United States Patent Application Publication US 2025/0041412 A1 - sequence listing, part 2

SEQ ID NO: 10464 - protein, 823 aa, Artificial Sequence
  Synthetic polypeptide
  misc_feature (1)..(1): Xaa can be any naturally occurring amino acid
XDKTRPLSTLANLAIIITDVQDMDPIFINLPYSTNIYEHSPPGTTVRIITAIDQDKGRPRGIGYTIVSGNTNSIFALDYISGVLTLNGLLDRENPLYSHGFILTVKGTELNDDRTPSDATVTTTFNILVIDINDNAPEFNSSEYSVAITELAQVGFALPLFIQVVDKDEENGGWLQGRPEGVGEGLHVQNLGLNSMFEVYLVGNNSHHFIISPTSVQGKADIRIRVAIPLDYETVDRYDFDLFANESVPDHVGYAKVKITLINENDNRPIFSQPLYNISLYENVTVGTSVLTVLATDNDAGTFGEVSYFFSDDPDRFSLDKDTGLIMLIARLDYELIQRFTLTIIARDGGGEETTGRVRINVLDVNDNVPTFQKDAYVGALRENEPSVTQLVRLRATDEDSPPNNQITYSIVSASAFGSYFDISLYEGYGVISVSRPLDYEQISNGLIYLTVMAMDAGNPPLNSTVPVTIEVFDENDNPPTFSKPAYFVSVVENIMAGATVLFLNATDLDRSREYGQESIIYSLEGSTQFRINARSGEITTTSLLDRETKSEYILIVRAVDGGVGHNQKTGIATVNITLLDINDNHPTWKDAPYYINLVEMTPPDSDVTTVVAVDPDLGENGTLVYSIQPPNKFYSLNSTTGKIRTTHAMLDRENPDPHEAELMRKIVVSVTDCGRPPLKATSSATVFVNLLDLNDNDPTFQNLPFVAEVLEGIPAGVSIYQVVAIDLDEGLNGLVSYRMPVGMPRMDFLINSSSGVVVTTTELDRERIAEYQLRVVASDAGTPTKSSTSTLTIHGCSEGCMWSCMGSTQHGLGTLDKLVNGH

SEQ ID NO: 10465 - protein, 259 aa, Artificial Sequence
  Synthetic polypeptide
MGLLDLCEEVFGTADLYRVLGVRREASDGEVRRGYHKVSLQVHPDRVGEGDKEDATRRFQILGKVYSVLSDREQRAVYDEQGTVDEDSPVLTQDRDWEAYWRLLFKKISLEDIQAFEKTYKGSEEELADIKQAYLDFKGDMDQIMESVLCVQYTEEPRIRNIIQQAIDAGEVPSYNAFVKESKQKMNARKRRAQEEAKEAEMSRKELGLDEGVDSLKAAIQFHRSTDGEKLCIEPVLNRLHLGTSSTPGPDLDDKILDL

SEQ ID NO: 10466 - protein, 108 aa, Artificial Sequence
  Synthetic polypeptide
MPVFHTRTIESILEPVAQQISHLVIMHEEGEVDGKAIPDLTAPVAAVQAAVSNLVRVGKETVQTTEDQILKRDMPPAFINRLLLEEILKNVLQTSPLIPDVSLKYKRE

SEQ ID NO: 10467 - protein, 107 aa, Artificial Sequence
  Synthetic polypeptide
MPVFHTRTIESILEPVAQQISHLVIMHEEGEVDGKAIPDLTAPVAAVQAAVSNLVRVGKETVQTTEDQILKRDMPPAFIKLLLEEILKNVLQTSPLIPDVSLKYKRE

SEQ ID NO: 10468 - protein, 777 aa, Artificial Sequence
  Synthetic polypeptide
GQMTDQVADLRARGQGSSPVAMQKAQQVSQGLDVLTAKVENAARKLEAMTNSKQSIAKKIDAAQNWLADPNGGPEGEEQIRGALAEARKIAELCDDPKERDDILRSLGEISALTSKLADLRRQGKGDSPEARALAKQVATALQNLQTKTNRAVANSRPAKAAVHLEGKIEQAQRWIDNPTVDDRGVGQAAIRGLVAEGHRLANVMMGPYRQDLLAKCDRVDQLTAQLADLAARGEGESPQARALASQLQDSLKDLKARMQEAMTQEVSDVFSDTTTPIKLLAVAATAPPDAPNREEVFDERAANFENHSGKLGATAEKAAAVGTANKSTVEGIQASVKTARELTPQVVSAARILLRNPGNQAAYEHFETMKNQWIDNVEKMTGLVDEAIDTKSLLDASEEAIKKDLDKCKVAMANIQPQMLVAGATSIARRANRILLVAKREVENSEDPKFREAVKAASDELSKTISPMVMDAKAVAGNISDPGLQKSFLDSGYRILGAVAKVREAFQPQEPDFPPPPPDLEQLRLTDELAPPKPPLPEGEVPPPRPPPPEEKDEEFPEQKAGEVINQPMMMAARQLHDEARKWSSKPGIPAAEVGIGVVAEADAADAAGFPVPPDMEDDYEPELLLMPSNQPVNQPILAAAQSLHREATKWSSKGNDIIAAAKRMALLMAEMSRLVRGGSGTKRALIQCAKDIAKASDEVTRLAKEVAKQCTDKRIRTNLLQVCERIPTISTQLKILSTVKATMLGRTNISDEESEQVCIFSGGEFTAFIKSSNDV

SEQ ID NO: 10469 - protein, 298 aa, Artificial Sequence
  Synthetic polypeptide
MPVFHTRTIESILEPVAQQISHLVIMHEEGEVDGKAIPDLTAPVAAVQAAVSNLVRVGKETVQTTEDQILKRDMPPAFIKVENACTKLVQAAQMLQSDPYSVPARDYLIDGSRGILSGTSDLLLTFDEAEVPPPRPPPPEEKDEEFPEQKAGEVINQPMMMAARQLHDEARKWSSKGNDIIAAAKRMALLMAEMSRLVRGGSGTKRALIQCAKDIAKASDEVTRLAKEVAKQCTDKRIRTNLLQVCERIPTISTQLKILSTVKATMLGRTNISDEESEQVCIFSGGEFTAFIKSSNDV

SEQ ID NO: 10470 - protein, 1037 aa, Artificial Sequence
  Synthetic polypeptide
MPVFHTRTIESILEPVAQQISHLVIMHEEGEVDGKAIPDLTAPVAAVQAAVSNLVRVGKETVQTTEDQILKRDMPPAFIKVENACTKLVQAAQMLQSDPYSVPARDYLIDGSRGILSGTSDLLLTFDEAEVRKIIRVCKGILEYLTVAEVVETMEDLVTYTKNLGPGMTKMAKMIDERQQELTHQEHRVMLVNSMNTVKELLPVLISAMKIFVTTKNSKNQGIEEALKNRNFTVEKMSAEINEIIRVLQLTSWDEDAWASKDTEAMKRALASIDSKLNQAKGWLRDPSASPGDAGEQAIRQILDEAGKVGELCAGKERREILGTCKMLGQMTDQVADLRARGQGSSPVAMQKAQQVSQGLDVLTAKVENAARKLEAMTNSKQSIAKKIDAAQNWLADPNGGPEGEEQIRGALAEARKIAELCDDPKERDDILRSLGEISALTSKLADLRRQGKGDSPEARALAKQVATALQNLQTKTNRAVANSRPAKAAVHLEGKIEQAQRWIDNPTVDDRGVGQAAIRGLVAEGHRLANVMMGPYRQDLLAKCDRVDQLTAQLADLAARGEGESPQARALASQLQDSLKDLKARMQEAMTQEVSDVFSDTTTPIKLLAVAATAPPDAPNREEVFDERAANFENHSGKLGATAEKAAAVGTANKSTVEGIQASVKTARELTPQVVSAARILLRNPGNQAAYEHFETMKNQWIDNVEKMTGLVDEAIDTKSLLDASEEAIKKDLDKCKVAMANIQPQMLVAGATSIARRANRILLVAKREVENSEDPKFREAVKAASDELSKTISPMVMDAKAVAGNISDPGLQKSFLDSGYRILGAVAKVREAFQPQEPDFPPPPPDLEQLRLTDELAPPKPPLPEGEVPPPRPPPPEEKDEEFPEQKAGEVINQPMMMAARQLHDEARKWSSKGNDIIAAAKRMALLMAEMSRLVRGGSGTKRALIQCAKDIAKASDEVTRLAKEVAKQCTDKRIRTNLLQVCERIPTISTQLKILSTVKATMLGRTNISDEESEQVCIFSGGEFTAFIKSSNDV

SEQ ID NO: 10471 - protein, 1105 aa, Artificial Sequence
  Synthetic polypeptide
MPVFHTRTIESILEPVAQQISHLVIMHEEGEVDGKAIPDLTAPVAAVQAAVSNLVRVGKETVQTTEDQILKRDMPPAFIKVENACTKLVQAAQMLQSDPYSVPARDYLIDGSRGILSGTSDLLLTFDEAEVRKIIRVCKGILEYLTVAEVVETMEDLVTYTKNLGPGMTKMAKMIDERQQELTHQEHRVMLVNSMNTVKELLPVLISAMKIFVTTKNSKNQGIEEALKNRNFTVEKMSAEINEIIRVLQLTSWDEDAWASKDTEAMKRALASIDSKLNQAKGWLRDPSASPGDAGEQAIRQILDEAGKVGELCAGKERREILGTCKMLGQMTDQVADLRARGQGSSPVAMQKAQQVSQGLDVLTAKVENAARKLEAMTNSKQSIAKKIDAAQNWLADPNGGPEGEEQIRGALAEARKIAELCDDPKERDDILRSLGEISALTSKLADLRRQGKGDSPEARALAKQVATALQNLQTKTNRAVANSRPAKAAVHLEGKIEQAQRWIDNPTVDDRGVGQAAIRGLVAEGHRLANVMMGPYRQDLLAKCDRVDQLTAQLADLAARGEGESPQARALASQLQDSLKDLKARMQEAMTQEVSDVFSDTTTPIKLLAVAATAPPDAPNREEVFDERAANFENHSGKLGATAEKAAAVGTANKSTVEGIQASVKTARELTPQVVSAARILLRNPGNQAAYEHFETMKNQWIDNVEKMTGLVDEAIDTKSLLDASEEAIKKDLDKCKVAMANIQPQMLVAGATSIARRANRILLVAKREVENSEDPKFREAVKAASDELSKTISPMVMDAKAVAGNISDPGLQKSFLDSGYRILGAVAKVREAFQPQEPDFPPPPPDLEQLRLTDELAPPKPPLPEGEVPPPRPPPPEEKDEEFPEQKAGEVINQPMMMAARQLHDEARKWSSKPGIPAAEVGIGVVAEADAADAAGFPVPPDMEDDYEPELLLMPSNQPVNQPILAAAQSLHREATKWSSKGNDIIAAAKRMALLMAEMSRLVRGGSGTKRALIQCAKDIAKASDEVTRLAKEVAKQCTDKRIRTNLLQVCERIPTISTQLKILSTVKATMLGRTNISDEESEQVCIFSGGEFTAFIKSSNDV

SEQ ID NO: 10472 - protein, 35 aa, Artificial Sequence; identical to SEQ ID NO: 1342
  Synthetic polypeptide

SEQ ID NO: 10473 - protein, 50 aa, Artificial Sequence
  Synthetic polypeptide
MAPVFVGTPYYGYVYEDTLPGSEVLKVVAMDGDRGKPNRILYSLVNDTDD

SEQ ID NO: 10474 - protein, 291 aa, Artificial Sequence
  Synthetic polypeptide
MRRCRWAALALGLLRLCLAQANFAPHFFDNGVGSTNGNMALFSLPEDTPVGSHVYTLNGTDPEGDPISYHISFDPSTRSVFSVDPTFGNITLVEELDREREDEIEAIISISDGLNLVAEKVVILVTDANDEAPRFIQEPYVALVPEDIPAGSIIFKVHAVDRDTGSGGSVTYFLQNLHSPFAVDRHSGVLRLQAGATLDYERSRTHYITVVAKDGGGRLHGADVVFSATTTVTVNVEDVQDMAPVFVGTPYYGYVYEDTLPGSEVLKVVAMDGDRGKPNRILYSLVNDTDD

SEQ ID NO: 10475 - protein, 201 aa, Artificial Sequence
  Synthetic polypeptide
MKQIGVKNVKLSEYEMSIAAHLVDPLNMHVTWSDIAGLDDVITDLKDTVILPIKKKHLFENSRLLQPPKGVLLYGPPGCGKTLIAKATAKEAGCRFINLQPSTLTDKWYGESQKLAAAVFSLAIKLQPSIIFIDEIDSFLRNRSSSDHEATAMMKAQFMSLWDGLDTDHSCQALKQREAILKLILKNENVCGKIVFHKIGP

SEQ ID NO: 10476 - protein, 289 aa, Artificial Sequence
  Synthetic polypeptide
MVHAEAFSRPLSRNEVVGLIFRLTIFGAVTYFTIKWMVDAIDPTRKQKVEAQKQAEKLMKQIGVKNVKLSEYEMSIAAHLVDPLNMHVTWSDIAGLDDVITDLKDTVILPIKKKHLFENSRLLQPPKGVLLYGPPGCGKTLIAKATAKEAGCRFINLQPSTLTDKWYGESQKLAAAVFSLAIKLQPSIIFIDEIDSFLRNRSSSDHEATAMMKAQFMSLWDGLDTDHSCQVIVMGATNRPQDLDSAIMRRMPTRFHINQPALKQREAILKLILKNENVCGKIVFHKIGP

SEQ ID NO: 10477 - protein, 246 aa, Artificial Sequence
  Synthetic polypeptide
MLRVIVESASNIPKTKFGKPDPIVSVIFKDEKKKTKKVDNELNPVWNEILEFDLRGIPLDFSSSLGIIVKDFETIGQNKLIGTATVALKDLTGDQSRSLPYKLISLLNEKGQDTGATIDLVIGYDPPSAPHPNDLSGPSVPGMGGDGEEDEGDEDRLDNAVRGPGPKGPVGTVSEAQLARRLTKVKNSRRMLSNKPQDFQIRVRVIEGRQLSGNNIRPVVKVHVCGQTHRTRIKRGNNPFFDEEQK

SEQ ID NO: 10478 - protein, 154 aa, Artificial Sequence; identical to SEQ ID NO: 1016
  Synthetic polypeptide

SEQ ID NO: 10479 - protein, 155 aa, Artificial Sequence; identical to SEQ ID NO: 1015
  Synthetic polypeptide

SEQ ID NO: 10480 - protein, 29 aa, Artificial Sequence
  Synthetic polypeptide
MDKLNKITVPASQKLSCSLDPKHLRQFHL

SEQ ID NO: 10481 - protein, 22 aa, Artificial Sequence
  Synthetic polypeptide
MDKLNKITVPASQKLSGLILVL

SEQ ID NO: 10482 - protein, 58 aa, Artificial Sequence
  Synthetic polypeptide
MDKLNKITVPASQKLRSLDYLSLLPAVSSLSCKHPLNTYFPDTLSCSLDPKHLRQFHL

SEQ ID NO: 10483 - protein, 798 aa, Artificial Sequence
  Synthetic polypeptide
MAASGVPRGCDILIVYSPDAEEWCQYLQTLFLSSRQVRSQKILTHRLGPEASFSAEDLSLFLSTRCVVVLLSAELVQHFHKPALLPLLQRAFHPPHRVVRLLCGVRDSEEFLDFFPDWAHWQELTCDDEPETYVAAVKKAISEDSGCDSVTDTEPEDEKVVSYSKQQNLPTVTSPGNLMVVQPDRIRCGAETTVYVIVRCKLDDRVATEAEFSPEDSPSVRMEAKVENEYTISVKAPNLSSGNVSLKIYSGDLVVCETVISYYTDMEEIGNLLSNAANPVEFMCQAFKIVPYNTETLDKLLTESLKNNIPASGLHLFGINQLEEEDMMTNQRDEELPTLLHFAAKYGLKNLTALLLTCPGALQAYSVANKHGHYPNTIAEKHGFRDLRQFIDEYVETVDMLKSHIKEELMHGEEADAVYESMAHLSTDLLMKCSLNPGCDEDLYESMAAFVPAATEDLYVEMLQASTSNPIPGDGFSRATKDSMIRKFLEGNSMGMTNLERDQCHLGQEEDVYHTVDDDEAFSVDLASRPPVPVPRPETTAPGAHQLPDNEPYIFKVFAEKSQERPGNFYVSSESIRKGPPVRPWRDRPQSSIYDPFAGMKTPGQRQLITLQEQVKLGIVNVDEAVLHFKEWQLNQKKRSESFRFQQENLKRLRDSITRRQREKQKSGKQTDLEITVPIRHSQHLPAKVEFGVYESGPRKSVIPPRTELRRGDWKTDSTSSTASSTSNRSSTRSLLSVSSGMEGDNEDNEVPEVTRSRSPGPPQVDGTPTMSLERPPRVPPRAASQSAWQSKWHILGT

SEQ ID NO: 10484 - protein, 397 aa, Artificial Sequence
  Synthetic polypeptide
MRFFTSVACYGSCLFASELLIRCKDWLKGRPALFTALLACVLYLCEWTGAKHVPGSSYVEMLQASTSNPIPGDGFSRATKDSMIRKFLEGNSMGMTNLERDQCHLGQEEDVYHTVDDDEAFSVDLASRPPVPVPRPETTAPGAHQLPDNEPYIFKVFAEKSQERPGNFYVSSESIRKGPPVRPWRDRPQSSIYDPFAGMKTPGQRQLITLQEQVKLGIVNVDEAVLHFKEWQLNQKKRSESFRFQQENLKRLRDSITRRQREKQKSGKQTDLEITVPIRHSQHLPAKVEFGVYESGPRKSVIPPRTELRRGDWKTDSTSSTASSTSNRSSTRSLLSVSSGMEGDNEDNEVPEVTRSRSPGPPQVDGTPTMSLERPPRVPPRAASQSAWQSKWHILGT

SEQ ID NO: 10485 - protein, 620 aa, Artificial Sequence
  Synthetic polypeptide
MVVQPDRIRCGAETTVYVIVRCKLDDRVATEAEFSPEDSPSVRMEAKVENEYTISVKAPNLSSGNVSLKIYSGDLVVCETVISYYTDMEEIGNLLSNAANPVEFMCQAFKIVPYNTETLDKLLTESLKNNIPASGLHLFGINQLEEEDMMTNQRDEELPTLLHFAAKYGLKNLTALLLTCPGALQAYSVANKHGHYPNTIAEKHGFRDLRQFIDEYVETVDMLKSHIKEELMHGEEADAVYESMAHLSTDLLMKCSLNPGCDEDLYESMAAFVPAATEDLYVEMLQASTSNPIPGDGFSRATKDSMIRKFLEGNSMGMTNLERDQCHLGQEEDVYHTVDDDEAFSVDLASRPPVPVPRPETTAPGAHQLPDNEPYIFKVFAEKSQERPGNFYVSSESIRKGPPVRPWRDRPQSSIYDPFAGMKTPGQRQLITLQEQVKLGIVNVDEAVLHFKEWQLNQKKRSESFRFQQENLKRLRDSITRRQREKQKSGKQTDLEITVPIRHSQHLPAKVEFGVYESGPRKSVIPPRTELRRGDWKTDSTSSTASSTSNRSSTRSLLSVSSGMEGDNEDNEVPEVTRSRSPGPPQVDGTPTMSLERPPRVPPRAASQSAWQSKWHILGT

SEQ ID NO: 10486 - protein, 177 aa, Artificial Sequence
  Synthetic polypeptide
MDETSPLVSPERAQPPDYTFPSGSGAHFPQVPGGAVRVAAAAGSGPSPPGSPGHDRERQPLLDRARGAAAQGQTQTVAAQAQALAAQAAAAAHAAQAHRERNEFPEDPEFEAVVRQAELAIERCIFPERIYQGSSGSYFVKDPQGVRWLTPVLSALWEAEAGASLEVRSSRPAWSTW

SEQ ID NO: 10487 - protein, 745 aa, Artificial Sequence
  Synthetic polypeptide
MPAVSKGDGMRGLAVFISDIRNCKSKEAEIKRINKELANIRSKFKGDKALDGYSKKKYVCKLLFIFLLGHDIDFGHMEAVNLLSSNRYTEKQIGYLFISVLVNSNSELIRLINNAIKNDLASRNPTFMGLALHCIASVGSREMAEAFAGEIPKVLVAGDTMDSVKQSAALCLLRLYRTSPDLVPMGDWTSRVVHLLNDQHLGVVTAATSLITTLAQKNPEEFKTSVSLAVSRLSRIVTSASTDLQDYTYYFVPAPWLSVKLLRLLQCYPPPDPAVRGRLTECLETILNKAQEPPKSKKVQHSNAKNAVLFEAISLIIHHDSEPNLLVRACNQLGQFLQHRETNLRYLALESMCTLASSEFSHEAVKTHIETVINALKTERDVSVRQRAVDLLYAMCDRSNAPQIVAEMLSYLETADYSIREEIVLKVAILAEKYAVDYTWYVDTILNLIRIAGDYVSEEVWYRVIQIVINRDDVQGYAAKTVFEALQAPACHENLVKVGGYILGEFGNLIAGDPRSSPLIQFHLLHSKFHLCSVPTRALLLSTYIKFVNLFPEVKPTIQDVLRSDSQLRNADVELQQRAVEYLRLSTVASTDILATVLEEMPPFPERESSILAKLKKKKGPSTVTDLEDTKRDRSVDVNGGPEPAPASTSAVSTPSPSADLLGLGAAPPAPAGPPPSSGGSGLLVDVFSDSASVVAPLAPGSEDNFARFVCKNNGVLFENQLLQIGLKSEFRQNLGKIQECSIST

SEQ ID NO: 10488 - protein, 746 aa, Artificial Sequence
  Synthetic polypeptide
MPAVSKGDGMRGLAVFISDIRNCKSKEAEIKRINKELANIRSKFKGDKALDGYSKKKYVCKLLFIFLLGHDIDFGHMEAVNLLSSNRYTEKQIGYLFISVLVNSNSELIRLINNAIKNDLASRNPTFMGLALHCIASVGSREMAEAFAGEIPKVLVAGDTMDSVKQSAALCLLRLYRTSPDLVPMGDWTSRVVHLLNDQHLGVVTAATSLITTLAQKNPEEFKTSVSLAVSRLSRIVTSASTDLQDYTYYFVPAPWLSVKLLRLLQCYPPPEDPAVRGRLTECLETILNKAQEPPKSKKVQHSNAKNAVLFEAISLIIHHDSEPNLLVRACNQLGQFLQHRETNLRYLALESMCTLASSEFSHEAVKTHIETVINALKTERDVSVRQRAVDLLYAMCDRSNAPQIVAEMLSYLETADYSIREEIVLKVAILAEKYAVDYTWYVDTILNLIRIAGDYVSEEVWYRVIQIVINRDDVQGYAAKTVFEALQAPACHENLVKVGGYILGEFGNLIAGDPRSSPLIQFHLLHSKFHLCSVPTRALLLSTYIKFVNLFPEVKPTIQDVLRSDSQLRNADVELQQRAVEYLRLSTVASTDILATVLEEMPPFPERESSILAKLKKKKGPSTVTDLEDTKRDRSVDVNGGPEPAPASTSAVSTPSPSADLLGLGAAPPAPAGPPPSSGGSGLLVDVFSDSASVVAPLAPGSEDNFARFVCKNNGVLFENQLLQIGLKSEFRQNLGKIQECSIST

SEQ ID NO: 10489 - protein, 1545 aa, Artificial Sequence
  Synthetic polypeptide
MANGTADVRKLFIFTTTQNYFGLMSELWDQPLLCNCLEINNFLDDGNQMLLRVQRSDAGISFSNTIEFGDTKDKVLVFFKLRPEVITDENLHDNILVSSMLESPISSLYQAVRQVFAPMLLKDQEWSRNFDPKLQNLLSELEAGLGIVLRRSDTNLTKLKFKEDDTRGILTPSDEFQFWIEQAHRGNKQISKERANYFKELFETIAREFYNLDSLSLLEVVDLVETTQDVVDDVWRQTEHDHYPESRMLHLLDIIGGSFGRFVQKKLGTLNLWEDPYYLVKESLKAGISICEQWVIVCNHLTGQVWQRYVPHPWKNEKYFPETLDKLGKRLEEVLAIRTIHEKFLYFLPASEEKIICLTRVFEPFTGLNPVQYNPYTEPLWKAAVSQYEKIIAPAEQKIAGKLKNYISEIQDSPQQLLQAFLKYKELVKRPTISKELMLERETLLARLVDSIKDFRLDFENRCRGIPGDASGPLSGKNLSEVVNSIVWVRQLELKVDDTIKIAEALLSDLPGFRCFHQSAKDLLDQLKLYEQEQFDDWSRDIQSGLSDSRSGLCIEASSRIMELDSNDGLLKVHYSDRLVILLREVRQLSALGFVIPAKIQQVANIAQKFCKQAIILKQVAHFYNSIDQQMIQSQRPMMLQSALAFEQIIKNSKAGSGGKSQITWDNPKELEGYIQKLQNAAERLATENRKLRKWHTTFCEKVVVLMNIDLLRQQQRWKDGLQELRTGLATVEAQGFQASDMHAWKQHWNHQLYKALEHQYQMGLEALNENLPEINIDLTYKQGRLQFRPPFEEIRAKYYREMKRFIGIPNQFKGVGEAGDESIFSIMIDRNASGFLTIFSKAEDLFRRLSAVLHQHKEWIVIGQVDMEALVEKHLFTVHDWEKNFKALKIKGKEVERLPSAVKVDCLNINCNPVKTVIDDLIQKLFDLLVLSLKKSIQAHLHEIDTFVTEAMEVLTIMPQSVEEIGDANLQYSKLQERKPEILPLFQEAEDKNRLLRTVAGGGLETISNLKAKWDKFELMMESHQLMIKDQIEVMKGNVKSRLQIYYQELEKFKARWDQLKPGDDVIETGQHNTLDKSAKLIKEKKIEFDDLEVTRKKLVDDCHHFRLEEPNFSLASSISKDIESCAQIWAFYEEFQQGFQEMANEDWITFRTKTYLFEEFLMNWHDRLRKVEEHSVMTVKLQSEVDKYKIVIPILKYVRGEHLSPDHWLDLFRLLGLPRGTSLEKLLFGDLLRVADTIVAKAADLKDLNSRAQGEVTIREALRELDLWGVGAVFTLIDYEDSQSRTMKLIKDWKDIVNQVGDNRCLLQSLKDSPYYKGFEDKVSIWERKLAELDEYLQNLNHIQRKWVYLEPIFGRGALPKEQTRFNRVDEDFRSIMTDIKKDNRVTTLTTHAGIRNSLLTILDQLQRCQKSLNEFLEEKRSAFPRFYFIGDDDLLEILGQSTNPSVIQSHLKKLFAGINSVCFDEKSKHITAMKSLEGEVVPFKNKVPLSNNVETWLNDLALEMKKTLEQLLKECVTTGRSSQGAVDPSLFPSQLTDKLLNF

SEQ ID NO: 10490 - protein, 3651 aa, Artificial Sequence
  Synthetic polypeptide
MANGTADVRKLFIFTTTQNYFGLMSELWDQPLLCNCLEINNFLDDGNQMLLRVQRSDAGISFSNTIEFGDTKDKVLVFFKLRPEVITDENLHDNILVSSMLESPISSLYQAVRQVFAPMLLKDQEWSRNFDPKLQNLLSELEAGLGIVLRRSDTNLTKLKFKEDDTRGILTPSDEFQFWIEQAHRGNKQISKERANYFKELFETIAREFYNLDSLSLLEVVDLVETTQDVVDDVWRQTEHDHYPESRMLHLLDIIGGSFGRFVQKKLGTLNLWEDPYYLVKESLKAGISICEQWVIVCNHLTGQVWQRYVPHPWKNEKYFPETLDKLGKRLEEVLAIRTIHEKFLYFLPASEEKIICLTRVFEPFTGLNPVQYNPYTEPLWKAAVSQYEKIIAPAEQKIAGKLKNYISEIQDSPQQLLQAFLKYKELVKRPTISKELMLERETLLARLVDSIKDFRLDFENRCRGIPGDASGPLSGKNLSEVVNSIVWVRQLELKVDDTIKIAEALLSDLPGFRCFHQSAKDLLDQLKLYEQEQFDDWSRDIQSGLSDSRSGLCIEASSRIMELDSNDGLLKVHYSDRLVILLREVRQLSALGFVIPAKIQQVANIAQKFCKQAIILKQVAHFYNSIDQQMIQSQRPMMLQSALAFEQIIKNSKAGSGGKSQITWDNPKELEGYIQKLQNAAERLATENRKLRKWHTTFCEKVVVLMNIDLLRQQQRWKDGLQELRTGLATVEAQGFQASDMHAWKQHWNHQLYKALEHQYQMGLEALNENLPEINIDLTYKQGRLQFRPPFEEIRAKYYREMKRFIGIPNQFKGVGEAGDESIFSIMIDRNASGFLTIFSKAEDLFRRLSAVLHQHKEWIVIGQVDMEALVEKHLFTVHDWEKNFKALKIKGKEVERLPSAVKVDCLNINCNPVKTVIDDLIQKLFDLLVLSLKKSIQAHLHEIDTFVTEAMEVLTIMPQSVEEIGDANLQYSKLQERKPEILPLFQEAEDKNRLLRTVAGGGLETISNLKAKWDKFELMMESHQLMIKDQIEVMKGNVKSRLQIYYQELEKFKARWDQLKPGDDVIETGQHNTLDKSAKLIKEKKIEFDDLEVTRKKLVDDCHHFRLEEPNFSLASSISKDIESCAQIWAFYEEFQQGFQEMANEDWITFRTKTYLFEEFLMNWHDRLRKVEEHSVMTVKLQSEVDKYKIVIPILKYVRGEHLSPDHWLDLFRLLGLPRGTSLEKLLFGDLLRVADTIVAKAADLKDLNSRAQGEVTIREALRELDLWGVGAVFTLIDYEDSQSRTMKLIKDWKDIVNQVGDNRCLLQSLKDSPYYKGFEDKVSIWERKLAELDEYLQNLNHIQRKWVYLEPIFGRGALPKEQTRFNRVDEDFRSIMTDIKKDNRVTTLTTHAGIRNSLLTILDQLQRCQKSLNEFLEEKRSAFPRFYFIGDDDLLEILGQSTNPSVIQSHLKKLFAGINSVCFDEKSKHITAMKSLEGEVVPFKNKVPLSNNVETWLNDLALEMKKTLEQLLKECVTTGRSSQGAVDPSLFPSQILCLAEQIKFTEDVENAIKDHSLHQIETQLVNKLEQYTNIDTSSEDPGNTESGILELKLKALILDIIHNIDVVKQLNQIQVHTTEDWAWKKQLRFYMKSDHTCCVQMVDSEFQYTYEYQGNASKLVYTPLTDKCYLTLTQAMKMGLGGNPYGPAGTGKTESVKALGGLLGRQVLVFNCDEGIDVKSMGRIFVGLVKCGAWGCFDEFNRLEESVLSAVSMQIQTIQDALKNHRTVCELLGKEVEVNSNSGIFITMNPAGKGYGGRQKLPDNLKQLFRPVAMSHPDNELIAEVILYSEGFKDAKVLSRKLVAIFNLSRELLTPQQHYDWGLRALKTVLRGSGNLLRQLNKSGTTQNANESHIVVQALRLNTMSKFTFTDCTRFDALIKDVFPGIELKEVEYDELSAALKQVFEEANYEIIPNQIKKALELYEQLCQRMGVVIVGPSGAGKSTLWRMLRAALCKTGKVVKQYTMNPKAMPRYQLLGHIDMDTREWSDGVLTNSARQVVREPQDVSSWIICDGDIDPEWIESLNSVLDDNRLLTMPSGERIQFGPNVNFVFETHDLSCASPATISRMGMIFLSDEETDLNSLIKSWLRNQPAEYRNNLENWIGDYFEKALQWVLKQNDYVVETSLVGTVMNGLSHLHGCRDHDEFIINLIRGLGGNLNMKSRLEFTKEVFHWARESPPDFHKPMDTYYDSTRGRLATYVLKKPEDLTADDFSNGLTLPVIQTPDMQRGLDYFKPWLSSDTKQPFILVGPEGCGKGMLLRYAFSQLRSTQIATVHCSAQTTSRHLLQKLSQTCMVISTNTGRVYRPKDCERLVLYLKDINLPKLDKWGTSTLVAFLQQVLTYQGFYDENLEWVGLENIQIVASMSAGGRLGRHKLTTRFTSIVRLCSIDYPEREQLQTIYGAYLEPVLHKNLKNHSIWGSSSKIYLLAGSMVQVYEQVRAKFTVDDYSHYFFTPCILTQWVLGLFRYDLEGGSSNHPLDYVLEIVAYEARRLFRDKIVGAKELHLFDIILTSVFQGDWGSDILDNMSDSFYVTWGARHNSGARAAPGQPLPPHGKPLGKLNSTDLKDVIKKGLIHYGRDNQNLDILLFHEVLEYMSRIDRVLSFPGGSLLLAGRSGVGRRTITSLVSHMHGAVLFSPKISRGYELKQFKNDLKHVLQLAGIEAQQVVLLLEDYQFVHPTFLEMINSLLSSGEVPGLYTLEELEPLLLPLKDQASQDGFFGPVFNYFTYRIQQNLHIVLIMDSANSNFMINCESNPALHKKCQVLWMEGWSNSSMKKIPEMLFSETGGGEKYNDKKRKEEKKKNSVDPDFLKSFLLIHESCKAYGATPSRYMTFLHVYSAISSSKKKELLKRQSHLQAGVSKLNEAKALVDELNRKAGEQSVLLKTKQDEADAALQMITVSMQDASEQKTELERLKHRIAEEVVKIEERKNKIDDELKEVQPLVNEAKLAVGNIKPESLSEIRSLRMPPDVIRDILEGVLRLMGIFDTSWVSMKSFLAKRGVREDIATFDARNISKEIRESVEELLFKNKGSFDPKNAKRASTAAAPLAAWVKANIQYSHVLERIHPLETEQAGLESNLKKTEDRKRKLEELLNSVGQKVSELKEKFQSRTSEAAKLEAEVSKAQETIKAAEVLINQLDREHKRWNAQVVEITEELATLPKRAQLAAAFITYLSAAPESLRKTCLEEWTKSAGLEKFDLRRFLCTESEQLIWKSEGLPSDDLSIENALVILQIIGLKSWSRVCPFLIDPSSQATEWLKTHLKDSRLEVINQQDSNFITALELAVRFGKTLIIQEMDGVEPVLYPLLRRDLVAQGPRYVVQIGDKIIDYNEEFRLFLSTRNPNPFIPPDAASIVTEVNFTTTRSGLRGQLLALTIQHEKPDLEEQKTKLLQQEEDKKIQLAKLEESLLETLATSQGNILENKDLIESLNQTKASSALIQESLKESYKLQISLDQERDAYLPLAESASKMYFIISDLSKINNMYRFSLAAFLRLFQRALQNKQDSENTEQRIQSLISSLQHMVYEYICRCLFKADQLMFALHFVRGMHPELFQENEWDTFTGVVVGDMLRKADSQQKIRDQLPSWIDQERSWAVATLKVILMTSACLQQESH

SEQ ID NO: 10491 - protein, 3644 aa, Artificial Sequence
  Synthetic polypeptide
MANGTADVRKLFIFTTTQNYFGLMSELWDQPLLCNCLEINNFLDDGNQMLLRVQRSDAGISFSNTIEFGDTKDKVLVFFKLRPEVITDENLHDNILVSSMLESPISSLYQAVRQVFAPMLLKDQEWSRNFDPKLQNLLSELEAGLGIVLRRSDTNLTKLKFKEDDTRGILTPSDEFQFWIEQAHRGNKQISKERANYFKELFETIAREFYNLDSLSLLEVVDLVETTQDVVDDVWRQTEHDHYPESRMLHLLDIIGGSFGRFVQKKLGTLNLWEDPYYLVKESLKAGISICEQWVIVCNHLTGQVWQRYVPHPWKNEKYFPETLDKLGKRLEEVLAIRTIHEKFLYFLPASEEKIICLTRVFEPFTGLNPVQYNPYTEPLWKAAVSQYEKIIAPAEQKIAGKLKNYISEIQDSPQQLLQAFLKYKELVKRPTISKELMLERETLLARLVDSIKDFRLDFENRCRGIPGDASGPLSGKNLSEVVNSIVWVRQLELKVDDTIKIAEALLSDLPGFRCFHQSAKDLLDQLKLYEQEQFDDWSRDIQSGLSDSRSGLCIEASSRIMELDSNDGLLKVHYSDRLVILLREVRQLSALGFVIPAKIQQVANIAQKFCKQAIILKQVAHFYNSIDQQMIQSQRPMMLQSALAFEQIIKNSKAGSGGKSQITWDNPKELEGYIQKLQNAAERLATENRKLRKWHTTFCEKVVVLMNIDLLRQQQRWKDGLQELRTGLATVEAQGFQASDMHAWKQHWNHQLYKALEHQYQMGLEALNENLPEINIDLTYKQGRLQFRPPFEEIRAKYYREMKRFIGIPNQFKGVGEAGDESIFSIMIDRNASGFLTIFSKAEDLFRRLSAVLHQHKEWIVIGQVDMEALVEKHLFTVHDWEKNFKALKIKGKEVERLPSAVKVDCLNINCNPVKTVIDDLIQKLFDLLVLSLKKSIQAHLHEIDTFVTEAMEVLTIMPQSVEEIGDANLQYSKLQERKPEILPLFQEAEDKNRLLRTVAGGGLETISNLKAKWDKFELMMESHQLMIKDQIEVMKGNVKSRLQIYYQELEKFKARWDQLKPGDDVIETGQHNTLDKSAKLIKEKKIEFDDLEVTRKKLVDDCHHFRLEEPNFSLASSISKDIESCAQIWAFYEEFQQGFQEMANEDWITFRTKTYLFEEFLMNWHDRLRKVEEHSVMTVKLQSEVDKYKIVIPILKYVRGEHLSPDHWLDLFRLLGLPRGTSLEKLLFGDLLRVADTIVAKAADLKDLNSRAQGEVTIREALRELDLWGVGAVFTLIDYEDSQSRTMKLIKDWKDIVNQVGDNRCLLQSLKDSPYYKGFEDKVSIWERKLAELDEYLQNLNHIQRKWVYLEPIFGRGALPKEQTRFNRVDEDFRSIMTDIKKDNRVTTLTTHAGIRNSLLTILDQLQRCQKSLNEFLEEKRSAFPRFYFIGDDDLLEILGQSTNPSVIQSHLKKLFAGINSVCFDEKSKHITAMKSLEGEVVPFKNKVPLSNNVETWLNDLALEMKKTLEQLLKECVTTGRSSQGAVDPSLFPSQILCLAEQIKFTEDVENAIKDHSLHQIETQLVNKLEQYTNIDTSSEDPGNTESGILELKLKALILDIIHNIDVVKQLNQIQVHTTEDWAWKKQLRFYMKSDHTCCVQMVDSEFQYTYEYQGNASKLVYTPLTDKCYLTLTQAMKMGLGGNPYGPAGTGKTESVKALGGLLGRQVLVFNCDEGIDVKSMGRIFVGLVKCGAWGCFDEFNRLEESVLSAVSMQIQTIQDALKNHRTVCELLGKEVEVNSNSGIFITMNPAGKGYGGRQKLPDNLKQLFRPVAMSHPDNELIAEVILYSEGFKDAKVLSRKLVAIFNLSRELLTPQQHYDWGLRALKTVLRGSGNLLRQLNKSGTTQNANESHIVVQALRLNTMSKFTFTDCTRFDALIKDVFPGIELKEVEYDELSAALKQVFEEANYEIIPNQIKKALELYEQLCQRMGVVIVGPSGAGKSTLWRMLRAALCKTGKVVKQYTMNPKAMPRYQLLGHIDMDTREWSDGVLTNSARQVVREPQDVSSWIICDGDIDPEWIESLNSVLDDNRLLTMPSGERIQFGPNVNFVFETHDLSCASPATISRMGMIFLSDEETDLNSLIKSWLRNQPAEYRNNLENWIGDYFEKALQWVLKQNDYVVETSLVGTVMNGLSHLHGCRDHDEFIINLIRGLGGNLNMKSRLEFTKEVFHWARESPPDFHKPMDTYYDSTRGRLATYVLKKPEDLTADDFSNGLTLPVIQTPDMQRGLDYFKPWLSSDTKQPFILVGPEGCGKGMLLRYAFSQLRSTQIATVHCSAQTTSRHLLQKLSQTCMVISTNTGRVYRPKDCERLVLYLKDINLPKLDKWGTSTLVAFLQQVLTYQGFYDENLEWVGLENIQIVASMSAGGRLGRHKLTTRFTSIVRLCSIDYPEREQLQTIYGAYLEPVLHKNLKNHSIWGSSSKIYLLAGSMVQVYEQVRAKFTVDDYSHYFFTPCILTQWVLGLFRYDLEGGSSNHPLDYVLEIVAYEARRLFRDKIVGAKELHLFDIILTSVFQGDWGSDILDNMSDSFYVTWGARHNSGARAAPGQPLPPHGKPLGKLNSTDLKDVIKKGLIHYGRDNQNLDILLFHEVLEYMSRIDRVLSFPGGSLLLAGRSGVGRRTITSLVSHMHGAVLFSPKISRGYELKQFKNDLKHVLQLAGIEAQQVVLLLEDYQFVHPTFLEMINSLLSSGEVPGLYTLEELEPLLLPLKDQASQDGFFGPVFNYFTYRIQQNLHIVLIMDSANSNFMINCESNPALHKKCQVLWMEGWSNSSMKKIPEMLFSETGGGEKYNDKKRKEEKKKNSVDPDFLKSFLLIHESCKAYGATPSRYMTFLHVYSAISSSKKKELLKRQSHLQAGVSKLNEAKALVDELNRKAGEQSVLLKTKQDEADAALQMITVSMQDASEQKTELERLKHRIAEEVVKIEERKNKIDDELKEVQPLVNEAKLAVGNIKPESLSEIRSLRMPPDVIRDILEGVLRLMGIFDTSWVSMKSFLAKRGVREDIATFDARNISKEIRESVEELLFKNKGSFDPKNAKRASTAAAPLAAWVKANIQYSHVLERIHPLETEQAGLESNLKKTEDRKRKLEELLNSVGQKVSELKEKFQSRTSEAAKLEAEVSKAQETIKAAEVLINQLDREHKRWNAQVVEITEELATLPKRAQLAAAFITYLSAAPESLRKTCLEEWTKSAGLEKFDLRRFLCTESEQLIWKSEGLPSDDLSIENALVILQSRVCPFLIDPSSQATEWLKTHLKDSRLEVINQQDSNFITALELAVRFGKTLIIQEMDGVEPVLYPLLRRDLVAQGPRYVVQIGDKIIDYNEEFRLFLSTRNPNPFIPPDAASIVTEVNFTTTRSGLRGQLLALTIQHEKPDLEEQKTKLLQQEEDKKIQLAKLEESLLETLATSQGNILENKDLIESLNQTKASSALIQESLKESYKLQISLDQERDAYLPLAESASKMYFIISDLSKINNMYRFSLAAFLRLFQRALQNKQDSENTEQRIQSLISSLQHMVYEYICRCLFKADQLMFALHFVRGMHPELFQENEWDTFTGVVVGDMLRKADSQQKIRDQLPSWIDQERSWAVATLKVILMTSACLQQESH

SEQ ID NO: 10492 - protein, 37 aa, Artificial Sequence
  Synthetic polypeptide
QKIRDQLPSWIDQERSWAVATLKVILMTSACLQQESH

SEQ ID NO: 10493 - protein, 82 aa, Artificial Sequence
  Synthetic polypeptide
MRIISRQIVLLFSGFWGLAMGAFPSSVQIGGLFIRNTDQEYTAFRLAIFLHNTSPNASEAPFNLVPHVDNIETANSFAVTNA

SEQ ID NO: 10494 - protein, 154 aa, Artificial Sequence
  Synthetic polypeptide
MDAELEFAIQPNTTGKQLFDQVVKTVGLREVWFFGLQYVDSKGYSTWLKLNKKVTQQDVKKENPLQFKFRAKFFPEDVSEELIQEITQRLFFLQVKEAILNDEIYCPPETAVLLASYAVQAKYGDYNKEIHKPGYLANDRLLPQRVNQPQIENM

SEQ ID NO: 10495 - protein, 133 aa, Artificial Sequence
  Synthetic polypeptide
MPKPINVRVTTMDAELEFAIQPNTTGKQLFDQVTQQDVKKENPLQFKFRAKFFPEDVSEELIQEITQRLFFLQVKEAILNDEIYCPPETAVLLASYAVQAKYGDYNKEIHKPGYLANDRLLPQRVNQPQIENM

SEQ ID NO: 10496 - protein, 165 aa, Artificial Sequence
  Synthetic polypeptide
MPKPINVRVTTMDAELEFAIQPNTTGKQLFDQVVKTVGLREVWFFGLQYVDSKGYSTWLKLNKKVTQQDVKKENPLQFKFRAKFFPEDVSEELIQEITQRLFFLQVKEAILNDEIYCPPETAVLLASYAVQAKYGDYNKEIHKPGYLANDRLLPQRVNQPQIENM

SEQ ID NO: 10497 - protein, 194 aa, Artificial Sequence
  Synthetic polypeptide
MHSFRLARLSSWRVHAGLVSHSAVRPHQGALVERIIPHPLYSAQNHDYDVALLRLQTALNFSDTVGAVCLPAKEQHFPKGSRCWVSGWGHTHPSHTYSSDMLQDTVVPLFSTQLCNSSCVYSGALTPRMLCAGYLDGRADACQGDSGGPLVCPDGDTWRLVGVVSWGRGCAEPNHPGVYAKVAEFLDWIHDTAQ

SEQ ID NO: 10498 - protein, 409 aa, Artificial Sequence
  Synthetic polypeptide
MRRGCAVLGALGLLAGAGVGSWLLVLYLCPAASQPISGTLQDEEITLSCSEASAEEALLPALPKTVSFRINSEDFLLEAQVRDQPRWLLVCHEGWSPALGLQICWSLGHLRLTHHKGVNLTDIKLNSSQEFAQLSPRLGGFLEEAWQPRNNCTSGQVVSLRCSECGARPLASRIVGGQSVAPGRWPWQASVALGFRHTCGGSVLAPRWVVTAAHCMHSFRLARLSSWRVHAGLVSHSAVRPHQGALVERIIPHPLYSAQNHDYDVALLRLQTALNFSDTVGAVCLPAKEQHFPKGSRCWVSGWGHTHPSHTYSSDMLQDTVVPLFSTQLCNSSCVYSGALTPRMLCAGYLDGRADACQGDSGGPLVCPDGDTWRLVGVVSWGRGCAEPNHPGVYAKVAEFLDWIHDTAQ

SEQ ID NO: 10499 - protein, 340 aa, Artificial Sequence
  Synthetic polypeptide
MRRGCAVLGALGLLAGAGVGSWLLVLYLCPAASQPISGTLQDEEITLSCSEASAEEALLPALPKTVSFRINSEDFLLEAQVRDQPRWLLVCHEGWSPALGLQICWSLGHLRLTHHKGVNLTDIKLNSSQEFAQLSPRLGGFLEEAWQPSFRLARLSSWRVHAGLVSHSAVRPHQGALVERIIPHPLYSAQNHDYDVALLRLQTALNFSDTVGAVCLPAKEQHFPKGSRCWVSGWGHTHPSHTYSSDMLQDTVVPLFSTQLCNSSCVYSGALTPRMLCAGYLDGRADACQGDSGGPLVCPDGDTWRLVGVVSWGRGCAEPNHPGVYAKVAEFLDWIHDTAQ

SEQ ID NO: 10500 - protein, 453 aa, Artificial Sequence
  Synthetic polypeptide
MSLMLDDQPPMEAQYAEEGPGPGIFRAEPGDQQHPISQAVCWRSMRRGCAVLGALGLLAGAGVGSWLLVLYLCPAASQPISGTLQDEEITLSCSEASAEEALLPALPKTVSFRINSEDFLLEAQVRDQPRWLLVCHEGWSPALGLQICWSLGHLRLTHHKGVNLTDIKLNSSQEFAQLSPRLGGFLEEAWQPRNNCTSGQVVSLRCSECGARPLASRIVGGQSVAPGRWPWQASVALGFRHTCGGSVLAPRWVVTAAHCMHSFRLARLSSWRVHAGLVSHSAVRPHQGALVERIIPHPLYSAQNHDYDVALLRLQTALNFSDTVGAVCLPAKEQHFPKGSRCWVSGWGHTHPSHTYSSDMLQDTVVPLFSTQLCNSSCVYSGALTPRMLCAGYLDGRADACQGDSGGPLVCPDGDTWRLVGVVSWGRGCAEPNHPGVYAKVAEFLDWIHDTAQ

SEQ ID NO: 10501 - protein, 384 aa, Artificial Sequence
  Synthetic polypeptide
MSLMLDDQPPMEAQYAEEGPGPGIFRAEPGDQQHPISQAVCWRSMRRGCAVLGALGLLAGAGVGSWLLVLYLCPAASQPISGTLQDEEITLSCSEASAEEALLPALPKTVSFRINSEDFLLEAQVRDQPRWLLVCHEGWSPALGLQICWSLGHLRLTHHKGVNLTDIKLNSSQEFAQLSPRLGGFLEEAWQPSFRLARLSSWRVHAGLVSHSAVRPHQGALVERIIPHPLYSAQNHDYDVALLRLQTALNFSDTVGAVCLPAKEQHFPKGSRCWVSGWGHTHPSHTYSSDMLQDTVVPLFSTQLCNSSCVYSGALTPRMLCAGYLDGRADACQGDSGGPLVCPDGDTWRLVGVVSWGRGCAEPNHPGVYAKVAEFLDWIHDTAQ

SEQ ID NO: 10502 - protein, 444 aa, Artificial Sequence
  Synthetic polypeptide
MTGWGQWRAIILHSPDPPWGQPHMIDVSQAVCWRSMRRGCAVLGALGLLAGAGVGSWLLVLYLCPAASQPISGTLQDEEITLSCSEASAEEALLPALPKTVSFRINSEDFLLEAQVRDQPRWLLVCHEGWSPALGLQICWSLGHLRLTHHKGVNLTDIKLNSSQEFAQLSPRLGGFLEEAWQPRNNCTSGQVVSLRCSECGARPLASRIVGGQSVAPGRWPWQASVALGFRHTCGGSVLAPRWVVTAAHCMHSFRLARLSSWRVHAGLVSHSAVRPHQGALVERIIPHPLYSAQNHDYDVALLRLQTALNFSDTVGAVCLPAKEQHFPKGSRCWVSGWGHTHPSHTYSSDMLQDTVVPLFSTQLCNSSCVYSGALTPRMLCAGYLDGRADACQGDSGGPLVCPDGDTWRLVGVVSWGRGCAEPNHPGVYAKVAEFLDWIHDTAQ

SEQ ID NO: 10503 - protein, 791 aa, Artificial Sequence
  Synthetic polypeptide
MFALGLPFLVLLVASVESHLGVLGPKNVSQKDAEFERTYVDEVNSELVNIYTFNHTVTRNRTEGVRVSVNVLNKQKGAPLLFVVRQKEAVVSFQVPLILRGMFQRKYLYQKVERTLCQPPTKNESEIQFFYVDVSTLSPVNTTYQLRVSRMDDFVLRTGEQFSFNTTAAQPQYFKYEFPEGVDSVIVKVTSNKAFPCSVISIQDVLCPVYDLDNNVAFIGMYQTMTKKAAITVQRKDFPSNSFYVVVVVKTEDQACGGSLPFYPFAEDEPVDQGHRQKTLSVLVSQAVTSEAYVSGMLFCLGIFLSFYLLTVLLACWENWRQKKKTLLVAIDRACPESASLLGHPRVLADSFPGSSPYEGYNYGSFENVSGSTDGLVDSAGTGDLSYGYQGTRPRVDSMSSVEEDDYDTLTDIDSDKNVIRTKQYLYVADLARKDKRVLRKKYQIYFWNIATIAVFYALPVVQLVITYQTVVNVTGNQDICYYNFLCAHPLGNLSAFNNILSNLGYILLGLLFLLIILQREINHNRALLRNDLCALECGIPKHFGLFYAMGTALMMEGLLSACYHVCPNYTNFQFDTSFMYMIAGLCMLKLYQKRHPDINASAYSAYACLAIVIFFSVLGVVFGKGNTAFWIVFSIIHIIATLLLSTQLYYMGRWKLDSGIFRRILHVLYTDCIRQCSGPLYVDRMVLLVMGNVINWSLAAYGLIMRPNDFASYLLAIGICNLLLYFAFYIIMKLRSGERIKLIPLLCIVCTSVVWGFALFFFFQGLSTWQHFGKLRQEDHLRRSRPAWAI

SEQ ID NO: 10504 - protein, 815 aa, Artificial Sequence
  Synthetic polypeptide
MFALGLPFLVLLVASVESHLGVLGPKNVSQKDAEFERTYVDEVNSELVNIYTFNHTVTRNRTEGVRVSVNVLNKQKGAPLLFVVRQKEAVVSFQVPLILRGMFQRKYLYQKVERTLCQPPTKNESEIQFFYVDVSTLSPVNTTYQLRVSRMDDFVLRTGEQFSFNTTAAQPQYFKYEFPEGVDSVIVKVTSNKAFPCSVISIQDVLCPVYDLDNNVAFIGMYQTMTKKAAITVQRKDFPSNSFYVVVVVKTEDQACGGSLPFYPFAEDEPVDQGHRQKTLSVLVSQAVTSEAYVSGMLFCLGIFLSFYLLTVLLACWENWRQKKKTLLVAIDRACPESGHPRVLADSFPGSSPYEGYNYGSFENVSGSTDGLVDSAGTGDLSYGYQGHDQFKRRLPSGQMRQLCIAMGRSFEPVGTRPRVDSMSSVEEDDYDTLTDIDSDKNVIRTKQYLYVADLARKDKRVLRKKYQIYFWNIATIAVFYALPVVQLVITYQTVVNVTGNQDICYYNFLCAHPLGNLSAFNNILSNLGYILLGLLFLLIILQREINHNRALLRNDLCALECGIPKHFGLFYAMGTALMMEGLLSACYHVCPNYTNFQFDTSFMYMIAGLCMLKLYQKRHPDINASAYSAYACLAIVIFFSVLGVVFGKGNTAFWIVFSIIHIIATLLLSTQLYYMGRWKLDSGIFRRILHVLYTDCIRQCSGPLYVDRMVLLVMGNVINWSLAAYGLIMRPNDFASYLLAIGICNLLLYFAFYIIMKLRSGERIKLIPLLCIVCTSVVWGFALFFFFQGLSTWQHFGKLRQEDHLRRSRPAWAI

SEQ ID NO: 10505 - protein, 794 aa, Artificial Sequence
  Synthetic polypeptide
MFALGLPFLVLLVASVESHLGVLGPKNVSQKDAEFERTYVDEVNSELVNIYTFNHTVTRNRTEGVRVSVNVLNKQKGAPLLFVVRQKEAVVSFQVPLILRGMFQRKYLYQKVERTLCQPPTKNESEIQFFYVDVSTLSPVNTTYQLRVSRMDDFVLRTGEQFSFNTTAAQPQYFKYEFPEGVDSVIVKVTSNKAFPCSVISIQDVLCPVYDLDNNVAFIGMYQTMTKKAAITVQRKDFPSNSFYVVVVVKTEDQACGGSLPFYPFAEDEPVDQGHRQKTLSVLVSQAVTSEAYVSGMLFCLGIFLSFYLLTVLLACWENWRQKKKTLLVAIDRACPESGHPRVLADSFPGSSPYEGYNYGSFENVSGSTDGLVDSAGTGDLSYGYQGRSFEPVGTRPRVDSMSSVEEDDYDTLTDIDSDKNVIRTKQYLYVADLARKDKRVLRKKYQIYFWNIATIAVFYALPVVQLVITYQTVVNVTGNQDICYYNFLCAHPLGNLSAFNNILSNLGYILLGLLFLLIILQREINHNRALLRNDLCALECGIPKHFGLFYAMGTALMMEGLLSACYHVCPNYTNFQFDTSFMYMIAGLCMLKLYQKRHPDINASAYSAYACLAIVIFFSVLGVVFGKGNTAFWIVFSIIHIIATLLLSTQLYYMGRWKLDSGIFRRILHVLYTDCIRQCSGPLYVDRMVLLVMGNVINWSLAAYGLIMRPNDFASYLLAIGICNLLLYFAFYIIMKLRSGERIKLIPLLCIVCTSVVWGFALFFFFQGLSTWQHFGKLRQEDHLRRSRPAWAI

SEQ ID NO: 10506 - protein, 86 aa, Artificial Sequence
  Synthetic polypeptide
MRPNDFASYLLAIGICNLLLYFAFYIIMKLRSGERIKLIPLLCIVCTSVVWGFALFFFFQGLSTWQHFGKLRQEDHLRRSRPAWAI

SEQ ID NO: 10507 - protein, 989 aa, Artificial Sequence
  Synthetic polypeptide
MTGAGEPRREEPPPQPSAGLRSRESGAPSAGGWERAERGRGAAARPATGPPPRRIGPLYGMWLVTFLLLLDSLHKARPEDVGTSLYFVNDSLQQVTFSSSVGVVVPCPAAGSPSAALRWYLATGDDIYDVPHIRHVHANGTLQLYPFSPSAFNSFIHDNDYFCTAENAAGKIRSPNIRVKAVFREPYTVRVEDQRSMRGNVAVFKCLIPSSVQEYVSVVSWEKDTVSIIPEHRFFITYHGGLYISDVQKEDALSTYRCITKHKYSGETRQSNGARLSVTDPAESIPTILDGFHSQEVWAGHTVELPCTASGYPIPAIRWLKDGRPLPADSRWTKRITGLTISDLRTEDSGTYICEVTNTFGSAEATGILMVIDPLHVTLTPKKLKTGIGSTVILSCALTGSPEFTIRWYRNTELVLPDEAISIRGLSNETLLITSAQKSHSGAYQCFATRKAQTAQDFAIIALEDGTPRIVSSFSEKVVNPGEQFSLMCAAKGAPPPTVTWALDDEPIVRDGSHRTNQYTMSDGTTISHMNVTGPQIRDGGVYRCTARNLVGSAEYQARINVRGPPSIRAMRNITAVAGRDTLINCRVIGYPYYSIKWYKDALLLPDNHRQVVFENGTLKLTDVQKGMDEGEYLCSVLIQPQLSISQSVHVAVKVPPLIQPFEFPPASIGQLLYIPCVVSSGDMPIRITWRKDGQVIISGSGVTIESKEFMSSLQISSVSLKHNGNYTCIASNAAATVSRERQLIVRVPPRFVVQPNNQDGIYGKAGVLNCSVDGYPPPKVMWKHAKGSGNPQQYHPVPLTGRIQILPNSSLLIRHVLEEDIGYYLCQASNGVGTDISKSMFLTVKIPAMITSHPNTTIAIKGHAKELNCTARGERPIIIRWEKGDTVIDPDRVMRYAIATKDNGDEVVSTLKLKPADRGDSVFFSCHAINSYGEDRGLIQLTVQEPPDPPELEIREVKARSMNLRWTQRFDGNSIITGFDIEYKNKSG

SEQ ID NO: 10508 - protein, 719 aa, Artificial Sequence
  Synthetic polypeptide
MWLVTFLLLLDSLHKARPEDVGTSLYFVNDSLQQLPCTASGYPIPAIRWLKDGRPLPADSRWTKRITGLTISDLRTEDSGTYICEVTNTFGSAEATGILMVIDPLHVTLTPKKLKTGIGSTVILSCALTGSPEFTIRWYRNTELVLPDEAISIRGLSNETLLITSAQKSHSGAYQCFATRKAQTAQDFAIIALEDGTPRIVSSFSEKVVNPGEQFSLMCAAKGAPPPTVTWALDDEPIVRDGSHRTNQYTMSDGTTISHMNVTGPQIRDGGVYRCTARNLVGSAEYQARINVRGPPSIRAMRNITAVAGRDTLINCRVIGYPYYSIKWYKDALLLPDNHRQVVFENGTLKLTDVQKGMDEGEYLCSVLIQPQLSISQSVHVAVKVPPLIQPFEFPPASIGQLLYIPCVVSSGDMPIRITWRKDGQVIISGSGVTIESKEFMSSLQISSVSLKHNGNYTCIASNAAATVSRERQLIVRVPPRFVVQPNNQDGIYGKAGVLNCSVDGYPPPKVMWKHAKGSGNPQQYHPVPLTGRIQILPNSSLLIRHVLEEDIGYYLCQASNGVGTDISKSMFLTVKIPAMITSHPNTTIAIKGHAKELNCTARGERPIIIRWEKGDTVIDPDRVMRYAIATKDNGDEVVSTLKLKPADRGDSVFFSCHAINSYGEDRGLIQLTVQEPPDPPELEIREVKARSMNLRWTQRFDGNSIITGFDIEYKNKSG

SEQ ID NO: 10509 - protein, 492 aa, Artificial Sequence
  Synthetic polypeptide
MDPDSDQPLNSLDVKPLRKPRIPMETFRKVGIPIIIALLSLASIIIVVVLIKVILDKYYFLCGQPLHFIPRKQLCDGELDCPLGEDEEHCVKSFPEGPAVAVRLSKDRSTLQVLDSATGNWFSACFDNFTEALAETACRQMGYSSKPTFRAVEIGPDQDLDVVEITENSQELRMRNSSGPCLSGSLVSLHCLACGKSLKTPRVVGVEEASVDSWPWQVSIQYDKQHVCGGSILDPHWVLTAAHCFRKHTDVFNWKVRAGSDKLGSFPSLAVAKIIIIEFNPMYPKDNDIALMKLQFPLTFSGTVRPICLPFFDEELTPATPLWIIGWGFTKQNGGKMSDILLQASVQVIDSTRCNADDAYQGEVTEKMMCAGIPEGGVDTCQGDSGGPLMYQSDQWHVVGIVSWGYGCGGPSTPGVYTKVSAYLNWIYNVWKDRTIQRSCNSPGTGLVIQQPAVPLMELRSARHTHRLTTCVCFLSFPALQPLSPLCPFPWD

SEQ ID NO: 10510 - protein, 454 aa, Artificial Sequence
  Synthetic polypeptide
MDPDSDQPLNSLVKVILDKYYFLCGQPLHFIPRKQLCDGELDCPLGEDEEHCVKSFPEGPAVAVRLSKDRSTLQVLDSATGNWFSACFDNFTEALAETACRQMGYSSKPTFRAVEIGPDQDLDVVEITENSQELRMRNSSGPCLSGSLVSLHCLACGKSLKTPRVVGVEEASVDSWPWQVSIQYDKQHVCGGSILDPHWVLTAAHCFRKHTDVFNWKVRAGSDKLGSFPSLAVAKIIIIEFNPMYPKDNDIALMKLQFPLTFSGTVRPICLPFFDEELTPATPLWIIGWGFTKQNGGKMSDILLQASVQVIDSTRCNADDAYQGEVTEKMMCAGIPEGGVDTCQGDSGGPLMYQSDQWHVVGIVSWGYGCGGPSTPGVYTKVSAYLNWIYNVWKDRTIQRSCNSPGTGLVIQQPAVPLMELRSARHTHRLTTCVCFLSFPALQPLSPLCPFPWD

SEQ ID NO: 10511 - protein, 347 aa, Artificial Sequence
  Synthetic polypeptide
MGYSRAVEIGPDQDLDVVEITENSQELRMRNSSGPCLSGSLVSLHCLACGKSLKTPRVVGVEEASVDSWPWQVSIQYDKQHVCGGSILDPHWVLTAAHCFRKHTDVFNWKVRAGSDKLGSFPSLAVAKIIIIEFNPMYPKDNDIALMKLQFPLTFSGTVRPICLPFFDEELTPATPLWIIGWGFTKQNGGKMSDILLQASVQVIDSTRCNADDAYQGEVTEKMMCAGIPEGGVDTCQGDSGGPLMYQSDQWHVVGIVSWGYGCGGPSTPGVYTKVSAYLNWIYNVWKDRTIQRSCNSPGTGLVIQQPAVPLMELRSARHTHRLTTCVCFLSFPALQPLSPLCPFPWD

SEQ ID NO: 10512 - protein, 489 aa, Artificial Sequence
  Synthetic polypeptide
MLQDPDSDQPLNSLDVKPLRKPRIPMETFRKVGIPIIIALLSLASIIIVVVLIKVILDKYYFLCGQPLHFIPRKQLCDGELDCPLGEDEEHCVKSFPEGPAVAVRLSKDRSTLQVLDSATGNWFSACFDNFTEALAETACRQMGYSRAVEIGPDQDLDVVEITENSQELRMRNSSGPCLSGSLVSLHCLACGKSLKTPRVVGVEEASVDSWPWQVSIQYDKQHVCGGSILDPHWVLTAAHCFRKHTDVFNWKVRAGSDKLGSFPSLAVAKIIIIEFNPMYPKDNDIALMKLQFPLTFSGTVRPICLPFFDEELTPATPLWIIGWGFTKQNGGKMSDILLQASVQVIDSTRCNADDAYQGEVTEKMMCAGIPEGGVDTCQGDSGGPLMYQSDQWHVVGIVSWGYGCGGPSTPGVYTKVSAYLNWIYNVWKDRTIQRSCNSPGTGLVIQQPAVPLMELRSARHTHRLTTCVCFLSFPALQPLSPLCPFPWD

SEQ ID NO: 10513 - protein, 494 aa, Artificial Sequence
  Synthetic polypeptide
MLQDPDSDQPLNSLDVKPLRKPRIPMETFRKVGIPIIIALLSLASIIIVVVLIKVILDKYYFLCGQPLHFIPRKQLCDGELDCPLGEDEEHCVKSFPEGPAVAVRLSKDRSTLQVLDSATGNWFSACFDNFTEALAETACRQMGYSSKPTFRAVEIGPDQDLDVVEITENSQELRMRNSSGPCLSGSLVSLHCLACGKSLKTPRVVGVEEASVDSWPWQVSIQYDKQHVCGGSILDPHWVLTAAHCFRKHTDVFNWKVRAGSDKLGSFPSLAVAKIIIIEFNPMYPKDNDIALMKLQFPLTFSGTVRPICLPFFDEELTPATPLWIIGWGFTKQNGGKMSDILLQASVQVIDSTRCNADDAYQGEVTEKMMCAGIPEGGVDTCQGDSGGPLMYQSDQWHVVGIVSWGYGCGGPSTPGVYTKVSAYLNWIYNVWKDRTIQRSCNSPGTGLVIQQPAVPLMELRSARHTHRLTTCVCFLSFPALQPLSPLCPFPWD

SEQ ID NO: 10514 - protein, 119 aa, Artificial Sequence
  Synthetic polypeptide
  misc_feature (1)..(1): Xaa can be any naturally occurring amino acid
XKVRAGSDKLGSFPSLAVAKIIIIEFNPMYPKDNDIALMKLQFPLTFSAYLNWIYNVWKDRTIQRSCNSPGTGLVIQQPAVPLMELRSARHTHRLTTCVCFLSFPALQPLSPLCPFPWD

SEQ ID NO: 10515 - protein, 438 aa, Artificial Sequence
  Synthetic polypeptide
MDPDSDQPLNSLDVKPLRKPRIPMETFRKVGIPIIIALLSLASIIIVVVLIKVILDKYYFLCGQPLHFIPRKQLCDGELDCPLGEDEEHCVKSFPEGPAVAVRLSKDRSTLQVLDSATGNWFSACFDNFTEALAETACRQMGYSSKPTFRAVEIGPDQDLDVVEITENSQELRMRNSSGPCLSGSLVSLHCLACGKSLKTPRVVGVEEASVDSWPWQVSIQYDKQHVCGGSILDPHWVLTAAHCFRKHTDVFNWKVRAGSDKLGSFPSLAVAKIIIIEFNPMYPKDNDIALMKLQFPLTFSGTVRPICLPFFDEELTPATPLWIIGWGFTKQNGGKMSDILLQASVQVIDSTRCNADDAYQGEVTEKMMCAGIPEGGVDTCQGDSGGPLMYQSDQWHVVGIVSWGYGCGGPSTPGVYTKVSAYLNWIYNVWKNYSEKL

SEQ ID NO: 10516 - protein, 400 aa, Artificial Sequence
  Synthetic polypeptide
MDPDSDQPLNSLVKVILDKYYFLCGQPLHFIPRKQLCDGELDCPLGEDEEHCVKSFPEGPAVAVRLSKDRSTLQVLDSATGNWFSACFDNFTEALAETACRQMGYSSKPTFRAVEIGPDQDLDVVEITENSQELRMRNSSGPCLSGSLVSLHCLACGKSLKTPRVVGVEEASVDSWPWQVSIQYDKQHVCGGSILDPHWVLTAAHCFRKHTDVFNWKVRAGSDKLGSFPSLAVAKIIIIEFNPMYPKDNDIALMKLQFPLTFSGTVRPICLPFFDEELTPATPLWIIGWGFTKQNGGKMSDILLQASVQVIDSTRCNADDAYQGEVTEKMMCAGIPEGGVDTCQGDSGGPLMYQSDQWHVVGIVSWGYGCGGPSTPGVYTKVSAYLNWIYNVWKNYSEKL

SEQ ID NO: 10517 - protein, 293 aa, Artificial Sequence
  Synthetic polypeptide
MGYSRAVEIGPDQDLDVVEITENSQELRMRNSSGPCLSGSLVSLHCLACGKSLKTPRVVGVEEASVDSWPWQVSIQYDKQHVCGGSILDPHWVLTAAHCFRKHTDVFNWKVRAGSDKLGSFPSLAVAKIIIIEFNPMYPKDNDIALMKLQFPLTFSGTVRPICLPFFDEELTPATPLWIIGWGFTKQNGGKMSDILLQASVQVIDSTRCNADDAYQGEVTEKMMCAGIPEGGVDTCQGDSGGPLMYQSDQWHVVGIVSWGYGCGGPSTPGVYTKVSAYLNWIYNVWKNYSEKL

SEQ ID NO: 10518 - protein, 435 aa, Artificial Sequence
  Synthetic polypeptide
MLQDPDSDQPLNSLDVKPLRKPRIPMETFRKVGIPIIIALLSLASIIIVVVLIKVILDKYYFLCGQPLHFIPRKQLCDGELDCPLGEDEEHCVKSFPEGPAVAVRLSKDRSTLQVLDSATGNWFSACFDNFTEALAETACRQMGYSRAVEIGPDQDLDVVEITENSQELRMRNSSGPCLSGSLVSLHCLACGKSLKTPRVVGVEEASVDSWPWQVSIQYDKQHVCGGSILDPHWVLTAAHCFRKHTDVFNWKVRAGSDKLGSFPSLAVAKIIIIEFNPMYPKDNDIALMKLQFPLTFSGTVRPICLPFFDEELTPATPLWIIGWGFTKQNGGKMSDILLQASVQVIDSTRCNADDAYQGEVTEKMMCAGIPEGGVDTCQGDSGGPLMYQSDQWHVVGIVSWGYGCGGPSTPGVYTKVSAYLNWIYNVWKNYSEKL

SEQ ID NO: 10519 - protein, 440 aa, Artificial Sequence
  Synthetic polypeptide
MLQDPDSDQPLNSLDVKPLRKPRIPMETFRKVGIPIIIALLSLASIIIVVVLIKVILDKYYFLCGQPLHFIPRKQLCDGELDCPLGEDEEHCVKSFPEGPAVAVRLSKDRSTLQVLDSATGNWFSACFDNFTEALAETACRQMGYSSKPTFRAVEIGPDQDLDVVEITENSQELRMRNSSGPCLSGSLVSLHCLACGKSLKTPRVVGVEEASVDSWPWQVSIQYDKQHVCGGSILDPHWVLTAAHCFRKHTDVFNWKVRAGSDKLGSFPSLAVAKIIIIEFNPMYPKDNDIALMKLQFPLTFSGTVRPICLPFFDEELTPATPLWIIGWGFTKQNGGKMSDILLQASVQVIDSTRCNADDAYQGEVTEKMMCAGIPEGGVDTCQGDSGGPLMYQSDQWHVVGIVSWGYGCGGPSTPGVYTKVSAYLNWIYNVWKNYSEKL

SEQ ID NO: 10520 - protein, 65 aa, Artificial Sequence
  Synthetic polypeptide
  misc_feature (1)..(1): Xaa can be any naturally occurring amino acid
XKVRAGSDKLGSFPSLAVAKIIIIEFNPMYPKDNDIALMKLQFPLTFSAYLNWIYNVWKNYSEKL

SEQ ID NO: 10521 - protein, 41 aa, Artificial Sequence
  Synthetic polypeptide
MEHSTFLSGLVLATLLSQAVCLGLPKCRDCSLCPAATPSGK

SEQ ID NO: 10522 - protein, 102 aa, Artificial Sequence
  Synthetic polypeptide
MEHSTFLSGLVLATLLSQVLNGAQAGVQWRDLGSLQPPPPSRLPWPPKVPRLQPLPGRHPVWEVRSVSAWPPIVWDVRSPSAWLPSLESEEHLCPAAIPSRK

SEQ ID NO: 10523 - protein, 24 aa, Artificial Sequence
  Synthetic polypeptide
MEHSTFLSGLVLATLLSQVCQFQF

SEQ ID NO: 10524 - protein, 20 aa, Artificial Sequence
  Synthetic polypeptide
MNYPLTLEMDLENLEDLGRN

SEQ ID NO: 10525 - protein, 33 aa, Artificial Sequence; identical to SEQ ID NO: 1356
  Synthetic polypeptide

SEQ ID NO: 10526 - protein, 667 aa, Artificial Sequence
  Synthetic polypeptide
MAGNVKKSSGAGGGSGSGGSGSGGLIGLMKDAFQPHHHHHHHLSPHPPGTVDKKMVEKCWKLMDKVVRLCQNPKLALKNSPPYILDLLPDTYQHLRTILSRYEGKMETLGENEYFRVFMENLMKKTKQTISLFKEGKERMYEENSQPRRNLTKLSLIFSHMLAELKGIFPSGLFQGDTFRITKADAAEFWRKAFGEKTIVPWKSFRQALHEVHPISSGLEAMALKSTIDLTCNDYISVFEFDIFTRLFQPWSSLLRNWNSLAVTHPGYMAFLTYDEVKARLQKFIHKPGSYIFRLSCTRLGQWAIGYVTADGNILQTIPHNKPLFQALIDGFREGFYLFPDGRNQNPDLTGLCEPTPQDHIKVTQEQYELYCEMGSTFQLCKICAENDKDVKIEPCGHLMCTSCLTSWQESEGQGCPFCRCEIKGTEPIVVDPFDPRGSGSLLRQGAEGAPSPNYDDDDDERADDTLFMMKELAGAKVERPPSPFSMAPQASLPPVPPRLDLLPQRVCVPSSASALGTASKAASGSLHKDKPLPVPPTLRDLPPPPPPDRPYSVGAESRPQRRPLPCTPGDCPSRDKLPPVPSSRLGDSWLPRPIPKVPVSAPSSSDPWTGRELTNRHSLPFSLPSQMEPRPDVPRLGSTFSLDTSMLLRRLRQEIHLNLEAEVAVS

SEQ ID NO: 10527 - protein, 232 aa, Artificial Sequence
  Synthetic polypeptide
MSLLLLLLLVSYYVGTLGTHTEIKRVAEEKVTLPCHHQLGLPEKDTLDIEWLLTDNEGNQKVVITYSSRHVYNNLTEEQKGRVAFASNFLAGDASLQIEPLKPSDEGRYTCKVKNSGRYVWSHVILKVLVRPSKPKCELEGELTEGSDLTLQCESSSGTEPIVYYWQRIREKEGEDERLPPKSRIDYNHPGRVLLQNLTMSYSGLYQCTAGNEAGKESCVVRVTVQYNPSRL

SEQ ID NO: 10528 - protein, 252 aa, Artificial Sequence
  Synthetic polypeptide
MSLLLLLLLVSYYVGTLGTHTEIKRVAEEKVTLPCHHQLGLPEKDTLDIEWLLTDNEGNQKVVITYSSRHVYNNLTEEQKGRVAFASNFLAGDASLQIEPLKPSDEGRYTCKVKNSGRYVWSHVILKVLVRPSKPKCELEGELTEGSDLTLQCESSSGTEPIVYYWQRIREKEGEDERLPPKSRIDYNHPGRVLLQNLTMSYSGLYQCTAGNEAGKESCVVRVTVQLRKLRPPANSHVNEPFQRQIIQHQSS

SEQ ID NO: 10529 - protein, 80 aa, Artificial Sequence
  Synthetic polypeptide
MSLLLLLLLVSYYVGTLGTHTEIKRVAEEKVTLPCHHQLGLPEKDTLDIEWLLTDNEGNQKVVLAVFLTRANLGLPSLPS

SEQ ID NO: 10530 - protein, 70 aa, Artificial Sequence
  Synthetic polypeptide
MSLLLLLLLVSYYVGTLGTHTEIKRVAEEKVTLPCHHQLGLPEKDTLDIEWLLTDNEGNQKVAGSCGLSD

SEQ ID NO: 10531 - protein, 136 aa, Artificial Sequence
  Synthetic polypeptide
MATSPQKSPSVPKSPTPKSPPSRKKDDSFLGKLGGTLARRKKAKEVSELQEEGMNAINLPLSPIPFELDPEDTMLEENEVRTMVDPNSRSDPKLQELMKVLIDWINDVLVGERIIVKDLAEDLYDGQVLQKLFAYP

SEQ ID NO: 10532 - protein, 100 aa, Artificial Sequence
  Synthetic polypeptide
MGCGALCPQVSELQEEGMNAINLPLSPIPFELDPEDTMLEENEVRTMVDPNSRSDPKLQELMKVLIDWINDVLVGERIIVKDLAEDLYDGQVLQKLFAYP

SEQ ID NO: 10533 - protein, 176 aa, Artificial Sequence
  Synthetic polypeptide
MLGIIPLPFGKPQPQSRRRPLRPPSASSASRPARGSLRRAMATSPQKSPSVPKSPTPKSPPSRKKDDSFLGKLGGTLARRKKAKEVSELQEEGMNAINLPLSPIPFELDPEDTMLEENEVRTMVDPNSRSDPKLQELMKVLIDWINDVLVGERIIVKDLAEDLYDGQVLQKLFAYP

SEQ ID NO: 10534 - protein, 83 aa, Artificial Sequence
  Synthetic polypeptide
MNAINLPLSPIPFELDPEDTMLEENEVRTMVDPNSRSDPKLQELMKVLIDWINDVLVGERIIVKDLAEDLYDGQVLQKLFAYP

SEQ ID NO: 10535 - protein, 202 aa, Artificial Sequence [sequence omitted]

SEQ ID NO: 10536 - protein, 612 aa, Artificial Sequence
  Synthetic polypeptide
MARGADVPEIPGDLTLKTCGSTASMKVKHVKKLPFTKGHFPKMAECAHFHYENVEFGSIQLSLSEEQNEVMKNGCESKELVYLVQIACQGKSWIVKRSYEDFRVLDKHLHLCIYDRRFSQLSELPRSDTLKDSPESVTQMLMAYLSRLSAIAGNKINCGPALTWMEIDNKGNHLLVHEESSINTPAVGAAHVIKRYTARAPDELTLEVGDIVSVIDMPPKVLSTWWRGKHGFQVGLFPGHCVELINQKVPQSVTNSVPKPVSKKHGKLITFLRTFMKSRPTKQKLKQRGILKERVFGCDLGEHLLNSGFEVPQVLQSCTAFIERYGIVDGIYRLSGVASNIQRLRHEFDSEHVPDLTKEPYVQDIHSVGSLCKLYFRELPNPLLTYQLYEKFSDAVSAATDEERLIKIHDVIQQLPPPHYRTLEFLMRHLSLLADYCSITNMHAKNLAIVWAPNLLRSKQIESACFSGTAAFMEVRIQSVVVEFILNHVDVLFSGRISMAMQEGAASLSRPKSLLVSSPSTKLLTLEEAQARTQAQVNSPIVTENKYIEVGEGPAALQGKFHTIIEFPLESQQHQHHLVIIARSAHCAVVQSHPRPAESETLGVGPSNWSFI

SEQ ID NO: 10537 - protein, 686 aa, Artificial Sequence
  Synthetic polypeptide
METESESSTLGDDSVFWLESEVIIQVTDCEEEEREEKFRKMKSSVHSEEDDFVPELHRNVHPRERPDWEETLSAMARGADVPEIPGDLTLKTCGSTASMKVKHVKKLPFTKGHFPKMAECAHFHYENVEFGSIQLSLSEEQNEVMKNGCESKELVYLVQIACQGKSWIVKRSYEDFRVLDKHLHLCIYDRRFSQLSELPRSDTLKDSPESVTQMLMAYLSRLSAIAGNKINCGPALTWMEIDNKGNHLLVHEESSINTPAVGAAHVIKRYTARAPDELTLEVGDIVSVIDMPPKVLSTWWRGKHGFQVGLFPGHCVELINQKVPQSVTNSVPKPVSKKHGKLITFLRTFMKSRPTKQKLKQRGILKERVFGCDLGEHLLNSGFEVPQVLQSCTAFIERYGIVDGIYRLSGVASNIQRLRHEFDSEHVPDLTKEPYVQDIHSVGSLCKLYFRELPNPLLTYQLYEKFSDAVSAATDEERLIKIHDVIQQLPPPHYRTLEFLMRHLSLLADYCSITNMHAKNLAIVWAPNLLRSKQIESACFSGTAAFMEVRIQSVVVEFILNHVDVLFSGRISMAMQEGAASLSRPKSLLVSSPSTKLLTLEEAQARTQAQVNSPIVTENKYIEVGEGPAALQGKFHTIIEFPLESQQHQHHLVIIARSAHCAVVQSHPRPAESETLGVGPSNWSFI

SEQ ID NO: 10538 - protein, 337 aa, Artificial Sequence
  Synthetic polypeptide
MKSRPTKQKLKQRGILKERVFGCDLGEHLLNSGFEVPQVLQSCTAFIERYGIVDGIYRLSGVASNIQRLRHEFDSEHVPDLTKEPYVQDIHSVGSLCKLYFRELPNPLLTYQLYEKFSDAVSAATDEERLIKIHDVIQQLPPPHYRTLEFLMRHLSLLADYCSITNMHAKNLAIVWAPNLLRSKQIESACFSGTAAFMEVRIQSVVVEFILNHVDVLFSGRISMAMQEGAASLSRPKSLLVSSPSTKLLTLEEAQARTQAQVNSPIVTENKYIEVGEGPAALQGKFHTIIEFPLESQQHQHHLVIIARSAHCAVVQSHPRPAESETLGVGPSNWSFI

SEQ ID NO: 10539 - protein, 65 aa, Artificial Sequence
  Synthetic polypeptide
MARGADVPEIPGDLTLKTCGSTASMKVKHVKKLPFTKGHFPKMAECAHFHYENVEFGSIQSFAAI

SEQ ID NO: 10540 - protein, 139 aa, Artificial Sequence
  Synthetic polypeptide
METESESSTLGDDSVFWLESEVIIQVTDCEEEEREEKFRKMKSSVHSEEDDFVPELHRNVHPRERPDWEETLSAMARGADVPEIPGDLTLKTCGSTASMKVKHVKKLPFTKGHFPKMAECAHFHYENVEFGSIQSFAAI

SEQ ID NO: 10541 - protein, 113 aa, Artificial Sequence
  Synthetic polypeptide
MKSSVHSEEDDFVPELHRNVHPRERPDWEETLSAMARGADVPEIPGDLTLKTCGSTASMKVKHVKKSTTPGLMGCDNIHRLPFTKGHFPKMAECAHFHYENVEFGSIQSFAAI

SEQ ID NO: 10542 - protein, 36 aa, Artificial Sequence
  Synthetic polypeptide
MAATGTAAAAATGRLLLLLLVGLTAPALALAGYIEG

SEQ ID NO: 10543 - protein, 146 aa, Artificial Sequence
  Synthetic polypeptide
MDNVTVRQGESATLRCTIDDRVTRVAWLNRSTILYAGNDKWSIDPRVIILVNTPTQYSIMIQNVDVYDEGPYTCSVQTDNHPKTSRVHLIVQVPPQIMNISSDITVNEGSSVTLLCLAIGRPEPTVTWRHLSVKVILRAASCHAMP

SEQ ID NO: 10544 - protein, 187 aa, Artificial Sequence
  Synthetic polypeptide
MGVCGYLFLPWKCLVVVSLRLLFLVPTGVPVRSGDATFPKAMDNVTVRQGESATLRCTIDDRVTRVAWLNRSTILYAGNDKWSIDPRVIILVNTPTQYSIMIQNVDVYDEGPYTCSVQTDNHPKTSRVHLIVQVPPQIMNISSDITVNEGSSVTLLCLAIGRPEPTVTWRHLSVKVILRAASCHAMP

SEQ ID NO: 10545 - protein, 180 aa, Artificial Sequence
  Synthetic polypeptide
MYHPAYWVVFSATTALLFIPGVPVRSGDATFPKAMDNVTVRQGESATLRCTIDDRVTRVAWLNRSTILYAGNDKWSIDPRVIILVNTPTQYSIMIQNVDVYDEGPYTCSVQTDNHPKTSRVHLIVQVPPQIMNISSDITVNEGSSVTLLCLAIGRPEPTVTWRHLSVKVILRAASCHAMP

SEQ ID NO: 10546 - protein, 143 aa, Artificial Sequence
  Synthetic polypeptide
MAAAGWRDGSGQEKYRLVVVGGGGVGKSALTIQFIQFFLFLQSYFVTDYDPTIEDSYTKQCVIDDRAARLDILDTAGQEEFGAMREQYMRTGEGFLLVFSVTDRGSFEEIYKFQRQILRVKDRDEFPMILIGNKADLDHQRQK

SEQ ID NO: 10547 - protein, 137 aa, Artificial Sequence
  Synthetic polypeptide
MAAAGWRDGSGQEKYRLVVVGGGGVGKSALTIQFIQSYFVTDYDPTIEDSYTKQCVIDDRAARLDILDTAGQEEFGAMREQYMRTGEGFLLVFSVTDRGSFEEIYKFQRQILRVKDRDEFPMILIGNKADLDHQRQK

SEQ ID NO: 10548 - protein, 118 aa, Artificial Sequence
  Synthetic polypeptide
MQESSIILQMFCFLSRESYFVTDYDPTIEDSYTKQCVIDDRAARLDILDTAGQEEFGAMREQYMRTGEGFLLVFSVTDRGSFEEIYKFQRQILRVKDRDEFPMILIGNKADLDHQRQK

SEQ ID NO: 10549 - protein, 60 aa, Artificial Sequence
  Synthetic polypeptide
MREQYMRTGEGFLLVFSVTDRGSFEEIYKFQRQILRVKDRDEFPMILIGNKADLDHQRQK

SEQ ID NO: 10550 - protein, 102 aa, Artificial Sequence
  Synthetic polypeptide
MSYFVTDYDPTIEDSYTKQCVIDDRAARLDILDTAGQEEFGAMREQYMRTGEGFLLVFSVTDRGSFEEIYKFQRQILRVKDRDEFPMILIGNKADLDHQRQK

SEQ ID NO: 10551 - protein, 480 aa, Artificial Sequence
  Synthetic polypeptide
MTAAENVCYTLINVPMDSEPPSEISLKNDLEKGDVKSKTEALKKVIIMILNGEKLPGLLMTIIRFVLPLQDHTIKKLLLVFWEIVPKTTPDGRLLHEMILVCDAYRKDLQHPNEFIRGSTLRFLCKLKEAELLEPLMPAIRACLEHRHSYVRRNAVLAIYTIYRNFEHLIPDAPELIHDFLVNEKDASCKRNAFMMLIHADQDRALDYLSTCIDQVQTFGDILQLVIVELIYKVCHANPSERARFIRCIYNLLQSSSPAVKYEAAGTLVTLSSAPTAIKAAAQCYIDLIIKESDNNVKLIVLDRLIELKEHPAHERVLQDLVMDILRVLSTPDLEVRKKTLQLALDLVSSRNVEELVIVLKKEVIKTNNVSEHEDTDKYRQLLVRTLHSCSVRFPDMAANVIPVLMEFLSDNNEAAAADVLEFVREAIQRFDNLRMLIVEKMLEVFHAIKSVNTLGGQGRRIAGCQELETSLGNMVRLCL

SEQ ID NO: 10552 - protein, 336 aa, Artificial Sequence [sequence omitted]

SEQ ID NO: 10553 - protein, 930 aa, Artificial Sequence
  Synthetic polypeptide
MPLAFCGSENHSAAYRVDQGVLNNGCFVDALNVVPHVFLLFITFPILFIGWGSQSSKVHIHHSTWLHFPGHNLRWILTFMLLFVLVCEIAEGILSDGVTESHHLHLYMPAGMAFMAAVTSVVYYHNIETSNFPKLLIALLVYWTLAFITKTIKFVKFLDHAIGFSQLRFCLTGLLVILYGMLLLVEVNVIRVRRYIFFKTPREVKPPEDLQDLGVRFLQPFVNLLSKGTYWWMNAFIKTAHKKPIDLRAIGKLPIAMRALTNYQRLCEAFDAQVRKDIQGTQGARAIWQALSHAFGRRLVLSSTFRILADLLGFAGPLCIFGIVDHLGKENDVFQPKTQFLGVYFVSSQEFLANAYVLAVLLFLALLLQRTFLQASYYVAIETGINLRGAIQTKIYNKIMHLSTSNLSMGEMTAGQICNLVAIDTNQLMWFFFLCPNLWAMPVQIIVGVILLYYILGVSALIGAAVIILLAPVQYFVATKLSQAQRSTLEYSNERLKQTNEMLRGIKLLKLYAWENIFRTRVETTRRKEMTSLRAFAIYTSISIFMNTAIPIAAVLITFVGHVSFFKEADFSPSVAFASLSLFHILVTPLFLLSSVVRSTVKALVSAEIREEQCAPHEPTPQGPASKYQAVPLRVVNRKRPAREDCRGLTGPLQSLVPSADGDADNCCVQIMGGYFTWTPDGIPTLSNITIRIPRGQLTMIVGQVGCGKSSLLLAALGEMQKVSGAVFWSSLPDSEIGEDPSPERETATDLDIRKRGPVAYASQKPWLLNATVEENIIFESPFNKQRYKMVIEACSLQPDIDILPHGDQTQIGERGINLSGGQRQRISVARALYQHANVVFLDDPFSALDIHLSDHLMQAGILELLRDDKRTVVLVTHKLQYLPHADWIIAMKDGTIQREGTLKDFQRSECQLFEHWKTLMNRQDQELEK

SEQ ID NO: 10554 - protein, 940 aa, Artificial Sequence
  Synthetic polypeptide
MPLAFCGSENHSAAYRVDQGVLNNGCFVDALNVVPHVFLLFITFPILFIGWGSQSSKVHIHHSTWLHFPGHNLRWILTFMLLFVLVCEIAEGILSDGVTESHHLHLYMPAGMAFMAAVTSVVYYHNIETSNFPKLLIALLVYWTLAFITKTIKFVKFLDHAIGFSQLRFCLTGLLVILYGMLLLVEVNVIRVRRYIFFKTPREVKPPEDLQDLGVRFLQPFVNLLSKGTYWWMNAFIKTAHKKPIDLRAIGKLPIAMRALTNYQRLCEAFDAQVRKDIQGTQGARAIWQALSHAFGRRLVLSSTFRILADLLGFAGPLCIFGIVDHLGKENDVFQPKTQFLGVYFVSSQEFLANAYVLAVLLFLALLLQRTFLQASYYVAIETGINLRGAIQTKIYNKIMHLSTSNLSMGEMTAGQICNLVAIDTNQLMWFFFLCPNLWAMPVQIIVGVILLYYILGVSALIGAAVIILLAPVQYFVATKLSQAQRSTLEYSNERLKQTNEMLRGIKLLKLYAWENIFRTRVETTRRKEMTSLRAFAIYTSISIFMNTAIPIAAVLITFVGHVSFFKEADFSPSVAFASLSLFHILVTPLFLLSSVVRSTVKALVSVQKLSEFLSSAEIREEQCAPHEPTPQGPASKYQAVPLRVVNRKRPAREDCRGLTGPLQSLVPSADGDADNCCVQIMGGYFTWTPDGIPTLSNITIRIPRGQLTMIVGQVGCGKSSLLLAALGEMQKVSGAVFWSSLPDSEIGEDPSPERETATDLDIRKRGPVAYASQKPWLLNATVEENIIFESPFNKQRYKMVIEACSLQPDIDILPHGDQTQIGERGINLSGGQRQRISVARALYQHANVVFLDDPFSALDIHLSDHLMQAGILELLRDDKRTVVLVTHKLQYLPHADWIIAMKDGTIQREGTLKDFQRSECQLFEHWKTLMNRQDQELEK

SEQ ID NO: 10555 - protein, 941 aa, Artificial Sequence
  Synthetic polypeptide
MPLAFCGSENHSAAYRVDQGVLNNGCFVDALNVVPHVFLLFITFPILFIGWGSQSSKVHIHHSTWLHFPGHNLRWILTFMLLFVLVCEIAEGILSDGVTESHHLHLYMPAGMAFMAAVTSVVYYHNIETSNFPKLLIALLVYWTLAFITKTIKFVKFLDHAIGFSQLRFCLTGLLVILYGMLLLVEVNVIRVRRYIFFKTPREVKPPEDLQDLGVRFLQPFVNLLSKGTYWWMNAFIKTAHKKPIDLRAIGKLPIAMRALTNYQRLCEAFDAQVRKDIQGTQGARAIWQALSHAFGRRLVLSSTFRILADLLGFAGPLCIFGIVDHLGKENDVFQPKTQFLGVYFVSSQEFLANAYVLAVLLFLALLLQRTFLQASYYVAIETGINLRGAIQTKIYNKIMHLSTSNLSMGEMTAGQICNLVAIDTNQLMWFFFLCPNLWAMPVQIIVGVILLYYILGVSALIGAAVIILLAPVQYFVATKLSQAQRSTLEYSNERLKQTNEMLRGIKLLKLYAWENIFRTRVETTRRKEMTSLRAFAIYTSISIFMNTAIPIAAVLITFVGHVSFFKEADFSPSVAFASLSLFHILVTPLFLLSSVVRSTVKALVSVQKLSEFLSSAEIREEQCAPHEPTPQGPASKYQAVPLRVVNRKRPAREDCRGLTGPLQSLVPSADGDADNCCVQIMGGYFTWTPDGIPTLSNITIRIPRGQLTMIVGQVGCGKSSLLLAALGEMQKVSGAVFWSSSLPDSEIGEDPSPERETATDLDIRKRGPVAYASQKPWLLNATVEENIIFESPFNKQRYKMVIEACSLQPDIDILPHGDQTQIGERGINLSGGQRQRISVARALYQHANVVFLDDPFSALDIHLSDHLMQAGILELLRDDKRTVVLVTHKLQYLPHADWIIAMKDGTIQREGTLKDFQRSECQLFEHWKTLMNRQDQELEK

SEQ ID NO: 10556 - protein, 68 aa, Artificial Sequence
  Synthetic polypeptide
GGSRWQRGFPQLAGGVILGVALWLRHDPQTTNLLYLELGDKPAPNTFYVGAGVMEEEEGRGKARRRRR

SEQ ID NO: 10557 - protein, 72 aa, Artificial Sequence
  Synthetic polypeptide
MAPFVHARAGKTKAQLAGGVILGVALWLRHDPQTTNLLYLELGDKPAPNTFYVGAGVMEEEEGRGKARRRRR

SEQ ID NO: 10558 - protein, 71 aa, Artificial Sequence
  Synthetic polypeptide
MCKPATDPRFTRSPLAGGVILGVALWLRHDPQTTNLLYLELGDKPAPNTFYVGAGVMEEEEGRGKARRRRR

SEQ ID NO: 10559 - protein, 79 aa, Artificial Sequence
  Synthetic polypeptide
MGVEGCTKCIKYLLFVFNFVFWLAGGVILGVALWLRHDPQTTNLLYLELGDKPAPNTFYVGAGVMEEEEGRGKARRRRR

SEQ ID NO: 10560 - protein, 117 aa, Artificial Sequence
  Synthetic polypeptide
MWCGWSFSWQPVHWVRSACGCSLTWVSWSLASSSSRSLLKVGELGMAPFVHARAGKTKAQLAGGVILGVALWLRHDPQTTNLLYLELGDKPAPNTFYVGAGVMEEEEGRGKARRRRR

SEQ ID NO: 10561 - protein, 74 aa, Artificial Sequence
  Synthetic polypeptide
QTQDVPLPAPEAPSPDELAGGVILGVALWLRHDPQTTNLLYLELGDKPAPNTFYVGAGVMEEEEGRGKARRRRR

SEQ ID NO: 10562 - protein, 64 aa, Artificial Sequence
  Synthetic polypeptide
  misc_feature (1)..(1): Xaa can be any naturally occurring amino acid
XQRGFPQLAGGVILGVALWLRHDPQTTNLLYLELGDKPAPNTFYVGAGVMEEEEGRGKARRRRR

SEQ ID NO: 10563 - protein, 505 aa, Artificial Sequence
  Synthetic polypeptide
MAAASSPPRAERKRWGWGRLPGARRGSAGLAKKCPFSLELAEGGPAGGALYAPIAPGAPGPAPPASPAAPAAPPVASDLGPRPPVSLDPRVSIYSTRRPVLARTHVQGRVYNFLERPTGWKCFVYHFAVFLIVLVCLIFSVLSTIEQYAALATGTLFWMEIVLVVFFGTEYVVRLWSAGCRSKYVGLWGRLRFARKPISIIDLIVVVASMVVLCVGSKGQVFATSAIRGIRFLQILRMLHVDRQGGTWRLLGSVVFIHRQELITTLYIGFLGLIFSSYFVYLAEKDAVNESGRVEFGSYADALWWGVVTVTTIGYGDKVPQTWVGKTIASCFSVFAISFFALPAGILGSGFALKVQQKQRQKHFNRQIPAAASLIQTAWRCYAAENPDSSTWKIYIRKAPRSHTLLSPSPKPKKSVVVKKKKFKLDKDNGVTPGEKMLTVPHITCDPPEERRLDHFSVDGYDSSGHKKTTVHEPESESSPDAESASALTLDFQACKIAKNKFLCL

SEQ ID NO: 10564 - protein, 378 aa, Artificial Sequence
  Synthetic polypeptide
MDFLIVLVCLIFSVLSTIEQYAALATGTLFWMEIVLVVFFGTEYVVRLWSAGCRSKYVGLWGRLRFARKPISIIDLIVVVASMVVLCVGSKGQVFATSAIRGIRFLQILRMLHVDRQGGTWRLLGSVVFIHRQELITTLYIGFLGLIFSSYFVYLAEKDAVNESGRVEFGSYADALWWGVVTVTTIGYGDKVPQTWVGKTIASCFSVFAISFFALPAGILGSGFALKVQQKQRQKHFNRQIPAAASLIQTAWRCYAAENPDSSTWKIYIRKAPRSHTLLSPSPKPKKSVVVKKKKFKLDKDNGVTPGEKMLTVPHITCDPPEERRLDHFSVDGYDSSGHKKTTVHEPESESSPDAESASALTLDFQACKIAKNKFLCL

SEQ ID NO: 10565 - protein, 404 aa, Artificial Sequence [sequence omitted]

SEQ ID NO: 10566 - protein, 380 aa, Artificial Sequence
  Synthetic polypeptide
MPGPLGLLCFLALGLLGSAGPSGAAPPLCAAPCSCDGDRRVDCSGKGLTAVPEGLSAFTQALQLAGNDLSFIHPKALSGLKELKVLTLQNNQLKTVPSEAIRGLSALQSLRLDANHITSVPEDSFEGLVQLRHLWLDDNSLTEVPVHPLSNLPTLQALTLALNKISSIPDFAFTNLSSLVVLHLHNNKIRSLSQHCFDGLDNLETLDLNYNNLGEFPQAIKALPSLKELGFHSNSISVIPDGAFDGNPLLRTIHLYDNPLSFVGNSAFHNLSDLHSLVIRGASMVQQFPNLTGTVHLESLTLTGTKISSIPNNLCQEQKMLRTLDLSYNNIRDLPSFNGCHALEEISLQRNQIYQIKEGTFQGLISLRILLNNVVKPHLY

SEQ ID NO: 10567 - protein, 87 aa, Artificial Sequence
  Synthetic polypeptide
MQGARAPRDQGRSPGRMSALGRSSVILLTYVLAATELTCLFMQFSIVPTLLKRRPLCSQQTHEKMLIITGHQRNASQNHNEIPSHTS

SEQ ID NO: 10568 - protein, 52 aa, Artificial Sequence
  Synthetic polypeptide
MQGARAPRDQGRSPGRMSALGRSSVILLTYVLAATELTCLFMQFSIVPPTDT

SEQ ID NO: 10569 - protein, 285 aa, Artificial Sequence
  Synthetic polypeptide
MCVPHRQGHQEGDSQGAEGELPAGEEPRSFLNKLSDYYYHADLLSRAAVEEDAYSRMKLVLRWYLSGFYKKPKGIKKPYNPILGETFRCCWFHPQTDSRTFYIAEQVSHHPPVSAFHVSNRKDGFCISGSITAKSRFYGNSLSALLDGKATLTFLNRAEDYTLTMPYAHCKGILYGTMTLELGGKVTIECAKNNFQAQLEFKLKPFFGGSTSINQISGKITSGEEVLASLSGHWDRDVFIKEEGSGSSALFWTPSGEVRRQRLRQHTVPLEEQTELESERQSRRG

SEQ ID NO: 10570 - protein, 565 aa, Artificial Sequence
  Synthetic polypeptide
MEPNGPSLPRDEGPPTPSSATKVPPAEYRLCNGSDKECVSPTARVTKKETLKAQKENYRQEKKRATRQLLSALTDPSVVIMADSLKIRGTLKSWTKLWCVLKPGVLLIYKTPKGPKGESVGSITQPLPSSYLIFRAASESDGRCWLDALELALRCSSLLRLGTCKPGRDGEPGTSPDASPSSLCGLPASATVHPDQDLFPLNGSSLENDAFSDKSERENPEESDTETQDHSRKTESGSDQSETPGAPVRRGTTYVEQVQEELGELGEASQVETVSEENKSLMWTLLKQLRPGMDLSRVVLPTFVLEPRSFLNKLSDYYYHADLLSRAAVEEDAYSRMKLVLRWYLSGFYKKPKGIKKPYNPILGETFRCCWFHPQTDSRTFYIAEQVSHHPPVSAFHVSNRKDGFCISGSITAKSRFYGNSLSALLDGKATLTFLNRAEDYTLTMPYAHCKGILYGTMTLELGGKVTIECAKNNFQAQLEFKLKPFFGGSTSINQISGKITSGEEVLASLSGHWDRDVFIKEEGSGSSALFWTPSGEVRRQRLRQHTVPLEEQTELESERQSRRG

SEQ ID NO: 10571 - protein, 586 aa, Artificial Sequence
  Synthetic polypeptide
MKEEAFLRRRFSLCPPSSTPQKVDPRKLTRNLLLSGDNELYPLSPGKDMEPNGPSLPRDEGPPTPSSATKVPPAEYRLCNGSDKECVSPTARVTKKETLKAQKENYRQEKKRATRQLLSALTDPSVVIMADSLKGPKGESVGSITQPLPSSYLIFRAASESDGRCWLDALELALRCSSLLRLGTCKPGRDGEPGTSPDASPSSLCGLPASATVHPDQDLFPLNGSSLENDAFSDKSERENPEESDTETQDHSRKTESGSDQSETPGAPVRRGTTYVEQVQEELGELGEASQVETVSEENKSLMWTLLKQLRPGMDLSRVVLPTFVLEPRSFLNKLSDYYYHADLLSRAAVEEDAYSRMKLVLRWYLSGFYKKPKGIKKPYNPILGETFRCCWFHPQTDSRTFYIAEQVSHHPPVSAFHVSNRKDGFCISGSITAKSRFYGNSLSALLDGKATLTFLNRAEDYTLTMPYAHCKGILYGTMTLELGGKVTIECAKNNFQAQLEFKLKPFFGGSTSINQISGKITSGEEVLASLSGHWDRDVFIKEEGSGSSALFWTPSGEVRRQRLRQHTVPLEEQTELESERQSRRG

SEQ ID NO: 10572 - protein, 654 aa, Artificial Sequence
  Synthetic polypeptide
MKEEAFLRRRFSLCPPSSTPQKVDPRKLTRNLLLSGDNELYPLSPGKDMEPNGPSLPRDEGPPTPSSATKVPPAEYRLCNGSDKECVSPTARVTKKETLKAQKENYRQEKKRATRQLLSALTDPSVVIMADSLKIRGTLKSWTKLWCVLKPGVLLIYKTPKVGQWVGTVLLHCCELIERPSKKDGFCFKLFHPLDQSVWAVKGPKGESVGSITQPLPSSYLIFRAASESDGRCWLDALELALRCSSLLRLGTCKPGRDGEPGTSPDASPSSLCGLPASATVHPDQDLFPLNGSSLENDAFSDKSERENPEESDTETQDHSRKTESGSDQSETPGAPVRRGTTYVEQVQEELGELGEASQVETVSEENKSLMWTLLKQLRPGMDLSRVVLPTFVLEPRSFLNKLSDYYYHADLLSRAAVEEDAYSRMKLVLRWYLSGFYKKPKGIKKPYNPILGETFRCCWFHPQTDSRTFYIAEQVSHHPPVSAFHVSNRKDGFCISGSITAKSRFYGNSLSALLDGKATLTFLNRAEDYTLTMPYAHCKGILYGTMTLELGGKVTIECAKNNFQAQLEFKLKPFFGGSTSINQISGKITSGEEVLASLSGHWDRDVFIKEEGSGSSALFWTPSGEVRRQRLRQHTVPLEEQTELESERQSRRG

SEQ ID NO: 10573 - protein, 108 aa, Artificial Sequence
  Synthetic polypeptide
MTLELGGKVTIECAKNNFQAQLEFKLKPFFGGSTSINQISGKITSGEEVLASLSGHWDRDVFIKEEGSGSSALFWTPSGEVRRQRLRQHTVPLEEQTELESERQSRRG

SEQ ID NO: 10574 - protein, 207 aa, Artificial Sequence
  Synthetic polypeptide
YNPILGETFRCCWFHPQTDSRTFYIAEQVSHHPPVSAFHVSNRKDGFCISGSITAKSRFYGNSLSALLDGKATLTFLNRAEDYTLTMPYAHCKGILYGTMTLELGGKVTIECAKNNFQAQLEFKLKPFFGGSTSINQISGKITSGEEVLASLSGHWDRDVFIKEEGSGSSALFWTPSGEVRRQRLRQHTVPLEEQTELESERQSRRG

SEQ ID NO: 10575 - protein, 129 aa, Artificial Sequence
  Synthetic polypeptide
MWLLGPLCLLLSSAAAKAKSKCGPTFFPCASGIHCIIGRFRCNGFEDCPDGSDEENCTANPLLCSTARYHCKNGLCIDKSFICDGQNNCQDNSDEESCESSQGSEERLCLAAHRLRCGERLCPAAPSGM

SEQ ID NO: 10576 - protein, 178 aa, Artificial Sequence
  Synthetic polypeptide
MWLLGPLCLLLSSAAESQLLPGNNFTNECNIPGNFMCSNGRCIPGAWQCDGLPDCFDKSDEKECPKAKSKCGPTFFPCASGIHCIIGRFRCNGFEDCPDGSDEENCTANPLLCSTARYHCKNGLCIDKSFICDGQNNCQDNSDEESCESSQGSEERLCLAAHRLRCGERLCPAAPSGM

SEQ ID NO: 10577 - protein, 474 aa, Artificial Sequence; identical to SEQ ID NO: 408
  Synthetic polypeptide

SEQ ID NO: 10578 - protein, 465 aa, Artificial Sequence
  Synthetic polypeptide
MQGEESLRILVEPEGDSFPLMEISTCETEASEQWDYVLVAQRHTQRDPRQARQQQFLEELRRKGFHIKVIRDQKQVFFGIRADNSVFGLYRTFLLEPEGPAPHAELAAPTTIPVTTSLRIRIVNFVVMNNKTSAGETFEDLMKDGVFEARFPLHKGEGRLKKTWARWRHMFREQPVDEIRNYFGEKVALYFVWLGWYTYMLVPAALTGLLVFLSGFSLFEASQISKEICEAHDILMCPLGDHSRRYQRLSETCTFAKLTHLFDNDGTVVFAIFMALWATVFLEIWKRQRARVVLHWDLYVWDEEQEEMALQLINCPDYKLRPYQHSYLRSTVILVLTLLMICLMIGMAHVLVVYRVLASALFSSSAVPFLEEQVTTAVVVTGALVHYVTIIIMTKINRCVALKLCDFEMPRTFSERESRCSGLCLKSQHFGRLRQADHLRSGVQDQTGQHEETPSLLARRGGVSL

SEQ ID NO: 10579 - protein, 413 aa, Artificial Sequence; identical to SEQ ID NO: 491
  Synthetic polypeptide

SEQ ID NO: 10580 - protein, 444 aa, Artificial Sequence
  Synthetic polypeptide
MQGEESLRILVEPEGDSFPLMEISTCETEASEQWDYVLVAQRHTQRDPRQARQQQFLEELRRKGFHIKVIRDQKQVFFGIRADNSVFGLYRTFLLEPEGPAPHAELAAPTTIPVTTSLRIRIVNFVVMNNKTSAGETFEDLMKDGVFEARFPLHKGEGRLKKTWARWRHMFREQPVDEIRNYFGEKVALYFVWLGWYTYMLVPAALTGLLVFLSGFSLFEASQISKEICEAHDILMCPLGDHSRRYQRLSETCTFAKLTHLFDNDGTVVFAIFMALWATVFLEIWKRQRARVVLHWDLYVWDEEQEEMALQLINCPDYKLRPYQHSYLRSTVILVLTLLMICLMIGMAHVLVVYRVLASALFSSSAVPFLEEQVTTAVVVTGALVHYVTIIIMTKINRCSGLCLKSQHFGRLRQADHLRSGVQDQTGQHEETPSLLARRGGVSL

SEQ ID NO: 10581 - protein, 198 aa, Artificial Sequence
  Synthetic polypeptide
MARDWIRPQRASDCWSGKQQLFQIIIIIIISPPCCCVDDTWAQAEVGPVTSCTGFVEGSSRTGGMGSACIKVTKYFLFLFNLIFFILGAVILGFGVWILADKSSFISVLQTSSSSLRMGAYVFIGVGAVTMLMGFLGCIGAVNEVRCLLGLYFAFLLLILIAQVTAGALFYFNMGKLCGLGQAACLYVPVPPSVKWKQ

SEQ ID NO: 10582 - protein, 115 aa, Artificial Sequence
  Synthetic polypeptide
MEILGAVILGFGVWILADKSSFISVLQTSSSSLRMGAYVFIGVGAVTMLMGFLGCIGAVNEVRCLLGLYFAFLLLILIAQVTAGALFYFNMGKLCGLGQAACLYVPVPPSVKWKQ

SEQ ID NO: 10583 - protein, 134 aa, Artificial Sequence
  Synthetic polypeptide
MGSACIKVTKYFLFLFNLIFFILGAVILGFGVWILADKSSFISVLQTSSSSLRMGAYVFIGVGAVTMLMGFLGCIGAVNEVRCLLGLYFAFLLLILIAQVTAGALFYFNMGKLCGLGQAACLYVPVPPSVKWKQ

SEQ ID NO: 10584 - protein, 175 aa, Artificial Sequence
  Synthetic polypeptide
MPLVINQSPPCCCVDDTWAQAEVGPVTSCTGFVEGSSRTGGMGSACIKVTKYFLFLFNLIFFILGAVILGFGVWILADKSSFISVLQTSSSSLRMGAYVFIGVGAVTMLMGFLGCIGAVNEVRCLLGLYFAFLLLILIAQVTAGALFYFNMGKLCGLGQAACLYVPVPPSVKWKQ

SEQ ID NO: 10585 - protein, 656 aa, Artificial Sequence
  Synthetic polypeptide
MAEGQGGGGQRWDWAGGGRAAEEEVVRRRCRRGEEAQVAQPWPEGSRGTAAGPPVEERFRQLHLRKQVSYRKAITKSGLQHLAPPPPTPGAPCSESERQIRSTVDWSESATYGEHIWFETNVSGDFCYVGEQYCVARMLKSVSRRKCAACKIVVHTPCIEQLEKINFRCKPSFRESGSRNVREPTFVRHHWVHRRRQDGKCRHCGKGFQQKFTFHSKEIVAISCSWCKQAYHSKVSCFMLQQIEEPCSLGVHAAVVIPPTWILRARRPQNTLKASKKKKRASFKRKSSKKGPEEGRWRPFIIRPTPSPLMKPLLVFVNPKSGGNQGAKIIQSFLWYLNPRQVFDLSQGGPKEALEMYRKVHNLRILACGGDGTVGWILSTLDQLRLKPPPPVAILPLGTGNDLARTLNWGGGYTDEPVSKILSHVEEGNVVQLDRWDLHAEPNPEAGPEDRDEGATDRLPLDVFNNYFSLGFDAHVTLEFHESREANPEKFNSRFRNKMFYAGTAFSDFLMGSSKDLAKHIRVVCDGMDLTPKIQDLKPQCVVFLNIPRYCAGTMPWGHPGEHHDFEPQRHDDGYLEVIGFTMTSLAALQVGGHGERLTQCREVVLTTSKAIPVQVDGEPCKLAASRIRIALRNQATMVQKAKRRSAAPLHSEGVG

SEQ ID NO: 10586 - protein, 639 aa, Artificial Sequence
  Synthetic polypeptide
MEPRDGSPEARSSDSESASASSSGSERDAGPEPDKAPRRLNKRRFPGLRLFGHRKAITKSGLQHLAPPPPTPGAPCSESERQIRSTVDWSESATYGEHIWFETNVSGDFCYVGEQYCVARMLKSVSRRKCAACKIVVHTPCIEQLEKINFRCKPSFRESGSRNVREPTFVRHHWVHRRRQDGKCRHCGKGFQQKFTFHSKEIVAISCSWCKQAYHSKVSCFMLQQIEEPCSLGVHAAVVIPPTWILRARRPQNTLKASKKKKRASFKRKSSKKGPEEGRWRPFIIRPTPSPLMKPLLVFVNPKSGGNQGAKIIQSFLWYLNPRQVFDLSQGGPKEALEMYRKVHNLRILACGGDGTVGWILSTLDQLRLKPPPPVAILPLGTGNDLARTLNWGGGYTDEPVSKILSHVEEGNVVQLDRWDLHAEPNPEAGPEDRDEGATDRLPLDVFNNYFSLGFDAHVTLEFHESREANPEKFNSRFRNKMFYAGTAFSDFLMGSSKDLAKHIRVVCDGMDLTPKIQDLKPQCVVFLNIPRYCAGTMPWGHPGEHHDFEPQRHDDGYLEVIGFTMTSLAALQVGGHGERLTQCREVVLTTSKAIPVQVDGEPCKLAASRIRIALRNQATMVQKAKRRSAAPLHSEGVG

SEQ ID NO: 10587 - protein, 617 aa, Artificial Sequence
  Synthetic polypeptide
MEPRDGSPEARSSDSESASASSSGSERDAGPEPDKAPRRLNKRRFPGLRLFGHRKAITKSGLQHLAPPPPTPGAPCSESERQIRSTVDWSESATYGEHIWFETNVSGDFCYVGEQYCVARMLQKSVSRRKCAACKIVVHTPCIEQLEKINFRCKPSFRESGSRNVREGFQQKFTFHSKEIVAISCSWCKQAYHSKVSCFMLQQIEEPCSLGVHAAVVIPPTWILRARRPQNTLKASKKKKRASFKRKSSKKGPEEGRWRPFIIRPTPSPLMKPLLVFVNPKSGGNQGAKIIQSFLWYLNPRQVFDLSQGGPKEALEMYRKVHNLRILACGGDGTVGWILSTLDQLRLKPPPPVAILPLGTGNDLARTLNWGGGYTDEPVSKILSHVEEGNVVQLDRWDLHAEPNPEAGPEDRDEGATDRLPLDVFNNYFSLGFDAHVTLEFHESREANPEKFNSRFRNKMFYAGTAFSDFLMGSSKDLAKHIRVVCDGMDLTPKIQDLKPQCVVFLNIPRYCAGTMPWGHPGEHHDFEPQRHDDGYLEVIGFTMTSLAALQVGGHGERLTQCREVVLTTSKAIPVQVDGEPCKLAASRIRIALRNQATMVQKAKRRSAAPLHSEGVG

SEQ ID NO: 10588 - protein, 640 aa, Artificial Sequence
  Synthetic polypeptide
MEPRDGSPEARSSDSESASASSSGSERDAGPEPDKAPRRLNKRRFPGLRLFGHRKAITKSGLQHLAPPPPTPGAPCSESERQIRSTVDWSESATYGEHIWFETNVSGDFCYVGEQYCVARMLQKSVSRRKCAACKIVVHTPCIEQLEKINFRCKPSFRESGSRNVREPTFVRHHWVHRRRQDGKCRHCGKGFQQKFTFHSKEIVAISCSWCKQAYHSKVSCFMLQQIEEPCSLGVHAAVVIPPTWILRARRPQNTLKASKKKKRASFKRKSSKKGPEEGRWRPFIIRPTPSPLMKPLLVFVNPKSGGNQGAKIIQSFLWYLNPRQVFDLSQGGPKEALEMYRKVHNLRILACGGDGTVGWILSTLDQLRLKPPPPVAILPLGTGNDLARTLNWGGGYTDEPVSKILSHVEEGNVVQLDRWDLHAEPNPEAGPEDRDEGATDRLPLDVFNNYFSLGFDAHVTLEFHESREANPEKFNSRFRNKMFYAGTAFSDFLMGSSKDLAKHIRVVCDGMDLTPKIQDLKPQCVVFLNIPRYCAGTMPWGHPGEHHDFEPQRHDDGYLEVIGFTMTSLAALQVGGHGERLTQCREVVLTTSKAIPVQVDGEPCKLAASRIRIALRNQATMVQKAKRRSAAPLHSEGVG

SEQ ID NO: 10589 - protein, 828 aa, Artificial Sequence
  Synthetic polypeptide
METFFRRHFRGKVPGPGEGQQRPSSVGLPTGKARRRSPAGQASSSLAQRRRSSAQLQGCLLSCGVRAQGSSRRRSSTVPPSCNPRFIVDKVLTPQPTTVGAQLLGAPLLLTGLVGMNEEEGVQEDVVAEASSAIQPGTKTPGPPPPRGAQPLLPLPRYLRRASSHLLPADAVYDHALWGLHGYYRRLSQRRPSGQHPGPGGRRASGTTAGTMLPTRVRPLSRRRQVALRRKAAGPQAWSALLAKAITKSGLQHLAPPPPTPGAPCSESERQIRSTVDWSESATYGEHIWFETNVSGDFCYVGEQYCVARMLKSVSRRKCAACKIVVHTPCIEQLEKINFRCKPSFRESGSRNVREPTFVRHHWVHRRRQDGKCRHCGKGFQQKFTFHSKEIVAISCSWCKQAYHSKVSCFMLQQIEEPCSLGVHAAVVIPPTWILRARRPQNTLKASKKKKRASFKRKSSKKGPEEGRWRPFIIRPTPSPLMKPLLVFVNPKSGGNQGAKIIQSFLWYLNPRQVFDLSQGGPKEALEMYRKVHNLRILACGGDGTVGWILSTLDQLRLKPPPPVAILPLGTGNDLARTLNWGGGYTDEPVSKILSHVEEGNVVQLDRWDLHAEPNPEAGPEDRDEGATDRLPLDVFNNYFSLGFDAHVTLEFHESREANPEKFNSRFRNKMFYAGTAFSDFLMGSSKDLAKHIRVVCDGMDLTPKIQDLKPQCVVFLNIPRYCAGTMPWGHPGEHHDFEPQRHDDGYLEVIGFTMTSLAALQVGGHGERLTQCREVVLTTSKAIPVQVDGEPCKLAASRIRIALRNQATMVQKAKRRSAAPLHSEGVG

SEQ ID NO: 10590 - protein, 418 aa, Artificial Sequence
  Synthetic polypeptide
MLQQIEEPCSLGVHAAVVIPPTWILRARRPQNTLKASKKKKRASFKRKSSKKGPEEGRWRPFIIRPTPSPLMKPLLVFVNPKSGGNQGAKIIQSFLWYLNPRQVFDLSQGGPKEALEMYRKVHNLRILACGGDGTVGWILSTLDQLRLKPPPPVAILPLGTGNDLARTLNWGGGYTDEPVSKILSHVEEGNVVQLDRWDLHAEPNPEAGPEDRDEGATDRLPLDVFNNYFSLGFDAHVTLEFHESREANPEKFNSRFRNKMFYAGTAFSDFLMGSSKDLAKHIRVVCDGMDLTPKIQDLKPQCVVFLNIPRYCAGTMPWGHPGEHHDFEPQRHDDGYLEVIGFTMTSLAALQVGGHGERLTQCREVVLTTSKAIPVQVDGEPCKLAASRIRIALRNQATMVQKAKRRSAAPLHSEGVG

SEQ ID NO: 10591 - protein, 644 aa, Artificial Sequence
  Synthetic polypeptide
MSAPGAGHSAGGSCNESSALGPVEALGTEEGERPGSLRQMWRYRSWDVPQIPSEAPQTQKAITKSGLQHLAPPPPTPGAPCSESERQIRSTVDWSSATYGEHIWFETNVSGDFCYVGEQYCVARMLQKSVSRRKCAACKIVVHTPCIEQLEKINFRCKPSFRESGSRNVREPTFVRHHWVHRRRQDGKCRHCGKGFQQKFTFHSKEIVAISCSWCKQAYHSKVSCFMLQQIEEPCSLGVHAAVVIPPTWILRARRPQNTLKASKKKKRASFKRKSSKKGPEEGRWRPFIIRPTPSPLMKPLLVFVNPKSGGNQGAKIIQSFLWYLNPRQVFDLSQGGPKEALEMYRKVHNLRILACGGDGTVGWILSTLDQLRLKPPPPVAILPLGTGNDLARTLNWGGGYTDEPVSKILSHVEEGNVVQLDRWDLHAEPNPEAGPEDRDEGATDRLPLDVFNNYFSLGFDAHVTLEFHESREANPEKFNSRFRNKMFYAGTAFSDFLMGSSKDLAKHIRVVCDGMDLTPKIQDLKPQCVVFLNIPRYCAGTMPWGHPGEHHDFEPQRHDDGYLEVIGFTMTSLAALQVGGHGERLTQCREVVLTTSKAIPVQVDGEPCKLAASRIRIALRNQATMVQKAKRRSAAPLHSEGVG

SEQ ID NO: 10592 - protein, 606 aa, Artificial Sequence
  Synthetic polypeptide
MWRYRSWDVPQIPSEAPQTQKAITKSGLQHLAPPPPTPGAPCSESERQIRSTVDWSESATYGEHIWFETNVSGDFCYVGEQYCVARMLQKSVSRRKCAACKIVVHTPCIEQLEKINFRCKPSFRESGSRNVREPTFVRHHWVHRRRQDGKCRHCGKGFQQKFTFHSKEIVAISCSWCKQAYHSKVSCFMLQQIEEPCSLGVHAAVVIPPTWILRARRPQNTLKASKKKKRASFKRKSSKKGPEEGRWRPFIIRPTPSPLMKPLLVFVNPKSGGNQGAKIIQSFLWYLNPRQVFDLSQGGPKEALEMYRKVHNLRILACGGDGTVGWILSTLDQLRLKPPPPVAILPLGTGNDLARTLNWGGGYTDEPVSKILSHVEEGNVVQLDRWDLHAEPNPEAGPEDRDEGATDRLPLDVFNNYFSLGFDAHVTLEFHESREANPEKFNSRFRNKMFYAGTAFSDFLMGSSKDLAKHIRVVCDGMDLTPKIQDLKPQCVVFLNIPRYCAGTMPWGHPGEHHDFEPQRHDDGYLEVIGFTMTSLAALQVGGHGERLTQCREVVLTTSKAIPVQVDGEPCKLAASRIRIALRNQATMVQKAKRRSAAPLHSEGVG

SEQ ID NO: 10593 - protein, 195 aa, Artificial Sequence
  Synthetic polypeptide
  misc_feature (1)..(1): Xaa can be any naturally occurring amino acid
XRNKMFYAGTAFSDFLMGSSKDLAKHIRVVVSGARLPWVGGPEGREAEATWHMHLNTLPARLQCDGMDLTPKIQDLKPQCVVFLNIPRYCAGTMPWGHPGEHHDFEPQRHDDGYLEVIGFTMTSLAALQVGGHGERLTQCREVVLTTSKAIPVQVDGEPCKLAASRIRIALRNQATMVQKAKRRSAAPLHSEGVG

SEQ ID NO: 10594 - protein, 797 aa, Artificial Sequence
  Synthetic polypeptide
MAEGQGGGGQRWDWAGGGRAAEEEVVRRRCRRGEEAQVAQPWPEGSRGTAAGPPVEERFRQLHLRKQVSYRKAITKSGLQHLAPPPPTPGAPCSESERQIRSTVDWSESATYGEHIWFETNVSGDFCYVGEQYCVARMLKSVSRRKCAACKIVVHTPCIEQLEKINFRCKPSFRESGSRNVREPTFVRHHWVHRRRQDGKCRHCGKGFQQKFTFHSKEIVAISCSWCKQAYHSKVSCFMLQQIEEPCSLGVHAAVVIPPTWILRARRPQNTLKASKKKKRASFKRKSSKKGPEEGRWRPFIIRPTPSPLMKPLLVFVNPKSGGNQGAKIIQSFLWYLNPRQVFDLSQGGPKEALEMYRKVHNLRILACGGDGTVGWILSTLDQLRLKPPPPVAILPLGTGNDLARTLNWGGGYTDEPVSKILSHVEEGNVVQLDRWDLHAEPNPEAGPEDRDEGATDRLPLDVFNNYFSLGFDAHVTLEFHESREANPEKFNSRFRNKMFYAGTAFSDFLMGSSKDLAKHIRVVCDGMDLTPKIQDLKPQCVVFLNIPRYCAGTMPWGHPGEHHDFEPQRHDDGYLEVIGFTMTSLAALQVGGHGERLTQCREVVLTTSKAIPVQVDGEPCKLAASRIRIALRNQATMVQKAKRRSAAPLHSDQQPVPEQLRIQVSRVSMHDYEALHYDKEQLKEASVPLGTVVVPGDSDLELCRAHIERLQQEPDGAGAKSPTCQKLSPKWCFLDATTASRFYRIDRAQEHLNYVTEIAQDEIYILDPELLGASARPDLPTPTSPLPTSPCSPTPR

SEQ ID NO: 10595 - protein, 780 aa, Artificial Sequence
  Synthetic polypeptide
MEPRDGSPEARSSDSESASASSSGSERDAGPEPDKAPRRLNKRRFPGLRLFGHRKAITKSGLQHLAPPPPTPGAPCSESERQIRSTVDWSESATYGEHIWFETNVSGDFCYVGEQYCVARMLKSVSRRKCAACKIVVHTPCIEQLEKINFRCKPSFRESGSRNVREPTFVRHHWVHRRRQDGKCRHCGKGFQQKFTFHSKEIVAISCSWCKQAYHSKVSCFMLQQIEEPCSLGVHAAVVIPPTWILRARRPQNTLKASKKKKRASFKRKSSKKGPEEGRWRPFIIRPTPSPLMKPLLVFVNPKSGGNQGAKIIQSFLWYLNPRQVFDLSQGGPKEALEMYRKVHNLRILACGGDGTVGWILSTLDQLRLKPPPPVAILPLGTGNDLARTLNWGGGYTDEPVSKILSHVEEGNVVQLDRWDLHAEPNPEAGPEDRDEGATDRLPLDVFNNYFSLGFDAHVTLEFHESREANPEKFNSRFRNKMFYAGTAFSDFLMGSSKDLAKHIRVVCDGMDLTPKIQDLKPQCVVFLNIPRYCAGTMPWGHPGEHHDFEPQRHDDGYLEVIGFTMTSLAALQVGGHGERLTQCREVVLTTSKAIPVQVDGEPCKLAASRIRIALRNQATMVQKAKRRSAAPLHSDQQPVPEQLRIQVSRVSMHDYEALHYDKEQLKEASVPLGTVVVPGDSDLELCRAHIERLQQEPDGAGAKSPTCQKLSPKWCFLDATTASRFYRIDRAQEHLNYVTEIAQDEIYILDPELLGASARPDLPTPTSPLPTSPCSPTPR

SEQ ID NO: 10596 - protein, 758 aa, Artificial Sequence
  Synthetic polypeptide
MEPRDGSPEARSSDSESASASSSGSERDAGPEPDKAPRRLNKRRFPGLRLFGHRKAITKSGLQHLAPPPPTPGAPCSESERQIRSTVDWSESATYGEHIWFETNVSGDFCYVGEQYCVARMLQKSVSRRKCAACKIVVHTPCIEQLEKINFRCKPSFRESGSRNVREGFQQKFTFHSKEIVAISCSWCKQAYHSKVSCFMLQQIEEPCSLGVHAAVVIPPTWILRARRPQNTLKASKKKKRASFKRKSSKKGPEEGRWRPFIIRPTPSPLMKPLLVFVNPKSGGNQGAKIIQSFLWYLNPRQVFDLSQGGPKEALEMYRKVHNLRILACGGDGTVGWILSTLDQLRLKPPPPVAILPLGTGNDLARTLNWGGGYTDEPVSKILSHVEEGNVVQLDRWDLHAEPNPEAGPEDRDEGATDRLPLDVFNNYFSLGFDAHVTLEFHESREANPEKFNSRFRNKMFYAGTAFSDFLMGSSKDLAKHIRVVCDGMDLTPKIQDLKPQCVVFLNIPRYCAGTMPWGHPGEHHDFEPQRHDDGYLEVIGFTMTSLAALQVGGHGERLTQCREVVLTTSKAIPVQVDGEPCKLAASRIRIALRNQATMVQKAKRRSAAPLHSDQQPVPEQLRIQVSRVSMHDYEALHYDKEQLKEASVPLGTVVVPGDSDLELCRAHIERLQQEPDGAGAKSPTCQKLSPKWCFLDATTASRFYRIDRAQEHLNYVTEIAQDEIYILDPELLGASARPDLPTPTSPLPTSPCSPTPR

SEQ ID NO: 10597 - protein, 781 aa, Artificial Sequence [sequence omitted]

SEQ ID NO: 10598 - protein, 133 aa, Artificial Sequence
  Synthetic polypeptide
MEPRDGSPEARSSDSESASASSSGSERDAGPEPDKAPRRLNKRRFPGLRLFGHSKSKSPTCQKLSPKWCFLDATTASRFYRIDRAQEHLNYVTEIAQDEIYILDPELLGASARPDLPTPTSPLPTSPCSPTPR

SEQ ID NO: 10599 - protein, 969 aa, Artificial Sequence
  Synthetic polypeptide
METFFRRHFRGKVPGPGEGQQRPSSVGLPTGKARRRSPAGQASSSLAQRRRSSAQLQGCLLSCGVRAQGSSRRRSSTVPPSCNPRFIVDKVLTPQPTTVGAQLLGAPLLLTGLVGMNEEEGVQEDVVAEASSAIQPGTKTPGPPPPRGAQPLLPLPRYLRRASSHLLPADAVYDHALWGLHGYYRRLSQRRPSGQHPGPGGRRASGTTAGTMLPTRVRPLSRRRQVALRRKAAGPQAWSALLAKAITKSGLQHLAPPPPTPGAPCSESERQIRSTVDWSESATYGEHIWFETNVSGDFCYVGEQYCVARMLKSVSRRKCAACKIVVHTPCIEQLEKINFRCKPSFRESGSRNVREPTFVRHHWVHRRRQDGKCRHCGKGFQQKFTFHSKEIVAISCSWCKQAYHSKVSCFMLQQIEEPCSLGVHAAVVIPPTWILRARRPQNTLKASKKKKRASFKRKSSKKGPEEGRWRPFIIRPTPSPLMKPLLVFVNPKSGGNQGAKIIQSFLWYLNPRQVFDLSQGGPKEALEMYRKVHNLRILACGGDGTVGWILSTLDQLRLKPPPPVAILPLGTGNDLARTLNWGGGYTDEPVSKILSHVEEGNVVQLDRWDLHAEPNPEAGPEDRDEGATDRLPLDVFNNYFSLGFDAHVTLEFHESREANPEKFNSRFRNKMFYAGTAFSDFLMGSSKDLAKHIRVVCDGMDLTPKIQDLKPQCVVFLNIPRYCAGTMPWGHPGEHHDFEPQRHDDGYLEVIGFTMTSLAALQVGGHGERLTQCREVVLTTSKAIPVQVDGEPCKLAASRIRIALRNQATMVQKAKRRSAAPLHSDQQPVPEQLRIQVSRVSMHDYEALHYDKEQLKEASVPLGTVVVPGDSDLELCRAHIERLQQEPDGAGAKSPTCQKLSPKWCFLDATTASRFYRIDRAQEHLNYVTEIAQDEIYILDPELLGASARPDLPTPTSPLPTSPCSPTPR

SEQ ID NO: 10600 - protein, 559 aa, Artificial Sequence
  Synthetic polypeptide
MLQQIEEPCSLGVHAAVVIPPTWILRARRPQNTLKASKKKKRASFKRKSSKKGPEEGRWRPFIIRPTPSPLMKPLLVFVNPKSGGNQGAKIIQSFLWYLNPRQVFDLSQGGPKEALEMYRKVHNLRILACGGDGTVGWILSTLDQLRLKPPPPVAILPLGTGNDLARTLNWGGGYTDEPVSKILSHVEEGNVVQLDRWDLHAEPNPEAGPEDRDEGATDRLPLDVFNNYFSLGFDAHVTLEFHESREANPEKFNSRFRNKMFYAGTAFSDFLMGSSKDLAKHIRVVCDGMDLTPKIQDLKPQCVVFLNIPRYCAGTMPWGHPGEHHDFEPQRHDDGYLEVIGFTMTSLAALQVGGHGERLTQCREVVLTTSKAIPVQVDGEPCKLAASRIRIALRNQATMVQKAKRRSAAPLHSDQQPVPEQLRIQVSRVSMHDYEALHYDKEQLKEASVPLGTVVVPGDSDLELCRAHIERLQQEPDGAGAKSPTCQKLSPKWCFLDATTASRFYRIDRAQEHLNYVTEIAQDEIYILDPELLGASARPDLPTPTSPLPTSPCSPTPR

SEQ ID NO: 10601 - protein, 785 aa, Artificial Sequence
  Synthetic polypeptide
MSAPGAGHSAGGSCNESSALGPVEALGTEEGERPGSLRQMWRYRSWDVPQIPSEAPQTQKAITKSGLQHLAPPPPTPGAPCSESERQIRSTVDWSSATYGEHIWFETNVSGDFCYVGEQYCVARMLQKSVSRRKCAACKIVVHTPCIEQLEKINFRCKPSFRESGSRNVREPTFVRHHWVHRRRQDGKCRHCGKGFQQKFTFHSKEIVAISCSWCKQAYHSKVSCFMLQQIEEPCSLGVHAAVVIPPTWILRARRPQNTLKASKKKKRASFKRKSSKKGPEEGRWRPFIIRPTPSPLMKPLLVFVNPKSGGNQGAKIIQSFLWYLNPRQVFDLSQGGPKEALEMYRKVHNLRILACGGDGTVGWILSTLDQLRLKPPPPVAILPLGTGNDLARTLNWGGGYTDEPVSKILSHVEEGNVVQLDRWDLHAEPNPEAGPEDRDEGATDRLPLDVFNNYFSLGFDAHVTLEFHESREANPEKFNSRFRNKMFYAGTAFSDFLMGSSKDLAKHIRVVCDGMDLTPKIQDLKPQCVVFLNIPRYCAGTMPWGHPGEHHDFEPQRHDDGYLEVIGFTMTSLAALQVGGHGERLTQCREVVLTTSKAIPVQVDGEPCKLAASRIRIALRNQATMVQKAKRRSAAPLHSDQQPVPEQLRIQVSRVSMHDYEALHYDKEQLKEASVPLGTVVVPGDSDLELCRAHIERLQQEPDGAGAKSPTCQKLSPKWCFLDATTASRFYRIDRAQEHLNYVTEIAQDEIYILDPELLGASARPDLPTPTSPLPTSPCSPTPR

SEQ ID NO: 10602 - protein, 747 aa, Artificial Sequence
  Synthetic polypeptide
MWRYRSWDVPQIPSEAPQTQKAITKSGLQHLAPPPPTPGAPCSESERQIRSTVDWSESATYGEHIWFETNVSGDFCYVGEQYCVARMLQKSVSRRKCAACKIVVHTPCIEQLEKINFRCKPSFRESGSRNVREPTFVRHHWVHRRRQDGKCRHCGKGFQQKFTFHSKEIVAISCSWCKQAYHSKVSCFMLQQIEEPCSLGVHAAVVIPPTWILRARRPQNTLKASKKKKRASFKRKSSKKGPEEGRWRPFIIRPTPSPLMKPLLVFVNPKSGGNQGAKIIQSFLWYLNPRQVFDLSQGGPKEALEMYRKVHNLRILACGGDGTVGWILSTLDQLRLKPPPPVAILPLGTGNDLARTLNWGGGYTDEPVSKILSHVEEGNVVQLDRWDLHAEPNPEAGPEDRDEGATDRLPLDVFNNYFSLGFDAHVTLEFHESREANPEKFNSRFRNKMFYAGTAFSDFLMGSSKDLAKHIRVVCDGMDLTPKIQDLKPQCVVFLNIPRYCAGTMPWGHPGEHHDFEPQRHDDGYLEVIGFTMTSLAALQVGGHGERLTQCREVVLTTSKAIPVQVDGEPCKLAASRIRIALRNQATMVQKAKRRSAAPLHSDQQPVPEQLRIQVSRVSMHDYEALHYDKEQLKEASVPLGTVVVPGDSDLELCRAHIERLQQEPDGAGAKSPTCQKLSPKWCFLDATTASRFYRIDRAQEHLNYVTEIAQDEIYILDPELLGASARPDLPTPTSPLPTSPCSPTPR

SEQ ID NO: 10603 - protein, 284 aa, Artificial Sequence
  Synthetic polypeptide
MRRQWGALLLGALLCAHGLASSPECACGRSHFTCAVSALGECTCIPAQWQCDGDNDCGDHSDEDGCILPTCSPLDFHCDNGKCIRRSWVCDGDNDCEDDSDEQDCPPRECEEDEFPCQNGYCIRSLWHCDGDNDCGDNSDEQCDMRKCSDKEFRCSDGSCIAEHWYCDGDTDCKDGSDEENCPSAVPAPPCNLEEFQCAYGRCILDIYHCDGDDDCGDWSDESDCSSHQPCRSGEFMCDSGLCINAGWRCDGDADCDDQSDERNCTTREAEAGESLEPRRQRLQ

SEQ ID NO: 10604 - protein, 273 aa, Artificial Sequence; identical to SEQ ID NO: 728
  Synthetic polypeptide

SEQ ID NO: 10605 - protein, 389 aa, Artificial Sequence
  Synthetic polypeptide
MIRSSSQDSEVSNSSGETLGADSDLSSNAGDGPGGEGSVHLASSRGTLSDSEIETNSATSTIFGKAHSLKPSIKEKLAGSPIRTSEDVSQRVYLYEGLLGRDKGSMWDQLEDAAMETFSISKERSTLWDQMQFWEDAFLDAVMLEREGMGMDQGPQEMIDRYLSLGEHDRKRLEDDEDRLLATLLHNLISYMLLMKVNKNDIRKKVRRLMGKSHIGLVYSQQINEVLDQLANLNGRDLSIWSSGSRHMKKQTFVVHAGTDTNGDIFFMEVCDDCVVLRSNIGTVYERWWYEKLINMTYCPKTKVLCLWRRNGSETQLNKFYTKKCRELYYCVKDSMERAAARQQSIKPGPELGGEFPVQDLKTGEGGLLQVTLEGINLKFMHNQVLSKW

SEQ ID NO: 10606 - protein, 1473 aa, Artificial Sequence
  Synthetic polypeptide
MVQKKKFCPRLLDYLVIVGARHPSSDSVAQTPELLRRYPLEDHTEFPLPPDVVFFCQPEGCLSVRQRRMSLRDDTSFVFTLTDKDTGVTRYGICVNFYRSFQKRISKEKGEGGAGSRGKEGTHATCASEEGGTESSESGSSLQPLSADSTPDVNQSPRGKRRAKAGSRSRNSTLTSLCVLSHYPFFSTFRECLYTLKRLVDCCSERLLGKKLGIPRGVQRDTMWRIFTGSLLVEEKSSALLHDLREIEAWIYRLLRSPVPVSGQKRVDIEVLPQELQPALTFALPDPSRFTLVDFPLHLPLELLGVDACLQVLTCILLEHKVVLQSRDYNALSMSVMAFVAMIYPLEYMFPVIPLLPTCMASAEQLLLAPTPYIIGVPASFFLYKLDFKMPDDVWLVDLDSNRVIAPTNAEVLPILPEPESLELKKHLKQALASMSLNTQPILNLEKFHEGQEIPLLLGRPSNDLQSTPSTEFNPLIYGNDVDSVDVATRVAMVRFFNSANVLQGFQMHTRTLRLFPRPVVAFQAGSFLASRPRQTPFAEKLARTQAVEYFGEWILNPTNYAFQRIHNNMFDPALIGDKPKWYAHQLQPIHYRVYDSNSQLAEALSVPPERDSDSEPTDDSGSDSMDYDDSSSSYSSLGDFVSEMMKCDINGDTPNVDPLTHAALGDASEVEIDELQNQKEAEEPGPDSENSQENPPLRSSSSTTASSSPSTVIHGANSEPADSTEMDDKAAVGVSKPLPSVPPSIGKSNVDRRQAEIGEGAQKLLRPNSLRLASDSDAESDSRASSPNSTVSNTSTEGFGGIMSFASSLYRNHSTSFSLSNLTLPTKGAREKATPFPSLKGNRRALVDQKSSVIKHSPTVKREPPSPQGRSSNSSENQQFLKEVVHSVLDGQGVGWLNMKKVRRLLESEQLRVFVLSKLNRMVQSEDDARQDIIPDVEISRKVYKGMLDLLKCTVLSLEQSYAHAGLGGMASIFGLLEIAQTHYYSKEPDKRKRSPTESVNTPVGKDPGLAGRGDPKAMAQLRVPQLGPRAPSATGKGPKELDTRSLKEENFIASIGPEVIKPVFDLGETEEKKSQISADSGVSLTSSSQRTDQDSVIGVSPAVMIRSSSQDSEVSNSSGETLGADSDLSSNAGDGPGGEGSVHLASSRGTLSDSEIETNSATSTIFGKAHSLKPSIKEKLAGSPIRTSEDVSQRVYLYEGLLGKERSTLWDQMQFWEDAFLDAVMLEREGMGMDQGPQEMIDRYLSLGEHDRKRLEDDEDRLLATLLHNLISYMLLMKVNKNDIRKKVRRLMGKSHIGLVYSQQINEVLDQLANLNGRDLSIWSSGSRHMKKQTFVVHAGTDTNGDIFFMEVCDDCVVLRSNIGTVYERWWYEKLINMTYCPKTKVLCLWRRNGSETQLNKFYTKKCRELYYCVKDSMERAAARQQSIKPGPELGGEFPVQDLKTGEGGLLQVTLEGINLKFMHNQVLSKW

SEQ ID NO: 10607 - protein, 1477 aa, Artificial Sequence
  Synthetic polypeptide
MVQKKKFCPRLLDYLVIVGARHPSSDSVAQTPELLRRYPLEDHTEFPLPPDVVFFCQPEGCLSVRQRRMSLRDDTSFVFTLTDKDTGVTRYGICVNFYRSFQKRISKEKGEGGAGSRGKEGTHATCASEEGGTESSESGSSLQPLSADSTPDVNQSPRGKRRAKAGSRSRNSTLTSLCVLSHYPFFSTFRECLYTLKRLVDCCSERLLGKKLGIPRGVQRDTMWRIFTGSLLVEEKSSALLHDLREIEAWIYRLLRSPVPVSGQKRVDIEVLPQELQPALTFALPDPSRFTLVDFPLHLPLELLGVDACLQVLTCILLEHKVVLQSRDYNALSMSVMAFVAMIYPLEYMFPVIPLLPTCMASAEQLLLAPTPYIIGVPASFFLYKLDFKMPDDVWLVDLDSNRVIAPTNAEVLPILPEPESLELKKHLKQALASMSLNTQPILNLEKFHEGQEIPLLLGRPSNDLQSTPSTEFNPLIYGNDVDSVDVATRVAMVRFFNSANVLQGFQMHTRTLRLFPRPVVAFQAGSFLASRPRQTPFAEKLARTQAVEYFGEWILNPTNYAFQRIHNNMFDPALIGDKPKWYAHQLQPIHYRVYDSNSQLAEALSVPPERDSDSEPTDDSGSDSMDYDDSSSSYSSLGDFVSEMMKCDINGDTPNVDPLTHAALGDASEVEIDELQNQKEAEEPGPDSENSQENPPLRSSSSTTASSSPSTVIHGANSEPADSTEMDDKAAVGVSKPLPSVPPSIGKSNVDRRQAEIGEGAQKLLRPNSLRLASDSDAESDSRASSPNSTVSNTSTEGFGGIMSFASSLYRNHSTSFSLSNLTLPTKGAREKATPFPSLKGNRRALVDQKSSVIKHSPTVKREPPSPQGRSSNSSENQQFLKEVVHSVLDGQGVGWLNMKKVRRLLESEQLRVFVLSKLNRMVQSEDDARQDIIPDVEISRKVYKGMLDLLKCTVLSLEQSYAHAGLGGMASIFGLLEIAQTHYYSKEPDKRKRSPTESVNTPVGKDPGLAGRGDPKAMAQLRVPQLGPRAPSATGKGPKELDTRSLKEENFIASIGPEVIKPVFDLGETEEKKSQISADSGVSLTSSSQRTDQDSVIGVSPAVMIRSSSQDSEVSTVVSNSSGETLGADSDLSSNAGDGPGGEGSVHLASSRGTLSDSEIETNSATSTIFGKAHSLKPSIKEKLAGSPIRTSEDVSQRVYLYEGLLGKERSTLWDQMQFWEDAFLDAVMLEREGMGMDQGPQEMIDRYLSLGEHDRKRLEDDEDRLLATLLHNLISYMLLMKVNKNDIRKKVRRLMGKSHIGLVYSQQINEVLDQLANLNGRDLSIWSSGSRHMKKQTFVVHAGTDTNGDIFFMEVCDDCVVLRSNIGTVYERWWYEKLINMTYCPKTKVLCLWRRNGSETQLNKFYTKKCRELYYCVKDSMERAAARQQSIKPGPELGGEFPVQDLKTGEGGLLQVTLEGINLKFMHNQVLSKW

SEQ ID NO: 10608 - protein, 1497 aa, Artificial Sequence
  Synthetic polypeptide
MVQKKKFCPRLLDYLVIVGARHPSSDSVAQTPELLRRYPLEDHTEFPLPPDVVFFCQPEGCLSVRQRRMSLRDDTSFVFTLTDKDTGVTRYGICVNFYRSFQKRISKEKGEGGAGSRGKEGTHATCASEEGGTESSESGSSLQPLSADSTPDVNQSPRGKRRAKAGSRSRNSTLTSLCVLSHYPFFSTFRECLYTLKRLVDCCSERLLGKKLGIPRGVQRDTMWRIFTGSLLVEEKSSALLHDLREIEAWIYRLLRSPVPVSGQKRVDIEVLPQELQPALTFALPDPSRFTLVDFPLHLPLELLGVDACLQVLTCILLEHKVVLQSRDYNALSMSVMAFVAMIYPLEYMFPVIPLLPTCMASAEQLLLAPTPYIIGVPASFFLYKLDFKMPDDVWLVDLDSNRVIAPTNAEVLPILPEPESLELKKHLKQALASMSLNTQPILNLEKFHEGQEIPLLLGRPSNDLQSTPSTEFNPLIYGNDVDSVDVATRVAMVRFFNSANVLQGFQMHTRTLRLFPRPVVAFQAGSFLASRPRQTPFAEKLARTQAVEYFGEWILNPTNYAFQRIHNNMFDPALIGDKPKWYAHQLQPIHYRVYDSNSQLAEALSVPPERDSDSEPTDDSGSDSMDYDDSSSSYSSLGDFVSEMMKCDINGDTPNVDPLTHAALGDASEVEIDELQNQKEAEEPGPDSENSQENPPLRSSSSTTASSSPSTVIHGANSEPADSTEMDDKAAVGVSKPLPSVPPSIGKSNVDRRQAEIGEGAQKLLRPNSLRLASDSDAESDSRASSPNSTVSNTSTEGFGGIMSFASSLYRNHSTSFSLSNLTLPTKGAREKATPFPSLKVFGLNTLMEIVTEAGPGSGEGNRRALVDQKSSVIKHSPTVKREPPSPQGRSSNSSENQQFLKEVVHSVLDGQGVGWLNMKKVRRLLESEQLRVFVLSKLNRMVQSEDDARQDIIPDVEISRKVYKGMLDLLKCTVLSLEQSYAHAGLGGMASIFGLLEIAQTHYYSKEPDKRKRSPTESVNTPVGKDPGLAGRGDPKAMAQLRVPQLGPRAPSATGKGPKELDTRSLKEENFIASIGPEVIKPVFDLGETEEKKSQISADSGVSLTSSSQRTDQDSVIGVSPAVMIRSSSQDSEVSTVVSNSSGETLGADSDLSSNAGDGPGGEGSVHLASSRGTLSDSEIETNSATSTIFGKAHSLKPSIKEKLAGSPIRTSEDVSQRVYLYEGLLGKERSTLWDQMQFWEDAFLDAVMLEREGMGMDQGPQEMIDRYLSLGEHDRKRLEDDEDRLLATLLHNLISYMLLMKVNKNDIRKKVRRLMGKSHIGLVYSQQINEVLDQLANLNGRDLSIWSSGSRHMKKQTFVVHAGTDTNGDIFFMEVCDDCVVLRSNIGTVYERWWYEKLINMTYCPKTKVLCLWRRNGSETQLNKFYTKKCRELYYCVKDSMERAAARQQSIKPGPELGGEFPVQDLKTGEGGLLQVTLEGINLKFMHNQVLSKW

SEQ ID NO: 10609 - protein, 1519 aa, Artificial Sequence
  Synthetic polypeptide
MVQKKKFCPRLLDYLVIVGARHPSSDSVAQTPELLRRYPLEDHTEFPLPPDVVFFCQPEGCLSVRQRRMSLRDDTSFVFTLTDKDTGVTRYGICVNFYRSFQKRISKEKGEGGAGSRGKEGTHATCASEEGGTESSESGSSLQPLSADSTPDVNQSPRGKRRAKAGSRSRNSTLTSLCVLSHYPFFSTFRECLYTLKRLVDCCSERLLGKKLGIPRGVQRDTMWRIFTGSLLVEEKSSALLHDLREIEAWIYRLLRSPVPVSGQKRVDIEVLPQELQPALTFALPDPSRFTLVDFPLHLPLELLGVDACLQVLTCILLEHKVVLQSRDYNALSMSVMAFVAMIYPLEYMFPVIPLLPTCMASAEQLLLAPTPYIIGVPASFFLYKLDFKMPDDVWLVDLDSNRVIAPTNAEVLPILPEPESLELKKHLKQALASMSLNTQPILNLEKFHEGQEIPLLLGRPSNDLQSTPSTEFNPLIYGNDVDSVDVATRVAMVRFFNSANVLQGFQMHTRTLRLFPRPVVAFQAGSFLASRPRQTPFAEKLARTQAVEYFGEWILNPTNYAFQRIHNNMFDPALIGDKPKWYAHQLQPIHYRVYDSNSQLAEALSVPPERDSDSEPTDDSGSDSMDYDDSSSSYSSLGDFVSEMMKCDINGDTPNVDPLTHAALGDASEVEIDELQNQKEAEEPGPDSENSQENPPLRSSSSTTASSSPSTVIHGANSEPADSTEMDDKAAVGVSKPLPSVPPSIGKSNVDRRQAEIGEGSVRRRIYDNPYFEPQYGFPPEEDEDEQGESYTPRFSQHVSGNRAQKLLRPNSLRLASDSDAESDSRASSPNSTVSNTSTEGFGGIMSFASSLYRNHSTSFSLSNLTLPTKGAREKATPFPSLKGNRRALVDQKSSVIKHSPTVKREPPSPQGRSSNSSENQQFLKEVVHSVLDGQGVGWLNMKKVRRLLESEQLRVFVLSKLNRMVQSEDDARQDIIPDVEISRKVYKGMLDLLKCTVLSLEQSYAHAGLGGMASIFGLLEIAQTHYYSKEPDKRKRSPTESVNTPVGKDPGLAGRGDPKAMAQLRVPQLGPRAPSATGKGPKELDTRSLKEENFIASIGPEVIKPVFDLGETEEKKSQISADSGVSLTSSSQRTDQDSVIGVSPAVMIRSSSQDSEVSTVSNSSGETLGADSDLSSNAGDGPGGEGSVHLASSRGTLSDSEIETNSATSTIFGKAHSLKPSIKEKLAGSPIRTSEDVSQRVYLYEGLLGKERSTLWDQMQFWEDAFLDAVMLEREGMGMDQGPQEMIDRYLSLGEHDRKRLEDDEDRLLATLLHNLISYMLLMKVNKNDIRKKVRRLMGKSHIGLVYSQQINEVLDQLANLNGRDLSIWSSGSRHMKKQTFVVHAGTDTNGDIFFMEVCDDCVVLRSNIGTVYERWWYEKLINMTYCPKTKVLCLWRRNGSETQLNKFYTKKCRELYYCVKDSMERAAARQQSIKPGPELGGEFPVQDLKTGEGGLLQVTLEGINLKFMHNQVLSKW

SEQ ID NO: 10610 - protein, 1520 aa, Artificial Sequence
  Synthetic polypeptide
MVQKKKFCPRLLDYLVIVGARHPSSDSVAQTPELLRRYPLEDHTEFPLPPDVVFFCQPEGCLSVRQRRMSLRDDTSFVFTLTDKDTGVTRYGICVNFYRSFQKRISKEKGEGGAGSRGKEGTHATCASEEGGTESSESGSSLQPLSADSTPDVNQSPRGKRRAKAGSRSRNSTLTSLCVLSHYPFFSTFRECLYTLKRLVDCCSERLLGKKLGIPRGVQRDTMWRIFTGSLLVEEKSSALLHDLREIEAWIYRLLRSPVPVSGQKRVDIEVLPQELQPALTFALPDPSRFTLVDFPLHLPLELLGVDACLQVLTCILLEHKVVLQSRDYNALSMSVMAFVAMIYPLEYMFPVIPLLPTCMASAEQLLLAPTPYIIGVPASFFLYKLDFKMPDDVWLVDLDSNRVIAPTNAEVLPILPEPESLELKKHLKQALASMSLNTQPILNLEKFHEGQEIPLLLGRPSNDLQSTPSTEFNPLIYGNDVDSVDVATRVAMVRFFNSANVLQGFQMHTRTLRLFPRPVVAFQAGSFLASRPRQTPFAEKLARTQAVEYFGEWILNPTNYAFQRIHNNMFDPALIGDKPKWYAHQLQPIHYRVYDSNSQLAEALSVPPERDSDSEPTDDSGSDSMDYDDSSSSYSSLGDFVSEMMKCDINGDTPNVDPLTHAALGDASEVEIDELQNQKEAEEPGPDSENSQENPPLRSSSSTTASSSPSTVIHGANSEPADSTEMDDKAAVGVSKPLPSVPPSIGKSNVDRRQAEIGEGSVRRRIYDNPYFEPQYGFPPEEDEDEQGESYTPRFSQHVSGNRAQKLLRPNSLRLASDSDAESDSRASSPNSTVSNTSTEGFGGIMSFASSLYRNHSTSFSLSNLTLPTKGAREKATPFPSLKGNRRALVDQKSSVIKHSPTVKREPPSPQGRSSNSSENQQFLKEVVHSVLDGQGVGWLNMKKVRRLLESEQLRVFVLSKLNRMVQSEDDARQDIIPDVEISRKVYKGMLDLLKCTVLSLEQSYAHAGLGGMASIFGLLEIAQTHYYSKEPDKRKRSPTESVNTPVGKDPGLAGRGDPKAMAQLRVPQLGPRAPSATGKGPKELDTRSLKEENFIASIGPEVIKPVFDLGETEEKKSQISADSGVSLTSSSQRTDQDSVIGVSPAVMIRSSSQDSEVSTVVSNSSGETLGADSDLSSNAGDGPGGEGSVHLASSRGTLSDSEIETNSATSTIFGKAHSLKPSIKEKLAGSPIRTSEDVSQRVYLYEGLLGKERSTLWDQMQFWEDAFLDAVMLEREGMGMDQGPQEMIDRYLSLGEHDRKRLEDDEDRLLATLLHNLISYMLLMKVNKNDIRKKVRRLMGKSHIGLVYSQQINEVLDQLANLNGRDLSIWSSGSRHMKKQTFVVHAGTDTNGDIFFMEVCDDCVVLRSNIGTVYERWWYEKLINMTYCPKTKVLCLWRRNGSETQLNKFYTKKCRELYYCVKDSMERAAARQQSIKPGPELGGEFPVQDLKTGEGGLLQVTLEGINLKFMHNQVLSKW

SEQ ID NO: 10611 - protein, 1579 aa, Artificial Sequence
  Synthetic polypeptide
MVQKKKFCPRLLDYLVIVGARHPSSDSVAQTPELLRRYPLEDHTEFPLPPDVVFFCQPEGCLSVRQRRMSLRDDTSFVFTLTDKDTGVTRYGICVNFYRSFQKRISKEKGEGGAGSRGKEGTHATCASEEGGTESSESGSSLQPLSADSTPDVNQSPRGKRRAKAGSRSRNSTLTSLCVLSHYPFFSTFRECLYTLKRLVDCCSERLLGKKLGIPRGVQRDTMWRIFTGSLLVEEKSSALLHDLREIEAWIYRLLRSPVPVSGQKRVDIEVLPQELQPALTFALPDPSRFTLVDFPLHLPLELLGVDACLQVLTCILLEHKVVLQSRDYNALSMSVMAFVAMIYPLEYMFPVIPLLPTCMASAEQLLLAPTPYIIGVPASFFLYKLDFKMPDDVWLVDLDSNRVIAPTNAEVLPILPEPESLELKKHLKQALASMSLNTQPILNLEKFHEGQEIPLLLGRPSNDLQSTPSTEFNPLIYGNDVDSVDVATRVAMVRFFNSANVLQGFQMHTRTLRLFPRPVVAFQAGSFLASRPRQTPFAEKLARTQAVEYFGEWILNPTNYAFQRIHNNMFDPALIGDKPKWYAHQLQPIHYRVYDSNSQLAEALSVPPERDSDSEPTDDSGSDSMDYDDSSSSYSSLGDFVSEMMKCDINGDTPNVDPLTHAALGDASEVEIDELQNQKEAEEPGPDSENSQENPPLRSSSSTTASSSPSTVIHGANSEPADSTEMDDKAAVGVSKPLPSVPPSIGKSNVDRRQAEIGEGSVRRRIYDNPYFEPQYGFPPEEDEDEQGESYTPRFSQHVSGNRAQKLLRPNSLRLASDSDAESDSRASSPNSTVSNTSTEGFGGIMSFASSLYRNHSTSFSLSNLTLPTKGAREKATPFPSLKVFGLNTLMEIVTEAGPGSGEGNRRALVDQKSSVIKHSPTVKREPPSPQGRSSNSSENQQFLKEVVHSVLDGQGVGWLNMKKVRRLLESEQLRVFVLSKLNRMVQSEDDARQDIIPDVEISRKVYKGMLDLLKCTVLSLEQSYAHAGLGGMASIFGLLEIAQTHYYSKEPDKRKRSPTESVNTPVGKDPGLAGRGDPKAMAQLRVPQLGPRAPSATGKGPKELDTRSLKEENFIASIELWNKHQEVKKQKALEKQRPEVIKPVFDLGETEEKKSQISADSGVSLTSSSQRTDQDSVIGVSPAVMIRSSSQDSEVSTVVSNSSGETLGADSDLSSNAGDGPGGEGSVHLASSRGTLSDSEIETNSATSTIFGKAHSLKPSIKEKLAGSPIRTSEDVSQRVYLYEGLLGRDKGSMWDQLEDAAMETFSISKERSTLWDQMQFWEDAFLDAVMLEREGMGMDQGPQEMIDRYLSLGEHDRKRLEDDEDRLLATLLHNLISYMLLMKVNKNDIRKKVRRLMGKSHIGLVYSQQINEVLDQLANLNGRDLSIWSSGSRHMKKQTFVVHAGTDTNGDIFFMEVCDDCVVLRSNIGTVYERWWYEKLINMTYCPKTKVLCLWRRNGSETQLNKFYTKKCRELYYCVKDSMERAAARQQSIKPGPELGGEFPVQDLKTGEGGLLQVTLEGINLKFMHNQVLSKW

SEQ ID NO: 10612 - protein, 1540 aa, Artificial Sequence
  Synthetic polypeptide
MVQKKKFCPRLLDYLVIVGARHPSSDSVAQTPELLRRYPLEDHTEFPLPPDVVFFCQPEGCLSVRQRRMSLRDDTSFVFTLTDKDTGVTRYGICVNFYRSFQKRISKEKGEGGAGSRGKEGTHATCASEEGGTESSESGSSLQPLSADSTPDVNQSPRGKRRAKAGSRSRNSTLTSLCVLSHYPFFSTFRECLYTLKRLVDCCSERLLGKKLGIPRGVQRDTMWRIFTGSLLVEEKSSALLHDLREIEAWIYRLLRSPVPVSGQKRVDIEVLPQELQPALTFALPDPSRFTLVDFPLHLPLELLGVDACLQVLTCILLEHKVVLQSRDYNALSMSVMAFVAMIYPLEYMFPVIPLLPTCMASAEQLLLAPTPYIIGVPASFFLYKLDFKMPDDVWLVDLDSNRVIAPTNAEVLPILPEPESLELKKHLKQALASMSLNTQPILNLEKFHEGQEIPLLLGRPSNDLQSTPSTEFNPLIYGNDVDSVDVATRVAMVRFFNSANVLQGFQMHTRTLRLFPRPVVAFQAGSFLASRPRQTPFAEKLARTQAVEYFGEWILNPTNYAFQRIHNNMFDPALIGDKPKWYAHQLQPIHYRVYDSNSQLAEALSVPPERDSDSEPTDDSGSDSMDYDDSSSSYSSLGDFVSEMMKCDINGDTPNVDPLTHAALGDASEVEIDELQNQKEAEEPGPDSENSQENPPLRSSSSTTASSSPSTVIHGANSEPADSTEMDDKAAVGVSKPLPSVPPSIGKSNVDRRQAEIGEGSVRRRIYDNPYFEPQYGFPPEEDEDEQGESYTPRFSQHVSGNRAQKLLRPNSLRLASDSDAESDSRASSPNSTVSNTSTEGFGGIMSFASSLYRNHSTSFSLSNLTLPTKGAREKATPFPSLKVFGLNTLMEIVTEAGPGSGEGNRRALVDQKSSVIKHSPTVKREPPSPQGRSSNSSENQQFLKEVVHSVLDGQGVGWLNMKKVRRLLESEQLRVFVLSKLNRMVQSEDDARQDIIPDVEISRKVYKGMLDLLKCTVLSLEQSYAHAGLGGMASIFGLLEIAQTHYYSKEPDKRKRSPTESVNTPVGKDPGLAGRGDPKAMAQLRVPQLGPRAPSATGKGPKELDTRSLKEENFIASIGPEVIKPVFDLGETEEKKSQISADSGVSLTSSSQRTDQDSVIGVSPAVMIRSSSQDSEVSTVVSNSSGETLGADSDLSSNAGDGPGGEGSVHLASSRGTLSDSEIETNSATSTIFGKAHSLKPSIKEKLAGSPIRTSEDVSQRVYLYEGLLGKERSTLWDQMQFWEDAFLDAVMLEREGMGMDQGPQEMIDRYLSLGEHDRKRLEDDEDRLLATLLHNLISYMLLMKVNKNDIRKKVRRLMGKSHIGLVYSQQINEVLDQLANLNGRDLSIWSSGSRHMKKQTFVVHAGTDTNGDIFFMEVCDDCVVLRSNIGTVYERWWYEKLINMTYCPKTKVLCLWRRNGSETQLNKFYTKKCRELYYCVKDSMERAAARQQSIKPGPELGGEFPVQDLKTGEGGLLQVTLEGINLKFMHNQVLSKW

SEQ ID NO: 10613 - protein, 381 aa, Artificial Sequence
  Synthetic polypeptide
MGQDQTKQQIEKGLQLYQSNQTEKALQVWTKVLEKSSDLMGRFRVLGCLVTAHSEMGRYKEMLKFAVVQIDTARELEDADFLLESYLNLARSNEKLCEFHKTISYCKTCLGLPGTRAGAQLGGQVSLSMGNAFLGLSVFQKALESFEKALRYAHNNDDAMLECRVCCSLGSFYAQVKDYEKALFFPCKAAELVNNYGKGWSLKYRAMSQYHMAVAYRLLGRLGSAMECCEESMKIALQHGDRPLQALCLLCFADIHRSRGDLELSQLKLHCLSESIYRSKGLQRELRAHVVRFHECVEETELYCGLCGESIGEKNSRLQALPCSHIFHLRRGASRLSRKHFGRPRRADHLSPGVQDHLGQHGETPSLLKIQKLPRHGGGSL

SEQ ID NO: 10614 - protein, 440 aa, Artificial Sequence
  Synthetic polypeptide
MGQDQTKQQIEKGLQLYQSNQTEKALQVWTKVLEKSSDLMGRFRVLGCLVTAHSEMGRYKEMLKFAVVQIDTARELEDADFLLESYLNLARSNEKLCEFHKTISYCKTCLGLPGTRAGAQLGGQVSLSMGNAFLGLSVFQKALESFEKALRYAHNNDDAMLECRVCCSLGSFYAQVKDYEKALFFPCKAAELVNNYGKGWSLKYRAMSQYHMAVAYRLLGRLGSAMECCEESMKIALQHGDRPLQALCLLCFADIHRSRGDLETAFPRYDSAMSIMTEIGNRLGQVQALLGVAKCWVARKALDKALDAIERAQDLAEEVGNKLSQLKLHCLSESIYRSKGLQRELRAHVVRFHECVEETELYCGLCGESIGEKNSRLQALPCSHIFHLRRGASRLSRKHFGRPRRADHLSPGVQDHLGQHGETPSLLKIQKLPRHGGGSL

SEQ ID NO: 10615 - protein, 355 aa, Artificial Sequence
  Synthetic polypeptide
MGQDQTKQQIEKGLQLYQSNQTEKALQVWTKVLEKSSDLMGRFRVLGCLVTAHSEMGRYKEMLKFAVVQIDTARELEDADFLLESYLNLARSNEKLCEFHKTISYCKTCLGLPGTRAGAQLGGQVSLSMGNAFLGLSVFQKALESFEKALRYAHNNDDAMLECRVCCSLGSFYAQVKESMKIALQHGDRPLQALCLLCFADIHRSRGDLETAFPRYDSAMSIMTEIGNRLGQVQALLGVAKCWVARKALDKVRSGLSHSLQPSQHSPLGASRLAAQAALSEREHLPQQRAAAGTAGARCEVPRVRGGDGALLRPVRRVHRREEQPAAGPTLLPHLPPQAWCLTSVSQALWEAEAG

SEQ ID NO: 10616 - protein, 290 aa, Artificial Sequence
  Synthetic polypeptide
MNCISDFFTYETTKSVVVKSWTIGIINRVVQLLIISYFVGWVFLHEKAYQVRDTAIESSVVTKVKGSGLYANRVMDVSDYVTPPQGTSVFVIITKMIVTENQMQGFCPESEEKYRCVSDSQCGPERLPGGGILTGRCVNYSSVLRTCEIQGWCPTEVDTVETPIMMEAENFTIFIKNSIRFPLFNFEKGNLLPNLTARDMKTCRFHPDKDPFCPILRVGDVVKFAGQDFAKLARTGGVLGIKIGWVCDLDKAWDQCIPKYSFTRLDSVSEKSSVSPGYNFRKDSLTAIRI

SEQ ID NO: 10617 - protein, 30 aa, Artificial Sequence
  Synthetic polypeptide
MFLFVLANFSMATFMDPGIFPRGLAWWLTS

SEQ ID NO: 10618 - protein, 83 aa, Artificial Sequence
  Synthetic polypeptide
MPAESGKRFKPSKYVPVSAAAIFLVGATTLFFAFTCPGLSLYVSPAVPIYNAIMFLFVLANFSMATFMDPGIFPRGLAWWLTS

SEQ ID NO: 10619 - protein, 9 aa, Artificial Sequence
  Synthetic polypeptide
RGLAWWLTS

SEQ ID NO: 10620 - protein, 387 aa, Artificial Sequence
  Synthetic polypeptide
MEELDALLEELERSTLQDSDEYSNPAPLPLDQHSRKETNLDETSEILSIQDNTSPLPAQLVYTTNIQELNVYSEAQEPKESPPPSKTSAAAQLDELMAHLTEMQAKVAVRADAGKKHLPDKQDHKASLDSMLGGLEQELQDLGIATVPKGHCASCQKPIAGKVIHALGQSWHPEHFVCTHCKEEIGSSPFFERSGLAYCPNDYHQLFSPRCAYCAAPILDKVLTAMNQTWHPEHFFCSHCGEVFGAEGFHEKDKKPYCRKDFLAMFSPKCGGCNRPVLENYLSAMDTVWHPECFVCGDCFTSFSTGSFFELDGRPFCELHYHHRRGTLCHGCGQPITGRCISAMGRLPQPPQPSASIILISQQPSRPLTGKRKNYNSLKAQVIIIIF

SEQ ID NO: 10621 - protein, 367 aa, Artificial Sequence
  Synthetic polypeptide
MPYWRNWNAPPFRTVMNIPTQLLFPWISIPERRLTLMRLRRSFLFRITQVPCREAQEPKESPPPSKTSAAAQLDELMAHLTEMQAKVAVRADAGKKHLPDKQDHKASLDSMLGGLEQELQDLGIATVPKGHCASCQKPIAGKVIHALGQSWHPEHFVCTHCKEEIGSSPFFERSGLAYCPNDYHQLFSPRCAYCAAPILDKVLTAMNQTWHPEHFFCSHCGEVFGAEGFHEKDKKPYCRKDFLAMFSPKCGGCNRPVLENYLSAMDTVWHPECFVCGDCFTSFSTGSFFELDGRPFCELHYHHRRGTLCHGCGQPITGRCISAMGRLPQPPQPSASIILISQQPSRPLTGKRKNYNSLKAQVIIIIF

SEQ ID NO: 10622 - protein, 392 aa, Artificial Sequence
  Synthetic polypeptide
MSTLLISSSDALLEELERSTLQDSDEYSNPAPLPLDQHSRKETNLDETSEILSIQDNTSPLPAQLVYTTNIQELNVYSEAQEPKESPPPSKTSAAAQLDELMAHLTEMQAKVAVRADAGKKHLPDKQDHKASLDSMLGGLEQELQDLGIATVPKGHCASCQKPIAGKVIHALGQSWHPEHFVCTHCKEEIGSSPFFERSGLAYCPNDYHQLFSPRCAYCAAPILDKVLTAMNQTWHPEHFFCSHCGEVFGAEGFHEKDKKPYCRKDFLAMFSPKCGGCNRPVLENYLSAMDTVWHPECFVCGDCFTSFSTGSFFELDGRPFCELHYHHRRGTLCHGCGQPITGRCISAMGRLPQPPQPSASIILISQQPSRPLTGKRKNYNSLKAQVIIIIF

SEQ ID NO: 10623 - protein, 261 aa, Artificial Sequence
  Synthetic polypeptide
MEELDALLEELERSTLQDSDEYSNPAPLPLDQHSRKETNLDETSEILSIQDNTSPLPAQLVYTTNIQELNVYSEAQEPKESPPPSKTSAAAQLDELMAHLTEMQAKVAVRADAGKKHLPDKQDHKASLDSMLGGLEQELQDLGIATVPKGHCASCQKPIAGKVIHALGQSWHPEHFVCTHCKEEIGSSPFFERSGLAYCPNDYHQLFSPRCAYCAAPILDKVLTAMNQTWHPEHFFCSHCGEVFGAEGDCHNHLNLQQASS

SEQ ID NO: 10624 - protein, 241 aa, Artificial Sequence
  Synthetic polypeptide
MPYWRNWNAPPFRTVMNIPTQLLFPWISIPERRLTLMRLRRSFLFRITQVPCREAQEPKESPPPSKTSAAAQLDELMAHLTEMQAKVAVRADAGKKHLPDKQDHKASLDSMLGGLEQELQDLGIATVPKGHCASCQKPIAGKVIHALGQSWHPEHFVCTHCKEEIGSSPFFERSGLAYCPNDYHQLFSPRCAYCAAPILDKVLTAMNQTWHPEHFFCSHCGEVFGAEGDCHNHLNLQQASS

SEQ ID NO: 10625 - protein, 266 aa, Artificial Sequence
  Synthetic polypeptide
MSTLLISSSDALLEELERSTLQDSDEYSNPAPLPLDQHSRKETNLDETSEILSIQDNTSPLPAQLVYTTNIQELNVYSEAQEPKESPPPSKTSAAAQLDELMAHLTEMQAKVAVRADAGKKHLPDKQDHKASLDSMLGGLEQELQDLGIATVPKGHCASCQKPIAGKVIHALGQSWHPEHFVCTHCKEEIGSSPFFERSGLAYCPNDYHQLFSPRCAYCAAPILDKVLTAMNQTWHPEHFFCSHCGEVFGAEGDCHNHLNLQQASS

SEQ ID NO: 10626 - protein, 65 aa, Artificial Sequence
  Synthetic polypeptide
MEELDALLEELERSTLQDSDEYSNPAPLPLDQHSRKETNLDETSEILSIQDNTSPLPGRCSGSGL

SEQ ID NO: 10627 - protein, 68 aa, Artificial Sequence
  Synthetic polypeptide
MPYWRNWNAPPFRTVMNIPTQLLFPWISIPERRLTLMRLRRSFLFRITQVPCRAGAVAQACNFSTLEG

SEQ ID NO: 10628 - protein, 70 aa, Artificial Sequence
  Synthetic polypeptide
MSTLLISSSDALLEELERSTLQDSDEYSNPAPLPLDQHSRKETNLDETSEILSIQDNTSPLPGRCSGSGL

SEQ ID NO: 10629 - protein, 494 aa, Artificial Sequence
  Synthetic polypeptide
MWLFFGITGLLTAALSGHPSPAPPDQLNTSSAESELWEPGERLPVRLTNGSSSCSGTVEVRLEASWEPACGALWDSRAAEAVCRALGCGGAEAASQLAPPTPELPPPPAAGNTSVAANATLAGAPALLCSGAEWRLCEVVEHACRSDGRRARVTCAENRALRLVDGGGACAGRVEMLEHGEWGSVCDDTWDLEDAHVVCRQLGCGWAVQALPGLHFTPGRGPIHRDQVNCSGAEAYLWDCPGLPGQHYCGHKEDAGAVCSEHQSWRLTGGADRCEGQVEVHFRGVWNTVCDSEWYPSEAKVLCQSLGCGTAVERPKGLPHSLSGRMYYSCNGEELTLSNCSWRFNNSNLCSQSLAARVLCSASRSLHNLSTPEVPASVQTVTIESSVTVKIENKESRELMLLIPSIVLGILLLGSLIFIAFILLRIKGKYALPVMVNHQHLPTTIPAGSNSYQPVPITIPKEAGRDGACLWSQLLGRLRWEDRLSPGGQCCSEL

SEQ ID NO: 10630 - protein, 372 aa, Artificial Sequence
  Synthetic polypeptide
MYRDPEAASPGAPSRDVLLVSAIITVSLSVTVVLCGLCHWCQRKLGKRYKNSLETVGTPDSGRGRSEKKAIKLPAGGKAVNTAPVPGQTPHDESDRRTEPRSSVSDLVNSLTSEMLMLSPGSEEDEAHEGCSRENLGRIQFSVGYNFQESTLTVKIMKAQELPAKDFSGTSDPFVKIYLLPDKKHKLETKVKRKNLNPHWNETFLFEGFPYEKVVQRILYLQVLDYDRFSRNDPIGEVSIPLNKVDLTQMQTFWKDLKPCSDGSGSRGELLLSLCYNPSANSIIVNIIKARNLKAMDIGGTSDPYVKVWLMYKDKRVEKKKTVTMKRNLNPIFNESFAFDIPTEKLRETTIIITVMDKDKLSRNDVIGKGRL

SEQ ID NO: 10631 - protein, 416 aa, Artificial Sequence
  Synthetic polypeptide
MYRDPEAASPGAPSRDVLLVSAIITVSLSVTVVLCGLCHWCQRKLGKRYKNSLETVGTPDSGRGRSEKKAINDLDRDFWNNNESTVQQKWSSYPPKEFILNISPYAPYGDPRLSLKLPAGGKAVNTAPVPGQTPHDESDRRTEPRSSVSDLVNSLTSEMLMLSPGSEEDEAHEGCSRENLGRIQFSVGYNFQESTLTVKIMKAQELPAKDFSGTSDPFVKIYLLPDKKHKLETKVKRKNLNPHWNETFLFEGFPYEKVVQRILYLQVLDYDRFSRNDPIGEVSIPLNKVDLTQMQTFWKDLKPCSDGSGSRGELLLSLCYNPSANSIIVNIIKARNLKAMDIGGTSDPYVKVWLMYKDKRVEKKKTVTMKRNLNPIFNESFAFDIPTEKLRETTIIITVMDKDKLSRNDVIGKGRL

SEQ ID NO: 10632 - protein, 580 aa, Artificial Sequence
  Synthetic polypeptide
MYRDPEAASPGAPSRDVLLVSAIITVSLSVTVVLCGLCHWCQRKLGKRYKNSLETVGTPDSGRGRSEKKAINDLDRDFWNNNESTVQQKWSSYPPKEFILNISPYAPYGDPRLSLNFEDSTLSTATTLESIPSSTGEPKCQRPRTLMRQQSLQQPLSQHQRGRQPSQPTTSQSLGQLQAHMASAPGPNPRAYGRGQARQGTSAGSKYRAAGGRSRSNPGSWDHVVGQIRNRGLDMKSFLEGRMVVLSLVLGLSEQDDFANIPDLQNPGTQQNQNAQGDKRLPAGGKAVNTAPVPGQTPHDESDRRTEPRSSVSDLVNSLTSEMLMLSPGSEEDEAHEGCSRENLGRIQFSVGYNFQESTLTVKIMKAQELPAKDFSGTSDPFVKIYLLPDKKHKLETKVKRKNLNPHWNETFLFEGFPYEKVVQRILYLQVLDYDRFSRNDPIGEVSIPLNKVDLTQMQTFWKDLKPCSDGSGSRGELLLSLCYNPSANSIIVNIIKARNLKAMDIGGTSDPYVKVWLMYKDKRVEKKKTVTMKRNLNPIFNESFAFDIPTEKLRETTIIITVMDKDKLSRNDVIGKGRL

SEQ ID NO: 10633 - protein, 491 aa, Artificial Sequence
  Synthetic polypeptide
MYRDPEAASPGAPSRDVLLVSAIITVSLSVTVVLCGLCHWCQRKLGKRYKNSLETVGTPDSGRGRSEKKAINDLDRDFWNNNESTVQQKWSSYPPKEFILNISPYAPYGDPRLSLNGTLLSGAKVAAAAGLAVEREGRLGEKPAPVPPPGEDALRSGGAAPSEPGSGGKAGRGRWRTVQSHLAAGKLNLSKLPAGGKAVNTAPVPGQTPHDESDRRTEPRSSVSDLVNSLTSEMLMLSPGSEEDEAHEGCSRENLGRIQFSVGYNFQESTLTVKIMKAQELPAKDFSGTSDPFVKIYLLPDKKHKLETKVKRKNLNPHWNETFLFEGFPYEKVVQRILYLQVLDYDRFSRNDPIGEVSIPLNKVDLTQMQTFWKDLKPCSDGSGSRGELLLSLCYNPSANSIIVNIIKARNLKAMDIGGTSDPYVKVWLMYKDKRVEKKKTVTMKRNLNPIFNESFAFDIPTEKLRETTIIITVMDKDKLSRNDVIGKGRL

SEQ ID NO: 10634 - protein, 655 aa, Artificial Sequence
  Synthetic polypeptide
MYRDPEAASPGAPSRDVLLVSAIITVSLSVTVVLCGLCHWCQRKLGKRYKNSLETVGTPDSGRGRSEKKAINDLDRDFWNNNESTVQQKWSSYPPKEFILNISPYAPYGDPRLSLNGTLLSGAKVAAAAGLAVEREGRLGEKPAPVPPPGEDALRSGGAAPSEPGSGGKAGRGRWRTVQSHLAAGKLNLSNFEDSTLSTATTLESIPSSTGEPKCQRPRTLMRQQSLQQPLSQHQRGRQPSQPTTSQSLGQLQAHMASAPGPNPRAYGRGQARQGTSAGSKYRAAGGRSRSNPGSWDHVVGQIRNRGLDMKSFLEGRMVVLSLVLGLSEQDDFANIPDLQNPGTQQNQNAQGDKRLPAGGKAVNTAPVPGQTPHDESDRRTEPRSSVSDLVNSLTSEMLMLSPGSEEDEAHEGCSRENLGRIQFSVGYNFQESTLTVKIMKAQELPAKDFSGTSDPFVKIYLLPDKKHKLETKVKRKNLNPHWNETFLFEGFPYEKVVQRILYLQVLDYDRFSRNDPIGEVSIPLNKVDLTQMQTFWKDLKPCSDGSGSRGELLLSLCYNPSANSIIVNIIKARNLKAMDIGGTSDPYVKVWLMYKDKRVEKKKTVTMKRNLNPIFNESFAFDIPTEKLRETTIIITVMDKDKLSRNDVIGKGRL

SEQ ID NO: 10635 - protein, 447 aa, Artificial Sequence
  Synthetic polypeptide
MYRDPEAASPGAPSRDVLLVSAIITVSLSVTVVLCGLCHWCQRKLGKRYKNSLETVGTPDSGRGRSEKKAINGTLLSGAKVAAAAGLAVEREGRLGEKPAPVPPPGEDALRSGGAAPSEPGSGGKAGRGRWRTVQSHLAAGKLNLSKLPAGGKAVNTAPVPGQTPHDESDRRTEPRSSVSDLVNSLTSEMLMLSPGSEEDEAHEGCSRENLGRIQFSVGYNFQESTLTVKIMKAQELPAKDFSGTSDPFVKIYLLPDKKHKLETKVKRKNLNPHWNETFLFEGFPYEKVVQRILYLQVLDYDRFSRNDPIGEVSIPLNKVDLTQMQTFWKDLKPCSDGSGSRGELLLSLCYNPSANSIIVNIIKARNLKAMDIGGTSDPYVKVWLMYKDKRVEKKKTVTMKRNLNPIFNESFAFDIPTEKLRETTIIITVMDKDKLSRNDVIGKGRL

SEQ ID NO: 10636 - protein, 222 aa, Artificial Sequence; identical to SEQ ID NO: 815
  Synthetic polypeptide

SEQ ID NO: 10637 - protein, 266 aa, Artificial Sequence; identical to SEQ ID NO: 745
  Synthetic polypeptide

SEQ ID NO: 10638 - protein, 430 aa, Artificial Sequence; identical to SEQ ID NO: 472
  Synthetic polypeptide

SEQ ID NO: 10639 - protein, 341 aa, Artificial Sequence; identical to SEQ ID NO: 626
  Synthetic polypeptide

SEQ ID NO: 10640 - protein, 505 aa, Artificial Sequence; identical to SEQ ID NO: 374
  Synthetic polypeptide

SEQ ID NO: 10641 - protein, 297 aa, Artificial Sequence; identical to SEQ ID NO: 684
  Synthetic polypeptide

SEQ ID NO: 10642 - protein, 118 aa, Artificial Sequence
  Synthetic polypeptide
MPGIVVFRRRWSVGSDDLVLPAIFLFLLHTTWFVILSVVLFGLVYNPHEACSLNLVDHGRGYLGILLSCMIAEMAIIWLSMRGGILYTEPRDSMQYVLYVRLGTEAGESLEPRRQRLQ

SEQ ID NO: 10643 - protein, 50 aa, Artificial Sequence; identical to SEQ ID NO: 1273
  Synthetic polypeptide

SEQ ID NO: 10644 - protein, 27 aa, Artificial Sequence
  Synthetic polypeptide
MSSARTPLPTLNERDTEQHFPGTFEKI

SEQ ID NO: 10645 - protein, 125 aa, Artificial Sequence
  Synthetic polypeptide
MAGTLDLDKGCTVEELLRGCIEAFDDSGKVRDPQLVRMFLMMHPWYIPSSQLAAKLLHIYQQSRKDNSNSLQVKTCHLVRYWISAFPAEFDLNPELAEQIKELKALLDQEGNRRHSSLIDIDSVA

SEQ ID NO: 10646 - protein, 164 aa, Artificial Sequence
  Synthetic polypeptide
MDGTEGSAGQPGPAERSHRSSVSSVGARAADVLVYLADDTVVPLAVENLPSLSAHELHRAVREVLQLPDIALDVFALWLVSPLLDEPFLQFRRNVFFPKRRELQIHDEEVLRLLYEEAKGNVLAARYPCDVEDCEALGALVCRVQLGPYQPGRPAACDLRWRLQ

SEQ ID NO: 10647 - protein, 198 aa, Artificial Sequence
  Synthetic polypeptide
MDGTEGSAGQPGPAERSHRSSVSSVGARAADVLVYLADDTVVPLAVENLPSLSAHELHRAVREVLQLPDIALDVFALWLVSPLLEVQLKPKHQPYKLGRQWPELLLRFTSAPDDDVAMDEPFLQFRRNVFFPKRRELQIHDEEVLRLLYEEAKGNVLAARYPCDVEDCEALGALVCRVQLGPYQPGRPAACDLRWRLQ

SEQ ID NO: 10648 - protein, 156 aa, Artificial Sequence
  Synthetic polypeptide
MDGTEGSAGQPGPAERSHRSSVSSVGARADDTVVPLAVENLPSLSAHELHRAVREVLQLPDIALDVFALWLVSPLLDEPFLQFRRNVFFPKRRELQIHDEEVLRLLYEEAKGNVLAARYPCDVEDCEALGALVCRVQLGPYQPGRPAACDLRWRLQ

SEQ ID NO: 10649 - protein, 142 aa, Artificial Sequence
  Synthetic polypeptide
MDGTEGSAGQPGPAERSHRSSVSSVGAREVQLKPKHQPYKLGRQWPELLLRFTSAPDDDVAMDEPFLQFRRNVFFPKRRELQIHDEEVLRLLYEEAKGNVLAARYPCDVEDCEALGALVCRVQLGPYQPGRPAACDLRWRLQ

SEQ ID NO: 10650 - protein, 218 aa, Artificial Sequence
  Synthetic polypeptide
MTSELDIFVGNTTLIDEDVYRLWLDGYSVTDAVALRVRSGILEQTGATAAVLQSDTMDHYRTFHMLERLLHAPPKLLHQLIFQIPPSRQALLIERYYAFDEAFVREVLGKKLSKGTKKDLDDISTKTGITLKSCRRQFDNFKRVFKVVEEMRGSLVDNIQQHFLLSDRLARDYAAIVFFANNRFETGKKKLQYLSFGDFAFCAELMIQNWTLGAVGGK

SEQ ID NO: 10651 - protein, 215 aa, Artificial Sequence
  Synthetic polypeptide
MTSELDIFVGNTTLIDEDVYRLWLDVTDAVALRVRSGILEQTGATAAVLQSDTMDHYRTFHMLERLLHAPPKLLHQLIFQIPPSRQALLIERYYAFDEAFVREVLGKKLSKGTKKDLDDISTKTGITLKSCRRQFDNFKRVFKVVEEMRGSLVDNIQQHFLLSDRLARDYAAIVFFANNRFETGKKKLQYLSFGDFAFCAELMIQNWTLGAVGGK

SEQ ID NO: 10652 - protein, 20 aa, Artificial Sequence
  Synthetic polypeptide
  misc_feature (1)..(1): Xaa can be any naturally occurring amino acid
XAFCAELMIQNWTLGAVGGK

SEQ ID NO: 10653 - protein, 42 aa, Artificial Sequence
  Synthetic polypeptide
MAFTFAAFCYMLTLVLCASLIFFVIWHALLLPGPRFLHLCNK

SEQ ID NO: 10654 - protein, 252 aa, Artificial Sequence; identical to SEQ ID NO: 780
  Synthetic polypeptide

SEQ ID NO: 10655 - protein, 552 aa, Artificial Sequence
  Synthetic polypeptide
MADLEAVLADVSYLMAMEKSKATPAARASKKILLPEPSIRSVMQKYLEDRGEVTFEKIFSQKLGYLLFRDFCLNHLEEARPLVEFYEEIKKYEKLETEEERVARSREIFDSYIMKELLACSHPFSKSATEHVQGHLGKKQVPPDLFQPYIEEICQNLRGDVFQKFIESDKFTRFCQWKNVELNIHLTMNDFSVHRIIGRGGFGEVYGCRKADTGKMYAMKCLDKKRIKMKQGETLALNERIMLSLVSTGDCPFIVCMSYAFHTPDKLSFILDLMNGGDLHYHLSQHGVFSEADMRFYAAEIILGLEHMHNRFVVYRDLKPANILLDEHGHVRISDLGLACDFSKKKPHASVGTHGYMAPEVLQKGVAYDSSADWFSLGCMLFKLLRGHSPFRQHKTKDKHEIDRMTLTMAVELPDSFSPELRSLLEGLLQRDVNRRLGCLGRGAQEVKESPFFRSLDWQMVFLQKYPPPLIPPRGEVNAADAFDIGSFDEEDTKGIKLLDSDQELYRNFPLTISERWQQEVAETVFDTINAETDRLEARKKAKNKQLGHEEE

SEQ ID NO: 10656 - protein, 111 aa, Artificial Sequence
  Synthetic polypeptide
MDPLGDTLRRLREAFHAGRTRPAEFRAAQLQGLGRFLQENKQLLHDALAQDLHKEQSKRTATSGPLQPPGPLPKVCRLPVPTTCLFLDFRSLLQCDRRLETCTDRFVKTAH

SEQ ID NO: 10657 - protein, 59 aa, Artificial Sequence
  Synthetic polypeptide
MDPLGDTLRRLREAFHAGRTRPAEFRAAQLQGLGRFLQENKQLLHDALAQDLHKVTAPM

SEQ ID NO: 10658 - protein, 572 aa, Artificial Sequence
  Synthetic polypeptide
MEAAPPGPPWPLLLLLLLLLALCGCPAPAAASPLLLFANRRDVRLVDAGGVKLESTIVVSGLEDAAAVDFQFSKGAVYWTDVSEEAIKQTYLNQTGAAVQNVVISGLVSPDGLACDWVGKKLYWTDSETNRIEVANLNGTSRKVLFWQDLDQPRAIALDPAHGYMYWTDWGETPRIERAGMDGSTRKIIVDSDIYWPNGLTIDLEEQKLYWADAKLSFIHRANLDGSFRQKVVEGSLTHPFALTLSGDTLYWTDWQTRSIHACNKRTGGKRKEILSALYSPMDIQVLSQERQPFFHTRCEEDNGGCSHLCLLSPSEPFYTCACPTGVQLQDNGRTCKAGAEEVLLLARRTDLRRISLDTPDFTDIVLQVDDIRHAIAIDYDPLEGYVYWTDDEVRAIRRAYLDGSGAQTLVNTEINDPDGIAVDWVARNLYWTDTGTDRIEVTRLNGTSRKILVSEDLDEPRAIALHPVMGLMYWTDWGENPKIECANLDGQERRVLVNASLGWPNGLALDLQEGKLYWGDAKTDKIEVWQLIPVIPALWKEGRDGQIALAQEFETSLANMVEPHLYKNRIK

SEQ ID NO: 10659 - protein, 370 aa, Artificial Sequence
  Synthetic polypeptide
MDYHEDDKRFRREEYEGNLLEAGLELERDEDTKIHGVGFVKIHAPWNVLCREAEFLKLKMPTKKMYHINETRGLLKKINSVLQKITDPIQPKVAEHRPQTMKRLSYPFSREKQHLFDLSDKDSFFDSKTRSTIVYEILKRTTCTKAKYSMGITSLLANGVYAAAYPLHDGDYNGENVEFNDRKLLYEEWARYGVFYKYQPIDLVRKYFGEKIGLYFAWLGVYTQMLIPASIVGIIVFLYGCATMDENIPSMEMCDQRHNITMCPLCDKTCSYWKMSSACATARASHLFDNPATVFFSVFMALWAATFMEHWKRKQMRLNYRWDLTGFEEEEDRARWLTPVTPALWEAEEGGSRGQEIKTILANRVKPCLY

SEQ ID NO: 10660 - protein, 63 aa, Artificial Sequence
  Synthetic polypeptide
MEHWKRKQMRLNYRWDLTGFEEEEDRARWLTPVTPALWEAEEGGSRGQEIKTILANRVKPCLY

SEQ ID NO: 10661 - protein, 221 aa, Artificial Sequence
  Synthetic polypeptide
MGITSLLANGVYAAAYPLHDGDYNGENVEFNDRKLLYEEWARYGVFYKYQPIDLVRKYFGEKIGLYFAWLGVYTQMLIPASIVGIIVFLYGCATMDENIPSMEMCDQRHNITMCPLCDKTCSYWKMSSACATARASHLFDNPATVFFSVFMALWAATFMEHWKRKQMRLNYRWDLTGFEEEEDRARWLTPVTPALWEAEEGGSRGQEIKTILANRVKPCLY

SEQ ID NO: 10662 - protein, 458 aa, Artificial Sequence
  Synthetic polypeptide
MLTRPSQVLLNSLSVDPDAECKYGLYFRDGRRKVDYILVYHHKRPSGNRTLVRRVQHSDTPSGARSVKQDHPLPGKGASLDAGSGEPPMDYHEDDKRFRREEYEGNLLEAGLELERDEDTKIHGVGFVKIHAPWNVLCREAEFLKLKMPTKKMYHINETRGLLKKINSVLQKITDPIQPKVAEHRPQTMKRLSYPFSREKQHLFDLSDKDSFFDSKTRSTIVYEILKRTTCTKAKYSMGITSLLANGVYAAAYPLHDGDYNGENVEFNDRKLLYEEWARYGVFYKYQPIDLVRKYFGEKIGLYFAWLGVYTQMLIPASIVGIIVFLYGCATMDENIPSMEMCDQRHNITMCPLCDKTCSYWKMSSACATARASHLFDNPATVFFSVFMALWAATFMEHWKRKQMRLNYRWDLTGFEEEEDRARWLTPVTPALWEAEEGGSRGQEIKTILANRVKPCLY

SEQ ID NO: 10663 - protein, 486 aa, Artificial Sequence
  Synthetic polypeptide
MRVNEKYSTLPAEDRSVHIINICAIEDIGYLPSEGTLLNSLSVDPDAECKYGLYFRDGRRKVDYILVYHHKRPSGNRTLVRRVQHSDTPSGARSVKQDHPLPGKGASLDAGSGEPPMDYHEDDKRFRREEYEGNLLEAGLELERDEDTKIHGVGFVKIHAPWNVLCREAEFLKLKMPTKKMYHINETRGLLKKINSVLQKITDPIQPKVAEHRPQTMKRLSYPFSREKQHLFDLSDKDSFFDSKTRSTIVYEILKRTTCTKAKYSMGITSLLANGVYAAAYPLHDGDYNGENVEFNDRKLLYEEWARYGVFYKYQPIDLVRKYFGEKIGLYFAWLGVYTQMLIPASIVGIIVFLYGCATMDENIPSMEMCDQRHNITMCPLCDKTCSYWKMSSACATARASHLFDNPATVFFSVFMALWAATFMEHWKRKQMRLNYRWDLTGFEEEEDRARWLTPVTPALWEAEEGGSRGQEIKTILANRVKPCLY

SEQ ID NO: 10664 - protein, 50 aa, Artificial Sequence
  Synthetic polypeptide
MGQACGHSILCRSQQYPAARPAEPMILKNLEVQSLAPGMRQVLTKVSYCH

SEQ ID NO: 10665 - protein, 783 aa, Artificial Sequence
  Synthetic polypeptide
MAEAGDAALSVAEWLRALHLEQYTGLFEQHGLVWATECQGLSDTRLMDMGMLLPGHRRRILAGLLRAHTSPAPAPRPTPRPVPMKRHIFRSPPVPATPPEPLPTTTEDEGLPAAPPIPPRRSCLPPTCFTTPSTAAPDPVLPPLPAKRHLAELSVPPVPPRTGPPRLLVSLPTKEEESLLPSLSSPPQPQSEEPLSTLPQGPPQPPSPPPCPPEIPPKPVRLFPEFDDSDYDEVPEEGPGAPARVMTKKEEPPPSRVPRAVRVASLLSEGEELSGDDQGDEEEDDHAYEGVPNGGWHTSSLSLSLPSTIAAPHPMDGPPGGSTPVTPVIKAGWLDKNPPQGSYIYQKRWVRLDTDHLRYFDSNKDAYSKRFISVACISHVAAIGDQKFEVITNNRTFAFRAESDVERKEWMQALQQAMAEQRARARLSSAYLLGVPGSEQPDRAGSLELRGFKNKLYVAVVGDKVQLYKNLEEYHLGIGITFIDMSVGNVKEVDRRSFDLTTPYRIFSFSADSELEKEQWLEAMQGAIAEALSTSEVAERIWAAAPNRFCADCGAPQPDWASINLCVVICKRCAGEHRGLGAGVSKVRSLKMDRKVWTETLIELFLQLGNGAGNRFWAANVPPSEALQPSSSPSTRRCHLEAKYREGKYRRYHPLFGNQEELDKALCAAVTTTDLAETQALLGCGAGINCFSGDPEAPTPLALAEQAGQTLQMEFLRNNRTTEVPRLDSMKPLEKHYSVVLPTVSHSGFLYKTASAGKLLQDRRAREDTSSPTRIFACAVPSA

SEQ ID NO: 10666 - protein, 71 aa, Artificial Sequence
  Synthetic polypeptide
MEFLRNNRTTEVPRLDSMKPLEKHYSVVLPTVSHSGFLYKTASAGKLLQDRRAREDTSSPTRIFACAVPSA

SEQ ID NO: 10667 - protein, 477 aa, Artificial Sequence
  Synthetic polypeptide
MTKKEEPPPSRVPRAVRVASLLSEGEELSGDDQGDEEEDDHAYEGVPNGGWHTSSLSLSLPSTIAAPHPMDGPPGGSTPVTPVIKAGWLDKNPPQGSYIYQKRWVRLDTDHLRYFDSNKDAYSKRFISVACISHVAAIGDQKFEVITNNRTFAFRAESDVERKEWMQALQQAMAEQRARARLSSAYLLGVPGSEQPDRAGSLELRGFKNKLYVAVVGDKVQLYKNLEEYHLGIGITFIDMSVGNVKEVDRRSFDLTTPYRIFSFSADSELEKEQWLEAMQGAIAEALSTSEVAERIWAAAPNRFCADCGAPQPDWASINLCVVICKRCAGEHRGLGAGVSKVRSLKMDRKVWTETLIEALCAAVTTTDLAETQALLGCGAGINCFSGDPEAPTPLALAEQAGQTLQMEFLRNNRTTEVPRLDSMKPLEKHYSVVLPTVSHSGFLYKTASAGKLLQDRRAREDTSSPTRIFACAVPSA

SEQ ID NO: 10668 - protein, 538 aa, Artificial Sequence
  Synthetic polypeptide
MTKKEEPPPSRVPRAVRVASLLSEGEELSGDDQGDEEEDDHAYEGVPNGGWHTSSLSLSLPSTIAAPHPMDGPPGGSTPVTPVIKAGWLDKNPPQGSYIYQKRWVRLDTDHLRYFDSNKDAYSKRFISVACISHVAAIGDQKFEVITNNRTFAFRAESDVERKEWMQALQQAMAEQRARARLSSAYLLGVPGSEQPDRAGSLELRGFKNKLYVAVVGDKVQLYKNLEEYHLGIGITFIDMSVGNVKEVDRRSFDLTTPYRIFSFSADSELEKEQWLEAMQGAIAEALSTSEVAERIWAAAPNRFCADCGAPQPDWASINLCVVICKRCAGEHRGLGAGVSKVRSLKMDRKVWTETLIELFLQLGNGAGNRFWAANVPPSEALQPSSSPSTRRCHLEAKYREGKYRRYHPLFGNQEELDKALCAAVTTTDLAETQALLGCGAGINCFSGDPEAPTPLALAEQAGQTLQMEFLRNNRTTEVPRLDSMKPLEKHYSVVLPTVSHSGFLYKTASAGKLLQDRRAREDTSSPTRIFACAVPSA

SEQ ID NO: 10669 - protein, 543 aa, Artificial Sequence
  Synthetic polypeptide
MTLSGSRGQEEPPPSRVPRAVRVASLLSEGEELSGDDQGDEEEDDHAYEGVPNGGWHTSSLSLSLPSTIAAPHPMDGPPGGSTPVTPVIKAGWLDKNPPQGSYIYQKRWVRLDTDHLRYFDSNKDAYSKRFISVACISHVAAIGDQKFEVITNNRTFAFRAESDVERKEWMQALQQAMAEQRARARLSSAYLLGVPGSEQPDRAGSLELRGFKNKLYVAVVGDKVQLYKNLEEYHLGIGITFIDMSVGNVKEVDRRSFDLTTPYRIFSFSADSELEKEQWLEAMQGAIAEALSTSEVAERIWAAAPNRFCADCGAPQPDWASINLCVVICKRCAGEHRGLGAGVSKVRSLKMDRKVWTETLIELFLQLGNGAGNRFWAANVPPSEALQPSSSPSTRRCHLEAKYREGKYRRYHPLFGNQEELDKALCAAVTTTDLAETQALLGCGAGINCFSGDPEAPTPLALAEQAGQTLQMEFLRNNRTTEVPRLDSMKPLEKHYSVVLPTVSHSGFLYKTASAGKLLQDRRAREDTSSPTRIFACAVPSA

SEQ ID NO: 10670 - protein, 65 aa, Artificial Sequence
  Synthetic polypeptide
MQPPPRKVKVTQELKNIQVEQMTKLQAKHQAECDLLEDMRTFSQKKAAIEREYAQVMNMLKVICS

SEQ ID NO: 10671 - protein, 44 aa, Artificial Sequence
  Synthetic polypeptide
MTKLQAKHQAECDLLEDMRTFSQKKAAIEREYAQVMNMLKVICS

SEQ ID NO: 10672 - protein, 63 aa, Artificial Sequence
  Synthetic polypeptide
MQPPPRKVKVTQELKNIQVEQMTKLQAKHQAECDLLEDMRTFSQKKAAIEREYAQARQSGSCL

SEQ ID NO: 10673 - protein, 42 aa, Artificial Sequence
  Synthetic polypeptide
MTKLQAKHQAECDLLEDMRTFSQKKAAIEREYAQARQSGSCL

SEQ ID NO: 10674 - protein, 70 aa, Artificial Sequence
  Synthetic polypeptide
MEATLPGHRTMNPCPVWEQKSGCVFLFFICVRGHVTERQQIVSGRNAARLCFIYSQDAGCSWSERTLTNT

SEQ ID NO: 10675 - protein, 146 aa, Artificial Sequence
  Synthetic polypeptide
MEEVTTCSFNSPLFRQEDDRGITYRIPALLYIPPTHTFLAFAEKRSTRRDEDALHLVLRRGLRIGQLVQWGPLKPLMEATLPGHRTMNPCPVWEQKSGCVFLFFICVRGHVTERQQIVSGRNAARLCFIYSQDAGCSWSERTLTNT

SEQ ID NO: 10676 - protein, 179 aa, Artificial Sequence
  Synthetic polypeptide
MRPADLPPRPMEESPASSSAPTETEEPGSSAEVMEEVTTCSFNSPLFRQEDDRGITYRIPALLYIPPTHTFLAFAEKRSTRRDEDALHLVLRRGLRIGQLVQWGPLKPLMEATLPGHRTMNPCPVWEQKSGCVFLFFICVRGHVTERQQIVSGRNAARLCFIYSQDAGCSWSERTLTNT

SEQ ID NO: 10677 - protein, 74 aa, Artificial Sequence
  Synthetic polypeptide
MEATLPGHRTMNPCPVWEQKSGCVFLFFICVRGHVTERQQIVSGRNAARLCFIYSQDAGCSWSEAHRWKGLALS

SEQ ID NO: 10678 - protein, 150 aa, Artificial Sequence
  Synthetic polypeptide
MEEVTTCSFNSPLFRQEDDRGITYRIPALLYIPPTHTFLAFAEKRSTRRDEDALHLVLRRGLRIGQLVQWGPLKPLMEATLPGHRTMNPCPVWEQKSGCVFLFFICVRGHVTERQQIVSGRNAARLCFIYSQDAGCSWSEAHRWKGLALS

SEQ ID NO: 10679 - protein, 183 aa, Artificial Sequence
  Synthetic polypeptide
MRPADLPPRPMEESPASSSAPTETEEPGSSAEVMEEVTTCSFNSPLFRQEDDRGITYRIPALLYIPPTHTFLAFAEKRSTRRDEDALHLVLRRGLRIGQLVQWGPLKPLMEATLPGHRTMNPCPVWEQKSGCVFLFFICVRGHVTERQQIVSGRNAARLCFIYSQDAGCSWSEAHRWKGLALS

SEQ ID NO: 10680 - protein, 36 aa, Artificial Sequence
  Synthetic polypeptide
MGDKGTRVFKKASPNGKAGQQEQNSISKKKLFKKKE

SEQ ID NO: 10681 - protein, 31 aa, Artificial Sequence
  Synthetic polypeptide
MGVFKKASPNGKAGQQEQNSISKKKLFKKKE

SEQ ID NO: 10682 - protein, 46 aa, Artificial Sequence
  Synthetic polypeptide
SHCKRWERRGHGRRLAAGEAESVQEGQSKWKGRATRAKFHLEKKII

SEQ ID NO: 10683 - protein, 54 aa, Artificial Sequence
  Synthetic polypeptide
  misc_feature (1)..(1): Xaa can be any naturally occurring amino acid
XVCLPLPCRCSGETTPTPGPVPSAECSRRPVQMERPGNKSKIPSRKKNYLRKRK

SEQ ID NO: 10684 - protein, 104 aa, Artificial Sequence
  Synthetic polypeptide
MPEQWARLLQTSNITKSEQKKNPQAVLDVLEFYNSKKTSNSQKYMSFTDKSAEDYNSSNALNVKAVSETPAVPPVSEDEDDDDDDATPPPVIAPRPEHTKSVFY

SEQ ID NO: 10685 - protein, 202 aa, Artificial Sequence
  Synthetic polypeptide
MSNNGLDIQDKPPAPPMRNTSTMIGAGSKDAGTLNHGSKPLPPNPEEKKKKDRFYRSILPGDKTNKKKEKERPEISLPSDFEHTIHVGFDAVTGEFTGMPEQWARLLQTSNITKSEQKKNPQAVLDVLEFYNSKKTSNSQKYMSFTDKSAEDYNSSNALNVKAVSETPAVPPVSEDEDDDDDDATPPPVIAPRPEHTKSVFY

SEQ ID NO: 10686 - protein, 93 aa, Artificial Sequence
  Synthetic polypeptide
  misc_feature (1)..(1): Xaa can be any naturally occurring amino acid
XNITKSEQKKNPQAVLDVLEFYNSKKTSNSQKYMSFTDKSAEDYNSSNALNVKAVSETPAVPPVSEDEDDDDDDATPPPVIAPRPEHTKSVFY

SEQ ID NO: 10687 - protein, 801 aa, Artificial Sequence
  Synthetic polypeptide
MDVKERKPYRSLTRRRDAERRYTSSSADSEEGKAPQKSYSSSETLKAYDQDARLAYGSRVKDIVPQEAEEFCRTGANFTLRELGLEEVTPPHGTLYRTDIGLPHCGYSMGAGSDADMEADTVLSPEHPVRLWGRSTRSGRSSCLSSRANSNLTLTDTEHENTETDHPGGLQNHARLRTPPPPLSHAHTPNQHHAASINSLNRGNFTPRSNPSPAPTDHSLSGEPPAGGAQEPAHAQENWLLNSNIPLETRNLGKQPFLGTLQDNLIEMDILGASRHDGAYSDGHFLFKPGGTSPLFCTTSPGYPLTSSTVYSPPPRPLPRSTFARPAFNLKKPSKYCNWKCAALSAIVISATLVILLAYFVAMHLFGLNWHLQPMEGQMYEITEDTASSWPVPTDVSLYPSGGTGLETPDRKGKGTTEGKPSSFFPEDSFIDSGEIDVGRRASQKIPPGTFWRSQVFIDHPVHLKFNVSLGKAALVGIYGRKGLPPSHTQFDFVELLDGRRLLTQEARSLEGTPRQSRGTVPPSSHETGFIQYLDSGIWHLAFYNDGKESEVVSFLTTAIESVDNCPSNCYGNGDCISGTCHCFLGFLGPDCGRASCPVLCSGNGQYMKGRCLCHSGWKGAECDVPTNQCIDVACSNHGTCITGTCICNPGYKGESCEEVDCMDPTCSGRGVCVRGECHCSVGWGGTNCETPRATCLDQCSGHGTFLPDTGLCSCDPSWTGHDCSIEICAADCGGHGVCVGGTCRCEDGWMGAACDQRACHPRCAEHGTCRDGKCECSPGWNGEHCTIAHYLDRVVKEQVC

SEQ ID NO: 10688 - protein, 53 aa, Artificial Sequence
  Synthetic polypeptide
MGIFKSSLFQALLDIILFLSPVCNLHEGKNFCLFCSLLYPQELKQCLAFNKYL

SEQ ID NO: 10689 - protein, 62 aa, Artificial Sequence
  Synthetic polypeptide
MGPKKKHLDYLIQCTNEMNVNIPQLADSLFERTTNSSWVVVFKSLITTHHLMVYGNEKSTHL

SEQ ID NO: 10690 - protein, 45 aa, Artificial Sequence
  Synthetic polypeptide
MNVNIPQLADSLFERTTNSSWVVVFKSLITTHHLMVYGNEKSTHL

SEQ ID NO: 10691 - protein, 96 aa, Artificial Sequence
  Synthetic polypeptide
MSGQSLTDRITAAQHSVTGSAVSKTVCKATTHEIMGPKKKHLDYLIQCTNEMNVNIPQLADSLFERTTNSSWVVVFKSLITTHHLMVYGNEKSTHL

SEQ ID NO: 10692 - protein, 16 aa, Artificial Sequence
  Synthetic polypeptide
MGPKKKHLDSPVTLPV

SEQ ID NO: 10693 - protein, 50 aa, Artificial Sequence
  Synthetic polypeptide
MSGQSLTDRITAAQHSVTGSAVSKTVCKATTHEIMGPKKKHLDSPVTLPV

SEQ ID NO: 10694 - protein, 392 aa, Artificial Sequence; identical to SEQ ID NO: 542
  Synthetic polypeptide

SEQ ID NO: 10695 - protein, 452 aa, Artificial Sequence; identical to SEQ ID NO: 433
  Synthetic polypeptide

SEQ ID NO: 10696 - protein, 485 aa, Artificial Sequence; identical to SEQ ID NO: 391
  Synthetic polypeptide

SEQ ID NO: 10697 - protein, 25 aa, Artificial Sequence
  Synthetic polypeptide
MPAVSKGDGMRGLAVFISDIRNSPW

SEQ ID NO: 10698 - protein, 81 aa, Artificial Sequence
  Synthetic polypeptide
MGSLKEELLKAIWHAFTALDQDHSGKVSKSQLKVLSHNLCTVLKVPHDPVALEEHFRDDDEGPVSNQGYMPYLNRFILEKG

SEQ ID NO: 10699 - protein, 136 aa, Artificial Sequence
  Synthetic polypeptide
MINPELRDGRADGFIHRIVPKLIQNWKIGLMCFLSIIITTVCIIMIATWSKHAKPVACSGDWLGVRDKCFYFSDDTRNWTASKIFCSLQKAELAQIDTQEDMEFLKRYAGTDMHWIGLSRKQGDSWKWTNGTTFNG

SEQ ID NO: 10700 - protein, 149 aa, Artificial Sequence
  Synthetic polypeptide
MINPELRDGRADGFIHRIVPKLIQNWKIGLMCFLSIIITTVCIIMIATWSKHAKPVACSGDWLGVRDKCFYFSDDTRNWTASKIFCSLQKAELAQIDTQEDMEFLKRYAGTDMHWIGLSRKQGDSWKWTNGTTFNGWTQLEKVFILPTL

SEQ ID NO: 10701 - protein, 138 aa, Artificial Sequence
  Synthetic polypeptide
MINPELRDGRADGFIHRIVPKLIQNWKIGLMCFLSIIITTVCIIMIATWSKHAKPVACSGDWLGVRDKCFYFSDDTRNWTASKIFCSLQKAELAQIDTQEDMEFLKRYAGTDMHWIGLSRKQGDSWKWTNGTTFNGWL

SEQ ID NO: 10702 - protein, 150 aa, Artificial Sequence
  Synthetic polypeptide
MINPELRDGRADGFIHRIVPKLIQNWKIGLMCFLSIIITTVCIIMIATWSKHAKPVACSGDWLGVRDKCFYFSDDTRNWTASKIFCSLQKAELAQIDTQEDMEFLKRYAGTDMHWIGLSRKQGDSWKWTNGTTFNDISAVQANMERLLLN

SEQ ID NO: 10703 - protein, 191 aa, Artificial Sequence
  Synthetic polypeptide
MINPELRDGRADGFIHRIVPKLIQNWKIGLMCFLSIIITTVCIIMIATWSKHAKPVACSGDWLGVRDKCFYFSDDTRNWTASKIFCSLQKAELAQIDTQEDMEFLKRYAGTDMHWIGLSRKQGDSWKWTNGTTFNGHNWRKCLFYQHFDWKGKLAFKESISTCRANKSPVGKLASYPCLFSPCTGFLTCGQ

SEQ ID NO: 10704 - protein, 511 aa, Artificial Sequence
  Synthetic polypeptide
MESMLNKLKSTVTKVTADVTSAVMGNPVTREFDVGRHIASGGNGLAWKIFNGTKKSTKQEVAVFVFDKKLIDKYQKFEKDQIIDSLKRGVQQLTRLRHPRLLTVQHPLEESRDCLAFCTEPVFASLANVLGNWENLPSPISPDIKDYKLYDVETKYGLLQVSEGLSFLHSSVKMVHGNITPENIILNKSGAWKIMGFDFCVSSTNPSEQEPKFPCKEWDPNLPSLCLPNPEYLAPEYILSVSCETASDMYSLGTVMYAVFNKGKPIFEVNKQDIYKSFSRQLDQLSRLGSSSLTNIPEEVREHVKLLLNVTPTVRPDADQMTKIPFFDDVGAVTLQYFDTLFQRDNLQKSQFFKGLPKVLPKLPKRVIVQRILPCLTSEFVNPDMVPFVLPNVLLIAEECTKEEYVKLILPELGPVFKQQEPIQILLIFLQKMDLLLTKTPPDEIKNSVLPMVYRALEAPSIQIQELCLNIIPTFANLIDYPSMKNALIPRIKNACLQTSSLAAGHGGSHL

SEQ ID NO: 10705 - protein, 22 aa, Artificial Sequence
  Synthetic polypeptide
  misc_feature (1)..(1): Xaa can be any naturally occurring amino acid
XRIKNACLQTSSLAAGHGGSHL

SEQ ID NO: 10706 - protein, 44 aa, Artificial Sequence
  Synthetic polypeptide
MSEEVTYADLQFQNSSEMEKIPEIGKFGEKGGRDLPCLRWTVDF

SEQ ID NO: 10707 - protein, 54 aa, Artificial Sequence
  Synthetic polypeptide
MWIDFFTYSSMSEEVTYADLQFQNSSEMEKIPEIGKFGEKGGRDLPCLRWTVDF

SEQ ID NO: 10708 - protein, 432 aa, Artificial Sequence
  Synthetic polypeptide
MTNSKGRSITDKTSGGPSSGGGFVDWTLRLNTIQSDKFLNLLLSMVPVIYQKNQEDRHKKANGIWQDGLSTAVQTFSNRSEQHMEYHSFSEQSFHANNGHASSSCSQKYDDYANYNYCDGRETSETTAMLQDEDISSDGDEDAIVEVTPKLPKESSGIMALQILVPFLLAGFGTVSAGMVLDIVQHWEVFRKVTEVFILVPALLGLKGNLEMTLASRLSTAVNIGKMDSPIEKWNLIIGNLALKQVQATVVGFLAAVAAIILGWIPEGKYYLDHSILLCSSSVATAFIASLLQGIIMVGVIVGSKKTGINPDNVATPIAASFGDLITLAILAWISQGLYSCLETYYYISPLVGVFFLALTPIWIIIAAKHPATRTVLHSGWEPVITAMVISSIGGLILDTTVSDPNLVGIVVYTPVINGMVVHACSPSYLGG

SEQ ID NO: 10709 - protein, 148 aa, Artificial Sequence; identical to SEQ ID NO: 1029
  Synthetic polypeptide

SEQ ID NO: 10710 - protein, 623 aa, Artificial Sequence; identical to SEQ ID NO: 237
  Synthetic polypeptide

SEQ ID NO: 10711 - protein, 617 aa, Artificial Sequence; identical to SEQ ID NO: 244
  Synthetic polypeptide

SEQ ID NO: 10712 - protein, 574 aa, Artificial Sequence; identical to SEQ ID NO: 304
  Synthetic polypeptide

SEQ ID NO: 10713 - protein, 91 aa, Artificial Sequence
  Synthetic polypeptide
DIVLPATEFLDQNRGSRRTNPFGETEDESFPEAEVKTDSTTEVIYEAMRQVLAARAIHNIFRMTESHLMVTSQSLSPQTRRFHRVPTPPGP

SEQ ID NO: 10714 - protein, 566 aa, Artificial Sequence
  Synthetic polypeptide
MPAVDKLLLEEALQDSPQTRSLLSVFEEDAGTLTDYTNQLLQAMQRVYGAQNEMCLATQQLSKQLLAYEKQNFALGKGDEEVISTLHYFSKVVDELNLLHTELAKQLADTMVLPIIQFREKDLTEVSTLKDLFGLASNDVCLFLEHDLSMAKYSRLPKKKENEKVKTEVGKEVAAARRKQHLSSLQYYCALNALQYRKQMAMMEPMIGFAHGQINFFKKGAEMFSKRMDSFLSSVADMVQSIQVELEAEAEKMRVSQQELLSVDESVYTPDSDVAAPQINRNLIQKAGYLNLRNKTGLVTTTWERLYFFTQGGNLMCQPRGAVAGGLIQDLDNCSVMAVDCEDRRYCFQITTPNGKSGIILQAESRKENEEWICAINNISRQIYLTDNPEAVAIKLNQTALQAVTPITSFGKKQESSCPSQNLKNSEMENENDKIVPKATASLPEAEELIAPGTPIQFDIVLPATEFLDQNRGSRRTNPFGETEDESFPEAEDSLLQQMFIVRFLGSMAVKTDSTTEVIYEAMRQVLAARAIHNIFRMTESHLMVTSQSLSPQTRRFHRVPTPPGP

SEQ ID NO: 10715 - protein, 560 aa, Artificial Sequence
  Synthetic polypeptide
MPAVDKLLLEEALQDSPQTRSLLSVFEEDAGTLTDYTNQLLQAMQRVYGAQNEMCLATQQLSKQLLAYEKQNFALGKGDEEVISTLHYFSKVVDELNLLHTELAKQLADTMVLPIIQFREKDLTEVSTLKDLFGLASNEHDLSMAKYSRLPKKKENEKVKTEVGKEVAAARRKQHLSSLQYYCALNALQYRKQMAMMEPMIGFAHGQINFFKKGAEMFSKRMDSFLSSVADMVQSIQVELEAEAEKMRVSQQELLSVDESVYTPDSDVAAPQINRNLIQKAGYLNLRNKTGLVTTTWERLYFFTQGGNLMCQPRGAVAGGLIQDLDNCSVMAVDCEDRRYCFQITTPNGKSGIILQAESRKENEEWICAINNISRQIYLTDNPEAVAIKLNQTALQAVTPITSFGKKQESSCPSQNLKNSEMENENDKIVPKATASLPEAEELIAPGTPIQFDIVLPATEFLDQNRGSRRTNPFGETEDESFPEAEDSLLQQMFIVRFLGSMAVKTDSTTEVIYEAMRQVLAARAIHNIFRMTESHLMVTSQSLSPQTRRFHRVPTPPGP

SEQ ID NO: 10716 - protein, 517 aa, Artificial Sequence
  Synthetic polypeptide
MQRVYGAQNEMCLATQQLSKQLLAYEKQNFALGKGDEEVISTLHYFSKVVDELNLLHTELAKQLADTMVLPIIQFREKDLTEVSTLKDLFGLASNEHDLSMAKYSRLPKKKENEKVKTEVGKEVAAARRKQHLSSLQYYCALNALQYRKQMAMMEPMIGFAHGQINFFKKGAEMFSKRMDSFLSSVADMVQSIQVELEAEAEKMRVSQQELLSVDESVYTPDSDVAAPQINRNLIQKAGYLNLRNKTGLVTTTWERLYFFTQGGNLMCQPRGAVAGGLIQDLDNCSVMAVDCEDRRYCFQITTPNGKSGIILQAESRKENEEWICAINNISRQIYLTDNPEAVAIKLNQTALQAVTPITSFGKKQESSCPSQNLKNSEMENENDKIVPKATASLPEAEELIAPGTPIQFDIVLPATEFLDQNRGSRRTNPFGETEDESFPEAEDSLLQQMFIVRFLGSMAVKTDSTTEVIYEAMRQVLAARAIHNIFRMTESHLMVTSQSLSPQTRRFHRVPTPPGP

SEQ ID NO: 10717 - protein, 33 aa, Artificial Sequence
  Synthetic polypeptide
MPAVDKLLLEEALQDSPQPGVVVGACNPSYSGG

SEQ ID NO: 10718 - protein, 175 aa, Artificial Sequence; identical to SEQ ID NO: 932
  Synthetic polypeptide

SEQ ID NO: 10719 - protein, 298 aa, Artificial Sequence
  Synthetic polypeptide
MSSACDAGDHYPLHLLVWKNDYRQLEKELQGQNVEAVDPRGRTLLHLAVSLGHLESARVLLRHKADVTKENRQGWTVLHEAVSTGDPEMVYTVLQHRDYHNTSMALEGVPELLQKILEAPDFYVQMKWEFTSWVPLVSRICPNDVCRIWKSGAKLRVDITLLGFENMSWIRGRRSFIFKGEDNWAELMEVNHDDKVVTTERFDLSQEMERLTLDLMKPKSREVERRLTSPVINTSLDTKNIAFERTKSGFWGWRTDKAEVVNGYEAKVYTVNNVNVITKIRTEHLTEEEKKRYKVPQQ

SEQ ID NO: 10720 - protein, 152 aa, Artificial Sequence
  Synthetic polypeptide
  misc_feature (1)..(1): Xaa can be any naturally occurring amino acid
XIWKSGAKLRVDITLLGFENMSWIRGRRSFIFKGEDNWAELMEVNHDDKVVTTERFDLSQEMERLTLDLMKPKSREVERRLTSPVINTSLDTKNIAFERTKSGFWGWRTDKAEVVNGYEAKVYTVNNVNVITKIRTEHLTEEEKKRYKVPQQ

SEQ ID NO: 10721 - protein, 75 aa, Artificial Sequence
  Synthetic polypeptide
LMARTSAHFARLRDFIKLEFPPGFPVKIEIPLFHVLNARITFGNVNGCSTAEESVSQNVEGTQADSATKLGEMCS

SEQ ID NO: 10722 - protein, 458 aa, Artificial Sequence
  Synthetic polypeptide
MSSACDAGDHYPLHLLVWKNDYRQLEKELQGQNVEAVDPRGRTLLHLAVSLGHLESARVLLRHKADVTKENRQGWTVLHEAVSTGDPEMVYTVLQHRDYHNTSMALEGVPELLQKILEAPDFYVQMKWEFTSWVPLVSRICPNDVCRIWKSGAKLRVDITLLGFENMSWIRGRRSFIFKGEDNWAELMEVNHDDKVVTTERFDLSQEMERLTLDLMKPKSREVERRLTSPVINTSLDTKNIAFERTKSGFWGWRTDKAEVVNGYEAKVYTVNNVNVITKIRTEHLTEEEKKRYKADRNPLESLLGTVEHQFGAQGDLTTECATANNPTAITPDEYFNEEFDLKDRDIGRPKELTIRTQKFKAMLWMCEEFPLSLVEQVIPIIDLMARTSAHFARLRDFIKLEFPPGFPVKIEIPLFHVLNARITFGNVNGCSTAEESVSQNVEGTQADSATKLGEMCS

SEQ ID NO: 10723 - protein, 128 aa, Artificial Sequence
  Synthetic polypeptide
  misc_feature (1)..(1): Xaa can be any naturally occurring amino acid
XPDEYFNEEFDLKDRDIGRPKELTIRTQKFKAMLWMCEEFPLSLVEQVIPIIDLMARTSAHFARLRDFIKLEFPPGFPVKIEIPLFHVLNARITFGNVNGCSTAEESVSQNVEGTQADSATKLGEMCS

SEQ ID NO: 10724 - protein, 114 aa, Artificial Sequence
  Synthetic polypeptide
MATWDEKAVTRRAKVAPAERMSKFLRHFTVVGDDYHAWNINYKKWENEEEEEEEEQPPPTPVSGEEGRAAAPDVAPAPGPAPRAPLDFRGMLRKLFSSHRFQWNMIPTSKAKKC

SEQ ID NO: 10725 - protein, 94 aa, Artificial Sequence
  Synthetic polypeptide
MSKFLRHFTVVGDDYHAWNINYKKWENEEEEEEEEQPPPTPVSGEEGRAAAPDVAPAPGPAPRAPLDFRGMLRKLFSSHRFQWNMIPTSKAKKC

SEQ ID NO: 10726 - protein, 9 aa, Artificial Sequence
  Synthetic polypeptide
MATWDEKEH

SEQ ID NO: 10727 - protein, 66 aa, Artificial Sequence
  Synthetic polypeptide
MRKGVLKDPEIADLFYKDDPEELFIGLHEIGHGSFGAVYFATNAHTSEVVAIKKMSYSGKQTHEAG

SEQ ID NO: 10728 - protein, 61 aa, Artificial Sequence
  Synthetic polypeptide
MRKGVLKDPEIADLFYKDDPEELFIGLHEIGHGSFGAVYFPGVVVAACNPSYSRGCGGKIT

SEQ ID NO: 10729 - protein, 256 aa, Artificial Sequence
  Synthetic polypeptide
MSMLKPSGLKAPTKILKPGSTALKTPTAVVAPVEKTISSEKASSTPSSETQEEFVDDFRVGERVWVNGNKPGFIQFLGETQFAPGQWAGIVLDEPIGKNDGSVAGVRYFQCEPLKGIFTRPSKLTRKVQAEDEANGLQTTPASRATSPLCTSTASMVSSSPSTPSNIPQKPSQPAAKEPSATPPISNLTKTASESISNLSEAGSIKKGERELKIGDRVLVPWLMPVIPALWESQVGGSRGQEIKTILANAVKPHLY

SEQ ID NO: 10730 - protein, 966 aa, Artificial Sequence
  Synthetic polypeptide
MREAAERRQQLQLEHDQALAVLSAKQQEIDLLQKSKVRELEEKCRTQSEQFNLLSRDLEKFRQHAGKIDLLGGSAVAPLDISTAPSKPFPQFMNGLATSLGKGQESAIGGSSAIGEYIRPLPQPGDRPEPLSAKPTFLSRSGSARCRSESDMENERNSNTSKQRYSGKVHLCVARYSYNPFDGPNENPEAELPLTAGKYLYVYGDMDEDGFYEGELLDGQRGLVPSNFVDFVQDNESRLASTLGNEQDQNFINHSGIGLEGEHILDLHSPTHIDAGITDNSAGTLDVNIDDIGEDIVPYPRKITLIKQLAKSVIVGWEPPAVPPGWGTVSSYNVLVDKETRMNLTLGSRTKALIEKLNMAACTYRISVQCVTSRGSSDELQCTLLVGKDVVVAPSHLRVDNITQISAQLSWLPTNSNYSHVIFLNEEEFDIVKAARYKYQFFNLRPNMAYKVKVLAKPHQMPWQLPLEQREKKEAFVEFSTLPAGPPAPPQDVTVQAGVTPATIRVSWRPPVLTPTGLSNGANVTGYGVYAKGQRVAEVIFPTADSTAVELVRLRSLEAKGVTVRTLSAQGESVDSAVAAVPPELLVPPTPHPRPAPQSKPLASSGVPETKDEHLGPHARMDEAWEQSRAPGPVHGHMLEPPVGPGRRSPSPSRILPQPQGTPVSTTVAKAMAREAAQRVAESSRLEKRSVFLERSSAGQYAASDEEDAYDSPDFKRRGASVDDFLKGSELGKQPHCCHGDEYHTESSRGSDLSDIMEEDEEELYSEMQLEDGGRRRPSGTSHNALKILGNPASAGRVDHMGRRFPRGSAGPQRSRPVTVPSIDDYGRDRLSPDFYEESETDPGAEELPARIFVALFDYDPLTMSPNPDAAEEELPFKEGQIIKVYGDKDADGFYRGETCARLGLIPCNMVSEIQADDEEMMDQLLRQGFLPLNTPVEKIDDMEIYLENLKESQRIKKFLELTNGV

SEQ ID NO: 10731 - protein, 103 aa, Artificial Sequence
  Synthetic polypeptide
MSPNPDAAEEELPFKEGQIIKVYGDKDADGFYRGETCARLGLIPCNMVSEIQADDEEMMDQLLRQGFLPLNTPVEKIDDMEIYLENLKESQRIKKFLELTNGV

SEQ ID NO: 10732 - protein, 218 aa, Artificial Sequence
  Synthetic polypeptide
MQQFGGLEATGILDEATLALMKTPRCSLPDLPVLTQARRRRQAPAPTKWNKRNLSWRVRTFPRDSPLGHDTVRALMYYALKVWSDIAPLNFHEVAGSAADIQIDFSKADHNDGYPFDGPGGTVAHAFFPGHHHTAGDTHFDDDEAWTFRSSDAHGMDLFAVAVHEFGHAIGLSHVAAAHSIMRPYYQGPVGDPLRYGLPYEDKVRVWQLYAGYGSRCL

SEQ ID NO: 10733 - protein, 302 aa, Artificial Sequence
  Synthetic polypeptide
MRRRAARGPGPPPPGPGLSRLPLPLLLLLALGTRGGCAAPAPAPRAEDLSLGVEWLSRFGYLPPADPTTGQLQTQEELSKAITAMQQFGGLEATGILDEATLALMKTPRCSLPDLPVLTQARRRRQAPAPTKWNKRNLSWRVRTFPRDSPLGHDTVRALMYYALKVWSDIAPLNFHEVAGSAADIQIDFSKADHNDGYPFDGPGGTVAHAFFPGHHHTAGDTHFDDDEAWTFRSSDAHGMDLFAVAVHEFGHAIGLSHVAAAHSIMRPYYQGPVGDPLRYGLPYEDKVRVWQLYAGYGSRCL

SEQ ID NO: 10734 - protein, 143 aa, Artificial Sequence
  Synthetic polypeptide
MYYALKVWSDIAPLNFHEVAGSAADIQIDFSKADHNDGYPFDGPGGTVAHAFFPGHHHTAGDTHFDDDEAWTFRSSDAHGMDLFAVAVHEFGHAIGLSHVAAAHSIMRPYYQGPVGDPLRYGLPYEDKVRVWQLYAGYGSRCL

SEQ ID NO: 10735 - protein, 393 aa, Artificial Sequence
  Synthetic polypeptide
GNMLRGIGETPIVPLGISYIDDFAKEGHSSLYLGSLNAIGMIGPVIGFALGSLFAKMYVDIGYVDLSTIRITPKDSRWVGAWWLGFLVSGLFSIISSIPFFFLPKNPNKPQKERKISLSLHVLKTNDDRNQTANLTNQGKNVTKNVTGFFQSLKSILTNPLYVIFLLLTLLQVSSFIGSFTYVFKYMEQQYGQSASHANFLLGIITIPTVATGMFLGGFIIKKFKLSLVGIAKFSFLTSMISFLFQLLYFPLICESKSVAGLTLTYDGNNSVASHVDVPLSYCNSECNCDESQWEPVCGNNGITYLSPCLAGCKSSSGIKKHTVFYNCSCVEVTGLQNRNYSAHLGECPRDNTCTRKFFIYVAIQVINSLFSATGGTTFILLTVKVPFVMNSS

SEQ ID NO: 10736 - protein, 569 aa, Artificial Sequence
  Synthetic polypeptide
MDQHQHLNKTAESASSEKKKTRRCNGFKMFLAALSFSYIAKALGGIIMKISITQIERRFDISSSLAGLIDGSFEIGNLLVIVFVSYFGSKLHRPKLIGIGCLLMGTGSILTSLPHFFMGYYRYSKETHINPSENSTSSLSTCLINQTLSFNGTSPEIVEKDCVKESGSHMWIYVFMGNMLRGIGETPIVPLGISYIDDFAKEGHSSLYLGSLNAIGMIGPVIGFALGSLFAKMYVDIGYVDLSTIRITPKDSRWVGAWWLGFLVSGLFSIISSIPFFFLPKNPNKPQKERKISLSLHVLKTNDDRNQTANLTNQGKNVTKNVTGFFQSLKSILTNPLYVIFLLLTLLQVSSFIGSFTYVFKYMEQQYGQSASHANFLLGIITIPTVATGMFLGGFIIKKFKLSLVGIAKFSFLTSMISFLFQLLYFPLICESKSVAGLTLTYDGNNSVASHVDVPLSYCNSECNCDESQWEPVCGNNGITYLSPCLAGCKSSSGIKKHTVFYNCSCVEVTGLQNRNYSAHLGECPRDNTCTRKFFIYVAIQVINSLFSATGGTTFILLTVKVPFVMNSS

SEQ ID NO: 10737 - protein, 94 aa, Artificial Sequence
  Synthetic polypeptide
MGFLQLLVVAVLASEHRVAGAAEVFGNSSEGLIEFSVGKFRYFELNRPFPEEAILHDISSNVTFLIFQIHSQYQNTTVSFSPVSVYQHLKVYFM

SEQ ID NO: 10738 - protein, 99 aa, Artificial Sequence
  Synthetic polypeptide
MGFLQLLVVAVLASEHRVAGAAEVFGNSSEVYLVVGLIEFSVGKFRYFELNRPFPEEAILHDISSNVTFLIFQIHSQYQNTTVSFSPVSVYQHLKVYFM

SEQ ID NO: 10739 - protein, 73 aa, Artificial Sequence
  Synthetic polypeptide
MSHRARPISGLIEFSVGKFRYFELNRPFPEEAILHDISSNVTFLIFQIHSQYQNTTVSFSPVSVYQHLKVYFM

SEQ ID NO: 10740 - protein, 1730 aa, Artificial Sequence
  Synthetic polypeptide
MVNENTRMYIPEENHQGSNYGSPRPAHANMNANAAAGLAPEHIPTPGAALSWQAAIDAARQAKLMGSAGNATISTVSSTQRKRQQYGKPKKQGSTTATRPPRALLCLTLKNPIRRACISIVEWKPFEIIILLTIFANCVALAIYIPFPEDDSNATNSNLERVEYLFLIIFTVEAFLKVIAYGLLFHPNAYLRNGWNLLDFIIVVVGLFSAILEQATKADGANALGGKGAGFDVKALRAFRVLRPLRLVSGVPSLQVVLNSIIKAMVPLLHIALLVLFVIIIYAIIGLELFMGKMHKTCYNQEGIADVPAEDDPSPCALETGHGRQCQNGTVCKPGWDGPKHGITNFDNFAFAMLTVFQCITMEGWTDVLYWMQDAMGYELPWVYFVSLVIFGSFFVLNLVLGVLSGEFSKEREKAKARGDFQKLREKQQLEEDLKGYLDWITQAEDIDPENEDEGMDEEKPRNMSMPTSETESVNTENVAGGDIEGENCGARLAHRISKSKFSRYWRRWNRFCRRKCRAAVKSNVFYWLVIFLVFLNTLTIASEHYNQPNWLTEVQDTANKALLALFTAEMLLKMYSLGLQAYFVSLFNRFDCFVVCGGILETILVETKIMSPLGISVLRCVRLLRIFKITRYWNSLSNLVASLLNSVRSIASLLLLLFLFIIIFSLLGMQLFGGKFNFDEMQTRRSTFDNFPQSLLTVFQILTGEDWNSVMYDGIMAYGGPSFPGMLVCIYFIILFICGNYILLNVFLAIAVDNLADAESLTSAQKEEEEEKERKKLARTASPEKKQELVEKPAVGESKEEKIELKSITADGESPPATKINMDDLQPNENEDKSPYPNPETTGEEDEEEPEMPVGPRPRPLSELHLKEKAVPMPEASAFFIFSSNNRFRLQCHRIVNDTIFTNLILFFILLSSISLAAEDPVQHTSFRNHILFYFDIVFTTIFTIEIALKMTAYGAFLHKGSFCRNYFNILDLLVVSVSLISFGIQSSAINVVKILRVLRVLRPLRAINRAKGLKHVVQCVFVAIRTIGNIVIVTTLLQFMFACIGVQLFKGKLYTCSDSSKQTEAECKGNYITYKDGEVDHPIIQPRSWENSKFDFDNVLAAMMALFTVSTFEGWPELLYRSIDSHTEDKGPIYNYRVEISIFFIIYIIIIAFFMMNIFVGFVIVTFQEQGEQEYKNCELDKNQRQCVEYALKARPLRRYIPKNQHQYKVWYVVNSTYFEYLMFVLILLNTICLAMQHYGQSCLFKIAMNILNMLFTGLFTVEMILKLIAFKPKGYFSDPWNVFDFLIVIGSIIDVILSETNPAEHTQCSPSMNAEENSRISITFFRLFRVMRLVKLLSRGEGIRTLLWTFIKSFQALPYVALLIVMLFFIYAVIGMQVFGKIALNDTTEINRNNNFQTFPQAVLLLFRCATGEAWQDIMLACMPGKKCAPESEPSNSTEGETPCGSSFAVFYFISFYMLCAFLIINLFVAVIMDNFDYLTRDWSILGPHHLDEFKRIWAEYDPEAKGRIKHLDVVTLLRRIQPPLGFGKLCPHRVACKRLVSMNMPLNSDGTVMFNATLFALVRTALRIKTEGNLEQANEELRAIIKKIWKRTSMKLLDQVVPPAGDDEVTVGKFYATFLIQEYFRKFKKRKEQGLVGKPSQRNALSLQAGLRTLHDIGPEIRRAISGDLTAEEELDKAMKEAVSAASEDDIFRGSRGPEPRGGGPLRWSIACVLQVSKTPPELPFP

SEQ ID NO: 10741 - protein, 1730 aa, Artificial Sequence
  Synthetic polypeptide
MVNENTRMYIPEENHQGSNYGSPRPAHANMNANAAAGLAPEHIPTPGAALSWQAAIDAARQAKLMGSAGNATISTVSSTQRKRQQYGKPKKQGSTTATRPPRALLCLTLKNPIRRACISIVEWKPFEIIILLTIFANCVALAIYIPFPEDDSNATNSNLERVEYLFLIIFTVEAFLKVIAYGLLFHPNAYLRNGWNLLDFIIVVVGLFSAILEQATKADGANALGGKGAGFDVKALRAFRVLRPLRLVSGVPSLQVVLNSIIKAMVPLLHIALLVLFVIIIYAIIGLELFMGKMHKTCYNQEGIADVPAEDDPSPCALETGHGRQCQNGTVCKPGWDGPKHGITNFDNFAFAMLTVFQCITMEGWTDVLYWMQDAMGYELPWVYFVSLVIFGSFFVLNLVLGVLSGEFSKEREKAKARGDFQKLREKQQLEEDLKGYLDWITQAEDIDPENEDEGMDEEKPRNMSMPTSETESVNTENVAGGDIEGENCGARLAHRISKSKFSRYWRRWNRFCRRKCRAAVKSNVFYWLVIFLVFLNTLTIASEHYNQPNWLTEVQDTANKALLALFTAEMLLKMYSLGLQAYFVSLFNRFDCFVVCGGILETILVETKIMSPLGISVLRCVRLLRIFKITRYWNSLSNLVASLLNSVRSIASLLLLLFLFIIIFSLLGMQLFGGKFNFDEMQTRRSTFDNFPQSLLTVFQILTGEDWNSVMYDGIMAYGGPSFPGMLVCIYFIILFICGNYILLNVFLAIAVDNLADAESLTSAQKEEEEEKERKKLARTASPEKKQELVEKPAVGESKEEKIELKSITADGESPPATKINMDDLQPNENEDKSPYPNPETTGEEDEEEPEMPVGPRPRPLSELHLKEKAVPMPEASAFFIFSSNNRFRLQCHRIVNDTIFTNLILFFILLSSISLAAEDPVQHTSFRNHILFYFDIVFTTIFTIEIALKMTAYGAFLHKGSFCRNYFNILDLLVVSVSLISFGIQSSAINVVKILRVLRVLRPLRAINRAKGLKHVVQCVFVAIRTIGNIVIVTTLLQFMFACIGVQLFKGKLYTCSDSSKQTEAECKGNYITYKDGEVDHPIIQPRSWENSKFDFDNVLAAMMALFTVSTFEGWPELLYRSIDSHTEDKGPIYNYRVEISIFFIIYIIIIAFFMMNIFVGFVIVTFQEQGEQEYKNCELDKNQRQCVEYALKARPLRRYIPKNQHQYKVWYVVNSTYFEYLMFVLILLNTICLAMQHYGQSCLFKIAMNILNMLFTGLFTVEMILKLIAFKPKHYFCDAWNTFDALIVVGSIVDIAITEVNPAEHTQCSPSMNAEENSRISITFFRLFRVMRLVKLLSRGEGIRTLLWTFIKSFQALPYVALLIVMLFFIYAVIGMQVFGKIALNDTTEINRNNNFQTFPQAVLLLFRCATGEAWQDIMLACMPGKKCAPESEPSNSTEGETPCGSSFAVFYFISFYMLCAFLIINLFVAVIMDNFDYLTRDWSILGPHHLDEFKRIWAEYDPEAKGRIKHLDVVTLLRRIQPPLGFGKLCPHRVACKRLVSMNMPLNSDGTVMFNATLFALVRTALRIKTEGNLEQANEELRAIIKKIWKRTSMKLLDQVVPPAGDDEVTVGKFYATFLIQEYFRKFKKRKEQGLVGKPSQRNALSLQAGLRTLHDIGPEIRRAISGDLTAEEELDKAMKEAVSAASEDDIFRGSRGPEPRGGGPLRWSIACVLQVSKTPPELPFP

SEQ ID NO: 10742 - protein, 1730 aa, Artificial Sequence
  Synthetic polypeptide
MVNENTRMYIPEENHQGSNYGSPRPAHANMNANAAAGLAPEHIPTPGAALSWQAAIDAARQAKLMGSAGNATISTVSSTQRKRQQYGKPKKQGSTTATRPPRALLCLTLKNPIRRACISIVEWKPFEIIILLTIFANCVALAIYIPFPEDDSNATNSNLERVEYLFLIIFTVEAFLKVIAYGLLFHPNAYLRNGWNLLDFIIVVVGLFSAILEQATKADGANALGGKGAGFDVKALRAFRVLRPLRLVSGVPSLQVVLNSIIKAMVPLLHIALLVLFVIIIYAIIGLELFMGKMHKTCYNQEGIADVPAEDDPSPCALETGHGRQCQNGTVCKPGWDGPKHGITNFDNFAFAMLTVFQCITMEGWTDVLYWMQDAMGYELPWVYFVSLVIFGSFFVLNLVLGVLSGEFSKEREKAKARGDFQKLREKQQLEEDLKGYLDWITQAEDIDPENEDEGMDEEKPRNMSMPTSETESVNTENVAGGDIEGENCGARLAHRISKSKFSRYWRRWNRFCRRKCRAAVKSNVFYWLVIFLVFLNTLTIASEHYNQPNWLTEVQDTANKALLALFTAEMLLKMYSLGLQAYFVSLFNRFDCFVVCGGILETILVETKIMSPLGISVLRCVRLLRIFKITRYWNSLSNLVASLLNSVRSIASLLLLLFLFIIIFSLLGMQLFGGKFNFDEMQTRRSTFDNFPQSLLTVFQILTGEDWNSVMYDGIMAYGGPSFPGMLVCIYFIILFICGNYILLNVFLAIAVDNLADAESLTSAQKEEEEEKERKKLARTASPEKKQELVEKPAVGESKEEKIELKSITADGESPPATKINMDDLQPNENEDKSPYPNPETTGEEDEEEPEMPVGPRPRPLSELHLKEKAVPMPEASAFFIFSSNNRFRLQCHRIVNDTIFTNLILFFILLSSISLAAEDPVQHTSFRNHILGNADYVFTSIFTLEIILKMTAYGAFLHKGSFCRNYFNILDLLVVSVSLISFGIQSSAINVVKILRVLRVLRPLRAINRAKGLKHVVQCVFVAIRTIGNIVIVTTLLQFMFACIGVQLFKGKLYTCSDSSKQTEAECKGNYITYKDGEVDHPIIQPRSWENSKFDFDNVLAAMMALFTVSTFEGWPELLYRSIDSHTEDKGPIYNYRVEISIFFIIYIIIIAFFMMNIFVGFVIVTFQEQGEQEYKNCELDKNQRQCVEYALKARPLRRYIPKNQHQYKVWYVVNSTYFEYLMFVLILLNTICLAMQHYGQSCLFKIAMNILNMLFTGLFTVEMILKLIAFKPKHYFCDAWNTFDALIVVGSIVDIAITEVNPAEHTQCSPSMNAEENSRISITFFRLFRVMRLVKLLSRGEGIRTLLWTFIKSFQALPYVALLIVMLFFIYAVIGMQVFGKIALNDTTEINRNNNFQTFPQAVLLLFRCATGEAWQDIMLACMPGKKCAPESEPSNSTEGETPCGSSFAVFYFISFYMLCAFLIINLFVAVIMDNFDYLTRDWSILGPHHLDEFKRIWAEYDPEAKGRIKHLDVVTLLRRIQPPLGFGKLCPHRVACKRLVSMNMPLNSDGTVMFNATLFALVRTALRIKTEGNLEQANEELRAIIKKIWKRTSMKLLDQVVPPAGDDEVTVGKFYATFLIQEYFRKFKKRKEQGLVGKPSQRNALSLQAGLRTLHDIGPEIRRAISGDLTAEEELDKAMKEAVSAASEDDIFRGSRGPEPRGGGPLRWSIACVLQVSKTPPELPFP

SEQ ID NO: 10743 - protein, 1778 aa, Artificial Sequence
  Synthetic polypeptide
MVNENTRMYIPEENHQGSNYGSPRPAHANMNANAAAGLAPEHIPTPGAALSWQAAIDAARQAKLMGSAGNATISTVSSTQRKRQQYGKPKKQGSTTATRPPRALLCLTLKNPIRRACISIVEWKPFEIIILLTIFANCVALAIYIPFPEDDSNATNSNLERVEYLFLIIFTVEAFLKVIAYGLLFHPNAYLRNGWNLLDFIIVVVGLFSAILEQATKADGANALGGKGAGFDVKALRAFRVLRPLRLVSGVPSLQVVLNSIIKAMVPLLHIALLVLFVIIIYAIIGLELFMGKMHKTCYNQEGIADVPAEDDPSPCALETGHGRQCQNGTVCKPGWDGPKHGITNFDNFAFAMLTVFQCITMEGWTDVLYWVNDAVGRDWPWIYFVTLIIIGSFFVLNLVLGVLSGEFSKEREKAKARGDFQKLREKQQLEEDLKGYLDWITQAEDIDPENEDEGMDEEKPRNMSMPTSETESVNTENVAGGDIEGENCGARLAHRISKSKFSRYWRRWNRFCRRKCRAAVKSNVFYWLVIFLVFLNTLTIASEHYNQPNWLTEVQDTANKALLALFTAEMLLKMYSLGLQAYFVSLFNRFDCFVVCGGILETILVETKIMSPLGISVLRCVRLLRIFKITRYWNSLSNLVASLLNSVRSIASLLLLLFLFIIIFSLLGMQLFGGKFNFDEMQTRRSTFDNFPQSLLTVFQILTGEDWNSVMYDGIMAYGGPSFPGMLVCIYFIILFICGNYILLNVFLAIAVDNLADAESLTSAQKEEEEEKERKKLARTASPEKKQELVEKPAVGESKEEKIELKSITADGESPPATKINMDDLQPNENEDKSPYPNPETTGEEDEEEPEMPVGPRPRPLSELHLKEKAVPMPEASAFFIFSSNNRFRLQCHRIVNDTIFTNLILFFILLSSISLAAEDPVQHTSFRNHILFYFDIVFTTIFTIEIALKILGNADYVFTSIFTLEIILKMTAYGAFLHKGSFCRNYFNILDLLVVSVSLISFGIQSSAINVVKILRVLRVLRPLRAINRAKGLKHVVQCVFVAIRTIGNIVIVTTLLQFMFACIGVQLFKGKLYTCSDSSKQTEAECKGNYITYKDGEVDHPIIQPRSWENSKFDFDNVLAAMMALFTVSTFEGWPELLYRSIDSHTEDKGPIYNYRVEISIFFIIYIIIIAFFMMNIFVGFVIVTFQEQGEQEYKNCELDKNQRQCVEYALKARPLRRYIPKNQHQYKVWYVVNSTYFEYLMFVLILLNTICLAMQHYGQSCLFKIAMNILNMLFTGLFTVEMILKLIAFKPKGYFSDPWNVFDFLIVIGSIIDVILSETNHYFCDAWNTFDALIVVGSIVDIAITEVNPAEHTQCSPSMNAEENSRISITFFRLFRVMRLVKLLSRGEGIRTLLWTFIKSFQALPYVALLIVMLFFIYAVIGMQVFGKIALNDTTEINRNNNFQTFPQAVLLLFRCATGEAWQDIMLACMPGKKCAPESEPSNSTEGETPCGSSFAVFYFISFYMLCAFLIINLFVAVIMDNFDYLTRDWSILGPHHLDEFKRIWAEYDPEAKGRIKHLDVVTLLRRIQPPLGFGKLCPHRVACKRLVSMNMPLNSDGTVMFNATLFALVRTALRIKTEGNLEQANEELRAIIKKIWKRTSMKLLDQVVPPAGDDEVTVGKFYATFLIQEYFRKFKKRKEQGLVGKPSQRNALSLQAGLRTLHDIGPEIRRAISGDLTAEEELDKAMKEAVSAASEDDIFRGSRGPEPRGGGPLRWSIACVLQVSKTPPELPFP

SEQ ID NO: 10744 - protein, 1750 aa, Artificial Sequence
  Synthetic polypeptide
MVNENTRMYIPEENHQGSNYGSPRPAHANMNANAAAGLAPEHIPTPGAALSWQAAIDAARQAKLMGSAGNATISTVSSTQRKRQQYGKPKKQGSTTATRPPRALLCLTLKNPIRRACISIVEWKPFEIIILLTIFANCVALAIYIPFPEDDSNATNSNLERVEYLFLIIFTVEAFLKVIAYGLLFHPNAYLRNGWNLLDFIIVVVGLFSAILEQATKADGANALGGKGAGFDVKALRAFRVLRPLRLVSGVPSLQVVLNSIIKAMVPLLHIALLVLFVIIIYAIIGLELFMGKMHKTCYNQEGIADVPAEDDPSPCALETGHGRQCQNGTVCKPGWDGPKHGITNFDNFAFAMLTVFQCITMEGWTDVLYWVNDAVGRDWPWIYFVTLIIIGSFFVLNLVLGVLSGEFSKEREKAKARGDFQKLREKQQLEEDLKGYLDWITQAEDIDPENEDEGMDEEKPRNMSMPTSETESVNTENVAGGDIEGENCGARLAHRISKSKFSRYWRRWNRFCRRKCRAAVKSNVFYWLVIFLVFLNTLTIASEHYNQPNWLTEVQDTANKALLALFTAEMLLKMYSLGLQAYFVSLFNRFDCFVVCGGILETILVETKIMSPLGISVLRCVRLLRIFKITRYWNSLSNLVASLLNSVRSIASLLLLLFLFIIIFSLLGMQLFGGKFNFDEMQTRRSTFDNFPQSLLTVFQILTGEDWNSVMYDGIMAYGGPSFPGMLVCIYFIILFICGNYILLNVFLAIAVDNLADAESLTSAQKEEEEEKERKKLARTASPEKKQELVEKPAVGESKEEKIELKSITADGESPPATKINMDDLQPNENEDKSPYPNPETTGEEDEEEPEMPVGPRPRPLSELHLKEKAVPMPEASAFFIFSSNNRFRLQCHRIVNDTIFTNLILFFILLSSISLAAEDPVQHTSFRNHILFYFDIVFTTIFTIEIALKILGNADYVFTSIFTLEIILKMTAYGAFLHKGSFCRNYFNILDLLVVSVSLISFGIQSSAINVVKILRVLRVLRPLRAINRAKGLKHVVQCVFVAIRTIGNIVIVTTLLQFMFACIGVQLFKGKLYTCSDSSKQTEAECKGNYITYKDGEVDHPIIQPRSWENSKFDFDNVLAAMMALFTVSTFEGWPELLYRSIDSHTEDKGPIYNYRVEISIFFIIYIIIIAFFMMNIFVGFVIVTFQEQGEQEYKNCELDKNQRQCVEYALKARPLRRYIPKNQHQYKVWYVVNSTYFEYLMFVLILLNTICLAMQHYGQSCLFKIAMNILNMLFTGLFTVEMILKLIAFKPKHYFCDAWNTFDALIVVGSIVDIAITEVNPAEHTQCSPSMNAEENSRISITFFRLFRVMRLVKLLSRGEGIRTLLWTFIKSFQALPYVALLIVMLFFIYAVIGMQVFGKIALNDTTEINRNNNFQTFPQAVLLLFRCATGEAWQDIMLACMPGKKCAPESEPSNSTEGETPCGSSFAVFYFISFYMLCAFLIINLFVAVIMDNFDYLTRDWSILGPHHLDEFKRIWAEYDPEAKGRIKHLDVVTLLRRIQPPLGFGKLCPHRVACKRLVSMNMPLNSDGTVMFNATLFALVRTALRIKTEGNLEQANEELRAIIKKIWKRTSMKLLDQVVPPAGDDEVTVGKFYATFLIQEYFRKFKKRKEQGLVGKPSQRNALSLQAGLRTLHDIGPEIRRAISGDLTAEEELDKAMKEAVSAASEDDIFRGSRGPEPRGGGPLRWSIACVLQVSKTPPELPFP

SEQ ID NO: 10745 - protein, 1758 aa, Artificial Sequence
  Synthetic polypeptide
MVNENTRMYIPEENHQGSNYGSPRPAHANMNANAAAGLAPEHIPTPGAALSWQAAIDAARQAKLMGSAGNATISTVSSTQRKRQQYGKPKKQGSTTATRPPRALLCLTLKNPIRRACISIVEWKPFEIIILLTIFANCVALAIYIPFPEDDSNATNSNLERVEYLFLIIFTVEAFLKVIAYGLLFHPNAYLRNGWNLLDFIIVVVGLFSAILEQATKADGANALGGKGAGFDVKALRAFRVLRPLRLVSGVPSLQVVLNSIIKAMVPLLHIALLVLFVIIIYAIIGLELFMGKMHKTCYNQEGIADVPAEDDPSPCALETGHGRQCQNGTVCKPGWDGPKHGITNFDNFAFAMLTVFQCITMEGWTDVLYWVNDAVGRDWPWIYFVTLIIIGSFFVLNLVLGVLSGEFSKEREKAKARGDFQKLREKQQLEEDLKGYLDWITQAEDIDPENEDEGMDEEKPRNMSMPTSETESVNTENVAGGDIEGENCGARLAHRISKSKFSRYWRRWNRFCRRKCRAAVKSNVFYWLVIFLVFLNTLTIASEHYNQPNWLTEVQDTANKALLALFTAEMLLKMYSLGLQAYFVSLFNRFDCFVVCGGILETILVETKIMSPLGISVLRCVRLLRIFKITRYWNSLSNLVASLLNSVRSIASLLLLLFLFIIIFSLLGMQLFGGKFNFDEMQTRRSTFDNFPQSLLTVFQILTGEDWNSVMYDGIMAYGGPSFPGMLVCIYFIILFICGNYILLNVFLAIAVDNLADAESLTSAQKEEEEEKERKKLARTASPEKKQELVEKPAVGESKEEKIELKSITADGESPPATKINMDDLQPNENEDKSPYPNPETTGEEDEEEPEMPVGPRPRPLSELHLKEKAVPMPEASAFFIFSSNNRFRLQCHRIVNDTIFTNLILFFILLSSISLAAEDPVQHTSFRNHILFYFDIVFTTIFTIEIALKMTAYGAFLHKGSFCRNYFNILDLLVVSVSLISFGIQSSAINVVKILRVLRVLRPLRAINRAKGLKHVVQCVFVAIRTIGNIVIVTTLLQFMFACIGVQLFKGKLYTCSDSSKQTEAECKGNYITYKDGEVDHPIIQPRSWENSKFDFDNVLAAMMALFTVSTFEGWPELLYRSIDSHTEDKGPIYNYRVEISIFFIIYIIIIAFFMMNIFVGFVIVTFQEQGEQEYKNCELDKNQRQCVEYALKARPLRRYIPKNQHQYKVWYVVNSTYFEYLMFVLILLNTICLAMQHYGQSCLFKIAMNILNMLFTGLFTVEMILKLIAFKPKGYFSDPWNVFDFLIVIGSIIDVILSETNHYFCDAWNTFDALIVVGSIVDIAITEVNPAEHTQCSPSMNAEENSRISITFFRLFRVMRLVKLLSRGEGIRTLLWTFIKSFQALPYVALLIVMLFFIYAVIGMQVFGKIALNDTTEINRNNNFQTFPQAVLLLFRCATGEAWQDIMLACMPGKKCAPESEPSNSTEGETPCGSSFAVFYFISFYMLCAFLIINLFVAVIMDNFDYLTRDWSILGPHHLDEFKRIWAEYDPEAKGRIKHLDVVTLLRRIQPPLGFGKLCPHRVACKRLVSMNMPLNSDGTVMFNATLFALVRTALRIKTEGNLEQANEELRAIIKKIWKRTSMKLLDQVVPPAGDDEVTVGKFYATFLIQEYFRKFKKRKEQGLVGKPSQRNALSLQAGLRTLHDIGPEIRRAISGDLTAEEELDKAMKEAVSAASEDDIFRGSRGPEPRGGGPLRWSIACVLQVSKTPPELPFP

SEQ ID NO: 10746 - protein, 1749 aa, Artificial Sequence
  Synthetic polypeptide
MVNENTRMYIPEENHQGSNYGSPRPAHANMNANAAAGLAPEHIPTPGAALSWQAAIDAARQAKLMGSAGNATISTVSSTQRKRQQYGKPKKQGSTTATRPPRALLCLTLKNPIRRACISIVEWKPFEIIILLTIFANCVALAIYIPFPEDDSNATNSNLERVEYLFLIIFTVEAFLKVIAYGLLFHPNAYLRNGWNLLDFIIVVVGLFSAILEQATKADGANALGGKGAGFDVKALRAFRVLRPLRLVSGVPSLQVVLNSIIKAMVPLLHIALLVLFVIIIYAIIGLELFMGKMHKTCYNQEGIADVPAEDDPSPCALETGHGRQCQNGTVCKPGWDGPKHGITNFDNFAFAMLTVFQCITMEGWTDVLYWVNDAVGRDWPWIYFVTLIIIGSFFVLNLVLGVLSGEFSKEREKAKARGDFQKLREKQQLEEDLKGYLDWITQAEDIDPENEDEGMDEEKPRNMSMPTSETESVNTENVAGGDIEGENCGARLAHRISKSKFSRYWRRWNRFCRRKCRAAVKSNVFYWLVIFLVFLNTLTIASEHYNQPNWLTEVQDTANKALLALFTAEMLLKMYSLGLQAYFVSLFNRFDCFVVCGGILETILVETKIMSPLGISVLRCVRLLRIFKITRYWNSLSNLVASLLNSVRSIASLLLLLFLFIIIFSLLGMQLFGGKFNFDEMQTRRSTFDNFPQSLLTVFQILTGEDWNSVMYDGIMAYGGPSFPGMLVCIYFIILFICGNYILLNVFLAIAVDNLADAESLTSAQKEEEEEKERKKLARTASPEKKQELVEKPAVGESKEEKIELKSITADGESPPATKINMDDLQPNENEDKSPYPNPETTGEEDEEEPEMPVGPRPRPLSELHLKEKAVPMPEASAFFIFSSNNRFRLQCHRIVNDTIFTNLILFFILLSSISLAAEDPVQHTSFRNHILFYFDIVFTTIFTIEIALKMTAYGAFLHKGSFCRNYFNILDLLVVSVSLISFGIQSSAINVVKILRVLRVLRPLRAINRAKGLKHVVQCVFVAIRTIGNIVIVTTLLQFMFACIGVQLFKGKLYTCSDSSKQTEAECKGNYITYKDGEVDHPIIQPRSWENSKFDFDNVLAAMMALFTVSTFEGWPELLYRSIDSHTEDKGPIYNYRVEISIFFIIYIIIIAFFMMNIFVGFVIVTFQEQGEQEYKNCELDKNQRQCVEYALKARPLRRYIPKNQHQYKVWYVVNSTYFEYLMFVLILLNTICLAMQHYGQSCLFKIAMNILNMLFTGLFTVEMILKLIAFKPKGYFSDPWNVFDFLIVIGSIIDVILSETNPAEHTQCSPSMNAEENSRISITFFRLFRVMRLVKLLSRGEGIRTLLWTFIKSFQALPYVALLIVMLFFIYAVIGMQVFGKIALNDTTEINRNNNFQTFPQAVLLLFRCATGEAWQDIMLACMPGKKCAPESEPSNSTEGETPCGSSFAVFYFISFYMLCAFLIINLFVAVIMDNFDYLTRDWSILGPHHLDEFKRIWAEYDPEAKGRIKHLDVVTLLRRIQPPLGFGKLCPHRVACKRLVSMNMPLNSDGTVMFNATLFALVRTALRIKTEEGPSPSEAHQGAEDPFRPAGNLEQANEELRAIIKKIWKRTSMKLLDQVVPPAGDDEVTVGKFYATFLIQEYFRKFKKRKEQGLVGKPSQRNALSLQAGLRTLHDIGPEIRRAISGDLTAEEELDKAMKEAVSAASEDDIFRGSRGPEPRGGGPLRWSIACVLQVSKTPPELPFP

SEQ ID NO: 10747 - protein, 1730 aa, Artificial Sequence
  Synthetic polypeptide
MVNENTRMYIPEENHQGSNYGSPRPAHANMNANAAAGLAPEHIPTPGAALSWQAAIDAARQAKLMGSAGNATISTVSSTQRKRQQYGKPKKQGSTTATRPPRALLCLTLKNPIRRACISIVEWKPFEIIILLTIFANCVALAIYIPFPEDDSNATNSNLERVEYLFLIIFTVEAFLKVIAYGLLFHPNAYLRNGWNLLDFIIVVVGLFSAILEQATKADGANALGGKGAGFDVKALRAFRVLRPLRLVSGVPSLQVVLNSIIKAMVPLLHIALLVLFVIIIYAIIGLELFMGKMHKTCYNQEGIADVPAEDDPSPCALETGHGRQCQNGTVCKPGWDGPKHGITNFDNFAFAMLTVFQCITMEGWTDVLYWVNDAVGRDWPWIYFVTLIIIGSFFVLNLVLGVLSGEFSKEREKAKARGDFQKLREKQQLEEDLKGYLDWITQAEDIDPENEDEGMDEEKPRNMSMPTSETESVNTENVAGGDIEGENCGARLAHRISKSKFSRYWRRWNRFCRRKCRAAVKSNVFYWLVIFLVFLNTLTIASEHYNQPNWLTEVQDTANKALLALFTAEMLLKMYSLGLQAYFVSLFNRFDCFVVCGGILETILVETKIMSPLGISVLRCVRLLRIFKITRYWNSLSNLVASLLNSVRSIASLLLLLFLFIIIFSLLGMQLFGGKFNFDEMQTRRSTFDNFPQSLLTVFQILTGEDWNSVMYDGIMAYGGPSFPGMLVCIYFIILFICGNYILLNVFLAIAVDNLADAESLTSAQKEEEEEKERKKLARTASPEKKQELVEKPAVGESKEEKIELKSITADGESPPATKINMDDLQPNENEDKSPYPNPETTGEEDEEEPEMPVGPRPRPLSELHLKEKAVPMPEASAFFIFSSNNRFRLQCHRIVNDTIFTNLILFFILLSSISLAAEDPVQHTSFRNHILFYFDIVFTTIFTIEIALKMTAYGAFLHKGSFCRNYFNILDLLVVSVSLISFGIQSSAINVVKILRVLRVLRPLRAINRAKGLKHVVQCVFVAIRTIGNIVIVTTLLQFMFACIGVQLFKGKLYTCSDSSKQTEAECKGNYITYKDGEVDHPIIQPRSWENSKFDFDNVLAAMMALFTVSTFEGWPELLYRSIDSHTEDKGPIYNYRVEISIFFIIYIIIIAFFMMNIFVGFVIVTFQEQGEQEYKNCELDKNQRQCVEYALKARPLRRYIPKNQHQYKVWYVVNSTYFEYLMFVLILLNTICLAMQHYGQSCLFKIAMNILNMLFTGLFTVEMILKLIAFKPKGYFSDPWNVFDFLIVIGSIIDVILSETNPAEHTQCSPSMNAEENSRISITFFRLFRVMRLVKLLSRGEGIRTLLWTFIKSFQALPYVALLIVMLFFIYAVIGMQVFGKIALNDTTEINRNNNFQTFPQAVLLLFRCATGEAWQDIMLACMPGKKCAPESEPSNSTEGETPCGSSFAVFYFISFYMLCAFLIINLFVAVIMDNFDYLTRDWSILGPHHLDEFKRIWAEYDPEAKGRIKHLDVVTLLRRIQPPLGFGKLCPHRVACKRLVSMNMPLNSDGTVMFNATLFALVRTALRIKTEGNLEQANEELRAIIKKIWKRTSMKLLDQVVPPAGDDEVTVGKFYATFLIQEYFRKFKKRKEQGLVGKPSQRNALSLQAGLRTLHDIGPEIRRAISGDLTAEEELDKAMKEAVSAASEDDIFRGSRGPEPRGGGPLRWSIACVLQVSKTPPELPFP

SEQ ID NO: 10748 - protein, 1736 aa, Artificial Sequence
  Synthetic polypeptide
MVNENTRMYIPEENHQGSNYGSPRPAHANMNANAAAGLAPEHIPTPGAALSWQAAIDAARQAKLMGSAGNATISTVSSTQRKRQQYGKPKKQGSTTATRPPRALLCLTLKNPIRRACISIVEWKPFEIIILLTIFANCVALAIYIPFPEDDSNATNSNLERVEYLFLIIFTVEAFLKVIAYGLLFHPNAYLRNGWNLLDFIIVVVGLFSAILEQATKADGANALGGKGAGFDVKALRAFRVLRPLRLVSGVPSLQVVLNSIIKAMVPLLHIALLVLFVIIIYAIIGLELFMGKMHKTCYNQEGIADVPAEDDPSPCALETGHGRQCQNGTVCKPGWDGPKHGITNFDNFAFAMLTVFQCITMEGWTDVLYWVNDAVGRDWPWIYFVTLIIIGSFFVLNLVLGVLSGEFSKEREKAKARGDFQKLREKQQLEEDLKGYLDWITQAEDIDPENEDEGMDEEKPRNMSMPTSETESVNTENVAGGDIEGENCGARLAHRISKSKFSRYWRRWNRFCRRKCRAAVKSNVFYWLVIFLVFLNTLTIASEHYNQPNWLTEVQDTANKALLALFTAEMLLKMYSLGLQAYFVSLFNRFDCFVVCGGILETILVETKIMSPLGISVLRCVRLLRIFKITRYWNSLSNLVASLLNSVRSIASLLLLLFLFIIIFSLLGMQLFGGKFNFDEMQTRRSTFDNFPQSLLTVFQILTGEDWNSVMYDGIMAYGGPSFPGMLVCIYFIILFICGNYILLNVFLAIAVDNLADAESLTSAQKEEEEEKERKKLARTASPEKKQELVEKPAVGESKEEKIELKSITADGESPPATKINMDDLQPNENEDKSPYPNPETTGEEDEEEPEMPVGPRPRPLSELHLKEKAVPMPEASAFFIFSSNNRFRLQCHRIVNDTIFTNLILFFILLSSISLAAEDPVQHTSFRNHILFYFDIVFTTIFTIEIALKMTAYGAFLHKGSFCRNYFNILDLLVVSVSLISFGIQSSAINVVKILRVLRVLRPLRAINRAKGLKHVVQCVFVAIRTIGNIVIVTTLLQFMFACIGVQLFKGKLYTCSDSSKQTEAECKGNYITYKDGEVDHPIIQPRSWENSKFDFDNVLAAMMALFTVSTFEGWPELLYRSIDSHTEDKGPIYNYRVEISIFFIIYIIIIAFFMMNIFVGFVIVTFQEQGEQEYKNCELDKNQRQCVEYALKARPLRRYIPKNQHQYKVWYVVNSTYFEYLMFVLILLNTICLAMQHYGQSCLFKIAMNILNMLFTGLFTVEMILKLIAFKPKHYFCDAWNTFDALIVVGSIVDIAITENAEENSRISITFFRLFRVMRLVKLLSRGEGIRTLLWTFIKSFQALPYVALLIVMLFFIYAVIGMQVFGKIALNDTTEINRNNNFQTFPQAVLLLFRCATGEAWQDIMLACMPGKKCAPESEPSNSTEGETPCGSSFAVFYFISFYMLCAFLIINLFVAVIMDNFDYLTRDWSILGPHHLDEFKRIWAEYDPEAKGRIKHLDVVTLLRRIQPPLGFGKLCPHRVACKRLVSMNMPLNSDGTVMFNATLFALVRTALRIKTEEGPSPSEAHQGAEDPFRPAGNLEQANEELRAIIKKIWKRTSMKLLDQVVPPAGDDEVTVGKFYATFLIQEYFRKFKKRKEQGLVGKPSQRNALSLQAGLRTLHDIGPEIRRAISGDLTAEEELDKAMKEAVSAASEDDIFRGSRGPEPRGGGPLRWSIACVLQVSKTPPELPFP

SEQ ID NO: 10749 - protein, 1738 aa, Artificial Sequence
  Synthetic polypeptide
MVNENTRMYIPEENHQGSNYGSPRPAHANMNANAAAGLAPEHIPTPGAALSWQAAIDAARQAKLMGSAGNATISTVSSTQRKRQQYGKPKKQGSTTATRPPRALLCLTLKNPIRRACISIVEWKPFEIIILLTIFANCVALAIYIPFPEDDSNATNSNLERVEYLFLIIFTVEAFLKVIAYGLLFHPNAYLRNGWNLLDFIIVVVGLFSAILEQATKADGANALGGKGAGFDVKALRAFRVLRPLRLVSGVPSLQVVLNSIIKAMVPLLHIALLVLFVIIIYAIIGLELFMGKMHKTCYNQEGIADVPAEDDPSPCALETGHGRQCQNGTVCKPGWDGPKHGITNFDNFAFAMLTVFQCITMEGWTDVLYWVNDAVGRDWPWIYFVTLIIIGSFFVLNLVLGVLSGEFSKEREKAKARGDFQKLREKQQLEEDLKGYLDWITQAEDIDPENEDEGMDEEKPRNMSMPTSETESVNTENVAGGDIEGENCGARLAHRISKSKFSRYWRRWNRFCRRKCRAAVKSNVFYWLVIFLVFLNTLTIASEHYNQPNWLTEVQDTANKALLALFTAEMLLKMYSLGLQAYFVSLFNRFDCFVVCGGILETILVETKIMSPLGISVLRCVRLLRIFKITRYWNSLSNLVASLLNSVRSIASLLLLLFLFIIIFSLLGMQLFGGKFNFDEMQTRRSTFDNFPQSLLTVFQILTGEDWNSVMYDGIMAYGGPSFPGMLVCIYFIILFICGNYILLNVFLAIAVDNLADAESLTSAQKEEEEEKERKKLARTASPEKKQELVEKPAVGESKEEKIELKSITADGESPPATKINMDDLQPNENEDKSPYPNPETTGEEDEEEPEMPVGPRPRPLSELHLKEKAVPMPEASAFFIFSSNNRFRLQCHRIVNDTIFTNLILFFILLSSISLAAEDPVQHTSFRNHILFYFDIVFTTIFTIEIALKMTAYGAFLHKGSFCRNYFNILDLLVVSVSLISFGIQSSAINVVKILRVLRVLRPLRAINRAKGLKHVVQCVFVAIRTIGNIVIVTTLLQFMFACIGVQLFKGKLYTCSDSSKQTEAECKGNYITYKDGEVDHPIIQPRSWENSKFDFDNVLAAMMALFTVSTFEGWPELLYRSIDSHTEDKGPIYNYRVEISIFFIIYIIIIAFFMMNIFVGFVIVTFQEQGEQEYKNCELDKNQRQCVEYALKARPLRRYIPKNQHQYKVWYVVNSTYFEYLMFVLILLNTICLAMQHYGQSCLFKIAMNILNMLFTGLFTVEMILKLIAFKPKHYFCDAWNTFDALIVVGSIVDIAITEVNNAEENSRISITFFRLFRVMRLVKLLSRGEGIRTLLWTFIKSFQALPYVALLIVMLFFIYAVIGMQVFGKIALNDTTEINRNNNFQTFPQAVLLLFRCATGEAWQDIMLACMPGKKCAPESEPSNSTEGETPCGSSFAVFYFISFYMLCAFLIINLFVAVIMDNFDYLTRDWSILGPHHLDEFKRIWAEYDPEAKGRIKHLDVVTLLRRIQPPLGFGKLCPHRVACKRLVSMNMPLNSDGTVMFNATLFALVRTALRIKTEEGPSPSEAHQGAEDPFRPAGNLEQANEELRAIIKKIWKRTSMKLLDQVVPPAGDDEVTVGKFYATFLIQEYFRKFKKRKEQGLVGKPSQRNALSLQAGLRTLHDIGPEIRRAISGDLTAEEELDKAMKEAVSAASEDDIFRGSRGPEPRGGGPLRWSIACVLQVSKTPPELPFP

SEQ ID NO: 10750 - protein, 1771 aa, Artificial Sequence
  Synthetic polypeptide
MVNENTRMYIPEENHQGSNYGSPRPAHANMNANAAAGLAPEHIPTPGAALSWQAAIDAARQAKLMGSAGNATISTVSSTQRKRQQYGKPKKQGSTTATRPPRALLCLTLKNPIRRACISIVEWKPFEIIILLTIFANCVALAIYIPFPEDDSNATNSNLERVEYLFLIIFTVEAFLKVIAYGLLFHPNAYLRNGWNLLDFIIVVVGLFSAILEQATKADGANALGGKGAGFDVKALRAFRVLRPLRLVSGVPSLQVVLNSIIKAMVPLLHIALLVLFVIIIYAIIGLELFMGKMHKTCYNQEGIADVPAEDDPSPCALETGHGRQCQNGTVCKPGWDGPKHGITNFDNFAFAMLTVFQCITMEGWTDVLYWVNDAVGRDWPWIYFVTLIIIGSFFVLNLVLGVLSGEFSKEREKAKARGDFQKLREKQQLEEDLKGYLDWITQAEDIDPENEDEGMDEEKPRNMSMPTSETESVNTENVAGGDIEGENCGARLAHRISKSKFSRYWRRWNRFCRRKCRAAVKSNVFYWLVIFLVFLNTLTIASEHYNQPNWLTEVQDTANKALLALFTAEMLLKMYSLGLQAYFVSLFNRFDCFVVCGGILETILVETKIMSPLGISVLRCVRLLRIFKITRYWNSLSNLVASLLNSVRSIASLLLLLFLFIIIFSLLGMQLFGGKFNFDEMQTRRSTFDNFPQSLLTVFQILTGEDWNSVMYDGIMAYGGPSFPGMLVCIYFIILFICGNYILLNVFLAIAVDNLADAESLTSAQKEEEEEKERKKLARTASPEKKQELVEKPAVGESKEEKIELKSITADGESPPATKINMDDLQPNENEDKSPYPNPETTGEEDEEEPEMPVGPRPRPLSELHLKEKAVPMPEASAFFIFSSNNRFRLQCHRIVNDTIFTNLILFFILLSSISLAAEDPVQHTSFRNHILFYFDIVFTTIFTIEIALKMTAYGAFLHKGSFCRNYFNILDLLVVSVSLISFGIQSSAINVVKILRVLRVLRPLRAINRAKGLKHVVQCVFVAIRTIGNIVIVTTLLQFMFACIGVQLFKGKLYTCSDSSKQTEAECKGNYITYKDGEVDHPIIQPRSWENSKFDFDNVLAAMMALFTVSTFEGWPELLYRSIDSHTEDKGPIYNYRVEISIFFIIYIIIIAFFMMNIFVGFVIVTFQEQGEQEYKNCELDKNQRQCVEYALKARPLRRYIPKNQHQYKVWYVVNSTYFEYLMFVLILLNTICLAMQHYGQSCLFKIAMNILNMLFTGLFTVEMILKLIAFKPKHYFCDAWNTFDALIVVGSIVDIAITEVNPAEHTQCSPSMGPSCSHPPLAVLTAPPVADGFQNAEENSRISITFFRLFRVMRLVKLLSRGEGIRTLLWTFIKSFQALPYVALLIVMLFFIYAVIGMQVFGKIALNDTTEINRNNNFQTFPQAVLLLFRCATGEAWQDIMLACMPGKKCAPESEPSNSTEGETPCGSSFAVFYFISFYMLCAFLIINLFVAVIMDNFDYLTRDWSILGPHHLDEFKRIWAEYDPEAKGRIKHLDVVTLLRRIQPPLGFGKLCPHRVACKRLVSMNMPLNSDGTVMFNATLFALVRTALRIKTEEGPSPSEAHQGAEDPFRPAGNLEQANEELRAIIKKIWKRTSMKLLDQVVPPAGDDEVTVGKFYATFLIQEYFRKFKKRKEQGLVGKPSQRNALSLQAGLRTLHDIGPEIRRAISGDLTAEEELDKAMKEAVSAASEDDIFRGSRGPEPRGGGPLRWSIACVLQVSKTPPELPFP

SEQ ID NO: 10751 - protein, 1749 aa, Artificial Sequence
  Synthetic polypeptide
MVNENTRMYIPEENHQGSNYGSPRPAHANMNANAAAGLAPEHIPTPGAALSWQAAIDAARQAKLMGSAGNATISTVSSTQRKRQQYGKPKKQGSTTATRPPRALLCLTLKNPIRRACISIVEWKPFEIIILLTIFANCVALAIYIPFPEDDSNATNSNLERVEYLFLIIFTVEAFLKVIAYGLLFHPNAYLRNGWNLLDFIIVVVGLFSAILEQATKADGANALGGKGAGFDVKALRAFRVLRPLRLVSGVPSLQVVLNSIIKAMVPLLHIALLVLFVIIIYAIIGLELFMGKMHKTCYNQEGIADVPAEDDPSPCALETGHGRQCQNGTVCKPGWDGPKHGITNFDNFAFAMLTVFQCITMEGWTDVLYWVNDAVGRDWPWIYFVTLIIIGSFFVLNLVLGVLSGEFSKEREKAKARGDFQKLREKQQLEEDLKGYLDWITQAEDIDPENEDEGMDEEKPRNMSMPTSETESVNTENVAGGDIEGENCGARLAHRISKSKFSRYWRRWNRFCRRKCRAAVKSNVFYWLVIFLVFLNTLTIASEHYNQPNWLTEVQDTANKALLALFTAEMLLKMYSLGLQAYFVSLFNRFDCFVVCGGILETILVETKIMSPLGISVLRCVRLLRIFKITRYWNSLSNLVASLLNSVRSIASLLLLLFLFIIIFSLLGMQLFGGKFNFDEMQTRRSTFDNFPQSLLTVFQILTGEDWNSVMYDGIMAYGGPSFPGMLVCIYFIILFICGNYILLNVFLAIAVDNLADAESLTSAQKEEEEEKERKKLARTASPEKKQELVEKPAVGESKEEKIELKSITADGESPPATKINMDDLQPNENEDKSPYPNPETTGEEDEEEPEMPVGPRPRPLSELHLKEKAVPMPEASAFFIFSSNNRFRLQCHRIVNDTIFTNLILFFILLSSISLAAEDPVQHTSFRNHILFYFDIVFTTIFTIEIALKMTAYGAFLHKGSFCRNYFNILDLLVVSVSLISFGIQSSAINVVKILRVLRVLRPLRAINRAKGLKHVVQCVFVAIRTIGNIVIVTTLLQFMFACIGVQLFKGKLYTCSDSSKQTEAECKGNYITYKDGEVDHPIIQPRSWENSKFDFDNVLAAMMALFTVSTFEGWPELLYRSIDSHTEDKGPIYNYRVEISIFFIIYIIIIAFFMMNIFVGFVIVTFQEQGEQEYKNCELDKNQRQCVEYALKARPLRRYIPKNQHQYKVWYVVNSTYFEYLMFVLILLNTICLAMQHYGQSCLFKIAMNILNMLFTGLFTVEMILKLIAFKPKHYFCDAWNTFDALIVVGSIVDIAITEVNPAEHTQCSPSMNAEENSRISITFFRLFRVMRLVKLLSRGEGIRTLLWTFIKSFQALPYVALLIVMLFFIYAVIGMQVFGKIALNDTTEINRNNNFQTFPQAVLLLFRCATGEAWQDIMLACMPGKKCAPESEPSNSTEGETPCGSSFAVFYFISFYMLCAFLIINLFVAVIMDNFDYLTRDWSILGPHHLDEFKRIWAEYDPEAKGRIKHLDVVTLLRRIQPPLGFGKLCPHRVACKRLVSMNMPLNSDGTVMFNATLFALVRTALRIKTEEGPSPSEAHQGAEDPFRPAGNLEQANEELRAIIKKIWKRTSMKLLDQVVPPAGDDEVTVGKFYATFLIQEYFRKFKKRKEQGLVGKPSQRNALSLQAGLRTLHDIGPEIRRAISGDLTAEEELDKAMKEAVSAASEDDIFRGSRGPEPRGGGPLRWSIACVLQVSKTPPELPFP

SEQ ID NO: 10752 - protein, 1730 aa, Artificial Sequence
  Synthetic polypeptide
MVNENTRMYIPEENHQGSNYGSPRPAHANMNANAAAGLAPEHIPTPGAALSWQAAIDAARQAKLMGSAGNATISTVSSTQRKRQQYGKPKKQGSTTATRPPRALLCLTLKNPIRRACISIVEWKPFEIIILLTIFANCVALAIYIPFPEDDSNATNSNLERVEYLFLIIFTVEAFLKVIAYGLLFHPNAYLRNGWNLLDFIIVVVGLFSAILEQATKADGANALGGKGAGFDVKALRAFRVLRPLRLVSGVPSLQVVLNSIIKAMVPLLHIALLVLFVIIIYAIIGLELFMGKMHKTCYNQEGIADVPAEDDPSPCALETGHGRQCQNGTVCKPGWDGPKHGITNFDNFAFAMLTVFQCITMEGWTDVLYWVNDAVGRDWPWIYFVTLIIIGSFFVLNLVLGVLSGEFSKEREKAKARGDFQKLREKQQLEEDLKGYLDWITQAEDIDPENEDEGMDEEKPRNMSMPTSETESVNTENVAGGDIEGENCGARLAHRISKSKFSRYWRRWNRFCRRKCRAAVKSNVFYWLVIFLVFLNTLTIASEHYNQPNWLTEVQDTANKALLALFTAEMLLKMYSLGLQAYFVSLFNRFDCFVVCGGILETILVETKIMSPLGISVLRCVRLLRIFKITRYWNSLSNLVASLLNSVRSIASLLLLLFLFIIIFSLLGMQLFGGKFNFDEMQTRRSTFDNFPQSLLTVFQILTGEDWNSVMYDGIMAYGGPSFPGMLVCIYFIILFICGNYILLNVFLAIAVDNLADAESLTSAQKEEEEEKERKKLARTASPEKKQELVEKPAVGESKEEKIELKSITADGESPPATKINMDDLQPNENEDKSPYPNPETTGEEDEEEPEMPVGPRPRPLSELHLKEKAVPMPEASAFFIFSSNNRFRLQCHRIVNDTIFTNLILFFILLSSISLAAEDPVQHTSFRNHILFYFDIVFTTIFTIEIALKMTAYGAFLHKGSFCRNYFNILDLLVVSVSLISFGIQSSAINVVKILRVLRVLRPLRAINRAKGLKHVVQCVFVAIRTIGNIVIVTTLLQFMFACIGVQLFKGKLYTCSDSSKQTEAECKGNYITYKDGEVDHPIIQPRSWENSKFDFDNVLAAMMALFTVSTFEGWPELLYRSIDSHTEDKGPIYNYRVEISIFFIIYIIIIAFFMMNIFVGFVIVTFQEQGEQEYKNCELDKNQRQCVEYALKARPLRRYIPKNQHQYKVWYVVNSTYFEYLMFVLILLNTICLAMQHYGQSCLFKIAMNILNMLFTGLFTVEMILKLIAFKPKHYFCDAWNTFDALIVVGSIVDIAITEVNPAEHTQCSPSMNAEENSRISITFFRLFRVMRLVKLLSRGEGIRTLLWTFIKSFQALPYVALLIVMLFFIYAVIGMQVFGKIALNDTTEINRNNNFQTFPQAVLLLFRCATGEAWQDIMLACMPGKKCAPESEPSNSTEGETPCGSSFAVFYFISFYMLCAFLIINLFVAVIMDNFDYLTRDWSILGPHHLDEFKRIWAEYDPEAKGRIKHLDVVTLLRRIQPPLGFGKLCPHRVACKRLVSMNMPLNSDGTVMFNATLFALVRTALRIKTEGNLEQANEELRAIIKKIWKRTSMKLLDQVVPPAGDDEVTVGKFYATFLIQEYFRKFKKRKEQGLVGKPSQRNALSLQAGLRTLHDIGPEIRRAISGDLTAEEELDKAMKEAVSAASEDDIFRGSRGPEPRGGGPLRWSIACVLQVSKTPPELPFP

SEQ ID NO: 10753 - protein, 1747 aa, Artificial Sequence
  Synthetic polypeptide
MVNENTRMYIPEENHQGSNYGSPRPAHANMNANAAAGLAPEHIPTPGAALSWQAAIDAARQAKLMGSAGNATISTVSSTQRKRQQYGKPKKQGSTTATRPPRALLCLTLKNPIRRACISIVEWKPFEIIILLTIFANCVALAIYIPFPEDDSNATNSNLERVEYLFLIIFTVEAFLKVIAYGLLFHPNAYLRNGWNLLDFIIVVVGLFSAILEQATKADGANALGGKGAGFDVKALRAFRVLRPLRLVSGVPSLQVVLNSIIKAMVPLLHIALLVLFVIIIYAIIGLELFMGKMHKTCYNQEGIADVPAEDDPSPCALETGHGRQCQNGTVCKPGWDGPKHGITNFDNFAFAMLTVFQCITMEGWTDVLYWVNDAVGRDWPWIYFVTLIIIGSFFVLNLVLGVLSGEFSKEREKAKARGDFQKLREKQQLEEDLKGYLDWITQAEDIDPENEDEGMDEEKPRNMSMPTSETESVNTENVAGGDIEGENCGARLAHRISKSKFSRYWRRWNRFCRRKCRAAVKSNVFYWLVIFLVFLNTLTIASEHYNQPNWLTEVQDTANKALLALFTAEMLLKMYSLGLQAYFVSLFNRFDCFVVCGGILETILVETKIMSPLGISVLRCVRLLRIFKITRYWNSLSNLVASLLNSVRSIASLLLLLFLFIIIFSLLGMQLFGGKFNFDEMQTRRSTFDNFPQSLLTVFQILTGEDWNSVMYDGIMAYGGPSFPGMLVCIYFIILFICGNYILLNVFLAIAVDNLADAESLTSAQKEEEEEKERKKLARTASPEKKQELVEKPAVGESKEEKIELKSITADGESPPATKINMDDLQPNENEDKSPYPNPETTGEEDEEEPEMPVGPRPRPLSELHLKEKAVPMPEASAFFIFSSNNRFRLQCHRIVNDTIFTNLILFFILLSSISLAAEDPVQHTSFRNHILGNADYVFTSIFTLEIILKMTAYGAFLHKGSFCRNYFNILDLLVVSVSLISFGIQSSAINVVKILRVLRVLRPLRAINRAKGLKHVVQCVFVAIRTIGNIVIVTTLLQFMFACIGVQLFKGKLYTCSDSSKQTEAECKGNYITYKDGEVDHPIIQPRSWENSKFDFDNVLAAMMALFTVSTFEGWPELLYRSIDSHTEDKGPIYNYRVEISIFFIIYIIIIAFFMMNIFVGFVIVTFQEQGEQEYKNCELDKNQRQCVEYALKARPLRRYIPKNQHQYKVWYVVNSTYFEYLMFVLILLNTICLAMQHYGQSCLFKIAMNILNMLFTGLFTVEMILKLIAFKPKGYFSDPWNVFDFLIVIGSIIDVILSETNHYFCDAWNTFDALIVVGSIVDIAITEVNNAEENSRISITFFRLFRVMRLVKLLSRGEGIRTLLWTFIKSFQALPYVALLIVMLFFIYAVIGMQVFGKIALNDTTEINRNNNFQTFPQAVLLLFRCATGEAWQDIMLACMPGKKCAPESEPSNSTEGETPCGSSFAVFYFISFYMLCAFLIINLFVAVIMDNFDYLTRDWSILGPHHLDEFKRIWAEYDPEAKGRIKHLDVVTLLRRIQPPLGFGKLCPHRVACKRLVSMNMPLNSDGTVMFNATLFALVRTALRIKTEGNLEQANEELRAIIKKIWKRTSMKLLDQVVPPAGDDEVTVGKFYATFLIQEYFRKFKKRKEQGLVGKPSQRNALSLQAGLRTLHDIGPEIRRAISGDLTAEEELDKAMKEAVSAASEDDIFRGSRGPEPRGGGPLRWSIACVLQVSKTPPELPFP

SEQ ID NO: 10754 - protein, 1730 aa, Artificial Sequence
  Synthetic polypeptide
MVNENTRMYIPEENHQGSNYGSPRPAHANMNANAAAGLAPEHIPTPGAALSWQAAIDAARQAKLMGSAGNATISTVSSTQRKRQQYGKPKKQGSTTATRPPRALLCLTLKNPIRRACISIVEWKPFEIIILLTIFANCVALAIYIPFPEDDSNATNSNLERVEYLFLIIFTVEAFLKVIAYGLLFHPNAYLRNGWNLLDFIIVVVGLFSAILEQATKADGANALGGKGAGFDVKALRAFRVLRPLRLVSGVPSLQVVLNSIIKAMVPLLHIALLVLFVIIIYAIIGLELFMGKMHKTCYNQEGIADVPAEDDPSPCALETGHGRQCQNGTVCKPGWDGPKHGITNFDNFAFAMLTVFQCITMEGWTDVLYWVNDAVGRDWPWIYFVTLIIIGSFFVLNLVLGVLSGEFSKEREKAKARGDFQKLREKQQLEEDLKGYLDWITQAEDIDPENEDEGMDEEKPRNMSMPTSETESVNTENVAGGDIEGENCGARLAHRISKSKFSRYWRRWNRFCRRKCRAAVKSNVFYWLVIFLVFLNTLTIASEHYNQPNWLTEVQDTANKALLALFTAEMLLKMYSLGLQAYFVSLFNRFDCFVVCGGILETILVETKIMSPLGISVLRCVRLLRIFKITRYWNSLSNLVASLLNSVRSIASLLLLLFLFIIIFSLLGMQLFGGKFNFDEMQTRRSTFDNFPQSLLTVFQILTGEDWNSVMYDGIMAYGGPSFPGMLVCIYFIILFICGNYILLNVFLAIAVDNLADAESLTSAQKEEEEEKERKKLARTASPEKKQELVEKPAVGESKEEKIELKSITADGESPPATKINMDDLQPNENEDKSPYPNPETTGEEDEEEPEMPVGPRPRPLSELHLKEKAVPMPEASAFFIFSSNNRFRLQCHRIVNDTIFTNLILFFILLSSISLAAEDPVQHTSFRNHILGNADYVFTSIFTLEIILKMTAYGAFLHKGSFCRNYFNILDLLVVSVSLISFGIQSSAINVVKILRVLRVLRPLRAINRAKGLKHVVQCVFVAIRTIGNIVIVTTLLQFMFACIGVQLFKGKLYTCSDSSKQTEAECKGNYITYKDGEVDHPIIQPRSWENSKFDFDNVLAAMMALFTVSTFEGWPELLYRSIDSHTEDKGPIYNYRVEISIFFIIYIIIIAFFMMNIFVGFVIVTFQEQGEQEYKNCELDKNQRQCVEYALKARPLRRYIPKNQHQYKVWYVVNSTYFEYLMFVLILLNTICLAMQHYGQSCLFKIAMNILNMLFTGLFTVEMILKLIAFKPKGYFSDPWNVFDFLIVIGSIIDVILSETNPAEHTQCSPSMNAEENSRISITFFRLFRVMRLVKLLSRGEGIRTLLWTFIKSFQALPYVALLIVMLFFIYAVIGMQVFGKIALNDTTEINRNNNFQTFPQAVLLLFRCATGEAWQDIMLACMPGKKCAPESEPSNSTEGETPCGSSFAVFYFISFYMLCAFLIINLFVAVIMDNFDYLTRDWSILGPHHLDEFKRIWAEYDPEAKGRIKHLDVVTLLRRIQPPLGFGKLCPHRVACKRLVSMNMPLNSDGTVMFNATLFALVRTALRIKTEGNLEQANEELRAIIKKIWKRTSMKLLDQVVPPAGDDEVTVGKFYATFLIQEYFRKFKKRKEQGLVGKPSQRNALSLQAGLRTLHDIGPEIRRAISGDLTAEEELDKAMKEAVSAASEDDIFRGSRGPEPRGGGPLRWSIACVLQVSKTPPELPFP

SEQ ID NO: 10755 - protein, 1738 aa, Artificial Sequence
  Synthetic polypeptide
MVNENTRMYIPEENHQGSNYGSPRPAHANMNANAAAGLAPEHIPTPGAALSWQAAIDAARQAKLMGSAGNATISTVSSTQRKRQQYGKPKKQGSTTATRPPRALLCLTLKNPIRRACISIVEWKPFEIIILLTIFANCVALAIYIPFPEDDSNATNSNLERVEYLFLIIFTVEAFLKVIAYGLLFHPNAYLRNGWNLLDFIIVVVGLFSAILEQATKADGANALGGKGAGFDVKALRAFRVLRPLRLVSGVPSLQVVLNSIIKAMVPLLHIALLVLFVIIIYAIIGLELFMGKMHKTCYNQEGIADVPAEDDPSPCALETGHGRQCQNGTVCKPGWDGPKHGITNFDNFAFAMLTVFQCITMEGWTDVLYWVNDAVGRDWPWIYFVTLIIIGSFFVLNLVLGVLSGEFSKEREKAKARGDFQKLREKQQLEEDLKGYLDWITQAEDIDPENEDEGMDEEKPRNMSMPTSETESVNTENVAGGDIEGENCGARLAHRISKSKFSRYWRRWNRFCRRKCRAAVKSNVFYWLVIFLVFLNTLTIASEHYNQPNWLTEVQDTANKALLALFTAEMLLKMYSLGLQAYFVSLFNRFDCFVVCGGILETILVETKIMSPLGISVLRCVRLLRIFKITRYWNSLSNLVASLLNSVRSIASLLLLLFLFIIIFSLLGMQLFGGKFNFDEMQTRRSTFDNFPQSLLTVFQILTGEDWNSVMYDGIMAYGGPSFPGMLVCIYFIILFICGNYILLNVFLAIAVDNLADAESLTSAQKEEEEEKERKKLARTASPEKKQELVEKPAVGESKEEKIELKSITADGESPPATKINMDDLQPNENEDKSPYPNPETTGEEDEEEPEMPVGPRPRPLSELHLKEKAVPMPEASAFFIFSSNNRFRLQCHRIVNDTIFTNLILFFILLSSISLAAEDPVQHTSFRNHILGNADYVFTSIFTLEIILKMTAYGAFLHKGSFCRNYFNILDLLVVSVSLISFGIQSSAINVVKILRVLRVLRPLRAINRAKGLKHVVQCVFVAIRTIGNIVIVTTLLQFMFACIGVQLFKGKLYTCSDSSKQTEAECKGNYITYKDGEVDHPIIQPRSWENSKFDFDNVLAAMMALFTVSTFEGWPELLYRSIDSHTEDKGPIYNYRVEISIFFIIYIIIIAFFMMNIFVGFVIVTFQEQGEQEYKNCELDKNQRQCVEYALKARPLRRYIPKNQHQYKVWYVVNSTYFEYLMFVLILLNTICLAMQHYGQSCLFKIAMNILNMLFTGLFTVEMILKLIAFKPKHYFCDAWNTFDALIVVGSIVDIAITEVNNAEENSRISITFFRLFRVMRLVKLLSRGEGIRTLLWTFIKSFQALPYVALLIVMLFFIYAVIGMQVFGKIALNDTTEINRNNNFQTFPQAVLLLFRCATGEAWQDIMLACMPGKKCAPESEPSNSTEGETPCGSSFAVFYFISFYMLCAFLIINLFVAVIMDNFDYLTRDWSILGPHHLDEFKRIWAEYDPEAKGRIKHLDVVTLLRRIQPPLGFGKLCPHRVACKRLVSMNMPLNSDGTVMFNATLFALVRTALRIKTEEGPSPSEAHQGAEDPFRPAGNLEQANEELRAIIKKIWKRTSMKLLDQVVPPAGDDEVTVGKFYATFLIQEYFRKFKKRKEQGLVGKPSQRNALSLQAGLRTLHDIGPEIRRAISGDLTAEEELDKAMKEAVSAASEDDIFRGSRGPEPRGGGPLRWSIACVLQVSKTPPELPFP

SEQ ID NO: 10756 - protein, 1749 aa, Artificial Sequence
  Synthetic polypeptide
MVNENTRMYIPEENHQGSNYGSPRPAHANMNANAAAGLAPEHIPTPGAALSWQAAIDAARQAKLMGSAGNATISTVSSTQRKRQQYGKPKKQGSTTATRPPRALLCLTLKNPIRRACISIVEWKPFEIIILLTIFANCVALAIYIPFPEDDSNATNSNLERVEYLFLIIFTVEAFLKVIAYGLLFHPNAYLRNGWNLLDFIIVVVGLFSAILEQATKADGANALGGKGAGFDVKALRAFRVLRPLRLVSGVPSLQVVLNSIIKAMVPLLHIALLVLFVIIIYAIIGLELFMGKMHKTCYNQEGIADVPAEDDPSPCALETGHGRQCQNGTVCKPGWDGPKHGITNFDNFAFAMLTVFQCITMEGWTDVLYWVNDAVGRDWPWIYFVTLIIIGSFFVLNLVLGVLSGEFSKEREKAKARGDFQKLREKQQLEEDLKGYLDWITQAEDIDPENEDEGMDEEKPRNMSMPTSETESVNTENVAGGDIEGENCGARLAHRISKSKFSRYWRRWNRFCRRKCRAAVKSNVFYWLVIFLVFLNTLTIASEHYNQPNWLTEVQDTANKALLALFTAEMLLKMYSLGLQAYFVSLFNRFDCFVVCGGILETILVETKIMSPLGISVLRCVRLLRIFKITRYWNSLSNLVASLLNSVRSIASLLLLLFLFIIIFSLLGMQLFGGKFNFDEMQTRRSTFDNFPQSLLTVFQILTGEDWNSVMYDGIMAYGGPSFPGMLVCIYFIILFICGNYILLNVFLAIAVDNLADAESLTSAQKEEEEEKERKKLARTASPEKKQELVEKPAVGESKEEKIELKSITADGESPPATKINMDDLQPNENEDKSPYPNPETTGEEDEEEPEMPVGPRPRPLSELHLKEKAVPMPEASAFFIFSSNNRFRLQCHRIVNDTIFTNLILFFILLSSISLAAEDPVQHTSFRNHILGNADYVFTSIFTLEIILKMTAYGAFLHKGSFCRNYFNILDLLVVSVSLISFGIQSSAINVVKILRVLRVLRPLRAINRAKGLKHVVQCVFVAIRTIGNIVIVTTLLQFMFACIGVQLFKGKLYTCSDSSKQTEAECKGNYITYKDGEVDHPIIQPRSWENSKFDFDNVLAAMMALFTVSTFEGWPELLYRSIDSHTEDKGPIYNYRVEISIFFIIYIIIIAFFMMNIFVGFVIVTFQEQGEQEYKNCELDKNQRQCVEYALKARPLRRYIPKNQHQYKVWYVVNSTYFEYLMFVLILLNTICLAMQHYGQSCLFKIAMNILNMLFTGLFTVEMILKLIAFKPKHYFCDAWNTFDALIVVGSIVDIAITEVNPAEHTQCSPSMNAEENSRISITFFRLFRVMRLVKLLSRGEGIRTLLWTFIKSFQALPYVALLIVMLFFIYAVIGMQVFGKIALNDTTEINRNNNFQTFPQAVLLLFRCATGEAWQDIMLACMPGKKCAPESEPSNSTEGETPCGSSFAVFYFISFYMLCAFLIINLFVAVIMDNFDYLTRDWSILGPHHLDEFKRIWAEYDPEAKGRIKHLDVVTLLRRIQPPLGFGKLCPHRVACKRLVSMNMPLNSDGTVMFNATLFALVRTALRIKTEEGPSPSEAHQGAEDPFRPAGNLEQANEELRAIIKKIWKRTSMKLLDQVVPPAGDDEVTVGKFYATFLIQEYFRKFKKRKEQGLVGKPSQRNALSLQAGLRTLHDIGPEIRRAISGDLTAEEELDKAMKEAVSAASEDDIFRGSRGPEPRGGGPLRWSIACVLQVSKTPPELPFP

SEQ ID NO: 10757 - protein, 1730 aa, Artificial Sequence
  Synthetic polypeptide
MVNENTRMYIPEENHQGSNYGSPRPAHANMNANAAAGLAPEHIPTPGAALSWQAAIDAARQAKLMGSAGNATISTVSSTQRKRQQYGKPKKQGSTTATRPPRALLCLTLKNPIRRACISIVEWKPFEIIILLTIFANCVALAIYIPFPEDDSNATNSNLERVEYLFLIIFTVEAFLKVIAYGLLFHPNAYLRNGWNLLDFIIVVVGLFSAILEQATKADGANALGGKGAGFDVKALRAFRVLRPLRLVSGVPSLQVVLNSIIKAMVPLLHIALLVLFVIIIYAIIGLELFMGKMHKTCYNQEGIADVPAEDDPSPCALETGHGRQCQNGTVCKPGWDGPKHGITNFDNFAFAMLTVFQCITMEGWTDVLYWVNDAVGRDWPWIYFVTLIIIGSFFVLNLVLGVLSGEFSKEREKAKARGDFQKLREKQQLEEDLKGYLDWITQAEDIDPENEDEGMDEEKPRNMSMPTSETESVNTENVAGGDIEGENCGARLAHRISKSKFSRYWRRWNRFCRRKCRAAVKSNVFYWLVIFLVFLNTLTIASEHYNQPNWLTEVQDTANKALLALFTAEMLLKMYSLGLQAYFVSLFNRFDCFVVCGGILETILVETKIMSPLGISVLRCVRLLRIFKITRYWNSLSNLVASLLNSVRSIASLLLLLFLFIIIFSLLGMQLFGGKFNFDEMQTRRSTFDNFPQSLLTVFQILTGEDWNSVMYDGIMAYGGPSFPGMLVCIYFIILFICGNYILLNVFLAIAVDNLADAESLTSAQKEEEEEKERKKLARTASPEKKQELVEKPAVGESKEEKIELKSITADGESPPATKINMDDLQPNENEDKSPYPNPETTGEEDEEEPEMPVGPRPRPLSELHLKEKAVPMPEASAFFIFSSNNRFRLQCHRIVNDTIFTNLILFFILLSSISLAAEDPVQHTSFRNHILGNADYVFTSIFTLEIILKMTAYGAFLHKGSFCRNYFNILDLLVVSVSLISFGIQSSAINVVKILRVLRVLRPLRAINRAKGLKHVVQCVFVAIRTIGNIVIVTTLLQFMFACIGVQLFKGKLYTCSDSSKQTEAECKGNYITYKDGEVDHPIIQPRSWENSKFDFDNVLAAMMALFTVSTFEGWPELLYRSIDSHTEDKGPIYNYRVEISIFFIIYIIIIAFFMMNIFVGFVIVTFQEQGEQEYKNCELDKNQRQCVEYALKARPLRRYIPKNQHQYKVWYVVNSTYFEYLMFVLILLNTICLAMQHYGQSCLFKIAMNILNMLFTGLFTVEMILKLIAFKPKHYFCDAWNTFDALIVVGSIVDIAITEVNPAEHTQCSPSMNAEENSRISITFFRLFRVMRLVKLLSRGEGIRTLLWTFIKSFQALPYVALLIVMLFFIYAVIGMQVFGKIALNDTTEINRNNNFQTFPQAVLLLFRCATGEAWQDIMLACMPGKKCAPESEPSNSTEGETPCGSSFAVFYFISFYMLCAFLIINLFVAVIMDNFDYLTRDWSILGPHHLDEFKRIWAEYDPEAKGRIKHLDVVTLLRRIQPPLGFGKLCPHRVACKRLVSMNMPLNSDGTVMFNATLFALVRTALRIKTEGNLEQANEELRAIIKKIWKRTSMKLLDQVVPPAGDDEVTVGKFYATFLIQEYFRKFKKRKEQGLVGKPSQRNALSLQAGLRTLHDIGPEIRRAISGDLTAEEELDKAMKEAVSAASEDDIFRGSRGPEPRGGGPLRWSIACVLQVSKTPPELPFP

SEQ ID NO: 10758 - protein, 1755 aa, Artificial Sequence
  Synthetic polypeptide
MVNENTRMYIPEENHQGSNYGSPRPAHANMNANAAAGLAPEHIPTPGAALSWQAAIDAARQAKLMGSAGNATISTVSSTQRKRQQYGKPKKQGSTTATRPPRALLCLTLKNPIRRACISIVEWKPFEIIILLTIFANCVALAIYIPFPEDDSNATNSNLERVEYLFLIIFTVEAFLKVIAYGLLFHPNAYLRNGWNLLDFIIVVVGLFSAILEQATKADGANALGGKGAGFDVKALRAFRVLRPLRLVSGVPSLQVVLNSIIKAMVPLLHIALLVLFVIIIYAIIGLELFMGKMHKTCYNQEGIADVPAEDDPSPCALETGHGRQCQNGTVCKPGWDGPKHGITNFDNFAFAMLTVFQCITMEGWTDVLYWVNDAVGRDWPWIYFVTLIIIGSFFVLNLVLGVLSGEFSKEREKAKARGDFQKLREKQQLEEDLKGYLDWITQAEDIDPENEDEGMDEEKPRNRGTPAGMLDQKKGKFAWFSHSTETHVSMPTSETESVNTENVAGGDIEGENCGARLAHRISKSKFSRYWRRWNRFCRRKCRAAVKSNVFYWLVIFLVFLNTLTIASEHYNQPNWLTEVQDTANKALLALFTAEMLLKMYSLGLQAYFVSLFNRFDCFVVCGGILETILVETKIMSPLGISVLRCVRLLRIFKITRYWNSLSNLVASLLNSVRSIASLLLLLFLFIIIFSLLGMQLFGGKFNFDEMQTRRSTFDNFPQSLLTVFQILTGEDWNSVMYDGIMAYGGPSFPGMLVCIYFIILFICGNYILLNVFLAIAVDNLADAESLTSAQKEEEEEKERKKLARTASPEKKQELVEKPAVGESKEEKIELKSITADGESPPATKINMDDLQPNENEDKSPYPNPETTGEEDEEEPEMPVGPRPRPLSELHLKEKAVPMPEASAFFIFSSNNRFRLQCHRIVNDTIFTNLILFFILLSSISLAAEDPVQHTSFRNHILFYFDIVFTTIFTIEIALKMTAYGAFLHKGSFCRNYFNILDLLVVSVSLISFGIQSSAINVVKILRVLRVLRPLRAINRAKGLKHVVQCVFVAIRTIGNIVIVTTLLQFMFACIGVQLFKGKLYTCSDSSKQTEAECKGNYITYKDGEVDHPIIQPRSWENSKFDFDNVLAAMMALFTVSTFEGWPELLYRSIDSHTEDKGPIYNYRVEISIFFIIYIIIIAFFMMNIFVGFVIVTFQEQGEQEYKNCELDKNQRQCVEYALKARPLRRYIPKNQHQYKVWYVVNSTYFEYLMFVLILLNTICLAMQHYGQSCLFKIAMNILNMLFTGLFTVEMILKLIAFKPKHYFCDAWNTFDALIVVGSIVDIAITEVNPAEHTQCSPSMNAEENSRISITFFRLFRVMRLVKLLSRGEGIRTLLWTFIKSFQALPYVALLIVMLFFIYAVIGMQVFGKIALNDTTEINRNNNFQTFPQAVLLLFRCATGEAWQDIMLACMPGKKCAPESEPSNSTEGETPCGSSFAVFYFISFYMLCAFLIINLFVAVIMDNFDYLTRDWSILGPHHLDEFKRIWAEYDPEAKGRIKHLDVVTLLRRIQPPLGFGKLCPHRVACKRLVSMNMPLNSDGTVMFNATLFALVRTALRIKTEGNLEQANEELRAIIKKIWKRTSMKLLDQVVPPAGDDEVTVGKFYATFLIQEYFRKFKKRKEQGLVGKPSQRNALSLQAGLRTLHDIGPEIRRAISGDLTAEEELDKAMKEAVSAASEDDIFRGSRGPEPRGGGPLRWSIACVLQVSKTPPELPFP

SEQ ID NO: 10759 - protein, 494 aa, Artificial Sequence
  Synthetic polypeptide
IKFSKLTCPERNESLSVEDQMEQSSLYFWDLLEGSEKAVVGTTYKHLKDLLSKLLNSGYFESIPVPKNAKEKEVPLEEEMLIQSEKKTQLSKTESVKESESLMEFAQPEIQPQEFLNRRYMTEVDYSNKQGEEQPWEADYARKPNLPKRWDMLTEPDGQEKKQESFKSWEASGKHQEVSKPAVSLEQRKQDTSKLRSTLPEEQKKQEISKSKPSPSQWKQDTPKSKAGYVQEEQKKQETPKLWPVQLQKEQDPKKQTPKSWTPSMQSEQNTTKSWTTPMCEEQDSKQPETPKSWENNVESQKHSLTSQSQISPKSWGVATASLIPNDQLLPRKLNTEPKDVPKPVHQPVGSSSTLPKDPVLRKEKLQDLMTQIQGTCNFMQESVLDFDKPSSAIPTSQPPSATPGSPVASKEQNLSSQSDFLQEPLQATSSPVTCSSNACLVTTDQASSGSETEFMTSETPEMQWLTPAIPALWEAEAGGSLEVRSSRPAWPTW

SEQ ID NO: 10760 - protein, 748 aa, Artificial Sequence
  Synthetic polypeptide
MEVQVSQASLGFELTSVEKSLREWSRLSREVIAWLCPSSPNFILNFPPPPSASSVSMVQLFSSPFGYQSPSGHSEEEREGNMKSAKPQVNHSQHGESQRALSPLQSTLSSAASPSQAYETYIENGLICLKHKIRNIEKKKLKLEDYKDRLKSGEHLNPDQLEAVEKYEEVLHNLEFAKELQKTFSGLSLDLLKAQKKAQRREHMLKLEAEKKKLRTILQVQYVLQNLTQEHVQKDFKGGLNGAVYLPSKELDYLIKFSKLTCPERNESLSVEDQMEQSSLYFWDLLEGSEKAVVGTTYKHLKDLLSKLLNSGYFESIPVPKNAKEKEVPLEEEMLIQSEKKTQLSKTESVKESESLMEFAQPEIQPQEFLNRRYMTEVDYSNKQGEEQPWEADYARKPNLPKRWDMLTEPDGQEKKQESFKSWEASGKHQEVSKPAVSLEQRKQDTSKLRSTLPEEQKKQEISKSKPSPSQWKQDTPKSKAGYVQEEQKKQETPKLWPVQLQKEQDPKKQTPKSWTPSMQSEQNTTKSWTTPMCEEQDSKQPETPKSWENNVESQKHSLTSQSQISPKSWGVATASLIPNDQLLPRKLNTEPKDVPKPVHQPVGSSSTLPKDPVLRKEKLQDLMTQIQGTCNFMQESVLDFDKPSSAIPTSQPPSATPGSPVASKEQNLSSQSDFLQEPLQATSSPVTCSSNACLVTTDQASSGSETEFMTSETPEMQWLTPAIPALWEAEAGGSLEVRSSRPAWPTW

SEQ ID NO: 10761 - protein, 667 aa, Artificial Sequence
  Synthetic polypeptide
MKSAKPQVNHSQHGESQRALSPLQSTLSSAASPSQAYETYIENGLICLKHKIRNIEKKKLKLEDYKDRLKSGEHLNPDQLEAVEKYEEVLHNLEFAKELQKTFSGLSLDLLKAQKKAQRREHMLKLEAEKKKLRTILQVQYVLQNLTQEHVQKDFKGGLNGAVYLPSKELDYLIKFSKLTCPERNESLSVEDQMEQSSLYFWDLLEGSEKAVVGTTYKHLKDLLSKLLNSGYFESIPVPKNAKEKEVPLEEEMLIQSEKKTQLSKTESVKESESLMEFAQPEIQPQEFLNRRYMTEVDYSNKQGEEQPWEADYARKPNLPKRWDMLTEPDGQEKKQESFKSWEASGKHQEVSKPAVSLEQRKQDTSKLRSTLPEEQKKQEISKSKPSPSQWKQDTPKSKAGYVQEEQKKQETPKLWPVQLQKEQDPKKQTPKSWTPSMQSEQNTTKSWTTPMCEEQDSKQPETPKSWENNVESQKHSLTSQSQISPKSWGVATASLIPNDQLLPRKLNTEPKDVPKPVHQPVGSSSTLPKDPVLRKEKLQDLMTQIQGTCNFMQESVLDFDKPSSAIPTSQPPSATPGSPVASKEQNLSSQSDFLQEPLQATSSPVTCSSNACLVTTDQASSGSETEFMTSETPEMQWLTPAIPALWEAEAGGSLEVRSSRPAWPTW

SEQ ID NO: 10762 - protein, 415 aa, Artificial Sequence
  Synthetic polypeptide
MLIQSEKKTQLSKTESVKESESLMEFAQPEIQPQEFLNRRYMTEVDYSNKQGEEQPWEADYARKPNLPKRWDMLTEPDGQEKKQESFKSWEASGKHQEVSKPAVSLEQRKQDTSKLRSTLPEEQKKQEISKSKPSPSQWKQDTPKSKAGYVQEEQKKQETPKLWPVQLQKEQDPKKQTPKSWTPSMQSEQNTTKSWTTPMCEEQDSKQPETPKSWENNVESQKHSLTSQSQISPKSWGVATASLIPNDQLLPRKLNTEPKDVPKPVHQPVGSSSTLPKDPVLRKEKLQDLMTQIQGTCNFMQESVLDFDKPSSAIPTSQPPSATPGSPVASKEQNLSSQSDFLQEPLQATSSPVTCSSNACLVTTDQASSGSETEFMTSETPEMQWLTPAIPALWEAEAGGSLEVRSSRPAWPTW

SEQ ID NO: 10763 - protein, 419 aa, Artificial Sequence
  Synthetic polypeptide
MAAPDGRVVSRPQRLGQGSGQGPKGSGACLHPLDSLEQKETQEQTSGQLVMLRKAQEFFQTCDAEGKGFIARKDMQRLHKELPLSLEELEDVFDALDADGNGYLTPQEFTTGFSHFFFSQNNPSQEDAGEQVAQRHEEKVYLSRGDEDLGDMGEDEEAQFRMLMDRLGAQKVLEDESDVKQLWLQLKKEEPHLLSNFEDFLTRIISQLQEAHEEKNELECALKRKIAAYDEEIQHLYEEMEQQIKSEKEQFLLKDTERFQARSQELEQKLLCKEQELEQLTQKQKRLEGQCTALHHDKHETKAENTKLKLTNQELARELERTSWELQDAQQQLESLQQEACKLHQEKEMEVYRVTESLQREKAGLLKQLDFLRERNKHLRDERDICFQAWWLTPVIPILWESETGGSLKAKNSRPAWTT

SEQ ID NO: 10764 - protein, 75 aa, Artificial Sequence
  Synthetic polypeptide
  misc_feature (1)..(1): Xaa can be any naturally occurring amino acid
XEKEMEVYRVTESLQREKAGLLKQLDFLRERNKHLRDERDICFQAWWLTPVIPILWESETGGSLKAKNSRPAWTT

SEQ ID NO: 10765 - protein, 128 aa, Artificial Sequence
  Synthetic polypeptide
MAQLEGYCFSAALSCTFLVSCLLFSAFSRALREPYMDEIFHLPQAQRYCEGHFSLSQWDPMITTLPGLYLVSVGVVKPAIWIFAWSEHVVCSIGMLRFVNLLFSVGNFYLLYLLFHKVQPRNKLISYH

SEQ ID NO: 10766 - protein, 55 aa, Artificial Sequence
  Synthetic polypeptide
KHSIEVPIPRDGEYVVEVRAHSDGGDGVVSQVKISGQTWWLMPIVPALWEAKVGG

SEQ ID NO: 10767 - protein, 1013 aa, Artificial Sequence
  Synthetic polypeptide
MKMWLLVSHLVIISITTCLAEFTWYRRYGHGVSEEDKGFGPIFEEQPINTIYPEESLEGKVSLNCRARASPFPVYKWRMNNGDVDLTSDRYSMVGGNLVINNPDKQKDAGIYYCLASNNYGMVRSTEATLSFGYLDPFPPEERPEVRVKEGKGMVLLCDPPYHFPDDLSYRWLLNEFPVFITMDKRRFVSQTNGNLYIANVEASDKGNYSCFVSSPSITKSVFSKFIPLIPIPERTTKPYPADIVVQFKDVYALMGQNVTLECFALGNPVPDIRWRKVLEPMPSTAEISTSGAVLKIFNIQLEDEGIYECEAENIRGKDKHQARIYVQAFPEWVEHINDTEVDIGSDLYWPCVATGKPIPTIRWLKNGYAYHKGELRLYDVTFENAGMYQCIAENTYGAIYANAELKILALAPTFEMNPMKKKILAAKGGRVIIECKPKAAPKPKFSWSKGTEWLVNSSRILIWEDGSLEINNITRNDGGIYTCFAENNRGKANSTGTLVITDPTRIILAPINADITVGENATMQCAASFDPALDLTFVWSFNGYVIDFNKENIHYQRNFMLDSNGELLIRNAQLKHAGRYTCTAQTIVDNSSASADLVVRGPPGPPGGLRIEDIRATSVALTWSRGSDNHSPISKYTIQTKTILSDDWKDAKTDPPIIEGNMEAARAVDLIPWMEYEFRVVATNTLGRGEPSIPSNRIKTDGAAPNVAPSDVGGGGGRNRELTITWAPLSREYHYGNNFGYIVAFKPFDGEEWKKVTVTNPDTGRYVHKDETMSPSTAFQVKVKAFNNKGDGPYSLVAVINSAQDAPSEAPTEVGVKVLSSSEISVHWEHVLEKIVESYQIRYWAAHDKEEAANRVQVTSQEYSARLENLLPDTQYFIEVGACNSAGCGPPSDMIEAFTKKAPPSQPPRIISSVRSGSRYIITWDHVVALSNESTVTGYKVLYRPDGQHDGKLYSTHKHSIEVPIPRDGEYVVEVRAHSDGGDGVVSQVKISGQTWWLMPIVPALWEAKVGG

SEQ ID NO: 10768 - protein, 1002 aa, Artificial Sequence
  Synthetic polypeptide
MKMWLLVSHLVIISITTCLAVSEEDKGFGPIFEEQPINTIYPEESLEGKVSLNCRARASPFPVYKWRMNNGDVDLTSDRYSMVGGNLVINNPDKQKDAGIYYCLASNNYGMVRSTEATLSFGYLDPFPPEERPEVRVKEGKGMVLLCDPPYHFPDDLSYRWLLNEFPVFITMDKRRFVSQTNGNLYIANVEASDKGNYSCFVSSPSITKSVFSKFIPLIPIPERTTKPYPADIVVQFKDVYALMGQNVTLECFALGNPVPDIRWRKVLEPMPSTAEISTSGAVLKIFNIQLEDEGIYECEAENIRGKDKHQARIYVQAFPEWVEHINDTEVDIGSDLYWPCVATGKPIPTIRWLKNGYAYHKGELRLYDVTFENAGMYQCIAENTYGAIYANAELKILALAPTFEMNPMKKKILAAKGGRVIIECKPKAAPKPKFSWSKGTEWLVNSSRILIWEDGSLEINNITRNDGGIYTCFAENNRGKANSTGTLVITDPTRIILAPINADITVGENATMQCAASFDPALDLTFVWSFNGYVIDFNKENIHYQRNFMLDSNGELLIRNAQLKHAGRYTCTAQTIVDNSSASADLVVRGPPGPPGGLRIEDIRATSVALTWSRGSDNHSPISKYTIQTKTILSDDWKDAKTDPPIIEGNMEAARAVDLIPWMEYEFRVVATNTLGRGEPSIPSNRIKTDGAAPNVAPSDVGGGGGRNRELTITWAPLSREYHYGNNFGYIVAFKPFDGEEWKKVTVTNPDTGRYVHKDETMSPSTAFQVKVKAFNNKGDGPYSLVAVINSAQDAPSEAPTEVGVKVLSSSEISVHWEHVLEKIVESYQIRYWAAHDKEEAANRVQVTSQEYSARLENLLPDTQYFIEVGACNSAGCGPPSDMIEAFTKKAPPSQPPRIISSVRSGSRYIITWDHVVALSNESTVTGYKVLYRPDGQHDGKLYSTHKHSIEVPIPRDGEYVVEVRAHSDGGDGVVSQVKISGQTWWLMPIVPALWEAKVGG

SEQ ID NO: 10769 - protein, 62 aa, Artificial Sequence
  Synthetic polypeptide
KHSIEVPIPRDGEYVVEVRAHSDGGDGVVSQVKISELEKTTLKFIWNQKRACIAKSILSQKN

SEQ ID NO: 10770 - protein, 1020 aa, Artificial Sequence
  Synthetic polypeptide
MKMWLLVSHLVIISITTCLAEFTWYRRYGHGVSEEDKGFGPIFEEQPINTIYPEESLEGKVSLNCRARASPFPVYKWRMNNGDVDLTSDRYSMVGGNLVINNPDKQKDAGIYYCLASNNYGMVRSTEATLSFGYLDPFPPEERPEVRVKEGKGMVLLCDPPYHFPDDLSYRWLLNEFPVFITMDKRRFVSQTNGNLYIANVEASDKGNYSCFVSSPSITKSVFSKFIPLIPIPERTTKPYPADIVVQFKDVYALMGQNVTLECFALGNPVPDIRWRKVLEPMPSTAEISTSGAVLKIFNIQLEDEGIYECEAENIRGKDKHQARIYVQAFPEWVEHINDTEVDIGSDLYWPCVATGKPIPTIRWLKNGYAYHKGELRLYDVTFENAGMYQCIAENTYGAIYANAELKILALAPTFEMNPMKKKILAAKGGRVIIECKPKAAPKPKFSWSKGTEWLVNSSRILIWEDGSLEINNITRNDGGIYTCFAENNRGKANSTGTLVITDPTRIILAPINADITVGENATMQCAASFDPALDLTFVWSFNGYVIDFNKENIHYQRNFMLDSNGELLIRNAQLKHAGRYTCTAQTIVDNSSASADLVVRGPPGPPGGLRIEDIRATSVALTWSRGSDNHSPISKYTIQTKTILSDDWKDAKTDPPIIEGNMEAARAVDLIPWMEYEFRVVATNTLGRGEPSIPSNRIKTDGAAPNVAPSDVGGGGGRNRELTITWAPLSREYHYGNNFGYIVAFKPFDGEEWKKVTVTNPDTGRYVHKDETMSPSTAFQVKVKAFNNKGDGPYSLVAVINSAQDAPSEAPTEVGVKVLSSSEISVHWEHVLEKIVESYQIRYWAAHDKEEAANRVQVTSQEYSARLENLLPDTQYFIEVGACNSAGCGPPSDMIEAFTKKAPPSQPPRIISSVRSGSRYIITWDHVVALSNESTVTGYKVLYRPDGQHDGKLYSTHKHSIEVPIPRDGEYVVEVRAHSDGGDGVVSQVKISELEKTTLKFIWNQKRACIAKSILSQKN

SEQ ID NO: 10771 - protein, 1009 aa, Artificial Sequence
  Synthetic polypeptide
MKMWLLVSHLVIISITTCLAVSEEDKGFGPIFEEQPINTIYPEESLEGKVSLNCRARASPFPVYKWRMNNGDVDLTSDRYSMVGGNLVINNPDKQKDAGIYYCLASNNYGMVRSTEATLSFGYLDPFPPEERPEVRVKEGKGMVLLCDPPYHFPDDLSYRWLLNEFPVFITMDKRRFVSQTNGNLYIANVEASDKGNYSCFVSSPSITKSVFSKFIPLIPIPERTTKPYPADIVVQFKDVYALMGQNVTLECFALGNPVPDIRWRKVLEPMPSTAEISTSGAVLKIFNIQLEDEGIYECEAENIRGKDKHQARIYVQAFPEWVEHINDTEVDIGSDLYWPCVATGKPIPTIRWLKNGYAYHKGELRLYDVTFENAGMYQCIAENTYGAIYANAELKILALAPTFEMNPMKKKILAAKGGRVIIECKPKAAPKPKFSWSKGTEWLVNSSRILIWEDGSLEINNITRNDGGIYTCFAENNRGKANSTGTLVITDPTRIILAPINADITVGENATMQCAASFDPALDLTFVWSFNGYVIDFNKENIHYQRNFMLDSNGELLIRNAQLKHAGRYTCTAQTIVDNSSASADLVVRGPPGPPGGLRIEDIRATSVALTWSRGSDNHSPISKYTIQTKTILSDDWKDAKTDPPIIEGNMEAARAVDLIPWMEYEFRVVATNTLGRGEPSIPSNRIKTDGAAPNVAPSDVGGGGGRNRELTITWAPLSREYHYGNNFGYIVAFKPFDGEEWKKVTVTNPDTGRYVHKDETMSPSTAFQVKVKAFNNKGDGPYSLVAVINSAQDAPSEAPTEVGVKVLSSSEISVHWEHVLEKIVESYQIRYWAAHDKEEAANRVQVTSQEYSARLENLLPDTQYFIEVGACNSAGCGPPSDMIEAFTKKAPPSQPPRIISSVRSGSRYIITWDHVVALSNESTVTGYKVLYRPDGQHDGKLYSTHKHSIEVPIPRDGEYVVEVRAHSDGGDGVVSQVKISELEKTTLKFIWNQKRACIAKSILSQKN

SEQ ID NO: 10772 - protein, 80 aa, Artificial Sequence; identical to SEQ ID NO: 1194
  Synthetic polypeptide

SEQ ID NO: 10773 - protein, 151 aa, Artificial Sequence; identical to SEQ ID NO: 1025
  Synthetic polypeptide

SEQ ID NO: 10774 - protein, 145 aa, Artificial Sequence
  Synthetic polypeptide
MATCHSHRTNSWQISVPSAFVWSVAPIKNVSRRSWVVDDNVLQHNSLSLHIFSHIQHDSSNGWEHGVTRRREERRREKLWPLGEPIPRSSPSQGCDTLSGALQFLASSSFWVPLCSPVPAVEAACGTPGPVTASQGASTLLRTQS

SEQ ID NO: 10775 - protein, 137 aa, Artificial Sequence
  Synthetic polypeptide
MGKDFRYYFQHPWSRMIVAYLVIFFNFLIFAEDPVSHSQTEANVIVVGNCFSFVTNKYPRGVGWRILKVLLWLLAILTGLIAGKFLFHQRLFGQLLRLKMFREDHGSWMTMFFSTILFLFIFSHIYNTILLMDGNMG

SEQ ID NO: 10776 - protein, 106 aa, Artificial Sequence
  Synthetic polypeptide
MATCHSHRTNSWQISVPSAFVWSVAPIKNVSRRSWVVDDNVLQHNSLSLHIFSHIQHDSSNGWEHGVTDMMLQDKPYPDWGKSARAFWKKGNVRITLFCYPWSTAV

SEQ ID NO: 10777 - protein, 66 aa, Artificial Sequence
  Synthetic polypeptide
MGIRNESFMKLAAVGTWMGDFVTAWMVTDMMLQDKPYPDWGKSARAFWKKGNVRITLFCYPWSTAV

SEQ ID NO: 10778 - protein, 210 aa, Artificial Sequence
  Synthetic polypeptide
MGKDFRYYFQHPWSRMIVAYLVIFFNFLIFAEDPVSHSQTEANVIVVGNCFSFVTNKYPRGVGWRILKVLLWLLAILTGLIAGKFLFHQRLFGQLLRLKMFREDHGSWMTMFFSTILFLFIFSHIYNTILLMDGNMGAYIITDYMGIRNESFMKLAAVGTWMGDFVTAWMVTDMMLQDKPYPDWGKSARAFWKKGNVRITLFCYPWSTAV

SEQ ID NO: 10779 - protein, 55 aa, Artificial Sequence
  Synthetic polypeptide
MFCAAVLENLGQTIVPDLGSLESQHDFRTPEFQDYIIERIFLLPCCQEALCQFSC

SEQ ID NO: 10780 - protein, 94 aa, Artificial Sequence
  Synthetic polypeptide
MKKMSRNVLLQMEEEEDDDDGDIGDVPASRRPFLTPHTHLPSSLVLENLGQTIVPDLGSLESQHDFRTPEFQDYIIERIFLLPCCQEALCQFSC

SEQ ID NO: 10781 - protein, 73 aa, Artificial Sequence
  Synthetic polypeptide
MKKMSRNVLLQMEEEEDDDDGDIVLENLGQTIVPDLGSLESQHDFRTPEFQDYIIERIFLLPCCQEALCQFSC

SEQ ID NO: 10782 - protein, 54 aa, Artificial Sequence
  Synthetic polypeptide
MFCAAVLENLGQTIVPDLGSLESQHDFRTPEFDYIIERIFLLPCCQEALCQFSC

SEQ ID NO: 10783 - protein, 93 aa, Artificial Sequence
  Synthetic polypeptide
MKKMSRNVLLQMEEEEDDDDGDIGDVPASRRPFLTPHTHLPSSLVLENLGQTIVPDLGSLESQHDFRTPEFDYIIERIFLLPCCQEALCQFSC

SEQ ID NO: 10784 - protein, 72 aa, Artificial Sequence
  Synthetic polypeptide
MKKMSRNVLLQMEEEEDDDDGDIVLENLGQTIVPDLGSLESQHDFRTPEFDYIIERIFLLPCCQEALCQFSC

SEQ ID NO: 10785 - protein, 199 aa, Artificial Sequence; identical to SEQ ID NO: 9316
  Synthetic polypeptide

SEQ ID NO: 10786 - protein, 577 aa, Artificial Sequence
  Synthetic polypeptide
MDTMMLNVRNLFEQLVRRVEILSEGNEVQFIQLAKDFEDFRKKWQRTDHELGKYKDLLMKAETERSALDVKLKHARNQVDVEIKRRQRAEADCEKLERQIQLIREMLMCDTSGSIQLSEEQKSALAFLNRGQPSSSNAGNKRLSTIDESGSILSDISFDKTDESLDWDSSLVKTFKLKKREKRRSTSRQFVDGPPGPVKKTRSIGSAVDQGNESIVAKTTVTVPNDGGPIEAVSTIETVPYWTRSRRKTGTLQPWNSDSTLNSRQLEPRTETDSVGTPQSNGGMRLHDFVSKTVIKPESCVPCGKRIKFGKLSLKCRDCRVVSHPECRDRCPLPCIPTLIGTPVKIGEGMLADFVSQTSPMIPSIVVHCVNEIEQRGLTETGLYRISGCDRTVKELKEKFLRVKTVPLLSKVDDIHAICSLLKDFLRNLKEPLLTFRLNRAFMEAAEITDEDNSIAAMYQAVGELPQANRDTLAFLMIHLQRVAQSPHTKMDVANLAKVFGPTIVAHAVPNPDPVTMLQDIKRQPKVVERLLSLPLEYWSQFMMVEQENIDPLHVIENSNAFSTPQTPDIKVSSHKI

SEQ ID NO: 10787 - protein, 87 aa, Artificial Sequence
  Synthetic polypeptide
MDVANLAKVFGPTIVAHAVPNPDPVTMLQDIKRQPKVVERLLSLPLEYWSQFMMVEQENIDPLHVIENSNAFSTPQTPDIKVSSHKI

SEQ ID NO: 10788 - protein, 30 aa, Artificial Sequence
  Synthetic polypeptide
MTSLLTTPSPRATPEAEAGGSLEPGRWRLQ

SEQ ID NO: 10789 - protein, 499 aa, Artificial Sequence; identical to SEQ ID NO: 375
  Synthetic polypeptide

SEQ ID NO: 10790 - protein, 311 aa, Artificial Sequence; identical to SEQ ID NO: 656
  Synthetic polypeptide

SEQ ID NO: 10791 - protein, 485 aa, Artificial Sequence; identical to SEQ ID NO: 390
  Synthetic polypeptide

SEQ ID NO: 10792 - protein, 154 aa, Artificial Sequence
  Synthetic polypeptide
  misc_feature (1)..(1): Xaa can be any naturally occurring amino acid
XSRNVLVKSNLQCCIADLGLAVMHSQGSDYLDIGNNPRVGTKRYMAPEVLDEQIRTDCFESYKWTDIWAFGLVLWEIARRTIVNGIVEDYRPPFYDVVPNDPSFEDMKKVVCVDQQTPTIPNRLAADPLTQHEDKDEDFMIIHFHLMDSKYISS

SEQ ID NO: 10793 - protein, 289 aa, Artificial Sequence
  Synthetic polypeptide
MAESAGASSFFPLVVLLLAGSGGSGPRGVQALLCACTSCLQANYTCETDGACMVSIFNLDGMEHHVRTCIPKVELVPAGKPFYCLSSEDLRNTHCCYTDYCNRIDLRVPSGHLKEPEHPSMWGPVELVGIIAGPVFLLFLIIIIVFLVINYHQRVYHNRQRLDMEDPSCEMCLSKDKTLQDLVYDLSTSGSGSGLPLFVQRTVARTIVLQEIIGKGRFGEVWRGRWRGGDVAVKIFSSREERSWFREAEIYQTVMLRHENILGFIAADNKAIQEAEAGELLEPRRRRLQ

SEQ ID NO: 10794 - protein, 237 aa, Artificial Sequence
  Synthetic polypeptide
MVSIFNLDGMEHHVRTCIPKVELVPAGKPFYCLSSEDLRNTHCCYTDYCNRIDLRVPSGHLKEPEHPSMWGPVELVGIIAGPVFLLFLIIIIVFLVINYHQRVYHNRQRLDMEDPSCEMCLSKDKTLQDLVYDLSTSGSGSGLPLFVQRTVARTIVLQEIIGKGRFGEVWRGRWRGGDVAVKIFSSREERSWFREAEIYQTVMLRHENILGFIAADNKAIQEAEAGELLEPRRRRLQ

SEQ ID NO: 10795 - protein, 2901 aa, Artificial Sequence
  Synthetic polypeptide
MLTPPLLLLLPLLSALVAAAIDAPKTCSPKQFACRDQITCISKGWRCDGERDCPDGSDEAPEICPQSKAQRCQPNEHNCLGTELCVPMSRLCNGVQDCMDGSDEGPHCRELQGNCSRLGCQHHCVPTLDGPTCYCNSSFQLQADGKTCKDFDECSVYGTCSQLCTNTDGSFICGCVEGYLLQPDNRSCKAKNEPVDRPPVLLIANSQNILATYLSGAQVSTITPTSTRQTTAMDFSYANETVCWVHVGDSAAQTQLKCARMPGLKGFVDEHTINISLSLHHVEQMAIDWLTGNFYFVDDIDDRIFVCNRNGDTCVTLLDLELYNPKGIALDPAMGKVFFTDYGQIPKVERCDMDGQNRTKLVDSKIVFPHGITLDLVSRLVYWADAYLDYIEVVDYEGKGRQTIIQGILIEHLYGLTVFENYLYATNSDNANAQQKTSVIRVNRFNSTEYQVVTRVDKGGALHIYHQRRQPRVRSHACENDQYGKPGGCSDICLLANSHKARTCRCRSGFSLGSDGKSCKKPEHELFLVYGKGRPGIIRGMDMGAKVPDEHMIPIENLMNPRALDFHAETGFIYFADTTSYLIGRQKIDGTERETILKDGIHNVEGVAVDWMGDNLYWTDDGPKKTISVARLEKAAQTRKTLIEGKMTHPRAIVVDPLNGWMYWTDWEEDPKDSRRGRLERAWMDGSHRDIFVTSKTVLWPNGLSLDIPAGRLYWVDAFYDRIETILLNGTDRKIVYEGPELNHAFGLCHHGNYLFWTEYRSGSVYRLERGVGGAPPTVTLLRSERPPIFEIRMYDAQQQQVGTNKCRVNNGGCSSLCLATPGSRQCACAEDQVLDADGVTCLANPSYVPPPQCQPGEFACANSRCIQERWKCDGDNDCLDNSDEAPALCHQHTCPSDRFKCENNRCIPNRWLCDGDNDCGNSEDESNATCSARTCPPNQFSCASGRCIPISWTCDLDDDCGDRSDESASCAYPTCFPLTQFTCNNGRCININWRCDNDNDCGDNSDEAGCSHSCSSTQFKCNSGRCIPEHWTCDGDNDCGDYSDETHANCTNQATRPPGGCHTDEFQCRLDGLCIPLRWRCDGDTDCMDSSDEKSCEGVTHVCDPSVKFGCKDSARCISKAWVCDGDNDCEDNSDEENCESLACRPPSHPCANNTSVCLPPDKLCDGNDDCGDGSDEGELCDQCSLNNGGCSHNCSVAPGEGIVCSCPLGMELGPDNHTCQIQSYCAKHLKCSQKCDQNKFSVKCSCYEGWVLEPDGESCRSLDPFKPFIIFSNRHEIRRIDLHKGDYSVLVPGLRNTIALDFHLSQSALYWTDVVEDKIYRGKLLDNGALTSFEVVIQYGLATPEGLAVDWIAGNIYWVESNLDQIEVAKLDGTLRTTLLAGDIEHPRAIALDPRDGILFWTDWDASLPRIEAASMSGAGRRTVHRETGSGGWPNGLTVDYLEKRILWIDARSDAIYSARYDGSGHMEVLRGHEFLSHPFAVTLYGGEVYWTDWRTNTLAKANKWTGHNVTVVQRTNTQPFDLQVYHPSRQPMAPNPCEANGGQGPCSHLCLINYNRTVSCACPHLMKLHKDNTTCYEFKKFLLYARQMEIRGVDLDAPYYNYIISFTVPDIDNVTVLDYDAREQRVYWSDVRTQAIKRAFINGTGVETVVSADLPNAHGLAVDWVSRNLFWTSYDTNKKQINVARLDGSFKNAVVQGLEQPHGLVVHPLRGKLYWTDGDNISMANMDGSNRTLLFSGQKGPVGLAIDFPESKLYWISSGNHTINRCNLDGSGLEVIDAMRSQLGKATALAIMGDKLWWADQVSEKMGTCSKADGSGSVVLRNSTTLVMHMKVYDESIQLDHKGTNPCSVNNGDCSQLCLPTSETTRSCMCTAGYSLRSGQQACEGVGSFLLYSVHEGIRGIPLDPNDKSDALVPVSGTSLAVGIDFHAENDTIYWVDMGLSTISRAKRDQTWREDVVTNGIGRVEGIAVDWIAGNIYWTDQGFDVIEVARLNGSFRYVVISQGLDKPRAITVHPEKGYLFWTEWGQYPRIERSRLDGTERVVLVNVSISWPNGISVDYQDGKLYWCDARTDKIERIDLETGENREVVLSSNNMDMFSVSVFEDFIYWSDRTHANGSIKRGSKDNATDSVPLRTGIGVQLKDIKVFNRDRQKGTNVCAVANGGCQQLCLYRGRGQRACACAHGMLAEDGASCREYAGYLLYSERTILKSIHLSDERNLNAPVQPFEDPEHMKNVIALAFDYRAGTSPGTPNRIFFSDIHFGNIQQINDDGSRRITIVENVGSVEGLAYHRGWDTLYWTSYTTSTITRHTVDQTRPGAFERETVITMSGDDHPRAFVLDECQNLMFWTNWNEQHPSIMRAALSGANVLTLIEKDIRTPNGLAIDHRAEKLYFSDATLDKIERCEYDGSHRYVILKSEPVHPFGLAVYGEHIFWTDWVRRAVQRANKHVGSNMKLLRVDIPQQPMGIIAVANDTNSCELSPCRINNGGCQDLCLLTHQGHVNCSCRGGRILQDDLTCRAVNSSCRAQDEFECANGECINFSLTCDGVPHCKDKSDEKPSYCNSRRCKKTFRQCSNGRCVSNMLWCNGADDCGDGSDEIPCNKTACGVGEFRCRDGTCIGNSSRCNQFVDCEDASDEMNCSATDCSSYFRLGVKGVLFQPCERTSLCYAPSWVCDGANDCGDYSDERDCPGVKRPRCPLNYFACPSGRCIPMSWTCDKEDDCEHGEDETHCNKFCSEAQFECQNHRCISKQWLCDGSDDCGDGSDEAAHCEGKTCGPSSFSCPGTHVCVPERWLCDGDKDCADGADESIAAGCLYNSTCDDREFMCQNRQCIPKHFVCDHDRDCADGSDESPECEYPTCGPSEFRCANGRCLSSRQWECDGENDCHDQSDEAPKNPHCTSQE

SEQ ID NO: 10796 - protein, 452 aa, Artificial Sequence
  Synthetic polypeptide
MGTQEGWCLLLCLALSGAAETKPHPAEGQWRAVDVVLDCFLAKDGAHRGALASSEDRARASLVLKQVPVLDDGSLEDFTDFQGGTLAQDDPPIIFEASVDLVQIPQAEALLHADCSGKEVTCEISRYFLQMTETTVKTAAWFMANMQVSGGGPSISLVMKTPRVTKNEALWHPTLNLPLSPQGTVRTAVEFQVMTQTQSLSFLLGSSASLDCGFSMAPGLDLISVEWRLQHKGRGQLVYSWTAGQGQAVRKGATLEPAQLGMARDASLTLPGLTIQDEGTYICQITTSLYRAQQIIQLNIQASPKVRLSLANEALLPTLICDIAGYYPLDVVVTWTREELGGSPAQVSGASFSSLRQSVAGTYSISSSLTAEPGSAGATYTCQVTHISLEEPLGASTQVVPPERRTALGVIFASSLFLLALMFLGLQRRQEVPFTCRHDSEAFPAMWNCKSN

SEQ ID NO: 10797 - protein, 359 aa, Artificial Sequence
  Synthetic polypeptide
MWEAQFLGLLFLQPLWVAPVKPLQPGAEVPVVWAQEGAPAQLPCSPTIPLQDLSLLRRAGVTWQHQPDSGPPAAAPGHPLAPGPHPAAPSSWGPRPRRYTVLSVGPGGLRSGRLPLQPRVQLDERGRQRGDFSLWLRPARRADAGEYRAAVHLRDRALSCRLRLRLGQASMTASPPGSLRASDWVILNCSFSRPDRPASVHWFRNRGQGRVPVRESPHHHLAESFLFLPQVSPMDSGPWGCILTYRDGFNVSIMYNLTVLGLEPPTPLTVYAGAGSRVGLPCRLPAGVGTRSFLTAKWTPPGGGPDLLVTGDNGDFTLRLEDVSQAQAGTYTCHIHLQEQQLNATVTLAIITGHDGSHL

SEQ ID NO: 10798 - protein, 278 aa, Artificial Sequence
  Synthetic polypeptide
MFLISSSVHGSDEHGRLLRRTLMRYVNLTSLLIFRSVSTAVYKRFPTMDHVVEAGFMTTDERKLFNHLKSPHLKYWVPFIWFGNLATKARNEGRIRDSVDLQSLMTEMNRYRSWCSLLFGYDWVGIPLVYTQVVTLAVYTFFFACLIGRQFLDPTKGYAGHDLDLYIPIFTLLQFFFYAGWLKVAEQLINPFGEDDDDFETNWCIDRNLQVSLLAVDEMHMSLPKMKKDIYWDDSAARPPYTLAAADYCIPSFLGSTVQMGRPHQILCKMKQDVIKKQ

SEQ ID NO: 10799 - protein, 171 aa, Artificial Sequence
  Synthetic polypeptide
MTTDERKLFNHLKSPHLKYWVPFIWFGNLATKARNEGRIRDSVDLQSLMTEMNRYRSWCSLLFGYDWVGIPLVYTQVAEQLINPFGEDDDDFETNWCIDRNLQVSLLAVDEMHMSLPKMKKDIYWDDSAARPPYTLAAADYCIPSFLGSTVQMGRPHQILCKMKQDVIKKQ

SEQ ID NO: 10800 - protein, 384 aa, Artificial Sequence
  Synthetic polypeptide
MTVTYSSKVANATFFGFHRLLLKWRGSIYKLLYREFIVFAVLYTAISLVYRLLLTGVQKRYFEKLSIYCDRYAEQIPVTFVLGFYVTLVVNRWWNQFVNLPWPDRLMFLISSSVHGSDEHGRLLRRTLMRYVNLTSLLIFRSVSTAVYKRFPTMDHVVEAGFMTTDERKLFNHLKSPHLKYWVPFIWFGNLATKARNEGRIRDSVDLQSLMTEMNRYRSWCSLLFGYDWVGIPLVYTQVVTLAVYTFFFACLIGRQFLDPTKGYAGHDLDLYIPIFTLLQFFFYAGWLKVAEQLINPFGEDDDDFETNWCIDRNLQVSLLAVDEMHMSLPKMKKDIYWDDSAARPPYTLAAADYCIPSFLGSTVQMGRPHQILCKMKQDVIKKQ

SEQ ID NO: 10801 - protein, 100 aa, Artificial Sequence
  Synthetic polypeptide
MENDNTVLLNPPLFALDKDAPLRYAGEICGFRLHGSGVPFEAVILDKATGEGLIRAKEPVDCEAQKEHTFTIQAYDCGEGPDGANTKKSHKMEIVMTPTS

SEQ ID NO: 10802 - protein, 137 aa, Artificial Sequence
  Synthetic polypeptide
MTLLLLPLLLASLLASCSCNKANKHKPWIEAEYQGIVMENDNTVLLNPPLFALDKDAPLRYAGEICGFRLHGSGVPFEAVILDKATGEGLIRAKEPVDCEAQKEHTFTIQAYDCGEGPDGANTKKSHKMEIVMTPTS

SEQ ID NO: 10803 - protein, 149 aa, Artificial Sequence
  Synthetic polypeptide
MVLGCELSGSTRVVVGVEALLTGASSPLPGVGPANKHKPWIEAEYQGIVMENDNTVLLNPPLFALDKDAPLRYAGEICGFRLHGSGVPFEAVILDKATGEGLIRAKEPVDCEAQKEHTFTIQAYDCGEGPDGANTKKSHKMEIVMTPTS

SEQ ID NO: 10804 - protein, 120 aa, Artificial Sequence
  Synthetic polypeptide
MVVITNKHKPWIEAEYQGIVMENDNTVLLNPPLFALDKDAPLRYAGEICGFRLHGSGVPFEAVILDKATGEGLIRAKEPVDCEAQKEHTFTIQAYDCGEGPDGANTKKSHKMEIVMTPTS

SEQ ID NO: 10805 - protein, 233 aa, Artificial Sequence
  Synthetic polypeptide
MLKPSVTSAPTADMATLTVVQPLTLDRDVARAIELLEKLQESGEVPVHKLQSLKKVLQSEFCTAIREVYQYMHETITVNGCPEFRARATAKATVAAFAASEGHSHPRVVELPKTDEGLGFNVMGGKEQNSPIYISRIIPGGVAERHGGLKRGDQLLSVNGVSVEGEHHEKAVELLKAAKDSVKLVVRYTPKVLEEMEARFEKLRTARRRQQQQLLIQQQQQQQQQQTQQNHMS

SEQ ID NO: 10806 - protein, 24 aa, Artificial Sequence
  Synthetic polypeptide
MITLKYVPGMDVLILSASWMLICI

SEQ ID NO: 10807 - protein, 75 aa, Artificial Sequence
  Synthetic polypeptide
MKKTQTWILTCIYLQLLLFNPLVKTEGICRNRVTNNVKDVTKLVANLPKDYMITLKYVPGMDVLILSASWMLICI

SEQ ID NO: 10808 - protein, 127 aa, Artificial Sequence [sequence omitted]

SEQ ID NO: 10809 - protein, 160 aa, Artificial Sequence [sequence omitted]

SEQ ID NO: 10810 - protein, 115 aa, Artificial Sequence
  Synthetic polypeptide
MLIDERLRCEHHKANYQTLKAEHTRLQNEHVKLQNELKHLFNEKQTQQEKLQLLLEELRGELVEKTKDLEEMKLQILTPQKLELLRAQIQQELETPMRERFRNLDEIRRGKLHLL

SEQ ID NO: 10811 - protein, 148 aa, Artificial Sequence
  Synthetic polypeptide
MVVSTFTDMDTFPNNFPPGGDSGLTGSQSEFQKMLIDERLRCEHHKANYQTLKAEHTRLQNEHVKLQNELKHLFNEKQTQQEKLQLLLEELRGELVEKTKDLEEMKLQILTPQKLELLRAQIQQELETPMRERFRNLDEIRRGKLHLL

SEQ ID NO: 10812 - protein, 36 aa, Artificial Sequence
  Synthetic polypeptide
MHDSNNVEKDITPSELPANPVLIIPTCHGRDPVGDN

SEQ ID NO: 10813 - protein, 30 aa, Artificial Sequence
  Synthetic polypeptide
VEKDITPSELPANPVLIIPTCHGRDPVGDN

SEQ ID NO: 10814 - protein, 121 aa, Artificial Sequence; identical to SEQ ID NO: 1093
  Synthetic polypeptide

SEQ ID NO: 10815 - protein, 73 aa, Artificial Sequence
  Synthetic polypeptide
  misc_feature (1)..(1): Xaa can be any naturally occurring amino acid
XYLSEVSLQKYDCPFSGTSFVVFSLFLICAMAGDVVYADIKTVRTSPLELAFPLQRSGPITRVAEQQSSGIAE

SEQ ID NO: 10816 - protein, 220 aa, Artificial Sequence
  Synthetic polypeptide
MDDSTEREQSRLTSCLKKREEMKLKECVSILPRKESPSVRSSKDGKLLAATLLLALLSCCLTVVSFYQVAALQGDLASLRAELQGHHAEKLPAGAGAPKAGLEEAPAVTAGLKIFEPPAPGEGNSSQNSRNKRAVQGPEETVTQDCLQLIADSETPTIQKGTWMKLETIILSKLSHVLTHRWELNNENTWIQEGEHHTPGPVVGWGEGGGIALGDIPTVK

SEQ ID NO: 10817 - protein, 266 aa, Artificial Sequence
  Synthetic polypeptide
MDCSLVRTLVHRYCAGEENWVDSRTIYVGHREPPPGAEAYIPQRYPDNRIVSSKYTFWNFIPKNLFEQFRRVANFYFLIIFLVQLIIDTPTSPVTSGLPLFFVITVTAIKQGYEDWLRHKADNAMNQCPVHFIQHGKLVRKQSRKLRVGDIVMVKEDETFPCDLIFLSSNRGDGTCHVTTASLDGESSHKTHYAVQDTKGFHTEEDIGGLHATIECEQPQPDLYKFVGRINVYSDLNDPVVRHTSVVLATRQDEMEGSLEHRSLKQ

SEQ ID NO: 10818 - protein, 241 aa, Artificial Sequence
  Synthetic polypeptide
  misc_feature (1)..(1): Xaa can be any naturally occurring amino acid
XYVGHREPPPGAEAYIPQRYPDNRIVSSKYTFWNFIPKNLFEQFRRVANFYFLIIFLVQLIIDTPTSPVTSGLPLFFVITVTAIKQGYEDWLRHKADNAMNQCPVHFIQHGKLVRKQSRKLRVGDIVMVKEDETFPCDLIFLSSNRGDGTCHVTTASLDGESSHKTHYAVQDTKGFHTEEDIGGLHATIECEQPQPDLYKFVGRINVYSDLNDPVVRHTSVVLATRQDEMEGSLEHRSLKQ

SEQ ID NO: 10819 - protein, 116 aa, Artificial Sequence
  Synthetic polypeptide
MAEKGASRGTLRRLWSLPRRRRGTAGRSRPDEIMHQDIVPLCAADIQDQLKKRFAYLSGGRGQDGSPVITFPDYPAFSEIPDKEFQNVMTYLTSIPRIVLGGTRQTTRQEKKSLKD

SEQ ID NO: 10820 - protein, 169 aa, Artificial Sequence
  Synthetic polypeptide
MARVESPVPAARASLTGSCVLGQAMPLRGGAGPSPASHGPTHGPSDPRTCLPGRGAGGMRPHGRGALGCCGLCSFYTCHGAAGDEIMHQDIVPLCAADIQDQLKKRFAYLSGGRGQDGSPVITFPDYPAFSEIPDKEFQNVMTYLTSIPRIVLGGTRQTTRQEKKSLKD

SEQ ID NO: 10821 - protein, 142 aa, Artificial Sequence
  Synthetic polypeptide
MFDCWRFILCKRPGSNSYSSPQRPNEAKKEETDHQIDVSDVIRLVQDTPEATAMATDEIMHQDIVPLCAADIQDQLKKRFAYLSGGRGQDGSPVITFPDYPAFSEIPDKEFQNVMTYLTSIPRIVLGGTRQTTRQEKKSLKD

SEQ ID NO: 10822 - protein, 118 aa, Artificial Sequence
  Synthetic polypeptide
MGDGKAVRISVAEMKSYYLYSEWCSWLLSVAEDEIMHQDIVPLCAADIQDQLKKRFAYLSGGRGQDGSPVITFPDYPAFSEIPDKEFQNVMTYLTSIPRIVLGGTRQTTRQEKKSLKD

SEQ ID NO: 10823 - protein, 83 aa, Artificial Sequence
  Synthetic polypeptide
MHQDIVPLCAADIQDQLKKRFAYLSGGRGQDGSPVITFPDYPAFSEIPDKEFQNVMTYLTSIPRIVLGGTRQTTRQEKKSLKD

SEQ ID NO: 10824 - protein, 145 aa, Artificial Sequence
  Synthetic polypeptide
MPLRGGAGPSPASHGPTHGPSDPRTCLPGRGAGGMRPHGRGALGCCGLCSFYTCHGAAGDEIMHQDIVPLCAADIQDQLKKRFAYLSGGRGQDGSPVITFPDYPAFSEIPDKEFQNVMTYLTSIPRIVLGGTRQTTRQEKKSLKD

SEQ ID NO: 10825 - protein, 112 aa, Artificial Sequence
  Synthetic polypeptide
MRFWLRTEEMALEEMVQRLNAVSKHTDEIMHQDIVPLCAADIQDQLKKRFAYLSGGRGQDGSPVITFPDYPAFSEIPDKEFQNVMTYLTSIPRIVLGGTRQTTRQEKKSLKD

SEQ ID NO: 10826 - protein, 110 aa, Artificial Sequence
  Synthetic polypeptide
MTVRRLSLLCRDLWALWLLLKAGADEIMHQDIVPLCAADIQDQLKKRFAYLSGGRGQDGSPVITFPDYPAFSEIPDKEFQNVMTYLTSIPRIVLGGTRQTTRQEKKSLKD

SEQ ID NO: 10827 - protein, 51 aa, Artificial Sequence
  Synthetic polypeptide
SPVITFPDYPAFSEIPDKEFQNVMTYLTSIPRIVLGGTRQTTRQEKKSLKD

SEQ ID NO: 10828 - protein, 40 aa, Artificial Sequence
  Synthetic polypeptide
  misc_feature (1)..(1): Xaa can be any naturally occurring amino acid
XSEIPDKEFQNVMTYLTSIPRIVLGGTRQTTRQEKKSLKD

SEQ ID NO: 10829 - protein, 565 aa, Artificial Sequence
  Synthetic polypeptide
MAEKGASRGTLRRLWSLPRRRRGTAGRSRPDEIMHQDIVPLCAADIQDQLKKRFAYLSGGRGQDGSPVITFPDYPAFSEIPDKEFQNVMTYLTSIPSLQDAGIGFILVIDRRRDKWTSVKASVLRIAASFPANLQLVLVLRPTGFFQRTLSDIAFKFNRDDFKMKVPVIMLSSVPDLHGYIDKSQLTEDLGGTLDYCHSRWLCQRTAIESFALMVKQTAQMLQSFGTELAETELPNDVQSTSSVLCAHTEKKDKAKEDLRLALKEGHSVLESLRELQAEGSEPSVNQDQLDNQATVQRLLAQLNETEAAFDEFWAKHQQKLEQCLQLRHFEQGFREVKAILDAASQKIATFTDIGNSLAHVEHLLRDLASFEEKSGVAVERARALSLDGEQLIGNKHYAVDSIRPKCQELRHLCDQFSAEIARRRGLLSKSLELHRRLETSMKWCDEGIYLLASQPVDKCQSQDGAEAALQEIEKFLETGAENKIQELNAIYKEYESILNQDLMEHVRKVFQKQASMEEVFHRRQASLKKLAARQTRPVQPVAPRPEALAKSPCPSPGIVVAAFP

SEQ ID NO: 10830 - protein, 618 aa, Artificial Sequence
  Synthetic polypeptide
MARVESPVPAARASLTGSCVLGQAMPLRGGAGPSPASHGPTHGPSDPRTCLPGRGAGGMRPHGRGALGCCGLCSFYTCHGAAGDEIMHQDIVPLCAADIQDQLKKRFAYLSGGRGQDGSPVITFPDYPAFSEIPDKEFQNVMTYLTSIPSLQDAGIGFILVIDRRRDKWTSVKASVLRIAASFPANLQLVLVLRPTGFFQRTLSDIAFKFNRDDFKMKVPVIMLSSVPDLHGYIDKSQLTEDLGGTLDYCHSRWLCQRTAIESFALMVKQTAQMLQSFGTELAETELPNDVQSTSSVLCAHTEKKDKAKEDLRLALKEGHSVLESLRELQAEGSEPSVNQDQLDNQATVQRLLAQLNETEAAFDEFWAKHQQKLEQCLQLRHFEQGFREVKAILDAASQKIATFTDIGNSLAHVEHLLRDLASFEEKSGVAVERARALSLDGEQLIGNKHYAVDSIRPKCQELRHLCDQFSAEIARRRGLLSKSLELHRRLETSMKWCDEGIYLLASQPVDKCQSQDGAEAALQEIEKFLETGAENKIQELNAIYKEYESILNQDLMEHVRKVFQKQASMEEVFHRRQASLKKLAARQTRPVQPVAPRPEALAKSPCPSPGIVVAAFP

SEQ ID NO: 10831 - protein, 591 aa, Artificial Sequence
  Synthetic polypeptide
MFDCWRFILCKRPGSNSYSSPQRPNEAKKEETDHQIDVSDVIRLVQDTPEATAMATDEIMHQDIVPLCAADIQDQLKKRFAYLSGGRGQDGSPVITFPDYPAFSEIPDKEFQNVMTYLTSIPSLQDAGIGFILVIDRRRDKWTSVKASVLRIAASFPANLQLVLVLRPTGFFQRTLSDIAFKFNRDDFKMKVPVIMLSSVPDLHGYIDKSQLTEDLGGTLDYCHSRWLCQRTAIESFALMVKQTAQMLQSFGTELAETELPNDVQSTSSVLCAHTEKKDKAKEDLRLALKEGHSVLESLRELQAEGSEPSVNQDQLDNQATVQRLLAQLNETEAAFDEFWAKHQQKLEQCLQLRHFEQGFREVKAILDAASQKIATFTDIGNSLAHVEHLLRDLASFEEKSGVAVERARALSLDGEQLIGNKHYAVDSIRPKCQELRHLCDQFSAEIARRRGLLSKSLELHRRLETSMKWCDEGIYLLASQPVDKCQSQDGAEAALQEIEKFLETGAENKIQELNAIYKEYESILNQDLMEHVRKVFQKQASMEEVFHRRQASLKKLAARQTRPVQPVAPRPEALAKSPCPSPGIVVAAFP

SEQ ID NO: 10832 - protein, 567 aa, Artificial Sequence
  Synthetic polypeptide
MGDGKAVRISVAEMKSYYLYSEWCSWLLSVAEDEIMHQDIVPLCAADIQDQLKKRFAYLSGGRGQDGSPVITFPDYPAFSEIPDKEFQNVMTYLTSIPSLQDAGIGFILVIDRRRDKWTSVKASVLRIAASFPANLQLVLVLRPTGFFQRTLSDIAFKFNRDDFKMKVPVIMLSSVPDLHGYIDKSQLTEDLGGTLDYCHSRWLCQRTAIESFALMVKQTAQMLQSFGTELAETELPNDVQSTSSVLCAHTEKKDKAKEDLRLALKEGHSVLESLRELQAEGSEPSVNQDQLDNQATVQRLLAQLNETEAAFDEFWAKHQQKLEQCLQLRHFEQGFREVKAILDAASQKIATFTDIGNSLAHVEHLLRDLASFEEKSGVAVERARALSLDGEQLIGNKHYAVDSIRPKCQELRHLCDQFSAEIARRRGLLSKSLELHRRLETSMKWCDEGIYLLASQPVDKCQSQDGAEAALQEIEKFLETGAENKIQELNAIYKEYESILNQDLMEHVRKVFQKQASMEEVFHRRQASLKKLAARQTRPVQPVAPRPEALAKSPCPSPGIVVAAFP

SEQ ID NO: 10833 - protein, 594 aa, Artificial Sequence
  Synthetic polypeptide
MPLRGGAGPSPASHGPTHGPSDPRTCLPGRGAGGMRPHGRGALGCCGLCSFYTCHGAAGDEIMHQDIVPLCAADIQDQLKKRFAYLSGGRGQDGSPVITFPDYPAFSEIPDKEFQNVMTYLTSIPSLQDAGIGFILVIDRRRDKWTSVKASVLRIAASFPANLQLVLVLRPTGFFQRTLSDIAFKFNRDDFKMKVPVIMLSSVPDLHGYIDKSQLTEDLGGTLDYCHSRWLCQRTAIESFALMVKQTAQMLQSFGTELAETELPNDVQSTSSVLCAHTEKKDKAKEDLRLALKEGHSVLESLRELQAEGSEPSVNQDQLDNQATVQRLLAQLNETEAAFDEFWAKHQQKLEQCLQLRHFEQGFREVKAILDAASQKIATFTDIGNSLAHVEHLLRDLASFEEKSGVAVERARALSLDGEQLIGNKHYAVDSIRPKCQELRHLCDQFSAEIARRRGLLSKSLELHRRLETSMKWCDEGIYLLASQPVDKCQSQDGAEAALQEIEKFLETGAENKIQELNAIYKEYESILNQDLMEHVRKVFQKQASMEEVFHRRQASLKKLAARQTRPVQPVAPRPEALAKSPCPSPGIVVAAFP

SEQ ID NO: 10834 - protein, 561 aa, Artificial Sequence
  Synthetic polypeptide
MRFWLRTEEMALEEMVQRLNAVSKHTDEIMHQDIVPLCAADIQDQLKKRFAYLSGGRGQDGSPVITFPDYPAFSEIPDKEFQNVMTYLTSIPSLQDAGIGFILVIDRRRDKWTSVKASVLRIAASFPANLQLVLVLRPTGFFQRTLSDIAFKFNRDDFKMKVPVIMLSSVPDLHGYIDKSQLTEDLGGTLDYCHSRWLCQRTAIESFALMVKQTAQMLQSFGTELAETELPNDVQSTSSVLCAHTEKKDKAKEDLRLALKEGHSVLESLRELQAEGSEPSVNQDQLDNQATVQRLLAQLNETEAAFDEFWAKHQQKLEQCLQLRHFEQGFREVKAILDAASQKIATFTDIGNSLAHVEHLLRDLASFEEKSGVAVERARALSLDGEQLIGNKHYAVDSIRPKCQELRHLCDQFSAEIARRRGLLSKSLELHRRLETSMKWCDEGIYLLASQPVDKCQSQDGAEAALQEIEKFLETGAENKIQELNAIYKEYESILNQDLMEHVRKVFQKQASMEEVFHRRQASLKKLAARQTRPVQPVAPRPEALAKSPCPSPGIVVAAFP

SEQ ID NO: 10835 - protein, 559 aa, Artificial Sequence
  Synthetic polypeptide
MTVRRLSLLCRDLWALWLLLKAGADEIMHQDIVPLCAADIQDQLKKRFAYLSGGRGQDGSPVITFPDYPAFSEIPDKEFQNVMTYLTSIPSLQDAGIGFILVIDRRRDKWTSVKASVLRIAASFPANLQLVLVLRPTGFFQRTLSDIAFKFNRDDFKMKVPVIMLSSVPDLHGYIDKSQLTEDLGGTLDYCHSRWLCQRTAIESFALMVKQTAQMLQSFGTELAETELPNDVQSTSSVLCAHTEKKDKAKEDLRLALKEGHSVLESLRELQAEGSEPSVNQDQLDNQATVQRLLAQLNETEAAFDEFWAKHQQKLEQCLQLRHFEQGFREVKAILDAASQKIATFTDIGNSLAHVEHLLRDLASFEEKSGVAVERARALSLDGEQLIGNKHYAVDSIRPKCQELRHLCDQFSAEIARRRGLLSKSLELHRRLETSMKWCDEGIYLLASQPVDKCQSQDGAEAALQEIEKFLETGAENKIQELNAIYKEYESILNQDLMEHVRKVFQKQASMEEVFHRRQASLKKLAARQTRPVQPVAPRPEALAKSPCPSPGIVVAAFP

SEQ ID NO: 10836 - protein, 222 aa, Artificial Sequence
  Synthetic polypeptide
  misc_feature (1)..(1): Xaa can be any naturally occurring amino acid
XSQKIATFTDIGNSLAHVEHLLRDLASFEEKSGVAVERARALSLDGEQLIGNKHYAVDSIRPKCQELRHLCDQFSAEIARRRGLLSKSLELHRRLETSMKWCDEGIYLLASQPVDKCQSQDGAEAALQEIEKFLETGAENKIQELNAIYKEYESILNQDLMEHVRKVFQKQASMEEVFHRRQASLKKLAARQTRPVQPVAPRPEALAKSPCPSPGIVVAAFP

SEQ ID NO: 10837 - protein, 85 aa, Artificial Sequence
  Synthetic polypeptide
MAPWTLWRCCQRVVGWVPVLFITFVVVWSYYAYVVELCVFTIFGNEENGKTVVYLVAFHLFFVMFVWSYWMTIFTSPASPSKEVI

SEQ ID NO: 10838 - protein, 22 aa, Artificial Sequence
  Synthetic polypeptide
MFVWSYWMTIFTSPASPSKEVI

SEQ ID NO: 10839 - protein, 468 aa, Artificial Sequence
  Synthetic polypeptide
MAGAGGQHHPPGAAGGAAAGAGAAVTSAAASAGPGEDSSDSEAEQEGPQKLIRKVSTSGQIRTKTSIKEGQLLKQTSSFQRWKKRYFKLRGRTLYYAKDSKSLIFDEVDLSDASVAEASTKNANNSFTIITPFRRLMLCAENRKEMEDWISSLKSVQTREPYEVAQFNVEHFSGMHNWYACSHARPTFCNVCRESLSGVTSHGLSCEVCKFKAHKRCAVRATNNCKWTTLASIGKDIIEDEDGVAMPHQWLEGNLPVSAKCAVCDKTCGSVLRLQDWKCLWCKTMVHTACKDLYHPICPLGQCKVSIIPPIALNSTDSDGFCRATFSFCVSPLLVFVNSKSGDNQGVKFLRRFKQLLNPAQVFDLMNGGPHLGLRLFQKFDNFRILVCGGDGSVGWVLSEIDKLNLNKQCQLGVLPLGTGNDLARVLGWGGSYDDDTQLPQILEKLERASTKMLDRTEKNGKVRMHCT

SEQ ID NO: 10840 - protein, 332 aa, Artificial Sequence
  Synthetic polypeptide
MLCAENRKEMEDWISSLKSVQTREPYEVAQFNVEHFSGMHNWYACSHARPTFCNVCRESLSGVTSHGLSCEVCKFKAHKRCAVRATNNCKWTTLASIGKDIIEDEDGVAMPHQWLEGNLPVSAKCAVCDKTCGSVLRLQDWKCLWCKTMVHTACKDLYHPICPLGQCKVSIIPPIALNSTDSDGFCRATFSFCVSPLLVFVNSKSGDNQGVKFLRRFKQLLNPAQVFDLMNGGPHLGLRLFQKFDNFRILVCGGDGSVGWVLSEIDKLNLNKQCQLGVLPLGTGNDLARVLGWGGSYDDDTQLPQILEKLERASTKMLDRTEKNGKVRMHCT

SEQ ID NO: 10841 - protein, 223 aa, Artificial Sequence
  Synthetic polypeptide
MWNISQGCTTGTPAPTPDPPSVTCAERVFLESPPMACPAKVHTACKDLYHPICPLGQCKVSIIPPIALNSTDSDGFCRATFSFCVSPLLVFVNSKSGDNQGVKFLRRFKQLLNPAQVFDLMNGGPHLGLRLFQKFDNFRILVCGGDGSVGWVLSEIDKLNLNKQCQLGVLPLGTGNDLARVLGWGGSYDDDTQLPQILEKLERASTKMLDRTEKNGKVRMHCT

SEQ ID NO: 10842 - protein, 1081 aa, Artificial Sequence
  Synthetic polypeptide
MAGAGGQHHPPGAAGGAAAGAGAAVTSAAASAGPGEDSSDSEAEQEGPQKLIRKVSTSGQIRTKTSIKEGQLLKQTSSFQRWKKRYFKLRGRTLYYAKDSKSLIFDEVDLSDASVAEASTKNANNSFTIITPFRRLMLCAENRKEMEDWISSLKSVQTREPYEVAQFNVEHFSGMHNWYACSHARPTFCNVCRESLSGVTSHGLSCEVCKFKAHKRCAVRATNNCKWTTLASIGKDIIEDEDGVAMPHQWLEGNLPVSAKCAVCDKTCGSVLRLQDWKCLWCKTMVHTACKDLYHPICPLGQCKVSIIPPIALNSTDSDGFCRATFSFCVSPLLVFVNSKSGDNQGVKFLRRFKQLLNPAQVFDLMNGGPHLGLRLFQKFDNFRILVCGGDGSVGWVLSEIDKLNLNKQCQLGVLPLGTGNDLARVLGWGGSYDDDTQLPQILEKLERASTKMLDRWSIMTYELKLPPKASLLPGPPEASEEFYMTIYEDSVATHLTKILNSDEHAVVISSAKTLCETVKDFVAKVEKTYDKTLENAVVADAVASKCSVLNEKLEQLLQALHTDSQAAPVLPGLSPLIVEEDAVESSSEESLGESKEQLGDDVTKPSSQKAVKPREIMLRANSLKKAVRQVIEEAGKVMDDPTVHPCEPANQSSDYDSTETDESKEEAKDDGAKESITVKTAPRSPDARASYGHSQTDSVPGPAVAASKENLPVLNTRIICPGLRAGLAASIAGSSIINKMLLANIDPFGATPFIDPDLDSVDGYSEKCVMNNYFGIGLDAKISLEFNNKREEHPEKCRSRTKNLMWYGVLGTRELLQRSYKNLEQRVQLECDGQYIPLPSLQGIAVLNIPSYAGGTNFWGGTKEDDIFAAPSFDDKILEVVAIFDSMQMAVSRVIKLQHHRIAQCRTVKITIFGDEGVPVQVDGEAWVQPPGIIKIVHKNRAQMLTRDRAFESTLKSWEDKQKCDSGKPVLRTHLYIHHAIDLATEEVSQMQLCSQAAEELITRICDAATIHCLLEQELAHAVNACSHALNKANPRCPESLTRDTATEIAINVKALYNETESLLVGRVPLPGQQNKTLSQ

SEQ ID NO: 10843 - protein, 945 aa, Artificial Sequence
  Synthetic polypeptide
MLCAENRKEMEDWISSLKSVQTREPYEVAQFNVEHFSGMHNWYACSHARPTFCNVCRESLSGVTSHGLSCEVCKFKAHKRCAVRATNNCKWTTLASIGKDIIEDEDGVAMPHQWLEGNLPVSAKCAVCDKTCGSVLRLQDWKCLWCKTMVHTACKDLYHPICPLGQCKVSIIPPIALNSTDSDGFCRATFSFCVSPLLVFVNSKSGDNQGVKFLRRFKQLLNPAQVFDLMNGGPHLGLRLFQKFDNFRILVCGGDGSVGWVLSEIDKLNLNKQCQLGVLPLGTGNDLARVLGWGGSYDDDTQLPQILEKLERASTKMLDRWSIMTYELKLPPKASLLPGPPEASEEFYMTIYEDSVATHLTKILNSDEHAVVISSAKTLCETVKDFVAKVEKTYDKTLENAVVADAVASKCSVLNEKLEQLLQALHTDSQAAPVLPGLSPLIVEEDAVESSSEESLGESKEQLGDDVTKPSSQKAVKPREIMLRANSLKKAVRQVIEEAGKVMDDPTVHPCEPANQSSDYDSTETDESKEEAKDDGAKESITVKTAPRSPDARASYGHSQTDSVPGPAVAASKENLPVLNTRIICPGLRAGLAASIAGSSIINKMLLANIDPFGATPFIDPDLDSVDGYSEKCVMNNYFGIGLDAKISLEFNNKREEHPEKCRSRTKNLMWYGVLGTRELLQRSYKNLEQRVQLECDGQYIPLPSLQGIAVLNIPSYAGGTNFWGGTKEDDIFAAPSFDDKILEVVAIFDSMQMAVSRVIKLQHHRIAQCRTVKITIFGDEGVPVQVDGEAWVQPPGIIKIVHKNRAQMLTRDRAFESTLKSWEDKQKCDSGKPVLRTHLYIHHAIDLATEEVSQMQLCSQAAEELITRICDAATIHCLLEQELAHAVNACSHALNKANPRCPESLTRDTATEIAINVKALYNETESLLVGRVPLPGQQNKTLSQ

SEQ ID NO: 10844 - protein, 836 aa, Artificial Sequence
  Synthetic polypeptide
MWNISQGCTTGTPAPTPDPPSVTCAERVFLESPPMACPAKVHTACKDLYHPICPLGQCKVSIIPPIALNSTDSDGFCRATFSFCVSPLLVFVNSKSGDNQGVKFLRRFKQLLNPAQVFDLMNGGPHLGLRLFQKFDNFRILVCGGDGSVGWVLSEIDKLNLNKQCQLGVLPLGTGNDLARVLGWGGSYDDDTQLPQILEKLERASTKMLDRWSIMTYELKLPPKASLLPGPPEASEEFYMTIYEDSVATHLTKILNSDEHAVVISSAKTLCETVKDFVAKVEKTYDKTLENAVVADAVASKCSVLNEKLEQLLQALHTDSQAAPVLPGLSPLIVEEDAVESSSEESLGESKEQLGDDVTKPSSQKAVKPREIMLRANSLKKAVRQVIEEAGKVMDDPTVHPCEPANQSSDYDSTETDESKEEAKDDGAKESITVKTAPRSPDARASYGHSQTDSVPGPAVAASKENLPVLNTRIICPGLRAGLAASIAGSSIINKMLLANIDPFGATPFIDPDLDSVDGYSEKCVMNNYFGIGLDAKISLEFNNKREEHPEKCRSRTKNLMWYGVLGTRELLQRSYKNLEQRVQLECDGQYIPLPSLQGIAVLNIPSYAGGTNFWGGTKEDDIFAAPSFDDKILEVVAIFDSMQMAVSRVIKLQHHRIAQCRTVKITIFGDEGVPVQVDGEAWVQPPGIIKIVHKNRAQMLTRDRAFESTLKSWEDKQKCDSGKPVLRTHLYIHHAIDLATEEVSQMQLCSQAAEELITRICDAATIHCLLEQELAHAVNACSHALNKANPRCPESLTRDTATEIAINVKALYNETESLLVGRVPLPGQQNKTLSQ

SEQ ID NO: 10845 - protein, 1148 aa, Artificial Sequence
  Synthetic polypeptide
MDLRDFYLLAALIACLRLDSAIAQELIYTIREELPENVPIGNIPKDLNISHINAATGTSASLVYRLVSKAGDAPLVKVSSSTGEIFTTSNRIDREKLCAGASYAEENECFFELEVVILPNDFFRLIKIKIIVKDTNDNAPMFPSPVINISIPENTLINSRFPIPSATDPDTGFNGVQHYELLNGQSVFGLDIVETPEGEKWPQLIVQQNLDREQKDTYVMKIKVEDGGTPQKSSTAILQVTVSDVNDNRPVFKEGQVEVHIPENAPVGTSVIQLHATDADIGSNAEIRYIFGAQVAPATKRLFALNNTTGLITVQRSLDREETAIHKVTVLASDGSSTPARATVTINVTDVNDNPPNIDLRYIISPINGTVYLSEKDPVNTKIALITVSDKDTDVNGKVICFIEREVPFHLKAVYDNQYLLETSSLLDYEGTKEFSFKIVASDSGKPSLNQTALVRVKLEDENDNPPIFNQPVIELSVSENNRRGLYLTTISATDEDSGKNADIVYQLGPNASFFDLDRKTGVLTASRVFDREEQERFIFTVTARDNGTPPLQSQAAVIVTVLDENDNSPKFTHNHFQFFVSENLPKYSTVGVITVTDADAGENKAVTLSILNDNDNFVLDPYSGVIKSNVSFDREQQSSYTFDVKATDGGQPPRSSTAKVTINVMDVNDNSPVVISPPSNTSFKLVPLSAIPGSVVAEVFAVDVDTGMNAELKYTIVSGNNKGLFRIDPVTGNITLEEKPAPTDVGLHRLVVNISDLGYPKSLHTLVLVFLYVNDTAGNASYIYDLIRRTMETPLDRNIGDSSQPYQNEDYLTIMIAIIAGAMVVIVVIFVTVLVRCRHASRFKAAQRSKQGAEWMSPNQENKQNKKKKRKKRKSPKSSLLNFVTIEESKPDDAVHEPINGTISLPAELEEQSIGRFDWGPAPPTTFKPNSPDLAKHYKSASPQPAFHLKPDTPVSVKKHHVIQELPLDNTFVGGCDTLSKRSSTSSDHFSASECSSQGGFKTKGPLHTRQCNSHSKSDNIPVTPQKCPSSTGFHIQENEESHYESQRRVTFHLPDGSQESCSDSGLGDHEPVGSGTLISHPLPLVQPQDEFYDQASPDKRTEADGNSDPNSEAKQMLEPCFLYSLQNREPVEPLFFINYPISGISL

SEQ ID NO: 10846 - protein, 1114 aa, Artificial Sequence
  Synthetic polypeptide
MDLRDFYLLAALIACLRLDSAIAQELIYTIREELPENVPIGNIPKDLNISHINAATGTSASLVYRLVSKAGDAPLVKVSSSTGEIFTTSNRIDREKLCAGASYAEENECFFELEVVILPNDFFRLIKIKIIVKDTNDNAPMFPSPVINISIPENTLINSRFPIPSATDPDTGFNGVQHYELLNGQSVFGLDIVETPEGEKWPQLIVQQNLDREQKDTYVMKIKVEDGGTPQKSSTAILQVTVSDVNDNRPVFKEGQVEVHIPENAPVGTSVIQLHATDADIGSNAEIRYIFGAQVAPATKRLFALNNTTGLITVQRSLDREETAIHKVTVLASDGSSTPARATVTINVTDVNDNPPNIDLRYIISPINGTVYLSEKDPVNTKIALITVSDKDTDVNGKVICFIEREVPFHLKAVYDNQYLLETSSLLDYEGTKEFSFKIVASDSGKPSLNQTALVRVKLEDENDNPPIFNQPVIELSVSENNRRGLYLTTISATDEDSGKNADIVYQLGPNASFFDLDRKTGVLTASRVFDREEQERFIFTVTARDNGTPPLQSQAAVIVTVLDENDNSPKFTHNHFQFFVSENLPKYSTVGVITVTDADAGENKAVTLSILNDNDNFVLDPYSGVIKSNVSFDREQQSSYTFDVKATDGGQPPRSSTAKVTINVMDVNDNSPVVISPPSNTSFKLVPLSAIPGSVVAEVFAVDVDTGMNAELKYTIVSGNNKGLFRIDPVTGNITLEEKPAPTDVGLHRLVVNISDLGYPKSLHTLVLVFLYVNDTAGNASYIYDLIRRTMETPLDRNIGDSSQPYQNEDYLTIMIAIIAGAMVVIVVIFVTVLVRCRHASRFKAAQRSKQGAEWMSPNQENKQNKKKKRKKRKSPKSSLLNFVTIEESKPDDAVHEPINGTISLPAELEEQSIGRFDWGPAPPTTFKPNSPDLAKHYKSASPQPAFHLKPDTPVSVKKHHVIQELPLDNTFVGGCDTLSKRSSTSSDHFSASECSSQGGFKTKGPLHTRQSQRRVTFHLPDGSQESCSDSGLGDHEPVGSGTLISHPLPLVQPQDEFYDQASPDKRTEADGNSDPNSEAKQMLEPCFLYSLQNREPVEPLFFINYPISGISL

SEQ ID NO: 10847 - protein, 238 aa, Artificial Sequence
  Synthetic polypeptide
MPSWIGAVILPLLGLLLSLPAGADVKARSCGEVRQAYGAKGFSLADIPYQEIAGEHLRICPQEYTCCTTEMEDKLSQQSKLEFENLVEETSHFVRTTFVSRHKKFDEFFRELLENAEKSLNDMFVRTYGMLYMQNSEVFQDLFTELKRYYTGGNVNLEEMLNDFWARLLERMFQLINPQYHFSEDYLECVSKYTDQLKPFGDVPRKLKIQVTRAFIAARTFVQGLTVGREVANRVSKT

SEQ ID NO: 10848 - protein, 151 aa, Artificial Sequence
  Synthetic polypeptide
MPPCSGGDGSTPPGPSLRDRDCPAQSAEYPRDRLDPRPGSPSEASSPPFLRSRAPVNWYQEKAQVFLWHLMVSGSTTLLCLWKQPFHVSAFPVTASLAFRQSQGAGQHLYKDLQPFILLRLLPQDKRMREEKAAGERSEPNFECWEEMDSW

SEQ ID NO: 10849 - protein, 118 aa, Artificial Sequence
  Synthetic polypeptide
MPPCSGGDGSTPPGPSLRDRDCPAQSAEYPRDRLDPRPGSPSEASSPPFLRSFTPEASKTTSPPGGTNNSRRAALGAVILTVKVCSFTPEPVRPRTHQKEETLNTTEHQKEQTPDAPP

SEQ ID NO: 10850 - protein, 64 aa, Artificial Sequence
  Synthetic polypeptide
MPPCSGGDGSTPPGPSLRDRDCPAQSAEYPRDRLDPRPGSPSEASSPPFLRSCNTHREDLQLHS

SEQ ID NO: 10851 - protein, 430 aa, Artificial Sequence
  Synthetic polypeptide
ASTQSPSVFPLTRCCKNIPSNATSVTLGCLATGYFPEPVMVTWDTGSLNGTTMTLPATTLTLSGHYATISLLTVSGAWAKQMFTCRVAHTPSSTDWVDNKTFSVCSRDFTPPTVKILQSSCDGGGHFPPTIQLLCLVSGYTPGTINITWLEDGQVMDVDLSTASTTQEGELASTQSELTLSQKHWLSDRTYTCQVTYQGHTFEDSTKKCADSNPRGVSAYLSRPSPFDLFIRKSPTITCLVVDLAPSKGTVNLTWSRASGKPVNHSTRKEEKQRNGTLTVTSTLPVGTRDWIEGETYQCRVTHPHLPRALMRSTTKTSGPRAAPEVYAFATPEWPGSRDKRTLACLIQNFMPEDISVQWLHNEVQLPDARHSTTQPRKTKGSGFFVFSRLEVTRAEWEQKDEFICRAVHEAASPSQTVQRAVSVNPARND

SEQ ID NO: 10852 - protein, 49 aa, Artificial Sequence
  Synthetic polypeptide
SGFFVFSRLEVTRAEWEQKDEFICRAVHEAASPSQTVQRAVSVNPARND

SEQ ID NO: 10853 - protein, 60 aa, Artificial Sequence
  Synthetic polypeptide
MEFGLSWVFLVAILKGVQCEVQLVESGGVVVQPGGSLRLSCAASGFTFDDYTMHWPTGGR

SEQ ID NO: 10854 - protein, 123 aa, Artificial Sequence
  Synthetic polypeptide
MKHLWFFLLLVAAPRWVLSQVQLQESGPGLVKPSETLSLTCTVSGGSISSYYWSWIRQPPGKGLEWIGYIYYSGSTNYNPSLKSRVTISVDTSKNQFSLKLSSVTAADTAVYYCARDTVRGGS

SEQ ID NO: 10855 - protein, 118 aa, Artificial Sequence
  Synthetic polypeptide
MWGVFLLYVSMKMGGTTGQNIDQPTEMTATEGAIVQINCTYQTSGFNGLFWYQQHAGEAPTFLSYNVLDGLEEKETEKLILKFTWNCKGSRMAKIILKKKNKVGRLTFLYFKTYYKLW

SEQ ID NO: 10856 - protein, 25 aa, Artificial Sequence
  Synthetic polypeptide
  misc_feature (1)..(1): Xaa can be any naturally occurring amino acid
XGYSSASKIIFGSGTRLSIRPTTCS

SEQ ID NO: 10857 - protein, 44 aa, Artificial Sequence
  Synthetic polypeptide
MNKLNFHNNRVMQDRRSVCIFLPNDESLNIIINGHCKDLKMSHA

SEQ ID NO: 10858 - protein, 46 aa, Artificial Sequence
  Synthetic polypeptide
MASNNTASIAQARKLVEQLKMEANIDRIKDYCEDQKRKFNSMSGTK

SEQ ID NO: 10859 - protein, 77 aa, Artificial Sequence
  Synthetic polypeptide
MQGKLQPPMEREARDGVPSGKVFLKDLSSTPMASNNTASIAQARKLVEQLKMEANIDRIKDYCEDQKRKFNSMSGTK

SEQ ID NO: 10860 - protein, 75 aa, Artificial Sequence
  Synthetic polypeptide
MTVPLNGVIRQHKTDKPDQVFLKDLSSTPMASNNTASIAQARKLVEQLKMEANIDRIKDYCEDQKRKFNSMSGTK

SEQ ID NO: 10861 - protein, 85 aa, Artificial Sequence
  Synthetic polypeptide
MVYLQAKTRIPEHRKVTQLIKCWSPDLNPVFLKDLSSTPMASNNTASIAQARKLVEQLKMEANIDRIKDYCEDQKRKFNSMSGTK

SEQ ID NO: 10862 - protein, 474 aa, Artificial Sequence
  Synthetic polypeptide
MSPHGDGRGQAQGRAVRVGLRRSGGIRGGVAVFAAVAAVFTFTLPPSVPGGDSGELITAAHELGVAHPPGYPLFTLVAKLAITLFPFGSIAYRVNLLCGLFGAVAASLLFFTVFRLSGSSAGGILAAGVFSFSRLTWQWSIAAEVFSLNNLFVGLLMALTVHFEEAATAKERSKVAKIGAFCCGLSLCNQHTIILYVLCIIPWILFQLLKKKELSLGSLLKLSLYFSAGLLPYVHLPISSYLNHARWTWGDQTTLQGFLTHFLREEYGTFSLAKSEIGSSMSEILLSQVTNMRTELSFNIQALAVCANICLATKDRQNPSLVWLFTGMFCIYSLFFAWRANLDISKPLFMGVVERFWMQSNAVVAVLAGIGLAAVVSETNRVLNSNGLQCLEWLSATLFVVYQIYSNYSVCDQRTNYVIDKFAKNLLTSMPHDAIILLRGDLPGNSLRYMHYCEGLRPDISLVDQEAGRSGSRL

SEQ ID NO: 10863 - protein, 180 aa, Artificial Sequence
  Synthetic polypeptide
MMTYEWYLPKMAKHLPGVNFPGNRWNPVEGILPSGMVTFNLYHFLEVNKQKETFVCIGIHEGDPTWKKNYSLWPWGSCDKLVPLEIVFNPEEWIKLTKSIYNWTEEYGRFDPSSWESVANEEMWQARMKTPFFIFNLAETAHMPSKVKAQLYAQAYDMEEGARSKRVQATSGGRWKQSLL

SEQ ID NO: 10864 - protein, 646 aa, Artificial Sequence
  Synthetic polypeptide
MSPHGDGRGQAQGRAVRVGLRRSGGIRGGVAVFAAVAAVFTFTLPPSVPGGDSGELITAAHELGVAHPPGYPLFTLVAKLAITLFPFGSIAYRVNLLCGLFGAVAASLLFFTVFRLSGSSAGGILAAGVFSFSRLTWQWSIAAEVFSLNNLFVGLLMALTVHFEEAATAKERSKVAKIGAFCCGLSLCNQHTIILYVLCIIPWILFQLLKKKELSLGSLLKLSLYFSAGLLPYVHLPISSYLNHARWTWGDQTTLQGFLTHFLREEYGTFSLAKSEIGSSMSEILLSQVTNMRTELSFNIQALAVCANICLATKDRQNPSLVWLFTGMFCIYSLFFAWRANLDISKPLFMGVVERFWMQSNAVVAVLAGIGLAAVVSETNRVLNSNGLQCLEWLSATLFVVYQIYSNYSVCDQRTNYVIDKFAKNLLTSMPHDAIILLRGDLPGNSLRYMHYCEGLRPDISLVDQEMMTYEWYLPKMAKHLPGVNFPGNRWNPVEGILPSGMVTFNLYHFLEVNKQKETFVCIGIHEGDPTWKKNYSLWPWGSCDKLVPLEIVFNPEEWIKLTKSIYNWTEEYGRFDPSSWESVANEEMWQARMKTPFFIFNLAETAHMPSKVKAQLYAQAYDMEEGARSKRVQATSGGRWKQSLL

SEQ ID NO: 10865 - protein, 51 aa, Artificial Sequence
  Synthetic polypeptide
  misc_feature (1)..(1): Xaa can be any naturally occurring amino acid
XPFFIFNLAETAHMPSKVKAQLYAQAYDMEEGARSKRVQATSGGRWKQSLL

SEQ ID NO: 10866 - protein, 123 aa, Artificial Sequence
  Synthetic polypeptide
GSFNAERGWYVSVQQPEEAEAEELSPLLSNELHRQRSPGVSFGLSVFNLMNAIMGSGILGLAYVLANTGVFGFSFLLLTVALLASYSVHLLLSMCIQTGPQAGEQTNRGAEEEHSKGEKRRSV

SEQ ID NO: 10867 - protein, 109 aa, Artificial Sequence
  Synthetic polypeptide
LSPLHSHPIFISCSHKELHRQRSPGVSFGLSVFNLMNAIMGSGILGLAYVLANTGVFGFSFLLLTVALLASYSVHLLLSMCIQTGPQAGEQTNRGAEEEHSKGEKRRSV

SEQ ID NO: 10868 - protein, 128 aa, Artificial Sequence
  Synthetic polypeptide
MEASWGSFNAERGWYVSVQQPEEAEAEELSPLLSNELHRQRSPGVSFGLSVFNLMNAIMGSGILGLAYVLANTGVFGFSFLLLTVALLASYSVHLLLSMCIQTGPQAGEQTNRGAEEEHSKGEKRRSV

SEQ ID NO: 10869 - protein, 74 aa, Artificial Sequence
  Synthetic polypeptide
MNAIMGSGILGLAYVLANTGVFGFSFLLLTVALLASYSVHLLLSMCIQTGPQAGEQTNRGAEEEHSKGEKRRSV

SEQ ID NO: 10870 - protein, 105 aa, Artificial Sequence
  Synthetic polypeptide
MSGPRIMYSLLLELHRQRSPGVSFGLSVFNLMNAIMGSGILGLAYVLANTGVFGFSFLLLTVALLASYSVHLLLSMCIQTGPQAGEQTNRGAEEEHSKGEKRRSV

SEQ ID NO: 10871 - protein, 77 aa, Artificial Sequence
  Synthetic polypeptide
  misc_feature (1)..(1): Xaa can be any naturally occurring amino acid
XNLMNAIMGSGILGLAYVLANTGVFGFSFLLLTVALLASYSVHLLLSMCIQTGPQAGEQTNRGAEEEHSKGEKRRSV

SEQ ID NO: 10872 - protein, 465 aa, Artificial Sequence
  Synthetic polypeptide
GSFNAERGWYVSVQQPEEAEAEELSPLLSNELHRQRSPGVSFGLSVFNLMNAIMGSGILGLAYVLANTGVFGFSFLLLTVALLASYSVHLLLSMCIQTAVTSYEDLGLFAFGLPGKLVVAGTIIIQNIGAMSSYLLIIKTELPAAIAEFLTGDYSRYWYLDGQTLLIIICVGIVFPLALLPKIGFLGYTSSLSFFFMMFFALVVIIKKWSIPCPLTLNYVEKGFQISNVTDDCKPKLFHFSKESAYALPTMAFSFLCHTSILPIYCELQSPSKKRMQNVTNTAIALSFLIYFISALFGYLTFYDKVESELLKGYSKYLSHDVVVMTVKLCILFAVLLTVPLIHFPARKAVTMMFFSNFPFSWIRHFLITLALNIIIVLLAIYVPDIRNVFGVVGASTSTCLIFIFPGLFYLKLSREDFLSWKKLGGLILSHRLACSGVISAHCNLCLPDSSNPPTSASRVAETTG

SEQ ID NO: 10873 - protein, 470 aa, Artificial Sequence
  Synthetic polypeptide
MEASWGSFNAERGWYVSVQQPEEAEAEELSPLLSNELHRQRSPGVSFGLSVFNLMNAIMGSGILGLAYVLANTGVFGFSFLLLTVALLASYSVHLLLSMCIQTAVTSYEDLGLFAFGLPGKLVVAGTIIIQNIGAMSSYLLIIKTELPAAIAEFLTGDYSRYWYLDGQTLLIIICVGIVFPLALLPKIGFLGYTSSLSFFFMMFFALVVIIKKWSIPCPLTLNYVEKGFQISNVTDDCKPKLFHFSKESAYALPTMAFSFLCHTSILPIYCELQSPSKKRMQNVTNTAIALSFLIYFISALFGYLTFYDKVESELLKGYSKYLSHDVVVMTVKLCILFAVLLTVPLIHFPARKAVTMMFFSNFPFSWIRHFLITLALNIIIVLLAIYVPDIRNVFGVVGASTSTCLIFIFPGLFYLKLSREDFLSWKKLGGLILSHRLACSGVISAHCNLCLPDSSNPPTSASRVAETTG

SEQ ID NO: 10874 - protein, 447 aa, Artificial Sequence
  Synthetic polypeptide
MSGPRIMYSLLLELHRQRSPGVSFGLSVFNLMNAIMGSGILGLAYVLANTGVFGFSFLLLTVALLASYSVHLLLSMCIQTAVTSYEDLGLFAFGLPGKLVVAGTIIIQNIGAMSSYLLIIKTELPAAIAEFLTGDYSRYWYLDGQTLLIIICVGIVFPLALLPKIGFLGYTSSLSFFFMMFFALVVIIKKWSIPCPLTLNYVEKGFQISNVTDDCKPKLFHFSKESAYALPTMAFSFLCHTSILPIYCELQSPSKKRMQNVTNTAIALSFLIYFISALFGYLTFYDKVESELLKGYSKYLSHDVVVMTVKLCILFAVLLTVPLIHFPARKAVTMMFFSNFPFSWIRHFLITLALNIIIVLLAIYVPDIRNVFGVVGASTSTCLIFIFPGLFYLKLSREDFLSWKKLGGLILSHRLACSGVISAHCNLCLPDSSNPPTSASRVAETTG

SEQ ID NO: 10875 - protein, 261 aa, Artificial Sequence
  Synthetic polypeptide
MSLRQRLAQLVGRLQDPQKVARFQRLCGVEAPPRRSADRREDEKAEAPLAGDPRLRGRQPGAPGGPQPPGSDRNQCPAKPDGGGAPNGVRNGLAAELGPASPRRAGALRRNSLTGEEGQLARVSNWPLYCLFCFGTELGNELFYILFFPFWIWNLDPLVGRRLVVIWVLVMYLGQCTKDIIRWPRPASPPVVKLEVFYNSEYSMPSTHAMSGTAIPISMVLLTYGRWQYPLIYGLILIPCWCSLVCLSRIYMGMHSILQGL

SEQ ID NO: 10876 - protein, 268 aa, Artificial Sequence
  Synthetic polypeptide
MSLRQRLAQLVGRLQDPQKVARFQRLCGVEAPPRRSADRREDEKAEAPLAGDPRLRGRQPGAPGGPQPPGSDRNQCPAKPDGGGAPNGVRNGLAAELGPASPRRAGALRRNSLTGEEGQLARVSNWPLYCLFCFGTELGNELFYILFFPFWIWNLDPLVGRRLVVIWVLVMYLGQCTKDIIRWPRPASPPVVKLEVFYNSEYSMPSTHAMSGTAIPISMVLLTYGRWQYPLIYGLILIPCWCSLVCLSRIYMGMHSILGVHQNHWGDF

SEQ ID NO: 10877 - protein, 30 aa, Artificial Sequence
  Synthetic polypeptide
MASSPELPTEDEQGSWGIDDLHISLQDMPF

SEQ ID NO: 10878 - protein, 2439 aa, Artificial Sequence
  Synthetic polypeptide
MASSPELPTEDEQGSWGIDDLHISLQAEQEDTQKKAFTCWINSQLARHTSPSVISDLFTDIKKGHVLLDLLEVLSGQQLPRDKGSNTFQCRINIEHALTFLRNRSIKLINIHVTDIIDGNPSIILGLIWTIILHFHIEKLAQTLSCNYNQPSLDDVSVVDSSPASSPPAKKCSKVQARWQMSARKALLLWAQEQCATYESVNVTDFKSSWRNGMAFLAIIHALRPDLIDMKSVKHRSNKDNLREAFRIAEQELKIPRLLEPEDVDVVDPDEKSIMTYVAQFLQYSKDAPGTGEEAQGKVKDAMGWLTLQKEKLQKLLKDSENDTYFKKYNSLLSFMESFNEEKKSFLDVLSIKRDLDELDKDHLQLREAWDGLDHQINAWKIKLNYALPPPLHQTEAWLQEVEELMDEDLSASQDHSQAVTLIQEKMTLFKSLMDRFEHHSNILLTFENKDENHLPLVPPNKLEEMKRRINNILEKKFILLLEFHYYKCLVLGLVDEVKSKLDIWNIKYGSRESVELLLEDWHKFIEEKEFLARLDTSFQKCGEIYKNLAGECQNINKQYMMVKSDVCMYRKNIYNVKSTLQKVLACWATYVENLRLLRACFEETKKEEIKEVPFETLAQWNLEHATLNEAGNFLVEVSNDVVGSSISKELRRLNKRWRKLVSKTQLEMNLPLMIKKQDQPTFDNSGNILSKEEKATVEFSTDMSVELPENYNQNIKAGEKHEKENEEFTGQLKVAKDVEKLIGQVEIWEAEAKSVLDQDDVDTSMEESLKHLIAKGSMFDELMARSEDMLQMDIQNISSQESFQHVLTTGLQAKIQEAKEKVQINVVKLIAALKNLTDVSPDLDIRLKMEESQKELESYMMRAQQLLGQRESPGELISKHKEALIISNTKSLAKYLKAVEELKNNVTEDIKMSLEEKSRDVCAKWESLHHELSLYVQQLKIDIEKGKLSDNILKLEKQINKEKKLIRRGRTKGLIKEHEACFSEEGCLYQLNHHMEVLRELCEELPSQKSQQEVKRLLKDYEQKIERLLKCASEIHMTLQPTAGGTSKNEGTITTSENRGGDPHSEAPFAKSDNQPSTEKAMEPTMKFSLASVLRPLQEESIMEKDYSASINSLLERYDTYRDILEHHLQNNKFRITSDFSSEEDRSSSCLQAKLTDLQVIKNETDARWKEFEIISLKLENHVNDIKKPFVIKERDTLKERERELQMTLNTRMESLETALRLVLPVEKASLLLCGSDLPLHKMAIQGFHLIDADRIYQHLRNIQDSIAKQIEICNRLEEPGNFVLKELHPFDLHAMQNIILKYKTQFEGMNHRVQRSEDTLKALEDFLASLRTAKLSAEPVTDLSASDTQVAQENTLTVKNKEGEIHLMKDKAKHLDKCLKMLDMSFKDAERGDDTSCENLLDAFSIKLSETHGYGVQEEFTEENKLLEACIFKNNELLKNIQDVQSQISKIGLKDPTVPAVKHRKKSLIRLDKVLDEYEEEKRHLQEMANSLPHFKDGREKTVNQQCQNTVVLWENTKALVTECLEQCGRVLELLKQYQNFKSILTTLIQKEESVISLQASYMGKENLKKRIAEIEIVKEEFNEHLEVVDKINQVCKNLQFYLNKMKTFEEPPFEKEANIIVDRWLDINEKTEDYYENLGRALALWDKLFNLKNVIDEWTEKALQKMELHQLTEEDRERLKEELQVHEQKTSEFSRRVAEIQFLLQSSEIPLELQVMESSILNKMEHVQKCLTGESNCHALSGSTAELREDLDQAKTQIGMTESLLKALSPSDSLEIFTKLEEIQQQILQQKHSMILLENQIGCLTPELSELKKQYESVSDLFNTKKSVLQDHFSKLLNDQCKNFNDWFSNIKVNLKECFESSETKKSVEQKLQKLSDFLTLEGRNSKIKQVDSVLKHVKKHLPKAHVKELISWLVGQEFELEKMESICQARAKELEDSLQQLLRLQDDHRNLRKWLTNQEEKWKGMEEPGEKTELFCQALARKREQFESVAQLNNSLKEYGFTEEEEIIMEATCLMDRYQTLLRQLSEIEEEDKLLPTEDQSFNDLAHDVIHWIKEIKESLMVLNSSEGKMPLEERIQKIKEIILLKPEGDARIETIMKQAESSEAPLVQKTLTDISNQWDNTLHLASTYLSHQEKLLLEGEKYLQSKEDLRLMLIELKKKQEAGFALQHGLQEKKAQLKIYKKFLKKAQDLTSLLKELKSQGNYLLECTKNPSFSEEPWLEIKHLHESLLQQLQDSVQNLDGHVREHDSYQVCVTDLNTTLDNFSKEFVSFSDKPVDQIAVEEKLQKLQELENRLSLQDGTLKKILALAKSVKQNTSSVGQKIIKDDIKSLQCKQKDLENRLASAKQEMECCLNSILKSKRSTEKKGKFTLPGREKQATSDVQESTQESAAVEKLEEDWEINKVQWLTAVISAREEAEVDRLLEPRSSRPAWATW

SEQ ID NO: 10879 - protein, 3831 aa, Artificial Sequence
  Synthetic polypeptide
MASSPELPTEDEQGSWGIDDLHISLQAEQEDTQKKAFTCWINSQLARHTSPSVISDLFTDIKKGHVLLDLLEVLSGQQLPRDKGSNTFQCRINIEHALTFLRNRSIKLINIHVTDIIDGNPSIILGLIWTIILHFHIEKLAQTLSCNYNQPSLDDVSVVDSSPASSPPAKKCSKVQARWQMSARKALLLWAQEQCATYESVNVTDFKSSWRNGMAFLAIIHALRPDLIDMKSVKHRSNKDNLREAFRIAEQELKIPRLLEPEDVDVVDPDEKSIMTYVAQFLQYSKDAPGTGEEAQGKVKDAMGWLTLQKEKLQKLLKDSENDTYFKKYNSLLSFMESFNEEKKSFLDVLSIKRDLDELDKDHLQLREAWDGLDHQINAWKIKLNYALPPPLHQTEAWLQEVEELMDEDLSASQDHSQAVTLIQEKMTLFKSLMDRFEHHSNILLTFENKDENHLPLVPPNKLEEMKRRINNILEKKFILLLEFHYYKCLVLGLVDEVKSKLDIWNIKYGSRESVELLLEDWHKFIEEKEFLARLDTSFQKCGEIYKNLAGECQNINKQYMMVKSDVCMYRKNIYNVKSTLQKVLACWATYVENLRLLRACFEETKKEEIKEVPFETLAQWNLEHATLNEAGNFLVEVSNDVVGSSISKELRRLNKRWRKLVSKTQLEMNLPLMIKKQDQPTFDNSGNILSKEEKATVEFSTDMSVELPENYNQNIKAGEKHEKENEEFTGQLKVAKDVEKLIGQVEIWEAEAKSVLDQDDVDTSMEESLKHLIAKGSMFDELMARSEDMLQMDIQNISSQESFQHVLTTGLQAKIQEAKEKVQINVVKLIAALKNLTDVSPDLDIRLKMEESQKELESYMMRAQQLLGQRESPGELISKHKEALIISNTKSLAKYLKAVEELKNNVTEDIKMSLEEKSRDVCAKWESLHHELSLYVQQLKIDIEKGKLSDNILKLEKQINKEKKLIRRGRTKGLIKEHEACFSEEGCLYQLNHHMEVLRELCEELPSQKSQQEVKRLLKDYEQKIERLLKCASEIHMTLQPTAGGTSKNEGTITTSENRGGDPHSEAPFAKSDNQPSTEKAMEPTMKFSLASVLRPLQEESIMEKDYSASINSLLERYDTYRDILEHHLQNNKFRITSDFSSEEDRSSSCLQAKLTDLQVIKNETDARWKEFEIISLKLENHVNDIKKPFVIKERDTLKERERELQMTLNTRMESLETALRLVLPVEKASLLLCGSDLPLHKMAIQGFHLIDADRIYQHLRNIQDSIAKQIEICNRLEEPGNFVLKELHPFDLHAMQNIILKYKTQFEGMNHRVQRSEDTLKALEDFLASLRTAKLSAEPVTDLSASDTQVAQENTLTVKNKEGEIHLMKDKAKHLDKCLKMLDMSFKDAERGDDTSCENLLDAFSIKLSETHGYGVQEEFTEENKLLEACIFKNNELLKNIQDVQSQISKIGLKDPTVPAVKHRKKSLIRLDKVLDEYEEEKRHLQEMANSLPHFKDGREKTVNQQCQNTVVLWENTKALVTECLEQCGRVLELLKQYQNFKSILTTLIQKEESVISLQASYMGKENLKKRIAEIEIVKEEFNEHLEVVDKINQVCKNLQFYLNKMKTFEEPPFEKEANIIVDRWLDINEKTEDYYENLGRALALWDKLFNLKNVIDEWTEKALQKMELHQLTEEDRERLKEELQVHEQKTSEFSRRVAEIQFLLQSSEIPLELQVMESSILNKMEHVQKCLTGESNCHALSGSTAELREDLDQAKTQIGMTESLLKALSPSDSLEIFTKLEEIQQQILQQKHSMILLENQIGCLTPELSELKKQYESVSDLFNTKKSVLQDHFSKLLNDQCKNFNDWFSNIKVNLKECFESSETKKSVEQKLQKLSDFLTLEGRNSKIKQVDSVLKHVKKHLPKAHVKELISWLVGQEFELEKMESICQARAKELEDSLQQLLRLQDDHRNLRKWLTNQEEKWKGMEEPGEKTELFCQALARKREQFESVAQLNNSLKEYGFTEEEEIIMEATCLMDRYQTLLRQLSEIEEEDKLLPTEDQSFNDLAHDVIHWIKEIKESLMVLNSSEGKMPLEERIQKIKEIILLKPEGDARIETIMKQAESSEAPLVQKTLTDISNQWDNTLHLASTYLSHQEKLLLEGEKYLQSKEDLRLMLIELKKKQEAGFALQHGLQEKKAQLKIYKKFLKKAQDLTSLLKELKSQGNYLLECTKNPSFSEEPWLEIKHLHESLLQQLQDSVQNLDGHVREHDSYQVCVTDLNTTLDNFSKEFVSFSDKPVDQIAVEEKLQKLQELENRLSLQDGTLKKILALAKSVKQNTSSVGQKIIKDDIKSLQCKQKDLENRLASAKQEMECCLNSILKSKRSTEKKGKFTLPGREKQATSDVQESTQESAAVEKLEEDWEINKDSAVEMAMSKQLSLNAQESMKNTEDERKVNELQNQPLELDTMLRNEQLEEIEKLYTQLEAKKAAIKPLEQTECLNKTETGALVLHNIGYSAQHLDNLLQALITLKKNKESQYCVLRDFQEYLAAVESSMKALLTDKESLKVGPLDSVTYLDKIKKFIASIEKEKDSLGNLKIKWENLSNHVTDMDKKLLESQIKQLEHGWEQVEQQIQKKYSQQVVEYDEFTTLMNKVQDTEISLQQQQQHLQLRLKSPEERAGNQSMIALTTDLQATKHGFSVLKGQAELQMKRIWGEKEKKNLEDGINNLKKQWETLEPLHLEAENQIKKCDIRNKMKETILWAKNLLGELNPSIPLLPDDILSQIRKCKVTHDGILARQQSVESLAEEVKDKVPSLTTYEGSDLNNTLEDLRNQYQMLVLKSTQRSQQLEFKLEERSNFFAIIRKFQLMVQESETLIIPRVETAATEAELKHHHVTLEASQKELQEIDSGISTHLQELTNIYEELNVFERLFLEDQLKNLKIRTNRIQRFIQNTCNEVEHKIKFCRQFHEKTSALQEEADSIQRNELLLNQEVNKGVKEEIYNLKDRLTAIKCCILQVLKLKKVFDYIGLNWDFSQLDQLQTQVFEKEKELEEKIKQLDTFEEEHGKYQALLSKMRAIDLQIKKMTEVVLKAPDSSPESRRLNAQILSQRIEKAKCLCDEIIKKLNENKTFDDSFKEKEILQIKLNAEENDKLYKVLQNMVLELSPKELDEKNCQDKLETSLHVLNQIKSQLQQPLLINLEIKHIQNEKDNCEAFQEQVWAEMCSIKAVTAIEKQREENSSEASDVETKLREFEDLQMQLNTSIDLRTNVLNDAYENLTRYKEAVTRAVESITSLEAIIIPYRVDVGNPEESLEMPLRKQEELESTVAHIQDLTEKLGMISSPEAKLQLQYTLQELVSKNSAMKEAFKAQETEAERYLENYKCYRKMEEDIYTNLSKMETVLGQSMSSLPLSYREALERLEQSKALVSNLISTKEELMKLRQILRLLRLRCTENDGICLLKIVSALWEKWLSLLEAAKEWEMWCEELKQEWKFVSEEIEREAIILDNLQEELPEISKTKEAATTEELSELLDCLCQYGENVEKQQLLLTLLLQRIRSIQNVPESSGAVETVPAFQEITSMKERCNKLLQKVQKNKELVQTEIQERHSFTKEIIALKNFFQQTTTSFQNMAFQDHPEKSEQFEELQSILKKGKLTFENIMEKLRIKYSEMYTIVPAEIESQVEECRKALEDIDEKISNEVLKSSPSYAMRRKIEEINNGLHNVEKMLQQKSKNIEKAQEIQKKMWDELDLWHSKLNELDSEVQDIVEQDPGQAQEWMDNLMIPFQQYQQVSQRAECRTSQLNKATVKMEEYSDLLKSTEAWIENTSHLLANPADYDSLRTLSHHASTVQHFR

SEQ ID NO: 10880 - protein, 3864 aa, Artificial Sequence
  Synthetic polypeptide
MASSPELPTEDEQGSWGIDDLHISLQAEQEDTQKKAFTCWINSQLARHTSPSVISDLFTDIKKGHVLLDLLEVLSGQQLPRDKGSNTFQCRINIEHALTFLRNRSIKLINIHVTDIIDGNPSIILGLIWTIILHFHIEKLAQTLSCNYNQPSLDDVSVVDSSPASSPPAKKCSKVQARWQMSARKALLLWAQEQCATYESVNVTDFKSSWRNGMAFLAIIHALRPDLIDMKSVKHRSNKDNLREAFRIAEQELKIPRLLEPEDVDVVDPDEKSIMTYVAQFLQYSKDAPGTGEEAQGKVKDAMGWLTLQKEKLQKLLKDSENDTYFKKYNSLLSFMESFNEEKKSFLDVLSIKRDLDELDKDHLQLREAWDGLDHQINAWKIKLNYALPPPLHQTEAWLQEVEELMDEDLSASQDHSQAVTLIQEKMTLFKSLMDRFEHHSNILLTFENKDENHLPLVPPNKLEEMKRRINNILEKKFILLLEFHYYKCLVLGLVDEVKSKLDIWNIKYGSRESVELLLEDWHKFIEEKEFLARLDTSFQKCGEIYKNLAGECQNINKQYMMVKSDVCMYRKNIYNVKSTLQKVLACWATYVENLRLLRACFEETKKEEIKEVPFETLAQWNLEHATLNEAGNFLVEVSNDVVGSSISKELRRLNKRWRKLVSKTQLEMNLPLMIKKQDQPTFDNSGNILSKEEKATVEFSTDMSVELPENYNQNIKAGEKHEKENEEFTGQLKVAKDVEKLIGQVEIWEAEAKSVLDQDDVDTSMEESLKHLIAKGSMFDELMARSEDMLQMDIQNISSQESFQHVLTTGLQAKIQEAKEKVQINVVKLIAALKNLTDVSPDLDIRLKMEESQKELESYMMRAQQLLGQRESPGELISKHKEALIISNTKSLAKYLKAVEELKNNVTEDIKMSLEEKSRDVCAKWESLHHELSLYVQQLKIDIEKGKLSDNILKLEKQINKEKKLIRRGRTKGLIKEHEACFSEEGCLYQLNHHMEVLRELCEELPSQKSQQEVKRLLKDYEQKIERLLKCASEIHMTLQPTAGGTSKNEGTITTSENRGGDPHSEAPFAKSDNQPSTEKAMEPTMKFSLASVLRPLQEESIMEKDYSASINSLLERYDTYRDILEHHLQNNKFRITSDFSSEEDRSSSCLQAKLTDLQVIKNETDARWKEFEIISLKLENHVNDIKKPFVIKERDTLKERERELQMTLNTRMESLETALRLVLPVEKASLLLCGSDLPLHKMAIQGFHLIDADRIYQHLRNIQDSIAKQIEICNRLEEPGNFVLKELHPFDLHAMQNIILKYKTQFEGMNHRVQRSEDTLKALEDFLASLRTAKLSAEPVTDLSASDTQVAQENTLTVKNKEGEIHLMKDKAKHLDKCLKMLDMSFKDAERGDDTSCENLLDAFSIKLSETHGYGVQEEFTEENKLLEACIFKNNELLKNIQDVQSQISKIGLKDPTVPAVKHRKKSLIRLDKVLDEYEEEKRHLQEMANSLPHFKDGREKTVNQQCQNTVVLWENTKALVTECLEQCGRVLELLKQYQNFKSILTTLIQKEESVISLQASYMGKENLKKRIAEIEIVKEEFNEHLEVVDKINQVCKNLQFYLNKMKTFEEPPFEKEANIIVDRWLDINEKTEDYYENLGRALALWDKLFNLKNVIDEWTEKALQKMELHQLTEEDRERLKEELQVHEQKTSEFSRRVAEIQFLLQSSEIPLELQVMESSILNKMEHVQKCLTGESNCHALSGSTAELREDLDQAKTQIGMTESLLKALSPSDSLEIFTKLEEIQQQILQQKHSMILLENQIGCLTPELSELKKQYESVSDLFNTKKSVLQDHFSKLLNDQCKNFNDWFSNIKVNLKECFESSETKKSVEQKLQKLSDFLTLEGRNSKIKQVDSVLKHVKKHLPKAHVKELISWLVGQEFELEKMESICQARAKELEDSLQQLLRLQDDHRNLRKWLTNQEEKWKGMEEPGEKTELFCQALARKREQFESVAQLNNSLKEYGFTEEEEIIMEATCLMDRYQTLLRQLSEIEEEDKLLPTEDQSFNDLAHDVIHWIKEIKESLMVLNSSEGKMPLEERIQKIKEIILLKPEGDARIETIMKQAESSEAPLVQKTLTDISNQWDNTLHLASTYLSHQEKLLLEGEKYLQSKEDLRLMLIELKKKQEAGFALQHGLQEKKAQLKIYKKFLKKAQDLTSLLKELKSQGNYLLECTKNPSFSEEPWLEIKHLHESLLQQLQDSVQNLDGHVREHDSYQVCVTDLNTTLDNFSKEFVSFSDKPVDQIAVEEKLQKLQELENRLSLQDGTLKKILALAKSVKQNTSSVGQKIIKDDIKSLQCKQKDLENRLASAKQEMECCLNSILKSKRSTEKKGKFTLPGREKQATSDVQESTQESAAVEKLEEDWEINKNFVENVMAVSKNCHHSMYIFESIVKNFISDEMQDSAVEMAMSKQLSLNAQESMKNTEDERKVNELQNQPLELDTMLRNEQLEEIEKLYTQLEAKKAAIKPLEQTECLNKTETGALVLHNIGYSAQHLDNLLQALITLKKNKESQYCVLRDFQEYLAAVESSMKALLTDKESLKVGPLDSVTYLDKIKKFIASIEKEKDSLGNLKIKWENLSNHVTDMDKKLLESQIKQLEHGWEQVEQQIQKKYSQQVVEYDEFTTLMNKVQDTEISLQQQQQHLQLRLKSPEERAGNQSMIALTTDLQATKHGFSVLKGQAELQMKRIWGEKEKKNLEDGINNLKKQWETLEPLHLEAENQIKKCDIRNKMKETILWAKNLLGELNPSIPLLPDDILSQIRKCKVTHDGILARQQSVESLAEEVKDKVPSLTTYEGSDLNNTLEDLRNQYQMLVLKSTQRSQQLEFKLEERSNFFAIIRKFQLMVQESETLIIPRVETAATEAELKHHHVTLEASQKELQEIDSGISTHLQELTNIYEELNVFERLFLEDQLKNLKIRTNRIQRFIQNTCNEVEHKIKFCRQFHEKTSALQEEADSIQRNELLLNQEVNKGVKEEIYNLKDRLTAIKCCILQVLKLKKVFDYIGLNWDFSQLDQLQTQVFEKEKELEEKIKQLDTFEEEHGKYQALLSKMRAIDLQIKKMTEVVLKAPDSSPESRRLNAQILSQRIEKAKCLCDEIIKKLNENKTFDDSFKEKEILQIKLNAEENDKLYKVLQNMVLELSPKELDEKNCQDKLETSLHVLNQIKSQLQQPLLINLEIKHIQNEKDNCEAFQEQVWAEMCSIKAVTAIEKQREENSSEASDVETKLREFEDLQMQLNTSIDLRTNVLNDAYENLTRYKEAVTRAVESITSLEAIIIPYRVDVGNPEESLEMPLRKQEELESTVAHIQDLTEKLGMISSPEAKLQLQYTLQELVSKNSAMKEAFKAQETEAERYLENYKCYRKMEEDIYTNLSKMETVLGQSMSSLPLSYREALERLEQSKALVSNLISTKEELMKLRQILRLLRLRCTENDGICLLKIVSALWEKWLSLLEAAKEWEMWCEELKQEWKFVSEEIEREAIILDNLQEELPEISKTKEAATTEELSELLDCLCQYGENVEKQQLLLTLLLQRIRSIQNVPESSGAVETVPAFQEITSMKERCNKLLQKVQKNKELVQTEIQERHSFTKEIIALKNFFQQTTTSFQNMAFQDHPEKSEQFEELQSILKKGKLTFENIMEKLRIKYSEMYTIVPAEIESQVEECRKALEDIDEKISNEVLKSSPSYAMRRKIEEINNGLHNVEKMLQQKSKNIEKAQEIQKKMWDELDLWHSKLNELDSEVQDIVEQDPGQAQEWMDNLMIPFQQYQQVSQRAECRTSQLNKATVKMEEYSDLLKSTEAWIENTSHLLANPADYDSLRTLSHHASTVQHFR

SEQ ID NO: 10881 - protein, 465 aa, Artificial Sequence
  Synthetic polypeptide
MEEDIYTNLSKMETVLGQSMSSLPLSYREALERLEQSKALVSNLISTKEELMKLRQILRLLRLRCTENDGICLLKIVSALWEKWLSLLEAAKEWEMWCEELKQEWKFVSEEIEREAIILDNLQEELPEISKTKEAATTEELSELLDCLCQYGENVEKQQLLLTLLLQRIRSIQNVPESSGAVETVPAFQEITSMKERCNKLLQKVQKNKELVQTEIQERHSFTKEIIALKNFFQQTTTSFQNMAFQDHPEKSEQFEELQSILKKGKLTFENIMEKLRIKYSEMYTIVPAEIESQVEECRKALEDIDEKISNEVLKSSPSYAMRRKIEEINNGLHNVEKMLQQKSKNIEKAQEIQKKMWDELDLWHSKLNELDSEVQDIVEQDPGQAQEWMDNLMIPFQQYQQVSQRAECRTSQLNKATVKMEEYSDLLKSTEAWIENTSHLLANPADYDSLRTLSHHASTVQHFR

SEQ ID NO: 10882 - protein, 193 aa, Artificial Sequence
  Synthetic polypeptide
MEKLRIKYSEMYTIVPAEIESQVEECRKALEDIDEKISNEVLKSSPSYAMRRKIEEINNGLHNVEKMLQQKSKNIEKAQEIQKKMWDELDLWHSKLNELDSEVQDIVEQDPGQAQEWMDNLMIPFQQYQQVSQRAECRTSQLNKATVKMEEYSDLLKSTEAWIENTSHLLANPADYDSLRTLSHHASTVQHFR

SEQ ID NO: 10883 - protein, 3963 aa, Artificial Sequence; identical to SEQ ID NO: 7
  Synthetic polypeptide

SEQ ID NO: 10884 - protein, 3996 aa, Artificial Sequence; identical to SEQ ID NO: 5
  Synthetic polypeptide

SEQ ID NO: 10885 - protein, 597 aa, Artificial Sequence; identical to SEQ ID NO: 270
  Synthetic polypeptide

SEQ ID NO: 10886 - protein, 348 aa, Artificial Sequence; identical to SEQ ID NO: 613
  Synthetic polypeptide

SEQ ID NO: 10887 - protein, 4073 aa, Artificial Sequence
  Synthetic polypeptide
MASSPELPTEDEQGSWGIDDLHISLQAEQEDTQKKAFTCWINSQLARHTSPSVISDLFTDIKKGHVLLDLLEVLSGQQLPRDKGSNTFQCRINIEHALTFLRNRSIKLINIHVTDIIDGNPSIILGLIWTIILHFHIEKLAQTLSCNYNQPSLDDVSVVDSSPASSPPAKKCSKVQARWQMSARKALLLWAQEQCATYESVNVTDFKSSWRNGMAFLAIIHALRPDLIDMKSVKHRSNKDNLREAFRIAEQELKIPRLLEPEDVDVVDPDEKSIMTYVAQFLQYSKDAPGTGEEAQGKVKDAMGWLTLQKEKLQKLLKDSENDTYFKKYNSLLSFMESFNEEKKSFLDVLSIKRDLDELDKDHLQLREAWDGLDHQINAWKIKLNYALPPPLHQTEAWLQEVEELMDEDLSASQDHSQAVTLIQEKMTLFKSLMDRFEHHSNILLTFENKDENHLPLVPPNKLEEMKRRINNILEKKFILLLEFHYYKCLVLGLVDEVKSKLDIWNIKYGSRESVELLLEDWHKFIEEKEFLARLDTSFQKCGEIYKNLAGECQNINKQYMMVKSDVCMYRKNIYNVKSTLQKVLACWATYVENLRLLRACFEETKKEEIKEVPFETLAQWNLEHATLNEAGNFLVEVSNDVVGSSISKELRRLNKRWRKLVSKTQLEMNLPLMIKKQDQPTFDNSGNILSKEEKATVEFSTDMSVELPENYNQNIKAGEKHEKENEEFTGQLKVAKDVEKLIGQVEIWEAEAKSVLDQDDVDTSMEESLKHLIAKGSMFDELMARSEDMLQMDIQNISSQESFQHVLTTGLQAKIQEAKEKVQINVVKLIAALKNLTDVSPDLDIRLKMEESQKELESYMMRAQQLLGQRESPGELISKHKEALIISNTKSLAKYLKAVEELKNNVTEDIKMSLEEKSRDVCAKWESLHHELSLYVQQLKIDIEKGKLSDNILKLEKQINKEKKLIRRGRTKGLIKEHEACFSEEGCLYQLNHHMEVLRELCEELPSQKSQQEVKRLLKDYEQKIERLLKCASEIHMTLQPTAGGTSKNEGTITTSENRGGDPHSEAPFAKSDNQPSTEKAMEPTMKFSLASVLRPLQEESIMEKDYSASINSLLERYDTYRDILEHHLQNNKFRITSDFSSEEDRSSSCLQAKLTDLQVIKNETDARWKEFEIISLKLENHVNDIKKPFVIKERDTLKERERELQMTLNTRMESLETALRLVLPVEKASLLLCGSDLPLHKMAIQGFHLIDADRIYQHLRNIQDSIAKQIEICNRLEEPGNFVLKELHPFDLHAMQNIILKYKTQFEGMNHRVQRSEDTLKALEDFLASLRTAKLSAEPVTDLSASDTQVAQENTLTVKNKEGEIHLMKDKAKHLDKCLKMLDMSFKDAERGDDTSCENLLDAFSIKLSETHGYGVQEEFTEENKLLEACIFKNNELLKNIQDVQSQISKIGLKDPTVPAVKHRKKSLIRLDKVLDEYEEEKRHLQEMANSLPHFKDGREKTVNQQCQNTVVLWENTKALVTECLEQCGRVLELLKQYQNFKSILTTLIQKEESVISLQASYMGKENLKKRIAEIEIVKEEFNEHLEVVDKINQVCKNLQFYLNKMKTFEEPPFEKEANIIVDRWLDINEKTEDYYENLGRALALWDKLFNLKNVIDEWTEKALQKMELHQLTEEDRERLKEELQVHEQKTSEFSRRVAEIQFLLQSSEIPLELQVMESSILNKMEHVQKCLTGESNCHALSGSTAELREDLDQAKTQIGMTESLLKALSPSDSLEIFTKLEEIQQQILQQKHSMILLENQIGCLTPELSELKKQYESVSDLFNTKKSVLQDHFSKLLNDQCKNFNDWFSNIKVNLKECFESSETKKSVEQKLQKLSDFLTLEGRNSKIKQVDSVLKHVKKHLPKAHVKELISWLVGQEFELEKMESICQARAKELEDSLQQLLRLQDDHRNLRKWLTNQEEKWKGMEEPGEKTELFCQALARKREQFESVAQLNNSLKEYGFTEEEEIIMEATCLMDRYQTLLRQLSEIEEEDKLLPTEDQSFNDLAHDVIHWIKEIKESLMVLNSSEGKMPLEERIQKIKEIILLKPEGDARIETIMKQAESSEAPLVQKTLTDISNQWDNTLHLASTYLSHQEKLLLEGEKYLQSKEDLRLMLIELKKKQEAGFALQHGLQEKKAQLKIYKKFLKKAQDLTSLLKELKSQGNYLLECTKNPSFSEEPWLEIKHLHESLLQQLQDSVQNLDGHVREHDSYQVCVTDLNTTLDNFSKEFVSFSDKPVDQIAVEEKLQKLQELENRLSLQDGTLKKILALAKSVKQNTSSVGQKIIKDDIKSLQCKQKDLENRLASAKQEMECCLNSILKSKRSTEKKGKFTLPGREKQATSDVQESTQESAAVEKLEEDWEINKDSAVEMAMSKQLSLNAQESMKNTEDERKVNELQNQPLELDTMLRNEQLEEIEKLYTQLEAKKAAIKPLEQTECLNKTETGALVLHNIGYSAQHLDNLLQALITLKKNKESQYCVLRDFQEYLAAVESSMKALLTDKESLKVGPLDSVTYLDKIKKFIASIEKEKDSLGNLKIKWENLSNHVTDMDKKLLESQIKQLEHGWEQVEQQIQKKYSQQVVEYDEFTTLMNKVQDTEISLQQQQQHLQLRLKSPEERAGNQSMIALTTDLQATKHGFSVLKGQAELQMKRIWGEKEKKNLEDGINNLKKQWETLEPLHLEAENQIKKCDIRNKMKETILWAKNLLGELNPSIPLLPDDILSQIRKCKVTHDGILARQQSVESLAEEVKDKVPSLTTYEGSDLNNTLEDLRNQYQMLVLKSTQRSQQLEFKLEERSNFFAIIRKFQLMVQESETLIIPRVETAATEAELKHHHVTLEASQKELQEIDSGISTHLQELTNIYEELNVFERLFLEDQLKNLKIRTNRIQRFIQNTCNEVEHKIKFCRQFHEKTSALQEEADSIQRNELLLNQEVNKGVKEEIYNLKDRLTAIKCCILQVLKLKKVFDYIGLNWDFSQLDQLQTQVFEKEKELEEKIKQLDTFEEEHGKYQALLSKMRAIDLQIKKMTEVVLKAPDSSPESRRLNAQILSQRIEKAKCLCDEIIKKLNENKTFDDSFKEKEILQIKLNAEENDKLYKVLQNMVLELSPKELDEKNCQDKLETSLHVLNQIKSQLQQPLLINLEIKHIQNEKDNCEAFQEQVWAEMCSIKAVTAIEKQREENSSEASDVETKLREFEDLQMQLNTSIDLRTNVLNDAYENLTRYKEAVTRAVESITSLEAIIIPYRVDVGNPEESLEMPLRKQEELESTVAHIQDLTEKLGMISSPEAKLQLQYTLQELVSKNSAMKEAFKAQETEAERYLENYKCYRKMEEDIYTNLSKMETVLGQSMSSLPLSYREALERLEQSKALVSNLISTKEELMKLRQILRLLRLRCTENDGICLLKIVSALWEKWLSLLEAAKEWEMWCEELKQEWKFVSEEIEREAIILDNLQEELPEISKTKEAATTEELSELLDCLCQYGENVEKQQLLLTLLLQRIRSIQNVPESSGAVETVPAFQEITSMKERCNKLLQKVQKNKELVQTEIQERHSFTKEIIALKNFFQQTTTSFQNMAFQDHPEKSEQFEELQSILKKGKLTFENIMEKLRIKYSEMYTIVPAEIESQVEECRKALEDIDEKISNEVLKSSPSYAMRRKIEEINNGLHNVEKMLQQKSKNIEKAQEIQKKMWDELDLWHSKLNELDSEVQDIVEQDPGQAQEWMDNLMIPFQQYQQVSQRAECRTSQLNKATVKMEEYSDLLKSTEAWIENTSHLLANPADYDSLRTLSHHASTVQMALEDSEQKHNLLHSIFMDLEDLSIIFETDELTQSIQELSNQVTALQQKIMESLPQIQRMADDVVAIESEVKSMEKRVSKIKTILLSKEIFDFSPEEHLKHGEVILENIRPMKKTIAEIVSYQVELRLPQTGMKPLPVFQRTNQLLQDIKLLENVTQEQNELLKVVIKQTNEWDEEIENLKQILNNYSAQFSLEHMSPDQADKLPQLQEDVVFNAPSWKQRTALTRHQTYQYFDPGLPSLQNCEK

SEQ ID NO: 10888 - protein, 4106 aa, Artificial Sequence
  Synthetic polypeptide
MASSPELPTEDEQGSWGIDDLHISLQAEQEDTQKKAFTCWINSQLARHTSPSVISDLFTDIKKGHVLLDLLEVLSGQQLPRDKGSNTFQCRINIEHALTFLRNRSIKLINIHVTDIIDGNPSIILGLIWTIILHFHIEKLAQTLSCNYNQPSLDDVSVVDSSPASSPPAKKCSKVQARWQMSARKALLLWAQEQCATYESVNVTDFKSSWRNGMAFLAIIHALRPDLIDMKSVKHRSNKDNLREAFRIAEQELKIPRLLEPEDVDVVDPDEKSIMTYVAQFLQYSKDAPGTGEEAQGKVKDAMGWLTLQKEKLQKLLKDSENDTYFKKYNSLLSFMESFNEEKKSFLDVLSIKRDLDELDKDHLQLREAWDGLDHQINAWKIKLNYALPPPLHQTEAWLQEVEELMDEDLSASQDHSQAVTLIQEKMTLFKSLMDRFEHHSNILLTFENKDENHLPLVPPNKLEEMKRRINNILEKKFILLLEFHYYKCLVLGLVDEVKSKLDIWNIKYGSRESVELLLEDWHKFIEEKEFLARLDTSFQKCGEIYKNLAGECQNINKQYMMVKSDVCMYRKNIYNVKSTLQKVLACWATYVENLRLLRACFEETKKEEIKEVPFETLAQWNLEHATLNEAGNFLVEVSNDVVGSSISKELRRLNKRWRKLVSKTQLEMNLPLMIKKQDQPTFDNSGNILSKEEKATVEFSTDMSVELPENYNQNIKAGEKHEKENEEFTGQLKVAKDVEKLIGQVEIWEAEAKSVLDQDDVDTSMEESLKHLIAKGSMFDELMARSEDMLQMDIQNISSQESFQHVLTTGLQAKIQEAKEKVQINVVKLIAALKNLTDVSPDLDIRLKMEESQKELESYMMRAQQLLGQRESPGELISKHKEALIISNTKSLAKYLKAVEELKNNVTEDIKMSLEEKSRDVCAKWESLHHELSLYVQQLKIDIEKGKLSDNILKLEKQINKEKKLIRRGRTKGLIKEHEACFSEEGCLYQLNHHMEVLRELCEELPSQKSQQEVKRLLKDYEQKIERLLKCASEIHMTLQPTAGGTSKNEGTITTSENRGGDPHSEAPFAKSDNQPSTEKAMEPTMKFSLASVLRPLQEESIMEKDYSASINSLLERYDTYRDILEHHLQNNKFRITSDFSSEEDRSSSCLQAKLTDLQVIKNETDARWKEFEIISLKLENHVNDIKKPFVIKERDTLKERERELQMTLNTRMESLETALRLVLPVEKASLLLCGSDLPLHKMAIQGFHLIDADRIYQHLRNIQDSIAKQIEICNRLEEPGNFVLKELHPFDLHAMQNIILKYKTQFEGMNHRVQRSEDTLKALEDFLASLRTAKLSAEPVTDLSASDTQVAQENTLTVKNKEGEIHLMKDKAKHLDKCLKMLDMSFKDAERGDDTSCENLLDAFSIKLSETHGYGVQEEFTEENKLLEACIFKNNELLKNIQDVQSQISKIGLKDPTVPAVKHRKKSLIRLDKVLDEYEEEKRHLQEMANSLPHFKDGREKTVNQQCQNTVVLWENTKALVTECLEQCGRVLELLKQYQNFKSILTTLIQKEESVISLQASYMGKENLKKRIAEIEIVKEEFNEHLEVVDKINQVCKNLQFYLNKMKTFEEPPFEKEANIIVDRWLDINEKTEDYYENLGRALALWDKLFNLKNVIDEWTEKALQKMELHQLTEEDRERLKEELQVHEQKTSEFSRRVAEIQFLLQSSEIPLELQVMESSILNKMEHVQKCLTGESNCHALSGSTAELREDLDQAKTQIGMTESLLKALSPSDSLEIFTKLEEIQQQILQQKHSMILLENQIGCLTPELSELKKQYESVSDLFNTKKSVLQDHFSKLLNDQCKNFNDWFSNIKVNLKECFESSETKKSVEQKLQKLSDFLTLEGRNSKIKQVDSVLKHVKKHLPKAHVKELISWLVGQEFELEKMESICQARAKELEDSLQQLLRLQDDHRNLRKWLTNQEEKWKGMEEPGEKTELFCQALARKREQFESVAQLNNSLKEYGFTEEEEIIMEATCLMDRYQTLLRQLSEIEEEDKLLPTEDQSFNDLAHDVIHWIKEIKESLMVLNSSEGKMPLEERIQKIKEIILLKPEGDARIETIMKQAESSEAPLVQKTLTDISNQWDNTLHLASTYLSHQEKLLLEGEKYLQSKEDLRLMLIELKKKQEAGFALQHGLQEKKAQLKIYKKFLKKAQDLTSLLKELKSQGNYLLECTKNPSFSEEPWLEIKHLHESLLQQLQDSVQNLDGHVREHDSYQVCVTDLNTTLDNFSKEFVSFSDKPVDQIAVEEKLQKLQELENRLSLQDGTLKKILALAKSVKQNTSSVGQKIIKDDIKSLQCKQKDLENRLASAKQEMECCLNSILKSKRSTEKKGKFTLPGREKQATSDVQESTQESAAVEKLEEDWEINKNFVENVMAVSKNCHHSMYIFESIVKNFISDEMQDSAVEMAMSKQLSLNAQESMKNTEDERKVNELQNQPLELDTMLRNEQLEEIEKLYTQLEAKKAAIKPLEQTECLNKTETGALVLHNIGYSAQHLDNLLQALITLKKNKESQYCVLRDFQEYLAAVESSMKALLTDKESLKVGPLDSVTYLDKIKKFIASIEKEKDSLGNLKIKWENLSNHVTDMDKKLLESQIKQLEHGWEQVEQQIQKKYSQQVVEYDEFTTLMNKVQDTEISLQQQQQHLQLRLKSPEERAGNQSMIALTTDLQATKHGFSVLKGQAELQMKRIWGEKEKKNLEDGINNLKKQWETLEPLHLEAENQIKKCDIRNKMKETILWAKNLLGELNPSIPLLPDDILSQIRKCKVTHDGILARQQSVESLAEEVKDKVPSLTTYEGSDLNNTLEDLRNQYQMLVLKSTQRSQQLEFKLEERSNFFAIIRKFQLMVQESETLIIPRVETAATEAELKHHHVTLEASQKELQEIDSGISTHLQELTNIYEELNVFERLFLEDQLKNLKIRTNRIQRFIQNTCNEVEHKIKFCRQFHEKTSALQEEADSIQRNELLLNQEVNKGVKEEIYNLKDRLTAIKCCILQVLKLKKVFDYIGLNWDFSQLDQLQTQVFEKEKELEEKIKQLDTFEEEHGKYQALLSKMRAIDLQIKKMTEVVLKAPDSSPESRRLNAQILSQRIEKAKCLCDEIIKKLNENKTFDDSFKEKEILQIKLNAEENDKLYKVLQNMVLELSPKELDEKNCQDKLETSLHVLNQIKSQLQQPLLINLEIKHIQNEKDNCEAFQEQVWAEMCSIKAVTAIEKQREENSSEASDVETKLREFEDLQMQLNTSIDLRTNVLNDAYENLTRYKEAVTRAVESITSLEAIIIPYRVDVGNPEESLEMPLRKQEELESTVAHIQDLTEKLGMISSPEAKLQLQYTLQELVSKNSAMKEAFKAQETEAERYLENYKCYRKMEEDIYTNLSKMETVLGQSMSSLPLSYREALERLEQSKALVSNLISTKEELMKLRQILRLLRLRCTENDGICLLKIVSALWEKWLSLLEAAKEWEMWCEELKQEWKFVSEEIEREAIILDNLQEELPEISKTKEAATTEELSELLDCLCQYGENVEKQQLLLTLLLQRIRSIQNVPESSGAVETVPAFQEITSMKERCNKLLQKVQKNKELVQTEIQERHSFTKEIIALKNFFQQTTTSFQNMAFQDHPEKSEQFEELQSILKKGKLTFENIMEKLRIKYSEMYTIVPAEIESQVEECRKALEDIDEKISNEVLKSSPSYAMRRKIEEINNGLHNVEKMLQQKSKNIEKAQEIQKKMWDELDLWHSKLNELDSEVQDIVEQDPGQAQEWMDNLMIPFQQYQQVSQRAECRTSQLNKATVKMEEYSDLLKSTEAWIENTSHLLANPADYDSLRTLSHHASTVQMALEDSEQKHNLLHSIFMDLEDLSIIFETDELTQSIQELSNQVTALQQKIMESLPQIQRMADDVVAIESEVKSMEKRVSKIKTILLSKEIFDFSPEEHLKHGEVILENIRPMKKTIAEIVSYQVELRLPQTGMKPLPVFQRTNQLLQDIKLLENVTQEQNELLKVVIKQTNEWDEEIENLKQILNNYSAQFSLEHMSPDQADKLPQLQEDVVFNAPSWKQRTALTRHQTYQYFDPGLPSLQNCEK

SEQ ID NO: 10889 - protein, 707 aa, Artificial Sequence
  Synthetic polypeptide
MEEDIYTNLSKMETVLGQSMSSLPLSYREALERLEQSKALVSNLISTKEELMKLRQILRLLRLRCTENDGICLLKIVSALWEKWLSLLEAAKEWEMWCEELKQEWKFVSEEIEREAIILDNLQEELPEISKTKEAATTEELSELLDCLCQYGENVEKQQLLLTLLLQRIRSIQNVPESSGAVETVPAFQEITSMKERCNKLLQKVQKNKELVQTEIQERHSFTKEIIALKNFFQQTTTSFQNMAFQDHPEKSEQFEELQSILKKGKLTFENIMEKLRIKYSEMYTIVPAEIESQVEECRKALEDIDEKISNEVLKSSPSYAMRRKIEEINNGLHNVEKMLQQKSKNIEKAQEIQKKMWDELDLWHSKLNELDSEVQDIVEQDPGQAQEWMDNLMIPFQQYQQVSQRAECRTSQLNKATVKMEEYSDLLKSTEAWIENTSHLLANPADYDSLRTLSHHASTVQMALEDSEQKHNLLHSIFMDLEDLSIIFETDELTQSIQELSNQVTALQQKIMESLPQIQRMADDVVAIESEVKSMEKRVSKIKTILLSKEIFDFSPEEHLKHGEVILENIRPMKKTIAEIVSYQVELRLPQTGMKPLPVFQRTNQLLQDIKLLENVTQEQNELLKVVIKQTNEWDEEIENLKQILNNYSAQFSLEHMSPDQADKLPQLQEDVVFNAPSWKQRTALTRHQTYQYFDPGLPSLQNCEK

SEQ ID NO: 10890 - protein, 458 aa, Artificial Sequence
  Synthetic polypeptide
MEKLRIKYSEMYTIVPAEIESQVEECRKALEDIDEKISNEVLKSSPSYAMRRKIEEINNGLHNVEKMLQQKSKNIEKAQEIQKKMWDELDLWHSKLNELDSEVQDIVEQDPGQAQEWMDNLMIPFQQYQQVSQRAECRTSQLNKATVKMEEYSDLLKSTEAWIENTSHLLANPADYDSLRTLSHHASTVQDSKCFRSGPRPNIYVSYYVTVIQMALEDSEQKHNLLHSIFMDLEDLSIIFETDELTQSIQELSNQVTALQQKIMESLPQIQRMADDVVAIESEVKSMEKRVSKIKTILLSKEIFDFSPEEHLKHGEVILENIRPMKKTIAEIVSYQVELRLPQTGMKPLPVFQRTNQLLQDIKLLENVTQEQNELLKVVIKQTNEWDEEIENLKQILNNYSAQFSLEHMSPDQADKLPQLQEDVVFNAPSWKQRTALTRHQTYQYFDPGLPSLQNCEK

SEQ ID NO: 10891 - protein, 4654 aa, Artificial Sequence
  Synthetic polypeptide
MASSPELPTEDEQGSWGIDDLHISLQAEQEDTQKKAFTCWINSQLARHTSPSVISDLFTDIKKGHVLLDLLEVLSGQQLPRDKGSNTFQCRINIEHALTFLRNRSIKLINIHVTDIIDGNPSIILGLIWTIILHFHIEKLAQTLSCNYNQPSLDDVSVVDSSPASSPPAKKCSKVQARWQMSARKALLLWAQEQCATYESVNVTDFKSSWRNGMAFLAIIHALRPDLIDMKSVKHRSNKDNLREAFRIAEQELKIPRLLEPEDVDVVDPDEKSIMTYVAQFLQYSKDAPGTGEEAQGKVKDAMGWLTLQKEKLQKLLKDSENDTYFKKYNSLLSFMESFNEEKKSFLDVLSIKRDLDELDKDHLQLREAWDGLDHQINAWKIKLNYALPPPLHQTEAWLQEVEELMDEDLSASQDHSQAVTLIQEKMTLFKSLMDRFEHHSNILLTFENKDENHLPLVPPNKLEEMKRRINNILEKKFILLLEFHYYKCLVLGLVDEVKSKLDIWNIKYGSRESVELLLEDWHKFIEEKEFLARLDTSFQKCGEIYKNLAGECQNINKQYMMVKSDVCMYRKNIYNVKSTLQKVLACWATYVENLRLLRACFEETKKEEIKEVPFETLAQWNLEHATLNEAGNFLVEVSNDVVGSSISKELRRLNKRWRKLVSKTQLEMNLPLMIKKQDQPTFDNSGNILSKEEKATVEFSTDMSVELPENYNQNIKAGEKHEKENEEFTGQLKVAKDVEKLIGQVEIWEAEAKSVLDQDDVDTSMEESLKHLIAKGSMFDELMARSEDMLQMDIQNISSQESFQHVLTTGLQAKIQEAKEKVQINVVKLIAALKNLTDVSPDLDIRLKMEESQKELESYMMRAQQLLGQRESPGELISKHKEALIISNTKSLAKYLKAVEELKNNVTEDIKMSLEEKSRDVCAKWESLHHELSLYVQQLKIDIEKGKLSDNILKLEKQINKEKKLIRRGRTKGLIKEHEACFSEEGCLYQLNHHMEVLRELCEELPSQKSQQEVKRLLKDYEQKIERLLKCASEIHMTLQPTAGGTSKNEGTITTSENRGGDPHSEAPFAKSDNQPSTEKAMEPTMKFSLASVLRPLQEESIMEKDYSASINSLLERYDTYRDILEHHLQNNKFRITSDFSSEEDRSSSCLQAKLTDLQVIKNETDARWKEFEIISLKLENHVNDIKKPFVIKERDTLKERERELQMTLNTRMESLETALRLVLPVEKASLLLCGSDLPLHKMAIQGFHLIDADRIYQHLRNIQDSIAKQIEICNRLEEPGNFVLKELHPFDLHAMQNIILKYKTQFEGMNHRVQRSEDTLKALEDFLASLRTAKLSAEPVTDLSASDTQVAQENTLTVKNKEGEIHLMKDKAKHLDKCLKMLDMSFKDAERGDDTSCENLLDAFSIKLSETHGYGVQEEFTEENKLLEACIFKNNELLKNIQDVQSQISKIGLKDPTVPAVKHRKKSLIRLDKVLDEYEEEKRHLQEMANSLPHFKDGREKTVNQQCQNTVVLWENTKALVTECLEQCGRVLELLKQYQNFKSILTTLIQKEESVISLQASYMGKENLKKRIAEIEIVKEEFNEHLEVVDKINQVCKNLQFYLNKMKTFEEPPFEKEANIIVDRWLDINEKTEDYYENLGRALALWDKLFNLKNVIDEWTEKALQKMELHQLTEEDRERLKEELQVHEQKTSEFSRRVAEIQFLLQSSEIPLELQVMESSILNKMEHVQKCLTGESNCHALSGSTAELREDLDQAKTQIGMTESLLKALSPSDSLEIFTKLEEIQQQILQQKHSMILLENQIGCLTPELSELKKQYESVSDLFNTKKSVLQDHFSKLLNDQCKNFNDWFSNIKVNLKECFESSETKKSVEQKLQKLSDFLTLEGRNSKIKQVDSVLKHVKKHLPKAHVKELISWLVGQEFELEKMESICQARAKELEDSLQQLLRLQDDHRNLRKWLTNQEEKWKGMEEPGEKTELFCQALARKREQFESVAQLNNSLKEYGFTEEEEIIMEATCLMDRYQTLLRQLSEIEEEDKLLPTEDQSFNDLAHDVIHWIKEIKESLMVLNSSEGKMPLEERIQKIKEIILLKPEGDARIETIMKQAESSEAPLVQKTLTDISNQWDNTLHLASTYLSHQEKLLLEGEKYLQSKEDLRLMLIELKKKQEAGFALQHGLQEKKAQLKIYKKFLKKAQDLTSLLKELKSQGNYLLECTKNPSFSEEPWLEIKHLHESLLQQLQDSVQNLDGHVREHDSYQVCVTDLNTTLDNFSKEFVSFSDKPVDQIAVEEKLQKLQELENRLSLQDGTLKKILALAKSVKQNTSSVGQKIIKDDIKSLQCKQKDLENRLASAKQEMECCLNSILKSKRSTEKKGKFTLPGREKQATSDVQESTQESAAVEKLEEDWEINKDSAVEMAMSKQLSLNAQESMKNTEDERKVNELQNQPLELDTMLRNEQLEEIEKLYTQLEAKKAAIKPLEQTECLNKTETGALVLHNIGYSAQHLDNLLQALITLKKNKESQYCVLRDFQEYLAAVESSMKALLTDKESLKVGPLDSVTYLDKIKKFIASIEKEKDSLGNLKIKWENLSNHVTDMDKKLLESQIKQLEHGWEQVEQQIQKKYSQQVVEYDEFTTLMNKVQDTEISLQQQQQHLQLRLKSPEERAGNQSMIALTTDLQATKHGFSVLKGQAELQMKRIWGEKEKKNLEDGINNLKKQWETLEPLHLEAENQIKKCDIRNKMKETILWAKNLLGELNPSIPLLPDDILSQIRKCKVTHDGILARQQSVESLAEEVKDKVPSLTTYEGSDLNNTLEDLRNQYQMLVLKSTQRSQQLEFKLEERSNFFAIIRKFQLMVQESETLIIPRVETAATEAELKHHHVTLEASQKELQEIDSGISTHLQELTNIYEELNVFERLFLEDQLKNLKIRTNRIQRFIQNTCNEVEHKIKFCRQFHEKTSALQEEADSIQRNELLLNQEVNKGVKEEIYNLKDRLTAIKCCILQVLKLKKVFDYIGLNWDFSQLDQLQTQVFEKEKELEEKIKQLDTFEEEHGKYQALLSKMRAIDLQIKKMTEVVLKAPDSSPESRRLNAQILSQRIEKAKCLCDEIIKKLNENKTFDDSFKEKEILQIKLNAEENDKLYKVLQNMVLELSPKELDEKNCQDKLETSLHVLNQIKSQLQQPLLINLEIKHIQNEKDNCEAFQEQVWAEMCSIKAVTAIEKQREENSSEASDVETKLREFEDLQMQLNTSIDLRTNVLNDAYENLTRYKEAVTRAVESITSLEAIIIPYRVDVGNPEESLEMPLRKQEELESTVAHIQDLTEKLGMISSPEAKLQLQYTLQELVSKNSAMKEAFKAQETEAERYLENYKCYRKMEEDIYTNLSKMETVLGQSMSSLPLSYREALERLEQSKALVSNLISTKEELMKLRQILRLLRLRCTENDGICLLKIVSALWEKWLSLLEAAKEWEMWCEELKQEWKFVSEEIEREAIILDNLQEELPEISKTKEAATTEELSELLDCLCQYGENVEKQQLLLTLLLQRIRSIQNVPESSGAVETVPAFQEITSMKERCNKLLQKVQKNKELVQTEIQERHSFTKEIIALKNFFQQTTTSFQNMAFQDHPEKSEQFEELQSILKKGKLTFENIMEKLRIKYSEMYTIVPAEIESQVEECRKALEDIDEKISNEVLKSSPSYAMRRKIEEINNGLHNVEKMLQQKSKNIEKAQEIQKKMWDELDLWHSKLNELDSEVQDIVEQDPGQAQEWMDNLMIPFQQYQQVSQRAECRTSQLNKATVKMEEYSDLLKSTEAWIENTSHLLANPADYDSLRTLSHHASTVQMALEDSEQKHNLLHSIFMDLEDLSIIFETDELTQSIQELSNQVTALQQKIMESLPQIQRMADDVVAIESEVKSMEKRVSKIKTILLSKEIFDFSPEEHLKHGEVILENIRPMKKTIAEIVSYQVELRLPQTGMKPLPVFQRTNQLLQDIKLLENVTQEQNELLKVVIKQTNEWDEEIENLKQILNNYSAQFSLEHMSPDQADKLPQLQGEIERMEKQILSLNQRKEDLLVDLKATVLNLHQHLKQEQEGVERDRLPAVTSEEGGVAERDASERKLNRRGSMSYLAAVEEEVEESSVKSDNGDEKAEPSPQSWSSLWKHDKDMEEDRASSSSGTIVQEAYGKISTSDNSMAQILTPDSLNTEQGPECSLRPNQTEEGTTPPIEADTLDSSDAQGGLEPRVEKTRPEPTEVLHACKTQVAELELWLQQANVAVEPETLNADMQQVLEQQLVGCQAMLTEIEHKVAFLLETCKDQGLGDNGATQHEAEALSLKLKTVKCNLEKVQMMLQEKHSEDQHPTILKKSSEPEHQEALQPVNLSELESIVTERPQFSRQKDFQQQQVLELKPMEQKDFIKFIEFNAKKMWPQYCQHDNDTTQESSASNQASSPENDVPDSILSPQGQNGDKWQYLHHELSSKIKLPLPQLVEPQVSTNMGILPSVTMYNFRYPTTEELKTYTTQLEDLRQEASNLQTQENMTEEAYINLDKKLFELFLTLSQCLSSVEEMLEMPRLYREDGSGQQVHYETLALELKKLYLALSDKKGDLLKAMTWPGENTNLLLECFDNLQVCLEHTQAAAVCRSKSLKAGLDYNRSYQPDMVVCACNPSYLGG

SEQ ID NO: 10892 - protein, 4605 aa, Artificial Sequence
  Synthetic polypeptide
MASSPELPTEDEQGSWGIDDLHISLQAEQEDTQKKAFTCWINSQLARHTSPSVISDLFTDIKKGHVLLDLLEVLSGQQLPRDKGSNTFQCRINIEHALTFLRNRSIKLINIHVTDIIDGNPSIILGLIWTIILHFHIEKLAQTLSCNYNQPSLDDVSVVDSSPASSPPAKKCSKVQARWQMSARKALLLWAQEQCATYESVNVTDFKSSWRNGMAFLAIIHALRPDLIDMKSVKHRSNKDNLREAFRIAEQELKIPRLLEPEDVDVVDPDEKSIMTYVAQFLQYSKDAPGTGEEAQGKVKDAMGWLTLQKEKLQKLLKDSENDTYFKKYNSLLSFMESFNEEKKSFLDVLSIKRDLDELDKDHLQLREAWDGLDHQINAWKIKLNYALPPPLHQTEAWLQEVEELMDEDLSASQDHSQAVTLIQEKMTLFKSLMDRFEHHSNILLTFENKDENHLPLVPPNKLEEMKRRINNILEKKFILLLEFHYYKCLVLGLVDEVKSKLDIWNIKYGSRESVELLLEDWHKFIEEKEFLARLDTSFQKCGEIYKNLAGECQNINKQYMMVKSDVCMYRKNIYNVKSTLQKVLACWATYVENLRLLRACFEETKKEEIKEVPFETLAQWNLEHATLNEAGNFLVEVSNDVVGSSISKELRRLNKRWRKLVSKTQLEMNLPLMIKKQDQPTFDNSGNILSKEEKATVEFSTDMSVELPENYNQNIKAGEKHEKENEEFTGQLKVAKDVEKLIGQVEIWEAEAKSVLDQDDVDTSMEESLKHLIAKGSMFDELMARSEDMLQMDIQNISSQESFQHVLTTGLQAKIQEAKEKVQINVVKLIAALKNLTDVSPDLDIRLKMEESQKELESYMMRAQQLLGQRESPGELISKHKEALIISNTKSLAKYLKAVEELKNNVTEDIKMSLEEKSRDVCAKWESLHHELSLYVQQLKIDIEKGKLSDNILKLEKQINKEKKLIRRGRTKGLIKEHEACFSEEGCLYQLNHHMEVLRELCEELPSQKSQQEVKRLLKDYEQKIERLLKCASEIHMTLQPTAGGTSKNEGTITTSENRGGDPHSEAPFAKSDNQPSTEKAMEPTMKFSLASVLRPLQEESIMEKDYSASINSLLERYDTYRDILEHHLQNNKFRITSDFSSEEDRSSSCLQAKLTDLQVIKNETDARWKEFEIISLKLENHVNDIKKPFVIKERDTLKERERELQMTLNTRMESLETALRLVLPVEKASLLLCGSDLPLHKMAIQGFHLIDADRIYQHLRNIQDSIAKQIEICNRLEEPGNFVLKELHPFDLHAMQNIILKYKTQFEGMNHRVQRSEDTLKALEDFLASLRTAKLSAEPVTDLSASDTQVAQENTLTVKNKEGEIHLMKDKAKHLDKCLKMLDMSFKDAERGDDTSCENLLDAFSIKLSETHGYGVQEEFTEENKLLEACIFKNNELLKNIQDVQSQISKIGLKDPTVPAVKHRKKSLIRLDKVLDEYEEEKRHLQEMANSLPHFKDGREKTVNQQCQNTVVLWENTKALVTECLEQCGRVLELLKQYQNFKSILTTLIQKEESVISLQASYMGKENLKKRIAEIEIVKEEFNEHLEVVDKINQVCKNLQFYLNKMKTFEEPPFEKEANIIVDRWLDINEKTEDYYENLGRALALWDKLFNLKNVIDEWTEKALQKMELHQLTEEDRERLKEELQVHEQKTSEFSRRVAEIQFLLQSSEIPLELQVMESSILNKMEHVQKCLTGESNCHALSGSTAELREDLDQAKTQIGMTESLLKALSPSDSLEIFTKLEEIQQQILQQKHSMILLENQIGCLTPELSELKKQYESVSDLFNTKKSVLQDHFSKLLNDQCKNFNDWFSNIKVNLKECFESSETKKSVEQKLQKLSDFLTLEGRNSKIKQVDSVLKHVKKHLPKAHVKELISWLVGQEFELEKMESICQARAKELEDSLQQLLRLQDDHRNLRKWLTNQEEKWKGMEEPGEKTELFCQALARKREQFESVAQLNNSLKEYGFTEEEEIIMEATCLMDRYQTLLRQLSEIEEEDKLLPTEDQSFNDLAHDVIHWIKEIKESLMVLNSSEGKMPLEERIQKIKEIILLKPEGDARIETIMKQAESSEAPLVQKTLTDISNQWDNTLHLASTYLSHQEKLLLEGEKYLQSKEDLRLMLIELKKKQEAGFALQHGLQEKKAQLKIYKKFLKKAQDLTSLLKELKSQGNYLLECTKNPSFSEEPWLEIKHLHESLLQQLQDSVQNLDGHVREHDSYQVCVTDLNTTLDNFSKEFVSFSDKPVDQIAVEEKLQKLQELENRLSLQDGTLKKILALAKSVKQNTSSVGQKIIKDDIKSLQCKQKDLENRLASAKQEMECCLNSILKSKRSTEKKGKFTLPGREKQATSDVQESTQESAAVEKLEEDWEINKNFVENVMAVSKNCHHSMYIFESIVKNFISDEMQDSAVEMAMSKQLSLNAQESMKNTEDERKVNELQNQPLELDTMLRNEQLEEIEKLYTQLEAKKAAIKPLEQTECLNKTETGALVLHNIGYSAQHLDNLLQALITLKKNKESQYCVLRDFQEYLAAVESSMKALLTDKESLKVGPLDSVTYLDKIKKFIASIEKEKDSLGNLKIKWENLSNHVTDMDKKLLESQIKQLEHGWEQVEQQIQKKYSQQVVEYDEFTTLMNKVQDTEISLQQQQQHLQLRLKSPEERAGNQSMIALTTDLQATKHGFSVLKGQAELQMKRIWGEKEKKNLEDGINNLKKQWETLEPLHLEAENQIKKCDIRNKMKETILWAKNLLGELNPSIPLLPDDILSQIRKCKVTHDGILARQQSVESLAEEVKDKVPSLTTYEGSDLNNTLEDLRNQYQMLVLKSTQRSQQLEFKLEERSNFFAIIRKFQLMVQESETLIIPRVETAATEAELKHHHVTLEASQKELQEIDSGISTHLQELTNIYEELNVFERLFLEDQLKNLKIRTNRIQRFIQNTCNEVEHKIKFCRQFHEKTSALQEEADSIQRNELLLNQEVNKGVKEEIYNLKDRLTAIKCCILQVLKLKKVFDYIGLNWDFSQLDQLQTQVFEKEKELEEKIKQLDTFEEEHGKYQALLSKMRAIDLQIKKMTEVVLKAPDSSPESRRLNAQILSQRIEKAKCLCDEIIKKLNENKTFDDSFKEKEILQIKLNAEENDKLYKVLQNMVLELSPKELDEKNCQDKLETSLHVLNQIKSQLQQPLLINLEIKHIQNEKDNCEAFQEQVWAEMCSIKAVTAIEKQREENSSEASDVETKLREFEDLQMQLNTSIDLRTNVLNDAYENLTRYKEAVTRAVESITSLEAIIIPYRVDVGNPEESLEMPLRKQEELESTVAHIQDLTEKLGMISSPEAKLQLQYTLQELVSKNSAMKEAFKAQETEAERYLENYKCYRKMEEDIYTNLSKMETVLGQSMSSLPLSYREALERLEQSKALVSNLISTKEELMKLRQILRLLRLRCTENDGICLLKIVSALWEKWLSLLEAAKEWEMWCEELKQEWKFVSEEIEREAIILDNLQEELPEISKTKEAATTEELSELLDCLCQYGENVEKQQLLLTLLLQRIRSIQNVPESSGAVETVPAFQEITSMKERCNKLLQKVQKNKELVQTEIQERHSFTKEIIALKNFFQQTTTSFQNMAFQDHPEKSEQFEELQSILKKGKLTFENIMEKLRIKYSEMYTIVPAEIESQVEECRKALEDIDEKISNEVLKSSPSYAMRRKIEEINNGLHNVEKMLQQKSKNIEKAQEIQKKMWDELDLWHSKLNELDSEVQDIVEQDPGQAQEWMDNLMIPFQQYQQVSQRAECRTSQLNKATVKMEEYSDLLKSTEAWIENTSHLLANPADYDSLRTLSHHASTVQMALEDSEQKHNLLHSIFMDLEDLSIIFETDELTQSIQELSNQVTALQQKIMESLPQIQRMADDVVAIESEVKSMEKRVSKIKTILLSKEIFDFSPEEHLKHGEVILENIRPMKKTIAEIVSYQVELRLPQTGMKPLPVFQRTNQLLQDIKLLENVTQEQNELLKVVIKQTNEWDEEIENLKQILNNYSAQFSLEHMSPDQADKLPQLQGEIERMEKQILSLNQRKEDLLVDLKATVLNLHQHLKQEQEGVERDRLPAVTSEEGGVAERDASERKLNRRGSMSYLAAVEEEVEESSVKSDHDKDMEEDRASSSSGTIVQEAYGKISTSDNSMAQILTPDSLNTEQGPECSLRPNQTEEGTTPPIEADTLDSSDAQGGLEPRVEKTRPEPTEVLHACKTQVAELELWLQQANVAVEPETLNADMQQVLEQQLVGCQAMLTEIEHKVAFLLETCKDQGLGDNGATQHEAEALSLKLKTVKCNLEKVQMMLQEKHSEDQHPTILKKSSEPEHQEALQPVNLSELESIVTERPQFSRQKDFQQQQVLELKPMEQKDFIKFIEFNAKKMWPQYCQHDNDTTQESSARYPTTEELKTYTTQLEDLRQEASNLQTQENMTEEAYINLDKKLFELFLTLSQCLSSVEEMLEMPRLYREDGSGQQVHYETLALELKKLYLALSDKKGDLLKAMTWPGENTNLLLECFDNLQVCLEHTQAAAVCRSKSLKAGLDYNRSYQPDMVVCACNPSYLGG

SEQ ID NO: 10893 - protein, 1288 aa, Artificial Sequence
  Synthetic polypeptide
MEEDIYTNLSKMETVLGQSMSSLPLSYREALERLEQSKALVSNLISTKEELMKLRQILRLLRLRCTENDGICLLKIVSALWEKWLSLLEAAKEWEMWCEELKQEWKFVSEEIEREAIILDNLQEELPEISKTKEAATTEELSELLDCLCQYGENVEKQQLLLTLLLQRIRSIQNVPESSGAVETVPAFQEITSMKERCNKLLQKVQKNKELVQTEIQERHSFTKEIIALKNFFQQTTTSFQNMAFQDHPEKSEQFEELQSILKKGKLTFENIMEKLRIKYSEMYTIVPAEIESQVEECRKALEDIDEKISNEVLKSSPSYAMRRKIEEINNGLHNVEKMLQQKSKNIEKAQEIQKKMWDELDLWHSKLNELDSEVQDIVEQDPGQAQEWMDNLMIPFQQYQQVSQRAECRTSQLNKATVKMEEYSDLLKSTEAWIENTSHLLANPADYDSLRTLSHHASTVQMALEDSEQKHNLLHSIFMDLEDLSIIFETDELTQSIQELSNQVTALQQKIMESLPQIQRMADDVVAIESEVKSMEKRVSKIKTILLSKEIFDFSPEEHLKHGEVILENIRPMKKTIAEIVSYQVELRLPQTGMKPLPVFQRTNQLLQDIKLLENVTQEQNELLKVVIKQTNEWDEEIENLKQILNNYSAQFSLEHMSPDQADKLPQLQGEIERMEKQILSLNQRKEDLLVDLKATVLNLHQHLKQEQEGVERDRLPAVTSEEGGVAERDASERKLNRRGSMSYLAAVEEEVEESSVKSDNGDEKAEPSPQSWSSLWKHDKDMEEDRASSSSGTIVQEAYGKISTSDNSMAQILTPDSLNTEQGPECSLRPNQTEEGTTPPIEADTLDSSDAQGGLEPRVEKTRPEPTEVLHACKTQVAELELWLQQANVAVEPETLNADMQQVLEQQLVGCQAMLTEIEHKVAFLLETCKDQGLGDNGATQHEAEALSLKLKTVKCNLEKVQMMLQEKHSEDQHPTILKKSSEPEHQEALQPVNLSELESIVTERPQFSRQKDFQQQQVLELKPMEQKDFIKFIEFNAKKMWPQYCQHDNDTTQESSASNQASSPENDVPDSILSPQGQNGDKWQYLHHELSSKIKLPLPQLVEPQVSTNMGILPSVTMYNFRYPTTEELKTYTTQLEDLRQEASNLQTQENMTEEAYINLDKKLFELFLTLSQCLSSVEEMLEMPRLYREDGSGQQVHYETLALELKKLYLALSDKKGDLLKAMTWPGENTNLLLECFDNLQVCLEHTQAAAVCRSKSLKAGLDYNRSYQPDMVVCACNPSYLGG

SEQ ID NO: 10894 - protein, 1039 aa, Artificial Sequence
  Synthetic polypeptide
MEKLRIKYSEMYTIVPAEIESQVEECRKALEDIDEKISNEVLKSSPSYAMRRKIEEINNGLHNVEKMLQQKSKNIEKAQEIQKKMWDELDLWHSKLNELDSEVQDIVEQDPGQAQEWMDNLMIPFQQYQQVSQRAECRTSQLNKATVKMEEYSDLLKSTEAWIENTSHLLANPADYDSLRTLSHHASTVQDSKCFRSGPRPNIYVSYYVTVIQMALEDSEQKHNLLHSIFMDLEDLSIIFETDELTQSIQELSNQVTALQQKIMESLPQIQRMADDVVAIESEVKSMEKRVSKIKTILLSKEIFDFSPEEHLKHGEVILENIRPMKKTIAEIVSYQVELRLPQTGMKPLPVFQRTNQLLQDIKLLENVTQEQNELLKVVIKQTNEWDEEIENLKQILNNYSAQFSLEHMSPDQADKLPQLQGEIERMEKQILSLNQRKEDLLVDLKATVLNLHQHLKQEQEGVERDRLPAVTSEEGGVAERDASERKLNRRGSMSYLAAVEEEVEESSVKSDNGDEKAEPSPQSWSSLWKHDKDMEEDRASSSSGTIVQEAYGKISTSDNSMAQILTPDSLNTEQGPECSLRPNQTEEGTTPPIEADTLDSSDAQGGLEPRVEKTRPEPTEVLHACKTQVAELELWLQQANVAVEPETLNADMQQVLEQQLVGCQAMLTEIEHKVAFLLETCKDQGLGDNGATQHEAEALSLKLKTVKCNLEKVQMMLQEKHSEDQHPTILKKSSEPEHQEALQPVNLSELESIVTERPQFSRQKDFQQQQVLELKPMEQKDFIKFIEFNAKKMWPQYCQHDNDTTQESSASNQASSPENDVPDSILSPQGQNGDKWQYLHHELSSKIKLPLPQLVEPQVSTNMGILPSVTMYNFRYPTTEELKTYTTQLEDLRQEASNLQTQENMTEEAYINLDKKLFELFLTLSQCLSSVEEMLEMPRLYREDGSGQQVHYETLALELKKLYLALSDKKGDLLKAMTWPGENTNLLLECFDNLQVCLEHTQAAAVCRSKSLKAGLDYNRSYQPDMVVCACNPSYLGG

SEQ ID NO: 10895 - protein, 109 aa, Artificial Sequence [sequence omitted]

SEQ ID NO: 10896 - protein, 63 aa, Artificial Sequence
  Synthetic polypeptide
MKTIEVDGIKVRIQIWDTAGQERYQTITKQYYRRAQGIFLVYDISSERSYQHIMKWVSDVDEL

SEQ ID NO: 10897 - protein, 97 aa, Artificial Sequence
  Synthetic polypeptide
  misc_feature (1)..(1): Xaa can be any naturally occurring amino acid
XPRPQLGRNCQPLRLEAVAPEAGVRDKSRGVDFKMKTIEVDGIKVRIQIWDTAGQERYQTITKQYYRRAQGIFLVYDISSERSYQHIMKWVSDVDEL

SEQ ID NO: 10898 - protein, 54 aa, Artificial Sequence
  Synthetic polypeptide
MATEGMILTNHDHQIRVGVLTVSDSCFRNLAEDRSGINLKDLVQDPSLHSFSRL

SEQ ID NO: 10899 - protein, 63 aa, Artificial Sequence
  Synthetic polypeptide
MATEGMILTNHDHQIRVGVLTVSDSCFRNLAEDRSGINLKDLVQDPSLSFPAQALSWPAPIHI

SEQ ID NO: 10900 - protein, 69 aa, Artificial Sequence
  Synthetic polypeptide
MATEGMILTNHDHQIRVGVLTVSDSCFRNLAEDRSGINLKDLVQDPSLLSLGLLPSTYKTWLAPPCLPP

SEQ ID NO: 10901 - protein, 55 aa, Artificial Sequence
  Synthetic polypeptide
MATEGMILTNHDHQIRVGVLTVSDSCFRNLAEDRSGINLKDLVQDPSLSLLLVAT

SEQ ID NO: 10902 - protein, 78 aa, Artificial Sequence
  Synthetic polypeptide
MATEGMILTNHDHQIRVGVLTVSDSCFRNLAEDRSGINLKDLVQDPSLLGGTISAYKIVPDEIEEIKGKHKEDGWKQS

SEQ ID NO: 10903 - protein, 40 aa, Artificial Sequence
  Synthetic polypeptide
MDHYDSQQTNDYMQPEEDWDRDLLLDPAWEKQQRKSCCRD

SEQ ID NO: 10904 - protein, 485 aa, Artificial Sequence
  Synthetic polypeptide
MAQGSGDQRAVGVADPEESSPNMIVYCKIEDIITKMQDDKTGGVPIRTVKSFLSKIPSVVTGTDIVQWLMKNLSIEDPVEAIHLGSLIAAQGYIFPISDHVLTMKDDGTFYRFQAPYFWPSNCWEPENTDYAIYLCKRTMQNKARLELADYEAENLARLQRAFARKWEFIFMQAEAQVKIDRKKDKTERKILDSQERAFWDVHRPVPGCVNTTEMDIRKCRRLKNPQKVKKSVYGVTEESQAQSPVHVLSQPIRKTTKEDIRKQITFLNAQIDRHCLKMSKVAESKEPSQQRVKRWGFSFDEILKDQVGRDQFLRFLESEFSSENLRFWLAVQDLKKQPLQDVAKRVEEIWQEFLAPGAPSAINLDSHSYEITSQNVKDGGRYTFEDAQEHIYKLMKSDSYARFLRSNAYQDLLLAKKKPESEQGRRTSLEKFTRSVANYIPSSPLPLKLIPAPTTTAQQGLLHAIQPSSIYFPHCSQNHQKFQV

SEQ ID NO: 10905 - protein, 522 aa, Artificial Sequence
  Synthetic polypeptide
MAQGSGDQRAVGVADPEESSPNMIVYCKIEDIITKMQDDKTGGVPIRTVKSFLSKIPSVVTGTDIVQWLMKNLSIEDPVEAIHLGSLIAAQGYIFPISDHVLTMKDDGTFYRFQAPYFWPSNCWEPENTDYAIYLCKRTMQNKARLELADYEAENLARLQRAFARKWEFIFMQAEAQVKIDRKKDKTERKILDSQERAFWDVHRPVPGCVNTTEMDIRKCRRLKNPQKVKKSVYGVTEESQAQSPVHVLSQPIRKTTKEDIRKQITFLNAQIDRHCLKMSKVAESLIAYTEQYVEYDPLITPAEPSNPWISDDVALWDIEMSKEPSQQRVKRWGFSFDEILKDQVGRDQFLRFLESEFSSENLRFWLAVQDLKKQPLQDVAKRVEEIWQEFLAPGAPSAINLDSHSYEITSQNVKDGGRYTFEDAQEHIYKLMKSDSYARFLRSNAYQDLLLAKKKPESEQGRRTSLEKFTRSVANYIPSSPLPLKLIPAPTTTAQQGLLHAIQPSSIYFPHCSQNHQKFQV

SEQ ID NO: 10906 - protein, 453 aa, Artificial Sequence
  Synthetic polypeptide
MKNLSIEDPVEAIHLGSLIAAQGYIFPISDHVLTMKDDGTFYRFQAPYFWPSNCWEPENTDYAIYLCKRTMQNKARLELADYEAENLARLQRAFARKWEFIFMQAEAQVKIDRKKDKTERKILDSQERAFWDVHRPVPGCVNTTEMDIRKCRRLKNPQKVKKSVYGVTEESQAQSPVHVLSQPIRKTTKEDIRKQITFLNAQIDRHCLKMSKVAESLIAYTEQYVEYDPLITPAEPSNPWISDDVALWDIEMSKEPSQQRVKRWGFSFDEILKDQVGRDQFLRFLESEFSSENLRFWLAVQDLKKQPLQDVAKRVEEIWQEFLAPGAPSAINLDSHSYEITSQNVKDGGRYTFEDAQEHIYKLMKSDSYARFLRSNAYQDLLLAKKKPESEQGRRTSLEKFTRSVANYIPSSPLPLKLIPAPTTTAQQGLLHAIQPSSIYFPHCSQNHQKFQV

SEQ ID NO: 10907 - protein, 383 aa, Artificial Sequence
  Synthetic polypeptide
MQNKARLELADYEAENLARLQRAFARKWEFIFMQAEAQVKIDRKKDKTERKILDSQERAFWDVHRPVPGCVNTTEMDIRKCRRLKNPQKVKKSVYGVTEESQAQSPVHVLSQPIRKTTKEDIRKQITFLNAQIDRHCLKMSKVAESLIAYTEQYVEYDPLITPAEPSNPWISDDVALWDIEMSKEPSQQRVKRWGFSFDEILKDQVGRDQFLRFLESEFSSENLRFWLAVQDLKKQPLQDVAKRVEEIWQEFLAPGAPSAINLDSHSYEITSQNVKDGGRYTFEDAQEHIYKLMKSDSYARFLRSNAYQDLLLAKKKPESEQGRRTSLEKFTRSVANYIPSSPLPLKLIPAPTTTAQQGLLHAIQPSSIYFPHCSQNHQKFQV

SEQ ID NO: 10908 - protein, 126 aa, Artificial Sequence
  Synthetic polypeptide
MSGLSGPPARRGPFPLALLLLFLLGPRLVLAISFHLPINSRKCLREEIHKDLLVTGAYEISDQSGGAGGLRSHLKITDSAGHILYSKEDATKGKFAFTTEDYDMFEVCFESKGTVAHAYNPSTLGG

SEQ ID NO: 10909 - protein, 57 aa, Artificial Sequence
  Synthetic polypeptide
MRPADLLQLVLLLDLPRDLGGMGCSSPPCECHQEEDFRVTCKDIQRIPSLPPSTQTL

SEQ ID NO: 10910 - protein, 281 aa, Artificial Sequence
  Synthetic polypeptide
MRPADLLQLVLLLDLPRDLGGMGCSSPPCECHQEEDFRVTCKDIQRIPSLPPSTQTLKLIETHLRTIPSHAFSNLPNISRIYVSIDVTLQQLESHSFYNLSKVTHIEIRNTRNLTYIDPDALKELPLLKFLGIFNTGLKMFPDLTKVYSTDIFFILEITDNPYMTSIPVNAFQGLCNETLTLKLYNNGFTSVQGYAFNGTKLDAVYLNKNKYLTVIDKDAFGGVYSGPSLLWPHKTRRLGYTERHQGWALTEERPREATARRWPSASQGERPQEKPNLLTL

SEQ ID NO: 10911 - protein, 94 aa, Artificial Sequence
  Synthetic polypeptide
MALRGTLRPLKVRRRREMLPQQVGFVCAVLALVCCASGLFGSLGHKTASASKRVLPDTWRNRKLMAPVNGTQTAKNCTDPVLLCDTTCCMEVFE

SEQ ID NO: 10912 - protein, 30 aa, Artificial Sequence
  Synthetic polypeptide
MAPVNGTQTAKNCTDPVLLCDTTCCMEVFE

SEQ ID NO: 10913 - protein, 77 aa, Artificial Sequence
  Synthetic polypeptide
MLPQQVGFVCAVLALVCCASGLFGSLGHKTASASKRVLPDTWRNRKLMAPVNGTQTAKNCTDPVLLCDTTCCMEVFE

SEQ ID NO: 10914 - protein, 483 aa, Artificial Sequence
  Synthetic polypeptide
MALRGTLRPLKVRRRREMLPQQVGFVCAVLALVCCASGLFGSLGHKTASASKRVLPDTWRNRKLMAPVNGTQTAKNCTDPAIHEFPTDLFSNKERQHGAVLLHILGALYMFYALAIVCDDFFVPSLEKICERLHLSEDVAGATFMAAGSSTPELFASVIGVFITHGDVGVGTIVGSAVFNILCIIGVCGLFAGQVVRLTWWAVCRDSVYYTISVIVLIVFIYDEQIVWWEGLVLIILYVFYILIMKYNVKMQAFFTVKQKSIANGNPVNSELEAGNDFYDGSYDDPSVPLLGQVKEKPQYGKNPVVMVDEIMSSSPPKFTFPEAGLRIMITNKFGPRTRLRMASRIIINERQRLINSANGVSSKPLQNGRHENIENGNVPVENPEDPQQNQEQQPPPQPPPPEPEPVEADFLSPFSVPATAASSLSFLEHTVIPRTAHLPQDLCTCLLLECSFPRYPHAHFLTFFRSLLKCHLFTVTFPDYRI

SEQ ID NO: 10915 - protein, 464 aa, Artificial Sequence
  Synthetic polypeptide
MALRGTLRPLKVRRRREMLPQQVGFVCAVLALVCCASGLFGSLGHKTASASKRVLPDTWRNRKLMAPVNGTQTAKNCTDPAIHEFPTDLFSNKERQHGAVLLHILGALYMFYALAIVCDDFFVPSLEKICERLHLSEDVAGATFMAAGSSTPELFASVIGVFITHGDVGVGTIVGSAVFNILCIIGVCGLFAGQVVRLTWWAVCRDSVYYTISVIVLIVFIYDEQIVWWEGLVLIILYVFYILIMKYNVKMQAFFTVKQKSIANGNPVNSELEAVKEKPQYGKNPVVMVDEIMSSSPPKFTFPEAGLRIMITNKFGPRTRLRMASRIIINERQRLINSANGVSSKPLQNGRHENIENGNVPVENPEDPQQNQEQQPPPQPPPPEPEPVEADFLSPFSVPATAASSLSFLEHTVIPRTAHLPQDLCTCLLLECSFPRYPHAHFLTFFRSLLKCHLFTVTFPDYRI

SEQ ID NO: 10916 - protein, 419 aa, Artificial Sequence
  Synthetic polypeptide
MAPVNGTQTAKNCTDPAIHEFPTDLFSNKERQHGAVLLHILGALYMFYALAIVCDDFFVPSLEKICERLHLSEDVAGATFMAAGSSTPELFASVIGVFITHGDVGVGTIVGSAVFNILCIIGVCGLFAGQVVRLTWWAVCRDSVYYTISVIVLIVFIYDEQIVWWEGLVLIILYVFYILIMKYNVKMQAFFTVKQKSIANGNPVNSELEAGNDFYDGSYDDPSVPLLGQVKEKPQYGKNPVVMVDEIMSSSPPKFTFPEAGLRIMITNKFGPRTRLRMASRIIINERQRLINSANGVSSKPLQNGRHENIENGNVPVENPEDPQQNQEQQPPPQPPPPEPEPVEADFLSPFSVPATAASSLSFLEHTVIPRTAHLPQDLCTCLLLECSFPRYPHAHFLTFFRSLLKCHLFTVTFPDYRI

SEQ ID NO: 10917 - protein, 466 aa, Artificial Sequence
  Synthetic polypeptide
MLPQQVGFVCAVLALVCCASGLFGSLGHKTASASKRVLPDTWRNRKLMAPVNGTQTAKNCTDPAIHEFPTDLFSNKERQHGAVLLHILGALYMFYALAIVCDDFFVPSLEKICERLHLSEDVAGATFMAAGSSTPELFASVIGVFITHGDVGVGTIVGSAVFNILCIIGVCGLFAGQVVRLTWWAVCRDSVYYTISVIVLIVFIYDEQIVWWEGLVLIILYVFYILIMKYNVKMQAFFTVKQKSIANGNPVNSELEAGNDFYDGSYDDPSVPLLGQVKEKPQYGKNPVVMVDEIMSSSPPKFTFPEAGLRIMITNKFGPRTRLRMASRIIINERQRLINSANGVSSKPLQNGRHENIENGNVPVENPEDPQQNQEQQPPPQPPPPEPEPVEADFLSPFSVPATAASSLSFLEHTVIPRTAHLPQDLCTCLLLECSFPRYPHAHFLTFFRSLLKCHLFTVTFPDYRI

SEQ ID NO: 10918 - protein, 447 aa, Artificial Sequence
  Synthetic polypeptide
MLPQQVGFVCAVLALVCCASGLFGSLGHKTASASKRVLPDTWRNRKLMAPVNGTQTAKNCTDPAIHEFPTDLFSNKERQHGAVLLHILGALYMFYALAIVCDDFFVPSLEKICERLHLSEDVAGATFMAAGSSTPELFASVIGVFITHGDVGVGTIVGSAVFNILCIIGVCGLFAGQVVRLTWWAVCRDSVYYTISVIVLIVFIYDEQIVWWEGLVLIILYVFYILIMKYNVKMQAFFTVKQKSIANGNPVNSELEAVKEKPQYGKNPVVMVDEIMSSSPPKFTFPEAGLRIMITNKFGPRTRLRMASRIIINERQRLINSANGVSSKPLQNGRHENIENGNVPVENPEDPQQNQEQQPPPQPPPPEPEPVEADFLSPFSVPATAASSLSFLEHTVIPRTAHLPQDLCTCLLLECSFPRYPHAHFLTFFRSLLKCHLFTVTFPDYRI

SEQ ID NO: 10919 - protein, 349 aa, Artificial Sequence
  Synthetic polypeptide
  misc_feature (1)..(1): Xaa can be any naturally occurring amino acid
XVCDDFFVPSLEKICERLHLSEDVAGATFMAAGSSTPELFASVIGVFITHGDVGVGTIVGSAVFNILCIIGVCGLFAGQVVRLTWWAVCRDSVYYTISVIVLIVFIYDEQIVWWEGLVLIILYVFYILIMKYNVKMQAFFTVKQKSIANGNPVNSELEAVKEKPQYGKNPVVMVDEIMSSSPPKFTFPEAGLRIMITNKFGPRTRLRMASRIIINERQRLINSANGVSSKPLQNGRHENIENGNVPVENPEDPQQNQEQQPPPQPPPPEPEPVEADFLSPFSVPATAASSLSFLEHTVIPRTAHLPQDLCTCLLLECSFPRYPHAHFLTFFRSLLKCHLFTVTFPDYRI

SEQ ID NO: 10920 - protein, 120 aa, Artificial Sequence
  Synthetic polypeptide
MLLRDLVLRRGCCWSSLLLHCALHPLWGFVQVTHGEPQKSCSKVTDSCRHVCQCRPPPPLPPPPPPPPPPRLLSAPAPNSTSCPTEESWWSGLVIIIAVCCASLVFLTVLVIICYKAIKS

SEQ ID NO: 10921 - protein, 67 aa, Artificial Sequence
  Synthetic polypeptide
MSQGRGKYDFYIGLGLAMSSSIFIGGSFILKKKGLLRLARKGSMRAGQGGHAYLKEWLWWAGLLSMN

SEQ ID NO: 10922 - protein, 55 aa, Artificial Sequence
  Synthetic polypeptide
IVRAKRRGTSYLTDIVWWAGTIAMAVGQIGNFLAYTAVPTVLVTPLGALGVPFGY

SEQ ID NO: 10923 - protein, 32 aa, Artificial Sequence
  Synthetic polypeptide
MAVGQIGNFLAYTAVPTVLVTPLGALGVPFGY

SEQ ID NO: 10924 - protein, 107 aa, Artificial Sequence
  Synthetic polypeptide
MGTAAAAAAAAAAAAAGEGARSPSPAAVSLGLGVAVVSSLVNGSTFVLQKKGIVRAKRRGTSYLTDIVWWAGTIAMAVGQIGNFLAYTAVPTVLVTPLGALGVPFGY

SEQ ID NO: 10925 - protein, 71 aa, Artificial Sequence
  Synthetic polypeptide
  misc_feature (1)..(1): Xaa can be any naturally occurring amino acid
XSSLVNGSTFVLQKKGIVRAKRRGTSYLTDIVWWAGTIAMAVGQIGNFLAYTAVPTVLVTPLGALGVPFGY

SEQ ID NO: 10926 - protein, 601 aa, Artificial Sequence
  Synthetic polypeptide
MEREPAGTEEPGPPGRRRRREGRTRTVRSNLLPPPGAEDPAAGAAKGERRRRRGCAQHLADNRLKTTKYTLLSFLPKNLFEQFHRPANVYFVFIALLNFVPAVNAFQPGLALAPVLFILAITAFRDLWEDYSRHRSDHKINHLGCLVFSREEKKYVNRFWKEIHVGDFVRLRCNEIFPADILLLSSSDPDGLCHIETANLDGETNLKRRQVVRGFSELVSEFNPLTFTSVIECEKPNNDLSRFRGCIIHDNGKKAGLYKENLLLRGCTLRNTDAVVGIVIYAGHETKALLNNSGPRYKRSKLERQMNCDVLWCVLLLVCMSLFSAVGHGLWIWRYQEKKSLFYVPKSDGSSLSPVTAAVYSFLTMIIVLQVLIPISLYVSIEIVKACQVYFINQDMQLYDEETDSQLQCRALNITEDLGQIQYIFSDKTGTLTENKMVFRRCTVSGVEYSHDANAQRLARYQEADSEEEEVVPRGGSVSQRGSIGSHQSVRVVHRTQSTKSHRRTGSRAEAKRASMLSKHTAFSSPMEKDITPDPKLLEKVSECDKSLAVARHQEHLLAHLSPELSDVFDFFIALTICNTVVVTSPDQPRTKAMPLFWARP

SEQ ID NO: 10927 - protein, 455 aa, Artificial Sequence
  Synthetic polypeptide
MEREPAGTEEPGPPGRRRRREGRTRTVRSNLLPPPGAEDPAAGAAKGERRRRRGCAQHLADNRLKTTKYTLLSFLPKNLFEQFHRPANVYFVFIALLNFVPAVNAFQPGLALAPVLFILAITAFRDLWEDYSRHRSDHKINHLGCLVFSREEKKYVNRFWKEIHVGDFVRLRCNEIFPADILLLSSSDPDGLCHIETANLDGETNLKRRQVVRGFSELVSEFNPLTFTSVIECEKPNNDLSRFRGCIIHDNGKKAGLYKENLLLRGCTLRNTDAVVGIVIYAGHETKALLNNSGPRYKRSKLERQMNCDVLWCVLLLVCMSLFSAVGHGLWIWRYQEKKSLFYVPKSDGSSLSPVTAAVYSFLTMIIVLQVLIPISLYVSIEIVKACQVYFINQDMQLYDEETDSQLQCRALNITEDLGQIQYIFSDKTGTLTENKMVFRRCTVSGVEYSHDANE

SEQ ID NO: 10928 - protein, 180 aa, Artificial Sequence
  Synthetic polypeptide
MEREPAGTEEPGPPGRRRRREGRTRTVRSNLLPPPGAEDPAAGAAKGERRRRRGCAQHLADNRLKTTKYTLLSFLPKNLFEQFHRPANVYFVFIALLNFVPAVNAFQPGLALAPVLFILAITAFRDLWEDYSRHRSDHKINHLGCLVFSRMQDEHYKMLMKNIKEHLNKWRDFPCSWIGK

SEQ ID NO: 10929 - protein, 187 aa, Artificial Sequence
  Synthetic polypeptide
EAGVRGTEEDGCWVCNLESVSQSQTWQENKLSEYQIDIFFAQTWTDSRLRFNSTMKILTLNSNMVGLIWIPDTIFRNSKTAEAHWITTPNQLLRIWNDGKILYTLRLTINAECQLQLHNFPMDEHSCPLIFSSCQEALIPQLFTQHAKLSLCQAFVLTPLSFWTTLPLNMQDLCPTFVGLFWKFSLS

SEQ ID NO: 10930 - protein, 245 aa, Artificial Sequence
  Synthetic polypeptide
MAPKLLLLLCLFSGLHARSRKVEEDEYEDSSSNQKWVLAPKSQDTDVTLILNKLLREYDKKLRPDIGIKPTVIDVDIYVNSIGPVSSINMEYQIDIFFAQTWTDSRLRFNSTMKILTLNSNMVGLIWIPDTIFRNSKTAEAHWITTPNQLLRIWNDGKILYTLRLTINAECQLQLHNFPMDEHSCPLIFSSCQEALIPQLFTQHAKLSLCQAFVLTPLSFWTTLPLNMQDLCPTFVGLFWKFSLS

SEQ ID NO: 10931 - protein, 78 aa, Artificial Sequence
  Synthetic polypeptide
  misc_feature (1)..(1): Xaa can be any naturally occurring amino acid
XAECQLQLHNFPMDEHSCPLIFSSCQEALIPQLFTQHAKLSLCQAFVLTPLSFWTTLPLNMQDLCPTFVGLFWKFSLS

SEQ ID NO: 10932 - protein, 518 aa, Artificial Sequence
  Synthetic polypeptide
MERNTFSMDCHSKSTAMEETAIWEQHTVTLHRAPGFGFGIAISGGRDNPHFQSGETSIVISDVLKGGPAEGQLQENDRVAMVNGVSMDNVEHAFAVQQLRKSGKNAKITIRRKKKVQIPVSRPDPEPVSDNEEDSYDEEIHDPRSGRSGVVNRRSEKIWPRDRSASRERSLSPRSDRRSVASSQPAKPTKVTLVKSRKNEEYGLRLASHIFVKEISQDSLAARDGNIQEGDVVLKINGTVTENMSLTDAKTLIERSKGKLKMVVQRDERATLLNVPDLSDSIHSANASERDDISEIQSLASDHSGRSHDRPPRRSRSRSPDQRSEPSDHSRHSPQQPSNGSLRSRDEERISKPGAVSTPVKHADDHTPKTVEEVTVERNEKQTPSLPEPKPVYAQVGQPDVDLPVSPSDGVLPNSTHEDGILRPSMKLVKFRKGDSVGLRLAGGNDVGIFVAGVLEDSPAAKEGLEEGDQILRVNNVDFTNIIREEAVLFLLDLPKGEEVTILAQKKKDVSSSAKWKY

SEQ ID NO: 10933 - protein, 514 aa, Artificial Sequence
  Synthetic polypeptide
MSARAAAAKSTAMEETAIWEQHTVTLHRAPGFGFGIAISGGRDNPHFQSGETSIVISDVLKGGPAEGQLQENDRVAMVNGVSMDNVEHAFAVQQLRKSGKNAKITIRRKKKVQIPVSRPDPEPVSDNEEDSYDEEIHDPRSGRSGVVNRRSEKIWPRDRSASRERSLSPRSDRRSVASSQPAKPTKVTLVKSRKNEEYGLRLASHIFVKEISQDSLAARDGNIQEGDVVLKINGTVTENMSLTDAKTLIERSKGKLKMVVQRDERATLLNVPDLSDSIHSANASERDDISEIQSLASDHSGRSHDRPPRRSRSRSPDQRSEPSDHSRHSPQQPSNGSLRSRDEERISKPGAVSTPVKHADDHTPKTVEEVTVERNEKQTPSLPEPKPVYAQVGQPDVDLPVSPSDGVLPNSTHEDGILRPSMKLVKFRKGDSVGLRLAGGNDVGIFVAGVLEDSPAAKEGLEEGDQILRVNNVDFTNIIREEAVLFLLDLPKGEEVTILAQKKKDVSSSAKWKY

SEQ ID NO: 10934 - protein, 51 aa, Artificial Sequence
  Synthetic polypeptide
MERNTFSMDCHSKSTAMEETAIWEQHTVTLHRKWGSDSVTFENLGFHKFKM

SEQ ID NO: 10935 - protein, 140 aa, Artificial Sequence
  Synthetic polypeptide
MRRLEGLCLRRRRRRRGPARERSGDKMKYQKYLTVLQMAIGVTPSNRGSLLPLKRKLWVTPSSENPNGATSSVSQGKPSLRRIKGRLHRSKSLDSMDFCELTSTAMEETAIWEQHTVTLHRKWGSDSVTFENLGFHKFKM

SEQ ID NO: 10936 - protein, 47 aa, Artificial Sequence
  Synthetic polypeptide
MSARAAAAKSTAMEETAIWEQHTVTLHRKWGSDSVTFENLGFHKFKM

SEQ ID NO: 10937 - protein, 1222 aa, Artificial Sequence
  Synthetic polypeptide
MGQKSWIEKTFCKRECIFVIPSMKDSNRCCCGQFTNQHIPPLPSATPSKNEEESKQVETQPEKWSVAKHTQSYPTDSYGVLEFQGGGYSNKAMYIRVSYDTKPDSLLHLMVKDWQLELPKLLISVHGGLQNFEMQPKLKQVFGKGLIKAAMTTGAWIFTGGVSTGVISHVGDALKDHSSKSRGRVCAIGIAPWGIVENKEDLVGKDVTRVYQTMSNPLSKLSVLNNSHTHFILADNGTLGKYGAEVKLRRLLEKHISLQKINTRLGQGVPLVGLVVEGGPNVVSIVLEYLQEEPPIPVVICDGSGRASDILSFAHKYCEEGGIINESLREQLLVTIQKTFNYNKAQSHQLFAIIMECMKKKELVTVFRMGSEGQQDIEMAILTALLKGTNVSAPDQLSLALAWNRVDIARSQIFVFGPHWPPLGSLAPPTDSKATEKEKKPPMATTKGGRGKGKGKKKGKVKEEVEEETDPRKIELLNWVNALEQAMLDALVLDRVDFVKLLIENGVNMQHFLTIPRLEELYNTRLGPPNTLHLLVRDVKKSNLPPDYHISLIDIGLVLEYLMGGAYRCNYTRKNFRTLYNNLFGPKRPKALKLLGMEDDEPPAKGKKKKKKKKEEEIDIDVDDPAVSRFQYPFHELMVWAVLMKRQKMAVFLWQRGEESMAKALVACKLYKAMAHESSESDLVDDISQDLDNNSKDFGQLALELLDQSYKHDEQIAMKLLTYELKNWSNSTCLKLAVAAKHRDFIAHTCSQMLLTDMWMGRLRMRKNPGLKVIMGILLPPTILFLEFRTYDDFSYQTSKENEDGKEKEEENTDANADAGSRKGDEENEHKKQRSIPIGTKICEFYNAPIVKFWFYTISYLGYLLLFNYVILVRMDGWPSLQEWIVISYIVSLALEKIREILMSEPGKLSQKIKVWLQEYWNITDLVAISTFMIGAILRLQNQPYMGYGRVIYCVDIIFWYIRVLDIFGVNKYLGPYVMMIGKMMIDMLYFVVIMLVVLMSFGVARQAILHPEEKPSWKLARNIFYMPYWMIYGEVFADQIDLYAMEINPPCGENLYDEEGKRLPPCIPGAWLTPALMACYLLVANILLVNLLIAVFNNTFFEVKSISNQVWKFQRYQLIMTFHDRPVLPPPMIILSHIYIIIMRLSGRCRKKREGDQEERDRGLKLFLSDEELKRLHEFEEQCVQEHFREKEDEQQSSSDERIRVTSERQHDVPAKRQAPE

SEQ ID NO: 10938 - protein, 315 aa, Artificial Sequence
  Synthetic polypeptide
MKDSNRCCCGQFTNQHIPPLPSATPSKNEEESKQVETQPEKWSVAKHTQSYPTDSYGVLEFQGGGYSNKAMYIRVSYDTKPDSLLHLMVKDWQLELPKLLISVHGGLQNFEMQPKLKQVFGKGLIKAAMTTGAWIFTGGVSTAPCGENLYDEEGKRLPPCIPGAWLTPALMACYLLVANILLVNLLIAVFNNTFFEVKSISNQVWKFQRYQLIMTFHDRPVLPPPMIILSHIYIIIMRLSGRCRKKREGDQEERDRGLKLFLSDEELKRLHEFEEQCVQEHFREKEDEQQSSSDERIRVTSERQHDVPAKRQAPE

SEQ ID NO: 10939 - protein, 1200 aa, Artificial Sequence
  Synthetic polypeptide
MKDSNRCCCGQFTNQHIPPLPSATPSKNEEESKQVETQPEKWSVAKHTQSYPTDSYGVLEFQGGGYSNKAMYIRVSYDTKPDSLLHLMVKDWQLELPKLLISVHGGLQNFEMQPKLKQVFGKGLIKAAMTTGAWIFTGGVSTGVISHVGDALKDHSSKSRGRVCAIGIAPWGIVENKEDLVGKDVTRVYQTMSNPLSKLSVLNNSHTHFILADNGTLGKYGAEVKLRRLLEKHISLQKINTRLGQGVPLVGLVVEGGPNVVSIVLEYLQEEPPIPVVICDGSGRASDILSFAHKYCEEGGIINESLREQLLVTIQKTFNYNKAQSHQLFAIIMECMKKKELVTVFRMGSEGQQDIEMAILTALLKGTNVSAPDQLSLALAWNRVDIARSQIFVFGPHWPPLGSLAPPTDSKATEKEKKPPMATTKGGRGKGKGKKKGKVKEEVEEETDPRKIELLNWVNALEQAMLDALVLDRVDFVKLLIENGVNMQHFLTIPRLEELYNTRLGPPNTLHLLVRDVKKSNLPPDYHISLIDIGLVLEYLMGGAYRCNYTRKNFRTLYNNLFGPKRPKALKLLGMEDDEPPAKGKKKKKKKKEEEIDIDVDDPAVSRFQYPFHELMVWAVLMKRQKMAVFLWQRGEESMAKALVACKLYKAMAHESSESDLVDDISQDLDNNSKDFGQLALELLDQSYKHDEQIAMKLLTYELKNWSNSTCLKLAVAAKHRDFIAHTCSQMLLTDMWMGRLRMRKNPGLKVIMGILLPPTILFLEFRTYDDFSYQTSKENEDGKEKEEENTDANADAGSRKGDEENEHKKQRSIPIGTKICEFYNAPIVKFWFYTISYLGYLLLFNYVILVRMDGWPSLQEWIVISYIVSLALEKIREILMSEPGKLSQKIKVWLQEYWNITDLVAISTFMIGAILRLQNQPYMGYGRVIYCVDIIFWYIRVLDIFGVNKYLGPYVMMIGKMMIDMLYFVVIMLVVLMSFGVARQAILHPEEKPSWKLARNIFYMPYWMIYGEVFADQIDLYAMEINPPCGENLYDEEGKRLPPCIPGAWLTPALMACYLLVANILLVNLLIAVFNNTFFEVKSISNQVWKFQRYQLIMTFHDRPVLPPPMIILSHIYIIIMRLSGRCRKKREGDQEERDRGLKLFLSDEELKRLHEFEEQCVQEHFREKEDEQQSSSDERIRVTSERQHDVPAKRQAPE

SEQ ID NO: 10940 - protein, 1239 aa, Artificial Sequence
  Synthetic polypeptide
MSSFKRGSLKSSTSGSQKGQKSWIEKTFCKRECIFVIPSMKDSNRCCCGQFTNQHIPPLPSATPSKNEEESKQVETQPEKWSVAKHTQSYPTDSYGVLEFQGGGYSNKAMYIRVSYDTKPDSLLHLMVKDWQLELPKLLISVHGGLQNFEMQPKLKQVFGKGLIKAAMTTGAWIFTGGVSTGVISHVGDALKDHSSKSRGRVCAIGIAPWGIVENKEDLVGKDVTRVYQTMSNPLSKLSVLNNSHTHFILADNGTLGKYGAEVKLRRLLEKHISLQKINTRLGQGVPLVGLVVEGGPNVVSIVLEYLQEEPPIPVVICDGSGRASDILSFAHKYCEEGGIINESLREQLLVTIQKTFNYNKAQSHQLFAIIMECMKKKELVTVFRMGSEGQQDIEMAILTALLKGTNVSAPDQLSLALAWNRVDIARSQIFVFGPHWPPLGSLAPPTDSKATEKEKKPPMATTKGGRGKGKGKKKGKVKEEVEEETDPRKIELLNWVNALEQAMLDALVLDRVDFVKLLIENGVNMQHFLTIPRLEELYNTRLGPPNTLHLLVRDVKKSNLPPDYHISLIDIGLVLEYLMGGAYRCNYTRKNFRTLYNNLFGPKRPKALKLLGMEDDEPPAKGKKKKKKKKEEEIDIDVDDPAVSRFQYPFHELMVWAVLMKRQKMAVFLWQRGEESMAKALVACKLYKAMAHESSESDLVDDISQDLDNNSKDFGQLALELLDQSYKHDEQIAMKLLTYELKNWSNSTCLKLAVAAKHRDFIAHTCSQMLLTDMWMGRLRMRKNPGLKVIMGILLPPTILFLEFRTYDDFSYQTSKENEDGKEKEEENTDANADAGSRKGDEENEHKKQRSIPIGTKICEFYNAPIVKFWFYTISYLGYLLLFNYVILVRMDGWPSLQEWIVISYIVSLALEKIREILMSEPGKLSQKIKVWLQEYWNITDLVAISTFMIGAILRLQNQPYMGYGRVIYCVDIIFWYIRVLDIFGVNKYLGPYVMMIGKMMIDMLYFVVIMLVVLMSFGVARQAILHPEEKPSWKLARNIFYMPYWMIYGEVFADQIDLYAMEINPPCGENLYDEEGKRLPPCIPGAWLTPALMACYLLVANILLVNLLIAVFNNTFFEVKSISNQVWKFQRYQLIMTFHDRPVLPPPMIILSHIYIIIMRLSGRCRKKREGDQEERDRGLKLFLSDEELKRLHEFEEQCVQEHFREKEDEQQSSSDERIRVTSERQHDVPAKRQAPE

SEQ ID NO: 10941 - protein, 1124 aa, Artificial Sequence
  Synthetic polypeptide
MYIRVSYDTKPDSLLHLMVKDWQLELPKLLISVHGGLQNFEMQPKLKQVFGKGLIKAAMTTGAWIFTGGVSTGVISHVGDALKDHSSKSRGRVCAIGIAPWGIVENKEDLVGKDVTRVYQTMSNPLSKLSVLNNSHTHFILADNGTLGKYGAEVKLRRLLEKHISLQKINTRLGQGVPLVGLVVEGGPNVVSIVLEYLQEEPPIPVVICDGSGRASDILSFAHKIINESLREQLLVTIQKTFNYNKAQSHQLFAIIMECMKKKELVTVFRMGSEGQQDIEMAILTALLKGTNVSAPDQLSLALAWNRVDIARSQIFVFGPHWPPLGSLAPPTDSKATEKEKKPPMATTKGGRGKGKGKKKGKVKEEVEEETDPRKIELLNWVNALEQAMLDALVLDRVDFVKLLIENGVNMQHFLTIPRLEELYNTRLGPPNTLHLLVRDVKKSNLPPDYHISLIDIGLVLEYLMGGAYRCNYTRKNFRTLYNNLFGPKRPKALKLLGMEDDEPPAKGKKKKKKKKEEEIDIDVDDPAVSRFQYPFHELMVWAVLMKRQKMAVFLWQRGEESMAKALVACKLYKAMAHESSESDLVDDISQDLDNNSKDFGQLALELLDQSYKHDEQIAMKLLTYELKNWSNSTCLKLAVAAKHRDFIAHTCSQMLLTDMWMGRLRMRKNPGLKVIMGILLPPTILFLEFRTYDDFSYQTSKENEDGKEKEEENTDANADAGSRKGDEENEHKKQRSIPIGTKICEFYNAPIVKFWFYTISYLGYLLLFNYVILVRMDGWPSLQEWIVISYIVSLALEKIREILMSEPGKLSQKIKVWLQEYWNITDLVAISTFMIGAILRLQNQPYMGYGRVIYCVDIIFWYIRVLDIFGVNKYLGPYVMMIGKMMIDMLYFVVIMLVVLMSFGVARQAILHPEEKPSWKLARNIFYMPYWMIYGEVFADQIDLYAMEINPPCGENLYDEEGKRLPPCIPGAWLTPALMACYLLVANILLVNLLIAVFNNTFFEVKSISNQVWKFQRYQLIMTFHDRPVLPPPMIILSHIYIIIMRLSGRCRKKREGDQEERDRGLKLFLSDEELKRLHEFEEQCVQEHFREKEDEQQSSSDERIRVTSERQHDVPAKRQAPE

SEQ ID NO: 10942 - protein, 32 aa, Artificial Sequence
  Synthetic polypeptide
MGQKSWIEKTFCKRECIFVIPSMKDSNRLGTR

SEQ ID NO: 10943 - protein, 10 aa, Artificial Sequence
  Synthetic polypeptide
MKDSNRLGTR

SEQ ID NO: 10944 - protein, 49 aa, Artificial Sequence
  Synthetic polypeptide
MSSFKRGSLKSSTSGSQKGQKSWIEKTFCKRECIFVIPSMKDSNRLGTR

SEQ ID NO: 10945 - protein, 34 aa, Artificial Sequence; identical to SEQ ID NO: 1355
  Synthetic polypeptide

SEQ ID NO: 10946 - protein, 12 aa, Artificial Sequence
  Synthetic polypeptide
MKDSNRHSKRLG

SEQ ID NO: 10947 - protein, 51 aa, Artificial Sequence; identical to SEQ ID NO: 1272
  Synthetic polypeptide

SEQ ID NO: 10948 - protein, 31 aa, Artificial Sequence; identical to SEQ ID NO: 1366
  Synthetic polypeptide

SEQ ID NO: 10949 - protein, 9 aa, Artificial Sequence
  Synthetic polypeptide
MKDSNSSAR

SEQ ID NO: 10950 - protein, 48 aa, Artificial Sequence; identical to SEQ ID NO: 1288
  Synthetic polypeptide

SEQ ID NO: 10951 - protein, 1282 aa, Artificial Sequence
  Synthetic polypeptide
MEGTHCTLQLHKPITELCYISFCLPKGEVRGFSYKGTVTLDRSNKGFHNCYQVREESDIISLSQEPDEHPGDIFFKQTPTKDILTELYKLTTERERLLTNLLSSDHILGITMGNQEGKLQELSVSLAPEDDCFQSAGDWQGELPVGPLNKRSTHGNKKPRRSSGRRESFGALPQKRTKRKGRGGRESAPLMGKDKICSSHSLPLSRTRPNLWVLEEKGNLLPNGALACSLQRRESCPPDIPKTPDTDLGFGSFETAFKDTGLGREVLPPDCSSTEAGGDGIRRPPSGLEHQQTGLSESHQDPEKHPEAEKDEMEKPAKRTCKQKPVSKVVAKVQDLSSQVQRVVKTHSKGKETIAIRPAAHAEFVPKADLLTLPGAEAGAHGSRRQGKERQGDRSSQSPAGETASISSVSASAEGAVNKVPLKVIESEKLDEAPEGKRLGFPVHTSVPHTRPETRNKRRAGLPLGGHKSLFLDLPHKVGPDSSQPRGDKKKPSPPAPAALGKVFNNSASQSSTHKQTSPVPSPLSPRLPSPQQHHRILRLPALPGEREAALNDSPCRKSRVFSGCVSADTLEPPSSAKVTETKGASPAFLRAGQPRLVPGETLEKSLGPGKTTAEPQHQSPPEYQAAILHLKREHKEEIENLQAQFELRAFHIRGEHAMITARLEETIENLKHELEHRWRGGCEERKDVCISTDDDCPPKTFRNVCVQTDRETFLKPCESESKTTRSNQLVPKKLNISSLSQLSPPNDHKDIHAALQPMEGMASNQQKALPPPPASIPPPPPLPSGLGSLSPAPPMPPVSAGPPLPPPPPPPPPLPPPSSAGPPPPPPPPPLPNSPAPPNPGGPPPAPPPPGLAPPPPPGLFFGLGSSSSQCPRKPAIEPSCPMKPLYWTRIQISDRSQNATPTLWDSLEEPDIRDPSEFEYLFSKDTTQQKKKPLSETYEKKNKVKKIIKLLDGKRSQTVGILISSLHLEMKDIQQAIFNVDDSVVDLETLAALYENRAQEDELVKIRKYYETSKEEELKLLDKPEQFLHELAQIPNFAERAQCIIFRSVFSEGITSLHRKVEIITRASKDLLHVKSVKDILALILAFGNYMNGGNRTRGQADGYSLEILPKLKDVKSRDNGINLVDYVVKYYLRYYDQEAGTEKSVFPLPEPQDFFLASQVKFEDLIKDLRKLKRQLEASEKQMVVVCKESPKEYLQPFKDKLEEFFQKAKTWNQAKCPSMRDWIKKMWHIYTMEYYAVIKKGKFMPFAGTRMKPETIILSKLSQGQKTKHCMFSLIGGS

SEQ ID NO: 10952 - protein, 1380 aa, Artificial Sequence
  Synthetic polypeptide
MEGTHCTLQLHKPITELCYISFCLPKGEVRGFSYKGTVTLDRSNKGFHNCYQVREESDIISLSQEPDEHPGDIFFKQTPTKDILTELYKLTTERERLLTNLLSSDHILGITMGNQEGKLQELSVSLAPEDDCFQSAGDWQGELPVGPLNKRSTHGNKKPRRSSGRRESFGALPQKRTKRKGRGGRESAPLMGKDKICSSHSLPLSRTRPNLWVLEEKGNLLPNGALACSLQRRESCPPDIPKTPDTDLGFGSFETAFKDTGLGREVLPPDCSSTEAGGDGIRRPPSGLEHQQTGLSESHQDPEKHPEAEKDEMEKPAKRTCKQKPVSKVVAKVQDLSSQVQRVVKTHSKGKETIAIRPAAHAEFVPKADLLTLPGAEAGAHGSRRQGKERQGDRSSQSPAGETASISSVSASAEGAVNKVPLKVIESEKLDEAPEGKRLGFPVHTSVPHTRPETRNKRRAGLPLGGHKSLFLDLPHKVGPDSSQPRGDKKKPSPPAPAALGKVFNNSASQSSTHKQTSPVPSPLSPRLPSPQQHHRILRLPALPGEREAALNDSPCRKSRVFSGCVSADTLEPPSSAKVTETKGASPAFLRAGQPRLVPGETLEKSLGPGKTTAEPQHQSPPGISSEGFPWDGFNEQTPKDLPNRDGGAWVLGYRAGPACPFLLHEEREKSNRSELYLDLHPDHSLTEQDDRTPGRLQAVWPPPKTKDTEEKVGLKYTEAEYQAAILHLKREHKEEIENLQAQFELRAFHIRGEHAMITARLEETIENLKHELEHRWRGGCEERKDVCISTDDDCPPKTFRNVCVQTDRETFLKPCESESKTTRSNQLVPKKLNISSLSQLSPPNDHKDIHAALQPMEGMASNQQKALPPPPASIPPPPPLPSGLGSLSPAPPMPPVSAGPPLPPPPPPPPPLPPPSSAGPPPPPPPPPLPNSPAPPNPGGPPPAPPPPGLAPPPPPGLFFGLGSSSSQCPRKPAIEPSCPMKPLYWTRIQISDRSQNATPTLWDSLEEPDIRDPSEFEYLFSKDTTQQKKKPLSETYEKKNKVKKIIKLLDGKRSQTVGILISSLHLEMKDIQQAIFNVDDSVVDLETLAALYENRAQEDELVKIRKYYETSKEEELKLLDKPEQFLHELAQIPNFAERAQCIIFRSVFSEGITSLHRKVEIITRASKDLLHVKSVKDILALILAFGNYMNGGNRTRGQADGYSLEILPKLKDVKSRDNGINLVDYVVKYYLRYYDQEAGTEKSVFPLPEPQDFFLASQVKFEDLIKDLRKLKRQLEASEKQMVVVCKESPKEYLQPFKDKLEEFFQKAKTWNQAKCPSMRDWIKKMWHIYTMEYYAVIKKGKFMPFAGTRMKPETIILSKLSQGQKTKHCMFSLIGGS

SEQ ID NO: 10953 - protein, 1157 aa, Artificial Sequence
  Synthetic polypeptide
MENVDNSLDGSDVSEPAKPEAGLEVAQSILSKFSMKSLFGFTSKLESVNPEEEDAVLKAFHSLDVNPTSQQDDSSNGLDPQEAGSRVSPDLGNDEKIASVETESEGSQRKEAGTSLLAQELLPLSTLKGTKDDVICVRGTLVHTTSDSDSDDGGQEPEEGSSTNGPKSPSGVLSEPSQESKENPGGFRENTVTGEMNGAELCAEDPQRIPPEMSSKLEAGNGGLQTERRPSQDQVGEEGSQDLPAVTNQNSSVGITESASSKKEVSGEKSFQLPAFFSGLRVLKKGATAEGGETITEIKPKDGDLALLKLTQPVQKSLVQAGLQTVKSEKKATDPKATPTLLEQLSLLLNIDMPKTEPKGADPESPRREEMGCNADQESQSGPGVPQTQGGEVKPKSPETALEAFKALFIRPPRKGTTADTSELEALKRKMRHEKESLRAVFERSNSKPADGPSDSKSPDHSLTEQDDRTPGRLQAVWPPPKTKDTEEKVGLKYTEAEYQAAILHLKREHKEEIENLQAQFELRAFHIRGEHAMITARLEETIENLKHELEHRWRGGCEERKDVCISTDDDCPPKTFRNVCVQTDRETFLKPCESESKTTRSNQLVPKKLNISSLSQLSPPNDHKDIHAALQPMEGMASNQQKALPPPPASIPPPPPLPSGLGSLSPAPPMPPVSAGPPLPPPPPPPPPLPPPSSAGPPPPPPPPPLPNSPAPPNPGGPPPAPPPPGLAPPPPPGLFFGLGSSSSQCPRKPAIEPSCPMKPLYWTRIQISDRSQNATPTLWDSLEEPDIRDPSEFEYLFSKDTTQQKKKPLSETYEKKNKVKKIIKLLDGKRSQTVGILISSLHLEMKDIQQAIFNVDDSVVDLETLAALYENRAQEDELVKIRKYYETSKEEELKLLDKPEQFLHELAQIPNFAERAQCIIFRSVFSEGITSLHRKVEIITRASKDLLHVKSVKDILALILAFGNYMNGGNRTRGQADGYSLEILPKLKDVKSRDNGINLVDYVVKYYLRYYDQEAGTEKSVFPLPEPQDFFLASQVKFEDLIKDLRKLKRQLEASEKQMVVVCKESPKEYLQPFKDKLEEFFQKAKTWNQAKCPSMRDWIKKMWHIYTMEYYAVIKKGKFMPFAGTRMKPETIILSKLSQGQKTKHCMFSLIGGS

SEQ ID NO: 10954 - protein, 130 aa, Artificial Sequence
  Synthetic polypeptide
  misc_feature (1)..(1): Xaa can be any naturally occurring amino acid
XPQDFFLASQVKFEDLIKDLRKLKRQLEASEKQMVVVCKESPKEYLQPFKDKLEEFFQKAKTWNQAKCPSMRDWIKKMWHIYTMEYYAVIKKGKFMPFAGTRMKPETIILSKLSQGQKTKHCMFSLIGGS

SEQ ID NO: 10955 - protein, 1231 aa, Artificial Sequence
  Synthetic polypeptide
MEGTHCTLQLHKPITELCYISFCLPKGEVRGFSYKGTVTLDRSNKGFHNCYQVREESDIISLSQEPDEHPGDIFFKQTPTKDILTELYKLTTERERLLTNLLSSDHILGITMGNQEGKLQELSVSLAPEDDCFQSAGDWQGELPVGPLNKRSTHGNKKPRRSSGRRESFGALPQKRTKRKGRGGRESAPLMGKDKICSSHSLPLSRTRPNLWVLEEKGNLLPNGALACSLQRRESCPPDIPKTPDTDLGFGSFETAFKDTGLGREVLPPDCSSTEAGGDGIRRPPSGLEHQQTGLSESHQDPEKHPEAEKDEMEKPAKRTCKQKPVSKVVAKVQDLSSQVQRVVKTHSKGKETIAIRPAAHAEFVPKADLLTLPGAEAGAHGSRRQGKERQGDRSSQSPAGETASISSVSASAEGAVNKVPLKVIESEKLDEAPEGKRLGFPVHTSVPHTRPETRNKRRAGLPLGGHKSLFLDLPHKVGPDSSQPRGDKKKPSPPAPAALGKVFNNSASQSSTHKQTSPVPSPLSPRLPSPQQHHRILRLPALPGEREAALNDSPCRKSRVFSGCVSADTLEPPSSAKVTETKGASPAFLRAGQPRLVPGETLEKSLGPGKTTAEPQHQSPPEYQAAILHLKREHKEEIENLQAQFELRAFHIRGEHAMITARLEETIENLKHELEHRWRGGCEERKDVCISTDDDCPPKTFRNVCVQTDRETFLKPCESESKTTRSNQLVPKKLNISSLSQLSPPNDHKDIHAALQPMEGMASNQQKALPPPPASIPPPPPLPSGLGSLSPAPPMPPVSAGPPLPPPPPPPPPLPPPSSAGPPPPPPPPPLPNSPAPPNPGGPPPAPPPPGLAPPPPPGLFFGLGSSSSQCPRKPAIEPSCPMKPLYWTRIQISDRSQNATPTLWDSLEEPDIRDPSEFEYLFSKDTTQQKKKPLSETYEKKNKVKKIIKLLDGKRSQTVGILISSLHLEMKDIQQAIFNVDDSVVDLETLAALYENRAQEDELVKIRKYYETSKEEELKLLDKPEQFLHELAQIPNFAERAQCIIFRSVFSEGITSLHRKVEIITRASKDLLHVKSVKDILALILAFGNYMNGGNRTRGQADGYSLEILPKLKDVKSRDNGINLVDYVVKYYLRYYDQEAGTEKSVFPLPEPQDFFLASQVKFEDLIKDLRKLKRQLEASEKQMVVVCKESPKEYLQPFKDKLEEFFQKGVIINITLKSIPEETINYLA

SEQ ID NO: 10956 - protein, 1329 aa, Artificial Sequence
  Synthetic polypeptide
MEGTHCTLQLHKPITELCYISFCLPKGEVRGFSYKGTVTLDRSNKGFHNCYQVREESDIISLSQEPDEHPGDIFFKQTPTKDILTELYKLTTERERLLTNLLSSDHILGITMGNQEGKLQELSVSLAPEDDCFQSAGDWQGELPVGPLNKRSTHGNKKPRRSSGRRESFGALPQKRTKRKGRGGRESAPLMGKDKICSSHSLPLSRTRPNLWVLEEKGNLLPNGALACSLQRRESCPPDIPKTPDTDLGFGSFETAFKDTGLGREVLPPDCSSTEAGGDGIRRPPSGLEHQQTGLSESHQDPEKHPEAEKDEMEKPAKRTCKQKPVSKVVAKVQDLSSQVQRVVKTHSKGKETIAIRPAAHAEFVPKADLLTLPGAEAGAHGSRRQGKERQGDRSSQSPAGETASISSVSASAEGAVNKVPLKVIESEKLDEAPEGKRLGFPVHTSVPHTRPETRNKRRAGLPLGGHKSLFLDLPHKVGPDSSQPRGDKKKPSPPAPAALGKVFNNSASQSSTHKQTSPVPSPLSPRLPSPQQHHRILRLPALPGEREAALNDSPCRKSRVFSGCVSADTLEPPSSAKVTETKGASPAFLRAGQPRLVPGETLEKSLGPGKTTAEPQHQSPPGISSEGFPWDGFNEQTPKDLPNRDGGAWVLGYRAGPACPFLLHEEREKSNRSELYLDLHPDHSLTEQDDRTPGRLQAVWPPPKTKDTEEKVGLKYTEAEYQAAILHLKREHKEEIENLQAQFELRAFHIRGEHAMITARLEETIENLKHELEHRWRGGCEERKDVCISTDDDCPPKTFRNVCVQTDRETFLKPCESESKTTRSNQLVPKKLNISSLSQLSPPNDHKDIHAALQPMEGMASNQQKALPPPPASIPPPPPLPSGLGSLSPAPPMPPVSAGPPLPPPPPPPPPLPPPSSAGPPPPPPPPPLPNSPAPPNPGGPPPAPPPPGLAPPPPPGLFFGLGSSSSQCPRKPAIEPSCPMKPLYWTRIQISDRSQNATPTLWDSLEEPDIRDPSEFEYLFSKDTTQQKKKPLSETYEKKNKVKKIIKLLDGKRSQTVGILISSLHLEMKDIQQAIFNVDDSVVDLETLAALYENRAQEDELVKIRKYYETSKEEELKLLDKPEQFLHELAQIPNFAERAQCIIFRSVFSEGITSLHRKVEIITRASKDLLHVKSVKDILALILAFGNYMNGGNRTRGQADGYSLEILPKLKDVKSRDNGINLVDYVVKYYLRYYDQEAGTEKSVFPLPEPQDFFLASQVKFEDLIKDLRKLKRQLEASEKQMVVVCKESPKEYLQPFKDKLEEFFQKGVIINITLKSIPEETINYLA

SEQ ID NO: 10957 - protein, 1106 aa, Artificial Sequence
  Synthetic polypeptide
MENVDNSLDGSDVSEPAKPEAGLEVAQSILSKFSMKSLFGFTSKLESVNPEEEDAVLKAFHSLDVNPTSQQDDSSNGLDPQEAGSRVSPDLGNDEKIASVETESEGSQRKEAGTSLLAQELLPLSTLKGTKDDVICVRGTLVHTTSDSDSDDGGQEPEEGSSTNGPKSPSGVLSEPSQESKENPGGFRENTVTGEMNGAELCAEDPQRIPPEMSSKLEAGNGGLQTERRPSQDQVGEEGSQDLPAVTNQNSSVGITESASSKKEVSGEKSFQLPAFFSGLRVLKKGATAEGGETITEIKPKDGDLALLKLTQPVQKSLVQAGLQTVKSEKKATDPKATPTLLEQLSLLLNIDMPKTEPKGADPESPRREEMGCNADQESQSGPGVPQTQGGEVKPKSPETALEAFKALFIRPPRKGTTADTSELEALKRKMRHEKESLRAVFERSNSKPADGPSDSKSPDHSLTEQDDRTPGRLQAVWPPPKTKDTEEKVGLKYTEAEYQAAILHLKREHKEEIENLQAQFELRAFHIRGEHAMITARLEETIENLKHELEHRWRGGCEERKDVCISTDDDCPPKTFRNVCVQTDRETFLKPCESESKTTRSNQLVPKKLNISSLSQLSPPNDHKDIHAALQPMEGMASNQQKALPPPPASIPPPPPLPSGLGSLSPAPPMPPVSAGPPLPPPPPPPPPLPPPSSAGPPPPPPPPPLPNSPAPPNPGGPPPAPPPPGLAPPPPPGLFFGLGSSSSQCPRKPAIEPSCPMKPLYWTRIQISDRSQNATPTLWDSLEEPDIRDPSEFEYLFSKDTTQQKKKPLSETYEKKNKVKKIIKLLDGKRSQTVGILISSLHLEMKDIQQAIFNVDDSVVDLETLAALYENRAQEDELVKIRKYYETSKEEELKLLDKPEQFLHELAQIPNFAERAQCIIFRSVFSEGITSLHRKVEIITRASKDLLHVKSVKDILALILAFGNYMNGGNRTRGQADGYSLEILPKLKDVKSRDNGINLVDYVVKYYLRYYDQEAGTEKSVFPLPEPQDFFLASQVKFEDLIKDLRKLKRQLEASEKQMVVVCKESPKEYLQPFKDKLEEFFQKGVIINITLKSIPEETINYLA

SEQ ID NO: 10958 - protein, 79 aa, Artificial Sequence
  Synthetic polypeptide
  misc_feature (1)..(1): Xaa can be any naturally occurring amino acid
XPQDFFLASQVKFEDLIKDLRKLKRQLEASEKQMVVVCKESPKEYLQPFKDKLEEFFQKGVIINITLKSIPEETINYLA

SEQ ID NO: 10959 - protein, 1218 aa, Artificial Sequence
  Synthetic polypeptide
MEGTHCTLQLHKPITELCYISFCLPKGEVRGFSYKGTVTLDRSNKGFHNCYQVREESDIISLSQEPDEHPGDIFFKQTPTKDILTELYKLTTERERLLTNLLSSDHILGITMGNQEGKLQELSVSLAPEDDCFQSAGDWQGELPVGPLNKRSTHGNKKPRRSSGRRESFGALPQKRTKRKGRGGRESAPLMGKDKICSSHSLPLSRTRPNLWVLEEKGNLLPNGALACSLQRRESCPPDIPKTPDTDLGFGSFETAFKDTGLGREVLPPDCSSTEAGGDGIRRPPSGLEHQQTGLSESHQDPEKHPEAEKDEMEKPAKRTCKQKPVSKVVAKVQDLSSQVQRVVKTHSKGKETIAIRPAAHAEFVPKADLLTLPGAEAGAHGSRRQGKERQGDRSSQSPAGETASISSVSASAEGAVNKVPLKVIESEKLDEAPEGKRLGFPVHTSVPHTRPETRNKRRAGLPLGGHKSLFLDLPHKVGPDSSQPRGDKKKPSPPAPAALGKVFNNSASQSSTHKQTSPVPSPLSPRLPSPQQHHRILRLPALPGEREAALNDSPCRKSRVFSGCVSADTLEPPSSAKVTETKGASPAFLRAGQPRLVPGETLEKSLGPGKTTAEPQHQSPPEYQAAILHLKREHKEEIENLQAQFELRAFHIRGEHAMITARLEETIENLKHELEHRWRGGCEERKDVCISTDDDCPPKTFRNVCVQTDRETFLKPCESESKTTRSNQLVPKKLNISSLSQLSPPNDHKDIHAALQPMEGMASNQQKALPPPPASIPPPPPLPSGLGSLSPAPPMPPVSAGPPLPPPPPPPPPLPPPSSAGPPPPPPPPPLPNSPAPPNPGGPPPAPPPPGLAPPPPPGLFFGLGSSSSQCPRKPAIEPSCPMKPLYWTRIQISDRSQNATPTLWDSLEEPDIRDPSEFEYLFSKDTTQQKKKPLSETYEKKNKVKKIIKLLDGKRSQTVGILISSLHLEMKDIQQAIFNVDDSVVDLETLAALYENRAQEDELVKIRKYYETSKEEELKLLDKPEQFLHELAQIPNFAERAQCIIFRSVFSEGITSLHRKVEIITRASKDLLHVKSVKDILALILAFGNYMNGGNRTRGQADGYSLEILPKLKDVKSRDNGINLVDYVVKYYLRYYDQEAGTEKSVFPLPEPQDFFLASQVKFEDLIKDLRKLKRQLEASEKQMVVVCKESPKEYLQPFKDKLEEFFQKVQMKDPG

SEQ ID NO: 10960 - protein, 1316 aa, Artificial Sequence
  Synthetic polypeptide
MEGTHCTLQLHKPITELCYISFCLPKGEVRGFSYKGTVTLDRSNKGFHNCYQVREESDIISLSQEPDEHPGDIFFKQTPTKDILTELYKLTTERERLLTNLLSSDHILGITMGNQEGKLQELSVSLAPEDDCFQSAGDWQGELPVGPLNKRSTHGNKKPRRSSGRRESFGALPQKRTKRKGRGGRESAPLMGKDKICSSHSLPLSRTRPNLWVLEEKGNLLPNGALACSLQRRESCPPDIPKTPDTDLGFGSFETAFKDTGLGREVLPPDCSSTEAGGDGIRRPPSGLEHQQTGLSESHQDPEKHPEAEKDEMEKPAKRTCKQKPVSKVVAKVQDLSSQVQRVVKTHSKGKETIAIRPAAHAEFVPKADLLTLPGAEAGAHGSRRQGKERQGDRSSQSPAGETASISSVSASAEGAVNKVPLKVIESEKLDEAPEGKRLGFPVHTSVPHTRPETRNKRRAGLPLGGHKSLFLDLPHKVGPDSSQPRGDKKKPSPPAPAALGKVFNNSASQSSTHKQTSPVPSPLSPRLPSPQQHHRILRLPALPGEREAALNDSPCRKSRVFSGCVSADTLEPPSSAKVTETKGASPAFLRAGQPRLVPGETLEKSLGPGKTTAEPQHQSPPGISSEGFPWDGFNEQTPKDLPNRDGGAWVLGYRAGPACPFLLHEEREKSNRSELYLDLHPDHSLTEQDDRTPGRLQAVWPPPKTKDTEEKVGLKYTEAEYQAAILHLKREHKEEIENLQAQFELRAFHIRGEHAMITARLEETIENLKHELEHRWRGGCEERKDVCISTDDDCPPKTFRNVCVQTDRETFLKPCESESKTTRSNQLVPKKLNISSLSQLSPPNDHKDIHAALQPMEGMASNQQKALPPPPASIPPPPPLPSGLGSLSPAPPMPPVSAGPPLPPPPPPPPPLPPPSSAGPPPPPPPPPLPNSPAPPNPGGPPPAPPPPGLAPPPPPGLFFGLGSSSSQCPRKPAIEPSCPMKPLYWTRIQISDRSQNATPTLWDSLEEPDIRDPSEFEYLFSKDTTQQKKKPLSETYEKKNKVKKIIKLLDGKRSQTVGILISSLHLEMKDIQQAIFNVDDSVVDLETLAALYENRAQEDELVKIRKYYETSKEEELKLLDKPEQFLHELAQIPNFAERAQCIIFRSVFSEGITSLHRKVEIITRASKDLLHVKSVKDILALILAFGNYMNGGNRTRGQADGYSLEILPKLKDVKSRDNGINLVDYVVKYYLRYYDQEAGTEKSVFPLPEPQDFFLASQVKFEDLIKDLRKLKRQLEASEKQMVVVCKESPKEYLQPFKDKLEEFFQKVQMKDPG

SEQ ID NO: 10961 - protein, 1093 aa, Artificial Sequence
  Synthetic polypeptide
MENVDNSLDGSDVSEPAKPEAGLEVAQSILSKFSMKSLFGFTSKLESVNPEEEDAVLKAFHSLDVNPTSQQDDSSNGLDPQEAGSRVSPDLGNDEKIASVETESEGSQRKEAGTSLLAQELLPLSTLKGTKDDVICVRGTLVHTTSDSDSDDGGQEPEEGSSTNGPKSPSGVLSEPSQESKENPGGFRENTVTGEMNGAELCAEDPQRIPPEMSSKLEAGNGGLQTERRPSQDQVGEEGSQDLPAVTNQNSSVGITESASSKKEVSGEKSFQLPAFFSGLRVLKKGATAEGGETITEIKPKDGDLALLKLTQPVQKSLVQAGLQTVKSEKKATDPKATPTLLEQLSLLLNIDMPKTEPKGADPESPRREEMGCNADQESQSGPGVPQTQGGEVKPKSPETALEAFKALFIRPPRKGTTADTSELEALKRKMRHEKESLRAVFERSNSKPADGPSDSKSPDHSLTEQDDRTPGRLQAVWPPPKTKDTEEKVGLKYTEAEYQAAILHLKREHKEEIENLQAQFELRAFHIRGEHAMITARLEETIENLKHELEHRWRGGCEERKDVCISTDDDCPPKTFRNVCVQTDRETFLKPCESESKTTRSNQLVPKKLNISSLSQLSPPNDHKDIHAALQPMEGMASNQQKALPPPPASIPPPPPLPSGLGSLSPAPPMPPVSAGPPLPPPPPPPPPLPPPSSAGPPPPPPPPPLPNSPAPPNPGGPPPAPPPPGLAPPPPPGLFFGLGSSSSQCPRKPAIEPSCPMKPLYWTRIQISDRSQNATPTLWDSLEEPDIRDPSEFEYLFSKDTTQQKKKPLSETYEKKNKVKKIIKLLDGKRSQTVGILISSLHLEMKDIQQAIFNVDDSVVDLETLAALYENRAQEDELVKIRKYYETSKEEELKLLDKPEQFLHELAQIPNFAERAQCIIFRSVFSEGITSLHRKVEIITRASKDLLHVKSVKDILALILAFGNYMNGGNRTRGQADGYSLEILPKLKDVKSRDNGINLVDYVVKYYLRYYDQEAGTEKSVFPLPEPQDFFLASQVKFEDLIKDLRKLKRQLEASEKQMVVVCKESPKEYLQPFKDKLEEFFQKVQMKDPG

SEQ ID NO: 10962 - protein, 66 aa, Artificial Sequence
  Synthetic polypeptide
  misc_feature (1)..(1): Xaa can be any naturally occurring amino acid
XPQDFFLASQVKFEDLIKDLRKLKRQLEASEKQMVVVCKESPKEYLQPFKDKLEEFFQKVQMKDPG

SEQ ID NO: 10963 - protein, 650 aa, Artificial Sequence
  Synthetic polypeptide
MEGTHCTLQLHKPITELCYISFCLPKGEVRGFSYKGTVTLDRSNKGFHNCYQVREESDIISLSQEPDEHPGDIFFKQTPTKDILTELYKLTTERERLLTNLLSSDHILGITMGNQEGKLQELSVSLAPEDDCFQSAGDWQGELPVGPLNKRSTHGNKKPRRSSGRRESFGALPQKRTKRKGRGGRESAPLMGKDKICSSHSLPLSRTRPNLWVLEEKGNLLPNGALACSLQRRESCPPDIPKTPDTDLGFGSFETAFKDTGLGREVLPPDCSSTEAGGDGIRRPPSGLEHQQTGLSESHQDPEKHPEAEKDEMEKPAKRTCKQKPVSKVVAKVQDLSSQVQRVVKTHSKGKETIAIRPAAHAEFVPKADLLTLPGAEAGAHGSRRQGKERQGDRSSQSPAGETASISSVSASAEGAVNKVPLKVIESEKLDEAPEGKRLGFPVHTSVPHTRPETRNKRRAGLPLGGHKSLFLDLPHKVGPDSSQPRGDKKKPSPPAPAALGKVFNNSASQSSTHKQTSPVPSPLSPRLPSPQQHHRILRLPALPGEREAALNDSPCRKSRVFSGCVSADTLEPPSSAKVTETKGASPAFLRAGQPRLVPGETLEKSLGPGKTTAEPQHQSPPEYQAAILHLKREHKEEIENLQLWDLIQI

SEQ ID NO: 10964 - protein, 748 aa, Artificial Sequence
  Synthetic polypeptide
MEGTHCTLQLHKPITELCYISFCLPKGEVRGFSYKGTVTLDRSNKGFHNCYQVREESDIISLSQEPDEHPGDIFFKQTPTKDILTELYKLTTERERLLTNLLSSDHILGITMGNQEGKLQELSVSLAPEDDCFQSAGDWQGELPVGPLNKRSTHGNKKPRRSSGRRESFGALPQKRTKRKGRGGRESAPLMGKDKICSSHSLPLSRTRPNLWVLEEKGNLLPNGALACSLQRRESCPPDIPKTPDTDLGFGSFETAFKDTGLGREVLPPDCSSTEAGGDGIRRPPSGLEHQQTGLSESHQDPEKHPEAEKDEMEKPAKRTCKQKPVSKVVAKVQDLSSQVQRVVKTHSKGKETIAIRPAAHAEFVPKADLLTLPGAEAGAHGSRRQGKERQGDRSSQSPAGETASISSVSASAEGAVNKVPLKVIESEKLDEAPEGKRLGFPVHTSVPHTRPETRNKRRAGLPLGGHKSLFLDLPHKVGPDSSQPRGDKKKPSPPAPAALGKVFNNSASQSSTHKQTSPVPSPLSPRLPSPQQHHRILRLPALPGEREAALNDSPCRKSRVFSGCVSADTLEPPSSAKVTETKGASPAFLRAGQPRLVPGETLEKSLGPGKTTAEPQHQSPPGISSEGFPWDGFNEQTPKDLPNRDGGAWVLGYRAGPACPFLLHEEREKSNRSELYLDLHPDHSLTEQDDRTPGRLQAVWPPPKTKDTEEKVGLKYTEAEYQAAILHLKREHKEEIENLQLWDLIQI

SEQ ID NO: 10965 - protein, 525 aa, Artificial Sequence
  Synthetic polypeptide
MENVDNSLDGSDVSEPAKPEAGLEVAQSILSKFSMKSLFGFTSKLESVNPEEEDAVLKAFHSLDVNPTSQQDDSSNGLDPQEAGSRVSPDLGNDEKIASVETESEGSQRKEAGTSLLAQELLPLSTLKGTKDDVICVRGTLVHTTSDSDSDDGGQEPEEGSSTNGPKSPSGVLSEPSQESKENPGGFRENTVTGEMNGAELCAEDPQRIPPEMSSKLEAGNGGLQTERRPSQDQVGEEGSQDLPAVTNQNSSVGITESASSKKEVSGEKSFQLPAFFSGLRVLKKGATAEGGETITEIKPKDGDLALLKLTQPVQKSLVQAGLQTVKSEKKATDPKATPTLLEQLSLLLNIDMPKTEPKGADPESPRREEMGCNADQESQSGPGVPQTQGGEVKPKSPETALEAFKALFIRPPRKGTTADTSELEALKRKMRHEKESLRAVFERSNSKPADGPSDSKSPDHSLTEQDDRTPGRLQAVWPPPKTKDTEEKVGLKYTEAEYQAAILHLKREHKEEIENLQLWDLIQI

SEQ ID NO: 10966 - protein, 730 aa, Artificial Sequence
  Synthetic polypeptide
MEGTHCTLQLHKPITELCYISFCLPKGEVRGFSYKGTVTLDRSNKGFHNCYQVREESDIISLSQEPDEHPGDIFFKQTPTKDILTELYKLTTERERLLTNLLSSDHILGITMGNQEGKLQELSVSLAPEDDCFQSAGDWQGELPVGPLNKRSTHGNKKPRRSSGRRESFGALPQKRTKRKGRGGRESAPLMGKDKICSSHSLPLSRTRPNLWVLEEKGNLLPNGALACSLQRRESCPPDIPKTPDTDLGFGSFETAFKDTGLGREVLPPDCSSTEAGGDGIRRPPSGLEHQQTGLSESHQDPEKHPEAEKDEMEKPAKRTCKQKPVSKVVAKVQDLSSQVQRVVKTHSKGKETIAIRPAAHAEFVPKADLLTLPGAEAGAHGSRRQGKERQGDRSSQSPAGETASISSVSASAEGAVNKVPLKVIESEKLDEAPEGKRLGFPVHTSVPHTRPETRNKRRAGLPLGGHKSLFLDLPHKVGPDSSQPRGDKKKPSPPAPAALGKVFNNSASQSSTHKQTSPVPSPLSPRLPSPQQHHRILRLPALPGEREAALNDSPCRKSRVFSGCVSADTLEPPSSAKVTETKGASPAFLRAGQPRLVPGETLEKSLGPGKTTAEPQHQSPPGISSEGFPWDGFNEQTPKDLPNRDGGAWVLGYRAGPACPFLLHEEREKSNRSELYLDLHPDHSLTEQDDRTPGRLQAVWPPPKTKDTEEKVGLKYTEAGRSAASLLSQ

SEQ ID NO: 10967 - protein, 507 aa, Artificial Sequence
  Synthetic polypeptide
MENVDNSLDGSDVSEPAKPEAGLEVAQSILSKFSMKSLFGFTSKLESVNPEEEDAVLKAFHSLDVNPTSQQDDSSNGLDPQEAGSRVSPDLGNDEKIASVETESEGSQRKEAGTSLLAQELLPLSTLKGTKDDVICVRGTLVHTTSDSDSDDGGQEPEEGSSTNGPKSPSGVLSEPSQESKENPGGFRENTVTGEMNGAELCAEDPQRIPPEMSSKLEAGNGGLQTERRPSQDQVGEEGSQDLPAVTNQNSSVGITESASSKKEVSGEKSFQLPAFFSGLRVLKKGATAEGGETITEIKPKDGDLALLKLTQPVQKSLVQAGLQTVKSEKKATDPKATPTLLEQLSLLLNIDMPKTEPKGADPESPRREEMGCNADQESQSGPGVPQTQGGEVKPKSPETALEAFKALFIRPPRKGTTADTSELEALKRKMRHEKESLRAVFERSNSKPADGPSDSKSPDHSLTEQDDRTPGRLQAVWPPPKTKDTEEKVGLKYTEAGRSAASLLSQ

SEQ ID NO: 10968 - protein, 88 aa, Artificial Sequence
  Synthetic polypeptide
IPFLSNLPSERGAARLSPHCLLSFPRKPSHGCRAASKARLEAKPANSPFPSHPSLAHITQFRMMVSLGHLAKGASLDDLIDSCIQSFE

SEQ ID NO: 10969 - protein, 74 aa, Artificial Sequence
  Synthetic polypeptide
MGTLGKAREAPRKPSHGCRAASKARLEAKPANSPFPSHPSLAHITQFRMMVSLGHLAKGASLDDLIDSCIQSFE

SEQ ID NO: 10970 - protein, 125 aa, Artificial Sequence
  Synthetic polypeptide
MKVVPTSPTPTDARRPRLGQIWITPVERTSTQAALVQGAGRRAQGTCLRPSPADGYLETPGHRKPSHGCRAASKARLEAKPANSPFPSHPSLAHITQFRMMVSLGHLAKGASLDDLIDSCIQSFE

SEQ ID NO: 10971 - protein, 26 aa, Artificial Sequence
  Synthetic polypeptide
MMVSLGHLAKGASLDDLIDSCIQSFE

SEQ ID NO: 10972 - protein, 49 aa, Artificial Sequence
  Synthetic polypeptide
MGSRASTLLRDEELEEIKKETGFSHSQITRLYSRFTSLDKGENGTLRCR

SEQ ID NO: 10973 - protein, 197 aa, Artificial Sequence
  Synthetic polypeptide
MAAAAKPNNLSLVVHGPGDLRLVCSFTAEASETTSPPGGTNNSRRAALRAVTLTAKVCSFTPEPARPRTHQKEETPNTSEHQKEQTPDTSPLRTVTLTAKVYSFTPEARETTNPPGGTNNCRNAGLRAVTLTAKVRSFTAEPARPRTHQKEETPNTSEHQNEQTPDTPPLGTVTLNARVRSFIVEVSETKNPPIPDT

SEQ ID NO: 10974 - protein, 25 aa, Artificial Sequence
  Synthetic polypeptide
MAAAAKPNNLSLVVHGPGDLRLLHC

SEQ ID NO: 10975 - protein, 215 aa, Artificial Sequence
  Synthetic polypeptide
MAAAAKPNNLSLVVHGPGDLRLENYPIPEPGPNEVLLRMHSVGICGSDVHYWEYGRIGNFIVKKPMVLGHEASGTVEKVGSSVKHLKPGDRVAIEPGAPRENDEFCKMGRYNLSPSIFFCATPPDDGNLCRFYKHNAAFCYKLPDNVTFEEGALIEPLSVGIHACRRGGVTLGHKVLVCGAGWAWWLMPVILALWEAEAVGSPEVRSLRPAWPTW

SEQ ID NO: 10976 - protein, 194 aa, Artificial Sequence
  Synthetic polypeptide
MENYPIPEPGPNEVLLRMHSVGICGSDVHYWEYGRIGNFIVKKPMVLGHEASGTVEKVGSSVKHLKPGDRVAIEPGAPRENDEFCKMGRYNLSPSIFFCATPPDDGNLCRFYKHNAAFCYKLPDNVTFEEGALIEPLSVGIHACRRGGVTLGHKVLVCGAGWAWWLMPVILALWEAEAVGSPEVRSLRPAWPTW

SEQ ID NO: 10977 - protein, 1212 aa, Artificial Sequence
  Synthetic polypeptide
MGFCLALAWTLLVGAWTPLGAQNPISWEVQRFDGWYNNLMEHRWGSKGSRLQRLVPASYADGVYQPLGEPHLPNPRDLSNTISRGPAGLASLRNRTVLGVFFGYHVLSDLVSVETPGCPAEFLNIRIPPGDPMFDPDQRGDVVLPFQRSRWDPETGRSPSNPRDPANQVTGWLDGSAIYGSSHSWSDALRSFSRGQLASGPDPAFPRDSQNPLLMWAAPDPATGQNGPRGLYAFGAERGNREPFLQALGLLWFRYHNLWAQRLARQHPDWEDEELFQHARKRVIATYQNIAVYEWLPSFLQKTLPEYTGYRPFLDPSISSEFVAASEQFLSTMVPPGVYMRNASCHFQGVINRNSSVSRALRVCNSYWSREHPSLQSAEDVDALLLGMASQIAEREDHVLVEDVRDFWPGPLKFSRTDHLASCLQRGRDLGLPSYTKARAALGLSPITRWQDINPALSRSNDTVLEATAALYNQDLSWLELLPGGLLESHRDPGPLFSTIVLEQFVRLRDGDRYWFENTRNGLFSKKEIEEIRNTTLQDVLVAVINIDPSALQPNVFVWHKGDPCPQPRQLSTEGLPACAPSVVRDYFEGSGFGFGVTIGTLCCFPLVSLLSAWIVARLRMRNFKRLQGQDRQSIVSEKLVGGMEALEWQGHKEPCRPVLVYLQPGQIRVVDGRLTVLRTIQLQPPQKVNFVLSSNRGRRTLLLKIPKEYDLVLLFNLEEERQALVENLRGALKESGLSIQEWELREQELMRAAVTREQRRHLLETFFRHLFSQVLDINQADAGTLPLDSSQKVREALTCELSRAEFAESLGLKPQDMFVESMFSLADKDGNGYLSFREFLDILVVFMKGSPEEKSRLMFRMYDFDGNGLISKDEFIRMLRSFIEISNNCLSKAQLAEVVESMFRESGFQDKEELTWEDFHFMLRDHNSELRFTQLCVKGVEVPEVIKDLCRRASYISQDMICPSPRVSARCSRSDIETELTPQRLQCPMDTDPPQEIRRRFGKKVTSFQPLLFTEAHREKFQRSCLHQTVQQFKRFIENYRRHIGCVAVFYAIAGGLFLERAYYYAFAAHHTGITDTTRVGIILSRGTAASISFMFSYILLTMCRNLITFLRETFLNRYVPFDAAVDFHRLIASTAIVLTVLHSVGHVVNVYLFSISPLSVLSCLFPGLFHDDGSELPQKYYWWFFQTVPVPATQEAEAEESFEPGRQRLQ

SEQ ID NO: 10978 - protein, 858 aa, Artificial Sequence
  Synthetic polypeptide
MWMHCCWAWPPRSQSERTMCWLKMCGVSLRLSLQVVNSWPLGRGSAGLPEPDFWPGPLKFSRTDHLASCLQRGRDLGLPSYTKARAALGLSPITRWQDINPALSRSNDTVLEATAALYNQDLSWLELLPGGLLESHRDPGPLFSTIVLEQFVRLRDGDRYWFENTRNGLFSKKEIEEIRNTTLQDVLVAVINIDPSALQPNVFVWHKGDPCPQPRQLSTEGLPACAPSVVRDYFEGSGFGFGVTIGTLCCFPLVSLLSAWIVARLRMRNFKRLQGQDRQSIVSEKLVGGMEALEWQGHKEPCRPVLVYLQPGQIRVVDGRLTVLRTIQLQPPQKVNFVLSSNRGRRTLLLKIPKEYDLVLLFNLEEERQALVENLRGALKESGLSIQEWELREQELMRAAVTREQRRHLLETFFRHLFSQVLDINQADAGTLPLDSSQKVREALTCELSRAEFAESLGLKPQDMFVESMFSLADKDGNGYLSFREFLDILVVFMKGSPEEKSRLMFRMYDFDGNGLISKDEFIRMLRSFIEISNNCLSKAQLAEVVESMFRESGFQDKEELTWEDFHFMLRDHNSELRFTQLCVKGVEVPEVIKDLCRRASYISQDMICPSPRVSARCSRSDIETELTPQRLQCPMDTDPPQEIRRRFGKKVTSFQPLLFTEAHREKFQRSCLHQTVQQFKRFIENYRRHIGCVAVFYAIAGGLFLERAYYYAFAAHHTGITDTTRVGIILSRGTAASISFMFSYILLTMCRNLITFLRETFLNRYVPFDAAVDFHRLIASTAIVLTVLHSVGHVVNVYLFSISPLSVLSCLFPGLFHDDGSELPQKYYWWFFQTVPVPATQEAEAEESFEPGRQRLQ

SEQ ID NO: 10979 - protein, 1210 aa, Artificial Sequence
  Synthetic polypeptide
MGFCLALAWTLLVGAWTPLGAQNPISWEVQRFDGWYNNLMEHRWGSKGSRLQRLVPASYADGVYQPLGEPHLPNPRDLSNTISRGPAGLASLRNRTVLGVFFGYHVLSDLVSVETPGCPAEFLNIRIPPGDPMFDPDQRGDVVLPFQRSRWDPETGRSPSNPRDPANQVTGWLDGSAIYGSSHSWSDALRSFSRGQLASGPDPAFPRDSQNPLLMWAAPDPATGQNGPRGLYAFGAERGNREPFLQALGLLWFRYHNLWAQRLARQHPDWEDEELFQHARKRVIATYQNIAVYEWLPSFLQKTLPEYTGYRPFLDPSISSEFVAASEQFLSTMVPPGVYMRNASCHFQGVINRNSSVSRALRVCNSYWSREHPSLQSAEDVDALLLGMASQIAEREDHVLVEDVRDFWPGPLKFSRTDHLASCLQRGRDLGLPSYTKARAALGLSPITRWQDINPALSRSNDTVLEATAALYNQDLSWLELLPGGLLESHRDPGPLFSTIVLEQFVRLRDGDRYWFENTRNGLFSKKEIEEIRNTTLQDVLVAVINIDPSALQPNVFVWHKGDPCPQPRQLSTEGLPACAPSVVRDYFEGSGFGFGVTIGTLCCFPLVSLLSAWIVARLRMRNFKRLQGQDRQSIVSEKLVGGMEALEWQGHKEPCRPVLVYLQPGQIRVVDGRLTVLRTIQLQPPQKVNFVLSSNRGRRTLLLKIPKEYDLVLLFNLEEERQALVENLRGALKESGLSIQEWELREQELMRAAVTREQRRHLLETFFRHLFSQVLDINQADAGTLPLDSSQKVREALTCELSRAEFAESLGLKPQDMFVESMFSLADKDGNGYLSFREFLDILVVFMKGSPEEKSRLMFRMYDFDGNGLISKDEFIRMLRSFIEISNNCLSKAQLAEVVESMFRESGFQDKEELTWEDFHFMLRDHNSELRFTQLCVKGVEVPEVIKDLCRRASYISQDMICPSPRVSARCSRSDIETELTPQRLQCPMDTDPPQEIRRRFGKKVTSFQPLLFTEAHREKFQRSCLHQTVQQFKRFIENYRRHIGCVAVFYAIAGGLFLERAYYYAFAAHHTGITDTTRVGIILSRGTAASISFMFSYILLTMCRNLITFLRETFLNRYVPFDAAVDFHRLIASTAIVLTVLHSVGHVVNVYLFSISPLSVLSCLFPGLFHDDGSELPQKYYWWFFQTVPATQEAEAEESFEPGRQRLQ

SEQ ID NO: 10980 - protein, 856 aa, Artificial Sequence
  Synthetic polypeptide
MWMHCCWAWPPRSQSERTMCWLKMCGVSLRLSLQVVNSWPLGRGSAGLPEPDFWPGPLKFSRTDHLASCLQRGRDLGLPSYTKARAALGLSPITRWQDINPALSRSNDTVLEATAALYNQDLSWLELLPGGLLESHRDPGPLFSTIVLEQFVRLRDGDRYWFENTRNGLFSKKEIEEIRNTTLQDVLVAVINIDPSALQPNVFVWHKGDPCPQPRQLSTEGLPACAPSVVRDYFEGSGFGFGVTIGTLCCFPLVSLLSAWIVARLRMRNFKRLQGQDRQSIVSEKLVGGMEALEWQGHKEPCRPVLVYLQPGQIRVVDGRLTVLRTIQLQPPQKVNFVLSSNRGRRTLLLKIPKEYDLVLLFNLEEERQALVENLRGALKESGLSIQEWELREQELMRAAVTREQRRHLLETFFRHLFSQVLDINQADAGTLPLDSSQKVREALTCELSRAEFAESLGLKPQDMFVESMFSLADKDGNGYLSFREFLDILVVFMKGSPEEKSRLMFRMYDFDGNGLISKDEFIRMLRSFIEISNNCLSKAQLAEVVESMFRESGFQDKEELTWEDFHFMLRDHNSELRFTQLCVKGVEVPEVIKDLCRRASYISQDMICPSPRVSARCSRSDIETELTPQRLQCPMDTDPPQEIRRRFGKKVTSFQPLLFTEAHREKFQRSCLHQTVQQFKRFIENYRRHIGCVAVFYAIAGGLFLERAYYYAFAAHHTGITDTTRVGIILSRGTAASISFMFSYILLTMCRNLITFLRETFLNRYVPFDAAVDFHRLIASTAIVLTVLHSVGHVVNVYLFSISPLSVLSCLFPGLFHDDGSELPQKYYWWFFQTVPATQEAEAEESFEPGRQRLQ

SEQ ID NO: 10981 - protein, 188 aa, Artificial Sequence
  Synthetic polypeptide
MITHQRIWYGTGLTFVSGLKADDVIYITLPFYHSAALLIGIHGCIVAGATLALRTKFSASQFWDDCRKYNVTVIQYIGELLRYLCNSPQKPNDRDHKVRLALGNGLRGDVWRQFVKRFGDICIYEFYAATEGNIGFMNYARKVGAVGRVNYLQKKIITYDLIKYDVEKDEPVRDENGYCVRVPKGIHA

SEQ ID NO: 10982 - protein, 370 aa, Artificial Sequence
  Synthetic polypeptide
MLSAIYTVLAGLLFLPLLVNLCCPYFFQDIGYFLKVAAVGRRVRSYGKRRPARTILRAFLEKARQTPHKPFLLFRDETLTYAQVDRRSNQVARALHDHLGLRQGDCVALLMGNEPAYVWLWLGLVKLGCAMACLNYNIRAKSLLHCFQCCGAKVLLVSPELQAAVEEILPSLKKDDVSIYYVSRTSNTDGIDSFLDKVDEVSTEPIPESWRSEVTFSTPALYIYTSGTTGATLALRTKFSASQFWDDCRKYNVTVIQYIGELLRYLCNSPQKPNDRDHKVRLALGNGLRGDVWRQFVKRFGDICIYEFYAATEGNIGFMNYARKVGAVGRVNYLQKKIITYDLIKYDVEKDEPVRDENGYCVRVPKGIHA

SEQ ID NO: 10983 - protein, 423 aa, Artificial Sequence
  Synthetic polypeptide
MLSAIYTVLAGLLFLPLLVNLCCPYFFQDIGYFLKVAAVGRRVRSYGKRRPARTILRAFLEKARQTPHKPFLLFRDETLTYAQVDRRSNQVARALHDHLGLRQGDCVALLMGNEPAYVWLWLGLVKLGCAMACLNYNIRAKSLLHCFQCCGAKVLLVSPELQAAVEEILPSLKKDDVSIYYVSRTSNTDGIDSFLDKVDEVSTEPIPESWRSEVTFSTPALYIYTSGTTGLPKAAMITHQRIWYGTGLTFVSGLKADDVIYITLPFYHSAALLIGIHGCIVAGATLALRTKFSASQFWDDCRKYNVTVIQYIGELLRYLCNSPQKPNDRDHKVRLALGNGLRGDVWRQFVKRFGDICIYEFYAATEGNIGFMNYARKVGAVGRVNYLQKKIITYDLIKYDVEKDEPVRDENGYCVRVPKGIHA

SEQ ID NO: 10984 - protein, 21 aa, Artificial Sequence
  Synthetic polypeptide
MATCAVEVFGLLEDENWKKLL

SEQ ID NO: 10985 - protein, 19 aa, Artificial Sequence
  Synthetic polypeptide
  misc_feature (1)..(1): Xaa can be any naturally occurring amino acid
XCAVEVFGLLEDENWKKLL

SEQ ID NO: 10986 - protein, 382 aa, Artificial Sequence
  Synthetic polypeptide
MVLLRVLILLLSWAAGMGDRDFDDGVLGLAWVGAPSGSSGGICEKSKLYSDGKKKSLNTGIITVQNYGSHVPPKVSHITFAHEVGHNFGSPHDSGTECTPGESKNLGQKENGNYIMYARATSGDKLNNNKFSLCSIRNISQVLEKKRNNCFVESGQPICGNGMVEQGEECDCGYSDQCKDECCFDANQPEGRKCKLKPGKQCSPSQGPCCTAQCAFKSKSEKCRDDSDCAREGICNGFTALCPASDPKPNFTDCNRHTQVCINGQCAGSICEKYGLEECTCASSDGKDDKELCHVCCMKKMDPSTCASTGSVQWSRHFSGRTITLQPGSPCNDFRGYCDVFMRCRLVDADGPLARLKKAIFSPELYENIAEWIVDAARTQHL

SEQ ID NO: 10987 - protein, 683 aa, Artificial Sequence
  Synthetic polypeptide
MVLLRVLILLLSWAAGMGGQYGNPLNKYIRHYEGLSYNVDSLHQKHQRAKRAVSHEDQFLRLDFHAHGRHFNLRMKRDTSLFSDEFKVETSNKVLDYDTSHIYTGHIYGEEGSFSHGSVIDGRFEGFIQTRGGTFYVEPAERYIKDRTLPFHSVIYHEDDINYPHKYGPQGGCADHSVFERMRKYQMTGVEEVTQIPQEEHAANGPELLRKKRTTSAEKNTCQLYIQTDHLFFKYYGTREAVIAQISSHVKAIDTIYQTTDFSGIRNISFMVKRIRINTTADEKDPTNPFRFPNIGVEKFLELNSEQNHDDYCLAYVFTDRDFDDGVLGLAWVGAPSGSSGGICEKSKLYSDGKKKSLNTGIITVQNYGSHVPPKVSHITFAHEVGHNFGSPHDSGTECTPGESKNLGQKENGNYIMYARATSGDKLNNNKFSLCSIRNISQVLEKKRNNCFVESGQPICGNGMVEQGEECDCGYSDQCKDECCFDANQPEGRKCKLKPGKQCSPSQGPCCTAQCAFKSKSEKCRDDSDCAREGICNGFTALCPASDPKPNFTDCNRHTQVCINGQCAGSICEKYGLEECTCASSDGKDDKELCHVCCMKKMDPSTCASTGSVQWSRHFSGRTITLQPGSPCNDFRGYCDVFMRCRLVDADGPLARLKKAIFSPELYENIAEWIVDAARTQHL

SEQ ID NO: 10988 - protein, 381 aa, Artificial Sequence
  Synthetic polypeptide
MVLLRVLILLLSWAAGMGDRDFDDGVLGLAWVGAPSGSSGGICEKSKLYSDGKKKSLNTGIITVQNYGSHVPPKVSHITFAHEVGHNFGSPHDSGTECTPGESKNLGQKENGNYIMYARATSGDKLNNNKFSLCSIRNISQVLEKKRNNCFVESGQPICGNGMVEQGEECDCGYSDQCKDECCFDANQPEGRKCKLKPGKQCSPSQGPCCTAQCAFKSKSEKCRDDSDCAREGICNGFTALCPASDPKPNFTDCNRHTQVCINGQCAGSICEKYGLEECTCASSDGKDDKELCHVCCMKKMDPSTCASTGSVQWSRHFSGRTITLQPGSPCNDFRGYCDVFMRCRLVDADGPLARLKKAIFSPELYENIAEWIVGVAACTL

SEQ ID NO: 10989 - protein, 682 aa, Artificial Sequence
  Synthetic polypeptide
MVLLRVLILLLSWAAGMGGQYGNPLNKYIRHYEGLSYNVDSLHQKHQRAKRAVSHEDQFLRLDFHAHGRHFNLRMKRDTSLFSDEFKVETSNKVLDYDTSHIYTGHIYGEEGSFSHGSVIDGRFEGFIQTRGGTFYVEPAERYIKDRTLPFHSVIYHEDDINYPHKYGPQGGCADHSVFERMRKYQMTGVEEVTQIPQEEHAANGPELLRKKRTTSAEKNTCQLYIQTDHLFFKYYGTREAVIAQISSHVKAIDTIYQTTDFSGIRNISFMVKRIRINTTADEKDPTNPFRFPNIGVEKFLELNSEQNHDDYCLAYVFTDRDFDDGVLGLAWVGAPSGSSGGICEKSKLYSDGKKKSLNTGIITVQNYGSHVPPKVSHITFAHEVGHNFGSPHDSGTECTPGESKNLGQKENGNYIMYARATSGDKLNNNKFSLCSIRNISQVLEKKRNNCFVESGQPICGNGMVEQGEECDCGYSDQCKDECCFDANQPEGRKCKLKPGKQCSPSQGPCCTAQCAFKSKSEKCRDDSDCAREGICNGFTALCPASDPKPNFTDCNRHTQVCINGQCAGSICEKYGLEECTCASSDGKDDKELCHVCCMKKMDPSTCASTGSVQWSRHFSGRTITLQPGSPCNDFRGYCDVFMRCRLVDADGPLARLKKAIFSPELYENIAEWIVGVAACTL

SEQ ID NO: 10990 - protein, 198 aa, Artificial Sequence
  Synthetic polypeptide
MVLLRVLILLLSWAAGMGGQYGNPLNKYIRHYEGLSYNVDSLHQKHQRAKRAVSHEDQFLRLDFHAHGRHFNLRMKRDTSLFSDEFKVETSNKVLDYDTSHIYTGHIYGEEGSFSHGSVIDGRFEGFIQTRGGTFYVEPAERYIKDRTLPFHSVIYHEDDINYPHKYGPQGGCADHSVFERMRKYQMTGVEEVTQVCL

SEQ ID NO: 10991 - protein, 52 aa, Artificial Sequence
  Synthetic polypeptide
MGRQLAGCGDAGKKASFKMSTVHEILCKLSLEGDHGQQSETLPKKRKKRKEK

SEQ ID NO: 10992 - protein, 34 aa, Artificial Sequence
  Synthetic polypeptide
MSTVHEILCKLSLEGDHGQQSETLPKKRKKRKEK

SEQ ID NO: 10993 - protein, 62 aa, Artificial Sequence
  Synthetic polypeptide
MSWPCDSVINQDHKTKEKNICFQKASFKMSTVHEILCKLSLEGDHGQQSETLPKKRKKRKEK

SEQ ID NO: 10994 - protein, 41 aa, Artificial Sequence
  Synthetic polypeptide
MGRQLAGCGDAGKKASFKMSTVHEILCKLSLEGDCPGSYSR

SEQ ID NO: 10995 - protein, 23 aa, Artificial Sequence
  Synthetic polypeptide
MSTVHEILCKLSLEGDCPGSYSR

SEQ ID NO: 10996 - protein, 51 aa, Artificial Sequence
  Synthetic polypeptide
MSWPCDSVINQDHKTKEKNICFQKASFKMSTVHEILCKLSLEGDCPGSYSR

SEQ ID NO: 10997 - protein, 37 aa, Artificial Sequence
  Synthetic polypeptide
MGRQLAGCGDAGKKASFKMSTVHEILCKLSLEAWATE

SEQ ID NO: 10998 - protein, 19 aa, Artificial Sequence
  Synthetic polypeptide
MSTVHEILCKLSLEAWATE

SEQ ID NO: 10999 - protein, 47 aa, Artificial Sequence
  Synthetic polypeptide
MSWPCDSVINQDHKTKEKNICFQKASFKMSTVHEILCKLSLEAWATE

SEQ ID NO: 11000 - protein, 67 aa, Artificial Sequence
  Synthetic polypeptide
MPRRSLHAAAVLLLVILKEQPSSPAPVNGSKWTYFGRNATTWMNLGNIMPDERSHLQLTTYCMILFI

SEQ ID NO: 11001 - protein, 176 aa, Artificial Sequence
  Synthetic polypeptide
MLSLKLPRLFSIDQIPQVFHEQGILFGYRHPQSSATACILSLFQMTNETLNIWTHLLPFWFFAWRFVTALYMTDIKNDSYSWPMLVYMCTSCVYPLVSSCAHTFSSMSKNARHICYFLDYGAVNLFSLGSAIAYSAYTFPDALMCTTFHDYYVALAVLNTILSTGLSCYSREVPAL

SEQ ID NO: 11002 - protein, 132 aa, Artificial Sequence
  Synthetic polypeptide
MTNETLNIWTHLLPFWFFAWRFVTALYMTDIKNDSYSWPMLVYMCTSCVYPLVSSCAHTFSSMSKNARHICYFLDYGAVNLFSLGSAIAYSAYTFPDALMCTTFHDYYVALAVLNTILSTGLSCYSREVPAL

SEQ ID NO: 11003 - protein, 336 aa, Artificial Sequence
  Synthetic polypeptide
MEMVGFLPKTRRQIFSLLSAILHLGNICYKKKTYRDDSIDICNPEVLPIVSELLEVKEEMLFEALVTRKTVTVGEKLILPYKLAEAVTVRNSMAKSLYSALFDWIVFRINHALLNSKDLEHNTKTLSIGVLDIFGFEDYENNSFEQFCINFANERLQHYFNQHIFKLEQEEYRTEGISWHNIDYIDNTCCINLISKKPTGLLHLLDEESNFPQATNQTLLDKFKHQHEDNSYIEFPAVMEPAFIIKHYAGKVKYGVKDFREKNTDHMRPDIVALLRSSKNAFISGMIGIDPVAVFRWAILRAFFRAMVAFREAGKRNIHRKTVPECSSVEEWMTKL

SEQ ID NO: 11004 - protein, 722 aa, Artificial Sequence
  Synthetic polypeptide
MNINDGGRRRFEDNEHTLRIYPGAISEGTIYCPIPARKNSTAAEVIESLINKLHLDKTKCYVLAEVKEFGGEEWILNPTDCPVQRMMLWPRMALENRLSGEDYRFLLREKNLDGSIHYGSLQSWLRVTEERRRMMERGFLPQPQQKDFDDLCSLPDLNEKTLLENLRNRFKHEKIYTYVGSILIVINPFKFLPIYNPKYVKMYDNHQLGKLEPHIYAVADVAYHAMLQRKKNQCIVISGESGSGKTQSTNFLIHHLTALSQKGFASGVEQIILGAGPVLEAFGNAKTAHNNNSSRFGKFIQVNYQETGTVLGAYVEKYLLEKSRLVYQEHNERNYHVFYYLLAGASEDERSAFHLKQPEEYHYLNQDCFTVEGEDLRHDFERLQLAMEMVGFLPKTRRQIFSLLSAILHLGNICYKKKTYRDDSIDICNPEVLPIVSELLEVKEEMLFEALVTRKTVTVGEKLILPYKLAEAVTVRNSMAKSLYSALFDWIVFRINHALLNSKDLEHNTKTLSIGVLDIFGFEDYENNSFEQFCINFANERLQHYFNQHIFKLEQEEYRTEGISWHNIDYIDNTCCINLISKKPTGLLHLLDEESNFPQATNQTLLDKFKHQHEDNSYIEFPAVMEPAFIIKHYAGKVKYGVKDFREKNTDHMRPDIVALLRSSKNAFISGMIGIDPVAVFRWAILRAFFRAMVAFREAGKRNIHRKTVPECSSVEEWMTKL

SEQ ID NO: 11005 - protein, 741 aa, Artificial Sequence
  Synthetic polypeptide
MNINDGGRRRFEDNEHTLRIYPGAISEGTIYCPIPARKNSTAAEVIESLINKLHLDKTKCYVLAEVKEFGGEEWILNPTDCPVQRMMLWPRMALENRLSGEDYRFLLREKNLDGSIHYGSLQSWLRVTEERRRMMERGFLPQPQQKDFDDLCSLPDLNEKTLLENLRNRFKHEKIYTYVGSILIVINPFKFLPIYNPKYVKMYDNHQLGKLEPHIYAVADVAYHAMLQRKKNQCIVISGESGSGKTQSTNFLIHHLTALSQKGFASGVEQIILGAGPVLEAFGNAKTAHNNNSSRFGKFIQVNYQETGTVLGAYVEKYLLEKSRLVYQEHNERNYHVFYYLLAGASEDERSAFHLKQPEEYHYLNQITKKPLRQSWDDYCYDSEPDCFTVEGEDLRHDFERLQLAMEMVGFLPKTRRQIFSLLSAILHLGNICYKKKTYRDDSIDICNPEVLPIVSELLEVKEEMLFEALVTRKTVTVGEKLILPYKLAEAVTVRNSMAKSLYSALFDWIVFRINHALLNSKDLEHNTKTLSIGVLDIFGFEDYENNSFEQFCINFANERLQHYFNQHIFKLEQEEYRTEGISWHNIDYIDNTCCINLISKKPTGLLHLLDEESNFPQATNQTLLDKFKHQHEDNSYIEFPAVMEPAFIIKHYAGKVKYGVKDFREKNTDHMRPDIVALLRSSKNAFISGMIGIDPVAVFRWAILRAFFRAMVAFREAGKRNIHRKTVPECSSVEEWMTKL

SEQ ID NO: 11006 - protein, 488 aa, Artificial Sequence; identical to SEQ ID NO: 387
  Synthetic polypeptide

SEQ ID NO: 11007 - protein, 512 aa, Artificial Sequence; identical to SEQ ID NO: 364
  Synthetic polypeptide

SEQ ID NO: 11008 - protein, 510 aa, Artificial Sequence; identical to SEQ ID NO: 369
  Synthetic polypeptide

SEQ ID NO: 11009 - protein, 464 aa, Artificial Sequence; identical to SEQ ID NO: 421
  Synthetic polypeptide

SEQ ID NO: 11010 - protein, 506 aa, Artificial Sequence; identical to SEQ ID NO: 373
  Synthetic polypeptide

SEQ ID NO: 11011 - protein, 473 aa, Artificial Sequence; identical to SEQ ID NO: 409
  Synthetic polypeptide

SEQ ID NO: 11012 - protein, 465 aa, Artificial Sequence; identical to SEQ ID NO: 419
  Synthetic polypeptide

SEQ ID NO: 11013 - protein, 476 aa, Artificial Sequence
  Synthetic polypeptide
MDSQGDWAAQEKGQRMSSQPAGNQTSPGATEDYSYGSWYIDEPQGGEELQPEGEVPSCHTSIPPGLYHACLASLSILVLLLLAMLVRRRQLWPDCVRGRPGLPSPVDFLAGDRPRAVPAAVFMVLLSSLCLLLPDEDALPFLTLASAPSQDGKTEAPRGAWKILGLFYYAALYYPLAACATAGHTAAHLLGSTLSWAHLGVQVWQRAECPQVPKIYKYYSLLASLPLLLGLGFLSLWYPVQLVRSFSRRTGAGSKGLQSSYSEEYLRNLLCRKKLGSSYHTSKHGFLSWARVCLRHCIYTPQPGFHLPLKLVLSATLTGTAIYQVALLLLVGVVPTIQKVRAGVTTDVSYLLAGFGIVLSEDKQEVVELVKHHLWALEVCYISALVLSCLLTFLVLMRSLVTHRTNLRALHRGAALDLSPLHRSPHPSRQAIFCWMSFSAYQTAFICLALWEAEAGGSRSQEMKTSLANMVRPRLY

SEQ ID NO: 11014 - protein, 500 aa, Artificial Sequence
  Synthetic polypeptide
MGGKGGGDTRGPVLFPCQLAQALSPRRAFPRELKEKGQRMSSQPAGNQTSPGATEDYSYGSWYIDEPQGGEELQPEGEVPSCHTSIPPGLYHACLASLSILVLLLLAMLVRRRQLWPDCVRGRPGLPSPVDFLAGDRPRAVPAAVFMVLLSSLCLLLPDEDALPFLTLASAPSQDGKTEAPRGAWKILGLFYYAALYYPLAACATAGHTAAHLLGSTLSWAHLGVQVWQRAECPQVPKIYKYYSLLASLPLLLGLGFLSLWYPVQLVRSFSRRTGAGSKGLQSSYSEEYLRNLLCRKKLGSSYHTSKHGFLSWARVCLRHCIYTPQPGFHLPLKLVLSATLTGTAIYQVALLLLVGVVPTIQKVRAGVTTDVSYLLAGFGIVLSEDKQEVVELVKHHLWALEVCYISALVLSCLLTFLVLMRSLVTHRTNLRALHRGAALDLSPLHRSPHPSRQAIFCWMSFSAYQTAFICLALWEAEAGGSRSQEMKTSLANMVRPRLY

SEQ ID NO: 11015 - protein, 498 aa, Artificial Sequence
  Synthetic polypeptide
MQIRLLRAELVVPLWQFIRQWPPGSDGWGQMEEKGQRMSSQPAGNQTSPGATEDYSYGSWYIDEPQGGEELQPEGEVPSCHTSIPPGLYHACLASLSILVLLLLAMLVRRRQLWPDCVRGRPGLPSPVDFLAGDRPRAVPAAVFMVLLSSLCLLLPDEDALPFLTLASAPSQDGKTEAPRGAWKILGLFYYAALYYPLAACATAGHTAAHLLGSTLSWAHLGVQVWQRAECPQVPKIYKYYSLLASLPLLLGLGFLSLWYPVQLVRSFSRRTGAGSKGLQSSYSEEYLRNLLCRKKLGSSYHTSKHGFLSWARVCLRHCIYTPQPGFHLPLKLVLSATLTGTAIYQVALLLLVGVVPTIQKVRAGVTTDVSYLLAGFGIVLSEDKQEVVELVKHHLWALEVCYISALVLSCLLTFLVLMRSLVTHRTNLRALHRGAALDLSPLHRSPHPSRQAIFCWMSFSAYQTAFICLALWEAEAGGSRSQEMKTSLANMVRPRLY

SEQ ID NO: 11016 - protein, 452 aa, Artificial Sequence
  Synthetic polypeptide
MSSQPAGNQTSPGATEDYSYGSWYIDEPQGGEELQPEGEVPSCHTSIPPGLYHACLASLSILVLLLLAMLVRRRQLWPDCVRGRPGLPRPRAVPAAVFMVLLSSLCLLLPDEDALPFLTLASAPSQDGKTEAPRGAWKILGLFYYAALYYPLAACATAGHTAAHLLGSTLSWAHLGVQVWQRAECPQVPKIYKYYSLLASLPLLLGLGFLSLWYPVQLVRSFSRRTGAGSKGLQSSYSEEYLRNLLCRKKLGSSYHTSKHGFLSWARVCLRHCIYTPQPGFHLPLKLVLSATLTGTAIYQVALLLLVGVVPTIQKVRAGVTTDVSYLLAGFGIVLSEDKQEVVELVKHHLWALEVCYISALVLSCLLTFLVLMRSLVTHRTNLRALHRGAALDLSPLHRSPHPSRQAIFCWMSFSAYQTAFICLALWEAEAGGSRSQEMKTSLANMVRPRLY

SEQ ID NO: 11017 - protein, 481 aa, Artificial Sequence
  Synthetic polypeptide
MSSQPAGNQTSPGATEDYSYGSWYIDEPQGGEELQPEGEVPSCHTSIPPGLYHACLASLSILVLLLLAMLVRRRQLWPDCVRGRPGLPSPVDFLAGDRPRAVPAAVFMVLLSSLCLLLPDEDALPFLTLASAPSQDGKTEAPRGAWKILGLFYYAALYYPLAACATAGHTAAHLLGSTLSWAHLGVQVWQRAECPQVPKIYKYYSLLASLPLLLGLGFLSLWYPVQLVRSFSRRTGAGSKGLQSSYSEEYLRNLLCRKKLGSRMAAVEDWLLLPRILVIKRDNYQLGTAGRPWPGLGHLGSCWPFSWAPWEGGGLPGLSGAVHHTPSFEDYRIPSPAEAGAFSYTDRDGHLPGGPAAAGGRGTHYPEGEGRGHHGCLLPAGRLWNRALRGQAGGGGAGEAPSVGSGSVLHLSLGLVLLTHLPGPDALTGDTQDQPSSSAPRSCPGLESLASESPSLPPSHILLDELQCLPDSLYLPCTLGG

SEQ ID NO: 11018 - protein, 461 aa, Artificial Sequence
  Synthetic polypeptide
MSSQPAGNQTSPGATEDYSYGSWYIDEPQGGEELQPEGEVPSCHTSIPPGLYHACLASLSILVLLLLAMLVRRRQLWPDCVRGRPGLPSPVDFLAGDRPRAVPAAVFMVLLSSLCLLLPDEDALPFLTLASAPSQDGKTEAPRGAWKILGLFYYAALYYPLAACATAGHTAAHLLGSTLSWAHLGVQVWQRAECPQVPKIYKYYSLLASLPLLLGLGFLSLWYPVQLVRSFSRRTGAGSKGLQSSYSEEYLRNLLCRKKLGSSYHTSKHGFLSWARVCLRHCIYTPQPGFHLPLKLVLSATLTGTAIYQVALLLLVGVVPTIQKVRAGVTTDVSYLLAGFGIVLSEDKQEVVELVKHHLWALEVCYISALVLSCLLTFLVLMRSLVTHRTNLRALHRGAALDLSPLHRSPHPSRQAIFCWMSFSAYQTAFICLALWEAEAGGSRSQEMKTSLANMVRPRLY

SEQ ID NO: 11019 - protein, 453 aa, Artificial Sequence
  Synthetic polypeptide
MSSQPAGNQTSPGATEDYSYGSWYIDEPQGGEELQPEGEVPSCHTSIPPGLYHACLASLSILVLLLLAMLVRRRQLWPDCVRGRPGLPSPVDFLAGDRPRAVPAAVFMVLLSSLCLLLPDEDALPFLTLASAPSQGAWKILGLFYYAALYYPLAACATAGHTAAHLLGSTLSWAHLGVQVWQRAECPQVPKIYKYYSLLASLPLLLGLGFLSLWYPVQLVRSFSRRTGAGSKGLQSSYSEEYLRNLLCRKKLGSSYHTSKHGFLSWARVCLRHCIYTPQPGFHLPLKLVLSATLTGTAIYQVALLLLVGVVPTIQKVRAGVTTDVSYLLAGFGIVLSEDKQEVVELVKHHLWALEVCYISALVLSCLLTFLVLMRSLVTHRTNLRALHRGAALDLSPLHRSPHPSRQAIFCWMSFSAYQTAFICLALWEAEAGGSRSQEMKTSLANMVRPRLY

SEQ ID NO: 11020 - protein, 403 aa, Artificial Sequence; identical to SEQ ID NO: 509
  Synthetic polypeptide

SEQ ID NO: 11021 - protein, 427 aa, Artificial Sequence; identical to SEQ ID NO: 478
  Synthetic polypeptide

SEQ ID NO: 11022 - protein, 425 aa, Artificial Sequence; identical to SEQ ID NO: 481
  Synthetic polypeptide

SEQ ID NO: 11023 - protein, 379 aa, Artificial Sequence; identical to SEQ ID NO: 573
  Synthetic polypeptide

SEQ ID NO: 11024 - protein, 416 aa, Artificial Sequence; identical to SEQ ID NO: 488
  Synthetic polypeptide

SEQ ID NO: 11025 - protein, 388 aa, Artificial Sequence; identical to SEQ ID NO: 553
  Synthetic polypeptide

SEQ ID NO: 11026 - protein, 380 aa, Artificial Sequence; identical to SEQ ID NO: 570
  Synthetic polypeptide

SEQ ID NO: 11027 - protein, 65 aa, Artificial Sequence
  Synthetic polypeptide
  misc_feature (1)..(1): Xaa can be any naturally occurring amino acid
XVRAGVTTDVSYLLAGFGIVLSEDKQEVVELVKHHLWALEAWLSGRSPLSEPQLPLQPSGNSSSV

SEQ ID NO: 11028 - protein, 404 aa, Artificial Sequence; identical to SEQ ID NO: 508
  Synthetic polypeptide

SEQ ID NO: 11029 - protein, 428 aa, Artificial Sequence; identical to SEQ ID NO: 474
  Synthetic polypeptide

SEQ ID NO: 11030 - protein, 426 aa, Artificial Sequence; identical to SEQ ID NO: 480
  Synthetic polypeptide

SEQ ID NO: 11031 - protein, 380 aa, Artificial Sequence; identical to SEQ ID NO: 571
  Synthetic polypeptide

SEQ ID NO: 11032 - protein, 417 aa, Artificial Sequence; identical to SEQ ID NO: 487
  Synthetic polypeptide

SEQ ID NO: 11033 - protein, 389 aa, Artificial Sequence; identical to SEQ ID NO: 550
  Synthetic polypeptide

SEQ ID NO: 11034 - protein, 381 aa, Artificial Sequence; identical to SEQ ID NO: 567
  Synthetic polypeptide

SEQ ID NO: 11035 - protein, 66 aa, Artificial Sequence
  Synthetic polypeptide
  misc_feature (1)..(1): Xaa can be any naturally occurring amino acid
XVRAGVTTDVSYLLAGFGIVLSEDKQEVVELVKHHLWALEAAWLSGRSPLSEPQLPLQPSGNSSSV

SEQ ID NO: 11036 - protein, 45 aa, Artificial Sequence
  Synthetic polypeptide
MAEKVNNFPPLPKFIPLKPCFYQDFEADIPPQHVSMTKRLYYLWM

SEQ ID NO: 11037 - protein, 42 aa, Artificial Sequence
  Synthetic polypeptide
MFLPRLRGRYSSPACQHDQAPLLPLDVKKVLAWRLLWFHAAL

SEQ ID NO: 11038 - protein, 127 aa, Artificial Sequence
  Synthetic polypeptide
MPTDHEEPCGPSHKSFCLNGGLCYVIPTIPSPFCRCVENYTGARCEEVFLPGSSIQTKSNLFEAFVALAVLVTLIIGAFYFLCRKGHFQRASSVQYDINLVETSSTSAHHSIHWGLGMYPPWRRGDY

SEQ ID NO: 11039 - protein, 62 aa, Artificial Sequence
  Synthetic polypeptide
AQAEERYGKELVQIARKAGGQTEINLWAFAPAVALLLPCPVPPIPQGLPEMSPPSESCHLHS

SEQ ID NO: 11040 - protein, 99 aa, Artificial Sequence
  Synthetic polypeptide
MASCRDFTAHTGYEVLLQRLLDGRKMCKDMEELLRQRAQAEERYGKELVQIARKAGGQTEINLWAFAPAVALLLPCPVPPIPQGLPEMSPPSESCHLHS

SEQ ID NO: 11041 - protein, 74 aa, Artificial Sequence
  Synthetic polypeptide
MCKDMEELLRQRAQAEERYGKELVQIARKAGGQTEINLWAFAPAVALLLPCPVPPIPQGLPEMSPPSESCHLHS

SEQ ID NO: 11042 - protein, 108 aa, Artificial Sequence
  Synthetic polypeptide
MMPQLQFKDAFWCRDFTAHTGYEVLLQRLLDGRKMCKDMEELLRQRAQAEERYGKELVQIARKAGGQTEINLWAFAPAVALLLPCPVPPIPQGLPEMSPPSESCHLHS

SEQ ID NO: 11043 - protein, 173 aa, Artificial Sequence
  Synthetic polypeptide
MNDRCPRPGSSSLARGCLLSVADGAGREGGPGPALPGLGRCCWRLALHQASLWQESELCRGRRLRMMPQLQFKDAFWCRDFTAHTGYEVLLQRLLDGRKMCKDMEELLRQRAQAEERYGKELVQIARKAGGQTEINLWAFAPAVALLLPCPVPPIPQGLPEMSPPSESCHLHS

SEQ ID NO: 11044 - protein, 107 aa, Artificial Sequence
  Synthetic polypeptide
MPQLQFKDAFWCRDFTAHTGYEVLLQRLLDGRKMCKDMEELLRQRAQAEERYGKELVQIARKAGGQTEINLWAFAPAVALLLPCPVPPIPQGLPEMSPPSESCHLHS

SEQ ID NO: 11045 - protein, 232 aa, Artificial Sequence
  Synthetic polypeptide
AQAEERYGKELVQIARKAGGQTEINSLRASFDSLKQQMENVGSSHIQLALTLREELRSLEEFRERQKEQRKKGMAVPRQSDCMEVKSPSWEYEAVMDRVQKSKLSLYKKAMESKKTYEQKCRDADDAEQAFERISANGHQKQVEKSQNKARQCKDSATEAERVYRQSIAQLEKVRAEWEQEHRTTCEAFQLQEFDRLTILRNALWVHSNQLSMQCVKDDEGLAHRRCSGNRK

SEQ ID NO: 11046 - protein, 259 aa, Artificial Sequence
  Synthetic polypeptide
MMPQLQFKDAFWCRDFTAHTGYEVLLQRLLDGRKMCKDMEELLRQRAQAEERYGKELVQIARKAGGQTEINSLRASFDSLKQQMENVGSSHIQLALTLREELRSLEEFRERQKEQRKKYEAVMDRVQKSKLSLYKKAMESKKTYEQKCRDADDAEQAFERISANGHQKQVEKSQNKARQCKDSATEAERVYRQSIAQLEKVRAEWEQEHRTTCEAFQLQEFDRLTILRNALWVHSNQLSMQCVKDDEGLAHRRCSGNRK

SEQ ID NO: 11047 - protein, 324 aa, Artificial Sequence
  Synthetic polypeptide
MNDRCPRPGSSSLARGCLLSVADGAGREGGPGPALPGLGRCCWRLALHQASLWQESELCRGRRLRMMPQLQFKDAFWCRDFTAHTGYEVLLQRLLDGRKMCKDMEELLRQRAQAEERYGKELVQIARKAGGQTEINSLRASFDSLKQQMENVGSSHIQLALTLREELRSLEEFRERQKEQRKKYEAVMDRVQKSKLSLYKKAMESKKTYEQKCRDADDAEQAFERISANGHQKQVEKSQNKARQCKDSATEAERVYRQSIAQLEKVRAEWEQEHRTTCEAFQLQEFDRLTILRNALWVHSNQLSMQCVKDDEGLAHRRCSGNRK

SEQ ID NO: 11048 - protein, 258 aa, Artificial Sequence
  Synthetic polypeptide
MPQLQFKDAFWCRDFTAHTGYEVLLQRLLDGRKMCKDMEELLRQRAQAEERYGKELVQIARKAGGQTEINSLRASFDSLKQQMENVGSSHIQLALTLREELRSLEEFRERQKEQRKKYEAVMDRVQKSKLSLYKKAMESKKTYEQKCRDADDAEQAFERISANGHQKQVEKSQNKARQCKDSATEAERVYRQSIAQLEKVRAEWEQEHRTTCEAFQLQEFDRLTILRNALWVHSNQLSMQCVKDDEGLAHRRCSGNRK

SEQ ID NO: 11049 - protein, 392 aa, Artificial Sequence
  Synthetic polypeptide
MMPQLQFKDAFWCRDFTAHTGYEVLLQRLLDGRKMCKDMEELLRQRAQAEERYGKELVQIARKAGGQTEINSLRASFDSLKQQMENVGSSHIQLALTLREELRSLEEFRERQKEQRKKYEAVMDRVQKSKLSLYKKAMESKKTYEQKCRDADDAEQAFERISANGHQKQVEKSQNKARQCKDSATEAERVYRQSIAQLEKVRAEWEQEHRTTCEAFQLQEFDRLTILRNALWVHSNQLSMQCVKDDELYEEVRLTLEGCSIDADIDSFIQAKSTGTEPPAPVPYQNYYDREVTPLTSSPGIQPSCGMIKRFSGLLHGSPKTTSLAASAASTETLTPTPERNEGVYTAIAVQEIQGNPASPAQEYRALYDYTAQNPDELDLSAGDILETKLWK

SEQ ID NO: 11050 - protein, 389 aa, Artificial Sequence
  Synthetic polypeptide
MMPQLQFKDAFWCRDFTAHTGYEVLLQRLLDGRKMCKDMEELLRQRAQAEERYGKELVQIARKAGGQTEINSLRASFDSLKQQMENVGSSHIQLALTLREELRSLEEFRERQKEQRKKYEAVMDRVQKSKLSLYKKAMESKKTYEQKCRDADDAEQAFERISANGHQKQVEKSQNKARQCKDSATEAERVYRQSIAQLEKVRAEWEQEHRTTCEAFQLQEFDRLTILRNALWVHSNQLSMQCVKDDELYEEVRLTLEGCSIDADIDSFIQAKSTGTEPPAPVPYQNYYDREVTPLTSSPGIQPSCGMIKRFSGLLHGSPKTTSLAASAETLTPTPERNEGVYTAIAVQEIQGNPASPAQEYRALYDYTAQNPDELDLSAGDILETKLWK

SEQ ID NO: 11051 - protein, 373 aa, Artificial Sequence
  Synthetic polypeptide
MMPQLQFKDAFWCRDFTAHTGYEVLLQRLLDGRKMCKDMEELLRQRAQAEERYGKELVQIARKAGGQTEINSLRASFDSLKQQMENVGSSHIQLALTLREELRSLEEFRERQKEQRKKYEAVMDRVQKSKLSLYKKAMESKKTYEQKCRDADDAEQAFERISANGHQKQVEKSQNKARQCKDSATEAERVYRQSIAQLEKVRAEWEQEHRTTCEAFQLQEFDRLTILRNALWVHSNQLSMQCVKDDELYEEVRLTLEGCSIDADIDSFIQAKSTGTEPPGEVRLADSAASRFSGLLHGSPKTTSLAASAASTETLTPTPERNEGVYTAIAVQEIQGNPASPAQEYRALYDYTAQNPDELDLSAGDILETKLWK

SEQ ID NO: 11052 - protein, 372 aa, Artificial Sequence
  Synthetic polypeptide
MPQLQFKDAFWCRDFTAHTGYEVLLQRLLDGRKMCKDMEELLRQRAQAEERYGKELVQIARKAGGQTEINSLRASFDSLKQQMENVGSSHIQLALTLREELRSLEEFRERQKEQRKKYEAVMDRVQKSKLSLYKKAMESKKTYEQKCRDADDAEQAFERISANGHQKQVEKSQNKARQCKDSATEAERVYRQSIAQLEKVRAEWEQEHRTTCEAFQLQEFDRLTILRNALWVHSNQLSMQCVKDDELYEEVRLTLEGCSIDADIDSFIQAKSTGTEPPGEVRLADSAASRFSGLLHGSPKTTSLAASAASTETLTPTPERNEGVYTAIAVQEIQGNPASPAQEYRALYDYTAQNPDELDLSAGDILETKLWK

SEQ ID NO: 11053 - protein, 109 aa, Artificial Sequence
  Synthetic polypeptide
  misc_feature (1)..(1): Xaa can be any naturally occurring amino acid
XDAGRLQHRRRHRQFHPGQEHGHRAPRFSGLLHGSPKTTSLAASAASTETLTPTPERNEGVYTAIAVQEIQGNPASPAQEYRALYDYTAQNPDELDLSAGDILETKLWK

SEQ ID NO: 11054 - protein, 135 aa, Artificial Sequence
  Synthetic polypeptide
MGAAGRQDFLFKAMLTISWLTLTCFPGATSTVAAGCPDQSPELQPWNPGHDQDHHVHIGQGKTLLLTSSATVYSIHISEGGIISNLEMISSIWEDVHRLDANMQILCHLISDWSIHGVWYLGGAGTNSLQILRDD

SEQ ID NO: 11055 - protein, 218 aa, Artificial Sequence
  Synthetic polypeptide
MQGKKPGGSSGGGRSGELQGDEAQRNKKKKKKVSCFSNIKIFLVSECALMLAQGTVGAYLVSVLTTLERRFNLQSADVGVIASSFEIGNLALILFVSYFGARGHRPRLIGCGGIVMALGALLSALPEFLTHQYKYEAGEIRWGAEGRDVCAANGSGGDEGPDPDLICRNRTATNMMYLLLIGAQVLLGIGATPVQPLGVSYIDDHVRRKDSSLYIGST

SEQ ID NO: 11056 - protein, 637 aa, Artificial Sequence
  Synthetic polypeptide
MQGKKPGGSSGGGRSGELQGDEAQRNKKKKKKVSCFSNIKIFLVSECALMLAQGTVGAYLVSVLTTLERRFNLQSADVGVIASSFEIGNLALILFVSYFGARGHRPRLIGCGGIVMALGALLSALPEFLTHQYKYEAGEIRWGAEGRDVCAANGSGGDEGPDPDLICRNRTATNMMYLLLIGAQVLLGIGATPVQPLGVSYIDDHVRRKDSSLYIGILFTMLVFGPACGFILGSFCTKIYVDAVFIDTSNLDITPDDPRWIGAWWGGFLLCGALLFFSSLLMFGFPQSLPPHSEPAMESEQAMLSEREYERPKPSNGVLRHPLEPDSSASCFQQLRVIPKVTKHLLSNPVFTCIILAACMEIAVVAGFAAFLGKYLEQQFNLTTSSANQLLGMTAIPCACLGIFLGGLLVKKLSLSALGAIRMAMLVNLVSTACYVSFLFLGCDTGPVAGVTVPYGNSTAPGSALDPYSPCNNNCECQTDSFTPVCGADGITYLSACFAGCNSTNLTGCACLTTVPAENATVVPGKCPSPGCQEAFLTFLCVMCICSLIGAMAQTPSVIILIRTVSPELKSYALGVLFLLLRLLVKVAGVESWIHHTRVKLWTSPVGPLARESQDQPDQPDQPRYTCELLEDLYLLF

SEQ ID NO: 11057 - protein, 30 aa, Artificial Sequence; identical to SEQ ID NO: 1371
  Synthetic polypeptide

SEQ ID NO: 11058 - protein, 27 aa, Artificial Sequence
  Synthetic polypeptide
MMKMRTPQYSTSNTGGLGTNSLRIPRD

SEQ ID NO: 11059 - protein, 171 aa, Artificial Sequence; identical to SEQ ID NO: 943
  Synthetic polypeptide

SEQ ID NO: 11060 - protein, 139 aa, Artificial Sequence
  Synthetic polypeptide
MLVLLAFIIAFHITSAALLFIATVDNAWWVGDEFFADVWRICTNNTNCTVINDSFQEYSTLQAVQATMILSTILCCIAFFIFVLQLFRLKQGERFVLTSIIQLMSCGVMLLWQTCVTMAHRKPKLLTVWPFTGYVCGPL

SEQ ID NO: 11061 - protein, 674 aa, Artificial Sequence
  Synthetic polypeptide
MALRGFCSADGSDPLWDWNVTWNTSNPDFTKCFQNTVLVWVPCFYLWACFPFYFLYLSRHDRGYIQMTPLNKTKTALGFLLWIVCWADLFYSFWERSRGIFLAPVFLVSPTLLGITMLLATFLIQLERRKGVQSSGIMLTFWLVALVCALAILRSKIMTALKEDAQVDLFRDITFYVYFSLLLIQLVLSCFSDRSPLFSETIHDPNPCPESSASFLSRITFWWITGLIVRGYRQPLEGSDLWSLNKEDTSEQVVPVLVKNWKKECAKTRKQPVKVVYSSKDPAQPKESSKVDANEEVEALIVKSPQKEWNPSLFKVLYKTFGPYFLMSFFFKAIHDLMMFSGPQILKLLIKFVNDTKAPDWQGYFYTVLLFVTACLQTLVLHQYFHICFVSGMRIKTAVIGAVYRKALVITNSARKSSTVGEIVNLMSVDAQRFMDLATYINMIWSAPLQVILALYLLWLNLGPSVLAGVAVMVLMVPVNAVMAMKTKTYQVAHMKSKDNRIKLMNEILNGIKVLKLYAWELAFKDKVLAIRQEELKVLKKSAYLSAVGTFTWVCTPFLVALCTFAVYVTIDENNILDAQTAFVSLALFNILRFPLNILPMVISSIVQASVSLKRLRIFLSHEELEPDSIERRPVKDGGGTNSITVRNATFTWARSDPPTLNGDTLSWNQVTML

SEQ ID NO: 11062 - protein, 573 aa, Artificial Sequence
  Synthetic polypeptide
  misc_feature (1)..(1): Xaa can be any naturally occurring amino acid
XAPVFLVSPTLLGITMLLATFLIQLERRKGVQSSGIMLTFWLVALVCALAILRSKIMTALKEDAQVDLFRDITFYVYFSLLLIQLVLSCFSDRSPLFSETIHDPNPCPESSASFLSRITFWWITGLIVRGYRQPLEGSDLWSLNKEDTSEQVVPVLVKNWKKECAKTRKQPVKVVYSSKDPAQPKESSKVDANEEVEALIVKSPQKEWNPSLFKVLYKTFGPYFLMSFFFKAIHDLMMFSGPQILKLLIKFVNDTKAPDWQGYFYTVLLFVTACLQTLVLHQYFHICFVSGMRIKTAVIGAVYRKALVITNSARKSSTVGEIVNLMSVDAQRFMDLATYINMIWSAPLQVILALYLLWLNLGPSVLAGVAVMVLMVPVNAVMAMKTKTYQVAHMKSKDNRIKLMNEILNGIKVLKLYAWELAFKDKVLAIRQEELKVLKKSAYLSAVGTFTWVCTPFLVALCTFAVYVTIDENNILDAQTAFVSLALFNILRFPLNILPMVISSIVQASVSLKRLRIFLSHEELEPDSIERRPVKDGGGTNSITVRNATFTWARSDPPTLNGDTLSWNQVTML

SEQ ID NO: 11063 - protein, 925 aa, Artificial Sequence; identical to SEQ ID NO: 97
  Synthetic polypeptide

SEQ ID NO: 11064 - protein, 915 aa, Artificial Sequence; identical to SEQ ID NO: 98
  Synthetic polypeptide

SEQ ID NO: 11065 - protein, 859 aa, Artificial Sequence; identical to SEQ ID NO: 120
  Synthetic polypeptide

SEQ ID NO: 11066 - protein, 856 aa, Artificial Sequence; identical to SEQ ID NO: 121
  Synthetic polypeptide

SEQ ID NO: 11067 - protein, 800 aa, Artificial Sequence; identical to SEQ ID NO: 140
  Synthetic polypeptide

SEQ ID NO: 11068 - protein, 15 aa, Artificial Sequence
  Synthetic polypeptide
MVTDSAGKQLQRYKN

SEQ ID NO: 11069 - protein, 824 aa, Artificial Sequence
  Synthetic polypeptide
  misc_feature (1)..(1): Xaa can be any naturally occurring amino acid
XAPVFLVSPTLLGITMLLATFLIQLERRKGVQSSGIMLTFWLVALVCALAILRSKIMTALKEDAQVDLFRDITFYVYFSLLLIQLVLSCFSDRSPLFSETIHDPNPCPESSASFLSRITFWWITGLIVRGYRQPLEGSDLWSLNKEDTSEQVVPVLVKNWKKECAKTRKQPVKVVYSSKDPAQPKESSKVDANEEVEALIVKSPQKEWNPSLFKVLYKTFGPYFLMSFFFKAIHDLMMFSGPQILKLLIKFVNDTKAPDWQGYFYTVLLFVTACLQTLVLHQYFHICFVSGMRIKTAVIGAVYRKALVITNSARKSSTVGEIVNLMSVDAQRFMDLATYINMIWSAPLQVILALYLLWLNLGPSVLAGVAVMVLMVPVNAVMAMKTKTYQVAHMKSKDNRIKLMNEILNGIKVLKLYAWELAFKDKVLAIRQEELKVLKKSAYLSAVGTFTWVCTPFLVALCTFAVYVTIDENNILDAQTAFVSLALFNILRFPLNILPMVISSIVQASVSLKRLRIFLSHEELEPDSIERRPVKDGGGTNSITVRNATFTWARSDPPTLNGITFSIPEGALVAVVGQVGCGKSSLLSALLAEMDKVEGHVAIKGSVAYVPQQAWIQNDSLRENILFGCQLEEPYYRSVIQACALLPDLEILPSGDRTEIGEKGVNLSGGQKQRVSLARAVYSNADIYLFDDPLSAVDAHVGKHIFENVIGPKGMLKNKTRILVTHSMSYLPQVDVIIVMSGGKISEMGSYQELLARDGAFAEFLRTYASTEQEQDAEENGSTVMDEEEAGVTGVSGPGKEAKQMENGMLVTDSAGKQLQRYKN

SEQ ID NO: 11070 - protein, 1380 aa, Artificial Sequence
  Synthetic polypeptide
MALRGFCSADGSDPLWDWNVTWNTSNPDFTKCFQNTVLVWVPCFYLWACFPFYFLYLSRHDRGYIQMTPLNKTKTALGFLLWIVCWADLFYSFWERSRGIFLAPVFLVSPTLLGITMLLATFLIQLERRKGVQSSGIMLTFWLVALVCALAILRSKIMTALKEDAQVDLFRDITFYVYFSLLLIQLVLSCFSDRSPLFSETIHDPNPCPESSASFLSRITFWWITGLIVRGYRQPLEGSDLWSLNKEDTSEQVVPVLVKNWKKECAKTRKQPVKVVYSSKDPAQPKESSKVDANEEVEALIVKSPQKEWNPSLFKVLYKTFGPYFLMSFFFKAIHDLMMFSGPQILKLLIKFVNDTKAPDWQGYFYTVLLFVTACLQTLVLHQYFHICFVSGMRIKTAVIGAVYRKALVITNSARKSSTVGEIVNLMSVDAQRFMDLATYINMIWSAPLQVILALYLLWLNLGPSVLAGVAVMVLMVPVNAVMAMKTKTYQVAHMKSKDNRIKLMNEILNGIKVLKLYAWELAFKDKVLAIRQEELKVLKKSAYLSAVGTFTWVCTPFLVALCTFAVYVTIDENNILDAQTAFVSLALFNILRFPLNILPMVISSIVQASVSLKRLRIFLSHEELEPDSIERRPVKDGGGTNSITVRNATFTWARSDPPTLNGITFSIPEGALVAVVGQVGCGKSSLLSALLAEMDKVEGHVAIKGSVAYVPQQAWIQNDSLRENILFGCQLEEPYYRSVIQACALLPDLEILPSGDRTEIGEKGVNLSGGQKQRVSLARAVYSNADIYLFDDPLSAVDAHVGKHIFENVIGPKGMLKNKTRILVTHSMSYLPQVDVIIVMSGGKISEMGSYQELLARDGAFAEFLRTYASTEQEQDAEENGSTVMDEEEAGVTGVSGPGKEAKQMENGMLVTDSAGKQLQRQLSSSSSYSGDISRHHNSTAELQKAEAKKEETWKLMEADKAQTGQVKLSVYWDYMKAIGLFISFLSIFLFMCNHVSALASNYWLSLWTDDPIVNGTQEHTKVRLSVYGALGISQGIAVFGYSMAVSIGGILASRCLHVDLLHSILRSPMSFFERTPSGNLVNRFSKELDTVDSMIPEVIKMFMGSLFNVIGACIVILLATPIAAIIIPPLGLIYFFVQRFYVASSRQLKRLESVSRSPVYSHFNETLLGVSVIRAFEEQERFIHQSDLKVDENQKAYYPSIVANRWLAVRLECVGNCIVLFAALFAVISRHSLSAGLVGLSVSYSLQVTTYLNWLVRMSSEMETNIVAVERLKEYSETEKEAPWQIQETAPPSSWPQVGRVEFRNYCLRYREDLDFVLRHINVTINGGEKIRTSGNIRSILPRLALSSQPVSLLVHPSPSLSHSLPSWPLQNIRICDL

SEQ ID NO: 11071 - protein, 1370 aa, Artificial Sequence
  Synthetic polypeptide
MALRGFCSADGSDPLWDWNVTWNTSNPDFTKCFQNTVLVWVPCFYLWACFPFYFLYLSRHDRGYIQMTPLNKTKTALGFLLWIVCWADLFYSFWERSRGIFLAPVFLVSPTLLGITMLLATFLIQLERRKGVQSSGIMLTFWLVALVCALAILRSKIMTALKEDAQVDLFRDITFYVYFSLLLIQLVLSCFSDRSPLFSETIHDPNPCPESSASFLSRITFWWITGLIVRGYRQPLEGSDLWSLNKEDTSEQVVPVLVKNWKKECAKTRKQPVKVVYSSKDPAQPKESSKVDANEEVEALIVKSPQKEWNPSLFKVLYKTFGPYFLMSFFFKAIHDLMMFSGPQILKLLIKFVNDTKAPDWQGYFYTVLLFVTACLQTLVLHQYFHICFVSGMRIKTAVIGAVYRKALVITNSARKSSTVGEIVNLMSVDAQRFMDLATYINMIWSAPLQVILALYLLWLNLGPSVLAGVAVMVLMVPVNAVMAMKTKTYQVAHMKSKDNRIKLMNEILNGIKVLKLYAWELAFKDKVLAIRQEELKVLKKSAYLSAVGTFTWVCTPFLVALCTFAVYVTIDENNILDAQTAFVSLALFNILRFPLNILPMVISSIVQASVSLKRLRIFLSHEELEPDSIERRPVKDGGGTNSITVRNATFTWARSDPPTLNGITFSIPEGALVAVVGQVGCGKSSLLSALLAEMDKVEGHVAIKGSVAYVPQQAWIQNDSLRENILFGCQLEEPYYRSVIQACALLPDLEILPSGDRTEIGEKGVNLSGGQKQRVSLARAVYSNADIYLFDDPLSAVDAHVGKHIFENVIGPKGMLKNKTRILVTHSMSYLPQVDVIIVMSGGKISEMGSYQELLARDGAFAEFLRTYASTEQEQDAEENGVTGVSGPGKEAKQMENGMLVTDSAGKQLQRQLSSSSSYSGDISRHHNSTAELQKAEAKKEETWKLMEADKAQTGQVKLSVYWDYMKAIGLFISFLSIFLFMCNHVSALASNYWLSLWTDDPIVNGTQEHTKVRLSVYGALGISQGIAVFGYSMAVSIGGILASRCLHVDLLHSILRSPMSFFERTPSGNLVNRFSKELDTVDSMIPEVIKMFMGSLFNVIGACIVILLATPIAAIIIPPLGLIYFFVQRFYVASSRQLKRLESVSRSPVYSHFNETLLGVSVIRAFEEQERFIHQSDLKVDENQKAYYPSIVANRWLAVRLECVGNCIVLFAALFAVISRHSLSAGLVGLSVSYSLQVTTYLNWLVRMSSEMETNIVAVERLKEYSETEKEAPWQIQETAPPSSWPQVGRVEFRNYCLRYREDLDFVLRHINVTINGGEKIRTSGNIRSILPRLALSSQPVSLLVHPSPSLSHSLPSWPLQNIRICDL

SEQ ID NO: 11072 - protein, 1314 aa, Artificial Sequence
  Synthetic polypeptide
MALRGFCSADGSDPLWDWNVTWNTSNPDFTKCFQNTVLVWVPCFYLWACFPFYFLYLSRHDRGYIQMTPLNKTKTALGFLLWIVCWADLFYSFWERSRGIFLAPVFLVSPTLLGITMLLATFLIQLERRKGVQSSGIMLTFWLVALVCALAILRSKIMTALKEDAQVDLFRDITFYVYFSLLLIQLVLSCFSDRSPLFSETIHDPNPCPESSASFLSRITFWWITGLIVRGYRQPLEGSDLWSLNKEDTSEQVVPVLVKNWKKECAKTRKQPVKVVYSSKDPAQPKESSKVDANEEVEALIVKSPQKEWNPSLFKVLYKTFGPYFLMSFFFKAIHDLMMFSGPQILKLLIKFVNDTKAPDWQGYFYTVLLFVTACLQTLVLHQYFHICFVSGMRIKTAVIGAVYRKALVITNSARKSSTVGEIVNLMSVDAQRFMDLATYINMIWSAPLQVILALYLLWLNLGPSVLAGVAVMVLMVPVNAVMAMKTKTYQVAHMKSKDNRIKLMNEILNGIKVLKLYAWELAFKDKVLAIRQEELKVLKKSAYLSAVGTFTWVCTPFLVALCTFAVYVTIDENNILDAQTAFVSLALFNILRFPLNILPMVISSIVQASVSLKRLRIFLSHEELEPDSIERRPVKDGGGTNSITVRNATFTWARSDPPTLNGITFSIPEGALVAVVGQVGCGKSSLLSALLAEMDKVEGHVAIKGSVAYVPQQAWIQNDSLRENILFGCQLEEPYYRSVIQACALLPDLEILPSGDRTEIGEKTRILVTHSMSYLPQVDVIIVMSGGKISEMGSYQELLARDGAFAEFLRTYASTEQEQDAEENGVTGVSGPGKEAKQMENGMLVTDSAGKQLQRQLSSSSSYSGDISRHHNSTAELQKAEAKKEETWKLMEADKAQTGQVKLSVYWDYMKAIGLFISFLSIFLFMCNHVSALASNYWLSLWTDDPIVNGTQEHTKVRLSVYGALGISQGIAVFGYSMAVSIGGILASRCLHVDLLHSILRSPMSFFERTPSGNLVNRFSKELDTVDSMIPEVIKMFMGSLFNVIGACIVILLATPIAAIIIPPLGLIYFFVQRFYVASSRQLKRLESVSRSPVYSHFNETLLGVSVIRAFEEQERFIHQSDLKVDENQKAYYPSIVANRWLAVRLECVGNCIVLFAALFAVISRHSLSAGLVGLSVSYSLQVTTYLNWLVRMSSEMETNIVAVERLKEYSETEKEAPWQIQETAPPSSWPQVGRVEFRNYCLRYREDLDFVLRHINVTINGGEKIRTSGNIRSILPRLALSSQPVSLLVHPSPSLSHSLPSWPLQNIRICDL

SEQ ID NO: 11073 - protein, 1311 aa, Artificial Sequence
  Synthetic polypeptide
MALRGFCSADGSDPLWDWNVTWNTSNPDFTKCFQNTVLVWVPCFYLWACFPFYFLYLSRHDRGYIQMTPLNKTKTALGFLLWIVCWADLFYSFWERSRGIFLAPVFLVSPTLLGITMLLATFLIQLERRKGVQSSGIMLTFWLVALVCALAILRSKIMTALKEDAQVDLFRDITFYVYFSLLLIQLVLSCFSDRSPLFSETIHDPNPCPESSASFLSRITFWWITGLIVRGYRQPLEGSDLWSLNKEDTSEQVVPVLVKNWKKECAKTRKQPVKVVYSSKDPAQPKESSKVDANEEVEALIVKSPQKEWNPSLFKVLYKTFGPYFLMSFFFKAIHDLMMFSGPQILKLLIKFVNDTKAPDWQGYFYTVLLFVTACLQTLVLHQYFHICFVSGMRIKTAVIGAVYRKALVITNSARKSSTVGEIVNLMSVDAQRFMDLATYINMIWSAPLQVILALYLLWLNLGPSVLAGVAVMVLMVPVNAVMAMKTKTYQVAHMKSKDNRIKLMNEILNGIKVLKLYAWELAFKDKVLAIRQEELKVLKKSAYLSAVGTFTWVCTPFLVALCTFAVYVTIDENNILDAQTAFVSLALFNILRFPLNILPMVISSIVQASVSLKRLRIFLSHEELEPDSIERRPVKDGGGTNSITVRNATFTWARSDPPTLNGITFSIPEGALVAVVGQVGCGKSSLLSALLAEMDKVEGHVAIKGVNLSGGQKQRVSLARAVYSNADIYLFDDPLSAVDAHVGKHIFENVIGPKGMLKNKTRILVTHSMSYLPQVDVIIVMSGGKISEMGSYQELLARDGAFAEFLRTYASTEQEQDAEENGVTGVSGPGKEAKQMENGMLVTDSAGKQLQRQLSSSSSYSGDISRHHNSTAELQKAEAKKEETWKLMEADKAQTGQVKLSVYWDYMKAIGLFISFLSIFLFMCNHVSALASNYWLSLWTDDPIVNGTQEHTKVRLSVYGALGISQGIAVFGYSMAVSIGGILASRCLHVDLLHSILRSPMSFFERTPSGNLVNRFSKELDTVDSMIPEVIKMFMGSLFNVIGACIVILLATPIAAIIIPPLGLIYFFVQRFYVASSRQLKRLESVSRSPVYSHFNETLLGVSVIRAFEEQERFIHQSDLKVDENQKAYYPSIVANRWLAVRLECVGNCIVLFAALFAVISRHSLSAGLVGLSVSYSLQVTTYLNWLVRMSSEMETNIVAVERLKEYSETEKEAPWQIQETAPPSSWPQVGRVEFRNYCLRYREDLDFVLRHINVTINGGEKIRTSGNIRSILPRLALSSQPVSLLVHPSPSLSHSLPSWPLQNIRICDL

SEQ ID NO: 11074 - protein, 1255 aa, Artificial Sequence
  Synthetic polypeptide
MALRGFCSADGSDPLWDWNVTWNTSNPDFTKCFQNTVLVWVPCFYLWACFPFYFLYLSRHDRGYIQMTPLNKTKTALGFLLWIVCWADLFYSFWERSRGIFLAPVFLVSPTLLGITMLLATFLIQLERRKGVQSSGIMLTFWLVALVCALAILRSKIMTALKEDAQVDLFRDITFYVYFSLLLIQLVLSCFSDRSPLFSETIHDPNPCPESSASFLSRITFWWITGLIVRGYRQPLEGSDLWSLNKEDTSEQVVPVLVKNWKKECAKTRKQPVKVVYSSKDPAQPKESSKVDANEEVEALIVKSPQKEWNPSLFKVLYKTFGPYFLMSFFFKAIHDLMMFSGPQILKLLIKFVNDTKAPDWQGYFYTVLLFVTACLQTLVLHQYFHICFVSGMRIKTAVIGAVYRKALVITNSARKSSTVGEIVNLMSVDAQRFMDLATYINMIWSAPLQVILALYLLWLNLGPSVLAGVAVMVLMVPVNAVMAMKTKTYQVAHMKSKDNRIKLMNEILNGIKVLKLYAWELAFKDKVLAIRQEELKVLKKSAYLSAVGTFTWVCTPFLVALCTFAVYVTIDENNILDAQTAFVSLALFNILRFPLNILPMVISSIVQASVSLKRLRIFLSHEELEPDSIERRPVKDGGGTNSITVRNATFTWARSDPPTLNGITFSIPEGALVAVVGQVGCGKSSLLSALLAEMDKVEGHVAIKTRILVTHSMSYLPQVDVIIVMSGGKISEMGSYQELLARDGAFAEFLRTYASTEQEQDAEENGVTGVSGPGKEAKQMENGMLVTDSAGKQLQRQLSSSSSYSGDISRHHNSTAELQKAEAKKEETWKLMEADKAQTGQVKLSVYWDYMKAIGLFISFLSIFLFMCNHVSALASNYWLSLWTDDPIVNGTQEHTKVRLSVYGALGISQGIAVFGYSMAVSIGGILASRCLHVDLLHSILRSPMSFFERTPSGNLVNRFSKELDTVDSMIPEVIKMFMGSLFNVIGACIVILLATPIAAIIIPPLGLIYFFVQRFYVASSRQLKRLESVSRSPVYSHFNETLLGVSVIRAFEEQERFIHQSDLKVDENQKAYYPSIVANRWLAVRLECVGNCIVLFAALFAVISRHSLSAGLVGLSVSYSLQVTTYLNWLVRMSSEMETNIVAVERLKEYSETEKEAPWQIQETAPPSSWPQVGRVEFRNYCLRYREDLDFVLRHINVTINGGEKIRTSGNIRSILPRLALSSQPVSLLVHPSPSLSHSLPSWPLQNIRICDL

SEQ ID NO: 11075 - protein, 1279 aa, Artificial Sequence
  Synthetic polypeptide
  misc_feature (1)..(1): Xaa can be any naturally occurring amino acid
XAPVFLVSPTLLGITMLLATFLIQLERRKGVQSSGIMLTFWLVALVCALAILRSKIMTALKEDAQVDLFRDITFYVYFSLLLIQLVLSCFSDRSPLFSETIHDPNPCPESSASFLSRITFWWITGLIVRGYRQPLEGSDLWSLNKEDTSEQVVPVLVKNWKKECAKTRKQPVKVVYSSKDPAQPKESSKVDANEEVEALIVKSPQKEWNPSLFKVLYKTFGPYFLMSFFFKAIHDLMMFSGPQILKLLIKFVNDTKAPDWQGYFYTVLLFVTACLQTLVLHQYFHICFVSGMRIKTAVIGAVYRKALVITNSARKSSTVGEIVNLMSVDAQRFMDLATYINMIWSAPLQVILALYLLWLNLGPSVLAGVAVMVLMVPVNAVMAMKTKTYQVAHMKSKDNRIKLMNEILNGIKVLKLYAWELAFKDKVLAIRQEELKVLKKSAYLSAVGTFTWVCTPFLVALCTFAVYVTIDENNILDAQTAFVSLALFNILRFPLNILPMVISSIVQASVSLKRLRIFLSHEELEPDSIERRPVKDGGGTNSITVRNATFTWARSDPPTLNGITFSIPEGALVAVVGQVGCGKSSLLSALLAEMDKVEGHVAIKGSVAYVPQQAWIQNDSLRENILFGCQLEEPYYRSVIQACALLPDLEILPSGDRTEIGEKGVNLSGGQKQRVSLARAVYSNADIYLFDDPLSAVDAHVGKHIFENVIGPKGMLKNKTRILVTHSMSYLPQVDVIIVMSGGKISEMGSYQELLARDGAFAEFLRTYASTEQEQDAEENGSTVMDEEEAGVTGVSGPGKEAKQMENGMLVTDSAGKQLQRQLSSSSSYSGDISRHHNSTAELQKAEAKKEETWKLMEADKAQTGQVKLSVYWDYMKAIGLFISFLSIFLFMCNHVSALASNYWLSLWTDDPIVNGTQEHTKVRLSVYGALGISQGIAVFGYSMAVSIGGILASRCLHVDLLHSILRSPMSFFERTPSGNLVNRFSKELDTVDSMIPEVIKMFMGSLFNVIGACIVILLATPIAAIIIPPLGLIYFFVQRFYVASSRQLKRLESVSRSPVYSHFNETLLGVSVIRAFEEQERFIHQSDLKVDENQKAYYPSIVANRWLAVRLECVGNCIVLFAALFAVISRHSLSAGLVGLSVSYSLQVTTYLNWLVRMSSEMETNIVAVERLKEYSETEKEAPWQIQETAPPSSWPQVGRVEFRNYCLRYREDLDFVLRHINVTINGGEKIRTSGNIRSILPRLALSSQPVSLLVHPSPSLSHSLPSWPLQNIRICDL

SEQ ID NO: 11076 - protein, 439 aa, Artificial Sequence
  Synthetic polypeptide
MAAPAEPCAGQGVWNQTEPEPAATSLLSLCFLRTAGVWVPPMYLWVLGPIYLLFIHHHGRGYLRMSPLFKAKMVLGFALIVLCTSSVAVALWKIQQGTPEAPEFLIHPTVWLTTMSFAVFLIHTERKKGVQSSGVLFGYWLLCFVLPATNAAQQASGAGFQSDPVRHLSTYLCLSLVVAQFVLSCLADQPPFFPEDPQQSNPCPETGAAFPSKATFWWVSGLVWRGYRRPLRPKDLWSLGRENSSEELVSRLEKEWMRNRSAARRHNKAIAFKRKGGSGMKAPETEPFLRQEGSQWRPLLKAIWQVFHSTFLLGTLSLIISDVFRFTVPKLLSLFLEFIGDPKPPAWKGYLLAVLMFLSACLQTLFEQQNMYRLKVLQMRLRSAITGLVYRKLLGKLTQENRLNPGGGGCSELRSRHYSAAWVRERDLVSEQKKNKTKK

SEQ ID NO: 11077 - protein, 3740 aa, Artificial Sequence
  Synthetic polypeptide
MPPAAPARLALALGLGLWLGALAGGPGRGCGPCEPPCLCGPAPGAACRVNCSGRGLRTLGPALRIPADATALDVSHNLLRALDVGLLANLSALAELDISNNKISTLEEGIFANLFNLSEINLSGNPFECDCGLAWLPRWAEEQQVRVVQPEAATCAGPGSLAGQPLLGIPLLDSGCGEEYVACLPDNSSGTVAAVSFSAAHEGLLQPEACSAFCFSTGQGLAALSEQGWCLCGAAQPSSASFACLSLCSGPPPPPAPTCRGPTLLQHVFPASPGATLVGPHGPLASGQLAAFHIAAPLPVTATRWDFGDGSAEVDAAGPAASHRYVLPGRYHVTAVLALGAGSALLGTDVQVEAAPAALELVCPSSVQSDESLDLSIQNRGGSGLEAAYSIVALGEEPARAVHPLCPSDTEIFPGNGHCYRLVVEKAAWLQAQEQCQAWAGAALAMVDSPAVQRFLVSRVTRSLDVWIGFSTVQGVEVGPAPQGEAFSLESCQNWLPGEPHPATAEHCVRLGPTGWCNTDLCSAPHSYVCELQPGGPVQDAENLLVGAPSGDLQGPLTPLAQQDGLSAPHEPVEVMVFPGLRLSREAFLTTAEFGTQELRRPAQLRLQVYRLLSTAGTPENGSEPESRSPDNRTQLAPACMPGGRWCPGANICLPLDASCHPQACANGCTSGPGLPGAPYALWREFLFSVPAGPPAQYSVTLHGQDVLMLPGDLVGLQHDAGPGALLHCSPAPGHPGPRAPYLSANASSWLPHLPAQLEGTWACPACALRLLAATEQLTVLLGLRPNPGLRLPGRYEVRAEVGNGVSRHNLSCSFDVVSPVAGLRVIYPAPRDGRLYVPTNGSALVLQVDSGANATATARWPGGSVSARFENVCPALVATFVPGCPWETNDTLFSVVALPWLSEGEHVVDVVVENSASRANLSLRVTAEEPICGLRATPSPEARVLQGVLVRYSPVVEAGSDMVFRWTINDKQSLTFQNVVFNVIYQSAAVFKLSLTASNHVSNVTVNYNVTVERMNRMQGLQVSTVPAVLSPNATLALTAGVLVDSAVEVAFLWTFGDGEQALHQFQPPYNESFPVPDPSVAQVLVEHNVMHTYAAPGEYLLTVLASNAFENLTQQVPVSVRASLPSVAVGVSDGVLVAGRPVTFYPHPLPSPGGVLYTWDFGDGSPVLTQSQPAANHTYASRGTYHVRLEVNNTVSGAAAQADVRVFEELRGLSVDMSLAVEQGAPVVVSAAVQTGDNITWTFDMGDGTVLSGPEATVEHVYLRAQNCTVTVGAASPAGHLARSLHVLVFVLEVLRVEPAACIPTQPDARLTAYVTGNPAHYLFDWTFGDGSSNTTVRGCPTVTHNFTRSGTFPLALVLSSRVNRAHYFTSICVEPEVGNVTLQPERQFVQLGDEAWLVACAWPPFPYRYTWDFGTEEAAPTRARGPEVTFIYRDPGSYLVTVTASNNISAANDSALVEVQEPVLVTSIKVNGSLGLELQQPYLFSAVGRGRPASYLWDLGDGGWLEGPEVTHAYNSTGDFTVRVAGWNEVSRSEAWLNVTVKRRVRGLVVNASRTVVPLNGSVSFSTSLEAGSDVRYSWVLCDRCTPIPGGPTISYTFRSVGTFNIIVTAENEVGSAQDSIFVYVLQLIEGLQVVGGGRYFPTNHTVQLQAVVRDGTNVSYSWTAWRDRGPALAGSGKGFSLTVLEAGTYHVQLRATNMLGSAWADCTMDFVEPVGWLMVAASPNPAAVNTSVTLSAELAGGSGVVYTWSLEEGLSWETSEPFTTHSFPTPGLHLVTMTAGNPLGSANATVEVDVQVPVSGLSIRASEPGGSFVAAGSSVPFWGQLATGTNVSWCWAVPGGSSKRGPHVTMVFPDAGTFSIRLNASNAVSWVSATYNLTAEEPIVGLVLWASSKVVAPGQLVHFQILLAAGSAVTFRLQVGGANPEVLPGPRFSHSFPRVGDHVVSVRGKNHVSWAQAQVRIVVLEAVSGLQVPNCCEPGIATGTERNFTARVQRGSRVAYAWYFSLQKVQGDSLVILSGRDVTYTPVAAGLLEIQVRAFNALGSENRTLVLEVQDAVQYVALQSGPCFTNRSAQFEAATSPSPRRVAYHWDFGDGSPGQDTDEPRAEHSYLRPGDYRVQVNASNLVSFFVAQATVTVQVLACREPEVDVVLPLQVLMRRSQRNYLEAHVDLRDCVTYQTEYRWEVYRTASCQRPGRPARVALPGVDVSRPRLVLPRLALPVGHYCFVFVVSFGDTPLTQSIQANVTVAPERLVPIIEGGSYRVWSDTRDLVLDGSESYDPNLEDGDQTPLSFHWACVASTQREAGGCALNFGPRGSSTVTIPRERLAAGVEYTFSLTVWKAGRKEEATNQTVLIRSGRVPIVSLECVSCKAQAVYEVSRSSYVYLEGRCLNCSSGSKRGRWAARTFSNKTLVLDETTTSTGSAGMRLVLRRGVLRDGEGYTFTLTVLGRSGEEEGCASIRLSPNRPPLGGSCRLFPLGAVHALTTKVHFECTGWHDAEDAGAPLVYALLLRRCRQGHCEEFCVYKGSLSSYGAVLPPGFRPHFEVGLAVVVQDQLGAAVVALNRSLAITLPEPNGSATGLTVWLHGLTASVLPGLLRQADPQHVIEYSLALVTVLNEYERALDVAAEPKHERQHRAQIRKNITETLVSLRVHTVDDIQQIAAALAQCMGPSRELVCRSCLKQTLHKLEAMMLILQAETTAGTVTPTAIGDSILNITGDLIHLASSDVRAPQPSELGAESPSRMVASQAYNLTSALMRILMRSRVLNEEPLTLAGEEIVAQGKRSDPRSLLCYGGAPGPGCHFSIPEAFSGALANLSDVVQLIFLVDSNPFPFGYISNYTVSTKVASMAFQTQAGAQIPIERLASERAITVKVPNNSDWAARGHRSSANSANSVVVQPQASVGAVVTLDSSNPAAGLHLQLNYTLLDGHYLSEEPEPYLAVYLHSEPRPNEHNCSASRRIRPESLQGADHRPYTFFISPGSRDPAGSYHLNLSSHFRWSALQVSVGLYTSLCQYFSEEDMVWRTEGLLPLEETSPRQAVCLTRHLTAFGASLFVPPSHVRFVFPEPTADVNYIVMLTCAVCLVTYMVMAAILHKLDQLDASRGRAIPFCGQRGRFKYEILVKTGWGRGSGTTAHVGIMLYGVDSRSGHRHLDGDRAFHRNSLDIFRIATPHSLGSVWKIRVWHDNKGLSPAWFLQHVIVRDLQTARSAFFLVNDWLSVETEANGGLVEKEVLAASDAALLRFRRLLVAELQRGFFDKHIWLSIWDRPPRSRFTRIQRATCCVLLICLFLGANAVWYGAVGDSAYSTGHVSRLSPLSVDTVAVGLVSSVVVYPVYLAILFLFRMSRSKVAGSPSPTPAGQQVLDIDSCLDSSVLDSSFLTFSGLHAEAFVGQMKSDLFLDDSKSLVCWPSGEGTLSWPDLLSDPSIVGSNLRQLARGQAGHGLGPEEDGFSLASPYSPAKSFSASDEDLIQQVLAEGVSSPAPTQDTHMETDLLSSLSSTPGEKTETLALQRLGELGPPSPGLNWEQPQAARLSRTGLVEGLRKRLLPAWCASLAHGLSLLLVAVAVAVSGWVGASFPPGVSVAWLLSSSASFLASFLGWEPLKVLLEALYFSLVAKRLHPDEDDTLVESPAVTPVSARVPRVRPPHGFALFLAKEEARKVKRLHGMLRSLLVYMLFLLVTLLASYGDASCHGHAYRLQSAIKQELHSRAFLAITRAQDGPMTDNCLPQNIPRIRLRS

SEQ ID NO: 11078 - protein, 3741 aa, Artificial Sequence
  Synthetic polypeptide
MPPAAPARLALALGLGLWLGALAGGPGRGCGPCEPPCLCGPAPGAACRVNCSGRGLRTLGPALRIPADATALDVSHNLLRALDVGLLANLSALAELDISNNKISTLEEGIFANLFNLSEINLSGNPFECDCGLAWLPRWAEEQQVRVVQPEAATCAGPGSLAGQPLLGIPLLDSGCGEEYVACLPDNSSGTVAAVSFSAAHEGLLQPEACSAFCFSTGQGLAALSEQGWCLCGAAQPSSASFACLSLCSGPPPPPAPTCRGPTLLQHVFPASPGATLVGPHGPLASGQLAAFHIAAPLPVTATRWDFGDGSAEVDAAGPAASHRYVLPGRYHVTAVLALGAGSALLGTDVQVEAAPAALELVCPSSVQSDESLDLSIQNRGGSGLEAAYSIVALGEEPARAVHPLCPSDTEIFPGNGHCYRLVVEKAAWLQAQEQCQAWAGAALAMVDSPAVQRFLVSRVTRSLDVWIGFSTVQGVEVGPAPQGEAFSLESCQNWLPGEPHPATAEHCVRLGPTGWCNTDLCSAPHSYVCELQPGGPVQDAENLLVGAPSGDLQGPLTPLAQQDGLSAPHEPVEVMVFPGLRLSREAFLTTAEFGTQELRRPAQLRLQVYRLLSTAGTPENGSEPESRSPDNRTQLAPACMPGGRWCPGANICLPLDASCHPQACANGCTSGPGLPGAPYALWREFLFSVPAGPPAQYSVTLHGQDVLMLPGDLVGLQHDAGPGALLHCSPAPGHPGPRAPYLSANASSWLPHLPAQLEGTWACPACALRLLAATEQLTVLLGLRPNPGLRLPGRYEVRAEVGNGVSRHNLSCSFDVVSPVAGLRVIYPAPRDGRLYVPTNGSALVLQVDSGANATATARWPGGSVSARFENVCPALVATFVPGCPWETNDTLFSVVALPWLSEGEHVVDVVVENSASRANLSLRVTAEEPICGLRATPSPEARVLQGVLVRYSPVVEAGSDMVFRWTINDKQSLTFQNVVFNVIYQSAAVFKLSLTASNHVSNVTVNYNVTVERMNRMQGLQVSTVPAVLSPNATLALTAGVLVDSAVEVAFLWTFGDGEQALHQFQPPYNESFPVPDPSVAQVLVEHNVMHTYAAPGEYLLTVLASNAFENLTQQVPVSVRASLPSVAVGVSDGVLVAGRPVTFYPHPLPSPGGVLYTWDFGDGSPVLTQSQPAANHTYASRGTYHVRLEVNNTVSGAAAQADVRVFEELRGLSVDMSLAVEQGAPVVVSAAVQTGDNITWTFDMGDGTVLSGPEATVEHVYLRAQNCTVTVGAASPAGHLARSLHVLVFVLEVLRVEPAACIPTQPDARLTAYVTGNPAHYLFDWTFGDGSSNTTVRGCPTVTHNFTRSGTFPLALVLSSRVNRAHYFTSICVEPEVGNVTLQPERQFVQLGDEAWLVACAWPPFPYRYTWDFGTEEAAPTRARGPEVTFIYRDPGSYLVTVTASNNISAANDSALVEVQEPVLVTSIKVNGSLGLELQQPYLFSAVGRGRPASYLWDLGDGGWLEGPEVTHAYNSTGDFTVRVAGWNEVSRSEAWLNVTVKRRVRGLVVNASRTVVPLNGSVSFSTSLEAGSDVRYSWVLCDRCTPIPGGPTISYTFRSVGTFNIIVTAENEVGSAQDSIFVYVLQLIEGLQVVGGGRYFPTNHTVQLQAVVRDGTNVSYSWTAWRDRGPALAGSGKGFSLTVLEAGTYHVQLRATNMLGSAWADCTMDFVEPVGWLMVAASPNPAAVNTSVTLSAELAGGSGVVYTWSLEEGLSWETSEPFTTHSFPTPGLHLVTMTAGNPLGSANATVEVDVQVPVSGLSIRASEPGGSFVAAGSSVPFWGQLATGTNVSWCWAVPGGSSKRGPHVTMVFPDAGTFSIRLNASNAVSWVSATYNLTAEEPIVGLVLWASSKVVAPGQLVHFQILLAAGSAVTFRLQVGGANPEVLPGPRFSHSFPRVGDHVVSVRGKNHVSWAQAQVRIVVLEAVSGLQVPNCCEPGIATGTERNFTARVQRGSRVAYAWYFSLQKVQGDSLVILSGRDVTYTPVAAGLLEIQVRAFNALGSENRTLVLEVQDAVQYVALQSGPCFTNRSAQFEAATSPSPRRVAYHWDFGDGSPGQDTDEPRAEHSYLRPGDYRVQVNASNLVSFFVAQATVTVQVLACREPEVDVVLPLQVLMRRSQRNYLEAHVDLRDCVTYQTEYRWEVYRTASCQRPGRPARVALPGVDVSRPRLVLPRLALPVGHYCFVFVVSFGDTPLTQSIQANVTVAPERLVPIIEGGSYRVWSDTRDLVLDGSESYDPNLEDGDQTPLSFHWACVASTQREAGGCALNFGPRGSSTVTIPRERLAAGVEYTFSLTVWKAGRKEEATNQTVLIRSGRVPIVSLECVSCKAQAVYEVSRSSYVYLEGRCLNCSSGSKRGRWAARTFSNKTLVLDETTTSTGSAGMRLVLRRGVLRDGEGYTFTLTVLGRSGEEEGCASIRLSPNRPPLGGSCRLFPLGAVHALTTKVHFECTGWHDAEDAGAPLVYALLLRRCRQGHCEEFCVYKGSLSSYGAVLPPGFRPHFEVGLAVVVQDQLGAAVVALNRSLAITLPEPNGSATGLTVWLHGLTASVLPGLLRQADPQHVIEYSLALVTVLNEYERALDVAAEPKHERQHRAQIRKNITETLVSLRVHTVDDIQQIAAALAQCMGPSRELVCRSCLKQTLHKLEAMMLILQAETTAGTVTPTAIGDSILNITGDLIHLASSDVRAPQPSELGAESPSRMVASQAYNLTSALMRILMRSRVLNEEPLTLAGEEIVAQGKRSDPRSLLCYGGAPGPGCHFSIPEAFSGALANLSDVVQLIFLVDSNPFPFGYISNYTVSTKVASMAFQTQAGAQIPIERLASERAITVKVPNNSDWAARGHRSSANSANSVVVQPQASVGAVVTLDSSNPAAGLHLQLNYTLLDGHYLSEEPEPYLAVYLHSEPRPNEHNCSASRRIRPESLQGADHRPYTFFISPGSRDPAGSYHLNLSSHFRWSALQVSVGLYTSLCQYFSEEDMVWRTEGLLPLEETSPRQAVCLTRHLTAFGASLFVPPSHVRFVFPEPTADVNYIVMLTCAVCLVTYMVMAAILHKLDQLDASRGRAIPFCGQRGRFKYEILVKTGWGRGSGTTAHVGIMLYGVDSRSGHRHLDGDRAFHRNSLDIFRIATPHSLGSVWKIRVWHDNKGLSPAWFLQHVIVRDLQTARSAFFLVNDWLSVETEANGGLVEKEVLAASDAALLRFRRLLVAELQRGFFDKHIWLSIWDRPPRSRFTRIQRATCCVLLICLFLGANAVWYGAVGDSAYSTGHVSRLSPLSVDTVAVGLVSSVVVYPVYLAILFLFRMSRSKVAGSPSPTPAGQQVLDIDSCLDSSVLDSSFLTFSGLHAEQAFVGQMKSDLFLDDSKSLVCWPSGEGTLSWPDLLSDPSIVGSNLRQLARGQAGHGLGPEEDGFSLASPYSPAKSFSASDEDLIQQVLAEGVSSPAPTQDTHMETDLLSSLSSTPGEKTETLALQRLGELGPPSPGLNWEQPQAARLSRTGLVEGLRKRLLPAWCASLAHGLSLLLVAVAVAVSGWVGASFPPGVSVAWLLSSSASFLASFLGWEPLKVLLEALYFSLVAKRLHPDEDDTLVESPAVTPVSARVPRVRPPHGFALFLAKEEARKVKRLHGMLRSLLVYMLFLLVTLLASYGDASCHGHAYRLQSAIKQELHSRAFLAITRAQDGPMTDNCLPQNIPRIRLRS

SEQ ID NO: 11079 - protein, 108 aa, Artificial Sequence
  Synthetic polypeptide
MHVKKYLLKGLHRLQKGPGYTYKELLVWYCDNTNTHGPKRIICEGPKKKAMWFLLTLLFAALVCWQWGIFIRTYLSWEVSVSLSVGFKTMDFPAVTICNASPFKCSGL

SEQ ID NO: 11080 - protein, 153 aa, Artificial Sequence
  Synthetic polypeptide
MLLHINPAYLFKLLHGFPPWIMPTDGNLGDKNFQMGKPGHREGATMHVKKYLLKGLHRLQKGPGYTYKELLVWYCDNTNTHGPKRIICEGPKKKAMWFLLTLLFAALVCWQWGIFIRTYLSWEVSVSLSVGFKTMDFPAVTICNASPFKCSGL

SEQ ID NO: 11081 - protein, 204 aa, Artificial Sequence; identical to SEQ ID NO: 853
  Synthetic polypeptide

SEQ ID NO: 11082 - protein, 249 aa, Artificial Sequence; identical to SEQ ID NO: 785
  Synthetic polypeptide

SEQ ID NO: 11083 - protein, 43 aa, Artificial Sequence
  Synthetic polypeptide
MGWLCSGLLFPVSCLVLLQVASSGVAVHACSPSYSGGRGGRIP

SEQ ID NO: 11084 - protein, 156 aa, Artificial Sequence
  Synthetic polypeptide
MGWLCSGLLFPVSCLVLLQVASSGNMKVLQEPTCVSDYMSISTCEWKMNGPTNCSTELRLLYQLVFLLSEAHTCIPENNGGAGCVCHLLMDDVVSADNYTLDLWAGQQLLWKGSFKPSEHGDQVLKQMNQNKEKYSVNHHKVQRCGQRCEGCSCKS

SEQ ID NO: 11085 - protein, 141 aa, Artificial Sequence
  Synthetic polypeptide
MQKDARREGNMKVLQEPTCVSDYMSISTCEWKMNGPTNCSTELRLLYQLVFLLSEAHTCIPENNGGAGCVCHLLMDDVVSADNYTLDLWAGQQLLWKGSFKPSEHGDQVLKQMNQNKEKYSVNHHKVQRCGQRCEGCSCKS

SEQ ID NO: 11086 - protein, 74 aa, Artificial Sequence
  Synthetic polypeptide
  misc_feature (1)..(1): Xaa can be any naturally occurring amino acid
XCVCHLLMDDVVSADNYTLDLWAGQQLLWKGSFKPSEHGDQVLKQMNQNKEKYSVNHHKVQRCGQRCEGCSCKS

SEQ ID NO: 11087 - protein, 143 aa, Artificial Sequence
  Synthetic polypeptide
MGWLCSGLLFPVSCLVLLQVASSGNMKVLQEPTCVSDYMSISTCEWKMNGPTNCSTELRLLYQLVFLLSEAHTCIPENNGGAGCVCHLLMDDVVSADNYTLDLWAGQQLLWKGSFKPSEHALWEAEPSGSPEVRSSRPAWTTW

SEQ ID NO: 11088 - protein, 128 aa, Artificial Sequence
  Synthetic polypeptide
MQKDARREGNMKVLQEPTCVSDYMSISTCEWKMNGPTNCSTELRLLYQLVFLLSEAHTCIPENNGGAGCVCHLLMDDVVSADNYTLDLWAGQQLLWKGSFKPSEHALWEAEPSGSPEVRSSRPAWTTW

SEQ ID NO: 11089 - protein, 61 aa, Artificial Sequence
  Synthetic polypeptide
  misc_feature (1)..(1): Xaa can be any naturally occurring amino acid
XCVCHLLMDDVVSADNYTLDLWAGQQLLWKGSFKPSEHALWEAEPSGSPEVRSSRPAWTTW

SEQ ID NO: 11090 - protein, 28 aa, Artificial Sequence
  Synthetic polypeptide
ARGAAAGAAAGSGWTQEAGVAGGGAVIR

SEQ ID NO: 11091 - protein, 35 aa, Artificial Sequence
  Synthetic polypeptide
MGARGALLLALLLARAGLRKPESQEAAPLSDKRTQ

SEQ ID NO: 11092 - protein, 28 aa, Artificial Sequence
  Synthetic polypeptide
  misc_feature (1)..(1): Xaa can be any naturally occurring amino acid
XLALLLARAGLRKPESQEAAPLSDKRTQ

SEQ ID NO: 11093 - protein, 28 aa, Artificial Sequence
  Synthetic polypeptide
  misc_feature (1)..(1): Xaa can be any naturally occurring amino acid
XRGAAAGAAAGSGWTQEAGVAGGGAVIR

SEQ ID NO: 11094 - protein, 340 aa, Artificial Sequence; identical to SEQ ID NO: 630
  Synthetic polypeptide

SEQ ID NO: 11095 - protein, 90 aa, Artificial Sequence
  Synthetic polypeptide
IPRSPQPLGGSHRTPSSRRDSDGANSVASYENEEPACEDADEDEDDYHNPGYLVVLPDSTPATSTAAPSAPALSTPGIRDSAFSTWPGRS

SEQ ID NO: 11096 - protein, 206 aa, Artificial Sequence
  Synthetic polypeptide
MEATAASWQVAVPVLGGASRPLGPRGAASLLRAPLQMEEAILVPCVLGLLLLPILAMLMALCVHCHRLPGSYDSTSSDSLYPRGIQFKRPHTVAPWPPAYPPVTSYPPLSQPDLLPIPRSPQPLGGSHRTPSSRRDSDGANSVASYENEEPACEDADEDEDDYHNPGYLVVLPDSTPATSTAAPSAPALSTPGIRDSAFSTWPGRS

SEQ ID NO: 11097 - protein, 170 aa, Artificial Sequence
  Synthetic polypeptide
MEEAILVPCVLGLLLLPILAMLMALCVHCHRLPGSYDSTSSDSLYPRGIQFKRPHTVAPWPPAYPPVTSYPPLSQPDLLPIPRSPQPLGGSHRTPSSRRDSDGANSVASYENEEPACEDADEDEDDYHNPGYLVVLPDSTPATSTAAPSAPALSTPGIRDSAFSTWPGRS

SEQ ID NO: 11098 - protein, 199 aa, Artificial Sequence
  Synthetic polypeptide
MEEAILVPCVLGLLLLPILAMLMALCVHCHRLPGSYDSTSSDSLYPRGIQFKRPHTVAPWPPAYPPVTSYPPLSQPDLLPIPRSPQPLGGSHRTPSSRRDSDGANSVASYENEGASGIRGAQAGWGVWGPSWTRLTPVSLPPEPACEDADEDEDDYHNPGYLVVLPDSTPATSTAAPSAPALSTPGIRDSAFSTWPGRS

SEQ ID NO: 11099 - protein, 189 aa, Artificial Sequence
  Synthetic polypeptide
MEEAILVPCVLGLLLLPILAMLMALCVHCHRLPGSYDSTSSDSLYPRGIQFKRPHTVAPWPPAYPPVTSYPPLSQPDLLPIPRSPQPRRDSDGANSVASYENEGASGIRGAQAGWGVWGPSWTRLTPVSLPPEPACEDADEDEDDYHNPGYLVVLPDSTPATSTAAPSAPALSTPGIRDSAFSTWPGRS

SEQ ID NO: 11100 - protein, 169 aa, Artificial Sequence
  Synthetic polypeptide
MEEAILVPCVLGLLLLPILAMLMALCVHCHRLPGSYDSTSSDSLYPRGIQFKRPHTVAPWPPAYPPVTSYPPLSQPDLLPIPSPQPLGGSHRTPSSRRDSDGANSVASYENEEPACEDADEDEDDYHNPGYLVVLPDSTPATSTAAPSAPALSTPGIRDSAFSTWPGRS

SEQ ID NO: 11101 - protein, 198 aa, Artificial Sequence
  Synthetic polypeptide
MEEAILVPCVLGLLLLPILAMLMALCVHCHRLPGSYDSTSSDSLYPRGIQFKRPHTVAPWPPAYPPVTSYPPLSQPDLLPIPSPQPLGGSHRTPSSRRDSDGANSVASYENEGASGIRGAQAGWGVWGPSWTRLTPVSLPPEPACEDADEDEDDYHNPGYLVVLPDSTPATSTAAPSAPALSTPGIRDSAFSTWPGRS

SEQ ID NO: 11102 - protein, 100 aa, Artificial Sequence; identical to SEQ ID NO: 1147
  Synthetic polypeptide

SEQ ID NO: 11103 - protein, 216 aa, Artificial Sequence; identical to SEQ ID NO: 833
  Synthetic polypeptide

SEQ ID NO: 11104 - protein, 180 aa, Artificial Sequence; identical to SEQ ID NO: 925
  Synthetic polypeptide

SEQ ID NO: 11105 - protein, 209 aa, Artificial Sequence; identical to SEQ ID NO: 846
  Synthetic polypeptide

SEQ ID NO: 11106 - protein, 199 aa, Artificial Sequence; identical to SEQ ID NO: 861
  Synthetic polypeptide

SEQ ID NO: 11107 - protein, 179 aa, Artificial Sequence; identical to SEQ ID NO: 926
  Synthetic polypeptide

SEQ ID NO: 11108 - protein, 208 aa, Artificial Sequence; identical to SEQ ID NO: 847
  Synthetic polypeptide

SEQ ID NO: 11109 - protein, 419 aa, Artificial Sequence
  Synthetic polypeptide
MKDSCITVMAMALLSGFFFFAPASSYNLDVRGARSFSPPRAGRHFGYRVLQVGNGVIVGAPGEGNSTGSLYQCQSGTGHCLPVTLRGSNYTSKYLGMTLATDPTDGSILACDPGLSRTCDQNTYLSGLCYLFRQNLQGPMLQGRPGFQECIKGNVDLVFLFDGSMSLQPDEFQKILDFMKDVMKKLSNTSYQFAAVQFSTSYKTEFDFSDYVKRKDPDALLKHVKHMLLLTNTFGAINYVATEVFREELGARPDATKVLIIITDGEATDSGNIDAAKDIIRYIIGIGKHFQTKESQETLHKFASKPASEFVKILDTFEKLKDLFTELQKKIYVIEGTSKQDLTSFNMELSSSGISADLSRGHAVVGAVGAKDWAGGFLDLKADLQDDTFIGNEPLTPEVRAGYLAWARERDSVSKKEER

SEQ ID NO: 11110 - protein, 336 aa, Artificial Sequence
  Synthetic polypeptide
MKDSCITVMAMALLSGFFFFAPASSYNLDVRGARSFSPPRAGRHFGYRVLQVGNGVIVGAPGEGNSTGSLYQCQSGTGHCLPVTLRGSNYTSKYLGMTLATDPTDGSILFAAVQFSTSYKTEFDFSDYVKRKDPDALLKHVKHMLLLTNTFGAINYVATEVFREELGARPDATKVLIIITDGEATDSGNIDAAKDIIRYIIGIGKHFQTKESQETLHKFASKPASEFVKILDTFEKLKDLFTELQKKIYVIEGTSKQDLTSFNMELSSSGISADLSRGHAVVGAVGAKDWAGGFLDLKADLQDDTFIGNEPLTPEVRAGYLAWARERDSVSKKEER

SEQ ID NO: 11111 - protein, 536 aa, Artificial Sequence
  Synthetic polypeptide
MKDSCITVMAMALLSGFFFFAPASSYNLDVRGARSFSPPRAGRHFGYRVLQVGNGVIVGAPGEGNSTGSLYQCQSGTGHCLPVTLRGSNYTSKYLGMTLATDPTDGSILACDPGLSRTCDQNTYLSGLCYLFRQNLQGPMLQGRPGFQECIKGNVDLVFLFDGSMSLQPDEFQKILDFMKDVMKKLSNTSYQFAAVQFSTSYKTEFDFSDYVKRKDPDALLKHVKHMLLLTNTFGAINYVATEVFREELGARPDATKVLIIITDGEATDSGNIDAAKDIIRYIIGIGKHFQTKESQETLHKFASKPASEFVKILDTFEKLKDLFTELQKKIYVIEGTSKQDLTSFNMELSSSGISADLSRGHAVVGAVGAKDWAGGFLDLKADLQDDTFIGNEPLTPEVRAGYLGYTVTWLPSRQKTSLLASGAPRYQHMGRVLLFQEPQGGGHWSQVQTIHGTQIGSYFGGELCGVDVDQDGETELLLIGAPLFYGEQRGGRVFIYQRRQLGFEEVSELQGDPGYPLGRFGEAITALTDINGDGL

SEQ ID NO: 11112 - protein, 453 aa, Artificial Sequence
  Synthetic polypeptide
MKDSCITVMAMALLSGFFFFAPASSYNLDVRGARSFSPPRAGRHFGYRVLQVGNGVIVGAPGEGNSTGSLYQCQSGTGHCLPVTLRGSNYTSKYLGMTLATDPTDGSILFAAVQFSTSYKTEFDFSDYVKRKDPDALLKHVKHMLLLTNTFGAINYVATEVFREELGARPDATKVLIIITDGEATDSGNIDAAKDIIRYIIGIGKHFQTKESQETLHKFASKPASEFVKILDTFEKLKDLFTELQKKIYVIEGTSKQDLTSFNMELSSSGISADLSRGHAVVGAVGAKDWAGGFLDLKADLQDDTFIGNEPLTPEVRAGYLGYTVTWLPSRQKTSLLASGAPRYQHMGRVLLFQEPQGGGHWSQVQTIHGTQIGSYFGGELCGVDVDQDGETELLLIGAPLFYGEQRGGRVFIYQRRQLGFEEVSELQGDPGYPLGRFGEAITALTDINGDGL

SEQ ID NO: 11113 - protein, 615 aa, Artificial Sequence
  Synthetic polypeptide
MKDSCITVMAMALLSGFFFFAPASSYNLDVRGARSFSPPRAGRHFGYRVLQVGNGVIVGAPGEGNSTGSLYQCQSGTGHCLPVTLRGSNYTSKYLGMTLATDPTDGSILACDPGLSRTCDQNTYLSGLCYLFRQNLQGPMLQGRPGFQECIKGNVDLVFLFDGSMSLQPDEFQKILDFMKDVMKKLSNTSYQFAAVQFSTSYKTEFDFSDYVKRKDPDALLKHVKHMLLLTNTFGAINYVATEVFREELGARPDATKVLIIITDGEATDSGNIDAAKDIIRYIIGIGKHFQTKESQETLHKFASKPASEFVKILDTFEKLKDLFTELQKKIYVIEGTSKQDLTSFNMELSSSGISADLSRGHAVVGAVGAKDWAGGFLDLKADLQDDTFIGNEPLTPEVRAGYLGYTVTWLPSRQKTSLLASGAPRYQHMGRVLLFQEPQGGGHWSQVQTIHGTQIGSYFGGELCGVDVDQDGETELLLIGAPLFYGEQRGGRVFIYQRRQLGFEEVSELQGDPGYPLGRFGEAITALTDINGDGLVDVAVGAPLEEQGAVYIFNGRHGGLSPQPSQRIEGTQVLSGIQWFGRSIHGVKDLEGDGLADVAVGAESQMIVLRYGGA

SEQ ID NO: 11114 - protein, 532 aa, Artificial Sequence
  Synthetic polypeptide
MKDSCITVMAMALLSGFFFFAPASSYNLDVRGARSFSPPRAGRHFGYRVLQVGNGVIVGAPGEGNSTGSLYQCQSGTGHCLPVTLRGSNYTSKYLGMTLATDPTDGSILFAAVQFSTSYKTEFDFSDYVKRKDPDALLKHVKHMLLLTNTFGAINYVATEVFREELGARPDATKVLIIITDGEATDSGNIDAAKDIIRYIIGIGKHFQTKESQETLHKFASKPASEFVKILDTFEKLKDLFTELQKKIYVIEGTSKQDLTSFNMELSSSGISADLSRGHAVVGAVGAKDWAGGFLDLKADLQDDTFIGNEPLTPEVRAGYLGYTVTWLPSRQKTSLLASGAPRYQHMGRVLLFQEPQGGGHWSQVQTIHGTQIGSYFGGELCGVDVDQDGETELLLIGAPLFYGEQRGGRVFIYQRRQLGFEEVSELQGDPGYPLGRFGEAITALTDINGDGLVDVAVGAPLEEQGAVYIFNGRHGGLSPQPSQRIEGTQVLSGIQWFGRSIHGVKDLEGDGLADVAVGAESQMIVLRYGGA

SEQ ID NO: 11115 - protein, 170 aa, Artificial Sequence
  Synthetic polypeptide
MKDSCITVMAMALLSGFFFFAPASSYNLDVRGARSFSPPRAGRHFGYRVLQIKSLIPQFQGRLVANLTYTLQLDGHRTRRRGLFPGGRHELRRNIAVTTSMSCTDFSFHFPMMFNTLVNSSWGDSVELHANVTCNNEDSDLLEDNSATTIIPILYPINILIQDTVAGRSE

SEQ ID NO: 11116 - protein, 936 aa, Artificial Sequence
  Synthetic polypeptide
MKDSCITVMAMALLSGFFFFAPASSYNLDVRGARSFSPPRAGRHFGYRVLQVGNGVIVGAPGEGNSTGSLYQCQSGTGHCLPVTLRGSNYTSKYLGMTLATDPTDGSILACDPGLSRTCDQNTYLSGLCYLFRQNLQGPMLQGRPGFQECIKGNVDLVFLFDGSMSLQPDEFQKILDFMKDVMKKLSNTSYQFAAVQFSTSYKTEFDFSDYVKRKDPDALLKHVKHMLLLTNTFGAINYVATEVFREELGARPDATKVLIIITDGEATDSGNIDAAKDIIRYIIGIGKHFQTKESQETLHKFASKPASEFVKILDTFEKLKDLFTELQKKIYVIEGTSKQDLTSFNMELSSSGISADLSRGHAVVGAVGAKDWAGGFLDLKADLQDDTFIGNEPLTPEVRAGYLGYTVTWLPSRQKTSLLASGAPRYQHMGRVLLFQEPQGGGHWSQVQTIHGTQIGSYFGGELCGVDVDQDGETELLLIGAPLFYGEQRGGRVFIYQRRQLGFEEVSELQGDPGYPLGRFGEAITALTDINGDGLVDVAVGAPLEEQGAVYIFNGRHGGLSPQPSQRIEGTQVLSGIQWFGRSIHGVKDLEGDGLADVAVGAESQMIVLSSRPVVDMVTLMSFSPAEIPVHEVECSYSTSNKMKEGVNITICFQIKSLIPQFQGRLVANLTYTLQLDGHRTRRRGLFPGGRHELRRNIAVTTSMSCTDFSFHFPVCVQDLISPINVSLNFSLWEEEGTPRDQRAQGKDIPPILRPSLHSETWEIPFEKNCGEDKKCEANLRVSFSPARSRALRLTAFASLSVELSLSNLEEDAYWVQLDLHFPPGLSFRKVEMLKPHSQIPVSCEELPEESRLLSRALSCNVSSPIFKAGHSVALQMMFNTLVNSSWGDSVELHANVTCNNEDSDLLEDNSATTIIPILYPINILIQDTVAGRSE

SEQ ID NO: 11117 - protein, 852 aa, Artificial Sequence
  Synthetic polypeptide
MKDSCITVMAMALLSGFFFFAPASSYNLDVRGARSFSPPRAGRHFGYRVLQVGNGVIVGAPGEGNSTGSLYQCQSGTGHCLPVTLRGSNYTSKYLGMTLATDPTDGSILFAAVQFSTSYKTEFDFSDYVKRKDPDALLKHVKHMLLLTNTFGAINYVATEVFREELGARPDATKVLIIITDGEATDSGNIDAAKDIIRYIIGIGKHFQTKESQETLHKFASKPASEFVKILDTFEKLKDLFTELQKKIYVIEGTSKQDLTSFNMELSSSGISADLSRGHAVVGAVGAKDWAGGFLDLKADLQDDTFIGNEPLTPEVRAGYLGYTVTWLPSRQKTSLLASGAPRYQHMGRVLLFQEPQGGGHWSQVQTIHGTQIGSYFGGELCGVDVDQDGETELLLIGAPLFYGEQRGGRVFIYQRRQLGFEEVSELQGDPGYPLGRFGEAITALTDINGDGLVDVAVGAPLEEQGAVYIFNGRHGGLSPQPSQRIEGTQVLSGIQWFGRSIHGVKDLEGDGLADVAVGAESQMIVLSSRPVVDMVTLMSFSPAEIPVHEVECSYSTSNKMKEGVNITICFQIKSLIPQFQGRLVANLTYTLQLDGHRTRRRGLFPGGRHELRRNIAVTTSMSCTDFSFHFPVCVQDLISPINVSLNFSLWEEEGTPRDQRAGKDIPPILRPSLHSETWEIPFEKNCGEDKKCEANLRVSFSPARSRALRLTAFASLSVELSLSNLEEDAYWVQLDLHFPPGLSFRKVEMLKPHSQIPVSCEELPEESRLLSRALSCNVSSPIFKAGHSVALQMMFNTLVNSSWGDSVELHANVTCNNEDSDLLEDNSATTIIPILYPINILIQDTVAGRSE

SEQ ID NO: 11118 - protein, 892 aa, Artificial Sequence
  Synthetic polypeptide
MASPPHQQLLHHHSTEVSCDSSGDSNSVRVKINPKQLSSNSHPKHCKYSISSSCSSSGDSGGVPRRVGGGGRLRRQKKLPQLFERASSRWWDPKFDSVNLEEACLERCFPQTQRRFRYALFYIGFACLLWSIYFAVHMRSRLIVMVAPALCFLLVCVGFFLFTFTKLYARHYAWTSLALTLLVFALTLAAQFQVLTPVSGRGDSSNLTATARPTDTCLSQVGSFSMCIEVLFLLYTVMHLPLYLSLCLGVAYSVLFETFGYHFRDEACFPSPGAGALHWELLSRGLLHGCIHAIGVHLFVMSQVRSRSTFLKVGQSIMHGKDLEVEKALKERMIHSVMPRIIADDLMKQGDEESENSVKRHATSSPKNRKKKSSIQKAPIAFRPFKMQQIEEVSILFADIVGFTKMSANKSAHALVGLLNDLFGRFDRLCEETKCEKISTLGDCYYCVAGCPEPRADHAYCCIEMGLGMIKAIEQFCQEKKEMVNMRVGVHTGTVLCGILGMRRFKFDVWSNDVNLANLMEQLGVAGKVHISEATAKYLDDRYEMEDGKVIERLGQSVVADQLKGLKTYLISGQRAKESRCSCAEALLSGFEVIDGSQVSSGPRGQGTASSGNVSDLAQTVKTFDNLKTCPSCGITFAPKSEAGAEGGAPQNGCQDEHKNSTKASGGPNPKTQNGLLSPPQEEKLTNSQTSLCEILQEKGRWAGVSLDQSALLPLRFKNIREKTDAHFVDVIKEDSLMKDYFFKPPINQFSLNFLDQELERSYRTSYQEEVIKNSPVKTFASPTFSSLLDVFLSTTVFLTLSTTCFLKYEAATVPPPPAALAVFSAALLLEVLSLAVSIRQWSLGCDANRRKNRQAQLPQKLSCCATKNTIKKEKEPTEREGTLADQASDKV

SEQ ID NO: 11119 - protein, 125 aa, Artificial Sequence
  Synthetic polypeptide
  misc_feature (1)..(1): Xaa can be any naturally occurring amino acid
XEEVIKNSPVKTFASPTFSSLLDVFLSTTVFLTLSTTCFLKYEAATVPPPPAALAVFSAALLLEVLSLAVSIRQWSLGCDANRRKNRQAQLPQKLSCCATKNTIKKEKEPTEREGTLADQASDKV

SEQ ID NO: 11120 - protein, 181 aa, Artificial Sequence; identical to SEQ ID NO: 923
  Synthetic polypeptide

SEQ ID NO: 11121 - protein, 653 aa, Artificial Sequence; identical to SEQ ID NO: 213
  Synthetic polypeptide

SEQ ID NO: 11122 - protein, 123 aa, Artificial Sequence
  Synthetic polypeptide
IEQFCQEKKEMVNMRVGVHTGTVLCGILGMRRFKFDVWSNDVNLANLMEQLGVAGKVHISEATAKYLDDRYEMEDGKVIERLGQSVVADQLKDTIWERASSLDPHFPEATGGEGSGMTAPAEG

SEQ ID NO: 11123 - protein, 595 aa, Artificial Sequence
  Synthetic polypeptide
MASPPHQQLLHHHSTEVSCDSSGDSNSVRVKINPKQLSSNSHPKHCKYSISSSCSSSGDSGGVPRRVGGGGRLRRQKKLPQLFERASSRWWDPKFDSVNLEEACLERCFPQTQRRFRYALFYIGFACLLWSIYFAVHMRSRLIVMVAPALCFLLVCVGFFLFTFTKLYARHYAWTSLALTLLVFALTLAAQFQVLTPVSGRGDSSNLTATARPTDTCLSQVGSFSMCIEVLFLLYTVMHLPLYLSLCLGVAYSVLFETFGYHFRDEACFPSPGAGALHWELLSRGLLHGCIHAIGVHLFVMSQVRSRSTFLKVGQSIMHGKDLEVEKALKERMIHSVMPRIIADDLMKQGDEESENSVKRHATSSPKNRKKKSSIQKAPIAFRPFKMQQIEEVSILFADIVGFTKMSANKSAHALVGLLNDLFGRFDRLCEETKCEKISTLGDCYYCVAGCPEPRADHAYCCIEMGLGMIKAIEQFCQEKKEMVNMRVGVHTGTVLCGILGMRRFKFDVWSNDVNLANLMEQLGVAGKVHISEATAKYLDDRYEMEDGKVIERLGQSVVADQLKDTIWERASSLDPHFPEATGGEGSGMTAPAEG

SEQ ID NO: 11124 - protein, 90 aa, Artificial Sequence
  Synthetic polypeptide
  misc_feature (1)..(1): Xaa can be any naturally occurring amino acid
XFDVWSNDVNLANLMEQLGVAGKVHISEATAKYLDDRYEMEDGKVIERLGQSVVADQLKDTIWERASSLDPHFPEATGGEGSGMTAPAEG

SEQ ID NO: 11125 - protein, 517 aa, Artificial Sequence
  Synthetic polypeptide
MACSPDAVVSPSSAFLRSGSVYEPLKSINLPRPDNETLWDKLDHYYRIVKSTLLLYQSPTTGLFPTKTCGGDQKAKIQDSLYCAAGAWALALAYRRIDDDKGRTHELEHSAIKCMRGILYCYMRQADKVQQFKQDPRPTTCLHSVFNVHTGDELLSYEEYGHLQINAVSLYLLYLVEMISSGLQIIYNTDEVSFIQNLVFCVERVYRVPDFGVWERGSKYNNGSTELHSSSVGLAKAALEAINGFNLFGNQGCSWSVIFVDLDAHNRNRQTLCSLLPRESRSHNTDAALLPCISYPAFALDDEVLFSQTLDKVVRKLKGKYGFKRFLRDGYRTSLEDPNRCYYKPAEIKLFDGIECEFPIFFLYMMIDGVFRGNPKQVQEYQDLLTPVLHHTTEGYPVVPKYYYVPADFVEYEKNNPGSQKRFPSNCGRDGKLFLWGQALYIIAKLLADELISPKDIDPVQRYVPLKDQRNVSMRFSNQAFGLRLKLNCQLSWVSSLPAHLHILRLACLRNCVSQSI

SEQ ID NO: 11126 - protein, 524 aa, Artificial Sequence
  Synthetic polypeptide
MAGAAGLTAEVSWKVLERRARTKRSGSVYEPLKSINLPRPDNETLWDKLDHYYRIVKSTLLLYQSPTTGLFPTKTCGGDQKAKIQDSLYCAAGAWALALAYRRIDDDKGRTHELEHSAIKCMRGILYCYMRQADKVQQFKQDPRPTTCLHSVFNVHTGDELLSYEEYGHLQINAVSLYLLYLVEMISSGLQIIYNTDEVSFIQNLVFCVERVYRVPDFGVWERGSKYNNGSTELHSSSVGLAKAALEAINGFNLFGNQGCSWSVIFVDLDAHNRNRQTLCSLLPRESRSHNTDAALLPCISYPAFALDDEVLFSQTLDKVVRKLKGKYGFKRFLRDGYRTSLEDPNRCYYKPAEIKLFDGIECEFPIFFLYMMIDGVFRGNPKQVQEYQDLLTPVLHHTTEGYPVVPKYYYVPADFVEYEKNNPGSQKRFPSNCGRDGKLFLWGQALYIIAKLLADELISPKDIDPVQRYVPLKDQRNVSMRFSNQAFGLRLKLNCQLSWVSSLPAHLHILRLACLRNCVSQSI

SEQ ID NO: 11127 - protein, 105 aa, Artificial Sequence
  Synthetic polypeptide
  misc_feature (1)..(1): Xaa can be any naturally occurring amino acid
XKNNPGSQKRFPSNCGRDGKLFLWGQALYIIAKLLADELISPKDIDPVQRYVPLKDQRNVSMRFSNQAFGLRLKLNCQLSWVSSLPAHLHILRLACLRNCVSQSI

SEQ ID NO: 11128 - protein, 662 aa, Artificial Sequence
  Synthetic polypeptide
MACSPDAVVSPSSAFLRSGSVYEPLKSINLPRPDNETLWDKLDHYYRIVKSTLLLYQSPTTGLFPTKTCGGDQKAKIQDSLYCAAGAWALALAYRRIDDDKGRTHELEHSAIKCMRGILYCYMRQADKVQQFKQDPRPTTCLHSVFNVHTGDELLSYEEYGHLQINAVSLYLLYLVEMISSGLQIIYNTDEVSFIQNLVFCVERVYRVPDFGVWERGSKYNNGSTELHSSSVGLAKAALEAINGFNLFGNQGCSWSVIFVDLDAHNRNRQTLCSLLPRESRSHNTDAALLPCISYPAFALDDEVLFSQTLDKVVRKLKGKYGFKRFLRDGYRTSLEDPNRCYYKPAEIKLFDGIECEFPIFFLYMMIDGVFRGNPKQVQEYQDLLTPVLHHTTEGYPVVPKYYYVPADFVEYEKNNPGSQKRFPSNCGRDGKLFLWGQALYIIAKLLADELISPKDIDPVQRYVPLKDQRNVSMRFSNQGPLENDLVVHVALIAESQRLQVFLNTYGIQTQTPQQVEPIQIWPQQELVKAYLQLGINEKLGLSGRPDRPIGCLGTSKIYRILGKTVVCYPIIFDLSDFYMSQDVFLLIDDIKNALQFIKQYWKMHGRPLFLVLIREDNIRGSRFNPILDMLAALKKGIIGGVKVHVDRLQKYVGLYGKKRPR

SEQ ID NO: 11129 - protein, 669 aa, Artificial Sequence
  Synthetic polypeptide
MAGAAGLTAEVSWKVLERRARTKRSGSVYEPLKSINLPRPDNETLWDKLDHYYRIVKSTLLLYQSPTTGLFPTKTCGGDQKAKIQDSLYCAAGAWALALAYRRIDDDKGRTHELEHSAIKCMRGILYCYMRQADKVQQFKQDPRPTTCLHSVFNVHTGDELLSYEEYGHLQINAVSLYLLYLVEMISSGLQIIYNTDEVSFIQNLVFCVERVYRVPDFGVWERGSKYNNGSTELHSSSVGLAKAALEAINGFNLFGNQGCSWSVIFVDLDAHNRNRQTLCSLLPRESRSHNTDAALLPCISYPAFALDDEVLFSQTLDKVVRKLKGKYGFKRFLRDGYRTSLEDPNRCYYKPAEIKLFDGIECEFPIFFLYMMIDGVFRGNPKQVQEYQDLLTPVLHHTTEGYPVVPKYYYVPADFVEYEKNNPGSQKRFPSNCGRDGKLFLWGQALYIIAKLLADELISPKDIDPVQRYVPLKDQRNVSMRFSNQGPLENDLVVHVALIAESQRLQVFLNTYGIQTQTPQQVEPIQIWPQQELVKAYLQLGINEKLGLSGRPDRPIGCLGTSKIYRILGKTVVCYPIIFDLSDFYMSQDVFLLIDDIKNALQFIKQYWKMHGRPLFLVLIREDNIRGSRFNPILDMLAALKKGIIGGVKVHVDRLQKYVGLYGKKRPR

SEQ ID NO: 11130 - protein, 829 aa, Artificial Sequence
  Synthetic polypeptide
MACSPDAVVSPSSAFLRSGSVYEPLKSINLPRPDNETLWDKLDHYYRIVKSTLLLYQSPTTGLFPTKTCGGDQKAKIQDSLYCAAGAWALALAYRRIDDDKGRTHELEHSAIKCMRGILYCYMRQADKVQQFKQDPRPTTCLHSVFNVHTGDELLSYEEYGHLQINAVSLYLLYLVEMISSGLQIIYNTDEVSFIQNLVFCVERVYRVPDFGVWERGSKYNNGSTELHSSSVGLAKAALEAINGFNLFGNQGCSWSVIFVDLDAHNRNRQTLCSLLPRESRSHNTDAALLPCISYPAFALDDEVLFSQTLDKVVRKLKGKYGFKRFLRDGYRTSLEDPNRCYYKPAEIKLFDGIECEFPIFFLYMMIDGVFRGNPKQVQEYQDLLTPVLHHTTEGYPVVPKYYYVPADFVEYEKNNPGSQKRFPSNCGRDGKLFLWGQALYIIAKLLADELISPKDIDPVQRYVPLKDQRNVSMRFSNQGPLENDLVVHVALIAESQRLQVFLNTYGIQTQTPQQVEPIQIWPQQELVKAYLQLGINEKLGLSGRPDRPIGCLGTSKIYRILGKTVVCYPIIFDLSDFYMSQDVFLLIDDIKNALQFIKQYWKMHGRPLFLVLIREDNIRGSRFNPILDMLAALKKGIIGGVKVHVDRLQTLISGAVVEQLDFLRISDTEELPEFKSFEELEPPKHSKVKRQSSTPSAPELGQQPDVNISEWKDKPTHEILQKLNDCSCLASQAILLGILLKREGPNFITKEGTVSDHIERVYRRAGSQKLWSVVRRAASLLSKVVDSLAPSITNVLVQGKQGQLCHLLLTEPSPVSSGLSLWILTIGL

SEQ ID NO: 11131 - protein, 836 aa, Artificial Sequence
  Synthetic polypeptide
MAGAAGLTAEVSWKVLERRARTKRSGSVYEPLKSINLPRPDNETLWDKLDHYYRIVKSTLLLYQSPTTGLFPTKTCGGDQKAKIQDSLYCAAGAWALALAYRRIDDDKGRTHELEHSAIKCMRGILYCYMRQADKVQQFKQDPRPTTCLHSVFNVHTGDELLSYEEYGHLQINAVSLYLLYLVEMISSGLQIIYNTDEVSFIQNLVFCVERVYRVPDFGVWERGSKYNNGSTELHSSSVGLAKAALEAINGFNLFGNQGCSWSVIFVDLDAHNRNRQTLCSLLPRESRSHNTDAALLPCISYPAFALDDEVLFSQTLDKVVRKLKGKYGFKRFLRDGYRTSLEDPNRCYYKPAEIKLFDGIECEFPIFFLYMMIDGVFRGNPKQVQEYQDLLTPVLHHTTEGYPVVPKYYYVPADFVEYEKNNPGSQKRFPSNCGRDGKLFLWGQALYIIAKLLADELISPKDIDPVQRYVPLKDQRNVSMRFSNQGPLENDLVVHVALIAESQRLQVFLNTYGIQTQTPQQVEPIQIWPQQELVKAYLQLGINEKLGLSGRPDRPIGCLGTSKIYRILGKTVVCYPIIFDLSDFYMSQDVFLLIDDIKNALQFIKQYWKMHGRPLFLVLIREDNIRGSRFNPILDMLAALKKGIIGGVKVHVDRLQTLISGAVVEQLDFLRISDTEELPEFKSFEELEPPKHSKVKRQSSTPSAPELGQQPDVNISEWKDKPTHEILQKLNDCSCLASQAILLGILLKREGPNFITKEGTVSDHIERVYRRAGSQKLWSVVRRAASLLSKVVDSLAPSITNVLVQGKQGQLCHLLLTEPSPVSSGLSLWILTIGL

SEQ ID NO: 11132 - protein, 143 aa, Artificial Sequence
  Synthetic polypeptide
SKVKRQSSTPSAPELGQQPDVNISEWKDKPTHEILQKLNDCSCLASQAILLGILLKREGPNFITKEGTVSDHIERVYRRAGSQKLWSVVRRAASLLSKVVDSLAPSITNVLVQGKQGQLCHLLLTEPSPVSSGLSLWILTIGL

SEQ ID NO: 11133 - protein, 896 aa, Artificial Sequence
  Synthetic polypeptide
MNSLFRKRNKGKYSPTVQTRSISNKELSELIEQLQKNADQVEKNIVDTEAKMQSDLARLQEGRQPEHRDVTLQKVLDSEKLLYVLEADAAIAKHMKHPQGDMIAEDIRQLKERVTNLRGKHKQIYRLAVKEVDPQVNWAALVEEKLDKLNNQSFGTDLPLVDHQVEEHNIFHNEVKAIGPHLAKDGDKEQNSELRAKYQKLLAASQARQQHLSSLQDYMQRCTNELYWLDQQAKGRMQYDWSDRNLDYPSRRRQYENFINRNLEAKEERINKLHSEGDQLLAAEHPGRNSIEAHMEAVHADWKEYLNLLICEESHLKYMEDYHQFHEDVKDAQELLRKVDSDLNQKYGPDFKDRYQIELLLRELDDQEKVLDKYEDVVQGLQKRGQQVVPLKYRRETPLKPIPVEALCDFEGEQGLISRGYSYTLQKNNGESWELMDSAGNKLIAPAVCFVIPPTDPEALALADSLGSQYRSVRQKAAGSKRTLQQRYEVLKTENPGDASDLQGRQLLAGLDKVASDLDRQEKAITGILRPPLEQGRAVQDSAERAKDLKNITNELLRIEPEKTRSTAEGEAFIQALPGSGTTPLLRTRVEDTNRKYEHLLQLLDLAQEKVDVANRLEKSLQQSWELLATHENHLNQDDTVPESSRVLDSKGQELAAMACELQAQKSLLGEVEQNLQAAKQCSSTLASRFQEHCPDLERQEAEVHKLGQRFNNLRQQVERRAQSLQSAKAAYEHFHRGHDHVLQFLVSIPSYEPQETDSLSQMETKLKNQKNLLDEIASREQEVQKICANSQQYQQAVKDYELEAEKLRSLLDLENGRRSHVSKRARLQSPATKVKEEEAALAAKFTEVYAINRQRLQNLEFALNLLRQQDTGSSSLFISNGLNCGLSRERKQCCW

SEQ ID NO: 11134 - protein, 894 aa, Artificial Sequence
  Synthetic polypeptide
MNSLFRKRNKGKYSPTVQTRSISNKELSELIEQLQKNADQVEKNIVDTEAKMQSDLARLQEGRQPEHRDVTLQKVLDSEKLLYVLEADAAIAKHMKHPQGDMIAEDIRQLKERVTNLRGKHKQIYRLAVKEVDPQVNWAALVEEKLDKLNNQSFGTDLPLVDHQVEEHNIFHNEVKAIGPHLAKDGDKNSELRAKYQKLLAASQARQQHLSSLQDYMQRCTNELYWLDQQAKGRMQYDWSDRNLDYPSRRRQYENFINRNLEAKEERINKLHSEGDQLLAAEHPGRNSIEAHMEAVHADWKEYLNLLICEESHLKYMEDYHQFHEDVKDAQELLRKVDSDLNQKYGPDFKDRYQIELLLRELDDQEKVLDKYEDVVQGLQKRGQQVVPLKYRRETPLKPIPVEALCDFEGEQGLISRGYSYTLQKNNGESWELMDSAGNKLIAPAVCFVIPPTDPEALALADSLGSQYRSVRQKAAGSKRTLQQRYEVLKTENPGDASDLQGRQLLAGLDKVASDLDRQEKAITGILRPPLEQGRAVQDSAERAKDLKNITNELLRIEPEKTRSTAEGEAFIQALPGSGTTPLLRTRVEDTNRKYEHLLQLLDLAQEKVDVANRLEKSLQQSWELLATHENHLNQDDTVPESSRVLDSKGQELAAMACELQAQKSLLGEVEQNLQAAKQCSSTLASRFQEHCPDLERQEAEVHKLGQRFNNLRQQVERRAQSLQSAKAAYEHFHRGHDHVLQFLVSIPSYEPQETDSLSQMETKLKNQKNLLDEIASREQEVQKICANSQQYQQAVKDYELEAEKLRSLLDLENGRRSHVSKRARLQSPATKVKEEEAALAAKFTEVYAINRQRLQNLEFALNLLRQQDTGSSSLFISNGLNCGLSRERKQCCW

SEQ ID NO: 11135 - protein, 317 aa, Artificial Sequence
  Synthetic polypeptide
MQSDLARLQEGRQPEHRDVTLQKVLDSEKLLYVLEADAAIAKHMKHPQGDMIAEDIRQLKERVTNLRGKHKQIYRLAVKEVDPQAQKSLLGEVEQNLQAAKQCSSTLASRFQEHCPDLERQEAEVHKLGQRFNNLRQQVERRAQSLQSAKAAYEHFHRGHDHVLQFLVSIPSYEPQETDSLSQMETKLKNQKNLLDEIASREQEVQKICANSQQYQQAVKDYELEAEKLRSLLDLENGRRSHVSKRARLQSPATKVKEEEAALAAKFTEVYAINRQRLQNLEFALNLLRQQDTGSSSLFISNGLNCGLSRERKQCCW

SEQ ID NO: 11136 - protein, 101 aa, Artificial Sequence
  Synthetic polypeptide
MGKLHSKPAAVCKRRESPEGDSFAVSAAWARKGIEEWIGRQRCPGGVSGPRQLRLAGTIGRSTRELVGDVLRDTLSEEEEDDFRLEAPQVACMNTALREAL

SEQ ID NO: 11137 - protein, 177 aa, Artificial Sequence
  Synthetic polypeptide
MGKLHSKPAAVCKRRESPEGDSFAVSAAWARKGIEEWIGRQRCPGGVSGPRQLRLAGTIGRSTRELVGDVLRDTLSEEEEDDFRLEVALPPEKTDGLGSGDEKKMERVSEPCPGSKKQLKFEELQCDVSMEEDSRQEWTFTLYDFDNNGKVTREMFWSGPAKGFVKNQLPRSAILKI

SEQ ID NO: 11138 - protein, 179 aa, Artificial Sequence
  Synthetic polypeptide
MGKLHSKPAAVCKRRESPEGDSFAVSAAWARKGIEEWIGRQRCPGGVSGPRQLRLAGTIGRSTRELVGDVLRDTLSEEEEDDFRLEVALPPEKTDGLGSGDEKKMERVSEPCPGSKKQLKFEELQCDVSMEEDSRQEWTFTLYDFDNNGKVTREQMLLMPPLHFPWVHLKVHLLPWWMV

SEQ ID NO: 11139 - protein, 178 aa, Artificial Sequence
  Synthetic polypeptide
MGKLHSKPAAVCKRRESPEGDSFAVSAAWARKGIEEWIGRQRCPGGVSGPRQLRLAGTIGRSTRELVGDVLRDTLSEEEEDDFRLEVALPPEKTDGLGSGDEKKMERVSEPCPGSKKQLKFEELQCDVSMEEDSRQEWTFTLYDFDNNGKVTREMLLMPPLHFPWVHLKVHLLPWWMV

SEQ ID NO: 11140 - protein, 77 aa, Artificial Sequence
  Synthetic polypeptide
MSRCAQAAEVAATVPGAGVGNVGLRPPMVPRQASFFPPPVPNPFVQQTQIGSARRVQRKVEDQMTSLVNATKGLMKN

SEQ ID NO: 11141 - protein, 77 aa, Artificial Sequence
  Synthetic polypeptide
MSRCAQAAEVAATVPGAGVGNVGLRPPMVPRQASFFPPPVPNPFVQQTQIGSARRVQENNTRLRLGYTGRNEEHWKW

SEQ ID NO: 11142 - protein, 159 aa, Artificial Sequence
  Synthetic polypeptide
MLLARMNPQVQPENNGADTGPEQPLRARKTAELLVVKERNGVQCLLAPRDGDAQPRETWGKKIDFLLSVVGFAVDLANVWRFPYLCYKNGGGAFLIPYTLFLIIAGMPLFYMELALGQYNREGAATVWKICPFFKAAPHRSHDRLSSASCQISRCTRFS

SEQ ID NO: 11143 - protein, 170 aa, Artificial Sequence
  Synthetic polypeptide
MAELPTTETPGDATLCSGRFTISTLLSSDEPSPPAAYDSSHPSHLTHSSTFCMRTFGYNTIDVVPTYEHYANSTQPGEPRKVRPTLADLHSFLKEGRHLHALAFDSRPSHEMTDGLVEGEAGTSSEKNPEEPVRFGWVKGVMIRCMLNIWGVILYLRLPWITAQAGIGCK

SEQ ID NO: 11144 - protein, 171 aa, Artificial Sequence
  Synthetic polypeptide
MAELPTTETPGDATLCSGRFTISTLLSSDEPSPPAAYDSSHPSHLTHSSTFCMRTFGYNTIDVVPTYEHYANSTQPGEPRKVRPTLADLHSFLKQEGRHLHALAFDSRPSHEMTDGLVEGEAGTSSEKNPEEPVRFGWVKGVMIRCMLNIWGVILYLRLPWITAQAGIGCK

SEQ ID NO: 11145 - protein, 1002 aa, Artificial Sequence
  Synthetic polypeptide
MAELPTTETPGDATLCSGRFTISTLLSSDEPSPPAAYDSSHPSHLTHSSTFCMRTFGYNTIDVVPTYEHYANSTQPGEPRKVRPTLADLHSFLKEGRHLHALAFDSRPSHEMTDGLVEGEAGTSSEKNPEEPVRFGWVKGVMIRCMLNIWGVILYLRLPWITAQAGIVLTWIIILLSVTVTSITGLSISAISTNGKVKSGGTYFLISRSLGPELGGSIGLIFAFANAVGVAMHTVGFAETVRDLLQEYGAPIVDPINDIRIIAVVSVTVLLAISLAGMEWESKAQVLFFLVIMVSFANYLVGTLIPPSEDKASKGFFSYRADIFVQNLVPDWRGPDGTFFGMFSIFFPSATGILAGANISGDLKDPAIAIPKGTLMAIFWTTISYLAISATIGSCVVRDASGVLNDTVTPGWGACEGLACSYGWNFTECTQQHSCHYGLINYYQTMSMVSGFAPLITAGIFGATLSSALACLVSAAKVFQCLCEDQLYPLIGFFGKGYGKNKEPVRGYLLAYAIAVAFIIIAELNTIAPIISNFFLCSYALINFSCFHASITNSPGWRPSFQYYNKWAALFGAIISVVIMFLLTWWAALIAIGVVLFLLLYVIYKKPEVNWGSSVQAGSYNLALSYSVGLNEVEDHIKNYRPQCLVLTGPPNFRPALVDFVGTFTRNLSLMICGHVLIGPHKQRMPELQLIANGHTKWLNKRKIKAFYSDVIAEDLRRGVQILMQAAGLGRMKPNILVVGFKKNWQSAHPATVEDYIGILHDAFDFNYGVCVMRMREGLNVSKMMQAHINPVFDPAEDGKEASARGARPSVSGALDPKALVKEEQATTIFQSEQGKKTIDIYWLFDDGGLTLLIPYLLGRKRRWSKCKIRVFVGGQINRMDQERKAIISLLSKFRLGFHEVHILPDINQNPRAEHTKRFEDMIAPFRLNDGFKDEATVNEMRRDCPWKISDEEITKNRVKSLRQVRLNEIVLDYSRDAALIVILATRAKLRLKKKKKKKKKE

SEQ ID NO: 11146 - protein, 993 aa, Artificial Sequence
  Synthetic polypeptide
MAELPTTETPGDATLCSGRFTISTLLSSDEPSPPAAYDSSHPSHLTHSSTFCMRTFGYNTIDVVPTYEHYANSTQPGEPRKVRPTLADLHSFLKEGRHLHALAFDSRPSHEMTDGLVEGEAGTSSEKNPEEPVRFGWVKGVMIRCMLNIWGVILYLRLPWITAQAGIVLTWIIILLSVTVTSITGLSISAISTNGKVKSGGTYFLISRSLGPELGGSIGLIFAFANAVGVAMHTVGFAETVRDLLQEYGAPIVDPINDIRIIAVVSVTVLLAISLAGMEWESKAQVLFFLVIMVSFANYLVGTLIPPSEDKASKGFFSYRADIFVQNLVPDWRGPDGTFFGMFSIFFPSATGILAGANISGDLKDPAIAIPKGTLMAIFWTTISYLAISATIGSCVVRDASGVLNDTVTPGWGACEGLACSYGWNFTECTQQHSCHYGLINYYQTMSMVSGFAPLITAGIFGATLSSALACLVSAAKVFQCLCEDQLYPLIGFFGKGYGKNKEPVRGYLLAYAIAVAFIIIAELNTIAPIISNFFLCSYALINFSCFHASITNSPGWRPSFQYYNKWAALFGAIISVVIMFLLTWWAALIAIGVVLFLLLYVIYKKPEVNWGSSVQAGSYNLALSYSVGLNEVEDHIKNYRPQCLVLTGPPNFRPALVDFVGTFTRNLSLMICGHVLIGPHKQRMPELQLIANGHTKWLNKRKIKAFYSDVIAEDLRRGVQILMQAAGLGRMKPNILVVGFKKNWQSAHPATVEDYIGILHDAFDFNYGVCVMRMREGLNVSKMMQAHINPVFDPAEDGKEASARVDPKALVKEEQATTIFQSEQGKKTIDIYWLFDDGGLTLLIPYLLGRKRRWSKCKIRVFVGGQINRMDQERKAIISLLSKFRLGFHEVHILPDINQNPRAEHTKRFEDMIAPFRLNDGFKDEATVNEMRRDCPWKISDEEITKNRVKSLRQVRLNEIVLDYSRDAALIVILATRAKLRLKKKKKKKKKE

SEQ ID NO: 11147 - protein, 1003 aa, Artificial Sequence
  Synthetic polypeptide
MAELPTTETPGDATLCSGRFTISTLLSSDEPSPPAAYDSSHPSHLTHSSTFCMRTFGYNTIDVVPTYEHYANSTQPGEPRKVRPTLADLHSFLKQEGRHLHALAFDSRPSHEMTDGLVEGEAGTSSEKNPEEPVRFGWVKGVMIRCMLNIWGVILYLRLPWITAQAGIVLTWIIILLSVTVTSITGLSISAISTNGKVKSGGTYFLISRSLGPELGGSIGLIFAFANAVGVAMHTVGFAETVRDLLQEYGAPIVDPINDIRIIAVVSVTVLLAISLAGMEWESKAQVLFFLVIMVSFANYLVGTLIPPSEDKASKGFFSYRADIFVQNLVPDWRGPDGTFFGMFSIFFPSATGILAGANISGDLKDPAIAIPKGTLMAIFWTTISYLAISATIGSCVVRDASGVLNDTVTPGWGACEGLACSYGWNFTECTQQHSCHYGLINYYQTMSMVSGFAPLITAGIFGATLSSALACLVSAAKVFQCLCEDQLYPLIGFFGKGYGKNKEPVRGYLLAYAIAVAFIIIAELNTIAPIISNFFLCSYALINFSCFHASITNSPGWRPSFQYYNKWAALFGAIISVVIMFLLTWWAALIAIGVVLFLLLYVIYKKPEVNWGSSVQAGSYNLALSYSVGLNEVEDHIKNYRPQCLVLTGPPNFRPALVDFVGTFTRNLSLMICGHVLIGPHKQRMPELQLIANGHTKWLNKRKIKAFYSDVIAEDLRRGVQILMQAAGLGRMKPNILVVGFKKNWQSAHPATVEDYIGILHDAFDFNYGVCVMRMREGLNVSKMMQAHINPVFDPAEDGKEASARGARPSVSGALDPKALVKEEQATTIFQSEQGKKTIDIYWLFDDGGLTLLIPYLLGRKRRWSKCKIRVFVGGQINRMDQERKAIISLLSKFRLGFHEVHILPDINQNPRAEHTKRFEDMIAPFRLNDGFKDEATVNEMRRDCPWKISDEEITKNRVKSLRQVRLNEIVLDYSRDAALIVILATRAKLRLKKKKKKKKKE

SEQ ID NO: 11148 - protein, 994 aa, Artificial Sequence
  Synthetic polypeptide
MAELPTTETPGDATLCSGRFTISTLLSSDEPSPPAAYDSSHPSHLTHSSTFCMRTFGYNTIDVVPTYEHYANSTQPGEPRKVRPTLADLHSFLKQEGRHLHALAFDSRPSHEMTDGLVEGEAGTSSEKNPEEPVRFGWVKGVMIRCMLNIWGVILYLRLPWITAQAGIVLTWIIILLSVTVTSITGLSISAISTNGKVKSGGTYFLISRSLGPELGGSIGLIFAFANAVGVAMHTVGFAETVRDLLQEYGAPIVDPINDIRIIAVVSVTVLLAISLAGMEWESKAQVLFFLVIMVSFANYLVGTLIPPSEDKASKGFFSYRADIFVQNLVPDWRGPDGTFFGMFSIFFPSATGILAGANISGDLKDPAIAIPKGTLMAIFWTTISYLAISATIGSCVVRDASGVLNDTVTPGWGACEGLACSYGWNFTECTQQHSCHYGLINYYQTMSMVSGFAPLITAGIFGATLSSALACLVSAAKVFQCLCEDQLYPLIGFFGKGYGKNKEPVRGYLLAYAIAVAFIIIAELNTIAPIISNFFLCSYALINFSCFHASITNSPGWRPSFQYYNKWAALFGAIISVVIMFLLTWWAALIAIGVVLFLLLYVIYKKPEVNWGSSVQAGSYNLALSYSVGLNEVEDHIKNYRPQCLVLTGPPNFRPALVDFVGTFTRNLSLMICGHVLIGPHKQRMPELQLIANGHTKWLNKRKIKAFYSDVIAEDLRRGVQILMQAAGLGRMKPNILVVGFKKNWQSAHPATVEDYIGILHDAFDFNYGVCVMRMREGLNVSKMMQAHINPVFDPAEDGKEASARVDPKALVKEEQATTIFQSEQGKKTIDIYWLFDDGGLTLLIPYLLGRKRRWSKCKIRVFVGGQINRMDQERKAIISLLSKFRLGFHEVHILPDINQNPRAEHTKRFEDMIAPFRLNDGFKDEATVNEMRRDCPWKISDEEITKNRVKSLRQVRLNEIVLDYSRDAALIVILATRAKLRLKKKKKKKKKE

SEQ ID NO: 11149 - protein, 147 aa, Artificial Sequence
  Synthetic polypeptide
MAHIPSGGAPAAGAAPMGPQYCVCKVELSVSGQNLLDRDVTSKSDPFCVLFTENNGRWIEYDRTETAINNLNPAFSKKFVLDYHFEEVQKLKFALFDQDKSSMRLDEHDFLGQFSCSLGTIVSSKKITRPLLLLNDKPAGKGLITFP

SEQ ID NO: 11150 - protein, 45 aa, Artificial Sequence
  Synthetic polypeptide
MRLDEHDFLGQFSCSLGTIVSSKKITRPLLLLNDKPAGKGLITFP

SEQ ID NO: 11151 - protein, 173 aa, Artificial Sequence
  Synthetic polypeptide
MAQMEFLFRKNTLTAAWKPRHQETLRLEAGVPEQCKAAWCPEEAAEPQAMVPSRRTWNLGATPSLRGLWRVGRAPEPEPGMARPAPAPASPAARPFPHTGPGRLRTGRGKDTPVCGDEDSSARSAARPALAQCRALSVDWAGPGSPHGLYLTLQDCKFPEASPAMWNCESIKP

SEQ ID NO: 11152 - protein, 146 aa, Artificial Sequence
  Synthetic polypeptide
MCASACKDTAAWCPEEAAEPQAMVPSRRTWNLGATPSLRGLWRVGRAPEPEPGMARPAPAPASPAARPFPHTGPGRLRTGRGKDTPVCGDEDSSARSAARPALAQCRALSVDWAGPGSPHGLYLTLQDCKFPEASPAMWNCESIKP

SEQ ID NO: 11153 - protein, 152 aa, Artificial Sequence
  Synthetic polypeptide
MLPLFGRQRTEWLLQAAWCPEEAAEPQAMVPSRRTWNLGATPSLRGLWRVGRAPEPEPGMARPAPAPASPAARPFPHTGPGRLRTGRGKDTPVCGDEDSSARSAARPALAQCRALSVDWAGPGSPHGLYLTLQDCKFPEASPAMWNCESIKP

SEQ ID NO: 11154 - protein, 124 aa, Artificial Sequence
  Synthetic polypeptide
MVPSRRTWNLGATPSLRGLWRVGRAPEPEPGMARPAPAPASPAARPFPHTGPGRLRTGRGKDTPVCGDEDSSARSAARPALAQCRALSVDWAGPGSPHGLYLTLQDCKFPEASPAMWNCESIKP

SEQ ID NO: 11155 - protein, 185 aa, Artificial Sequence
  Synthetic polypeptide
MAQMEFLFRKNTLTAAWKPRHQETLRLEAGVPEQCKAAWCPEEAAEPQAMVPSRRTWNLGATPSLRGLWRVGRAPEPEPGMARPAPAPASPAARPFPHTGPGRLRTGRGKDTPVCGDEDSSARSAARPALAQCRALSVDWAGPGSPHGLYLTLQKTCFVSPPPSARIVSFLRPPQPCGTVSQLNL

SEQ ID NO: 11156 - protein, 158 aa, Artificial Sequence
  Synthetic polypeptide
MCASACKDTAAWCPEEAAEPQAMVPSRRTWNLGATPSLRGLWRVGRAPEPEPGMARPAPAPASPAARPFPHTGPGRLRTGRGKDTPVCGDEDSSARSAARPALAQCRALSVDWAGPGSPHGLYLTLQKTCFVSPPPSARIVSFLRPPQPCGTVSQLNL

SEQ ID NO: 11157 - protein, 164 aa, Artificial Sequence
  Synthetic polypeptide
MLPLFGRQRTEWLLQAAWCPEEAAEPQAMVPSRRTWNLGATPSLRGLWRVGRAPEPEPGMARPAPAPASPAARPFPHTGPGRLRTGRGKDTPVCGDEDSSARSAARPALAQCRALSVDWAGPGSPHGLYLTLQKTCFVSPPPSARIVSFLRPPQPCGTVSQLNL

SEQ ID NO: 11158 - protein, 136 aa, Artificial Sequence
  Synthetic polypeptide
MVPSRRTWNLGATPSLRGLWRVGRAPEPEPGMARPAPAPASPAARPFPHTGPGRLRTGRGKDTPVCGDEDSSARSAARPALAQCRALSVDWAGPGSPHGLYLTLQKTCFVSPPPSARIVSFLRPPQPCGTVSQLNL

SEQ ID NO: 11159 - protein, 34 aa, Artificial Sequence
  Synthetic polypeptide
MALLHSGRVLPGIAAAFHPGLAAAASARASLSPV

SEQ ID NO: 11160 - protein, 125 aa, Artificial Sequence
  Synthetic polypeptide
MPERLAEMLLDLWTPLIILWITLPPCIYMAPMNQSQVLMSGSPLELNSLGEEQRILNRSKRGWVWNQMFVLEEFSGPEPILVGRDASSAKKRIFESFGLCSVFPEPRTLPAYRNCSVNTLHEKIN

SEQ ID NO: 11161 - protein, 534 aa, Artificial Sequence; identical to SEQ ID NO: 342
  Synthetic polypeptide

SEQ ID NO: 11162 - protein, 660 aa, Artificial Sequence; identical to SEQ ID NO: 204
  Synthetic polypeptide

SEQ ID NO: 11163 - protein, 401 aa, Artificial Sequence
  Synthetic polypeptide
MGSVTGAVLKTLLLSTQNWNRVEAGNSYDCDDPLVSALPQASFSSSSELSSSHGPGFARLNRRDGAGGWSPLVSNKYQWLQIDLGERMEVTAVATQGGYGSSNWVTSYLLMFSDSGWNWKQYRQEDSIWGFSGNANADSVVYYRLQPSIKARFLRFIPLEWNPKGRIGMRIEVFGCAYRSEVVDLDGKSSLLYRFDQKSLSPIKDIISLKFKTMQSDGILLHREGPNGDHITLQLRRARLFLLINSGEAKLPSTSTLVNLTLGSLLDDQHWHSVLIQRLGKQVNFTVDEHRHHFHARGEFNLMNLDYEGNVSFSCSQPQSMPVTFLSSRSYLALPDFSGEEEVSATFQFRTWNKAGLLLFSELQLISGGILLFLSDGKLKSNLYQPGKLPSDITADSLRRT

SEQ ID NO: 11164 - protein, 449 aa, Artificial Sequence
  Synthetic polypeptide
MGSVTGAVLKTLLLSTQNWNRVEAGNSYDCDDPLVSALPQASFSSSSELSSSHGPGFARLNRRDGAGGWSPLVSNKYQWLQIDLGERMEVTAVATQGGYGSSNWVTSYLLMFSDSGWNWKQYRQEDSIWGFSGNANADSVVYYRLQPSIKARFLRFIPLEWNPKGRIGMRIEVFGCAYRSEVVDLDGKSSLLYRFDQKSLSPIKDIISLKFKTMQSDGILLHREGPNGDHITLQLRRARLFLLINSGEAKLPSTSTLVNLTLGSLLDDQHWHSVLIQRLGKQVNFTVDEHRHHFHARGEFNLMNLDYEISFGGIPAPGKSVSFPHRNFHGCLENLYYNGVDIIDLAKQQKPQIIAMGNVSFSCSQPQSMPVTFLSSRSYLALPDFSGEEEVSATFQFRTWNKAGLLLFSELQLISGGILLFLSDGKLKSNLYQPGKLPSDITADSLRRT

SEQ ID NO: 11165 - protein, 453 aa, Artificial Sequence
  Synthetic polypeptide
MLLFYLLVVLSIDSTKASALTNPNVALFLLADDCDDPLVSALPQASFSSSSELSSSHGPGFARLNRRDGAGGWSPLVSNKYQWLQIDLGERMEVTAVATQGGYGSSNWVTSYLLMFSDSGWNWKQYRQEDSIWGFSGNANADSVVYYRLQPSIKARFLRFIPLEWNPKGRIGMRIEVFGCAYRSEVVDLDGKSSLLYRFDQKSLSPIKDIISLKFKTMQSDGILLHREGPNGDHITLQLRRARLFLLINSGEAKLPSTSTLVNLTLGSLLDDQHWHSVLIQRLGKQVNFTVDEHRHHFHARGEFNLMNLDYEISFGGIPAPGKSVSFPHRNFHGCLENLYYNGVDIIDLAKQQKPQIIAMGNVSFSCSQPQSMPVTFLSSRSYLALPDFSGEEEVSATFQFRTWNKAGLLLFSELQLISGGILLFLSDGKLKSNLYQPGKLPSDITADSLRRT

SEQ ID NO: 11166 - protein, 377 aa, Artificial Sequence
  Synthetic polypeptide
MWNYDCDDPLVSALPQASFSSSSELSSSHGPGFARLNRRDGAGGWSPLVSNKYQWLQIDLGERMEVTAVATQGGYGSSNWVTSYLLMFSDSGWNWKQYRQEDSIWGFSGNANADSVVYYRLQPSIKARFLRFIPLEWNPKGRIGMRIEVFGCAYRSEVVDLDGKSSLLYRFDQKSLSPIKDIISLKFKTMQSDGILLHREGPNGDHITLQLRRARLFLLINSGEAKLPSTSTLVNLTLGSLLDDQHWHSVLIQRLGKQVNFTVDEHRHHFHARGEFNLMNLDYEGNVSFSCSQPQSMPVTFLSSRSYLALPDFSGEEEVSATFQFRTWNKAGLLLFSELQLISGGILLFLSDGKLKSNLYQPGKLPSDITADSLRRT

SEQ ID NO: 11167 - protein, 619 aa, Artificial Sequence
  Synthetic polypeptide
MALPTARPLLGSCGTPALGSLLFLLFSLGWVQPSRTLAGETGQEAAPLDGVLANPPNISSLSPRQLLGFPCAEVSGLSTERVRELAVALAQKNVKLSTEQLRCLAHRLSEPPEDLDALPLDLLLFLNPDAFSGPQACTRFFSRITKANVDLLPRGAPERQRLLPAALACWGVRGSLLSEADVRALGGLACDLPGRFVAESAEVLLPRLVSCPGPLDQDQQEAARAALQGGGPPYGPPSTWSVSTMDALRGLLPVLGQPIIRSIPQGIVAAWRQRSSRDPSWRQPERTILRPRFRREVEKTACPSGKKAREIDESLIFYKKWELEACVDAALLATQMDRVNAIPFTYEQLDVLKHKLDELYPQGYPESVIQHLGYLFLKMSPEDIRKWNVTSLETLKALLEVNKGHEMSPQAPRRPLPQVATLIDRFVKGRGQLDKDTLDTLTAFYPGYLCSLSPEELSSVPPSSIWAVRPQDLDTCDPRQLDVLYPKARLAFQNMNGSEYFVKIQSFLGGAPTEDLKALSQQNVSMDLATFMKLRTDAVLPLTVAEVQKLLGPHVEGLKAEERHRPVRDWILRQRQDDLDTLGLGLQGGIPNGYLVLDLSMQGAVAHTCYPSALGDRGG

SEQ ID NO: 11168 - protein, 611 aa, Artificial Sequence
  Synthetic polypeptide
MALPTARPLLGSCGTPALGSLLFLLFSLGWVQPSRTLAGETGQEAAPLDGVLANPPNISSLSPRQLLGFPCAEVSGLSTERVRELAVALAQKNVKLSTEQLRCLAHRLSEPPEDLDALPLDLLLFLNPDAFSGPQACTRFFSRITKANVDLLPRGAPERQRLLPAALACWGVRGSLLSEADVRALGGLACDLPGRFVAESAEVLLPRLVSCPGPLDQDQQEAARAALQGGGPPYGPPSTWSVSTMDALRGLLPVLGQPIIRSIPQGIVAAWRQRSSRDPSWRQPERTILRPRFRREVEKTACPSGKKAREIDESLIFYKKWELEACVDAALLATQMDRVNAIPFTYEQLDVLKHKLDELYPQGYPESVIQHLGYLFLKMSPEDIRKWNVTSLETLKALLEVNKGHEMSPQVATLIDRFVKGRGQLDKDTLDTLTAFYPGYLCSLSPEELSSVPPSSIWAVRPQDLDTCDPRQLDVLYPKARLAFQNMNGSEYFVKIQSFLGGAPTEDLKALSQQNVSMDLATFMKLRTDAVLPLTVAEVQKLLGPHVEGLKAEERHRPVRDWILRQRQDDLDTLGLGLQGGIPNGYLVLDLSMQGAVAHTCYPSALGDRGG

SEQ ID NO: 11169 - protein, 315 aa, Artificial Sequence
  Synthetic polypeptide
VEKTACPSGKKAREIDESLIFYKKWELEACVDAALLATQMDRVNAIPFTYEQLDVLKHKLDELYPQGYPESVIQHLGYLFLKMSPEDIRKWNVTSLETLKALLEVNKGHEMSPQVATLIDRFVKGRGQLDKDTLDTLTAFYPGYLCSLSPEELSSVPPSSIWAVRPQDLDTCDPRQLDVLYPKARLAFQNMNGSEYFVKIQSFLGGAPTEDLKALSQQNVSMDLATFMKLRTDAVLPLTVAEVQKLLGPHVEGLKAEERHRPVRDWILRQRQDDLDTLGLGLQGGIPNGYLVLDLSMQGAVAHTCYPSALGDRGG

SEQ ID NO: 11170 - protein, 333 aa, Artificial Sequence
  Synthetic polypeptide
  misc_feature (1)..(1): Xaa can be any naturally occurring amino acid
XSWRQPERTILRPRFRREVEKTACPSGKKAREIDESLIFYKKWELEACVDAALLATQMDRVNAIPFTYEQLDVLKHKLDELYPQGYPESVIQHLGYLFLKMSPEDIRKWNVTSLETLKALLEVNKGHEMSPQVATLIDRFVKGRGQLDKDTLDTLTAFYPGYLCSLSPEELSSVPPSSIWAVRPQDLDTCDPRQLDVLYPKARLAFQNMNGSEYFVKIQSFLGGAPTEDLKALSQQNVSMDLATFMKLRTDAVLPLTVAEVQKLLGPHVEGLKAEERHRPVRDWILRQRQDDLDTLGLGLQGGIPNGYLVLDLSMQGAVAHTCYPSALGDRGG

SEQ ID NO: 11171 - protein, 267 aa, Artificial Sequence
  Synthetic polypeptide
MKTPPGASSRTKCSRELRSFCAFSCPRAKQPTCTAWFPQQEHPSENGPQMPGRDPPAASTMQVLLLTSAEDLDCTPGFQQKVFHINQPAEFIEDQSILNLTFSDCKGNDKLRYEVSSPYFKVNSDGGLVALRNITAVGKTLFVHARTPHAEDMAELVIVGGKDIQGSLQDIFKFARTSPVPRQKRSIVVSPILIPENQRQPFPRDVGKVVDSDRPERSKFRLTGKGVDQEPKGIFRINENTGSVSVTRTLDREVIAVYQAGHGGSCL

SEQ ID NO: 11172 - protein, 220 aa, Artificial Sequence
  Synthetic polypeptide
MQPRTPLVLCVLLSQVLLLTSAEDLDCTPGFQQKVFHINQPAEFIEDQSILNLTFSDCKGNDKLRYEVSSPYFKVNSDGGLVALRNITAVGKTLFVHARTPHAEDMAELVIVGGKDIQGSLQDIFKFARTSPVPRQKRSIVVSPILIPENQRQPFPRDVGKVVDSDRPERSKFRLTGKGVDQEPKGIFRINENTGSVSVTRTLDREVIAVYQAGHGGSCL

SEQ ID NO: 11173 - protein, 181 aa, Artificial Sequence
  Synthetic polypeptide
MQPRTPLVLCVLLSQVLLLTSAEDLDCTPGFQQKVFHINQPAEFIEDQSILNLTFSDCKGNDKLRYEVSSPYFKVNSDGGLVALRNITAVGKTLFVHARTPHAEDMAELVIVGGKDIQGSLQVVDSDRPERSKFRLTGKGVDQEPKGIFRINENTGSVSVTRTLDREVIAVYQAGHGGSCL

SEQ ID NO: 11174 - protein, 610 aa, Artificial Sequence
  Synthetic polypeptide
MKTPPGASSRTKCSRELRSFCAFSCPRAKQPTCTAWFPQQEHPSENGPQMPGRDPPAASTMQVLLLTSAEDLDCTPGFQQKVFHINQPAEFIEDQSILNLTFSDCKGNDKLRYEVSSPYFKVNSDGGLVALRNITAVGKTLFVHARTPHAEDMAELVIVGGKDIQGSLQDIFKFARTSPVPRQKRSIVVSPILIPENQRQPFPRDVGKVVDSDRPERSKFRLTGKGVDQEPKGIFRINENTGSVSVTRTLDREVIAVYQLFVETTDVNGKTLEGPVPLEVIVIDQNDNRPIFREGPYIGHVMEGSPTGTTVMRMTAFDADDPATDNALLRYNIRQQTPDKPSPNMFYIDPEKGDIVTVVSPALLDRETLENPKYELIIEAQDMAGLDVGLTGTATATIMIDDKNDHSPKFTKKEFQATVEEGAVGVIVNLTVEDKDDPTTGAWRAAYTIINGNPGQSFEIHTNPQTNEGMLSVVKPLDYEISAFHTLLIKVENEDPLVPDVSYGPSSTATVHITVLDVNEGPVFYPDPMMVTRQEDLSVGSVLLTVNATDPDSLQHQTIRYSVYKDPAGWLNINPINGTVDTTAVLDRESPFVDNSVYTALFLAIDSGGI

SEQ ID NO: 11175 - protein, 563 aa, Artificial Sequence
  Synthetic polypeptide
MQPRTPLVLCVLLSQVLLLTSAEDLDCTPGFQQKVFHINQPAEFIEDQSILNLTFSDCKGNDKLRYEVSSPYFKVNSDGGLVALRNITAVGKTLFVHARTPHAEDMAELVIVGGKDIQGSLQDIFKFARTSPVPRQKRSIVVSPILIPENQRQPFPRDVGKVVDSDRPERSKFRLTGKGVDQEPKGIFRINENTGSVSVTRTLDREVIAVYQLFVETTDVNGKTLEGPVPLEVIVIDQNDNRPIFREGPYIGHVMEGSPTGTTVMRMTAFDADDPATDNALLRYNIRQQTPDKPSPNMFYIDPEKGDIVTVVSPALLDRETLENPKYELIIEAQDMAGLDVGLTGTATATIMIDDKNDHSPKFTKKEFQATVEEGAVGVIVNLTVEDKDDPTTGAWRAAYTIINGNPGQSFEIHTNPQTNEGMLSVVKPLDYEISAFHTLLIKVENEDPLVPDVSYGPSSTATVHITVLDVNEGPVFYPDPMMVTRQEDLSVGSVLLTVNATDPDSLQHQTIRYSVYKDPAGWLNINPINGTVDTTAVLDRESPFVDNSVYTALFLAIDSGGI

SEQ ID NO: 11176 - protein, 524 aa, Artificial Sequence
  Synthetic polypeptide
MQPRTPLVLCVLLSQVLLLTSAEDLDCTPGFQQKVFHINQPAEFIEDQSILNLTFSDCKGNDKLRYEVSSPYFKVNSDGGLVALRNITAVGKTLFVHARTPHAEDMAELVIVGGKDIQGSLQVVDSDRPERSKFRLTGKGVDQEPKGIFRINENTGSVSVTRTLDREVIAVYQLFVETTDVNGKTLEGPVPLEVIVIDQNDNRPIFREGPYIGHVMEGSPTGTTVMRMTAFDADDPATDNALLRYNIRQQTPDKPSPNMFYIDPEKGDIVTVVSPALLDRETLENPKYELIIEAQDMAGLDVGLTGTATATIMIDDKNDHSPKFTKKEFQATVEEGAVGVIVNLTVEDKDDPTTGAWRAAYTIINGNPGQSFEIHTNPQTNEGMLSVVKPLDYEISAFHTLLIKVENEDPLVPDVSYGPSSTATVHITVLDVNEGPVFYPDPMMVTRQEDLSVGSVLLTVNATDPDSLQHQTIRYSVYKDPAGWLNINPINGTVDTTAVLDRESPFVDNSVYTALFLAIDSGGI

SEQ ID NO: 11177 - protein, 159 aa, Artificial Sequence
  Synthetic polypeptide
MCERAARLCRAGAHRLLREPPQQGRALGGLLRWVGARMGEPRESLAPAAPADPGPASPRGGTAVILDIFRRADKNDDGKLSLEEFQLFFADGVLNEKELEDLFHTIDSDNTNHVDTKELCDYFVDHMGDYEDVLASLETLNHSVLKAMGYTKKPQFFHL

SEQ ID NO: 11178 - protein, 76 aa, Artificial Sequence
  Synthetic polypeptide
MMMGSCPWRNSSSSLQMASLMRKNWRISFTRLTLTTPNYFVDHMGDYEDVLASLETLNHSVLKAMGYTKKPQFFHL

SEQ ID NO: 11179 - protein, 50 aa, Artificial Sequence
  Synthetic polypeptide
NTNHVDTKELCDYFVDHMGDYEDVLASLETLNHSVLKAMGYTKKPQFFHL

SEQ ID NO: 11180 - protein, 1244 aa, Artificial Sequence
  Synthetic polypeptide
MVEGRVSEFLKKLGFSGGGRQYQALEKDEEEALIDEQSELKAIEKEKKVTALPPKEACKCQKEDLARAFCVDLHTGLSEFSVTQRRLAHGWNEFVADNSEPVWKKYLDQFKNPLILLLLGSALVSVLTKEYEDAVSIATAVLVVVTVAFIQEYRSEKSLEELTKMVPPECNCLREGKLQHLLARELVPGDVVSLSIGDRIPADIRLTEVTDLLVDESSFTGEAEPCSKTDSPLTGGGDLTTLSNIVFMGTLVQYGRGQGVVIGTGESSQFGEVFKMMQAEETPKTPLQKSMDRLGKQLTLFSFGIIGLIMLIGWSQGKQLLSMFTIGVSLAVAAIPEGLPIVVMVTLVLGVLRMAKKRVIVKKLPIVETLGCCSVLCSDKTGTLTANEMTVTQLVTSDGLRAEVSGVGYDGQGTVCLLPSKEVIKEFSNVSVGKLVEAGCVANNAVIRKNAVMGQPTEGALMALAMKMDLSDIKNSYIRKKEIPFSSEQKWMAVKCSLKTEDQEDIYFMKGALEEVIRYCTMYNNGGIPLPLTPQQRSFCLQEEKRMGSLGLRVLALASGPELGRLTFLGLVGIIDPPRVGVKEAVQVLSESGVSVKMITGDALETALAIGRNIGLCNGKLQAMSGEEVDSVEKGELADRVGKVSVFFRTSPKHKLKIIKALQESGAIVAMTGDGVNDAVALKSADIGIAMGQTGTDVSKEAANMILVDDDFSAIIQTESQIMSELPFTIASKRIKYLGIQLTRDVKDLFKENYKPLLKEIKEDTNKWKNIPCSWVGRINIVKMAILPKVIYRFNAIPIKLPMTFFTELEKTTLKFIWKQKRARIAKSILSQKNKAGGITLPDFKLYYKATVTKTAWYWYQNRDIDQWNRTEPSEIMPHIYNYLIFDKPEKNKQWGKDSLFNKWCWENWLAICRKLKLDPFLTPYTKINSRWIKDLNVRPKTIKTLEENLGITIQDIGMGKDFMSKTPKAMATKAKIDKWDLIKLKSFCTAKETTIRVNRQPTTWEKIFTTYSSDKGLISRIYNELKQIYKKKTNNPIKKWAKDMNRHFSKEDIYAAKKHMKKCSSSLAIREMQIKTTMRYHLTPVRMAIIKKSGNNRCWRGCGEIGTLLHCWWDCKLVQPLWKSVWRFLRDLELEIPFDPAIPLLGIYPKDYKSCCYKDTCTRMFIAALFTIAKTWNQPKCPTMIDWIKKMWHIYTMEYYAAIKNDEFMSFVGTWMKLETIILSKLLQEQKTKHHIFSLIGGN

SEQ ID NO: 11181 - protein, 750 aa, Artificial Sequence
  Synthetic polypeptide
MVEGRVSEFLKKLGFSGGGRQYQALEKDEEEALIDEQSELKAIEKEKKVTALPPKEACKCQKEDLARAFCVDLHTGLSEFSVTQRRLAHGWNEFVADNSEPVWKKYLDQFKNPLILLLLGSALVSVLTKEYEDAVSIATAVLVVVTVAFIQEYRSEKSLEELTKMVPPECNCLREGKLQHLLARELVPGDVVSLSIGDRIPADIRLTEVTDLLVDESSFTGEAEPCSKTDSPLTGGGDLTTLSNIVFMGTLVQYGRGQGVVIGTGESSQFGEVFKMMQAEETPKTPLQKSMDRLGKQLTLFSFGIIGLIMLIGWSQGKQLLSMFTIGVSLAVAAIPEGLPIVVMVTLVLGVLRMAKKRVIVKKLPIVETLGCCSVLCSDKTGTLTANEMTVTQLVTSDGLRAEVSGVGYDGQGTVCLLPSKEVIKEFSNVSVGKLVEAGCVANNAVIRKNAVMGQPTEGALMALAMKMDLSDIKNSYIRKKEIPFSSEQKWMAVKCSLKTEDQEDIYFMKGALEEVIRYCTMYNNGGIPLPLTPQQRSFCLQEEKRMGSLGLRVLALASGPELGRLTFLGLVGIIDPPRVGVKEAVQVLSESGVSVKMITGDALETALAIGRNIGLCNGKLQAMSGEEVDSVEKGELADRVGKVSVFFRTSPKHKLKIIKALQESGAIVAMTGDGVNDAVALKSADIGIAMGQTGTDVSKEAANMILVDDDFSAIIIGKNYFKVHMEAKKSPHRQVNPKPKEQSWRHHTT

SEQ ID NO: 11182 - protein, 506 aa, Artificial Sequence
  Synthetic polypeptide
MAGAGPKRRALAAPAAEEKEEAREKMLAAKSADGSAPAGEGEGVTLQRNITLLNGVAIIVGTIIGSGIFVTPTGVLKEAGSPGLALVVWAACGVFSIVGALCYAELGTTISKSGGDYAYMLEVYGSLPAFLKLWIELLIIRPSSQYIVALVFATYLLKPLFPTCPVPEEAAKLVACLCVLLLTAVNCYSVKAATRVQDAFAAAKLLALALIILLGFVQIGKGDVSNLDPNFSFEGTKLDVGNIVLALYSGLFAYGGWNYLNFVTEEMINPYRNLPLAIIISLPIVTLVYVLTNLAYFTTLSTEQMLSSEAVAVDFGNYHLGVMSWIIPVFVGLSCFGSVNGSLFTSSRLFFVGSREGHLPSILSMIHPQLLTPVPSLVFTCVMTLLYAFSKDIFSVINFFSFFNWLCVALAIIGMIWLRHRKPELERPIKVNLALPVFFILACLFLIAVSFWKTPVECGIGFTIILSGLPVYFFGVWWKNKPKWLLQGIYQLGVVAHTCNPSYSGG

SEQ ID NO: 11183 - protein, 240 aa, Artificial Sequence
  Synthetic polypeptide
MINPYRNLPLAIIISLPIVTLVYVLTNLAYFTTLSTEQMLSSEAVAVDFGNYHLGVMSWIIPVFVGLSCFGSVNGSLFTSSRLFFVGSREGHLPSILSMIHPQLLTPVPSLVFTCVMTLLYAFSKDIFSVINFFSFFNWLCVALAIIGMIWLRHRKPELERPIKVNLALPVFFILACLFLIAVSFWKTPVECGIGFTIILSGLPVYFFGVWWKNKPKWLLQGIYQLGVVAHTCNPSYSGG

SEQ ID NO: 11184 - protein, 61 aa, Artificial Sequence
  Synthetic polypeptide
MGQIEWAMWANEQALASGLNLLSVPQGLGTSCCFCRASWLSHLFLNSNATCLGRSFQTVQP

SEQ ID NO: 11185 - protein, 1895 aa, Artificial Sequence
  Synthetic polypeptide
MEPHVLGAVLYWLLLPCALLAACLLRFSGLSLVYLLFLLLLPWFPGPTRCGLQGHTGRLLRALLGLSLLFLVAHLALQICLHIVPRLDQLLGPSCSRWETLSRHIGVTRLDLKDIPNAIRLVAPDLGILVVSSVCLGICGRLARNTRQSPHPRELDDDERDVDASPTAGLQEAATLAPTRRSRLAARFRVTAHWLLVAAGRVLAVTLLALAGIAHPSALSSVYLLLFLALCTWWACHFPISTRGFSRLCVAVGCFGAGHLICLYCYQMPLAQALLPPAGIWARVLGLKDFVGPTNCSSPHALVLNTGLDWPVYASPGVLLLLCYATASLRKLRAYRPSGQRKEAAKGYEARELELAELDQWPQERESDQHVVPTAPDTEADNCIVHELTGQSSVLRRPVRPKRAEPREASPLHSLGHLIMDQSYVCALIAMMVWSITYHSWLTFVLLLWACLIWTVRSRHQLAMLCSPCILLYGMTLCCLRYVWAMDLRPELPTTLGPVSLRQLGLEHTRYPCLDLGAMLLYTLTFWLLLRQFVKEKLLKWAESPAALTEVTVADTEPTRTQTLLQSLGELVKGVYAKYWIYVCAGMFIVVSFAGRLVVYKIVYMFLFLLCLTLFQVYYSLWRKLLKAFWWLVVAYTMLVLIAVYTFQFQDFPAYWRNLTGFTDEQLGDLGLEQFSVSELFSSILVPGFFLLACILQLHYFHRPFMQLTDMEHVSLPGTRLPRWAHRQDAVSGTPLLREEQQEHQQQQQEEEEEEEDSRDEGLGVATPHQATQVPEGAAKWGLVAERLLELAAGFSDVLSRVQVFLRRLLELHVFKLVALYTVWVALKEVSVMNLLLVVLWAFALPYPRFRPMASCLSTVWTCVIIVCKMLYQLKVVNPQEYSSNCTEPFPNSTNLLPTEISQSLLYRGPVDPANWFGVRKGFPNLGYIQNHLQVLLLLVFEAIVYRRQEHYRRQHQLAPLPAQAVFASGTRQQLDQDLLGCLKYFINFFFYKFGLEICFLMAVNVIGQRMNFLVTLHGCWLVAILTRRHRQAIARLWPNYCLFLALFLLYQYLLCLGMPPALCIDYPWRWSRAVPMNSALIKWLYLPDFFRAPNSTNLISDFLLLLCASQQWQVFSAERTEEWQRMAGVNTDRLEPLRGEPNPVPNFIHCRSYLDMLKVAVFRYLFWLVLVVVFVTGATRISIFGLGYLLACFYLLLFGTALLQRDTRARLVLWDCLILYNVTVIISKNMLSLLACVFVEQMQTGFCWVIQLFSLVCTVKGYYDPKEMMDRDQDCLLPVEEAGIIWDSVCFFFLLLQRRVFLSHYYLHVRADLQATALLASRGFALYNAANLKSIDFHRRIEEKSLAQLKRQMERIRAKQEKHRQGRVDRSRPQDTLGPKDPGLEPGPDSPGGSSPPRRQWWRPWLDHATVIHSGDYFLFESDSEEEEEAVPEDPRPSAQSAFQLAYQAWVTNAQAVLRRRQQEQEQARQEQAGQLPTGGGPSQEVEPAEGPEEAAAGRSHVVQRVLSTAQFLWMLGQALVDELTRWLQEFTRHHGTMSDVLRAERYLLTQELLQGGEVHRGVLDQLYTSQAEATLPGPTEAPNAPSTVSSGLGAEEPLSSMTDDMGSPLSTGYHTRSGSEEAVTDPGEREAGASLYQGLMRTASELLLDRRLRIPELEEAELFAEGQGRALRLLRAVYQCVAAHSELLCYFIIILNHMVTASAGSLVLPVLVFLWAMLSIPRPSKRFWMTAIVFTEIAVVVKYLFQFGFFPWNSHVVLRRYENKPYFPPRILGLEKTDGYIKYDLVQLMALFFHRSQLLCYGLWDHEEDSPSKEHDKSGEEEQGAEEGPGVPAATTEDHIQVEARVGPTDGTPEPQVELRPRDTRRISLRFRRRKKEGPARKGAAAIGRMPAS

SEQ ID NO: 11186 - protein, 222 aa, Artificial Sequence
  Synthetic polypeptide
MSAGSERGAAATPGGLPAPCASKVELRLSCRHLLDRDPLTKSDPSVALLQQAQGQWVQVGRTEVVRSSLHPVFSKVFTVDYYFEEVQRLRFEVYDTHGPSGFSCQEDDFLGGMECTLGQPAQKWLLQVVMRVSVDVLGPAGHCAKHFLCCTESSHLARTGPSFLLRKEISQAWWCVPVVPATGEAEAGESLEPGRQRFQRAEIAPLHTSPGDSESLSQKKKK

SEQ ID NO: 11187 - protein, 31 aa, Artificial Sequence
  Synthetic polypeptide
DSWAWWQMPVIPATQEAEAGESLEPGRRRLQ

SEQ ID NO: 11188 - protein, 103 aa, Artificial Sequence
  Synthetic polypeptide
FHRVYSFLDYIMGGCQIHFTTKRERGETGVAIDFTASNGDPRNSCSLHYINPYQPNEYLKALVSVGEICQDYDSWAWWQMPVIPATQEAEAGESLEPGRRRLQ

SEQ ID NO: 11189 - protein, 383 aa, Artificial Sequence
  Synthetic polypeptide
MSAGSERGAAATPGGLPAPCASKVELRLSCRHLLDRDPLTKSDPSVALLQQAQGQWVQVGRTEVVRSSLHPVFSKVFTVDYYFEEVQRLRFEVYDTHGPSGFSCQEDDFLGGMECTLGQIVAQKKVTRPLLLKFGRNAGKSTITVIAEDISGNNGYVELSFRARKLDDKDLFSKSDPFLELYRVNDDQGLQLVYRTEVVKNNLNPVWEAFKVSLSSLCSCEETRPLKCLVWDYDSRGKHDFIGEFSTTFEEMQKAFEEGQAQWDCVNPKYKQKRRSYKNSGVVVLADLKFHRVYSFLDYIMGGCQIHFTVAIDFTASNGDPRNSCSLHYINPYQPNEYLKALVSVGEICQDYDSWAWWQMPVIPATQEAEAGESLEPGRRRLQ

SEQ ID NO: 11190 - protein, 458 aa, Artificial Sequence
  Synthetic polypeptide
MSAGSERGAAATPGGLPAPCASKVELRLSCRHLLDRDPLTKSDPSVALLQQAQGQWVQVGRTEVVRSSLHPVFSKVFTVDYYFEEVQRLRFEVYDTHGPSGFSCQEDDFLGGMECTLGQPAQKWLLQVVMRVSVDVLGPAGHCAKHFLCCTESSHLARTGPSFLLRYDDLCLPWATAGAVRWWTCRGGHTQGWQIVAQKKVTRPLLLKFGRNAGKSTITVIAEDISGNNGYVELSFRARKLDDKDLFSKSDPFLELYRVNDDQGLQLVYRTEVVKNNLNPVWEAFKVSLSSLCSCEETRPLKCLVWDYDSRGKHDFIGEFSTTFEEMQKAFEEGQAQWDCVNPKYKQKRRSYKNSGVVVLADLKFHRVYSFLDYIMGGCQIHFTVAIDFTASNGDPRNSCSLHYINPYQPNEYLKALVSVGEICQDYDSWAWWQMPVIPATQEAEAGESLEPGRRRLQ

SEQ ID NO: 11191 - protein, 312 aa, Artificial Sequence
  Synthetic polypeptide
MWSGWWLWPLVAVCTADFFRDEAERIMRDSPVIDGHNDLPWQLLDMFNNRLQDERANLTTLAGTHTNIPKLRAGFVGGQFWSVYTPCDTQNKDAVRRTLEQMDVVHRMCRMYPETFLYVTSSAGIRQAFREGKVASLIGVEGGHSIDSSLGVLRALYQLGMRYLTLTHSCNTPWADNWLVDTGDSEPQSQGLSPFGQRVVKELNRLGVLIDLAHVSVATMKATLQLSRAPVIFSHSSAYSVCASRRNVPDDVLRLVKQTDSLVMVNFYNNYISCTNKANLSQVAVEKPGDATAPSGEGHKVTSTETQGHHAP

SEQ ID NO: 11192 - protein, 631 aa, Artificial Sequence
  Synthetic polypeptide
MARAGSCGGAAAGAGRPEPWELSLEEVLKAYEQPLNEEQAWAVCFQGCRGLRGSPGRRLRDTGDLLLRGDGSVGAREPEAAEPATMVVPLASSEAQTVQSLGFAIYRALDWGLDESEERELSPQLERLIDLMANNDSEDSGCGAADEGYGGPEEEEEAEGVPRSVRTFAQAMRLCAARLTDPRGAQAHYQAVCRALFVETLELRAFLARVREAKEMLQKLREDEPHLETPRAELDSLGHTDWARLWVQLMRELRRGVKLKKVQEQEFNPLPTEFQLTPFEMLMQDIRARNYKLRKVMVDGDIPPRVKKDAHELILDFIRSRPPLKQVSERRLRPLPPKQRSLHEKILEEIKQERRLRPVRGEGWAARGFGSLPCILNACSGDAKSTSCINLSVTDAGGSAQRPRPRVLLKAPTLAEMEEMNTSEEEESPCGEVTLKRDRSFSEHDLAQLRSEVASGLQSATHPPGGTEPPRPRAGSAHVWRPGSRDQGTCPASVSDPSHPLLSNRGSSGDRPEASMTPDAKHLWLEFSHPVESLALTVEEVMDVRRVLVKAEMEKFLQNKELFSSLKKGKICCCCRAKFPLFSWPPSCLFCKSQEQTGCETMVFKTAGNKKETQRGKPAITTVIAWRVSRS

SEQ ID NO: 11193 - protein, 617 aa, Artificial Sequence
  Synthetic polypeptide
MARAGSCGGAAAGAGRPEPWELSLEEVLKAYEQPLNEEQAWAVCFQGCRGLRGSPGRRLRDTGDLLLRGDGSVGAREPEAAEPATMVVPLASSEAQTVQSLGFAIYRALDWGLDESEERELSPQLERLIDLMANNDSEDSGCGAADEGYGGPEEEEEAEGVPRSVRTFAQAMRLCAARLTDPRGAQAHYQAVCRALFVETLELRAFLARVREAKEMLQKLREDEPHLETPRAELDSLGHTDWARLWVQLMRELRRGVKLKKVQEQEFNPLPTEFQLTPFEMLMQDIRARNYKLRKVMVDGDIPPRVKKDAHELILDFIRSRPPLKQVSERRLRPLPPKQRSLHEKILEEIKQERRLRPVRGEGWAARGFGSLPCILNACSGDAKSTSCINLSVTDAGGSAQRPRPRVLLKAPTLAEMEEMNTSEEEESPCGEVTLKRDRSFSEHDLAQLRSEVASGLQSATHPPGGTEPPRPRAGSAHVWRPGSRDQGTCPASVSDPSHPLLSNRGSSGDRPEASMTPDAKHLWLEFSHPVESLALTVEEVMDVRRVLVKAEMEKFLQNKELFSSLKKGKICCCCRAKFPLFSWPPSCLFCKRAVCTSCSIKPGAVAHACSSCTLGG

SEQ ID NO: 11194 - protein, 1039 aa, Artificial Sequence
  Synthetic polypeptide
MALGSDGVRVTMESALTARDRVGVQDFVLLENFTSEAAFIENLRRRFRENLIYTYIGPVLVSVNPYRDLQIYSRQHMERYRGVSFYEVPPHLFAVADTVYRALRTERRDQAVMISGESGAGKTEATKRLLQFYAETCPAPERGGAVRDRLLQSNPVLEAFGNAKTLRNDNSSRFGKYMDVQFDFKGAPVGGHILSYLLEKSRVVHQNHGERNFHIFYQLLEGGEEETLRRLGLERNPQSYLYLVKGQCAKVSSINDKSDWKVVRKALTVIDFTEDEVEDLLSIVASVLHLGNIHFAANEESNAQVTTENQLKYLTRLLSVEGSTLREALTHRKIIAKGEELLSPLNLEQAAYARDALAKAVYSRTFTWLVGKINRSLASKDVESPSWRSTTVLGLLDIYGFEVFQHNSFEQFCINYCNEKLQQLFIELTLKSEQEEYEAEGIAWEPVQYFNNKIICDLVEEKFKGIISILDEECLRPGEATDLTFLEKLEDTVKHHPHFLTHKLADQRTRKSLGRGEFRLLHYAGEVTYSVTGFLDKNNDLLFRNLKETMCSSKNPIMSQCFDRSELSDKKRPETVATQFKMSLLQLVEILQSKEPAYVRCIKPNDAKQPGRFDEVLIRHQVKYLGLLENLRVRRAGFAYRRKYEAFLQRYKSLCPETWPTWAGRPQDGVAVLVRHLGYKPEEYKMGRTKIFIRFPKTLFATEDALEVRRQSLATKIQAAWRGFHWRQKFLRVKRSAICIQSWWRGTLGRRKAAKRKWAAQTIRRLIRGFVLRHAPRCPENAFFLDHVRTSFLLNLRRQLPQNVLDTSWPTPPPALREASELLRELCIKNMVWKYCRSISPEWKQQLQQKAVASEIFKGKKDNYPQSVPRLFISTRLGTDEISPRVLQALGSEPIQYAVPVVKYDRKGYKPRSRQLLLTPNAVVIVEDAKVKQRIDYANLTGISVSSLSDSLFVLHVQRADNKQKGDVVLQSDHVIETLTKTALSANRVNSININQGSITFAGGPGRDGTIDFTPGSELLITKAKNGHLAVGSRGGRTA

SEQ ID NO: 11195 - protein, 1063 aa, Artificial Sequence
  Synthetic polypeptide
MALQVELVPTGEIIRVVHPHRPCKLALGSDGVRVTMESALTARDRVGVQDFVLLENFTSEAAFIENLRRRFRENLIYTYIGPVLVSVNPYRDLQIYSRQHMERYRGVSFYEVPPHLFAVADTVYRALRTERRDQAVMISGESGAGKTEATKRLLQFYAETCPAPERGGAVRDRLLQSNPVLEAFGNAKTLRNDNSSRFGKYMDVQFDFKGAPVGGHILSYLLEKSRVVHQNHGERNFHIFYQLLEGGEEETLRRLGLERNPQSYLYLVKGQCAKVSSINDKSDWKVVRKALTVIDFTEDEVEDLLSIVASVLHLGNIHFAANEESNAQVTTENQLKYLTRLLSVEGSTLREALTHRKIIAKGEELLSPLNLEQAAYARDALAKAVYSRTFTWLVGKINRSLASKDVESPSWRSTTVLGLLDIYGFEVFQHNSFEQFCINYCNEKLQQLFIELTLKSEQEEYEAEGIAWEPVQYFNNKIICDLVEEKFKGIISILDEECLRPGEATDLTFLEKLEDTVKHHPHFLTHKLADQRTRKSLGRGEFRLLHYAGEVTYSVTGFLDKNNDLLFRNLKETMCSSKNPIMSQCFDRSELSDKKRPETVATQFKMSLLQLVEILQSKEPAYVRCIKPNDAKQPGRFDEVLIRHQVKYLGLLENLRVRRAGFAYRRKYEAFLQRYKSLCPETWPTWAGRPQDGVAVLVRHLGYKPEEYKMGRTKIFIRFPKTLFATEDALEVRRQSLATKIQAAWRGFHWRQKFLRVKRSAICIQSWWRGTLGRRKAAKRKWAAQTIRRLIRGFVLRHAPRCPENAFFLDHVRTSFLLNLRRQLPQNVLDTSWPTPPPALREASELLRELCIKNMVWKYCRSISPEWKQQLQQKAVASEIFKGKKDNYPQSVPRLFISTRLGTDEISPRVLQALGSEPIQYAVPVVKYDRKGYKPRSRQLLLTPNAVVIVEDAKVKQRIDYANLTGISVSSLSDSLFVLHVQRADNKQKGDVVLQSDHVIETLTKTALSANRVNSININQGSITFAGGPGRDGTIDFTPGSELLITKAKNGHLAVGSRGGRTA

SEQ ID NO: 11196 - protein, 1028 aa, Artificial Sequence
  Synthetic polypeptide
MESALTARDRVGVQDFVLLENFTSEAAFIENLRRRFRENLIYTYIGPVLVSVNPYRDLQIYSRQHMERYRGVSFYEVPPHLFAVADTVYRALRTERRDQAVMISGESGAGKTEATKRLLQFYAETCPAPERGGAVRDRLLQSNPVLEAFGNAKTLRNDNSSRFGKYMDVQFDFKGAPVGGHILSYLLEKSRVVHQNHGERNFHIFYQLLEGGEEETLRRLGLERNPQSYLYLVKGQCAKVSSINDKSDWKVVRKALTVIDFTEDEVEDLLSIVASVLHLGNIHFAANEESNAQVTTENQLKYLTRLLSVEGSTLREALTHRKIIAKGEELLSPLNLEQAAYARDALAKAVYSRTFTWLVGKINRSLASKDVESPSWRSTTVLGLLDIYGFEVFQHNSFEQFCINYCNEKLQQLFIELTLKSEQEEYEAEGIAWEPVQYFNNKIICDLVEEKFKGIISILDEECLRPGEATDLTFLEKLEDTVKHHPHFLTHKLADQRTRKSLGRGEFRLLHYAGEVTYSVTGFLDKNNDLLFRNLKETMCSSKNPIMSQCFDRSELSDKKRPETVATQFKMSLLQLVEILQSKEPAYVRCIKPNDAKQPGRFDEVLIRHQVKYLGLLENLRVRRAGFAYRRKYEAFLQRYKSLCPETWPTWAGRPQDGVAVLVRHLGYKPEEYKMGRTKIFIRFPKTLFATEDALEVRRQSLATKIQAAWRGFHWRQKFLRVKRSAICIQSWWRGTLGRRKAAKRKWAAQTIRRLIRGFVLRHAPRCPENAFFLDHVRTSFLLNLRRQLPQNVLDTSWPTPPPALREASELLRELCIKNMVWKYCRSISPEWKQQLQQKAVASEIFKGKKDNYPQSVPRLFISTRLGTDEISPRVLQALGSEPIQYAVPVVKYDRKGYKPRSRQLLLTPNAVVIVEDAKVKQRIDYANLTGISVSSLSDSLFVLHVQRADNKQKGDVVLQSDHVIETLTKTALSANRVNSININQGSITFAGGPGRDGTIDFTPGSELLITKAKNGHLAVGSRGGRTA

SEQ ID NO: 11197 - protein, 1044 aa, Artificial Sequence
  Synthetic polypeptide
MRYRASALGSDGVRVTMESALTARDRVGVQDFVLLENFTSEAAFIENLRRRFRENLIYTYIGPVLVSVNPYRDLQIYSRQHMERYRGVSFYEVPPHLFAVADTVYRALRTERRDQAVMISGESGAGKTEATKRLLQFYAETCPAPERGGAVRDRLLQSNPVLEAFGNAKTLRNDNSSRFGKYMDVQFDFKGAPVGGHILSYLLEKSRVVHQNHGERNFHIFYQLLEGGEEETLRRLGLERNPQSYLYLVKGQCAKVSSINDKSDWKVVRKALTVIDFTEDEVEDLLSIVASVLHLGNIHFAANEESNAQVTTENQLKYLTRLLSVEGSTLREALTHRKIIAKGEELLSPLNLEQAAYARDALAKAVYSRTFTWLVGKINRSLASKDVESPSWRSTTVLGLLDIYGFEVFQHNSFEQFCINYCNEKLQQLFIELTLKSEQEEYEAEGIAWEPVQYFNNKIICDLVEEKFKGIISILDEECLRPGEATDLTFLEKLEDTVKHHPHFLTHKLADQRTRKSLGRGEFRLLHYAGEVTYSVTGFLDKNNDLLFRNLKETMCSSKNPIMSQCFDRSELSDKKRPETVATQFKMSLLQLVEILQSKEPAYVRCIKPNDAKQPGRFDEVLIRHQVKYLGLLENLRVRRAGFAYRRKYEAFLQRYKSLCPETWPTWAGRPQDGVAVLVRHLGYKPEEYKMGRTKIFIRFPKTLFATEDALEVRRQSLATKIQAAWRGFHWRQKFLRVKRSAICIQSWWRGTLGRRKAAKRKWAAQTIRRLIRGFVLRHAPRCPENAFFLDHVRTSFLLNLRRQLPQNVLDTSWPTPPPALREASELLRELCIKNMVWKYCRSISPEWKQQLQQKAVASEIFKGKKDNYPQSVPRLFISTRLGTDEISPRVLQALGSEPIQYAVPVVKYDRKGYKPRSRQLLLTPNAVVIVEDAKVKQRIDYANLTGISVSSLSDSLFVLHVQRADNKQKGDVVLQSDHVIETLTKTALSANRVNSININQGSITFAGGPGRDGTIDFTPGSELLITKAKNGHLAVGSRGGRTA

SEQ ID NO: 11198 - protein, 613 aa, Artificial Sequence
  Synthetic polypeptide
MALGSDGVRVTMESALTARDRVGVQDFVLLENFTSEAAFIENLRRRFRENLIYTYIGPVLVSVNPYRDLQIYSRQHMERYRGVSFYEVPPHLFAVADTVYRALRTERRDQAVMISGESGAGKTEATKRLLQFYAETCPAPERGGAVRDRLLQSNPVLEAFGNAKTLRNDNSSRFGKYMDVQFDFKGAPVGGHILSYLLEKSRVVHQNHGERNFHIFYQLLEGGEEETLRRLGLERNPQSYLYLVKGQCAKVSSINDKSDWKVVRKALTVIDFTEDEVEDLLSIVASVLHLGNIHFAANEESNAQVTTENQLKYLTRLLSVEGSTLREALTHRKIIAKGEELLSPLNLEQAAYARDALAKAVYSRTFTWLVGKINRSLASKDVESPSWRSTTVLGLLDIYGFEVFQHNSFEQFCINYCNEKLQQLFIELTLKSEQEEYEAEGIAWEPVQYFNNKIICDLVEEKFKGIISILDEECLRPGEATDLTFLEKLEDTVKHHPHFLTHKLADQRTRKSLGRGEFRLLHYAGEVTYSVTGFLDKNNDLLFRNLKETMCSSKNPIMSQCFDRSELSDKKRPETLSRASFPEDVTWCPLTLRLDELSLCGALRTHRHTPATL

SEQ ID NO: 11199 - protein, 637 aa, Artificial Sequence
  Synthetic polypeptide
MALQVELVPTGEIIRVVHPHRPCKLALGSDGVRVTMESALTARDRVGVQDFVLLENFTSEAAFIENLRRRFRENLIYTYIGPVLVSVNPYRDLQIYSRQHMERYRGVSFYEVPPHLFAVADTVYRALRTERRDQAVMISGESGAGKTEATKRLLQFYAETCPAPERGGAVRDRLLQSNPVLEAFGNAKTLRNDNSSRFGKYMDVQFDFKGAPVGGHILSYLLEKSRVVHQNHGERNFHIFYQLLEGGEEETLRRLGLERNPQSYLYLVKGQCAKVSSINDKSDWKVVRKALTVIDFTEDEVEDLLSIVASVLHLGNIHFAANEESNAQVTTENQLKYLTRLLSVEGSTLREALTHRKIIAKGEELLSPLNLEQAAYARDALAKAVYSRTFTWLVGKINRSLASKDVESPSWRSTTVLGLLDIYGFEVFQHNSFEQFCINYCNEKLQQLFIELTLKSEQEEYEAEGIAWEPVQYFNNKIICDLVEEKFKGIISILDEECLRPGEATDLTFLEKLEDTVKHHPHFLTHKLADQRTRKSLGRGEFRLLHYAGEVTYSVTGFLDKNNDLLFRNLKETMCSSKNPIMSQCFDRSELSDKKRPETLSRASFPEDVTWCPLTLRLDELSLCGALRTHRHTPATL

SEQ ID NO: 11200 - protein, 602 aa, Artificial Sequence
  Synthetic polypeptide
MESALTARDRVGVQDFVLLENFTSEAAFIENLRRRFRENLIYTYIGPVLVSVNPYRDLQIYSRQHMERYRGVSFYEVPPHLFAVADTVYRALRTERRDQAVMISGESGAGKTEATKRLLQFYAETCPAPERGGAVRDRLLQSNPVLEAFGNAKTLRNDNSSRFGKYMDVQFDFKGAPVGGHILSYLLEKSRVVHQNHGERNFHIFYQLLEGGEEETLRRLGLERNPQSYLYLVKGQCAKVSSINDKSDWKVVRKALTVIDFTEDEVEDLLSIVASVLHLGNIHFAANEESNAQVTTENQLKYLTRLLSVEGSTLREALTHRKIIAKGEELLSPLNLEQAAYARDALAKAVYSRTFTWLVGKINRSLASKDVESPSWRSTTVLGLLDIYGFEVFQHNSFEQFCINYCNEKLQQLFIELTLKSEQEEYEAEGIAWEPVQYFNNKIICDLVEEKFKGIISILDEECLRPGEATDLTFLEKLEDTVKHHPHFLTHKLADQRTRKSLGRGEFRLLHYAGEVTYSVTGFLDKNNDLLFRNLKETMCSSKNPIMSQCFDRSELSDKKRPETLSRASFPEDVTWCPLTLRLDELSLCGALRTHRHTPATL

SEQ ID NO: 11201 - protein, 618 aa, Artificial Sequence
  Synthetic polypeptide
MRYRASALGSDGVRVTMESALTARDRVGVQDFVLLENFTSEAAFIENLRRRFRENLIYTYIGPVLVSVNPYRDLQIYSRQHMERYRGVSFYEVPPHLFAVADTVYRALRTERRDQAVMISGESGAGKTEATKRLLQFYAETCPAPERGGAVRDRLLQSNPVLEAFGNAKTLRNDNSSRFGKYMDVQFDFKGAPVGGHILSYLLEKSRVVHQNHGERNFHIFYQLLEGGEEETLRRLGLERNPQSYLYLVKGQCAKVSSINDKSDWKVVRKALTVIDFTEDEVEDLLSIVASVLHLGNIHFAANEESNAQVTTENQLKYLTRLLSVEGSTLREALTHRKIIAKGEELLSPLNLEQAAYARDALAKAVYSRTFTWLVGKINRSLASKDVESPSWRSTTVLGLLDIYGFEVFQHNSFEQFCINYCNEKLQQLFIELTLKSEQEEYEAEGIAWEPVQYFNNKIICDLVEEKFKGIISILDEECLRPGEATDLTFLEKLEDTVKHHPHFLTHKLADQRTRKSLGRGEFRLLHYAGEVTYSVTGFLDKNNDLLFRNLKETMCSSKNPIMSQCFDRSELSDKKRPETLSRASFPEDVTWCPLTLRLDELSLCGALRTHRHTPATL

SEQ ID NO: 11202 - protein, 169 aa, Artificial Sequence; identical to SEQ ID NO: 947
  Synthetic polypeptide

SEQ ID NO: 11203 - protein, 137 aa, Artificial Sequence
  Synthetic polypeptide
MAPTGLLVAGASFLAFRGLHWGLRRLPTPESAARDRWQWWNLCVSLAHSLLSGTGALLGLSLYPQMAADPIHGHPRWALVLVAVSVGYFLADGADLLWNQTLGKTWDLLCHHLVSPSHAEPKLDCTAAISAHCNLPA

SEQ ID NO: 11204 - protein, 347 aa, Artificial Sequence
  Synthetic polypeptide
MDSLQDTVALDHGGCCPALSRLVPRGFGTEMWTLFALSGPLFLFQVLTFMIYIVSTVFCGHLGKVELASVTLAVAFVNVCGVSVGVGLSSACDTLMSQSFGSPNKKHVGVILQRGALVLLLCCLPCWALFLNTQHILLLFRQDPDVSRLTQDYVMIFIPGLPVIFLYNLLAKYLQNQGWLKGQEEESPFQTPGLSILHPSHSHLSRASFHLFQKITWPQVLSGVVGNCVNGVANYALVSVLNLGVRGSAYANIISQFAQTVFLLLYIVLKKLHLETWAGWSSQCLQDWGPFFSLAVPSMLMICVEWWAYEIGSFLMGLLSVVDLSAQAVIYEVATVTYMAGRSGSRV

SEQ ID NO: 11205 - protein, 311 aa, Artificial Sequence
  Synthetic polypeptide
MDSLQDTVALDHGGCCPALSRLVPRGFGTEMWTLFALSGPLFLFQVLTFMIYIVSTVFCGHLGKVELASVTLAVAFVNVCGVSVGVGLSSACDTLMSQSFGSPNKKHVGVILQRGALVLLLCCLPCWALFLNTQHILLLFRQDPDVSRLTQDYVMIFIPGLPVIFLYNLLAKYLQNQKITWPQVLSGVVGNCVNGVANYALVSVLNLGVRGSAYANIISQFAQTVFLLLYIVLKKLHLETWAGWSSQCLQDWGPFFSLAVPSMLMICVEWWAYEIGSFLMGLLSVVDLSAQAVIYEVATVTYMAGRSGSRV

SEQ ID NO: 11206 - protein, 136 aa, Artificial Sequence
  Synthetic polypeptide
MDRAALRAAAMGEKKEGGGGGDAAAAEGGAGAAASRALQQCGQLQKLIDISIGSLRGLRTKCAVSNDLTQQEIRTLEAKLVRYICKQRQCKLSVAPGERTPELNSYPRFSDWLYTFNVRPEVVQPTHLPASQLTNQ

SEQ ID NO: 11207 - protein, 32 aa, Artificial Sequence
  Synthetic polypeptide
MGNCHTVGPNEALVVSGIAMYGRLRLEDRLSP

SEQ ID NO: 11208 - protein, 968 aa, Artificial Sequence
  Synthetic polypeptide
MAEQESLEFGKADFVLMDTVSMPEFMANLRLRFEKGRIYTFIGEVVVSVNPYKLLNIYGRDTIEQYKGRELYERPPHLFAIADAAYKAMKRRSKDTCIVISGESGAGKTEASKYIMQYIAAITNPSQRAEVERVKNMLLKSNCVLEAFGNAKTNRNDNSSRFGKYMDINFDFKGDPIGGHINNYLLEKSRVIVQQPGERSFHSFYQLLQGGSEQMLRSLHLQKSLSSYNYIHVGAQLKSSINDAAEFRVVADAMKVIGFKPEEIQTVYKILAAILHLGNLKFVVDGDTPLIENGKVVSIIAELLSTKTDMVEKALLYRTVATGRDIIDKQHTEQEASYGRDAFAKAIYERLFCWIVTRINDIIEVKNYDTTIHGKNTVIGVLDIYGFEIFDNNSFEQFCINYCNEKLQQLFIQLVLKQEQEEYQREGIPWKHIDYFNNQIIVDLVEQQHKGIIAILDDACMNVGKVTDEMFLEALNSKLGKHAHFSSRKLCASDKILEFDRDFRIRHYAGDVVYSVIGFIDKNKDTLFQDFKRLMYNSSNPVLKNMWPEGKLSITEVTKRPLTAATLFKNSMIALVDNLASKEPYYVRCIKPNDKKSPQIFDDERCRHQVEYLGLLENVRVRRAGFAFRQTYEKFLHRYKMISEFTWPNHDLPSDKEAVKKLIERCGFQDDVAYGKTKIFIRTPRTLFTLEELRAQMLIRIVLFLQKVWRGTLARMRYKRTKAALTIIRYYRRYKVKSYIHEVARRFHGVKTMRDYGKHVKWPSPPKVLRRFEEALQTIFNRWRASQLIKSIPASDLPQVRAKVAAVEMLKGQRADLGLQRAWEGNYLASKPDTPQTSGTFVPVANELKRKDKYMNVLFSCHVRKVNRFSKVEDRAIFVTDRHLYKMDPTKQYKVMKTIPLYNLTGLSVSNGKDQLVVFHTKDNKDLIVCLFSKQPTHESRIGELVGVLVNHFKRLREVRKLQTKSGS

SEQ ID NO: 11209 - protein, 880 aa, Artificial Sequence
  Synthetic polypeptide
MKRRSKDTCIVISGESGAGKTEASKYIMQYIAAITNPSQRAEVERVKNMLLKSNCVLEAFGNAKTNRNDNSSRFGKYMDINFDFKGDPIGGHINNYLLEKSRVIVQQPGERSFHSFYQLLQGGSEQMLRSLHLQKSLSSYNYIHVGAQLKSSINDAAEFRVVADAMKVIGFKPEEIQTVYKILAAILHLGNLKFVVDGDTPLIENGKVVSIIAELLSTKTDMVEKALLYRTVATGRDIIDKQHTEQEASYGRDAFAKAIYERLFCWIVTRINDIIEVKNYDTTIHGKNTVIGVLDIYGFEIFDNNSFEQFCINYCNEKLQQLFIQLVLKQEQEEYQREGIPWKHIDYFNNQIIVDLVEQQHKGIIAILDDACMNVGKVTDEMFLEALNSKLGKHAHFSSRKLCASDKILEFDRDFRIRHYAGDVVYSVIGFIDKNKDTLFQDFKRLMYNSSNPVLKNMWPEGKLSITEVTKRPLTAATLFKNSMIALVDNLASKEPYYVRCIKPNDKKSPQIFDDERCRHQVEYLGLLENVRVRRAGFAFRQTYEKFLHRYKMISEFTWPNHDLPSDKEAVKKLIERCGFQDDVAYGKTKIFIRTPRTLFTLEELRAQMLIRIVLFLQKVWRGTLARMRYKRTKAALTIIRYYRRYKVKSYIHEVARRFHGVKTMRDYGKHVKWPSPPKVLRRFEEALQTIFNRWRASQLIKSIPASDLPQVRAKVAAVEMLKGQRADLGLQRAWEGNYLASKPDTPQTSGTFVPVANELKRKDKYMNVLFSCHVRKVNRFSKVEDRAIFVTDRHLYKMDPTKQYKVMKTIPLYNLTGLSVSNGKDQLVVFHTKDNKDLIVCLFSKQPTHESRIGELVGVLVNHFKRLREVRKLQTKSGS

SEQ ID NO: 11210 - protein, 992 aa, Artificial Sequence
  Synthetic polypeptide
MAEQESLEFGKADFVLMDTVSMPEFMANLRLRFEKGRIYTFIGEVVVSVNPYKLLNIYGRDTIEQYKGRELYERPPHLFAIADAAYKAMKRRSKDTCIVISGESGAGKTEASKYIMQYIAAITNPSQRAEVERVKNMLLKSNCVLEAFGNAKTNRNDNSSRFGKYMDINFDFKGDPIGGHINNYLLEKSRVIVQQPGERSFHSFYQLLQGGSEQMLRSLHLQKSLSSYNYIHVGAQLKSSINDAAEFRVVADAMKVIGFKPEEIQTVYKILAAILHLGNLKFVVDGDTPLIENGKVVSIIAELLSTKTDMVEKALLYRTVATGRDIIDKQHTEQEASYGRDAFAKAIYERLFCWIVTRINDIIEVKNYDTTIHGKNTVIGVLDIYGFEIFDNNSFEQFCINYCNEKLQQLFIQLVLKQEQEEYQREGIPWKHIDYFNNQIIVDLVEQQHKGIIAILDDACMNVGKVTDEMFLEALNSKLGKHAHFSSRKLCASDKILEFDRDFRIRHYAGDVVYSVIGFIDKNKDTLFQDFKRLMYNSSNPVLKNMWPEGKLSITEVTKRPLTAATLFKNSMIALVDNLASKEPYYVRCIKPNDKKSPQIFDDERCRHQVEYLGLLENVRVRRAGFAFRQTYEKFLHRYKMISEFTWPNHDLPSDKEAVKKLIERCGFQDDVAYGKTKIFIRTPRTLFTLEELRAQMLIRIVLFLQKVWRGTLARMRYKRTKAALTIIRYYRRYKVKSYIHEVARRFHGVKTMRDYGKHVKWPSPPKVLRRFEEALQTIFNRWRASQLIKSIPASDLPQVRAKVAAVEMLKGQRADLGLQRAWEGNYLASKPDTPQTSGTFVPVANELKRKDKYMNVLFSCHVRKVNRFSKVEDRAIFVTDRHLYKMDPTKQYKVMKTIPLYNLTGLSVSNGKDQLVVFHTKDNKDLIVCLFSKQPTHESRIGELVGVLVNHFKRLPYSLRYNKIEIRSVNNPTVAFKCSSEWESYTSLSLF

SEQ ID NO: 11211 - protein, 904 aa, Artificial Sequence
  Synthetic polypeptide
MKRRSKDTCIVISGESGAGKTEASKYIMQYIAAITNPSQRAEVERVKNMLLKSNCVLEAFGNAKTNRNDNSSRFGKYMDINFDFKGDPIGGHINNYLLEKSRVIVQQPGERSFHSFYQLLQGGSEQMLRSLHLQKSLSSYNYIHVGAQLKSSINDAAEFRVVADAMKVIGFKPEEIQTVYKILAAILHLGNLKFVVDGDTPLIENGKVVSIIAELLSTKTDMVEKALLYRTVATGRDIIDKQHTEQEASYGRDAFAKAIYERLFCWIVTRINDIIEVKNYDTTIHGKNTVIGVLDIYGFEIFDNNSFEQFCINYCNEKLQQLFIQLVLKQEQEEYQREGIPWKHIDYFNNQIIVDLVEQQHKGIIAILDDACMNVGKVTDEMFLEALNSKLGKHAHFSSRKLCASDKILEFDRDFRIRHYAGDVVYSVIGFIDKNKDTLFQDFKRLMYNSSNPVLKNMWPEGKLSITEVTKRPLTAATLFKNSMIALVDNLASKEPYYVRCIKPNDKKSPQIFDDERCRHQVEYLGLLENVRVRRAGFAFRQTYEKFLHRYKMISEFTWPNHDLPSDKEAVKKLIERCGFQDDVAYGKTKIFIRTPRTLFTLEELRAQMLIRIVLFLQKVWRGTLARMRYKRTKAALTIIRYYRRYKVKSYIHEVARRFHGVKTMRDYGKHVKWPSPPKVLRRFEEALQTIFNRWRASQLIKSIPASDLPQVRAKVAAVEMLKGQRADLGLQRAWEGNYLASKPDTPQTSGTFVPVANELKRKDKYMNVLFSCHVRKVNRFSKVEDRAIFVTDRHLYKMDPTKQYKVMKTIPLYNLTGLSVSNGKDQLVVFHTKDNKDLIVCLFSKQPTHESRIGELVGVLVNHFKRLPYSLRYNKIEIRSVNNPTVAFKCSSEWESYTSLSLF

SEQ ID NO: 11212 - protein, 667 aa, Artificial Sequence
  Synthetic polypeptide
MAEQESLEFGKADFVLMDTVSMPEFMANLRLRFEKGRIYTFIGEVVVSVNPYKLLNIYGRDTIEQYKGRELYERPPHLFAIADAAYKAMKRRSKDTCIVISGESGAGKTEASKYIMQYIAAITNPSQRAEVERVKNMLLKSNCVLEAFGNAKTNRNDNSSRFGKYMDINFDFKGDPIGGHINNYLLEKSRVIVQQPGERSFHSFYQLLQGGSEQMLRSLHLQKSLSSYNYIHVGAQLKSSINDAAEFRVVADAMKVIGFKPEEIQTVYKILAAILHLGNLKFVVDGDTPLIENGKVVSIIAELLSTKTDMVEKALLYRTVATGRDIIDKQHTEQEASYGRDAFAKAIYERLFCWIVTRINDIIEVKNYDTTIHGKNTVIGVLDIYGFEIFDNNSFEQFCINYCNEKLQQLFIQLVLKQEQEEYQREGIPWKHIDYFNNQIIVDLVEQQHKGIIAILDDACMNVGKVTDEMFLEALNSKLGKHAHFSSRKLCASDKILEFDRDFRIRHYAGDVVYSVIGFIDKNKDTLFQDFKRLMYNSSNPVLKNMWPEGKLSITEVTKRPLTAATLFKNSMIALVDNLASKEPYYVRCIKPNDKKSPQIFDDERCRHQVEYLGLLENVRVRRAGFAFRQTYEKFLHRMLKKNNYSSQEKKTNCLWGVRITLTSGSS

SEQ ID NO: 11213 - protein, 579 aa, Artificial Sequence
  Synthetic polypeptide
MKRRSKDTCIVISGESGAGKTEASKYIMQYIAAITNPSQRAEVERVKNMLLKSNCVLEAFGNAKTNRNDNSSRFGKYMDINFDFKGDPIGGHINNYLLEKSRVIVQQPGERSFHSFYQLLQGGSEQMLRSLHLQKSLSSYNYIHVGAQLKSSINDAAEFRVVADAMKVIGFKPEEIQTVYKILAAILHLGNLKFVVDGDTPLIENGKVVSIIAELLSTKTDMVEKALLYRTVATGRDIIDKQHTEQEASYGRDAFAKAIYERLFCWIVTRINDIIEVKNYDTTIHGKNTVIGVLDIYGFEIFDNNSFEQFCINYCNEKLQQLFIQLVLKQEQEEYQREGIPWKHIDYFNNQIIVDLVEQQHKGIIAILDDACMNVGKVTDEMFLEALNSKLGKHAHFSSRKLCASDKILEFDRDFRIRHYAGDVVYSVIGFIDKNKDTLFQDFKRLMYNSSNPVLKNMWPEGKLSITEVTKRPLTAATLFKNSMIALVDNLASKEPYYVRCIKPNDKKSPQIFDDERCRHQVEYLGLLENVRVRRAGFAFRQTYEKFLHRMLKKNNYSSQEKKTNCLWGVRITLTSGSS

SEQ ID NO: 11214 - protein, 403 aa, Artificial Sequence
  Synthetic polypeptide
MDLKESPSEGSLQPSSIQIFANTSTLHGIRHIFVYGPLTIRRVLWAVAFVGSLGLLLVESSERVSYYFSYQHVTKVDEVVAQSLVFPAVTLCNLNGFRFSRLTTNDLYHAGELLALLDVNLQIPDPHLADPSVLEALRQKANFKHYKPKQFSMLEFLHRVGHDLKDMMLYCKFKGQECGHQDFTTVFTKYGKCYMFNSGEDGKPLLTTVKGGTGNGLEIMLDIQQDEYLPIWGETEETTFEAGVKVQIHSQSEPPFIQELGFGVAPGFQTFVATQEQRLTYLPPPWGECRSSEMGLDFFPVYSITACRIDCETRYIVENCNCRMVHMPGDAPFCTPEQHKECAEPALGLLAEKDSNYCLCRTPCNLTRYNKELSMVKIPSKTSAKYLEKKFNKSEKYISTNAV

SEQ ID NO: 11215 - protein, 454 aa, Artificial Sequence
  Synthetic polypeptide
MSRIGGAGLPAAALTGPGRFRMAREEPAPAALAAAGQPGGGRGGERALQGPGVARRGRPSLSRAKLHGLRHMCAGRTAAGGSFQRRALWVLAFCTSFGLLLSWSSNRLLYWLSFPSHTRVHREWSRQLPFPAVTVCNNNPLRFPRLSKGDLYYAGHWLGLLLPNRTARPLVSELLRGDEPRRQWFRKLADFRLFLPPRHFEGISAAFMDRLGHQLEDMLLSCKYRGELCGPHNFSSVFTKYGKCYMFNSGEDGKPLLTTVKGGTGNGLEIMLDIQQDEYLPIWGETEETTFEAGVKVQIHSQSEPPFIQELGFGVAPGFQTFVATQEQRLTYLPPPWGECRSSEMGLDFFPVYSITACRIDCETRYIVENCNCRMVHMPGDAPFCTPEQHKECAEPALGLLAEKDSNYCLCRTPCNLTRYNKELSMVKIPSKTSAKYLEKKFNKSEKYISTNAV

SEQ ID NO: 11216 - protein, 242 aa, Artificial Sequence; identical to SEQ ID NO: 793
  Synthetic polypeptide

SEQ ID NO: 11217 - protein, 815 aa, Artificial Sequence
  Synthetic polypeptide
METLTPGHLQPSPSSPRPRAAPGSLGRVTRRRLSRWIALTRKVSWTPARPSQSALLSPSRGQETAPPVPGCCPRTLSPPAPRRPSGSMIAGVSLKPLLRITARIWRACCSSCRRARSTSQTTSSKVAPALGSGRAPALACPDPPLCLSDPETGKTCLLKAMLNLHDGQNTTIPLLLEIARQTDSLKELVNASYTDSYYKGQTALHIAIERRNMALVTLLVENGADVQAAAHGDFFKKTKGRPGFYFGELPLSLAACTNQLGIVKFLLQNSWQTADISARDSVGNTVLHALVEVADNTADNTKFVTSMYNEILMLGAKLHPTLKLEELTNKKGMTPLALAAGTGKIGVLAYILQREIQEPECRHLSRKFTEWAYGPVHSSLYDLSCIDTCEKNSVLEVIAYSSSETPNRHDMLLVEPLNRLLQDKWDRFVKRIFYFNFLVYCLYMIIFTMAAYYRPVDGLPPFKMEKTGDYFRVTGEILSVLGGVYFFFRGIQYFLQRRPSMKTLFVDSYSEMLFFLQSLFMLATVVLYFSHLKEYVASMVFSLALGWTNMLYYTRGFQQMGIYAVMIEKMILRDLCRFMFVYIVFLFGFSTAVVTLIEDGKNDSLPSESTSHRWRGPACRPPDSSYNSLYSTCLELFKFTIGMGDLEFTENYDFKAVFIILLLAYVILTYILLLNMLIALMGETVNKIAQESKNIWKLQRAITILDTEKSFLKCMRKAFRSGKLLQVGYTPDGKDDYRWCFRVDEVNWTTWNTNVGIINEDPGNCEGVKRTLSFSLRSSRAACLGLPKCKACSLCLAAHRLGCEEPLCLAAPSGK

SEQ ID NO: 11218 - protein, 757 aa, Artificial Sequence
  Synthetic polypeptide
MKKWSSTDLGAAADPLQKDTCPDPLDGDPNSRPPPAKPQLSTAKSRTRLFGKGDSEEAFPVDCPHEEGELDSCPTITVSPVITIQRPGDGPTGARLLSQDSVAASTEKTLRLYDRRSIFEAVAQNNCQDLESLLLFLQKSKKHLTDNEFKDPETGKTCLLKAMLNLHDGQNTTIPLLLEIARQTDSLKELVNASYTDSYYKGQTALHIAIERRNMALVTLLVENGADVQAAAHGDFFKKTKGRPGFYFGELPLSLAACTNQLGIVKFLLQNSWQTADISARDSVGNTVLHALVEVADNTADNTKFVTSMYNEILMLGAKLHPTLKLEELTNKKGMTPLALAAGTGKIGNRHDMLLVEPLNRLLQDKWDRFVKRIFYFNFLVYCLYMIIFTMAAYYRPVDGLPPFKMEKTGDYFRVTGEILSVLGGVYFFFRGIQYFLQRRPSMKTLFVDSYSEMLFFLQSLFMLATVVLYFSHLKEYVASMVFSLALGWTNMLYYTRGFQQMGIYAVMIEKMILRDLCRFMFVYIVFLFGFSTAVVTLIEDGKNDSLPSESTSHRWRGPACRPPDSSYNSLYSTCLELFKFTIGMGDLEFTENYDFKAVFIILLLAYVILTYILLLNMLIALMGETVNKIAQESKNIWKLQRAITILDTEKSFLKCMRKAFRSGKLLQVGYTPDGKDDYRWCFRVDEVNWTTWNTNVGIINEDPGNCEGVKRTLSFSLRSSRAACLGLPKCKACSLCLAAHRLGCEEPLCLAAPSGK

SEQ ID NO: 11219 - protein, 828 aa, Artificial Sequence
  Synthetic polypeptide
MKKWSSTDLGAAADPLQKDTCPDPLDGDPNSRPPPAKPQLSTAKSRTRLFGKGDSEEAFPVDCPHEEGELDSCPTITVSPVITIQRPGDGPTGARLLSQDSVAASTEKTLRLYDRRSIFEAVAQNNCQDLESLLLFLQKSKKHLTDNEFKDPETGKTCLLKAMLNLHDGQNTTIPLLLEIARQTDSLKELVNASYTDSYYKGQTALHIAIERRNMALVTLLVENGADVQAAAHGDFFKKTKGRPGFYFGELPLSLAACTNQLGIVKFLLQNSWQTADISARDSVGNTVLHALVEVADNTADNTKFVTSMYNEILMLGAKLHPTLKLEELTNKKGMTPLALAAGTGKIGVIENGPPLSFMVLAYILQREIQEPECRHLSRKFTEWAYGPVHSSLYDLSCIDTCEKNSVLEVIAYSSSETPNRHDMLLVEPLNRLLQDKWDRFVKRIFYFNFLVYCLYMIIFTMAAYYRPVDGLPPFKMEKTGDYFRVTGEILSVLGGVYFFFRGIQYFLQRRPSMKTLFVDSYSEMLFFLQSLFMLATVVLYFSHLKEYVASMVFSLALGWTNMLYYTRGFQQMGIYAVMIEKMILRDLCRFMFVYIVFLFGFSTAVVTLIEDGKNDSLPSESTSHRWRGPACRPPDSSYNSLYSTCLELFKFTIGMGDLEFTENYDFKAVFIILLLAYVILTYILLLNMLIALMGETVNKIAQESKNIWKLQRAITILDTEKSFLKCMRKAFRSGKLLQVGYTPDGKDDYRWCFRVDEVNWTTWNTNVGIINEDPGNCEGVKRTLSFSLRSSRAACLGLPKCKACSLCLAAHRLGCEEPLCLAAPSGK

SEQ ID NO: 11220 - protein, 807 aa, Artificial Sequence
  Synthetic polypeptide
MKKWSSTDLGAAADPLQKDTCPDPLDGDPNSRPPPAKPQLSTAKSRTRLFGKGDSEEAFPVDCPHEEGELDSCPTITVSPVITIQRPGDGPTGARLLSQDSVAASTEKTLRLYDRRSIFEAVAQNNCQDLESLLLFLQKSKKHLTDNEFKDPETGKTCLLKAMLNLHDGQNTTIPLLLEIARQTDSLKELVNASYTDSYYKGQTALHIAIERRNMALVTLLVENGADVQAAAHGDFFKKTKGRPGFYFGELPLSLAACTNQLGIVKFLLQNSWQTADISARDSVGNTVLHALVEVADNTADNTKFVTSMYNEILMLGAKLHPTLKLEELTNKKGMTPLALAAGTGKIGVLAYILQREIQEPECRHLSRKFTEWAYGPVHSSLYDLSCIDTCEKNSVLENRHDMLLVEPLNRLLQDKWDRFVKRIFYFNFLVYCLYMIIFTMAAYYRPVDGLPPFKMEKTGDYFRVTGEILSVLGGVYFFFRGIQYFLQRRPSMKTLFVDSYSEMLFFLQSLFMLATVVLYFSHLKEYVASMVFSLALGWTNMLYYTRGFQQMGIYAVMIEKMILRDLCRFMFVYIVFLFGFSTAVVTLIEDGKNDSLPSESTSHRWRGPACRPPDSSYNSLYSTCLELFKFTIGMGDLEFTENYDFKAVFIILLLAYVILTYILLLNMLIALMGETVNKIAQESKNIWKLQRAITILDTEKSFLKCMRKAFRSGKLLQVGYTPDGKDDYRWCFRVDEVNWTTWNTNVGIINEDPGNCEGVKRTLSFSLRSSRAACLGLPKCKACSLCLAAHRLGCEEPLCLAAPSGK

SEQ ID NO: 11221 - protein, 817 aa, Artificial Sequence
  Synthetic polypeptide
MKKWSSTDLGAAADPLQKDTCPDPLDGDPNSRPPPAKPQLSTAKSRTRLFGKGDSEEAFPVDCPHEEGELDSCPTITVSPVITIQRPGDGPTGARLLSQDSVAASTEKTLRLYDRRSIFEAVAQNNCQDLESLLLFLQKSKKHLTDNEFKDPETGKTCLLKAMLNLHDGQNTTIPLLLEIARQTDSLKELVNASYTDSYYKGQTALHIAIERRNMALVTLLVENGADVQAAAHGDFFKKTKGRPGFYFGELPLSLAACTNQLGIVKFLLQNSWQTADISARDSVGNTVLHALVEVADNTADNTKFVTSMYNEILMLGAKLHPTLKLEELTNKKGMTPLALAAGTGKIGVLAYILQREIQEPECRHLSRKFTEWAYGPVHSSLYDLSCIDTCEKNSVLEVIAYSSSETPNRHDMLLVEPLNRLLQDKWDRFVKRIFYFNFLVYCLYMIIFTMAAYYRPVDGLPPFKMEKTGDYFRVTGEILSVLGGVYFFFRGIQYFLQRRPSMKTLFVDSYSEMLFFLQSLFMLATVVLYFSHLKEYVASMVFSLALGWTNMLYYTRGFQQMGIYAVMIEKMILRDLCRFMFVYIVFLFGFSTAVVTLIEDGKNDSLPSESTSHRWRGPACRPPDSSYNSLYSTCLELFKFTIGMGDLEFTENYDFKAVFIILLLAYVILTYILLLNMLIALMGETVNKIAQESKNIWKLQRAITILDTEKSFLKCMRKAFRSGKLLQVGYTPDGKDDYRWCFRVDEVNWTTWNTNVGIINEDPGNCEGVKRTLSFSLRSSRAACLGLPKCKACSLCLAAHRLGCEEPLCLAAPSGK

SEQ ID NO: 11222 - protein, 40 aa, Artificial Sequence
  Synthetic polypeptide
MIRNWLTIFILFPLKLVEKCGMVAHTCSPSALEGQGRQIT

SEQ ID NO: 11223 - protein, 8 aa, Artificial Sequence
  Synthetic polypeptide
MWYGGSHL

SEQ ID NO: 11224 - protein, 107 aa, Artificial Sequence
  Synthetic polypeptide
MELAALCRWGLLLALLPPGAASTQDNYLSTDVGSCTLVCPLHNQEVTAEDGTQRCEKCSKPCARVCYGLGMEHLREVRAVTSANIQEFAGCKKIFGSLAFLPESFDG

SEQ ID NO: 11225 - protein, 383 aa, Artificial Sequence
  Synthetic polypeptide
MELAALCRWGLLLALLPPGAASTQVCTGTDMKLRLPASPETHLDMLRHLYQGCQVVQGNLELTYLPTNASLSFLQDIQEVQGYVLIAHNQVRQVPLQRLRIVRGTQLFEDNYALAVLDNGDPLNNTTPVTGASPGGLRELQLRSLTEILKGGVLIQRNPQLCYQDTILWKDIFHKNNQLALTLIDTNRSRACHPCSPMCKGSRCWGESSEDCQSLTRTVCAGGCARCKGPLPTDCCHEQCAAGCTGPKHSDCLACLHFNHSGICELHCPALVTYNTDTFESMPNPEGRYTFGASCVTACPYNYLSTDVGSCTLVCPLHNQEVTAEDGTQRCEKCSKPCARVCYGLGMEHLREVRAVTSANIQEFAGCKKIFGSLAFLPESFDG

SEQ ID NO: 11226 - protein, 353 aa, Artificial Sequence
  Synthetic polypeptide
MKLRLPASPETHLDMLRHLYQGCQVVQGNLELTYLPTNASLSFLQDIQEVQGYVLIAHNQVRQVPLQRLRIVRGTQLFEDNYALAVLDNGDPLNNTTPVTGASPGGLRELQLRSLTEILKGGVLIQRNPQLCYQDTILWKDIFHKNNQLALTLIDTNRSRACHPCSPMCKGSRCWGESSEDCQSLTRTVCAGGCARCKGPLPTDCCHEQCAAGCTGPKHSDCLACLHFNHSGICELHCPALVTYNTDTFESMPNPEGRYTFGASCVTACPYNYLSTDVGSCTLVCPLHNQEVTAEDGTQRCEKCSKPCARVCYGLGMEHLREVRAVTSANIQEFAGCKKIFGSLAFLPESFDG

SEQ ID NO: 11227 - protein, 368 aa, Artificial Sequence
  Synthetic polypeptide
MPRGSWKPQVCTGTDMKLRLPASPETHLDMLRHLYQGCQVVQGNLELTYLPTNASLSFLQDIQEVQGYVLIAHNQVRQVPLQRLRIVRGTQLFEDNYALAVLDNGDPLNNTTPVTGASPGGLRELQLRSLTEILKGGVLIQRNPQLCYQDTILWKDIFHKNNQLALTLIDTNRSRACHPCSPMCKGSRCWGESSEDCQSLTRTVCAGGCARCKGPLPTDCCHEQCAAGCTGPKHSDCLACLHFNHSGICELHCPALVTYNTDTFESMPNPEGRYTFGASCVTACPYNYLSTDVGSCTLVCPLHNQEVTAEDGTQRCEKCSKPCARVCYGLGMEHLREVRAVTSANIQEFAGCKKIFGSLAFLPESFDG

SEQ ID NO: 11228 - protein, 125 aa, Artificial Sequence
  Synthetic polypeptide
  misc_feature (1)..(1): Xaa can be any naturally occurring amino acid
XHSGICELHCPALVTYNTDTFESMPNPEGRYTFGASCVTACPYNYLSTDVGSCTLVCPLHNQEVTAEDGTQRCEKCSKPCARVCYGLGMEHLREVRAVTSANIQEFAGCKKIFGSLAFLPESFDG

SEQ ID NO: 11229 - protein, 122 aa, Artificial Sequence
  Synthetic polypeptide
MELAALCRWGLLLALLPPGAASTQDNYLSTDVGSCTLVCPLHNQEVTAEDGTQRCEKCSKPCARVCYGLGMEHLREVRAVTSANIQEFAGCKKIFGSLAFLPESFDGLGDRVRPCLKKKKKK

SEQ ID NO: 11230 - protein, 398 aa, Artificial Sequence
  Synthetic polypeptide
MELAALCRWGLLLALLPPGAASTQVCTGTDMKLRLPASPETHLDMLRHLYQGCQVVQGNLELTYLPTNASLSFLQDIQEVQGYVLIAHNQVRQVPLQRLRIVRGTQLFEDNYALAVLDNGDPLNNTTPVTGASPGGLRELQLRSLTEILKGGVLIQRNPQLCYQDTILWKDIFHKNNQLALTLIDTNRSRACHPCSPMCKGSRCWGESSEDCQSLTRTVCAGGCARCKGPLPTDCCHEQCAAGCTGPKHSDCLACLHFNHSGICELHCPALVTYNTDTFESMPNPEGRYTFGASCVTACPYNYLSTDVGSCTLVCPLHNQEVTAEDGTQRCEKCSKPCARVCYGLGMEHLREVRAVTSANIQEFAGCKKIFGSLAFLPESFDGLGDRVRPCLKKKKKK

SEQ ID NO: 11231 - protein, 368 aa, Artificial Sequence
  Synthetic polypeptide
MKLRLPASPETHLDMLRHLYQGCQVVQGNLELTYLPTNASLSFLQDIQEVQGYVLIAHNQVRQVPLQRLRIVRGTQLFEDNYALAVLDNGDPLNNTTPVTGASPGGLRELQLRSLTEILKGGVLIQRNPQLCYQDTILWKDIFHKNNQLALTLIDTNRSRACHPCSPMCKGSRCWGESSEDCQSLTRTVCAGGCARCKGPLPTDCCHEQCAAGCTGPKHSDCLACLHFNHSGICELHCPALVTYNTDTFESMPNPEGRYTFGASCVTACPYNYLSTDVGSCTLVCPLHNQEVTAEDGTQRCEKCSKPCARVCYGLGMEHLREVRAVTSANIQEFAGCKKIFGSLAFLPESFDGLGDRVRPCLKKKKKK

SEQ ID NO: 11232 - protein, 383 aa, Artificial Sequence
  Synthetic polypeptide
MPRGSWKPQVCTGTDMKLRLPASPETHLDMLRHLYQGCQVVQGNLELTYLPTNASLSFLQDIQEVQGYVLIAHNQVRQVPLQRLRIVRGTQLFEDNYALAVLDNGDPLNNTTPVTGASPGGLRELQLRSLTEILKGGVLIQRNPQLCYQDTILWKDIFHKNNQLALTLIDTNRSRACHPCSPMCKGSRCWGESSEDCQSLTRTVCAGGCARCKGPLPTDCCHEQCAAGCTGPKHSDCLACLHFNHSGICELHCPALVTYNTDTFESMPNPEGRYTFGASCVTACPYNYLSTDVGSCTLVCPLHNQEVTAEDGTQRCEKCSKPCARVCYGLGMEHLREVRAVTSANIQEFAGCKKIFGSLAFLPESFDGLGDRVRPCLKKKKKK

SEQ ID NO: 11233 - protein, 140 aa, Artificial Sequence
  Synthetic polypeptide
  misc_feature (1)..(1): Xaa can be any naturally occurring amino acid
XHSGICELHCPALVTYNTDTFESMPNPEGRYTFGASCVTACPYNYLSTDVGSCTLVCPLHNQEVTAEDGTQRCEKCSKPCARVCYGLGMEHLREVRAVTSANIQEFAGCKKIFGSLAFLPESFDGLGDRVRPCLKKKKKK

SEQ ID NO: 11234 - protein, 307 aa, Artificial Sequence
  Synthetic polypeptide
MELAALCRWGLLLALLPPGAASTQDNYLSTDVGSCTLVCPLHNQEVTAEDGTQRCEKCSKPCARVCYGLGMEHLREVRAVTSANIQEFAGCKKIFGSLAFLPESFDGDPASNTAPLQPEQLQVFETLEEITGYLYISAWPDSLPDLSVFQNLQVIRGRILHNGAYSLTLQGLGISWLGLRSLRELGSGLALIHHNTHLCFVHTVPWDQLFRNPHQALLHTANRPEDECVGEGLACHQLCARGHCWGPGPTQCVNCSQFLRGQECVEECRVLQGLPREYVNARHCLPCHPECQPQNGSVTCFGPGLAQ

SEQ ID NO: 11235 - protein, 583 aa, Artificial Sequence
  Synthetic polypeptide
MELAALCRWGLLLALLPPGAASTQVCTGTDMKLRLPASPETHLDMLRHLYQGCQVVQGNLELTYLPTNASLSFLQDIQEVQGYVLIAHNQVRQVPLQRLRIVRGTQLFEDNYALAVLDNGDPLNNTTPVTGASPGGLRELQLRSLTEILKGGVLIQRNPQLCYQDTILWKDIFHKNNQLALTLIDTNRSRACHPCSPMCKGSRCWGESSEDCQSLTRTVCAGGCARCKGPLPTDCCHEQCAAGCTGPKHSDCLACLHFNHSGICELHCPALVTYNTDTFESMPNPEGRYTFGASCVTACPYNYLSTDVGSCTLVCPLHNQEVTAEDGTQRCEKCSKPCARVCYGLGMEHLREVRAVTSANIQEFAGCKKIFGSLAFLPESFDGDPASNTAPLQPEQLQVFETLEEITGYLYISAWPDSLPDLSVFQNLQVIRGRILHNGAYSLTLQGLGISWLGLRSLRELGSGLALIHHNTHLCFVHTVPWDQLFRNPHQALLHTANRPEDECVGEGLACHQLCARGHCWGPGPTQCVNCSQFLRGQECVEECRVLQGLPREYVNARHCLPCHPECQPQNGSVTCFGPGLAQ

SEQ ID NO: 11236 - protein, 553 aa, Artificial Sequence
  Synthetic polypeptide
MKLRLPASPETHLDMLRHLYQGCQVVQGNLELTYLPTNASLSFLQDIQEVQGYVLIAHNQVRQVPLQRLRIVRGTQLFEDNYALAVLDNGDPLNNTTPVTGASPGGLRELQLRSLTEILKGGVLIQRNPQLCYQDTILWKDIFHKNNQLALTLIDTNRSRACHPCSPMCKGSRCWGESSEDCQSLTRTVCAGGCARCKGPLPTDCCHEQCAAGCTGPKHSDCLACLHFNHSGICELHCPALVTYNTDTFESMPNPEGRYTFGASCVTACPYNYLSTDVGSCTLVCPLHNQEVTAEDGTQRCEKCSKPCARVCYGLGMEHLREVRAVTSANIQEFAGCKKIFGSLAFLPESFDGDPASNTAPLQPEQLQVFETLEEITGYLYISAWPDSLPDLSVFQNLQVIRGRILHNGAYSLTLQGLGISWLGLRSLRELGSGLALIHHNTHLCFVHTVPWDQLFRNPHQALLHTANRPEDECVGEGLACHQLCARGHCWGPGPTQCVNCSQFLRGQECVEECRVLQGLPREYVNARHCLPCHPECQPQNGSVTCFGPGLAQ

SEQ ID NO: 11237 - protein, 568 aa, Artificial Sequence
  Synthetic polypeptide
MPRGSWKPQVCTGTDMKLRLPASPETHLDMLRHLYQGCQVVQGNLELTYLPTNASLSFLQDIQEVQGYVLIAHNQVRQVPLQRLRIVRGTQLFEDNYALAVLDNGDPLNNTTPVTGASPGGLRELQLRSLTEILKGGVLIQRNPQLCYQDTILWKDIFHKNNQLALTLIDTNRSRACHPCSPMCKGSRCWGESSEDCQSLTRTVCAGGCARCKGPLPTDCCHEQCAAGCTGPKHSDCLACLHFNHSGICELHCPALVTYNTDTFESMPNPEGRYTFGASCVTACPYNYLSTDVGSCTLVCPLHNQEVTAEDGTQRCEKCSKPCARVCYGLGMEHLREVRAVTSANIQEFAGCKKIFGSLAFLPESFDGDPASNTAPLQPEQLQVFETLEEITGYLYISAWPDSLPDLSVFQNLQVIRGRILHNGAYSLTLQGLGISWLGLRSLRELGSGLALIHHNTHLCFVHTVPWDQLFRNPHQALLHTANRPEDECVGEGLACHQLCARGHCWGPGPTQCVNCSQFLRGQECVEECRVLQGLPREYVNARHCLPCHPECQPQNGSVTCFGPGLAQ

SEQ ID NO: 11238 - protein, 23 aa, Artificial Sequence
  Synthetic polypeptide
  misc_feature (1)..(1): Xaa can be any naturally occurring amino acid
XPCHPECQPQNGSVTCFGPGLAQ

SEQ ID NO: 11239 - protein, 180 aa, Artificial Sequence
  Synthetic polypeptide
MAGRGGAARPNGPAAGNKICQFKLVLLGESAVGKSSLVLRFVKGQFHEYQESTIGAAFLTQTVCLDDTTVKFEIWDTAGQERYHSLAPMYYRGAQAAIVVYDITNTDTFARAKNWVKELQRQASPNIVIALAGNKADLASKRAVEFQEAQAYADDNSLLFMETSAKTAMNVNEIFMAIVS

SEQ ID NO: 11240 - protein, 213 aa, Artificial Sequence
  Synthetic polypeptide
MELSWRSPSPLSASLHSTSPHPHALWTTTAGRAMAGRGGAARPNGPAAGNKICQFKLVLLGESAVGKSSLVLRFVKGQFHEYQESTIGAAFLTQTVCLDDTTVKFEIWDTAGQERYHSLAPMYYRGAQAAIVVYDITNTDTFARAKNWVKELQRQASPNIVIALAGNKADLASKRAVEFQEAQAYADDNSLLFMETSAKTAMNVNEIFMAIVS

SEQ ID NO: 11241 - protein, 111 aa, Artificial Sequence
  Synthetic polypeptide
VKFEIWDTAGQERYHSLAPMYYRGAQAAIVVYDITNTDTFARAKNWVKELQRQASPNIVIALAGNKADLASKRAVEFQEAQAYADDNSLLFMETSAKTAMNVNEIFMAIVS

SEQ ID NO: 11242 - protein, 178 aa, Artificial Sequence
  Synthetic polypeptide
MAGRGGAARPNGPAAGNKICQFKLVLLGESAVGKSSLVLRFVKGQFHEYQESTIGAAFLTQTVCLDDTTVKFEIWDTAGQERYHSLAPMYYRGAQAAIVVYDITNTDTFARAKNWVKELQRQASPNIVIALAGNKADLASKRAVEFQCLGRLEWEDHLRPGVRDQPRRHSKTLSLQKI

SEQ ID NO: 11243 - protein, 211 aa, Artificial Sequence
  Synthetic polypeptide
MELSWRSPSPLSASLHSTSPHPHALWTTTAGRAMAGRGGAARPNGPAAGNKICQFKLVLLGESAVGKSSLVLRFVKGQFHEYQESTIGAAFLTQTVCLDDTTVKFEIWDTAGQERYHSLAPMYYRGAQAAIVVYDITNTDTFARAKNWVKELQRQASPNIVIALAGNKADLASKRAVEFQCLGRLEWEDHLRPGVRDQPRRHSKTLSLQKI

SEQ ID NO: 11244 - protein, 109 aa, Artificial Sequence
  Synthetic polypeptide
VKFEIWDTAGQERYHSLAPMYYRGAQAAIVVYDITNTDTFARAKNWVKELQRQASPNIVIALAGNKADLASKRAVEFQCLGRLEWEDHLRPGVRDQPRRHSKTLSLQKI

SEQ ID NO: 11245 - protein, 182 aa, Artificial Sequence
  Synthetic polypeptide
MGKTFSQLGSWREDENKSILSSKPAIGSKAVNYSSTGSSKSFCSCVPCEGTADASFVTCPTCQGSGKIPQELEKQLVALIPYGDQRLKPKHTKLFVFLAVLICLVTSSFIVFFLFPRSVIVQPAGLNSSTVAFDEADIYLNITMFYAVATKIRDENTYKICTWLEIKVHHVLLHIQVLRRQQ

SEQ ID NO: 11246 - protein, 229 aa, Artificial Sequence
  Synthetic polypeptide
MGKTFSQLGSWREDENKSILSSKPAIGSKAVNYSSTGSSKSFCSCVPCEGTADASFVTCPTCQGSGKIPQELEKQLVALIPYGDQRLKPKHTKLFVFLAVLICLVTSSFIVFFLFPRSVIVQPAGLNSSTVAFDEADIYLNITNILNISNGNYYPIMVTQLTLEVLHLSLVVGQVSNNLLLHIGPLASEQMFYAVATKIRDENTYKICTWLEIKVHHVLLHIQVLRRQQ

SEQ ID NO: 11247 - protein, 181 aa, Artificial Sequence
  Synthetic polypeptide
MGTADASFVTCPTCQGSGKIPQELEKQLVALIPYGDQRLKPKHTKLFVFLAVLICLVTSSFIVFFLFPRSVIVQPAGLNSSTVAFDEADIYLNITNILNISNGNYYPIMVTQLTLEVLHLSLVVGQVSNNLLLHIGPLASEQMFYAVATKIRDENTYKICTWLEIKVHHVLLHIQVLRRQQ

SEQ ID NO: 11248 - protein, 208 aa, Artificial Sequence
  Synthetic polypeptide
MMCLECASAAAGGAEEEEADAERRRRRRGAQRGAGGSGCCGARGAGGAGVSAAGDEVQTLSGSVRRAPTGPPGTPGTPGCAATAKGPGAQQPKPASLGRGRGAAAAILSLGNVLNYLDRYTVAGVLLDIQQHFGVKDRGAGLLQSVFICSFMVAAPIFGYLGDRFNRKVILSCGIFFWSAVTFSSSFIPQQLCDLEELNVSEPQFPHL

SEQ ID NO: 11249 - protein, 728 aa, Artificial Sequence
  Synthetic polypeptide
MCAWCSDEALPLGSPRCDLKENLLKDNCAPESIEFPVSEARVLEDRPLSDKGSGDSSQVTQVSPQRIALRLRPDDSKNFSIQVRQVEDYPVDIYYLMDLSYSMKDDLWSIQNLGTKLATQMRKLTSNLRIGFGAFVDKPVSPYMYISPPEALENPCYDMKTTCLPMFGYKHVLTLTDQVTRFNEEVKKQSVSRNRDAPEGGFDAIMQATVCDEKIGWRNDASHLLVFTTDAKTHIALDGRLAGIVQPNDGQCHVGSDNHYSASTTMDYPSLGLMTEKLSQKNINLIFAVTENVVNLYQNYSELIPGTTVGVLSMDSSNVLQLIVDAYGKIRSKVELEVRDLPEELSLSFNATCLNNEVIPGLKSCMGLKIGDTVSFSIEAKVRGCPQEKEKSFTIKPVGFKDSLIVQVTFDCDCACQAQAEPNSHRCNNGNGTFECGVCRCGPGWLGSQCECSEEDYRPSQQDECSPREGQPVCSQRGECLCGQCVCHSSDFGKITGKYCECDDFSCVRYKGEMCSGHGQCSCGDCLCDSDWTGYYCNCTTRTDTCMSSNGLLCSGRGKCECGSCVCIQPGSYGDTCEKCPTCPDACTFKKECVECKKFDRGALHDENTCNRYCRDEIESVKELKDTGKDAVNCTYKNEDDCVVRFQYYEDSSGKSILYVVEEPECPKGPDILVVLLSVMGAILLIGLAALLIWKLLITIHDRKEFAKFEEERARAKWDTAGPGGACL

SEQ ID NO: 11250 - protein, 775 aa, Artificial Sequence
  Synthetic polypeptide
MRARPRPRPLWATVLALGALAGVGVGGPNICTTRGVSSCQQCLAVSPMCAWCSDEALPLGSPRCDLKENLLKDNCAPESIEFPVSEARVLEDRPLSDKGSGDSSQVTQVSPQRIALRLRPDDSKNFSIQVRQVEDYPVDIYYLMDLSYSMKDDLWSIQNLGTKLATQMRKLTSNLRIGFGAFVDKPVSPYMYISPPEALENPCYDMKTTCLPMFGYKHVLTLTDQVTRFNEEVKKQSVSRNRDAPEGGFDAIMQATVCDEKIGWRNDASHLLVFTTDAKTHIALDGRLAGIVQPNDGQCHVGSDNHYSASTTMDYPSLGLMTEKLSQKNINLIFAVTENVVNLYQNYSELIPGTTVGVLSMDSSNVLQLIVDAYGKIRSKVELEVRDLPEELSLSFNATCLNNEVIPGLKSCMGLKIGDTVSFSIEAKVRGCPQEKEKSFTIKPVGFKDSLIVQVTFDCDCACQAQAEPNSHRCNNGNGTFECGVCRCGPGWLGSQCECSEEDYRPSQQDECSPREGQPVCSQRGECLCGQCVCHSSDFGKITGKYCECDDFSCVRYKGEMCSGHGQCSCGDCLCDSDWTGYYCNCTTRTDTCMSSNGLLCSGRGKCECGSCVCIQPGSYGDTCEKCPTCPDACTFKKECVECKKFDRGALHDENTCNRYCRDEIESVKELKDTGKDAVNCTYKNEDDCVVRFQYYEDSSGKSILYVVEEPECPKGPDILVVLLSVMGAILLIGLAALLIWKLLITIHDRKEFAKFEEERARAKWDTAGPGGACL

SEQ ID NO: 11251 - protein, 764 aa, Artificial Sequence
  Synthetic polypeptide
  misc_feature (1)..(1): Xaa can be any naturally occurring amino acid
XTVLALGALAGVGVGGPNICTTRGVSSCQQCLAVSPMCAWCSDEALPLGSPRCDLKENLLKDNCAPESIEFPVSEARVLEDRPLSDKGSGDSSQVTQVSPQRIALRLRPDDSKNFSIQVRQVEDYPVDIYYLMDLSYSMKDDLWSIQNLGTKLATQMRKLTSNLRIGFGAFVDKPVSPYMYISPPEALENPCYDMKTTCLPMFGYKHVLTLTDQVTRFNEEVKKQSVSRNRDAPEGGFDAIMQATVCDEKIGWRNDASHLLVFTTDAKTHIALDGRLAGIVQPNDGQCHVGSDNHYSASTTMDYPSLGLMTEKLSQKNINLIFAVTENVVNLYQNYSELIPGTTVGVLSMDSSNVLQLIVDAYGKIRSKVELEVRDLPEELSLSFNATCLNNEVIPGLKSCMGLKIGDTVSFSIEAKVRGCPQEKEKSFTIKPVGFKDSLIVQVTFDCDCACQAQAEPNSHRCNNGNGTFECGVCRCGPGWLGSQCECSEEDYRPSQQDECSPREGQPVCSQRGECLCGQCVCHSSDFGKITGKYCECDDFSCVRYKGEMCSGHGQCSCGDCLCDSDWTGYYCNCTTRTDTCMSSNGLLCSGRGKCECGSCVCIQPGSYGDTCEKCPTCPDACTFKKECVECKKFDRGALHDENTCNRYCRDEIESVKELKDTGKDAVNCTYKNEDDCVVRFQYYEDSSGKSILYVVEEPECPKGPDILVVLLSVMGAILLIGLAALLIWKLLITIHDRKEFAKFEEERARAKWDTAGPGGACL

SEQ ID NO: 11252 - protein, 727 aa, Artificial Sequence
  Synthetic polypeptide
MCAWCSDEALPLGSPRCDLKENLLKDNCAPESIEFPVSEARVLEDRPLSDKGSGDSSQVTQVSPQRIALRLRPDDSKNFSIQVRQVEDYPVDIYYLMDLSYSMKDDLWSIQNLGTKLATQMRKLTSNLRIGFGAFVDKPVSPYMYISPPEALENPCYDMKTTCLPMFGYKHVLTLTDQVTRFNEEVKKQSVSRNRDAPEGGFDAIMQATVCDEKIGWRNDASHLLVFTTDAKTHIALDGRLAGIVQPNDGQCHVGSDNHYSASTTMDYPSLGLMTEKLSQKNINLIFAVTENVVNLYQNYSELIPGTTVGVLSMDSSNVLQLIVDAYGKIRSKVELEVRDLPEELSLSFNATCLNNEVIPGLKSCMGLKIGDTVSFSIEAKVRGCPQEKEKSFTIKPVGFKDSLIVQVTFDCDCACQAQAEPNSHRCNNGNGTFECGVCRCGPGWLGSQCECSEEDYRPSQQDECSPREGQPVCSQRGECLCGQCVCHSSDFGKITGKYCECDDFSCVRYKGEMCSGHGQCSCGDCLCDSDWTGYYCNCTTRTDTCMSSNGLLCSGRGKCECGSCVCIQPGSYGDTCEKCPTCPDACTFKKECVECKKFDRGALHDENTCNRYCRDEIESVKELKDTGKDAVNCTYKNEDDCVVRFQYYEDSSGKSILYVVEEPECPKGPDILVVLLSVMGAILLIGLAALLIWKLLITIHDRKEFAKFEEERARAKWDTHYAQSLR

SEQ ID NO: 11253 - protein, 774 aa, Artificial Sequence
  Synthetic polypeptide
MRARPRPRPLWATVLALGALAGVGVGGPNICTTRGVSSCQQCLAVSPMCAWCSDEALPLGSPRCDLKENLLKDNCAPESIEFPVSEARVLEDRPLSDKGSGDSSQVTQVSPQRIALRLRPDDSKNFSIQVRQVEDYPVDIYYLMDLSYSMKDDLWSIQNLGTKLATQMRKLTSNLRIGFGAFVDKPVSPYMYISPPEALENPCYDMKTTCLPMFGYKHVLTLTDQVTRFNEEVKKQSVSRNRDAPEGGFDAIMQATVCDEKIGWRNDASHLLVFTTDAKTHIALDGRLAGIVQPNDGQCHVGSDNHYSASTTMDYPSLGLMTEKLSQKNINLIFAVTENVVNLYQNYSELIPGTTVGVLSMDSSNVLQLIVDAYGKIRSKVELEVRDLPEELSLSFNATCLNNEVIPGLKSCMGLKIGDTVSFSIEAKVRGCPQEKEKSFTIKPVGFKDSLIVQVTFDCDCACQAQAEPNSHRCNNGNGTFECGVCRCGPGWLGSQCECSEEDYRPSQQDECSPREGQPVCSQRGECLCGQCVCHSSDFGKITGKYCECDDFSCVRYKGEMCSGHGQCSCGDCLCDSDWTGYYCNCTTRTDTCMSSNGLLCSGRGKCECGSCVCIQPGSYGDTCEKCPTCPDACTFKKECVECKKFDRGALHDENTCNRYCRDEIESVKELKDTGKDAVNCTYKNEDDCVVRFQYYEDSSGKSILYVVEEPECPKGPDILVVLLSVMGAILLIGLAALLIWKLLITIHDRKEFAKFEEERARAKWDTHYAQSLR

SEQ ID NO: 11254 - protein, 763 aa, Artificial Sequence
  Synthetic polypeptide
  misc_feature (1)..(1): Xaa can be any naturally occurring amino acid
XTVLALGALAGVGVGGPNICTTRGVSSCQQCLAVSPMCAWCSDEALPLGSPRCDLKENLLKDNCAPESIEFPVSEARVLEDRPLSDKGSGDSSQVTQVSPQRIALRLRPDDSKNFSIQVRQVEDYPVDIYYLMDLSYSMKDDLWSIQNLGTKLATQMRKLTSNLRIGFGAFVDKPVSPYMYISPPEALENPCYDMKTTCLPMFGYKHVLTLTDQVTRFNEEVKKQSVSRNRDAPEGGFDAIMQATVCDEKIGWRNDASHLLVFTTDAKTHIALDGRLAGIVQPNDGQCHVGSDNHYSASTTMDYPSLGLMTEKLSQKNINLIFAVTENVVNLYQNYSELIPGTTVGVLSMDSSNVLQLIVDAYGKIRSKVELEVRDLPEELSLSFNATCLNNEVIPGLKSCMGLKIGDTVSFSIEAKVRGCPQEKEKSFTIKPVGFKDSLIVQVTFDCDCACQAQAEPNSHRCNNGNGTFECGVCRCGPGWLGSQCECSEEDYRPSQQDECSPREGQPVCSQRGECLCGQCVCHSSDFGKITGKYCECDDFSCVRYKGEMCSGHGQCSCGDCLCDSDWTGYYCNCTTRTDTCMSSNGLLCSGRGKCECGSCVCIQPGSYGDTCEKCPTCPDACTFKKECVECKKFDRGALHDENTCNRYCRDEIESVKELKDTGKDAVNCTYKNEDDCVVRFQYYEDSSGKSILYVVEEPECPKGPDILVVLLSVMGAILLIGLAALLIWKLLITIHDRKEFAKFEEERARAKWDTHYAQSLR

SEQ ID NO: 11255 - protein, 405 aa, Artificial Sequence
  Synthetic polypeptide
MGPGPSRAPRAPRLMLCALALMVAAGGCVVSAFNLDTRFLVVKEAGNPGSLFGYSVALHRQTERQQRYLLLAGAPRELAVPDGYTNRTGAVYLCPLTAHKDDCERMNITVKNDPGHHIIEDMWLGVTVASQGPAGRVLVCAHRYTQVLWSGSEDQRRMVGKCYVRGNDLELDSSDDWQTYHNEMCNSNTDYLETGMCQLGTSGGFTQNTVYFGAPGAYNWKGNSYMIQRKEWDLSEYSYKDPEDQGNLYIGYTMQVGSFILHPKNITIVTGAPRHRHMGAVFLLSQEAGGDLRRRQVLEGSQVGAYFGSAIALADLNNDGWQDLLVGAPYYFERKEEVGGAIYVFMNQAGTSFPAHPSLLLHGPSGSAFGLSVASIGDINQDGFQVSQDIAENQEEGKGASEDPK

SEQ ID NO: 11256 - protein, 180 aa, Artificial Sequence
  Synthetic polypeptide
MIQRKEWDLSEYSYKDPEDQGNLYIGYTMQVGSFILHPKNITIVTGAPRHRHMGAVFLLSQEAGGDLRRRQVLEGSQVGAYFGSAIALADLNNDGWQDLLVGAPYYFERKEEVGGAIYVFMNQAGTSFPAHPSLLLHGPSGSAFGLSVASIGDINQDGFQVSQDIAENQEEGKGASEDPK

SEQ ID NO: 11257 - protein, 28 aa, Artificial Sequence
  Synthetic polypeptide
  misc_feature (1)..(1): Xaa can be any naturally occurring amino acid
XINQDGFQVSQDIAENQEEGKGASEDPK

SEQ ID NO: 11258 - protein, 957 aa, Artificial Sequence
  Synthetic polypeptide
MGPGPSRAPRAPRLMLCALALMVAAGGCVVSAFNLDTRFLVVKEAGNPGSLFGYSVALHRQTERQQRYLLLAGAPRELAVPDGYTNRTGAVYLCPLTAHKDDCERMNITVKNDPGHHIIEDMWLGVTVASQGPAGRVLVCAHRYTQVLWSGSEDQRRMVGKCYVRGNDLELDSSDDWQTYHNEMCNSNTDYLETGMCQLGTSGGFTQNTVYFGAPGAYNWKGNSYMIQRKEWDLSEYSYKDPEDQGNLYIGYTMQVGSFILHPKNITIVTGAPRHRHMGAVFLLSQEAGGDLRRRQVLEGSQVGAYFGSAIALADLNNDGWQDLLVGAPYYFERKEEVGGAIYVFMNQAGTSFPAHPSLLLHGPSGSAFGLSVASIGDINQDGFQDIAVGAPFEGLGKVYIYHSSSKGLLRQPQQVIHGEKLGLPGLATFGYSLSGQMDVDENFYPDLLVGSLSDHIVLLRARPVINIVHKTLVPRPAVLDPALCTATSCVQVELCFAYNQSAGNPNYRRNITLAYTLEADRDRRPPRLRFAGSESAVFHGFFSMPEMRCQKLELLLMDNLRDKLRPIIISMNYSLPLRMPDRPRLGLRSLDAYPILNQAQALENHTEVQFQKECGPDNKCESNLQMRAAFVSEQQQKLSRLQYSRDVRKLLLSINVTNTRTSERSGEDAHEALLTLVVPPALLLSSVRPPGACQANETIFCELGNPFKRNQRMELLIAFEVIGVTLHTRDLQVQLQLSTSSHQDNLWPMILTLLVDYTLQTSLSMVNHRLQSFFGGTVMGESGMKTVEDVGSPLKYEFQVGPMGEGLVGLGTLVLGLEWPYEVSNGKWLLYPTEITVHGNGSWPCRPPGDLINPLNLTLSDPGDRPSSPQRRRRQLDPGGGQGPPPVTLAAAKKAKSETVLTCATGRAHCVWLECPIPDAPVVTNVTVKARVWNSTFIEVPVRCFTISELFSGFSS

SEQ ID NO: 11259 - protein, 37 aa, Artificial Sequence
  Synthetic polypeptide
  misc_feature (1)..(1): Xaa can be any naturally occurring amino acid
XPVVTNVTVKARVWNSTFIEVPVRCFTISELFSGFSS

SEQ ID NO: 11260 - protein, 1104 aa, Artificial Sequence
  Synthetic polypeptide
MDEEEDGAGAEESGQPRSFMRLNDLSGAGGRPGPGSAEKDPGSADSEAEGLPYPALAPVVFFYLSQDSRPRSWCLRTVCNPWFERISMLVILLNCVTLGMFRPCEDIACDSQRCRILQAFDDFIFAFFAVEMVVKMVALGIFGKKCYLGDTWNRLDFFIVIAGMLEYSLDLQNVSFSAVRTVRVLRPLRAINRVPSMRILVTLLLDTLPMLGNVLLLCFFVFFIFGIVGVQLWAGLLRNRCFLPENFSLPLSVDLERYYQTENEDESPFICSQPRENGMRSCRSVPTLRGDGGGGPPCGLDYEAYNSSSNTTCVNWNQYYTNCSAGEHNPFKGAINFDNIGYAWIAIFQVITLEGWVDIMYFVMDAHSFYNFIYFILLIIVGSFFMINLCLVVIATQFSETKQRESQLMREQRVRFLSNASTLASFSEPGSCYEELLKYLVYILRKAARRLAQVSRAAGVRVGLLSSPAPLGGQETQPSSSCSRSHRRLSVHHLVHHHHHHHHHYHLGNGTLRAPRASPEIQDRDANGSRRLMLPPPSTPALSGAPPGGAESVHSFYHADCHLEPVRCQAPPPRSPSEASGRTVGSGKVYPTVHTSPPPETLKEKALVEVAASSGPPTLTSLNIPPGPYSSMHKLLETQSTGACQSSCKISSPCLKADSGACGPDSCPYCARAGAGEVELADREMPDSDSEAVYEFTQDAQHSDLRDPHSRRQRSLGPDAEPSSVLAFWRLICDTFRKIVDSKYFGRGIMIAILVNTLSMGIEYHEQPEELTNALEISNIVFTSLFALEMLLKLLVYGPFGYIKNPYNIFDGVIVVISVWEIVGQQGGGLSVLRTFRLMRVLKLVRFLPALQRQLVVLMKTMDNVATFCMLLMLFIFIFSILGMHLFGCKFASERDGDTLPDRKNFDSLLWAIVTVFQILTQEDWNKVLYNGMASTSSWAALYFIALMTFGNYVLFNLLVAILVEGFQAEEISKREDASGQLSCIQLPVDSQGGDANKSESEPDFFSPSLDGDGDRKKCLALVSLGEHPELRKSLLPPLIIHTAATPMSLPKSTSTGLGEALGPASRRTSSSGSAEPGAAHEMKSPLSDLGQDATALICFCKME

SEQ ID NO: 11261 - protein, 1081 aa, Artificial Sequence
  Synthetic polypeptide
MDEEEDGAGAEESGQPRSFMRLNDLSGAGGRPGPGSAEKDPGSADSEAEGLPYPALAPVVFFYLSQDSRPRSWCLRTVCNPWFERISMLVILLNCVTLGMFRPCEDIACDSQRCRILQAFDDFIFAFFAVEMVVKMVALGIFGKKCYLGDTWNRLDFFIVIAGMLEYSLDLQNVSFSAVRTVRVLRPLRAINRVPSMRILVTLLLDTLPMLGNVLLLCFFVFFIFGIVGVQLWAGLLRNRCFLPENFSLPLSVDLERYYQTENEDESPFICSQPRENGMRSCRSVPTLRGDGGGGPPCGLDYEAYNSSSNTTCVNWNQYYTNCSAGEHNPFKGAINFDNIGYAWIAIFQVITLEGWVDIMYFVMDAHSFYNFIYFILLIIVGSFFMINLCLVVIATQFSETKQRESQLMREQRVRFLSNASTLASFSEPGSCYEELLKYLVYILRKAARRLAQVSRAAGVRVGLLSSPAPLGGQETQPSSSCSRSHRRLSVHHLVHHHHHHHHHYHLGNGTLRAPRASPEIQDRDANGSRRLMLPPPSTPALSGAPPGGAESVHSFYHADCHLEPVRCQAPPPRSPSEASGRTVGSGKVYPTVHTSPPPETLKEKALVEVAASSGPPTLTSLNIPPGPYSSMHKLLETQSTGACQSSCKISSPCLKADSGACGPDSCPYCARAGAGEVELADREMPDSDSEAVYEFTQDAQHSDLRDPHSRRQRSLGPDAEPSSVLAFWRLICDTFRKIVDSKYFGRGIMIAILVNTLSMGIEYHEQPEELTNALEISNIVFTSLFALEMLLKLLVYGPFGYIKNPYNIFDGVIVVISVWEIVGQQGGGLSVLRTFRLMRVLKLVRFLPALQRQLVVLMKTMDNVATFCMLLMLFIFIFSILGMHLFGCKFASERDGDTLPDRKNFDSLLWAIVTVFQILTQEDWNKVLYNGMASTSSWAALYFIALMTFGNYVLFNLLVAILVEGFQAEGDANKSESEPDFFSPSLDGDGDRKKCLALVSLGEHPELRKSLLPPLIIHTAATPMSLPKSTSTGLGEALGPASRRTSSSGSAEPGAAHEMKSPLSDLGQDATALICFCKME

SEQ ID NO: 11262 - protein, 498 aa, Artificial Sequence
  Synthetic polypeptide
MDALCGSGELGSKFWDSNLSVHTENPDLTPCFQNSLLAWVPCIYLWVALPCYLLYLRHHCRGYIILSHLSKLKMVLGVLLWCVSWADLFYSFHGLVHGRAPAPVFFVTPLVVGVTMLLATLLIQYERLQGVQSSGVLIIFWFLCVVCAIVPFRSKILLAKAEGEISDPFRFTTFYIHFALVLSALILACFREKPPFFSAKNVDPNPYPETSAGFLSRLFFWWFTKLLNPDPLRGCLPGFTSPQDGHLWLPASPGGEGPLVPKGRGQIPDGGAAAAGGMEEAGKADGTTQGFSSTWEKCLRRGRGAAGCPAQAPEALLPEGPAGHLRLQLPHQCLLQAYPGPALLHQSTAAQHPDQVYLQPHGPLLVGLPGGWADVPVLHDAVADLTTLLPLHLCDWGEVSYWDHGCHLQEGSGYHQLSQTCVHCGGNCQPHVSGCPALHGPCPLPQSAVVSTPADHPGDLLPLAEPRSLCPGWSRFHGLADSTQRSCGREDARLPVTS

SEQ ID NO: 11263 - protein, 480 aa, Artificial Sequence
  Synthetic polypeptide
MDALCGSGELGSKFWDSNLSVHTENPDLTPCFQNSLLAWVPCIYLWVALPCYLLYLRHHCRGYIILSHLSKLKMVLGVLLWCVSWADLFYSFHGLVHGRAPAPVFFVTPLVVGVTMLLATLLIQYERLQGVQSSGVLIIFWFLCVVCAIVPFRSKILLAKAEGEISDPFRFTTFYIHFALVLSALILACFREKPPFFSAKNVDPNPYPETSAGFLSRLFFWWFTKMAIYGYRHPLEEKDLWSLKEEDRSQMVVQQLLEAWRKQEKQTARHKASAAPGKNASGEDEVLLGARPRPRKPSFLKALLATFGSSFLISACFKLIQDLLSFINPQLLSILIRFISNPMAPSWWGFLVAGLMFLCSMMQSLILQHYYHYIFVTGVKFRTGIMGVIYRKALVITNSVKRASTVGEIVNLMSVDAQRFMDLAPFLNLLWSAPLQIILAIYFLWQNLGPSVLAGVAFMVLLIPLNGAVAVKMRAFQSLP

SEQ ID NO: 11264 - protein, 764 aa, Artificial Sequence
  Synthetic polypeptide
MDALCGSGELGSKFWDSNLSVHTENPDLTPCFQNSLLAWVPCIYLWVALPCYLLYLRHHCRGYIILSHLSKLKMVLGVLLWCVSWADLFYSFHGLVHGRAPAPVFFVTPLVVGVTMLLATLLIQYERLQGVQSSGVLIIFWFLCVVCAIVPFRSKILLAKAEGEISDPFRFTTFYIHFALVLSALILACFREKPPFFSAKNVDPNPYPETSAGFLSRLFFWWFTKMAIYGYRHPLEEKDLWSLKEEDRSQMVVQQLLEAWRKQEKQTARHKASAAPGKNASGEDEVLLGARPRPRKPSFLKALLATFGSSFLISACFKLIQDLLSFINPQLLSILIRFISNPMAPSWWGFLVAGLMFLCSMMQSLILQHYYHYIFVTGVKFRTGIMGVIYRKALVITNSVKRASTVGEIVNLMSVDAQRFMDLAPFLNLLWSAPLQIILAIYFLWQNLGPSVLAGVAFMVLLIPLNGAVAVKMRAFQVKQMKLKDSRIKLMSEILNGIKVLKLYAWEPSFLKQVEGIRQGELQLLRTAAYLHTTTTFTWMCSPFLVTLITLWVYVYVDPNNVLDAEKAFVSVSLFNILRLPLNMLPQLISNLTQASVSLKRIQQFLSQEELDPQSVERKTISPGYAITIHSGTFTWAQDLPPTLHSLDIQVPKGALVAVVGPVGCGKSSLVSALLGEMEKLEGKVHMKGSVAYVPQQAWIQNCTLQENVLFGKALNPKRYQQTLEACALLADLEMLPGGDQTEIGEKSVARHGGPAINPSYSGG

SEQ ID NO: 11265 - protein, 789 aa, Artificial Sequence
  Synthetic polypeptide
MDALCGSGELGSKFWDSNLSVHTENPDLTPCFQNSLLAWVPCIYLWVALPCYLLYLRHHCRGYIILSHLSKLKMVLGVLLWCVSWADLFYSFHGLVHGRAPAPVFFVTPLVVGVTMLLATLLIQYERLQGVQSSGVLIIFWFLCVVCAIVPFRSKILLAKAEGEISDPFRFTTFYIHFALVLSALILACFREKPPFFSAKNVDPNPYPETSAGFLSRLFFWWFTKMAIYGYRHPLEEKDLWSLKEEDRSQMVVQQLLEAWRKQEKQTARHKASAAPGKNASGEDEVLLGARPRPRKPSFLKALLATFGSSFLISACFKLIQDLLSFINPQLLSILIRFISNPMAPSWWGFLVAGLMFLCSMMQSLILQHYYHYIFVTGVKFRTGIMGVIYRKALVITNSVKRASTVGEIVNLMSVDAQRFMDLAPFLNLLWSAPLQIILAIYFLWQNLGPSVLAGVAFMVLLIPLNGAVAVKMRAFQVKQMKLKDSRIKLMSEILNGIKVLKLYAWEPSFLKQVEGIRQGELQLLRTAAYLHTTTTFTWMCSPFLVTLITLWVYVYVDPNNVLDAEKAFVSVSLFNILRLPLNMLPQLISNLTQASVSLKRIQQFLSQEELDPQSVERKTISPGYAITIHSGTFTWAQDLPPTLHSLDIQVPKGALVAVVGPVGCGKSSLVSALLGEMEKLEGKVHMKGSVAYVPQQAWIQNCTLQENVLFGKALNPKRYQQTLEACALLADLEMLPGGDQTEIGEKLLGRLRHENCSNARGRGCSEPRSHHCTPAWVSETPSQEKKKK

SEQ ID NO: 11266 - protein, 71 aa, Artificial Sequence
  Synthetic polypeptide
MDTFTVQDSTAMSWWRNNFWIILAVAIIVVSVGLGLILYCVCKWQLRRGLSFLIHTVKGGTSTNLQEPFQP

SEQ ID NO: 11267 - protein, 64 aa, Artificial Sequence
  Synthetic polypeptide
MDTFTVQDSTAMSWWRNNFWIILAVAIIVVSVGLGLILYCVCLSFLIHTVKGGTSTNLQEPFQP

SEQ ID NO: 11268 - protein, 78 aa, Artificial Sequence
  Synthetic polypeptide
MSNPGGRRNGPVKLRLTGLPDPFAKVVVDGSGQCHSTDTVKNTLDPKWNQHYDLASQPFHIMVHIKNMAHWTTQMKLL

SEQ ID NO: 11269 - protein, 91 aa, Artificial Sequence
  Synthetic polypeptide
MSNPGGRRNGPVKLRLTVLCAKNLVKKDFFRLPDPFAKVVVDGSGQCHSTDTVKNTLDPKWNQHYDLASQPFHIMVHIKNMAHWTTQMKLL

SEQ ID NO: 11270 - protein, 21 aa, Artificial Sequence
  Synthetic polypeptide
MSNPGGRRNGPVKLRLTDGTV

SEQ ID NO: 11271 - protein, 178 aa, Artificial Sequence
  Synthetic polypeptide
MADFLPSRSVLSVCFPGCLLTSGEAEQQRKSKEIDKCLSREKTYVKRLVKILLLGAGESGKSTFLKQMRIIHGQDFDQRAREEFRPTIYSNVIKGMRVLVDAREKLHIPWGDNSNQQHGDKMMSFDTRAPMAAQGMVETRVFLQYLPAIRALWADSGIQNAYDRRREFQLAGHGGSHL

SEQ ID NO: 11272 - protein, 83 aa, Artificial Sequence
  Synthetic polypeptide
MRVLVDAREKLHIPWGDNSNQQHGDKMMSFDTRAPMAAQGMVETRVFLQYLPAIRALWADSGIQNAYDRRREFQLAGHGGSHL

SEQ ID NO: 11273 - protein, 353 aa, Artificial Sequence
  Synthetic polypeptide
MESGSTAASEEARSLRECELYVQKHNIQALLKDSIVQLCTARPERPMAFLREYFERLEKEEAKQIQNLQKAGTRTDSREDEISPPPPNPVVKGRRRRGAISAEVYTEEDAASYVRKVIPKDYKTMAALAKAIEKNVLFSHLDDNERSDIFDAMFSVSFIAGETVIQQGDEGDNFYVIDQGETDVYVNNEWATSVGEGGSFGELALIYGTPRAATVKAKTNVKLWGIDRDSYRRILMGSTLRKRKMYEEFLSKVSILESLDKWERLTVADALEPVQFEDGQKIVVQGEPGDEFFIILEGSAAVLQRRSENEEFVEVGRLGPSDYFGYSKKTASVNREKRPHQKWNLPAPWYWTS

SEQ ID NO: 11274 - protein, 157 aa, Artificial Sequence
  Synthetic polypeptide
  misc_feature (1)..(1): Xaa can be any naturally occurring amino acid
XGSFGELALIYGTPRAATVKAKTNVKLWGIDRDSYRRILMGSTLRKRKMYEEFLSKVSILESLDKWERLTVADALEPVQFEDGQKIVVQGEPGDEFFIILEGSAAVLQRRSENEEFVEVGRLGPSDYFGYSKKTASVNREKRPHQKWNLPAPWYWTS

SEQ ID NO: 11275 - protein, 88 aa, Artificial Sequence
  Synthetic polypeptide
MPPYFAMENAENHKIKAYTQLKLSGLLPSAYWIGQAVVDIPLFFIILILMLGSLLAFHYGLYFYTVKFLAVAASQMKNTTPFTIATKN

SEQ ID NO: 11276 - protein, 1123 aa, Artificial Sequence
  Synthetic polypeptide
MSTAIREVGVWRQTRTLLLKNYLIKCRTKKSSVQEILFPLFFLFWLILISMMHPNKKYEEVPNIELNPMDKFTLSNLILGYTPVTNITSSIMQKVSTDHLPDVIITEEYTNEKEMLTSSLSKPSNFVGVVFKDSMSYELRFFPDMIPVSSIYMDSRAGCSKSCEAAQYWSSGFTVLQASIDAAIIQLKTNVSLWKELESTKAVIMGETAVVEIDTFPRGVILIYLVIAFSPFGYFLAIHIVAEKEKKIKEFLKIMGLHDTAFWLSWVLLYTSLIFLMSLLMAVIATASLLFPQSSSIVIFLLFFLYGLSSVFFALMLTPLFKKSKHVGIVEFFVTVAFGFIGLMIILIESFPKSLVWLFSPFCHCTFVIGIAQVMHLEDFNEGASFSNLTAGPYPLIITIIMLTLNSIFYVLLAVYLDQVIPGEFGLRRSSLYFLKPSYWSKSKRNYEELSEGNVNGNISFSEIIEPVSSEFVGKEAIRISGIQKTYRKKGENVEALRNLSFDIYEGQITALLGHSGTGKSTLMNILCGLCPPSDGFASIYGHRVSEIDEMFEARKMIGICPQLDIHFDVLTVEENLSILASIKGIPANNIIQEVQKVLLDLDMQTIKDNQAKKLSGGQKRKLSLGIAVLGNPKILLLDEPTAGMDPCSRHIVWNLLKYRKANRVTVFSTHFMDEADILADRKAVISQGMLKCVGSSMFLKSKWGIGYRLSMYIDKYCATESLSSLVKQHIPGATLLQQNDQQLVYSLPFKDMDKFSGLFSALDSHSNLGVISYGVSMTTLEDVFLKLEVEAEIDQADYSVFTQQPLEEEMDSKSFDEMEQSLLILSETKAALVSTMSLWKQQMYTIAKFHFFTLKRESKSVRSVLLLLLIFFTVQIFMFLVHHSFKNAVVPIKLVPDLYFLKPGDKPHKYKTSLLLQNSAADSDISDLISFFTSQNIMVTMINDSDYVSVAPHSAALNVMHSEKDYVFAAVFNSTMVYSLPILVNIISNYYLYHLNVTETIQIWSTPFFQEITDIVFKIELYFQAALLGIIVTAMPPYFAMENAENHKIKAYTQLKLSGLLPSAYWIGQAVVDIPLFFIILILMLGSLLAFHYGLYFYTVKFLAVAASQMKNTTPFTIATKN

SEQ ID NO: 11277 - protein, 1122 aa, Artificial Sequence
  Synthetic polypeptide
MSTAIREVGVWRQTRTLLLKNYLIKCRTKKSSVQEILFPLFFLFWLILISMMHPNKKYEEVPNIELNPMDKFTLSNLILGYTPVTNITSSIMQKVSTDHLPDVIITEEYTNEKEMLTSSLSKPSNFVGVVFKDSMSYELRFFPDMIPVSSIYMDSRAGCSKSCEAAQYWSSGFTVLQASIDAAIIQLKTNVSLWKELESTKAVIMGETAVVEIDTFPRGVILIYLVIAFSPFGYFLAIHIVAEKEKKIKEFLKIMGLHDTAFWLSWVLLYTSLIFLMSLLMAVIATASLLFPQSSSIVIFLLFFLYGLSSVFFALMLTPLFKKSKHVGIVEFFVTVAFGFIGLMIILIESFPKSLVWLFSPFCHCTFVIGIAQVMHLEDFNEGASFSNLTAGPYPLIITIIMLTLNSIFYVLLAVYLDQVIPGEFGLRRSSLYFLKPSYWSKSKRNYEELSEGNVNGNISFSEIIEPVSSEFVGKEAIRISGIQKTYRKKGENVEALRNLSFDIYEGQITALLGHSGTGKSTLMNILCGLCPPSDGFASIYGHRVSEIDEMFEARKMIGICPQLDIHFDVLTVEENLSILASIKGIPANNIIQEVQKVLLDLDMQTIKDNQAKKLSGGQKRKLSLGIAVLGNPKILLLDEPTAGMDPCSRHIVWNLLKYRKANRVTVFSTHFMDEADILADRKAVISQGMLKCVGSSMFLKSKWGIGYRLSMYIDKYCATESLSSLVKQHIPGATLLQQNDQQLVYSLPFKDMDKFSGLFSALDSHSNLGVISYGVSMTTLEDVFLKLEVEAEIDQADYSVFTQQPLEEEMDSKSFDEMEQSLLILSETKAALVSTMSLWKQQMYTIAKFHFFTLKRESKSVRSVLLLLLIFFTVQIFMFLVHHSFKNAVVPIKLVPDLYFLKPGDKPHKYKTSLLLQNSADSDISDLISFFTSQNIMVTMINDSDYVSVAPHSAALNVMHSEKDYVFAAVFNSTMVYSLPILVNIISNYYLYHLNVTETIQIWSTPFFQEITDIVFKIELYFQAALLGIIVTAMPPYFAMENAENHKIKAYTQLKLSGLLPSAYWIGQAVVDIPLFFIILILMLGSLLAFHYGLYFYTVKFLAVAASQMKNTTPFTIATKN

SEQ ID NO: 11278 - protein, 479 aa, Artificial Sequence
  Synthetic polypeptide
MSTAIREVGVWRQTRTLLLKNYLIKCRTKKSSVQEILFPLFFLFWLILISMMHPNKKYEEVPNIELNPMDKFTLSNLILGYTPVTNITSSIMQKVSTDHLPDVIITEEYTNEKEMLTSSLSKPSNFVGVVFKDSMSYELRFFPDMIPVSSIYMDSRAGCSKSCEAAQYWSSGFTVLQASIDAAIIQLKTNVSLWKELESTKAVIMGETAVVEIDTFPRGVILIYLVIAFSPFGYFLAIHIVAEKEKKIKEFLKIMGLHDTAFWLSWVLLYTSLIFLMSLLMAVIATASLLFPQSSSIVIFLLFFLYGLSSVFFALMLTPLFKKSKHVGIVEFFVTVAFGFIGLMIILIESFPKSLVWLFSPFCHCTFVIGIAQVMHLEDFNEGASFSNLTAGPYPLIITIIMLTLNSIFYVLLAVYLDQVIPGEFGLRRSSLYFLKPSYWSKSKRNYEELSEGNVNGNISFSEIIEPVSSEFVGKEAIR

SEQ ID NO: 11279 - protein, 150 aa, Artificial Sequence
  Synthetic polypeptide
VEFFVTVAFGFIGLMIILIESFPKSLVWLFSPFCHCTFVIGIAQVMHLEDFNEGASFSNLTAGPYPLIITIIMLTLNSIFYVLLAVYLDQVIPGEFGLRRSSLYFLKPSYWSKSKRNYEELSEGNVNGNISFSEIIEPVSSEFVGKEAIR

SEQ ID NO: 11280 - protein, 112 aa, Artificial Sequence; identical to SEQ ID NO: 9682
  Synthetic polypeptide

SEQ ID NO: 11281 - protein, 59 aa, Artificial Sequence
  Synthetic polypeptide
AQPGGSSWRRIALLILAITIHNVPEGLAVGVGFGAIEKTASATFESASVAQGSQKIGHP

SEQ ID NO: 11282 - protein, 235 aa, Artificial Sequence
  Synthetic polypeptide
MLQGHSSVFQALLGTFFTWGMTAAGAALVFVFSSGQRRILDGSLGFAAGVMLAASYWSLLAPAVEMATSSGGFGAFAFFPVAVGFTLGAAFVYLADLLMPHLGAAEDPQTTLALNFGSTLMKKKSDPEGPALLFPESELSIRIDKSENGEAYQRKKAAATGLPEGPAVPVPSRGNLAQPGGSSWRRIALLILAITIHNVPEGLAVGVGFGAIEKTASATFESASVAQGSQKIGHP

SEQ ID NO: 11283 - protein, 242 aa, Artificial Sequence
  Synthetic polypeptide
MLQGHSSVFQALLGTFFTWGMTAAGAALVFVFSSGQRRILDGSLGFAAGVMLAASYWSLLAPAVEMATSSGGFGAFAFFPVAVGFTLGAAFVYLADLLMPHLGAAEDPQTTLALNFGSTLMKKKSDPEGPALLFPESELSIRIGRAGLLSDKSENGEAYQRKKAAATGLPEGPAVPVPSRGNLAQPGGSSWRRIALLILAITIHNVPEGLAVGVGFGAIEKTASATFESASVAQGSQKIGHP

SEQ ID NO: 11284 - protein, 151 aa, Artificial Sequence
  Synthetic polypeptide
MTVRPPQPCGTGAAEDPQTTLALNFGSTLMKKKSDPEGPALLFPESELSIRIGRAGLLSDKSENGEAYQRKKAAATGLPEGPAVPVPSRGNLAQPGGSSWRRIALLILAITIHNVPEGLAVGVGFGAIEKTASATFESASVAQGSQKIGHP

SEQ ID NO: 11285 - protein, 45 aa, Artificial Sequence
  Synthetic polypeptide
AQPGGSSWRRIALLILAITIHNVPEGRVCFTFCHDCKFPEASPAV

SEQ ID NO: 11286 - protein, 221 aa, Artificial Sequence
  Synthetic polypeptide
MLQGHSSVFQALLGTFFTWGMTAAGAALVFVFSSGQRRILDGSLGFAAGVMLAASYWSLLAPAVEMATSSGGFGAFAFFPVAVGFTLGAAFVYLADLLMPHLGAAEDPQTTLALNFGSTLMKKKSDPEGPALLFPESELSIRIDKSENGEAYQRKKAAATGLPEGPAVPVPSRGNLAQPGGSSWRRIALLILAITIHNVPEGRVCFTFCHDCKFPEASPAV

SEQ ID NO: 11287 - protein, 228 aa, Artificial Sequence
  Synthetic polypeptide
MLQGHSSVFQALLGTFFTWGMTAAGAALVFVFSSGQRRILDGSLGFAAGVMLAASYWSLLAPAVEMATSSGGFGAFAFFPVAVGFTLGAAFVYLADLLMPHLGAAEDPQTTLALNFGSTLMKKKSDPEGPALLFPESELSIRIGRAGLLSDKSENGEAYQRKKAAATGLPEGPAVPVPSRGNLAQPGGSSWRRIALLILAITIHNVPEGRVCFTFCHDCKFPEASPAV

SEQ ID NO: 11288 - protein, 137 aa, Artificial Sequence
  Synthetic polypeptide
MTVRPPQPCGTGAAEDPQTTLALNFGSTLMKKKSDPEGPALLFPESELSIRIGRAGLLSDKSENGEAYQRKKAAATGLPEGPAVPVPSRGNLAQPGGSSWRRIALLILAITIHNVPEGRVCFTFCHDCKFPEASPAV

SEQ ID NO: 11289 - protein, 78 aa, Artificial Sequence
  Synthetic polypeptide
  misc_feature (1)..(1): Xaa can be any naturally occurring amino acid
XKSENGEAYQRKKAAATGLPEGPAVPVPSRGNLAQPGGSSWRRIALLILAITIHNVPEGRVCFTFCHDCKFPEASPAV

SEQ ID NO: 11290 - protein, 69 aa, Artificial Sequence
  Synthetic polypeptide
  misc_feature (1)..(1): Xaa can be any naturally occurring amino acid
XRKKAAATGLPEGPAVPVPSRGNLAQPGGSSWRRIALLILAITIHNVPEGRVCFTFCHDCKFPEASPAV

SEQ ID NO: 11291 - protein, 93 aa, Artificial Sequence
  Synthetic polypeptide
AQPGGSSWRRIALLILAITIHNVPGACPHLEECTLQIPLQVSKELQDRRDCHSLGLSDKNLSRLDWKLSHGSSGLTFRVKMIGPFRLDKRRHR

SEQ ID NO: 11292 - protein, 269 aa, Artificial Sequence
  Synthetic polypeptide
MLQGHSSVFQALLGTFFTWGMTAAGAALVFVFSSGQRRILDGSLGFAAGVMLAASYWSLLAPAVEMATSSGGFGAFAFFPVAVGFTLGAAFVYLADLLMPHLGAAEDPQTTLALNFGSTLMKKKSDPEGPALLFPESELSIRIDKSENGEAYQRKKAAATGLPEGPAVPVPSRGNLAQPGGSSWRRIALLILAITIHNVPGACPHLEECTLQIPLQVSKELQDRRDCHSLGLSDKNLSRLDWKLSHGSSGLTFRVKMIGPFRLDKRRHR

SEQ ID NO: 11293 - protein, 276 aa, Artificial Sequence
  Synthetic polypeptide
MLQGHSSVFQALLGTFFTWGMTAAGAALVFVFSSGQRRILDGSLGFAAGVMLAASYWSLLAPAVEMATSSGGFGAFAFFPVAVGFTLGAAFVYLADLLMPHLGAAEDPQTTLALNFGSTLMKKKSDPEGPALLFPESELSIRIGRAGLLSDKSENGEAYQRKKAAATGLPEGPAVPVPSRGNLAQPGGSSWRRIALLILAITIHNVPGACPHLEECTLQIPLQVSKELQDRRDCHSLGLSDKNLSRLDWKLSHGSSGLTFRVKMIGPFRLDKRRHR

SEQ ID NO: 11294 - protein, 185 aa, Artificial Sequence
  Synthetic polypeptide
MTVRPPQPCGTGAAEDPQTTLALNFGSTLMKKKSDPEGPALLFPESELSIRIGRAGLLSDKSENGEAYQRKKAAATGLPEGPAVPVPSRGNLAQPGGSSWRRIALLILAITIHNVPGACPHLEECTLQIPLQVSKELQDRRDCHSLGLSDKNLSRLDWKLSHGSSGLTFRVKMIGPFRLDKRRHR

SEQ ID NO: 11295 - protein, 126 aa, Artificial Sequence
  Synthetic polypeptide
  misc_feature (1)..(1): Xaa can be any naturally occurring amino acid
XKSENGEAYQRKKAAATGLPEGPAVPVPSRGNLAQPGGSSWRRIALLILAITIHNVPGACPHLEECTLQIPLQVSKELQDRRDCHSLGLSDKNLSRLDWKLSHGSSGLTFRVKMIGPFRLDKRRHR

SEQ ID NO: 11296 - protein, 117 aa, Artificial Sequence
  Synthetic polypeptide
  misc_feature (1)..(1): Xaa can be any naturally occurring amino acid
XRKKAAATGLPEGPAVPVPSRGNLAQPGGSSWRRIALLILAITIHNVPGACPHLEECTLQIPLQVSKELQDRRDCHSLGLSDKNLSRLDWKLSHGSSGLTFRVKMIGPFRLDKRRHR

SEQ ID NO: 11297 - protein, 27 aa, Artificial Sequence
  Synthetic polypeptide
AQPGGSSWRRIALLILAITIHNVPGAR

SEQ ID NO: 11298 - protein, 203 aa, Artificial Sequence
  Synthetic polypeptide
MLQGHSSVFQALLGTFFTWGMTAAGAALVFVFSSGQRRILDGSLGFAAGVMLAASYWSLLAPAVEMATSSGGFGAFAFFPVAVGFTLGAAFVYLADLLMPHLGAAEDPQTTLALNFGSTLMKKKSDPEGPALLFPESELSIRIDKSENGEAYQRKKAAATGLPEGPAVPVPSRGNLAQPGGSSWRRIALLILAITIHNVPGAR

SEQ ID NO: 11299 - protein, 210 aa, Artificial Sequence
  Synthetic polypeptide
MLQGHSSVFQALLGTFFTWGMTAAGAALVFVFSSGQRRILDGSLGFAAGVMLAASYWSLLAPAVEMATSSGGFGAFAFFPVAVGFTLGAAFVYLADLLMPHLGAAEDPQTTLALNFGSTLMKKKSDPEGPALLFPESELSIRIGRAGLLSDKSENGEAYQRKKAAATGLPEGPAVPVPSRGNLAQPGGSSWRRIALLILAITIHNVPGAR

SEQ ID NO: 11300 - protein, 119 aa, Artificial Sequence
  Synthetic polypeptide
MTVRPPQPCGTGAAEDPQTTLALNFGSTLMKKKSDPEGPALLFPESELSIRIGRAGLLSDKSENGEAYQRKKAAATGLPEGPAVPVPSRGNLAQPGGSSWRRIALLILAITIHNVPGAR

SEQ ID NO: 11301 - protein, 60 aa, Artificial Sequence
  Synthetic polypeptide
  misc_feature (1)..(1): Xaa can be any naturally occurring amino acid
XKSENGEAYQRKKAAATGLPEGPAVPVPSRGNLAQPGGSSWRRIALLILAITIHNVPGAR

SEQ ID NO: 11302 - protein, 51 aa, Artificial Sequence
  Synthetic polypeptide
  misc_feature (1)..(1): Xaa can be any naturally occurring amino acid
XRKKAAATGLPEGPAVPVPSRGNLAQPGGSSWRRIALLILAITIHNVPGAR

SEQ ID NO: 11303 - protein, 30 aa, Artificial Sequence; identical to SEQ ID NO: 1370
  Synthetic polypeptide

SEQ ID NO: 11304 - protein, 206 aa, Artificial Sequence; identical to SEQ ID NO: 850
  Synthetic polypeptide

SEQ ID NO: 11305 - protein, 213 aa, Artificial Sequence; identical to SEQ ID NO: 841
  Synthetic polypeptide

SEQ ID NO: 11306 - protein, 122 aa, Artificial Sequence; identical to SEQ ID NO: 1090
  Synthetic polypeptide

SEQ ID NO: 11307 - protein, 63 aa, Artificial Sequence
  Synthetic polypeptide
  misc_feature (1)..(1): Xaa can be any naturally occurring amino acid
XKSENGEAYQRKKAAATGLPEGPAVPVPSRGNLAQPGGSSWRRIALLILAITIHNVPGDLRIK

SEQ ID NO: 11308 - protein, 54 aa, Artificial Sequence
  Synthetic polypeptide
  misc_feature (1)..(1): Xaa can be any naturally occurring amino acid
XRKKAAATGLPEGPAVPVPSRGNLAQPGGSSWRRIALLILAITIHNVPGDLRIK

SEQ ID NO: 11309 - protein, 175 aa, Artificial Sequence
  Synthetic polypeptide
MWGLLIWTLLALHQIRAARAQDDVSPYFKTEPVRTQVHLEGNRLVLTCMAEGSWPLEFKWLHNNRELTKFSLEYRYMITSLDRTHAGFYRCIVRNRMGALLQRQTEVQVAYMGSFEEGEKHQSVSHGEAAVIRAPRIASFPQPQVTWFRDGRKIPPSSRMPDAAAHTCDPSTLGD

SEQ ID NO: 11310 - protein, 113 aa, Artificial Sequence
  Synthetic polypeptide
MTPASITAAKTSTITTAFPPVSSTTLFAVGATHSASIQEETEEVVNSQLPLLLSLLALLLLLLVGASLLAWRMFQKWIKVPATQEAEMGGLLDPRNSRPACATQQGSRVYKIK

SEQ ID NO: 11311 - protein, 130 aa, Artificial Sequence
  Synthetic polypeptide
MWLPWALLLLWVPASTSMTPASITAAKTSTITTAFPPVSSTTLFAVGATHSASIQEETEEVVNSQLPLLLSLLALLLLLLVGASLLAWRMFQKWIKVPATQEAEMGGLLDPRNSRPACATQQGSRVYKIK

SEQ ID NO: 11312 - protein, 243 aa, Artificial Sequence
  Synthetic polypeptide
MWLPWALLLLWVPGCFALSKCRTVAGPVGGSLSVQCPYEKEHRTLNKYWCRPPQIFLCDKIVETKGSAGKRNGRVSIRDSPANLSFTVTLENLTEEDAGTYWCGVDTPWLRDFHDPVVEVEVSVFPASTSMTPASITAAKTSTITTAFPPVSSTTLFAVGATHSASIQEETEEVVNSQLPLLLSLLALLLLLLVGASLLAWRMFQKWIKVPATQEAEMGGLLDPRNSRPACATQQGSRVYKIK

SEQ ID NO: 11313 - protein, 687 aa, Artificial Sequence; identical to SEQ ID NO: 192
  Synthetic polypeptide

SEQ ID NO: 11314 - protein, 261 aa, Artificial Sequence; identical to SEQ ID NO: 751
  Synthetic polypeptide

SEQ ID NO: 11315 - protein, 744 aa, Artificial Sequence
  Synthetic polypeptide
MAGPRPSPWARLLLAALISVSLSGTLANRCKKAPVKSCTECVRVDKDCAYCTDEMFRDRRCNTQAELLAAGCQRESIVVMESSFQITEETQIDTTLRRSQMSPQGLRVRLRPGEERHFELEVFEPLESPVDLYILMDFSNSMSDDLDNLKKMGQNLARVLSQLTSDYTIGFGKFVDKVSVPQTDMRPEKLKEPWPNSDPPFSFKNVISLTEDVDEFRNKLQGERISGNLDAPEGGFDAILQTAVCTRDIGWRPDSTHLLVFSTESAFHYEADGANVLAGIMSRNDERCHLDTTGTYTQYRTQDYPSVPTLVRLLAKHNIIPIFAVTNYSYSYYEKLHTYFPVSSLGVLQEDSSNIVELLEEAFNRIRSNLDIRALDSPRGLRTEVTSKMFQKTRTGSFHIRRGEVGIYQVQLRALEHVDGTHVCQLPEDQKGNIHLKPSFSDGLKMDAGIICDVCTCELQKEVRSARCSFNGDFVCGQCVCSEGWSGQTCNCSTGSLSDIQPCLREGEDKPCSGRGECQCGHCVCYGEGRYEGQFCEYDNFQCPRTSGFLCNDRGRCSMGQCVCEPGWTGPSCDCPLSNATCIDSNGGICNGRGHCECGRCHCHQQSLYTDTICEINYSAIHPGLCEDLRSCVQCQAWGTGEKKGRTCEECNFKVKMVDELKRAEEVVVRCSFRDEDDDCTYSYTMEGDGAPGPNSTVLVHKKKDCPPGSFWWLIPLLLLLLPLLALLLLLCWKYCACCKFPHL

SEQ ID NO: 11316 - protein, 356 aa, Artificial Sequence
  Synthetic polypeptide
MATLLSHPQQRPPFLRQAIKIRRRRVRDLQDPPPQMAPEIQPPSHHFSPEQRALLYEDALYTVLHRLGHPEPNHVTEASELLRYLQEAFHVEPEEHQQTLQRVRELEKPIFCLKATVKQAKGILGKDVSGFSDPYCLLGIEQGVGVPGGSPGSRHRQKAVVRHTIPEEETHRTQVITQTLNPVWDETFILEFEDITNASFHLDMWDLDTVESVRQKLGELTDLHGLRRIFKEARKDKGQDDFLGNVVLRLQDLRCREDQWYPLEPRTETYPDRGQCHLQFQLIHKRRATSASRSQPSYTVHLHLLQQLVSHEVTQHEAGSTSWDGSLSPQAATVLFLHATQKDLSDFHQSMALEIR

SEQ ID NO: 11317 - protein, 97 aa, Artificial Sequence
  Synthetic polypeptide
  misc_feature (1)..(1): Xaa can be any naturally occurring amino acid
XYPLEPRTETYPDRGQCHLQFQLIHKRRATSASRSQPSYTVHLHLLQQLVSHEVTQHEAGSTSWDGSLSPQAATVLFLHATQKDLSDFHQSMALEIR

SEQ ID NO: 11318 - protein, 852 aa, Artificial Sequence
  Synthetic polypeptide
MAPKTKKGCKVTLPEKPVKLASHTRDTTGVSQMFPSSKARTKSLLGDDVFSTMAGLEEADAEVSGISEADPQALLQAMKDLDGMDADILGLKKSNSAPSKKAAKDPGKGELPNHPKPAGGAIPTKKSLPSPSSSGHQNRRFSSEDLEDPLRGLLSYDEGGITKQPPVTQSKTASDKSPSTVRDQGPSIPLTPGDTPIRKKEELLFDDGDDIMATLGFGDSPKAEKRQIGDQEGPRPARSTLDELLGRGMATKLLARPGTGEHREFKLDKKYQRPQDSEDMWGDEDFTFGAYQPTVVSSEGRQSRRQSVRFFADSGADPKGEPGSKQSPPMASSPIQPRKGGADWLGLKDEDLDLFPASPTREAHRESSVPVTPSVPPPASQHSTPAGLPPSRAKPPTEGAGSPAKASQASKLRASKEEKEDWLSHALSRKKSQGLAREQHAGTSEGLHLAGTAGHPPSGSQPLTSTQGLEHAAAGGSSGTTARERPCVRPGVSGSPVTQNHAASALPTGSPKRGTAPGDLSATEPATCFPSTQKPTEPSVPVQPLLPESLARSLLPSTEYQKQLLAAQVQLQCSPAELQAELLHSQARLAELEAQVRKLELERAQHELLLGSLQQQHQADLELIESAHRSRIKVLETSYQQREERLRRENEELSARYLSQCQEAEQARAELTAQHQRRLAAIAQEKDQEMERLRELQRASILDMRRDHEEQLQRLKLLKDREVDAATSATSHTRSLNSIIHQMEKFSSSLHELSSRVEASHLTTSQERELGIRQRDEQLRALQERLGQQQRDMEEERSRQQEVIGKMEARLNEQSRLLEQASWLMPVIPALQESKAGGSLEVRSSRPAWPTW

SEQ ID NO: 11319 - protein, 853 aa, Artificial Sequence
  Synthetic polypeptide
MAPKTKKGCKVTLPEKPVKLASHTRDTTGVSQMFPSSKARTKSLLGDDVFSTMAGLEEADAEVSGISEADPQALLQAMKDLDGMDADILGLKKSNSAPSKKAAKDPGKGELPNHPKPAGGAIPTKKSLPSPSSSGHQNRRFSSEDLEDPLRGLLSYDEGGITKQPPVTQSKTASDKSPSTVRDQGPSIPLTPGDTPIRKKEELLFDDGDDIMATLGFGDSPKAEKRQIGDQEGPRPARSTLDELLGRGMATKLLARPGTGEHREFKLDKKYQRPQDSEDMWGDEDFTFGAYQPTVVSSEGRQSRRQSVSRFFADSGADPKGEPGSKQSPPMASSPIQPRKGGADWLGLKDEDLDLFPASPTREAHRESSVPVTPSVPPPASQHSTPAGLPPSRAKPPTEGAGSPAKASQASKLRASKEEKEDWLSHALSRKKSQGLAREQHAGTSEGLHLAGTAGHPPSGSQPLTSTQGLEHAAAGGSSGTTARERPCVRPGVSGSPVTQNHAASALPTGSPKRGTAPGDLSATEPATCFPSTQKPTEPSVPVQPLLPESLARSLLPSTEYQKQLLAAQVQLQCSPAELQAELLHSQARLAELEAQVRKLELERAQHELLLGSLQQQHQADLELIESAHRSRIKVLETSYQQREERLRRENEELSARYLSQCQEAEQARAELTAQHQRRLAAIAQEKDQEMERLRELQRASILDMRRDHEEQLQRLKLLKDREVDAATSATSHTRSLNSIIHQMEKFSSSLHELSSRVEASHLTTSQERELGIRQRDEQLRALQERLGQQQRDMEEERSRQQEVIGKMEARLNEQSRLLEQASWLMPVIPALQESKAGGSLEVRSSRPAWPTW

SEQ ID NO: 11320 - protein, 42 aa, Artificial Sequence
  Synthetic polypeptide
MNEQSRLLEQASWLMPVIPALQESKAGGSLEVRSSRPAWPTW

SEQ ID NO: 11321 - protein, 867 aa, Artificial Sequence
  Synthetic polypeptide
  misc_feature (1)..(1): Xaa can be any naturally occurring amino acid
XAPKTKKGCKGSIDDFLGDLLGDDMTLPEKPVKLASHTRDTTGVSQMFPSSKARTKSLLGDDVFSTMAGLEEADAEVSGISEADPQALLQAMKDLDGMDADILGLKKSNSAPSKKAAKDPGKGELPNHPKPAGGAIPTKKSLPSPSSSGHQNRRFSSEDLEDPLRGLLSYDEGGITKQPPVTQSKTASDKSPSTVRDQGPSIPLTPGDTPIRKKEELLFDDGDDIMATLGFGDSPKAEKRQIGDQEGPRPARSTLDELLGRGMATKLLARPGTGEHREFKLDKKYQRPQDSEDMWGDEDFTFGAYQPTVVSSEGRQSRRQSVSRFFADSGADPKGEPGSKQSPPMASSPIQPRKGGADWLGLKDEDLDLFPASPTREAHRESSVPVTPSVPPPASQHSTPAGLPPSRAKPPTEGAGSPAKASQASKLRASKEEKEDWLSHALSRKKSQGLAREQHAGTSEGLHLAGTAGHPPSGSQPLTSTQGLEHAAAGGSSGTTARERPCVRPGVSGSPVTQNHAASALPTGSPKRGTAPGDLSATEPATCFPSTQKPTEPSVPVQPLLPESLARSLLPSTEYQKQLLAAQVQLQCSPAELQAELLHSQARLAELEAQVRKLELERAQHELLLGSLQQQHQADLELIESAHRSRIKVLETSYQQREERLRRENEELSARYLSQCQEAEQARAELTAQHQRRLAAIAQEKDQEMERLRELQRASILDMRRDHEEQLQRLKLLKDREVDAATSATSHTRSLNSIIHQMEKFSSSLHELSSRVEASHLTTSQERELGIRQRDEQLRALQERLGQQQRDMEEERSRQQEVIGKMEARLNEQSRLLEQASWLMPVIPALQESKAGGSLEVRSSRPAWPTW

SEQ ID NO: 11322 - protein, 416 aa, Artificial Sequence
  Synthetic polypeptide
MASADKNGGSVSSVSSSRLQSRKPPNLSITIPPPEKETQAPGEQDSMLPEGFQNRRLKKSQPRTWAAHTTACPPSFLPKRKNPAYLKSVSLQEPRSRWQESSEKRPGFRRQASLSQSIRKGAAQWFGVSGDWEGQRQQWQRRSLHHCSMRYGRLKASCQRDLELPSQEAPSFQGTESPKPCKMPKIVDPLARGRAFRHPEEMDRPHAPHPPLTPGVLSLTSFTSVRSGYSHLPRRKRMSVAHMSLQAAAALLKGRSVLDATGQRCRVVKRSFAFPSFLEEDVVDGADTFDSSFFSKEEMSSMPDDVFESPPLSASYFRGIPHSASPVSPDGVQIPLKEYGRAPVPGPRRGKRIASKVKHFAFDRKKRHYGLGVVGNWLNRSYRRSISSTVQRQLESFDSHRRAWWCMPVIPATREA

SEQ ID NO: 11323 - protein, 387 aa, Artificial Sequence
  Synthetic polypeptide
MASADKNGGSVSSVSSSRLQSRKPPNLSITIPPPEKETQAPGEQDSMLPERKNPAYLKSVSLQEPRSRWQESSEKRPGFRRQASLSQSIRKGAAQWFGVSGDWEGQRQQWQRRSLHHCSMRYGRLKASCQRDLELPSQEAPSFQGTESPKPCKMPKIVDPLARGRAFRHPEEMDRPHAPHPPLTPGVLSLTSFTSVRSGYSHLPRRKRMSVAHMSLQAAAALLKGRSVLDATGQRCRVVKRSFAFPSFLEEDVVDGADTFDSSFFSKEEMSSMPDDVFESPPLSASYFRGIPHSASPVSPDGVQIPLKEYGRAPVPGPRRGKRIASKVKHFAFDRKKRHYGLGVVGNWLNRSYRRSISSTVQRQLESFDSHRRAWWCMPVIPATREA

SEQ ID NO: 11324 - protein, 396 aa, Artificial Sequence
  Synthetic polypeptide
MEEDDSYVPSDLTAEERQELENIRRRKQELLADIQRLKDEIAEVANEIENLGSTEERKNMQRNKQVAMGRKKFNMDPKKGIQFLIENDLLKNTCEDIAQFLYKGEGLNKTAIGDYLGERDEFNIQVLHAFVELHEFTDLNLVQALRQFLWSFRLPGEAQKIDRMMEAFAQRYCQCNNGVFQSTDTCYVLSFAIIMLNTSLHNPNVKDKPTVERFIAMNRGINDGGDLPEELLRNLYESIKNEPFKIPEDDGNDLTHTFFNPDREGWLLKLGGGRVKTWKRRWFILTDNCLYYFEYTTDKEPRGIIPLENLSIREVEDSKKPNCFELYIPDNKDQVIKACKTEADGRVVEGNHTVYRISAPTPEEKEEWIKCINTSPSCHHVKKDMFASLQPGLQAS

SEQ ID NO: 11325 - protein, 395 aa, Artificial Sequence
  Synthetic polypeptide
MEEDDSYVPSDLTAEERQELENIRRRKQELLADIQRLKDEIAEVANEIENLGSTEERKNMQRNKQVAMGRKKFNMDPKKGIQFLIENDLLKNTCEDIAQFLYKGEGLNKTAIGDYLGERDEFNIQVLHAFVELHEFTDLNLVQALRQFLWSFRLPGEAQKIDRMMEAFAQRYCQCNNGVFQSTDTCYVLSFAIIMLNTSLHNPNVKDKPTVERFIAMNRGINDGGDLPEELLRNLYESIKNEPFKIPEDDGNDLTHTFFNPDREGWLLKLGGRVKTWKRRWFILTDNCLYYFEYTTDKEPRGIIPLENLSIREVEDSKKPNCFELYIPDNKDQVIKACKTEADGRVVEGNHTVYRISAPTPEEKEEWIKCINTSPSCHHVKKDMFASLQPGLQAS

SEQ ID NO: 11326 - protein, 337 aa, Artificial Sequence
  Synthetic polypeptide
MQRNKQVAMGRKKFNMDPKKGIQFLIENDLLKNTCEDIAQFLYKGEGLNKTAIGDYLGERDEFNIQVLHAFVELHEFTDLNLVQALRQFLWSFRLPGEAQKIDRMMEAFAQRYCQCNNGVFQSTDTCYVLSFAIIMLNTSLHNPNVKDKPTVERFIAMNRGINDGGDLPEELLRNLYESIKNEPFKIPEDDGNDLTHTFFNPDREGWLLKLGGGRVKTWKRRWFILTDNCLYYFEYTTDKEPRGIIPLENLSIREVEDSKKPNCFELYIPDNKDQVIKACKTEADGRVVEGNHTVYRISAPTPEEKEEWIKCINTSPSCHHVKKDMFASLQPGLQAS

SEQ ID NO: 11327 - protein, 306 aa, Artificial Sequence
  Synthetic polypeptide
MEEDDSYVPSDLTAEERQELENIRRRKQELLADIQRLKDEIAEVANEIENLGSTEERKNMQRNKQVAMGRKKFNMDPKKGIQFLIENDLLKNTCEDIAQFLYKGEGLNKTAIGDYLGERDEFNIQVLHAFVELHEFTDLNLVQALRQFLWSFRLPGEAQKIDRMMEAFAQRYCQCNNGVFQSTDTCYVLSFAIIMLNTSLHNPNVKDKPTVERFIAMNRGINDGGDLPEELLRNLYESIKNEPFKIPEDDGNDLTHTFFNPDREGWLLKLGGGRVKTWKRRWFILTDNCLYYFEYTTVITFAKPTL

SEQ ID NO: 11328 - protein, 305 aa, Artificial Sequence
  Synthetic polypeptide
MEEDDSYVPSDLTAEERQELENIRRRKQELLADIQRLKDEIAEVANEIENLGSTEERKNMQRNKQVAMGRKKFNMDPKKGIQFLIENDLLKNTCEDIAQFLYKGEGLNKTAIGDYLGERDEFNIQVLHAFVELHEFTDLNLVQALRQFLWSFRLPGEAQKIDRMMEAFAQRYCQCNNGVFQSTDTCYVLSFAIIMLNTSLHNPNVKDKPTVERFIAMNRGINDGGDLPEELLRNLYESIKNEPFKIPEDDGNDLTHTFFNPDREGWLLKLGGRVKTWKRRWFILTDNCLYYFEYTTVITFAKPTL

SEQ ID NO: 11329 - protein, 247 aa, Artificial Sequence
  Synthetic polypeptide
MQRNKQVAMGRKKFNMDPKKGIQFLIENDLLKNTCEDIAQFLYKGEGLNKTAIGDYLGERDEFNIQVLHAFVELHEFTDLNLVQALRQFLWSFRLPGEAQKIDRMMEAFAQRYCQCNNGVFQSTDTCYVLSFAIIMLNTSLHNPNVKDKPTVERFIAMNRGINDGGDLPEELLRNLYESIKNEPFKIPEDDGNDLTHTFFNPDREGWLLKLGGGRVKTWKRRWFILTDNCLYYFEYTTVITFAKPTL

SEQ ID NO: 11330 - protein, 236 aa, Artificial Sequence
  Synthetic polypeptide
MAEFRVRVSTGEAFGAGTWDKVSVSIVGTRGESPPLPLDNLGKEFTAGAEEDFQVTLPEDVGRVLLLRVHKAPPVLPLLGPLAPDAWFCRWFQLTPPRGGHLLFPCYQWLEGAGTLVLQEGTAKVSWADHHPVLQQQRQEELQARQEMYQWKAYNPGWPHCLDEKTVEDLELNIKYSTAKNANFYLQAGSAFAEMKIKGLLDRKGLWRSLNEMKRIFNFRRTPAAETKENMDGGDP

SEQ ID NO: 11331 - protein, 71 aa, Artificial Sequence
  Synthetic polypeptide
MELRVGNRYRLGRKIGSGSFGDIYLGTDIAAGEEVAIKLECVKTKHPQLHIESKIYKMMQGGGVLSAWRSS

SEQ ID NO: 11332 - protein, 65 aa, Artificial Sequence
  Synthetic polypeptide
MELRVGNRYRLGRKIGSGSFGDIYLGTDIAAGEEVAIKLECVKTKHPQLHIESKIYKMMQGGEES

SEQ ID NO: 11333 - protein, 61 aa, Artificial Sequence
  Synthetic polypeptide
MSALGSPVRAYDFLLKFLLVGDSDVGKGEILASLQDGAAESPYGHPADHKNPRLRATRTSG

SEQ ID NO: 11334 - protein, 217 aa, Artificial Sequence
  Synthetic polypeptide
MALSDEPAAGGPEEEAEDETLAFGAALEAFGESAETRALLGRLREVHGGGAEREVALERFRVIMDKYQEQPHLLDPHLEWMMNLLLDIVQDQTSPASLVHLAFKFLYIITKVRGYKTFLRLFPHEVADVEPVLDLVTIQNPKDHEAWETRYMLLLWLSVTCLIPFDFSRLDGNLLTQPGQARMSIMDRILQIAESYLIVSDKARDAAAVLVSRYLGS

SEQ ID NO: 11335 - protein, 226 aa, Artificial Sequence
  Synthetic polypeptide
MAPDPWFSTYDSTCQIAQEIAEKIQQRNQYERKGEKAPKLTVTIRALLQNLKEKIALLKDLLLRAVSTHQITQLEGDRRQNLLDDLVTRERLLLASFKNEGAEPDLIRSSLMSEEAKRGAPNPWLFEEPEETRGLGFDEIRQQQQKIIQEQDAGLDALSSIISRQKQMGQEIGNELDEQNEIIDDLANLVENTDEKLRNETRRVNMVDRKSASCGLNLQGRKEIPR

SEQ ID NO: 11336 - protein, 115 aa, Artificial Sequence
  Synthetic polypeptide
MSEEAKRGAPNPWLFEEPEETRGLGFDEIRQQQQKIIQEQDAGLDALSSIISRQKQMGQEIGNELDEQNEIIDDLANLVENTDEKLRNETRRVNMVDRKSASCGLNLQGRKEIPR

SEQ ID NO: 11337 - protein, 148 aa, Artificial Sequence
  Synthetic polypeptide
MKLGSSRAGPGRGSAGLLPGVHELPMGIPAPWGTSPLSFHRKCSLWAPGRPFLTLVLLVSIKQVTGSLLEETTRKWAQYKQACLRDLLKEPSGIFCNGTFDQYVCWPHSSPGNVSVPCPSYLPWWSEESKWIPAVKRMWRPWKGAEEN

SEQ ID NO: 11338 - protein, 375 aa, Artificial Sequence
  Synthetic polypeptide
MKLGSSRAGPGRGSAGLLPGVHELPMGIPAPWGTSPLSFHRKCSLWAPGRPFLTLVLLVSIKQVTGSLLEETTRKWAQYKQACLRDLLKEPSGIFCNGTFDQYVCWPHSSPGNVSVPCPSYLPWWSEESSGRAYRHCLAQGTWQTIENATDIWQDDSECSENHSFKQNVDRYALLSTLQLMYTVGYSFSLISLFLALTLLLFLRKLHCTRNYIHMNLFASFILRTLAVLVKDVVFYNSYSKRPDNENGWMSYLSEMSTSCRSVQVLLHYFVGANYLWLLVEGLYLHTLLEPTVLPERRLWPRYLLLGWAFPVLFVVPWGFARAHLENTGCWTTNGNKKIWWIIRGPMMLCVTALGLEETGLKRNGSIPFGHKEDI

SEQ ID NO: 11339 - protein, 195 aa, Artificial Sequence
  Synthetic polypeptide
MYTVGYSFSLISLFLALTLLLFLRKLHCTRNYIHMNLFASFILRTLAVLVKDVVFYNSYSKRPDNENGWMSYLSEMSTSCRSVQVLLHYFVGANYLWLLVEGLYLHTLLEPTVLPERRLWPRYLLLGWAFPVLFVVPWGFARAHLENTGCWTTNGNKKIWWIIRGPMMLCVTALGLEETGLKRNGSIPFGHKEDI

SEQ ID NO: 11340 - protein, 446 aa, Artificial Sequence
  Synthetic polypeptide
MKLGSSRAGPGRGSAGLLPGVHELPMGIPAPWGTSPLSFHRKCSLWAPGRPFLTLVLLVSIKQVTGSLLEETTRKWAQYKQACLRDLLKEPSGIFCNGTFDQYVCWPHSSPGNVSVPCPSYLPWWSEESSGRAYRHCLAQGTWQTIENATDIWQDDSECSENHSFKQNVDRYALLSTLQLMYTVGYSFSLISLFLALTLLLFLRKLHCTRNYIHMNLFASFILRTLAVLVKDVVFYNSYSKRPDNENGWMSYLSEMSTSCRSVQVLLHYFVGANYLWLLVEGLYLHTLLEPTVLPERRLWPRYLLLGWAFPVLFVVPWGFARAHLENTGCWTTNGNKKIWWIIRGPMMLCVTVNFFIFLKILKLLISKLKAHQMCFRDYKYRLAKSTLVLIPLLGVHEILFSFITDDQVEGFAKLIRLFIQLTLSSFHGFLVALQYGFANGEPISS

SEQ ID NO: 11341 - protein, 266 aa, Artificial Sequence
  Synthetic polypeptide
MYTVGYSFSLISLFLALTLLLFLRKLHCTRNYIHMNLFASFILRTLAVLVKDVVFYNSYSKRPDNENGWMSYLSEMSTSCRSVQVLLHYFVGANYLWLLVEGLYLHTLLEPTVLPERRLWPRYLLLGWAFPVLFVVPWGFARAHLENTGCWTTNGNKKIWWIIRGPMMLCVTVNFFIFLKILKLLISKLKAHQMCFRDYKYRLAKSTLVLIPLLGVHEILFSFITDDQVEGFAKLIRLFIQLTLSSFHGFLVALQYGFANGEPISS

SEQ ID NO: 11342 - protein, 269 aa, Artificial Sequence
  Synthetic polypeptide
MANTVEADGSNDEGYEAAEEGLGDEDEKRKISAIRSYRDVMKLCAAHLPTESDAPNHYQAVCRALFAETMELHTFLTKIKSAKENLKKIQEMEKSDESSTDLEELKNADWARFWVQVMRDLRNGVKLKKVQERQYNPLPIEYQLTPYEMLMDDIRCKRYTLRKVMVNGDIPPRLKKSAHEIILDFIRSRPPLNPVSARKLKPTPPRPRSLHERILEEIKAERKLRPVSPEEIRRSRLAQQPLSQPRLSSVAAALIVLLLPVLNSSTIPY

SEQ ID NO: 11343 - protein, 428 aa, Artificial Sequence
  Synthetic polypeptide
MAQAAGPAGGGEPRTEAVGGEGPREPGAAGGAAGGSRDALSLEEILRLYNQPINEEQAWAVCYQCCGSLRAAARRRQPRHRVRSAAQIRVWRDGAVTLAPAADDAGEPPPVAGKLGYSQCMETEVIESLGIIIYKALDYGLKENEERELSPPLEQLIDHMANTVEADGSNDEGYEAAEEGLGDEDEKRKISAIRSYRDVMKLCAAHLPTESDAPNHYQAVCRALFAETMELHTFLTKIKSAKENLKKIQEMEKSDESSTDLEELKNADWARFWVQVMRDLRNGVKLKKVQERQYNPLPIEYQLTPYEMLMDDIRCKRYTLRKVMVNGDIPPRLKKSAHEIILDFIRSRPPLNPVSARKLKPTPPRPRSLHERILEEIKAERKLRPVSPEEIRRSRLAQQPLSQPRLSSVAAALIVLLLPVLNSSTIPY

SEQ ID NO: 11344 - protein, 231 aa, Artificial Sequence
  Synthetic polypeptide
METELCAAHLPTESDAPNHYQAVCRALFAETMELHTFLTKIKSAKENLKKIQEMEKSDESSTDLEELKNADWARFWVQVMRDLRNGVKLKKVQERQYNPLPIEYQLTPYEMLMDDIRCKRYTLRKVMVNGDIPPRLKKSAHEIILDFIRSRPPLNPVSARKLKPTPPRPRSLHERILEEIKAERKLRPVSPEEIRRSRLAQQPLSQPRLSSVAAALIVLLLPVLNSSTIPY

SEQ ID NO: 11345 - protein, 308 aa, Artificial Sequence
  Synthetic polypeptide
METEVIESLGIIIYKALDYGLKENEERELSPPLEQLIDHMANTVEADGSNDEGYEAAEEGLGDEDEKRKISAIRSYRDVMKLCAAHLPTESDAPNHYQAVCRALFAETMELHTFLTKIKSAKENLKKIQEMEKSDESSTDLEELKNADWARFWVQVMRDLRNGVKLKKVQERQYNPLPIEYQLTPYEMLMDDIRCKRYTLRKVMVNGDIPPRLKKSAHEIILDFIRSRPPLNPVSARKLKPTPPRPRSLHERILEEIKAERKLRPVSPEEIRRSRLAQQPLSQPRLSSVAAALIVLLLPVLNSSTIPY

SEQ ID NO: 11346 - protein, 119 aa, Artificial Sequence
  Synthetic polypeptide
  misc_feature (1)..(1): Xaa can be any naturally occurring amino acid
XDDIRCKRYTLRKVMVNGDIPPRLKKSAHEIILDFIRSRPPLNPVSARKLKPTPPRPRSLHERILEEIKAERKLRPVSPEEIRRSRLAQQPLSQPRLSSVAAALIVLLLPVLNSSTIPY

SEQ ID NO: 11347 - protein, 141 aa, Artificial Sequence
  Synthetic polypeptide
MAQAAGPAGGGEPRTEAVGGEGPREPGAAGGAAGGSRDALSLEEILRLYNQPINEEQAWAVCYQCCGSLRAAARRRQPRHRVRSAAQIRVWRDGAVTLAPAADDAGEPPPVAGKLGYSQCMETETESQIMSELPFILLQRE

SEQ ID NO: 11348 - protein, 21 aa, Artificial Sequence
  Synthetic polypeptide
METETESQIMSELPFILLQRE

SEQ ID NO: 11349 - protein, 39 aa, Artificial Sequence
  Synthetic polypeptide
MSSGKTCCIAGKLGYSQCMETETESQIMSELPFILLQRE

SEQ ID NO: 11350 - protein, 30 aa, Artificial Sequence
  Synthetic polypeptide
MPLYSGFRRLGSLLTNFMTLANQSTSLKSQ

SEQ ID NO: 11351 - protein, 1366 aa, Artificial Sequence [sequence omitted]

SEQ ID NO: 11352 - protein, 111 aa, Artificial Sequence
  Synthetic polypeptide
PPALECRRCHVKCHRDHLDKKEDLICPCKVSYDVTSARDMLLLACSQDEQKKWVTHLVKKIPKNPPSGFVRASPRTLSTRSTANQSFRKVVKNTSGKTRIHETVTGSMQTG

SEQ ID NO: 11353 - protein, 245 aa, Artificial Sequence
  Synthetic polypeptide
MSNSRNNRVMVEGVGARVVRGPDWKWGKQDGGEGHVGTVRSFESPEEVVVVWDNGTAANYRCSGAYDLRILDSAPTGIKHDGTMCDTCRQQPIIGIRWKCAECTNYDLCTVCYHGDKHHLRHRFYRITTPGSERVLLESRRKSKKITARGIFAGARVVRGVDWQWEDQDGGNGRRGKVTEIQDWSASSPHSAAYVLWDNGAKNLYRVGFEGMLFGRLRHENHLNHEGRGAELSMSRDHAIVLQPR

SEQ ID NO: 11354 - protein, 310 aa, Artificial Sequence
  Synthetic polypeptide
MSNSRNNRVMVEGVGARVVRGPDWKWGKQDGGEGHVGTVRSFESPEEVVVVWDNGTAANYRCSGAYDLRILDSAPTGIKHDGTMCDTCRQQPIIGIRWKCAECTNYDLCTVCYHGDKHHLRHRFYRITTPGSERVLLESRRKSKKITARGIFAGARVVRGVDWQWEDQDGGNGRRGKVTEIQDWSASSPHSAAYVLWDNGAKNLYRVGFEGMSDLKCVQDAKGGSFYRDHCPVLGEQNGNRNPGGLQIGDLVNIDLDLEIVQSLQHGHGGWTDGMFETLTTTGTVCGIDEDHDIVVQYPSGNRKDQAIQI

SEQ ID NO: 11355 - protein, 871 aa, Artificial Sequence
  Synthetic polypeptide
MCRIAGALRTLLPLLAALLQASVEASGEIALCKTGFPEDVYSAVLSKDVHEGQPLLNVKFSNCNGKRKVQYESSEPADFKVDEDGMVYAVRSFPLSSEHAKFLIYAQDKETQEKWQVAVKLSLKPTLTEESVKESAEVEEIVFPRQFSKHSGHLQRQKRDWVIPPINLPENSRGPFPQELVRIRSDRDKNLSLRYSVTGPGADQPPTGIFIINPISGQLSVTKPLDREQIARFHLRAHAVDINGNQVENPIDIVINVIDMNDNRPEFLHQVWNGTVPEGSKPGTYVMTVTAIDADDPNALNGMLRYRIVSQAPSTPSPNMFTINNETGDIITVAAGLDREKVQQYTLIIQATDMEGNPTYGLSNTATAVITVTDVNDNPPEFTAMTFYGEVPENRVDIIVANLTVTDKDQPHTPAWNAVYRISGGDPTGRFAIQTDPNSNDGLVTVVKPIDFETNRMFVLTVAAENQVPLAKGIQHPPQSTATVSVTVIDVNENPYFAPNPKIIRQEEGLHAGTMLTTFTAQDPDRYMQQNIRYTKLSDPANWLKIDPVNGQITTIAVLDRESPNVKNNIYNATFLASDNGIPPMSGTGTLQIYLLDINDNAPQVLPQEAETCETPDPNSINITALDYDIDPNAGPFAFDLPLSPVTIKRNWTITRLNGDFAQLNLKIKFLEAGIYEVPIIITDSGNPPKSNISILRVKVCQCDSNGDCTDVDRIVGAGLGTGAIIAILLCIIILLILVLMFVVWMKRRDKERQAKQLLIDPEDDVRDNILKYDEEGGGEEDQDYDLSQLQQPDTVEPDAIKPVGIRRMDERPIHAEPQYPVRSAAPHPGDIGDFINEPCEHVSASPLLSSITRSFLRPPQKQKPLQPEEL

SEQ ID NO: 11356 - protein, 840 aa, Artificial Sequence
  Synthetic polypeptide
MFLLRRYVCIFTEKLKNQAELYVFLSVKFSNCNGKRKVQYESSEPADFKVDEDGMVYAVRSFPLSSEHAKFLIYAQDKETQEKWQVAVKLSLKPTLTEESVKESAEVEEIVFPRQFSKHSGHLQRQKRDWVIPPINLPENSRGPFPQELVRIRSDRDKNLSLRYSVTGPGADQPPTGIFIINPISGQLSVTKPLDREQIARFHLRAHAVDINGNQVENPIDIVINVIDMNDNRPEFLHQVWNGTVPEGSKPGTYVMTVTAIDADDPNALNGMLRYRIVSQAPSTPSPNMFTINNETGDIITVAAGLDREKVQQYTLIIQATDMEGNPTYGLSNTATAVITVTDVNDNPPEFTAMTFYGEVPENRVDIIVANLTVTDKDQPHTPAWNAVYRISGGDPTGRFAIQTDPNSNDGLVTVVKPIDFETNRMFVLTVAAENQVPLAKGIQHPPQSTATVSVTVIDVNENPYFAPNPKIIRQEEGLHAGTMLTTFTAQDPDRYMQQNIRYTKLSDPANWLKIDPVNGQITTIAVLDRESPNVKNNIYNATFLASDNGIPPMSGTGTLQIYLLDINDNAPQVLPQEAETCETPDPNSINITALDYDIDPNAGPFAFDLPLSPVTIKRNWTITRLNGDFAQLNLKIKFLEAGIYEVPIIITDSGNPPKSNISILRVKVCQCDSNGDCTDVDRIVGAGLGTGAIIAILLCIIILLILVLMFVVWMKRRDKERQAKQLLIDPEDDVRDNILKYDEEGGGEEDQDYDLSQLQQPDTVEPDAIKPVGIRRMDERPIHAEPQYPVRSAAPHPGDIGDFINEPCEHVSASPLLSSITRSFLRPPQKQKPLQPEEL

SEQ ID NO: 11357 - protein, 191 aa, Artificial Sequence
  Synthetic polypeptide
MGSVLSTDSGKSAPASATARALERRRDPELPVTSFDCAVCLEVLHQPVRTRCGHVFCRSCIATSLKNNKWTCPYCRAYLPSEGVPATDVAKRMKSEYKNCAECDTLVCLSEMRAHIRTCQKYIDKYGPLQELEETAARCVCPFCQRELYEDSLLDHCITHHRSERRPVDNNTKIHLSCCCPRPHFHPQVPQ

SEQ ID NO: 11358 - protein, 227 aa, Artificial Sequence
  Synthetic polypeptide
MGSVLSTDSGKSAPASATARALERRRDPELPVTSFDCAVCLEVLHQPVRTRCGHVFCRSCIATSLKNNKWTCPYCRAYLPSEGVPATDVAKRMKSEYKNCAECDTLVCLSEMRAHIRTCQKYIDKYGPLQELEETAARCVCPFCQRELYEDSLLDHCITHHRSERRPVFCPLCRLIPDENPSSFSGSLIRHLQVSHTLFYDDFIDNNTKIHLSCCCPRPHFHPQVPQ

SEQ ID NO: 11359 - protein, 39 aa, Artificial Sequence
  Synthetic polypeptide
MNLIFHKDILFGIPANKEAEGDYVAVEAERDLKMLCSWL

SEQ ID NO: 11360 - protein, 40 aa, Artificial Sequence
  Synthetic polypeptide
MNLIFHKDILFGIPANKKEAEGDYVAVEAERDLKMLCSWL

SEQ ID NO: 11361 - protein, 523 aa, Artificial Sequence
  Synthetic polypeptide
MAPRARRRRPLFALLLLCALLARLQVALQIAPPCTSEKHYEHLGRCCNKCEPGKYMSSKCTTTSDSVCLPCGPDEYLDSWNEEDKCLLHKVCDTGKALVAVVAGNSTTPRRCACTAGYHWSQDCECCRRNTECAPGLGAQHPLQLNKDTVCKPCLAGYFSDAFSSTDKCRPWTNCTFLGKRVEHHGTEKSDAVCSSSLPARKPPNEPHVYLPGLIILLLFASVALVAAIIFGVCYRKKGKALTANLWHWINEACGRLSGDKESSGDSCVSTHTANFGQQGACEGVLLLTLEEKTFPEDMCYPDQGGVCQGTCVGGGPYAQGEDARMLSLVSKTEIEEDSFRQMPTEDEYMDRPSQPTDQLLFLTEPGSKSTPPFSEPLEVGENDSLSQCFTGTQSTVGSESCNCTEPLCRTDWTPMSSENYLQKEVDSGHCPHWAASPSPNWADVCTGCRNPPGEDCEPLVGSPKRGPLPQCAYGMGLPPEEEASRTEARDQPEDGADGRLPSSARAGAGSGSSPGGQSPASD

SEQ ID NO: 11362 - protein, 354 aa, Artificial Sequence
  Synthetic polypeptide
METLNGPAGGGAPDAKLQPPGQHHRHHHLHPVAERRRLHRAPSPARPFLKDLHARPAAPGPAVPSSGRAPAPAAPRSPNLAGKAPPSPGSLAAPGRLSRRSGGVPGAKDKPPPGAGARAAGGAKAALGSRRAARVAPAEPLSRAGKPPGAEPPSAAAKGRKAKRGSRAPPARTVGPPTPAARIPAVTLAVTSVAGSPARCSRISHTDSSSDLSDCPSEPLSDEQRLLPAASSDAESGTGSSDREPPRGAPTPSPAARGAPPGSPEPPALLAAPLAAGACPGGRSIPSGVSGGFAGPGVAEDVRGRSPPERPVPGTPKEPSLGEQSRLVPAAEEEELLREMEELRSENDYLKHNP

SEQ ID NO: 11363 - protein, 147 aa, Artificial Sequence
  Synthetic polypeptide
MEEMRDSYLEEDVYQLQELRRELDRANKNCRILQYRLRKAEQKSLKVAETGQVDGELIRSLEQDLKVAKDVSVRLHHELKTVEEKRAKAEDENETLRQQMIEVEISKQALQNELERLKERGKQTSKQAKLTGKKAPKSKEDYGFNTV

SEQ ID NO: 11364 - protein, 507 aa, Artificial Sequence
  Synthetic polypeptide
METLNGPAGGGAPDAKLQPPGQHHRHHHLHPVAERRRLHRAPSPARPFLKDLHARPAAPGPAVPSSGRAPAPAAPRSPNLAGKAPPSPGSLAAPGRLSRRSGGVPGAKDKPPPGAGARAAGGAKAALGSRRAARVAPAEPLSRAGKPPGAEPPSAAAKGRKAKRGSRAPPARTVGPPTPAARIPAVTLAVTSVAGSPARCSRISHTDSSSDLSDCPSEPLSDEQRLLPAASSDAESGTGSSDREPPRGAPTPSPAARGAPPGSPEPPALLAAPLAAGACPGGRSIPSGVSGGFAGPGVAEDVRGRSPPERPVPGTPKEPSLGEQSRLVPAAEEEELLREMEELRSENDYLKDELDELRAEMEEMRDSYLEEDVYQLQELRRELDRANKNCRILQYRLRKAEQKSLKVAETGQVDGELIRSLEQDLKVAKDVSVRLHHELKTVEEKRAKAEDENETLRQQMIEVEISKQALQNELERLKERGKQTSKQAKLTGKKAPKSKEDYGFNTV

SEQ ID NO: 11365 - protein, 871 aa, Artificial Sequence
  Synthetic polypeptide
MEEMRDSYLEEDVYQLQELRRELDRANKNCRILQYRLRKAEQKSLKVAETGQVDGELIRSLEQDLKVAKDVSVRLHHELKTVEEKRAKAEDENETLRQQMIEVEISKQALQNELERLKESSLKRRSTREMYKEKKTFNQDDSADLRCQLQFAKEEAFLMRKKMAKLGREKDELEQELQKYKSLYGDVDSPLPTGEAGGPPSTREAELKLRLKLVEEEANILGRKIVELEVENRGLKAEMEDMRGQQEREGPGRDHAPSIPTSPFGDSLESSTELRRHLQFVEEEAELLRRSISEIEDHNRQLTHELSKFKFEPPREPGWLGEGASPGAGGGAPLQEELKSARLQISELSGKVLKLQHENHALLSNIQRCDLAAHLGLRAPSPRDSDAESDAGKKESDGEESRLPQPKREGPVGGESDSEEMFEKTSGFGSGKPSEASEPCPTELLKAREDSEYLVTLKHEAQRLERTVERLITDTDSFLHDAGLRGGAPLPGPGLQGEEEQGEGDQQEPQLLGTINAKMKAFKKELQAFLEQVNRIGDGLSPLPHLTESSSFLSTVTSVSRDSPIGNLGKELGPDLQSRLKEQLEWQLGPARGDERESLRLRAARELHRRADGDTGSHGLGGQTCFSLELRGPPVLPEQSVSIEELQGQLVQAARLHQEETETFTNKIHKMEEEHLYALRWKELEMHSLALQNTLHERTWSDEKNLMQQELRSLKQNIFLFYVKLRWLLKHWRQGKQMEEEGEEFTEGEHPETLSRLGELGVQGGHQADGPDHDSDRGCGFPVGEHSPHSRVQIGDHSLRLQTADRGQPHKQVVENQQLFSAFKALLEDFRAELREDERARLRLQQQYASDKAAWDVEWAVLKCRLEQATS

SEQ ID NO: 11366 - protein, 830 aa, Artificial Sequence
  Synthetic polypeptide
MEEMRDSYLEEDVYQLQELRRELDRANKNCRILQYRLRKAEQKSLKVAETGQVDGELIRSLEQDLKVAKDVSVRLHHELKTVEEKRAKAEDENETLRQQMIEVEISKQALQNELERLKESSLKRRSTREMYKEKKTFNQDDSADLRCQLQFAKEEAFLMRKKMAKLGREKDELEQELQKYKSLYGDVDSPLPTGEAGGPPSTREAELKLRLKLVEEEANILGRKIVELEVENRGLKAEMEDMRGQQEREGPGRDHAPSIPTSPFGDSLESSTELRRHLQFVEEEAELLRRSISEIEDHNRQLTHELSKFKFEPPREPGWLGEGASPGAGGGAPLQEELKSARLQISELSGKVLKLQHENHALLSNIQRCDLAAHLGLRAPSPRDSDAESDAGKKESDGEESRLPQPKREGPVGGESDSEEMFEKTSGFGSGKPSEASEPCPTELLKAREDSEYLVTLKHEAQRLERTVERLITDTDSFLHDAGLRGGAPLPGPGLQGEEEQGEGDQQEPQLLGTINAKMKAFKKELQAFLEQVNRIGDGLSPLPHLTESSSFLSTVTSVSRDSPIGNLGKELGPDLQSRLKEQLEWQLGPARGDERESLRLRAARELHRRADGDTGSHGLGGQTCFSLEMEEEHLYALRWKELEMHSLALQNTLHERTWSDEKNLMQQELRSLKQNIFLFYVKLRWLLKHWRQGKQMEEEGEEFTEGEHPETLSRLGELGVQGGHQADGPDHDSDRGCGFPVGEHSPHSRVQIGDHSLRLQTADRGQPHKQVVENQQLFSAFKALLEDFRAELREDERARLRLQQQYASDKAAWDVEWAVLKCRLEQATS

SEQ ID NO: 11367 - protein, 1190 aa, Artificial Sequence
  Synthetic polypeptide
METLNGPAGGGAPDAKLQPPGQHHRHHHLHPVAERRRLHRAPSPARPFLKDLHARPAAPGPAVPSSGRAPAPAAPRSPNLAGKAPPSPGSLAAPGRLSRRSGGVPGAKDKPPPGAGARAAGGAKAALGSRRAARVAPAEPLSRAGKPPGAEPPSAAAKGRKAKRGSRAPPARTVGPPTPAARIPAVTLAVTSVAGSPARCSRISHTDSSSDLSDCPSEPLSDEQRLLPAASSDAESGTGSSDREPPRGAPTPSPAARGAPPGSPEPPALLAAPLAAGACPGGRSIPSGVSGGFAGPGVAEDVRGRSPPERPVPGTPKEPSLGEQSRLVPAAEEEELLREMEELRSENDYLKDELDELRAEMEEMRDSYLEEDVYQLQELRRELDRANKNCRILQYRLRKAEQKSLKVAETGQVDGELIRSLEQDLKVAKDVSVRLHHELKTVEEKRAKAEDENETLRQQMIEVEISKQALQNELERLKESSLKRRSTREMYKEKKTFNQDDSADLRCQLQFAKEEAFLMRKKMAKLGREKDELEQELQKYKSLYGDVDSPLPTGEAGGPPSTREAELKLRLKLVEEEANILGRKIVELEVENRGLKAEMEDMRGQQEREGPGRDHAPSIPTSPFGDSLESSTELRRHLQFVEEEAELLRRSISEIEDHNRQLTHELSKFKFEPPREPGWLGEGASPGAGGGAPLQEELKSARLQISELSGKVLKLQHENHALLSNIQRCDLAAHLGLRAPSPRDSDAESDAGKKESDGEESRLPQPKREGPVGGESDSEEMFEKTSGFGSGKPSEASEPCPTELLKAREDSEYLVTLKHEAQRLERTVERLITDTDSFLHDAGLRGGAPLPGPGLQGEEEQGEGDQQEPQLLGTINAKMKAFKKELQAFLEQVNRIGDGLSPLPHLTESSSFLSTVTSVSRDSPIGNLGKELGPDLQSRLKEQLEWQLGPARGDERESLRLRAARELHRRADGDTGSHGLGGQTCFSLEMEEEHLYALRWKELEMHSLALQNTLHERTWSDEKNLMQQELRSLKQNIFLFYVKLRWLLKHWRQGKQMEEEGEEFTEGEHPETLSRLGELGVQGGHQADGPDHDSDRGCGFPVGEHSPHSRVQIGDHSLRLQTADRGQPHKQVVENQQLFSAFKALLEDFRAELREDERARLRLQQQYASDKAAWDVEWAVLKCRLEQATS

SEQ ID NO: 11368 - protein, 186 aa, Artificial Sequence
  Synthetic polypeptide
MHSLALQNTLHERTWSDEKNLMQQELRSLKQNIFLFYVKLRWLLKHWRQGKQMEEEGEEFTEGEHPETLSRLGELGVQGGHQADGPDHDSDRGCGFPVGEHSPHSRVQIGDHSLRLQTADRGQPHKQVVENQQLFSAFKALLEDFRAELREDERARLRLQQQYASDKAAWDVEWAVLKCRLEQATS

SEQ ID NO: 11369 - protein, 30 aa, Artificial Sequence; identical to SEQ ID NO: 1367
  Synthetic polypeptide

SEQ ID NO: 11370 - protein, 49 aa, Artificial Sequence
  Synthetic polypeptide
MASASGAMAKHEQILVLDPPTDLKFKGIQAVIFPSPLAAFLVESVSCFG

SEQ ID NO: 11371 - protein, 256 aa, Artificial Sequence
  Synthetic polypeptide
MASASGAMAKHEQILVLDPPTDLKFKGPFTDVVTTNLKLRNPSDRKVCFKVKTTAPRRYCVRPNSGIIDPGSTVTVSVMLQPFDYDPNEKSKHKFMVQTIFAPPNTSDMEAVWKEAKPDELMDSKLRCVFEMPNENDKLGITPPGNAPTVTSMSSINNTVATPASYHTKDDPRGLSVLKQEKQKNDMEPSKAVPLNASKQDGPMPKPHSVSLNDTETRKLMEECKRLQGEMMKLSEENRHLRVHIAHSVITTSCLE

SEQ ID NO: 11372 - protein, 211 aa, Artificial Sequence
  Synthetic polypeptide
MASASGAMAKHEQILVLDPPTDLKFKGPFTDVVTTNLKLRNPSDRKVCFKVKTTAPRRYCVRPNSGIIDPGSTVTVSVMLQPFDYDPNEKSKHKFMVQTIFAPPNTSDMEAVWKEAKPDELMDSKLRCVFEMPNENDKLNDMEPSKAVPLNASKQDGPMPKPHSVSLNDTETRKLMEECKRLQGEMMKLSEENRHLRVHIAHSVITTSCLE

SEQ ID NO: 11373 - protein, 260 aa, Artificial Sequence
  Synthetic polypeptide
MASASGAMAKHEQILVLDPPTDLKFKGPFTDVVTTNLKLRNPSDRKVCFKVKTTAPRRYCVRPNSGIIDPGSTVTVSVMLQPFDYDPNEKSKHKFMVQTIFAPPNTSDMEAVWKEAKPDELMDSKLRCVFEMPNENDKLGITPPGNAPTVTSMSSINNTVATPASYHTKDDPRGLSVLKQEKQKNDMEPSKAVPLNASKQDGPMPKPHSVSLNDTETRKLMEECKRLQGEMMKLSEENRHLRAFRQLYFPVPLQLSWWSL

SEQ ID NO: 11374 - protein, 215 aa, Artificial Sequence
  Synthetic polypeptide
MASASGAMAKHEQILVLDPPTDLKFKGPFTDVVTTNLKLRNPSDRKVCFKVKTTAPRRYCVRPNSGIIDPGSTVTVSVMLQPFDYDPNEKSKHKFMVQTIFAPPNTSDMEAVWKEAKPDELMDSKLRCVFEMPNENDKLNDMEPSKAVPLNASKQDGPMPKPHSVSLNDTETRKLMEECKRLQGEMMKLSEENRHLRAFRQLYFPVPLQLSWWSL

SEQ ID NO: 11375 - protein, 111 aa, Artificial Sequence
  Synthetic polypeptide
MGPWGWKLRWTVALLLAAAGTAVGDRCERNEFQCQDGKCISYKWVCDGSAECQDGSDESQETCLSVTCKSGDFSCGGRVNRCIPQFWRCDGQVDCDNGSDEQGCPIIRHLG

SEQ ID NO: 11376 - protein, 196 aa, Artificial Sequence
  Synthetic polypeptide
  misc_feature (1)..(1): Xaa can be any naturally occurring amino acid
XGRPGVPPRFLSQRRRQVPGPRSRLRDIHESPSVILGPPGEVPGFRCALWRHLRPHLVLGGALAPPAPIKFTEGPPATLKASVPYEVETLPQNLPAPPWSAAEIFSHVGDRCERNEFQCQDGKCISYKWVCDGSAECQDGSDESQETCLSVTCKSGDFSCGGRVNRCIPQFWRCDGQVDCDNGSDEQGCPIIRHLG

SEQ ID NO: 11377 - protein, 695 aa, Artificial Sequence
  Synthetic polypeptide
MGPWGWKLRWTVALLLAAAGTAVGDRCERNEFQCQDGKCISYKWVCDGSAECQDGSDESQETCLSVTCKSGDFSCGGRVNRCIPQFWRCDGQVDCDNGSDEQGCLTLCEGPNKFKCHSGECITLDKVCNMARDCRDWSDEPIKECGTNECLDNNGGCSHVCNDLKIGYECLCPDGFQLVAQRRCEDIDECQDPDTCSQLCVNLEGGYKCQCEEGFQLDPHTKACKAVGSIAYLFFTNRHEVRKMTLDRSEYTSLIPNLRNVVALDTEVASNRIYWSDLSQRMICSTQLDRAHGVSSYDTVISRDIQAPDGLAVDWIHSNIYWTDSVLGTVSVADTKGVKRKTLFRENGSKPRAIVVDPVHGFMYWTDWGTPAKIKKGGLNGVDIYSLVTENIQWPNGITLDLLSGRLYWVDSKLHSISSIDVNGGNRKTILEDEKRLAHPFSLAVFEDKVFWTDIINEAIFSANRLTGSDVNLLAENLLSPEDMVLFHNLTQPRGVNWCERTTLSNGGCQYLCLPAPQINPHSPKFTCACPDGMLLARDMRSCLTEAEAAVATQETSTVRLKVSSTAVRTQHTTTRPVPDTSRLPGATPGLTTVEIVTMSHQALGDVAGRGNEKKPSSVRALSIVLPIVLLVFLCLGVFLLWKNWRLKNINSINFDNPVYQKTTEDEVHICHNQDGYSYPSTQVPHACNPSTLGG

SEQ ID NO: 11378 - protein, 897 aa, Artificial Sequence
  Synthetic polypeptide
MGPWGWKLRWTVALLLAAAGTAVGDRCERNEFQCQDGKCISYKWVCDGSAECQDGSDESQETCLSVTCKSGDFSCGGRVNRCIPQFWRCDGQVDCDNGSDEQGCPPKTCSQDEFRCHDGKCISRQFVCDSDRDCLDGSDEASCPVLTCGPASFQCNSSTCIPQLWACDNDPDCEDGSDEWPQRCRGLYVFQGDSSPCSAFEFHCLSGECIHSSWRCDGGPDCKDKSDEENCAVATCRPDEFQCSDGNCIHGSRQCDREYDCKDMSDEVGCVNVTLCEGPNKFKCHSGECITLDKVCNMARDCRDWSDEPIKECGTNECLDNNGGCSHVCNDLKIGYECLCPDGFQLVAQRRCEDIDECQDPDTCSQLCVNLEGGYKCQCEEGFQLDPHTKACKAVGSIAYLFFTNRHEVRKMTLDRSEYTSLIPNLRNVVALDTEVASNRIYWSDLSQRMICSTQLDRAHGVSSYDTVISRDIQAPDGLAVDWIHSNIYWTDSVLGTVSVADTKGVKRKTLFRENGSKPRAIVVDPVHGFMYWTDWGTPAKIKKGGLNGVDIYSLVTENIQWPNGITLDLLSGRLYWVDSKLHSISSIDVNGGNRKTILEDEKRLAHPFSLAVFEDKVFWTDIINEAIFSANRLTGSDVNLLAENLLSPEDMVLFHNLTQPRGVNWCERTTLSNGGCQYLCLPAPQINPHSPKFTCACPDGMLLARDMRSCLTEAEAAVATQETSTVRLKVSSTAVRTQHTTTRPVPDTSRLPGATPGLTTVEIVTMSHQALGDVAGRGNEKKPSSVRALSIVLPIATELGLWSRGQLCDRACLSLQCSSSSFAWGSSFYGRTGGLRTSTASTLTTPSIRRPQRMRSTFATTRTATATPRHRCLTPVIPALWEAELDHLSSGVGDQA

SEQ ID NO: 11379 - protein, 863 aa, Artificial Sequence
  Synthetic polypeptide
MGPWGWKLRWTVALLLAAAGTAVGDRCERNEFQCQDGKCISYKWVCDGSAECQDGSDESQETCLSVTCKSGDFSCGGRVNRCIPQFWRCDGQVDCDNGSDEQGCPPKTCSQDEFRCHDGKCISRQFVCDSDRDCLDGSDEASCPVLTCGPASFQCNSSTCIPQLWACDNDPDCEDGSDEWPQRCRGLYVFQGDSSPCSAFEFHCLSGECIHSSWRCDGGPDCKDKSDEENCAVATCRPDEFQCSDGNCIHGSRQCDREYDCKDMSDEVGCVNVTLCEGPNKFKCHSGECITLDKVCNMARDCRDWSDEPIKECGTNECLDNNGGCSHVCNDLKIGYECLCPDGFQLVAQRRCEDIDECQDPDTCSQLCVNLEGGYKCQCEEGFQLDPHTKACKAVGSIAYLFFTNRHEVRKMTLDRSEYTSLIPNLRNVVALDTEVASNRIYWSDLSQRMICSTQLDRAHGVSSYDTVISRDIQAPDGLAVDWIHSNIYWTDSVLGTVSVADTKGVKRKTLFRENGSKPRAIVVDPVHGFMYWTDWGTPAKIKKGGLNGVDIYSLVTENIQWPNGITLDLLSGRLYWVDSKLHSISSIDVNGGNRKTILEDEKRLAHPFSLAVFEDKVFWTDIINEAIFSANRLTGSDVNLLAENLLSPEDMVLFHNLTQPRGVNWCERTTLSNGGCQYLCLPAPQINPHSPKFTCACPDGMLLARDMRSCLTEAEAAVATQETSTVRLKVSSTAVRTQHTTTRPVPDTSRLPGATPGLTTVEIVTMSHQALGDVAGRGNEKKPSSVRALSIVLPIVLLVFLCLGVFLLWKNWRLKNINSINFDNPVYQKTTEDEVHICHNQDGYSYPSTQVPHACNPSTLGG

SEQ ID NO: 11380 - protein, 685 aa, Artificial Sequence
  Synthetic polypeptide
MGPWGWKLRWTVALLLAAAGTAVGDRCERNEFQCQDGKCISYKWVCDGSAECQDGSDESQETCLSVTCKSGDFSCGGRVNRCIPQFWRCDGQVDCDNGSDEQGCPVATCRPDEFQCSDGNCIHGSRQCDREYDCKDMSDEVGCVNVTLCEGPNKFKCHSGECITLDKVCNMARDCRDWSDEPIKECGTNECLDNNGGCSHVCNDLKIGYECLCPDGFQLVAQRRCEDIDECQDPDTCSQLCVNLEGGYKCQCEEGFQLDPHTKACKAVGSIAYLFFTNRHEVRKMTLDRSEYTSLIPNLRNVVALDTEVASNRIYWSDLSQRMICSTQLDRAHGVSSYDTVISRDIQAPDGLAVDWIHSNIYWTDSVLGTVSVADTKGVKRKTLFRENGSKPRAIVVDPVHGFMYWTDWGTPAKIKKGGLNGVDIYSLVTENIQWPNGITLDLLSGRLYWVDSKLHSISSIDVNGGNRKTILEDEKRLAHPFSLAVFEDKVFWTDIINEAIFSANRLTGSDVNLLAENLLSPEDMVLFHNLTQPREAEAAVATQETSTVRLKVSSTAVRTQHTTTRPVPDTSRLPGATPGLTTVEIVTMSHQALGDVAGRGNEKKPSSVRALSIVLPIVLLVFLCLGVFLLWKNWRLKNINSINFDNPVYQKTTEDEVHICHNQDGYSYPSTQVPHACNPSTLGG

SEQ ID NO: 11381 - protein, 822 aa, Artificial Sequence
  Synthetic polypeptide
MGPWGWKLRWTVALLLAAAGTAVGDRCERNEFQCQDGKCISYKWVCDGSAECQDGSDESQETCSPKTCSQDEFRCHDGKCISRQFVCDSDRDCLDGSDEASCPVLTCGPASFQCNSSTCIPQLWACDNDPDCEDGSDEWPQRCRGLYVFQGDSSPCSAFEFHCLSGECIHSSWRCDGGPDCKDKSDEENCAVATCRPDEFQCSDGNCIHGSRQCDREYDCKDMSDEVGCVNVTLCEGPNKFKCHSGECITLDKVCNMARDCRDWSDEPIKECGTNECLDNNGGCSHVCNDLKIGYECLCPDGFQLVAQRRCEDIDECQDPDTCSQLCVNLEGGYKCQCEEGFQLDPHTKACKAVGSIAYLFFTNRHEVRKMTLDRSEYTSLIPNLRNVVALDTEVASNRIYWSDLSQRMICSTQLDRAHGVSSYDTVISRDIQAPDGLAVDWIHSNIYWTDSVLGTVSVADTKGVKRKTLFRENGSKPRAIVVDPVHGFMYWTDWGTPAKIKKGGLNGVDIYSLVTENIQWPNGITLDLLSGRLYWVDSKLHSISSIDVNGGNRKTILEDEKRLAHPFSLAVFEDKVFWTDIINEAIFSANRLTGSDVNLLAENLLSPEDMVLFHNLTQPRGVNWCERTTLSNGGCQYLCLPAPQINPHSPKFTCACPDGMLLARDMRSCLTEAEAAVATQETSTVRLKVSSTAVRTQHTTTRPVPDTSRLPGATPGLTTVEIVTMSHQALGDVAGRGNEKKPSSVRALSIVLPIVLLVFLCLGVFLLWKNWRLKNINSINFDNPVYQKTTEDEVHICHNQDGYSYPSTQVPHACNPSTLGG

SEQ ID NO: 11382 - protein, 948 aa, Artificial Sequence
  Synthetic polypeptide
  misc_feature (1)..(1): Xaa can be any naturally occurring amino acid
XGRPGVPPRFLSQRRRQVPGPRSRLRDIHESPSVILGPPGEVPGFRCALWRHLRPHLVLGGALAPPAPIKFTEGPPATLKASVPYEVETLPQNLPAPPWSAAEIFSHVGDRCERNEFQCQDGKCISYKWVCDGSAECQDGSDESQETCLSVTCKSGDFSCGGRVNRCIPQFWRCDGQVDCDNGSDEQGCPPKTCSQDEFRCHDGKCISRQFVCDSDRDCLDGSDEASCPVLTCGPASFQCNSSTCIPQLWACDNDPDCEDGSDEWPQRCRGLYVFQGDSSPCSAFEFHCLSGECIHSSWRCDGGPDCKDKSDEENCAVATCRPDEFQCSDGNCIHGSRQCDREYDCKDMSDEVGCVNVTLCEGPNKFKCHSGECITLDKVCNMARDCRDWSDEPIKECGTNECLDNNGGCSHVCNDLKIGYECLCPDGFQLVAQRRCEDIDECQDPDTCSQLCVNLEGGYKCQCEEGFQLDPHTKACKAVGSIAYLFFTNRHEVRKMTLDRSEYTSLIPNLRNVVALDTEVASNRIYWSDLSQRMICSTQLDRAHGVSSYDTVISRDIQAPDGLAVDWIHSNIYWTDSVLGTVSVADTKGVKRKTLFRENGSKPRAIVVDPVHGFMYWTDWGTPAKIKKGGLNGVDIYSLVTENIQWPNGITLDLLSGRLYWVDSKLHSISSIDVNGGNRKTILEDEKRLAHPFSLAVFEDKVFWTDIINEAIFSANRLTGSDVNLLAENLLSPEDMVLFHNLTQPRGVNWCERTTLSNGGCQYLCLPAPQINPHSPKFTCACPDGMLLARDMRSCLTEAEAAVATQETSTVRLKVSSTAVRTQHTTTRPVPDTSRLPGATPGLTTVEIVTMSHQALGDVAGRGNEKKPSSVRALSIVLPIVLLVFLCLGVFLLWKNWRLKNINSINFDNPVYQKTTEDEVHICHNQDGYSYPSTQVPHACNPSTLGG

SEQ ID NO: 11383 - protein, 374 aa, Artificial Sequence
  Synthetic polypeptide
MDDSGLIRRRRLQKDLPLPRKSSSCRTSNRKSLILTSTSPTLPRPHSPLPGHLGSSPLDSPRNFSPNTPAHFSFASSRRADGRRWSLASLPSSGYGTNTPSSTVSSSCSSQERLHQLPYQPTVDELHFLSKHFGSTESITDEDGGRRSPAVRPRSRSLSPGRSPSSYDNEIVMMNHVYKERFPKATAQMEEKLRDFTRAYEPDSVLPLADGVLSFIHHQIIELARDCLTKSRDGLITTVYFYELQENLEKLLQDAYERSESLEVAFVTQLVKKLLIIISRPARLLECLEFNPEEFYHLLEAAEGHAKEGHLVKTDIPRYIIRQLGLTRDPFPDVVHLEEQDSGGSNTPEQDDLSEALWISWSYTLSLSFPIHKM

SEQ ID NO: 11384 - protein, 378 aa, Artificial Sequence
  Synthetic polypeptide
MSDSLWTALSNFSMPSFPGGSMFRRTKSCRTSNRKSLILTSTSPTLPRPHSPLPGHLGSSPLDSPRNFSPNTPAHFSFASSRRADGRRWSLASLPSSGYGTNTPSSTVSSSCSSQERLHQLPYQPTVDELHFLSKHFGSTESITDEDGGRRSPAVRPRSRSLSPGRSPSSYDNEIVMMNHVYKERFPKATAQMEEKLRDFTRAYEPDSVLPLADGVLSFIHHQIIELARDCLTKSRDGLITTVYFYELQENLEKLLQDAYERSESLEVAFVTQLVKKLLIIISRPARLLECLEFNPEEFYHLLEAAEGHAKEGHLVKTDIPRYIIRQLGLTRDPFPDVVHLEEQDSGGSNTPEQDDLSEALWISWSYTLSLSFPIHKM

SEQ ID NO: 11385 - protein, 332 aa, Artificial Sequence
  Synthetic polypeptide
  misc_feature (1)..(1): Xaa can be any naturally occurring amino acid
XRPHSPLPGHLGSSPLDSPRNFSPNTPAHFSFASSRRADGRRWSLASLPSSGYGTNTPSSTVSSSCSSQERLHQLPYQPTVDELHFLSKHFGSTESITDEDGGRRSPAVRPRSRSLSPGRSPSSYDNEIVMMNHVYKERFPKATAQMEEKLRDFTRAYEPDSVLPLADGVLSFIHHQIIELARDCLTKSRDGLITTVYFYELQENLEKLLQDAYERSESLEVAFVTQLVKKLLIIISRPARLLECLEFNPEEFYHLLEAAEGHAKEGHLVKTDIPRYIIRQLGLTRDPFPDVVHLEEQDSGGSNTPEQDDLSEALWISWSYTLSLSFPIHKM

SEQ ID NO: 11386 - protein, 396 aa, Artificial Sequence
  Synthetic polypeptide
MDDSGLIRRRRLQKDLPLPRKSSSCRTSNRKSLILTSTSPTLPRPHSPLPGHLGSSPLDSPRNFSPNTPAHFSFASSRRADGRRWSLASLPSSGYGTNTPSSTVSSSCSSQERLHQLPYQPTVDELHFLSKHFGSTESITDEDGGRRSPAVRPRSRSLSPGRSPSSYDNEIVMMNHVYKERFPKATAQMEEKLRDFTRAYEPDSVLPLADGVLSFIHHQIIELARDCLTKSRDGLITTVYFYELQENLEKLLQDAYERSESLEVAFVTQLVKKLLIIISRPARLLECLEFNPEEFYHLLEAAEGHAKEGHLVKTDIPRYIIRQLGLTRDPFPDVVHLEEQDSGGSNTPEQDDLSELLVRLRQKNHLNPGGRDCCELRLHHCTPAWATRAKLSQKIK

SEQ ID NO: 11387 - protein, 400 aa, Artificial Sequence
  Synthetic polypeptide
MSDSLWTALSNFSMPSFPGGSMFRRTKSCRTSNRKSLILTSTSPTLPRPHSPLPGHLGSSPLDSPRNFSPNTPAHFSFASSRRADGRRWSLASLPSSGYGTNTPSSTVSSSCSSQERLHQLPYQPTVDELHFLSKHFGSTESITDEDGGRRSPAVRPRSRSLSPGRSPSSYDNEIVMMNHVYKERFPKATAQMEEKLRDFTRAYEPDSVLPLADGVLSFIHHQIIELARDCLTKSRDGLITTVYFYELQENLEKLLQDAYERSESLEVAFVTQLVKKLLIIISRPARLLECLEFNPEEFYHLLEAAEGHAKEGHLVKTDIPRYIIRQLGLTRDPFPDVVHLEEQDSGGSNTPEQDDLSELLVRLRQKNHLNPGGRDCCELRLHHCTPAWATRAKLSQKIK

SEQ ID NO: 11388 - protein, 354 aa, Artificial Sequence
  Synthetic polypeptide
  misc_feature (1)..(1): Xaa can be any naturally occurring amino acid
XRPHSPLPGHLGSSPLDSPRNFSPNTPAHFSFASSRRADGRRWSLASLPSSGYGTNTPSSTVSSSCSSQERLHQLPYQPTVDELHFLSKHFGSTESITDEDGGRRSPAVRPRSRSLSPGRSPSSYDNEIVMMNHVYKERFPKATAQMEEKLRDFTRAYEPDSVLPLADGVLSFIHHQIIELARDCLTKSRDGLITTVYFYELQENLEKLLQDAYERSESLEVAFVTQLVKKLLIIISRPARLLECLEFNPEEFYHLLEAAEGHAKEGHLVKTDIPRYIIRQLGLTRDPFPDVVHLEEQDSGGSNTPEQDDLSELLVRLRQKNHLNPGGRDCCELRLHHCTPAWATRAKLSQKIK

SEQ ID NO: 11389 - protein, 381 aa, Artificial Sequence
  Synthetic polypeptide
MDDSGLIRRRRLQKDLPLPRKSSSCRTSNRKSLILTSTSPTLPRPHSPLPGHLGSSPLDSPRNFSPNTPAHFSFASSRRADGRRWSLASLPSSGYGTNTPSSTVSSSCSSQERLHQLPYQPTVDELHFLSKHFGSTESITDEDGGRRSPAVRPRSRSLSPGRSPSSYDNEIVMMNHVYKERFPKATAQMEEKLRDFTRAYEPDSVLPLADGVLSFIHHQIIELARDCLTKSRDGLITTVYFYELQENLEKLLQDAYERSESLEVAFVTQLVKKLLIIISRPARLLECLEFNPEEFYHLLEAAEGHAKEGHLVKTDIPRYIIRQLGLTRDPFPDVVHLEEQDSGGSNTPEQDDLSEWKKMRICLQSQSWVQVLTFSFIMALG

SEQ ID NO: 11390 - protein, 385 aa, Artificial Sequence
  Synthetic polypeptide
MSDSLWTALSNFSMPSFPGGSMFRRTKSCRTSNRKSLILTSTSPTLPRPHSPLPGHLGSSPLDSPRNFSPNTPAHFSFASSRRADGRRWSLASLPSSGYGTNTPSSTVSSSCSSQERLHQLPYQPTVDELHFLSKHFGSTESITDEDGGRRSPAVRPRSRSLSPGRSPSSYDNEIVMMNHVYKERFPKATAQMEEKLRDFTRAYEPDSVLPLADGVLSFIHHQIIELARDCLTKSRDGLITTVYFYELQENLEKLLQDAYERSESLEVAFVTQLVKKLLIIISRPARLLECLEFNPEEFYHLLEAAEGHAKEGHLVKTDIPRYIIRQLGLTRDPFPDVVHLEEQDSGGSNTPEQDDLSEWKKMRICLQSQSWVQVLTFSFIMALG

SEQ ID NO: 11391 - protein, 339 aa, Artificial Sequence
  Synthetic polypeptide
  misc_feature (1)..(1): Xaa can be any naturally occurring amino acid
XRPHSPLPGHLGSSPLDSPRNFSPNTPAHFSFASSRRADGRRWSLASLPSSGYGTNTPSSTVSSSCSSQERLHQLPYQPTVDELHFLSKHFGSTESITDEDGGRRSPAVRPRSRSLSPGRSPSSYDNEIVMMNHVYKERFPKATAQMEEKLRDFTRAYEPDSVLPLADGVLSFIHHQIIELARDCLTKSRDGLITTVYFYELQENLEKLLQDAYERSESLEVAFVTQLVKKLLIIISRPARLLECLEFNPEEFYHLLEAAEGHAKEGHLVKTDIPRYIIRQLGLTRDPFPDVVHLEEQDSGGSNTPEQDDLSEWKKMRICLQSQSWVQVLTFSFIMALG

SEQ ID NO: 11392 - protein, 181 aa, Artificial Sequence
  Synthetic polypeptide
MARFGDEMPARYGGGGSGAAAGVVVGSGGGRGAGGSRQGGQPGAQRMYKQSMAQRARTMALYNPIPVRQNCLTVNRSLFLFSEDNVVRKYAKKITEWPPFEYMILATIIANCIVLALEQHLPDDDKTPMSERLDDTEPYFIGIFCFEAGIKIIALGFAFHKGSYLRNGWNVMDFVVVLTGL

SEQ ID NO: 11393 - protein, 98 aa, Artificial Sequence
  Synthetic polypeptide
MSSWPTRPTKSTAPPRPGGKNGTTIIANCIVLALEQHLPDDDKTPMSERLDDTEPYFIGIFCFEAGIKIIALGFAFHKGSYLRNGWNVMDFVVVLTGL

SEQ ID NO: 11394 - protein, 270 aa, Artificial Sequence
  Synthetic polypeptide
MTLEAIRYSRGSLQILDQLLLPKQSRYEAVGSVHQAWEAIRAMKVRGAPAIALVGCLSLAVELQAGAGGPGLAALVAFVRDKLSFLVTARPTAVNMARAARDLADVAAREAEREGATEEAVRERRETELCEHWEEHTRQRELPLRGPLGGTVLETRPYNQGARLTAFELVYEQIPATLITDSMVAAAMAHRGVSAVVVGADRVVANGDTANKVGTYQLAIVAKHHGIPFYVAAPSSSCDLRLETGKEIIIEERPGQELTDVNGVRIAAPA

SEQ ID NO: 11395 - protein, 317 aa, Artificial Sequence
  Synthetic polypeptide
MTLEAIRYSRGSLQILDQLLLPKQSRYEAVGSVHQAWEAIRAMKVRGAPAIALVGCLSLAVELQAGAGGPGLAALVAFVRDKLSFLVTARPTAVNMARAARDLADVAAREAEREGATEEAVRERVICCTEDMLEKDLRDNRSIGDLGARHLLERVAPSGGKVTVLTHCNTGALATAGYGTALGVIRSLHSLGRLEHAFCTETRPYNQGARLTAFELVYEQIPATLITDSMVAAAMAHRGVSAVVVGADRVVANGDTANKVGTYQLAIVAKHHGIPFYVAAPSSSCDLRLETGKEIIIEERPGQELTDVNGVRIAAPA

SEQ ID NO: 11396 - protein, 600 aa, Artificial Sequence
  Synthetic polypeptide
MAEANNPSEQELESEPRSWSLLEQLGLAGADLAAPGVQQQLELERERLRREIRKELKLKEGAENLRRATTDLGRSLGPVELLLRGSSRRLDLLHQQLQELHAHVVLPDPAATHDGPQSPGAGGPTCSATNLSRVAGLEKQLAIELKVKQGAENMIQTYSNGSTKDRKLLLTAQQMLQDSKTKIDIIRMQLRRALQAGQLENQAAPDDTQGSPDLGAVELRIEELRHHFRVEHAVAEGAKNVLRLLSAAKAPDRKAVSEAQEKLTESNQKLGLLREALERRLGELPADHPKGRLLREELAAASSAAFSTRLAGPFPATHYSTLCKPAPLTGTLEVRVVGCRDLPETIPWNPTPSMGGPGTPDSRPPFLSRPARGLYSRSGSLSGRSSLKAEAENTSEVSTVLKLDNTVVGQTSWKPCGPNAWDQSFTLELERARELELAVFWRDQRGLCALKFLKLEDFLDNERHEVQLDMEPQGCLVAEVTFRNPVIERIPRLRRQKKIFSKQQGKAFQRARQMNIDVATWVRLLRRLIPNATGTGTFSPGASPGSEARTTGDISVEKLNLGTDSDSSPQKSSRDPPSSPSSLSQLLRKLNEEDRLRPEV

SEQ ID NO: 11397 - protein, 594 aa, Artificial Sequence
  Synthetic polypeptide
MASDAVQSEPRSWSLLEQLGLAGADLAAPGVQQQLELERERLRREIRKELKLKEGAENLRRATTDLGRSLGPVELLLRGSSRRLDLLHQQLQELHAHVVLPDPAATHDGPQSPGAGGPTCSATNLSRVAGLEKQLAIELKVKQGAENMIQTYSNGSTKDRKLLLTAQQMLQDSKTKIDIIRMQLRRALQAGQLENQAAPDDTQGSPDLGAVELRIEELRHHFRVEHAVAEGAKNVLRLLSAAKAPDRKAVSEAQEKLTESNQKLGLLREALERRLGELPADHPKGRLLREELAAASSAAFSTRLAGPFPATHYSTLCKPAPLTGTLEVRVVGCRDLPETIPWNPTPSMGGPGTPDSRPPFLSRPARGLYSRSGSLSGRSSLKAEAENTSEVSTVLKLDNTVVGQTSWKPCGPNAWDQSFTLELERARELELAVFWRDQRGLCALKFLKLEDFLDNERHEVQLDMEPQGCLVAEVTFRNPVIERIPRLRRQKKIFSKQQGKAFQRARQMNIDVATWVRLLRRLIPNATGTGTFSPGASPGSEARTTGDISVEKLNLGTDSDSSPQKSSRDPPSSPSSLSQLLRKLNEEDRLRPEV

SEQ ID NO: 11398 - protein, 80 aa, Artificial Sequence
  Synthetic polypeptide
WVRLLRRLIPNATGTGTFSPGASPGSEARTTGDISVEKLNLGTDSDSSPQKSSRDPPSSPSSLSQLLRKLNEEDRLRPEV

SEQ ID NO: 11399 - protein, 228 aa, Artificial Sequence
  Synthetic polypeptide
MGGRVFLVFLAFCVWLTLPGAETQDSRGCARWCPQDSSCVNATACRCNPGFSSFSEIITTPMETCDDINECATLSKVSCGKFSDCWNTEGSYDCVCSPGYEPVSGAKTFKNESENTCQDMTFSTWTPPPGVHSQTLSRFFDKVQDLGRDYKPGLANNTIQSILQALDELLEAPGDLETLPRLQQHCVASHLLDGLEDVLRGLSKNLSNGLLNFSYPAGTGQDPISKKR

SEQ ID NO: 11400 - protein, 321 aa, Artificial Sequence
  Synthetic polypeptide
MGGRVFLVFLAFCVWLTLPGAETQDSRGCARWCPQDSSCVNATACRCNPGFSSFSEIITTPMETCDDINECATLSKVSCGKFSDCWNTEGSYDCVCSPGYEPVSGAKTFKNESENTCQDVDECQQNPRLCKSYGTCVNTLGSYTCQCLPGFKLKPEDPKLCTDVDECSSGQHQCDSSTVCFNTVGSYSCRCRPGWKPRHGIPNNQKDTVCEDMTFSTWTPPPGVHSQTLSRFFDKVQDLGRDYKPGLANNTIQSILQALDELLEAPGDLETLPRLQQHCVASHLLDGLEDVLRGLSKNLSNGLLNFSYPAGTGQDPISKKR

SEQ ID NO: 11401 - protein, 370 aa, Artificial Sequence
  Synthetic polypeptide
MGGRVFLVFLAFCVWLTLPGAETQDSRGCARWCPQDSSCVNATACRCNPGFSSFSEIITTPMETCDDINECATLSKVSCGKFSDCWNTEGSYDCVCSPGYEPVSGAKTFKNESENTCQDVDECQQNPRLCKSYGTCVNTLGSYTCQCLPGFKLKPEDPKLCTDVNECTSGQNPCHSSTHCLNNVGSYQCRCRPGWQPIPGSPNGPNNTVCEDVDECSSGQHQCDSSTVCFNTVGSYSCRCRPGWKPRHGIPNNQKDTVCEDMTFSTWTPPPGVHSQTLSRFFDKVQDLGRDYKPGLANNTIQSILQALDELLEAPGDLETLPRLQQHCVASHLLDGLEDVLRGLSKNLSNGLLNFSYPAGTGQDPISKKR

SEQ ID NO: 11402 - protein, 277 aa, Artificial Sequence
  Synthetic polypeptide
MGGRVFLVFLAFCVWLTLPGAETQDSRGCARWCPQDSSCVNATACRCNPGFSSFSEIITTPMETCDDINECATLSKVSCGKFSDCWNTEGSYDCVCSPGYEPVSGAKTFKNESENTCQDVDECSSGQHQCDSSTVCFNTVGSYSCRCRPGWKPRHGIPNNQKDTVCEDMTFSTWTPPPGVHSQTLSRFFDKVQDLGRDYKPGLANNTIQSILQALDELLEAPGDLETLPRLQQHCVASHLLDGLEDVLRGLSKNLSNGLLNFSYPAGTGQDPISKKR

SEQ ID NO: 11403 - protein, 109 aa, Artificial Sequence
  Synthetic polypeptide
MTFSTWTPPPGVHSQTLSRFFDKVQDLGRDYKPGLANNTIQSILQALDELLEAPGDLETLPRLQQHCVASHLLDGLEDVLRGLSKNLSNGLLNFSYPAGTGQDPISKKR

SEQ ID NO: 11404 - protein, 214 aa, Artificial Sequence
  Synthetic polypeptide
  misc_feature (1)..(1): Xaa can be any naturally occurring amino acid
XFKNESENTCQDVDECQQNPRLCKSYGTCVNTLGSYTCQCLPGFKLKPEDPKLCTDVDECSSGQHQCDSSTVCFNTVGSYSCRCRPGWKPRHGIPNNQKDTVCEDMTFSTWTPPPGVHSQTLSRFFDKVQDLGRDYKPGLANNTIQSILQALDELLEAPGDLETLPRLQQHCVASHLLDGLEDVLRGLSKNLSNGLLNFSYPAGTGQDPISKKR

SEQ ID NO: 11405 - protein, 248 aa, Artificial Sequence; identical to SEQ ID NO: 786
  Synthetic polypeptide

SEQ ID NO: 11406 - protein, 341 aa, Artificial Sequence; identical to SEQ ID NO: 627
  Synthetic polypeptide

SEQ ID NO: 11407 - protein, 390 aa, Artificial Sequence; identical to SEQ ID NO: 544
  Synthetic polypeptide

SEQ ID NO: 11408 - protein, 297 aa, Artificial Sequence; identical to SEQ ID NO: 685
  Synthetic polypeptide

SEQ ID NO: 11409 - protein, 129 aa, Artificial Sequence; identical to SEQ ID NO: 1081
  Synthetic polypeptide

SEQ ID NO: 11410 - protein, 234 aa, Artificial Sequence
  Synthetic polypeptide
  misc_feature (1)..(1): Xaa can be any naturally occurring amino acid
XFKNESENTCQDVDECQQNPRLCKSYGTCVNTLGSYTCQCLPGFKLKPEDPKLCTDVDECSSGQHQCDSSTVCFNTVGSYSCRCRPGWKPRHGIPNNQKDTVCEDMTFSTWTPPPGVHSQTLSRFFDKVQDLGRDYKPGLANNTIQSILQALDELLEAPGDLETLPRLQQHCVASHLLDGLEDVLRGLSKNLSNGLLNFSYPAGTDRCDGTTVAPASWEAEVRGSLEPRRLSLQ

SEQ ID NO: 11411 - protein, 124 aa, Artificial Sequence
  Synthetic polypeptide
MGGRVFLVFLAFCVWLTLPGAETQDSRGCARWCPQDSSCVNATACRCNPGFSSFSEIITTPMETCDDINECATLSKVSCGKFSDCWNTEGSYDCVCSPGYEPVSGAKTFKNESENTCQGGPRKE

SEQ ID NO: 11412 - protein, 17 aa, Artificial Sequence
  Synthetic polypeptide
  misc_feature (1)..(1): Xaa can be any naturally occurring amino acid
XFKNESENTCQGGPRKE

SEQ ID NO: 11413 - protein, 51 aa, Artificial Sequence
  Synthetic polypeptide
MAKTYDYLFKLLLIGDSGVGKTCVLFRFSEDAFNSTFISTIGTCGPSYSGG

SEQ ID NO: 11414 - protein, 176 aa, Artificial Sequence
  Synthetic polypeptide
MAPGALRGGCEQRAPGGGARTAALGPWPWPSPGPAPSPGAAPPRSRKMSGALLWPLLPLLLLLLSARDGVRAAQPQAPGYLIAAPSVFRAGVEEVISVTIFNSPREVTVQAQLVAQGEPVVQSQGAILDKGTIKLKTCLSPFAMIVRPPQPRETVSPLNLFFFINYPVSGMSLSPV

SEQ ID NO: 11415 - protein, 129 aa, Artificial Sequence
  Synthetic polypeptide
MSGALLWPLLPLLLLLLSARDGVRAAQPQAPGYLIAAPSVFRAGVEEVISVTIFNSPREVTVQAQLVAQGEPVVQSQGAILDKGTIKLKTCLSPFAMIVRPPQPRETVSPLNLFFFINYPVSGMSLSPV

SEQ ID NO: 11416 - protein, 125 aa, Artificial Sequence; identical to SEQ ID NO: 1083
  Synthetic polypeptide

SEQ ID NO: 11417 - protein, 1236 aa, Artificial Sequence
  Synthetic polypeptide
MGGGGTCTISVQVRVCTGGNLLGGRRRPLSPCNEEVWGEAPLPGARPFNAPPARSAPAPSGVPGLRLPAPHQRHSRPGRLRPTCELGDMSLLCVGVKKAKFDGAQEKFNTYVTLKVQNVKSTTIAVRGSQPSWEQDFMFEINRLDLGLTVEVWNKGLIWDTMVGTVWIPLRTIRQSNEEGPGEWLTLDSQVIMADSEICGTKDPTFHRILLDTRFELPLDIPEEEARYWAKKLEQLNAMRDQDEYSFQDEQDKPLPVPSNQCCNWNYFGWGEQHNDDPDSAVDDRDSDYRSETSNSIPPPYYTTSQPNASVHQYSVRPPPLGSRESYSDSMHSYEEFSEPQALSPTGSSRYASSGELSQGSSQLSEDFDPDEHSLQGSDMEDERDRDSYHSCHSSVSYHKDSPRWDQDEEELEEDLEDFLEEEELPEDEEELEEEEEEVPDDLGSYAQREDVAVAEPKDFKRISLPPAAPGKEDKAPVAPTEAPDMAKVAPKPATPDKVPAAEQIPEAEPPKDEESFRPREDEEGQEGQDSMSRAKANWLRAFNKVRMQLQEARGEGEMSKSLWFKGGPGGGLIIIDSMPDIRKRKPIPLVSDLAMSLVQSRKAGITSALASSTLNNEELKNHVYKKTLQALIYPISCTTPHNFEVWTATTPTYCYECEGLLWGIARQGMRCTECGVKCHEKCQDLLNADCLQRAAEKSSKHGAEDRTQNIIMVLKDRMKIRERNKPEIFELIQEIFAVTKTAHTQQMKAVKQSVLDGTSKWSAKISITVVCAQGLQAKDKTGSSDPYVTVQVGKTKKRTKTIYGNLNPVWEENFHFECHNSSDRIKVRVWDEDDDIKSRVKQRFKRESDDFLGQTIIEVRTLSGEMDVWYNLDKRTDKSAVSGAIRLHISVEIKGEEKVAPYHVQYTCLHENLFHFVTDVQNNGVVKIPDAKGDDAWKVYYDETAQEIVDEFAMRYGVESIYQAMTHFACLSSKYMCPGVPAVMSTLLANINAYYAHTTASTNVSASDRFAASNFGKERFVKLLDQLHNSLRIDLSMYRNNFPASSPERLQDLKSTVDLLTSITFFRMKVQELQSPPRASQVVKDCVKACLNSTYEYIFNNCHELYSREYQTDPAKKGEVLPEEQGPSIKNLDFWSKLITLIVSIIEEDKNSYTPCLNQFPQELNVGKISAEVMWNLFAQDMKYAMEEHDKHRLCKSADYMNLHFKVKWLYNEYVTELPAFKDRVPEYPARRRLQ

SEQ ID NO: 11418 - protein, 1148 aa, Artificial Sequence
  Synthetic polypeptide
MSLLCVGVKKAKFDGAQEKFNTYVTLKVQNVKSTTIAVRGSQPSWEQDFMFEINRLDLGLTVEVWNKGLIWDTMVGTVWIPLRTIRQSNEEGPGEWLTLDSQVIMADSEICGTKDPTFHRILLDTRFELPLDIPEEEARYWAKKLEQLNAMRDQDEYSFQDEQDKPLPVPSNQCCNWNYFGWGEQHNDDPDSAVDDRDSDYRSETSNSIPPPYYTTSQPNASVHQYSVRPPPLGSRESYSDSMHSYEEFSEPQALSPTGSSRYASSGELSQGSSQLSEDFDPDEHSLQGSDMEDERDRDSYHSCHSSVSYHKDSPRWDQDEEELEEDLEDFLEEEELPEDEEELEEEEEEVPDDLGSYAQREDVAVAEPKDFKRISLPPAAPGKEDKAPVAPTEAPDMAKVAPKPATPDKVPAAEQIPEAEPPKDEESFRPREDEEGQEGQDSMSRAKANWLRAFNKVRMQLQEARGEGEMSKSLWFKGGPGGGLIIIDSMPDIRKRKPIPLVSDLAMSLVQSRKAGITSALASSTLNNEELKNHVYKKTLQALIYPISCTTPHNFEVWTATTPTYCYECEGLLWGIARQGMRCTECGVKCHEKCQDLLNADCLQRAAEKSSKHGAEDRTQNIIMVLKDRMKIRERNKPEIFELIQEIFAVTKTAHTQQMKAVKQSVLDGTSKWSAKISITVVCAQGLQAKDKTGSSDPYVTVQVGKTKKRTKTIYGNLNPVWEENFHFECHNSSDRIKVRVWDEDDDIKSRVKQRFKRESDDFLGQTIIEVRTLSGEMDVWYNLDKRTDKSAVSGAIRLHISVEIKGEEKVAPYHVQYTCLHENLFHFVTDVQNNGVVKIPDAKGDDAWKVYYDETAQEIVDEFAMRYGVESIYQAMTHFACLSSKYMCPGVPAVMSTLLANINAYYAHTTASTNVSASDRFAASNFGKERFVKLLDQLHNSLRIDLSMYRNNFPASSPERLQDLKSTVDLLTSITFFRMKVQELQSPPRASQVVKDCVKACLNSTYEYIFNNCHELYSREYQTDPAKKGEVLPEEQGPSIKNLDFWSKLITLIVSIIEEDKNSYTPCLNQFPQELNVGKISAEVMWNLFAQDMKYAMEEHDKHRLCKSADYMNLHFKVKWLYNEYVTELPAFKDRVPEYPARRRLQ

SEQ ID NO: 11419 - protein, 1146 aa, Artificial Sequence
  Synthetic polypeptide
MSLLCVGVKKAKFDGAQEKFNTYVTLKVQNVKSTTIAVRGSQPSWEQDFMFEINRLDLGLTVEVWNKGLIWDTMVGTVWIPLRTIRQSNEEGPGEWLTLDSQVIMADSEICGTKDPTFHRILLDTRFELPLDIPEEEARYWAKKLEQLNAMRDQDEYSFQDEQDKPLPVPSNQCCNWNYFGWGEQHNDDPDSAVDDRDSDYRSETSNSIPPPYYTTSQPNASVHQYSVRPPPLGSRESYSDSMHSYEEFSEPQALSPTGSSRYASSGELSQGSSQLSEDFDPDEHSLQGSDMEDERDRDSYHSCHSSVSYHKDSPRWDQDEEELEEDLEDFLEEEELPEDEEELEEEEEEVPDDLGSYAQREDVAVAEPKDFKRISLPPAAPGKEDKAPVAPTEAPDMAKVAPKPATPDKVPAAEQIPEAEPPKDEESFRPREDEEGQEGQDSMSRAKANWLRAFNKVRMQLQEARGEGEMSKSLWFKGGPGGGLIIIDSMPDIRKRKPIPLVSDLSLVQSRKAGITSALASSTLNNEELKNHVYKKTLQALIYPISCTTPHNFEVWTATTPTYCYECEGLLWGIARQGMRCTECGVKCHEKCQDLLNADCLQRAAEKSSKHGAEDRTQNIIMVLKDRMKIRERNKPEIFELIQEIFAVTKTAHTQQMKAVKQSVLDGTSKWSAKISITVVCAQGLQAKDKTGSSDPYVTVQVGKTKKRTKTIYGNLNPVWEENFHFECHNSSDRIKVRVWDEDDDIKSRVKQRFKRESDDFLGQTIIEVRTLSGEMDVWYNLDKRTDKSAVSGAIRLHISVEIKGEEKVAPYHVQYTCLHENLFHFVTDVQNNGVVKIPDAKGDDAWKVYYDETAQEIVDEFAMRYGVESIYQAMTHFACLSSKYMCPGVPAVMSTLLANINAYYAHTTASTNVSASDRFAASNFGKERFVKLLDQLHNSLRIDLSMYRNNFPASSPERLQDLKSTVDLLTSITFFRMKVQELQSPPRASQVVKDCVKACLNSTYEYIFNNCHELYSREYQTDPAKKGEVLPEEQGPSIKNLDFWSKLITLIVSIIEEDKNSYTPCLNQFPQELNVGKISAEVMWNLFAQDMKYAMEEHDKHRLCKSADYMNLHFKVKWLYNEYVTELPAFKDRVPEYPARRRLQ

SEQ ID NO: 11420 - protein, 1148 aa, Artificial Sequence
  Synthetic polypeptide
MSLLCVSLKKAKFDGAQEKFNTYVTLKVQNVKSTTIAVRGSQPSWEQDFMFEINRLDLGLTVEVWNKGLIWDTMVGTVWIPLRTIRQSNEEGPGEWLTLDSQVIMADSEICGTKDPTFHRILLDTRFELPLDIPEEEARYWAKKLEQLNAMRDQDEYSFQDEQDKPLPVPSNQCCNWNYFGWGEQHNDDPDSAVDDRDSDYRSETSNSIPPPYYTTSQPNASVHQYSVRPPPLGSRESYSDSMHSYEEFSEPQALSPTGSSRYASSGELSQGSSQLSEDFDPDEHSLQGSDMEDERDRDSYHSCHSSVSYHKDSPRWDQDEEELEEDLEDFLEEEELPEDEEELEEEEEEVPDDLGSYAQREDVAVAEPKDFKRISLPPAAPGKEDKAPVAPTEAPDMAKVAPKPATPDKVPAAEQIPEAEPPKDEESFRPREDEEGQEGQDSMSRAKANWLRAFNKVRMQLQEARGEGEMSKSLWFKGGPGGGLIIIDSMPDIRKRKPIPLVSDLAMSLVQSRKAGITSALASSTLNNEELKNHVYKKTLQALIYPISCTTPHNFEVWTATTPTYCYECEGLLWGIARQGMRCTECGVKCHEKCQDLLNADCLQRAAEKSSKHGAEDRTQNIIMVLKDRMKIRERNKPEIFELIQEIFAVTKTAHTQQMKAVKQSVLDGTSKWSAKISITVVCAQGLQAKDKTGSSDPYVTVQVGKTKKRTKTIYGNLNPVWEENFHFECHNSSDRIKVRVWDEDDDIKSRVKQRFKRESDDFLGQTIIEVRTLSGEMDVWYNLDKRTDKSAVSGAIRLHISVEIKGEEKVAPYHVQYTCLHENLFHFVTDVQNNGVVKIPDAKGDDAWKVYYDETAQEIVDEFAMRYGVESIYQAMTHFACLSSKYMCPGVPAVMSTLLANINAYYAHTTASTNVSASDRFAASNFGKERFVKLLDQLHNSLRIDLSMYRNNFPASSPERLQDLKSTVDLLTSITFFRMKVQELQSPPRASQVVKDCVKACLNSTYEYIFNNCHELYSREYQTDPAKKGEVLPEEQGPSIKNLDFWSKLITLIVSIIEEDKNSYTPCLNQFPQELNVGKISAEVMWNLFAQDMKYAMEEHDKHRLCKSADYMNLHFKVKWLYNEYVTELPAFKDRVPEYPARRRLQ

SEQ ID NO: 11421 - protein, 1018 aa, Artificial Sequence
  Synthetic polypeptide
MGGGGTCTISVQVRVCTGGNLLGGRRRPLSPCNEEVWGEAPLPGARPFNAPPARSAPAPSGVPGLRLPAPHQRHSRPGRLRPTCELGDMSLLCVGVKKAKFDGAQEKFNTYVTLKVQNVKSTTIAVRGSQPSWEQDFMFEINRLDLGLTVEVWNKGLIWDTMVGTVWIPLRTIRQSNEEGPGEWLTLDSQVIMADSEICGTKDPTFHRILLDTRFELPLDIPEEEARYWAKKLEQLNAMRDQDEYSFQDEQDKPLPVPSNQCCNWNYFGWGEQHNDDPDSAVDDRDSDYRSETSNSIPPPYYTTSQPNASVHQYSVRPPPLGSRESYSDSMHSYEEFSEPQALSPTGSSRYASSGELSQGSSQLSEDFDPDEHSLQGSDMEDERDRDSYHSCHSSVSYHKDSPRWDQDEEELEEDLEDFLEEEELPEDEEELEEEEEEVPDDLGSYAQREDVAVAEPKDFKRISLPPAAPGKEDKAPVAPTEAPDMAKVAPKPATPDKVPAAEQIPEAEPPKDEESFRPREDEEGQEGQDSMSRAKANWLRAFNKVRMQLQEARGEGEMSKSLWFKGGPGGGLIIIDSMPDIRKRKPIPLVSDLAMSLVQSRKAGITSALASSTLNNEELKNHVYKKTLQALIYPISCTTPHNFEVWTATTPTYCYECEGLLWGIARQGMRCTECGVKCHEKCQDLLNADCLQRAAEKSSKHGAEDRTQNIIMVLKDRMKIRERNKPEIFELIQEIFAVTKTAHTQQMKAVKQSVLDGTSKWSAKISITVVCAQGLQAKDKTGSSDPYVTVQVGKTKKRTKTIYGNLNPVWEENFHFECHNSSDRIKVRVWDEDDDIKSRVKQRFKRESDDFLGQTIIEVRTLSGEMDVWYNLDKRTDKSAVSGAIRLHISVEIKGEEKVAPYHVQYTCLHENLFHFVTDVQNNGVVKIPDAKGDDAWKVYYDETAQEIVDEFAMRYGVESIYQAMTHFACLSSKYMCPGVPAVMSTLLANINAYYAHTTASTNVSASDRFAASNFGN

SEQ ID NO: 11422 - protein, 930 aa, Artificial Sequence
  Synthetic polypeptide
MSLLCVGVKKAKFDGAQEKFNTYVTLKVQNVKSTTIAVRGSQPSWEQDFMFEINRLDLGLTVEVWNKGLIWDTMVGTVWIPLRTIRQSNEEGPGEWLTLDSQVIMADSEICGTKDPTFHRILLDTRFELPLDIPEEEARYWAKKLEQLNAMRDQDEYSFQDEQDKPLPVPSNQCCNWNYFGWGEQHNDDPDSAVDDRDSDYRSETSNSIPPPYYTTSQPNASVHQYSVRPPPLGSRESYSDSMHSYEEFSEPQALSPTGSSRYASSGELSQGSSQLSEDFDPDEHSLQGSDMEDERDRDSYHSCHSSVSYHKDSPRWDQDEEELEEDLEDFLEEEELPEDEEELEEEEEEVPDDLGSYAQREDVAVAEPKDFKRISLPPAAPGKEDKAPVAPTEAPDMAKVAPKPATPDKVPAAEQIPEAEPPKDEESFRPREDEEGQEGQDSMSRAKANWLRAFNKVRMQLQEARGEGEMSKSLWFKGGPGGGLIIIDSMPDIRKRKPIPLVSDLAMSLVQSRKAGITSALASSTLNNEELKNHVYKKTLQALIYPISCTTPHNFEVWTATTPTYCYECEGLLWGIARQGMRCTECGVKCHEKCQDLLNADCLQRAAEKSSKHGAEDRTQNIIMVLKDRMKIRERNKPEIFELIQEIFAVTKTAHTQQMKAVKQSVLDGTSKWSAKISITVVCAQGLQAKDKTGSSDPYVTVQVGKTKKRTKTIYGNLNPVWEENFHFECHNSSDRIKVRVWDEDDDIKSRVKQRFKRESDDFLGQTIIEVRTLSGEMDVWYNLDKRTDKSAVSGAIRLHISVEIKGEEKVAPYHVQYTCLHENLFHFVTDVQNNGVVKIPDAKGDDAWKVYYDETAQEIVDEFAMRYGVESIYQAMTHFACLSSKYMCPGVPAVMSTLLANINAYYAHTTASTNVSASDRFAASNFGN

SEQ ID NO: 11423 - protein, 928 aa, Artificial Sequence
  Synthetic polypeptide
MSLLCVGVKKAKFDGAQEKFNTYVTLKVQNVKSTTIAVRGSQPSWEQDFMFEINRLDLGLTVEVWNKGLIWDTMVGTVWIPLRTIRQSNEEGPGEWLTLDSQVIMADSEICGTKDPTFHRILLDTRFELPLDIPEEEARYWAKKLEQLNAMRDQDEYSFQDEQDKPLPVPSNQCCNWNYFGWGEQHNDDPDSAVDDRDSDYRSETSNSIPPPYYTTSQPNASVHQYSVRPPPLGSRESYSDSMHSYEEFSEPQALSPTGSSRYASSGELSQGSSQLSEDFDPDEHSLQGSDMEDERDRDSYHSCHSSVSYHKDSPRWDQDEEELEEDLEDFLEEEELPEDEEELEEEEEEVPDDLGSYAQREDVAVAEPKDFKRISLPPAAPGKEDKAPVAPTEAPDMAKVAPKPATPDKVPAAEQIPEAEPPKDEESFRPREDEEGQEGQDSMSRAKANWLRAFNKVRMQLQEARGEGEMSKSLWFKGGPGGGLIIIDSMPDIRKRKPIPLVSDLSLVQSRKAGITSALASSTLNNEELKNHVYKKTLQALIYPISCTTPHNFEVWTATTPTYCYECEGLLWGIARQGMRCTECGVKCHEKCQDLLNADCLQRAAEKSSKHGAEDRTQNIIMVLKDRMKIRERNKPEIFELIQEIFAVTKTAHTQQMKAVKQSVLDGTSKWSAKISITVVCAQGLQAKDKTGSSDPYVTVQVGKTKKRTKTIYGNLNPVWEENFHFECHNSSDRIKVRVWDEDDDIKSRVKQRFKRESDDFLGQTIIEVRTLSGEMDVWYNLDKRTDKSAVSGAIRLHISVEIKGEEKVAPYHVQYTCLHENLFHFVTDVQNNGVVKIPDAKGDDAWKVYYDETAQEIVDEFAMRYGVESIYQAMTHFACLSSKYMCPGVPAVMSTLLANINAYYAHTTASTNVSASDRFAASNFGN

SEQ ID NO: 11424 - protein, 930 aa, Artificial Sequence
  Synthetic polypeptide
MSLLCVSLKKAKFDGAQEKFNTYVTLKVQNVKSTTIAVRGSQPSWEQDFMFEINRLDLGLTVEVWNKGLIWDTMVGTVWIPLRTIRQSNEEGPGEWLTLDSQVIMADSEICGTKDPTFHRILLDTRFELPLDIPEEEARYWAKKLEQLNAMRDQDEYSFQDEQDKPLPVPSNQCCNWNYFGWGEQHNDDPDSAVDDRDSDYRSETSNSIPPPYYTTSQPNASVHQYSVRPPPLGSRESYSDSMHSYEEFSEPQALSPTGSSRYASSGELSQGSSQLSEDFDPDEHSLQGSDMEDERDRDSYHSCHSSVSYHKDSPRWDQDEEELEEDLEDFLEEEELPEDEEELEEEEEEVPDDLGSYAQREDVAVAEPKDFKRISLPPAAPGKEDKAPVAPTEAPDMAKVAPKPATPDKVPAAEQIPEAEPPKDEESFRPREDEEGQEGQDSMSRAKANWLRAFNKVRMQLQEARGEGEMSKSLWFKGGPGGGLIIIDSMPDIRKRKPIPLVSDLAMSLVQSRKAGITSALASSTLNNEELKNHVYKKTLQALIYPISCTTPHNFEVWTATTPTYCYECEGLLWGIARQGMRCTECGVKCHEKCQDLLNADCLQRAAEKSSKHGAEDRTQNIIMVLKDRMKIRERNKPEIFELIQEIFAVTKTAHTQQMKAVKQSVLDGTSKWSAKISITVVCAQGLQAKDKTGSSDPYVTVQVGKTKKRTKTIYGNLNPVWEENFHFECHNSSDRIKVRVWDEDDDIKSRVKQRFKRESDDFLGQTIIEVRTLSGEMDVWYNLDKRTDKSAVSGAIRLHISVEIKGEEKVAPYHVQYTCLHENLFHFVTDVQNNGVVKIPDAKGDDAWKVYYDETAQEIVDEFAMRYGVESIYQAMTHFACLSSKYMCPGVPAVMSTLLANINAYYAHTTASTNVSASDRFAASNFGN

SEQ ID NO: 11425 - protein, 568 aa, Artificial Sequence
  Synthetic polypeptide
MGGGGTCTISVQVRVCTGGNLLGGRRRPLSPCNEEVWGEAPLPGARPFNAPPARSAPAPSGVPGLRLPAPHQRHSRPGRLRPTCELGDMSLLCVGVKKAKFDGAQEKFNTYVTLKVQNVKSTTIAVRGSQPSWEQDFMFEINRLDLGLTVEVWNKGLIWDTMVGTVWIPLRTIRQSNEEGPGEWLTLDSQVIMADSEICGTKDPTFHRILLDTRFELPLDIPEEEARYWAKKLEQLNAMRDQDEYSFQDEQDKPLPVPSNQCCNWNYFGWGEQHNDDPDSAVDDRDSDYRSETSNSIPPPYYTTSQPNASVHQYSVRPPPLGSRESYSDSMHSYEEFSEPQALSPTGSSRYASSGELSQGSSQLSEDFDPDEHSLQGSDMEDERDRDSYHSCHSSVSYHKDSPRWDQDEEELEEDLEDFLEEEELPEDEEELEEEEEEVPDDLGSYAQREDVAVAEPKDFKRISLPPAAPGKEDKAPVAPTEAPDMAKVAPKPATPDKVPAAEQIPEAEPPKDEESFRPREDEEGQEGQDSMSRAKANWLRAFNKVRMQLQEELSVVACVCGPSYSGG

SEQ ID NO: 11426 - protein, 480 aa, Artificial Sequence
  Synthetic polypeptide
MSLLCVGVKKAKFDGAQEKFNTYVTLKVQNVKSTTIAVRGSQPSWEQDFMFEINRLDLGLTVEVWNKGLIWDTMVGTVWIPLRTIRQSNEEGPGEWLTLDSQVIMADSEICGTKDPTFHRILLDTRFELPLDIPEEEARYWAKKLEQLNAMRDQDEYSFQDEQDKPLPVPSNQCCNWNYFGWGEQHNDDPDSAVDDRDSDYRSETSNSIPPPYYTTSQPNASVHQYSVRPPPLGSRESYSDSMHSYEEFSEPQALSPTGSSRYASSGELSQGSSQLSEDFDPDEHSLQGSDMEDERDRDSYHSCHSSVSYHKDSPRWDQDEEELEEDLEDFLEEEELPEDEEELEEEEEEVPDDLGSYAQREDVAVAEPKDFKRISLPPAAPGKEDKAPVAPTEAPDMAKVAPKPATPDKVPAAEQIPEAEPPKDEESFRPREDEEGQEGQDSMSRAKANWLRAFNKVRMQLQEELSVVACVCGPSYSGG

SEQ ID NO: 11427 - protein, 480 aa, Artificial Sequence
  Synthetic polypeptide
MSLLCVSLKKAKFDGAQEKFNTYVTLKVQNVKSTTIAVRGSQPSWEQDFMFEINRLDLGLTVEVWNKGLIWDTMVGTVWIPLRTIRQSNEEGPGEWLTLDSQVIMADSEICGTKDPTFHRILLDTRFELPLDIPEEEARYWAKKLEQLNAMRDQDEYSFQDEQDKPLPVPSNQCCNWNYFGWGEQHNDDPDSAVDDRDSDYRSETSNSIPPPYYTTSQPNASVHQYSVRPPPLGSRESYSDSMHSYEEFSEPQALSPTGSSRYASSGELSQGSSQLSEDFDPDEHSLQGSDMEDERDRDSYHSCHSSVSYHKDSPRWDQDEEELEEDLEDFLEEEELPEDEEELEEEEEEVPDDLGSYAQREDVAVAEPKDFKRISLPPAAPGKEDKAPVAPTEAPDMAKVAPKPATPDKVPAAEQIPEAEPPKDEESFRPREDEEGQEGQDSMSRAKANWLRAFNKVRMQLQEELSVVACVCGPSYSGG

SEQ ID NO: 11428 - protein, 142 aa, Artificial Sequence
  Synthetic polypeptide
MGGGGTCTISVQVRVCTGGNLLGGRRRPLSPCNEEVWGEAPLPGARPFNAPPARSAPAPSGVPGLRLPAPHQRHSRPGRLRPTCELGDMSLLCVGVKKAKFDGAQEKFNTYVTLKVQNVKSTTIAVRGSQPSWEQDFMLRIN

SEQ ID NO: 11429 - protein, 54 aa, Artificial Sequence
  Synthetic polypeptide
MSLLCVGVKKAKFDGAQEKFNTYVTLKVQNVKSTTIAVRGSQPSWEQDFMLRIN

SEQ ID NO: 11430 - protein, 54 aa, Artificial Sequence
  Synthetic polypeptide
MSLLCVSLKKAKFDGAQEKFNTYVTLKVQNVKSTTIAVRGSQPSWEQDFMLRIN

SEQ ID NO: 11431 - protein, 31 aa, Artificial Sequence
  Synthetic polypeptide
MLLGFRRGRRSHFAQGCLLPLPGLSPLQQLL

SEQ ID NO: 11432 - protein, 99 aa, Artificial Sequence
  Synthetic polypeptide
MGRGYSGALQARGGLEEPLERGLRGPSFTQSPLHGAAAAYLSAQRDASLPVPGQRSDMQKVTLGLLVFLAGFPVLDANDLEDKNSPFYYGVSHYAQPAL

SEQ ID NO: 11433 - protein, 42 aa, Artificial Sequence
  Synthetic polypeptide
MQKVTLGLLVFLAGFPVLDANDLEDKNSPFYYGVSHYAQPAL

SEQ ID NO: 11434 - protein, 119 aa, Artificial Sequence
  Synthetic polypeptide
MGRGYSGALQARGGLEEPLERGLRGPSFTQSPLHGAAAAYLSAQRDASLPVPGQRSDMQKVTLGLLVFLAGFPVLDANDLEDKNSPFYYDRVCWCVNQNVSTWDFVCFLMAVSPAPCAS

SEQ ID NO: 11435 - protein, 62 aa, Artificial Sequence
  Synthetic polypeptide
MQKVTLGLLVFLAGFPVLDANDLEDKNSPFYYDRVCWCVNQNVSTWDFVCFLMAVSPAPCAS

SEQ ID NO: 11436 - protein, 284 aa, Artificial Sequence
  Synthetic polypeptide
MWPNGSSLGPCFRPTNITLEERRLIASPWFAASFCVVGLASNLLALSVLAGARQGGSHTRSSFLTFLCGLVLTDFLGLLVTGTIVVSQHAALFEWHAVDPGCRLCRFMGVVMIFFGLSPLLLGAAMASERYLGITRPFSRPAVASQRRAWATVGLVWAAALALGLLPLLGVGRYTVQYPGSWCFLTLGAESGDVAFGLLFSMLGGLSVGLSFLLNTVSVATLCHVYHGQEAAQQRPRDSEVEMMAQLLGIMVVASVCWLPLLLCPPHAVTPRTQFPSPDWTVSL

SEQ ID NO: 11437 - protein, 243 aa, Artificial Sequence
  Synthetic polypeptide
MLRMRVPALLVLLFCFRGRAGPSPHFLQQPEDLVVLLGEEARLPCALGAYWGLVQWTKSGLALGGQRDLPGWSRYWISGNAANGQHDLHIRPVELEDEASYECQATQAGLRSRPAQLHVLVPPEAPQVLGGPSVSLVAGVPANLTCRSRGDARPTPELLWFRDGVLLDGATFHQTLLKEGTPGSVESTLTLTPFSHDDGATFVCRARSQALPTGRDTAITLSLQSTWEAEAGESLVPGRQMLR

SEQ ID NO: 11438 - protein, 193 aa, Artificial Sequence
  Synthetic polypeptide
MLRMRVPALLVLLFCFRGRAGWSRYWISGNAANGQHDLHIRPVELEDEASYECQATQAGLRSRPAQLHVLVPPEAPQVLGGPSVSLVAGVPANLTCRSRGDARPTPELLWFRDGVLLDGATFHQTLLKEGTPGSVESTLTLTPFSHDDGATFVCRARSQALPTGRDTAITLSLQSTWEAEAGESLVPGRQMLR

SEQ ID NO: 11439 - protein, 243 aa, Artificial Sequence
  Synthetic polypeptide
MLRMRVPALLVLLFCFRGRAGPSPHFLQQPEDLVVLLGEEARLPCALGAYWGLVQWTKSGLALGGQRDLPGWSRYWISGNAANGQHDLHIRPVELEDEASYECQATQAGLRSRPAQLHVLVPPEAPQVLGGPSVSLVAGVPANLTCRSRGDARPTPELLWFRDGVLLDGATFHQTLLKEGTPGSVESTLTLTPFSHDDGATFVCRARSQALPTGRDTAITLSLQSTWEAEAGESLEPGRQRLQ

SEQ ID NO: 11440 - protein, 193 aa, Artificial Sequence
  Synthetic polypeptide
MLRMRVPALLVLLFCFRGRAGWSRYWISGNAANGQHDLHIRPVELEDEASYECQATQAGLRSRPAQLHVLVPPEAPQVLGGPSVSLVAGVPANLTCRSRGDARPTPELLWFRDGVLLDGATFHQTLLKEGTPGSVESTLTLTPFSHDDGATFVCRARSQALPTGRDTAITLSLQSTWEAEAGESLEPGRQRLQ

SEQ ID NO: 11441 - protein, 540 aa, Artificial Sequence
  Synthetic polypeptide
MEAVCGAWGRGLVLGVSVLGSKEPGDPHANAPRALTVLSTSIQAPGSAQVAGLCGRLTLHRDLRTGRWEPDPQRSRRCLRDPQRVLEYCRQMYPELQIARVEQATQAIPMERWCGGSRSGSCAHPHHQVVPFRCLPGEFVSEALLVPEGCRFLHQERMDQCESSTRRHQEAQEACSSQGLILHGSGMLLPCGSDRFRGVEYVCCPPPGTPDPSGTAVGDPSTRSWPPGSRVEGAEDEEEEESFPQPVDDYFVEPPQAEEEEETVPPPSSHTLAVVGKVTPTPRPTDGVDIYFGMPGEISEHEGFLRAKMDLEERRMRQINEVMREWAMADNQSKNLPKADRQALNEHFQSILQTLEEQVSGERQRLVETHATRVIALINDQRRAALEGFLAALQADPPQAERVLLALRRYLRAEQKEQRHTLRHYQHVAAVDPEKAQQMRFQVHTHLQVIEERVNQSLGLLDQNPHLAQELRPQIQELLHSEHLGPSELEAPAPGGSSEDKGGLQPPDSKDDTPMTLPKVPAAQEADVEGSLEPRKLRLQ

SEQ ID NO: 11442 - protein, 547 aa, Artificial Sequence
  Synthetic polypeptide
MGPASPAARGLSRRPGQPPLPLLLPLLLLLLRAQPAIGSLAGGSPGAAEAPGSAQVAGLCGRLTLHRDLRTGRWEPDPQRSRRCLRDPQRVLEYCRQMYPELQIARVEQATQAIPMERWCGGSRSGSCAHPHHQVVPFRCLPGEFVSEALLVPEGCRFLHQERMDQCESSTRRHQEAQEACSSQGLILHGSGMLLPCGSDRFRGVEYVCCPPPGTPDPSGTAVGDPSTRSWPPGSRVEGAEDEEEEESFPQPVDDYFVEPPQAEEEEETVPPPSSHTLAVVGKVTPTPRPTDGVDIYFGMPGEISEHEGFLRAKMDLEERRMRQINEVMREWAMADNQSKNLPKADRQALNEHFQSILQTLEEQVSGERQRLVETHATRVIALINDQRRAALEGFLAALQADPPQAERVLLALRRYLRAEQKEQRHTLRHYQHVAAVDPEKAQQMRFQVHTHLQVIEERVNQSLGLLDQNPHLAQELRPQIQELLHSEHLGPSELEAPAPGGSSEDKGGLQPPDSKDADTPMTLPKVPAAQEADVEGSLEPRKLRLQ

SEQ ID NO: 11443 - protein, 507 aa, Artificial Sequence
  Synthetic polypeptide
MLASLEKDKTAPGSAQVAGLCGRLTLHRDLRTGRWEPDPQRSRRCLRDPQRVLEYCRQMYPELQIARVEQATQAIPMERWCGGSRSGSCAHPHHQVVPFRCLPGEFVSEALLVPEGCRFLHQERMDQCESSTRRHQEAQEACSSQGLILHGSGMLLPCGSDRFRGVEYVCCPPPGTPDPSGTAVGDPSTRSWPPGSRVEGAEDEEEEESFPQPVDDYFVEPPQAEEEEETVPPPSSHTLAVVGKVTPTPRPTDGVDIYFGMPGEISEHEGFLRAKMDLEERRMRQINEVMREWAMADNQSKNLPKADRQALNEHFQSILQTLEEQVSGERQRLVETHATRVIALINDQRRAALEGFLAALQADPPQAERVLLALRRYLRAEQKEQRHTLRHYQHVAAVDPEKAQQMRFQVHTHLQVIEERVNQSLGLLDQNPHLAQELRPQIQELLHSEHLGPSELEAPAPGGSSEDKGGLQPPDSKDDTPMTLPKVPAAQEADVEGSLEPRKLRLQ

SEQ ID NO: 11444 - protein, 164 aa, Artificial Sequence
  Synthetic polypeptide
  misc_feature (1)..(1): Xaa can be any naturally occurring amino acid
XEWAMADNQSKNLPKADRQALNEAERVLLALRRYLRAEQKEQRHTLRHYQHVAAVDPEKAQQMRFQVHTHLQVIEERVNQSLGLLDQNPHLAQELRPQIQELLHSEHLGPSELEAPAPGGSSEDKGGLQPPDSKDDTPMTLPKVPAAQEADVEGSLEPRKLRLQ

SEQ ID NO: 11445 - protein, 986 aa, Artificial Sequence
  Synthetic polypeptide
MTTYRAIPSDGVDLAASCGARVGDVLPGPHTGDYAPLGFWAQNGSMSQPLGESPATATATATATTRPSPTTPAMPKMGVRARVADWPPKREALREHSNPSPSQDTDGTKATKMAHSMRSIQNGQPPTSTPASSGSKAFHRLSRRRSKDVEFQDGWPRSPGRAFLPLRHRSSSEITLSECDAEDAGEPRGARHTGALPLFREYGSTSSIDVQGMPEQSFFDILNEFRSEQPDARGCQALTELLRADPGPHLMGGGGGAKGDSHNGQPAKDSLLPLQPTKEKEKARKKPARGLGGGDTVDSSIFRKLRSSKPEGEAGRSPGEADEGRSPPEASRPWVCQKSFAHFDVQSMLFDLNEAAANRVSVSQRRNTTTGASAASAASAMASLTASRAHSLGGLDPAFTSTEDLNCKENLEQDLGDDNSNDLLLSCPHFRNEIGGECERNVSFSRASVGSPSSGEGHLAEPALSAYRTNASISVLEVPKEQQRTQSRPRQYSIEHVDLGARYYQDYFVGKEHANYFGVDEKLGPVAVSIKREKLEDHKEHGPQYQYRIIFRTRELITLRGSILEDATPTATKHGTGRGLPLKDALEYVIPELNIHCLRLALNTPKVTEQLLKLDEQGLCRKHKVGILYCKAGQSSEEEMYNNEEAGPAFEEFLSLIGEKVCLKGFTKYAAQLDVKTDSTGTHSLYTMYQDYEIMFHVSTLLPYTPNNRQQLLRKRHIGNDIVTIIFQEPGALPFTPKNIRSHFQHVFIIVRVHNPCTDNVCYSMAVTRSKDAPPFGPPIPSGTTFRKSDVFRDFLLAKVINAENAAHKSDKFHTMATRTRQEYLKDLAENCVSNTPIDSTGKFNLISLTSKKKEKTKARAGAEQHSAGAIAWRVVAQDYAQGVEIDCILGISNEFVVLLDLRTKEVVFNCYCGDVIGWTPDSSTLKIFYGRGDHIFLQATEGSVEDIREIVQRLKWLTPVIPALWEAETGESLEVRSSRPAWPTW

SEQ ID NO: 11446 - protein, 47 aa, Artificial Sequence
  Synthetic polypeptide
  misc_feature (1)..(1): Xaa can be any naturally occurring amino acid
XTEGSVEDIREIVQRLKWLTPVIPALWEAETGESLEVRSSRPAWPTW

SEQ ID NO: 11447 - protein, 251 aa, Artificial Sequence
  Synthetic polypeptide
MNRKDSKRKSHQECTGKIGGRGRPRQVRRHKTCPSPREISKVMASMNLGLLSEGGCSEDELLEKCIQSFDSAGSLCHEDHMLNMVLAMHSWVLPSADLAARLLTSYQKATGDTQELRRLQICHLVRYWLMRHPEVMHQDPQLEEVIGRFWATVAREGNSAQRRLGDSSDLLSPGGPGPPLPMSSPGLGKKRKVSLLFDHLETGELAQHLTYLEFRSFQAITVWWCMPVIPATWEGEAGESLEPQEAEITVS

SEQ ID NO: 11448 - protein, 237 aa, Artificial Sequence
  Synthetic polypeptide
MNRKDSKRKSHQECTGKIGGRGRPRQVRRHKTCPSPREISKVMASMNLGLLSEGGCSEDELLEKCIQSFDSAGSLCHEDHMLNMVLAMHSWVLPSADLAARLLTSYQKATGDTQELRRLQICHLVRYWLMRHPEVMHQDPQLEEVIGRFWATVAREGNSAQRRLGDSSDLPGLGKKRKVSLLFDHLETGELAQHLTYLEFRSFQAITVWWCMPVIPATWEGEAGESLEPQEAEITVS

SEQ ID NO: 11449 - protein, 143 aa, Artificial Sequence
  Synthetic polypeptide
KCGSPSDSSTTEEMEVAVSKARAKVTMNDFDYLKLLGKGTFGKVILVREKATGRYYAMKILRKEVIIAKALKYAFQTHDRLCFVMEYANGGELFFHLSRERVFTEERARFYGAEIVSALEYLHSRDVVYRDIKPQLEQPKYPL

SEQ ID NO: 11450 - protein, 225 aa, Artificial Sequence
  Synthetic polypeptide
MKTERPRPNTFVIRCLQWTTVIERTFHVDSPDEREEWMRAIQMVANSLKQRAPGEDPMDYKCGSPSDSSTTEEMEVAVSKARAKVTMNDFDYLKLLGKGTFGKVILVREKATGRYYAMKILRKEVIIAKDEVAHTVTESRVLQNTRHPFLTALKYAFQTHDRLCFVMEYANGGELFFHLSRERVFTEERARFYGAEIVSALEYLHSRDVVYRDIKPQLEQPKYPL

SEQ ID NO: 11451 - protein, 287 aa, Artificial Sequence
  Synthetic polypeptide
MNEVSVIKEGWLHKRGEYIKTWRPRYFLLKSDGSFIGYKERPEAPDQTLPPLNNFSVAECQLMKTERPRPNTFVIRCLQWTTVIERTFHVDSPDEREEWMRAIQMVANSLKQRAPGEDPMDYKCGSPSDSSTTEEMEVAVSKARAKVTMNDFDYLKLLGKGTFGKVILVREKATGRYYAMKILRKEVIIAKDEVAHTVTESRVLQNTRHPFLTALKYAFQTHDRLCFVMEYANGGELFFHLSRERVFTEERARFYGAEIVSALEYLHSRDVVYRDIKPQLEQPKYPL

SEQ ID NO: 11452 - protein, 137 aa, Artificial Sequence
  Synthetic polypeptide
KCGSPSDSSTTEEMEVAVSKARAKVTMNDFDYLKLLGKGTFGKVILVREKATGRYYAMKILRKEVIIAKALKYAFQTHDRLCFVMEYANGGELFFHLSRERVFTEERARFYGAEIVSALEYLHSRDVVYRDIKQDLL

SEQ ID NO: 11453 - protein, 219 aa, Artificial Sequence
  Synthetic polypeptide
MKTERPRPNTFVIRCLQWTTVIERTFHVDSPDEREEWMRAIQMVANSLKQRAPGEDPMDYKCGSPSDSSTTEEMEVAVSKARAKVTMNDFDYLKLLGKGTFGKVILVREKATGRYYAMKILRKEVIIAKDEVAHTVTESRVLQNTRHPFLTALKYAFQTHDRLCFVMEYANGGELFFHLSRERVFTEERARFYGAEIVSALEYLHSRDVVYRDIKQDLL

SEQ ID NO: 11454 - protein, 281 aa, Artificial Sequence
  Synthetic polypeptide
MNEVSVIKEGWLHKRGEYIKTWRPRYFLLKSDGSFIGYKERPEAPDQTLPPLNNFSVAECQLMKTERPRPNTFVIRCLQWTTVIERTFHVDSPDEREEWMRAIQMVANSLKQRAPGEDPMDYKCGSPSDSSTTEEMEVAVSKARAKVTMNDFDYLKLLGKGTFGKVILVREKATGRYYAMKILRKEVIIAKDEVAHTVTESRVLQNTRHPFLTALKYAFQTHDRLCFVMEYANGGELFFHLSRERVFTEERARFYGAEIVSALEYLHSRDVVYRDIKQDLL

SEQ ID NO: 11455 - protein, 138 aa, Artificial Sequence
  Synthetic polypeptide
KCGSPSDSSTTEEMEVAVSKARAKVTMNDFDYLKLLGKGTFGKVILVREKATGRYYAMKILRKEVIIAKALKYAFQTHDRLCFVMEYANGGELFFHLSRERVFTEERARFYGAEIVSALEYLHSRDVVYRDIKQQDLL

SEQ ID NO: 11456 - protein, 220 aa, Artificial Sequence
  Synthetic polypeptide
MKTERPRPNTFVIRCLQWTTVIERTFHVDSPDEREEWMRAIQMVANSLKQRAPGEDPMDYKCGSPSDSSTTEEMEVAVSKARAKVTMNDFDYLKLLGKGTFGKVILVREKATGRYYAMKILRKEVIIAKDEVAHTVTESRVLQNTRHPFLTALKYAFQTHDRLCFVMEYANGGELFFHLSRERVFTEERARFYGAEIVSALEYLHSRDVVYRDIKQQDLL

SEQ ID NO: 11457 - protein, 282 aa, Artificial Sequence
  Synthetic polypeptide
MNEVSVIKEGWLHKRGEYIKTWRPRYFLLKSDGSFIGYKERPEAPDQTLPPLNNFSVAECQLMKTERPRPNTFVIRCLQWTTVIERTFHVDSPDEREEWMRAIQMVANSLKQRAPGEDPMDYKCGSPSDSSTTEEMEVAVSKARAKVTMNDFDYLKLLGKGTFGKVILVREKATGRYYAMKILRKEVIIAKDEVAHTVTESRVLQNTRHPFLTALKYAFQTHDRLCFVMEYANGGELFFHLSRERVFTEERARFYGAEIVSALEYLHSRDVVYRDIKQQDLL

SEQ ID NO: 11458 - protein, 17 aa, Artificial Sequence
  Synthetic polypeptide
MEARSRSAEHLAQAKTQ

SEQ ID NO: 11459 - protein, 18 aa, Artificial Sequence
  Synthetic polypeptide
MEARSRSAECSIWHRLRL

SEQ ID NO: 11460 - protein, 8 aa, Artificial Sequence
  Synthetic polypeptide
MAETYEFS

SEQ ID NO: 11461 - protein, 8 aa, Artificial Sequence
  Synthetic polypeptide
  misc_feature (1)..(1): Xaa can be any naturally occurring amino acid
XAETYEFS

SEQ ID NO: 11462 - protein, 265 aa, Artificial Sequence
  Synthetic polypeptide
MAWRCPRMGRVPLAWCLALCGWACMAPRGTQAEESPFVGNPGNITGARGLTGTLRCQLQVQGEPPEVHWLRDGQILELADSTQTQVPLGEDEQDDWIVVSQLRITSLQLSDTGQYQCLVFLGHQTFVSQPGYVGLEGLPYFLEEPEDRTVAANTPFNLSCQAQGPPEPVDLLWLQDAVPLATAPGHGPQRSLHVPGLNKTSSFSCEAHNAKGVTTSRTATITVLPQQPRNLHLVSRQPTELEVAWTPGLSGIYPLTHCTLQNKKK

SEQ ID NO: 11463 - protein, 491 aa, Artificial Sequence
  Synthetic polypeptide
MAWRCPRMGRVPLAWCLALCGWACMAPRGTQAEESPFVGNPGNITGARGLTGTLRCQLQVQGEPPEVHWLRDGQILELADSTQTQVPLGEDEQDDWIVVSQLRITSLQLSDTGQYQCLVFLGHQTFVSQPGYVGLEGLPYFLEEPEDRTVAANTPFNLSCQAQGPPEPVDLLWLQDAVPLATAPGHGPQRSLHVPGLNKTSSFSCEAHNAKGVTTSRTATITVLPQQPRNLHLVSRQPTELEVAWTPGLSGIYPLTHCTLQAVLSNDGMGIQAGEPDPPEEPLTSQASVPPHQLRLGSLHPHTPYHIRVACTSSQGPSSWTHWLPVETPEGVPLGPPENISATRNGSQAFVHWQEPRAPLQGTLLGYRLAYQGQDTPEVLMDIGLRQEVTLELQGDGSVSNLTVCVAAYTAAGDGPWSLPVPLEAWRPGQAQPVHQLVKEPSTPAFSWPWWYVLLGAVVAAACVLILALFLVHRRKKETRYGIQRSFPEAP

SEQ ID NO: 11464 - protein, 482 aa, Artificial Sequence
  Synthetic polypeptide
MAWRCPRMGRVPLAWCLALCGWACMAPRGTQAEESPFVGNPGNITGARGLTGTLRCQLQVQGEPPEVHWLRDGQILELADSTQTQVPLGEDEQDDWIVVSQLRITSLQLSDTGQYQCLVFLGHQTFVSQPGYVGLEGLPYFLEEPEDRTVAANTPFNLSCQAQGPPEPVDLLWLQDAVPLATAPGHGPQRSLHVPGLNKTSSFSCEAHNAKGVTTSRTATITVLPQQPRNLHLVSRQPTELEVAWTPGLSGIYPLTHCTLQAVLSNDGMGIQAGEPDPPEEPLTSQASVPPHQLRLGSLHPHTPYHIRVACTSSQGPSSWTHWLPVETPEGVPLGPPENISATRNGSQAFVHWQEPRAPLQGTLLGYRLAYQGQDTPEVLMDIGLRQEVTLELQGDGSVSNLTVCVAAYTAAGDGPWSLPVPLEAWRPVKEPSTPAFSWPWWYVLLGAVVAAACVLILALFLVHRRKKETRYGIQRSFPEAP

SEQ ID NO: 11465 - protein, 223 aa, Artificial Sequence
  Synthetic polypeptide
MGIQAGEPDPPEEPLTSQASVPPHQLRLGSLHPHTPYHIRVACTSSQGPSSWTHWLPVETPEGVPLGPPENISATRNGSQAFVHWQEPRAPLQGTLLGYRLAYQGQDTPEVLMDIGLRQEVTLELQGDGSVSNLTVCVAAYTAAGDGPWSLPVPLEAWRPGQAQPVHQLVKEPSTPAFSWPWWYVLLGAVVAAACVLILALFLVHRRKKETRYGIQRSFPEAP

SEQ ID NO: 11466 - protein, 483 aa, Artificial Sequence
  Synthetic polypeptide
MAWRCPRMGRVPLAWCLALCGWACMAPRGTQAEESPFVGNPGNITGARGLTGTLRCQLQVQGEPPEVHWLRDGQILELADSTQTQVPLGEDEQDDWIVVSQLRITSLQLSDTGQYQCLVFLGHQTFVSQPGYVGLEGLPYFLEEPEDRTVAANTPFNLSCQAQGPPEPVDLLWLQDAVPLATAPGHGPQRSLHVPGLNKTSSFSCEAHNAKGVTTSRTATITVLPQQPRNLHLVSRQPTELEVAWTPGLSGIYPLTHCTLQAVLSNDGMGIQAGEPDPPEEPLTSQASVPPHQLRLGSLHPHTPYHIRVACTSSQGPSSWTHWLPVETPEGVPLGPPENISATRNGSQAFVHWQEPRAPLQGTLLGYRLAYQGQDTPEVLMDIGLRQEVTLELQGDGSVSNLTVCVAAYTAAGDGPWSLPVPLEAWRPGQAQPVHQLVKEPSTPAFSWPWWYVLLGAVVAAACVLILALFLVHRRKKETRYGP

SEQ ID NO: 11467 - protein, 474 aa, Artificial Sequence
  Synthetic polypeptide
MAWRCPRMGRVPLAWCLALCGWACMAPRGTQAEESPFVGNPGNITGARGLTGTLRCQLQVQGEPPEVHWLRDGQILELADSTQTQVPLGEDEQDDWIVVSQLRITSLQLSDTGQYQCLVFLGHQTFVSQPGYVGLEGLPYFLEEPEDRTVAANTPFNLSCQAQGPPEPVDLLWLQDAVPLATAPGHGPQRSLHVPGLNKTSSFSCEAHNAKGVTTSRTATITVLPQQPRNLHLVSRQPTELEVAWTPGLSGIYPLTHCTLQAVLSNDGMGIQAGEPDPPEEPLTSQASVPPHQLRLGSLHPHTPYHIRVACTSSQGPSSWTHWLPVETPEGVPLGPPENISATRNGSQAFVHWQEPRAPLQGTLLGYRLAYQGQDTPEVLMDIGLRQEVTLELQGDGSVSNLTVCVAAYTAAGDGPWSLPVPLEAWRPVKEPSTPAFSWPWWYVLLGAVVAAACVLILALFLVHRRKKETRYGP

SEQ ID NO: 11468 - protein, 215 aa, Artificial Sequence
  Synthetic polypeptide
MGIQAGEPDPPEEPLTSQASVPPHQLRLGSLHPHTPYHIRVACTSSQGPSSWTHWLPVETPEGVPLGPPENISATRNGSQAFVHWQEPRAPLQGTLLGYRLAYQGQDTPEVLMDIGLRQEVTLELQGDGSVSNLTVCVAAYTAAGDGPWSLPVPLEAWRPGQAQPVHQLVKEPSTPAFSWPWWYVLLGAVVAAACVLILALFLVHRRKKETRYGP

SEQ ID NO: 11469 - protein, 525 aa, Artificial Sequence; identical to SEQ ID NO: 358
  Synthetic polypeptide

SEQ ID NO: 11470 - protein, 516 aa, Artificial Sequence; identical to SEQ ID NO: 361
  Synthetic polypeptide

SEQ ID NO: 11471 - protein, 257 aa, Artificial Sequence; identical to SEQ ID NO: 771
  Synthetic polypeptide

SEQ ID NO: 11472 - protein, 537 aa, Artificial Sequence
  Synthetic polypeptide
MAWRCPRMGRVPLAWCLALCGWACMAPRGTQAEESPFVGNPGNITGARGLTGTLRCQLQVQGEPPEVHWLRDGQILELADSTQTQVPLGEDEQDDWIVVSQLRITSLQLSDTGQYQCLVFLGHQTFVSQPGYVGLEGLPYFLEEPEDRTVAANTPFNLSCQAQGPPEPVDLLWLQDAVPLATAPGHGPQRSLHVPGLNKTSSFSCEAHNAKGVTTSRTATITVLPQQPRNLHLVSRQPTELEVAWTPGLSGIYPLTHCTLQAVLSNDGMGIQAGEPDPPEEPLTSQASVPPHQLRLGSLHPHTPYHIRVACTSSQGPSSWTHWLPVETPEGVPLGPPENISATRNGSQAFVHWQEPRAPLQGTLLGYRLAYQGQDTPEVLMDIGLRQEVTLELQGDGSVSNLTVCVAAYTAAGDGPWSLPVPLEAWRPGQAQPVHQLVKEPSTPAFSWPWWYVLLGAVVAAACVLILALFLVHRRKKETRYGEVFEPTVERGELVVRYRVRKSYSRRTTEATLQKYVSVSTMDLSLLVGECHLNVSP

SEQ ID NO: 11473 - protein, 528 aa, Artificial Sequence
  Synthetic polypeptide
MAWRCPRMGRVPLAWCLALCGWACMAPRGTQAEESPFVGNPGNITGARGLTGTLRCQLQVQGEPPEVHWLRDGQILELADSTQTQVPLGEDEQDDWIVVSQLRITSLQLSDTGQYQCLVFLGHQTFVSQPGYVGLEGLPYFLEEPEDRTVAANTPFNLSCQAQGPPEPVDLLWLQDAVPLATAPGHGPQRSLHVPGLNKTSSFSCEAHNAKGVTTSRTATITVLPQQPRNLHLVSRQPTELEVAWTPGLSGIYPLTHCTLQAVLSNDGMGIQAGEPDPPEEPLTSQASVPPHQLRLGSLHPHTPYHIRVACTSSQGPSSWTHWLPVETPEGVPLGPPENISATRNGSQAFVHWQEPRAPLQGTLLGYRLAYQGQDTPEVLMDIGLRQEVTLELQGDGSVSNLTVCVAAYTAAGDGPWSLPVPLEAWRPVKEPSTPAFSWPWWYVLLGAVVAAACVLILALFLVHRRKKETRYGEVFEPTVERGELVVRYRVRKSYSRRTTEATLQKYVSVSTMDLSLLVGECHLNVSP

SEQ ID NO: 11474 - protein, 269 aa, Artificial Sequence
  Synthetic polypeptide
MGIQAGEPDPPEEPLTSQASVPPHQLRLGSLHPHTPYHIRVACTSSQGPSSWTHWLPVETPEGVPLGPPENISATRNGSQAFVHWQEPRAPLQGTLLGYRLAYQGQDTPEVLMDIGLRQEVTLELQGDGSVSNLTVCVAAYTAAGDGPWSLPVPLEAWRPGQAQPVHQLVKEPSTPAFSWPWWYVLLGAVVAAACVLILALFLVHRRKKETRYGEVFEPTVERGELVVRYRVRKSYSRRTTEATLQKYVSVSTMDLSLLVGECHLNVSP

SEQ ID NO: 11475 - protein, 502 aa, Artificial Sequence
  Synthetic polypeptide
MESPSAPPHRWCIPWQRLLLTASLLTFWNPPTTAKLTIESTPFNVAEGKEVLLLVHNLPQHLFGYSWYKGERVDGNRQIIGYVIGTQQATPGPAYSGREIIYPNASLLIQNIIQNDTGFYTLHVIKSDLVNEEATGQFRVYPELPKPSISSNNSKPVEDKDAVAFTCEPETQDATYLWWVNNQSLPVSPRLQLSNGNRTLTLFNVTRNDTASYKCETQNPVSARRSDSVILNVLYGPDAPTISPLNTSYRSGENLNLSCHAASNPPAQYSWFVNGTFQQSTQELFIPNITVNNSGSYTCQAHNSDTGLNRTTVTTITVYAEPPKPFITSNNSNPVEDEDAVALTCEPEIQNTTYLWWVNNQSLPVSPRLQLSNDNRTLTLLSVTRNDVGPYECGIQNKLSVDHSDPVILNVLYGPDDPTISPSYTYYRPGVNLSLSCHAASNPPAQYSWLIDGNIQQHTQELFISNITEKNSGLYTCQANNSASGHSRTTVKTITVSDWTRP

SEQ ID NO: 11476 - protein, 501 aa, Artificial Sequence
  Synthetic polypeptide
MESPSAPPHRWCIPWQRLLLTASLLTFWNPPTTAKLTIESTPFNVAEGKEVLLLVHNLPQHLFGYSWYKGERVDGNRQIIGYVIGTQQATPGPAYSGREIIYPNASLLIQNIIQNDTGFYTLHVIKSDLVNEEATGQFRVYPELPKPSISSNNSKPVEDKDAVAFTCEPETQDATYLWWVNNQSLPVSPRLQLSNGNRTLTLFNVTRNDTASYKCETQNPVSARRSDSVILNVLYGPDAPTISPLNTSYRSGENLNLSCHAASNPPAQYSWFVNGTFQQSTQELFIPNITVNNSGSYTCQAHNSDTGLNRTTVTTITVYEPPKPFITSNNSNPVEDEDAVALTCEPEIQNTTYLWWVNNQSLPVSPRLQLSNDNRTLTLLSVTRNDVGPYECGIQNKLSVDHSDPVILNVLYGPDDPTISPSYTYYRPGVNLSLSCHAASNPPAQYSWLIDGNIQQHTQELFISNITEKNSGLYTCQANNSASGHSRTTVKTITVSDWTRP

SEQ ID NO: 11477 - protein, 621 aa, Artificial Sequence
  Synthetic polypeptide
MESPSAPPHRWCIPWQRLLLTASLLTFWNPPTTAKLTIESTPFNVAEGKEVLLLVHNLPQHLFGYSWYKGERVDGNRQIIGYVIGTQQATPGPAYSGREIIYPNASLLIQNIIQNDTGFYTLHVIKSDLVNEEATGQFRVYPELPKPSISSNNSKPVEDKDAVAFTCEPETQDATYLWWVNNQSLPVSPRLQLSNGNRTLTLFNVTRNDTASYKCETQNPVSARRSDSVILNVLYGPDAPTISPLNTSYRSGENLNLSCHAASNPPAQYSWFVNGTFQQSTQELFIPNITVNNSGSYTCQAHNSDTGLNRTTVTTITVYAEPPKPFITSNNSNPVEDEDAVALTCEPEIQNTTYLWWVNNQSLPVSPRLQLSNDNRTLTLLSVTRNDVGPYECGIQNKLSVDHSDPVILNVLYGPDDPTISPSYTYYRPGVNLSLSCHAASNPPAQYSWLIDGNIQQHTQELFISNITEKNSGLYTCQANNSASGHSRTTVKTITVSAELPKPSISSNNSKPVEDKDAVAFTCEPEAQNTTYLWWVNGQSLPVSPRLQLSNGNRTLTLFNVTRNDARAYVCGIQNSVSANRSDPVTLDVLYSCFASSLKHLQQLQSKIASLPRIFTEKTLT

SEQ ID NO: 11478 - protein, 620 aa, Artificial Sequence
  Synthetic polypeptide
MESPSAPPHRWCIPWQRLLLTASLLTFWNPPTTAKLTIESTPFNVAEGKEVLLLVHNLPQHLFGYSWYKGERVDGNRQIIGYVIGTQQATPGPAYSGREIIYPNASLLIQNIIQNDTGFYTLHVIKSDLVNEEATGQFRVYPELPKPSISSNNSKPVEDKDAVAFTCEPETQDATYLWWVNNQSLPVSPRLQLSNGNRTLTLFNVTRNDTASYKCETQNPVSARRSDSVILNVLYGPDAPTISPLNTSYRSGENLNLSCHAASNPPAQYSWFVNGTFQQSTQELFIPNITVNNSGSYTCQAHNSDTGLNRTTVTTITVYEPPKPFITSNNSNPVEDEDAVALTCEPEIQNTTYLWWVNNQSLPVSPRLQLSNDNRTLTLLSVTRNDVGPYECGIQNKLSVDHSDPVILNVLYGPDDPTISPSYTYYRPGVNLSLSCHAASNPPAQYSWLIDGNIQQHTQELFISNITEKNSGLYTCQANNSASGHSRTTVKTITVSAELPKPSISSNNSKPVEDKDAVAFTCEPEAQNTTYLWWVNGQSLPVSPRLQLSNGNRTLTLFNVTRNDARAYVCGIQNSVSANRSDPVTLDVLYSCFASSLKHLQQLQSKIASLPRIFTEKTLT

SEQ ID NO: 11479 - protein, 706 aa, Artificial Sequence
  Synthetic polypeptide
MESPSAPPHRWCIPWQRLLLTASLLTFWNPPTTAKLTIESTPFNVAEGKEVLLLVHNLPQHLFGYSWYKGERVDGNRQIIGYVIGTQQATPGPAYSGREIIYPNASLLIQNIIQNDTGFYTLHVIKSDLVNEEATGQFRVYPELPKPSISSNNSKPVEDKDAVAFTCEPETQDATYLWWVNNQSLPVSPRLQLSNGNRTLTLFNVTRNDTASYKCETQNPVSARRSDSVILNVLYGPDAPTISPLNTSYRSGENLNLSCHAASNPPAQYSWFVNGTFQQSTQELFIPNITVNNSGSYTCQAHNSDTGLNRTTVTTITVYAEPPKPFITSNNSNPVEDEDAVALTCEPEIQNTTYLWWVNNQSLPVSPRLQLSNDNRTLTLLSVTRNDVGPYECGIQNKLSVDHSDPVILNVLYGPDDPTISPSYTYYRPGVNLSLSCHAASNPPAQYSWLIDGNIQQHTQELFISNITEKNSGLYTCQANNSASGHSRTTVKTITVSAELPKPSISSNNSKPVEDKDAVAFTCEPEAQNTTYLWWVNGQSLPVSPRLQLSNGNRTLTLFNVTRNDARAYVCGIQNSVSANRSDPVTLDVLYGPDTPIISPPDSSYLSGANLNLSCHSASNPSPQYSWRINGIPQQHTQVLFIAKITPNNNGTYACFVSNLATGRNNSIVKSITVSDSCFASSLKHLQQLQSKIASLPRIFTEKTLT

SEQ ID NO: 11480 - protein, 705 aa, Artificial Sequence
  Synthetic polypeptide
MESPSAPPHRWCIPWQRLLLTASLLTFWNPPTTAKLTIESTPFNVAEGKEVLLLVHNLPQHLFGYSWYKGERVDGNRQIIGYVIGTQQATPGPAYSGREIIYPNASLLIQNIIQNDTGFYTLHVIKSDLVNEEATGQFRVYPELPKPSISSNNSKPVEDKDAVAFTCEPETQDATYLWWVNNQSLPVSPRLQLSNGNRTLTLFNVTRNDTASYKCETQNPVSARRSDSVILNVLYGPDAPTISPLNTSYRSGENLNLSCHAASNPPAQYSWFVNGTFQQSTQELFIPNITVNNSGSYTCQAHNSDTGLNRTTVTTITVYEPPKPFITSNNSNPVEDEDAVALTCEPEIQNTTYLWWVNNQSLPVSPRLQLSNDNRTLTLLSVTRNDVGPYECGIQNKLSVDHSDPVILNVLYGPDDPTISPSYTYYRPGVNLSLSCHAASNPPAQYSWLIDGNIQQHTQELFISNITEKNSGLYTCQANNSASGHSRTTVKTITVSAELPKPSISSNNSKPVEDKDAVAFTCEPEAQNTTYLWWVNGQSLPVSPRLQLSNGNRTLTLFNVTRNDARAYVCGIQNSVSANRSDPVTLDVLYGPDTPIISPPDSSYLSGANLNLSCHSASNPSPQYSWRINGIPQQHTQVLFIAKITPNNNGTYACFVSNLATGRNNSIVKSITVSDSCFASSLKHLQQLQSKIASLPRIFTEKTLT

SEQ ID NO: 11481 - protein, 682 aa, Artificial Sequence
  Synthetic polypeptide
MESPSAPPHRWCIPWQRLLLTASLLTFWNPPTTAKLTIESTPFNVAEGKEVLLLVHNLPQHLFGYSWYKGERVDGNRQIIGYVIGTQQATPGPAYSGREIIYPNASLLIQNIIQNDTGFYTLHVIKSDLVNEEATGQFRVYPELPKPSISSNNSKPVEDKDAVAFTCEPETQDATYLWWVNNQSLPVSPRLQLSNGNRTLTLFNVTRNDTASYKCETQNPVSARRSDSVILNVLYGPDAPTISPLNTSYRSGENLNLSCHAASNPPAQYSWFVNGTFQQSTQELFIPNITVNNSGSYTCQAHNSDTGLNRTTVTTITVYAEPPKPFITSNNSNPVEDEDAVALTCEPEIQNTTYLWWVNNQSLPVSPRLQLSNDNRTLTLLSVTRNDVGPYECGIQNKLSVDHSDPVILNVLYGPDDPTISPSYTYYRPGVNLSLSCHAASNPPAQYSWLIDGNIQQHTQELFISNITEKNSGLYTCQANNSASGHSRTTVKTITVSAELPKPSISSNNSKPVEDKDAVAFTCEPEAQNTTYLWWVNGQSLPVSPRLQLSNGNRTLTLFNVTRNDARAYVCGIQNSVSANRSDPVTLDVLYGPDTPIISPPDSSYLSGANLNLSCHSASNPSPQYSWRINGIPQQHTQVLFIAKITPNNNGTYACFVSNLATGRNNSIVKSITVSAFATATV

SEQ ID NO: 11482 - protein, 681 aa, Artificial Sequence
  Synthetic polypeptide
MESPSAPPHRWCIPWQRLLLTASLLTFWNPPTTAKLTIESTPFNVAEGKEVLLLVHNLPQHLFGYSWYKGERVDGNRQIIGYVIGTQQATPGPAYSGREIIYPNASLLIQNIIQNDTGFYTLHVIKSDLVNEEATGQFRVYPELPKPSISSNNSKPVEDKDAVAFTCEPETQDATYLWWVNNQSLPVSPRLQLSNGNRTLTLFNVTRNDTASYKCETQNPVSARRSDSVILNVLYGPDAPTISPLNTSYRSGENLNLSCHAASNPPAQYSWFVNGTFQQSTQELFIPNITVNNSGSYTCQAHNSDTGLNRTTVTTITVYEPPKPFITSNNSNPVEDEDAVALTCEPEIQNTTYLWWVNNQSLPVSPRLQLSNDNRTLTLLSVTRNDVGPYECGIQNKLSVDHSDPVILNVLYGPDDPTISPSYTYYRPGVNLSLSCHAASNPPAQYSWLIDGNIQQHTQELFISNITEKNSGLYTCQANNSASGHSRTTVKTITVSAELPKPSISSNNSKPVEDKDAVAFTCEPEAQNTTYLWWVNGQSLPVSPRLQLSNGNRTLTLFNVTRNDARAYVCGIQNSVSANRSDPVTLDVLYGPDTPIISPPDSSYLSGANLNLSCHSASNPSPQYSWRINGIPQQHTQVLFIAKITPNNNGTYACFVSNLATGRNNSIVKSITVSAFATATV

SEQ ID NO: 11483 - protein, 682 aa, Artificial Sequence
  Synthetic polypeptide
MESPSAPPHRWCIPWQRLLLTASLLTFWNPPTTAKLTIESTPFNVAEGKEVLLLVHNLPQHLFGYSWYKGERVDGNRQIIGYVIGTQQATPGPAYSGREIIYPNASLLIQNIIQNDTGFYTLHVIKSDLVNEEATGQFRVYPELPKPSISSNNSKPVEDKDAVAFTCEPETQDATYLWWVNNQSLPVSPRLQLSNGNRTLTLFNVTRNDTASYKCETQNPVSARRSDSVILNVLYGPDAPTISPLNTSYRSGENLNLSCHAASNPPAQYSWFVNGTFQQSTQELFIPNITVNNSGSYTCQAHNSDTGLNRTTVTTITVYAEPPKPFITSNNSNPVEDEDAVALTCEPEIQNTTYLWWVNNQSLPVSPRLQLSNDNRTLTLLSVTRNDVGPYECGIQNKLSVDHSDPVILNVLYGPDDPTISPSYTYYRPGVNLSLSCHAASNPPAQYSWLIDGNIQQHTQELFISNITEKNSGLYTCQANNSASGHSRTTVKTITVSAELPKPSISSNNSKPVEDKDAVAFTCEPEAQNTTYLWWVNGQSLPVSPRLQLSNGNRTLTLFNVTRNDARAYVCGIQNSVSANRSDPVTLDVLYGPDTPIISPPDSSYLSGANLNLSCHSASNPSPQYSWRINGIPQQHTQVLFIAKITPNNNGTYACFVSNLATGRNNSIVKSITVSGYLQKRL

SEQ ID NO: 11484 - protein, 681 aa, Artificial Sequence
  Synthetic polypeptide
MESPSAPPHRWCIPWQRLLLTASLLTFWNPPTTAKLTIESTPFNVAEGKEVLLLVHNLPQHLFGYSWYKGERVDGNRQIIGYVIGTQQATPGPAYSGREIIYPNASLLIQNIIQNDTGFYTLHVIKSDLVNEEATGQFRVYPELPKPSISSNNSKPVEDKDAVAFTCEPETQDATYLWWVNNQSLPVSPRLQLSNGNRTLTLFNVTRNDTASYKCETQNPVSARRSDSVILNVLYGPDAPTISPLNTSYRSGENLNLSCHAASNPPAQYSWFVNGTFQQSTQELFIPNITVNNSGSYTCQAHNSDTGLNRTTVTTITVYEPPKPFITSNNSNPVEDEDAVALTCEPEIQNTTYLWWVNNQSLPVSPRLQLSNDNRTLTLLSVTRNDVGPYECGIQNKLSVDHSDPVILNVLYGPDDPTISPSYTYYRPGVNLSLSCHAASNPPAQYSWLIDGNIQQHTQELFISNITEKNSGLYTCQANNSASGHSRTTVKTITVSAELPKPSISSNNSKPVEDKDAVAFTCEPEAQNTTYLWWVNGQSLPVSPRLQLSNGNRTLTLFNVTRNDARAYVCGIQNSVSANRSDPVTLDVLYGPDTPIISPPDSSYLSGANLNLSCHSASNPSPQYSWRINGIPQQHTQVLFIAKITPNNNGTYACFVSNLATGRNNSIVKSITVSGYLQKRL

SEQ ID NO: 11485 - protein, 680 aa, Artificial Sequence
  Synthetic polypeptide
MESPSAPPHRWCIPWQRLLLTASLLTFWNPPTTAKLTIESTPFNVAEGKEVLLLVHNLPQHLFGYSWYKGERVDGNRQIIGYVIGTQQATPGPAYSGREIIYPNASLLIQNIIQNDTGFYTLHVIKSDLVNEEATGQFRVYPELPKPSISSNNSKPVEDKDAVAFTCEPETQDATYLWWVNNQSLPVSPRLQLSNGNRTLTLFNVTRNDTASYKCETQNPVSARRSDSVILNVLYGPDAPTISPLNTSYRSGENLNLSCHAASNPPAQYSWFVNGTFQQSTQELFIPNITVNNSGSYTCQAHNSDTGLNRTTVTTITVYAEPPKPFITSNNSNPVEDEDAVALTCEPEIQNTTYLWWVNNQSLPVSPRLQLSNDNRTLTLLSVTRNDVGPYECGIQNKLSVDHSDPVILNVLYGPDDPTISPSYTYYRPGVNLSLSCHAASNPPAQYSWLIDGNIQQHTQELFISNITEKNSGLYTCQANNSASGHSRTTVKTITVSAELPKPSISSNNSKPVEDKDAVAFTCEPEAQNTTYLWWVNGQSLPVSPRLQLSNGNRTLTLFNVTRNDARAYVCGIQNSVSANRSDPVTLDVLYGPDTPIISPPDSSYLSGANLNLSCHSASNPSPQYSWRINGIPQQHTQVLFIAKITPNNNGTYACFVSNLATGRNNSIVKSITVSDWTRP

SEQ ID NO: 11486 - protein, 679 aa, Artificial Sequence
  Synthetic polypeptide
MESPSAPPHRWCIPWQRLLLTASLLTFWNPPTTAKLTIESTPFNVAEGKEVLLLVHNLPQHLFGYSWYKGERVDGNRQIIGYVIGTQQATPGPAYSGREIIYPNASLLIQNIIQNDTGFYTLHVIKSDLVNEEATGQFRVYPELPKPSISSNNSKPVEDKDAVAFTCEPETQDATYLWWVNNQSLPVSPRLQLSNGNRTLTLFNVTRNDTASYKCETQNPVSARRSDSVILNVLYGPDAPTISPLNTSYRSGENLNLSCHAASNPPAQYSWFVNGTFQQSTQELFIPNITVNNSGSYTCQAHNSDTGLNRTTVTTITVYEPPKPFITSNNSNPVEDEDAVALTCEPEIQNTTYLWWVNNQSLPVSPRLQLSNDNRTLTLLSVTRNDVGPYECGIQNKLSVDHSDPVILNVLYGPDDPTISPSYTYYRPGVNLSLSCHAASNPPAQYSWLIDGNIQQHTQELFISNITEKNSGLYTCQANNSASGHSRTTVKTITVSAELPKPSISSNNSKPVEDKDAVAFTCEPEAQNTTYLWWVNGQSLPVSPRLQLSNGNRTLTLFNVTRNDARAYVCGIQNSVSANRSDPVTLDVLYGPDTPIISPPDSSYLSGANLNLSCHSASNPSPQYSWRINGIPQQHTQVLFIAKITPNNNGTYACFVSNLATGRNNSIVKSITVSDWTRP

SEQ ID NO: 11487 - protein, 144 aa, Artificial Sequence
  Synthetic polypeptide
MGPPSAPPCRLHVPWKEVLLTASLLTFWNPPTTAKLTIESTPFNVAEGKEVLLLAHNLPQNRIGYSWYKGERVDGNSLIVGYVIGTQQATPGPAYSGRETIYPNASLLIQNVTQNDTGFYTLQVIKSALLLKPYMLEMDNSMKI

SEQ ID NO: 11488 - protein, 239 aa, Artificial Sequence
  Synthetic polypeptide
MGPPSAPPCRLHVPWKEVLLTASLLTFWNPPTTAKLTIESTPFNVAEGKEVLLLAHNLPQNRIGYSWYKGERVDGNSLIVGYVIGTQQATPGPAYSGRETIYPNASLLIQNVTQNDTGFYTLQVIKSDLVNEEATGQFHVYPELPKPSISSNNSNPVEDKDAVAFTCEPEVQNTTYLWWVNGQSLPVSPRLQLSNGNMTLTLLSVKRNDAGSYECEIQNPASANRSDPVTLNVLYWTRP

SEQ ID NO: 11489 - protein, 324 aa, Artificial Sequence
  Synthetic polypeptide
MGPPSAPPCRLHVPWKEVLLTASLLTFWNPPTTAKLTIESTPFNVAEGKEVLLLAHNLPQNRIGYSWYKGERVDGNSLIVGYVIGTQQATPGPAYSGRETIYPNASLLIQNVTQNDTGFYTLQVIKSDLVNEEATGQFHVYPELPKPSISSNNSNPVEDKDAVAFTCEPEVQNTTYLWWVNGQSLPVSPRLQLSNGNMTLTLLSVKRNDAGSYECEIQNPASANRSDPVTLNVLYGPDGPTISPSKANYRPGENLNLSCHAASNPPAQYSWFINGTFQQSTQELFIPNITVNNSGSYMCQAHNSATGLNRTTVTMITVSDWTRP

SEQ ID NO: 11490 - protein, 30 aa, Artificial Sequence; identical to SEQ ID NO: 1380
  Synthetic polypeptide

SEQ ID NO: 11491 - protein, 99 aa, Artificial Sequence
  Synthetic polypeptide
MDTNLNGRGLETWSSWGLRCMQCKTNGDCRVEECALGQDLCRTTIVRLWEEGEELELVEKSCTHSEKTNRTLSYRTGLKITSLTEVVCGLDLCNQGNSG

SEQ ID NO: 11492 - protein, 104 aa, Artificial Sequence
  Synthetic polypeptide
MGHPPLLPLLLLLHTCVPASWGLRCMQCKTNGDCRVEECALGQDLCRTTIVRLWEEGEELELVEKSCTHSEKTNRTLSYRTGLKITSLTEVVCGLDLCNQGNSG

SEQ ID NO: 11493 - protein, 79 aa, Artificial Sequence
  Synthetic polypeptide
MQCKTNGDCRVEECALGQDLCRTTIVRLWEEGEELELVEKSCTHSEKTNRTLSYRTGLKITSLTEVVCGLDLCNQGNSG

SEQ ID NO: 11494 - protein, 127 aa, Artificial Sequence
  Synthetic polypeptide
MDTNLNGRGLETWSSWGLRCMQCKTNGDCRVEECALGQDLCRTTIVRLWEEGEELELVEKSCTHSEKTNRTLSYRTGLKITSLTEVVCGLDLCNQGNSDNLAFSRSALANLLLWKGNRAQTERESLD

SEQ ID NO: 11495 - protein, 132 aa, Artificial Sequence
  Synthetic polypeptide
MGHPPLLPLLLLLHTCVPASWGLRCMQCKTNGDCRVEECALGQDLCRTTIVRLWEEGEELELVEKSCTHSEKTNRTLSYRTGLKITSLTEVVCGLDLCNQGNSDNLAFSRSALANLLLWKGNRAQTERESLD

SEQ ID NO: 11496 - protein, 107 aa, Artificial Sequence
  Synthetic polypeptide
MQCKTNGDCRVEECALGQDLCRTTIVRLWEEGEELELVEKSCTHSEKTNRTLSYRTGLKITSLTEVVCGLDLCNQGNSDNLAFSRSALANLLLWKGNRAQTERESLD

SEQ ID NO: 11497 - protein, 481 aa, Artificial Sequence; identical to SEQ ID NO: 402
  Synthetic polypeptide

SEQ ID NO: 11498 - protein, 478 aa, Artificial Sequence
  Synthetic polypeptide
MARAAALLPSRSPPTPLLWPLLLLLLLETGAQDVRVQVLPEVRGQLGGTVELPCHLLPPVPGLYISLVTWQRPDAPANHQNVAAFHPKMGPSFPSPKPGSERLSFVSAKQSTGQDTEAELQDATLALHGLTVEDEGNYTCEFATFPKGSVRGMTWLRVIAKPKNQAEAQKVTFSQDPTTVALCISKEGRPPARISWLSSLDWEAKETQVSGTLAGTVTVTSRFTLVPSGRADGVTVTCKVEHESFEEPALIPVTLSVRYPPEVSISGYDDNWYLGRTDATLSCDVRSNPEPTGYDWSTTSGTFPTSAVAQGSQLVIHAVDSLFNTTFVCTVTNAVGMGRAEQVIFVRETPNTAGAGATGGIIGGIIAAIIATAVAATGILICRQQRKEQTLQGAEEDEDLEGPPSYKPPTPKAKLEAQEMPSQLFTLGASEHSPLKTPYFDAGASCTEQLFRRLKQENRLDPGGRSCNELRPRHCTPA

SEQ ID NO: 11499 - protein, 39 aa, Artificial Sequence; identical to SEQ ID NO: 1320
  Synthetic polypeptide

SEQ ID NO: 11500 - protein, 411 aa, Artificial Sequence
  Synthetic polypeptide
MGGHFWPPEPYTVFMWGSPWEADSPRVKLRGREKGRQTEGGAFPLVSSALSGDPRFFSPTTPPAEPIVVRLKEVRLQRDDFEILKVIGRGAFSEVAVVKMKQTGQVYAMKIMNKWDMLKRGEVSCFREERDVLVNGDRRWITQLHFAFQDENYLYLVMEYYVGGDLLTLLSKFGERIPAEMARFYLAEIVMAIDSVHRLGYVHRDIKPDNILLDRCGHIRLADFGSCLKLRADGTVRSLVAVGTPDYLSPEILQAVGGGPGTGSYGPECDWWALGVFAYEMFYGQTPFYADSTAETYGKIVHYKEHLSLPLVDEGVPEEARDFIQRLLCPPETRLGRGGAGDFRTHPFFFGLDWDGLRDSVPPFTPDFEGATDTCNFDLVEDGLTAMVSGGGAEVGGLLEPRSSRPAWAMW

SEQ ID NO: 11501 - protein, 401 aa, Artificial Sequence
  Synthetic polypeptide
MSAEVRLRRLQQLVLDPGFLGLEPLLDLLLGVHQELGASELAQDKYVADFLQWAEPIVVRLKEVRLQRDDFEILKVIGRGAFSEVAVVKMKQTGQVYAMKIMNKWDMLKRGEVSCFREERDVLVNGDRRWITQLHFAFQDENYLYLVMEYYVGGDLLTLLSKFGERIPAEMARFYLAEIVMAIDSVHRLGYVHRDIKPDNILLDRCGHIRLADFGSCLKLRADGTVRSLVAVGTPDYLSPEILQAVGGGPGTGSYGPECDWWALGVFAYEMFYGQTPFYADSTAETYGKIVHYKEHLSLPLVDEGVPEEARDFIQRLLCPPETRLGRGGAGDFRTHPFFFGLDWDGLRDSVPPFTPDFEGATDTCNFDLVEDGLTAMVSGGGAEVGGLLEPRSSRPAWAMW

SEQ ID NO: 11502 - protein, 60 aa, Artificial Sequence
  Synthetic polypeptide
  misc_feature (1)..(1): Xaa can be any naturally occurring amino acid
XDWDGLRDSVPPFTPDFEGATDTCNFDLVEDGLTAMVSGGGAEVGGLLEPRSSRPAWAMW

SEQ ID NO: 11503 - protein, 406 aa, Artificial Sequence
  Synthetic polypeptide
MGGHFWPPEPYTVFMWGSPWEADSPRVKLRGREKGRQTEGGAFPLVSSALSGDPRFFSPTTPPAEPIVVRLKEVRLQRDDFEILKVIGRGAFSEVAVVKMKQTGQVYAMKIMNKWDMLKRGEVSCFREERDVLVNGDRRWITQLHFAFQDENYLYLVMEYYVGGDLLTLLSKFGERIPAEMARFYLAEIVMAIDSVHRLGYVHRDIKPDNILLDRCGHIRLADFGSCLKLRADGTVRSLVAVGTPDYLSPEILQAVGGGPGTGSYGPECDWWALGVFAYEMFYGQTPFYADSTAETYGKIVHYKEHLSLPLVDEGVPEEARDFIQRLLCPPETRLGRGGAGDFRTHPFFFGLDWDGLRDSVPPFTPDFEGATDTCNFDLVEDGLTAMAEVGGLLEPRSSRPAWAMW

SEQ ID NO: 11504 - protein, 396 aa, Artificial Sequence
  Synthetic polypeptide
MSAEVRLRRLQQLVLDPGFLGLEPLLDLLLGVHQELGASELAQDKYVADFLQWAEPIVVRLKEVRLQRDDFEILKVIGRGAFSEVAVVKMKQTGQVYAMKIMNKWDMLKRGEVSCFREERDVLVNGDRRWITQLHFAFQDENYLYLVMEYYVGGDLLTLLSKFGERIPAEMARFYLAEIVMAIDSVHRLGYVHRDIKPDNILLDRCGHIRLADFGSCLKLRADGTVRSLVAVGTPDYLSPEILQAVGGGPGTGSYGPECDWWALGVFAYEMFYGQTPFYADSTAETYGKIVHYKEHLSLPLVDEGVPEEARDFIQRLLCPPETRLGRGGAGDFRTHPFFFGLDWDGLRDSVPPFTPDFEGATDTCNFDLVEDGLTAMAEVGGLLEPRSSRPAWAMW

SEQ ID NO: 11505 - protein, 55 aa, Artificial Sequence
  Synthetic polypeptide
  misc_feature (1)..(1): Xaa can be any naturally occurring amino acid
XDWDGLRDSVPPFTPDFEGATDTCNFDLVEDGLTAMAEVGGLLEPRSSRPAWAMW

SEQ ID NO: 11506 - protein, 243 aa, Artificial Sequence
  Synthetic polypeptide
MASGSGDSVTRRSVASQFFTQEEGPGIDGMTTSERVVDLLNQAALITNDSKITVLKQVQELIINKDPTLLDNFLDEIIAFQADKSIEVRKFVIGFIEEACKRDIELLLKLIANLNMLLRDENVNVVKKAILTMTQLYKVALQWMVKSRVISELQEACWDMVSAMAGDIILLLDSDNDGIRTHAIKFVEGLIVTLSPRMADSEIPRRQEHDISLDRIPRDHPYIQYTLVRIAKTSEQTKYSSTE

SEQ ID NO: 11507 - protein, 30 aa, Artificial Sequence
  Synthetic polypeptide
MALGKFRAALRDYETKMVTRGVAASGWLWL

SEQ ID NO: 11508 - protein, 136 aa, Artificial Sequence
  Synthetic polypeptide
MAMAEGERTECAEPPRDEPPADGALKRAEELKTQANDYFKAKDYENAIKFYSQAIELNPSNAIYYGNRSLAYLRTECYGYALGDATRAIELDKKYIKGYYRRAASNMALGKFRAALRDYETKMVTRGVAASGWLWL

SEQ ID NO: 11509 - protein, 135 aa, Artificial Sequence
  Synthetic polypeptide
  misc_feature (1)..(1): Xaa can be any naturally occurring amino acid
XMAEGERTECAEPPRDEPPADGALKRAEELKTQANDYFKAKDYENAIKFYSQAIELNPSNAIYYGNRSLAYLRTECYGYALGDATRAIELDKKYIKGYYRRAASNMALGKFRAALRDYETKMVTRGVAASGWLWL

SEQ ID NO: 11510 - protein, 45 aa, Artificial Sequence
  Synthetic polypeptide
MKLKGLGKRCKRREDLEAWWRVPVVPATQDTEAGESLEPGRRRLQ

SEQ ID NO: 11511 - protein, 29 aa, Artificial Sequence
  Synthetic polypeptide
MAWWRVPVVPATQDTEAGESLEPGRRRLQ

SEQ ID NO: 11512 - protein, 1305 aa, Artificial Sequence
  Synthetic polypeptide
MMMARKQDVRIPTYNISVVGLSGTEKEKGQCGIGKSCLCNRFVRPSADEFHLDHTSVLSTSDFGGRVVNNDHFLYWGEVSRSLEDCVECKMHIVEQTEFIDDQTFQPHRSTALQPYIKRAAATKLASAEKLMYFCTDQLGLEQDFEQKQMPDGKLLVDGFLLGIDVSRGMNRNFDDQLKFVSNLYNQLAKTKKPIVVVLTKCDEGVERYIRDAHTFALSKKNLQVVETSARSNVNVDLAFSTLVQLIDKSRGKTKIIPYFEALKQQSQQIATAKDKYEWLVSRIVKNHNENWLSVSRKMQASPEYQDYVYLEGTQKAKKLFLQHIHRLKHEHIERRRKLYLAALPLAFEALIPNLDEIDHLSCIKAKKLLETKPEFLKWFVVLEETPWDATSHIDNMENERIPFDLMDTVPAEQLYEAHLEKLRNERKRVEMRRAFKENLETSPFITPGKPWEEARSFIMNEDFYQWLEESVYMDIYGKHQKQIIDKAKEEFQELLLEYSELFYELELDAKPSKEKMGVIQDVLGEEQRFKALQKLQAERDALILKHIHFVYHPTKETCPSCPACVDAKIEHLISSRFIRPSDRNQKNSLSDPNIDRINLVILGKDGLARELANEIRALCTNDDKYVIDGKMYELSLRPIEGNVRLPVNSFQTPTFQPHGCLCLYNSKESLSYVVESIEKSRESTLGRRDNHLVHLPLTLILVNKRGDTSGETLHSLIQQGQQIASKLQCVFLDPASAGIGYGRNINEKQISQVLKGLLDSKRNLNLVSSTASIKDLADVDLRIVMCLMCGDPFSADDILFPVLQSQTCKSSHCGSNNSVLLELPIGLHKKRIELSVLSYHSSFSIRKSRLVHGYIVFYSAKRKASLAMLRAFLCEVQDIIPIQLVALTDGAVDVLDNDLSREQLTEGEEIAQEIDGRFTSIPCSQPQHKLEIFHPFFKDVVEKKNIIEATHMYDNAAEACSTTEEVFNSPRAGSPLCNSNLQDSEEDIEPSYSLFREDTSLPSLSKDHSKLSMELEGNDGLSFIMSNFESKLNNKVPPPVKPKPPVHFEITKGDLSYLDQGHRDGQRKSVSSSPWLPQDGFDPSDYAEPMDAVVKPRNEEENIYSVPHDSTQGKIITIRNINKAQSNGSGNGSDSEMDTSSLERGRKVSIVSKPVLYRTRCTRLGRFASYRTSFSVGSDDELGPIRKKEEDQASQGYKGDNAVIPYETDEDPRRRNILRSLRRNTKKPKPKPRPSITKATWESNYFGVPLTTVVTPEKPIPIFIERCIEYIEATGICPRKMKTYVHTKTCTQLFLAALFMTAPN

SEQ ID NO: 11513 - protein, 130 aa, Artificial Sequence
  Synthetic polypeptide
GSALGNTEVIREYIFGLWRRAVANAKSIGHLIFARLLRLQESSQGEHPPPEDEGGEPEHTWLTEMLENWTRTSLEKQEQPHEDPERKGSLSNLMDFVKKTGICASKWEWGTTHNFLYKHDLLSLCTVDSP

SEQ ID NO: 11514 - protein, 194 aa, Artificial Sequence
  Synthetic polypeptide
LPYPIFAAIDNDLQPSWQEARAPETWFEFTPHHAGFSALGAFVSITHFGSKFKKGRLVRTHPERDLTFLRDQLRNLTLKGLWRRAVANAKSIGHLIFARLLRLQESSQGEHPPPEDEGGEPEHTWLTEMLENWTRTSLEKQEQPHEDPERKGSLSNLMDFVKKTGICASKWEWGTTHNFLYKHDLLSLCTVDSP

SEQ ID NO: 11515 - protein, 378 aa, Artificial Sequence
  Synthetic polypeptide
MGSSEVSIIPGLQKEEKAAVERRRLHVLKALKKLRIEADEAPVVAVLGSGGGLRAHIACLGVLSEMKEQGLLDAVTYLAGVSGSTWAISSLYTNDGDMEALEADLKHRFTRQEWDLAKSLQKTIQAARSENYSLTDFWAYMVISKQTRELPESHLSNMKKPVEEGTLPYPIFAAIDNDLQPSWQEARAPETWFEFTPHHAGFSALGAFVSITHFGSKFKKGRLVRTHPERDLTFLRGLWGSALGNTEVIREYIFDQLRNLTLKGLWRRAVANAKSIGHLIFARLLRLQESSQGEHPPPEDEGGEPEHTWLTEMLENWTRTSLEKQEQPHEDPERKGSLSNLMDFVKKTGICASKWEWGTTHNFLYKHDLLSLCTVDSP

SEQ ID NO: 11516 - protein, 388 aa, Artificial Sequence
  Synthetic polypeptide
MRTRPRPRLRRTENFLTAVHHGKKEEKAAVERRRLHVLKALKKLRIEADEAPVVAVLGSGGGLRAHIACLGVLSEMKEQGLLDAVTYLAGVSGSTWAISSLYTNDGDMEALEADLKHRFTRQEWDLAKSLQKTIQAARSENYSLTDFWAYMVISKQTRELPESHLSNMKKPVEEGTLPYPIFAAIDNDLQPSWQEARAPETWFEFTPHHAGFSALGAFVSITHFGSKFKKGRLVRTHPERDLTFLRGLWGSALGNTEVIREYIFDQLRNLTLKGLWRRAVANAKSIGHLIFARLLRLQESSQGEHPPPEDEGGEPEHTWLTEMLENWTRTSLEKQEQPHEDPERKGSLSNLMDFVKKTGICASKWEWGTTHNFLYKHDLLSLCTVDSP

SEQ ID NO: 11517 - protein, 67 aa, Artificial Sequence
  Synthetic polypeptide
  misc_feature (1)..(1): Xaa can be any naturally occurring amino acid
XMLENWTRTSLEKQEQPHEDPERKGSLSNLMDFVKKTGICASKWEWGTTHNFLYKHDLLSLCTVDSP

SEQ ID NO: 11518 - protein, 126 aa, Artificial Sequence
  Synthetic polypeptide
GSALGNTEVIREYIFGLWRRAVANAKSIGHLIFARLLRLQESSQGEHPPPEDEGGEPEHTWLTEMLENWTRTSLEKQEQPHEDPERKGSLSNLMDFVKKTGICASKWEWGTTHNFLYKHEFDSFHQ

SEQ ID NO: 11519 - protein, 190 aa, Artificial Sequence
  Synthetic polypeptide
LPYPIFAAIDNDLQPSWQEARAPETWFEFTPHHAGFSALGAFVSITHFGSKFKKGRLVRTHPERDLTFLRDQLRNLTLKGLWRRAVANAKSIGHLIFARLLRLQESSQGEHPPPEDEGGEPEHTWLTEMLENWTRTSLEKQEQPHEDPERKGSLSNLMDFVKKTGICASKWEWGTTHNFLYKHEFDSFHQ

SEQ ID NO: 11520 - protein, 374 aa, Artificial Sequence
  Synthetic polypeptide
MGSSEVSIIPGLQKEEKAAVERRRLHVLKALKKLRIEADEAPVVAVLGSGGGLRAHIACLGVLSEMKEQGLLDAVTYLAGVSGSTWAISSLYTNDGDMEALEADLKHRFTRQEWDLAKSLQKTIQAARSENYSLTDFWAYMVISKQTRELPESHLSNMKKPVEEGTLPYPIFAAIDNDLQPSWQEARAPETWFEFTPHHAGFSALGAFVSITHFGSKFKKGRLVRTHPERDLTFLRGLWGSALGNTEVIREYIFDQLRNLTLKGLWRRAVANAKSIGHLIFARLLRLQESSQGEHPPPEDEGGEPEHTWLTEMLENWTRTSLEKQEQPHEDPERKGSLSNLMDFVKKTGICASKWEWGTTHNFLYKHEFDSFHQ

SEQ ID NO: 11521 - protein, 384 aa, Artificial Sequence
  Synthetic polypeptide
MRTRPRPRLRRTENFLTAVHHGKKEEKAAVERRRLHVLKALKKLRIEADEAPVVAVLGSGGGLRAHIACLGVLSEMKEQGLLDAVTYLAGVSGSTWAISSLYTNDGDMEALEADLKHRFTRQEWDLAKSLQKTIQAARSENYSLTDFWAYMVISKQTRELPESHLSNMKKPVEEGTLPYPIFAAIDNDLQPSWQEARAPETWFEFTPHHAGFSALGAFVSITHFGSKFKKGRLVRTHPERDLTFLRGLWGSALGNTEVIREYIFDQLRNLTLKGLWRRAVANAKSIGHLIFARLLRLQESSQGEHPPPEDEGGEPEHTWLTEMLENWTRTSLEKQEQPHEDPERKGSLSNLMDFVKKTGICASKWEWGTTHNFLYKHEFDSFHQ

SEQ ID NO: 11522 - protein, 63 aa, Artificial Sequence
  Synthetic polypeptide
  misc_feature (1)..(1): Xaa can be any naturally occurring amino acid
XMLENWTRTSLEKQEQPHEDPERKGSLSNLMDFVKKTGICASKWEWGTTHNFLYKHEFDSFHQ

SEQ ID NO: 11523 - protein, 153 aa, Artificial Sequence
  Synthetic polypeptide
MAPPPPPLAASTPLLHGEFGSYPARGPRFALTLTSQALHIQRLRPKPEARPRGGLVPLAEVSGCCTLRSRSPSDSAAYFCIYTYPRGRRGARRRATRTFRADGAATYEENRAEAQRWATALTCLLRGLPLPGDGATREAEAGESLEPGRQRLQ

SEQ ID NO: 11524 - protein, 251 aa, Artificial Sequence
  Synthetic polypeptide
MIGCLHARVSGPLWDAGLCPASSRSAHTCLSLSVSDAPVSPATAPHCLLLSTAPAPPCPCHGVLNSHPFSPPFPQRPDQELTGSWGHGPRSTLVRAKAMAPPPPPLAASTPLLHGEFGSYPARGPRFALTLTSQALHIQRLRPKPEARPRGGLVPLAEVSGCCTLRSRSPSDSAAYFCIYTYPRGRRGARRRATRTFRADGAATYEENRAEAQRWATALTCLLRGLPLPGDGATREAEAGESLEPGRQRLQ

SEQ ID NO: 11525 - protein, 130 aa, Artificial Sequence
  Synthetic polypeptide
MNGHLEAEEQQDQALHIQRLRPKPEARPRGGLVPLAEVSGCCTLRSRSPSDSAAYFCIYTYPRGRRGARRRATRTFRADGAATYEENRAEAQRWATALTCLLRGLPLPGDGATREAEAGESLEPGRQRLQ

SEQ ID NO: 11526 - protein, 189 aa, Artificial Sequence
  Synthetic polypeptide
MNGHLEAEEQQDQRPDQELTGSWGHGPRSTLVRAKAMAPPPPPLAASTPLLHGEFGSYPARGPRFALTLTSQALHIQRLRPKPEARPRGGLVPLAEVSGCCTLRSRSPSDSAAYFCIYTYPRGRRGARRRATRTFRADGAATYEENRAEAQRWATALTCLLRGLPLPGDGATREAEAGESLEPGRQRLQ

SEQ ID NO: 11527 - protein, 23 aa, Artificial Sequence
  Synthetic polypeptide
MATVYFTRATSQCKCSINYHLNI

SEQ ID NO: 11528 - protein, 38 aa, Artificial Sequence
  Synthetic polypeptide
MATVTATTKVPEIRDVTRIERIGPNRADDQEITIECTS

SEQ ID NO: 11529 - protein, 38 aa, Artificial Sequence
  Synthetic polypeptide
MPAVSKGDGMRGLAVFISDIRNCSSPWEASGDDCQLNE

SEQ ID NO: 11530 - protein, 38 aa, Artificial Sequence
  Synthetic polypeptide
  misc_feature (1)..(1): Xaa can be any naturally occurring amino acid
XPAVSKGDGMRGLAVFISDIRNCSSPWEASGDDCQLNE

SEQ ID NO: 11531 - protein, 319 aa, Artificial Sequence
  Synthetic polypeptide
MRSPAVPTPARGQLGVAFVLLPPHSEGARVFGALGPIGPSSPGLTLGGLAVSEHRLSNKLLAWSGVLEWQEKRRPYSDSTAKLKRTLPCQAYVNQGENLETDQWPQKLIMQLIPQQLLTTLGPLFRNSQLAQFHFTNRDCDSLKGLCRIMGNGFAGCMLFPHISPCEVRVLMLLYSSKKKIFMGLIPYDQSGFVSAIRQVITTRKQAVGPGGVNSGPVQIVNNKFLAWSGVMEWQEPRPEPNSRSKRWLPSHVYVNQGEILRTEQWPRKLYMQLIPQQLLTTLVPLFRNSRLVQFHFTKDLETLKSLCRIMDNGFFLHL

SEQ ID NO: 11532 - protein, 351 aa, Artificial Sequence
  Synthetic polypeptide
MVRPRRAPYRSGAGGPLGGRGRPPRPLVVRAVRSRSWPASPRGPQPPRIRARSAPPMEGARVFGALGPIGPSSPGLTLGGLAVSEHRLSNKLLAWSGVLEWQEKRRPYSDSTAKLKRTLPCQAYVNQGENLETDQWPQKLIMQLIPQQLLTTLGPLFRNSQLAQFHFTNRDCDSLKGLCRIMGNGFAGCMLFPHISPCEVRVLMLLYSSKKKIFMGLIPYDQSGFVSAIRQVITTRKQAVGPGGVNSGPVQIVNNKFLAWSGVMEWQEPRPEPNSRSKRWLPSHVYVNQGEILRTEQWPRKLYMQLIPQQLLTTLVPLFRNSRLVQFHFTKDLETLKSLCRIMDNGFFLHL

SEQ ID NO: 11533 - protein, 82 aa, Artificial Sequence
  Synthetic polypeptide
RPEPNSRSKRWLPSHVYVNQGEILRTEQWPRKLYMQLIPQQLLTTLVPLFRNSRLVQFHFTKDLETLKSLCRIMDNGFFLHL

SEQ ID NO: 11534 - protein, 538 aa, Artificial Sequence; identical to SEQ ID NO: 340
  Synthetic polypeptide

SEQ ID NO: 11535 - protein, 633 aa, Artificial Sequence; identical to SEQ ID NO: 230
  Synthetic polypeptide

SEQ ID NO: 11536 - protein, 448 aa, Artificial Sequence; identical to SEQ ID NO: 438
  Synthetic polypeptide

SEQ ID NO: 11537 - protein, 455 aa, Artificial Sequence; identical to SEQ ID NO: 428
  Synthetic polypeptide

SEQ ID NO: 11538 - protein, 490 aa, Artificial Sequence; identical to SEQ ID NO: 385
  Synthetic polypeptide

SEQ ID NO: 11539 - protein, 480 aa, Artificial Sequence; identical to SEQ ID NO: 404
  Synthetic polypeptide

SEQ ID NO: 11540 - protein, 575 aa, Artificial Sequence; identical to SEQ ID NO: 303
  Synthetic polypeptide

SEQ ID NO: 11541 - protein, 390 aa, Artificial Sequence; identical to SEQ ID NO: 549
  Synthetic polypeptide

SEQ ID NO: 11542 - protein, 524 aa, Artificial Sequence
  Synthetic polypeptide
MLLPLLLSSLLGGSQAMDGRFWIRVQESVMVPEGLCISVPCSFSYPRQDWTGSTPAYGYWFKAVTETTKGAPVATNHQSREVEMSTRGRFQLTGDPAKGNCSLVIRDAQMQDESQYFFRVERGSYVRYNFMNDGFFLKVTALTQKPDVYIPETLEPGQPVTVICVFNWAFEECPPPSFSWTGAALSSQGTKPTTSHFSVLSFTPRPQDHNTDLTCHVDFSRKGVSAQRTVRLRVAYAPRDLVISISRDNTPALEPQPQGNVPYLEAQKGQFLRLLCAADSQPPATLSWVLQNRVLSSSHPWGPRPLGLELPGVKAGDSGRYTCRAENRLGSQQRALDLSVQYPPENLRVMVSQANRTVLENLGNGTSLPVLEGQSLCLVCVTHSSPPARLSWTQRGQVLSPSQPSDPGVLELPRVQVEHEGEFTCHARHPLGSQHVSLSLSVHYKKGLISTAFSNGAFLGIGITALLFLCLALIIMKILPKRRTQTETPRPRFSRHSTILDYINVVPTAGPLMECKLSKARAGT

SEQ ID NO: 11543 - protein, 619 aa, Artificial Sequence
  Synthetic polypeptide
MLLPLLLSSLLGGSQAMDGRFWIRVQESVMVPEGLCISVPCSFSYPRQDWTGSTPAYGYWFKAVTETTKGAPVATNHQSREVEMSTRGRFQLTGDPAKGNCSLVIRDAQMQDESQYFFRVERGSYVRYNFMNDGFFLKVTALTQKPDVYIPETLEPGQPVTVICVFNWAFEECPPPSFSWTGAALSSQGTKPTTSHFSVLSFTPRPQDHNTDLTCHVDFSRKGVSAQRTVRLRVAYAPRDLVISISRDNTPALEPQPQGNVPYLEAQKGQFLRLLCAADSQPPATLSWVLQNRVLSSSHPWGPRPLGLELPGVKAGDSGRYTCRAENRLGSQQRALDLSVQYPPENLRVMVSQANRTVLENLGNGTSLPVLEGQSLCLVCVTHSSPPARLSWTQRGQVLSPSQPSDPGVLELPRVQVEHEGEFTCHARHPLGSQHVSLSLSVHYSPKLLGPSCSWEAEGLHCSCSSQASPAPSLRWWLGEELLEGNSSQDSFEVTPSSAGPWANSSLSLHGGLSSGLRLRCEAWNVHGAQSGSILQLPDKKGLISTAFSNGAFLGIGITALLFLCLALIIMKILPKRRTQTETPRPRFSRHSTILDYINVVPTAGPLMECKLSKARAGT

SEQ ID NO: 11544 - protein, 434 aa, Artificial Sequence
  Synthetic polypeptide
MLLPLLLSSLLGGSQAMDGRFWIRVQESVMVPEGLCISVPCSFSYPRQDWTGSTPAYGYWFKAVTETTKGAPVATNHQSREVEMSTRGRFQLTGDPAKGNCSLVIRDAQMQDESQYFFRVERGSYVRYNFMNDGFFLKVTALTQKPDVYIPETLEPGQPVTVICVFNWAFEECPPPSFSWTGAALSSQGTKPTTSHFSVLSFTPRPQDHNTDLTCHVDFSRKGVSAQRTVRLRVAYAPRDLVISISRDNTPDPPENLRVMVSQANRTVLENLGNGTSLPVLEGQSLCLVCVTHSSPPARLSWTQRGQVLSPSQPSDPGVLELPRVQVEHEGEFTCHARHPLGSQHVSLSLSVHYKKGLISTAFSNGAFLGIGITALLFLCLALIIMKILPKRRTQTETPRPRFSRHSTILDYINVVPTAGPLMECKLSKARAGT

SEQ ID NO: 11545 - protein, 441 aa, Artificial Sequence
  Synthetic polypeptide
MLLPLLLSSLLGGSQAMDGRFWIRVQESVMVPEGLCISVPCSFSYPRQDWTGSTPAYGYWFKAVTETTKGAPVATNHQSREVEMSTRGRFQLTGDPAKGNCSLVIRDAQMQDESQYFFRVERGSYVRYNFMNDGFFLKVTALTQKTVRLRVAYAPRDLVISISRDNTPALEPQPQGNVPYLEAQKGQFLRLLCAADSQPPATLSWVLQNRVLSSSHPWGPRPLGLELPGVKAGDSGRYTCRAENRLGSQQRALDLSVQYPPENLRVMVSQANRTVLENLGNGTSLPVLEGQSLCLVCVTHSSPPARLSWTQRGQVLSPSQPSDPGVLELPRVQVEHEGEFTCHARHPLGSQHVSLSLSVHYKKGLISTAFSNGAFLGIGITALLFLCLALIIMKILPKRRTQTETPRPRFSRHSTILDYINVVPTAGPLMECKLSKARAGT

SEQ ID NO: 11546 - protein, 476 aa, Artificial Sequence
  Synthetic polypeptide
MLLPLLLSSLLGGSQAMDGRFWIRVQESVMVPEGLCISVPCSFSYPRQDWTGSTPAYGYWFKAVTETTKGAPVATNHQSREVEMSTRGRFQLTGDPAKGNCSLVIRDAQMQDESQYFFRVERGSYVRYNFMNDGFFLKVTGTKPTTSHFSVLSFTPRPQDHNTDLTCHVDFSRKGVSAQRTVRLRVAYAPRDLVISISRDNTPALEPQPQGNVPYLEAQKGQFLRLLCAADSQPPATLSWVLQNRVLSSSHPWGPRPLGLELPGVKAGDSGRYTCRAENRLGSQQRALDLSVQYPPENLRVMVSQANRTVLENLGNGTSLPVLEGQSLCLVCVTHSSPPARLSWTQRGQVLSPSQPSDPGVLELPRVQVEHEGEFTCHARHPLGSQHVSLSLSVHYKKGLISTAFSNGAFLGIGITALLFLCLALIIMKILPKRRTQTETPRPRFSRHSTILDYINVVPTAGPLMECKLSKARAGT

SEQ ID NO: 11547 - protein, 466 aa, Artificial Sequence
  Synthetic polypeptide
MLLPLLLSSLLGGSQAMDGRFWIRVQESVMVPEGLCISVPCSFSYPRQDWTGSTPAYGYWFKAVTETTKGAPVATNHQSREVEMSTRGRFQLTGDPAKGNCSLVIRDAQMQDESQYFFRVERGSYVRYNFMNDGFFLKVTVLSFTPRPQDHNTDLTCHVDFSRKGVSAQRTVRLRVAYAPRDLVISISRDNTPALEPQPQGNVPYLEAQKGQFLRLLCAADSQPPATLSWVLQNRVLSSSHPWGPRPLGLELPGVKAGDSGRYTCRAENRLGSQQRALDLSVQYPPENLRVMVSQANRTVLENLGNGTSLPVLEGQSLCLVCVTHSSPPARLSWTQRGQVLSPSQPSDPGVLELPRVQVEHEGEFTCHARHPLGSQHVSLSLSVHYKKGLISTAFSNGAFLGIGITALLFLCLALIIMKILPKRRTQTETPRPRFSRHSTILDYINVVPTAGPLMECKLSKARAGT

SEQ ID NO: 11548 - protein, 561 aa, Artificial Sequence
  Synthetic polypeptide
MLLPLLLSSLLGGSQAMDGRFWIRVQESVMVPEGLCISVPCSFSYPRQDWTGSTPAYGYWFKAVTETTKGAPVATNHQSREVEMSTRGRFQLTGDPAKGNCSLVIRDAQMQDESQYFFRVERGSYVRYNFMNDGFFLKVTVLSFTPRPQDHNTDLTCHVDFSRKGVSAQRTVRLRVAYAPRDLVISISRDNTPALEPQPQGNVPYLEAQKGQFLRLLCAADSQPPATLSWVLQNRVLSSSHPWGPRPLGLELPGVKAGDSGRYTCRAENRLGSQQRALDLSVQYPPENLRVMVSQANRTVLENLGNGTSLPVLEGQSLCLVCVTHSSPPARLSWTQRGQVLSPSQPSDPGVLELPRVQVEHEGEFTCHARHPLGSQHVSLSLSVHYSPKLLGPSCSWEAEGLHCSCSSQASPAPSLRWWLGEELLEGNSSQDSFEVTPSSAGPWANSSLSLHGGLSSGLRLRCEAWNVHGAQSGSILQLPDKKGLISTAFSNGAFLGIGITALLFLCLALIIMKILPKRRTQTETPRPRFSRHSTILDYINVVPTAGPLMECKLSKARAGT

SEQ ID NO: 11549 - protein, 376 aa, Artificial Sequence
  Synthetic polypeptide
MLLPLLLSSLLGGSQAMDGRFWIRVQESVMVPEGLCISVPCSFSYPRQDWTGSTPAYGYWFKAVTETTKGAPVATNHQSREVEMSTRGRFQLTGDPAKGNCSLVIRDAQMQDESQYFFRVERGSYVRYNFMNDGFFLKVTVLSFTPRPQDHNTDLTCHVDFSRKGVSAQRTVRLRVAYAPRDLVISISRDNTPDPPENLRVMVSQANRTVLENLGNGTSLPVLEGQSLCLVCVTHSSPPARLSWTQRGQVLSPSQPSDPGVLELPRVQVEHEGEFTCHARHPLGSQHVSLSLSVHYKKGLISTAFSNGAFLGIGITALLFLCLALIIMKILPKRRTQTETPRPRFSRHSTILDYINVVPTAGPLMECKLSKARAGT

SEQ ID NO: 11550 - protein, 513 aa, Artificial Sequence
  Synthetic polypeptide
MLLPLLLSSLLGGSQAMDGRFWIRVQESVMVPEGLCISVPCSFSYPRQDWTGSTPAYGYWFKAVTETTKGAPVATNHQSREVEMSTRGRFQLTGDPAKGNCSLVIRDAQMQDESQYFFRVERGSYVRYNFMNDGFFLKVTALTQKPDVYIPETLEPGQPVTVICVFNWAFEECPPPSFSWTGAALSSQGTKPTTSHFSVLSFTPRPQDHNTDLTCHVDFSRKGVSAQRTVRLRVAYAPRDLVISISRDNTPALEPQPQGNVPYLEAQKGQFLRLLCAADSQPPATLSWVLQNRVLSSSHPWGPRPLGLELPGVKAGDSGRYTCRAENRLGSQQRALDLSVQYPPENLRVMVSQANRTVLENLGNGTSLPVLEGQSLCLVCVTHSSPPARLSWTQRGQVLSPSQPSDPGVLELPRVQVEHEGEFTCHARHPLGSQHVSLSLSVHYKKGLISTAFSNGAFLGIGITALLFLCLALIIMKILPKRRTQTETPRPRFSRHSTILDYINVVPTAGPLL

SEQ ID NO: 11551 - protein, 608 aa, Artificial Sequence
  Synthetic polypeptide
MLLPLLLSSLLGGSQAMDGRFWIRVQESVMVPEGLCISVPCSFSYPRQDWTGSTPAYGYWFKAVTETTKGAPVATNHQSREVEMSTRGRFQLTGDPAKGNCSLVIRDAQMQDESQYFFRVERGSYVRYNFMNDGFFLKVTALTQKPDVYIPETLEPGQPVTVICVFNWAFEECPPPSFSWTGAALSSQGTKPTTSHFSVLSFTPRPQDHNTDLTCHVDFSRKGVSAQRTVRLRVAYAPRDLVISISRDNTPALEPQPQGNVPYLEAQKGQFLRLLCAADSQPPATLSWVLQNRVLSSSHPWGPRPLGLELPGVKAGDSGRYTCRAENRLGSQQRALDLSVQYPPENLRVMVSQANRTVLENLGNGTSLPVLEGQSLCLVCVTHSSPPARLSWTQRGQVLSPSQPSDPGVLELPRVQVEHEGEFTCHARHPLGSQHVSLSLSVHYSPKLLGPSCSWEAEGLHCSCSSQASPAPSLRWWLGEELLEGNSSQDSFEVTPSSAGPWANSSLSLHGGLSSGLRLRCEAWNVHGAQSGSILQLPDKKGLISTAFSNGAFLGIGITALLFLCLALIIMKILPKRRTQTETPRPRFSRHSTILDYINVVPTAGPLL

SEQ ID NO: 11552 - protein, 423 aa, Artificial Sequence
  Synthetic polypeptide
MLLPLLLSSLLGGSQAMDGRFWIRVQESVMVPEGLCISVPCSFSYPRQDWTGSTPAYGYWFKAVTETTKGAPVATNHQSREVEMSTRGRFQLTGDPAKGNCSLVIRDAQMQDESQYFFRVERGSYVRYNFMNDGFFLKVTALTQKPDVYIPETLEPGQPVTVICVFNWAFEECPPPSFSWTGAALSSQGTKPTTSHFSVLSFTPRPQDHNTDLTCHVDFSRKGVSAQRTVRLRVAYAPRDLVISISRDNTPDPPENLRVMVSQANRTVLENLGNGTSLPVLEGQSLCLVCVTHSSPPARLSWTQRGQVLSPSQPSDPGVLELPRVQVEHEGEFTCHARHPLGSQHVSLSLSVHYKKGLISTAFSNGAFLGIGITALLFLCLALIIMKILPKRRTQTETPRPRFSRHSTILDYINVVPTAGPLL

SEQ ID NO: 11553 - protein, 430 aa, Artificial Sequence
  Synthetic polypeptide
MLLPLLLSSLLGGSQAMDGRFWIRVQESVMVPEGLCISVPCSFSYPRQDWTGSTPAYGYWFKAVTETTKGAPVATNHQSREVEMSTRGRFQLTGDPAKGNCSLVIRDAQMQDESQYFFRVERGSYVRYNFMNDGFFLKVTALTQKTVRLRVAYAPRDLVISISRDNTPALEPQPQGNVPYLEAQKGQFLRLLCAADSQPPATLSWVLQNRVLSSSHPWGPRPLGLELPGVKAGDSGRYTCRAENRLGSQQRALDLSVQYPPENLRVMVSQANRTVLENLGNGTSLPVLEGQSLCLVCVTHSSPPARLSWTQRGQVLSPSQPSDPGVLELPRVQVEHEGEFTCHARHPLGSQHVSLSLSVHYKKGLISTAFSNGAFLGIGITALLFLCLALIIMKILPKRRTQTETPRPRFSRHSTILDYINVVPTAGPLL

SEQ ID NO: 11554 - protein, 465 aa, Artificial Sequence
  Synthetic polypeptide
MLLPLLLSSLLGGSQAMDGRFWIRVQESVMVPEGLCISVPCSFSYPRQDWTGSTPAYGYWFKAVTETTKGAPVATNHQSREVEMSTRGRFQLTGDPAKGNCSLVIRDAQMQDESQYFFRVERGSYVRYNFMNDGFFLKVTGTKPTTSHFSVLSFTPRPQDHNTDLTCHVDFSRKGVSAQRTVRLRVAYAPRDLVISISRDNTPALEPQPQGNVPYLEAQKGQFLRLLCAADSQPPATLSWVLQNRVLSSSHPWGPRPLGLELPGVKAGDSGRYTCRAENRLGSQQRALDLSVQYPPENLRVMVSQANRTVLENLGNGTSLPVLEGQSLCLVCVTHSSPPARLSWTQRGQVLSPSQPSDPGVLELPRVQVEHEGEFTCHARHPLGSQHVSLSLSVHYKKGLISTAFSNGAFLGIGITALLFLCLALIIMKILPKRRTQTETPRPRFSRHSTILDYINVVPTAGPLL

SEQ ID NO: 11555 - protein, 455 aa, Artificial Sequence
  Synthetic polypeptide
MLLPLLLSSLLGGSQAMDGRFWIRVQESVMVPEGLCISVPCSFSYPRQDWTGSTPAYGYWFKAVTETTKGAPVATNHQSREVEMSTRGRFQLTGDPAKGNCSLVIRDAQMQDESQYFFRVERGSYVRYNFMNDGFFLKVTVLSFTPRPQDHNTDLTCHVDFSRKGVSAQRTVRLRVAYAPRDLVISISRDNTPALEPQPQGNVPYLEAQKGQFLRLLCAADSQPPATLSWVLQNRVLSSSHPWGPRPLGLELPGVKAGDSGRYTCRAENRLGSQQRALDLSVQYPPENLRVMVSQANRTVLENLGNGTSLPVLEGQSLCLVCVTHSSPPARLSWTQRGQVLSPSQPSDPGVLELPRVQVEHEGEFTCHARHPLGSQHVSLSLSVHYKKGLISTAFSNGAFLGIGITALLFLCLALIIMKILPKRRTQTETPRPRFSRHSTILDYINVVPTAGPLL

SEQ ID NO: 11556 - protein, 550 aa, Artificial Sequence
  Synthetic polypeptide
MLLPLLLSSLLGGSQAMDGRFWIRVQESVMVPEGLCISVPCSFSYPRQDWTGSTPAYGYWFKAVTETTKGAPVATNHQSREVEMSTRGRFQLTGDPAKGNCSLVIRDAQMQDESQYFFRVERGSYVRYNFMNDGFFLKVTVLSFTPRPQDHNTDLTCHVDFSRKGVSAQRTVRLRVAYAPRDLVISISRDNTPALEPQPQGNVPYLEAQKGQFLRLLCAADSQPPATLSWVLQNRVLSSSHPWGPRPLGLELPGVKAGDSGRYTCRAENRLGSQQRALDLSVQYPPENLRVMVSQANRTVLENLGNGTSLPVLEGQSLCLVCVTHSSPPARLSWTQRGQVLSPSQPSDPGVLELPRVQVEHEGEFTCHARHPLGSQHVSLSLSVHYSPKLLGPSCSWEAEGLHCSCSSQASPAPSLRWWLGEELLEGNSSQDSFEVTPSSAGPWANSSLSLHGGLSSGLRLRCEAWNVHGAQSGSILQLPDKKGLISTAFSNGAFLGIGITALLFLCLALIIMKILPKRRTQTETPRPRFSRHSTILDYINVVPTAGPLL

SEQ ID NO: 11557 - protein, 365 aa, Artificial Sequence
  Synthetic polypeptide
MLLPLLLSSLLGGSQAMDGRFWIRVQESVMVPEGLCISVPCSFSYPRQDWTGSTPAYGYWFKAVTETTKGAPVATNHQSREVEMSTRGRFQLTGDPAKGNCSLVIRDAQMQDESQYFFRVERGSYVRYNFMNDGFFLKVTVLSFTPRPQDHNTDLTCHVDFSRKGVSAQRTVRLRVAYAPRDLVISISRDNTPDPPENLRVMVSQANRTVLENLGNGTSLPVLEGQSLCLVCVTHSSPPARLSWTQRGQVLSPSQPSDPGVLELPRVQVEHEGEFTCHARHPLGSQHVSLSLSVHYKKGLISTAFSNGAFLGIGITALLFLCLALIIMKILPKRRTQTETPRPRFSRHSTILDYINVVPTAGPLL

SEQ ID NO: 11558 - protein, 188 aa, Artificial Sequence
  Synthetic polypeptide
MESLKRWNEERGLWCEKGVQVLLTTVGAFAAFGLMTIAISTDYWLYTRALICNTTNLTAGGDDGTPHRGGGGASEKKDPGGLTHSGLWRICCLEGLKRGVCVKINHFPEDTDYDHDSAEYLLRVVRASSIFPILSAILLLLGGVCVAASRVYKSKRNIILGAGILFVAAGWATEQDPVSENRKKESQR

SEQ ID NO: 11559 - protein, 143 aa, Artificial Sequence
  Synthetic polypeptide
MMWSNFFLQEENRRRGAAGRRRAHGQGRSGLTPEREGKVKLALLLAAVGATLAVLSVGTEFWVELNTYKANGSAVCEAAHLGLWKACTKRLWQADVPVDRDTCGPAELPGEANCTYFKFFTTGENARIFQRTTKKASQMLPAI

SEQ ID NO: 11560 - protein, 189 aa, Artificial Sequence
  Synthetic polypeptide
MMWSNFFLQEENRRRGAAGRRRAHGQGRSGLTPEREGKVKLALLLAAVGATLAVLSVGTEFWVELNTYKANGSAVCEAAHLGLWKACTKRLWQADVPVDRDTCGPAELPGEANCTYFKFFTTGENARIFQRTTKKEVNLAAAVIAVLGLAVMALGCLCIIMVLSKGAEFLLRVGAVCFGLSASQMLPAI

SEQ ID NO: 11561 - protein, 26 aa, Artificial Sequence
  Synthetic polypeptide
MALVLILQLLTLWPLCHTDITPSGEY

SEQ ID NO: 11562 - protein, 13 aa, Artificial Sequence
  Synthetic polypeptide
MALVLILQLLTLY

SEQ ID NO: 11563 - protein, 339 aa, Artificial Sequence
  Synthetic polypeptide
MTGAYPKPTLSAQPSPVVTSGGRVTLQCESQVAFGGFILCKEGEEEHPQCLNSQPHARGSSRAIFSVGPVSPNRRWSHRCYGYDLNSPYVWSSPSDLLELLVPGVSKKPSLSVQPGPVVAPGESLTLQCVSDVGYDRFVLYKEGERDLRQLPGRQPQAGLSQANFTLGPVSRSYGGQYRCYGAHNLSSECSAPSDPLDILITGQIRGTPFISVQPGPTVASGENVTLLCQSWRQFHTFLLTKAGAADAPLRLRSIHEYPKYQAEFPMSPVTSAHAGTYRCYGSLNSDPYLLSHPSEPLELVVSGPSMGSSPPPTGPISTPAGPEDQPLTPTGSDPQSGA

SEQ ID NO: 11564 - protein, 455 aa, Artificial Sequence
  Synthetic polypeptide
MTPIVTVLICLGLSLGPRTHVQTGTIPKPTLWAEPDSVITQGSPVTLSCQGSLEAQEYRLYREKKSASWITRIRPELVKNGQFHIPSITWEHTGRYGCQYYSRARWSELSDPLVLVMTGAYPKPTLSAQPSPVVTSGGRVTLQCESQVAFGGFILCKEGEEEHPQCLNSQPHARGSSRAIFSVGPVSPNRRWSHRCYGYDLNSPYVWSSPSDLLELLVPGVSKKPSLSVQPGPVVAPGESLTLQCVSDVGYDRFVLYKEGERDLRQLPGRQPQAGLSQANFTLGPVSRSYGGQYRCYGAHNLSSECSAPSDPLDILITGQIRGTPFISVQPGPTVASGENVTLLCQSWRQFHTFLLTKAGAADAPLRLRSIHEYPKYQAEFPMSPVTSAHAGTYRCYGSLNSDPYLLSHPSEPLELVVSGPSMGSSPPPTGPISTPAGPEDQPLTPTGSDPQSGA

SEQ ID NO: 11565 - protein, 454 aa, Artificial Sequence
  Synthetic polypeptide
MTPIVTVLICLGLSLGPRTHVQTGTIPKPTLWAEPDSVITQGSPVTLSCQGSLEAQEYRLYREKKSASWITRIRPELVKNGQFHIPSITWEHTGRYGCQYYSRARWSELSDPLVLVMTGAYPKPTLSAQPSPVVTSGGRVTLQCESQVAFGGFILCKEGEEEHPQCLNSQPHARGSSRAIFSVGPVSPNRRWSHRCYGYDLNSPYVWSSPSDLLELLVPGVSKKPSLSVQPGPVVAPGESLTLQCVSDVGYDRFVLYKEGERDLRQLPGRQPQAGLSQANFTLGPVSRSYGGQYRCYGAHNLSSECSAPSDPLDILITGQIRGTPFISVQPGPTVASGENVTLLCQSWRQFHTFLLTKAGAADAPLRLRSIHEYPKYQAEFPMSPVTSAHAGTYRCYGSLNSDPYLLSHPSEPLELVVSGPSMGSSPPPTGPISTPGPEDQPLTPTGSDPQSGA

SEQ ID NO: 11566 - protein, 131 aa, Artificial Sequence
  Synthetic polypeptide
  misc_feature (1)..(1): Xaa can be any naturally occurring amino acid
XFISVQPGPTVASGENVTLLCQSWRQFHTFLLTKAGAADAPLRLRSIHEYPKYQAEFPMSPVTSAHAGTYRCYGSLNSDPYLLSHPSEPLELVVSGPSMGSSPPPTGPISTPAGPEDQPLTPTGSDPQSGA

SEQ ID NO: 11567 - protein, 164 aa, Artificial Sequence
  Synthetic polypeptide
MEREMEDLPRPSISAEPGTVIPLGSHVTFVCRGPVGVQTFRLERESRSTYNDTEDVSQASPSESEARFRIDSVSEGNAGPYRCIYYKPPKWSEQSDYLELLVKETSGGPDSPDTEPGSSAGPTQRPSDNSHNELCVPVQRTPALRTPVVEEGDNDPCTAGLLFT

SEQ ID NO: 11568 - protein, 175 aa, Artificial Sequence
  Synthetic polypeptide
MEREMVLCLAQTIHTQEDLPRPSISAEPGTVIPLGSHVTFVCRGPVGVQTFRLERESRSTYNDTEDVSQASPSESEARFRIDSVSEGNAGPYRCIYYKPPKWSEQSDYLELLVKETSGGPDSPDTEPGSSAGPTQRPSDNSHNELCVPVQRTPALRTPVVEEGDNDPCTAGLLFT

SEQ ID NO: 11569 - protein, 181 aa, Artificial Sequence
  Synthetic polypeptide
MSPHPTALLGLVLCLAQTIHTQEDLPRPSISAEPGTVIPLGSHVTFVCRGPVGVQTFRLERESRSTYNDTEDVSQASPSESEARFRIDSVSEGNAGPYRCIYYKPPKWSEQSDYLELLVKETSGGPDSPDTEPGSSAGPTQRPSDNSHNELCVPVQRTPALRTPVVEEGDNDPCTAGLLFT

SEQ ID NO: 11570 - protein, 164 aa, Artificial Sequence
  Synthetic polypeptide
MSPHPTALLGLVLCLAQTIHTQEDLPRPSISAEPGTVIPLGSHVTFVCRGPVGVQTFRLERESRSTYNDTEDVSQASPSESEARFRIDSVSEGNAGPYRCIYYKPPKWSEQSDYLELLVKGPTQRPSDNSHNELCVPVQRTPALRTPVVEEGDNDPCTAGLLFT

SEQ ID NO: 11571 - protein, 160 aa, Artificial Sequence
  Synthetic polypeptide
MSPHPTALLGLVLCLAQTIHTQEEDLPRPSISAEPGTVIPLGSHVTFVCRGPVGVQTFRLERESRSTYNDTEDVSQASPSESEARFRIDSKPLEARTPRTQSPAPQLDPRRGRRTTVTMSSVSLCRGLQHSGPRWWKKGITIPVLQDYYLPKIFYILVSL

SEQ ID NO: 11572 - protein, 182 aa, Artificial Sequence
  Synthetic polypeptide
MSPHPTALLGLVLCLAQTIHTQEEDLPRPSISAEPGTVIPLGSHVTFVCRGPVGVQTFRLERESRSTYNDTEDVSQASPSESEARFRIDSVSEGNAGPYRCIYYKPPKWSEQSDYLELLVKETSGGPDSPDTEPGSSAGPTQRPSDNSHNELCVPVQRTPALRTPVVEEGDNDPCTAGLLFT

SEQ ID NO: 11573 - protein, 165 aa, Artificial Sequence
  Synthetic polypeptide
MSPHPTALLGLVLCLAQTIHTQEEDLPRPSISAEPGTVIPLGSHVTFVCRGPVGVQTFRLERESRSTYNDTEDVSQASPSESEARFRIDSVSEGNAGPYRCIYYKPPKWSEQSDYLELLVKGPTQRPSDNSHNELCVPVQRTPALRTPVVEEGDNDPCTAGLLFT

SEQ ID NO: 11574 - protein, 33 aa, Artificial Sequence
  Synthetic polypeptide
MSLMVVSMVCVGFFLLQGAWPHEALKVEEVQEP

SEQ ID NO: 11575 - protein, 33 aa, Artificial Sequence [sequence omitted]

SEQ ID NO: 11576 - protein, 144 aa, Artificial Sequence
  Synthetic polypeptide
MSLMVVSMACVGFFLDQSVWAHVGGQDKPFCSAWPSAVVPQGGHVTLRCHYRRGFNIFTLYKKDGVPVPELYNRIFWNSFLISPVTPAHAGTYRCRGFHPHSPTEWSAPSNPLVIMVTEVEGVSVFSPAAMFVIIFSSNNRKPT

SEQ ID NO: 11577 - protein, 146 aa, Artificial Sequence
  Synthetic polypeptide
MSMSPTVIILACLGFFLDQSVWAHVGGQDKPFCSAWPSAVVPQGGHVTLRCHYRRGFNIFTLYKKDGVPVPELYNRIFWNSFLISPVTPAHAGTYRCRGFHPHSPTEWSAPSNPLVIMVTEVEGVSVFSPAAMFVIIFSSNNRKPT

SEQ ID NO: 11578 - protein, 145 aa, Artificial Sequence
  Synthetic polypeptide
  misc_feature (1)..(1): Xaa can be any naturally occurring amino acid
XMSPTVIILACLGFFLDQSVWAHVGGQDKPFCSAWPSAVVPQGGHVTLRCHYRRGFNIFTLYKKDGVPVPELYNRIFWNSFLISPVTPAHAGTYRCRGFHPHSPTEWSAPSNPLVIMVTEVEGVSVFSPAAMFVIIFSSNNRKPT

SEQ ID NO: 11579 - protein, 234 aa, Artificial Sequence
  Synthetic polypeptide
MSPSPTALFCLGLCLGRVPAQSGPLPKPSLQALPSSLVPLEKPVTLRCQGPPGVDLYRLEKLSSSRYQDQAVLFIPAMKRSLAGRYRCSYQNGSLWSLPSDQLELVATGVFAKPSLSAQPGPAVSSGGDVTLQCQTRYGFDQFALYKEGDPAPYKNPERWYRASFPIITVTAAHSGTYRCYSFSSRDPYLWSAPSDPLELVVTGTSVTPSRLPTEPPSPVAGSRRHGSTSYYSN

SEQ ID NO: 11580 - protein, 521 aa, Artificial Sequence
  Synthetic polypeptide
MGDQSWLWNQAAPGVRSPVFACSVEKGNVPLVLSEHLAHSRDPGSGAVRFLISPEPWASAILGTSGLLASPVLPAALDAVTCQHLPQPSSGSRPISPRIGALCPLLLQPGTMSTSSLRRQMKNIVHNYSEAEIKVREATSNDPWGPSSSLMSEIADLTYNVVAFSEIMSMIWKRLNDHGKNWRHVYKAMTLMEYLIKTGSERVSQQCKENMYAVQTLKDFQYVDRDGKDQGVNVREKAKQLVALLRDEDRLREERAHALKTKEKLAQTATASSAAVGSGPPPEAEQAWPQSSGEEELQLQLALAMSKEEADQEERIRRGDDLRLQMAIEESKRETGGKEESSLMDLADVFTAPAPAPTTDPWGGPAPMAAAVPTAAPTSDPWGGPPVPPAADPWGGPAPTPASGDPWRPAAPAGPSVDPWGGTPAPAAGEGPTPDPWGSSDGGVPVSGPSASDPWTPAPAFSDPWGGSPAKPSTNGTTAAGGFDTEPDEFSDFDRLRTALPTSGSSAGMVAHACNPSYLGG

SEQ ID NO: 11581 - protein, 409 aa, Artificial Sequence
  Synthetic polypeptide
MSTSSLRRQMKNIVHNYSEAEIKVREATSNDPWGPSSSLMSEIADLTYNVVAFSEIMSMIWKRLNDHGKNWRHVYKAMTLMEYLIKTGSERVSQQCKENMYAVQTLKDFQYVDRDGKDQGVNVREKAKQLVALLRDEDRLREERAHALKTKEKLAQTATASSAAVGSGPPPEAEQAWPQSSGEEELQLQLALAMSKEEADQEERIRRGDDLRLQMAIEESKRETGGKEESSLMDLADVFTAPAPAPTTDPWGGPAPMAAAVPTAAPTSDPWGGPPVPPAADPWGGPAPTPASGDPWRPAAPAGPSVDPWGGTPAPAAGEGPTPDPWGSSDGGVPVSGPSASDPWTPAPAFSDPWGGSPAKPSTNGTTAGGFDTEPDEFSDFDRLRTALPTSGSSAGMVAHACNPSYLGG

SEQ ID NO: 11582 - protein, 435 aa, Artificial Sequence
  Synthetic polypeptide
MSTSSLRRQMKNIVHNYSEAEIKVREATSNDPWGPSSSLMSEIADLTYNVVAFSEIMSMIWKRLNDHGKNWRHVYKAMTLMEYLIKTGSERVSQQCKENMYAVQTLKDFQYVDRDGKDQGVNVREKAKQLVALLRDEDRLREERAHALKTKEKLAQTATASSAAVGSGPPPEAEQAWPQSSGEEELQLQLALAMSKEEADQPPSCGPEDDAQLQLALSLSREEHDKEERIRRGDDLRLQMAIEESKRETGGKEESSLMDLADVFTAPAPAPTTDPWGGPAPMAAAVPTAAPTSDPWGGPPVPPAADPWGGPAPTPASGDPWRPAAPAGPSVDPWGGTPAPAAGEGPTPDPWGSSDGGVPVSGPSASDPWTPAPAFSDPWGGSPAKPSTNGTTAAGGFDTEPDEFSDFDRLRTALPTSGSSAGMVAHACNPSYLGG

SEQ ID NO: 11583 - protein, 52 aa, Artificial Sequence
  Synthetic polypeptide
  misc_feature (1)..(1): Xaa can be any naturally occurring amino acid
XKPSTNGTTAAGGFDTEPDEFSDFDRLRTALPTSGSSAGMVAHACNPSYLGG

SEQ ID NO: 11584 - protein, 64 aa, Artificial Sequence; identical to SEQ ID NO: 1237
  Synthetic polypeptide

SEQ ID NO: 11585 - protein, 66 aa, Artificial Sequence
  Synthetic polypeptide
MEESVVRPSVFVVDGQTDIPFTRLGRSHRRQSCSVARDGPAGSWEQLIQERRSHEVNPAAHLTVTT

SEQ ID NO: 11586 - protein, 102 aa, Artificial Sequence
  Synthetic polypeptide
MEESVVRPSVFVVDGQTDIPFTRLGRSHRRQSCSVARVGLGLLLLLMGAGLAVQGWFLLQLHWRLGEMVTRLPDGPAGSWEQLIQERRSHEVNPAAHLTVTT

SEQ ID NO: 11587 - protein, 94 aa, Artificial Sequence
  Synthetic polypeptide
MDWGTELWDQFEVLERHTQWGLDLLDRYVKFVKERTEVEQAYAKQLRSLVKKYLPKRPAKDDPESKGESMDARCGIIWLGILSPLLCREIDLGL

SEQ ID NO: 11588 - protein, 81 aa, Artificial Sequence
  Synthetic polypeptide
MDWGTELWDQFEVLERHTQWGLDLLDRYVKFVKERTEVEQAYAKQLRSLVKKYLPKRPAKDDPESKSSAVAHTCTPSTLGG

SEQ ID NO: 11589 - protein, 154 aa, Artificial Sequence
  Synthetic polypeptide
MEVLAAETTSQQERLQAIAEKRKRQAEIENKRRQLEDERRQLQHLKSKALRERWLLEGTPSSASEGDEDLRRQMQDDEQKTRLLEDSVSRLEKEIEVLERGDSAPATAKENAAAPSPVRAPAPSPAKEERKTEVVMNSQQTPVGTPKAVCAARL

SEQ ID NO: 11590 - protein, 138 aa, Artificial Sequence
  Synthetic polypeptide
MAHRPPSPALASVLLALLLSGAARAAEIVGGHEAQPHSRPYMASLQMRGNPGSHFCGGTLIHPSFVLTAAHCLRDIPQRLVNVVLGAHNVRTQEPTQQHFSVAQVFLNNYDAENKLNDVLLIQHFRRLRKADHLRLGV

SEQ ID NO: 11591 - protein, 97 aa, Artificial Sequence
  Synthetic polypeptide
MASLQMRGNPGSHFCGGTLIHPSFVLTAAHCLRDIPQRLVNVVLGAHNVRTQEPTQQHFSVAQVFLNNYDAENKLNDVLLIQHFRRLRKADHLRLGV

SEQ ID NO: 11592 - protein, 222 aa, Artificial Sequence; identical to SEQ ID NO: 816
  Synthetic polypeptide

SEQ ID NO: 11593 - protein, 146 aa, Artificial Sequence
  Synthetic polypeptide
MAFSGRARPCIIPENEEIPRAALNTVHEANGTEDERAVSKLQRRHSDVKVYKEFCDFYAKFNMANALASATCERCKGGFAPAEKIVNSNGELYHEQCFVCAQCFQQFPEGLFYEFEGRKYCEHDFQMLFAPCCHQCGASNPSYSRG

SEQ ID NO: 11594 - protein, 84 aa, Artificial Sequence
  Synthetic polypeptide
MANALASATCERCKGGFAPAEKIVNSNGELYHEQCFVCAQCFQQFPEGLFYEFEGRKYCEHDFQMLFAPCCHQCGASNPSYSRG

SEQ ID NO: 11595 - protein, 96 aa, Artificial Sequence
  Synthetic polypeptide
MLGVAAGMTHSNMANALASATCERCKGGFAPAEKIVNSNGELYHEQCFVCAQCFQQFPEGLFYEFEGRKYCEHDFQMLFAPCCHQCGASNPSYSRG

SEQ ID NO: 11596 - protein, 121 aa, Artificial Sequence
  Synthetic polypeptide
MTALQLKELSHSGLYRRRRDRPDSLRVNGLPEEELSNMANALASATCERCKGGFAPAEKIVNSNGELYHEQCFVCAQCFQQFPEGLFYEFEGRKYCEHDFQMLFAPCCHQCGASNPSYSRG

SEQ ID NO: 11597 - protein, 88 aa, Artificial Sequence
  Synthetic polypeptide
MTCNMANALASATCERCKGGFAPAEKIVNSNGELYHEQCFVCAQCFQQFPEGLFYEFEGRKYCEHDFQMLFAPCCHQCGASNPSYSRG

SEQ ID NO: 11598 - protein, 217 aa, Artificial Sequence
  Synthetic polypeptide
MALLVLGIQLTRDVKDLFKENYKPLLKEIKEDTNKWKNIPCSWVGRINIVKMAILPKVIYRFNAIPIKLPMTFFTELEKTTLKFIWNQKRARIAKAILSQKNKAGGITLPDFKLYYKATVTKTAWYWYQNRDIDQWNRTEPSEITLPVYNYLIFDKPEKNKQWGKESLFNKWCWENCLAICRKLKLDPFLTPYTKINSRWIKDLNVRPKTIKTLEEN

SEQ ID NO: 11599 - protein, 13 aa, Artificial Sequence
  Synthetic polypeptide
MALLVLDREPNHE

SEQ ID NO: 11600 - protein, 150 aa, Artificial Sequence
  Synthetic polypeptide
MHQDADGKKTPWGKRGWKMFHTLLRGMVLYFLKGEDHCLEGESLVGQMVDEPVGVHHSLATPATHYTKKPHVFQLRTADWRLYLFQAPRSSIDPTRTAWTLPRTTCWIYRGTCRSGGAVAASWRSTACGRSTWSTRTQPRETEPEFAAMF

SEQ ID NO: 11601 - protein, 977 aa, Artificial Sequence
  Synthetic polypeptide
MMGDYRLPDHPQPMEILNLYLGDSLEPHPGECPRETCSHEDPPEPFEEQTWATDPPEPTRQNVPPWGSGVELTHLGSWVHQDGLEPCQEQTRATDPPESTRQDAPPWGSGVELTHLGSPSAQREHRQNTASPGSPVNSHLPGSPKQNRSTSTQVVFWAGILQAQMCVLDLEEELEKTEGLKAGLKCCLPTPPVDLPGDTGLHSSPPENEDSGEDSSEPEGEGQAWLREGTPDSSPQWGAEEESMFFSNPLFLASPCSENSASGECFSWGASDSHAGVRTGPESPATLEPPLPEDTVLWELESEPDLGDGAAISGHCTPPFPVPIYKPHSICWASVAAAEGAPAAPPGHGESEGDRLGPAPSAAPCVDEALTWESGCVGSDLGPAAHPVQPWASLSPEGWQRGGPFWPQVTLNSQDRDEREGGHPQESLPCTLAPCPWRSPASSPEPSSPESESRGPGPRPSPASSQEGSPQLQHHSSGILPKWTLDASQSSLLETDGEQPSSLKKKEAGEAPKPGEEVKSEGTARPAETGDVQPDIHLTSAEHENLRTPMNSSWLPGSPMPQAQSPEEGQRPPAGDKLANGVRNNKVAWNLASRLYRLEGFRKSEVAAYLQKNNDFSRAVAEEYLSFFQFGGQSLDRALRSFLQALVLSGETQERERILYQFSRRFHHCNPGIFPSVDSVHTLTCAIMLLNTDLHGQNIGKSMSCQEFITNLNGLRDGGNFPKELLKALYWSIRSEKLEWAVDEEDTARPEKAQPSLPAGKMSKPFLQLAQDPTVPTYKQGILARKMHQDADGKKTPWGKRGWKMFHTLLRGMVLYFLKQGEDHCLEGESLVGQMVDEPVGVHHSLATPATHYTKKPHVFQLRTADWRLYLFQAPTAKEMSSWIARINLAAATHSAPPFPAAVGSQRRFVRPILPVGPAQSSLEEQHRSHENCLDAAADDLLDLQRNLPERRGRGRELEEHRLRKEYLEYEDTAQRN

SEQ ID NO: 11602 - protein, 948 aa, Artificial Sequence
  Synthetic polypeptide
MMGDYRLPDHPQPMEILNLYLGDSLEPHPGECPRETCSHEDPPEPFEEQTWATDPPEPTRQNVPPWGSGVELTHLGSWVHQDGLEPCQEQTRATDPPESTRQDAPPWGSGVELTHLGSPSAQREHRQNTASPGSPVNSHLPGSPKQNRSTSTQVVFWAGILQAQMCVLDLEEELEKTEGLKAGLKCCLPTPPVDLPGDTGLHSSPPENEDSGEDSSEPEGEGQAWLREGTPDSSPQWGAEEESMFFSNPLFLASPCSENSASGECFSWGASDSHAGVRTGPESPATLEPPLPEDTVLWELESEPDLGDGAAISGHCTPPFPVPIYKPHSICWASVAAAEGAPAAPPGHGESEGDRLGPAPSAAPCVDEALTWESGCVGSDLGPAAHPVQPWASLSPEGWQRGGPFWPQVTLNSQDREPSSPESESRGPGPRPSPASSQEGSPQLQHHSSGILPKWTLDASQSSLLETDGEQPSSLKKKEAGEAPKPGEEVKSEGTARPAETGDVQPDIHLTSAEHENLRTPMNSSWLPGSPMPQAQSPEEGQRPPAGDKLANGVRNNKVAWNLASRLYRLEGFRKSEVAAYLQKNNDFSRAVAEEYLSFFQFGGQSLDRALRSFLQALVLSGETQERERILYQFSRRFHHCNPGIFPSVDSVHTLTCAIMLLNTDLHGQNIGKSMSCQEFITNLNGLRDGGNFPKELLKALYWSIRSEKLEWAVDEEDTARPEKAQPSLPAGKMSKPFLQLAQDPTVPTYKQGILARKMHQDADGKKTPWGKRGWKMFHTLLRGMVLYFLKGEDHCLEGESLVGQMVDEPVGVHHSLATPATHYTKKPHVFQLRTADWRLYLFQAPTAKEMSSWIARINLAAATHSAPPFPAAVGSQRRFVRPILPVGPAQSSLEEQHRSHENCLDAAADDLLDLQRNLPERRGRGRELEEHRLRKEYLEYEDTAQRN

SEQ ID NO: 11603 - protein, 25 aa, Artificial Sequence
  Synthetic polypeptide
MKAEDYDVVKVIGRGAFGEVQLHYS

SEQ ID NO: 11604 - protein, 111 aa, Artificial Sequence
  Synthetic polypeptide
MSRPPPTGKMPGAPETAPGDGAGASRQRKLEALIRDPRSPINVESLLDGLNSLVLDLDFPALRKNKNIDNFLNRYEKIVKKIRGLQMKAEDYDVVKVIGRGAFGEVQLHYS

SEQ ID NO: 11605 - protein, 56 aa, Artificial Sequence
  Synthetic polypeptide
MSRPPPTGKMPGAPETAPGDGAGASRQRKLEALIRDPRSPINVESLLSYLALRQCM

SEQ ID NO: 11606 - protein, 97 aa, Artificial Sequence
  Synthetic polypeptide
MNQTASVSHHIKCQPSKTIKELGSNSPPQRNWKGIAIALLVILVVCSLITMSVILLTPDELTNSSETRLSLEDLFRKDFVLHDPEARWINDKQRAKS

SEQ ID NO: 11607 - protein, 90 aa, Artificial Sequence
  Synthetic polypeptide
MRKVESRGEGGREELGSNSPPQRNWKGIAIALLVILVVCSLITMSVILLTPDELTNSSETRLSLEDLFRKDFVLHDPEARWINDKQRAKS

SEQ ID NO: 11608 - protein, 53 aa, Artificial Sequence
  Synthetic polypeptide
MRKVESRGEGGREMNSQIRQKPDCLWKTSLGKTLCFTIQRLGGSMTNREPNHE

SEQ ID NO: 11609 - protein, 47 aa, Artificial Sequence
  Synthetic polypeptide
MSVILLTPDELTNSSETRLSLEDLFRKDFVLHDPEARWINDKQRAKS

SEQ ID NO: 11610 - protein, 101 aa, Artificial Sequence
  Synthetic polypeptide
MTAAKQEPQPTPGARASQAQPADQELGSNSPPQRNWKGIAIALLVILVVCSLITMSVILLTPDELTNSSETRLSLEDLFRKDFVLHDPEARWINDKQRAKS

SEQ ID NO: 11611 - protein, 93 aa, Artificial Sequence
  Synthetic polypeptide
MVITEVAEGPVDGSEKELGSNSPPQRNWKGIAIALLVILVVCSLITMSVILLTPDELTNSSETRLSLEDLFRKDFVLHDPEARWINDKQRAKS

SEQ ID NO: 11612 - protein, 205 aa, Artificial Sequence
  Synthetic polypeptide
MNQTASVSHHIKCQPSKTIKELGSNSPPQRNWKGIAIALLVILVVCSLITMSVILLTPDELTNSSETRLSLEDLFRKDFVLHDPEARWINDTDVVYKSENGHVIKLNIETNATTLLLENTTFVTFKASRHSVSPDLKYVLLAYDVKQIWQYWHMETFSHGNHWFTLTDGAFSLQVTLALTIFNSLFLQTSLACSTCQAFVDISDC

SEQ ID NO: 11613 - protein, 198 aa, Artificial Sequence
  Synthetic polypeptide
MRKVESRGEGGREELGSNSPPQRNWKGIAIALLVILVVCSLITMSVILLTPDELTNSSETRLSLEDLFRKDFVLHDPEARWINDTDVVYKSENGHVIKLNIETNATTLLLENTTFVTFKASRHSVSPDLKYVLLAYDVKQIWQYWHMETFSHGNHWFTLTDGAFSLQVTLALTIFNSLFLQTSLACSTCQAFVDISDC

SEQ ID NO: 11614 - protein, 155 aa, Artificial Sequence
  Synthetic polypeptide
MSVILLTPDELTNSSETRLSLEDLFRKDFVLHDPEARWINDTDVVYKSENGHVIKLNIETNATTLLLENTTFVTFKASRHSVSPDLKYVLLAYDVKQIWQYWHMETFSHGNHWFTLTDGAFSLQVTLALTIFNSLFLQTSLACSTCQAFVDISDC

SEQ ID NO: 11615 - protein, 209 aa, Artificial Sequence
  Synthetic polypeptide
MTAAKQEPQPTPGARASQAQPADQELGSNSPPQRNWKGIAIALLVILVVCSLITMSVILLTPDELTNSSETRLSLEDLFRKDFVLHDPEARWINDTDVVYKSENGHVIKLNIETNATTLLLENTTFVTFKASRHSVSPDLKYVLLAYDVKQIWQYWHMETFSHGNHWFTLTDGAFSLQVTLALTIFNSLFLQTSLACSTCQAFVDISDC

SEQ ID NO: 11616 - protein, 201 aa, Artificial Sequence
  Synthetic polypeptide
MVITEVAEGPVDGSEKELGSNSPPQRNWKGIAIALLVILVVCSLITMSVILLTPDELTNSSETRLSLEDLFRKDFVLHDPEARWINDTDVVYKSENGHVIKLNIETNATTLLLENTTFVTFKASRHSVSPDLKYVLLAYDVKQIWQYWHMETFSHGNHWFTLTDGAFSLQVTLALTIFNSLFLQTSLACSTCQAFVDISDC

SEQ ID NO: 11617 - protein, 203 aa, Artificial Sequence
  Synthetic polypeptide
MGTEGPPPPAASRGRQGCLLVPARTKTTIALLYDEESENAYDIRLKLTKEVLTIQKQDVVCVGGSHQGRNRRTVTLRRQPVGGLGLSIKGGSEHNVPVVISKIFEDQAADQTGMLFVGDAVLQVNGIHVENATHEEVVHLLRNAGDEVTITVEYLREAPAFLKLPLGSPGPSSDHSSGASSPLFDSGLHLNGNSSTTNWKKLL

SEQ ID NO: 11618 - protein, 365 aa, Artificial Sequence
  Synthetic polypeptide
MPEEMDKPLISLHLVDSDSSLAKVPDEAPKVGILGSGDFARSLATRLVGSGFKVVVGSRNPKRTARLFPSAAQVTFQEEAVSSPEVIFVAVFREHYSSLCSLSDQLAGKILVDVSNPTEQEHLQHRESNAEYLASLFPTCTVVKAFNVISAWTLQAGPRDGNRQVPICGDQPEAKRAVSEMALAMGFMPVDMGSLASAWEVEAMPLRLLPAWKVPTLLALGLFVCFYAYNFVRDVLQPYVQESQNKFFKLPVSVVNTTLPCVAYVLLSLVYLPGVLAAALQLRRGTKYQRFPDWLDHWLQHRKQIGLLSFFCAALHALYSFCLPLRRAHRYDLVNLAVKQNKSTSISQCFTENTLTSRNSATRSS

SEQ ID NO: 11619 - protein, 375 aa, Artificial Sequence
  Synthetic polypeptide
MSHQPAVATKMPEEMDKPLISLHLVDSDSSLAKVPDEAPKVGILGSGDFARSLATRLVGSGFKVVVGSRNPKRTARLFPSAAQVTFQEEAVSSPEVIFVAVFREHYSSLCSLSDQLAGKILVDVSNPTEQEHLQHRESNAEYLASLFPTCTVVKAFNVISAWTLQAGPRDGNRQVPICGDQPEAKRAVSEMALAMGFMPVDMGSLASAWEVEAMPLRLLPAWKVPTLLALGLFVCFYAYNFVRDVLQPYVQESQNKFFKLPVSVVNTTLPCVAYVLLSLVYLPGVLAAALQLRRGTKYQRFPDWLDHWLQHRKQIGLLSFFCAALHALYSFCLPLRRAHRYDLVNLAVKQNKSTSISQCFTENTLTSRNSATRSS

SEQ ID NO: 11620 - protein, 125 aa, Artificial Sequence
  Synthetic polypeptide
MGTEGPPPPAASRGRQGCLLVPARTKTTIALLYDEESENAYDIRLKLTKEVLTIQKQDVVCVGGSHQGRNAPSSPSSPIAKDPRYEKRWLDTLSVPLSMARISRYKAGTEKLRTDHICHGGPIRL

SEQ ID NO: 11621 - protein, 252 aa, Artificial Sequence
  Synthetic polypeptide
MGTEGPPPPAASRGRQGCLLVPARTKTTIALLYDEESENAYDIRLKLTKEVLTIQKQDVVCVGGSHQGRNRRTVTLRRQPVGGLGLSIKGGSEHNVPVVISKIFEDQAADQTGMLFVGDAVLQVNGIHVENATHEEVVHLLRNAGDEVTITVEYLREAPAFLKLPLGSPGPSSDHSSGASSPLFDSGLHLNGNSSTTAPSSPSSPIAKDPRYEKRWLDTLSVPLSMARISRYKAGTEKLRTDHICHGGPIRL

SEQ ID NO: 11622 - protein, 121 aa, Artificial Sequence
  Synthetic polypeptide
MGTEGPPPPAASRGRQGCLLVPARTKTTIALLYDEESENAYDIRLKLTKEVLTIQKQDVVCVGGSHQGRNAPSSPSSPIAKDPRYEKRWLDTLSVPLSMARISRYKAGTEKLRPHMPWWSH

SEQ ID NO: 11623 - protein, 248 aa, Artificial Sequence
  Synthetic polypeptide
MGTEGPPPPAASRGRQGCLLVPARTKTTIALLYDEESENAYDIRLKLTKEVLTIQKQDVVCVGGSHQGRNRRTVTLRRQPVGGLGLSIKGGSEHNVPVVISKIFEDQAADQTGMLFVGDAVLQVNGIHVENATHEEVVHLLRNAGDEVTITVEYLREAPAFLKLPLGSPGPSSDHSSGASSPLFDSGLHLNGNSSTTAPSSPSSPIAKDPRYEKRWLDTLSVPLSMARISRYKAGTEKLRPHMPWWSH

SEQ ID NO: 11624 - protein, 114 aa, Artificial Sequence
  Synthetic polypeptide
MGTEGPPPPAASRGRQGCLLVPARTKTTIALLYDEESENAYDIRLKLTKEVLTIQKQDVVCVGGSHQGRNAPSSPSSPIAKDPRYEKRWLDTLSVPLSMARISRYKAGTEKLRL

SEQ ID NO: 11625 - protein, 241 aa, Artificial Sequence
  Synthetic polypeptide
MGTEGPPPPAASRGRQGCLLVPARTKTTIALLYDEESENAYDIRLKLTKEVLTIQKQDVVCVGGSHQGRNRRTVTLRRQPVGGLGLSIKGGSEHNVPVVISKIFEDQAADQTGMLFVGDAVLQVNGIHVENATHEEVVHLLRNAGDEVTITVEYLREAPAFLKLPLGSPGPSSDHSSGASSPLFDSGLHLNGNSSTTAPSSPSSPIAKDPRYEKRWLDTLSVPLSMARISRYKAGTEKLRL

SEQ ID NO: 11626 - protein, 135 aa, Artificial Sequence
  Synthetic polypeptide
MGTEGPPPPAASRGRQGCLLVPARTKTTIALLYDEESENAYDIRLKLTKEVLTIQKQDVVCVGGSHQGRNAPSSPSSPIAKDPRYEKRWLDTLSVPLSMARISRYKAGTEKLSERYDSRVCGDADVDKPTALPII

SEQ ID NO: 11627 - protein, 262 aa, Artificial Sequence
  Synthetic polypeptide
MGTEGPPPPAASRGRQGCLLVPARTKTTIALLYDEESENAYDIRLKLTKEVLTIQKQDVVCVGGSHQGRNRRTVTLRRQPVGGLGLSIKGGSEHNVPVVISKIFEDQAADQTGMLFVGDAVLQVNGIHVENATHEEVVHLLRNAGDEVTITVEYLREAPAFLKLPLGSPGPSSDHSSGASSPLFDSGLHLNGNSSTTAPSSPSSPIAKDPRYEKRWLDTLSVPLSMARISRYKAGTEKLSERYDSRVCGDADVDKPTALPII

SEQ ID NO: 11628 - protein, 245 aa, Artificial Sequence
  Synthetic polypeptide
MDWEVVSRNSISDDRLETQSLPSRSPPGTPNHRNSTFTQEGTRLRPSSVGHLVDHMVHTSPSEVFVNQRSPSSTQANSIVLESSPSQETPGDGKPPALPPKQSKKNSWNQIHYSHSQQDLESHINETFDIPSSPEKPTPNGGIPHDNLVLIRMKPDENGRFGFNVKGGYDQKMPVIVSRVAPGTPADLCVPRLNEGDQVVLINGRDIAEHTHDQVVLFIKASCERHSGELMLLVRPNGPLQIKSG

SEQ ID NO: 11629 - protein, 612 aa, Artificial Sequence
  Synthetic polypeptide
MTSRFRLPAGRTYNVRASELARDRQHTEVVCNILLLDNTVQAFKVNKHDQGQVLLDVVFKHLDLTEQDYFGLQLADDSTDNPRWLDPNKPIRKQLKRGSPYSLNFRVKFFVSDPNKLQEEYTRYQYFLQIKQDILTGRLPCPSNTAALLASFAVQSELGDYDQSENLSGYLSDYSFIPNQPQDFEKEIAKLHQQHIGLSPAEAEFNYLNTARTLELYGVEFHYARDQSNNEIMIGVMSGGILIYKNRVRMNTFPWLKIVKISFKCKQFFIQLRKELHESRETLLGFNMVNYRACKNLWKACVEHHTFFRLDRPLPPQKNFFAHYFTLGSKFRYCGRTEVQSVQYGKEKANKDRVFARSPSKPLARKLMDWEVVSRNSISDDRLETQSLPSRSPPGTPNHRNSTFTQEGTRLRPSSVGHLVDHMVHTSPSEVFVNQRSPSSTQANSIVLESSPSQETPGDGKPPALPPKQSKKNSWNQIHYSHSQQDLESHINETFDIPSSPEKPTPNGGIPHDNLVLIRMKPDENGRFGFNVKGGYDQKMPVIVSRVAPGTPADLCVPRLNEGDQVVLINGRDIAEHTHDQVVLFIKASCERHSGELMLLVRPNGPLQIKSG

SEQ ID NO: 11630 - protein, 292 aa, Artificial Sequence
  Synthetic polypeptide
MLSFFRRTLGRRSMRKHAEKERLREAQRAATHIPAAGDSKSIITCRVSLLDGTDVSVDLPKKAKGQELFDQIMYHLDLIESDYFGLRFMDSAQVAHWLDGTKSIKKQVKIGSPYCLHLRVKFYSSEPNNLREELTRYLFVLQLKQDILSGKLDCPFDTAVQLAAYNLQAELGDYDLAEHSPELVSEFRFVPIQTEEMELAIFEKWKEYRGQTPAQAETNYLNKAKWLEMYGVDMHVVKARDGNDYSLGLTPTGVLVFEGDTKIGLFFWPKITRLDFKKNKLTLVVVEDDDQP

SEQ ID NO: 11631 - protein, 67 aa, Artificial Sequence
  Synthetic polypeptide
MTTFGAVAEWRLPSLRRATLWIPQLLGRLRQENCLNQGVGSCSEPRSCHWTPAWQRSETPSQKRIEK

SEQ ID NO: 11632 - protein, 38 aa, Artificial Sequence
  Synthetic polypeptide
MNPVYSPGSSGVPYANAKGIGYPAWAMKVKLCLKRRQR

SEQ ID NO: 11633 - protein, 34 aa, Artificial Sequence
  Synthetic polypeptide
MNPVYSPGSSGVPYANAKGIGYPEKLARCGDTHL

SEQ ID NO: 11634 - protein, 4 aa, Artificial Sequence
  Synthetic polypeptide
MLSL

SEQ ID NO: 11635 - protein, 105 aa, Artificial Sequence
  Synthetic polypeptide
MPAPEQASLVEEGQPQTRQEAASTGPGMEPETTATTILASVKEQELQFQRLTRELEVERQIVASQLERCRLGAESPSIASTSSTEKSFPWRSTGEWCEPERQSLQ

SEQ ID NO: 11636 - protein, 38 aa, Artificial Sequence
  Synthetic polypeptide
  misc_feature (1)..(1): Xaa can be any naturally occurring amino acid
XCRLGAESPSIASTSSTEKSFPWRSTGEWCEPERQSLQ

SEQ ID NO: 11637 - protein, 58 aa, Artificial Sequence
  Synthetic polypeptide
MLLSPSLLLLLLLGAPRGCAEGVAAALTPERLLEWQEVPFASHHDSEDSPAMLNCESN

SEQ ID NO: 11638 - protein, 35 aa, Artificial Sequence
  Synthetic polypeptide
MEIKDQGAQMEPLLPTAFPWSTMDQSACTSSLLSP

SEQ ID NO: 11639 - protein, 691 aa, Artificial Sequence
  Synthetic polypeptide
MEIKDQGAQMEPLLPTRNDEEAVVDRGGTRSILKTHFEKEDLEGHRTLFIGVHVPLGGRKSHRRHRHRGHKHRKRDRERDSGLEDGRESPSFDTPSQRVQFILGTEDDDEEHIPHDLFTELDEICWREGEDAEWRETARWLKFEEDVEDGGERWSKPYVATLSLHSLFELRSCILNGTVLLDMHANTLEEIADMVLDQQVSSGQLNEDVRHRVHEALMKQHHHQNQKKLTNRIPIVRSFADIGKKQSEPNSMDKNAGQVVSPQSAPACVENKNDVSRENSTVDFSKGLGGQQKGHTSPCGMKQRHEKGPPHQQEREVDLHFMKKIPPGAEASNILVGELEFLDRTVVAFVRLSPAVLLQGLAEVPIPTRFLFILLGPLGKGQQYHEIGRSIATLMTDEVFHDVAYKAKDRNDLVSGIDEFLDQVTVLPPGEWDPSIRIEPPKNVPSQEKRKIPAVPNGTAAHGEAEPHGGHSGPELQRTGRIFGGLILDIKRKAPYFWSDFRDAFSLQCLASFLFLYCACMSPVITFGGLLGEATEGRISAIESLFGASMTGIAYSLFGGQPLTILGSTGPVLVFEKILFKFCKEYGLSYLSLRASIGLWTATLCIILVATDASSLVCYITRFTEEAFASLICIIFIYEALEKLFELSEAYPINMHNDLELLTQYSCLHIPFFLDVGQELGTHEVVALKEL

SEQ ID NO: 11640 - protein, 661 aa, Artificial Sequence
  Synthetic polypeptide
MEIKDQGAQMEPLLPTRNDEEAVVDRGGTRSILKTHFEKEDLEGHRTLFIGVHVPLGGRKSHRRHRHRGHKHRKRDRERDSGLEDGRESPSFDTPSQRVQFILGTEDDDEEHIPHDLFTELDEICWREGEDAEWRETARWLKFEEDVEDGGERWSKPYVATLSLHSLFELRSCILNGTVLLDMHANTLEEIADMVLDQQVSSGQLNEDVRHRVHEALMKQHHHQNQKKLTNRIPIVRSFADIGKKQSEPNSMDKNAGQVVSPQSAPACVENKNDVSRENSTVDFSKVDLHFMKKIPPGAEASNILVGELEFLDRTVVAFVRLSPAVLLQGLAEVPIPTRFLFILLGPLGKGQQYHEIGRSIATLMTDEVFHDVAYKAKDRNDLVSGIDEFLDQVTVLPPGEWDPSIRIEPPKNVPSQEKRKIPAVPNGTAAHGEAEPHGGHSGPELQRTGRIFGGLILDIKRKAPYFWSDFRDAFSLQCLASFLFLYCACMSPVITFGGLLGEATEGRISAIESLFGASMTGIAYSLFGGQPLTILGSTGPVLVFEKILFKFCKEYGLSYLSLRASIGLWTATLCIILVATDASSLVCYITRFTEEAFASLICIIFIYEALEKLFELSEAYPINMHNDLELLTQYSCLHIPFFLDVGQELGTHEVVALKEL

SEQ ID NO: 11641 - protein, 672 aa, Artificial Sequence
  Synthetic polypeptide
MQSLGVSGNRKVMQSGTCEPFQSLSHQRNDEEAVVDRGGTRSILKTHFEKEDLEGHRTLFIGVHVPLGGRKSHRRHRHRGHKHRKRDRERDSGLEDGRESPSFDTPSQRVQFILGTEDDDEEHIPHDLFTELDEICWREGEDAEWRETARWLKFEEDVEDGGERWSKPYVATLSLHSLFELRSCILNGTVLLDMHANTLEEIADMVLDQQVSSGQLNEDVRHRVHEALMKQHHHQNQKKLTNRIPIVRSFADIGKKQSEPNSMDKNAGQVVSPQSAPACVENKNDVSRENSTVDFSKVDLHFMKKIPPGAEASNILVGELEFLDRTVVAFVRLSPAVLLQGLAEVPIPTRFLFILLGPLGKGQQYHEIGRSIATLMTDEVFHDVAYKAKDRNDLVSGIDEFLDQVTVLPPGEWDPSIRIEPPKNVPSQEKRKIPAVPNGTAAHGEAEPHGGHSGPELQRTGRIFGGLILDIKRKAPYFWSDFRDAFSLQCLASFLFLYCACMSPVITFGGLLGEATEGRISAIESLFGASMTGIAYSLFGGQPLTILGSTGPVLVFEKILFKFCKEYGLSYLSLRASIGLWTATLCIILVATDASSLVCYITRFTEEAFASLICIIFIYEALEKLFELSEAYPINMHNDLELLTQYSCLHIPFFLDVGQELGTHEVVALKEL

SEQ ID NO: 11642 - protein, 337 aa, Artificial Sequence
  Synthetic polypeptide
MKTWVKIVFGVATSAVLALLVMCIVLRPSRVHNSEENTMRALTLKDILNGTFSYKTFFPNWISGQEYLHQSADNNIVLYNIETGQSYTILSNRTMKSVNASNYGLSPDRQFVYLESDYSKLWRYSYTATYYIYDLSNGEFVRGNELPRPIQYLCWSPVGSKLAYVYQNNIYLKQRPGDPPFQITFNGRENKIFNGIPDWVYEEEMLATKYALWWSPNGKFLAYAEFNDTDIPVIAYSYYGDEQYPRTINIPYPKAGAKNPVVRIFIIDTTYPAYVGPQEVPVPAMIASSDYYFSWLTWVTDERVCLQWLKRVQNVSVLSICDFREDWQTWDCPKLFF

SEQ ID NO: 11643 - protein, 312 aa, Artificial Sequence
  Synthetic polypeptide
MKTWVKIVFGVATSAVLALLVMCIVLRPSRVHNSEENTMRALTLKDILNGTFSYKTFFPNWISGQEYLHQSADNNIVLYNIETGQSYTILSNRTMLWRYSYTATYYIYDLSNGEFVRGNELPRPIQYLCWSPVGSKLAYVYQNNIYLKQRPGDPPFQITFNGRENKIFNGIPDWVYEEEMLATKYALWWSPNGKFLAYAEFNDTDIPVIAYSYYGDEQYPRTINIPYPKAGAKNPVVRIFIIDTTYPAYVGPQEVPVPAMIASSDYYFSWLTWVTDERVCLQWLKRVQNVSVLSICDFREDWQTWDCPKLFF

SEQ ID NO: 11644 - protein, 79 aa, Artificial Sequence; identical to SEQ ID NO: 1195
  Synthetic polypeptide

SEQ ID NO: 11645 - protein, 100 aa, Artificial Sequence; identical to SEQ ID NO: 1148
  Synthetic polypeptide

SEQ ID NO: 11646 - protein, 1257 aa, Artificial Sequence; identical to SEQ ID NO: 41
  Synthetic polypeptide

SEQ ID NO: 11647 - protein, 1306 aa, Artificial Sequence; identical to SEQ ID NO: 31
  Synthetic polypeptide

SEQ ID NO: 11648 - protein, 1257 aa, Artificial Sequence; identical to SEQ ID NO: 40
  Synthetic polypeptide

SEQ ID NO: 11649 - protein, 1306 aa, Artificial Sequence; identical to SEQ ID NO: 30
  Synthetic polypeptide

SEQ ID NO: 11650 - protein, 1186 aa, Artificial Sequence
  Synthetic polypeptide
MAQSVLVPPGPDSFRFFTRESLAAIEQRIAEEKAKRPKQERKDEDDENGPKPNSDLEAGKSLPFIYGDIPPEMVSVPLEDLDPYYINKKTFIVLNKGKAISRFSATPALYILTPFNPIRKLAIKILVHSLFNMLIMCTILTNCVFMTMSNPPDWTKNVEYTFTGIYTFESLIKILARGFCLEDFTFLRDPWNWLDFTVITFAYVTEFVDLGNVSALRTFRVLRALKTISVIPGLKTIVGALIQSVKKLSDVMILTVFCLSVFALIGLQLFMGNLRNKCLQWPPDNSSFEINITSFFNNSLDGNGTTFNRTVSIFNWDEYIEDKSHFYFLEGQNDALLCGNSSDAGQCPEGYICVKAGRNPNYGYTSFDTFSWAFLSLFRLMTQDFWENLYQLTLRAAGKTYMIFFVLVIFLGSFYLINLILAVVAMAYEEQNQATLEEAEQKEAEFQQMLEQLKKQQEEAQAAAAAASAESRDFSGAGGIGVFSESSSVASKLSSKSEKELKNRRKKKKQKEQSGEEEKNDRVRKSESEDSIRRKGFRFSLEGSRLTYEKRFSSPHQSLLSIRGSLFSPRRNSRASLFSFRGRAKDIGSENDFADDEHSTFEDNDSRRDSLFVPHRHGERRHSNVSQASRASRVLPILPMNGKMHSAVDCNGVVSLVGGPSTLTSAGQLLPEGTTTETEIRKRRSSSYHVSMDLLEDPTSRQRAMSIASILTNTMEELEESRQKCPPCWYKFANMCLIWDCCKPWLKVKHLVNLVVMDPFVDLAITICIVLNTLFMAMEHYPMTEQFSSVLSVGNLVFTGIFTAEMFLKIIAMDPYYYFQEGWNIFDGFIVSLSLMELGLANVEGLSVLRSFRLLRVFKLAKSWPTLNMLIKIIGNSVGALGNLTLVLAIIVFIFAVVGMQLFGKSYKECVCKISNDCELPRWHMHDFFHSFLIVFRVLCGEWIETMWDCMEVAGQTMCLTVFMMVMVIGNLVVLNLFLALLLSSFSSDNLAATDDDNEMNNLQIAVGRMQKGIDFVKRKIREFIQKAFVRKQKALDEIKPLEDLNNKKDSCISNHTTIEIGKDLNYLKDGNGTTSGIGSSVEKYVVDESDYMSFINNPSLTVTVPIAVGESDFENLNTEEFSSESDMEESKEKLNATSSSEGSTVDIGAPAEGEQPEVEPEESLEPEACFTEDLKQTKYSIMVEL

SEQ ID NO: 11651 - protein, 1186 aa, Artificial Sequence
  Synthetic polypeptide
MAQSVLVPPGPDSFRFFTRESLAAIEQRIAEEKAKRPKQERKDEDDENGPKPNSDLEAGKSLPFIYGDIPPEMVSVPLEDLDPYYINKKTFIVLNKGKAISRFSATPALYILTPFNPIRKLAIKILVHSLFNMLIMCTILTNCVFMTMSNPPDWTKNVEYTFTGIYTFESLIKILARGFCLEDFTFLRDPWNWLDFTVITFAYVTEFVNLGNVSALRTFRVLRALKTISVIPGLKTIVGALIQSVKKLSDVMILTVFCLSVFALIGLQLFMGNLRNKCLQWPPDNSSFEINITSFFNNSLDGNGTTFNRTVSIFNWDEYIEDKSHFYFLEGQNDALLCGNSSDAGQCPEGYICVKAGRNPNYGYTSFDTFSWAFLSLFRLMTQDFWENLYQLTLRAAGKTYMIFFVLVIFLGSFYLINLILAVVAMAYEEQNQATLEEAEQKEAEFQQMLEQLKKQQEEAQAAAAAASAESRDFSGAGGIGVFSESSSVASKLSSKSEKELKNRRKKKKQKEQSGEEEKNDRVRKSESEDSIRRKGFRFSLEGSRLTYEKRFSSPHQSLLSIRGSLFSPRRNSRASLFSFRGRAKDIGSENDFADDEHSTFEDNDSRRDSLFVPHRHGERRHSNVSQASRASRVLPILPMNGKMHSAVDCNGVVSLVGGPSTLTSAGQLLPEGTTTETEIRKRRSSSYHVSMDLLEDPTSRQRAMSIASILTNTMEELEESRQKCPPCWYKFANMCLIWDCCKPWLKVKHLVNLVVMDPFVDLAITICIVLNTLFMAMEHYPMTEQFSSVLSVGNLVFTGIFTAEMFLKIIAMDPYYYFQEGWNIFDGFIVSLSLMELGLANVEGLSVLRSFRLLRVFKLAKSWPTLNMLIKIIGNSVGALGNLTLVLAIIVFIFAVVGMQLFGKSYKECVCKISNDCELPRWHMHDFFHSFLIVFRVLCGEWIETMWDCMEVAGQTMCLTVFMMVMVIGNLVVLNLFLALLLSSFSSDNLAATDDDNEMNNLQIAVGRMQKGIDFVKRKIREFIQKAFVRKQKALDEIKPLEDLNNKKDSCISNHTTIEIGKDLNYLKDGNGTTSGIGSSVEKYVVDESDYMSFINNPSLTVTVPIAVGESDFENLNTEEFSSESDMEESKEKLNATSSSEGSTVDIGAPAEGEQPEVEPEESLEPEACFTEDLKQTKYSIMVEL

SEQ ID NO: 11652 - protein, 1150 aa, Artificial Sequence
  Synthetic polypeptide
MAMLPPPGPQSFVHFTKQSLALIEQRIAERKSKEPKEEKKDDDEEAPKPSSDLEAGKQLPFIYGDIPPGMVSEPLEDLDPYYADKKTFIVLNKGKTIFRFNATPALYMLSPFSPLRRISIKILVHSLFSMLIMCTILTNCIFMTMNNPPDWTKNVEYTFTGIYTFESLVKILARGFCVGEFTFLRDPWNWLDFVVIVFAYLTEFVNLGNVSALRTFRVLRALKTISVIPGLKTIVGALIQSVKKLSDVMILTVFCLSVFALIGLQLFMGNLKHKCFRNSLENNETLESIMNTLESEEDFRKYFYYLEGSKDALLCGFSTDSGQCPEGYTCVKIGRNPDYGYTSFDTFSWAFLALFRLMTQDYWENLYQQTLRAAGKTYMIFFVVVIFLGSFYLINLILAVVAMAYEEQNQANIEEAKQKELEFQQMLDRLKKEQEEAEAIAAAAAEYTSIRRSRIMGLSESSSETSKLSSKSAKERRNRRKKKNQKKLSSGEEKGDAEKLSKSESEDSIRRKSFHLGVEGHRRAHEKRLSTPNQSPLSIRGSLFSARRSSRTSLFSFKGRGRDIGSETEFADDEHSIFGDNESRRGSLFVPHRPQERRSSNISQASRSPPMLPVNGKMHSAVDCNGVVSLVDGRSALMLPNGQLLPEGTTNQIHKKRRCSSYLLSEDMLNDPNLRQRAMSRASILTNTVEELEESRQKCPPWWYRFAHKFLIWNCSPYWIKFKKCIYFIVMDPFVDLAITICIVLNTLFMAMEHHPMTEEFKNVLAIGNLVFTGIFAAEMVLKLIAMDPYEYFQVGWNIFDSLIVTLSLVELFLADVEGLSVLRSFRLLRVFKLAKSWPTLNMLIKIIGNSVGALGNLTLVLAIIVFIFAVVGMQLFGKSYKECVCKINDDCTLPRWHMNDFFHSFLIVFRVLCGEWIETMWDCMEVAGQAMCLIVYMMVMVIGNLVVLNLFLALLLSSFSSDNLTAIEEDPDANNLQIAVTRIKKGINYVKQTLREFILKAFSKKPKISREIRQAEDLNTKKENYISNHTLAEMSKGHNFLKEKDKISGFGSSVDKHLMEDSDGQSFIHNPSLTVTVPIAPGESDLENMNAEELSSDSDSEYSKVRLNRSSSSECSTVDNPLPGEGEEAEAEPMNSDEPEACFTDGSLY

SEQ ID NO: 11653 - protein, 1161 aa, Artificial Sequence
  Synthetic polypeptide
MAMLPPPGPQSFVHFTKQSLALIEQRIAERKSKEPKEEKKDDDEEAPKPSSDLEAGKQLPFIYGDIPPGMVSEPLEDLDPYYADKKTFIVLNKGKTIFRFNATPALYMLSPFSPLRRISIKILVHSLFSMLIMCTILTNCIFMTMNNPPDWTKNVEYTFTGIYTFESLVKILARGFCVGEFTFLRDPWNWLDFVVIVFAYLTEFVNLGNVSALRTFRVLRALKTISVIPGLKTIVGALIQSVKKLSDVMILTVFCLSVFALIGLQLFMGNLKHKCFRNSLENNETLESIMNTLESEEDFRKYFYYLEGSKDALLCGFSTDSGQCPEGYTCVKIGRNPDYGYTSFDTFSWAFLALFRLMTQDYWENLYQQTLRAAGKTYMIFFVVVIFLGSFYLINLILAVVAMAYEEQNQANIEEAKQKELEFQQMLDRLKKEQEEAEAIAAAAAEYTSIRRSRIMGLSESSSETSKLSSKSAKERRNRRKKKNQKKLSSGEEKGDAEKLSKSESEDSIRRKSFHLGVEGHRRAHEKRLSTPNQSPLSIRGSLFSARRSSRTSLFSFKGRGRDIGSETEFADDEHSIFGDNESRRGSLFVPHRPQERRSSNISQASRSPPMLPVNGKMHSAVDCNGVVSLVDGRSALMLPNGQLLPEVIIDKATSDDSGTTNQIHKKRRCSSYLLSEDMLNDPNLRQRAMSRASILTNTVEELEESRQKCPPWWYRFAHKFLIWNCSPYWIKFKKCIYFIVMDPFVDLAITICIVLNTLFMAMEHHPMTEEFKNVLAIGNLVFTGIFAAEMVLKLIAMDPYEYFQVGWNIFDSLIVTLSLVELFLADVEGLSVLRSFRLLRVFKLAKSWPTLNMLIKIIGNSVGALGNLTLVLAIIVFIFAVVGMQLFGKSYKECVCKINDDCTLPRWHMNDFFHSFLIVFRVLCGEWIETMWDCMEVAGQAMCLIVYMMVMVIGNLVVLNLFLALLLSSFSSDNLTAIEEDPDANNLQIAVTRIKKGINYVKQTLREFILKAFSKKPKISREIRQAEDLNTKKENYISNHTLAEMSKGHNFLKEKDKISGFGSSVDKHLMEDSDGQSFIHNPSLTVTVPIAPGESDLENMNAEELSSDSDSEYSKVRLNRSSSSECSTVDNPLPGEGEEAEAEPMNSDEPEACFTDGSLY

SEQ ID NO: 11654 - protein, 1162 aa, Artificial Sequence
  Synthetic polypeptide
MAMLPPPGPQSFVHFTKQSLALIEQRIAERKSKEPKEEKKDDDEEAPKPSSDLEAGKQLPFIYGDIPPGMVSEPLEDLDPYYADKKTFIVLNKGKTIFRFNATPALYMLSPFSPLRRISIKILVHSTLFSMLIMCTILTNCIFMTMNNPPDWTKNVEYTFTGIYTFESLVKILARGFCVGEFTFLRDPWNWLDFVVIVFAYLTEFVNLGNVSALRTFRVLRALKTISVIPGLKTIVGALIQSVKKLSDVMILTVFCLSVFALIGLQLFMGNLKHKCFRNSLENNETLESIMNTLESEEDFRKYFYYLEGSKDALLCGFSTDSGQCPEGYTCVKIGRNPDYGYTSFDTFSWAFLALFRLMTQDYWENLYQQTLRAAGKTYMIFFVVVIFLGSFYLINLILAVVAMAYEEQNQANIEEAKQKELEFQQMLDRLKKEQEEAEAIAAAAAEYTSIRRSRIMGLSESSSETSKLSSKSAKERRNRRKKKNQKKLSSGEEKGDAEKLSKSESEDSIRRKSFHLGVEGHRRAHEKRLSTPNQSPLSIRGSLFSARRSSRTSLFSFKGRGRDIGSETEFADDEHSIFGDNESRRGSLFVPHRPQERRSSNISQASRSPPMLPVNGKMHSAVDCNGVVSLVDGRSALMLPNGQLLPEVIIDKATSDDSGTTNQIHKKRRCSSYLLSEDMLNDPNLRQRAMSRASILTNTVEELEESRQKCPPWWYRFAHKFLIWNCSPYWIKFKKCIYFIVMDPFVDLAITICIVLNTLFMAMEHHPMTEEFKNVLAIGNLVFTGIFAAEMVLKLIAMDPYEYFQVGWNIFDSLIVTLSLVELFLADVEGLSVLRSFRLLRVFKLAKSWPTLNMLIKIIGNSVGALGNLTLVLAIIVFIFAVVGMQLFGKSYKECVCKINDDCTLPRWHMNDFFHSFLIVFRVLCGEWIETMWDCMEVAGQAMCLIVYMMVMVIGNLVVLNLFLALLLSSFSSDNLTAIEEDPDANNLQIAVTRIKKGINYVKQTLREFILKAFSKKPKISREIRQAEDLNTKKENYISNHTLAEMSKGHNFLKEKDKISGFGSSVDKHLMEDSDGQSFIHNPSLTVTVPIAPGESDLENMNAEELSSDSDSEYSKVRLNRSSSSECSTVDNPLPGEGEEAEAEPMNSDEPEACFTDGSLY

SEQ ID NO: 11655 - protein, 1162 aa, Artificial Sequence
  Synthetic polypeptide
MAMLPPPGPQSFVHFTKQSLALIEQRIAERKSKEPKEEKKDDDEEAPKPSSDLEAGKQLPFIYGDIPPGMVSEPLEDLDPYYADKKTFIVLNKGKTIFRFNATPALYMLSPFSPLRRISIKILVHSTLFSMLIMCTILTNCIFMTMNNPPDWTKNVEYTFTGIYTFESLVKILARGFCVGEFTFLRDPWNWLDFVVIVFAYVTEFVDLGNVSALRTFRVLRALKTISVIPGLKTIVGALIQSVKKLSDVMILTVFCLSVFALIGLQLFMGNLKHKCFRNSLENNETLESIMNTLESEEDFRKYFYYLEGSKDALLCGFSTDSGQCPEGYTCVKIGRNPDYGYTSFDTFSWAFLALFRLMTQDYWENLYQQTLRAAGKTYMIFFVVVIFLGSFYLINLILAVVAMAYEEQNQANIEEAKQKELEFQQMLDRLKKEQEEAEAIAAAAAEYTSIRRSRIMGLSESSSETSKLSSKSAKERRNRRKKKNQKKLSSGEEKGDAEKLSKSESEDSIRRKSFHLGVEGHRRAHEKRLSTPNQSPLSIRGSLFSARRSSRTSLFSFKGRGRDIGSETEFADDEHSIFGDNESRRGSLFVPHRPQERRSSNISQASRSPPMLPVNGKMHSAVDCNGVVSLVDGRSALMLPNGQLLPEVIIDKATSDDSGTTNQIHKKRRCSSYLLSEDMLNDPNLRQRAMSRASILTNTVEELEESRQKCPPWWYRFAHKFLIWNCSPYWIKFKKCIYFIVMDPFVDLAITICIVLNTLFMAMEHHPMTEEFKNVLAIGNLVFTGIFAAEMVLKLIAMDPYEYFQVGWNIFDSLIVTLSLVELFLADVEGLSVLRSFRLLRVFKLAKSWPTLNMLIKIIGNSVGALGNLTLVLAIIVFIFAVVGMQLFGKSYKECVCKINDDCTLPRWHMNDFFHSFLIVFRVLCGEWIETMWDCMEVAGQAMCLIVYMMVMVIGNLVVLNLFLALLLSSFSSDNLTAIEEDPDANNLQIAVTRIKKGINYVKQTLREFILKAFSKKPKISREIRQAEDLNTKKENYISNHTLAEMSKGHNFLKEKDKISGFGSSVDKHLMEDSDGQSFIHNPSLTVTVPIAPGESDLENMNAEELSSDSDSEYSKVRLNRSSSSECSTVDNPLPGEGEEAEAEPMNSDEPEACFTDGSLY

SEQ ID NO: 11656 - protein, 157 aa, Artificial Sequence
  Synthetic polypeptide
MKSTADLHQKLGKAIELEAIKPTYQVLNVQEKKRKSLDNEVEKTANLVISNWNQQIKAKKKLMVSTKKHEALFQLVESSKQSMTEKEKRKLLNKLTKSTEKLEKEDENYYQKNMAGYSTRLKWENTLENCYQAYILQKNVHLYSKSDAQECLWENCL

SEQ ID NO: 11657 - protein, 235 aa, Artificial Sequence
  Synthetic polypeptide
MRDPLTDCPYNKVYKNLKEFSQNGENFCKQVTSVLQQRANLEISYAKGLQKLASKLSKALQNTRKSCVSSAWAWASEGMKSTADLHQKLGKAIELEAIKPTYQVLNVQEKKRKSLDNEVEKTANLVISNWNQQIKAKKKLMVSTKKHEALFQLVESSKQSMTEKEKRKLLNKLTKSTEKLEKEDENYYQKNMAGYSTRLKWENTLENCYQAYILQKNVHLYSKSDAQECLWENCL

SEQ ID NO: 11658 - protein, 207 aa, Artificial Sequence
  Synthetic polypeptide
MRDPLTDCPYNKVYKNLKEFSQNGENFCKQVTSVLQQSCVSSAWAWASEGMKSTADLHQKLGKAIELEAIKPTYQVLNVQEKKRKSLDNEVEKTANLVISNWNQQIKAKKKLMVSTKKHEALFQLVESSKQSMTEKEKRKLLNKLTKSTEKLEKEDENYYQKNMAGYSTRLKWENTLENCYQAYILQKNVHLYSKSDAQECLWENCL

SEQ ID NO: 11659 - protein, 738 aa, Artificial Sequence
  Synthetic polypeptide
MHQLSLIRGNRGRSIHILERTASSSTEPSVSRQLLEPEPVPLSKEADSWEIIEGLKIGQTNVQKPDKHEGFMLKKRKWPLKGWHKRFFVLDNGMLKYSKAPLDIQKGKVHGSIDVGLSVMSIKKKARRIDLDTEEHIYHLKVKSQDWFDAWVSKLRHHRLYRQNEIVRSPRDASFHIFPSTSTAESSPAANVSVMDGKMQPNSFPWQSPLPCSNSLPATCTTGQSKVAAWLQDSEEMDRCAEDLAHCQSNLVELSKLLQNLEILQRTQSAPNFTDMQANCVDISKKDKRVTRRWRTKSVSKDTKIQLQEGPPAKGQFSTTRRRQRLAAAVATTVPFSATMSPVRLHSSNPNLCADIEFQTPPSHLTDPLESSTDYTKLQEEFCLIAQKVHSLLKSAFNSIAIEKEKLKQMVSEQDHSKGHSTQMARLRQSLSQALNQNAELRSRLNRIHSESIICDQVVSVNIIPSPDEAGEQIHVSLPLSQQVANESRLSMSESVSEFFDAQEVLLSASSSENEASDDESYISDVSDNISEDNTSVADNISRQILNGELTGGAFRNGRRACLPAPCPDTSNINLWNILRNNIGKDLSKVSMPVELNEPLNTLQHLCEEMEYSELLDKASETDDPYERMVLVAAFAVSGYCSTYFRAGSKPFNPVLGETYECIREDKGFRFFSEQVSHHPPISACHCESKNFVFWQDIRWKNKFWGKSMEILPVGTLNVMLPKPGTVAHACNSSTLGG

SEQ ID NO: 11660 - protein, 759 aa, Artificial Sequence
  Synthetic polypeptide
MSSDEKGISPAHKTSTPTHRSASSSTSSQRDSRQSIHILERTASSSTEPSVSRQLLEPEPVPLSKEADSWEIIEGLKIGQTNVQKPDKHEGFMLKKRKWPLKGWHKRFFVLDNGMLKYSKAPLDIQKGKVHGSIDVGLSVMSIKKKARRIDLDTEEHIYHLKVKSQDWFDAWVSKLRHHRLYRQNEIVRSPRDASFHIFPSTSTAESSPAANVSVMDGKMQPNSFPWQSPLPCSNSLPATCTTGQSKVAAWLQDSEEMDRCAEDLAHCQSNLVELSKLLQNLEILQRTQSAPNFTDMQANCVDISKKDKRVTRRWRTKSVSKDTKIQLQEGPPAKGQFSTTRRRQRLAAAVATTVPFSATMSPVRLHSSNPNLCADIEFQTPPSHLTDPLESSTDYTKLQEEFCLIAQKVHSLLKSAFNSIAIEKEKLKQMVSEQDHSKGHSTQMARLRQSLSQALNQNAELRSRLNRIHSESIICDQVVSVNIIPSPDEAGEQIHVSLPLSQQVANESRLSMSESVSEFFDAQEVLLSASSSENEASDDESYISDVSDNISEDNTSVADNISRQILNGELTGGAFRNGRRACLPAPCPDTSNINLWNILRNNIGKDLSKVSMPVELNEPLNTLQHLCEEMEYSELLDKASETDDPYERMVLVAAFAVSGYCSTYFRAGSKPFNPVLGETYECIREDKGFRFFSEQVSHHPPISACHCESKNFVFWQDIRWKNKFWGKSMEILPVGTLNVMLPKPGTVAHACNSSTLGG

SEQ ID NO: 11661 - protein, 698 aa, Artificial Sequence
  Synthetic polypeptide
MSSDEKGISPAHKTSTPTHRSASSSTSSQRDSRQSIHILERTASSSTEPSVSRQLLEPEPVPLSKEADSWEIIEGLKIGQTNVQKPDKHEGFMLKKRKWPLKGWHKRFFVLDNGMLKYSKAPLDIQKGKVHGSIDVGLSVMSIKKKARRIDLDTEEHIYHLKVKSQDWFDAWVSKLRHHRLYRQNEIVRSPRDASFHIFPSTSTAESSPAANVSVMDGKMQPNSFPWQSPLPCSNSLPATCTTGQSKVAAWLQDSEEMDRCAEDLAHCQSNLVELSKLLQNLEILQRTQSAPNFTDMQANCVDISKKDKRVTRRWRTKSVSKDTKIQLQVPFSATMSPVRLHSSNPNLCADIEFQTPPSHLTDPLESSTDYTKLQEEFCLIAQKVHSLLKSAFNSIAIEKEKLKQMVSEQDHSKGHSTQMARLRQSLSQAGEQIHVSLPLSQQVANESRLSMSESVSEFFDAQEVLLSASSSENEASDDESYISDVSDNISEDNTSVADNISRQILNGELTGGAFRNGRRACLPAPCPDTSNINLWNILRNNIGKDLSKVSMPVELNEPLNTLQHLCEEMEYSELLDKASETDDPYERMVLVAAFAVSGYCSTYFRAGSKPFNPVLGETYECIREDKGFRFFSEQVSHHPPISACHCESKNFVFWQDIRWKNKFWGKSMEILPVGTLNVMLPKPGTVAHACNSSTLGG

SEQ ID NO: 11662 - protein, 734 aa, Artificial Sequence
  Synthetic polypeptide
MSSDEKGISPAHKTSTPTHRSASSSTSSQRDSRQSIHILERTASSSTEPSVSRQLLEPEPVPLSKEADSWEIIEGLKIGQTNVQKPDKHEGFMLKKRKWPLKGWHKRFFVLDNGMLKYSKAPLDIQKGKVHGSIDVGLSVMSIKKKARRIDLDTEEHIYHLKVKSQDWFDAWVSKLRHHRLYRQNEIVRSPRDASFHIFPSTSTAESSPAANVSVMDGKMQPNSFPWQSPLPCSNSLPATCTTGQSKVAAWLQDSEEMDRCAEDLAHCQSNLVELSKLLQNLEILQRTQSAPNFTDMQANCVDISKKDKRVTRRWRTKSVSKDTKIQLQVPFSATMSPVRLHSSNPNLCADIEFQTPPSHLTDPLESSTDYTKLQEEFCLIAQKVHSLLKSAFNSIAIEKEKLKQMVSEQDHSKGHSTQMARLRQSLSQALNQNAELRSRLNRIHSESIICDQVVSVNIIPSPDEAGEQIHVSLPLSQQVANESRLSMSESVSEFFDAQEVLLSASSSENEASDDESYISDVSDNISEDNTSVADNISRQILNGELTGGAFRNGRRACLPAPCPDTSNINLWNILRNNIGKDLSKVSMPVELNEPLNTLQHLCEEMEYSELLDKASETDDPYERMVLVAAFAVSGYCSTYFRAGSKPFNPVLGETYECIREDKGFRFFSEQVSHHPPISACHCESKNFVFWQDIRWKNKFWGKSMEILPVGTLNVMLPKPGTVAHACNSSTLGG

SEQ ID NO: 11663 - protein, 703 aa, Artificial Sequence
  Synthetic polypeptide
MSSDEKGISPAHKTSTPTHRSASSSTSSQRDSRQSIHILERTASSSTEPSVSRQLLEPEPVPLSKEADSWEIIEGLKIGQTNVQKPDKHEGFMLKKRKWPLKGWHKRFFVLDNGMLKYSKAPLDIQKGKVHGSIDVGLSVMSIKKKARRIDLDTEEHIYHLKVKSQDWFDAWVSKLRHHRLYRQNEIVRSPRDASFHIFPSTSTAESSPAANVSVMDGKMQPNSFPWQSPLPCSNSLPATCTTGQSKVAAWLQDSEEMDRCAEDLAHCQSNLVELSKLLQNLEILQRTQSAPNFTDMQVPFSATMSPVRLHSSNPNLCADIEFQTPPSHLTDPLESSTDYTKLQEEFCLIAQKVHSLLKSAFNSIAIEKEKLKQMVSEQDHSKGHSTQMARLRQSLSQALNQNAELRSRLNRIHSESIICDQVVSVNIIPSPDEAGEQIHVSLPLSQQVANESRLSMSESVSEFFDAQEVLLSASSSENEASDDESYISDVSDNISEDNTSVADNISRQILNGELTGGAFRNGRRACLPAPCPDTSNINLWNILRNNIGKDLSKVSMPVELNEPLNTLQHLCEEMEYSELLDKASETDDPYERMVLVAAFAVSGYCSTYFRAGSKPFNPVLGETYECIREDKGFRFFSEQVSHHPPISACHCESKNFVFWQDIRWKNKFWGKSMEILPVGTLNVMLPKPGTVAHACNSSTLGG

SEQ ID NO: 11664 - protein, 949 aa, Artificial Sequence
  Synthetic polypeptide
MDRPLSSSAEAEEELEWQVASRRRKAWAKCRSSWQASETEDLSTEATTQDEEEDEEEDLPGAQLPAAGGRGNVPNEKIAIWLKDCRTPLGASLDEQSSSTLKGVLVRNGGSFEDDLSLGAEANHLHESDAQIENCNNILAKERRLQFHQKGRSMNSTGSGKSSGTVSSVSELLELYEEDPEEILYNLGFGRDEPDIASKIPSRFFNSSSFAKGIDIKVFLSAQMQRMEVENPNYALTSRFRQIEVLTTVANAFSSLYSQVSGTPLQRIGSMSSVTSNKETDPPPPLTRSNTANRLMKTLSKLNLCVDKTEKGESSSPSPSAEKGKILNVSVIEESGNKNDQKSQKIMKKKESSSMLATVKEEVSGSSAAVTENADSDRISDEANSNFNQGTENEQSKETQSHESKLGEESGIVESKLDSDFNISSHSELENSSELKSVHISTPEKEPCAPLTIPSIRNIMTQQKDSFEMEEVQSTEGEAPHVPATYQLGLTKSKRDHLLRTASQHSDSSGFAEDSTDCLSLNHLQVQESLQAMGSSADSCDSETTVTSLGEDLATPTAQDQPYFNESEEESLVPLQKGLEKAAAVADKRKSGSQDFPQCNTIENTGTKQSTCSPGDHIIEITEVEEDLFPAETVELLREASAESDVGKSSESEFTQYTTHHILKSLASIEAKCSDMSSENTTGPPSSMDRVNTALQRAQMKVCSLSNQRMGRSLLKSKDLLKQRYLFAKAGYPLRRSQSLPTTLLSPVRVVSSVNVRLSPGKETRCSPPSFTYKYTPEEEQELEKRVMEHDGQSLVKSTIFISPSSVKKEEAPQSEAPRVEECHHGRTPTCSRLAPPPMSQSTCSLHSIHSEWQERPLCEHTRTLSTHSVPNISGATCSAFASPFGCPYSHRHATYPYRVCSVNPPSAIEMQLRRVLHDIRNSLQNLSQGEAVTNPDQSRFLCSQVCLL

SEQ ID NO: 11665 - protein, 796 aa, Artificial Sequence
  Synthetic polypeptide
MNSTGSGKSSGTVSSVSELLELYEEDPEEILYNLGFGRDEPDIASKIPSRFFNSSSFAKGIDIKVFLSAQMQRMEVENPNYALTSRFRQIEVLTTVANAFSSLYSQVSGTPLQRIGSMSSVTSNKETDPPPPLTRSNTANRLMKTLSKLNLCVDKTEKGESSSPSPSAEKGKILNVSVIEESGNKNDQKSQKIMKKKESSSMLATVKEEVSGSSAAVTENADSDRISDEANSNFNQGTENEQSKETQSHESKLGEESGIVESKLDSDFNISSHSELENSSELKSVHISTPEKEPCAPLTIPSIRNIMTQQKDSFEMEEVQSTEGEAPHVPATYQLGLTKSKRDHLLRTASQHSDSSGFAEDSTDCLSLNHLQVQESLQAMGSSADSCDSETTVTSLGEDLATPTAQDQPYFNESEEESLVPLQKGLEKAAAVADKRKSGSQDFPQCNTIENTGTKQSTCSPGDHIIEITEVEEDLFPAETVELLREASAESDVGKSSESEFTQYTTHHILKSLASIEAKCSDMSSENTTGPPSSMDRVNTALQRAQMKVCSLSNQRMGRSLLKSKDLLKQRYLFAKAGYPLRRSQSLPTTLLSPVRVVSSVNVRLSPGKETRCSPPSFTYKYTPEEEQELEKRVMEHDGQSLVKSTIFISPSSVKKEEAPQSEAPRVEECHHGRTPTCSRLAPPPMSQSTCSLHSIHSEWQERPLCEHTRTLSTHSVPNISGATCSAFASPFGCPYSHRHATYPYRVCSVNPPSAIEMQLRRVLHDIRNSLQNLSQGEAVTNPDQSRFLCSQVCLL

SEQ ID NO: 11666 - protein, 458 aa, Artificial Sequence
  Synthetic polypeptide
MTTEDHLLRTASQHSDSSGFAEDSTDCLSLNHLQVQESLQAMGSSADSCDSETTVTSLGEDLATPTAQDQPYFNESEEESLVPLQKGLEKAAAVADKRKSGSQDFPQCNTIENTGTKQSTCSPGDHIIEITEVEEDLFPAETVELLREASAESDVGKSSESEFTQYTTHHILKSLASIEAKCSDMSSENTTGPPSSMDRVNTALQRAQMKVCSLSNQRMGRSLLKSKDLLKQRYLFAKAGYPLRRSQSLPTTLLSPVRVVSSVNVRLSPGKETRCSPPSFTYKYTPEEEQELEKRVMEHDGQSLVKSTIFISPSSVKKEEAPQSEAPRVEECHHGRTPTCSRLAPPPMSQSTCSLHSIHSEWQERPLCEHTRTLSTHSVPNISGATCSAFASPFGCPYSHRHATYPYRVCSVNPPSAIEMQLRRVLHDIRNSLQNLSQGEAVTNPDQSRFLCSQVCLL

SEQ ID NO: 11667 - protein, 436 aa, Artificial Sequence
  Synthetic polypeptide
MAFPPRRRLRLGPRGLPLLLSGLLLPLCRAFNLDVDSPAEYSGPEGSYFGFAVDFFVPSASSRMFLLVGAPKANTTQPGIVEGGQVLKCDWSSTRRCQPIEFDATGNRDYAKDDPLEFKSHQWFGASVRSKQDKILACAPLYHWRTEMKQEREPVGTCFLQDGTKTVEYAPCRSQDIDADGQGFCQGGFSIDFTKADRVLLGGPGSFYWQGQLISDQVAEIVSKYDPNVYSIKYNNQLATRTAQAIFDDSYLGYSVAVGDFNGDGIDDFVSGVPRAARTLGMVYIYDGKNMSSLYNFTGEQMAAYFGFSVAATDINGDDYADVFIGAPLFMDRGSDGKLQEVGQVSVSLQRASGDFQTTKLNGFEVFARFGSAIAPLGDLDQDGFNGIIKRDIENKTIKLCSKILYSPKVIMCSFLSVLFQKKQRKKKKSRKEHLK

SEQ ID NO: 11668 - protein, 400 aa, Artificial Sequence
  Synthetic polypeptide
MAFPPRRRLRLGPRGLPLLLSGLLLPLCRAFNLDVDSPAEYSGPEGSYFGFAVDFFVPSASSRMFLLVGAPKANTTQPGIVEGGQVLKCDWSSTRRCQPIEFDATGNRDYAKDDPLEFKSHQWFGASVRSKQDKILACAPLYHWRTEMKQEREPVGTCFLQDGTKTVEYAPCRSRQLISDQVAEIVSKYDPNVYSIKYNNQLATRTAQAIFDDSYLGYSVAVGDFNGDGIDDFVSGVPRAARTLGMVYIYDGKNMSSLYNFTGEQMAAYFGFSVAATDINGDDYADVFIGAPLFMDRGSDGKLQEVGQVSVSLQRASGDFQTTKLNGFEVFARFGSAIAPLGDLDQDGFNGIIKRDIENKTIKLCSKILYSPKVIMCSFLSVLFQKKQRKKKKSRKEHLK

SEQ ID NO: 11669 - protein, 390 aa, Artificial Sequence
  Synthetic polypeptide
MLLGTLLLILYILMLCRMFLLVGAPKANTTQPGIVEGGQVLKCDWSSTRRCQPIEFDATGNRDYAKDDPLEFKSHQWFGASVRSKQDKILACAPLYHWRTEMKQEREPVGTCFLQDGTKTVEYAPCRSQDIDADGQGFCQGGFSIDFTKADRVLLGGPGSFYWQGQLISDQVAEIVSKYDPNVYSIKYNNQLATRTAQAIFDDSYLGYSVAVGDFNGDGIDDFVSGVPRAARTLGMVYIYDGKNMSSLYNFTGEQMAAYFGFSVAATDINGDDYADVFIGAPLFMDRGSDGKLQEVGQVSVSLQRASGDFQTTKLNGFEVFARFGSAIAPLGDLDQDGFNGIIKRDIENKTIKLCSKILYSPKVIMCSFLSVLFQKKQRKKKKSRKEHLK

SEQ ID NO: 11670 - protein, 63 aa, Artificial Sequence
  Synthetic polypeptide
MNRAFSRKKDKTWMHTPEALSKHFIPYNAKTCLAPPFAFCHDCKYPEAFPSRGTVSGLNLFSL

SEQ ID NO: 11671 - protein, 141 aa, Artificial Sequence
  Synthetic polypeptide
MNRAFSRKKDKTWMHTPEALSKHFIPYNAKFLGSTEVEQPKGTEVVRDAVRKLKFARHIKKSEGQKIPKVELQISIYGVKILEPKTKEVQHNCQLHRISFCADDKTDKRIFTFICKDSESNKHLCYVFDSEKCARRGGSRL

SEQ ID NO: 11672 - protein, 114 aa, Artificial Sequence
  Synthetic polypeptide
GFFIYEEEGSGVPGSSRKGNDAIVVEQWTVIEGCEIKTDYGPLLHTLAEFGWLLTSVLPTPVLRHDSEGNLATKQIVFLQRPVMWNSAAQTPDPGTVAHACNPSTLEGQGGRII

SEQ ID NO: 11673 - protein, 432 aa, Artificial Sequence
  Synthetic polypeptide
MGCGLRKLEDPDDSSPGKIFSTLKRPQVETKTEFAYEYVLLDFTLQASSNPEVIKINSILDIVTKVENYYLKGYIVGAIHPVIQPVGQRKHLPASYLYRVVLLRLKLSPKNSAAPSGQRRPRLVIEECPLTSEAQTNDAAKELIEKINVAAKRGMKFVGFISQHYSPSKFCNGTNHDGDIESMLHVRHGSDENCRSWNEGTLSGQSSESGIEEELHHESGQYQMEQNGSPTSSKSRKGEASDNKLYTVFNAFDDDSTSWAYQEGILSMKVTRKGSVISTLDADWLELTTFYYKQGLSLIDSFVFWETSKGEHLPKSLEGFFIYEEEGSGVPGSSRKGNDAIVVEQWTVIEGCEIKTDYGPLLHTLAEFGWLLTSVLPTPVLRHDSEGNLATKQIVFLQRPVMWNSAAQTPDPGTVAHACNPSTLEGQGGRII

SEQ ID NO: 11674 - protein, 126 aa, Artificial Sequence
  Synthetic polypeptide
MLGTDRCVVEEWLSEFKALPDTQITSYAATLHRKKTLVPALYKVIQDSNNELLEPVCHQLFELYRSSEVRLKRFTLQFLPELMWVYLRLTVSRDRQSNGCIEALLLGIYNLHFRRPRWEDHLSPGV

SEQ ID NO: 11675 - protein, 8 aa, Artificial Sequence
  Synthetic polypeptide
MSDQGCED

SEQ ID NO: 11676 - protein, 31 aa, Artificial Sequence
  Synthetic polypeptide
MTSSLQRPWRVPWLPWTILLVSTAADSWVPH

SEQ ID NO: 11677 - protein, 145 aa, Artificial Sequence
  Synthetic polypeptide
MTSSLQRPWRVPWLPWTILLVSTAAASQNQERLCAFKDPYQQDLGIGESRISHENGTILCSKGSTCYGLWEKSKGDINLVKQGCWSHIGDPQECHYEECVVTTTPPSIQNGTYRFCCCSTDLCNVNFTENFPPPDTTPLSLQLHS

SEQ ID NO: 11678 - protein, 204 aa, Artificial Sequence
  Synthetic polypeptide
MKPPGSSSRQPPLAGCSLAGASCGPQRGPAGSVPASAPARTPPCRLLLVLLLLPPLAASSRPRAWGAAAPSAPHWNETAEKNLGVLADEDNTLQQNSSSNISYSNAMQKEITLPSRLIYYINQDSESPYHVLDTKARHQQKHNKAVHLAQASFQIEAFGSKFILDLILNKESLDTDTSVLEERPCEDTVRWTAAVCKPRREPCE

SEQ ID NO: 11679 - protein, 670 aa, Artificial Sequence
  Synthetic polypeptide
MEALEVDDISPALEVTEEFFSTLDSNLEKAVQQAEVYGIQEVPELVGHEVLSNITDNGAMRNVTSLGKGGMIWDHCKSRLLETKAQNVFPAKEQFMVQRGTTPDNLSWMEQKEASTFNFFNICQRRRDRPRSVNDLLDETSTFKPGHARSRSDITQVDWRVVLKTTPLQQQQQQQPLLQGPHVTRPSFLLPSPNKIEDAQGNTEHKQTFPNILKKGYLEIRKDHDSYWQSCYAELSPYNLYFYSLDSSGNQNLYATYQLSHFQSISVLGNLEARMVDTVLYDNTQLQLKAESPWEALDWGQKLWEVVHAAVPGYMGRQNELTISPGLGHHDDYTQNHSFQKKTSGLLPPSPVLDSSKQYQNILKSGTLYRLTVQNNWKAFTFVLSRAYLMAFQPGKLDEDPLLSYNVDVCLAVQMDNLDGCDSCFQVIFPQDVLRLRAETRQRAQEWMEALKIAANVARSSEQNLQVTLRNKPKDQMGGHELRKNKRQSVTTSFLSILTTLSLERGLTAQSFKCAGCQRSIGLSNGKAKVCNYSGWYYCSSCHVDDSFLIPARIVHNWDTSKYKVSKQAKEFLEYVYEEPLIDIQQENAMLYHHAEPLAAVLRLRQRLKSLRAYLFSCRAAVAEDLRRRIFPREYLLQQIHLYSLADLQQVKSNRKFHSGAGMTGTPNTC

SEQ ID NO: 11680 - protein, 677 aa, Artificial Sequence
  Synthetic polypeptide
MEALEVDDISPALEVTEEFFSTLDSNLEKAVQQAEVYGIQEVPELVGHEVLSNITDNGAMRNVTSLGKGGMIWDHCKSRLLETKAQNVFPAKEQFMVQRGTTPDNLSWMEQKEASTFNFFNICQRRRDRPRSVNDLLDETSTFKPGHARSRSDITQVDWRVVLKTTPLQQQQQQQPLLQGPHVTRPSFLLPSPNKIEDAQGNTEHKQTFPNILKKGYLEIRKDHDSYWQSCYAELSPYNLYFYSLDSSGNQNLYATYQLSHFQSISVLGNLEARMVDTVLYDNTQLQLKAESPWEALDWGQKLWEVVHAAVPGYMGRQNELTISPGLGHHDDYTQNHSFQKKTSGLLPPSPVLDSSKQYQNILKSGTLYRLTVQNNWKAFTFVLSRAYLMAFQPGKLDEDPLLSYNVDVCLAVQMDNLDGCDSCFQVIFPQDVLRLRAETRQRAQEWMEALKIAANVARSSEQNLQVTLRNKPKDQMGGHELRKNKRQSVTTSFLSILTTLSLERGLTAQSFKCAGCQRSIGLSNGKAKVCNYSGWYYCSSCHVDDSFLIPARIVHNWDTSKYKVSKQAKEFLEYVYEEPLIDIQQENAMLYHHAEPLAAVLRLRQRLKSLRAYLFSCRAAVAEDLRRRNDQQHALVMLNVFGEFSPENTSFNRSTCIHLPTCSRLNQTESFIPVLV

SEQ ID NO: 11681 - protein, 422 aa, Artificial Sequence
  Synthetic polypeptide
  misc_feature (1)..(1): Xaa can be any naturally occurring amino acid
XNQNLYATYQLSHFQSISVLGNLEARMVDTVLYDNTQLQLKAESPWEALDWGQKLWEVVHAAVPGYMGRQNELTISPGLGHHDDYTQNHSFQKKTSGLLPPSPVLDSSKQYQNILKSGTLYRLTVQNNWKAFTFVLSRAYLMAFQPGKLDEDPLLSYNVDVCLAVQMDNLDGCDSCFQVIFPQDVLRLRAETRQRAQEWMEALKIAANVARSSEQNLQVTLRNKPKDQMGGHELRKNKRQSVTTSFLSILTTLSLERGLTAQSFKCAGCQRSIGLSNGKAKVCNYSGWYYCSSCHVDDSFLIPARIVHNWDTSKYKVSKQAKEFLEYVYEEPLIDIQQENAMLYHHAEPLAAVLRLRQRLKSLRAYLFSCRAAVAEDLRRRIFPREYLLQQIHLYSLADLQQVKSNRKFHSGAGMTGTPNTC

SEQ ID NO: 11682 - protein, 345 aa, Artificial Sequence
  Synthetic polypeptide
MAGLGASLHVWGWLMLGSCLLARAQLDSDGTITIEEQIVLVLKAKVQCELNITAQLQEGEGNCFPEWDGLICWPRGTVGKISAVPCPPYIYDFNHKGVAFRHCNPNGTWDFMHSLNKTWANYSDCLRFLQPDISIGKQEFFERLYVMYTVGYSISFGSLAVAILIIGYFRRLHCTRNYIHMHLFVSFMLRATSIFVKDRVVHAHIGVKELESLIMQDDPQNSIEATSVDKSQYIGCKIAVVMFIYFLATNYYWILVEGLYLHNLIFVAFFSDTKYLWGFILIGWGFPAAFVAAWAVARATLADARCWELSAGDIKWIYQAPILAAIGIGRLLCMDKIPATASLTP

SEQ ID NO: 11683 - protein, 142 aa, Artificial Sequence
  Synthetic polypeptide
MAQRAFPNPYADYNKSLAEGYFDAAGRLTPEFSQRLTNKIRELLQQMERGLKSADPRDGTGYTGWAGIAVLYLHLYDVFGDPAYLQLAHGYVKQSLNCLTKRSITFLCGDAGPLAVAAVLYHKMNNEKQAEDCITRCSGSHL

SEQ ID NO: 11684 - protein, 80 aa, Artificial Sequence
  Synthetic polypeptide
MAQRAFPNPYADYNKSLAEGYFDAAGRLTPEFSQRLTNKIRELLQQMERGLKSADPRDGTGYTGWAVAVAHTYNPSTLGG

SEQ ID NO: 11685 - protein, 414 aa, Artificial Sequence
  Synthetic polypeptide
MLGPCMLLLLLLLGLRLQLSLGIIPVEEENPDFWNREAAEALGAAKKLQPAQTAAKNLIIFLGDGMGVSTVTAARILKGQKKDKLGPEIPLAMDRFPYVALSKTYNVDKHVPDSGATATAYLCGVKGNFQTIGLSAAARFNQCNTTRGNEVISVMNRAKKAGKSVGVVTTTRVQHASPAGTYAHTVNRNWYSDADVPASARQEGCQDIATQLISNMDIDVILGGGRKYMFRMGTPDPEYPDDYSQGGTRLDGKNLVQEWLAKRQGARYVWNRTELMQASLDPSVTHLMGLFEPGDMKYEIHRDSTLDPSLMEMTEAALRLLSRNPRGFFLFVEGGRIDHGHHESRAYRALTETIMFDDAIERAGQLTSEEDTLSLVTADHSHVFSFGGYPLRGSSIFGMAAQHLQSQHFGRKSG

SEQ ID NO: 11686 - protein, 453 aa, Artificial Sequence; identical to SEQ ID NO: 432
  Synthetic polypeptide

SEQ ID NO: 11687 - protein, 61 aa, Artificial Sequence
  Synthetic polypeptide
MEFNSNVKSWSFSLQQPTQFINPETPGYVGFANLPNQVHRKSVKKGFEFTLMVVGFYLCSQ

SEQ ID NO: 11688 - protein, 50 aa, Artificial Sequence
  Synthetic polypeptide
MSKQQPTQFINPETPGYVGFANLPNQVHRKSVKKGFEFTLMVVGFYLCSQ

SEQ ID NO: 11689 - protein, 10 aa, Artificial Sequence
  Synthetic polypeptide
MVVGFYLCSQ

SEQ ID NO: 11690 - protein, 55 aa, Artificial Sequence
  Synthetic polypeptide
MEFNSNVKSWSFSLQQPTQFINPETPGYVGFANLPNQVHRKSVKKGFEFTLMVVD

SEQ ID NO: 11691 - protein, 44 aa, Artificial Sequence
  Synthetic polypeptide
MSKQQPTQFINPETPGYVGFANLPNQVHRKSVKKGFEFTLMVVD

SEQ ID NO: 11692 - protein, 4 aa, Artificial Sequence
  Synthetic polypeptide
MVVD

SEQ ID NO: 11693 - protein, 87 aa, Artificial Sequence
  Synthetic polypeptide
MEFNSNVKSWSFSLQQPTQFINPETPGYVGFANLPNQVHRKSVKKGFEFTLMVVGHKRHYGPPPCLFSNYSLWRKPALPALNRVLPV

SEQ ID NO: 11694 - protein, 76 aa, Artificial Sequence
  Synthetic polypeptide
MSKQQPTQFINPETPGYVGFANLPNQVHRKSVKKGFEFTLMVVGHKRHYGPPPCLFSNYSLWRKPALPALNRVLPV

SEQ ID NO: 11695 - protein, 36 aa, Artificial Sequence
  Synthetic polypeptide
MVVGHKRHYGPPPCLFSNYSLWRKPALPALNRVLPV

SEQ ID NO: 11696 - protein, 61 aa, Artificial Sequence; identical to SEQ ID NO: 11687
  Synthetic polypeptide

SEQ ID NO: 11697 - protein, 50 aa, Artificial Sequence; identical to SEQ ID NO: 11688
  Synthetic polypeptide

SEQ ID NO: 11698 - protein, 10 aa, Artificial Sequence
  Synthetic polypeptide
MVVGFYLCSQ

SEQ ID NO: 11699 - protein, 55 aa, Artificial Sequence; identical to SEQ ID NO: 11690
  Synthetic polypeptide

SEQ ID NO: 11700 - protein, 44 aa, Artificial Sequence; identical to SEQ ID NO: 11691
  Synthetic polypeptide

SEQ ID NO: 11701 - protein, 4 aa, Artificial Sequence
  Synthetic polypeptide
MVVD

SEQ ID NO: 11702 - protein, 93 aa, Artificial Sequence
  Synthetic polypeptide
MEFNSNVKSWSFSLQQPTQFINPETPGYVGFANLPNQVHRKSVKKGFEFTLMVVGHKRHYGPPPCLFSNYSLWRKPAVMSREHSSSLTGKPTK

SEQ ID NO: 11703 - protein, 82 aa, Artificial Sequence
  Synthetic polypeptide
MSKQQPTQFINPETPGYVGFANLPNQVHRKSVKKGFEFTLMVVGHKRHYGPPPCLFSNYSLWRKPAVMSREHSSSLTGKPTK

SEQ ID NO: 11704 - protein, 42 aa, Artificial Sequence
  Synthetic polypeptide
MVVGHKRHYGPPPCLFSNYSLWRKPAVMSREHSSSLTGKPTK

SEQ ID NO: 11705 - protein, 360 aa, Artificial Sequence
  Synthetic polypeptide
MAAPPAPAAKGSPQPEPHAPEPGPGSAKRGREDSRAGRLSFCTKVCYGIGGVPNQIASSATAFYLQLFLLDIAQIPAAQVSLVLFGGKVSGAAADPVAGFFINRSQRTGSGRLMPWVLGCTPFIALAYFFLWFLPPFTSLRGLWYTTFYCLFQALATFFQVPYTALTMLLTPCPRERDSATAYRMTVEMAGTLMGATVHGLIVSGAHRPHRCEATATPGPVTVSPNAAHLYCIAAAVVVVTYPVCISLLCLGVKERPDPSAPASGPGLSFLAGLSLTTRHPPYLKLVISFLFISAAVQVEQSYLVLFCTHASQLHDHVQGLVLTVLVSAVLSTPLWEWVLQRFGKKTSAFGIFGLAQGKA

SEQ ID NO: 11706 - protein, 303 aa, Artificial Sequence; identical to SEQ ID NO: 666
  Synthetic polypeptide

SEQ ID NO: 11707 - protein, 670 aa, Artificial Sequence; identical to SEQ ID NO: 201
  Synthetic polypeptide

SEQ ID NO: 11708 - protein, 363 aa, Artificial Sequence; identical to SEQ ID NO: 592
  Synthetic polypeptide

SEQ ID NO: 11709 - protein, 293 aa, Artificial Sequence
  Synthetic polypeptide
MPRNQGFSEPEYSAEYSAEYSVSLPSDPDRGVGRTHEISVRNSGSCLCLPRFMRLTFVPESLENLYQTYFKRQRHETLLVLVVFAALFDCYVVVMCAVVFSSDKLASLAVAGIGLVLDIILFVLCKKGLLPDRVTRRVLPYVLWLLITAQIFSYLGLNFARAHAASDTVGWQVFFVFSFFITLPLSLSPIVIISVVSCVVHTLVLGVTVAQQQQEELKGMQLLRELKPAETMEHAYVLKKYIQDEYLPYVFVSFAYLCVMPRQHGVLVNSQCLGVEQDAKQAQNNMSHPQLSK

SEQ ID NO: 11710 - protein, 449 aa, Artificial Sequence
  Synthetic polypeptide
FVKFANIEEDTPSYHRSYDFFVSRFSEMCHSSHDDLEIKTKIRMSGIKGLQGVVRKTVNDELQANIWDPQHMDKIVPSLLFNLQHVEEAESRSPSPLQAPEKEKESPAELAERCLRELLGRAAFGNIKNAIKPVLIHLDNHSLWEPKVFAIRCFKIIMYSIQPQHSHLVIQQLLGHLDANSRSAATVRAGIVEVLSEAAVIAATGSVGPTVLEMFNTLLRQLRLSIDYALTGSYDGAVSLGTKIIKEHEERMFQEAVIKTVGSFASTLPTYQRSEVILFIMSKVPRPSLHQAVDTGRTGENRNRLTQIMLLKSLLQVSTGFQCNNMMSALPSNFLDRLLSTALMEDAEIRLFVLEILISFIDRHGNRHKFSTISTLSDISVLKLKVDKCSRQDTVFMKKLQKLTGHGGGHLQSQLLGRLRQENRLNPEGGGCSEPRLCQCTSAWVTEQK

SEQ ID NO: 11711 - protein, 422 aa, Artificial Sequence
  Synthetic polypeptide
MCHSSHDDLEIKTKIRMSGIKGLQGVVRKTVNDELQANIWDPQHMDKIVPSLLFNLQHVEEAESRSPSPLQAPEKEKESPAELAERCLRELLGRAAFGNIKNAIKPVLIHLDNHSLWEPKVFAIRCFKIIMYSIQPQHSHLVIQQLLGHLDANSRSAATVRAGIVEVLSEAAVIAATGSVGPTVLEMFNTLLRQLRLSIDYALTGSYDGAVSLGTKIIKEHEERMFQEAVIKTVGSFASTLPTYQRSEVILFIMSKVPRPSLHQAVDTGRTGENRNRLTQIMLLKSLLQVSTGFQCNNMMSALPSNFLDRLLSTALMEDAEIRLFVLEILISFIDRHGNRHKFSTISTLSDISVLKLKVDKCSRQDTVFMKKLQKLTGHGGGHLQSQLLGRLRQENRLNPEGGGCSEPRLCQCTSAWVTEQK

SEQ ID NO: 11712 - protein, 535 aa, Artificial Sequence
  Synthetic polypeptide
MEKLTFYALSAPEKLDRIGAYLSERLIRDVGRHRYGYVCIAMEALDQLLMACHCQSINLFVESFLKMVAKLLESEKPNLQILGTNSFVKFANIEEDTPSYHRSYDFFVSRFSEMCHSSHDDLEIKTKIRMSGIKGLQGVVRKTVNDELQANIWDPQHMDKIVPSLLFNLQHVEEAESRSPSPLQAPEKEKESPAELAERCLRELLGRAAFGNIKNAIKPVLIHLDNHSLWEPKVFAIRCFKIIMYSIQPQHSHLVIQQLLGHLDANSRSAATVRAGIVEVLSEAAVIAATGSVGPTVLEMFNTLLRQLRLSIDYALTGSYDGAVSLGTKIIKEHEERMFQEAVIKTVGSFASTLPTYQRSEVILFIMSKVPRPSLHQAVDTGRTGENRNRLTQIMLLKSLLQVSTGFQCNNMMSALPSNFLDRLLSTALMEDAEIRLFVLEILISFIDRHGNRHKFSTISTLSDISVLKLKVDKCSRQDTVFMKKLQKLTGHGGGHLQSQLLGRLRQENRLNPEGGGCSEPRLCQCTSAWVTEQK

SEQ ID NO: 11713 - protein, 570 aa, Artificial Sequence
  Synthetic polypeptide
MYGVCGCCGALRPRYKRLVDNIFPEDPEDGLVKTNMEKLTFYALSAPEKLDRIGAYLSERLIRDVGRHRYGYVCIAMEALDQLLMACHCQSINLFVESFLKMVAKLLESEKPNLQILGTNSFVKFANIEEDTPSYHRSYDFFVSRFSEMCHSSHDDLEIKTKIRMSGIKGLQGVVRKTVNDELQANIWDPQHMDKIVPSLLFNLQHVEEAESRSPSPLQAPEKEKESPAELAERCLRELLGRAAFGNIKNAIKPVLIHLDNHSLWEPKVFAIRCFKIIMYSIQPQHSHLVIQQLLGHLDANSRSAATVRAGIVEVLSEAAVIAATGSVGPTVLEMFNTLLRQLRLSIDYALTGSYDGAVSLGTKIIKEHEERMFQEAVIKTVGSFASTLPTYQRSEVILFIMSKVPRPSLHQAVDTGRTGENRNRLTQIMLLKSLLQVSTGFQCNNMMSALPSNFLDRLLSTALMEDAEIRLFVLEILISFIDRHGNRHKFSTISTLSDISVLKLKVDKCSRQDTVFMKKLQKLTGHGGGHLQSQLLGRLRQENRLNPEGGGCSEPRLCQCTSAWVTEQK

SEQ ID NO: 11714 - protein, 482 aa, Artificial Sequence
  Synthetic polypeptide
FVKFANIEEDTPSYHRSYDFFVSRFSEMCHSSHDDLEIKTKIRMSGIKGLQGVVRKTVNDELQANIWDPQHMDKIVPSLLFNLQHVEEAESRSPSPLQAPEKEKESPAELAERCLRELLGRAAFGNIKNAIKPVLIHLDNHSLWEPKVFAIRCFKIIMYSIQPQHSHLVIQQLLGHLDANSRSAATVRAGIVEVLSEAAVIAATGSVGPTVLEMFNTLLRQLRLSIDYALTGSYDGAVSLGTKIIKEHEERMFQEAVIKTVGSFASTLPTYQRSEVILFIMSKVPRPSLHQAVDTGRTGENRNRLTQIMLLKSLLQVSTGFQCNNMMSALPSNFLDRLLSTALMEDAEIRLFVLEILISFIDRHGNRHKFSTISTLSDISVLKLKVDKCSRQDTVFMKKHSQQLYRHIYLSCKEETNVQKHYEALYGLLALISIELANEEVVVDLIRLVLAVQVIETRKKEAPYMLPEDVFVERPRPSDSED

SEQ ID NO: 11715 - protein, 499 aa, Artificial Sequence
  Synthetic polypeptide
MCHSSHDDLEIKTKIRMSGIKGLQGVVRKTVNDELQANIWDPQHMDKIVPSLLFNLQHVEEAESRSPSPLQAPEKEKESPAELAERCLRELLGRAAFGNIKNAIKPVLIHLDNHSLWEPKVFAIRCFKIIMYSIQPQHSHLVIQQLLGHLDANSRSAATVRAGIVEVLSEAAVIAATGSVGPTVLEMFNTLLRQLRLSIDYALTGSYDGAVSLGTKIIKEHEERMFQEAVIKTVGSFASTLPTYQRSEVILFIMSKVPRPSLHQAVDTGRTGENRNRLTQIMLLKSLLQVSTGFQCNNMMSALPSNFLDRLLSTALMEDAEIRLFVLEILISFIDRHGNRHKFSTISTLSDISVLKLKVDKCSRQDTVFMKKHSQQLYRHIYLSCKEETNVQKHYEALYGLLALISIELANEEVVVDLIRLVLAVQDVAQVNEENLPVYNRCALYALGAAYLNLISQLTTVPAFCQHIHEVIETRKKEAPYMLPEDVFVERPRPSDSED

SEQ ID NO: 11716 - protein, 612 aa, Artificial Sequence
  Synthetic polypeptide
MEKLTFYALSAPEKLDRIGAYLSERLIRDVGRHRYGYVCIAMEALDQLLMACHCQSINLFVESFLKMVAKLLESEKPNLQILGTNSFVKFANIEEDTPSYHRSYDFFVSRFSEMCHSSHDDLEIKTKIRMSGIKGLQGVVRKTVNDELQANIWDPQHMDKIVPSLLFNLQHVEEAESRSPSPLQAPEKEKESPAELAERCLRELLGRAAFGNIKNAIKPVLIHLDNHSLWEPKVFAIRCFKIIMYSIQPQHSHLVIQQLLGHLDANSRSAATVRAGIVEVLSEAAVIAATGSVGPTVLEMFNTLLRQLRLSIDYALTGSYDGAVSLGTKIIKEHEERMFQEAVIKTVGSFASTLPTYQRSEVILFIMSKVPRPSLHQAVDTGRTGENRNRLTQIMLLKSLLQVSTGFQCNNMMSALPSNFLDRLLSTALMEDAEIRLFVLEILISFIDRHGNRHKFSTISTLSDISVLKLKVDKCSRQDTVFMKKHSQQLYRHIYLSCKEETNVQKHYEALYGLLALISIELANEEVVVDLIRLVLAVQDVAQVNEENLPVYNRCALYALGAAYLNLISQLTTVPAFCQHIHEVIETRKKEAPYMLPEDVFVERPRPSDSED

SEQ ID NO: 11717 - protein, 647 aa, Artificial Sequence
  Synthetic polypeptide
MYGVCGCCGALRPRYKRLVDNIFPEDPEDGLVKTNMEKLTFYALSAPEKLDRIGAYLSERLIRDVGRHRYGYVCIAMEALDQLLMACHCQSINLFVESFLKMVAKLLESEKPNLQILGTNSFVKFANIEEDTPSYHRSYDFFVSRFSEMCHSSHDDLEIKTKIRMSGIKGLQGVVRKTVNDELQANIWDPQHMDKIVPSLLFNLQHVEEAESRSPSPLQAPEKEKESPAELAERCLRELLGRAAFGNIKNAIKPVLIHLDNHSLWEPKVFAIRCFKIIMYSIQPQHSHLVIQQLLGHLDANSRSAATVRAGIVEVLSEAAVIAATGSVGPTVLEMFNTLLRQLRLSIDYALTGSYDGAVSLGTKIIKEHEERMFQEAVIKTVGSFASTLPTYQRSEVILFIMSKVPRPSLHQAVDTGRTGENRNRLTQIMLLKSLLQVSTGFQCNNMMSALPSNFLDRLLSTALMEDAEIRLFVLEILISFIDRHGNRHKFSTISTLSDISVLKLKVDKCSRQDTVFMKKHSQQLYRHIYLSCKEETNVQKHYEALYGLLALISIELANEEVVVDLIRLVLAVQDVAQVNEENLPVYNRCALYALGAAYLNLISQLTTVPAFCQHIHEVIETRKKEAPYMLPEDVFVERPRPSDSED

SEQ ID NO: 11718 - protein, 243 aa, Artificial Sequence
  Synthetic polypeptide
MIEAFRDNGLNTLDHTTEISVSRLETVISSIYYQLNKRLPSTHQISVEQSISLLLNFMIAAYDSEGRGKLTVFSVKAMLATMCGGKMLDKLRYVFSQMSDSNGLMIFSKFDQFLKEVLKLPTAVFEGPSFGYTEHSVRTCFPQQRKIMLNMFLDTMMADPPPQCLVWLPLMHRLAHVENVFHPVECSYCRCESMMGFRYRCQQCHNYQLCQNCFWRGHAGGPHSNQHQMKEHSSWAGHDGSHL

SEQ ID NO: 11719 - protein, 300 aa, Artificial Sequence
  Synthetic polypeptide
MIEESGNKRKTMAEKRQLFIEMRAQNFDVIRLSTYRTACKLRFVQKRCNLHLVDIWNMIEAFRDNGLNTLDHTTEISVSRLETVISSIYYQLNKRLPSTHQISVEQSISLLLNFMIAAYDSEGRGKLTVFSVKAMLATMCGGKMLDKLRYVFSQMSDSNGLMIFSKFDQFLKEVLKLPTAVFEGPSFGYTEHSVRTCFPQQRKIMLNMFLDTMMADPPPQCLVWLPLMHRLAHVENVFHPVECSYCRCESMMGFRYRCQQCHNYQLCQNCFWRGHAGGPHSNQHQMKEHSSWAGHDGSHL

SEQ ID NO: 11720 - protein, 96 aa, Artificial Sequence
  Synthetic polypeptide
MLNMFLDTMMADPPPQCLVWLPLMHRLAHVENVFHPVECSYCRCESMMGFRYRCQQCHNYQLCQNCFWRGHAGGPHSNQHQMKEHSSWAGHDGSHL

SEQ ID NO: 11721 - protein, 28 aa, Artificial Sequence
  Synthetic polypeptide
MIEESGNKRKTMAEKRQLFIEMRMALTS

SEQ ID NO: 11722 - protein, 1703 aa, Artificial Sequence
  Synthetic polypeptide
MALLIHLKTVSELRGRGDRIAKVTFRGQSFYSRVLENCEDVADFDETFRWPVASSIDRNEMLEIQVFNYSKVFSNKLIGTFRMVLQKVVEESHVEVTDTLIDDNNAIIKTSLCVEVRYQATDGTVGSWDDGDFLGDESLQEEEKDSQETDGLLPGSRPSSRPPGEKSFRRAGRSVFSAMKLGKNRSHKEEPQRPDEPAVLEMEDLDHLAIRLGDGLDPDSVSLASVTALTTNVSNKRSKPDIKMEPSAGRPMDYQVSITVIEARQLVGLNMDPVVCVEVGDDKKYTSMKESTNCPYYNEYFVFDFHVSPDVMFDKIIKISVIHSKNLLRSGTLVGSFKMDVGTVYSQPEHQFHHKWAILSDPDDISSGLKGYVKCDVAVVGKGDNIKTPHKANETDEDDIEGNLLLPEGVPPERQWARFYVKIYRAEGLPRMNTSLMANVKKAFIGENKDLVDPYVQVFFAGQKGKTSVQKSSYEPLWNEQVVFTDLFPPLCKRMKVQIRDSDKVNDVAIGTHFIDLRKISNDGDKGFLPTLGPAWVNMYGSTRNYTLLDEHQDLNEGLGEGVSFRARLLLGLAVEIVDTSNPELTSSTEVQVEQATPISESCAGKMEEFFLFGAFLEASMIDRRNGDKPITFEVTIGNYGNEVDGLSRPQRPRPRKEPGDEEEVDLIQNASDDEAGDAGDLASVSSTPPMRPQVTDRNYFHLPYLERKPCIYIKSWWPDQRRRLYNANIMDHIADKLEEGLNDIQEMIKTEKSYPERRLRGVLEELSCGCCRFLSLADKDQGHSSRTRLDRERLKSCMRELENMGQQARMLRAQVKRHTVRDKLRLCQNFLQKLRFLADEPQHSIPDIFIWMMSNNKRVAYARVPSKDLLFSIVEEETGKDCAKVKTLFLKLPGKRGFGSAGWTVQAKVELYLWLGLSKQRKEFLCGLPCGFQEVKAAQGLGLHAFPPVSLVYTKKQAFQLRAHMYQARSLFAADSSGLSDPFARVFFINQSQCTEVLNETLCPTWDQMLVFDNLELYGEAHELRDDPPIIVIEIYDQDSMGKADFMGRTFAKPLVKMADEAYCPPRFPPQLEYYQIYRGNATAGDLLAAFELLQIGPAGKADLPPINGPVDVDRGPIMPVPMGIRPVLSKYRVEVLFWGLRDLKRVNLAQVDRPRVDIECAGKGVQSSLIHNYKKNPNFNTLVKWFEVDLPENELLHPPLNIRVVDCRAFGRYTLVGSHAVSSLRRFIYRPPDRSAPSWNTTVRLLRRCRVLCNGGSSSHSTGEVVVTMEPEVPIKKLETMVKLDATSEAVVKVDVAEEEKEKKKKKKGTAEEPEEEEPDESMLDWWSKYFASIDTMKEQLRQQEPSGIDLEEKEEVDNTEGLKGSMKGKEKARAAKEEKKKKTQSSGSGQGSEAPEKKKPKIDELKVYPKELESEFDNFEDWLHTFNLLRGKTGDDEDGSTEEERIVGRFKGSLCVYKVPLPEDVSREAGYDSTYGMFQGIPSNDPINVLVRVYVVRATDLHPADINGKADPYIAIRLGKTDIRDKENYISKQLNPVFGKSFDIEASFPMESMLTVAVYDWDLVGTDDLIGETKIDLENRFYSKHRATCGIAQTYSTHGYNIWRDPMKPSQILTRLCKDGKVDGPHFGPPGRVKVANRVFTGPSEIEDENGQRKPTDEHVALLALRHWEDIPRAGCRLVPEHVETRPLLNPDKPGIEQKL

SEQ ID NO: 11723 - protein, 936 aa, Artificial Sequence
  Synthetic polypeptide
MIKTEKSYPERRLRGVLEELSCGCCRFLSLADKDQGHSSRTRLDRERLKSCMRELENMGQQARMLRAQVKRHTVRDKLRLCQNFLQKLRFLADEPQHSIPDIFIWMMSNNKRVAYARVPSKDLLFSIVEEETGKDCAKVKTLFLKLPGKRGFGSAGWTVQAKVELYLWLGLSKQRKEFLCGLPCGFQEVKAAQGLGLHAFPPVSLVYTKKQAFQLRAHMYQARSLFAADSSGLSDPFARVFFINQSQCTEVLNETLCPTWDQMLVFDNLELYGEAHELRDDPPIIVIEIYDQDSMGKADFMGRTFAKPLVKMADEAYCPPRFPPQLEYYQIYRGNATAGDLLAAFELLQIGPAGKADLPPINGPVDVDRGPIMPVPMGIRPVLSKYRVEVLFWGLRDLKRVNLAQVDRPRVDIECAGKGVQSSLIHNYKKNPNFNTLVKWFEVDLPENELLHPPLNIRVVDCRAFGRYTLVGSHAVSSLRRFIYRPPDRSAPSWNTTGEVVVTMEPEVPIKKLETMVKLDATSEAVVKVDVAEEEKEKKKKKKGTAEEPEEEEPDESMLDWWSKYFASIDTMKEQLRQQEPSGIDLEEKEEVDNTEGLKGSMKGKEKARAAKEEKKKKTQSSGSGQGSEAPEKKKPKIDELKVYPKELESEFDNFEDWLHTFNLLRGKTGDDEDGSTEEERIVGRFKGSLCVYKVPLPEDVSREAGYDSTYGMFQGIPSNDPINVLVRVYVVRATDLHPADINGKADPYIAIRLGKTDIRDKENYISKQLNPVFGKSFDIEASFPMESMLTVAVYDWDLVGTDDLIGETKIDLENRFYSKHRATCGIAQTYSTHGYNIWRDPMKPSQILTRLCKDGKVDGPHFGPPGRVKVANRVFTGPSEIEDENGQRKPTDEHVALLALRHWEDIPRAGCRLVPEHVETRPLLNPDKPGIEQKL

SEQ ID NO: 11724 - protein, 1013 aa, Artificial Sequence
  Synthetic polypeptide
MMTDTQDGPSESSQIMRSLTPLINREEAFGEAGEAGLWPSITHTPDSQEEGLNDIQEMIKTEKSYPERRLRGVLEELSCGCCRFLSLADKDQGHSSRTRLDRERLKSCMRELENMGQQARMLRAQVKRHTVRDKLRLCQNFLQKLRFLADEPQHSIPDIFIWMMSNNKRVAYARVPSKDLLFSIVEEETGKDCAKVKTLFLKLPGKRGFGSAGWTVQAKVELYLWLGLSKQRKEFLCGLPCGFQEVKAAQGLGLHAFPPVSLVYTKKQAFQLRAHMYQARSLFAADSSGLSDPFARVFFINQSQCTEVLNETLCPTWDQMLVFDNLELYGEAHELRDDPPIIVIEIYDQDSMGKADFMGRTFAKPLVKMADEAYCPPRFPPQLEYYQIYRGNATAGDLLAAFELLQIGPAGKADLPPINGPVDVDRGPIMPVPMGIRPVLSKYRVEVLFWGLRDLKRVNLAQVDRPRVDIECAGKGVQSSLIHNYKKNPNFNTLVKWFEVDLPENELLHPPLNIRVVDCRAFGRYTLVGSHAVSSLRRFIYRPPDRSAPSWNTTVRLLRRCRVLCNGGSSSHSTGEVVVTMEPEVPIKKLETMVKLDATSEAVVKVDVAEEEKEKKKKKKGTAEEPEEEEPDESMLDWWSKYFASIDTMKEQLRQQEPSGIDLEEKEEVDNTEGLKGSMKGKEKARAAKEEKKKKTQSSGSGQGSEAPEKKKPKIDELKVYPKELESEFDNFEDWLHTFNLLRGKTGDDEDGSTEEERIVGRFKGSLCVYKVPLPEDVSREAGYDSTYGMFQGIPSNDPINVLVRVYVVRATDLHPADINGKADPYIAIRLGKTDIRDKENYISKQLNPVFGKSFDIEASFPMESMLTVAVYDWDLVGTDDLIGETKIDLENRFYSKHRATCGIAQTYSTHGYNIWRDPMKPSQILTRLCKDGKVDGPHFGPPGRVKVANRVFTGPSEIEDENGQRKPTDEHVALLALRHWEDIPRAGCRLVPEHVETRPLLNPDKPGIEQKL

SEQ ID NO: 11725 - protein, 1061 aa, Artificial Sequence
  Synthetic polypeptide
MGAIGLLWLLPLLLSTAAVGSGMGTGQRAGSPAAGPPLQPREPLSYSRLQRKSLAVDFVVPSLFRVYARDLLLPPSSSELKAGRPEARGSLALDCAPLLRLLGPAPGVSWTAGSPAPAEARTLSRVLKGGSVRKLRRAKQLVLELGEEAILEGCVGPPGEAAVGLLQFNLSELFSWWIRQGEGRLRIRLMPEKKASEVGREGRLSAAIRASQPRLLFQIFGTGHSSLESPTNMPSPSPDYFTWNLTWIMKDSFPFLSHRSRYGLECSFDFPCELEYSPPLHDLRNQSWSWRRIPSEEASQMDLLDGPGAERSKEMPRGSFLLLNTSADSKHTILSPWMRSSSEHCTLAVSVHRHLQPSGRYIAQLLPHNEAAREILLMPTPGKHGWTVLQGRIGRPDNPFRVALEYISSGNRSLSAVDFFALKNCSEGTSPGSKMALQSSFTCWNGTVLQLGQACDFHQDCAQGEDESQMCRKLPVGFYCNFEDGFCGWTQGTLSPHTPQWQVRTLKDARFQDHQDHALLLSTTDVPASESATVTSATFPAPIKSSPCELRMSWLIRGVLRGNVSLVLVENKTGKEQGRMVWHVAAYEGLSLWQWMVLPLLDVSDRFWLQMVAWWGQGSRAIVAFDNISISLDCYLTISGEDKILQNTAPKSRNLFERNPNKELKPGENSPRQTPIFDPTVHWLFTTCGASGPHGPTQAQCNNAYQNSNLSVEVGSEGPLKGIQIWKVPATDTYSISGYGAAGGKGGKNTMMRSHGVSVLGIFNLEKDDMLYILVGQQGEDACPSTNQLIQKVCIGENNVIEEEIRVNRSVHEWAGGGGGGGGATYVFKMKDGVPVPLIIAAGGGGRAYGAKTDTFHPERLENNSSVLGLNGNSGAAGGGGGWNDNTSLLWAGKSLQEGATGGHSCPQAMKKWGWETRGGFGGGGGGCSSGGGGGGYIGGNAASNNDPEMDGEDGVSFISPLGILYTPALKVMEGHGEVNIKHYLNCSHCEVDECHMDPESHKVICFCDHGTVLAEDGVSCIVSPTPEPHLPLSLILSVVTSALVAALVLAFSGIMIVLQL

SEQ ID NO: 11726 - protein, 743 aa, Artificial Sequence
  Synthetic polypeptide
MGAIGLLWLLPLLLSTAAVGSGMGTGQRAGSPAAGPPLQPREPLSYSRLQRKSLAVDFVVPSLFRVYARDLLLPPSSSELKAGRPEARGSLALDCAPLLRLLGPAPGVSWTAGSPAPAEARTLSRVLKGGSVRKLRRAKQLVLELGEEAILEGCVGPPGEAAVGLLQFNLSELFSWWIRQGEGRLRIRLMPEKKASEVGREGRLSAAIRASQPRLLFQIFGTGHSSLESPTNMPSPSPDYFTWNLTWIMKDSFPFLSHRSRYGLECSFDFPCELEYSPPLHDLRNQSWSWRRIPSEEASQMDLLDGPGAERSKEMPRGSFLLLNTSADSKHTILSPWMRSSSEHCTLAVSVHRHLQPSGRYIAQLLPHNEAAREILLMPTPGKHGWTVLQGRIGRPDNPFRVALEYISSGNRSLSAVDFFALKNCSEGTSPGSKMALQSSFTCWNGTVLQLGQACDFHQDCAQGEDESQMCRKLPVGFYCNFEDGFCGWTQGTLSPHTPQWQVRTLKDARFQDHQDHALLLSTTDVPASESATVTSATFPAPIKSSPCELRMSWLIRGVLRGNVSLVLVENKTGKEQGRMVWHVAAYEGLSLWQWMVLPLLDVSDRFWLQMVAWWGQGSRAIVAFDNISISLDCYLTISGEDKILQNTAPKSRNLFERNPNKELKPGENSPRQTPIFDPTVHWLFTTCGASGPHGPTQAQCNNAYQNSNLSVEVGSEGPLKGIQIWKVPATDTYRLHLQSEGL

SEQ ID NO: 11727 - protein, 190 aa, Artificial Sequence
  Synthetic polypeptide
MFSWLGTDDRRRKDPEVFQTVSEGLKKLYKSKLLPLEEHYRFHEFHSPALEDADFDNKPMVLLVGQYSTGKTTFIRYLLEQDFPGMRIGPEPTTDSFIAVMQGDMEGIIPGNALVVDPKKPFRKLNAFGNAFLNRFVCAQLPNPVLESISVIDTPGILSGEKQRISRDSLSCKMCMPYLPPGIQRIMKSE

SEQ ID NO: 11728 - protein, 459 aa, Artificial Sequence
  Synthetic polypeptide
MYLVAGDRGLAGCGHLLVSLLGLLLLLARSGTRALVCLPCDESKCEEPRNCPGSIVQGVCGCCYTCASQRNESCGGTFGIYGTCDRGLRCVIRPPLNGDSLTEYEAGVCEDENWTDDQLLGFKPCNENLIAGCNIINGKCECNTIRTCSNPFEFPSQDMCLSALKRIEEEKPDCSKARCEVQFSPRCPEDSVLIEGYAPPGECCPLPSRCVCNPAGCLRKVCQPGNLNILVSKASGKPGECCDLYECKPVFGVDCRTVECPPVQQTACPPDSYETQVRLTADGCCTLPTRCECLSGLCGFPVCEVGSTPRIVSRGDGTPGKCCDVFECVNDTKPACVFNNVEYYDGDMFRMDNCRFCRCQGGVAICFTAQCGEINCERYYVPEGECCPVCEDPVYPFNNPAGCYANGLILAHGDRWREDDCTFCQCVNGERHCVATVCGQTCTNPVKVPGECCPVCEAL

SEQ ID NO: 11729 - protein, 480 aa, Artificial Sequence
  Synthetic polypeptide
MYLVAGDRGLAGCGHLLVSLLGLLLLLARSGTRALVCLPCDESKCEEPRNCPGSIVQGVCGCCYTCASQRNESCGGTFGIYGTCDRGLRCVIRPPLNGDSLTEYEAGVCEDENWTDDQLLGFKPCNENLIAGCNIINGKCECNTIRTCSNPFEFPSQDMCLSALKRIEEEKPDCSKARCEVQFSPRCPEDSVLIEGYAPPGECCPLPSRCVCNPAGCLRKVCQPGNLNILVSKASGKPGECCDLYECKPVFGVDCRTVECPPVQQTACPPDSYETQVRLTADGCCTLPTRCECLSGLCGFPVCEVGSTPRIVSRGDGTPGKCCDVFECVNDTKPACVFNNVEYYDGDMFRMDNCRFCRCQGGVAICFTAQCGEINCERYYVPEGECCPVCEDPVYPFNNPAGCYANGLILAHGDRWREDDCTFCQCVNGERHCVATVCGQTCTNPVKVPGECCPVCEEAESVTGVRLPGFESWVHHKLML

SEQ ID NO: 11730 - protein, 479 aa, Artificial Sequence
  Synthetic polypeptide
MYLVAGDRGLAGCGHLLVSLLGLLLLLARSGTRALVCLPCDESKCEEPRNCPGSIVQGVCGCCYTCASQRNESCGGTFGIYGTCDRGLRCVIRPPLNGDSLTEYEAGVCEDENWTDDQLLGFKPCNENLIAGCNIINGKCECNTIRTCSNPFEFPSQDMCLSALKRIEEEKPDCSKARCEVQFSPRCPEDSVLIEGYAPPGECCPLPSRCVCNPAGCLRKVCQPGNLNILVSKASGKPGECCDLYECKPVFGVDCRTVECPPVQQTACPPDSYETQVRLTADGCCTLPTRCECLSGLCGFPVCEVGSTPRIVSRGDGTPGKCCDVFECVNDTKPACVFNNVEYYDGDMFRMDNCRFCRCQGGVAICFTAQCGEINCERYYVPEGECCPVCEDPVYPFNNPAGCYANGLILAHGDRWREDDCTFCQCVNGERHCVATVCGQTCTNPVKVPGECCPVCEEAESVTGVRLPGFESWVHHKLC

SEQ ID NO: 11731 - protein, 636 aa, Artificial Sequence
  Synthetic polypeptide
MSANNSPPSAQKSVLPTAIPAVLPAASPCSSPKTGLSARLSNGSFSAPSLTNSRGSVHTVSFLLQIGLTRESVTIEAQELSLSAVKDLVCSIVYQKFPECGFFGMYDKILLFRHDMNSENILQLITSADEIHEGDLVEVVLSALATVEDFQIRPHTLYVHSYKAPTFCDYCGEMLWGLVRQGLKCEGCGLNYHKRCAFKIPNNCSGVRKRRLSNVSLPGPGLSVPRPLQPEYVALPSEESHVHQEPSKRIPSWSGRPIWMEKMVMCRVKVPHTFAVHSYTRPTICQYCKRLLKGLFRQGMQCKDCKFNCHKRCASKVPRDCLGEVTFNGEPSSLGTDTDIPMDIDNNDINSDSSRGLDDTEEPSPPEDKMFFLDPSDLDVERDEEAVKTISPSTSNNIPLMRVVQSIKHTKRKSSTMVKEGWMVHYTSRDNLRKRHYWRLDSKCLTLFQNESGSKYYKEIPLSEILRISSPRDFTNISQGSNPHCFEIITDTMVYFVGENNGDSSHNPVLAATGVGLDVAQSWEKAIRQALMPVTPQASVCTSPGQGKDHKDLSTSISVSNCQIQENVDISTVYQIFADEVLGSGQFGIVYGGKHRKTGRDVAIKVIDKMRFPTKQESQLRNEVAILQKKLYNLKY

SEQ ID NO: 11732 - protein, 171 aa, Artificial Sequence
  Synthetic polypeptide
TDTMVYFVGENNGDSSHNPVLAATGVGLDVAQSWEKAIRQALMPVTPQASVCTSPGQGKDHKDLSTSISVSNCQIQENVDISTVYQIFADEVLGSGQFGIVYGDLSVLRVVTSLEDFLSSEEQRTVRGKHRKTGRDVAIKVIDKMRFPTKQESQLRNEVAILQKKLYNLKY

SEQ ID NO: 11733 - protein, 83 aa, Artificial Sequence
  Synthetic polypeptide
  misc_feature (1)..(1): Xaa can be any naturally occurring amino acid
XTSISVSNCQIQENVDISTVYQIFADEVLGSGQFGIVYGGKHRKTGRDVAIKVIDKMRFPTKQESQLRNEVAILQKKLYNLKY

SEQ ID NO: 11734 - protein, 642 aa, Artificial Sequence
  Synthetic polypeptide
MSANNSPPSAQKSVLPTAIPAVLPAASPCSSPKTGLSARLSNGSFSAPSLTNSRGSVHTVSFLLQIGLTRESVTIEAQELSLSAVKDLVCSIVYQKFPECGFFGMYDKILLFRHDMNSENILQLITSADEIHEGDLVEVVLSALATVEDFQIRPHTLYVHSYKAPTFCDYCGEMLWGLVRQGLKCEGCGLNYHKRCAFKIPNNCSGVRKRRLSNVSLPGPGLSVPRPLQPEYVALPSEESHVHQEPSKRIPSWSGRPIWMEKMVMCRVKVPHTFAVHSYTRPTICQYCKRLLKGLFRQGMQCKDCKFNCHKRCASKVPRDCLGEVTFNGEPSSLGTDTDIPMDIDNNDINSDSSRGLDDTEEPSPPEDKMFFLDPSDLDVERDEEAVKTISPSTSNNIPLMRVVQSIKHTKRKSSTMVKEGWMVHYTSRDNLRKRHYWRLDSKCLTLFQNESGSKYYKEIPLSEILRISSPRDFTNISQGSNPHCFEIITDTMVYFVGENNGDSSHNPVLAATGVGLDVAQSWEKAIRQALMPVTPQASVCTSPGQGKDHKDLSTSISVSNCQIQENVDISTVYQIFADEVLGSGQFGIVYGGKHRKTGRDVAIKVIDKMRFPTKQESQLRNEVAILQPGQQEGNSVSTTTK

SEQ ID NO: 11735 - protein, 177 aa, Artificial Sequence
  Synthetic polypeptide
TDTMVYFVGENNGDSSHNPVLAATGVGLDVAQSWEKAIRQALMPVTPQASVCTSPGQGKDHKDLSTSISVSNCQIQENVDISTVYQIFADEVLGSGQFGIVYGDLSVLRVVTSLEDFLSSEEQRTVRGKHRKTGRDVAIKVIDKMRFPTKQESQLRNEVAILQPGQQEGNSVSTTTK

SEQ ID NO: 11736 - protein, 89 aa, Artificial Sequence
  Synthetic polypeptide
  misc_feature (1)..(1): Xaa can be any naturally occurring amino acid
XTSISVSNCQIQENVDISTVYQIFADEVLGSGQFGIVYGGKHRKTGRDVAIKVIDKMRFPTKQESQLRNEVAILQPGQQEGNSVSTTTK

SEQ ID NO: 11737 - protein, 128 aa, Artificial Sequence
  Synthetic polypeptide
MSANNSPPSAQKSVLPTAIPAVLPAASPCSSPKTGLSARLSNGSFSAPSLTNSRGSVHTVSFLLQIGLTRESVTIEAQELSLSAVKDLVCSIVYQKIVSSWKIRTILSLQTVGPVSCTYRTCKKYAFL

SEQ ID NO: 11738 - protein, 235 aa, Artificial Sequence [sequence omitted]

SEQ ID NO: 11739 - protein, 246 aa, Artificial Sequence
  Synthetic polypeptide
MTFGRSGAASVVLNVGGARYSLSRELLKDFPLRRVSRLHGCRSERDVLEVCDDYDRERNEYFFDRHSEAFGFILLYVRGHGKLRFAPRMCELSFYNEMIYWGLEGAHLEYCCQRRLDDRMSDTYTFYSADEPGVLGRDEARPGGAEAAPSRRWLERMRRTFEEPTSSLAAQILASVSVVFVIVSMVVLCASTLPDWRNAAADNRSLDDRSRYSAGPGREPSGIIEAICIGWFTAECIVRFIVSKNK

SEQ ID NO: 11740 - protein, 276 aa, Artificial Sequence
  Synthetic polypeptide
MTFGRSGAASVVLNVGGARYSLSRELLKDFPLRRVSRLHGCRSERDVLEVCDDYDRERNEYFFDRHSEAFGFILLYVRGHGKLRFAPRMCELSFYNEMIYWGLEGAHLEYCCQRRLDDRMSDTYTFYSADEPGVLGRDEARPGGAEAAPSRRWLERMRRTFEEPTSSLAAQILASVSVVFVIVSMVVLCASTLPDWRNAAADNRSLDDRSRIIEAICIGWFTAECIVRFIVSKNKWHFSLLLPCEEGHVCFPFCIIVSFLRPPSCGTVSQLSLFPL

SEQ ID NO: 11741 - protein, 287 aa, Artificial Sequence
  Synthetic polypeptide
MTFGRSGAASVVLNVGGARYSLSRELLKDFPLRRVSRLHGCRSERDVLEVCDDYDRERNEYFFDRHSEAFGFILLYVRGHGKLRFAPRMCELSFYNEMIYWGLEGAHLEYCCQRRLDDRMSDTYTFYSADEPGVLGRDEARPGGAEAAPSRRWLERMRRTFEEPTSSLAAQILASVSVVFVIVSMVVLCASTLPDWRNAAADNRSLDDRSRYSAGPGREPSGIIEAICIGWFTAECIVRFIVSKNKWHFSLLLPCEEGHVCFPFCIIVSFLRPPSCGTVSQLSLFPL

SEQ ID NO: 11742 - protein, 169 aa, Artificial Sequence
  Synthetic polypeptide
MVVFNGLLKIKICEAVSLKPTAWSLRHAVGPRPQTFLLDPYIALNVDDSRIGQTATKQKTNSPAWHDEFVTDVCNGRKIELAVFHDAPIGYDDFVANCTIQFEELLQNGSRHFEDWIDLEPEGRVYVIIDLSGSSGEECKLPRTRILSKLFIIVSPASWNSAWHTVPAQ

SEQ ID NO: 11743 - protein, 602 aa, Artificial Sequence
  Synthetic polypeptide
MVVFNGLLKIKICEAVSLKPTAWSLRHAVGPRPQTFLLDPYIALNVDDSRIGQTATKQKTNSPAWHDEFVTDVCNGRKIELAVFHDAPIGYDDFVANCTIQFEELLQNGSRHFEDWIDLEPEGRVYVIIDLSGSSGEAPKDNEERVFRERMRPRKRQGAVRRRVHQVNGHKFMATYLRQPTYCSHCRDFIWGVIGKQGYQCQVCTCVVHKRCHELIITKCAGLKKQETPDQVGSQRFSVNMPHKFGIHNYKVPTFCDHCGSLLWGLLRQGLQCKVCKMNVHRRCETNVAPNCGVDARGIAKVLADLGVTPDKITNSGQRRKKLIAGAESPQPASGSSPSEEDRSKSAPTSPCDQEIKELENNIRKALSFDNRGEEHRAASSPDGQLMSPGENGEVRQGQAKRLGLDEFNFIKVLGKGSFGKVMLAELKGKDEVYAVKVLKKDVILQDDDVDCTMTEKRILALARKHPYLTQLYCCFQTKDRLFFVMEYVNGGDLMFQIQRSRKFDEPRSRFYAAEVTSALMFLHQHGVIYRDIGGAGSRYPQQTNTGTEKQTLHVLTYKWELNDENTWTHGGELHTLGSVGDGVGRVGRGRASERIANGCWA

SEQ ID NO: 11744 - protein, 168 aa, Artificial Sequence
  Synthetic polypeptide
MAHGPGALMLKCVVVGDGAVGKTCLLMSYANDAFPEEYVPTVFDHYAVSVTVGGKQYLLGLYDTAGQEDYDRLRPLSYPMTDVFLICFSVVNPASFQNVKEEWVPELKEYAPNVPFLLIGTQIDLRDDPKTLARLNDMKEKPICVEQGQKLAKEVSAQIPHPQCDLVP

SEQ ID NO: 11745 - protein, 89 aa, Artificial Sequence
  Synthetic polypeptide
MTDVFLICFSVVNPASFQNVKEEWVPELKEYAPNVPFLLIGTQIDLRDDPKTLARLNDMKEKPICVEQGQKLAKEVSAQIPHPQCDLVP

SEQ ID NO: 11746 - protein, 190 aa, Artificial Sequence
  Synthetic polypeptide
MAHGPGALMLKCVVVGDGAVGKTCLLMSYANDAFPEEYVPTVFDHYAVSVTVGGKQYLLGLYDTAGQEDYDRLRPLSYPMTDVFLICFSVVNPASFQNVKEEWVPELKEYAPNVPFLLIGTQIDLRDDPKTLARLNDMKEKPICVEQGQKLAKEHLQPSALYSLPCASYPADVSTCGRHTAGTLLFRSVH

SEQ ID NO: 11747 - protein, 111 aa, Artificial Sequence
  Synthetic polypeptide
MTDVFLICFSVVNPASFQNVKEEWVPELKEYAPNVPFLLIGTQIDLRDDPKTLARLNDMKEKPICVEQGQKLAKEHLQPSALYSLPCASYPADVSTCGRHTAGTLLFRSVH

SEQ ID NO: 11748 - protein, 194 aa, Artificial Sequence
  Synthetic polypeptide
MAHGPGALMLKCVVVGDGAVGKTCLLMSYANDAFPEEYVPTVFDHYAVSVTVGGKQYLLGLYDTAGQEDYDRLRPLSYPMTDVFLICFSVVNPASFQNVKEEWVPELKEYAPNVPFLLIGTQIDLRDDPKTLARLNDMKEKPICVEQGQKLAKEQMSAHVDATQQGLCSFVQFTDISPGPKQCLTYSRYPVNMW

SEQ ID NO: 11749 - protein, 115 aa, Artificial Sequence
  Synthetic polypeptide
MTDVFLICFSVVNPASFQNVKEEWVPELKEYAPNVPFLLIGTQIDLRDDPKTLARLNDMKEKPICVEQGQKLAKEQMSAHVDATQQGLCSFVQFTDISPGPKQCLTYSRYPVNMW

SEQ ID NO: 11750 - protein, 193 aa, Artificial Sequence
  Synthetic polypeptide
MAHGPGALMLKCVVVGDGAVGKTCLLMSYANDAFPEEYVPTVFDHYAVSVTVGGKQYLLGLYDTAGQEDYDRLRPLSYPMTDVFLICFSVVNPASFQNVKEEWVPELKEYAPNVPFLLIGTQIDLRDDPKTLARLNDMKEKPICVEQGQKLAKEMSAHVDATQQGLCSFVQFTDISPGPKQCLTYSRYPVNMW

SEQ ID NO: 11751 - protein, 114 aa, Artificial Sequence
  Synthetic polypeptide
MTDVFLICFSVVNPASFQNVKEEWVPELKEYAPNVPFLLIGTQIDLRDDPKTLARLNDMKEKPICVEQGQKLAKEMSAHVDATQQGLCSFVQFTDISPGPKQCLTYSRYPVNMW

SEQ ID NO: 11752 - protein, 116 aa, Artificial Sequence
  Synthetic polypeptide
MAAKGAHGSYLKVESELERCRAEGHWDRMPELVRQLQTLSMPGGGGNRRGSPSAAFTFPDTDDFGKLLLAEALLEQCLKENHAKIKDSMPLLEKNEPKMSEAKNYLSSILNHGRLS

SEQ ID NO: 11753 - protein, 82 aa, Artificial Sequence
  Synthetic polypeptide
MVPSSSRTPGFKQSSHHLRLPKCWDYRDDFGKLLLAEALLEQCLKENHAKIKDSMPLLEKNEPKMSEAKNYLSSILNHGRLS

SEQ ID NO: 11754 - protein, 116 aa, Artificial Sequence
  Synthetic polypeptide
  misc_feature (1)..(1): Xaa can be any naturally occurring amino acid
XAAKGAHGSYLKVESELERCRAEGHWDRMPELVRQLQTLSMPGGGGNRRGSPSAAFTFPDTDDFGKLLLAEALLEQCLKENHAKIKDSMPLLEKNEPKMSEAKNYLSSILNHGRLS

SEQ ID NO: 11755 - protein, 36 aa, Artificial Sequence
  Synthetic polypeptide
  misc_feature (1)..(1): Xaa can be any naturally occurring amino acid
XHAKIKDSMPLLEKNEPKMSEAKNYLSSILNHGRLS

SEQ ID NO: 11756 - protein, 269 aa, Artificial Sequence
  Synthetic polypeptide
MAAKGAHGSYLKVESELERCRAEGHWDRMPELVRQLQTLSMPGGGGNRRGSPSAAFTFPDTDDFGKLLLAEALLEQCLKENHAKIKDSMPLLEKNEPKMSEAKNYLSSILNHGRLSPQYMCEAMLILGKLHYVEGSYRDAISMYARAGIDDMSMENKPLYQMRLLSEAFVIKGLSLERLPNSIASRFRLTEREEEVITCFERASWIAQVFLQELEKTTNNSTSRHLKGCHPLDYELTYFLEAALQSAYVKNLKKGFGKLRQEDCWSPQV

SEQ ID NO: 11757 - protein, 235 aa, Artificial Sequence
  Synthetic polypeptide
MVPSSSRTPGFKQSSHHLRLPKCWDYRDDFGKLLLAEALLEQCLKENHAKIKDSMPLLEKNEPKMSEAKNYLSSILNHGRLSPQYMCEAMLILGKLHYVEGSYRDAISMYARAGIDDMSMENKPLYQMRLLSEAFVIKGLSLERLPNSIASRFRLTEREEEVITCFERASWIAQVFLQELEKTTNNSTSRHLKGCHPLDYELTYFLEAALQSAYVKNLKKGFGKLRQEDCWSPQV

SEQ ID NO: 11758 - protein, 269 aa, Artificial Sequence
  Synthetic polypeptide
  misc_feature (1)..(1): Xaa can be any naturally occurring amino acid
XAAKGAHGSYLKVESELERCRAEGHWDRMPELVRQLQTLSMPGGGGNRRGSPSAAFTFPDTDDFGKLLLAEALLEQCLKENHAKIKDSMPLLEKNEPKMSEAKNYLSSILNHGRLSPQYMCEAMLILGKLHYVEGSYRDAISMYARAGIDDMSMENKPLYQMRLLSEAFVIKGLSLERLPNSIASRFRLTEREEEVITCFERASWIAQVFLQELEKTTNNSTSRHLKGCHPLDYELTYFLEAALQSAYVKNLKKGFGKLRQEDCWSPQV

SEQ ID NO: 11759 - protein, 700 aa, Artificial Sequence
  Synthetic polypeptide
MAAKGAHGSYLKVESELERCRAEGHWDRMPELVRQLQTLSMPGGGGNRRGSPSAAFTFPDTDDFGKLLLAEALLEQCLKENHAKIKDSMPLLEKNEPKMSEAKNYLSSILNHGRLSPQYMCEAMLILGKLHYVEGSYRDAISMYARAGIDDMSMENKPLYQMRLLSEAFVIKGLSLERLPNSIASRFRLTEREEEVITCFERASWIAQVFLQELEKTTNNSTSRHLKGCHPLDYELTYFLEAALQSAYVKNLKKGNIVKGMRELREVLRTVETKATQNFKVMAAKHLAGVLLHSLSEECYWSPLSHPLPEFMGKEESSFATQALRKPHLYEGDNLYCPKDNIEEALLLLLISESMATRDVVLSRVPEQEEDRTVSLQNAAAIYDLLSITLGRRGQYVMLSECLERAMKFAFGEFHLWYQVALSMVACGKSAYAVSLLRECVKLRPSDPTVPLMAAKVCIGSLRWLEEAEHFAMMVISLGEEAGEFLPKGYLALGLTYSLQATDATLKSKQDELHRKALQTLERAQQLAPSDPQVILYVSLQLALVRQISSAMEQLQEALKVRKDDAHALHLLALLFSAQKHHQHALDVVNMAITEHPENFNLMFTKVKLEQVLKGPEEALVTCRQVLRLWQTLYSFSQLGDFRSPEGFQTPQRNICNSEIYRGGGLEKDGSFGEGLTMKKQSGMHLTLPDAHDADSAYMS

SEQ ID NO: 11760 - protein, 676 aa, Artificial Sequence
  Synthetic polypeptide
MAAKGAHGSYLKVESELERCRAEGHWDRMPELVRQLQTLSMPGGGGNRRGSPSAAFTFPDTDDFGKLLLAEALLEQCLKENHAKIKDSMPLLEKNEPKMSEAKNYLSSILNHGRLSPQYMCEAMLILGKLHYVEGSYRDAISMYARAGIDDMSMENKPLYQMRLLSEAFVIKGLSLERLPNSIASRFRLTEREEEVITCFERASWIAQVFLQELEKTTNNSTSRHLKGCHPLDYELTYFLEAALQSAYVKNLKKGNIVKGMRELREVLRTVETKATQNFKVMAAKHLAGVLLHSLSEECYWSPLSHPLPEFMGKEESSFATQALRKPHLYEGDNLYCPKDNIEEALLLLLISESMATRDVVLSRVPEQEEDRTVSLQNAAAIYDLLSITLGRRGQYVMLSECLERAMKFAFGEFHLWYQVALSMVACGKSAYAVSLLRECVKLRPSDPTVPLMAAKVCIGSLRWLEEAEHFAMMVISLGEEAGEFLPKGYLALGLTYSLQATDATLKSKQDELHRKALQTLERAQQLAPSDPQVILYVSLQLALVRQISSAMEQLQEALKVRKDDAHALHLLALLFSAQKHHQHALDVVNMAITEHPENFNLMFTKVKLEQVLKGPEEALVTCRQVLRLWQTLYSFSQLGGLEKDGSFGEGLTMKKQSGMHLTLPDAHDADSAYMS

SEQ ID NO: 11761 - protein, 322 aa, Artificial Sequence
  Synthetic polypeptide
MATRDVVLSRVPEQEEDRTVSLQNAAAIYDLLSITLGRRGQYVMLSECLERAMKFAFGEFHLWYQVALSMVACGKSAYAVSLLRECVKLRPSDPTVPLMAAKVCIGSLRWLEEAEHFAMMVISLGEEAGEFLPKGYLALGLTYSLQATDATLKSKQDELHRKALQTLERAQQLAPSDPQVILYVSLQLALVRQISSAMEQLQEALKVRKDDAHALHLLALLFSAQKHHQHALDVVNMAITEHPENFNLMFTKVKLEQVLKGPEEALVTCRQVLRLWQTLYSFSQLGGLEKDGSFGEGLTMKKQSGMHLTLPDAHDADSAYMS

SEQ ID NO: 11762 - protein, 642 aa, Artificial Sequence
  Synthetic polypeptide
MVPSSSRTPGFKQSSHHLRLPKCWDYRDDFGKLLLAEALLEQCLKENHAKIKDSMPLLEKNEPKMSEAKNYLSSILNHGRLSPQYMCEAMLILGKLHYVEGSYRDAISMYARAGIDDMSMENKPLYQMRLLSEAFVIKGLSLERLPNSIASRFRLTEREEEVITCFERASWIAQVFLQELEKTTNNSTSRHLKGCHPLDYELTYFLEAALQSAYVKNLKKGNIVKGMRELREVLRTVETKATQNFKVMAAKHLAGVLLHSLSEECYWSPLSHPLPEFMGKEESSFATQALRKPHLYEGDNLYCPKDNIEEALLLLLISESMATRDVVLSRVPEQEEDRTVSLQNAAAIYDLLSITLGRRGQYVMLSECLERAMKFAFGEFHLWYQVALSMVACGKSAYAVSLLRECVKLRPSDPTVPLMAAKVCIGSLRWLEEAEHFAMMVISLGEEAGEFLPKGYLALGLTYSLQATDATLKSKQDELHRKALQTLERAQQLAPSDPQVILYVSLQLALVRQISSAMEQLQEALKVRKDDAHALHLLALLFSAQKHHQHALDVVNMAITEHPENFNLMFTKVKLEQVLKGPEEALVTCRQVLRLWQTLYSFSQLGGLEKDGSFGEGLTMKKQSGMHLTLPDAHDADSAYMS

SEQ ID NO: 11763 - protein, 1393 aa, Artificial Sequence
  Synthetic polypeptide
MELQRTSSISGPLSPAYTGQVPYNYNQLEGRFKQLQDEREAVQKKTFTKWVNSHLARVSCRITDLYTDLRDGRMLIKLLEVLSGERLPKPTKGRMRIHCLENVDKALQFLKEQRVHLENMGSHDIVDGNHRLTLGLIWTIILRFQIQDISVETEDNKEKKSAKDALLLWCQMKTAGYPNVNIHNFTTSWRDGMAFNALIHKHRPDLIDFDKLKKSNAHYNLQNAFNLAEQHLGLTKLLDPEDISVDHPDEKSIITYVVTYYHYFSKMKALAVEGKRIGKVLDNAIETEKMIEKYESLASDLLEWIEQTIIILNNRKFANSLVGVQQQLQAFNTYRTVEKPPKFTEKGNLEVLLFTIQSKMRANNQKVYMPREGKLISDINKAWERLEKAEHERELALRNELIRQEKLEQLARRFDRKAAMRETWLSENQRLVSQDNFGFDLPAVEAATKKHEAIETDIAAYEERVQAVVAVARELEAENYHDIKRITARKDNVIRLWEYLLELLRARRQRLEMNLGLQKIFQEMLYIMDWMDEMKVLVLSQDYGKHLLGVEDLLQKHTLVEADIGIQAERVRGVNASAQKFATDGEGYKPCDPQVIRDRVAHMEFCYQELCQLAAERRARLEESRRLWKFFWEMAEEEGWIREKEKILSSDDYGKDLTSVMRLLSKHRAFEDEMSGRSGHFEQAIKEGEDMIAEEHFGSEKIRERIIYIREQWANLEQLSAIRKKRLEEASLLHQFQADADDIDAWMLDILKIVSSSDVGHDEYSTQSLVKKHKDVAEEIANYRPTLDTLHEQASALPQEHAESPDVRGRLSGIEERYKEVAELTRLRKQALQDTLALYKMFSEADACELWIDEKEQWLNNMQIPEKLEDLEVIQHRFESLEPEMNNQASRVAVVNQIARQLMHSGHPSEKEIKAQQDKLNTRWSQFRELVDRKKDALLSALSIQNYHLECNETKSWIREKTKVIESTQDLGNDLAGVMALQRKLTGMERDLVAIEAKLSDLQKEAEKLESEHPDQAQAILSRLAEISDVWEEMKTTLKNREASLGEASKLQQFLRDLDDFQSWLSRTQTAIASEDMPNTLTEAEKLLTQHENIKNEIDNYEEDYQKMRDMGEMVTQGQTDAQYMFLRQRLQALDTGWNELHKMWENRQNLLSQSHAYQQFLRDTKQAEAFLNNQEYVLAHTEMPTTLEGAEAAIKKQEDFMTTMDANEEKINAVVETGRRLVSDGNINSDRIQEKVDSIDDRHRKNRETASELLMRLKDNRDLQKFLQDCQELSLWINEKMLTAQDMSYDEARNLHSKWLKHQAFMAELASNKEWLDKIEKGTVAHACNPSTLGGQGRWITGGQEFQTSLANMVKPHLYEAYKNSQAWWYVPVIAAIGEAEARAQEAEVAVS

SEQ ID NO: 11764 - protein, 1406 aa, Artificial Sequence
  Synthetic polypeptide
MTTTVATDYDNIEIQQQYSDVNNRWDVDDWDNENSSARLFERSRIKALADEREAVQKKTFTKWVNSHLARVSCRITDLYTDLRDGRMLIKLLEVLSGERLPKPTKGRMRIHCLENVDKALQFLKEQRVHLENMGSHDIVDGNHRLTLGLIWTIILRFQIQDISVETEDNKEKKSAKDALLLWCQMKTAGYPNVNIHNFTTSWRDGMAFNALIHKHRPDLIDFDKLKKSNAHYNLQNAFNLAEQHLGLTKLLDPEDISVDHPDEKSIITYVVTYYHYFSKMKALAVEGKRIGKVLDNAIETEKMIEKYESLASDLLEWIEQTIIILNNRKFANSLVGVQQQLQAFNTYRTVEKPPKFTEKGNLEVLLFTIQSKMRANNQKVYMPREGKLISDINKAWERLEKAEHERELALRNELIRQEKLEQLARRFDRKAAMRETWLSENQRLVSQDNFGFDLPAVEAATKKHEAIETDIAAYEERVQAVVAVARELEAENYHDIKRITARKDNVIRLWEYLLELLRARRQRLEMNLGLQKIFQEMLYIMDWMDEMKVLVLSQDYGKHLLGVEDLLQKHTLVEADIGIQAERVRGVNASAQKFATDGEGYKPCDPQVIRDRVAHMEFCYQELCQLAAERRARLEESRRLWKFFWEMAEEEGWIREKEKILSSDDYGKDLTSVMRLLSKHRAFEDEMSGRSGHFEQAIKEGEDMIAEEHFGSEKIRERIIYIREQWANLEQLSAIRKKRLEEASLLHQFQADADDIDAWMLDILKIVSSSDVGHDEYSTQSLVKKHKDVAEEIANYRPTLDTLHEQASALPQEHAESPDVRGRLSGIEERYKEVAELTRLRKQALQDTLALYKMFSEADACELWIDEKEQWLNNMQIPEKLEDLEVIQHRFESLEPEMNNQASRVAVVNQIARQLMHSGHPSEKEIKAQQDKLNTRWSQFRELVDRKKDALLSALSIQNYHLECNETKSWIREKTKVIESTQDLGNDLAGVMALQRKLTGMERDLVAIEAKLSDLQKEAEKLESEHPDQAQAILSRLAEISDVWEEMKTTLKNREASLGEASKLQQFLRDLDDFQSWLSRTQTAIASEDMPNTLTEAEKLLTQHENIKNEIDNYEEDYQKMRDMGEMVTQGQTDAQYMFLRQRLQALDTGWNELHKMWENRQNLLSQSHAYQQFLRDTKQAEAFLNNQEYVLAHTEMPTTLEGAEAAIKKQEDFMTTMDANEEKINAVVETGRRLVSDGNINSDRIQEKVDSIDDRHRKNRETASELLMRLKDNRDLQKFLQDCQELSLWINEKMLTAQDMSYDEARNLHSKWLKHQAFMAELASNKEWLDKIEKGTVAHACNPSTLGGQGRWITGGQEFQTSLANMVKPHLYEAYKNSQAWWYVPVIAAIGEAEARAQEAEVAVS

SEQ ID NO: 11765 - protein, 90 aa, Artificial Sequence
  Synthetic polypeptide
MENEIFTPLLEQFMTSPLVTWVKTFGPLAAGNGTNLDEYVALVDGVFLNQVMLQMDMDEVGNHHSQQTLARTKNQTPHVLTHRWELNNEN

SEQ ID NO: 11766 - protein, 215 aa, Artificial Sequence
  Synthetic polypeptide
MASVWKRLQRVGKHASKFQFVASYQELMVECTKKWQPDKLVVVWTRRSRRKSSKAHSWQPGIKNPYRGVVVWPVPENIEITVTLFKDPHAEEFEDKEWTFVIENESPSGRRKALATSSINMKQYASPMPTQTDVKLKFKPLSKKVVSAALQFSLSCIFLREGKATDEDMQSLASLMSMKQADIGNLDDFEEDNEDDDENRVNQEEKAAKITELGS

SEQ ID NO: 11767 - protein, 95 aa, Artificial Sequence
  Synthetic polypeptide
MKQYASPMPTQTDVKLKFKPLSKKVVSAALQFSLSCIFLREGKATDEDMQSLASLMSMKQADIGNLDDFEEDNEDDDENRVNQEEKAAKITELGS

SEQ ID NO: 11768 - protein, 918 aa, Artificial Sequence
  Synthetic polypeptide
MASVWKRLQRVGKHASKFQFVASYQELMVECTKKWQPDKLVVVWTRRSRRKSSKAHSWQPGIKNPYRGVVVWPVPENIEITVTLFKDPHAEEFEDKEWTFVIENESPSGRRKALATSSINMKQYASPMPTQTDVKLKFKPLSKKVVSAALQFSLSCIFLREGKATDEDMQSLASLMSMKQADIGNLDDFEEDNEDDDENRVNQEEKAAKITEIVNQLNALSSLDEDQDDCIKQANMRSAKSASSSEELINKLNFLDEAEKDLATVNSNPFDDPDAAELNPFGDPDSEEPITETASPRKTEDSFYNNSYNPFKEVQTPQYLNPFDEPEAFVTIKDSPPQSTKRKNIRPVDMSKYLYADSSKTEEEELDESNPFYEPKSTPPPNNLVNPVQELETERRVKRKAPAPPVLSPKTGVLNENTVSAGKDLSTSPKPSPIPSPVLGRKPNASQSLLVWCKEVTKNYRGVKITNFTTSWRNGLSFCAILHHFRPDLIDYKSLNPQDIKENNKKAYDGFASIGISRLLEPSDMVLLAIPDKLTVMTYLYQIRAHFSGQELNVVQIEENSSKSTYKVGNYETDTNSSVDQEKFYAELSDLKREPELQQPISGAVDFLSQDDSVFVNDSGVGESESEHQTPDDHLSPSTASPYCRRTKSDTEPQKSQQSSGRTSGSDDPGICSNTDSTQAQVLLGKKRLLKAETLELSDLYVSDKKKDMSPPFICEETDEQKLQTLDIGSNLEKEKLENSRSLECRSDPESPIKKTSLSPTSKLGYSYSRDLDLAKKKHASLRQTESDPDADRTTLNHADHSSKIVQHRLLSRQEELKERARVLLEQARRDAALKAGNKHNTNTATPFCNRQLSDQQDEERRRQLRERARQLIAEARSGVKMSELPSYGEMAAEKLKERSKASGDMVAHTCSPTYSRG

SEQ ID NO: 11769 - protein, 883 aa, Artificial Sequence
  Synthetic polypeptide
MASVWKRLQRVGKHASKFQFVASYQELMVECTKKWQPDKLVVVWTRRSRRKSSKAHSWQPGIKNPYRGVVVWPVPENIEITVTLFKDPHAEEFEDKEWTFVIENESPSGRRKALATSSINMKQYASPMPTQTDVKLKFKPLSKKVVSAALQFSLSCIFLREGKATDEDMQSLASLMSMKQADIGNLDDFEEDNEDDDENRVNQEEKAAKITELINKLNFLDEAEKDLATVNSNPFDDPDAAELNPFGDPDSEEPITETASPRKTEDSFYNNSYNPFKEVQTPQYLNPFDEPEAFVTIKDSPPQSTKRKNIRPVDMSKYLYADSSKTEEEELDESNPFYEPKSTPPPNNLVNPVQELETERRVKRKAPAPPVLSPKTGVLNENTVSAGKDLSTSPKPSPIPSPVLGRKPNASQSLLVWCKEVTKNYRGVKITNFTTSWRNGLSFCAILHHFRPDLIDYKSLNPQDIKENNKKAYDGFASIGISRLLEPSDMVLLAIPDKLTVMTYLYQIRAHFSGQELNVVQIEENSSKSTYKVGNYETDTNSSVDQEKFYAELSDLKREPELQQPISGAVDFLSQDDSVFVNDSGVGESESEHQTPDDHLSPSTASPYCRRTKSDTEPQKSQQSSGRTSGSDDPGICSNTDSTQAQVLLGKKRLLKAETLELSDLYVSDKKKDMSPPFICEETDEQKLQTLDIGSNLEKEKLENSRSLECRSDPESPIKKTSLSPTSKLGYSYSRDLDLAKKKHASLRQTESDPDADRTTLNHADHSSKIVQHRLLSRQEELKERARVLLEQARRDAALKAGNKHNTNTATPFCNRQLSDQQDEERRRQLRERARQLIAEARSGVKMSELPSYGEMAAEKLKERSKASGDMVAHTCSPTYSRG

SEQ ID NO: 11770 - protein, 78 aa, Artificial Sequence
  Synthetic polypeptide
  misc_feature (1)..(1): Xaa can be any naturally occurring amino acid
XNTNTATPFCNRQLSDQDEERRRQLRERARQLIAEARSGVKMSELPSYGEMAAEKLKERSKASGDMVAHTCSPTYSRG

SEQ ID NO: 11771 - protein, 143 aa, Artificial Sequence
  Synthetic polypeptide
  misc_feature (1)..(1): Xaa can be any naturally occurring amino acid
XRLLEPSDMTESDPDADRTTLNHADHSSKIVQHRLLSRQEELKERARVLLEQARRDAALKAGNKHNTNTATPFCNRQLSDQQDEERRRQLRERARQLIAEARSGVKMSELPSYGEMAAEKLKERSKASGDMVAHTCSPTYSRG

SEQ ID NO: 11772 - protein, 38 aa, Artificial Sequence
  Synthetic polypeptide
MRREFCWDAYSKAAGSRASSPLPRQTFTARNAKGNSSG

SEQ ID NO: 11773 - protein, 37 aa, Artificial Sequence
  Synthetic polypeptide
  misc_feature (1)..(1): Xaa can be any naturally occurring amino acid
XREFCWDAYSKAAGSRASSPLPRQTFTARNAKGNSSG

SEQ ID NO: 11774 - protein, 248 aa, Artificial Sequence
  Synthetic polypeptide
MALCSLISSWASGFRSDDDQERRGDSYIVRVKAVVMTRDDSSGGWFPQEGGGISRVGVCKVMHPEGNGRSGFLIHGERQKDKLVVLECYVRKDLVYTKANPTFHHWKVDNRKFGLTFQSPADARAFDRGVRKAIEDLIEGSTTSSSTIHNEAELGDDDVFTTATDSSSNSSQKREQPTRTISSPTSCEHRRIYTLGHLHDSYPTDHYHLDQVQWLMPVIPALWEAEAGGSQGQEIETILVNTVKPRVY

SEQ ID NO: 11775 - protein, 230 aa, Artificial Sequence
  Synthetic polypeptide
MASPGSDSYIVRVKAVVMTRDDSSGGWFPQEGGGISRVGVCKVMHPEGNGRSGFLIHGERQKDKLVVLECYVRKDLVYTKANPTFHHWKVDNRKFGLTFQSPADARAFDRGVRKAIEDLIEGSTTSSSTIHNEAELGDDDVFTTATDSSSNSSQKREQPTRTISSPTSCEHRRIYTLGHLHDSYPTDHYHLDQVQWLMPVIPALWEAEAGGSQGQEIETILVNTVKPRVY

SEQ ID NO: 11776 - protein, 233 aa, Artificial Sequence
  Synthetic polypeptide
MTEETHPDDDSYIVRVKAVVMTRDDSSGGWFPQEGGGISRVGVCKVMHPEGNGRSGFLIHGERQKDKLVVLECYVRKDLVYTKANPTFHHWKVDNRKFGLTFQSPADARAFDRGVRKAIEDLIEGSTTSSSTIHNEAELGDDDVFTTATDSSSNSSQKREQPTRTISSPTSCEHRRIYTLGHLHDSYPTDHYHLDQVQWLMPVIPALWEAEAGGSQGQEIETILVNTVKPRVY

SEQ ID NO: 11777 - protein, 119 aa, Artificial Sequence
  Synthetic polypeptide
MATAERRALGIGFQWLSLATLVLICAGQGGRREDGGPACYGGFDLYFILDKSGSVLHHWNEIYYFVEQLAHKFISPQLRMSFIVFSTRGTTLMKLTEDRSGQNIDINSNLEEVDSNFHN

SEQ ID NO: 11778 - protein, 190 aa, Artificial Sequence [sequence omitted]

SEQ ID NO: 11779 - protein, 22 aa, Artificial Sequence
  Synthetic polypeptide
  misc_feature (1)..(1): Xaa can be any naturally occurring amino acid
XDLGAIVYCVGVKDFNETQFLQ

SEQ ID NO: 11780 - protein, 223 aa, Artificial Sequence
  Synthetic polypeptide
MATAERRALGIGFQWLSLATLVLICAGQGGRREDGGPACYGGFDLYFILDKSGSVLHHWNEIYYFVEQLAHKFISPQLRMSFIVFSTRGTTLMKLTEDREQIRQGLEELQKVLPGGDTYMHEGFERASEQIYYENRQGYRTASVIIALTDGELHEDLFFYSEREANRSRDLGAIVYCVGVKDFNETQLARIADSKDHVFPVNDGFQALQGIIHSDAQISLWNG

SEQ ID NO: 11781 - protein, 55 aa, Artificial Sequence
  Synthetic polypeptide
  misc_feature (1)..(1): Xaa can be any naturally occurring amino acid
XDLGAIVYCVGVKDFNETQLARIADSKDHVFPVNDGFQALQGIIHSDAQISLWNG

SEQ ID NO: 11782 - protein, 481 aa, Artificial Sequence
  Synthetic polypeptide
MATAERRALGIGFQWLSLATLVLICAGQGGRREDGGPACYGGFDLYFILDKSGSVLHHWNEIYYFVEQLAHKFISPQLRMSFIVFSTRGTTLMKLTEDREQIRQGLEELQKVLPGGDTYMHEGFERASEQIYYENRQGYRTASVIIALTDGELHEDLFFYSEREANRSRDLGAIVYCVGVKDFNETQLARIADSKDHVFPVNDGFQALQGIIHSILKKSCIEILAAEPSTICAGESFQVVVRGNGFRHARNVDRVLCSFKINDSVTLNEKPFSVEDTYLLCPAPILKEVGMKAALQVSMNDGLSFISSSVIITTTHCSDGSILAIALLILFLLLALALLWWFWPLCCTVIIKEVPPPPAEESEEEDDDGLPKKKWPTVDASYYGGRGVGGIKRMEVRWGEKGSTEEGAKLEKAKNARVKMPEQEYEFPEPRNLNNNMRRPSSPRKWYSPIKGKLDALWVLLRKGYDRVSVMRPQPGDTTWV

SEQ ID NO: 11783 - protein, 487 aa, Artificial Sequence; identical to SEQ ID NO: 389
  Synthetic polypeptide

SEQ ID NO: 11784 - protein, 817 aa, Artificial Sequence
  Synthetic polypeptide
MKKFFDSRREQGGSGLGSGSSGGGGSTSGLGSGYIGRVFGIGRQQVTVDEVLAEGGFAIVFLVRTSNGMKCALKRMFVNNEHDLQVCKREIQIMRDLSGHKNIVGYIDSSINNVSSGDVWEVLILMDFCRGGQVVNLMNQRLQTGFTENEVLQIFCDTCEAVARLHQCKTPIIHRDLKVENILLHDRGHYVLCDFGSATNKFQNPQTEGVNAVEDEIKKYTTLSYRAPEMVNLYSGKIITTKADIWALGCLLYKLCYFTLPFGESQVAICDGNFTIPDNSRYSQDMHCLIRYMLEPDPDKRPDIYQVSYFSFKLLKKECPIPNVQNSPIPAKLPEPVKASEAAAKKTQPKARLTDPIPTTETSIAPRQRPKAGQTQPNPGILPIQPALTPRKRATVQPPPQAAGSSNQPGLLASVPQPKPQAPPSQPLPQTQAKQPQAPPTPQQTPSTQAQGLPAQAQATPQHQQQLFLKQQQQQQQPPPAQQQPAGTFYQQQQAQTQQFQAVHPATQKPAIAQFPVVSQGGSQQQLMQNFYQQQQQQQQQQQQQQLATALHQQQLMTQQAALQQKPTMAAGQQPQPQPAAAPQPAPAQEPAIQAPVRQQPKVQTTPPPAVQGQKVGSLTPPSSPKTQRAGHRRILSDVTHSAVFGVPASKSTQLLQAAAAEASLNKSKSATTTPSGSPRTSQQNVYNPSEGSTWNPFDDDNFSKLTAEELLNKDFAKLGEGKHPEKLGGSAESLIPGFQSTQGDAFATTSFSAGTAEKRKGGQTVDSGLPLLSVSDPFIPLQVPDAPDSARLHPGEINSLVAHTKPVWWSLHTDAN

SEQ ID NO: 11785 - protein, 785 aa, Artificial Sequence
  Synthetic polypeptide
MKKFFDSRREQGGSGLGSGSSGGGGSTSGLGSGYIGRVFGIGRQQVTVDEVLAEGGFAIVFLVRTSNGMKCALKRMFVNNEHDLQVCKREIQIMRDLSGHKNIVGYIDSSINNVSSGDVWEVLILMDFCRGGQVVNLMNQRLQTGFTENEVLQIFCDTCEAVARLHQCKTPIIHRDLKVENILLHDRGHYVLCDFGSATNKFQNPQTEGVNAVEDEIKKYTTLSYRAPEMVNLYSGKIITTKADIWALGCLLYKLCYFTLPFGESQVAICDGNFTIPDNSRYSQDMHCLIRYMLEPDPDKRPDIYQVSYFSFKLLKKECPIPNVQNSPIPAKLPEPVKASEAAAKKTQPKARLTDPIPTTETSIAPRQRPKAGQTQPNPGILPIQPALTPRKRATVQPPPQAAGSSNQPGLLASVPQPKPQAPPSQPLPQTQAKQPQAPPTPQQTPSTQAQGLPAQAQATPQHQQQLFLKQQQQQQQPPPAQQQPAGTFYQQQQAQTQQFQAVHPATQKPAIAQFPVVSQGGSQQQLMQNFYQQQQQQQQQQQQQQLATALHQQQLMTQQAALQQKPTMAAGQQPQPQPAAAPQPAPAQEPAIQAPVRQQPKVQTTPPPAVQGQKVGSLTPPSSPKTQRAGHRRILSDVTHSAVFGVPASKSTQLLQAAAAEASLNKSKSATTTPSGSPRTSQQNVYNPSEGSTWNPFDDDNFSKLTAEELLNKDFAKLGEGKHPEKLGGSAESLIPGFQSTQGDAFATTSFSAGTDSARLHPGEINSLVAHTKPVWWSLHTDAN

SEQ ID NO: 11786 - protein, 595 aa, Artificial Sequence
  Synthetic polypeptide
MKKFFDSRREQGGSGLGSGSSGGGGSTSGLGSGYIGRVFGIGRQQVTVDEVLAEGGFAIVFLVRTSNGMKCALKRMFVNNEHDLQVCKREIQIMRDLSGHKNIVGYIDSSINNVSSGDVWEVLILMDFCRGGQVVNLMNQRLQTGFTENEVLQIFCDTCEAVARLHQCKTPIIHRDLKVENILLHDRGHYVLCDFGSATNKFQNPQTEGVNAVEDEIKKYTTLSYRAPEMVNLYSGKIITTKADIWALGCLLYKLCYFTLPFGESQVAICDGNFTIPDNSRYSQDMHCLIRYMLEPDPDKRPDIYQVSYFSFKLLKKECPIPNVQNSPIPAKLPEPVKASEAAAKKTQPKARLTDPIPTTETSIAPRQRPKAGQTQPNPGILPIQPALTPRKRATVQPPPQAAGSSNQPGLLASVPQPKPQAPPSQPLPQTQAKQPQAPPTPQQTPSTQAQGLPAQAQATPQHQQQLFLKQQQQQQQPPPAQQQPAGTFYQQQQAQTQQFQAVHPATQKPAIAQFPVVSQGGSQQQLMQNFYQQQQQQQQQQQQQQLATALHQQQLMTQQAALQQKPTMAAGQQPQPQPAAAPQPAPAQEPAHYS

SEQ ID NO: 11787 - protein, 40 aa, Artificial Sequence
  Synthetic polypeptide
MFKIGRGALDLFSELLSFGGIVLAACQALENSTSPLSGSP

SEQ ID NO: 11788 - protein, 34 aa, Artificial Sequence
  Synthetic polypeptide
MVPSAGQLALFALGIVLAACQALENSTSPLSGSP

SEQ ID NO: 11789 - protein, 249 aa, Artificial Sequence
  Synthetic polypeptide
MTTTRYRPTWDLALDPLVSCKLCLGEYPVEQMTTIAQCQCIFCTLCLKQYVELLIKEGLETAISCPDAACPKQGHLQENEIECMVAAEIMQRYKKLQFEREVLFDPCRTWCPASTCQAVCQLQDVGLQTPQPVQCKACRMEFCSTCKASWHPGQGCPETMPITFLPGETSAAFKMEEDDAPIKRCPKCKVYIERDEGCAQMMCKNCKHAFCWYCLESLDDDFLLIHYDKGPCRNKLGHSRASVIWHRTQ

SEQ ID NO: 11790 - protein, 245 aa, Artificial Sequence
  Synthetic polypeptide
  misc_feature (1)..(1): Xaa can be any naturally occurring amino acid
XYRPTWDLALDPLVSCKLCLGEYPVEQMTTIAQCQCIFCTLCLKQYVELLIKEGLETAISCPDAACPKQGHLQENEIECMVAAEIMQRYKKLQFEREVLFDPCRTWCPASTCQAVCQLQDVGLQTPQPVQCKACRMEFCSTCKASWHPGQGCPETMPITFLPGETSAAFKMEEDDAPIKRCPKCKVYIERDEGCAQMMCKNCKHAFCWYCLESLDDDFLLIHYDKGPCRNKLGHSRASVIWHRTQ

SEQ ID NO: 11791 - protein, 304 aa, Artificial Sequence
  Synthetic polypeptide
MTTTRYRPTWDLALDPLVSCKLCLGEYPVEQMTTIAQCQCIFCTLCLKQYVELLIKEGLETAISCPDAACPKQGHLQENEIECMVAAEIMQRYKKLQFEREVLFDPCRTWCPASTCQAVCQLQDVGLQTPQPVQCKACRMEFCSTCKASWHPGQGCPETMPITFLPGETSAAFKMEEDDAPIKRCPKCKVYIERDEGCAQMMCKNCKHAFCWYCLESLDDDFLLIHYDKGPCRNKLGHSRASVIWHRTQVVDQRFSACLCHLEIARWYIKINSVSFNPRRKSGVHQNRKGQPRSPGGEPGKQSL

SEQ ID NO: 11792 - protein, 300 aa, Artificial Sequence
  Synthetic polypeptide
  misc_feature (1)..(1): Xaa can be any naturally occurring amino acid
XYRPTWDLALDPLVSCKLCLGEYPVEQMTTIAQCQCIFCTLCLKQYVELLIKEGLETAISCPDAACPKQGHLQENEIECMVAAEIMQRYKKLQFEREVLFDPCRTWCPASTCQAVCQLQDVGLQTPQPVQCKACRMEFCSTCKASWHPGQGCPETMPITFLPGETSAAFKMEEDDAPIKRCPKCKVYIERDEGCAQMMCKNCKHAFCWYCLESLDDDFLLIHYDKGPCRNKLGHSRASVIWHRTQVVDQRFSACLCHLEIARWYIKINSVSFNPRRKSGVHQNRKGQPRSPGGEPGKQSL

SEQ ID NO: 11793 - protein, 237 aa, Artificial Sequence
  Synthetic polypeptide
MSPWSWFLLQTLCLLPTGAASRRGAPGTANCELKPQQSELNSFLWTIKRDPPSYFFGTIHVPYTRVWDFIPDNSKEAFLQSSIVYFELDLTDPYTISALTSCQMLPQGENLQDVLPRDIYCRLKRHLEYVKLMMPLWMTPDQRGKGLYADYLFNAIAGNWERKRPVWVMLMVNSLTEVDIKSRGVPVLDLFLAQEAERLRKQTGAVEKVEEQCHPLNGLNFSQDAARRPSPDQRPVP

SEQ ID NO: 11794 - protein, 277 aa, Artificial Sequence; identical to SEQ ID NO: 723
  Synthetic polypeptide

SEQ ID NO: 11795 - protein, 77 aa, Artificial Sequence; identical to SEQ ID NO: 1197
  Synthetic polypeptide

SEQ ID NO: 11796 - protein, 51 aa, Artificial Sequence; identical to SEQ ID NO: 1266
  Synthetic polypeptide

SEQ ID NO: 11797 - protein, 63 aa, Artificial Sequence
  Synthetic polypeptide
MEEASEGGGNDRVRNLQSEVEGVKNIMTQNVERILARGENLEHLRNKTEDLEATIFRKVHLSR

SEQ ID NO: 11798 - protein, 37 aa, Artificial Sequence
  Synthetic polypeptide
MTQNVERILARGENLEHLRNKTEDLEATIFRKVHLSR

SEQ ID NO: 11799 - protein, 25 aa, Artificial Sequence
  Synthetic polypeptide
  misc_feature (1)..(1): Xaa can be any naturally occurring amino acid
XWTFGQGTKVEIKRSSFASVAASPP

SEQ ID NO: 11800 - protein, 81 aa, Artificial Sequence
  Synthetic polypeptide
MRLPAQLLGLLMLWVPGSSGDVVMTQSPLSLPVTLGQPASISCRSSQSLVYSDGNTYLNWFQQRPGQSPRRLIYKEAVLHQ

SEQ ID NO: 11801 - protein, 76 aa, Artificial Sequence
  Synthetic polypeptide
MRLPAQLLGLLMLWVPGSSGDVVMTQSPLSLPVTLGQPASISCRKQFCISSCISSMILAATKCPSSALSQCHFLQP

SEQ ID NO: 11802 - protein, 59 aa, Artificial Sequence
  Synthetic polypeptide
MTAREHSPRHGARARAMQRASTIDVAADMLGLSLAGNIQDPDEPILEFSLGSDKNILKS

SEQ ID NO: 11803 - protein, 15 aa, Artificial Sequence
  Synthetic polypeptide
MLERLNKWLLLESLK

SEQ ID NO: 11804 - protein, 29 aa, Artificial Sequence
  Synthetic polypeptide
MYENECECQLLLKEMLERLNKWLLLESLK

SEQ ID NO: 11805 - protein, 154 aa, Artificial Sequence
  Synthetic polypeptide
MYRRSYVFQTRKEQYEHADEASRAAEPERPADEGWAGATSLAALQGLGERVAAHVQRARALEQRHAGLRRQLDAFQRLGELAGPEDALARQVESNRQRVRDLEAERARLERQGTEAQRALDEFRSKYENECECQLLLKEMLERLNKWLLLESLK

SEQ ID NO: 11806 - protein, 15 aa, Artificial Sequence
  Synthetic polypeptide
ILGKFFIAVRKWTNT

SEQ ID NO: 11807 - protein, 393 aa, Artificial Sequence
  Synthetic polypeptide
MAAVPELLQQQEEDRSKLRSVSVDLNVDPSLQIDIPDALSERDKVKFTVHTKTTLPTFQSPEFSVTRQHEDFVWLHDTLIETTDYAGLIIPPAPTKPDFDGPREKMQKLGEGEGSMTKEEFAKMKQELEAEYLAVFKKTVSSHEVFLQRLSSHPVLSKDRNFHVFLEYDQDLSVRRKNTKEMFGGFFKSVVKSADEVLFTGVKEVDDFFEQEKNFLINYYNRIKDSCVKADKMTRSHKNVADDYIHTAACLHSLALEEPTVIKKYLLKVAELFEKLRKVEGRVSSDEDLKLTELLRYYMLNIEAAKDLLYRRTKALIDYENSNKALDKARLKSKDVKLAEAHQQECCQKFEQLSESAKEELINFKRKRVAAFRKNLIEMSELEIKHARALAFM

SEQ ID NO: 11808 - protein, 224 aa, Artificial Sequence
  Synthetic polypeptide
MDGIIEQKSMLVHSKISDAGKRNGLINTRNLMAESRDGLVSVYPAPQYQSHRVGASTVPASLDSSRSEPMQQLLDPNTLQQSVESRYRPNIILYSEGVLRSWGDGVAADCCETTFIEDRSPTKDSLEYPDGKFIDLSADDIKIHTLSYDVEEEEEFQELESDYSSDTESEDNFLMMPPRDHLGLSVFSMLCCFWPLGIAAFYLSHEFARAGSLDQQHQGHLGTF

SEQ ID NO: 11809 - protein, 265 aa, Artificial Sequence
  Synthetic polypeptide
MDDAVQITKISMDSWFILVLLGSGLICVSANNATTVAPSVGITRLINSSTAEPVKEEAKTSNPTSSLTSLSVAPTFSPNITLGPTYLTTVNSSDSDNGTTRTASTNSIGITISPNGTWLPDNQFTDARTEPWEGNSSTAATTPETFPPSGNSDSKDRRDETPIIAVMVALSSLLVIVFIIIVLYMLRFKKYKQAGSHSNSFRLSNGRTEDVEPQSVPLLARSPSTNRKYPPLPVDKLEEEINRRMADDNKLFREEFNVFLWNLTS

SEQ ID NO: 11810 - protein, 245 aa, Artificial Sequence
  Synthetic polypeptide
MDSWFILVLLGSGLICVSANNATTVAPSVGITRLINSSTAEPVKEEAKTSNPTSSLTSLSVAPTFSPNITLGPTYLTTVNSSDSDNGTTRTASTNSIGITISPNGTWLPDNQFTDARTEPWEGNSSTAATTPETFPPSDETPIIAVMVALSSLLVIVFIIIVLYMLRFKKYKQAGSHSNSFRLSNGRTEDVEPQSVPLLARSPSTNRKYPPLPVDKLEEEINRRMADDNKLFREEFNVFLWNLTS

SEQ ID NO: 11811 - protein, 254 aa, Artificial Sequence
  Synthetic polypeptide
MDSWFILVLLGSGLICVSANNATTVAPSVGITRLINSSTAEPVKEEAKTSNPTSSLTSLSVAPTFSPNITLGPTYLTTVNSSDSDNGTTRTASTNSIGITISPNGTWLPDNQFTDARTEPWEGNSSTAATTPETFPPSGNSDSKDRRDETPIIAVMVALSSLLVIVFIIIVLYMLRFKKYKQAGSHSNSFRLSNGRTEDVEPQSVPLLARSPSTNRKYPPLPVDKLEEEINRRMADDNKLFREEFNVFLWNLTS

SEQ ID NO: 11812 - protein, 110 aa, Artificial Sequence
  Synthetic polypeptide
MVALSSLLVIVFIIIVLYMLRRFRKAELMSRNTEKYKQAGSHSNSFRLSNGRTEDVEPQSVPLLARSPSTNRKYPPLPVDKLEEEINRRMADDNKLFREEFNVFLWNLTS

SEQ ID NO: 11813 - protein, 315 aa, Artificial Sequence
  Synthetic polypeptide
MDDAVQITKISMDSWFILVLLGSGLICVSANNATTVAPSVGITRLINSSTAEPVKEEAKTSNPTSSLTSLSVAPTFSPNITLGPTYLTTVNSSDSDNGTTRTASTNSIGITISPNGTWLPDNQFTDARTEPWEGNSSTAATTPETFPPSGNSDSKDRRDETPIIAVMVALSSLLVIVFIIIVLYMLRFKKYKQAGSHSNSFRLSNGRTEDVEPQSVPLLARSPSTNRKYPPLPVDKLEEEINRRMADDNKLFREEFNALPACPIQATCEAASKEENKEKNRYVNILPYDHSRVHLTPVEGVPDSDYINASFINQH

SEQ ID NO: 11814 - protein, 295 aa, Artificial Sequence
  Synthetic polypeptide
MDSWFILVLLGSGLICVSANNATTVAPSVGITRLINSSTAEPVKEEAKTSNPTSSLTSLSVAPTFSPNITLGPTYLTTVNSSDSDNGTTRTASTNSIGITISPNGTWLPDNQFTDARTEPWEGNSSTAATTPETFPPSDETPIIAVMVALSSLLVIVFIIIVLYMLRFKKYKQAGSHSNSFRLSNGRTEDVEPQSVPLLARSPSTNRKYPPLPVDKLEEEINRRMADDNKLFREEFNALPACPIQATCEAASKEENKEKNRYVNILPYDHSRVHLTPVEGVPDSDYINASFINQH

SEQ ID NO: 11815 - protein, 304 aa, Artificial Sequence
  Synthetic polypeptide
MDSWFILVLLGSGLICVSANNATTVAPSVGITRLINSSTAEPVKEEAKTSNPTSSLTSLSVAPTFSPNITLGPTYLTTVNSSDSDNGTTRTASTNSIGITISPNGTWLPDNQFTDARTEPWEGNSSTAATTPETFPPSGNSDSKDRRDETPIIAVMVALSSLLVIVFIIIVLYMLRFKKYKQAGSHSNSFRLSNGRTEDVEPQSVPLLARSPSTNRKYPPLPVDKLEEEINRRMADDNKLFREEFNALPACPIQATCEAASKEENKEKNRYVNILPYDHSRVHLTPVEGVPDSDYINASFINQH

SEQ ID NO: 11816 - protein, 160 aa, Artificial Sequence
  Synthetic polypeptide
MVALSSLLVIVFIIIVLYMLRRFRKAELMSRNTEKYKQAGSHSNSFRLSNGRTEDVEPQSVPLLARSPSTNRKYPPLPVDKLEEEINRRMADDNKLFREEFNALPACPIQATCEAASKEENKEKNRYVNILPYDHSRVHLTPVEGVPDSDYINASFINQH

SEQ ID NO: 11817 - protein, 322 aa, Artificial Sequence
  Synthetic polypeptide
MDDAVQITKISMDSWFILVLLGSGLICVSANNATTVAPSVGITRLINSSTAEPVKEEAKTSNPTSSLTSLSVAPTFSPNITLGPTYLTTVNSSDSDNGTTRTASTNSIGITISPNGTWLPDNQFTDARTEPWEGNSSTAATTPETFPPSGNSDSKDRRDETPIIAVMVALSSLLVIVFIIIVLYMLRFKKYKQAGSHSNSFRLSNGRTEDVEPQSVPLLARSPSTNRKYPPLPVDKLEEEINRRMADDNKLFREEFNALPACPIQATCEAASKEENKEKNRYVNILPYDHSRVHLTPVEGVPDSDYINASFINPGGSTPSVH

SEQ ID NO: 11818 - protein, 302 aa, Artificial Sequence
  Synthetic polypeptide
MDSWFILVLLGSGLICVSANNATTVAPSVGITRLINSSTAEPVKEEAKTSNPTSSLTSLSVAPTFSPNITLGPTYLTTVNSSDSDNGTTRTASTNSIGITISPNGTWLPDNQFTDARTEPWEGNSSTAATTPETFPPSDETPIIAVMVALSSLLVIVFIIIVLYMLRFKKYKQAGSHSNSFRLSNGRTEDVEPQSVPLLARSPSTNRKYPPLPVDKLEEEINRRMADDNKLFREEFNALPACPIQATCEAASKEENKEKNRYVNILPYDHSRVHLTPVEGVPDSDYINASFINPGGSTPSVH

SEQ ID NO: 11819 - protein, 311 aa, Artificial Sequence
  Synthetic polypeptide
MDSWFILVLLGSGLICVSANNATTVAPSVGITRLINSSTAEPVKEEAKTSNPTSSLTSLSVAPTFSPNITLGPTYLTTVNSSDSDNGTTRTASTNSIGITISPNGTWLPDNQFTDARTEPWEGNSSTAATTPETFPPSGNSDSKDRRDETPIIAVMVALSSLLVIVFIIIVLYMLRFKKYKQAGSHSNSFRLSNGRTEDVEPQSVPLLARSPSTNRKYPPLPVDKLEEEINRRMADDNKLFREEFNALPACPIQATCEAASKEENKEKNRYVNILPYDHSRVHLTPVEGVPDSDYINASFINPGGSTPSVH

SEQ ID NO: 11820 - protein, 167 aa, Artificial Sequence
  Synthetic polypeptide
MVALSSLLVIVFIIIVLYMLRRFRKAELMSRNTEKYKQAGSHSNSFRLSNGRTEDVEPQSVPLLARSPSTNRKYPPLPVDKLEEEINRRMADDNKLFREEFNALPACPIQATCEAASKEENKEKNRYVNILPYDHSRVHLTPVEGVPDSDYINASFINPGGSTPSVH

SEQ ID NO: 11821 - protein, 323 aa, Artificial Sequence; identical to SEQ ID NO: 644
  Synthetic polypeptide

SEQ ID NO: 11822 - protein, 303 aa, Artificial Sequence; identical to SEQ ID NO: 667
  Synthetic polypeptide

SEQ ID NO: 11823 - protein, 312 aa, Artificial Sequence; identical to SEQ ID NO: 651
  Synthetic polypeptide

SEQ ID NO: 11824 - protein, 168 aa, Artificial Sequence; identical to SEQ ID NO: 949
  Synthetic polypeptide

SEQ ID NO: 11825 - protein, 664 aa, Artificial Sequence; identical to SEQ ID NO: 202
  Synthetic polypeptide

SEQ ID NO: 11826 - protein, 644 aa, Artificial Sequence; identical to SEQ ID NO: 218
  Synthetic polypeptide

SEQ ID NO: 11827 - protein, 653 aa, Artificial Sequence; identical to SEQ ID NO: 214
  Synthetic polypeptide

SEQ ID NO: 11828 - protein, 509 aa, Artificial Sequence; identical to SEQ ID NO: 370
  Synthetic polypeptide

SEQ ID NO: 11829 - protein, 242 aa, Artificial Sequence
  Synthetic polypeptide
MDSALSDPHNGSAEAGGPTNSTTRPPSTPEGIALAYGSLLLMALLPIFFGALRSVRCARGKNASDMPETITSRDAARFPIIASCTLLGLYLFFKIFSQEYINLLLSMYFFVLGILALSHTISPFMNKFFPASFPNRQYQLLFTQGSGENKEEIINYEFDTKDLVCLGLSSIVGVWYLLRKHWIANNLFGLAFSLNGVELLHLNNVSTGCILLGGLFIYDVFWVFGTNVMVTVAKSFEAPIKC

SEQ ID NO: 11830 - protein, 200 aa, Artificial Sequence
  Synthetic polypeptide
MDSALSDPHNGSAEAGGPTNSTTRPPSTPEGIALAYGSLLLMALLPIFFGALRSVRCARGKNASDMPETITSRDAARFPIIASCTLLGLYLFFKIFSQEYINLLLSMYFFVLGILALSHTISPFMNKFFPASFPNRQYQLLFTQGSGENKEEIINYEFDTKDLVCLGLSSIVGVWYLLRKVFGTNVMVTVAKSFEAPIKC

SEQ ID NO: 11831 - protein, 241 aa, Artificial Sequence
  Synthetic polypeptide
MDSALSDPHNGSAEAGGPTNSTTRPPSTPEGIALAYGSLLLMALLPIFFGALRSVRCARGKNASDMPETITSRDAARFPIIASCTLLGLYLFFKIFSQEYINLLLSMYFFVLGILALSHTISPFMNKFFPASFPNRQYQLLFTQGSGENKEEIINYEFDTKDLVCLGLSSIVGVWYLLRKHWIANNLFGLAFSLNGVELLHLNNVSTGCILLGGLFIYDVFWVFGTNVMVTVAKSFEAPIK

SEQ ID NO: 11832 - protein, 199 aa, Artificial Sequence
  Synthetic polypeptide
MDSALSDPHNGSAEAGGPTNSTTRPPSTPEGIALAYGSLLLMALLPIFFGALRSVRCARGKNASDMPETITSRDAARFPIIASCTLLGLYLFFKIFSQEYINLLLSMYFFVLGILALSHTISPFMNKFFPASFPNRQYQLLFTQGSGENKEEIINYEFDTKDLVCLGLSSIVGVWYLLRKVFGTNVMVTVAKSFEAPIK

SEQ ID NO: 11833 - protein, 68 aa, Artificial Sequence
  Synthetic polypeptide
MKLEEVVVTLQLGGDKEPTETIGDLSICLDGLQLESEVVTNGETTCSESMVAHTCNPSTLGSQGGRIT

SEQ ID NO: 11834 - protein, 178 aa, Artificial Sequence
  Synthetic polypeptide
MSDSGSQLGSMGSLTMKSQLQITVISAKLKENKKNWFGPSPYVEVTVDGQSKKTEKCNNTNSPKWKQPLTVIVTPVSKLHFRVWSHQTLKSDVLLGTAALDIYETLKSNNMKLEEVVVTLQLGGDKEPTETIGDLSICLDGLQLESEVVTNGETTCSESMVAHTCNPSTLGSQGGRIT

SEQ ID NO: 11835 - protein, 279 aa, Artificial Sequence
  Synthetic polypeptide
MPRSRGGRAAPGPPPPPPPPGQAPRWSRWRVPGRLLLLLLPALCCLPGAARAAAAAAGAGNRAAVAVAVARADEAEAPFAGQNWLKSYGYLLPYDSRASALHSAKALQSAVSTMQQFYGIPVTGVLDQTTIEWMKKPRCGVPDHPHLSRRRRNKRYALTGQKWRQKHITYSIHNYTPKVGELDTRKAIRQAFDVWQKVTPLTFEEVPYHEIKSDRKEADIMIFFASGFHGDSSPFDGEGGFLAHAYFPGPGIGGDTHFDSDEPWTLGNANHDATQEAEA

SEQ ID NO: 11836 - protein, 1280 aa, Artificial Sequence; identical to SEQ ID NO: 34
  Synthetic polypeptide

SEQ ID NO: 11837 - protein, 130 aa, Artificial Sequence
  Synthetic polypeptide
MGSNKSKPKDASQRRRSLEPAENVHGAGGGAFPASQTPSKPASADGHRGPSAAFAPAAAEPKLFGGFNSSDTVTSPQRAGPLAGGVTTFVALYDYESRTETDLSFKKGERLQIVNNTPLSASPSLCFSLA

SEQ ID NO: 11838 - protein, 225 aa, Artificial Sequence
  Synthetic polypeptide
MAEELVLERCDLELETNGRDHHTADLCREKLVVRRGQPFWLTLHFEGRNYEASVDSLTFSVVTADAVYLDSEEERQEYVLTQQGFIYQGSAKFIKNIPWNFGQFEDGILDICLILLDVNPKFLKNAGRDCSRRSSPVYVGRVVSGMVNCNDDQGVLLGRWDNNYGDGVSPMSWIGSVDILRRWKNHGCQRVKYGQCWVFAAVACTVSSSGKWGQHQDLPPRVGVT

SEQ ID NO: 11839 - protein, 306 aa, Artificial Sequence
  Synthetic polypeptide
MAEELVLERCDLELETNGRDHHTADLCREKLVVRRGQPFWLTLHFEGRNYEASVDSLTFSVVTGPAPSQEAGTKARFPLRDAVEEGDWTATVVDQQDCTLSLQLTTPANAPIGLYRLSLEASTGYQGSSFVLGHFILLFNAWCPADAVYLDSEEERQEYVLTQQGFIYQGSAKFIKNIPWNFGQFEDGILDICLILLDVNPKFLKNAGRDCSRRSSPVYVGRVVSGMVNCNDDQGVLLGRWDNNYGDGVSPMSWIGSVDILRRWKNHGCQRVKYGQCWVFAAVACTVSSSGKWGQHQDLPPRVGVT

SEQ ID NO: 11840 - protein, 246 aa, Artificial Sequence
  Synthetic polypeptide
MAEGPAPSQEAGTKARFPLRDAVEEGDWTATVVDQQDCTLSLQLTTPANAPIGLYRLSLEASTGYQGSSFVLGHFILLFNAWCPADAVYLDSEEERQEYVLTQQGFIYQGSAKFIKNIPWNFGQFEDGILDICLILLDVNPKFLKNAGRDCSRRSSPVYVGRVVSGMVNCNDDQGVLLGRWDNNYGDGVSPMSWIGSVDILRRWKNHGCQRVKYGQCWVFAAVACTVSSSGKWGQHQDLPPRVGVT

SEQ ID NO: 11841 - protein, 20 aa, Artificial Sequence
  Synthetic polypeptide
MAQTPAFDKPKAPSAVPGAY

SEQ ID NO: 11842 - protein, 199 aa, Artificial Sequence
  Synthetic polypeptide
MVRLPLQCVLWGCLLTAVHPEPPTACREKQYLINSQCCSLCQPGQKLVSDCTEFTETECLPCGESEFLDTWNRETHCHQHKYCDPNLGLRVQQKGTSETDTICTCEEGWHCTSEACESCVLHRSCSPGFGVKQIATGVSDTICEPCPVGFFSNVSSAFEKCHPWTRPGAVALACNLSTLDAKAGGSLEVRSSRPASTTW

SEQ ID NO: 11843 - protein, 224 aa, Artificial Sequence
  Synthetic polypeptide
MRPRPEGRGLRAGVALSPALLLLLLLPPPPTLLGRLWAAGTPSPSAPGARQDGALGAGRVKRGWVWNQFFVVEEYTGTEPLYVGKIHSDSDEGDGAIKYTISGEGAGTIFLIDELTGDIHAMERLDREQKTFYTLRAQARDRATNRLLEPESEFIIKVQDINDSEPRFLHGPYIGSVAELSPTGTSVMQVMASDADDPTYGSSARLVYSVLDGEHHFTVDPKTA

SEQ ID NO: 11844 - protein, 610 aa, Artificial Sequence
  Synthetic polypeptide
MEAPSGSEPGGDGAGDCAHPDPRAPGAAAPSSGPGPCAAARESERQLRLRLCVLNEILGTERDYVGTLRFLQSAFLHRIRQNVADSVEKGLTEENVKVLFSNIEDILEVHKDFLAALEYCLHPEPQSQHELGNVFLKFKDKFCVYEEYCSNHEKALRLLVELNKIPTVRAFLLSCMLLGGRKTTDIPLEGYLLSPIQRICKYPLLLKELAKRTPGKHPDHPAVQSALQAMKTVCSNINETKRQMEKLEALEQLQSHIEGWEGSNLTDICTQLLLQGTLLKISAGNIQERAFFLFDNLLVYCKRKSRVTGSKKSTKRTKSINGSLYIFRGRINTEVMEVENVEDGTADYHSNGYTVTNGWKIHNTAKNKWFVCMAKTAEEKQKWLDAIIREREQRESLKLGMERDAYVMIAEKGEKLYHMMMNKKVNLIKDRRRKLSTVPKCFLGNEFVAWLLEIGEISKTEEGVNLGQALLENGIIHHVSDKHQFKNEQVMYRFRYDDGTYKARSELEDIMSKGVRLYCRLHSLYTPVIKDRDYHLKTYKSVLPGSKLVDWLLAQGDCQTREEAVALGVGLCNNGFMHHEHSSEPLHLQFPLPGCPACLIPAGNSVFLLS

SEQ ID NO: 11845 - protein, 145 aa, Artificial Sequence
  Synthetic polypeptide
MEAPSGSEPGGDGAGDCAHPDPRAPGAAAPSSGPGPCAAARESERQLRLRLCVLNEILGTERDYVGTLRFLQSAFLHRIRQNVADSVEKGLTEENVKVLFSNIEDILEVHKDFLAALEYCLHPEPQSQHELGNVFLKFGAVMRMN

SEQ ID NO: 11846 - protein, 145 aa, Artificial Sequence
  Synthetic polypeptide
MEAPSGSEPGGDGAGDCAHPDPRAPGAAAPSSGPGPCAAARESERQLRLRLCVLNEILGTERDYVGTLRFLQSAFLHRIRQNVADSVEKGLTEENVKVLFSNIEDILEVHKDFLAALEYCLHPEPQSQHELGNVFLKFPRQQRII

SEQ ID NO: 11847 - protein, 139 aa, Artificial Sequence
  Synthetic polypeptide
MEAPSGSEPGGDGAGDCAHPDPRAPGAAAPSSGPGPCAAARESERQLRLRLCVLNEILGTERDYVGTLRFLQSAFLHRIRQNVADSVEKGLTEENVKVLFSNIEDILEVHKDFLAALEYCLHPEPQSQHELGNVFLKFL

SEQ ID NO: 11848 - protein, 202 aa, Artificial Sequence
  Synthetic polypeptide
MPAGMTKHGSRSTSSLPPEPMEIVRSKACSRRVRLNVGGLAHEVLWRTLDRLPRTRLGKLRDCNTHDSLLEVCDDYSLDDNEYFFDRHPGAFTSILNFYRTGRLHMMEEMCALSFSQELDYWGIDEIYLESCCQARYHQKKEQMNEELKREAETLREREGEEFDNTCCAEKRKKLWDLLEKPNSSVAAKEMRIITEATMKSC

SEQ ID NO: 11849 - protein, 415 aa, Artificial Sequence
  Synthetic polypeptide
MMGIGKNTTSKSMEAGSSTEGKYEDEAKHPAFFTLPVVINGGATSSGEQDNEDTELMAIYTTENGIAEKSSLAETLDSTGSLDPQRSDMIYTIEDVPPWYLCIFLGLQHYLTCFSGTIAVPFLLADAMCVGYDQWATSQLIGTIFFCVGITTLLQTTFGCRLPLFQASAFAFLAPARAILSLDKWKCNTTDVSVANGTAELLHTEHIWYPRIREIQGAIIMSSLIEVVIGLLGLPGALLKYIGPLTITPTVALIGLSGFQAAGERAGKHWGIAMLTIFLVLLFSQYARNVKFPLPIYKSKKGWTAYKLQLFKMFPIILAILVSWLLCFIFTVTDVFPPDSTKYGFYARTDARQGVLLVAPWFKVPYPCRARRDMPVTPALWGGRGRRITRGQEFKTSLANMVKPHLYKNTKMSQA

SEQ ID NO: 11850 - protein, 301 aa, Artificial Sequence
  Synthetic polypeptide
MMGIGKNTTSKSMEAGSSTEGKYEDEAKHPAFFTLPVVINGGATSSGEQDNEDTELMAIYTTENGIAEKSSLAETLDSTGSLDPQRSDMIYTIEDVPPWYLCIFLGLQHYLTCFSGTIAVPFLLADAMCVGYDQWATSQLIGTIFFCVGITTLLQTTFGCRTIFLVLLFSQYARNVKFPLPIYKSKKGWTAYKLQLFKMFPIILAILVSWLLCFIFTVTDVFPPDSTKYGFYARTDARQGVLLVAPWFKVPYPCRARRDMPVTPALWGGRGRRITRGQEFKTSLANMVKPHLYKNTKMSQA

SEQ ID NO: 11851 - protein, 172 aa, Artificial Sequence
  Synthetic polypeptide
  misc_feature (1)..(1): Xaa can be any naturally occurring amino acid
XGYDQWATSQLIGTIFFCVGITTLLQTTFGCRTIFLVLLFSQYARNVKFPLPIYKSKKGWTAYKLQLFKMFPIILAILVSWLLCFIFTVTDVFPPDSTKYGFYARTDARQGVLLVAPWFKVPYPCRARRDMPVTPALWGGRGRRITRGQEFKTSLANMVKPHLYKNTKMSQA

SEQ ID NO: 11852 - protein, 66 aa, Artificial Sequence
  Synthetic polypeptide
MALRELKVCLLGDTGVGKSSIVWRFVEDSFDPNINPTIGSCHLIISCMRRGTVSEMTTDSCILSPQ

SEQ ID NO: 11853 - protein, 98 aa, Artificial Sequence
  Synthetic polypeptide
MALRELKVCLLGDTGVGKSSIVWRFVEDSFDPNINPTIGASFMTKTVQYQNELHKFLIWDTAGQERTVSSLRARTAFISLLSAPWHMVLMPIGLCLLI

SEQ ID NO: 11854 - protein, 70 aa, Artificial Sequence
  Synthetic polypeptide
MALRELKVCLLGDTGVGKSSIVWRFVEDSFDPNINPTIGASFMTKTVQYQNELHKFLIWDTAGQERVYVY

SEQ ID NO: 11855 - protein, 779 aa, Artificial Sequence
  Synthetic polypeptide
MAMRSGRHPSLLLLLVLLLWLLQVSIIDSVQQETDDLTKQTKEKIYQPLRRSKRRWVITTLELEEEDPGPFPKLIGELFNNMSYNMSLMYLISGPGVDEYPEIGLFSLEDHENGRIYVHRPVDREMTPSFTVYFDVVERSTGKIVDTSLIFNIRISDVNDHAPQFPEKEFNITVQENQSAGQPIFQMLAVDLDEENTPNSQVLYFLISQTPLLKESGFRVDRLSGEIRLSGCLDYETAPQFTLLIRARDCGEPSLSSTTTVHVDVQEGNNHRPAFTQENYKVQIPEGRASQGVLRLLVQDRDSPFTSAWRAKFNILHGNEEGHFDISTDPETNEGILNVIKPLDYETRPAQSLIIVVENEERLVFCERGKLQPPRKAAASATVSVQVTDANDPPAFHPQSFIVNKEEGARPGTLLGTFNAMDPDSQIRYELVHDPANWVSVDKNSGVVITVEPIDRESPHVNNSFYVIIIHAVDDGFPPQTATGTLMLFLSDINDNVPTLRPRSRYMEVCESAVHEPLHIEAEDPDLEPFSDPFTFELDNTWGNAEDTWKLGRNWGQSVELLTLRSLPRGNYLVPLFIGDKQGLSQKQTVHVRICPCASGLTCVELADAEVGLHVGALFPVCAAFVALAVALLFLLRCYFVLEPKRHGCSVSNDEGHQTLVMYNAESKGTSAQTWSDVEGQRPALLICTAAAGPTQGVKDLEEVPPSAASQSAQARCALGSWGYGKPFEPRSVKNIHSTPARAPWLTSVIPALWEAEAGVSRDQEIETILANMVKPCLY

SEQ ID NO: 11856 - protein, 112 aa, Artificial Sequence
  Synthetic polypeptide
MKPLIWTWSDVEGQRPALLICTAAAGPTQGVKDLEEVPPSAASQSAQARCALGSWGYGKPFEPRSVKNIHSTPARAPWLTSVIPALWEAEAGVSRDQEIETILANMVKPCLY

SEQ ID NO: 11857 - protein, 89 aa, Artificial Sequence
  Synthetic polypeptide
MKPLIWTWSDVEGQRPALLICTAAAGPTQGVKGYGKPFEPRSVKNIHSTPARAPWLTSVIPALWEAEAGVSRDQEIETILANMVKPCLY

SEQ ID NO: 11858 - protein, 134 aa, Artificial Sequence
  Synthetic polypeptide
MNGEEEFFDAVTEANQKVTGMIDLDTSKNNRIGKTGERPSQENGIQKHRTSLPAPMFSRSDFSVWTILKKCVGLELSKITMPIAFNEPLSFLQRITEYMEHVYLIHRASCQPQPLERMQPGAVLHACNASYLGG

SEQ ID NO: 11859 - protein, 146 aa, Artificial Sequence
  Synthetic polypeptide
MNGEEEFFDAVTGFDSDNSSGEFSEANQKVTGMIDLDTSKNNRIGKTGERPSQENGIQKHRTSLPAPMFSRSDFSVWTILKKCVGLELSKITMPIAFNEPLSFLQRITEYMEHVYLIHRASCQPQPLERMQPGAVLHACNASYLGG

SEQ ID NO: 11860 - protein, 54 aa, Artificial Sequence
  Synthetic polypeptide
MPIAFNEPLSFLQRITEYMEHVYLIHRASCQPQPLERMQPGAVLHACNASYLGG

SEQ ID NO: 11861 - protein, 357 aa, Artificial Sequence
  Synthetic polypeptide
MNGEEEFFDAVTEANQKVTGMIDLDTSKNNRIGKTGERPSQENGIQKHRTSLPAPMFSRSDFSVWTILKKCVGLELSKITMPIAFNEPLSFLQRITEYMEHVYLIHRASCQPQPLERMQSVAAFAVSAVASQWERTGKPFNPLLGETYELIREDLGFRFISEQVSHHPPISAFHSEGLNHDFLFHGSIYPKLKFWGKSVEAEPRGTITLELLKHNEAYTWTNPTCCVHNVIIGKLWIEQYGTVEILNHRTGHKCVLHFKPCGLFGKELHKVEGHIQDKNKKKLFMIYGKWTECLWGIDPVSYESFKKQERRGDHLRKAKLLLGRLRQENLLNSGGRGCSDPRSHHCTPAWATERDSV

SEQ ID NO: 11862 - protein, 369 aa, Artificial Sequence
  Synthetic polypeptide
MNGEEEFFDAVTGFDSDNSSGEFSEANQKVTGMIDLDTSKNNRIGKTGERPSQENGIQKHRTSLPAPMFSRSDFSVWTILKKCVGLELSKITMPIAFNEPLSFLQRITEYMEHVYLIHRASCQPQPLERMQSVAAFAVSAVASQWERTGKPFNPLLGETYELIREDLGFRFISEQVSHHPPISAFHSEGLNHDFLFHGSIYPKLKFWGKSVEAEPRGTITLELLKHNEAYTWTNPTCCVHNVIIGKLWIEQYGTVEILNHRTGHKCVLHFKPCGLFGKELHKVEGHIQDKNKKKLFMIYGKWTECLWGIDPVSYESFKKQERRGDHLRKAKLLLGRLRQENLLNSGGRGCSDPRSHHCTPAWATERDSV

SEQ ID NO: 11863 - protein, 277 aa, Artificial Sequence
  Synthetic polypeptide
MPIAFNEPLSFLQRITEYMEHVYLIHRASCQPQPLERMQSVAAFAVSAVASQWERTGKPFNPLLGETYELIREDLGFRFISEQVSHHPPISAFHSEGLNHDFLFHGSIYPKLKFWGKSVEAEPRGTITLELLKHNEAYTWTNPTCCVHNVIIGKLWIEQYGTVEILNHRTGHKCVLHFKPCGLFGKELHKVEGHIQDKNKKKLFMIYGKWTECLWGIDPVSYESFKKQERRGDHLRKAKLLLGRLRQENLLNSGGRGCSDPRSHHCTPAWATERDSV

SEQ ID NO: 11864 - protein, 700 aa, Artificial Sequence
  Synthetic polypeptide
MPLHQLGDKPLTFPSPNSAMENGLDHTPPSRRASPGTPLSPGSLRSAAHSPLDTSKQPLCQLWAEKHGARGTHEVRYVSAGQSVACGWWAFAPPCLQVLNTPKGILFFLCAAAFLQGMTVNGFINTVITSLERRYDLHSYQSGLIASSYDIAACLCLTFVSYFGGSGHKPRWLGWGVLLMGTGSLVFALPHFTAGRYEVELDAGVRTCPANPGAVCADSTSGLSRYQLVFMLGQFLHGVGATPLYTLGVTYLDENVKSSCSPVYIAIFYTAAILGPAAGYLIGGALLNIYTEMGRRTELTTESPLWVGAWWVGFLGSGAAAFFTAVPILGYPRQLPGSQRYAVMRAAEMHQLKDSSRGEASNPDFGKTIRDLPLSIWLLLKNPTFILLCLAGATEATLITGMSTFSPKFLESQFSLSASEAATLFGYLVVPAGGGGTFLGGFFVNKLRLRGSAVIKFCLFCTVVSLLGILVFSLHCPSVPMAGVTASYGGSLLPEGHLNLTAPCNAACSCQPEHYSPVCGSDGLMYFSLCHAGCPAATETNVDGQKVYRDCSCIPQNLSSGFGHATAGKCTSTCQRKPLLLVFIFVVIFFTFLSSIPALTATLRCVRDPQRSFALGIQWIVVRILGGIPGPIAFGWVIDKACLLWQDQCGQQGSCLVYQNSAMSRYILIMGLLYKFQLPEVHHSLNVLNRKFQKQTVHNL

SEQ ID NO: 11865 - protein, 129 aa, Artificial Sequence
  Synthetic polypeptide
TTALCAARTASCTSHCATQGALQPRRRMWTARRCVRDPQRSFALGIQWIVVRILGGIPGPIAFGWVIDKACLLWQDQCGQQGSCLVYQNSAMSRYILIMGLLYKFQLPEVHHSLNVLNRKFQKQTVHNL

SEQ ID NO: 11866 - protein, 683 aa, Artificial Sequence; identical to SEQ ID NO: 195
  Synthetic polypeptide

SEQ ID NO: 11867 - protein, 112 aa, Artificial Sequence; identical to SEQ ID NO: 1122
  Synthetic polypeptide

SEQ ID NO: 11868 - protein, 688 aa, Artificial Sequence
  Synthetic polypeptide
MPLHQLGDKPLTFPSPNSAMENGLDHTPPSRRASPGTPLSPGSLRSAAHSPLDTSKQPLCQLWAEKHGARGTHEVRYVSAGQSVACGWWAFAPPCLQVLNTPKGILFFLCAAAFLQGMTVNGFINTVITSLERRYDLHSYQSGLIASSYDIAACLCLTFVSYFGGSGHKPRWLGWGVLLMGTGSLVFALPHFTAGRYEVELDAGVRTCPANPGAVCADSTSGLSRYQLVFMLGQFLHGVGATPLYTLGVTYLDENVKSSCSPVYIAIFYTAAILGPAAGYLIGGALLNIYTEMGRRTELTTESPLWVGAWWVGFLGSGAAAFFTAVPILGYPRQLPGSQRYAVMRAAEMHQLKDSSRGEASNPDFGKTIRDLPLSIWLLLKNPTFILLCLAGATEATLITGMSTFSPKFLESQFSLSASEAATLFGYLVVPAGGGGTFLGGFFVNKLRLRGSAVIKFCLFCTVVSLLGILVFSLHCPSVPMAGVTASYGGSLLPEGHLNLTAPCNAACSCQPEHYSPVCGSDGLMYFSLCHAGCPAATETNVDGQKVYRDCSCIPQNLSSGFGHATAGKCTSTCQRKPLLLVFIFVVIFFTFLSSIPALTATLRCVRDPQRSFALGIQWIVVRILGGIPGPIAFGWVIDKACLLWQDQCGQQGSCLVYQNSAMSRYILIMGLLYKAPLLRIHPTLDGK

SEQ ID NO: 11869 - protein, 117 aa, Artificial Sequence
  Synthetic polypeptide
TTALCAARTASCTSHCATQGALQPRRRMWTARRCVRDPQRSFALGIQWIVVRILGGIPGPIAFGWVIDKACLLWQDQCGQQGSCLVYQNSAMSRYILIMGLLYKAPLLRIHPTLDGK

SEQ ID NO: 11870 - protein, 724 aa, Artificial Sequence
  Synthetic polypeptide
MPLHQLGDKPLTFPSPNSAMENGLDHTPPSRRASPGTPLSPGSLRSAAHSPLDTSKQPLCQLWAEKHGARGTHEVRYVSAGQSVACGWWAFAPPCLQVLNTPKGILFFLCAAAFLQGMTVNGFINTVITSLERRYDLHSYQSGLIASSYDIAACLCLTFVSYFGGSGHKPRWLGWGVLLMGTGSLVFALPHFTAGRYEVELDAGVRTCPANPGAVCADSTSGLSRYQLVFMLGQFLHGVGATPLYTLGVTYLDENVKSSCSPVYIAIFYTAAILGPAAGYLIGGALLNIYTEMGRRTELTTESPLWVGAWWVGFLGSGAAAFFTAVPILGYPRQLPGSQRYAVMRAAEMHQLKDSSRGEASNPDFGKTIRDLPLSIWLLLKNPTFILLCLAGATEATLITGMSTFSPKFLESQFSLSASEAATLFGYLVVPAGGGGTFLGGFFVNKLRLRGSAVIKFCLFCTVVSLLGILVFSLHCPSVPMAGVTASYGGSLLPEGHLNLTAPCNAACSCQPEHYSPVCGSDGLMYFSLCHAGCPAATETNVDGQKVYRDCSCIPQNLSSGFGHATAGKCTSTCQRKPLLLVFIFVVIFFTFLSSIPALTATLRCVRDPQRSFALGIQWIVVRILGGIPGPIAFGWVIDKACLLWQDQCGQQGSCLVYQNSAMSRYILIMGLLYKKTAVCRPRKGPSLGAQPCSWASGLQNVGKARPLFEPPSYGSVMAAELTE

SEQ ID NO: 11871 - protein, 153 aa, Artificial Sequence
  Synthetic polypeptide
TTALCAARTASCTSHCATQGALQPRRRMWTARRCVRDPQRSFALGIQWIVVRILGGIPGPIAFGWVIDKACLLWQDQCGQQGSCLVYQNSAMSRYILIMGLLYKKTAVCRPRKGPSLGAQPCSWASGLQNVGKARPLFEPPSYGSVMAAELTE

SEQ ID NO: 11872 - protein, 287 aa, Artificial Sequence
  Synthetic polypeptide
MRLNSSAPGTPGTPAADPFQRAQAGLEEALLAPGFGNASGNASERVLAAPSSELDVNTDIYSKVLVTAVYLALFVVGTVGNTVTAFTLARKKSLQSLQSTVHYHLGSLALSDLLTLLLAMPVELYNFIWVHHPWAFGDAGCRGYYFLRDACTYATALNVASLSVERYLAICHPFKAKTLMSRSRTKKFISAIWLASALLAVPMLFTMGEQNRSADGQHAGGLVCTPTIHTATVKVVIQKRLAFALLSLTPSCCPVKKVPASPSTMIVGLLRLPQPCRTVSQFNLFPL

SEQ ID NO: 11873 - protein, 338 aa, Artificial Sequence
  Synthetic polypeptide
MRLNSSAPGTPGTPAADPFQRAQAGLEEALLAPGFGNASGNASERVLAAPSSELDVNTDIYSKVLVTAVYLALFVVGTVGNTVTAFTLARKKSLQSLQSTVHYHLGSLALSDLLTLLLAMPVELYNFIWVHHPWAFGDAGCRGYYFLRDACTYATALNVASLSVERYLAICHPFKAKTLMSRSRTKKFISAIWLASALLAVPMLFTMGEQNRSADGQHAGGLVCTPTIHTATVKVVIQVNTFMSFIFPMVVISVLNTIIANKLTVMVRQAAEQGQVCTVGGEHSTFSMAIEPGRVQALRHGVRVLRAVVIAFVVCWLPYHVRRLMFCYISDEQWTPPG

SEQ ID NO: 11874 - protein, 418 aa, Artificial Sequence; identical to SEQ ID NO: 484
  Synthetic polypeptide

SEQ ID NO: 11875 - protein, 460 aa, Artificial Sequence
  Synthetic polypeptide
MLLKCLHNNLCQKYSAHAFQFSPRNVLWLLVVCLRSDNKRPCLEFSQLSVKDSFRDLFIPRIETILMMYTRNNLNCAEPLFEQNNSLNVNFNTQKKTVWLIHGYRPVGSIPLWLQNFVRILLNEEDMNVIVVDWSRGATTFIYNRAVKNTRKVAVSLSVHIKNLLKHGASLDNFHFIGVSLGAHISGFVGKIFHGQLGRITGLDPAGPRFSRKPPYSRLDYTDAKFVDVIHSDSNGLGIQEPLGHIDFYPNGGNKQPGCPKSIFSGIQFIKCNHQRAVHLFMASLETNCNFISFPCRSYKDYKTSLCVDCDCFKEKSCPRLGYQAKLFKGVLKERMEGRPLRTTVFLDTSGTYPFCTYYFVLSIIVPDKTMMDGSFSFKLLNQLGMIEEPRLYELQKTRIEVWEPPPRFQRVCGNAWSSKWKSGAGAEPSWRTSARAVWKGNVGLEPYTEFPLGHCLVEL

SEQ ID NO: 11876 - protein, 439 aa, Artificial Sequence
  Synthetic polypeptide
MRVYIFLCLMCWVRSDNKRPCLEFSQLSVKDSFRDLFIPRIETILMMYTRNNLNCAEPLFEQNNSLNVNFNTQKKTVWLIHGYRPVGSIPLWLQNFVRILLNEEDMNVIVVDWSRGATTFIYNRAVKNTRKVAVSLSVHIKNLLKHGASLDNFHFIGVSLGAHISGFVGKIFHGQLGRITGLDPAGPRFSRKPPYSRLDYTDAKFVDVIHSDSNGLGIQEPLGHIDFYPNGGNKQPGCPKSIFSGIQFIKCNHQRAVHLFMASLETNCNFISFPCRSYKDYKTSLCVDCDCFKEKSCPRLGYQAKLFKGVLKERMEGRPLRTTVFLDTSGTYPFCTYYFVLSIIVPDKTMMDGSFSFKLLNQLGMIEEPRLYELQKTRIEVWEPPPRFQRVCGNAWSSKWKSGAGAEPSWRTSARAVWKGNVGLEPYTEFPLGHCLVEL

SEQ ID NO: 11877 - protein, 206 aa, Artificial Sequence; identical to SEQ ID NO: 849
  Synthetic polypeptide

SEQ ID NO: 11878 - protein, 307 aa, Artificial Sequence; identical to SEQ ID NO: 663
  Synthetic polypeptide

SEQ ID NO: 11879 - protein, 348 aa, Artificial Sequence; identical to SEQ ID NO: 611
  Synthetic polypeptide

SEQ ID NO: 11880 - protein, 258 aa, Artificial Sequence; identical to SEQ ID NO: 765
  Synthetic polypeptide

SEQ ID NO: 11881 - protein, 29 aa, Artificial Sequence
  Synthetic polypeptide
MSLLLSFYLLGLLVSSGQELFEEYHDGEI

SEQ ID NO: 11882 - protein, 398 aa, Artificial Sequence
  Synthetic polypeptide
MSLLLSFYLLGLLVSSGQALLQVTISLSKVELSVGESKFFTCTAIGEPESIDWYNPQGEKIISTQRVVVQKEGVRSRLTIYNANIEDAGIYRCQATDAKGQTQEATVVLEIYQKLTFREVVSPQEFKQGEDAEVVCRVSSSPAPAVSWLYHNEEVTTISDNRFAMLANNNLQILNINKSDEGIYRCEGRVEARGEIDFRDIIVIVNVPPAISMPQKSFNATAERGEEMTFSCRASGSPEPAISWFRNGKLIEENEKYILKGSNTELTVRNIINSDGGPYVCRATNKAGEDEKQAFLQVFVQPHIIQLKNETTYENGQVTLVCDAEGEPIPEITWKRAVDGFTFTEGDKSLDGRIEVKGQHGSSSLHIKDVKLSDSGRYDCEAASRIGGHQKSMYLDIE

SEQ ID NO: 11883 - protein, 256 aa, Artificial Sequence
  Synthetic polypeptide
MSLLLSFYLLGLLVSSGQDRFAMLANNNLQILNINKSDEGIYRCEGRVEARGEIDFRDIIVIVNVPPAISMPQKSFNATAERGEEMTFSCRASGSPEPAISWFRNGKLIEENEKYILKGSNTELTVRNIINSDGGPYVCRATNKAGEDEKQAFLQVFVQPHIIQLKNETTYENGQVTLVCDAEGEPIPEITWKRAVDGFTFTEGDKSLDGRIEVKGQHGSSSLHIKDVKLSDSGRYDCEAASRIGGHQKSMYLDIE

SEQ ID NO: 11884 - protein, 423 aa, Artificial Sequence
  Synthetic polypeptide
MVRSDSGGQVYLDYHNRQGLFVDWKYNEALYLEEGQPETYYRTALLQVTISLSKVELSVGESKFFTCTAIGEPESIDWYNPQGEKIISTQRVVVQKEGVRSRLTIYNANIEDAGIYRCQATDAKGQTQEATVVLEIYQKLTFREVVSPQEFKQGEDAEVVCRVSSSPAPAVSWLYHNEEVTTISDNRFAMLANNNLQILNINKSDEGIYRCEGRVEARGEIDFRDIIVIVNVPPAISMPQKSFNATAERGEEMTFSCRASGSPEPAISWFRNGKLIEENEKYILKGSNTELTVRNIINSDGGPYVCRATNKAGEDEKQAFLQVFVQPHIIQLKNETTYENGQVTLVCDAEGEPIPEITWKRAVDGFTFTEGDKSLDGRIEVKGQHGSSSLHIKDVKLSDSGRYDCEAASRIGGHQKSMYLDIE

SEQ ID NO: 11885 - protein, 398 aa, Artificial Sequence; identical to SEQ ID NO: 11882
  Synthetic polypeptide

SEQ ID NO: 11886 - protein, 256 aa, Artificial Sequence; identical to SEQ ID NO: 11883
  Synthetic polypeptide

SEQ ID NO: 11887 - protein, 423 aa, Artificial Sequence; identical to SEQ ID NO: 11884
  Synthetic polypeptide

SEQ ID NO: 11888 - protein, 286 aa, Artificial Sequence
  Synthetic polypeptide
MDQLEDLLVLFINYVPTDGNAGLLAEPQIAMFCGRLNMHMNVQNGKWDSDPSGTKTCIDTKEGILQYCQEVYPELQITNVVEANQPVTIQNWCKRGRKQCKTHPHFVIPYRCLVGEFVSDALLVPDKCKFLHQERMDVCETHLHWHTVAKETCSEKSTNLHDYGMLLPCGIDKFRGVEFVCCPLAEESDNVDSADAEEDDSDVWWGGADTDYADGSEDKVVEVAEEEEVAEVEEEEADDDEDDEDGDEVEEEAEEPYEEATERTTSIATTTTTTTESVEEVVRAKT

SEQ ID NO: 11889 - protein, 256 aa, Artificial Sequence
  Synthetic polypeptide
MFCGRLNMHMNVQNGKWDSDPSGTKTCIDTKEGILQYCQEVYPELQITNVVEANQPVTIQNWCKRGRKQCKTHPHFVIPYRCLVGEFVSDALLVPDKCKFLHQERMDVCETHLHWHTVAKETCSEKSTNLHDYGMLLPCGIDKFRGVEFVCCPLAEESDNVDSADAEEDDSDVWWGGADTDYADGSEDKVVEVAEEEEVAEVEEEEADDDEDDEDGDEVEEEAEEPYEEATERTTSIATTTTTTTESVEEVVRAKT

SEQ ID NO: 11890 - protein, 291 aa, Artificial Sequence
  Synthetic polypeptide
MLPGLALLLLAAWTARALEVPTDGNAGLLAEPQIAMFCGRLNMHMNVQNGKWDSDPSGTKTCIDTKEGILQYCQEVYPELQITNVVEANQPVTIQNWCKRGRKQCKTHPHFVIPYRCLVGEFVSDALLVPDKCKFLHQERMDVCETHLHWHTVAKETCSEKSTNLHDYGMLLPCGIDKFRGVEFVCCPLAEESDNVDSADAEEDDSDVWWGGADTDYADGSEDKVVEVAEEEEVAEVEEEEADDDEDDEDGDEVEEEAEEPYEEATERTTSIATTTTTTTESVEEVVRAKT

SEQ ID NO: 11891 - protein, 235 aa, Artificial Sequence
  Synthetic polypeptide
MLPGLALLLLAAWTARALEVYPELQITNVVEANQPVTIQNWCKRGRKQCKTHPHFVIPYRCLVGEFVSDALLVPDKCKFLHQERMDVCETHLHWHTVAKETCSEKSTNLHDYGMLLPCGIDKFRGVEFVCCPLAEESDNVDSADAEEDDSDVWWGGADTDYADGSEDKVVEVAEEEEVAEVEEEEADDDEDDEDGDEVEEEAEEPYEEATERTTSIATTTTTTTESVEEVVRAKT

SEQ ID NO: 11892 - protein, 82 aa, Artificial Sequence
  Synthetic polypeptide
  misc_feature (1)..(1): Xaa can be any naturally occurring amino acid
XGGADTDYADGSEDKVVEVAEEEEVAEVEEEEADDDEDDEDGDEVEEEAEEPYEEATERTTSIATTTTTTTESVEEVVRAKT

SEQ ID NO: 11893 - protein, 213 aa, Artificial Sequence
  Synthetic polypeptide
  misc_feature (1)..(1): Xaa can be any naturally occurring amino acid
XLQITNVVEANQPVTIQNWCKRGRKQCKTHPHFVIPYRCLVGEFVSDALLVPDKCKFLHQERMDVCETHLHWHTVAKETCSEKSTNLHDYGMLLPCGIDKFRGVEFVCCPLAEESDNVDSADAEEDDSDVWWGGADTDYADGSEDKVVEVAEEEEVAEVEEEEADDDEDDEDGDEVEEEAEEPYEEATERTTSIATTTTTTTESVEEVVRAKT

SEQ ID NO: 11894 - protein, 223 aa, Artificial Sequence
  Synthetic polypeptide
MDQLEDLLVLFINYVPTDGNAGLLAEPQIAMFCGRLNMHMNVQNGKWDSDPSGTKTCIDTKEGILQYCQEVYPELQITNVVEANQPVTIQNWCKRGRKQCKTHPHFVIPYRCLVGEFVSDALLVPDKCKFLHQERMDVCETHLHWHTVAKETCSEKSTNLHDYGMLLPCGIDKFRGVEFVCCPLAEESDNVDSADAEEDDSDVWWGGADTDYADGRNAFHLPP

SEQ ID NO: 11895 - protein, 193 aa, Artificial Sequence
  Synthetic polypeptide
MFCGRLNMHMNVQNGKWDSDPSGTKTCIDTKEGILQYCQEVYPELQITNVVEANQPVTIQNWCKRGRKQCKTHPHFVIPYRCLVGEFVSDALLVPDKCKFLHQERMDVCETHLHWHTVAKETCSEKSTNLHDYGMLLPCGIDKFRGVEFVCCPLAEESDNVDSADAEEDDSDVWWGGADTDYADGRNAFHLPP

SEQ ID NO: 11896 - protein, 228 aa, Artificial Sequence
  Synthetic polypeptide
MLPGLALLLLAAWTARALEVPTDGNAGLLAEPQIAMFCGRLNMHMNVQNGKWDSDPSGTKTCIDTKEGILQYCQEVYPELQITNVVEANQPVTIQNWCKRGRKQCKTHPHFVIPYRCLVGEFVSDALLVPDKCKFLHQERMDVCETHLHWHTVAKETCSEKSTNLHDYGMLLPCGIDKFRGVEFVCCPLAEESDNVDSADAEEDDSDVWWGGADTDYADGRNAFHLPP

SEQ ID NO: 11897 - protein, 172 aa, Artificial Sequence
  Synthetic polypeptide
MLPGLALLLLAAWTARALEVYPELQITNVVEANQPVTIQNWCKRGRKQCKTHPHFVIPYRCLVGEFVSDALLVPDKCKFLHQERMDVCETHLHWHTVAKETCSEKSTNLHDYGMLLPCGIDKFRGVEFVCCPLAEESDNVDSADAEEDDSDVWWGGADTDYADGRNAFHLPP

SEQ ID NO: 11898 - protein, 19 aa, Artificial Sequence
  Synthetic polypeptide
  misc_feature (1)..(1): Xaa can be any naturally occurring amino acid
XGGADTDYADGRNAFHLPP

SEQ ID NO: 11899 - protein, 150 aa, Artificial Sequence
  Synthetic polypeptide
  misc_feature (1)..(1): Xaa can be any naturally occurring amino acid
XLQITNVVEANQPVTIQNWCKRGRKQCKTHPHFVIPYRCLVGEFVSDALLVPDKCKFLHQERMDVCETHLHWHTVAKETCSEKSTNLHDYGMLLPCGIDKFRGVEFVCCPLAEESDNVDSADAEEDDSDVWWGGADTDYADGRNAFHLPP

SEQ ID NO: 11900 - protein, 197 aa, Artificial Sequence
  Synthetic polypeptide
MDNWIKLSGCQNITSTKCNFSSLKLNVYEEIKLRIRAEKENTSSWYEVDSFTPFRKAQIGPPEVHLEAEDKAIVIHISPGTKDSVMWALDGLSFTYSLVIWKNSSGVEERIENIYSRHKIYKLSPETTYCLKVKAALLTSWKIGVYSPVHCIKTTVENELPPPENIEVSVQNQNYVLKWDYTYANMTFQVQWLQRPR

SEQ ID NO: 11901 - protein, 266 aa, Artificial Sequence
  Synthetic polypeptide
MMVVLLGATTLVLVAVAPWVLSAAAGGKNLKSPQKVEVDIIDDNFILRWNRSDESVGNVTFSFDYQKTGMDNWIKLSGCQNITSTKCNFSSLKLNVYEEIKLRIRAEKENTSSWYEVDSFTPFRKAQIGPPEVHLEAEDKAIVIHISPGTKDSVMWALDGLSFTYSLVIWKNSSGVEERIENIYSRHKIYKLSPETTYCLKVKAALLTSWKIGVYSPVHCIKTTVENELPPPENIEVSVQNQNYVLKWDYTYANMTFQVQWLQRPR

SEQ ID NO: 11902 - protein, 118 aa, Artificial Sequence
  Synthetic polypeptide
MGALARALLLPLLAQWLLRAAPELAPAPFTLPLRVAAATNRVVAPTPGPGTPAERHADGLALALEPALASPAGAANFLAMVDNLQGDSGRGYYLEMLIGTPPQKQLKHSPARRSARFK

SEQ ID NO: 11903 - protein, 117 aa, Artificial Sequence
  Synthetic polypeptide
MGALARALLLPLLAQWLLRAAPELAPAPFTLPLRVAAATNRVVAPTPGPGTPAERHADGLALALEPALASPAGAANFLAMVDNLQGDSGRGYYLEMLIGTPPQKLKHSPARRSARFK

SEQ ID NO: 11904 - protein, 385 aa, Artificial Sequence; identical to SEQ ID NO: 560
  Synthetic polypeptide

SEQ ID NO: 11905 - protein, 244 aa, Artificial Sequence
  Synthetic polypeptide
MRLGSPGLLFLLFSSLRAANFSVPVVSAPHSPSQDELTFTCTSINGYPRPNVYWINKTDNSLLDQALQNDTVFLNMRGLYDVVSVLRIARTPSVNIGCCIENVLLQQNLTVGSQTGNDIGERDKITENPVSTGEKNAATWSILAVLCLLVVVAVAIGWVCRDRCLQHSYAGAWAVSPETELTVSRHGFEQTTDVLPFILKSSLGASCEPTAFPLPPAAPGPCAHLFIWMLAECTPCSPVWSSIS

SEQ ID NO: 11906 - protein, 361 aa, Artificial Sequence
  Synthetic polypeptide
MRLGSPGLLFLLFSSLRADTQEKEVRAMVGSDVELSCACPEGSRFDLNDVYVYWQTSESKTVVTYHIPQNSSLENVDSRYRNRALMSPAGMLRGDFSLRLFNVTPQDEQKFHCLVLSQSLGFQEVLSVEVTLHVAANFSVPVVSAPHSPSQDELTFTCTSINGYPRPNVYWINKTDNSLLDQALQNDTVFLNMRGLYDVVSVLRIARTPSVNIGCCIENVLLQQNLTVGSQTGNDIGERDKITENPVSTGEKNAATWSILAVLCLLVVVAVAIGWVCRDRCLQHSYAGAWAVSPETELTVSRHGFEQTTDVLPFILKSSLGASCEPTAFPLPPAAPGPCAHLFIWMLAECTPCSPVWSSIS

SEQ ID NO: 11907 - protein, 407 aa, Artificial Sequence
  Synthetic polypeptide
MEPSALRKAGSEQEEGFEGLPRRVTDLGMVSNLRRSNSSLFKSWRLQCPFGNNDKQESLSSWIPENIKKKECVYFVESSKLSDAGKVVCQCGYTHEQHLEEATKPHTFQGTQWDPKKHVQEMPTDAFGDIVFTGLSQKVKKYVRVSQDTPSSVIYHLMTQHWGLDVPNLLISVTGGAKNFNMKPRLKSIFRRGLVKVAQTTGAWIITGGSHTGVMKQVGEAVRDFSLSSSYKEGELITIGVATWGTVHRREGLIHPTGSFPAEYILDEDGQGNLTCLDSNHSHFILVDDGTHGQYGVEIPLRTRLEKFISEQTKERGGVAIKIPIVCVVLEGGPGTLHTIDNATTNGTPCVVVEGSGRVADVIAQVANLPVSDITISLIQQKLSVFFQEMFETFTESRIVEWTKKGY

SEQ ID NO: 11908 - protein, 476 aa, Artificial Sequence
  Synthetic polypeptide
MEPSALRKAGSEQEEGFEGLPRRVTDLGMVSNLRRSNSSLFKSWRLQCPFGNNDKQESLSSWIPENIKKKECVYFVESSKLSDAGKVVCQCGYTHEQHLEEATKPHTFQGTQWDPKKHVQEMPTDAFGDIVFTGLSQKVKKYVRVSQDTPSSVIYHLMTQHWGLDVPNLLISVTGGAKNFNMKPRLKSIFRRGLVKVAQTTGAWIITGGSHTGVMKQVGEAVRDFSLSSSYKEGELITIGVATWGTVHRREGLIHPTGSFPAEYILDEDGQGNLTCLDSNHSHFILVDDGTHGQYGVEIPLRTRLEKFISEQTKERGGVAIKIPIVCVVLEGGPGTLHTIDNATTNGTPCVVVEGSGRVADVIAQVANLPVSDITISLIQQKLSVFFQEMFETFTESRIVEWTKKIQDIVRRRQLLTVFREGKDGQQDVDVAILQALLKEIEKPILKFMWSLKGSQTAKIILKGKNKAGRLTLSDF

SEQ ID NO: 11909 - protein, 740 aa, Artificial Sequence
  Synthetic polypeptide
MADRGCPLEAAPLPAEVRESLAELELELSEDVHTEAVQAALAKYKERKMPMPSKRRSVLVHSSVETYTPPDTSSASEDEGSLRRPGRLTSTPLQSHSSVEPWLDRVIQGSSTSSSASSTSSHPGGRPTTAPSAAATPGAAATTALAGLEAHTHIDLHSAPPDVTTGLVEHSYFERPQVASVRSVPRGCSGSMLETADGVPVNSRVSSKIQQLLNTLKRPKRPPLKEFFVDDFEELLEVQQPDPNQPKPEGSETSVLRGEPLTAGVPRPPSLLATLQRWGTTQPKSPCLTALDTTGKAVYTLTYGKLWSRSLKLAYTLLNKLTSKNEPLLKPGDRVALVFPNSDPVMFMVAFYGCLLAELVPVPIEVPLTRKDAGSQQVGFLLGSCGVFLALTTDACQKGLPKAQTGEVAAFKGWPPLSWLVIDGKHLAKPPKDWHPLAQDTGTGTAYIEYKTSKEGSTVGVTVSHASLLAQCRALTQACGYSEAETLTNVLDFKRDAGLWHGVLTSVMNRMHVVSVPYALMKANPLSWIQKVCFYKARAALVKSRDMHWSLLAQRGQRDVSLSSLRMLIVADGANPWSISSCDAFLNVFQSRGLRPEVICPCASSPEALTVAIRRPPDLGGPPPRKAVLSMNGLSYGVIRVDTEEKLSVLTVQDVGQVMPGANVCVVKLEGTPYLCKTDEVGEICVSSSATGTAYYGLLGITKNVFEAVPVTTGGAPIFDRPFTRTGLLGFIGPGTSGNF

SEQ ID NO: 11910 - protein, 805 aa, Artificial Sequence
  Synthetic polypeptide
MADRGCPLEAAPLPAEVRESLAELELELSEGDITQKGYEKKRAKLLARYIPLIQGIDPSLQAENRIPGPSQTTAAAPKQQKSRPTASRDERFRSDVHTEAVQAALAKYKERKMPMPSKRRSVLVHSSVETYTPPDTSSASEDEGSLRRPGRLTSTPLQSHSSVEPWLDRVIQGSSTSSSASSTSSHPGGRPTTAPSAAATPGAAATTALAGLEAHTHIADLHSAPPDVTTGLVEHSYFERPQVASVRSVPRGCSGSMLETADGVPVNSRVSSKIQQLLNTLKRPKRPPLKEFFVDDFEELLEVQQPDPNQPKPEGSETSVLRGEPLTAGVPRPPSLLATLQRWGTTQPKSPCLTALDTTGKAVYTLTYGKLWSRSLKLAYTLLNKLTSKNEPLLKPGDRVALVFPNSDPVMFMVAFYGCLLAELVPVPIEVPLTRKDAGSQQVGFLLGSCGVFLALTTDACQKGLPKAQTGEVAAFKGWPPLSWLVIDGKHLAKPPKDWHPLAQDTGTGTAYIEYKTSKEGSTVGVTVSHASLLAQCRALTQACGYSEAETLTNVLDFKRDAGLWHGVLTSVMNRMHVVSVPYALMKANPLSWIQKVCFYKARAALVKSRDMHWSLLAQRGQRDVSLSSLRMLIVADGANPWSISSCDAFLNVFQSRGLRPEVICPCASSPEALTVAIRRPPDLGGPPPRKAVLSMNGLSYGVIRVDTEEKLSVLTVQDVGQVMPGANVCVVKLEGTPYLCKTDEVGEICVSSSATGTAYYGLLGITKNVFEAVPVTTGGAPIFDRPFTRTGLLGFIGPGTSGNF

SEQ ID NO: 11911 - protein, 800 aa, Artificial Sequence
  Synthetic polypeptide
MADRGCPLEAAPLPAEVRESLAELELELSEGDITQKGYEKKRAKLLARYIPLIQGIDPSLQAENRIPGPSQTTAAAPKQQKSRPTASRDERFRSDVHTEAVQAALAKYKERKMPMPSKRRSVLVHSSVETYTPPDTSSASEDEGSLRRPGRLTSTPLQSHSSVEPWLDRVIQGSSTSSSASSTSSHPGGRPTTAPSAAATPGAAATTALAGLEAHTHIDLHSAPPDVTTGLVEHSYFERPQVASVRSVPRGCSGSMLETADGVPVNSRVSSKIQQLLNTLKRPKRPPLKEFFVDDFEELLEDPNQPKPEGSETSVLRGEPLTAGVPRPPSLLATLQRWGTTQPKSPCLTALDTTGKAVYTLTYGKLWSRSLKLAYTLLNKLTSKNEPLLKPGDRVALVFPNSDPVMFMVAFYGCLLAELVPVPIEVPLTRKDAGSQQVGFLLGSCGVFLALTTDACQKGLPKAQTGEVAAFKGWPPLSWLVIDGKHLAKPPKDWHPLAQDTGTGTAYIEYKTSKEGSTVGVTVSHASLLAQCRALTQACGYSEAETLTNVLDFKRDAGLWHGVLTSVMNRMHVVSVPYALMKANPLSWIQKVCFYKARAALVKSRDMHWSLLAQRGQRDVSLSSLRMLIVADGANPWSISSCDAFLNVFQSRGLRPEVICPCASSPEALTVAIRRPPDLGGPPPRKAVLSMNGLSYGVIRVDTEEKLSVLTVQDVGQVMPGANVCVVKLEGTPYLCKTDEVGEICVSSSATGTAYYGLLGITKNVFEAVPVTTGGAPIFDRPFTRTGLLGFIGPGTSGNF

SEQ ID NO: 11912 - protein, 804 aa, Artificial Sequence
  Synthetic polypeptide
MADRGCPLEAAPLPAEVRESLAELELELSEGDITQKGYEKKRAKLLARYIPLIQGIDPSLQAENRIPGPSQTTAAAPKQQKSRPTASRDERFRSDVHTEAVQAALAKYKERKMPMPSKRRSVLVHSSVETYTPPDTSSASEDEGSLRRPGRLTSTPLQSHSSVEPWLDRVIQGSSTSSSASSTSSHPGGRPTTAPSAAATPGAAATTALAGLEAHTHIDLHSAPPDVTTGLVEHSYFERPQVASVRSVPRGCSGSMLETADGVPVNSRVSSKIQQLLNTLKRPKRPPLKEFFVDDFEELLEVQQPDPNQPKPEGSETSVLRGEPLTAGVPRPPSLLATLQRWGTTQPKSPCLTALDTTGKAVYTLTYGKLWSRSLKLAYTLLNKLTSKNEPLLKPGDRVALVFPNSDPVMFMVAFYGCLLAELVPVPIEVPLTRKDAGSQQVGFLLGSCGVFLALTTDACQKGLPKAQTGEVAAFKGWPPLSWLVIDGKHLAKPPKDWHPLAQDTGTGTAYIEYKTSKEGSTVGVTVSHASLLAQCRALTQACGYSEAETLTNVLDFKRDAGLWHGVLTSVMNRMHVVSVPYALMKANPLSWIQKVCFYKARAALVKSRDMHWSLLAQRGQRDVSLSSLRMLIVADGANPWSISSCDAFLNVFQSRGLRPEVICPCASSPEALTVAIRRPPDLGGPPPRKAVLSMNGLSYGVIRVDTEEKLSVLTVQDVGQVMPGANVCVVKLEGTPYLCKTDEVGEICVSSSATGTAYYGLLGITKNVFEAVPVTTGGAPIFDRPFTRTGLLGFIGPGTSGNF

SEQ ID NO: 11913 - protein, 761 aa, Artificial Sequence
  Synthetic polypeptide
MADRGCPLEAAPLPAEVRESLAELELELSEGDITQKGYEKKRAKLLARYIPLIQGIDPSLQAENRIPGPSQTTAAAPKQQKSRPTASRDERFRSDVHTEAVQAALAKYKERKMPMPSKRRSVLVHSSVETYTPPDTSSASEDEGSLRRPGRLTSTPLQSHSSVEPWLDRVIQGSSTSSSASSTSSHPGGRPTTAPSAAATPGAAATTALAGLEAHTHIGVPVNSRVSSKIQQLLNTLKRPKRPPLKEFFVDDFEELLEVQQPDPNQPKPEGSETSVLRGEPLTAGVPRPPSLLATLQRWGTTQPKSPCLTALDTTGKAVYTLTYGKLWSRSLKLAYTLLNKLTSKNEPLLKPGDRVALVFPNSDPVMFMVAFYGCLLAELVPVPIEVPLTRKDAGSQQVGFLLGSCGVFLALTTDACQKGLPKAQTGEVAAFKGWPPLSWLVIDGKHLAKPPKDWHPLAQDTGTGTAYIEYKTSKEGSTVGVTVSHASLLAQCRALTQACGYSEAETLTNVLDFKRDAGLWHGVLTSVMNRMHVVSVPYALMKANPLSWIQKVCFYKARAALVKSRDMHWSLLAQRGQRDVSLSSLRMLIVADGANPWSISSCDAFLNVFQSRGLRPEVICPCASSPEALTVAIRRPPDLGGPPPRKAVLSMNGLSYGVIRVDTEEKLSVLTVQDVGQVMPGANVCVVKLEGTPYLCKTDEVGEICVSSSATGTAYYGLLGITKNVFEAVPVTTGGAPIFDRPFTRTGLLGFIGPGTSGNF

SEQ ID NO: 11914 - protein, 1258 aa, Artificial Sequence
  Synthetic polypeptide
MAAAPARGGGGGGGGGGGCSGSGSSASRGFYFNTVLSLARSLAVQRPASLEKVQKLLCMCPVDFHGIFQLDERRRDAVIALGIFLIESDLQHKDCVVPYLLRLLKGLPKVYWVEESTARKGRGALPVAESFSFCLVTLLSDVAYRDPSLRDEILEVLLQVLHVLLGMCQALEIQDKEYLCKYAIPCLIGISRAFGRYSNMEESLLSKLFPKIPPHSLRVLEELEGVRRRSFNDFRSILPSNLLTVCQEGTLKRKTSSVSSISQVSPERGMPPPSSPGGSAFHYFEASCLPDGTALEPEYYFSTISSSFSVSPLFNGVTYKEFNIPLEMLRELLNLVKKIVEEAVLKSLDAIVASVMEANPSADLYYTSFSDPLYLTMFKMLRDTLYYMKDLPTSFVKEIHDFVLEQFNTSQGELQKILHDADRIHNELSPLKLRCQANAACVDLMVWAVKDEQGAENLCIKLSEKLQSKTSSKVIIAHLPLLICCLQGLGRLCERFPVVVHSVTPSLRDFLVIPSPVLVKLYKYHSQYHTVAGNDIKISVTNEHSESTLNVMSGKKSQPSMYEQLRDIAIDNICRCLKAGLTVDPVIVEAFLASLSNRLYISQESDKDAHLIPDHTIRALGHIAVALRDTPKVMEPILQILQQKFCQPPSPLDVLIIDQLGCLVITGNQYIYQEVWNLFQQISVKASSVVYSATKDYKDHGYRHCSLAVINALANIAANIQDEHLVDELLMNLLELFVQLGLEGKRASERASEKGPALKASSSAGNLGVLIPVIAVLTRRLPPIKEAKPRLQKLFRDFWLYSVLMGFAVEGSGLWPEEWYEGVCEIATKSPLLTFPSKEPLRSVLQYNSAMKNDTVTPAELSELRSTIINLLDPPPEVSALINKLDFAMSTYLLSVYRLEYMRVLRSTDPDRFQVMFCYFEDKAIQKDKSGMMQCVIAVADKVFDAFLNMMADKAKTKENEEELERHAQFLLVNFNHIHKRIRRVADKYLSGLVDKFPHLLWSGTVLKTMLDILQTLSLSLSADIHKDQPYYDIPDAPYRITVPDTYEARESIVKDFAARCGMILQEAMKWAPTVTKSHLQEYLNKHQNWVSGLSQHTGLAMATESILHFAGYNKQNTTLGATQLSERPACVKKDYSNFMASLNLRNRYAGEVYGMIRFSGTTGQMSDLNKMMVQDLHSALDRSHPQHYTQAMFKLTAMLISSKDCDPQLLHHLCWGPLRMFNEHGMETALACWEWLLAGKDGVEVPMTLSTSHHLHL

SEQ ID NO: 11915 - protein, 1200 aa, Artificial Sequence
  Synthetic polypeptide
MCPVDFHGIFQLDERRRDAVIALGIFLIESDLQHKDCVVPYLLRLLKGLPKVYWVEESTARKGRGALPVAESFSFCLVTLLSDVAYRDPSLRDEILEVLLQVLHVLLGMCQALEIQDKEYLCKYAIPCLIGISRAFGRYSNMEESLLSKLFPKIPPHSLRVLEELEGVRRRSFNDFRSILPSNLLTVCQEGTLKRKTSSVSSISQVSPERGMPPPSSPGGSAFHYFEASCLPDGTALEPEYYFSTISSSFSVSPLFNGVTYKEFNIPLEMLRELLNLVKKIVEEAVLKSLDAIVASVMEANPSADLYYTSFSDPLYLTMFKMLRDTLYYMKDLPTSFVKEIHDFVLEQFNTSQGELQKILHDADRIHNELSPLKLRCQANAACVDLMVWAVKDEQGAENLCIKLSEKLQSKTSSKVIIAHLPLLICCLQGLGRLCERFPVVVHSVTPSLRDFLVIPSPVLVKLYKYHSQYHTVAGNDIKISVTNEHSESTLNVMSGKKSQPSMYEQLRDIAIDNICRCLKAGLTVDPVIVEAFLASLSNRLYISQESDKDAHLIPDHTIRALGHIAVALRDTPKVMEPILQILQQKFCQPPSPLDVLIIDQLGCLVITGNQYIYQEVWNLFQQISVKASSVVYSATKDYKDHGYRHCSLAVINALANIAANIQDEHLVDELLMNLLELFVQLGLEGKRASERASEKGPALKASSSAGNLGVLIPVIAVLTRRLPPIKEAKPRLQKLFRDFWLYSVLMGFAVEGSGLWPEEWYEGVCEIATKSPLLTFPSKEPLRSVLQYNSAMKNDTVTPAELSELRSTIINLLDPPPEVSALINKLDFAMSTYLLSVYRLEYMRVLRSTDPDRFQVMFCYFEDKAIQKDKSGMMQCVIAVADKVFDAFLNMMADKAKTKENEEELERHAQFLLVNFNHIHKRIRRVADKYLSGLVDKFPHLLWSGTVLKTMLDILQTLSLSLSADIHKDQPYYDIPDAPYRITVPDTYEARESIVKDFAARCGMILQEAMKWAPTVTKSHLQEYLNKHQNWVSGLSQHTGLAMATESILHFAGYNKQNTTLGATQLSERPACVKKDYSNFMASLNLRNRYAGEVYGMIRFSGTTGQMSDLNKMMVQDLHSALDRSHPQHYTQAMFKLTAMLISSKDCDPQLLHHLCWGPLRMFNEHGMETALACWEWLLAGKDGVEVPMTLSTSHHLHL

SEQ ID NO: 11916 - protein, 356 aa, Artificial Sequence; identical to SEQ ID NO: 600
  Synthetic polypeptide

SEQ ID NO: 11917 - protein, 275 aa, Artificial Sequence
  Synthetic polypeptide
MDLCHPEPAELSSGETEELQRIKWHRKQLLEDIQKLKDEIADVFAQIDCFESAEESRMAQKEKELCIGRKKFNMDPAKGIQYFIEHKLLTPDVQDIARFLYKGEGLNKTAIGTYLGERDPINLQVLQAFVDCHEFANLNLVQALRQFLWSFRLPGEAQKIDRMMEAFATRYCLCNPGVFQSTDTCYVLSFSIIMLNTSLHNPNVRDRPPFERFVSMNRGINNGSDLPEDQLRNLFDSIKSEPFSIPEDDGNDLTHTFFNPDREGWLLKLEQCLAN

SEQ ID NO: 11918 - protein, 358 aa, Artificial Sequence [sequence omitted]

SEQ ID NO: 11919 - protein, 278 aa, Artificial Sequence
  Synthetic polypeptide
MDPVTQLYTMTSTLEYKTTKADIQMPFTCSVTYYGPSGQKTIHSEQAVFDIYYLDLSLNPSGEVTRQIGDALPVSCTISASRNATVVWMKDNIRLRSSPSFSSLHYQDAGNYVCETALQEVEGLKKRESLTLIVEGKPQIKMTKKTDPSGLSKTIICHVEGFPKPAIQWTITGSGSVINQTEESPYINGRYYSKIIISPEENVTLTCTAENQLERTVNSLNVSAISIPEHDEADEISDENREKVNDQAKLIVGIVVGLLLAALVAGVVYWLYMKKSNG

SEQ ID NO: 11920 - protein, 556 aa, Artificial Sequence
  Synthetic polypeptide
MESKGASSCRLLFCLLISATVFRPGLGWYTVNSAYGDTIIIPCRLDVPQNLMFGKWKYEKPDGSPVFIAFRSSTKKSVQYDDVPEYKDRLNLSENYTLSISNARISDEKRFVCMLVTEDNVFEAPTIVKVFKQPSKPEIVSKALFLETEQLKKLGDCISEDSYPDGNITWYRNGKVLHPLEGAVVIIFKKEMDPVTQLYTMTSTLEYKTTKADIQMPFTCSVTYYGPSGQKTIHSEQAVFDIYYPTEQVTIQVLPPKNAIKEGDNITLKCLGNGNPPPEEFLFYLPGQPEGIRSSNTYTLTDVRRNATGDYKCSLIDKKSMIASTAITVHYLDLSLNPSGEVTRQIGDALPVSCTISASRNATVVWMKDNIRLRSSPSFSSLHYQDAGNYVCETALQEVEGLKKRESLTLIVEGKPQIKMTKKTDPSGLSKTIICHVEGFPKPAIQWTITGSGSVINQTEESPYINGRYYSKIIISPEENVTLTCTAENQLERTVNSLNVSAISIPEHDEADEISDENREKVNDQAKLIVGIVVGLLLAALVAGVVYWLYMKKSNG

SEQ ID NO: 11921 - protein, 543 aa, Artificial Sequence
  Synthetic polypeptide
MESKGASSCRLLFCLLISATVFRPGLGWYTVNSAYGDTIIIPCRLDVPQNLMFGKWKYEKPDGSPVFIAFRSSTKKSVQYDDVPEYKDRLNLSENYTLSISNARISDEKRFVCMLVTEDNVFEAPTIVKVFKQPSKPEIVSKALFLETEQLKKLGDCISEDSYPDGNITWYRNGKVLHPLEGAVVIIFKKEMDPVTQLYTMTSTLEYKTTKADIQMPFTCSVTYYGPSGQKTIHSEQAVFDIYYPTEQVTIQVLPPKNAIKEGDNITLKCLGNGNPPPEEFLFYLPGQPEGIRSSNTYTLTDVRRNATGDYKCSLIDKKSMIASTAITVHYLDLSLNPSGEVTRQIGDALPVSCTISASRNATVVWMKDNIRLRSSPSFSSLHYQDAGNYVCETALQEVEGLKKRESLTLIVEGKPQIKMTKKTDPSGLSKTIICHVEGFPKPAIQWTITGSGSVINQTEESPYINGRYYSKIIISPEENVTLTCTAENQLERTVNSLNVSANENREKVNDQAKLIVGIVVGLLLAALVAGVVYWLYMKKSNG

SEQ ID NO: 11922 - protein, 505 aa, Artificial Sequence
  Synthetic polypeptide
MFGKWKYEKPDGSPVFIAFRSSTKKSVQYDDVPEYKDRLNLSENYTLSISNARISDEKRFVCMLVTEDNVFEAPTIVKVFKQPSKPEIVSKALFLETEQLKKLGDCISEDSYPDGNITWYRNGKVLHPLEGAVVIIFKKEMDPVTQLYTMTSTLEYKTTKADIQMPFTCSVTYYGPSGQKTIHSEQAVFDIYYPTEQVTIQVLPPKNAIKEGDNITLKCLGNGNPPPEEFLFYLPGQPEGIRSSNTYTLTDVRRNATGDYKCSLIDKKSMIASTAITVHYLDLSLNPSGEVTRQIGDALPVSCTISASRNATVVWMKDNIRLRSSPSFSSLHYQDAGNYVCETALQEVEGLKKRESLTLIVEGKPQIKMTKKTDPSGLSKTIICHVEGFPKPAIQWTITGSGSVINQTEESPYINGRYYSKIIISPEENVTLTCTAENQLERTVNSLNVSAISIPEHDEADEISDENREKVNDQAKLIVGIVVGLLLAALVAGVVYWLYMKKSNG

SEQ ID NO: 11923 - protein, 317 aa, Artificial Sequence
  Synthetic polypeptide
  misc_feature (1)..(1): Xaa can be any naturally occurring amino acid
XLGDCISEDSYPDGNITWYRNGKVLHPLEGAVVIIFKKEMDPVTQLYTMTSTLEYKTTKADIQMPFTCSVTYYGPSGQKTIHSEQAVFDIYYLDLSLNPSGEVTRQIGDALPVSCTISASRNATVVWMKDNIRLRSSPSFSSLHYQDAGNYVCETALQEVEGLKKRESLTLIVEGKPQIKMTKKTDPSGLSKTIICHVEGFPKPAIQWTITGSGSVINQTEESPYINGRYYSKIIISPEENVTLTCTAENQLERTVNSLNVSAISIPEHDEADEISDENREKVNDQAKLIVGIVVGLLLAALVAGVVYWLYMKKSNG

SEQ ID NO: 11924 - protein, 150 aa, Artificial Sequence
  Synthetic polypeptide
MEGAPTVRQVMNEGDSSLATDLQEDVEENPSPTVEENNVVVKKQGPNLHNWSGDWSFWISSSTYKDRNEEYRRQFTHLPDTERLIADYACALQRDILLQGRLYLSENWLCFYSNIFRWETTFFFTSFGARDRSYLSIFRLWQNVLLDKKL

SEQ ID NO: 11925 - protein, 182 aa, Artificial Sequence
  Synthetic polypeptide
MEGAPTVRQVMNEGDSSLATDLQEDVEENPSPTVEENNVVVKKQGPNLHNWSGDWSFWISSSTYKDRNEEYRRQFTHLPDTERLIADYACALQRDILLQGRLYLSENWLCFYSNIFRWETTISIALKNITFMTKEKTARLIPNAIQIVTESEKFFFTSFGARDRSYLSIFRLWQNVLLDKKL

SEQ ID NO: 11926 - protein, 248 aa, Artificial Sequence
  Synthetic polypeptide
MIVRLPQPCGTVSEKISSEVFSRNCAGGGSLRRKRKAGILEMVIFQLFHIHRSVSHGQQGLPVRSVDFNRGTDNITVRQGDTAILRCVVEDKNSKVAWLNRSGIIFAGHDKWSLDPRVELEKRHSLEYSLRIQKVDVYDEGSYTCSVQTQHEPKTSQVYLIVQVPPKISNISSDVTVNEGSNVTLVCMANGRPEPVITWRHLTPTAPCEEIYQENTELFLTFIVLPLASGSVHQTWTKLHELIMSPSY

SEQ ID NO: 11927 - protein, 198 aa, Artificial Sequence
  Synthetic polypeptide
MRLLCLLPTGLPVRSVDFNRGTDNITVRQGDTAILRCVVEDKNSKVAWLNRSGIIFAGHDKWSLDPRVELEKRHSLEYSLRIQKVDVYDEGSYTCSVQTQHEPKTSQVYLIVQVPPKISNISSDVTVNEGSNVTLVCMANGRPEPVITWRHLTPTAPCEEIYQENTELFLTFIVLPLASGSVHQTWTKLHELIMSPSY

SEQ ID NO: 11928 - protein, 211 aa, Artificial Sequence
  Synthetic polypeptide
MRTYWLHSVWVLGFFLSLFSLQGLPVRSVDFNRGTDNITVRQGDTAILRCVVEDKNSKVAWLNRSGIIFAGHDKWSLDPRVELEKRHSLEYSLRIQKVDVYDEGSYTCSVQTQHEPKTSQVYLIVQVPPKISNISSDVTVNEGSNVTLVCMANGRPEPVITWRHLTPTAPCEEIYQENTELFLTFIVLPLASGSVHQTWTKLHELIMSPSY

SEQ ID NO: 11929 - protein, 214 aa, Artificial Sequence
  Synthetic polypeptide
MVRRVQPDRKQLPLVLLRLLCLLPTGLPVRSVDFNRGTDNITVRQGDTAILRCVVEDKNSKVAWLNRSGIIFAGHDKWSLDPRVELEKRHSLEYSLRIQKVDVYDEGSYTCSVQTQHEPKTSQVYLIVQVPPKISNISSDVTVNEGSNVTLVCMANGRPEPVITWRHLTPTAPCEEIYQENTELFLTFIVLPLASGSVHQTWTKLHELIMSPSY

SEQ ID NO: 11930 - protein, 125 aa, Artificial Sequence
  Synthetic polypeptide
MEPEINCSELCDSFPGQELDRRPLHDLCKTTITSSHHSSKTISSLSPVLLGIVWTFLSCGLLLILFFLAFTIHCRKNRIRKKTRYPLSRLLFNTGGFSQCNKVRKINKSHLLFKKSKNENIFTLR

SEQ ID NO: 11931 - protein, 253 aa, Artificial Sequence
  Synthetic polypeptide
MKKFNFRKVLDGLTASSPGSGSSSGSNSGGGAGSGSVHPAGTAGVLREEIQETLTSEYFQICKTVRHGFPHQPTALAFDPVQKILAIGTRTGAIRILGRPGVDCYCQHESGAAVLQLQFLINEGALVSASSDDTLHLWNLRQKRPAILHSLKFNRERITYCHLPFQSKWLYVGTERGNTHIVNIESFILSGYVIMWNKAIELSTKTHPGPVVHLSDSPRDEGKVFRLRLAHHQLSWISCLPAHPADLGTCQPS

SEQ ID NO: 11932 - protein, 81 aa, Artificial Sequence
  Synthetic polypeptide
MDPQWKGNTQRKSGVKTQGEDGHPHTSQRERLATDSFLTTFRKNQPCGNPKFGLLASRKKINFFCLSHPSLWYFVTTAPAN

SEQ ID NO: 11933 - protein, 398 aa, Artificial Sequence
  Synthetic polypeptide
MAPSRFRTQLELVSNVLIFSCTNIVGVCTHYPAEVSQRQAFQETRECIQARLHSQRENQQQERLLLSVLPRHVAMEMKADINAKQEDMMFHKIYIQKHDNVSILFADIEGFTSLASQCTAQELVMTLNELFARFDKLAAENHCLRIKILGDCYYCVSGLPEARADHAHCCVEMGMDMIEAISLVREVTGVNVNMRVGIHSGRVHCGVLGLRKWQFDVWSNDVTLANHMEAGGKAGRIHITKATLNYLNGDYEVEPGCGGERNAYLKEHSIETFLILRCTQKRKEEKAMIAKMNRQRTNSIGHNPPHWGAERPFYNHLGGNQVSKEMKRMGFEDPKDKNAQESANPEDEVDEFLGRAIDARSIDRLRSEHVRKFLLTFREPDLEKKRVDGMQSCTAMII

SEQ ID NO: 11934 - protein, 324 aa, Artificial Sequence
  Synthetic polypeptide
MEMKADINAKQEDMMFHKIYIQKHDNVSILFADIEGFTSLASQCTAQELVMTLNELFARFDKLAAENHCLRIKILGDCYYCVSGLPEARADHAHCCVEMGMDMIEAISLVREVTGVNVNMRVGIHSGRVHCGVLGLRKWQFDVWSNDVTLANHMEAGGKAGRIHITKATLNYLNGDYEVEPGCGGERNAYLKEHSIETFLILRCTQKRKEEKAMIAKMNRQRTNSIGHNPPHWGAERPFYNHLGGNQVSKEMKRMGFEDPKDKNAQESANPEDEVDEFLGRAIDARSIDRLRSEHVRKFLLTFREPDLEKKRVDGMQSCTAMII

SEQ ID NO: 11935 - protein, 415 aa, Artificial Sequence
  Synthetic polypeptide
MKSQKEGCCSRGDLSIQTGPGGEWAPRRLVSNVLIFSCTNIVGVCTHYPAEVSQRQAFQETRECIQARLHSQRENQQQERLLLSVLPRHVAMEMKADINAKQEDMMFHKIYIQKHDNVSILFADIEGFTSLASQCTAQELVMTLNELFARFDKLAAENHCLRIKILGDCYYCVSGLPEARADHAHCCVEMGMDMIEAISLVREVTGVNVNMRVGIHSGRVHCGVLGLRKWQFDVWSNDVTLANHMEAGGKAGRIHITKATLNYLNGDYEVEPGCGGERNAYLKEHSIETFLILRCTQKRKEEKAMIAKMNRQRTNSIGHNPPHWGAERPFYNHLGGNQVSKEMKRMGFEDPKDKNAQESANPEDEVDEFLGRAIDARSIDRLRSEHVRKFLLTFREPDLEKKRVDGMQSCTAMII

SEQ ID NO: 11936 - protein, 765 aa, Artificial Sequence
  Synthetic polypeptide
MSGSKSVSPPGYAAQKTAAPAPRGGPEHRSAWGEADSRANGYPHAPGGSARGSTKKPGGAVTPQQQQRLASRWRSDDDDDPPLSGDDPLAGGFGFSFRSKSAWQERGGDDCGRGSRRQRRGAASGGSTRAPPAGGGGGSAAAAASAGGTEVRPRSVEVGLEERRGKGRAADELEAGAVEGGEGSGDGGSSADSGSGAGPGAVLSLGACCLALLQIFRSKKFPSDKLERLYQRYFFRLNQSSLTMLMAVLVLVCLVMLAFHAARPPLQLPYLAVLAAAVGVILIMAVLCNRAAFHQDHMGLACYALIAVVLAVQVVGLLLPQPRSASEGIWWTVFFIYTIYTLLPVRMRAAVLSGVLLSALHLAIALRTNAQDQFLLKQLVSNVLIFSCTNIVGVCTHYPAEVSQRQAFQETRECIQARLHSQRENQQQERLLLSVLPRHVAMEMKADINAKQEDMMFHKIYIQKHDNVSILFADIEGFTSLASQCTAQELVMTLNELFARFDKLAAENHCLRIKILGDCYYCVSGLPEARADHAHCCVEMGMDMIEAISLVREVTGVNVNMRVGIHSGRVHCGVLGLRKWQFDVWSNDVTLANHMEAGGKAGRIHITKATLNYLNGDYEVEPGCGGERNAYLKEHSIETFLILRCTQKRKEEKAMIAKMNRQRTNSIGHNPPHWGAERPFYNHLGGNQVSKEMKRMGFEDPKDKNAQESANPEDEVDEFLGRAIDARSIDRLRSEHVRKFLLTFREPDLEKKRVDGMQSCTAMII

SEQ ID NO: 11937 - protein, 185 aa, Artificial Sequence
  Synthetic polypeptide
MDGTETRQRRLDSCGKPGELGLPHPLSTGGLPVASEDGALRAPESQSVTPKPLETEPSRETTWSIGLQVTVPFMFAGLGLSWAGMLLDYFQANTGQIDDPQEQHRVISSNLALIQVQATVVGLLAAVAALLLGVVSREEVDVAKVELLCASSVLTAFLAAFALGISTDGNRAFWLLSSLKPGPGL

SEQ ID NO: 11938 - protein, 273 aa, Artificial Sequence
  Synthetic polypeptide
MDGTETRQRRLDSCGKPGELGLPHPLSTGGLPVASEDGALRAPESQSVTPKPLETEPSRETTWSIGLQVTVPFMFAGLGLSWAGMLLDYFQGKKLRGFSCELTRSPHGVLPESFFTIMCQVVVPILLSGLCMMTAGLVMNTIQHWPVFVEVKDLLTLVPPLVGLKGNLEMTLASRLSTAANTGQIDDPQEQHRVISSNLALIQVQATVVGLLAAVAALLLGVVSREEVDVAKVELLCASSVLTAFLAAFALGISTDGNRAFWLLSSLKPGPGL

SEQ ID NO: 11939 - protein, 221 aa, Artificial Sequence
  Synthetic polypeptide
MDGTETRQRRLDSCGKPGELGLPHPLSTGGLPVASEDGALRAPESQSVTPKPLETEPSRETTWSIGLQVTVPFMFAGLGLSWAGMLLDYFQHWPVFVEVKDLLTLVPPLVGLKGNLEMTLASRLSTAANTGQIDDPQEQHRVISSNLALIQVQATVVGLLAAVAALLLGVVSREEVDVAKVELLCASSVLTAFLAAFALGISTDGNRAFWLLSSLKPGPGL

SEQ ID NO: 11940 - protein, 236 aa, Artificial Sequence
  Synthetic polypeptide
MDGTETRQRRLDSCGKPGELGLPHPLSTGGLPVASEDGALRAPESQSVTPKPLETEPSRETTWSIGLQVTVPFMFAGLGLSWAGMLLDYFQHWPVFVEVKDLLTLVPPLVGLKGNLEMTLASRLSTAVSGHLDIRGGHNVRQANTGQIDDPQEQHRVISSNLALIQVQATVVGLLAAVAALLLGVVSREEVDVAKVELLCASSVLTAFLAAFALGISTDGNRAFWLLSSLKPGPGL

SEQ ID NO: 11941 - protein, 104 aa, Artificial Sequence
  Synthetic polypeptide
MTLASRLSTAANTGQIDDPQEQHRVISSNLALIQVQATVVGLLAAVAALLLGVVSREEVDVAKVELLCASSVLTAFLAAFALGISTDGNRAFWLLSSLKPGPGL

SEQ ID NO: 11942 - protein, 195 aa, Artificial Sequence
  Synthetic polypeptide
MVVTQLNLEFCFQGKKLRGFSCELTRSPHGVLPESFFTIMCQVVVPILLSGLCMMTAGLVMNTIQHWPVFVEVKDLLTLVPPLVGLKGNLEMTLASRLSTAANTGQIDDPQEQHRVISSNLALIQVQATVVGLLAAVAALLLGVVSREEVDVAKVELLCASSVLTAFLAAFALGISTDGNRAFWLLSSLKPGPGL

SEQ ID NO: 11943 - protein, 1293 aa, Artificial Sequence
  Synthetic polypeptide
MAPRAAGGAPLSARAAAASPPPFQTPPRCPVPLLLLLLLGAARAGALEIQRRFPSPTPTNNFALDGAAGTVYLAAVNRLYQLSGANLSLEAEAAVGPVPDSPLCHAPQLPQASCEHPRRLTDNYNKILQLDPGQGLVVVCGSIYQGFCQLRRRGNISAVAVRFPPAAPPAEPVTVFPSMLNVAANHPNASTVGLVLPPAAGAGGSRLLVGATYTGYGSSFFPRNRSLEDHRFENTPEIAIRSLDTRGDLAKLFTFDLNPSDDNILKIKQGAKEQHKLGFVSAFLHPSDPPPGAQSYAYLALNSEARAGDKESQARSLLARICLPHGAGGDAKKLTESYIQLGLQCAGGAGRGDLYSRLVSVFPARERLFAVFERPQGSPAARAAPAALCAFRFADVRAAIRAARTACFVEPAPDVVAVLDSVVQGTGPACERKLNIQLQPEQLDCGAAHLQHPLSILQPLKATPVFRAPGLTSVAVASVNNYTAVFLGTVNGRLLKINLNESMQVVSRRVVTVAYGEPVHHVMQFDPADSGYLYLMTSHQMARVKVAACNVHSTCGDCVGAADAYCGWCALETRCTLQQDCTNSSQQHFWTSASEGPSRCPAMTVLPSEIDVRQEYPGMILQISGSLPSLSGMEMACDYGNNIRTVARVPGPAFGHQIAYCNLLPRDQFPPFPPNQDHVTVEMSVRVNGRNIVKANFTIYDCSRTAQVYPHTACTSCLSAQWPCFWCSQQHSCVSNQSRCEASPNPTSPQDCPRTLLSPLAPVPTGGSQNILVPLANTAFFQGAALECSFGLEEIFEAVWVNESVVRCDQVVLHTTRKSQVFPLSLQLKGRPARFLDSPEPMTVMVYNCAMGSPDCSQCLGREDLGHLCMWSDGCRLRGPLQPMAGTCPAPEIHAIEPLSGPLDGGTLLTIRGRNLGRRLSDVAHGVWIGGVACEPLPDRYTVSEEIVCVTGPAPGPLSGVVTVNASKEGKSRDRFSYVLPLVHSLEPTMGPKAGGTRITIHGNDLHVGSELQVLVNDTDPCTELMRTDTSIACTMPEGALPAPVPVCVRFERRGCVHGNLTFWYMQNPVITAISPRRSPVSGGRTITVAGERFHMVQNVSMAVHHIGREPTLCKVLNSTLITCPSPGALSNASAPVDFFINGRAYADEVAVAEELLDPEEAQRGSRFRLDYLPNPQFSTAKREKWIKHHPGEPLTLVIHKEQDSLGLQSHEYRVKIGQVSCDIQIVSDRIIHCSVNESLGAAVGQLPITIQVGNFNQTIATLQLGGSETAIIVSIVICSVLLLLSVVAWVPE

SEQ ID NO: 11944 - protein, 511 aa, Artificial Sequence
  Synthetic polypeptide
MGLLPKLGASQGSDTSTSRAGRCARSVFGNIKVFVLCQGLLQLCQLLYSAYFKSSLTTIEKRFGLSSSSSGLISSLNEISNAILIIFVSYFGSRVHRPRLIGIGGLFLAAGAFILTLPHFLSEPYQYTLASTAILFAISVFGPAFGYLLGSVMLQIFVDYGRVNTAAVNLVPGDPRWIGAWWLGLLISSALLVLTSFPFFFFPRAMPIGAKRAPATADEARKLEEAKSRGSLVDFIKRFPCIFLRLLMNSLFVLVVLAQCTFSSVIAGLSTFLNKFLEKQYGTSAAYANFLIGAVNLPAAALGMLFGGILMKRFVFSLQAIPRIATTIITISMILCVPLFFMGCSTPTVAEVYPPSTSSSIHPQSPACRRDCSCPDSIFHPVCGDNGIEYLSPCHAGCSNINMSSATSKQLIYLNCSCVTGGSASAKTGSCPVPCAHFLLPAIFLISFVSLIACISHNPLYMMVLRVVNQEEKSFAIGVQFLLMRLLVSQPRTPSSSLKSGHPHLGASVRT

SEQ ID NO: 11945 - protein, 587 aa, Artificial Sequence
  Synthetic polypeptide
MGLLPKLGASQGSDTSTSRAGRCARSVFGNIKVFVLCQGLLQLCQLLYSAYFKSSLTTIEKRFGLSSSSSGLISSLNEISNAILIIFVSYFGSRVHRPRLIGIGGLFLAAGAFILTLPHFLSEPYQYTLASTGNNSRLQAELCQKHWQDLPPSKCHSTTQNPQKETSSMWGLMVVAQLLAGIGTVPIQPFGISYVDDFSEPSNSPLYISILFAISVFGPAFGYLLGSVMLQIFVDYGRVNTAAVNLVPGDPRWIGAWWLGLLISSALLVLTSFPFFFFPRAMPIGAKRAPATADEARKLEEAKSRGSLVDFIKRFPCIFLRLLMNSLFVLVVLAQCTFSSVIAGLSTFLNKFLEKQYGTSAAYANFLIGAVNLPAAALGMLFGGILMKRFVFSLQAIPRIATTIITISMILCVPLFFMGCSTPTVAEVYPPSTSSSIHPQSPACRRDCSCPDSIFHPVCGDNGIEYLSPCHAGCSNINMSSATSKQLIYLNCSCVTGGSASAKTGSCPVPCAHFLLPAIFLISFVSLIACISHNPLYMMVLRVVNQEEKSFAIGVQFLLMRLLVSQPRTPSSSLKSGHPHLGASVRT

SEQ ID NO: 11946 - protein, 1487 aa, Artificial Sequence
  Synthetic polypeptide
MGVPKFYRWISERYPCLSEVVKEHQIPEFDNLYLDMNGIIHQCSHPNDDDVHFRISDDKIFTDIFHYLEVLFRIIKPRKVFFMAVDGVAPRAKMNQQRGRRFRSAKEAEDKIKKAIEKGETLPTEARFDSNCITPGTEFMARLHEHLKYFVNMKISTDKSWQGVTIYFSGHETPGEGEHKIMEFIRSEKAKPDHDPNTRHCLYGLDADLIMLGLTSHEAHFSLLREEVRFGGKKTQRVCAPEETTFHLLHLSLMREYIDYEFSVLKEKITFKYDIERIIDDWILMGFLVGNDFIPHLPHLHINHDALPLLYGTYVTILPELGGYINESGHLNLPRFEKYLVKLSDFDREHFSEVFVDLKWFESKVGNKYLNEAAGVAAEEARNYKEKKKLKGQENSLCWTALDKNEGEMITSKDNLEDETEDDDLFETEFRQYKRTYYMTKMGVDVVSDDFLADQAACYVQAIQWILHYYYHGVQSWSWYYPYHYAPFLSDIHNISTLKIHFELGKPFKPFEQLLAVLPAASKNLLPACYQHLMTNEDSPIIEYYPPDFKTDLNGKQQEWEAVVLIPFIDEKRLLEAMETCNHSLKKEERKRNQHSECLMCWYDRDTEFIYPSPWPEKFPAIERCCTRYKIISLDAWRVDINKNKITRIDQKALYFCGFPTLKHIRHKFFLKKSGVQVFQQSSRGENMMLEILVDAESDELTVENVASSVLGKSVFVNWPHLEEARVVAVSDGETKFYLEEPPGTQKLYSGRTAPPSKVVHLGDKEQSNWAKEVQGISEHYLRRKGIIINETSAVVYAQLLTGRKYQINQNGEVRLEKQWSKQVVPFVYQTIVKDIRAFDSRFSNIKTLDDLFPLRSMVFMLGTPYYGCTGEVQDSGDVITEGRIRVIFSIPCEPNLDALIQNQHKYSIKYNPGYVLASRLGVSGYLVSRFTGSIFIGRGSRRNPHGDHKANVGLNLKFNKKNEEVPGYTKKVGSEWMYSSAAEQLLAEYLERAPELFSYIAKNSQEDVFYEDDIWPGENENGAEKVQEIITWLKGHPVSTLSRSSCDLQILDAAIVEKIEEEVEKCKQRKNNKKVRVTVKPHLLYRPLEQQHGVIPDRDAEFCLFDRVVNVRENFSVPVGLRGTIIGIKGANREADVLFEVLFDEEFPGGLTIRCSPGRGYRLPTSALVNLSHGSRSETGNQKLTAIVKPQPAVHQHSSSSSVSSGHLGALNHSPQSLFVPTQVPTKDDDEFCNIWQSLQGSGKMQYFQPTIQEKGAVLPQEISQVNQHHKSGFNDNSVKYQQRKHDPHRKFKEECKSPKAECWSQKMSNKQPNSGIENFLASLNISKENEVQSSHHGEPPSEEHLSPQSFAMGTRMLKEILKIDGSNTVDHKNEIKQIANEIPVSSNRRDEYGLPSQPKQNKKLASYMNKPHSANEYHNVQSMDNMCWPAPSQIPPVSTPVTELSRICSLVGMPQPDFSFLRMPQCYSQKPRYKINLSVHQWING

SEQ ID NO: 11947 - protein, 1488 aa, Artificial Sequence
  Synthetic polypeptide
MGVPKFYRWISERYPCLSEVVKEHQIPEFDNLYLDMNGIIHQCSHPNDDDVHFRISDDKIFTDIFHYLEVLFRIIKPRKVFFMAVDGVAPRAKMNQQRGRRFRSAKEAEDKIKKAIEKGETLPTEARFDSNCITPGTEFMARLHEHLKYFVNMKISTDKSWQGVTIYFSGHETPGEGEHKIMEFIRSEKAKPDHDPNTRHCLYGLDADLIMLGLTSHEAHFSLLREEVRFGGKKTQRVCAPEETTFHLLHLSLMREYIDYEFSVLKEKITFKYDIERIIDDWILMGFLVGNDFIPHLPHLHINHDALPLLYGTYVTILPELGGYINESGHLNLPRFEKYLVKLSDFDREHFSEVFVDLKWFESKVGNKYLNEAAGVAAEEARNYKEKKKLKGQENSLCWTALDKNEGEMITSKDNLEDETEDDDLFETEFRQYKRTYYMTKMGVDVVSDDFLADQAACYVQAIQWILHYYYHGVQSWSWYYPYHYAPFLSDIHNISTLKIHFELGKPFKPFEQLLAVLPAASKNLLPACYQHLMTNEDSPIIEYYPPDFKTDLNGKQQEWEAVVLIPFIDEKRLLEAMETCNHSLKKEERKRNQHSECLMCWYDRDTEFIYPSPWPEKFPAIERCCTRYKIISLDAWRVDINKNKITRIDQKALYFCGFPTLKHIRHKFFLKKSGVQVFQQSSRGENMMLEILVDAESDELTVENVASSVLGKSVFVNWPHLEEARVVAVSDGETKFYLEEPPGTQKLYSGRTAPPSKVVHLGDKEQSNWAKEVQGISEHYLRRKGIIINETSAVVYAQLLTGRKYQINQNGEVRLEKQWSKQVVPFVYQTIVKDIRAFDSRFSNIKTLDDLFPLRSMVFMLGTPYYGCTGEVQDSGDVITEGRIRVIFSIPCEPNLDALIQNQHKYSIKYNPGYVLASRLGVSGYLVSRFTGSIFIGRGSRRNPHGDHKANVGLNLKFNKKNEEVPGYTKKVGSEWMYSSAAEQLLAEYLERAPELFSYIAKNSQEDVFYEDDIWPGENENGAEKVQEIITWLKGHPVSTLSRSSCDLQILDAAIVEKIEEEVEKCKQRKNNKKVRVTVKPHLLYRPLEQQHGVIPDRDAEFCLFDRVVNVRENFSVPVGLRGTIIGIKGANREADVLFEVLFDEEFPGGLTIRCSPGRGYRLPTSALVNLSHGSRSETGNQKLTAIVKPQPAVHQHSSSSSVSSGHLGALNHSPQSLFVPTQVPTKDDDEFCNIWQSLQGSGKMQYFQPTIQEKGAVLPQEISQVNQHHKSGFNDNSVKYQQRKHDPHRKFKEECKSPKAECWSQKMSNKQPNSGIENFLASLNISKENEVQSSHHGEPPSEEHLSPQSFAMKGTRMLKEILKIDGSNTVDHKNEIKQIANEIPVSSNRRDEYGLPSQPKQNKKLASYMNKPHSANEYHNVQSMDNMCWPAPSQIPPVSTPVTELSRICSLVGMPQPDFSFLRMPQCYSQKPRYKINLSVHQWING

SEQ ID NO: 11948 - protein, 954 aa, Artificial Sequence
  Synthetic polypeptide
  misc_feature (1)..(1): Xaa can be any naturally occurring amino acid
XTNEDSPIIEYYPPDFKTDLNGKQQEWEAVVLIPFIDERLLEAMETCNHSLKKEERKRNQHSECLMCWYDRDTEFIYPSPWPEKFPAIERCCTRYKIISLDAWRVDINKNKITRIDQKALYFCGFPTLKHIRHKFFLKKSGVQVFQQSSRGENMMLEILVDAESDELTVENVASSVLGKSVFVNWPHLEEARVVAVSDGETKFYLEEPPGTQKLYSGRTAPPSKVVHLGDKEQSNWAKEVQGISEHYLRRKGIIINETSAVVYAQLLTGRKYQINQNGEVRLEKQWSKQVVPFVYQTIVKDIRAFDSRFSNIKTLDDLFPLRSMVFMLGTPYYGCTGEVQDSGDVITEGRIRVIFSIPCEPNLDALIQNQHKYSIKYNPGYVLASRLGVSGYLVSRFTGSIFIGRGSRRNPHGDHKANVGLNLKFNKKNEEVPGYTKKVGSEWMYSSAAEQLLAEYLERAPELFSYIAKNSQEDVFYEDDIWPGENENGAEKVQEIITWLKGHPVSTLSRSSCDLQILDAAIVEKIEEEVEKCKQRKNNKKVRVTVKPHLLYRPLEQQHGVIPDRDAEFCLFDRVVNVRENFSVPVGLRGTIIGIKGANREADVLFEVLFDEEFPGGLTIRCSPGRGYRLPTSALVNLSHGSRSETGNQKLTAIVKPQPAVHQHSSSSSVSSGHLGALNHSPQSLFVPTQVPTKDDDEFCNIWQSLQGSGKMQYFQPTIQEKGAVLPQEISQVNQHHKSGFNDNSVKYQQRKHDPHRKFKEECKSPKAECWSQKMSNKQPNSGIENFLASLNISKENEVQSSHHGEPPSEEHLSPQSFAMKGTRMLKEILKIDGSNTVDHKNEIKQIANEIPVSSNRRDEYGLPSQPKQNKKLASYMNKPHSANEYHNVQSMDNMCWPAPSQIPPVSTPVTELSRICSLVGMPQPDFSFLRMPQCYSQKPRYKINLSVHQWING

SEQ ID NO: 11949 - protein, 909 aa, Artificial Sequence
  Synthetic polypeptide
MRLLWKLVILLPLINSSAGDGLLSRPIFTQEPHDVIFPLDLSKSEVILNCAANGYPSPHYRWKQNGTDIDFTMSYHYRLDGGSLAINSPHTDQDIGMYQCLATNLLGTILSRKAKLQFAYIEDFETKTRSTVSVREGQGVVLLCGPPPHFGDLSYAWTFNDNPLYVQEDNRRFVSQETGNLYIAKVEPSDVGNYTCFITNKEAQRSVQGPPTPLVQRTDGVMGEYEPKIEVRFPETIQAAKDSSVKLECFALGNPVPDISWRRLDGSPLPGKVKYSKSQAILEIPNFQQEDEGFYECIASNLRGRNLAKGQLIFYAPPEWEQKIQNTHLSIYDNLLWECKASGKPNPWYTWLKNGERLNPEERIQIENGTLIITMLNVSDSGVYQCAAENKYQIIYANAELRVLASAPDFSKSPVKKKSFVQVGGDIVIGCKPNAFPRAAISWKRGTETLRQSKRIFLLEDGSLKIYNITRSDAGSYTCIATNQFGTAKNTGSLIVKERTVITVPPSKMDVTVGESIVLPCQVSHDPSIEVVFVWFFNGDVIDLKKGVAHFERIGGESVGDLMIRNIQLHHSGKYLCTVQTTLESLSAVADIIVRGPPGPPEDVQVEDISSTTSQLSWRAGPDNNSPIQIFTIQTRTPFSVGWQAVATVPEILNGKTYNATVVGLSPWVEYEFRVVAGNSIGIGEPSEPSELLRTKASVPVVAPVNIHGGGGSRSELVITWESIPEELQNGEGFGYIIMFRPVGSTTWSKEKVSSVESSRFVYRNESIIPLSPFEVKVGVYNNEGEGSLSTVTIVYSGEDEPQLAPRGTSLQSFSASEMEVSWNAIAWNRNTGRVLGYEVLYWTDDSKESMIGKIRVSGNVTTKNITGLKANTIYFASVRAYNTAGTGPSSPPVNVTTKKSRGGAKMAE

SEQ ID NO: 11950 - protein, 837 aa, Artificial Sequence
  Synthetic polypeptide
MSYHYRLDGGSLAINSPHTDQDIGMYQCLATNLLGTILSRKAKLQFAYIEDFETKTRSTVSVREGQGVVLLCGPPPHFGDLSYAWTFNDNPLYVQEDNRRFVSQETGNLYIAKVEPSDVGNYTCFITNKEAQRSVQGPPTPLVQRTDGVMGEYEPKIEVRFPETIQAAKDSSVKLECFALGNPVPDISWRRLDGSPLPGKVKYSKSQAILEIPNFQQEDEGFYECIASNLRGRNLAKGQLIFYAPPEWEQKIQNTHLSIYDNLLWECKASGKPNPWYTWLKNGERLNPEERIQIENGTLIITMLNVSDSGVYQCAAENKYQIIYANAELRVLASAPDFSKSPVKKKSFVQVGGDIVIGCKPNAFPRAAISWKRGTETLRQSKRIFLLEDGSLKIYNITRSDAGSYTCIATNQFGTAKNTGSLIVKERTVITVPPSKMDVTVGESIVLPCQVSHDPSIEVVFVWFFNGDVIDLKKGVAHFERIGGESVGDLMIRNIQLHHSGKYLCTVQTTLESLSAVADIIVRGPPGPPEDVQVEDISSTTSQLSWRAGPDNNSPIQIFTIQTRTPFSVGWQAVATVPEILNGKTYNATVVGLSPWVEYEFRVVAGNSIGIGEPSEPSELLRTKASVPVVAPVNIHGGGGSRSELVITWESIPEELQNGEGFGYIIMFRPVGSTTWSKEKVSSVESSRFVYRNESIIPLSPFEVKVGVYNNEGEGSLSTVTIVYSGEDEPQLAPRGTSLQSFSASEMEVSWNAIAWNRNTGRVLGYEVLYWTDDSKESMIGKIRVSGNVTTKNITGLKANTIYFASVRAYNTAGTGPSSPPVNVTTKKSRGGAKMAE

SEQ ID NO: 11951 - protein, 242 aa, Artificial Sequence
  Synthetic polypeptide
MDKQNSQMNASHPETNLPVGYPPQYPPTAFQGPPGYSGYPGPQVSYPPPPAGHSGPGPAGFPVPNQPVYNQPVYNQPVGAAGVPWMPAPQPPLNCPPGLEYLSQIDQILIHQQIELLEAEDTDCCTRNCCGPSRPFTLRIIDNMGQEVITLERPLRCSSCCCPCCLQEIEIQAPPGVPIGYVIQTWHPCLPKFTIQNEKREDVLKISGPCVVCSCCGDVDFENDDIKVLSWKELRNSHLKNF

SEQ ID NO: 11952 - protein, 266 aa, Artificial Sequence
  Synthetic polypeptide
MDKQNSQMNASHPETNLPVGYPPQYPPTAFQGPPGYSGYPGPQVSYPPPPAGHSGPGPAGFPVPNQPVYNQPVYNQPVGAAGVPWMPAPQPPLNCPPGLEYLSQIDQILIHQQIELLEVLTGFETNNKYEIKNSFGQRVYFAAEDTDCCTRNCCGPSRPFTLRIIDNMGQEVITLERPLRCSSCCCPCCLQEIEIQAPPGVPIGYVIQTWHPCLPKFTIQNEKREDVLKISGPCVVCSCCGDVDFENDDIKVLSWKELRNSHLKNF

SEQ ID NO: 11953 - protein, 185 aa, Artificial Sequence
  Synthetic polypeptide
MLLTRKQTCQLGILLSIHRQHSKIDQILIHQQIELLEVLTGFETNNKYEIKNSFGQRVYFAAEDTDCCTRNCCGPSRPFTLRIIDNMGQEVITLERPLRCSSCCCPCCLQEIEIQAPPGVPIGYVIQTWHPCLPKFTIQNEKREDVLKISGPCVVCSCCGDVDFENDDIKVLSWKELRNSHLKNF

SEQ ID NO: 11954 - protein, 259 aa, Artificial Sequence
  Synthetic polypeptide
MNASHPETNLPVGYPPQYPPTAFQGPPGYSGYPGPQVSYPPPPAGHSGPGPAGFPVPNQPVYNQPVYNQPVGAAGVPWMPAPQPPLNCPPGLEYLSQIDQILIHQQIELLEVLTGFETNNKYEIKNSFGQRVYFAAEDTDCCTRNCCGPSRPFTLRIIDNMGQEVITLERPLRCSSCCCPCCLQEIEIQAPPGVPIGYVIQTWHPCLPKFTIQNEKREDVLKISGPCVVCSCCGDVDFENDDIKVLSWKELRNSHLKNF

SEQ ID NO: 11955 - protein, 133 aa, Artificial Sequence
  Synthetic polypeptide
  misc_feature (1)..(1): Xaa can be any naturally occurring amino acid
XGFPVPNQPVYNQPVYNQPVGAAGVPWMPAPQPPLNCPPGLEYLSQIDQILIHQQIELLEEIQAPPGVPIGYVIQTWHPCLPKFTIQNEKREDVLKISGPCVVCSCCGDVDFENDDIKVLSWKELRNSHLKNF

SEQ ID NO: 11956 - protein, 135 aa, Artificial Sequence
  Synthetic polypeptide
MKILEKKSVEVNFTESLLRMAADDVEEYMIERPEPEFQDLNEKARALKQILSKIPDEINDRVRFLQTIKKHWRKSPGHWSGQRLLEQYPISTGNQSKNGQMGLHQVKMILQSKICNKLSEETTHIMGENISKLPL

SEQ ID NO: 11957 - protein, 198 aa, Artificial Sequence
  Synthetic polypeptide
MRMTMEEMKNEAETTSMVSMPLYAVMYPVFNELERVNLSAAQTLRAAFIKAEKENPGLTQDIIMKILEKKSVEVNFTESLLRMAADDVEEYMIERPEPEFQDLNEKARALKQILSKIPDEINDRVRFLQTIKKHWRKSPGHWSGQRLLEQYPISTGNQSKNGQMGLHQVKMILQSKICNKLSEETTHIMGENISKLPL

SEQ ID NO: 11958 - protein, 179 aa, Artificial Sequence
  Synthetic polypeptide
  misc_feature (1)..(1): Xaa can be any naturally occurring amino acid
XPLYAVMYPVFNELERVNLSAAQTLRAAFIKAEKENPGLTQDIIMKILEKKSVEVNFTESLLRMAADDVEEYMIERPEPEFQDLNEKARALKQILSKIPDEINDRVRFLQTIKKHWRKSPGHWSGQRLLEQYPISTGNQSKNGQMGLHQVKMILQSKICNKLSEETTHIMGENISKLPL

SEQ ID NO: 11959 - protein, 100 aa, Artificial Sequence
  Synthetic polypeptide
MRSSCVLLTALVALAAYYVYIPLPGSVSDPWKLMLLDATFRGAQQVPLLVIPRQTRSGVDLQRTPTDLQLRVLTVRRKTNKQKGIASTSTKKTSTPKPHL

SEQ ID NO: 11960 - protein, 132 aa, Artificial Sequence
  Synthetic polypeptide
MSSCRGQKVAGGLRVVSPFPLCQPAGEPSQGKMRSSCVLLTALVALAAYYVYIPLPGSVSDPWKLMLLDATFRGAQQVPLLVIPRQTRSGVDLQRTPTDLQLRVLTVRRKTNKQKGIASTSTKKTSTPKPHL

SEQ ID NO: 11961 - protein, 123 aa, Artificial Sequence
  Synthetic polypeptide
  misc_feature (1)..(1): Xaa can be any naturally occurring amino acid
XGGLRVVSPFPLCQPAGEPSQGKMRSSCVLLTALVALAAYYVYIPLPGSVSDPWKLMLLDATFRGAQQVPLLVIPRQTRSGVDLQRTPTDLQLRVLTVRRKTNKQKGIASTSTKKTSTPKPHL

SEQ ID NO: 11962 - protein, 187 aa, Artificial Sequence
  Synthetic polypeptide
MLRFYLFISLLCLSRSDAEETCPSFTRLSFHSAVVGTGLNVRLMLYTRKNLTCAQTINSSAFGNLNVTKKTTFIVHGFRPTGSPPVWMDDLVKGLLSVEDMNVVVVDWNRGATTLIYTHASSKTRKVAMVLKEFIDQMLAEGASLDDIYMIGVSLGAHISGFVGEMYDGWLGRITGLQHGSKGLAYM

SEQ ID NO: 11963 - protein, 42 aa, Artificial Sequence
  Synthetic polypeptide
  misc_feature (1)..(1): Xaa can be any naturally occurring amino acid
XDIYMIGVSLGAHISGFVGEMYDGWLGRITGLQHGSKGLAYM

SEQ ID NO: 11964 - protein, 686 aa, Artificial Sequence
  Synthetic polypeptide
MGCLWGLALPLFFFCWEVGVSGSSAGPSTRRADTAMTTDDTEVPAMTLAPGHAALETQTLSAETSSRASTPAGPIPEAETRGAKRISPARETRSFTKTSPNFMVLIATSVETSAASGSPEGAGMTTVQTITGSDPREAIFDTLCTDDSSEEAKTLTMDILTLAHTSTEAKGLSSESSASSDSPHPVITPSRASESSASSDGPHPVITPSRASESSASSDGPHPVITPSRASESSASSDGPHPVITPSRASESSASSDGPHPVITPSRASESSASSDGPHPVITPSRASESSASSDGPHPVITPSRASESSASSDGPHPVITPSRASESSASSDGPHPVITPSRASESSASSDGLHPVITPSRASESSASSDGPHPVITPSRASESSASSDGPHPVITPSWSPGSDVTLLAEALVTVTNIEVINCSITEIETTTSSIPGASDTDLIPTEGVKASSTSDPPALPDSTEAKPHITEVTASAETLSTAGTTESAAPDATVGTPLPTNSATEREVTAPGATTLSGALVTVSRNPLEETSALSVETPSYVKVSGAAPVSIEAGSAVGKTTSFAGSSASSYSPSEAALKNFTPSETPTMDIATKGPFPTSRDPLPSVPPTTTNSSRGTNSTLAKITTSAKTTMKPPTATPTTARTRPTTDVSAGLERWLMPVIPALWEAEAGGSPEVRSSRPG

SEQ ID NO: 11965 - protein, 515 aa, Artificial Sequence
  Synthetic polypeptide
MGCLWGLALPLFFFCWEVGVSGSSAGPSTRRADTAMTTDDTEVPAMTLAPGHAALETQTLSAETSSRASTPAGPIPEAETRGAKRISPARETRSFTKTSPNFMVLIATSVETSAASGSPEGAGMTTVQTITGSDPREAIFDTLCTDDSSEEAKTLTMDILTLAHTSTEAKGLSSESSASSDSPHPVITPSRASESSASSDGPHPVITPSRASESSASSDGPHPVITPSWSPGSDVTLLAEALVTVTNIEVINCSITEIETTTSSIPGASDTDLIPTEGVKASSTSDPPALPDSTEAKPHITEVTASAETLSTAGTTESAAPDATVGTPLPTNSATEREVTAPGATTLSGALVTVSRNPLEETSALSVETPSYVKVSGAAPVSIEAGSAVGKTTSFAGSSASSYSPSEAALKNFTPSETPTMDIATKGPFPTSRDPLPSVPPTTTNSSRGTNSTLAKITTSAKTTMKPPTATPTTARTRPTTDVSAGLERWLMPVIPALWEAEAGGSPEVRSSRPG

SEQ ID NO: 11966 - protein, 651 aa, Artificial Sequence
  Synthetic polypeptide
MTTDDTEVPAMTLAPGHAALETQTLSAETSSRASTPAGPIPEAETRGAKRISPARETRSFTKTSPNFMVLIATSVETSAASGSPEGAGMTTVQTITGSDPREAIFDTLCTDDSSEEAKTLTMDILTLAHTSTEAKGLSSESSASSDSPHPVITPSRASESSASSDGPHPVITPSRASESSASSDGPHPVITPSRASESSASSDGPHPVITPSRASESSASSDGPHPVITPSRASESSASSDGPHPVITPSRASESSASSDGPHPVITPSRASESSASSDGPHPVITPSRASESSASSDGPHPVITPSRASESSASSDGLHPVITPSRASESSASSDGPHPVITPSRASESSASSDGPHPVITPSWSPGSDVTLLAEALVTVTNIEVINCSITEIETTTSSIPGASDTDLIPTEGVKASSTSDPPALPDSTEAKPHITEVTASAETLSTAGTTESAAPDATVGTPLPTNSATEREVTAPGATTLSGALVTVSRNPLEETSALSVETPSYVKVSGAAPVSIEAGSAVGKTTSFAGSSASSYSPSEAALKNFTPSETPTMDIATKGPFPTSRDPLPSVPPTTTNSSRGTNSTLAKITTSAKTTMKPPTATPTTARTRPTTDVSAGLERWLMPVIPALWEAEAGGSPEVRSSRPG

SEQ ID NO: 11967 - protein, 98 aa, Artificial Sequence
  Synthetic polypeptide
  misc_feature (1)..(1): Xaa can be any naturally occurring amino acid
XPTMDIATKGPFPTSRDPLPSVPPTTTNSSRGTNSTLAKITTSAKTTMKPPTATPTTARTRPTTDVSAGLERWLMPVIPALWEAEAGGSPEVRSSRPG

SEQ ID NO: 11968 - protein, 715 aa, Artificial Sequence
  Synthetic polypeptide
MGCLWGLALPLFFFCWEVGVSGSSAGPSTRRADTAMTTDDTEVPAMTLAPGHAALETQTLSAETSSRASTPAGPIPEAETRGAKRISPARETRSFTKTSPNFMVLIATSVETSAASGSPEGAGMTTVQTITGSDPREAIFDTLCTDDSSEEAKTLTMDILTLAHTSTEAKGLSSESSASSDSPHPVITPSRASESSASSDGPHPVITPSRASESSASSDGPHPVITPSRASESSASSDGPHPVITPSRASESSASSDGPHPVITPSRASESSASSDGPHPVITPSRASESSASSDGPHPVITPSRASESSASSDGPHPVITPSRASESSASSDGPHPVITPSRASESSASSDGLHPVITPSRASESSASSDGPHPVITPSRASESSASSDGPHPVITPSWSPGSDVTLLAEALVTVTNIEVINCSITEIETTTSSIPGASDTDLIPTEGVKASSTSDPPALPDSTEAKPHITEVTASAETLSTAGTTESAAPDATVGTPLPTNSATEREVTAPGATTLSGALVTVSRNPLEETSALSVETPSYVKVSGAAPVSIEAGSAVGKTTSFAGSSASSYSPSEAALKNFTPSETPTMDIATKGPFPTSRDPLPSVPPTTTNSSRGTNSTLAKITTSAKTTMKPPTATPTTARTRPTTDVSAGENGGFLLLRLSVASPEDLTDPRVAERLMQQFVTLYVLEDKQPVVFTSVITEAGVEPST

SEQ ID NO: 11969 - protein, 544 aa, Artificial Sequence
  Synthetic polypeptide
MGCLWGLALPLFFFCWEVGVSGSSAGPSTRRADTAMTTDDTEVPAMTLAPGHAALETQTLSAETSSRASTPAGPIPEAETRGAKRISPARETRSFTKTSPNFMVLIATSVETSAASGSPEGAGMTTVQTITGSDPREAIFDTLCTDDSSEEAKTLTMDILTLAHTSTEAKGLSSESSASSDSPHPVITPSRASESSASSDGPHPVITPSRASESSASSDGPHPVITPSWSPGSDVTLLAEALVTVTNIEVINCSITEIETTTSSIPGASDTDLIPTEGVKASSTSDPPALPDSTEAKPHITEVTASAETLSTAGTTESAAPDATVGTPLPTNSATEREVTAPGATTLSGALVTVSRNPLEETSALSVETPSYVKVSGAAPVSIEAGSAVGKTTSFAGSSASSYSPSEAALKNFTPSETPTMDIATKGPFPTSRDPLPSVPPTTTNSSRGTNSTLAKITTSAKTTMKPPTATPTTARTRPTTDVSAGENGGFLLLRLSVASPEDLTDPRVAERLMQQFVTLYVLEDKQPVVFTSVITEAGVEPST

SEQ ID NO: 11970 - protein, 680 aa, Artificial Sequence
  Synthetic polypeptide
MTTDDTEVPAMTLAPGHAALETQTLSAETSSRASTPAGPIPEAETRGAKRISPARETRSFTKTSPNFMVLIATSVETSAASGSPEGAGMTTVQTITGSDPREAIFDTLCTDDSSEEAKTLTMDILTLAHTSTEAKGLSSESSASSDSPHPVITPSRASESSASSDGPHPVITPSRASESSASSDGPHPVITPSRASESSASSDGPHPVITPSRASESSASSDGPHPVITPSRASESSASSDGPHPVITPSRASESSASSDGPHPVITPSRASESSASSDGPHPVITPSRASESSASSDGPHPVITPSRASESSASSDGLHPVITPSRASESSASSDGPHPVITPSRASESSASSDGPHPVITPSWSPGSDVTLLAEALVTVTNIEVINCSITEIETTTSSIPGASDTDLIPTEGVKASSTSDPPALPDSTEAKPHITEVTASAETLSTAGTTESAAPDATVGTPLPTNSATEREVTAPGATTLSGALVTVSRNPLEETSALSVETPSYVKVSGAAPVSIEAGSAVGKTTSFAGSSASSYSPSEAALKNFTPSETPTMDIATKGPFPTSRDPLPSVPPTTTNSSRGTNSTLAKITTSAKTTMKPPTATPTTARTRPTTDVSAGENGGFLLLRLSVASPEDLTDPRVAERLMQQFVTLYVLEDKQPVVFTSVITEAGVEPST

SEQ ID NO: 11971 - protein, 127 aa, Artificial Sequence
  Synthetic polypeptide
  misc_feature (1)..(1): Xaa can be any naturally occurring amino acid
XPTMDIATKGPFPTSRDPLPSVPPTTTNSSRGTNSTLAKITTSAKTTMKPPTATPTTARTRPTTDVSAGENGGFLLLRLSVASPEDLTDPRVAERLMQQFVTLYVLEDKQPVVFTSVITEAGVEPST

SEQ ID NO: 11972 - protein, 688 aa, Artificial Sequence
  Synthetic polypeptide
MGCLWGLALPLFFFCWEVGVSGSSAGPSTRRADTAMTTDDTEVPAMTLAPGHAALETQTLSAETSSRASTPAGPIPEAETRGAKRISPARETRSFTKTSPNFMVLIATSVETSAASGSPEGAGMTTVQTITGSDPREAIFDTLCTDDSSEEAKTLTMDILTLAHTSTEAKGLSSESSASSDSPHPVITPSRASESSASSDGPHPVITPSRASESSASSDGPHPVITPSRASESSASSDGPHPVITPSRASESSASSDGPHPVITPSRASESSASSDGPHPVITPSRASESSASSDGPHPVITPSRASESSASSDGPHPVITPSRASESSASSDGPHPVITPSRASESSASSDGLHPVITPSRASESSASSDGPHPVITPSRASESSASSDGPHPVITPSWSPGSDVTLLAEALVTVTNIEVINCSITEIETTTSSIPGASDTDLIPTEGVKASSTSDPPALPDSTEAKPHITEVTASAETLSTAGTTESAAPDATVGTPLPTNSATEREVTAPGATTLSGALVTVSRNPLEETSALSVETPSYVKVSGAAPVSIEAGSAVGKTTSFAGSSASSYSPSEAALKNFTPSETPTMDIATKGPFPTSRDPLPSVPPTTTNSSRGTNSTLAKITTSAKTTMKPPTATPTTARTRPTTDVSAGENGGFLLLRLSVASPEDLTDPRVAERLMQQR

SEQ ID NO: 11973 - protein, 517 aa, Artificial Sequence
  Synthetic polypeptide
MGCLWGLALPLFFFCWEVGVSGSSAGPSTRRADTAMTTDDTEVPAMTLAPGHAALETQTLSAETSSRASTPAGPIPEAETRGAKRISPARETRSFTKTSPNFMVLIATSVETSAASGSPEGAGMTTVQTITGSDPREAIFDTLCTDDSSEEAKTLTMDILTLAHTSTEAKGLSSESSASSDSPHPVITPSRASESSASSDGPHPVITPSRASESSASSDGPHPVITPSWSPGSDVTLLAEALVTVTNIEVINCSITEIETTTSSIPGASDTDLIPTEGVKASSTSDPPALPDSTEAKPHITEVTASAETLSTAGTTESAAPDATVGTPLPTNSATEREVTAPGATTLSGALVTVSRNPLEETSALSVETPSYVKVSGAAPVSIEAGSAVGKTTSFAGSSASSYSPSEAALKNFTPSETPTMDIATKGPFPTSRDPLPSVPPTTTNSSRGTNSTLAKITTSAKTTMKPPTATPTTARTRPTTDVSAGENGGFLLLRLSVASPEDLTDPRVAERLMQQR

SEQ ID NO: 11974 - protein, 653 aa, Artificial Sequence
  Synthetic polypeptide
MTTDDTEVPAMTLAPGHAALETQTLSAETSSRASTPAGPIPEAETRGAKRISPARETRSFTKTSPNFMVLIATSVETSAASGSPEGAGMTTVQTITGSDPREAIFDTLCTDDSSEEAKTLTMDILTLAHTSTEAKGLSSESSASSDSPHPVITPSRASESSASSDGPHPVITPSRASESSASSDGPHPVITPSRASESSASSDGPHPVITPSRASESSASSDGPHPVITPSRASESSASSDGPHPVITPSRASESSASSDGPHPVITPSRASESSASSDGPHPVITPSRASESSASSDGPHPVITPSRASESSASSDGLHPVITPSRASESSASSDGPHPVITPSRASESSASSDGPHPVITPSWSPGSDVTLLAEALVTVTNIEVINCSITEIETTTSSIPGASDTDLIPTEGVKASSTSDPPALPDSTEAKPHITEVTASAETLSTAGTTESAAPDATVGTPLPTNSATEREVTAPGATTLSGALVTVSRNPLEETSALSVETPSYVKVSGAAPVSIEAGSAVGKTTSFAGSSASSYSPSEAALKNFTPSETPTMDIATKGPFPTSRDPLPSVPPTTTNSSRGTNSTLAKITTSAKTTMKPPTATPTTARTRPTTDVSAGENGGFLLLRLSVASPEDLTDPRVAERLMQQR

SEQ ID NO: 11975 - protein, 100 aa, Artificial Sequence
  Synthetic polypeptide
  misc_feature (1)..(1): Xaa can be any naturally occurring amino acid
XPTMDIATKGPFPTSRDPLPSVPPTTTNSSRGTNSTLAKITTSAKTTMKPPTATPTTARTRPTTDVSAGENGGFLLLRLSVASPEDLTDPRVAERLMQQR

SEQ ID NO: 11976 - protein, 288 aa, Artificial Sequence; identical to SEQ ID NO: 704
  Synthetic polypeptide

SEQ ID NO: 11977 - protein, 489 aa, Artificial Sequence; identical to SEQ ID NO: 386
  Synthetic polypeptide

SEQ ID NO: 11978 - protein, 570 aa, Artificial Sequence; identical to SEQ ID NO: 311
  Synthetic polypeptide

SEQ ID NO: 11979 - protein, 291 aa, Artificial Sequence; identical to SEQ ID NO: 700
  Synthetic polypeptide

SEQ ID NO: 11980 - protein, 492 aa, Artificial Sequence; identical to SEQ ID NO: 378
  Synthetic polypeptide

SEQ ID NO: 11981 - protein, 573 aa, Artificial Sequence; identical to SEQ ID NO: 305
  Synthetic polypeptide

SEQ ID NO: 11982 - protein, 291 aa, Artificial Sequence; identical to SEQ ID NO: 701
  Synthetic polypeptide

SEQ ID NO: 11983 - protein, 492 aa, Artificial Sequence; identical to SEQ ID NO: 382
  Synthetic polypeptide

SEQ ID NO: 11984 - protein, 573 aa, Artificial Sequence; identical to SEQ ID NO: 308
  Synthetic polypeptide

SEQ ID NO: 11985 - protein, 183 aa, Artificial Sequence
  Synthetic polypeptide
MIGYLGYCKGVEPKTECERLAGTESPVREEPGEDFPAARRLYWDDLKRKLSEKLDSTDFTGTIKLLNENSYVPREAGSQKDENLALYVENQFREFKLSKVWRDQHFVKIQVKDSAQNSVIIVDKNGRLVYLVENPGGYVAYSKAATVTNVSQMKNHGLVLFTAMLQSFGECLTYIVVFAKQMH

SEQ ID NO: 11986 - protein, 264 aa, Artificial Sequence
  Synthetic polypeptide
MMDQARSAFSNLFGGEPLSYTRFSLARQVDGDNSHVEMKLAVDEEENADNNTKANVTKPKRCSGSICYGTIAVIVFFLIGFMIGYLGYCKGVEPKTECERLAGTESPVREEPGEDFPAARRLYWDDLKRKLSEKLDSTDFTGTIKLLNENSYVPREAGSQKDENLALYVENQFREFKLSKVWRDQHFVKIQVKDSAQNSVIIVDKNGRLVYLVENPGGYVAYSKAATVTNVSQMKNHGLVLFTAMLQSFGECLTYIVVFAKQMH

SEQ ID NO: 11987 - protein, 150 aa, Artificial Sequence
  Synthetic polypeptide
MIGYLGYCKGVEPKTECERLAGTESPVREEPGEDFPAARRLYWDDLKRKLSEKLDSTDFTGTIKLLNENSYVPREAGSQKDENLALYVENQFREFKLSKVWRDQHFVKIQVKDSAQNSVIIVDKNGRLVYLVENPGGYVAYSKAATVTYC

SEQ ID NO: 11988 - protein, 231 aa, Artificial Sequence
  Synthetic polypeptide
MMDQARSAFSNLFGGEPLSYTRFSLARQVDGDNSHVEMKLAVDEEENADNNTKANVTKPKRCSGSICYGTIAVIVFFLIGFMIGYLGYCKGVEPKTECERLAGTESPVREEPGEDFPAARRLYWDDLKRKLSEKLDSTDFTGTIKLLNENSYVPREAGSQKDENLALYVENQFREFKLSKVWRDQHFVKIQVKDSAQNSVIIVDKNGRLVYLVENPGGYVAYSKAATVTYC

SEQ ID NO: 11989 - protein, 118 aa, Artificial Sequence
  Synthetic polypeptide
MIGYLGYCKGVEPKTECERLAGTESPVREEPGEDFPAARRLYWDDLKRKLSEKLDSTDFTGTIKLLNENSYVPREAGSQKDENLALYVENQFREFKLSKVWRDQHFVKIQVKDSTASS

SEQ ID NO: 11990 - protein, 199 aa, Artificial Sequence
  Synthetic polypeptide
MMDQARSAFSNLFGGEPLSYTRFSLARQVDGDNSHVEMKLAVDEEENADNNTKANVTKPKRCSGSICYGTIAVIVFFLIGFMIGYLGYCKGVEPKTECERLAGTESPVREEPGEDFPAARRLYWDDLKRKLSEKLDSTDFTGTIKLLNENSYVPREAGSQKDENLALYVENQFREFKLSKVWRDQHFVKIQVKDSTASS

SEQ ID NO: 11991 - protein, 59 aa, Artificial Sequence
  Synthetic polypeptide
MELLPLWLCLGFHFLTVGWRNRSGTATAASQGVCKLHFWEAEAGRSPEVRSSRPAWSTW

SEQ ID NO: 11992 - protein, 258 aa, Artificial Sequence
  Synthetic polypeptide
MSDNGELEDKPPAPPVRMSSTIFSTGGKDPLSANHSLKPLPSVPEEKKPRHKIISIFSGTEKGSKKKEKERPEISPPSDFEHTIHVGFDAVTGEFTGMPEQWARLLQTSNITKLEQKKNPQAVLDVLKFYDSNTVKQKYLSFTPPEKDGFPSGTPALNAKGTEAPAVVTEEEDDDEETAPPVIAPRPDHTKSIYTRSVIDPVPAPVGDSHVDGAAKSLDKQKKKTKMTDEEIMEKLRTIVSIGDPKKKYTRYEKIGQG

SEQ ID NO: 11993 - protein, 394 aa, Artificial Sequence
  Synthetic polypeptide
MRGPSGALWLLLALRTVLGGMEVRWCATSDPEQHKCGNMSEAFREAGIQPSLLCVRGTSADHCVQLIAAQEADAITLDGGAIYEAGKEHGLKPVVGEVYDQEVGTSYYAVAVVRRSSHVTIDTLKGVKSCHTGINRTVGWNVPVGYLVESGRLSVMGCDVLKAVSDYFGGSCVPGAGETSYSESLCRLCRGDSSGEGVCDKSPLERYYDYSGAFRCLAEGAGDVAFVKHSTVLENTDGKTLPSWGQALLSQDFELLCRDGSRADVTEWRQCHLARVPAHAVVVRADTDGGLIFRLLNEGQRLFSHEGSSFQMFSSEAYGQKDLLFKDSTSELVPIATQTYEAWLGHEYLHAMKGLLCDPNPLLQPLAPTPRLYPMATALAQVPSFAWTIAVVYK

SEQ ID NO: 11994 - protein, 593 aa, Artificial Sequence
  Synthetic polypeptide
MNYIFGNNTLLYSRGSRGGNTSSSHGSAGPKQKHWAKKGSSDELQAEPEPSRWQQIVAFFTRRHSFIDCISVATSSTQANPPPVLVNTDSLETPTYVNGTDADYEYEEITLERGNSGLGFSIAGGTDNPHIGDDSSIFITKIITGGAAAQDGRLRVNDCILRVNEVDVRDVTHSKAVEALKEAGSIVRLYVKRRKPVSEKIMEIKLIKGPKGLGFSIAGGVGNQHIPGDNSIYVTKIIEGGAAHKDGKLQIGDKLLAVNNVCLEEVTHEEAVTALKNTSDFVYLKVAKPTSMYMNDGYAPPDITNSSSQPVDNHVSPSSFLGQTPASPARYSPVSKAVLGDDEITREPRKVVLHRGSTGLGFNIVGGEDGEGIFISFILAGGPADLSGELRKGDRIISVNSVDLRAASHEQAAAALKNAGQAVTIVAQYRPEEYSRFEAKIHDLREQMMNSSISSGSGSLRTSQKRSLYVRALFDYDKTKDSGLPSQGLNFKFGDILHVINASDDEWWQARQVTPDGESDEVGVIPSKRRVEKKERARLKTVKFNSKTRDKGEIPDDMGSKGLRIKRIYSPGNLIIRSRFYSQNVGEDRKISV

SEQ ID NO: 11995 - protein, 676 aa, Artificial Sequence
  Synthetic polypeptide
MPVRKQDTQRALHLLEEYRSKLSQTEDRQLRSSIERVINIFQSNLFQALIDIQEFYEVTLLDNPKCIDRSKPSEPIQPVNTWEISSLPSSTVTSETLPSSLSPSVEKYRYQDEDTPPQEHISPQITNEVIGPELVHVSEKNLSEIENVHGFVSHSHISPIKANPPPVLVNTDSLETPTYVNGTDADYEYEEITLERGNSGLGFSIAGGTDNPHIGDDSSIFITKIITGGAAAQDGRLRVNDCILRVNEVDVRDVTHSKAVEALKEAGSIVRLYVKRRKPVSEKIMEIKLIKGPKGLGFSIAGGVGNQHIPGDNSIYVTKIIEGGAAHKDGKLQIGDKLLAVNNVCLEEVTHEEAVTALKNTSDFVYLKVAKPTSMYMNDGYAPPDITNSSSQPVDNHVSPSSFLGQTPASPARYSPVSKAVLGDDEITREPRKVVLHRGSTGLGFNIVGGEDGEGIFISFILAGGPADLSGELRKGDRIISVNSVDLRAASHEQAAAALKNAGQAVTIVAQYRPEEYSRFEAKIHDLREQMMNSSISSGSGSLRTSQKRSLYVRALFDYDKTKDSGLPSQGLNFKFGDILHVINASDDEWWQARQVTPDGESDEVGVIPSKRRVEKKERARLKTVKFNSKTRDKGEIPDDMGSKGLRIKRIYSPGNLIIRSRFYSQNVGEDRKISV

SEQ ID NO: 11996 - protein, 709 aa, Artificial Sequence
  Synthetic polypeptide
MPVRKQDTQRALHLLEEYRSKLSQTEDRQLRSSIERVINIFQSNLFQALIDIQEFYEVTLLDNPKCIDRSKPSEPIQPVNTWEISSLPSSTVTSETLPSSLSPSVEKYRYQDEDTPPQEHISPQITNEVIGPELVHVSEKNLSEIENVHGFVSHSHISPIKPTEAVLPSPPTVPVIPVLPVPAENTVILPTIPQANPPPVLVNTDSLETPTYVNGTDADYEYEEITLERGNSGLGFSIAGGTDNPHIGDDSSIFITKIITGGAAAQDGRLRVNDCILRVNEVDVRDVTHSKAVEALKEAGSIVRLYVKRRKPVSEKIMEIKLIKGPKGLGFSIAGGVGNQHIPGDNSIYVTKIIEGGAAHKDGKLQIGDKLLAVNNVCLEEVTHEEAVTALKNTSDFVYLKVAKPTSMYMNDGYAPPDITNSSSQPVDNHVSPSSFLGQTPASPARYSPVSKAVLGDDEITREPRKVVLHRGSTGLGFNIVGGEDGEGIFISFILAGGPADLSGELRKGDRIISVNSVDLRAASHEQAAAALKNAGQAVTIVAQYRPEEYSRFEAKIHDLREQMMNSSISSGSGSLRTSQKRSLYVRALFDYDKTKDSGLPSQGLNFKFGDILHVINASDDEWWQARQVTPDGESDEVGVIPSKRRVEKKERARLKTVKFNSKTRDKGEIPDDMGSKGLRIKRIYSPGNLIIRSRFYSQNVGEDRKISV

SEQ ID NO: 11997 - protein, 658 aa, Artificial Sequence
  Synthetic polypeptide
MPVRKQDTQRALHLLEEYRSKLSQTEDRQLRSSIERVINIFQSNLFQALIDIQEFYEVTLLDNPKCIDRSKPSEPIQPVNTWEISSLPSSTVTSETLPSSLSPSVEKYRYQDEDTPPQEHISPQITNEVIGPELVHVSEKNLSEIENVHGFVSHSHISPIKVNGTDADYEYEEITLERGNSGLGFSIAGGTDNPHIGDDSSIFITKIITGGAAAQDGRLRVNDCILRVNEVDVRDVTHSKAVEALKEAGSIVRLYVKRRKPVSEKIMEIKLIKGPKGLGFSIAGGVGNQHIPGDNSIYVTKIIEGGAAHKDGKLQIGDKLLAVNNVCLEEVTHEEAVTALKNTSDFVYLKVAKPTSMYMNDGYAPPDITNSSSQPVDNHVSPSSFLGQTPASPARYSPVSKAVLGDDEITREPRKVVLHRGSTGLGFNIVGGEDGEGIFISFILAGGPADLSGELRKGDRIISVNSVDLRAASHEQAAAALKNAGQAVTIVAQYRPEEYSRFEAKIHDLREQMMNSSISSGSGSLRTSQKRSLYVRALFDYDKTKDSGLPSQGLNFKFGDILHVINASDDEWWQARQVTPDGESDEVGVIPSKRRVEKKERARLKTVKFNSKTRDKGEIPDDMGSKGLRIKRIYSPGNLIIRSRFYSQNVGEDRKISV

SEQ ID NO: 11998 - protein, 731 aa, Artificial Sequence
  Synthetic polypeptide
MPVRKQDTQRALHLLEEYRSKLSQTEDRQLRSSIERVINIFQSNLFQALIDIQEFYEVTLLDNPKCIDRSKPSEPIQPVNTWEISSLPSSTVTSETLPSSLSPSVEKYRYQDEDTPPQEHISPQITNEVIGPELVHVSEKNLSEIENVHGFVSHSHISPIKANPPPVLVNTDSLETPTYVNGTDADYEYEEITLERGNSGLGFSIAGGTDNPHIGDDSSIFITKIITGGAAAQDGRLRVNDCILRVNEVDVRDVTHSKAVEALKEAGSIVRLYVKRRKPVSEKIMEIKLIKGPKGLGFSIAGGVGNQHIPGDNSIYVTKIIEGGAAHKDGKLQIGDKLLAVNNVCLEEVTHEEAVTALKNTSDFVYLKVAKPTSMYMNDGYAPPDITNSSSQPVDNHVSPSSFLGQTPASPARYSPVSKAVLGDDEITREPRKVVLHRGSTGLGFNIVGGEDGEGIFISFILAGGPADLSGELRKGDRIISVNSVDLRAASHEQAAAALKNAGQAVTIVAQYRPEEYSRFEAKIHDLREQMMNSSISSGSGSLRTSQKRSLYVRALFDYDKTKDSGLPSQGLNFKFGDILHVINASDDEWWQARQVTPDGESDEVGVIPSKRRVEKKERARLKTVKFNSKTRDKGQSFNDKRKKNLFSRKFPFYKNKDQSEQETSDADQLMRVQWKFGRMQLSHHLRKARNKNPCRFHALREVILKKLKGLKLGKIPLTETERKHNSIKDT

SEQ ID NO: 11999 - protein, 764 aa, Artificial Sequence
  Synthetic polypeptide
MPVRKQDTQRALHLLEEYRSKLSQTEDRQLRSSIERVINIFQSNLFQALIDIQEFYEVTLLDNPKCIDRSKPSEPIQPVNTWEISSLPSSTVTSETLPSSLSPSVEKYRYQDEDTPPQEHISPQITNEVIGPELVHVSEKNLSEIENVHGFVSHSHISPIKPTEAVLPSPPTVPVIPVLPVPAENTVILPTIPQANPPPVLVNTDSLETPTYVNGTDADYEYEEITLERGNSGLGFSIAGGTDNPHIGDDSSIFITKIITGGAAAQDGRLRVNDCILRVNEVDVRDVTHSKAVEALKEAGSIVRLYVKRRKPVSEKIMEIKLIKGPKGLGFSIAGGVGNQHIPGDNSIYVTKIIEGGAAHKDGKLQIGDKLLAVNNVCLEEVTHEEAVTALKNTSDFVYLKVAKPTSMYMNDGYAPPDITNSSSQPVDNHVSPSSFLGQTPASPARYSPVSKAVLGDDEITREPRKVVLHRGSTGLGFNIVGGEDGEGIFISFILAGGPADLSGELRKGDRIISVNSVDLRAASHEQAAAALKNAGQAVTIVAQYRPEEYSRFEAKIHDLREQMMNSSISSGSGSLRTSQKRSLYVRALFDYDKTKDSGLPSQGLNFKFGDILHVINASDDEWWQARQVTPDGESDEVGVIPSKRRVEKKERARLKTVKFNSKTRDKGQSFNDKRKKNLFSRKFPFYKNKDQSEQETSDADQLMRVQWKFGRMQLSHHLRKARNKNPCRFHALREVILKKLKGLKLGKIPLTETERKHNSIKDT

SEQ ID NO: 12000 - protein, 196 aa, Artificial Sequence
  Synthetic polypeptide
MASRGATRPNGPNTGNKICQFKLVLLGESAVGKSSLVLRFVKGQFHEFQESTIGAAFLTQTVCLDDTTVKFEIWDTAGQERYHSLAPMYYRGAQAAIVVYDITNEESFARAKNWVKELQRQASPNIVIALSGNKADLANKRAVDFQEAQSYADDNSLLFMETSAKTSMNVNEIFMAIATREAKARESLEPRRWRLQ

SEQ ID NO: 12001 - protein, 182 aa, Artificial Sequence
  Synthetic polypeptide
MASRGATRPNGPNTGNKICQFKLVLLGESAVGKSSLVLRFVKGQFHEFQESTIGVKFEIWDTAGQERYHSLAPMYYRGAQAAIVVYDITNEESFARAKNWVKELQRQASPNIVIALSGNKADLANKRAVDFQEAQSYADDNSLLFMETSAKTSMNVNEIFMAIATREAKARESLEPRRWRLQ

SEQ ID NO: 12002 - protein, 190 aa, Artificial Sequence
  Synthetic polypeptide
MASRGATRPNGPNTGNKICQFKLVLLGESAVGKSSLVLRFVKGQFHEFQESTIGAAFLTQTVCLDDTTVKFEIWDTAGQERYHSLAPMYYRGAQAAIVVYDITNEESFARAKNWVKELQRQASPNIVIALSGNKADLANKRAVDFQEAQSYADDNSLLFMETSAKTSMNVNEIFMAIDRPSRRYSRRRHC

SEQ ID NO: 12003 - protein, 176 aa, Artificial Sequence
  Synthetic polypeptide
MASRGATRPNGPNTGNKICQFKLVLLGESAVGKSSLVLRFVKGQFHEFQESTIGVKFEIWDTAGQERYHSLAPMYYRGAQAAIVVYDITNEESFARAKNWVKELQRQASPNIVIALSGNKADLANKRAVDFQEAQSYADDNSLLFMETSAKTSMNVNEIFMAIDRPSRRYSRRRHC

SEQ ID NO: 12004 - protein, 131 aa, Artificial Sequence
  Synthetic polypeptide
MAAAPLKVCIVGSGNWGSAVAKIIGNNVKKLQKFASTVKMWVFEETVNGRKLTDIINNDHENVKYLPGHKLPENVVAMSNLSEAVQDADLLVFVIPHQFIHRICDEITGRVPKKALGITLIKVFCFMHMKF

SEQ ID NO: 12005 - protein, 69 aa, Artificial Sequence
  Synthetic polypeptide
MAAAPLKVCIVGSGNWLPCQILARLCRMQTCWCLSFPTSSFTESVMRSLGECPRKRWESPSSRCFVLCI

SEQ ID NO: 12006 - protein, 92 aa, Artificial Sequence
  Synthetic polypeptide
MWVFEETVNGRKLTDIINNDHENVKYLPGHKLPENVVAMSNLSEAVQDADLLVFVIPHQFIHRICDEITGRVPKKALGITLIKVFCFMHMKF

SEQ ID NO: 12007 - protein, 350 aa, Artificial Sequence
  Synthetic polypeptide
MAAAPLKVCIVGSGNWGSAVAKIIGNNVKKLQKFASTVKMWVFEETVNGRKLTDIINNDHENVKYLPGHKLPENVVAMSNLSEAVQDADLLVFVIPHQFIHRICDEITGRVPKKALGITLIKGIDEGPEGLKLISDIIREKMGIDISVLMGANIANEVAAEKFCETTIGSKVMENGLLFKELLQTPNFRITVVDDADTVELCGALKNIVAVGAGFCDGLRCGDNTKAAVIRLGLMEMIAFARIFCKGQVSTATFLESCGVADLITTCYGGRNRRVAEAFARTGKTIEELEKEMLNGQKLQGPQTSAEVYRILKQKGLLDKRLRQQNRLNPGGRGCSETRSCHRTPAWAIE

SEQ ID NO: 12008 - protein, 214 aa, Artificial Sequence
  Synthetic polypeptide
MAMGDDKSFDDEESVDGNRPSSAASAFKVPAPKTSGNPANSARKPGSAGGPKVGGASKEGGAGAVDEDDFIKAFTDVPSIQIYSSRELEETLNKIREILSDDKHDWDQRANALKKIRSLLVAGAAQYDCFFQHLRLLDGALKLSAKDLRSQVVREACITVAHLSTVLGNKFDHGAEAIVPTLFNLVPNSAKVMATSGCAAIRFIIRAGRGSSHL

SEQ ID NO: 12009 - protein, 448 aa, Artificial Sequence
  Synthetic polypeptide
MEPRSMEYFCAQVQQKDVGGRLQVGQELLLYLGAPGAISDLEEDLGRLGKTVDALTGWVGSSNYRVSLMGLEILSAFVDRLSTRFKSYVAMVIVALIDRMGDAKDKVRDEAQTLILKLMDQVAPPMYIWEQLASGFKHKNFRSREGVCLCLIETLNIFGAQPLVISKLIPHLCILFGDSNSQVRDAAILAIVEIYRHVGEKVRMDLYKRGIPPARLEMIFAKFDEVQSSGGMILSVCKDKSFDDEESVDGNRPSSAASAFKVPAPKTSGNPANSARKPGSAGGPKVGAGASKEGGAGAVDEDDFIKAFTDVPSIQIYSSRELEETLNKIREILSDDKHDWDQRANALKKIRSLLVAGAAQYDCFFQHLRLLDGALKLSAKDLRSQVVREACITVAHLSTVLGNKFDHGAEAIVPTLFNLVPNSAKVMATSGCAAIRFIIRAGRGSSHL

SEQ ID NO: 12010 - protein, 447 aa, Artificial Sequence
  Synthetic polypeptide
MEPRSMEYFCAQVQQKDVGGRLQVGQELLLYLGAPGAISDLEEDLGRLGKTVDALTGWVGSSNYRVSLMGLEILSAFVDRLSTRFKSYVAMVIVALIDRMGDAKDKVRDEAQTLILKLMDQVAPPMYIWEQLASGFKHKNFRSREGVCLCLIETLNIFGAQPLVISKLIPHLCILFGDSNSQVRDAAILAIVEIYRHVGEKVRMDLYKRGIPPARLEMIFAKFDEVQSSGGMILSVCKDKSFDDEESVDGNRPSSAASAFKVPAPKTSGNPANSARKPGSAGGPKVGGASKEGGAGAVDEDDFIKAFTDVPSIQIYSSRELEETLNKIREILSDDKHDWDQRANALKKIRSLLVAGAAQYDCFFQHLRLLDGALKLSAKDLRSQVVREACITVAHLSTVLGNKFDHGAEAIVPTLFNLVPNSAKVMATSGCAAIRFIIRAGRGSSHL

SEQ ID NO: 12011 - protein, 224 aa, Artificial Sequence
  Synthetic polypeptide
MLIQRTFISYYISYQNKSFDDEESVDGNRPSSAASAFKVPAPKTSGNPANSARKPGSAGGPKVGGASKEGGAGAVDEDDFIKAFTDVPSIQIYSSRELEETLNKIREILSDDKHDWDQRANALKKIRSLLVAGAAQYDCFFQHLRLLDGALKLSAKDLRSQVVREACITVAHLSTVLGNKFDHGAEAIVPTLFNLVPNSAKVMATSGCAAIRFIIRAGRGSSHL

SEQ ID NO: 12012 - protein, 199 aa, Artificial Sequence
  Synthetic polypeptide
MRRLICKRICDYKSFDDEESVDGNRPSSAASAFKVPAPKTSGNPANSARKPGSAGGPKVGELLSIMIYSSRELEETLNKIREILSDDKHDWDQRANALKKIRSLLVAGAAQYDCFFQHLRLLDGALKLSAKDLRSQVVREACITVAHLSTVLGNKFDHGAEAIVPTLFNLVPNSAKVMATSGCAAIRFIIRAGRGSSHL

SEQ ID NO: 12013 - protein, 220 aa, Artificial Sequence
  Synthetic polypeptide
MRRLICKRICDYKSFDDEESVDGNRPSSAASAFKVPAPKTSGNPANSARKPGSAGGPKVGGASKEGGAGAVDEDDFIKAFTDVPSIQIYSSRELEETLNKIREILSDDKHDWDQRANALKKIRSLLVAGAAQYDCFFQHLRLLDGALKLSAKDLRSQVVREACITVAHLSTVLGNKFDHGAEAIVPTLFNLVPNSAKVMATSGCAAIRFIIRAGRGSSHL

SEQ ID NO: 12014 - protein, 40 aa, Artificial Sequence
  Synthetic polypeptide
MIPPSSPREDGVDGLPKEAVGAEQPPSPASTSSQESKLLS

SEQ ID NO: 12015 - protein, 135 aa, Artificial Sequence
  Synthetic polypeptide
MIPPSSPREDGVDGLPKEAVGAEQPPSPASTSSQESKLQKLKRSLSFKTKSLRSKSADNFFQRTNSEDMKLQAHMVAEISPSSSPLPAPGSLTSTPARAGLHPGGKAHAFQEYIFKKPTFCDVCNHMIVGLQLLS

SEQ ID NO: 12016 - protein, 124 aa, Artificial Sequence
  Synthetic polypeptide
MIPPSSPREDGVDGLPKEAVGAEQPPSPASTSSQESKTKSLRSKSADNFFQRTNSEDMKLQAHMVAEISPSSSPLPAPGSLTSTPARAGLHPGGKAHAFQEYIFKKPTFCDVCNHMIVGLQLLS

SEQ ID NO: 12017 - protein, 152 aa, Artificial Sequence
  Synthetic polypeptide
MIPPSSPREDGVDGLPKEAVGAEQPPSPASTSSQESKLQKLKRSLSFKTKSLRSKSADNFFQRTNSEDMKLQAHMVAEISPSSSPLPAPGSLTSTPARAGLHPGGKAHAFQEYIFKKPTFCDVCNHMIVASLLKPARPRAHREEGTTPDASP

SEQ ID NO: 12018 - protein, 141 aa, Artificial Sequence
  Synthetic polypeptide
MIPPSSPREDGVDGLPKEAVGAEQPPSPASTSSQESKTKSLRSKSADNFFQRTNSEDMKLQAHMVAEISPSSSPLPAPGSLTSTPARAGLHPGGKAHAFQEYIFKKPTFCDVCNHMIVASLLKPARPRAHREEGTTPDASP

SEQ ID NO: 12019 - protein, 251 aa, Artificial Sequence
  Synthetic polypeptide
MSGALDVLQMKEEDVLKFLAAGTHLGGTNLDFQMEQYIYKRKSDGIYIINLKRTWEKLLLAARAIVAIENPADVSVISSRNTGQRAVLKFAAATGATPIAGRFTPGTFTNQIQAAFREPRLLVVTDPRADHQPLTEASYVNLPTIALCNTDSPLRYVDIAIPCNNKGAHSVGLMWWMLAREVLRMRGTISREHPWEVMPDLYFYRDPEEIEKEEQAAAEKAVTKEEFQGEWTAPAPEFTATQPEVAAWVTE

SEQ ID NO: 12020 - protein, 256 aa, Artificial Sequence
  Synthetic polypeptide
MSGALDVLQMKEEDVLKFLAAGTHLGGTNLDFQMEQYIYKRKSDGIYIINLKRTWEKLLLAARAIVAIENPADVSVISSRNTGQVCGTVRAVLKFAAATGATPIAGRFTPGTFTNQIQAAFREPRLLVVTDPRADHQPLTEASYVNLPTIALCNTDSPLRYVDIAIPCNNKGAHSVGLMWWMLAREVLRMRGTISREHPWEVMPDLYFYRDPEEIEKEEQAAAEKAVTKEEFQGEWTAPAPEFTATQPEVAAWVTE

SEQ ID NO: 12021 - protein, 365 aa, Artificial Sequence
  Synthetic polypeptide
MSGALDVLQMKEEDVLKFLAAGTHLGGTNLDFQMEQYIYKRKSDGIYIINLKRTWEKLLLAARAIVAIENPADVSVISSRNTGQRAVLKFAAATGATPIAGRFTPGTFTNQIQAAFREPRLLVVTDPRADHQPLTEASYVNLPTIALCNTDSPLRYVDIAIPCNNKGAHSVGLMWWMLAREVLRMRGTISREHPWEVMPDLYFYRDPEEIEKEEQAAAEKAVTKEEFQGEWTAPAPEFTATQPEVADWSEGVQVPSVPIQQFPTEDWSAQPATEDWSAAPTAQATEWVPGLQTESRSLSAQCCPGWSAVARTSTSQPPALASQSAEIAASAQLPPRLGSEERLCLAAHRLGCEEPLCPAFISSRK

SEQ ID NO: 12022 - protein, 370 aa, Artificial Sequence
  Synthetic polypeptide
MSGALDVLQMKEEDVLKFLAAGTHLGGTNLDFQMEQYIYKRKSDGIYIINLKRTWEKLLLAARAIVAIENPADVSVISSRNTGQVCGTVRAVLKFAAATGATPIAGRFTPGTFTNQIQAAFREPRLLVVTDPRADHQPLTEASYVNLPTIALCNTDSPLRYVDIAIPCNNKGAHSVGLMWWMLAREVLRMRGTISREHPWEVMPDLYFYRDPEEIEKEEQAAAEKAVTKEEFQGEWTAPAPEFTATQPEVADWSEGVQVPSVPIQQFPTEDWSAQPATEDWSAAPTAQATEWVPGLQTESRSLSAQCCPGWSAVARTSTSQPPALASQSAEIAASAQLPPRLGSEERLCLAAHRLGCEEPLCPAFISSRK

SEQ ID NO: 12023 - protein, 184 aa, Artificial Sequence
  Synthetic polypeptide
MAATASPQPLATEDADSENSSFYYYDYLDEVAFMLCRKDAVVSFGKVFLPVFYSLIFVLGLSGNLLLLMVLLRYVPRRRMVEIYLLNLAISNLLFLVTLPFWGISVAWHWVFGSFLCKMMGNHISIPQDTPLGCILKNWEKFDPQALKRKRLIFFVTQPGSDMDLGTSNLGQKMEVLILILSIN

SEQ ID NO: 12024 - protein, 298 aa, Artificial Sequence
  Synthetic polypeptide
MAATASPQPLATEDADSENSSFYYYDYLDEVAFMLCRKDAVVSFGKVFLPVFYSLIFVLGLSGNLLLLMVLLRYVPRRRMVEIYLLNLAISNLLFLVTLPFWGISVAWHWVFGSFLCKMVSTLYTINFYSGIFFISCMSLDKYLEIVHAQPYHRLRTRAKSLLLATIVWAVSLAVSIPDMVFVQTHENPKGVWNCHADFGGHGTIWKLFLRFQQNLLGFLLPLLAMIFFYSRIGCVLVRLRPAGQGRALKIAAALVVAFFVLWFPYNLTLFLHTLLDLQVFGNCEVSQHLDYALQLSW

SEQ ID NO: 12025 - protein, 360 aa, Artificial Sequence
  Synthetic polypeptide
MAATASPQPLATEDADSENSSFYYYDYLDEVAFMLCRKDAVVSFGKVFLPVFYSLIFVLGLSGNLLLLMVLLRYVPRRRMVEIYLLNLAISNLLFLVTLPFWGISVAWHWVFGSFLCKMVSTLYTINFYSGIFFISCMSLDKYLEIVHAQPYHRLRTRAKSLLLATIVWAVSLAVSIPDMVFVQTHENPKGVWNCHADFGGHGTIWKLFLRFQQNLLGFLLPLLAMIFFYSRIGCVLVRLRPAGQGRALKIAAALVVAFFVLWFPYNLTLFLHTLLDLQVFGNCEVSQHLDYALQMGNHISIPQDTPLGCILKNWEKFDPQALKRKRLIFFVTQPGSDMDLGTSNLGQKMEVLILILSIN

SEQ ID NO: 12026 - protein, 618 aa, Artificial Sequence
  Synthetic polypeptide
MKVTLSALDTSESSFTPLVVIELAQDVKEETKEWLKNRIIAKKKDGDNNDDFLTMAECQFIIKHELENLRAKDEKMIPGYPQAKLYPGKSLLRRLLTSGIVIQVFPLHDSEALKKLEDTWYTRFALKYQPIDSIRGYFGETIALYFGFLEYFTFALIPMAVIGLPYYLFVWEDYDKYVIFASFNLIWSTVILELWKRGCANMTYRWGTLLMKRKFEEPRPGFHGVLGINSITGKEEPLYPSYKRQLRIYLVSLPFVCLCLYFSLYVMMIYFDMEVWALGLHENSGSEWTSVLLYVPSIIYAIVIEIMNRLYRYAAEFLTSWENHRLESAYQNHLILKVLVFNFLNCFASLFYIAFVLKDMKLLRQSLATLLITSQILNQIMESFLPYWLQRKHGVRVKRKVQALKADIDATLYEQVILEKEMGTYLGTFDDYLELFLQFGYVSLFSCVYPLAAAFAVLNNFTEVNSDALKMCRVFKRPFSEPSANIGVWQLAFETMSVISVVTNCALIGMSPQVNAVFPESKADLILIVVAVEIGRNPPEGYHLGSTRLWRTRESHIQLLIVHACLIPCTEQFDRIYLYYNCVYPLTEQFCLWECIPQIYLPVHKMTNVGGNLLQHPY

SEQ ID NO: 12027 - protein, 684 aa, Artificial Sequence
  Synthetic polypeptide
MKVTLSALDTSESSFTPLVVIELAQDVKEETKEWLKNRIIAKKKDGGAQLLFRPLLNKYEQETLENQNLYLVGASKIRMLLGAEAVGLVKECNDNTMRAFTYRTRQNFKGFDDNNDDFLTMAECQFIIKHELENLRAKDEKMIPGYPQAKLYPGKSLLRRLLTSGIVIQVFPLHDSEALKKLEDTWYTRFALKYQPIDSIRGYFGETIALYFGFLEYFTFALIPMAVIGLPYYLFVWEDYDKYVIFASFNLIWSTVILELWKRGCANMTYRWGTLLMKRKFEEPRPGFHGVLGINSITGKEEPLYPSYKRQLRIYLVSLPFVCLCLYFSLYVMMIYFDMEVWALGLHENSGSEWTSVLLYVPSIIYAIVIEIMNRLYRYAAEFLTSWENHRLESAYQNHLILKVLVFNFLNCFASLFYIAFVLKDMKLLRQSLATLLITSQILNQIMESFLPYWLQRKHGVRVKRKVQALKADIDATLYEQVILEKEMGTYLGTFDDYLELFLQFGYVSLFSCVYPLAAAFAVLNNFTEVNSDALKMCRVFKRPFSEPSANIGVWQLAFETMSVISVVTNCALIGMSPQVNAVFPESKADLILIVVAVEIGRNPPEGYHLGSTRLWRTRESHIQLLIVHACLIPCTEQFDRIYLYYNCVYPLTEQFCLWECIPQIYLPVHKMTNVGGNLLQHPY

SEQ ID NO: 12028 - protein, 494 aa, Artificial Sequence
  Synthetic polypeptide
MKVTLSALDTSESSFTPLVVIELAQDVKEETKEWLKNRIIAKKKDGGAQLLFRPLLNKYEQETLENQNLYLVGASKIRMLLGAEAVGLVKECNDNTMRAFTYRTRQNFKGFDDNNDDFLTMAECQFIIKHELENLRAKDEKMIPGYPQAKLYPGKSLLRRLLTSGIVIQVFPLHDSEALKKLEDTWYTRFALKYQPIENHRLESAYQNHLILKVLVFNFLNCFASLFYIAFVLKDMKLLRQSLATLLITSQILNQIMESFLPYWLQRKHGVRVKRKVQALKADIDATLYEQVILEKEMGTYLGTFDDYLELFLQFGYVSLFSCVYPLAAAFAVLNNFTEVNSDALKMCRVFKRPFSEPSANIGVWQLAFETMSVISVVTNCALIGMSPQVNAVFPESKADLILIVVAVEIGRNPPEGYHLGSTRLWRTRESHIQLLIVHACLIPCTEQFDRIYLYYNCVYPLTEQFCLWECIPQIYLPVHKMTNVGGNLLQHPY

SEQ ID NO: 12029 - protein, 573 aa, Artificial Sequence
  Synthetic polypeptide
MKVTLSALDTSESSFTPLVVIELAQDVKEETKEWLKNRIIAKKKDGVRRLLTSGIVIQVFPLHDSEALKKLEDTWYTRFALKYQPIDSIRGYFGETIALYFGFLEYFTFALIPMAVIGLPYYLFVWEDYDKYVIFASFNLIWSTVILELWKRGCANMTYRWGTLLMKRKFEEPRPGFHGVLGINSITGKEEPLYPSYKRQLRIYLVSLPFVCLCLYFSLYVMMIYFDMEVWALGLHENSGSEWTSVLLYVPSIIYAIVIEIMNRLYRYAAEFLTSWENHRLESAYQNHLILKVLVFNFLNCFASLFYIAFVLKDMKLLRQSLATLLITSQILNQIMESFLPYWLQRKHGVRVKRKVQALKADIDATLYEQVILEKEMGTYLGTFDDYLELFLQFGYVSLFSCVYPLAAAFAVLNNFTEVNSDALKMCRVFKRPFSEPSANIGVWQLAFETMSVISVVTNCALIGMSPQVNAVFPESKADLILIVVAVEIGRNPPEGYHLGSTRLWRTRESHIQLLIVHACLIPCTEQFDRIYLYYNCVYPLTEQFCLWECIPQIYLPVHKMTNVGGNLLQHPY

SEQ ID NO: 12030 - protein, 212 aa, Artificial Sequence
  Synthetic polypeptide
  misc_feature (1)..(1): Xaa can be any naturally occurring amino acid
XCVYPLAAAFAVLNNFTEVNSDALKMCRVFKRPFSEPSANIGVWQIIFCLDTGVKRGLNCKVMRNLLGEMEMSCVLFVVVVVSQLAFETMSVISVVTNCALIGMSPQVNAVFPESKADLILIVVAVEIGRNPPEGYHLGSTRLWRTRESHIQLLIVHACLIPCTEQFDRIYLYYNCVYPLTEQFCLWECIPQIYLPVHKMTNVGGNLLQHPY

SEQ ID NO: 12031 - protein, 565 aa, Artificial Sequence
  Synthetic polypeptide
MKVTLSALDTSESSFTPLVVIELAQDVKEETKEWLKNRIIAKKKDGDNNDDFLTMAECQFIIKHELENLRAKDEKMIPGYPQAKLYPGKSLLRRLLTSGIVIQVFPLHDSEALKKLEDTWYTRFALKYQPIDSIRGYFGETIALYFGFLEYFTFALIPMAVIGLPYYLFVWEDYDKYVIFASFNLIWSTVILELWKRGCANMTYRWGTLLMKRKFEEPRPGFHGVLGINSITGKEEPLYPSYKRQLRIYLVSLPFVCLCLYFSLYVMMIYFDMEVWALGLHENSGSEWTSVLLYVPSIIYAIVIEIMNRLYRYAAEFLTSWENHRLESAYQNHLILKVLVFNFLNCFASLFYIAFVLKDMKLLRQSLATLLITSQILNQIMESFLPYWLQRKHGVRVKRKVQALKADIDATLYEQVILEKEMGTYLGTFDDYLELFLQFGYVSLFSCVYPLAAAFAVLNNFTEVNSDALKMCRVFKRPFSEPSANIGVWQLAFETMSVISVVTNCALIGMSPQVNAVFPESKADLILIVVAVEVLASSSPSATIVSFLRPPQPCRTVSQLNLFPL

SEQ ID NO: 12032 - protein, 631 aa, Artificial Sequence
  Synthetic polypeptide
MKVTLSALDTSESSFTPLVVIELAQDVKEETKEWLKNRIIAKKKDGGAQLLFRPLLNKYEQETLENQNLYLVGASKIRMLLGAEAVGLVKECNDNTMRAFTYRTRQNFKGFDDNNDDFLTMAECQFIIKHELENLRAKDEKMIPGYPQAKLYPGKSLLRRLLTSGIVIQVFPLHDSEALKKLEDTWYTRFALKYQPIDSIRGYFGETIALYFGFLEYFTFALIPMAVIGLPYYLFVWEDYDKYVIFASFNLIWSTVILELWKRGCANMTYRWGTLLMKRKFEEPRPGFHGVLGINSITGKEEPLYPSYKRQLRIYLVSLPFVCLCLYFSLYVMMIYFDMEVWALGLHENSGSEWTSVLLYVPSIIYAIVIEIMNRLYRYAAEFLTSWENHRLESAYQNHLILKVLVFNFLNCFASLFYIAFVLKDMKLLRQSLATLLITSQILNQIMESFLPYWLQRKHGVRVKRKVQALKADIDATLYEQVILEKEMGTYLGTFDDYLELFLQFGYVSLFSCVYPLAAAFAVLNNFTEVNSDALKMCRVFKRPFSEPSANIGVWQLAFETMSVISVVTNCALIGMSPQVNAVFPESKADLILIVVAVEVLASSSPSATIVSFLRPPQPCRTVSQLNLFPL

SEQ ID NO: 12033 - protein, 441 aa, Artificial Sequence
  Synthetic polypeptide
MKVTLSALDTSESSFTPLVVIELAQDVKEETKEWLKNRIIAKKKDGGAQLLFRPLLNKYEQETLENQNLYLVGASKIRMLLGAEAVGLVKECNDNTMRAFTYRTRQNFKGFDDNNDDFLTMAECQFIIKHELENLRAKDEKMIPGYPQAKLYPGKSLLRRLLTSGIVIQVFPLHDSEALKKLEDTWYTRFALKYQPIENHRLESAYQNHLILKVLVFNFLNCFASLFYIAFVLKDMKLLRQSLATLLITSQILNQIMESFLPYWLQRKHGVRVKRKVQALKADIDATLYEQVILEKEMGTYLGTFDDYLELFLQFGYVSLFSCVYPLAAAFAVLNNFTEVNSDALKMCRVFKRPFSEPSANIGVWQLAFETMSVISVVTNCALIGMSPQVNAVFPESKADLILIVVAVEVLASSSPSATIVSFLRPPQPCRTVSQLNLFPL

SEQ ID NO: 12034 - protein, 520 aa, Artificial Sequence
  Synthetic polypeptide
MKVTLSALDTSESSFTPLVVIELAQDVKEETKEWLKNRIIAKKKDGVRRLLTSGIVIQVFPLHDSEALKKLEDTWYTRFALKYQPIDSIRGYFGETIALYFGFLEYFTFALIPMAVIGLPYYLFVWEDYDKYVIFASFNLIWSTVILELWKRGCANMTYRWGTLLMKRKFEEPRPGFHGVLGINSITGKEEPLYPSYKRQLRIYLVSLPFVCLCLYFSLYVMMIYFDMEVWALGLHENSGSEWTSVLLYVPSIIYAIVIEIMNRLYRYAAEFLTSWENHRLESAYQNHLILKVLVFNFLNCFASLFYIAFVLKDMKLLRQSLATLLITSQILNQIMESFLPYWLQRKHGVRVKRKVQALKADIDATLYEQVILEKEMGTYLGTFDDYLELFLQFGYVSLFSCVYPLAAAFAVLNNFTEVNSDALKMCRVFKRPFSEPSANIGVWQLAFETMSVISVVTNCALIGMSPQVNAVFPESKADLILIVVAVEVLASSSPSATIVSFLRPPQPCRTVSQLNLFPL

SEQ ID NO: 12035 - protein, 159 aa, Artificial Sequence
  Synthetic polypeptide
  misc_feature (1)..(1): Xaa can be any naturally occurring amino acid
XCVYPLAAAFAVLNNFTEVNSDALKMCRVFKRPFSEPSANIGVWQIIFCLDTGVKRGLNCKVMRNLLGEMEMSCVLFVVVVVSQLAFETMSVISVVTNCALIGMSPQVNAVFPESKADLILIVVAVEVLASSSPSATIVSFLRPPQPCRTVSQLNLFPL

SEQ ID NO: 12036 - protein, 671 aa, Artificial Sequence
  Synthetic polypeptide
MAGLNCGVSIALLGVLLLGAARLPRGAEAFEIALPRESNITVLIKLGTPTLLAKPCYIVISKRHITMLSIKSGERIVFTFSCQSPENHFVIEIQKNIDCMSGPCPFGEVQLQPSTSLLPTLNRTFIWDVKAHKSIGLELQFSIPRLRQIGPGESCPDGVTHSISGRIDATVVRIGTFCSNGTVSRIKMQEGVKMALHLPWFHPRNVSGFSIANRSSIKRLCIIESVFEGEGSATLMSANYPEGFPEDELMTWQFVVPAHLRASVSFLNFNLSNCERKEERVEYYIPGSTTNPEVFKLEDKQPGNMAGNFNLSLQGCDQDAQSPGILRLQFQVLVQHPQNESNKIYVVDLSNERAMSLTIEPRPVKQSRKFVPGCFVCLESRTCSSNLTLTSGSKHKISFLCDDLTRLWMNVEKTISCTDHRYCQRKSYSLQVPSDILHLPVELHDFSWKLLVPKDRLSLVLVPAQKLQQHTHEKPCNTSFSYLVASAIPSQDLYFGSFCPGGSIKQIQVKQNISVTLRTFAPSFQQEASRQGLTVSFIPYFKEEGVFTVTPDTKSKVYLRTPNWDRGLPSLTSVSWNISVPRDQVACLTFFKERSGVVCQTGRAFMIIQEQRTRAEEIFSLDEDVLPKPSFHHHSFWVNISNCSPTSGKQLDLLFSVTLTPRTVGEVSSHL

SEQ ID NO: 12037 - protein, 192 aa, Artificial Sequence
  Synthetic polypeptide
MATAAYEQLKLHITPEKFYVEACDDGADDVLTIDRVSTEVTLAVKKDVPPSAVTRPIFGILGTIHLVAGNYLIVITKKIKVGEFFSHVVWKATDFDVLSYKKTMLHLTDIQLQDNKTFLAMLNHVLNVDGFYFSTTYDLTHTLQRLSNTSPEFQEMSLLERADQRFVWNGHLLRELSAQPEVHRFALPVLHG

SEQ ID NO: 12038 - protein, 89 aa, Artificial Sequence
  Synthetic polypeptide
MLHLTDIQLQDNKTFLAMLNHVLNVDGFYFSTTYDLTHTLQRLSNTSPEFQEMSLLERADQRFVWNGHLLRELSAQPEVHRFALPVLHG

SEQ ID NO: 12039 - protein, 131 aa, Artificial Sequence
  Synthetic polypeptide
MWKLVMMEQMTYLPLTVCPQRLPLQSRKMFLLQLSQDQYLVYWAQSIWWQLQDNKTFLAMLNHVLNVDGFYFSTTYDLTHTLQRLSNTSPEFQEMSLLERADQRFVWNGHLLRELSAQPEVHRFALPVLHG

SEQ ID NO: 12040 - protein, 633 aa, Artificial Sequence
  Synthetic polypeptide
MNNSLENTISFEEYIRVKARSVPQHRMKEFLDSLASKGPEALQEFQQTATTTMVYQQGGNCIYTDSTEVAGSLLELACPVTTSVQPQTQQEQQIQVQQPQQVQVQVQVQQSPQQVSAQLSPQLTVHQPTEQPIQVQVQIQGQAPQSAAPSIQTPSLQSPSPSQLQAAQIQVQHVQAAQQIQAAEIPEEHIPHQQIQAQLVAGQSLAGGQQIQIQTVGALSPPPSQQGSPREGERRVGTASVLQPVKKRKVDMPITVSYAISGQPVATVLAIPQGQQQSYVSLRPDLLTVDSAHLYSATGTITSPTGETWTIPVYSAQPRGDPQQQSITHIAIPQEAYNAVHVSGSPTALAAVKLEDDKEKMVGTTSVVKNSHEEVVQTLANSLFPAQFMNGNIHIPVAVQAVAGTYQNTAQTVHIWDPQQQPQQQTPQEQTPPPQQQQQQLQVTCSAQTVQVAEVEPQSQPQPSPELLLPNSLKPEEGLEVWKNWAQTKNAELEKDAQNRLAPIGRRQLLRFQEDLISSAVAELNYGLCLMTREARNGEGEPYDPDVLYYIFLCIQKYLFENGRVDDIFSDLYYVRFTEWLHEVLKDVQPRVTPLGMVAHTCNPSTLGGRDGLITEYWEFKTSLANMVKPHLY

SEQ ID NO: 12041 - protein, 349 aa, Artificial Sequence
  Synthetic polypeptide
MRAGPGPTVTLALVLAVSWAMELKPTAPPIFTGRPFVVAWDVPTQDCGPRLKVPLDLNAFDVQASPNEGFVNQNITIFYRDRLGLYPRFDSAGRSVHGGVPQNVSLWAHRKMLQKRVEHYIRTQESAGLAVIDWEDWRPVWVRNWQDKDVYRRLSRQLVASRHPDWPPDRIVKQAQYEFEFAAQQFMLETLRYVKAVRPRHLWGFYLFPDCYNHDYVQNWESYTGRCPDVEVARNDQLAWLWAESTALFPSVYLDETLASSRHGRNFVSFRVQEALRVARTHHANHALPVYVFTRPTYSRRLTGLSEMDLISTIGESAALGAAGVILWGDAGYTTSTEVRSLSARPPIV

SEQ ID NO: 12042 - protein, 384 aa, Artificial Sequence
  Synthetic polypeptide
MRAGPGPTVTLALVLAVSWAMELKPTAPPIFTGRPFVVAWDVPTQDCGPRLKVPLDLNAFDVQASPNEGFVNQNITIFYRDRLGLYPRFDSAGRSVHGGVPQNVSLWAHRKMLQKRVEHYIRTQESAGLAVIDWEDWRPVWVRNWQDKDVYRRLSRQLVASRHPDWPPDRIVKQAQYEFEFAAQQFMLETLRYVKAVRPRHLWGFYLFPDCYNHDYVQNWESYTGRCPDVEVARNDQLAWLWAESTALFPSVYLDETLASSRHGRNFVSFRVQEALRVARTHHANHALPVYVFTRPTYSRRLTGLSEMDLISTIGESAALGAAGVILWGDAGYTTSTPALASQSAEIAASARPPPRLGSEERLCLAAHRLGCEEPLCLAAQSGK

SEQ ID NO: 12043 - protein, 385 aa, Artificial Sequence
  Synthetic polypeptide
MRAGPGPTVTLALVLAVSWAMELKPTAPPIFTGRPFVVAWDVPTQDCGPRLKVPLDLNAFDVQASPNEGFVNQNITIFYRDRLGLYPRFDSAGRSVHGGVPQNVSLWAHRKMLQKRVEHYIRTQESAGLAVIDWEDWRPVWVRNWQDKDVYRRLSRQLVASRHPDWPPDRIVKQAQYEFEFAAQQFMLETLRYVKAVRPRHLWGFYLFPDCYNHDYVQNWESYTGRCPDVEVARNDQLAWLWAESTALFPSVYLDETLASSRHGRNFVSFRVQEALRVARTHHANHALPVYVFTRPTYSRRLTGLSEMDLISTIGESAALGAAGVILWGDAGYTTSTQPALASQSAEIAASARPPPRLGSEERLCLAAHRLGCEEPLCLAAQSGK

SEQ ID NO: 12044 - protein, 415 aa, Artificial Sequence
  Synthetic polypeptide
MRAGPGPTVTLALVLAVSWAMELKPTAPPIFTGRPFVVAWDVPTQDCGPRLKVPLDLNAFDVQASPNEGFVNQNITIFYRDRLGLYPRFDSAGRSVHGGVPQNVSLWAHRKMLQKRVEHYIRTQESAGLAVIDWEDWRPVWVRNWQDKDVYRRLSRQLVASRHPDWPPDRIVKQAQYEFEFAAQQFMLETLRYVKAVRPRHLWGFYLFPDCYNHDYVQNWESYTGRCPDVEVARNDQLAWLWAESTALFPSVYLDETLASSRHGRNFVSFRVQEALRVARTHHANHALPVYVFTRPTYSRRLTGLSEMDLISTIGESAALGAAGVILWGDAGYTTSTAGVQWRDLGSLQHPPPSSLPWPPKVPRLQPLPGRHPVWEVRSVSAWPPIVWDVRSPSAWLPSLESEERLCPAAIPSRK

SEQ ID NO: 12045 - protein, 433 aa, Artificial Sequence
  Synthetic polypeptide
MRAGPGPTVTLALVLAVSWAMELKPTAPPIFTGRPFVVAWDVPTQDCGPRLKVPLDLNAFDVQASPNEGFVNQNITIFYRDRLGLYPRFDSAGRSVHGGVPQNVSLWAHRKMLQKRVEHYIRTQESAGLAVIDWEDWRPVWVRNWQDKDVYRRLSRQLVASRHPDWPPDRIVKQAQYEFEFAAQQFMLETLRYVKAVRPRHLWGFYLFPDCYNHDYVQNWESYTGRCPDVEVARNDQLAWLWAESTALFPSVYLDETLASSRHGRNFVSFRVQEALRVARTHHANHALPVYVFTRPTYSRRLTGLSEMDLISTIGESAALGAAGVILWGDAGYTTSTPRPPEVLGLQTESLNGAQAGVQWRDLGSLQHPPPSSLPWPPKVPRLQPLPGRHPVWEVRSVSAWPPIVWDVRSPSAWLPSLESEERLCPAAIPSRK

SEQ ID NO: 12046 - protein, 81 aa, Artificial Sequence
  Synthetic polypeptide
MGDLELLLPGEAEVLVRGLRSFPLREMGSEGWNQQHENLEKLNMQAILDATVSQGEPIQELLVTHGKSMVVHTCNPSYSGG

SEQ ID NO: 12047 - protein, 38 aa, Artificial Sequence
  Synthetic polypeptide
MQAILDATVSQGEPIQELLVTHGKSMVVHTCNPSYSGG

SEQ ID NO: 12048 - protein, 514 aa, Artificial Sequence
  Synthetic polypeptide
MATARTFGPEREAEPAKEARVVGSELVDTYTVYIIQVTDGSHEWTVKHRYSDFHDLHEKLVAERKIDKNLLPPKKIIGKNSRSLVEKREKDLEVYLQKLLAAFPGVTPRVLAHFLHFHFYEINGITAALAEELFEKGEQLLGAGEVFAIGPLQLYAVTEQLQQGKPTCASGDAKTDLGHILDFTCRLKYLKVSGTEGPFGTSNIQEQLLPFDLSIFKSLHQVEISHCDAKHIRGLVASKPTLATLSVRFSATSMKEVLVPEASEFDEWEPEGTTLEGPVTAVIPTWQALTTLDLSHNSVSEIDESVKLIPKIEFLDLSHNGLLVVDNLQHLYNLVHLDLSYNKLSSLEGLHTKLGNIKTLNLAGNLLESLSGLHKLYSLVNLDLRDNRIEQMEEVRSIGSLPCLEHVSLLNNPLSIIPDYRTKVLAQFGERASEVCLDDTVTTEKELDTVEVLKAIQKAKEVKSKLSNPEKKGGEDSRLSAAPCIRPSSSPPTVAPASASLPQPILSNQVSGVS

SEQ ID NO: 12049 - protein, 62 aa, Artificial Sequence
  Synthetic polypeptide
MAPFLRIAFNSYELGSLQAEDEANQPFCAVKMKEALSTAVFCASNIMAGMQELSAHVPCMNA

SEQ ID NO: 12050 - protein, 342 aa, Artificial Sequence
  Synthetic polypeptide
MSLVLLSLAALCRSAVPREPTVQCGSETGPSPEWMLQHDLIPGDLRDLRVEPVTTSVATGDYSILMNVSWVLRADASIRLLKATKICVTGKSNFQSYSCVRCNYTEAFQTQTRPSGGKWTFSYIGFPVELNTVYFIGAHNIPNANMNEDGPSMSVNFTSPGCLDHIMKYKKKCVKAGSLWDPNITACKKNEETVEVNFTTTPLGNRYMALIQHSTIIGFSQVFEPHQKKQTRASVVIPVTGDSEGATVQLTPYFPTCGSDCIRHKGTVVLCPQTGVPFPLDNNKSKPGGWLPLLLLSLLVATWVLVAGIYLMWRHGLDCAEPLTPGFFQYIYWKIFWRFVSL

SEQ ID NO: 12051 - protein, 326 aa, Artificial Sequence
  Synthetic polypeptide
MSLVLLSLAALCRSAVPREPTVQCGSETGPSPEWMLQHDLIPGDLRDLRVEPVTTSVATGDYSILMNVSWVLRADASIRLLKATKICVTGKSNFQSYSCVRCNYTEAFQTQTRPSGGKWTFSYIGFPVELNTVYFIGAHNIPNANMNEDGPSMSVNFTSPGSLWDPNITACKKNEETVEVNFTTTPLGNRYMALIQHSTIIGFSQVFEPHQKKQTRASVVIPVTGDSEGATVQLTPYFPTCGSDCIRHKGTVVLCPQTGVPFPLDNNKSKPGGWLPLLLLSLLVATWVLVAGIYLMWRHGLDCAEPLTPGFFQYIYWKIFWRFVSL

SEQ ID NO: 12052 - protein, 96 aa, Artificial Sequence
  Synthetic polypeptide
MPSALAIFTCRPNSHPFQERHVYLDEPIKIGRSVARCRPAQNNATFDCKVLSRNHALVWFDHKTGKGNLDLCQHCRIDSALLATISERLQRAIPGR

SEQ ID NO: 12053 - protein, 174 aa, Artificial Sequence
  Synthetic polypeptide
MPSALAIFTCRPNSHPFQERHVYLDEPIKIGRSVARCRPAQNNATFDCKVLSRNHALVWFDHKTGKFYLQDTKSSNGTFINSQRLSRGSEESPPCEILSGDIIQFGVDVTENTRKVTHGCIVSTIKLFLPDGMEARLRSDVIHAPLPSPVDKVAANTPSMYSQELFQLSQYLQV

SEQ ID NO: 12054 - protein, 60 aa, Artificial Sequence
  Synthetic polypeptide
MDEQDLNEPLAKVSLLKDDLQGAQSEIEAKQEIQHLRKELIEAQELARTSKQKCFELQGQ

SEQ ID NO: 12055 - protein, 509 aa, Artificial Sequence
  Synthetic polypeptide
MPSALAIFTCRPNSHPFQERHVYLDEPIKIGRSVARCRPAQNNATFDCKVLSRNHALVWFDHKTGKFYLQDTKSSNGTFINSQRLSRGSEESPPCEILSGDIIQFGVDVTENTRKVTHGCIVSTIKLFLPDGMEARLRSDVIHAPLPSPVDKVAANTPSMYSQELFQLSQYLQEALHREQMLEQKLATLQRLLAITQEASDTSWQALIDEDRLLSRLEVMGNQLQACSKNQTEDSLRKELIALQEDKHNYETTAKESLRRVLQEKIEVVRKLSEVERSLSNTEDECTHLKEMNERTQEELRELANKYNGAVNEIKDLSDKLKVAEGKQEEIQQKGQAEKKELQHKIDEMEEKEQELQAKIEALQADNDFTNERLTALQEHLLSKSGGDCTFIHQFIECQKKLIVEGHLTKAVEETKLSKENQTRAKESDFSDTLSPSKEKSSDDTTDAQMDEQDLNEPLAKVSLLKDDLQGAQSEIEAKQEIQHLRKELIEAQELARTSKQKCFELQGQ

SEQ ID NO: 12056 - protein, 488 aa, Artificial Sequence
  Synthetic polypeptide
MPSALAIFTCRPNSHPFQERHVYLDEPIKIGRSVARCRPAQNNATFDCKVLSRNHALVWFDHKTGKFYLQDTKSSNGTFINSQRLSRGSEESPPCEILSGDIIQFGVDVTENTRKVTHGCIVSTIKLFLPDGMEARLRSDVIHAPLPSPVDKVAANTPSMYSQELFQLSQYLQEALHREQMLEQKLATLQRLLAITQEASDTSWQALIDEDRLLSRLEVMGNQLQACSKNQTEDSLRKELIALQEDKHNYETTAKESLRRVLQEKIEVVRKLSEVERSLSNTEDECTHLKEMNERTQEELRELANKYNGAVNEIKDLSDKLKVAEGKQEEIQQKGQAEKKELQHKIDEMEEKEQELQAKIEALQADNDFTNERLTALQEKLIVEGHLTKAVEETKLSKENQTRAKESDFSDTLSPSKEKSSDDTTDAQMDEQDLNEPLAKVSLLKDDLQGAQSEIEAKQEIQHLRKELIEAQELARTSKQKCFELQGQ

SEQ ID NO: 12057 - protein, 526 aa, Artificial Sequence
  Synthetic polypeptide
MPSALAIFTCRPNSHPFQERHVYLDEPIKIGRSVARCRPAQNNATFDCKVLSRNHALVWFDHKTGKFYLQDTKSSNGTFINSQRLSRGSEESPPCEILSGDIIQFGVDVTENTRKVTHGCIVSTIKLFLPDGMEARLRSDVIHAPLPSPVDKVAANTPSMYSQELFQLSQYLQEALHREQMLEQKLATLQRLLAITQEASDTSWQALIDEDRLLSRLEVMGNQLQACSKNQTEDSLRKELIALQEDKHNYETTAKESLRRVLQEKIEVVRKLSEVERSLSNTEDECTHLKEMNERTQEELRELANKYNGAVNEIKDLSDKLKVAEGKQEEIQQKGQAEKKELQHKIDEMEEKEQELQAKIEALQADNDFTNERLTALQVRLEHLQEKTLKECSSLEHLLSKSGGDCTFIHQFIECQKKLIVEGHLTKAVEETKLSKENQTRAKESDFSDTLSPSKEKSSDDTTDAQMDEQDLNEPLAKVSLLKDDLQGAQSEIEAKQEIQHLRKELIEAQELARTSKQKCFELQGQ

SEQ ID NO: 12058 - protein, 110 aa, Artificial Sequence
  Synthetic polypeptide
  misc_feature (1)..(1): Xaa can be any naturally occurring amino acid
XKLIVEGHLTKAVEETKLSKENQTRAKESDFSDTLSPSKEKSSDDTTDAQMDEQDLNEPLAKVSLLKDDLQGAQSEIEAKQEIQHLRKELIEAQELARTSKQKCFELQGQ

SEQ ID NO: 12059 - protein, 134 aa, Artificial Sequence
  Synthetic polypeptide
  misc_feature (1)..(1): Xaa can be any naturally occurring amino acid
XQAEKKELQHKIDEMEEKEQELQAKIEALQADNDFTNERLTALQENQTRAKESDFSDTLSPSKEKSSDDTTDAQMDEQDLNEPLAKVSLLKDDLQGAQSEIEAKQEIQHLRKELIEAQELARTSKQKCFELQGQ

SEQ ID NO: 12060 - protein, 1117 aa, Artificial Sequence
  Synthetic polypeptide
AGGSLGTGRRRQRLPATGGTTRSPREGEVPGVDYNFLTVKEFLDLEQSGTLLEVGTYEGNYYGTPKPPSQPVSGKVITTDALHSLQSGSKQSTPKRTKSYNDMQNAGIVHAENEEEDDVPEMNSSFTADSGEQEEHTLQETALPPVNSSIIAAPITDPSQKFPQYLPLSAEDNLGPLPENWEMAYTENGEVYFIDHNTKTTSWLDPRCLNKQQKPLEECEDDEGVHTEELDSELELPAGWEKIEDPVYGIYYVDHINRKTQYENPVLEAKRKKQLEQQQQQQQQQQQQQQQQQQQQTEEWTEDHSALVPPVIPNHPPSNPEPAREVPLQGKPFFTRNPSELKGKFIHTKLRKSSRGFGFTVVGGDEPDEFLQIKSLVLDGPAALDGKMETGDVIVSVNDTCVLGHTHAQVVKIFQSIPIGASVDLELCRGYPLPFDPDDPNTSLVTSVAILDKEPIIVNGQETYDSPASHSSKTGKVNGMKDARPSSPADVASNSSHGYPNDTVSLASSIATQPELITVHIVKGPMGFGFTIADSPGGGGQRVKQIVDSPRCRGLKEGDLIVEVNKKNVQALTHNQVVDMLVECPKGSEVTLLVQRGGLPVPKKSPKSQPLERKDSQNSSQHSVSSHRSLHTASPSHSTQVLPEFPPAEAQAPDQTDSSGQKKPDPFKIWAQSRSMYENRPMSPSPASGLSKGEREREINSTNFGECPIPDYQEQDIFLWRKETGFGFRILGGNEPGEPIYIGHIVPLGAADTDGRLRSGDELICVDGTPVIGKSHQLVVQLMQQAAKQGHVNLTVRRKVVFAVPKTENEVPSPASSHHSSNQPASLTEEKRTPQGSQNSLNTVSSGSGSTSGIGSGGGGGSGVVSTVVQPYDVEIRRGENEGFGFVIVSSVSRPEAGTTFAGNACVAMPHKIGRIIEGSPADRCGKLKVGDRILAVNGCSITNKSHSDIVNLIKEAGNTVTLRIIPGDESSNATLLTNAEKIATITTTHTPSQQGTQETRNTTKPKQESQFEFKAPQATQEQDFYTVELERGAKGFGFSLRGGREYNMDLYVLRLAEDGPAERCGKMRIGDEILEINGETTKNMKHSRAIELIKNGGRRVRLFLKRGDGSVPEYVL

SEQ ID NO: 12061 - protein, 1000 aa, Artificial Sequence
  Synthetic polypeptide
KQSTPKRTKSYNDMQNAGIVHAENEEEDDVPEMNSSFTADSGEQEEHTLQETALPPVNSSIIAAPITDPSQKFPQYLPLSAEDNLGPLPENWEMAYTENGEVYFIDHNTKTTSWLDPRCLNKQQKPLEECEDDEGVHTEELDSELELPAGWEKIEDPVYGIYYVDHINRKTQYENPVLEAKRKKQLEQQQQQQQQQQQQQQQQQQQQTEEWTEDHSALVPPVIPNHPPSNPEPAREVPLQGKPFFTRNPSELKGKFIHTKLRKSSRGFGFTVVGGDEPDEFLQIKSLVLDGPAALDGKMETGDVIVSVNDTCVLGHTHAQVVKIFQSIPIGASVDLELCRGYPLPFDPDDPNTSLVTSVAILDKEPIIVNGQETYDSPASHSSKTGKVNGMKDARPSSPADVASNSSHGYPNDTVSLASSIATQPELITVHIVKGPMGFGFTIADSPGGGGQRVKQIVDSPRCRGLKEGDLIVEVNKKNVQALTHNQVVDMLVECPKGSEVTLLVQRGGLPVPKKSPKSQPLERKDSQNSSQHSVSSHRSLHTASPSHSTQVLPEFPPAEAQAPDQTDSSGQKKPDPFKIWAQSRSMYENRLPDYQEQDIFLWRKETGFGFRILGGNEPGEPIYIGHIVPLGAADTDGRLRSGDELICVDGTPVIGKSHQLVVQLMQQAAKQGHVNLTVRRKVVFAVPKTENEVPSPASSHHSSNQPASLTEEKRTPQGSQNSLNTVSSGSGSTSGIGSGGGGGSGVVSTVVQPYDVEIRRGENEGFGFVIVSSVSRPEAGTTFAGNACVAMPHKIGRIIEGSPADRCGKLKVGDRILAVNGCSITNKSHSDIVNLIKEAGNTVTLRIIPGDESSNATLLTNAEKIATITTTHTPSQQGTQETRNTTKPKQESQFEFKAPQATQEQDFYTVELERGAKGFGFSLRGGREYNMDLYVLRLAEDGPAERCGKMRIGDEILEINGETTKNMKHSRAIELIKNGGRRVRLFLKRGDGSVPEYVL

SEQ ID NO: 12062 - protein, 1146 aa, Artificial Sequence
  Synthetic polypeptide
MSKVIQKKNHWTSRVHECTVKRGPQGELGVTVLGGAEHGEFPYVGAVAAVEAAGLPGGGEGPRLGEGELLLEVQGVRVSGLPRYDVLGVIDSCKEAVTFKAVRQGGRLNKDLRHFLNQRFQKGSPDHELQQTIRDNLYRHAVPCTTRSPREGEVPGVDYNFLTVKEFLDLEQSGTLLEVGTYEGNYYGTPKPPSQPVSGKVITTDALHSLQSGSKQSTPKRTKSYNDMQNAGIVHAENEEEDDVPEMNSSFTADSGEQEEHTLQETALPPVNSSIIAAPITDPSQKFPQYLPLSAEDNLGPLPENWEMAYTENGEVYFIDHNTKTTSWLDPRCLNKQQKPLEECEDDEGVHTEELDSELELPAGWEKIEDPVYGIYYVDHINRKTQYENPVLEAKRKKQLEQQQQQQQQQQQQQQQQQQQQTEEWTEDHSALVPPVIPNHPPSNPEPAREVPLQGKPFFTRNPSELKGKFIHTKLRKSSRGFGFTVVGGDEPDEFLQIKSLVLDGPAALDGKMETGDVIVSVNDTCVLGHTHAQVVKIFQSIPIGASVDLELCRGYPLPFDPDDPNTSLVTSVAILDKEPIIVNGQETYDSPASHSSKTGKVNGMKDARPSSPADVASNSSHGYPNDTVSLASSIATQPELITVHIVKGPMGFGFTIADSPGGGGQRVKQIVDSPRCRGLKEGDLIVEVNKKNVQALTHNQVVDMLVECPKGSEVTLLVQRGGLPVPKKSPKSQPLERKDSQNSSQHSVSSHRSLHTASPSHSTQVLPEFPPAEAQAPDQTDSSGQKKPDPFKIWAQSRSMYENRLPDYQEQDIFLWRKETGFGFRILGGNEPGEPIYIGHIVPLGAADTDGRLRSGDELICVDGTPVIGKSHQLVVQLMQQAAKQGHVNLTVRRKVVFAVPKTENEVPSPASSHHSSNQPASLTEEKRTPQGSQNSLNTVSSGSGSTSGIGSGGGGGSGVVSTVVQPYDVEIRRGENEGFGFVIVSSVSRPEAGTTFESSNATLLTNAEKIATITTTHTPSQQGTQETRNTTKPKQESQFEFKAPQATQEQDFYTVELERGAKGFGFSLRGGREYNMDLYVLRLAEDGPAERCGKMRIGDEILEINGETTKNMKHSRAIELIKNGGRRVRLFLKRGDGSVPEYVL

SEQ ID NO: 12063 - protein, 1213 aa, Artificial Sequence
  Synthetic polypeptide
MSKVIQKKNHWTSRVHECTVKRGPQGELGVTVLGGAEHGEFPYVGAVAAVEAAGLPGGGEGPRLGEGELLLEVQGVRVSGLPRYDVLGVIDSCKEAVTFKAVRQGGRLNKDLRHFLNQRFQKGSPDHELQQTIRDNLYRHAVPCTTRSPREGEVPGVDYNFLTVKEFLDLEQSGTLLEVGTYEGNYYGTPKPPSQPVSGKVITTDALHSLQSGSKQSTPKRTKSYNDMQNAGIVHAENEEEDDVPEMNSSFTADSGEQEEHTLQETALPPVNSSIIAAPITDPSQKFPQYLPLSAEDNLGPLPENWEMAYTENGEVYFIDHNTKTTSWLDPRCLNKQQKPLEECEDDEGVHTEELDSELELPAGWEKIEDPVYGIYYVDHINRKTQYENPVLEAKRKKQLEQQQQQQQQQQQQQQQQQQQQTEEWTEDHSALVPPVIPNHPPSNPEPAREVPLQGKPFFTRNPSELKGKFIHTKLRKSSRGFGFTVVGGDEPDEFLQIKSLVLDGPAALDGKMETGDVIVSVNDTCVLGHTHAQVVKIFQSIPIGASVDLELCRGYPLPFDPDDPNTSLVTSVAILDKEPIIVNGQETYDSPASHSSKTGKVNGMKDARPSSPADVASNSSHGYPNDTVSLASSIATQPELITVHIVKGPMGFGFTIADSPGGGGQRVKQIVDSPRCRGLKEGDLIVEVNKKNVQALTHNQVVDMLVECPKGSEVTLLVQRGGLPVPKKSPKSQPLERKDSQNSSQHSVSSHRSLHTASPSHSTQVLPEFPPAEAQAPDQTDSSGQKKPDPFKIWAQSRSMYENRLPDYQEQDIFLWRKETGFGFRILGGNEPGEPIYIGHIVPLGAADTDGRLRSGDELICVDGTPVIGKSHQLVVQLMQQAAKQGHVNLTVRRKVVFAVPKTENEVPSPASSHHSSNQPASLTEEKRTPQGSQNSLNTVSSGSGSTSGIGSGGGGGSGVVSTVVQPYDVEIRRGENEGFGFVIVSSVSRPEAGTTFGNACVAMPHKIGRIIEGSPADRCGKLKVGDRILAVNGCSITNKSHSDIVNLIKEAGNTVTLRIIPGDESSNATLLTNAEKIATITTTHTPSQQGTQETRNTTKPKQESQFEFKAPQATQEQDFYTVELERGAKGFGFSLRGGREYNMDLYVLRLAEDGPAERCGKMRIGDEILEINGETTKNMKHSRAIELIKNGGRRVRLFLKRGDGSVPEYVL

SEQ ID NO: 12064 - protein, 1242 aa, Artificial Sequence
  Synthetic polypeptide
MSKVIQKKNHWTSRVHECTVKRGPQGELGVTVLGGAEHGEFPYVGAVAAVEAAGLPGGGEGPRLGEGELLLEVQGVRVSGLPRYDVLGVIDSCKEAVTFKAVRQGGRLNKDLRHFLNQRFQKGSPDHELQQTIRDNLYRHAVPCTTRSPREGEVPGVDYNFLTVKEFLDLEQSGTLLEVGTYEGNYYGTPKPPSQPVSGKVITTDALHSLQSGSKQSTPKRTKSYNDMQNAGIVHAENEEEDDVPEMNSSFTADSGEQEEHTLQETALPPVNSSIIAAPITDPSQKFPQYLPLSAEDNLGPLPENWEMAYTENGEVYFIDHNTKTTSWLDPRCLNKQQKPLEECEDDEGVHTEELDSELELPAGWEKIEDPVYGIYYVDHINRKTQYENPVLEAKRKKQLEQQQQQQQQQQQQQQQQQQQQTEEWTEDHSALVPPVIPNHPPSNPEPAREVPLQGKPFFTRNPSELKGKFIHTKLRKSSRGFGFTVVGGDEPDEFLQIKSLVLDGPAALDGKMETGDVIVSVNDTCVLGHTHAQVVKIFQSIPIGASVDLELCRGYPLPFDPDDPNTSLVTSVAILDKEPIIVNGQETYDSPASHSSKTGKVNGMKDARPSSPADVASNSSHGYPNDTVSLASSIATQPELITVHIVKGPMGFGFTIADSPGGGGQRVKQIVDSPRCRGLKEGDLIVEVNKKNVQALTHNQVVDMLVECPKGSEVTLLVQRGGLPVPKKSPKSQPLERKDSQNSSQHSVSSHRSLHTASPSHSTQVLPEFPPAEAQAPDQTDSSGQKKPDPFKIWAQSRSMYENRPMSPSPASGLSKGEREREINSTNFGECPIPDYQEQDIFLWRKETGFGFRILGGNEPGEPIYIGHIVPLGAADTDGRLRSGDELICVDGTPVIGKSHQLVVQLMQQAAKQGHVNLTVRRKVVFAVPKTENEVPSPASSHHSSNQPASLTEEKRTPQGSQNSLNTVSSGSGSTSGIGSGGGGGSGVVSTVVQPYDVEIRRGENEGFGFVIVSSVSRPEAGTTFAGNACVAMPHKIGRIIEGSPADRCGKLKVGDRILAVNGCSITNKSHSDIVNLIKEAGNTVTLRIIPGDESSNATLLTNAEKIATITTTHTPSQQGTQETRNTTKPKQESQFEFKAPQATQEQDFYTVELERGAKGFGFSLRGGREYNMDLYVLRLAEDGPAERCGKMRIGDEILEINGETTKNMKHSRAIELIKNGGRRVRLFLKRGDGSVPEYVL

SEQ ID NO: 12065 - protein, 1241 aa, Artificial Sequence
  Synthetic polypeptide
MSKVIQKKNHWTSRVHECTVKRGPQGELGVTVLGGAEHGEFPYVGAVAAVEAAGLPGGGEGPRLGEGELLLEVQGVRVSGLPRYDVLGVIDSCKEAVTFKAVRQGGRLNKDLRHFLNQRFQKGSPDHELQQTIRDNLYRHAVPCTTRSPREGEVPGVDYNFLTVKEFLDLEQSGTLLEVGTYEGNYYGTPKPPSQPVSGKVITTDALHSLQSGSKQSTPKRTKSYNDMQNAGIVHAENEEEDDVPEMNSSFTADSGEQEEHTLQETALPPVNSSIIAAPITDPSQKFPQYLPLSAEDNLGPLPENWEMAYTENGEVYFIDHNTKTTSWLDPRCLNKQQKPLEECEDDEGVHTEELDSELELPAGWEKIEDPVYGIYYVDHINRKTQYENPVLEAKRKKQLEQQQQQQQQQQQQQQQQQQQQTEEWTEDHSALVPPVIPNHPPSNPEPAREVPLQGKPFFTRNPSELKGKFIHTKLRKSSRGFGFTVVGGDEPDEFLQIKSLVLDGPAALDGKMETGDVIVSVNDTCVLGHTHAQVVKIFQSIPIGASVDLELCRGYPLPFDPDDPNTSLVTSVAILDKEPIIVNGQETYDSPASHSSKTGKVNGMKDARPSSPADVASNSSHGYPNDTVSLASSIATQPELITVHIVKGPMGFGFTIADSPGGGGQRVKQIVDSPRCRGLKEGDLIVEVNKKNVQALTHNQVVDMLVECPKGSEVTLLVQRGGLPVPKKSPKSQPLERKDSQNSSQHSVSSHRSLHTASPSHSTQVLPEFPPAEAQAPDQTDSSGQKKPDPFKIWAQSRSMYENRPMSPSPASGLSKGEREREINSTNFGECPIPDYQEQDIFLWRKETGFGFRILGGNEPGEPIYIGHIVPLGAADTDGRLRSGDELICVDGTPVIGKSHQLVVQLMQQAAKQGHVNLTVRRKVVFAVPKTENEVPSPASSHHSSNQPASLTEEKRTPQGSQNSLNTVSSGSGSTSGIGSGGGGGSGVVSTVVQPYDVEIRRGENEGFGFVIVSSVSRPEAGTTFGNACVAMPHKIGRIIEGSPADRCGKLKVGDRILAVNGCSITNKSHSDIVNLIKEAGNTVTLRIIPGDESSNATLLTNAEKIATITTTHTPSQQGTQETRNTTKPKQESQFEFKAPQATQEQDFYTVELERGAKGFGFSLRGGREYNMDLYVLRLAEDGPAERCGKMRIGDEILEINGETTKNMKHSRAIELIKNGGRRVRLFLKRGDGSVPEYVL

SEQ ID NO: 12066 - protein, 1122 aa, Artificial Sequence
  Synthetic polypeptide
  misc_feature (1)..(1): Xaa can be any naturally occurring amino acid
XAWWEAVSGSQREGLILAIGLGFAGTTRSPREGEVPGVDYNFLTVKEFLDLEQSGTLLEVGTYEGNYYGTPKPPSQPVSGKVITTDALHSLQSGSKQSTPKRTKSYNDMQNAGIVHAENEEEDDVPEMNSSFTADSGEQEEHTLQETALPPVNSSIIAAPITDPSQKFPQYLPLSAEDNLGPLPENWEMAYTENGEVYFIDHNTKTTSWLDPRCLNKQQKPLEECEDDEGVHTEELDSELELPAGWEKIEDPVYGIYYVDHINRKTQYENPVLEAKRKKQLEQQQQQQQQQQQQQQQQQQQQTEEWTEDHSALVPPVIPNHPPSNPEPAREVPLQGKPFFTRNPSELKGKFIHTKLRKSSRGFGFTVVGGDEPDEFLQIKSLVLDGPAALDGKMETGDVIVSVNDTCVLGHTHAQVVKIFQSIPIGASVDLELCRGYPLPFDPDDPNTSLVTSVAILDKEPIIVNGQETYDSPASHSSKTGKVNGMKDARPSSPADVASNSSHGYPNDTVSLASSIATQPELITVHIVKGPMGFGFTIADSPGGGGQRVKQIVDSPRCRGLKEGDLIVEVNKKNVQALTHNQVVDMLVECPKGSEVTLLVQRGGLPVPKKSPKSQPLERKDSQNSSQHSVSSHRSLHTASPSHSTQVLPEFPPAEAQAPDQTDSSGQKKPDPFKIWAQSRSMYENRPMSPSPASGLSKGEREREINSTNFGECPIPDYQEQDIFLWRKETGFGFRILGGNEPGEPIYIGHIVPLGAADTDGRLRSGDELICVDGTPVIGKSHQLVVQLMQQAAKQGHVNLTVRRKVVFAVPKTENEVPSPASSHHSSNQPASLTEEKRTPQGSQNSLNTVSSGSGSTSGIGSGGGGGSGVVSTVVQPYDVEIRRGENEGFGFVIVSSVSRPEAGTTFGNACVAMPHKIGRIIEGSPADRCGKLKVGDRILAVNGCSITNKSHSDIVNLIKEAGNTVTLRIIPGDESSNATLLTNAEKIATITTTHTPSQQGTQETRNTTKPKQESQFEFKAPQATQEQDFYTVELERGAKGFGFSLRGGREYNMDLYVLRLAEDGPAERCGKMRIGDEILEINGETTKNMKHSRAIELIKNGGRRVRLFLKRGDGSVPEYVL

SEQ ID NO: 12067 - protein, 976 aa, Artificial Sequence
  Synthetic polypeptide
AGGSLGTGRRRQRLPATGGTTRSPREGEVPGVDYNFLTVKEFLDLEQSGTLLEVGTYEGNYYGTPKPPSQPVSGKVITTDALHSLQSGSKQSTPKRTKSYNDMQNAGIVHAENEEEDDVPEMNSSFTADSGEQEEHTLQETALPPVNSSIIAAPITDPSQKFPQYLPLSAEDNLGPLPENWEMAYTENGEVYFIDHNTKTTSWLDPRCLNKQQKPLEECEDDEGVHTEELDSELELPAGWEKIEDPVYGIYYVDHINRKTQYENPVLEAKRKKQLEQQQQQQQQQQQQQQQQQQQQTEEWTEDHSALVPPVIPNHPPSNPEPAREVPLQGKPFFTRNPSELKGKFIHTKLRKSSRGFGFTVVGGDEPDEFLQIKSLVLDGPAALDGKMETGDVIVSVNDTCVLGHTHAQVVKIFQSIPIGASVDLELCRGYPLPFDPDDPNTSLVTSVAILDKEPIIVNGQETYDSPASHSSKTGKVNGMKDARPSSPADVASNSSHGYPNDTVSLASSIATQPELITVHIVKGPMGFGFTIADSPGGGGQRVKQIVDSPRCRGLKEGDLIVEVNKKNVQALTHNQVVDMLVECPKGSEVTLLVQRGGLPVPKKSPKSQPLERKDSQNSSQHSVSSHRSLHTASPSHSTQVLPEFPPAEAQAPDQTDSSGQKKPDPFKIWAQSRSMYENRPMSPSPASGLSKGEREREINSTNFGECPIPDYQEQDIFLWRKETGFGFRILGGNEPGEPIYIGHIVPLGAADTDGRLRSGDELICVDGTPVIGKSHQLVVQLMQQAAKQGHVNLTVRRKVVFAVPKTENEVPSPASSHHSSNQPASLTEEKRTPQGSQNSLNTVSSGSGSTSGIGSGGGGGSGVVSTVVQPYDVEIRRGENEGFGFVIVSSVSRPEAGTTFAGNACVAMPHKIGRIIEGSPADRCGKLKVGDRILAVNGCSITNKSHSDIVNLIKEAGNTVTLRIIPGDGTSFCTN

SEQ ID NO: 12068 - protein, 859 aa, Artificial Sequence
  Synthetic polypeptide
KQSTPKRTKSYNDMQNAGIVHAENEEEDDVPEMNSSFTADSGEQEEHTLQETALPPVNSSIIAAPITDPSQKFPQYLPLSAEDNLGPLPENWEMAYTENGEVYFIDHNTKTTSWLDPRCLNKQQKPLEECEDDEGVHTEELDSELELPAGWEKIEDPVYGIYYVDHINRKTQYENPVLEAKRKKQLEQQQQQQQQQQQQQQQQQQQQTEEWTEDHSALVPPVIPNHPPSNPEPAREVPLQGKPFFTRNPSELKGKFIHTKLRKSSRGFGFTVVGGDEPDEFLQIKSLVLDGPAALDGKMETGDVIVSVNDTCVLGHTHAQVVKIFQSIPIGASVDLELCRGYPLPFDPDDPNTSLVTSVAILDKEPIIVNGQETYDSPASHSSKTGKVNGMKDARPSSPADVASNSSHGYPNDTVSLASSIATQPELITVHIVKGPMGFGFTIADSPGGGGQRVKQIVDSPRCRGLKEGDLIVEVNKKNVQALTHNQVVDMLVECPKGSEVTLLVQRGGLPVPKKSPKSQPLERKDSQNSSQHSVSSHRSLHTASPSHSTQVLPEFPPAEAQAPDQTDSSGQKKPDPFKIWAQSRSMYENRLPDYQEQDIFLWRKETGFGFRILGGNEPGEPIYIGHIVPLGAADTDGRLRSGDELICVDGTPVIGKSHQLVVQLMQQAAKQGHVNLTVRRKVVFAVPKTENEVPSPASSHHSSNQPASLTEEKRTPQGSQNSLNTVSSGSGSTSGIGSGGGGGSGVVSTVVQPYDVEIRRGENEGFGFVIVSSVSRPEAGTTFAGNACVAMPHKIGRIIEGSPADRCGKLKVGDRILAVNGCSITNKSHSDIVNLIKEAGNTVTLRIIPGDGTSFCTN

SEQ ID NO: 12069 - protein, 1072 aa, Artificial Sequence
  Synthetic polypeptide
MSKVIQKKNHWTSRVHECTVKRGPQGELGVTVLGGAEHGEFPYVGAVAAVEAAGLPGGGEGPRLGEGELLLEVQGVRVSGLPRYDVLGVIDSCKEAVTFKAVRQGGRLNKDLRHFLNQRFQKGSPDHELQQTIRDNLYRHAVPCTTRSPREGEVPGVDYNFLTVKEFLDLEQSGTLLEVGTYEGNYYGTPKPPSQPVSGKVITTDALHSLQSGSKQSTPKRTKSYNDMQNAGIVHAENEEEDDVPEMNSSFTADSGEQEEHTLQETALPPVNSSIIAAPITDPSQKFPQYLPLSAEDNLGPLPENWEMAYTENGEVYFIDHNTKTTSWLDPRCLNKQQKPLEECEDDEGVHTEELDSELELPAGWEKIEDPVYGIYYVDHINRKTQYENPVLEAKRKKQLEQQQQQQQQQQQQQQQQQQQQTEEWTEDHSALVPPVIPNHPPSNPEPAREVPLQGKPFFTRNPSELKGKFIHTKLRKSSRGFGFTVVGGDEPDEFLQIKSLVLDGPAALDGKMETGDVIVSVNDTCVLGHTHAQVVKIFQSIPIGASVDLELCRGYPLPFDPDDPNTSLVTSVAILDKEPIIVNGQETYDSPASHSSKTGKVNGMKDARPSSPADVASNSSHGYPNDTVSLASSIATQPELITVHIVKGPMGFGFTIADSPGGGGQRVKQIVDSPRCRGLKEGDLIVEVNKKNVQALTHNQVVDMLVECPKGSEVTLLVQRGGLPVPKKSPKSQPLERKDSQNSSQHSVSSHRSLHTASPSHSTQVLPEFPPAEAQAPDQTDSSGQKKPDPFKIWAQSRSMYENRLPDYQEQDIFLWRKETGFGFRILGGNEPGEPIYIGHIVPLGAADTDGRLRSGDELICVDGTPVIGKSHQLVVQLMQQAAKQGHVNLTVRRKVVFAVPKTENEVPSPASSHHSSNQPASLTEEKRTPQGSQNSLNTVSSGSGSTSGIGSGGGGGSGVVSTVVQPYDVEIRRGENEGFGFVIVSSVSRPEAGTTFGNACVAMPHKIGRIIEGSPADRCGKLKVGDRILAVNGCSITNKSHSDIVNLIKEAGNTVTLRIIPGDGTSFCTN

SEQ ID NO: 12070 - protein, 1101 aa, Artificial Sequence
  Synthetic polypeptide
MSKVIQKKNHWTSRVHECTVKRGPQGELGVTVLGGAEHGEFPYVGAVAAVEAAGLPGGGEGPRLGEGELLLEVQGVRVSGLPRYDVLGVIDSCKEAVTFKAVRQGGRLNKDLRHFLNQRFQKGSPDHELQQTIRDNLYRHAVPCTTRSPREGEVPGVDYNFLTVKEFLDLEQSGTLLEVGTYEGNYYGTPKPPSQPVSGKVITTDALHSLQSGSKQSTPKRTKSYNDMQNAGIVHAENEEEDDVPEMNSSFTADSGEQEEHTLQETALPPVNSSIIAAPITDPSQKFPQYLPLSAEDNLGPLPENWEMAYTENGEVYFIDHNTKTTSWLDPRCLNKQQKPLEECEDDEGVHTEELDSELELPAGWEKIEDPVYGIYYVDHINRKTQYENPVLEAKRKKQLEQQQQQQQQQQQQQQQQQQQQTEEWTEDHSALVPPVIPNHPPSNPEPAREVPLQGKPFFTRNPSELKGKFIHTKLRKSSRGFGFTVVGGDEPDEFLQIKSLVLDGPAALDGKMETGDVIVSVNDTCVLGHTHAQVVKIFQSIPIGASVDLELCRGYPLPFDPDDPNTSLVTSVAILDKEPIIVNGQETYDSPASHSSKTGKVNGMKDARPSSPADVASNSSHGYPNDTVSLASSIATQPELITVHIVKGPMGFGFTIADSPGGGGQRVKQIVDSPRCRGLKEGDLIVEVNKKNVQALTHNQVVDMLVECPKGSEVTLLVQRGGLPVPKKSPKSQPLERKDSQNSSQHSVSSHRSLHTASPSHSTQVLPEFPPAEAQAPDQTDSSGQKKPDPFKIWAQSRSMYENRPMSPSPASGLSKGEREREINSTNFGECPIPDYQEQDIFLWRKETGFGFRILGGNEPGEPIYIGHIVPLGAADTDGRLRSGDELICVDGTPVIGKSHQLVVQLMQQAAKQGHVNLTVRRKVVFAVPKTENEVPSPASSHHSSNQPASLTEEKRTPQGSQNSLNTVSSGSGSTSGIGSGGGGGSGVVSTVVQPYDVEIRRGENEGFGFVIVSSVSRPEAGTTFAGNACVAMPHKIGRIIEGSPADRCGKLKVGDRILAVNGCSITNKSHSDIVNLIKEAGNTVTLRIIPGDGTSFCTN

SEQ ID NO: 12071 - protein, 1100 aa, Artificial Sequence
  Synthetic polypeptide
MSKVIQKKNHWTSRVHECTVKRGPQGELGVTVLGGAEHGEFPYVGAVAAVEAAGLPGGGEGPRLGEGELLLEVQGVRVSGLPRYDVLGVIDSCKEAVTFKAVRQGGRLNKDLRHFLNQRFQKGSPDHELQQTIRDNLYRHAVPCTTRSPREGEVPGVDYNFLTVKEFLDLEQSGTLLEVGTYEGNYYGTPKPPSQPVSGKVITTDALHSLQSGSKQSTPKRTKSYNDMQNAGIVHAENEEEDDVPEMNSSFTADSGEQEEHTLQETALPPVNSSIIAAPITDPSQKFPQYLPLSAEDNLGPLPENWEMAYTENGEVYFIDHNTKTTSWLDPRCLNKQQKPLEECEDDEGVHTEELDSELELPAGWEKIEDPVYGIYYVDHINRKTQYENPVLEAKRKKQLEQQQQQQQQQQQQQQQQQQQQTEEWTEDHSALVPPVIPNHPPSNPEPAREVPLQGKPFFTRNPSELKGKFIHTKLRKSSRGFGFTVVGGDEPDEFLQIKSLVLDGPAALDGKMETGDVIVSVNDTCVLGHTHAQVVKIFQSIPIGASVDLELCRGYPLPFDPDDPNTSLVTSVAILDKEPIIVNGQETYDSPASHSSKTGKVNGMKDARPSSPADVASNSSHGYPNDTVSLASSIATQPELITVHIVKGPMGFGFTIADSPGGGGQRVKQIVDSPRCRGLKEGDLIVEVNKKNVQALTHNQVVDMLVECPKGSEVTLLVQRGGLPVPKKSPKSQPLERKDSQNSSQHSVSSHRSLHTASPSHSTQVLPEFPPAEAQAPDQTDSSGQKKPDPFKIWAQSRSMYENRPMSPSPASGLSKGEREREINSTNFGECPIPDYQEQDIFLWRKETGFGFRILGGNEPGEPIYIGHIVPLGAADTDGRLRSGDELICVDGTPVIGKSHQLVVQLMQQAAKQGHVNLTVRRKVVFAVPKTENEVPSPASSHHSSNQPASLTEEKRTPQGSQNSLNTVSSGSGSTSGIGSGGGGGSGVVSTVVQPYDVEIRRGENEGFGFVIVSSVSRPEAGTTFGNACVAMPHKIGRIIEGSPADRCGKLKVGDRILAVNGCSITNKSHSDIVNLIKEAGNTVTLRIIPGDGTSFCTN

SEQ ID NO: 12072 - protein, 981 aa, Artificial Sequence
  Synthetic polypeptide
  misc_feature (1)..(1): Xaa can be any naturally occurring amino acid
XAWWEAVSGSQREGLILAIGLGFAGTTRSPREGEVPGVDYNFLTVKEFLDLEQSGTLLEVGTYEGNYYGTPKPPSQPVSGKVITTDALHSLQSGSKQSTPKRTKSYNDMQNAGIVHAENEEEDDVPEMNSSFTADSGEQEEHTLQETALPPVNSSIIAAPITDPSQKFPQYLPLSAEDNLGPLPENWEMAYTENGEVYFIDHNTKTTSWLDPRCLNKQQKPLEECEDDEGVHTEELDSELELPAGWEKIEDPVYGIYYVDHINRKTQYENPVLEAKRKKQLEQQQQQQQQQQQQQQQQQQQQTEEWTEDHSALVPPVIPNHPPSNPEPAREVPLQGKPFFTRNPSELKGKFIHTKLRKSSRGFGFTVVGGDEPDEFLQIKSLVLDGPAALDGKMETGDVIVSVNDTCVLGHTHAQVVKIFQSIPIGASVDLELCRGYPLPFDPDDPNTSLVTSVAILDKEPIIVNGQETYDSPASHSSKTGKVNGMKDARPSSPADVASNSSHGYPNDTVSLASSIATQPELITVHIVKGPMGFGFTIADSPGGGGQRVKQIVDSPRCRGLKEGDLIVEVNKKNVQALTHNQVVDMLVECPKGSEVTLLVQRGGLPVPKKSPKSQPLERKDSQNSSQHSVSSHRSLHTASPSHSTQVLPEFPPAEAQAPDQTDSSGQKKPDPFKIWAQSRSMYENRPMSPSPASGLSKGEREREINSTNFGECPIPDYQEQDIFLWRKETGFGFRILGGNEPGEPIYIGHIVPLGAADTDGRLRSGDELICVDGTPVIGKSHQLVVQLMQQAAKQGHVNLTVRRKVVFAVPKTENEVPSPASSHHSSNQPASLTEEKRTPQGSQNSLNTVSSGSGSTSGIGSGGGGGSGVVSTVVQPYDVEIRRGENEGFGFVIVSSVSRPEAGTTFGNACVAMPHKIGRIIEGSPADRCGKLKVGDRILAVNGCSITNKSHSDIVNLIKEAGNTVTLRIIPGDGTSFCTN

SEQ ID NO: 12073 - protein, 304 aa, Artificial Sequence
  Synthetic polypeptide
MIAEPAHFYLFGLICLCSGSRLRQEDFPPRIVEHPSDLIVSKGEPATLNCKAEGRPTPTIEWYKGGERVETDKDDPRSHRMLLPSGSLFFLRIVHGRKSRPDEGVYVCVARNYLGEAVSHNASLEVAILRDDFRQNPSDVMVAVGEPAVMECQPPRGHPEPTISWKKDGSPLDDKDERITIRGGKLMITYTRKSDAGKYVCVGTNMVGERESEVAELTVLERPSFVKRPSNLAVTVDDSAEFKCEARGDPVPTVRWRKDDGELPKSRGAFRHDCKFPEVSPAMWNCESIKPLSFINYPVSGISS

SEQ ID NO: 12074 - protein, 343 aa, Artificial Sequence
  Synthetic polypeptide
MKWKHVPFLVMISLLSLSPNHLFLAQLIPDPEDVERGNDHGTPIPTSDNDDNSLGYTGSRLRQEDFPPRIVEHPSDLIVSKGEPATLNCKAEGRPTPTIEWYKGGERVETDKDDPRSHRMLLPSGSLFFLRIVHGRKSRPDEGVYVCVARNYLGEAVSHNASLEVAILRDDFRQNPSDVMVAVGEPAVMECQPPRGHPEPTISWKKDGSPLDDKDERITIRGGKLMITYTRKSDAGKYVCVGTNMVGERESEVAELTVLERPSFVKRPSNLAVTVDDSAEFKCEARGDPVPTVRWRKDDGELPKSRGAFRHDCKFPEVSPAMWNCESIKPLSFINYPVSGISS

SEQ ID NO: 12075 - protein, 31 aa, Artificial Sequence; identical to SEQ ID NO: 1363
  Synthetic polypeptide

SEQ ID NO: 12076 - protein, 30 aa, Artificial Sequence
  Synthetic polypeptide
MIWKRSAVLRFYSVCGLLLQEREREKRGRG

SEQ ID NO: 12077 - protein, 147 aa, Artificial Sequence
  Synthetic polypeptide
MLPSQEASKLYHEHYMRNSRAIGVLWAIFTICFAIINVVVFIQPYWVGDSVSTPKPGYFGLFHYCVGSGLAGRELTCRGSFTDFSTIPSSAFKAAAFFVLLSMVLILGCITCFSLFFFCNTATVYKICAWMQLLAVWPREAKKIGHL

SEQ ID NO: 12078 - protein, 421 aa, Artificial Sequence
  Synthetic polypeptide
MGSSRLAALLLPLLLIVIDLSDSAGIGFRHLPHWNTRCPLASHTDDSFTGSSAYIPCRTWWALFSTKPWCVRVWHCSRCLCQHLLSGGSGLQRGLFHLLVQKSKKSSTFKFYRRHKMPAPAQRKLLPRRHLSEKSHHISIPSPDISHKGLRSKRTQPSDPETWESLPRLDSQRHGGPEFSFDLLPEARAIRVTISSGPEVSVRLCHQWALECEELSSPYDVQKIVSGGHTVELPYEFLLPCLCIEASYLQEDTVRRKKCPFQSWPEAYGSDFWKSVHFTDYSQHTQMVMALTLRCPLKLEAALCQRHDWHTLCKDLPNATARESDGWYVLEKVDLHPQLCFKFSFGNSSHVECPHQTGSLTSWNVSMDTQAQQLILHFSSRMHATFSAAWSLPGLGQDTLVPPVYTVSQGLAQRTHSESVC

SEQ ID NO: 12079 - protein, 454 aa, Artificial Sequence
  Synthetic polypeptide
MLAPFLLLLTHSRSPLSFRPCSHVPGALIAQKPMGSSRLAALLLPLLLIVIDLSDSAGIGFRHLPHWNTRCPLASHTDDSFTGSSAYIPCRTWWALFSTKPWCVRVWHCSRCLCQHLLSGGSGLQRGLFHLLVQKSKKSSTFKFYRRHKMPAPAQRKLLPRRHLSEKSHHISIPSPDISHKGLRSKRTQPSDPETWESLPRLDSQRHGGPEFSFDLLPEARAIRVTISSGPEVSVRLCHQWALECEELSSPYDVQKIVSGGHTVELPYEFLLPCLCIEASYLQEDTVRRKKCPFQSWPEAYGSDFWKSVHFTDYSQHTQMVMALTLRCPLKLEAALCQRHDWHTLCKDLPNATARESDGWYVLEKVDLHPQLCFKFSFGNSSHVECPHQTGSLTSWNVSMDTQAQQLILHFSSRMHATFSAAWSLPGLGQDTLVPPVYTVSQGLAQRTHSESVC

SEQ ID NO: 12080 - protein, 13 aa, Artificial Sequence
  Synthetic polypeptide
APVTGWQELKMPF

SEQ ID NO: 12081 - protein, 45 aa, Artificial Sequence
  Synthetic polypeptide
MKEGRLEESVALRIITEGASILRQEKNLLDIDAPVTGWQELKMPF

SEQ ID NO: 12082 - protein, 95 aa, Artificial Sequence
  Synthetic polypeptide
MSEPKAIDPKLSTTDRVVKAVPFPPSHRLTAKEVFDNDGKPRVDILKAHLMKEGRLEESVALRIITEGASILRQEKNLLDIDAPVTGWQELKMPF

SEQ ID NO: 12083 - protein, 26 aa, Artificial Sequence
  Synthetic polypeptide
MALKRINKARWLTPVIPALWEAKVIT

SEQ ID NO: 12084 - protein, 64 aa, Artificial Sequence
  Synthetic polypeptide
MAAGSITTLPALPEDGGSGAFPPGHFKDPKRLYCKNGGFFLRIHPDGRVDGVREKSDPHSNTNT

SEQ ID NO: 12085 - protein, 197 aa, Artificial Sequence
  Synthetic polypeptide
MVGVGGGDVEDVTPRPGGCQISGRGARGCNGIPGAAAWEAALPRRRPRRHPSVNPRSRAAGSPRTRGRRTEERPSGSRLGDRGRGRALPGGRLGGRGRGRAPERVGGRGRGRGTAAPRAAPAARGSRPGPAGTMAAGSITTLPALPEDGGSGAFPPGHFKDPKRLYCKNGGFFLRIHPDGRVDGVREKSDPHSNTNT

SEQ ID NO: 12086 - protein, 683 aa, Artificial Sequence
  Synthetic polypeptide
MAAEIDFLREQNRRLNEDFRRYQMESFSKYSSVQKAVCQGEGDDTFENLVFDQSFLAPLVTEYDKHLGELNGQLKYYQKQVGEMKLQLENVIKENERLHSELKDAVEKKLEAFPLGTEVGTDIYADDETVRNLQEQLQLANQEKTQAVELWQTVSQELDRLHKLYQEHMTEAQIHVFESQKQKDQLFDFQQLTKQLHVTNENMEVTNQQFLKTVTEQSVIIEQLRKKLRQAKLELRVAVAKVEELTNVTEDLQGQMKKKEKDVVSAHGREEASDRRLQQLQSSIKQLEIRLCVTIQEANQLRTENTHLEKQTRELQAKCNELENERYEAIVRARNSMQLLEEANLQKSQALLEEKQKEEDIEKMKETVSRFVQDATIRTKKEVANTKKQCNIQISRLTEELSALQMECAEKQGQIERVIKEKKAVEEELEKIYREGRGNESDYRKLEEMHQRFLVSERSKDDLQLRLTRAENRIKQLETDSSEEISRYQEMIQKLQNVLESERENCGLVSEQRLKLQQENKQLRKETESLRKIALEAQKKAKVKISTMEHEFSIKERGFEVQLREMEDSNRNSIVELRHLLATQQKAANRWKEETKKLTESAEIRINNLKSELSRQKLHTQELLSQLEMANEKVAENEKLILEHQEKANRLQRRLSQAEERAASASQQDNNTSLIRLLKDQKN

SEQ ID NO: 12087 - protein, 302 aa, Artificial Sequence
  Synthetic polypeptide
MAAEIDFLREQNRRLNEDFRRYQMESFSKYSSVQKAVCQGEGDDTFENLVFDQSFLAPLVTEYDKHLGELNGQLKYYQKQVGEMKLQLENVIKENERLHSELKDAVEKKLEAFPLGTEVGTDIYADDETVRNLQEQLQLANQEKTQAVELWQTVSQELDRLHKLYQEHMTEAQIHVFESQKQKDQLFDFQQLTKQLHVTNENMEVTNQQFLKTVTEQSVIIEQLRKKLRSELSRQKLHTQELLSQLEMANEKVAENEKLILEHQEKANRLQRRLSQAEERAASASQQDNNTSLIRLLKDQKN

SEQ ID NO: 12088 - protein, 170 aa, Artificial Sequence
  Synthetic polypeptide
MAAEIDFLREQNRRLNEDFRRYQMESFSKYSSVQKAVCQGEGDDTFENLVFDQSFLAPLVTEYDKHLGELNGQLKYYQKQVGEMKLQLENVIKENERSELSRQKLHTQELLSQLEMANEKVAENEKLILEHQEKANRLQRRLSQAEERAASASQQDNNTSLIRLLKDQKN

SEQ ID NO: 12089 - protein, 279 aa, Artificial Sequence
  Synthetic polypeptide
MESFSKYSSVQKAVCQGEGDDTFENLVFDQSFLAPLVTEYDKHLGELNGQLKYYQKQVGEMKLQLENVIKENERLHSELKDAVEKKLEAFPLGTEVGTDIYADDETVRNLQEQLQLANQEKTQAVELWQTVSQELDRLHKLYQEHMTEAQIHVFESQKQKDQLFDFQQLTKQLHVTNENMEVTNQQFLKTVTEQSVIIEQLRKKLRSELSRQKLHTQELLSQLEMANEKVAENEKLILEHQEKANRLQRRLSQAEERAASASQQDNNTSLIRLLKDQKN

SEQ ID NO: 12090 - protein, 65 aa, Artificial Sequence
  Synthetic polypeptide
MAAEIDFLREQNRRLNEDFRRYQMESFSKYSSVQNDYRNKSGNPRGPIDPLKEADCRTQETSQIP

SEQ ID NO: 12091 - protein, 42 aa, Artificial Sequence
  Synthetic polypeptide
MESFSKYSSVQNDYRNKSGNPRGPIDPLKEADCRTQETSQIP

SEQ ID NO: 12092 - protein, 41 aa, Artificial Sequence
  Synthetic polypeptide
MAAEIDFLREQNRRLNEDFRRYQMESFSKYSSVQECENGLI

SEQ ID NO: 12093 - protein, 18 aa, Artificial Sequence
  Synthetic polypeptide
MESFSKYSSVQECENGLI

SEQ ID NO: 12094 - protein, 46 aa, Artificial Sequence
  Synthetic polypeptide
MAAEIDFLREQNRRLNEDFRRYQMESFSKYSSVQSQMFLYRSVRMD

SEQ ID NO: 12095 - protein, 23 aa, Artificial Sequence
  Synthetic polypeptide
MESFSKYSSVQSQMFLYRSVRMD

SEQ ID NO: 12096 - protein, 14 aa, Artificial Sequence
  Synthetic polypeptide
MYGKIIFVLLLSGI

SEQ ID NO: 12097 - protein, 97 aa, Artificial Sequence
  Synthetic polypeptide
MHTSTSSSVTKSYISSQTNDTHKRDTYAATPRAHEVSEISVRTVYPPEEETGERVQLAHHFSEPEITLIIFGVMAGVIGTILLISYGIRRLIKVTAL

SEQ ID NO: 12098 - protein, 90 aa, Artificial Sequence
  Synthetic polypeptide
MYGKIIFVLLLSDTHKRDTYAATPRAHEVSEISVRTVYPPEEETGERVQLAHHFSEPEITLIIFGVMAGVIGTILLISYGIRRLIKVTAL

SEQ ID NO: 12099 - protein, 110 aa, Artificial Sequence
  Synthetic polypeptide
MYGKIIFVLLLSEIVSISALSTTEVAMHTSTSSSVTKSYISSQTNDTHKRDTYAATPRAHEVSEISVRTVYPPEEETEITLIIFGVMAGVIGTILLISYGIRRLIKVTAL

SEQ ID NO: 12100 - protein, 123 aa, Artificial Sequence
  Synthetic polypeptide
MYGKIIFVLLLSEIVSISALSTTEVAMHTSTSSSVTKSYISSQTNDTHKRDTYAATPRAHEVSEISVRTVYPPEEETGERVQLAHHFSEPEITLIIFGVMAGVIGTILLISYGIRRLIKVTAL

SEQ ID NO: 12101 - protein, 78 aa, Artificial Sequence
  Synthetic polypeptide
MYGKIIFVLLLSEIVSISALSTTEVAMHTSTSSSVTKSYISSQTNEITLIIFGVMAGVIGTILLISYGIRRLIKVTAL

SEQ ID NO: 12102 - protein, 91 aa, Artificial Sequence
  Synthetic polypeptide
MYGKIIFVLLLSEIVSISALSTTEVAMHTSTSSSVTKSYISSQTNGERVQLAHHFSEPEITLIIFGVMAGVIGTILLISYGIRRLIKVTAL

SEQ ID NO: 12103 - protein, 58 aa, Artificial Sequence
  Synthetic polypeptide
MYGKIIFVLLLSGERVQLAHHFSEPEITLIIFGVMAGVIGTILLISYGIRRLIKVTAL

SEQ ID NO: 12104 - protein, 14 aa, Artificial Sequence
  Synthetic polypeptide
MYGKIIFVLLLSGI

SEQ ID NO: 12105 - protein, 17 aa, Artificial Sequence
  Synthetic polypeptide
MYGKIIFVLLLSGDCFE

SEQ ID NO: 12106 - protein, 190 aa, Artificial Sequence
  Synthetic polypeptide
MRLLERMRKDWFMVGIVLAIAGAKLEPSIGVNGGPLKPEITVSYIAVATIFFNSGLSLKTEELTSALVHLKLHLFIQIFTLAFFPATIWLFLQLLSITPINEWLLKGLQTVGCMPPPVSSAVILTKAVGGNEAAAIFNSAFGSFLGIVITPLLLLLFLGSSSSVPFTSIFSQLFMTVVVPLIIGQEHPDS

SEQ ID NO: 12107 - protein, 177 aa, Artificial Sequence
  Synthetic polypeptide
MRLLERMRKDWFMVGIVLAIAGAKLEPSIGVNGGPLKPEITVSYIAVATIFFNSGLSLKTEELTSALVHLKLHLFIQIFTLAFFPATIWLFLQLLSITPINEWLLKGLQTVGCMPPPVSSAVILTKAVGGNEGIVITPLLLLLFLGSSSSVPFTSIFSQLFMTVVVPLIIGQEHPDS

SEQ ID NO: 12108 - protein, 1963 aa, Artificial Sequence; identical to SEQ ID NO: 12
  Synthetic polypeptide

SEQ ID NO: 12109 - protein, 616 aa, Artificial Sequence
  Synthetic polypeptide
  misc_feature (1)..(1): Xaa can be any naturally occurring amino acid
XDNVIFVHNTIHLISQVMDNMVMACGGILPLLSAATSATHELENIEPTQGLSIEASVTFLQRLISLVDVLIFASSLGFTEIEAEKSMSSGGILRQCLRLVCAVAVRNCLECQQHSQLKTRGDKALKPMHSLIPLGKSAAKSPVDIVTGGISPVRDLDRLLQDMDINRLRAVVFRDIEDSKQAQFLALAVVYFISVLMVSKYRDILEPQNERHSQSCTETGSENENVSLSEITPAAFSTLTTASVEESESTSSARRRDSGIGEETATGLGSHVEVTPHTAPPGVSAGPDAISEVLSTLSLEVNKSPETKNDRGNDLDTKATPSVSVSKNVNVKDILRSLVNIPADGVTVDPALLPPACLGALGDLSVEQPVQFRSFDRSVIVAAKKSAVSPSTFNTSIPTNAVSVVSSVDSAQASDMGGESPGSRSSNAKLPSVPTVDSVSQDPVSNMSITERLEHALEKAAPLLREIFVDFAPFLSRTLLGSHGQELLIEGTSLVCMKSSSSVVELVMLLCSQRSLVGGYRQRNGGQGNVKMEQRDPVFFGHKPRNADSHQKLEEARNRVSPGVSRRRMALLILLFWLSKTDFRLLAFRIMRKQIYSTLSHQVCGNLLQQLQETNI

SEQ ID NO: 12110 - protein, 1108 aa, Artificial Sequence; identical to SEQ ID NO: 61
  Synthetic polypeptide

SEQ ID NO: 12111 - protein, 1192 aa, Artificial Sequence; identical to SEQ ID NO: 47
  Synthetic polypeptide

SEQ ID NO: 12112 - protein, 1191 aa, Artificial Sequence; identical to SEQ ID NO: 48
  Synthetic polypeptide

SEQ ID NO: 12113 - protein, 969 aa, Artificial Sequence; identical to SEQ ID NO: 87
  Synthetic polypeptide

SEQ ID NO: 12114 - protein, 150 aa, Artificial Sequence
  Synthetic polypeptide
GLDYQSCPTSEDCENNPVDSFWKRASIQYSKDSSGVIHVMLNGSEPTGAYPIKGFFADYEIPNLQKEKITRIEIWVMHEIGGPNVESCGEGSMKVLEKRLKDMGFQYSCINDYRPVKLLQCVDHSTHPDCALKSKIGHRGVHREDHVQTE

SEQ ID NO: 12115 - protein, 300 aa, Artificial Sequence
  Synthetic polypeptide
MAAQGCAASRLLQLLLQLLLLLLLLAAGGARARWRGEGTSAHLRDIFLGRCAEYRALLSPEQRNKNCTAIWEAFKVALDKDPCSVLPSDYDLFINLSRHSIPRDKSLFWENSHLLVNSFADNTRRFMPLSDVLYGRVADFLSWCRQKNDSGLDYQSCPTSEDCENNPVDSFWKRASIQYSKDSSGVIHVMLNGSEPTGAYPIKGFFADYEIPNLQKEKITRIEIWVMHEIGGPNVESCGEGSMKVLEKRLKDMGFQYSCINDYRPVKLLQCVDHSTHPDCALKSKIGHRGVHREDHVQTE

SEQ ID NO: 12116 - protein, 315 aa, Artificial Sequence
  Synthetic polypeptide
MAAQGCAASRLLQLLLQLLLLLLLLAAGGARARWRGEGTSAHLRDIFLGRCAEYRALLSPEQRQIRNSREPPVLHTTQNKNCTAIWEAFKVALDKDPCSVLPSDYDLFINLSRHSIPRDKSLFWENSHLLVNSFADNTRRFMPLSDVLYGRVADFLSWCRQKNDSGLDYQSCPTSEDCENNPVDSFWKRASIQYSKDSSGVIHVMLNGSEPTGAYPIKGFFADYEIPNLQKEKITRIEIWVMHEIGGPNVESCGEGSMKVLEKRLKDMGFQYSCINDYRPVKLLQCVDHSTHPDCALKSKIGHRGVHREDHVQTE

SEQ ID NO: 12117 - protein, 108 aa, Artificial Sequence
  Synthetic polypeptide
  misc_feature (1)..(1): Xaa can be any naturally occurring amino acid
XSEPTGAYPIKGFFADYEIPNLQKEKITRIEIWVMHEIGGPNVESCGEGSMKVLEKRLKDMGFQYSCINDYRPVKLLQCVDHSTHPDCALKSKIGHRGVHREDHVQTE

SEQ ID NO: 12118 - protein, 196 aa, Artificial Sequence
  Synthetic polypeptide
  misc_feature (1)..(1): Xaa can be any naturally occurring amino acid
XSLFWENSHLLVNSFADNTRRFMPLSDVLYGRVADFLSWCRQKNDSGLDYQSCPTSEDCENNPVDSFWKRASIQYSKDSSGVIHVMLNGSEPTGAYPIKGFFADYEIPNLQKEKITRIEIWVMHEIGGPNVESCGEGSMKVLEKRLKDMGFQYSCINDYRPVKLLQCVDHSTHPDCALKSKIGHRGVHREDHVQTE

SEQ ID NO: 12119 - protein, 42 aa, Artificial Sequence
  Synthetic polypeptide
MAHVRHFRTLVSGFYFWEAALLLRIQSPQTVLDTLYIFKTYL

SEQ ID NO: 12120 - protein, 214 aa, Artificial Sequence
  Synthetic polypeptide
MDVKERRPYCSLTKSRREKERRYTNSSADNEECRVPTQKSYSSSETLKAFDHDSSRLLYGNRVKDLVHREADEFTRQGQNFTLRQLGVCEPATRRGLAFCAEMGLPHRGYSISAGSDADTENEAVMSPEHAMRLWGRGVKSGRSSCLSSRSNSALTLTDTEHENKSDSENDSLQLPRRCLLSPHWVNFLSLAPLCKHPPRFQLGWLLSSFTHCL

SEQ ID NO: 12121 - protein, 1025 aa, Artificial Sequence
  Synthetic polypeptide
MDVKERRPYCSLTKSRREKERRYTNSSADNEECRVPTQKSYSSSETLKAFDHDSSRLLYGNRVKDLVHREADEFTRQGQNFTLRQLGVCEPATRRGLAFCAEMGLPHRGYSISAGSDADTENEAVMSPEHAMRLWGRGVKSGRSSCLSSRSNSALTLTDTEHENKSDSENEQPASNQGQSTLQPLPPSHKQHSAQHHPSITSLNRNSLTNRRNQSPAPPAALPAELQTTPESVQLQDSWVLGSNVPLESRHFLFKTGTGTTPLFSTATPGYTMASGSVYSPPTRPLPRNTLSRSAFKFKKSSKYCSWKCTALCAVGVSVLLAILLSYFIAMHLFGLNWQLQQTENDTFENGKVNSDTMPTNTVSLPSGDNGKLGGFTQENNTIDSGELDIGRRAIQEIPPGIFWRSQLFIDQPQFLKFNISLQKDALIGVYGRKGLPPSHTQYDFVELLDGSRLIAREQRSLLETERAGRQARSVSLHEAGFIQYLDSGIWHLAFYNDGKNAEQVSFNTIVIESVVECPRNCHGNGECVSGTCHCFPGFLGPDCSRAACPVLCSGNGQYSKGRCLCFSGWKGTECDVPTTQCIDPQCGGRGICIMGSCACNSGYKGESCEEADCIDPGCSNHGVCIHGECHCSPGWGGSNCEILKTMCPDQCSGHGTYLQESGSCTCDPNWTGPDCSNEICSVDCGSHGVCMGGTCRCEEGWTGPACNQRACHPRCAEHGTCKDGKCECSQGWNGEHCTIEGCPGLCNSNGRCTLDQNGWHCVCQPGWRGAGCDVAMETLCTDSKDNEGDGLIDCMDPDCCLQSSCQNQPYCRGLPDPQDIISQSLQSPSQQAAKSFYDRISFLIGSDSTHVIPGESPFNKSLASVIRGQVLTADGTPLIGVNVSFFHYPEYGYTITRQDGMFDLVANGGASLTLVFERSPFLTQYHTVWIPWNVFYVMDTLVMKKEENDIPSCDLSGFVRPNPIIVSSPLSTFFRSSPEDSPIIPETQGDGVKDGLVRIHCDYCTNKSVHVSLMEQSQCFPYEE

SEQ ID NO: 12122 - protein, 120 aa, Artificial Sequence
  Synthetic polypeptide
MAVKLGTLLLALALGLAQPASARRKLLVFLLDGFRSDYISDEALESLPGFKEIVSRGVKVDYLTPDFPSLSYPNYYTLMTGEEIRTQTGTEGRPHIDTGGRRLPADQGERPQKKSTLMTS

SEQ ID NO: 12123 - protein, 1618 aa, Artificial Sequence
  Synthetic polypeptide
MGRHLALLLLLLLLFQHFGDSDGSQRLEQTPLQFTHLEYNVTVQENSAAKTYVGHPVKMGVYITHPAWEVRYKIVSGDSENLFKAEEYILGDFCFLRIRTKGGNTAILNREVKDHYTLIVKALEKNTNVEARTKVRVQVLDTNDLRPLFSPTSYSVSLPENTAIRTSIARVSATDADIGTNGEFYYSFKDRTDMFAIHPTSGVIVLTGRLDYLETKLYEMEILAADRGMKLYGSSGISSMAKLTVHIEQANECAPVITAVTLSPSELDRDPAYAIVTVDDCDQGANGDIASLSIVAGDLLQQFRTVRSFPGSKEYKVKAIGGIDWDSHPFGYNLTLQAKDKGTPPQFSSVKVIHVTSPQFKAGPVKFEKDVYRAEISEFAPPNTPVVMVKAIPAYSHLRYVFKSTPGKAKFSLNYNTGLISILEPVKRQQAAHFELEVTTSDRKASTKVLVKVLGANSNPPEFTQTAYKAAFDENVPIGTTVMSLSAVDPDEGENGYVTYSIANLNHVPFAIDHFTGAVSTSENLDYELMPRVYTLRIRASDWGLPYRREVEVLATITLNNLNDNTPLFEKINCEGTIPRDLGVGEQITTVSAIDADELQLVQYQIEAGNELDFFSLNPNSGVLSLKRSLMDGLGAKVSFHSLRITATDGENFATPLYINITVAASHKLVNLQCEETGVAKMLAEKLLQANKLHNQGEVEDIFFDSHSVNAHIPQFRSTLPTGIQVKENQPVGSSVIFMNSTDLDTGFNGKLVYAVSGGNEDSCFMIDMETGMLKILSPLDRETTDKYTLNITVYDLGIPQKAAWRLLHVVVVDANDNPPEFLQESYFVEVSEDKEVHSEIIQVEATDKDLGPNGHVTYSIVTDTDTFSIDSVTGVVNIARPLDRELQHEHSLKIEARDQAREEPQLFSTVVVKVSLEDVNDNPPTFIPPNYRVKVREDLPEGTVIMWLEAHDPDLGQSGQVRYSLLDHGEGNFDVDKLSGAVRIVQQLDFEKKQVYNLTVRAKDKGKPVSLSSTCYVEVEVVDVNENLHPPVFSSFVEKGTVKEDAPVGSLVMTVSAHDEDARRDGEIRYSIRDGSGVGVFKIGEETGVIETSDRLDRESTSHYWLTVFATDQGVVPLSSFIEIYIEVEDVNDNAPQTSEPVYYPEIMENSPKDVSVVQIEAFDPDSSSNDKLMYKITSGNPQGFFSIHPKTGLITTTSRKLDREQQDEHILEVTVTDNGSPPKSTIARVIVKILDENDNKPQFLQKFYKIRLPEREKPDRERNARREPLYHVIATDKDEGPNAEISYSIEDGNEHGKFFIEPKTGVVSSKRFSAAGEYDILSIKAVDNGRPQKSSTTRLHIEWISKPKPSLEPISFEESFFTFTVMESDPVAHMIGVISVEPPGIPLWFDITGGNYDSHFDVDKGTGTIIVAKPLDAEQKSNYNLTVEATDGTTTILTQVFIKVIDTNDHRPQFSTSKYEVVIPEDTAPETEILQISAVDQDEKNKLIYTLQSSRDPLSLKKFRLDPATGSLYTSEKLDHEAVHQHTLTVMVRDQDVPVKRNFARIVVNVSDTNDHAPWFTASSYKGRVYESAAVGSVVLQVTALDKDKGKNAEVLYSIESGMVNSGCLFMKQKKD

SEQ ID NO: 12124 - protein, 51 aa, Artificial Sequence
  Synthetic polypeptide
MSGCRKRCKREILKFAQYLLRLLTGSLHTGRDLMGGDWIMEVASPMLFLRW

SEQ ID NO: 12125 - protein, 425 aa, Artificial Sequence
  Synthetic polypeptide
MEDPSEPDRLASADGGSPEEEEDGEREPLLPRIAWAHPRRGAPGSAVRLLDAAGEEGEAGDEELPLPPGDVGVSRSSSAELDRSRPAVSVTIGTSEMNAFLDDPEFADIMLRAEQAIEVGIFPERISQGSSGSYFVKDPKRKIIGVFKPKSEEPYGQLNPKWTKYVHKVCCPCCFGRGCLIPNQGYLSEAGAYLVDNKLHLSIVPKTKVVWLVSETFNYNAIDRAKSRGKKYALEKVPKVGRKFHRIGLPPKIGSFQLFVEGYKEAEYWLRKFEADPLPENIRKQFQSQFERLVILDYIIRNTDRGNDNWLVRYEKQKCEKEIDHKESKWIDDEEFLIKIAAIDNGLAFPFKHPDEWRAYPFHWAWLPQAKVPFSEEIRNLILPYISDMNFVQDLCEDLYELFKTDKGFDKATFESQMSVMRGQL

SEQ ID NO: 12126 - protein, 329 aa, Artificial Sequence
  Synthetic polypeptide
MNAFLDDPEFADIMLRAEQAIEVGIFPERISQGSSGSYFVKDPKRKIIGVFKPKSEEPYGQLNPKWTKYVHKVCCPCCFGRGCLIPNQGYLSEAGAYLVDNKLHLSIVPKTKVVWLVSETFNYNAIDRAKSRGKKYALEKVPKVGRKFHRIGLPPKIGSFQLFVEGYKEAEYWLRKFEADPLPENIRKQFQSQFERLVILDYIIRNTDRGNDNWLVRYEKQKCEKEIDHKESKWIDDEEFLIKIAAIDNGLAFPFKHPDEWRAYPFHWAWLPQAKVPFSEEIRNLILPYISDMNFVQDLCEDLYELFKTDKGFDKATFESQMSVMRGQL

SEQ ID NO: 12127 - protein, 193 aa, Artificial Sequence
  Synthetic polypeptide
MNGDSRAAVVTSPPPTTAPHKERYFDRVDENNPEYLRERNMAPDLRQDFNMMEQKKRVSMILQSPAFCEELESMIQEQFKKGKNPTGLLALQQIADFMTTNVPNVYPAAPQGGMAALNMSLGMVTPVNDLRGSDSIAYDKGEKLLRCKLAAFYRLADLFGWSQLIYNHITEYKFHRESVCCGPCCGPRTRGKE

SEQ ID NO: 12128 - protein, 136 aa, Artificial Sequence
  Synthetic polypeptide
MTEAALVEGQVKLRDGKKWKSRWLVLRKPSPVADCLLMLVYKDKSERIKGLRERSSLTLEDICGLEPGLPYEGLVHTLAIVCLSQAIMLGFDSHEAMCAWDARIRYALGEGWARWLIPVIPVLREAEVGGSPEPRR

SEQ ID NO: 12129 - protein, 282 aa, Artificial Sequence; identical to SEQ ID NO: 720
  Synthetic polypeptide

SEQ ID NO: 12130 - protein, 126 aa, Artificial Sequence
  Synthetic polypeptide
MNWSHSCISFCWIYFAASRLRAAETADGKYAQKLFNDLFEDYSNALRPVEDTDKVLNVTLQITLSQIKDMDERNQILTAYLWIRQIWHDAYLTWDRDQYDGLDSIRIPSDLVWRPDIVLYNKTWTT

SEQ ID NO: 12131 - protein, 300 aa, Artificial Sequence
  Synthetic polypeptide
MNWSHSCISFCWIYFAASRLRAAETADGKYAQKLFNDLFEDYSNALRPVEDTDKVLNVTLQITLSQIKDMDERNQILTAYLWIRQIWHDAYLTWDRDQYDGLDSIRIPSDLVWRPDIVLYNKADDESSEPVNTNVVLRYDGLITWDAPAITKSSCVVDVTYFPFDNQQCNLTFGSWTYNGNQVDIFNALDSGDLSDFIEDVEWEVHGMPAVKNVISYGCCSEPYPDVTFTLLLKRRSSFYIVNLLIPCVLISFLAPLSFYLPAASGEKVSLGVTILLAMTVFQLMVAEIMPASENVPLIV

SEQ ID NO: 12132 - protein, 99 aa, Artificial Sequence; identical to SEQ ID NO: 1153
  Synthetic polypeptide

SEQ ID NO: 12133 - protein, 169 aa, Artificial Sequence; identical to SEQ ID NO: 948
  Synthetic polypeptide

SEQ ID NO: 12134 - protein, 163 aa, Artificial Sequence
  Synthetic polypeptide
MENGCLLNYLRENKGKLRKEMLLSVCQDICEGMEYLERNGYIHRDLAARNCLVSSTCIVKISDFGMTRYVLDDEYVSSFGAKFPIKWSPPEVFLFNKYSSKSDVWSFGVLMWEVFTEGKMPFENKSNLQVVEAISEGFRLYRPHLAPMSIYEVMYSCWHEGGA

SEQ ID NO: 12135 - protein, 508 aa, Artificial Sequence
  Synthetic polypeptide
MILSSYNTIQSVFCCCCCCSVQKRQMRTQISLSTDEELPEKYTQRRRPWLSQLSNKKQSNTGRVQPSKRKPLPPLPPSEVAEEKIQVKALYDFLPREPCNLALRRAEEYLILEKYNPHWWKARDRLGNEGLIPSNYVTENKITNLEIYEWYHRNITRNQAEHLLRQESKEGAFIVRDSRHLGSYTISVFMGARRSTEAAIKHYQIKKNDSGQWYVAERHAFQSIPELIWYHQHNAAGLMTRLRYPVGLMGSCLPATAGFSYEKWEIDPSELAFIKEIGSGQFGVVHLGEWRSHIQVAIKAINEGSMSEEDFIEEAKVMMKLSHSKLVQLYGVCIQRKPLYIVTEFMENGCLLNYLRENKGKLRKEMLLSVCQDICEGMEYLERNGYIHRDLAARNCLVSSTCIVKISDFGMTRYVLDDEYVSSFGAKFPIKWSPPEVFLFNKYSSKSDVWSFGVLMWEVFTEGKMPFENKSNLQVVEAISEGFRLYRPHLAPMSIYEVMYSCWHEGGA

SEQ ID NO: 12136 - protein, 106 aa, Artificial Sequence
  Synthetic polypeptide
MARGGAACKSDARLLLGRDALRPAPALLAPAVLLGAALGLGLGLWLGCRAGRQRTRHQKDDTQNLLKNLESNAQTPSETGSPSRRRKREVQMSKDKEAVDSQHGIS

SEQ ID NO: 12137 - protein, 279 aa, Artificial Sequence
  Synthetic polypeptide
MARGGAACKSDARLLLGRDALRPAPALLAPAVLLGAALGLGLGLWLGCRAGRQRTRHQKDDTQNLLKNLESNAQTPSETGSPSRRRKREVQMSKDKEAVDECEPPSNSNITAFALKAKVIYPINQKFRPLADGSSNPSLHENLKQAVLPHQPVEASPSSSLGSLSQGEKDDCSSSSSVHSATSDDRFLSRTFLRVNAFPEVLACESVDVDLCIYSLHLKDLLHLDTALRQEKHMMFIQIFKMCLLDLLPKKKSDDELYQKILSKQEKAQQRVRAWSQTG

SEQ ID NO: 12138 - protein, 603 aa, Artificial Sequence
  Synthetic polypeptide
MARGGAACKSDARLLLGRDALRPAPALLAPAVLLGAALGLGLGLWLGCRAGRQRTRHQKDDTQNLLKNLESNAQTPSETGSPSRRRKREVQMSKDKEAVDECEPPSNSNITAFALKAKVIYPINQKFRPLADGSSNPSLHENLKQAVLPHQPVEASPSSSLGSLSQGEKDDCSSSSSVHSATSDDRFLSRTFLRVNAFPEVLACESVDVDLCIYSLHLKDLLHLDTALRQEKHMMFIQIFKMCLLDLLPKKKSDDELYQKILSKQEKDLEELEKGLQVKLSNTEMSGAGDSEYITLADVEKKEREYSEQLIDNMEAFWKQMANIQHFLVDQFKCSSSKARQLMMTLTERMIAAEGLLCDSQELQALDALERTMGRAHMAKVIEFLKLQVQEETRCRLAAISHGLELLAGEGKLSGRQKEELLTQQHKAFWQEAERFSREFVQRGKDLVTASLAHQVEGTAKLTLAQEEEQRSFLAEAQPTADPEKFLEAFHEVLERQRLMQCDLEEEENVRATEAVVALCQELYFSTVDTFQKFVDALFLQTLPGMTGLPPEECDYLRQEVQENAAWQLGKSNRFRRQQWKLFQELLEQDQQGKRQVRLSEGL

SEQ ID NO: 12139 - protein, 596 aa, Artificial Sequence
  Synthetic polypeptide
MARGGAACKSDARLLLGRDALRPAPALLAPAVLLGAALGLGLGLWLGCRAGRQRTRHQKDDTQNLLKNLESNAQTPSETGSPSRRRKREVQMSKDKEAVDECEPPSNSNITAFALKAKVIYPINQKFRPLADGSSNPSLHENLKQAVLPHQPVEASPSSSLGSLSQGEKDDCSSSSSVHSATSDDRFLSRTFLRVNAFPEVLACESVDVDLCIYSLHLKDLLHLDTALRQEKHMMFIQIFKMCLLDLLPKKKSDDELYQKILSKQEKDLEELEKGLQVKLSNTEMSGAGDSEYITLADVEKKEREYSEQLIDNMEAFWKQMANIQHFLVDQFKCSSSKARQLMMTLTERMIAAEGLLCDSQELQALDALERTMGRAHMAKVIEFLKLQVQEETRCRLAAISHGLELLAGEGKLSGRQKEELLTQQHKAFWQEAERFSREFVQRGKDLVTASLAHQVEGTAKLTLAQEEEQRSFLAEAQPTADPEKFLEAFHEVLERQRLMQCDLEEEENVRATEAVVALCQELYFSTVDTFQKFVDALFLQTLPGMTGLPPEECDYLRQEVQENAAWQLGKSNRFRRQQWKLFQELLEQDQQGPYK

SEQ ID NO: 12140 - protein, 662 aa, Artificial Sequence
  Synthetic polypeptide
MARGGAACKSDARLLLGRDALRPAPALLAPAVLLGAALGLGLGLWLGCRAGRQRTRHQKDDTQNLLKNLESNAQTPSETGSPSRRRKREVQMSKDKEAVDECEPPSNSNITAFALKAKVIYPINQKFRPLADGSSNPSLHENLKQAVLPHQPVEASPSSSLGSLSQGEKDDCSSSSSVHSATSDDRFLSRTFLRVNAFPEVLACESVDVDLCIYSLHLKDLLHLDTALRQEKHMMFIQIFKMCLLDLLPKKKSDDELYQKILSKQEKDLEELEKGLQVKLSNTEMSGAGDSEYITLADVEKKEREYSEQLIDNMEAFWKQMANIQHFLVDQFKCSSSKARQLMMTLTERMIAAEGLLCDSQELQALDALERTMGRAHMAKVIEFLKLQVQEETRCRLAAISHGLELLAGEGKLSGRQKEELLTQQHKAFWQEAERFSREFVQRGKDLVTASLAHQVEGTAKLTLAQEEEQRSFLAEAQPTADPEKFLEAFHEVLERQRLMQCDLEEEENVRATEAVVALCQELYFSTVDTFQKFVDALFLQTLPGMTGLPPEECDYLRQEVQENAAWQLGKSNRFRRQQWKLFQELLEQDQQPKGSTNCHNYEDCSEMSPYTKSVSQTSRFPPYQQHPVTKKDHLQNKSHKVPKNKLTNVYKGLRETFIECH

SEQ ID NO: 12141 - protein, 311 aa, Artificial Sequence
  Synthetic polypeptide
MRGSGPRGAGRRRPPSGGGDTPITPASLAGCYSAPRRAPLWTCLLLCAALRTLLASPSNEVNLLDSRTVMGDLGWIAFPKNGWEEIGEVDENYAPIHTYQVCKVMEQNQNNWLLTSWISNEGASRIFIELKFTLRDCNSLPGGLGTCKETFNMYYFESDDQNGRNIKENQYIKIDTIAADESFTELDLGDRVMKLNTEVRDVGPLSKKGFYLAFQDVGACIALVSVRVYYKKCPSVVRHLAVFPDTITGADSSQLLEVSGSCVNHSVTDEPPKMHCSAEGEWLVPIGKCMCKAGYEEKNGTCQVHIHLDGR

SEQ ID NO: 12142 - protein, 106 aa, Artificial Sequence; identical to SEQ ID NO: 1135
  Synthetic polypeptide

SEQ ID NO: 12143 - protein, 225 aa, Artificial Sequence
  Synthetic polypeptide
MAHRGPSRASKGPGPTARAPSPGAPPPPRSPRSRPLLLLLLLLGACGAAGRSPEPGRLGPHAQLTRVPRSPPAGRAEPGGGEDRQARGTEPGAPGPSPGPAPGPGEDGAPAAGYRRWERAAPLAGVASRAQVSLISTSFVLKGDATHNQAMVHWTGENSSVILILTKYYHADMGKVLESSLWRSSDFGTSYTKLTLQPGVTTVIDNFYICPTNKRKPWFMQVQWR

SEQ ID NO: 12144 - protein, 53 aa, Artificial Sequence
  Synthetic polypeptide
MGKVLESSLWRSSDFGTSYTKLTLQPGVTTVIDNFYICPTNKRKPWFMQVQWR

SEQ ID NO: 12145 - protein, 220 aa, Artificial Sequence
  Synthetic polypeptide
MAHRGPSRASKGPGPTARAPSPGAPPPPRSPRSRPLLLLLLLLGACGAAGRSPEPGRLGPHAQLTRVPRSPPAGRAEPGGGEDRQARGTEPGAPGPSPGPAPGPGEDGAPAAGYRRWERAAPLAGVASRAQVSLISTSFVLKGDATHNQAMVHWTGENSSVILILTKYYHADMGKVLESSLWRSSDFGTSYTKLTLQPGVTTVIDNFYICPTNKRKVQWR

SEQ ID NO: 12146 - protein, 48 aa, Artificial Sequence
  Synthetic polypeptide
MGKVLESSLWRSSDFGTSYTKLTLQPGVTTVIDNFYICPTNKRKVQWR

SEQ ID NO: 12147 - protein, 286 aa, Artificial Sequence
  Synthetic polypeptide
MAHRGPSRASKGPGPTARAPSPGAPPPPRSPRSRPLLLLLLLLGACGAAGRSPEPGRLGPHAQLTRVPRSPPAGRAEPGGGEDRQARGTEPGAPGPSPGPAPGPGEDGAPAAGYRRWERAAPLAGVASRAQVSLISTSFVLKGDATHNQAMVHWTGENSSVILILTKYYHADMGKVLESSLWRSSDFGTSYTKLTLQPGVTTVIDNFYICPTNKRKPSSQEPTTPSDAQKNIRQTHVERHPPACLASPQSSLGHPAQGKSPDCPSLRCTVVSWWDPGTGRGNTGGS

SEQ ID NO: 12148 - protein, 114 aa, Artificial Sequence
  Synthetic polypeptide
MGKVLESSLWRSSDFGTSYTKLTLQPGVTTVIDNFYICPTNKRKPSSQEPTTPSDAQKNIRQTHVERHPPACLASPQSSLGHPAQGKSPDCPSLRCTVVSWWDPGTGRGNTGGS

SEQ ID NO: 12149 - protein, 25 aa, Artificial Sequence
  Synthetic polypeptide
MKTGHFEIVTMLLATMILVDIFQKN

SEQ ID NO: 12150 - protein, 46 aa, Artificial Sequence
  Synthetic polypeptide
MGVLKVWLGLALALAEFAVLPHHSEGACVYQDSLLALIPGLMAAQD

SEQ ID NO: 12151 - protein, 37 aa, Artificial Sequence
  Synthetic polypeptide
MGVLKVWLGLALALAEFAVLPHHSEGACVYQDSLLAV

SEQ ID NO: 12152 - protein, 715 aa, Artificial Sequence; identical to SEQ ID NO: 181
  Synthetic polypeptide

SEQ ID NO: 12153 - protein, 558 aa, Artificial Sequence
  Synthetic polypeptide
  misc_feature (1)..(1): Xaa can be any naturally occurring amino acid
XCSYEGHVFQDGEDWRLSRCAKCLCRNGVAQCFTAQCQPLFCNQDETVVRVPGKCCPQCSARSCSAAGQVYEHGEQWSENACTTCICDRGEVRCHKQACLPLRCGKGQSRARRHGQCCEECVSPAGSCSYDGVVRYQDEMWKGSACEFCMCDHGQVTCQTGECAKVECARDEELIHLDGKCCPECISRNGYCVYEETGEFMSSNASEVKRIPEGEKWEDGPCKVCECRGAQVTCYEPSCPPCPVGTLALEVKGQCCPDCTSVHCHPDCLTCSQSPDHCDLCQDPTKLLQNGWCVHSCGLGFYQAGSLCLACQPQCSTCTSGLECSSCQPPLLMRHGQCVPTCGDGFYQDRHSCAVCHESCAGCWGPTEKHCLACRDPLHVLRDGGCESSCGKGFYNRQGTCSACDQSCDSCGPSSPRCLTCTEKTVLHDGKCMSECPGGYYADATGRCKVCHNSCASCSGPTPSHCTACSPPKALRQGHCLPRCGEGFYSDHGVCKACHSSCLACMGPAPSHCTGCKKPEEGLQVEQLSDVGIPSGECLAQCRAHFYLESTGICEACF

SEQ ID NO: 12154 - protein, 644 aa, Artificial Sequence
  Synthetic polypeptide
  misc_feature (1)..(1): Xaa can be any naturally occurring amino acid
XGEVLQIAANQCCPECVLRTPGSCHHEKKIHEHGTEWASSPCSVCSCNHGEVRCTPQPCPPLSCGHQELAFIPEGSCCPVCVGLGKPCSYEGHVFQDGEDWRLSRCAKCLCRNGVAQCFTAQCQPLFCNQDETVVRVPGKCCPQCSARSCSAAGQVYEHGEQWSENACTTCICDRGEVRCHKQACLPLRCGKGQSRARRHGQCCEECVSPAGSCSYDGVVRYQDEMWKGSACEFCMCDHGQVTCQTGECAKVECARDEELIHLDGKCCPECISRNGYCVYEETGEFMSSNASEVKRIPEGEKWEDGPCKVCECRGAQVTCYEPSCPPCPVGTLALEVKGQCCPDCTSVHCHPDCLTCSQSPDHCDLCQDPTKLLQNGWCVHSCGLGFYQAGSLCLACQPQCSTCTSGLECSSCQPPLLMRHGQCVPTCGDGFYQDRHSCAVCHESCAGCWGPTEKHCLACRDPLHVLRDGGCESSCGKGFYNRQGTCSACDQSCDSCGPSSPRCLTCTEKTVLHDGKCMSECPGGYYADATGRCKVCHNSCASCSGPTPSHCTACSPPKALRQGHCLPRCGEGFYSDHGVCKACHSSCLACMGPAPSHCTGCKKPEEGLQVEQLSDVGIPSGECLAQCRAHFYLESTGICEACF

SEQ ID NO: 12155 - protein, 811 aa, Artificial Sequence
  Synthetic polypeptide
MGVLKVWLGLALALAEFAVLPHHSEGACVYQDSLLADATIWKPDSCQSCRCHGDIVICKPAVCRNPQCAFEKGEVLQIAANQCCPECVLRTPGSCHHEKKIHEHGTEWASSPCSVCSCNHGEVRCTPQPCPPLSCGHQELAFIPEGSCCPVCVGLGKPCSYEGHVFQDGEDWRLSRCAKCLCRNGVAQCFTAQCQPLFCNQDETVVRVPGKCCPQCSARSCSAAGQVYEHGEQWSENACTTCICDRGEVRCHKQACLPLRCGKGQSRARRHGQCCEECVSPAGSCSYDGVVRYQDEMWKGSACEFCMCDHGQVTCQTGECAKVECARDEELIHLDGKCCPECISRNGYCVYEETGEFMSSNASEVKRIPEGEKWEDGPCKVCECRGAQVTCYEPSCPPCPVGTLALEVKGQCCPDCTSVHCHPDCLTCSQSPDHCDLCQDPTKLLQNGWCVHSCGLGFYQAGSLCLACQPQCSTCTSGLECSSCQPPLLMRHGQCVPTCGDGFYQDRHSCAVCHESCAGCWGPTEKHCLACRDPLHVLRDGGCESSCGKGFYNRQGTCSACDQSCDSCGPSSPRCLTCTEKTVLHDGKCMSECPGGYYADATGRCKVCHNSCASCSGPTPSHCTACSPPKALRQGHCLPRCGEGFYSDHGVCKACHSSCLACMGPAPSHCTGCKKPEEGLQVEQLSDVGIPSGECLAQCRAHFYLESTGICEACHQSCFRCAGKSPHNCTDCGPSHVLLDGQCLSQCPDGYFHQEGSCTECHPTCRQCHGPLESDCISCYPHISLTNGNCRTSCREEQFLNLVGYCAELKF

SEQ ID NO: 12156 - protein, 654 aa, Artificial Sequence
  Synthetic polypeptide
  misc_feature (1)..(1): Xaa can be any naturally occurring amino acid
XCSYEGHVFQDGEDWRLSRCAKCLCRNGVAQCFTAQCQPLFCNQDETVVRVPGKCCPQCSARSCSAAGQVYEHGEQWSENACTTCICDRGEVRCHKQACLPLRCGKGQSRARRHGQCCEECVSPAGSCSYDGVVRYQDEMWKGSACEFCMCDHGQVTCQTGECAKVECARDEELIHLDGKCCPECISRNGYCVYEETGEFMSSNASEVKRIPEGEKWEDGPCKVCECRGAQVTCYEPSCPPCPVGTLALEVKGQCCPDCTSVHCHPDCLTCSQSPDHCDLCQDPTKLLQNGWCVHSCGLGFYQAGSLCLACQPQCSTCTSGLECSSCQPPLLMRHGQCVPTCGDGFYQDRHSCAVCHESCAGCWGPTEKHCLACRDPLHVLRDGGCESSCGKGFYNRQGTCSACDQSCDSCGPSSPRCLTCTEKTVLHDGKCMSECPGGYYADATGRCKVCHNSCASCSGPTPSHCTACSPPKALRQGHCLPRCGEGFYSDHGVCKACHSSCLACMGPAPSHCTGCKKPEEGLQVEQLSDVGIPSGECLAQCRAHFYLESTGICEACHQSCFRCAGKSPHNCTDCGPSHVLLDGQCLSQCPDGYFHQEGSCTECHPTCRQCHGPLESDCISCYPHISLTNGNCRTSCREEQFLNLVGYCAELKF

SEQ ID NO: 12157 - protein, 822 aa, Artificial Sequence
  Synthetic polypeptide
MGVLKVWLGLALALAEFAVLPHHSEGACVYQDSLLADATIWKPDSCQSCRCHGDIVICKPAVCRNPQCAFEKGEVLQIAANQCCPECVLRTPGSCHHEKKIHEHGTEWASSPCSVCSCNHGEVRCTPQPCPPLSCGHQELAFIPEGSCCPVCVGLGKPCSYEGHVFQDGEDWRLSRCAKCLCRNGVAQCFTAQCQPLFCNQDETVVRVPGKCCPQCSARSCSAAGQVYEHGEQWSENACTTCICDRGEVRCHKQACLPLRCGKGQSRARRHGQCCEECVSPAGSCSYDGVVRYQDEMWKGSACEFCMCDHGQVTCQTGECAKVECARDEELIHLDGKCCPECISRNGYCVYEETGEFMSSNASEVKRIPEGEKWEDGPCKVCECRGAQVTCYEPSCPPCPVGTLALEVKGQCCPDCTSVHCHPDCLTCSQSPDHCDLCQDPTKLLQNGWCVHSCGLGFYQAGSLCLACQPQCSTCTSGLECSSCQPPLLMRHGQCVPTCGDGFYQDRHSCAVCHESCAGCWGPTEKHCLACRDPLHVLRDGGCESSCGKGFYNRQGTCSACDQSCDSCGPSSPRCLTCTEKTVLHDGKCMSECPGGYYADATGRCKVCHNSCASCSGPTPSHCTACSPPKALRQGHCLPRCGEGFYSDHGVCKACHSSCLACMGPAPSHCTGCKKPEEGLQVEQLSDVGIPSGECLAQCRAHFYLESTGICEACHQSCFRCAGKSPHNCTDCGPSHVLLDGQCLSQCPDGYFHQEGSCTECHPTCRQCHGPLESDCISCYPHISLTNGNCRTSCREEQFLNLVGYCAGFLRTLKMHMCAVNL

SEQ ID NO: 12158 - protein, 665 aa, Artificial Sequence
  Synthetic polypeptide
  misc_feature (1)..(1): Xaa can be any naturally occurring amino acid
XCSYEGHVFQDGEDWRLSRCAKCLCRNGVAQCFTAQCQPLFCNQDETVVRVPGKCCPQCSARSCSAAGQVYEHGEQWSENACTTCICDRGEVRCHKQACLPLRCGKGQSRARRHGQCCEECVSPAGSCSYDGVVRYQDEMWKGSACEFCMCDHGQVTCQTGECAKVECARDEELIHLDGKCCPECISRNGYCVYEETGEFMSSNASEVKRIPEGEKWEDGPCKVCECRGAQVTCYEPSCPPCPVGTLALEVKGQCCPDCTSVHCHPDCLTCSQSPDHCDLCQDPTKLLQNGWCVHSCGLGFYQAGSLCLACQPQCSTCTSGLECSSCQPPLLMRHGQCVPTCGDGFYQDRHSCAVCHESCAGCWGPTEKHCLACRDPLHVLRDGGCESSCGKGFYNRQGTCSACDQSCDSCGPSSPRCLTCTEKTVLHDGKCMSECPGGYYADATGRCKVCHNSCASCSGPTPSHCTACSPPKALRQGHCLPRCGEGFYSDHGVCKACHSSCLACMGPAPSHCTGCKKPEEGLQVEQLSDVGIPSGECLAQCRAHFYLESTGICEACHQSCFRCAGKSPHNCTDCGPSHVLLDGQCLSQCPDGYFHQEGSCTECHPTCRQCHGPLESDCISCYPHISLTNGNCRTSCREEQFLNLVGYCAGFLRTLKMHMCAVNL

SEQ ID NO: 12159 - protein, 1340 aa, Artificial Sequence; identical to SEQ ID NO: 23
  Synthetic polypeptide

SEQ ID NO: 12160 - protein, 1284 aa, Artificial Sequence
  Synthetic polypeptide
MSLLQSALDFLAGPGSLGGASGRDQSDFVGQTVELGELRLRVRRVLAEGGFAFVYEAQDVGSGREYALKRLLSNEEEKNRAIIQEVCFMKKLSGHPNIVQFCSAASIGKEESDTGQAEFLLLTELCKGQLVEFLKKMESRGPLSCDTVLKIFYQTCRAVQHMHRQKPPIIHRDLKVENLLLSNQGTIKLCDFGSATTISHYPDYSWSAQRRALVEEEITRNTTPMYRTPEIIDLYSNFPIGEKQDIWALGCILYLLCFRQHPFEDGAKLRIVNGKYSIPPHDTQYTVFHSLIRAMLQVNPEERLSIAEVVHQLQEIAAARNVNPKSPITELLEQNGGYGSATLSRGPPPPVGPAGSGYSGGLALAEYDQPYGGFLDILRGGTERLFTNLKDTSSKVIQSVANYAKGDLDISYITSRIAVMSFPAEGVESALKNNIEDVRLFLDSKHPGHYAVYNLSPRTYRPSRFHNRVSECGWAARRAPHLHTLYNICRNMHAWLRQDHKNVCVVHCMDGRAASAVAVCSFLCFCRLFSTAEAAVYMFSMKRCPPGIWPSHKRYIEYMCDMVAEEPITPHSKPILVRAVVMTPVPLFSKQRSGCRPFCEVYVGDERVASTSQEYDKMRDFKIEDGKAVIPLGVTVQGDVLIVIYHARSTLGGRLQAKMASMKMFQIQFHTGFVPRNATTVKFAKYDLDACDIQEKYPDLFQVNLEVEVEPRDRPSREAPPWENSSMRGLNPKILFSSREEQQDILSKFGKPELPRQPGSTAQYDAGAGSPEAEPTDSDSPPSSSADASRFLHTLDWQEEKEAETGAENASSKESESALMEDRDESEVSDEGGSPISSEGQEPRADPEPPGLAAGLVQQDLVFEVETPAVLPEPVPQEDGVDLLGLHSEVGAGPAVPPQACKAPSSNTDLLSCLLGPPEAASQGPPEDLLSEDPLLLASPAPPLSVQSTPRGGPPAAADPFGPLLPSSGNNSQPCSNPDLFGEFLNSDSVTVPPSFPSAHSAPPPSCSADFLHLGDLPGEPSKMTASSSNPDLLGGWAAWTETAASAVAPTPATEGPLFSPGGQPAPCGSQASWTKSQNPDPFADLGDLSSGLQGSPAGFPPGGFIPKTATTPKGSSSWQTSRPPAQGASWPPQAKPPPKACTQPRPNYASNFSVIGAREERGVRAPSFAQKPKVSENDFEDLLSNQGFSSRSDKKGPKTIAEMRKQDLAKDTDPLKLKLLDWIEGKERNIRALLSTLHTVLWDGESRWTPVGMADLVAPEQVKKHYRRAVLAVHPDKVLTQEK

SEQ ID NO: 12161 - protein, 1205 aa, Artificial Sequence
  Synthetic polypeptide
MSLLQSALDFLAGPGSLGGASGRDQSDFVGQTVELGELRLRVRRVLAEGQLVEFLKKMESRGPLSCDTVLKIFYQTCRAVQHMHRQKPPIIHRDLKVENLLLSNQGTIKLCDFGSATTISHYPDYSWSAQRRALVEEEITRNTTPMYRTPEIIDLYSNFPIGEKQDIWALGCILYLLCFRQHPFEDGAKLRIVNGKYSIPPHDTQYTVFHSLIRAMLQVNPEERLSIAEVVHQLQEIAAARNVNPKSPITELLEQNGGYGSATLSRGPPPPVGPAGSGYSGGLALAEYDQPYGGFLDILRGGTERLFTNLKDTSSKVIQSVANYAKGDLDISYITSRIAVMSFPAEGVESALKNNIEDVRLFLDSKHPGHYAVYNLSPRTYRPSRFHNRVSECGWAARRAPHLHTLYNICRNMHAWLRQDHKNVCVVHCMDGRAASAVAVCSFLCFCRLFSTAEAAVYMFSMKRCPPGIWPSHKRYIEYMCDMVAEEPITPHSKPILVRAVVMTPVPLFSKQRSGCRPFCEVYVGDERVASTSQEYDKMRDFKIEDGKAVIPLGVTVQGDVLIVIYHARSTLGGRLQAKMASMKMFQIQFHTGFVPRNATTVKFAKYDLDACDIQEKYPDLFQVNLEVEVEPRDRPSREAPPWENSSMRGLNPKILFSSREEQQDILSKFGKPELPRQPGSTAQYDAGAGSPEAEPTDSDSPPSSSADASRFLHTLDWQEEKEAETGAENASSKESESALMEDRDESEVSDEGGSPISSEGQEPRADPEPPGLAAGLVQQDLVFEVETPAVLPEPVPQEDGVDLLGLHSEVGAGPAVPPQACKAPSSNTDLLSCLLGPPEAASQGPPEDLLSEDPLLLASPAPPLSVQSTPRGGPPAAADPFGPLLPSSGNNSQPCSNPDLFGEFLNSDSVTVPPSFPSAHSAPPPSCSADFLHLGDLPGEPSKMTASSSNPDLLGGWAAWTETAASAVAPTPATEGPLFSPGGQPAPCGSQASWTKSQNPDPFADLGDLSSGLQGSPAGFPPGGFIPKTATTPKGSSSWQTSRPPAQGASWPPQAKPPPKACTQPRPNYASNFSVIGAREERGVRAPSFAQKPKVSENDFEDLLSNQGFSSRSDKKGPKTIAEMRKQDLAKDTDPLKLKLLDWIEGKERNIRALLSTLHTVLWDGESRWTPVGMADLVAPEQVKKHYRRAVLAVHPDKVLTQEK

SEQ ID NO: 12162 - protein, 440 aa, Artificial Sequence
  Synthetic polypeptide
  misc_feature (1)..(1): Xaa can be any naturally occurring amino acid
XVGAGPAVPPQACKAPSSNTDLLSCLLGPPEAASQGPPEDLLSEDPLLLASPAPPLSVQSTPRGGPPAAADPFGPLLPSSGNNSQPCSNPDLFGEFLNSDSVTVPPSFPSAHSAPPPSCSADFLHLGDLPGEPSKMTASSSNPDLLGGWAAWTETAASAVAPTPATEGPLFSPGGQPAPCGSQASWTKSQNPDPFADLGDLSSGLQDPQAQSTVSPRGQRVCTCSRRLPTGKLKPGVADTGTAASPHRHCGSPAGFPPGGFIPKTATTPKGSSSWQTSRPPAQGASWPPQAKPPPKACTQPRPNYASNFSVIGAREERGVRAPSFAQKPKVSENDFEDLLSNQGFSSRSDKKGPKTIAEMRKQDLAKDTDPLKLKLLDWIEGKERNIRALLSTLHTVLWDGESRWTPVGMADLVAPEQVKKHYRRAVLAVHPDKVLTQEK

SEQ ID NO: 12163 - protein, 564 aa, Artificial Sequence
  Synthetic polypeptide
MSLLQSALDFLAGPGSLGGASGRDQSDFVGQTVELGELRLRVRRVLAEGGFAFVYEAQDVGSGREYALKRLLSNEEEKNRAIIQEVCFMKKLSGHPNIVQFCSAASIGKEESDTGQAEFLLLTELCKGQLVEFLKKMESRGPLSCDTVLKIFYQTCRAVQHMHRQKPPIIHRDLKVENLLLSNQGTIKLCDFGSATTISHYPDYSWSAQRRALVEEEITRNTTPMYRTPEIIDLYSNFPIGEKQDIWALGCILYLLCFRQHPFEDGAKLRIVNGKYSIPPHDTQYTVFHSLIRAMLQVNPEERLSIAEVVHQLQEIAAARNVNPKSPITELLEQNGGYGSATLSRGPPPPVGPAGSGYSGGLALAEYDQPYGGFLDILRGGTERLFTNLKDTSSKVIQSVANYAKGDLDISYITSRIAVMSFPAEGVESALKNNIEDVRLFLDSKHPGHYAVYNLSPRTYRPSRFHNRVSECGWAARRAPHLHTLYNICRNMHAWLRQDHKNVCVVHCMDGRAASAVAVCSFLCFCRLFSTAEAAVYMFSMKRCPPGIWPSHKRFKKLRGHQAG

SEQ ID NO: 12164 - protein, 485 aa, Artificial Sequence
  Synthetic polypeptide
MSLLQSALDFLAGPGSLGGASGRDQSDFVGQTVELGELRLRVRRVLAEGQLVEFLKKMESRGPLSCDTVLKIFYQTCRAVQHMHRQKPPIIHRDLKVENLLLSNQGTIKLCDFGSATTISHYPDYSWSAQRRALVEEEITRNTTPMYRTPEIIDLYSNFPIGEKQDIWALGCILYLLCFRQHPFEDGAKLRIVNGKYSIPPHDTQYTVFHSLIRAMLQVNPEERLSIAEVVHQLQEIAAARNVNPKSPITELLEQNGGYGSATLSRGPPPPVGPAGSGYSGGLALAEYDQPYGGFLDILRGGTERLFTNLKDTSSKVIQSVANYAKGDLDISYITSRIAVMSFPAEGVESALKNNIEDVRLFLDSKHPGHYAVYNLSPRTYRPSRFHNRVSECGWAARRAPHLHTLYNICRNMHAWLRQDHKNVCVVHCMDGRAASAVAVCSFLCFCRLFSTAEAAVYMFSMKRCPPGIWPSHKRFKKLRGHQAG

SEQ ID NO: 12165 - protein, 276 aa, Artificial Sequence
  Synthetic polypeptide
MVNSSRVQPQQPGDAKRPPAPRAPDPGRLMAGCAAVGASLAAPGGLCEQRGLEIEMQRIRQAAARDPPAGAAASPSPPLSSCSRQAWSRDNPGFEAEEEEEEVEGEEGGMVVEMDVEWRPGSRRSAASSAVSSVGARSRGLGGYHGAGHPSGRRRRREDQGPPCPSPVGGGDPLHRHLPLEGQPPRVAWAERLVRGLRGLWGTRLMEESSTNREKYLKSVLRELVTYLLFLIVLCICYHTLKIEPQIPVSHVIMRVSDQYSTVYCIARWFCPTSLM

SEQ ID NO: 12166 - protein, 82 aa, Artificial Sequence
  Synthetic polypeptide
MEVFPFLLVLSVWWSRTWDSANADSIIHIGAIFDESAKKDDEVFRTAVGDLNQNEEILQTEKITFSVTFVDGNNPFQAVQEG

SEQ ID NO: 12167 - protein, 57 aa, Artificial Sequence
  Synthetic polypeptide
MRKGLRATAARCGLGLGYLLQMLVLPALALLSASGTGSAAQGPGMVAHGCNPSTLGG

SEQ ID NO: 12168 - protein, 537 aa, Artificial Sequence
  Synthetic polypeptide
MARKQNRNSKELGLVPLTDDTSHAGPPGPGRALLECDHLRSGVPGGRRRKDWSCSLLVASLAGAFGSSFLYGYNLSVVNAPTPYIKAFYNESWERRHGRPIDPDTLTLLWSVTVSIFAIGGLVGTLIVKMIGKVLGRKHTLLANNGFAISAALLMACSLQAGAFEMLIVGRFIMGIDGGVALSVLPMYLSEISPKEIRGSLGQVTAIFICIGVFTGQLLGLPELLGKESTWPYLFGVIVVPAVVQLLSLPFLPDSPRYLLLEKHNEARAVKAFQTFLGKADVSQEVEEVLAESRVQRSIRLVSVLELLRAPYVRWQVVTVIVTMACYQLCGLNAIWFYTNSIFGKAGIPPAKIPYVTLSTGGIETLAAVFSGLVIEHLGRRPLLIGGFGLMGLFFGTLTITLTLQDHAPWVPYLSIVGILAIIASFCSGPGGIPFILTGEFFQQSQRPAAFIIAGTVNWLSNFAVGLLFPFIQKSLDTYCFLVFATICITGAIYLYFVLPETKNRTYAEISQAFSKRNKAYPPEEKIDSAVTDAQRN

SEQ ID NO: 12169 - protein, 508 aa, Artificial Sequence
  Synthetic polypeptide
MKLSKKDRGEDEESDSAKKKLDWSCSLLVASLAGAFGSSFLYGYNLSVVNAPTPYIKAFYNESWERRHGRPIDPDTLTLLWSVTVSIFAIGGLVGTLIVKMIGKVLGRKHTLLANNGFAISAALLMACSLQAGAFEMLIVGRFIMGIDGGVALSVLPMYLSEISPKEIRGSLGQVTAIFICIGVFTGQLLGLPELLGKESTWPYLFGVIVVPAVVQLLSLPFLPDSPRYLLLEKHNEARAVKAFQTFLGKADVSQEVEEVLAESRVQRSIRLVSVLELLRAPYVRWQVVTVIVTMACYQLCGLNAIWFYTNSIFGKAGIPPAKIPYVTLSTGGIETLAAVFSGLVIEHLGRRPLLIGGFGLMGLFFGTLTITLTLQDHAPWVPYLSIVGILAIIASFCSGPGGIPFILTGEFFQQSQRPAAFIIAGTVNWLSNFAVGLLFPFIQKSLDTYCFLVFATICITGAIYLYFVLPETKNRTYAEISQAFSKRNKAYPPEEKIDSAVTDAQRN

SEQ ID NO: 12170 - protein, 538 aa, Artificial Sequence
  Synthetic polypeptide
MARKQNRNSKELGLVPLTDDTSHAGPPGPGRALLECDHLRSGVPGGRRRKDWSCSLLVASLAGAFGSSFLYGYNLSVVNAPTPYIKAFYNESWERRHGRPIDPDTLTLLWSVTVSIFAIGGLVGTLIVKMIGKVLGRKHTLLANNGFAISAALLMACSLQAGAFEMLIVGRFIMGIDGGVALSVLPMYLSEISPKEIRGSLGQVTAIFICIGVFTGQLLGLPELLGKESTWPYLFGVIVVPAVVQLLSLPFLPDSPRYLLLEKHNEARAVKAFQTFLGKADVSQEVEEVLAESRVQRSIRLVSVLELLRAPYVRWQVVTVIVTMACYQLCGLNAIWFYTNSIFGKAGIPPAKIPYVTLSTGGIETLAAVFSGLVIEHLGRRPLLIGGFGLMGLFFGTLTITLTLQDHAPWVPYLSIVGILAIIASFCSGPGGIPFILTGEFFQQSQRPAAFIIAGTVNWLSNFAVGLLFPFIQKSLDTYCFLVFATICITGAIYLYFVLPETKNRTYAEISQAFSKRNKAYPPEEKIDSAVTDAAQRN

SEQ ID NO: 12171 - protein, 509 aa, Artificial Sequence
  Synthetic polypeptide
MKLSKKDRGEDEESDSAKKKLDWSCSLLVASLAGAFGSSFLYGYNLSVVNAPTPYIKAFYNESWERRHGRPIDPDTLTLLWSVTVSIFAIGGLVGTLIVKMIGKVLGRKHTLLANNGFAISAALLMACSLQAGAFEMLIVGRFIMGIDGGVALSVLPMYLSEISPKEIRGSLGQVTAIFICIGVFTGQLLGLPELLGKESTWPYLFGVIVVPAVVQLLSLPFLPDSPRYLLLEKHNEARAVKAFQTFLGKADVSQEVEEVLAESRVQRSIRLVSVLELLRAPYVRWQVVTVIVTMACYQLCGLNAIWFYTNSIFGKAGIPPAKIPYVTLSTGGIETLAAVFSGLVIEHLGRRPLLIGGFGLMGLFFGTLTITLTLQDHAPWVPYLSIVGILAIIASFCSGPGGIPFILTGEFFQQSQRPAAFIIAGTVNWLSNFAVGLLFPFIQKSLDTYCFLVFATICITGAIYLYFVLPETKNRTYAEISQAFSKRNKAYPPEEKIDSAVTDAAQRN

SEQ ID NO: 12172 - protein, 441 aa, Artificial Sequence
  Synthetic polypeptide
MARKQNRNSKELGLVPLTDDTSHAGPPGPGRALLECDHLRSGVPGGRRRKDWSCSLLVASLAGAFGSSFLYGYNLSVVNAPTPYIKAFYNESWERRHGRPIDPDTLTLLWSVTVSIFAIGGLVGTLIVKMIGKVLGRKHTLLANNGFAISAALLMACSLQAGAFEMLIVGRFIMGIDGGVALSVLPMYLSEISPKEIRGSLGQVTAIFICIGVFTGQLLGLPELLGKESTWPYLFGVIVVPAVVQLLSLPFLPDSPRYLLLEKHNEARAVKAFQTFLGKADVSQEVEEVLAESRVQRSIRLVSVLELLRAPYVRWQVVTVIVTMACYQLCGLNAIWFYTNSIFGKAGIPPAKIPYVTLSTGGIETLAAVFSGLVIEHLGRRPLLIGGFGLMGLFFGTLTITLTLQDHAPWVPYLSIVGILAIIASFCSGPASVSPSVQRQG

SEQ ID NO: 12173 - protein, 412 aa, Artificial Sequence
  Synthetic polypeptide
MKLSKKDRGEDEESDSAKKKLDWSCSLLVASLAGAFGSSFLYGYNLSVVNAPTPYIKAFYNESWERRHGRPIDPDTLTLLWSVTVSIFAIGGLVGTLIVKMIGKVLGRKHTLLANNGFAISAALLMACSLQAGAFEMLIVGRFIMGIDGGVALSVLPMYLSEISPKEIRGSLGQVTAIFICIGVFTGQLLGLPELLGKESTWPYLFGVIVVPAVVQLLSLPFLPDSPRYLLLEKHNEARAVKAFQTFLGKADVSQEVEEVLAESRVQRSIRLVSVLELLRAPYVRWQVVTVIVTMACYQLCGLNAIWFYTNSIFGKAGIPPAKIPYVTLSTGGIETLAAVFSGLVIEHLGRRPLLIGGFGLMGLFFGTLTITLTLQDHAPWVPYLSIVGILAIIASFCSGPASVSPSVQRQG

SEQ ID NO: 12174 - protein, 139 aa, Artificial Sequence; identical to SEQ ID NO: 1076
  Synthetic polypeptide

SEQ ID NO: 12175 - protein, 110 aa, Artificial Sequence; identical to SEQ ID NO: 1123
  Synthetic polypeptide

SEQ ID NO: 12176 - protein, 45 aa, Artificial Sequence
  Synthetic polypeptide
MLHVEMLTLVFLVLWMCVFSQDPGSKAVADRYAVYWNSSNPRQQK

SEQ ID NO: 12177 - protein, 62 aa, Artificial Sequence
  Synthetic polypeptide
MAAASYDQLLKQVEALKMENSNLRQELEDNSNHLTKLETEASNMKIEIHHWHKQEDFTGRKK

SEQ ID NO: 12178 - protein, 884 aa, Artificial Sequence; identical to SEQ ID NO: 107
  Synthetic polypeptide

SEQ ID NO: 12179 - protein, 882 aa, Artificial Sequence
  Synthetic polypeptide
MEPRPTAPSSGAPGLAGVGETPSAAALAAARVELPGTAVPSVPEDAAPASRDGGGVRDEGPAAAGDGLGRPLGPTPSQSRFQVDLVSENAGRAAAAAAAAAAAAAAAGAGAGAKQTPADGEASGESEPAKGSEEAKGRFRVNFVDPAASSSAEDSLSDAAGVGVDGPNVSFQNGGDTVLSEGSSLHSGGGGGSGHHQHYYYDTHTNTYYLRTFGHNTMDAVPRIDHYRHTAAQLGEKLLRPSLAELHDELEKEPFEDGFANGEESTPTRDAVVTYTAESKGVVKFGWIKGVLVRCMLNIWGVMLFIRLSWIVGQAGIGLSVLVIMMATVVTTITGLSTSAIATNGFVRGGGAYYLISRSLGPEFGGAIGLIFAFANAVAVAMYVVGFAETVVELLKEHSILMIDEINDIRIIGAITVVILLGISVAGMEWEAKAQIVLLVILLLAIGDFVIGTFIPLESKKPKGFFGYKSEIFNENFGPDFREEETFFSVFAIFFPAATGILAGANISGDLADPQSAIPKGTLLAILITTLVYVGIAVSVGSCVVRDATGNVNDTIVTELTNCTSAACKLNFDFSSCESSPCSYGLMNNFQVMSMVSGFTPLISAGIFSATLSSALASLVSAPKIFQALCKDNIYPAFQMFAKGYGKNNEPLRGYILTFLIALGFILIAELNVIAPIISNFFLASYALINFSVFHASLAKSPGWRPAFKYYNMWISLLGAILCCIVMFVINWWAALLTYVIVLGLYIYVTYKKPDVNWGSSTQALTYLNALQHSIRLSGVEDHVKNFRPQCLVMTGAPNSRPALLHLVHDFTKNVGLMICGHVHMGPRRQAMKEMSIDQAKYQRWLIKNKMKAFYAPVHADDLREGAQYLMQVCISQELLHV

SEQ ID NO: 12180 - protein, 1123 aa, Artificial Sequence
  Synthetic polypeptide
MAPTLFQKLFSKRTGLGAPGRDARDPDCGFSWPLPEFDPSQIRLIVYQDCERRGRNVLFDSSVKRRNEDISVSDLNTIYSYLHGMEILSNLREHQLRLMSARARYERYSGNQVLFCSETIARCWYILLSGSVLVKGSMVLPPCSFGKQFGGKRGCDCLVLEPSEMIVVENAKDNEDSILQREIPARQSRRRFRKINYKGERQTITDDVEVNSYLSLPADLTKMHLTENPHPQVTHVSSSQSGCSIASDSGSSSLSDIYQATESEVGDVDLTRLPEGPVDSEDDEEEDEEIDRTDPLQGRDLVRECLEKEPADKTDDDIEQLLEFMHQLPAFANMTMSVRRELCSVMIFEVVEQAGAIILEDGQELDSWYVILNGTVEISHPDGKVENLFMGNSFGITPTLDKQYMHGIVRTKVDDCQFVCIAQQDYWRILNHVEKNTHKVEEEGEIVMVHEHRELDRSGTRKGHIVIKATPERLIMHLIEEHSIVDPTYIEDFLLTYRTFLESPLDVGIKLLEWFKIDSLRDKVTRIVLLWVNNHFNDFEGDPAMTRFLEEFEKNLEDTKMNGHLRLLNIACAAKAKWRQVVLQKASRESPLQFSLNGGSEKGFGIFVEGVEPGSKAADSGLKRGDQIMEVNGQNFENITFMKAVEILRNNTHLALTVKTNIFVFKELLFRTEQEKSGVPHIPKIAEKKSNRHSIQHVPGDIEQTSQEKGSKKVKANTVSGGRNKIRKILDKTRFSILPPKLFSDGGLSQSQDDSIVGTRHCRHSLAIMPIPGTLSSSSPDLLQPTTSMLDFSNPSDIPDQVIRVFKVDQQSCYIIISKDTTAKEVVFHAVHEFGLTGASDTYSLCEVSVTPEGVIKQRRLPDQFSKLADRIQLNGRYYLKNNMETETLCSDEDAQELVKESQLSMLQLSTIEVATQLSMRDFDLFRNIEPTEYIDDLFKLNSKTGNTHLKRFEDIVNQETFWVASEILTEANQLKRMKIIKHFIKIALHCRECKNFNSMFAIISGLNLASVARLRGTWEKLPSKYEKHLQDLQDIFDPSRNMAKYRNILSSQSMQPPIIPLFPVVKKDMTFLHEGNDSKVDGLVNFEKLRMISKEIRQVVRMTSANMDPAMMFRQRHDEFVT

SEQ ID NO: 12181 - protein, 1078 aa, Artificial Sequence
  Synthetic polypeptide
MNSPVDPGARQALRKKPPERTPEDLNTIYSYLHGMEILSNLREHQLRLMSARARYERYSGNQVLFCSETIARCWYILLSGSVLVKGSMVLPPCSFGKQFGGKRGCDCLVLEPSEMIVVENAKDNEDSILQREIPARQSRRRFRKINYKGERQTITDDVEVNSYLSLPADLTKMHLTENPHPQVTHVSSSQSGCSIASDSGSSSLSDIYQATESEVGDVDLTRLPEGPVDSEDDEEEDEEIDRTDPLQGRDLVRECLEKEPADKTDDDIEQLLEFMHQLPAFANMTMSVRRELCSVMIFEVVEQAGAIILEDGQELDSWYVILNGTVEISHPDGKVENLFMGNSFGITPTLDKQYMHGIVRTKVDDCQFVCIAQQDYWRILNHVEKNTHKVEEEGEIVMVHEHRELDRSGTRKGHIVIKATPERLIMHLIEEHSIVDPTYIEDFLLTYRTFLESPLDVGIKLLEWFKIDSLRDKVTRIVLLWVNNHFNDFEGDPAMTRFLEEFEKNLEDTKMNGHLRLLNIACAAKAKWRQVVLQKASRESPLQFSLNGGSEKGFGIFVEGVEPGSKAADSGLKRGDQIMEVNGQNFENITFMKAVEILRNNTHLALTVKTNIFVFKELLFRTEQEKSGVPHIPKIAEKKSNRHSIQHVPGDIEQTSQEKGSKKVKANTVSGGRNKIRKILDKTRFSILPPKLFSDGGLSQSQDDSIVGTRHCRHSLAIMPIPGTLSSSSPDLLQPTTSMLDFSNPSAVGFYYIPDQVIRVFKVDQQSCYIIISKDTTAKEVVFHAVHEFGLTGASDTYSLCEVSVTPEGVIKQRRLPDQFSKLADRIQLNGRYYLKNNMETETLCSDEDAQELVKESQLSMLQLSTIEVATQLSMRDFDLFRNIEPTEYIDDLFKLNSKTGNTHLKRFEDIVNQETFWVASEILTEANQLKRMKIIKHFIKIALHCRECKNFNSMFAIISGLNLASVARLRGTWEKLPSKYEKHLQDLQDIFDPSRNMAKYRNILSSQSMQPPIIPLFPVVKKDMTFLHEGNDSKVDGLVNFEKLRMISKEIRQVVRMTSANMDPAMMFRQRHDEFVT

SEQ ID NO: 12182 - protein, 1073 aa, Artificial Sequence
  Synthetic polypeptide
MNSPVDPGARQALRKKPPERTPEDLNTIYSYLHGMEILSNLREHQLRLMSARARYERYSGNQVLFCSETIARCWYILLSGSVLVKGSMVLPPCSFGKQFGGKRGCDCLVLEPSEMIVVENAKDNEDSILQREIPARQSRRRFRKINYKGERQTITDDVEVNSYLSLPADLTKMHLTENPHPQVTHVSSSQSGCSIASDSGSSSLSDIYQATESEVGDVDLTRLPEGPVDSEDDEEEDEEIDRTDPLQGRDLVRECLEKEPADKTDDDIEQLLEFMHQLPAFANMTMSVRRELCSVMIFEVVEQAGAIILEDGQELDSWYVILNGTVEISHPDGKVENLFMGNSFGITPTLDKQYMHGIVRTKVDDCQFVCIAQQDYWRILNHVEKNTHKVEEEGEIVMVHEHRELDRSGTRKGHIVIKATPERLIMHLIEEHSIVDPTYIEDFLLTYRTFLESPLDVGIKLLEWFKIDSLRDKVTRIVLLWVNNHFNDFEGDPAMTRFLEEFEKNLEDTKMNGHLRLLNIACAAKAKWRQVVLQKASRESPLQFSLNGGSEKGFGIFVEGVEPGSKAADSGLKRGDQIMEVNGQNFENITFMKAVEILRNNTHLALTVKTNIFVFKELLFRTEQEKSGVPHIPKIAEKKSNRHSIQHVPGDIEQTSQEKGSKKVKANTVSGGRNKIRKILDKTRFSILPPKLFSDGGLSQSQDDSIVGTRHCRHSLAIMPIPGTLSSSSPDLLQPTTSMLDFSNPSDIPDQVIRVFKVDQQSCYIIISKDTTAKEVVFHAVHEFGLTGASDTYSLCEVSVTPEGVIKQRRLPDQFSKLADRIQLNGRYYLKNNMETETLCSDEDAQELVKESQLSMLQLSTIEVATQLSMRDFDLFRNIEPTEYIDDLFKLNSKTGNTHLKRFEDIVNQETFWVASEILTEANQLKRMKIIKHFIKIALHCRECKNFNSMFAIISGLNLASVARLRGTWEKLPSKYEKHLQDLQDIFDPSRNMAKYRNILSSQSMQPPIIPLFPVVKKDMTFLHEGNDSKVDGLVNFEKLRMISKEIRQVVRMTSANMDPAMMFRQRHDEFVT

SEQ ID NO: 12183 - protein, 788 aa, Artificial Sequence
  Synthetic polypeptide
MSVRRELCSVMIFEVVEQAGAIILEDGQELDSWYVILNGTVEISHPDGKVENLFMGNSFGITPTLDKQYMHGIVRTKVDDCQFVCIAQQDYWRILNHVEKNTHKVEEEGEIVMVHEHRELDRSGTRKGHIVIKATPERLIMHLIEEHSIVDPTYIEDFLLTYRTFLESPLDVGIKLLEWFKIDSLRDKVTRIVLLWVNNHFNDFEGDPAMTRFLEEFEKNLEDTKMNGHLRLLNIACAAKAKWRQVVLQKASRESPLQFSLNGGSEKGFGIFVEGVEPGSKAADSGLKRGDQIMEVNGQNFENITFMKAVEILRNNTHLALTVKTNIFVFKELLFRTEQEKSGVPHIPKIAEKKSNRHSIQHVPGDIEQTSQEKGSKKVKANTVSGGRNKIRKILDKTRFSILPPKLFSDGGLSQSQDDSIVGTRHCRHSLAIMPIPGTLSSSSPDLLQPTTSMLDFSNPSDIPDQVIRVFKVDQQSCYIIISKDTTAKEVVFHAVHEFGLTGASDTYSLCEVSVTPEGVIKQRRLPDQFSKLADRIQLNGRYYLKNNMETETLCSDEDAQELVKESQLSMLQLSTIEVATQLSMRDFDLFRNIEPTEYIDDLFKLNSKTGNTHLKRFEDIVNQETFWVASEILTEANQLKRMKIIKHFIKIALHCRECKNFNSMFAIISGLNLASVARLRGTWEKLPSKYEKHLQDLQDIFDPSRNMAKYRNILSSQSMQPPIIPLFPVVKKDMTFLHEGNDSKVDGLVNFEKLRMISKEIRQVVRMTSANMDPAMMFRQRHDEFVT

SEQ ID NO: 12184 - protein, 129 aa, Artificial Sequence
  Synthetic polypeptide
KQLQQAVTGISNAAQATASDDASQHQGGGGGELAYALNNFDKQIIVDPLSFSEERFRPSLEERLESIISGAALMADSSCTRDDRRERIVAECNAVRQALQDLLSEYMGNGYCEDQMTHSLWKLLKALQR

SEQ ID NO: 12185 - protein, 271 aa, Artificial Sequence
  Synthetic polypeptide
MKAAAGEFADDPCSSVKRGNMVRAARALLSAVTRLLILADMADVYKLLVQLKVVEDGILKLRNAGNEQDLGIQYKALKPEVDKLNIMAAKRQQELKDVGHRDQMAAARGILQKNVPILYTASQACLQHPDVAAYKANRDLIYKQLQQAVTGISNAAQATASDDASQHQGGGGGELAYALNNFDKQIIVDPLSFSEERFRPSLEERLESIISGAALMADSSCTRDDRRERIVAECNAVRQALQDLLSEYMGNGYCEDQMTHSLWKLLKALQR

SEQ ID NO: 12186 - protein, 374 aa, Artificial Sequence
  Synthetic polypeptide
MTAVHAGNINFKWDPKSLEIRTLAVERLLEPLVTQVTTLVNTNSKGPSNKKRGRSKKAHVLAASVEQATENFLEKGDKIAKESQFLKEELVAAVEDVRKQGDLMKAAAGEFADDPCSSVKRGNMVRAARALLSAVTRLLILADMADVYKLLVQLKVVEDGILKLRNAGNEQDLGIQYKALKPEVDKLNIMAAKRQQELKDVGHRDQMAAARGILQKNVPILYTASQACLQHPDVAAYKANRDLIYKQLQQAVTGISNAAQATASDDASQHQGGGGGELAYALNNFDKQIIVDPLSFSEERFRPSLEERLESIISGAALMADSSCTRDDRRERIVAECNAVRQALQDLLSEYMGNGYCEDQMTHSLWKLLKALQR

SEQ ID NO: 12187 - protein, 559 aa, Artificial Sequence
  Synthetic polypeptide
MRAQEDLEGRTQHETTRDPSTPLPTEPKFDMLYKIEDVPPWYLCILLGFQHYLTCFSGTIAVPFLLAEALCVGHDQHMVSQLIGTIFTCVGITTLIQTTVGIRLPLFQASAFAFLVPAKAILALERWKCPPEEEIYGNWSLPLNTSHIWHPRIREVGLHVQGAIMVSSVVEVVIGLLGLPGALLNYIGPLTVTPTVSLIGLSVFQAAGDRAGSHWGISACSILLIILFSQYLRNLTFLLPVYRWGKGLTLLRIQIFKMFPIMLAIMTVWLLCYVLTLTDVLPTDPKAYGFQARTDARGDIMAIAPWIRIPYPCQWGLPTVTAAAVLGMFSATLAGIIESIGDYYACARLAGAPPPPVHAINRGIFTEGICCIIAGLLGTGNGSTSSSPNIGVLGITKVGSRRVVQYGAAIMLVLGTIGKFTALFSSLPDPILGGMFCTLFGMITAVGLSNLQFVDMNSSRNLFVLGFSMFFGLTLPNYLESNPGAINTGILEVDQILIVLLTTEMFVGGCLAFILDNTVPGRAQWLTLIIPALWEAKPGRSQGQEFKTSLTNIVTPRLY

SEQ ID NO: 12188 - protein, 555 aa, Artificial Sequence
  Synthetic polypeptide
MRAQEDLEGRTQHETTRDPSTPLPTEPKFDMLYKIEDVPPWYLCILLGFQHYLTCFSGTIAVPFLLAEALCVGHDQHMVSQLIGTIFTCVGITTLIQTTVGIRLPLFQASAFAFLVPAKAILALERWKCPPEEEIYGNWSLPLNTSHIWHPRIREVQGAIMVSSVVEVVIGLLGLPGALLNYIGPLTVTPTVSLIGLSVFQAAGDRAGSHWGISACSILLIILFSQYLRNLTFLLPVYRWGKGLTLLRIQIFKMFPIMLAIMTVWLLCYVLTLTDVLPTDPKAYGFQARTDARGDIMAIAPWIRIPYPCQWGLPTVTAAAVLGMFSATLAGIIESIGDYYACARLAGAPPPPVHAINRGIFTEGICCIIAGLLGTGNGSTSSSPNIGVLGITKVGSRRVVQYGAAIMLVLGTIGKFTALFSSLPDPILGGMFCTLFGMITAVGLSNLQFVDMNSSRNLFVLGFSMFFGLTLPNYLESNPGAINTGILEVDQILIVLLTTEMFVGGCLAFILDNTVPGRAQWLTLIIPALWEAKPGRSQGQEFKTSLTNIVTPRLY

SEQ ID NO: 12189 - protein, 799 aa, Artificial Sequence
  Synthetic polypeptide
MVFSRRGGLGARDLLLWLLLLAAWEVGSGQLHYSIPEEAKHGTFVGRVAQDLGLELAELVPRLFRVASKTHRDLLEVNLQNGILFVNSRIDREELCQWSAECSIHLELIADRPLQVFHVEVKVKDINDNPPVFRGREQIIFIPESRLLNSRFPIEGAADADIGANALLTYTLSPSDYFSLDVEASDELSKSLWLELRKYLDREETPELHLLLTATDGGKPELQGTVELLITVLDVNDNAPLFDQAVYRVHLLETTANGTLVTTLNASDADEGVNGEVVFSFDSGISRDIQEKFKVDSSSGEIRLIDKLDYEETKSYEIQVKAVDKGSPPMSNHCKVLVKVLDVNDNAPELAVTSLYLPIREDAPLSTVIALITVSDRDSGANGQVTCSLMPHVPFKLVSTFKNYYSLVLDSALDRESLSVYELVVTARDGGSPSLWATARVSVEVADVNDNAPAFAQPEYTVFVKENNPPGCHIFTVSARDADAQENALVSYSLVERRVGERALSNYVSVHAESGKVYALQPLDHEELELLQFQVSARDAGVPPLGSNVTLQVFVLDENDNAPALLAPRVGGTIGAVSELVPRLVGAGHVVAKVRAVDADSGYNAWLSYELQPAAGGARIPFRVGLYTGEISTTRVLDEADLSRYRLLVLVKDHGEPALTATATVLVSLVESGQAPKASSRASVGVAGPEAALVDVNVYLIIAICAVSSLLVLTLLLYTALRCSVPPTEGAYVPGKPTLVCSSALGSWSNSQQRRQRVCSSEGPPKTDLMAFSPGLSPSLNTSERNEQPEANLDLSGNQ

SEQ ID NO: 12190 - protein, 1204 aa, Artificial Sequence
  Synthetic polypeptide
MEPPGGSLGPGRGTRDKKKGRSPDELPSAGGDGGKSKKFLERFTSMRIKKEKEKPNSAHRNSSASYGDDPTAQSLQDVSDEQVLVLFEQMLLDMNLNEEKQQPLREKDIIIKREMVSQYLYTSKAGMSQKESSKSAMMYIQELRSGLRDMPLLSCLESLRVSLNNNPVSWVQTFGAEGLASLLDILKRLHDEKEETAGSYDSRNKHEIIRCLKAFMNNKFGIKTMLETEEGILLLVRAMDPAVPNMMIDAAKLLSALCILPQPEDMNERVLEAMTERAEMDEVERFQPLLDGLKSGTTIALKVGCLQLINALITPAEELDFRVHIRSELMRLGLHQVLQDLREIENEDMRVQLNVFDEQGEEDSYDLKGRLDDIRMEMDDFNEVFQILLNTVKDSKAEPHFLSILQHLLLVRNDYEARPQYYKLIEECISQIVLHKNGADPDFKCRHLQIEIEGLIDQMIDKTKVEKSEAKAAELEKKLDSELTARHELQVEMKKMESDFEQKLQDLQGEKDALHSEKQQIATEKQDLEAEVSQLTGEVAKLTKELEDAKKEMASLSAAAITVPPSVPSRAPVPPAPPLPGDSGTIIPPPPAPGDSTTPPPPPPPPPPPPPLPGGTAISPPPPLSGDATIPPPPPLPEGVGIPSPSSLPGGTAIPPPPPLPGSARIPPPPPPLPGSAGIPPPPPPLPGEAGMPPPPPPLPGGPGIPPPPPFPGGPGIPPPPPGMGMPPPPPFGFGVPAAPVLPFGLTPKKLYKPEVQLRRPNWSKLVAEDLSQDCFWTKVKEDRFENNELFAKLTLTFSAQTKTKKDQEGGEEKKSVQKKKVKELKVLDSKTAQNLSIFLGSFRMPYQEIKNVILEVNEAVLTESMIQNLIKQMPEPEQLKMLSELKDEYDDLAESEQFGVVMGTVPRLRPRLNAILFKLQFSEQVENIKPEIVSVTAACEELRKSESFSNLLEITLLVGNYMNAGSRNAGAFGFNISFLCKLRDTKSTDQKMTLLHFLAELCENDYPDVLKFPDELAHVEKASRVSAENLQKNLDQMKKQISDVERDVQNFPAATDEKDKFVEKMTIFVKDAQEQYNKLRMMHSNMETLYKELGEYFLFDPKKLSVEEFFMDLHNFRNMFLQAVKENQKRRETEEKMRRAKLAKEKAEKERLEKQQKREQLIDMNAEGDETGVMDSLLEALQSGAAFRRKRGPRQAIKLQTVL

SEQ ID NO: 12191 - protein, 1220 aa, Artificial Sequence
  Synthetic polypeptide
MEPPGGSLGPGRGTRDKKKGRSPDELPSAGGDGGKSKKFLERFTSMRIKKEKEKPNSAHRNSSASYGDDPTAQSLQDVSDEQVLVLFEQMLLDMNLNEEKQQPLREKDIIIKREMVSQYLYTSKAGMSQKESSKSAMMYIQELRSGLRDMPLLSCLESLRVSLNNNPVSWVQTFGAEGLASLLDILKRLHDEKEETAGSYDSRNKHEIIRCLKAFMNNKFGIKTMLETEEGILLLVRAMDPAVPNMMIDAAKLLSALCILPQPEDMNERVLEAMTERAEMDEVERFQPLLDGLKSGTTIALKVGCLQLINALITPAEELDFRVHIRSELMRLGLHQVLQDLREIENEDMRVQLNVFDEQGEEDSYDLKGRLDDIRMEMDDFNEVFQILLNTVKDSKAEPHFLSILQHLLLVRNDYEARPQYYKLIEECISQIVLHKNGADPDFKCRHLQIEIEGLIDQMIDKTKVEKSEAKAAELEKKLDSELTARHELQVEMKKMESDFEQKLQDLQGEKDALHSEKQQIATEKQDLEAEVSQLTGEVAKLTKELEDAKKEMASLSAAAITVPPSVPSRAPVPPAPPLPGDSGTIIPPPPAPGDSTTPPPPPPPPPPPPPLPGGVCISSPPSLPGGTAISPPPPLSGDATIPPPPPLPEGVGIPSPSSLPGGTAIPPPPPLPGSARIPPPPPPLPGSAGIPPPPPPLPGEAGMPPPPPPLPGGPGIPPPPPFPGGPGIPPPPPGMGMPPPPPFGFGVPAAPVLPFGLTPKKLYKPEVQLRRPNWSKLVAEDLSQDCFWTKVKEDRFENNELFAKLTLTFSAQTKRTKKAKKDQEGGEEKKSVQKKKVKELKVLDSKTAQNLSIFLGSFRMPYQEIKNVILEVNEAVLTESMIQNLIKQMPEPEQLKMLSELKDEYDDLAESEQFGVVMGTVPRLRPRLNAILFKLQFSEQVENIKPEIVSVTAACEELRKSESFSNLLEITLLVGNYMNAGSRNAGAFGFNISFLCKLRDTKSTDQKMTLLHFLAELCENDYPDVLKFPDELAHVEKASRVSAENLQKNLDQMKKQISDVERDVQNFPAATDEKDKFVEKMTIFVKDAQEQYNKLRMMHSNMETLYKELGEYFLFDPKKLSVEEFFMDLHNFRNMFLQAVKENQKRRETEEKMRRAKLAKEKAEKERLEKQQKREQLIDMNAEGDETGVMDSLLEALQSGAAFRRKRGPRQAIKLQTVL

SEQ ID NO: 12192 - protein, 1216 aa, Artificial Sequence
  Synthetic polypeptide
MEPPGGSLGPGRGTRDKKKGRSPDELPSAGGDGGKSKKFLERFTSMRIKKEKEKPNSAHRNSSASYGDDPTAQSLQDVSDEQVLVLFEQMLLDMNLNEEKQQPLREKDIIIKREMVSQYLYTSKAGMSQKESSKSAMMYIQELRSGLRDMPLLSCLESLRVSLNNNPVSWVQTFGAEGLASLLDILKRLHDEKEETAGSYDSRNKHEIIRCLKAFMNNKFGIKTMLETEEGILLLVRAMDPAVPNMMIDAAKLLSALCILPQPEDMNERVLEAMTERAEMDEVERFQPLLDGLKSGTTIALKVGCLQLINALITPAEELDFRVHIRSELMRLGLHQVLQDLREIENEDMRVQLNVFDEQGEEDSYDLKGRLDDIRMEMDDFNEVFQILLNTVKDSKAEPHFLSILQHLLLVRNDYEARPQYYKLIEECISQIVLHKNGADPDFKCRHLQIEIEGLIDQMIDKTKVEKSEAKAAELEKKLDSELTARHELQVEMKKMESDFEQKLQDLQGEKDALHSEKQQIATEKQDLEAEVSQLTGEVAKLTKELEDAKKEMASLSAAAITVPPSVPSRAPVPPAPPLPGDSGTIIPPPPAPGDSTTPPPPPPPPPPPPPLPGGVCISSPPSLPGGTAISPPPPLSGDATIPPPPPLPEGVGIPSPSSLPGGTAIPPPPPLPGSARIPPPPPPLPGSAGIPPPPPPLPGEAGMPPPPPPLPGGPGIPPPPPFPGGPGIPPPPPGMGMPPPPPFGFGVPAAPVLPFGLTPKKLYKPEVQLRRPNWSKLVAEDLSQDCFWTKVKEDRFENNELFAKLTLTFSAQTKTKKDQEGGEEKKSVQKKKVKELKVLDSKTAQNLSIFLGSFRMPYQEIKNVILEVNEAVLTESMIQNLIKQMPEPEQLKMLSELKDEYDDLAESEQFGVVMGTVPRLRPRLNAILFKLQFSEQVENIKPEIVSVTAACEELRKSESFSNLLEITLLVGNYMNAGSRNAGAFGFNISFLCKLRDTKSTDQKMTLLHFLAELCENDYPDVLKFPDELAHVEKASRVSAENLQKNLDQMKKQISDVERDVQNFPAATDEKDKFVEKMTSFVKDAQEQYNKLRMMHSNMETLYKELGEYFLFDPKKLSVEEFFMDLHNFRNMFLQAVKENQKRRETEEKMRRAKLAKEKAEKERLEKQQKREQLIDMNAEGDETGVMDSLLEALQSGAAFRRKRGPRQAIKLQTVL

SEQ ID NO: 12193 - protein, 1219 aa, Artificial Sequence
  Synthetic polypeptide
MEPPGGSLGPGRGTRDKKKGRSPDELPSAGGDGGKSKKFLERFTSMRIKKEKEKPNSAHRNSSASYGDDPTAQSLQDVSDEQVLVLFEQMLLDMNLNEEKQQPLREKDIIIKREMVSQYLYTSKAGMSQKESSKSAMMYIQELRSGLRDMPLLSCLESLRVSLNNNPVSWVQTFGAEGLASLLDILKRLHDEKEETAGSYDSRNKHEIIRCLKAFMNNKFGIKTMLETEEGILLLVRAMDPAVPNMMIDAAKLLSALCILPQPEDMNERVLEAMTERAEMDEVERFQPLLDGLKSGTTIALKVGCLQLINALITPAEELDFRVHIRSELMRLGLHQVLQDLREIENEDMRVQLNVFDEQGEEDSYDLKGRLDDIRMEMDDFNEVFQILLNTVKDSKAEPHFLSILQHLLLVRNDYEARPQYYKLIEECISQIVLHKNGADPDFKCRHLQIEIEGLIDQMIDKTKVEKSEAKAAELEKKLDSELTARHELQVEMKKMESDFEQKLQDLQGEKDALHSEKQQIATEKQDLEAEVSQLTGEVAKLTKELEDAKKEMASLSAAAITVPPSVPSRAPVPPAPPLPGDSGTIIPPPPAPGDSTTPPPPPPPPPPPPPLPGGVCISSPPSLPGGTAISPPPPLSGDATIPPPPPLPEGVGIPSPSSLPGGTAIPPPPPLPGSARIPPPPPPLPGSAGIPPPPPPLPGEAGMPPPPPPLPGGPGIPPPPPFPGGPGIPPPPPGMGMPPPPPFGFGVPAAPVLPFGLTPKKLYKPEVQLRRPNWSKLVAEDLSQDCFWTKVKEDRFENNELFAKLTLTFSAQTKTSKAKKDQEGGEEKKSVQKKKVKELKVLDSKTAQNLSIFLGSFRMPYQEIKNVILEVNEAVLTESMIQNLIKQMPEPEQLKMLSELKDEYDDLAESEQFGVVMGTVPRLRPRLNAILFKLQFSEQVENIKPEIVSVTAACEELRKSESFSNLLEITLLVGNYMNAGSRNAGAFGFNISFLCKLRDTKSTDQKMTLLHFLAELCENDYPDVLKFPDELAHVEKASRVSAENLQKNLDQMKKQISDVERDVQNFPAATDEKDKFVEKMTSFVKDAQEQYNKLRMMHSNMETLYKELGEYFLFDPKKLSVEEFFMDLHNFRNMFLQAVKENQKRRETEEKMRRAKLAKEKAEKERLEKQQKREQLIDMNAEGDETGVMDSLLEALQSGAAFRRKRGPRQAIKLQTVL

SEQ ID NO: 12194 - protein, 1229 aa, Artificial Sequence
  Synthetic polypeptide
MEPPGGSLGPGRGTRDKKKGRSPDELPSAGGDGGKSKKFTLKRLMADELERFTSMRIKKEKEKPNSAHRNSSASYGDDPTAQSLQDVSDEQVLVLFEQMLLDMNLNEEKQQPLREKDIIIKREMVSQYLYTSKAGMSQKESSKSAMMYIQELRSGLRDMPLLSCLESLRVSLNNNPVSWVQTFGAEGLASLLDILKRLHDEKEETAGSYDSRNKHEIIRCLKAFMNNKFGIKTMLETEEGILLLVRAMDPAVPNMMIDAAKLLSALCILPQPEDMNERVLEAMTERAEMDEVERFQPLLDGLKSGTTIALKVGCLQLINALITPAEELDFRVHIRSELMRLGLHQVLQDLREIENEDMRVQLNVFDEQGEEDSYDLKGRLDDIRMEMDDFNEVFQILLNTVKDSKAEPHFLSILQHLLLVRNDYEARPQYYKLIEECISQIVLHKNGADPDFKCRHLQIEIEGLIDQMIDKTKVEKSEAKAAELEKKLDSELTARHELQVEMKKMESDFEQKLQDLQGEKDALHSEKQQIATEKQDLEAEVSQLTGEVAKLTKELEDAKKEMASLSAAAITVPPSVPSRAPVPPAPPLPGDSGTIIPPPPAPGDSTTPPPPPPPPPPPPPLPGGVCISSPPSLPGGTAISPPPPLSGDATIPPPPPLPEGVGIPSPSSLPGGTAIPPPPPLPGSARIPPPPPPLPGSAGIPPPPPPLPGEAGMPPPPPPLPGGPGIPPPPPFPGGPGIPPPPPGMGMPPPPPFGFGVPAAPVLPFGLTPKKLYKPEVQLRRPNWSKLVAEDLSQDCFWTKVKEDRFENNELFAKLTLTFSAQTKRTKKAKKDQEGGEEKKSVQKKKVKELKVLDSKTAQNLSIFLGSFRMPYQEIKNVILEVNEAVLTESMIQNLIKQMPEPEQLKMLSELKDEYDDLAESEQFGVVMGTVPRLRPRLNAILFKLQFSEQVENIKPEIVSVTAACEELRKSESFSNLLEITLLVGNYMNAGSRNAGAFGFNISFLCKLRDTKSTDQKMTLLHFLAELCENDYPDVLKFPDELAHVEKASRVSAENLQKNLDQMKKQISDVERDVQNFPAATDEKDKFVEKMTIFVKDAQEQYNKLRMMHSNMETLYKELGEYFLFDPKKLSVEEFFMDLHNFRNMFLQAVKENQKRRETEEKMRRAKLAKEKAEKERLEKQQKREQLIDMNAEGDETGVMDSLLEALQSGAAFRRKRGPRQAIKLQTVL

SEQ ID NO: 12195 - protein, 1225 aa, Artificial Sequence
  Synthetic polypeptide
MEPPGGSLGPGRGTRDKKKGRSPDELPSAGGDGGKSKKFTLKRLMADELERFTSMRIKKEKEKPNSAHRNSSASYGDDPTAQSLQDVSDEQVLVLFEQMLLDMNLNEEKQQPLREKDIIIKREMVSQYLYTSKAGMSQKESSKSAMMYIQELRSGLRDMPLLSCLESLRVSLNNNPVSWVQTFGAEGLASLLDILKRLHDEKEETAGSYDSRNKHEIIRCLKAFMNNKFGIKTMLETEEGILLLVRAMDPAVPNMMIDAAKLLSALCILPQPEDMNERVLEAMTERAEMDEVERFQPLLDGLKSGTTIALKVGCLQLINALITPAEELDFRVHIRSELMRLGLHQVLQDLREIENEDMRVQLNVFDEQGEEDSYDLKGRLDDIRMEMDDFNEVFQILLNTVKDSKAEPHFLSILQHLLLVRNDYEARPQYYKLIEECISQIVLHKNGADPDFKCRHLQIEIEGLIDQMIDKTKVEKSEAKAAELEKKLDSELTARHELQVEMKKMESDFEQKLQDLQGEKDALHSEKQQIATEKQDLEAEVSQLTGEVAKLTKELEDAKKEMASLSAAAITVPPSVPSRAPVPPAPPLPGDSGTIIPPPPAPGDSTTPPPPPPPPPPPPPLPGGVCISSPPSLPGGTAISPPPPLSGDATIPPPPPLPEGVGIPSPSSLPGGTAIPPPPPLPGSARIPPPPPPLPGSAGIPPPPPPLPGEAGMPPPPPPLPGGPGIPPPPPFPGGPGIPPPPPGMGMPPPPPFGFGVPAAPVLPFGLTPKKLYKPEVQLRRPNWSKLVAEDLSQDCFWTKVKEDRFENNELFAKLTLTFSAQTKTKKDQEGGEEKKSVQKKKVKELKVLDSKTAQNLSIFLGSFRMPYQEIKNVILEVNEAVLTESMIQNLIKQMPEPEQLKMLSELKDEYDDLAESEQFGVVMGTVPRLRPRLNAILFKLQFSEQVENIKPEIVSVTAACEELRKSESFSNLLEITLLVGNYMNAGSRNAGAFGFNISFLCKLRDTKSTDQKMTLLHFLAELCENDYPDVLKFPDELAHVEKASRVSAENLQKNLDQMKKQISDVERDVQNFPAATDEKDKFVEKMTSFVKDAQEQYNKLRMMHSNMETLYKELGEYFLFDPKKLSVEEFFMDLHNFRNMFLQAVKENQKRRETEEKMRRAKLAKEKAEKERLEKQQKREQLIDMNAEGDETGVMDSLLEALQSGAAFRRKRGPRQAIKLQTVL

SEQ ID NO: 12196 - protein, 1228 aa, Artificial Sequence
  Synthetic polypeptide
MEPPGGSLGPGRGTRDKKKGRSPDELPSAGGDGGKSKKFTLKRLMADELERFTSMRIKKEKEKPNSAHRNSSASYGDDPTAQSLQDVSDEQVLVLFEQMLLDMNLNEEKQQPLREKDIIIKREMVSQYLYTSKAGMSQKESSKSAMMYIQELRSGLRDMPLLSCLESLRVSLNNNPVSWVQTFGAEGLASLLDILKRLHDEKEETAGSYDSRNKHEIIRCLKAFMNNKFGIKTMLETEEGILLLVRAMDPAVPNMMIDAAKLLSALCILPQPEDMNERVLEAMTERAEMDEVERFQPLLDGLKSGTTIALKVGCLQLINALITPAEELDFRVHIRSELMRLGLHQVLQDLREIENEDMRVQLNVFDEQGEEDSYDLKGRLDDIRMEMDDFNEVFQILLNTVKDSKAEPHFLSILQHLLLVRNDYEARPQYYKLIEECISQIVLHKNGADPDFKCRHLQIEIEGLIDQMIDKTKVEKSEAKAAELEKKLDSELTARHELQVEMKKMESDFEQKLQDLQGEKDALHSEKQQIATEKQDLEAEVSQLTGEVAKLTKELEDAKKEMASLSAAAITVPPSVPSRAPVPPAPPLPGDSGTIIPPPPAPGDSTTPPPPPPPPPPPPPLPGGVCISSPPSLPGGTAISPPPPLSGDATIPPPPPLPEGVGIPSPSSLPGGTAIPPPPPLPGSARIPPPPPPLPGSAGIPPPPPPLPGEAGMPPPPPPLPGGPGIPPPPPFPGGPGIPPPPPGMGMPPPPPFGFGVPAAPVLPFGLTPKKLYKPEVQLRRPNWSKLVAEDLSQDCFWTKVKEDRFENNELFAKLTLTFSAQTKTSKAKKDQEGGEEKKSVQKKKVKELKVLDSKTAQNLSIFLGSFRMPYQEIKNVILEVNEAVLTESMIQNLIKQMPEPEQLKMLSELKDEYDDLAESEQFGVVMGTVPRLRPRLNAILFKLQFSEQVENIKPEIVSVTAACEELRKSESFSNLLEITLLVGNYMNAGSRNAGAFGFNISFLCKLRDTKSTDQKMTLLHFLAELCENDYPDVLKFPDELAHVEKASRVSAENLQKNLDQMKKQISDVERDVQNFPAATDEKDKFVEKMTSFVKDAQEQYNKLRMMHSNMETLYKELGEYFLFDPKKLSVEEFFMDLHNFRNMFLQAVKENQKRRETEEKMRRAKLAKEKAEKERLEKQQKREQLIDMNAEGDETGVMDSLLEALQSGAAFRRKRGPRQAIKLQTVL

SEQ ID NO: 12197 - protein, 1171 aa, Artificial Sequence
  Synthetic polypeptide
MRIKKEKEKPNSAHRNSSASYGDDPTAQSLQDVSDEQVLVLFEQMLLDMNLNEEKQQPLREKDIIIKREMVSQYLYTSKAGMSQKESSKSAMMYIQELRSGLRDMPLLSCLESLRVSLNNNPVSWVQTFGAEGLASLLDILKRLHDEKEETAGSYDSRNKHEIIRCLKAFMNNKFGIKTMLETEEGILLLVRAMDPAVPNMMIDAAKLLSALCILPQPEDMNERVLEAMTERAEMDEVERFQPLLDGLKSGTTIALKVGCLQLINALITPAEELDFRVHIRSELMRLGLHQVLQDLREIENEDMRVQLNVFDEQGEEDSYDLKGRLDDIRMEMDDFNEVFQILLNTVKDSKAEPHFLSILQHLLLVRNDYEARPQYYKLIEECISQIVLHKNGADPDFKCRHLQIEIEGLIDQMIDKTKVEKSEAKAAELEKKLDSELTARHELQVEMKKMESDFEQKLQDLQGEKDALHSEKQQIATEKQDLEAEVSQLTGEVAKLTKELEDAKKEMASLSAAAITVPPSVPSRAPVPPAPPLPGDSGTIIPPPPAPGDSTTPPPPPPPPPPPPPLPGGVCISSPPSLPGGTAISPPPPLSGDATIPPPPPLPEGVGIPSPSSLPGGTAIPPPPPLPGSARIPPPPPPLPGSAGIPPPPPPLPGEAGMPPPPPPLPGGPGIPPPPPFPGGPGIPPPPPGMGMPPPPPFGFGVPAAPVLPFGLTPKKLYKPEVQLRRPNWSKLVAEDLSQDCFWTKVKEDRFENNELFAKLTLTFSAQTKTKKDQEGGEEKKSVQKKKVKELKVLDSKTAQNLSIFLGSFRMPYQEIKNVILEVNEAVLTESMIQNLIKQMPEPEQLKMLSELKDEYDDLAESEQFGVVMGTVPRLRPRLNAILFKLQFSEQVENIKPEIVSVTAACEELRKSESFSNLLEITLLVGNYMNAGSRNAGAFGFNISFLCKLRDTKSTDQKMTLLHFLAELCENDYPDVLKFPDELAHVEKASRVSAENLQKNLDQMKKQISDVERDVQNFPAATDEKDKFVEKMTSFVKDAQEQYNKLRMMHSNMETLYKELGEYFLFDPKKLSVEEFFMDLHNFRNMFLQAVKENQKRRETEEKMRRAKLAKEKAEKERLEKQQKREQLIDMNAEGDETGVMDSLLEALQSGAAFRRKRGPRQAIKLQTVL

SEQ ID NO: 12198 - protein, 74 aa, Artificial Sequence
  Synthetic polypeptide
  misc_feature (1)..(1): Xaa can be any naturally occurring amino acid
XRETEEKMRRAKLAKEKAEKERLEKQQKREQLIDMNAEGDETGVMDSLLEALQSGAAFRRKRGPRQAIKLQTVL

SEQ ID NO: 12199 - protein, 1205 aa, Artificial Sequence
  Synthetic polypeptide
MEPPGGSLGPGRGTRDKKKGRSPDELPSAGGDGGKSKKFLERFTSMRIKKEKEKPNSAHRNSSASYGDDPTAQSLQDVSDEQVLVLFEQMLLDMNLNEEKQQPLREKDIIIKREMVSQYLYTSKAGMSQKESSKSAMMYIQELRSGLRDMPLLSCLESLRVSLNNNPVSWVQTFGAEGLASLLDILKRLHDEKEETAGSYDSRNKHEIIRCLKAFMNNKFGIKTMLETEEGILLLVRAMDPAVPNMMIDAAKLLSALCILPQPEDMNERVLEAMTERAEMDEVERFQPLLDGLKSGTTIALKVGCLQLINALITPAEELDFRVHIRSELMRLGLHQVLQDLREIENEDMRVQLNVFDEQGEEDSYDLKGRLDDIRMEMDDFNEVFQILLNTVKDSKAEPHFLSILQHLLLVRNDYEARPQYYKLIEECISQIVLHKNGADPDFKCRHLQIEIEGLIDQMIDKTKVEKSEAKAAELEKKLDSELTARHELQVEMKKMESDFEQKLQDLQGEKDALHSEKQQIATEKQDLEAEVSQLTGEVAKLTKELEDAKKEMASLSAAAITVPPSVPSRAPVPPAPPLPGDSGTIIPPPPAPGDSTTPPPPPPPPPPPPPLPGGTAISPPPPLSGDATIPPPPPLPEGVGIPSPSSLPGGTAIPPPPPLPGSARIPPPPPPLPGSAGIPPPPPPLPGEAGMPPPPPPLPGGPGIPPPPPFPGGPGIPPPPPGMGMPPPPPFGFGVPAAPVLPFGLTPKKLYKPEVQLRRPNWSKLVAEDLSQDCFWTKVKEDRFENNELFAKLTLTFSAQTKTKKDQEGGEEKKSVQKKKVKELKVLDSKTAQNLSIFLGSFRMPYQEIKNVILEVNEAVLTESMIQNLIKQMPEPEQLKMLSELKDEYDDLAESEQFGVVMGTVPRLRPRLNAILFKLQFSEQVENIKPEIVSVTAACEELRKSESFSNLLEITLLVGNYMNAGSRNAGAFGFNISFLCKLRDTKSTDQKMTLLHFLAELCENDYPDVLKFPDELAHVEKASRVSAENLQKNLDQMKKQISDVERDVQNFPAATDEKDKFVEKMTIFVKDAQEQYNKLRMMHSNMETLYKELGEYFLFDPKKLSVEEFFMDLHNFRNMFLQAVKENQKRRETEEKMRRAKLAKEKAEKERLEKQQKREQLIDMNAEGDETGVMDSLLEALQSGAAFRRKRGPRQEAIKLQTVL

SEQ ID NO: 12200 - protein, 1221 aa, Artificial Sequence
  Synthetic polypeptide
MEPPGGSLGPGRGTRDKKKGRSPDELPSAGGDGGKSKKFLERFTSMRIKKEKEKPNSAHRNSSASYGDDPTAQSLQDVSDEQVLVLFEQMLLDMNLNEEKQQPLREKDIIIKREMVSQYLYTSKAGMSQKESSKSAMMYIQELRSGLRDMPLLSCLESLRVSLNNNPVSWVQTFGAEGLASLLDILKRLHDEKEETAGSYDSRNKHEIIRCLKAFMNNKFGIKTMLETEEGILLLVRAMDPAVPNMMIDAAKLLSALCILPQPEDMNERVLEAMTERAEMDEVERFQPLLDGLKSGTTIALKVGCLQLINALITPAEELDFRVHIRSELMRLGLHQVLQDLREIENEDMRVQLNVFDEQGEEDSYDLKGRLDDIRMEMDDFNEVFQILLNTVKDSKAEPHFLSILQHLLLVRNDYEARPQYYKLIEECISQIVLHKNGADPDFKCRHLQIEIEGLIDQMIDKTKVEKSEAKAAELEKKLDSELTARHELQVEMKKMESDFEQKLQDLQGEKDALHSEKQQIATEKQDLEAEVSQLTGEVAKLTKELEDAKKEMASLSAAAITVPPSVPSRAPVPPAPPLPGDSGTIIPPPPAPGDSTTPPPPPPPPPPPPPLPGGVCISSPPSLPGGTAISPPPPLSGDATIPPPPPLPEGVGIPSPSSLPGGTAIPPPPPLPGSARIPPPPPPLPGSAGIPPPPPPLPGEAGMPPPPPPLPGGPGIPPPPPFPGGPGIPPPPPGMGMPPPPPFGFGVPAAPVLPFGLTPKKLYKPEVQLRRPNWSKLVAEDLSQDCFWTKVKEDRFENNELFAKLTLTFSAQTKRTKKAKKDQEGGEEKKSVQKKKVKELKVLDSKTAQNLSIFLGSFRMPYQEIKNVILEVNEAVLTESMIQNLIKQMPEPEQLKMLSELKDEYDDLAESEQFGVVMGTVPRLRPRLNAILFKLQFSEQVENIKPEIVSVTAACEELRKSESFSNLLEITLLVGNYMNAGSRNAGAFGFNISFLCKLRDTKSTDQKMTLLHFLAELCENDYPDVLKFPDELAHVEKASRVSAENLQKNLDQMKKQISDVERDVQNFPAATDEKDKFVEKMTIFVKDAQEQYNKLRMMHSNMETLYKELGEYFLFDPKKLSVEEFFMDLHNFRNMFLQAVKENQKRRETEEKMRRAKLAKEKAEKERLEKQQKREQLIDMNAEGDETGVMDSLLEALQSGAAFRRKRGPRQEAIKLQTVL

SEQ ID NO: 12201 - protein, 1217 aa, Artificial Sequence
  Synthetic polypeptide
MEPPGGSLGPGRGTRDKKKGRSPDELPSAGGDGGKSKKFLERFTSMRIKKEKEKPNSAHRNSSASYGDDPTAQSLQDVSDEQVLVLFEQMLLDMNLNEEKQQPLREKDIIIKREMVSQYLYTSKAGMSQKESSKSAMMYIQELRSGLRDMPLLSCLESLRVSLNNNPVSWVQTFGAEGLASLLDILKRLHDEKEETAGSYDSRNKHEIIRCLKAFMNNKFGIKTMLETEEGILLLVRAMDPAVPNMMIDAAKLLSALCILPQPEDMNERVLEAMTERAEMDEVERFQPLLDGLKSGTTIALKVGCLQLINALITPAEELDFRVHIRSELMRLGLHQVLQDLREIENEDMRVQLNVFDEQGEEDSYDLKGRLDDIRMEMDDFNEVFQILLNTVKDSKAEPHFLSILQHLLLVRNDYEARPQYYKLIEECISQIVLHKNGADPDFKCRHLQIEIEGLIDQMIDKTKVEKSEAKAAELEKKLDSELTARHELQVEMKKMESDFEQKLQDLQGEKDALHSEKQQIATEKQDLEAEVSQLTGEVAKLTKELEDAKKEMASLSAAAITVPPSVPSRAPVPPAPPLPGDSGTIIPPPPAPGDSTTPPPPPPPPPPPPPLPGGVCISSPPSLPGGTAISPPPPLSGDATIPPPPPLPEGVGIPSPSSLPGGTAIPPPPPLPGSARIPPPPPPLPGSAGIPPPPPPLPGEAGMPPPPPPLPGGPGIPPPPPFPGGPGIPPPPPGMGMPPPPPFGFGVPAAPVLPFGLTPKKLYKPEVQLRRPNWSKLVAEDLSQDCFWTKVKEDRFENNELFAKLTLTFSAQTKTKKDQEGGEEKKSVQKKKVKELKVLDSKTAQNLSIFLGSFRMPYQEIKNVILEVNEAVLTESMIQNLIKQMPEPEQLKMLSELKDEYDDLAESEQFGVVMGTVPRLRPRLNAILFKLQFSEQVENIKPEIVSVTAACEELRKSESFSNLLEITLLVGNYMNAGSRNAGAFGFNISFLCKLRDTKSTDQKMTLLHFLAELCENDYPDVLKFPDELAHVEKASRVSAENLQKNLDQMKKQISDVERDVQNFPAATDEKDKFVEKMTSFVKDAQEQYNKLRMMHSNMETLYKELGEYFLFDPKKLSVEEFFMDLHNFRNMFLQAVKENQKRRETEEKMRRAKLAKEKAEKERLEKQQKREQLIDMNAEGDETGVMDSLLEALQSGAAFRRKRGPRQEAIKLQTVL

SEQ ID NO: 12202 - protein, 1220 aa, Artificial Sequence
  Synthetic polypeptide
MEPPGGSLGPGRGTRDKKKGRSPDELPSAGGDGGKSKKFLERFTSMRIKKEKEKPNSAHRNSSASYGDDPTAQSLQDVSDEQVLVLFEQMLLDMNLNEEKQQPLREKDIIIKREMVSQYLYTSKAGMSQKESSKSAMMYIQELRSGLRDMPLLSCLESLRVSLNNNPVSWVQTFGAEGLASLLDILKRLHDEKEETAGSYDSRNKHEIIRCLKAFMNNKFGIKTMLETEEGILLLVRAMDPAVPNMMIDAAKLLSALCILPQPEDMNERVLEAMTERAEMDEVERFQPLLDGLKSGTTIALKVGCLQLINALITPAEELDFRVHIRSELMRLGLHQVLQDLREIENEDMRVQLNVFDEQGEEDSYDLKGRLDDIRMEMDDFNEVFQILLNTVKDSKAEPHFLSILQHLLLVRNDYEARPQYYKLIEECISQIVLHKNGADPDFKCRHLQIEIEGLIDQMIDKTKVEKSEAKAAELEKKLDSELTARHELQVEMKKMESDFEQKLQDLQGEKDALHSEKQQIATEKQDLEAEVSQLTGEVAKLTKELEDAKKEMASLSAAAITVPPSVPSRAPVPPAPPLPGDSGTIIPPPPAPGDSTTPPPPPPPPPPPPPLPGGVCISSPPSLPGGTAISPPPPLSGDATIPPPPPLPEGVGIPSPSSLPGGTAIPPPPPLPGSARIPPPPPPLPGSAGIPPPPPPLPGEAGMPPPPPPLPGGPGIPPPPPFPGGPGIPPPPPGMGMPPPPPFGFGVPAAPVLPFGLTPKKLYKPEVQLRRPNWSKLVAEDLSQDCFWTKVKEDRFENNELFAKLTLTFSAQTKTSKAKKDQEGGEEKKSVQKKKVKELKVLDSKTAQNLSIFLGSFRMPYQEIKNVILEVNEAVLTESMIQNLIKQMPEPEQLKMLSELKDEYDDLAESEQFGVVMGTVPRLRPRLNAILFKLQFSEQVENIKPEIVSVTAACEELRKSESFSNLLEITLLVGNYMNAGSRNAGAFGFNISFLCKLRDTKSTDQKMTLLHFLAELCENDYPDVLKFPDELAHVEKASRVSAENLQKNLDQMKKQISDVERDVQNFPAATDEKDKFVEKMTSFVKDAQEQYNKLRMMHSNMETLYKELGEYFLFDPKKLSVEEFFMDLHNFRNMFLQAVKENQKRRETEEKMRRAKLAKEKAEKERLEKQQKREQLIDMNAEGDETGVMDSLLEALQSGAAFRRKRGPRQEAIKLQTVL

SEQ ID NO: 12203 - protein, 1230 aa, Artificial Sequence
  Synthetic polypeptide
MEPPGGSLGPGRGTRDKKKGRSPDELPSAGGDGGKSKKFTLKRLMADELERFTSMRIKKEKEKPNSAHRNSSASYGDDPTAQSLQDVSDEQVLVLFEQMLLDMNLNEEKQQPLREKDIIIKREMVSQYLYTSKAGMSQKESSKSAMMYIQELRSGLRDMPLLSCLESLRVSLNNNPVSWVQTFGAEGLASLLDILKRLHDEKEETAGSYDSRNKHEIIRCLKAFMNNKFGIKTMLETEEGILLLVRAMDPAVPNMMIDAAKLLSALCILPQPEDMNERVLEAMTERAEMDEVERFQPLLDGLKSGTTIALKVGCLQLINALITPAEELDFRVHIRSELMRLGLHQVLQDLREIENEDMRVQLNVFDEQGEEDSYDLKGRLDDIRMEMDDFNEVFQILLNTVKDSKAEPHFLSILQHLLLVRNDYEARPQYYKLIEECISQIVLHKNGADPDFKCRHLQIEIEGLIDQMIDKTKVEKSEAKAAELEKKLDSELTARHELQVEMKKMESDFEQKLQDLQGEKDALHSEKQQIATEKQDLEAEVSQLTGEVAKLTKELEDAKKEMASLSAAAITVPPSVPSRAPVPPAPPLPGDSGTIIPPPPAPGDSTTPPPPPPPPPPPPPLPGGVCISSPPSLPGGTAISPPPPLSGDATIPPPPPLPEGVGIPSPSSLPGGTAIPPPPPLPGSARIPPPPPPLPGSAGIPPPPPPLPGEAGMPPPPPPLPGGPGIPPPPPFPGGPGIPPPPPGMGMPPPPPFGFGVPAAPVLPFGLTPKKLYKPEVQLRRPNWSKLVAEDLSQDCFWTKVKEDRFENNELFAKLTLTFSAQTKRTKKAKKDQEGGEEKKSVQKKKVKELKVLDSKTAQNLSIFLGSFRMPYQEIKNVILEVNEAVLTESMIQNLIKQMPEPEQLKMLSELKDEYDDLAESEQFGVVMGTVPRLRPRLNAILFKLQFSEQVENIKPEIVSVTAACEELRKSESFSNLLEITLLVGNYMNAGSRNAGAFGFNISFLCKLRDTKSTDQKMTLLHFLAELCENDYPDVLKFPDELAHVEKASRVSAENLQKNLDQMKKQISDVERDVQNFPAATDEKDKFVEKMTIFVKDAQEQYNKLRMMHSNMETLYKELGEYFLFDPKKLSVEEFFMDLHNFRNMFLQAVKENQKRRETEEKMRRAKLAKEKAEKERLEKQQKREQLIDMNAEGDETGVMDSLLEALQSGAAFRRKRGPRQEAIKLQTVL

SEQ ID NO: 12204 - protein, 1226 aa, Artificial Sequence
  Synthetic polypeptide
MEPPGGSLGPGRGTRDKKKGRSPDELPSAGGDGGKSKKFTLKRLMADELERFTSMRIKKEKEKPNSAHRNSSASYGDDPTAQSLQDVSDEQVLVLFEQMLLDMNLNEEKQQPLREKDIIIKREMVSQYLYTSKAGMSQKESSKSAMMYIQELRSGLRDMPLLSCLESLRVSLNNNPVSWVQTFGAEGLASLLDILKRLHDEKEETAGSYDSRNKHEIIRCLKAFMNNKFGIKTMLETEEGILLLVRAMDPAVPNMMIDAAKLLSALCILPQPEDMNERVLEAMTERAEMDEVERFQPLLDGLKSGTTIALKVGCLQLINALITPAEELDFRVHIRSELMRLGLHQVLQDLREIENEDMRVQLNVFDEQGEEDSYDLKGRLDDIRMEMDDFNEVFQILLNTVKDSKAEPHFLSILQHLLLVRNDYEARPQYYKLIEECISQIVLHKNGADPDFKCRHLQIEIEGLIDQMIDKTKVEKSEAKAAELEKKLDSELTARHELQVEMKKMESDFEQKLQDLQGEKDALHSEKQQIATEKQDLEAEVSQLTGEVAKLTKELEDAKKEMASLSAAAITVPPSVPSRAPVPPAPPLPGDSGTIIPPPPAPGDSTTPPPPPPPPPPPPPLPGGVCISSPPSLPGGTAISPPPPLSGDATIPPPPPLPEGVGIPSPSSLPGGTAIPPPPPLPGSARIPPPPPPLPGSAGIPPPPPPLPGEAGMPPPPPPLPGGPGIPPPPPFPGGPGIPPPPPGMGMPPPPPFGFGVPAAPVLPFGLTPKKLYKPEVQLRRPNWSKLVAEDLSQDCFWTKVKEDRFENNELFAKLTLTFSAQTKTKKDQEGGEEKKSVQKKKVKELKVLDSKTAQNLSIFLGSFRMPYQEIKNVILEVNEAVLTESMIQNLIKQMPEPEQLKMLSELKDEYDDLAESEQFGVVMGTVPRLRPRLNAILFKLQFSEQVENIKPEIVSVTAACEELRKSESFSNLLEITLLVGNYMNAGSRNAGAFGFNISFLCKLRDTKSTDQKMTLLHFLAELCENDYPDVLKFPDELAHVEKASRVSAENLQKNLDQMKKQISDVERDVQNFPAATDEKDKFVEKMTSFVKDAQEQYNKLRMMHSNMETLYKELGEYFLFDPKKLSVEEFFMDLHNFRNMFLQAVKENQKRRETEEKMRRAKLAKEKAEKERLEKQQKREQLIDMNAEGDETGVMDSLLEALQSGAAFRRKRGPRQEAIKLQTVL

SEQ ID NO: 12205 - protein, 1229 aa, Artificial Sequence
  Synthetic polypeptide
MEPPGGSLGPGRGTRDKKKGRSPDELPSAGGDGGKSKKFTLKRLMADELERFTSMRIKKEKEKPNSAHRNSSASYGDDPTAQSLQDVSDEQVLVLFEQMLLDMNLNEEKQQPLREKDIIIKREMVSQYLYTSKAGMSQKESSKSAMMYIQELRSGLRDMPLLSCLESLRVSLNNNPVSWVQTFGAEGLASLLDILKRLHDEKEETAGSYDSRNKHEIIRCLKAFMNNKFGIKTMLETEEGILLLVRAMDPAVPNMMIDAAKLLSALCILPQPEDMNERVLEAMTERAEMDEVERFQPLLDGLKSGTTIALKVGCLQLINALITPAEELDFRVHIRSELMRLGLHQVLQDLREIENEDMRVQLNVFDEQGEEDSYDLKGRLDDIRMEMDDFNEVFQILLNTVKDSKAEPHFLSILQHLLLVRNDYEARPQYYKLIEECISQIVLHKNGADPDFKCRHLQIEIEGLIDQMIDKTKVEKSEAKAAELEKKLDSELTARHELQVEMKKMESDFEQKLQDLQGEKDALHSEKQQIATEKQDLEAEVSQLTGEVAKLTKELEDAKKEMASLSAAAITVPPSVPSRAPVPPAPPLPGDSGTIIPPPPAPGDSTTPPPPPPPPPPPPPLPGGVCISSPPSLPGGTAISPPPPLSGDATIPPPPPLPEGVGIPSPSSLPGGTAIPPPPPLPGSARIPPPPPPLPGSAGIPPPPPPLPGEAGMPPPPPPLPGGPGIPPPPPFPGGPGIPPPPPGMGMPPPPPFGFGVPAAPVLPFGLTPKKLYKPEVQLRRPNWSKLVAEDLSQDCFWTKVKEDRFENNELFAKLTLTFSAQTKTSKAKKDQEGGEEKKSVQKKKVKELKVLDSKTAQNLSIFLGSFRMPYQEIKNVILEVNEAVLTESMIQNLIKQMPEPEQLKMLSELKDEYDDLAESEQFGVVMGTVPRLRPRLNAILFKLQFSEQVENIKPEIVSVTAACEELRKSESFSNLLEITLLVGNYMNAGSRNAGAFGFNISFLCKLRDTKSTDQKMTLLHFLAELCENDYPDVLKFPDELAHVEKASRVSAENLQKNLDQMKKQISDVERDVQNFPAATDEKDKFVEKMTSFVKDAQEQYNKLRMMHSNMETLYKELGEYFLFDPKKLSVEEFFMDLHNFRNMFLQAVKENQKRRETEEKMRRAKLAKEKAEKERLEKQQKREQLIDMNAEGDETGVMDSLLEALQSGAAFRRKRGPRQEAIKLQTVL

SEQ ID NO: 12206 - protein, 1172 aa, Artificial Sequence
  Synthetic polypeptide
MRIKKEKEKPNSAHRNSSASYGDDPTAQSLQDVSDEQVLVLFEQMLLDMNLNEEKQQPLREKDIIIKREMVSQYLYTSKAGMSQKESSKSAMMYIQELRSGLRDMPLLSCLESLRVSLNNNPVSWVQTFGAEGLASLLDILKRLHDEKEETAGSYDSRNKHEIIRCLKAFMNNKFGIKTMLETEEGILLLVRAMDPAVPNMMIDAAKLLSALCILPQPEDMNERVLEAMTERAEMDEVERFQPLLDGLKSGTTIALKVGCLQLINALITPAEELDFRVHIRSELMRLGLHQVLQDLREIENEDMRVQLNVFDEQGEEDSYDLKGRLDDIRMEMDDFNEVFQILLNTVKDSKAEPHFLSILQHLLLVRNDYEARPQYYKLIEECISQIVLHKNGADPDFKCRHLQIEIEGLIDQMIDKTKVEKSEAKAAELEKKLDSELTARHELQVEMKKMESDFEQKLQDLQGEKDALHSEKQQIATEKQDLEAEVSQLTGEVAKLTKELEDAKKEMASLSAAAITVPPSVPSRAPVPPAPPLPGDSGTIIPPPPAPGDSTTPPPPPPPPPPPPPLPGGVCISSPPSLPGGTAISPPPPLSGDATIPPPPPLPEGVGIPSPSSLPGGTAIPPPPPLPGSARIPPPPPPLPGSAGIPPPPPPLPGEAGMPPPPPPLPGGPGIPPPPPFPGGPGIPPPPPGMGMPPPPPFGFGVPAAPVLPFGLTPKKLYKPEVQLRRPNWSKLVAEDLSQDCFWTKVKEDRFENNELFAKLTLTFSAQTKTKKDQEGGEEKKSVQKKKVKELKVLDSKTAQNLSIFLGSFRMPYQEIKNVILEVNEAVLTESMIQNLIKQMPEPEQLKMLSELKDEYDDLAESEQFGVVMGTVPRLRPRLNAILFKLQFSEQVENIKPEIVSVTAACEELRKSESFSNLLEITLLVGNYMNAGSRNAGAFGFNISFLCKLRDTKSTDQKMTLLHFLAELCENDYPDVLKFPDELAHVEKASRVSAENLQKNLDQMKKQISDVERDVQNFPAATDEKDKFVEKMTSFVKDAQEQYNKLRMMHSNMETLYKELGEYFLFDPKKLSVEEFFMDLHNFRNMFLQAVKENQKRRETEEKMRRAKLAKEKAEKERLEKQQKREQLIDMNAEGDETGVMDSLLEALQSGAAFRRKRGPRQEAIKLQTVL

SEQ ID NO: 12207 - protein, 75 aa, Artificial Sequence
  Synthetic polypeptide
  misc_feature (1)..(1): Xaa can be any naturally occurring amino acid
XRETEEKMRRAKLAKEKAEKERLEKQQKREQLIDMNAEGDETGVMDSLLEALQSGAAFRRKRGPRQEAIKLQTVL

SEQ ID NO: 12208 - protein, 1044 aa, Artificial Sequence
  Synthetic polypeptide
MAAPQDLDIAVWLATVHLEQYADTFRRHGLATAGAARGLGHEELKQLGISATGHRKRILRLLQTGTEEGSLDPKSDSAMEPSPSPAPQAQPPKPVPKPRTVFGGLSGPATTQRPGLSPALGGPGVSRSPEPSPRPPPLPTSSSEQSSALNTVEMMPNSIYFGLDSRGRAQAAQDKAPDSSQISAPTPALRPTTGTVHIMDPGCLYYGVQPVGTPGAPDRRESRGVCQGRAEHRLSRQDLEAREDAGYASLELPGDSTLLSPTLETEETSDDLISPYASFSFTADRLTPLLSGWLDKLSPQGNYVFQRRFVQFNGRSLMYFGSDKDPFPKGVIPLTAIEMTRSSKDNKFQVITGQRVFVFRTESEAQRDMWCSTLQSCLKEQRLLGHPRPPQPPRPLRTGMLELRGHKAKVFAALSPGELALYKSEQAFSLGIGICFIELQGCSVRETKSRSFDLLTPHRCFSFTAESGGARQSWAAALQEAVTETLSDYEVAEKIWSNRANRQCADCGSSRPDWAAVNLGVVICKQCAGQHRALGSGISKVQSLKLDTSVWSNEIVQLFIVLGNDRANRFWAGTLPPGEGLHPDATPGPRGEFISRKYRLGLFRKPHPQYPDHSQLLQALCAAVARPNLLKNMTQLLCVEAFEGEEPWFPPAPDGSCPGLLPSDPSPGVYNEVVVRATYSGFLYCSPVSNKAGPSPPRRGRDAPPRLWCVLGAALEMFASENSPEPLSLIQPQDIVCLGVSPPPTDPGDRFPFSFELILAGGRIQHFGTDGADSLEAWTSAVGKWFSPLSCHQLLGPGLLRLGRLWLRSPSHTAPAPGLWLSGFGLLRGDHLFLCSAPGPGPPAPEDMVHLRRLQEISVVSAADTPDKKEHLVLVETGRTLYLQGEGRLDFTAWNAAIGGAAGGGGTGLQEQQMSRGDIPIIVDACISFVTQHGLRLEGVYRKGGARARSLRLLAEFRRDARSVKLRPGEHFVEDVTDTLKRFFRELDDPVTSARLLPRWREAAELPQKNQRLEKYKDVIGCLPRVNRRTLATLIGHLYRLGAP

SEQ ID NO: 12209 - protein, 875 aa, Artificial Sequence
  Synthetic polypeptide
MEPSPSPAPQAQPPKPVPKPRTVFGGLSGPATTQRPGLSPALGGPGVSRSPEPSPRPPPLPTSSSEQSSALNTVEMMPNSIYFGLDSRGRAQAAQDKAPDSSQISAPTPALRPTTGTVHIMDPGCLYYGVQPVGTPGAPDRRESRGVCQGRAEHRLSRQDLEAREDAGYASLELPGDSTLLSPTLETEETSDDLISPYASFSFTADRLTPLLSGWLDKLSPQGNYVFQRRFVQFNGRSLMYFGSDKDPFPKGVIPLTAIEMTRSSKDNKFQVITGQRVFVFRTESEAQRDMWCSTLQSCLKEQRLLGHPRPPQPPRPLRTGMLELRGHKAKVFAALSPGELALYKSEQAFSLGIGICFIELQGCSVRETKSRSFDLLTPHRCFSFTAESGGARQSWAAALQEAVTETLSDYEVAEKIWSNRANRQCADCGSSRPDWAAVNLGVVICKQCAGQHRALGSGISKVQSLKLDTSVWSNEIVQLFIVLGNDRANRFWAGTLPPGEGLHPDATPGPRGEFISRKYRLGLFRKPHPQYPDHSQLLQALCAAVARPNLLKNMTQLLCVEAFEDPSPGVYNEVVVRATYSGFLYCSPVSNKAGPSPPRRGRDAPPRLWCVLGAALEMFASENSPEPLSLIQPQDIVCLGVSPPPTDPGDRFPFSFELILAGGRIQHFGTDGADSLEAWTSAVGKWFSPLSCHQLLGPGLLRLGRLWLRSPSHTAPAPGLWLSGFGLLRGDHLFLCSAPGPGPPAPEDMVHLRRLQEISVVSAADTPDKKEHLVLVETGRTLYLQGEGRLDFTAWNAAIGGAAGGGGTGLQEQQMSRGDIPIIVDACISFVTQHELPQKNQRLEKYKDVIGCLPRVNRRTLATLIGHLYRLGAP

SEQ ID NO: 12210 - protein, 706 aa, Artificial Sequence
  Synthetic polypeptide
MTRSSKDNKFQVITGQRVFVFRTESEAQRDMWCSTLQSCLKEQRLLGHPRPPQPPRPLRTGMLELRGHKAKVFAALSPGELALYKSEQAFSLGIGICFIELQGCSVRETKSRSFDLLTPHRCFSFTAESGGARQSWAAALQEAVTETLSDYEVAEKIWSNRANRQCADCGSSRPDWAAVNLGVVICKQCAGQHRALGSGISKVQSLKLDTSVWSNEIVQLFIVLGNDRANRFWAGTLPPGEGLHPDATPGPRGEFISRKYRLGLFRKPHPQYPDHSQLLQALCAAVARPNLLKNMTQLLCVEAFEGEEPWFPPAPDGSCPGLLPSDPSPGVYNEVVVRATYSGFLYCSPVSNKAGPSPPRRGRDAPPRLWCVLGAALEMFASENSPEPLSLIQPQDIVCLGVSPPPTDPGDRFPFSFELILAGGRIQHFGTDGADSLEAWTSAVGKWFSPLSCHQLLGPGLLRLGRLWLRSPSHTAPAPGLWLSGFGLLRGDHLFLCSAPGPGPPAPEDMVHLRRLQEISVVSAADTPDKKEHLVLVETGRTLYLQGEGRLDFTAWNAAIGGAAGGGGTGLQEQQMSRGDIPIIVDACISFVTQHGLRLEGVYRKGGARARSLRLLAEFRRDARSVKLRPGEHFVEDVTDTLKRFFRELDDPVTSARLLPRWREAAELPQKNQRLEKYKDVIGCLPRVNRRTLATLIGHLYRLGAP

SEQ ID NO: 12211 - protein, 934 aa, Artificial Sequence
  Synthetic polypeptide
MAAPQDLDIAVWLATVHLEQYADTFRRHGLATAGAARGLGHEELKQLGISATGHRKRILRLLQTGTEEGSLDPKSDSAMEPSPSPAPQAQPPKPVPKPRTVFGGLSGPATTQRPGLSPALGGPGVSRSPEPSPRPPPLPTSSSEQSSALNTVEMMPNSIYFGLDSRGRAQAAQDKAPDSSQISAPTPALRPTTGTVHIMDPGCLYYGVQPVGTPGAPDRRESRGVCQGRAEHRLSRQDLEAREDAGYASLELPGDSTLLSPTLETEETSDDLISPYASFSFTADRLTPLLSGWLDKLSPQGNYVFQRRFVQFNGRSLMYFGSDKDPFPKGVIPLTAIEMTRSSKDNKFQVITGQRVFVFRTESEAQRDMWCSTLQSCLKEQRLLGHPRPPQPPRPLRTGMLELRGHKAKVFAALSPGELALYKSEQAFSLGIGICFIELQGCSVRETKSRSFDLLTPHRCFSFTAESGGARQSWAAALQEAVTETLSDYEVAEKIWSNRANRQCADCGSSRPDWAAVNLGVVICKQCAGQHRALGSGISKVQSLKLDTSVWSNEIVQLFIVLGNDRANRFWAGTLPPGEGLHPDATPGPRGEFISRKYRLGLFRKPHPQYPDHSQLLQALCAAVARPNLLKNMTQLLCVEAFEGEEPWFPPAPDGSCPGLLPSDPSPGVYNEVVVRATYSGFLYCSPVSNKAGPSPPRRGRDAPPRLWCVLGAALEMFASENSPEPLSLIQPQDIVCLGVSPPPTDPGDRFPFSFELILAGGRIQHFGTDGADSLEAWTSAVGKWFSPLSCHQLLGPGLLRLGRLWLRSPSHTAPAPGLWLSGFGLLRGDHLFLCSAPGPGPPAPEDMVHLRRLQEISVVSAADTPDKKEHLVLVETGRTLYLQGEGRLDFTAWNAAIGGAAGGGGTGLQEQQMSRGDIPIIVDACISFVTQHG

SEQ ID NO: 12212 - protein, 836 aa, Artificial Sequence
  Synthetic polypeptide
MEPSPSPAPQAQPPKPVPKPRTVFGGLSGPATTQRPGLSPALGGPGVSRSPEPSPRPPPLPTSSSEQSSALNTVEMMPNSIYFGLDSRGRAQAAQDKAPDSSQISAPTPALRPTTGTVHIMDPGCLYYGVQPVGTPGAPDRRESRGVCQGRAEHRLSRQDLEAREDAGYASLELPGDSTLLSPTLETEETSDDLISPYASFSFTADRLTPLLSGWLDKLSPQGNYVFQRRFVQFNGRSLMYFGSDKDPFPKGVIPLTAIEMTRSSKDNKFQVITGQRVFVFRTESEAQRDMWCSTLQSCLKEQRLLGHPRPPQPPRPLRTGMLELRGHKAKVFAALSPGELALYKSEQAFSLGIGICFIELQGCSVRETKSRSFDLLTPHRCFSFTAESGGARQSWAAALQEAVTETLSDYEVAEKIWSNRANRQCADCGSSRPDWAAVNLGVVICKQCAGQHRALGSGISKVQSLKLDTSVWSNEIVQLFIVLGNDRANRFWAGTLPPGEGLHPDATPGPRGEFISRKYRLGLFRKPHPQYPDHSQLLQALCAAVARPNLLKNMTQLLCVEAFEDPSPGVYNEVVVRATYSGFLYCSPVSNKAGPSPPRRGRDAPPRLWCVLGAALEMFASENSPEPLSLIQPQDIVCLGVSPPPTDPGDRFPFSFELILAGGRIQHFGTDGADSLEAWTSAVGKWFSPLSCHQLLGPGLLRLGRLWLRSPSHTAPAPGLWLSGFGLLRGDHLFLCSAPGPGPPAPEDMVHLRRLQEISVVSAADTPDKKEHLVLVETGRTLYLQGEGRLDFTAWNAAIGGAAGGGGTGLQEQQMSRGDIPIIVDACISFVTQHG

SEQ ID NO: 12213 - protein, 596 aa, Artificial Sequence
  Synthetic polypeptide
MTRSSKDNKFQVITGQRVFVFRTESEAQRDMWCSTLQSCLKEQRLLGHPRPPQPPRPLRTGMLELRGHKAKVFAALSPGELALYKSEQAFSLGIGICFIELQGCSVRETKSRSFDLLTPHRCFSFTAESGGARQSWAAALQEAVTETLSDYEVAEKIWSNRANRQCADCGSSRPDWAAVNLGVVICKQCAGQHRALGSGISKVQSLKLDTSVWSNEIVQLFIVLGNDRANRFWAGTLPPGEGLHPDATPGPRGEFISRKYRLGLFRKPHPQYPDHSQLLQALCAAVARPNLLKNMTQLLCVEAFEGEEPWFPPAPDGSCPGLLPSDPSPGVYNEVVVRATYSGFLYCSPVSNKAGPSPPRRGRDAPPRLWCVLGAALEMFASENSPEPLSLIQPQDIVCLGVSPPPTDPGDRFPFSFELILAGGRIQHFGTDGADSLEAWTSAVGKWFSPLSCHQLLGPGLLRLGRLWLRSPSHTAPAPGLWLSGFGLLRGDHLFLCSAPGPGPPAPEDMVHLRRLQEISVVSAADTPDKKEHLVLVETGRTLYLQGEGRLDFTAWNAAIGGAAGGGGTGLQEQQMSRGDIPIIVDACISFVTQHG

SEQ ID NO: 12214 - protein, 422 aa, Artificial Sequence; identical to SEQ ID NO: 483
  Synthetic polypeptide

SEQ ID NO: 12215 - protein, 217 aa, Artificial Sequence; identical to SEQ ID NO: 828
  Synthetic polypeptide

SEQ ID NO: 12216 - protein, 212 aa, Artificial Sequence
  Synthetic polypeptide
  misc_feature (1)..(1): Xaa can be any naturally occurring amino acid
XRSCREDQKPVMDDQRDLISNNEQLPMLGRRPGAPESKCSRGALYTGFSILVTLLLAGQATTAYFLYQQQGRLDKLTVTSQNLQLENLRMKLPKPPKPVSKMRMATPLLMQALPMGALPQGPMQNATKYGNMTEDHVMHLLQNADPLKVYPPLKGSFPENLRHLKNTMETIDWKVFESWMHHWLLFEMSRHSLEQKPTDAPPKVPFPLGFRV

SEQ ID NO: 12217 - protein, 1615 aa, Artificial Sequence; identical to SEQ ID NO: 21
  Synthetic polypeptide

SEQ ID NO: 12218 - protein, 1604 aa, Artificial Sequence; identical to SEQ ID NO: 22
  Synthetic polypeptide

SEQ ID NO: 12219 - protein, 1616 aa, Artificial Sequence; identical to SEQ ID NO: 20
  Synthetic polypeptide

SEQ ID NO: 12220 - protein, 9 aa, Artificial Sequence
  Synthetic polypeptide
MARHGGSRL

SEQ ID NO: 12221 - protein, 84 aa, Artificial Sequence
  Synthetic polypeptide
MMPQEQYTHHRSTMPGSVGPQVYKVGIYGWRKRCLYFFVLLLMILILVNLAMTIWILKVMNFTIHISQLQRYGTNLSPHEQVSG

SEQ ID NO: 12222 - protein, 83 aa, Artificial Sequence
  Synthetic polypeptide
MPQEQYTHHRSTMPGSVGPQVYKVGIYGWRKRCLYFFVLLLMILILVNLAMTIWILKVMNFTIHISQLQRYGTNLSPHEQVSG

SEQ ID NO: 12223 - protein, 323 aa, Artificial Sequence; identical to SEQ ID NO: 643
  Synthetic polypeptide

SEQ ID NO: 12224 - protein, 28 aa, Artificial Sequence
  Synthetic polypeptide
MGAVMGTFSSLQTKQRRPSKGKMSPAPP

SEQ ID NO: 12225 - protein, 159 aa, Artificial Sequence
  Synthetic polypeptide
MGAVMGTFSSLQTKQRRPSKDIAWWYYQYQRDKIEDELEMTMVCHRPEGLEQLEAQTNFTKRELQVLYRGFKNECPSGVVNEDTFKQIYAQFFPHGDASTYAHYLFNAFDTTQTGSVKFEDFVTALSILLRGTVHEKLRWTFNLYDINKDGYINKEICS

SEQ ID NO: 12226 - protein, 173 aa, Artificial Sequence
  Synthetic polypeptide
MGAVMGTFSSLQTKQRRPSKDKIEDELEMTMVCHRPEGLEQLEAQTNFTKRELQVLYRGFKNECPSGVVNEDTFKQIYAQFFPHGALPCLEGSPCVEFLPPSPALLFCLVDASTYAHYLFNAFDTTQTGSVKFEDFVTALSILLRGTVHEKLRWTFNLYDINKDGYINKEICS

SEQ ID NO: 12227 - protein, 148 aa, Artificial Sequence
  Synthetic polypeptide
MGAVMGTFSSLQTKQRRPSKDKIEDELEMTMVCHRPEGLEQLEAQTNFTKRELQVLYRGFKNECPSGVVNEDTFKQIYAQFFPHGDASTYAHYLFNAFDTTQTGSVKFEDFVTALSILLRGTVHEKLRWTFNLYDINKDGYINKEICS

SEQ ID NO: 12228 - protein, 157 aa, Artificial Sequence
  Synthetic polypeptide
MSGCSKRCKLGFVKFAQTIFKLITGTLSKDKIEDELEMTMVCHRPEGLEQLEAQTNFTKRELQVLYRGFKNECPSGVVNEDTFKQIYAQFFPHGDASTYAHYLFNAFDTTQTGSVKFEDFVTALSILLRGTVHEKLRWTFNLYDINKDGYINKEICS

SEQ ID NO: 12229 - protein, 120 aa, Artificial Sequence
  Synthetic polypeptide
MTMVCHRPEGLEQLEAQTNFTKRELQVLYRGFKNECPSGVVNEDTFKQIYAQFFPHGDASTYAHYLFNAFDTTQTGSVKFEDFVTALSILLRGTVHEKLRWTFNLYDINKDGYINKEICS

SEQ ID NO: 12230 - protein, 53 aa, Artificial Sequence
  Synthetic polypeptide
MAFANFRRILRLSTFEKRKSREYEHVRRDLDPNEVWEIVGELGDGAFGKVYKM

SEQ ID NO: 12231 - protein, 485 aa, Artificial Sequence
  Synthetic polypeptide
MGPGERAGGGGDAGKGNAAGGGGGGRSATTAGSRAVSALCLLLSVGSAAACLLLGVQAAALQGRVAALEEERELLRRAGPPGALDAWAEPHLERLLREKLDGLAKIRTAREAPSECVCPPGPPGRRGKPGRRGDPGPPGQSGRDGYPGPLGLDGKPGLPGPKGEKGAPGDFGPRGDQGQDGAAGPPGPPGPPGARGPPGDTGKDGPRGAQGPAGPKGEPGQDGEMGPKGPPGPKGEPGVPGKKGDDGTPSQPGPPGPKGEPGSMGPRGENGVDGAPGPKGEPGHRGTDGAAGPRGAPGLKGEQGDTVVIDYDGRILDALKGPPGPQGPPGPPGIPGAKGELGLPGAPGIDGEKGPKGQKGDPGEPGPAGLKGEAGEMGLSGLPGADGLKGEKGESASDSLQESLAQLIVEPGPPGPPGPPGPMGLQGIQGPKGLDGAKGEKGASGERGPSGLPGPVGPPGLIGLPGTKGEKGRPGEPGLDGWDCN

SEQ ID NO: 12232 - protein, 234 aa, Artificial Sequence
  Synthetic polypeptide
MKITSTSCICPVLVCLCFVQRCYGTAHHSSIKVMRNQTKHIEGETEVHHRPKRGWVWNQFFVLEEHMGPDPQYVGKLHSNSDKGDGSVKYILTGEGAGTIFIIDDTTGDIHSTKSLDREQKTHYVLHAQAIDRRTNKPLEPESEFIIKVQDINDNAPKFTDGPYIVTVPEMSDMGTSVLQVTATDADDPTYGNSARVVYSILQGQPYFSVDPKTGSQGPRMEGQAEAMSEEHKL

SEQ ID NO: 12233 - protein, 180 aa, Artificial Sequence
  Synthetic polypeptide
WVWNQFFVLEEHMGPDPQYVGKLHSNSDKGDGSVKYILTGEGAGTIFIIDDTTGDIHSTKSLDREQKTHYVLHAQAIDRRTNKPLEPESEFIIKVQDINDNAPKFTDGPYIVTVPEMSDMGTSVLQVTATDADDPTYGNSARVVYSILQGQPYFSVDPKTGSQGPRMEGQAEAMSEEHKL

SEQ ID NO: 12234 - protein, 100 aa, Artificial Sequence
  Synthetic polypeptide
MRTYRYFLLLFWVGQPYPTLSTPLSKRTSGFPAKKRALELSGNSKNELNRSKRSWMWNQFFLLEEYTGSDYQYVGKGTFGNIWRHFWLSHLGKTLLAPSR

SEQ ID NO: 12235 - protein, 45 aa, Artificial Sequence
  Synthetic polypeptide
MWNQFFLLEEYTGSDYQYVGKGTFGNIWRHFWLSHLGKTLLAPSR

SEQ ID NO: 12236 - protein, 308 aa, Artificial Sequence; identical to SEQ ID NO: 662
  Synthetic polypeptide

SEQ ID NO: 12237 - protein, 292 aa, Artificial Sequence
  Synthetic polypeptide
MEGGGKPNSSSNSRDDGNSVFPAKASATGAGPAAAEKRLGTPPGGGGAGAKEHGNSVCFKVDGGGGGGGGGGGGEEPAGGFEDAEGPRRQYGFMQRQFTSMLQPGVNKFSLRMFGSQKAVEKEQERVKTAGFWIIHPYSDFRFYWDLIMLIMMVGNLVIIPVGITFFTEQTTTPWIIFNVASDTVFLLDLIMNFRTGTVNEDSSEIILDPKVIKMNYLKSWFVVDFISSIPVDYIFLIVEKGMDSEVYKTARALRIVRFTKILSLLRLLRLSRLIRYIHQWEETVEPQMEGT

SEQ ID NO: 12238 - protein, 142 aa, Artificial Sequence [sequence omitted]

SEQ ID NO: 12239 - protein, 517 aa, Artificial Sequence
  Synthetic polypeptide
MWGLGARGPDRGLLLALALGGLARAGGVEVEPGGAHGESGGFQVVTFEWAHVQDPYVIALWILVASLAKIGFHLSHKVTSVVPESALLIVLGLVLGGIVWAADHIASFTLTPTVFFFYLLPPIVLDAGYFMPNRLFFGNLGTILLYAVVGTVWNAATTGLSLYGVFLSGLMGDLQIGLLDFLLFGSLMAAVDPVAVLAVFEEVHVNEVLFIIVFGESLLNDAVTVVLYNVFESFVALGGDNVTGVDCVKGIVSFFVVSLGGTLVGVVFAFLLSLVTRFTKHVRIIEPGFVFIISYLSYLTSEMLSLSAILAITFCGICCQKYVKANISEQSATTVRYTMKMLASSAETIIFMFLGISAVNPFIWTWNTAFVLLTLVFISVYRAIGVVLQTWLLNRYRMVQLEPIDQVVLSYGGLRGAVAFALVVLLDGDKVKEKNLFVSTTIIVVFFTVIFQGLTIKPLVQWLKVKRSEHREPRLNEKLHGRAFDHILSAIEDISGQIGHNYLRDKAQACNPSTLGD

SEQ ID NO: 12240 - protein, 508 aa, Artificial Sequence
  Synthetic polypeptide
MWGLGARGPDRGLLLALALGGLARAGGVEVEPGGAHGESGGFQVVTFEWAHVQDPYVIALWILVASLAKIGFHLSHKVTSVVPESALLIVLGLVLGGIVWAADHIASFTLTPTVFFFYLLPPIVLDAGYFMPNRLFFGNLGTILLYAVVGTVWNAATTGLSLYGVFLSGLMGDLQIGLLDFLLFGSLMAAVDPVAVLAVFEEVHVNEVLFIIVFGESLLNDAVTVVLYNVFESFVALGGDNVTGVDCVKGIVSFFVVSLGGTLVGVVFAFLLSLVTRFTKHVRIIEPGFVFIISYLSYLTSEMLSLSAILAITFCGICCQKYVKANISEQSATTVRYTMKMLASSAETIIFMFLGISAVNPFIWTWNTAFVLLTLVFISVYRAIGVVLQTWLLNRYRMVQLEPIDQVVLSYGGLRGAVAFALVVLLDGDKVKEKNLFVSTTIIVVFFTVIFQWLKVKRSEHREPRLNEKLHGRAFDHILSAIEDISGQIGHNYLRDKAQACNPSTLGD

SEQ ID NO: 12241 - protein, 356 aa, Artificial Sequence
  Synthetic polypeptide
MCIRQLKFFTTACVCECPQNILSPQPSCVNLGMMWTWALWMLPSLCKFSLAALPAKPENISCVYYYRKNLTCTWSPGKETSYTQYTVKRTYAFGEKHDNCTTNSSTSENRASCSFFLPRITIPDNYTIEVEAENGDGVIKSHMTYWRLENIAKTEPPKIFRVKPVLGIKRMIQIEWIKPELAPVSSDLKYTLRFRTVNSTSWMEVNFAKNRKDKNQTYNLTGLQPFTEYVIALRCAVKESKFWSDWSQEKMGMTEEEAPCGLELWRVLKPAEADGRRPVRLLWKKARGAPVLEKTLGYNIWYYPESNTNLTETMNTTNQQLELHLGGESFWVSMISYNSLGKSPVATLRIPAIQEK

SEQ ID NO: 12242 - protein, 337 aa, Artificial Sequence
  Synthetic polypeptide
MKLSPQPSCVNLGMMWTWALWMLPSLCKFSLAALPAKPENISCVYYYRKNLTCTWSPGKETSYTQYTVKRTYAFGEKHDNCTTNSSTSENRASCSFFLPRITIPDNYTIEVEAENGDGVIKSHMTYWRLENIAKTEPPKIFRVKPVLGIKRMIQIEWIKPELAPVSSDLKYTLRFRTVNSTSWMEVNFAKNRKDKNQTYNLTGLQPFTEYVIALRCAVKESKFWSDWSQEKMGMTEEEAPCGLELWRVLKPAEADGRRPVRLLWKKARGAPVLEKTLGYNIWYYPESNTNLTETMNTTNQQLELHLGGESFWVSMISYNSLGKSPVATLRIPAIQEK

SEQ ID NO: 12243 - protein, 214 aa, Artificial Sequence
  Synthetic polypeptide
MTYWRLENIAKTEPPKIFRVKPVLGIKRMIQIEWIKPELAPVSSDLKYTLRFRTVNSTSWMEVNFAKNRKDKNQTYNLTGLQPFTEYVIALRCAVKESKFWSDWSQEKMGMTEEEAPCGLELWRVLKPAEADGRRPVRLLWKKARGAPVLEKTLGYNIWYYPESNTNLTETMNTTNQQLELHLGGESFWVSMISYNSLGKSPVATLRIPAIQEK

SEQ ID NO: 12244 - protein, 60 aa, Artificial Sequence
  Synthetic polypeptide
MAFDVSCFFWVVLFSAGCKVITSWDQMCIERACSPSAFCHDCKRLKSSPEAKQMPALCFL

SEQ ID NO: 12245 - protein, 1084 aa, Artificial Sequence
  Synthetic polypeptide
MDSDSDSPFNYSWPSFPKMKIRRRTSKQDRSFDILKKSKPPSTLLAAGRLSDMLNGGDEVYANCMVIDQVGDLDISYINIEGITATTSPESRGCTLWPQSSKHTLPTETSPSVYPLSENVEGTAHTEAQQSFMSPSSSCASNLNLSFGWHGFEKEQSHLKKRSSSLDALDADSEGEGHSEPSHICYTPGSQSSSRTGIPSGDELDSFETNTEPDFNISRAESLPLSSNLQSKESLLSGVRSRSYSCSSPKISLGKTRLVRELTVCSSSEEQRAYSLSEPPRENRIQEEEWDKYIIPAKSESEKYKVSRTFSFLMNRMTSPRNKSKTKSKDAKDKEKLNRHQFAPGTFSGVLQCLVCDKTLLGKESLQCSNCNANVHKGCKDAAPACTKKFQEKYNKNKPQTILGNSSFRDIPQPGLSLHPSSSVPVGLPTGRRETVGQVHPLSRSVPGTTLESFRRSATSLESESDHNSCRSRSHSDELLQSMGSSPSTESFIMEDVVDSSLWSDLSSDAQEFEAESWSLVVDPSFCNRQEKDVIKRQDVIFELMQTEMHHIQTLFIMSEIFRKGMKEELQLDHSTVDKIFPCLDELLEIHRHFFYSMKERRQESCAGSDRNFVIDRIGDILVQQFSEENASKMKKIYGEFCCHHKEAVNLFKELQQNKKFQNFIKLRNSNLLARRRGIPECILLVTQRITKYPVLVERILQYTKERTEEHKDLRKALCLIKDMIATVDLKVNEYEKNQKWLEILNKIENKTYTKLKNGHVFRKQALMSEERTLLYDGLVYWKTATGRFKDILALLLTDVLLFLQEKDQKYIFAAVDQKPSVISLQKLIAREVANEERGMFLISASSAGPEMYEIHTNSKEERNNWMRRIQQAVESCPEEKGGRTSESDEDKRKAEARVAKIQQCQEILTNQDQQICAYLEEKLHIYAELGELSGFEDVHLEPHLLIKPDPGEPPQAASLLAAALKEAESLQVAVKASQMGAVSQSCEDSCGDSVLADTLSSHDVPGSPTASLVTGGREGRGCSDVDPGIQGVVTDLAVSDAGEKVECRNFPGSSQSEIIQAIQNLTRLLYSLQVPDVKKVGDH

SEQ ID NO: 12246 - protein, 1397 aa, Artificial Sequence
  Synthetic polypeptide
MELSCSEAPLYGQMMIYAKFDKNVYLPEDAEFYFTYDGSHQRHVMIAERIEDNVLQSSVPGHGLQETVTVSVCLCSEGYSPVTMGSGSVTYVDNMACRLARLLVTQANRLTACSHQTLLTPFALTAGALPALDEELVLALTHLELPLEWTVLGSSSLEVSSHRESLLHLAMRWGLAKLSQFFLCLPGGVQALALPNEEGATPLDLALREGHSKLVEDVTNFQGRWSPSFSRVQLSEEASLHYIHSSETLTLTLNHTAEHLLEADIKLFRKYFWDRAFLVKAFEPEARPEERTAMPSSGAETEEEIKNSVSSRSAAEKEDIKRVKSLVVQHNEHEDQHSLDLDRSFDILKKSKPPSTLLAAGRLSDMLNGGDEVYANCMVIDQVGDLDISYINIEGITATTSPESRGCTLWPQSSKHTLPTETSPSVYPLSENVEGTAHTEAQQSFMSPSSSCASNLNLSFGWHGFEKEQSHLKKRSSSLDALDADSEGEGHSEPSHICYTPGSQSSSRTGIPSGDELDSFETNTEPDFNISRAESLPLSSNLQSKESLLSGVRSRSYSCSSPKISLGKTRLVRELTVCSSSEEQRAYSLSEPPRENRIQEEEWDKYIIPAKSESEKYKVSRTFSFLMNRMTSPRNKSKTKSKDAKDKEKLNRHQFAPGTFSGVLQCLVCDKTLLGKESLQCSNCNANVHKGCKDAAPACTKKFQEKYNKNKPQTILGNSSFRDIPQPGLSLHPSSSVPVGLPTGRRETVGQVHPLSRSVPGTTLESFRRSATSLESESDHNSCRSRSHSDELLQSMGSSPSTESFIMEDVVDSSLWSDLSSDAQEFEAESWSLVVDPSFCNRQEKDVIKRQDVIFELMQTEMHHIQTLFIMSEIFRKGMKEELQLDHSTVDKIFPCLDELLEIHRHFFYSMKERRQESCAGSDRNFVIDRIGDILVQQFSEENASKMKKIYGEFCCHHKEAVNLFKELQQNKKFQNFIKLRNSNLLARRRGIPECILLVTQRITKYPVLVERILQYTKERTEEHKDLRKALCLIKDMIATVDLKVNEYEKNQKWLEILNKIENKTYTKLKNGHVFRKQALMSEERTLLYDGLVYWKTATGRFKDILALLLTDVLLFLQEKDQKYIFAAVDQKPSVISLQKLIAREVANEERGMFLISASSAGPEMYEIHTNSKEERNNWMRRIQQAVESCPEEKGGRTSESDEDKRKAEARVAKIQQCQEILTNQDQQICAYLEEKLHIYAELGELSGFEDVHLEPHLLIKPDPGEPPQAASLLAAALKEAESLQVAVKASQMGAVSQSCEDSCGDSVLADTLSSHDVPGSPTASLVTGGREGRGCSDVDPGIQGVVTDLAVSDAGEKVECRNFPGSSQSEIIQAIQNLTRLLYSLQVPDVKKVGDH

SEQ ID NO: 12247 - protein, 1353 aa, Artificial Sequence
  Synthetic polypeptide
MELSCSEAPLYGQMMIYAKFDKNVYLPEDAEFYFTYDGSHQRHVMIAERIEDNVLQSSVPGHGLQETVTVSVCLCSEGYSPVTMGSGSVTYVDNMACRLARLLVTQANRLTACSHQTLLTPFALTAGALPALDEELVLALTHLELPLEWTVLGSSSLEVSSHRESLLHLAMRWGLAKLSQFFLCLPGGVQALALPNEEGATPLDLALREGHSKLVEDVTNFQGRWSPSFSRVQLSEEASLHYIHSSETLTLTLNHTAEHLLEADIKLFRKYFWDRAFLVKAFEPEARPEERTAMPSSGAETEEEIKNSVSSRSAAEKEDIKRVKSLVVQHNEHEDQHSLDLDRSFDILKKSKPPSTLLAAGRLSDMLNGGDEVYANCMVIDQVGDLDISYINIEGITATTSPESRGCTLWPQSSKHTLPTETSPSVYPLSENVEGTAHTEAQQSFMSPSSSCASNLNLSFGWHGFEKEQSHLKKRSSSLDALDADSEGEGHSEPSHICYTPGSQSSSRTGIPSGDELDSFETNTEPDFNISRAESLPLSSNLQSKESLLSGVRSRSYSCSSPKISLGKTRLVRELTVCSSSEEQRAYSLSEPPRENRIQEEEWDKYIIPAKSESEKYKVSRTFSFLMNRMTSPRNKSKTKSKDAKDKEKLNRHQFAPGTFSGVLQCLVCDKTLLGKESLQCSNCNANVHKGCKDAAPACTKKFQEKYNKNKPQTILGNSSFRDIPQPGLSLHPSSSVPVGLPTGRRETVGQVHPLSRSVPGTTLESFRRSATSLESESDHNSCRSRSHSDELLQSMGSSPSTESFIMEDVVDSSLWSDLSSDAQEFEAESWSLVVDPSFCNRQEKDVIKRQDVIFELMQTEMHHIQTLFIMSEIFRKGMKEELQLDHSTVDKIFPCLDELLEIHRHFFYSMKERRQESCAGSDRNFVIDRIGDILVQQFSEENASKMKKIYGEFCCHHKEAVNLFKELQQNKKFQNFIKLRNSNLLARRRGIPECILLVTQRITKYPVLVERILQYTKERTEEHKDLRKALCLIKDMIATVDLKVNEYEKNQKWLEILNKIENKTYTKLKNGHVFRKQALMSEERTLLYDGLVYWKTATGRFKDILALLLTDVLLFLQEKDQKYIFAAVDQKPSVISLQKLIAREVANEERGMFLISASSAGPEMYEIHTNSKEERNNWMRRIQQAVESCPEEKGGRTSESDEDKRKAEARVAKIQQCQEILTNQDQQICAYLEEKLHIYAELGELSGFEDVHLEPHLLIKPDPGEPPQAASLLAAALKEALVTGGREGRGCSDVDPGIQGVVTDLAVSDAGEKVECRNFPGSSQSEIIQAIQNLTRLLYSLQVPDVKKVGDH

SEQ ID NO: 12248 - protein, 317 aa, Artificial Sequence
  Synthetic polypeptide
MIATVDLKVNEYEKNQKWLEILNKIENKTYTKLKNGHVFRKQALMSEERTLLYDGLVYWKTATGRFKDILALLLTDVLLFLQEKDQKYIFAAVDQKPSVISLQKLIAREVANEERGMFLISASSAGPEMYEIHTNSKEERNNWMRRIQQAVESCPEEKGGRTSESDEDKRKAEARVAKIQQCQEILTNQDQQICAYLEEKLHIYAELGELSGFEDVHLEPHLLIKPDPGEPPQAASLLAAALKEALVTGGREGRGCSDVDPGIQGVVTDLAVSDAGEKVECRNFPGSSQSEIIQAIQNLTRLLYSLQVPDVKKVGDH

SEQ ID NO: 12249 - protein, 164 aa, Artificial Sequence
  Synthetic polypeptide
MWQEAMRRRRYLRDRSEEAAGGGDGLPRSRDWLYESYYCMSQQHPLIVFLLLIVMGSCLALLAVFFALGLEVEDHVAFLITVPTALAIFFAIFILVCIESVFKKLLRLFSLVIWICLVAMGYLFMCFGGTVSPWDQQRGWNWRFNDISRAQKDEYHMFSLLCGS

SEQ ID NO: 12250 - protein, 241 aa, Artificial Sequence
  Synthetic polypeptide
MWQEAMRRRRYLRDRSEEAAGGGDGLPRSRDWLYESYYCMSQQHPLIVFLLLIVMGSCLALLAVFFALGLEVEDHVAFLITVPTALAIFFAIFILVCIESVFKKLLRLFSLVIWICLVAMGYLFMCFGGTVSPWDQVSFFLFIIFVVYTMLPFNMRDAIIASVLTSSSHTIVLSVCLSATPGGKEHLVWQRQLGHRHTQKEDHVKTPEEDGHLQSKERGPRRNQLCLHHDCGLLALKTVRK

SEQ ID NO: 12251 - protein, 57 aa, Artificial Sequence
  Synthetic polypeptide
MRSPSAAWLLGAAILLAASLSCSGTIQGRVQWLMPVIPALWEAQVGRSLEIRSSRPA

SEQ ID NO: 12252 - protein, 468 aa, Artificial Sequence
  Synthetic polypeptide
MSAQCCAGQLACCCGSAGCSLCCDCCPRIRQSLSTRFMYALYFILVVVLCCIMMSTTVAHKMKEHIPFFEDMCKGIKAGDTCEKLVGYSAVYRVCFGMACFFFIFCLLTLKINNSKSCRAHIHNGFWFFKLLLLGAMCSGAFFIPDQDTFLNAWRYVGAVGGFLFIGIQLLLLVEFAHKWNKNWTAGTASNKLWYASLALVTLIMYSIATGGLVLMAVFYTQKDSCMENKILLGVNGGLCLLISLVAISPWVQNRQPHSGLLQSGVISCYVTYLTFSALSSKPAEVDEHGKNVTICVPDFGQDLYRDENLVTILGTSLLIGCILYSCLTSTTRSSSDALQGRYAAPELEIARCCFCFSPGGEDTEEQQPGKEGPRVIYDEKKGTVYIYSYFHFVFFLASLYVMMTVTNWFKWSPTLLPRLEYSGMILAHCNLHLPDVKRFSCLSLPSSWGYRHVPPWEATQHIQVGPM

SEQ ID NO: 12253 - protein, 422 aa, Artificial Sequence
  Synthetic polypeptide
MSAQCCAGQLACCCGSAGCSLCCDCCPRIRQSLSTRFMYALYFILVVVLCCIMMSTTVAHKMKEHIPFFEDMCKGIKAGDTCEKLVGYSAVYRVCFGMACFFFIFCLLTLKINNSKSCRAHIHNGFWFFKLLLLGAMCSGAFFIPDQDTFLNAWRYVGAVGGFLFIGIQLLLLVEFAHKWNKNWTAGTASNKLWYASLALVTLIMYSIATGGLVLMAVFYTQKDSCMENKILLGVNGGLCLLISLVAISPWVQNRQPHSGLLQSGVISCYVTYLTFSALSSKPAEVDEHGKNVTICVPDFGQDLYRDENLVTILGTSLLIGCILYSCLTSTTRSSSDALQGRYAAPELEIARCCFCFSPGGEDTEEQQPGKEGPRVIYDEKKGTVYIYSYFHFVFFLASLYVMMTVTNWFKEATQHIQVGPM

SEQ ID NO: 12254 - protein, 424 aa, Artificial Sequence
  Synthetic polypeptide
MSAQCCAGQLACCCGSAGCSLCCDCCPRIRQSLSTRFMYALYFILVVVLCCIMMSTTVAHKMKEHIPFFEDMCKGIKAGDTCEKLVGYSAVYRVCFGMACFFFIFCLLTLKINNSKSCRAHIHNGFWFFKLLLLGAMCSGAFFIPDQDTFLNAWRYVGAVGGFLFIGIQLLLLVEFAHKWNKNWTAGTASNKLWYASLALVTLIMYSIATGGLVLMAVFYTQKDSCMENKILLGVNGGLCLLISLVAISPWVQNRQPHSGLLQSGVISCYVTYLTFSALSSKPAEVVLDEHGKNVTICVPDFGQDLYRDENLVTILGTSLLIGCILYSCLTSTTRSSSDALQGRYAAPELEIARCCFCFSPGGEDTEEQQPGKEGPRVIYDEKKGTVYIYSYFHFVFFLASLYVMMTVTNWFKEATQHIQVGPM

SEQ ID NO: 12255 - protein, 411 aa, Artificial Sequence
  Synthetic polypeptide
MSAQCCAGQLACCCGSAGCSLCCDCCPRIRQSLSTRFMYALYFILVVVLCCIMMSTTVAHKMKEHIPFFEDMCKGIKAGDTCEKLVGYSAVYRVCFGMACFFFIFCLLTLKINNSKSCRAHIHNGFWFFKLLLLGAMCSGAFFIPDQDTFLNAWRYVGAVGGFLFIGIQLLLLVEFAHKWNKNWTAGTASNKLWYASLALVTLIMYSIATGGLVLMAVFYTQKDSCMENKILLGVNGGLCLLISLVAISPWVQNRQPHSGLLQSGVISCYVTYLTFSALSSKPAEVDEHGKNVTICVPDFGQDLYRDENLVTILGTSLLIGCILYSCLTSTTRSSSDALQGRYAAPELEIARCCFCFSPGGEDTEEQQPGKEGPRVIYDEKKGTVYIYSYFHFVFFLASLYVMMTVTNWFK

SEQ ID NO: 12256 - protein, 413 aa, Artificial Sequence
  Synthetic polypeptide
MSAQCCAGQLACCCGSAGCSLCCDCCPRIRQSLSTRFMYALYFILVVVLCCIMMSTTVAHKMKEHIPFFEDMCKGIKAGDTCEKLVGYSAVYRVCFGMACFFFIFCLLTLKINNSKSCRAHIHNGFWFFKLLLLGAMCSGAFFIPDQDTFLNAWRYVGAVGGFLFIGIQLLLLVEFAHKWNKNWTAGTASNKLWYASLALVTLIMYSIATGGLVLMAVFYTQKDSCMENKILLGVNGGLCLLISLVAISPWVQNRQPHSGLLQSGVISCYVTYLTFSALSSKPAEVVLDEHGKNVTICVPDFGQDLYRDENLVTILGTSLLIGCILYSCLTSTTRSSSDALQGRYAAPELEIARCCFCFSPGGEDTEEQQPGKEGPRVIYDEKKGTVYIYSYFHFVFFLASLYVMMTVTNWFK

SEQ ID NO: 12257 - protein, 515 aa, Artificial Sequence
  Synthetic polypeptide
MQLCIFCCCCILFYFDLYDFGRGYDFTIQENGLQIDQPPEIGNISIVRIIIMKNDNAEGIIEFDPKYTAFEVEEDVGLIMIPVVRLHGTYGYVTADFISQSSSASPGGVDYILHGSTVTFQHGQNLSFINISIIDDNESEFEEPIEILLTGATGGAVLGRHLVSRIIIAKSDSPFGVIRFLNQSKISIANPNSTMILSLVLERTGGLLGEIQVNWETVGPNSQEALLPQNRDIADPVSGLFYFGEGEGGVRTIILTIYPHEEIEVEETFIIKLHLVKGEAKLDSRAKDVTLTIQEFGDPNGVVQFAPETLSKKTYSEPLALEGPLLITFFVRRVKGTFGEIMVYWELSSEFDITEDFLSTSGFFTIADGESEASFDVHLLPDEVPEIEEDYVIQLVSVEGGAELDLEKSITWFSVYANDDPHGVFALYSDRQSILIGQNLIRSIQINITRLAGTFGDVAVGLRISSDHKEQPIVTENAERQLVVKDGATYKVDVVPIKNQHLTHDSCSVNVILNE

SEQ ID NO: 12258 - protein, 4854 aa, Artificial Sequence
  Synthetic polypeptide
MSVFLGPGMPSASLLVNLLSALLILFVFGETEIRFTGQTEFVVNETSTTVIRLIIERIGEPANVTAIVSLYGEDAGDFFDTYAAAFIPAGETNRTVYIAVCDDDLPEPDETFIFHLTLQKPSANVKLGWPRTVTVTILSNDNAFGIISFNMLPSIAVSEPKGRNESMPLTLIREKGTYGMVMVTFEVEGGPNPPDEDLSPVKGNITFPPGRATVIYNLTVLDDEVPENDEIFLIQLKSVEGGAEINTSRNSIEIIIKKNDSPVRFLQSIYLVPEEDHILIIPVVRGKDNNGNLIGSDEYEVSISYAVTTGNSTAHAQQNLDFIDLQPNTTVVFPPFIHESHLKFQIVDDTIPEIAESFHIMLLKDTLQGDAVLISPSVVQVTIKPNDKPYGVLSFNSVLFERTVIIDEDRISRYEEITVVRNGGTHGNVSANWVLTRNSTDPSPVTADIRPSSGVLHFAQGQMLATIPLTVVDDDLPEEAEAYLLQILPHTIRGGAEVSEPAELLFYIQDSDDVYGLITFFPMENQKIESSPGERYLSLSFTRLGGTKGDVRLLYSVLYIPAGAVDPLQAKEGILNISRRNDLIFPEQKTQVTTKLPIRNDAFLQNGAHFLVQLETVELLNIIPLIPPISPRFGEICNISLLVTPAIANGEIGFLSNLPIILHEPEDFAAEVVYIPLHRDGTDGQATVYWSLKPSGFNSKAVTPDDIGPFNGSVLFLSGQSDTTINITIKGDDIPEMNETVTLSLDRVNVENQVLKSGYTSRDLIILENDDPGGVFEFSPASRGPYVIKEGESVELHIIRSRGSLVKQFLHYRVEPRDSNEFYGNTGVLEFKPGEREIVITLLARLDGIPELDEHYWVVLSSHGERESKLGSATIVNITILKNDDPHGIIEFVSDGLIVMINESKGDAIYSAVYDVVRNRGNFGDVSVSWVVSPDFTQDVFPVQGTVVFGDQEFSKNITIYSLPDEIPEEMEEFTVILLNGTGGAKVGNRTTATLRIRRNDDPIYFAEPRVVRVQEGETANFTVLRNGSVDVTCMVQYATKDGKATARERDFIPVEKGETLIFEVGSRQQSISIFVNEDGIPETDEPFYIILLNSTGDTVVYQYGVATVIIEANDDPNGIFSLEPIDKAVEEGKTNAFWILRHRGYFGSVSVSWQLFQNDSALQPGQEFYETSGTVNFMDGEEAKPIILHAFPDKIPEFNEFYFLKLVNISGGSPGPGGQLAETNLQVTVMVPFNDDPFGVFILDPECLEREVAEDVLSEDDMSYITNFTILRQQGVFGDVQLGWEILSSEFPAGLPPMIDFLLVGIFPTTVHLQQHMRRHHSGTDALYFTGLEGAFGTVNPKYHPSRNNTIANFTFSAWVMPNANTNGFIIAKDDGNGSIYYGVKIQTNESHVTLSLHYKTLGSNATYIAKTTVMKYLEESVWLHLLIILEDGIIEFYLDGNAMPRGIKSLKGEAITDGPGILRIGAGINGNDRFTGLMQDVRSYERKLTLEEIYELHAMPAKSDLHPISGYLEFRQGETNKSFIISARDDNDEEGEELFILKLVSVYGGARISEENTTARLTIQKSDNANGLFGFTGACIPEIAEEGSTISCVVERTRGALDYVHVFYTISQIETDGINYLVDDFANASGTITFLPWQRSEVLNIYVLDDDIPELNEYFRVTLVSAIPGDGKLGSTPTSGASIDPEKETTDITIKASDHPYGLLQFSTGLPPQPKDAMTLPASSVPHITVEEEDGEIRLLVIRAQGLLGRVTAEFRTVSLTAFSPEDYQNVAGTLEFQPGERYKYIFINITDNSIPELEKSFKVELLNLEGGVAELFRVDGSGSGDGDMEFFLPTIHKRASLGVASQILVTIAASDHAHGVFEFSPESLFVSGTEPEDGYSTVTLNVIRHHGTLSPVTLHWNIDSDPDGDLAFTSGNITFEIGQTSANITVEILPDEDPELDKAFSVSVLSVSSGSLGAHINATLTVLASDDPYGIFIFSEKNRPVKVEEATQNITLSIIRLKGLMGKVLVSYATLDDMEKPPYFPPNLARATQGRDYIPASGFALFGANQSEATIAISILDDDEPERSESVFIELLNSTLVAKVQSRSIPNSPRLGPKVETIAQLIIIANDDAFGTLQLSAPIVRVAENHVGPIINVTRTGGAFADVSVKFKAVPITAIAGEDYSIASSDVVLLEGETSKAVPIYVINDIYPELEESFLVQLMNETTGGARLGALTEAVIIIEASDDPYGLFGFQITKLIVEEPEFNSVKVNLPIIRNSGTLGNVTVQWVATINGQLATGDLRVVSGNVTFAPGETIQTLLLEVLADDVPEIEEVIQVQLTDASGGGTIGLDRIANIIIPANDDPYGTVAFAQMVYRVQEPLERSSCANITVRRSGGHFGRLLLFYSTSDIDVVALAMEEGQDLLSYYESPIQGVPDPLWRTWMNVSAVGEPLYTCATLCLKEQACSAFSFFSASEGPQCFWMTSWISPAVNNSDFWTYRKNMTRVASLFSGQAVAGSDYEPVTRQWAIMQEGDEFANLTVSILPDDFPEMDESFLISLLEVHLMNISASLKNQPTIGQPNISTVVIALNGDAFGVFVIYNISPNTSEDGLFVEVQEQPQTLVELMIHRTGGSLGQVAVEWRVVGGTATEGLDFIGAGEILTFAEGETKKTVILTILDDSEPEDDESIIVSLVYTEGGSRILPSSDTVRVNILANDNVAGIVSFQTASRSVIGHEGEILQFHVIRTFPGRGNVTVNWKIIGQNLELNFANFSGQLFFPEGSLNTTLFVHLLDDNIPEEKEVYQVILYDVRTQGVPPAGIALLDAQGYAAVLTVEASDEPHGVLNFALSSRFVLLQEANITIQLFINREFGSLGAINVTYTTVPGMLSLKNQTVGNLAEPEVDFVPIIGFLILEEGETAAAINITILEDDVPELEEYFLVNLTYVGLTMAASTSFPPRLDSEGLTAQVIIDANDGARGVIEWQQSRFEVNETHGSLTLVAQRSREPLGHVSLFVYAQNLEAQVGLDYIFTPMILHFADGERYKNVNIMILDDDIPEGDEKFQLILTNPSPGLELGKNTIALIIVLANDDGPGVLSFNNSEHFFLREPTALYVQESVAVLYIVREPAQGLFGTVTVQFIVTEVNSSNESKDLTPSKGYIVLEEGVRFKALQISAILDTEPEMDEYFVCTLFNPTGGARLGVHVQTLITVLQNQAPLGLFSISAVENRATSIDIEEANRTVYLNVSRTNGIDLAVSVQWETVSETAFGMRGMDVVFSVFQSFLDESASGWCFFTLENLIYGIMLRKSSVTVYRWQGIFIPVEDLNIENPKTCEAFNIGFSPYFVITHEERNEEKPSLNSVFTFTSGFKLFLVQTIIILESSQVRYFTSDSQDYLIIASQRDDSELTQVFRWNGGSFVLHQKLPVRGVLTVALFNKGGSVFLAISQANARLNSLLFRWSGSGFINFQEVPVSGTTEVEALSSANDIYLIFAENVFLGDQNSIDIFIWEMGQSSFRYFQSVDFAAVNRIHSFTPASGIAHILLIGQDMSALYCWNSERNQFSFVLEVPSAYDVASVTVKSLNSSKNLIALVGAHSHIYELAYISSHSDFIPSSGELIFEPGEREATIAVNILDDTVPEKEESFKVQLKNPKGGAEIGINDSVTITILSNDDAYGIVAFAQNSLYKQVEEMEQDSLVTLNVERLKGTYGRITIAWEADGSISDIFPTSGVILFTEGQVLSTITLTILADNIPELSEVVIVTLTRITTEGVEDSYKGATIDQDRSKSVITTLPNDSPFGLVGWRAASVFIRVAEPKENTTTLQLQIARDKGLLGDIAIHLRAQPNFLLHVDNQATENEDYVLQETIIIMKENIKEAHAEVSILPDDLPELEEGFIVTITEVNLVNSDFSTGQPSVRRPGMEIAEIMIEENDDPRGIFMFHVTRGAGEVITAYEVPPPLNVLQVPVVRLAGSFGAVNVYWKASPDSAGLEDFKPSHGILEFADKQVTAMIEITIIDDAEFELTETFNISLISVAGGGRLGDDVVVTVVIPQNDSPFGVFGFEEKTVMIDESLSSDDPDSYVTLTVVRSPGGKGTVRLEWTIDEKAKHNLSPLNGTLHFDETESQKTIVLHTLQDTVLEEDRRFTIQLISIDEVEISPVKGSASIIIRGDKRASGEVGIAPSSRHILIGEPSAKYNGTAIISLVRGPGILGEVTVFWRIFPPSVGEFAETSGKLTMRDEQSAVIVVIQALNDDIPEEKSFYEFQLTAVSEGGVLSESSSTANITVVASDSPYGRFAFSHEQLRVSEAQRVNITIIRSSGDFGHVRLWYKTMSGTAEAGLDFVPAAGELLFEAGEMRKSLHVEILDDDYPEGPEEFSLTITKVELQGRGYDFTIQENGLQIDQPPEIGNISIVRIIIMKNDNAEGIIEFDPKYTAFEVEEDVGLIMIPVVRLHGTYGYVTADFISQSSSASPGGVDYILHGSTVTFQHGQNLSFINISIIDDNESEFEEPIEILLTGATGGAVLGRHLVSRIIIAKSDSPFGVIRFLNQSKISIANPNSTMILSLVLERTGGLLGEIQVNWETVGPNSQEALLPQNRDIADPVSGLFYFGEGEGGVRTIILTIYPHEEIEVEETFIIKLHLVKGEAKLDSRAKDVTLTIQEFGDPNGVVQFAPETLSKKTYSEPLALEGPLLITFFVRRVKGTFGEIMVYWELSSEFDITEDFLSTSGFFTIADGESEASFDVHLLPDEVPEIEEDYVIQLVSVEGGAELDLEKSITWFSVYANDDPHGVFALYSDRQSILIGQNLIRSIQINITRLAGTFGDVAVGLRISSDHKEQPIVTENAERQLVVKDGATYKVDVVPIKNQHLTHDSCSVNVILNE

SEQ ID NO: 12259 - protein, 119 aa, Artificial Sequence; identical to SEQ ID NO: 10044
  Synthetic polypeptide

SEQ ID NO: 12260 - protein, 202 aa, Artificial Sequence; identical to SEQ ID NO: 10040
  Synthetic polypeptide

SEQ ID NO: 12261 - protein, 159 aa, Artificial Sequence; identical to SEQ ID NO: 10041
  Synthetic polypeptide

SEQ ID NO: 12262 - protein, 168 aa, Artificial Sequence; identical to SEQ ID NO: 10039
  Synthetic polypeptide

SEQ ID NO: 12263 - protein, 84 aa, Artificial Sequence
  Synthetic polypeptide
MGSRHFEGIYDHVGHFGRFQRVLYFICAFQNISCGIHYLASVFMGVTPHHVCRPPGNCHLDSLWDLGIRGPETKMLLPYCLLTK

SEQ ID NO: 12264 - protein, 41 aa, Artificial Sequence
  Synthetic polypeptide
MGVTPHHVCRPPGNCHLDSLWDLGIRGPETKMLLPYCLLTK

SEQ ID NO: 12265 - protein, 82 aa, Artificial Sequence
  Synthetic polypeptide
MRTLHAVSHPYSNSMRFQRVLYFICAFQNISCGIHYLASVFMGVTPHHVCRPPGNCHLDSLWDLGIRGPETKMLLPYCLLTK

SEQ ID NO: 12266 - protein, 32 aa, Artificial Sequence; identical to SEQ ID NO: 10048
  Synthetic polypeptide

SEQ ID NO: 12267 - protein, 322 aa, Artificial Sequence
  Synthetic polypeptide
MVLSQEEPDSARGTSEAQPLGPAPTGAAPPPGPGPSDSPEAAVEKVEVELAGPATAEPHEPPEPPEGGWGWLVMLAAMWCNGSVFGIQNACGVLFVSMLETFGSKDDDKMVFKTAWVGSLSMGMIFFCCPIVSVFTDLFGCRKTAVVGAAVGFVGLMSSSFVSSIEPLYLTYGIIFACGCSFAYQPSLVILGHYFKKRLGLVNGIVTAGSSVFTILLPLLLRVLIDSVGLFYTLRVLCIFMFVLFLAGFTYRPLATSTKDKESGGSGSSLFSRKKFSPPKKIFNFAIFKVTAYAVWAVGIPLALFGYFVPYVHLTGVGASRL

SEQ ID NO: 12268 - protein, 208 aa, Artificial Sequence
  Synthetic polypeptide
  misc_feature (1)..(1): Xaa can be any naturally occurring amino acid
XWVGSLSMGMIFFCCPIVSVFTDLFGCRKTAVVGAAVGFVGLMSSSFVSSIEPLYLTYGIIFACGCSFAYQPSLVILGHYFKKRLGLVNGIVTAGSSVFTILLPLLLRVLIDSVGLFYTLRVLCIFMFVLFLAGFTYRPLATSTKDKESGGSGSSLFSRKKFSPPKKIFNFAIFKVTAYAVWAVGIPLALFGYFVPYVHLTGVGASRL

SEQ ID NO: 12269 - protein, 62 aa, Artificial Sequence; identical to SEQ ID NO: 1241
  Synthetic polypeptide

SEQ ID NO: 12270 - protein, 376 aa, Artificial Sequence; identical to SEQ ID NO: 574
  Synthetic polypeptide

SEQ ID NO: 12271 - protein, 132 aa, Artificial Sequence; identical to SEQ ID NO: 1078
  Synthetic polypeptide

SEQ ID NO: 12272 - protein, 446 aa, Artificial Sequence; identical to SEQ ID NO: 441
  Synthetic polypeptide

SEQ ID NO: 12273 - protein, 97 aa, Artificial Sequence
  Synthetic polypeptide
MKAEGGDHSMINLSVQQVLSLWAHGTVLRNLTEMWYWIFLWALFSSLFVHGAAGVLMFVMLQRHRQGRVISVIAVSIGFLASVTGAMITSDNTEGVV

SEQ ID NO: 12274 - protein, 2056 aa, Artificial Sequence
  Synthetic polypeptide
MKNIYCLIPKLVNFATLGCLWISVVQCTVLNSCLKSCVTNLGQQLDLGTPHNLSEPCIQGCHFWNSVDQKNCALKCNDTYATVCERESCEVGCSSAEGAYEEEVLENADLPTAPFASSIGSHNMTLRWKSANFSGVKYIIQWKYAQLLGSWTYTKTVSRPSYVVKPLHPFTEYIFRVVWIFTAQLQLYSPPSPSYRTHPHGVPETAPLIRNIESSSPDTVEVSWDPPQFPGGPILGYNLRLISKNQKLDAGTQRTSFQFYSTLPNTIYRFSIAAVNEVGEGPEAESSITTSSSAVQQEEQWLFLSRKTSLRKRSLKHLVDEAHCLRLDAIYHNITGISVDVHQQIVYFSEGTLIWAKKAANMSDVSDLRIFYRGSGLISSISIDWLYQRMYFIMDELVCVCDLENCSNIEEITPPSISAPQKIVADSYNGYVFYLLRDGIYRADLPVPSGRCAEAVRIVESCTLKDFAIKPQAKRIIYFNDTAQVFMSTFLDGSASHLILPRIPFADVKSFACENNDFLVTDGKVIFQQDALSFNEFIVGCDLSHIEEFGFGNLVIFGSSSQLHPLPGRPQELSVLFGSHQALVQWKPPALAIGASPSAWQNWTYEVKVSTQDPPEVTHIFLNISGTMLNVPELQSAMKYKVSVRASSPKRPGPWSEPSVGTTLVPASEPPFIMAVKEDGLWSKPLNSFGPGEFLSSDIGNVSDMDWYNNSLYYSDTKGDVFVWLLNGTDISENYHLPSIAGAGALAFEWLGHFLYWAGKTYVIQRQSVLTGHTDIVTHVKLLVNDMVVDSVGGYLYWTTLYSVESTRLNGESSLVLQTQPWFSGKKVIALTLDLSDGLLYWLVQDSQCIHLYTAVLRGQSTGDTTITEFAAWSTSEISQNALMYYSGRLFWINGFRIITTQEIGQKTSVSVLEPARFNQFTIIQTSLKPLPGNFSFTPKVIPDSVQESSFRIEGNASSFQILWNGPPAVDWGVVFYSVEFSAHSKFLASEQHSLPVFTVEGLEPYALFNLSVTPYTYWGKGPKTSLSLRAPETVPSAPENPRIFILPSGKCCNKNEVVVEFRWNKPKHENGVLTKFEIFYNISNQSITNKTCEDWIAVNVTPSVMSFQLEGMSPRCFIAFQVRAFTSKGPGPYADVVKSTTSEINPFPHLITLLGNKIVFLDMDQNQVVWTFSAERVISAVCYTADNEMGYYAEGDSLFLLHLHNRSSSELFQDSLVFDITVITIDWISRHLYFALKESQNGMQVFDVDLEHKVKYPREVKIHNRNSTIISFSVYPLLSRLYWTEVSNFGYQMFYYSIISHTLHRILQPTATNQQNKRNQCSCNVTEFELSGAMAIDTSNLEKPLIYFAKAQEIWAMDLEGCQCWRVITVPAMLGKTLVSLTVDGDLIYWIITAKDSTQIYQAKKGNGAIVSQVKALRSRHILAYSSVMQPFPDKAFLSLASDTVEPTILNATNTSLTIRLPLAKTNLTWYGITSPTPTYLVYYAEVNDRKNSSDLKYRILEFQDSIALIEDLQPFSTYMIQIAVKNYYSDPLEHLPPGKEIWGKTKNGVPEAVQLINTTVRSDTSLIISWRESHKPNGPKESVRYQLAISHLALIPETPLRQSEFPNGRLTLLVTRLSGGNIYVLKVLACHSEEMWCTESHPVTVEMFNTPEKPYSLVPENTSLQFNWKAPLNVNLIRFWVELQKWKYNEFYHVKTSCSQGPAYVCNITNLQPYTSYNVRVVVVYKTGENSTSLPESFKTKAGVPNKPGIPKLLEGSKNSIQWEKAEDNGCRITYYILEIRKSTSNNLQNQNLRWKMTFNGSCSSVCTWKSKNLKGIFQFRVVAANNLGFGEYSGISENIILVGDDFWIPETSFILTIIVGIFLVVTIPLTFVWHRRLKNQKSAKEGVTVLINEDKELAELRGLAAGVGLANACYAIHTLPTQEEIENLPAFPREKLTLRLLLGSGAFGEVYEGTAVDILGVGSGEIKVAVKTLKKGSTDQEKIEFLKEAHLMSKFNHPNILKQLGVCLLNEPQYIILELMEGGDLLTYLRKARMATCLEQCTAHYEPWKYCGM

SEQ ID NO: 12275 - protein, 2062 aa, Artificial Sequence
  Synthetic polypeptide
MKNIYCLIPKLVNFATLGCLWISVVQCTVLNSCLKSCVTNLGQQLDLGTPHNLSEPCIQGCHFWNSVDQKNCALKCRESCEVGCSSAEGAYEEEVLENADLPTAPFASSIGSHNMTLRWKSANFSGVKYIIQWKYAQLLGSWTYTKTVSRPSYVVKPLHPFTEYIFRVVWIFTAQLQLYSPPSPSYRTHPHGVPETAPLIRNIESSSPDTVEVSWDPPQFPGGPILGYNLRLISKNQKLDAGTQRTSFQFYSTLPNTIYRFSIAAVNEVGEGPEAESSITTSSSAVQQEEQWLFLSRKTSLRKRSLKHLVDEAHCLRLDAIYHNITGISVDVHQQIVYFSEGTLIWAKKAANMSDVSDLRIFYRGSGLISSISIDWLYQRMYFIMDELVCVCDLENCSNIEEITPPSISAPQKIVADSYNGYVFYLLRDGIYRADLPVPSGRCAEAVRIVESCTLKDFAIKPQAKRIIYFNDTAQVFMSTFLDGSASHLILPRIPFADVKSFACENNDFLVTDGKVIFQQDALSFNEFIVGCDLSHIEEFGFGNLVIFGSSSQLHPLPGRPQELSVLFGSHQALVQWKPPALAIGANVILISDIIELFELGPSAWQNWTYEVKVSTQDPPEVTHIFLNISGTMLNVPELQSAMKYKVSVRASSPKRPGPWSEPSVGTTLVPASEPPFIMAVKEDGLWSKPLNSFGPGEFLSSDIGNVSDMDWYNNSLYYSDTKGDVFVWLLNGTDISENYHLPSIAGAGALAFEWLGHFLYWAGKTYVIQRQSVLTGHTDIVTHVKLLVNDMVVDSVGGYLYWTTLYSVESTRLNGESSLVLQTQPWFSGKKVIALTLDLSDGLLYWLVQDSQCIHLYTAVLRGQSTGDTTITEFAAWSTSEISQNALMYYSGRLFWINGFRIITTQEIGQKTSVSVLEPARFNQFTIIQTSLKPLPGNFSFTPKVIPDSVQESSFRIEGNASSFQILWNGPPAVDWGVVFYSVEFSAHSKFLASEQHSLPVFTVEGLEPYALFNLSVTPYTYWGKGPKTSLSLRAPETVPSAPENPRIFILPSGKCCNKNEVVVEFRWNKPKHENGVLTKFEIFYNISNQSITNKTCEDWIAVNVTPSVMSFQLEGMSPRCFIAFQVRAFTSKGPGPYADVVKSTTSEINPFPHLITLLGNKIVFLDMDQNQVVWTFSAERVISAVCYTADNEMGYYAEGDSLFLLHLHNRSSSELFQDSLVFDITVITIDWISRHLYFALKESQNGMQVFDVDLEHKVKYPREVKIHNRNSTIISFSVYPLLSRLYWTEVSNFGYQMFYYSIISHTLHRILQPTATNQQNKRNQCSCNVTEFELSGAMAIDTSNLEKPLIYFAKAQEIWAMDLEGCQCWRVITVPAMLAGKTLVSLTVDGDLIYWIITAKDSTQIYQAKKGNGAIVSQVKALRSRHILAYSSVMQPFPDKAFLSLASDTVEPTILNATNTSLTIRLPLAKTNLTWYGITSPTPTYLVYYAEVNDRKNSSDLKYRILEFQDSIALIEDLQPFSTYMIQIAVKNYYSDPLEHLPPGKEIWGKTKNGVPEAVQLINTTVRSDTSLIISWRESHKPNGPKESVRYQLAISHLALIPETPLRQSEFPNGRLTLLVTRLSGGNIYVLKVLACHSEEMWCTESHPVTVEMFNTPEKPYSLVPENTSLQFNWKAPLNVNLIRFWVELQKWKYNEFYHVKTSCSQGPAYVCNITNLQPYTSYNVRVVVVYKTGENSTSLPESFKTKAGVPNKPGIPKLLEGSKNSIQWEKAEDNGCRITYYILEIRKSTSNNLQNQNLRWKMTFNGSCSSVCTWKSKNLKGIFQFRVVAANNLGFGEYSGISENIILVGDDFWIPETSFILTIIVGIFLVVTIPLTFVWHRRLKNQKSAKEGVTVLINEDKELAELRGLAAGVGLANACYAIHTLPTQEEIENLPAFPREKLTLRLLLGSGAFGEVYEGTAVDILGVGSGEIKVAVKTLKKGSTDQEKIEFLKEAHLMSKFNHPNILKQLGVCLLNEPQYIILELMEGGDLLTYLRKARMATCLEQCTAHYEPWKYCGM

SEQ ID NO: 12276 - protein, 1439 aa, Artificial Sequence
  Synthetic polypeptide
MKNIYCLIPKLVNFATLGCLWISVVQCTVLNSCLKSCVTNLGQQLDLGTPHNLSEPCIQGCHFWNSVDQKNCALKCNDTYATVCERESCEVGCSSAEGAYEEEVLENADLPTAPFASSIGSHNMTLRWKSANFSGVKYIIQWKYAQLLGSWTYTKTVSRPSYVVKPLHPFTEYIFRVVWIFTAQLQLYSPPSPSYRTHPHGVPETAPLIRNIESSSPDTVEVSWDPPQFPGGPILGYNLRLISKNQKLDAGTQRTSFQFYSTLPNTIYRFSIAAVNEVGEGPEAESSITTSSSAVQQEEQWLFLSRKTSLRKRSLKHLVDEAHCLRLDAIYHNITGISVDVHQQIVYFSEGTLIWAKKAANMSDVSDLRIFYRGSGLISSISIDWLYQRMYFIMDELVCVCDLENCSNIEEITPPSISAPQKIVADSYNGYVFYLLRDGIYRADLPVPSGRCAEAVRIVESCTLKDFAIKPQAKRIIYFNDTAQVFMSTFLDGSASHLILPRIPFADVKSFACENNDFLVTDGKVIFQQDALSFNEFIVGCDLSHIEEFGFGNLVIFGSSSQLHPLPGRPQELSVLFGSHQALVQWKPPALAIGASPSAWQNWTYEVKVSTQDPPEVTHIFLNISGTMLNVPELQSAMKYKVSVRASSPKRPGPWSEPSVGTTLVPASEPPFIMAVKEDGLWSKPLNSFGPGEFLSSDIGNVSDMDWYNNSLYYSDTKGDVFVWLLNGTDISENYHLPSIAGAGALAFEWLGHFLYWAGKTYVIQRQSVLTGHTDIVTHVKLLVNDMVVDSVGGYLYWTTLYSVESTRLNGESSLVLQTQPWFSGKKVIALTLDLSDGLLYWLVQDSQCIHLYTAVLRGQSTGDTTITEFAAWSTSEISQNALMYYSGRLFWINGFRIITTQEIGQKTSVSVLEPARFNQFTIIQTSLKPLPGNFSFTPKVIPDSVQESSFRIEGNASSFQILWNGPPAVDWGVVFYSVEFSAHSKFLASEQHSLPVFTVEGLEPYALFNLSVTPYTYWGKGPKTSLSLRAPETVPSAPENPRIFILPSGKCCNKNEVVVEFRWNKPKHENGVLTKFEIFYNISNQSITNKTCEDWIAVNVTPSVMSFQLEGMSPRCFIAFQVRAFTSKGPGPYADVVKSTTSEINPFPHLITLLGNKIVFLDMDQNQVVWTFSAERVISAVCYTADNEMGYYAEGDSLFLLHLHNRSSSELFQDSLVFDITVITIDWISRHLYFALKESQNGMQVFDVDLEHKVKYPREVKIHNRNSTIISFSVYPLLSRLYWTEVSNFGYQMFYYSIISHTLHRILQPTATNQQNKRNQCSCNVTEFELSGAMAIDTSNLEKPLIYFAKAQEIWAMDLEGCQCWRVITVPAMLGKTLVSLTVDGDLIYWIITAKDSTQIYQAKKGNGAIVSQVKALRSRHILAYSSVMQPFPEHQNT

SEQ ID NO: 12277 - protein, 1445 aa, Artificial Sequence
  Synthetic polypeptide
MKNIYCLIPKLVNFATLGCLWISVVQCTVLNSCLKSCVTNLGQQLDLGTPHNLSEPCIQGCHFWNSVDQKNCALKCRESCEVGCSSAEGAYEEEVLENADLPTAPFASSIGSHNMTLRWKSANFSGVKYIIQWKYAQLLGSWTYTKTVSRPSYVVKPLHPFTEYIFRVVWIFTAQLQLYSPPSPSYRTHPHGVPETAPLIRNIESSSPDTVEVSWDPPQFPGGPILGYNLRLISKNQKLDAGTQRTSFQFYSTLPNTIYRFSIAAVNEVGEGPEAESSITTSSSAVQQEEQWLFLSRKTSLRKRSLKHLVDEAHCLRLDAIYHNITGISVDVHQQIVYFSEGTLIWAKKAANMSDVSDLRIFYRGSGLISSISIDWLYQRMYFIMDELVCVCDLENCSNIEEITPPSISAPQKIVADSYNGYVFYLLRDGIYRADLPVPSGRCAEAVRIVESCTLKDFAIKPQAKRIIYFNDTAQVFMSTFLDGSASHLILPRIPFADVKSFACENNDFLVTDGKVIFQQDALSFNEFIVGCDLSHIEEFGFGNLVIFGSSSQLHPLPGRPQELSVLFGSHQALVQWKPPALAIGANVILISDIIELFELGPSAWQNWTYEVKVSTQDPPEVTHIFLNISGTMLNVPELQSAMKYKVSVRASSPKRPGPWSEPSVGTTLVPASEPPFIMAVKEDGLWSKPLNSFGPGEFLSSDIGNVSDMDWYNNSLYYSDTKGDVFVWLLNGTDISENYHLPSIAGAGALAFEWLGHFLYWAGKTYVIQRQSVLTGHTDIVTHVKLLVNDMVVDSVGGYLYWTTLYSVESTRLNGESSLVLQTQPWFSGKKVIALTLDLSDGLLYWLVQDSQCIHLYTAVLRGQSTGDTTITEFAAWSTSEISQNALMYYSGRLFWINGFRIITTQEIGQKTSVSVLEPARFNQFTIIQTSLKPLPGNFSFTPKVIPDSVQESSFRIEGNASSFQILWNGPPAVDWGVVFYSVEFSAHSKFLASEQHSLPVFTVEGLEPYALFNLSVTPYTYWGKGPKTSLSLRAPETVPSAPENPRIFILPSGKCCNKNEVVVEFRWNKPKHENGVLTKFEIFYNISNQSITNKTCEDWIAVNVTPSVMSFQLEGMSPRCFIAFQVRAFTSKGPGPYADVVKSTTSEINPFPHLITLLGNKIVFLDMDQNQVVWTFSAERVISAVCYTADNEMGYYAEGDSLFLLHLHNRSSSELFQDSLVFDITVITIDWISRHLYFALKESQNGMQVFDVDLEHKVKYPREVKIHNRNSTIISFSVYPLLSRLYWTEVSNFGYQMFYYSIISHTLHRILQPTATNQQNKRNQCSCNVTEFELSGAMAIDTSNLEKPLIYFAKAQEIWAMDLEGCQCWRVITVPAMLAGKTLVSLTVDGDLIYWIITAKDSTQIYQAKKGNGAIVSQVKALRSRHILAYSSVMQPFPEHQNT

SEQ ID NO: 12278 - protein, 1442 aa, Artificial Sequence
  Synthetic polypeptide
MKNIYCLIPKLVNFATLGCLWISVVQCTVLNSCLKSCVTNLGQQLDLGTPHNLSEPCIQGCHFWNSVDQKNCALKCNDTYATVCERESCEVGCSSAEGAYEEEVLENADLPTAPFASSIGSHNMTLRWKSANFSGVKYIIQWKYAQLLGSWTYTKTVSRPSYVVKPLHPFTEYIFRVVWIFTAQLQLYSPPSPSYRTHPHGVPETAPLIRNIESSSPDTVEVSWDPPQFPGGPILGYNLRLISKNQKLDAGTQRTSFQFYSTLPNTIYRFSIAAVNEVGEGPEAESSITTSSSAVQQEEQWLFLSRKTSLRKRSLKHLVDEAHCLRLDAIYHNITGISVDVHQQIVYFSEGTLIWAKKAANMSDVSDLRIFYRGSGLISSISIDWLYQRMYFIMDELVCVCDLENCSNIEEITPPSISAPQKIVADSYNGYVFYLLRDGIYRADLPVPSGRCAEAVRIVESCTLKDFAIKPQAKRIIYFNDTAQVFMSTFLDGSASHLILPRIPFADVKSFACENNDFLVTDGKVIFQQDALSFNEFIVGCDLSHIEEFGFGNLVIFGSSSQLHPLPGRPQELSVLFGSHQALVQWKPPALAIGASPSAWQNWTYEVKVSTQDPPEVTHIFLNISGTMLNVPELQSAMKYKVSVRASSPKRPGPWSEPSVGTTLVPASEPPFIMAVKEDGLWSKPLNSFGPGEFLSSDIGNVSDMDWYNNSLYYSDTKGDVFVWLLNGTDISENYHLPSIAGAGALAFEWLGHFLYWAGKTYVIQRQSVLTGHTDIVTHVKLLVNDMVVDSVGGYLYWTTLYSVESTRLNGESSLVLQTQPWFSGKKVIALTLDLSDGLLYWLVQDSQCIHLYTAVLRGQSTGDTTITEFAAWSTSEISQNALMYYSGRLFWINGFRIITTQEIGQKTSVSVLEPARFNQFTIIQTSLKPLPGNFSFTPKVIPDSVQESSFRIEGNASSFQILWNGPPAVDWGVVFYSVEFSAHSKFLASEQHSLPVFTVEGLEPYALFNLSVTPYTYWGKGPKTSLSLRAPETVPSAPENPRIFILPSGKCCNKNEVVVEFRWNKPKHENGVLTKFEIFYNISNQSITNKTCEDWIAVNVTPSVMSFQLEGMSPRCFIAFQVRAFTSKGPGPYADVVKSTTSEINPFPHLITLLGNKIVFLDMDQNQVVWTFSAERVISAVCYTADNEMGYYAEGDSLFLLHLHNRSSSELFQDSLVFDITVITIDWISRHLYFALKESQNGMQVFDVDLEHKVKYPREVKIHNRNSTIISFSVYPLLSRLYWTEVSNFGYQMFYYSIISHTLHRILQPTATNQQNKRNQCSCNVTEFELSGAMAIDTSNLEKPLIYFAKAQEIWAMDLEGCQCWRVITVPAMLGKTLVSLTVDGDLIYWIITAKDSTQIYQAKKGNGAIVSQVKALRSRHILAYSSVMQPFPERREKEKF

SEQ ID NO: 12279 - protein, 1448 aa, Artificial Sequence
  Synthetic polypeptide
MKNIYCLIPKLVNFATLGCLWISVVQCTVLNSCLKSCVTNLGQQLDLGTPHNLSEPCIQGCHFWNSVDQKNCALKCRESCEVGCSSAEGAYEEEVLENADLPTAPFASSIGSHNMTLRWKSANFSGVKYIIQWKYAQLLGSWTYTKTVSRPSYVVKPLHPFTEYIFRVVWIFTAQLQLYSPPSPSYRTHPHGVPETAPLIRNIESSSPDTVEVSWDPPQFPGGPILGYNLRLISKNQKLDAGTQRTSFQFYSTLPNTIYRFSIAAVNEVGEGPEAESSITTSSSAVQQEEQWLFLSRKTSLRKRSLKHLVDEAHCLRLDAIYHNITGISVDVHQQIVYFSEGTLIWAKKAANMSDVSDLRIFYRGSGLISSISIDWLYQRMYFIMDELVCVCDLENCSNIEEITPPSISAPQKIVADSYNGYVFYLLRDGIYRADLPVPSGRCAEAVRIVESCTLKDFAIKPQAKRIIYFNDTAQVFMSTFLDGSASHLILPRIPFADVKSFACENNDFLVTDGKVIFQQDALSFNEFIVGCDLSHIEEFGFGNLVIFGSSSQLHPLPGRPQELSVLFGSHQALVQWKPPALAIGANVILISDIIELFELGPSAWQNWTYEVKVSTQDPPEVTHIFLNISGTMLNVPELQSAMKYKVSVRASSPKRPGPWSEPSVGTTLVPASEPPFIMAVKEDGLWSKPLNSFGPGEFLSSDIGNVSDMDWYNNSLYYSDTKGDVFVWLLNGTDISENYHLPSIAGAGALAFEWLGHFLYWAGKTYVIQRQSVLTGHTDIVTHVKLLVNDMVVDSVGGYLYWTTLYSVESTRLNGESSLVLQTQPWFSGKKVIALTLDLSDGLLYWLVQDSQCIHLYTAVLRGQSTGDTTITEFAAWSTSEISQNALMYYSGRLFWINGFRIITTQEIGQKTSVSVLEPARFNQFTIIQTSLKPLPGNFSFTPKVIPDSVQESSFRIEGNASSFQILWNGPPAVDWGVVFYSVEFSAHSKFLASEQHSLPVFTVEGLEPYALFNLSVTPYTYWGKGPKTSLSLRAPETVPSAPENPRIFILPSGKCCNKNEVVVEFRWNKPKHENGVLTKFEIFYNISNQSITNKTCEDWIAVNVTPSVMSFQLEGMSPRCFIAFQVRAFTSKGPGPYADVVKSTTSEINPFPHLITLLGNKIVFLDMDQNQVVWTFSAERVISAVCYTADNEMGYYAEGDSLFLLHLHNRSSSELFQDSLVFDITVITIDWISRHLYFALKESQNGMQVFDVDLEHKVKYPREVKIHNRNSTIISFSVYPLLSRLYWTEVSNFGYQMFYYSIISHTLHRILQPTATNQQNKRNQCSCNVTEFELSGAMAIDTSNLEKPLIYFAKAQEIWAMDLEGCQCWRVITVPAMLAGKTLVSLTVDGDLIYWIITAKDSTQIYQAKKGNGAIVSQVKALRSRHILAYSSVMQPFPERREKEKF

SEQ ID NO: 12280 - protein, 115 aa, Artificial Sequence
  Synthetic polypeptide
MGYCSGRCTLIFICGMQLVCVLERQIFDFLGYQWAPILANFVHIIIVILGLFGTIQYRPRYITGILSFPKHQESLSLKFTCLTEVSSSKRNAIVLKPLRRNLIKQPGKINHWRGD

SEQ ID NO: 12281 - protein, 100 aa, Artificial Sequence
  Synthetic polypeptide
MKIVCVLERQIFDFLGYQWAPILANFVHIIIVILGLFGTIQYRPRYITGILSFPKHQESLSLKFTCLTEVSSSKRNAIVLKPLRRNLIKQPGKINHWRGD

SEQ ID NO: 12282 - protein, 127 aa, Artificial Sequence
  Synthetic polypeptide
MGYCSGRCTLIFICGMQLVCVLERQIFDFLGYQWAPILANFVHIIIVILGLFGTIQYRPRYITGYAVWLVLWVTWNVFVICFYLEAGDLSKKDPRLLLSSLAACSSIEDEKSISSTGNENYCLVFLT

SEQ ID NO: 12283 - protein, 112 aa, Artificial Sequence
  Synthetic polypeptide
MKIVCVLERQIFDFLGYQWAPILANFVHIIIVILGLFGTIQYRPRYITGYAVWLVLWVTWNVFVICFYLEAGDLSKKDPRLLLSSLAACSSIEDEKSISSTGNENYCLVFLT

SEQ ID NO: 12284 - protein, 212 aa, Artificial Sequence
  Synthetic polypeptide
MDTTAAAALPAFVALLLLSPWPLLGSAQGQFSAGGCTFDDGPGACDYHQDLYDDFEWVHVSAQEPHYLPPEMPQGSYMIVDSSDHDPGEKARLQLPTMKENDTHCIDFSYLLYSQKGLNPGTLNILVRVNKGPLANPIWNVTGFTGRDWLRAELAVSTFWPNEYQQQVTILEAESSLHQTTKPASALILDFAASRTVRNKFVLNYPVSGILL

SEQ ID NO: 12285 - protein, 95 aa, Artificial Sequence
  Synthetic polypeptide
  misc_feature (1)..(1): Xaa can be any naturally occurring amino acid
XNPGTLNILVRVNKGPLANPIWNVTGFTGRDWLRAELAVSTFWPNEYQQQVTILEAESSLHQTTKPASALILDFAASRTVRNKFVLNYPVSGILL

SEQ ID NO: 12286 - protein, 186 aa, Artificial Sequence; identical to SEQ ID NO: 900
  Synthetic polypeptide

SEQ ID NO: 12287 - protein, 69 aa, Artificial Sequence
  Synthetic polypeptide
  misc_feature (1)..(1): Xaa can be any naturally occurring amino acid
XNPGTLNILVRVNKGPLANPIWNVTGFTGRDWLRAELAVSTFWPNEYQDAATSHHLGSREQPSPDNQTC

SEQ ID NO: 12288 - protein, 171 aa, Artificial Sequence
  Synthetic polypeptide
MDTTAAAALPAFVALLLLSPWPLLGSAQGQFSAGGCTFDDGPGACDYHQDLYDDFEWVHVSAQEPHYLPPEMPQGSYMIVDSSDHDPGEKARLQLPTMKENDTHCIDFSYLLYSQKGLNPGTLNILVRVNKGPLANPIWNVTGFTGRDWLRAELAVSTFWPNEYQVKRPEY

SEQ ID NO: 12289 - protein, 54 aa, Artificial Sequence
  Synthetic polypeptide
  misc_feature (1)..(1): Xaa can be any naturally occurring amino acid
XNPGTLNILVRVNKGPLANPIWNVTGFTGRDWLRAELAVSTFWPNEYQVKRPEY

SEQ ID NO: 12290 - protein, 91 aa, Artificial Sequence; identical to SEQ ID NO: 1162
  Synthetic polypeptide

SEQ ID NO: 12291 - protein, 34 aa, Artificial Sequence; identical to SEQ ID NO: 1350
  Synthetic polypeptide

SEQ ID NO: 12292 - protein, 498 aa, Artificial Sequence
  Synthetic polypeptide
MVPVENTEGPSLLNQKGTAVETEGSGSRHPPWARGCGMFTFLSSVTAAVSGLLVGYELGIISGALLQIKTLLALSCHEQEMVVSSLVIGALLASLTGGVLIDRYGRRTAIILSSCLLGLGSLVLILSLSYTVLIVGRIAIGVSISLSSIATCVYIAEIAPQHRRGLLVSLNELMIVIGILSAYISNYAFANVFHGWKYMFGLVIPLGVLQAIAMYFLPPSPRFLVMKGQEGAASKVLGRLRALSDTTEELTVIKSSLKDEYQYSFWDLFRSKDNMRTRIMIGLTLVFFVQITGQPNILFYASTVLKSVGFQSNEAASLASTGVGVVKVISTIPATLLVDHVGSKTFLCIGSSVMAASLVTMGIVNLNIHMNFTHICRSHNSINQSLDESVIYGPGNLSTNNNTLRDHFKGISSHSRSSLMPLRNDVDKRGETTSASLLNAGLSHTEYQIVTDPGDVPAFLKWLSLASLLVYVAAFSIGLGPSIESIFPENIKIGEILA

SEQ ID NO: 12293 - protein, 122 aa, Artificial Sequence
  Synthetic polypeptide
MVNKDMNGFPVKKCSAFQFFKKRVRRWIKSPMVSVDKHQSPSLKYTGSSMVHIPPGEPDFESSLCQTCLGEHAFQRGVLPQENESCSWETQSGCEVREPCNHANILTKPDPRTFWTNDDPGP

SEQ ID NO: 12294 - protein, 91 aa, Artificial Sequence
  Synthetic polypeptide
MVSVDKHQSPSLKYTGSSMVHIPPGEPDFESSLCQTCLGEHAFQRGVLPQENESCSWETQSGCEVREPCNHANILTKPDPRTFWTNDDPGP

SEQ ID NO: 12295 - protein, 164 aa, Artificial Sequence; identical to SEQ ID NO: 957
  Synthetic polypeptide

SEQ ID NO: 12296 - protein, 91 aa, Artificial Sequence
  Synthetic polypeptide
MALVPCQVLRMAILLSYCSILCNYKAIEMPSHQTYGGSWKFLTFIDLFVVAVFWIIYAYDREMIYPKLLDNFIPGWLNHGMFNLKRATSFP

SEQ ID NO: 12297 - protein, 143 aa, Artificial Sequence
  Synthetic polypeptide
MALVPCQVLRMAILLSYCSILCNYKAIEMPSHQTYGGSWKFLTFIDLVIQAVFFGICVLTDLSSLLTRGSGNQEQERQLKKLISLRDWMLAVLAFPVGVFVVAVFWIIYAYDREMIYPKLLDNFIPGWLNHGMFNLKRATSFP

SEQ ID NO: 12298 - protein, 55 aa, Artificial Sequence
  Synthetic polypeptide
MLAVLAFPVGVFVVAVFWIIYAYDREMIYPKLLDNFIPGWLNHGMFNLKRATSFP

SEQ ID NO: 12299 - protein, 139 aa, Artificial Sequence
  Synthetic polypeptide
MTKVLRMAILLSYCSILCNYKAIEMPSHQTYGGSWKFLTFIDLVIQAVFFGICVLTDLSSLLTRGSGNQEQERQLKKLISLRDWMLAVLAFPVGVFVVAVFWIIYAYDREMIYPKLLDNFIPGWLNHGMFNLKRATSFP

SEQ ID NO: 12300 - protein, 311 aa, Artificial Sequence
  Synthetic polypeptide
MRKFNIRKVLDGLTAGSSSASQQQQQQHPPGNREPEIQETLQSEHFQLCKTVRHGFPYQPSALAFDPVQKILAVGTQTGALRLFGRPGVECYCQHDSGAAVIQLQFLINEGALVSALADDTLHLWNLRQKRPAILHSLKFCRERVTFCHLPFQSKWLYVGTERGNIHIVNVESFTLSGYVIMWNKAIELSSKSHPGPVVHISDNPMDEGKLLIGFESGTVVLWDLKSKKADYRYTYDEAIHSVAWHHEGKQFICSHSDGTLTIWNVRSPAKPVQTITPHGKQLKDGKKPEPCKPILKVEFKTTRSGSRRTN

SEQ ID NO: 12301 - protein, 310 aa, Artificial Sequence
  Synthetic polypeptide
MRKFNIRKVLDGLTAGSSSASQQQQQQHPPGNREPEIQETLQSEHFQLCKTVRHGFPYQPSALAFDPVQKILAVGTQTGALRLFGRPGVECYCQHDSGAAVIQLQFLINEGALVSALADDTLHLWNLRQKRPAILHSLKFCRERVTFCHLPFQSKWLYVGTERGNIHIVNVESFTLSGYVIMWNKAIELSSKSHPGPVVHISDNPMDEGKLLIGFESGTVVLWDLKSKKADYRYTYDEAIHSVAWHHEGKQFICSHSDGTLTIWNVRSPAKPVQTITPHGKQLKDGKKPEPCKPILKVEFKTTRSGRRTN

SEQ ID NO: 12302 - protein, 319 aa, Artificial Sequence
  Synthetic polypeptide
MRKFNIRKVLDGLTAGSSSASQQQQQQHPPGNREPEIQETLQSEHFQLCKTVRHGFPYQPSALAFDPVQKILAVGTQTGALRLFGRPGVECYCQHDSGAAVIQLQFLINEGALVSALADDTLHLWNLRQKRPAILHSLKFCRERVTFCHLPFQSKWLYVGTERGNIHIVNVESFTLSGYVIMWNKAIELSSKSHPGPVVHISDNPMDEGKLLIGFESGTVVLWDLKSKKADYRYTYDEAIHSVAWHHEGKQFICSHSDGTLTIWNVRSPAKPVQTITPHGKQLKDGKKPEPCKPILKVEFKTTRSGSGALLKRYPKMWK

SEQ ID NO: 12303 - protein, 50 aa, Artificial Sequence
  Synthetic polypeptide
IELYGSNDPYRREPRSPRKSRQPSGVCDTRKDISLKLSVLIYKMKVVTPS

SEQ ID NO: 12304 - protein, 389 aa, Artificial Sequence
  Synthetic polypeptide
MHGKSTAVLEMDYSIVDFLTLCETPYPNDFQEPYAVVVLLEKDLVLIDLAQNGYPIFENPYPLSIHESPVTCCEYFADCPVDLIPALYSVGARQKRQGYSKKEWPINGGNWGLGAQSYPEIIITGHADGSVKFWDASAITLQVLYKLKTSKVFEKSRNKDDRPNTDIVDEDPYAIQIISWCPESRMLCIAGVSAHVIIYRFSKQEVITEVIPMLEVRLLYEINDVETPEGEQPPPLPTPVGGSNPQPIPPQSHPSTSSSSSDGLRDNVPCLKVKNSPLKQSPGYQTELVIQLVWVGGEPPQQITSLAVNSSYGLVVFGNCNGIAMVDYLQKAVLLNLGTIELYGSNDPYRREPRSPRKSRQPSGVCDTRKDISLKLSVLIYKMKVVTPS

SEQ ID NO: 12305 - protein, 718 aa, Artificial Sequence
  Synthetic polypeptide
MRKFNIRKVLDGLTAGSSSASQQQQQQHPPGNREPEIQETLQSEHFQLCKTVRHGFPYQPSALAFDPVQKILAVGTQTGALRLFGRPGVECYCQHDSGAAVIQLQFLINEGALVSALADDTLHLWNLRQKRPAILHSLKFCRERVTFCHLPFQSKWLYVGTERGNIHIVNVESFTLSGYVIMWNKAIELSSKSHPGPVVHISDNPMDEGKLLIGFESGTVVLWDLKSKKADYRYTYDEAIHSVAWHHEGKQFICSHSDGTLTIWNVRSPAKPVQTITPHGKQLKDGKKPEPCKPILKVEFKTTRSGEPFIILSGGLSYDTVGRRPCLTVMHGKSTAVLEMDYSIVDFLTLCETPYPNDFQEPYAVVVLLEKDLVLIDLAQNGYPIFENPYPLSIHESPVTCCEYFADCPVDLIPALYSVGARQKRQGYSKKEWPINGGNWGLGAQSYPEIIITGHADGSVKFWDASAITLQVLYKLKTSKVFEKSRNKDDRPNTDIVDEDPYAIQIISWCPESRMLCIAGVSAHVIIYRFSKQEVITEVIPMLEVRLLYEINDVETPEGEQPPPLPTPVGGSNPQPIPPQSHPSTSSSSSDGLRDNVPCLKVKNSPLKQSPGYQTELVIQLVWVGGEPPQQITSLAVNSSYGLVVFGNCNGIAMVDYLQKAVLLNLGTIELYGSNDPYRREPRSPRKSRQPSGVCDTRKDISLKLSVLIYKMKVVTPS

SEQ ID NO: 12306 - protein, 60 aa, Artificial Sequence
  Synthetic polypeptide
  misc_feature (1)..(1): Xaa can be any naturally occurring amino acid
XKAVLLNLGTIELYGSNDPYRREPRSPRKSRQPSGVCDTRKDISLKLSVLIYKMKVVTPS

SEQ ID NO: 12307 - protein, 310 aa, Artificial Sequence
  Synthetic polypeptide
MEDKVLTVVKVLNGICDKTIRSTTDPVMSQCACLEEVHLPNIKPGEGLGMYIKSTYDGLHVITGTTENSPADRSQKIHAGDEVIQVNQQTVVGWQLKNLVKKLRENPTGVVLLLKKRPTGSFNFTPAPLKNLRWKPPLVQTSPPPATTQSPESTMDTSLKKEKSAILDLYIPPPPAVPYSPRDENGSFVYGGSSKCKQPLPGPKGSESPNSFLDQESRRRRFTIADSDQLPGYSVETNILPTKMREKTPSYGKPRPLSMPADGNWMGIVDPFARPRGHGRKGLSKETFQMKRNAPCLCCARWELLDTSGY

SEQ ID NO: 12308 - protein, 485 aa, Artificial Sequence
  Synthetic polypeptide
MEPVTKWSPKQVVDWTRGLDDCLQQYVHKFEREKINGEQLLQISHQDLEELGVTRIGHQELVLEAVDLLCALNYGLETDNMKNLVLKLRASSHNLQNYISSRRKSPAYDGNTSRKAPNEFLTSVVELIGAAKALLAWLDRAPFTGITDFSVTKNKIIQLCLDLTTTVQKDCFVAEMEDKVLTVVKVLNGICDKTIRSTTDPVMSQCACLEEVHLPNIKPGEGLGMYIKSTYDGLHVITGTTENSPADRSQKIHAGDEVIQVNQQTVVGWQLKNLVKKLRENPTGVVLLLKKRPTGSFNFTPAPLKNLRWKPPLVQTSPPPATTQSPESTMDTSLKKEKSAILDLYIPPPPAVPYSPRDENGSFVYGGSSKCKQPLPGPKGSESPNSFLDQESRRRRFTIADSDQLPGYSVETNILPTKMREKTPSYGKPRPLSMPADGNWMGIVDPFARPRGHGRKGLSKETFQMKRNAPCLCCARWELLDTSGY

SEQ ID NO: 12309 - protein, 405 aa, Artificial Sequence
  Synthetic polypeptide
MKNLVLKLRASSHNLQNYISSRRKSPAYDGNTSRKAPNEFLTSVVELIGAAKALLAWLDRAPFTGITDFSVTKNKIIQLCLDLTTTVQKDCFVAEMEDKVLTVVKVLNGICDKTIRSTTDPVMSQCACLEEVHLPNIKPGEGLGMYIKSTYDGLHVITGTTENSPADRSQKIHAGDEVIQVNQQTVVGWQLKNLVKKLRENPTGVVLLLKKRPTGSFNFTPAPLKNLRWKPPLVQTSPPPATTQSPESTMDTSLKKEKSAILDLYIPPPPAVPYSPRDENGSFVYGGSSKCKQPLPGPKGSESPNSFLDQESRRRRFTIADSDQLPGYSVETNILPTKMREKTPSYGKPRPLSMPADGNWMGIVDPFARPRGHGRKGLSKETFQMKRNAPCLCCARWELLDTSGY

SEQ ID NO: 12310 - protein, 173 aa, Artificial Sequence
  Synthetic polypeptide
MEDKVLTVVKVLNGICDKTIRSTTDPVMSQCACLEEVHLPNIKPGEGLGMYIKSTYDGLHVITGTTENSPADRSQKIHAGDEVIQVNQQTVVGWQLKNLVKKLRENPTGVVLLLKKRPTGSFNFTPAPLKNLRWKPPLVQLLRRLRQKSCLNPGGRGCSELRSRHYTSAWMTE

SEQ ID NO: 12311 - protein, 348 aa, Artificial Sequence
  Synthetic polypeptide
MEPVTKWSPKQVVDWTRGLDDCLQQYVHKFEREKINGEQLLQISHQDLEELGVTRIGHQELVLEAVDLLCALNYGLETDNMKNLVLKLRASSHNLQNYISSRRKSPAYDGNTSRKAPNEFLTSVVELIGAAKALLAWLDRAPFTGITDFSVTKNKIIQLCLDLTTTVQKDCFVAEMEDKVLTVVKVLNGICDKTIRSTTDPVMSQCACLEEVHLPNIKPGEGLGMYIKSTYDGLHVITGTTENSPADRSQKIHAGDEVIQVNQQTVVGWQLKNLVKKLRENPTGVVLLLKKRPTGSFNFTPAPLKNLRWKPPLVQLLRRLRQKSCLNPGGRGCSELRSRHYTSAWMTE

SEQ ID NO: 12312 - protein, 268 aa, Artificial Sequence
  Synthetic polypeptide
MKNLVLKLRASSHNLQNYISSRRKSPAYDGNTSRKAPNEFLTSVVELIGAAKALLAWLDRAPFTGITDFSVTKNKIIQLCLDLTTTVQKDCFVAEMEDKVLTVVKVLNGICDKTIRSTTDPVMSQCACLEEVHLPNIKPGEGLGMYIKSTYDGLHVITGTTENSPADRSQKIHAGDEVIQVNQQTVVGWQLKNLVKKLRENPTGVVLLLKKRPTGSFNFTPAPLKNLRWKPPLVQLLRRLRQKSCLNPGGRGCSELRSRHYTSAWMTE

SEQ ID NO: 12313 - protein, 110 aa, Artificial Sequence
  Synthetic polypeptide
NIKPGEGLGMYIKSTYDGLHVITGTTENVGWQLKNLVKKLRENPTGVVLLLKKRPTGSFNFTPAPLKNLRWKPPLVQLLRRLRQKSCLNPGGRGCSELRSRHYTSAWMTE

SEQ ID NO: 12314 - protein, 187 aa, Artificial Sequence
  Synthetic polypeptide
MLETLRERLLSVQQDFTSGLKTLSDKSREAKVKSKPRTVPFLPKYSAGLELLSRYEDTWAALHRRAKDCASAGELVDSEVVMLSAHWEKKKTSLVELQEQLQQLPALIADLESMTANLTHLEASFEEVENNLLHLEDLCGQCELERCKHMQSQQLENYKKNKRSQNSGSQTHIPCAEEWSIHLQNCT

SEQ ID NO: 12315 - protein, 170 aa, Artificial Sequence
  Synthetic polypeptide
MLETLRERLLSVQQDFTSGLKTLSDKSREAKVKSKPRYEDTWAALHRRAKDCASAGELVDSEVVMLSAHWEKKKTSLVELQEQLQQLPALIADLESMTANLTHLEASFEEVENNLLHLEDLCGQCELERCKHMQSQQLENYKKNKRSQNSGSQTHIPCAEEWSIHLQNCT

SEQ ID NO: 12316 - protein, 152 aa, Artificial Sequence
  Synthetic polypeptide
MLETLRERLLSVQQDFTSGYEDTWAALHRRAKDCASAGELVDSEVVMLSAHWEKKKTSLVELQEQLQQLPALIADLESMTANLTHLEASFEEVENNLLHLEDLCGQCELERCKHMQSQQLENYKKNKRSQNSGSQTHIPCAEEWSIHLQNCT

SEQ ID NO: 12317 - protein, 122 aa, Artificial Sequence
  Synthetic polypeptide
MATKARVMYDFAAEPGNNELTVNEGEIITITNPDVGGGWLEGRNIKGERGLVPTDYVEILPSDGKDQFSCGNSVADQAFLDSLSASTAQASSSAASNNHQPGTVAHACNPTSTLGGRGGRIT

SEQ ID NO: 12318 - protein, 115 aa, Artificial Sequence
  Synthetic polypeptide
MATKARVMYDFAAEPGNNELTVNEGEIITITNPDVGGGWLEGRNIKGERGLVPTDYVEILPSDGKDQFSCGNSVADQAFLDSLSASTAQASSSAASNNHQLGVVAGTCNPSCSGG

SEQ ID NO: 12319 - protein, 284 aa, Artificial Sequence
  Synthetic polypeptide
MPKPINVRVTTMDAELEFAIQPNTTGKQLFDQVSAQEVRKENPLQFKFRAKFYPEDVAEELIQDITQKLFFLQVKEGILSDEIYCPPETAVLLGSYAVQAKFGDYNKEVHKSGYLSSERLIPQRVMDQHKLTRDQWEDRIQVWHAEHRGMLKDNAMLEYLKIAQDLEMYGINYFEIKNKKGTDLWLGVDALGLNIYEKDDKLTPKIGFPWSEIRNISFNDKKFVIKPIDKKAPAQWLTPVIPGPWEAEMAESRGQEFETSLANTVKTPSLLKIQKLSGRGGGRL

SEQ ID NO: 12320 - protein, 316 aa, Artificial Sequence
  Synthetic polypeptide
MPKPINVRVTTMDAELEFAIQPNTTGKQLFDQVVKTIGLREVWYFGLHYVDNKGFPTWLKLDKKVSAQEVRKENPLQFKFRAKFYPEDVAEELIQDITQKLFFLQVKEGILSDEIYCPPETAVLLGSYAVQAKFGDYNKEVHKSGYLSSERLIPQRVMDQHKLTRDQWEDRIQVWHAEHRGMLKDNAMLEYLKIAQDLEMYGINYFEIKNKKGTDLWLGVDALGLNIYEKDDKLTPKIGFPWSEIRNISFNDKKFVIKPIDKKAPAQWLTPVIPGPWEAEMAESRGQEFETSLANTVKTPSLLKIQKLSGRGGGRL

SEQ ID NO: 12321 - protein, 253 aa, Artificial Sequence
  Synthetic polypeptide
MENYGIEWHSVRDSEGQKLLIGVGPEGISICKDDFSPINRIAYPVVQMATQSGKNVYLTVTKESGNSIVLLFKMISTRAASGLYRAITETHAFYRCDTVTSAVMMQYSRDLKGHLASLFLNENINLGKKYVFDIKRTSKEVYDHARRALYNAGVVDLVSRNNQSPSHSPLKSSESSMNCSSCEGLSCQQTRVLQEKLRKLKEAMLCMVCCEEEINSTFCPCGHTVCCESCAAQLQFQLLGGREARGLLKTRSS

SEQ ID NO: 12322 - protein, 434 aa, Artificial Sequence
  Synthetic polypeptide
MLCYVTRPDAVLMEVEVEAKANGEDCLNQVCRRLGIIEVDYFGLQFTGSKGESLWLNLRNRISQQMDGLAPYRLKLRVKFFVEPHLILQEQTRHIFFLHIKEALLAGHLLCSPEQAVELSALLAQTKFGDYNQNTAKYNYEELCAKELSSATLNSIVAKHKELEGTSQASAEYQVLQIVSAMENYGIEWHSVRDSEGQKLLIGVGPEGISICKDDFSPINRIAYPVVQMATQSGKNVYLTVTKESGNSIVLLFKMISTRAASGLYRAITETHAFYRCDTVTSAVMMQYSRDLKGHLASLFLNENINLGKKYVFDIKRTSKEVYDHARRALYNAGVVDLVSRNNQSPSHSPLKSSESSMNCSSCEGLSCQQTRVLQEKLRKLKEAMLCMVCCEEEINSTFCPCGHTVCCESCAAQLQFQLLGGREARGLLKTRSS

SEQ ID NO: 12323 - protein, 303 aa, Artificial Sequence
  Synthetic polypeptide
MANMQGLVERLERAVSRLESLSAESHRPPGNCGEVNGVIAGVAPSVEAFDKLMDSMVAEFLKNSRILAGDVETHAEMVHSAFQAQRAFLLMASQYQQPHEGPVASTVSAFSVLSSGPGLPPPPPPLPPPGPPPLFENEGKKEESSPSRSALFAQLNQGEAITKGLRHVTDDQKTYKNPSLRAQGGQTQSPTKSHTPSPTSPKSYPSQKHAPVLELEGKKWRVEYQEDRNDLVISETELKQVAYIFKCEKSTIQIKGKVNSIIIDNCKKLGLVFDNVVGIVEVINSQDIQIQKTSYEAERQAMD

SEQ ID NO: 12324 - protein, 351 aa, Artificial Sequence
  Synthetic polypeptide
MANMQGLVERLERAVSRLESLSAESHRPPGNCGEVNGVIAGVAPSVEAFDKLMDSMVAEFLKNSRILAGDVETHAEMVHSAFQAQRAFLLMASQYQQPHENDVAALLKPISEKIQEIQTFRERNRGSNMFNHLSAVSESIPALGWIAVGPVASTVSAFSVLSSGPGLPPPPPPLPPPGPPPLFENEGKKEESSPSRSALFAQLNQGEAITKGLRHVTDDQKTYKNPSLRAQGGQTQSPTKSHTPSPTSPKSYPSQKHAPVLELEGKKWRVEYQEDRNDLVISETELKQVAYIFKCEKSTIQIKGKVNSIIIDNCKKLGLVFDNVVGIVEVINSQDIQIQKTSYEAERQAMD

SEQ ID NO: 12325 - protein, 415 aa, Artificial Sequence
  Synthetic polypeptide
MANMQGLVERLERAVSRLESLSAESHRPPGNCGEVNGVIAGVAPSVEAFDKLMDSMVAEFLKNSRILAGDVETHAEMVHSAFQAQRAFLLMASQYQQPHENDVAALLKPISEKIQEIQTFRERNRGSNMFNHLSAVSESIPALGWIAVSPKPGPYVKEMNDAATFYTNRVLKDYKHSDLRHVDWVKSYLNIWSELQAYIKEHHTTGLTWSKTGPVASTVSAFSVLSSGPGLPPPPPPLPPPGPPPLFENEGKKEESSPSRSALFAQLNQGEAITKGLRHVTDDQKTYKNPSLRAQGGQTQSPTKSHTPSPTSPKSYPSQKHAPVLELEGKKWRVEYQEDRNDLVISETELKQVAYIFKCEKSTIQIKGKVNSIIIDNCKKLGLVFDNVVGIVEVINSQDIQIQKTSYEAERQAMD

SEQ ID NO: 12326 - protein, 155 aa, Artificial Sequence
  Synthetic polypeptide
MANMQGLVERLERAVSRLESLSAESHRPPGNCGEVNGVIAGVAPSVEAFDKLMDSMVAEFLKNSRILAGDVETHEYQEDRNDLVISETELKQVAYIFKCEKSTIQIKGKVNSIIIDNCKKLGLVFDNVVGIVEVINSQDIQIQKTSYEAERQAMD

SEQ ID NO: 12327 - protein, 389 aa, Artificial Sequence
  Synthetic polypeptide
MANMQGLVERLERAVSRLESLSAESHRPPGNCGEVNGVIAGVAPSVEAFDKLMDSMVAEFLKNSRILAGDVETHNDVAALLKPISEKIQEIQTFRERNRGSNMFNHLSAVSESIPALGWIAVSPKPGPYVKEMNDAATFYTNRVLKDYKHSDLRHVDWVKSYLNIWSELQAYIKEHHTTGLTWSKTGPVASTVSAFSVLSSGPGLPPPPPPLPPPGPPPLFENEGKKEESSPSRSALFAQLNQGEAITKGLRHVTDDQKTYKNPSLRAQGGQTQSPTKSHTPSPTSPKSYPSQKHAPVLELEGKKWRVEYQEDRNDLVISETELKQVAYIFKCEKSTIQIKGKVNSIIIDNCKKLGLVFDNVVGIVEVINSQDIQIQKTSYEAERQAMD

SEQ ID NO: 12328 - protein, 1047 aa, Artificial Sequence
  Synthetic polypeptide
MAPPTGVLSSLLLLVTIAGCARKQCSEGRTYSNAVISPNLETTRIMRVSHTFPVVDCTAACCDLSSCDLAWWFEGRCYLVSCPHKENCEPKKMGPIRSYLTFVLRPVQRPAQLLDYGDMMLNRGSPSGIWGDSPEDIRKDLTFLGKDWGLEEMSEYSDDYRELEKDLLQPSGKQEPRGSAEYTDWGLLPGSEGAFNSSVGDSPAVPAETQQDPELHYLNESASTPAPKLPERSVLLPLPTTPSSGEVLEKEKASQLQEQSSNSSGKEVLMPSHSLPPASLELSSVTVEKSPVLTVTPGSTEHSIPTPPTSAAPSESTPSELPISPTTAPRTVKELTVSAGDNLIITLPDNEVELKAFVAPAPPVETTYNYEWNLISHPTDYQGEIKQGHKQTLNLSQLSVGLYVFKVTVSSENAFGEGFVNVTVKPARRVNLPPVAVVSPQLQELTLPLTSALIDGSQSTDDTEIVSYHWEEINGPFIEEKTSVDSPVLRLSNLDPGNYSFRLTVTDSDGATNSTTAALIVNNAVDYPPVANAGPNHTITLPQNSITLNGNQSSDDHQIVLYEWSLGPGSEGKHVVMQGVQTPYLHLSAMQEGDYTFQLKVTDSSRQQSTAVVTVIVQPENNRPPVAVAGPDKELIFPVESATLDGSSSSDDHGIVFYHWEHVRGPSAVEMENIDKAIATVTGLQVGTYHFRLTVKDQQGLSSTSTLTVAVKKENNSPPRARAGGRHVLVLPNNSITLDGSRSTDDQRIVSYLWIRDGQSPAAGDVIDGSDHSVALQLTNLVEGVYTFHLRVTDSQGASDTDTATVEVQPDPRKSGLVELTLQVGVGQLTEQRKDTLVRQLAVLLNVLDSDIKVQKIRAHSDLSTVIVFYVQSRPPFKVLKAAEVARNLHMRLSKEKADFLLFKVLRVDTAGCLLKCSGHGHCDPLTKRCICSHLWMENLIQRYIWDGESNCEWSIFYVTVLAFTLIVLTGGFTWLCICCCKRQKRTKIRKKTKYTILDNMDEQERMELRPKYEEEIRTCRETSGARRHRGKIMGGHGKKAAIYKPR

SEQ ID NO: 12329 - protein, 1002 aa, Artificial Sequence
  Synthetic polypeptide
MRVSHTFPVVDCTAACCDLSSCDLAWWFEGRCYLVSCPHKENCEPKKMGPIRSYLTFVLRPVQRPAQLLDYGDMMLNRGSPSGIWGDSPEDIRKDLTFLGKDWGLEEMSEYSDDYRELEKDLLQPSGKQEPRGSAEYTDWGLLPGSEGAFNSSVGDSPAVPAETQQDPELHYLNESASTPAPKLPERSVLLPLPTTPSSGEVLEKEKASQLQEQSSNSSGKEVLMPSHSLPPASLELSSVTVEKSPVLTVTPGSTEHSIPTPPTSAAPSESTPSELPISPTTAPRTVKELTVSAGDNLIITLPDNEVELKAFVAPAPPVETTYNYEWNLISHPTDYQGEIKQGHKQTLNLSQLSVGLYVFKVTVSSENAFGEGFVNVTVKPARRVNLPPVAVVSPQLQELTLPLTSALIDGSQSTDDTEIVSYHWEEINGPFIEEKTSVDSPVLRLSNLDPGNYSFRLTVTDSDGATNSTTAALIVNNAVDYPPVANAGPNHTITLPQNSITLNGNQSSDDHQIVLYEWSLGPGSEGKHVVMQGVQTPYLHLSAMQEGDYTFQLKVTDSSRQQSTAVVTVIVQPENNRPPVAVAGPDKELIFPVESATLDGSSSSDDHGIVFYHWEHVRGPSAVEMENIDKAIATVTGLQVGTYHFRLTVKDQQGLSSTSTLTVAVKKENNSPPRARAGGRHVLVLPNNSITLDGSRSTDDQRIVSYLWIRDGQSPAAGDVIDGSDHSVALQLTNLVEGVYTFHLRVTDSQGASDTDTATVEVQPDPRKSGLVELTLQVGVGQLTEQRKDTLVRQLAVLLNVLDSDIKVQKIRAHSDLSTVIVFYVQSRPPFKVLKAAEVARNLHMRLSKEKADFLLFKVLRVDTAGCLLKCSGHGHCDPLTKRCICSHLWMENLIQRYIWDGESNCEWSIFYVTVLAFTLIVLTGGFTWLCICCCKRQKRTKIRKKTKYTILDNMDEQERMELRPKYEEEIRTCRETSGARRHRGKIMGGHGKKAAIYKPR

SEQ ID NO: 12330 - protein, 1038 aa, Artificial Sequence
  Synthetic polypeptide
MTRLGWPSPCCARKQCSEGRTYSNAVISPNLETTRIMRVSHTFPVVDCTAACCDLSSCDLAWWFEGRCYLVSCPHKENCEPKKMGPIRSYLTFVLRPVQRPAQLLDYGDMMLNRGSPSGIWGDSPEDIRKDLTFLGKDWGLEEMSEYSDDYRELEKDLLQPSGKQEPRGSAEYTDWGLLPGSEGAFNSSVGDSPAVPAETQQDPELHYLNESASTPAPKLPERSVLLPLPTTPSSGEVLEKEKASQLQEQSSNSSGKEVLMPSHSLPPASLELSSVTVEKSPVLTVTPGSTEHSIPTPPTSAAPSESTPSELPISPTTAPRTVKELTVSAGDNLIITLPDNEVELKAFVAPAPPVETTYNYEWNLISHPTDYQGEIKQGHKQTLNLSQLSVGLYVFKVTVSSENAFGEGFVNVTVKPARRVNLPPVAVVSPQLQELTLPLTSALIDGSQSTDDTEIVSYHWEEINGPFIEEKTSVDSPVLRLSNLDPGNYSFRLTVTDSDGATNSTTAALIVNNAVDYPPVANAGPNHTITLPQNSITLNGNQSSDDHQIVLYEWSLGPGSEGKHVVMQGVQTPYLHLSAMQEGDYTFQLKVTDSSRQQSTAVVTVIVQPENNRPPVAVAGPDKELIFPVESATLDGSSSSDDHGIVFYHWEHVRGPSAVEMENIDKAIATVTGLQVGTYHFRLTVKDQQGLSSTSTLTVAVKKENNSPPRARAGGRHVLVLPNNSITLDGSRSTDDQRIVSYLWIRDGQSPAAGDVIDGSDHSVALQLTNLVEGVYTFHLRVTDSQGASDTDTATVEVQPDPRKSGLVELTLQVGVGQLTEQRKDTLVRQLAVLLNVLDSDIKVQKIRAHSDLSTVIVFYVQSRPPFKVLKAAEVARNLHMRLSKEKADFLLFKVLRVDTAGCLLKCSGHGHCDPLTKRCICSHLWMENLIQRYIWDGESNCEWSIFYVTVLAFTLIVLTGGFTWLCICCCKRQKRTKIRKKTKYTILDNMDEQERMELRPKYEEEIRTCRETSGARRHRGKIMGGHGKKAAIYKPR

SEQ ID NO: 12331 - protein, 1019 aa, Artificial Sequence
  Synthetic polypeptide
MAPPTGVLSSLLLLVTIAGCARKQCSEGRTYSNAVISPNLETTRIMRVSHTFPVVDCTAACCDLSSCDLAWWFEGRCYLVSCPHKENCEPKKMGPIRSYLTFVLRPVQRPAQLLDYGDMMLNRGSPSGIWGDSPEDIRKDLTFLGKDWGLEEMSEYSDDYRELEKDLLQPSGKQEPRGSAEYTDWGLLPGSEGAFNSSVGDSPAVPAETQQDPELHYLNESASTPAPKLPERSVLLPLPTTPSSGEVLEKEKASQLQEQSSNSSGKEVLMPSHSLPPASLELSSVTVEKSPVLTVTPGSTEHSIPTPPTSAAPSESTPSELPISPTTAPRTVKELTVSAGDNLIITLPDNEVELKAFVAPAPPVETTYNYEWNLISHPTDYQGEIKQGHKQTLNLSQLSVGLYVFKVTVSSENAFGEGFVNVTVKPARRVNLPPVAVVSPQLQELTLPLTSALIDGSQSTDDTEIVSYHWEEINGPFIEEKTSVDSPVLRLSNLDPGNYSFRLTVTDSDGATNSTTAALIVNNAVDYPPVANAGPNHTITLPQNSITLNGNQSSDDHQIVLYEWSLGPGSEGKHVVMQGVQTPYLHLSAMQEGDYTFQLKVTDSSRQQSTAVVTVIVQPENNRPPVAVAGPDKELIFPVESATLDGSSSSDDHGIVFYHWEHVRGPSAVEMENIDKAIATVTGLQVGTYHFRLTVKDQQGLSSTSTLTVAVKKENNSPPRARAGGRHVLVLPNNSITLDGSRSTDDQRIVSYLWIRDGQSPAAGDVIDGSDHSVALQLTNLVEGVYTFHLRVTDSQGASDTDTATVEVQPDPRKSGLVELTLQVGVGQLTEQRKDTLVRQLAVLLNVLDSDIKVQKIRAHSDLSTVIVFYVQSRPPFKVLKAAEVARNLHMRLSKEKADFLLFKVLRVDTAGCLLKCSGHGHCDPLTKRCICSHLWMENLIQRYIWDGESNCEWSIFYVTVLAFTLIVLTGGFTWLCICCCKRQKRTKIRKKTKYTILDNMDEQERMELRPKYERKKFA

SEQ ID NO: 12332 - protein, 974 aa, Artificial Sequence
  Synthetic polypeptide
MRVSHTFPVVDCTAACCDLSSCDLAWWFEGRCYLVSCPHKENCEPKKMGPIRSYLTFVLRPVQRPAQLLDYGDMMLNRGSPSGIWGDSPEDIRKDLTFLGKDWGLEEMSEYSDDYRELEKDLLQPSGKQEPRGSAEYTDWGLLPGSEGAFNSSVGDSPAVPAETQQDPELHYLNESASTPAPKLPERSVLLPLPTTPSSGEVLEKEKASQLQEQSSNSSGKEVLMPSHSLPPASLELSSVTVEKSPVLTVTPGSTEHSIPTPPTSAAPSESTPSELPISPTTAPRTVKELTVSAGDNLIITLPDNEVELKAFVAPAPPVETTYNYEWNLISHPTDYQGEIKQGHKQTLNLSQLSVGLYVFKVTVSSENAFGEGFVNVTVKPARRVNLPPVAVVSPQLQELTLPLTSALIDGSQSTDDTEIVSYHWEEINGPFIEEKTSVDSPVLRLSNLDPGNYSFRLTVTDSDGATNSTTAALIVNNAVDYPPVANAGPNHTITLPQNSITLNGNQSSDDHQIVLYEWSLGPGSEGKHVVMQGVQTPYLHLSAMQEGDYTFQLKVTDSSRQQSTAVVTVIVQPENNRPPVAVAGPDKELIFPVESATLDGSSSSDDHGIVFYHWEHVRGPSAVEMENIDKAIATVTGLQVGTYHFRLTVKDQQGLSSTSTLTVAVKKENNSPPRARAGGRHVLVLPNNSITLDGSRSTDDQRIVSYLWIRDGQSPAAGDVIDGSDHSVALQLTNLVEGVYTFHLRVTDSQGASDTDTATVEVQPDPRKSGLVELTLQVGVGQLTEQRKDTLVRQLAVLLNVLDSDIKVQKIRAHSDLSTVIVFYVQSRPPFKVLKAAEVARNLHMRLSKEKADFLLFKVLRVDTAGCLLKCSGHGHCDPLTKRCICSHLWMENLIQRYIWDGESNCEWSIFYVTVLAFTLIVLTGGFTWLCICCCKRQKRTKIRKKTKYTILDNMDEQERMELRPKYERKKFA

SEQ ID NO: 12333 - protein, 1010 aa, Artificial Sequence
  Synthetic polypeptide
MTRLGWPSPCCARKQCSEGRTYSNAVISPNLETTRIMRVSHTFPVVDCTAACCDLSSCDLAWWFEGRCYLVSCPHKENCEPKKMGPIRSYLTFVLRPVQRPAQLLDYGDMMLNRGSPSGIWGDSPEDIRKDLTFLGKDWGLEEMSEYSDDYRELEKDLLQPSGKQEPRGSAEYTDWGLLPGSEGAFNSSVGDSPAVPAETQQDPELHYLNESASTPAPKLPERSVLLPLPTTPSSGEVLEKEKASQLQEQSSNSSGKEVLMPSHSLPPASLELSSVTVEKSPVLTVTPGSTEHSIPTPPTSAAPSESTPSELPISPTTAPRTVKELTVSAGDNLIITLPDNEVELKAFVAPAPPVETTYNYEWNLISHPTDYQGEIKQGHKQTLNLSQLSVGLYVFKVTVSSENAFGEGFVNVTVKPARRVNLPPVAVVSPQLQELTLPLTSALIDGSQSTDDTEIVSYHWEEINGPFIEEKTSVDSPVLRLSNLDPGNYSFRLTVTDSDGATNSTTAALIVNNAVDYPPVANAGPNHTITLPQNSITLNGNQSSDDHQIVLYEWSLGPGSEGKHVVMQGVQTPYLHLSAMQEGDYTFQLKVTDSSRQQSTAVVTVIVQPENNRPPVAVAGPDKELIFPVESATLDGSSSSDDHGIVFYHWEHVRGPSAVEMENIDKAIATVTGLQVGTYHFRLTVKDQQGLSSTSTLTVAVKKENNSPPRARAGGRHVLVLPNNSITLDGSRSTDDQRIVSYLWIRDGQSPAAGDVIDGSDHSVALQLTNLVEGVYTFHLRVTDSQGASDTDTATVEVQPDPRKSGLVELTLQVGVGQLTEQRKDTLVRQLAVLLNVLDSDIKVQKIRAHSDLSTVIVFYVQSRPPFKVLKAAEVARNLHMRLSKEKADFLLFKVLRVDTAGCLLKCSGHGHCDPLTKRCICSHLWMENLIQRYIWDGESNCEWSIFYVTVLAFTLIVLTGGFTWLCICCCKRQKRTKIRKKTKYTILDNMDEQERMELRPKYERKKFA

SEQ ID NO: 12334 - protein, 465 aa, Artificial Sequence
  Synthetic polypeptide
MTEESSDVPRELIESIKDVIGRKIKISVKKKVKLEVKGDKVENKVLVLTSCRAFLVTARIPTKLELTFSYLEIHGVVCSKSAQMIVETEKCSISMKMASPEDVSEVLAHIGTCLRKIFPGLSPVRIMKKVSMEPSERLASLQALWDSQTVAEQGPCGGFSQMYACVCDWLGFSYREEVQWDVDTIYLTQDTRELNLQDFSHLDHRDLIPIIAALEYNQWFTKLSSKDLKLSTDVCEQILRVVSRSNRLEELVLENAGLRTDFAQKLASALAHNPNSGLHTINLAGNPLEDRGVSSLSIQFAKLPKGLKHLNLSKTSLSPKGVNSLSQSLSANPLTASTLVHLDLSGNVLRGDDLSHMYNFLAQPNAIVHLDLSNTECSLDMVCGALLRGCLQYLAVLNLSRTVFSHRKGKEVPPSFKQFFSSSLALMHINLSGTKLSPEPLKALLLGLACNHNLKGVSLDLSNCE

SEQ ID NO: 12335 - protein, 266 aa, Artificial Sequence
  Synthetic polypeptide
MKMASFLAFLLLNFRVCLLLLQLLMPHSAQFSVLGPSGPILAMVGEDADLPCHLFPTMSAETMELKWVSSSLRQVVNVYADGKEVEDRQSAPYRGRTSILRDGITAGKAALRIHNVTASDSGKYLCYFQDGDFYEKALVELKVAALGSDLHVDVKGYKDGGIHLECRSTGWYPQPQIQWSNNKGENIPTVEAPVVADGVGLYAVAASVIMRGSSGEGVSCTIRSSLLGLEKTASISIAALIMTAQGWKLCRCSLLENFHAMDTTQL

SEQ ID NO: 12336 - protein, 214 aa, Artificial Sequence
  Synthetic polypeptide
MKMASFLAFLLLNFRVCLLLLQLLMPHSAQFSVLGPSGPILAMVGEDADLPCHLFPTMSAETMELKWVSSSLRQVVNVYADGKEVEDRQSAPYRGRTSILRDGITAGKAALRIHNVTASDSGKYLCYFQDGDFYEKALVELKVADGVGLYAVAASVIMRGSSGEGVSCTIRSSLLGLEKTASISIAALIMTAQGWKLCRCSLLENFHAMDTTQL

SEQ ID NO: 12337 - protein, 300 aa, Artificial Sequence
  Synthetic polypeptide
MAVMAPRTLLLLLSGALALTQTWAGSHSMRYFFTSVSRPGRGEPRFIAVGYVDDTQFVRFDSDAASQRMEPRAPWIEQEGPEYWDQETRNVKAQSQTDRVDLGTLRGYYNQSEAGSHTIQIMYGCDVGSDGRFLRGYRQDAYDGKDYIALNEDLRSWTAADMAAQITKRKWEAAHEAEQLRAYLDGTCVEWLRRYLENGKETLQRTDPPKTHMTHHPISDHEATLRCWALGFYPAEITLTWQRDGEDQTQDTELVETRPAGDGTFQKWAAVVVPSGEEQRYTCHVQHEGLPKPLTLRWEA

SEQ ID NO: 12338 - protein, 339 aa, Artificial Sequence
  Synthetic polypeptide
MAVMAPRTLLLLLSGALALTQTWAGSHSMRYFFTSVSRPGRGEPRFIAVGYVDDTQFVRFDSDAASQRMEPRAPWIEQEGPEYWDQETRNVKAQSQTDRVDLGTLRGYYNQSEAGSHTIQIMYGCDVGSDGRFLRGYRQDAYDGKDYIALNEDLRSWTAADMAAQITKRKWEAAHEAEQLRAYLDGTCVEWLRRYLENGKETLQRTDPPKTHMTHHPISDHEATLRCWALGFYPAEITLTWQRDGEDQTQDTELVETRPAGDGTFQKWAAVVVPSGEEQRYTCHVQHEGLPKPLTLRWELSSQPTIPIVGIIAGLVLLGAVITGAVVAAVMWRRKSSEA

SEQ ID NO: 12339 - protein, 349 aa, Artificial Sequence
  Synthetic polypeptide
MAVMAPRTLLLLLSGALALTQTWAGSHSMRYFFTSVSRPGRGEPRFIAVGYVDDTQFVRFDSDAASQRMEPRAPWIEQEGPEYWDQETRNVKAQSQTDRVDLGTLRGYYNQSEAGSHTIQIMYGCDVGSDGRFLRGYRQDAYDGKDYIALNEDLRSWTAADMAAQITKRKWEAAHEAEQLRAYLDGTCVEWLRRYLENGKETLQRTDPPKTHMTHHPISDHEATLRCWALGFYPAEITLTWQRDGEDQTQDTELVETRPAGDGTFQKWAAVVVPSGEEQRYTCHVQHEGLPKPLTLRWELSSQPTIPIVGIIAGLVLLGAVITGAVVAAVMWRRKSSEVQLHSLPVSVA

SEQ ID NO: 12340 - protein, 350 aa, Artificial Sequence
  Synthetic polypeptide
MAVMAPRTLLLLLSGALALTQTWAGSHSMRYFFTSVSRPGRGEPRFIAVGYVDDTQFVRFDSDAASQRMEPRAPWIEQEGPEYWDQETRNVKAQSQTDRVDLGTLRGYYNQSEAGSHTIQIMYGCDVGSDGRFLRGYRQDAYDGKDYIALNEDLRSWTAADMAAQITKRKWEAAHEAEQLRAYLDGTCVEWLRRYLENGKETLQRTDPPKTHMTHHPISDHEATLRCWALGFYPAEITLTWQRDGEDQTQDTELVETRPAGDGTFQKWAAVVVPSGEEQRYTCHVQHEGLPKPLTLRWELSSQPTIPIVGIIAGLVLLGAVITGAVVAAVMWRRKSSDRKGGSYTQAAKA

SEQ ID NO: 12341 - protein, 356 aa, Artificial Sequence
  Synthetic polypeptide
MAVMAPRTLLLLLSGALALTQTWAGSHSMRYFFTSVSRPGRGEPRFIAVGYVDDTQFVRFDSDAASQRMEPRAPWIEQEGPEYWDQETRNVKAQSQTDRVDLGTLRGYYNQSEAGSHTIQIMYGCDVGSDGRFLRGYRQDAYDGKDYIALNEDLRSWTAADMAAQITKRKWEAAHEAEQLRAYLDGTCVEWLRRYLENGKETLQRTDPPKTHMTHHPISDHEATLRCWALGFYPAEITLTWQRDGEDQTQDTELVETRPAGDGTFQKWAAVVVPSGEEQRYTCHVQHEGLPKPLTLRWELSSQPTIPIVGIIAGLVLLGAVITGAVVAAVMWRRKSSGGEGVKDRKGGSYTQAAKA

SEQ ID NO: 12342 - protein, 360 aa, Artificial Sequence
  Synthetic polypeptide
MAVMAPRTLLLLLSGALALTQTWAGSHSMRYFFTSVSRPGRGEPRFIAVGYVDDTQFVRFDSDAASQRMEPRAPWIEQEGPEYWDQETRNVKAQSQTDRVDLGTLRGYYNQSEAGSHTIQIMYGCDVGSDGRFLRGYRQDAYDGKDYIALNEDLRSWTAADMAAQITKRKWEAAHEAEQLRAYLDGTCVEWLRRYLENGKETLQRTDPPKTHMTHHPISDHEATLRCWALGFYPAEITLTWQRDGEDQTQDTELVETRPAGDGTFQKWAAVVVPSGEEQRYTCHVQHEGLPKPLTLRWELSSQPTIPIVGIIAGLVLLGAVITGAVVAAVMWRRKSSDRKGGSYTQAAKVQLHSLPVSVA

SEQ ID NO: 12343 - protein, 366 aa, Artificial Sequence
  Synthetic polypeptide
MAVMAPRTLLLLLSGALALTQTWAGSHSMRYFFTSVSRPGRGEPRFIAVGYVDDTQFVRFDSDAASQRMEPRAPWIEQEGPEYWDQETRNVKAQSQTDRVDLGTLRGYYNQSEAGSHTIQIMYGCDVGSDGRFLRGYRQDAYDGKDYIALNEDLRSWTAADMAAQITKRKWEAAHEAEQLRAYLDGTCVEWLRRYLENGKETLQRTDPPKTHMTHHPISDHEATLRCWALGFYPAEITLTWQRDGEDQTQDTELVETRPAGDGTFQKWAAVVVPSGEEQRYTCHVQHEGLPKPLTLRWELSSQPTIPIVGIIAGLVLLGAVITGAVVAAVMWRRKSSGGEGVKDRKGGSYTQAAKVQLHSLPVSVA

SEQ ID NO: 12344 - protein, 369 aa, Artificial Sequence
  Synthetic polypeptide
MAVMAPRTLLLLLSGALALTQTWAGSHSMRYFFTSVSRPGRGEPRFIAVGYVDDTQFVRFDSDAASQRMEPRAPWIEQEGPEYWDQETRNVKAQSQTDRVDLGTLRGYYNQSEAGSHTIQIMYGCDVGSDGRFLRGYRQDAYDGKDYIALNEDLRSWTAADMAAQITKRKWEAAHEAEQLRAYLDGTCVEWLRRYLENGKETLQRTDPPKTHMTHHPISDHEATLRCWALGFYPAEITLTWQRDGEDQTQDTELVETRPAGDGTFQKWAAVVVPSGEEQRYTCHVQHEGLPKPLTLRWELSSQPTIPIVGIIAGLVLLGAVITGAVVAAVMWRRKSSDRKGGSYTQAASSDSAQGSDVSLTACKVHNWP

SEQ ID NO: 12345 - protein, 375 aa, Artificial Sequence
  Synthetic polypeptide
MAVMAPRTLLLLLSGALALTQTWAGSHSMRYFFTSVSRPGRGEPRFIAVGYVDDTQFVRFDSDAASQRMEPRAPWIEQEGPEYWDQETRNVKAQSQTDRVDLGTLRGYYNQSEAGSHTIQIMYGCDVGSDGRFLRGYRQDAYDGKDYIALNEDLRSWTAADMAAQITKRKWEAAHEAEQLRAYLDGTCVEWLRRYLENGKETLQRTDPPKTHMTHHPISDHEATLRCWALGFYPAEITLTWQRDGEDQTQDTELVETRPAGDGTFQKWAAVVVPSGEEQRYTCHVQHEGLPKPLTLRWELSSQPTIPIVGIIAGLVLLGAVITGAVVAAVMWRRKSSGGEGVKDRKGGSYTQAASSDSAQGSDVSLTACKVHNWP

SEQ ID NO: 12346 - protein, 376 aa, Artificial Sequence
  Synthetic polypeptide
MAVMAPRTLLLLLSGALALTQTWAGSHSMRYFFTSVSRPGRGEPRFIAVGYVDDTQFVRFDSDAASQRMEPRAPWIEQEGPEYWDQETRNVKAQSQTDRVDLGTLRGYYNQSEAGSHTIQIMYGCDVGSDGRFLRGYRQDAYDGKDYIALNEDLRSWTAADMAAQITKRKWEAAHEAEQLRAYLDGTCVEWLRRYLENGKETLQRTDPPKTHMTHHPISDHEATLRCWALGFYPAEITLTWQRDGEDQTQDTELVETRPAGDGTFQKWAAVVVPSGEEQRYTCHVQHEGLPKPLTLRWELSSQPTIPIVGIIAGLVLLGAVITGAVVAAVMWRRKSSDRKGGSYTQAASSDSAQGSDVSLTACKEVQLHSLPVSVA

SEQ ID NO: 12347 - protein, 382 aa, Artificial Sequence
  Synthetic polypeptide
MAVMAPRTLLLLLSGALALTQTWAGSHSMRYFFTSVSRPGRGEPRFIAVGYVDDTQFVRFDSDAASQRMEPRAPWIEQEGPEYWDQETRNVKAQSQTDRVDLGTLRGYYNQSEAGSHTIQIMYGCDVGSDGRFLRGYRQDAYDGKDYIALNEDLRSWTAADMAAQITKRKWEAAHEAEQLRAYLDGTCVEWLRRYLENGKETLQRTDPPKTHMTHHPISDHEATLRCWALGFYPAEITLTWQRDGEDQTQDTELVETRPAGDGTFQKWAAVVVPSGEEQRYTCHVQHEGLPKPLTLRWELSSQPTIPIVGIIAGLVLLGAVITGAVVAAVMWRRKSSGGEGVKDRKGGSYTQAASSDSAQGSDVSLTACKEVQLHSLPVSVA

SEQ ID NO: 12348 - protein, 354 aa, Artificial Sequence
  Synthetic polypeptide
MVDGTLLLLLSEALALTQTWAGSHSLKYFHTSVSRPGRGEPRFISVGYVDDTQFVRFDNDAASPRMVPRAPWMEQEGSEYWDRETRSARDTAQIFRVNLRTLRGYYNQSEAGSHTLQWMHGCELGPDGRFLRGYEQFAYDGKDYLTLNEDLRSWTAVDTAAQISEQKSNDASEAEHQRAYLEDTCVEWLHKYLEKGKETLLHLEPPKTHVTHHPISDHEATLRCWALGFYPAEITLTWQQDGEGHTQDTELVETRPAGDGTFQKWAAVVVPSGEEQRYTCHVQHEGLPEPVTLRWKPASQPTIPIVGIIAGLVLLGSVVSGAVVAAVIWRKKSSGRPRRADHEVRRSKPSWLTR

SEQ ID NO: 12349 - protein, 341 aa, Artificial Sequence
  Synthetic polypeptide
MVDGTLLLLLSEALALTQTWAGSHSLKYFHTSVSRPGRGEPRFISVGYVDDTQFVRFDNDAASPRMVPRAPWMEQEGSEYWDRETRSARDTAQIFRVNLRTLRGYYNQSEAGSHTLQWMHGCELGPDGRFLRGYEQFAYDGKDYLTLNEDLRSWTAVDTAAQISEQKSNDASEAEHQRAYLEDTCVEWLHKYLEKGKETLLHLEPPKTHVTHHPISDHEATLRCWALGFYPAEITLTWQQDGEGHTQDTELVETRPAGDGTFQKWAAVVVPSGEEQRYTCHVQHEGLPEPVTLRWKPASQPTIPIVGIIAGLVLLGSVVSGAVVAAVIWRKKSSGMGLVAL

SEQ ID NO: 12350 - protein, 202 aa, Artificial Sequence
  Synthetic polypeptide
MFFTCGPNEAMVVSGFCRSPPVMVAGGRVFVLPCIQQIQRISLNTLTLNVKSEKVYTRHGVPISVTGIAQEIYKDRQKFSEQVFKVASSDLVNMGISVVSYTLKDIHDDQDYLHSLGKARTAQVQKDARIGEAEAKRDAGIREAKAKQEKVSAQYLSEIEMAKAQRDYELKKAAYDIEVNTRRAQADLAYQLQQLQHHCEAC

SEQ ID NO: 12351 - protein, 250 aa, Artificial Sequence
  Synthetic polypeptide
MFFTCGPNEAMVVSGFCRSPPVMVAGGRVFVLPCIQQIQRISLNTLTLNVKSEKVYTRHGVPISVTGIAQVKIQGQNKEMLAAACQMFLGKTEAEIAHIALETLEGHQRAIMAHMTVEEIYKDRQKFSEQVFKVASSDLVNMGISVVSYTLKDIHDDQDYLHSLGKARTAQVQKDARIGEAEAKRDAGIREAKAKQEKVSAQYLSEIEMAKAQRDYELKKAAYDIEVNTRRAQADLAYQLQQLQHHCEAC

SEQ ID NO: 12352 - protein, 187 aa, Artificial Sequence
  Synthetic polypeptide
MRPWWSPVKIQGQNKEMLAAACQMFLGKTEAEIAHIALETLEGHQRAIMAHMTVEEIYKDRQKFSEQVFKVASSDLVNMGISVVSYTLKDIHDDQDYLHSLGKARTAQVQKDARIGEAEAKRDAGIREAKAKQEKVSAQYLSEIEMAKAQRDYELKKAAYDIEVNTRRAQADLAYQLQQLQHHCEAC

SEQ ID NO: 12353 - protein, 293 aa, Artificial Sequence
  Synthetic polypeptide
MQPDMSLNVIKMKSSDFLESAELDSGGFGKVSLCFHRTQGLMIMKTVYKGPNCIEHNEALLEEAKMMNRLRHSRVVKLLGVIIEEGKYSLVMEYMEKGNLMHVLKAEIADLGLASFKMWSKLNNEEHNELREVDGTAKKNGGTLYYMAPEHLNDVNAKPTEKSDVYSFAVVLWAIFANKEPYENAICEQQLIMCIKSGNRPDVDDITEYCPREIISLMKLCWEANPEARPTFPGIEEKFRPFYLSQLEESVEEDVKSLKNEQTKISKDIEDRKNMTNTLDVTETQDTLHLITA

SEQ ID NO: 12354 - protein, 339 aa, Artificial Sequence
  Synthetic polypeptide
MQPDMSLNVIKMKSSDFLESAELDSGGFGKVSLCFHRTQGLMIMKTVYKGPNCIEHNEALLEEAKMMNRLRHSRVVKLLGVIIEEGKYSLVMEYMEKGNLMHVLKAEMSTPLSVKGRIILEIIEGMCYLHGKGVIHKDLKPENILVDNDFHIKIADLGLASFKMWSKLNNEEHNELREVDGTAKKNGGTLYYMAPEHLNDVNAKPTEKSDVYSFAVVLWAIFANKEPYENAICEQQLIMCIKSGNRPDVDDITEYCPREIISLMKLCWEANPEARPTFPGIEEKFRPFYLSQLEESVEEDVKSLKNEQTKISKDIEDRKNMTNTLDVTETQDTLHLITA

SEQ ID NO: 12355 - protein, 373 aa, Artificial Sequence
  Synthetic polypeptide
MRVMAPRALLLLLSGGLALTETWACSHSMRYFDTAVSRPGRGEPRFISVGYVDDTQFVRFDSDAASPRGEPRAPWVEQEGPEYWDRETQKYKRQAQADRVSLRNLRGYYNQSEDGSHTLQRMSGCDLGPDGRLLRGYDQSAYDGKDYIALNEDLRSWTAADTAAQITQRKLEAARAAEQLRAYLEGTCVEWLRRYLENGKETLQRAEPPKTHVTHHPLSDHEATLRCWALGFYPAEITLTWQRDGEDQTQDTELVETRPAGDGTFQKWAAVVVPSGQEQRYTCHMQHEGLQEPLTLSWEPSSQPTIPIMGIVAGLAVLVVLAVLGAVVTAMMCRRKSSGGKGGSCSQAAYSNCALSFFVSLPSLLVPSLEGTQ

SEQ ID NO: 12356 - protein, 379 aa, Artificial Sequence
  Synthetic polypeptide
MRVMAPRALLLLLSGGLALTETWACSHSMRYFDTAVSRPGRGEPRFISVGYVDDTQFVRFDSDAASPRGEPRAPWVEQEGPEYWDRETQKYKRQAQADRVSLRNLRGYYNQSEDGSHTLQRMSGCDLGPDGRLLRGYDQSAYDGKDYIALNEDLRSWTAADTAAQITQRKLEAARAAEQLRAYLEGTCVEWLRRYLENGKETLQRAEPPKTHVTHHPLSDHEATLRCWALGFYPAEITLTWQRDGEDQTQDTELVETRPAGDGTFQKWAAVVVPSGQEQRYTCHMQHEGLQEPLTLSWEPSSQPTIPIMGIVAGLAVLVVLAVLGAVVTAMMCRRKSSGHFLPTGGKGGSCSQAAYSNCALSFFVSLPSLLVPSLEGTQ

SEQ ID NO: 12357 - protein, 147 aa, Artificial Sequence
  Synthetic polypeptide
MASAGRSEGTAGGGAGPEEPRREEGRAGLSPSSPPGSHSMRYFYTSVSRPGRGEPRFISVGYVDDTQFVRFDSDAASPREEPRAPWIEQEGPEYWDRNTQIYKAQAQTDRESLRNLRGYYNQSEAVAHTCNPSTLGGCGGWITRSGV

SEQ ID NO: 12358 - protein, 136 aa, Artificial Sequence
  Synthetic polypeptide
MLVMAPRTVLLLLSAALALTETWAGSHSMRYFYTSVSRPGRGEPRFISVGYVDDTQFVRFDSDAASPREEPRAPWIEQEGPEYWDRNTQIYKAQAQTDRESLRNLRGYYNQSEAVAHTCNPSTLGGCGGWITRSGV

SEQ ID NO: 12359 - protein, 45 aa, Artificial Sequence
  Synthetic polypeptide
MASAGRSEGTAGGGAGPEEPRREEGRAGLSPSSPPGSHSMRDFSP

SEQ ID NO: 12360 - protein, 34 aa, Artificial Sequence
  Synthetic polypeptide
MLVMAPRTVLLLLSAALALTETWAGSHSMRDFSP

SEQ ID NO: 12361 - protein, 2006 aa, Artificial Sequence
  Synthetic polypeptide
MQPPSLLLLLLLLLLLCVSVVRPRGLLCGSFPEPCANGGTCLSLSLGQGTCQCAPGFLGETCQFPDPCQNAQLCQNGGSCQALLPAPLGLPSSPSPLTPSFLCTCLPGFTGERCQAKLEDPCPPSFCSKRGRCHIQASGRPQCSCMPGWTGEQCQLRDFCSANPCVNGGVCLATYPQIQCHCPPGFEGHACERDVNECFQDPGPCPKGTSCHNTLGSFQCLCPVGQEGPRCELRAGPCPPRGCSNGGTCQLMPEKDSTFHLCLCPPGFIGPDCEVNPDNCVSHQCQNGGTCQDGLDTYTCLCPETWTGWDCSEDVDECETQGPPHCRNGGTCQNSAGSFHCVCVSGWGGTSCEENLDDCIAATCAPGSTCIDRVGSFSCLCPPGRTGLLCHLEDMCLSQPCHGDAQCSTNPLTGSTLCLCQPGYSGPTCHQDLDECLMAQQGPSPCEHGGSCLNTPGSFNCLCPPGYTGSRCEADHNECLSQPCHPGSTCLDLLATFHCLCPPGLEGQLCEVETNECASAPCLNHADCHDLLNGFQCICLPGFSGTRCEEDIDECRSSPCANGGQCQDQPGAFHCKCLPGFEGPRCQTEVDECLSDPCPVGASCLDLPGAFFCLCPSGFTGQLCEVPLCAPNLCQPKQICKDQKDKANCLCPDGSPGCAPPEDNCTCHHGHCQRSSCVCDVGWTGPECEAELGGCISAPCAHGGTCYPQPSGYNCTCPTGYTGPTCSEEMTACHSGPCLNGGSCNPSPGGYYCTCPPSHTGPQCQTSTDYCVSAPCFNGGTCVNRPGTFSCLCAMGFQGPRCEGKLRPSCADSPCRNRATCQDSPQGPRCLCPTGYTGGSCQTLMDLCAQKPCPRNSHCLQTGPSFHCLCLQGWTGPLCNLPLSSCQKAALSQGIDVSSLCHNGGLCVDSGPSYFCHCPPGFQGSLCQDHVNPCESRPCQNGATCMAQPSGYLCQCAPGYDGQNCSKELDACQSQPCHNHGTCTPKPGGFHCACPPGFVGLRCEGDVDECLDQPCHPTGTAACHSLANAFYCQCLPGHTGQWCEVEIDPCHSQPCFHGGTCEATAGSPLGFICHCPKGFEGPTCSHRAPSCGFHHCHHGGLCLPSPKPGFPPRCACLSGYGGPDCLTPPAPKGCGPPSPCLYNGSCSETTGLGGPGFRCSCPHSSPGPRCQKPGAKGCEGRSGDGACDAGCSGPGGNWDGGDCSLGVPDPWKGCPSHSRCWLLFRDGQCHPQCDSEECLFDGYDCETPPACTPAYDQYCHDHFHNGHCEKGCNTAECGWDGGDCRPEDGDPEWGPSLALLVVLSPPALDQQLFALARVLSLTLRVGLWVRKDRDGRDMVYPYPGARAEEKLGGTRDPTYQERAAPQTQPLGKETDSLSAGFVVVMGVDLSRCGPDHPASRCPWDPGLLLRFLAAMAAVGALEPLLPGPLLAVHPHAGTAPPANQLPWPVLCSPVAGVILLALGALLVLQLIRRRRREHGALWLPPGFTRRPRTQSAPHRRRPPLGEDSIGLKALKPKAEVDEDGVVMCSGPEEGEEVGQAEETGPPSTCQLWSLSGGCGALPQAAMLTPPQESEMEAPDLDTRGPDGVTPLMSAVCCGEVQSGTFQGAWLGCPEPWEPLLDGGACPQAHTVGTGETPLHLAARFSRPTAARRLLEAGANPNQPDRAGRTPLHAAVAADAREVCQLLLRSRQTAVDARTEDGTTPLMLAARLAVEDLVEELIAAQADVGARDKWGKTALHWAAAVNNARAARSLLQAGADKDAQDNREQTPLFLAAREGAVEVAQLLLGLGAARELRDQAGLAPADVAHQRNHWDLLTLLEGAGPPEARHKATPGREAGPFPRARTVSVSVPPHGGGALPRCRTLSAGAGPRGGGACLQARTWSVDLAARGGGAYSHCRSLSGVGAGGGPTPRGRRFSAGMRGPRPNPAIMRGRYGVAAGRGGRVSTDDWPCDWVALGACGSASNIPIPPPCLTPSPERGSPQLDCGPPALQEMPINQGGEGTRTLL

SEQ ID NO: 12362 - protein, 60 aa, Artificial Sequence
  Synthetic polypeptide
MVCLKLPGGSYMAKLTVTLMVLSSPLALAGDTRPPPAEWRGLFSRVWIPRGSASLAQGHH

SEQ ID NO: 12363 - protein, 54 aa, Artificial Sequence
  Synthetic polypeptide
MVCLKLPGGSCMTALTVTLMVLSSPLALSGDTRQLHTSDISHFCLSSCVFGVWP

SEQ ID NO: 12364 - protein, 122 aa, Artificial Sequence
  Synthetic polypeptide
MALQIPGGFWAAAVTVMLVMLSTPVAEARDFPKDFLVQFKGMCYFTNGTERVRGVARYIYNREEYGRFDSDVGEFQAVTELGRSIEDWNNYKDFLEQERAAVDKVCRHNYEAELRTTLQRQG

SEQ ID NO: 12365 - protein, 121 aa, Artificial Sequence
  Synthetic polypeptide
  misc_feature (1)..(1): Xaa can be any naturally occurring amino acid
XLQIPGGFWAAAVTVMLVMLSTPVAEARDFPKDFLVQFKGMCYFTNGTERVRGVARYIYNREEYGRFDSDVGEFQAVTELGRSIEDWNNYKDFLEQERAAVDKVCRHNYEAELRTTLQRQG

SEQ ID NO: 12366 - protein, 36 aa, Artificial Sequence
  Synthetic polypeptide
MRPEDRMFHIRAVILRALSLAFLLSLRGAGAIKGLL

SEQ ID NO: 12367 - protein, 37 aa, Artificial Sequence
  Synthetic polypeptide
MRPEDRMFHIRAVILRALSLAFLLSLRGAGAIKGSLP

SEQ ID NO: 12368 - protein, 301 aa, Artificial Sequence
  Synthetic polypeptide
MALRKELLKSIWYAFTALDVEKSGKVSKSQLKVLSHNLYTVLHIPHDPVALEEHFRDDDDGPVSSQGYMPYLNKYILDKVEEGAFVKEHFDELCWTLTAKKNYRADSNGNSMLSNQDAFRLWCLFNFLSEDKYPLIMVPDEVEYLLKKVLSSMSLEVSLGELEELLAQEAQVAQTTGGLSVWQFLELFNSGRCLRGVGRDTLSMAIHEVYQELIQDVLKQGYLWKRGHLRRNWAERWFQLQPSCLCYFGSEECKEKRGIIPLDAHCCVEAQWLMPVIPALWEAEAGGSPEVGSLRPAWPTW

SEQ ID NO: 12369 - protein, 289 aa, Artificial Sequence
  Synthetic polypeptide
MALRKELLKSIWYAFTALDVEKSGKVSKSQLKVLSHNLYTVLHIPHDPVALEEHFRDDDDGPVSSQGYMPYLNKYILDKVEEGAFVKEHFDELCWTLTAKKNYRADSNGNSMLSNQDAFRLWCLFNFLSEDKYPLIMVPDEVEYLLKKVLSSMSLEVSLGELEELLAQEAQVAQTTGGLSVWQFLELFNSGRCLRGVGRDTLSMAIHEVYQELIQDVLKQGYLWKRGHLRRNWAERWFQLQPSCLCYFGSEECKEKRGIIPLDAHCCVEVLLWKGARIYAEVQASSLTD

SEQ ID NO: 12370 - protein, 893 aa, Artificial Sequence
  Synthetic polypeptide
MEVTCLLLLALIPFHCRGQGVYAPAQAQIVHAGQACVVKEDNISERVYTIREGDTLMLQCLVTGHPRPQVRWTKTAGSASDKFQETSVFNETLRIERIARTQGGRYYCKAENGVGVPAIKSIRVDVQYLDEPMLTVHQTVSDVRGNFYQEKTVFLRCTVNSNPPARFIWKRGSDTLSHSQDNGVDIYEPLYTQGETKVLKLKNLRPQDYASYTCQVSVRNVCGIPDKAITFRLTNTTAPPALKLSVNETLVVNPGENVTVQCLLTGGDPLPQLQWSHGPGPLPLGALAQGGTLSIPSVQARDSGYYNCTATNNVGNPAKKTVNLLVRSMKNATFQITPDVIKESENIQLGQDLKLSCHVDAVPQEKVTYQWFKNGKPARMSKRLLVTRNDPELPAVTSSLELIDLHFSDYGTYLCMASFPGAPVPDLSVEVNISSETVPPTISVPKGRAVVTVREGSPAELQCEVRGKPRPPVLWSRVDKEAALLPSGLPLEETPDGKLRLERVSRDMSGTYRCQTARYNGFNVRPREAQVQLNVQFPPEVEPSSQDVRQALGRPVLLRCSLLRGSPQRIASAVWRFKGQLLPPPPVVPAAAEAPDHAELRLDAVTRDSSGSYECSVSNDVGSAACLFQVSAKAYSPEFYFDTPNPTRSHKLSKNYSYVLQWTQREPDAVDPVLNYRLSIRQLNQHNAVVKAIPVRRVEKGQLLEYILTDLRVPHSYEVRLTPYTTFGAGDMASRIIHYTEPINSPNLSDNTCHFEDEKICGYTQDLTDNFDWTRQNALTQNPKRSPNTGPPTDISGTPEGYYMFIETSRPRELGDRARLVSPLYNASAKFYCVSFFYHMYGKHIGSLNLLVRSRNKGALDTHAWSLSGNKGNVWQQAHVPISPSGPFQNVTC

SEQ ID NO: 12371 - protein, 897 aa, Artificial Sequence
  Synthetic polypeptide
MEVTCLLLLALIPFHCRGQGVYAPAQAQIVHAGQACVVKEDNISERVYTIREGDTLMLQCLVTGHPRPQVRWTKTAGSASDKFQETSVFNETLRIERIARTQGGRYYCKAENGVGVPAIKSIRVDVQYLDEPMLTVHQTVSDVRGNFYQEKTVFLRCTVNSNPPARFIWKRGSDTLSHSQDNGVDIYEPLYTQGETKVLKLKNLRPQDYASYTCQVSVRNVCGIPDKAITFRLTNTTAPPALKLSVNETLVVNPGENVTVQCLLTGGDPLPQLQWSHGPGPLPLGALAQGGTLSIPSVQARDSGYYNCTATNNVGNPAKKTVNLLVRSMKNATFQITPDVIKESENIQLGQDLKLSCHVDAVPQEKVTYQWFKNGKPARMSKRLLVTRNDPELPAVTSSLELIDLHFSDYGTYLCMASFPGAPVPDLSVEVNISSETVPPTISVPKGRAVVTVREGSPAELQCEVRGKPRPPVLWSRVDKEAALLPSGLPLEETPDGKLRLERVSRDMSGTYRCQTARYNGFNVRPREAQVQLNVQSPCFPPEVEPSSQDVRQALGRPVLLRCSLLRGSPQRIASAVWRFKGQLLPPPPVVPAAAEAPDHAELRLDAVTRDSSGSYECSVSNDVGSAACLFQVSAKAYSPEFYFDTPNPTRSHKLSKNYSYVLQWTQREPDAVDPVLNYRLSIRQLNQHNAVVKAIPVRRVEKGQLLEYILTDLRVPHSYEVRLTPYTTFGAGDMASRIIHYTELLALRTLSSDNTCHFEDEKICGYTQDLTDNFDWTRQNALTQNPKRSPNTGPPTDISGTPEGYYMFIETSRPRELGDRARLVSPLYNASAKFYCVSFFYHMYGKHIGSLNLLVRSRNKGALDTHAWSLSGNKGNVWQQAHVPISPSGPFQNVTC

SEQ ID NO: 12372 - protein, 860 aa, Artificial Sequence
  Synthetic polypeptide
MEVTCLLLLALIPFHCRGQGVYAPAQAQIVHAGQACVVKEDNISERVYTIREGDTLMLQCLVTGHPRPQVRWTKTAGSASDKFQETSVFNETLRIERIARTQGGRYYCKAENGVGVPAIKSIRVDVQYLDEPMLTVHQTVSDVRGNFYQEKTVFLRCTVNSNPPARFIWKRGSDTLSHSQDNGVDIYEPLYTQGETKVLKLKNLRPQDYASYTCQVSVRNVCGIPDKAITFRLTNTTAPPALKLSVNETLVVNPGENVTVQCLLTGGDPLPQLQWSHGPGPLPLGALAQGGTLSIPSVQARDSGYYNCTATNNVGNPAKKTVNLLVRSMKNATFQITPDVIKESENIQLGQDLKLSCHVDAVPQEKVTYQWFKNGKPARMSKRLLVTRNDPELPAVTSSLELIDLHFSDYGTYLCMASFPGAPVPDLSVEVNISSETVPPTISVPKGRAVVTVREGSPAELQCEVRGKPRPPVLWSRVDKEAALLPSGLPLEETPDGKLRLERVSRDMSGTYRCQTARYNGFNVRPREAQVQLNVQFPPEVEPSSQDVRQALGRPVLLRCSLLRGSPQRIASAVWRFKGQLLPPPPVVPAAAEAPDHAELRLDAVTRDSSGSYECSVSNDVGSAACLFQVSAKAYSPEFYFDTPNPTRSHKLSKNYSYVLQWTQREPDAVDPVLNYRLSIRQLNQHNAVVKAIPVRRVEKGQLLEYILTDLRVPHSYEVRLTPYTTFGAGDMASRIIHYTEPINSPNLSDNTCHFEDEKICGYTQDLTDNFDWTRQNALTQNPKRSPNTGPPTDISGTPEGYYMFIETSRPRELGDRARLVSPLYNASAKFYCVSFFYHMYGKHIARAKLHFKKKKGKRK

SEQ ID NO: 12373 - protein, 864 aa, Artificial Sequence
  Synthetic polypeptide
MEVTCLLLLALIPFHCRGQGVYAPAQAQIVHAGQACVVKEDNISERVYTIREGDTLMLQCLVTGHPRPQVRWTKTAGSASDKFQETSVFNETLRIERIARTQGGRYYCKAENGVGVPAIKSIRVDVQYLDEPMLTVHQTVSDVRGNFYQEKTVFLRCTVNSNPPARFIWKRGSDTLSHSQDNGVDIYEPLYTQGETKVLKLKNLRPQDYASYTCQVSVRNVCGIPDKAITFRLTNTTAPPALKLSVNETLVVNPGENVTVQCLLTGGDPLPQLQWSHGPGPLPLGALAQGGTLSIPSVQARDSGYYNCTATNNVGNPAKKTVNLLVRSMKNATFQITPDVIKESENIQLGQDLKLSCHVDAVPQEKVTYQWFKNGKPARMSKRLLVTRNDPELPAVTSSLELIDLHFSDYGTYLCMASFPGAPVPDLSVEVNISSETVPPTISVPKGRAVVTVREGSPAELQCEVRGKPRPPVLWSRVDKEAALLPSGLPLEETPDGKLRLERVSRDMSGTYRCQTARYNGFNVRPREAQVQLNVQSPCFPPEVEPSSQDVRQALGRPVLLRCSLLRGSPQRIASAVWRFKGQLLPPPPVVPAAAEAPDHAELRLDAVTRDSSGSYECSVSNDVGSAACLFQVSAKAYSPEFYFDTPNPTRSHKLSKNYSYVLQWTQREPDAVDPVLNYRLSIRQLNQHNAVVKAIPVRRVEKGQLLEYILTDLRVPHSYEVRLTPYTTFGAGDMASRIIHYTELLALRTLSSDNTCHFEDEKICGYTQDLTDNFDWTRQNALTQNPKRSPNTGPPTDISGTPEGYYMFIETSRPRELGDRARLVSPLYNASAKFYCVSFFYHMYGKHIARAKLHFKKKKGKRK

SEQ ID NO: 12374 - protein, 170 aa, Artificial Sequence
  Synthetic polypeptide
  misc_feature (1)..(1): Xaa can be any naturally occurring amino acid
XNQHNAVVKAIPVRRVEKGQLLEYILTDLRVPHSYEVRLTPYTTFGAGDMASRIIHYTEHNTCHFEDEKICGYTQDLTDNFDWTRQNALTQNPKRSPNTGPPTDISGTPEGYYMFIETSRPRELGDRARLVSPLYNASAKFYCVSFFYHMYGKHIARAKLHFKKKKGKRK

SEQ ID NO: 12375 - protein, 754 aa, Artificial Sequence
  Synthetic polypeptide
MCLLVFPLVPRSPDYILPCSPGWRLRLAASFLLSVFPLLDLLPVALPPGAGPGPIGLEVLAGCVAAVAWISHSLALWVLAHSPHGHSRGPLALALVALLPAPALVLTVLWHCQRGTLLPPLLPGPMARLCLLILQLAALLAYALGWAAPGGPREPWAQEPLLPEDQEPEVAEDGESWLSRFSYAWLAPLLARGACGELRQPQDICRLPHRLQPTYLARVFQAHWQEGARLWRALYGAFGRCYLALGLLKLVGTMLGFSGPLLLSLLVGFLEEGQEPLSHGLLYALGLAGGAVLGAVLQNQYGYEVYKVTLQARGAVLNILYCKALQLGPSRPPTGEALNLLGTDSERLLNFAGSFHEAWGLPLQLAITLYLLYQQVGVAFVGGLILALLLVPVNKVIATRIMASNQEMLQHKDARVKLVTELLSGIRVIKFCGWEQALGARVEACRARELGRLRVIKYLDAACVYLWAALPVVISIVIFITYVLMGHQLTATKVFTALALVRMLILPLNNFPWVINGLLEAKVSLDRIQLFLDLPNHNPQAYYSPDCGRLGAQIKWLLCSDPPAEPSTVLELHGALFSWDPVGTSLETFISHLEVKKGMLVGIVGKVGCGKSSLLAAIAGELHRLRGHVAVRGLSKGFGLATQEPWIQFATIRDNILFGKTFDAQLYKEVLEACALNDDLSILPAGDQTEVGEKGVTLSGGQRARIALARAVYQLLGRLRQENRLNPRGRGCSEPRSHHCTPAWVMRMKPCLQK

SEQ ID NO: 12376 - protein, 782 aa, Artificial Sequence
  Synthetic polypeptide
MERLLAQLCGSSAAWPLPLWEGDTTGHCFTQLVLSALPHALLAVLSACYLGTPRSPDYILPCSPGWRLRLAASFLLSVFPLLDLLPVALPPGAGPGPIGLEVLAGCVAAVAWISHSLALWVLAHSPHGHSRGPLALALVALLPAPALVLTVLWHCQRGTLLPPLLPGPMARLCLLILQLAALLAYALGWAAPGGPREPWAQEPLLPEDQEPEVAEDGESWLSRFSYAWLAPLLARGACGELRQPQDICRLPHRLQPTYLARVFQAHWQEGARLWRALYGAFGRCYLALGLLKLVGTMLGFSGPLLLSLLVGFLEEGQEPLSHGLLYALGLAGGAVLGAVLQNQYGYEVYKVTLQARGAVLNILYCKALQLGPSRPPTGEALNLLGTDSERLLNFAGSFHEAWGLPLQLAITLYLLYQQVGVAFVGGLILALLLVPVNKVIATRIMASNQEMLQHKDARVKLVTELLSGIRVIKFCGWEQALGARVEACRARELGRLRVIKYLDAACVYLWAALPVVISIVIFITYVLMGHQLTATKVFTALALVRMLILPLNNFPWVINGLLEAKVSLDRIQLFLDLPNHNPQAYYSPDPPAEPSTVLELHGALFSWDPVGTSLETFISHLEVKKGMLVGIVGKVGCGKSSLLAAIAGELHRLRGHVAVRGLSKGFGLATQEPWIQFATIRDNILFGKTFDAQLYKEVLEACALNDDLSILPAGDQTEVGEKGVTLSGGQRARIALARAVYQLLGRLRQENRLNPRGRGCSEPRSHHCTPAWVMRMKPCLQK

SEQ ID NO: 12377 - protein, 500 aa, Artificial Sequence
  Synthetic polypeptide
MRRERTRGPQAWEFPSPTKSGCSLQSLSRDLRELREGEKPEDQAETEESWQGLARKTPGKACAPEGGSCQPGKTENTITMTTSHQPQDRYKAVWLIFFMLGLGTLLPWNFFMTATQYFTNRLDMSQNVSLVTAELSKDAQASAAPAAPLPERNSLSAIFNNVMTLCAMLPLLLFTYLNSFLHQRIPQSVRILGSLVAILLVFLITAILVKVQLDALPFFVITMIKIVLINSFGAILQGSLFGLAGLLPASYTAPIMSGQGLAGFFASVAMICAIASGSELSESAFGYFITACAVIILTIICYLGLPRLEFYRYYQQLKLEGPGEQETKLDLISKGEEPRAGKEESGVSVSNSQPTNESHSIKAILKNISVLAFSVCFIFTITIGMFPAVTVEVKSSIAGSSTWERYFIPVSCFLTFNIFDWLGRSLTAVFMWPGKDSRWLPSLVLARLVFVPLLLLCNIKPRRYLTVVFEHDAWFIFFMAAFAFSNGYLASLCMCFGPKS

SEQ ID NO: 12378 - protein, 421 aa, Artificial Sequence
  Synthetic polypeptide
MTTSHQPQDRYKAVWLIFFMLGLGTLLPWNFFMTATQYFTNRLDMSQNVSLVTAELSKDAQASAAPAAPLPERNSLSAIFNNVMTLCAMLPLLLFTYLNSFLHQRIPQSVRILGSLVAILLVFLITAILVKVQLDALPFFVITMIKIVLINSFGAILQGSLFGLAGLLPASYTAPIMSGQGLAGFFASVAMICAIASGSELSESAFGYFITACAVIILTIICYLGLPRLEFYRYYQQLKLEGPGEQETKLDLISKGEEPRAGKEESGVSVSNSQPTNESHSIKAILKNISVLAFSVCFIFTITIGMFPAVTVEVKSSIAGSSTWERYFIPVSCFLTFNIFDWLGRSLTAVFMWPGKDSRWLPSLVLARLVFVPLLLLCNIKPRRYLTVVFEHDAWFIFFMAAFAFSNGYLASLCMCFGPKS

SEQ ID NO: 12379 - protein, 183 aa, Artificial Sequence
  Synthetic polypeptide
MDISIQRNGSIVAGYEVVGSSSASELLSAIEHVAEKAKTALHKLFPLEDGSFRVFGKAQCNDIVFGFGSKDDEYTLPCSSGYRGNITAKCESSGWQVIRETCVLSLLEELNKNFSMIVGNATEAAVSSFVQNLSVIIRQNPSTTVGNLASVVSILSNISSLSLASHFRVSNSTMEVSPQYLEE

SEQ ID NO: 12380 - protein, 380 aa, Artificial Sequence
  Synthetic polypeptide
MKVGVLWLISFFTFTDGHGGFLGKNDGIKTKKELIVNKKKHLGPVEEYQLLLQVTYRDSKEKRDLRNFLKLLKPPLLWSHGLIRIIRAKATTDCNSLNGVLQCTCEDSYTWFPPSCLDPQNCYLHTAGALPSCECHLNNLSQSVNFCERTKIWGTFKINERFTNDLLNSSSAIYSKYANGIEIQLKKAYERIQGFESVQVTQFRNGSIVAGYEVVGSSSASELLSAIEHVAEKAKTALHKLFPLEDGSFRVFGKAQCNDIVFGFGSKDDEYTLPCSSGYRGNITAKCESSGWQVIRETCVLSLLEELNKNFSMIVGNATEAAVSSFVQNLSVIIRQNPSTTVGNLASVVSILSNISSLSLASHFRVSNSTMEVSPQYLEE

SEQ ID NO: 12381 - protein, 173 aa, Artificial Sequence
  Synthetic polypeptide
EYQLLLQVTYRDSKEKRDLRNFLKLLKPPLLWSHGLIRIIRAKATTDCNSLNGVLQCTCEDSYTWFPPSCLDPQNCYLHTAGALPSCECHLNNLSQSVNFCERTKIWGTFKINERFTNDLLNSSSAIYSKYANGIEIQLKKAYERIQGFESVQVTQFRNAVLPLAETQSWSHP

SEQ ID NO: 12382 - protein, 219 aa, Artificial Sequence
  Synthetic polypeptide
MKVGVLWLISFFTFTDGHGGFLGKNDGIKTKKELIVNKKKHLGPVEEYQLLLQVTYRDSKEKRDLRNFLKLLKPPLLWSHGLIRIIRAKATTDCNSLNGVLQCTCEDSYTWFPPSCLDPQNCYLHTAGALPSCECHLNNLSQSVNFCERTKIWGTFKINERFTNDLLNSSSAIYSKYANGIEIQLKKAYERIQGFESVQVTQFRNAVLPLAETQSWSHP

SEQ ID NO: 12383 - protein, 143 aa, Artificial Sequence
  Synthetic polypeptide
  misc_feature (1)..(1): Xaa can be any naturally occurring amino acid
XWSHGLIRIIRAKATTDCNSLNGVLQCTCEDSYTWFPPSCLDPQNCYLHTAGALPSCECHLNNLSQSVNFCERTKIWGTFKINERFTNDLLNSSSAIYSKYANGIEIQLKKAYERIQGFESVQVTQFRNAVLPLAETQSWSHP

SEQ ID NO: 12384 - protein, 153 aa, Artificial Sequence; identical to SEQ ID NO: 1019
  Synthetic polypeptide

SEQ ID NO: 12385 - protein, 199 aa, Artificial Sequence; identical to SEQ ID NO: 868
  Synthetic polypeptide

SEQ ID NO: 12386 - protein, 123 aa, Artificial Sequence
  Synthetic polypeptide
  misc_feature (1)..(1): Xaa can be any naturally occurring amino acid
XWSHGLIRIIRAKATTDCNSLNGVLQCTCEDSYTWFPPSCLDPQNCYLHTAGALPSCECHLNNLSQSVNFCERTKIWGTFKINERFTNDLLNSSSAIYSKYANGIEIQQCCPSTCRDPILEPS

SEQ ID NO: 12387 - protein, 68 aa, Artificial Sequence
  Synthetic polypeptide
MKVGVLWLISFFTFTDGHGGFLGKNDGIKTKKELIVNKKKHLGTLLNIQICTRRMTVIPMSKTFVKIK

SEQ ID NO: 12388 - protein, 159 aa, Artificial Sequence
  Synthetic polypeptide
MATSGAASAELVIGWCIFGLLLLAILAFCWIYVRKYQSRRESEVVSTITAIFSLAIALITSALLPVDIFLVSYMKNQNGTFKDWANANVSRQIEDTVLYGYYTLYSVILFCVFFWIPFVYFYYEEKDDDDTSKCTALWLTPVIPALWEAEAGGSPEVRS

SEQ ID NO: 12389 - protein, 86 aa, Artificial Sequence
  Synthetic polypeptide
MKNQNGTFKDWANANVSRQIEDTVLYGYYTLYSVILFCVFFWIPFVYFYYEEKDDDDTSKCTALWLTPVIPALWEAEAGGSPEVRS

SEQ ID NO: 12390 - protein, 104 aa, Artificial Sequence
  Synthetic polypeptide
MATRSCREKAQKLNEQHQLILSKLLREEDNKYCADCEAKGPRWASWNIGVFICIRCAGIHRNLGVHISRVKSVNLDQWTAEQIQGAVAHTCNPSTLGGPGGQII

SEQ ID NO: 12391 - protein, 118 aa, Artificial Sequence
  Synthetic polypeptide
MATRSCREKAQKLNEQHQLILSKLLREEDNKYCADCEAKGPRWASWNIGVFICIRCAGIHRNLGVHISRVKSVNLDQWTAEQIQCMQDMGNTKARLLYEANLPENFRRPQTDQEPNHE

SEQ ID NO: 12392 - protein, 146 aa, Artificial Sequence
  Synthetic polypeptide
MATRSCREKAQKLNEQHQLILSKLLREEDNKYCADCEAKGPRWASWNIGVFICIRCAGIHRNLGVHISRVKSVNLDQWTAEQIQCMQDMGNTKARLLYEANLPENFRRPQTDQAVEFFIRDKYEKKKYYDKNAIAITNETKGQVSV

SEQ ID NO: 12393 - protein, 43 aa, Artificial Sequence
  Synthetic polypeptide
MLFLKLSVFRAVEFFIRDKYEKKKYYDKNAIAITNETKGQVSV

SEQ ID NO: 12394 - protein, 21 aa, Artificial Sequence
  Synthetic polypeptide
  misc_feature (1)..(1): Xaa can be any naturally occurring amino acid
XKYYDKNAIAITNETKGQVSV

SEQ ID NO: 12395 - protein, 173 aa, Artificial Sequence
  Synthetic polypeptide
MATRSCREKAQKLNEQHQLILSKLLREEDNKYCADCEAKGPRWASWNIGVFICIRCAGIHRNLGVHISRVKSVNLDQWTAEQIQCMQDMGNTKARLLYEANLPENFRRPQTDQAVEFFIRDKYEKKKYYDKNAIAITNISSSDAPLQPLVSSPSLQAAVDKNKLEETKGQVSV

SEQ ID NO: 12396 - protein, 70 aa, Artificial Sequence
  Synthetic polypeptide
MLFLKLSVFRAVEFFIRDKYEKKKYYDKNAIAITNISSSDAPLQPLVSSPSLQAAVDKNKLEETKGQVSV

SEQ ID NO: 12397 - protein, 48 aa, Artificial Sequence
  Synthetic polypeptide
  misc_feature (1)..(1): Xaa can be any naturally occurring amino acid
XKYYDKNAIAITNISSSDAPLQPLVSSPSLQAAVDKNKLEETKGQVSV

SEQ ID NO: 12398 - protein, 595 aa, Artificial Sequence
  Synthetic polypeptide
MSSAVGPRGPRPPTVPPPMQELPDLSHLTEEERNIIMAVMDRQKEEEEKEEAMLKCVVRDMAKPAACKTPRNAENQPHQPSPRLHQQFESYKEQVRKIGEEARRYQGEHKDDAPTCGICHKTKFADGCGHLCSYCRTKFCARCGGRVSLRSNNEDICVMWVCNLCRKQQEILTKSGAWFFGSGPQQTSQDGTLSDTATGAGSEVPREKKARLQERSRSQTPLSTAAASSQDAAPPSAPPDRSKGAEPSQQALGPEQKQASSRSRSEPPRERKKTPGLSEQNGKGALKSERKRVPKTSAQPVEGAVEERERKERRESRRLEKGRSQDYPDTPEKRDEGKAADEEKQRKEEDYQTRYRSDPNLARYPVKPPPEEQQMRMHARVSRARHERRHSDVALPRTEAGAALPEGKAGKRAPAAARASPPDSPRAYSAERTAETRAPGAKQLTNHSPPAPRHGPVPAEAPELKAQEPLRKQSRLDPSSAVLMRKAKREKVETMLRNDSLSSDQSESVRPSPPKPHRSKRGGKKRQMSVSSSEEEGVSTPEYTSCEDVELESESVSEKATQNPMSSTRKVLKWSTCLQTQRFQFGFWTLKAHLT

SEQ ID NO: 12399 - protein, 595 aa, Artificial Sequence
  Synthetic polypeptide
MSSAVGPRGPRPPTVPPPMQELPDLSHLTEEERNIIMAVMDRQKEEEEKEEAMLKCVVRDMAKPAACKTPRNAENQPHQPSPRLHQQFESYKEQVRKIGEEARRYQGEHKDDAPTCGICHKTKFADGCGHLCSYCRTKFCARCGGRVSLRSNNEDKVVMWVCNLCRKQQEILTKSGAWFFGSGPQQTSQDGTLSDTATGAGSEVPREKKARLQERSRSQTPLSTAAASSQDAAPPSAPPDRSKGAEPSQQALGPEQKQASSRSRSEPPRERKKTPGLSEQNGKGALKSERKRVPKTSAQPVEGAVEERERKERRESRRLEKGRSQDYPDTPEKRDEGKAADEEKQRKEEDYQTRYRSDPNLARYPVKPPPEEQQMRMHARVSRARHERRHSDVALPRTEAGAALPEGKAGKRAPAAARASPPDSPRAYSAERTAETRAPGAKQLTNHSPPAPRHGPVPAEAPELKAQEPLRKQSRLDPSSAVLMRKAKREKVETMLRNDSLSSDQSESVRPSPPKPHRSKRGGKKRQMSVSSSEEEGVSTPEYTSCEDVELESESVSEKATQNPMSSTRKVLKWSTCLQTQRFQFGFWTLKAHLT

SEQ ID NO: 12400 - protein, 169 aa, Artificial Sequence
  Synthetic polypeptide
  misc_feature (1)..(1): Xaa can be any naturally occurring amino acid
XYSAERTAETRAPGAKQLTNHSPPAPRHGPVPAEAPELKAQEPLRKQSRLDPSSAVLMRKAKREKVETMLRNDSLSSDQSESVRPSPPKPHRSKRGGKKRQMSVSSSEEEGVSTPEYTSCEDVELESESVSEKATQNPMSSTRKVLKWSTCLQTQRFQFGFWTLKAHLT

SEQ ID NO: 12401 - protein, 359 aa, Artificial Sequence
  Synthetic polypeptide
MPRHHAGGEEGGAAGLWVKSGAAAAAAGGGRLGSGMKDVESGRGRVLLNSAAARGDGLLLLGTRAATLGGGGGGLRESRRGKQGARMSLLGKPLSYTSSQSCRRNVKYRRVQNYLYNVLERPRGWAFIYHAFVFLLVFGCLILSVFSTIPEHTKLASSCLLILEFVMIVVFGLEFIIRIWSAGCCCRYRGWQGRLRFARKPFCVIDTIVLIASIAVVSAKTQGNIFATSALRSLRFLQILRMVRMDRRGGTWKLLGSVVYAHSKELITAWYIGFLVLIFSSFLVYLVEKDANKEFSTYADALWWGTITLTTIGYGDKTPLTWLGRLLSAGFALLGISFFALPANGGRIIEPREILCGPM

SEQ ID NO: 12402 - protein, 359 aa, Artificial Sequence
  Synthetic polypeptide
MPRHHAGGEEGGAAGLWVKSGAAAAAAGGGRLGSGMKDVESGRGRVLLNSAAARGDGLLLLGTRAATLGGGGGGLRESRRGKQGARMSLLGKPLSYTSSQSCRRNVKYRRVQNYLYNVLERPRGWAFIYHAFVFLPVFGCLILSVFSTIPEHTKLASSCLLILEFVMIVVFGLEFIIRIWSAGCCCRYRGWQGRLRFARKPFCVIDTIVLIASIAVVSAKTQGNIFATSALRSLRFLQILRMVRMDRRGGTWKLLGSVVYAHSKELITAWYIGFLVLIFSSFLVYLVEKDANKEFSTYADALWWGTITLTTIGYGDKTPLTWLGRLLSAGFALLGISFFALPANGGRIIEPREILCGPM

SEQ ID NO: 12403 - protein, 550 aa, Artificial Sequence
  Synthetic polypeptide
MPRHHAGGEEGGAAGLWVKSGAAAAAAGGGRLGSGMKDVESGRGRVLLNSAAARGDGLLLLGTRAATLGGGGGGLRESRRGKQGARMSLLGKPLSYTSSQSCRRNVKYRRVQNYLYNVLERPRGWAFIYHAFVFLLVFGCLILSVFSTIPEHTKLASSCLLILEFVMIVVFGLEFIIRIWSAGCCCRYRGWQGRLRFARKPFCVIDTIVLIASIAVVSAKTQGNIFATSALRSLRFLQILRMVRMDRRGGTWKLLGSVVYAHSKELITAWYIGFLVLIFSSFLVYLVEKDANKEFSTYADALWWGTITLTTIGYGDKTPLTWLGRLLSAGFALLGISFFALPAGILGSGFALKVQEQHRQKHFEKRRNPAANLIQCVWRSYAADEKSVSIATWKPHLKALHTCSPTKKEQGEASSSKFCSNKQKLFRMYTSRKQSQKLSFKERVRMASPRGQSIKSRQASVGDRRSPSTDITAEGSPTKVQKSWSFNDRTRFRPSLRLKSSQPKPVIDADTALGTDDVYDEKGCQCDVSVEDLTPPLKTVIRAISSARMD

SEQ ID NO: 12404 - protein, 531 aa, Artificial Sequence
  Synthetic polypeptide
MPRHHAGGEEGGAAGLWVKSGAAAAAAGGGRLGSGMKDVESGRGRVLLNSAAARGDGLLLLGTRAATLGGGGGGLRESRRGKQGARMSLLGKPLSYTSSQSCRRNVKYRRVQNYLYNVLERPRGWAFIYHAFVFLLVFGCLILSVFSTIPEHTKLASSCLLILEFVMIVVFGLEFIIRIWSAGCCCRYRGWQGRLRFARKPFCVIDTIVLIASIAVVSAKTQGNIFATSALRSLRFLQILRMVRMDRRGGTWKLLGSVVYAHSKELITAWYIGFLVLIFSSFLVYLVEKDANKEFSTYADALWWGTITLTTIGYGDKTPLTWLGRLLSAGFALLGISFFALPAGILGSGFALKVQEQHRQKHFEKRRNPAANLIQCVWRSYAADEKSVSIATWKPHLKALHTCSPTKKEQGEASSSQKLSFKERVRMASPRGQSIKSRQASVGDRRSPSTDITAEGSPTKVQKSWSFNDRTRFRPSLRLKSSQPKPVIDADTALGTDDVYDEKGCQCDVSVEDLTPPLKTVIRAISSARMD

SEQ ID NO: 12405 - protein, 532 aa, Artificial Sequence
  Synthetic polypeptide
MPRHHAGGEEGGAAGLWVKSGAAAAAAGGGRLGSGMKDVESGRGRVLLNSAAARGDGLLLLGTRAATLGGGGGGLRESRRGKQGARMSLLGKPLSYTSSQSCRRNVKYRRVQNYLYNVLERPRGWAFIYHAFVFLLVFGCLILSVFSTIPEHTKLASSCLLILEFVMIVVFGLEFIIRIWSAGCCCRYRGWQGRLRFARKPFCVIDTIVLIASIAVVSAKTQGNIFATSALRSLRFLQILRMVRMDRRGGTWKLLGSVVYAHSKELITAWYIGFLVLIFSSFLVYLVEKDANKEFSTYADALWWGTITLTTIGYGDKTPLTWLGRLLSAGFALLGISFFALPAGILGSGFALKVQEQHRQKHFEKRRNPAANLIQCVWRSYAADEKSVSIATWKPHLKALHTCSPTKQNQQGESQSCQKLSFKERVRMASPRGQSIKSRQASVGDRRSPSTDITAEGSPTKVQKSWSFNDRTRFRPSLRLKSSQPKPVIDADTALGTDDVYDEKGCQCDVSVEDLTPPLKTVIRAISSARMD

SEQ ID NO: 12406 - protein, 541 aa, Artificial Sequence
  Synthetic polypeptide
MPRHHAGGEEGGAAGLWVKSGAAAAAAGGGRLGSGMKDVESGRGRVLLNSAAARGDGLLLLGTRAATLGGGGGGLRESRRGKQGARMSLLGKPLSYTSSQSCRRNVKYRRVQNYLYNVLERPRGWAFIYHAFVFLLVFGCLILSVFSTIPEHTKLASSCLLILEFVMIVVFGLEFIIRIWSAGCCCRYRGWQGRLRFARKPFCVIDTIVLIASIAVVSAKTQGNIFATSALRSLRFLQILRMVRMDRRGGTWKLLGSVVYAHSKELITAWYIGFLVLIFSSFLVYLVEKDANKEFSTYADALWWGTITLTTIGYGDKTPLTWLGRLLSAGFALLGISFFALPAGILGSGFALKVQEQHRQKHFEKRRNPAANLIQCVWRSYAADEKSVSIATWKPHLKALHTCSPTNKFCSNKQKLFRMYTSRKQSQKLSFKERVRMASPRGQSIKSRQASVGDRRSPSTDITAEGSPTKVQKSWSFNDRTRFRPSLRLKSSQPKPVIDADTALGTDDVYDEKGCQCDVSVEDLTPPLKTVIRAISSARMD

SEQ ID NO: 12407 - protein, 522 aa, Artificial Sequence
  Synthetic polypeptide
MPRHHAGGEEGGAAGLWVKSGAAAAAAGGGRLGSGMKDVESGRGRVLLNSAAARGDGLLLLGTRAATLGGGGGGLRESRRGKQGARMSLLGKPLSYTSSQSCRRNVKYRRVQNYLYNVLERPRGWAFIYHAFVFLLVFGCLILSVFSTIPEHTKLASSCLLILEFVMIVVFGLEFIIRIWSAGCCCRYRGWQGRLRFARKPFCVIDTIVLIASIAVVSAKTQGNIFATSALRSLRFLQILRMVRMDRRGGTWKLLGSVVYAHSKELITAWYIGFLVLIFSSFLVYLVEKDANKEFSTYADALWWGTITLTTIGYGDKTPLTWLGRLLSAGFALLGISFFALPAGILGSGFALKVQEQHRQKHFEKRRNPAANLIQCVWRSYAADEKSVSIATWKPHLKALHTCSPTNQKLSFKERVRMASPRGQSIKSRQASVGDRRSPSTDITAEGSPTKVQKSWSFNDRTRFRPSLRLKSSQPKPVIDADTALGTDDVYDEKGCQCDVSVEDLTPPLKTVIRAISSARMD

SEQ ID NO: 12408 - protein, 531 aa, Artificial Sequence
  Synthetic polypeptide
MPRHHAGGEEGGAAGLWVKSGAAAAAAGGGRLGSGMKDVESGRGRVLLNSAAARGDGLLLLGTRAATLGGGGGGLRESRRGKQGARMSLLGKPLSYTSSQSCRRNVKYRRVQNYLYNVLERPRGWAFIYHAFVFLPVFGCLILSVFSTIPEHTKLASSCLLILEFVMIVVFGLEFIIRIWSAGCCCRYRGWQGRLRFARKPFCVIDTIVLIASIAVVSAKTQGNIFATSALRSLRFLQILRMVRMDRRGGTWKLLGSVVYAHSKELITAWYIGFLVLIFSSFLVYLVEKDANKEFSTYADALWWGTITLTTIGYGDKTPLTWLGRLLSAGFALLGISFFALPAGILGSGFALKVQEQHRQKHFEKRRNPAANLIQCVWRSYAADEKSVSIATWKPHLKALHTCSPTKKEQGEASSSQKLSFKERVRMASPRGQSIKSRQASVGDRRSPSTDITAEGSPTKVQKSWSFNDRTRFRPSLRLKSSQPKPVIDADTALGTDDVYDEKGCQCDVSVEDLTPPLKTVIRAISSARMD

SEQ ID NO: 12409 - protein, 549 aa, Artificial Sequence
  Synthetic polypeptide
MPRHHAGGEEGGAAGLWVKSGAAAAAAGGGRLGSGMKDVESGRGRVLLNSAAARGDGLLLLGTRAATLGGGGGGLRESRRGKQGARMSLLGKPLSYTSSQSCRRNVKYRRVQNYLYNVLERPRGWAFIYHAFVFLLVFGCLILSVFSTIPEHTKLASSCLLILEFVMIVVFGLEFIIRIWSAGCCCRYRGWQGRLRFARKPFCVIDTIVLIASIAVVSAKTQGNIFATSALRSLRFLQILRMVRMDRRGGTWKLLGSVVYAHSKELITAWYIGFLVLIFSSFLVYLVEKDANKEFSTYADALWWGTITLTTIGYGDKTPLTWLGRLLSAGFALLGISFFALPAGILGSGFALKVQEQHRQKHFEKRRNPAANLIQCVWRSYAADEKSVSIATWKPHLKALHTCSPTKKEQGEASSSKFCSNKQKLFRMYTSRKQSQKLSFKERVRMASPRGQSIKSRQASVGDRRSPSTDITAEGSPTKVQKSWSFNDRTRFRPSLRLKSSQPKPVIDADTALGTDDVYDEKGCQCDVSVEDLTPPLKTVIRAISARMD

SEQ ID NO: 12410 - protein, 530 aa, Artificial Sequence
  Synthetic polypeptide
MPRHHAGGEEGGAAGLWVKSGAAAAAAGGGRLGSGMKDVESGRGRVLLNSAAARGDGLLLLGTRAATLGGGGGGLRESRRGKQGARMSLLGKPLSYTSSQSCRRNVKYRRVQNYLYNVLERPRGWAFIYHAFVFLLVFGCLILSVFSTIPEHTKLASSCLLILEFVMIVVFGLEFIIRIWSAGCCCRYRGWQGRLRFARKPFCVIDTIVLIASIAVVSAKTQGNIFATSALRSLRFLQILRMVRMDRRGGTWKLLGSVVYAHSKELITAWYIGFLVLIFSSFLVYLVEKDANKEFSTYADALWWGTITLTTIGYGDKTPLTWLGRLLSAGFALLGISFFALPAGILGSGFALKVQEQHRQKHFEKRRNPAANLIQCVWRSYAADEKSVSIATWKPHLKALHTCSPTKKEQGEASSSQKLSFKERVRMASPRGQSIKSRQASVGDRRSPSTDITAEGSPTKVQKSWSFNDRTRFRPSLRLKSSQPKPVIDADTALGTDDVYDEKGCQCDVSVEDLTPPLKTVIRAISARMD

SEQ ID NO: 12411 - protein, 531 aa, Artificial Sequence
  Synthetic polypeptide
MPRHHAGGEEGGAAGLWVKSGAAAAAAGGGRLGSGMKDVESGRGRVLLNSAAARGDGLLLLGTRAATLGGGGGGLRESRRGKQGARMSLLGKPLSYTSSQSCRRNVKYRRVQNYLYNVLERPRGWAFIYHAFVFLLVFGCLILSVFSTIPEHTKLASSCLLILEFVMIVVFGLEFIIRIWSAGCCCRYRGWQGRLRFARKPFCVIDTIVLIASIAVVSAKTQGNIFATSALRSLRFLQILRMVRMDRRGGTWKLLGSVVYAHSKELITAWYIGFLVLIFSSFLVYLVEKDANKEFSTYADALWWGTITLTTIGYGDKTPLTWLGRLLSAGFALLGISFFALPAGILGSGFALKVQEQHRQKHFEKRRNPAANLIQCVWRSYAADEKSVSIATWKPHLKALHTCSPTKQNQQGESQSCQKLSFKERVRMASPRGQSIKSRQASVGDRRSPSTDITAEGSPTKVQKSWSFNDRTRFRPSLRLKSSQPKPVIDADTALGTDDVYDEKGCQCDVSVEDLTPPLKTVIRAISARMD

SEQ ID NO: 12412 - protein, 540 aa, Artificial Sequence
  Synthetic polypeptide
MPRHHAGGEEGGAAGLWVKSGAAAAAAGGGRLGSGMKDVESGRGRVLLNSAAARGDGLLLLGTRAATLGGGGGGLRESRRGKQGARMSLLGKPLSYTSSQSCRRNVKYRRVQNYLYNVLERPRGWAFIYHAFVFLLVFGCLILSVFSTIPEHTKLASSCLLILEFVMIVVFGLEFIIRIWSAGCCCRYRGWQGRLRFARKPFCVIDTIVLIASIAVVSAKTQGNIFATSALRSLRFLQILRMVRMDRRGGTWKLLGSVVYAHSKELITAWYIGFLVLIFSSFLVYLVEKDANKEFSTYADALWWGTITLTTIGYGDKTPLTWLGRLLSAGFALLGISFFALPAGILGSGFALKVQEQHRQKHFEKRRNPAANLIQCVWRSYAADEKSVSIATWKPHLKALHTCSPTNKFCSNKQKLFRMYTSRKQSQKLSFKERVRMASPRGQSIKSRQASVGDRRSPSTDITAEGSPTKVQKSWSFNDRTRFRPSLRLKSSQPKPVIDADTALGTDDVYDEKGCQCDVSVEDLTPPLKTVIRAISARMD

SEQ ID NO: 12413 - protein, 521 aa, Artificial Sequence
  Synthetic polypeptide
MPRHHAGGEEGGAAGLWVKSGAAAAAAGGGRLGSGMKDVESGRGRVLLNSAAARGDGLLLLGTRAATLGGGGGGLRESRRGKQGARMSLLGKPLSYTSSQSCRRNVKYRRVQNYLYNVLERPRGWAFIYHAFVFLLVFGCLILSVFSTIPEHTKLASSCLLILEFVMIVVFGLEFIIRIWSAGCCCRYRGWQGRLRFARKPFCVIDTIVLIASIAVVSAKTQGNIFATSALRSLRFLQILRMVRMDRRGGTWKLLGSVVYAHSKELITAWYIGFLVLIFSSFLVYLVEKDANKEFSTYADALWWGTITLTTIGYGDKTPLTWLGRLLSAGFALLGISFFALPAGILGSGFALKVQEQHRQKHFEKRRNPAANLIQCVWRSYAADEKSVSIATWKPHLKALHTCSPTNQKLSFKERVRMASPRGQSIKSRQASVGDRRSPSTDITAEGSPTKVQKSWSFNDRTRFRPSLRLKSSQPKPVIDADTALGTDDVYDEKGCQCDVSVEDLTPPLKTVIRAISARMD

SEQ ID NO: 12414 - protein, 530 aa, Artificial Sequence
  Synthetic polypeptide
MPRHHAGGEEGGAAGLWVKSGAAAAAAGGGRLGSGMKDVESGRGRVLLNSAAARGDGLLLLGTRAATLGGGGGGLRESRRGKQGARMSLLGKPLSYTSSQSCRRNVKYRRVQNYLYNVLERPRGWAFIYHAFVFLPVFGCLILSVFSTIPEHTKLASSCLLILEFVMIVVFGLEFIIRIWSAGCCCRYRGWQGRLRFARKPFCVIDTIVLIASIAVVSAKTQGNIFATSALRSLRFLQILRMVRMDRRGGTWKLLGSVVYAHSKELITAWYIGFLVLIFSSFLVYLVEKDANKEFSTYADALWWGTITLTTIGYGDKTPLTWLGRLLSAGFALLGISFFALPAGILGSGFALKVQEQHRQKHFEKRRNPAANLIQCVWRSYAADEKSVSIATWKPHLKALHTCSPTKKEQGEASSSQKLSFKERVRMASPRGQSIKSRQASVGDRRSPSTDITAEGSPTKVQKSWSFNDRTRFRPSLRLKSSQPKPVIDADTALGTDDVYDEKGCQCDVSVEDLTPPLKTVIRAISARMD

SEQ ID NO: 12415 - protein, 382 aa, Artificial Sequence
  Synthetic polypeptide
MQPWHGKAMQRASEAGATAPKASARNARGAPMDPTESPAAPEAALPKAGKFGPARKSGSRQKKSAPDTQERPPVRATGARAKKAPQRAQDTQPSDATSAPGAEGLEPPAAREPALSRAGSCRQRGARCSTKPRPPPGPWDVPSPGLPVSAPILVRRDAAPGASKLRAVLEKLKLSRDDISTAAGMVKGVVDHLLLRLKCDSAFRGVGLLNTGSYYEHVKISAPNEFDVMFKLEVPRIQLEEYSNTRAYYFVKFKRNPKENPLSQFLEGEILSASKMLSKFRKIIKEEINDIKDTDVIMKRKRGGSPAVTLLISEKISVDITLALESKSSWPASTQEGLRIQNWLSAKVRKQLRLKPFYLVPKHAKEGNGFQALQKAEEGELL

SEQ ID NO: 12416 - protein, 435 aa, Artificial Sequence
  Synthetic polypeptide
MGKEKTHINIVVIGHVDSGKSTTTGHLIYKCGGIDKRTIEKFEKEAAEMGKGSFKYAWVLDKLKAERERGITIDISLWKFETSKYYVTIIDAPGHRDFIKNMITGTSQADCAVLIVAAGVGEFEAGISKNGQTREHALLAYTLGVKQLIVGVNKMDSTEPPYSQKRYEEIVKEVSTYIKKIGYNPDTVAFVPISGWNGDNMLEPSANMPWFKGWKVTRKDGNASGTTLLEALDCILPPTRPTDKPLRLPLQDVYKIGGIGTVPVGRVETGVLKPGMVVTFAPVNVTTEVKSVEMHHEALSEALPGDNVGFNVKNVSVKDVRRGNVAGDSKNDPPMEAAGFTAQVIILNHPGQISAGYAPVLDCHTAHIACKFAELKEKIDRRSGKKLEDGPKFLKSGDAAIVDMVPGKPMRVDSLSSRVRDQHGEHGEMPSLLKI

SEQ ID NO: 12417 - protein, 398 aa, Artificial Sequence
  Synthetic polypeptide
MGKEKTHINIVVIGHVDSGKSTTTGHLIYKCGGIDKRTIEKFEKEAAEMGKGSFKYAWVLDKLKAERERGITIDISLWKFETSKYYVTIIDAPGHRDFIKNMITGTSQADCAVLIVAAGVGEFEAGISKNGQTREHALLAYTLGVKQLIVGVNKMDSTEPPYSQKRYEEIVKEVSTYIKKIGYNPDTVAFVPISGWNGDNMLEPSANMPWFKGWKVTRKDGNASGTTLLEALDCILPPTRPTDKPLRLPLQDVYKIGGIGTVPVGRVETGVLKPGMVVTFAPVNVTTEVKSVEMHHEALSEALPGDNVGFNVKNVSVKDVRRGNVAGDSKNDPPMEAAGFTAQVIILNHPGQISAGYAPVLDCHTAHIACKFAELKEKIDRRQEFENSLVNMVKLCLY

SEQ ID NO: 12418 - protein, 112 aa, Artificial Sequence
  Synthetic polypeptide
MGKEKTHINIVVIGHVDSGKSTTTGHLIYKCGGIDKRTIEKFEKEAAEMGKGSFKYAWVLDKLKAERERGITIDISLWKFETSKYYVTIIDAPGHRDFIKNMITGTSQADCA

SEQ ID NO: 12419 - protein, 921 aa, Artificial Sequence
  Synthetic polypeptide
MQGPPLLTAAHLLCVCTAALAVAPGPRFLVTAPGIIRPGGNVTIGVELLEHCPSQVTVKAELLKTASNLTVSVLEAEGVFEKGSFKTLTLPSDPKSNLIQQWLSQQSDLGVISKTFQLSSHPILGDWSIQVQVNDQTYYQSFQVSEYVLPKFEVTLQTPLYCSMNSKHLNGTITAKYTYGKPVKGDVTLTFLPLSFWGKKKNITKTFKINGSANFSFNDEEMKNVMDSSNGLSEYLDLSSPGPVEILTTVTESVTGISRNVSTNVFFKQHDYIIEFFDYTTVLKPSLNFTATVKVTRADGNQLTLEERRNNVVITVTQRNYTEYWSGSNSGNQKMEAVQKINYTVPQSGTFKIEFPILEDSSELQLKAYFLGSKSSMAVHSLFKSPSKTYIQLKTRDENIKVGSPFELVVSGNKRLKELSYMVVSRGQLVAVGKQNSTMFSLTPENSWTPKACVIVYYIEDDGEIISDVLKIPVQLVFKNKIKLYWSKVKAEPSEKVSLRISVTQPDSIVGIVAVDKSVNLMNASNDITMENVVHELELYNTGYYLGMFMNSFAVFQECGLWVLTDANLTKDYIDGVYDNAEYAERFMEENEGHIVDIHDFSLGSSPHVRKHFPETWIWLDTNMGYRIYQEFEVTVPDSITSWVATGFVISEDLGLGLTTTPVELQAFQPFFIFLNLPYSVIRGEEFALEITIFNYLKDATEVKVIIEKSDKFDILMTSNEINATGHQQTLLVPSEDGATVLFPIRPTHLGEIPITVTALSPTASDAVTQMILVKAEGIEKSYSQSILLDLTDNRLQSTLKTLSFSFPPNTVTGSERVQITAIGDVLGPSINGLASLIRMPYGCGEQNMINFAPNIYILDYLTKKKQLTDNLKEKALSFMRQGYQRELLYQREDGSFSAFGNYDPSGSTCHPITGYIPKGL

SEQ ID NO: 12420 - protein, 998 aa, Artificial Sequence
  Synthetic polypeptide
MQGPPLLTAAHLLCVCTAALAVAPGPRFLVTAPGIIRPGGNVTIGVELLEHCPSQVTVKAELLKTASNLTVSVLEAEGVFEKGSFKTLTLPSLPLNSADEIYELRVTGRTQDEILFSNSTRLSFETKRISVFIQTDKALYKPKQEVKFRIVTLFSDFKPYKTSLNILIKDPKSNLIQQWLSQQSDLGVISKTFQLSSHPILGDWSIQVQVNDQTYYQSFQVSEYVLPKFEVTLQTPLYCSMNSKHLNGTITAKYTYGKPVKGDVTLTFLPLSFWGKKKNITKTFKINGSANFSFNDEEMKNVMDSSNGLSEYLDLSSPGPVEILTTVTESVTGISRNVSTNVFFKQHDYIIEFFDYTTVLKPSLNFTATVKVTRADGNQLTLEERRNNVVITVTQRNYTEYWSGSNSGNQKMEAVQKINYTVPQSGTFKIEFPILEDSSELQLKAYFLGSKSSMAVHSLFKSPSKTYIQLKTRDENIKVGSPFELVVSGNKRLKELSYMVVSRGQLVAVGKQNSTMFSLTPENSWTPKACVIVYYIEDDGEIISDVLKIPVQLVFKNKIKLYWSKVKAEPSEKVSLRISVTQPDSIVGIVAVDKSVNLMNASNDITMENVVHELELYNTGYYLGMFMNSFAVFQECGLWVLTDANLTKDYIDGVYDNAEYAERFMEENEGHIVDIHDFSLGSSPHVRKHFPETWIWLDTNMGYRIYQEFEVTVPDSITSWVATGFVISEDLGLGLTTTPVELQAFQPFFIFLNLPYSVIRGEEFALEITIFNYLKDATEVKVIIEKSDKFDILMTSNEINATGHQQTLLVPSEDGATVLFPIRPTHLGEIPITVTALSPTASDAVTQMILVKAEGIEKSYSQSILLDLTDNRLQSTLKTLSFSFPPNTVTGSERVQITAIGDVLGPSINGLASLIRMPYGCGEQNMINFAPNIYILDYLTKKKQLTDNLKEKALSFMRQGYQRELLYQREDGSFSAFGNYDPSGSTCHPITGYIPKGL

SEQ ID NO: 12421 - protein, 1341 aa, Artificial Sequence
  Synthetic polypeptide
MQGPPLLTAAHLLCVCTAALAVAPGPRFLVTAPGIIRPGGNVTIGVELLEHCPSQVTVKAELLKTASNLTVSVLEAEGVFEKGSFKTLTLPSDPKSNLIQQWLSQQSDLGVISKTFQLSSHPILGDWSIQVQVNDQTYYQSFQVSEYVLPKFEVTLQTPLYCSMNSKHLNGTITAKYTYGKPVKGDVTLTFLPLSFWGKKKNITKTFKINGSANFSFNDEEMKNVMDSSNGLSEYLDLSSPGPVEILTTVTESVTGISRNVSTNVFFKQHDYIIEFFDYTTVLKPSLNFTATVKVTRADGNQLTLEERRNNVVITVTQRNYTEYWSGSNSGNQKMEAVQKINYTVPQSGTFKIEFPILEDSSELQLKAYFLGSKSSMAVHSLFKSPSKTYIQLKTRDENIKVGSPFELVVSGNKRLKELSYMVVSRGQLVAVGKQNSTMFSLTPENSWTPKACVIVYYIEDDGEIISDVLKIPVQLVFKNKIKLYWSKVKAEPSEKVSLRISVTQPDSIVGIVAVDKSVNLMNASNDITMENVVHELELYNTGYYLGMFMNSFAVFQECGLWVLTDANLTKDYIDGVYDNAEYAERFMEENEGHIVDIHDFSLGSSPHVRKHFPETWIWLDTNMGYRIYQEFEVTVPDSITSWVATGFVISEDLGLGLTTTPVELQAFQPFFIFLNLPYSVIRGEEFALEITIFNYLKDATEVKVIIEKSDKFDILMTSNEINATGHQQTLLVPSEDGATVLFPIRPTHLGEIPITVTALSPTASDAVTQMILVKAEGIEKSYSQSILLDLTDNRLQSTLKTLSFSFPPNTVTGSERVQITAIGDVLGPSINGLASLIRMPYGCGEQNMINFAPNIYILDYLTKKKQLTDNLKEKALSFMRQGYQRELLYQREDGSFSAFGNYDPSGSTWLSAFVLRCFLEADPYIDIDQNVLHRTYTWLKGHQKSNGEFWDPGRVIHSELQGGNKSPVTLTAYIVTSLLGYRKYQPNIDVQESIHFLESEFSRGISDNYTLALITYALSSVGSPKAKEALNMLTWRAEQEGGMQFWVSSESKLSDSWQPRSLDIEVAAYALLSHFLQFQTSEGIPIMRWLSRQRNSLGGFASTQDTTVALKALSEFAALMNTERTNIQVTVTGPSSPSPVKFLIDTHNRLLLQTAELAVVQPTAVNISANGFGFAICQLNVVYNVKASGSSRRRRSIQNQEAFDLDVAVKENKDDLNHVDLNVCTSFSGPGRSGMALMEVNLLSGFMVPSEAISLSETVKKVEYDHGKLNLYLDSVNETQFCVNIPAVRNFKVSNTQDASVSIVDYYEPTTWMQLKVIILSELMKKQKTKYHMFSLISGS

SEQ ID NO: 12422 - protein, 1401 aa, Artificial Sequence
  Synthetic polypeptide
MQGPPLLTAAHLLCVCTAALAVAPGPRFLVTAPGIIRPGGNVTIGVELLEHCPSQVTVKAELLKTASNLTVSVLEAEGVFEKGSFKTLTLPSLPLNSADEIYELRVTGRTQDEILFSNSTRLSFETKRISVFIQTDKALYKPKQEVKFRIVTLFSDFKPYKTSLNILIKDPKSNLIQQWLSQQSDLGVISKTFQLSSHPILGDWSIQVQVNDQTYYQSFQVSEYVLPKFEVTLQTPLYCSMNSKHLNGTITAKYTYGKPVKGDVTLTFLPLSFWGKKKNITKTFKINGSANFSFNDEEMKNVMDSSNGLSEYLDLSSPGPVEILTTVTESVTGISRNVSTNVFFKQHDYIIEFFDYTTVLKPSLNFTATVKVTRADGNQLTLEERRNNVVITVTQRNYTEYWSGSNSGNQKMEAVQKINYTVPQSGTFKIEFPILEDSSELQLKAYFLGSKSSMAVHSLFKSPSKTYIQLKTRDENIKVGSPFELVVSGNKRLKELSYMVVSRGQLVAVGKQNSTMFSLTPENSWTPKACVIVYYIEDDGEIISDVLKIPVQLVFKNKIKLYWSKVKAEPSEKVSLRISVTQPDSIVGIVAVDKSVNLMNASNDITMENVVHELELYNTGYYLGMFMNSFAVFQECGLWVLTDANLTKDYIDGVYDNAEYAERFMEENEGHIVDIHDFSLGSSPHVRKHFPETWIWLDTNMGYRIYQEFEVTVPDSITSWVATGFVISEDLGLGLTTTPVELQAFQPFFIFLNLPYSVIRGEEFALEITIFNYLKDATEVKVIIEKSDKFDILMTSNEINATGHQQTLLVPSEDGATVLFPIRPTHLGEIPITVTALSPTASDAVTQMILVKAEGIEKSYSQSILLDLTDNRLQSTLKTLSFSFPPNTVTGSERVQITAIGDVLGPSINGLASLIRMPYGCGEQNMINFAPNIYILDYLTKKKQLTDNLKEKALSFMRQGYQRELLYQREDGSFSAFGNYDPSGSTWLSAFVLRCFLEADPYIDIDQNVLHRTYTWLKGHQKSNGEFWDPGRVIHSELQGGNKSPVTLTAYIVTSLLGYRKYQPNIDVQESIHFLESEFSRGISDNYTLALITYALSSVGSPKAKEALNMLTWRAEQEGGMQFWVSSESKLSDSWQPRSLDIEVAAYALLSHFLQFQTSEGIPIMRWLSRQRNSLGGFASTQDTTVALKALSEFAALMNTERTNIQVTVTGPSSPSPLAVVQPTAVNISANGFGFAICQLNVVYNVKASGSSRRRRSIQNQEAFDLDVAVKENKDDLNHVDLNVCTSFSGPGRSGMALMEVNLLSGFMVPSEAISLSETVKKVEYDHGKLNLYLDSVNETQFCVNIPAVRNFKVSNTQDASVSIVDYYEPTTWMQLKVIILSELMKKQKTKYHMFSLISGS

SEQ ID NO: 12423 - protein, 1418 aa, Artificial Sequence
  Synthetic polypeptide
MQGPPLLTAAHLLCVCTAALAVAPGPRFLVTAPGIIRPGGNVTIGVELLEHCPSQVTVKAELLKTASNLTVSVLEAEGVFEKGSFKTLTLPSLPLNSADEIYELRVTGRTQDEILFSNSTRLSFETKRISVFIQTDKALYKPKQEVKFRIVTLFSDFKPYKTSLNILIKDPKSNLIQQWLSQQSDLGVISKTFQLSSHPILGDWSIQVQVNDQTYYQSFQVSEYVLPKFEVTLQTPLYCSMNSKHLNGTITAKYTYGKPVKGDVTLTFLPLSFWGKKKNITKTFKINGSANFSFNDEEMKNVMDSSNGLSEYLDLSSPGPVEILTTVTESVTGISRNVSTNVFFKQHDYIIEFFDYTTVLKPSLNFTATVKVTRADGNQLTLEERRNNVVITVTQRNYTEYWSGSNSGNQKMEAVQKINYTVPQSGTFKIEFPILEDSSELQLKAYFLGSKSSMAVHSLFKSPSKTYIQLKTRDENIKVGSPFELVVSGNKRLKELSYMVVSRGQLVAVGKQNSTMFSLTPENSWTPKACVIVYYIEDDGEIISDVLKIPVQLVFKNKIKLYWSKVKAEPSEKVSLRISVTQPDSIVGIVAVDKSVNLMNASNDITMENVVHELELYNTGYYLGMFMNSFAVFQECGLWVLTDANLTKDYIDGVYDNAEYAERFMEENEGHIVDIHDFSLGSSPHVRKHFPETWIWLDTNMGYRIYQEFEVTVPDSITSWVATGFVISEDLGLGLTTTPVELQAFQPFFIFLNLPYSVIRGEEFALEITIFNYLKDATEVKVIIEKSDKFDILMTSNEINATGHQQTLLVPSEDGATVLFPIRPTHLGEIPITVTALSPTASDAVTQMILVKAEGIEKSYSQSILLDLTDNRLQSTLKTLSFSFPPNTVTGSERVQITAIGDVLGPSINGLASLIRMPYGCGEQNMINFAPNIYILDYLTKKKQLTDNLKEKALSFMRQGYQRELLYQREDGSFSAFGNYDPSGSTWLSAFVLRCFLEADPYIDIDQNVLHRTYTWLKGHQKSNGEFWDPGRVIHSELQGGNKSPVTLTAYIVTSLLGYRKYQPNIDVQESIHFLESEFSRGISDNYTLALITYALSSVGSPKAKEALNMLTWRAEQEGGMQFWVSSESKLSDSWQPRSLDIEVAAYALLSHFLQFQTSEGIPIMRWLSRQRNSLGGFASTQDTTVALKALSEFAALMNTERTNIQVTVTGPSSPSPVKFLIDTHNRLLLQTAELAVVQPTAVNISANGFGFAICQLNVVYNVKASGSSRRRRSIQNQEAFDLDVAVKENKDDLNHVDLNVCTSFSGPGRSGMALMEVNLLSGFMVPSEAISLSETVKKVEYDHGKLNLYLDSVNETQFCVNIPAVRNFKVSNTQDASVSIVDYYEPTTWMQLKVIILSELMKKQKTKYHMFSLISGS

SEQ ID NO: 12424 - protein, 47 aa, Artificial Sequence
  Synthetic polypeptide
MEDGKPVWAPHPTDGFQMGNIVDIGPDSLTIEPLNQKGKASCSGSCL

SEQ ID NO: 12425 - protein, 93 aa, Artificial Sequence
  Synthetic polypeptide
MPYFTRLILFLFCLMVLVESRKPKRKRWTGQVEMPKPSHLYKKNLDVTKIRKGKPQQLLRVDEHDFSMRPAFGEEEAHEAKVPRVLKSHNVAV

SEQ ID NO: 12426 - protein, 118 aa, Artificial Sequence
  Synthetic polypeptide
MVKPGGICSATGYWKAAFCLTDVHKMPYFTRLILFLFCLMVLVESRKPKRKRWTGQVEMPKPSHLYKKNLDVTKIRKGKPQQLLRVDEHDFSMRPAFGEEEAHEAKVPRVLKSHNVAV

SEQ ID NO: 12427 - protein, 128 aa, Artificial Sequence
  Synthetic polypeptide
MSTASAASSSSSSSAGEMIEAPSQVLNFEEIDYKEIEVEEVQWFTPVIPALWKANPGRSPELRSSRPAWTRWQNPDSTKNTKISWVWWHKPVIPATLGWLRQENHFSQRGRGCSELRSRHCTPAWATE

SEQ ID NO: 12428 - protein, 321 aa, Artificial Sequence
  Synthetic polypeptide
MERLWGLFQRAQQLSPRSSQTVYQRVEGPRKGHLEEEEEDGEEGAETLAHFCPMELRGPEPLGSRPRQPNLIPWAAAGRRAAPYLVLTALLIFTGAFLLGYVAFRGSCQACGDSVLVVSEDVNYEPDLDFHQGRLYWSDLQAMFLQFLGEGRLEDTIRQTSLRERVAGSAGMAALTQDIRAALSRQKLDHVWTDTHYVGLQFPDPAHPNTLHWVDEAGKVGEQLPLEDPDVYCPYSAIGNVTGELVYAHYGRPEDLQDLRARGVDPVGRLLLVRVGVISFAQKEAKTGGSLEARNSRQHGENPLSTKKKKKKKGSFFFFFS

SEQ ID NO: 12429 - protein, 73 aa, Artificial Sequence
  Synthetic polypeptide
  misc_feature (1)..(1): Xaa can be any naturally occurring amino acid
XYGRPEDLQDLRARGVDPVGRLLLVRVGVISFAQKEAKTGGSLEARNSRQHGENPLSTKKKKKKKGSFFFFFS

SEQ ID NO: 12430 - protein, 356 aa, Artificial Sequence
  Synthetic polypeptide
MERLWGLFQRAQQLSPRSSQTVYQRVEGPRKGHLEEEEEDGEEGAETLAHFCPMELRGPEPLGSRPRQPNLIPWAAAGRRAAPYLVLTALLIFTGAFLLGYVAFRGSCQACGDSVLVVSEDVNYEPDLDFHQGRLYWSDLQAMFLQFLGEGRLEDTIRQTSLRERVAGSAGMAALTQDIRAALSRQKLDHVWTDTHYVGLQFPDPAHPNTLHWVDEAGKVGEQLPLEDPDVYCPYSAIGNVTGELVYAHYGRPEDLQDLRARGVDPVGRLLLVRVGVISFAQKHFRRPRQEDRLRPGIQGNTVRTPSLLKKKKKKKVLFFFFLVSWAGGTCMWSQLLRRLRWEDRLSPGVPGCSEL

SEQ ID NO: 12431 - protein, 108 aa, Artificial Sequence
  Synthetic polypeptide
  misc_feature (1)..(1): Xaa can be any naturally occurring amino acid
XYGRPEDLQDLRARGVDPVGRLLLVRVGVISFAQKHFRRPRQEDRLRPGIQGNTVRTPSLLKKKKKKKVLFFFFLVSWAGGTCMWSQLLRRLRWEDRLSPGVPGCSEL

SEQ ID NO: 12432 - protein, 270 aa, Artificial Sequence
  Synthetic polypeptide
MELRVLLCWASLAAALEETLLNTKLETADLKWVTFPQVDGQWEELSGLDEEQHSVRTYEVCDVQRAPGQAHWLRTGWVPRRGAVHVYATLRFTMLECLSLPRAGRSCKETFTVFYYESDADTATALTPAWMENPYIKVDTVAAEHLTRKRPGAEATGKVNVKTLRLGPLSKAGFYLAFQDQGACMALLSLHLFYKKCAQLTVNLTRFPETVPRELVVPVAGSCVVDAVPAPGPSPSLYCREDGQWAEQPVTGCSCAPGFEAAEGNTKCRA

SEQ ID NO: 12433 - protein, 1028 aa, Artificial Sequence
  Synthetic polypeptide
MELENYKQPVVLREDNCRRRRRMKPRSAAASLSSMELIPIEFVLPTSQRKCKSPETALLHVAGHGNVEQMKAQVWLRALETSVAADFYHRLGPHHFLLLYQKKGQWYEIYDKYQVVQTLDCLRYWKATHRSPGQIHLVQRHPPSEESQAFQRQLTALIGYDVTDVSNVHDDELEFTRRGLVTPRMAEVASRDPKLYAMHPWVTSKPLPEYLWKKIANNCIFIVIHRSTTSQTIKVSPDDTPGAILQSFFTKMAKKKSLMDIPESQSEQDFVLRVCGRDEYLVGETPIKNFQWVRHCLKNGEEIHVVLDTPPDPALDEVRKEEWPLVDDCTGVTGYHEQLTIHGKDHESVFTVSLWDCDRKFRVKIRGIDIPVLPRNTDLTVFVEANIQHGQQVLCQRRTSPKPFTEEVLWNVWLEFSIKIKDLPKGALLNLQIYCGKAPALSSKASAESPSSESKGKVQLLYYVNLLLIDHRFLLRRGEYVLHMWQISGKGEDQGSFNADKLTSATNPDKENSMSISILLDNYCHPIALPKHQPTPDPEGDRVRAEMPNQLRKQLEAIIATDPLNPLTAEDKELLWHFRYESLKHPKAYPKLFSSVKWGQQEIVAKTYQLLARREVWDQSALDVGLTMQLLDCNFSDENVRAIAVQKLESLEDDDVLHYLLQLVQAVKFEPYHDSALARFLLKRGLRNKRIGHFLFWFLRSEIAQSRHYQQRFAVILEAYLRGCGTAMLHDFTQQVQVIEMLQKVTLDIKSLSAEKYDVSSQVISQLKQKLENLQNSQLPESFRVPYDPGLKAGALAIEKCKVMASKKKPLWLEFKCADPTALSNETIGIIFKHGDDLRQDMLILQILRIMESIWETESLDLCLLPYGCISTGDKIGMIEIVKDATTIAKIQQSTVGNTGAFKDEVLNHWLKEKSPTEEKFQAAVERFVYSCAGYCVATFVLGIGDRHNDNIMITETGNLFHIDFGHILGNYKSFLGINKERVPFVLTPDFLFVMGTSGKKTSPHFQKFQAFSSSLLNLLSLMEALAM

SEQ ID NO: 12434 - protein, 345 aa, Artificial Sequence
  Synthetic polypeptide
MSIEIPAGLTELLQGFTVEVLRHQPADLLEFALQHFTRLQQENERKGTARFGHEGRTWGDLGAAAGGGTPSKGVNFAEEPMQSDSEDGEEEEAAPADAGAFNAPVINRFTRRASVCAEAYNPDEEEDDAESRIIHPKTDDQRNRLQEACKDILLFKNLDPEQMSQVLDAMFEKLVKDGEHVIDQGDDGDNFYVIDRGTFDIYVKCDGVGRCVGNYDNRGSFGELALMYNTPRAATITATSPGALWGLDRVTFRRIIVKNNAKKRKMYESFIESLPFLKSLEFSERLKVVDVIGTKVYNDGEQIIAQGRARWLTPVIPALWEADAGRSRGQEIKTILANTLKPRLY

SEQ ID NO: 12435 - protein, 37 aa, Artificial Sequence
  Synthetic polypeptide
MQRSPLEKASVVSKLFFSSERLRVTQKNIFALNMKNA

SEQ ID NO: 12436 - protein, 17 aa, Artificial Sequence
  Synthetic polypeptide
MFYGIFLYLGEKKLSSE

SEQ ID NO: 12437 - protein, 98 aa, Artificial Sequence
  Synthetic polypeptide
MQRSPLEKASVVSKLFFSWTRPILRKGYRQRLELSDIYQIPSVDSADNLSEKLEREWDRELASKKNPKLINALRRCFFWRFMFYGIFLYLGEKKLSSE

SEQ ID NO: 12438 - protein, 844 aa, Artificial Sequence
  Synthetic polypeptide
MQRSPLEKASVVSKLFFSWTRPILRKGYRQRLELSDIYQIPSVDSADNLSEKLEREWDRELASKKNPKLINALRRCFFWRFMFYGIFLYLGEVTKAVQPLLLGRIIASYDPDNKEERSIAIYLGIGLCLLFIVRTLLLHPAIFGLHHIGMQMRIAMFSLIYKKGLALAHFVWIAPLQVALLMGLIWELLQASAFCGLGFLIVLALFQAGLGRMMMKYRDQRAGKISERLVITSEMIENIQSVKAYCWEEAMEKMIENLRQTELKLTRKAAYVRYFNSSAFFFSGFFVVFLSVLPYALIKGIILRKIFTTISFCIVLRMAVTRQFPWAVQTWYDSLGAINKIQDFLQKQEYKTLEYNLTTTEVVMENVTAFWEEGFGELFEKAKQNNNNRKTSNGDDSLFFSNFSLLGTPVLKDINFKIERGQLLAVAGSTGAGKTSLLMVIMGELEPSEGKIKHSGRISFCSQFSWIMPGTIKENIIFGVSYDEYRYRSVIKACQLEEDISKFAEKDNIVLGEGGITLSGGQRARISLARAVYKDADLYLLDSPFGYLDVLTEKEIFESCVCKLMANKTRILVTSKMEHLKKADKILILHEGSSYFYGTFSELQNLQPDFSSKLMGCDSFDQFSAERRNSILTETLHRFSLEGDAPVSWTETKKQSFKQTGEFGEKRKNSILNPINSIRKFSIVQKTPLQMNGIEEDSDEPLERRLSLVPDSEQGEAILPRISVISTGPTLQARRRQSVLNLMTHSVNQGQNIHRKTTASTRKVSLAPQANLTELDIYSRRLSQETGLEISEEINEEDLKECFFDDMESIPAVTTWNTYLRYITVHKSLIFVLIWCLVIFLAEL

SEQ ID NO: 12439 - protein, 874 aa, Artificial Sequence
  Synthetic polypeptide
MQRSPLEKASVVSKLFFSWTRPILRKGYRQRLELSDIYQIPSVDSADNLSEKLEREWDRELASKKNPKLINALRRCFFWRFMFYGIFLYLGEVTKAVQPLLLGRIIASYDPDNKEERSIAIYLGIGLCLLFIVRTLLLHPAIFGLHHIGMQMRIAMFSLIYKKTLKLSSRVLDKISIGQLVSLLSNNLNKFDEGLALAHFVWIAPLQVALLMGLIWELLQASAFCGLGFLIVLALFQAGLGRMMMKYRDQRAGKISERLVITSEMIENIQSVKAYCWEEAMEKMIENLRQTELKLTRKAAYVRYFNSSAFFFSGFFVVFLSVLPYALIKGIILRKIFTTISFCIVLRMAVTRQFPWAVQTWYDSLGAINKIQDFLQKQEYKTLEYNLTTTEVVMENVTAFWEEGFGELFEKAKQNNNNRKTSNGDDSLFFSNFSLLGTPVLKDINFKIERGQLLAVAGSTGAGKTSLLMVIMGELEPSEGKIKHSGRISFCSQFSWIMPGTIKENIIFGVSYDEYRYRSVIKACQLEEDISKFAEKDNIVLGEGGITLSGGQRARISLARAVYKDADLYLLDSPFGYLDVLTEKEIFESCVCKLMANKTRILVTSKMEHLKKADKILILHEGSSYFYGTFSELQNLQPDFSSKLMGCDSFDQFSAERRNSILTETLHRFSLEGDAPVSWTETKKQSFKQTGEFGEKRKNSILNPINSIRKFSIVQKTPLQMNGIEEDSDEPLERRLSLVPDSEQGEAILPRISVISTGPTLQARRRQSVLNLMTHSVNQGQNIHRKTTASTRKVSLAPQANLTELDIYSRRLSQETGLEISEEINEEDLKECFFDDMESIPAVTTWNTYLRYITVHKSLIFVLIWCLVIFLAEL

SEQ ID NO: 12440 - protein, 813 aa, Artificial Sequence
  Synthetic polypeptide
MQRSPLEKASVVSKLFFSWTRPILRKGYRQRLELSDIYQIPSVDSADNLSEKLEREWDRELASKKNPKLINALRRCFFWRFMFYGIFLYLGEVTKAVQPLLLGRIIASYDPDNKEERSIAIYLGIGLCLLFIVRTLLLHPAIFGLHHIGMQMRIAMFSLIYKKTLKLSSRVLDKISIGQLVSLLSNNLNKFDEGLALAHFVWIAPLQVALLMGLIWELLQASAFCGLGFLIVLALFQAGLGRMMMKYRDQRAGKISERLVITSEMIENIQSVKAYCWEEAMEKMIENLRQTELKLTRKAAYVRYFNSSAFFFSGFFVVFLSVLPYALIKGIILRKIFTTISFCIVLRMAVTRQFPWAVQTWYDSLGAINKIQDFLQKQEYKTLEYNLTTTEVVMENVTAFWEETSLLMVIMGELEPSEGKIKHSGRISFCSQFSWIMPGTIKENIIFGVSYDEYRYRSVIKACQLEEDISKFAEKDNIVLGEGGITLSGGQRARISLARAVYKDADLYLLDSPFGYLDVLTEKEIFESCVCKLMANKTRILVTSKMEHLKKADKILILHEGSSYFYGTFSELQNLQPDFSSKLMGCDSFDQFSAERRNSILTETLHRFSLEGDAPVSWTETKKQSFKQTGEFGEKRKNSILNPINSIRKFSIVQKTPLQMNGIEEDSDEPLERRLSLVPDSEQGEAILPRISVISTGPTLQARRRQSVLNLMTHSVNQGQNIHRKTTASTRKVSLAPQANLTELDIYSRRLSQETGLEISEEINEEDLKECFFDDMESIPAVTTWNTYLRYITVHKSLIFVLIWCLVIFLAEL

SEQ ID NO: 12441 - protein, 75 aa, Artificial Sequence
  Synthetic polypeptide
MGLQARRWASGSRGAAGPRRGVLQLLPLPLPLPLLLLLLLRPGAGRAAAQGEAEAPTLYLWKTGKLQNTDERNCQ

SEQ ID NO: 12442 - protein, 404 aa, Artificial Sequence; identical to SEQ ID NO: 503
  Synthetic polypeptide

SEQ ID NO: 12443 - protein, 833 aa, Artificial Sequence
  Synthetic polypeptide
MVCEGKRSASCPCFFLLTAKFYWILTMMQRTHSQEYAHSIRVDGDIILGGLFPVHAKGERGVPCGELKKEKGIHRLEAMLYAIDQINKDPDLLSNITLGVRILDTCSRDTYALEQSLTFVQALIEKDASDVKCANGDPPIFTKPDKISGVIGAAASSVSIMVANILRLFKIPQISYASTAPELSDNTRYDFFSRVVPPDSYQAQAMVDIVTALGWNYVSTLASEGNYGESGVEAFTQISREIGGVCIAQSQKIPREPRPGEFEKIIKRLLETPNARAVIMFANEDDIRRILEAAKKLNQSGHFLWIGSDSWGSKIAPVYQQEEIAEGAVTILPKRASIDGFDRYFRSRTLANNRRNVWFAEFWEENFGCKLGSHGKRNSHIKKCTGLERIARDSSYEQEGKVQFVIDAVYSMAYALHNMHKDLCPGYIGLCPRMSTIDGKELLGYIRAVNFNGSAGTPVTFNENGDAPGRYDIFQYQITNKSTEYKVIGHWTNQLHLKVEDMQWAHREHTHPASVCSLPCKPGERKKTVKGVPCCWHCERCEGYNYQVDELSCELCPLDQRPNMNRTGCQLIPIIKLEWHSPWAVVPVFVAILGIIATTFVIVTFVRYNDTPIVRASGRELSYVLLTGIFLCYSITFLMIAAPDTIICSFRRVFLGLGMCFSYAALLTKTNRIHRIFEQGKKSVTAPKFISPASQLVITFSLISVQLLGVFVWFVVDPPHIIIDYGEQRTLDPEKARGVLKCDISDLSLICSLGYSILLMVTCTVYAIKTRGVPETFNEAKPIGFTMYTTCIIWLAFIPIFFGTAQSAEKIWKREAEESVVRPEKDSTCHCWL

SEQ ID NO: 12444 - protein, 1046 aa, Artificial Sequence
  Synthetic polypeptide
MDAAGRGCHLLPLPAARGPARAPAAAAAAAASPPGPCSGAACAPSAAAGAGAMNPSSSAGEEKGATGGSSSSGSGAGSCCLGAEGGADPRGAGSAAAAGAAALDEPAAAGQKEKDEALEEKLRNLTFRKQVSYRKAISRAGLQHLAPAHPLSLPVANGPAKEPRATLDWSENAVNGEHLWLETNVSGDLCYLGEENCQVRFAKSALRRKCAVCKIVVHTACIEQLEKINFRCKPTFREGGSRSPRENFVRHHWVHRRRQEGKCKQCGKGFQQKFSFHSKEIVAISCSWCKQAFHNKVTCFMLHHIEEPCSLGAHAAVIVPPTWIIKVKKPQNSLKASNRKKKRTSFKRKASKRGMEQENKGRPFVIKPISSPLMKPLLVFVNPKSGGNQGTKVLQMFMWYLNPRQVFDLSQEGPKDALELYRKVPNLRILACGGDGTVGWILSILDELQLSPQPPVGVLPLGTGNDLARTLNWGGGYTDEPVSKILCQVEDGTVVQLDRWNLHVERNPDLPPEELEDGVCKLPLNVFNNYFSLGFDAHVTLEFHESREANPEKFNSRFRNKMFYAGAAFSDFLQRSSRDLSKHVKVVCDGTDLTPKIQELKFQCIVFLNIPRYCAGTMPWGNPGDHHDFEPQRHDDGYIEVIGFTMASLAALQVGGHGERLHQCREVMLLTYKSIPMQVDGEPCRLAPAMIRISLRNQANMVQKSKRRTSMPLLNDIHQVQTADLRRVSAPPGSFTIPQSVPDRLRIRVNKISLQDYEGFHYDKEKLREASIPLGILVVRGDCDLETCRMYIDRLQEDLQSVSSGSQRVHYQDHETSFPRALSAQRLSPRWCFLDATSADRFYRIDRSQEHLHFVMEISQDEIFILDPDMVVSQPAGTPPGMPDLVVEQASGISDWWNPALRKRMLSDSGLGMIAPYYEDSDLKDLSHSRVLQSPVSSEDHAILQAVIAGDLMKLIESYKNGGSLLIQGPDHCSLLHYAAKTGNGEIVKYILDHGPSELLDMADSETGETALHKAACQRNRAVCQLLVDAGASLRKTDSKHDCKAS

SEQ ID NO: 12445 - protein, 1015 aa, Artificial Sequence
  Synthetic polypeptide
MDAAGRGCHLLPLPAARGPARAPAAAAAAAASPPGPCSGAACAPSAAAGAGAMNPSSSAGEEKGATGGSSSSGSGAGSCCLGAEGGADPRGAGSAAAAGAAALDEPAAAGQKEKDEALEEKLRNLTFRKQVSYRKAISRAGLQHLAPAHPLSLPVANGPAKEPRATLDWSENAVNGEHLWLETNVSGDLCYLGEENCQVRFAKSALRRKCAVCKIVVHTACIEQLEKINFRCKPTFREGGSRSPRENFVRHHWVHRRRQEGKCKQCGKGFQQKFSFHSKEIVAISCSWCKQAFHNKVTCFMLHHIEEPCSLGAHAAVIVPPTWIIKVKKPQNSLKASNRKKKRTSFKRKASKRGMEQENKGRPFVIKPISSPLMKPLLVFVNPKSGGNQGTKVLQMFMWYLNPRQVFDLSQEGPKDALELYRKVPNLRILACGGDGTVGWILSILDELQLSPQPPVGVLPLGTGNDLARTLNWGGGYTDEPVSKILCQVEDGTVVQLDRWNLHVERNPDLPPEELEDGVCKLPLNVFNNYFSLGFDAHVTLEFHESREANPEKFNSRFRNKMFYAGAAFSDFLQRSSRDLSKHVKVVCDGTDLTPKIQELKFQCIVFLNIPRYCAGTMPWGNPGDHHDFEPQRHDDGYIEVIGFTMASLAALQVGGHGERLHQCREVMLLTYKSIPMQVDGEPCRLAPAMIRISLRNQANMVQKSKRRTSMPLLNDPQSVPDRLRIRVNKISLQDYEGFHYDKEKLREASIPLGILVVRGDCDLETCRMYIDRLQEDLQSVSSGSQRVHYQDHETSFPRALSAQRLSPRWCFLDDRSQEHLHFVMEISQDEIFILDPDMVVSQPAGTPPGMPDLVVEQASGISDWWNPALRKRMLSDSGLGMIAPYYEDSDLKDLSHSRVLQSPVSSEDHAILQAVIAGDLMKLIESYKNGGSLLIQGPDHCSLLHYAAKTGNGEIVKYILDHGPSELLDMADSETGETALHKAACQRNRAVCQLLVDAGASLRKTDSKHDCKAS

SEQ ID NO: 12446 - protein, 1033 aa, Artificial Sequence
  Synthetic polypeptide
MDAAGRGCHLLPLPAARGPARAPAAAAAAAASPPGPCSGAACAPSAAAGAGAMNPSSSAGEEKGATGGSSSSGSGAGSCCLGAEGGADPRGAGSAAAAGAAALDEPAAAGQKEKDEALEEKLRNLTFRKQVSYRKAISRAGLQHLAPAHPLSLPVANGPAKEPRATLDWSENAVNGEHLWLETNVSGDLCYLGEENCQVRFAKSALRRKCAVCKIVVHTACIEQLEKINFRCKPTFREGGSRSPRENFVRHHWVHRRRQEGKCKQCGKGFQQKFSFHSKEIVAISCSWCKQAFHNKVTCFMLHHIEEPCSLGAHAAVIVPPTWIIKVKKPQNSLKASNRKKKRTSFKRKASKRGMEQENKGRPFVIKPISSPLMKPLLVFVNPKSGGNQGTKVLQMFMWYLNPRQVFDLSQEGPKDALELYRKVPNLRILACGGDGTVGWILSILDELQLSPQPPVGVLPLGTGNDLARTLNWGGGYTDEPVSKILCQVEDGTVVQLDRWNLHVERNPDLPPEELEDGVCKLPLNVFNNYFSLGFDAHVTLEFHESREANPEKFNSRFRNKMFYAGAAFSDFLQRSSRDLSKHVKVVCDGTDLTPKIQELKFQCIVFLNIPRYCAGTMPWGNPGDHHDFEPQRHDDGYIEVIGFTMASLAALQVGGHGERLHQCREVMLLTYKSIPMQVDGEPCRLAPAMIRISLRNQANMVQKSKRRTSMPLLNDPQSVPDRLRIRVNKISLQDYEGFHYDKEKLREASISDWLRTIAGELVQSFGAIPLGILVVRGDCDLETCRMYIDRLQEDLQSVSSGSQRVHYQDHETSFPRALSAQRLSPRWCFLDDRSQEHLHFVMEISQDEIFILDPDMVVSQPAGTPPGMPDLVVEQASGISDWWNPALRKRMLSDSGLGMIAPYYEDSDLKDLSHSRVLQSPVSSEDHAILQAVIAGDLMKLIESYKNGGSLLIQGPDHCSLLHYAAKTGNGEIVKYILDHGPSELLDMADSETGETALHKAACQRNRAVCQLLVDAGASLRKTDSKHDCKAS

SEQ ID NO: 12447 - protein, 702 aa, Artificial Sequence
  Synthetic polypeptide
MLHHIEEPCSLGAHAAVIVPPTWIIKVKKPQNSLKASNRKKKRTSFKRKASKRGMEQENKGRPFVIKPISSPLMKPLLVFVNPKSGGNQGTKVLQMFMWYLNPRQVFDLSQEGPKDALELYRKVPNLRILACGGDGTVGWILSILDELQLSPQPPVGVLPLGTGNDLARTLNWGGGYTDEPVSKILCQVEDGTVVQLDRWNLHVERNPDLPPEELEDGVCKLPLNVFNNYFSLGFDAHVTLEFHESREANPEKFNSRFRNKMFYAGAAFSDFLQRSSRDLSKHVKVVCDGTDLTPKIQELKFQCIVFLNIPRYCAGTMPWGNPGDHHDFEPQRHDDGYIEVIGFTMASLAALQVGGHGERLHQCREVMLLTYKSIPMQVDGEPCRLAPAMIRISLRNQANMVQKSKRRTSMPLLNDPQSVPDRLRIRVNKISLQDYEGFHYDKEKLREASISDWLRTIAGELVQSFGAIPLGILVVRGDCDLETCRMYIDRLQEDLQSVSSGSQRVHYQDHETSFPRALSAQRLSPRWCFLDATSADRFYRIDRSQEHLHFVMEISQDEIFILDPDMVVSQPAGTPPGMPDLVVEQASGSPVSSEDHAILQAVIAGDLMKLIESYKNGGSLLIQGPDHCSLLHYAAKTGNGEIVKYILDHGPSELLDMADSETGETALHKAACQRNRAVCQLLVDAGASLRKTDSKHDCKAS

SEQ ID NO: 12448 - protein, 1065 aa, Artificial Sequence
  Synthetic polypeptide
MDAAGRGCHLLPLPAARGPARAPAAAAAAAASPPGPCSGAACAPSAAAGAGAMNPSSSAGEEKGATGGSSSSGSGAGSCCLGAEGGADPRGAGSAAAAGAAALDEPAAAGQKEKDEALEEKLRNLTFRKQVSYRKAISRAGLQHLAPAHPLSLPVANGPAKEPRATLDWSENAVNGEHLWLETNVSGDLCYLGEENCQVRFAKSALRRKCAVCKIVVHTACIEQLEKINFRCKPTFREGGSRSPRENFVRHHWVHRRRQEGKCKQCGKGFQQKFSFHSKEIVAISCSWCKQAFHNKVTCFMLHHIEEPCSLGAHAAVIVPPTWIIKVKKPQNSLKASNRKKKRTSFKRKASKRGMEQENKGRPFVIKPISSPLMKPLLVFVNPKSGGNQGTKVLQMFMWYLNPRQVFDLSQEGPKDALELYRKVPNLRILACGGDGTVGWILSILDELQLSPQPPVGVLPLGTGNDLARTLNWGGGYTDEPVSKILCQVEDGTVVQLDRWNLHVERNPDLPPEELEDGVCKLPLNVFNNYFSLGFDAHVTLEFHESREANPEKFNSRFRNKMFYAGAAFSDFLQRSSRDLSKHVKVVCDGTDLTPKIQELKFQCIVFLNIPRYCAGTMPWGNPGDHHDFEPQRHDDGYIEVIGFTMASLAALQVGGHGERLHQCREVMLLTYKSIPMQVDGEPCRLAPAMIRISLRNQANMVQKSKRRTSMPLLNDIHQVQTADLRRVSAPPGSFTIPQSVPDRLRIRVNKISLQDYEGFHYDKEKLREASIPLGILVVRGDCDLETCRMYIDRLQEDLQSVSSGSQRVHYQDHETSFPRALSAQRLSPRWCFLDATSADRFYRIDRSQEHLHFVMEISQDEIFILDPDMVVSQPAGTPPGMPDLVVEQASGISDWWNPALRKRMLSDSGLGMIAPYYEDSDLKDLSHSRVLQSPVSSEDHAILQAVIAGDLMKLIESYKNGGSLLIQGPDHCSLLHYAAKTGNGEIVKYILDHGPSELLDMADSETGETALHKAACQRNRAVCQLLVDAGASLRKTDSKQVSFLPPSEEVAFLPFAFQHDCKAS

SEQ ID NO: 12449 - protein, 1034 aa, Artificial Sequence
  Synthetic polypeptide
MDAAGRGCHLLPLPAARGPARAPAAAAAAAASPPGPCSGAACAPSAAAGAGAMNPSSSAGEEKGATGGSSSSGSGAGSCCLGAEGGADPRGAGSAAAAGAAALDEPAAAGQKEKDEALEEKLRNLTFRKQVSYRKAISRAGLQHLAPAHPLSLPVANGPAKEPRATLDWSENAVNGEHLWLETNVSGDLCYLGEENCQVRFAKSALRRKCAVCKIVVHTACIEQLEKINFRCKPTFREGGSRSPRENFVRHHWVHRRRQEGKCKQCGKGFQQKFSFHSKEIVAISCSWCKQAFHNKVTCFMLHHIEEPCSLGAHAAVIVPPTWIIKVKKPQNSLKASNRKKKRTSFKRKASKRGMEQENKGRPFVIKPISSPLMKPLLVFVNPKSGGNQGTKVLQMFMWYLNPRQVFDLSQEGPKDALELYRKVPNLRILACGGDGTVGWILSILDELQLSPQPPVGVLPLGTGNDLARTLNWGGGYTDEPVSKILCQVEDGTVVQLDRWNLHVERNPDLPPEELEDGVCKLPLNVFNNYFSLGFDAHVTLEFHESREANPEKFNSRFRNKMFYAGAAFSDFLQRSSRDLSKHVKVVCDGTDLTPKIQELKFQCIVFLNIPRYCAGTMPWGNPGDHHDFEPQRHDDGYIEVIGFTMASLAALQVGGHGERLHQCREVMLLTYKSIPMQVDGEPCRLAPAMIRISLRNQANMVQKSKRRTSMPLLNDPQSVPDRLRIRVNKISLQDYEGFHYDKEKLREASIPLGILVVRGDCDLETCRMYIDRLQEDLQSVSSGSQRVHYQDHETSFPRALSAQRLSPRWCFLDDRSQEHLHFVMEISQDEIFILDPDMVVSQPAGTPPGMPDLVVEQASGISDWWNPALRKRMLSDSGLGMIAPYYEDSDLKDLSHSRVLQSPVSSEDHAILQAVIAGDLMKLIESYKNGGSLLIQGPDHCSLLHYAAKTGNGEIVKYILDHGPSELLDMADSETGETALHKAACQRNRAVCQLLVDAGASLRKTDSKQVSFLPPSEEVAFLPFAFQHDCKAS

SEQ ID NO: 12450 - protein, 1052 aa, Artificial Sequence
  Synthetic polypeptide
MDAAGRGCHLLPLPAARGPARAPAAAAAAAASPPGPCSGAACAPSAAAGAGAMNPSSSAGEEKGATGGSSSSGSGAGSCCLGAEGGADPRGAGSAAAAGAAALDEPAAAGQKEKDEALEEKLRNLTFRKQVSYRKAISRAGLQHLAPAHPLSLPVANGPAKEPRATLDWSENAVNGEHLWLETNVSGDLCYLGEENCQVRFAKSALRRKCAVCKIVVHTACIEQLEKINFRCKPTFREGGSRSPRENFVRHHWVHRRRQEGKCKQCGKGFQQKFSFHSKEIVAISCSWCKQAFHNKVTCFMLHHIEEPCSLGAHAAVIVPPTWIIKVKKPQNSLKASNRKKKRTSFKRKASKRGMEQENKGRPFVIKPISSPLMKPLLVFVNPKSGGNQGTKVLQMFMWYLNPRQVFDLSQEGPKDALELYRKVPNLRILACGGDGTVGWILSILDELQLSPQPPVGVLPLGTGNDLARTLNWGGGYTDEPVSKILCQVEDGTVVQLDRWNLHVERNPDLPPEELEDGVCKLPLNVFNNYFSLGFDAHVTLEFHESREANPEKFNSRFRNKMFYAGAAFSDFLQRSSRDLSKHVKVVCDGTDLTPKIQELKFQCIVFLNIPRYCAGTMPWGNPGDHHDFEPQRHDDGYIEVIGFTMASLAALQVGGHGERLHQCREVMLLTYKSIPMQVDGEPCRLAPAMIRISLRNQANMVQKSKRRTSMPLLNDPQSVPDRLRIRVNKISLQDYEGFHYDKEKLREASISDWLRTIAGELVQSFGAIPLGILVVRGDCDLETCRMYIDRLQEDLQSVSSGSQRVHYQDHETSFPRALSAQRLSPRWCFLDDRSQEHLHFVMEISQDEIFILDPDMVVSQPAGTPPGMPDLVVEQASGISDWWNPALRKRMLSDSGLGMIAPYYEDSDLKDLSHSRVLQSPVSSEDHAILQAVIAGDLMKLIESYKNGGSLLIQGPDHCSLLHYAAKTGNGEIVKYILDHGPSELLDMADSETGETALHKAACQRNRAVCQLLVDAGASLRKTDSKQVSFLPPSEEVAFLPFAFQHDCKAS

SEQ ID NO: 12451 - protein, 721 aa, Artificial Sequence
  Synthetic polypeptide
MLHHIEEPCSLGAHAAVIVPPTWIIKVKKPQNSLKASNRKKKRTSFKRKASKRGMEQENKGRPFVIKPISSPLMKPLLVFVNPKSGGNQGTKVLQMFMWYLNPRQVFDLSQEGPKDALELYRKVPNLRILACGGDGTVGWILSILDELQLSPQPPVGVLPLGTGNDLARTLNWGGGYTDEPVSKILCQVEDGTVVQLDRWNLHVERNPDLPPEELEDGVCKLPLNVFNNYFSLGFDAHVTLEFHESREANPEKFNSRFRNKMFYAGAAFSDFLQRSSRDLSKHVKVVCDGTDLTPKIQELKFQCIVFLNIPRYCAGTMPWGNPGDHHDFEPQRHDDGYIEVIGFTMASLAALQVGGHGERLHQCREVMLLTYKSIPMQVDGEPCRLAPAMIRISLRNQANMVQKSKRRTSMPLLNDPQSVPDRLRIRVNKISLQDYEGFHYDKEKLREASISDWLRTIAGELVQSFGAIPLGILVVRGDCDLETCRMYIDRLQEDLQSVSSGSQRVHYQDHETSFPRALSAQRLSPRWCFLDATSADRFYRIDRSQEHLHFVMEISQDEIFILDPDMVVSQPAGTPPGMPDLVVEQASGSPVSSEDHAILQAVIAGDLMKLIESYKNGGSLLIQGPDHCSLLHYAAKTGNGEIVKYILDHGPSELLDMADSETGETALHKAACQRNRAVCQLLVDAGASLRKTDSKQVSFLPPSEEVAFLPFAFQHDCKAS

SEQ ID NO: 12452 - protein, 234 aa, Artificial Sequence
  Synthetic polypeptide
MEGGDQSEEEPRERSQAGGMGTLWSQESTPEERLPVEGSRPWAVARRVLTAILILGLLLCFSVLLFYNFQNCGPRPCETSVCLDLRDHYLASGNTSVAPCTDFFSFACGRAKETNNSFQELATKNKNRLRRILEVQNSWHPGSGEEKAFQFYNSCMDTLAIEAAGTGPLRQVIEELGGWRISGKWTSLNFNRTLRLLMSQYGHFPFFRAYLGPHPASPHTPVIQEVFTDTLVMS

SEQ ID NO: 12453 - protein, 31 aa, Artificial Sequence
  Synthetic polypeptide
MTNQEKWAHLSPSEFSQLQKYAECLNKQLSN

SEQ ID NO: 12454 - protein, 125 aa, Artificial Sequence
  Synthetic polypeptide
MASLYQRFTGKINTSRSFPAPPEASHLLGGQGPEEDGGAGAKPLGPRAQAAAPRERGGGGGGAGGRPRFQYQARSDGDEEDELVGSNPPQRNWKGIAIALLVILVICSLIVTSVILLTPVSGISS

SEQ ID NO: 12455 - protein, 61 aa, Artificial Sequence
  Synthetic polypeptide
MKEKAMIKTAKMQGNVMELVGSNPPQRNWKGIAIALLVILVICSLIVTSVILLTPVSGISS

SEQ ID NO: 12456 - protein, 63 aa, Artificial Sequence
  Synthetic polypeptide
MTTAKEPSASGKSVQQQEQELVGSNPPQRNWKGIAIALLVILVICSLIVTSVILLTPVSGISS

SEQ ID NO: 12457 - protein, 656 aa, Artificial Sequence; identical to SEQ ID NO: 209
  Synthetic polypeptide

SEQ ID NO: 12458 - protein, 616 aa, Artificial Sequence; identical to SEQ ID NO: 248
  Synthetic polypeptide

SEQ ID NO: 12459 - protein, 633 aa, Artificial Sequence; identical to SEQ ID NO: 232
  Synthetic polypeptide

SEQ ID NO: 12460 - protein, 604 aa, Artificial Sequence; identical to SEQ ID NO: 261
  Synthetic polypeptide

SEQ ID NO: 12461 - protein, 595 aa, Artificial Sequence; identical to SEQ ID NO: 273
  Synthetic polypeptide

SEQ ID NO: 12462 - protein, 626 aa, Artificial Sequence
  Synthetic polypeptide
MAVESEYSLLRTEASFPTMKMFCVSHTLPRVEVMFVSGPQTRERTEPVDPRWQCLVQMWAGCLLEEGLCGASEACVNDGVFGRCQKVPAMDFYRYEVSPVALQRLRVALQKLSGTGFTWQDDYTQYVMDQELADLPKTYLRRPEASSPARPSKHSVGSERRYSREGGAALANALRRHLPFLEALSQAPASDVLARTHTAQDRPPAEGDDRFSESILTYVAHTSALTYPPGSRTQLREDLLPRTLGQLQPDELSPKVDSGVDRHHLMAALSAYAAQRPPAPPGEGSLEPQYLLRAPSRMPRPLLAPAAPQKWPSPLGDSEDPSSTGDGARIHTLLKDLQRQPAEVRGLSGLELDGMAELMAGLMQGVDHGVARGSPGRAALGESGEQADGPKATLRGDSFPDDGVQDDDDRLYQEVHRLSATLGGLLQDHGSRLLPGALPFARPLDMERKKSEHPESSLSSEEETAGVENVKSQTYSKDLLGQQPHSEPGAAAFGELQNQMPGPSKEEQSLPAGAQEALSDGLQLEVQPSEEEARGYIVTDRDPLRPEEGRRLVEDVARLLQVPSSAFADVEVLGPAVTFKVSANVQNVTTEDVEKATAFATGRAAWSRWTARPTKPPTLTLQPVTE

SEQ ID NO: 12463 - protein, 586 aa, Artificial Sequence
  Synthetic polypeptide
MGPPLPLLLLLLLLLPPRVLPAAPSSVPRGRQLPGRLDGVFGRCQKVPAMDFYRYEVSPVALQRLRVALQKLSGTGFTWQDDYTQYVMDQELADLPKTYLRRPEASSPARPSKHSVGSERRYSREGGAALANALRRHLPFLEALSQAPASDVLARTHTAQDRPPAEGDDRFSESILTYVAHTSALTYPPGSRTQLREDLLPRTLGQLQPDELSPKVDSGVDRHHLMAALSAYAAQRPPAPPGEGSLEPQYLLRAPSRMPRPLLAPAAPQKWPSPLGDSEDPSSTGDGARIHTLLKDLQRQPAEVRGLSGLELDGMAELMAGLMQGVDHGVARGSPGRAALGESGEQADGPKATLRGDSFPDDGVQDDDDRLYQEVHRLSATLGGLLQDHGSRLLPGALPFARPLDMERKKSEHPESSLSSEEETAGVENVKSQTYSKDLLGQQPHSEPGAAAFGELQNQMPGPSKEEQSLPAGAQEALSDGLQLEVQPSEEEARGYIVTDRDPLRPEEGRRLVEDVARLLQVPSSAFADVEVLGPAVTFKVSANVQNVTTEDVEKATAFATGRAAWSRWTARPTKPPTLTLQPVTE

SEQ ID NO: 12464 - protein, 603 aa, Artificial Sequence
  Synthetic polypeptide
MGPPLPLLLLLLLLLPPRVLPAAPSSVPRGRQLPGRLGCLLEEGLCGASEACVNDGVFGRCQKVPAMDFYRYEVSPVALQRLRVALQKLSGTGFTWQDDYTQYVMDQELADLPKTYLRRPEASSPARPSKHSVGSERRYSREGGAALANALRRHLPFLEALSQAPASDVLARTHTAQDRPPAEGDDRFSESILTYVAHTSALTYPPGSRTQLREDLLPRTLGQLQPDELSPKVDSGVDRHHLMAALSAYAAQRPPAPPGEGSLEPQYLLRAPSRMPRPLLAPAAPQKWPSPLGDSEDPSSTGDGARIHTLLKDLQRQPAEVRGLSGLELDGMAELMAGLMQGVDHGVARGSPGRAALGESGEQADGPKATLRGDSFPDDGVQDDDDRLYQEVHRLSATLGGLLQDHGSRLLPGALPFARPLDMERKKSEHPESSLSSEEETAGVENVKSQTYSKDLLGQQPHSEPGAAAFGELQNQMPGPSKEEQSLPAGAQEALSDGLQLEVQPSEEEARGYIVTDRDPLRPEEGRRLVEDVARLLQVPSSAFADVEVLGPAVTFKVSANVQNVTTEDVEKATAFATGRAAWSRWTARPTKPPTLTLQPVTE

SEQ ID NO: 12465 - protein, 574 aa, Artificial Sequence
  Synthetic polypeptide
MGPPLPLLLLLLLLLPPRVLPAAPSSVPRGRQLPGRLGCLLEEGLCGASEACVNDGVFGRCQKVPAMDFYRYEVSPVALQRLRVALQKLSGTGFTWQDDYTQYVMDQELADLPKTYLRRPEASSPARPSKHSVGSERRYSREGGAALANALRRHLPFLEALSQAPASDVLARTHTAQDRPPAEGDDRFSESILTYVAHTSALTYPPGSRTQLREDLLPRTLGQLQPDELSPKVDSGVDRHHLMAALSAYAAQRPPAPPGEGSLEPQYLLRAPSRMPRPLLAPAAPQKWPSPLGDSEDPSSTGDGARIHTLLKDLQRQPAEVRGLSGLELDGMAELMAGLMQGVDHGVARGSPGRAALGESGEQADGPKATLRGDSFPDDGVQDDDDRLYQEVHRLSATLGGLLQDHGSRLLPGALPFARPLDMERKKSEHPESSLSSEEETAGVENVKSQTYSKDLLGQQPHSEPGAAAFGELQNQMPGPSKEEQSLPAGAQEALSDGLQLEVQPSEEEARGYIVTDREVLGPAVTFKVSANVQNVTTEDVEKATAFATGRAAWSRWTARPTKPPTLTLQPVTE

SEQ ID NO: 12466 - protein, 565 aa, Artificial Sequence
  Synthetic polypeptide
MGPPLPLLLLLLLLLPPRVLPAAPSSVPRGRQLPGRLGCLLEEGLCGASEACVNGFTWQDDYTQYVMDQELADLPKTYLRRPEASSPARPSKHSVGSERRYSREGGAALANALRRHLPFLEALSQAPASDVLARTHTAQDRPPAEGDDRFSESILTYVAHTSALTYPPGSRTQLREDLLPRTLGQLQPDELSPKVDSGVDRHHLMAALSAYAAQRPPAPPGEGSLEPQYLLRAPSRMPRPLLAPAAPQKWPSPLGDSEDPSSTGDGARIHTLLKDLQRQPAEVRGLSGLELDGMAELMAGLMQGVDHGVARGSPGRAALGESGEQADGPKATLRGDSFPDDGVQDDDDRLYQEVHRLSATLGGLLQDHGSRLLPGALPFARPLDMERKKSEHPESSLSSEEETAGVENVKSQTYSKDLLGQQPHSEPGAAAFGELQNQMPGPSKEEQSLPAGAQEALSDGLQLEVQPSEEEARGYIVTDRDPLRPEEGRRLVEDVARLLQVPSSAFADVEVLGPAVTFKVSANVQNVTTEDVEKATAFATGRAAWSRWTARPTKPPTLTLQPVTE

SEQ ID NO: 12467 - protein, 615 aa, Artificial Sequence; identical to SEQ ID NO: 249
  Synthetic polypeptide

SEQ ID NO: 12468 - protein, 575 aa, Artificial Sequence; identical to SEQ ID NO: 302
  Synthetic polypeptide

SEQ ID NO: 12469 - protein, 592 aa, Artificial Sequence; identical to SEQ ID NO: 277
  Synthetic polypeptide

SEQ ID NO: 12470 - protein, 554 aa, Artificial Sequence; identical to SEQ ID NO: 328
  Synthetic polypeptide

SEQ ID NO: 12471 - protein, 80 aa, Artificial Sequence
  Synthetic polypeptide
MAVESEYSLLRTEASFPTMKMFCVSHTLPRVEVMFVSGPQTRERTEPVDPRWQCLVQMWAGCLLEEGLCGASEACVNGLP

SEQ ID NO: 12472 - protein, 57 aa, Artificial Sequence
  Synthetic polypeptide
MGPPLPLLLLLLLLLPPRVLPAAPSSVPRGRQLPGRLGCLLEEGLCGASEACVNGLP

SEQ ID NO: 12473 - protein, 70 aa, Artificial Sequence
  Synthetic polypeptide
MGPPLPLLLLLLLLLPPRVLPAAPSSVPRGRQLPGRLETMETRSVMNLACDGRKHPINSSSLLPGNVSQV

SEQ ID NO: 12474 - protein, 255 aa, Artificial Sequence
  Synthetic polypeptide
MTPPSRAEAGVRRSRVPSEGRWRGAEPPGISASTQPASAGRAARHCGAMSGARGEGPEAGAGGAGGRAAPENPGGVLSVELPGLLAQLARSFALLLPVYALGYLGLSFSWVLLALALLAWCRRSRGLKALRLCRALALLEDEERVVRLGVRACDLPAWVHFPDTERAEWLNKTVKHMWPFICQFIEKLFRETIEPAVRGANTHLSTFSFTKVDVGQQPLRINGVKVYTENVDKRQIILDLQISYKAEAAQGCVGR

SEQ ID NO: 12475 - protein, 225 aa, Artificial Sequence
  Synthetic polypeptide
SASTQPASAGRAARHCGAMSGARGEGPEAGAGGAGGRAAPENPGGVLSVELPGLLAQLARSFALLLPVYALGYLGLSFSWVLLALALLAWCRRSRGLKALRLCRALALLEDEERVVRLGVRACDLPAWVHFPDTERAEWLNKTVKHMWPFICQFIEKLFRETIEPAVRGANTHLSTFSFTKVDVGQQPLRINGVKVYTENVDKRQIILDLQISYKAEAAQGCVGR

SEQ ID NO: 12476 - protein, 520 aa, Artificial Sequence
  Synthetic polypeptide
MENSERAEEMQENYQRNGTAEEQPKLRKEAVGSIEIFRFADGLDITLMILGILASLVNGACLPLMPLVLGEMSDNLISGCLVQTNTTNYQNCTQSQEKLNEDMTLLTLYYVGIGVAALIFGYIQISLWIITAARQTKRIRKQFFHSVLAQDIGWFDSCDIGELNTRMTDDIDKISDGIGDKIALLFQNMSTFSIGLAVGLVKGWKLTLVTLSTSPLIMASAAACSRMVISLTSKELSAYSKAGAVAEEVLSSIRTVIAFRAQEKELQRYTQNLKDAKDFGIKRTIASKVSLGAVYFFMNGTYGLAFWYGTSLILNGEPGYTIGTVLAVFFSVIHSSYCIGAAVPHFETFAIARGAAFHIFQVIDKKPSIDNFSTAGYKPESIEGTVEFKNVSFNYPSRPSIKILKGLNLRIKSGETVALVGLNGSGKSTVVQLLQRLYDPDDGFIMVDENDIRALNVRHYRDHIGVVSQEPVLFGTTISNNIKYGRDDVTDEEMERAAREANAYDFIMEFPNGSQKIGHS

SEQ ID NO: 12477 - protein, 75 aa, Artificial Sequence
  Synthetic polypeptide
MVDENDIRALNVRHYRDHIGVVSQEPVLFGTTISNNIKYGRDDVTDEEMERAAREANAYDFIMEFPNGSQKIGHS

SEQ ID NO: 12478 - protein, 609 aa, Artificial Sequence; identical to SEQ ID NO: 253
  Synthetic polypeptide

SEQ ID NO: 12479 - protein, 164 aa, Artificial Sequence; identical to SEQ ID NO: 960
  Synthetic polypeptide

SEQ ID NO: 12480 - protein, 29 aa, Artificial Sequence
  Synthetic polypeptide
MECLYYFLGFLLLAARLPLDAAKPRVQTT

SEQ ID NO: 12481 - protein, 271 aa, Artificial Sequence
  Synthetic polypeptide
MECLYYFLGFLLLAARLPLDAAKQAGLSADPYVYNWTAWSEDSDGENGTGQSHHNVFPDGKPFPHHPGWRRWNFIYVFHTLGQYFQKLGRCSVRVSVNTANVTLGPQLMEVTVYRRHGRAYVPIAQVKDVYVVTDQIPVFVTMFQKNDRNSSDETFLKDLPIMFDVLIHDPSHFLNYSTINYKWSFGDNTGLFVSTNHTVNHTYVLNGTFSLNLTVKAAAPGPCPPPPPPPRPSKPTPSLGTWMKLETIILSKLSQGQKTKRRMFSFTGGN

SEQ ID NO: 12482 - protein, 370 aa, Artificial Sequence
  Synthetic polypeptide
MECLYYFLGFLLLAARLPLDAAKRFHDVLGNERPSAYMREHNQLNGWSSDENDWNEKLYPVWKRGDMRWKNSWKGGRVQAVLTSDSPALVGSNITFAVNLIFPRCQKEDANGNIVYEKNCRNEAGLSADPYVYNWTAWSEDSDGENGTGQSHHNVFPDGKPFPHHPGWRRWNFIYVFHTLGQYFQKLGRCSVRVSVNTANVTLGPQLMEVTVYRRHGRAYVPIAQVKDVYVVTDQIPVFVTMFQKNDRNSSDETFLKDLPIMFDVLIHDPSHFLNYSTINYKWSFGDNTGLFVSTNHTVNHTYVLNGTFSLNLTVKAAAPGPCPPPPPPPRPSKPTPSLGTWMKLETIILSKLSQGQKTKRRMFSFTGGN

SEQ ID NO: 12483 - protein, 312 aa, Artificial Sequence
  Synthetic polypeptide
MECLYYFLGFLLLAARLPLDAAKRFHDVLGNERPSAYMREHNQLNGWSSDENDWNEKLYPVWKRGDMRWKNSWKGGRVQAVLTSDSPALVGSNITFAVNLIFPRCQKEDANGNIVYEKNCRNGQYFQKLGRCSVRVSVNTANVTLGPQLMEVTVYRRHGRAYVPIAQVKDVYVVTDQIPVFVTMFQKNDRNSSDETFLKDLPIMFDVLIHDPSHFLNYSTINYKWSFGDNTGLFVSTNHTVNHTYVLNGTFSLNLTVKAAAPGPCPPPPPPPRPSKPTPSLGTWMKLETIILSKLSQGQKTKRRMFSFTGGN

SEQ ID NO: 12484 - protein, 96 aa, Artificial Sequence
  Synthetic polypeptide
MNKLYIGNLSENAAPSDLESIFKDAKIPVSGPFLVKTGYAFVDCPDESWALKAIEALSGKIELHGKPIEVEHSVPKRQRIRKLQIRNIPPHLQWED

SEQ ID NO: 12485 - protein, 43 aa, Artificial Sequence
  Synthetic polypeptide
MAGVSYAAPWWVSLLHRLPHFDLSWEATSSQFRPEDTDYQQGR

SEQ ID NO: 12486 - protein, 277 aa, Artificial Sequence
  Synthetic polypeptide
MAGVSYAAPWWVSLLHRLPHFDLSWEATSSQFRPEDTDYQQALLLLGAAALACLALDLLFLLFYSFWLCCRRRKSEEHLDADCCCTAWCVIIATLVCSAGIAVGFYGNGETSDGIHRATYSLRHANRTVAGVQDRVWDTAVGLNHTAEPSLQTLERQLAGRPEPLRAVQRLQGLLETLLGYTAAIPFWRNTAVSLEVLAEQVDLYDWYRVCLLGVLALVISWGALGLELAVSVGSSDFCVDPDAYVTKMVEEYSVLSGATPETEARELPEPRRWRLQ

SEQ ID NO: 12487 - protein, 309 aa, Artificial Sequence
  Synthetic polypeptide
MAGVSYAAPWWVSLLHRLPHFDLSWEATSSQFRPEDTDYQQALLLLGAAALACLALDLLFLLFYSFWLCCRRRKSEEHLDADCCCTAWCVIIATLVCSAGIAVGFYGNGETSDGIHRATYSLRHANRTVAGVQDRVWDTAVGLNHTAEPSLQTLERQLAGRPEPLRAVQRLQGLLETLLGYTAAIPFWRNTAVSLEVLAEQVDLYDWYRWLGYLGLLLLDVIICLLVLVGLIRSSKGILVGVCLLGVLALVISWGALGLELAVSVGSSDFCVDPDAYVTKMVEEYSVLSGATPETEARELPEPRRWRLQ

SEQ ID NO: 12488 - protein, 138 aa, Artificial Sequence
  Synthetic polypeptide
MPSGVPGCWPQLPLKGPWRPTPRPRVPVPWRTPRFACRWLGYLGLLLLDVIICLLVLVGLIRSSKGILVGVCLLGVLALVISWGALGLELAVSVGSSDFCVDPDAYVTKMVEEYSVLSGATPETEARELPEPRRWRLQ

SEQ ID NO: 12489 - protein, 286 aa, Artificial Sequence
  Synthetic polypeptide
MAGVSYAAPWWVSLLHRLPHFDLSWEATSSQFRPEDTDYQQALLLLGAAALACLALDLLFLLFYSFWLCCRRRKSEEHLDADCCCTAWCVIIATLVCSAGIAVGFYGNGETSDGIHRATYSLRHANRTVAGVQDRVWDTAVGLNHTAEPSLQTLERQLAGRPEPLRAVQRLQGLLETLLGYTAAIPFWRNTAVSLEVLAEQVDLYDWYRVCLLGVLALVISWGALGLELAVSVGSSDFCVDPDAYVTKMVEEYSVLSGGGGGCNEPRSHHCIPAWATRVKLHLKKK

SEQ ID NO: 12490 - protein, 318 aa, Artificial Sequence
  Synthetic polypeptide
MAGVSYAAPWWVSLLHRLPHFDLSWEATSSQFRPEDTDYQQALLLLGAAALACLALDLLFLLFYSFWLCCRRRKSEEHLDADCCCTAWCVIIATLVCSAGIAVGFYGNGETSDGIHRATYSLRHANRTVAGVQDRVWDTAVGLNHTAEPSLQTLERQLAGRPEPLRAVQRLQGLLETLLGYTAAIPFWRNTAVSLEVLAEQVDLYDWYRWLGYLGLLLLDVIICLLVLVGLIRSSKGILVGVCLLGVLALVISWGALGLELAVSVGSSDFCVDPDAYVTKMVEEYSVLSGGGGGCNEPRSHHCIPAWATRVKLHLKKK

SEQ ID NO: 12491 - protein, 147 aa, Artificial Sequence
  Synthetic polypeptide
MPSGVPGCWPQLPLKGPWRPTPRPRVPVPWRTPRFACRWLGYLGLLLLDVIICLLVLVGLIRSSKGILVGVCLLGVLALVISWGALGLELAVSVGSSDFCVDPDAYVTKMVEEYSVLSGGGGGCNEPRSHHCIPAWATRVKLHLKKK

SEQ ID NO: 12492 - protein, 120 aa, Artificial Sequence
  Synthetic polypeptide
MKRRMFPRPCLARMPGSRGSGSTPDGNRKCCRFEHLLIAHPGSRGSRVLVDARDKLGIPWQYSENEKHGMFLMAFENKAGLPVEPATFQLYVPALSALWRDSGIREAFSRRSEFQLGLVD

SEQ ID NO: 12493 - protein, 103 aa, Artificial Sequence
  Synthetic polypeptide
MRIIHGREFDQKALLEFRDTIFDNILKGSRVLVDARDKLGIPWQYSENEKHGMFLMAFENKAGLPVEPATFQLYVPALSALWRDSGIREAFSRRSEFQLGLVD

SEQ ID NO: 12494 - protein, 179 aa, Artificial Sequence
  Synthetic polypeptide
MSGVVRTLSRCLLPAEAGGARERRAGSGARDAEREARRRSRDIDALLARERRAVRRLVKILLLGAGESGKSTFLKQMRIIHGREFDQKALLEFRDTIFDNILKGSRVLVDARDKLGIPWQYSENEKHGMFLMAFENKAGLPVEPATFQLYVPALSALWRDSGIREAFSRRSEFQLGLVD

SEQ ID NO: 12495 - protein, 193 aa, Artificial Sequence
  Synthetic polypeptide
MGAKQSGPAAANGRTRAYSGSDLPSSSSGGANGTAGGGGGARAAAAGRFPAQVPSAHQPSASGGAAAAAAAPAAPAAPRSRSLGGAVGSVASGARAAQSPFSIPNSSSGPYGSQDSVHSSPEDGGGGRDRPVGGSPGGPRLVIGSLPAHLSPHMFGGFKCPVCSKFVSSDEMDLHLVMCLTKPRITYNGVIMR

SEQ ID NO: 12496 - protein, 101 aa, Artificial Sequence
  Synthetic polypeptide
ANILAQKQLRSIILTHVIRAQRAINNEMAHQLYVLQVLTFNLLEDRMMTKMDPQDQAQRDIIFELRRIAFDAESEPNNSSGSMEKRKSMYTRDYKKLGFIV

SEQ ID NO: 12497 - protein, 363 aa, Artificial Sequence
  Synthetic polypeptide
MPPPADIVKVAIEWPGAYPKLMEIDQKKPLSAIIKEVCDGWSLANHEYFALQHADSSNFYITEKNRNEIKNGTILRLTTSPAQNAQQLHERIQSSSMDAKLEALKDLASLSRDVTFAQEFINLDGISLLTQMVESGTERYQKLQKIMKPCFGDMLSFTLTAFVELMDHGIVSWDTFSVAFIKKIASFVNKSAIDISILQRSLAILESMVLNSHDLYQKVAQEITIGQLIPHLQGSDQEIQTYTIAVINALFLKAPDERRQEMANILAQKQLRSIILTHVIRAQRAINNEMAHQLYVLQVLTFNLLEDRMMTKMDPQDQAQRDIIFELRRIAFDAESEPNNSSGSMEKRKSMYTRDYKKLGFIV

SEQ ID NO: 12498 - protein, 104 aa, Artificial Sequence
  Synthetic polypeptide
QEMANILAQKQLRSIILTHVIRAQRAINNEMAHQLYVLQVLTFNLLEDRMMTKMDPQDQAQRDIIFELRRIAFDAESEPNNSSGSMEKRKSMYTRDYKKLGFIV

SEQ ID NO: 12499 - protein, 143 aa, Artificial Sequence
  Synthetic polypeptide
  misc_feature (1)..(1): Xaa can be any naturally occurring amino acid
XQEIQTYTIAVINALFLKAPDERRQVDVESNVDILDCPLTEMANILAQKQLRSIILTHVIRAQRAINNEMAHQLYVLQVLTFNLLEDRMMTKMDPQDQAQRDIIFELRRIAFDAESEPNNSSGSMEKRKSMYTRDYKKLGFIV

SEQ ID NO: 12500 - protein, 22 aa, Artificial Sequence
  Synthetic polypeptide
  misc_feature (1)..(1): Xaa can be any naturally occurring amino acid
XNYYKKLFGSGTTLVVTGAQQM

SEQ ID NO: 12501 - protein, 155 aa, Artificial Sequence
  Synthetic polypeptide
LRDNIAGEELELSKSLNELGIKELYAWDNRRETFRKSSLGNDETDKEKKKFLGFFKVNKRSNSKAEQLVLSGADSDEDTSRAAPGRGLNGCLTTPNSPSMHSRSLTLGPSLSLGSISGVSVKSEMKKRRAPPPPGSGPPVQDKASEKAGCSSSRL

SEQ ID NO: 12502 - protein, 352 aa, Artificial Sequence
  Synthetic polypeptide
MDAPRASAAKPPTGRKMKARAPPPPGKAATLHVHSDQKPPHDGALGSQQNLVRMKEALRASTMDVTVVLPSGLEKRSVLNGSHAMMDLLVELCLQNHLNPSHHALEIRSSETQQPLSFKPNTLIGTLNVHTVFLKEKVPEEKVKPGPPKVPEKSVRLVVNYLRTQKAVVRVSPEVPLQNILPVICAKCEVSPEHVVLLRDNIAGEELELSKSLNELGIKELYAWDNRRETFRKSSLGNDETDKEKKKFLGFFKVNKRSNSKAEQLVLSGADSDEDTSRAAPGRGLNGCLTTPNSPSMHSRSLTLGPSLSLGSISGVSVKSEMKKRRAPPPPGSGPPVQDKASEKAGCSSSRL

SEQ ID NO: 12503 - protein, 327 aa, Artificial Sequence
  Synthetic polypeptide
MDAPRASAAKPPTGRKMKARAPPPPGKAATLHVHSDQKPPHDGALGSQQNLVRMKEALRASTMDVTVVLPSGLEKRSVLNGSHAMMDLLVELCLQNHLNPSHHALEIRSSETQQPLSFKPNTLIGTLNVHTVFLKEKVPEEKVKPGPPKVPEKSVRLVVNYLRTQKAVVRVSPEVPLQNILPVICAKCEVSPEHVVLLRDNIAGEELELSKSLNELGIKELYAWDNRRETFRKSSLGNDETDKEKKKFLGFFKVNKRSNSKGCLTTPNSPSMHSRSLTLGPSLSLGSISGVSVKSEMKKRRAPPPPGSGPPVQDKASEKAGCSSSRL

SEQ ID NO: 12504 - protein, 219 aa, Artificial Sequence
  Synthetic polypeptide
MKEKVPEEKVKPGPPKVPEKSVRLVVNYLRTQKAVVRVSPEVPLQNILPVICAKCEVSPEHVVLLRDNIAGEELELSKSLNELGIKELYAWDNRRETFRKSSLGNDETDKEKKKFLGFFKVNKRSNSKAEQLVLSGADSDEDTSRAAPGRGLNGCLTTPNSPSMHSRSLTLGPSLSLGSISGVSVKSEMKKRRAPPPPGSGPPVQDKASEKAGCSSSRL

SEQ ID NO: 12505 - protein, 246 aa, Artificial Sequence
  Synthetic polypeptide
  misc_feature (1)..(1): Xaa can be any naturally occurring amino acid
XHAMMDLLVELCLQNHLNPSHHALEIRSSETQQPLSFKPNTLIGTLNVHTVFLKEKVPEEKVKPGPPKVPEKSVRLVVNYLRTQKAVVRVSPEVPLQNILPVICAKCEVSPEHVVLLRDNIAGEELELSKSLNELGIKELYAWDNRRETFRKSSLGNDETDKEKKKFLGFFKVNKRSNSKGCLTTPNSPSMHSRSLTLGPSLSLGSISGVSVKSEMKKRRAPPPPGSGPPVQDKASEKAGCSSSRL

SEQ ID NO: 12506 - protein, 470 aa, Artificial Sequence
  Synthetic polypeptide
MGSVGSQRLEEPSVAGTPDPGVVMSFTFDSHQLEEAAEAAQGQGLRARGVPAFTDTTLDEPVPDDRYHAIYFAMLLAGVGFLLPYNSFITDVDYLHHKYPGTSIVFDMSLTYILVALAAVLLNNVLVERLTLHTRITAASATCGCSSSLGTRPTPSTWPLWAPWPSAAQQSSFYGYTGMLPKRYTQGVMTGESTAGVMISLSRILTKLLLPDERASTLIFFLVSVALELLCFLLHLLVRRSRFVLFYTTRPRDSHRGRPGLGRGYGYRVHHDVVAGDVHFEHPAPALAPNESPKDSPAHEVTGSGGAYMRFDVPRPRVQRSWPTFRALLLHRYVVARVIWADMLSIAVTYFITLCLFPGLESEIRHCILGEWLPILIMAVFNLSDFVGKILAALPVDWRGTHLLACSCLRVVFIPLFILCVYPSGMPALRHPAWPCIFSLLMGISNGYFGSVPMILAAGKVSPKQRELAG

SEQ ID NO: 12507 - protein, 484 aa, Artificial Sequence
  Synthetic polypeptide
MGSVGSQRLEEPSVAGTPDPGVVMSFTFDSHQLEEAAEAAQGQGLRARGVPAFTDTTLDEPVPDDRYHAIYFAMLLAGVGFLLPYNSFITDVDYLHHKYPGTSIVFDMSLTYILVALAAVLLNNVLVERLTLHTRITAGYLLALGPLLFISICDVWLQLFSRDQAYAINLAAVGTVAFGCTVQQSSFYGYTGMLPKRYTQGVMTGESTAGVMISLSRILTKLLLPDERASTLIFFLVSVALELLCFLLHLLVRRSRFVLFYTTRPRDSHRGRPGLGRGYGYRVHHDVVAGDVHFEHPAPALAPNESPKDSPAHEVTGSGGAYMRFDVPRPRVQRSWPTFRALLLHRYVVARVIWADMLSIAVTYFITLCLFPGLESEIRHCILGEWLPILIMAVFNLSDFVGKILAALPVDWRGTHLLACSCLRVVFIPLFILCVYPSGMPALRHPAWPCIFSLLMGISNGYFGSVPMILAAGKVSPKQRELAG

SEQ ID NO: 12508 - protein, 123 aa, Artificial Sequence
  Synthetic polypeptide
MDEDGGGEGGGVPEDLSLEEREELLDIRRRKKELIDDIERLKYEIAEVMTEIDNLTSVEESKTTQRNKQIAMGRKKFNMDPKKGIQFLIENDLLQSSPEDVAQFLYKGEGLNKTVIGDYLGER

SEQ ID NO: 12509 - protein, 268 aa, Artificial Sequence
  Synthetic polypeptide
MHRGKLDCAGGALLSSYLIVLMILLAVVICTVSAIMCVSMRGTICNPGPRKSMSKLLYIRLALFFPEMVWASLGAAWVADGVQCDRTVVNGIIATVVVSWIIIAATVVSIIIVFDPLGGKMAPYSSAGPSHLDSHDSSQLLNGLKTAATSVWETRIKLLCCCIGKDDHTRVAFSSTAELFSTYFSDTDLVPSDIAAGLALLHQQQDNIRNNQEPAQVVCHAPGSSQEADLDAELENCHHYMQFAAAAYGWPLYIYRNPLTGLCRIGGD

SEQ ID NO: 12510 - protein, 309 aa, Artificial Sequence
  Synthetic polypeptide
MPGMVLFGRRWAIASDDLVFPGFFELVVRVLWWIGILTLYLMHRGKLDCAGGALLSSYLIVLMILLAVVICTVSAIMCVSMRGTICNPGPRKSMSKLLYIRLALFFPEMVWASLGAAWVADGVQCDRTVVNGIIATVVVSWIIIAATVVSIIIVFDPLGGKMAPYSSAGPSHLDSHDSSQLLNGLKTAATSVWETRIKLLCCCIGKDDHTRVAFSSTAELFSTYFSDTDLVPSDIAAGLALLHQQQDNIRNNQEPAQVVCHAPGSSQEADLDAELENCHHYMQFAAAAYGWPLYIYRNPLTGLCRIGGD

SEQ ID NO: 12511 - protein, 182 aa, Artificial Sequence
  Synthetic polypeptide
MYCVSHHVCQHESWIIIAATVVSIIIVFDPLGGKMAPYSSAGPSHLDSHDSSQLLNGLKTAATSVWETRIKLLCCCIGKDDHTRVAFSSTAELFSTYFSDTDLVPSDIAAGLALLHQQQDNIRNNQEPAQVVCHAPGSSQEADLDAELENCHHYMQFAAAAYGWPLYIYRNPLTGLCRIGGD

SEQ ID NO: 12512 - protein, 275 aa, Artificial Sequence
  Synthetic polypeptide
MHRGKLDCAGGALLSSYLIVLMILLAVVICTVSAIMCVSMRGTICNPGPRKSMSKLLYIRLALFFPEMVWASLGAAWVADGVQCDRTVVNGIIATVVVSWIIIAATVVSIIIVFDPLGGKMAPYSSAGPSHLDSHDSSQLLNGLKTAATSVWETRIKLLCCCIGKDDHTRVAFSSTAELFSTYFSDTDLVPSDIAAGLALLHQQQDNIRNNQEPAQVVCHAPGSSQEADLDAELENCHHYMQFAAAAYGWPLYIYRNPLTGLCRIGGDWCSGSCL

SEQ ID NO: 12513 - protein, 316 aa, Artificial Sequence
  Synthetic polypeptide
MPGMVLFGRRWAIASDDLVFPGFFELVVRVLWWIGILTLYLMHRGKLDCAGGALLSSYLIVLMILLAVVICTVSAIMCVSMRGTICNPGPRKSMSKLLYIRLALFFPEMVWASLGAAWVADGVQCDRTVVNGIIATVVVSWIIIAATVVSIIIVFDPLGGKMAPYSSAGPSHLDSHDSSQLLNGLKTAATSVWETRIKLLCCCIGKDDHTRVAFSSTAELFSTYFSDTDLVPSDIAAGLALLHQQQDNIRNNQEPAQVVCHAPGSSQEADLDAELENCHHYMQFAAAAYGWPLYIYRNPLTGLCRIGGDWCSGSCL

SEQ ID NO: 12514 - protein, 189 aa, Artificial Sequence
  Synthetic polypeptide
MYCVSHHVCQHESWIIIAATVVSIIIVFDPLGGKMAPYSSAGPSHLDSHDSSQLLNGLKTAATSVWETRIKLLCCCIGKDDHTRVAFSSTAELFSTYFSDTDLVPSDIAAGLALLHQQQDNIRNNQEPAQVVCHAPGSSQEADLDAELENCHHYMQFAAAAYGWPLYIYRNPLTGLCRIGGDWCSGSCL

SEQ ID NO: 12515 - protein, 243 aa, Artificial Sequence
  Synthetic polypeptide
MHRGKLDCAGGALLSSYLIVLMILLAVVICTVSAIMCVSMRGTICNPGPRKSMSKLLYIRLALFFPEMVWASLGAAWVADGVQCDRTVVNGIIATVVVSWIIIAATVVSIIIVFDPLGGKMAPYSSAGPSHLDSHDSSQLLNGLKTAATSVWETRIKLLCCCIGKDDHTRVAFSSTAELFSTYFSDTDLVPSDIAAGLALLHQQQDNIRNNQEPAQVVCHAPGSSQVQWLMPIIPALWEAKAG

SEQ ID NO: 12516 - protein, 143 aa, Artificial Sequence
  Synthetic polypeptide
MPGMVLFGRRWAIASDDLVFPGFFELVVRVLWWIGILTLYLMHRGKLDCAGGALLSSYLIVLMILLAVVICTVSAIMCVSMRGHRSGAQRHCGGPRPASSATGQYQEQPRACPGGLPCPRELPGAVAHAYNPSTLGGQGGLIT

SEQ ID NO: 12517 - protein, 187 aa, Artificial Sequence
  Synthetic polypeptide
MPGMVLFGRRWAIASDDLVFPGFFELVVRVLWWIGILTLYLMHRGKLDCAGGALLSSYLIVLMILLAVVICTVSAIMCVSMRGTICNPGPRKSMSKLLYIRLALFFPEMVWASLGAAWVADGVQCDRTVVNGIIATVVVRTQIWCPATLRRASPCFISNRTISGTTKSLPRWSAMPQGAPRCSGSCL

SEQ ID NO: 12518 - protein, 284 aa, Artificial Sequence
  Synthetic polypeptide
MPGMVLFGRRWAIASDDLVFPGFFELVVRVLWWIGILTLYLMHRGKLDCAGGALLSSYLIVLMILLAVVICTVSAIMCVSMRGTICNPGPRKSMSKLLYIRLALFFPEMVWASLGAAWVADGVQCDRTVVNGIIATVVVSWIIIAATVVSIIIVFDPLGGKMAPYSSAGPSHLDSHDSSQLLNGLKTAATSVWETRIKLLCCCIGKDDHTRVAFSSTAELFSTYFSDTDLVPSDIAAGLALLHQQQDNIRNNQEPAQVVCHAPGSSQVQWLMPIIPALWEAKAG

SEQ ID NO: 12519 - protein, 60 aa, Artificial Sequence
  Synthetic polypeptide
MYCVSHHVCQHERTQIWCPATLRRASPCFISNRTISGTTKSLPRWSAMPQGAPRCSGSCL

SEQ ID NO: 12520 - protein, 157 aa, Artificial Sequence
  Synthetic polypeptide
MYCVSHHVCQHESWIIIAATVVSIIIVFDPLGGKMAPYSSAGPSHLDSHDSSQLLNGLKTAATSVWETRIKLLCCCIGKDDHTRVAFSSTAELFSTYFSDTDLVPSDIAAGLALLHQQQDNIRNNQEPAQVVCHAPGSSQVQWLMPIIPALWEAKAG

SEQ ID NO: 12521 - protein, 1190 aa, Artificial Sequence
  Synthetic polypeptide
MATTATPATNQGWPEDFGFRLGGSGPCFVLEVAKGSSAHAGGLRPGDQILEVEGLAVGGLSRERLVRLARRCPRVPPSLGVLPAPDGGPGPGSGPAAPTTVLRAPRCGRGLALGRELLRLAGRKRPDAVHRERRRKAQEFSRKVDEILGDQPTAKEQVFAALKQFAAEQRVDDLVWTLTLALPREACGPLLDNLRIFIPKKHRARFDEVVSQGLLGKLCRARRAQGAQRLRRSRSEERPERLLVSTRASAPPRRPDEPPPRRASLLVGGLAGPGGARRTVRVYKGNKSFGFTLRGHGPVWIESVLPGSPADNAALKSGDRILFLNGLDMRNCSHDKVVSMLQGSGAMPTLVVEEGLVPFASDSDSLDSPNPSSALTSLQWVAEILPSSIRVQGRTFSQQLEHLLTPPERYGVCRALESFFQHRNIDTLIVDVYPVLDTPAKQVLWQFIYQLLTYEEQELCQEKIACFLGYTAMTAEPEPELDLESEPTPEPQPRSSLRASSMCRRSLRSQGLEAGLSCGPSECPEMPLPLIPGERQAGDGTSLPETPNPKMMSAVYAELESRLNSSFKGKMGTVSKSRASPPGPSPAVTTGPRTLSGVSWPSERLLPSPCYHPLCSGGLASPSSSESHPYASLDSSRAPSPQPGPGPICPDSPPSPDPTRPPSRRKLFTFSHPVRSRDTDRFLDVLSEQLGPRVTIVDDFLTPENDYEEMSFHDDQGSFVTNERSSASDCISSSEEGSSLTYSSISDHIPPPPLSPPPPPPLPFHDAKPSSRSSDGSRGPAQALAKPLTQLSHPVPPPPPPPLPPPVPCAPPMLSRGLGHRRSETSHMSVKRLRWEQVENSEGTIWGQLGEDSDYDKLSDMVKYLDLELHFGTQKPAKPVPGPEPFRKKEVVEILSHKKAYNTSILLAHLKLSPAELRQVLMSMEPRRLEPAHLAQLLLFAPDADEEQRYQAFREAPGRLSEPDQFVLQMLSVPEYKTRLRSLHFQATLQEKTEEIRGSLECLRQASLELKNSRKLAKILEFVLAMGNYLNDGQPKTNKTTGFKINFLTELNSTKTVDGKSTFLHILAKSLSQHFPELLGFAQDLPTVPLAAKVNQRALTSDLADLHGTISEIQDACQSISPSSEDKFAMVMSSFLETAQPALRALDGLQREAMEELGKALAFFGEDSKATTSEAFFGIFAEFMSKFEET

SEQ ID NO: 12522 - protein, 1006 aa, Artificial Sequence
  Synthetic polypeptide
MGKDQGFSRHFRIFIPKKHRARFDEVVSQGLLGKLCRARRAQGAQRLRRSRSEERPERLLVSTRASAPPRRPDEPPPRRASLLVGGLAGPGGARRTVRVYKGNKSFGFTLRGHGPVWIESVLPGSPADNAALKSGDRILFLNGLDMRNCSHDKVVSMLQGSGAMPTLVVEEGLVPFASDSDSLDSPNPSSALTSLQWVAEILPSSIRVQGRTFSQQLEHLLTPPERYGVCRALESFFQHRNIDTLIVDVYPVLDTPAKQVLWQFIYQLLTYEEQELCQEKIACFLGYTAMTEPEPELDLESEPTPEPQPRSSLRASSMCRRSLRSQGLEAGLSCGPSECPEMPLPLIPGERQAGDGTSLPETPNPKMMSAVYAELESRLNSSFKGKMGTVSKSRASPPGPSPAVTTGPRTLSGVSWPSERLLPSPCYHPLCSGGLASPSSSESHPYASLDSSRAPSPQPGPGPICPDSPPSPDPTRPPSRRKLFTFSHPVRSRDTDRFLDVLSEQLGPRVTIVDDFLTPENDYEEMSFHDDQGSFVTNERSSASDCISSSEEGSSLTYSSISDHIPPPPLSPPPPPPLPFHDAKPSSRSSDGSRGPAQALAKPLTQLSHPVPPPPPPPLPPPVPCAPPMLSRGLGHRRSETSHMSVKRLRWEQVENSEGTIWGQLGEDSDYDKLSDMVKYLDLELHFGTQKPAKPVPGPEPFRKKEVVEILSHKKAYNTSILLAHLKLSPAELRQVLMSMEPRRLEPAHLAQLLLFAPDADEEQRYQAFREAPGRLSEPDQFVLQMLSVPEYKTRLRSLHFQATLQEKTEEIRGSLECLRQASLELKNSRKLAKILEFVLAMGNYLNDGQPKTNKTTGFKINFLTELNSTKTVDGKSTFLHILAKSLSQHFPELLGFAQDLPTVPLAAKVNQRALTSDLADLHGTISEIQDACQSISPSSEDKFAMVMSSFLETAQPALRALDGLQREAMEELGKALAFFGEDSKATTSEAFFGIFAEFMSKFEET

SEQ ID NO: 12523 - protein, 999 aa, Artificial Sequence
  Synthetic polypeptide
MSCLGIFIPKKHRARFDEVVSQGLLGKLCRARRAQGAQRLRRSRSEERPERLLVSTRASAPPRRPDEPPPRRASLLVGGLAGPGGARRTVRVYKGNKSFGFTLRGHGPVWIESVLPGSPADNAALKSGDRILFLNGLDMRNCSHDKVVSMLQGSGAMPTLVVEEGLVPFASDSDSLDSPNPSSALTSLQWVAEILPSSIRVQGRTFSQQLEHLLTPPERYGVCRALESFFQHRNIDTLIVDVYPVLDTPAKQVLWQFIYQLLTYEEQELCQEKIACFLGYTAMTEPEPELDLESEPTPEPQPRSSLRASSMCRRSLRSQGLEAGLSCGPSECPEMPLPLIPGERQAGDGTSLPETPNPKMMSAVYAELESRLNSSFKGKMGTVSKSRASPPGPSPAVTTGPRTLSGVSWPSERLLPSPCYHPLCSGGLASPSSSESHPYASLDSSRAPSPQPGPGPICPDSPPSPDPTRPPSRRKLFTFSHPVRSRDTDRFLDVLSEQLGPRVTIVDDFLTPENDYEEMSFHDDQGSFVTNERSSASDCISSSEEGSSLTYSSISDHIPPPPLSPPPPPPLPFHDAKPSSRSSDGSRGPAQALAKPLTQLSHPVPPPPPPPLPPPVPCAPPMLSRGLGHRRSETSHMSVKRLRWEQVENSEGTIWGQLGEDSDYDKLSDMVKYLDLELHFGTQKPAKPVPGPEPFRKKEVVEILSHKKAYNTSILLAHLKLSPAELRQVLMSMEPRRLEPAHLAQLLLFAPDADEEQRYQAFREAPGRLSEPDQFVLQMLSVPEYKTRLRSLHFQATLQEKTEEIRGSLECLRQASLELKNSRKLAKILEFVLAMGNYLNDGQPKTNKTTGFKINFLTELNSTKTVDGKSTFLHILAKSLSQHFPELLGFAQDLPTVPLAAKVNQRALTSDLADLHGTISEIQDACQSISPSSEDKFAMVMSSFLETAQPALRALDGLQREAMEELGKALAFFGEDSKATTSEAFFGIFAEFMSKFEET

SEQ ID NO: 12524 - protein, 51 aa, Artificial Sequence
  Synthetic polypeptide
MDFLVLFLFYLASVLMGLVLICVCSKTHSLKGLARGGAQEAEAGGSLEPGV

SEQ ID NO: 12525 - protein, 151 aa, Artificial Sequence
  Synthetic polypeptide
MASPPACPSEEDESLKGCELYVQLHGIQQVLKDCIVHLCISKPERPMKFLREHFEKLEKEENRQILARQKSNSQSDSHDEEVSPTPPNPVVKARRRRGGVSAEVYTEEDAVSYVRKVIPKDYKTMTALAKAISKNVLFAHLDDNERRGGRR

SEQ ID NO: 12526 - protein, 96 aa, Artificial Sequence
  Synthetic polypeptide
MDPLEENRQILARQKSNSQSDSHDEEVSPTPPNPVVKARRRRGGVSAEVYTEEDAVSYVRKVIPKDYKTMTALAKAISKNVLFAHLDDNERRGGRR

SEQ ID NO: 12527 - protein, 20 aa, Artificial Sequence
  Synthetic polypeptide
MKDRTQELRTNGASVTYFAE

SEQ ID NO: 12528 - protein, 43 aa, Artificial Sequence
  Synthetic polypeptide
MQPPPPGPLGDCLRDWEDLQQDFQNIQETHRLYRLKLEELTKL

SEQ ID NO: 12529 - protein, 168 aa, Artificial Sequence
  Synthetic polypeptide
MGCTLSAEDKAAVERSKMIDRNLREDGEKAAREVKLLLLGAGESGKSTIVKQMKIIHEAGYSEEECKQYKAVVYSNTIQSIIAIIRAMGRLKIDFGDSARADDARQLFVLAGAAEEGFMTAELAGVIKRLWKDSGVQACFNRSREYQLNDSAAYLTQSSPNMILFNNE

SEQ ID NO: 12530 - protein, 116 aa, Artificial Sequence
  Synthetic polypeptide
MKIIHEAGYSEEECKQYKAVVYSNTIQSIIAIIRAMGRLKIDFGDSARADDARQLFVLAGAAEEGFMTAELAGVIKRLWKDSGVQACFNRSREYQLNDSAAYLTQSSPNMILFNNE

SEQ ID NO: 12531 - protein, 884 aa, Artificial Sequence; identical to SEQ ID NO: 110
  Synthetic polypeptide

SEQ ID NO: 12532 - protein, 811 aa, Artificial Sequence; identical to SEQ ID NO: 139
  Synthetic polypeptide

SEQ ID NO: 12533 - protein, 980 aa, Artificial Sequence; identical to SEQ ID NO: 84
  Synthetic polypeptide

SEQ ID NO: 12534 - protein, 1051 aa, Artificial Sequence; identical to SEQ ID NO: 71
  Synthetic polypeptide

SEQ ID NO: 12535 - protein, 1012 aa, Artificial Sequence
  Synthetic polypeptide
  misc_feature (1)..(1): Xaa can be any naturally occurring amino acid
XDAVPRPGAGTGQGLGAAGGGSPPRALAALEPRLDLLLGARRLPGGLGWGPALLLQPPASSLPGAFSCASGEYLEMKNQVCSKCGEGTYSLGSGIKFDEWDELPAGFSNIATFMDTVVGPSDSRPDGCNNSSWIPRGNYIESNRDDCTVSLIYAVHLKKSGYVFFEYQYVDNNIFFEFFIQNDQCQEMDTTTDKWVKLTDNGEWGSHSVMLKSGTNILYWRTTGILMGSKAVKPVLVKNITIEGVAYTSECFPCKPGTFSNKPGSFNCQVCPRNTYSEKGAKECIRCKDDSQFSEEGSSECTERPPCTTKDYFQIHTPCDEEGKTQIMYKWIEPKICREDLTDAIRLPPSGEKKDCPPCNPGFYNNGSSSCHPCPPGTFSDGTKECRPCPAGTEPALGFEYKWWNVLPGNMKTSCFNVGNSKCDGMNGWEVAGDHIQSGAGGSDNDYLILNLHIPGFKPPTSMTGATGSELGRITFVFETLCSADCVLYFMVDINRKSTNVVESWGGTKEKQAYTHIIFKNATFTFTWAFQRTNQGQDNRRFINDMVKIYSITATNAVDGVASSCRACALGSEQSGSSCVPCPPGHYIEKETNQCKECPPDTYLSIHQVYGKEACIPCGPGSKNNQDHSVCYSDCFFYHEKENQSLHYDFSNLSSVGSLMNGPSFTSKGTKYFHFFNISLCGHEGKKMALCTNNITDFTVKEIVAGSDDYTNLVGAFVCQSTIIPSESKGFRAALSSQSIILADTFIGVTVETTLKNINIKEDMFPVPTSQIPDVHFFYKSSTATTSCINGRSTAVKMRCNPTKSGAGVISVPSKCPAGTCDGCTFYFLWESAEACPLCTEHDFHEIEGACKRGFQETLYVWNEPKWCIKGISLPEKKLATCETVDFWLKVGAGVGAFTAVLLVALTCYFWKKNQKLEYKYSKLVMTTNSKECELPAADSCAIMEGEDNEEEVVYSNKQSLLGKLKSLATKKLPQSPQSSATTTLISQQPSTLRQDRQSAKRVWLAKGWDDC

SEQ ID NO: 12536 - protein, 860 aa, Artificial Sequence
  Synthetic polypeptide
MHSSWIPRGNYIESNRDDCTVSLIYAVHLKKSGYVFFEYQYVDNNIFFEFFIQNDQCQEMDTTTDKWVKLTDNGEWGSHSVMLKSGTNILYWRTTGILMGSKAVKPVLVKNITIEGVAYTSECFPCKPGTFSNKPGSFNCQVCPRNTYSEKGAKECIRCKDDSQFSEEGSSECTERPPCTTKDYFQIHTPCDEEGKTQIMYKWIEPKICREDLTDAIRLPPSGEKKDCPPCNPGFYNNGSSSCHPCPPGTFSDGTKECRPCPAGTEPALGFEYKWWNVLPGNMKTSCFNVGNSKCDGMNGWEVAGDHIQSGAGGSDNDYLILNLHIPGFKPPTSMTGATGSELGRITFVFETLCSADCVLYFMVDINRKSTNVVESWGGTKEKQAYTHIIFKNATFTFTWAFQRTNQGQDNRRFINDMVKIYSITATNAVDGVASSCRACALGSEQSGSSCVPCPPGHYIEKETNQCKECPPDTYLSIHQVYGKEACIPCGPGSKNNQDHSVCYSDCFFYHEKENQSLHYDFSNLSSVGSLMNGPSFTSKGTKYFHFFNISLCGHEGKKMALCTNNITDFTVKEIVAGSDDYTNLVGAFVCQSTIIPSESKGFRAALSSQSIILADTFIGVTVETTLKNINIKEDMFPVPTSQIPDVHFFYKSSTATTSCINGRSTAVKMRCNPTKSGAGVISVPSKCPAGTCDGCTFYFLWESAEACPLCTEHDFHEIEGACKRGFQETLYVWNEPKWCIKGISLPEKKLATCETVDFWLKVGAGVGAFTAVLLVALTCYFWKKNQKLEYKYSKLVMTTNSKECELPAADSCAIMEGEDNEEEVVYSNKQSLLGKLKSLATKLPTVNCGLQTLHGKFQK

SEQ ID NO: 12537 - protein, 787 aa, Artificial Sequence
  Synthetic polypeptide
MLEGNYQVMLKSGTNILYWRTTGILMGSKAVKPVLVKNITIEGVAYTSECFPCKPGTFSNKPGSFNCQVCPRNTYSEKGAKECIRCKDDSQFSEEGSSECTERPPCTTKDYFQIHTPCDEEGKTQIMYKWIEPKICREDLTDAIRLPPSGEKKDCPPCNPGFYNNGSSSCHPCPPGTFSDGTKECRPCPAGTEPALGFEYKWWNVLPGNMKTSCFNVGNSKCDGMNGWEVAGDHIQSGAGGSDNDYLILNLHIPGFKPPTSMTGATGSELGRITFVFETLCSADCVLYFMVDINRKSTNVVESWGGTKEKQAYTHIIFKNATFTFTWAFQRTNQGQDNRRFINDMVKIYSITATNAVDGVASSCRACALGSEQSGSSCVPCPPGHYIEKETNQCKECPPDTYLSIHQVYGKEACIPCGPGSKNNQDHSVCYSDCFFYHEKENQSLHYDFSNLSSVGSLMNGPSFTSKGTKYFHFFNISLCGHEGKKMALCTNNITDFTVKEIVAGSDDYTNLVGAFVCQSTIIPSESKGFRAALSSQSIILADTFIGVTVETTLKNINIKEDMFPVPTSQIPDVHFFYKSSTATTSCINGRSTAVKMRCNPTKSGAGVISVPSKCPAGTCDGCTFYFLWESAEACPLCTEHDFHEIEGACKRGFQETLYVWNEPKWCIKGISLPEKKLATCETVDFWLKVGAGVGAFTAVLLVALTCYFWKKNQKLEYKYSKLVMTTNSKECELPAADSCAIMEGEDNEEEVVYSNKQSLLGKLKSLATKLPTVNCGLQTLHGKFQK

SEQ ID NO: 12538 - protein, 956 aa, Artificial Sequence
  Synthetic polypeptide
MLFRARGPVRGRGWGRPAEAPRRGRSPPWSPAWICCWALAGCQAAWAGDLPSSSSRPLPPCQEKDYHFEYTECDSSGSRWRVAIPNSAVDCSGLPDPVRGKECTFSCASGEYLEMKNQVCSKCGEGTYSLGSGIKFDEWDELPAGFSNIATFMDTVVGPSDSRPDGCNNSSWIPRGNYIESNRDDCTVSLIYAVHLKKSGYVFFEYQYVDNNIFFEFFIQNDQCQEMDTTTDKWVKLTDNGEWGSHSVMLKSGTNILYWRTTGILMGSKAVKPVLVKNITIEGVAYTSECFPCKPGTFSNKPGSFNCQVCPRNTYSEKGAKECIRCKDDSQFSEEGSSECTERPPCTTKDYFQIHTPCDEEGKTQIMYKWIEPKICREDLTDAIRLPPSGEKKDCPPCNPGFYNNGSSSCHPCPPGTFSDGTKECRPCPAGTEPALGFEYKWWNVLPGNMKTSCFNVGNSKCDGMNGWEVAGDHIQSGAGGSDNDYLILNLHIPGFKPPTSMTGATGSELGRITFVFETLCSADCVLYFMVDINRKSTNVVESWGGTKEKQAYTHIIFKNATFTFTWAFQRTNQGQDATTLRKKPTSARNVHLTPTCPYIRSMAKRLVFHAGLGVKTISNLSSVGSLMNGPSFTSKGTKYFHFFNISLCGHEGKKMALCTNNITDFTVKEIVAGSDDYTNLVGAFVCQSTIIPSESKGFRAALSSQSIILADTFIGVTVETTLKNINIKEDMFPVPTSQIPDVHFFYKSSTATTSCINGRSTAVKMRCNPTKSGAGVISVPSKCPAGTCDGCTFYFLWESAEACPLCTEHDFHEIEGACKRGFQETLYVWNEPKWCIKGISLPEKKLATCETVDFWLKVGAGVGAFTAVLLVALTCYFWKKNQKLEYKYSKLVMTTNSKECELPAADSCAIMEGEDNEEEVVYSNKQSLLGKLKSLATKLPTVNCGLQTLHGKFQK

SEQ ID NO: 12539 - protein, 1027 aa, Artificial Sequence
  Synthetic polypeptide
MLFRARGPVRGRGWGRPAEAPRRGRSPPWSPAWICCWALAGCQAAWAGDLPSSSSRPLPPCQEKDYHFEYTECDSSGSRWRVAIPNSAVDCSGLPDPVRGKECTFSCASGEYLEMKNQVCSKCGEGTYSLGSGIKFDEWDELPAGFSNIATFMDTVVGPSDSRPDGCNNSSWIPRGNYIESNRDDCTVSLIYAVHLKKSGYVFFEYQYVDNNIFFEFFIQNDQCQEMDTTTDKWVKLTDNGEWGSHSVMLKSGTNILYWRTTGILMGSKAVKPVLVKNITIEGVAYTSECFPCKPGTFSNKPGSFNCQVCPRNTYSEKGAKECIRCKDDSQFSEEGSSECTERPPCTTKDYFQIHTPCDEEGKTQIMYKWIEPKICREDLTDAIRLPPSGEKKDCPPCNPGFYNNGSSSCHPCPPGTFSDGTKECRPCPAGTEPALGFEYKWWNVLPGNMKTSCFNVGNSKCDGMNGWEVAGDHIQSGAGGSDNDYLILNLHIPGFKPPTSMTGATGSELGRITFVFETLCSADCVLYFMVDINRKSTNVVESWGGTKEKQAYTHIIFKNATFTFTWAFQRTNQGQDNRRFINDMVKIYSITATNAVDGVASSCRACALGSEQSGSSCVPCPPGHYIEKETNQCKECPPDTYLSIHQVYGKEACIPCGPGSKNNQDHSVCYSDCFFYHEKENQSLHYDFSNLSSVGSLMNGPSFTSKGTKYFHFFNISLCGHEGKKMALCTNNITDFTVKEIVAGSDDYTNLVGAFVCQSTIIPSESKGFRAALSSQSIILADTFIGVTVETTLKNINIKEDMFPVPTSQIPDVHFFYKSSTATTSCINGRSTAVKMRCNPTKSGAGVISVPSKCPAGTCDGCTFYFLWESAEACPLCTEHDFHEIEGACKRGFQETLYVWNEPKWCIKGISLPEKKLATCETVDFWLKVGAGVGAFTAVLLVALTCYFWKKNQKLEYKYSKLVMTTNSKECELPAADSCAIMEGEDNEEEVVYSNKQSLLGKLKSLATKLPTVNCGLQTLHGKFQK

SEQ ID NO: 12540 - protein, 988 aa, Artificial Sequence
  Synthetic polypeptide
  misc_feature (1)..(1): Xaa can be any naturally occurring amino acid
XDAVPRPGAGTGQGLGAAGGGSPPRALAALEPRLDLLLGARRLPGGLGWGPALLLQPPASSLPGAFSCASGEYLEMKNQVCSKCGEGTYSLGSGIKFDEWDELPAGFSNIATFMDTVVGPSDSRPDGCNNSSWIPRGNYIESNRDDCTVSLIYAVHLKKSGYVFFEYQYVDNNIFFEFFIQNDQCQEMDTTTDKWVKLTDNGEWGSHSVMLKSGTNILYWRTTGILMGSKAVKPVLVKNITIEGVAYTSECFPCKPGTFSNKPGSFNCQVCPRNTYSEKGAKECIRCKDDSQFSEEGSSECTERPPCTTKDYFQIHTPCDEEGKTQIMYKWIEPKICREDLTDAIRLPPSGEKKDCPPCNPGFYNNGSSSCHPCPPGTFSDGTKECRPCPAGTEPALGFEYKWWNVLPGNMKTSCFNVGNSKCDGMNGWEVAGDHIQSGAGGSDNDYLILNLHIPGFKPPTSMTGATGSELGRITFVFETLCSADCVLYFMVDINRKSTNVVESWGGTKEKQAYTHIIFKNATFTFTWAFQRTNQGQDNRRFINDMVKIYSITATNAVDGVASSCRACALGSEQSGSSCVPCPPGHYIEKETNQCKECPPDTYLSIHQVYGKEACIPCGPGSKNNQDHSVCYSDCFFYHEKENQSLHYDFSNLSSVGSLMNGPSFTSKGTKYFHFFNISLCGHEGKKMALCTNNITDFTVKEIVAGSDDYTNLVGAFVCQSTIIPSESKGFRAALSSQSIILADTFIGVTVETTLKNINIKEDMFPVPTSQIPDVHFFYKSSTATTSCINGRSTAVKMRCNPTKSGAGVISVPSKCPAGTCDGCTFYFLWESAEACPLCTEHDFHEIEGACKRGFQETLYVWNEPKWCIKGISLPEKKLATCETVDFWLKVGAGVGAFTAVLLVALTCYFWKKNQKLEYKYSKLVMTTNSKECELPAADSCAIMEGEDNEEEVVYSNKQSLLGKLKSLATKLPTVNCGLQTLHGKFQK

SEQ ID NO: 12541 - protein, 99 aa, Artificial Sequence
  Synthetic polypeptide
MDLEGDRNGGAKKKNFFKLNNKSEKDKKEKKPTVSVFSMFRYSNWLDKLYMVVGTLAAIIHGAGLPLMMLVFGEMTDIFANAGNLEDLMSNITNRRTPN

SEQ ID NO: 12542 - protein, 80 aa, Artificial Sequence
  Synthetic polypeptide
MELEKRKENRFVERQSIVPLRLIYRSGGEDESRHDALDTRVRGDLGGPQLTHVDQASFQVDAFGTSFILDVVLNQKKLNL

SEQ ID NO: 12543 - protein, 130 aa, Artificial Sequence
  Synthetic polypeptide
MQAAVAVSVPFLLLCVLGTCPPARCGQAGDASLMELEKRKENRFVERQSIVPLRLIYRSGGEDESRHDALDTRVRGDLGGPQIQMFLKSESQKTIYQIQLTHVDQASFQVDAFGTSFILDVVLNQKKLNL

SEQ ID NO: 12544 - protein, 113 aa, Artificial Sequence
  Synthetic polypeptide
MQAAVAVSVPFLLLCVLGTCPPARCGQAGDASLMELEKRKENRFVERQSIVPLRLIYRSGGEDESRHDALDTRVRGDLGGPQLTHVDQASFQVDAFGTSFILDVVLNQKKLNL

SEQ ID NO: 12545 - protein, 93 aa, Artificial Sequence
  Synthetic polypeptide
MELEKRKENRFVERQSIVPLRLIYRSGGEDESRHDALDTRVRGDLGGPQLTHVDQASFQVDAFGTSFILDVVLNQDAHPSTTLLFFTELPGMS

SEQ ID NO: 12546 - protein, 143 aa, Artificial Sequence
  Synthetic polypeptide
MQAAVAVSVPFLLLCVLGTCPPARCGQAGDASLMELEKRKENRFVERQSIVPLRLIYRSGGEDESRHDALDTRVRGDLGGPQIQMFLKSESQKTIYQIQLTHVDQASFQVDAFGTSFILDVVLNQDAHPSTTLLFFTELPGMS

SEQ ID NO: 12547 - protein, 126 aa, Artificial Sequence
  Synthetic polypeptide
MQAAVAVSVPFLLLCVLGTCPPARCGQAGDASLMELEKRKENRFVERQSIVPLRLIYRSGGEDESRHDALDTRVRGDLGGPQLTHVDQASFQVDAFGTSFILDVVLNQDAHPSTTLLFFTELPGMS

SEQ ID NO: 12548 - protein, 80 aa, Artificial Sequence; identical to SEQ ID NO: 12542
  Synthetic polypeptide

SEQ ID NO: 12549 - protein, 130 aa, Artificial Sequence; identical to SEQ ID NO: 12543
  Synthetic polypeptide

SEQ ID NO: 12550 - protein, 113 aa, Artificial Sequence; identical to SEQ ID NO: 12544
  Synthetic polypeptide

SEQ ID NO: 12551 - protein, 386 aa, Artificial Sequence
  Synthetic polypeptide
MELEKRKENRFVERQSIVPLRLIYRSGGEDESRHDALDTRVRGDLGGPQLTHVDQASFQVDAFGTSFILDVVLNHDLLSSEYIERHIEHGGKTVEVKGGEHCYYQGHIRGNPDSFVALSTCHGLHGMFYDGNHTYLIEPEENDTTQEDFHFHSVYKSRLFEFSLDDLPSEFQQVNITPSKFILKPRPKRSKRQLRRYPRNVEEETKYIELMIVNDHLMFKKHRLSVVHTNTYAKSVVNMADLIYKDQLKTRIVLVAMETWATDNKFAISENPLITLREFMKYRRDFIKEKSDAVHLFSGSQFESSRSGAAYIGGICSLLKGGGVNEFGKTDLMAVTLAQSLAHNIGIISDKRKLASGECKCEDTWSGCIMGDTGQAWWLMAVIPSL

SEQ ID NO: 12552 - protein, 419 aa, Artificial Sequence
  Synthetic polypeptide
MQAAVAVSVPFLLLCVLGTCPPARCGQAGDASLMELEKRKENRFVERQSIVPLRLIYRSGGEDESRHDALDTRVRGDLGGPQLTHVDQASFQVDAFGTSFILDVVLNHDLLSSEYIERHIEHGGKTVEVKGGEHCYYQGHIRGNPDSFVALSTCHGLHGMFYDGNHTYLIEPEENDTTQEDFHFHSVYKSRLFEFSLDDLPSEFQQVNITPSKFILKPRPKRSKRQLRRYPRNVEEETKYIELMIVNDHLMFKKHRLSVVHTNTYAKSVVNMADLIYKDQLKTRIVLVAMETWATDNKFAISENPLITLREFMKYRRDFIKEKSDAVHLFSGSQFESSRSGAAYIGGICSLLKGGGVNEFGKTDLMAVTLAQSLAHNIGIISDKRKLASGECKCEDTWSGCIMGDTGQAWWLMAVIPSL

SEQ ID NO: 12553 - protein, 340 aa, Artificial Sequence
  Synthetic polypeptide
MGNPENIEDAYVAVIRPKNTASLNSREYRAKSYEILLHEVPIEGQKKKRKKVLLETKLQGNSEITQGILDYVVETTKPISPANQGIRGKRVVLMKKFPLDGEKMGREASLFIVPSVVKDNTKYTYTPGCPIFYCLQDIMRVCSESSTHFATLTARMLIALDKWLDERHAQSHFIPALFRPSPLERIKTNVINPAYATESGQTENSLHMGYSALEIKSKMLALEKADTCIYNPLFGSDLQYTNRVDKVVINPYFGLGAPDYSKIQIPKQEKWQRSMSSVTEDKERQWVDDFPLHRSACEGDSELLSRLLSERFSVNQLDSDHWAPIHYACWTMDGAGDHYF

SEQ ID NO: 12554 - protein, 102 aa, Artificial Sequence
  Synthetic polypeptide
MLLNQVDKVVINPYFGLGAPDYSKIQIPKQEKWQRSMSSVTEDKERQWVDDFPLHRSACEGDSELLSRLLSERFSVNQLDSDHWAPIHYACWTMDGAGDHYF

SEQ ID NO: 12555 - protein, 187 aa, Artificial Sequence
  Synthetic polypeptide
MQLPRWWELGDPCAWTGQGRGTRRMSPATTGTFLLTAFLLSCADGINGTVNWKTRQANNFIISRKMAAGMKDVYSIFSKVHSDRNVYPSAGVLFVHVLEREYFKGEFPPYPKPGEISNDPITFNTNLMGYPDRPGWLRYIQRTPYSDGVLYGSPTAENVGKPTIIENVLEVPASTVKKEKEIKSLRI

SEQ ID NO: 12556 - protein, 110 aa, Artificial Sequence
  Synthetic polypeptide
MQLPRWWELGDPCAWTGQGRGTRRMSPATTGTFLLTGEISNDPITFNTNLMGYPDRPGWLRYIQRTPYSDGVLYGSPTAENVGKPTIIENVLEVPASTVKKEKEIKSLRI

SEQ ID NO: 12557 - protein, 151 aa, Artificial Sequence
  Synthetic polypeptide
MQLPRWWELGDPCAWTGQGRGTRRMSPATTGTFLLTVYSIFSKVHSDRNVYPSAGVLFVHVLEREYFKGEFPPYPKPGEISNDPITFNTNLMGYPDRPGWLRYIQRTPYSDGVLYGSPTAENVGKPTIIENVLEVPASTVKKEKEIKSLRI

SEQ ID NO: 12558 - protein, 217 aa, Artificial Sequence
  Synthetic polypeptide
MSNPGTRRNGSSIKIRLTVLCAKNLAKKDFFRLPDPFAKIVVDGSGQCHSTDTVKNTLDPKWNQHYDLYVGKTDSITISVWNHKKIHKKQGAGFLGCVRLLSNAISRLKDTGYQRLDLCKLNPSDTDAVRGQIVVSLQTRDRIGTGGSVVDCRGLLENEGEPGMCLTAPREYNQQTSRMGPSVGQTTQGLQQIDCKKSKDRREGEPVNNSYSNKLET

SEQ ID NO: 12559 - protein, 152 aa, Artificial Sequence
  Synthetic polypeptide
MGRPLLLPLLPLLLPPAFLQPSGSTGSGPSYLYGVTQPKHLSASMGGSVEIPFSFYYPWELATAPDVRISWRRGHFHRQSFYSTRPPSIHKDYVNRLFLNWTEGQKSGFLRISNLQKQDQSVYFCRVELDTRSSGRQQWQSIEGTKLSITQG

SEQ ID NO: 12560 - protein, 133 aa, Artificial Sequence
  Synthetic polypeptide
MSAPVGPRGRLAPIPAASQPPLQPEMPDLSHLTEEERKIILAVMDRQKKEEEKEQSVLKKLHQQFEMYKEQVKKMGEESQQQQEQKGDAPTCGICHKTKFADGCGHNCSYCQTKFCARCGGRVSLRSNKENFL

SEQ ID NO: 12561 - protein, 200 aa, Artificial Sequence
  Synthetic polypeptide
MSAPVGPRGRLAPIPAASQPPLQPEMPDLSHLTEEERKIILAVMDRQKKEEEKEQSVLKKLHQQFEMYKEQVKKMGEESQQQQEQKGDAPTCGICHKTKFADGCGHNCSYCQTKFCARCGGRVSLRSNKVMWVCNLCRKQQEILTKSGAWFYNSGSNTPQQPDQKVLRGLRNEEAPQEKKPKLHEQTQFQGPSGKLPLNF

SEQ ID NO: 12562 - protein, 254 aa, Artificial Sequence
  Synthetic polypeptide
MSAPVGPRGRLAPIPAASQPPLQPEMPDLSHLTEEERKIILAVMDRQKKEEEKEQSVLKKLHQQFEMYKEQVKKMGEESQQQQEQKGDAPTCGICHKTKFADGCGHNCSYCQTKFCARCGGRVSLRSNKVMWVCNLCRKQQEILTKSGAWFYNSGSNTPQQPDQKVLRGLRNEEAPQEKKPKLHEQTQFQGPSGDLSVPAVEKSRSHGLTRQHSIKNGSGVKHHIASDIASDRNMDKSQNHCDEWKKLDTKEYI

SEQ ID NO: 12563 - protein, 475 aa, Artificial Sequence
  Synthetic polypeptide
MLDRCALVEQRKRSPSVSRDQNRRYDQREEREEYSQYATSDTAMPRSPSDYADRRSQHEPQFYEDSDHLSYRDSNRRSHRHSKEYIVDDEDVESRDEYERQRREEEYQSRYRSDPNLARYPVKPQPYEEQMRIHAEVSRARHERRHSDVSLANADLEDSRISMLRMDRPSRQRSISERRAAMENQRSYSMERTREAQGPSSYAQRTTNHSPPTPRRSPLPIDRPDLRRTDSLRKQHHLDPSSAVRKTKREKMETMLRNDSLSSDQSESVRPPPPKPHKSKKGGKMRQISLSSSEEELASTPEYTSCDDVEIESESVSEKGDMDYNWLDHTSWHSSEASPMSLHPVTWQPSKDGDRLIGRILLNKRLKDGSVPRDSGAMLGLKVVGGKMTESGRLCAFITKVKKGSLADTVGHLRPGDEVLEWNGRLLQGATFEEVYNIILESKPEPQVELVVSRPIGDIPRIPDSTHAQLESSLP

SEQ ID NO: 12564 - protein, 505 aa, Artificial Sequence
  Synthetic polypeptide
MQFETLRQVCNSVLSHFHGVFSSPPNILQNELFGQTLNNARKRSPSVSRDQNRRYDQREEREEYSQYATSDTAMPRSPSDYADRRSQHEPQFYEDSDHLSYRDSNRRSHRHSKEYIVDDEDVESRDEYERQRREEEYQSRYRSDPNLARYPVKPQPYEEQMRIHAEVSRARHERRHSDVSLANADLEDSRISMLRMDRPSRQRSISERRAAMENQRSYSMERTREAQGPSSYAQRTTNHSPPTPRRSPLPIDRPDLRRTDSLRKQHHLDPSSAVRKTKREKMETMLRNDSLSSDQSESVRPPPPKPHKSKKGGKMRQISLSSSEEELASTPEYTSCDDVEIESESVSEKGDMDYNWLDHTSWHSSEASPMSLHPVTWQPSKDGDRLIGRILLNKRLKDGSVPRDSGAMLGLKVVGGKMTESGRLCAFITKVKKGSLADTVGHLRPGDEVLEWNGRLLQGATFEEVYNIILESKPEPQVELVVSRPIGDIPRIPDSTHAQLESSLP

SEQ ID NO: 12565 - protein, 552 aa, Artificial Sequence
  Synthetic polypeptide
MQFETLRQVCNSVLSHFHGVFSSPPNILQNELFGQTLNNARKRSPSVSRDQNRRYDQREEREEYSQYATSDTAMPRSPSDYADRRSQHEPQFYEDSDHLSYRDSNRRSHRHSKEYIVDDEDVESRDEYERQRREEEYQSRYRSDPNLARYPVKPQPYEEQMRIHAEVSRARHERRHSDVSLANADLEDSRISMLRMDRPSRQRSISERRAAMENQRSYSMERTREAQGPSSYAQRTTNHSPPTPRRSPLPIDRPDLRRTDSLRKQHHLDPSSAVRKTKREKMETMLRNDSLSSDQSESVRPPPPKPHKSKKGGKMRQISLSSSEEELASTPEYTSCDDVEIESESVSEKGDSQKGKRKTSEQAVLSDSNTRSERQKEMMYFGGHSLEEDLEWSEPQIKDSGVDTCSSTTLNEEHSHSDKHPVTWQPSKDGDRLIGRILLNKRLKDGSVPRDSGAMLGLKVVGGKMTESGRLCAFITKVKKGSLADTVGHLRPGDEVLEWNGRLLQGATFEEVYNIILESKPEPQVELVVSRPIGDIPRIPDSTHAQLESSLP

SEQ ID NO: 12566 - protein, 697 aa, Artificial Sequence
  Synthetic polypeptide
MSAPVGPRGRLAPIPAASQPPLQPEMPDLSHLTEEERKIILAVMDRQKKEEEKEQSVLKKLHQQFEMYKEQVKKMGEESQQQQEQKGDAPTCGICHKTKFADGCGHNCSYCQTKFCARCGGRVSLRSNKVMWVCNLCRKQQEILTKSGAWFYNSGSNTPQQPDQKVLRGLRNEEAPQEKKPKLHEQTQFQGPSGDLSVPAVEKSRSHGLTRQHSIKNGSGVKHHIASDIASDRKRSPSVSRDQNRRYDQREEREEYSQYATSDTAMPRSPSDYADRRSQHEPQFYEDSDHLSYRDSNRRSHRHSKEYIVDDEDVESRDEYERQRREEEYQSRYRSDPNLARYPVKPQPYEEQMRIHAEVSRARHERRHSDVSLANADLEDSRISMLRMDRPSRQRSISERRAAMENQRSYSMERTREAQGPSSYAQRTTNHSPPTPRRSPLPIDRPDLRRTDSLRKQHHLDPSSAVRKTKREKMETMLRNDSLSSDQSESVRPPPPKPHKSKKGGKMRQISLSSSEEELASTPEYTSCDDVEIESESVSEKGDMDYNWLDHTSWHSSEASPMSLHPVTWQPSKDGDRLIGRILLNKRLKDGSVPRDSGAMLGLKVVGGKMTESGRLCAFITKVKKGSLADTVGHLRPGDEVLEWNGRLLQGATFEEVYNIILESKPEPQVELVVSRPIGDIPRIPDSTHAQLESSLP

SEQ ID NO: 12567 - protein, 715 aa, Artificial Sequence
  Synthetic polypeptide
MLDRCALVEQRKRSPSVSRDQNRRYDQREEREEYSQYATSDTAMPRSPSDYADRRSQHEPQFYEDSDHLSYRDSNRRSHRHSKEYIVDDEDVESRDEYERQRREEEYQSRYRSDPNLARYPVKPQPYEEQMRIHAEVSRARHERRHSDVSLANADLEDSRISMLRMDRPSRQRSISERRAAMENQRSYSMERTREAQGPSSYAQRTTNHSPPTPRRSPLPIDRPDLRRTDSLRKQHHLDPSSAVRKTKREKMETMLRNDSLSSDQSESVRPPPPKPHKSKKGGKMRQISLSSSEEELASTPEYTSCDDVEIESESVSEKGDMDYNWLDHTSWHSSEASPMSLHPVTWQPSKDGDRLIGRILLNKRLKDGSVPRDSGAMLGLKVVGGKMTESGRLCAFITKVKKGSLADTVGHLRPGDEVLEWNGRLLQGATFEEVYNIILESKPEPQVELVVSRPIGDIPRIPDSTHAQLESSSSSFESQKMDRPSISVTSPMSPGMLRDVPQFLSGQLSSQSLSRRTTPFVPRVQIKLWFDKVGHQLIVTILGAKDLPSREDGRPRNPYVKIYFLPDRSDKNKRRTKTVKKTLEPKWNQTFIYSPVHRREFRERMLEITLWDQARVREEESEFLGEILIELETALLDDEPHWYKLQTHDVSSLPLPHPSPYMPRRQLHGESPTRRLQSIEGTYFKIMRATYDKPIANFIVNGQKLEAFPLKTGT

SEQ ID NO: 12568 - protein, 729 aa, Artificial Sequence
  Synthetic polypeptide
MQFETLRQVCNSVLSHFHGVFSSPPNILQNELFGQTLNNARKRSPSVSRDQNRRYDQREEREEYSQYATSDTAMPRSPSDYADRRSQHEPQFYEDSDHLSYRDSNRRSHRHSKEYIVDDEDVESRDEYERQRREEEYQSRYRSDPNLARYPVKPQPYEEQMRIHAEVSRARHERRHSDVSLANADLEDSRISMLRMDRPSRQRSISERRAAMENQRSYSMERTREAQGPSSYAQRTTNHSPPTPRRSPLPIDRPDLRRTDSLRKQHHLDPSSAVRKTKREKMETMLRNDSLSSDQSESVRPPPPKPHKSKKGGKMRQISLSSSEEELASTPEYTSCDDVEIESESVSEKGDMDYNWLDHTSWHSSEASPMSLHPVTWQPSKDGDRLIGRILLNKRLKDGSVPRDSGAMLGLKVVGGKMTESGRLCAFITKVKKGSLADTVGHLRPGDEVLEWNGRLLQGATFEEVYNIILESKPEPQVELVVSRPIGDIPRIPDSTHAQLESSSSSFESQKMDRPSISVTSPMSPGMLRDVPQFLSGQLSIKLWFDKVGHQLIVTILGAKDLPSREDGRPRNPYVKIYFLPDRSDKNKRRTKTVKKTLEPKWNQTFIYSPVHRREFRERMLEITLWDQARVREEESEFLGEILIELETALLDDEPHWYKLQTHDVSSLPLPHPSPYMPRRQLHGESPTRRLQSIEGTYFKIMRATYDKPIANFIVNGQKLEAFPLKTGT

SEQ ID NO: 12569 - protein, 776 aa, Artificial Sequence
  Synthetic polypeptide
MQFETLRQVCNSVLSHFHGVFSSPPNILQNELFGQTLNNARKRSPSVSRDQNRRYDQREEREEYSQYATSDTAMPRSPSDYADRRSQHEPQFYEDSDHLSYRDSNRRSHRHSKEYIVDDEDVESRDEYERQRREEEYQSRYRSDPNLARYPVKPQPYEEQMRIHAEVSRARHERRHSDVSLANADLEDSRISMLRMDRPSRQRSISERRAAMENQRSYSMERTREAQGPSSYAQRTTNHSPPTPRRSPLPIDRPDLRRTDSLRKQHHLDPSSAVRKTKREKMETMLRNDSLSSDQSESVRPPPPKPHKSKKGGKMRQISLSSSEEELASTPEYTSCDDVEIESESVSEKGDSQKGKRKTSEQAVLSDSNTRSERQKEMMYFGGHSLEEDLEWSEPQIKDSGVDTCSSTTLNEEHSHSDKHPVTWQPSKDGDRLIGRILLNKRLKDGSVPRDSGAMLGLKVVGGKMTESGRLCAFITKVKKGSLADTVGHLRPGDEVLEWNGRLLQGATFEEVYNIILESKPEPQVELVVSRPIGDIPRIPDSTHAQLESSSSSFESQKMDRPSISVTSPMSPGMLRDVPQFLSGQLSIKLWFDKVGHQLIVTILGAKDLPSREDGRPRNPYVKIYFLPDRSDKNKRRTKTVKKTLEPKWNQTFIYSPVHRREFRERMLEITLWDQARVREEESEFLGEILIELETALLDDEPHWYKLQTHDVSSLPLPHPSPYMPRRQLHGESPTRRLQSIEGTYFKIMRATYDKPIANFIVNGQKLEAFPLKTGT

SEQ ID NO: 12570 - protein, 937 aa, Artificial Sequence
  Synthetic polypeptide
MSAPVGPRGRLAPIPAASQPPLQPEMPDLSHLTEEERKIILAVMDRQKKEEEKEQSVLKKLHQQFEMYKEQVKKMGEESQQQQEQKGDAPTCGICHKTKFADGCGHNCSYCQTKFCARCGGRVSLRSNKVMWVCNLCRKQQEILTKSGAWFYNSGSNTPQQPDQKVLRGLRNEEAPQEKKPKLHEQTQFQGPSGDLSVPAVEKSRSHGLTRQHSIKNGSGVKHHIASDIASDRKRSPSVSRDQNRRYDQREEREEYSQYATSDTAMPRSPSDYADRRSQHEPQFYEDSDHLSYRDSNRRSHRHSKEYIVDDEDVESRDEYERQRREEEYQSRYRSDPNLARYPVKPQPYEEQMRIHAEVSRARHERRHSDVSLANADLEDSRISMLRMDRPSRQRSISERRAAMENQRSYSMERTREAQGPSSYAQRTTNHSPPTPRRSPLPIDRPDLRRTDSLRKQHHLDPSSAVRKTKREKMETMLRNDSLSSDQSESVRPPPPKPHKSKKGGKMRQISLSSSEEELASTPEYTSCDDVEIESESVSEKGDMDYNWLDHTSWHSSEASPMSLHPVTWQPSKDGDRLIGRILLNKRLKDGSVPRDSGAMLGLKVVGGKMTESGRLCAFITKVKKGSLADTVGHLRPGDEVLEWNGRLLQGATFEEVYNIILESKPEPQVELVVSRPIGDIPRIPDSTHAQLESSSSSFESQKMDRPSISVTSPMSPGMLRDVPQFLSGQLSSQSLSRRTTPFVPRVQIKLWFDKVGHQLIVTILGAKDLPSREDGRPRNPYVKIYFLPDRSDKNKRRTKTVKKTLEPKWNQTFIYSPVHRREFRERMLEITLWDQARVREEESEFLGEILIELETALLDDEPHWYKLQTHDVSSLPLPHPSPYMPRRQLHGESPTRRLQSIEGTYFKIMRATYDKPIANFIVNGQKLEAFPLKTGT

SEQ ID NO: 12571 - protein, 305 aa, Artificial Sequence
  Synthetic polypeptide
MKGIRKGESRAKESKPWEPGKRRCAKCGRLDFILMKKMGIKSGFTFWNLVFLLTVSCVKGFIYTCGGTLKGLNGTIESPGFPYGYPNGANCTWVIIAEERNRIQIVFQSFALEEEYDYLSLYDGHPHPTNFRTRLTGFHLPPPVTSTKSVFSLRLTSDFAVSAHGFKVYYEELQSSSCGNPGVPPKGVLYGTRFDVGDKIRYSCVTGYILDGHPQLTCIANSVNTASWDFPVPICRAEDACGGTMRGSSGIISSPSFPNEYHNNADCTWTIVAEPGDTISLIFTDFQMEEKYDYLEIEGSEPPTI

SEQ ID NO: 12572 - protein, 265 aa, Artificial Sequence
  Synthetic polypeptide
MWSWFLCWKPVQLDRQTASGFIYTCGGTLKGLNGTIESPGFPYGYPNGANCTWVIIAEERNRIQIVFQSFALEEEYDYLSLYDGHPHPTNFRTRLTGFHLPPPVTSTKSVFSLRLTSDFAVSAHGFKVYYEELQSSSCGNPGVPPKGVLYGTRFDVGDKIRYSCVTGYILDGHPQLTCIANSVNTASWDFPVPICRAEDACGGTMRGSSGIISSPSFPNEYHNNADCTWTIVAEPGDTISLIFTDFQMEEKYDYLEIEGSEPPTI

SEQ ID NO: 12573 - protein, 169 aa, Artificial Sequence
  Synthetic polypeptide
MWQLWASLCCLLVLANARSRPSFHPLSDELVNYVNKRNTTWQAGHNFYNVDMSYLKRLCGTFLGGPKPPQRVMFTEDLKLPASFDAREQWPQCPTIKEIRDQGSCGSCWAFGAVEAISDRICIHTNAHVSVEVSAEDLLTCCGSMCGDGELVVFLSTLGKFSVCSVENQ

SEQ ID NO: 12574 - protein, 405 aa, Artificial Sequence
  Synthetic polypeptide
MAVAAAAAAAGPAGAGGGRAQRSGLLEVLVRDRWHKVLVNLSEDALVLSSEEGAAAYNGIGTATNGSFCRGAGAGHPGAGGAQPPDSPAGVRTAFTDLPEQVPESISNQKRGVKVLKQELGGLGISIKGGKENKMPILISKIFKGLAADQTQALYVGDAILSVNGADLRDATHDEAVQALKRAGKEVLLEVKYMREATPYVKKGSPVSEIGWETPPPESPRLGGSTSDPPSSQSFSFHRDRKSIPLKMCYVTRSMALADPENRQLEIHSPDAKHTVILRSKDSATAQAWFSAIHSNVNDLLTRVIAEVREQLGKTGIAGSREIRHLGWLAEKVPGESKKQWKPALVVLTEKDLLIYDSMPRRKEAWFSPVHTYPLLATSAPHCSHYRLSSASCQISCSVRFSQEF

SEQ ID NO: 12575 - protein, 191 aa, Artificial Sequence
  Synthetic polypeptide
MAVAAAAAAAGPAGAGGGRAQRSGLLEVLVRDRWHKVLVNLSEDALVLSSEEGAAAYNGIGTATNGSFCRGAGAGHPGAGGAQPPDSPAGVRTAFTDLPEQVPESISNQKRGVKVLKQELGGLGISIKGGKENKMPILISKIFKGLAADQTQALYVGDAILSVNGADLRDATHDEAVQALKRAGKEVLLEG

SEQ ID NO: 12576 - protein, 193 aa, Artificial Sequence
  Synthetic polypeptide
MAVAAAAAAAGPAGAGGGRAQRSGLLEVLVRDRWHKVLVNLSEDALVLSSEEGAAAYNGIGTATNGSFCRGAGAGHPGAGGAQPPDSPAGVRTAFTDLPEQVPESISNQKRGVKVLKQELGGLGISIKGGKENKMPILISKIFKGLAADQTQALYVGDAILSVNGADLRDATHDEAVQALKRAGKEVLLEGLF

SEQ ID NO: 12577 - protein, 265 aa, Artificial Sequence
  Synthetic polypeptide
MGLKARRAAGAAGGGGDGGGGGGGAANPAGGDAAAAGDEERKVGLAPGDVEQVTLALGAGADKDGTLLLEGGGRDEGQRRTPQGIGLLAKTPLSRPVKRNNAKYRRIQTLIYDALERPRGWALLYHALVFLIVLGCLILAVLTTFKEYETVSGDWLLLLETFAIFIFGAEFALRIWAAGCCCRYKGWRGRLKFARKPLCMLDIFVLIASVPVVAVGNQGNVLATSLRSLRFLQILRMLRMDRRGGTWKLLGSAICAHSKIFERME

SEQ ID NO: 12578 - protein, 145 aa, Artificial Sequence
  Synthetic polypeptide
MKPAEHATMFLIVLGCLILAVLTTFKEYETVSGDWLLLLETFAIFIFGAEFALRIWAAGCCCRYKGWRGRLKFARKPLCMLDIFVLIASVPVVAVGNQGNVLATSLRSLRFLQILRMLRMDRRGGTWKLLGSAICAHSKIFERME

SEQ ID NO: 12579 - protein, 128 aa, Artificial Sequence
  Synthetic polypeptide
MAVPPPGIMKQAGDSRDMSREMQDVDLAEVKPLVEKGETITGLLQEFDVQEQDIETLHGSVHVTLCGTPKGNRPVILTYHDIGMNHKTCYNPLFNYEDMQEITQHFAVCHVDAPGQQDGAASFPAGFP

SEQ ID NO: 12580 - protein, 45 aa, Artificial Sequence
  Synthetic polypeptide
MNHKTCYNPLFNYEDMQEITQHFAVCHVDAPGQQDGAASFPAGFP

SEQ ID NO: 12581 - protein, 30 aa, Artificial Sequence
  Synthetic polypeptide
MQEITQHFAVCHVDAPGQQDGAASFPAGFP

SEQ ID NO: 12582 - protein, 165 aa, Artificial Sequence
  Synthetic polypeptide
MSGSRESCTVGCVCVFTRMRVPVCLCVCITNLLLGLTVRLKLALCLYVAGDSRDMSREMQDVDLAEVKPLVEKGETITGLLQEFDVQEQDIETLHGSVHVTLCGTPKGNRPVILTYHDIGMNHKTCYNPLFNYEDMQEITQHFAVCHVDAPGQQDGAASFPAGFP

SEQ ID NO: 12583 - protein, 111 aa, Artificial Sequence
  Synthetic polypeptide
MSREMQDVDLAEVKPLVEKGETITGLLQEFDVQEQDIETLHGSVHVTLCGTPKGNRPVILTYHDIGMNHKTCYNPLFNYEDMQEITQHFAVCHVDAPGQQDGAASFPAGFP

SEQ ID NO: 12584 - protein, 91 aa, Artificial Sequence
  Synthetic polypeptide
MSREMQDVDLAEVKPLVEKGETITGLLQEFDVQTKPATTPSSTTRTCRRSPSTLPSATWTPLASRTAQPPSPQGSHDPFSVTSSKKPSLII

SEQ ID NO: 12585 - protein, 122 aa, Artificial Sequence
  Synthetic polypeptide
MTVPAAGDSRDMSREMQDVDLAEVKPLVEKGETITGLLQEFDVQEQDIETLHGSVHVTLCGTPKGNRPVILTYHDIGMNHKTCYNPLFNYEDMQEITQHFAVCHVDAPGQQDGAASFPAGFP

SEQ ID NO: 12586 - protein, 691 aa, Artificial Sequence
  Synthetic polypeptide
AENMADLIDGYCRLVNGTSQSFIIRPQKEGERALPSIPKLANSEKQGMRTHAVSVSGVSHCQHKVKKARRFLPLVFCSHDPPSTDEISGDETDDYAEIIDEEDTYTMPSTRDYEIQRERIELGRCIGEGQFGDVHQGIYMSPENPALAVAIKTCKNCTSDSVREKFLQEALTMRQFDHPHIVKLIGVITENPVWIIMELCTLGELRSFLQVRKYSLDLASLILYAYQLSTALAYLESKRFVHRDIAARNVLVSSNDCVKLGDFGLSRYMEDSTYYKASKGKLPIKWMAPESINFRRFTSASDVWMFGVCMWEILMHGVKPFQGVKNNDVIGRIENGERLPMPPNCPPTLYSLMTKCWAYDPSRRPRFTELKAQLSTILEEEKAQQEERMRMESRRQATVSWDSGGSDEAPPKPSRPGYPSPRSSEGFYPSPQHMVQTNHYQVSGYPGSHGITAMAGSIYPGQASLLDQTDSWNHRPQEIAMWQPNVEDSTVLDLRGIGQVLPTHLMEERLIRQQQEMEEDQRWLEKEERFLKPDVRLSRGSIDREDGSLQGPIGNQHIYQPVGKPDPAAPPKKPPRPGAPGHLGSLASLSSPADSYNEGVKPWRLQPQEISPPPTANLDRSNDKVYENVTGLVKAVIEMSSKIQPAPPEEYVPMVKEVGLALRTLLATVDETIPLLPASTHREARHGSSRP

SEQ ID NO: 12587 - protein, 662 aa, Artificial Sequence
  Synthetic polypeptide
IAENMADLIDGYCRLVNGTSQSFIIRPQKEGERALPSIPKLANSEKQGMRTHAVSVSETDDYAEIIDEEDTYTMPSKSYGIDEARDYEIQRERIELGRCIGEGQFGDVHQGIYMSPENPALAVAIKTCKNCTSDSVREKFLQEALTMRQFDHPHIVKLIGVITENPVWIIMELCTLGELRSFLQVRKYSLDLASLILYAYQLSTALAYLESKRFVHRDIAARNVLVSSNDCVKLGDFGLSRYMEDSTYYKASKGKLPIKWMAPESINFRRFTSASDVWMFGVCMWEILMHGVKPFQGVKNNDVIGRIENGERLPMPPNCPPTLYSLMTKCWAYDPSRRPRFTELKAQLSTILEEEKAQQEERMRMESRRQATVSWDSGGSDEAPPKPSRPGYPSPRSSEGFYPSPQHMVQTNHYQVSGYPGSHGITAMAGSIYPGQASLLDQTDSWNHRPQEIAMWQPNVEDSTVLDLRGIGQVLPTHLMEERLIRQQQEMEEDQRWLEKEERFLKPDVRLSRGSIDREDGSLQGPIGNQHIYQPVGKPDPAAPPKKPPRPGAPGHLGSLASLSSPADSYNEGVKLQPQEISPPPTANLDRSNDKVYENVTGLVKAVIEMSSKIQPAPPEEYVPMVKEVGLALRTLLATVDETIPLLPASTHREARHGSSRP

SEQ ID NO: 12588 - protein, 944 aa, Artificial Sequence
  Synthetic polypeptide
MAAAYLDPNLNHTPNSSTKTHLGTGMERSPGAMERVLKVFHYFESNSEPTTWASIIRHGDATDVRGIIQKIVDSHKVKHVACYGFRLSHLRSEEVHWLHVDMGVSSVREKYELAHPPEEWKYELRIRYLPKGFLNQFTEDKPTLNFFYQQVKSDYMLEIADQVDQEIALKLGCLEIRRSYWEMRGNALEKKSNYEVLEKDVGLKRFFPKSLLDSVKAKTLRKLIQQTFRQFANLNREESILKFFEILSPVYRFDKECFKCALGSSWIISVELAIGPEEGISYLTDKGCNPTHLADFTQVQTIQYSNSEDKDRKGMLQLKIAGAPEPLTVTAPSLTIAENMADLIDGYCRLVNGTSQSFIIRPQKEGERALPSIPKLANSEKQGMRTHAVSVSETDDYAEIIDEEDTYTMPSTRDYEIQRERIELGRCIGEGQFGDVHQGIYMSPENPALAVAIKTCKNCTSDSVREKFLQEALTMRQFDHPHIVKLIGVITENPVWIIMELCTLGELRSFLQVRKYSLDLASLILYAYQLSTALAYLESKRFVHRDIAARNVLVSSNDCVKLGDFGLSRYMEDSTYYKASKGKLPIKWMAPESINFRRFTSASDVWMFGVCMWEILMHGVKPFQGVKNNDVIGRIENGERLPMPPNCPPTLYSLMTKCWAYDPSRRPRFTELKAQLSTILEEEKAQQEERMRMESRRQATVSWDSGGSDEAPPKPSRPGYPSPRSSEGFYPSPQHMVQTNHYQDSTVLDLRGIGQVLPTHLMEERLIRQQQEMEEDQRWLEKEERFLKPDVRLSRGSIDREDGSLQGPIGNQHIYQPVGKPDPAAPPKKPPRPGAPGHLGSLASLSSPADSYNEGVKLQPQEISPPPTANLDRSNDKVYENVTGLVKAVIEMSSKIQPAPPEEYVPMVKEVGLALRTLLATVDETIPLLPASTHREARHGSSRP

SEQ ID NO: 12589 - protein, 990 aa, Artificial Sequence
  Synthetic polypeptide
MAAAYLDPNLNHTPNSSTKTHLGTGMERSPGAMERVLKVFHYFESNSEPTTWASIIRHGDATDVRGIIQKIVDSHKVKHVACYGFRLSHLRSEEVHWLHVDMGVSSVREKYELAHPPEEWKYELRIRYLPKGFLNQFTEDKPTLNFFYQQVKSDYMLEIADQVDQEIALKLGCLEIRRSYWEMRGNALEKKSNYEVLEKDVGLKRFFPKSLLDSVKAKTLRKLIQQTFRQFANLNREESILKFFEILSPVYRFDKECFKCALGSSWIISVELAIGPEEGISYLTDKGCNPTHLADFTQVQTIQYSNSEDKDRKGMLQLKIAGAPEPLTVTAPSLTIAENMADLIDGYCRLVNGTSQSFIIRPQKEGERALPSIPKLANSEKQGMRTHAVSVSETDDYAEIIDEEDTYTMPSTRDYEIQRERIELGRCIGEGQFGDVHQGIYMSPENPALAVAIKTCKNCTSDSVREKFLQEALTMRQFDHPHIVKLIGVITENPVWIIMELCTLGELRSFLQVRKYSLDLASLILYAYQLSTALAYLESKRFVHRDIAARNVLVSSNDCVKLGDFGLSRYMEDSTYYKASKGKLPIKWMAPESINFRRFTSASDVWMFGVCMWEILMHGVKPFQGVKNNDVIGRIENGERLPMPPNCPPTLYSLMTKCWAYDPSRRPRFTELKAQLSTILEEEKAQQEERMRMESRRQATVSWDSGGSDEAPPKPSRPGYPSPRSSEGFYPSPQHMVQTNHYQVSGYPGSHGITAMAGSIYPGQASLLDQTDSWNHRPQEIAMWQPNVEDSTVLDLRGIGQVLPTHLMEERLIRQQQEMEEDQRWLEKEERFLKPDVRLSRGSIDREDGSLQGPIGNQHIYQPVGKPDPAAPPKKPPRPGAPGHLGSLASLSSPADSYNEGVKLQPQEISPPPTANLDRSNDKVYENVTGLVKAVIEMSSKIQPAPPEEYVPMVKEVGLALRTLLATVDETIPLLPASTHREARHGSSRP

SEQ ID NO: 12590 - protein, 1003 aa, Artificial Sequence
  Synthetic polypeptide
MAAAYLDPNLNHTPNSSTKTHLGTGMERSPGAMERVLKVFHYFESNSEPTTWASIIRHGDATDVRGIIQKIVDSHKVKHVACYGFRLSHLRSEEVHWLHVDMGVSSVREKYELAHPPEEWKYELRIRYLPKGFLNQFTEDKPTLNFFYQQVKSDYMLEIADQVDQEIALKLGCLEIRRSYWEMRGNALEKKSNYEVLEKDVGLKRFFPKSLLDSVKAKTLRKLIQQTFRQFANLNREESILKFFEILSPVYRFDKECFKCALGSSWIISVELAIGPEEGISYLTDKGCNPTHLADFTQVQTIQYSNSEDKDRKGMLQLKIAGAPEPLTVTAPSLTIAENMADLIDGYCRLVNGTSQSFIIRPQKEGERALPSIPKLANSEKQGMRTHAVSVSETDDYAEIIDEEDTYTMPSTRDYEIQRERIELGRCIGEGQFGDVHQGIYMSPENPALAVAIKTCKNCTSDSVREKFLQEALTMRQFDHPHIVKLIGVITENPVWIIMELCTLGELRSFLQVRKYSLDLASLILYAYQLSTALAYLESKRFVHRDIAARNVLVSSNDCVKLGDFGLSRYMEDSTYYKASKGKLPIKWMAPESINFRRFTSASDVWMFGVCMWEILMHGVKPFQGVKNNDVIGRIENGERLPMPPNCPPTLYSLMTKCWAYDPSRRPRFTELKAQLSTILEEEKAQQEERMRMESRRQATVSWDSGGSDEAPPKPSRPGYPSPRSSEGFYPSPQHMVQTNHYQVSGYPGSHGITAMAGSIYPGQASLLDQTDSWNHRPQEIAMWQPNVEDSTVLDLRGIGQVLPTHLMEERLIRQQQEMEEDQRWLEKEERFLKPDVRLSRGSIDREDGSLQGPIGNQHIYQPVGKPGKEEKNWAERNPAAPPKKPPRPGAPGHLGSLASLSSPADSYNEGVKPNQLQPQEISPPPTANLDRSNDKVYENVTGLVKAVIEMSSKIQPAPPEEYVPMVKEVGLALRTLLATVDETIPLLPASTHREARHGSSRP

SEQ ID NO: 12591 - protein, 1003 aa, Artificial Sequence
  Synthetic polypeptide
MAAAYLDPNLNHTPNSSTKTHLGTGMERSPGAMERVLKVFHYFESNSEPTTWASIIRHGDATDVRGIIQKIVDSHKVKHVACYGFRLSHLRSEEVHWLHVDMGVSSVREKYELAHPPEEWKYELRIRYLPKGFLNQFTEDKPTLNFFYQQVKSDYMLEIADQVDQEIALKLGCLEIRRSYWEMRGNALEKKSNYEVLEKDVGLKRFFPKSLLDSVKAKTLRKLIQQTFRQFANLNREESILKFFEILSPVYRFDKECFKCALGSSWIISVELAIGPEEGISYLTDKGCNPTHLADFTQVQTIQYSNSEDKDRKGMLQLKIAGAPEPLTVTAPSLTIAENMADLIDGYCRLVNGTSQSFIIRPQKEGERALPSIPKLANSEKQGMRTHAVSVSETDDYAEIIDEEDTYTMPSTRDYEIQRERIELGRCIGEGQFGDVHQGIYMSPENPALAVAIKTCKNCTSDSVREKFLQEALTMRQFDHPHIVKLIGVITENPVWIIMELCTLGELRSFLQVRKYSLDLASLILYAYQLSTALAYLESKRFVHRDIAARNVLVSSNDCVKLGDFGLSRYMEDSTYYKASKGKLPIKWMAPESINFRRFTSASDVWMFGVCMWEILMHGVKPFQGVKNNDVIGRIENGERLPMPPNCPPTLYSLMTKCWAYDPSRRPRFTELKAQLSTILEEEKAQQEERMRMESRRQATVSWDSGGSDEAPPKPSRPGYPSPRSSEGFYPSPQHMVQTNHYQVSGYPGSHGITAMAGSIYPGQASLLDQTDSWNHRPQEIAMWQPNVEDSTVLDLRGIGQVLPTHLMEERLIRQQQEMEEDQRWLEKEERFLKPDVRLSRGSIDREDGSLQGPIGNQHIYQPVGKPGKEEKNWAERNPAAPPKKPPRPGAPGHLGSLASLSSPADSYNEGVKPWRLQPQEISPPPTANLDRSNDKVYENVTGLVKAVIEMSSKIQPAPPEEYVPMVKEVGLALRTLLATVDETIPLLPASTHREARHGSSRP

SEQ ID NO: 12592 - protein, 658 aa, Artificial Sequence
  Synthetic polypeptide
MADLIDGYCRLVNGTSQSFIIRPQKEGERALPSIPKLANSEKQGMRTHAVSVSETDDYAEIIDEEDTYTMPSKSYGIDEARDYEIQRERIELGRCIGEGQFGDVHQGIYMSPENPALAVAIKTCKNCTSDSVREKFLQEALTMRQFDHPHIVKLIGVITENPVWIIMELCTLGELRSFLQVRKYSLDLASLILYAYQLSTALAYLESKRFVHRDIAARNVLVSSNDCVKLGDFGLSRYMEDSTYYKASKGKLPIKWMAPESINFRRFTSASDVWMFGVCMWEILMHGVKPFQGVKNNDVIGRIENGERLPMPPNCPPTLYSLMTKCWAYDPSRRPRFTELKAQLSTILEEEKAQQEERMRMESRRQATVSWDSGGSDEAPPKPSRPGYPSPRSSEGFYPSPQHMVQTNHYQVSGYPGSHGITAMAGSIYPGQASLLDQTDSWNHRPQEIAMWQPNVEDSTVLDLRGIGQVLPTHLMEERLIRQQQEMEEDQRWLEKEERFLKPDVRLSRGSIDREDGSLQGPIGNQHIYQPVGKPDPAAPPKKPPRPGAPGHLGSLASLSSPADSYNEGVKLQPQEISPPPTANLDRSNDKVYENVTGLVKAVIEMSSKIQPAPPEEYVPMVKEVGLALRTLLATVDETIPLLPASTHREARHGSSRP

SEQ ID NO: 12593 - protein, 618 aa, Artificial Sequence
  Synthetic polypeptide
MKYQEVRCLTSFNISVSFPAETDDYAEIIDEEDTYTMPSTRDYEIQRERIELGRCIGEGQFGDVHQGIYMSPENPALAVAIKTCKNCTSDSVREKFLQEALTMRQFDHPHIVKLIGVITENPVWIIMELCTLGELRSFLQVRKYSLDLASLILYAYQLSTALAYLESKRFVHRDIAARNVLVSSNDCVKLGDFGLSRYMEDSTYYKASKGKLPIKWMAPESINFRRFTSASDVWMFGVCMWEILMHGVKPFQGVKNNDVIGRIENGERLPMPPNCPPTLYSLMTKCWAYDPSRRPRFTELKAQLSTILEEEKAQQEERMRMESRRQATVSWDSGGSDEAPPKPSRPGYPSPRSSEGFYPSPQHMVQTNHYQVSGYPGSHGITAMAGSIYPGQASLLDQTDSWNHRPQEIAMWQPNVEDSTVLDLRGIGQVLPTHLMEERLIRQQQEMEEDQRWLEKEERFLKPDVRLSRGSIDREDGSLQGPIGNQHIYQPVGKPDPAAPPKKPPRPGAPGHLGSLASLSSPADSYNEGVKLQPQEISPPPTANLDRSNDKVYENVTGLVKAVIEMSSKIQPAPPEEYVPMVKEVGLALRTLLATVDETIPLLPASTHREARHGSSRP

SEQ ID NO: 12594 - protein, 1034 aa, Artificial Sequence
  Synthetic polypeptide
MLLELAGQEALKPAGAIYMEKSGCSPFPVCWAKEYDRYLASSKIMAAAYLDPNLNHTPNSSTKTHLGTGMERSPGAMERVLKVFHYFESNSEPTTWASIIRHGDATDVRGIIQKIVDSHKVKHVACYGFRLSHLRSEEVHWLHVDMGVSSVREKYELAHPPEEWKYELRIRYLPKGFLNQFTEDKPTLNFFYQQVKSDYMLEIADQVDQEIALKLGCLEIRRSYWEMRGNALEKKSNYEVLEKDVGLKRFFPKSLLDSVKAKTLRKLIQQTFRQFANLNREESILKFFEILSPVYRFDKECFKCALGSSWIISVELAIGPEEGISYLTDKGCNPTHLADFTQVQTIQYSNSEDKDRKGMLQLKIAGAPEPLTVTAPSLTIAENMADLIDGYCRLVNGTSQSFIIRPQKEGERALPSIPKLANSEKQGMRTHAVSVSETDDYAEIIDEEDTYTMPSTRDYEIQRERIELGRCIGEGQFGDVHQGIYMSPENPALAVAIKTCKNCTSDSVREKFLQEALTMRQFDHPHIVKLIGVITENPVWIIMELCTLGELRSFLQVRKYSLDLASLILYAYQLSTALAYLESKRFVHRDIAARNVLVSSNDCVKLGDFGLSRYMEDSTYYKASKGKLPIKWMAPESINFRRFTSASDVWMFGVCMWEILMHGVKPFQGVKNNDVIGRIENGERLPMPPNCPPTLYSLMTKCWAYDPSRRPRFTELKAQLSTILEEEKAQQEERMRMESRRQATVSWDSGGSDEAPPKPSRPGYPSPRSSEGFYPSPQHMVQTNHYQVSGYPGSHGITAMAGSIYPGQASLLDQTDSWNHRPQEIAMWQPNVEDSTVLDLRGIGQVLPTHLMEERLIRQQQEMEEDQRWLEKEERFLKPDVRLSRGSIDREDGSLQGPIGNQHIYQPVGKPDPAAPPKKPPRPGAPGHLGSLASLSSPADSYNEGVKLQPQEISPPPTANLDRSNDKVYENVTGLVKAVIEMSSKIQPAPPEEYVPMVKEVGLALRTLLATVDETIPLLPASTHREARHGSSRP

SEQ ID NO: 12595 - protein, 300 aa, Artificial Sequence
  Synthetic polypeptide
MRMESRRQATVSWDSGGSDEAPPKPSRPGYPSPRSSEGFYPSPQHMVQTNHYQVSGYPGSHGITAMAGSIYPGQASLLDQTDSWNHRPQEIAMWQPNVEDSTVLDLRGIGQVLPTHLMEERLIRQQQEMEEDQRWLEKEERFLKPDVRLSRGSIDREDGSLQGPIGNQHIYQPVGKPDPAAPPKKPPRPGAPGHLGSLASLSSPADSYNEGVKLQPQEISPPPTANLDRSNDKVYENVTGLVKAVIEMSSKIQPAPPEEYVPMVKEVGLALRTLLATVDETIPLLPASTHREARHGSSRP

SEQ ID NO: 12596 - protein, 53 aa, Artificial Sequence
  Synthetic polypeptide
MSSKIQPAPPEEYVPMVKEVGLALRTLLATVDETIPLLPASTHREARHGSSRP

SEQ ID NO: 12597 - protein, 955 aa, Artificial Sequence
  Synthetic polypeptide
  misc_feature (1)..(1): Xaa can be any naturally occurring amino acid
XYDRYLASSKIMAAAYLDPNLNHTPNSSTKTHLGTGMERSPGAMERVLKVFHYFESNSEPTTWASIIRHGDATDVRGIIQKIVDSHKVKHVACYGFRLSHLRSEEVHWLHVDMGVSSVREKYELAHPPEEWKYELRIRYLPKGFLNQFTEDKPTLNFFYQQVKSDYMLEIADQVDQEIALKLGCLEIRRSYWEMRGNALEKKSNYEVLEKDVGLKRFFPKSLLDSVKAKTLRKLIQQTFRQFANLNREESILKFFEILSPVYRFDKECFKCALGSSWIISVELAIGPEEGISYLTDKGCNPTHLADFTQVQTIQYSNSEDKDRKGMLQLKIAGAPEPLTVTAPSLTIAENMADLIDGYCRLVNGTSQSFIIRPQKEGERALPSIPKLANSEKQGMRTHAVSVSETDDYAEIIDEEDTYTMPSTRDYEIQRERIELGRCIGEGQFGDVHQGIYMSPENPALAVAIKTCKNCTSDSVREKFLQEALTMRQFDHPHIVKLIGVITENPVWIIMELCTLGELRSFLQVRKYSLDLASLILYAYQLSTALAYLESKRFVHRDIAARNVLVSSNDCVKLGDFGLSRYMEDSTYYKASKGKLPIKWMAPESINFRRFTSASDVWMFGVCMWEILMHGVKPFQGVKNNDVIGRIENGERLPMPPNCPPTLYSLMTKCWAYDPSRRPRFTELKAQLSTILEEEKAQQEERMRMESRRQATVSWDSGGSDEAPPKPSRPGYPSPRSSEGFYPSPQHMVQTNHYQDSTVLDLRGIGQVLPTHLMEERLIRQQQEMEEDQRWLEKEERFLKPDVRLSRGSIDREDGSLQGPIGNQHIYQPVGKPDPAAPPKKPPRPGAPGHLGSLASLSSPADSYNEGVKLQPQEISPPPTANLDRSNDKVYENVTGLVKAVIEMSSKIQPAPPEEYVPMVKEVGLALRTLLATVDETIPLLPASTHREARHGSSRP

SEQ ID NO: 12598 - protein, 423 aa, Artificial Sequence
  Synthetic polypeptide
AENMADLIDGYCRLVNGTSQSFIIRPQKEGERALPSIPKLANSEKQGMRTHAVSVSGVSHCQHKVKKARRFLPLVFCSHDPPSTDEISGDETDDYAEIIDEEDTYTMPSTRDYEIQRERIELGRCIGEGQFGDVHQGIYMSPENPALAVAIKTCKNCTSDSVREKFLQEALTMRQFDHPHIVKLIGVITENPVWIIMELCTLGELRSFLQVRKYSLDLASLILYAYQLSTALAYLESKRFVHRDIAARNVLVSSNDCVKLGDFGLSRYMEDSTYYKASKGKLPIKWMAPESINFRRFTSASDVWMFGVCMWEILMHGVKPFQGVKNNDVIGRIENGERLPMPPNCPPTLYSLMTKCWAYDPSRRPRFTELKAQLSTILEEEKAQQEERMRMESRRQATVSWDSGGSDEAPPKKNGLDEAVKNI

SEQ ID NO: 12599 - protein, 397 aa, Artificial Sequence
  Synthetic polypeptide
IAENMADLIDGYCRLVNGTSQSFIIRPQKEGERALPSIPKLANSEKQGMRTHAVSVSETDDYAEIIDEEDTYTMPSKSYGIDEARDYEIQRERIELGRCIGEGQFGDVHQGIYMSPENPALAVAIKTCKNCTSDSVREKFLQEALTMRQFDHPHIVKLIGVITENPVWIIMELCTLGELRSFLQVRKYSLDLASLILYAYQLSTALAYLESKRFVHRDIAARNVLVSSNDCVKLGDFGLSRYMEDSTYYKASKGKLPIKWMAPESINFRRFTSASDVWMFGVCMWEILMHGVKPFQGVKNNDVIGRIENGERLPMPPNCPPTLYSLMTKCWAYDPSRRPRFTELKAQLSTILEEEKAQQEERMRMESRRQATVSWDSGGSDEAPPKKNGLDEAVKNI

SEQ ID NO: 12600 - protein, 725 aa, Artificial Sequence
  Synthetic polypeptide
MAAAYLDPNLNHTPNSSTKTHLGTGMERSPGAMERVLKVFHYFESNSEPTTWASIIRHGDATDVRGIIQKIVDSHKVKHVACYGFRLSHLRSEEVHWLHVDMGVSSVREKYELAHPPEEWKYELRIRYLPKGFLNQFTEDKPTLNFFYQQVKSDYMLEIADQVDQEIALKLGCLEIRRSYWEMRGNALEKKSNYEVLEKDVGLKRFFPKSLLDSVKAKTLRKLIQQTFRQFANLNREESILKFFEILSPVYRFDKECFKCALGSSWIISVELAIGPEEGISYLTDKGCNPTHLADFTQVQTIQYSNSEDKDRKGMLQLKIAGAPEPLTVTAPSLTIAENMADLIDGYCRLVNGTSQSFIIRPQKEGERALPSIPKLANSEKQGMRTHAVSVSETDDYAEIIDEEDTYTMPSTRDYEIQRERIELGRCIGEGQFGDVHQGIYMSPENPALAVAIKTCKNCTSDSVREKFLQEALTMRQFDHPHIVKLIGVITENPVWIIMELCTLGELRSFLQVRKYSLDLASLILYAYQLSTALAYLESKRFVHRDIAARNVLVSSNDCVKLGDFGLSRYMEDSTYYKASKGKLPIKWMAPESINFRRFTSASDVWMFGVCMWEILMHGVKPFQGVKNNDVIGRIENGERLPMPPNCPPTLYSLMTKCWAYDPSRRPRFTELKAQLSTILEEEKAQQEERMRMESRRQATVSWDSGGSDEAPPKKNGLDEAVKNI

SEQ ID NO: 12601 - protein, 393 aa, Artificial Sequence
  Synthetic polypeptide
MADLIDGYCRLVNGTSQSFIIRPQKEGERALPSIPKLANSEKQGMRTHAVSVSETDDYAEIIDEEDTYTMPSKSYGIDEARDYEIQRERIELGRCIGEGQFGDVHQGIYMSPENPALAVAIKTCKNCTSDSVREKFLQEALTMRQFDHPHIVKLIGVITENPVWIIMELCTLGELRSFLQVRKYSLDLASLILYAYQLSTALAYLESKRFVHRDIAARNVLVSSNDCVKLGDFGLSRYMEDSTYYKASKGKLPIKWMAPESINFRRFTSASDVWMFGVCMWEILMHGVKPFQGVKNNDVIGRIENGERLPMPPNCPPTLYSLMTKCWAYDPSRRPRFTELKAQLSTILEEEKAQQEERMRMESRRQATVSWDSGGSDEAPPKKNGLDEAVKNI

SEQ ID NO: 12602 - protein, 353 aa, Artificial Sequence
  Synthetic polypeptide
MKYQEVRCLTSFNISVSFPAETDDYAEIIDEEDTYTMPSTRDYEIQRERIELGRCIGEGQFGDVHQGIYMSPENPALAVAIKTCKNCTSDSVREKFLQEALTMRQFDHPHIVKLIGVITENPVWIIMELCTLGELRSFLQVRKYSLDLASLILYAYQLSTALAYLESKRFVHRDIAARNVLVSSNDCVKLGDFGLSRYMEDSTYYKASKGKLPIKWMAPESINFRRFTSASDVWMFGVCMWEILMHGVKPFQGVKNNDVIGRIENGERLPMPPNCPPTLYSLMTKCWAYDPSRRPRFTELKAQLSTILEEEKAQQEERMRMESRRQATVSWDSGGSDEAPPKKNGLDEAVKNI

SEQ ID NO: 12603 - protein, 769 aa, Artificial Sequence
  Synthetic polypeptide
MLLELAGQEALKPAGAIYMEKSGCSPFPVCWAKEYDRYLASSKIMAAAYLDPNLNHTPNSSTKTHLGTGMERSPGAMERVLKVFHYFESNSEPTTWASIIRHGDATDVRGIIQKIVDSHKVKHVACYGFRLSHLRSEEVHWLHVDMGVSSVREKYELAHPPEEWKYELRIRYLPKGFLNQFTEDKPTLNFFYQQVKSDYMLEIADQVDQEIALKLGCLEIRRSYWEMRGNALEKKSNYEVLEKDVGLKRFFPKSLLDSVKAKTLRKLIQQTFRQFANLNREESILKFFEILSPVYRFDKECFKCALGSSWIISVELAIGPEEGISYLTDKGCNPTHLADFTQVQTIQYSNSEDKDRKGMLQLKIAGAPEPLTVTAPSLTIAENMADLIDGYCRLVNGTSQSFIIRPQKEGERALPSIPKLANSEKQGMRTHAVSVSETDDYAEIIDEEDTYTMPSTRDYEIQRERIELGRCIGEGQFGDVHQGIYMSPENPALAVAIKTCKNCTSDSVREKFLQEALTMRQFDHPHIVKLIGVITENPVWIIMELCTLGELRSFLQVRKYSLDLASLILYAYQLSTALAYLESKRFVHRDIAARNVLVSSNDCVKLGDFGLSRYMEDSTYYKASKGKLPIKWMAPESINFRRFTSASDVWMFGVCMWEILMHGVKPFQGVKNNDVIGRIENGERLPMPPNCPPTLYSLMTKCWAYDPSRRPRFTELKAQLSTILEEEKAQQEERMRMESRRQATVSWDSGGSDEAPPKKNGLDEAVKNI

SEQ ID NO: 12604 - protein, 35 aa, Artificial Sequence
  Synthetic polypeptide
MRMESRRQATVSWDSGGSDEAPPKKNGLDEAVKNI

SEQ ID NO: 12605 - protein, 736 aa, Artificial Sequence
  Synthetic polypeptide
  misc_feature (1)..(1): Xaa can be any naturally occurring amino acid
XYDRYLASSKIMAAAYLDPNLNHTPNSSTKTHLGTGMERSPGAMERVLKVFHYFESNSEPTTWASIIRHGDATDVRGIIQKIVDSHKVKHVACYGFRLSHLRSEEVHWLHVDMGVSSVREKYELAHPPEEWKYELRIRYLPKGFLNQFTEDKPTLNFFYQQVKSDYMLEIADQVDQEIALKLGCLEIRRSYWEMRGNALEKKSNYEVLEKDVGLKRFFPKSLLDSVKAKTLRKLIQQTFRQFANLNREESILKFFEILSPVYRFDKECFKCALGSSWIISVELAIGPEEGISYLTDKGCNPTHLADFTQVQTIQYSNSEDKDRKGMLQLKIAGAPEPLTVTAPSLTIAENMADLIDGYCRLVNGTSQSFIIRPQKEGERALPSIPKLANSEKQGMRTHAVSVSETDDYAEIIDEEDTYTMPSTRDYEIQRERIELGRCIGEGQFGDVHQGIYMSPENPALAVAIKTCKNCTSDSVREKFLQEALTMRQFDHPHIVKLIGVITENPVWIIMELCTLGELRSFLQVRKYSLDLASLILYAYQLSTALAYLESKRFVHRDIAARNVLVSSNDCVKLGDFGLSRYMEDSTYYKASKGKLPIKWMAPESINFRRFTSASDVWMFGVCMWEILMHGVKPFQGVKNNDVIGRIENGERLPMPPNCPPTLYSLMTKCWAYDPSRRPRFTELKAQLSTILEEEKAQQEERMRMESRRQATVSWDSGGSDEAPPKKNGLDEAVKNI

SEQ ID NO: 12606 - protein, 195 aa, Artificial Sequence
  Synthetic polypeptide
AENMADLIDGYCRLVNGTSQSFIIRPQKEGERALPSIPKLANSEKQGMRTHAVSVSGVSHCQHKVKKARRFLPLVFCSHDPPSTDEISGDETDDYAEIIDEEDTYTMPSTRDYEIQRERIELGRCIGEGQFGDVHQGIYMSPENPALAVAIKTCKNCTSDSVREKFLQEACLKLPGDKDHVCFAHHSILSVLHST

SEQ ID NO: 12607 - protein, 169 aa, Artificial Sequence
  Synthetic polypeptide
IAENMADLIDGYCRLVNGTSQSFIIRPQKEGERALPSIPKLANSEKQGMRTHAVSVSETDDYAEIIDEEDTYTMPSKSYGIDEARDYEIQRERIELGRCIGEGQFGDVHQGIYMSPENPALAVAIKTCKNCTSDSVREKFLQEACLKLPGDKDHVCFAHHSILSVLHST

SEQ ID NO: 12608 - protein, 497 aa, Artificial Sequence
  Synthetic polypeptide
MAAAYLDPNLNHTPNSSTKTHLGTGMERSPGAMERVLKVFHYFESNSEPTTWASIIRHGDATDVRGIIQKIVDSHKVKHVACYGFRLSHLRSEEVHWLHVDMGVSSVREKYELAHPPEEWKYELRIRYLPKGFLNQFTEDKPTLNFFYQQVKSDYMLEIADQVDQEIALKLGCLEIRRSYWEMRGNALEKKSNYEVLEKDVGLKRFFPKSLLDSVKAKTLRKLIQQTFRQFANLNREESILKFFEILSPVYRFDKECFKCALGSSWIISVELAIGPEEGISYLTDKGCNPTHLADFTQVQTIQYSNSEDKDRKGMLQLKIAGAPEPLTVTAPSLTIAENMADLIDGYCRLVNGTSQSFIIRPQKEGERALPSIPKLANSEKQGMRTHAVSVSETDDYAEIIDEEDTYTMPSTRDYEIQRERIELGRCIGEGQFGDVHQGIYMSPENPALAVAIKTCKNCTSDSVREKFLQEACLKLPGDKDHVCFAHHSILSVLHST

SEQ ID NO: 12609 - protein, 165 aa, Artificial Sequence
  Synthetic polypeptide
MADLIDGYCRLVNGTSQSFIIRPQKEGERALPSIPKLANSEKQGMRTHAVSVSETDDYAEIIDEEDTYTMPSKSYGIDEARDYEIQRERIELGRCIGEGQFGDVHQGIYMSPENPALAVAIKTCKNCTSDSVREKFLQEACLKLPGDKDHVCFAHHSILSVLHST

SEQ ID NO: 12610 - protein, 132 aa, Artificial Sequence
  Synthetic polypeptide
MKYQEVRCLTSFNISVSFPAETDDYAEIIDEEDTYTMPSKSYGIDEARDYEIQRERIELGRCIGEGQFGDVHQGIYMSPENPALAVAIKTCKNCTSDSVREKFLQEACLKLPGDKDHVCFAHHSILSVLHST

SEQ ID NO: 12611 - protein, 125 aa, Artificial Sequence
  Synthetic polypeptide
MKYQEVRCLTSFNISVSFPAETDDYAEIIDEEDTYTMPSTRDYEIQRERIELGRCIGEGQFGDVHQGIYMSPENPALAVAIKTCKNCTSDSVREKFLQEACLKLPGDKDHVCFAHHSILSVLHST

SEQ ID NO: 12612 - protein, 541 aa, Artificial Sequence
  Synthetic polypeptide
MLLELAGQEALKPAGAIYMEKSGCSPFPVCWAKEYDRYLASSKIMAAAYLDPNLNHTPNSSTKTHLGTGMERSPGAMERVLKVFHYFESNSEPTTWASIIRHGDATDVRGIIQKIVDSHKVKHVACYGFRLSHLRSEEVHWLHVDMGVSSVREKYELAHPPEEWKYELRIRYLPKGFLNQFTEDKPTLNFFYQQVKSDYMLEIADQVDQEIALKLGCLEIRRSYWEMRGNALEKKSNYEVLEKDVGLKRFFPKSLLDSVKAKTLRKLIQQTFRQFANLNREESILKFFEILSPVYRFDKECFKCALGSSWIISVELAIGPEEGISYLTDKGCNPTHLADFTQVQTIQYSNSEDKDRKGMLQLKIAGAPEPLTVTAPSLTIAENMADLIDGYCRLVNGTSQSFIIRPQKEGERALPSIPKLANSEKQGMRTHAVSVSETDDYAEIIDEEDTYTMPSTRDYEIQRERIELGRCIGEGQFGDVHQGIYMSPENPALAVAIKTCKNCTSDSVREKFLQEACLKLPGDKDHVCFAHHSILSVLHST

SEQ ID NO: 12613 - protein, 310 aa, Artificial Sequence
  Synthetic polypeptide
  misc_feature (1)..(1): Xaa can be any naturally occurring amino acid
XEKKSNYEVLEKDVGLKRFFPKSLLDSVKAKTLRKLIQQTFRQFANLNREESILKFFEILSPVYRFDKECFKCALGSSWIISVELAIGPEEGISYLTDKGCNPTHLADFTQVQTIQYSNSEDKDRKGMLQLKIAGAPEPLTVTAPSLTIAENMADLIDGYCRLVNGTSQSFIIRPQKEGERALPSIPKLANSEKQGMRTHAVSVSETDDYAEIIDEEDTYTMPSTRDYEIQRERIELGRCIGEGQFGDVHQGIYMSPENPALAVAIKTCKNCTSDSVREKFLQEACLKLPGDKDHVCFAHHSILSVLHST

SEQ ID NO: 12614 - protein, 508 aa, Artificial Sequence
  Synthetic polypeptide
  misc_feature (1)..(1): Xaa can be any naturally occurring amino acid
XYDRYLASSKIMAAAYLDPNLNHTPNSSTKTHLGTGMERSPGAMERVLKVFHYFESNSEPTTWASIIRHGDATDVRGIIQKIVDSHKVKHVACYGFRLSHLRSEEVHWLHVDMGVSSVREKYELAHPPEEWKYELRIRYLPKGFLNQFTEDKPTLNFFYQQVKSDYMLEIADQVDQEIALKLGCLEIRRSYWEMRGNALEKKSNYEVLEKDVGLKRFFPKSLLDSVKAKTLRKLIQQTFRQFANLNREESILKFFEILSPVYRFDKECFKCALGSSWIISVELAIGPEEGISYLTDKGCNPTHLADFTQVQTIQYSNSEDKDRKGMLQLKIAGAPEPLTVTAPSLTIAENMADLIDGYCRLVNGTSQSFIIRPQKEGERALPSIPKLANSEKQGMRTHAVSVSETDDYAEIIDEEDTYTMPSTRDYEIQRERIELGRCIGEGQFGDVHQGIYMSPENPALAVAIKTCKNCTSDSVREKFLQEACLKLPGDKDHVCFAHHSILSVLHST

SEQ ID NO: 12615 - protein, 339 aa, Artificial Sequence
  Synthetic polypeptide
MAAAYLDPNLNHTPNSSTKTHLGTGMERSPGAMERVLKVFHYFESNSEPTTWASIIRHGDATDVRGIIQKIVDSHKVKHVACYGFRLSHLRSEEVHWLHVDMGVSSVREKYELAHPPEEWKYELRIRYLPKGFLNQFTEDKPTLNFFYQQVKSDYMLEIADQVDQEIALKLGCLEIRRSYWEMRGNALEKKSNYEVLEKDVGLKRFFPKSLLDSVKAKTLRKLIQQTFRQFANLNREESILKFFEILSPVYRFDKECFKCALGSSWIISVELAIGPEEGISYLTDKGCNAPWLMPVIPALWKAEAGGSPEVRSLRPAWPTWQNPVSTKNTKISQAWWRL

SEQ ID NO: 12616 - protein, 383 aa, Artificial Sequence
  Synthetic polypeptide
MLLELAGQEALKPAGAIYMEKSGCSPFPVCWAKEYDRYLASSKIMAAAYLDPNLNHTPNSSTKTHLGTGMERSPGAMERVLKVFHYFESNSEPTTWASIIRHGDATDVRGIIQKIVDSHKVKHVACYGFRLSHLRSEEVHWLHVDMGVSSVREKYELAHPPEEWKYELRIRYLPKGFLNQFTEDKPTLNFFYQQVKSDYMLEIADQVDQEIALKLGCLEIRRSYWEMRGNALEKKSNYEVLEKDVGLKRFFPKSLLDSVKAKTLRKLIQQTFRQFANLNREESILKFFEILSPVYRFDKECFKCALGSSWIISVELAIGPEEGISYLTDKGCNAPWLMPVIPALWKAEAGGSPEVRSLRPAWPTWQNPVSTKNTKISQAWWRL

SEQ ID NO: 12617 - protein, 152 aa, Artificial Sequence
  Synthetic polypeptide
  misc_feature (1)..(1): Xaa can be any naturally occurring amino acid
XEKKSNYEVLEKDVGLKRFFPKSLLDSVKAKTLRKLIQQTFRQFANLNREESILKFFEILSPVYRFDKECFKCALGSSWIISVELAIGPEEGISYLTDKGCNAPWLMPVIPALWKAEAGGSPEVRSLRPAWPTWQNPVSTKNTKISQAWWRL

SEQ ID NO: 12618 - protein, 350 aa, Artificial Sequence
  Synthetic polypeptide
  misc_feature (1)..(1): Xaa can be any naturally occurring amino acid
XYDRYLASSKIMAAAYLDPNLNHTPNSSTKTHLGTGMERSPGAMERVLKVFHYFESNSEPTTWASIIRHGDATDVRGIIQKIVDSHKVKHVACYGFRLSHLRSEEVHWLHVDMGVSSVREKYELAHPPEEWKYELRIRYLPKGFLNQFTEDKPTLNFFYQQVKSDYMLEIADQVDQEIALKLGCLEIRRSYWEMRGNALEKKSNYEVLEKDVGLKRFFPKSLLDSVKAKTLRKLIQQTFRQFANLNREESILKFFEILSPVYRFDKECFKCALGSSWIISVELAIGPEEGISYLTDKGCNAPWLMPVIPALWKAEAGGSPEVRSLRPAWPTWQNPVSTKNTKISQAWWRL

SEQ ID NO: 12619 - protein, 241 aa, Artificial Sequence
  Synthetic polypeptide
MAAAYLDPNLNHTPNSSTKTHLGTGMERSPGAMERVLKVFHYFESNSEPTTWASIIRHGDATDVRGIIQKIVDSHKVKHVACYGFRLSHLRSEEVHWLHVDMGVSSVREKYELAHPPEEWKYELRIRYLPKGFLNQFTEDKPTLNFFYQQVKSDYMLEIADQVDQEIALKLGCLEIRRSYWEMRGNALEKKSNYEVLEKDVGLKRFFPKSLLDSVKVPSSPMYLNTSAGGSEISSNSAALS

SEQ ID NO: 12620 - protein, 135 aa, Artificial Sequence
  Synthetic polypeptide
MAAAYLDPNLNHTPNSSTKTHLGTGMERSPGAMERVLKVFHYFESNSEPTTWASIIRHGDATDVRVKSDYMLEIADQVDQEIALKLGCLEIRKDVGLKRFFPKSLLDSVKVPSSPMYLNTSAGGSEISSNSAALS

SEQ ID NO: 12621 - protein, 285 aa, Artificial Sequence
  Synthetic polypeptide
MLLELAGQEALKPAGAIYMEKSGCSPFPVCWAKEYDRYLASSKIMAAAYLDPNLNHTPNSSTKTHLGTGMERSPGAMERVLKVFHYFESNSEPTTWASIIRHGDATDVRGIIQKIVDSHKVKHVACYGFRLSHLRSEEVHWLHVDMGVSSVREKYELAHPPEEWKYELRIRYLPKGFLNQFTEDKPTLNFFYQQVKSDYMLEIADQVDQEIALKLGCLEIRRSYWEMRGNALEKKSNYEVLEKDVGLKRFFPKSLLDSVKVPSSPMYLNTSAGGSEISSNSAALS

SEQ ID NO: 12622 - protein, 54 aa, Artificial Sequence
  Synthetic polypeptide
  misc_feature (1)..(1): Xaa can be any naturally occurring amino acid
XEKKSNYEVLEKDVGLKRFFPKSLLDSVKVPSSPMYLNTSAGGSEISSNSAALS

SEQ ID NO: 12623 - protein, 252 aa, Artificial Sequence
  Synthetic polypeptide
  misc_feature (1)..(1): Xaa can be any naturally occurring amino acid
XYDRYLASSKIMAAAYLDPNLNHTPNSSTKTHLGTGMERSPGAMERVLKVFHYFESNSEPTTWASIIRHGDATDVRGIIQKIVDSHKVKHVACYGFRLSHLRSEEVHWLHVDMGVSSVREKYELAHPPEEWKYELRIRYLPKGFLNQFTEDKPTLNFFYQQVKSDYMLEIADQVDQEIALKLGCLEIRRSYWEMRGNALEKKSNYEVLEKDVGLKRFFPKSLLDSVKVPSSPMYLNTSAGGSEISSNSAALS

SEQ ID NO: 12624 - protein, 199 aa, Artificial Sequence
  Synthetic polypeptide
MAAAYLDPNLNHTPNSSTKTHLGTGMERSPGAMERVLKVFHYFESNSEPTTWASIIRHGDATDVRGIIQKIVDSHKVKHVACYGFRLSHLRSEEVHWLHVDMGVSSVREKYELAHPPEEWKYELRIRYLPKGFLNQFTEDKPTLNFFYQQVKSDYMLEIADQVDQEIALKLGCLEIRRSYWEMRGNALEKKSNYEVLES

SEQ ID NO: 12625 - protein, 243 aa, Artificial Sequence
  Synthetic polypeptide
MLLELAGQEALKPAGAIYMEKSGCSPFPVCWAKEYDRYLASSKIMAAAYLDPNLNHTPNSSTKTHLGTGMERSPGAMERVLKVFHYFESNSEPTTWASIIRHGDATDVRGIIQKIVDSHKVKHVACYGFRLSHLRSEEVHWLHVDMGVSSVREKYELAHPPEEWKYELRIRYLPKGFLNQFTEDKPTLNFFYQQVKSDYMLEIADQVDQEIALKLGCLEIRRSYWEMRGNALEKKSNYEVLES

SEQ ID NO: 12626 - protein, 12 aa, Artificial Sequence
  Synthetic polypeptide
  misc_feature (1)..(1): Xaa can be any naturally occurring amino acid
XEKKSNYEVLES

SEQ ID NO: 12627 - protein, 210 aa, Artificial Sequence
  Synthetic polypeptide
  misc_feature (1)..(1): Xaa can be any naturally occurring amino acid
XYDRYLASSKIMAAAYLDPNLNHTPNSSTKTHLGTGMERSPGAMERVLKVFHYFESNSEPTTWASIIRHGDATDVRGIIQKIVDSHKVKHVACYGFRLSHLRSEEVHWLHVDMGVSSVREKYELAHPPEEWKYELRIRYLPKGFLNQFTEDKPTLNFFYQQVKSDYMLEIADQVDQEIALKLGCLEIRRSYWEMRGNALEKKSNYEVLES

SEQ ID NO: 12628 - protein, 105 aa, Artificial Sequence
  Synthetic polypeptide
MKIFLPVLLAALLGVERASSLMCFSCLNQKSNLYCLKPTICSDQDNYCVTVSASAGIEGKAPAELTICRLRLHHLEDILARSTDWPRPGGFCLLLVSSSLSWTGS

SEQ ID NO: 12629 - protein, 21 aa, Artificial Sequence
  Synthetic polypeptide
MEGRSAAIPGDSYIQQSTKTI

SEQ ID NO: 12630 - protein, 22 aa, Artificial Sequence
  Synthetic polypeptide
MEGRSAAKIPGDSYIQQSTKTI

SEQ ID NO: 12631 - protein, 266 aa, Artificial Sequence
  Synthetic polypeptide
MILANVFCLFFFLDETLRSLASPSSLQGPELHGWRPPVDCVRANELCAAESNCSSRYRTLRQCLAGRDRNTMLANKECQAALEVLQESPLYDCRCKRGMKKELQCLQIYWSIHLGLTEGEEFYEASPYEPVTSRLSDIFRLASIFSGTGADPVVSAKSNHCLDAAKACNLNDNCKKLRSSYISICNREISPTERCNRRKCHKALRQFFDRVPSEYTYRMLFCSCQDQACAERRRQTILPSCSYEDKEKPNCLDLRGVCRTDHLCRK

SEQ ID NO: 12632 - protein, 161 aa, Artificial Sequence
  Synthetic polypeptide
MILANVFCLFFFLGEEFYEASPYEPVTSRLSDIFRLASIFSGTGADPVVSAKSNHCLDAAKACNLNDNCKKLRSSYISICNREISPTERCNRRKCHKALRQFFDRVPSEYTYRMLFCSCQDQACAERRRQTILPSCSYEDKEKPNCLDLRGVCRTDHLCRK

SEQ ID NO: 12633 - protein, 133 aa, Artificial Sequence
  Synthetic polypeptide
MILANVFCLFFFLGTGADPVVSAKSNHCLDAAKACNLNDNCKKLRSSYISICNREISPTERCNRRKCHKALRQFFDRVPSEYTYRMLFCSCQDQACAERRRQTILPSCSYEDKEKPNCLDLRGVCRTDHLCRK

SEQ ID NO: 12634 - protein, 326 aa, Artificial Sequence
  Synthetic polypeptide
MILANVFCLFFFLDETLRSLASPSSLQGPELHGWRPPVDCVRANELCAAESNCSSRYRTLRQCLAGRDRNTMLANKECQAALEVLQESPLYDCRCKRGMKKELQCLQIYWSIHLGLTEGEEFYEASPYEPVTSRLSDIFRLASIFSGTGADPVVSAKSNHCLDAAKACNLNDNCKKLRSSYISICNREISPTERCNRRKCHKALRQFFDRVPSEYTYRMLFCSCQDQACAERRRQTILPSCSYEDKEKPNCLDLRGVCRTDHLCRRLPWPPKVPRLQPLPGRHPVWEVRSVSAWPPIVWDVRSPSAWLPSLESEERLCPPAIPSRK

SEQ ID NO: 12635 - protein, 221 aa, Artificial Sequence
  Synthetic polypeptide
MILANVFCLFFFLGEEFYEASPYEPVTSRLSDIFRLASIFSGTGADPVVSAKSNHCLDAAKACNLNDNCKKLRSSYISICNREISPTERCNRRKCHKALRQFFDRVPSEYTYRMLFCSCQDQACAERRRQTILPSCSYEDKEKPNCLDLRGVCRTDHLCRRLPWPPKVPRLQPLPGRHPVWEVRSVSAWPPIVWDVRSPSAWLPSLESEERLCPPAIPSRK

SEQ ID NO: 12636 - protein, 193 aa, Artificial Sequence
  Synthetic polypeptide
MILANVFCLFFFLGTGADPVVSAKSNHCLDAAKACNLNDNCKKLRSSYISICNREISPTERCNRRKCHKALRQFFDRVPSEYTYRMLFCSCQDQACAERRRQTILPSCSYEDKEKPNCLDLRGVCRTDHLCRRLPWPPKVPRLQPLPGRHPVWEVRSVSAWPPIVWDVRSPSAWLPSLESEERLCPPAIPSRK

SEQ ID NO: 12637 - protein, 365 aa, Artificial Sequence
  Synthetic polypeptide
MAPPPARVHLGAFLAVTPNPGSAASGTEAAAATPSKVWGSSAGRIEPRGGGRGALPTSMGQHGPSARARAGRAPGPRPAREASPRLRVHKTFKFVVVGVLLQVVPSSAATIKLHDQSIGTQQWEHSPLGELCPPGSHRSEHPGACNRCTEGVGYTNASNNLFACLPCTACKSDEEERSPCTTTRNTACQCKPGTFRNDNSAEMCRKCSRGCPRGMVKVKDCTPWSDIECVHKESGNGHNIWVILVVTLVVPLLLVAVLIVCCCIGSGCGGDPKCMDRVCFWRLGLLRGPGAEDNAHNEILSNADSLSTFVSEQQMESQEPADLTGVTVQSPGEAQCLLGPAEAEGSQRRRLLVPANGADPTESSG

SEQ ID NO: 12638 - protein, 354 aa, Artificial Sequence
  Synthetic polypeptide
MARWIPTKRQKYGVAIYNYNASQDVELSLQIGDTVHILEMYEGWYRGYTLQNKSKKGIFPETYIHLKEATVEDLGQHETVIPGELPLVQELTSTLREWAVIWRKLYVNNKLTLFRQLQQMTYSLIEWRSQILSGTLPKDELAELKKKVTAKIDHGNRMLGLDLVVRDDNGNILDPDETSTIALFKAHEVASKRIEEKIQEEKSILQNLDLRGQSIFSTIHTYGLYVNFKNFVCNIGEDAELFMALYDPDQSTFISENYLIRWGSNGMPKEIEKLNNLQAVFTDLSSMDLIRPRVSLVCQIVRVGHMELKEGKKHTCGLRRPFGVAVMDITDIIHGKVDDEEKQHFIPFQHGGRL

SEQ ID NO: 12639 - protein, 126 aa, Artificial Sequence
  Synthetic polypeptide
  misc_feature (1)..(1): Xaa can be any naturally occurring amino acid
XVNPAEPRFAGPVHLQYHPHLWPLCELQELCLQHRGRCRVVYGPLRPRPVHFYQDLSSMDLIRPRVSLVCQIVRVGHMELKEGKKHTCGLRRPFGVAVMDITDIIHGKVDDEEKQHFIPFQHGGRL

SEQ ID NO: 12640 - protein, 946 aa, Artificial Sequence
  Synthetic polypeptide
MARWIPTKRQKYGVAIYNYNASQDVELSLQIGDTVHILEMYEGWYRGYTLQNKSKKGIFPETYIHLKEATVEDLGQHETVIPGELPLVQELTSTLREWAVIWRKLYVNNKLTLFRQLQQMTYSLIEWRSQILSGTLPKDELAELKKKVTAKIDHGNRMLGLDLVVRDDNGNILDPDETSTIALFKAHEVASKRIEEKIQEEKSILQNLDLRGQSIFSTIHTYGLYVNFKNFVCNIGEDAELFMALYDPDQSTFISENYLIRWGSNGMPKEIEKLNNLQAVFTDLSSMDLIRPRVSLVCQIVRVGHMELKEGKKHTCGLRRPFGVAVMDITDIIHGKVDDEEKQHFIPFQQIAMETYIRQRQLIMSPLITSHVIGENEPLTSVLNKVIAAKEVNHKGQGLWVSLKLLPGDLTQVQKNFSHLVDRSTAIARKMGFPEIILPGDVRNDIYVTLIHGEFDKGKKKTPKNVEVTMSVHDEEGKLLEKAIHPGAGYEGISEYKSVVYYQVKQPCWYETVKVSIAIEEVTRCHIRFTFRHRSSQETRDKSERAFGVAFVKLMNPDGTTLQDGRHDLVVYKGDNKKMEDAKFYLTLPGTKMEMEEKELQASKNLVTFTPSKDSTKDSFQIATLICSTKLTQNVDLLGLLNWRSNSQNIKHNLKKLMEVDGGEIVKFLQDTLDALFNIMMEMSDSETYDFLVFDALVFIISLIGDIKFQHFNPVLETYIYKHFSATLAYVKLSKVLNFYVANADDSSKTELLFAALKALKYLFRFIIQSRVLYLRFYGQSKDGDEFNNSIRQLFLAFNMLMDRPLEEAVKIKGAALKYLPSIINDVKLVFDPVELSVLFCKFIQSIPDNQLVRQKLNCMTKIVESTLFRQSECREVLLPLLTDQLSGQLDDNSNKPDHEASSQLLSNILEVLDRKDVVEMEAIILSEVTQEWKIKYYMFSLISGS

SEQ ID NO: 12641 - protein, 718 aa, Artificial Sequence
  Synthetic polypeptide
  misc_feature (1)..(1): Xaa can be any naturally occurring amino acid
XVNPAEPRFAGPVHLQYHPHLWPLCELQELCLQHRGRCRVVYGPLRPRPVHFYQDLSSMDLIRPRVSLVCQIVRVGHMELKEGKKHTCGLRRPFGVAVMDITDIIHGKVDDEEKQHFIPFQQIAMETYIRQRQLIMSPLITSHVIGENEPLTSVLNKVIAAKEVNHKGQGLWVSLKLLPGDLTQVQKNFSHLVDRSTAIARKMGFPEIILPGDVRNDIYVTLIHGEFDKGKKKTPKNVEVTMSVHDEEGKLLEKAIHPGAGYEGISEYKSVVYYQVKQPCWYETVKVSIAIEEVTRCHIRFTFRHRSSQETRDKSERAFGVAFVKLMNPDGTTLQDGRHDLVVYKGDNKKMEDAKFYLTLPGTKMEMEEKELQASKNLVTFTPSKDSTKDSFQIATLICSTKLTQNVDLLGLLNWRSNSQNIKHNLKKLMEVDGGEIVKFLQDTLDALFNIMMEMSDSETYDFLVFDALVFIISLIGDIKFQHFNPVLETYIYKHFSATLAYVKLSKVLNFYVANADDSSKTELLFAALKALKYLFRFIIQSRVLYLRFYGQSKDGDEFNNSIRQLFLAFNMLMDRPLEEAVKIKGAALKYLPSIINDVKLVFDPVELSVLFCKFIQSIPDNQLVRQKLNCMTKIVESTLFRQSECREVLLPLLTDQLSGQLDDNSNKPDHEASSQLLSNILEVLDRKDVVEMEAIILSEVTQEWKIKYYMFSLISGS

SEQ ID NO: 12642 - protein, 252 aa, Artificial Sequence
  Synthetic polypeptide
MRWRRAPRRSGRPGPRAQRPGSAARSSPPLPLLPLLLLLGTAALAPGAAAGNEAAPAGASVCYSSPPSVGSVQELAQRAAVVIEGKVHPQRRQQGALDRKAAAAAGEAGAWGGDREPPAAGPRALGPPAEEPLLAANGTVPSWPTAPVPSAGEPGEEAPYLVKVHQVWAVKAGGLKKDSLLTVRLGTWGHPAFPSCGRLKEDSRYIFFMEPDANSTSRAPAAFRASFPPLETGRNLKKEVSRVLCKRCGNQK

SEQ ID NO: 12643 - protein, 105 aa, Artificial Sequence
  Synthetic polypeptide
VPSAGEPGEEAPYLVKVHQVWAVKAGGLKKDSLLTVRLGTWGHPAFPSCGRLKEDSRYIFFMEPDANSTSRAPAAFRASFPPLETGRNLKKEVSRVLCKRCGNQK

SEQ ID NO: 12644 - protein, 255 aa, Artificial Sequence
  Synthetic polypeptide
MRWRRAPRRSGRPGPRAQRPGSAARSSPPLPLLPLLLLLGTAALAPGAAAGNEAAPAGASVCYSSPPSVGSVQELAQRAAVVIEGKVHPQRRQQGALDRKAAAAAGEAGAWGGDREPPAAGPRALGPPAEEPLLAANGTVPSWPTAPVPSAGEPGEEAPYLVKVHQVWAVKAGGLKKDSLLTVRLGTWGHPAFPSCGRLKEDSRYIFFMEPDANSTSRAPAAFRASFPPLETGRNLKKEVSRVLCKRCDYESDVR

SEQ ID NO: 12645 - protein, 108 aa, Artificial Sequence
  Synthetic polypeptide
VPSAGEPGEEAPYLVKVHQVWAVKAGGLKKDSLLTVRLGTWGHPAFPSCGRLKEDSRYIFFMEPDANSTSRAPAAFRASFPPLETGRNLKKEVSRVLCKRCDYESDVR

SEQ ID NO: 12646 - protein, 35 aa, Artificial Sequence
  Synthetic polypeptide
MGSGARFPSGTLRVRWLLLLGLVGPVLGAARPGLL

SEQ ID NO: 12647 - protein, 533 aa, Artificial Sequence
  Synthetic polypeptide
MGSGARFPSGTLRVRWLLLLGLVGPVLGAARPGFQQTSHLSSYEIITPWRLTRERREAPRPYSKQVSYVIQAEGKEHIIHLERNKDLLPEDFVVYTYNKEGTLITDHPNIQNHCHYRGYVEGVHNSSIALSDCFGLRGLLHLENASYGIEPLQNSSHFEHIIYRMDDVYKEPLKCGVSNKDIEKETAKDEEEEPPSMTQLLRRRRAVLPQTRYVELFIVVDKERYDMMGRNQTAVREEMILLANYLDSMYIMLNIRIVLVGLEIWTNGNLINIVGGAGDVLGNFVQWREKFLITRRRHDSAQLVLKKGFGGTAGMAFVGTVCSRSHAGGINVFGQITVETFASIVAHELGHNLGMNHDDGRDCSCGAKSCIMNSGASGSRNFSSCSAEDFEKLTLNKGGNCLLNIPKPDEAYSAPSCGNKLVDAGEECDCGTPKECELDPCCEGSTCKLKSFAECAYGDCCKDCRFLPGGTLCRGKTSECDVPEYCNGSSQFCQPDVFIQNGYPCQNNKAYCYNGMCQYYDAQCQVIFGSSCH

SEQ ID NO: 12648 - protein, 575 aa, Artificial Sequence
  Synthetic polypeptide
MGSGARFPSGTLRVRWLLLLGLVGPVLGAARPGFQQTSHLSSYEIITPWRLTRERREAPRPYSKQVSYVIQAEGKEHIIHLERNKDLLPEDFVVYTYNKEGTLITDHPNIQNHCHYRGYVEGVHNSSIALSDCFGLRGLLHLENASYGIEPLQNSSHFEHIIYRMDDVYKEPLKCGVSNKDIEKETAKDEEEEPPSMTQLLRRRRAVLPQTRYVELFIVVDKERYDMMGRNQTAVREEMILLANYLDSMYIMLNIRIVLVGLEIWTNGNLINIVGGAGDVLGNFVQWREKFLITRRRHDSAQLVLKKGFGGTAGMAFVGTVCSRSHAGGINVFGQITVETFASIVAHELGHNLGMNHDDGRDCSCGAKSCIMNSGASGSRNFSSCSAEDFEKLTLNKGGNCLLNIPKPDEAYSAPSCGNKLVDAGEECDCGTPKECELDPCCEGSTCKLKSFAECAYGDCCKDCRFLPGGTLCRGKTSECDVPEYCNGSSQFCQPDVFIQNGYPCQNNKAYCYNGMCQYYDAQCQVIFGSKAKAAPKDCFIEVNSKGDRFGNCGFSGNEYKKCATGLSLKFHAPF

SEQ ID NO: 12649 - protein, 1558 aa, Artificial Sequence
  Synthetic polypeptide
MAQAAKQLKKIKDIEAQALQEQKEKEESNRKRRNRSRDRKKKADAATSFLRAARSGNLDKALDHLRNGVDINTCNQNGLNGLHLASKEGHVKMVVELLHKEIILETTTKKGNTALHIAALAGQDEVVRELVNYGANVNAQSQKGFTPLYMAAQENHLEVVKFLLENGANQNVATEDGFTPLAVALQQGHENVVAHLINYGTKGKVRLPALHIAARNDDTRTAAVLLQNDPNPDVLSKTGFTPLHIAAHYENLNVAQLLLNRGASVNFTPQNGITPLHIASRRGNVIMVRLLLDRGAQIETKTKDELTPLHCAARNGHVRISEILLDHGAPIQAKTKNGLSPIHMAAQGDHLDCVRLLLQYDAEIDDITLDHLTPLHVAAHCGHHRVAKVLLDKGAKPNSRALNGFTPLHIACKKNHVRVMELLLKTGASIDAVTESGLTPLHVASFMGHLPIVKNLLQRGASPNVSNVKVETPLHMAARAGHTEVAKYLLQNKAKVNAKAKDDQTPLHCAARIGHTNMVKLLLENNANPNLATTAGHTPLHIAAREGHVETVLALLEKEASQACMTKKGFTPLHVAAKYGKVRVAELLLERDAHPNAAGKNGLTPLHVAVHHNNLDIVKLLLPRGGSPHSPAWNGYTPLHIAAKQNQVEVARSLLQYGGSANAESVQGVTPLHLAAQEGHAEMVALLLSKQANGNLGNKSGLTPLHLVAQEGHVPVADVLIKHGVMVDATTRMGYTPLHVASHYGNIKLVKFLLQHQADVNAKTKLGYSPLHQAAQQGHTDIVTLLLKNGASPNEVSSDGTTPLAIAKRLGYISVTDVLKVVTDETSFVLVSDKHRMSFPETVDEILDVSEDEGTAHITIMGEELISFKAERRDSRDVDEEKELLDFVPKLDQVVESPAIPRIPCAMPETVVIRSEEQEQASKEYDEDSLIPSSPATETSDNISPVASPVHTGFLVSFMVDARGGSMRGSRHNGLRVVIPPRTCAAPTRITCRLVKPQKLSTPPPLAEEEGLASRIIALGPTGAQFLSPVIVEIPHFASHGRGDRELVVLRSENGSVWKEHRSRYGESYLDQILNGMDEELGSLEELEKKRVCRIITTDFPLYFVIMSRLCQDYDTIGPEGGSLKSKLVPLVQATFPENAVTKRVKLALQAQPVPDELVTKLLGNQATFSPIVTVEPRRRKFHRPIGLRIPLPPSWTDNPRDSGEGDTTSLRLLCSVIGGTDQAQWEDITGTTKLVYANECANFTTNVSARFWLSDCPRTAEAVNFATLLYKELTAVPYMAKFVIFAKMNDPREGRLRCYCMTDDKVDKTLEQHENFVEVARSRDIEVLEGMSLFAELSGNLVPVKKAAQQRSFHFQSFRENRLAMPVKVRDSSREPGGSLSFLRKAMKYEDTQHILCHLNITMPPCAKGSGAEDRRRTPTPLALRYSILSESTPGSLSGTEQAEMKMAVISEHLGLSWAELARELQFSVEDINRIRVENPNSLLEQSVALLNLWVIREGQNANMENLYTALQSIDRGEIVNMLEGSGRQSRNLKPDRRHTDRDYSLSPSQMNGIQKS

SEQ ID NO: 12650 - protein, 1517 aa, Artificial Sequence
  Synthetic polypeptide
MPYSVGFREADAATSFLRAARSGNLDKALDHLRNGVDINTCNQNGLNGLHLASKEGHVKMVVELLHKEIILETTTKKGNTALHIAALAGQDEVVRELVNYGANVNAQSQKGFTPLYMAAQENHLEVVKFLLENGANQNVATEDGFTPLAVALQQGHENVVAHLINYGTKGKVRLPALHIAARNDDTRTAAVLLQNDPNPDVLSKTGFTPLHIAAHYENLNVAQLLLNRGASVNFTPQNGITPLHIASRRGNVIMVRLLLDRGAQIETKTKDELTPLHCAARNGHVRISEILLDHGAPIQAKTKNGLSPIHMAAQGDHLDCVRLLLQYDAEIDDITLDHLTPLHVAAHCGHHRVAKVLLDKGAKPNSRALNGFTPLHIACKKNHVRVMELLLKTGASIDAVTESGLTPLHVASFMGHLPIVKNLLQRGASPNVSNVKVETPLHMAARAGHTEVAKYLLQNKAKVNAKAKDDQTPLHCAARIGHTNMVKLLLENNANPNLATTAGHTPLHIAAREGHVETVLALLEKEASQACMTKKGFTPLHVAAKYGKVRVAELLLERDAHPNAAGKNGLTPLHVAVHHNNLDIVKLLLPRGGSPHSPAWNGYTPLHIAAKQNQVEVARSLLQYGGSANAESVQGVTPLHLAAQEGHAEMVALLLSKQANGNLGNKSGLTPLHLVAQEGHVPVADVLIKHGVMVDATTRMGYTPLHVASHYGNIKLVKFLLQHQADVNAKTKLGYSPLHQAAQQGHTDIVTLLLKNGASPNEVSSDGTTPLAIAKRLGYISVTDVLKVVTDETSFVLVSDKHRMSFPETVDEILDVSEDEGEELISFKAERRDSRDVDEEKELLDFVPKLDQVVESPAIPRIPCAMPETVVIRSEEQEQASKEYDEDSLIPSSPATETSDNISPVASPVHTGFLVSFMVDARGGSMRGSRHNGLRVVIPPRTCAAPTRITCRLVKPQKLSTPPPLAEEEGLASRIIALGPTGAQFLSPVIVEIPHFASHGRGDRELVVLRSENGSVWKEHRSRYGESYLDQILNGMDEELGSLEELEKKRVCRIITTDFPLYFVIMSRLCQDYDTIGPEGGSLKSKLVPLVQATFPENAVTKRVKLALQAQPVPDELVTKLLGNQATFSPIVTVEPRRRKFHRPIGLRIPLPPSWTDNPRDSGEGDTTSLRLLCSVIGGTDQAQWEDITGTTKLVYANECANFTTNVSARFWLSDCPRTAEAVNFATLLYKELTAVPYMAKFVIFAKMNDPREGRLRCYCMTDDKVDKTLEQHENFVEVARSRDIEVLEGMSLFAELSGNLVPVKKAAQQRSFHFQSFRENRLAMPVKVRDSSREPGGSLSFLRKAMKYEDTQHILCHLNITMPPCAKGSGAEDRRRTPTPLALRYSILSESTPGSLSGTEQAEMKMAVISEHLGLSWAELARELQFSVEDINRIRVENPNSLLEQSVALLNLWVIREGQNANMENLYTALQSIDRGEIVNMLEGSGRQSRNLKPDRRHTDRDYSLSPSQMNGIQKS

SEQ ID NO: 12651 - protein, 169 aa, Artificial Sequence
  Synthetic polypeptide
  misc_feature (1)..(1): Xaa can be any naturally occurring amino acid
XEDTQHILCHLNITMPPCAKGSGAEDRRRTPTPLALRYSILSESTPGSLSGTEQAEMKMAVISEHLGLSWAELARELQFSVEDINRIRVENPNSLLEQSVALLNLWVIREGQNANMENLYTALQSIDRGEIVNMLEGSGRQSRNLKPDRRHTDRDYSLSPSQMNGIQKS

SEQ ID NO: 12652 - protein, 839 aa, Artificial Sequence
  Synthetic polypeptide
  misc_feature (1)..(1): Xaa can be any naturally occurring amino acid
XIKHGVMVDATTRMGYTPLHVASHYGNIKLVKFLLQHQADVNAKTKLGYSPLHQAAQQGHTDIVTLLLKNGASPNEVSSDGTTPLAIAKRLGYISVTDVLKVVTDETSFVLVSDKHRMSFPETVDEILDVSEDEGTAHITIMGEELISFKAERRDSRDVDEEKELLDFVPKLDQVVESPAIPRIPCAMPETVVIRSEEQEQASKEYDEDSLIPSSPATETSDNISPVASPVHTGFLVSFMVDARGGSMRGSRHNGLRVVIPPRTCAAPTRITCRLVKPQKLSTPPPLAEEEGLASRIIALGPTGAQFLSPVIVEIPHFASHGRGDRELVVLRSENGSVWKEHRSRYGESYLDQILNGMDEELGSLEELEKKRVCRIITTDFPLYFVIMSRLCQDYDTIGPEGGSLKSKLVPLVQATFPENAVTKRVKLALQAQPVPDELVTKLLGNQATFSPIVTVEPRRRKFHRPIGLRIPLPPSWTDNPRDSGEGDTTSLRLLCSVIGGTDQAQWEDITGTTKLVYANECANFTTNVSARFWLSDCPRTAEAVNFATLLYKELTAVPYMAKFVIFAKMNDPREGRLRCYCMTDDKVDKTLEQHENFVEVARSRDIEVLEGMSLFAELSGNLVPVKKAAQQRSFHFQSFRENRLAMPVKVRDSSREPGGSLSFLRKAMKYEDTQHILCHLNITMPPCAKGSGAEDRRRTPTPLALRYSILSESTPGSLSGTEQAEMKMAVISEHLGLSWAELARELQFSVEDINRIRVENPNSLLEQSVALLNLWVIREGQNANMENLYTALQSIDRGEIVNMLEGSGRQSRNLKPDRRHTDRDYSLSPSQMNGIQKS

SEQ ID NO: 12653 - protein, 52 aa, Artificial Sequence
  Synthetic polypeptide
MAQAAKQLKKIKDIEAQALQEQKEKEESNRKRRNRSRDRKKKHLGRQRQEDC

SEQ ID NO: 12654 - protein, 258 aa, Artificial Sequence; identical to SEQ ID NO: 766
  Synthetic polypeptide

SEQ ID NO: 12655 - protein, 37 aa, Artificial Sequence
  Synthetic polypeptide
MRTADGGEPAGASSPAGRVDGGLGAVAYMWNPNTLGG

SEQ ID NO: 12656 - protein, 198 aa, Artificial Sequence
  Synthetic polypeptide
MCGNNMSTPLPAIVPAARKATAAVIFLHGLGDTGHGWAEAFAGIRSSHIKYICPHAFDIIGLSPDSQEDESGIKQAAENIKALIDQEVKNGIPSNRIILGGFSQGGALSLYTALTTQQKLAGVTALSCWLPLRASFPQGPIGGANRDISILQCHGDCDPLVPLMFGSLTVEKLKTLVNPANVTFKTYEGMMHSSCQQE

SEQ ID NO: 12657 - protein, 214 aa, Artificial Sequence
  Synthetic polypeptide
MCGNNMSTPLPAIVPAARKATAAVIFLHGLGDTGHGWAEAFAGIRSSHIKYICPHAPVRPVTLNMNVAMPSWFDIIGLSPDSQEDESGIKQAAENIKALIDQEVKNGIPSNRIILGGFSQGGALSLYTALTTQQKLAGVTALSCWLPLRASFPQGPIGGANRDISILQCHGDCDPLVPLMFGSLTVEKLKTLVNPANVTFKTYEGMMHSSCQQE

SEQ ID NO: 12658 - protein, 158 aa, Artificial Sequence
  Synthetic polypeptide
MGCCTGRCSLICLCALQLVSALERQIFDFLGFQWAPILGNFLHIIVVILGLFGTIQYRPRYIMVYTVWTALWVTWNVFIICFYLEVGGLSKDTDLMTFNISVHRSWWREHGPGCVRRVLPPSAHGMMDDYTYVSVTGCIVDFQYLEVIHSAVQILLSP

SEQ ID NO: 12659 - protein, 346 aa, Artificial Sequence
  Synthetic polypeptide
MDEGTGLQPGAGEQLEAPATAEAVQERCEPETLRSKSLPVLSSASCRPSLSPTSGDANPAFGCVDSSGHQELKQGPNPLAPSPSAPSTSAGLGDCNHRVDLSKTFSVSSALAMLQERRCLYVVLTDSRCFLVCMCFLTFIQALMVSGYLSSVITTIERRYSLKSSESGLLVSCFDIGNLVVVVFVSYFGGRGRRPLWLAVGGLLIAFGAALFALPHFISPPYQIQELNASAPNDGLCQGGNSTATLEPPACPKDSGGNNHWVYVALFICAQILIGMGSTPIYTLGPTYLDDNVKKENSSLYLAIMYVMGALGPAVGYLLGGLLIGFYVDPRNPVHLDQNDPRFIGN

SEQ ID NO: 12660 - protein, 194 aa, Artificial Sequence
  Synthetic polypeptide
MKYTKQNFMMSVLGIIIYVTDLIVDIWVSVRFFHEGQYVFSALALSFMLFGTLVAQCFSYSWFKADLKKAGQESQHCFLLLHCLQGGVFTRYWFALKRGYHAAFKYDSNTSNFVEEQIDLHKEVIDRVTDLSMLRLFETYLEGCPQLILQLYILLEHGQANFSQYERPREDTTRYQSPANPKESPYQIWTVLTS

SEQ ID NO: 12661 - protein, 67 aa, Artificial Sequence
  Synthetic polypeptide
MGPAGSLLGSGQMQITLWGSLAAVAIFFVITFLIFLCSSCDREKKPRQHSGDHENLMNVHLHCKFLA

SEQ ID NO: 12662 - protein, 569 aa, Artificial Sequence; identical to SEQ ID NO: 313
  Synthetic polypeptide

SEQ ID NO: 12663 - protein, 497 aa, Artificial Sequence
  Synthetic polypeptide
MILLTFSTGRRLDFVHHSGVFFLQTLLWILCATVCGTEQYFNVEVWLQKYGYLPPTDPRMSVLRSAETMQSALAAMQQFYGINMTGKVDRNTIDWMKKPRCGVPDQTRGSSKFHIRRKRYALTGQKWQHKHITYSIKNVTPKVGDPETRKAIRRAFDVWQNVTPLTFEEVPYSELENGKRDVDITIIFASGFHGDSSPFDGEGGFLAHAYFPGPGIGGDTHFDSDEPWTLGNPNHDGNDLFLVAVHELGHALGLEHSNDPTAIMAPFYQYMETDNFKLPNDDLQGIQKIYGPPDKIPPPTRPLPTVPPHRSIPPADPRKNDRPKPPRPPTGRPSYPGAKPNICDGNFNTLAILRREMFVFKDQWFWRVRNNRVMDGYPMQITYFWRGLPPSIDAVYENSDGNFVFFKGNKYWVFKDTTLQPGYPHDLITLGSGIPPHGIDSAIWWEDVGKTYFFKGDRYWRYSEEMKTMDPGYPKPITVWKGIPESPQGAFVHKENA

SEQ ID NO: 12664 - protein, 481 aa, Artificial Sequence
  Synthetic polypeptide
MILLTFSTGRRLDFVHHSGVFFLQTLLWILCATVCGTEQYFNVEVWLQKYGYLPPTDPRMSVLRSAETMQSALAAMQQFYGINMTGKVDRNTIDWMKKPRCGVPDQTRGSSKFHIRRKRYALTGQKWQHKHITYSIKNVTPKVGDPETRKAIRRAFDVWQNVTPLTFEEVPYSELENGKRDVDITIIFASGFHGDSSPFDGEGGFLAHAYFPGPGIGGDTHFDSDEPWTLGNPNHDGNDLFLVAVHELGHALGLEHSNDPTAIMAPFYQYMETDNFKLPNDDLQGIQKIYGPPDKIPPPTRPLPTVPPHRSIPPADPRKNDRPKPPRPPTGRPSYPGAKPNICDGNFNTLAILRREMFVFKDQWFWRVRNNRVMDGYPMQITYFWRGLPPSIDAVYENSDGNFVFFKGNKYWVFKDTTLQPGYPHDLITLGSGIPPHGIDSAIWWEDVGKTYFFKGDRNSDMLNAKKKNQPKTSEEIFAEE

SEQ ID NO: 12665 - protein, 465 aa, Artificial Sequence
  Synthetic polypeptide
MILLTFSTGRRLDFVHHSGVFFLQTLLWILCATVCGTEQYFNVEVWLQKYGYLPPTDPRMSVLRSAETMQSALAAMQQFYGINMTGKVDRNTIDWMKKPRCGVPDQTRGSSKFHIRRKRYALTGQKWQHKHITYSIKNVTPKVGDPETRKAIRRAFDVWQNVTPLTFEEVPYSELENGKRDVDITIIFASGFHGDSSPFDGEGGFLAHAYFPGPGIGGDTHFDSDEPWTLGNPNHDGNDLFLVAVHELGHALGLEHSNDPTAIMAPFYQYMETDNFKLPNDDLQGIQKIYGPPDKIPPPTRPLPTVPPHRSIPPADPRKNDRPKPPRPPTGRPSYPGAKPNICDGNFNTLAILRREMFVFKDQWFWRVRNNRVMDGYPMQITYFWRGLPPSIDAVYENSDGNFVFFKGNKYWVFKDTTLQPGYPHDLITLGSGIPPHGIDSAIWWEDVGKTYFFKGDRPRKRRYK

SEQ ID NO: 12666 - protein, 46 aa, Artificial Sequence
  Synthetic polypeptide
MILLTFSTGRRLDFVHHSGVFFLQTLLWILCATVCGTEQYFNVEAQ

SEQ ID NO: 12667 - protein, 63 aa, Artificial Sequence
  Synthetic polypeptide
MRDGRYCRRAVLKPGPLSRAGYLRTGRRLDFVHHSGVFFLQTLLWILCATVCGTEQYFNVEAQ

SEQ ID NO: 12668 - protein, 142 aa, Artificial Sequence
  Synthetic polypeptide
MATRGGAGVAMAVWSLLSARAVTAFLLLFLPRFLQAQTFSFPFQQPEKCDNNQYFDISALSCVPCGANQRQDARGTSCVCLPGFQMISNNGGPAIICKKCPENMKGVTEDGWNCISCPSDLTAEGKCHCPIGHILDFIIKFF

SEQ ID NO: 12669 - protein, 132 aa, Artificial Sequence
  Synthetic polypeptide
MAVWSLLSARAVTAFLLLFLPRFLQAQTFSFPFQQPEKCDNNQYFDISALSCVPCGANQRQDARGTSCVCLPGFQMISNNGGPAIICKKCPENMKGVTEDGWNCISCPSDLTAEGKCHCPIGHILDFIIKFF

SEQ ID NO: 12670 - protein, 39 aa, Artificial Sequence
  Synthetic polypeptide
MKGVTEDGWNCISCPSDLTAEGKCHCPIGHILDFIIKFF

SEQ ID NO: 12671 - protein, 16 aa, Artificial Sequence
  Synthetic polypeptide
MSLSHWPYFRFYYKIF

SEQ ID NO: 12672 - protein, 140 aa, Artificial Sequence
  Synthetic polypeptide
  misc_feature (1)..(1): Xaa can be any naturally occurring amino acid
XRGGAGVAMAVWSLLSARAVTAFLLLFLPRFLQAQTFSFPFQQPEKCDNNQYFDISALSCVPCGANQRQDARGTSCVCLPGFQMISNNGGPAIICKKCPENMKGVTEDGWNCISCPSDLTAEGKCHCPIGHILDFIIKFF

SEQ ID NO: 12673 - protein, 828 aa, Artificial Sequence
  Synthetic polypeptide
MILQAHLHSLCLLMLYLATGYGQEGKFSGPLKPMTFSIYEGQEPSQIIFQFKANPPAVTFELTGETDNIFVIEREGLLYYNRALDRETRSTHNLQVAALDANGIIVEGPVPITIKVKDINDNRPTFLQSKYEGSVRQNSRPGKPFLYVNATDLDDPATPNGQLYYQIVIQLPMINNVMYFQINNKTGAISLTREGSQELNPAKNPSYNLVISVKDMGGQSENSFSDTTSVDIIVTENIWKAPKPVEMVENSTDPHPIKITQVRWNDPGAQYSLVDKEKLPRFPFSIDQEGDIYVTQPLDREEKDAYVFYAVAKDEYGKPLSYPLEIHVKVKDINDNPPTCPSPVTVFEVQENERLGNSIGTLTAHDRDEENTANSFLNYRIVEQTPKLPMDGLFLIQTYAGMLQLAKQSLKKQDTPQYNLTIEVSDKDFKTLCFVQINVIDINDQIPIFEKSDYGNLTLAEDTNIGSTILTIQATDADEPFTGSSKILYHIIKGDSEGRLGVDTDPHTNTGYVIIKKPLDFETAAVSNIVFKAENPEPLVFGVKYNASSFAKFTLIVTDVNEAPQFSQHVFQAKVSEDVAIGTKVGNVTAKDPEGLDISYSLRGDTRGWLKIDHVTGEIFSVAPLDREAGSPYRVQVVATEVGGSSLSSVSEFHLILMDVNDNPPRLAKDYTGLFFCHPLSAPGSLIFEATDDDQHLFRGPHFTFSLGSGSLQNDWEVSKINGTHARLSTRHTEFEEREYVVLIRINDGGRPPLEGIVSLPVTFCSCVEGSCFRPAGHQTGIPTVGMAVGILLTTLLVIDISVPGSWAFGLGLGLTPLAPLVPWTFLN

SEQ ID NO: 12674 - protein, 736 aa, Artificial Sequence
  Synthetic polypeptide
MILQAHLHSLCLLMLYLATGYGQEGKFSGPLKPMTFSIYEGQEPSQIIFQFKANPPAVTFELTGETDNIFVIEREGLLYYNRALDRETRSTHNLQVAALDANGIIVEGPVPITIKVKDINDNRPTFLQSKYEGSVRQNSRPGKPFLYVNATDLDDPATPNGQLYYQIVIQLPMINNVMYFQINNKTGAISLTREGSQELNPAKNPSYNLVISVKDMGGQSENSFSDTTSVDIIVTENIWKAPKPVEMVENSTDPHPIKITQVRWNDPGAQYSLVDKEKLPRFPFSIDQEGDIYVTQPLDREEKDAYVFYAVAKDEYGKPLSYPLEIHVKVKDINDNPPTCPSPVTVFEVQENERLGNSIGTLTAHDRDEENTANSFLNYRIVEQTPKLPMDGLFLIQTYAGMLQLAKQSLKKQDTPQYNLTIEVSDKDFKTLCFVQINVIDINDQIPIFEKSDYGNLTLAEDTNIGSTILTIQATDADEPFTGSSKILYHIIKGDSEGRLGVDTDPHTNTGYVIIKKPLDFETAAVSNIVFKAENPEPLVFGVKYNASSFAKFTLIVTDVNEAPQFSQHVFQAKVSEDVAIGTKVGNVTAKDPEGLDISYSLRGDTRGWLKIDHVTGEIFSVAPLDREAGSPYRVQVVATEVGGSSLSSVSEFHLILMDVNDNPPRLAKDYTGLFFCHPLSAPGSLIFEATDDDQHLFRGPHFTFSLGSGSLQNDWEVSKINEIATAIPAFSNHQH

SEQ ID NO: 12675 - protein, 522 aa, Artificial Sequence
  Synthetic polypeptide
MILQAHLHSLCLLMLYLATGYGQEGKFSGPLKPMTFSIYEGQEPSQIIFQFKANPPAVTFELTGETDNIFVIEREGLLYYNRALDRETRSTHNLQVAALDANGIIVEGPVPITIKVKDINDNRPTFLQSKYEGSVRQNSRPGNSIGTLTAHDRDEENTANSFLNYRIVEQTPKLPMDGLFLIQTYAGMLQLAKQSLKKQDTPQYNLTIEVSDKDFKTLCFVQINVIDINDQIPIFEKSDYGNLTLAEDTNIGSTILTIQATDADEPFTGSSKILYHIIKGDSEGRLGVDTDPHTNTGYVIIKKPLDFETAAVSNIVFKAENPEPLVFGVKYNASSFAKFTLIVTDVNEAPQFSQHVFQAKVSEDVAIGTKVGNVTAKDPEGLDISYSLRGDTRGWLKIDHVTGEIFSVAPLDREAGSPYRVQVVATEVGGSSLSSVSEFHLILMDVNDNPPRLAKDYTGLFFCHPLSAPGSLIFEATDDDQHLFRGPHFTFSLGSGSLQNDWEVSKINEIATAIPAFSNHQH

SEQ ID NO: 12676 - protein, 92 aa, Artificial Sequence
  Synthetic polypeptide
MKMVAPWTRFYSNSCCLCCHVRTGTILLGVWYLIINAVVLLILLSALADPDQYNFSSSELGGDFEFMDDAKVPFTLCHDSEASPAMWNCKSS

SEQ ID NO: 12677 - protein, 183 aa, Artificial Sequence
  Synthetic polypeptide
MTSRTRVTWPSPPRPLPVPAAAAVAFGAKGTDPAEARSSRGIEEAGPRAHGRAGREPERRRSRQQRRGGLQARRSTLLKTCARARATAPGAMKMVAPWTRFYSNSCCLCCHVRTGTILLGVWYLIINAVVLLILLSALADPDQYNFSSSELGGDFEFMDDAKVPFTLCHDSEASPAMWNCKSS

SEQ ID NO: 12678 - protein, 146 aa, Artificial Sequence
  Synthetic polypeptide
  misc_feature (1)..(1): Xaa can be any naturally occurring amino acid
XSRGIEEAGPRAHGRAGREPERRRSRQQRRGGLQARRSTLLKTCARARATAPGAMKMVAPWTRFYSNSCCLCCHVRTGTILLGVWYLIINAVVLLILLSALADPDQYNFSSSELGGDFEFMDDAKVPFTLCHDSEASPAMWNCKSS

SEQ ID NO: 12679 - protein, 328 aa, Artificial Sequence
  Synthetic polypeptide
MCIAEIDLIPRDRPFVCAPSSKTGSVTTTYCCNQDHCNKIELPTTVKSSPGLGPVELAAVIAGPVCFVCISLMLMVYICHNRTVIHHRVPNEEDPSLDRPFISEGTTLKDLIYDMTTSGSGSGLPLLVQRTIARTIVLQESIGKGRFGEVWRGKWRGEEVAVKIFSSREERSWFREAEIYQTVMLRHENILGFIAADNKDNGTWTQLWLVSDYHEHGSLFDYLNRYTVTVEGMIKLALSTASGLAHLHMEIVGTQGKPAIAHRDLKSKNILVKKNGTCCIADLGLAVRHDSATDTIDIAPNHRVGTKRCKLLESSLVFPASITVPNTW

SEQ ID NO: 12680 - protein, 320 aa, Artificial Sequence
  Synthetic polypeptide
MEAAVAAPRPRLLLLVLAAAAAAAAALLPGATALQCFCHLCTKDNFTCVTDGLCFVSVTETTDKVIHNSMCIAEIDLIPRDRPFVCAPSSKTGSVTTTYCCNQDHCNKIELPTTGLPLLVQRTIARTIVLQESIGKGRFGEVWRGKWRGEEVAVKIFSSREERSWFREAEIYQTVMLRHENILGFIAADNKDNGTWTQLWLVSDYHEHGSLFDYLNRYTVTVEGMIKLALSTASGLAHLHMEIVGTQGKPAIAHRDLKSKNILVKKNGTCCIADLGLAVRHDSATDTIDIAPNHRVGTKRCKLLESSLVFPASITVPNTW

SEQ ID NO: 12681 - protein, 401 aa, Artificial Sequence
  Synthetic polypeptide
MEAAVAAPRPRLLLLVLAAAAAAAAALLPGATALQCFCHLCTKDNFTCVTDGLCFVSVTETTDKVIHNSMCIAEIDLIPRDRPFVCAPSSKTGSVTTTYCCNQDHCNKIELPTTGPFSVKSSPGLGPVELAAVIAGPVCFVCISLMLMVYICHNRTVIHHRVPNEEDPSLDRPFISEGTTLKDLIYDMTTSGSGSGLPLLVQRTIARTIVLQESIGKGRFGEVWRGKWRGEEVAVKIFSSREERSWFREAEIYQTVMLRHENILGFIAADNKDNGTWTQLWLVSDYHEHGSLFDYLNRYTVTVEGMIKLALSTASGLAHLHMEIVGTQGKPAIAHRDLKSKNILVKKNGTCCIADLGLAVRHDSATDTIDIAPNHRVGTKRCKLLESSLVFPASITVPNTW

SEQ ID NO: 12682 - protein, 397 aa, Artificial Sequence
  Synthetic polypeptide
MEAAVAAPRPRLLLLVLAAAAAAAAALLPGATALQCFCHLCTKDNFTCVTDGLCFVSVTETTDKVIHNSMCIAEIDLIPRDRPFVCAPSSKTGSVTTTYCCNQDHCNKIELPTTVKSSPGLGPVELAAVIAGPVCFVCISLMLMVYICHNRTVIHHRVPNEEDPSLDRPFISEGTTLKDLIYDMTTSGSGSGLPLLVQRTIARTIVLQESIGKGRFGEVWRGKWRGEEVAVKIFSSREERSWFREAEIYQTVMLRHENILGFIAADNKDNGTWTQLWLVSDYHEHGSLFDYLNRYTVTVEGMIKLALSTASGLAHLHMEIVGTQGKPAIAHRDLKSKNILVKKNGTCCIADLGLAVRHDSATDTIDIAPNHRVGTKRCKLLESSLVFPASITVPNTW

SEQ ID NO: 12683 - protein, 436 aa, Artificial Sequence
  Synthetic polypeptide
MRRLSLWWLLSRVCLLLPPPCALVLAGVPSSSSHPQPCQILKRIGHAVRVGAVHLQPWTTAPRAASRAPDDSRAGAQRDEPEPGTRRSPAPSPGARWLGSTLHGRGPPGSRKPGEGARAEALWPRDALLFAVDNLNRVEGLLPYNLSLEVVMAIEAGLGDLPLLPFSSPSSPWSSDPFSFLQSVCHTVVVQGVSALLAFPQSQGEMMELDLVSLVLHIPVISIVRHEFPRESQNPLHLQLSLENSLSSDADVTVSILTMNNWYNFSLLLCQEDWNITDFLLLTQNNSKFHLGSIINITANLPSTQDLLSFLQIQLESIKNSTPTVVMFGCDMESIRRIFEITTQFGVMPPELRWVLGDSQNVEELRTEGLPLGLIAHGKTTQSVFEHYVQDAMELVARAVATATMIQPELALIPSTMNCMEVETTNLTSGQYLSRI

SEQ ID NO: 12684 - protein, 183 aa, Artificial Sequence
  Synthetic polypeptide
MGCCSSASSAAQSSKREWKPLEDRSCTDIPWLLLFILFCIGMGFICGFSIATGAAARLVSGYDSYGNICGQKNTKLEAIPNSGMDHTQRKYVFFLDPCNLDLINRKIKSVALCVAACPRQELKTLSDVQKFAEINGSALCSYNLKPSEYTTSPKSSVLCPKLPVPARSILLGRKDLNFEISLG

SEQ ID NO: 12685 - protein, 160 aa, Artificial Sequence
  Synthetic polypeptide
MGAPLLSPGWGAGAAGRRWWMLLAPLLPALLLVRPAGALVEGLYCGTRDCYEVLGVSRSAGKAEIARAYRQLARRYHPDRYRPQPGDEGPGRTPQSAEEAFLLVATAYETLKPPALASQSAEIAASARPPPRLGSEERLCLAAHRLGCEEPLCPAAQSGK

SEQ ID NO: 12686 - protein, 182 aa, Artificial Sequence
  Synthetic polypeptide
MANSAGFLGDLTTEGINKPGFYKGPAGSQVTLSSLGNQTRVLLEEQARHLLNEQEHATMAYYLDEYRGGSVSVEALVMALFKLLNTHAKFSLLSEVRGTISPQDLERFDHLVLRREIESMKARQPPGPGAGDTYSMVSYSDTGSSTGSHGTSTTVSSARRDSDTTSSSLLGGLNERMPVGPG

SEQ ID NO: 12687 - protein, 214 aa, Artificial Sequence [sequence omitted]

SEQ ID NO: 12688 - protein, 565 aa, Artificial Sequence
  Synthetic polypeptide
MNAPLDGLSVSSSSTGSLGSAAGAGGGGGAGLRLLSANVRQLHQALTALLSEAEREQFTHCLNAYHARRNVFDLVRTLRVLLDSPVKRRLLPMLRLVIPRSDQLLFDQYTAEGLYLPATTPYRQPAWGGPDSAGPGEVRLVSLRRAKAHEGLGFSIRGGSEHGVGIYVSLVEPGSLAEKEGLRVGDQILRVNDKSLARVTHAEAVKALKGSKKLVLSVYSAGRIPGGYVTNHIYTWVDPQGRSISPPSGLPQPHGGALRQQEGDRRSTLHLLQGGDEKKVNLVLGDGRSLGLTIRGGAEYGLGIYITGVDPGSEAEGSGLKVGDQILEVNGRSFLNILHDEAVRLLKSSRHLILTVKDVGRLPRARTTVDETKWIASSRIRETMANSAGFLGDLTTEGINKPGFYKGPAGSQVTLSSLGNQTRVLLEEQARHLLNEQEHATMAYYLDEYRGGSVSVEALVMALFKLLNTHAKFSLLSEVRGTISPQDLERFDHLVLRREIESMKARQPPGPGAGDTYSMVSYSDTGSSTGSHGTSTTVSSARRDSDTTSSSLLGGLNERMPVGPG

SEQ ID NO: 12689 - protein, 374 aa, Artificial Sequence
  Synthetic polypeptide
MNAPLDGLSVSSSSTGSLGSAAGAGGGGGAGLRLLSANVRQLHQALTALLSEAEREQFTHCLNAYHARRNVFDLVRTLRVLLDSPVKRRLLPMLRLVIPRSDQLLFDQYTAEGLYLPATTPYRQPAWGGPDSAGPGEVRLVSLRRAKAHEGLGFSIRGGSEHGVGIYVSLVEPGSLAEKEGLRVGDQILRVNDKSLARVTHAEAVKALKGSKKLVLSVYSAGRIPGGYVTNHIYTWVDPQGRSISPPSGLPQPHGGALRQQEGDRRSTLHLLQGGDEKKVNLVLGDGRSLGLTIRGGAEYGLGIYITGVDPGSEAEGSGLKAWWCMPIVPATWEAEVDHLSFGSRGCSEPRSSCCTPAWATGVRPCLKTNKQTK

SEQ ID NO: 12690 - protein, 327 aa, Artificial Sequence
  Synthetic polypeptide
MNAPLDGLSVSSSSTGSLGSAAGAGGGGGAGLRLLSANVRQLHQALTALLSEAEREQFTHCLNAYHARRNVFDLVRTLRVLLDSPVKRRLLPMLRLVIPRSDQLLFDQYTAEGLYLPATTPYRQPAWGGPDSAGPGEVRLVSLRRAKAHEGLGFSIRGGSEHGVGIYVSLVEPGSLAEKEGLRVGDQILRVNDKSLARVTHAEAVKALKGSKKLVLSVYSAGRIPGGYVTNHIYTWVDPQGRSISPPSGLPQPHGGALRQQEGDRRSTLHLLQGGDEKKVNLVLGDGRSLGLTIRGGAEYGLGIYITGVDPGSEAEGSGLKQPKGTD

SEQ ID NO: 12691 - protein, 223 aa, Artificial Sequence
  Synthetic polypeptide
MAAAGARLSPGPGSGLRGRPRLCFHPGPPPLLPLLLLFLLLLPPPPLLAGATAAASREPDSPCRLKTVTVSTLPALRESDIGWSGARAGAGAGTGAGAAAAAASPGSPGSAGTAAESRLLLFVRNELPGRIAVQDDLDNTELPFFTLEMSGTAADISLVHWRQQWLENGTLYFHVSMSSSGQLAQATAPTLQEPSEIVEEQMHILHISVMPQVCLYQRCEKGL

SEQ ID NO: 12692 - protein, 143 aa, Artificial Sequence
  Synthetic polypeptide
MALARPGTPDPQALASVLLLLLWAPALSLLAGTVPSEPPSACASDPCAPGTECQATESGGYTCGPMEPRGCATQPCHHGALCVPQGPDPTGFRCYCVPGFQGPRCELDIDECASRPCHHGATCRNLADRYECHCPLGYAGSLP

SEQ ID NO: 12693 - protein, 32 aa, Artificial Sequence
  Synthetic polypeptide
MGSRIKQNPETTFEVYVEVAYPRTGGTLSGGF

SEQ ID NO: 12694 - protein, 17 aa, Artificial Sequence
  Synthetic polypeptide
MLKWPIPGQVALFQVGL

SEQ ID NO: 12695 - protein, 833 aa, Artificial Sequence
  Synthetic polypeptide
MVKLDIHTLAHHLKQERLYVNSEKQLIQRLNADVLKTAEKLYRTAWIAKQQRINLDRLIITSAEASPAECCQHAKILEDTQFVDGYKQLGFQETAYGEFLSRLRENPRLIASSLVAGEKLNQENTQSVIYTVFTSLYGNCIMQEDESYLLQVLRYLIEFELKESDNPRRLLRRGTCAFSILFKLFSEGLFSAKLFLTATLHEPIMQLLVEDEDHLETDPNKLIERFSPSQQEKLFGEKGSDRFRQKVQEMVESNEAKLVALVNKFIGYLKQNTYCFPHSLRWIVSQMYKTLSCVDRLEVGEVRAMCTDLLLACFICPAVVNPEQYGIISDAPINEVARFNLMQVGRLLQQLAMTGSEEGDPRTKSSLGKFDKSCVAAFLDVVIGGRAVETPPLSSVNLLEGLSRTVVYITYSQLITLVNFMKSVMSGDQLREDRMALDNLLANLPPAKPGKSSSLEMTPYNTPQLSPATTPANKKNRLPIATRSRSRTNMLMDLHMDHEGSSQETIQEVQPEEVLVISLGTGPQLTPGMMSENEVLNMQLSDGGQGDVPVDENKLHGKPDKTLRFSLCSDNLEGISEGPSNRSNSVSSLDLEGESVSELGAGPSGSNGVEALQLLEHEQATTQDNLDDKLRKFEIRDMMGLTDDRDISETVSETWSTDVLGSDFDPNIDEDRLQEIAGAAAENMLGSLLCLPGSGSVLLDPCTGSTISETTSEAWSVEVLPSDSEAPDLKQEERLQELESCSGLGSTSDDTDVREVSSRPSTPGLSVVSGISATSEDIPNKIEDLRSECSSDFGGKDSVTSPDMDEITHDISKINKVWPGALAHTCDPSTSRG

SEQ ID NO: 12696 - protein, 812 aa, Artificial Sequence
  Synthetic polypeptide
MVKLDIHTLAHHLKQERLYVNSEKQLIQRLNADVLKTAEKLYRTAWIAKQQRINLDRLIITSAEASPAECCQHAKILEDTQFVDGYKQLGFQETAYGEFLSRLRENPRLIASSLVAGEKLNQENTQSVIYTVFTSLYGNCIMQEDESYLLQVLRYLIEFELKESDNPRRLLRRGTCAFSILFKLFSEGLFSAKLFLTATLHEPIMQLLVEDEDHLETDPNKLIERFSPSQQEKLFGEKGSDRFRQKVQEMVESNEAKLVALVNKFIGYLKQNTYCFPHSLRWIVSQMYKTLSCVDRLEVGEVRAMCTDLLLACFICPAVVNPEQYGIISDAPINEVARFNLMQVGRLLQQLAMTGSEEGDPRTKSSLGKFDKSCVAAFLDVVIGGRAVETPPLSSVNLLEGLSRTVVYITYSQLITLVNFMKSVMSGDQLREDRMALDNLLANLPPAKPGKSSSLEMTPYNTPQLSPATTPANKKNRLPIATRSRSRTNMLMDLHMDHEGSSQETIQEVQPEEVLVISLGTGPQLTPGMMSENEVLNMQLSDGGQGDVPVDENKLHGPSNRSNSVSSLDLEGESVSELGAGPSGSNGVEALQLLEHEQATTQDNLDDKLRKFEIRDMMGLTDDRDISETVSETWSTDVLGSDFDPNIDEDRLQEIAGAAAENMLGSLLCLPGSGSVLLDPCTGSTISETTSEAWSVEVLPSDSEAPDLKQEERLQELESCSGLGSTSDDTDVREVSSRPSTPGLSVVSGISATSEDIPNKIEDLRSECSSDFGGKDSVTSPDMDEITHDISKINKVWPGALAHTCDPSTSRG

SEQ ID NO: 12697 - protein, 670 aa, Artificial Sequence
  Synthetic polypeptide
  misc_feature (1)..(1): Xaa can be any naturally occurring amino acid
XLRRGTCAFSILFKLFSEGLFSAKLFLTATLHEPIMQLLVEDEDHLETDPNKLIERFSPSQQEKLFGEKGSDRFRQKVQEMVESNEAKLVALVNKFIGYLKQNTYCFPHSLRWIVSQMYKTLSCVDRLEVGEVRAMCTDLLLACFICPAVVNPEQYGIISDAPINEVARFNLMQVGRLLQQLAMTGSEEGDPRTKSSLGKFDKSCVAAFLDVVIGGRAVETPPLSSVNLLEGLSRTVVYITYSQLITLVNFMKSVMSGDQLREDRMALDNLLANLPPAKPGKSSSLEMTPYNTPQLSPATTPANKKNRLPIGQQLAAITAWDSSATNITSHITVVTPFATRSRSRTNMLMDLHMDHEGSSQETIQEVQPEEVLVISLGTGPQLTPGMMSENEVLNMQLSDGGQGDVPVDENKLHGPSNRSNSVSSLDLEGESVSELGAGPSGSNGVEALQLLEHEQATTQDNLDDKLRKFEIRDMMGLTDDRDISETVSETWSTDVLGSDFDPNIDEDRLQEIAGAAAENMLGSLLCLPGSGSVLLDPCTGSTISETTSEAWSVEVLPSDSEAPDLKQEERLQELESCSGLGSTSDDTDVREVSSRPSTPGLSVVSGISATSEDIPNKIEDLRSECSSDFGGKDSVTSPDMDEITHDISKINKVWPGALAHTCDPSTSRG

SEQ ID NO: 12698 - protein, 696 aa, Artificial Sequence
  Synthetic polypeptide
  misc_feature (1)..(1): Xaa can be any naturally occurring amino acid
XNCIMQEDESYLLQVLRYLIEFELKESDNPRRLLRRGTCAFSILFKLFSEGLFSAKLFLTATLHEPIMQLLVEDEDHLETDPNKLIERFSPSQQEKLFGEKGSDRFRQKVQEMVESNEAKLVALVNKFIGYLKQNTYCFPHSLRWIVSQMYKTLSCVDRLEVGEVRAMCTDLLLACFICPAVVNPEQYGIISDAPINEVARFNLMQVGRLLQQLAMTGSEEGDPRTKSSLGKFDKSCVAAFLDVVIGGRAVETPPLSSVNLLEGLSRTVVYITYSQLITLVNFMKSVMSGDQLREDRMALDNLLANLPPAKPGKSSSLEMTPYNTPQLSPATTPANKKNRLPIATRSRSRTNMLMDLHMDHEGSSQETIQEVQPEEVLVISLGTGPQLTPGMMSENEVLNMQLSDGGQGDVPVDENKLHGKPDKTLRFSLCSDNLEGISEGPSNRSNSVSSLDLEGESVSELGAGPSGSNGVEALQLLEHEQATTQDNLDDKLRKFEIRDMMGLTDDRDISETVSETWSTDVLGSDFDPNIDEDRLQEIAGAAAENMLGSLLCLPGSGSVLLDPCTGSTISETTSEAWSVEVLPSDSEAPDLKQEERLQELESCSGLGSTSDDTDVREVSSRPSTPGLSVVSGISATSEDIPNKIEDLRSECSSDFGGKDSVTSPDMDEITHDISKINKVWPGALAHTCDPSTSRG

SEQ ID NO: 12699 - protein, 415 aa, Artificial Sequence
  Synthetic polypeptide
MAFLDNPTIILAHIRQSHVTSDDTGMCEMVLIDHDVDLEKIHPPSMPGDSGSEIQGSNGETQGYVYAQSVDITSSWDFGIRRRSNTAQRLERLRKERQNQIKCKNIQWKERNSKQSAQELKSLFEKKSLKEKPPISGKQSILSVRLEQCPLQLNNPFNEYSKFDGKGHVGTTATKKIDVYLPLHSSQDRLLPMTVVTMASARVQDLIGLICWQYTSEGREPKLNDNVSAYCLHIAEDDGEVDTDFPPLDSNEPIHKFGFSTLALVEKYSSPGLTSKESLFVRINAAHGFSLIQVDNTKVTMKEILLKAVKRRKGSQKVSGPQYRLEKQSEPNVAVDLDSTLESQSAWEFCLVRENSISGDKVEIDPVTNQKASTKFWIKQKPISIDSDLLCACDLAEEKSPTCRVPAIAGACRHA

SEQ ID NO: 12700 - protein, 462 aa, Artificial Sequence
  Synthetic polypeptide
MAFLDNPTIILAHIRQSHVTSDDTGMCEMVLIDHDVDLEKIHPPSMPGDSGSEIQGSNGETQGYVYAQSVDITSSWDFGIRRRSNTAQRLERLRKERQNQIKCKNIQWKERNSKQSAQELKSLFEKKSLKEKPPISGKQSILSVRLEQCPLQLNNPFNEYSKFDGKGHVGTTATKKIDVYLPLHSSQDRLLPMTVVTMASARVQDLIGLICWQYTSEGREPKLNDNVSAYCLHIAEDDGEVDTDFPPLDSNEPIHKFGFSTLALVEKYSSPGLTSKESLFVRINAAHGFSLIQVDNTKVTMKEILLKAVKRRKGSQKVSGPQYRLEKQSEPNVAVDLDSTLESQSAWEFCLVRENSSRADGVFEEDSQIDIATVQDMLSSHHYKSFKVSMIHRLRFTTDVQLGISGDKVEIDPVTNQKASTKFWIKQKPISIDSDLLCACDLAEEKSPTCRVPAIAGACRHA

SEQ ID NO: 12701 - protein, 426 aa, Artificial Sequence
  Synthetic polypeptide
MAFLDNPTIILAHIRQSHVTSDDTGMCEMVLIDHDVDLEKIHPPSMPGDSGSEIQGSNGETQGYVYAQSVDITSSWDFGIRRRSNTAQRLERLRKERQNQIKCKNIQWKERNSKQSAQELKSLFEKKSLKEKPPISGKQSILSVRLEQCPLQLNNPFNEYSKFDGKGHVGTTATKKIDVYLPLHSSQDRLLPMTVVTMASARVQDLIGLICWQYTSEGREPKLNDNVSAYCLHIAEDDGEVDTDFPPLDSNEPIHKFGFSTLALVEKYSSPGLTSKESLFVRINAAHGFSLIQVDNTKVTMKEILLKAVKRRKGSQKVSGSRADGVFEEDSQIDIATVQDMLSSHHYKSFKVSMIHRLRFTTDVQLGISGDKVEIDPVTNQKASTKFWIKQKPISIDSDLLCACDLAEEKSPTCRVPAIAGACRHA

SEQ ID NO: 12702 - protein, 175 aa, Artificial Sequence
  Synthetic polypeptide
MTVVTMASARVQDLIGLICWQYTSEGREPKLKNAAHGFSLIQVDNTKVTMKEILLKAVKRRKGSQKVSGSRADGVFEEDSQIDIATVQDMLSSHHYKSFKVSMIHRLRFTTDVQLGISGDKVEIDPVTNQKASTKFWIKQKPISIDSDLLCACDLAEEKSPTCRVPAIAGACRHA

SEQ ID NO: 12703 - protein, 270 aa, Artificial Sequence
  Synthetic polypeptide
MTVVTMASARVQDLIGLICWQYTSEGREPKLNDNVSAYCLHIAEDDGEVDTDFPPLDSNEPIHKFGFSTLALVEKYSSPGLTSKESLFVRINAAHGFSLIQVDNTKVTMKEILLKAVKRRKGSQKVSGPQYRLEKQSEPNVAVDLDSTLESQSAWEFCLVRENSSRADGVFEEDSQIDIATVQDMLSSHHYKSFKVSMIHRLRFTTDVQLGISGDKVEIDPVTNQKASTKFWIKQKPISIDSDLLCACDLAEEKSPTCRVPAIAGACRHA

SEQ ID NO: 12704 - protein, 234 aa, Artificial Sequence
  Synthetic polypeptide
MTVVTMASARVQDLIGLICWQYTSEGREPKLNDNVSAYCLHIAEDDGEVDTDFPPLDSNEPIHKFGFSTLALVEKYSSPGLTSKESLFVRINAAHGFSLIQVDNTKVTMKEILLKAVKRRKGSQKVSGSRADGVFEEDSQIDIATVQDMLSSHHYKSFKVSMIHRLRFTTDVQLGISGDKVEIDPVTNQKASTKFWIKQKPISIDSDLLCACDLAEEKSPTCRVPAIAGACRHA

SEQ ID NO: 12705 - protein, 322 aa, Artificial Sequence
  Synthetic polypeptide
MAFLDNPTIILAHIRQSHVTSDDTGMCEMVLIDHDVDLEKIHPPSMPGDSGSEIQGSNGETQGYVYAQSVDITSSWDFGIRRRSNTAQRLERLRKERQNQIKCKNIQWKERNSKQSAQELKSLFEKKSLKEKPPISGKQSILSVRLEQCPLQLNNPFNEYSKFDGKGHVGTTATKKIDVYLPLHSSQDRLLPMTVVTMASARVQDLIGLICWQYTSEGREPKLNDNVSAYCLHIAEDDGEVDTDFPPLDSNEPIHKFGFSTLALVEKYSSPGLTSKESLFVRINAAHGFSLIQVDNTKVTMKEILLKAVKRRKGSQKVSALL

SEQ ID NO: 12706 - protein, 71 aa, Artificial Sequence
  Synthetic polypeptide
MTVVTMASARVQDLIGLICWQYTSEGREPKLKNAAHGFSLIQVDNTKVTMKEILLKAVKRRKGSQKVSALL

SEQ ID NO: 12707 - protein, 130 aa, Artificial Sequence
  Synthetic polypeptide
MTVVTMASARVQDLIGLICWQYTSEGREPKLNDNVSAYCLHIAEDDGEVDTDFPPLDSNEPIHKFGFSTLALVEKYSSPGLTSKESLFVRINAAHGFSLIQVDNTKVTMKEILLKAVKRRKGSQKVSALL

SEQ ID NO: 12708 - protein, 320 aa, Artificial Sequence
  Synthetic polypeptide
MAFLDNPTIILAHIRQSHVTSDDTGMCEMVLIDHDVDLEKIHPPSMPGDSGSEIQGSNGETQGYVYAQSVDITSSWDFGIRRRSNTAQRLERLRKERQNQIKCKNIQWKERNSKQSAQELKSLFEKKSLKEKPPISGKQSILSVRLEQCPLQLNNPFNEYSKFDGKGHVGTTATKKIDVYLPLHSSQDRLLPMTVVTMASARVQDLIGLICWQYTSEGREPKLNDNVSAYCLHIAEDDGEVDTDFPPLDSNEPIHKFGFSTLALVEKYSSPGLTSKESLFVRMSGAVAHACNPSTLGDRGRPGFGRPRRVKSSKPAWPTW

SEQ ID NO: 12709 - protein, 128 aa, Artificial Sequence
  Synthetic polypeptide
MTVVTMASARVQDLIGLICWQYTSEGREPKLNDNVSAYCLHIAEDDGEVDTDFPPLDSNEPIHKFGFSTLALVEKYSSPGLTSKESLFVRMSGAVAHACNPSTLGDRGRPGFGRPRRVKSSKPAWPTW

SEQ ID NO: 12710 - protein, 99 aa, Artificial Sequence
  Synthetic polypeptide
EQCPLQLNNPFNEYSKFDGKARWLTPVIPALGRPRQPDHLRSGVQAATSPEVRSSRTAWPTWQTPVSTKNTKNSRAWWQVPIIPATREAEAGESLQPGR

SEQ ID NO: 12711 - protein, 245 aa, Artificial Sequence
  Synthetic polypeptide
MAFLDNPTIILAHIRQSHVTSDDTGMCEMVLIDHDVDLEKIHPPSMPGDSGSEIQGSNGETQGYVYAQSVDITSSWDFGIRRRSNTAQRLERLRKERQNQIKCKNIQWKERNSKQSAQELKSLFEKKSLKEKPPISGKQSILSVRLEQCPLQLNNPFNEYSKFDGKARWLTPVIPALGRPRQPDHLRSGVQAATSPEVRSSRTAWPTWQTPVSTKNTKNSRAWWQVPIIPATREAEAGESLQPGR

SEQ ID NO: 12712 - protein, 80 aa, Artificial Sequence
  Synthetic polypeptide
MYKRNGLMASVLVTSATPQGSSSSDSLEGQSCDYASKSYDAVVFDVLKVTPEEFASQITLMDIPVFKAIQPEMLLKSGHF

SEQ ID NO: 12713 - protein, 222 aa, Artificial Sequence
  Synthetic polypeptide
MYKRNGLMASVLVTSATPQGSSSSDSLEGQSCDYASKSYDAVVFDVLKVTPEEFASQITLMDIPVFKAIQPEELASCGWSKKEKHSLAPNVVAFTRRFNQVSFWVVREILTAQTLKIRAEILSHFVKIAKKLLELNNLHSLMSVVSALQSAPIFRLTKTWALLNRKDKTTFEKLDYLMSKEDNYKRTREYIRSLKMVPSIPYLGIQLLCVWQSCEEARVARD

SEQ ID NO: 12714 - protein, 442 aa, Artificial Sequence
  Synthetic polypeptide
MGDVLSTHLDDARRQHIAEKTGKILTEFLQFYEDQYGVALFNSMRHEIEGTGLPQAQLLWRKVPLDERIVFSGNLFQHQEDSKKWRNRFSLVPHNYGLVLYENKAAYERQVPPRAVINSAGYKILTSVDQYLELIGNSLPGTTAKSGSAPILKCPTQFPLILWHPYARHYYFCMMTEAEQDKWQAVLQDCIRHCNNGIPEDSKVEGPAFTDAIRMYRQSKELYGTWEMLCGNEVQILSNLVMEELGPELKAELGPRLKGKPQERQRQWIQISDAVYHMVYEQAKARFEEVLSKVQQVQPAMQAVIRTDMDQIITSKEHLASKIRAFILPKAEVCVRNHVQPYIPSILEALMVPTSQGFTEVRDVFFKEVTDMNLNVINEGGIDKLGEYMEKLSRLAYHPLKMQSCYEKMESLRLDGLQQRFDVSSTSVFKQRAQIHMREVSA

SEQ ID NO: 12715 - protein, 429 aa, Artificial Sequence
  Synthetic polypeptide
MGWMGEKTGKILTEFLQFYEDQYGVALFNSMRHEIEGTGLPQAQLLWRKVPLDERIVFSGNLFQHQEDSKKWRNRFSLVPHNYGLVLYENKAAYERQVPPRAVINSAGYKILTSVDQYLELIGNSLPGTTAKSGSAPILKCPTQFPLILWHPYARHYYFCMMTEAEQDKWQAVLQDCIRHCNNGIPEDSKVEGPAFTDAIRMYRQSKELYGTWEMLCGNEVQILSNLVMEELGPELKAELGPRLKGKPQERQRQWIQISDAVYHMVYEQAKARFEEVLSKVQQVQPAMQAVIRTDMDQIITSKEHLASKIRAFILPKAEVCVRNHVQPYIPSILEALMVPTSQGFTEVRDVFFKEVTDMNLNVINEGGIDKLGEYMEKLSRLAYHPLKMQSCYEKMESLRLDGLQQRFDVSSTSVFKQRAQIHMREVSA

SEQ ID NO: 12716 - protein, 20 aa, Artificial Sequence
  Synthetic polypeptide
MGDVLSTHLDDARRQHIAGW

SEQ ID NO: 12717 - protein, 20 aa, Artificial Sequence
  Synthetic polypeptide
MGWMGASSRGPGTQVLTTHC

SEQ ID NO: 12718 - protein, 20 aa, Artificial Sequence
  Synthetic polypeptide
MGWMGDYNLYEDEDRDFLAY

SEQ ID NO: 12719 - protein, 32 aa, Artificial Sequence
  Synthetic polypeptide
MGWMGEAVRTVGGRKVLGVTPGLWSISINGSS

SEQ ID NO: 12720 - protein, 28 aa, Artificial Sequence
  Synthetic polypeptide
MGWMGASVFSPVKWVFPKSCDHSMRQKL

SEQ ID NO: 12721 - protein, 18 aa, Artificial Sequence
  Synthetic polypeptide
MTEGTKKTSKKCSGGSRL

SEQ ID NO: 12722 - protein, 455 aa, Artificial Sequence
  Synthetic polypeptide
MAALAPVGSPASRGPRLAAGLRLLPMLGLLQLLAEPGLGRVHHLALKDDVRHKVHLNTFGFFKDGYMVVNVSSLSLNEPEDKDVTIGFSLDRTKNDGFSSYLDEDVNYCILKKQSVSVTLLILDISRSEVRVKSPPEAGTQLPKIIFSRDEKVLGQSQEPNVNPASAGNQTQKTQDGGKSKRSTVDSKAMGEKSFSVHNNGGAVSFQFFFNISTDDQEGLYSLYFHKCLGKELPSDKFTFSLDIEITEKNPDSYLSAGEIPLPKLYISMAFFFFLSGTIWIHILRKRRNDVFKIHWLMAALPFTKSLSLVFHAIDYHYISSQGFPIEGWAVVYYITHLLKGALLFITIALIGTGWAFIKHILSDKDKKIFMIVIPLQVLANVAYIIIESTEEGTTEYGLWKDSLFLVDLLCCGAILFPVVWSIRHLQEASATDGKGDSMGPLQQRANLRAGSRIG

SEQ ID NO: 12723 - protein, 40 aa, Artificial Sequence
  Synthetic polypeptide
MATITEKEVQQCCLEGRDKDSEAVRHGANGKAAVRDKWGL

SEQ ID NO: 12724 - protein, 58 aa, Artificial Sequence
  Synthetic polypeptide
MGKSNSKLKPEVVEELTRKTYFTEKEVQQCCLEGRDKDSEAVRHGANGKAAVRDKWGL

SEQ ID NO: 12725 - protein, 292 aa, Artificial Sequence
  Synthetic polypeptide
MLHLLALFLHCLPLASGDYDICKSWVTTDEGPTWEFYACQPKVMRLKDYVKVKVEPSGITCGDPPERFCSHENPYLCSNECDASNPDLAHPPRLMFDKEEEGLATYWQSITWSRYPSPLEANITLSWNKTVELTDDVVMTFEYGRPTVMVLEKSLDNGRTWQPYQFYAEDCMEAFGMSARRARDMSSSSAHRVLCTEEYSRWAGSKKEKHVRFEVRDRFAIFAGPDLRNMDNLYTRLESAKGLKEFFTLTDLRMRLLRPALGGTYVQRENLYKYFYAISNIEVIGRCGSGCL

SEQ ID NO: 12726 - protein, 234 aa, Artificial Sequence
  Synthetic polypeptide
MGLRIHFVVDPHGWCCMGLIVFVWLYNIVLIPKIVLFPHYEEGHIPGILIIIFYGISIFCLVALVRASITDPGRLPENPKIPHGEREFWELCNKCNLMRPKRSHHCSRCGHCVRRMDHHCPWINNCVGEDNHWLFLQLCFYTELLTCYALMFSFCHYYYFLPLKKRNLDLFVFRHELAIMRLAAFMGITMLVGITGLFYTQLIGIITDTTSIEKMSNCCEDIHVTCLLLLCLPS

SEQ ID NO: 12727 - protein, 266 aa, Artificial Sequence; identical to SEQ ID NO: 744
  Synthetic polypeptide

SEQ ID NO: 12728 - protein, 226 aa, Artificial Sequence
  Synthetic polypeptide
MGLRIHFVVDPHGWCCMGLIVFVWLYNIVLIPKIVLFPHYEEGHIPGILIIIFYGISIFCLVALVRASITDPGRLPENPKIPHGEREFWELCNKCNLMRPKRSHHCSRCGHCVRRMDHHCPWINNCVGEDNHWLFLQLCFYTELLTCYALMFSFCHYYYFLPLKKRNLDLFVFRHELAIMRLAAFMGITMLVGITGLFYTQLIGIITPPQPSAATTLANQKLSTWR

SEQ ID NO: 12729 - protein, 275 aa, Artificial Sequence
  Synthetic polypeptide
MGATIECWDPETKYPLPVFSTFVLTGSSAKKVYGAAIQFYEPYSRELLSEKQLMHLGLLTPVERKMVSKSINTNKCICLLSHWPFFEAFRKFLMFIYKLSVSGPHPLPIEKHISHFMQNIPFPSPQRPRILVQLSVHDALILSQPVSTPLPLSGANFSTLLMNLGPENCATLLLFVLLESKILLHSLRPAVLTGVAEAVVAMIFPFQWQCPYIPLCPLSLAAVLSAPLPFIVGVDSRYFDLHDPPQDVVCIDLDTNMLYVPGVVAHACNPSTLRG

SEQ ID NO: 12730 - protein, 511 aa, Artificial Sequence
  Synthetic polypeptide
MIEDKGPRVTDYFVVAGLTDTSTLLDQEINRLDTKSTGPKAPITDIAIIIKSAGETVPEGYTCVEATPSALQANLNYGSLKSPELFLCYKRGRDKPPLTDIGVLYEGKERLIPGCEVILATPYGRCANVNNSSTTSQRIFITYRRAPPVRPQNSLAVTDICVIVTSKGETPPHTFCKVDKNLNCGMWGSSVFLCYKKSVPASNAIAYKAGLIFRYPEEDYESFPLSESDVPLFCLPMGATIECWDPETKYPLPVFSTFVLTGSSAKKVYGAAIQFYEPYSRELLSEKQLMHLGLLTPVERKMVSKSINTNKCICLLSHWPFFEAFRKFLMFIYKLSVSGPHPLPIEKHISHFMQNIPFPSPQRPRILVQLSVHDALILSQPVSTPLPLSGANFSTLLMNLGPENCATLLLFVLLESKILLHSLRPAVLTGVAEAVVAMIFPFQWQCPYIPLCPLSLAAVLSAPLPFIVGVDSRYFDLHDPPQDVVCIDLDTNMLYVPGVVAHACNPSTLRG

SEQ ID NO: 12731 - protein, 284 aa, Artificial Sequence
  Synthetic polypeptide
  misc_feature (1)..(1): Xaa can be any naturally occurring amino acid
XDVPLFCLPMGATIECWDPETKYPLPVFSTFVLTGSSAKKVYGAAIQFYEPYSRELLSEKQLMHLGLLTPVERKMVSKSINTNKCICLLSHWPFFEAFRKFLMFIYKLSVSGPHPLPIEKHISHFMQNIPFPSPQRPRILVQLSVHDALILSQPVSTPLPLSGANFSTLLMNLGPENCATLLLFVLLESKILLHSLRPAVLTGVAEAVVAMIFPFQWQCPYIPLCPLSLAAVLSAPLPFIVGVDSRYFDLHDPPQDVVCIDLDTNMLYVPGVVAHACNPSTLRG

SEQ ID NO: 12732 - protein, 42 aa, Artificial Sequence
  Synthetic polypeptide
MATLPSAERRAFALKINRPVYPTANLTATWSPHENLKLSMPK

SEQ ID NO: 12733 - protein, 180 aa, Artificial Sequence
  Synthetic polypeptide
MATLPSAERRAFALKINRYSSAEIRKQFTLPPNLGQYHRQSISTSGFPSLQLPQFYDPVEPVDFEGLLMTHLNSLDVQLAQELGDFTDDDLDVVFTPKECRTLQPSLPEEGVELDPHVRDCVQTYIREWLIVNRKNQGSPEICGFKKTGSRKDFHKTLPKQTFESETLECSEPAAQHYSQ

SEQ ID NO: 12734 - protein, 112 aa, Artificial Sequence
  Synthetic polypeptide
MTHLNSLDVQLAQELGDFTDDDLDVVFTPKECRTLQPSLPEEGVELDPHVRDCVQTYIREWLIVNRKNQGSPEICGFKKTGSRKDFHKTLPKQTFESETLECSEPAAQHYSQ

SEQ ID NO: 12735 - protein, 189 aa, Artificial Sequence
  Synthetic polypeptide
MATLPSAERRAFALKINRYSSAEIRKQFTLPPNLGQYHRQSISTSGFPSLQLPQFYDPVEPVDFEGLLMTHLNSLDVQLAQELGDFTDDDLDVVFTPKECRTLQPSLPEEGVELDPHVRDCVQTYIREWLIVNRKNQGSPEICGFKKTGSRKDFHKTLPKQTFESETLECSEPAAQLEERILNVPNTKK

SEQ ID NO: 12736 - protein, 121 aa, Artificial Sequence
  Synthetic polypeptide
MTHLNSLDVQLAQELGDFTDDDLDVVFTPKECRTLQPSLPEEGVELDPHVRDCVQTYIREWLIVNRKNQGSPEICGFKKTGSRKDFHKTLPKQTFESETLECSEPAAQLEERILNVPNTKK

SEQ ID NO: 12737 - protein, 29 aa, Artificial Sequence
  Synthetic polypeptide
MNDHNAYRCFSQPRHISVAMDKFGFSMKK

SEQ ID NO: 12738 - protein, 282 aa, Artificial Sequence
  Synthetic polypeptide
MRLREPLLSGSAAMPGASLQRACRLLVAVCALHLGVTLVYYLAGRDLSRLPQLVGVSTPLQGGSNSAAAIGQSSGELRTGGARPPPPLGASSQPRPGGDSSPVVDSGPGPASNLTSVPVPHTTALSLPACPEESPLLVGPMLIEFNMPVDLELVAKQNPNVKMGGRYAPRDCVSPHKVAIIIPFRNRQEHLKYWLYYLHPVLQRQQLDYGIYVINQAGDTIFNRAKLLNVGFQEALKDYDYTCFVFSDVDLIPMNDHNAYRCFSQPRHISVAMDKFGFSMKK

SEQ ID NO: 12739 - protein, 99 aa, Artificial Sequence
  Synthetic polypeptide
MATVRASLRGALLLLLAVAGVAEVAGGLAPGSAGALCCNHSKDNQMCRDVCEQHSWILPSQLFAGNHEGLSDMCNDLLFTETPNCNCITSYLEVSHLAW

SEQ ID NO: 12740 - protein, 690 aa, Artificial Sequence
  Synthetic polypeptide
MATVRASLRGALLLLLAVAGVAEVAGGLAPGSAGALCCNHSKDNQMCRDVCEQIFSSKSESRLKHLLQRAPDYCPETMVEIWNCMNSSLPGVFKKSDGWVGLGCCELAIALECRQACKQASSKNDISKVCRKEYENALFSCISRNEMGSVCCSYAGHHTNCREYCQAIFRTDSSPGPSQIKAVENYCASISPQLIHCVNNYTQSYPMRNPTDSLYCCDRAEDHACQNACKRILMSKKTEMEIVDGLIEGCKTQPLPQDPLWQCFLESSQSVHPGVTVHPPPSTGLDGAKLHCCSKANTSTCRELCTKLYSMSWGNTQSWQEFDRFCEYNPVEVSMLTCLADVREPCQLGCRNLTYCTNFNNRPTELFRSCNAQSDQGAMNDMKLWEKGSIKMPFINIPVLDIKKCQPEMWKAIACSLQIKPCHSKSRGSIICKSDCVEILKKCGDQNKFPEDHTAESICELLSPTDDLKNCIPLDTYLRPSTLGNIVEEVTHPCNPNPCPANELCEVNRKGCPSGDPCLPYFCVQGCKLGEASDFIVRQGTLIQVPSSAGEVGCYKICSCGQSGLLENCMEMHCIDLQKSCIVGGKRKSHGTSFSIDCNVCSCFAGNLVCSTRLCLSEHSSEDDRRTFTGLPCNCADQFVPVCGQNGRTYPSACIARCVGLQDHQFEFGSCMSKDPCNPNPCQKNQSLSE

SEQ ID NO: 12741 - protein, 705 aa, Artificial Sequence
  Synthetic polypeptide
MATVRASLRGALLLLLAVAGVAEVAGGLAPGSAGALCCNHSKDNQMCRDVCEQIFSSKSESRLKHLLQRAPDYCPETMVEIWNCMNSSLPGVFKKSDGWVGLGCCELAIALECRQACKQASSKNDISKVCRKEYENALFSCISRNEMGSVCCSYAGHHTNCREYCQAIFRTDSSPGPSQIKAVENYCASISPQLIHCVNNYTQSYPMRNPTDSLYCCDRAEDHACQNACKRILMSKKTEMEIVDGLIEGCKTQPLPQDPLWQCFLESSQSVHPGVTVHPPPSTGLDGAKLHCCSKANTSTCRELCTKLYSMSWGNTQSWQEFDRFCEYNPVEVSMLTCLADVREPCQLGCRNLTYCTNFNNRPTELFRSCNAQSDQGAMNDMKLWEKGSIKMPFINIPVLDIKKCQPEMWKAIACSLQIKPCHSKSRGSIICKSDCVEILKKCGDQNKFPEDHTAESICELLSPTDDLKNCIPLDTYLRPSTLGNIVEEVTHPCNPNPCPANELCEVNRKGCPSGDPCLPYFCVQGCKLGEASDFIVRQGTLIQVPSSAGEVGCYKICSCGQSGLLENCMEMHCIDLQKSCIVGGKRKSHGTSFSIDCNVCSCFAGNLVCSTRLCLSEHSSEDDRRTFTGLPCNCADQFVPVCGQNGRTYPSACIARCVGLQDHQFEFGSCMSKDPCNPNPCQKNQRQMTHWKEYHRESADVLVI

SEQ ID NO: 12742 - protein, 455 aa, Artificial Sequence
  Synthetic polypeptide
MAKWLNKYFSLGNSKTKSPPQPPRPDYREQRRRGERPSQPPQAVPQASSAASASCGPATASCFSASSGSLPDDSGSTSDLIRAYRAQKERDFEDPYNGPGSSLRKLRAMCRLDYCGGSGEPGGVQRAFSASSASGAAGCCCASSGAGAAASSSSSSGSPHLYRSSSERRPATPAEVRYISPKHRLIKVESAAGGGAGDPLGGACAGGRTWSPTACGGKKLLNKCAASAAEESGAGKKDKVTIADDYSDPFDAKNDLKSKAGKGESAGYMEPYEAQRIMTEFQRQESVRSQHKGIQLYDTPYEPEGQSVDSDSESTVSPRLRESKLPQDDDRPADEYDQPWEWNRVTIPALAAQFNGNEKRQSSPSPSRDRRRQLRAPGGGFKPIKHGSPEFCGILGERVDPAVPLEKQIWYHGAISRGDAENLLRLCKECSYLVRNSQTSKHDYSLSLRKSSYQN

SEQ ID NO: 12743 - protein, 880 aa, Artificial Sequence
  Synthetic polypeptide
MATLPSAERRAFALKINRYSSAEIRKQFTLPPNLGQYHRQSISTSGFPSLQLPQFYDPVEPVDFEGLLMTHLNSLDVQLAQELGDFTDDDLDVVFTPKECRTLQPSLPEEGVELDPHVRDCVQTYIREWLIVNRKNQGSPEICGFKKTGSRKDFHKTLPKQTFESETLECSEPAAQAGPRHLNVLCDVSGKGPVTACDFDLRSLQPDKRLENLLQQVSAEDFEKQNEEARRTNRQAELFALYPSVDEEDAVEIRPVPECPKEHLGNRILVKLLTLKFEIEIEPLFASIALYDVKERKKISENFHCDLNSDQFKGFLRAHTPSVAASSQARSAVFSVTYPSSDIYLVVKIEKVLQQGEIGDCAEPYTVIKESDGGKSKEKIEKLKLQAESFCQRLGKYRMPFAWAPISLSSFFNVSTLEREVTDVDSVVGRSSVGERRTLAQSRRLSERALSLEENGVGSNFKTSTLSVSSFFKQEGDRLSDEDLFKFLADYKRSSSLQRRVKSIPGLLRLEISTAPEIINCCLTPEMLPVKPFPENRTRPHKEILEFPTREVYVPHTVYRNLLYVYPQRLNFVNKLASARNITIKIQFMCGEDASNAMPVIFGKSSGPEFLQEVYTAVTYHNKSPDFYEEVKIKLPAKLTVNHHLLFTFYHISCQQKQGASVETLLGYSWLPILLNERLQTGSYCLPVALEKLPPNYSMHSAEKVPLQNPPIKWAEGHKGVFNIEVQAVSSVHTQDNHLEKFFTLCHSLESQVTFPIRVLDQKISEMALEHELKLSIICLNSSRLEPLVLFLHLVLDKLFQLSVQPMVIAGQTANFSQFAFESVVAIANSLHNSKDLSKDQHGRNCLLASYVHYVFRLPEVQRDVPKSGAHICNPSTLGG

SEQ ID NO: 12744 - protein, 347 aa, Artificial Sequence
  Synthetic polypeptide
MCGEDASNAMPVRRETNICLKSGWAAHPCHFTQVRDSSVYKVRLFQANTAQHVQGLLCPGYQWGNRVIFGKSSGPEFLQEVYTAVTYHNKSPDFYEEVKIKLPAKLTVNHHLLFTFYHISCQQKQGASVETLLGYSWLPILLNERLQTGSYCLPVALEKLPPNYSMHSAEKVPLQNPPIKWAEGHKGVFNIEVQAVSSVHTQDNHLEKFFTLCHSLESQVTFPIRVLDQKISEMALEHELKLSIICLNSSRLEPLVLFLHLVLDKLFQLSVQPMVIAGQTANFSQFAFESVVAIANSLHNSKDLSKDQHGRNCLLASYVHYVFRLPEVQRDVPKSGAHICNPSTLGG

SEQ ID NO: 12745 - protein, 182 aa, Artificial Sequence
  Synthetic polypeptide
MHSAEKVPLQNPPIKWAEGHKGVFNIEVQAVSSVHTQDNHLEKFFTLCHSLESQVTFPIRVLDQKISEMALEHELKLSIICLNSSRLEPLVLFLHLVLDKLFQLSVQPMVIAGQTANFSQFAFESVVAIANSLHNSKDLSKDQHGRNCLLASYVHYVFRLPEVQRDVPKSGAHICNPSTLGG

SEQ ID NO: 12746 - protein, 812 aa, Artificial Sequence
  Synthetic polypeptide
MTHLNSLDVQLAQELGDFTDDDLDVVFTPKECRTLQPSLPEEGVELDPHVRDCVQTYIREWLIVNRKNQGSPEICGFKKTGSRKDFHKTLPKQTFESETLECSEPAAQAGPRHLNVLCDVSGKGPVTACDFDLRSLQPDKRLENLLQQVSAEDFEKQNEEARRTNRQAELFALYPSVDEEDAVEIRPVPECPKEHLGNRILVKLLTLKFEIEIEPLFASIALYDVKERKKISENFHCDLNSDQFKGFLRAHTPSVAASSQARSAVFSVTYPSSDIYLVVKIEKVLQQGEIGDCAEPYTVIKESDGGKSKEKIEKLKLQAESFCQRLGKYRMPFAWAPISLSSFFNVSTLEREVTDVDSVVGRSSVGERRTLAQSRRLSERALSLEENGVGSNFKTSTLSVSSFFKQEGDRLSDEDLFKFLADYKRSSSLQRRVKSIPGLLRLEISTAPEIINCCLTPEMLPVKPFPENRTRPHKEILEFPTREVYVPHTVYRNLLYVYPQRLNFVNKLASARNITIKIQFMCGEDASNAMPVIFGKSSGPEFLQEVYTAVTYHNKSPDFYEEVKIKLPAKLTVNHHLLFTFYHISCQQKQGASVETLLGYSWLPILLNERLQTGSYCLPVALEKLPPNYSMHSAEKVPLQNPPIKWAEGHKGVFNIEVQAVSSVHTQDNHLEKFFTLCHSLESQVTFPIRVLDQKISEMALEHELKLSIICLNSSRLEPLVLFLHLVLDKLFQLSVQPMVIAGQTANFSQFAFESVVAIANSLHNSKDLSKDQHGRNCLLASYVHYVFRLPEVQRDVPKSGAHICNPSTLGG

SEQ ID NO: 12747 - protein, 880 aa, Artificial Sequence
  Synthetic polypeptide
MATLPSAERRAFALKINRYSSAEIRKQFTLPPNLGQYHRQSISTSGFPSLQLPQFYDPVEPVDFEGLLMTHLNSLDVQLAQELGDFTDDDLDVVFTPKECRTLQPSLPEEGVELDPHVRDCVQTYIREWLIVNRKNQGSPEICGFKKTGSRKDFHKTLPKQTFESETLECSEPAAQAGPRHLNVLCDVSGKGPVTACDFDLRSLQPDKRLENLLQQVSAEDFEKQNEEARRTNRQAELFALYPSVDEEDAVEIRPVPECPKEHLGNRILVKLLTLKFEIEIEPLFASIALYDVKERKKISENFHCDLNSDQFKGFLRAHTPSVAASSQARSAVFSVTYPSSDIYLVVKIEKVLQQGEIGDCAEPYTVIKESDGGKSKEKIEKLKLQAESFCQRLGKYRMPFAWAPISLSSFFNVSTLEREVTDVDSVVGRSSVGERRTLAQSRRLSERALSLEENGVGSNFKTSTLSVSSFFKQEGDRLSDEDLFKFLADYKRSSSLQRRVKSIPGLLRLEISTAPEIINCCLTPEMLPVKPFPENRTRPHKEILEFPTREVYVPHTVYRNLLYVYPQRLNFVNKLASARNITIKIQFMCGEDASNAMPVIFGKSSGPEFLQEVYTAVTYHNKSPDFYEEVKIKLPAKLTVNHHLLFTFYHISCQQKQGASVETLLGYSWLPILLNERLQTGSYCLPVALEKLPPNYSMHSAEKVPLQNPPIKWAEGHKGVFNIEVQAVSSVHTQDNHLEKFFTLCHSLESQVTFPIRVLDQKISEMALEHELKLSIICLNSSRLEPLVLFLHLVLDKLFQLSVQPMVIAGQTANFSQFAFESVVAIANSLHNSKDLSKDQHGRNCLLASYVHYVFRLPEVQRDVPKSVAHICNPSTLGG

SEQ ID NO: 12748 - protein, 347 aa, Artificial Sequence
  Synthetic polypeptide
MCGEDASNAMPVRRETNICLKSGWAAHPCHFTQVRDSSVYKVRLFQANTAQHVQGLLCPGYQWGNRVIFGKSSGPEFLQEVYTAVTYHNKSPDFYEEVKIKLPAKLTVNHHLLFTFYHISCQQKQGASVETLLGYSWLPILLNERLQTGSYCLPVALEKLPPNYSMHSAEKVPLQNPPIKWAEGHKGVFNIEVQAVSSVHTQDNHLEKFFTLCHSLESQVTFPIRVLDQKISEMALEHELKLSIICLNSSRLEPLVLFLHLVLDKLFQLSVQPMVIAGQTANFSQFAFESVVAIANSLHNSKDLSKDQHGRNCLLASYVHYVFRLPEVQRDVPKSVAHICNPSTLGG

SEQ ID NO: 12749 - protein, 182 aa, Artificial Sequence
  Synthetic polypeptide
MHSAEKVPLQNPPIKWAEGHKGVFNIEVQAVSSVHTQDNHLEKFFTLCHSLESQVTFPIRVLDQKISEMALEHELKLSIICLNSSRLEPLVLFLHLVLDKLFQLSVQPMVIAGQTANFSQFAFESVVAIANSLHNSKDLSKDQHGRNCLLASYVHYVFRLPEVQRDVPKSVAHICNPSTLGG

SEQ ID NO: 12750 - protein, 812 aa, Artificial Sequence
  Synthetic polypeptide
MTHLNSLDVQLAQELGDFTDDDLDVVFTPKECRTLQPSLPEEGVELDPHVRDCVQTYIREWLIVNRKNQGSPEICGFKKTGSRKDFHKTLPKQTFESETLECSEPAAQAGPRHLNVLCDVSGKGPVTACDFDLRSLQPDKRLENLLQQVSAEDFEKQNEEARRTNRQAELFALYPSVDEEDAVEIRPVPECPKEHLGNRILVKLLTLKFEIEIEPLFASIALYDVKERKKISENFHCDLNSDQFKGFLRAHTPSVAASSQARSAVFSVTYPSSDIYLVVKIEKVLQQGEIGDCAEPYTVIKESDGGKSKEKIEKLKLQAESFCQRLGKYRMPFAWAPISLSSFFNVSTLEREVTDVDSVVGRSSVGERRTLAQSRRLSERALSLEENGVGSNFKTSTLSVSSFFKQEGDRLSDEDLFKFLADYKRSSSLQRRVKSIPGLLRLEISTAPEIINCCLTPEMLPVKPFPENRTRPHKEILEFPTREVYVPHTVYRNLLYVYPQRLNFVNKLASARNITIKIQFMCGEDASNAMPVIFGKSSGPEFLQEVYTAVTYHNKSPDFYEEVKIKLPAKLTVNHHLLFTFYHISCQQKQGASVETLLGYSWLPILLNERLQTGSYCLPVALEKLPPNYSMHSAEKVPLQNPPIKWAEGHKGVFNIEVQAVSSVHTQDNHLEKFFTLCHSLESQVTFPIRVLDQKISEMALEHELKLSIICLNSSRLEPLVLFLHLVLDKLFQLSVQPMVIAGQTANFSQFAFESVVAIANSLHNSKDLSKDQHGRNCLLASYVHYVFRLPEVQRDVPKSVAHICNPSTLGG

SEQ ID NO: 12751 - protein, 294 aa, Artificial Sequence
  Synthetic polypeptide
MAKWLNKYFSLGNSKTKSPPQPPRPDYREQRRRGERPSQPPQAVPQASSAASASCGPATASCFSASSGSLPDDSGSTSDLIRAYRAQKERDFEDPYNGPGSSLRKLRAMCRLDYCGGSGEPGGVQRAFSASSASGAAGCCCASSGAGAAASSSSSSGSPHLYRSSSERRPATPAEVRYISPKHRLIKVESAAGGGAGDPLGGACAGGRTWSPTACGGKKLLNKCAASAAEESGAGKKDKVTIADDYSDPFDAKNDLKSKAGKGESAGYMEPYEAQRIMTGREDYSYLPEKVSVC

SEQ ID NO: 12752 - protein, 1602 aa, Artificial Sequence
  Synthetic polypeptide
MIILSKSQKSWIKGVFDKRECSTIIPSSKNPHRCTPVCQVCQNLIRCYCGRLIGDHAGIDYSWTISAAKGKESEQWSVEKHTTKSPTDTFGTINFQDGEHTHHAKYIRTSYDTKLDHLLHLMLKEWKMELPKLVISVHGGIQNFTMPSKFKEIFSQGLVKAAETTGAWIITEGINTGVSKHVGDALKSHSSHSLRKIWTVGIPPWGVIENQRDLIGKDVVCLYQTLDNPLSKLTTLNSMHSHFILSDDGTVGKYGNEMKLRRNLEKYLSLQKIHCRSRQGVPVVGLVVEGGPNVILSVWETVKDKDPVVVCEGTGRAADLLAFTHKHLADEGMLRPQVKEEIICMIQNTFNFSLKQSKHLFQILMECMVHRDCITIFDADSEEQQDLDLAILTALLKGTNLSASEQLNLAMAWDRVDIAKKHILIYEQHWKPDALEQAMSDALVMDRVDFVKLLIEYGVNLHRFLTIPRLEELYNTKQGPTNTLLHHLVQDVKQHTLLSGYRITLIDIGLVVEYLIGRAYRSNYTRKHFRALYNNLYRKYKHQRHSSGNRNESAESTLHSQFIRTAQPYKFKEKSIVLHKSRKKSKEQNVSDDPESTGFLYPYNDLLVWAVLMKRQKMAMFFWQHGEEATVKAVIACILYRAMAHEAKESHMVDDASEELKNYSKQFGQLALDLLEKAFKQNERMAMTLLTYELRNWSNSTCLKLAVSGGLRPFVSHTCTQMLLTDMWMGRLKMRKNSWLKIIISIILPPTILTLEFKSKAEMSHVPQSQDFQFMWYYSDQNASSSKESASVKEYDLERGHDEKLDENQHFGLESGHQHLPWTRKVYEFYSAPIVKFWFYTMAYLAFLMLFTYTVLVEMQPQPSVQEWLVSIYIFTNAIEVVREICISEPGKFTQKVKVWISEYWNLTETVAIGLFSAGFVLRWGDPPFHTAGRLIYCIDIIFWFSRLLDFFAVNQHAGPYVTMIAKMTANMFYIVIIMAIVLLSFGVARKAILSPKEPPSWSLARDIVFEPYWMIYGEVYAGEIDVCSSQPSCPPGSFLTPFLQAVYLFVQYIIMVNLLIAFFNNVYLDMESISNNLWKYNRYRYIMTYHEKPWLPPPLILLSHVGLLLRRLCCHRAPHDQEEGDVGLKLYLSKEDLKKLHDFEEQCVEKYFHEKMEDVNCSCEERIRVTSERVTEMYFQLKEMNEKVSFIKDSLLSLDSQVGHLQDLSALTVDTLKVLSAVDTLQEDEALLAKRKHSTCKKLPHSWSNVICAEVLGSMEIAGEKKYQYYSMPSSLLRSLAGGRHPPRVQRGALLEITNSKREATNVRNDQERQETQSSIVVSGVSPNRQAHSKYGQFLLVPSNLKRVPFSAETVLPLSRPSVPDVLATEQDIQTEVLVHLTGQTPVVSDWASVDEPKEKHEPIAHLLDGQDKAEQVLPTLSCTPEPMTMSSPLSQAKIMQTGGGYVNWAFSEGDETGVFSIKKKWQTCLPSTCDSDSSRSEQHQKQAQDSSLSDNSTRSAQSSECSEVGPWLQPNTSFWINPLRRYRPFARSHSFRFHKEEKLMKICKIKNLSGSSEIGQGAWVKAKMLTKDRRLSKKKKNTQGLQVPTCCIRDSRGGTQ

SEQ ID NO: 12753 - protein, 1607 aa, Artificial Sequence
  Synthetic polypeptide
MKEQPVLERLQSQKSWIKGVFDKRECSTIIPSSKNPHRCTPVCQVCQNLIRCYCGRLIGDHAGIDYSWTISAAKGKESEQWSVEKHTTKSPTDTFGTINFQDGEHTHHAKYIRTSYDTKLDHLLHLMLKEWKMELPKLVISVHGGIQNFTMPSKFKEIFSQGLVKAAETTGAWIITEGINTGVSKHVGDALKSHSSHSLRKIWTVGIPPWGVIENQRDLIGKDVVCLYQTLDNPLSKLTTLNSMHSHFILSDDGTVGKYGNEMKLRRNLEKYLSLQKIHCRSRQGVPVVGLVVEGGPNVILSVWETVKDKDPVVVCEGTGRAADLLAFTHKHLADEGMLRPQVKEEIICMIQNTFNFSLKQSKHLFQILMECMVHRDCITIFDADSEEQQDLDLAILTALLKGTNLSASEQLNLAMAWDRVDIAKKHILIYEQHWKPDALEQAMSDALVMDRVDFVKLLIEYGVNLHRFLTIPRLEELYNTKQGPTNTLLHHLVQDVKQHTLLSGYRITLIDIGLVVEYLIGRAYRSNYTRKHFRALYNNLYRKYKHQRHSSGNRNESAESTLHSQFIRTAQPYKFKEKSIVLHKSRKKSKEQNVSDDPESTGFLYPYNDLLVWAVLMKRQKMAMFFWQHGEEATVKAVIACILYRAMAHEAKESHMVDDASEELKNYSKQFGQLALDLLEKAFKQNERMAMTLLTYELRNWSNSTCLKLAVSGGLRPFVSHTCTQMLLTDMWMGRLKMRKNSWLKIIISIILPPTILTLEFKSKAEMSHVPQSQDFQFMWYYSDQNASSSKESASVKEYDLERGHDEKLDENQHFGLESGHQHLPWTRKVYEFYSAPIVKFWFYTMAYLAFLMLFTYTVLVEMQPQPSVQEWLVSIYIFTNAIEVVREICISEPGKFTQKVKVWISEYWNLTETVAIGLFSAGFVLRWGDPPFHTAGRLIYCIDIIFWFSRLLDFFAVNQHAGPYVTMIAKMTANMFYIVIIMAIVLLSFGVARKAILSPKEPPSWSLARDIVFEPYWMIYGEVYAGEIDVCSSQPSCPPGSFLTPFLQAVYLFVQYIIMVNLLIAFFNNVYLDMESISNNLWKYNRYRYIMTYHEKPWLPPPLILLSHVGLLLRRLCCHRAPHDQEEGDVGLKLYLSKEDLKKLHDFEEQCVEKYFHEKMEDVNCSCEERIRVTSERVTEMYFQLKEMNEKVSFIKDSLLSLDSQVGHLQDLSALTVDTLKVLSAVDTLQEDEALLAKRKHSTCKKLPHSWSNVICAEVLGSMEIAGEKKYQYYSMPSSLLRSLAGGRHPPRVQRGALLEITNSKREATNVRNDQERQETQSSIVVSGVSPNRQAHSKYGQFLLVPSNLKRVPFSAETVLPLSRPSVPDVLATEQDIQTEVLVHLTGQTPVVSDWASVDEPKEKHEPIAHLLDGQDKAEQVLPTLSCTPEPMTMSSPLSQAKIMQTGGGYVNWAFSEGDETGVFSIKKKWQTCLPSTCDSDSSRSEQHQKQAQDSSLSDNSTRSAQSSECSEVGPWLQPNTSFWINPLRRYRPFARSHSFRFHKEEKLMKICKIKNLSGSSEIGQGAWVKAKMLTKDRRLSKKKKNTQGLQVPTCCIRDSRGGTQ

SEQ ID NO: 12754 - protein, 1602 aa, Artificial Sequence
  Synthetic polypeptide
MTAPVTSQKSWIKGVFDKRECSTIIPSSKNPHRCTPVCQVCQNLIRCYCGRLIGDHAGIDYSWTISAAKGKESEQWSVEKHTTKSPTDTFGTINFQDGEHTHHAKYIRTSYDTKLDHLLHLMLKEWKMELPKLVISVHGGIQNFTMPSKFKEIFSQGLVKAAETTGAWIITEGINTGVSKHVGDALKSHSSHSLRKIWTVGIPPWGVIENQRDLIGKDVVCLYQTLDNPLSKLTTLNSMHSHFILSDDGTVGKYGNEMKLRRNLEKYLSLQKIHCRSRQGVPVVGLVVEGGPNVILSVWETVKDKDPVVVCEGTGRAADLLAFTHKHLADEGMLRPQVKEEIICMIQNTFNFSLKQSKHLFQILMECMVHRDCITIFDADSEEQQDLDLAILTALLKGTNLSASEQLNLAMAWDRVDIAKKHILIYEQHWKPDALEQAMSDALVMDRVDFVKLLIEYGVNLHRFLTIPRLEELYNTKQGPTNTLLHHLVQDVKQHTLLSGYRITLIDIGLVVEYLIGRAYRSNYTRKHFRALYNNLYRKYKHQRHSSGNRNESAESTLHSQFIRTAQPYKFKEKSIVLHKSRKKSKEQNVSDDPESTGFLYPYNDLLVWAVLMKRQKMAMFFWQHGEEATVKAVIACILYRAMAHEAKESHMVDDASEELKNYSKQFGQLALDLLEKAFKQNERMAMTLLTYELRNWSNSTCLKLAVSGGLRPFVSHTCTQMLLTDMWMGRLKMRKNSWLKIIISIILPPTILTLEFKSKAEMSHVPQSQDFQFMWYYSDQNASSSKESASVKEYDLERGHDEKLDENQHFGLESGHQHLPWTRKVYEFYSAPIVKFWFYTMAYLAFLMLFTYTVLVEMQPQPSVQEWLVSIYIFTNAIEVVREICISEPGKFTQKVKVWISEYWNLTETVAIGLFSAGFVLRWGDPPFHTAGRLIYCIDIIFWFSRLLDFFAVNQHAGPYVTMIAKMTANMFYIVIIMAIVLLSFGVARKAILSPKEPPSWSLARDIVFEPYWMIYGEVYAGEIDVCSSQPSCPPGSFLTPFLQAVYLFVQYIIMVNLLIAFFNNVYLDMESISNNLWKYNRYRYIMTYHEKPWLPPPLILLSHVGLLLRRLCCHRAPHDQEEGDVGLKLYLSKEDLKKLHDFEEQCVEKYFHEKMEDVNCSCEERIRVTSERVTEMYFQLKEMNEKVSFIKDSLLSLDSQVGHLQDLSALTVDTLKVLSAVDTLQEDEALLAKRKHSTCKKLPHSWSNVICAEVLGSMEIAGEKKYQYYSMPSSLLRSLAGGRHPPRVQRGALLEITNSKREATNVRNDQERQETQSSIVVSGVSPNRQAHSKYGQFLLVPSNLKRVPFSAETVLPLSRPSVPDVLATEQDIQTEVLVHLTGQTPVVSDWASVDEPKEKHEPIAHLLDGQDKAEQVLPTLSCTPEPMTMSSPLSQAKIMQTGGGYVNWAFSEGDETGVFSIKKKWQTCLPSTCDSDSSRSEQHQKQAQDSSLSDNSTRSAQSSECSEVGPWLQPNTSFWINPLRRYRPFARSHSFRFHKEEKLMKICKIKNLSGSSEIGQGAWVKAKMLTKDRRLSKKKKNTQGLQVPTCCIRDSRGGTQ

SEQ ID NO: 12755 - protein, 520 aa, Artificial Sequence
  Synthetic polypeptide
MASSGMADSANHLPFFFGNITREEAEDYLVQGGMSDGLYLLRQSRNYLGGFALSVAHGRKAHHYTIERELNGTYAIAGGRTHASPADLCHYHSQESDGLVCLLKKPFNRPQGVQPKTGPFEDLKENLIREYVKQTWNLQGQALEQAIISQKPQLEKLIATTAHEKMPWFHGKISREESEQIVLIGSKTNGKFLIRARDNNGSYALCLLHEGKVLHYRIDKDKTGKLSIPEGKKFDTLWQLVEHYSYKADGLLRVLTVPCQKIGTQGNVNFGGRPQLPGSHPASSPAQGNRQESTVSFNPYEPELAPWAADKGPQREALPMDTEVYESPYADPEEIRPKEVYLDRKLLTLEDKELGSGNFGTVKKGYYQMKKVVKTVAVKILKNEANDPALKDELLAEANVMQQLDNPYIVRMIGICEAESWMLVMEMAELGPLNKYLQQNRHVKDKNIIELVHQVSMGMKYLEESNFVHRDLAARNVLLVTQHYAKISDFGLSKALRADENYYKQTPYRPGEKGMTFSKC

SEQ ID NO: 12756 - protein, 543 aa, Artificial Sequence
  Synthetic polypeptide
MASSGMADSANHLPFFFGNITREEAEDYLVQGGMSDGLYLLRQSRNYLGGFALSVAHGRKAHHYTIERELNGTYAIAGGRTHASPADLCHYHSQESDGLVCLLKKPFNRPQGVQPKTGPFEDLKENLIREYVKQTWNLQGQALEQAIISQKPQLEKLIATTAHEKMPWFHGKISREESEQIVLIGSKTNGKFLIRARDNNGSYALCLLHEGKVLHYRIDKDKTGKLSIPEGKKFDTLWQLVEHYSYKADGLLRVLTVPCQKIGTQGNVNFGGRPQLPGSHPATWSAGGIISRIKSYSFPKPGHRKSSPAQGNRQESTVSFNPYEPELAPWAADKGPQREALPMDTEVYESPYADPEEIRPKEVYLDRKLLTLEDKELGSGNFGTVKKGYYQMKKVVKTVAVKILKNEANDPALKDELLAEANVMQQLDNPYIVRMIGICEAESWMLVMEMAELGPLNKYLQQNRHVKDKNIIELVHQVSMGMKYLEESNFVHRDLAARNVLLVTQHYAKISDFGLSKALRADENYYKQTPYRPGEKGMTFSKC

SEQ ID NO: 12757 - protein, 519 aa, Artificial Sequence
  Synthetic polypeptide
MASSGMADSANHLPFFFGNITREEAEDYLVQGGMSDGLYLLRQSRNYLGGFALSVAHGRKAHHYTIERELNGTYAIAGGRTHASPADLCHYHSQESDGLVCLLKKPFNRPQGVQPKTGPFEDLKENLIREYVKQTWNLQGQALEQAIISQKPQLEKLIATTAHEKMPWFHGKISREESEQIVLIGSKTNGKFLIRARDNNGSYALCLLHEGKVLHYRIDKDKTGKLSIPEGKKFDTLWQLVEHYSYKADGLLRVLTVPCQKIGTQGNVNFGGRPQLPGSHPASSPAQGNRQESTVSFNPYEPELAPWAADKGPQREALPMDTEVYESPYADPEEIRPKEVYLDRKLLTLEDKELGSGNFGTVKKGYYQMKKVVKTVAVKILKNEANDPALKDELLAEANVMQQLDNPYIVRMIGICEAESWMLVMEMAELGPLNKYLQQNRHVKDKNIIELVHQVSMGMKYLEESNFVHRDLAARNVLLVTQHYAKISDFGLSKALRADENYYKTPYRPGEKGMTFSKC

SEQ ID NO: 12758 - protein, 542 aa, Artificial Sequence
  Synthetic polypeptide
MASSGMADSANHLPFFFGNITREEAEDYLVQGGMSDGLYLLRQSRNYLGGFALSVAHGRKAHHYTIERELNGTYAIAGGRTHASPADLCHYHSQESDGLVCLLKKPFNRPQGVQPKTGPFEDLKENLIREYVKQTWNLQGQALEQAIISQKPQLEKLIATTAHEKMPWFHGKISREESEQIVLIGSKTNGKFLIRARDNNGSYALCLLHEGKVLHYRIDKDKTGKLSIPEGKKFDTLWQLVEHYSYKADGLLRVLTVPCQKIGTQGNVNFGGRPQLPGSHPATWSAGGIISRIKSYSFPKPGHRKSSPAQGNRQESTVSFNPYEPELAPWAADKGPQREALPMDTEVYESPYADPEEIRPKEVYLDRKLLTLEDKELGSGNFGTVKKGYYQMKKVVKTVAVKILKNEANDPALKDELLAEANVMQQLDNPYIVRMIGICEAESWMLVMEMAELGPLNKYLQQNRHVKDKNIIELVHQVSMGMKYLEESNFVHRDLAARNVLLVTQHYAKISDFGLSKALRADENYYKTPYRPGEKGMTFSKC

SEQ ID NO: 12759 - protein, 999 aa, Artificial Sequence
  Synthetic polypeptide
MATSEYPYSECQNAAQIYRKVTCGIKPASFEKVHDPEIKEIIGECICKNKEERYEIKDLLSHAFFAEDTGVRVELAEEDHGRKSTIALRLWVEDPKKLKGKPKDNGAIEFTFDLEKETPDEVAQEMIESGFFHESDVKIVAKSIRDRVALIQWRRERIWPALQPKEQQDVGSPDKARGPPVPLQVQVTYHAQAGQPGPPEPEEPEADQHLLPPTLPTSATSLASDSTFDSGQGSTVYSDSQSSQQSVMLGSLADAAPSPAQCVCSPPVSEGPVLPQSLPSLGAYQQPTAAPGLPVGSVPAPACPPSLQQHFPDPAMSFAPVLPPPSTPMPTGPGQPAPPGQQPPPLAQPTPLPQVLAPQPVVPLQPVPPHLPPYLAPASQVGAPAQLKPLQMPQAPLQPLAQVPPQMPPIPVVPPITPLAGIDGLPPALPDLPTATVPPVPPPQYFSPAVILPSLAAPLPPASPALPLQAVKLPHPPGAPLAMPCRTIVPNAPATIPLLAVAPPGVAALSIHSAVAQLPGQPVYPAAFPQMAPTDVPPSPHHTVQNMRATPPQPALPPQPTLPPQPVLPPQPTLPPQPVLPPQPTRPPQPVLPPQPMLPPQPVLPPQPALPVRPEPLQPHLPEQAAPAATPGSQILLGHPAPYAVDVAAQVPTVPVPPAAVLSPPLPEVLLPAAPELLPQFPSSLATVSASVQSVPTQTATLLPPANPPLPGGPGIASPCPTVQLTVEPVQEEQASQDKPPGLPQSCESYGGSDVTSGKELSDSCEGAFGGGRLEGRAARKHHRRSTRARSRQERASRPRLTILNVCNTGDKMVECQLETHNHKMVTFKFDLDGDAPDEIATYMVEHDFILQAERETFIEQMKDVMDKAEDMLSEDTDADRGSDPGTSPPHLSTCGLGTGEESRQSQANAPVYQQNVLHTGKRWFIICPVAEHPAPEAPESSPPLPLSSLPPEASQGLNLTEYVQDLYSENSRTMLMEIKEDPNKRPVHGSEDTVLLQC

SEQ ID NO: 12760 - protein, 1387 aa, Artificial Sequence
  Synthetic polypeptide
MDGDGGRRDVPGTLMEPGRGAGPAGMAEPRAKAARPGPQRFLRRSVVESDQEEPPGLEAAEAPGPQPPQPLQRRVLLLCKTRRLIAERARGRPAAPAPAALVAQPGAPGAPADAGPEPVGTQEPGPDPIAAAVETAPAPDGGPREEAAATVRKEDEGAAEAKPEPGRTRRDEPEEEEDDEDDLKAVATSLDGRFLKFDIELGRGSFKTVYKGLDTETWVEVAWCELQDRKLTKLERQRFKEEAEMLKGLQHPNIVRFYDFWESSAKGKRCIVLVTELMTSGTLKTYLKRFKVMKPKVLRSWCRQILKGLLFLHTRTPPIIHRDLKCDNIFITGPTGSVKIGDLGLATLKRASFAKSVIGTPEFMAPEMYEEHYDESVDVYAFGMCMLEMATSEYPYSECQNAAQIYRKVTCGIKPASFEKVHDPEIKEIIGECICKNKEERYEIKDLLSHAFFAEDTGVRVELAEEDHGRKSTIALRLWVEDPKKLKGKPKDNGAIEFTFDLEKETPDEVAQEMIESGFFHESDVKIVAKSIRDRVALIQWRRERIWPALQPKEQQDVGSPDKARGPPVPLQVQVTYHAQAGQPGPPEPEEPEADQHLLPPTLPTSATSLASDSTFDSGQGSTVYSDSQSSQQSVMLGSLADAAPSPAQCVCSPPVSEGPVLPQSLPSLGAYQQPTAAPGLPVGSVPAPACPPSLQQHFPDPAMSFAPVLPPPSTPMPTGPGQPAPPGQQPPPLAQPTPLPQVLAPQPVVPLQPVPPHLPPYLAPASQVGAPAQLKPLQMPQAPLQPLAQVPPQMPPIPVVPPITPLAGIDGLPPALPDLPTATVPPVPPPQYFSPAVILPSLAAPLPPASPALPLQAVKLPHPPGAPLAMPCRTIVPNAPATIPLLAVAPPGVAALSIHSAVAQLPGQPVYPAAFPQMAPTDVPPSPHHTVQNMRATPPQPALPPQPTLPPQPVLPPQPTLPPQPVLPPQPTRPPQPVLPPQPMLPPQPVLPPQPALPVRPEPLQPHLPEQAAPAATPGSQILLGHPAPYAVDVAAQVPTVPVPPAAVLSPPLPEVLLPAAPELLPQFPSSLATVSASVQSVPTQTATLLPPANPPLPGGPGIASPCPTVQLTVEPVQEEQASQDKPPGLPQSCESYGGSDVTSGKELSDSCEGAFGGGRLEGRAARKHHRRSTRARSRQERASRPRLTILNVCNTGDKMVECQLETHNHKMVTFKFDLDGDAPDEIATYMVEHDFILQAERETFIEQMKDVMDKAEDMLSEDTDADRGSDPGTSPPHLSTCGLGTGEESRQSQANAPVYQQNVLHTGKRWFIICPVAEHPAPEAPESSPPLPLSSLPPEASQGLNLTEYVQDLYSENSRTMLMEIKEDPNKRPVHGSEDTVLLQC

SEQ ID NO: 12761 - protein, 991 aa, Artificial Sequence
  Synthetic polypeptide
  misc_feature (1)..(1): Xaa can be any naturally occurring amino acid
XECQNAAQIYRKVTCGIKPASFEKVHDPEIKEIIGECICKNKEERYEIKDLLSHAFFAEDTGVRVELAEEDHGRKSTIALRLWVEDPKKLKGKPKDNGAIEFTFDLEKETPDEVAQEMIESGFFHESDVKIVAKSIRDRVALIQWRRERIWPALQPKEQQDVGSPDKARGPPVPLQVQVTYHAQAGQPGPPEPEEPEADQHLLPPTLPTSATSLASDSTFDSGQGSTVYSDSQSSQQSVMLGSLADAAPSPAQCVCSPPVSEGPVLPQSLPSLGAYQQPTAAPGLPVGSVPAPACPPSLQQHFPDPAMSFAPVLPPPSTPMPTGPGQPAPPGQQPPPLAQPTPLPQVLAPQPVVPLQPVPPHLPPYLAPASQVGAPAQLKPLQMPQAPLQPLAQVPPQMPPIPVVPPITPLAGIDGLPPALPDLPTATVPPVPPPQYFSPAVILPSLAAPLPPASPALPLQAVKLPHPPGAPLAMPCRTIVPNAPATIPLLAVAPPGVAALSIHSAVAQLPGQPVYPAAFPQMAPTDVPPSPHHTVQNMRATPPQPALPPQPTLPPQPVLPPQPTLPPQPVLPPQPTRPPQPVLPPQPMLPPQPVLPPQPALPVRPEPLQPHLPEQAAPAATPGSQILLGHPAPYAVDVAAQVPTVPVPPAAVLSPPLPEVLLPAAPELLPQFPSSLATVSASVQSVPTQTATLLPPANPPLPGGPGIASPCPTVQLTVEPVQEEQASQDKPPGLPQSCESYGGSDVTSGKELSDSCEGAFGGGRLEGRAARKHHRRSTRARSRQERASRPRLTILNVCNTGDKMVECQLETHNHKMVTFKFDLDGDAPDEIATYMVEHDFILQAERETFIEQMKDVMDKAEDMLSEDTDADRGSDPGTSPPHLSTCGLGTGEESRQSQANAPVYQQNVLHTGKRWFIICPVAEHPAPEAPESSPPLPLSSLPPEASQGLNLTEYVQDLYSENSRTMLMEIKEDPNKRPVHGSEDTVLLQC

SEQ ID NO: 12762 - protein, 1383 aa, Artificial Sequence
  Synthetic polypeptide
  misc_feature (1)..(1): Xaa can be any naturally occurring amino acid
XGRRDVPGTLMEPGRGAGPAGMAEPRAKAARPGPQRFLRRSVVESDQEEPPGLEAAEAPGPQPPQPLQRRVLLLCKTRRLIAERARGRPAAPAPAALVAQPGAPGAPADAGPEPVGTQEPGPDPIAAAVETAPAPDGGPREEAAATVRKEDEGAAEAKPEPGRTRRDEPEEEEDDEDDLKAVATSLDGRFLKFDIELGRGSFKTVYKGLDTETWVEVAWCELQDRKLTKLERQRFKEEAEMLKGLQHPNIVRFYDFWESSAKGKRCIVLVTELMTSGTLKTYLKRFKVMKPKVLRSWCRQILKGLLFLHTRTPPIIHRDLKCDNIFITGPTGSVKIGDLGLATLKRASFAKSVIGTPEFMAPEMYEEHYDESVDVYAFGMCMLEMATSEYPYSECQNAAQIYRKVTCGIKPASFEKVHDPEIKEIIGECICKNKEERYEIKDLLSHAFFAEDTGVRVELAEEDHGRKSTIALRLWVEDPKKLKGKPKDNGAIEFTFDLEKETPDEVAQEMIESGFFHESDVKIVAKSIRDRVALIQWRRERIWPALQPKEQQDVGSPDKARGPPVPLQVQVTYHAQAGQPGPPEPEEPEADQHLLPPTLPTSATSLASDSTFDSGQGSTVYSDSQSSQQSVMLGSLADAAPSPAQCVCSPPVSEGPVLPQSLPSLGAYQQPTAAPGLPVGSVPAPACPPSLQQHFPDPAMSFAPVLPPPSTPMPTGPGQPAPPGQQPPPLAQPTPLPQVLAPQPVVPLQPVPPHLPPYLAPASQVGAPAQLKPLQMPQAPLQPLAQVPPQMPPIPVVPPITPLAGIDGLPPALPDLPTATVPPVPPPQYFSPAVILPSLAAPLPPASPALPLQAVKLPHPPGAPLAMPCRTIVPNAPATIPLLAVAPPGVAALSIHSAVAQLPGQPVYPAAFPQMAPTDVPPSPHHTVQNMRATPPQPALPPQPTLPPQPVLPPQPTLPPQPVLPPQPTRPPQPVLPPQPMLPPQPVLPPQPALPVRPEPLQPHLPEQAAPAATPGSQILLGHPAPYAVDVAAQVPTVPVPPAAVLSPPLPEVLLPAAPELLPQFPSSLATVSASVQSVPTQTATLLPPANPPLPGGPGIASPCPTVQLTVEPVQEEQASQDKPPGLPQSCESYGGSDVTSGKELSDSCEGAFGGGRLEGRAARKHHRRSTRARSRQERASRPRLTILNVCNTGDKMVECQLETHNHKMVTFKFDLDGDAPDEIATYMVEHDFILQAERETFIEQMKDVMDKAEDMLSEDTDADRGSDPGTSPPHLSTCGLGTGEESRQSQANAPVYQQNVLHTGKRWFIICPVAEHPAPEAPESSPPLPLSSLPPEASQGLNLTEYVQDLYSENSRTMLMEIKEDPNKRPVHGSEDTVLLQC

SEQ ID NO: 12763 - protein, 184 aa, Artificial Sequence
  Synthetic polypeptide
  misc_feature (1)..(1): Xaa can be any naturally occurring amino acid
XQLETHNHKMVTFKFDLDGDAPDEIATYMVEHDFILQAERETFIEQMKDVMDKAEDMLSEDTDADRGSDPGTSPPHLSTCGLGTGEESRQSQANAPVYQQNVLHTGKRWFIICPVAEHPAPEAPESSPPLPLSSLPPEASQGLNLTEYVQDLYSENSRTMLMEIKEDPNKRPVHGSEDTVLLQC

SEQ ID NO: 12764 - protein, 489 aa, Artificial Sequence
  Synthetic polypeptide
MAAVILESIFLKRSQQKKKTSPLNFKKRLFLLTVHKLSYYEYDFERGRRGSKKGSIDVEKITCVETVVPEKNPPPERQIPRRGEESSEMEQISIIERFPYPFQVVYDEGPLYVFSPTEELRKRWIHQLKNVIRYNSDLVQKYHPCFWIDGQYLCCSQTAKNAMGCQILENRNGSLKPGSSHRKTKKPLPPTPEEDQILKKPLPPEPAAAPVSTSELKKVVALYDYMPMNANDLQLRKGDEYFILEESNLPWWRARDKNGQEGYIPSNYVTEAEDSIEMYEWYSKHMTRSQAEQLLKQEGKEGGFIVRDSSKAGKYTVSVFAKSTGDPQGVIRHYVVCSTPQSQYYLAARNCLVNDQGVVKVSDFGLSRYVLDDEYTSSVGSKFPVRWSPPEVLMYSKFSSKSDIWAFGVLMWEIYSLGKMPYERFTNSETAEHIAQGLRLYRPHLASEKVYTIMYSCWHELLRRLRQENDLNPGGGGCSEPRSCHCTLA

SEQ ID NO: 12765 - protein, 665 aa, Artificial Sequence
  Synthetic polypeptide
MAAVILESIFLKRSQQKKKTSPLNFKKRLFLLTVHKLSYYEYDFERGRRGSKKGSIDVEKITCVETVVPEKNPPPERQIPRRGEESSEMEQISIIERFPYPFQVVYDEGPLYVFSPTEELRKRWIHQLKNVIRYNSDLVQKYHPCFWIDGQYLCCSQTAKNAMGCQILENRNGSLKPGSSHRKTKKPLPPTPEEDQILKKPLPPEPAAAPVSTSELKKVVALYDYMPMNANDLQLRKGDEYFILEESNLPWWRARDKNGQEGYIPSNYVTEAEDSIEMYEWYSKHMTRSQAEQLLKQEGKEGGFIVRDSSKAGKYTVSVFAKSTGDPQGVIRHYVVCSTPQSQYYLAEKHLFSTIPELINYHQHNSAGLISRLKYPVSQQNKNAPSTAGLGYGSWEIDPKDLTFLKELGTGQFGVVKYGKWRGQYDVAIKMIKEGSMSEDEFIEEAKVMMNLSHEKLVQLYGVCTKQRPIFIITEYMANGCLLNYLREMRHRFQTQQLLEMCKDVCEAMEYLESKQFLHRDLAARNCLVNDQGVVKVSDFGLSRYVLDDEYTSSVGSKFPVRWSPPEVLMYSKFSSKSDIWAFGVLMWEIYSLGKMPYERFTNSETAEHIAQGLRLYRPHLASEKVYTIMYSCWHELLRRLRQENDLNPGGGGCSEPRSCHCTLA

SEQ ID NO: 12766 - protein, 553 aa, Artificial Sequence
  Synthetic polypeptide
MAAVILESIFLKRSQQKKKTSPLNFKKRLFLLTVHKLSYYEYDFERGRRGSKKGSIDVEKITCVETVVPEKNPPPERQIPRRGEESSEMEQISIIERFPYPFQVVYDEGPLYVFSPTEELRKRWIHQLKNVIRYNSDLVQKYHPCFWIDGQYLCCSQTAKNAMGCQILENRNGSLKPGSSHRKTKKPLPPTPEEDQILKKPLPPEPAAAPVSTSELKKVVALYDYMPMNANDLQLRKGDEYFILEESNLPWWRARDKNGQEGYIPSNYVTEAEDSIEMYEWYSKHMTRSQAEQLLKQEGKEGGFIVRDSSKAGKYTVSVFAKSTGDPQGVIRHYVVCSTPQSQYYLAEKHLFSTIPELINYHQHNSAGLISRLKYPVSQQNKNAPSTAGLGYGSWEIDPKDLTFLKELGTGQFGVVKYGKWRGQYDVAIKMIKEGSMSEDEFIEEAKVMMNLSHEKLVQLYGVCTKQRPIFIITEYMANGCLLNYLREMRHRFQTQQLLEMCKDVCEAMEYLESKQFLHRDLACTLHFLQSRSTSLHSYLTCLAPVSIRVCAP

SEQ ID NO: 12767 - protein, 236 aa, Artificial Sequence
  Synthetic polypeptide
MASLGLQLVGYILGLLGLLGTLVAMLLPSWKTSSYVGASIVTAVGFSKGLWMECATHSTGITQCDIYSTLLGLPADIQAAQAMMVTSSAISSLACIISVVGMRCTVFCQESRAKDRVAVAGGVFFILGGLLGFIPVAWNLHGILRDFYSPLVPDSMKFEIGEALYLGIISSLFSLIAGIILCFSCSSQRNRSNYYDAYQAQPLATRSSPRPGQPPKVKSFQGLSGRSDLLEHFPEP

SEQ ID NO: 12768 - protein, 30 aa, Artificial Sequence
  Synthetic polypeptide
MNFYLLLASSILCALIVFWKYRRFQVPARP

SEQ ID NO: 12769 - protein, 1396 aa, Artificial Sequence
  Synthetic polypeptide
MEQTDCKPYQPLPKVKHEMDLAYTSSSDESEDGRKPRQSYNSRETLHEYNQELRMNYNSQSRKRKEVEKSTQEMEFCETSHTLCSGYQTDMHSVSRHGYQLEMGSDVDTETEGAASPDHALRMWIRGMKSEHSSCLSSRANSALSLTDTDHERKSDGENGFKFSPVCCDMEAQAGSTQDVQSSPHNQFTFRPLPPPPPPPHACTCARKPPPAADSLQRRSMTTRSQPSPAAPAPPTSTQDSVHLHNSWVLNSNIPLETRHFLFKHGSGSSAIFSAASQNYPLTSNTVYSPPPRPLPRSTFSRPAFTFNKPYRCCNWKCTALSATAITVTLALLLAYVIAVHLFGLTWQLQPVEGELYANGVSKGNRGTESMDTTYSPIGGKVSDKSEKKVFQKGRAIDTGEVDIGAQVMQTIPPGLFWRFQITIHHPIYLKFNISLAKDSLLGIYGRRNIPPTHTQFDFVKLMDGKQLVKQDSKGSDDTQHSPRNLILTSLQETGFIEYMDQGPWYLAFYNDGKKMEQVFVLTTAIEIMDDCSTNCNGNGECISGHCHCFPGFLGPDCARDSCPVLCGGNGEYEKGHCVCRHGWKGPECDVPEEQCIDPTCFGHGTCIMGVCICVPGYKGEICEEEDCLDPMCSNHGICVKGECHCSTGWGGVNCETPLPVCQEQCSGHGTFLLDAGVCSCDPKWTGSDCSTELCTMECGSHGVCSRGICQCEEGWVGPTCEERSCHSHCTEHGQCKDGKCECSPGWEGDHCTIAHYLDAVRDGCPGLCFGNGRCTLDQNGWHCVCQVGWSGTGCNVVMEMLCGDNLDNDGDGLTDCVDPDCCQQSNCYISPLCQGSPDPLDLIQQSQTLFSQHTSRLFYDRIKFLIGKDSTHVIPPEVSFDSRRACVIRGQVVAIDGTPLVGVNVSFLHHSDYGFTISRQDGSFDLVAIGGISVILIFDRSPFLPEKRTLWLPWNQFIVVEKVTMQRVVSDPPSCDISNFISPNPIVLPSPLTSFGGSCPERGTIVPELQVVQEEIPIPSSFVRLSYLSSRTPGYKTLLRILLTHSTIPVGMIKVHLTVAVEGRLTQKWFPAAINLVYTFAWNKTDIYGQKVWGLAEALVSVGYEYETCPDFILWEQRTVVLQGFEMDASNLGGWSLNKHHILNPQSGIIHKGNGENMFISQQPPVISTIMGNGHQRSVACTNCNGPAHNNKLFAPVALASGPDGSVYVGDFNFVRRIFPSGNSVSILELRNRDTRHSTSPAHKYYLAMDPVSESLYLSDTNTRKVYKLKSLVETKDLSKNFEVVAGTGDQCLPFDQSHCGDGGRASEASLNSPRGITVDRHGFIYFVDGTMIRKIDENAVITTVIGSNGLTSTQPLSCDSGMDITQRNANQNHNEISSHPSWNGCYQNDKKKCW

SEQ ID NO: 12770 - protein, 1389 aa, Artificial Sequence
  Synthetic polypeptide
MEQTDCKPYQPLPKVKHEMDLAYTSSSDESEDGRKPRQSYNSRETLHEYNQELRMNYNSQSRKRKEVEKSTQEMEFCETSHTLCSGYQTDMHSVSRHGYQLEMGSDVDTETEGAASPDHALRMWIRGMKSEHSSCLSSRANSALSLTDTDHERKSDGENGFKFSPVCCDMEAQAGSTQDVQSSPHNQFTFRPLPPPPPPPHACTCARKPPPAADSLQRRSMTTRSQPSPAAPAPPTSTQDSVHLHNSWVLNSNIPLETRHFLFKHGSGSSAIFSAASQNYPLTSNTVYSPPPRPLPRSTFSRPAFTFNKPYRCCNWKCTALSATAITVTLALLLAYVIAVHLFGLTWQLQPVEGELYANGVSKGNRGTESMDTTYSPIGGKVSDKSEKKVFQKGRAIDTGEVDIGAQVMQTIPPGLFWRFQITIHHPIYLKFNISLAKDSLLGIYGRRNIPPTHTQFDFVKLMDGKQLVKQDSKGSDDTQHSPRNLILTSLQETGFIEYMDQGPWYLAFYNDGKKMEQVFVLTTAIEIMDDCSTNCNGNGECISGHCHCFPGFLGPDCARDSCPVLCGGNGEYEKGHCVCRHGWKGPECDVPEEQCIDPTCFGHGTCIMGVCICVPGYKGEICEEEDCLDPMCSNHGICVKGECHCSTGWGGVNCETPLPVCQEQCSGHGTFLLDAGVCSCDPKWTGSDCSTELCTMECGSHGVCSRGICQCEEGWVGPTCEERSCHSHCTEHGQCKDGKCECSPGWEGDHCTIAHYLDAVRDGCPGLCFGNGRCTLDQNGWHCVCQVGWSGTGCNVVMEMLCGDNLDNDGDGLTDCVDPDCCQQSNCYISPLCQGSPDPLDLIQQSQTLFSQHTSRLFYDRIKFLIGKDSTHVIPPEVSFDSRRACVIRGQVVAIDGTPLVGVNVSFLHHSDYGFTISRQDGSFDLVAIGGISVILIFDRSPFLPEKRTLWLPWNQFIVVEKVTMQRVVSDPPSCDISNFISPNPIVLPSPLTSFGGSCPERGTIVPELQVVQEEIPIPSSFVRLSYLSSRTPGYKTLLRILLTHSTIPVGMIKVHLTVAVEGRLTQKWFPAAINLVYTFAWNKTDIYGQKVWGLAEALVSVGYEYETCPDFILWEQRTVVLQGFEMDASNLGGWSLNKHHILNPQSGIIHKGNGENMFISQQPPVISTIMGNGHQRSVACTNCNGPAHNNKLFAPVALASGPDGSVYVGDFNFVRRIFPSGNSVSILELSTSPAHKYYLAMDPVSESLYLSDTNTRKVYKLKSLVETKDLSKNFEVVAGTGDQCLPFDQSHCGDGGRASEASLNSPRGITVDRHGFIYFVDGTMIRKIDENAVITTVIGSNGLTSTQPLSCDSGMDITQRNANQNHNEISSHPSWNGCYQNDKKKCW

SEQ ID NO: 12771 - protein, 1246 aa, Artificial Sequence; identical to SEQ ID NO: 42
  Synthetic polypeptide

SEQ ID NO: 12772 - protein, 1239 aa, Artificial Sequence
  Synthetic polypeptide
MEQTDCKPYQPLPKVKHEMDLAYTSSSDESEDGRKPRQSYNSRETLHEYNQELRMNYNSQSRKRKEVEKSTQEMEFCETSHTLCSGYQTDMHSVSRHGYQLEMGSDVDTETEGAASPDHALRMWIRGMKSEHSSCLSSRANSALSLTDTDHERKSDGENGFKFSPVCCDMEAQAGSTQDVQSSPHNQFTFRPLPPPPPPPHACTCARKPPPAADSLQRRSMTTRSQPSPAAPAPPTSTQDSVHLHNSWVLNSNIPLETRHFLFKHGSGSSAIFSAASQNYPLTSNTVYSPPPRPLPRSTFSRPAFTFNKPYRCCNWKCTALSATAITVTLALLLAYVIAVHLFGLTWQLQPVEGELYANGVSKGNRGTESMDTTYSPIGGKVSDKSEKKVFQKGRAIDTGEVDIGAQVMQTIPPGLFWRFQITIHHPIYLKFNISLAKDSLLGIYGRRNIPPTHTQFDFVKLMDGKQLVKQDSKGSDDTQHSPRNLILTSLQETGFIEYMDQGPWYLAFYNDGKKMEQVFVLTTAIEIMDDCSTNCNGNGECISGHCHCFPGFLGPDCARDSCPVLCGGNGEYEKGHCVCRHGWKGPECDVPEEQCIDPTCFGHGTCIMGVCICVPGYKGEICEEEDCLDPMCSNHGICVKGECHCSTGWGGVNCETPLPVCQEQCSGHGTFLLDAGVCSCDPKWTGSDCSTELCTMECGSHGVCSRGICQCEEGWVGPTCEERSCHSHCTEHGQCKDGKCECSPGWEGDHCTIAHYLDAVRDGCPGLCFGNGRCTLDQNGWHCVCQVGWSGTGCNVVMEMLCGDNLDNDGDGLTDCVDPDCCQQSNCYISPLCQGSPDPLDLIQQSQTLFSQHTSRLFYDRIKFLIGKDSTHVIPPEVSFDSRRACVIRGQVVAIDGTPLVGVNVSFLHHSDYGFTISRQDGSFDLVAIGGISVILIFDRSPFLPEKRTLWLPWNQFIVVEKVTMQRVVSDPPSCDISNFISPNPIVLPSPLTSFGGSCPERGTIVPELQVVQEEIPIPSSFVRLSYLSSRTPGYKTLLRILLTHSTIPVGMIKVHLTVAVEGRLTQKWFPAAINLVYTFAWNKTDIYGQKVWGLAEALVSVGYEYETCPDFILWEQRTVVLQGFEMDASNLGGWSLNKHHILNPQSGIIHKGNGENMFISQQPPVISTIMGNGHQRSVACTNCNGPAHNNKLFAPVALASGPDGSVYVGDFNFVRRIFPSGNSVSILELRSSKTRKV

SEQ ID NO: 12773 - protein, 1243 aa, Artificial Sequence
  Synthetic polypeptide
MEQTDCKPYQPLPKVKHEMDLAYTSSSDESEDGRKPRQSYNSRETLHEYNQELRMNYNSQSRKRKEVEKSTQEMEFCETSHTLCSGYQTDMHSVSRHGYQLEMGSDVDTETEGAASPDHALRMWIRGMKSEHSSCLSSRANSALSLTDTDHERKSDGENGFKFSPVCCDMEAQAGSTQDVQSSPHNQFTFRPLPPPPPPPHACTCARKPPPAADSLQRRSMTTRSQPSPAAPAPPTSTQDSVHLHNSWVLNSNIPLETRHFLFKHGSGSSAIFSAASQNYPLTSNTVYSPPPRPLPRSTFSRPAFTFNKPYRCCNWKCTALSATAITVTLALLLAYVIAVHLFGLTWQLQPVEGELYANGVSKGNRGTESMDTTYSPIGGKVSDKSEKKVFQKGRAIDTGEVDIGAQVMQTIPPGLFWRFQITIHHPIYLKFNISLAKDSLLGIYGRRNIPPTHTQFDFVKLMDGKQLVKQDSKGSDDTQHSPRNLILTSLQETGFIEYMDQGPWYLAFYNDGKKMEQVFVLTTAIEIMDDCSTNCNGNGECISGHCHCFPGFLGPDCARDSCPVLCGGNGEYEKGHCVCRHGWKGPECDVPEEQCIDPTCFGHGTCIMGVCICVPGYKGEICEEEDCLDPMCSNHGICVKGECHCSTGWGGVNCETPLPVCQEQCSGHGTFLLDAGVCSCDPKWTGSDCSTELCTMECGSHGVCSRGICQCEEGWVGPTCEERSCHSHCTEHGQCKDGKCECSPGWEGDHCTIAHYLDAVRDGCPGLCFGNGRCTLDQNGWHCVCQVGWSGTGCNVVMEMLCGDNLDNDGDGLTDCVDPDCCQQSNCYISPLCQGSPDPLDLIQQSQTLFSQHTSRLFYDRIKFLIGKDSTHVIPPEVSFDSRRACVIRGQVVAIDGTPLVGVNVSFLHHSDYGFTISRQDGSFDLVAIGGISVILIFDRSPFLPEKRTLWLPWNQFIVVEKVTMQRVVSDPPSCDISNFISPNPIVLPSPLTSFGGSCPERGTIVPELQVVQEEIPIPSSFVRLSYLSSRTPGYKTLLRILLTHSTIPVGMIKVHLTVAVEGRLTQKWFPAAINLVYTFAWNKTDIYGQKVWGLAEALVSVGYEYETCPDFILWEQRTVVLQGFEMDASNLGGWSLNKHHILNPQSGIIHKGNGENMFISQQPPVISTIMGNGHQRSVACTNCNGPAHNNKLFAPVALASGPDGSVYVGDFNFVRRIFPSGNSVSILELRASAQQKKLPSE

SEQ ID NO: 12774 - protein, 3 aa, Artificial Sequence
  Synthetic polypeptide
MAS

SEQ ID NO: 12775 - protein, 53 aa, Artificial Sequence
  Synthetic polypeptide
MNLHMRMTAFCKDHDSRSGKQPSQTLSPSDFLDKLMGRTSGYDARIRPNFKVE

SEQ ID NO: 12776 - protein, 69 aa, Artificial Sequence
  Synthetic polypeptide
MNRQLVNILTALFAFFLETNHFRTAFCKDHDSRSGKQPSQTLSPSDFLDKLMGRTSGYDARIRPNFKVE

SEQ ID NO: 12777 - protein, 33 aa, Artificial Sequence
  Synthetic polypeptide
HVEWCKQLIAATISSQISGSVTSENVSRDYKKP

SEQ ID NO: 12778 - protein, 86 aa, Artificial Sequence
  Synthetic polypeptide
MDRPAAAAAAGCEGGGGPNPGPAGGRRPPRAAGGATAGSRQPSVETLDSPTGSHVEWCKQLIAATISSQISGSVTSENVSRDYKKP

SEQ ID NO: 12779 - protein, 32 aa, Artificial Sequence
  Synthetic polypeptide
HVEWCKQLIAATISSQISGSVTSENVSRDYKE

SEQ ID NO: 12780 - protein, 85 aa, Artificial Sequence
  Synthetic polypeptide
MDRPAAAAAAGCEGGGGPNPGPAGGRRPPRAAGGATAGSRQPSVETLDSPTGSHVEWCKQLIAATISSQISGSVTSENVSRDYKE

SEQ ID NO: 12781 - protein, 165 aa, Artificial Sequence
  Synthetic polypeptide
ETSSVKQPWDHTTTTTTNRPGTTRAPAKPPGSGLDLADALDDQDDGRRKPGIGGRERWNHVTTTTKRPVTTRAPANTLGNDFDLADALDDRNDRDDGRRKPIAGGGGFSDKDLEDIVGGGEYKPDKGKGDGRYGSNDDPGSAPHLYPCFELSHLSGPNQCTSYTY

SEQ ID NO: 12782 - protein, 202 aa, Artificial Sequence
  Synthetic polypeptide
MVAWRSAFLVCLAFSLATLVQRGSGDFDDFNLEDAVKETSSVKQPWDHTTTTTTNRPGTTRAPAKPPGSGLDLADALDDQDDGRRKPGIGGRERWNHVTTTTKRPVTTRAPANTLGNDFDLADALDDRNDRDDGRRKPIAGGGGFSDKDLEDIVGGGEYKPDKGKGDGRYGSNDDPGSAPHLYPCFELSHLSGPNQCTSYTY

SEQ ID NO: 12783 - protein, 129 aa, Artificial Sequence
  Synthetic polypeptide
MVAWRSAFLVCLAFSLATLVQRGSGDFDDFNLEDAVKETSSVKQPWDHTTTTTTNRPGTTRAPAKPPGSGLDLADALDDQDDGRRKPGIGGRGDGRYGSNDDPGSAPHLYPCFELSHLSGPNQCTSYTY

SEQ ID NO: 12784 - protein, 153 aa, Artificial Sequence
  Synthetic polypeptide
MVAWRSAFLVCLAFSLATLVQRGSGDFDDFNLEDAVKETSSVKQRWNHVTTTTKRPVTTRAPANTLGNDFDLADALDDRNDRDDGRRKPIAGGGGFSDKDLEDIVGGGEYKPDKGKGDGRYGSNDDPGSAPHLYPCFELSHLSGPNQCTSYTY

SEQ ID NO: 12785 - protein, 130 aa, Artificial Sequence
  Synthetic polypeptide
MVAWRSAFLVCLAFSLATLVQRGSGDFDDFNLEDAVKETSSVKRNDFDLADALDDRNDRDDGRRKPIAGGGGFSDKDLEDIVGGGEYKPDKGKGDGRYGSNDDPGSAPHLYPCFELSHLSGPNQCTSYTY

SEQ ID NO: 12786 - protein, 176 aa, Artificial Sequence
  Synthetic polypeptide
ETSSVKQPWDHTTTTTTNRPGTTRAPAKPPGSGLDLADALDDQDDGRRKPGIGGRERWNHVTTTTKRPVTTRAPANTLGNDFDLADALDDRNDRDDGRRKPIAGGGGFSDKDLEDIVGGGEYKPDKGKVTKTAWYWYKNRHIDQWNRIENIQKMPQTCSHLIFNKIDKTSSGERTP

SEQ ID NO: 12787 - protein, 213 aa, Artificial Sequence
  Synthetic polypeptide
MVAWRSAFLVCLAFSLATLVQRGSGDFDDFNLEDAVKETSSVKQPWDHTTTTTTNRPGTTRAPAKPPGSGLDLADALDDQDDGRRKPGIGGRERWNHVTTTTKRPVTTRAPANTLGNDFDLADALDDRNDRDDGRRKPIAGGGGFSDKDLEDIVGGGEYKPDKGKVTKTAWYWYKNRHIDQWNRIENIQKMPQTCSHLIFNKIDKTSSGERTP

SEQ ID NO: 12788 - protein, 164 aa, Artificial Sequence
  Synthetic polypeptide
MVAWRSAFLVCLAFSLATLVQRGSGDFDDFNLEDAVKETSSVKQRWNHVTTTTKRPVTTRAPANTLGNDFDLADALDDRNDRDDGRRKPIAGGGGFSDKDLEDIVGGGEYKPDKGKVTKTAWYWYKNRHIDQWNRIENIQKMPQTCSHLIFNKIDKTSSGERTP

SEQ ID NO: 12789 - protein, 141 aa, Artificial Sequence
  Synthetic polypeptide
MVAWRSAFLVCLAFSLATLVQRGSGDFDDFNLEDAVKETSSVKRNDFDLADALDDRNDRDDGRRKPIAGGGGFSDKDLEDIVGGGEYKPDKGKVTKTAWYWYKNRHIDQWNRIENIQKMPQTCSHLIFNKIDKTSSGERTP

SEQ ID NO: 12790 - protein, 9 aa, Artificial Sequence
  Synthetic polypeptide
ETSSVKRSL

SEQ ID NO: 12791 - protein, 46 aa, Artificial Sequence
  Synthetic polypeptide
MVAWRSAFLVCLAFSLATLVQRGSGDFDDFNLEDAVKETSSVKRSL

SEQ ID NO: 12792 - protein, 17 aa, Artificial Sequence
  Synthetic polypeptide
ETSSVKHNKKPYLLGSL

SEQ ID NO: 12793 - protein, 54 aa, Artificial Sequence
  Synthetic polypeptide
MVAWRSAFLVCLAFSLATLVQRGSGDFDDFNLEDAVKETSSVKHNKKPYLLGSL

SEQ ID NO: 12794 - protein, 230 aa, Artificial Sequence
  Synthetic polypeptide
MLSKVLPVLLGILLILQSRVEGPQTESKNEASSRDVVYGPQPQPLENQLLSEETKSTETETGSRVGKLPEASRILNTILSNYDHKLRPGIGEKPTVVTVEISVNSLGPLSILDMEYTIDIIFSQTWYDERLCYNDTFESLVLNGNVVSQLWIPDTFFRNSKRTHEHEITMPNQMVRIYKDGKVLYTIRMTIDAGCSLHMLRFPMDSHSCPLSFSSWPDTEECSVNALIEW

SEQ ID NO: 12795 - protein, 1139 aa, Artificial Sequence
  Synthetic polypeptide
MGDMANSSIEFHPKPQQQRDVPQAGGFGCTLAELRTLMELRGAEALQKIEEAYGDVSGLCRRLKTSPTEGLADNTNDLEKRRQIYGQNFIPPKQPKTFLQLVWEALQDVTLIILEVAAIVSLGLSFYAPPGEESEACGNVSGGAEDEGEAEAGWIEGAAILLSVICVVLVTAFNDWSKEKQFRGLQSRIEQEQKFTVIRNGQLLQVPVAALVVGDIAQVKYGDLLPADGVLIQANDLKIDESSLTGESDHVRKSADKDPMLLSGTHVMEGSGRMVVTAVGVNSQTGIIFTLLGAGGEEEEKKDKKAKKQDGAVAMEMQPLKSAEGGEMEEREKKKANAPKKEKSVLQGKLTKLAVQIGKAGLVMSAITVIILVLYFVIETFVVEGRTWLAECTPVYVQYFVKFFIIGVTVLVVAVPEGLPLAVTISLAYSVKKMMKDNNLVRHLDACETMGNATAICSDKTGTLTTNRMTVVQSYLGDTHYKEIPAPSALTPKILDLLVHAISINSAYTTKILPPEKEGALPRQVGNKTECALLGFVLDLKRDFQPVREQIPEDKLYKVYTFNSVRKSMSTVIRMPDGGFRLFSKGASEILLKKCTNILNSNGELRGFRPRDRDDMVRKIIEPMACDGLRTICIAYRDFSAGQEPDWDNENEVVGDLTCIAVVGIEDPVRPEVPEAIRKCQRAGITVRMVTGDNINTARAIAAKCGIIQPGEDFLCLEGKEFNRRIRNEKGEIEQERLDKVWPKLRVLARSSPTDKHTLVKGIIDSTTGEQRQVVAVTGDGTNDGPALKKADVGFAMGIAGTDVAKEASDIILTDDNFTSIVKAVMWGRNVYDSISKFLQFQLTVNVVAVIVAFTGACITQDSPLKAVQMLWVNLIMDTFASLALATEPPTESLLLRKPYGRDKPLISRTMMKNILGHAVYQLAIIFTLLFVGELFFDIDSGRNAPLHSPPSEHYTIIFNTFVMMQLFNEINARKIHGERNVFDGIFSNPIFCTIVLGTFGIQIVIVQFGGKPFSCSPLSTEQWLWCLFVGVGELVWGQVIATIPTSQLKCLKEAGHGPGKDEMTDEELAEGEEEIDHAERELRRGQILWFRGLNRIQTQFCQNAPDSLCLHTPPWNSLVIPLQPGLCPPLPRNGARLG

SEQ ID NO: 12796 - protein, 1153 aa, Artificial Sequence
  Synthetic polypeptide
MGDMANSSIEFHPKPQQQRDVPQAGGFGCTLAELRTLMELRGAEALQKIEEAYGDVSGLCRRLKTSPTEGLADNTNDLEKRRQIYGQNFIPPKQPKTFLQLVWEALQDVTLIILEVAAIVSLGLSFYAPPGEESEACGNVSGGAEDEGEAEAGWIEGAAILLSVICVVLVTAFNDWSKEKQFRGLQSRIEQEQKFTVIRNGQLLQVPVAALVVGDIAQVKYGDLLPADGVLIQANDLKIDESSLTGESDHVRKSADKDPMLLSGTHVMEGSGRMVVTAVGVNSQTGIIFTLLGAGGEEEEKKDKKGKQQDGAMESSQTKAKKQDGAVAMEMQPLKSAEGGEMEEREKKKANAPKKEKSVLQGKLTKLAVQIGKAGLVMSAITVIILVLYFVIETFVVEGRTWLAECTPVYVQYFVKFFIIGVTVLVVAVPEGLPLAVTISLAYSVKKMMKDNNLVRHLDACETMGNATAICSDKTGTLTTNRMTVVQSYLGDTHYKEIPAPSALTPKILDLLVHAISINSAYTTKILPPEKEGALPRQVGNKTECALLGFVLDLKRDFQPVREQIPEDKLYKVYTFNSVRKSMSTVIRMPDGGFRLFSKGASEILLKKCTNILNSNGELRGFRPRDRDDMVRKIIEPMACDGLRTICIAYRDFSAGQEPDWDNENEVVGDLTCIAVVGIEDPVRPEVPEAIRKCQRAGITVRMVTGDNINTARAIAAKCGIIQPGEDFLCLEGKEFNRRIRNEKGEIEQERLDKVWPKLRVLARSSPTDKHTLVKGIIDSTTGEQRQVVAVTGDGTNDGPALKKADVGFAMGIAGTDVAKEASDIILTDDNFTSIVKAVMWGRNVYDSISKFLQFQLTVNVVAVIVAFTGACITQDSPLKAVQMLWVNLIMDTFASLALATEPPTESLLLRKPYGRDKPLISRTMMKNILGHAVYQLAIIFTLLFVGELFFDIDSGRNAPLHSPPSEHYTIIFNTFVMMQLFNEINARKIHGERNVFDGIFSNPIFCTIVLGTFGIQIVIVQFGGKPFSCSPLSTEQWLWCLFVGVGELVWGQVIATIPTSQLKCLKEAGHGPGKDEMTDEELAEGEEEIDHAERELRRGQILWFRGLNRIQTQFCQNAPDSLCLHTPPWNSLVIPLQPGLCPPLPRNGARLG

SEQ ID NO: 12797 - protein, 500 aa, Artificial Sequence
  Synthetic polypeptide
MAAHGKLRRERGLQAEYETQVKEMRWQLSEQLRCLELQGELRRELLQELAEFMRRRAEVELEYSRGLEKLAERFSSRGGRLGSSREHQSFRKEPSLLSPLHCWAVLLQHTRQQSRESAALSEVLAGPLAQRLSHIAEDVGRLVKKAKKTYQAYHMESVNAEAKLREAERQEEKRAGRSVPTTTAGATEAGPLRKSSLKKGGRLVEKRQAKFMEHKLKCTKARNEYLLSLASVNAAVSNYYLHDVLDLMDCCDTGFHLALGQVLRSYTAAESRTQASQVQGLGSLEEAVEALDPPGDKAKVLEVHATVFCPPLRFDYHPHDGDEVAEICVEMELRDEILPRAQNIQSRLDRQTIETEEVNKTLKATLQALLEVVASDDGDVLDSFQTSPSTESLKSTSSDPGSRQAGRRRGQQQETETFYLTKLQEYLSGRSILAKLQAKHEKLQEALQRGDKEEQEVSWTQYTQRKFQKSRQPRPSSQYNQRLFGGDMEKFIQQQFANTT

SEQ ID NO: 12798 - protein, 561 aa, Artificial Sequence
  Synthetic polypeptide
MAAHGKLRRERGLQAEYETQVKEMRWQLSEQLRCLELQGELRRELLQELAEFMRRRAEVELEYSRGLEKLAERFSSRGGRLGSSREHQSFRKEPSLLSPLHCWAVLLQHTRQQSRESAALSEVLAGPLAQRLSHIAEDVGRLVKKSRDLEQQLQDELLEVVSELQTAKKTYQAYHMESVNAEAKLREAERQEEKRAGRSVPTTTAGATEAGPLRKSSLKKGGRLVEKLWPPQRPVAASSCAPVCWLQAGFLVHPPWWGAMCAPSTHQRQAKFMEHKLKCTKARNEYLLSLASVNAAVSNYYLHDVLDLMDCCDTGFHLALGQVLRSYTAAESRTQASQVQGLGSLEEAVEALDPPGDKAKVLEVHATVFCPPLRFDYHPHDGDEVAEICVEMELRDEILPRAQNIQSRLDRQTIETEEVNKTLKATLQALLEVVASDDGDVLDSFQTSPSTESLKSTSSDPGSRQAGRRRGQQQETETFYLTKLQEYLSGRSILAKLQAKHEKLQEALQRGDKEEQEVSWTQYTQRKFQKSRQPRPSSQYNQRLFGGDMEKFIQQQFANTT

SEQ ID NO: 12799 - protein, 521 aa, Artificial Sequence
  Synthetic polypeptide
MAAHGKLRRERGLQAEYETQVKEMRWQLSEQLRCLELQGELRRELLQELAEFMRRRAEVELEYSRGLEKLAERFSSRGGRLGSSREHQSFRKEPSLLSPLHCWAVLLQHTRQQSRESAALSEVLAGPLAQRLSHIAEDVGRLVKKSRDLEQQLQDELLEVVSELQTAKKTYQAYHMESVNAEAKLREAERQEEKRAGRSVPTTTAGATEAGPLRKSSLKKGGRLVEKRQAKFMEHKLKCTKARNEYLLSLASVNAAVSNYYLHDVLDLMDCCDTGFHLALGQVLRSYTAAESRTQASQVQGLGSLEEAVEALDPPGDKAKVLEVHATVFCPPLRFDYHPHDGDEVAEICVEMELRDEILPRAQNIQSRLDRQTIETEEVNKTLKATLQALLEVVASDDGDVLDSFQTSPSTESLKSTSSDPGSRQAGRRRGQQQETETFYLTKLQEYLSGRSILAKLQAKHEKLQEALQRGDKEEQEVSWTQYTQRKFQKSRQPRPSSQYNQRLFGGDMEKFIQQQFANTT

SEQ ID NO: 12800 - protein, 343 aa, Artificial Sequence
  Synthetic polypeptide
MAAHGKLRRERGLQAEYETQVKEMRWQLSEQLRCLELQGELRRELLQELAEFMRRRAEVELEYSRGLEKLAERFSSRGGRLGSSREHQSFRKEPSLLSPLHCWAVLLQHTRQQSRESAALSEVLAGPLAQRLSHIAEDVGRLVKKSRDLEQQLQDELLEVVSELQTVAEICVEMELRDEILPRAQNIQSRLDRQTIETEEVNKTLKATLQALLEVVASDDGDVLDSFQTSPSTESLKSTSSDPGSRQAGRRRGQQQETETFYLTKLQEYLSGRSILAKLQAKHEKLQEALQRGDKEEQEVSWTQYTQRKFQKSRQPRPSSQYNQRLFGGDMEKFIQQQFANTT

SEQ ID NO: 12801 - protein, 498 aa, Artificial Sequence
  Synthetic polypeptide
MRWQLSEQLRCLELQGELRRELLQELAEFMRRRAEVELEYSRGLEKLAERFSSRGGRLGSSREHQSFRKEPSLLSPLHCWAVLLQHTRQQSRESAALSEVLAGPLAQRLSHIAEDVGRLVKKSRDLEQQLQDELLEVVSELQTAKKTYQAYHMESVNAEAKLREAERQEEKRAGRSVPTTTAGATEAGPLRKSSLKKGGRLVEKRQAKFMEHKLKCTKARNEYLLSLASVNAAVSNYYLHDVLDLMDCCDTGFHLALGQVLRSYTAAESRTQASQVQGLGSLEEAVEALDPPGDKAKVLEVHATVFCPPLRFDYHPHDGDEVAEICVEMELRDEILPRAQNIQSRLDRQTIETEEVNKTLKATLQALLEVVASDDGDVLDSFQTSPSTESLKSTSSDPGSRQAGRRRGQQQETETFYLTKLQEYLSGRSILAKLQAKHEKLQEALQRGDKEEQEVSWTQYTQRKFQKSRQPRPSSQYNQRLFGGDMEKFIQQQFANTT

SEQ ID NO: 12802 - protein, 36 aa, Artificial Sequence
  Synthetic polypeptide
  misc_feature (1)..(1): Xaa can be any naturally occurring amino acid
XKFQKSRQPRPSSQYNQRLFGGDMEKFIQQQFANTT

SEQ ID NO: 12803 - protein, 483 aa, Artificial Sequence
  Synthetic polypeptide
MAAHGKLRRERGLQAEYETQVKEMRWQLSEQLRCLELQGELRRELLQELAEFMRRRAEVELEYSRGLEKLAERFSSRGGRLGSSREHQSFRKEPSLLSPLHCWAVLLQHTRQQSRESAALSEVLAGPLAQRLSHIAEDVGRLVKKAKKTYQAYHMESVNAEAKLREAERQEEKRAGRSVPTTTAGATEAGPLRKSSLKKGGRLVEKRQAKFMEHKLKCTKARNEYLLSLASVNAAVSNYYLHDVLDLMDCCDTGFHLALGQVLRSYTAAESRTQASQVQGLGSLEEAVEALDPPGDKAKVLEVHATVFCPPLRFDYHPHDGDEVAEICVEMELRDEILPRAQNIQSRLDRQTIETEEVNKTLKATLQALLEVVASDDGDVLDSFQTSPSTESLKSTSSDPGSRQAGRRRGQQQETETFYLTKLQEYLSGRSILAKLQAKHEKLQEALQRGDKEEQEVSCNNLQIQRKALPKTSSKISDTYEWI

SEQ ID NO: 12804 - protein, 544 aa, Artificial Sequence
  Synthetic polypeptide
MAAHGKLRRERGLQAEYETQVKEMRWQLSEQLRCLELQGELRRELLQELAEFMRRRAEVELEYSRGLEKLAERFSSRGGRLGSSREHQSFRKEPSLLSPLHCWAVLLQHTRQQSRESAALSEVLAGPLAQRLSHIAEDVGRLVKKSRDLEQQLQDELLEVVSELQTAKKTYQAYHMESVNAEAKLREAERQEEKRAGRSVPTTTAGATEAGPLRKSSLKKGGRLVEKLWPPQRPVAASSCAPVCWLQAGFLVHPPWWGAMCAPSTHQRQAKFMEHKLKCTKARNEYLLSLASVNAAVSNYYLHDVLDLMDCCDTGFHLALGQVLRSYTAAESRTQASQVQGLGSLEEAVEALDPPGDKAKVLEVHATVFCPPLRFDYHPHDGDEVAEICVEMELRDEILPRAQNIQSRLDRQTIETEEVNKTLKATLQALLEVVASDDGDVLDSFQTSPSTESLKSTSSDPGSRQAGRRRGQQQETETFYLTKLQEYLSGRSILAKLQAKHEKLQEALQRGDKEEQEVSCNNLQIQRKALPKTSSKISDTYEWI

SEQ ID NO: 12805 - protein, 504 aa, Artificial Sequence
  Synthetic polypeptide
MAAHGKLRRERGLQAEYETQVKEMRWQLSEQLRCLELQGELRRELLQELAEFMRRRAEVELEYSRGLEKLAERFSSRGGRLGSSREHQSFRKEPSLLSPLHCWAVLLQHTRQQSRESAALSEVLAGPLAQRLSHIAEDVGRLVKKSRDLEQQLQDELLEVVSELQTAKKTYQAYHMESVNAEAKLREAERQEEKRAGRSVPTTTAGATEAGPLRKSSLKKGGRLVEKRQAKFMEHKLKCTKARNEYLLSLASVNAAVSNYYLHDVLDLMDCCDTGFHLALGQVLRSYTAAESRTQASQVQGLGSLEEAVEALDPPGDKAKVLEVHATVFCPPLRFDYHPHDGDEVAEICVEMELRDEILPRAQNIQSRLDRQTIETEEVNKTLKATLQALLEVVASDDGDVLDSFQTSPSTESLKSTSSDPGSRQAGRRRGQQQETETFYLTKLQEYLSGRSILAKLQAKHEKLQEALQRGDKEEQEVSCNNLQIQRKALPKTSSKISDTYEWI

SEQ ID NO: 12806 - protein, 326 aa, Artificial Sequence
  Synthetic polypeptide
MAAHGKLRRERGLQAEYETQVKEMRWQLSEQLRCLELQGELRRELLQELAEFMRRRAEVELEYSRGLEKLAERFSSRGGRLGSSREHQSFRKEPSLLSPLHCWAVLLQHTRQQSRESAALSEVLAGPLAQRLSHIAEDVGRLVKKSRDLEQQLQDELLEVVSELQTVAEICVEMELRDEILPRAQNIQSRLDRQTIETEEVNKTLKATLQALLEVVASDDGDVLDSFQTSPSTESLKSTSSDPGSRQAGRRRGQQQETETFYLTKLQEYLSGRSILAKLQAKHEKLQEALQRGDKEEQEVSCNNLQIQRKALPKTSSKISDTYEWI

SEQ ID NO: 12807 - protein, 481 aa, Artificial Sequence
  Synthetic polypeptide
MRWQLSEQLRCLELQGELRRELLQELAEFMRRRAEVELEYSRGLEKLAERFSSRGGRLGSSREHQSFRKEPSLLSPLHCWAVLLQHTRQQSRESAALSEVLAGPLAQRLSHIAEDVGRLVKKSRDLEQQLQDELLEVVSELQTAKKTYQAYHMESVNAEAKLREAERQEEKRAGRSVPTTTAGATEAGPLRKSSLKKGGRLVEKRQAKFMEHKLKCTKARNEYLLSLASVNAAVSNYYLHDVLDLMDCCDTGFHLALGQVLRSYTAAESRTQASQVQGLGSLEEAVEALDPPGDKAKVLEVHATVFCPPLRFDYHPHDGDEVAEICVEMELRDEILPRAQNIQSRLDRQTIETEEVNKTLKATLQALLEVVASDDGDVLDSFQTSPSTESLKSTSSDPGSRQAGRRRGQQQETETFYLTKLQEYLSGRSILAKLQAKHEKLQEALQRGDKEEQEVSCNNLQIQRKALPKTSSKISDTYEWI

SEQ ID NO: 12808 - protein, 97 aa, Artificial Sequence
  Synthetic polypeptide
MEPQKLLIIGFLLCSLTCLLLETVASSPLPLSALGIQEKTGSKPRSGGNHRSWLNNFRDYLWQLIKSALPPAAIVAFLLTSALMGILCCFTASTEGL

SEQ ID NO: 12809 - protein, 732 aa, Artificial Sequence
  Synthetic polypeptide
MRSRSNSGVRLDGYARLVQQTILCYQNPVTGLLSASHEQKDAWVRDNIYSILAVWGLGMAYRKNADRDEDKAKAYELEQNVVKLMRGLLQCMMRQVAKVEKFKHTQSTKDSLHAKYNTATCGTVVGDDQWGHLQVDATSLFLLFLAQMTASGLRIIFTLDEVAFIQNLVFYIEAAYKVADYGMWERGDKTNQGIPELNASSVGMAKAALEAIDELDLFGAHGGRKSVIHVLPDEVEHCQSILFSMLPRASTSKEIDAGLLSIISFPAFAVEDVNLVNVTKNEIISKLQGRYGCCRFLRDGYKTPREDPNRLHYDPAELKLFENIECEWPVFWTYFIIDGVFSGDAVQVQEYREALEGILIRGKNGIRLVPELYAVPPNKVDEEYKNPHTVDRVPMGKVPHLWGQSLYILSSLLAEGFLAAGEIDPLNRRFSTSVKPDVVVQVTVLAENNHIKDLLRKHGVNVQSIADIHPIQVQPGRILSHIYAKLGRNKNMNLSGRPYRHIGVLGTSKLYVIRNQIFTFTPQFTDQHHFYLALDNEMIVEMLRIELAYLCTCWRMTGRPTLTFPISRTMLTNDGSDIHSAVLSTIRKLEDGYFGGARVKLGNLSEFLTTSFYTYLTFLDPDCDEKLFDNASEGTFSPDSDSDLVGYLEDTCNQESQDELDHYINHLLQSTSLRSYLPPLCKNTEDRHVFSAIHSTRDILSVMAKAKGLEVPYAVADAYNPSTLGGQDRRIP

SEQ ID NO: 12810 - protein, 244 aa, Artificial Sequence
  Synthetic polypeptide
MVFSVRQCGHVGRTEEVLLTFKIFLVIICLHVVLVTSLEEDTDNSSLSPPPAKLSVVSFAPSSNEVETTSLNDVTLSLLPSNETEKTKITIVKTFNASGVKPQRNICNLSSICNDSAFFRGEIMFQYDKESTVPQNQHITNGTLTGVLSLSELKRSELNKTLQTLSETYFIMCATAEAQSTLNCTFTIKLNNTMNACAVIAALERVKIRPMEHCCCSVRIPCPSSPEELEKLQCIFYILLQSDK

SEQ ID NO: 12811 - protein, 225 aa, Artificial Sequence
  Synthetic polypeptide
MVFSVRQCGHVGRTEEVLLTFKIFLVIICLHVVLVTSLEEDTDNSSLSPPPAKLSVVSFAPSSNGTPDVTLSLLPSNETGVKPQRNICNLSSICNDSAFFRGEIMFQYDKESTVPQNQHITNGTLTGVLSLSELKRSELNKTLQTLSETYFIMCATAEAQSTLNCTFTIKLNNTMNACAVIAALERVKIRPMEHCCCSVRIPCPSSPEELEKLQCIFYILLQSDK

SEQ ID NO: 12812 - protein, 247 aa, Artificial Sequence
  Synthetic polypeptide
MVFSVRQCGHVGRTEEVLLTFKIFLVIICLHVVLVTSLEEDTDNSSLSPPPAKLSVVSFAPSSNGTPEVETTSLNDVTLSLLPSNETEKTKITIVKTFNASGVKPQRNICNLSSICNDSAFFRGEIMFQYDKESTVPQNQHITNGTLTGVLSLSELKRSELNKTLQTLSETYFIMCATAEAQSTLNCTFTIKLNNTMNACAVIAALERVKIRPMEHCCCSVRIPCPSSPEELEKLQCIFYILLQSDK

SEQ ID NO: 12813 - protein, 233 aa, Artificial Sequence
  Synthetic polypeptide
MVFSVRQCGHVGRTEEVLLTFKIFLVIICLHVVLVTSLEEDTDNSSLSPPPAKLSVVSFAPSSNGTPEVETTSLNDVTLSLLPSNETGVKPQRNICNLSSICNDSAFFRGEIMFQYDKESTVPQNQHITNGTLTGVLSLSELKRSELNKTLQTLSETYFIMCATAEAQSTLNCTFTIKLNNTMNACAVIAALERVKIRPMEHCCCSVRIPCPSSPEELEKLQCIFYILLQSDK

SEQ ID NO: 12814 - protein, 231 aa, Artificial Sequence
  Synthetic polypeptide
MVFSVRQCGHVGRTEEVLLTFKIFLVIICLHVVLVTSLEEDTDNSSLSPPPDEETGACSDVTLSLLPSNETEKTKITIVKTFNASGVKPQRNICNLSSICNDSAFFRGEIMFQYDKESTVPQNQHITNGTLTGVLSLSELKRSELNKTLQTLSETYFIMCATAEAQSTLNCTFTIKLNNTMNACAVIAALERVKIRPMEHCCCSVRIPCPSSPEELEKLQCIFYILLQSDK

SEQ ID NO: 12815 - protein, 223 aa, Artificial Sequence
  Synthetic polypeptide
MVFSVRQCGHVGRTEEVLLTFKIFLVIICLHVVLVTSLEEDTDNSSLSPPPDVTLSLLPSNETEKTKITIVKTFNASGVKPQRNICNLSSICNDSAFFRGEIMFQYDKESTVPQNQHITNGTLTGVLSLSELKRSELNKTLQTLSETYFIMCATAEAQSTLNCTFTIKLNNTMNACAVIAALERVKIRPMEHCCCSVRIPCPSSPEELEKLQCIFYILLQSDK

SEQ ID NO: 12816 - protein, 231 aa, Artificial Sequence
  Synthetic polypeptide
MVFSVRQCGHVGRTEEVLLTFKIFLVIICLHVVLVTSLEEDTDNSSLSPPPEVETTSLNDVTLSLLPSNETEKTKITIVKTFNASGVKPQRNICNLSSICNDSAFFRGEIMFQYDKESTVPQNQHITNGTLTGVLSLSELKRSELNKTLQTLSETYFIMCATAEAQSTLNCTFTIKLNNTMNACAVIAALERVKIRPMEHCCCSVRIPCPSSPEELEKLQCIFYILLQSDK

SEQ ID NO: 12817 - protein, 217 aa, Artificial Sequence
  Synthetic polypeptide
MVFSVRQCGHVGRTEEVLLTFKIFLVIICLHVVLVTSLEEDTDNSSLSPPPEVETTSLNDVTLSLLPSNETGVKPQRNICNLSSICNDSAFFRGEIMFQYDKESTVPQNQHITNGTLTGVLSLSELKRSELNKTLQTLSETYFIMCATAEAQSTLNCTFTIKLNNTMNACAVIAALERVKIRPMEHCCCSVRIPCPSSPEELEKLQCIFYILLQSDK

SEQ ID NO: 12818 - protein, 10 aa, Artificial Sequence
  Synthetic polypeptide
MLWWEEVEDC

SEQ ID NO: 12819 - protein, 116 aa, Artificial Sequence
  Synthetic polypeptide
MGNWAVNEGLSIFVILVWLGLNVFLFVWYYRVYDIPPKFFYTRKLLGSALALARAPAACLNFNCMLILLPVCRNLLSFLRGSSALSPGASLKSQGIDVLRASLRAALSQSWMAVGG

SEQ ID NO: 12820 - protein, 84 aa, Artificial Sequence
  Synthetic polypeptide
MGNWAVNEGLSIFVISALALARAPAACLNFNCMLILLPVCRNLLSFLRGSSALSPGASLKSQGIDVLRASLRAALSQSWMAVGG

SEQ ID NO: 12821 - protein, 146 aa, Artificial Sequence
  Synthetic polypeptide
MEPGDAARPGSGRATGAPPPRLLLLPLLLGWGLRVAAAASASSSGAAAEDSSAMEELATEKEAEESHRQDSVSLLTFILLLTLTILTIWLFKHRRVRFLHETGLAMIYGVIIEVMQENVLILWRCKLKYSGVKYMNPNICNFQKVQ

SEQ ID NO: 12822 - protein, 584 aa, Artificial Sequence
  Synthetic polypeptide
MAMWQGAMDNRGFQQGSFSSFQNSSSDEDLMDIPATAMDFSMRDDVPPLDREVGEDKSYNGGGIGSSNRIMDFLEEPIPGVGTYDDFNTIDWVREKSRDRDRHREITNKSKESTWALIHSVSDAFSGWLLMLLIGLLSGSLAGLIDISAHWMTDLKEGICTGGFWFNHEHCCWNSEHVTFEERDKCPEWNSWSQLIISTDEGAFAYIVNYFMYVLWALLFAFLAVSLVKVFAPYACGSGIPEIKTILSGFIIRGYLGKWTLVIKTITLVLAVSSGLSLGKEGPLVHVACCCGNILCHCFNKYRKNEAKRREVLSAAAAAGVSVAFGAPIGGVLFSLEEVSYYFPLKTLWRSFFAALVAAFTLRSINPFGNSRLVLFYVEFHTPWHLFELVPFILLGIFGGLWGALFIRTNIAWCRKRKTTQLGKYPVIEVLVVTAITAILAFPNEYTRMSTSELISELFNDCGLLDSSKLCDYENRFNTSKGGELPDRPAGVGVYSAMWQLALTLILKIVITIFTFGMKIPSGLFIPSMAVGAIAGRLLGVGMEQLAYYHQEWTVFNSWCSQGADCITPGLYAMVGAAACLGKR

SEQ ID NO: 12823 - protein, 514 aa, Artificial Sequence
  Synthetic polypeptide
MDFLEEPIPGVGTYDDFNTIDWVREKSRDRDRHREITNKSKESTWALIHSVSDAFSGWLLMLLIGLLSGSLAGLIDISAHWMTDLKEGICTGGFWFNHEHCCWNSEHVTFEERDKCPEWNSWSQLIISTDEGAFAYIVNYFMYVLWALLFAFLAVSLVKVFAPYACGSGIPEIKTILSGFIIRGYLGKWTLVIKTITLVLAVSSGLSLGKEGPLVHVACCCGNILCHCFNKYRKNEAKRREVLSAAAAAGVSVAFGAPIGGVLFSLEEVSYYFPLKTLWRSFFAALVAAFTLRSINPFGNSRLVLFYVEFHTPWHLFELVPFILLGIFGGLWGALFIRTNIAWCRKRKTTQLGKYPVIEVLVVTAITAILAFPNEYTRMSTSELISELFNDCGLLDSSKLCDYENRFNTSKGGELPDRPAGVGVYSAMWQLALTLILKIVITIFTFGMKIPSGLFIPSMAVGAIAGRLLGVGMEQLAYYHQEWTVFNSWCSQGADCITPGLYAMVGAAACLGKR

SEQ ID NO: 12824 - protein, 24 aa, Artificial Sequence
  Synthetic polypeptide
MADEQEIMCKLESIKEIRRDALKQ

SEQ ID NO: 12825 - protein, 23 aa, Artificial Sequence
  Synthetic polypeptide
MPKTGYAEDSFSALMHLQVVCEV

SEQ ID NO: 12826 - protein, 33 aa, Artificial Sequence
  Synthetic polypeptide
MDAELEFAIQPNTTGKQLFDQVPVSPLTLFAML

SEQ ID NO: 12827 - protein, 44 aa, Artificial Sequence
  Synthetic polypeptide
MPKTISVRVTTMDAELEFAIQPNTTGKQLFDQVPVSPLTLFAML

SEQ ID NO: 12828 - protein, 76 aa, Artificial Sequence
  Synthetic polypeptide
MALLNFFFPDEKPYSEEESRRVRRNKRSKSNEGADDVPFTFHHDCEASPATWNCKSIKPLFLPSLGYVFINSVKTD

SEQ ID NO: 12829 - protein, 208 aa, Artificial Sequence
  Synthetic polypeptide
MGYPEVERRELLPAAAPRERGSQGCGCGGAPARAGEGNSCLLFLGFFGLSLALHLLTLCCYLELRSELRRERGAESRLGGSGTPGTSGTLSSLGGLDPDSPITSHLGQPSPKQQPLEPGEAALHSDSQDGHQMALLNFFFPDEKPYSEEESRRVRRNKRSKSNEGADDVPFTFHHDCEASPATWNCKSIKPLFLPSLGYVFINSVKTD

SEQ ID NO: 12830 - protein, 102 aa, Artificial Sequence
  Synthetic polypeptide
MVPGVPGAVLTLCLWLAASSGCLAAGPGAAAARRLDESLSAGSVQRARCASRCLSLQITRISAFFQHFQNNGSLVWCQNHKQCSKSQFLRRLRWENRLSLGS

SEQ ID NO: 12831 - protein, 3 aa, Artificial Sequence
  Synthetic polypeptide
DIT

SEQ ID NO: 12832 - protein, 282 aa, Artificial Sequence
  Synthetic polypeptide
NKTEQQQQQNKTSLSALTQLMKKMPHFRKQITKQVVHLNLAEDCMNKFKLNIEKLCKTEQDLALGTDAEGQKVKDSMRVLLPVLLNKNHDNCDKIRAILLYIFSINGTTEENLDRLIQNVKIENESDMIRNWSYLGVPIVPQSQQGKPLRKDRSAEETFQLSRWTPFIKDIMEDAIDNRLDSKEWPYCSQCPAVWNGSGAVSARQKPRANYLEDRKNGSKLIVFVIGGITYSEVRCAYEVSQAHKSCEVIIGSTHVLTPKKLLDDIKMLNKPKDKVSLIKDE

SEQ ID NO: 12833 - protein, 34 aa, Artificial Sequence
  Synthetic polypeptide
RQKLKTMASGCKKPKTKQNNNNNKIRHHLVLLPS

SEQ ID NO: 12834 - protein, 164 aa, Artificial Sequence
  Synthetic polypeptide
AQEFETSLGIIVRPRLYKKQKNNQSQQGKPLRKDRSAEETFQLSRWTPFIKDIMEDAIDNRLDSKEWPYCSQCPAVWNGSGAVSARQKPRANYLEDRKNGSKLIVFVIGGITYSEVRCAYEVSQAHKSCEVIIGSTHVLTPKKLLDDIKMLNKPKDKVSLIKDE

SEQ ID NO: 12835 - protein, 18 aa, Artificial Sequence
  Synthetic polypeptide
DLASTKNKKITSLNKANR

SEQ ID NO: 12836 - protein, 35 aa, Artificial Sequence
  Synthetic polypeptide
PVSTRQTVKKGSVCRRNFSALSVDTFYQRYYGGCY

SEQ ID NO: 12837 - protein, 50 aa, Artificial Sequence
  Synthetic polypeptide
GQARWLTPVILALWEAQASGSQGQEIKTILANMVYAPSWDAGIVWKIWNL

SEQ ID NO: 12838 - protein, 31 aa, Artificial Sequence
  Synthetic polypeptide
HFGRPRRVDHKVKRSRPSWPTWCTPQVGTPA

SEQ ID NO: 12839 - protein, 319 aa, Artificial Sequence
  Synthetic polypeptide
PGAVAHACNPSTLGGPGEWITRSRDQDHPGQHGVRPKLGRRHSMENMELMKLTPEKVQNWNSEILAKQKPLIAKPSAKLLFVNRLKGKKYKTNSSTKVLQDASNSIDHRIPNSQRKISADTIGDEGFFDLLSRFQSNRMDDQRCCLQEKNCHTASTTTSSTPPKMMLKTSSVPVVSPNTDEFLDLLASSQSRRLDDQRASFSNLPGLRLTQNSQSVLSHLMTNDNKEADEDFFDILVKCQGSRLDDQRCAPPPATTKGPTVPDEDFFSLILRSQGKRMDEQRVLLQRDQNRDTDFGLKDFLQNNALLEFKNSGKKSADH

SEQ ID NO: 12840 - protein, 59 aa, Artificial Sequence
  Synthetic polypeptide
GAGGGRCSGVEIDKERQKLSEYHYEYTACDSTGSRWRVAVPHTPGLCTSLPDPIKGTEC

SEQ ID NO: 12841 - protein, 120 aa, Artificial Sequence
  Synthetic polypeptide
GAGGGRCSGVEIDKERQKLSEYHYEYTACDSTGSRWRVAVPHTPGLCTSLPDPIKGTECSFSCNAGEFLDMKDQSCKPCAEGRYSLGTGIRFDEWDELPHGFASLSANMELDDSAAESTG

SEQ ID NO: 12842 - protein, 123 aa, Artificial Sequence
  Synthetic polypeptide
GAGGGRCSGVEIDKERQKLSEYHYEYTACDSTGSRWRVAVPHTPGLCTSLPDPIKGTECSFSCNAGEFLDMKDQSCKPCAEGRYSLGTGIRFDEWDELPHGFASLSANMELDDSAAESTGNCT

SEQ ID NO: 12843 - protein, 173 aa, Artificial Sequence
  Synthetic polypeptide
GAGGGRCSGVEIDKERQKLSEYHYEYTACDSTGSRWRVAVPHTPGLCTSLPDPIKGTECSFSCNAGEFLDMKDQSCKPCAEGRYSLGTGIRFDEWDELPHGFASLSANMELDDSAAESTGNCTSSKWVPRGDYIASNTDECTATLMYAVNLKQSGTVNFEYYYPDSSIIFEFF

SEQ ID NO: 12844 - protein, 894 aa, Artificial Sequence
  Synthetic polypeptide
GAGGGRCSGVEIDKERQKLSEYHYEYTACDSTGSRWRVAVPHTPGLCTSLPDPIKGTECSFSCNAGEFLDMKDQSCKPCAEGRYSLGTGIRFDEWDELPHGFASLSANMELDDSAAESTGNCTSSKWVPRGDYIASNTDECTATLMYAVNLKQSGTVNFEYYYPDSSIIFEFFVQNDQCQPNADDSRWMKTTEKGWEFHSVELNRGNNVLYWRTTAFSVWTKVPKPVLTQLMYKWAKPKICSEDLEGAVKLPASGVKTHCPPCNPGFFKTNNSTCQPCPYGSYSNGSDCTRCPAGTEPAVGFEYKWWNTLPTNMETTVLSGINFEYKGMTGWEVAGDHIYTAAGASDNDFMILTLVVPGFRPPQSVMADTENKEVARITFVFETLCSVNCELYFMVGVNSRTNTPVETWKGSKGKQSYTYIIEENTTTSFTWAFQRTTFHEASRKYTNDVAKIYSINVTNVMNGVASYCRPCALEASDVGSSCTSCPAGYYIDRDSGTCHSCPTNTILKAHQPYGVQACVPCGPGTKNNKIHSLCYNDCTFSRNTPTRTFNYNFSALANTVTLAGGPSFTSKGLKYFHHFTLSLCGNQGRKMSVCTDNVTDLRIPEGESGFSKSITAYVCQAVIIPPEVTGYKAGVSSQPVSLADRLIGVTTDMTLDGITSPAELFHLESLGIPDVIFFYRSNDVTQSCSSGRSTTIRVRCSPQKTVPGSLLLPGTCSDGTCDGCNFHFLWESAAACPLCSVADYHAIVSSCVAGIQKTTYVWREPKLCSGGISLPEQRVTICKTIDFWLKVGISAGTCTAILLTVLTCYFWKKNQKLEYKYSKLVMNATLKDCDLPAADSCAIMEGEDVEDDLIFTSKKSLFGKIKSFTSKRTPDGFDSVPLKTSSGGLDMDL

SEQ ID NO: 12845 - protein, 869 aa, Artificial Sequence
  Synthetic polypeptide
GAGGGRCSGVEIDKERQKLSEYHYEYTACDSTGSRWRVAVPHTPGLCTSLPDPIKGTECSFSCNAGEFLDMKDQSCKPCAEGRYSLGTGIRFDEWDELPHGFASLSANMELDDSAAESTGNCTSSKWVPRGDYIASNTDECTATLMYAVNLKQSGTVNFEYYYPDSSIIFEFFVQNDQCQPNADDSRWMKTTEKGWEFHSVELNRGNNVLYWRTTAFSVWTKVPKPVLVRNIAITEKGSSSCNVRPACTDKDYFYTHTACDANGETQLMYKWAKPKICSEDLEGAVKLPASGVKTHCPPCNPGFFKTNNSTCQPCPYGSYSNGSDCTRCPAGTEPAVGFEYKWWNTLPTNMETTVLSGINFEYKGMTGWEVAGDHIYTAAGASDNDFMILTLVVPGFRPPQSVMADTENKEVARITFVFETLCSVNCELYFMVGVNSRTNTPVETWKGSKGKQSYTYIIEENTTTSFTWAFQRTTFHEASRKYTNDVAKIYSINVTNVMNGVASYCRPCALEASDVGSSCTSCPAGYYIDRDSGTCHSCPTNTILKAHQPYGVQACVPCGPGTKNNKIHSLCYNDCTFSRNTPTRTFNYNFSALANTVTLAGGPSFTSKGLKYFHHFTLSLCGNQGRKMSVCTDNVTDLRIPEGESGFSKSITAYVCQAVIIPPEVTGYKAGVSSQPVSLADRLIGVTTDMTLDGITSPAELFHLESLGIPDVIFFYRSNDVTQSCSSGRSTTIRVRCSPQKTVPGSLLLPGTCSDGTCDGCNFHFLWESAAACPLCSVADYHAIVSSCVAGIQKTTYVWREPKLCSGGISLPEQRVTICKTIDFWLKVGISAGTCTAILLTVLTCYFWKKNQKLEYKYSKLVMNATLK

SEQ ID NO: 12846 - protein, 981 aa, Artificial Sequence
  Synthetic polypeptide
GAGGGRCSGVEIDKERQKLSEYHYEYTACDSTGSRWRVAVPHTPGLCTSLPDPIKGTECSFSCNAGEFLDMKDQSCKPCAEGRYSLGTGIRFDEWDELPHGFASLSANMELDDSAAESTGNCTSSKWVPRGDYIASNTDECTATLMYAVNLKQSGTVNFEYYYPDSSIIFEFFVQNDQCQPNADDSRWMKTTEKGWEFHSVELNRGNNVLYWRTTAFSVWTKVPKPVLVRNIAITGVAYTSECFPCKPGTYADKQGSSFCKLCPANSYSNKGETSCHQCDPDKYSEKGSSSCNVRPACTDKDYFYTHTACDANGETQLMYKWAKPKICSEDLEGAVKLPASGVKTHCPPCNPGFFKTNNSTCQPCPYGSYSNGSDCTRCPAGTEPAVGFEYKWWNTLPTNMETTVLSGINFEYKGMTGWEVAGDHIYTAAGASDNDFMILTLVVPGFRPPQSVMADTENKEVARITFVFETLCSVNCELYFMVGVNSRTNTPVETWKGSKGKQSYTYIIEENTTTSFTWAFQRTTFHEASRKYTNDVAKIYSINVTNVMNGVASYCRPCALEASDVGSSCTSCPAGYYIDRDSGTCHSCPTNTILKAHQPYGVQACVPCGPGTKNNKIHSLCYNDCTFSRNTPTRTFNYNFSALANTVTLAGGPSFTSKGLKYFHHFTLSLCGNQGRKMSVCTDNVTDLRIPEGESGFSKSITAYVCQAVIIPPEVTGYKAGVSSQPVSLADRLIGVTTDMTLDGITSPAELFHLESLGIPDVIFFYRSNDVTQSCSSGRSTTIRVRCSPQKTVPGSLLLPGTCSDGTCDGCNFHFLWESAAACPLCSVADYHAIVSSCVAGIQKTTYVWREPKLCSGGISLPEQRVTICKTIDFWLKVGISAGTCTAILLTVLTCYFWKKNQKLEYKYSKLVMNATLKDCDLPAADSCAIMEGEDVEDDLIFTSKKSLFGKIKSFTSKRTPDGFDSVPLKTSSGGLDMDL

SEQ ID NO: 12847 - protein, 47 aa, Artificial Sequence
  Synthetic polypeptide
IKNGRNCLSTTMSTRRVTARVPGGGSPCRIPRACAPACLTPSRAPSA

SEQ ID NO: 12848 - protein, 58 aa, Artificial Sequence
  Synthetic polypeptide
IKNGRNCLSTTMSTRRVTARVPGGGSPCRIPRACAPACLTPSRAPSAPSPATPGSFWI

SEQ ID NO: 12849 - protein, 6 aa, Artificial Sequence
  Synthetic polypeptide
RTAEIV

SEQ ID NO: 12850 - protein, 616 aa, Artificial Sequence
  Synthetic polypeptide
AGAMFHSSLRHQTQLMYKWAKPKICSEDLEGAVKLPASGVKTHCPPCNPGFFKTNNSTCQPCPYGSYSNGSDCTRCPAGTEPAVGFEYKWWNTLPTNMETTVLSGINFEYKGMTGWEVAGDHIYTAAGASDNDFMILTLVVPGFRPPQSVMADTENKEVARITFVFETLCSVNCELYFMVGVNSRTNTPVETWKGSKGKQSYTYIIEENTTTSFTWAFQRTTFHEASRKYTNDVAKIYSINVTNVMNGVASYCRPCALEASDVGSSCTSCPAGYYIDRDSGTCHSCPTNTILKAHQPYGVQACVPCGPGTKNNKIHSLCYNDCTFSRNTPTRTFNYNFSALANTVTLAGGPSFTSKGLKYFHHFTLSLCGNQGRKMSVCTDNVTDLRIPEGESGFSKSITAYVCQAVIIPPEVTGYKAGVSSQPVSLADRLIGVTTDMTLDGITSPAELFHLESLGIPDVIFFYRSNDVTQSCSSGRSTTIRVRCSPQKTVPGSLLLPGTCSDGTCDGCNFHFLWESAAACPLCSVADYHAIVSSCVAGIQKTTYVWREPKLCSGGISLPEQRVTICKTIDFWLKVGISAGTCTAILLTVLTCYFWKKNQKLEYKYSKLVMNATLK

SEQ ID NO: 12851 - protein, 678 aa, Artificial Sequence
  Synthetic polypeptide
AGAMFHSSLRHQTQLMYKWAKPKICSEDLEGAVKLPASGVKTHCPPCNPGFFKTNNSTCQPCPYGSYSNGSDCTRCPAGTEPAVGFEYKWWNTLPTNMETTVLSGINFEYKGMTGWEVAGDHIYTAAGASDNDFMILTLVVPGFRPPQSVMADTENKEVARITFVFETLCSVNCELYFMVGVNSRTNTPVETWKGSKGKQSYTYIIEENTTTSFTWAFQRTTFHEASRKYTNDVAKIYSINVTNVMNGVASYCRPCALEASDVGSSCTSCPAGYYIDRDSGTCHSCPTNTILKAHQPYGVQACVPCGPGTKNNKIHSLCYNDCTFSRNTPTRTFNYNFSALANTVTLAGGPSFTSKGLKYFHHFTLSLCGNQGRKMSVCTDNVTDLRIPEGESGFSKSITAYVCQAVIIPPEVTGYKAGVSSQPVSLADRLIGVTTDMTLDGITSPAELFHLESLGIPDVIFFYRSNDVTQSCSSGRSTTIRVRCSPQKTVPGSLLLPGTCSDGTCDGCNFHFLWESAAACPLCSVADYHAIVSSCVAGIQKTTYVWREPKLCSGGISLPEQRVTICKTIDFWLKVGISAGTCTAILLTVLTCYFWKKNQKLEYKYSKLVMNATLKDCDLPAADSCAIMEGEDVEDDLIFTSKKSLFGKIKSFTSKRTPDGFDSVPLKTSSGGLDMDL

SEQ ID NO: 12852 - protein, 23 aa, Artificial Sequence
  Synthetic polypeptide
DTRHNSCTNGPSRKSVARTLRGQ

SEQ ID NO: 12853 - protein, 24 aa, Artificial Sequence
  Synthetic polypeptide
RGHVSFISETPDTTHVQMGQAENL

SEQ ID NO: 12854 - protein, 738 aa, Artificial Sequence
  Synthetic polypeptide
ACCFLYKLTHVFDDLRGSVSLSWVGDSTGVILVLTTFHVPLVIMTFGQSKLYRSEDYGKNFKDITDLINNTFIRTEFGMAIGPENSGKVVLTAEVSGGSRGGRIFRSSDFAKNFVQTDLPFHPLTQMMYSPQNSDYLLALSTENGLWVSKNFGGKWEEIHKAVCLAKWGSDNTIFFTTYANGSCKADLGALELWRTSDLGKSFKTIGVKIYSFGLGGRFLFASVMADKDTTRRIHVSTDQGDTWSMAQLPSVGQEQFYSILAANDDMVFMHVDEPGDTGFGTIFTSDDRGIVYSKSLDRHLYTTTGGETDFTNVTSLRGVYITSVLSEDNSIQTMITFDQGGRWTHLRKPENSECDATAKNKNECSLHIHASYSISQKLNVPMAPLSEPNAVGIVIAHGSVGDAISVMVPDVYISDDGGYSWTKMLEGPHYYTILDSGGIIVAIEHSSRPINVIKFSTDEGQCWQTYTFTRDPIYFTGLASEPGARSMNISIWGFTESFLTSQWVSYTIDFKDILERNCEEKDYTIWLAHSTDPEDYEDGCILGYKEQFLRLRKSSVCQNGRDYVVTKQPSICLCSLEDFLCDFGYYRPENDSKCVEQPELKGHDLEFCLYGREEHLTTNGYRKIPGDKCQGGVNPVREVKDLKKKCTSNFLSPEKQNSKSNSVPIILAIVGLMLVTVVAGVLIVKKYVCGGRFLVHRYSVLQQHAEANGVDGVDALDTASHTNKSGYHDDSDEDLLE

SEQ ID NO: 12855 - protein, 23 aa, Artificial Sequence
  Synthetic polypeptide
HMCLMISEAQYPCPGLEIALGSF

SEQ ID NO: 12856 - protein, 5 aa, Artificial Sequence
  Synthetic polypeptide
INTCV

SEQ ID NO: 12857 - protein, 494 aa, Artificial Sequence
  Synthetic polypeptide
AGRRQIQFADDMQEFTKFPTKTGRRSLSRSISQSSTDSYSSAASYTDSSDDEVSPREKQQTNSKGSSNFCVKNIKQAEFGRREIEIAEQDMSALISLRKRAQGEKPLAGAKIVGCTHITAQTAVLIETLCALGAQCRWSACNIYSTQNEVAAALAEAGVAVFAWKGESEDDFWWCIDRCVNMDGWQANMILDDGGDLTHWVYKKYPNVFKKIRGIVEESVTGVHRLYQLSKAGKLCVPAMNVNDSVTKQKFDNLYCCRESILDGLKRTTDVMFGGKQVVVCGYGEVGKGCCAALKALGAIVYITEIDPICALQACMDGFRVVKLNEVIRQVDVVITCTGNKNVVTREHLDRMKNSCIVCNMGHSNTEIDVTSLRTPELTWERVRSQVDHVIWPDGKRVVLLAEGRLLNLSCSTVPTFVLSITATTQALALIELYNAPEGRYKQDVYLLPKKMDEYVASLHLPSFDAHLTELTDDQAKYLGLNKNGPFKPNYYRY

SEQ ID NO: 12858 - protein, 71 aa, Artificial Sequence
  Synthetic polypeptide
GPAGGKSSLLMTCRSSPNSPPKLAEDLCLARSHSPPLTATVQLHPTQIALMMRFLPERSSKPTPRAAAISV

SEQ ID NO: 12859 - protein, 9 aa, Artificial Sequence
  Synthetic polypeptide
GRQEANPVC

SEQ ID NO: 12860 - protein, 504 aa, Artificial Sequence
  Synthetic polypeptide
EKWLIPGLEKRKNKQIQFADDMQEFTKFPTKTGRRSLSRSISQSSTDSYSSAASYTDSSDDEVSPREKQQTNSKGSSNFCVKNIKQAEFGRREIEIAEQDMSALISLRKRAQGEKPLAGAKIVGCTHITAQTAVLIETLCALGAQCRWSACNIYSTQNEVAAALAEAGVAVFAWKGESEDDFWWCIDRCVNMDGWQANMILDDGGDLTHWVYKKYPNVFKKIRGIVEESVTGVHRLYQLSKAGKLCVPAMNVNDSVTKQKFDNLYCCRESILDGLKRTTDVMFGGKQVVVCGYGEVGKGCCAALKALGAIVYITEIDPICALQACMDGFRVVKLNEVIRQVDVVITCTGNKNVVTREHLDRMKNSCIVCNMGHSNTEIDVTSLRTPELTWERVRSQVDHVIWPDGKRVVLLAEGRLLNLSCSTVPTFVLSITATTQALALIELYNAPEGRYKQDVYLLPKKMDEYVASLHLPSFDAHLTELTDDQAKYLGLNKNGPFKPNYYRY

SEQ ID NO: 12861 - protein, 76 aa, Artificial Sequence
  Synthetic polypeptide
FQVWRRGRTSKSSLLMTCRSSPNSPPKLAEDLCLARSHSPPLTATVQLHPTQIALMMRFLPERSSKPTPRAAAISV

SEQ ID NO: 12862 - protein, 42 aa, Artificial Sequence
  Synthetic polypeptide
QLSHLLLQVLASKYYSLLKERLLREMVDSRFGEEEEQANPVC

SEQ ID NO: 12863 - protein, 8 aa, Artificial Sequence
  Synthetic polypeptide
ADGSLEIL

SEQ ID NO: 12864 - protein, 2 aa, Artificial Sequence
  Synthetic polypeptide
DT

SEQ ID NO: 12865 - protein, 15 aa, Artificial Sequence
  Synthetic polypeptide
SQHFERPRRMDHLRY

SEQ ID NO: 12866 - protein, 64 aa, Artificial Sequence
  Synthetic polypeptide
AEIAQLTPAWATERGSVSKNKKKSWLYDYTQTYNGSFYFSGICYLLSSVSFFFVPLAERWKNSL

SEQ ID NO: 12867 - protein, 65 aa, Artificial Sequence
  Synthetic polypeptide
AEIAQLTPAWATERGSVSKNKKKSWLYDYTQTYNGSFYFSGICYLLSSVSFFFVPLAERWKNSLT

SEQ ID NO: 12868 - protein, 85 aa, Artificial Sequence
  Synthetic polypeptide
SQQLMRLRQENHLNLRVGGCSEPRLRNSLQPGQQSEALSQKTKKKAGYMIIPRHTMALSTSLAYAISSLQFPFFLYHWPKDGKTV

SEQ ID NO: 12869 - protein, 35 aa, Artificial Sequence
  Synthetic polypeptide
TCGSEVAVSRDCATHSSLGNRARLCLKKQKKKLVI

SEQ ID NO: 12870 - protein, 73 aa, Artificial Sequence
  Synthetic polypeptide
KRLEGAFLLLLSCKDSQKAPSMKNRLSLDAESAGTLILDYPVSRTISNTRGSPLTEEYGWPWAFAGWCHSWWD

SEQ ID NO: 12871 - protein, 202 aa, Artificial Sequence
  Synthetic polypeptide
QYKRVTTHRRIWLALGLCWLVSFLVGLTPMFGWNMKLTSEYHRNVTFLSCQFVSVMRMDYMVYFSFLTWIFIPLVVMCAIYLDIFYIIRNKLSLNLSNSKETGAFYGREFKTAKSLFLVLFLFALSWLPLSIINCIIYFNGEVPQLVLYMGILLSHANSMMNPIVYAYKIKKFKETYLLILKACVVCHPSDSLDTSIEKNSE

SEQ ID NO: 12872 - protein, 92 aa, Artificial Sequence
  Synthetic polypeptide
SWTTQSPELLAIQEGHHSQKNMAGPGPLLAGVIPGGIDPHVWLEHETDLRVPQKCHLPFMPICFRHENGLHGILQLPHLDFHPPGCHVRHLS

SEQ ID NO: 12873 - protein, 72 aa, Artificial Sequence
  Synthetic polypeptide
FHLNEQFTAMRDLYMKNGQGFALVYSITAQSTFNDLQDLREQILRVKDTEDVPMILVGNKCDLEDERVVGKE

SEQ ID NO: 12874 - protein, 127 aa, Artificial Sequence
  Synthetic polypeptide
FHLNEQFTAMRDLYMKNGQGFALVYSITAQSTFNDLQDLREQILRVKDTEDVPMILVGNKCDLEDERVVGKEQGQNLARQWCNCAFLESSAKSKINVNEIFYDLVRQINRKTPVEKKKPKKKSCLLL

SEQ ID NO: 12875 - protein, 6 aa, Artificial Sequence
  Synthetic polypeptide
MSNLQQ

SEQ ID NO: 12876 - protein, 80 aa, Artificial Sequence
  Synthetic polypeptide
KSAVLKNLDILSGSPTDWLCNLGRVPLPLGLSSPTCKMGMMVELALWDTAGQEDYDRLRPLSYPDTDVILMCFSIDSPDS

SEQ ID NO: 12877 - protein, 81 aa, Artificial Sequence
  Synthetic polypeptide
KSAVLKNLDILSGSPTDWLCNLGRVPLPLGLSSPTCKMGMMVELALWDTAGQEDYDRLRPLSYPDTDVILMCFSIDSPDSL

SEQ ID NO: 12878 - protein, 96 aa, Artificial Sequence
  Synthetic polypeptide
KSAVLKNLDILSGSPTDWLCNLGRVPLPLGLSSPTCKMGMMVELALWDTAGQEDYDRLRPLSYPDTDVILMCFSIDSPDSLENIPEKWTPEVKHFC

SEQ ID NO: 12879 - protein, 188 aa, Artificial Sequence
  Synthetic polypeptide
KSAVLKNLDILSGSPTDWLCNLGRVPLPLGLSSPTCKMGMMVELALWDTAGQEDYDRLRPLSYPDTDVILMCFSIDSPDSLENIPEKWTPEVKHFCPNVPIILVGNKKDLRKAGTWRTGSVPLATLSAQPRPRRECGRCLRWPLGLASRSARTSVGGAVPFSEIPKAFPTCPLPSQGYRNYPPTTPAS

SEQ ID NO: 12880 - protein, 116 aa, Artificial Sequence
  Synthetic polypeptide
KSAVLKNLDILSGSPTDWLCNLGRVPLPLGLSSPTCKMGMMVELALWDTAGQEDYDRLRPLSYPDTDVILMCFSIDSPDSLENIPEKWTPEVKHFCPNVPIILVGNKKDLRQDEHT

SEQ ID NO: 12881 - protein, 158 aa, Artificial Sequence
  Synthetic polypeptide
KSAVLKNLDILSGSPTDWLCNLGRVPLPLGLSSPTCKMGMMVELALWDTAGQEDYDRLRPLSYPDTDVILMCFSIDSPDSLENIPEKWTPEVKHFCPNVPIILVGNKKDLRQDEHTRRELAKMKQEPVRSEEGRDMANRISAFGYLECSAKTKEGVRE

SEQ ID NO: 12882 - protein, 177 aa, Artificial Sequence
  Synthetic polypeptide
KSAVLKNLDILSGSPTDWLCNLGRVPLPLGLSSPTCKMGMMVELALWDTAGQEDYDRLRPLSYPDTDVILMCFSIDSPDSLENIPEKWTPEVKHFCPNVPIILVGNKKDLRQDEHTRRELAKMKQEPVRSEEGRDMANRISAFGYLECSAKTKEGVREVFEMATRAGLQVRKNKRRR

SEQ ID NO: 12883 - protein, 182 aa, Artificial Sequence
  Synthetic polypeptide
KSAVLKNLDILSGSPTDWLCNLGRVPLPLGLSSPTCKMGMMVELALWDTAGQEDYDRLRPLSYPDTDVILMCFSIDSPDSLENIPEKWTPEVKHFCPNVPIILVGNKKDLRQDEHTRRELAKMKQEPVRSEEGRDMANRISAFGYLECSAKTKEGVREVFEMATRAGLQVRKNKRRRGCPIL

SEQ ID NO: 12884 - protein, 34 aa, Artificial Sequence
  Synthetic polypeptide
PGPSPFASGFKLPHLQNGDDGGAGSVGHSRAGRL

SEQ ID NO: 12885 - protein, 40 aa, Artificial Sequence
  Synthetic polypeptide
WWSWLCGTQQGRKTMIDCGLSPTRTLMSSSCASPSTALTA

SEQ ID NO: 12886 - protein, 41 aa, Artificial Sequence
  Synthetic polypeptide
WWSWLCGTQQGRKTMIDCGLSPTRTLMSSSCASPSTALTAW

SEQ ID NO: 12887 - protein, 51 aa, Artificial Sequence
  Synthetic polypeptide
WWSWLCGTQQGRKTMIDCGLSPTRTLMSSSCASPSTALTAWKTFLRSGPQR

SEQ ID NO: 12888 - protein, 11 aa, Artificial Sequence
  Synthetic polypeptide
CLLPSHTQSAQ

SEQ ID NO: 12889 - protein, 28 aa, Artificial Sequence
  Synthetic polypeptide
MSSSISYPVGSMTCMETTNTHTGHVASS

SEQ ID NO: 12890 - protein, 54 aa, Artificial Sequence
  Synthetic polypeptide
VFFHLIPSRLNDMYGDYKYTYWACGVVLIISGIYLFIGMGINYRLLAKEQKANE

SEQ ID NO: 12891 - protein, 98 aa, Artificial Sequence
  Synthetic polypeptide
VFFHLIPSRLNDMYGDYKYTYWACGVVLIISGIYLFIGMGINYRLLAKEQKANEQKKESKEEETSIDVAGKPNEVTKAAESPDQKDTDGGPKEEESPV

SEQ ID NO: 12892 - protein, 13 aa, Artificial Sequence
  Synthetic polypeptide
LWAKSLIKICGIT

SEQ ID NO: 12893 - protein, 9 aa, Artificial Sequence
  Synthetic polypeptide
QLCDFGQSH

SEQ ID NO: 12894 - protein, 1051 aa, Artificial Sequence
  Synthetic polypeptide
TSCVTLGKVINKDLRHYLSLQFQKGSIDHKLQQVIRDNLYLRTIPCTTRAPRDGEVPGVDYNFISVEQFKALEESGALLESGTYDGNFYGTPKPPAEPSPFQPDPVDQVLFDNEFDAESQRKRTTSVSKMERMDSSLPEEEEDEDKEAINGSGNAENRERHSESSDWMKTVPSYNQTNSSMDFRNYMMRDETLEPLPKNWEMAYTDTGMIYFIDHNTKTTTWLDPRLCKKAKAPEDCEDGELPYGWEKIEDPQYGTYYVDFTLVAQAGVQWHDLGSLQPPPPGFNHLNQKTQFENPVEEAKRKKQLGQVEIGSSKPDMEKSHFTRDPSQLKGVLVRASLKKSTMGFGFTIIGGDRPDEFLQVKNVLKDGPAAQDGKIAPGDVIVDINGNCVLGHTHADVVQMFQLVPVNQYVNLTLCRGYPLPDDSEDPVVDIVAATPVINGQSLTKGETCMNPQDFKPGAMVLEQNGKSGHTLTGDGLNGPSDASEQRVSMASSGSSQPELVTIPLIKGPKGFGFAIADSPTGQKVKMILDSQWCQGLQKGDIIKEIYHQNVQNLTHLQVVEVLKQFPVGADVPLLILRGGPPSPTKTAKMKTDKKENAGSLEAINEPIPQPMPFPPSIIRSGSPKLDPSEVYLKSKTLYEDKPPNTKDLDVFLRKQESGFGFRVLGGDGPDQSIYIGAIIPLGAAEKDGRLRAADELMCIDGIPVKGKSHKQVLDLMTTAARNGHVLLTVRRKIFYGEKQPEDDSSQAFISTQNGSPRLNRAEVPARPAPQEPYDVVLQRKENEGFGFVILTSKNKPPPGVIPHKIGRVIEGSPADRCGKLKVGDHISAVNGQSIVELSHDNIVQLIKDAGVTVTLTVIAEEEHHGPPSGTNSARQSPALQHRPMGQSQANHIPGDRSALEGEIGKDVSTSYRHSWSDHKHLAQPDTAVISVVGSRHNQNLGCYPVELERGPRGFGFSLRGGKEYNMGLFILRLAEDGPAIKDGRIHVGDQIVEINGEPTQGITHTRAIELIQAGGNKVLLLLRPGTGLIPDHGLAPSGLCSYVKPEQH

SEQ ID NO: 12895 - protein, 1382 aa, Artificial Sequence
  Synthetic polypeptide
TSCVTLGKVINKDLRHYLSLQFQKGSIDHKLQQVIRDNLYLRTIPCTTRAPRDGEVPGVDYNFISVEQFKALEESGALLESGTYDGNFYGTPKPPAEPSPFQPDPVDQVLFDNEFDAESQRKRTTSVSKMERMDSSLPEEEEDEDKEAINGSGNAENRERHSESSDWMKTVPSYNQTNSSMDFRNYMMRDETLEPLPKNWEMAYTDTGMIYFIDHNTKTTTWLDPRLCKKAKAPEDCEDGELPYGWEKIEDPQYGTYYVDHLNQKTQFENPVEEAKRKKQLGQVEIGSSKPDMEKSHFTRDPSQLKGVLVRASLKKSTMGFGFTIIGGDRPDEFLQVKNVLKDGPAAQDGKIAPGDVIVDINGNCVLGHTHADVVQMFQLVPVNQYVNLTLCRGYPLPDDSEDPVVDIVAATPVINGQSLTKGETCMNPQDFKPGAMVLEQNGKSGHTLTGDGLNGPSDASEQRVSMASSGSSQPELVTIPLIKGPKGFGFAIADSPTGQKVKMILDSQWCQGLQKGDIIKEIYHQNVQNLTHLQVVEVLKQFPVGADVPLLILRGGPPSPTKTAKMKTDKKENAGSLEAINEPIPQPMPFPPSIIRSGSPKLDPSEVYLKSKTLYEDKPPNTKDLDVFLRKQESGFGFRVLGGDGPDQSIYIGAIIPLGAAEKDGRLRAADELMCIDGIPVKGKSHKQVLDLMTTAARNGHVLLTVRRKIFYGEKQPEDDSSQAFISTQNGSPRLNRAEVPARPAPQEPYDVVLQRKENEGFGFVILTSKNKPPPGVIPHKIGRVIEGSPADRCGKLKVGDHISAVNGQSIVELSHDNIVQLIKDAGVTVTLTVIAEEEHHGPPSGTNSARQSPALQHRPMGQSQANHIPGDRSALEGEIGKDVSTSYRHSWSDHKHLAQPDTAVISVVGSRHNQNLGCYPVELERGPRGFGFSLRGGKEYNMGLFILRLAEDGPAIKDGRIHVGDQIVEINGEPTQGITHTRAIELIQAGGNKVLLLLRPGTGLIPDHGDWDINNPSSSNVIYDEQSPLPPSSHFASIFEESHVPVIEESLRVQICEKAEELKDIVPEKKSTLNENQPEIKHQSLLQKNVSKRDPPSSHGHSNKKNLLKVENGVTRRGRSVSPKKPASQHSEEHLDKIPSPLKNNPKRRPRDQSLSPSKGENKSCQVSTRAGSGQDQCRKSRGRSASPKKQQKIEGSKAPSNAEAKLLEGKSRRIAGYTGSNAEQIPDGKEKSDVIRKDAKQNQLEKSRTRSPEKKIKRMVEKSLPSKMTNKTTSKEVSENEKGKKVTTGETSSSNDKIGENVQLSEKRLKQEPEEKVVSNKTEDHKGKELEAADKNKETGRFKPESSSPVKKTLITPGPWKVPSGNKVTGTIGMAEKRQ

SEQ ID NO: 12896 - protein, 1026 aa, Artificial Sequence
  Synthetic polypeptide
TSCVTLGKVINKDLRHYLSLQFQKGSIDHKLQQVIRDNLYLRTIPCTTRAPRDGEVPGVDYNFISVEQFKALEESGALLESGTYDGNFYGTPKPPAEPSPFQPDPVDQVLFDNEFDAESQRKRTTSVSKMERMDSSLPEEEEDEDKEAINGSGNAENRERHSESSDWMKTVPSYNQTNSSMDFRNYMMRDETLEPLPKNWEMAYTDTGMIYFIDHNTKTTTWLDPRLCKKAKAPEDCEDGELPYGWEKIEDPQYGTYYVDHLNQKTQFENPVEEAKRKKQLGQVEIGSSKPDMEKSHFTRDPSQLKGVLVRASLKKSTMGFGFTIIGGDRPDEFLQVKNVLKDGPAAQDGKIAPGDVIVDINGNCVLGHTHADVVQMFQLVPVNQYVNLTLCRGYPLPDDSEDPVVDIVAATPVINGQSLTKGETCMNPQDFKPGAMVLEQNGKSGHTLTGDGLNGPSDASEQRVSMASSGSSQPELVTIPLIKGPKGFGFAIADSPTGQKVKMILDSQWCQGLQKGDIIKEIYHQNVQNLTHLQVVEVLKQFPVGADVPLLILRGGPPSPTKTAKMKTDKKENAGSLEAINEPIPQPMPFPPSIIRSGSPKLDPSEVYLKSKTLYEDKPPNTKDLDVFLRKQESGFGFRVLGGDGPDQSIYIGAIIPLGAAEKDGRLRAADELMCIDGIPVKGKSHKQVLDLMTTAARNGHVLLTVRRKIFYGEKQPEDDSSQAFISTQNGSPRLNRAEVPARPAPQEPYDVVLQRKENEGFGFVILTSKNKPPPGVIPHKIGRVIEGSPADRCGKLKVGDHISAVNGQSIVELSHDNIVQLIKDAGVTVTLTVIAEEEHHGPPSGTNSARQSPALQHRPMGQSQANHIPGDRSALEGEIGKDVSTSYRHSWSDHKHLAQPDTAVISVVGSRHNQNLGCYPVELERGPRGFGFSLRGGKEYNMGLFILRLAEDGPAIKDGRIHVGDQIVEINGEPTQGITHTRAIELIQAGGNKVLLLLRPGTGLIPDHGLAPSGLCSYVKPEQH

SEQ ID NO: 12897 - protein, 83 aa, Artificial Sequence
  Synthetic polypeptide
LETSMELPSLQQNPALFSQIQLIKSSLIMSLMQNLKENERHLSARWKEWIALFLKRKKMRTRKLLMAVETQKTERGILSHLTG

SEQ ID NO: 12898 - protein, 979 aa, Artificial Sequence
  Synthetic polypeptide
NGIILLESIVAVAGNFYGTPKPPAEPSPFQPDPVDQVLFDNEFDAESQRKRTTSVSKMERMDSSLPEEEEDEDKEAINGSGNAENRERHSESSDWMKTVPSYNQTNSSMDFRNYMMRDETLEPLPKNWEMAYTDTGMIYFIDHNTKTTTWLDPRLCKKAKAPEDCEDGELPYGWEKIEDPQYGTYYVDFTLVAQAGVQWHDLGSLQPPPPGFNHLNQKTQFENPVEEAKRKKQLGQVEIGSSKPDMEKSHFTRDPSQLKGVLVRASLKKSTMGFGFTIIGGDRPDEFLQVKNVLKDGPAAQDGKIAPGDVIVDINGNCVLGHTHADVVQMFQLVPVNQYVNLTLCRGYPLPDDSEDPVVDIVAATPVINGQSLTKGETCMNPQDFKPGAMVLEQNGKSGHTLTGDGLNGPSDASEQRVSMASSGSSQPELVTIPLIKGPKGFGFAIADSPTGQKVKMILDSQWCQGLQKGDIIKEIYHQNVQNLTHLQVVEVLKQFPVGADVPLLILRGGPPSPTKTAKMKTDKKENAGSLEAINEPIPQPMPFPPSIIRSGSPKLDPSEVYLKSKTLYEDKPPNTKDLDVFLRKQESGFGFRVLGGDGPDQSIYIGAIIPLGAAEKDGRLRAADELMCIDGIPVKGKSHKQVLDLMTTAARNGHVLLTVRRKIFYGEKQPEDDSSQAFISTQNGSPRLNRAEVPARPAPQEPYDVVLQRKENEGFGFVILTSKNKPPPGVIPHKIGRVIEGSPADRCGKLKVGDHISAVNGQSIVELSHDNIVQLIKDAGVTVTLTVIAEEEHHGPPSGTNSARQSPALQHRPMGQSQANHIPGDRSALEGEIGKDVSTSYRHSWSDHKHLAQPDTAVISVVGSRHNQNLGCYPVELERGPRGFGFSLRGGKEYNMGLFILRLAEDGPAIKDGRIHVGDQIVEINGEPTQGITHTRAIELIQAGGNKVLLLLRPGTGLIPDHGLAPSGLCSYVKPEQH

SEQ ID NO: 12899 - protein, 1310 aa, Artificial Sequence
  Synthetic polypeptide
NGIILLESIVAVAGNFYGTPKPPAEPSPFQPDPVDQVLFDNEFDAESQRKRTTSVSKMERMDSSLPEEEEDEDKEAINGSGNAENRERHSESSDWMKTVPSYNQTNSSMDFRNYMMRDETLEPLPKNWEMAYTDTGMIYFIDHNTKTTTWLDPRLCKKAKAPEDCEDGELPYGWEKIEDPQYGTYYVDHLNQKTQFENPVEEAKRKKQLGQVEIGSSKPDMEKSHFTRDPSQLKGVLVRASLKKSTMGFGFTIIGGDRPDEFLQVKNVLKDGPAAQDGKIAPGDVIVDINGNCVLGHTHADVVQMFQLVPVNQYVNLTLCRGYPLPDDSEDPVVDIVAATPVINGQSLTKGETCMNPQDFKPGAMVLEQNGKSGHTLTGDGLNGPSDASEQRVSMASSGSSQPELVTIPLIKGPKGFGFAIADSPTGQKVKMILDSQWCQGLQKGDIIKEIYHQNVQNLTHLQVVEVLKQFPVGADVPLLILRGGPPSPTKTAKMKTDKKENAGSLEAINEPIPQPMPFPPSIIRSGSPKLDPSEVYLKSKTLYEDKPPNTKDLDVFLRKQESGFGFRVLGGDGPDQSIYIGAIIPLGAAEKDGRLRAADELMCIDGIPVKGKSHKQVLDLMTTAARNGHVLLTVRRKIFYGEKQPEDDSSQAFISTQNGSPRLNRAEVPARPAPQEPYDVVLQRKENEGFGFVILTSKNKPPPGVIPHKIGRVIEGSPADRCGKLKVGDHISAVNGQSIVELSHDNIVQLIKDAGVTVTLTVIAEEEHHGPPSGTNSARQSPALQHRPMGQSQANHIPGDRSALEGEIGKDVSTSYRHSWSDHKHLAQPDTAVISVVGSRHNQNLGCYPVELERGPRGFGFSLRGGKEYNMGLFILRLAEDGPAIKDGRIHVGDQIVEINGEPTQGITHTRAIELIQAGGNKVLLLLRPGTGLIPDHGDWDINNPSSSNVIYDEQSPLPPSSHFASIFEESHVPVIEESLRVQICEKAEELKDIVPEKKSTLNENQPEIKHQSLLQKNVSKRDPPSSHGHSNKKNLLKVENGVTRRGRSVSPKKPASQHSEEHLDKIPSPLKNNPKRRPRDQSLSPSKGENKSCQVSTRAGSGQDQCRKSRGRSASPKKQQKIEGSKAPSNAEAKLLEGKSRRIAGYTGSNAEQIPDGKEKSDVIRKDAKQNQLEKSRTRSPEKKIKRMVEKSLPSKMTNKTTSKEVSENEKGKKVTTGETSSSNDKIGENVQLSEKRLKQEPEEKVVSNKTEDHKGKELEAADKNKETGRFKPESSSPVKKTLITPGPWKVPSGNKVTGTIGMAEKRQ

SEQ ID NO: 12900 - protein, 954 aa, Artificial Sequence
  Synthetic polypeptide
NGIILLESIVAVAGNFYGTPKPPAEPSPFQPDPVDQVLFDNEFDAESQRKRTTSVSKMERMDSSLPEEEEDEDKEAINGSGNAENRERHSESSDWMKTVPSYNQTNSSMDFRNYMMRDETLEPLPKNWEMAYTDTGMIYFIDHNTKTTTWLDPRLCKKAKAPEDCEDGELPYGWEKIEDPQYGTYYVDHLNQKTQFENPVEEAKRKKQLGQVEIGSSKPDMEKSHFTRDPSQLKGVLVRASLKKSTMGFGFTIIGGDRPDEFLQVKNVLKDGPAAQDGKIAPGDVIVDINGNCVLGHTHADVVQMFQLVPVNQYVNLTLCRGYPLPDDSEDPVVDIVAATPVINGQSLTKGETCMNPQDFKPGAMVLEQNGKSGHTLTGDGLNGPSDASEQRVSMASSGSSQPELVTIPLIKGPKGFGFAIADSPTGQKVKMILDSQWCQGLQKGDIIKEIYHQNVQNLTHLQVVEVLKQFPVGADVPLLILRGGPPSPTKTAKMKTDKKENAGSLEAINEPIPQPMPFPPSIIRSGSPKLDPSEVYLKSKTLYEDKPPNTKDLDVFLRKQESGFGFRVLGGDGPDQSIYIGAIIPLGAAEKDGRLRAADELMCIDGIPVKGKSHKQVLDLMTTAARNGHVLLTVRRKIFYGEKQPEDDSSQAFISTQNGSPRLNRAEVPARPAPQEPYDVVLQRKENEGFGFVILTSKNKPPPGVIPHKIGRVIEGSPADRCGKLKVGDHISAVNGQSIVELSHDNIVQLIKDAGVTVTLTVIAEEEHHGPPSGTNSARQSPALQHRPMGQSQANHIPGDRSALEGEIGKDVSTSYRHSWSDHKHLAQPDTAVISVVGSRHNQNLGCYPVELERGPRGFGFSLRGGKEYNMGLFILRLAEDGPAIKDGRIHVGDQIVEINGEPTQGITHTRAIELIQAGGNKVLLLLRPGTGLIPDHGLAPSGLCSYVKPEQH

SEQ ID NO: 12901 - protein, 67 aa, Artificial Sequence
  Synthetic polypeptide
NSCTLFHIHRLATILQSDNCKKWKLPYTAGKTIKWYNPSGEHRGSSWKLLWNSQASSRTQPFSARSS

SEQ ID NO: 12902 - protein, 23 aa, Artificial Sequence
  Synthetic polypeptide
GGSRGQETKTILANMSFLMAGRK

SEQ ID NO: 12903 - protein, 826 aa, Artificial Sequence
  Synthetic polypeptide
GWITRSGDQDHPGQHELPYGWEKIEDPQYGTYYVDFTLVAQAGVQWHDLGSLQPPPPGFNHLNQKTQFENPVEEAKRKKQLGQVEIGSSKPDMEKSHFTRDPSQLKGVLVRASLKKSTMGFGFTIIGGDRPDEFLQVKNVLKDGPAAQDGKIAPGDVIVDINGNCVLGHTHADVVQMFQLVPVNQYVNLTLCRGYPLPDDSEDPVVDIVAATPVINGQSLTKGETCMNPQDFKPGAMVLEQNGKSGHTLTGDGLNGPSDASEQRVSMASSGSSQPELVTIPLIKGPKGFGFAIADSPTGQKVKMILDSQWCQGLQKGDIIKEIYHQNVQNLTHLQVVEVLKQFPVGADVPLLILRGGPPSPTKTAKMKTDKKENAGSLEAINEPIPQPMPFPPSIIRSGSPKLDPSEVYLKSKTLYEDKPPNTKDLDVFLRKQESGFGFRVLGGDGPDQSIYIGAIIPLGAAEKDGRLRAADELMCIDGIPVKGKSHKQVLDLMTTAARNGHVLLTVRRKIFYGEKQPEDDSSQAFISTQNGSPRLNRAEVPARPAPQEPYDVVLQRKENEGFGFVILTSKNKPPPGVIPHKIGRVIEGSPADRCGKLKVGDHISAVNGQSIVELSHDNIVQLIKDAGVTVTLTVIAEEEHHGPPSGTNSARQSPALQHRPMGQSQANHIPGDRSALEGEIGKDVSTSYRHSWSDHKHLAQPDTAVISVVGSRHNQNLGCYPVELERGPRGFGFSLRGGKEYNMGLFILRLAEDGPAIKDGRIHVGDQIVEINGEPTQGITHTRAIELIQAGGNKVLLLLRPGTGLIPDHGLAPSGLCSYVKPEQH

SEQ ID NO: 12904 - protein, 1157 aa, Artificial Sequence
  Synthetic polypeptide
GWITRSGDQDHPGQHELPYGWEKIEDPQYGTYYVDHLNQKTQFENPVEEAKRKKQLGQVEIGSSKPDMEKSHFTRDPSQLKGVLVRASLKKSTMGFGFTIIGGDRPDEFLQVKNVLKDGPAAQDGKIAPGDVIVDINGNCVLGHTHADVVQMFQLVPVNQYVNLTLCRGYPLPDDSEDPVVDIVAATPVINGQSLTKGETCMNPQDFKPGAMVLEQNGKSGHTLTGDGLNGPSDASEQRVSMASSGSSQPELVTIPLIKGPKGFGFAIADSPTGQKVKMILDSQWCQGLQKGDIIKEIYHQNVQNLTHLQVVEVLKQFPVGADVPLLILRGGPPSPTKTAKMKTDKKENAGSLEAINEPIPQPMPFPPSIIRSGSPKLDPSEVYLKSKTLYEDKPPNTKDLDVFLRKQESGFGFRVLGGDGPDQSIYIGAIIPLGAAEKDGRLRAADELMCIDGIPVKGKSHKQVLDLMTTAARNGHVLLTVRRKIFYGEKQPEDDSSQAFISTQNGSPRLNRAEVPARPAPQEPYDVVLQRKENEGFGFVILTSKNKPPPGVIPHKIGRVIEGSPADRCGKLKVGDHISAVNGQSIVELSHDNIVQLIKDAGVTVTLTVIAEEEHHGPPSGTNSARQSPALQHRPMGQSQANHIPGDRSALEGEIGKDVSTSYRHSWSDHKHLAQPDTAVISVVGSRHNQNLGCYPVELERGPRGFGFSLRGGKEYNMGLFILRLAEDGPAIKDGRIHVGDQIVEINGEPTQGITHTRAIELIQAGGNKVLLLLRPGTGLIPDHGDWDINNPSSSNVIYDEQSPLPPSSHFASIFEESHVPVIEESLRVQICEKAEELKDIVPEKKSTLNENQPEIKHQSLLQKNVSKRDPPSSHGHSNKKNLLKVENGVTRRGRSVSPKKPASQHSEEHLDKIPSPLKNNPKRRPRDQSLSPSKGENKSCQVSTRAGSGQDQCRKSRGRSASPKKQQKIEGSKAPSNAEAKLLEGKSRRIAGYTGSNAEQIPDGKEKSDVIRKDAKQNQLEKSRTRSPEKKIKRMVEKSLPSKMTNKTTSKEVSENEKGKKVTTGETSSSNDKIGENVQLSEKRLKQEPEEKVVSNKTEDHKGKELEAADKNKETGRFKPESSSPVKKTLITPGPWKVPSGNKVTGTIGMAEKRQ

SEQ ID NO: 12905 - protein, 801 aa, Artificial Sequence
  Synthetic polypeptide
GWITRSGDQDHPGQHELPYGWEKIEDPQYGTYYVDHLNQKTQFENPVEEAKRKKQLGQVEIGSSKPDMEKSHFTRDPSQLKGVLVRASLKKSTMGFGFTIIGGDRPDEFLQVKNVLKDGPAAQDGKIAPGDVIVDINGNCVLGHTHADVVQMFQLVPVNQYVNLTLCRGYPLPDDSEDPVVDIVAATPVINGQSLTKGETCMNPQDFKPGAMVLEQNGKSGHTLTGDGLNGPSDASEQRVSMASSGSSQPELVTIPLIKGPKGFGFAIADSPTGQKVKMILDSQWCQGLQKGDIIKEIYHQNVQNLTHLQVVEVLKQFPVGADVPLLILRGGPPSPTKTAKMKTDKKENAGSLEAINEPIPQPMPFPPSIIRSGSPKLDPSEVYLKSKTLYEDKPPNTKDLDVFLRKQESGFGFRVLGGDGPDQSIYIGAIIPLGAAEKDGRLRAADELMCIDGIPVKGKSHKQVLDLMTTAARNGHVLLTVRRKIFYGEKQPEDDSSQAFISTQNGSPRLNRAEVPARPAPQEPYDVVLQRKENEGFGFVILTSKNKPPPGVIPHKIGRVIEGSPADRCGKLKVGDHISAVNGQSIVELSHDNIVQLIKDAGVTVTLTVIAEEEHHGPPSGTNSARQSPALQHRPMGQSQANHIPGDRSALEGEIGKDVSTSYRHSWSDHKHLAQPDTAVISVVGSRHNQNLGCYPVELERGPRGFGFSLRGGKEYNMGLFILRLAEDGPAIKDGRIHVGDQIVEINGEPTQGITHTRAIELIQAGGNKVLLLLRPGTGLIPDHGLAPSGLCSYVKPEQH

SEQ ID NO: 12906 - protein, 63 aa, Artificial Sequence
  Synthetic polypeptide
FVIQQTWIQVLLMSFNSCLILGKLLSLQELQFLPQNEDDRDTPCLMNVRIKGDRLFLIKLAES

SEQ ID NO: 12907 - protein, 9 aa, Artificial Sequence
  Synthetic polypeptide
GLKETGYSS

SEQ ID NO: 12908 - protein, 608 aa, Artificial Sequence
  Synthetic polypeptide
RRQVIPHKIGRVIEGSPADRCGKLKVGDHISAVNGQSIVELSHDNIVQLIKDAGVTVTLTVIAEEEHHGPPSGTNSARQSPALQHRPMGQSQANHIPGDRSALEGEIGKDVSTSYRHSWSDHKHLAQPDTAVISVVGSRHNQNLGCYPVELERGPRGFGFSLRGGKEYNMGLFILRLAEDGPAIKDGRIHVGDQIVEINGEPTQGITHTRAIELIQAGGNKVLLLLRPGTGLIPDHGDWDINNPSSSNVIYDEQSPLPPSSHFASIFEESHVPVIEESLRVQICEKAEELKDIVPEKKSTLNENQPEIKHQSLLQKNVSKRDPPSSHGHSNKKNLLKVENGVTRRGRSVSPKKPASQHSEEHLDKIPSPLKNNPKRRPRDQSLSPSKGENKSCQVSTRAGSGQDQCRKSRGRSASPKKQQKIEGSKAPSNAEAKLLEGKSRRIAGYTGSNAEQIPDGKEKSDVIRKDAKQNQLEKSRTRSPEKKIKRMVEKSLPSKMTNKTTSKEVSENEKGKKVTTGETSSSNDKIGENVQLSEKRLKQEPEEKVVSNKTEDHKGKELEAADKNKETGRFKPESSSPVKKTLITPGPWKVPSGNKVTGTIGMAEKRQ

SEQ ID NO: 12909 - protein, 252 aa, Artificial Sequence
  Synthetic polypeptide
RRQVIPHKIGRVIEGSPADRCGKLKVGDHISAVNGQSIVELSHDNIVQLIKDAGVTVTLTVIAEEEHHGPPSGTNSARQSPALQHRPMGQSQANHIPGDRSALEGEIGKDVSTSYRHSWSDHKHLAQPDTAVISVVGSRHNQNLGCYPVELERGPRGFGFSLRGGKEYNMGLFILRLAEDGPAIKDGRIHVGDQIVEINGEPTQGITHTRAIELIQAGGNKVLLLLRPGTGLIPDHGLAPSGLCSYVKPEQH

SEQ ID NO: 12910 - protein, 42 aa, Artificial Sequence
  Synthetic polypeptide
DVPCKMCLLPSAMIVRPPQPHGTYPASSIGGPRKLLQRFHHL

SEQ ID NO: 12911 - protein, 27 aa, Artificial Sequence
  Synthetic polypeptide
DVPFAFCHDCEASPATWNLSSEQHWWS

SEQ ID NO: 12912 - protein, 261 aa, Artificial Sequence
  Synthetic polypeptide
GLPSHMELIQRAALVVLENYYKDFTIYNPNLLTASKFRAAKHMAGLKVYNVDGPSNNATGQSRAMIAAAARRRDSSHNELYYEEAEHERRVKKRKARLVVAVEEAFIHIQRLQAEEQQKAPGEVMDPREAAQAIFPSMARALQKYLRITRQQNYHSMESILQHLAFCITNGMTPKAFLERYLSAGPTLQYDKDRWLSTQWRLVSDEAVTNGLRDGIVFVLKCLDFSLVVNVKKIPFIILSEEFIDPKSHKFVLRLQSETSV

SEQ ID NO: 12913 - protein, 8 aa, Artificial Sequence
  Synthetic polypeptide
GINICSCS

SEQ ID NO: 12914 - protein, 99 aa, Artificial Sequence
  Synthetic polypeptide
GRVRWLMPVISALWEAETGGSPEGLTSARAAEILARDGPNALTPPPTTPEWIKFCRQLFGGFSMLLWIGAILCFLAYSIQAATEEEPQNDNLYLGVVLS

SEQ ID NO: 12915 - protein, 137 aa, Artificial Sequence
  Synthetic polypeptide
GRVRWLMPVISALWEAETGGSPEGLTSARAAEILARDGPNALTPPPTTPEWIKFCRQLFGGFSMLLWIGAILCFLAYSIQAATEEEPQNDNLYLGVVLSAVVIITGCFSYYQEAKSSKIMESFKNMVPQQALVIRNG

SEQ ID NO: 12916 - protein, 985 aa, Artificial Sequence
  Synthetic polypeptide
GRVRWLMPVISALWEAETGGSPEGLTSARAAEILARDGPNALTPPPTTPEWIKFCRQLFGGFSMLLWIGAILCFLAYSIQAATEEEPQNDNLYLGVVLSAVVIITGCFSYYQEAKSSKIMESFKNMVPQQALVIRNGEKMSINAEEVVVGDLVEVKGGDRIPADLRIISANGCKVDNSSLTGESEPQTRSPDFTNENPLETRNIAFFSTNCVEGTARGIVVYTGDRTVMGRIATLASGLEGGQTPIAAEIEHFIHIITGVAVFLGVSFFILSLILEYTWLEAVIFLIGIIVANVPEGLLATVTVCLTLTAKRMARKNCLVKNLEAVETLGSTSTICSDKTGTLTQNRMTVAHMWFDNQIHEADTTENQSGVSFDKTSATWLALSRIAGLCNRAVFQANQENLPILKRAVAGDASESALLKCIELCCGSVKEMRERYAKIVEIPFNSTNKYQLSIHKNPNTSEPQHLLVMKGAPERILDRCSSILLHGKEQPLDEELKDAFQNAYLELGGLGERVLGFCHLFLPDEQFPEGFQFDTDDVNFPIDNLCFVGLISMIDPPRAAVPDAVGKCRSAGIKVIMVTGDHPITAKAIAKGVGIISEGNETVEDIAARLNIPVSQVNPRDAKACVVHGSDLKDMTSEQLDDILKYHTEIVFARTSPQQKLIIVEGCQRQGAIVAVTGDGVNDSPALKKADIGVAMGIAGSDVSKQAADMILLDDNFASIVTGVEEGRLIFDNLKKSIAYTLTSNIPEITPFLIFIIANIPLPLGTVTILCIDLGTDMVPAISLAYEQAESDIMKRQPRNPKTDKLVNERLISMAYGQIGMIQALGGFFTYFVILAENGFLPIHLLGLRVDWDDRWINDVEDSYGQQWTYEQRKIVEFTCHTAFFVSIVVVQWADLVICKTRRNSVFQQGMKNKILIFGLFEETALAAFLSYCPGMGVALRMYPLKPTWWFCAFPYSLLIFVYDEVRKLIIRRRPGGWVEKETYY

SEQ ID NO: 12917 - protein, 15 aa, Artificial Sequence
  Synthetic polypeptide
SQHFGRLRLVDHLRD

SEQ ID NO: 12918 - protein, 2456 aa, Artificial Sequence
  Synthetic polypeptide
EPEDQNSSPALQCRDGYEPCVNEGMCVTYHNGTGYCKCPEGFLGEYCQHRDPCEKNRCQNGGTCVAQAMLGKATCRCASGFTGEDCQYSTSHPCFVSRPCLNGGTCHMLSRDTYECTCQVGFTGKECQWTDACLSHPCANGSTCTTVANQFSCKCLTGFTGQKCETDVNECDIPGHCQHGGTCLNLPGSYQCQCPQGFTGQYCDSLYVPCAPSPCVNGGTCRQTGDFTFECNCLPGFEGSTCERNIDDCPNHRCQNGGVCVDGVNTYNCRCPPQWTGQFCTEDVDECLLQPNACQNGGTCANRNGGYGCVCVNGWSGDDCSENIDDCAFASCTPGSTCIDRVASFSCMCPEGKAGLLCHLDDACISNPCHKGALCDTNPLNGQYICTCPQGYKGADCTEDVDECAMANSNPCEHAGKCVNTDGAFHCECLKGYAGPRCEMDINECHSDPCQNDATCLDKIGGFTCLCMPGFKGVHCELEINECQSNPCVNNGQCVDKVNRFQCLCPPGFTGPVCQIDIDDCSSTPCLNGAKCIDHPNGYECQCATGFTGVLCEENIDNCDPDPCHHGQCQDGIDSYTCICNPGYMGAICSDQIDECYSSPCLNDGRCIDLVNGYQCNCQPGTSGVNCEINFDDCASNPCIHGICMDGINRYSCVCSPGFTGQRCNIDIDECASNPCRKGATCINGVNGFRCICPEGPHHPSCYSQVNECLSNPCIHGNCTGGLSGYKCLCDAGWVGINCEVDKNECLSNPCQNGGTCDNLVNGYRCTCKKGFKGYNCQVNIDECASNPCLNQGTCFDDISGYTCHCVLPYTGKNCQTVLAPCSPNPCENAAVCKESPNFESYTCLCAPGWQGQRCTIDIDECISKPCMNHGLCHNTQGSYMCECPPGFSGMDCEEDIDDCLANPCQNGGSCMDGVNTFSCLCLPGFTGDKCQTDMNECLSEPCKNGGTCSDYVNSYTCKCQAGFDGVHCENNINECTESSCFNGGTCVDGINSFSCLCPVGFTGSFCLHEINECSSHPCLNEGTCVDGLGTYRCSCPLGYTGKNCQTLVNLCSRSPCKNKGTCVQKKAESQCLCPSGWAGAYCDVPNVSCDIAASRRGVLVEHLCQHSGVCINAGNTHYCQCPLGYTGSYCEEQLDECASNPCQHGATCSDFIGGYRCECVPGYQGVNCEYEVDECQNQPCQNGGTCIDLVNHFKCSCPPGTRGLLCEENIDDCARGPHCLNGGQCMDRIGGYSCRCLPGFAGERCEGDINECLSNPCSSEGSLDCIQLTNDYLCVCRSAFTGRHCETFVDVCPQMPCLNGGTCAVASNMPDGFICRCPPGFSGARCQSSCGQVKCRKGEQCVHTASGPRCFCPSPRDCESGCASSPCQHGGSCHPQRQPPYYSCQCAPPFSGSRCELYTAPPSTPPATCLSQYCADKARDGVCDEACNSHACQWDGGDCSLTMENPWANCSSPLPCWDYINNQCDELCNTVECLFDNFECQGNSKTCKYDKYCADHFKDNHCDQGCNSEECGWDGLDCAADQPENLAEGTLVIVVLMPPEQLLQDARSFLRALGTLLHTNLRIKRDSQGELMVYPYYGEKSAAMKKQRMTRRSLPGEQEQEVAGSKVFLEIDNRQCVQDSDHCFKNTDAAAALLASHAIQGTLSYPLVSVVSESLTPERTQLLYLLAVAVVIILFIILLGVIMAKRKRKHGSLWLPEGFTLRRDASNHKRREPVGQDAVGLKNLSVQVSEANLIGTGTSEHWVDDEGPQPKKVKAEDEALLSEEDDPIDRRPWTQQHLEAADIRRTPSLALTPPQAEQEVDVLDVNVRGPDGCTPLMLASLRGGSSDLSDEDEDAEDSSANIITDLVYQGASLQAQTDRTGEMALHLAARYSRADAAKRLLDAGADANAQDNMGRCPLHAAVAADAQGVFQILIRNRVTDLDARMNDGTTPLILAARLAVEGMVAELINCQADVNAVDDHGKSALHWAAAVNNVEATLLLLKNGANRDMQDNKEETPLFLAAREGSYEAAKILLDHFANRDITDHMDRLPRDVARDRMHHDIVRLLDEYNVTPSPPGTVLTSALSPVICGPNRSFLSLKHTPMGKKSRRPSAKSTMPTSLPNLAKEAKDAKGSRRKKSLSEKVQLSESSVTLSPVDSLESPHTYVSDTTSSPMITSPGILQASPNPMLATAAPPAPVHAQHALSFSNLHEMQPLAHGASTVLPSVSQLLSHHHIVSPGSGSAGSLSRLHPVPVPADWMNRMEVNETQYNEMFGMVLAPAEGTHPGIAPQSRPPEGKHITTPREPLPPIVTFQLIPKGSIAQPAGAPQPQSTCPPAVAGPLPTMYQIPEMARLPSVAFPTAMMPQQDGQVAQTILPAYHPFPASVGKYPTPPSQHSYASSNAAERTPSHSGHLQGEHPYLTPSPESPDQWSSSSPHSASDWSDVTTSPTPGGAGGGQRGPGTHMSEPPHNNMQVYA

SEQ ID NO: 12919 - protein, 22 aa, Artificial Sequence
  Synthetic polypeptide
TRSQKTRILLQHCSVEMAMNPV

SEQ ID NO: 12920 - protein, 25 aa, Artificial Sequence
  Synthetic polypeptide
YFGQITELGARRPEFFSSIAVSRWL

SEQ ID NO: 12921 - protein, 2447 aa, Artificial Sequence
  Synthetic polypeptide
ALQCRDGYEPCVNEGMCVTYHNGTGYCKCPEGFLGEYCQHRDPCEKNRCQNGGTCVAQAMLGKATCRCASGFTGEDCQYSTSHPCFVSRPCLNGGTCHMLSRDTYECTCQVGFTGKECQWTDACLSHPCANGSTCTTVANQFSCKCLTGFTGQKCETDVNECDIPGHCQHGGTCLNLPGSYQCQCPQGFTGQYCDSLYVPCAPSPCVNGGTCRQTGDFTFECNCLPGFEGSTCERNIDDCPNHRCQNGGVCVDGVNTYNCRCPPQWTGQFCTEDVDECLLQPNACQNGGTCANRNGGYGCVCVNGWSGDDCSENIDDCAFASCTPGSTCIDRVASFSCMCPEGKAGLLCHLDDACISNPCHKGALCDTNPLNGQYICTCPQGYKGADCTEDVDECAMANSNPCEHAGKCVNTDGAFHCECLKGYAGPRCEMDINECHSDPCQNDATCLDKIGGFTCLCMPGFKGVHCELEINECQSNPCVNNGQCVDKVNRFQCLCPPGFTGPVCQIDIDDCSSTPCLNGAKCIDHPNGYECQCATGFTGVLCEENIDNCDPDPCHHGQCQDGIDSYTCICNPGYMGAICSDQIDECYSSPCLNDGRCIDLVNGYQCNCQPGTSGVNCEINFDDCASNPCIHGICMDGINRYSCVCSPGFTGQRCNIDIDECASNPCRKGATCINGVNGFRCICPEGPHHPSCYSQVNECLSNPCIHGNCTGGLSGYKCLCDAGWVGINCEVDKNECLSNPCQNGGTCDNLVNGYRCTCKKGFKGYNCQVNIDECASNPCLNQGTCFDDISGYTCHCVLPYTGKNCQTVLAPCSPNPCENAAVCKESPNFESYTCLCAPGWQGQRCTIDIDECISKPCMNHGLCHNTQGSYMCECPPGFSGMDCEEDIDDCLANPCQNGGSCMDGVNTFSCLCLPGFTGDKCQTDMNECLSEPCKNGGTCSDYVNSYTCKCQAGFDGVHCENNINECTESSCFNGGTCVDGINSFSCLCPVGFTGSFCLHEINECSSHPCLNEGTCVDGLGTYRCSCPLGYTGKNCQTLVNLCSRSPCKNKGTCVQKKAESQCLCPSGWAGAYCDVPNVSCDIAASRRGVLVEHLCQHSGVCINAGNTHYCQCPLGYTGSYCEEQLDECASNPCQHGATCSDFIGGYRCECVPGYQGVNCEYEVDECQNQPCQNGGTCIDLVNHFKCSCPPGTRGLLCEENIDDCARGPHCLNGGQCMDRIGGYSCRCLPGFAGERCEGDINECLSNPCSSEGSLDCIQLTNDYLCVCRSAFTGRHCETFVDVCPQMPCLNGGTCAVASNMPDGFICRCPPGFSGARCQSSCGQVKCRKGEQCVHTASGPRCFCPSPRDCESGCASSPCQHGGSCHPQRQPPYYSCQCAPPFSGSRCELYTAPPSTPPATCLSQYCADKARDGVCDEACNSHACQWDGGDCSLTMENPWANCSSPLPCWDYINNQCDELCNTVECLFDNFECQGNSKTCKYDKYCADHFKDNHCDQGCNSEECGWDGLDCAADQPENLAEGTLVIVVLMPPEQLLQDARSFLRALGTLLHTNLRIKRDSQGELMVYPYYGEKSAAMKKQRMTRRSLPGEQEQEVAGSKVFLEIDNRQCVQDSDHCFKNTDAAAALLASHAIQGTLSYPLVSVVSESLTPERTQLLYLLAVAVVIILFIILLGVIMAKRKRKHGSLWLPEGFTLRRDASNHKRREPVGQDAVGLKNLSVQVSEANLIGTGTSEHWVDDEGPQPKKVKAEDEALLSEEDDPIDRRPWTQQHLEAADIRRTPSLALTPPQAEQEVDVLDVNVRGPDGCTPLMLASLRGGSSDLSDEDEDAEDSSANIITDLVYQGASLQAQTDRTGEMALHLAARYSRADAAKRLLDAGADANAQDNMGRCPLHAAVAADAQGVFQILIRNRVTDLDARMNDGTTPLILAARLAVEGMVAELINCQADVNAVDDHGKSALHWAAAVNNVEATLLLLKNGANRDMQDNKEETPLFLAAREGSYEAAKILLDHFANRDITDHMDRLPRDVARDRMHHDIVRLLDEYNVTPSPPGTVLTSALSPVICGPNRSFLSLKHTPMGKKSRRPSAKSTMPTSLPNLAKEAKDAKGSRRKKSLSEKVQLSESSVTLSPVDSLESPHTYVSDTTSSPMITSPGILQASPNPMLATAAPPAPVHAQHALSFSNLHEMQPLAHGASTVLPSVSQLLSHHHIVSPGSGSAGSLSRLHPVPVPADWMNRMEVNETQYNEMFGMVLAPAEGTHPGIAPQSRPPEGKHITTPREPLPPIVTFQLIPKGSIAQPAGAPQPQSTCPPAVAGPLPTMYQIPEMARLPSVAFPTAMMPQQDGQVAQTILPAYHPFPASVGKYPTPPSQHSYASSNAAERTPSHSGHLQGEHPYLTPSPESPDQWSSSSPHSASDWSDVTTSPTPGGAGGGQRGPGTHMSEPPHNNMQVYA

SEQ ID NO: 12922 - protein, 587 aa, Artificial Sequence
  Synthetic polypeptide
EQLLDTVSAVQIKDRPFEDTCHGNPSHYYDKAVRRCCYRCPMGLFPTQQCPQRPTDCRKQCEPDYYLDEADRCTACVTCSRDDLVEKTPCAWNSSRVCECRPGMFCSTSAVNSCARCFFHSVCPAGMIVKFPGTAQKNTVCEPASPGVSPACASPENCKEPSSGTIPQAKPTPVSPATSSASTMPVRGGTRLAQEAASKLTRAPDSPSSVGRPSSDPGLSPTQPCPEGSGDCRKQCEPDYYLDEAGRCTACVSCSRDDLVEKTPCAWNSSRTCECRPGMICATSATNSRARCVPYPICAAETVTKPQDMAEKDTTFEAPPLGTQPDCNPTPENGEAPASTSPTQSLLVDSQASKTLPIPTSAPVALSSTGKPVLDAGPVLFWVILVLVVVVGSSAFLLCHRRACRKRIRQKLHLCYPVQTSQPKLELVDSRPRRSSTQLRSGASVTEPVAEERGLMSQPLMETCHSVGAAYLESLPLQDASPAGGPSSPRDLPEPRVSTEHTNNKIEKIYIMKADTVIVGTVKAELPEGRGLAGPAEPELEEELEADHTPHYPEQETEPPLGSCSDVMLSVEEEGKEDPLPTAASGK

SEQ ID NO: 12923 - protein, 64 aa, Artificial Sequence
  Synthetic polypeptide
RIDPSRTPVMETPATTMTRLSGGAVTAAPWGCSRHSSAHRGLLTAGSSVSLTTTWMRPTAVQPA

SEQ ID NO: 12924 - protein, 36 aa, Artificial Sequence
  Synthetic polypeptide
VNMCQVLRAASGHSECCANKGSTLRGHLSWKPQPLL

SEQ ID NO: 12925 - protein, 59 aa, Artificial Sequence
  Synthetic polypeptide
QGCGAIGILRHCREVPTSTTTLEAWMENLSELNMPYAPAVPLLGSTLRGHLSWKPQPLL

SEQ ID NO: 12926 - protein, 89 aa, Artificial Sequence
  Synthetic polypeptide
YDYFRSLDGESIRTEHALCPSSSTPRIDPSRTPVMETPATTMTRLSGGAVTAAPWGCSRHSSAHRGLLTAGSSVSLTTTWMRPTAVQPA

SEQ ID NO: 12927 - protein, 115 aa, Artificial Sequence
  Synthetic polypeptide
ALKRNEIIRSHRGTHKNTHSCLVRHSSNWKQPKCPSTSERIWLRRTPPLRRHPWGPSRTATPPQRMARRLPAPAPLRACWWTPRPVRRCPSQPALPSLSPPRGSPFWMQGQCSSG

SEQ ID NO: 12928 - protein, 48 aa, Artificial Sequence
  Synthetic polypeptide
PATLPRHSRGMKLYVHTEARTRILTAALFVIVQTGNNPNVHQLANGYG

SEQ ID NO: 12929 - protein, 281 aa, Artificial Sequence
  Synthetic polypeptide
RTDMAEKDTTFEAPPLGTQPDCNPTPENGEAPASTSPTQSLLVDSQASKTLPIPTSAPVALSSTGKPVLDAGPVLFWVILVLVVVVGSSAFLLCHRRACRKRIRQKLHLCYPVQTSQPKLELVDSRPRRSSTLRSGASVTEPVAEERGLMSQPLMETCHSVGAAYLESLPLQDASPAGGPSSPRDLPEPRVSTEHTNNKIEKIYIMKADTVIVGTVKAELPEGRGLAGPAEPELEEELEADHTPHYPEQETEPPLGSCSDVMLSVEEEGKEDPLPTAASGK

SEQ ID NO: 12930 - protein, 282 aa, Artificial Sequence
  Synthetic polypeptide
RTDMAEKDTTFEAPPLGTQPDCNPTPENGEAPASTSPTQSLLVDSQASKTLPIPTSAPVALSSTGKPVLDAGPVLFWVILVLVVVVGSSAFLLCHRRACRKRIRQKLHLCYPVQTSQPKLELVDSRPRRSSTQLRSGASVTEPVAEERGLMSQPLMETCHSVGAAYLESLPLQDASPAGGPSSPRDLPEPRVSTEHTNNKIEKIYIMKADTVIVGTVKAELPEGRGLAGPAEPELEEELEADHTPHYPEQETEPPLGSCSDVMLSVEEEGKEDPLPTAASGK

SEQ ID NO: 12931 - protein, 112 aa, Artificial Sequence
  Synthetic polypeptide
ATGNFLRFAEPKFPPAFAHAGPITSKSSLLWDNPSLSKSLVSGGGVFLKPSPCYHPQLAWLLLRAHHALASLSQDCQTACTDIVFSCLPRQAVGHLILPLVAMGPRSMSPAS

SEQ ID NO: 12932 - protein, 177 aa, Artificial Sequence
  Synthetic polypeptide
VPSRLCPCWAYHLKILPSVGQPQLVQVPGIWGRSFPETFSLLPPPAGLAAPPGSPCPGLPFTGLSDCMYRHCLLLSPTPGCGTPDSSPGGHGTQVNVTCIVNVCSSSDHSSQCSSQASSTMGDTDSSPSESPKDEQVPFSKEECAFRSQLETPETLLGSTEEKPLPLGVPDAGMKPS

SEQ ID NO: 12933 - protein, 138 aa, Artificial Sequence
  Synthetic polypeptide
ASTGQPEDDTETTGLEGGVAMPGAEDDVVTPGTSEDRYKSGLTTLVATSVNSVTGIRIEDLPTSESTVHAQEQSPSATASNVATSHSTEKVDGDTQTTVEKDGLSTVTLVGIIVGVLLAIGFIGAIIVVVMRKMSGRP

SEQ ID NO: 12934 - protein, 139 aa, Artificial Sequence
  Synthetic polypeptide
ASTGQPEDDTETTGLEGGVAMPGAEDDVVTPGTSEDRYKSGLTTLVATSVNSVTGIRIEDLPTSESTVHAQEQSPSATASNVATSHSTEKVDGDTQTTVEKDGLSTVTLVGIIVGVLLAIGFIGAIIVVVMRKMSGRYS

SEQ ID NO: 12935 - protein, 140 aa, Artificial Sequence
  Synthetic polypeptide
ASTGQPEDDTETTGLEGGVAMPGAEDDVVTPGTSEDRYKSGLTTLVATSVNSVTGIRIEDLPTSESTVHAQEQSPSATASNVATSHSTEKVDGDTQTTVEKDGLSTVTLVGIIVGVLLAIGFIGAIIVVVMRKMSGRYSP

SEQ ID NO: 12936 - protein, 51 aa, Artificial Sequence
  Synthetic polypeptide
GRVQWLTTVIPGLWEAEAGRSPEPAQASQKMTLRLQVWKAALPCQVPKMMW

SEQ ID NO: 12937 - protein, 21 aa, Artificial Sequence
  Synthetic polypeptide
SQDFGRLRRADHLSQHRPARR

SEQ ID NO: 12938 - protein, 53 aa, Artificial Sequence
  Synthetic polypeptide
KYRISQAWWWAPVIPATQEAEAGESLEPGRRRLRPKAYERRTNVTGPALHQKL

SEQ ID NO: 12939 - protein, 165 aa, Artificial Sequence
  Synthetic polypeptide
SQLLRRLRQENRLNPGGGGCDPKLMKEEQMSQAQLFTRSFDDGLGFEYVMFYNDIEKRMVCLFQGGPYLEGPPGFIHGGAIATMIDATVGMCAMMAGGIVMTANLNINYKRPIPLCSVVMINSQLDKVEGRKFFVSCNVQSVDEKTLYSEATSLFIKLNPAKSLT

SEQ ID NO: 12940 - protein, 11 aa, Artificial Sequence
  Synthetic polypeptide
TREAEVATQSL

SEQ ID NO: 12941 - protein, 22 aa, Artificial Sequence
  Synthetic polypeptide
IENQHPSHRVMEGINWRAFEGE

SEQ ID NO: 12942 - protein, 69 aa, Artificial Sequence
  Synthetic polypeptide
TGERLKENKNEKVIEHIMEDLDTNADKQLSFEEFIMLMARLTWASHEKMHEGDEGPGHHHKPGLGEGTP

SEQ ID NO: 12943 - protein, 377 aa, Artificial Sequence
  Synthetic polypeptide
EEERRARANDREYNEKFQYASNCIKTSKYNILTFLPVNLFEQFQEVANTYFLFLLILQLIPQISSLSWFTTIVPLVLVLTITAVKDATDDYFRHKSDNQVNNRQSQVLINGILQQEQWMNVCVGDIIKLENNQFVAADLLLLSSSEPHGLCYIETAELDGETNMKVRQAIPVTSELGDISKLAKFDGEVICEPPNNKLDKFSGTLYWKENKFPLSNQNMLLRGCVLRNTEWCFGLVIFAGPDTKLMQNSGRTKFKRTSIDRLMNTLVLWIFGFLVCMGVILAIGNAIWEHEVGMRFQVYLPWDEAVDSAFFSGFLSFWSYIIILNTVVPISLYVRYVPSLTWGLSRESGGPIELFFSMKMKSLRSNEKSSSSCTVNI

SEQ ID NO: 12944 - protein, 1180 aa, Artificial Sequence
  Synthetic polypeptide
EEERRARANDREYNEKFQYASNCIKTSKYNILTFLPVNLFEQFQEVANTYFLFLLILQLIPQISSLSWFTTIVPLVLVLTITAVKDATDDYFRHKSDNQVNNRQSQVLINGILQQEQWMNVCVGDIIKLENNQFVAADLLLLSSSEPHGLCYIETAELDGETNMKVRQAIPVTSELGDISKLAKFDGEVICEPPNNKLDKFSGTLYWKENKFPLSNQNMLLRGCVLRNTEWCFGLVIFAGPDTKLMQNSGRTKFKRTSIDRLMNTLVLWIFGFLVCMGVILAIGNAIWEHEVGMRFQVYLPWDEAVDSAFFSGFLSFWSYIIILNTVVPISLYVSVEVIRLGHSYFINWDKKMFCMKKRTPAEARTTTLNEELGQVEYIFSDKTGTLTQNIMVFNKCSINGHSYGDVFDVLGHKAELGERPEPVDFSFNPLADKKFLFWDPSLLEAVKIGDPHTHEFFRLLSLCHTVMSEEKNEGELYYKAQSPDEGALVTAARNFGFVFRSRTPKTITVHEMGTAITYQLLAILDFNNIRKRMSVIVRNPEGKIRLYCKGADTILLDRLHHSTQELLNTTMDHLNEYAGEGLRTLVLAYKDLDEEYYEEWAERRLQASLAQDSREDRLASIYEEVENNMMLLGATAIEDKLQQGVPETIALLTLANIKIWVLTGDKQETAVNIGYSCKMLTDDMTEVFIVTGHTVLEVREELRKAREKMMDSSRSVGNGFTYQDKLSSSKLTSVLEAVAGEYALVINGHSLAHALEADMELEFLETACACKAVICCRVTPLQKAQVVELVKKYKKAVTLAIGDGANDVSMIKTAHIGVGISGQEGIQAVLASDYSFSQFKFLQRLLLVHGRWSYLRMCKFLCYFFYKNFAFTMVHFWFGFFCGFSAQTVYDQYFITLYNIVYTSLPVLAMGVFDQDVPEQRSMEYPKLYEPGQLNLLFNKREFFICIAQGIYTSVLMFFIPYGVFADATRDDGTQLADYQSFAVTVATSLVIVVSVQIGLDTGYWTAINHFFIWGSLAVYFAILFAMHSNGLFDMFPNQFRFVGNAQNTLAQPTVWLTIVLTTVVCIMPVVAFRFLRLNLKPDLSDTVRYTQLVRKKQKAQHRCMRRVGRTGSRRSGYAFSHQEGFGELIMSGKNMRLSSLALSSFTTRSSSSWIESLRRKKSDSASSPSGGADKPLKG

SEQ ID NO: 12945 - protein, 432 aa, Artificial Sequence
  Synthetic polypeptide
EEERRARANDREYNEKFQYASNCIKTSKYNILTFLPVNLFEQFQEVANTYFLFLLILQLIPQISSLSWFTTIVPLVLVLTITAVKDATDDYFRHKSDNQVNNRQSQVLINGILQQEQWMNVCVGDIIKLENNQFVAADLLLLSSSEPHGLCYIETAELDGETNMKVRQAIPVTSELGDISKLAKFDGEVICEPPNNKLDKFSGTLYWKENKFPLSNQNMLLRGCVLRNTEWCFGLVIFAGPDTKLMQNSGRTKFKRTSIDRLMNTLVLWIFGFLVCMGVILAIGNAIWEHEVGMRFQVYLPWDEAVDSAFFSGFLSFWSYIIILNTVVPISLYVSVEVIRLGHSYFINWDKKMFCMKKRTPAEARTTTLNEELGQVEYIFSDKTGTLTQNIMVFNKCSINGHSYVGSEGPRRKGPSWPGTVAHAYSHSTLGG

SEQ ID NO: 12946 - protein, 59 aa, Artificial Sequence
  Synthetic polypeptide
EKKKGGRGLMTENTMRNSSMRVTASRPPSTIFSPSCLSTSLSSSRKLPTLTSCSSSFCS

SEQ ID NO: 12947 - protein, 8 aa, Artificial Sequence
  Synthetic polypeptide
RRRKEGAG

SEQ ID NO: 12948 - protein, 170 aa, Artificial Sequence
  Synthetic polypeptide
GLRREGYTVQVNVNDYLDIYCPHYNSSGVGPGAGPGPGGGAEQYVLYMVSRNGYRTCNASQGFKRWECNRPHAPHSPIKFSEKFQRYSAFSLGYEFHAGHEYYYISTPTHNLHWKCLRMKVFVCCASKDFEGENPQVPKLEKSISGTSPKREHLPLAVGIAFFLMTFLAS

SEQ ID NO: 12949 - protein, 196 aa, Artificial Sequence
  Synthetic polypeptide
GLRREGYTVQVNVNDYLDIYCPHYNSSGVGPGAGPGPGGGAEQYVLYMVSRNGYRTCNASQGFKRWECNRPHAPHSPIKFSEKFQRYSAFSLGYEFHAGHEYYYISTPTHNLHWKCLRMKVFVCCASTSHSGEKPVPTLPQFTMGPNVKINVLEDFEGENPQVPKLEKSISGTSPKREHLPLAVGIAFFLMTFLAS

SEQ ID NO: 12950 - protein, 168 aa, Artificial Sequence
  Synthetic polypeptide
NRGKYHRASSVVRPAARGLHRAGERERLSGYLLPALQQLGGGPRGGTGARRRGRAVRAVHGEPQRLPHLQRQPGLQALGVQPAARPAQPHQVLGEVPALQRLLSGLRVPRRPRVLLHLHAHSQPALEVSEDEGVRLLRLHIALRGEAGPHSPPVHHGPQCEDQRAGRL

SEQ ID NO: 12951 - protein, 142 aa, Artificial Sequence
  Synthetic polypeptide
NRGKYHRASSVVRPAARGLHRAGERERLSGYLLPALQQLGGGPRGGTGARRRGRAVRAVHGEPQRLPHLQRQPGLQALGVQPAARPAQPHQVLGEVPALQRLLSGLRVPRRPRVLLHLHAHSQPALEVSEDEGVRLLRLQRL

SEQ ID NO: 12952 - protein, 45 aa, Artificial Sequence
  Synthetic polypeptide
SQEVNFMGFNQLFILLFLILKLEQRKISSCILCSKACGERATPCR

SEQ ID NO: 12953 - protein, 29 aa, Artificial Sequence
  Synthetic polypeptide
GRVCWLTPVIPALWEAKVLSWCSGGPPGV

SEQ ID NO: 12954 - protein, 30 aa, Artificial Sequence
  Synthetic polypeptide
PGVLAHTCNPSTLGGQGTIVVQWGPSWCLT

SEQ ID NO: 12955 - protein, 141 aa, Artificial Sequence
  Synthetic polypeptide
SQHFGRPRYYRGAVGALLVFDLTKHQTYAVVERWLKELYDHAEATIVVMLVGNKSDLSQAREVPTEEARMFAENNGLLFLETSALDSTNVELAFETVLKEIFAKVSKQRQNSIRTNAITLGSAQAGQEPGPGEKRACCISL

SEQ ID NO: 12956 - protein, 41 aa, Artificial Sequence
  Synthetic polypeptide
AHEFETSLGNMAKSCLYQKYKKLAGLGGTIVVQWGPSWCLT

SEQ ID NO: 12957 - protein, 62 aa, Artificial Sequence
  Synthetic polypeptide
GRVCWLTPVIPALWEAKVGGSLELMNSRPAWATWQNPVSTKNIKNWPGLVVLSWCSGGPPGV

SEQ ID NO: 12958 - protein, 140 aa, Artificial Sequence
  Synthetic polypeptide
KIGRAWWYYRGAVGALLVFDLTKHQTYAVVERWLKELYDHAEATIVVMLVGNKSDLSQAREVPTEEARMFAENNGLLFLETSALDSTNVELAFETVLKEIFAKVSKQRQNSIRTNAITLGSAQAGQEPGPGEKRACCISL

SEQ ID NO: 12959 - protein, 499 aa, Artificial Sequence
  Synthetic polypeptide
IIIYKMKILASLILQAPLSVFEGDSVVLRCRAKAEVTLNNTIYKNDNVLAFLNKRTDFHIPHACLKDNGAYRCTGYKESCCPVSSNTVKIQVQEPFTRPVLRASSFQPISGNPVTLTCETQLSLERSDVPLRFRFFRDDQTLGLGWSLSPNFQITAMWSKDSGFYWCKAATMPYSVISDSPRSWIQVQIPASHPVLTLSPEKALNFEGTKVTLHCETQEDSLRTLYRFYHEGVPLRHKSVRCERGASISFSLTTENSGNYYCTADNGLGAKPSKAVSLSVTVPVSHPVLNLSSPEDLIFEGAKVTLHCEAQRGSLPILYQFHHEGAALERRSANSAGGVAISFSLTAEHSGNYYCTADNGFGPQRSKAVSLSVTVPVSHPVLTLSSAEALTFEGATVTLHCEVQRGSPQILYQFYHEDMPLWSSSTPSVGRVSFSFSLTEGHSGNYYCTADNGFGPQRSEVVSLFVTGKCWVLASHPPLAEFSLTHSFKNLFALSSFLP

SEQ ID NO: 12960 - protein, 666 aa, Artificial Sequence
  Synthetic polypeptide
IIIYKMKILASLILQAPLSVFEGDSVVLRCRAKAEVTLNNTIYKNDNVLAFLNKRTDFHIPHACLKDNGAYRCTGYKESCCPVSSNTVKIQVQEPFTRPVLRASSFQPISGNPVTLTCETQLSLERSDVPLRFRFFRDDQTLGLGWSLSPNFQITAMWSKDSGFYWCKAATMPYSVISDSPRSWIQVQIPASHPVLTLSPEKALNFEGTKVTLHCETQEDSLRTLYRFYHEGVPLRHKSVRCERGASISFSLTTENSGNYYCTADNGLGAKPSKAVSLSVTVPVSHPVLNLSSPEDLIFEGAKVTLHCEAQRGSLPILYQFHHEGAALERRSANSAGGVAISFSLTAEHSGNYYCTADNGFGPQRSKAVSLSVTVPVSHPVLTLSSAEALTFEGATVTLHCEVQRGSPQILYQFYHEDMPLWSSSTPSVGRVSFSFSLTEGHSGNYYCTADNGFGPQRSEVVSLFVTVPVSRPILTLRVPRAQAVVGDLLELHCEAPRGSPPILYWFYHEDVTLGSSSAPSGGEASFNLSLTAEHSGNYSCEANNGLVAQHSDTISLSVIVPVSRPILTFRAPRAQAVVGDLLELHCEALRGSSPILYWFYHEDVTLGKISAPSGGGASFNLSLTTEHSGIYSCEADNGLEAQRSEMVTLKVAGEWALPTSSTSEN

SEQ ID NO: 12961 - protein, 884 aa, Artificial Sequence
  Synthetic polypeptide
IIIYKMKILASLILQAPLSVFEGDSVVLRCRAKAEVTLNNTIYKNDNVLAFLNKRTDFHIPHACLKDNGAYRCTGYKESCCPVSSNTVKIQVQEPFTRPVLRASSFQPISGNPVTLTCETQLSLERSDVPLRFRFFRDDQTLGLGWSLSPNFQITAMWSKDSGFYWCKAATMPYSVISDSPRSWIQVQIPASHPVLTLSPEKALNFEGTKVTLHCETQEDSLRTLYRFYHEGVPLRHKSVRCERGASISFSLTTENSGNYYCTADNGLGAKPSKAVSLSVTVPVSHPVLNLSSPEDLIFEGAKVTLHCEAQRGSLPILYQFHHEGAALERRSANSAGGVAISFSLTAEHSGNYYCTADNGFGPQRSKAVSLSVTVPVSHPVLTLSSAEALTFEGATVTLHCEVQRGSPQILYQFYHEDMPLWSSSTPSVGRVSFSFSLTEGHSGNYYCTADNGFGPQRSEVVSLFVTVPVSRPILTLRVPRAQAVVGDLLELHCEAPRGSPPILYWFYHEDVTLGSSSAPSGGEASFNLSLTAEHSGNYSCEANNGLVAQHSDTISLSVIVPVSRPILTFRAPRAQAVVGDLLELHCEALRGSSPILYWFYHEDVTLGKISAPSGGGASFNLSLTTEHSGIYSCEADNGLEAQRSEMVTLKVAVPVSRPVLTLRAPGTHAAVGDLLELHCEALRGSPLILYRFFHEDVTLGNRSSPSGGASLNLSLTAEHSGNYSCEADNGLGAQRSETVTLYITGLTANRSGPFATGVAGGLLSIAGLAAGALLLYCWLSRKAGRKPASDPARSPSDSDSQEPTYHNVPAWEELQPVYTNANPRGENVVYSEVRIIQEKKKHAVASDPRHLRNKGSPIIYSEVKVASTPVSGSLFLASSAPHR

SEQ ID NO: 12962 - protein, 28 aa, Artificial Sequence
  Synthetic polypeptide
WDSSGHLNHHLQNEDISFADPASSTFCV

SEQ ID NO: 12963 - protein, 56 aa, Artificial Sequence
  Synthetic polypeptide
IIIYKMKILASMDHSLPRRESDPHLQGISLLLTTENKMVPSVPWERNTKRNPRQYP

SEQ ID NO: 12964 - protein, 28 aa, Artificial Sequence
  Synthetic polypeptide
WDSSGHLNHHLQNEDISLHGPQSSKERE

SEQ ID NO: 12965 - protein, 584 aa, Artificial Sequence; identical to SEQ ID NO: 1906
  Synthetic polypeptide

SEQ ID NO: 12966 - protein, 751 aa, Artificial Sequence; identical to SEQ ID NO: 1683
  Synthetic polypeptide

SEQ ID NO: 12967 - protein, 969 aa, Artificial Sequence; identical to SEQ ID NO: 1557
  Synthetic polypeptide

SEQ ID NO: 12968 - protein, 116 aa, Artificial Sequence; identical to SEQ ID NO: 3423
  Synthetic polypeptide

SEQ ID NO: 12969 - protein, 74 aa, Artificial Sequence; identical to SEQ ID NO: 4083
  Synthetic polypeptide

SEQ ID NO: 12970 - protein, 508 aa, Artificial Sequence
  Synthetic polypeptide
AKIAPLYSSLDAVTEQADSLTLVAPSSVFEGDSIVLKCQGEQNWKIQKMAYHKDNKELSVFKKFSDFLIQSAVLSDSGNYFCSTKGQLFLWDKTSNIVKIKVQELFQRPVLTASSFQPIEGGPVSLKCETRLSPQRLDVQLQFCFFRENQVLGSGWSSSPELQISAVWSEDTGSYWCKAETVTHRIRKQSLQSQIHVQRIPISNVSLEIRAPGGQVTEGQKLILLCSVAGGTGNVTFSWYREATGTSMGKKTQRSLSAELEIPAVKESDAGKYYCRADNGHVPIQSKVVNIPVRIPVSRPVLTLRSPGAQAAVGDLLELHCEALRGSPPILYQFYHEDVTLGNSSAPSGGGASFNLSLTAEHSGNYSCEANNGLGAQCSEAVPVSISGPDGYRRDLMTAGVLWGLFGVLGFTGVALLLYALFHKISGESSATNEPRGASRPNPQEFTYSSPTPDMEELQPVYVNVGSVDVDVVYSQVWSMQQPESSANIRTLLENKDSQVIYSSVKKS

SEQ ID NO: 12971 - protein, 444 aa, Artificial Sequence
  Synthetic polypeptide
AKIAPLYSSLDAVTEQADSLTLVAPSSVFEGDSIVLKCQGEQNWKIQKMAYHKDNKELSVFKKFSDFLIQSAVLSDSGNYFCSTKGQLFLWDKTSNIVKIKVQELFQRPVLTASSFQPIEGGPVSLKCETRLSPQRLDVQLQFCFFRENQVLGSGWSSSPELQISAVWSEDTGSYWCKAETVTHRIRKQSLQSQIHVQRIPISNVSLEIRAPGGQVTEGQKLILLCSVAGGTGNVTFSWYREATGTSMGKKTQRSLSAELEIPAVKESDAGKYYCRADNGHVPIQSKVVNIPVRIPVSRPVLTLRSPGAQAAVGDLLELHCEALRGSPPILYQFYHEDVTLGNSSAPSGGGASFNLSLTAEHSGNYSCEANNGLGAQCSEAVPVSISGPDGYRRDLMTAGVLWGLFGVLGFTGVALLLYALFHKISGESSATNEPRTPKSSTLL

SEQ ID NO: 12972 - protein, 202 aa, Artificial Sequence
  Synthetic polypeptide
AKIAPLYSSLDAVTEQADSLTLVAPSSVFEGDSIVLKCQGEQNWKIQKMAYHKDNKELSVFKKFSDFLIQSAVLSDSGNYFCSTKGQLFLWDKTSNIVKIKVQGPDGYRRDLMTAGVLWGLFGVLGFTGVALLLYALFHKISGESSATNEPRGASRPNPQEFTYSSPTPDMEELQPVYVNANIRTLLENKDSQVIYSSVKKS

SEQ ID NO: 12973 - protein, 41 aa, Artificial Sequence
  Synthetic polypeptide
FQLLGKLRQENCLNPGGGGCGEPRSHHCTPAWMQSLNRQIR

SEQ ID NO: 12974 - protein, 22 aa, Artificial Sequence
  Synthetic polypeptide
TREVEVVVSQDRTIVLQPGCSH

SEQ ID NO: 12975 - protein, 31 aa, Artificial Sequence
  Synthetic polypeptide
CWTGTGIFLVHSRMRTRKKREDPDPLQPGAS

SEQ ID NO: 12976 - protein, 116 aa, Artificial Sequence
  Synthetic polypeptide
EEKGGPRPASARSQLTRRWWLDSGPCSPVCCSTTLELCNGPRTGWPWAWARASKPGHGTGLWAPQTLGSTTWRSQMLSSLTTPLTSARPRRPPCALGGPNSPCSSPQRTPGLTEAL

SEQ ID NO: 12977 - protein, 108 aa, Artificial Sequence
  Synthetic polypeptide
EEKGGPRPASARSQLTRRWWLDSGPCSPVCCSTTLELCNGPRTGWPWAWARASKPGHGTGLWAPQTLGSTTWRSQMLSSLTTPLTSARPRRPPCALGGPNSPCSTLLQ

SEQ ID NO: 12978 - protein, 762 aa, Artificial Sequence
  Synthetic polypeptide
ELGRKGRTQTRFSQEPADQTVVAGQRAVLPCVLLNYSGIVQWTKDGLALGMGQGLKAWPRYRVVGSADAGQYNLEITDAELSDDASYECQATEAALRSRRAKLTVLIPPEDTRIDGGPVILLQAGTPHNLTCRAFNAKPAATIIWFRDGTQQEGAVASTELLKDGKRETTVSQLLINPTDLDIGRVFTCRSMNEAIPSGKETSIELDVHHPPTVTLSIEPQTVQEGERVVFTCQATANPEILGYRWAKGGFLIEDAHESRYETNVDYSFFTEPVSCEVHNKVGSTNVSTLVNVHFAPRIVVDPKPTTTDIGSDVTLTCVWVGNPPLTLTWTKKDSNMGPRPPGSPPEAALSAQVLSNSNQLLLKSVTQADAGTYTCRAIVPRIGVAEREVPLYVNGPPIISSEAVQYAVRGDGGKVECFIGSTPPPDRIAWAWKENFLEVGTLERYTVERTNSGSGVLSTLTINNVMEADFQTHYNCTAWNSFGPGTAIIQLEEREVLPVGIIAGATIGASILLIFFFIALVFFLYRRRKGSRKDVTLRKLDIKVETVNREPLTMHSDREDDTASVSTATRVMKAIYSSFKDDVDLKQDLRCDTIDTREEYEMKDPTNGYYNVRAHEDRPSSRAVLYADYRAPGPARFDGRPSSRLSHSSGYAQLNTYSRGPASDYGPEPTPPGPAAPAGTDTTSQLSYENYEKFNSHPFPGAAGYPTYRLGYPQAPPSGLERTPYEAYDPIGKYATATRFSYTSQHSDYGQRFQQRMQTHV

SEQ ID NO: 12979 - protein, 746 aa, Artificial Sequence
  Synthetic polypeptide
ELGRKGRTQTRFSQEPADQTVVAGQRAVLPCVLLNYSGIVQWTKDGLALGMGQGLKAWPRYRVVGSADAGQYNLEITDAELSDDASYECQATEAALRSRRAKLTVLIPPEDTRIDGGPVILLQAGTPHNLTCRAFNAKPAATIIWFRDGTQQEGAVASTELLKDGKRETTVSQLLINPTDLDIGRVFTCRSMNEAIPSGKETSIELDVHHPPTVTLSIEPQTVQEGERVVFTCQATANPEILGYRWAKGGFLIEDAHESRYETNVDYSFFTEPVSCEVHNKVGSTNVSTLVNVHFAPRIVVDPKPTTTDIGSDVTLTCVWVGNPPLTLTWTKKDSNMVLSNSNQLLLKSVTQADAGTYTCRAIVPRIGVAEREVPLYVNGPPIISSEAVQYAVRGDGGKVECFIGSTPPPDRIAWAWKENFLEVGTLERYTVERTNSGSGVLSTLTINNVMEADFQTHYNCTAWNSFGPGTAIIQLEEREVLPVGIIAGATIGASILLIFFFIALVFFLYRRRKGSRKDVTLRKLDIKVETVNREPLTMHSDREDDTASVSTATRVMKAIYSSFKDDVDLKQDLRCDTIDTREEYEMKDPTNGYYNVRAHEDRPSSRAVLYADYRAPGPARFDGRPSSRLSHSSGYAQLNTYSRGPASDYGPEPTPPGPAAPAGTDTTSQLSYENYEKFNSHPFPGAAGYPTYRLGYPQAPPSGLERTPYEAYDPIGKYATATRFSYTSQHSDYGQRFQQRMQTHV

SEQ ID NO: 12980 - protein, 643 aa, Artificial Sequence
  Synthetic polypeptide
ELGRKGRTQTRFSQEPADQTVVAGQRAVLPCVLLNYSGIVQWTKDGLALGMGQGLKAWPRYRVVGSADAGQYNLEITDAELSDDASYECQATEAALRSRRAKLTVLNPPTVTLSIEPQTVQEGERVVFTCQATANPEILGYRWAKGGFLIEDAHESRYETNVDYSFFTEPVSCEVHNKVGSTNVSTLVNVHFAPRIVVDPKPTTTDIGSDVTLTCVWVGNPPLTLTWTKKDSNMVLSNSNQLLLKSVTQADAGTYTCRAIVPRIGVAEREVPLYVNGPPIISSEAVQYAVRGDGGKVECFIGSTPPPDRIAWAWKENFLEVGTLERYTVERTNSGSGVLSTLTINNVMEADFQTHYNCTAWNSFGPGTAIIQLEEREVLPVGIIAGATIGASILLIFFFIALVFFLYRRRKGSRKDVTLRKLDIKVETVNREPLTMHSDREDDTASVSTATRVMKAIYSSFKDDVDLKQDLRCDTIDTREEYEMKDPTNGYYNVRAHEDRPSSRAVLYADYRAPGPARFDGRPSSRLSHSSGYAQLNTYSRGPASDYGPEPTPPGPAAPAGTDTTSQLSYENYEKFNSHPFPGAAGYPTYRLGYPQAPPSGLERTPYEAYDPIGKYATATRFSYTSQHSDYGQRFQQRMQTHV

SEQ ID NO: 12981 - protein, 124 aa, Artificial Sequence; identical to SEQ ID NO: 3333
  Synthetic polypeptide

SEQ ID NO: 12982 - protein, 116 aa, Artificial Sequence; identical to SEQ ID NO: 3420
  Synthetic polypeptide

SEQ ID NO: 12983 - protein, 11 aa, Artificial Sequence
  Synthetic polypeptide
RDPDPLQPGAS

SEQ ID NO: 12984 - protein, 760 aa, Artificial Sequence; identical to SEQ ID NO: 1670
  Synthetic polypeptide

SEQ ID NO: 12985 - protein, 744 aa, Artificial Sequence; identical to SEQ ID NO: 1690
  Synthetic polypeptide

SEQ ID NO: 12986 - protein, 641 aa, Artificial Sequence; identical to SEQ ID NO: 1866
  Synthetic polypeptide

SEQ ID NO: 12987 - protein, 790 aa, Artificial Sequence
  Synthetic polypeptide
ERRERGEKINRARRGQAGRDAAKSSTEEEKQRPEGTQTRFSQEPADQTVVAGQRAVLPCVLLNYSGIVQWTKDGLALGMGQGLKAWPRYRVVGSADAGQYNLEITDAELSDDASYECQATEAALRSRRAKLTVLIPPEDTRIDGGPVILLQAGTPHNLTCRAFNAKPAATIIWFRDGTQQEGAVASTELLKDGKRETTVSQLLINPTDLDIGRVFTCRSMNEAIPSGKETSIELDVHHPPTVTLSIEPQTVQEGERVVFTCQATANPEILGYRWAKGGFLIEDAHESRYETNVDYSFFTEPVSCEVHNKVGSTNVSTLVNVHFAPRIVVDPKPTTTDIGSDVTLTCVWVGNPPLTLTWTKKDSNMGPRPPGSPPEAALSAQVLSNSNQLLLKSVTQADAGTYTCRAIVPRIGVAEREVPLYVNGPPIISSEAVQYAVRGDGGKVECFIGSTPPPDRIAWAWKENFLEVGTLERYTVERTNSGSGVLSTLTINNVMEADFQTHYNCTAWNSFGPGTAIIQLEEREVLPVGIIAGATIGASILLIFFFIALVFFLYRRRKGSRKDVTLRKLDIKVETVNREPLTMHSDREDDTASVSTATRVMKAIYSSFKDDVDLKQDLRCDTIDTREEYEMKDPTNGYYNVRAHEDRPSSRAVLYADYRAPGPARFDGRPSSRLSHSSGYAQLNTYSRGPASDYGPEPTPPGPAAPAGTDTTSQLSYENYEKFNSHPFPGAAGYPTYRLGYPQAPPSGLERTPYEAYDPIGKYATATRFSYTSQHSDYGQRFQQRMQTHV

SEQ ID NO: 12988 - protein, 774 aa, Artificial Sequence
  Synthetic polypeptide
ERRERGEKINRARRGQAGRDAAKSSTEEEKQRPEGTQTRFSQEPADQTVVAGQRAVLPCVLLNYSGIVQWTKDGLALGMGQGLKAWPRYRVVGSADAGQYNLEITDAELSDDASYECQATEAALRSRRAKLTVLIPPEDTRIDGGPVILLQAGTPHNLTCRAFNAKPAATIIWFRDGTQQEGAVASTELLKDGKRETTVSQLLINPTDLDIGRVFTCRSMNEAIPSGKETSIELDVHHPPTVTLSIEPQTVQEGERVVFTCQATANPEILGYRWAKGGFLIEDAHESRYETNVDYSFFTEPVSCEVHNKVGSTNVSTLVNVHFAPRIVVDPKPTTTDIGSDVTLTCVWVGNPPLTLTWTKKDSNMVLSNSNQLLLKSVTQADAGTYTCRAIVPRIGVAEREVPLYVNGPPIISSEAVQYAVRGDGGKVECFIGSTPPPDRIAWAWKENFLEVGTLERYTVERTNSGSGVLSTLTINNVMEADFQTHYNCTAWNSFGPGTAIIQLEEREVLPVGIIAGATIGASILLIFFFIALVFFLYRRRKGSRKDVTLRKLDIKVETVNREPLTMHSDREDDTASVSTATRVMKAIYSSFKDDVDLKQDLRCDTIDTREEYEMKDPTNGYYNVRAHEDRPSSRAVLYADYRAPGPARFDGRPSSRLSHSSGYAQLNTYSRGPASDYGPEPTPPGPAAPAGTDTTSQLSYENYEKFNSHPFPGAAGYPTYRLGYPQAPPSGLERTPYEAYDPIGKYATATRFSYTSQHSDYGQRFQQRMQTHV

SEQ ID NO: 12989 - protein, 671 aa, Artificial Sequence
  Synthetic polypeptide
ERRERGEKINRARRGQAGRDAAKSSTEEEKQRPEGTQTRFSQEPADQTVVAGQRAVLPCVLLNYSGIVQWTKDGLALGMGQGLKAWPRYRVVGSADAGQYNLEITDAELSDDASYECQATEAALRSRRAKLTVLNPPTVTLSIEPQTVQEGERVVFTCQATANPEILGYRWAKGGFLIEDAHESRYETNVDYSFFTEPVSCEVHNKVGSTNVSTLVNVHFAPRIVVDPKPTTTDIGSDVTLTCVWVGNPPLTLTWTKKDSNMVLSNSNQLLLKSVTQADAGTYTCRAIVPRIGVAEREVPLYVNGPPIISSEAVQYAVRGDGGKVECFIGSTPPPDRIAWAWKENFLEVGTLERYTVERTNSGSGVLSTLTINNVMEADFQTHYNCTAWNSFGPGTAIIQLEEREVLPVGIIAGATIGASILLIFFFIALVFFLYRRRKGSRKDVTLRKLDIKVETVNREPLTMHSDREDDTASVSTATRVMKAIYSSFKDDVDLKQDLRCDTIDTREEYEMKDPTNGYYNVRAHEDRPSSRAVLYADYRAPGPARFDGRPSSRLSHSSGYAQLNTYSRGPASDYGPEPTPPGPAAPAGTDTTSQLSYENYEKFNSHPFPGAAGYPTYRLGYPQAPPSGLERTPYEAYDPIGKYATATRFSYTSQHSDYGQRFQQRMQTHV

SEQ ID NO: 12990 - protein, 44 aa, Artificial Sequence
  Synthetic polypeptide
KKRERREDKQSKTRPGGKRCSQEQHRRGEAEARGDPDPLQPGAS

SEQ ID NO: 12991 - protein, 137 aa, Artificial Sequence
  Synthetic polypeptide
TEQDEARREEMQPRAAPKRRSRGQRGPRPASARSQLTRRWWLDSGPCSPVCCSTTLELCNGPRTGWPWAWARASKPGHGTGLWAPQTLGSTTWRSQMLSSLTTPLTSARPRRPPCALGGPNSPCSSPQRTPGLTEAL

SEQ ID NO: 12992 - protein, 129 aa, Artificial Sequence
  Synthetic polypeptide
TEQDEARREEMQPRAAPKRRSRGQRGPRPASARSQLTRRWWLDSGPCSPVCCSTTLELCNGPRTGWPWAWARASKPGHGTGLWAPQTLGSTTWRSQMLSSLTTPLTSARPRRPPCALGGPNSPCSTLLQ

SEQ ID NO: 12993 - protein, 66 aa, Artificial Sequence
  Synthetic polypeptide
DPKRPHFPNFTLLSMPSAFPGQFLLPSLSAYQENSYSSLGSCQRHHFLQDSFLHLRDPDPLQPGAS

SEQ ID NO: 12994 - protein, 165 aa, Artificial Sequence
  Synthetic polypeptide
KASLSQLHTAVYALCLPRTVSSPFSLCLPGKLLLIPRILSKTSLPTGFVPAPQGPRPASARSQLTRRWWLDSGPCSPVCCSTTLELCNGPRTGWPWAWARASKPGHGTGLWAPQTLGSTTWRSQMLSSLTTPLTSARPRRPPCALGGPNSPCSSPQRTPGLTEAL

SEQ ID NO: 12995 - protein, 157 aa, Artificial Sequence
  Synthetic polypeptide
KASLSQLHTAVYALCLPRTVSSPFSLCLPGKLLLIPRILSKTSLPTGFVPAPQGPRPASARSQLTRRWWLDSGPCSPVCCSTTLELCNGPRTGWPWAWARASKPGHGTGLWAPQTLGSTTWRSQMLSSLTTPLTSARPRRPPCALGGPNSPCSTLLQ

SEQ ID NO: 12996 - protein, 815 aa, Artificial Sequence
  Synthetic polypeptide
TVSRILKGLTFPTSHCCLCPLPSQDSFFSLLSLLTRKTPTHPSDLVKDITSYRIRSCTSGTQTRFSQEPADQTVVAGQRAVLPCVLLNYSGIVQWTKDGLALGMGQGLKAWPRYRVVGSADAGQYNLEITDAELSDDASYECQATEAALRSRRAKLTVLIPPEDTRIDGGPVILLQAGTPHNLTCRAFNAKPAATIIWFRDGTQQEGAVASTELLKDGKRETTVSQLLINPTDLDIGRVFTCRSMNEAIPSGKETSIELDVHHPPTVTLSIEPQTVQEGERVVFTCQATANPEILGYRWAKGGFLIEDAHESRYETNVDYSFFTEPVSCEVHNKVGSTNVSTLVNVHFAPRIVVDPKPTTTDIGSDVTLTCVWVGNPPLTLTWTKKDSNMGPRPPGSPPEAALSAQVLSNSNQLLLKSVTQADAGTYTCRAIVPRIGVAEREVPLYVNGPPIISSEAVQYAVRGDGGKVECFIGSTPPPDRIAWAWKENFLEVGTLERYTVERTNSGSGVLSTLTINNVMEADFQTHYNCTAWNSFGPGTAIIQLEEREVLPVGIIAGATIGASILLIFFFIALVFFLYRRRKGSRKDVTLRKLDIKVETVNREPLTMHSDREDDTASVSTATRVMKAIYSSFKDDVDLKQDLRCDTIDTREEYEMKDPTNGYYNVRAHEDRPSSRAVLYADYRAPGPARFDGRPSSRLSHSSGYAQLNTYSRGPASDYGPEPTPPGPAAPAGTDTTSQLSYENYEKFNSHPFPGAAGYPTYRLGYPQAPPSGLERTPYEAYDPIGKYATATRFSYTSQHSDYGQRFQQRMQTHV

SEQ ID NO: 12997 - protein, 799 aa, Artificial Sequence
  Synthetic polypeptide
TVSRILKGLTFPTSHCCLCPLPSQDSFFSLLSLLTRKTPTHPSDLVKDITSYRIRSCTSGTQTRFSQEPADQTVVAGQRAVLPCVLLNYSGIVQWTKDGLALGMGQGLKAWPRYRVVGSADAGQYNLEITDAELSDDASYECQATEAALRSRRAKLTVLIPPEDTRIDGGPVILLQAGTPHNLTCRAFNAKPAATIIWFRDGTQQEGAVASTELLKDGKRETTVSQLLINPTDLDIGRVFTCRSMNEAIPSGKETSIELDVHHPPTVTLSIEPQTVQEGERVVFTCQATANPEILGYRWAKGGFLIEDAHESRYETNVDYSFFTEPVSCEVHNKVGSTNVSTLVNVHFAPRIVVDPKPTTTDIGSDVTLTCVWVGNPPLTLTWTKKDSNMVLSNSNQLLLKSVTQADAGTYTCRAIVPRIGVAEREVPLYVNGPPIISSEAVQYAVRGDGGKVECFIGSTPPPDRIAWAWKENFLEVGTLERYTVERTNSGSGVLSTLTINNVMEADFQTHYNCTAWNSFGPGTAIIQLEEREVLPVGIIAGATIGASILLIFFFIALVFFLYRRRKGSRKDVTLRKLDIKVETVNREPLTMHSDREDDTASVSTATRVMKAIYSSFKDDVDLKQDLRCDTIDTREEYEMKDPTNGYYNVRAHEDRPSSRAVLYADYRAPGPARFDGRPSSRLSHSSGYAQLNTYSRGPASDYGPEPTPPGPAAPAGTDTTSQLSYENYEKFNSHPFPGAAGYPTYRLGYPQAPPSGLERTPYEAYDPIGKYATATRFSYTSQHSDYGQRFQQRMQTHV

SEQ ID NO: 12998 - protein, 696 aa, Artificial Sequence
  Synthetic polypeptide
TVSRILKGLTFPTSHCCLCPLPSQDSFFSLLSLLTRKTPTHPSDLVKDITSYRIRSCTSGTQTRFSQEPADQTVVAGQRAVLPCVLLNYSGIVQWTKDGLALGMGQGLKAWPRYRVVGSADAGQYNLEITDAELSDDASYECQATEAALRSRRAKLTVLNPPTVTLSIEPQTVQEGERVVFTCQATANPEILGYRWAKGGFLIEDAHESRYETNVDYSFFTEPVSCEVHNKVGSTNVSTLVNVHFAPRIVVDPKPTTTDIGSDVTLTCVWVGNPPLTLTWTKKDSNMVLSNSNQLLLKSVTQADAGTYTCRAIVPRIGVAEREVPLYVNGPPIISSEAVQYAVRGDGGKVECFIGSTPPPDRIAWAWKENFLEVGTLERYTVERTNSGSGVLSTLTINNVMEADFQTHYNCTAWNSFGPGTAIIQLEEREVLPVGIIAGATIGASILLIFFFIALVFFLYRRRKGSRKDVTLRKLDIKVETVNREPLTMHSDREDDTASVSTATRVMKAIYSSFKDDVDLKQDLRCDTIDTREEYEMKDPTNGYYNVRAHEDRPSSRAVLYADYRAPGPARFDGRPSSRLSHSSGYAQLNTYSRGPASDYGPEPTPPGPAAPAGTDTTSQLSYENYEKFNSHPFPGAAGYPTYRLGYPQAPPSGLERTPYEAYDPIGKYATATRFSYTSQHSDYGQRFQQRMQTHV

SEQ ID NO: 12999 - protein, 559 aa, Artificial Sequence
  Synthetic polypeptide
HGVFLPDPPTVTLSIEPQTVQEGERVVFTCQATANPEILGYRWAKGGFLIEDAHESRYETNVDYSFFTEPVSCEVHNKVGSTNVSTLVNVHFAPRIVVDPKPTTTDIGSDVTLTCVWVGNPPLTLTWTKKDSNMGPRPPGSPPEAALSAQVLSNSNQLLLKSVTQADAGTYTCRAIVPRIGVAEREVPLYVNGPPIISSEAVQYAVRGDGGKVECFIGSTPPPDRIAWAWKENFLEVGTLERYTVERTNSGSGVLSTLTINNVMEADFQTHYNCTAWNSFGPGTAIIQLEEREVLPVGIIAGATIGASILLIFFFIALVFFLYRRRKGSRKDVTLRKLDIKVETVNREPLTMHSDREDDTASVSTATRVMKAIYSSFKDDVDLKQDLRCDTIDTREEYEMKDPTNGYYNVRAHEDRPSSRAVLYADYRAPGPARFDGRPSSRLSHSSGYAQLNTYSRGPASDYGPEPTPPGPAAPAGTDTTSQLSYENYEKFNSHPFPGAAGYPTYRLGYPQAPPSGLERTPYEAYDPIGKYATATRFSYTSQHSDYGQRFQQRMQTHV

SEQ ID NO: 13000 - protein, 543 aa, Artificial Sequence
  Synthetic polypeptide
HGVFLPDPPTVTLSIEPQTVQEGERVVFTCQATANPEILGYRWAKGGFLIEDAHESRYETNVDYSFFTEPVSCEVHNKVGSTNVSTLVNVHFAPRIVVDPKPTTTDIGSDVTLTCVWVGNPPLTLTWTKKDSNMVLSNSNQLLLKSVTQADAGTYTCRAIVPRIGVAEREVPLYVNGPPIISSEAVQYAVRGDGGKVECFIGSTPPPDRIAWAWKENFLEVGTLERYTVERTNSGSGVLSTLTINNVMEADFQTHYNCTAWNSFGPGTAIIQLEEREVLPVGIIAGATIGASILLIFFFIALVFFLYRRRKGSRKDVTLRKLDIKVETVNREPLTMHSDREDDTASVSTATRVMKAIYSSFKDDVDLKQDLRCDTIDTREEYEMKDPTNGYYNVRAHEDRPSSRAVLYADYRAPGPARFDGRPSSRLSHSSGYAQLNTYSRGPASDYGPEPTPPGPAAPAGTDTTSQLSYENYEKFNSHPFPGAAGYPTYRLGYPQAPPSGLERTPYEAYDPIGKYATATRFSYTSQHSDYGQRFQQRMQTHV

SEQ ID NO: 13001 - protein, 19 aa, Artificial Sequence
  Synthetic polypeptide
MRYSRRASSMEYSYLTLLQ

SEQ ID NO: 13002 - protein, 211 aa, Artificial Sequence
  Synthetic polypeptide
AICVPLDSQPWTSDETVVAGGTVVLKCQVKDHEDSSLQWSNPAQQTLYFGEKRALRDNRIQLVTSTPHELSISISNVALADEGEYTCSIFTMPVRTAKSLVTVLGIPQKPIITGYKSSLREKDTATLNCQSSGSKPAARLTWRKGDQELHGEPTRIQEDPNDTPTAMIRPDPPHPREGQKLLLHCEGRGNPVPQQYLWEKEGSVPPLKMTQ

SEQ ID NO: 13003 - protein, 375 aa, Artificial Sequence
  Synthetic polypeptide
AICVPLDSQPWTSDETVVAGGTVVLKCQVKDHEDSSLQWSNPAQQTLYFGEKRALRDNRIQLVTSTPHELSISISNVALADEGEYTCSIFTMPVRTAKSLVTVLGIPQKPIITGYKSSLREKDTATLNCQSSGSKPAARLTWRKGDQELHGEPTRIQEDPNGKTFTVSSSVTFQVTREDDGASIVCSVNHESLKGADRSTSQRIEVLYTPTAMIRPDPPHPREGQKLLLHCEGRGNPVPQQYLWEKEGSVPPLKMTQESALIFPFLNKSDSGTYGCTATSNMGSYKAYYTLNVNDPSPVPSSSSTYHAIIGGIVAFIVFLLLIMLIFLGHYLIRHKGTYLTHEAKGSDDAPDADTAIINAEGGQSGGDDKKEYFI

SEQ ID NO: 13004 - protein, 13 aa, Artificial Sequence
  Synthetic polypeptide
CYLCAFRQPALDI

SEQ ID NO: 13005 - protein, 43 aa, Artificial Sequence
  Synthetic polypeptide
AFTSSSRKWRQFPPQSFWTPSHRGAPQEQHSQCLPGCFIGLPC

SEQ ID NO: 13006 - protein, 995 aa, Artificial Sequence
  Synthetic polypeptide
ERQCRVMVKGVVCGIRKPNMNVASPAVLGQSPHNLSASEPSLLHLENGDNSHHKAFGPPVIVVPPKNSTVNASQDVSLACHAEAYPANLTYSWFQDNINVFHISRLQPRVRILVDGSLRLLATQPDDAGCYTCVPSNGLLHPPSASAYLTVLCMPGVIRCPVRANPPLLFVSWTKDGKALQLDKFPGWSQGTEGSLIIALGNEDALGEYSCTPYNSLGTAGPSPVTRVLLKAPPAFIERPKEEYFQEVGRELLIPCSAQGDPPPVVSWTKVGRGLQGQAQVDSNSSLILRPLTKEAHGHWECSASNAVARVATSTNVYVLGTSPHVVTNVSVVALPKGANVSWEPGFDGGYLQRFSVWYTPLAKRPDRMHHDWVSLAVPVGAAHLLVPGLQPHTQYQFSVLAQNKLGSGPFSEIVLSAPEGLPTTPAAPGLPPTEIPPPLSPPRGLVAVRTPRGVLLHWDPPELVPKRLDGYVLEGRQGSQGWEVLDPAVAGTETELLVPGLIKDVLYEFRLVAFAGSFVSDPSNTANVSTSGLEVYPSRTQLPGLLPQPVLAGVVGGVCFLGVAVLVSILAGCLLNRRRAARRRRKRLRQDPPLIFSPTGKSAAPSALGSGSPDSVAKLKLQGSPVPSLRQSLLWGDPAGTPSPHPDPPSSRGPLPLEPICRGPDGRFVMGPTVAAPQERSGREQAEPRTPAQRLARSFDCSSSSPSGAPQPLCIEDISPVAPPPAAPPSPLPGPGPLLQYLSLPFFREMNVDGDWPPLEEPSPAAPPDYMDTRRCPTSSFLRSPETPPVSPRESLPGAVVGAGATAEPPYTALADWTLRERLLPGLLPAAPRGSLTSQSSGRGSASFLRPPSTAPSAGGSYLSPAPGDTSSWASGPERWPRREHVVTVSKRRNTSVDENYEWDSEFPGDMELLETLHLGLASSRLRPEAEPELGVKTPEEGCLLNTAHVTGPEARCAALREEFLAFRRRRDATRARLPAYRQPVPHPEQATLL

SEQ ID NO: 13007 - protein, 1011 aa, Artificial Sequence
  Synthetic polypeptide
ERQCRVMVKGVVCGIRKPNMNVASPAVLGQSPHNLSASEPSLLHLENGDNSHHKAFGPPVIVVPPKNSTVNASQDVSLACHAEAYPANLTYSWFQDNINVFHISRLQPRVRILVDGSLRLLATQPDDAGCYTCVPSNGLLHPPSASAYLTVLYPAQVTAMPPETPLPIGMPGVIRCPVRANPPLLFVSWTKDGKALQLDKFPGWSQGTEGSLIIALGNEDALGEYSCTPYNSLGTAGPSPVTRVLLKAPPAFIERPKEEYFQEVGRELLIPCSAQGDPPPVVSWTKVGRGLQGQAQVDSNSSLILRPLTKEAHGHWECSASNAVARVATSTNVYVLGTSPHVVTNVSVVALPKGANVSWEPGFDGGYLQRFSVWYTPLAKRPDRMHHDWVSLAVPVGAAHLLVPGLQPHTQYQFSVLAQNKLGSGPFSEIVLSAPEGLPTTPAAPGLPPTEIPPPLSPPRGLVAVRTPRGVLLHWDPPELVPKRLDGYVLEGRQGSQGWEVLDPAVAGTETELLVPGLIKDVLYEFRLVAFAGSFVSDPSNTANVSTSGLEVYPSRTQLPGLLPQPVLAGVVGGVCFLGVAVLVSILAGCLLNRRRAARRRRKRLRQDPPLIFSPTGKSAAPSALGSGSPDSVAKLKLQGSPVPSLRQSLLWGDPAGTPSPHPDPPSSRGPLPLEPICRGPDGRFVMGPTVAAPQERSGREQAEPRTPAQRLARSFDCSSSSPSGAPQPLCIEDISPVAPPPAAPPSPLPGPGPLLQYLSLPFFREMNVDGDWPPLEEPSPAAPPDYMDTRRCPTSSFLRSPETPPVSPRESLPGAVVGAGATAEPPYTALADWTLRERLLPGLLPAAPRGSLTSQSSGRGSASFLRPPSTAPSAGGSYLSPAPGDTSSWASGPERWPRREHVVTVSKRRNTSVDENYEWDSEFPGDMELLETLHLGLASSRLRPEAEPELGVKTPEEGCLLNTAHVTGPEARCAALREEFLAFRRRRDATRARLPAYRQPVPHPEQATLL

SEQ ID NO: 13008 - protein, 111 aa, Artificial Sequence
  Synthetic polypeptide
KMETIPTTKLLDPQSSWCPPRTAQSMPPRMFHWPAMLRHTLLTSPTAGSRTTSMSSTLAACSPGCGSWWTGACGCWPPSLMMPAATPVCPAMASCIHPQPLPTSLCSACRG

SEQ ID NO: 13009 - protein, 111 aa, Artificial Sequence
  Synthetic polypeptide
KMETIPTTKLLDPQSSWCPPRTAQSMPPRMFHWPAMLRHTLLTSPTAGSRTTSMSSTLAACSPGCGSWWTGACGCWPPSLMMPAATPVCPAMASCIHPQPLPTSLCSTQPR

SEQ ID NO: 13010 - protein, 9 aa, Artificial Sequence
  Synthetic polypeptide
AEEASSEET

SEQ ID NO: 13011 - protein, 10 aa, Artificial Sequence
  Synthetic polypeptide
EQRKPLQKKL

SEQ ID NO: 13012 - protein, 51 aa, Artificial Sequence
  Synthetic polypeptide
EQRKPLQKKLDSFPAQDPCTTIYVAATEPVPESVQETNSITVYASVTLPES

SEQ ID NO: 13013 - protein, 10 aa, Artificial Sequence
  Synthetic polypeptide
SRGSLFRRNL

SEQ ID NO: 13014 - protein, 45 aa, Artificial Sequence
  Synthetic polypeptide
SRGSLFRRNLTPSQLRTLAPPYMLLPQSLSQSLSRKQIPSQSMLV

SEQ ID NO: 13015 - protein, 225 aa, Artificial Sequence
  Synthetic polypeptide
GVQDWPGQHGHLVHMTVVSGSNVTLNISESLPENYKQLTWFYTFDQKIVEWDSRKSKYFESKFKGRVRLDPQSGALYISKVQKEDNSTYIMRVLKKTGNEQEWKIKLQVLDPVPKPVIKIEKIEDMDDNCYLKLSCVIPGESVNYTWYGDKRPFPKELQNSVLETTLMPHNYSRCYTCQVSNSVSSKNGTVCLSPPCTLARSFGVEWIASWLVVTVPTILGLLLT

SEQ ID NO: 13016 - protein, 151 aa, Artificial Sequence
  Synthetic polypeptide
GVQDWPGQHGHLVHMTVVSGSNVTLNISESLPENYKQLTWFYTFDQKIVEWDSRKSKYFESKFKGRVRLDPQSGALYISKVQKEDNSTYIMRVLKKTGNEQEWKIKLQVLGESGEPKSKSPLQWPQMDHCRASWEAWGTLGEEERKTSGQV

SEQ ID NO: 13017 - protein, 15 aa, Artificial Sequence
  Synthetic polypeptide
QEFKTGLGNMVTWYI

SEQ ID NO: 13018 - protein, 28 aa, Artificial Sequence
  Synthetic polypeptide
RSSRLAWATWSLGTYDRGLRQQRDSEHL

SEQ ID NO: 13019 - protein, 17 aa, Artificial Sequence
  Synthetic polypeptide
LKIATWTSNDCHQKETT

SEQ ID NO: 13020 - protein, 15 aa, Artificial Sequence
  Synthetic polypeptide
NSSWIVTKNSHLDVK

SEQ ID NO: 13021 - protein, 504 aa, Artificial Sequence
  Synthetic polypeptide
EAVRGDSNSYNVRRTEGFSVTLDDLAPDTTYLVQVQALTQEGQGAGSKVHEFQTLSPEGSGNLAVIGGVAVGVVLLLVLAGVGFFIHRRRKNQRARQSPEDVYFSKSEQLKPLKTYVDPHTYEDPNQAVLKFTTEIHPSCVTRQKVIGAGEFGEVYKGMLKTSSGKKEVPVAIKTLKAGYTEKQRVDFLGEAGIMGQFSHHNIIRLEGVISKYKPMMIITEYMENGALDKFLREKDGEFSVLQLVGMLRGIAAGMKYLANMNYVHRDLAARNILVNSNLVCKVSDFGLSRVLEDDPEATYTTSGGKIPIRWTAPEAISYRKFTSASDVWSFGIVMWEVMTYGERPYWELSNHEVMKAINDGFRLPTPMDCPSAIYQLMMQCWQQERARRPKFADIVSILDKLIRAPDSLKTLADFDPRVSIRLPSTSGSEGVPFRTVSEWLESIKMQQYTEHFMAAGYTAIEKVVQMTNDDIKRIGVRLPGHQKRIAYSLLGLKDQVNTVGIPI

SEQ ID NO: 13022 - protein, 122 aa, Artificial Sequence
  Synthetic polypeptide
RGSQGRLQQLQCAPHRGFLRDPGRPGPRHHLPGPGAGTDAGGPGGRQQGARIPDAVPGGIWQLGGDWRRGCRCGPASGAGRSWLLYPPQEEEPACPPVPGGRLLLQVRTTEAPEDIRGPPHI

SEQ ID NO: 13023 - protein, 19 aa, Artificial Sequence
  Synthetic polypeptide
RQSGETPTATMCAAPRVSP

SEQ ID NO: 13024 - protein, 717 aa, Artificial Sequence
  Synthetic polypeptide
HPALCQTRMKCPFLFACSPGFFKFEASESPCLECPEHTLPSPEGATSCECEEGFFRAPQDPASMPCTRPPSAPHYLTAVGMGAKVELRWTPPQDSGGREDIVYSVTCEQCWPESGECGPCEASVRYSEPPHGLTRTSVTVSDLEPHMNYTFTVEARNGVSGLVTSRSFRTASVSINQTEPPKVRLEGRSTTSLSVSWSIPPPQQSRVWKYEVTYRKKGDSNSYNVRRTEGFSVTLDDLAPDTTYLVQVQALTQEGQGAGSKVHEFQTLSPEGSGNLAVIGGVAVGVVLLLVLAGVGFFIHRRRKNQRARQSPEDVYFSKSEQLKPLKTYVDPHTYEDPNQAVLKFTTEIHPSCVTRQKVIGAGEFGEVYKGMLKTSSGKKEVPVAIKTLKAGYTEKQRVDFLGEAGIMGQFSHHNIIRLEGVISKYKPMMIITEYMENGALDKFLREKDGEFSVLQLVGMLRGIAAGMKYLANMNYVHRDLAARNILVNSNLVCKVSDFGLSRVLEDDPEATYTTSGGKIPIRWTAPEAISYRKFTSASDVWSFGIVMWEVMTYGERPYWELSNHEVMKAINDGFRLPTPMDCPSAIYQLMMQCWQQERARRPKFADIVSILDKLIRAPDSLKTLADFDPRVSIRLPSTSGSEGVPFRTVSEWLESIKMQQYTEHFMAAGYTAIEKVVQMTNDDIKRIGVRLPGHQKRIAYSLLGLKDQVNTVGIPI

SEQ ID NO: 13025 - protein, 33 aa, Artificial Sequence
  Synthetic polypeptide
NSVYLSHHRILAPSIVPDTYEVPISICLLAWIF

SEQ ID NO: 13026 - protein, 123 aa, Artificial Sequence
  Synthetic polypeptide
SAHFYLPARLDFLSLRHLRAPAWSALSTRCHPLRVPPPASVRKASSGHLRTQRRCLAHDPPPPHTTSQPWAWVPRWSCAGRPLRTAGAARTLSTASPANSAGPSLGNAGRVRPVCATRSLLTD

SEQ ID NO: 13027 - protein, 709 aa, Artificial Sequence
  Synthetic polypeptide
ALESWNLACSPGFFKFEASESPCLECPEHTLPSPEGATSCECEEGFFRAPQDPASMPCTRPPSAPHYLTAVGMGAKVELRWTPPQDSGGREDIVYSVTCEQCWPESGECGPCEASVRYSEPPHGLTRTSVTVSDLEPHMNYTFTVEARNGVSGLVTSRSFRTASVSINQTEPPKVRLEGRSTTSLSVSWSIPPPQQSRVWKYEVTYRKKGDSNSYNVRRTEGFSVTLDDLAPDTTYLVQVQALTQEGQGAGSKVHEFQTLSPEGSGNLAVIGGVAVGVVLLLVLAGVGFFIHRRRKNQRARQSPEDVYFSKSEQLKPLKTYVDPHTYEDPNQAVLKFTTEIHPSCVTRQKVIGAGEFGEVYKGMLKTSSGKKEVPVAIKTLKAGYTEKQRVDFLGEAGIMGQFSHHNIIRLEGVISKYKPMMIITEYMENGALDKFLREKDGEFSVLQLVGMLRGIAAGMKYLANMNYVHRDLAARNILVNSNLVCKVSDFGLSRVLEDDPEATYTTSGGKIPIRWTAPEAISYRKFTSASDVWSFGIVMWEVMTYGERPYWELSNHEVMKAINDGFRLPTPMDCPSAIYQLMMQCWQQERARRPKFADIVSILDKLIRAPDSLKTLADFDPRVSIRLPSTSGSEGVPFRTVSEWLESIKMQQYTEHFMAAGYTAIEKVVQMTNDDIKRIGVRLPGHQKRIAYSLLGLKDQVNTVGIPI

SEQ ID NO: 13028 - protein, 13 aa, Artificial Sequence
  Synthetic polypeptide
FGIMESCLLAWIF

SEQ ID NO: 13029 - protein, 124 aa, Artificial Sequence
  Synthetic polypeptide
LWNHGILPARLDFLSLRHLRAPAWSALSTRCHPLRVPPPASVRKASSGHLRTQRRCLAHDPPPPHTTSQPWAWVPRWSCAGRPLRTAGAARTLSTASPANSAGPSLGNAGRVRPVCATRSLLTD

SEQ ID NO: 13030 - protein, 64 aa, Artificial Sequence; identical to SEQ ID NO: 4493
  Synthetic polypeptide

SEQ ID NO: 13031 - protein, 64 aa, Artificial Sequence; identical to SEQ ID NO: 4492
  Synthetic polypeptide

SEQ ID NO: 13032 - protein, 30 aa, Artificial Sequence; identical to SEQ ID NO: 6446
  Synthetic polypeptide

SEQ ID NO: 13033 - protein, 414 aa, Artificial Sequence; identical to SEQ ID NO: 2203
  Synthetic polypeptide

SEQ ID NO: 13034 - protein, 64 aa, Artificial Sequence; identical to SEQ ID NO: 4477
  Synthetic polypeptide

SEQ ID NO: 13035 - protein, 86 aa, Artificial Sequence
  Synthetic polypeptide
GFPSHVELKAGLILSQLGDLSSWCNGLLQEPKISLRRSSLKYLGCRYSEIKPYGLDWAELSRDLRKTCEEQTLSIPYNDYGDSKEI

SEQ ID NO: 13036 - protein, 92 aa, Artificial Sequence
  Synthetic polypeptide
ISLMRSDGFKNGSLLAKALFSCLLPCEMYLSSSTMIVRLPQPCGTESWSHPFPAWGPQQLVQWTPSGTQDKLAAQLTQVPGVPLQRDQTLRT

SEQ ID NO: 13037 - protein, 104 aa, Artificial Sequence
  Synthetic polypeptide
ATQKTGIYLSDLTYIDSAYPSTGSILENEQRSNLMNNILRIISDLQQSCEYDIPMLPHVQKYLNSVQYIEELQKFVEDDNYKLSLKIEPGTSTPRSAASREDLV

SEQ ID NO: 13038 - protein, 386 aa, Artificial Sequence
  Synthetic polypeptide
ATQKTGIYLSDLTYIDSAYPSTGSILENEQRSNLMNNILRIISDLQQSCEYDIPMLPHVQKYLNSVQYIEELQKFVEDDNYKLSLKIEPGTSTPRSAASREDLVGPEVGASPQSGRKSVAAEGALLPQTPPSPRNLIPHGHRKCHSLGYNFIHKMNTAEFKSATFPNAGPRHLLDDSVMEPHAPSRGQAESSTLSSGISIGSSDGSELSEETSWPAFERNRLYHSLGPVTRVARNGYRSHMKASSSAESEDLAVHLYPGAVTIQGVLRRKTLLKEGKKPTVASWTKYWAALCGTQLFYYAAKSLKATERKHFKSTSNKNVSVIGWMVMMADDPEHPDLFLLTDSEKGNSYKFQAGNRMNAMLWFKHLSAACQSNKQQVPTNLMTFE

SEQ ID NO: 13039 - protein, 360 aa, Artificial Sequence
  Synthetic polypeptide
ATQKTGIYLSDLTYIDSAYPSTGSILENEQRSNLMNNILRIISDLQQSCEYDIPMLPHVQKYLNSVQYIEELQKFVEDDNYKLSLKIEPGTSTPRSAASREDLVGPEVGASPQSGRKSVAAEGALLPQTPPSPRNLIPHGHRKCHSLGYNFIHKMNTAEFKSATFPNAGPRHLLDDSVMEPHAPSRGQAESSTLSSGISIGSSDGSELSEETSWPAFESSAESEDLAVHLYPGAVTIQGVLRRKTLLKEGKKPTVASWTKYWAALCGTQLFYYAAKSLKATERKHFKSTSNKNVSVIGWMVMMADDPEHPDLFLLTDSEKGNSYKFQAGNRMNAMLWFKHLSAACQSNKQQVPTNLMTFE

SEQ ID NO: 13040 - protein, 47 aa, Artificial Sequence
  Synthetic polypeptide
GEGSKMAEQEQLQSTAPSMSNTEDRYLFVRFNIHRFSIPINWQHSRK

SEQ ID NO: 13041 - protein, 30 aa, Artificial Sequence
  Synthetic polypeptide
GGFQDGRTGTTPVYSSQHEQHRRQVSICQI

SEQ ID NO: 13042 - protein, 20 aa, Artificial Sequence
  Synthetic polypeptide
EALGSAGRSKKQEEKEGRTL

SEQ ID NO: 13043 - protein, 289 aa, Artificial Sequence
  Synthetic polypeptide
GPWQCWKEQETGRKRGTHSLRYFRLGVSDPIHGVPEFISVGYVDSHPITTYDSVTRQKEPRAPWMAENLAPDHWERYTQLLRGWQQMFKVELKRLQRHYNHSDNVAHTIKQAWEANQHELLYQKNWLEEECIAWLKRFLEYGKDTLQRTEPPLVRVNRKETFPGVTALFCKAHGFYPPEIYMTWMKNGEEIVQEIDYGDILPSGDGTYQAWASIELDPQSSNLYSCHVEHCGVHMVLQVPQESETIPLVMKAVSGSIVLVIVLAGVGVLVWRRRPREQNGAIYLPTPDR

SEQ ID NO: 13044 - protein, 334 aa, Artificial Sequence
  Synthetic polypeptide
GPWQCWKEQETGRKRGTHSLRYFRLGVSDPIHGVPEFISVGYVDSHPITTYDSVTRQKEPRAPWMAENLAPDHWERYTQLLRGWQQMFKVELKRLQRHYNHSGSHTYQRMIGCELLEDGSTTGFLQYAYDGQDFLIFNKDTLSWLAVDNVAHTIKQAWEANQHELLYQKNWLEEECIAWLKRFLEYGKDTLQRTEPPLVRVNRKETFPGVTALFCKAHGFYPPEIYMTWMKNGEEIVQEIDYGDILPSGDGTYQAWASIELDPQSSNLYSCHVEHCGVHMVLQVPQESETIPLVMKAVSGSIVLVIVLAGVGVLVWRRRPREQNGAIYLPTPDR

SEQ ID NO: 13045 - protein, 207 aa, Artificial Sequence
  Synthetic polypeptide
GPWQCWKEQETGRKRGTHSLRYFRLGVSDPIHGVPEFISVGYVDSHPITTYDSVTRQKEPRAPWMAENLAPDHWERYTQLLRGWQQMFKVELKRLQRHYNHSGSHTYQRMIGCELLEDGSTTGFLQYAYDGQDFLIFNKDTLSWLAVDNVAHTIKQAWEANQHELLYQKNWLEEECIAWLKRFLEYGKDTLQRTEQNGAIYLPTPDR

SEQ ID NO: 13046 - protein, 242 aa, Artificial Sequence
  Synthetic polypeptide
GPWQCWKEQETGRKRGTHSLRYFRLGVSDPIHGVPEFISVGYVDSHPITTYDSVTRQKEPRAPWMAENLAPDHWERYTQLLRGWQQMFKVELKRLQRHYNHSGSHTYQRMIGCELLEDGSTTGFLQYAYDGQDFLIFNKDTLSWLAVDNVAHTIKQAWEANQHELLYQKNWLEEECIAWLKRFLEYGKDTLQRTESETIPLVMKAVSGSIVLVIVLAGVGVLVWRRRPREQNGAIYLPTPDR

SEQ ID NO: 13047 - protein, 35 aa, Artificial Sequence
  Synthetic polypeptide
RPLAVLEGARNRKKKRDALSEIFSPGRFGSHPWGP

SEQ ID NO: 13048 - protein, 17 aa, Artificial Sequence
  Synthetic polypeptide
ERVARCKGAHTAGFQAT

SEQ ID NO: 13049 - protein, 18 aa, Artificial Sequence
  Synthetic polypeptide
PDAKGHILQDSRLPDSQH

SEQ ID NO: 13050 - protein, 467 aa, Artificial Sequence
  Synthetic polypeptide
RNVRNIMLRTCSQMQRGTYCRIPGYLTVNIEPLPPVVAGDAVTLKCNFKTDGRMREIVWYRVTDGGTIKQKIFTFDAMFSTNYSHMENYRKREDLVYQSTVRLPEVRISDNGPYECHVGIYDRATREKVVLASGNIFLNVMAPPTSIEVVAADTPAPFSRYQAQNFTLVCIVSGGKPAPMVYFKRDGEPIDAVPLSEPPAASSGPLQDSRPFRSLLHRDLDDTKMQKSLSLLDAENRGGRPYTERPSRGLTPDPNILLQPTTENIPETVVSREFPRWVHSAEPTYFLRHSRTPSSDGTVEVRALLTWTLNPQIDNEALFSCEVKHPALSMPMQAEVTLVAPKGPKIVMTPSRARVGDTVRILVHGFQNEVFPEPMFTWTRVGSRLLDGSAEFDGKELVLERVPAELNGSMYRCTAQNPLGSTDTHTRLIVFENPNIPRGTEDSNGSIGPTGARLTLVLALTVILELT

SEQ ID NO: 13051 - protein, 45 aa, Artificial Sequence
  Synthetic polypeptide
HDLGQATAPLEGQFYDLHNGFRDNLPLAPKGPKIVMTPSRARVGD

SEQ ID NO: 13052 - protein, 155 aa, Artificial Sequence
  Synthetic polypeptide
HDLGQATAPLEGQFYDLHNGFRDNLPLAPKGPKIVMTPSRARVGDTVRILVHGFQNEVFPEPMFTWTRVGSRLLDGSAEFDGKELVLERVPAELNGSMYRCTAQNPLGSTDTHTRLIVFENPNIPRGTEDSNGSIGPTGARLTLVLALTVILELT

SEQ ID NO: 13053 - protein, 50 aa, Artificial Sequence
  Synthetic polypeptide
MKPYVLSRLVTGTSYSMTLDKPLPPWRASSMTCTMGFVITCLLPPKDPKL

SEQ ID NO: 13054 - protein, 22 aa, Artificial Sequence
  Synthetic polypeptide
PASCPQRTQNCDDAQQSPGRGH

SEQ ID NO: 13055 - protein, 54 aa, Artificial Sequence
  Synthetic polypeptide
PASCPQRTQNCDDAQQSPGRGHSEDSGPWVSERSLPGAHVHVDAGWEPPPGRQR

SEQ ID NO: 13056 - protein, 17 aa, Artificial Sequence
  Synthetic polypeptide
AKIVPLHSSLGDSWQMT

SEQ ID NO: 13057 - protein, 37 aa, Artificial Sequence; identical to SEQ ID NO: 6039
  Synthetic polypeptide

SEQ ID NO: 13058 - protein, 92 aa, Artificial Sequence; identical to SEQ ID NO: 3724
  Synthetic polypeptide

SEQ ID NO: 13059 - protein, 70 aa, Artificial Sequence; identical to SEQ ID NO: 4213
  Synthetic polypeptide

SEQ ID NO: 13060 - protein, 28 aa, Artificial Sequence
  Synthetic polypeptide
QNGRKKRKSNWKRGDSHSVHQLARPRGA

SEQ ID NO: 13061 - protein, 530 aa, Artificial Sequence; identical to SEQ ID NO: 1961
  Synthetic polypeptide

SEQ ID NO: 13062 - protein, 35 aa, Artificial Sequence; identical to SEQ ID NO: 6123
  Synthetic polypeptide

SEQ ID NO: 13063 - protein, 23 aa, Artificial Sequence
  Synthetic polypeptide
QEWPKKAGLLSGSHDFQPLCPGH

SEQ ID NO: 13064 - protein, 278 aa, Artificial Sequence; identical to SEQ ID NO: 2571
  Synthetic polypeptide

SEQ ID NO: 13065 - protein, 10 aa, Artificial Sequence
  Synthetic polypeptide
CTAQGLEHSA

SEQ ID NO: 13066 - protein, 172 aa, Artificial Sequence; identical to SEQ ID NO: 3008
  Synthetic polypeptide

SEQ ID NO: 13067 - protein, 833 aa, Artificial Sequence; identical to SEQ ID NO: 1615
  Synthetic polypeptide

SEQ ID NO: 13068 - protein, 266 aa, Artificial Sequence; identical to SEQ ID NO: 2608
  Synthetic polypeptide

SEQ ID NO: 13069 - protein, 24 aa, Artificial Sequence
  Synthetic polypeptide
NAQPKAWNTAPRCQPHLPGPGEEL

SEQ ID NO: 13070 - protein, 113 aa, Artificial Sequence; identical to SEQ ID NO: 3446
  Synthetic polypeptide

SEQ ID NO: 13071 - protein, 52 aa, Artificial Sequence; identical to SEQ ID NO: 5072
  Synthetic polypeptide

SEQ ID NO: 13072 - protein, 18 aa, Artificial Sequence
  Synthetic polypeptide
SQEFETSLADMACSWDLA

SEQ ID NO: 13073 - protein, 40 aa, Artificial Sequence
  Synthetic polypeptide
AAGRTEVRLWEGLSNVEAQAVECGAECGGGLFLWKDFQGE

SEQ ID NO: 13074 - protein, 47 aa, Artificial Sequence
  Synthetic polypeptide
QQEELKLDSGKDFLMWKHKLWNAELSVGVDSFFGKISKENKPMHGKH

SEQ ID NO: 13075 - protein, 24 aa, Artificial Sequence
  Synthetic polypeptide
VWGWTLSLERFPRRISQCMASTKS

SEQ ID NO: 13076 - protein, 43 aa, Artificial Sequence
  Synthetic polypeptide
AAGRTEVRLWEGLSNVEAQAVECGAECGGGLFLWKDFQGTRWW

SEQ ID NO: 13077 - protein, 224 aa, Artificial Sequence
  Synthetic polypeptide
QQEELKLDSGKDFLMWKHKLWNAELSVGVDSFFGKISKVQDGGDPPEGGGGHSRLLDPLLRGGTDPYVWLEQSECGGAGLGSQRQHGGARDQVRVREGHQHGVHGLLQLLCVGAAPASPHGPHLPGGLLPNPQAAQQEGVGLLRRPAEVLWEGAEDRQVAGPHPLPLCPQLAAFAHPQLHHPLLPVLPQAQHPYLHCHLPHARQLGHEPHCLCLPHPEVPRHLP

SEQ ID NO: 13078 - protein, 225 aa, Artificial Sequence
  Synthetic polypeptide
VWGWTLSLERFPRYKMVVTPRRAAVAIAGCWILSFVVGLTPMFGWNNLSAVERAWAANGSMGEPVIKCEFEKVISMEYMVYFNFFVWVLPPLLLMVLIYLEVFYLIRKQLNKKVSASSGDPQKYYGKELKIAKSLALILFLFALSWLPLHILNCITLFCPSCHKPSILTYIAIFLTHGNSAMNPIVYAFRIQKFRVTFLKIWNDHFRCQPAPPIDEDLPEERPDD

SEQ ID NO: 13079 - protein, 29 aa, Artificial Sequence
  Synthetic polypeptide
KPGFRDQPGQYRHRRHRCSKGGFRHHPNR

SEQ ID NO: 13080 - protein, 365 aa, Artificial Sequence
  Synthetic polypeptide
VWWLTPVINRNTLGGQGRRSTRSQDFETSLDNIGIAGTDVAKEASDIILTDDNFTSIVKAVMWGRNVYDSISKFLQFQLTVNVVAVIVAFTGACITQDSPLKAVQMLWVNLIMDTFASLALATEPPTESLLKRRPYGRNKPLISRTMMKNILGHAFYQLIVIFILVFAGEKFFDIDSGRKAPLHSPPSQHYTIVFNTFVLMQLFNEINSRKIHGEKNVFSGIYRNIIFCSVVLGTFICQFISAIPTRSLKFLKEAGHGTTKEEITKDAEGLDEIDHAEMELRRGQILWFRGLNRIQTQIDVINTFQTGASFKGVLRRQNMGQHLDVKLVPSSSYVAVAPVKSSPTTSVPAVSSPPMGNQSGQSVP

SEQ ID NO: 13081 - protein, 401 aa, Artificial Sequence
  Synthetic polypeptide
VWWLTPVINRNTLGGQGRRSTRSQDFETSLDNIGIAGTDVAKEASDIILTDDNFTSIVKAVMWGRNVYDSISKFLQFQLTVNVVAVIVAFTGACITQDSPLKAVQMLWVNLIMDTFASLALATEPPTESLLKRRPYGRNKPLISRTMMKNILGHAFYQLIVIFILVFAGEKFFDIDSGRKAPLHSPPSQHYTIVFNTFVLMQLFNEINSRKIHGEKNVFSGIYRNIIFCSVVLGTFICQIFIVEFGGKPFSCTSLSLSQWLWCLFIGIGELLWGQFISAIPTRSLKFLKEAGHGTTKEEITKDAEGLDEIDHAEMELRRGQILWFRGLNRIQTQIDVINTFQTGASFKGVLRRQNMGQHLDVKLVPSSSYVAVAPVKSSPTTSVPAVSSPPMGNQSGQSVP

SEQ ID NO: 13082 - protein, 436 aa, Artificial Sequence
  Synthetic polypeptide
VWWLTPVINRNTLGGQGRRSTRSQDFETSLDNIGIAGTDVAKEASDIILTDDNFTSIVKAVMWGRNVYDSISKFLQFQLTVNVVAVIVAFTGACITQDSPLKAVQMLWVNLIMDTFASLALATEPPTESLLKRRPYGRNKPLISRTMMKNILGHAFYQLIVIFILVFAGEKFFDIDSGRKAPLHSPPSQHYTIVFNTFVLMQLFNEINSRKIHGEKNVFSGIYRNIIFCSVVLGTFICQIFIVEFGGKPFSCTSLSLSQWLWCLFIGIGELLWGQFISAIPTRSLKFLKEAGHGTTKEEITKDAEGLDEIDHAEMELRRGQILWFRGLNRIQTQIKVVKAFHSSLHESIQKPYNQKSIHSFMTHPEFAIEEELPRTPLLDEEEEENPDKASKFGTRVLLLDGEVTPYANTNNNAVDCNQVQLPQSDSSLQSLETSV

SEQ ID NO: 13083 - protein, 52 aa, Artificial Sequence
  Synthetic polypeptide
DQAQWLTPIIPALQEAEGGRSQGQEIKTILANMKSPAHHPLLSTMGHTPGVP

SEQ ID NO: 13084 - protein, 102 aa, Artificial Sequence
  Synthetic polypeptide
HEITCPPPPVIYNGAHTGSSLEDFPYGTTVTYTCLGQKEEWNSASLERAPSVVQAMIKKEAPGVALLPCVNFPSLLSSAHMSILQMDTRYLARKPHISTMTL

SEQ ID NO: 13085 - protein, 511 aa, Artificial Sequence
  Synthetic polypeptide
HEITCPPPPVIYNGAHTGSSLEDFPYGTTVTYTCNPGPERGVEFSLIGESTIRCTSNDQERGTWSGPAPLCKLSLLAVQCSHVHIANGYKISGKEAPYFYNDTVTFKCYSGFTLKGSSQIRCKADNTWDPEIPVCEKETCQHVRQSLQELPAGSRVELVNTSCQDGYQLTGHAYQMCQDAENGIWFKKIPLCKVIHCHPPPVIVNGKHTGMMAENFLYGNEVSYECDQGFYLLGEKKLQCRSDSKGHGSWSGPSPQCLRSPPVTRCPNPEVKHGYKLNKTHSAYSHNDIVYVDCNPGFIMNGSRVIRCHTDNTWVPGVPTCIKKAFIGCPPPPKTPNGNHTGGNIARFSPGMSILYSCDQGYLLVGEALLLCTHEGTWSQPAPHCKEVNCSSPADMDGIQKGLEPRKMYQYGAVVTLECEDGYMLEGSPQSQCQSDHQWNPPLAVCRSRSLAPVLCGIAAGLILLTFLIVITLYVISKHRARNYYTDTSQKEAFHLEAREVYSVDPYNPAS

SEQ ID NO: 13086 - protein, 449 aa, Artificial Sequence
  Synthetic polypeptide
HEITCPPPPVIYNGAHTGSSLEDFPYGTTVTYTCNPGPERGVEFSLIGESTIRCTSNDQERGTWSGPAPLCKLSLLAVQCSHVHIANGYKISGKEAPYFYNDTVTFKCYSGFTLKGSSQIRCKADNTWDPEIPVCEKETCQHVRQSLQELPAGSRVELVNTSCQDGYQLTGHAYQMCQDAENGIWFKKIPLCKVIHCHPPPVIVNGKHTGMMAENFLYGNEVSYECDQGFYLLGEKKLQCRSDSKGHGSWSGPSPQCLRSPPVTRCPNPEVKHGYKLNKTHSAYSHNDIVYVDCNPGFIMNGSRVIRCHTDNTWVPGVPTCIKKEVNCSSPADMDGIQKGLEPRKMYQYGAVVTLECEDGYMLEGSPQSQCQSDHQWNPPLAVCRSRSLAPVLCGIAAGLILLTFLIVITLYVISKHRARNYYTDTSQKEAFHLEAREVYSVDPYNPAS

SEQ ID NO: 13087 - protein, 570 aa, Artificial Sequence
  Synthetic polypeptide
HEITCPPPPVIYNGAHTGSSLEDFPYGTTVTYTCNPGPERGVEFSLIGESTIRCTSNDQERGTWSGPAPLCKLSLLAVQCSHVHIANGYKISGKEAPYFYNDTVTFKCYSGFTLKGSSQIRCKADNTWDPEIPVCEKGCQSPPGLHHGRHTGGNTVFFVSGMTVDYTCDPGYLLVGNKSIHCMPSGNWSPSAPRCEETCQHVRQSLQELPAGSRVELVNTSCQDGYQLTGHAYQMCQDAENGIWFKKIPLCKVIHCHPPPVIVNGKHTGMMAENFLYGNEVSYECDQGFYLLGEKKLQCRSDSKGHGSWSGPSPQCLRSPPVTRCPNPEVKHGYKLNKTHSAYSHNDIVYVDCNPGFIMNGSRVIRCHTDNTWVPGVPTCIKKAFIGCPPPPKTPNGNHTGGNIARFSPGMSILYSCDQGYLLVGEALLLCTHEGTWSQPAPHCKEVNCSSPADMDGIQKGLEPRKMYQYGAVVTLECEDGYMLEGSPQSQCQSDHQWNPPLAVCRSRSLAPVLCGIAAGLILLTFLIVITLYVISKHRARNYYTDTSQKEAFHLEAREVYSVDPYNPAS

SEQ ID NO: 13088 - protein, 25 aa, Artificial Sequence
  Synthetic polypeptide
AHGPSLQVCSPAGELRPLPQGRPEV

SEQ ID NO: 13089 - protein, 1102 aa, Artificial Sequence
  Synthetic polypeptide
GSNELMVHLYKCAAQRESCGLCLKADRKFECGWCSGERRCTLHQHCTSPSSPWLDWSSHNVKCSNPQITEILTVSGPPEGGTRVTIHGVNLGLDFSEIAHHVQVAGVPCTPLPGEYIIAEQIVCEMGHALVGTTSGPVRLCIGECKPEFMTKSHQQYTFVNPSVLSLNPIRGPESGGTMVTITGHYLGAGSSVAVYLGNQTCEFYGRSMSEIVCVSPPSSNGLGPVPVSVSVDRAHVDSNLQFEYIDDPRVQRIEPEWSIASGHTPLTITGFNLDVIQEPRIRVKFNGKESVNVCKVVNTTTLTCLAPSLTTDYRPGLDTVERPDEFGFVFNNVQSLLIYNDTKFIYYPNPTFELLSPTGVLDQKPGSPIILKGKNLCPPASGGAKLNYTVLIGETPCAVTVSETQLLCEPPNLTGQHKVMVHVGGMVFSPGSVSVISDSLLTLPAIVSIAAGGSLLLIIVIIVLIAYKRKSRENDLTLKRLQMQMDNLESRVALECKEAFAELQTDINELTSDLDRSGIPYLDYRTYAMRVLFPGIEDHPVLRELEVQGNGQQHVEKALKLFAQLINNKVFLLTFIRTLELQRSFSMRDRGNVASLIMTGLQGRLEYATDVLKQLLSDLIDKNLENKNHPKLLLRRTESVAEKMLTNWFAFLLHKFLKECAGEPLFMLYCAIKQQMEKGPIDAITGEARYSLSEDKLIRQQIEYKTLILNCVNPDNENSPEIPVKVLNCDTITQVKEKILDAVYKNVPYSQRPRAVDMDLEWRQGRIARVVLQDEDITTKIEGDWKRLNTLMHYQVSDRSVVALVPKQTSSYNIPASASISRTSISRYDSSFRYTGSPDSLRSRAPMITPDLESGVKVWHLVKNHDHGDQKEGDRGSKMVSEIYLTRLLATKGTLQKFVDDLFETLFSTVHRGSALPLAIKYMFDFLDEQADRHSIHDTDVRHTWKSNCLPLRFWVNVIKNPQFVFDIHKGSITDACLSVVAQTFMDSCSTSEHRLGKDSPSNKLLYAKDIPSYKSWVERYYADIAKLPAISDQDMNAYLAEQSRLHAVEFNMLSALNEIYSYVSKYSEELIGALEQDEQARRQRLAYKVEQLINAMSIES

SEQ ID NO: 13090 - protein, 96 aa, Artificial Sequence
  Synthetic polypeptide
LFPFTSSLLICEVEGRMPTSQGHREDQMSSWSISTSVQPSGRAAASASRPTGSLSVAGAAASAGAPSTSTVPALPAPGSTGPATMSSAPTLKSPRF

SEQ ID NO: 13091 - protein, 20 aa, Artificial Sequence
  Synthetic polypeptide
KKEPTLPTPQFQTSSLQNSE

SEQ ID NO: 13092 - protein, 4 aa, Artificial Sequence
  Synthetic polypeptide
PPEL

SEQ ID NO: 13093 - protein, 404 aa, Artificial Sequence
  Synthetic polypeptide
RHRESTPCKDGSGEWRLDASTSQRTPRIAGCHQKPGERHGTDFLTTRRRRSQPCQHLNFRLLASRTLSEELVQVVENSELADEQDKETVRVQGPGILPGLDSESASSSIRFSKACLKNVFSVLLIFIYLLLMAVAVFLVYRTITDFREKLKHPVMSVSYKEVDRYDAPGIALYPGQAQLLSCKHHYEVIPPLTSPGQPGDMNCTTQRINYTDPFSNQTVKSALIVQGPREVKKRELVFLQFRLNKSSEDFSAIDYLLFSSFQEFLQSPNRVGFMQACESAYSSWKFSGGFRTWVKMSLVKTKEEDGREAVEFRQETSVVNYIDQRPAAKKSAQLFFVVFEWKDPFIQKVQDIVTANPWNTIALLCGAFLALFKAAEFAKLSIKWMIKIRKRYLKRRGQATSHIS

SEQ ID NO: 13094 - protein, 10 aa, Artificial Sequence
  Synthetic polypeptide
KWNMKSINQV

SEQ ID NO: 13095 - protein, 48 aa, Artificial Sequence
  Synthetic polypeptide
RALIKSDLRRHNINIGITNVDVKAIPADSPTDQEPKTVMLSKQSESAI

SEQ ID NO: 13096 - protein, 159 aa, Artificial Sequence
  Synthetic polypeptide
SLLLRKTFLSKYYCSLTNSPVYPRALMKMYEEINVAFMSGNTASLLQPVDQGVISTFKSYSLRNTLQKAVAARNNYSSLGSEQSKLRTFWKGCTILDAIKNILDSWEEVKLSTLTGVWRKLIPILMDDFEVFKTSVEEIAADVVGITRELELEVEYEEH

SEQ ID NO: 13097 - protein, 15 aa, Artificial Sequence
  Synthetic polypeptide
GGMTWGISLITSRPF

SEQ ID NO: 13098 - protein, 7 aa, Artificial Sequence
  Synthetic polypeptide
LSSYKVE

SEQ ID NO: 13099 - protein, 939 aa, Artificial Sequence
  Synthetic polypeptide
SAHIRWNDMGNITHNKSTILVELINKEETALFHTDDIENAKYISRLFATRHKFYKQNKICTEQSNSPPPIRRQPTWSRSSLPRQQPYILPPVHVQCGEHYSETHTSQDSIFHGNEEALYCNSHNSLDLNYLNGTVTNGSVCSVHSVNSLNCSQSFIQASPVSSNLSIPGSDIMRADYIPSHRHSAIIVPSYRPTPDYETVMRQMKRGILHTDSQSQSLRNLNIINTHAYNQPEDLVYSQPEMRERHPYTVPYGPQGVYSNKLVSPSDQRNPKNNVVPSKPGASAISHTVSTPELANMQLQGSHNYSTAHMLKNYLFRPPPPYPRPRPATSTPDLASHRHKYVSGSSPDLVTRKVQLSVKTFQEDSSPVVHQSLQEVSEPLTATKHHGTVNKRHSLEVMNSMVRGMEAMTLKSLHLPMARRNTLREQGPPEEGSGSHEVPQLPQYHHKKTFSDATMLIHSSESEEEEEEAPESVPQIPMLREKMEYSAQLQAALARIPNKPPPEYPGPRKSVSNGALRQDQASLPPAMARARVLRHGPAKAISMSRTDPPAVNGASLGPSISEPDLTSVKERVKKEPVKERPVSEMFSLEDSIIEREMMIRNLEKQKMAGLEAQKRPLMLAALNGLSVARVSGREENRVDATRVPMDERFRTLKKKLEEGMVFTEYEQIPKKKANGIFSTAALPENAERSRIREVVPYEENRVELIPTKENNTGYINASHIKVVVGGAEWHYIATQGPLPHTCHDFWQMVWEQGVNVIAMVTAEEEGGRTKSHRYWPKLGSKHSSATYGKFKVTTKFRTDSVCYATTGLKVKHLLSGQERTVWHLQYTDWPDHGCPEDVQGFLSYLEEIQSVRRHTNSMLEGTKNRHPPIVVHCSAGVGRTGVLILSELMIYCLEHNEKVEVPMMLRLLREQRMFMIQTIAQYKFVYQVLIQFLQNSRLI

SEQ ID NO: 13100 - protein, 51 aa, Artificial Sequence
  Synthetic polypeptide
GRARWLTPVIPALWESEAGGSRGQEIETILANMDNHGNCVHLGIFFMGIFV

SEQ ID NO: 13101 - protein, 997 aa, Artificial Sequence
  Synthetic polypeptide
GRARWLTPVIPALWESEAGGSRGQEIETILANMDNHGNCVHLGIFFMGIFVRNRIGRQAVIYRWNDMGNITHNKSTILVELINKEETALFHTDDIENAKYISRLFATRHKFYKQNKICTEQSNSPPPIRRQPTWSRSSLPRQQPYILPPVHVQCGEHYSETHTSQDSIFHGNEEALYCNSHNSLDLNYLNGTVTNGSVCSVHSVNSLNCSQSFIQASPVSSNLSIPGSDIMRADYIPSHRHSAIIVPSYRPTPDYETVMRQMKRGILHTDSQSQSLRNLNIINTHAYNQPEDLVYSQPEMRERHPYTVPYGPQGVYSNKLVSPSDQRNPKNNVVPSKPGASAISHTVSTPELANMQLQGSHNYSTAHMLKNYLFRPPPPYPRPRPATSTPDLASHRHKYVSGSSPDLVTRKVQLSVKTFQEDSSPVVHQSLQEVSEPLTATKHHGTVNKRHSLEVMNSMVRGMEAMTLKSLHLPMARRNTLREQGPPEEGSGSHEVPQLPQYHHKKTFSDATMLIHSSESEEEEEEAPESVPQIPMLREKMEYSAQLQAALARIPNKPPPEYPGPRKSVSNGALRQDQASLPPAMARARVLRHGPAKAISMSRTDPPAVNGASLGPSISEPDLTSVKERVKKEPVKERPVSEMFSLEDSIIEREMMIRNLEKQKMAGLEAQKRPLMLAALNGLSVARVSGREENRVDATRVPMDERFRTLKKKLEEGMVFTEYEQIPKKKANGIFSTAALPENAERSRIREVVPYEENRVELIPTKENNTGYINASHIKVVVGGAEWHYIATQGPLPHTCHDFWQMVWEQGVNVIAMVTAEEEGGRTKSHRYWPKLGSKHSSATYGKFKVTTKFRTDSVCYATTGLKVKHLLSGQERTVWHLQYTDWPDHGCPEDVQGFLSYLEEIQSVRRHTNSMLEGTKNRHPPIVVHCSAGVGRTGVLILSELMIYCLEHNEKVEVPMMLRLLREQRMFMIQTIAQYKFVYQVLIQFLQNSRLI

SEQ ID NO: 13102 - protein, 50 aa, Artificial Sequence
  Synthetic polypeptide
PGTVAHACNPSTLGVRGGWITRSRDRDHPGQHGQSWKLCTPWHFLYGDFR

SEQ ID NO: 13103 - protein, 64 aa, Artificial Sequence
  Synthetic polypeptide
PGTVAHACNPSTLGVRGGWITRSRDRDHPGQHGQSWKLCTPWHFLYGDFREEQNWKTSGNIQVE

SEQ ID NO: 13104 - protein, 41 aa, Artificial Sequence
  Synthetic polypeptide
SQHFGSPRRVDHEVKRSRPSWPTWTIMETVYTLAFSLWGFS

SEQ ID NO: 13105 - protein, 32 aa, Artificial Sequence
  Synthetic polypeptide
HASLVPPTQEAELGGLLEPRSLSPAWATCGGT

SEQ ID NO: 13106 - protein, 50 aa, Artificial Sequence
  Synthetic polypeptide
KFESSLGNMWRHLTCWILNLPLRTPNRGSRFPRNPQCLLPGWRVTRPLML

SEQ ID NO: 13107 - protein, 147 aa, Artificial Sequence
  Synthetic polypeptide
VQPGQHVAAPDLLDPKSAAQNSKPRLSFSTKPTVLASRVESDTTINVMKWKTVSTIFLVVVLYLIIGATVFKALEQPHEISQRTTIVIQKQTFISQHSCVNSTELDELIQDLETSHHAQKAAKYSVSSMPYWEFPSLVFSWLELEIS

SEQ ID NO: 13108 - protein, 417 aa, Artificial Sequence
  Synthetic polypeptide
VQPGQHVAAPDLLDPKSAAQNSKPRLSFSTKPTVLASRVESDTTINVMKWKTVSTIFLVVVLYLIIGATVFKALEQPHEISQRTTIVIQKQTFISQHSCVNSTELDELIQQIVAAINAGIIPLGNTSNQISHWDLGSSFFFAGTVITTIGFGNISPRTEGGKIFCIIYALLGIPLFGFLLAGVGDQLGTIFGKGIAKVEDTFIKWNVSQTKIRIISTIIFILFGCVLFVALPAIIFKHIEGWSALDAIYFVVITLTTIGFGDYVAGGSDIEYLDFYKPVVWFWILVGLAYFAAVLSMIGDWLRVISKKTKEEVGEFRAHAAEWTANVTAEFKETRRRLSVEIYDKFQRATSIKRKLSAELAGNHNQELTPCRRTLSVNHLTSERDVLPPLLKTESIYLNGLTPHCAGEEIAVIENIK

SEQ ID NO: 13109 - protein, 223 aa, Artificial Sequence
  Synthetic polypeptide
VQPGQHVAAPDLLDPKSAAQNSKPRLSFSTKPTVLASRVESDTTINVMKWKTVSTIFLVVVLYLIIGATVFKALEQPHEISQRTTIVIQKQTFISQHSCVNSTELDELIQQIVAAINAGIIPLGNTSNQISHWDLGSSFFFAGTVITTIGFGNISPRTEGGKIFCIIYALLGIPLFGFLLAGVGDQLGTIFGKGIAKVEDTFIVDPILNIWTSISLSCGSGSL

SEQ ID NO: 13110 - protein, 108 aa, Artificial Sequence
  Synthetic polypeptide
GQGALVVEPVLGSSPGSGAYQNWVKKNGAEHSLPTLGLTNNQLFFLGFAQVWCSVRTPESSHEGLITDPHSPSRFRVIGSLSNSKEFSEHFRCPPGSPMNPPHKCEVW

SEQ ID NO: 13111 - protein, 24 aa, Artificial Sequence
  Synthetic polypeptide
QGKEHWSWSQFWVQVPVLELTRTG

SEQ ID NO: 13112 - protein, 29 aa, Artificial Sequence
  Synthetic polypeptide
RARSTGRGASSGFKSRFWSLPELGEEERG

SEQ ID NO: 13113 - protein, 24 aa, Artificial Sequence
  Synthetic polypeptide
AFESDLVPQDKLLCGFQILFFPVC

SEQ ID NO: 13114 - protein, 6 aa, Artificial Sequence
  Synthetic polypeptide
ELLSQI

SEQ ID NO: 13115 - protein, 789 aa, Artificial Sequence
  Synthetic polypeptide
VRFSTSRQTLMWIPDSFFSSLLSGRISTLRDETGAIFIDRDPAAFAPILNFLRTKELDLRGVSINVLRHEAEFYGITPLVRRLLLCEELERSSCGSVLFHGYLPPPGIPSRKINNTVRSADSRNGLNSTEGEARGNGTQPVLSGTGEETVRLGFPVDPRKVLIVAGHHNWIVAAYAHFAVCYRIKESSGWQQVFTSPYLDWTIERVALNAKVVGGPHGDKDKMVAVASESSIILWSVQDGGSGSEIGVFSLGVPVDALFFIGNQLVATSHTGKVGVWNAVTQHWQVQDVVPITSYDTAGSFLLLGCNNGSIYYIDMQKFPLRMKDNDLLVTELYHDPSNDAITALSVYLTPKTSVSGNWIEIAYGTSSGAVRVIVQHPETVGSGPQLFQTFTVHRSPVTKIMLSEKHLVSVCADNNHVRTWTVTRFRGMISTQPGSTPLASFKILSLEETESHGSYSSGNDIGPFGERDDQQVFIQKVVPITNKLFVRLSSTGKRICEIQAVDCTTISSFTVRECEGSSRMGSRPRRYLFTGHTNGSIQMWDLTTAMDMVNKSEDKDVGGPTEEELLKLLDQCDLSTSRCATPNISPATSVVQHSHLRESNSSLQLQHHDTTHEAATYGSMRPYRESPLLARARRTESFHSYRDFQTINLNRNVERAVPENGNLGPIQAEVKGATGECNISERKSPGVEIKSLRELDSGLEVHKIAEGFSESKKRSSEDENENKIEFRKKGGFEGGGFLGRKKVPYLASSPSTSDGGTDSPGTASPSPTKTTPSPRHKKSDSSGQEYSL

SEQ ID NO: 13116 - protein, 214 aa, Artificial Sequence
  Synthetic polypeptide
VRFSTSRQTLMWIPDSFFSSLLSGRISTLRDETGAIFIDRDPAAFAPILNFLRTKELDLRGVSINVLRHEAEFYGITPLVRRLLLCEELERSSCGSVLFHGYLPPPGIPSRKINNTVRSADSRNGLNSTEGEARGNGTQPVLSGTGEETVRLGFPVDPRKVLIVAGHHNWIVAAYAHFAVCYRVFWLGTVGHACNPSTLGGRDGWSSRSARPTW

SEQ ID NO: 13117 - protein, 30 aa, Artificial Sequence
  Synthetic polypeptide
IQPRAHITKRAFGEYVRSRLLTVLQYPHLQ

SEQ ID NO: 13118 - protein, 299 aa, Artificial Sequence
  Synthetic polypeptide
KGIWRICEIQAVDCTTISSFTVRECEGSSRMGSRPRRYLFTGHTNGSIQMWDLTTAMDMVNKSEDKDVGGPTEEELLKLLDQCDLSTSRCATPNISPATSVVQHSHLRESNSSLQLQHHDTTHEAATYGSMRPYRESPLLARARRTESFHSYRDFQTINLNRNVERAVPENGNLGPIQAEVKGATGECNISERKSPGVEIKSLRELDSGLEVHKIAEGFSESKKRSSEDENENKIEFRKKGGFEGGGFLGRKKVPYLASSPSTSDGGTDSPGTASPSPTKTTPSPRHKKSDSSGQEYSL

SEQ ID NO: 13119 - protein, 8 aa, Artificial Sequence
  Synthetic polypeptide
LKGHLENM

SEQ ID NO: 13120 - protein, 21 aa, Artificial Sequence
  Synthetic polypeptide
EARVSPLWTSVSSLVKRKITR

SEQ ID NO: 13121 - protein, 115 aa, Artificial Sequence
  Synthetic polypeptide
GSGINSFGFQSQLSPFSWVVRSQGLTSLDLSFLTCKKKNNKVNFHSPRSGQRCWAARTQVEKRLVVLVVLLAAGLVACLAALGIQYQTRSPSVCLSEACVSVTSSILSSMDPTVD

SEQ ID NO: 13122 - protein, 143 aa, Artificial Sequence
  Synthetic polypeptide
GSGINSFGFQSQLSPFSWVVRSQGLTSLDLSFLTCKKKNNKVNFHSPRSGQRCWAARTQVEKRLVVLVVLLAAGLVACLAALGIQYQTRSPSVCLSEACVSVTSSILSSMDPTVDPCHDFFSYACGGWIKANPVPDGHSRWGT

SEQ ID NO: 13123 - protein, 765 aa, Artificial Sequence
  Synthetic polypeptide
GSGINSFGFQSQLSPFSWVVRSQGLTSLDLSFLTCKKKNNKVNFHSPRSGQRCWAARTQVEKRLVVLVVLLAAGLVACLAALGIQYQTRSPSVCLSEACVSVTSSILSSMDPTVDPCHDFFSYACGGWIKANPVPDGHSRWGTFSNLWEHNQAIIKHLLENSTASVSEAERKAQVYYRACMNETRIEELRAKPLMELIERLGGWNITGPWAKDNFQDTLQVVTAHYRTSPFFSVYVSADSKNSNSNVIQVDQSGLGLPSRDYYLNKTENEKVLTGYLNYMVQLGKLLGGGDEEAIRPQMQQILDFETALANITIPQEKRRDEELIYHKVTAAELQTLAPAINWLPFLNTIFYPVEINESEPIVVYDKEYLEQISTLINTTDRCLLNNYMIWNLVRKTSSFLDQRFQDADEKFMEVMYGTKKTCLPRWKFCVSDTENNLGFALGPMFVKATFAEDSKSIATEIILEIKKAFEESLSTLKWMDEETRKSAKEKADAIYNMIGYPNFIMDPKELDKVFNDYTAVPDLYFENAMRFFNFSWRVTADQLRKAPNRDQWSMTPPMVNAYYSPTKNEIVFPAGILQAPFYTRSSPKALNFGGIGVVVGHELTHAFDDQGREYDKDGNLRPWWKNSSVEAFKRQTECMVEQYSNYSVNGEPVNGRHTLGENIADNGGLKAAYRAYQNWVKKNGAEHSLPTLGLTNNQLFFLGFAQVWCSVRTPESSHEGLITDPHSPSRFRVIGSLSNSKEFSEHFRCPPGSPMNPPHKCEVW

SEQ ID NO: 13124 - protein, 733 aa, Artificial Sequence
  Synthetic polypeptide
GSGINSFGFQSQLSPFSWVVRSQGLTSLDLSFLTCKKKNNKVNFHSPRSGQRCWAARTQVEKRLVVLVVLLAAGLVACLAALGIQYQTRSPSVCLSEACVSVTSSILSSMDPTVDPCHDFFSYACGGWIKANPVPDGHSRWGTFSNLWEHNQAIIKHLLENSTASVSEAERKAQVYYRACMNETRIEELRAKPLMELIERLGGWNITGPWAKDNFQDTLQVVTAHYRTSPFFSVYVSADSKNSNSNVIQVDQSGLGLPSRDYYLNKTENEKVLTGYLNYMVQLGKLLGGGDEEAIRPQMQQILDFETALANITIPQEKRRDEELIYHKVTAAELQTLAPAINWLPFLNTIFYPVEINESEPIVVYDKEYLEQISTLINTTDRCLLNNYMIWNLVRKTSSFLDQRFQDADEKFMEVMYGTKKTCLPRWKFCVSDTENNLGFALGPMFVKATFAEDSKSIATEIILEIKKAFEESLSTLKWMDEETRKSAKEKADAIYNMIGYPNFIMDPKELDKVFNDYTAVPDLYFENAMRFFNFSWRVTADQLRKAPNRDQWSMTPPMVNAYYSPTKNEIVFPAGILQAPFYTRSSPKALNFGGIGVVVGHELTHAFDDQGREYDKDGNLRPWWKNSSVEAFKRQTECMVEQYSNYSVNGEPVNGRHTLGENIADNGGLKAAYRVWCSVRTPESSHEGLITDPHSPSRFRVIGSLSNSKEFSEHFRCPPGSPMNPPHKCEVW

SEQ ID NO: 13125 - protein, 75 aa, Artificial Sequence
  Synthetic polypeptide
QGELPQPPEWPEVLGCTDPGGEAAGGVGGTSGGRTGGLLGSTGHPVPDKIPLCVPERSLCLSDQLHLELHGPHSG

SEQ ID NO: 13126 - protein, 78 aa, Artificial Sequence
  Synthetic polypeptide
QGELPQPPEWPEVLGCTDPGGEAAGGVGGTSGGRTGGLLGSTGHPVPDKIPLCVPERSLCLSDQLHLELHGPHSGPLP

SEQ ID NO: 13127 - protein, 113 aa, Artificial Sequence
  Synthetic polypeptide
GAQDQESRTQMSTYKRATLDEEDLVDSLSEGDAYPNGLQVNFHSPRSGQRCWAARTQVEKRLVVLVVLLAAGLVACLAALGIQYQTRSPSVCLSEACVSVTSSILSSMDPTVD

SEQ ID NO: 13128 - protein, 141 aa, Artificial Sequence
  Synthetic polypeptide
GAQDQESRTQMSTYKRATLDEEDLVDSLSEGDAYPNGLQVNFHSPRSGQRCWAARTQVEKRLVVLVVLLAAGLVACLAALGIQYQTRSPSVCLSEACVSVTSSILSSMDPTVDPCHDFFSYACGGWIKANPVPDGHSRWGT

SEQ ID NO: 13129 - protein, 763 aa, Artificial Sequence
  Synthetic polypeptide
GAQDQESRTQMSTYKRATLDEEDLVDSLSEGDAYPNGLQVNFHSPRSGQRCWAARTQVEKRLVVLVVLLAAGLVACLAALGIQYQTRSPSVCLSEACVSVTSSILSSMDPTVDPCHDFFSYACGGWIKANPVPDGHSRWGTFSNLWEHNQAIIKHLLENSTASVSEAERKAQVYYRACMNETRIEELRAKPLMELIERLGGWNITGPWAKDNFQDTLQVVTAHYRTSPFFSVYVSADSKNSNSNVIQVDQSGLGLPSRDYYLNKTENEKVLTGYLNYMVQLGKLLGGGDEEAIRPQMQQILDFETALANITIPQEKRRDEELIYHKVTAAELQTLAPAINWLPFLNTIFYPVEINESEPIVVYDKEYLEQISTLINTTDRCLLNNYMIWNLVRKTSSFLDQRFQDADEKFMEVMYGTKKTCLPRWKFCVSDTENNLGFALGPMFVKATFAEDSKSIATEIILEIKKAFEESLSTLKWMDEETRKSAKEKADAIYNMIGYPNFIMDPKELDKVFNDYTAVPDLYFENAMRFFNFSWRVTADQLRKAPNRDQWSMTPPMVNAYYSPTKNEIVFPAGILQAPFYTRSSPKALNFGGIGVVVGHELTHAFDDQGREYDKDGNLRPWWKNSSVEAFKRQTECMVEQYSNYSVNGEPVNGRHTLGENIADNGGLKAAYRAYQNWVKKNGAEHSLPTLGLTNNQLFFLGFAQVWCSVRTPESSHEGLITDPHSPSRFRVIGSLSNSKEFSEHFRCPPGSPMNPPHKCEVW

SEQ ID NO: 13130 - protein, 731 aa, Artificial Sequence
  Synthetic polypeptide
GAQDQESRTQMSTYKRATLDEEDLVDSLSEGDAYPNGLQVNFHSPRSGQRCWAARTQVEKRLVVLVVLLAAGLVACLAALGIQYQTRSPSVCLSEACVSVTSSILSSMDPTVDPCHDFFSYACGGWIKANPVPDGHSRWGTFSNLWEHNQAIIKHLLENSTASVSEAERKAQVYYRACMNETRIEELRAKPLMELIERLGGWNITGPWAKDNFQDTLQVVTAHYRTSPFFSVYVSADSKNSNSNVIQVDQSGLGLPSRDYYLNKTENEKVLTGYLNYMVQLGKLLGGGDEEAIRPQMQQILDFETALANITIPQEKRRDEELIYHKVTAAELQTLAPAINWLPFLNTIFYPVEINESEPIVVYDKEYLEQISTLINTTDRCLLNNYMIWNLVRKTSSFLDQRFQDADEKFMEVMYGTKKTCLPRWKFCVSDTENNLGFALGPMFVKATFAEDSKSIATEIILEIKKAFEESLSTLKWMDEETRKSAKEKADAIYNMIGYPNFIMDPKELDKVFNDYTAVPDLYFENAMRFFNFSWRVTADQLRKAPNRDQWSMTPPMVNAYYSPTKNEIVFPAGILQAPFYTRSSPKALNFGGIGVVVGHELTHAFDDQGREYDKDGNLRPWWKNSSVEAFKRQTECMVEQYSNYSVNGEPVNGRHTLGENIADNGGLKAAYRVWCSVRTPESSHEGLITDPHSPSRFRVIGSLSNSKEFSEHFRCPPGSPMNPPHKCEVW

SEQ ID NO: 13131 - protein, 40 aa, Artificial Sequence
  Synthetic polypeptide
KEHRTKSPGPRCRRTSGPRWTRRTWWTRSPRATHTPTACR

SEQ ID NO: 13132 - protein, 113 aa, Artificial Sequence
  Synthetic polypeptide
RSTGPRVQDPDVDVQAGHAGRGGPGGLALRGRRIPQRPAGELPQPPEWPEVLGCTDPGGEAAGGVGGTSGGRTGGLLGSTGHPVPDKIPLCVPERSLCLSDQLHLELHGPHSG

SEQ ID NO: 13133 - protein, 116 aa, Artificial Sequence
  Synthetic polypeptide
RSTGPRVQDPDVDVQAGHAGRGGPGGLALRGRRIPQRPAGELPQPPEWPEVLGCTDPGGEAAGGVGGTSGGRTGGLLGSTGHPVPDKIPLCVPERSLCLSDQLHLELHGPHSGPLP

SEQ ID NO: 13134 - protein, 54 aa, Artificial Sequence
  Synthetic polypeptide
SSIIQGTASHCFLSPFRTHQKGLVQCEERSSIPATSAQRTSSKFFCYQSLLEST

SEQ ID NO: 13135 - protein, 4180 aa, Artificial Sequence
  Synthetic polypeptide
YNVKNVAPFQQPPPRGQVQSSSAINLSWSPPDSPNAHWLTYSLLRDGFEIYTTEDQYPYSIQYFLDTDLLPYTKYSYYIETTNVHGSTRSVAVTYKTKPGVPEGNLTLSYIIPIGSDSVTLTWTTLSNQSGPIEKYILSCAPLAGGQPCVSYEGHETSATIWNLVPFAKYDFSVQACTSGGCLHSLPITVTTAQAPPQRLSPPKMQKISSTELHVEWSPPAELNGIIIRYELYMRRLRSTKETTSEESRVFQSSGWLSPHSFVESANENALKPPQTMTTITGLEPYTKYEFRVLAVNMAGSVSSAWVSERTGESAPVFMIPPSVFPLSSYSLNISWEKPADNVTRGKVVGYDINMLSEQSPQQSIPMAFSQLLHTAKSQELSYTVEGLKPYRIYEFTITLCNSVGCVTSASGAGQTLAAAPAQLRPPLVKGINSTTIHLRWFPPEELNGPSPIYQLERRESSLPALMTTMMKGIRFIGNGYCKFPSSTHPVNTDFTGIKASFRTKVPEGLIVFAASPGNQEEYFALQLKKGRLYFLFDPQGSPVEVTTTNDHGKQYSDGKWHEIIAIRHQAFGQITLDGIYTGSSAILNGSTVIGDNTGVFLGGLPRSYTILRKDPEIIQKGFVGCLKDVHFMKNYNPSAIWEPLDWQSSEEQINVYNSWEGCPASLNEGAQFLGAGFLELHPYMFHGGMNFEISFKFRTDQLNGLLLFVYNKDGPDFLAMELKSGILTFRLNTSLAFTQVDLLLGLSYCNGKWNKVIIKKEGSFISASVNGLMKHASESGDQPLVVNSPVYVGGIPQELLNSYQHLCLEQGFGGCMKDVKFTRGAVVNLASVSSGAVRVNLDGCLSTDSAVNCRGNDSILVYQGKEQSVYEGGLQPFTEYLYRVIASHEGGSVYSDWSRGRTTGAAPQSVPTPSRVRSLNGYSIEVTWDEPVVRGVIEKYILKAYSEDSTRPPRMPSASAEFVNTSNLTGILTGLLPFKNYAVTLTACTLAGCTESSHALNISTPQEAPQEVQPPVAKSLPSSLLLSWNPPKKANGIITQYCLYMDGRLIYSGSEENYIVTDLAVFTPHQFLLSACTHVGCTNSSWVLLYTAQLPPEHVDSPVLTVLDSRTIHIQWKQPRKISGILERYVLYMSNHTHDFTIWSVIYNSTELFQDHMLQYVLPGNKYLIKLGACTGGGCTVSEASEALTDEDIPEGVPAPKAHSYSPDSFNVSWTEPEYPNGVITSYGLYLDGILIHNSSELSYRAYGFAPWSLHSFRVQACTAKGCALGPLVENRTLEAPPEGTVNVFVKTQGSRKAHVRWEAPFRPNGLLTHSVLFTGIFYVDPVGNNYTLLNVTKVMYSGEETNLWVLIDGLVPFTNYTVQVNISNSQGSLITDPITIAMPPGAPDGVLPPRLSSATPTSLQVVWSTPARNNAPGSPRYQLQMRSGDSTHGFLELFSNPSASLSYEVSDLQPYTEYMFRLVASNGFGSAHSSWIPFMTAEDKPGPVVPPILLDVKSRMMLVTWQHPRKSNGVITHYNIYLHGRLYLRTPGNVTNCTVMHLHPYTAYKFQVEACTSKGCSLSPESQTVWTLPGAPEGIPSPELFSDTPTSVIISWQPPTHPNGLVENFTIERRVKGKEEVTTLVTLPRSHSMRFIDKTSALSPWTKYEYRVLMSTLHGGTNSSAWVEVTTRPSRPAGVQPPVVTVLEPDAVQVTWKPPLIQNGDILSYEIHMPDPHITLTNVTSAVLSQKVTHLIPFTNYSVTIVACSGGNGYLGGCTESLPTYVTTHPTVPQNVGPLSVIPLSESYVVISWQPPSKPNGPNLRYELLRRKIQQPLASNPPEDLNRWHNIYSGTQWLYEDKGLSRFTTYEYMLFVHNSVGFTPSREVTVTTLAGLPERGANLTASVLNHTAIDVRWAKPTVQDLQGEVEYYTLFWSSATSNDSLKILPDVNSHVIGHLKPNTEYWIFISVFNGVHSINSAGLHATTCDGEPQGMLPPEVVIINSTAVRVIWTSPSNPNGVVTEYSIYVNNKLYKTGMNVPGSFILRDLSPFTIYDIQVEVCTIYACVKSNGTQITTVEDTPSDIPTPTIRGITSRSLQIDWVSPRKPNGIILGYDLLWKTWYPCAKTQKLVQDQSDELCKAVRCQKPESICGHICYSSEAKVCCNGVLYNPKPGHRCCEEKYIPFVLNSTGVCCGGRIQEAQPNHQCCSGYYARILPGEVCCPDEQHNRVSVGIGDSCCGRMPYSTSGNQICCAGRLHDGHGQKCCGRQIVSNDLECCGGEEGVVYNRLPGMFCCGQDYVNMSDTICCSASSGESKAHIKKNDPVPVKCCETELIPKSQKCCNGVGYNPLKYVCSDKISTGMMMKETKECRILCPASMEATEHCGRCDFNFTSHICTVIRGSHNSTGKASIEEMCSSAEETIHTGSVNTYSYTDVNLKPYMTYEYRISAWNSYGRGLSKAVRARTKEDVPQGVSPPTWTKIDNLEDTIVLNWRKPIQSNGPIIYYILLRNGIERFRGTSLSFSDKEGIQPFQEYSYQLKACTVAGCATSSKVVAATTQGVPESILPPSITALSAVALHLSWSVPEKSNGVIKEYQIRQVGKGLIHTDTTDRRQHTVTGLQPYTNYSFTLTACTSAGCTSSEPFLGQTLQAAPEGVWVTPRHIIINSTTVELYWSLPEKPNGLVSQYQLSRNGNLLFLGGSEEQNFTDKNLEPNSRYTYKLEVKTGGGSSASDDYIVQTPMSTPEEIYPPYNITVIGPYSIFVAWIPPGILIPEIPVEYNVLLNDGSVTPLAFSVGHHQSTLLENLTPFTQYEIRIQACQNGSCGVSSRMFVKTPEAAPMDLNSPVLKALGSACIEIKWMPPEKPNGIIINYFIYRRPAGIEEESVLFVWSEGALEFMDEGDTLRPFTLYEYRVRACNSKGSVESLWSLTQTLEAPPQDFPAPWAQATSAHSVLLNWTKPESPNGIISHYRVVYQERPDDPTFNSPTVHAFTVKGTSHQAHLYGLEPFTTYRIGVVAANHAGEILSPWTLIQTLESSPSGLRNFIVEQKENGRALLLQWSEPMRTNGVIKTYNIFSDGFLEYSGLNRQFLFRRLDPFTLYTLTLEACTRAGCAHSAPQPLWTDEAPPDSQLAPTVHSVKSTSVELSWSEPVNPNGKIIRYEVIRRCFEGKAWGNQTIQADEKIVFTEYNTERNTFMYNDTGLQPWTQCEYKIYTWNSAGHTCSSWNVVRTLQAPPEGLSPPVISYVSMNPQKLLISWIPPEQSNGIIQSYRLQRNEMLYPFSFDPVTFNYTDEELLPFSTYSYALQACTSGGCSTSKPTSITTLEAAPSEVSPPDLWAVSATQMNVCWSPPTVQNGKITKYLVRYDNKESLAGQGLCLLVSHLQPYSQYNFSLVACTNGGCTASVSKSAWTMEALPENMDSPTLQVTGSESIEITWKPPRNPNGQIRSYELRRDGTIVYTGLETRYRDFTLTPGVEYSYTVTASNSQGGILSPLVKDRTSPSAPSGMEPPKLQARGPQEILVNWDPPVRTNGDIINYTLFIRELFERETKIIHINTTHNSFGMQSYIVNQLKPFHRYEIRIQACTTLGCASSDWTFIQTPEIAPLMQPPPHLEVQMAPGGFQPTVSLLWTGPLQPNGKVLYYELYRRQIATQPRKSNPVLIYNGSSTSFIDSELLPFTEYEYQVWAVNSAGKAPSSWTWCRTGPAPPEGLRAPTFHVISSTQAVVNISAPGKPNGIVSLYRLFSSSAHGAETVLSEGMATQQTLHGLQAFTNYSIGVEACTCFNCCSKGPTAELRTHPAPPSGLSSPQIGTLASRTASFRWSPPMFPNGVIHSYELQFHVACPPDSALPCTPSQIETKYTGLGQKASLGGLQPYTTYKLRVVAHNEVGSTASEWISFTTQKELPQYRAPFSVDSNLSVVCVNWSDTFLLNGQLKEYVLTDGGRRVYSGLDTTLYIPRTADKTFFFQVICTTDEGSVKTPLIQYDTSTGLGLVLTTPGKKKGSRSKSTEFYSELWFIVLMAMLGLILLAIFLSLILQRKIHKEPYIRERPPLVPLQKRMSPLNVYPPGENHMFDSVADISDVSSNVTLKSYTMHFEGLADTKIPRSGTPVSIRSNRSACVLRIPSQNQTSLTYSQGSLHRSVSQLMDIQDKKVLMDNSLWEAIMGHNSGLYVDEEDLMNAIKDFSSVTKERTTFTDTHL

SEQ ID NO: 13136 - protein, 4156 aa, Artificial Sequence
  Synthetic polypeptide
YNVKNVAPFQQPPPRGQVQSSSAINLSWSPPDSPNAHWLTYSLLRDGFEIYTTEDQYPYSIQYFLDTDLLPYTKYSYYIETTNVHGSTRSVAVTYKTKPGVPEGNLTLSYIIPIGSDSVTLTWTTLSNQSGPIEKYILSCAPLAGGQPCVSYEGHETSATIWNLVPFAKYDFSVQACTSGGCLHSLPITVTTAQAPPQRLSPPKMQKISSTELHVEWSPPAELNGIIIRYELYMRRLRSTKETTSEESRVFQSSGWLSPHSFVESANENALKPPQTMTTITGLEPYTKYEFRVLAVNMAGSVSSAWVSERTGESAPVFMIPPSVFPLSSYSLNISWEKPADNVTRGKVVGYDINMLSEQSPQQSIPMAFSQLLHTAKSQELSYTVEGLKPYRIYEFTITLCNSVGCVTSASGAGQTLAAAPAQLRPPLVKGINSTTIHLRWFPPEELNGPSPIYQLERRESSLPALMTTMMKGIRFIGNGYCKFPSSTHPVNTDFTGIKASFRTKVPEGLIVFAASPGNQEEYFALQLKKGRLYFLFDPQGSPVEVTTTNDHGKQYSDGKWHEIIAIRHQAFGQITLDGIYTGSSAILNGSTVIGDNTGVFLGGLPRSYTILRKDPEIIQKGFVGCLKDVHFMKNYNPSAIWEPLDWQSSEEQINVYNSWEGCPASLNEGAQFLGAGFLELHPYMFHGGMNFEISFKFRTDQLNGLLLFVYNKDGPDFLAMELKSGILTFRLNTSLAFTQVDLLLGLSYCNGKWNKVIIKKEGSFISASVNGLMKHASESGDQPLVVNSPVYVGGIPQELLNSYQHLCLEQGFGGCMKDVKFTRGAVVNLASVSSGAVRVNLDGCLSTDSAVNCRGNDSILVYQGKEQSVYEGGLQPFTEYLYRVIASHEGGSVYSDWSRGRTTGAAPQSVPTPSRVRSLNGYSIEVTWDEPVVRGVIEKYILKAYSEDSTRPPRMPSASAEFVNTSNLTGILTGLLPFKNYAVTLTACTLAGCTESSHALNISTPQEAPQEVQPPVAKSLPSSLLLSWNPPKKANGIITQYCLYMDGRLIYSGSEENYIVTDLAVFTPHQFLLSACTHVGCTNSSWVLLYTAQLPPEHVDSPVLTVLDSRTIHIQWKQPRKISGILERYVLYMSNHTHDFTIWSVIYNSTELFQDHMLQYVLPGNKYLIKLGACTGGGCTVSEASEALTDEDIPEGVPAPKAHSYSPDSFNVSWTEPEYPNGVITSYGLYLDGILIHNSSELSYRAYGFAPWSLHSFRVQACTAKGCALGPLVENRTLEAPPEGTVNVFVKTQGSRKAHVRWEAPFRPNGLLTHSVLFTGIFYVDPVGNNYTLLNVTKVMYSGEETNLWVLIDGLVPFTNYTVQVNISNSQGSLITDPITIAMPPGAPDGVLPPRLSSATPTSLQVVWSTPARNNAPGSPRYQLQMRSGDSTHGFLELFSNPSASLSYEVSDLQPYTEYMFRLVASNGFGSAHSSWIPFMTAEDKPGPVVPPILLDVKSRMMLVTWQHPRKSNGVITHYNIYLHGRLYLRTPGNVTNCTVMHLHPYTAYKFQVEACTSKGCSLSPESQTVWTLPGAPEGIPSPELFSDTPTSVIISWQPPTHPNGLVENFTIERRVKGKEEVTTLVTLPRSHSMRFIDKTSALSPWTKYEYRVLMSTLHGGTNSSAWVEVTTRPSRPAGVQPPVVTVLEPDAVQVTWKPPLIQNGDILSYEIHMPDPHITLTNVTSAVLSQKVTHLIPFTNYSVTIVACSGGNGYLGGCTESLPTYVTTHPTVPQNVGPLSVIPLSESYVVISWQPPSKPNGPNLRYELLRRKIQQPLASNPPEDLNRWHNIYSGTQWLYEDKGLSRFTTYEYMLFVHNSVGFTPSREVTVTTLAGLPERGANLTASVLNHTAIDVRWAKPTVQDLQGEVEYYTLFWSSATSNDSLKILPDVNSHVIGHLKPNTEYWIFISVFNGVHSINSAGLHATTCDGEPQGMLPPEVVIINSTAVRVIWTSPSNPNGVVTEYSIYVNNKLYKTGMNVPGSFILRDLSPFTIYDIQVEVCTIYACVKSNGTQITTVEDTPSDIPTPTIRGITSRSLQIDWVSPRKPNGIILGYDLLWKTWYPCAKTQKLVQDQSDELCKAVRCQKPESICGHICYSSEAKVCCNGVLYNPKPGHRCCEEKYIPFVLNSTGVCCGGRIQEAQPNHQCCSGYYARILPGEVCCPDEQHNRVSVGIGDSCCGRMPYSTSGNQICCAGRLHDGHGQKCCGRQIVSNDLECCGGEEGVVYNRLPGMFCCGQDYVNMSDTICCSASSGESKAHIKKNDPVPVKCCETELIPKSQKCCNGVGYNPLKYVCSDKISTGMMMKETKECRILCPASMEATEHCGRCDFNFTSHICTVIRGSHNSTGKASIEEMCSSAEETIHTGSVNTYSYTDVNLKPYMTYEYRISAWNSYGRGLSKAVRARTKEDVPQGVSPPTWTKIDNLEDTIVLNWRKPIQSNGPIIYYILLRNGIERFRGTSLSFSDKEGIQPFQEYSYQLKACTVAGCATSSKVVAATTQGVPESILPPSITALSAVALHLSWSVPEKSNGVIKEYQIRQVGKGLIHTDTTDRRQHTVTGLQPYTNYSFTLTACTSAGCTSSEPFLGQTLQAAPEGVWVTPRHIIINSTTVELYWSLPEKPNGLVSQYQLSRNGNLLFLGGSEEQNFTDKNLEPNSRYTYKLEVKTGGGSSASDDYIVQTPMSTPEEIYPPYNITVIGPYSIFVAWIPPGILIPEIPVEYNVLLNDGSVTPLAFSVGHHQSTLLENLTPFTQYEIRIQACQNGSCGVSSRMFVKTPEAAPMDLNSPVLKALGSACIEIKWMPPEKPNGIIINYFIYRRPAGIEEESVLFVWSEGALEFMDEGDTLRPFTLYEYRVRACNSKGSVESLWSLTQTLEAPPQDFPAPWAQATSAHSVLLNWTKPESPNGIISHYRVVYQERPDDPTFNSPTVHAFTVKGTSHQAHLYGLEPFTTYRIGVVAANHAGEILSPWTLIQTLESSPSGLRNFIVEQKENGRALLLQWSEPMRTNGVIKTYNIFSDGFLEYSGLNRQFLFRRLDPFTLYTLTLEACTRAGCAHSAPQPLWTDEAPPDSQLAPTVHSVKSTSVELSWSEPVNPNGKIIRYEVIRRCFEGKAWGNQTIQADEKIVFTEYNTERNTFMYNDTGLQPWTQCEYKIYTWNSAGHTCSSWNVVRTLQAPPEGLSPPVISYVSMNPQKLLISWIPPEQSNGIIQSYRLQRNEMLYPFSFDPVTFNYTDEELLPFSTYSYALQACTSGGCSTSKPTSITTLEAAPSEVSPPDLWAVSATQMNVCWSPPTVQNGKITKYLVRYDNKESLAGQGLCLLVSHLQPYSQYNFSLVACTNGGCTASVSKSAWTMEALPENMDSPTLQVTGSESIEITWKPPRNPNGQIRSYELRRDGTIVYTGLETRYRDFTLTPGVEYSYTVTASNSQGGILSPLVKDRTSPSAPSGMEPPKLQARGPQEILVNWDPPVRTNGDIINYTLFIRELFERETKIIHINTTHNSFGMQSYIVNQLKPFHRYEIRIQACTTLGCASSDWTFIQTPEIAPLMQPPPHLEVQMAPGGFQPTVSLLWTGPLQPNGKVLYYELYRRQIATQPRKSNPVLIYNGSSTSFIDSELLPFTEYEYQVWAVNSAGKAPSSWTWCRTGPAPPEGLRAPTFHVISSTQAVVNISAPGKPNGIVSLYRLFSSSAHGAETVLSEGMATQQTLHGLQAFTNYSIGVEACTCFNCCSKGPTAELRTHPAPPSGLSSPQIGTLASRTASFRWSPPMFPNGVIHSYELQFHVACPPDSALPCTPSQIETKYTGLGQKASLGGLQPYTTYKLRVVAHNEVGSTASEWISFTTQKELPQYRAPFSVDSNLSVVCVNWSDTFLLNGQLKEYVLTDGGRRVYSGLDTTLYIPRTADKTFFFQVICTTDEGSVKTPLIQYDTSTGLGLVLTTPGKKKGSRSKSTEFYSELWFIVLMAMLGLILLAIFLSLILQRKIHKEPYIRERPPLVPLQKRMSPLNVYPPGENHMGLADTKIPRSGTPVSIRSNRSACVLRIPSQNQTSLTYSQGSLHRSVSQLMDIQDKKVLMDNSLWEAIMGHNSGLYVDEEDLMNAIKDFSSVTKERTTFTDTHL

SEQ ID NO: 13137 - protein, 500 aa, Artificial Sequence
  Synthetic polypeptide
YNVKNVAPFQQPPPRGQVQSSSAINLSWSPPDSPNAHWLTYSLLRDGFEIYTTEDQYPYSIQYFLDTDLLPYTKYSYYIETTNVHGSTRSVAVTYKTKPGVPEGNLTLSYIIPIGSDSVTLTWTTLSNQSGPIEKYILSCAPLAGGQPCVSYEGHETSATIWNLVPFAKYDFSVQACTSGGCLHSLPITVTTAQAPPQRLSPPKMQKISSTELHVEWSPPAELNGIIIRYELYMRRLRSTKETTSEESRVFQSSGWLSPHSFVESANENALKPPQTMTTITGLEPYTKYEFRVLAVNMAGSVSSAWVSERTGESAPVFMIPPSVFPLSSYSLNISWEKPADNVTRGKVVGYDINMLSEQSPQQSIPMAFSQLLHTAKSQELSYTVEGLKPYRIYEFTITLCNSVGCVTSASGAGQTLAAAPAQLRPPLVKGINSTTIHLRWFPPEELNGPSPIYQLERRESSLPALMTTMMKGIRFIGNGYCKFPSSTHPVNTDFTGKCV

SEQ ID NO: 13138 - protein, 34 aa, Artificial Sequence
  Synthetic polypeptide
AQWLTSVIPALWEAEAGRSPEVTAGCWQPLPPSP

SEQ ID NO: 13139 - protein, 107 aa, Artificial Sequence
  Synthetic polypeptide
GDCWLLAAIASLTLNEEILARVVPLNQSFQENYAGIFHFQFWQYGEWVEVVVDDRLPTKDGELLFVHSAEGSEFWSALLEKAYAKINGCYEALSGGATTEGFEDFTG

SEQ ID NO: 13140 - protein, 598 aa, Artificial Sequence
  Synthetic polypeptide
GDCWLLAAIASLTLNEEILARVVPLNQSFQENYAGIFHFQFWQYGEWVEVVVDDRLPTKDGELLFVHSAEGSEFWSALLEKAYAKINGCYEALSGGATTEGFEDFTGGIAEWYELKKPPPNLFKIIQKALQKGSLLGCSIDITSAADSEAITFQKLVKGHAYSVTGAEEVESNGSLQKLIRIRNPWGEVEWTGRWNDNCPSWNTIDPEERERLTRRHEDGEFWMSFSDFLRHYSRLEICNLTPDTLTSDTYKKWKLTKMDGNWRRGSTAGGCRNYPNTFWMNPQYLIKLEEEDEDEEDGESGCTFLVGLIQKHRRRQRKMGEDMHTIGFGIYEVPEELSGQTNIHLSKNFFLTNRARERSDTFINLREVLNRFKLPPGEYILVPSTFEPNKDGDFCIRVFSEKKADYQAVDDEIEANLEEFDISEDDIDDGFRRLFAQLAGEDAEISAFELQTILRRVLAKRQDIKSDGFSIETCKIMVDMLDSDGSGKLGLKEFYILWTKIQKYQKIYREIDVDRSGTMNSYEMRKALEEAGFKMPCQLHQVIVARFADDQLIIDFDNFVRCLVRLETLFKIFKQLDPENTGTIELDLISWLCFSVL

SEQ ID NO: 13141 - protein, 14 aa, Artificial Sequence
  Synthetic polypeptide
SQHFGRPRQADHLR

SEQ ID NO: 13142 - protein, 28 aa, Artificial Sequence
  Synthetic polypeptide
GISTLAADSITWGALPKCWCPWLCFSVL

SEQ ID NO: 13143 - protein, 29 aa, Artificial Sequence
  Synthetic polypeptide
QGFQPWLQIPSHGELCQSAGVLGSVSQYF

SEQ ID NO: 13144 - protein, 29 aa, Artificial Sequence
  Synthetic polypeptide
RDFNLGCRFHHMGSFAKVLVSLALFLSTL

SEQ ID NO: 13145 - protein, 25 aa, Artificial Sequence
  Synthetic polypeptide
HMSLSCFSETWTPTRWKMENAITGR

SEQ ID NO: 13146 - protein, 178 aa, Artificial Sequence
  Synthetic polypeptide
PRKLEPEHVWFPVETKDNILTYVPELFFRNLDPYQMENGKCHHWQIIAFDELRTDFKSPIDQCNPVHARERLRNIERICFLLRKLVLPEYSIHSLFCIMFLCAQEWLTLGLNVPLLFYHFWRYFHCPADSSELAYDPPVVMNADTLSYCQKEAWCKLAFYLLSFFYYLYCMIYTLVSS

SEQ ID NO: 13147 - protein, 24 aa, Artificial Sequence
  Synthetic polypeptide
VVFQKPGPLPDGKWKMPSLADNCL

SEQ ID NO: 13148 - protein, 16 aa, Artificial Sequence
  Synthetic polypeptide
DCMAQWRKHKKERWGR

SEQ ID NO: 13149 - protein, 20 aa, Artificial Sequence
  Synthetic polypeptide
ETAWPNGGSTRKRDGEDNCL

SEQ ID NO: 13150 - protein, 149 aa, Artificial Sequence
  Synthetic polypeptide
RLHGPMEEAQEREMGKIIAFDELRTDFKSPIDQCNPVHARERLRNIERICFLLRKLVLPEYSIHSLFCIMFLCAQEWLTLGLNVPLLFYHFWRYFHCPADSSELAYDPPVVMNADTLSYCQKEAWCKLAFYLLSFFYYLYCMIYTLVSS

SEQ ID NO: 13151 - protein, 164 aa, Artificial Sequence; identical to SEQ ID NO: 3053
  Synthetic polypeptide

SEQ ID NO: 13152 - protein, 20 aa, Artificial Sequence
  Synthetic polypeptide
PVKDSETWVQCGLSLIHHAR

SEQ ID NO: 13153 - protein, 35 aa, Artificial Sequence; identical to SEQ ID NO: 6119
  Synthetic polypeptide

SEQ ID NO: 13154 - protein, 31 aa, Artificial Sequence
  Synthetic polypeptide
SLCYTWSFTLSLPSWMALHSPPTGAARILHP

SEQ ID NO: 13155 - protein, 101 aa, Artificial Sequence
  Synthetic polypeptide
SSFKSPLERPSPPRGPPSFPHSEQWFLLSFPPASSAPVLPRFVLWLPCLLFIEPVLHLVIYIESPQLDGFAFTTYWCCQNTPSIASSALCSCVRKSGSRWG

SEQ ID NO: 13156 - protein, 106 aa, Artificial Sequence
  Synthetic polypeptide
VSPAGWLCIHHLLVLPEYSIHSLFCIMFLCAQEWLTLGLNVPLLFYHFWRYFHCPADSSELAYDPPVVMNADTLSYCQKEAWCKLAFYLLSFFYYLYCMIYTLVSS

SEQ ID NO: 13157 - protein, 36 aa, Artificial Sequence
  Synthetic polypeptide
AQDFKTTLGRTSLSRASAGGYSGWASTSPSSWGYFS

SEQ ID NO: 13158 - protein, 71 aa, Artificial Sequence
  Synthetic polypeptide
PGVVLTPVIPALREAEAGGLPELRISRPPWEEPLYPGPPLVATVAGHQLHPLPGAIFPDHTLHHPVHHGQV

SEQ ID NO: 13159 - protein, 421 aa, Artificial Sequence
  Synthetic polypeptide
SQHFERLRQADCLSSGFQDHPGKNLSIQGLRWWLQWLGINFTLFLGLFFLTTPSIILSTMDKFNVTKPIHALNNPIISQFFPTLLLWSFSALLPSIVYYSTLLESHWTKSGENQIMMTKVYIFLIFMVLILPSLGLTSLDFFFRWLFDKTSSEASIRLECVFLPDQGAFFVNYVIASAFIGNGMELLRLPGLILYTFRMIMAKTAADRRNVKQNQAFQYEFGAMYAWMLCVFTVIVAYSITCPIIAPFGLIYILLKHMVDRHNLYFVYLPAKLEKGIHFAAVNQALAAPILCLFWLYFFSFLRLGMKAPATLFTFLVLLLTILVCLAHTCFGCFKHLSPLNYKTEEPASDKGSEAEAHMPPPFTPYVPRILNGLASERTALSPQQQQQQTYGAIHNISGTIPGQCLAQSATGSVAAAPQEA

SEQ ID NO: 13160 - protein, 67 aa, Artificial Sequence
  Synthetic polypeptide
GQEFETSLTNMFLILVFSIIRRRFWDYGRIALVSEADSESRFQRLSSTSSSGQQDFENELGCCPWLT

SEQ ID NO: 13161 - protein, 756 aa, Artificial Sequence
  Synthetic polypeptide
GQEFETSLTNMFLILVFSIIRRRFWDYGRIALVSEADSESRFQRLSSTSSSGQQDFENELGCCPWLTAIFRLHDDQILEWCGEDAIHYLSFQRHIIFLLVVVSFLSLCVILPVNLSGDLLDKDPYSFGRTTIANLQTDNDLLWLHTIFAVIYLFLTVGFMRHHTQSIKYKEENLVRRTLFITGLPRDARKETVESHFRDAYPTCEVVDVQLCYNVAKLIYLCKEKKKTEKSLTYYTNLQVKTGQRTLINPKPCGQFCCCEVLGCEWEDAISYYTRMKDRLLERITEEERHVQDQPLGMAFVTFQEKSMATYILKDFNACKCQSLQCKGEPQPSSHSRELYTSKWTVTFAADPEDICWKNLSIQGLRWWLQWLGINFTLFLGLFFLTTPSIILSTMDKFNVTKPIHALNNPIISQFFPTLLLWSFSALLPSIVYYSTLLESHWTKSGENQIMMTKVYIFLIFMVLILPSLGLTSLDFFFRWLFDKTSSEASIRLECVFLPDQGAFFVNYVIASAFIGNGMELLRLPGLILYTFRMIMAKTAADRRNVKQNQAFQYEFGAMYAWMLCVFTVIVAYSITCPIIAPFGLIYILLKHMVDRHNLYFVYLPAKLEKGIHFAAVNQALAAPILCLFWLYFFSFLRLGMKAPATLFTFLVLLLTILVCLAHTCFGCFKHLSPLNYKTEEPASDKGSEAEAHMPPPFTPYVPRILNGLASERTALSPQQQQQQTYGAIHNISGTIPGQCLAQSATGSVAAAPQEA

SEQ ID NO: 13162 - protein, 4 aa, Artificial Sequence
  Synthetic polypeptide
PICS

SEQ ID NO: 13163 - protein, 69 aa, Artificial Sequence
  Synthetic polypeptide
SQHFGRLRQVDHLRSGVRDQPDQYVLNLGVFYYKKKILGLWPHCPGVRSRQRVQISEIVIDFLLRSTRL

SEQ ID NO: 13164 - protein, 8531 aa, Artificial Sequence
  Synthetic polypeptide
GAGEGGARPHGLGGHGGGQGADGLGLRGNLLRKLPRKTAVRVGDTAMFCVELAVPVGPVHWLRNQEEVVAGGRVAISAEGTRHTLTISQCCLEDVGQVAFMAGDCQTSTQFCVSAPRKPPLQPPVDPVVKARMESSVILSWSPPPHGERPVTIDGYLVEKKKLGTYTWIRCHEAEWVATPELTVADVAEEGNFQFRVSALNSFGQSPYLEFPGTVHLAPKLAVRTPLKAVQAVEGGEVTFSVDLTVASAGEWFLDGQALKASSVYEIHCDRTRHTLTIREVPASLHGAQLKFVANGIESSIRMEVRAAPGLTANKPPAAAAREVLARLHEEAQLLAELSDQAAAVTWLKDGRTLSPGPKYEVQASAGRRVLLVRDVARDDAGLYECVSRGGRIAYQLSVQGLARFLHKDMAGSCVDAVAGGPAQFECETSEAHVHVHWYKDGMELGHSGERFLQEDVGTRHRLVAATVTRQDEGTYSCRVGEDSVDFRLRVSEPKAVFAKEQPACREVQAEVGASATLSCEVAQDQMEVTWYKDGKKLSSSSKVHVEAVGCMRRLVVQQVGQADSGEYSCEARGQRVSFRLDVAEPKVVFAKEQLARRKLQAEAGASATLSCEVAQAQTEVTWYKDGKKLSSSSKVCMEATGCTRRLVVQQAGQADAGEYSCEAGGQRLSFHLDVKEPKVVFAKDQVAHSEVQAEAGASATLSCEVAQAQTEVMWYKDGKKLSSSLKVHVEAKGCRRRLVVQQAGKTDAGDYSCEARGQRVSFRLHITEPKMMFAKEQSVHNEVQAEAGASAMLSCEVAQAQTEVTWYKDGKKLSSSSKVGMEVKGCTRRLVLPQAGKADAGEYSCEAGGQRVSFHLHITEPKGVFAKEQSVHNEVQAEAGTTAMLSCEVAQPQTEVTWYKDGKKLSSSSKVRMEVKGCTRRLVVQQVGKADAGEYSCEAGGQRVSFQLHITEPKAVFAKEQLVHNEVRTEAGASATLSCEVAQAQTEVTWYKDGKKLSSSSKVRIEAAGCMRQLVVQQAGQADAGEYTCEAGGQRLSFHLDVSEPKAVFAKEQLAHRKVQAEAGAIATLSCEVAQAQTEVTWYKDGKKLSSSSKVRMEAVGCTRRLVVQQACQADTGEYSCEAGGQRLSFSLDVAEPKVVFAKEQPVHREVQAQAGASTTLSCEVAQAQTEVMWYKDGKKLSFSSKVRMEAVGCTRRLVVQQAGQAVAGEYSCEAGSQRLSFHLHVAEPKAVFAKEQPAHREVQAEAGASATLSCEVAQAQTEVTWYKDGKKLSSSLKVHVEAAGCTRRLVVQQAGQADTGEYSCEAGGQQLSFRLQVAEPKAVFAKEQPASREVQAEAGTSATLSCEVAQAQTEVTWYKDGKKLSSSSKVRMEAVGCTRRLVVQEAGQADAGEYSCKAGDQRLSFHLHVAEPKVVFAKEQPAHREVQAEAGASATLSCEVAQAQTEVTWYKDGKKLSSSSKVRVEAVGCTRRLVVQQAGQAEAGEYSCEAGGQQLSFRLQVAEPKAVFAKEQVVFAKDQPVHREVQAEAGTSTMLSCEVAQAQTEVMWYKDGKKLSSSSKMRVEAVGCTRRLVVQEAGQADAGEYSCEAGGQRLSFHLHVAEPKVVFAKEQPACREVQAEAGASATLSCEVAQGQMEVTWYKDGKKLSSSSKVHMEASGYTRRLVVQQAGQADAGEYSCEAGGQRLSFRLHVAELEPQISERPCRREPLVVKEHEDIILTATLATPSAATVTWLKDGVEIRRSKRHETASQGDTHTLTVHGAQVLDSAIYSCRVGAEGQDFPVQVEEVAAKFCRLLEPVCGELGGTVTLACELSPACAEVVWRCGNTQLRVGKRFQMVAEGPVRSLTVLGLRAEDAGEYVCESRDDHTSAQLTVSVPRVVKFMSGLSTVVAEEGGEATFQCVVSPSDVAVVWFRDGALLQPSEKFAISQSGASHSLTISDLVLEDAGQITVEAEGASSSAALRVREAPVLFKKKLEPQTVEERSSVTLEVELTRPWPELRWTRNATALAPGKNVEIHAEGARHRLVLHNVGFADRGFFGCETPDDKTQAKLTVEMRQVRLVRGLQAVEAREQGTATMEVQLSHADVDGSWTRDGLRFQQGPTCHLAVRGPMHTLTLSGLRPEDSGLMVFKAEGVHTSARLVVTELPVSFSRPLQDVVTTEKEKVTLECELSRPNVDVRWLKDGVELRAGKTMAIAAQGACRSLTIYRCEFADQGVYVCDAHDAQSSASVKVQGRNIQIVRPLEDVEVMEKDGATFSCEVSHDEVPGQWFWEGSKLRPTDNVRIRQEGRTYTLIYRRVLAEDAGEIQFVAENAESRAQLRVKELPVTLVRPLRDKIAMEKHRGVLECQVSRASAQVRWFKGSQELQPGPKYELVSDGLYRKLIISDVHAEDEDTYTCDAGDVKTSAQFFVEEQSITIVRGLQDVTVMEPAPAWFECETSIPSVRPPKWLLGKTVLQAGGNVGLEQEGTVHRLMLRRTCSTMTGPVHFTVGKSRSSARLVVSDIPVVLTRPLEPKTGRELQSVVLSCDFRPAPKAVQWYKDDTPLSPSEKFKMSLEGQMAELRILRLMPADAGVYRCQAGSAHSSTEVTVEAREVTVTGPLQDAEATEEGWASFSCELSHEDEEVEWSLNGMPLYNDSFHEISHKGRRHTLVLKSIQRADAGIVRASSLKVSTSARLEVRVKPVVFLKALDDLSAEERGTLALQCEVSDPEAHVVWRKDGVQLGPSDKYDFLHTAGTRGLVVHDVSPEDAGLYTCHVGSEETRARVRVHDLHVGITKRLKTMEVLEGESCSFECVLSHESASDPAMWTVGGKTVGSSSRFQATRQGRKYILVVREAAPSDAGEVVFSVRGLTSKASLIVRERPAAIIKPLEDQWVAPGEDVELRCELSRAGTPVHWLKDRKAIRKSQKYDVVCEGTMAMLVIRGASLKDAGEYTCEVEASKSTASLHVEEKANCFTEELTNLQVEEKGTAVFTCKTEHPAATVTWRKGLLELRASGKHQPSQEGLTLRLTISALEKADSDTYTCDIGQAQSRAQLLVQGRRVHIIEDLEDVDVQEGSSATFRCRISPANYEPVHWFLDKTPLHANELNEIDAQPGGYHVLTLRQLALKDSGTIYFEAGDQRASAALRVTEKPSVFSRELTDATITEGEDLTLVCETSTCDIPVCWTKDGKTLRGSARCQLSHEGHRAQLLITGATLQDSGRYKCEAGGACSSSIVRVHARPVRFQEALKDLEVLEGGAATLRCVLSSVAAPVKWCYGNNVLRPGDKYSLRQEGAMLELVVRNLRPQDSGRYSCSFGDQTTSATLTVTALPAQFIGKLRNKEATEGATATLRCELSKAAPVEWRKGSETLRDGDRYCLRQDGAMCELQIRGLAMVDAAEYSCVCGEERTSASLTIRPMPAHFIGRLRHQESIEGATATLRCELSKAAPVEWRKGRESLRDGDRHSLRQDGAVCELQICGLAVADAGEYSCVCGEERTSATLTVKALPAKFTEGLRNEEAVEGATAMLWCELSKVAPVEWRKGPENLRDGDRYILRQEGTRCELQICGLAMADAGEYLCVCGQERTSATLTIRALPARFIEDVKNQEAREGATAVLQCELNSAAPVEWRKGSETLRDGDRYSLRQDGTKCELQIRGLAMADTGEYSCVCGQERTSAMLTVRALPIKFTEGLRNEEATEGATAVLRCELSKMAPVEWWKGHETLRDGDRHSLRQDGARCELQIRGLVAEDAGEYLCMCGKERTSAMLTVRAMPSKFIEGLRNEEATEGDTATLWCELSKAAPVEWRKGHETLRDGDRHSLRQDGSRCELQIRGLAVVDAGEYSCVCGQERTSATLTVRALPARFIEDVKNQEAREGATAVLQCELSKAAPVEWRKGSETLRGGDRYSLRQDGTRCELQIHGLSVADTGEYSCVCGQERTSATLTVRALPARFTQDLKTKEASEGATATLQCELSKVAPVEWKKGPETLRDGGRYSLKQDGTRCELQIHDLSVADAGEYSCMCGQERTSATLTVRALPARFTEGLRNEEAMEGATATLQCELSKAAPVEWRKGLEALRDGDKYSLRQDGAVCELQIHGLAMADNGVYSCVCGQERTSATLTVRALPARFIEDMRNQKATEGATVTLQCKLRKAAPVEWRKGPNTLKDGDRYSLKQDGTSCELQIRGLVIADAGEYSCICEQERTSATLTVRALPARFIEDVRNHEATEGATAVLQCELSKAAPVEWRKGSETLRDGDRYSLRQDGTRCELQIRGLAVEDTGEYLCVCGQERTSATLTVRALPARFIDNMTNQEAREGATATLHCELSKVAPVEWRKGPETLRDGDRHSLRQDGTRCELQIRGLSVADAGEYSCVCGQERTSATLTIRALPAKFTKGLRNEEATEGATAMLQCELSKVAPVEWRKGPETLRDGDRYNLRQDGTRCELQIHGLSVADTGEYSCVCGQEKTSATLTVKAPQPVFREPLQSLQAEEGSTATLQCELSEPTATVVWSKGGLQLQANGRREPRLQGCTAELVLQDLQREDTGEYTCTCGSQATSATLTVTAAPVRFLRELQHQEVDEGGTAHLCCELSRAGASVEWRKGSLQLFPCAKYQMVQDGAAAELLVRGVEQEDAGDYTCDTGHTQSMASLSVRVPRPKFKTRLQSLEQETGDIARLCCQLSDAESGAVVQWLKEGVELHAGPKYEMRSQGATRELLIHQLEAKDTGEYACVTGGQKTAASLRVTEPEVTIVRGLVDAEVTADEDVEFSCEVSRAGATGVQWCLQGLPLQSNEVTEVAVRDGRIHTLRLKGVTPEDAGTVSFHLGNHASSAQLTVRAPEVTILEPLQDVQLSEGQDASFQCRLSRASGQEARWALGGVPLQANEMNDITVEQGTLHLLTLHKVTLEDAGTVSFHVGTCSSEAQLKVTAKNTVVRGLENVEALEGGEALFECQLSQPEVAAHTWLLDDEPVHTSENAEVVFFENGLRHLLLLKNLRPQDSCRVTFLAGDMVTSAFLTVRGWRLEILEPLKNAAVRAGAQACFTCTLSEAVPVGEASWYINGAAVQPDDSDWTVTADGSHHALLLRSAQPHHAGEVTFACRDAVASARLTVLGLPDPPEDAEVVARSSHTVTLSWAAPMSDGGGGLCGYRVEVKEGATGQWRLCHELVPGPECVVDGLAPGETYRFRVAAVGPVGAGEPVHLPQTVRLAEPPKPVPPQPSAPESRQVAAGEDVSLELEVVAEAGEVIWHKGMERIQPGGRFEVVSQGRQQMLVIKGFTAEDQGEYHCGLAQGSICPAAATFQVALSPASVDEAPQPSLPPEAAQEGDLHLLWEALARKRRMSREPTLDSISELPEEDGRSQRLPQEAEEVAPDLSEGYSTADELARTGDADLSHTSSDDESRAGTPSLVTYLKKAGRPGTSPLASKVGAPAAPSVKPQQQQEPLAAVRPPLGDLSTKDLGDPSMDKAAVKIQAAFKGYKVRKEMKQQEGPMFSHTFGDTEAQVGDALRLECVVASKADVRARWLKDGVELTDGRHHHIDQLGDGTCSLLITGLDRADAGCYTCQVSNKFGQVTHSACVVVSGSESEAESSSGGELDDAFRRAARRLHRLFRTKSPAEVSDEELFLSADEGPAEPEEPADWQTYREDEHFICIRFEALTEARQAVTRFQEMFATLGIGVEIKLVEQGPRRVEMCISKETPAPVVPPEPLPSLLTSDAAPVFLTELQNQEVQDGYPVSFDCVVTGQPMPSVRWFKDGKLLEEDDHYMINEDQQGGHQLIITAVVPADMGVYRCLAENSMGVSSTKAELRVDLTSTDYDTAADATESSSYFSAQGYLSSREQEGTESTTDEGQLPQVVEELRDLQVAPGTRLAKFQLKVKGYPAPRLYWFKDGQPLTASAHIRMTDKKILHTLEIISVTREDSGQYAAYISNAMGAAYSSARLLVRGPDEPEEKPASDVHEQLVPPRMLERFTPKKVKKGSSITFSVKVEGRPVPTVHWLREEAERGVLWIGPDTPGYTVASSAQQHSLVLLDVGRQHQGTYTCIASNAAGQALCSASLHVSGLPKVEEQEKVKEALISTFLQGTTQAISAQGLETASFADLGGQRKEEPLAAKEALGHLSLAEVGTEEFLQKLTSQITEMVSAKITQAKLQVPGGDSDEDSKTPSASPRHGRSRPSSSIQESSSESEDGDARGEIFDIYVVTADYLPLGAEQDAITLREGQYVEVLDAAHPLRWLVRTKPTKSSPSRQGWVSPAYLDRRLKLSPEWGAAEAPEFPGEAVSEDEYKARLSSVIQELLSSEQAFVEELQFLQSHHLQHLERCPHVPIAVAGQKAVIFRNVRDIGRFHSSFLQELQQCDTDDDVAMCFIKNQAAFEQYLEFLVGRVQAESVVVSTAIQEFYKKYAEEALLAGDPSQPPPPPLQHYLEQPVERVQRYQALLKELIRNKARNRQNCALLEQAYAVVSALPQRAENKLHVSLMENYPGTLQALGEPIRQGHFIVWEGAPGARMPWKGHNRHVFLFRNHLVICKPRRDSRTDTVSYVFRNMMKLSSIDLNDQVEGDDRAFEVWQEREDSVRKYLLQARTAIIKSSWVKEICGIQQRLALPVWRPPDFEEELADCTAELGETVKLACRVTGTPKPVISWYKDGKAVQVDPHHILIEDPDGSCALILDSLTGVDSGQYMCFAASAAGNCSTLGKILVQVPPRFVNKVRASPFVEGEDAQFTCTIEGAPYPQIRWYKDGALLTTGNKFQTLSEPRSGLLVLVIRAASKEDLGLYECELVNRLGSARASAELRIQSPMLQAQEQCHREQLVAAVEDTTLERADQEVTSVLKRLLGPKAPGPSTGDLTGPGPCPRGAPALQETGSQPPVTGTSEAPAVPPRVPQPLLHEGPEQEPEAIARAQEWTVPIRMEGAAWPGAGTGELLWDVHSHVVRETTQRTYTYQAIDTHTARPPSMQVTIEDVQAQTGGTAQFEAIIEGDPQPSVTWYKDSVQLVDSTRLSQQQEGTTYSLVLRHVASKDAGVYTCLAQNTGGQVLCKAELLVLGGDNEPDSEKQSHRRKLHSFYEVKEEIGRGVFGFVKRVQHKGNKILCAAKFIPLRSRTRAQAYRERDILAALSHPLVTGLLDQFETRKTLILILELCSSEELLDRLYRKGVVTEAEVKVYIQQLVEGLHYLHSHGVLHLDIKPSNILMVHPAREDIKICDFGFAQNITPAELQFSQYGSPEFVSPEIIQQNPVSEASDIWAMGVISYLSLTCSSPFAGESDRATLLNVLEGRVSWSSPMAAHLSEDAKDFIKATLQRAPQARPSAAQCLSHPWFLKSMPAEEAHFINTKQLKFLLARSRWQRSLMSYKSILVMRSIPELLRGPPDSPSLGVARHLCRDTGGSSSSSSSSDNELAPFARAKSLPPSPVTHSPLLHPRGFLRPSASLPEEAEASERSTEAPAPPASPEGAGPPAAQGCVPRHSVIRSLFYHQAGESPEHGALAPGSRRHPARRRHLLKGGYIAGALPGLREPLMEHRVLEEEAAREEQATLLAKAPSFETALRLPASGTHLAPGHSHSLEHDSPSTPRPSSEACGEAQRLPSAPSGGAPIRDMGHPQGSKQLPSTGGHPGTAQPERPSPDSPWGQPAPFCHPKQGSAPQEGCSPHPAVAPCPPGSFPPGSCKEAPLVPSSPFLGQPQAPPAPAKASPPLDSKMGPGDISLPGRPKPGPCSSPGSASQASSSQVSSLRVGSSQVGTEPGPSLDAEGWTQEAEDLSDSTPTLQRPQEQATMRKFSLGGRGGYAGVAGYGTFAFGGDAGGMLGQGPMWARIAWAVSQSEEEEQEEARAESQSEEQQEARAESPLPQVSARPVPEVGRAPTRSSPEPTPWEDIGQVSLVQIRDLSGDAEAADTISLDISEVDPAYLNLSDLYDIKYLPFEFMIFRKVPKSAQPEPPSPMAEEELAEFPEPTWPWPGELGPHAGLEITEESEDVDALLAEAAVGRKRKWSSPSRSLFHFPGRHLPLDEPAELGLRERVKASVEHISRILKGRPEGLEKEGPPRKKPGLASFRLSGLKSWDRAPTFLRELSDETVVLGQSVTLACQVSAQPAAQATWSKDGAPLESSSRVLISATLKNFQLLTILVVVAEDLGVYTCSVSNALGTVTTTGVLRKAERPSSSPCPDIGEVYADGVLLVWKPVESYGPVTYIVQCSLEGGSWTTLASDIFDCCYLTSKLSRGGTYTFRTACVSKAGMGPYSSPSEQVLLGGPSHLASEEESQGRSAQPLPSTKTFAFQTQIQRGRFSVVRQCWEKASGRALAAKIIPYHPKDKTAVLREYEALKGLRHPHLAQLHAAYLSPRHLVLILELCSGPELLPCLAERASYSESEVKDYLWQMLSATQYLHNQHILHLDLRSENMIITEYNLLKVVDLGNAQSLSQEKVLPSDKFKDYLETMELLEGQGAVPQTDIWAIGVTAFIMLSAEYPVSSEGARDLQRGLRKGLVRLSRCYAGLSGGAVAFLRSTLCAQPWGRPCASSCLQCPWLTEEGPACSRPAPVTFPTARLRVFVRNREKRRALLYKRHNLAQVR

SEQ ID NO: 13165 - protein, 7576 aa, Artificial Sequence
  Synthetic polypeptide
GAGEGGARPHGLGGHGGGQGADGLGLRGNLLRKLPRKTAVRVGDTAMFCVELAVPVGPVHWLRNQEEVVAGGRVAISAEGTRHTLTISQCCLEDVGQVAFMAGDCQTSTQFCVSAPRKPPLQPPVDPVVKARMESSVILSWSPPPHGERPVTIDGYLVEKKKLGTYTWIRCHEAEWVATPELTVADVAEEGNFQFRVSALNSFGQSPYLEFPGTVHLAPKLAVRTPLKAVQAVEGGEVTFSVDLTVASAGEWFLDGQALKASSVYEIHCDRTRHTLTIREVPASLHGAQLKFVANGIESSIRMEVRAAPGLTANKPPAAAAREVLARLHEEAQLLAELSDQAAAVTWLKDGRTLSPGPKYEVQASAGRRVLLVRDVARDDAGLYECVSRGGRIAYQLSVQGLARFLHKDMAGSCVDAVAGGPAQFECETSEAHVHVHWYKDGMELGHSGERFLQEDVGTRHRLVAATVTRQDEGTYSCRVGEDSVDFRLRVSEPKVVFAKEQLARRKLQAEAGASATLSCEVAQAQTEVTWYKDGKKLSSSSKVCMEATGCTRRLVVQQAGQADAGEYSCEAGGQRLSFHLDVKEPKVVFAKDQVAHSEVQAEAGASATLSCEVAQAQTEVMWYKDGKKLSSSLKVHVEAKGCRRRLVVQQAGKTDAGDYSCEARGQRVSFRLHITEPKMMFAKEQSVHNEVQAEAGASAMLSCEVAQAQTEVTWYKDGKKLSSSSKVGMEVKGCTRRLVLPQAGKADAGEYSCEAGGQRVSFHLHITEPKGVFAKEQSVHNEVQAEAGTTAMLSCEVAQPQTEVTWYKDGKKLSSSSKVRMEVKGCTRRLVVQQVGKADAGEYSCEAGGQRVSFQLHITEPKAVFAKEQLVHNEVRTEAGASATLSCEVAQAQTEVTWYKDGKKLSSSSKVRIEAAGCMRQLVVQQAGQADAGEYTCEAGGQRLSFHLDVSEPKAVFAKEQLAHRKVQAEAGAIATLSCEVAQAQTEVTWYKDGKKLSSSSKVRMEAVGCTRRLVVQQACQADTGEYSCEAGGQRLSFSLDVAEPKVVFAKEQPVHREVQAQAGASTTLSCEVAQAQTEVMWYKDGKKLSFSSKVRMEAVGCTRRLVVQQAGQAVAGEYSCEAGSQRLSFHLHVAEPKAVFAKEQPASREVQAEAGTSATLSCEVAQAQTEVTWYKDGKKLSSSSKVRMEAVGCTRRLVVQEAGQADAGEYSCKAGDQRLSFHLHVAEPKVVFAKEQPAHREVQAEAGASATLSCEVAQAQTEVTWYKDGKKLSSSSKVRVEAVGCTRRLVVQQAGQAEAGEYSCEAGGQQLSFRLQVAELEPQISERPCRREPLVVKEHEDIILTATLATPSAATVTWLKDGVEIRRSKRHETASQGDTHTLTVHGAQVLDSAIYSCRVGAEGQDFPVQVEEVAAKFCRLLEPVCGELGGTVTLACELSPACAEVVWRCGNTQLRVGKRFQMVAEGPVRSLTVLGLRAEDAGEYVCESRDDHTSAQLTVSVPRVVKFMSGLSTVVAEEGGEATFQCVVSPSDVAVVWFRDGALLQPSEKFAISQSGASHSLTISDLVLEDAGQITVEAEGASSSAALRVREAPVLFKKKLEPQTVEERSSVTLEVELTRPWPELRWTRNATALAPGKNVEIHAEGARHRLVLHNVGFADRGFFGCETPDDKTQAKLTVEMRQVRLVRGLQAVEAREQGTATMEVQLSHADVDGSWTRDGLRFQQGPTCHLAVRGPMHTLTLSGLRPEDSGLMVFKAEGVHTSARLVVTELPVSFSRPLQDVVTTEKEKVTLECELSRPNVDVRWLKDGVELRAGKTMAIAAQGACRSLTIYRCEFADQGVYVCDAHDAQSSASVKVQGRTYTLIYRRVLAEDAGEIQFVAENAESRAQLRVKELPVTLVRPLRDKIAMEKHRGVLECQVSRASAQVRWFKGSQELQPGPKYELVSDGLYRKLIISDVHAEDEDTYTCDAGDVKTSAQFFVEEQSITIVRGLQDVTVMEPAPAWFECETSIPSVRPPKWLLGKTVLQAGGNVGLEQEGTVHRLMLRRTCSTMTGPVHFTVGKSRSSARLVVSDIPVVLTRPLEPKTGRELQSVVLSCDFRPAPKAVQWYKDDTPLSPSEKFKMSLEGQMAELRILRLMPADAGVYRCQAGSAHSSTEVTVEAREVTVTGPLQDAEATEEGWASFSCELSHEDEEVEWSLNGMPLYNDSFHEISHKGRRHTLVLKSIQRADAGIVRASSLKVSTSARLEVRVKPVVFLKALDDLSAEERGTLALQCEVSDPEAHVVWRKDGVQLGPSDKYDFLHTAGTRGLVVHDVSPEDAGLYTCHVGSEETRARVRVHDLHVGITKRLKTMEVLEGESCSFECVLSHESASDPAMWTVGGKTVGSSSRFQATRQGRKYILVVREAAPSDAGEVVFSVRGLTSKASLIVRERPAAIIKPLEDQWVAPGEDVELRCELSRAGTPVHWLKDRKAIRKSQKYDVVCEGTMAMLVIRGASLKDAGEYTCEVEASKSTASLHVEEKANCFTEELTNLQVEEKGTAVFTCKTEHPAATVTWRKGLLELRASGKHQPSQEGLTLRLTISALEKADSDTYTCDIGQAQSRAQLLVQGRRVHIIEDLEDVDVQEGSSATFRCRISPANYEPVHWFLDKTPLHANELNEIDAQPGGYHVLTLRQLALKDSGTIYFEAGDQRASAALRVTEKPSVFSRELTDATITEGEDLTLVCETSTCDIPVCWTKDGKTLRGSARCQLSHEGHRAQLLITGATLQDSGRYKCEAGGACSSSIVRVHARPVRFQEALKDLEVLEGGAATLRCVLSSVAAPVKWCYGNNVLRPGDKYSLRQEGAMLELVVRNLRPQDSGRYSCSFGDQTTSATLTVTALPAQFIGKLRNKEATEGATATLRCELSKAAPVEWRKGSETLRDGDRYCLRQDGAMCELQIRGLAMVDAAEYSCVCGEERTSASLTIRPMPAHFIGRLRHQESIEGATATLRCELSKAAPVEWRKGRESLRDGDRHSLRQDGAVCELQICGLAVADAGEYSCVCGEERTSATLTVKALPAKFTEGLRNEEAVEGATAMLWCELSKVAPVEWRKGPENLRDGDRYILRQEGTRCELQICGLAMADAGEYLCVCGQERTSATLTIRALPARFIEDVKNQEAREGATAVLQCELNSAAPVEWRKGSETLRDGDRYSLRQDGTKCELQIRGLAMADTGEYSCVCGQERTSAMLTVRALPIKFTEGLRNEEATEGATAVLRCELSKMAPVEWWKGHETLRDGDRHSLRQDGARCELQIRGLVAEDAGEYLCMCGKERTSAMLTVRAMPSKFIEGLRNEEATEGDTATLWCELSKAAPVEWRKGHETLRDGDRHSLRQDGSRCELQIRGLAVVDAGEYSCVCGQERTSATLTVRALPARFIEDVKNQEAREGATAVLQCELSKAAPVEWRKGSETLRGGDRYSLRQDGTRCELQIHGLSVADTGEYSCVCGQERTSATLTVRAPQPVFREPLQSLQAEEGSTATLQCELSEPTATVVWSKGGLQLQANGRREPRLQGCTAELVLQDLQREDTGEYTCTCGSQATSATLTVTAAPVRFLRELQHQEVDEGGTAHLCCELSRAGASVEWRKGSLQLFPCAKYQMVQDGAAAELLVRGVEQEDAGDYTCDTGHTQSMASLSVRVPRPKFKTRLQSLEQETGDIARLCCQLSDAESGAVVQWLKEGVELHAGPKYEMRSQGATRELLIHQLEAKDTGEYACVTGGQKTAASLRVTEPEVTIVRGLVDAEVTADEDVEFSCEVSRAGATGVQWCLQGLPLQSNEVTEVAVRDGRIHTLRLKGVTPEDAGTVSFHLGNHASSAQLTVRAPEVTILEPLQDVQLSEGQDASFQCRLSRASGQEARWALGGVPLQANEMNDITVEQGTLHLLTLHKVTLEDAGTVSFHVGTCSSEAQLKVTAKNTVVRGLENVEALEGGEALFECQLSQPEVAAHTWLLDDEPVHTSENAEVVFFENGLRHLLLLKNLRPQDSCRVTFLAGDMVTSAFLTVRGWRLEILEPLKNAAVRAGAQACFTCTLSEAVPVGEASWYINGAAVQPDDSDWTVTADGSHHALLLRSAQPHHAGEVTFACRDAVASARLTVLGLPDPPEDAEVVARSSHTVTLSWAAPMSDGGGGLCGYRVEVKEGATGQWRLCHELVPGPECVVDGLAPGETYRFRVAAVGPVGAGEPVHLPQTVRLAEPPKPVPPQPSAPESRQVAAGEDVSLELEVVAEAGEVIWHKGMERIQPGGRFEVVSQGRQQMLVIKGFTAEDQGEYHCGLAQGSICPAAATFQVALSPASVDEAPQPSLPPEAAQEGDLHLLWEALARKRRMSREPTLDSISELPEEDGRSQRLPQEAEEVAPDLSEGYSTADELARTGDADLSHTSSDDESRAGTPSLVTYLKKAGRPGTSPLASKVGAPAAPSVKPQQQQEPLAAVRPPLGDLSTKDLGDPSMDKAAVKIQAAFKGYKVRKEMKQQEGPMFSHTFGDTEAQVGDALRLECVVASKADVRARWLKDGVELTDGRHHHIDQLGDGTCSLLITGLDRADAGCYTCQVSNKFGQVTHSACVVVSGSESEAESSSGGELDDAFRRAARRLHRLFRTKSPAEVSDEELFLSADEGPAEPEEPADWQTYREDEHFICIRFEALTEARQAVTRFQEMFATLGIGVEIKLVEQGPRRVEMCISKETPAPVVPPEPLPSLLTSDAAPVFLTELQNQEVQDGYPVSFDCVVTGQPMPSVRWFKDGKLLEEDDHYMINEDQQGGHQLIITAVVPADMGVYRCLAENSMGVSSTKAELRVDLTSTDYDTAADATESSSYFSAQGYLSSREQEGTESTTDEGQLPQVVEELRDLQVAPGTRLAKFQLKVKGYPAPRLYWFKDGQPLTASAHIRMTDKKILHTLEIISVTREDSGQYAAYISNAMGAAYSSARLLVRGPDEPEEKPASDVHEQLVPPRMLERFTPKKVKKGSSITFSVKVEGRPVPTVHWLREEAERGVLWIGPDTPGYTVASSAQQHSLVLLDVGRQHQGTYTCIASNAAGQALCSASLHVSGLPKVEEQEKVKEALISTFLQGTTQAISAQGLETASFADLGGQRKEEPLAAKEALGHLSLAEVGTEEFLQKLTSQITEMVSAKITQAKLQVPGGDSDEDSKTPSASPRHGRSRPSSSIQESSSESEDGDARGEIFDIYVVTADYLPLGAEQDAITLREGQYVEVLDAAHPLRWLVRTKPTKSSPSRQGWVSPAYLDRRLKLSPEWGAAEAPEFPGEAVSEDEYKARLSSVIQELLSSEQAFVEELQFLQSHHLQHLERCPHVPIAVAGQKAVIFRNVRDIGRFHSSFLQELQQCDTDDDVAMCFIKNQAAFEQYLEFLVGRVQAESVVVSTAIQEFYKKYAEEALLAGDPSQPPPPPLQHYLEQPVERVQRYQALLKELIRNKARNRQNCALLEQAYAVVSALPQRAENKLHVSLMENYPGTLQALGEPIRQGHFIVWEGAPGARMPWKGHNRHVFLFRNHLVICKPRRDSRTDTVSYVFRNMMKLSSIDLNDQVEGDDRAFEVWQEREDSVRKYLLQARTAIIKSSWVKEICGIQQRLALPVWRPPDFEEELADCTAELGETVKLACRVTGTPKPVISWYKDGKAVQVDPHHILIEDPDGSCALILDSLTGVDSGQYMCFAASAAGNCSTLGKILVQVPPRFVNKVRASPFVEGEDAQFTCTIEGAPYPQIRWYKDGALLTTGNKFQTLSEPRSGLLVLVIRAASKEDLGLYECELVNRLGSARASAELRIQSPMLQAQEQCHREQLVAAVEDTTLERADQEVTSVLKRLLGPKAPGPSTGDLTGPGPCPRGAPALQETGSQPPVTGTSEAPAVPPRVPQPLLHEGPEQEPEAIARAQEWTVPIRMEGAAWPGAGTGELLWDVHSHVVRETTQRTYTYQAIDTHTARPPSMQVTIEDVQAQTGGTAQFEAIIEGDPQPSVTWYKDSVQLVDSTRLSQQQEGTTYSLVLRHVASKDAGVYTCLAQNTGGQVLCKAELLVLGGDNEPDSEKQSHRRKLHSFYEVKEEIGRGVFGFVKRVQHKGNKILCAAKFIPLRSRTRAQAYRERDILAALSHPLVTGLLDQFETRKTLILILELCSSEELLDRLYRKGVVTEAEVKVYIQQLVEGLHYLHSHGVLHLDIKPSNILMVHPAREDIKICDFGFAQNITPAELQFSQYGSPEFVSPEIIQQNPVSEASDIWAMGVISYLSLTCSSPFAGESDRATLLNVLEGRVSWSSPMAAHLSEDAKDFIKATLQRAPQARPSAAQCLSHPWFLKSMPAEEAHFINTKQLKFLLARSRWQRSLMSYKSILVMRSIPELLRGPPDSPSLGVARHLCRDTGGSSSSSSSSDNELAPFARAKSLPPSPVTHSPLLHPRGFLRPSASLPEEAEASERSTEAPAPPASPEGAGPPAAQGCVPRHSVIRSLFYHQAGESPEHGALAPGSRRHPARRRHLLKGGYIAGALPGLREPLMEHRVLEEEAAREEQATLLAKAPSFETALRLPASGTHLAPGHSHSLEHDSPSTPRPSSEACGEAQRLPSAPSGGAPIRDMGHPQGSKQLPSTGGHPGTAQPERPSPDSPWGQPAPFCHPKQGSAPQEGCSPHPAVAPCPPGSFPPGSCKEAPLVPSSPFLGQPQAPPAPAKASPPLDSKMGPGDISLPGRPKPGPCSSPGSASQASSSQVSSLRVGSSQVGTEPGPSLDAEGWTQEAEDLSDSTPTLQRPQEQATMRKFSLGGRGGYAGVAGYGTFAFGGDAGGMLGQGPMWARIAWAVSQSEEEEQEEARAESQSEEQQEARAESPLPQVSARPVPEVGRAPTRSSPEPTPWEDIGQVSLVQIRDLSGDAEAADTISLDISEVDPAYLNLSDLYDIKYLPFEFMIFRKVPKSAQPEPPSPMAEEELAEFPEPTWPWPGELGPHAGLEITEESEDVDALLAEAAVGRKRKWSSPSRSLFHFPGRHLPLDEPAELGLRERVKASVEHISRILKGRPEGLEKEGPPRKKPGLASFRLSGLKSWDRAPTFLRELSDETVVLGQSVTLACQVSAQPAAQATWSKDGAPLESSSRVLISATLKNFQLLTILVVVAEDLGVYTCSVSNALGTVTTTGVLRKAERPSSSPCPDIGEVYADGVLLVWKPVESYGPVTYIVQCSLEGGSWTTLASDIFDCCYLTSKLSRGGTYTFRTACVSKAGMGPYSSPSEQVLLGGPSHLASEEESQGRSAQPLPSTKTFAFQTQIQRGRFSVVRQCWEKASGRALAAKIIPYHPKDKTAVLREYEALKGLRHPHLAQLHAAYLSPRHLVLILELCSGPELLPCLAERASYSESEVKDYLWQMLSATQYLHNQHILHLDLRSENMIITEYNLLKVVDLGNAQSLSQEKVLPSDKFKDYLETMAPELLEGQGAVPQTDIWAIGVTAFIMLSAEYPVSSEGARDLQRGLRKGLVRLSRCYAGLSGGAVAFLRSTLCAQPWGRPCASSCLQCPWLTEEGPACSRPAPVTFPTARLRVFVRNREKRRALLYKRHNLAQVR

SEQ ID NO: 13166 - protein, 6228 aa, Artificial Sequence
  Synthetic polypeptide
GAGEGGARPHGLGGHGGGQGADGLGLRGNLLRKLPRKTAVRVGDTAMFCVELAVPVGPVHWLRNQEEVVAGGRVAISAEGTRHTLTISQCCLEDVGQVAFMAGDCQTSTQFCVSAPRKPPLQPPVDPVVKARMESSVILSWSPPPHGERPVTIDGYLVEKKKLGTYTWIRCHEAEWVATPELTVADVAEEGNFQFRVSALNSFGQSPYLEFPGTVHLAPKLAVRTPLKAVQAVEGGEVTFSVDLTVASAGEWFLDGQALKASSVYEIHCDRTRHTLTIREVPASLHGAQLKFVANGIESSIRMEVRAAPGLTANKPPAAAAREVLARLHEEAQLLAELSDQAAAVTWLKDGRTLSPGPKYEVQASAGRRVLLVRDVARDDAGLYECVSRGGRIAYQLSVQGLARFLHKDMAGSCVDAVAGGPAQFECETSEAHVHVHWYKDGMELGHSGERFLQEDVGTRHRLVAATVTRQDEGTYSCRVGEDSVDFRLRVSEPKVVFAKEQLARRKLQAEAGASATLSCEVAQAQTEVTWYKDGKKLSSSSKVCMEATGCTRRLVVQQAGQADAGEYSCEAGGQRLSFHLDVKEPKVVFAKDQVAHSEVQAEAGASATLSCEVAQAQTEVMWYKDGKKLSSSLKVHVEAKGCRRRLVVQQAGKTDAGDYSCEARGQRVSFRLHITEPKMMFAKEQSVHNEVQAEAGASAMLSCEVAQAQTEVTWYKDGKKLSSSSKVGMEVKGCTRRLVLPQAGKADAGEYSCEAGGQRVSFHLHITEPKGVFAKEQSVHNEVQAEAGTTAMLSCEVAQPQTEVTWYKDGKKLSSSSKVRMEVKGCTRRLVVQQVGKADAGEYSCEAGGQRVSFQLHITEPKAVFAKEQLVHNEVRTEAGASATLSCEVAQAQTEVTWYKDGKKLSSSSKVRIEAAGCMRQLVVQQAGQADAGEYTCEAGGQRLSFHLDVSEPKAVFAKEQLAHRKVQAEAGAIATLSCEVAQAQTEVTWYKDGKKLSSSSKVRMEAVGCTRRLVVQQACQADTGEYSCEAGGQRLSFSLDVAEPKVVFAKEQPVHREVQAQAGASTTLSCEVAQAQTEVMWYKDGKKLSFSSKVRMEAVGCTRRLVVQQAGQAVAGEYSCEAGSQRLSFHLHVAEPKAVFAKEQPASREVQAEAGTSATLSCEVAQAQTEVTWYKDGKKLSSSSKVRMEAVGCTRRLVVQEAGQADAGEYSCKAGDQRLSFHLHVAEPKVVFAKEQPAHREVQAEAGASATLSCEVAQAQTEVTWYKDGKKLSSSSKVRVEAVGCTRRLVVQQAGQAEAGEYSCEAGGQQLSFRLQVAELEPQISERPCRREPLVVKEHEDIILTATLATPSAATVTWLKDGVEIRRSKRHETASQGDTHTLTVHGAQVLDSAIYSCRVGAEGQDFPVQVEEVAAKFCRLLEPVCGELGGTVTLACELSPACAEVVWRCGNTQLRVGKRFQMVAEGPVRSLTVLGLRAEDAGEYVCESRDDHTSAQLTVSVPRVVKFMSGLSTVVAEEGGEATFQCVVSPSDVAVVWFRDGALLQPSEKFAISQSGASHSLTISDLVLEDAGQITVEAEGASSSAALRVREAPVLFKKKLEPQTVEERSSVTLEVELTRPWPELRWTRNATALAPGKNVEIHAEGARHRLVLHNVGFADRGFFGCETPDDKTQAKLTVEMRQVRLVRGLQAVEAREQGTATMEVQLSHADVDGSWTRDGLRFQQGPTCHLAVRGPMHTLTLSGLRPEDSGLMVFKAEGVHTSARLVVTELPVSFSRPLQDVVTTEKEKVTLECELSRPNVDVRWLKDGVELRAGKTMAIAAQGACRSLTIYRCEFADQGVYVCDAHDAQSSASVKVQGRTYTLIYRRVLAEDAGEIQFVAENAESRAQLRVKELPVTLVRPLRDKIAMEKHRGVLECQVSRASAQVRWFKGSQELQPGPKYELVSDGLYRKLIISDVHAEDEDTYTCDAGDVKTSAQFFVEEQSITIVRGLQDVTVMEPAPAWFECETSIPSVRPPKWLLGKTVLQAGGNVGLEQEGTVHRLMLRRTCSTMTGPVHFTVGKSRSSARLVVSDIPVVLTRPLEPKTGRELQSVVLSCDFRPAPKAVQWYKDDTPLSPSEKFKMSLEGQMAELRILRLMPADAGVYRCQAGSAHSSTEVTVEAREVTVTGPLQDAEATEEGWASFSCELSHEDEEVEWSLNGMPLYNDSFHEISHKGRRHTLVLKSIQRADAGIVRASSLKVSTSARLEVRVKPVVFLKALDDLSAEERGTLALQCEVSDPEAHVVWRKDGVQLGPSDKYDFLHTAGTRGLVVHDVSPEDAGLYTCHVGSEETRARVRVHDLHVGITKRLKTMEVLEGESCSFECVLSHESASDPAMWTVGGKTVGSSSRFQATRQGRKYILVVREAAPSDAGEVVFSVRGLTSKASLIVRERPAAIIKPLEDQWVAPGEDVELRCELSRAGTPVHWLKDRKAIRKSQKYDVVCEGTMAMLVIRGASLKDAGEYTCEVEASKSTASLHVEEKANCFTEELTNLQVEEKGTAVFTCKTEHPAATVTWRKGLLELRASGKHQPSQEGLTLRLTISALEKADSDTYTCDIGQAQSRAQLLVQGRRVHIIEDLEDVDVQEGSSATFRCRISPANYEPVHWFLDKTPLHANELNEIDAQPGGYHVLTLRQLALKDSGTIYFEAGDQRASAALRVTEKPSVFSRELTDATITEGEDLTLVCETSTCDIPVCWTKDGKTLRGSARCQLSHEGHRAQLLITGATLQDSGRYKCEAGGACSSSIVRVHARPVRFQEALKDLEVLEGGAATLRCVLSSVAAPVKWCYGNNVLRPGDKYSLRQEGAMLELVVRNLRPQDSGRYSCSFGDQTTSATLTVTALPAQFIGKLRNKEATEGATATLRCELSKAAPVEWRKGSETLRDGDRYCLRQDGAMCELQIRGLAMVDAAEYSCVCGEERTSASLTIRPMPAHFIGRLRHQESIEGATATLRCELSKAAPVEWRKGRESLRDGDRHSLRQDGAVCELQICGLAVADAGEYSCVCGEERTSATLTVKALPAKFTEGLRNEEAVEGATAMLWCELSKVAPVEWRKGPENLRDGDRYILRQEGTRCELQICGLAMADAGEYLCVCGQERTSATLTIRALPARFIEDVKNQEAREGATAVLQCELNSAAPVEWRKGSETLRDGDRYSLRQDGTKCELQIRGLAMADTGEYSCVCGQERTSAMLTVRALPIKFTEGLRNEEATEGATAVLRCELSKMAPVEWWKGHETLRDGDRHSLRQDGARCELQIRGLVAEDAGEYLCMCGKERTSAMLTVRAMPSKFIEGLRNEEATEGDTATLWCELSKAAPVEWRKGHETLRDGDRHSLRQDGSRCELQIRGLAVVDAGEYSCVCGQERTSATLTVRALPARFIEDVKNQEAREGATAVLQCELSKAAPVEWRKGSETLRGGDRYSLRQDGTRCELQIHGLSVADTGEYSCVCGQERTSATLTVRAPQPVFREPLQSLQAEEGSTATLQCELSEPTATVVWSKGGLQLQANGRREPRLQGCTAELVLQDLQREDTGEYTCTCGSQATSATLTVTAAPVRFLRELQHQEVDEGGTAHLCCELSRAGASVEWRKGSLQLFPCAKYQMVQDGAAAELLVRGVEQEDAGDYTCDTGHTQSMASLSVRVPRPKFKTRLQSLEQETGDIARLCCQLSDAESGAVVQWLKEGVELHAGPKYEMRSQGATRELLIHQLEAKDTGEYACVTGGQKTAASLRVTEPEVTIVRGLVDAEVTADEDVEFSCEVSRAGATGVQWCLQGLPLQSNEVTEVAVRDGRIHTLRLKGVTPEDAGTVSFHLGNHASSAQLTVRAPEVTILEPLQDVQLSEGQDASFQCRLSRASGQEARWALGGVPLQANEMNDITVEQGTLHLLTLHKVTLEDAGTVSFHVGTCSSEAQLKVTAKNTVVRGLENVEALEGGEALFECQLSQPEVAAHTWLLDDEPVHTSENAEVVFFENGLRHLLLLKNLRPQDSCRVTFLAGDMVTSAFLTVRGWRLEILEPLKNAAVRAGAQACFTCTLSEAVPVGEASWYINGAAVQPDDSDWTVTADGSHHALLLRSAQPHHAGEVTFACRDAVASARLTVLGLPDPPEDAEVVARSSHTVTLSWAAPMSDGGGGLCGYRVEVKEGATGQWRLCHELVPGPECVVDGLAPGETYRFRVAAVGPVGAGEPVHLPQTVRLAEPPKPVPPQPSAPESRQVAAGEDVSLELEVVAEAGEVIWHKGMERIQPGGRFEVVSQGRQQMLVIKGFTAEDQGEYHCGLAQGSICPAAATFQVALSPASVDEAPQPSLPPEAAQEGDLHLLWEALARKRRMSREPTLDSISELPEEDGRSQRLPQEAEEVAPDLSEGYSTADELARTGDADLSHTSSDDESRAGTPSLVTYLKKAGRPGTSPLASKVGAPAAPSVKPQQQQEPLAAVRPPLGDLSTKDLGDPSMDKAAVKIQAAFKGYKVRKEMKQQEGPMFSHTFGDTEAQVGDALRLECVVASKADVRARWLKDGVELTDGRHHHIDQLGDGTCSLLITGLDRADAGCYTCQVSNKFGQVTHSACVVVSGSESEAESSSGGELDDAFRRAARRLHRLFRTKSPAEVSDEELFLSADEGPAEPEEPADWQTYREDEHFICIRFEALTEARQAVTRFQEMFATLGIGVEIKLVEQGPRRVEMCISKETPAPVVPPEPLPSLLTSDAAPVFLTELQNQEVQDGYPVSFDCVVTGQPMPSVRWFKDGKLLEEDDHYMINEDQQGGHQLIITAVVPADMGVYRCLAENSMGVSSTKAELRVDLTSTDYDTAADATESSSYFSAQGYLSSREQEGTESTTDEGQLPQVVEELRDLQVAPGTRLAKFQLKVKGYPAPRLYWFKDGQPLTASAHIRMTDKKILHTLEIISVTREDSGQYAAYISNAMGAAYSSARLLVRGPDEPEEKPASDVHEQLVPPRMLERFTPKKVKKGSSITFSVKVEGRPVPTVHWLREEAERGVLWIGPDTPGYTVASSAQQHSLVLLDVGRQHQGTYTCIASNAAGQALCSASLHVSGLPKVEEQEKVKEALISTFLQGTTQAISAQGLETASFADLGGQRKEEPLAAKEALGHLSLAEVGTEEFLQKLTSQITEMVSAKITQAKLQVPGGDSDEDSKTPSASPRHGRSRPSSSIQESSSESEDGDARGEIFDIYVVTADYLPLGAEQDAITLREGQYVEVLDAAHPLRWLVRTKPTKSSPSRQGWVSPAYLDRRLKLSPEWGAAEAPEFPGEAVSEDEYKARLSSVIQELLSSEQAFVEELQFLQSHHLQHLERCPHVPIAVAGQKAVIFRNVRDIGRFHSSFLQELQQCDTDDDVAMCFIKNQAAFEQYLEFLVGRVQAESVVVSTAIQEFYKKYAEEALLAGDPSQPPPPPLQHYLEQPVERVQRYQALLKELIRNKARNRQNCALLEQAYAVVSALPQRAENKLHVSLMENYPGTLQALGEPIRQGHFIVWEGAPGARMPWKGHNRHVFLFRNHLVICKPRRDSRTDTVSYVFRNMMKLSSIDLNDQVEGDDRAFEVWQEREDSVRKYLLQARTAIIKSSWVKEICGIQQRLALPVWRPPDFEEELADCTAELGETVKLACRVTGTPKPVISWYKDGKAVQVDPHHILIEDPDGSCALILDSLTGVDSGQYMCFAASAAGNCSTLGKILVQVPPRFVNKVRASPFVEGEDAQFTCTIEGAPYPQIRWYKDGALLTTGNKFQTLSEPRSGLLVLVIRAASKEDLGLYECELVNRLGSARASAELRIQSPMLQAQEQCHREQLVAAVEVTEQETKVPKKTVIIEETITTVVKSPRGQRRSPSKSPSRSPSRCSASPLRPGLLAPDLLYLPGAGQPRRPEAEPGQKPVVPTLYVTEAEAHSPALPGLSGPQPKWVEVEETIEVRVKKMGPQGVSPTTEVPRSSSGHLFTLPGATPGGDPNSNNSNNKLLAQEAWAQGTAMVGVREPLVFRVDARGSVDWAASGMGSLEEEGTMEEAGEEEGEDGDAFVTEESQDTHSLGDRDPKILTHNGRMLTLADLEDYVPGEGETFHCGGPGPGAPDDPPCEVSVIQREIGEPTVGQPVLLSVGHALGPRGPLGLFRPEPRGASPPGPQVRSLEGTSFLLREAPARPVGSAPWTQSFCTRIRRSADSGQSSFTTELSTQTVNFGTVGETVTLHICPDRDGDEAAQP

SEQ ID NO: 13167 - protein, 173 aa, Artificial Sequence
  Synthetic polypeptide
GGGGGSQAARAGRARGRAGCRRTGLARKPPPKAPSEDGGARGRHGYVLRGAGGPGGPRPLAAEPGGSGGGGPRGHLRGGHAPHTNHLPVLPGGCGPGGLYGWRLPDVHPVLRVGPQEASPATPCGSCGKGQDGEFRDSQLVPTTPWGTPCHYRRLPGREEEAWHLHLDQVPRG

SEQ ID NO: 13168 - protein, 84 aa, Artificial Sequence
  Synthetic polypeptide
GRGRGEPGRTGWAGTGAGRVQTDWACEETSSESSLGRRRCAWATRLCFAWSWRSRWAPSTGCGTRRKWWRGAAWPSPRRARATH

SEQ ID NO: 13169 - protein, 6493 aa, Artificial Sequence
  Synthetic polypeptide
GEEGGGALRKRERKREEGVRQVRLVRGLQAVEAREQGTATMEVQLSHADVDGSWTRDGLRFQQGPTCHLAVRGPMHTLTLSGLRPEDSGLMVFKAEGVHTSARLVVTELPVSFSRPLQDVVTTEKEKVTLECELSRPNVDVRWLKDGVELRAGKTMAIAAQGACRSLTIYRCEFADQGVYVCDAHDAQSSASVKVQGRNIQIVRPLEDVEVMEKDGATFSCEVSHDEVPGQWFWEGSKLRPTDNVRIRQEGRTYTLIYRRVLAEDAGEIQFVAENAESRAQLRVKELPVTLVRPLRDKIAMEKHRGVLECQVSRASAQVRWFKGSQELQPGPKYELVSDGLYRKLIISDVHAEDEDTYTCDAGDVKTSAQFFVEEQSITIVRGLQDVTVMEPAPAWFECETSIPSVRPPKWLLGKTVLQAGGNVGLEQEGTVHRLMLRRTCSTMTGPVHFTVGKSRSSARLVVSDIPVVLTRPLEPKTGRELQSVVLSCDFRPAPKAVQWYKDDTPLSPSEKFKMSLEGQMAELRILRLMPADAGVYRCQAGSAHSSTEVTVEAREVTVTGPLQDAEATEEGWASFSCELSHEDEEVEWSLNGMPLYNDSFHEISHKGRRHTLVLKSIQRADAGIVRASSLKVSTSARLEVRVKPVVFLKALDDLSAEERGTLALQCEVSDPEAHVVWRKDGVQLGPSDKYDFLHTAGTRGLVVHDVSPEDAGLYTCHVGSEETRARVRVHDLHVGITKRLKTMEVLEGESCSFECVLSHESASDPAMWTVGGKTVGSSSRFQATRQGRKYILVVREAAPSDAGEVVFSVRGLTSKASLIVRERPAAIIKPLEDQWVAPGEDVELRCELSRAGTPVHWLKDRKAIRKSQKYDVVCEGTMAMLVIRGASLKDAGEYTCEVEASKSTASLHVEEKANCFTEELTNLQVEEKGTAVFTCKTEHPAATVTWRKGLLELRASGKHQPSQEGLTLRLTISALEKADSDTYTCDIGQAQSRAQLLVQGRRVHIIEDLEDVDVQEGSSATFRCRISPANYEPVHWFLDKTPLHANELNEIDAQPGGYHVLTLRQLALKDSGTIYFEAGDQRASAALRVTEKPSVFSRELTDATITEGEDLTLVCETSTCDIPVCWTKDGKTLRGSARCQLSHEGHRAQLLITGATLQDSGRYKCEAGGACSSSIVRVHARPVRFQEALKDLEVLEGGAATLRCVLSSVAAPVKWCYGNNVLRPGDKYSLRQEGAMLELVVRNLRPQDSGRYSCSFGDQTTSATLTVTALPAQFIGKLRNKEATEGATATLRCELSKAAPVEWRKGSETLRDGDRYCLRQDGAMCELQIRGLAMVDAAEYSCVCGEERTSASLTIRPMPAHFIGRLRHQESIEGATATLRCELSKAAPVEWRKGRESLRDGDRHSLRQDGAVCELQICGLAVADAGEYSCVCGEERTSATLTVKALPAKFTEGLRNEEAVEGATAMLWCELSKVAPVEWRKGPENLRDGDRYILRQEGTRCELQICGLAMADAGEYLCVCGQERTSATLTIRALPARFIEDVKNQEAREGATAVLQCELNSAAPVEWRKGSETLRDGDRYSLRQDGTKCELQIRGLAMADTGEYSCVCGQERTSAMLTVRALPIKFTEGLRNEEATEGATAVLRCELSKMAPVEWWKGHETLRDGDRHSLRQDGARCELQIRGLVAEDAGEYLCMCGKERTSAMLTVRAMPSKFIEGLRNEEATEGDTATLWCELSKAAPVEWRKGHETLRDGDRHSLRQDGSRCELQIRGLAVVDAGEYSCVCGQERTSATLTVRALPARFIEDVKNQEAREGATAVLQCELSKAAPVEWRKGSETLRGGDRYSLRQDGTRCELQIHGLSVADTGEYSCVCGQERTSATLTVRALPARFTQDLKTKEASEGATATLQCELSKVAPVEWKKGPETLRDGGRYSLKQDGTRCELQIHDLSVADAGEYSCMCGQERTSATLTVRALPARFTEGLRNEEAMEGATATLQCELSKAAPVEWRKGLEALRDGDKYSLRQDGAVCELQIHGLAMADNGVYSCVCGQERTSATLTVRALPARFIEDMRNQKATEGATVTLQCKLRKAAPVEWRKGPNTLKDGDRYSLKQDGTSCELQIRGLVIADAGEYSCICEQERTSATLTVRALPARFIEDVRNHEATEGATAVLQCELSKAAPVEWRKGSETLRDGDRYSLRQDGTRCELQIRGLAVEDTGEYLCVCGQERTSATLTVRALPARFIDNMTNQEAREGATATLHCELSKVAPVEWRKGPETLRDGDRHSLRQDGTRCELQIRGLSVADAGEYSCVCGQERTSATLTIRALPAKFTKGLRNEEATEGATAMLQCELSKVAPVEWRKGPETLRDGDRYNLRQDGTRCELQIHGLSVADTGEYSCVCGQEKTSATLTVKAPQPVFREPLQSLQAEEGSTATLQCELSEPTATVVWSKGGLQLQANGRREPRLQGCTAELVLQDLQREDTGEYTCTCGSQATSATLTVTAAPVRFLRELQHQEVDEGGTAHLCCELSRAGASVEWRKGSLQLFPCAKYQMVQDGAAAELLVRGVEQEDAGDYTCDTGHTQSMASLSVRVPRPKFKTRLQSLEQETGDIARLCCQLSDAESGAVVQWLKEGVELHAGPKYEMRSQGATRELLIHQLEAKDTGEYACVTGGQKTAASLRVTEPEVTIVRGLVDAEVTADEDVEFSCEVSRAGATGVQWCLQGLPLQSNEVTEVAVRDGRIHTLRLKGVTPEDAGTVSFHLGNHASSAQLTVRAPEVTILEPLQDVQLSEGQDASFQCRLSRASGQEARWALGGVPLQANEMNDITVEQGTLHLLTLHKVTLEDAGTVSFHVGTCSSEAQLKVTAKNTVVRGLENVEALEGGEALFECQLSQPEVAAHTWLLDDEPVHTSENAEVVFFENGLRHLLLLKNLRPQDSCRVTFLAGDMVTSAFLTVRGWRLEILEPLKNAAVRAGAQACFTCTLSEAVPVGEASWYINGAAVQPDDSDWTVTADGSHHALLLRSAQPHHAGEVTFACRDAVASARLTVLGLPDPPEDAEVVARSSHTVTLSWAAPMSDGGGGLCGYRVEVKEGATGQWRLCHELVPGPECVVDGLAPGETYRFRVAAVGPVGAGEPVHLPQTVRLAEPPKPVPPQPSAPESRQVAAGEDVSLELEVVAEAGEVIWHKGMERIQPGGRFEVVSQGRQQMLVIKGFTAEDQGEYHCGLAQGSICPAAATFQVALSPASVDEAPQPSLPPEAAQEGDLHLLWEALARKRRMSREPTLDSISELPEEDGRSQRLPQEAEEVAPDLSEGYSTADELARTGDADLSHTSSDDESRAGTPSLVTYLKKAGRPGTSPLASKVGAPAAPSVKPQQQQEPLAAVRPPLGDLSTKDLGDPSMDKAAVKIQAAFKGYKVRKEMKQQEGPMFSHTFGDTEAQVGDALRLECVVASKADVRARWLKDGVELTDGRHHHIDQLGDGTCSLLITGLDRADAGCYTCQVSNKFGQVTHSACVVVSGSESEAESSSGGELDDAFRRAARRLHRLFRTKSPAEVSDEELFLSADEGPAEPEEPADWQTYREDEHFICIRFEALTEARQAVTRFQEMFATLGIGVEIKLVEQGPRRVEMCISKETPAPVVPPEPLPSLLTSDAAPVFLTELQNQEVQDGYPVSFDCVVTGQPMPSVRWFKDGKLLEEDDHYMINEDQQGGHQLIITAVVPADMGVYRCLAENSMGVSSTKAELRVDLTSTDYDTAADATESSSYFSAQGYLSSREQEGTESTTDEGQLPQVVEELRDLQVAPGTRLAKFQLKVKGYPAPRLYWFKDGQPLTASAHIRMTDKKILHTLEIISVTREDSGQYAAYISNAMGAAYSSARLLVRGPDEPEEKPASDVHEQLVPPRMLERFTPKKVKKGSSITFSVKVEGRPVPTVHWLREEAERGVLWIGPDTPGYTVASSAQQHSLVLLDVGRQHQGTYTCIASNAAGQALCSASLHVSGLPKVEEQEKVKEALISTFLQGTTQAISAQGLETASFADLGGQRKEEPLAAKEALGHLSLAEVGTEEFLQKLTSQITEMVSAKITQAKLQVPGGDSDEDSKTPSASPRHGRSRPSSSIQESSSESEDGDARGEIFDIYVVTADYLPLGAEQDAITLREGQYVEVLDAAHPLRWLVRTKPTKSSPSRQGWVSPAYLDRRLKLSPEWGAAEAPEFPGEAVSEDEYKARLSSVIQELLSSEQAFVEELQFLQSHHLQHLERCPHVPIAVAGQKAVIFRNVRDIGRFHSSFLQELQQCDTDDDVAMCFIKNQAAFEQYLEFLVGRVQAESVVVSTAIQEFYKKYAEEALLAGDPSQPPPPPLQHYLEQPVERVQRYQALLKELIRNKARNRQNCALLEQAYAVVSALPQRAENKLHVSLMENYPGTLQALGEPIRQGHFIVWEGAPGARMPWKGHNRHVFLFRNHLVICKPRRDSRTDTVSYVFRNMMKLSSIDLNDQVEGDDRAFEVWQEREDSVRKYLLQARTAIIKSSWVKEICGIQQRLALPVWRPPDFEEELADCTAELGETVKLACRVTGTPKPVISWYKDGKAVQVDPHHILIEDPDGSCALILDSLTGVDSGQYMCFAASAAGNCSTLGKILVQVPPRFVNKVRASPFVEGEDAQFTCTIEGAPYPQIRWYKDGALLTTGNKFQTLSEPRSGLLVLVIRAASKEDLGLYECELVNRLGSARASAELRIQSPMLQAQEQCHREQLVAAVEDTTLERADQEVTSVLKRLLGPKAPGPSTGDLTGPGPCPRGAPALQETGSQPPVTGTSEAPAVPPRVPQPLLHEGPEQEPEAIARAQEWTVPIRMEGAAWPGAGTGELLWDVHSHVVRETTQRTYTYQAIDTHTARPPSMQVTIEDVQAQTGGTAQFEAIIEGDPQPSVTWYKDSVQLVDSTRLSQQQEGTTYSLVLRHVASKDAGVYTCLAQNTGGQVLCKAELLVLGGDNEPDSEKQSHRRKLHSFYEVKEEIGRGVFGFVKRVQHKGNKILCAAKFIPLRSRTRAQAYRERDILAALSHPLVTGLLDQFETRKTLILILELCSSEELLDRLYRKGVVTEAEVKVYIQQLVEGLHYLHSHGVLHLDIKPSNILMVHPAREDIKICDFGFAQNITPAELQFSQYGSPEFVSPEIIQQNPVSEASDIWAMGVISYLSLTCSSPFAGESDRATLLNVLEGRVSWSSPMAAHLSEDAKDFIKATLQRAPQARPSAAQCLSHPWFLKSMPAEEAHFINTKQLKFLLARSRWQRSLMSYKSILVMRSIPELLRGPPDSPSLGVARHLCRDTGGSSSSSSSSDNELAPFARAKSLPPSPVTHSPLLHPRGFLRPSASLPEEAEASERSTEAPAPPASPEGAGPPAAQGCVPRHSVIRSLFYHQAGESPEHGALAPGSRRHPARRRHLLKGGYIAGALPGLREPLMEHRVLEEEAAREEQATLLAKAPSFETALRLPASGTHLAPGHSHSLEHDSPSTPRPSSEACGEAQRLPSAPSGGAPIRDMGHPQGSKQLPSTGGHPGTAQPERPSPDSPWGQPAPFCHPKQGSAPQEGCSPHPAVAPCPPGSFPPGSCKEAPLVPSSPFLGQPQAPPAPAKASPPLDSKMGPGDISLPGRPKPGPCSSPGSASQASSSQVSSLRVGSSQVGTEPGPSLDAEGWTQEAEDLSDSTPTLQRPQEQATMRKFSLGGRGGYAGVAGYGTFAFGGDAGGMLGQGPMWARIAWAVSQSEEEEQEEARAESQSEEQQEARAESPLPQVSARPVPEVGRAPTRSSPEPTPWEDIGQVSLVQIRDLSGDAEAADTISLDISEVDPAYLNLSDLYDIKYLPFEFMIFRKVPKSAQPEPPSPMAEEELAEFPEPTWPWPGELGPHAGLEITEESEDVDALLAEAAVGRKRKWSSPSRSLFHFPGRHLPLDEPAELGLRERVKASVEHISRILKGRPEGLEKEGPPRKKPGLASFRLSGLKSWDRAPTFLRELSDETVVLGQSVTLACQVSAQPAAQATWSKDGAPLESSSRVLISATLKNFQLLTILVVVAEDLGVYTCSVSNALGTVTTTGVLRKAERPSSSPCPDIGEVYADGVLLVWKPVESYGPVTYIVQCSLEGGSWTTLASDIFDCCYLTSKLSRGGTYTFRTACVSKAGMGPYSSPSEQVLLGGPSHLASEEESQGRSAQPLPSTKTFAFQTQIQRGRFSVVRQCWEKASGRALAAKIIPYHPKDKTAVLREYEALKGLRHPHLAQLHAAYLSPRHLVLILELCSGPELLPCLAERASYSESEVKDYLWQMLSATQYLHNQHILHLDLRSENMIITEYNLLKVVDLGNAQSLSQEKVLPSDKFKDYLETMELLEGQGAVPQTDIWAIGVTAFIMLSAEYPVSSEGARDLQRGLRKGLVRLSRCYAGLSGGAVAFLRSTLCAQPWGRPCASSCLQCPWLTEEGPACSRPAPVTFPTARLRVFVRNREKRRALLYKRHNLAQVR

SEQ ID NO: 13170 - protein, 1855 aa, Artificial Sequence
  Synthetic polypeptide
GEEGGGALRKRERKREEGVRQVRLVRGLQAVEAREQGTATMEVQLSHADVDGSWTRDGLRFQQGPTCHLAVRGPMHTLTLSGLRPEDSGLMVFKAEGVHTSARLVVTELPVSFSRPLQDVVTTEKEKVTLECELSRPNVDVRWLKDGVELRAGKTMAIAAQGACRSLTIYRCEFADQGVYVCDAHDAQSSASVKVQGRTYTLIYRRVLAEDAGEIQFVAENAESRAQLRVKELPVTLVRPLRDKIAMEKHRGVLECQVSRASAQVRWFKGSQELQPGPKYELVSDGLYRKLIISDVHAEDEDTYTCDAGDVKTSAQFFVEEQSITIVRGLQDVTVMEPAPAWFECETSIPSVRPPKWLLGKTVLQAGGNVGLEQEGTVHRLMLRRTCSTMTGPVHFTVGKSRSSARLVVSDIPVVLTRPLEPKTGRELQSVVLSCDFRPAPKAVQWYKDDTPLSPSEKFKMSLEGQMAELRILRLMPADAGVYRCQAGSAHSSTEVTVEAREVTVTGPLQDAEATEEGWASFSCELSHEDEEVEWSLNGMPLYNDSFHEISHKGRRHTLVLKSIQRADAGIVRASSLKVSTSARLEVRVKPVVFLKALDDLSAEERGTLALQCEVSDPEAHVVWRKDGVQLGPSDKYDFLHTAGTRGLVVHDVSPEDAGLYTCHVGSEETRARVRVHDLHVGITKRLKTMEVLEGESCSFECVLSHESASDPAMWTVGGKTVGSSSRFQATRQGRKYILVVREAAPSDAGEVVFSVRGLTSKASLIVRERPAAIIKPLEDQWVAPGEDVELRCELSRAGTPVHWLKDRKAIRKSQKYDVVCEGTMAMLVIRGASLKDAGEYTCEVEASKSTASLHVEEKANCFTEELTNLQVEEKGTAVFTCKTEHPAATVTWRKGLLELRASGKHQPSQEGLTLRLTISALEKADSDTYTCDIGQAQSRAQLLVQGRRVHIIEDLEDVDVQEGSSATFRCRISPANYEPVHWFLDKTPLHANELNEIDAQPGGYHVLTLRQLALKDSGTIYFEAGDQRASAALRVTEKPSVFSRELTDATITEGEDLTLVCETSTCDIPVCWTKDGKTLRGSARCQLSHEGHRAQLLITGATLQDSGRYKCEAGGACSSSIVRVHARPVRFQEALKDLEVLEGGAATLRCVLSSVAAPVKWCYGNNVLRPGDKYSLRQEGAMLELVVRNLRPQDSGRYSCSFGDQTTSATLTVTALPAQFIGKLRNKEATEGATATLRCELSKAAPVEWRKGSETLRDGDRYCLRQDGAMCELQIRGLAMVDAAEYSCVCGEERTSASLTIRPMPAHFIGRLRHQESIEGATATLRCELSKAAPVEWRKGRESLRDGDRHSLRQDGAVCELQICGLAVADAGEYSCVCGEERTSATLTVKALPAKFTEGLRNEEAVEGATAMLWCELSKVAPVEWRKGPENLRDGDRYILRQEGTRCELQICGLAMADAGEYLCVCGQERTSATLTIRALPARFIEDVKNQEAREGATAVLQCELNSAAPVEWRKGSETLRDGDRYSLRQDGTKCELQIRGLAMADTGEYSCVCGQERTSAMLTVRALPIKFTEGLRNEEATEGATAVLRCELSKMAPVEWWKGHETLRDGDRHSLRQDGARCELQIRGLVAEDAGEYLCMCGKERTSAMLTVRAMPSKFIEGLRNEEATEGDTATLWCELSKAAPVEWRKGHETLRDGDRHSLRQDGSRCELQIRGLAVVDAGEYSCVCGQERTSATLTVRALPARFIEDVKNQEAREGATAVLQCELSKAAPVEWRKGSETLRGGDRYSLRQDGTRCELQIHGLSVADTGEYSCVCGQERTSATLTVRALPARHSRSEDQGGLRRGHSYTAV

SEQ ID NO: 13171 - protein, 5913 aa, Artificial Sequence
  Synthetic polypeptide
GEEGGGALRKRERKREEGVRQVRLVRGLQAVEAREQGTATMEVQLSHADVDGSWTRDGLRFQQGPTCHLAVRGPMHTLTLSGLRPEDSGLMVFKAEGVHTSARLVVTELPVSFSRPLQDVVTTEKEKVTLECELSRPNVDVRWLKDGVELRAGKTMAIAAQGACRSLTIYRCEFADQGVYVCDAHDAQSSASVKVQGRTYTLIYRRVLAEDAGEIQFVAENAESRAQLRVKELPVTLVRPLRDKIAMEKHRGVLECQVSRASAQVRWFKGSQELQPGPKYELVSDGLYRKLIISDVHAEDEDTYTCDAGDVKTSAQFFVEEQSITIVRGLQDVTVMEPAPAWFECETSIPSVRPPKWLLGKTVLQAGGNVGLEQEGTVHRLMLRRTCSTMTGPVHFTVGKSRSSARLVVSDIPVVLTRPLEPKTGRELQSVVLSCDFRPAPKAVQWYKDDTPLSPSEKFKMSLEGQMAELRILRLMPADAGVYRCQAGSAHSSTEVTVEAREVTVTGPLQDAEATEEGWASFSCELSHEDEEVEWSLNGMPLYNDSFHEISHKGRRHTLVLKSIQRADAGIVRASSLKVSTSARLEVRVKPVVFLKALDDLSAEERGTLALQCEVSDPEAHVVWRKDGVQLGPSDKYDFLHTAGTRGLVVHDVSPEDAGLYTCHVGSEETRARVRVHDLHVGITKRLKTMEVLEGESCSFECVLSHESASDPAMWTVGGKTVGSSSRFQATRQGRKYILVVREAAPSDAGEVVFSVRGLTSKASLIVRERPAAIIKPLEDQWVAPGEDVELRCELSRAGTPVHWLKDRKAIRKSQKYDVVCEGTMAMLVIRGASLKDAGEYTCEVEASKSTASLHVEEKANCFTEELTNLQVEEKGTAVFTCKTEHPAATVTWRKGLLELRASGKHQPSQEGLTLRLTISALEKADSDTYTCDIGQAQSRAQLLVQGRRVHIIEDLEDVDVQEGSSATFRCRISPANYEPVHWFLDKTPLHANELNEIDAQPGGYHVLTLRQLALKDSGTIYFEAGDQRASAALRVTEKPSVFSRELTDATITEGEDLTLVCETSTCDIPVCWTKDGKTLRGSARCQLSHEGHRAQLLITGATLQDSGRYKCEAGGACSSSIVRVHARPVRFQEALKDLEVLEGGAATLRCVLSSVAAPVKWCYGNNVLRPGDKYSLRQEGAMLELVVRNLRPQDSGRYSCSFGDQTTSATLTVTALPAQFIGKLRNKEATEGATATLRCELSKAAPVEWRKGSETLRDGDRYCLRQDGAMCELQIRGLAMVDAAEYSCVCGEERTSASLTIRPMPAHFIGRLRHQESIEGATATLRCELSKAAPVEWRKGRESLRDGDRHSLRQDGAVCELQICGLAVADAGEYSCVCGEERTSATLTVKALPAKFTEGLRNEEAVEGATAMLWCELSKVAPVEWRKGPENLRDGDRYILRQEGTRCELQICGLAMADAGEYLCVCGQERTSATLTIRALPARFIEDVKNQEAREGATAVLQCELNSAAPVEWRKGSETLRDGDRYSLRQDGTKCELQIRGLAMADTGEYSCVCGQERTSAMLTVRALPIKFTEGLRNEEATEGATAVLRCELSKMAPVEWWKGHETLRDGDRHSLRQDGARCELQIRGLVAEDAGEYLCMCGKERTSAMLTVRAMPSKFIEGLRNEEATEGDTATLWCELSKAAPVEWRKGHETLRDGDRHSLRQDGSRCELQIRGLAVVDAGEYSCVCGQERTSATLTVRALPARFIEDVKNQEAREGATAVLQCELSKAAPVEWRKGSETLRGGDRYSLRQDGTRCELQIHGLSVADTGEYSCVCGQERTSATLTVRAPQPVFREPLQSLQAEEGSTATLQCELSEPTATVVWSKGGLQLQANGRREPRLQGCTAELVLQDLQREDTGEYTCTCGSQATSATLTVTAAPVRFLRELQHQEVDEGGTAHLCCELSRAGASVEWRKGSLQLFPCAKYQMVQDGAAAELLVRGVEQEDAGDYTCDTGHTQSMASLSVRVPRPKFKTRLQSLEQETGDIARLCCQLSDAESGAVVQWLKEGVELHAGPKYEMRSQGATRELLIHQLEAKDTGEYACVTGGQKTAASLRVTEPEVTIVRGLVDAEVTADEDVEFSCEVSRAGATGVQWCLQGLPLQSNEVTEVAVRDGRIHTLRLKGVTPEDAGTVSFHLGNHASSAQLTVRAPEVTILEPLQDVQLSEGQDASFQCRLSRASGQEARWALGGVPLQANEMNDITVEQGTLHLLTLHKVTLEDAGTVSFHVGTCSSEAQLKVTAKNTVVRGLENVEALEGGEALFECQLSQPEVAAHTWLLDDEPVHTSENAEVVFFENGLRHLLLLKNLRPQDSCRVTFLAGDMVTSAFLTVRGWRLEILEPLKNAAVRAGAQACFTCTLSEAVPVGEASWYINGAAVQPDDSDWTVTADGSHHALLLRSAQPHHAGEVTFACRDAVASARLTVLGLPDPPEDAEVVARSSHTVTLSWAAPMSDGGGGLCGYRVEVKEGATGQWRLCHELVPGPECVVDGLAPGETYRFRVAAVGPVGAGEPVHLPQTVRLAEPPKPVPPQPSAPESRQVAAGEDVSLELEVVAEAGEVIWHKGMERIQPGGRFEVVSQGRQQMLVIKGFTAEDQGEYHCGLAQGSICPAAATFQVALSPASVDEAPQPSLPPEAAQEGDLHLLWEALARKRRMSREPTLDSISELPEEDGRSQRLPQEAEEVAPDLSEGYSTADELARTGDADLSHTSSDDESRAGTPSLVTYLKKAGRPGTSPLASKVGAPAAPSVKPQQQQEPLAAVRPPLGDLSTKDLGDPSMDKAAVKIQAAFKGYKVRKEMKQQEGPMFSHTFGDTEAQVGDALRLECVVASKADVRARWLKDGVELTDGRHHHIDQLGDGTCSLLITGLDRADAGCYTCQVSNKFGQVTHSACVVVSGSESEAESSSGGELDDAFRRAARRLHRLFRTKSPAEVSDEELFLSADEGPAEPEEPADWQTYREDEHFICIRFEALTEARQAVTRFQEMFATLGIGVEIKLVEQGPRRVEMCISKETPAPVVPPEPLPSLLTSDAAPVFLTELQNQEVQDGYPVSFDCVVTGQPMPSVRWFKDGKLLEEDDHYMINEDQQGGHQLIITAVVPADMGVYRCLAENSMGVSSTKAELRVDLTSTDYDTAADATESSSYFSAQGYLSSREQEGTESTTDEGQLPQVVEELRDLQVAPGTRLAKFQLKVKGYPAPRLYWFKDGQPLTASAHIRMTDKKILHTLEIISVTREDSGQYAAYISNAMGAAYSSARLLVRGPDEPEEKPASDVHEQLVPPRMLERFTPKKVKKGSSITFSVKVEGRPVPTVHWLREEAERGVLWIGPDTPGYTVASSAQQHSLVLLDVGRQHQGTYTCIASNAAGQALCSASLHVSGLPKVEEQEKVKEALISTFLQGTTQAISAQGLETASFADLGGQRKEEPLAAKEALGHLSLAEVGTEEFLQKLTSQITEMVSAKITQAKLQVPGGDSDEDSKTPSASPRHGRSRPSSSIQESSSESEDGDARGEIFDIYVVTADYLPLGAEQDAITLREGQYVEVLDAAHPLRWLVRTKPTKSSPSRQGWVSPAYLDRRLKLSPEWGAAEAPEFPGEAVSEDEYKARLSSVIQELLSSEQAFVEELQFLQSHHLQHLERCPHVPIAVAGQKAVIFRNVRDIGRFHSSFLQELQQCDTDDDVAMCFIKNQAAFEQYLEFLVGRVQAESVVVSTAIQEFYKKYAEEALLAGDPSQPPPPPLQHYLEQPVERVQRYQALLKELIRNKARNRQNCALLEQAYAVVSALPQRAENKLHVSLMENYPGTLQALGEPIRQGHFIVWEGAPGARMPWKGHNRHVFLFRNHLVICKPRRDSRTDTVSYVFRNMMKLSSIDLNDQVEGDDRAFEVWQEREDSVRKYLLQARTAIIKSSWVKEICGIQQRLALPVWRPPDFEEELADCTAELGETVKLACRVTGTPKPVISWYKDGKAVQVDPHHILIEDPDGSCALILDSLTGVDSGQYMCFAASAAGNCSTLGKILVQVPPRFVNKVRASPFVEGEDAQFTCTIEGAPYPQIRWYKDGALLTTGNKFQTLSEPRSGLLVLVIRAASKEDLGLYECELVNRLGSARASAELRIQSPMLQAQEQCHREQLVAAVEDTTLERADQEVTSVLKRLLGPKAPGPSTGDLTGPGPCPRGAPALQETGSQPPVTGTSEAPAVPPRVPQPLLHEGPEQEPEAIARAQEWTVPIRMEGAAWPGAGTGELLWDVHSHVVRETTQRTYTYQAIDTHTARPPSMQVTIEDVQAQTGGTAQFEAIIEGDPQPSVTWYKDSVQLVDSTRLSQQQEGTTYSLVLRHVASKDAGVYTCLAQNTGGQVLCKAELLVLGGDNEPDSEKQSHRRKLHSFYEVKEEIGRGVFGFVKRVQHKGNKILCAAKFIPLRSRTRAQAYRERDILAALSHPLVTGLLDQFETRKTLILILELCSSEELLDRLYRKGVVTEAEVKVYIQQLVEGLHYLHSHGVLHLDIKPSNILMVHPAREDIKICDFGFAQNITPAELQFSQYGSPEFVSPEIIQQNPVSEASDIWAMGVISYLSLTCSSPFAGESDRATLLNVLEGRVSWSSPMAAHLSEDAKDFIKATLQRAPQARPSAAQCLSHPWFLKSMPAEEAHFINTKQLKFLLARSRWQRSLMSYKSILVMRSIPELLRGPPDSPSLGVARHLCRDTGGSSSSSSSSDNELAPFARAKSLPPSPVTHSPLLHPRGFLRPSASLPEEAEASERSTEAPAPPASPEGAGPPAAQGCVPRHSVIRSLFYHQAGESPEHGALAPGSRRHPARRRHLLKGGYIAGALPGLREPLMEHRVLEEEAAREEQATLLAKAPSFETALRLPASGTHLAPGHSHSLEHDSPSTPRPSSEACGEAQRLPSAPSGGAPIRDMGHPQGSKQLPSTGGHPGTAQPERPSPDSPWGQPAPFCHPKQGSAPQEGCSPHPAVAPCPPGSFPPGSCKEAPLVPSSPFLGQPQAPPAPAKASPPLDSKMGPGDISLPGRPKPGPCSSPGSASQASSSQVSSLRVGSSQVGTEPGPSLDAEGWTQEAEDLSDSTPTLQRPQEQATMRKFSLGGRGGYAGVAGYGTFAFGGDAGGMLGQGPMWARIAWAVSQSEEEEQEEARAESQSEEQQEARAESPLPQVSARPVPEVGRAPTRSSPEPTPWEDIGQVSLVQIRDLSGDAEAADTISLDISEVDPAYLNLSDLYDIKYLPFEFMIFRKVPKSAQPEPPSPMAEEELAEFPEPTWPWPGELGPHAGLEITEESEDVDALLAEAAVGRKRKWSSPSRSLFHFPGRHLPLDEPAELGLRERVKASVEHISRILKGRPEGLEKEGPPRKKPGLASFRLSGLKSWDRAPTFLRELSDETVVLGQSVTLACQVSAQPAAQATWSKDGAPLESSSRVLISATLKNFQLLTILVVVAEDLGVYTCSVSNALGTVTTTGVLRKAERPSSSPCPDIGEVYADGVLLVWKPVESYGPVTYIVQCSLEGGSWTTLASDIFDCCYLTSKLSRGGTYTFRTACVSKAGMGPYSSPSEQVLLGGPSHLASEEESQGRSAQPLPSTKTFAFQTQIQRGRFSVVRQCWEKASGRALAAKIIPYHPKDKTAVLREYEALKGLRHPHLAQLHAAYLSPRHLVLILELCSGPELLPCLAERASYSESEVKDYLWQMLSATQYLHNQHILHLDLRSENMIITEYNLLKVVDLGNAQSLSQEKVLPSDKFKDYLETMAPELLEGQGAVPQTDIWAIGVTAFIMLSAEYPVSSEGARDLQRGLRKGLVRLSRCYAGLSGGAVAFLRSTLCAQPWGRPCASSCLQCPWLTEEGPACSRPAPVTFPTARLRVFVRNREKRRALLYKRHNLAQVR

SEQ ID NO: 13172 - protein, 4565 aa, Artificial Sequence
  Synthetic polypeptide
GEEGGGALRKRERKREEGVRQVRLVRGLQAVEAREQGTATMEVQLSHADVDGSWTRDGLRFQQGPTCHLAVRGPMHTLTLSGLRPEDSGLMVFKAEGVHTSARLVVTELPVSFSRPLQDVVTTEKEKVTLECELSRPNVDVRWLKDGVELRAGKTMAIAAQGACRSLTIYRCEFADQGVYVCDAHDAQSSASVKVQGRTYTLIYRRVLAEDAGEIQFVAENAESRAQLRVKELPVTLVRPLRDKIAMEKHRGVLECQVSRASAQVRWFKGSQELQPGPKYELVSDGLYRKLIISDVHAEDEDTYTCDAGDVKTSAQFFVEEQSITIVRGLQDVTVMEPAPAWFECETSIPSVRPPKWLLGKTVLQAGGNVGLEQEGTVHRLMLRRTCSTMTGPVHFTVGKSRSSARLVVSDIPVVLTRPLEPKTGRELQSVVLSCDFRPAPKAVQWYKDDTPLSPSEKFKMSLEGQMAELRILRLMPADAGVYRCQAGSAHSSTEVTVEAREVTVTGPLQDAEATEEGWASFSCELSHEDEEVEWSLNGMPLYNDSFHEISHKGRRHTLVLKSIQRADAGIVRASSLKVSTSARLEVRVKPVVFLKALDDLSAEERGTLALQCEVSDPEAHVVWRKDGVQLGPSDKYDFLHTAGTRGLVVHDVSPEDAGLYTCHVGSEETRARVRVHDLHVGITKRLKTMEVLEGESCSFECVLSHESASDPAMWTVGGKTVGSSSRFQATRQGRKYILVVREAAPSDAGEVVFSVRGLTSKASLIVRERPAAIIKPLEDQWVAPGEDVELRCELSRAGTPVHWLKDRKAIRKSQKYDVVCEGTMAMLVIRGASLKDAGEYTCEVEASKSTASLHVEEKANCFTEELTNLQVEEKGTAVFTCKTEHPAATVTWRKGLLELRASGKHQPSQEGLTLRLTISALEKADSDTYTCDIGQAQSRAQLLVQGRRVHIIEDLEDVDVQEGSSATFRCRISPANYEPVHWFLDKTPLHANELNEIDAQPGGYHVLTLRQLALKDSGTIYFEAGDQRASAALRVTEKPSVFSRELTDATITEGEDLTLVCETSTCDIPVCWTKDGKTLRGSARCQLSHEGHRAQLLITGATLQDSGRYKCEAGGACSSSIVRVHARPVRFQEALKDLEVLEGGAATLRCVLSSVAAPVKWCYGNNVLRPGDKYSLRQEGAMLELVVRNLRPQDSGRYSCSFGDQTTSATLTVTALPAQFIGKLRNKEATEGATATLRCELSKAAPVEWRKGSETLRDGDRYCLRQDGAMCELQIRGLAMVDAAEYSCVCGEERTSASLTIRPMPAHFIGRLRHQESIEGATATLRCELSKAAPVEWRKGRESLRDGDRHSLRQDGAVCELQICGLAVADAGEYSCVCGEERTSATLTVKALPAKFTEGLRNEEAVEGATAMLWCELSKVAPVEWRKGPENLRDGDRYILRQEGTRCELQICGLAMADAGEYLCVCGQERTSATLTIRALPARFIEDVKNQEAREGATAVLQCELNSAAPVEWRKGSETLRDGDRYSLRQDGTKCELQIRGLAMADTGEYSCVCGQERTSAMLTVRALPIKFTEGLRNEEATEGATAVLRCELSKMAPVEWWKGHETLRDGDRHSLRQDGARCELQIRGLVAEDAGEYLCMCGKERTSAMLTVRAMPSKFIEGLRNEEATEGDTATLWCELSKAAPVEWRKGHETLRDGDRHSLRQDGSRCELQIRGLAVVDAGEYSCVCGQERTSATLTVRALPARFIEDVKNQEAREGATAVLQCELSKAAPVEWRKGSETLRGGDRYSLRQDGTRCELQIHGLSVADTGEYSCVCGQERTSATLTVRAPQPVFREPLQSLQAEEGSTATLQCELSEPTATVVWSKGGLQLQANGRREPRLQGCTAELVLQDLQREDTGEYTCTCGSQATSATLTVTAAPVRFLRELQHQEVDEGGTAHLCCELSRAGASVEWRKGSLQLFPCAKYQMVQDGAAAELLVRGVEQEDAGDYTCDTGHTQSMASLSVRVPRPKFKTRLQSLEQETGDIARLCCQLSDAESGAVVQWLKEGVELHAGPKYEMRSQGATRELLIHQLEAKDTGEYACVTGGQKTAASLRVTEPEVTIVRGLVDAEVTADEDVEFSCEVSRAGATGVQWCLQGLPLQSNEVTEVAVRDGRIHTLRLKGVTPEDAGTVSFHLGNHASSAQLTVRAPEVTILEPLQDVQLSEGQDASFQCRLSRASGQEARWALGGVPLQANEMNDITVEQGTLHLLTLHKVTLEDAGTVSFHVGTCSSEAQLKVTAKNTVVRGLENVEALEGGEALFECQLSQPEVAAHTWLLDDEPVHTSENAEVVFFENGLRHLLLLKNLRPQDSCRVTFLAGDMVTSAFLTVRGWRLEILEPLKNAAVRAGAQACFTCTLSEAVPVGEASWYINGAAVQPDDSDWTVTADGSHHALLLRSAQPHHAGEVTFACRDAVASARLTVLGLPDPPEDAEVVARSSHTVTLSWAAPMSDGGGGLCGYRVEVKEGATGQWRLCHELVPGPECVVDGLAPGETYRFRVAAVGPVGAGEPVHLPQTVRLAEPPKPVPPQPSAPESRQVAAGEDVSLELEVVAEAGEVIWHKGMERIQPGGRFEVVSQGRQQMLVIKGFTAEDQGEYHCGLAQGSICPAAATFQVALSPASVDEAPQPSLPPEAAQEGDLHLLWEALARKRRMSREPTLDSISELPEEDGRSQRLPQEAEEVAPDLSEGYSTADELARTGDADLSHTSSDDESRAGTPSLVTYLKKAGRPGTSPLASKVGAPAAPSVKPQQQQEPLAAVRPPLGDLSTKDLGDPSMDKAAVKIQAAFKGYKVRKEMKQQEGPMFSHTFGDTEAQVGDALRLECVVASKADVRARWLKDGVELTDGRHHHIDQLGDGTCSLLITGLDRADAGCYTCQVSNKFGQVTHSACVVVSGSESEAESSSGGELDDAFRRAARRLHRLFRTKSPAEVSDEELFLSADEGPAEPEEPADWQTYREDEHFICIRFEALTEARQAVTRFQEMFATLGIGVEIKLVEQGPRRVEMCISKETPAPVVPPEPLPSLLTSDAAPVFLTELQNQEVQDGYPVSFDCVVTGQPMPSVRWFKDGKLLEEDDHYMINEDQQGGHQLIITAVVPADMGVYRCLAENSMGVSSTKAELRVDLTSTDYDTAADATESSSYFSAQGYLSSREQEGTESTTDEGQLPQVVEELRDLQVAPGTRLAKFQLKVKGYPAPRLYWFKDGQPLTASAHIRMTDKKILHTLEIISVTREDSGQYAAYISNAMGAAYSSARLLVRGPDEPEEKPASDVHEQLVPPRMLERFTPKKVKKGSSITFSVKVEGRPVPTVHWLREEAERGVLWIGPDTPGYTVASSAQQHSLVLLDVGRQHQGTYTCIASNAAGQALCSASLHVSGLPKVEEQEKVKEALISTFLQGTTQAISAQGLETASFADLGGQRKEEPLAAKEALGHLSLAEVGTEEFLQKLTSQITEMVSAKITQAKLQVPGGDSDEDSKTPSASPRHGRSRPSSSIQESSSESEDGDARGEIFDIYVVTADYLPLGAEQDAITLREGQYVEVLDAAHPLRWLVRTKPTKSSPSRQGWVSPAYLDRRLKLSPEWGAAEAPEFPGEAVSEDEYKARLSSVIQELLSSEQAFVEELQFLQSHHLQHLERCPHVPIAVAGQKAVIFRNVRDIGRFHSSFLQELQQCDTDDDVAMCFIKNQAAFEQYLEFLVGRVQAESVVVSTAIQEFYKKYAEEALLAGDPSQPPPPPLQHYLEQPVERVQRYQALLKELIRNKARNRQNCALLEQAYAVVSALPQRAENKLHVSLMENYPGTLQALGEPIRQGHFIVWEGAPGARMPWKGHNRHVFLFRNHLVICKPRRDSRTDTVSYVFRNMMKLSSIDLNDQVEGDDRAFEVWQEREDSVRKYLLQARTAIIKSSWVKEICGIQQRLALPVWRPPDFEEELADCTAELGETVKLACRVTGTPKPVISWYKDGKAVQVDPHHILIEDPDGSCALILDSLTGVDSGQYMCFAASAAGNCSTLGKILVQVPPRFVNKVRASPFVEGEDAQFTCTIEGAPYPQIRWYKDGALLTTGNKFQTLSEPRSGLLVLVIRAASKEDLGLYECELVNRLGSARASAELRIQSPMLQAQEQCHREQLVAAVEVTEQETKVPKKTVIIEETITTVVKSPRGQRRSPSKSPSRSPSRCSASPLRPGLLAPDLLYLPGAGQPRRPEAEPGQKPVVPTLYVTEAEAHSPALPGLSGPQPKWVEVEETIEVRVKKMGPQGVSPTTEVPRSSSGHLFTLPGATPGGDPNSNNSNNKLLAQEAWAQGTAMVGVREPLVFRVDARGSVDWAASGMGSLEEEGTMEEAGEEEGEDGDAFVTEESQDTHSLGDRDPKILTHNGRMLTLADLEDYVPGEGETFHCGGPGPGAPDDPPCEVSVIQREIGEPTVGQPVLLSVGHALGPRGPLGLFRPEPRGASPPGPQVRSLEGTSFLLREAPARPVGSAPWTQSFCTRIRRSADSGQSSFTTELSTQTVNFGTVGETVTLHICPDRDGDEAAQP

SEQ ID NO: 13173 - protein, 102 aa, Artificial Sequence
  Synthetic polypeptide
GRGSGKERRECARYGSYGACRQWRHGSRARLPWRCSCRMRTWMAAGLVTVCGSSRGPRATWLCGAPCTPSHSRGCGQRIVALWSSRPKECTRRRGSWSPSFP

SEQ ID NO: 13174 - protein, 76 aa, Artificial Sequence
  Synthetic polypeptide
RRSEEGGGALRISEDVGGVLRGGGRRGTEEEGAEKRGGSAPGTARTGPAGSGGTGAGHGYHGGAAVACGRGWQLDS

SEQ ID NO: 13175 - protein, 26 aa, Artificial Sequence
  Synthetic polypeptide
HRASKSLGISWVIGASFVLISDKHRL

SEQ ID NO: 13176 - protein, 2751 aa, Artificial Sequence
  Synthetic polypeptide
VTSTDYDTAADATESSSYFSAQGYLSSREQEGTESTTDEGQLPQVVEELRDLQVAPGTRLAKFQLKVKGYPAPRLYWFKDGQPLTASAHIRMTDKKILHTLEIISVTREDSGQYAAYISNAMGAAYSSARLLVRGPDEPEEKPASDVHEQLVPPRMLERFTPKKVKKGSSITFSVKVEGRPVPTVHWLREEAERGVLWIGPDTPGYTVASSAQQHSLVLLDVGRQHQGTYTCIASNAAGQALCSASLHVSGLPKVEEQEKVKEALISTFLQGTTQAISAQGLETASFADLGGQRKEEPLAAKEALGHLSLAEVGTEEFLQKLTSQITEMVSAKITQAKLQVPGGDSDEDSKTPSASPRHGRSRPSSSIQESSSESEDGDARGEIFDIYVVTADYLPLGAEQDAITLREGQYVEVLDAAHPLRWLVRTKPTKSSPSRQGWVSPAYLDRRLKLSPEWGAAEAPEFPGEAVSEDEYKARLSSVIQELLSSEQAFVEELQFLQSHHLQHLERCPHVPIAVAGQKAVIFRNVRDIGRFHSSFLQELQQCDTDDDVAMCFIKNQAAFEQYLEFLVGRVQAESVVVSTAIQEFYKKYAEEALLAGDPSQPPPPPLQHYLEQPVERVQRYQALLKELIRNKARNRQNCALLEQAYAVVSALPQRAENKLHVSLMENYPGTLQALGEPIRQGHFIVWEGAPGARMPWKGHNRHVFLFRNHLVICKPRRDSRTDTVSYVFRNMMKLSSIDLNDQVEGDDRAFEVWQEREDSVRKYLLQARTAIIKSSWVKEICGIQQRLALPVWRPPDFEEELADCTAELGETVKLACRVTGTPKPVISWYKDGKAVQVDPHHILIEDPDGSCALILDSLTGVDSGQYMCFAASAAGNCSTLGKILVQVPPRFVNKVRASPFVEGEDAQFTCTIEGAPYPQIRWYKDGALLTTGNKFQTLSEPRSGLLVLVIRAASKEDLGLYECELVNRLGSARASAELRIQSPMLQAQEQCHREQLVAAVEDTTLERADQEVTSVLKRLLGPKAPGPSTGDLTGPGPCPRGAPALQETGSQPPVTGTSEAPAVPPRVPQPLLHEGPEQEPEAIARAQEWTVPIRMEGAAWPGAGTGELLWDVHSHVVRETTQRTYTYQAIDTHTARPPSMQVTIEDVQAQTGGTAQFEAIIEGDPQPSVTWYKDSVQLVDSTRLSQQQEGTTYSLVLRHVASKDAGVYTCLAQNTGGQVLCKAELLVLGGDNEPDSEKQSHRRKLHSFYEVKEEIGRGVFGFVKRVQHKGNKILCAAKFIPLRSRTRAQAYRERDILAALSHPLVTGLLDQFETRKTLILILELCSSEELLDRLYRKGVVTEAEVKVYIQQLVEGLHYLHSHGVLHLDIKPSNILMVHPAREDIKICDFGFAQNITPAELQFSQYGSPEFVSPEIIQQNPVSEASDIWAMGVISYLSLTCSSPFAGESDRATLLNVLEGRVSWSSPMAAHLSEDAKDFIKATLQRAPQARPSAAQCLSHPWFLKSMPAEEAHFINTKQLKFLLARSRWQRSLMSYKSILVMRSIPELLRGPPDSPSLGVARHLCRDTGGSSSSSSSSDNELAPFARAKSLPPSPVTHSPLLHPRGFLRPSASLPEEAEASERSTEAPAPPASPEGAGPPAAQGCVPRHSVIRSLFYHQAGESPEHGALAPGSRRHPARRRHLLKGGYIAGALPGLREPLMEHRVLEEEAAREEQATLLAKAPSFETALRLPASGTHLAPGHSHSLEHDSPSTPRPSSEACGEAQRLPSAPSGGAPIRDMGHPQGSKQLPSTGGHPGTAQPERPSPDSPWGQPAPFCHPKQGSAPQEGCSPHPAVAPCPPGSFPPGSCKEAPLVPSSPFLGQPQAPPAPAKASPPLDSKMGPGDISLPGRPKPGPCSSPGSASQASSSQVSSLRVGSSQVGTEPGPSLDAEGWTQEAEDLSDSTPTLQRPQEQATMRKFSLGGRGGYAGVAGYGTFAFGGDAGGMLGQGPMWARIAWAVSQSEEEEQEEARAESQSEEQQEARAESPLPQVSARPVPEVGRAPTRSSPEPTPWEDIGQVSLVQIRDLSGDAEAADTISLDISEVDPAYLNLSDLYDIKYLPFEFMIFRKVPKSAQPEPPSPMAEEELAEFPEPTWPWPGELGPHAGLEITEESEDVDALLAEAAVGRKRKWSSPSRSLFHFPGRHLPLDEPAELGLRERVKASVEHISRILKGRPEGLEKEGPPRKKPGLASFRLSGLKSWDRAPTFLRELSDETVVLGQSVTLACQVSAQPAAQATWSKDGAPLESSSRVLISATLKNFQLLTILVVVAEDLGVYTCSVSNALGTVTTTGVLRKAERPSSSPCPDIGEVYADGVLLVWKPVESYGPVTYIVQCSLEGGSWTTLASDIFDCCYLTSKLSRGGTYTFRTACVSKAGMGPYSSPSEQVLLGGPSHLASEEESQGRSAQPLPSTKTFAFQTQIQRGRFSVVRQCWEKASGRALAAKIIPYHPKDKTAVLREYEALKGLRHPHLAQLHAAYLSPRHLVLILELCSGPELLPCLAERASYSESEVKDYLWQMLSATQYLHNQHILHLDLRSENMIITEYNLLKVVDLGNAQSLSQEKVLPSDKFKDYLETMAPELLEGQGAVPQTDIWAIGVTAFIMLSAEYPVSSEGARDLQRGLRKGLVRLSRCYAGLSGGAVAFLRSTLCAQPWGRPCASSCLQCPWLTEEGPACSRPAPVTFPTARLRVFVRNREKRRALLYKRHNLAQVR

SEQ ID NO: 13177 - protein, 2749 aa, Artificial Sequence
  Synthetic polypeptide
VTSTDYDTAADATESSSYFSAQGYLSSREQEGTESTTDEGQLPQVVEELRDLQVAPGTRLAKFQLKVKGYPAPRLYWFKDGQPLTASAHIRMTDKKILHTLEIISVTREDSGQYAAYISNAMGAAYSSARLLVRGPDEPEEKPASDVHEQLVPPRMLERFTPKKVKKGSSITFSVKVEGRPVPTVHWLREEAERGVLWIGPDTPGYTVASSAQQHSLVLLDVGRQHQGTYTCIASNAAGQALCSASLHVSGLPKVEEQEKVKEALISTFLQGTTQAISAQGLETASFADLGGQRKEEPLAAKEALGHLSLAEVGTEEFLQKLTSQITEMVSAKITQAKLQVPGGDSDEDSKTPSASPRHGRSRPSSSIQESSSESEDGDARGEIFDIYVVTADYLPLGAEQDAITLREGQYVEVLDAAHPLRWLVRTKPTKSSPSRQGWVSPAYLDRRLKLSPEWGAAEAPEFPGEAVSEDEYKARLSSVIQELLSSEQAFVEELQFLQSHHLQHLERCPHVPIAVAGQKAVIFRNVRDIGRFHSSFLQELQQCDTDDDVAMCFIKNQAAFEQYLEFLVGRVQAESVVVSTAIQEFYKKYAEEALLAGDPSQPPPPPLQHYLEQPVERVQRYQALLKELIRNKARNRQNCALLEQAYAVVSALPQRAENKLHVSLMENYPGTLQALGEPIRQGHFIVWEGAPGARMPWKGHNRHVFLFRNHLVICKPRRDSRTDTVSYVFRNMMKLSSIDLNDQVEGDDRAFEVWQEREDSVRKYLLQARTAIIKSSWVKEICGIQQRLALPVWRPPDFEEELADCTAELGETVKLACRVTGTPKPVISWYKDGKAVQVDPHHILIEDPDGSCALILDSLTGVDSGQYMCFAASAAGNCSTLGKILVQVPPRFVNKVRASPFVEGEDAQFTCTIEGAPYPQIRWYKDGALLTTGNKFQTLSEPRSGLLVLVIRAASKEDLGLYECELVNRLGSARASAELRIQSPMLQAQEQCHREQLVAAVEDTTLERADQEVTSVLKRLLGPKAPGPSTGDLTGPGPCPRGAPALQETGSQPPVTGTSEAPAVPPRVPQPLLHEGPEQEPEAIARAQEWTVPIRMEGAAWPGAGTGELLWDVHSHVVRETTQRTYTYQAIDTHTARPPSMQVTIEDVQAQTGGTAQFEAIIEGDPQPSVTWYKDSVQLVDSTRLSQQQEGTTYSLVLRHVASKDAGVYTCLAQNTGGQVLCKAELLVLGGDNEPDSEKQSHRRKLHSFYEVKEEIGRGVFGFVKRVQHKGNKILCAAKFIPLRSRTRAQAYRERDILAALSHPLVTGLLDQFETRKTLILILELCSSEELLDRLYRKGVVTEAEVKVYIQQLVEGLHYLHSHGVLHLDIKPSNILMVHPAREDIKICDFGFAQNITPAELQFSQYGSPEFVSPEIIQQNPVSEASDIWAMGVISYLSLTCSSPFAGESDRATLLNVLEGRVSWSSPMAAHLSEDAKDFIKATLQRAPQARPSAAQCLSHPWFLKSMPAEEAHFINTKQLKFLLARSRWQRSLMSYKSILVMRSIPELLRGPPDSPSLGVARHLCRDTGGSSSSSSSSDNELAPFARAKSLPPSPVTHSPLLHPRGFLRPSASLPEEAEASERSTEAPAPPASPEGAGPPAAQGCVPRHSVIRSLFYHQAGESPEHGALAPGSRRHPARRRHLLKGGYIAGALPGLREPLMEHRVLEEEAAREEQATLLAKAPSFETALRLPASGTHLAPGHSHSLEHDSPSTPRPSSEACGEAQRLPSAPSGGAPIRDMGHPQGSKQLPSTGGHPGTAQPERPSPDSPWGQPAPFCHPKQGSAPQEGCSPHPAVAPCPPGSFPPGSCKEAPLVPSSPFLGQPQAPPAPAKASPPLDSKMGPGDISLPGRPKPGPCSSPGSASQASSSQVSSLRVGSSQVGTEPGPSLDAEGWTQEAEDLSDSTPTLQRPQEQATMRKFSLGGRGGYAGVAGYGTFAFGGDAGGMLGQGPMWARIAWAVSQSEEEEQEEARAESQSEEQQEARAESPLPQVSARPVPEVGRAPTRSSPEPTPWEDIGQVSLVQIRDLSGDAEAADTISLDISEVDPAYLNLSDLYDIKYLPFEFMIFRKVPKSAQPEPPSPMAEEELAEFPEPTWPWPGELGPHAGLEITEESEDVDALLAEAAVGRKRKWSSPSRSLFHFPGRHLPLDEPAELGLRERVKASVEHISRILKGRPEGLEKEGPPRKKPGLASFRLSGLKSWDRAPTFLRELSDETVVLGQSVTLACQVSAQPAAQATWSKDGAPLESSSRVLISATLKNFQLLTILVVVAEDLGVYTCSVSNALGTVTTTGVLRKAERPSSSPCPDIGEVYADGVLLVWKPVESYGPVTYIVQCSLEGGSWTTLASDIFDCCYLTSKLSRGGTYTFRTACVSKAGMGPYSSPSEQVLLGGPSHLASEEESQGRSAQPLPSTKTFAFQTQIQRGRFSVVRQCWEKASGRALAAKIIPYHPKDKTAVLREYEALKGLRHPHLAQLHAAYLSPRHLVLILELCSGPELLPCLAERASYSESEVKDYLWQMLSATQYLHNQHILHLDLRSENMIITEYNLLKVVDLGNAQSLSQEKVLPSDKFKDYLETMELLEGQGAVPQTDIWAIGVTAFIMLSAEYPVSSEGARDLQRGLRKGLVRLSRCYAGLSGGAVAFLRSTLCAQPWGRPCASSCLQCPWLTEEGPACSRPAPVTFPTARLRVFVRNREKRRALLYKRHNLAQVR

SEQ ID NO: 13178 - protein, 1403 aa, Artificial Sequence
  Synthetic polypeptide
VTSTDYDTAADATESSSYFSAQGYLSSREQEGTESTTDEGQLPQVVEELRDLQVAPGTRLAKFQLKVKGYPAPRLYWFKDGQPLTASAHIRMTDKKILHTLEIISVTREDSGQYAAYISNAMGAAYSSARLLVRGPDEPEEKPASDVHEQLVPPRMLERFTPKKVKKGSSITFSVKVEGRPVPTVHWLREEAERGVLWIGPDTPGYTVASSAQQHSLVLLDVGRQHQGTYTCIASNAAGQALCSASLHVSGLPKVEEQEKVKEALISTFLQGTTQAISAQGLETASFADLGGQRKEEPLAAKEALGHLSLAEVGTEEFLQKLTSQITEMVSAKITQAKLQVPGGDSDEDSKTPSASPRHGRSRPSSSIQESSSESEDGDARGEIFDIYVVTADYLPLGAEQDAITLREGQYVEVLDAAHPLRWLVRTKPTKSSPSRQGWVSPAYLDRRLKLSPEWGAAEAPEFPGEAVSEDEYKARLSSVIQELLSSEQAFVEELQFLQSHHLQHLERCPHVPIAVAGQKAVIFRNVRDIGRFHSSFLQELQQCDTDDDVAMCFIKNQAAFEQYLEFLVGRVQAESVVVSTAIQEFYKKYAEEALLAGDPSQPPPPPLQHYLEQPVERVQRYQALLKELIRNKARNRQNCALLEQAYAVVSALPQRAENKLHVSLMENYPGTLQALGEPIRQGHFIVWEGAPGARMPWKGHNRHVFLFRNHLVICKPRRDSRTDTVSYVFRNMMKLSSIDLNDQVEGDDRAFEVWQEREDSVRKYLLQARTAIIKSSWVKEICGIQQRLALPVWRPPDFEEELADCTAELGETVKLACRVTGTPKPVISWYKDGKAVQVDPHHILIEDPDGSCALILDSLTGVDSGQYMCFAASAAGNCSTLGKILVQVPPRFVNKVRASPFVEGEDAQFTCTIEGAPYPQIRWYKDGALLTTGNKFQTLSEPRSGLLVLVIRAASKEDLGLYECELVNRLGSARASAELRIQSPMLQAQEQCHREQLVAAVEVTEQETKVPKKTVIIEETITTVVKSPRGQRRSPSKSPSRSPSRCSASPLRPGLLAPDLLYLPGAGQPRRPEAEPGQKPVVPTLYVTEAEAHSPALPGLSGPQPKWVEVEETIEVRVKKMGPQGVSPTTEVPRSSSGHLFTLPGATPGGDPNSNNSNNKLLAQEAWAQGTAMVGVREPLVFRVDARGSVDWAASGMGSLEEEGTMEEAGEEEGEDGDAFVTEESQDTHSLGDRDPKILTHNGRMLTLADLEDYVPGEGETFHCGGPGPGAPDDPPCEVSVIQREIGEPTVGQPVLLSVGHALGPRGPLGLFRPEPRGASPPGPQVRSLEGTSFLLREAPARPVGSAPWTQSFCTRIRRSADSGQSSFTTELSTQTVNFGTVGETVTLHICPDRDGDEAAQP

SEQ ID NO: 13179 - protein, 23 aa, Artificial Sequence
  Synthetic polypeptide
KPREGERQRSRETGEVERMNLTS

SEQ ID NO: 13180 - protein, 187 aa, Artificial Sequence
  Synthetic polypeptide
NTDTHGLKESKEKMDGEIETEGGRETAIERDRRGGEDEFDKLRPLCYTNTDIFLLCFSVVSPSSFQNVSEKWVPEIRCHCPKAPIILVGTQSDLREDVKVLIELDKCKEKPVPEEAAKLCAEEIKAASYIECSALTQKNLKEVFDAAIVAGIQYSDTQQQPKKSKSRTPDKMKNLSKSWWKKYCCFV

SEQ ID NO: 13181 - protein, 45 aa, Artificial Sequence
  Synthetic polypeptide
THAHTHTVKHRHTRLEGEQGEDGWRDRNRGRERDSDRERPERWRG

SEQ ID NO: 13182 - protein, 177 aa, Artificial Sequence
  Synthetic polypeptide
DQPGQYAVVSVDGRPVRLQLCDTAGQDEFDKLRPLCYTNTDIFLLCFSVVSPSSFQNVSEKWVPEIRCHCPKAPIILVGTQSDLREDVKVLIELDKCKEKPVPEEAAKLCAEEIKAASYIECSALTQKNLKEVFDAAIVAGIQYSDTQQQPKKSKSRTPDKMKNLSKSWWKKYCCFV

SEQ ID NO: 13183 - protein, 20 aa, Artificial Sequence
  Synthetic polypeptide
GQEFETSLVNMRWCLWMGGP

SEQ ID NO: 13184 - protein, 39 aa, Artificial Sequence
  Synthetic polypeptide
HFGFWEAEMGGLLEAKSLRPAWSICGGVCGWAARETPTL

SEQ ID NO: 13185 - protein, 7 aa, Artificial Sequence
  Synthetic polypeptide
DQPGQYG

SEQ ID NO: 13186 - protein, 162 aa, Artificial Sequence
  Synthetic polypeptide
GQEFETSLVNMDEFDKLRPLCYTNTDIFLLCFSVVSPSSFQNVSEKWVPEIRCHCPKAPIILVGTQSDLREDVKVLIELDKCKEKPVPEEAAKLCAEEIKAASYIECSALTQKNLKEVFDAAIVAGIQYSDTQQQPKKSKSRTPDKMKNLSKSWWKKYCCFV

SEQ ID NO: 13187 - protein, 30 aa, Artificial Sequence
  Synthetic polypeptide
HFGFWEAEMGGLLEAKSLRPAWSIWMNLTS

SEQ ID NO: 13188 - protein, 39 aa, Artificial Sequence; identical to SEQ ID NO: 5860
  Synthetic polypeptide

SEQ ID NO: 13189 - protein, 1043 aa, Artificial Sequence; identical to SEQ ID NO: 1539
  Synthetic polypeptide

SEQ ID NO: 13190 - protein, 974 aa, Artificial Sequence; identical to SEQ ID NO: 1551
  Synthetic polypeptide

SEQ ID NO: 13191 - protein, 975 aa, Artificial Sequence; identical to SEQ ID NO: 1549
  Synthetic polypeptide

SEQ ID NO: 13192 - protein, 470 aa, Artificial Sequence; identical to SEQ ID NO: 2096
  Synthetic polypeptide

SEQ ID NO: 13193 - protein, 940 aa, Artificial Sequence; identical to SEQ ID NO: 1569
  Synthetic polypeptide

SEQ ID NO: 13194 - protein, 30 aa, Artificial Sequence; identical to SEQ ID NO: 6522
  Synthetic polypeptide

SEQ ID NO: 13195 - protein, 24 aa, Artificial Sequence
  Synthetic polypeptide
AGHGGSRLYSQHFGRARRADHEKR

SEQ ID NO: 13196 - protein, 1057 aa, Artificial Sequence
  Synthetic polypeptide
GRARWLTPVLPALWEGEAGGSRETLMDSTTATAELGWMVHPPSGWEEVSGYDENMNTIRTYQVCNVFESSQNNWLRTKFIRRRGAHRIHVEMKFSVRDCSSIPSVPGSCKETFNLYYYEADFDSATKTFPNWMENPWVKVDTIAADESFSQVDLGGRVMKINTEVRSFGPVSRSGFYLAFQDYGGCMSLIAVRVFYRKCPRIIQNGAIFQETLSGAESTSLVAARGSCIANAEEVDVPIKLYCNGDGEWLVPIGRCMCKAGFEAVENGTVCRGCPSGTFKANQGDEACTHCPINSRTTSEGATNCVCRNGYYRADLDPLDMPCTTIPSAPQAVISSVNETSLMLEWTPPRDSGGREDLVYNIICKSCGSGRGACTRCGDNVQYAPRQLGLTEPRIYISDLLAHTQYTFEIQAVNGVTDQSPFSPQFASVNITTNQAAPSAVSIMHQVSRTVDSITLSWSQPDQPNGVILDYELQYYEKELSEYNATAIKSPTNTVTVQGLKAGAIYVFQVRARTVAGYGRYSGKMYFQTMTEAEYQTSIQEKLPLIIGSSAAGLVFLIAVVVIAIVCNRRGFERADSEYTDKLQHYTSGHMTPGMKIYIDPFTYEDPNEAVREFAKEIDISCVKIEQVIGAGEFGEVCSGHLKLPGKREIFVAIKTLKSGYTEKQRRDFLSEASIMGQFDHPNVIHLEGVVTKSTPVMIITEFMENGSLDSFLRQNDGQFTVIQLVGMLRGIAAGMKYLADMNYVHRDLAARNILVNSNLVCKVSDFGLSRFLEDDTSDPTYTSALGGKIPIRWTAPEAIQYRKFTSASDVWSYGIVMWEVMSYGERPYWDMTNQDVINAIEQDYRLPPPMDCPSALHQLMLDCWQKDRNHRPKFGQIVNTLDKMIRNPNSLKAMAPLSSGINLPLLDRTIPDYTSFNTVDEWLEAIKMGQYKESFANAGFTSFDVVSQMMMEDILRVGVTLAGHQKKILNSIQVMRAQMNQIQSVEGQPLARRPRATGRTKRCQPRDVTKKTCNSNDGKKKGMGKKKTDPGRGREIQGIFFKEDSHKESNDCSCGG

SEQ ID NO: 13197 - protein, 988 aa, Artificial Sequence
  Synthetic polypeptide
GRARWLTPVLPALWEGEAGGSRETLMDSTTATAELGWMVHPPSGWEEVSGYDENMNTIRTYQVCNVFESSQNNWLRTKFIRRRGAHRIHVEMKFSVRDCSSIPSVPGSCKETFNLYYYEADFDSATKTFPNWMENPWVKVDTIAADESFSQVDLGGRVMKINTEVRSFGPVSRSGFYLAFQDYGGCMSLIAVRVFYRKCPRIIQNGAIFQETLSGAESTSLVAARGSCIANAEEVDVPIKLYCNGDGEWLVPIGRCMCKAGFEAVENGTVCRGCPSGTFKANQGDEACTHCPINSRTTSEGATNCVCRNGYYRADLDPLDMPCTTIPSAPQAVISSVNETSLMLEWTPPRDSGGREDLVYNIICKSCGSGRGACTRCGDNVQYAPRQLGLTEPRIYISDLLAHTQYTFEIQAVNGVTDQSPFSPQFASVNITTNQAAPSAVSIMHQVSRTVDSITLSWSQPDQPNGVILDYELQYYEKELSEYNATAIKSPTNTVTVQGLKAGAIYVFQVRARTVAGYGRYSGKMYFQTMTEAEYQTSIQEKLPLIIGSSAAGLVFLIAVVVIAIVCNRRGFERADSEYTDKLQHYTSGHMTPGMKIYIDPFTYEDPNEAVREFAKEIDISCVKIEQVIGAGEFGEVCSGHLKLPGKREIFVAIKTLKSGYTEKQRRDFLSEASIMGQFDHPNVIHLEGVVTKSTPVMIITEFMENGSLDSFLRQNDGQFTVIQLVGMLRGIAAGMKYLADMNYVHRDLAARNILVNSNLVCKVSDFGLSRFLEDDTSDPTYTSALGGKIPIRWTAPEAIQYRKFTSASDVWSYGIVMWEVMSYGERPYWDMTNQDVINAIEQDYRLPPPMDCPSALHQLMLDCWQKDRNHRPKFGQIVNTLDKMIRNPNSLKAMAPLSSGINLPLLDRTIPDYTSFNTVDEWLEAIKMGQYKESFANAGFTSFDVVSQMMMEDILRVGVTLAGHQKKILNSIQVMRAQMNQIQSVEV

SEQ ID NO: 13198 - protein, 989 aa, Artificial Sequence
  Synthetic polypeptide
GRARWLTPVLPALWEGEAGGSRETLMDSTTATAELGWMVHPPSGWEEVSGYDENMNTIRTYQVCNVFESSQNNWLRTKFIRRRGAHRIHVEMKFSVRDCSSIPSVPGSCKETFNLYYYEADFDSATKTFPNWMENPWVKVDTIAADESFSQVDLGGRVMKINTEVRSFGPVSRSGFYLAFQDYGGCMSLIAVRVFYRKCPRIIQNGAIFQETLSGAESTSLVAARGSCIANAEEVDVPIKLYCNGDGEWLVPIGRCMCKAGFEAVENGTVCRGCPSGTFKANQGDEACTHCPINSRTTSEGATNCVCRNGYYRADLDPLDMPCTTIPSAPQAVISSVNETSLMLEWTPPRDSGGREDLVYNIICKSCGSGRGACTRCGDNVQYAPRQLGLTEPRIYISDLLAHTQYTFEIQAVNGVTDQSPFSPQFASVNITTNQAAPSAVSIMHQVSRTVDSITLSWSQPDQPNGVILDYELQYYEKELSEYNATAIKSPTNTVTVQGLKAGAIYVFQVRARTVAGYGRYSGKMYFQTMTEAEYQTSIQEKLPLIIGSSAAGLVFLIAVVVIAIVCNRRRGFERADSEYTDKLQHYTSGHMTPGMKIYIDPFTYEDPNEAVREFAKEIDISCVKIEQVIGAGEFGEVCSGHLKLPGKREIFVAIKTLKSGYTEKQRRDFLSEASIMGQFDHPNVIHLEGVVTKSTPVMIITEFMENGSLDSFLRQNDGQFTVIQLVGMLRGIAAGMKYLADMNYVHRDLAARNILVNSNLVCKVSDFGLSRFLEDDTSDPTYTSALGGKIPIRWTAPEAIQYRKFTSASDVWSYGIVMWEVMSYGERPYWDMTNQDVINAIEQDYRLPPPMDCPSALHQLMLDCWQKDRNHRPKFGQIVNTLDKMIRNPNSLKAMAPLSSGINLPLLDRTIPDYTSFNTVDEWLEAIKMGQYKESFANAGFTSFDVVSQMMMEDILRVGVTLAGHQKKILNSIQVMRAQMNQIQSVEV

SEQ ID NO: 13199 - protein, 484 aa, Artificial Sequence
  Synthetic polypeptide
GRARWLTPVLPALWEGEAGGSRETLMDSTTATAELGWMVHPPSGWEEVSGYDENMNTIRTYQVCNVFESSQNNWLRTKFIRRRGAHRIHVEMKFSVRDCSSIPSVPGSCKETFNLYYYEADFDSATKTFPNWMENPWVKVDTIAADESFSQVDLGGRVMKINTEVRSFGPVSRSGFYLAFQDYGGCMSLIAVRVFYRKCPRIIQNGAIFQETLSGAESTSLVAARGSCIANAEEVDVPIKLYCNGDGEWLVPIGRCMCKAGFEAVENGTVCRGCPSGTFKANQGDEACTHCPINSRTTSEGATNCVCRNGYYRADLDPLDMPCTTIPSAPQAVISSVNETSLMLEWTPPRDSGGREDLVYNIICKSCGSGRGACTRCGDNVQYAPRQLGLTEPRIYISDLLAHTQYTFEIQAVNGVTDQSPFSPQFASVNITTNQAAPSAVSIMHQVSRTVDSITLSWSQPDQPNGVILDYELQYYEKMKTQRS

SEQ ID NO: 13200 - protein, 954 aa, Artificial Sequence
  Synthetic polypeptide
GRARWLTPVLPALWEGEAGGSRETLMDSTTATAELGWMVHPPSGWEEVSGYDENMNTIRTYQVCNVFESSQNNWLRTKFIRRRGAHRIHVEMKFSVRDCSSIPSVPGSCKETFNLYYYEADFDSATKTFPNWMENPWVKVDTIAADESFSQVDLGGRVMKINTEVRSFGPVSRSGFYLAFQDYGGCMSLIAVRVFYRKCPRIIQNGAIFQETLSGAESTSLVAARGSCIANAEEVDVPIKLYCNGDGEWLVPIGRCMCKAGFEAVENGTVCRGCPSGTFKANQGDEACTHCPINSRTTSEGATNCVCRNGYYRADLDPLDMPCTTIPSAPQAVISSVNETSLMLEWTPPRDSGGREDLVYNIICKSCGSGRGACTRCGDNVQYAPRQLGLTEPRIYISDLLAHTQYTFEIQAVNGVTDQSPFSPQFASVNITTNQAAPSAVSIMHQVSRTVDSITLSWSQPDQPNGVILDYELQYYEKQELSEYNATAIKSPTNTVTVQGLKAGAIYVFQVRARTVAGYGRYSGKMYFQTMTEAEYQTSIQEKLPLIIGSSAAGLVFLIAVVVIAIVCNRRGFERADSEYTDKLQHYTSGHMTPGMKIYIDPFTYEDPNEAVREFAKEIDISCVKIEQVIGAGEFGEVCSGHLKLPGKREIFVAIKTLKSGYTEKQRRDFLSEASIMGQFDHPNVIHLEGVVTKSTPVMIITEFMENGSLDSFLRQNDGQFTVIQLVGMLRGIAAGMKYLADMNYVHRDLAARNILVNSNLVCKVSDFGLSRFLEDDTSDPTYTSALGGKIPIRWTAPEAIQYRKFTSASDVWSYGIVMWEVMSYGERPYWDMTNQDVINAIEQDYRLPPPMDCPSALHQLMLDCWQKDRNHRPKFGQIVNTLDKMIRNPNSLKAMAPLSSGINLPLLDRTIPDYTSFNTVDEWLEAIKMGQYKESFANAGFTSFDVVSQMMME

SEQ ID NO: 13201 - protein, 32 aa, Artificial Sequence
  Synthetic polypeptide
PGTVAHACTPSTLGGRGGRITRNANGLHYSDC

SEQ ID NO: 13202 - protein, 43 aa, Artificial Sequence; identical to SEQ ID NO: 5551
  Synthetic polypeptide

SEQ ID NO: 13203 - protein, 35 aa, Artificial Sequence; identical to SEQ ID NO: 6132
  Synthetic polypeptide

SEQ ID NO: 13204 - protein, 1036 aa, Artificial Sequence
  Synthetic polypeptide
HETLMDSTTATAELGWMVHPPSGWEEVSGYDENMNTIRTYQVCNVFESSQNNWLRTKFIRRRGAHRIHVEMKFSVRDCSSIPSVPGSCKETFNLYYYEADFDSATKTFPNWMENPWVKVDTIAADESFSQVDLGGRVMKINTEVRSFGPVSRSGFYLAFQDYGGCMSLIAVRVFYRKCPRIIQNGAIFQETLSGAESTSLVAARGSCIANAEEVDVPIKLYCNGDGEWLVPIGRCMCKAGFEAVENGTVCRGCPSGTFKANQGDEACTHCPINSRTTSEGATNCVCRNGYYRADLDPLDMPCTTIPSAPQAVISSVNETSLMLEWTPPRDSGGREDLVYNIICKSCGSGRGACTRCGDNVQYAPRQLGLTEPRIYISDLLAHTQYTFEIQAVNGVTDQSPFSPQFASVNITTNQAAPSAVSIMHQVSRTVDSITLSWSQPDQPNGVILDYELQYYEKELSEYNATAIKSPTNTVTVQGLKAGAIYVFQVRARTVAGYGRYSGKMYFQTMTEAEYQTSIQEKLPLIIGSSAAGLVFLIAVVVIAIVCNRRGFERADSEYTDKLQHYTSGHMTPGMKIYIDPFTYEDPNEAVREFAKEIDISCVKIEQVIGAGEFGEVCSGHLKLPGKREIFVAIKTLKSGYTEKQRRDFLSEASIMGQFDHPNVIHLEGVVTKSTPVMIITEFMENGSLDSFLRQNDGQFTVIQLVGMLRGIAAGMKYLADMNYVHRDLAARNILVNSNLVCKVSDFGLSRFLEDDTSDPTYTSALGGKIPIRWTAPEAIQYRKFTSASDVWSYGIVMWEVMSYGERPYWDMTNQDVINAIEQDYRLPPPMDCPSALHQLMLDCWQKDRNHRPKFGQIVNTLDKMIRNPNSLKAMAPLSSGINLPLLDRTIPDYTSFNTVDEWLEAIKMGQYKESFANAGFTSFDVVSQMMMEDILRVGVTLAGHQKKILNSIQVMRAQMNQIQSVEGQPLARRPRATGRTKRCQPRDVTKKTCNSNDGKKKGMGKKKTDPGRGREIQGIFFKEDSHKESNDCSCGG

SEQ ID NO: 13205 - protein, 967 aa, Artificial Sequence
  Synthetic polypeptide
HETLMDSTTATAELGWMVHPPSGWEEVSGYDENMNTIRTYQVCNVFESSQNNWLRTKFIRRRGAHRIHVEMKFSVRDCSSIPSVPGSCKETFNLYYYEADFDSATKTFPNWMENPWVKVDTIAADESFSQVDLGGRVMKINTEVRSFGPVSRSGFYLAFQDYGGCMSLIAVRVFYRKCPRIIQNGAIFQETLSGAESTSLVAARGSCIANAEEVDVPIKLYCNGDGEWLVPIGRCMCKAGFEAVENGTVCRGCPSGTFKANQGDEACTHCPINSRTTSEGATNCVCRNGYYRADLDPLDMPCTTIPSAPQAVISSVNETSLMLEWTPPRDSGGREDLVYNIICKSCGSGRGACTRCGDNVQYAPRQLGLTEPRIYISDLLAHTQYTFEIQAVNGVTDQSPFSPQFASVNITTNQAAPSAVSIMHQVSRTVDSITLSWSQPDQPNGVILDYELQYYEKELSEYNATAIKSPTNTVTVQGLKAGAIYVFQVRARTVAGYGRYSGKMYFQTMTEAEYQTSIQEKLPLIIGSSAAGLVFLIAVVVIAIVCNRRGFERADSEYTDKLQHYTSGHMTPGMKIYIDPFTYEDPNEAVREFAKEIDISCVKIEQVIGAGEFGEVCSGHLKLPGKREIFVAIKTLKSGYTEKQRRDFLSEASIMGQFDHPNVIHLEGVVTKSTPVMIITEFMENGSLDSFLRQNDGQFTVIQLVGMLRGIAAGMKYLADMNYVHRDLAARNILVNSNLVCKVSDFGLSRFLEDDTSDPTYTSALGGKIPIRWTAPEAIQYRKFTSASDVWSYGIVMWEVMSYGERPYWDMTNQDVINAIEQDYRLPPPMDCPSALHQLMLDCWQKDRNHRPKFGQIVNTLDKMIRNPNSLKAMAPLSSGINLPLLDRTIPDYTSFNTVDEWLEAIKMGQYKESFANAGFTSFDVVSQMMMEDILRVGVTLAGHQKKILNSIQVMRAQMNQIQSVEV

SEQ ID NO: 13206 - protein, 968 aa, Artificial Sequence
  Synthetic polypeptide
HETLMDSTTATAELGWMVHPPSGWEEVSGYDENMNTIRTYQVCNVFESSQNNWLRTKFIRRRGAHRIHVEMKFSVRDCSSIPSVPGSCKETFNLYYYEADFDSATKTFPNWMENPWVKVDTIAADESFSQVDLGGRVMKINTEVRSFGPVSRSGFYLAFQDYGGCMSLIAVRVFYRKCPRIIQNGAIFQETLSGAESTSLVAARGSCIANAEEVDVPIKLYCNGDGEWLVPIGRCMCKAGFEAVENGTVCRGCPSGTFKANQGDEACTHCPINSRTTSEGATNCVCRNGYYRADLDPLDMPCTTIPSAPQAVISSVNETSLMLEWTPPRDSGGREDLVYNIICKSCGSGRGACTRCGDNVQYAPRQLGLTEPRIYISDLLAHTQYTFEIQAVNGVTDQSPFSPQFASVNITTNQAAPSAVSIMHQVSRTVDSITLSWSQPDQPNGVILDYELQYYEKELSEYNATAIKSPTNTVTVQGLKAGAIYVFQVRARTVAGYGRYSGKMYFQTMTEAEYQTSIQEKLPLIIGSSAAGLVFLIAVVVIAIVCNRRRGFERADSEYTDKLQHYTSGHMTPGMKIYIDPFTYEDPNEAVREFAKEIDISCVKIEQVIGAGEFGEVCSGHLKLPGKREIFVAIKTLKSGYTEKQRRDFLSEASIMGQFDHPNVIHLEGVVTKSTPVMIITEFMENGSLDSFLRQNDGQFTVIQLVGMLRGIAAGMKYLADMNYVHRDLAARNILVNSNLVCKVSDFGLSRFLEDDTSDPTYTSALGGKIPIRWTAPEAIQYRKFTSASDVWSYGIVMWEVMSYGERPYWDMTNQDVINAIEQDYRLPPPMDCPSALHQLMLDCWQKDRNHRPKFGQIVNTLDKMIRNPNSLKAMAPLSSGINLPLLDRTIPDYTSFNTVDEWLEAIKMGQYKESFANAGFTSFDVVSQMMMEDILRVGVTLAGHQKKILNSIQVMRAQMNQIQSVEV

SEQ ID NO: 13207 - protein, 463 aa, Artificial Sequence
  Synthetic polypeptide
HETLMDSTTATAELGWMVHPPSGWEEVSGYDENMNTIRTYQVCNVFESSQNNWLRTKFIRRRGAHRIHVEMKFSVRDCSSIPSVPGSCKETFNLYYYEADFDSATKTFPNWMENPWVKVDTIAADESFSQVDLGGRVMKINTEVRSFGPVSRSGFYLAFQDYGGCMSLIAVRVFYRKCPRIIQNGAIFQETLSGAESTSLVAARGSCIANAEEVDVPIKLYCNGDGEWLVPIGRCMCKAGFEAVENGTVCRGCPSGTFKANQGDEACTHCPINSRTTSEGATNCVCRNGYYRADLDPLDMPCTTIPSAPQAVISSVNETSLMLEWTPPRDSGGREDLVYNIICKSCGSGRGACTRCGDNVQYAPRQLGLTEPRIYISDLLAHTQYTFEIQAVNGVTDQSPFSPQFASVNITTNQAAPSAVSIMHQVSRTVDSITLSWSQPDQPNGVILDYELQYYEKMKTQRS

SEQ ID NO: 13208 - protein, 933 aa, Artificial Sequence
  Synthetic polypeptide
HETLMDSTTATAELGWMVHPPSGWEEVSGYDENMNTIRTYQVCNVFESSQNNWLRTKFIRRRGAHRIHVEMKFSVRDCSSIPSVPGSCKETFNLYYYEADFDSATKTFPNWMENPWVKVDTIAADESFSQVDLGGRVMKINTEVRSFGPVSRSGFYLAFQDYGGCMSLIAVRVFYRKCPRIIQNGAIFQETLSGAESTSLVAARGSCIANAEEVDVPIKLYCNGDGEWLVPIGRCMCKAGFEAVENGTVCRGCPSGTFKANQGDEACTHCPINSRTTSEGATNCVCRNGYYRADLDPLDMPCTTIPSAPQAVISSVNETSLMLEWTPPRDSGGREDLVYNIICKSCGSGRGACTRCGDNVQYAPRQLGLTEPRIYISDLLAHTQYTFEIQAVNGVTDQSPFSPQFASVNITTNQAAPSAVSIMHQVSRTVDSITLSWSQPDQPNGVILDYELQYYEKQELSEYNATAIKSPTNTVTVQGLKAGAIYVFQVRARTVAGYGRYSGKMYFQTMTEAEYQTSIQEKLPLIIGSSAAGLVFLIAVVVIAIVCNRRGFERADSEYTDKLQHYTSGHMTPGMKIYIDPFTYEDPNEAVREFAKEIDISCVKIEQVIGAGEFGEVCSGHLKLPGKREIFVAIKTLKSGYTEKQRRDFLSEASIMGQFDHPNVIHLEGVVTKSTPVMIITEFMENGSLDSFLRQNDGQFTVIQLVGMLRGIAAGMKYLADMNYVHRDLAARNILVNSNLVCKVSDFGLSRFLEDDTSDPTYTSALGGKIPIRWTAPEAIQYRKFTSASDVWSYGIVMWEVMSYGERPYWDMTNQDVINAIEQDYRLPPPMDCPSALHQLMLDCWQKDRNHRPKFGQIVNTLDKMIRNPNSLKAMAPLSSGINLPLLDRTIPDYTSFNTVDEWLEAIKMGQYKESFANAGFTSFDVVSQMMME

SEQ ID NO: 13209 - protein, 207 aa, Artificial Sequence
  Synthetic polypeptide
NCYGHTVPLSDGGKAFCIIYSVIGIPFTLLFLTAVVQRITVHVTRRPVLYFHIRWGFSKQVVAIVHAVLLGFVTVSCFFFIPAAVFSVLEDDWNFLESFYFCFISLSTIGLGDYVPGEGYNQKFRELYKIGITCYLLLGLIAMLVVLETFCELHELKKFRKMFYVKKDKDEDQVHIIEHDQLSFSSITDQAAGMKEDQKQNEPFVAT

SEQ ID NO: 13210 - protein, 219 aa, Artificial Sequence
  Synthetic polypeptide
NCYGHTVPLSDGGKAFCIIYSVIGIPFTLLFLTAVVQRITVHVTRRPVLYFHIRWGFSKQVVAIVHAVLLGFVTVSCFFFIPAAVFSVLEDDWNFLESFYFCFISLSTIGLGDYVPGEGYNQKFRELYKIGITCYLLLGLIAMLVVLETFCELHELKKFRKMFYVKKDKDEDQVHIIEHDQLSFSSITDQAAGMKEDQKQNEPFVATQSSACVDGPANH

SEQ ID NO: 13211 - protein, 58 aa, Artificial Sequence
  Synthetic polypeptide
SEKSMRKQPSPDTESAGALIRDFPATKTVMATPCPCQMEVRPSASSTPSLAFPSPSCS

SEQ ID NO: 13212 - protein, 20 aa, Artificial Sequence
  Synthetic polypeptide
SETSQPLKLLWPHRALVRWR

SEQ ID NO: 13213 - protein, 12 aa, Artificial Sequence
  Synthetic polypeptide
AGARSTLYLGCS

SEQ ID NO: 13214 - protein, 75 aa, Artificial Sequence
  Synthetic polypeptide
GWSKINFIPGLQLVNPHTHWTIQKGSFLGEFHPWGHHPNLPMRNTGSRMLKQNLNLLFQKLPKNAQMLSRRKLLT

SEQ ID NO: 13215 - protein, 79 aa, Artificial Sequence
  Synthetic polypeptide
GWSKINFIPGLQLVNPHTHWTIQKGSFLGEFHPWGHHPNLPMRNTGSRMLKQRMMENLNLLFQKLPKNAQMLSRRKLLT

SEQ ID NO: 13216 - protein, 203 aa, Artificial Sequence
  Synthetic polypeptide
MEQDQLYTWAAVSQPTHSLDYSEGQFPRRVPSMGPPSKPPDEEHRLEDAETEDDGESQSAVSETPQKRSDAVQKEVVDMKSEGQATVIQQLEQTIEDLRTKIAELERQYPALDTEVASGHQGLENGVTASGDVCLEALRLEEKEVRHHRILEAKSIQTSPTEEGGVLTLPPVDGLPGRPPCPPGAESGPQTKFCSEISLIVSP

SEQ ID NO: 13217 - protein, 1130 aa, Artificial Sequence
  Synthetic polypeptide
MEQDQLYTWAAVSQPTHSLDYSEGQFPRRVPSMGPPSKPPDEEHRLEDAETESQSAVSETPQKRSDAVQKEVVDMKSEGQATVIQQLEQTIEDLRTKIAELERQYPALDTEVASGHQGLENGVTASGDVCLEALRLEEKEVRHHRILEAKSIQTSPTEEGGVLTLPPVDGLPGRPPCPPGAESGPQTKFCSEISLIVSPRRISVQLDSHQPTQSISQPPPPPSLLWSAGQGQPGSQPPHSISTEFQTSHEHSVSSAFKNSCNIPSPPPLPCTESSSSMPGLGMVPPPPPPLPGMTVPTLPSTAIPQPPPLQGTEMLPPPPPPLPGAGIPPPPPLPGAGILPLPPLPGAGIPPPPPLPGAAIPPPPPLPGAGIPLPPPLPGAGIPPPPPLPGAGIPPPPPLPGAGIPPPPPLPGAGIPPPPPLPGAGIPPPPPLPGAGIPPPPPLPGAGIPPPPPLPGAGIPPPPPLPGAGIPPPPPLPGAGIPPPPPLPGAGIPPPPPLPGAGIPPPPPLPGVGIPPPPPLPGAGIPPPPPLPGAGIPPPPPLPGAGIPPPPPLPRVGIPPPPPLPGAGIPPPPPLPGAGIPPPPPLPGVGIPPPPPLPGVGIPPPPPLPGAGIPPPPPLPGMGIPPAPAPPLPPPGTGIPPPPLLPVSGPPLLPQVGSSTLPTPQVCGFLPPPLPSGLFGLGMNQDKGSRKQPIEPCRPMKPLYWTRIQLHSKRDSSTSLIWEKIEEPSIDCHEFEELFSKTAVKERKKPISDTISKTKAKQVVKLLSNKRSQAVGILMSSLHLDMKDIQHAVVNLDNSVVDLETLQALYENRAQSDELEKIEKHGRSSKDKENAKSLDKPEQFLYELSLIPNFSERVFCILFQSTFSESICSIRRKLELLQKLCETLKNGPGVMQVLGLVLAFGNYMNGGNKTRGQADGFGLDILPKLKDVKSSDNSRSLLSYIVSYYLRNFDEDAGKEQCLFPLPEPQDLFQASQMKFEDFQKDLRKLKKDLKACEVEAGKVYQVSSKEHMQPFKENMEQFIIQAKIDQEAEENSLTETHKCFLETTAYFFMKPKLGEKEVSPNAFFSIWHEFSSDFKDFWKKENKLLLQERVKEAEEVCRQKKGKSLYKIKPRHDSGIKAKISMKT

SEQ ID NO: 13218 - protein, 55 aa, Artificial Sequence
  Synthetic polypeptide
EPSWLSDQQITKRPVKLKQGKYTRSPQKSICSLSRKTWNNLLFKPKLTKRQRKIH

SEQ ID NO: 13219 - protein, 148 aa, Artificial Sequence
  Synthetic polypeptide
LGAILVIRSTDHKKACEVEAGKVYQVSSKEHMQPFKENMEQFIIQAKIDQEAEENSLTETHKCFLETTAYFFMKPKLGEKEVSPNAFFSIWHEFSSDFKDFWKKENKLLLQERVKEAEEVCRQKKGKSLYKIKPRHDSGIKAKISMKT

SEQ ID NO: 13220 - protein, 16 aa, Artificial Sequence
  Synthetic polypeptide
LRSHLGYQINRSQKGL

SEQ ID NO: 13221 - protein, 24 aa, Artificial Sequence
  Synthetic polypeptide
EPSWLSDQQITKRPKLTKRQRKIH

SEQ ID NO: 13222 - protein, 117 aa, Artificial Sequence
  Synthetic polypeptide
LGAILVIRSTDHKKAKIDQEAEENSLTETHKCFLETTAYFFMKPKLGEKEVSPNAFFSIWHEFSSDFKDFWKKENKLLLQERVKEAEEVCRQKKGKSLYKIKPRHDSGIKAKISMKT

SEQ ID NO: 13223 - protein, 17 aa, Artificial Sequence
  Synthetic polypeptide
LRSHLGYQINRSQKGQN

SEQ ID NO: 13224 - protein, 134 aa, Artificial Sequence
  Synthetic polypeptide
ACEVEAGKVYQVSSKEHMQPFKENMEQFIIQAKIDQEAEENSLTETHKCFLETTAYFFMKPKLGEKEVSPNAFFSIWHEFSSDFKDFWKKENKLLLQERVKEAEEVCRQKKGKSLYKIKPRHDSGIKAKISMKT

SEQ ID NO: 13225 - protein, 3 aa, Artificial Sequence
  Synthetic polypeptide
MSL

SEQ ID NO: 13226 - protein, 51 aa, Artificial Sequence
  Synthetic polypeptide
PSRRRTVDEPVKLKQGKYTRSPQKSICSLSRKTWNNLLFKPKLTKRQRKIH

SEQ ID NO: 13227 - protein, 42 aa, Artificial Sequence
  Synthetic polypeptide
ALSSLLGYQIDCPGIAVLVFESPLLYFRMTPKPKRTWMCKYN

SEQ ID NO: 13228 - protein, 272 aa, Artificial Sequence
  Synthetic polypeptide
PQSPSAPGCVNTTEVDIKKSSRMRNPHKTRKSVYGLQNDIRSHSPTHTPTPETKPPTEDELQQQIKYWQIQLDRHRLKMSKVADSLLSYTEQYLEYDPFLLPPDPSNPWLSDDTTFWELEASKEPSQQRVKRWGFGMDEALKDPVGREQFLKFLESEFSSENLRFWLAVEDLKKRPIKEVPSRVQEIWQEFLAPGAPSAINLDSKSYDKTTQNVKEPGRYTFEDAQEHIYKLMKSDSYPRFIRSSAYQELLQAKKKGKSLTSKRLTSLAQSY

SEQ ID NO: 13229 - protein, 280 aa, Artificial Sequence
  Synthetic polypeptide
PQSPSAPGCVNTTEVDIKKSSRMRNPHKTRKSVYGLQNDIRSHSPTHTPTPETKPPTEDELQQQIKYWQIQLDRHRLKMSKVADSLLSYTEQYLEYDPFLLPPDPSNPWLSDDTTFWELEASKEPSQQRVKRWGFGMDEALKDPVGREQFLKFLESEFSSENLRFWLAVEDLKKRPIKEVPSRVQEIWQEFLAPGAPSAINLDSKSYDKTTQNVKEPGRYTFEDAQEHIYKLMKSDSYPRFIRSSAYQELLQAKKKGRNIPIFPCHKNCTPTLRASTNLL

SEQ ID NO: 13230 - protein, 290 aa, Artificial Sequence
  Synthetic polypeptide
PQSPSAPGCVNTTEVDIKKSSRMRNPHKTRKSVYGLQNDIRSHSPTHTPTPETKPPTEDELQQQIKYWQIQLDRHRLKMSKVADSLLSYTEQYLEYDPFLLPPDPSNPWLSDDTTFWELEASKEPSQQRVKRWGFGMDEALKDPVGREQFLKFLESEFSSENLRFWLAVEDLKKRPIKEVPSRVQEIWQEFLAPGAPSAINLDSKSYDKTTQNVKEPGRYTFEDAQEHIYKLMKSDSYPRFIRSSAYQELLQAKKKSGNSMDRRTSFEKFAQNVGKSLTSKRLTSLAQSY

SEQ ID NO: 13231 - protein, 298 aa, Artificial Sequence
  Synthetic polypeptide
PQSPSAPGCVNTTEVDIKKSSRMRNPHKTRKSVYGLQNDIRSHSPTHTPTPETKPPTEDELQQQIKYWQIQLDRHRLKMSKVADSLLSYTEQYLEYDPFLLPPDPSNPWLSDDTTFWELEASKEPSQQRVKRWGFGMDEALKDPVGREQFLKFLESEFSSENLRFWLAVEDLKKRPIKEVPSRVQEIWQEFLAPGAPSAINLDSKSYDKTTQNVKEPGRYTFEDAQEHIYKLMKSDSYPRFIRSSAYQELLQAKKKSGNSMDRRTSFEKFAQNVGRNIPIFPCHKNCTPTLRASTNLL

SEQ ID NO: 13232 - protein, 35 aa, Artificial Sequence
  Synthetic polypeptide
SSRLSDRLSWYCSACVRVTLTLLQNDPKAQAHLDV

SEQ ID NO: 13233 - protein, 26 aa, Artificial Sequence
  Synthetic polypeptide
LEQCLHVVASLCGRSSDNSSDQDFKI

SEQ ID NO: 13234 - protein, 71 aa, Artificial Sequence; identical to SEQ ID NO: 4151
  Synthetic polypeptide

SEQ ID NO: 13235 - protein, 512 aa, Artificial Sequence
  Synthetic polypeptide
AEIMPWHSSLGNKNGTLSQRKKRLFSGDIAPLMQEKVLSAVTYAVDDEEAAEVNANEQPEAPKLVLQSLFSLIRGEVEQLDSRALPLCLHQIAESYFQEEDYEKAMKFIQLERLYHEQLLANLSAIQEQWETKWKTVQPHTVTALRNSEKGFNGEDFERLTKICATHQDPLLSKHKIAAVEKSQERKCSTQLLVSEDPKEGGATTKESESKTCLGTESSKESQHTVEPLGSSPCCHQMDVQTDSPSLSVTAGKDHMEELLCSAEATLALHTQSSETAGSPSGPDSSEDACEDDSRLQLAQTEACQDVARIEGIAEDPKVFLSSKSKTEPLISPGCDRIPPALISEGKYSQAQRKELRLPLRDASEALPTDQLENNELNELQQPDLTDSDGKSPQAQADSDGSENVLCGNNQISDLGILLPEVCMAPEEKGDKDDQLNKETEDYLNSLLEGCLKDTEDSLSYEDNQDDDSDLLQDLSPEEASYSLQENLPSDESCLSLDDLAKRIEIAEVNQR

SEQ ID NO: 13236 - protein, 621 aa, Artificial Sequence
  Synthetic polypeptide
AEIMPWHSSLGNKNGTLSQRKKRLFSGDIAPLMQEKVLSAVTYAVDDEEAAEVNANEQPEAPKLVLQSLFSLIRGEVEQLDSRALPLCLHQIAESYFQEEDYEKAMKFIQLERLYHEQLLANLSAIQEQWETKWKTVQPHTVTALRNSEKGFNGEDFERLTKICATHQDPLLSKHKIAAVEKSQERKCSTQLLVSEDPKEGGATTKESESKTCLGTESSKESQHTVEPLGSSPCCHQMDVQTDSPSLSVTAGKDHMEELLCSAEATLALHTQSSETAGSPSGPDSSEDACEDDSRLQLAQTEACQDVARIEGIAEDPKVFLSSKSKTEPLISPGCDRIPPALISEGKYSQAQRKELRLPLRDASEALPTDQLENNELNELQQPDLTDSDGKSPQAQADSDGSENVLCGNNQISDLGILLPEVCMAPEEKGDKDDQLNKETEDYLNSLLEGCLKDTEDSLSYEDNQDDDSDLLQDLSPEEASYSLQENLPSDESCLSLDDLAKRIEIAEVVPTEGLVSILKKRNDTVGDHPAQMQHKPSKRRVRFQEIDDSLDQDEVGGGSCILLVLLCIATVFLSVGGTALYCTFGDMESPVCTDFADNMDFYYTKLLQGVAELKHWIYLS

SEQ ID NO: 13237 - protein, 53 aa, Artificial Sequence
  Synthetic polypeptide
SQLLGRLKQENCLNLGGRGCSEPRSCHGTPAWATRTELCLKEKKDFFQEILHL

SEQ ID NO: 13238 - protein, 53 aa, Artificial Sequence
  Synthetic polypeptide
TWEAEAAVSRDHAMALQPGQQERNSVSKKKKTFFRRYCTFNARKSTKRSHICC

SEQ ID NO: 13239 - protein, 11 aa, Artificial Sequence
  Synthetic polypeptide
PTSFLIWLLDF

SEQ ID NO: 13240 - protein, 41 aa, Artificial Sequence
  Synthetic polypeptide
PTSFLIWLLDFKQKHPRKTRPVQKQDNFLSLLPAFVREKRS

SEQ ID NO: 13241 - protein, 19 aa, Artificial Sequence
  Synthetic polypeptide
VWEFDTSLTNKFPHLAVGF

SEQ ID NO: 13242 - protein, 15 aa, Artificial Sequence
  Synthetic polypeptide
YQPDQQVSSFGCWIL

SEQ ID NO: 13243 - protein, 45 aa, Artificial Sequence
  Synthetic polypeptide
YQPDQQVSSFGCWILSKSIQEKQGLFKNKTTSSHCCLHLYVRNAH

SEQ ID NO: 13244 - protein, 85 aa, Artificial Sequence
  Synthetic polypeptide
YQPDQQVSSFGCWILSKSIQEKQGLFKNKTTSSHCCLHLYVRNAHDSKVSNVRAGTGVRENGVESFLCHSLRRISPFIMHCRIQQ

SEQ ID NO: 13245 - protein, 66 aa, Artificial Sequence
  Synthetic polypeptide
DRARWLTPIIPALWEAEAGGSPEIQTGLSGQNDTSQTSSPSASSNISGGIFLFFVANAIIHLFCFS

SEQ ID NO: 13246 - protein, 44 aa, Artificial Sequence
  Synthetic polypeptide
DTNWTLRTKRHQPNQQPLSIQQHKRRHFPFLRGQCHNPPLLLQL

SEQ ID NO: 13247 - protein, 36 aa, Artificial Sequence
  Synthetic polypeptide
SQHFGRPRQADHLRYKLDSQDKTTPAKPAAPQHPAT

SEQ ID NO: 13248 - protein, 44 aa, Artificial Sequence; identical to SEQ ID NO: 13246
  Synthetic polypeptide

SEQ ID NO: 13249 - protein, 28 aa, Artificial Sequence
  Synthetic polypeptide
GGWIMRYKLDSQDKTTPAKPAAPQHPAT

SEQ ID NO: 13250 - protein, 56 aa, Artificial Sequence
  Synthetic polypeptide
SQHFGRLRRVDHEIQTGLSGQNDTSQTSSPSASSNISGGIFLFFVANAIIHLFCFS

SEQ ID NO: 13251 - protein, 4 aa, Artificial Sequence
  Synthetic polypeptide
QVSM

SEQ ID NO: 13252 - protein, 21 aa, Artificial Sequence
  Synthetic polypeptide
SLTGFHVIPTISSIVPESCLL

SEQ ID NO: 13253 - protein, 701 aa, Artificial Sequence; identical to SEQ ID NO: 1757
  Synthetic polypeptide

SEQ ID NO: 13254 - protein, 441 aa, Artificial Sequence; identical to SEQ ID NO: 2156
  Synthetic polypeptide

SEQ ID NO: 13255 - protein, 25 aa, Artificial Sequence
  Synthetic polypeptide
TGHVIIDRFPCDPHYLKHRPGELPA

SEQ ID NO: 13256 - protein, 106 aa, Artificial Sequence; identical to SEQ ID NO: 3546
  Synthetic polypeptide

SEQ ID NO: 13257 - protein, 23 aa, Artificial Sequence
  Synthetic polypeptide
AQEFKTSLDNTQAPGLSGRPWAA

SEQ ID NO: 13258 - protein, 46 aa, Artificial Sequence
  Synthetic polypeptide
AQEFKTSLDNTQAPGLSGRPWAAEDPDRGLVPGSTLPAAPQCPLRL

SEQ ID NO: 13259 - protein, 32 aa, Artificial Sequence
  Synthetic polypeptide
EAETGGLLEPRNSRPAWTTHKLRASVADPGQL

SEQ ID NO: 13260 - protein, 506 aa, Artificial Sequence
  Synthetic polypeptide
EAETGGLLEPRNSRPAWTTHKLRASVADPGQLKILTGDWFQEARSQRHHNAHFGSDLVRASMRRKKSTRGDQAPGHDREAEAAVKEKEEGPEPRLTIDEAPQERLRETEASDPEEASQAQEDPGQGDQQVCAEEADPELEPASGGEQEPRPQQAQTKAASQILENGEEAPGPDPSLDRMLSSSSSVSSLNSSTLSGSQMSLSGDAEAVQVRGSVHFALHYEPGAAELRVHVIQCQGLAAARRRRSDPYVKSYLLPDKQSKRKTAVKKRNLNPVFNETLRYSVPQAELQGRVLSLSVWHRESLGRNIFLGEVEVPLDTWDWGSEPTWLPLQPRVPPSPDDLPSRGLLALSLKYVPAGSEGAGLPPSGELHFWVKEARDLLPLRAGSLDTYVQCFVLPDDSQASRQRTRVVRRSLSPVFNHTMVYDGFGPADLRQACAELSLWDHGALANRQLGGTRLSLGTGSSYGLQVPWMDSTPEEKQLWQALLEQPCEWVDGLLPLRTNLAPRT

SEQ ID NO: 13261 - protein, 518 aa, Artificial Sequence
  Synthetic polypeptide
EAETGGLLEPRNSRPAWTTHKLRASVADPGQLKILTGDWFQEARSQRHHNAHFGSDLVRASMRRKKSTRGDQAPGHDREAEAAVKEKEEGPEPRLTIDEAPQERLRETEGPDFPSPSVPLKASDPEEASQAQEDPGQGDQQVCAEEADPELEPASGGEQEPRPQQAQTKAASQILENGEEAPGPDPSLDRMLSSSSSVSSLNSSTLSGSQMSLSGDAEAVQVRGSVHFALHYEPGAAELRVHVIQCQGLAAARRRRSDPYVKSYLLPDKQSKRKTAVKKRNLNPVFNETLRYSVPQAELQGRVLSLSVWHRESLGRNIFLGEVEVPLDTWDWGSEPTWLPLQPRVPPSPDDLPSRGLLALSLKYVPAGSEGAGLPPSGELHFWVKEARDLLPLRAGSLDTYVQCFVLPDDSQASRQRTRVVRRSLSPVFNHTMVYDGFGPADLRQACAELSLWDHGALANRQLGGTRLSLGTGSSYGLQVPWMDSTPEEKQLWQALLEQPCEWVDGLLPLRTNLAPRT

SEQ ID NO: 13262 - protein, 34 aa, Artificial Sequence
  Synthetic polypeptide
HFERLRREDCLSPGIQDQPGQHTSSGPQWQTLGS

SEQ ID NO: 13263 - protein, 264 aa, Artificial Sequence
  Synthetic polypeptide
ARQSLYVKSYLLPDKQSKRKTAVKKRNLNPVFNETLRYSVPQAELQGRVLSLSVWHRESLGRNIFLGEVEVPLDTWDWGSEPTWLPLQPRVPPSPDDLPSRGLLALSLKYVPAGSEGAGLPPSGELHFWVKEARDLLPLRAGSLDTYVQCFVLPDDSQASRQRTRVVRRSLSPVFNHTMVYDGFGPADLRQACAELSLWDHGALANRQLGGTRLSLGTGSSYGLQVPWMDSTPEEKQLWQALLEQPCEWVDGLLPLRTNLAPRT

SEQ ID NO: 13264 - protein, 35 aa, Artificial Sequence
  Synthetic polypeptide
LGLLVLIFKMGTTALLGGVRLSETIPLRQKLPPPG

SEQ ID NO: 13265 - protein, 44 aa, Artificial Sequence
  Synthetic polypeptide
SRPPRPHLQNGNNSVIGRRAIKRDNPSTSKATSSRISRASARRR

SEQ ID NO: 13266 - protein, 165 aa, Artificial Sequence
  Synthetic polypeptide
EVAEGMAYMERMNYIHRDLRAANILVGERLACKIADFGLARLIKDDEYNPCQGSKFPIKWTAPEAALFGRFTIKSDVWSFGILLTELITKGRIPYPGMNKREVLEQVEQGYHMPCPPGCPASLYEAMEQTWRLDPEERPTFEYLQSFLEDYFTSAEPQYQPGDQT

SEQ ID NO: 13267 - protein, 18 aa, Artificial Sequence
  Synthetic polypeptide
GRAAPPPASAVPPAVPER

SEQ ID NO: 13268 - protein, 20 aa, Artificial Sequence
  Synthetic polypeptide
MGGRPRPLHQLCLQLCLRGS

SEQ ID NO: 13269 - protein, 52 aa, Artificial Sequence
  Synthetic polypeptide
LCDTLLAAPSRRQVTQQCPASTARPSTMTSSGSKCESTLAPGHLRTCPTAPT

SEQ ID NO: 13270 - protein, 39 aa, Artificial Sequence
  Synthetic polypeptide
SSVWWLRAWVQGPDHLGSNPKPTTSSCVILCWLHLRGGK

SEQ ID NO: 13271 - protein, 1414 aa, Artificial Sequence
  Synthetic polypeptide
YFAGCTFEEASDPAVPCEYSQAQYDDFQWEQVRIHPGTRAPADLPHGSYLMVNTSQHAPGQRAHVIFQSLSENDTHCVQFSYFLYSRDGHSPGTLGVYVRVNGGPLGSAVWNMTGSHGRQWHQAELAVSTFWPNEYQVLFEALISPDRRGYMGLDDILLLSYPCAKAPHFSRLGDVEVNAGQNASFQCMAAGRAAEAERFLLQRQSGALVPAAGVRHISHRRFLATFPLAAVSRAEQDLYRCVSQAPRGAGVSNFAELIVKEPPTPIAPPQLLRAGPTYLIIQLNTNSIIGDGPIVRKEIEYRMARGPWAEVHAVSLQTYKLWHLDPDTEYEISVLLTRPGDGGTGRPGPPLISRTKCAEPMRAPKGLAFAEIQARQLTLQWEPLGYNVTRCHTYTVSLCYHYTLGSSHNQTIRECVKTEQGVSRYTIKNLLPYRNVHVRLVLTNPEGRKEGKEVTFQTDEDVPSGIAAESLTFTPLEDMIFLKWEEPQEPNGLITQYEISYQSIESSDPAVNVPGPRRTISKLRNETYHVFSNLHPGTTYLFSVRARTGKGFGQAALTEITTNISAPSFDYADMPSPLGESENTITVLLRPAQGRGAPISVYQVIVEEERARRLRREPGGQDCFPVPLTFEAALARGLVHYFGAELAASSLPEAMPFTVGDNQTYRGFWNPPLEPRKAYLIYFQAASHLKGETRLNCIRIARKAACKESKRPLEVSQRSEEMGLILGICAGGLAVLILLLGAIIVIIRKGKPVNMTKATVNYRQEKTHMMSAVDRSFTDQSTLQEDERLGLSFMDTHGYSTRGDQRSGGVTEASSLLGGSPRRPCGRKGSPYHTGQLHPAVRVADLLQHINQMKTAEGYGFKQEYESFFEGWDATKKKDKVKGSRQEPMPAYDRHRVKLHPMLGDPNADYINANYIDGYHRSNHFIATQGPKPEMVYDFWRMVWQEHCSSIVMITKLVEVGRVKCSRYWPEDSDTYGDIKIMLVKTETLAEYVVRTFALERRGYSARHEVRQFHFTAWPEHGVPYHATGLLAFIRRVKASTPPDAGPIVIHCSAGTGRTGCYIVLDVMLDMAECEGVVDIYNCVKTLCSRRVNMIQTEEQYIFIHDAILEACLCGETTIPVSEFKATYKEMIRIDPQSNSSQLREEFQTLNSVTPPLDVEECSIALLPRNRDKNRSMDVLPPDRCLPFLISTDGDSNNYINAALTDSYTRSAAFIVTLHPLQSTTPDFWRLVYDYGCTSIVMLNQLNQSNSAWPCLQYWPEPGRQQYGLMEVEFMSGTADEDLVARVFRVQNISRLQEGHLLVRHFQFLRWSAYRDTPDSKKAFLHLLAEVDKWQAESGDGRTIVHCLNGGGRSGTFCACATVLEMIRCHNLVDVFFAAKTLRNYKPNMVETMDQYHFCYDVALEYLEGLESR

SEQ ID NO: 13272 - protein, 1411 aa, Artificial Sequence
  Synthetic polypeptide
YFAGCTFEEASDPAVPCEYSQAQYDDFQWEQVRIHPGTRAPADLPHGSYLMVNTSQHAPGQRAHVIFQSLSENDTHCVQFSYFLYSRDGHSPGTLGVYVRVNGGPLGSAVWNMTGSHGRQWHQAELAVSTFWPNEYQVLFEALISPDRRGYMGLDDILLLSYPCAKAPHFSRLGDVEVNAGQNASFQCMAAGRAAEAERFLLQRQSGALVPAAGVRHISHRRFLATFPLAAVSRAEQDLYRCVSQAPRGAGVSNFAELIVKEPPTPIAPPQLLRAGPTYLIIQLNTNSIIGDGPIVRKEIEYRMARGPWAEVHAVSLQTYKLWHLDPDTEYEISVLLTRPGDGGTGRPGPPLISRTKCAEPMRAPKGLAFAEIQARQLTLQWEPLGYNVTRCHTYTVSLCYHYTLGSSHNQTIRECVKTEQGVSRYTIKNLLPYRNVHVRLVLTNPEGRKEGKEVTFQTDEDVPSGIAAESLTFTPLEDMIFLKWEEPQEPNGLITQYEISYQSIESSDPAVNVPGPRRTISKLRNETYHVFSNLHPGTTYLFSVRARTGKGFGQAALTEITTNISAPSFDYADMPSPLGESENTITVLLRPAQGRGAPISVYQVIVEEERARRLRREPGGQDCFPVPLTFEAALARGLVHYFGAELAASSLPEAMPFTVGDNQTYRGFWNPPLEPRKAYLIYFQAASHLKGETRLNCIRIARKAACKESKRPLEVSQRSEEMGLILGICAGGLAVLILLLGAIIVIIRKGKPVNMTKATVNYRQEKTHMMSAVDRSFTDQSTLQEDERLGLSFMDTHGYSTRGDQRSGGVTEASSLLGGSPRRPCGRKGSPYHTGQLHPAVRVADLLQHINQMKTAEGYGFKQEYESFFEGWDATKKKDKVKGSRQEPMPAYDRHRVKLHPMLGDPNADYINANYIDGYHRSNHFIATQGPKPEMVYDFWRMVWQEHCSSIVMITKLVEVKCSRYWPEDSDTYGDIKIMLVKTETLAEYVVRTFALERRGYSARHEVRQFHFTAWPEHGVPYHATGLLAFIRRVKASTPPDAGPIVIHCSAGTGRTGCYIVLDVMLDMAECEGVVDIYNCVKTLCSRRVNMIQTEEQYIFIHDAILEACLCGETTIPVSEFKATYKEMIRIDPQSNSSQLREEFQTLNSVTPPLDVEECSIALLPRNRDKNRSMDVLPPDRCLPFLISTDGDSNNYINAALTDSYTRSAAFIVTLHPLQSTTPDFWRLVYDYGCTSIVMLNQLNQSNSAWPCLQYWPEPGRQQYGLMEVEFMSGTADEDLVARVFRVQNISRLQEGHLLVRHFQFLRWSAYRDTPDSKKAFLHLLAEVDKWQAESGDGRTIVHCLNGGGRSGTFCACATVLEMIRCHNLVDVFFAAKTLRNYKPNMVETMDQYHFCYDVALEYLEGLESR

SEQ ID NO: 13273 - protein, 1418 aa, Artificial Sequence
  Synthetic polypeptide
YFAGCTFEEASDPAVPCEYSQAQYDDFQWEQVRIHPGTRAPADLPHGSYLMVNTSQHAPGQRAHVIFQSLSENDTHCVQFSYFLYSRDGHSPGTLGVYVRVNGGPLGSAVWNMTGSHGRQWHQAELAVSTFWPNEYQVLFEALISPDRRGYMGLDDILLLSYPCAKAPHFSRLGDVEVNAGQNASFQCMAAGRAAEAERFLLQRQSGALVPAAGVRHISHRRFLATFPLAAVSRAEQDLYRCVSQAPRGAGVSNFAELIVKEPPTPIAPPQLLRAGPTYLIIQLNTNSIIGDGPIVRKEIEYRMARGPWAEVHAVSLQTYKLWHLDPDTEYEISVLLTRPGDGGTGRPGPPLISRTKCAEPMRAPKGLAFAEIQARQLTLQWEPLGYNVTRCHTYTVSLCYHYTLGSSHNQTIRECVKTEQGVSRYTIKNLLPYRNVHVRLVLTNPEGRKEGKEVTFQTDEDVPSGIAAESLTFTPLEDMIFLKWEEPQEPNGLITQYEISYQSIESSDPAVNVPGPRRTISKLRNETYHVFSNLHPGTTYLFSVRARTGKGFGQAALTEITTNISAPSFDYADMPSPLGESENTITVLLRPAQGRGAPISVYQVIVEEERARRLRREPGGQDCFPVPLTFEAALARGLVHYFGAELAASSLPEAMPFTVGDNQTYRGFWNPPLEPRKAYLIYFQAASHLKGETRLNCIRIARKAACKESKRPLEVSQRSEEMGLILGICAGGLAVLILLLGAIIVIIRKGKPVNMTKATVNYRQEKTHMMSAVDRSFTDQSTLQEDERLGLSFMDTHGYSTRGDQRSGGVTEASSLLGGSPRRPCGRKGSPYHTGQLHPAVRVADLLQHINQMKTAEGYGFKQEYESFFEGWDATKKKDKVKGSRQEPMPAYDRHRVKLHPMLGDPNADYINANYIDIRINREGYHRSNHFIATQGPKPEMVYDFWRMVWQEHCSSIVMITKLVEVGRVKCSRYWPEDSDTYGDIKIMLVKTETLAEYVVRTFALERRGYSARHEVRQFHFTAWPEHGVPYHATGLLAFIRRVKASTPPDAGPIVIHCSAGTGRTGCYIVLDVMLDMAECEGVVDIYNCVKTLCSRRVNMIQTEEQYIFIHDAILEACLCGETTIPVSEFKATYKEMIRIDPQSNSSQLREEFQTLNSVTPPLDVEECSIALLPRNRDKNRSMDVLPPDRCLPFLISTDGDSNNYINAALTDSYTRSAAFIVTLHPLQSTTPDFWRLVYDYGCTSIVMLNQLNQSNSAWPCLQYWPEPGRQQYGLMEVEFMSGTADEDLVARVFRVQNISREGHLLVRHFQFLRWSAYRDTPDSKKAFLHLLAEVDKWQAESGDGRTIVHCLNGGGRSGTFCACATVLEMIRCHNLVDVFFAAKTLRNYKPNMVETMDQYHFCYDVALEYLEGLESR

SEQ ID NO: 13274 - protein, 1420 aa, Artificial Sequence
  Synthetic polypeptide
YFAGCTFEEASDPAVPCEYSQAQYDDFQWEQVRIHPGTRAPADLPHGSYLMVNTSQHAPGQRAHVIFQSLSENDTHCVQFSYFLYSRDGHSPGTLGVYVRVNGGPLGSAVWNMTGSHGRQWHQAELAVSTFWPNEYQVLFEALISPDRRGYMGLDDILLLSYPCAKAPHFSRLGDVEVNAGQNASFQCMAAGRAAEAERFLLQRQSGALVPAAGVRHISHRRFLATFPLAAVSRAEQDLYRCVSQAPRGAGVSNFAELIVKEPPTPIAPPQLLRAGPTYLIIQLNTNSIIGDGPIVRKEIEYRMARGPWAEVHAVSLQTYKLWHLDPDTEYEISVLLTRPGDGGTGRPGPPLISRTKCAEPMRAPKGLAFAEIQARQLTLQWEPLGYNVTRCHTYTVSLCYHYTLGSSHNQTIRECVKTEQGVSRYTIKNLLPYRNVHVRLVLTNPEGRKEGKEVTFQTDEDVPSGIAAESLTFTPLEDMIFLKWEEPQEPNGLITQYEISYQSIESSDPAVNVPGPRRTISKLRNETYHVFSNLHPGTTYLFSVRARTGKGFGQAALTEITTNISAPSFDYADMPSPLGESENTITVLLRPAQGRGAPISVYQVIVEEERARRLRREPGGQDCFPVPLTFEAALARGLVHYFGAELAASSLPEAMPFTVGDNQTYRGFWNPPLEPRKAYLIYFQAASHLKGETRLNCIRIARKAACKESKRPLEVSQRSEEMGLILGICAGGLAVLILLLGAIIVIIRKGKPVNMTKATVNYRQEKTHMMSAVDRSFTDQSTLQEDERLGLSFMDTHGYSTRGDQRSGGVTEASSLLGGSPRRPCGRKGSPYHTGQLHPAVRVADLLQHINQMKTAEGYGFKQEYESFFEGWDATKKKDKVKGSRQEPMPAYDRHRVKLHPMLGDPNADYINANYIDIRINREGYHRSNHFIATQGPKPEMVYDFWRMVWQEHCSSIVMITKLVEVGRVKCSRYWPEDSDTYGDIKIMLVKTETLAEYVVRTFALERRGYSARHEVRQFHFTAWPEHGVPYHATGLLAFIRRVKASTPPDAGPIVIHCSAGTGRTGCYIVLDVMLDMAECEGVVDIYNCVKTLCSRRVNMIQTEEQYIFIHDAILEACLCGETTIPVSEFKATYKEMIRIDPQSNSSQLREEFQTLNSVTPPLDVEECSIALLPRNRDKNRSMDVLPPDRCLPFLISTDGDSNNYINAALTDSYTRSAAFIVTLHPLQSTTPDFWRLVYDYGCTSIVMLNQLNQSNSAWPCLQYWPEPGRQQYGLMEVEFMSGTADEDLVARVFRVQNISRLQEGHLLVRHFQFLRWSAYRDTPDSKKAFLHLLAEVDKWQAESGDGRTIVHCLNGGGRSGTFCACATVLEMIRCHNLVDVFFAAKTLRNYKPNMVETMDQYHFCYDVALEYLEGLESR

SEQ ID NO: 13275 - protein, 1420 aa, Artificial Sequence
  Synthetic polypeptide
YFAGCTFEEASDPAVPCEYSQAQYDDFQWEQVRIHPGTRAPADLPHGSYLMVNTSQHAPGQRAHVIFQSLSENDTHCVQFSYFLYSRDGHSPGTLGVYVRVNGGPLGSAVWNMTGSHGRQWHQAELAVSTFWPNEYQVLFEALISPDRRGYMGLDDILLLSYPCAKAPHFSRLGDVEVNAGQNASFQCMAAGRAAEAERFLLQRQSGALVPAAGVRHISHRRFLATFPLAAVSRAEQDLYRCVSQAPRGAGVSNFAELIVKEPPTPIAPPQLLRAGPTYLIIQLNTNSIIGDGPIVRKEIEYRMARGPWAEVHAVSLQTYKLWHLDPDTEYEISVLLTRPGDGGTGRPGPPLISRTKCAEPMRAPKGLAFAEIQARQLTLQWEPLGYNVTRCHTYTVSLCYHYTLGSSHNQTIRECVKTEQGVSRYTIKNLLPYRNVHVRLVLTNPEGRKEGKEVTFQTDEDVPSGIAAESLTFTPLEDMIFLKWEEPQEPNGLITQYEISYQSIESSDPAVNVPGPRRTISKLRNETYHVFSNLHPGTTYLFSVRARTGKGFGQAALTEITTNISAPSFDYADMPSPLGESENTITVLLRPAQGRGAPISVYQVIVEEERARRLRREPGGQDCFPVPLTFEAALARGLVHYFGAELAASSLPEAMPFTVGDNQTYRGFWNPPLEPRKAYLIYFQAASHLKGETRLNCIRIARKAACKESKRPLEVSQRSEEMGLILGICAGGLAVLILLLGAIIVIIRKGKPVNMTKATVNYRQEKTHMMSAVDRSFTDQSTLQEDERLGLSFMDTHGYSTRGDQRSGGVTEASSLLGGSPRRPCGRKGSPYHTGQLHPAVRVADLLQHINQMKTAEGYGFKQEYESFFEGWDATKKKDKVKGSRQEPMPAYDRHRVKLHPMLGDPNADYINANYIDLRGGRTGYHRSNHFIATQGPKPEMVYDFWRMVWQEHCSSIVMITKLVEVGRVKCSRYWPEDSDTYGDIKIMLVKTETLAEYVVRTFALERRGYSARHEVRQFHFTAWPEHGVPYHATGLLAFIRRVKASTPPDAGPIVIHCSAGTGRTGCYIVLDVMLDMAECEGVVDIYNCVKTLCSRRVNMIQTEEQYIFIHDAILEACLCGETTIPVSEFKATYKEMIRIDPQSNSSQLREEFQTLNSVTPPLDVEECSIALLPRNRDKNRSMDVLPPDRCLPFLISTDGDSNNYINAALTDSYTRSAAFIVTLHPLQSTTPDFWRLVYDYGCTSIVMLNQLNQSNSAWPCLQYWPEPGRQQYGLMEVEFMSGTADEDLVARVFRVQNISRLQEGHLLVRHFQFLRWSAYRDTPDSKKAFLHLLAEVDKWQAESGDGRTIVHCLNGGGRSGTFCACATVLEMIRCHNLVDVFFAAKTLRNYKPNMVETMDQYHFCYDVALEYLEGLESR

SEQ ID NO: 13276 - protein, 1424 aa, Artificial Sequence
  Synthetic polypeptide
YFAGCTFEEASDPAVPCEYSQAQYDDFQWEQVRIHPGTRAPADLPHGSYLMVNTSQHAPGQRAHVIFQSLSENDTHCVQFSYFLYSRDGHSPGTLGVYVRVNGGPLGSAVWNMTGSHGRQWHQAELAVSTFWPNEYQVLFEALISPDRRGYMGLDDILLLSYPCAKAPHFSRLGDVEVNAGQNASFQCMAAGRAAEAERFLLQRQSGALVPAAGVRHISHRRFLATFPLAAVSRAEQDLYRCVSQAPRGAGVSNFAELIVKEPPTPIAPPQLLRAGPTYLIIQLNTNSIIGDGPIVRKEIEYRMARGPWAEVHAVSLQTYKLWHLDPDTEYEISVLLTRPGDGGTGRPGPPLISRTKCAEPMRAPKGLAFAEIQARQLTLQWEPLGYNVTRCHTYTVSLCYHYTLGSSHNQTIRECVKTEQGVSRYTIKNLLPYRNVHVRLVLTNPEGRKEGKEVTFQTDEDVPSGIAAESLTFTPLEDMIFLKWEEPQEPNGLITQYEISYQSIESSDPAVNVPGPRRTISKLRNETYHVFSNLHPGTTYLFSVRARTGKGFGQAALTEITTNISAPSFDYADMPSPLGESENTITVLLRPAQGRGAPISVYQVIVEEERARRLRREPGGQDCFPVPLTFEAALARGLVHYFGAELAASSLPEAMPFTVGDNQTYRGFWNPPLEPRKAYLIYFQAASHLKGETRLNCIRIARKAACKESKRPLEVSQRSEEMGLILGICAGGLAVLILLLGAIIVIIRKGRDHYAYSYYPKPVNMTKATVNYRQEKTHMMSAVDRSFTDQSTLQEDERLGLSFMDTHGYSTRGDQRSGGVTEASSLLGGSPRRPCGRKGSPYHTGQLHPAVRVADLLQHINQMKTAEGYGFKQEYESFFEGWDATKKKDKVKGSRQEPMPAYDRHRVKLHPMLGDPNADYINANYIDGYHRSNHFIATQGPKPEMVYDFWRMVWQEHCSSIVMITKLVEVGRVKCSRYWPEDSDTYGDIKIMLVKTETLAEYVVRTFALERRGYSARHEVRQFHFTAWPEHGVPYHATGLLAFIRRVKASTPPDAGPIVIHCSAGTGRTGCYIVLDVMLDMAECEGVVDIYNCVKTLCSRRVNMIQTEEQYIFIHDAILEACLCGETTIPVSEFKATYKEMIRIDPQSNSSQLREEFQTLNSVTPPLDVEECSIALLPRNRDKNRSMDVLPPDRCLPFLISTDGDSNNYINAALTDSYTRSAAFIVTLHPLQSTTPDFWRLVYDYGCTSIVMLNQLNQSNSAWPCLQYWPEPGRQQYGLMEVEFMSGTADEDLVARVFRVQNISRLQEGHLLVRHFQFLRWSAYRDTPDSKKAFLHLLAEVDKWQAESGDGRTIVHCLNGGGRSGTFCACATVLEMIRCHNLVDVFFAAKTLRNYKPNMVETMDQYHFCYDVALEYLEGLESR

SEQ ID NO: 13277 - protein, 326 aa, Artificial Sequence
  Synthetic polypeptide
IYFCVPSIQPRASHGLREHLAKGQRMLAGEGMSQVVRSLQELLARRTYYSGDLLFSVDILRNVTDTFKRATYVPSADDVQRFFQVVSFMVDAENKEKWDDAQQVSPGSVHLLRVVEDFIHLVGDALKAFQSSLIVTDNLVISIQREPVSAVSSDITFPMRGRRGMKDWVRHSEDRLFLPKEVLSLSSPGKPATSGAAGSPGRGRGPGTVPPGPGHSHQRLLPADPDESSYFVIGAVLYRTLGLILPPPRPPLAVTSRVMTVTVRPPTQPPAEPLITVELSYIINGTTDPHCASWDYSRADASSGDWDTENCQTLETQAAHTRCQCQ

SEQ ID NO: 13278 - protein, 950 aa, Artificial Sequence
  Synthetic polypeptide
IYFCVPSIQPRASHGLREHLAKGQRMLAGEGMSQVVRSLQELLARRTYYSGDLLFSVDILRNVTDTFKRATYVPSADDVQRFFQVVSFMVDAENKEKWDDAQQVSPGSVHLLRVVEDFIHLVGDALKAFQSSLIVTDNLVISIQREPVSAVSSDITFPMRGRRGMKDWVRHSEDRLFLPKEVLSLSSPGKPATSGAAGSPGRGRGPGTVPPGPGHSHQRLLPADPDESSYFVIGAVLYRTLGLILPPPRPPLAVTSRVMTVTVRPPTQPPAEPLITVELSYIINGTTDPHCASWDYSRADASSGDWDTENCQTLETQAAHTRCQCQHLSTFAVLAQPPKDLTLELAGSPSVPLVIGCAVSCMALLTLLAIYAAFWRFIKSERSIILLNFCLSILASNILILVGQSRVLSKGVCTMTAAFLHFFFLSSFCWVLTEAWQSYLAVIGRMRTRLVRKRFLCLGWGLPALVVAVSVGFTRTKGYGTSSYCWLSLEGGLLYAFVGPAAVIVLVNMLIGIIVFNKLMARDGISDKSKKQRAGASLWSSCVVLPLLALTWMSAVLAMTDRRSVLFQALFAVFNSAQGFVITAVHCFLRREVQDVVKCQMGVCRADESEDSPDSCKNGQLQILSDFEKDVDLACQTVLFKEVNTCNPSTITGTLSRLSLDEDEEPKSCLVGPEGSLSFSPLPGNILVPMAASPGLGEPPPPQEANPVYMCGEGGLRQLDLTWLRPTEPGSEGDYMVLPRRTLSLQPGGGGGGGEDAPRARPEGTPRRAAKTVAHTEGYPSFLSVDHSGLGLGPAYGSLQNPYGMTFQPPPPTPSARQVPEPGERSRTMPRTVPGSTMKMGSLERKKLRYSDLDFEKVMHTRKRHSELYHELNQKFHTFDRYRSQSTAKDKPSPGERPSLSQHRRHQSWSTFKSMTLGSLPPKPRERLTLHRAAAWEPTEPPDGDFQTEV

SEQ ID NO: 13279 - protein, 969 aa, Artificial Sequence
  Synthetic polypeptide
IYFCVPSIQPRASHGLREHLAKGQRMLAGEGMSQVVRSLQELLARRTYYSGDLLFSVDILRNVTDTFKRATYVPSADDVQRFFQVVSFMVDAENKEKWDDAQQVSPGSVHLLRVVEDFIHLVGDALKAFQSSLIVTDNLVISIQREPVSAVSSDITFPMRGRRGMKDWVRHSEDRLFLPKEVLSLSSPGKPATSGAAGSPGRGRGPGTVPPGPGHSHQRLLPADPDESSYFVIGAVLYRTLGLILPPPRPPLAVTSRVMTVTVRPPTQPPAEPLITVELSYIINGTTDPHCASWDYSRADASSGDWDTENCQTLETQAAHTRCQCQHLSTFAVLAQPPKDLTLELAGSPSVPLVIGCAVSCMALLTLLAIYAAFWRFIKSERSIILLNFCLSILASNILILVGQSRVLSKGVCTMTAAFLHFFFLSSFCWVLTEAWQSYLAVIGRMRTRLVRKRFLCLGWGLPALVVAVSVGFTRTKGYGTSSYCWLSLEGGLLYAFVGPAAVIVLVNMLIGIIVFNKLMARDGISDKSKKQRAGASLWSSCVVLPLLALTWMSAVLAMTDRRSVLFQALFAVFNSAQGFVITAVHCFLRREVQDVVKCQMGVCRADESEDSPDSCKNGQLQILSDFEKDVDLACQTVLFKEVNTCNPSTITGTLSRLSLDEDEEPKSCLVGPEGSLSFSPLPGNILVPMAASPGLGEPPPPQEANPVYMCGEGGLRQLDLTWLRPTEPGSEGDYMVLPRRTLSLQPGGGGGGGEDAPRARPEGTPRRAAKTVAHTEGYPSFLSVDHSGLGLGPAYGSLQNPYGMTFQPPPPTPSARQVPEPGERSRTMPRTVPGSTMKMGSLERKKLRYSDLDFEKVMHTRKRHSELYHELNQKFHTFDRYRSQSTAKREKRWSVSSGGAAERSVCTDKPSPGERPSLSQHRRHQSWSTFKSMTLGSLPPKPRERLTLHRAAAWEPTEPPDGDFQTEV

SEQ ID NO: 13280 - protein, 968 aa, Artificial Sequence
  Synthetic polypeptide
IYFCVPSIQPRASHGLREHLAKGQRMLAGEGMSQVVRSLQELLARRTYYSGDLLFSVDILRNVTDTFKRATYVPSADDVQRFFQVVSFMVDAENKEKWDDAQQVSPGSVHLLRVVEDFIHLVGDALKAFQSSLIVTDNLVISIQREPVSAVSSDITFPMRGRRGMKDWVRHSEDRLFLPKEVLSLSSPGKPATSGAAGSPGRGRGPGTVPPGPGHSHQRLLPADPDESSYFVIGAVLYRTLGLILPPPRPPLAVTSRVMTVTVRPPTQPPAEPLITVELSYIINGTTDPHCASWDYSRADASSGDWDTENCQTLETQAAHTRCQCQHLSTFAVLAQPPKDLTLELAGSPSVPLVIGCAVSCMALLTLLAIYAAFWRFIKSERSIILLNFCLSILASNILILVGQSRVLSKGVCTMTAAFLHFFFLSSFCWVLTEAWQSYLAVIGRMRTRLVRKRFLCLGWGLPALVVAVSVGFTRTKGYGTSSYCWLSLEGGLLYAFVGPAAVIVLVNMLIGIIVFNKLMARDGISDKSKKQRAGASLWSSCVVLPLLALTWMSAVLAMTDRRSVLFQALFAVFNSAQGFVITAVHCFLRREVQDVVKCQMGVCRADESEDSPDSCKNGQLQILSDFEKDVDLACQTVLFKEVNTCNPSTITGTLSRLSLDEDEEPKSCLVGPEGSLSFSPLPGNILVPMAASPGLGEPPPPQEANPVYMCGEGGLRQLDLTWLRPTEPGSEGDYMVLPRRTLSLQPGGGGGGGEDAPRARPEGTPRRAAKTVAHTEGYPSFLSVDHSGLGLGPAYGSLQNPYGMTFQPPPPTPSARQVPEPGERSRTMPRTVPGSTMKMGSLERKKLRYSDLDFEVMHTRKRHSELYHELNQKFHTFDRYRSQSTAKREKRWSVSSGGAAERSVCTDKPSPGERPSLSQHRRHQSWSTFKSMTLGSLPPKPRERLTLHRAAAWEPTEPPDGDFQTEV

SEQ ID NO: 13281 - protein, 983 aa, Artificial Sequence
  Synthetic polypeptide
IYFCVPSIQPRASHGLREHLAKGQRMLAGEGMSQVVRSLQELLARRTYYSGDLLFSVDILRNVTDTFKRATYVPSADDVQRFFQVVSFMVDAENKEKWDDAQQVSPGSVHLLRVVEDFIHLVGDALKAFQSSLIVTDNLVISIQREPVSAVSSDITFPMRGRRGMKDWVRHSEDRLFLPKEVLSLSSPGKPATSGAAGSPGRGRGPGTVPPGPGHSHQRLLPADPDESSYFVIGAVLYRTLGLILPPPRPPLAVTSRVMTVTVRPPTQPPAEPLITVELSYIINGTTDPHCASWDYSRADASSGDWDTENCQTLETQAAHTRCQCQHLSTFAVLAQPPKDLTLELAGSPSVPLVIGCAVSCMALLTLLAIYAAFWRFIKSERSIILLNFCLSILASNILILVGQSRVLSKGVCTMTAAFLHFFFLSSFCWVLTEAWQSYLAVIGRMRTRLVRKRFLCLGWGLPALVVAVSVGFTRTKGYGTSSYCWLSLEGGLLYAFVGPAAVIVLVNMLIGIIVFNKLMARDGISDKSKKQRAGSERCPWASLLLPCSACGAVPSPLLSSASARNAMASLWSSCVVLPLLALTWMSAVLAMTDRRSVLFQALFAVFNSAQGFVITAVHCFLRREVQDVVKCQMGVCRADESEDSPDSCKNGQLQILSDFEKDVDLACQTVLFKEVNTCNPSTITGTLSRLSLDEDEEPKSCLVGPEGSLSFSPLPGNILVPMAASPGLGEPPPPQEANPVYMCGEGGLRQLDLTWLRPTEPGSEGDYMVLPRRTLSLQPGGGGGGGEDAPRARPEGTPRRAAKTVAHTEGYPSFLSVDHSGLGLGPAYGSLQNPYGMTFQPPPPTPSARQVPEPGERSRTMPRTVPGSTMKMGSLERKKLRYSDLDFEKVMHTRKRHSELYHELNQKFHTFDRYRSQSTAKDKPSPGERPSLSQHRRHQSWSTFKSMTLGSLPPKPRERLTLHRAAAWEPTEPPDGDFQTEV

SEQ ID NO: 13282 - protein, 1002 aa, Artificial Sequence
  Synthetic polypeptide
IYFCVPSIQPRASHGLREHLAKGQRMLAGEGMSQVVRSLQELLARRTYYSGDLLFSVDILRNVTDTFKRATYVPSADDVQRFFQVVSFMVDAENKEKWDDAQQVSPGSVHLLRVVEDFIHLVGDALKAFQSSLIVTDNLVISIQREPVSAVSSDITFPMRGRRGMKDWVRHSEDRLFLPKEVLSLSSPGKPATSGAAGSPGRGRGPGTVPPGPGHSHQRLLPADPDESSYFVIGAVLYRTLGLILPPPRPPLAVTSRVMTVTVRPPTQPPAEPLITVELSYIINGTTDPHCASWDYSRADASSGDWDTENCQTLETQAAHTRCQCQHLSTFAVLAQPPKDLTLELAGSPSVPLVIGCAVSCMALLTLLAIYAAFWRFIKSERSIILLNFCLSILASNILILVGQSRVLSKGVCTMTAAFLHFFFLSSFCWVLTEAWQSYLAVIGRMRTRLVRKRFLCLGWGLPALVVAVSVGFTRTKGYGTSSYCWLSLEGGLLYAFVGPAAVIVLVNMLIGIIVFNKLMARDGISDKSKKQRAGSERCPWASLLLPCSACGAVPSPLLSSASARNAMASLWSSCVVLPLLALTWMSAVLAMTDRRSVLFQALFAVFNSAQGFVITAVHCFLRREVQDVVKCQMGVCRADESEDSPDSCKNGQLQILSDFEKDVDLACQTVLFKEVNTCNPSTITGTLSRLSLDEDEEPKSCLVGPEGSLSFSPLPGNILVPMAASPGLGEPPPPQEANPVYMCGEGGLRQLDLTWLRPTEPGSEGDYMVLPRRTLSLQPGGGGGGGEDAPRARPEGTPRRAAKTVAHTEGYPSFLSVDHSGLGLGPAYGSLQNPYGMTFQPPPPTPSARQVPEPGERSRTMPRTVPGSTMKMGSLERKKLRYSDLDFEKVMHTRKRHSELYHELNQKFHTFDRYRSQSTAKREKRWSVSSGGAAERSVCTDKPSPGERPSLSQHRRHQSWSTFKSMTLGSLPPKPRERLTLHRAAAWEPTEPPDGDFQTEV

SEQ ID NO: 13283 - protein, 1001 aa, Artificial Sequence
  Synthetic polypeptide
IYFCVPSIQPRASHGLREHLAKGQRMLAGEGMSQVVRSLQELLARRTYYSGDLLFSVDILRNVTDTFKRATYVPSADDVQRFFQVVSFMVDAENKEKWDDAQQVSPGSVHLLRVVEDFIHLVGDALKAFQSSLIVTDNLVISIQREPVSAVSSDITFPMRGRRGMKDWVRHSEDRLFLPKEVLSLSSPGKPATSGAAGSPGRGRGPGTVPPGPGHSHQRLLPADPDESSYFVIGAVLYRTLGLILPPPRPPLAVTSRVMTVTVRPPTQPPAEPLITVELSYIINGTTDPHCASWDYSRADASSGDWDTENCQTLETQAAHTRCQCQHLSTFAVLAQPPKDLTLELAGSPSVPLVIGCAVSCMALLTLLAIYAAFWRFIKSERSIILLNFCLSILASNILILVGQSRVLSKGVCTMTAAFLHFFFLSSFCWVLTEAWQSYLAVIGRMRTRLVRKRFLCLGWGLPALVVAVSVGFTRTKGYGTSSYCWLSLEGGLLYAFVGPAAVIVLVNMLIGIIVFNKLMARDGISDKSKKQRAGSERCPWASLLLPCSACGAVPSPLLSSASARNAMASLWSSCVVLPLLALTWMSAVLAMTDRRSVLFQALFAVFNSAQGFVITAVHCFLRREVQDVVKCQMGVCRADESEDSPDSCKNGQLQILSDFEKDVDLACQTVLFKEVNTCNPSTITGTLSRLSLDEDEEPKSCLVGPEGSLSFSPLPGNILVPMAASPGLGEPPPPQEANPVYMCGEGGLRQLDLTWLRPTEPGSEGDYMVLPRRTLSLQPGGGGGGGEDAPRARPEGTPRRAAKTVAHTEGYPSFLSVDHSGLGLGPAYGSLQNPYGMTFQPPPPTPSARQVPEPGERSRTMPRTVPGSTMKMGSLERKKLRYSDLDFEVMHTRKRHSELYHELNQKFHTFDRYRSQSTAKREKRWSVSSGGAAERSVCTDKPSPGERPSLSQHRRHQSWSTFKSMTLGSLPPKPRERLTLHRAAAWEPTEPPDGDFQTEV

SEQ ID NO: 13284 - protein, 99 aa, Artificial Sequence
  Synthetic polypeptide
LSSVFFYPWCLPLRSCRMSSSVIRCSSKCLCVLLDWGLLEFIFVSPASSPGPVMGLGSTWPRGSACWQARACRRWCAACRSYWPGAPTIVGTCSSLWTF

SEQ ID NO: 13285 - protein, 21 aa, Artificial Sequence
  Synthetic polypeptide
TGASLNLFLCPQHPAQGQSWA

SEQ ID NO: 13286 - protein, 27 aa, Artificial Sequence
  Synthetic polypeptide
NGDIDSGGDGMMKIVRRMCGCCASSRR

SEQ ID NO: 13287 - protein, 148 aa, Artificial Sequence
  Synthetic polypeptide
WNDEDCKKDVRMLRFIQEVNTTTRSCALWDLEEDTEYIVHVQAISIQGQSPASEPVLFKTPREAEKMASKNKDEVTMKEMGRNQQLRTGEVLIIVVVLFMWAGVIALFCRQYDIIKDNEPNNNKEKTKSASETSTPEHQGGGLLRSKI

SEQ ID NO: 13288 - protein, 71 aa, Artificial Sequence
  Synthetic polypeptide
EKSPFSPDFPDCDEGTFVKPVTSWHWAWWRSSAHHRAPAPMPSSPSAMPWRCPTSSCVGSTTRWTTRTPST

SEQ ID NO: 13289 - protein, 39 aa, Artificial Sequence
  Synthetic polypeptide
KRKGENGVLVLPLPMSLCRRSLHSHLTFQIVMKVHLSSL

SEQ ID NO: 13290 - protein, 827 aa, Artificial Sequence
  Synthetic polypeptide
RYICQACDQLALGVVAIFGPSQGSCTNAVQSICNALEVPHIQLRWKHHPLDNKDTFYVNLYPDYASLSHAILDLVQYLKWRSATVVYDDSTGLIRLQELIMAPSRYNIRLKIRQLPIDSDDSRPLLKEMKRGREFRIIFDCSHTMAAQILKQAMAMGMMTEYYHFIFTTLDLYALDLEPYRYSGVNLTGFRILNVDNPHVSAIVEKWSMERLQAAPRSESGLLDGVMMTDAALLYDAVHIVSVCYQRAPQMTVNSLQCHRHKAWRFGGRFMNFIKEAQWEGLTGRIVFNKTSGLRTDFDLDIISLKEDGLEKVGVWSPADGLNITEVAKGRGPNVTDSLTNRSLIVTTVLEEPFVMFRKSDRTLYGNDRFEGYCIDLLKELAHILGFSYEIRLVEDGKYGAQDDKGQWNGMVKELIDHKADLAVAPLTITHVREKAIDFSKPFMTLGVSILYRKPNGTNPSVFSFLNPLSPDIWMYVLLAYLGVSCVLFVIARFSPYEWYDAHPCNPGSEVVENNFTLLNSFWFGMGSLMQQGSELMPKALSTRIIGGIWWFFTLIIISSYTANLAAFLTVERMESPIDSADDLAKQTKIEYGAVKDGATMTFFKKSKISTFEKMWAFMSSKPSALVKNNEEGIQRALTADYALLMESTTIEYVTQRNCNLTQIGGLIDSKGYGIGTPMGSPYRDKITIAILQLQEEDKLHIMKEKWWRGSGCPEEENKEASALGIQKIGGIFIVLAAGLVLSVLVAVGEFVYKLRKTAEREQRSFCSTVADEIRFSLTCQRRVKHKPQPPMMVKTDAVINMHTFNDRRLPGKDSMACSTSLAPVFP

SEQ ID NO: 13291 - protein, 780 aa, Artificial Sequence
  Synthetic polypeptide
RYICQACDQLALGVVAIFGPSQGSCTNAVQSICNALEVPHIQLRWKHHPLDNKDTFYVNLYPDYASLSHAILDLVQYLKWRSATVVYDDSTGLIRLQELIMAPSRYNIRLKIRQLPIDSDDSRPLLKEMKRGREFRIIFDCSHTMAAQILKQAMAMGMMTEYYHFIFTTLDLYALDLEPYRYSGVNLTGFRILNVDNPHVSAIVEKWSMERLQAAPRSESGLLDGVMMTDAALLYDAVHIVSVCYQRAPQMTVNSLQCHRHKAWRFGGRFMNFIKEAQWEGLTGRIVFNKTSGLRTDFDLDIISLKEDGLEKVGVWSPADGLNITEVAKGRGPNVTDSLTNRSLIVTTVLEEPFVMFRKSDRTLYGNDRFEGYCIDLLKELAHILGFSYEIRLVEDGKYGAQDDKGQWNGMVKELIDHKADLAVAPLTITHVREKAIDFSKPFMTLGVSILYRKPNGTNPSVFSFLNPLSPDIWMYVLLAYLGVSCVLFVIARFSPYEWYDAHPCNPGSEVVENNFTLLNSFWFGMGSLMQQGSELMPKALSTRIIGGIWWFFTLIIISSYTANLAAFLTVERMESPIDSADDLAKQTKIEYGAVKDGATMTFFKKSKISTFEKMWAFMSSKPSALVKNNEEGIQRALTADYALLMESTTIEYVTQRNCNLTQIGGLIDSKGYGIGTPMGSPYRDKITIAILQLQEEDKLHIMKEKWWRGSGCPEEENKEASALGIQKIGGIFIVLAAGLVLSVLVAVGEFVYKLRKTAEREQVSLRAWSLHRMGNGDSR

SEQ ID NO: 13292 - protein, 79 aa, Artificial Sequence
  Synthetic polypeptide
IIIITTIDSTINTSTPAPQLLFSPATMPVTSWHWAWWRSSAHHRAPAPMPSSPSAMPWRCPTSSCVGSTTRWTTRTPST

SEQ ID NO: 13293 - protein, 841 aa, Artificial Sequence
  Synthetic polypeptide
LYYQHQYTSTTITVFTSNNACDQLALGVVAIFGPSQGSCTNAVQSICNALEVPHIQLRWKHHPLDNKDTFYVNLYPDYASLSHAILDLVQYLKWRSATVVYDDSTGLIRLQELIMAPSRYNIRLKIRQLPIDSDDSRPLLKEMKRGREFRIIFDCSHTMAAQILKQAMAMGMMTEYYHFIFTTLDLYALDLEPYRYSGVNLTGFRILNVDNPHVSAIVEKWSMERLQAAPRSESGLLDGVMMTDAALLYDAVHIVSVCYQRAPQMTVNSLQCHRHKAWRFGGRFMNFIKEAQWEGLTGRIVFNKTSGLRTDFDLDIISLKEDGLEKVGVWSPADGLNITEVAKGRGPNVTDSLTNRSLIVTTVLEEPFVMFRKSDRTLYGNDRFEGYCIDLLKELAHILGFSYEIRLVEDGKYGAQDDKGQWNGMVKELIDHKADLAVAPLTITHVREKAIDFSKPFMTLGVSILYRKPNGTNPSVFSFLNPLSPDIWMYVLLAYLGVSCVLFVIARFSPYEWYDAHPCNPGSEVVENNFTLLNSFWFGMGSLMQQGSELMPKALSTRIIGGIWWFFTLIIISSYTANLAAFLTVERMESPIDSADDLAKQTKIEYGAVKDGATMTFFKKSKISTFEKMWAFMSSKPSALVKNNEEGIQRALTADYALLMESTTIEYVTQRNCNLTQIGGLIDSKGYGIGTPMGSPYRDKITIAILQLQEEDKLHIMKEKWWRGSGCPEEENKEASALGIQKIGGIFIVLAAGLVLSVLVAVGEFVYKLRKTAEREQRSFCSTVADEIRFSLTCQRRVKHKPQPPMMVKTDAVINMHTFNDRRLPGKDSMACSTSLAPVFP

SEQ ID NO: 13294 - protein, 794 aa, Artificial Sequence
  Synthetic polypeptide
LYYQHQYTSTTITVFTSNNACDQLALGVVAIFGPSQGSCTNAVQSICNALEVPHIQLRWKHHPLDNKDTFYVNLYPDYASLSHAILDLVQYLKWRSATVVYDDSTGLIRLQELIMAPSRYNIRLKIRQLPIDSDDSRPLLKEMKRGREFRIIFDCSHTMAAQILKQAMAMGMMTEYYHFIFTTLDLYALDLEPYRYSGVNLTGFRILNVDNPHVSAIVEKWSMERLQAAPRSESGLLDGVMMTDAALLYDAVHIVSVCYQRAPQMTVNSLQCHRHKAWRFGGRFMNFIKEAQWEGLTGRIVFNKTSGLRTDFDLDIISLKEDGLEKVGVWSPADGLNITEVAKGRGPNVTDSLTNRSLIVTTVLEEPFVMFRKSDRTLYGNDRFEGYCIDLLKELAHILGFSYEIRLVEDGKYGAQDDKGQWNGMVKELIDHKADLAVAPLTITHVREKAIDFSKPFMTLGVSILYRKPNGTNPSVFSFLNPLSPDIWMYVLLAYLGVSCVLFVIARFSPYEWYDAHPCNPGSEVVENNFTLLNSFWFGMGSLMQQGSELMPKALSTRIIGGIWWFFTLIIISSYTANLAAFLTVERMESPIDSADDLAKQTKIEYGAVKDGATMTFFKKSKISTFEKMWAFMSSKPSALVKNNEEGIQRALTADYALLMESTTIEYVTQRNCNLTQIGGLIDSKGYGIGTPMGSPYRDKITIAILQLQEEDKLHIMKEKWWRGSGCPEEENKEASALGIQKIGGIFIVLAAGLVLSVLVAVGEFVYKLRKTAEREQVSLRAWSLHRMGNGDSR

SEQ ID NO: 13295 - protein, 28 aa, Artificial Sequence
  Synthetic polypeptide
SSSSPPLTLLSTPVHQHHNYCFHQQQCL

SEQ ID NO: 13296 - protein, 58 aa, Artificial Sequence
  Synthetic polypeptide
ARLSLKRPGRRMRSAGTEWNPRACPCRGGSPSLPEPLGPMTRSTRSDTTRRILVLIFA

SEQ ID NO: 13297 - protein, 60 aa, Artificial Sequence
  Synthetic polypeptide
ARLSLKRPGRRMRSAGTEWNPRACPCRGGSPSLPEPLGPMTRSTRSDTTRRVRVSRLTPW

SEQ ID NO: 13298 - protein, 56 aa, Artificial Sequence
  Synthetic polypeptide
IISEAPWEEDEIRRDRVEPQSVSLSWREPIPAGAPGANDTEYEIRYYEKDTCADFC

SEQ ID NO: 13299 - protein, 212 aa, Artificial Sequence
  Synthetic polypeptide
IISEAPWEEDEIRRDRVEPQSVSLSWREPIPAGAPGANDTEYEIRYYEKGQSEQTYSMVKTGAPTVTVTNLKPATRYVFQIRAASPGPSWEAQSFNPSIEVQTLGEAASGSRDQSPAIVVTVVTISALLVLGSVMSVLAIWRRPCSYGKGGGDAHDEEELYFHFKVPTRRTFLDPQSCGDLLQAVHLFAKELDAKSVTLERSLGGGLETSPH

SEQ ID NO: 13300 - protein, 560 aa, Artificial Sequence
  Synthetic polypeptide
IISEAPWEEDEIRRDRVEPQSVSLSWREPIPAGAPGANDTEYEIRYYEKGQSEQTYSMVKTGAPTVTVTNLKPATRYVFQIRAASPGPSWEAQSFNPSIEVQTLGEAASGSRDQSPAIVVTVVTISALLVLGSVMSVLAIWRRPCSYGKGGGDAHDEEELYFHFKVPTRRTFLDPQSCGDLLQAVHLFAKELDAKSVTLERSLGGGRFGELCCGCLQLPGRQELLVAVHMLRDSASDSQRLGFLAEALTLGQFDHSHIVRLEGVVTRGSTLMIVTEYMSHGALDGFLRRHEGQLVAGQLMGLLPGLASAMKYLSEMGYVHRGLAARHVLVSSDLVCKISGFGRGPRDRSEAVYTTMSGRSPALWAAPETLQFGHFSSASDVWSFGIIMWEVMAFGERPYWDMSGQDVIKAVEDGFRLPPPRNCPNLLHRLMLDCWQKDPGERPRFSQIHSILSKMVQDPEPPKCALTTCPRPPTPLADRAFSTFPSFGSVGAWLEALDLCRYKDSFAAAGYGSLEAVAEMTAQDLVSLGISLAEHREALLSGISALQARVLQLQGQGVQV

SEQ ID NO: 13301 - protein, 566 aa, Artificial Sequence
  Synthetic polypeptide
IISEAPWEEDEIRRDRVEPQSVSLSWREPIPAGAPGANDTEYEIRYYEKGQSEQTYSMVKTGAPTVTVTNLKPATRYVFQIRAASPGPSWEAQSFNPSIEVQTLGEAASGSRDQSPAIVVTVVTISALLVLGSVMSVLAIWRRPCSYGKGGGDAHDEEELYFHFKVPTRRTFLDPQSCGDLLQAVHLFAKELDAKSVTLERSLGGGRFGELCCGCLQLPGRQELLVAVHMLRDSASDSQRLGFLAEALTLGQFDHSHIVRLEGVVTRGSTLMIVTEYMSHGALDGFLRRHEGQLVAGQLMGLLPGLASAMKYLSEMGYVHRGLAARHVLVSSDLVCKISGFGRGPRDRSEAVYTTMSGRSPALWAAPETLQFGHFSSASDVWSFGIIMWEVMAFGERPYWDMSGQDVIKAVEDGFRLPPPRNCPNLLHRLMLDCWQKDPGERPRFSQIHSILSKMVQDPEPPKCALTTCPRPPTPLADRAFSTFPSFGSVGAWLEALDLCRYKDSFAAAGYGSLEAVAEMTAQDLVSLGISLAEHREALLSGISALQARVLQLQGQGVQVIIKTCL

SEQ ID NO: 13302 - protein, 6 aa, Artificial Sequence
  Synthetic polypeptide
SALGGG

SEQ ID NO: 13303 - protein, 2 aa, Artificial Sequence
  Synthetic polypeptide
GL

SEQ ID NO: 13304 - protein, 13 aa, Artificial Sequence
  Synthetic polypeptide
SQLLKRLRTMNCN

SEQ ID NO: 13305 - protein, 82 aa, Artificial Sequence
  Synthetic polypeptide
WCAPVVPAPQEAEDYELQLMTYKAFVESQQKSPGKRRRMLSSSDAITQEFMDLRTRYTALVTLTTQHVKYISDALRRLEEEE

SEQ ID NO: 13306 - protein, 6225 aa, Artificial Sequence
  Synthetic polypeptide
WCAPVVPAPQEAEDYELQLMTYKAFVESQQKSPGKRRRMLSSSDAITQEFMDLRTRYTALVTLTTQHVKYISDALRRLEEEEKVVEEEKQEHVEKVKELLGWVSTLARNTQGKATSSETKESTDIEKAILEQQVLSEELTTKKEQVSEAIKTSQIFLAKHGHKLSEKEKKQISEQLNALNKAYHDLCDGSANQLQQLQSQLAHQTEQKECRAVAGVIDLGTVEIFPIFKAMQKGLLDQDTGLVLLESQVIMSGLIAPETGENLSLEEGIARNLINPQMYQQLRELQDALALISRLTESRGPLSVVEAIEKRIISETVGLKILEAHLATGGFSLSPSENCINLEEAFHQGLISAWLHSVLESYLRTSKNLIDPNTAEKIGLLDLMQRCIVHQESGFKLLPVKQLAGGMVSLKSGRKVSIFRAVQEGLIDRQVTVRLLEAQLFAGGIVDPRTGHRLTVEEAVRHNLIDQDMACAILIRQLQTGGIIDTVTGQRLTIDEAVSNDLVAAKIALVILESLWSFMGLLWPESGEILPITDALEQGIVSTELAHKILSNRQHIKALFLPATTEILSWKKAIESGILDRDLANNLKSICIPDVMPHMQLADSAEQNINPGAAVLPCSKSHPKATASQSENLLFQLMTHSYINVQNGQRLLLLDKELMETLTSRDEYQTSPPKVVEIGHQRQKTPEGLQESANVKISGTFSSGWTVRLPEFQFSSQNKEYPDREDCTTEKGKKTTVETEDSSVENPEQDLFVEQKERNPNIDALKVINKVKLEVQRQLIGTQREDQTAVSVRENASRGHLLTIPPAEAEGVPLVVDKDVFSVETPKKEHQPLRNTSFTCQNEQAHTLETEYIHDETGGSHIKPQSKKLQVQVKKTLGIKLELKSETDGNVHPLDKKEMLKKTFLAKDDHKESQEAQNIAGGSMMMSEKTDEEDSGREIFLSCSHPLELLEEATLNVLSAQLLDGGIFHEQTGQKLLLNEAISRGIVPSHTAVKLMEKLNMFQGFFDSQTCESLTTEEVINEGLMDEKLLHNVLMADKAISGVLDPRTQTLCSVKDAVTVGLLDKETATRILERQVVTGGIIDLKRGKKVSVTLASTLGLVDVADQPELINLEKASKGRDAEKTVRERLISLQMETTGLIDPDSKAPLTVVQSIDRGLLEREEAVRLLTKQVVDGGIIHHISGMRLSVDNAFRHGLIGEDLAEKLKRVENLNIHQIFNPETKENISLPKAIKLDLITSDLKREIQEVQAFTGNFVDLISGQRLTLAEAKKEGLLTNEAVLSPGMMHGIVDPENCRIVPYSELVKKCKIDIESGQRYLEVIPFSDIKDGVSDKVLTLSQAIQLGKVDFASTLKVLEAQANTGGIIDTATGKRLTLASALEEKLVDENMVRIIASHQVLNGGIVDIFSDQRVTLVEAIEKRLISPELANMIQIDSSEFSDHRAQIEKQEGIEVCALQNEFLGKDMLIACNQTAEMSCNKVEESERLFQVENQSAQEKVKVRVSDGEQAKKSREISLKEFGCKDQRKPRMSSDAKEFISIINPHNLKGKSLGQVSLTHPYSECDFKLKEVARNNMGNDTNEEQEKAVTKIEIISHMKQSTSCLDSEEIRENQGEVILEVQETYCETSGKLPSEQVLQQPMNARVKSKREKREVIVEESIRTCKPAFLSEEKLYQETAIRDEHDSHIKSQPREMTSSEKGKEADTEMGFSITFKIEESSSQVVPQGISVKHLDALTLFSSKQANEGKVNNLSLCLTLKPEENLSREIACGAQSEPFPCMTPRPEGLHYQESDGKAQVTGPSQISKTDKSFQGTTRQETNYQDSWVTSKTKETKHQISSSNECKEKSYQEVSFDPARGLKLEEITVSRPDSKEVRYLEFSDRKDLHHQGSKSDDKLCGTLKSEIATQELTGEKFLEMANPNVAGLEAGSIEDIVTQRGSRVLGSFLPEKLFKGVSQKENTGQQNAIISPTVLETSEEKTVSLTVCSAVKTEKTPQEKLRESPGSEQTPFMTAPEGKGNGGVNPEPFRATQNVFTRQLCLEHDEKLVSYLSLLRNIEMRTKQIQPLELNLAELQDLLCQAKVLERELKDLTTLVSQELECVNQIIISQPQEVPAQLLKALEKDAKNLQKSLSSVSDTWNSRLLHFQNAVEIEKTKVLNQHTQLEGRLQDLRAWVGNKNLILNSKGSNSEIDVDSLNLCLQQYEDLKQPMAERKAQLDALAFDIQFFISEHAQDLSPQQNRQMLRLLNELQRSFQDILEQTAAQVDALQGHLQQMEQEALVKTLQKQQNTCHQQLEDLCSWVGQAERALAGHQGRTTQQDLSALQKNQSDLKDLQDDIQNRATSFATVVKDIEGFMEENQTKLSPRELTALREKLHQAKEQYEALQEETRVAQKELEEAVTSALQQETEKSKAAKELAENKKKIDALLDWVTSVGSSGGQLLTNLPGMEQLSGASLEKGALDTTDGYMGVNQAPEKLDKQCEMMKARHQELLSQQQNFILATQSAQAFLDQHGHNLTPEEQQMLQQKLGELKEQYSTSLAQSEAELKQVQTLQDELQKFLQDHKEFESWLERSEKELENMHKGGSSPETLPSLLKRQGSFSEDVISHKGDLRFVTISGQKVLDMENSFKEGKEPSEIGNLVKDKLKDATERYTALHSKCTRLGSHLNMLLGQYHQFQNSADSLQAWMQACEANVEKLLSDTVASDPGVLQEQLATTKQLQEELAEHQVPVEKLQKVARDIMEIEGEPAPDHRHVQETTDSILSHFQSLSYSLAERSSLLQKAIAQSQSVQESLESLLQSIGEVEQNLEGKQVSSLSSGVIQEALATNMKLKQDIARQKSSLEATREMVTRFMETADSTTAAVLQGKLAEVSQRFEQLCLQQQEKESSLKKLLPQAEMFEHLSGKLQQFMENKSRMLASGNQPDQDITHFFQQIQELNLEMEDQQENLDTLEHLVTELSSCGFALDLCQHQDRVQNLRKDFTELQKTVKEREKDASSCQEQLDEFRKLVRTFQKWLKETEGSIPPTETSMSAKELEKQIEHLKSLLDDWASKGTLVEEINCKGTSLENLIMEITAPDSQGKTGSILPSVGSSVGSVNGYHTCKDLTEIQCDMSDVNLKYEKLGGVLHERQESLQAILNRMEEVHKEANSVLQWLESKEEVLKSMDAMSSPTKTETVKAQAESNKAFLAELEQNSPKIQKVKEALAGLLVTYPNSQEAENWKKIQEELNSRWERATEVTVARQRQLEESASHLACFQAAESQLRPWLMEKELMMGVLGPLSIDPNMLNAQKQQVQFMLKEFEARRQQHEQLNEAAQGILTGPGDVSLSTSQVQKELQSINQKWVELTDKLNSRSSQIDQAIVKSTQYQELLQDLSEKVRAVGQRLSVQSAISTQPEAVKQQLEETSEIRSDLEQLDHEVKEAQTLCDELSVLIGEQYLKDELKKRLETVALPLQGLEDLAADRINRLQAALASTQQFQQMFDELRTWLDDKQSQQAKNCPISAKLERLQSQLQENEEFQKSLNQHSGSYEVIVAEGESLLLSVPPGEEKRTLQNQLVELKNHWEELSKKTADRQSRLKDCMQKAQKYQWHVEDLVPWIEDCKAKMSELRVTLDPVQLESSLLRSKAMLNEVEKRRSLLEILNSAADILINSSEADEDGIRDEKAGINQNMDAVTEELQAKTGSLEEMTQRLREFQESFKNIEKKVEGAKHQLEIFDALGSQACSNKNLEKLRAQQEVLQALEPQVDYLRNFTQGLVEDAPDGSDASQLLHQAEVAQQEFLEVKQRVNSGCVMMENKLEGIGQFHCRVREMFSQLADLDDELDGMGAIGRDTDSLQSQIEDVRLFLNKIHVLKLDIEASEAECRHMLEEEGTLDLLGLKRELEALNKQCGKLTERGKARQEQLELTLGRVEDFYRKLKGLNDATTAAEEAEALQWVVGTEVEIINQQLADFKMFQKEQVDPLQMKLQQVNGLGQGLIQSAGKDCDVQGLEHDMEEINARWNTLNKKVAQRIAQLQEALLHCGKFQDALEPLLSWLADTEELIANQKPPSAEYKVVKAQIQEQKLLQRLLDDRKATVDMLQAEGGRIAQSAELADREKITGQLESLESRWTELLSKAAARQKQLEDILVLAKQFHETAEPISDFLSVTEKKLANSEPVGTQTAKIQQQIIRHKALEEDIENHATDVHQAVKIGQSLSSLTSPAEQGVLSEKIDSLQARYSEIQDRCCRKAALLDQALSNARLFGEDEVEVLNWLAEVEDKLSSVFVKDFKQDVLHRQHADHLALNEEIVNRKKNVDQAIKNGQALLKQTTGEEVLLIQEKLDGIKTRYADITVTSSKALRTLEQARQLATKFQSTYEELTGWLREVEEELATSGGQSPTGEQIPQFQQRQKELKKEVMEHRLVLDTVNEVSRALLELVPWRAREGLDKLVSDANEQYKLVSDTIGQRVDEIDAAIQRSQQYEQAADAELAWVAETKRKLMALGPIRLEQDQTTAQLQVQKAFSIDIIRHKDSMDELFSHRSEIFGTCGEEQKTVLQEKTESLIQQYEAISLLNSERYARLERAQVLVNQFWETYEELSPWIEETRALIAQLPSPAIDHEQLRQQQEEMRQLRESIAEHKPHIDKLLKIGPQLKELNPEEGEMVEEKYQKAENMYAQIKEEVRQRALALDEAVSQSTQFHDKIEPMLETLENLSSRLRMPPLIPAEVDKIRECISDNKSATVELEKLQPSFEALKRRGEELIGRSQGADKDLAAKEIQDKLDQMVFFWEDIKARAEEREIKFLDVLELAEKFWYDMAALLTTIKDTQDIVHDLESPGIDPSIIKQQVEAAETIKEETDGLHEELEFIRILGADLIFACGETEKPEVRKSIDEMNNAWENLNKTWKERLEKLEDAMQAAVQYQDTLQAMFDWLDNTVIKLCTMPPVGTDLNTVKDQLNEMKEFKVEVYQQQIEMEKLNHQGELMLKKATDETDRDIIREPLTELKHLWENLGEKIAHRQHKLEGALLALGQFQHALEELMSWLTHTEELLDAQRPISGDPKVIEVELAKHHVLKNDVLAHQATVETVNKAGNELLESSAGDDASSLRSRLEAMNQCWESVLQKTEEREQQLQSTLQQAQGFHSEIEDFLLELTRMESQLSASKPTGGLPETAREQLDTHMELYSQLKAKEETYNQLLDKGRLMLLSRDDSGSGSKTEQSVALLEQKWHVVSSKMEERKSKLEEALNLATEFQNSLQEFINWLTLAEQSLNIASPPSLILNTVLSQIEEHKVFANEVNAHRDQIIELDQTGNQLKFLSQKQDVVLIKNLLVSVQSRWEKVVQRSIERGRSLDDARKRAKQFHEAWKKLIDWLEDAESHLDSELEISNDPDKIKLQLSKHKEFQKTLGGKQPVYDTTIRTGRALKEKTLLPEDSQKLDNFLGEVRDKWDTVCGKSVERQHKLEEALLFSGQFMDALQALVDWLYKVEPQLAEDQPVHGDLDLVMNLMDAHKVFQKELGKRTGTVQVLKRSGRELIENSRDDTTWVKGQLQELSTRWDTVCKLSVSKQSRLEQALKQAEVFRDTVHMLLEWLSEAEQTLRFRGALPDDTEALQSLIDTHKEFMKKVEEKRVDVNSAVAMGEVILAVCHPDCITTIKHWITIIRARFEEVLTWAKQHQQRLETALSELVANAELLEELLAWIQWAETTLIQRDQEPIPQNIDRVKALIAEHQTFMEEMTRKQPDVDRVTKTYKRKNIEPTHAPFIEKSRSGGRKSLSQPTPPPMPILSQSEAKNPRINQLSARWQQVWLLALERQRKLNDALDRLEELKEFANFDFDVWRKKYMRWMNHKKSRVMDFFRRIDKDQDGKITRQEFIDGILASKFPTTKLEMTAVADIFDRDGDGYIDYYEFVAALHPNKDAYRPTTDADKIEDEVTRQVAQCKCAKRFQVEQIGENKYRFFLGNQFGDSQQLRLVRILRSTVMVRVGGGWMALDEFLVKNDPCRVHHPGSKIKRSDSSSSISSQSPIARGRTNIELREKFILPEGASQGMTPFRSRGRRSKPSSRAASPTRSSSSASQSNHSCTSMPSSPATPASGTKTSLQFSRCYDKPWLVNSKAGTPIRDSHSPDLQLPTPEVIPSSGSKLKRPTPTFHSSRTSLAGDTSNSSSPASTGAKTNRADPKKSASRPGSRAGSRAGSRASSRRGSDASDFDLLETQSACSDTSESSAAGGQGNSRRGLNKPSKIPTMSKKTTTASPRTPGPKR

SEQ ID NO: 13307 - protein, 6053 aa, Artificial Sequence
  Synthetic polypeptide
WCAPVVPAPQEAEDYELQLMTYKAFVESQQKSPGKRRRMLSSSDAITQEFMDLRTRYTALVTLTTQHVKYISDALRRLEEEEKVVEEEKQEHVEKVKELLGWVSTLARNTQGKATSSETKESTDIEKAILEQQVLSEELTTKKEQVSEAIKTSQIFLAKHGHKLSEKEKKQISEQLNALNKAYHDLCDGSANQLQQLQSQLAHQTEQKECRAVAGVIDLGTVEIFPIFKAMQKGLLDQDTGLVLLESQVIMSGLIAPETGENLSLEEGIARNLINPQMYQQLRELQDALALISRLTESRGPLSVVEAIEKRIISETVGLKILEAHLATGGFSLSPSENCINLEEAFHQGLISAWLHSVLESYLRTSKNLIDPNTAEKIGLLDLMQRCIVHQESGFKLLPVKQLAGGMVSLKSGRKVSIFRAVQEGLIDRQVTVRLLEAQLFAGGIVDPRTGHRLTVEEAVRHNLIDQDMACAILIRQLQTGGIIDTVTGQRLTIDEAVSNDLVAAKIALVILESLWSFMGLLWPESGEILPITDALEQGIVSTELAHKILSNRQHIKALFLPATTEILSWKKAIESGILDRDLANNLKSICIPDVMPHMQLADSAEQNINPGAAVLPCSKSHPKATASQSENLLFQLMTHSYINVQNGQRLLLLDKELMETLTSRDEYQTSPPKVVEIGHQRQKTPEGLQESANVKISGTFSSGWTVRLPEFQFSSQNKEYPDREDCTTEKGKKTTVETEDSSVENPEQDLFVEQKERNPNIDALKVINKVKLEVQRQLIGTQREDQTAVSVRENASRGHLLTIPPAEAEGVPLVVDKDVFSVETPKKEHQPLRNTSFTCQNEQAHTLETEYIHDETGGSHIKPQSKKLQVQVKKTLGIKLELKSETDGNVHPLDKKEMLKKTFLAKDDHKESQEAQNIAGGSMMMSEKTDEEDSGREIFLSCSHPLELLEEATLNVLSAQLLDGGIFHEQTGQKLLLNEAISRGIVPSHTAVKLMEKLNMFQGFFDSQTCESLTTEEVINEGLMDEKLLHNVLMADKAISGVLDPRTQTLCSVKDAVTVGLLDKETATRILERQVVTGGIIDLKRGKKVSVTLASTLGLVDVADQPELINLEKASKGRDAEKTVRERLISLQMETTGLIDPDSKAPLTVVQSIDRGLLEREEAVRLLTKQVVDGGIIHHISGMRLSVDNAFRHGLIGEDLAEKLKRVENLNIHQIFNPETKENISLPKAIKLDLITSDLKREIQEVQAFTGNFVDLISGQRLTLAEAKKEGLLTNEAVLSPGMMHGIVDPENCRIVPYSELVKKCKIDIESGQRYLEVIPFSDIKDGVSDKVLTLSQAIQLGKVDFASTLKVLEAQANTGGIIDTATGKRLTLASALEEKLVDENMVRIIASHQVLNGGIVDIFSDQRVTLVEAIEKRLISPELANMIQIDSSEFSDHRAQIEKQEGIEVCALQNEFLGKDMLIACNQTAEMSCNKVEESERLFQVENQSAQEKVKVRVSDGEQAKKSREISLKEFGCKDQRKPRMSSDAKEFISIINPHNLKGKSLGQVSLTHPYSECDFKLKEVARNNMGNDTNEEQEKAVTKIEIISHMKQSTSCLDSEEIRENQGEVILEVQETYCETSGKLPSEQVLQQPMNARVKSKREKREVIVEESIRTCKPAFLSEEKLYQETAIRDEHDSHIKSQPREMTSSEKGKEADTEMGFSITFKIEESSSQVVPQGISVKHLDALTLFSSKQANEGKVNNLSLCLTLKPEENLSREIACGAQSEPFPCMTPRPEGLHYQESDGKAQVTGPSQISKTDKSFQGTTRQETNYQDSWVTSKTKETKHQISSSNECKEKSYQEVSFDPARGLKLEEITVSRPDSKEVRYLEFSDRKDLHHQGSKSDDKLCGTLKSEIATQELTGEKFLEMANPNVAGLEAGSIEDIVTQRGSRVLGSFLPEKLFKGVSQKENTGQQNAIISPTVLETSEEKTVSLTVCSAVKTEKTPQEKLRESPGSEQTPFMTAPEGKGNGGVNPEPFRATQNVFTRQLCLEHDEKLVSYLSLLRNIEMRTKQIQPLELNLAELQDLLCQAKVLERELKDLTTLVSQELECVNQIIISQPQEVPAQLLKALEKDAKNLQKSLSSVSDTWNSRLLHFQNAVEIEKTKVLNQHTQLEGRLQDLRAWVGNKNLILNSKGSNSEIDVDSLNLCLQQYEDLKQPMAERKAQLDALAFDIQFFISEHAQDLSPQQNRQMLRLLNELQRSFQDILEQTAAQVDALQGHLQQMEQEALVKTLQKQQNTCHQQLEDLCSWVGQAERALAGHQGRTTQQDLSALQKNQSDLKDLQDDIQNRATSFATVVKDIEGFMEENQTKLSPRELTALREKLHQAKEQYEALQEETRVAQKELEEAVTSALQQETEKSKAAKELAENKKKIDALLDWVTSVGSSGGQLLTNLPGMEQLSGASLEKGALDTTDGYMGVNQAPEKLDKQCEMMKARHQELLSQQQNFILATQSAQAFLDQHGHNLTPEEQQMLQQKLGELKEQYSTSLAQSEAELKQVQTLQDELQKFLQDHKEFESWLERSEKELENMHKGGSSPETLPSLLKRQGSFSEDVISHKGDLRFVTISGQKVLDMENSFKEGKEPSEIGNLVKDKLKDATERYTALHSKCTRLGSHLNMLLGQYHQFQNSADSLQAWMQACEANVEKLLSDTVASDPGVLQEQLATTKQLQEELAEHQVPVEKLQKVARDIMEIEGEPAPDHRHVQETTDSILSHFQSLSYSLAERSSLLQKAIAQSQSVQESLESLLQSIGEVEQNLEGKQVSSLSSGVIQEALATNMKLKQDIARQKSSLEATREMVTRFMETADSTTAAVLQGKLAEVSQRFEQLCLQQQEKESSLKKLLPQAEMFEHLSGKLQQFMENKSRMLASGNQPDQDITHFFQQIQELNLEMEDQQENLDTLEHLVTELSSCGFALDLCQHQDRVQNLRKDFTELQKTVKEREKDASSCQEQLDEFRKLVRTFQKWLKETEGSIPPTETSMSAKELEKQIEHLKSLLDDWASKGTLVEEINCKGTSLENLIMEITAPDSQGKTGSILPSVGSSVGSVNGYHTCKDLTEIQCDMSDVNLKYEKLGGVLHERQESLQAILNRMEEVHKEANSVLQWLESKEEVLKSMDAMSSPTKTETVKAQAESNKAFLAELEQNSPKIQKVKEALAGLLVTYPNSQEAENWKKIQEELNSRWERATEVTVARQRQLEESASHLACFQAAESQLRPWLMEKELMMGVLGPLSIDPNMLNAQKQQVQFMLKEFEARRQQHEQLNEAAQGILTGPGDVSLSTSQVQKELQSINQKWVELTDKLNSRSSQIDQAIVKSTQYQELLQDLSEKVRAVGQRLSVQSAISTQPEAVKQQLEETSEIRSDLEQLDHEVKEAQTLCDELSVLIGEQYLKDELKKRLETVALPLQGLEDLAADRINRLQAALASTQQFQQMFDELRTWLDDKQSQQAKNCPISAKLERLQSQLQENEEFQKSLNQHSGSYEVIVAEGESLLLSVPPGEEKRTLQNQLVELKNHWEELSKKTADRQSRLKDCMQKAQKYQWHVEDLVPWIEDCKAKMSELRVTLDPVQLESSLLRSKAMLNEVEKRRSLLEILNSAADILINSSEADEDGIRDEKAGINQNMDAVTEELQAKTGSLEEMTQRLREFQESFKNIEKKVEGAKHQLEIFDALGSQACSNKNLEKLRAQQEVLQALEPQVDYLRNFTQGLVEDAPDGSDASQLLHQAEVAQQEFLEVKQRVNSGCVMMENKLEGIGQFHCRVREMFSQLADLDDELDGMGAIGRDTDSLQSQIEDVRLFLNKIHVLKLDIEASEAECRHMLEEEGTLDLLGLKRELEALNKQCGKLTERGKARQEQLELTLGRVEDFYRKLKGLNDATTAAEEAEALQWVVGTEVEIINQQLADFKMFQKEQVDPLQMKLQQVNGLGQGLIQSAGKDCDVQGLEHDMEEINARWNTLNKKVAQRIAQLQEALLHCGKFQDALEPLLSWLADTEELIANQKPPSAEYKVVKAQIQEQKLLQRLLDDRKATVDMLQAEGGRIAQSAELADREKITGQLESLESRWTELLSKAAARQKQLEDILVLAKQFHETAEPISDFLSVTEKKLANSEPVGTQTAKIQQQIIRHKALNEEIVNRKKNVDQAIKNGQALLKQTTGEEVLLIQEKLDGIKTRYADITVTSSKALRTLEQARQLATKFQSTYEELTGWLREVEEELATSGGQSPTGEQIPQFQQRQKELKKEVMEHRLVLDTVNEVSRALLELVPWRAREGLDKLVSDANEQYKLVSDTIGQRVDEIDAAIQRSQQYEQAADAELAWVAETKRKLMALGPIRLEQDQTTAQLQVQKAFSIDIIRHKDSMDELFSHRSEIFGTCGEEQKTVLQEKTESLIQQYEAISLLNSERYARLERAQVLVNQFWETYEELSPWIEETRALIAQLPSPAIDHEQLRQQQEEMRQLRESIAEHKPHIDKLLKIGPQLKELNPEEGEMVEEKYQKAENMYAQIKEEVRQRALALDEAVSQSTQITEFHDKIEPMLETLENLSSRLRMPPLIPAEVDKIRECISDNKSATVELEKLQPSFEALKRRGEELIGRSQGADKDLAAKEIQDKLDQMVFFWEDIKARAEEREIKFLDVLELAEKFWYDMAALLTTIKDTQDIVHDLESPGIDPSIIKQQVEAAETIKEETDGLHEELEFIRILGADLIFACGETEKPEVRKSIDEMNNAWENLNKTWKERLEKLEDAMQAAVQYQDTLQAMFDWLDNTVIKLCTMPPVGTDLNTVKDQLNEMKEFKVEVYQQQIEMEKLNHQGELMLKKATDETDRDIIREPLTELKHLWENLGEKIAHRQHKLEGALLALGQFQHALEELMSWLTHTEELLDAQRPISGDPKVIEVELAKHHVLKNDVLAHQATVETVNKAGNELLESSAGDDASSLRSRLEAMNQCWESVLQKTEEREQQLQSTLQQAQGFHSEIEDFLLELTRMESQLSASKPTGGLPETAREQLDTHMELYSQLKAKEETYNQLLDKGRLMLLSRDDSGSGSKTEQSVALLEQKWHVVSSKMEERKSKLEEALNLATEFQNSLQEFINWLTLAEQSLNIASPPSLILNTVLSQIEEHKVFANEVNAHRDQIIELDQTGNQLKFLSQKQDVVLIKNLLVSVQSRWEKVVQRSIERGRSLDDARKRAKQFHEAWKKLIDWLEDAESHLDSELEISNDPDKIKLQLSKHKEFQKTLGGKQPVYDTTIRTGRALKEKTLLPEDSQKLDNFLGEVRDKWDTVCGKSVERQHKLEEALLFSGQFMDALQALVDWLYKVEPQLAEDQPVHGDLDLVMNLMDAHKVFQKELGKRTGTVQVLKRSGRELIENSRDDTTWVKGQLQELSTRWDTVCKLSVSKQSRLEQALKQAEVFRDTVHMLLEWLSEAEQTLRFRGALPDDTEALQSLIDTHKEFMKKVEEKRVDVNSAVAMGEVILAVCHPDCITTIKHWITIIRARFEEVLTWAKQHQQRLETALSELVANAELLEELLAWIQWAETTLIQRDQEPIPQNIDRVKALIAEHQTFMEEMTRKQPDVDRVTKTYKRKNIEPTHAPFIEKSRSGGRKSLSQPTPPPMPILSQSEAKNPRINQLSARWQQVWLLALERQRKLNDALDRLEELKEFANFDFDVWRKKYMRWMNHKKSRVMDFFRRIDKDQDGKITRQEFIDGILASKFPTTKLEMTAVADIFDRDGDGYIDYYEFVAALHPNKDAYRPTTDADKIEDEVTRQVAQCKCAKRFQVEQIGENKYRFGDSQQLRLVRILRSTVMVRVGGGWMALDEFLVKNDPCRARGRTNIELREKFILPEGASQGMTPFRSRGRRSKPSSRAASPTRSSSSASQSNHSCTSMPSSPATPASGTKVIPSSGSKLKRPTPTFHSSRTSLAGDTSNSSSPASTGAKTNRADPKKSASRPGSRAGSRAGSRASSRRGSDASDFDLLETQSACSDTSESSAAGGQGNSRRGLNKPSKIPTMSKKTTTASPRTPGPKR

SEQ ID NO: 13308 - protein, 544 aa, Artificial Sequence
  Synthetic polypeptide
WCAPVVPAPQEAEDYELQLMTYKAFVESQQKSPGKRRRMLSSSDAITQEFMDLRTRYTALVTLTTQHVKYISDALRRLEEEEKVVEEEKQEHVEKVKELLGWVSTLARNTQGKATSSETKESTDIEKAILEQQVLSEELTTKKEQVSEAIKTSQIFLAKHGHKLSEKEKKQISEQLNALNKAYHDLCDGSANQLQQLQSQLAHQTEQKTLQKQQNTCHQQLEDLCSWVGQAERALAGHQGRTTQQDLSALQKNQSDLKDLQDDIQNRATSFATVVKDIEGFMEENQTKLSPRELTALREKLHQAKEQYEALQEETRVAQKELEEAVTSALQQETEKSKAAKELAENKKKIDALLDWVTSVGSSGGQLLTNLPGMEQLSGASLEKGALDTTDGYMGVNQAPEKLDKQCEMMKARHQELLSQQQNFILATQSAQAFLDQHGHNLTPEEQQMLQQKLGELKEQYSTSLAQSEAELKQVQTLQDELQKFLQDHKEFESWLERSEKELENMHKGGSSPETLPSLLKRQGSFSEDVISHKGDLRFVTISG

SEQ ID NO: 13309 - protein, 3965 aa, Artificial Sequence
  Synthetic polypeptide
WCAPVVPAPQEAEDYELQLMTYKAFVESQQKSPGKRRRMLSSSDAITQEFMDLRTRYTALVTLTTQHVKYISDALRRLEEEEKVVEEEKQEHVEKVKELLGWVSTLARNTQGKATSSETKESTDIEKAILEQQVLSEELTTKKEQVSEAIKTSQIFLAKHGHKLSEKEKKQISEQLNALNKAYHDLCDGSANQLQQLQSQLAHQTEQKTLQKQQNTCHQQLEDLCSWVGQAERALAGHQGRTTQQDLSALQKNQSDLKDLQDDIQNRATSFATVVKDIEGFMEENQTKLSPRELTALREKLHQAKEQYEALQEETRVAQKELEEAVTSALQQETEKSKAAKELAENKKKIDALLDWVTSVGSSGGQLLTNLPGMEQLSGASLEKGALDTTDGYMGVNQAPEKLDKQCEMMKARHQELLSQQQNFILATQSAQAFLDQHGHNLTPEEQQMLQQKLGELKEQYSTSLAQSEAELKQVQTLQDELQKFLQDHKEFESWLERSEKELENMHKGGSSPETLPSLLKRQGSFSEDVISHKGDLRFVTISGQKVLDMENSFKEGKEPSEIGNLVKDKLKDATERYTALHSKCTRLGSHLNMLLGQYHQFQNSADSLQAWMQACEANVEKLLSDTVASDPGVLQEQLATTKQLQEELAEHQVPVEKLQKVARDIMEIEGEPAPDHRHVQETTDSILSHFQSLSYSLAERSSLLQKAIAQSQSVQESLESLLQSIGEVEQNLEGKQVSSLSSGVIQEALATNMKLKQDIARQKSSLEATREMVTRFMETADSTTAAVLQGKLAEVSQRFEQLCLQQQEKESSLKKLLPQAEMFEHLSGKLQQFMENKSRMLASGNQPDQDITHFFQQIQELNLEMEDQQENLDTLEHLVTELSSCGFALDLCQHQDRVQNLRKDFTELQKTVKEREKDASSCQEQLDEFRKLVRTFQKWLKETEGSIPPTETSMSAKELEKQIEHLKSLLDDWASKGTLVEEINCKGTSLENLIMEITAPDSQGKTDLTEIQCDMSDVNLKYEKLGGVLHERQESLQAILNRMEEVHKEANSVLQWLESKEEVLKSMDAMSSPTKTETVKAQAESNKAFLAELEQNSPKIQKVKEALAGLLVTYPNSQEAENWKKIQEELNSRWERATEVTVARQRQLEESASHLACFQAAESQLRPWLMEKELMMGVLGPLSIDPNMLNAQKQQVQFMLKEFEARRQQHEQLNEAAQGILTGPGDVSLSTSQVQKELQSINQKWVELTDKLNSRSSQIDQAIVKSTQYQELLQDLSEKVRAVGQRLSVQSAISTQPEAVKQQLEETSEIRSDLEQLDHEVKEAQTLCDELSVLIGEQYLKDELKKRLETVALPLQGLEDLAADRINRLQAALASTQQFQQMFDELRTWLDDKQSQQAKNCPISAKLERLQSQLQENEEFQKSLNQHSGSYEVIVAEGESLLLSVPPGEEKRTLQNQLVELKNHWEELSKKTADRQSRLKDCMQKAQKYQWHVEDLVPWIEDCKAKMSELRVTLDPVQLESSLLRSKAMLNEVEKRRSLLEILNSAADILINSSEADEDGIRDEKAGINQNMDAVTEELQAKTGSLEEMTQRLREFQESFKNIEKKVEGAKHQLEIFDALGSQACSNKNLEKLRAQQEVLQALEPQVDYLRNFTQGLVEDAPDGSDASQLLHQAEVAQQEFLEVKQRVNSGCVMMENKLEGIGQFHCRVREMFSQLADLDDELDGMGAIGRDTDSLQSQIEDVRLFLNKIHVLKLDIEASEAECRHMLEEEGTLDLLGLKRELEALNKQCGKLTERGKARQEQLELTLGRVEDFYRKLKGLNDATTAAEEAEALQWVVGTEVEIINQQLADFKMFQKEQVDPLQMKLQQVNGLGQGLIQSAGKDCDVQGLEHDMEEINARWNTLNKKVAQRIAQLQEALLHCGKFQDALEPLLSWLADTEELIANQKPPSAEYKVVKAQIQEQKLLQRLLDDRKATVDMLQAEGGRIAQSAELADREKITGQLESLESRWTELLSKAAARQKQLEDILVLAKQFHETAEPISDFLSVTEKKLANSEPVGTQTAKIQQQIIRHKALNEEIVNRKKNVDQAIKNGQALLKQTTGEEVLLIQEKLDGIKTRYADITVTSSKALRTLEQARQLATKFQSTYEELTGWLREVEEELATSGGQSPTGEQIPQFQQRQKELKKEVMEHRLVLDTVNEVSRALLELVPWRAREGLDKLVSDANEQYKLVSDTIGQRVDEIDAAIQRSQQYEQAADAELAWVAETKRKLMALGPIRLEQDQTTAQLQVQKAFSIDIIRHKDSMDELFSHRSEIFGTCGEEQKTVLQEKTESLIQQYEAISLLNSERYARLERAQVLVNQFWETYEELSPWIEETRALIAQLPSPAIDHEQLRQQQEEMRQLRESIAEHKPHIDKLLKIGPQLKELNPEEGEMVEEKYQKAENMYAQIKEEVRQRALALDEAVSQSTQITEFHDKIEPMLETLENLSSRLRMPPLIPAEVDKIRECISDNKSATVELEKLQPSFEALKRRGEELIGRSQGADKDLAAKEIQDKLDQMVFFWEDIKARAEEREIKFLDVLELAEKFWYDMAALLTTIKDTQDIVHDLESPGIDPSIIKQQVEAAETIKEETDGLHEELEFIRILGADLIFACGETEKPEVRKSIDEMNNAWENLNKTWKERLEKLEDAMQAAVQYQDTLQAMFDWLDNTVIKLCTMPPVGTDLNTVKDQLNEMKEFKVEVYQQQIEMEKLNHQGELMLKKATDETDRDIIREPLTELKHLWENLGEKIAHRQHKLEGALLALGQFQHALEELMSWLTHTEELLDAQRPISGDPKVIEVELAKHHVLKNDVLAHQATVETVNKAGNELLESSAGDDASSLRSRLEAMNQCWESVLQKTEEREQQLQSTLQQAQGFHSEIEDFLLELTRMESQLSASKPTGGLPETAREQLDTHMELYSQLKAKEETYNQLLDKGRLMLLSRDDSGSGSKTEQSVALLEQKWHVVSSKMEERKSKLEEALNLATEFQNSLQEFINWLTLAEQSLNIASPPSLILNTVLSQIEEHKVFANEVNAHRDQIIELDQTGNQLKFLSQKQDVVLIKNLLVSVQSRWEKVVQRSIERGRSLDDARKRAKQFHEAWKKLIDWLEDAESHLDSELEISNDPDKIKLQLSKHKEFQKTLGGKQPVYDTTIRTGRALKEKTLLPEDSQKLDNFLGEVRDKWDTVCGKSVERQHKLEEALLFSGQFMDALQALVDWLYKVEPQLAEDQPVHGDLDLVMNLMDAHKVFQKELGKRTGTVQVLKRSGRELIENSRDDTTWVKGQLQELSTRWDTVCKLSVSKQSRLEQALKQAEVFRDTVHMLLEWLSEAEQTLRFRGALPDDTEALQSLIDTHKEFMKKVEEKRVDVNSAVAMGEVILAVCHPDCITTIKHWITIIRARFEEVLTWAKQHQQRLETALSELVANAELLEELLAWIQWAETTLIQRDQEPIPQNIDRVKALIAEHQTFMEEMTRKQPDVDRVTKTYKRKNIEPTHAPFIEKSRSGGRKSLSQPTPPPMPILSQSEAKNPRINQLSARWQQVWLLALERQRKLNDALDRLEELKEFANFDFDVWRKKYMRWMNHKKSRVMDFFRRIDKDQDGKITRQEFIDGILASKFPTTKLEMTAVADIFDRDGDGYIDYYEFVAALHPNKDAYRPTTDADKIEDEVTRQVAQCKCAKRFQVEQIGENKYRFGDSQQLRLVRILRSTVMVRVGGGWMALDEFLVKNDPCRARGRTNIELREKFILPEGASQGMTPFRSRGRRSKPSSRAASPTRSSSSASQSNHSCTSMPSSPATPASGTKVIPSSGSKLKRPTPTFHSSRTSLAGDTSNSSSPASTGAKTNRADPKKSASRPGSRAGSRAGSRASSRRGSDASDFDLLETQSACSDTSESSAAGGQGNSRRGLNKPSKIPTMSKKTTTASPRTPGPKR

SEQ ID NO: 13310 - protein, 3965 aa, Artificial Sequence
  Synthetic polypeptide
WCAPVVPAPQEAEDYELQLMTYKAFVESQQKSPGKRRRMLSSSDAITQEFMDLRTRYTALVTLTTQHVKYISDALRRLEEEEKVVEEEKQEHVEKVKELLGWVSTLARNTQGKATSSETKESTDIEKAILEQQVLSEELTTKKEQVSEAIKTSQIFLAKHGHKLSEKEKKQISEQLNALNKAYHDLCDGSANQLQQLQSQLAHQTEQKTLQKQQNTCHQQLEDLCSWVGQAERALAGHQGRTTQQDLSALQKNQSDLKDLQDDIQNRATSFATVVKDIEGFMEENQTKLSPRELTALREKLHQAKEQYEALQEETRVAQKELEEAVTSALQQETEKSKAAKELAENKKKIDALLDWVTSVGSSGGQLLTNLPGMEQLSGASLEKGALDTTDGYMGVNQAPEKLDKQCEMMKARHQELLSQQQNFILATQSAQAFLDQHGHNLTPEEQQMLQQKLGELKEQYSTSLAQSEAELKQVQTLQDELQKFLQDHKEFESWLERSEKELENMHKGGSSPETLPSLLKRQGSFSEDVISHKGDLRFVTISGQKVLDMENSFKEGKEPSEIGNLVKDKLKDATERYTALHSKCTRLGSHLNMLLGQYHQFQNSADSLQAWMQACEANVEKLLSDTVASDPGVLQEQLATTKQLQEELAEHQVPVEKLQKVARDIMEIEGEPAPDHRHVQETTDSILSHFQSLSYSLAERSSLLQKAIAQSQSVQESLESLLQSIGEVEQNLEGKQVSSLSSGVIQEALATNMKLKQDIARQKSSLEATREMVTRFMETADSTTAAVLQGKLAEVSQRFEQLCLQQQEKESSLKKLLPQAEMFEHLSGKLQQFMENKSRMLASGNQPDQDITHFFQQIQELNLEMEDQQENLDTLEHLVTELSSCGFALDLCQHQDRVQNLRKDFTELQKTVKEREKDASSCQEQLDEFRKLVRTFQKWLKETEGSIPPTETSMSAKELEKQIEHLKSLLDDWASKGTLVEEINCKGTSLENLIMEITAPDSQGKTDLTEIQCDMSDVNLKYEKLGGVLHERQESLQAILNRMEEVHKEANSVLQWLESKEEVLKSMDAMSSPTKTETVKAQAESNKAFLAELEQNSPKIQKVKEALAGLLVTYPNSQEAENWKKIQEELNSRWERATEVTVARQRQLEESASHLACFQAAESQLRPWLMEKELMMGVLGPLSIDPNMLNAQKQQVQFMLKEFEARRQQHEQLNEAAQGILTGPGDVSLSTSQVQKELQSINQKWVELTDKLNSRSSQIDQAIVKSTQYQELLQDLSEKVRAVGQRLSVQSAISTQPEAVKQQLEETSEIRSDLEQLDHEVKEAQTLCDELSVLIGEQYLKDELKKRLETVALPLQGLEDLAADRINRLQAALASTQQFQQMFDELRTWLDDKQSQQAKNCPISAKLERLQSQLQENEEFQKSLNQHSGSYEVIVAEGESLLLSVPPGEEKRTLQNQLVELKNHWEELSKKTADRQSRLKDCMQKAQKYQWHVEDLVPWIEDCKAKMSELRVTLDPVQLESSLLRSKAMLNEVEKRRSLLEILNSAADILINSSEADEDGIRDEKAGINQNMDAVTEELQAKTGSLEEMTQRLREFQESFKNIEKKVEGAKHQLEIFDALGSQACSNKNLEKLRAQQEVLQALEPQVDYLRNFTQGLVEDAPDGSDASQLLHQAEVAQQEFLEVKQRVNSGCVMMENKLEGIGQFHCRVREMFSQLADLDDELDGMGAIGRDTDSLQSQIEDVRLFLNKIHVLKLDIEASEAECRHMLEEEGTLDLLGLKRELEALNKQCGKLTERGKARQEQLELTLGRVEDFYRKLKGLNDATTAAEEAEALQWVVGTEVEIINQQLADFKMFQKEQVDPLQMKLQQVNGLGQGLIQSAGKDCDVQGLEHDMEEINARWNTLNKKVAQRIAQLQEALLHCGKFQDALEPLLSWLADTEELIANQKPPSAEYKVVKAQIQEQKLLQRLLDDRKATVDMLQAEGGRIAQSAELADREKITGQLESLESRWTELLSKAAARQKQLEDILVLAKQFHETAEPISDFLSVTEKKLANSEPVGTQTAKIQQQIIRHKALNEEIVNRKKNVDQAIKNGQALLKQTTGEEVLLIQEKLDGIKTRYADITVTSSKALRTLEQARQLATKFQSTYEELTGWLREVEEELATSGGQSPTGEQIPQFQQRQKELKKEVMEHRLVLDTVNEVSRALLELVPWRAREGLDKLVSDANEQYKLVSDTIGQRVDEIDAAIQRSQQYEQAADAELAWVAETKRKLMALGPIRLEQDQTTAQLQVQKAFSIDIIRHKDSMDELFSHRSEIFGTCGEEQKTVLQEKTESLIQQYEAISLLNSERYARLERAQVLVNQFWETYEELSPWIEETRALIAQLPSPAIDHEQLRQQQEEMRQLRESIAEHKPHIDKLLKIGPQLKELNPEEGEMVEEKYQKAENMYAQIKEEVRQRALALDEAVSQSTQVSQFHDKIEPMLETLENLSSRLRMPPLIPAEVDKIRECISDNKSATVELEKLQPSFEALKRRGEELIGRSQGADKDLAAKEIQDKLDQMVFFWEDIKARAEEREIKFLDVLELAEKFWYDMAALLTTIKDTQDIVHDLESPGIDPSIIKQQVEAAETIKEETDGLHEELEFIRILGADLIFACGETEKPEVRKSIDEMNNAWENLNKTWKERLEKLEDAMQAAVQYQDTLQAMFDWLDNTVIKLCTMPPVGTDLNTVKDQLNEMKEFKVEVYQQQIEMEKLNHQGELMLKKATDETDRDIIREPLTELKHLWENLGEKIAHRQHKLEGALLALGQFQHALEELMSWLTHTEELLDAQRPISGDPKVIEVELAKHHVLKNDVLAHQATVETVNKAGNELLESSAGDDASSLRSRLEAMNQCWESVLQKTEEREQQLQSTLQQAQGFHSEIEDFLLELTRMESQLSASKPTGGLPETAREQLDTHMELYSQLKAKEETYNQLLDKGRLMLLSRDDSGSGSKTEQSVALLEQKWHVVSSKMEERKSKLEEALNLATEFQNSLQEFINWLTLAEQSLNIASPPSLILNTVLSQIEEHKVFANEVNAHRDQIIELDQTGNQLKFLSQKQDVVLIKNLLVSVQSRWEKVVQRSIERGRSLDDARKRAKQFHEAWKKLIDWLEDAESHLDSELEISNDPDKIKLQLSKHKEFQKTLGGKQPVYDTTIRTGRALKEKTLLPEDSQKLDNFLGEVRDKWDTVCGKSVERQHKLEEALLFSGQFMDALQALVDWLYKVEPQLAEDQPVHGDLDLVMNLMDAHKVFQKELGKRTGTVQVLKRSGRELIENSRDDTTWVKGQLQELSTRWDTVCKLSVSKQSRLEQALKQAEVFRDTVHMLLEWLSEAEQTLRFRGALPDDTEALQSLIDTHKEFMKKVEEKRVDVNSAVAMGEVILAVCHPDCITTIKHWITIIRARFEEVLTWAKQHQQRLETALSELVANAELLEELLAWIQWAETTLIQRDQEPIPQNIDRVKALIAEHQTFMEEMTRKQPDVDRVTKTYKRKNIEPTHAPFIEKSRSGGRKSLSQPTPPPMPILSQSEAKNPRINQLSARWQQVWLLALERQRKLNDALDRLEELKEFANFDFDVWRKKYMRWMNHKKSRVMDFFRRIDKDQDGKITRQEFIDGILASKFPTTKLEMTAVADIFDRDGDGYIDYYEFVAALHPNKDAYRPTTDADKIEDEVTRQVAQCKCAKRFQVEQIGENKYRFGDSQQLRLVRILRSTVMVRVGGGWMALDEFLVKNDPCRARGRTNIELREKFILPEGASQGMTPFRSRGRRSKPSSRAASPTRSSSSASQSNHSCTSMPSSPATPASGTKVIPSSGSKLKRPTPTFHSSRTSLAGDTSNSSSPASTGAKTNRADPKKSASRPGSRAGSRAGSRASSRRGSDASDFDLLETQSACSDTSESSAAGGQGNSRRGLNKPSKIPTMSKKTTTASPRTPGPKR

SEQ ID NO: 13311 - protein, 4095 aa, Artificial Sequence
  Synthetic polypeptide
WCAPVVPAPQEAEDYELQLMTYKAFVESQQKSPGKRRRMLSSSDAITQEFMDLRTRYTALVTLTTQHVKYISDALRRLEEEEKVVEEEKQEHVEKVKELLGWVSTLARNTQGKATSSETKESTDIEKAILEQQVLSEELTTKKEQVSEAIKTSQIFLAKHGHKLSEKEKKQISEQLNALNKAYHDLCDGSANQLQQLQSQLAHQTEQKTLQKQQNTCHQQLEDLCSWVGQAERALAGHQGRTTQQDLSALQKNQSDLKDLQDDIQNRATSFATVVKDIEGFMEENQTKLSPRELTALREKLHQAKEQYEALQEETRVAQKELEEAVTSALQQETEKSKAAKELAENKKKIDALLDWVTSVGSSGGQLLTNLPGMEQLSGASLEKGALDTTDGYMGVNQAPEKLDKQCEMMKARHQELLSQQQNFILATQSAQAFLDQHGHNLTPEEQQMLQQKLGELKEQYSTSLAQSEAELKQVQTLQDELQKFLQDHKEFESWLERSEKELENMHKGGSSPETLPSLLKRQGSFSEDVISHKGDLRFVTISGQKVLDMENSFKEGKEPSEIGNLVKDKLKDATERYTALHSKCTRLGSHLNMLLGQYHQFQNSADSLQAWMQACEANVEKLLSDTVASDPGVLQEQLATTKQLQEELAEHQVPVEKLQKVARDIMEIEGEPAPDHRHVQETTDSILSHFQSLSYSLAERSSLLQKAIAQSQSVQESLESLLQSIGEVEQNLEGKQVSSLSSGVIQEALATNMKLKQDIARQKSSLEATREMVTRFMETADSTTAAVLQGKLAEVSQRFEQLCLQQQEKESSLKKLLPQAEMFEHLSGKLQQFMENKSRMLASGNQPDQDITHFFQQIQELNLEMEDQQENLDTLEHLVTELSSCGFALDLCQHQDRVQNLRKDFTELQKTVKEREKDASSCQEQLDEFRKLVRTFQKWLKETEGSIPPTETSMSAKELEKQIEHLKSLLDDWASKGTLVEEINCKGTSLENLIMEITAPDSQGKTGSILPSVGSSVGSVNGYHTCKDLTEIQCDMSDVNLKYEKLGGVLHERQESLQAILNRMEEVHKEANSVLQWLESKEEVLKSMDAMSSPTKTETVKAQAESNKAFLAELEQNSPKIQKVKEALAGLLVTYPNSQEAENWKKIQEELNSRWERATEVTVARQRQLEESASHLACFQAAESQLRPWLMEKELMMGVLGPLSIDPNMLNAQKQQVQFMLKEFEARRQQHEQLNEAAQGILTGPGDVSLSTSQVQKELQSINQKWVELTDKLNSRSSQIDQAIVKSTQYQELLQDLSEKVRAVGQRLSVQSAISTQPEAVKQQLEETSEIRSDLEQLDHEVKEAQTLCDELSVLIGEQYLKDELKKRLETVALPLQGLEDLAADRINRLQAALASTQQFQQMFDELRTWLDDKQSQQAKNCPISAKLERLQSQLQENEEFQKSLNQHSGSYEVIVAEGESLLLSVPPGEEKRTLQNQLVELKNHWEELSKKTADRQSRLKDCMQKAQKYQWHVEDLVPWIEDCKAKMSELRVTLDPVQLESSLLRSKAMLNEVEKRRSLLEILNSAADILINSSEADEDGIRDEKAGINQNMDAVTEELQAKTGSLEEMTQRLREFQESFKNIEKKVEGAKHQLEIFDALGSQACSNKNLEKLRAQQEVLQALEPQVDYLRNFTQGLVEDAPDGSDASQLLHQAEVAQQEFLEVKQRVNSGCVMMENKLEGIGQFHCRVREMFSQLADLDDELDGMGAIGRDTDSLQSQIEDVRLFLNKIHVLKLDIEASEAECRHMLEEEGTLDLLGLKRELEALNKQCGKLTERGKARQEQLELTLGRVEDFYRKLKGLNDATTAAEEAEALQWVVGTEVEIINQQLADFKMFQKEQVDPLQMKLQQVNGLGQGLIQSAGKDCDVQGLEHDMEEINARWNTLNKKVAQRIAQLQEALLHCGKFQDALEPLLSWLADTEELIANQKPPSAEYKVVKAQIQEQKLLQRLLDDRKATVDMLQAEGGRIAQSAELADREKITGQLESLESRWTELLSKAAARQKQLEDILVLAKQFHETAEPISDFLSVTEKKLANSEPVGTQTAKIQQQIIRHKALEEDIENHATDVHQAVKIGQSLSSLTSPAEQGVLSEKIDSLQARYSEIQDRCCRKAALLDQALSNARLFGEDEVEVLNWLAEVEDKLSSVFVKDFKQDVLHRQHADHLALNEEIVNRKKNVDQAIKNGQALLKQTTGEEVLLIQEKLDGIKTRYADITVTSSKALRTLEQARQLATKFQSTYEELTGWLREVEEELATSGGQSPTGEQIPQFQQRQKELKKEVMEHRLVLDTVNEVSRALLELVPWRAREGLDKLVSDANEQYKLVSDTIGQRVDEIDAAIQRSQQYEQAADAELAWVAETKRKLMALGPIRLEQDQTTAQLQVQKAFSIDIIRHKDSMDELFSHRSEIFGTCGEEQKTVLQEKTESLIQQYEAISLLNSERYARLERAQVLVNQFWETYEELSPWIEETRALIAQLPSPAIDHEQLRQQQEEMRQLRESIAEHKPHIDKLLKIGPQLKELNPEEGEMVEEKYQKAENMYAQIKEEVRQRALALDEAVSQSTQITEFHDKIEPMLETLENLSSRLRMPPLIPAEVDKIRECISDNKSATVELEKLQPSFEALKRRGEELIGRSQGADKDLAAKEIQDKLDQMVFFWEDIKARAEEREIKFLDVLELAEKFWYDMAALLTTIKDTQDIVHDLESPGIDPSIIKQQVEAAETIKEETDGLHEELEFIRILGADLIFACGETEKPEVRKSIDEMNNAWENLNKTWKERLEKLEDAMQAAVQYQDTLQAMFDWLDNTVIKLCTMPPVGTDLNTVKDQLNEMKEFKVEVYQQQIEMEKLNHQGELMLKKATDETDRDIIREPLTELKHLWENLGEKIAHRQHKLEGALLALGQFQHALEELMSWLTHTEELLDAQRPISGDPKVIEVELAKHHVLKNDVLAHQATVETVNKAGNELLESSAGDDASSLRSRLEAMNQCWESVLQKTEEREQQLQSTLQQAQGFHSEIEDFLLELTRMESQLSASKPTGGLPETAREQLDTHMELYSQLKAKEETYNQLLDKGRLMLLSRDDSGSGSKTEQSVALLEQKWHVVSSKMEERKSKLEEALNLATEFQNSLQEFINWLTLAEQSLNIASPPSLILNTVLSQIEEHKVFANEVNAHRDQIIELDQTGNQLKFLSQKQDVVLIKNLLVSVQSRWEKVVQRSIERGRSLDDARKRAKQFHEAWKKLIDWLEDAESHLDSELEISNDPDKIKLQLSKHKEFQKTLGGKQPVYDTTIRTGRALKEKTLLPEDSQKLDNFLGEVRDKWDTVCGKSVERQHKLEEALLFSGQFMDALQALVDWLYKVEPQLAEDQPVHGDLDLVMNLMDAHKVFQKELGKRTGTVQVLKRSGRELIENSRDDTTWVKGQLQELSTRWDTVCKLSVSKQSRLEQALKQAEVFRDTVHMLLEWLSEAEQTLRFRGALPDDTEALQSLIDTHKEFMKKVEEKRVDVNSAVAMGEVILAVCHPDCITTIKHWITIIRARFEEVLTWAKQHQQRLETALSELVANAELLEELLAWIQWAETTLIQRDQEPIPQNIDRVKALIAEHQTFMEEMTRKQPDVDRVTKTYKRKNIEPTHAPFIEKSRSGGRKSLSQPTPPPMPILSQSEAKNPRINQLSARWQQVWLLALERQRKLNDALDRLEELKEFANFDFDVWRKKYMRWMNHKKSRVMDFFRRIDKDQDGKITRQEFIDGILASKFPTTKLEMTAVADIFDRDGDGYIDYYEFVAALHPNKDAYRPTTDADKIEDEVTRQVAQCKCAKRFQVEQIGENKYRFGDSQQLRLVRILRSTVMVRVGGGWMALDEFLVKNDPCRARGRTNIELREKFILPEGASQGMTPFRSRGRRSKPSSRAASPTRSSSSASQSNHSCTSMPSSPATPASGTKVIPSSGSKLKRPTPTFHSSRTSLAGDTSNSSSPASTGAKTNRADPKKSASRPGSRAGSRAGSRASSRRGSDASDFDLLETQSACSDTSESSAAGGQGNSRRGLNKPSKIPTMSKKTTTASPRTPGPKR

SEQ ID NO: 13312 - protein, 4095 aa, Artificial Sequence
  Synthetic polypeptide
WCAPVVPAPQEAEDYELQLMTYKAFVESQQKSPGKRRRMLSSSDAITQEFMDLRTRYTALVTLTTQHVKYISDALRRLEEEEKVVEEEKQEHVEKVKELLGWVSTLARNTQGKATSSETKESTDIEKAILEQQVLSEELTTKKEQVSEAIKTSQIFLAKHGHKLSEKEKKQISEQLNALNKAYHDLCDGSANQLQQLQSQLAHQTEQKTLQKQQNTCHQQLEDLCSWVGQAERALAGHQGRTTQQDLSALQKNQSDLKDLQDDIQNRATSFATVVKDIEGFMEENQTKLSPRELTALREKLHQAKEQYEALQEETRVAQKELEEAVTSALQQETEKSKAAKELAENKKKIDALLDWVTSVGSSGGQLLTNLPGMEQLSGASLEKGALDTTDGYMGVNQAPEKLDKQCEMMKARHQELLSQQQNFILATQSAQAFLDQHGHNLTPEEQQMLQQKLGELKEQYSTSLAQSEAELKQVQTLQDELQKFLQDHKEFESWLERSEKELENMHKGGSSPETLPSLLKRQGSFSEDVISHKGDLRFVTISGQKVLDMENSFKEGKEPSEIGNLVKDKLKDATERYTALHSKCTRLGSHLNMLLGQYHQFQNSADSLQAWMQACEANVEKLLSDTVASDPGVLQEQLATTKQLQEELAEHQVPVEKLQKVARDIMEIEGEPAPDHRHVQETTDSILSHFQSLSYSLAERSSLLQKAIAQSQSVQESLESLLQSIGEVEQNLEGKQVSSLSSGVIQEALATNMKLKQDIARQKSSLEATREMVTRFMETADSTTAAVLQGKLAEVSQRFEQLCLQQQEKESSLKKLLPQAEMFEHLSGKLQQFMENKSRMLASGNQPDQDITHFFQQIQELNLEMEDQQENLDTLEHLVTELSSCGFALDLCQHQDRVQNLRKDFTELQKTVKEREKDASSCQEQLDEFRKLVRTFQKWLKETEGSIPPTETSMSAKELEKQIEHLKSLLDDWASKGTLVEEINCKGTSLENLIMEITAPDSQGKTGSILPSVGSSVGSVNGYHTCKDLTEIQCDMSDVNLKYEKLGGVLHERQESLQAILNRMEEVHKEANSVLQWLESKEEVLKSMDAMSSPTKTETVKAQAESNKAFLAELEQNSPKIQKVKEALAGLLVTYPNSQEAENWKKIQEELNSRWERATEVTVARQRQLEESASHLACFQAAESQLRPWLMEKELMMGVLGPLSIDPNMLNAQKQQVQFMLKEFEARRQQHEQLNEAAQGILTGPGDVSLSTSQVQKELQSINQKWVELTDKLNSRSSQIDQAIVKSTQYQELLQDLSEKVRAVGQRLSVQSAISTQPEAVKQQLEETSEIRSDLEQLDHEVKEAQTLCDELSVLIGEQYLKDELKKRLETVALPLQGLEDLAADRINRLQAALASTQQFQQMFDELRTWLDDKQSQQAKNCPISAKLERLQSQLQENEEFQKSLNQHSGSYEVIVAEGESLLLSVPPGEEKRTLQNQLVELKNHWEELSKKTADRQSRLKDCMQKAQKYQWHVEDLVPWIEDCKAKMSELRVTLDPVQLESSLLRSKAMLNEVEKRRSLLEILNSAADILINSSEADEDGIRDEKAGINQNMDAVTEELQAKTGSLEEMTQRLREFQESFKNIEKKVEGAKHQLEIFDALGSQACSNKNLEKLRAQQEVLQALEPQVDYLRNFTQGLVEDAPDGSDASQLLHQAEVAQQEFLEVKQRVNSGCVMMENKLEGIGQFHCRVREMFSQLADLDDELDGMGAIGRDTDSLQSQIEDVRLFLNKIHVLKLDIEASEAECRHMLEEEGTLDLLGLKRELEALNKQCGKLTERGKARQEQLELTLGRVEDFYRKLKGLNDATTAAEEAEALQWVVGTEVEIINQQLADFKMFQKEQVDPLQMKLQQVNGLGQGLIQSAGKDCDVQGLEHDMEEINARWNTLNKKVAQRIAQLQEALLHCGKFQDALEPLLSWLADTEELIANQKPPSAEYKVVKAQIQEQKLLQRLLDDRKATVDMLQAEGGRIAQSAELADREKITGQLESLESRWTELLSKAAARQKQLEDILVLAKQFHETAEPISDFLSVTEKKLANSEPVGTQTAKIQQQIIRHKALEEDIENHATDVHQAVKIGQSLSSLTSPAEQGVLSEKIDSLQARYSEIQDRCCRKAALLDQALSNARLFGEDEVEVLNWLAEVEDKLSSVFVKDFKQDVLHRQHADHLALNEEIVNRKKNVDQAIKNGQALLKQTTGEEVLLIQEKLDGIKTRYADITVTSSKALRTLEQARQLATKFQSTYEELTGWLREVEEELATSGGQSPTGEQIPQFQQRQKELKKEVMEHRLVLDTVNEVSRALLELVPWRAREGLDKLVSDANEQYKLVSDTIGQRVDEIDAAIQRSQQYEQAADAELAWVAETKRKLMALGPIRLEQDQTTAQLQVQKAFSIDIIRHKDSMDELFSHRSEIFGTCGEEQKTVLQEKTESLIQQYEAISLLNSERYARLERAQVLVNQFWETYEELSPWIEETRALIAQLPSPAIDHEQLRQQQEEMRQLRESIAEHKPHIDKLLKIGPQLKELNPEEGEMVEEKYQKAENMYAQIKEEVRQRALALDEAVSQSTQVSQFHDKIEPMLETLENLSSRLRMPPLIPAEVDKIRECISDNKSATVELEKLQPSFEALKRRGEELIGRSQGADKDLAAKEIQDKLDQMVFFWEDIKARAEEREIKFLDVLELAEKFWYDMAALLTTIKDTQDIVHDLESPGIDPSIIKQQVEAAETIKEETDGLHEELEFIRILGADLIFACGETEKPEVRKSIDEMNNAWENLNKTWKERLEKLEDAMQAAVQYQDTLQAMFDWLDNTVIKLCTMPPVGTDLNTVKDQLNEMKEFKVEVYQQQIEMEKLNHQGELMLKKATDETDRDIIREPLTELKHLWENLGEKIAHRQHKLEGALLALGQFQHALEELMSWLTHTEELLDAQRPISGDPKVIEVELAKHHVLKNDVLAHQATVETVNKAGNELLESSAGDDASSLRSRLEAMNQCWESVLQKTEEREQQLQSTLQQAQGFHSEIEDFLLELTRMESQLSASKPTGGLPETAREQLDTHMELYSQLKAKEETYNQLLDKGRLMLLSRDDSGSGSKTEQSVALLEQKWHVVSSKMEERKSKLEEALNLATEFQNSLQEFINWLTLAEQSLNIASPPSLILNTVLSQIEEHKVFANEVNAHRDQIIELDQTGNQLKFLSQKQDVVLIKNLLVSVQSRWEKVVQRSIERGRSLDDARKRAKQFHEAWKKLIDWLEDAESHLDSELEISNDPDKIKLQLSKHKEFQKTLGGKQPVYDTTIRTGRALKEKTLLPEDSQKLDNFLGEVRDKWDTVCGKSVERQHKLEEALLFSGQFMDALQALVDWLYKVEPQLAEDQPVHGDLDLVMNLMDAHKVFQKELGKRTGTVQVLKRSGRELIENSRDDTTWVKGQLQELSTRWDTVCKLSVSKQSRLEQALKQAEVFRDTVHMLLEWLSEAEQTLRFRGALPDDTEALQSLIDTHKEFMKKVEEKRVDVNSAVAMGEVILAVCHPDCITTIKHWITIIRARFEEVLTWAKQHQQRLETALSELVANAELLEELLAWIQWAETTLIQRDQEPIPQNIDRVKALIAEHQTFMEEMTRKQPDVDRVTKTYKRKNIEPTHAPFIEKSRSGGRKSLSQPTPPPMPILSQSEAKNPRINQLSARWQQVWLLALERQRKLNDALDRLEELKEFANFDFDVWRKKYMRWMNHKKSRVMDFFRRIDKDQDGKITRQEFIDGILASKFPTTKLEMTAVADIFDRDGDGYIDYYEFVAALHPNKDAYRPTTDADKIEDEVTRQVAQCKCAKRFQVEQIGENKYRFGDSQQLRLVRILRSTVMVRVGGGWMALDEFLVKNDPCRARGRTNIELREKFILPEGASQGMTPFRSRGRRSKPSSRAASPTRSSSSASQSNHSCTSMPSSPATPASGTKVIPSSGSKLKRPTPTFHSSRTSLAGDTSNSSSPASTGAKTNRADPKKSASRPGSRAGSRAGSRASSRRGSDASDFDLLETQSACSDTSESSAAGGQGNSRRGLNKPSKIPTMSKKTTTASPRTPGPKR

SEQ ID NO: 13313 - protein, 32 aa, Artificial Sequence
  Synthetic polypeptide
DVSERTSGSSSDEIAAGEWTWPGINSECRKRL

SEQ ID NO: 13314 - protein, 280 aa, Artificial Sequence
  Synthetic polypeptide
MGTVATPVIPALWEAEMFQKEQVDPLQMKLQQVNGLGQGLIQSAGKDCDVQGLEHDMEEINARWNTLNKKVAQRIAQLQEALLHCGKFQDALEPLLSWLADTEELIANQKPPSAEYKVVKAQIQEQKLLQRLLDDRKATVDMLQAEGGRIAQSAELADREKITGQLESLESRWTELLSKAAARQKQLEDILVLAKQFHETAEPISDFLSVTEKKLANSEPVGTQTAKIQQQIIRHKALEEDIENHATDVHQAVKIGQSLSSLTSPAEQGVLSEKIDSLQA

SEQ ID NO: 13315 - protein, 2299 aa, Artificial Sequence
  Synthetic polypeptide
MGTVATPVIPALWEAEMFQKEQVDPLQMKLQQVNGLGQGLIQSAGKDCDVQGLEHDMEEINARWNTLNKKVAQRIAQLQEALLHCGKFQDALEPLLSWLADTEELIANQKPPSAEYKVVKAQIQEQKLLQRLLDDRKATVDMLQAEGGRIAQSAELADREKITGQLESLESRWTELLSKAAARQKQLEDILVLAKQFHETAEPISDFLSVTEKKLANSEPVGTQTAKIQQQIIRHKALEEDIENHATDVHQAVKIGQSLSSLTSPAEQGVLSEKIDSLQARYSEIQDRCCRKAALLDQALSNARLFGEDEVEVLNWLAEVEDKLSSVFVKDFKQDVLHRQHADHLALNEEIVNRKKNVDQAIKNGQALLKQTTGEEVLLIQEKLDGIKTRYADITVTSSKALRTLEQARQLATKFQSTYEELTGWLREVEEELATSGGQSPTGEQIPQFQQRQKELKKEVMEHRLVLDTVNEVSRALLELVPWRAREGLDKLVSDANEQYKLVSDTIGQRVDEIDAAIQRSQQYEQAADAELAWVAETKRKLMALGPIRLEQDQTTAQLQVQKAFSIDIIRHKDSMDELFSHRSEIFGTCGEEQKTVLQEKTESLIQQYEAISLLNSERYARLERAQVLVNQFWETYEELSPWIEETRALIAQLPSPAIDHEQLRQQQEEMRQLRESIAEHKPHIDKLLKIGPQLKELNPEEGEMVEEKYQKAENMYAQIKEEVRQRALALDEAVSQSTQFHDKIEPMLETLENLSSRLRMPPLIPAEVDKIRECISDNKSATVELEKLQPSFEALKRRGEELIGRSQGADKDLAAKEIQDKLDQMVFFWEDIKARAEEREIKFLDVLELAEKFWYDMAALLTTIKDTQDIVHDLESPGIDPSIIKQQVEAAETIKEETDGLHEELEFIRILGADLIFACGETEKPEVRKSIDEMNNAWENLNKTWKERLEKLEDAMQAAVQYQDTLQAMFDWLDNTVIKLCTMPPVGTDLNTVKDQLNEMKEFKVEVYQQQIEMEKLNHQGELMLKKATDETDRDIIREPLTELKHLWENLGEKIAHRQHKLEGALLALGQFQHALEELMSWLTHTEELLDAQRPISGDPKVIEVELAKHHVLKNDVLAHQATVETVNKAGNELLESSAGDDASSLRSRLEAMNQCWESVLQKTEEREQQLQSTLQQAQGFHSEIEDFLLELTRMESQLSASKPTGGLPETAREQLDTHMELYSQLKAKEETYNQLLDKGRLMLLSRDDSGSGSKTEQSVALLEQKWHVVSSKMEERKSKLEEALNLATEFQNSLQEFINWLTLAEQSLNIASPPSLILNTVLSQIEEHKVFANEVNAHRDQIIELDQTGNQLKFLSQKQDVVLIKNLLVSVQSRWEKVVQRSIERGRSLDDARKRAKQFHEAWKKLIDWLEDAESHLDSELEISNDPDKIKLQLSKHKEFQKTLGGKQPVYDTTIRTGRALKEKTLLPEDSQKLDNFLGEVRDKWDTVCGKSVERQHKLEEALLFSGQFMDALQALVDWLYKVEPQLAEDQPVHGDLDLVMNLMDAHKVFQKELGKRTGTVQVLKRSGRELIENSRDDTTWVKGQLQELSTRWDTVCKLSVSKQSRLEQALKQAEVFRDTVHMLLEWLSEAEQTLRFRGALPDDTEALQSLIDTHKEFMKKVEEKRVDVNSAVAMGEVILAVCHPDCITTIKHWITIIRARFEEVLTWAKQHQQRLETALSELVANAELLEELLAWIQWAETTLIQRDQEPIPQNIDRVKALIAEHQTFMEEMTRKQPDVDRVTKTYKRKNIEPTHAPFIEKSRSGGRKSLSQPTPPPMPILSQSEAKNPRINQLSARWQQVWLLALERQRKLNDALDRLEELKEFANFDFDVWRKKYMRWMNHKKSRVMDFFRRIDKDQDGKITRQEFIDGILASKFPTTKLEMTAVADIFDRDGDGYIDYYEFVAALHPNKDAYRPTTDADKIEDEVTRQVAQCKCAKRFQVEQIGENKYRFFLGNQFGDSQQLRLVRILRSTVMVRVGGGWMALDEFLVKNDPCRVHHPGSKIKRSDSSSSISSQSPIARGRTNIELREKFILPEGASQGMTPFRSRGRRSKPSSRAASPTRSSSSASQSNHSCTSMPSSPATPASGTKTSLQFSRCYDKPWLVNSKAGTPIRDSHSPDLQLPTPEVIPSSGSKLKRPTPTFHSSRTSLAGDTSNSSSPASTGAKTNRADPKKSASRPGSRAGSRAGSRASSRRGSDASDFDLLETQSACSDTSESSAAGGQGNSRRGLNKPSKIPTMSKKTTTASPRTPGPKR

SEQ ID NO: 13316 - protein, 2242 aa, Artificial Sequence
  Synthetic polypeptide
MGTVATPVIPALWEAEMFQKEQVDPLQMKLQQVNGLGQGLIQSAGKDCDVQGLEHDMEEINARWNTLNKKVAQRIAQLQEALLHCGKFQDALEPLLSWLADTEELIANQKPPSAEYKVVKAQIQEQKLLQRLLDDRKATVDMLQAEGGRIAQSAELADREKITGQLESLESRWTELLSKAAARQKQLEDILVLAKQFHETAEPISDFLSVTEKKLANSEPVGTQTAKIQQQIIRHKALEEDIENHATDVHQAVKIGQSLSSLTSPAEQGVLSEKIDSLQARYSEIQDRCCRKAALLDQALSNARLFGEDEVEVLNWLAEVEDKLSSVFVKDFKQDVLHRQHADHLALNEEIVNRKKNVDQAIKNGQALLKQTTGEEVLLIQEKLDGIKTRYADITVTSSKALRTLEQARQLATKFQSTYEELTGWLREVEEELATSGGQSPTGEQIPQFQQRQKELKKEVMEHRLVLDTVNEVSRALLELVPWRAREGLDKLVSDANEQYKLVSDTIGQRVDEIDAAIQRSQQYEQAADAELAWVAETKRKLMALGPIRLEQDQTTAQLQVQKAFSIDIIRHKDSMDELFSHRSEIFGTCGEEQKTVLQEKTESLIQQYEAISLLNSERYARLERAQVLVNQFWETYEELSPWIEETRALIAQLPSPAIDHEQLRQQQEEMRQLRESIAEHKPHIDKLLKIGPQLKELNPEEGEMVEEKYQKAENMYAQIKEEVRQRALALDEAVSQSTQITEFHDKIEPMLETLENLSSRLRMPPLIPAEVDKIRECISDNKSATVELEKLQPSFEALKRRGEELIGRSQGADKDLAAKEIQDKLDQMVFFWEDIKARAEEREIKFLDVLELAEKFWYDMAALLTTIKDTQDIVHDLESPGIDPSIIKQQVEAAETIKEETDGLHEELEFIRILGADLIFACGETEKPEVRKSIDEMNNAWENLNKTWKERLEKLEDAMQAAVQYQDTLQAMFDWLDNTVIKLCTMPPVGTDLNTVKDQLNEMKEFKVEVYQQQIEMEKLNHQGELMLKKATDETDRDIIREPLTELKHLWENLGEKIAHRQHKLEGALLALGQFQHALEELMSWLTHTEELLDAQRPISGDPKVIEVELAKHHVLKNDVLAHQATVETVNKAGNELLESSAGDDASSLRSRLEAMNQCWESVLQKTEEREQQLQSTLQQAQGFHSEIEDFLLELTRMESQLSASKPTGGLPETAREQLDTHMELYSQLKAKEETYNQLLDKGRLMLLSRDDSGSGSKTEQSVALLEQKWHVVSSKMEERKSKLEEALNLATEFQNSLQEFINWLTLAEQSLNIASPPSLILNTVLSQIEEHKVFANEVNAHRDQIIELDQTGNQLKFLSQKQDVVLIKNLLVSVQSRWEKVVQRSIERGRSLDDARKRAKQFHEAWKKLIDWLEDAESHLDSELEISNDPDKIKLQLSKHKEFQKTLGGKQPVYDTTIRTGRALKEKTLLPEDSQKLDNFLGEVRDKWDTVCGKSVERQHKLEEALLFSGQFMDALQALVDWLYKVEPQLAEDQPVHGDLDLVMNLMDAHKVFQKELGKRTGTVQVLKRSGRELIENSRDDTTWVKGQLQELSTRWDTVCKLSVSKQSRLEQALKQAEVFRDTVHMLLEWLSEAEQTLRFRGALPDDTEALQSLIDTHKEFMKKVEEKRVDVNSAVAMGEVILAVCHPDCITTIKHWITIIRARFEEVLTWAKQHQQRLETALSELVANAELLEELLAWIQWAETTLIQRDQEPIPQNIDRVKALIAEHQTFMEEMTRKQPDVDRVTKTYKRKNIEPTHAPFIEKSRSGGRKSLSQPTPPPMPILSQSEAKNPRINQLSARWQQVWLLALERQRKLNDALDRLEELKEFANFDFDVWRKKYMRWMNHKKSRVMDFFRRIDKDQDGKITRQEFIDGILASKFPTTKLEMTAVADIFDRDGDGYIDYYEFVAALHPNKDAYRPTTDADKIEDEVTRQVAQCKCAKRFQVEQIGENKYRFFLGNQFGDSQQLRLVRILRSTVMVRVGGGWMALDEFLVKNDPCRARGRTNIELREKFILPEGASQGMTPFRSRGRRSKPSSRAASPTRSSSSASQSNHSCTSMPSSPATPASGTKVIPSSGSKLKRPTPTFHSSRTSLAGDTSNSSSPASTGAKTNRADPKKSASRPGSRAGSRAGSRASSRRGSDASDFDLLETQSACSDTSESSAAGGQGNSRRGLNKPSKIPTMSKKTTTASPRTPGPKR

SEQ ID NO: 13317 - protein, 2236 aa, Artificial Sequence
  Synthetic polypeptide
MGTVATPVIPALWEAEMFQKEQVDPLQMKLQQVNGLGQGLIQSAGKDCDVQGLEHDMEEINARWNTLNKKVAQRIAQLQEALLHCGKFQDALEPLLSWLADTEELIANQKPPSAEYKVVKAQIQEQKLLQRLLDDRKATVDMLQAEGGRIAQSAELADREKITGQLESLESRWTELLSKAAARQKQLEDILVLAKQFHETAEPISDFLSVTEKKLANSEPVGTQTAKIQQQIIRHKALEEDIENHATDVHQAVKIGQSLSSLTSPAEQGVLSEKIDSLQARYSEIQDRCCRKAALLDQALSNARLFGEDEVEVLNWLAEVEDKLSSVFVKDFKQDVLHRQHADHLALNEEIVNRKKNVDQAIKNGQALLKQTTGEEVLLIQEKLDGIKTRYADITVTSSKALRTLEQARQLATKFQSTYEELTGWLREVEEELATSGGQSPTGEQIPQFQQRQKELKKEVMEHRLVLDTVNEVSRALLELVPWRAREGLDKLVSDANEQYKLVSDTIGQRVDEIDAAIQRSQQYEQAADAELAWVAETKRKLMALGPIRLEQDQTTAQLQVQKAFSIDIIRHKDSMDELFSHRSEIFGTCGEEQKTVLQEKTESLIQQYEAISLLNSERYARLERAQVLVNQFWETYEELSPWIEETRALIAQLPSPAIDHEQLRQQQEEMRQLRESIAEHKPHIDKLLKIGPQLKELNPEEGEMVEEKYQKAENMYAQIKEEVRQRALALDEAVSQSTQITEFHDKIEPMLETLENLSSRLRMPPLIPAEVDKIRECISDNKSATVELEKLQPSFEALKRRGEELIGRSQGADKDLAAKEIQDKLDQMVFFWEDIKARAEEREIKFLDVLELAEKFWYDMAALLTTIKDTQDIVHDLESPGIDPSIIKQQVEAAETIKEETDGLHEELEFIRILGADLIFACGETEKPEVRKSIDEMNNAWENLNKTWKERLEKLEDAMQAAVQYQDTLQAMFDWLDNTVIKLCTMPPVGTDLNTVKDQLNEMKEFKVEVYQQQIEMEKLNHQGELMLKKATDETDRDIIREPLTELKHLWENLGEKIAHRQHKLEGALLALGQFQHALEELMSWLTHTEELLDAQRPISGDPKVIEVELAKHHVLKNDVLAHQATVETVNKAGNELLESSAGDDASSLRSRLEAMNQCWESVLQKTEEREQQLQSTLQQAQGFHSEIEDFLLELTRMESQLSASKPTGGLPETAREQLDTHMELYSQLKAKEETYNQLLDKGRLMLLSRDDSGSGSKTEQSVALLEQKWHVVSSKMEERKSKLEEALNLATEFQNSLQEFINWLTLAEQSLNIASPPSLILNTVLSQIEEHKVFANEVNAHRDQIIELDQTGNQLKFLSQKQDVVLIKNLLVSVQSRWEKVVQRSIERGRSLDDARKRAKQFHEAWKKLIDWLEDAESHLDSELEISNDPDKIKLQLSKHKEFQKTLGGKQPVYDTTIRTGRALKEKTLLPEDSQKLDNFLGEVRDKWDTVCGKSVERQHKLEEALLFSGQFMDALQALVDWLYKVEPQLAEDQPVHGDLDLVMNLMDAHKVFQKELGKRTGTVQVLKRSGRELIENSRDDTTWVKGQLQELSTRWDTVCKLSVSKQSRLEQALKQAEVFRDTVHMLLEWLSEAEQTLRFRGALPDDTEALQSLIDTHKEFMKKVEEKRVDVNSAVAMGEVILAVCHPDCITTIKHWITIIRARFEEVLTWAKQHQQRLETALSELVANAELLEELLAWIQWAETTLIQRDQEPIPQNIDRVKALIAEHQTFMEEMTRKQPDVDRVTKTYKRKNIEPTHAPFIEKSRSGGRKSLSQPTPPPMPILSQSEAKNPRINQLSARWQQVWLLALERQRKLNDALDRLEELKEFANFDFDVWRKKYMRWMNHKKSRVMDFFRRIDKDQDGKITRQEFIDGILASKFPTTKLEMTAVADIFDRDGDGYIDYYEFVAALHPNKDAYRPTTDADKIEDEVTRQVAQCKCAKRFQVEQIGENKYRFGDSQQLRLVRILRSTVMVRVGGGWMALDEFLVKNDPCRARGRTNIELREKFILPEGASQGMTPFRSRGRRSKPSSRAASPTRSSSSASQSNHSCTSMPSSPATPASGTKVIPSSGSKLKRPTPTFHSSRTSLAGDTSNSSSPASTGAKTNRADPKKSASRPGSRAGSRAGSRASSRRGSDASDFDLLETQSACSDTSESSAAGGQGNSRRGLNKPSKIPTMSKKTTTASPRTPGPKR

SEQ ID NO: 13318 - protein, 2236 aa, Artificial Sequence
  Synthetic polypeptide
MGTVATPVIPALWEAEMFQKEQVDPLQMKLQQVNGLGQGLIQSAGKDCDVQGLEHDMEEINARWNTLNKKVAQRIAQLQEALLHCGKFQDALEPLLSWLADTEELIANQKPPSAEYKVVKAQIQEQKLLQRLLDDRKATVDMLQAEGGRIAQSAELADREKITGQLESLESRWTELLSKAAARQKQLEDILVLAKQFHETAEPISDFLSVTEKKLANSEPVGTQTAKIQQQIIRHKALEEDIENHATDVHQAVKIGQSLSSLTSPAEQGVLSEKIDSLQARYSEIQDRCCRKAALLDQALSNARLFGEDEVEVLNWLAEVEDKLSSVFVKDFKQDVLHRQHADHLALNEEIVNRKKNVDQAIKNGQALLKQTTGEEVLLIQEKLDGIKTRYADITVTSSKALRTLEQARQLATKFQSTYEELTGWLREVEEELATSGGQSPTGEQIPQFQQRQKELKKEVMEHRLVLDTVNEVSRALLELVPWRAREGLDKLVSDANEQYKLVSDTIGQRVDEIDAAIQRSQQYEQAADAELAWVAETKRKLMALGPIRLEQDQTTAQLQVQKAFSIDIIRHKDSMDELFSHRSEIFGTCGEEQKTVLQEKTESLIQQYEAISLLNSERYARLERAQVLVNQFWETYEELSPWIEETRALIAQLPSPAIDHEQLRQQQEEMRQLRESIAEHKPHIDKLLKIGPQLKELNPEEGEMVEEKYQKAENMYAQIKEEVRQRALALDEAVSQSTQVSQFHDKIEPMLETLENLSSRLRMPPLIPAEVDKIRECISDNKSATVELEKLQPSFEALKRRGEELIGRSQGADKDLAAKEIQDKLDQMVFFWEDIKARAEEREIKFLDVLELAEKFWYDMAALLTTIKDTQDIVHDLESPGIDPSIIKQQVEAAETIKEETDGLHEELEFIRILGADLIFACGETEKPEVRKSIDEMNNAWENLNKTWKERLEKLEDAMQAAVQYQDTLQAMFDWLDNTVIKLCTMPPVGTDLNTVKDQLNEMKEFKVEVYQQQIEMEKLNHQGELMLKKATDETDRDIIREPLTELKHLWENLGEKIAHRQHKLEGALLALGQFQHALEELMSWLTHTEELLDAQRPISGDPKVIEVELAKHHVLKNDVLAHQATVETVNKAGNELLESSAGDDASSLRSRLEAMNQCWESVLQKTEEREQQLQSTLQQAQGFHSEIEDFLLELTRMESQLSASKPTGGLPETAREQLDTHMELYSQLKAKEETYNQLLDKGRLMLLSRDDSGSGSKTEQSVALLEQKWHVVSSKMEERKSKLEEALNLATEFQNSLQEFINWLTLAEQSLNIASPPSLILNTVLSQIEEHKVFANEVNAHRDQIIELDQTGNQLKFLSQKQDVVLIKNLLVSVQSRWEKVVQRSIERGRSLDDARKRAKQFHEAWKKLIDWLEDAESHLDSELEISNDPDKIKLQLSKHKEFQKTLGGKQPVYDTTIRTGRALKEKTLLPEDSQKLDNFLGEVRDKWDTVCGKSVERQHKLEEALLFSGQFMDALQALVDWLYKVEPQLAEDQPVHGDLDLVMNLMDAHKVFQKELGKRTGTVQVLKRSGRELIENSRDDTTWVKGQLQELSTRWDTVCKLSVSKQSRLEQALKQAEVFRDTVHMLLEWLSEAEQTLRFRGALPDDTEALQSLIDTHKEFMKKVEEKRVDVNSAVAMGEVILAVCHPDCITTIKHWITIIRARFEEVLTWAKQHQQRLETALSELVANAELLEELLAWIQWAETTLIQRDQEPIPQNIDRVKALIAEHQTFMEEMTRKQPDVDRVTKTYKRKNIEPTHAPFIEKSRSGGRKSLSQPTPPPMPILSQSEAKNPRINQLSARWQQVWLLALERQRKLNDALDRLEELKEFANFDFDVWRKKYMRWMNHKKSRVMDFFRRIDKDQDGKITRQEFIDGILASKFPTTKLEMTAVADIFDRDGDGYIDYYEFVAALHPNKDAYRPTTDADKIEDEVTRQVAQCKCAKRFQVEQIGENKYRFGDSQQLRLVRILRSTVMVRVGGGWMALDEFLVKNDPCRARGRTNIELREKFILPEGASQGMTPFRSRGRRSKPSSRAASPTRSSSSASQSNHSCTSMPSSPATPASGTKVIPSSGSKLKRPTPTFHSSRTSLAGDTSNSSSPASTGAKTNRADPKKSASRPGSRAGSRAGSRASSRRGSDASDFDLLETQSACSDTSESSAAGGQGNSRRGLNKPSKIPTMSKKTTTASPRTPGPKR

SEQ ID NO: 13319 - protein, 2127 aa, Artificial Sequence
  Synthetic polypeptide
MGTVATPVIPALWEAEMFQKEQVDPLQMKLQQVNGLGQGLIQSAGKDCDVQGLEHDMEEINARWNTLNKKVAQRIAQLQEALLHCGKFQDALEPLLSWLADTEELIANQKPPSAEYKVVKAQIQEQKLLQRLLDDRKATVDMLQAEGGRIAQSAELADREKITGQLESLESRWTELLSKAAARQKQLEDILVLAKQFHETAEPISDFLSVTEKKLANSEPVGTQTAKIQQQIIRHKALNEEIVNRKKNVDQAIKNGQALLKQTTGEEVLLIQEKLDGIKTRYADITVTSSKALRTLEQARQLATKFQSTYEELTGWLREVEEELATSGGQSPTGEQIPQFQQRQKELKKEVMEHRLVLDTVNEVSRALLELVPWRAREGLDKLVSDANEQYKLVSDTIGQRVDEIDAAIQRSQQYEQAADAELAWVAETKRKLMALGPIRLEQDQTTAQLQVQKAFSIDIIRHKDSMDELFSHRSEIFGTCGEEQKTVLQEKTESLIQQYEAISLLNSERYARLERAQVLVNQFWETYEELSPWIEETRALIAQLPSPAIDHEQLRQQQEEMRQLRESIAEHKPHIDKLLKIGPQLKELNPEEGEMVEEKYQKAENMYAQIKEEVRQRALALDEAVSQSTQITEFHDKIEPMLETLENLSSRLRMPPLIPAEVDKIRECISDNKSATVELEKLQPSFEALKRRGEELIGRSQGADKDLAAKEIQDKLDQMVFFWEDIKARAEEREIKFLDVLELAEKFWYDMAALLTTIKDTQDIVHDLESPGIDPSIIKQQVEAAETIKEETDGLHEELEFIRILGADLIFACGETEKPEVRKSIDEMNNAWENLNKTWKERLEKLEDAMQAAVQYQDTLQAMFDWLDNTVIKLCTMPPVGTDLNTVKDQLNEMKEFKVEVYQQQIEMEKLNHQGELMLKKATDETDRDIIREPLTELKHLWENLGEKIAHRQHKLEGALLALGQFQHALEELMSWLTHTEELLDAQRPISGDPKVIEVELAKHHVLKNDVLAHQATVETVNKAGNELLESSAGDDASSLRSRLEAMNQCWESVLQKTEEREQQLQSTLQQAQGFHSEIEDFLLELTRMESQLSASKPTGGLPETAREQLDTHMELYSQLKAKEETYNQLLDKGRLMLLSRDDSGSGSKTEQSVALLEQKWHVVSSKMEERKSKLEEALNLATEFQNSLQEFINWLTLAEQSLNIASPPSLILNTVLSQIEEHKVFANEVNAHRDQIIELDQTGNQLKFLSQKQDVVLIKNLLVSVQSRWEKVVQRSIERGRSLDDARKRAKQFHEAWKKLIDWLEDAESHLDSELEISNDPDKIKLQLSKHKEFQKTLGGKQPVYDTTIRTGRALKEKTLLPEDSQKLDNFLGEVRDKWDTVCGKSVERQHKLEEALLFSGQFMDALQALVDWLYKVEPQLAEDQPVHGDLDLVMNLMDAHKVFQKELGKRTGTVQVLKRSGRELIENSRDDTTWVKGQLQELSTRWDTVCKLSVSKQSRLEQALKQAEVFRDTVHMLLEWLSEAEQTLRFRGALPDDTEALQSLIDTHKEFMKKVEEKRVDVNSAVAMGEVILAVCHPDCITTIKHWITIIRARFEEVLTWAKQHQQRLETALSELVANAELLEELLAWIQWAETTLIQRDQEPIPQNIDRVKALIAEHQTFMEEMTRKQPDVDRVTKTYKRKNIEPTHAPFIEKSRSGGRKSLSQPTPPPMPILSQSEAKNPRINQLSARWQQVWLLALERQRKLNDALDRLEELKEFANFDFDVWRKKYMRWMNHKKSRVMDFFRRIDKDQDGKITRQEFIDGILASKFPTTKLEMTAVADIFDRDGDGYIDYYEFVAALHPNKDAYRPTTDADKIEDEVTRQVAQCKCAKRFQVEQIGENKYRFGDSQQLRLVRILRSTVMVRVGGGWMALDEFLVKNDPCRARGRTNIELREKFILPEGASQGMTPFRSRGRRSKPSSRAASPTRSSSSASQSNHSCTSMPSSPATPASGTKVIPSSGSKLKRPTPTFHSSRTSLAGDTSNSSSPASTGAKTNRADPKKSASRPGSRAGSRAGSRASSRRGSDASDFDLLETQSACSDTSESSAAGGQGNSRRGLNKPSKIPTMSKKTTTASPRTPGPKR

SEQ ID NO: 13320 - protein, 2127 aa, Artificial Sequence
  Synthetic polypeptide
MGTVATPVIPALWEAEMFQKEQVDPLQMKLQQVNGLGQGLIQSAGKDCDVQGLEHDMEEINARWNTLNKKVAQRIAQLQEALLHCGKFQDALEPLLSWLADTEELIANQKPPSAEYKVVKAQIQEQKLLQRLLDDRKATVDMLQAEGGRIAQSAELADREKITGQLESLESRWTELLSKAAARQKQLEDILVLAKQFHETAEPISDFLSVTEKKLANSEPVGTQTAKIQQQIIRHKALNEEIVNRKKNVDQAIKNGQALLKQTTGEEVLLIQEKLDGIKTRYADITVTSSKALRTLEQARQLATKFQSTYEELTGWLREVEEELATSGGQSPTGEQIPQFQQRQKELKKEVMEHRLVLDTVNEVSRALLELVPWRAREGLDKLVSDANEQYKLVSDTIGQRVDEIDAAIQRSQQYEQAADAELAWVAETKRKLMALGPIRLEQDQTTAQLQVQKAFSIDIIRHKDSMDELFSHRSEIFGTCGEEQKTVLQEKTESLIQQYEAISLLNSERYARLERAQVLVNQFWETYEELSPWIEETRALIAQLPSPAIDHEQLRQQQEEMRQLRESIAEHKPHIDKLLKIGPQLKELNPEEGEMVEEKYQKAENMYAQIKEEVRQRALALDEAVSQSTQVSQFHDKIEPMLETLENLSSRLRMPPLIPAEVDKIRECISDNKSATVELEKLQPSFEALKRRGEELIGRSQGADKDLAAKEIQDKLDQMVFFWEDIKARAEEREIKFLDVLELAEKFWYDMAALLTTIKDTQDIVHDLESPGIDPSIIKQQVEAAETIKEETDGLHEELEFIRILGADLIFACGETEKPEVRKSIDEMNNAWENLNKTWKERLEKLEDAMQAAVQYQDTLQAMFDWLDNTVIKLCTMPPVGTDLNTVKDQLNEMKEFKVEVYQQQIEMEKLNHQGELMLKKATDETDRDIIREPLTELKHLWENLGEKIAHRQHKLEGALLALGQFQHALEELMSWLTHTEELLDAQRPISGDPKVIEVELAKHHVLKNDVLAHQATVETVNKAGNELLESSAGDDASSLRSRLEAMNQCWESVLQKTEEREQQLQSTLQQAQGFHSEIEDFLLELTRMESQLSASKPTGGLPETAREQLDTHMELYSQLKAKEETYNQLLDKGRLMLLSRDDSGSGSKTEQSVALLEQKWHVVSSKMEERKSKLEEALNLATEFQNSLQEFINWLTLAEQSLNIASPPSLILNTVLSQIEEHKVFANEVNAHRDQIIELDQTGNQLKFLSQKQDVVLIKNLLVSVQSRWEKVVQRSIERGRSLDDARKRAKQFHEAWKKLIDWLEDAESHLDSELEISNDPDKIKLQLSKHKEFQKTLGGKQPVYDTTIRTGRALKEKTLLPEDSQKLDNFLGEVRDKWDTVCGKSVERQHKLEEALLFSGQFMDALQALVDWLYKVEPQLAEDQPVHGDLDLVMNLMDAHKVFQKELGKRTGTVQVLKRSGRELIENSRDDTTWVKGQLQELSTRWDTVCKLSVSKQSRLEQALKQAEVFRDTVHMLLEWLSEAEQTLRFRGALPDDTEALQSLIDTHKEFMKKVEEKRVDVNSAVAMGEVILAVCHPDCITTIKHWITIIRARFEEVLTWAKQHQQRLETALSELVANAELLEELLAWIQWAETTLIQRDQEPIPQNIDRVKALIAEHQTFMEEMTRKQPDVDRVTKTYKRKNIEPTHAPFIEKSRSGGRKSLSQPTPPPMPILSQSEAKNPRINQLSARWQQVWLLALERQRKLNDALDRLEELKEFANFDFDVWRKKYMRWMNHKKSRVMDFFRRIDKDQDGKITRQEFIDGILASKFPTTKLEMTAVADIFDRDGDGYIDYYEFVAALHPNKDAYRPTTDADKIEDEVTRQVAQCKCAKRFQVEQIGENKYRFGDSQQLRLVRILRSTVMVRVGGGWMALDEFLVKNDPCRARGRTNIELREKFILPEGASQGMTPFRSRGRRSKPSSRAASPTRSSSSASQSNHSCTSMPSSPATPASGTKVIPSSGSKLKRPTPTFHSSRTSLAGDTSNSSSPASTGAKTNRADPKKSASRPGSRAGSRAGSRASSRRGSDASDFDLLETQSACSDTSESSAAGGQGNSRRGLNKPSKIPTMSKKTTTASPRTPGPKR

SEQ ID NO: 13321 - protein, 19 aa, Artificial Sequence
  Synthetic polypeptide
SQHFGRLRCFRKNKWILFR

SEQ ID NO: 13322 - protein, 107 aa, Artificial Sequence
  Synthetic polypeptide
DLILLLLLTRQKQLEDILVLAKQFHETAEPISDFLSVTEKKLANSEPVGTQTAKIQQQIIRHKALEEDIENHATDVHQAVKIGQSLSSLTSPAEQGVLSEKIDSLQA

SEQ ID NO: 13323 - protein, 2126 aa, Artificial Sequence
  Synthetic polypeptide
DLILLLLLTRQKQLEDILVLAKQFHETAEPISDFLSVTEKKLANSEPVGTQTAKIQQQIIRHKALEEDIENHATDVHQAVKIGQSLSSLTSPAEQGVLSEKIDSLQARYSEIQDRCCRKAALLDQALSNARLFGEDEVEVLNWLAEVEDKLSSVFVKDFKQDVLHRQHADHLALNEEIVNRKKNVDQAIKNGQALLKQTTGEEVLLIQEKLDGIKTRYADITVTSSKALRTLEQARQLATKFQSTYEELTGWLREVEEELATSGGQSPTGEQIPQFQQRQKELKKEVMEHRLVLDTVNEVSRALLELVPWRAREGLDKLVSDANEQYKLVSDTIGQRVDEIDAAIQRSQQYEQAADAELAWVAETKRKLMALGPIRLEQDQTTAQLQVQKAFSIDIIRHKDSMDELFSHRSEIFGTCGEEQKTVLQEKTESLIQQYEAISLLNSERYARLERAQVLVNQFWETYEELSPWIEETRALIAQLPSPAIDHEQLRQQQEEMRQLRESIAEHKPHIDKLLKIGPQLKELNPEEGEMVEEKYQKAENMYAQIKEEVRQRALALDEAVSQSTQFHDKIEPMLETLENLSSRLRMPPLIPAEVDKIRECISDNKSATVELEKLQPSFEALKRRGEELIGRSQGADKDLAAKEIQDKLDQMVFFWEDIKARAEEREIKFLDVLELAEKFWYDMAALLTTIKDTQDIVHDLESPGIDPSIIKQQVEAAETIKEETDGLHEELEFIRILGADLIFACGETEKPEVRKSIDEMNNAWENLNKTWKERLEKLEDAMQAAVQYQDTLQAMFDWLDNTVIKLCTMPPVGTDLNTVKDQLNEMKEFKVEVYQQQIEMEKLNHQGELMLKKATDETDRDIIREPLTELKHLWENLGEKIAHRQHKLEGALLALGQFQHALEELMSWLTHTEELLDAQRPISGDPKVIEVELAKHHVLKNDVLAHQATVETVNKAGNELLESSAGDDASSLRSRLEAMNQCWESVLQKTEEREQQLQSTLQQAQGFHSEIEDFLLELTRMESQLSASKPTGGLPETAREQLDTHMELYSQLKAKEETYNQLLDKGRLMLLSRDDSGSGSKTEQSVALLEQKWHVVSSKMEERKSKLEEALNLATEFQNSLQEFINWLTLAEQSLNIASPPSLILNTVLSQIEEHKVFANEVNAHRDQIIELDQTGNQLKFLSQKQDVVLIKNLLVSVQSRWEKVVQRSIERGRSLDDARKRAKQFHEAWKKLIDWLEDAESHLDSELEISNDPDKIKLQLSKHKEFQKTLGGKQPVYDTTIRTGRALKEKTLLPEDSQKLDNFLGEVRDKWDTVCGKSVERQHKLEEALLFSGQFMDALQALVDWLYKVEPQLAEDQPVHGDLDLVMNLMDAHKVFQKELGKRTGTVQVLKRSGRELIENSRDDTTWVKGQLQELSTRWDTVCKLSVSKQSRLEQALKQAEVFRDTVHMLLEWLSEAEQTLRFRGALPDDTEALQSLIDTHKEFMKKVEEKRVDVNSAVAMGEVILAVCHPDCITTIKHWITIIRARFEEVLTWAKQHQQRLETALSELVANAELLEELLAWIQWAETTLIQRDQEPIPQNIDRVKALIAEHQTFMEEMTRKQPDVDRVTKTYKRKNIEPTHAPFIEKSRSGGRKSLSQPTPPPMPILSQSEAKNPRINQLSARWQQVWLLALERQRKLNDALDRLEELKEFANFDFDVWRKKYMRWMNHKKSRVMDFFRRIDKDQDGKITRQEFIDGILASKFPTTKLEMTAVADIFDRDGDGYIDYYEFVAALHPNKDAYRPTTDADKIEDEVTRQVAQCKCAKRFQVEQIGENKYRFFLGNQFGDSQQLRLVRILRSTVMVRVGGGWMALDEFLVKNDPCRVHHPGSKIKRSDSSSSISSQSPIARGRTNIELREKFILPEGASQGMTPFRSRGRRSKPSSRAASPTRSSSSASQSNHSCTSMPSSPATPASGTKTSLQFSRCYDKPWLVNSKAGTPIRDSHSPDLQLPTPEVIPSSGSKLKRPTPTFHSSRTSLAGDTSNSSSPASTGAKTNRADPKKSASRPGSRAGSRAGSRASSRRGSDASDFDLLETQSACSDTSESSAAGGQGNSRRGLNKPSKIPTMSKKTTTASPRTPGPKR

SEQ ID NO: 13324 - protein, 2069 aa, Artificial Sequence
  Synthetic polypeptide
DLILLLLLTRQKQLEDILVLAKQFHETAEPISDFLSVTEKKLANSEPVGTQTAKIQQQIIRHKALEEDIENHATDVHQAVKIGQSLSSLTSPAEQGVLSEKIDSLQARYSEIQDRCCRKAALLDQALSNARLFGEDEVEVLNWLAEVEDKLSSVFVKDFKQDVLHRQHADHLALNEEIVNRKKNVDQAIKNGQALLKQTTGEEVLLIQEKLDGIKTRYADITVTSSKALRTLEQARQLATKFQSTYEELTGWLREVEEELATSGGQSPTGEQIPQFQQRQKELKKEVMEHRLVLDTVNEVSRALLELVPWRAREGLDKLVSDANEQYKLVSDTIGQRVDEIDAAIQRSQQYEQAADAELAWVAETKRKLMALGPIRLEQDQTTAQLQVQKAFSIDIIRHKDSMDELFSHRSEIFGTCGEEQKTVLQEKTESLIQQYEAISLLNSERYARLERAQVLVNQFWETYEELSPWIEETRALIAQLPSPAIDHEQLRQQQEEMRQLRESIAEHKPHIDKLLKIGPQLKELNPEEGEMVEEKYQKAENMYAQIKEEVRQRALALDEAVSQSTQITEFHDKIEPMLETLENLSSRLRMPPLIPAEVDKIRECISDNKSATVELEKLQPSFEALKRRGEELIGRSQGADKDLAAKEIQDKLDQMVFFWEDIKARAEEREIKFLDVLELAEKFWYDMAALLTTIKDTQDIVHDLESPGIDPSIIKQQVEAAETIKEETDGLHEELEFIRILGADLIFACGETEKPEVRKSIDEMNNAWENLNKTWKERLEKLEDAMQAAVQYQDTLQAMFDWLDNTVIKLCTMPPVGTDLNTVKDQLNEMKEFKVEVYQQQIEMEKLNHQGELMLKKATDETDRDIIREPLTELKHLWENLGEKIAHRQHKLEGALLALGQFQHALEELMSWLTHTEELLDAQRPISGDPKVIEVELAKHHVLKNDVLAHQATVETVNKAGNELLESSAGDDASSLRSRLEAMNQCWESVLQKTEEREQQLQSTLQQAQGFHSEIEDFLLELTRMESQLSASKPTGGLPETAREQLDTHMELYSQLKAKEETYNQLLDKGRLMLLSRDDSGSGSKTEQSVALLEQKWHVVSSKMEERKSKLEEALNLATEFQNSLQEFINWLTLAEQSLNIASPPSLILNTVLSQIEEHKVFANEVNAHRDQIIELDQTGNQLKFLSQKQDVVLIKNLLVSVQSRWEKVVQRSIERGRSLDDARKRAKQFHEAWKKLIDWLEDAESHLDSELEISNDPDKIKLQLSKHKEFQKTLGGKQPVYDTTIRTGRALKEKTLLPEDSQKLDNFLGEVRDKWDTVCGKSVERQHKLEEALLFSGQFMDALQALVDWLYKVEPQLAEDQPVHGDLDLVMNLMDAHKVFQKELGKRTGTVQVLKRSGRELIENSRDDTTWVKGQLQELSTRWDTVCKLSVSKQSRLEQALKQAEVFRDTVHMLLEWLSEAEQTLRFRGALPDDTEALQSLIDTHKEFMKKVEEKRVDVNSAVAMGEVILAVCHPDCITTIKHWITIIRARFEEVLTWAKQHQQRLETALSELVANAELLEELLAWIQWAETTLIQRDQEPIPQNIDRVKALIAEHQTFMEEMTRKQPDVDRVTKTYKRKNIEPTHAPFIEKSRSGGRKSLSQPTPPPMPILSQSEAKNPRINQLSARWQQVWLLALERQRKLNDALDRLEELKEFANFDFDVWRKKYMRWMNHKKSRVMDFFRRIDKDQDGKITRQEFIDGILASKFPTTKLEMTAVADIFDRDGDGYIDYYEFVAALHPNKDAYRPTTDADKIEDEVTRQVAQCKCAKRFQVEQIGENKYRFFLGNQFGDSQQLRLVRILRSTVMVRVGGGWMALDEFLVKNDPCRARGRTNIELREKFILPEGASQGMTPFRSRGRRSKPSSRAASPTRSSSSASQSNHSCTSMPSSPATPASGTKVIPSSGSKLKRPTPTFHSSRTSLAGDTSNSSSPASTGAKTNRADPKKSASRPGSRAGSRAGSRASSRRGSDASDFDLLETQSACSDTSESSAAGGQGNSRRGLNKPSKIPTMSKKTTTASPRTPGPKR

SEQ ID NO: 13325 - protein, 2063 aa, Artificial Sequence
  Synthetic polypeptide
DLILLLLLTRQKQLEDILVLAKQFHETAEPISDFLSVTEKKLANSEPVGTQTAKIQQQIIRHKALEEDIENHATDVHQAVKIGQSLSSLTSPAEQGVLSEKIDSLQARYSEIQDRCCRKAALLDQALSNARLFGEDEVEVLNWLAEVEDKLSSVFVKDFKQDVLHRQHADHLALNEEIVNRKKNVDQAIKNGQALLKQTTGEEVLLIQEKLDGIKTRYADITVTSSKALRTLEQARQLATKFQSTYEELTGWLREVEEELATSGGQSPTGEQIPQFQQRQKELKKEVMEHRLVLDTVNEVSRALLELVPWRAREGLDKLVSDANEQYKLVSDTIGQRVDEIDAAIQRSQQYEQAADAELAWVAETKRKLMALGPIRLEQDQTTAQLQVQKAFSIDIIRHKDSMDELFSHRSEIFGTCGEEQKTVLQEKTESLIQQYEAISLLNSERYARLERAQVLVNQFWETYEELSPWIEETRALIAQLPSPAIDHEQLRQQQEEMRQLRESIAEHKPHIDKLLKIGPQLKELNPEEGEMVEEKYQKAENMYAQIKEEVRQRALALDEAVSQSTQITEFHDKIEPMLETLENLSSRLRMPPLIPAEVDKIRECISDNKSATVELEKLQPSFEALKRRGEELIGRSQGADKDLAAKEIQDKLDQMVFFWEDIKARAEEREIKFLDVLELAEKFWYDMAALLTTIKDTQDIVHDLESPGIDPSIIKQQVEAAETIKEETDGLHEELEFIRILGADLIFACGETEKPEVRKSIDEMNNAWENLNKTWKERLEKLEDAMQAAVQYQDTLQAMFDWLDNTVIKLCTMPPVGTDLNTVKDQLNEMKEFKVEVYQQQIEMEKLNHQGELMLKKATDETDRDIIREPLTELKHLWENLGEKIAHRQHKLEGALLALGQFQHALEELMSWLTHTEELLDAQRPISGDPKVIEVELAKHHVLKNDVLAHQATVETVNKAGNELLESSAGDDASSLRSRLEAMNQCWESVLQKTEEREQQLQSTLQQAQGFHSEIEDFLLELTRMESQLSASKPTGGLPETAREQLDTHMELYSQLKAKEETYNQLLDKGRLMLLSRDDSGSGSKTEQSVALLEQKWHVVSSKMEERKSKLEEALNLATEFQNSLQEFINWLTLAEQSLNIASPPSLILNTVLSQIEEHKVFANEVNAHRDQIIELDQTGNQLKFLSQKQDVVLIKNLLVSVQSRWEKVVQRSIERGRSLDDARKRAKQFHEAWKKLIDWLEDAESHLDSELEISNDPDKIKLQLSKHKEFQKTLGGKQPVYDTTIRTGRALKEKTLLPEDSQKLDNFLGEVRDKWDTVCGKSVERQHKLEEALLFSGQFMDALQALVDWLYKVEPQLAEDQPVHGDLDLVMNLMDAHKVFQKELGKRTGTVQVLKRSGRELIENSRDDTTWVKGQLQELSTRWDTVCKLSVSKQSRLEQALKQAEVFRDTVHMLLEWLSEAEQTLRFRGALPDDTEALQSLIDTHKEFMKKVEEKRVDVNSAVAMGEVILAVCHPDCITTIKHWITIIRARFEEVLTWAKQHQQRLETALSELVANAELLEELLAWIQWAETTLIQRDQEPIPQNIDRVKALIAEHQTFMEEMTRKQPDVDRVTKTYKRKNIEPTHAPFIEKSRSGGRKSLSQPTPPPMPILSQSEAKNPRINQLSARWQQVWLLALERQRKLNDALDRLEELKEFANFDFDVWRKKYMRWMNHKKSRVMDFFRRIDKDQDGKITRQEFIDGILASKFPTTKLEMTAVADIFDRDGDGYIDYYEFVAALHPNKDAYRPTTDADKIEDEVTRQVAQCKCAKRFQVEQIGENKYRFGDSQQLRLVRILRSTVMVRVGGGWMALDEFLVKNDPCRARGRTNIELREKFILPEGASQGMTPFRSRGRRSKPSSRAASPTRSSSSASQSNHSCTSMPSSPATPASGTKVIPSSGSKLKRPTPTFHSSRTSLAGDTSNSSSPASTGAKTNRADPKKSASRPGSRAGSRAGSRASSRRGSDASDFDLLETQSACSDTSESSAAGGQGNSRRGLNKPSKIPTMSKKTTTASPRTPGPKR

SEQ ID NO: 13326 - protein, 2063 aa, Artificial Sequence
  Synthetic polypeptide
DLILLLLLTRQKQLEDILVLAKQFHETAEPISDFLSVTEKKLANSEPVGTQTAKIQQQIIRHKALEEDIENHATDVHQAVKIGQSLSSLTSPAEQGVLSEKIDSLQARYSEIQDRCCRKAALLDQALSNARLFGEDEVEVLNWLAEVEDKLSSVFVKDFKQDVLHRQHADHLALNEEIVNRKKNVDQAIKNGQALLKQTTGEEVLLIQEKLDGIKTRYADITVTSSKALRTLEQARQLATKFQSTYEELTGWLREVEEELATSGGQSPTGEQIPQFQQRQKELKKEVMEHRLVLDTVNEVSRALLELVPWRAREGLDKLVSDANEQYKLVSDTIGQRVDEIDAAIQRSQQYEQAADAELAWVAETKRKLMALGPIRLEQDQTTAQLQVQKAFSIDIIRHKDSMDELFSHRSEIFGTCGEEQKTVLQEKTESLIQQYEAISLLNSERYARLERAQVLVNQFWETYEELSPWIEETRALIAQLPSPAIDHEQLRQQQEEMRQLRESIAEHKPHIDKLLKIGPQLKELNPEEGEMVEEKYQKAENMYAQIKEEVRQRALALDEAVSQSTQVSQFHDKIEPMLETLENLSSRLRMPPLIPAEVDKIRECISDNKSATVELEKLQPSFEALKRRGEELIGRSQGADKDLAAKEIQDKLDQMVFFWEDIKARAEEREIKFLDVLELAEKFWYDMAALLTTIKDTQDIVHDLESPGIDPSIIKQQVEAAETIKEETDGLHEELEFIRILGADLIFACGETEKPEVRKSIDEMNNAWENLNKTWKERLEKLEDAMQAAVQYQDTLQAMFDWLDNTVIKLCTMPPVGTDLNTVKDQLNEMKEFKVEVYQQQIEMEKLNHQGELMLKKATDETDRDIIREPLTELKHLWENLGEKIAHRQHKLEGALLALGQFQHALEELMSWLTHTEELLDAQRPISGDPKVIEVELAKHHVLKNDVLAHQATVETVNKAGNELLESSAGDDASSLRSRLEAMNQCWESVLQKTEEREQQLQSTLQQAQGFHSEIEDFLLELTRMESQLSASKPTGGLPETAREQLDTHMELYSQLKAKEETYNQLLDKGRLMLLSRDDSGSGSKTEQSVALLEQKWHVVSSKMEERKSKLEEALNLATEFQNSLQEFINWLTLAEQSLNIASPPSLILNTVLSQIEEHKVFANEVNAHRDQIIELDQTGNQLKFLSQKQDVVLIKNLLVSVQSRWEKVVQRSIERGRSLDDARKRAKQFHEAWKKLIDWLEDAESHLDSELEISNDPDKIKLQLSKHKEFQKTLGGKQPVYDTTIRTGRALKEKTLLPEDSQKLDNFLGEVRDKWDTVCGKSVERQHKLEEALLFSGQFMDALQALVDWLYKVEPQLAEDQPVHGDLDLVMNLMDAHKVFQKELGKRTGTVQVLKRSGRELIENSRDDTTWVKGQLQELSTRWDTVCKLSVSKQSRLEQALKQAEVFRDTVHMLLEWLSEAEQTLRFRGALPDDTEALQSLIDTHKEFMKKVEEKRVDVNSAVAMGEVILAVCHPDCITTIKHWITIIRARFEEVLTWAKQHQQRLETALSELVANAELLEELLAWIQWAETTLIQRDQEPIPQNIDRVKALIAEHQTFMEEMTRKQPDVDRVTKTYKRKNIEPTHAPFIEKSRSGGRKSLSQPTPPPMPILSQSEAKNPRINQLSARWQQVWLLALERQRKLNDALDRLEELKEFANFDFDVWRKKYMRWMNHKKSRVMDFFRRIDKDQDGKITRQEFIDGILASKFPTTKLEMTAVADIFDRDGDGYIDYYEFVAALHPNKDAYRPTTDADKIEDEVTRQVAQCKCAKRFQVEQIGENKYRFGDSQQLRLVRILRSTVMVRVGGGWMALDEFLVKNDPCRARGRTNIELREKFILPEGASQGMTPFRSRGRRSKPSSRAASPTRSSSSASQSNHSCTSMPSSPATPASGTKVIPSSGSKLKRPTPTFHSSRTSLAGDTSNSSSPASTGAKTNRADPKKSASRPGSRAGSRAGSRASSRRGSDASDFDLLETQSACSDTSESSAAGGQGNSRRGLNKPSKIPTMSKKTTTASPRTPGPKR

SEQ ID NO: 13327 - protein, 1954 aa, Artificial Sequence
  Synthetic polypeptide
DLILLLLLTRQKQLEDILVLAKQFHETAEPISDFLSVTEKKLANSEPVGTQTAKIQQQIIRHKALNEEIVNRKKNVDQAIKNGQALLKQTTGEEVLLIQEKLDGIKTRYADITVTSSKALRTLEQARQLATKFQSTYEELTGWLREVEEELATSGGQSPTGEQIPQFQQRQKELKKEVMEHRLVLDTVNEVSRALLELVPWRAREGLDKLVSDANEQYKLVSDTIGQRVDEIDAAIQRSQQYEQAADAELAWVAETKRKLMALGPIRLEQDQTTAQLQVQKAFSIDIIRHKDSMDELFSHRSEIFGTCGEEQKTVLQEKTESLIQQYEAISLLNSERYARLERAQVLVNQFWETYEELSPWIEETRALIAQLPSPAIDHEQLRQQQEEMRQLRESIAEHKPHIDKLLKIGPQLKELNPEEGEMVEEKYQKAENMYAQIKEEVRQRALALDEAVSQSTQITEFHDKIEPMLETLENLSSRLRMPPLIPAEVDKIRECISDNKSATVELEKLQPSFEALKRRGEELIGRSQGADKDLAAKEIQDKLDQMVFFWEDIKARAEEREIKFLDVLELAEKFWYDMAALLTTIKDTQDIVHDLESPGIDPSIIKQQVEAAETIKEETDGLHEELEFIRILGADLIFACGETEKPEVRKSIDEMNNAWENLNKTWKERLEKLEDAMQAAVQYQDTLQAMFDWLDNTVIKLCTMPPVGTDLNTVKDQLNEMKEFKVEVYQQQIEMEKLNHQGELMLKKATDETDRDIIREPLTELKHLWENLGEKIAHRQHKLEGALLALGQFQHALEELMSWLTHTEELLDAQRPISGDPKVIEVELAKHHVLKNDVLAHQATVETVNKAGNELLESSAGDDASSLRSRLEAMNQCWESVLQKTEEREQQLQSTLQQAQGFHSEIEDFLLELTRMESQLSASKPTGGLPETAREQLDTHMELYSQLKAKEETYNQLLDKGRLMLLSRDDSGSGSKTEQSVALLEQKWHVVSSKMEERKSKLEEALNLATEFQNSLQEFINWLTLAEQSLNIASPPSLILNTVLSQIEEHKVFANEVNAHRDQIIELDQTGNQLKFLSQKQDVVLIKNLLVSVQSRWEKVVQRSIERGRSLDDARKRAKQFHEAWKKLIDWLEDAESHLDSELEISNDPDKIKLQLSKHKEFQKTLGGKQPVYDTTIRTGRALKEKTLLPEDSQKLDNFLGEVRDKWDTVCGKSVERQHKLEEALLFSGQFMDALQALVDWLYKVEPQLAEDQPVHGDLDLVMNLMDAHKVFQKELGKRTGTVQVLKRSGRELIENSRDDTTWVKGQLQELSTRWDTVCKLSVSKQSRLEQALKQAEVFRDTVHMLLEWLSEAEQTLRFRGALPDDTEALQSLIDTHKEFMKKVEEKRVDVNSAVAMGEVILAVCHPDCITTIKHWITIIRARFEEVLTWAKQHQQRLETALSELVANAELLEELLAWIQWAETTLIQRDQEPIPQNIDRVKALIAEHQTFMEEMTRKQPDVDRVTKTYKRKNIEPTHAPFIEKSRSGGRKSLSQPTPPPMPILSQSEAKNPRINQLSARWQQVWLLALERQRKLNDALDRLEELKEFANFDFDVWRKKYMRWMNHKKSRVMDFFRRIDKDQDGKITRQEFIDGILASKFPTTKLEMTAVADIFDRDGDGYIDYYEFVAALHPNKDAYRPTTDADKIEDEVTRQVAQCKCAKRFQVEQIGENKYRFGDSQQLRLVRILRSTVMVRVGGGWMALDEFLVKNDPCRARGRTNIELREKFILPEGASQGMTPFRSRGRRSKPSSRAASPTRSSSSASQSNHSCTSMPSSPATPASGTKVIPSSGSKLKRPTPTFHSSRTSLAGDTSNSSSPASTGAKTNRADPKKSASRPGSRAGSRAGSRASSRRGSDASDFDLLETQSACSDTSESSAAGGQGNSRRGLNKPSKIPTMSKKTTTASPRTPGPKR

SEQ ID NO: 13328 - protein, 1954 aa, Artificial Sequence
  Synthetic polypeptide
DLILLLLLTRQKQLEDILVLAKQFHETAEPISDFLSVTEKKLANSEPVGTQTAKIQQQIIRHKALNEEIVNRKKNVDQAIKNGQALLKQTTGEEVLLIQEKLDGIKTRYADITVTSSKALRTLEQARQLATKFQSTYEELTGWLREVEEELATSGGQSPTGEQIPQFQQRQKELKKEVMEHRLVLDTVNEVSRALLELVPWRAREGLDKLVSDANEQYKLVSDTIGQRVDEIDAAIQRSQQYEQAADAELAWVAETKRKLMALGPIRLEQDQTTAQLQVQKAFSIDIIRHKDSMDELFSHRSEIFGTCGEEQKTVLQEKTESLIQQYEAISLLNSERYARLERAQVLVNQFWETYEELSPWIEETRALIAQLPSPAIDHEQLRQQQEEMRQLRESIAEHKPHIDKLLKIGPQLKELNPEEGEMVEEKYQKAENMYAQIKEEVRQRALALDEAVSQSTQVSQFHDKIEPMLETLENLSSRLRMPPLIPAEVDKIRECISDNKSATVELEKLQPSFEALKRRGEELIGRSQGADKDLAAKEIQDKLDQMVFFWEDIKARAEEREIKFLDVLELAEKFWYDMAALLTTIKDTQDIVHDLESPGIDPSIIKQQVEAAETIKEETDGLHEELEFIRILGADLIFACGETEKPEVRKSIDEMNNAWENLNKTWKERLEKLEDAMQAAVQYQDTLQAMFDWLDNTVIKLCTMPPVGTDLNTVKDQLNEMKEFKVEVYQQQIEMEKLNHQGELMLKKATDETDRDIIREPLTELKHLWENLGEKIAHRQHKLEGALLALGQFQHALEELMSWLTHTEELLDAQRPISGDPKVIEVELAKHHVLKNDVLAHQATVETVNKAGNELLESSAGDDASSLRSRLEAMNQCWESVLQKTEEREQQLQSTLQQAQGFHSEIEDFLLELTRMESQLSASKPTGGLPETAREQLDTHMELYSQLKAKEETYNQLLDKGRLMLLSRDDSGSGSKTEQSVALLEQKWHVVSSKMEERKSKLEEALNLATEFQNSLQEFINWLTLAEQSLNIASPPSLILNTVLSQIEEHKVFANEVNAHRDQIIELDQTGNQLKFLSQKQDVVLIKNLLVSVQSRWEKVVQRSIERGRSLDDARKRAKQFHEAWKKLIDWLEDAESHLDSELEISNDPDKIKLQLSKHKEFQKTLGGKQPVYDTTIRTGRALKEKTLLPEDSQKLDNFLGEVRDKWDTVCGKSVERQHKLEEALLFSGQFMDALQALVDWLYKVEPQLAEDQPVHGDLDLVMNLMDAHKVFQKELGKRTGTVQVLKRSGRELIENSRDDTTWVKGQLQELSTRWDTVCKLSVSKQSRLEQALKQAEVFRDTVHMLLEWLSEAEQTLRFRGALPDDTEALQSLIDTHKEFMKKVEEKRVDVNSAVAMGEVILAVCHPDCITTIKHWITIIRARFEEVLTWAKQHQQRLETALSELVANAELLEELLAWIQWAETTLIQRDQEPIPQNIDRVKALIAEHQTFMEEMTRKQPDVDRVTKTYKRKNIEPTHAPFIEKSRSGGRKSLSQPTPPPMPILSQSEAKNPRINQLSARWQQVWLLALERQRKLNDALDRLEELKEFANFDFDVWRKKYMRWMNHKKSRVMDFFRRIDKDQDGKITRQEFIDGILASKFPTTKLEMTAVADIFDRDGDGYIDYYEFVAALHPNKDAYRPTTDADKIEDEVTRQVAQCKCAKRFQVEQIGENKYRFGDSQQLRLVRILRSTVMVRVGGGWMALDEFLVKNDPCRARGRTNIELREKFILPEGASQGMTPFRSRGRRSKPSSRAASPTRSSSSASQSNHSCTSMPSSPATPASGTKVIPSSGSKLKRPTPTFHSSRTSLAGDTSNSSSPASTGAKTNRADPKKSASRPGSRAGSRAGSRASSRRGSDASDFDLLETQSACSDTSESSAAGGQGNSRRGLNKPSKIPTMSKKTTTASPRTPGPKR

SEQ ID NO: 13329 - protein, 24 aa, Artificial Sequence
  Synthetic polypeptide
FDSTVATHQAKTAGRHPGSGQTVP

SEQ ID NO: 13330 - protein, 62 aa, Artificial Sequence
  Synthetic polypeptide
FYCCYSPGKNSWKTSWFWPNSSMRQLSLFLTSYLSQRKSLLTQNLLALRLPKYSSRSFGTRL

SEQ ID NO: 13331 - protein, 66 aa, Artificial Sequence
  Synthetic polypeptide
FYCCYSPGKNSWKTSWFWPNSSMRQLSLFLTSYLSQRKSLLTQNLLALRLPKYSSRSFGTRLWKKT

SEQ ID NO: 13332 - protein, 297 aa, Artificial Sequence
  Synthetic polypeptide
ARRSVSCLYSQPFGRPRLADHEFGDSQQLRLVRILRSTVMVRVGGGWMALDEFLVKNDPCRARGRTNIELREKFILPEGASQGMTPFRSRGRRSKPSSRAASPTRSSSSASQSNHSCTSMPSSPATPASGTKTSLQFSRCYDKPWLVNSKAGTPIRDSHSPDLQLPTPEVIPSSGSKLKRPTPTFHSSRTSLAGDTSNSSSPASTGAKTNRADPKKSASRPGSRAGSRAGSRASSRRGSDASDFDLLETQSACSDTSESSAAGGQGNSRRGLNKPSKIPTMSKKTTTASPRTPGPKR

SEQ ID NO: 13333 - protein, 260 aa, Artificial Sequence
  Synthetic polypeptide
ARRSVSCLYSQPFGRPRLADHEFGDSQQLRLVRILRSTVMVRVGGGWMALDEFLVKNDPCRARGRTNIELREKFILPEGASQGMTPFRSRGRRSKPSSRAASPTRSSSSASQSNHSCTSMPSSPATPASGTKVIPSSGSKLKRPTPTFHSSRTSLAGDTSNSSSPASTGAKTNRADPKKSASRPGSRAGSRAGSRASSRRGSDASDFDLLETQSACSDTSESSAAGGQGNSRRGLNKPSKIPTMSKKTTTASPRTPGPKR

SEQ ID NO: 13334 - protein, 150 aa, Artificial Sequence
  Synthetic polypeptide
ARRSVSCLYSQPFGRPRLADHEFGDSQQLRLVRILRSTVMVRVGGGWMALDEFLVKNDPCRVHHPGSKIKRSDSSSSISSQSPIARGRTNIELREKFILPEGASQGMTPFRSRGRRSKPSSRAASPTRSSSSASQSNHSCTSMPSSPATP

SEQ ID NO: 13335 - protein, 320 aa, Artificial Sequence
  Synthetic polypeptide
ARRSVSCLYSQPFGRPRLADHEFGDSQQLRLVRILRSTVMVRVGGGWMALDEFLVKNDPCRVHHPGSKIKRSDSSSSISSQSPIARGRTNIELREKFILPEGASQGMTPFRSRGRRSKPSSRAASPTRSSSSASQSNHSCTSMPSSPATPASGTKTSLQFSRCYDKPWLVNSKAGTPIRDSHSPDLQLPTPEVIPSSGSKLKRPTPTFHSSRTSLAGDTSNSSSPASTGAKTNRADPKKSASRPGSRAGSRAGSRASSRRGSDASDFDLLETQSACSDTSESSAAGGQGNSRRGLNKPSKIPTMSKKTTTASPRTPGPKR

SEQ ID NO: 13336 - protein, 51 aa, Artificial Sequence
  Synthetic polypeptide
GPAQCLMPVFPALWEAKTGGSRVWGFSAVAAGPYSAQHRDGSRWWRMDGLG

SEQ ID NO: 13337 - protein, 38 aa, Artificial Sequence
  Synthetic polypeptide
PGAVSHACIPSPLGGQDWRITSLGILSSCGWSVFCAAP

SEQ ID NO: 13338 - protein, 38 aa, Artificial Sequence
  Synthetic polypeptide
GRVRWLTPVIPALWEAEETEACPVALTSRPAPGPRPVP

SEQ ID NO: 13339 - protein, 18 aa, Artificial Sequence
  Synthetic polypeptide
PGAVAHACNPSTLGGRGD

SEQ ID NO: 13340 - protein, 121 aa, Artificial Sequence
  Synthetic polypeptide
SQHFGRPRRLRHALWPSLPDLHRVLGQYLRDTAALSPPKATVSDTCEEVEPSLLEILPKSSERTPLPLCSSQAQMDYRRLQPSCLGTMPLSVCPPMAESGSCCTTHIANHSYLPLSYWQQP

SEQ ID NO: 13341 - protein, 24 aa, Artificial Sequence
  Synthetic polypeptide
GRVRWLTPVIPALWEAEVGRSQGD

SEQ ID NO: 13342 - protein, 135 aa, Artificial Sequence
  Synthetic polypeptide
PGAVAHACNPSTLGGRGGQITRRLRHALWPSLPDLHRVLGQYLRDTAALSPPKATVSDTCEEVEPSLLEILPKSSERTPLPLCSSQAQMDYRRLQPSCLGTMPLSVCPPMAESGSCCTTHIANHSYLPLSYWQQP

SEQ ID NO: 13343 - protein, 34 aa, Artificial Sequence
  Synthetic polypeptide
SQHFGRPRWADHKETEACPVALTSRPAPGPRPVP

SEQ ID NO: 13344 - protein, 32 aa, Artificial Sequence
  Synthetic polypeptide
HGETPSLLKIQKISCAWWRGDNPFPKNADGTI

SEQ ID NO: 13345 - protein, 46 aa, Artificial Sequence
  Synthetic polypeptide
HGETPSLLKIQKISCAWWRGDNPFPKNADGTICYDSTHYKETWKAL

SEQ ID NO: 13346 - protein, 224 aa, Artificial Sequence
  Synthetic polypeptide
HGETPSLLKIQKISCAWWRGDNPFPKNADGTICYDSTHYKETWKALEALVAKGLVQALGLSNFNSRQIDDILSVASVRPAVLQVECHPYLAQNELIAHCQARGLEVTAYSPLGSSDRAWRDPDEPVLLEEPVVLALAEKYGRSPAQILLRWQVQRKVICIPKSITPSRILQNIKVFDFTFSPEEMKQLNALNKNWRYIVPMLTVDGKRVPRDAGHPLYPFNDPY

SEQ ID NO: 13347 - protein, 24 aa, Artificial Sequence
  Synthetic polypeptide
KYKKLAARGGGETTPSPRMLMGLY

SEQ ID NO: 13348 - protein, 38 aa, Artificial Sequence
  Synthetic polypeptide
KYKKLAARGGGETTPSPRMLMGLYATTPPTTRRLGRLW

SEQ ID NO: 13349 - protein, 86 aa, Artificial Sequence
  Synthetic polypeptide
KYKKLAARGGGETTPSPRMLMGLYATTPPTTRRLGRLWRHWWLRGWCRRWACPTSTVGRLMTYSVWPPCVQLSCRWNATHTWLKMS

SEQ ID NO: 13350 - protein, 14 aa, Artificial Sequence
  Synthetic polypeptide
LRVVAGRQPLPQEC

SEQ ID NO: 13351 - protein, 534 aa, Artificial Sequence
  Synthetic polypeptide
KYHLTQPSHYWVYTQRTINHAAIKTHAHAHERSESSEVAFVMQLVKKLMIIIARPARLLECLEFDPEEFYHLLEAAEGHAKEGQGIKCDIPRYIVSQLGLTRDPLEEMAQLSSCDSPDTPETDDSIEGHGASLPSKKTPSEEDFETIKLISNGAYGAVFLVRHKSTRQRFAMKKINKQNLILRNQIQQAFVERDILTFAENPFVVSMFCSFDTKRHLCMVMEYVEGGDCATLLKNIGALPVDMVRLYFAETVLALEYLHNYGIVHRDLKPDNLLITSMGHIKLTDFGLSKIGLMSLTTNLYEGHIEKDAREFLDKQVCGTPEYIAPEVILRQGYGKPVDWWAMGIILYEFLVGCVPFFGDTPEELFGQVISDEIVWPEGDEALPPDAQDLTSKLLHQNPLERLGTGSAYEVKQHPFFTGLDWTGLLRQKAEFIPQLESEDDTSYFDTRSERYHHMDSEDEEEVSEDGCLEIRQFSSCSPRFNKVYSSMERLSLLEERRTPPPTKRSLSEEKEDHSDGLAGLKGRDRSWVIGSPE

SEQ ID NO: 13352 - protein, 1430 aa, Artificial Sequence
  Synthetic polypeptide
KYHLTQPSHYWVYTQRTINHAAIKTHAHAHERSESSEVAFVMQLVKKLMIIIARPARLLECLEFDPEEFYHLLEAAEGHAKEGQGIKCDIPRYIVSQLGLTRDPLEEMAQLSSCDSPDTPETDDSIEGHGASLPSKKTPSEEDFETIKLISNGAYGAVFLVRHKSTRQRFAMKKINKQNLILRNQIQQAFVERDILTFAENPFVVSMFCSFDTKRHLCMVMEYVEGGDCATLLKNIGALPVDMVRLYFAETVLALEYLHNYGIVHRDLKPDNLLITSMGHIKLTDFGLSKIGLMSLTTNLYEGHIEKDAREFLDKQVCGTPEYIAPEVILRQGYGKPVDWWAMGIILYEFLVGCVPFFGDTPEELFGQVISDEIVWPEGDEALPPDAQDLTSKLLHQNPLERLGTGSAYEVKQHPFFTGLDWTGLLRQKAEFIPQLESEDDTSYFDTRSERYHHMDSEDEEEVSEDGCLEIRQFSSCSPRFNKVYSSMERLSLLEERRTPPPTKRSLSEEKEDHSDGLAGLKGRDRSWVIGSPEILRKRLSVSESSHTESDSSPPMTVRRRCSGLLDAPRFPEGPEEASSTLRRQPQEGIWVLTPPSGEGVSGPVTEHSGEQRPKLDEEAVGRSSGSSPAMETRGRGTSQLAEGATAKAISDLAVRRARHRLLSGDSTEKRTARPVNKVIKSASATALSLLIPSEHHTCSPLASPMSPHSQSSNPSSRDSSPSRDFLPALGSMRPPIIIHRAGKKYGFTLRAIRVYMGDSDVYTVHHMVWHVEDGGPASEAGLRQGDLITHVNGEPVHGLVHTEVVELILKSGNKVAISTTPLENTSIKVGPARKGSYKAKMARRSKRSRGKDGQESRKRSSLFRKITKQASLLHTSRSLSSLNRSLSSGESGPGSPTHSHSLSPRSPTQGYRVTPDAVHSVGGNSSQSSSPSSSVPSSPAGSGHTRPSSLHGLAPKLQRQYRSPRRKSAGSIPLSPLAHTPSPPPPTASPQRSPSPLSGHVAQAFPTKLHLSPPLGRQLSRPKSAEPPRSPLLKRVQSAEKLAAALAASEKKLATSRKHSLDLPHSELKKELPPREVSPLEVVGARSVLSGKGALPGKGVLQPAPSRALGTLRQDRAERRESLQKQEAIREVDSSEDDTEEGPENSQGAQELSLAPHPEVSQSVAPKGAGESGEEDPFPSRDPRSLGPMVPSLLTGITLGPPRMESPSGPHRRLGSPQAIEEAASSSSAGPNLGQSGATDPIPPEGCWKAQHLHTQALTALSPSTSGLTPTSSCSPPSSTSGKLSMWSWKSLIEGPDRASPSRKATMAGGLANLQDLENTTPAQPKNLSPREQGKTQPPSAPRLAHPSYEDPSQGWLWESECAQAVKEDPALSITQVPDASGDRRQDVPCRGCPLTQKSEPSLRRGQEPGGHQKHRDLALVPDELLKQT

SEQ ID NO: 13353 - protein, 1310 aa, Artificial Sequence
  Synthetic polypeptide
KYHLTQPSHYWVYTQRTINHAAIKTHAHAHERSESSEVAFVMQLVKKLMIIIARPARLLECLEFDPEEFYHLLEAAEGHAKEGQGIKCDIPRYIVSQLGLTRDPLEEMAQLSSCDSPDTPETDDSIEGHGASLPSKKTPSEEDFETIKLISNGAYGAVFLVRHKSTRQRFAMKKINKQNLILRNQIQQAFVERDILTFAENPFVVSMFCSFDTKRHLCMVMEYVEGGDCATLLKNIGALPVDMVRLYFAETVLALEYLHNYGIVHRDLKPDNLLITSMGHIKLTDFGLSKIGLMSLTTNLYEGHIEKDAREFLDKQVCGTPEYIAPEVILRQGYGKPVDWWAMGIILYEFLVGCVPFFGDTPEELFGQVISDEIVWPEGDEALPPDAQDLTSKLLHQNPLERLGTGSAYEVKQHPFFTGLDWTGLLRQKAEFIPQLESEDDTSYFDTRSERYHHMDSEDEEEVSEDGCLEIRQFSSCSPRFNKVYSSMERLSLLEERRTPPPTKRSLSEEKEDHSDGLAGLKGRDRSWVIGSPEILRKRLSVSESSHTESDSSPPMTVRRRCSGLLDAPRFPEGPEEASSTLRRQPQEGIWVLTPPSGEGVSGPVTEHSGEQRPKLDEEAVGRSSGSSPAMETRGRGTSQLAEGATAKAISDLAVRRARHRLLSGDSTEKRTARPVNKVIKSASATALSLLIPSEHHTCSPLASPMSPHSQSSNPSSRDSSPYGFTLRAIRVYMGDSDVYTVHHMVWHVEDGGPASEAGLRQGDLITHVNGEPVHGLVHTEVVELILKSGNKVAISTTPLENTSIKVGPARKGSYKAKMARRSKRSRGKDGQESRKRSSLFRKITKQASLLHTSRSLSSLNRSLSSGESGPGSPTHSHSLSPRSPTQGYRVTPDAVHSELSRPKSAEPPRSPLLKRVQSAEKLAAALAASEKKLATSRKHSLDLPHSELKKELPPREVSPLEVVGARSVLSGKGALPGKGVLQPAPSRALGTLRQDRAERRESLQKQEAIREVDSSEDDTEEGPENSQGAQELSLAPHPEVSQSVAPKGAGESGEEDPFPSRDPRSLGPMVPSLLTGITLGPPRMESPSGPHRRLGSPQAIEEAASSSSAGPNLGQSGATDPIPPEGCWKAQHLHTQALTALSPSTSGLTPTSSCSPPSSTSGKLSMWSWKSLIEGPDRASPSRKATMAGGLANLQDLENTTPAQPKNLSPREQGKTQPPSAPRLAHPSYEDPSQGWLWESECAQAVKEDPALSITQVPDASGDRRQDVPCRGCPLTQKSEPSLRRGQEPGGHQKHRDLALVPDELLKQT

SEQ ID NO: 13354 - protein, 17 aa, Artificial Sequence
  Synthetic polypeptide
RHMHTLMSAQRAQKWLL

SEQ ID NO: 13355 - protein, 144 aa, Artificial Sequence
  Synthetic polypeptide
YPESTMNSNLQEKNNPIKKWAKDMSRHFSKEDIYAAKKHMKKCSPSLAIREMQIKTTMRYHLTPVRMAIIKKSGNNRCWRGCGEIGTLLYCWWDCKLVQPLWKSVGRFLRDLELEIPFDPAIPLLGIYPKDYKSCCYKDTCTRS

SEQ ID NO: 13356 - protein, 27 aa, Artificial Sequence
  Synthetic polypeptide
GNGSLEAGSSRPALPTWPNSVSTKRCK

SEQ ID NO: 13357 - protein, 406 aa, Artificial Sequence
  Synthetic polypeptide
KMQMKLMEMKDLENHNSQLNWCSSPHSILVNGATDYCSLSTSSSETANLNEHVEGQSNLESEPIHQESPARSSPELLPSGVTDENEVTTAVTEKVCSELDNNRHSKEEDPFNVDSSSLTGPVADTNLDFFQSDPFVGSDPFKDDPFGKIDPFGGDPFKGSDPFASDCFFRQSTDPFATSSTDPFSAANNSSITSVETLKHNDPFAPGGTVVAASDSATDPFASVFGNESFGGGFADFSTLSKVNNEDPFRSATSSSVSNVVITKNVFEETSVKSEDEPPALPPKIGTPTRPCPLPPGKRSINKLDSPDPFKLNDPFQPFPGNDSPKEKDPEIFCDPFTSATTTTNKEADPSNFANFSAYPSEEDMIEWAKRESEREEEQRLARLNQQEQEDLELAIALSKSEISEA

SEQ ID NO: 13358 - protein, 52 aa, Artificial Sequence
  Synthetic polypeptide
WWPMPVIPALWEAEAMDHLRPGVRDQPCQHGQTLFLLKDANETDGNERFGKS

SEQ ID NO: 13359 - protein, 38 aa, Artificial Sequence
  Synthetic polypeptide
MGMVAHACNPSTLGGRGHYATQRTVGSFQRISLPWLFT

SEQ ID NO: 13360 - protein, 504 aa, Artificial Sequence
  Synthetic polypeptide
SQHFGRPRSLCDTKDCGKLSKDQFALAFHLISQKLIKGIDPPHVLTPEMIPPSDRASLQKNIIGSSPVADFSAIKELDTLNNEIVDLQREKNNVEQDLKEKEDTIKQRTSEVQDLQDEVQRENTNLQKLQAQKQQVQELLDELDEQKAQLEEQLKEVRKKCAEEAQLARSSPELLPSGVTDENEVTTAVTEKVCSELDNNRHSKEEDPFNVDSSSLTGPVADTNLDFFQSDPFVGSDPFKDDPFGKIDPFGGDPFKGSDPFASDCFFRQSTDPFATSSTDPFSAANNSSITSVETLKHNDPFAPGGTVVAASDSATDPFASVFGNESFGGGFADFSTLSKVNNEDPFRSATSSSVSNVVITKNVFEETSVKSEDEPPALPPKIGTPTRPCPLPPGKRSINKLDSPDPFKLNDPFQPFPGNDSPKEKDPEIFCDPFTSATTTTNKEADPSNFANFSAYPSEEDMIEWAKRESEREEEQRLARLNQQEQEDLELAIALSKSEISEA

SEQ ID NO: 13361 - protein, 638 aa, Artificial Sequence
  Synthetic polypeptide
SQHFGRPRSLCDTKDCGKLSKDQFALAFHLISQKLIKGIDPPHVLTPEMIPPSDRASLQKNIIGSSPVADFSAIKELDTLNNEIVDLQREKNNVEQDLKEKEDTIKQRTSEVQDLQDEVQRENTNLQKLQAQKQQVQELLDELDEQKAQLEEQLKEVRKKCAEEAQLISSLKAELTSQESQISTYEEELAKAREELSRLQQETAELEESVESGKAQLEPLQQHLQDSQQEISSMQMKLMEMKDLENHNSQLNWCSSPHSILVNGATDYCSLSTSSSETANLNEHVEGQSNLESEPIHQESPARSSPELLPSGVTDENEVTTAVTEKVCSELDNNRHSKEEDPFNVDSSSLTGPVADTNLDFFQSDPFVGSDPFKDDPFGKIDPFGGDPFKGSDPFASDCFFRQSTDPFATSSTDPFSAANNSSITSVETLKHNDPFAPGGTVVAASDSATDPFASVFGNESFGGGFADFSTLSKVNNEDPFRSATSSSVSNVVITKNVFEETSVKSEDEPPALPPKIGTPTRPCPLPPGKRSINKLDSPDPFKLNDPFQPFPGNDSPKEKDPEIFCDPFTSATTTTNKEADPSNFANFSAYPSEEDMIEWAKRESEREEEQRLARLNQQEQEDLELAIALSKSEISEA

SEQ ID NO: 13362 - protein, 47 aa, Artificial Sequence
  Synthetic polypeptide
WAWWLTPVIPALWEAEVIMRHKGLWEAFKGSVCLGFSLNQSEVNQGH

SEQ ID NO: 13363 - protein, 53 aa, Artificial Sequence
  Synthetic polypeptide
GFDLCRLCFPASCDGSFWLGLAKGRYWQVTGDAAKGEIQGLISLKPVQRRTSV

SEQ ID NO: 13364 - protein, 11 aa, Artificial Sequence
  Synthetic polypeptide
LEMQQREKSRV

SEQ ID NO: 13365 - protein, 85 aa, Artificial Sequence
  Synthetic polypeptide
LLAGTSQRKILAGDWRCSKGRNPGFDFFEASAKENISVRQAFERLVDAICDKMSDSLDTDPSMLGSSKNTRLSDTPPLLQQNCSC

SEQ ID NO: 13366 - protein, 242 aa, Artificial Sequence
  Synthetic polypeptide
EKPRGGVRVGKKSPKLCAPHEFQCGNRSCLAAVFVCDGDDDCGDGSDERGCADPACGPREFRCGGDGGGACIPERWVCDRQFDCEDRSDEAAELCGRPGPGATSAPAACATASQFACRSGECVHLGWRCDGDRDCKDKSDEADCPLGTCRGDEFQCGDGTCVLAIKHCNQEQDCPDGSDEAGCLQESPCEGPRRFQCKSGKRVDGGKVCDVQRDCRDWSDELLKVWAERVSAQQWRLLTHLH

SEQ ID NO: 13367 - protein, 813 aa, Artificial Sequence
  Synthetic polypeptide
EKPRGGVRVGKKSPKLCAPHEFQCGNRSCLAAVFVCDGDDDCGDGSDERGCADPACGPREFRCGGDGGGACIPERWVCDRQFDCEDRSDEAAELCGRPGPGATSAPAACATASQFACRSGECVHLGWRCDGDRDCKDKSDEADCPLGTCRGDEFQCGDGTCVLAIKHCNQEQDCPDGSDEAGCLQGLNECLHNNGGCSHICTDLKIGFECTCPAGFQLLDQKTCGDIDECKDPDACSQICVNYKGYFKCECYPGYEMDLLTKNCKAAAGKSPSLIFTNRHEVRRIDLVKRNYSRLIPMLKNVVALDVEVATNRIYWCDLSYRKIYSAYMDKASDPKEQEVLIDEQLHSPEGLAVDWVHKHIYWTDSGNKTISVATVDGGRRRTLFSRNLSEPRAIAVDPLRGFMYWSDWGDQAKIEKSGLNGVDRQTLVSDNIEWPNGITLDLLSQRLYWVDSKLHQLSSIDFSGGNRKTLISSTDFLSHPFGIAVFEDKVFWTDLENEAIFSANRLNGLEISILAENLNNPHDIVIFHELKQPRAPDACELSVQPNGGCEYLCLPAPQISSHSPKYTCACPDTMWLGPDMKRCYRAPQSTSTTTLASTMTRTVPATTRAPGTTVHRSTYQNHSTETPSLTAAVPSSVSVPRAPSISPSTLSPATSNHSQHYANEDSKMGSTVTAAVIGIIVPIVVIALLCMSGYLIWRNWKRKNTKSMNFDNPVYRKTTEEEDEDELHIGRTAQIGHVYPAAISSFDRPLWAEPCLGETREPEDPAPALKELFVLPGEPRSQLHQLPKNPLSELPVVKSKRVALSLEDDGLP

SEQ ID NO: 13368 - protein, 754 aa, Artificial Sequence
  Synthetic polypeptide
EKPRGGVRVGKKSPKLCAPHEFQCGNRSCLAAVFVCDGDDDCGDGSDERGCADPACGPREFRCGGDGGGACIPERWVCDRQFDCEDRSDEAAELCGRPGPGATSAPAACATASQFACRSGECVHLGWRCDGDRDCKDKSDEADCPLGTCRGDEFQCGDGTCVLAIKHCNQEQDCPDGSDEAGCLQGLNECLHNNGGCSHICTDLKIGFECTCPAGFQLLDQKTCGDIDECKDPDACSQICVNYKGYFKCECYPGYEMDLLTKNCKAAAGKSPSLIFTNRHEVRRIDLVKRNYSRLIPMLKNVVALDVEVATNRIYWCDLSYRKIYSAYMDKASDPKEQEVLIDEQLHSPEGLAVDWVHKHIYWTDSGNKTISVATVDGGRRRTLFSRNLSEPRAIAVDPLRGFMYWSDWGDQAKIEKSGLNGVDRQTLVSDNIEWPNGITLDLLSQRLYWVDSKLHQLSSIDFSGGNRKTLISSTDFLSHPFGIAVFEDKVFWTDLENEAIFSANRLNGLEISILAENLNNPHDIVIFHELKQPRAPDACELSVQPNGGCEYLCLPAPQISSHSPKYTCACPDTMWLGPDMKRCYRAPQSTSTTTLASTMTRTVPATTRAPGTTVHRSTYQNHSTETPSLTAAVPSSVSVPRAPSISPSTLSPATSNHSQHYANEDSKMGSTVTAAVIGIIVPIVVIALLCMSGYLIWRNWKRKNTKSMNFDNPVYRKTTEEEDEDELHIGRTAQIGHVYPARVALSLEDDGLP

SEQ ID NO: 13369 - protein, 177 aa, Artificial Sequence
  Synthetic polypeptide
ERKAPNCAPRTSSSAATARAWPPCSCATATTTVVTAAMSAAVQTRPAGPASSAAAAMAAAPASRSAGSATASLTARTARTRQPSSAAVRAPGPRPRPPPAPPPPSSPAAAASACTWAGAATATATAKTNRTRPTAHWAPAVGTSSSVGMGHVSLQSSTATRSRTVQMGVMKLAAYRG

SEQ ID NO: 13370 - protein, 213 aa, Artificial Sequence
  Synthetic polypeptide
ERKAPNCAPRTSSSAATARAWPPCSCATATTTVVTAAMSAAVQTRPAGPASSAAAAMAAAPASRSAGSATASLTARTARTRQPSSAAVRAPGPRPRPPPAPPPPSSPAAAASACTWAGAATATATAKTNRTRPTAHWAPAVGTSSSVGMGHVSLQSSTATRSRTVQMGVMKLAAYRSHPVRVPADFSVRVASAWTAGKCVMCRGTAGTGRMSF

SEQ ID NO: 13371 - protein, 43 aa, Artificial Sequence
  Synthetic polypeptide
RKAKRRSQSRKEKPQIVRPARVPVRQPLVPGRRVRVRRRRRLW

SEQ ID NO: 13372 - protein, 347 aa, Artificial Sequence
  Synthetic polypeptide
ASGPFACRPLAWKAPSLLVRPHLTSGVTISRVLPPLAKKTCADSDFTCDNGHCIHERWKCDGEEECPDGSDESEATCTKQVCPAEKLSCGPTSHKCVPASWRCDGEKDCEGGADEAGCATLCAPHEFQCGNRSCLAAVFVCDGDDDCGDGSDERGCADPACGPREFRCGGDGGGACIPERWVCDRQFDCEDRSDEAAELCGRPGPGATSAPAACATASQFACRSGECVHLGWRCDGDRDCKDKSDEADCPLGTCRGDEFQCGDGTCVLAIKHCNQEQDCPDGSDEAGCLQESPCEGPRRFQCKSGKRVDGGKVCDVQRDCRDWSDELLKVWAERVSAQQWRLLTHLH

SEQ ID NO: 13373 - protein, 918 aa, Artificial Sequence
  Synthetic polypeptide
ASGPFACRPLAWKAPSLLVRPHLTSGVTISRVLPPLAKKTCADSDFTCDNGHCIHERWKCDGEEECPDGSDESEATCTKQVCPAEKLSCGPTSHKCVPASWRCDGEKDCEGGADEAGCATLCAPHEFQCGNRSCLAAVFVCDGDDDCGDGSDERGCADPACGPREFRCGGDGGGACIPERWVCDRQFDCEDRSDEAAELCGRPGPGATSAPAACATASQFACRSGECVHLGWRCDGDRDCKDKSDEADCPLGTCRGDEFQCGDGTCVLAIKHCNQEQDCPDGSDEAGCLQGLNECLHNNGGCSHICTDLKIGFECTCPAGFQLLDQKTCGDIDECKDPDACSQICVNYKGYFKCECYPGYEMDLLTKNCKAAAGKSPSLIFTNRHEVRRIDLVKRNYSRLIPMLKNVVALDVEVATNRIYWCDLSYRKIYSAYMDKASDPKEQEVLIDEQLHSPEGLAVDWVHKHIYWTDSGNKTISVATVDGGRRRTLFSRNLSEPRAIAVDPLRGFMYWSDWGDQAKIEKSGLNGVDRQTLVSDNIEWPNGITLDLLSQRLYWVDSKLHQLSSIDFSGGNRKTLISSTDFLSHPFGIAVFEDKVFWTDLENEAIFSANRLNGLEISILAENLNNPHDIVIFHELKQPRAPDACELSVQPNGGCEYLCLPAPQISSHSPKYTCACPDTMWLGPDMKRCYRAPQSTSTTTLASTMTRTVPATTRAPGTTVHRSTYQNHSTETPSLTAAVPSSVSVPRAPSISPSTLSPATSNHSQHYANEDSKMGSTVTAAVIGIIVPIVVIALLCMSGYLIWRNWKRKNTKSMNFDNPVYRKTTEEEDEDELHIGRTAQIGHVYPAAISSFDRPLWAEPCLGETREPEDPAPALKELFVLPGEPRSQLHQLPKNPLSELPVVKSKRVALSLEDDGLP

SEQ ID NO: 13374 - protein, 859 aa, Artificial Sequence
  Synthetic polypeptide
ASGPFACRPLAWKAPSLLVRPHLTSGVTISRVLPPLAKKTCADSDFTCDNGHCIHERWKCDGEEECPDGSDESEATCTKQVCPAEKLSCGPTSHKCVPASWRCDGEKDCEGGADEAGCATLCAPHEFQCGNRSCLAAVFVCDGDDDCGDGSDERGCADPACGPREFRCGGDGGGACIPERWVCDRQFDCEDRSDEAAELCGRPGPGATSAPAACATASQFACRSGECVHLGWRCDGDRDCKDKSDEADCPLGTCRGDEFQCGDGTCVLAIKHCNQEQDCPDGSDEAGCLQGLNECLHNNGGCSHICTDLKIGFECTCPAGFQLLDQKTCGDIDECKDPDACSQICVNYKGYFKCECYPGYEMDLLTKNCKAAAGKSPSLIFTNRHEVRRIDLVKRNYSRLIPMLKNVVALDVEVATNRIYWCDLSYRKIYSAYMDKASDPKEQEVLIDEQLHSPEGLAVDWVHKHIYWTDSGNKTISVATVDGGRRRTLFSRNLSEPRAIAVDPLRGFMYWSDWGDQAKIEKSGLNGVDRQTLVSDNIEWPNGITLDLLSQRLYWVDSKLHQLSSIDFSGGNRKTLISSTDFLSHPFGIAVFEDKVFWTDLENEAIFSANRLNGLEISILAENLNNPHDIVIFHELKQPRAPDACELSVQPNGGCEYLCLPAPQISSHSPKYTCACPDTMWLGPDMKRCYRAPQSTSTTTLASTMTRTVPATTRAPGTTVHRSTYQNHSTETPSLTAAVPSSVSVPRAPSISPSTLSPATSNHSQHYANEDSKMGSTVTAAVIGIIVPIVVIALLCMSGYLIWRNWKRKNTKSMNFDNPVYRKTTEEEDEDELHIGRTAQIGHVYPARVALSLEDDGLP

SEQ ID NO: 13375 - protein, 655 aa, Artificial Sequence
  Synthetic polypeptide
ASGPFACRPLAWKAPSLLVRPHLTSGVTISRVLPPLAKKTCADSDFTCDNGHCIHERWKCDGEEECPDGSDESEATCTKQVCPAEKLSCGPTSHKCVPASWRCDGEKDCEGGADEAGCATSLGTCRGDEFQCGDGTCVLAIKHCNQEQDCPDGSDEAGCLQGLNECLHNNGGCSHICTDLKIGFECTCPAGFQLLDQKTCGDIDECKDPDACSQICVNYKGYFKCECYPGYEMDLLTKNCKAAAGKSPSLIFTNRHEVRRIDLVKRNYSRLIPMLKNVVALDVEVATNRIYWCDLSYRKIYSAYMDKASDPKEQEVLIDEQLHSPEGLAVDWVHKHIYWTDSGNKTISVATVDGGRRRTLFSRNLSEPRAIAVDPLRGFMYWSDWGDQAKIEKSGLNGVDRQTLVSDNIEWPNGITLDLLSQRLYWVDSKLHQLSSIDFSGGNRKTLISSTDFLSHPFGIAVFEDKVFWTDLENEAIFSANRLNGLEISILAENLNNPHDIVIFHELKQPRAPDACELSVQPNGGCEYLCLPAPQISSHSPKYTCACPDTMWLGPDMKRCYRDANEDSKMGSTVTAAVIGIIVPIVVIALLCMSGYLIWRNWKRKNTKSMNFDNPVYRKTTEEEDEDELHIGRTAQIGHVYPARVALSLEDDGLP

SEQ ID NO: 13376 - protein, 748 aa, Artificial Sequence
  Synthetic polypeptide
ASGPFACRPLAWKAPSLLVRPHLTSGVTISRVLPPLAKKTCADSDFTCDNGHCIHERWKCDGEEECPDGSDESEATCTKQVCPAEKLSCGPTSHKCVPASWRCDGEKDCEGGADEAGCATWLNECLHNNGGCSHICTDLKIGFECTCPAGFQLLDQKTCGDIDECKDPDACSQICVNYKGYFKCECYPGYEMDLLTKNCKAAAGKSPSLIFTNRHEVRRIDLVKRNYSRLIPMLKNVVALDVEVATNRIYWCDLSYRKIYSAYMDKASDPKEQEVLIDEQLHSPEGLAVDWVHKHIYWTDSGNKTISVATVDGGRRRTLFSRNLSEPRAIAVDPLRGFMYWSDWGDQAKIEKSGLNGVDRQTLVSDNIEWPNGITLDLLSQRLYWVDSKLHQLSSIDFSGGNRKTLISSTDFLSHPFGIAVFEDKVFWTDLENEAIFSANRLNGLEISILAENLNNPHDIVIFHELKQPRAPDACELSVQPNGGCEYLCLPAPQISSHSPKYTCACPDTMWLGPDMKRCYRAPQSTSTTTLASTMTRTVPATTRAPGTTVHRSTYQNHSTETPSLTAAVPSSVSVPRAPSISPSTLSPATSNHSQHYANEDSKMGSTVTAAVIGIIVPIVVIALLCMSGYLIWRNWKRKNTKSMNFDNPVYRKTTEEEDEDELHIGRTAQIGHVYPAAISSFDRPLWAEPCLGETREPEDPAPALKELFVLPGEPRSQLHQLPKNPLSELPVVKSKRVALSLEDDGLP

SEQ ID NO: 13377 - protein, 43 aa, Artificial Sequence
  Synthetic polypeptide
LRPFCMQAPSLEGSISACPASPDLWSHHFQGASSPSQEDLCRQ

SEQ ID NO: 13378 - protein, 24 aa, Artificial Sequence
  Synthetic polypeptide
GVRDQPGQHRLKWYWETSLRRKDG

SEQ ID NO: 13379 - protein, 35 aa, Artificial Sequence
  Synthetic polypeptide
GVRDQPGQHRLKWYWETSLRRKDGASRERGQDRPE

SEQ ID NO: 13380 - protein, 51 aa, Artificial Sequence
  Synthetic polypeptide
GVRDQPGQHRLKWYWETSLRRKDGGGPASSSPPRSSGAERRRRSGACPGST

SEQ ID NO: 13381 - protein, 35 aa, Artificial Sequence
  Synthetic polypeptide
GVRDQPGQHRLKWYWETSLRRKDGGRGERGQDRPE

SEQ ID NO: 13382 - protein, 40 aa, Artificial Sequence
  Synthetic polypeptide
GVRDQPGQHRLKWYWETSLRRKDGGSSRRLSLSGAHCSHL

SEQ ID NO: 13383 - protein, 34 aa, Artificial Sequence
  Synthetic polypeptide
PGAVAHAWNPSTLGGHSGRITRDEEFETSLANIG

SEQ ID NO: 13384 - protein, 88 aa, Artificial Sequence
  Synthetic polypeptide
AQTTDQPGFQSRSESFPGATAAGVRGCGVCQPPGPQHPDGRDRPRHDPRHQPGDGHVLGHVTLELHGDHGGLLRGPAVQPDPAHLRAG

SEQ ID NO: 13385 - protein, 44 aa, Artificial Sequence
  Synthetic polypeptide
AQTTDQPGFQSRSESFPGATAAGVRGCGVCQPPGPQHPDGRGPI

SEQ ID NO: 13386 - protein, 17 aa, Artificial Sequence
  Synthetic polypeptide
ARWLSTDHRPAWVSIQV

SEQ ID NO: 13387 - protein, 131 aa, Artificial Sequence
  Synthetic polypeptide
SPVAEHRPQTSLGFNPGLKASLERLQLEYVDVVFANRPDPNTPMEETVRAMTHVINQGMAMYWGTSRWSSMEIMEAYSVARQFNLTPPICEQAEYHMFQREKVEVQLPELFHKIGVGAMTWSPLACGIVSG

SEQ ID NO: 13388 - protein, 146 aa, Artificial Sequence
  Synthetic polypeptide
SPVAEHRPQTSLGFNPGLKASLERLQLEYVDVVFANRPDPNTPMEETVRAMTHVINQGMAMYWGTSRWSSMEIMEAYSVARQFNLTPPICEQAEYHMFQREKVEVQLPELFHKIGVGAMTWSPLACGIVSGKYDSGIPPYSRASLK

SEQ ID NO: 13389 - protein, 245 aa, Artificial Sequence
  Synthetic polypeptide
SPVAEHRPQTSLGFNPGLKASLERLQLEYVDVVFANRPDPNTPMEETVRAMTHVINQGMAMYWGTSRWSSMEIMEAYSVARQFNLTPPICEQAEYHMFQREKVEVQLPELFHKIGVGAMTWSPLACGIVSGKYDSGIPPYSRASLKGYQWLKDKILSEEGRRQQAKLKELQAIAERLGCTLPQLAIAWCLRNEGVSSVLLGASNADQLMENIGAIQVLPKLSSSIIHEIDSILGNKPYSKKDYRS

SEQ ID NO: 13390 - protein, 273 aa, Artificial Sequence
  Synthetic polypeptide
SPVAEHRPQTSLGFNPGLKASLERLQLEYVDVVFANRPDPNTPMEETVRAMTHVINQGMAMYWGTSRWSSMEIMEAYSVARQFNLTPPICEQAEYHMFQREKVEVQLPELFHKIGVGAMTWSPLACGIVSGKYDSGIPPYSRASLKGYQWLKDKILSEEGRRQQAKLKELQAIAERLGCTLPQLAIAWCLRNEGVSSVLLGASNADQLMENIGAIQVRVRGPAGQRAHPSPSPVQCILPGSSCVPGSVLGTQDAPVNHQSCAPGELAFQQEQT

SEQ ID NO: 13391 - protein, 260 aa, Artificial Sequence
  Synthetic polypeptide
SPVAEHRPQTSLGFNPGLKASLERLQLEYVDVVFANRPDPNTPMEGDPFSSSKSRTFIIEETVRAMTHVINQGMAMYWGTSRWSSMEIMEAYSVARQFNLTPPICEQAEYHMFQREKVEVQLPELFHKIGVGAMTWSPLACGIVSGKYDSGIPPYSRASLKGYQWLKDKILSEEGRRQQAKLKELQAIAERLGCTLPQLAIAWCLRNEGVSSVLLGASNADQLMENIGAIQVLPKLSSSIIHEIDSILGNKPYSKKDYRS

SEQ ID NO: 13392 - protein, 58 aa, Artificial Sequence
  Synthetic polypeptide
GRKHRFGVRKATFGLNCHRSMACSFMENLAEKQSPFLKKCHPLLLWFAVGGCLMMKLL

SEQ ID NO: 13393 - protein, 21 aa, Artificial Sequence
  Synthetic polypeptide
IATGQWHAALWKISPRSSLLS

SEQ ID NO: 13394 - protein, 998 aa, Artificial Sequence
  Synthetic polypeptide
LGIRKEAQIWSQKSHFWSELPQVNGMQLYGKSRREAVSFLKEVPPPFTLVCCRRLFDDEASVDEPRRTETSLPETEVDHNMDVNTEEDDDGELALWSPEVKIVELVKDCKGLGFSILDYQDPLDPTRSVIVIRSLVADGVAERSGGLLPGDRLVSVNEYCLDNTSLAEAVEILKAVPPGLVHLGICKPLVEDNEEESCYILHSSSNEDKTEFSGTIHDINSSLILEAPKGFRDEPYFKEELVDEPFLDLGKSFHSQQKEIEQSKEAWEMHEFLTPRLQEMDEEREILVDEEYELYQDPSPSMELYPLSHIQEATPVPSVNELHFGTQWLHDNEPSESQEARTGRTVYSQEAQPYGYCPENVMKENFVMESLPSVPSTEGNSQQGRFDDLENLNSLAKTSLDLGMIPNDVQGPSLLIDLPVVAQRREQEDLPLYQHQATRVISKASAYTGMLSSRYATDTCELPEREEGEGEETPNFSHWGPPRIVEIFREPNVSLGISIVGGQTVIKRLKNGEELKGIFIKQVLEDSPAGKTNALKTGDKILEVSGVDLQNASHSEAVEAIKNAGNPVVFIVQSLSSTPRVIPNVHNKANKITGNQNQDTQEKKEKRQGTAPPPMKLPPPYKALTDDSDENEEEDAFTDQKIRQRYADLPGELHIIELEKDKNGLGLSLAGNKDRSRMSIFVVGINPEGPAAADGRMRIGDELLEINNQILYGRSHQNASAIIKTAPSKVKLVFIRNEDAVNQMAVTPFPVPSSSPSSIEDQSGTEPISSEEDGSVEVGIKQLPESESFKLAVSQMKQQKYPTKVSFSSQEIPLAPASSYHSTDADFTGYGGFQAPLSVDPATCPIVPGQEMIIEISKGRSGLGLSIVGGKDTPLFWRLGSPRAWSQHLVRAFMLHHPVTEVEGQNAIVIHEVYEEGAAARDGRLWAGDQILEVNGVDLRNSSHEEAITALRQTPQKVRLVVYRDEAHYRDEENLEIFPVDLQKKAGRGLGLSIVGKR

SEQ ID NO: 13395 - protein, 1217 aa, Artificial Sequence
  Synthetic polypeptide
LGIRKEAQIWSQKSHFWSELPQVNGMQLYGKSRREAVSFLKEVPPPFTLVCCRRLFDDEASVDEPRRTETSLPETEVDHNMDVNTEEDDDGELALWSPEVKIVELVKDCKGLGFSILDYQDPLDPTRSVIVIRSLVADGVAERSGGLLPGDRLVSVNEYCLDNTSLAEAVEILKAVPPGLVHLGICKPLVEDNEEESCYILHSSSNEDKTEFSGTIHDINSSLILEAPKGFRDEPYFKEELVDEPFLDLGKSFHSQQKEIEQSKEAWEMHEFLTPRLQEMDEEREILVDEEYELYQDPSPSMELYPLSHIQEATPVPSVNELHFGTQWLHDNEPSESQEARTGRTVYSQEAQPYGYCPENVMKENFVMESLPSVPSTEGNSQQGRFDDLENLNSLAKTSLDLGMIPNDVQGPSLLIDLPVVAQRREQEDLPLYQHQATRVISKASAYTGMLSSRYATDTCELPEREEGEGEETPNFSHWGPPRIVEIFREPNVSLGISIVGGQTVIKRLKNGEELKGIFIKQVLEDSPAGKTNALKTGDKILEVSGVDLQNASHSEAVEAIKNAGNPVVFIVQSLSSTPRVIPNVHNKANKITGNQNQDTQEKKEKRQGTAPPPMKLPPPYKALTDDSDENEEEDAFTDQKIRQRYADLPGELHIIELEKDKNGLGLSLAGNKDRSRMSIFVVGINPEGPAAADGRMRIGDELLEINNQILYGRSHQNASAIIKTAPSKVKLVFIRNEDAVNQMAVTPFPVPSSSPSSIEDQSGTEPISSEEDGSVEVGIKQLPESESFKLAVSQMKQQKYPTKVSFSSQEIPLAPASSYHSTDADFTGYGGFQAPLSVDPATCPIVPGQEMIIEISKGRSGLGLSIVGGKDTPLNAIVIHEVYEEGAAARDGRLWAGDQILEVNGVDLRNSSHEEAITALRQTPQKVRLVVYRDEAHYRDEENLEIFPVDLQKKAGRGLGLSIVGKRNGSGVFISDIVKGGAADLDGRLIQGDQILSVNGEDMRNASQETVATILKCAQGLVQLEIGRLRAGSWTSARTTSQNSQGSQQSAHSSCHPSFAPVITGLQNLVGTKRVSDPSQKNSGTDMEPRTVEINRELSDALGISIAGGRGSPLGDIPVFIAMIQASGVAARTQKLKVGDRIVSINGQPLDGLSHADVVNLLKNAYGRIILQVVADTNISAIAAQLENMSTGYHLGSPTAEHHPEDTEEQLQMTAD

SEQ ID NO: 13396 - protein, 1091 aa, Artificial Sequence
  Synthetic polypeptide
LGIRKEAQIWSQKSHFWSELPQVNGMQLYGKSRREAVSFLKEVPPPFTLVCCRRLFDDEASVDEPRRTETSLPETEVDHNMDVNTEEDDDGELALWSPEVKIVELVKDCKGLGFSILDYQDPLDPTRSVIVIRSLVADGVAERSGGLLPGDRLVSVNEYCLDNTSLAEAVEILKAVPPGLVHLGICKPLVEDNEEESCYILHSSSNEDKTEFSGTIHDINSSLILEAPKGFRDEPYFKEELVDEPFLDLGKSFHSQQKEIEQSKEAWEMHEFLTPRLQEMDEEREILVDEEYELYQDPSPSMELYPLSHIQEATPVPSVNELHFGTQWLHDNEPSESQEARTGRTVYSQEAQPYGYCPENVMKENFVMESLPSVPSTEGNSQQGRFDDLENLNSLAKTSLDLGMIPNDVQGPSLLIDLPVVAQRREQEDLPLYQHQATRVISKASAYTGMLSSRYATDTCELPEREEGEGEETPNFSHWGPPRIVEIFREPNVSLGISIVGGQTVIKRLKNGEELKGIFIKQVLEDSPAGKTNALKTGDKILEVSGVDLQNASHSEAVEAIKNAGNPVVFIVQSLSSTPRVIPNVHNKANKITGNQNQDTQEKKEKRQGTAPPPMKLPPPYKALTDDSDENEEEDAFTDQKIRQRYADLPGELHIIELEKDKNGLGLSLAGNKDRSRMSIFVVGINPEGPAAADGRMRIGDELLEINNQILYGRSHQNASAIIKTAPSKVKLVFIRNEDAVNQMAVTPFPVPSSSPSSIEDQSGTEPISSEEDGSVEVGIKQLPESESFKLAVSQMKQQKYPTKVSFSSQEIPLAPASSYHSTDADFTGYGGFQAPLSVDPATCPIVPGQEMIIEISKGRSGLGLSIVGGKDTPLNAIVIHEVYEEGAAARDGRLWAGDQILEVNGVDLRNSSHEEAITALRQTPQKVRLVVYRDEAHYRDEENLEIFPVDLQKKAGRGLGLSIVGKRNGSGVFISDIVKGGAADLDGRLIQGDQILSVNGEDMRNASQETVATILKCAQGLVQLEIGRLRAGSWTSARTTSQNSQSAECTQQLSSLLRSCHHWPAKPGWHKKSFRSFPEKFRHRYGTKDC

SEQ ID NO: 13397 - protein, 52 aa, Artificial Sequence
  Synthetic polypeptide
DPVSTKVSYLREKKAKEKKLQILATGVHRELLRFLENPMCLLGSVLLVDKLL

SEQ ID NO: 13398 - protein, 557 aa, Artificial Sequence
  Synthetic polypeptide
VQVFESSLGNIMRPRIYKSELPEREEGEGEETPNFSHWGPPRIVEIFREPNVSLGISIVGGQTVIKRLKNGEELKGIFIKQVLEDSPAGKTNALKTGDKILEVSGVDLQNASHSEAVEAIKNAGNPVVFIVQSLSSTPRVIPNVHNKANKITGNQNQDTQEKKEKRQGTAPPPMKLPPPYKALTDDSDENEEEDAFTDQKIRQRYADLPGELHIIELEKDKNGLGLSLAGNKDRSRMSIFVVGINPEGPAAADGRMRIGDELLEINNQILYGRSHQNASAIIKTAPSKVKLVFIRNEDAVNQMAVTPFPVPSSSPSSIEDQSGTEPISSEEDGSVEVGIKQLPESESFKLAVSQMKQQKYPTKVSFSSQEIPLAPASSYHSTDADFTGYGGFQAPLSVDPATCPIVPGQEMIIEISKGRSGLGLSIVGGKDTPLFWRLGSPRAWSQHLVRAFMLHHPVTEVEGQNAIVIHEVYEEGAAARDGRLWAGDQILEVNGVDLRNSSHEEAITALRQTPQKVRLVVYRDEAHYRDEENLEIFPVDLQKKAGRGLGLSIVGKR

SEQ ID NO: 13399 - protein, 776 aa, Artificial Sequence
  Synthetic polypeptide
VQVFESSLGNIMRPRIYKSELPEREEGEGEETPNFSHWGPPRIVEIFREPNVSLGISIVGGQTVIKRLKNGEELKGIFIKQVLEDSPAGKTNALKTGDKILEVSGVDLQNASHSEAVEAIKNAGNPVVFIVQSLSSTPRVIPNVHNKANKITGNQNQDTQEKKEKRQGTAPPPMKLPPPYKALTDDSDENEEEDAFTDQKIRQRYADLPGELHIIELEKDKNGLGLSLAGNKDRSRMSIFVVGINPEGPAAADGRMRIGDELLEINNQILYGRSHQNASAIIKTAPSKVKLVFIRNEDAVNQMAVTPFPVPSSSPSSIEDQSGTEPISSEEDGSVEVGIKQLPESESFKLAVSQMKQQKYPTKVSFSSQEIPLAPASSYHSTDADFTGYGGFQAPLSVDPATCPIVPGQEMIIEISKGRSGLGLSIVGGKDTPLNAIVIHEVYEEGAAARDGRLWAGDQILEVNGVDLRNSSHEEAITALRQTPQKVRLVVYRDEAHYRDEENLEIFPVDLQKKAGRGLGLSIVGKRNGSGVFISDIVKGGAADLDGRLIQGDQILSVNGEDMRNASQETVATILKCAQGLVQLEIGRLRAGSWTSARTTSQNSQGSQQSAHSSCHPSFAPVITGLQNLVGTKRVSDPSQKNSGTDMEPRTVEINRELSDALGISIAGGRGSPLGDIPVFIAMIQASGVAARTQKLKVGDRIVSINGQPLDGLSHADVVNLLKNAYGRIILQVVADTNISAIAAQLENMSTGYHLGSPTAEHHPEDTEEQLQMTAD

SEQ ID NO: 13400 - protein, 650 aa, Artificial Sequence
  Synthetic polypeptide
VQVFESSLGNIMRPRIYKSELPEREEGEGEETPNFSHWGPPRIVEIFREPNVSLGISIVGGQTVIKRLKNGEELKGIFIKQVLEDSPAGKTNALKTGDKILEVSGVDLQNASHSEAVEAIKNAGNPVVFIVQSLSSTPRVIPNVHNKANKITGNQNQDTQEKKEKRQGTAPPPMKLPPPYKALTDDSDENEEEDAFTDQKIRQRYADLPGELHIIELEKDKNGLGLSLAGNKDRSRMSIFVVGINPEGPAAADGRMRIGDELLEINNQILYGRSHQNASAIIKTAPSKVKLVFIRNEDAVNQMAVTPFPVPSSSPSSIEDQSGTEPISSEEDGSVEVGIKQLPESESFKLAVSQMKQQKYPTKVSFSSQEIPLAPASSYHSTDADFTGYGGFQAPLSVDPATCPIVPGQEMIIEISKGRSGLGLSIVGGKDTPLNAIVIHEVYEEGAAARDGRLWAGDQILEVNGVDLRNSSHEEAITALRQTPQKVRLVVYRDEAHYRDEENLEIFPVDLQKKAGRGLGLSIVGKRNGSGVFISDIVKGGAADLDGRLIQGDQILSVNGEDMRNASQETVATILKCAQGLVQLEIGRLRAGSWTSARTTSQNSQSAECTQQLSSLLRSCHHWPAKPGWHKKSFRSFPEKFRHRYGTKDC

SEQ ID NO: 13401 - protein, 413 aa, Artificial Sequence
  Synthetic polypeptide
EVTCSSLLSAMIMRPLLPHGNRQGTAPPPMKLPPPYKALTDDSDENEEEDAFTDQKIRQRYADLPGELHIIELEKDKNGLGLSLAGNKDRSRMSIFVVGINPEGPAAADGRMRIGDELLEINNQILYGRSHQNASAIIKTAPSKVKLVFIRNEDAVNQMAVTPFPVPSSSPSSIEDQSGTEPISSEEDGSVEVGIKQLPESESFKLAVSQMKQQKYPTKVSFSSQEIPLAPASSYHSTDADFTGYGGFQAPLSVDPATCPIVPGQEMIIEISKGRSGLGLSIVGGKDTPLFWRLGSPRAWSQHLVRAFMLHHPVTEVEGQNAIVIHEVYEEGAAARDGRLWAGDQILEVNGVDLRNSSHEEAITALRQTPQKVRLVVYRDEAHYRDEENLEIFPVDLQKKAGRGLGLSIVGKR

SEQ ID NO: 13402 - protein, 632 aa, Artificial Sequence
  Synthetic polypeptide
EVTCSSLLSAMIMRPLLPHGNRQGTAPPPMKLPPPYKALTDDSDENEEEDAFTDQKIRQRYADLPGELHIIELEKDKNGLGLSLAGNKDRSRMSIFVVGINPEGPAAADGRMRIGDELLEINNQILYGRSHQNASAIIKTAPSKVKLVFIRNEDAVNQMAVTPFPVPSSSPSSIEDQSGTEPISSEEDGSVEVGIKQLPESESFKLAVSQMKQQKYPTKVSFSSQEIPLAPASSYHSTDADFTGYGGFQAPLSVDPATCPIVPGQEMIIEISKGRSGLGLSIVGGKDTPLNAIVIHEVYEEGAAARDGRLWAGDQILEVNGVDLRNSSHEEAITALRQTPQKVRLVVYRDEAHYRDEENLEIFPVDLQKKAGRGLGLSIVGKRNGSGVFISDIVKGGAADLDGRLIQGDQILSVNGEDMRNASQETVATILKCAQGLVQLEIGRLRAGSWTSARTTSQNSQGSQQSAHSSCHPSFAPVITGLQNLVGTKRVSDPSQKNSGTDMEPRTVEINRELSDALGISIAGGRGSPLGDIPVFIAMIQASGVAARTQKLKVGDRIVSINGQPLDGLSHADVVNLLKNAYGRIILQVVADTNISAIAAQLENMSTGYHLGSPTAEHHPEDTEEQLQMTAD

SEQ ID NO: 13403 - protein, 506 aa, Artificial Sequence
  Synthetic polypeptide
EVTCSSLLSAMIMRPLLPHGNRQGTAPPPMKLPPPYKALTDDSDENEEEDAFTDQKIRQRYADLPGELHIIELEKDKNGLGLSLAGNKDRSRMSIFVVGINPEGPAAADGRMRIGDELLEINNQILYGRSHQNASAIIKTAPSKVKLVFIRNEDAVNQMAVTPFPVPSSSPSSIEDQSGTEPISSEEDGSVEVGIKQLPESESFKLAVSQMKQQKYPTKVSFSSQEIPLAPASSYHSTDADFTGYGGFQAPLSVDPATCPIVPGQEMIIEISKGRSGLGLSIVGGKDTPLNAIVIHEVYEEGAAARDGRLWAGDQILEVNGVDLRNSSHEEAITALRQTPQKVRLVVYRDEAHYRDEENLEIFPVDLQKKAGRGLGLSIVGKRNGSGVFISDIVKGGAADLDGRLIQGDQILSVNGEDMRNASQETVATILKCAQGLVQLEIGRLRAGSWTSARTTSQNSQSAECTQQLSSLLRSCHHWPAKPGWHKKSFRSFPEKFRHRYGTKDC

SEQ ID NO: 13404 - protein, 16 aa, Artificial Sequence
  Synthetic polypeptide
GLSCLMEIGKELLHRQ

SEQ ID NO: 13405 - protein, 15 aa, Artificial Sequence
  Synthetic polypeptide
DQPGQHGTDMEPRTV

SEQ ID NO: 13406 - protein, 139 aa, Artificial Sequence
  Synthetic polypeptide
DQPGQHGTDMEPRTVEINRELSDALGISIAGGRGSPLGDIPVFIAMIQASGVAARTQKLKVGDRIVSINGQPLDGLSHADVVNLLKNAYGRIILQVVADTNISAIAAQLENMSTGYHLGSPTAEHHPEDTEEQLQMTAD

SEQ ID NO: 13407 - protein, 42 aa, Artificial Sequence
  Synthetic polypeptide
GRARWLTPVIPTLWEAEAGGSLEVESLRPAWPTWHRYGTKDC

SEQ ID NO: 13408 - protein, 20 aa, Artificial Sequence
  Synthetic polypeptide
GREFETSLANMAQIWNQGLL

SEQ ID NO: 13409 - protein, 21 aa, Artificial Sequence
  Synthetic polypeptide
GREFETSLANMAQIWNQGLLR

SEQ ID NO: 13410 - protein, 59 aa, Artificial Sequence
  Synthetic polypeptide
GQARWLTPVIPALWEAEALCWPGTCPPGHARRAPAPQWTWRRRRRRALWMAKGTGRAQA

SEQ ID NO: 13411 - protein, 916 aa, Artificial Sequence
  Synthetic polypeptide
GSVLARNVSTRSCPPRTSPAVDLEEEEEESSVDGKGDRKSTGLKLSKKKARRRHTDDPSKECFTLKFDLNVDIETEIVPAMKKKSLGEVLLPVFERKGIALGKVDIYLDQSNTPLSLTFEAYRFGGHYLRVKAPAKPGDEGKVEQGMKDSKSLSLPILRPAGTGPPALERVDAQSRRESLDILAPGRRRKNMSEFLGEASIPGQEPPTPSSCSLPSGSSGSTNTGDSWKNRAASRFSGFFSSGPSTSAFGREVDKMEQLEGKLHTYSLFGLPRLPRGLRFDHDSWEEEYDEDEDEDNACLRLEDSWRELIDGHEKLTRRQCHQQEAVWELLHTEASYIRKLRVIINLFLCCLLNLQESGLLCEVEAERLFSNIPEIAQLHRRLWASVMAPVLEKARRTRALLQPGDFLKGFKMFGSLFKPYIRYCMEEEGCMEYMRGLLRDNDLFRAYITWAEKHPQCQRLKLSDMLAKPHQRLTKYPLLLKSVLRKTEEPRAKEAVVAMIGSVERFIHHVNACMRQRQERQRLAAVVSRIDAYEVVESSSDEVDKLLKEFLHLDLTAPIPGASPEETRQLLLEGSLRMKEGKDSKMDVYCFLFTDLLLVTKAVKKAERTRVIRPPLLVDKIVCRELRDPGSFLLIYLNEFHSAVGAYTFQASGQALCRGWVDTIYNAQNQLQQLRAQEPPGSQQPLQSLEEEEDEQEEEEEEEEEEEEGEDSGTSAASSPTIMRKSSGSPDSQHCASDGSTETLAMVVVEPGDTLSSPEFDSGPFSSQSDETSLSTTASSATPTSELLPLGPVDGRSCSMDSAYGTLSPTSLQDFVAPGPMAELVPRAPESPRVPSPPPSPRLRRRTPVQLLSCPPHLLKSKSEASLLQLLAGAGTHGTPSAPSRSLSELCLAVPAPAQEADPGPALPNQDHPAA

SEQ ID NO: 13412 - protein, 992 aa, Artificial Sequence
  Synthetic polypeptide
GSVLARNVSTRSCPPRTSPAVDLEEEEEESSVDGKGDRKSTGLKLSKKKARRRHTDDPSKECFTLKFDLNVDIETEIVPAMKKKSLGEVLLPVFERKGIALGKVDIYLDQSNTPLSLTFEAYRFGGHYLRVKAPAKPGDEGKVEQGMKDSKSLSLPILRPAGTGPPALERVDAQSRRESLDILAPGRRRKNMSEFLGEASIPGQEPPTPSSCSLPSGSSGSTNTGDSWKNRAASRFSGFFSSGPSTSAFGREVDKMEQLEGKLHTYSLFGLPRLPRGLRFDHDSWEEEYDEDEDEDNACLRLEDSWRELIDGHEKLTRRQCHQQEAVWELLHTEASYIRKLRVIINLFLCCLLNLQESGLLCEVEAERLFSNIPEIAQLHRRLWASVMAPVLEKARRTRALLQPGDFLKGFKMFGSLFKPYIRYCMEEEGCMEYMRGLLRDNDLFRAYITWAEKHPQCQRLKLSDMLAKPHQRLTKYPLLLKSVLRKTEEPRAKEAVVAMIGSVERFIHHVNACMRQRQERQRLAAVVSRIDAYEVVESSSDEVDKLLKEFLHLDLTAPIPGASPEETRQLLLEGSLRMKEGKDSKMDVYCFLFTDLLLVTKAVKKAERTRVIRPPLLVDKIVCRELRDPGSFLLIYLNEFHSAVGAYTFQASGQALCRGWVDTIYNAQNQLQQLRAQEPPGSQQPLQSLEEEEDEQEEEEEEEEEEEEGEDSGTSAASSPTIMRKSSGSPDSQHCASDGSTETLAMVVVEPGDTLSSPEFDSGPFSSQSDETSLSTTASSATPTSELLPLGPVDGRSCSMDSAYGTLSPTSLQDFVAPGPMAELVPRAPESPRVPSPPPSPRLRRRTPVQLLSCPPHLLKSKSEASLLQLLAGAGTHGTPSAPSRSLSELCLAVPAPGIRTQGSPQEAGPSWDCRGAPSPGSGPGLVGCLAGEPAGSHRKRCGDLPSGASPRVQPEPPPGVSAQHRKLTLAQLYRIRTTLLLNSTLTASEV

SEQ ID NO: 13413 - protein, 761 aa, Artificial Sequence
  Synthetic polypeptide
GSVLARNVSTRSCPPRTSPAVDLEEEEEESSVDGKGDRKSTGLKLSKKKARRRHTDDPSKECFTLKFDLNVDIETEIVPAMKKKSLGEVLLPVFERKGIALGKVDIYLDQSNTPLSLTFEAYRFGGHYLRVKAPAKPGDEGKVEQGMKDSKSLSLPILRPAGTGPPALERVDAQSRRESLDILAPGRRRKNMSEFLGEASIPGQEPPTPSSCSLPSGSSGSTNTGDSWKNRAASRFSGFFSSGPSTSAFGREVDKMEQLEGKLHTYSLFGLPRLPRGLRFDHDSWEEEYDEDEDEDNACLRLEDSWRELIDGHEKLTRRQCHQQEAVWELLHTEASYIRKLRVIINLFLCCLLNLQESGLLCEVEAERLFSNIPEIAQLHRRLWASVMAPVLEKARRTRALLQPGDFLKGFKMFGSLFKPYIRYCMEEEGCMEYMRGLLRDNDLFRAYITWAEKHPQCQRLKLSDMLAKPHQRLTKYPLLLKSVLRKTEEPRAKEAVVAMIGSVERFIHHVNACMRQRQERQRLAAVVSRIDAYEVVESSSDEVDKLLKEFLHLDLTAPIPGASPEETRQLLLEGSLRMKEGKDSKMDVYCFLFTDLLLVTKAVKKAERTRVIRPPLLVDKIVCRELRDPGSFLLIYLNEFHSAVGAYTFQASGQALCRGWVDTIYNAQNQLQQLRAQEPPGSQQPLQSLEEEEDEQEEEEEEEEEEEEGEDSGTSAASSPTIMRKSSGSPDSQHWKLTLAQLYRIRTTLLLNSTLTASEV

SEQ ID NO: 13414 - protein, 63 aa, Artificial Sequence
  Synthetic polypeptide
SQPFGRLRLCAGPERVHPVMPAAHQPRSGLGGGGGGELCGWQRGPEEHRPETLQEESKEETHG

SEQ ID NO: 13415 - protein, 90 aa, Artificial Sequence
  Synthetic polypeptide
GSRITYVTTPTASSCTAGGPSTSARPVTASSTAPCIMMGMSASTFPHKALCWPGTCPPGHARRAPAPQWTWRRRRRRALWMAKGTGRAQA

SEQ ID NO: 13416 - protein, 52 aa, Artificial Sequence
  Synthetic polypeptide
NPVSTKNTNTRLWWCVLLVQATREAEARGSRMSPRRLPAAAPPGAPQPLRGL

SEQ ID NO: 13417 - protein, 1047 aa, Artificial Sequence
  Synthetic polypeptide
SKLLGRLRLEDHVCHHADCQQLHRRGPLNLCEACDSKFHSTMHYDGHVRFDLPPQGSVLARNVSTRSCPPRTSPAVDLEEEEEESSVDGKGDRKSTGLKLSKKKARRRHTDDPSKECFTLKFDLNVDIETEIVPAMKKKSLGEVLLPVFERKGIALGKVDIYLDQSNTPLSLTFEAYRFGGHYLRVKAPAKPGDEGKVEQGMKDSKSLSLPILRPAGTGPPALERVDAQSRRESLDILAPGRRRKNMSEFLGEASIPGQEPPTPSSCSLPSGSSGSTNTGDSWKNRAASRFSGFFSSGPSTSAFGREVDKMEQLEGKLHTYSLFGLPRLPRGLRFDHDSWEEEYDEDEDEDNACLRLEDSWRELIDGHEKLTRRQCHQQEAVWELLHTEASYIRKLRVIINLFLCCLLNLQESGLLCEVEAERLFSNIPEIAQLHRRLWASVMAPVLEKARRTRALLQPGDFLKGFKMFGSLFKPYIRYCMEEEGCMEYMRGLLRDNDLFRAYITWAEKHPQCQRLKLSDMLAKPHQRLTKYPLLLKSVLRKTEEPRAKEAVVAMIGSVERFIHHVNACMRQRQERQRLAAVVSRIDAYEVVESSSDEVDKLLKEFLHLDLTAPIPGASPEETRQLLLEGSLRMKEGKDSKMDVYCFLFTDLLLVTKAVKKAERTRVIRPPLLVDKIVCRELRDPGSFLLIYLNEFHSAVGAYTFQASGQALCRGWVDTIYNAQNQLQQLRAQEPPGSQQPLQSLEEEEDEQEEEEEEEEEEEEGEDSGTSAASSPTIMRKSSGSPDSQHCASDGSTETLAMVVVEPGDTLSSPEFDSGPFSSQSDETSLSTTASSATPTSELLPLGPVDGRSCSMDSAYGTLSPTSLQDFVAPGPMAELVPRAPESPRVPSPPPSPRLRRRTPVQLLSCPPHLLKSKSEASLLQLLAGAGTHGTPSAPSRSLSELCLAVPAPGIRTQGSPQEAGPSWDCRGAPSPGSGPGLVGCLAGEPAGSHRKRCGDLPSGASPRVQPEPPPGVSAQHRKLTLAQLYRIRTTLLLNSTLTASEV

SEQ ID NO: 13418 - protein, 816 aa, Artificial Sequence
  Synthetic polypeptide
SKLLGRLRLEDHVCHHADCQQLHRRGPLNLCEACDSKFHSTMHYDGHVRFDLPPQGSVLARNVSTRSCPPRTSPAVDLEEEEEESSVDGKGDRKSTGLKLSKKKARRRHTDDPSKECFTLKFDLNVDIETEIVPAMKKKSLGEVLLPVFERKGIALGKVDIYLDQSNTPLSLTFEAYRFGGHYLRVKAPAKPGDEGKVEQGMKDSKSLSLPILRPAGTGPPALERVDAQSRRESLDILAPGRRRKNMSEFLGEASIPGQEPPTPSSCSLPSGSSGSTNTGDSWKNRAASRFSGFFSSGPSTSAFGREVDKMEQLEGKLHTYSLFGLPRLPRGLRFDHDSWEEEYDEDEDEDNACLRLEDSWRELIDGHEKLTRRQCHQQEAVWELLHTEASYIRKLRVIINLFLCCLLNLQESGLLCEVEAERLFSNIPEIAQLHRRLWASVMAPVLEKARRTRALLQPGDFLKGFKMFGSLFKPYIRYCMEEEGCMEYMRGLLRDNDLFRAYITWAEKHPQCQRLKLSDMLAKPHQRLTKYPLLLKSVLRKTEEPRAKEAVVAMIGSVERFIHHVNACMRQRQERQRLAAVVSRIDAYEVVESSSDEVDKLLKEFLHLDLTAPIPGASPEETRQLLLEGSLRMKEGKDSKMDVYCFLFTDLLLVTKAVKKAERTRVIRPPLLVDKIVCRELRDPGSFLLIYLNEFHSAVGAYTFQASGQALCRGWVDTIYNAQNQLQQLRAQEPPGSQQPLQSLEEEEDEQEEEEEEEEEEEEGEDSGTSAASSPTIMRKSSGSPDSQHWKLTLAQLYRIRTTLLLNSTLTASEV

SEQ ID NO: 13419 - protein, 67 aa, Artificial Sequence
  Synthetic polypeptide
PIMMLKMIFNQTSVEHCKTHTEKQKECNFFLIAVRLASLNQILDPWVYLLLRKILLRKFCQEEFWGN

SEQ ID NO: 13420 - protein, 95 aa, Artificial Sequence
  Synthetic polypeptide
PIMMLKMIFNQTSVEHCKTHTEKQKECNFFLIAVRLASLNQILDPWVYLLLRKILLRKFCQEMGPDGRCFCHAWRQVPRTWCSSHDREPCSVQLS

SEQ ID NO: 13421 - protein, 92 aa, Artificial Sequence
  Synthetic polypeptide
PIMMLKMIFNQTSVEHCKTHTEKQKECNFFLIAVRLASLNQILDPWVYLLLRKILLRKFCQIRYHTNNYASSSTSLPCQCSSTLMWSDHLER

SEQ ID NO: 13422 - protein, 127 aa, Artificial Sequence
  Synthetic polypeptide
PIMMLKMIFNQTSVEHCKTHTEKQKECNFFLIAVRLASLNQILDPWVYLLLRKILLRKFCQMRKRRLREQAPLLPTSTVIDPSRFCAQPFRWFLDLSFPAMSSSHPQLPLTLASFKLLREPCSVQLS

SEQ ID NO: 13423 - protein, 76 aa, Artificial Sequence
  Synthetic polypeptide
PIMMLKMIFNQTSVEHCKTHTEKQKECNFFLIAVRLASLNQILDPWVYLLLRKILLRKFCQMRKRRLREQEEFWGN

SEQ ID NO: 13424 - protein, 104 aa, Artificial Sequence
  Synthetic polypeptide
PIMMLKMIFNQTSVEHCKTHTEKQKECNFFLIAVRLASLNQILDPWVYLLLRKILLRKFCQMRKRRLREQEMGPDGRCFCHAWRQVPRTWCSSHDREPCSVQLS

SEQ ID NO: 13425 - protein, 131 aa, Artificial Sequence
  Synthetic polypeptide
PIMMLKMIFNQTSVEHCKTHTEKQKECNFFLIAVRLASLNQILDPWVYLLLRKILLRKFCQMRKRRLREQFWRPASSGSGCQQIRCLMESCSLTQTGVQWSDFRSLQPSPPPLTAIFASWVQVILLPQPPK

SEQ ID NO: 13426 - protein, 120 aa, Artificial Sequence
  Synthetic polypeptide
PIMMLKMIFNQTSVEHCKTHTEKQKECNFFLIAVRLASLNQILDPWVYLLLRKILLRKFCQMRKRRLREQLICSLQNSQIQRATAHCGQVQTYRVLNREEMEVLVSSINVYTRISTVKTE

SEQ ID NO: 13427 - protein, 90 aa, Artificial Sequence
  Synthetic polypeptide
PIMMLKMIFNQTSVEHCKTHTEKQKECNFFLIAVRLASLNQILDPWVYLLLRKILLRKFCQVANAVSSCSNDGQKGQPISLSNEIIQTEA

SEQ ID NO: 13428 - protein, 121 aa, Artificial Sequence
  Synthetic polypeptide
PIMMLKMIFNQTSVEHCKTHTEKQKECNFFLIAVRLASLNQILDPWVYLLLRKILLRKFCQVANAVSSCSNDGQKGQPISLSNEIIQTEAIRYHTNNYASSSTSLPCQCSSTLMWSDHLER

SEQ ID NO: 13429 - protein, 49 aa, Artificial Sequence
  Synthetic polypeptide
SATERTRHWMARDLDLVTALPCDLSHFILPDFPFLTDNDVENDLQSDIS

SEQ ID NO: 13430 - protein, 14 aa, Artificial Sequence
  Synthetic polypeptide
SKSLYLAGLSFSNR

SEQ ID NO: 13431 - protein, 11 aa, Artificial Sequence
  Synthetic polypeptide
GRLSNAELKTI

SEQ ID NO: 13432 - protein, 195 aa, Artificial Sequence
  Synthetic polypeptide
RGAFHHDCKFPEAASATQNSKPFENGQYLDIYGITRDQAGEYECSAENDVSFPDVRKVKVVVNFAPTIQEIKSGTVTPGRSGLIRCEGAGVPPPAFEWYKGEKKLFNGQQGIIIQNFSTRSILTVTNVTQEHFGNYTCVAANKLGTTNASLPLNPPSTAQYGITGSADVLFSCWYLVLTLSSFTSIFYLKNAILQ

SEQ ID NO: 13433 - protein, 81 aa, Artificial Sequence
  Synthetic polypeptide
VLMRFDGFINIWHFPCWHLFFLLLPCEEVPSTMIVNFLRPPQQRRTQNHLKMDNIWTFMELQGTRLGNMNAVRKMMCHSQM

SEQ ID NO: 13434 - protein, 26 aa, Artificial Sequence
  Synthetic polypeptide
AFTRHRCQRHASCTACKTVTMANIGI

SEQ ID NO: 13435 - protein, 111 aa, Artificial Sequence
  Synthetic polypeptide
AFTRHRCQRHASCTACKTVTMANIGINGNHSLETCETTLFALRMATWNQILDPWVYILLRKAVLKNLYKLASQCCGVHVISLHIWELSSIKNSLKVAAISESPVAEKSAST

SEQ ID NO: 13436 - protein, 31 aa, Artificial Sequence
  Synthetic polypeptide
LLVFLGLYQTQMPAPCFLYSLQNGYNGQHWN

SEQ ID NO: 13437 - protein, 40 aa, Artificial Sequence
  Synthetic polypeptide
LLVFLGLYQTQMPAPCFLYSLQNGYNGQHWNKWKSFSGNL

SEQ ID NO: 13438 - protein, 35 aa, Artificial Sequence
  Synthetic polypeptide
PAAVIVSFLRPLPDTDASAMLPVQPAKRLQWPTLE

SEQ ID NO: 13439 - protein, 172 aa, Artificial Sequence
  Synthetic polypeptide
AMIVSLPSSPGDRIKVTVAGLAGKDPVQCSRDVVICPDASLEDAKKEGPYDVVVLPGGNLGAQNLSESAAVKEILKEQENRKGLIAAICAGPTALLAHEIGFGSKVTTHPLAKDKMMNGGHYTYSENRVEKDGLILTSRGPGTSFEFALAIVEALNGKEVAAQVKAPLVLKD

SEQ ID NO: 13440 - protein, 152 aa, Artificial Sequence
  Synthetic polypeptide
AMIVSLPSSPGDRIKVTVAGLAGKDPVQCSRDVVICPDASLEDAKKESAAVKEILKEQENRKGLIAAICAGPTALLAHEIGFGSKVTTHPLAKDKMMNGGHYTYSENRVEKDGLILTSRGPGTSFEFALAIVEALNGKEVAAQVKAPLVLKD

SEQ ID NO: 13441 - protein, 68 aa, Artificial Sequence
  Synthetic polypeptide
LCHCPLAQVTGLRSPLQAWLEKTQYSVAVMWSFVLMPALKMQKKRDHMMWWFYQEVIWAHRIYLSLLL

SEQ ID NO: 13442 - protein, 48 aa, Artificial Sequence
  Synthetic polypeptide
LCHCPLAQVTGLRSPLQAWLEKTQYSVAVMWSFVLMPALKMQKKSLLL

SEQ ID NO: 13443 - protein, 2 aa, Artificial Sequence
  Synthetic polypeptide
QD

SEQ ID NO: 13444 - protein, 10 aa, Artificial Sequence
  Synthetic polypeptide
HEGATIEHSV

SEQ ID NO: 13445 - protein, 19 aa, Artificial Sequence
  Synthetic polypeptide
MKVQQSNTVYSSYWVRCVS

SEQ ID NO: 13446 - protein, 1028 aa, Artificial Sequence
  Synthetic polypeptide
RCNNRTQCIVVTGSDVFPDPCPGTYKYLEVQYECVPYIFVCPGTLKAIVDSPCIYEAEQKAGAWCKDPLQAADKIYFMPWTPYRTDTLIEYASLEDFQNSRQTTTYKLPNRVDGTGFVVYDGAVFFNKERTRNIVKFDLRTRIKSGEAIINYANYHDTSPYRWGGKTDIDLAVDENGLWVIYATEQNNGMIVISQLNPYTLRFEATWETVYDKRAASNAFMICGVLYVVRSVYQDNESETGKNSIDYIYNTRLNRGEYVDVPFPNQYQYIAAVDYNPRDNQLYVWNNNFILRYSLEFGPPDPAQVPTTAVTITSSAELFKTIISTTSTTSQKGPMSTTVAGSQEGSKGTKPPPAVSTTKIPPITNIFPLPERFCEALDSKGIKWPQTQRGMMVERPCPKGTRGTASYLCMISTGTWNPKGPDLSNCTSHWVNQLAQKIRSGENAASLANELAKHTKGPVFAGDVSSSVRLMEQLVDILDAQLQELKPSEKDSAGRSYNKAIVDTVDNLLRPEALESWKHMNSSEQAHTATMLLDTLEEGAFVLADNLLEPTRVSMPTENIVLEVAVLSTEGQIQDFKFPLGIKGAGSSIQLSANTVKQNSRNGLAKLVFIIYRSLGQFLSTENATIKLGADFIGRNSTIAVNSHVISVSINKESSRVYLTDPVLFTLPHIDPDNYFNANCSFWNYSERTMMGYWSTQGCKLVDTNKTRTTCACSHLTNFAILMAHREIAYKDGVHELLLTVITWVGIVISLVCLAICIFTFCFFRGLQSDRNTIHKNLCINLFIAEFIFLIGIDKTKYAIACPIFAGLLHFFFLAAFAWMCLEGVQLYLMLVEVFESEYSRKKYYYVAGYLFPATVVGVSAAIDYKSYGTEKACWLHVDNYFIWSFIGPVTFIILLNIIFLVITLCKMVKHSNTLKPDSSRLENIKSWVLGAFALLCLLGLTWSFGLLFINEETIVMAYLFTIFNAFQGVFIFIFHCALQKKVRKEYGKCFRHSYCCGGLPTESPHSSVKASTTRTSARYSSGTQDIH

SEQ ID NO: 13447 - protein, 1308 aa, Artificial Sequence
  Synthetic polypeptide
RCNNRTQCIVVTGSDVFPDPCPGTYKYLEVQYECVPYIFVCPGTLKAIVDSPCIYEAEQKAGAWCKDPLQAADKIYFMPWTPYRTDTLIEYASLEDFQNSRQTTTYKLPNRVDGTGFVVYDGAVFFNKERTRNIVKFDLRTRIKSGEAIINYANYHDTSPYRWGGKTDIDLAVDENGLWVIYATEQNNGMIVISQLNPYTLRFEATWETVYDKRAASNAFMICGVLYVVRSVYQDNESETGKNSIDYIYNTRLNRGEYVDVPFPNQYQYIAAVDYNPRDNQLYVWNNNFILRYSLEFGPPDPAQVPTTAVTITSSAELFKTIISTTSTTSQKGPMSTTVAGSQEGSKGTKPPPAVSTTKIPPITNIFPLPERFCEALDSKGIKWPQTQRGMMVERPCPKGTRGTASYLCMISTGTWNPKGPDLSNCTSHWVNQLAQKIRSGENAASLANELAKHTKGPVFAGDVSSSVRLMEQLVDILDAQLQELKPSEKDSAGRSYNKAIVDTVDNLLRPEALESWKHMNSSEQAHTATMLLDTLEEGAFVLADNLLEPTRVSMPTENIVLEVAVLSTEGQIQDFKFPLGIKGAGSSIQLSANTVKQNSRNGLAKLVFIIYRSLGQFLSTENATIKLGADFIGRNSTIAVNSHVISVSINKESSRVYLTDPVLFTLPHIDPDNYFNANCSFWNYSERTMMGYWSTQGCKLVDTNKTRTTCACSHLTNFAILMAHREIAYKDGVHELLLTVITWVGIVISLVCLAICIFTFCFFRGLQSDRNTIHKNLCINLFIAEFIFLIGIDKTKYAIACPIFAGLLHFFFLAAFAWMCLEGVQLYLMLVEVFESEYSRKKYYYVAGYLFPATVVGVSAAIDYKSYGTEKACWLHVDNYFIWSFIGPVTFIILLNIIFLVITLCKMVKHSNTLKPDSSRLENIKSWVLGAFALLCLLGLTWSFGLLFINEETIVMAYLFTIFNAFQGVFIFIFHCALQKKVRKEYGKCFRHSYCCGGLPTESPHSSVKASTTRTSARYSSGTQSRIRRMWNDTVRKQSESSFISGDINSTSTLNQGHSLNNARDTSAMDTLPLNGNFNNSYSLHKGDYNDSVQVVDCGLSLNDTAFEKMIISELVHNNLRGSSKTHNLELTLPVKPVIGGSSSEDDAIVADASSLMHSDNPGLELHHKELEAPLIPQRTHSLLYQPQKKVKSEGTDSYVSQLTAEAEDHLQSPNRDSLYTSMPNLRDSPYPESSPDMEEDLSPSRRSENEDIYYKSMPNLGAGHQLQMCYQISRGNSDGYIIPINKEGCIPEGDVREGQMQLVTSL

SEQ ID NO: 13448 - protein, 1082 aa, Artificial Sequence
  Synthetic polypeptide
RCNNRTQCIVVTGSDVFPDPCPGTYKYLEVQYECVPYIFVCPGTLKAIVDSPCIYEAEQKAGAWCKDPLQAADKIYFMPWTPYRTDTLIEYASLEDFQNSRQTTTYKLPNRVDGTGFVVYDGAVFFNKERTRNIVKFDLRTRIKSGEAIINYANYHDTSPYRWGGKTDIDLAVDENGLWVIYATEQNNGMIVISQLNPYTLRFEATWETVYDKRAASNAFMICGVLYVVRSVYQDNESETGKNSIDYIYNTRLNRGEYVDVPFPNQYQYIAAVDYNPRDNQLYVWNNNFILRYSLEFGPPDPAQVPTTAVTITSSAELFKTIISTTSTTSQKGPMSTTVAGSQEGSKGTKPPPAVSTTKIPPITNIFPLPERFCEALDSKGIKWPQTQRGMMVERPCPKGTRGTASYLCMISTGTWNPKGPDLSNCTSHWVNQLAQKIRSGENAASLANELAKHTKGPVFAGDVSSSVRLMEQLVDILDAQLQELKPSEKDSAGRSYNKAIVDTVDNLLRPEALESWKHMNSSEQAHTATMLLDTLEEGAFVLADNLLEPTRVSMPTENIVLEVAVLSTEGQIQDFKFPLGIKGAGSSIQLSANTVKQNSRNGLAKLVFIIYRSLGQFLSTENATIKLGADFIGRNSTIAVNSHVISVSINKESSRVYLTDPVLFTLPHIDPDNYFNANCSFWNYSERTMMGYWSTQGCKLVDTNKTRTTCACSHLTNFAILMAHREIAYKDGVHELLLTVITWVGIVISLVCLAICIFTFCFFRGLQSDRNTIHKNLCINLFIAEFIFLIGIDKTKYAIACPIFAGLLHFFFLAAFAWMCLEGVQLYLMLVEVFESEYSRKKYYYVAGYLFPATVVGVSAAIDYKSYGTEKACWLHVDNYFIWSFIGPVTFIILLNIIFLVITLCKMVKHSNTLKPDSSRLENIKSWVLGAFALLCLLGLTWSFGLLFINEETIVMAYLFTIFNAFQGVFIFIFHCALQKKVRKEYGKCFRHSYCCGGLPTESPHSSVKASTTRTSARYSSGTQSRIRRMWNDTVRKQSESSFISGDINSTSTLNQGLTSHGLRAHLQDLYHLELLLGQIA

SEQ ID NO: 13449 - protein, 1366 aa, Artificial Sequence
  Synthetic polypeptide
RCNNRTQCIVVTGSDVFPDPCPGTYKYLEVQYECVPYIFVCPGTLKAIVDSPCIYEAEQKAGAWCKDPLQAADKIYFMPWTPYRTDTLIEYASLEDFQNSRQTTTYKLPNRVDGTGFVVYDGAVFFNKERTRNIVKFDLRTRIKSGEAIINYANYHDTSPYRWGGKTDIDLAVDENGLWVIYATEQNNGMIVISQLNPYTLRFEATWETVYDKRAASNAFMICGVLYVVRSVYQDNESETGKNSIDYIYNTRLNRGEYVDVPFPNQYQYIAAVDYNPRDNQLYVWNNNFILRYSLEFGPPDPAQVPTTAVTITSSAELFKTIISTTSTTSQKGPMSTTVAGSQEGSKGTKPPPAVSTTKIPPITNIFPLPERFCEALDSKGIKWPQTQRGMMVERPCPKGTRGTASYLCMISTGTWNPKGPDLSNCTSHWVNQLAQKIRSGENAASLANELAKHTKGPVFAGDVSSSVRLMEQLVDILDAQLQELKPSEKDSAGRSYNKAIVDTVDNLLRPEALESWKHMNSSEQAHTATMLLDTLEEGAFVLADNLLEPTRVSMPTENIVLEVAVLSTEGQIQDFKFPLGIKGAGSSIQLSANTVKQNSRNGLAKLVFIIYRSLGQFLSTENATIKLGADFIGRNSTIAVNSHVISVSINKESSRVYLTDPVLFTLPHIDPDNYFNANCSFWNYSERTMMGYWSTQGCKLVDTNKTRTTCACSHLTNFAILMAHREIAYKDGVHELLLTVITWVGIVISLVCLAICIFTFCFFRGLQSDRNTIHKNLCINLFIAEFIFLIGIDKTKYAIACPIFAGLLHFFFLAAFAWMCLEGVQLYLMLVEVFESEYSRKKYYYVAGYLFPATVVGVSAAIDYKSYGTEKACWLHVDNYFIWSFIGPVTFIILLNIIFLVITLCKMVKHSNTLKPDSSRLENINNYRVCDGYYNTDLPGSWVLGAFALLCLLGLTWSFGLLFINEETIVMAYLFTIFNAFQGVFIFIFHCALQKKVRKEYGKCFRHSYCCGGLPTESPHSSVKASTTRTSARYSSGTQSRIRRMWNDTVRKQSESSFISGDINSTSTLNQGMTGNYLLTNPLLRPHGTNNPYNTLLAETVVCNAPSAPVFNSPGHSLNNARDTSAMDTLPLNGNFNNSYSLHKGDYNDSVQVVDCGLSLNDTAFEKMIISELVHNNLRGSSKTHNLELTLPVKPVIGGSSSEDDAIVADASSLMHSDNPGLELHHKELEAPLIPQRTHSLLYQPQKKVKSEGTDSYVSQLTAEAEDHLQSPNRDSLYTSMPNLRDSPYPESSPDMEEDLSPSRRSENEDIYYKSMPNLGAGHQLQMCYQISRGNSDGYIIPINKEGCIPEGDVREGQMQLVTSL

SEQ ID NO: 13450 - protein, 1321 aa, Artificial Sequence
  Synthetic polypeptide
RCNNRTQCIVVTGSDVFPDPCPGTYKYLEVQYECVPYIFVCPGTLKAIVDSPCIYEAEQKAGAWCKDPLQAADKIYFMPWTPYRTDTLIEYASLEDFQNSRQTTTYKLPNRVDGTGFVVYDGAVFFNKERTRNIVKFDLRTRIKSGEAIINYANYHDTSPYRWGGKTDIDLAVDENGLWVIYATEQNNGMIVISQLNPYTLRFEATWETVYDKRAASNAFMICGVLYVVRSVYQDNESETGKNSIDYIYNTRLNRGEYVDVPFPNQYQYIAAVDYNPRDNQLYVWNNNFILRYSLEFGPPDPAQVPTTAVTITSSAELFKTIISTTSTTSQKGPMSTTVAGSQEGSKGTKPPPAVSTTKIPPITNIFPLPERFCEALDSKGIKWPQTQRGMMVERPCPKGTRGTASYLCMISTGTWNPKGPDLSNCTSHWVNQLAQKIRSGENAASLANELAKHTKGPVFAGDVSSSVRLMEQLVDILDAQLQELKPSEKDSAGRSYNKLQKREKTCRAYLKAIVDTVDNLLRPEALESWKHMNSSEQAHTATMLLDTLEEGAFVLADNLLEPTRVSMPTENIVLEVAVLSTEGQIQDFKFPLGIKGAGSSIQLSANTVKQNSRNGLAKLVFIIYRSLGQFLSTENATIKLGADFIGRNSTIAVNSHVISVSINKESSRVYLTDPVLFTLPHIDPDNYFNANCSFWNYSERTMMGYWSTQGCKLVDTNKTRTTCACSHLTNFAILMAHREIAYKDGVHELLLTVITWVGIVISLVCLAICIFTFCFFRGLQSDRNTIHKNLCINLFIAEFIFLIGIDKTKYAIACPIFAGLLHFFFLAAFAWMCLEGVQLYLMLVEVFESEYSRKKYYYVAGYLFPATVVGVSAAIDYKSYGTEKACWLHVDNYFIWSFIGPVTFIILLNIIFLVITLCKMVKHSNTLKPDSSRLENIKSWVLGAFALLCLLGLTWSFGLLFINEETIVMAYLFTIFNAFQGVFIFIFHCALQKKVRKEYGKCFRHSYCCGGLPTESPHSSVKASTTRTSARYSSGTQSRIRRMWNDTVRKQSESSFISGDINSTSTLNQGHSLNNARDTSAMDTLPLNGNFNNSYSLHKGDYNDSVQVVDCGLSLNDTAFEKMIISELVHNNLRGSSKTHNLELTLPVKPVIGGSSSEDDAIVADASSLMHSDNPGLELHHKELEAPLIPQRTHSLLYQPQKKVKSEGTDSYVSQLTAEAEDHLQSPNRDSLYTSMPNLRDSPYPESSPDMEEDLSPSRRSENEDIYYKSMPNLGAGHQLQMCYQISRGNSDGYIIPINKEGCIPEGDVREGQMQLVTSL

SEQ ID NO: 13451 - protein, 1364 aa, Artificial Sequence
  Synthetic polypeptide
RCNNRTQCIVVTGSDVFPDPCPGTYKYLEVQYECVPYIFVCPGTLKAIVDSPCIYEAEQKAGAWCKDPLQAADKIYFMPWTPYRTDTLIEYASLEDFQNSRQTTTYKLPNRVDGTGFVVYDGAVFFNKERTRNIVKFDLRTRIKSGEAIINYANYHDTSPYRWGGKTDIDLAVDENGLWVIYATEQNNGMIVISQLNPYTLRFEATWETVYDKRAASNAFMICGVLYVVRSVYQDNESETGKNSIDYIYNTRLNRGEYVDVPFPNQYQYIAAVDYNPRDNQLYVWNNNFILRYSLEFGPPDPAQVPTTAVTITSSAELFKTIISTTSTTSQKGPMSTTVAGSQEGSKGTKPPPAVSTTKIPPITNIFPLPERFCEALDSKGIKWPQTQRGMMVERPCPKGTRGTASYLCMISTGTWNPKGPDLSNCTSHWVNQLAQKIRSGENAASLANELAKHTKGPVFAGDVSSSVRLMEQLVDILDAQLQELKPSEKDSAGRSYNKLQKREKTCRAYLKAIVDTVDNLLRPEALESWKHMNSSEQAHTATMLLDTLEEGAFVLADNLLEPTRVSMPTENIVLEVAVLSTEGQIQDFKFPLGIKGAGSSIQLSANTVKQNSRNGLAKLVFIIYRSLGQFLSTENATIKLGADFIGRNSTIAVNSHVISVSINKESSRVYLTDPVLFTLPHIDPDNYFNANCSFWNYSERTMMGYWSTQGCKLVDTNKTRTTCACSHLTNFAILMAHREIAYKDGVHELLLTVITWVGIVISLVCLAICIFTFCFFRGLQSDRNTIHKNLCINLFIAEFIFLIGIDKTKYAIACPIFAGLLHFFFLAAFAWMCLEGVQLYLMLVEVFESEYSRKKYYYVAGYLFPATVVGVSAAIDYKSYGTEKACWLHVDNYFIWSFIGPVTFIILLNIIFLVITLCKMVKHSNTLKPDSSRLENIKSWVLGAFALLCLLGLTWSFGLLFINEETIVMAYLFTIFNAFQGVFIFIFHCALQKKVRKEYGKCFRHSYCCGGLPTESPHSSVKASTTRTSARYSSGTQSRIRRMWNDTVRKQSESSFISGDINSTSTLNQGMTGNYLLTNPLLRPHGTNNPYNTLLAETVVCNAPSAPVFNSPGHSLNNARDTSAMDTLPLNGNFNNSYSLHKGDYNDSVQVVDCGLSLNDTAFEKMIISELVHNNLRGSSKTHNLELTLPVKPVIGGSSSEDDAIVADASSLMHSDNPGLELHHKELEAPLIPQRTHSLLYQPQKKVKSEGTDSYVSQLTAEAEDHLQSPNRDSLYTSMPNLRDSPYPESSPDMEEDLSPSRRSENEDIYYKSMPNLGAGHQLQMCYQISRGNSDGYIIPINKEGCIPEGDVREGQMQLVTSL

SEQ ID NO: 13452 - protein, 1336 aa, Artificial Sequence
  Synthetic polypeptide
RCNNRTQCIVVTGSDVFPDPCPGTYKYLEVQYECVPYIFVCPGTLKAIVDSPCIYEAEQKAGAWCKDPLQAADKIYFMPWTPYRTDTLIEYASLEDFQNSRQTTTYKLPNRVDGTGFVVYDGAVFFNKERTRNIVKFDLRTRIKSGEAIINYANYHDTSPYRWGGKTDIDLAVDENGLWVIYATEQNNGMIVISQLNPYTLRFEATWETVYDKRAASNAFMICGVLYVVRSVYQDNESETGKNSIDYIYNTRLNRGEYVDVPFPNQYQYIAAVDYNPRDNQLYVWNNNFILRYSLEFGPPDPAQVPTTAVTITSSAELFKTIISTTSTTSQKGPMSTTVAGSQEGSKGTKPPPAVSTTKIPPITNIFPLPERFCEALDSKGIKWPQTQRGMMVERPCPKGTRGTASYLCMISTGTWNPKGPDLSNCTSHWVNQLAQKIRSGENAASLANELAKHTKGPVFAGDVSSSVRLMEQLVDILDAQLQELKPSEKDSAGRSYNKLQKREKTCRAYLKAIVDTVDNLLRPEALESWKHMNSSEQAHTATMLLDTLEEGAFVLADNLLEPTRVSMPTENIVLEVAVLSTEGQIQDFKFPLGIKGAGSSIQLSANTVKQNSRNGLAKLVFIIYRSLGQFLSTENATIKLGADFIGRNSTIAVNSHVISVSINKESSRVYLTDPVLFTLPHIDPDNYFNANCSFWNYSERTMMGYWSTQGCKLVDTNKTRTTCACSHLTNFAILMAHREIAYKDGVHELLLTVITWVGIVISLVCLAICIFTFCFFRGLQSDRNTIHKNLCINLFIAEFIFLIGIDKTKYAIACPIFAGLLHFFFLAAFAWMCLEGVQLYLMLVEVFESEYSRKKYYYVAGYLFPATVVGVSAAIDYKSYGTEKACWLHVDNYFIWSFIGPVTFIILLNIIFLVITLCKMVKHSNTLKPDSSRLENINNYRVCDGYYNTDLPGSWVLGAFALLCLLGLTWSFGLLFINEETIVMAYLFTIFNAFQGVFIFIFHCALQKKVRKEYGKCFRHSYCCGGLPTESPHSSVKASTTRTSARYSSGTQSRIRRMWNDTVRKQSESSFISGDINSTSTLNQGHSLNNARDTSAMDTLPLNGNFNNSYSLHKGDYNDSVQVVDCGLSLNDTAFEKMIISELVHNNLRGSSKTHNLELTLPVKPVIGGSSSEDDAIVADASSLMHSDNPGLELHHKELEAPLIPQRTHSLLYQPQKKVKSEGTDSYVSQLTAEAEDHLQSPNRDSLYTSMPNLRDSPYPESSPDMEEDLSPSRRSENEDIYYKSMPNLGAGHQLQMCYQISRGNSDGYIIPINKEGCIPEGDVREGQMQLVTSL

SEQ ID NO: 13453 - protein, 1379 aa, Artificial Sequence
  Synthetic polypeptide
RCNNRTQCIVVTGSDVFPDPCPGTYKYLEVQYECVPYIFVCPGTLKAIVDSPCIYEAEQKAGAWCKDPLQAADKIYFMPWTPYRTDTLIEYASLEDFQNSRQTTTYKLPNRVDGTGFVVYDGAVFFNKERTRNIVKFDLRTRIKSGEAIINYANYHDTSPYRWGGKTDIDLAVDENGLWVIYATEQNNGMIVISQLNPYTLRFEATWETVYDKRAASNAFMICGVLYVVRSVYQDNESETGKNSIDYIYNTRLNRGEYVDVPFPNQYQYIAAVDYNPRDNQLYVWNNNFILRYSLEFGPPDPAQVPTTAVTITSSAELFKTIISTTSTTSQKGPMSTTVAGSQEGSKGTKPPPAVSTTKIPPITNIFPLPERFCEALDSKGIKWPQTQRGMMVERPCPKGTRGTASYLCMISTGTWNPKGPDLSNCTSHWVNQLAQKIRSGENAASLANELAKHTKGPVFAGDVSSSVRLMEQLVDILDAQLQELKPSEKDSAGRSYNKLQKREKTCRAYLKAIVDTVDNLLRPEALESWKHMNSSEQAHTATMLLDTLEEGAFVLADNLLEPTRVSMPTENIVLEVAVLSTEGQIQDFKFPLGIKGAGSSIQLSANTVKQNSRNGLAKLVFIIYRSLGQFLSTENATIKLGADFIGRNSTIAVNSHVISVSINKESSRVYLTDPVLFTLPHIDPDNYFNANCSFWNYSERTMMGYWSTQGCKLVDTNKTRTTCACSHLTNFAILMAHREIAYKDGVHELLLTVITWVGIVISLVCLAICIFTFCFFRGLQSDRNTIHKNLCINLFIAEFIFLIGIDKTKYAIACPIFAGLLHFFFLAAFAWMCLEGVQLYLMLVEVFESEYSRKKYYYVAGYLFPATVVGVSAAIDYKSYGTEKACWLHVDNYFIWSFIGPVTFIILLNIIFLVITLCKMVKHSNTLKPDSSRLENINNYRVCDGYYNTDLPGSWVLGAFALLCLLGLTWSFGLLFINEETIVMAYLFTIFNAFQGVFIFIFHCALQKKVRKEYGKCFRHSYCCGGLPTESPHSSVKASTTRTSARYSSGTQSRIRRMWNDTVRKQSESSFISGDINSTSTLNQGMTGNYLLTNPLLRPHGTNNPYNTLLAETVVCNAPSAPVFNSPGHSLNNARDTSAMDTLPLNGNFNNSYSLHKGDYNDSVQVVDCGLSLNDTAFEKMIISELVHNNLRGSSKTHNLELTLPVKPVIGGSSSEDDAIVADASSLMHSDNPGLELHHKELEAPLIPQRTHSLLYQPQKKVKSEGTDSYVSQLTAEAEDHLQSPNRDSLYTSMPNLRDSPYPESSPDMEEDLSPSRRSENEDIYYKSMPNLGAGHQLQMCYQISRGNSDGYIIPINKEGCIPEGDVREGQMQLVTSL

SEQ ID NO: 13454 - protein, 1289 aa, Artificial Sequence
  Synthetic polypeptide
RCNNRTQCIVVTGSDVFPDPCPGTYKYLEVQYECVPYMEQKVFVCPGTLKAIVDSPCIYEAEQKAGAWCKDPLQAADKIYFMPWTPYRTDTLIEYASLEDFQNSRQTTTYKLPNRVDGTGFVVYDGAVFFNKERTRNIVKFDLRTRIKSGEAIINYANYHDTSPYRWGGKTDIDLAVDENGLWVIYATEQNNGMIVISQLNPYTLRFEATWETVYDKRAASNAFMICGVLYVVRSVYQDNESETGKNSIDYIYNTRLNRGEYVDVPFPNQYQYIAAVDYNPRDNQLYVWNNNFILRYSLEFGPPDPAQERFCEALDSKGIKWPQTQRGMMVERPCPKGTRGTASYLCMISTGTWNPKGPDLSNCTSHWVNQLAQKIRSGENAASLANELAKHTKGPVFAGDVSSSVRLMEQLVDILDAQLQELKPSEKDSAGRSYNKAIVDTVDNLLRPEALESWKHMNSSEQAHTATMLLDTLEEGAFVLADNLLEPTRVSMPTENIVLEVAVLSTEGQIQDFKFPLGIKGAGSSIQLSANTVKQNSRNGLAKLVFIIYRSLGQFLSTENATIKLGADFIGRNSTIAVNSHVISVSINKESSRVYLTDPVLFTLPHIDPDNYFNANCSFWNYSERTMMGYWSTQGCKLVDTNKTRTTCACSHLTNFAILMAHREIAYKDGVHELLLTVITWVGIVISLVCLAICIFTFCFFRGLQSDRNTIHKNLCINLFIAEFIFLIGIDKTKYAIACPIFAGLLHFFFLAAFAWMCLEGVQLYLMLVEVFESEYSRKKYYYVAGYLFPATVVGVSAAIDYKSYGTEKACWLHVDNYFIWSFIGPVTFIILLNIIFLVITLCKMVKHSNTLKPDSSRLENIKSWVLGAFALLCLLGLTWSFGLLFINEETIVMAYLFTIFNAFQGVFIFIFHCALQKKVRKEYGKCFRHSYCCGGLPTESPHSSVKASTTRTSARYSSGTQSRIRRMWNDTVRKQSESSFISGDINSTSTLNQGMTGNYLLTNPLLRPHGTNNPYNTLLAETVVCNAPSAPVFNSPGHSLNNARDTSAMDTLPLNGNFNNSYSLHKGDYNDSVQVVDCGLSLNDTAFEKMIISELVHNNLRGSSKTHNLELTLPVKPVIGGSSSEDDAIVADASSLMHSDNPGLELHHKELEAPLIPQRTHSLLYQPQKKVKSEGTDSYVSQLTAEAEDHLQSPNRDSLYTSMPNLRDSPYPESSPDMEEDLSPSRRSENEDIYYKSMPNLGAGHQLQMCYQISRGNSDGYIIPINKEGCIPEGDVREGQMQLVTSL

SEQ ID NO: 13455 - protein, 50 aa, Artificial Sequence
  Synthetic polypeptide
CSSCCFCLEFSFFTSTSGEICPYFRHPLSERVSSQSQRRLFEKMGESNSE

SEQ ID NO: 13456 - protein, 331 aa, Artificial Sequence
  Synthetic polypeptide
VQVAASVWNSLSSLLPVVRFAHTLGILSVKEFLAKAKEDFLKKWENPTQNNAGLEDFERKKTLGTGSFGRVMLVKHKATEQYYAMKILDKQKDNSNLYMVMEYVPGGEMFSHLRRIGRFSEPHARFYAAQIVLTFEYLHSLDLIYRDLKPENLLIDHQGYIQVTDFGFAKRVKGRTWTLCGTPEYLAPEIILSKGYNKAVDWWALGVLIYEMAAGYPPFFADQPIQIYEKIVSGKVRFPSHFSSDLKDLLRNLLQVDLTKRFGNLKNGVSDIKTHKWFATTDWIAIYQRKVEAPFIPKFRGSGDTSNFDDYEEEDIRVSITEKCAKEFGEF

SEQ ID NO: 13457 - protein, 181 aa, Artificial Sequence
  Synthetic polypeptide
VQVAASVWNSLSSLLPVVRFAHTLGILSVKEFLAKAKEDFLKKWENPTQNNAGLEDFERKKTLGTGSFGRVMLVKHKATEQYYAMKILDKQKVVKLKQIEHTLNEKRILQAVNFPFLVRLEYAFKDNSNLYMVMEYVPGGEMFSHLRRIGRFSEPHARFYAAQIVLTFEYLHSLDLIYRDL

SEQ ID NO: 13458 - protein, 195 aa, Artificial Sequence
  Synthetic polypeptide
VQVAASVWNSLSSLLPVVRFAHTLGILSVKEFLAKAKEDFLKKWENPTQNNAGLEDFERKKTLGTGSFGRVMLVKHKATEQYYAMKILDKQKVVKLKQIEHTLNEKRILQAVNFPFLVRLEYAFKDNSNLYMVMEYVPGGEMFSHLRRIGRFSEPHARFYAAQIVLTFEYLHSLDLIYRDLKPENLLIDHQGYIQ

SEQ ID NO: 13459 - protein, 216 aa, Artificial Sequence
  Synthetic polypeptide
VQVAASVWNSLSSLLPVVRFAHTLGILSVKEFLAKAKEDFLKKWENPTQNNAGLEDFERKKTLGTGSFGRVMLVKHKATEQYYAMKILDKQKVVKLKQIEHTLNEKRILQAVNFPFLVRLEYAFKDNSNLYMVMEYVPGGEMFSHLRRIGRFSEPHARFYAAQIVLTFEYLHSLDLIYRDLKPENLLIDHQGYIQVTDFGFAKRVKGRTWTLCGTP

SEQ ID NO: 13460 - protein, 223 aa, Artificial Sequence
  Synthetic polypeptide
VQVAASVWNSLSSLLPVVRFAHTLGILSVKEFLAKAKEDFLKKWENPTQNNAGLEDFERKKTLGTGSFGRVMLVKHKATEQYYAMKILDKQKVVKLKQIEHTLNEKRILQAVNFPFLVRLEYAFKDNSNLYMVMEYVPGGEMFSHLRRIGRFSEPHARFYAAQIVLTFEYLHSLDLIYRDLKPENLLIDHQGYIQVTDFGFAKRVKGRTWTLCGTPEYLAPEI

SEQ ID NO: 13461 - protein, 227 aa, Artificial Sequence
  Synthetic polypeptide
VQVAASVWNSLSSLLPVVRFAHTLGILSVKEFLAKAKEDFLKKWENPTQNNAGLEDFERKKTLGTGSFGRVMLVKHKATEQYYAMKILDKQKVVKLKQIEHTLNEKRILQAVNFPFLVRLEYAFKDNSNLYMVMEYVPGGEMFSHLRRIGRFSEPHARFYAAQIVLTFEYLHSLDLIYRDLKPENLLIDHQGYIQVTDFGFAKRVKGRTWTLCGTPEYLAPEIILSK

SEQ ID NO: 13462 - protein, 231 aa, Artificial Sequence
  Synthetic polypeptide
VQVAASVWNSLSSLLPVVRFAHTLGILSVKEFLAKAKEDFLKKWENPTQNNAGLEDFERKKTLGTGSFGRVMLVKHKATEQYYAMKILDKQKVVKLKQIEHTLNEKRILQAVNFPFLVRLEYAFKDNSNLYMVMEYVPGGEMFSHLRRIGRFSEPHARFYAAQIVLTFEYLHSLDLIYRDLKPENLLIDHQGYIQVTDFGFAKRVKGRTWTLCGTPEYLAPEIILSKGYNK

SEQ ID NO: 13463 - protein, 270 aa, Artificial Sequence
  Synthetic polypeptide
VQVAASVWNSLSSLLPVVRFAHTLGILSVKEFLAKAKEDFLKKWENPTQNNAGLEDFERKKTLGTGSFGRVMLVKHKATEQYYAMKILDKQKVVKLKQIEHTLNEKRILQAVNFPFLVRLEYAFKDNSNLYMVMEYVPGGEMFSHLRRIGRFSEPHARFYAAQIVLTFEYLHSLDLIYRDLKPENLLIDHQGYIQVTDFGFAKRVKGRTWTLCGTPEYLAPEIILSKGYNKAVDWWALGVLIYEMAAGYPPFFADQPIQIYEKIVSGKNF

SEQ ID NO: 13464 - protein, 271 aa, Artificial Sequence
  Synthetic polypeptide
VQVAASVWNSLSSLLPVVRFAHTLGILSVKEFLAKAKEDFLKKWENPTQNNAGLEDFERKKTLGTGSFGRVMLVKHKATEQYYAMKILDKQKVVKLKQIEHTLNEKRILQAVNFPFLVRLEYAFKDNSNLYMVMEYVPGGEMFSHLRRIGRFSEPHARFYAAQIVLTFEYLHSLDLIYRDLKPENLLIDHQGYIQVTDFGFAKRVKGRTWTLCGTPEYLAPEIILSKGYNKAVDWWALGVLIYEMAAGYPPFFADQPIQIYEKIVSGKQNF

SEQ ID NO: 13465 - protein, 364 aa, Artificial Sequence
  Synthetic polypeptide
VQVAASVWNSLSSLLPVVRFAHTLGILSVKEFLAKAKEDFLKKWENPTQNNAGLEDFERKKTLGTGSFGRVMLVKHKATEQYYAMKILDKQKVVKLKQIEHTLNEKRILQAVNFPFLVRLEYAFKDNSNLYMVMEYVPGGEMFSHLRRIGRFSEPHARFYAAQIVLTFEYLHSLDLIYRDLKPENLLIDHQGYIQVTDFGFAKRVKGRTWTLCGTPEYLAPEIILSKGYNKAVDWWALGVLIYEMAAGYPPFFADQPIQIYEKIVSGKVRFPSHFSSDLKDLLRNLLQVDLTKRFGNLKNGVSDIKTHKWFATTDWIAIYQRKVEAPFIPKFRGSGDTSNFDDYEEEDIRVSITEKCAKEFGEF

SEQ ID NO: 13466 - protein, 258 aa, Artificial Sequence
  Synthetic polypeptide
PGAAAYTCNPSTLGGGGRRIAWVQEFKTAVSSDRRNAMAHRDSEMKEECLREDLKFYFMSPCEKYRARRQIPWKLGLQILKIVMVTTQLVRFGLSNQLVVAFKEDNTVAFKHLFLKGYSGTDEDDYSCSVYTQEDAYESIFFAINQYHQLKDITLGTLGYGENEDNRIGLKVCKQHYKKGTMFPSNETLNIDNDVELDCVQLDLQDLSKKPPDWKNSSFFRLEFYRLLQVEISFHLKGIDLQTIHSRELPDCYVFQNT

SEQ ID NO: 13467 - protein, 575 aa, Artificial Sequence
  Synthetic polypeptide
PGAAAYTCNPSTLGGGGRRIAWVQEFKTAVSSDRRNAMAHRDSEMKEECLREDLKFYFMSPCEKYRARRQIPWKLGLQILKIVMVTTQLVRFGLSNQLVVAFKEDNTVAFKHLFLKGYSGTDEDDYSCSVYTQEDAYESIFFAINQYHQLKDITLGTLGYGENEDNRIGLKVCKQHYKKGTMFPSNETLNIDNDVELDCVQLDLQDLSKKPPDWKNSSFFRLEFYRLLQVEISFHLKGIDLQTIHSRELPDCYVFQNTIIFDNKAHSGKIKIYFDSDAKIEECKDLNIFGSTQKNAQYVLVFDAFVIVICLASLILCTRSIVLALRLRKRFLNFFLEKYKRPVCDTDQWEFINGWYVLVIISDLMTIIGSILKMEIKAKNLTNYDLCSIFLGTSTLLVWVGVIRYLGYFQAYNVLILTMQASLPKVLRFCACAGMIYLGYTFCGWIVLGPYHDKFENLNTVAECLFSLVNGDDMFATFAQIQQKSILVWLFSRLYLYSFISLFIYMILSLFIALITDSYDTIKKFQQNGFPETDLQEFLKECSSKEEYQKESSAFLSCICCRRRKRSDDHLIPIS

SEQ ID NO: 13468 - protein, 44 aa, Artificial Sequence
  Synthetic polypeptide
QAQRLTPVILALWEAEAGESLGSRSSRLQSAVIAEMQWHIVILR

SEQ ID NO: 13469 - protein, 8 aa, Artificial Sequence
  Synthetic polypeptide
SQKCNGTS

SEQ ID NO: 13470 - protein, 37 aa, Artificial Sequence
  Synthetic polypeptide
KKNLAGHGGVHDPPSRCSKLQGSHAHWSRGLPQPEEC

SEQ ID NO: 13471 - protein, 51 aa, Artificial Sequence
  Synthetic polypeptide
KKNLAGHGGVHDPPSRCSKLQGSHAHWSRGLPQPEECHQGEIWERCHQCGG

SEQ ID NO: 13472 - protein, 33 aa, Artificial Sequence
  Synthetic polypeptide
LAMVEFMILPVGAANFREAMRIGAEVYHNLKNV

SEQ ID NO: 13473 - protein, 272 aa, Artificial Sequence
  Synthetic polypeptide
LAMVEFMILPVGAANFREAMRIGAEVYHNLKNVIKEKYGKDATNVGDEGGFAPNILENKEGLELLKTAIGKAGYTDKVVIGMDVAASEFFRSGKYDLDFKSPDDPSRYISPDQLADLYKSFIKDYPVVSIEDPFDQDDWGAWQKFTASAGIQVVGDDLTVTNPKRIAKAVNEKSCNCLLLKVNQIGSVTESLQACKLAQANGWGVMVSHRSGETEDTFIADLVVGLCTGQIKTGAPCRSERLAKYNQLLRIEEELGSKAKFAGRNFRNPLAK

SEQ ID NO: 13474 - protein, 25 aa, Artificial Sequence
  Synthetic polypeptide
SLGNIGDSVFTKKLKKKFSWPWWSS

SEQ ID NO: 13475 - protein, 13 aa, Artificial Sequence
  Synthetic polypeptide
HMNMHCASPRRDD

SEQ ID NO: 13476 - protein, 100 aa, Artificial Sequence
  Synthetic polypeptide
ICIVLLQGEMIEMLPDGLFQCKKLQCLLLGKNSLMNLSPHVGELSNLTHLELIGNYLETLPPELEGCQSLKRNCLIVEENLLNTLPLPVTERLQTCLDKC

SEQ ID NO: 13477 - protein, 27 aa, Artificial Sequence
  Synthetic polypeptide
EFESSLDNVGDAISTKHKQPEQLFIFR

SEQ ID NO: 13478 - protein, 22 aa, Artificial Sequence
  Synthetic polypeptide
EMPSLQNINSQSNCSYSGERRE

SEQ ID NO: 13479 - protein, 837 aa, Artificial Sequence
  Synthetic polypeptide
TARATVHIQVNDVNEYAPVFKEKSYKATVIEGKQYDSILRVEAVDADCSPQFSQICSYEIITPDVPFTVDKDGYIKNTEKLNYGKEHQYKLTVTAYDCGKKRATEDVLVKISIKPTCTPGWQGWNNRIEYEPGTGALAVFPNIHLETCDEPVASVQATVELETSHIGKGCDRDTYSEKSLHRLCGAAAGTAELLPSPSGSLNWTMGLPTDNGHDSDQVFEFNGTQAVRIPDGVVSVSPKEPFTISVWMRHGPFGRKKETILCSSDKTDMNRHHYSLYVHGCRLIFLFRQDPSEEKKYRPAEFHWKLNQVCDEEWHHYVLNVEFPSVTLYVDGTSHEPFSVTEDYPLHPSKIETQLVVGACWQEFSGVENDNETEPVTVASAGGDLHMTQFFRGNLAGLTLRSGKLADKKVIDCLYTCKEGLDLQVLEDSGRGVQIQAHPSQLVLTLEGEDLGELDKAMQHISYLNSRQFPTPGIRRLKITSTIKCFNEATCISVPPVDGYVMVLQPEEPKISLSGVHHFARAASEFESSEGVFLFPELRIISTITREVEPEGDGAEDPTVQESLVSEEIVHDLDTCEVTVEGEELNHEQESLEVDMARLQQKGIEVSSSELGMTFTGVDTMASYEEVLHLLRYRNWHARSLLDRKFKLICSELNGRYISNEFKVEVNVIHTANPMEHANHMAAQPQFVHPEHRSFVDLSGHNLANPHPFAVVPSTATVVIVVCVSFLVFMIILGVFRIRAAHRRTMRDQDTGKENEMDWDDSALTITVNPMETYEDQHSSEEEEEEEEEEESEDGEEEDDITSAESESSEEEEGEQGDPQNATRQQQLEWDDSTLSY

SEQ ID NO: 13480 - protein, 818 aa, Artificial Sequence
  Synthetic polypeptide
TARATVHIQVNDVNEYAPVFKEKSYKATVIEGKQYDSILRVEAVDADCSPQFSQICSYEIITPDVPFTVDKDGYIKNTEKLNYGKEHQYKLTVTAYDCGKKRATEDVLVKISIKPTCTPGWQGWNNRIEYEPGTGALAVFPNIHLETCDEPVASVQATVELETSHIGKGCDRDTYSEKSLHRLCGAAAGTAELLPSPSGSLNWTMGLPTDNGHDSDQVFEFNGTQAVRIPDGVVSVSPKEPFTISVWMRHGPFGRKKETILCSSDKTDMNRHHYSLYVHGCRLIFLFRQDPSEEKKYRPAEFHWKLNQVCDEEWHHYVLNVEFPSVTLYVDGTSHEPFSVTEDYPLHPSKIETQLVVGACWQGGDLHMTQFFRGNLAGLTLRSGKLADKKVIDCLYTCKEGLDLQVLEDSGRGVQIQAHPSQLVLTLEGEDLGELDKAMQHISYLNSRQFPTPGIRRLKITSTIKCFNEATCISVPPVDGYVMVLQPEEPKISLSGVHHFARAASEFESSEGVFLFPELRIISTITREVEPEGDGAEDPTVQESLVSEEIVHDLDTCEVTVEGEELNHEQESLEVDMARLQQKGIEVSSSELGMTFTGVDTMASYEEVLHLLRYRNWHARSLLDRKFKLICSELNGRYISNEFKVEVNVIHTANPMEHANHMAAQPQFVHPEHRSFVDLSGHNLANPHPFAVVPSTATVVIVVCVSFLVFMIILGVFRIRAAHRRTMRDQDTGKENEMDWDDSALTITVNPMETYEDQHSSEEEEEEEEEEESEDGEEEDDITSAESESSEEEEGEQGDPQNATRQQQLEWDDSTLSY

SEQ ID NO: 13481 - protein, 617 aa, Artificial Sequence
  Synthetic polypeptide
HFGRPRQEDHWRPGVQDQPGQHSLGMVTPINDLPGADTSSYVKGEKLTRCKLASLYRLVDLFGWAHLANTYISVRISKEQDHIIIIPRGLSFSEATASNLVKVNIIGEVVDQGSTNLKIDHTGFSPHAAIYSTRPDVKCVIHIHTLATAAVSSMKCGILPISQESLLLGDVAYYDYQGSLEEQEERIQLQKVLGPSCKVLVLRNHGVVALGETLEEAFHYIFNVQLACEIQVQALAGAGGVDNLHVLDFQKYKAFTYTVAASGGGGVNMGSHQKWKVGEIEFEGLMRTLDNLGYRTGYAYRHPLIREKPRHKSDVEIPATVTAFSFEDDTVPLSPLKYMAQRQQREKTRWLNSPNTYMKVNVPEESRNGETSPRTKITWMKAEDSSKVSGGTPIKIEDPNQFVPLNTNPNEVLEKRNKIREQNRYDLKTAGPQSQLLAGIVVDKPPSTMQFEDDDHGPPAPPNPFSHLTEGELEEYKRTIERKQQGLEDAEQELLSDDASSVSQIQSQTQSPQNVPEKLEENHELFSKSFISMEVPVMVVNGKDDMHDVEDELAKRVSRLSTSTTIENIEITIKSPEKIEEVLSPEGSPSKSPSKKKKKFRTPSFLKKNKKKEKVEA

SEQ ID NO: 13482 - protein, 585 aa, Artificial Sequence
  Synthetic polypeptide
HFGRPRQEDHWRPGVQDQPGQHSLGMVTPINDLPGADTSSYVKGEKLTRCKLASLYRLVDLFGWAHLANTYISVRISKEQDHIIIIPRGLSFSEATASNLVKVNIIGEVVDQGSTNLKIDHTGFSPHAAIYSTRPDVKCVIHIHTLATAAVSSMKCGILPISQESLLLGDVAYYDYQGSLEEQEERIQLQKVLGPSCKVLVLRNHGVVALGETLEEAFHYIFNVQLACEIQVQALAGAGGVDNLHVLDFQKYKAFTYTVAASGGGGVNMGSHQKWKVGEIEFEGLMRTLDNLGYRTGYAYRHPLIREKPRHKSDVEIPATVTAFSFEDDTVPLSPLKYMAQRQQREKTRWLNSPNTYMKVNVPEESRNGETSPRTKITWMKAEDSSKVSGGTPIKIEDPNQFVPLNTNPNEVLEKRNKIREQNRYDLKTAGPQSQLLAGIVVDKPPSTMQFEDDDHGPPAPPNPFSHLTEGELEEYKRTIERKQQGLEENHELFSKSFISMEVPVMVVNGKDDMHDVEDELAKRVSRLSTSTTIENIEITIKSPEKIEEVLSPEGSPSKSPSKKKKKFRTPSFLKKNKKKEKVEA

SEQ ID NO: 13483 - protein, 52 aa, Artificial Sequence
  Synthetic polypeptide
MGTVAHVCNPSTLGGQGRRITGGQEFKTSLGNIVLAWSHLSMTFLVQIHPHM

SEQ ID NO: 13484 - protein, 698 aa, Artificial Sequence; identical to SEQ ID NO: 1763
  Synthetic polypeptide

SEQ ID NO: 13485 - protein, 20 aa, Artificial Sequence
  Synthetic polypeptide
CARVCVSEFPAAVHKDAFYL

SEQ ID NO: 13486 - protein, 7 aa, Artificial Sequence
  Synthetic polypeptide
VRACVCV

SEQ ID NO: 13487 - protein, 121 aa, Artificial Sequence
  Synthetic polypeptide
EFMEEMYTTFRNTLLTPAVAEWRGSLRWAELFHMSPTSNEDLRKIPDSNPFDATAGYRSLTYEEVLQELVKHKELLRRKDTHIRELEDYIDNLLVRVMEETPSILRVPYEPSRKAGKFSNS

SEQ ID NO: 13488 - protein, 20 aa, Artificial Sequence
  Synthetic polypeptide
SSGLFKSSWKRCIPLSEILC

SEQ ID NO: 13489 - protein, 25 aa, Artificial Sequence
  Synthetic polypeptide
VLAYLRVHGRDVYHFQKYFADPCSS

SEQ ID NO: 13490 - protein, 49 aa, Artificial Sequence
  Synthetic polypeptide
FNVINGFGSLKRGVGRREATGDQKHFQAVSSARKRGLRGGLCLPGSGHG

SEQ ID NO: 13491 - protein, 30 aa, Artificial Sequence
  Synthetic polypeptide
MPHDQKFCLIQCHKWLWLIKTRSWKTRGNR

SEQ ID NO: 13492 - protein, 420 aa, Artificial Sequence
  Synthetic polypeptide
NEELEDARQPVTKNTFRQYRVLGKGGFGEVCACQVRATGKMYACKRLEKKRIKKRKGESMALNEKQILEKVNSQFVVNLAYAYETKDALCLVLTIMNGGDLKFHIYNMGNPGFEEERALFYAAEILCGLEDLHRENTVYRDLKPENILLDDYGHIRISDLGLAVKIPEGDLIRGRVGTVGYMAPEVLNNQRYGLSPDYWGLGCLIYEMIEGQSPFRGRKEKVKREEVDRRVLETEEVYSHKFSEEAKSICKMLLTKDAKQRLGCQEEGAAEVKRHPFFRNMNFKRLEAGMLDPPFVPDPRAVYCKDVLDIEQFSTVKGVNLDHTDDDFYSKFSTGSVSIPWQNEMIETECFKELNVFGPNGTLPPDLNRNHPPEPPKKGLLQRLFKRQHQNNSKSSPSSKTSFNHHINSNHVSSNSTGSS

SEQ ID NO: 13493 - protein, 14 aa, Artificial Sequence
  Synthetic polypeptide
GILGPQPTSRTVFT

SEQ ID NO: 13494 - protein, 69 aa, Artificial Sequence
  Synthetic polypeptide
SGAVAHACNPSTLGGRGRRIMRNTWTSANLSNSIHLVTLTQEVLVLQEMILFFLQTPCLTNHAFLSIHT

SEQ ID NO: 13495 - protein, 61 aa, Artificial Sequence
  Synthetic polypeptide
SQHFGRPRQADHEEYLDLSQPLEQYSPSYPDTRSSCSSGDDSVFSPDPMPYEPCLPQYPHI

SEQ ID NO: 13496 - protein, 67 aa, Artificial Sequence
  Synthetic polypeptide
SQHFGRPRQADHEEYLDLSQPLEQYSPSYPDTRSSCSSGDDSVFSPDPMPYEPCLPQYPHINGSVKT

SEQ ID NO: 13497 - protein, 201 aa, Artificial Sequence
  Synthetic polypeptide
GKLKSPDRIVEDEDSITSVKSLPKEKEPLRVIPLKEVHKVQECKQSDIMMRDNLFEIVTTSRTFYVQADSPEEMHSWIKAVSGAIVAQRGPGRSASSEHPPGPSESKHAFRPTNAATATSHSTASRSNSLVSTFTMEKRGFYESLAKVKPGNFKVQTVSPREPASKVTEQALLRPQSKNGPQEKDCDLVDLDDASLPVSDV

SEQ ID NO: 13498 - protein, 180 aa, Artificial Sequence
  Synthetic polypeptide
GKLKSPDRIVEDEDSITSVKSLPKEKEPLRVIPLKEVHKVQECKQSDIMMRDNLFEIVTTSRTFYVQADSPEEMHSWIKAVSGAIVAQRGPGRSASSMRQARRLSNPCIQRSIPPVLQNPNTLSVLPTQPPPPHIPQPLAATLWSQPLPWRSEDFTSLLPRSSQGTSRSRLSLQENQLPK

SEQ ID NO: 13499 - protein, 131 aa, Artificial Sequence
  Synthetic polypeptide
GKLKSPDRIVEDEDSITSVKSLPKEKEPLRVIPLKEVHKVQECKQSDIMMRDNLFEIVTTSRTFYVQADSPEEMHSWIKAVSGAIVAQRGPGRSASSMRQARRLSNPCIQRYTSRAGECSTYVGSHANVPS

SEQ ID NO: 13500 - protein, 11 aa, Artificial Sequence
  Synthetic polypeptide
NPCPRKRNLFV

SEQ ID NO: 13501 - protein, 27 aa, Artificial Sequence
  Synthetic polypeptide
QDSGRRRQHHFCEIPAQGKGTSSCNTT

SEQ ID NO: 13502 - protein, 26 aa, Artificial Sequence
  Synthetic polypeptide
HMSLQLICVGQGVRPLKGKILQFHQS

SEQ ID NO: 13503 - protein, 13 aa, Artificial Sequence
  Synthetic polypeptide
VCNLFVLGKVSGP

SEQ ID NO: 13504 - protein, 273 aa, Artificial Sequence
  Synthetic polypeptide
YNMAATTKDFGQTDLDLTYESATYLCWARCQALERKNSAIPSELNEKQELVYTNKKLELQVESMLSEIKMEQAKTEDEKSKLTVLQMTHNKLLQEHNNALKTIEELTRKESEKVDRAVLKELSEKLELAEKALASKQLQMDEMKQTIAKQEEDLETMTILRAQMEVYCSDFHAERAAREKIHEEKEQLALQLAVLLKENDAFEDGGRQSLMEMQSRHGARTSDSDQQAYLVQRGAEDRDWRQQRNIPIHSCPKCGEVLPDIDTLQIHVMDCII

SEQ ID NO: 13505 - protein, 6 aa, Artificial Sequence
  Synthetic polypeptide
DGSLLF

SEQ ID NO: 13506 - protein, 46 aa, Artificial Sequence
  Synthetic polypeptide
NEDSHSLFSGYFIRWKFTVLIFMLKEQRERKFMRKRSNWHCSWQFC

SEQ ID NO: 13507 - protein, 120 aa, Artificial Sequence
  Synthetic polypeptide
PFFILRIFHKMEVYCSDFHAERAAREKIHEEKEQLALQLAVLLKENDAFEDGGRQSLMEMQSRHGARTSDSDQQAYLVQRGAEDRDWRQQRNIPIHSCPKCGEVLPDIDTLQIHVMDCII

SEQ ID NO: 13508 - protein, 13 aa, Artificial Sequence
  Synthetic polypeptide
AVFAPLHSCLGSP

SEQ ID NO: 13509 - protein, 77 aa, Artificial Sequence
  Synthetic polypeptide
SCVRATALLPRQSLMEMQSRHGARTSDSDQQAYLVQRGAEDRDWRQQRNIPIHSCPKCGEVLPDIDTLQIHVMDCII

SEQ ID NO: 13510 - protein, 198 aa, Artificial Sequence
  Synthetic polypeptide
MGVMPGEPQAHPCGLSNFGDKSGFSKQMVEILHKHNIQFSSFDIFSDEEVRQGLKAYSSWPTYPQLYVSGELIGGLDIIKELEASEELDTICPKAPKLEERLKVLTNKASVMLFMKGNKQEAKCGFSKQILEILNSTGVEYETFDILEDEEVRQGLKAYSNWPTYPQLYVKGELVGGLDIVKELKENGELLPILRGEN

SEQ ID NO: 13511 - protein, 19 aa, Artificial Sequence
  Synthetic polypeptide
QLWGQVRFQQADGGNSSQT

SEQ ID NO: 13512 - protein, 72 aa, Artificial Sequence
  Synthetic polypeptide
WVSCQASLRPTPAALATLGTSQVSASRWWKFFTNIIFSLAVLISSQMKRFDRDSKPIPVGLPILSSMFLESS

SEQ ID NO: 13513 - protein, 49 aa, Artificial Sequence
  Synthetic polypeptide
IDQRNRIENPELQDSCTRSMPTPPLTSRASGFWAMRRTWPSSRGTRCRL

SEQ ID NO: 13514 - protein, 17 aa, Artificial Sequence
  Synthetic polypeptide
RIQSCRTHAHVQCPRRH

SEQ ID NO: 13515 - protein, 84 aa, Artificial Sequence
  Synthetic polypeptide
RSEEQNRESRAAGLMHTFNAHAATDITGFGILGHAQNLAKQQRNEVSFVIHNLPVLAKMAAVSKACGNMFGLMHGTCPETSDVQ

SEQ ID NO: 13516 - protein, 152 aa, Artificial Sequence
  Synthetic polypeptide
RSEEQNRESRAAGLMHTFNAHAATDITGFGILGHAQNLAKQQRNEVSFVIHNLPVLAKMAAVSKACGNMFGLMHGTCPETSGGLLICLPREQAARFCAEIKSPKYGEGHQAWIIGIVEKGNRTARIIDKPRIIEVAPQVATQNVNPTPGATS

SEQ ID NO: 13517 - protein, 122 aa, Artificial Sequence
  Synthetic polypeptide
DLELEIPFDPAIPLLGIYPKDYKSCCCKDACTHMFIAALFTIAKTWNQLKCPSMIDWIKKMWHIHTVEYYAAVKKDEFMYFAGRWMKLETIILSKLSKGQKTKRRMFSLIGQTMQCQGTCWC

SEQ ID NO: 13518 - protein, 171 aa, Artificial Sequence
  Synthetic polypeptide
VHVLCREMDEAGNHHSKQTIKRTENQTPHVLTHRPDNAVPGDVLVLTKPLGTQVAVAVHQWLDIPEKWNKIKLVVTQEDVELAYQEAMMNMARLNRTAAGLMHTFNAHAATDITGFGILGHAQNLAKQQRNEVSFVIHNLPVLAKMAAVSKACGNMFGLMHGTCPETSDVQ

SEQ ID NO: 13519 - protein, 239 aa, Artificial Sequence
  Synthetic polypeptide
VHVLCREMDEAGNHHSKQTIKRTENQTPHVLTHRPDNAVPGDVLVLTKPLGTQVAVAVHQWLDIPEKWNKIKLVVTQEDVELAYQEAMMNMARLNRTAAGLMHTFNAHAATDITGFGILGHAQNLAKQQRNEVSFVIHNLPVLAKMAAVSKACGNMFGLMHGTCPETSGGLLICLPREQAARFCAEIKSPKYGEGHQAWIIGIVEKGNRTARIIDKPRIIEVAPQVATQNVNPTPGATS

SEQ ID NO: 13520 - protein, 168 aa, Artificial Sequence
  Synthetic polypeptide
VHVLCREMDEAGNHHSKQTIKRTENQTPHVLTHRPDNAVPGDVLVLTKPLGTQVAVAVHQWLDIPEKWNKIKLVVTQEDVELAYQEAMMNMARLNRTGGLLICLPREQAARFCAEIKSPKYGEGHQAWIIGIVEKGNRTARIIDKPRIIEVAPQVATQNVNPTPGATS

SEQ ID NO: 13521 - protein, 20 aa, Artificial Sequence
  Synthetic polypeptide
ITSLSQKTCRRTGFGNFTRH

SEQ ID NO: 13522 - protein, 60 aa, Artificial Sequence
  Synthetic polypeptide
ITSLSQKTCRRTGFGNFTRSCTHTSRTSWPCTVRSLEGRTTRPPCPTWTSSSKNYCRVMR

SEQ ID NO: 13523 - protein, 188 aa, Artificial Sequence
  Synthetic polypeptide
KCVALPLSHSISCSTMVRRAFFFFTFRHDCKFSEASQPCFLYRLWNCESVQPLFSMNYQSQPENLQKNWLREFYQALGSFYFLHESLKNIYQFDFKAKKYRKVAGKEIYSDTLESTPMLEKEKFPQDYFPECKWSRKGFIRTRWCIADCAFDLVNIHLFHDASNLVAWETSPSVYSGIRHKALGYVLD

SEQ ID NO: 13524 - protein, 448 aa, Artificial Sequence
  Synthetic polypeptide
KCVALPLSHSISCSTMVRRAFFFFTFRHDCKFSEASQPCFLYRLWNCESVQPLFSMNYQSQPENLQKNWLREFYQVVHTHKPHFMALHCQEFGGKNYEASMSHVDKFVKELLSSDAMKEYNRARVYLDENYKSQEHFTALGSFYFLHESLKNIYQFDFKAKKYRKVAGKEIYSDTLESTPMLEKEKFPQDYFPECKWSRKGFIRTRWCIADCAFDLVNIHLFHDASNLVAWETSPSVYSGIRHKALGYVLDRIIDQRFEKVSYFVFGDFNFRLDSKSVVETLCTKATMQTVRAADTNEVVKLIFRESDNDRKVMLQLEKKLFDYFNQEVFRDNNGTALLEFDKELSVFKDRLYELDISFPPSYPYSEDARQGEQYMNTRCPAWCDRILMSPSAKELVLRSESEEKVVTYDHIGPNVCMGDHKPVFLAFRIMPGAGKPHAHVHKCCVVQ

SEQ ID NO: 13525 - protein, 423 aa, Artificial Sequence
  Synthetic polypeptide
KCVALPLSHSISCSTMVRRAFFFFTFRHDCKFSEASQPCFLYRLWNCESVQPLFSMNYQSQPENLQKNWLREFYQVVHTHKPHFMALHCQEFGGKNYEASMSHVDKFVKELLSSDAMKEYNRARVYLDENYKSQEHFTALGSFYFLHESLKNIYQFDFKAKKYRKVAGKEIYSDTLESTPMLEKEKFPQDYFPECKWSRKGFIRTRWCIADCAFDLVNIHLFHDASNLVAWETSPSVYSGIRHKALGYVLDRIIDQRFEKVSYFVFGDFNFRLDSKSVVETLCTKATMQTVRAADTNEVVKLIFRESDNDRKVMLQLEKKLFDYFNQEVFRDNNGTALLEFDKELSVFKDRLYELDISFPPSYPYSEDARQGEQYMNTRCPAWCDRILMSPSAKELVLRVSVCCPSPGHRGMWSAGSGLAQPW

SEQ ID NO: 13526 - protein, 66 aa, Artificial Sequence
  Synthetic polypeptide
VSATSILHELPVSARKPAEELASGILPGRAHTQAALHGLALSGVWREELRGLHVPRGQVRQRTIVE

SEQ ID NO: 13527 - protein, 36 aa, Artificial Sequence
  Synthetic polypeptide
VSATSILHELPVSARKPAEELASGILPGTRKLLFSS

SEQ ID NO: 13528 - protein, 48 aa, Artificial Sequence
  Synthetic polypeptide
ACSLNEDTMEATSLQTLHGTLWKQTGNLKLWVKSDGILFWIYRCRIRC

SEQ ID NO: 13529 - protein, 753 aa, Artificial Sequence
  Synthetic polypeptide
NYGSNLMASYFGYTVVVSDVNSDGLDDVLVGAPLFMEREFESNPREVGQIYLYLQVSSLLFRDPQILTGTETFGRFGSAMAHLGDLNQDGYNDIAIGVPFAGKDQRGKVLIYNGNKDGLNTKPSQVLQGVWASHAVPSGFGFTLRGDSDIDKNDYPDLIVGAFGTGKVAVYRARPVVTVDAQLLLHPMIINLENKTCQVPDSMTSAACFSLRVCASVTGQSIANTIVLMAEVQLDSLKQKGAIKRTLFLDNHQAHRVFPLVIKRQKSHQCQDFIVYLRDETEFRDKLSPINISLNYSLDESTFKEGLEVKPILNYYRENIVSEQAHILVDCGEDNLCVPDLKLSARPDKHQVIIGDENHLMLIINARNEGEGAYEAELFVMIPEEADYVGIERNNKGFRPLSCEYKMENVTRMVVCDLGNPMVSGTNYSLGLRFAVPRLEKTNMSINFDLQIRSSNKDNPDSNFVSLQINITAVAQVEIRGVSHPPQIVLPIHNWEPEEEPHKEEEVGPLVEHIYELHNIGPSTISDTILEVGWPFSARDEFLLYIFHIQTLGPLQCQPNPNINPQDIKPAASPEDTPELSAFLRNSTIPHLVRKRDVHVVEFHRQSPAKILNCTNIECLQISCAVGRLEGGESAVLKVRSRLWAHTFLQRKNDPYALASLVSFEVKKMPYTDQPAKLPEGSIVIKTSVIWATPNVSFSIPLWVIILAILLGLLVLAILTLALWKCGFFDRARPPQEDMTDREQLTNDKTPEA

SEQ ID NO: 13530 - protein, 12 aa, Artificial Sequence
  Synthetic polypeptide
FYIMDIHHKGHR

SEQ ID NO: 13531 - protein, 360 aa, Artificial Sequence
  Synthetic polypeptide
LQENKLRDPTDSTLWISITRVTADISLAKRSVLNNPSKHAIIERSNTRSSLAEVQSEIERIFELARTLQLVVLDADTINHPAQLSKTSLAPIIVYVKISSPKVLQRLIKSRGKSQAKHLNVQMVAADKLAQCPPELFDVILDENQLEDACEHLADYLEAYWKATHPPSSSLPNPLLSRTLATSSLPLSPTLASNSQGSQGDQRTDRSAPIRSASQAEEEPSVEPVKKSQHRSSSSAPHHNHRSGTSRGLSRQETFDSETQESRDSAYVEPKEDYSHDHVDHYASHRDHNHRDETHGSSDHRHRESRHRSRDVDREQDHNECNKQRSRHKSKDRYCEKDGEVISKKRNEAGEWNRDVYIRQ

SEQ ID NO: 13532 - protein, 58 aa, Artificial Sequence
  Synthetic polypeptide
VTCSLGQSNAWCSFTVSHQPHKGPSSCRKTSSGIPLILHYGYPSQGSPLTSRLPNARY

SEQ ID NO: 13533 - protein, 922 aa, Artificial Sequence
  Synthetic polypeptide
GLPSQMELGVMKVDINLQKVDIDQCSSDGWFSGTHKCHLNNSECMPIKGLGFVLGAYECICKAGFYHPGVLPVNNFRRRGPDQHISGSTKDVSEEAYVCLPCREGCPFCADDSPCFVQEDKYLRLAIISFQALCMLLDFVSMLVVYHFRKAKSIRASGLILLETILFGSLLLYFPVVILYFEPSTFRCILLRWARLLGFATVYGTVTLKLHRVLKVFLSRTAQRIPYMTGGRVMRMLAVILLVVFWFLIGWTSSVCQNLEKQISLIGQGKTSDHLIFNMCLIDRWDYMTAVAEFLFLLWGVYLCYAVRTVPSAFHEPRYMAVAVHNELIISAIFHTIRFVLASRLQSDWMLMLYFAHTHLTVTVTIGLLLIPKFSHSSNNPRDDIATEAYEDELDMGRSGSYLNSSINSAWSEHSLDPEDIRDELKKLYAQLEIYKRKKMITNNPHLQKKRCSKKGLGRSIMRRITEIPETVSRQCSKEDKEGADHGTAKGTALIRKNPPESSGNTGKSKEETLKNRVFSLKKSHSTYDHVRDQTEESSSLPTESQEEETTENSTLESLSGKKLTQKLKEDSEAESTESVPLVCKSASAHNLSSEKKTGHPRTSMLQKSLSVIASAKEKTLGLAGKTQTAGVEERTKSQKPLPKDKETNRNHSNSDNTETKDPAPQNSNPAEEPRKPQKSGIMKQQRVNPTTANSDLNPGTTQMKDNFDIGEVCPWEVYDLTPGPVPSESKVQKHVSIVASEMEKNPTFSLKEKSHHKPKAAEVCQQSNQKRIDKAEVCLWESQGQSILEDEKLLISKTPVLPERAKEENGGQPRAANVCAGQSEELPPKAVASKTENENLNQIGHQEKKTSSSEENVRGSYNSSNNFQQPLTSRAEVCPWEFETPAQPNAGRSVALPASSALSANKIAGPRKEEIWDSFKV

SEQ ID NO: 13534 - protein, 30 aa, Artificial Sequence
  Synthetic polypeptide
RRCLASPSPSATVLSFLRPPQPNGTGCHES

SEQ ID NO: 13535 - protein, 44 aa, Artificial Sequence
  Synthetic polypeptide
VCSSPSWVHFPHCHLMKKVPCFSFTFRHGFKFPEASPAKWNWVS

SEQ ID NO: 13536 - protein, 922 aa, Artificial Sequence
  Synthetic polypeptide
GLPSHVELGVMKVDINLQKVDIDQCSSDGWFSGTHKCHLNNSECMPIKGLGFVLGAYECICKAGFYHPGVLPVNNFRRRGPDQHISGSTKDVSEEAYVCLPCREGCPFCADDSPCFVQEDKYLRLAIISFQALCMLLDFVSMLVVYHFRKAKSIRASGLILLETILFGSLLLYFPVVILYFEPSTFRCILLRWARLLGFATVYGTVTLKLHRVLKVFLSRTAQRIPYMTGGRVMRMLAVILLVVFWFLIGWTSSVCQNLEKQISLIGQGKTSDHLIFNMCLIDRWDYMTAVAEFLFLLWGVYLCYAVRTVPSAFHEPRYMAVAVHNELIISAIFHTIRFVLASRLQSDWMLMLYFAHTHLTVTVTIGLLLIPKFSHSSNNPRDDIATEAYEDELDMGRSGSYLNSSINSAWSEHSLDPEDIRDELKKLYAQLEIYKRKKMITNNPHLQKKRCSKKGLGRSIMRRITEIPETVSRQCSKEDKEGADHGTAKGTALIRKNPPESSGNTGKSKEETLKNRVFSLKKSHSTYDHVRDQTEESSSLPTESQEEETTENSTLESLSGKKLTQKLKEDSEAESTESVPLVCKSASAHNLSSEKKTGHPRTSMLQKSLSVIASAKEKTLGLAGKTQTAGVEERTKSQKPLPKDKETNRNHSNSDNTETKDPAPQNSNPAEEPRKPQKSGIMKQQRVNPTTANSDLNPGTTQMKDNFDIGEVCPWEVYDLTPGPVPSESKVQKHVSIVASEMEKNPTFSLKEKSHHKPKAAEVCQQSNQKRIDKAEVCLWESQGQSILEDEKLLISKTPVLPERAKEENGGQPRAANVCAGQSEELPPKAVASKTENENLNQIGHQEKKTSSSEENVRGSYNSSNNFQQPLTSRAEVCPWEFETPAQPNAGRSVALPASSALSANKIAGPRKEEIWDSFKV

SEQ ID NO: 13537 - protein, 52 aa, Artificial Sequence
  Synthetic polypeptide
ISLMRPDDFIRGNPFHLVLILSLACHQYKTCISSSTMIVRPPQPCGTGCHES

SEQ ID NO: 13538 - protein, 21 aa, Artificial Sequence
  Synthetic polypeptide
NLHFIFHYDCEASPAMWNWVS

SEQ ID NO: 13539 - protein, 61 aa, Artificial Sequence
  Synthetic polypeptide
AKLNFYSSCGVFISAMQCGQSHRHSMSPAIWLLQFTMSSSSLLYSIQLDLFLPQDFSLIGC

SEQ ID NO: 13540 - protein, 647 aa, Artificial Sequence
  Synthetic polypeptide
PGVVAHACNPSTLVGQAEFLFLLWGVYLCYAVRTVPSAFHEPRYMAVAVHNELIISAIFHTIRFVLASRLQSDWMLMLYFAHTHLTVTVTIGLLLIPKFSHSSNNPRDDIATEAYEDELDMGRSGSYLNSSINSAWSEHSLDPEDIRDELKKLYAQLEIYKRKKMITNNPHLQKKRCSKKGLGRSIMRRITEIPETVSRQCSKEDKEGADHGTAKGTALIRKNPPESSGNTGKSKEETLKNRVFSLKKSHSTYDHVRDQTEESSSLPTESQEEETTENSTLESLSGKKLTQKLKEDSEAESTESVPLVCKSASAHNLSSEKKTGHPRTSMLQKSLSVIASAKEKTLGLAGKTQTAGVEERTKSQKPLPKDKETNRNHSNSDNTETKDPAPQNSNPAEEPRKPQKSGIMKQQRVNPTTANSDLNPGTTQMKDNFDIGEVCPWEVYDLTPGPVPSESKVQKHVSIVASEMEKNPTFSLKEKSHHKPKAAEVCQQSNQKRIDKAEVCLWESQGQSILEDEKLLISKTPVLPERAKEENGGQPRAANVCAGQSEELPPKAVASKTENENLNQIGHQEKKTSSSEENVRGSYNSSNNFQQPLTSRAEVCPWEFETPAQPNAGRSVALPASSALSANKIAGPRKEEIWDSFKV

SEQ ID NO: 13541 - protein, 8 aa, Artificial Sequence
  Synthetic polypeptide
SQHFGRPS

SEQ ID NO: 13542 - protein, 6 aa, Artificial Sequence
  Synthetic polypeptide
GRKEDG

SEQ ID NO: 13543 - protein, 671 aa, Artificial Sequence
  Synthetic polypeptide
KEGRKMGESSEDIDQMFSTLLGEMDLLTQSLGVDTLPPPDPNPPRAEFNYSVGFKDLNESLNALEDQDLDALMADLVADISEAEQRTIQAQKESLQNQHHSASLQASIFSGAASLGYGTNVAATGISQYEDDLPPPPADPVLDLPLPPPPPEPLSQEEEEAQAKADKIKLALEKLKEAKVKKLVVKVHMNDNSTKSLMVDERQLARDVLDNLFEKTHCDCNVDWCLYEIYPELQIERFFEDHENVVEVLSDWTRDTENKILFLEKEEKYAVFKNPQNFYLDNRGKKESKETNEKMNAKNKESLLEESFCGTSIIVPELEGALYLKEDGKKSWKRRYFLLRASGIYYVPKGKTKTSRDLACFIQFENVNIYYGTQHKMKYKAPTDYCFVLKHPQIQKESQYIKYLCCDDTRTLNQWVMGIRIAKYGKTLYDNYQRAVAKAGLASRWTNLGTVNAAAPAQPSTGPKTGTTQPNGQIPQATHSVSAVLQEAQRHAETSKDKKPALGNHHDPAVPRAPHAPKSSLPPPPPVRRSSDTSGSPATPLKAKGTGGGGLPAPPDDFLPPPPPPPPLDDPELPPPPPDFMEPPPDFVPPPPPSYAGIAGSELPPPPPPPPAPAPAPVPDSARPPPAVAKRPPVPPKRQENPGHPGGAGGGEQDFMSDLMKALQKKRGNVS

SEQ ID NO: 13544 - protein, 177 aa, Artificial Sequence
  Synthetic polypeptide
KEGRKMGESSEDIDQMFSTLLGEMDLLTQSLGVDTLPPPDPNPPRAEFNYSVGFKDLNESLNALEDQDLDALMADLVADISEAEQRTIQAQKESLQNQHHSASLQASIFSGAASLGYGTNVAATGISQYEDDLPPPPADPVLDLPLPPPPPEPLSQVSMWDQRWQDHQPLLPITDVP

SEQ ID NO: 13545 - protein, 12 aa, Artificial Sequence
  Synthetic polypeptide
RKEGRWVSQVKT

SEQ ID NO: 13546 - protein, 681 aa, Artificial Sequence
  Synthetic polypeptide
PLKHNILPDAGALEMMGESSEDIDQMFSTLLGEMDLLTQSLGVDTLPPPDPNPPRAEFNYSVGFKDLNESLNALEDQDLDALMADLVADISEAEQRTIQAQKESLQNQHHSASLQASIFSGAASLGYGTNVAATGISQYEDDLPPPPADPVLDLPLPPPPPEPLSQEEEEAQAKADKIKLALEKLKEAKVKKLVVKVHMNDNSTKSLMVDERQLARDVLDNLFEKTHCDCNVDWCLYEIYPELQIERFFEDHENVVEVLSDWTRDTENKILFLEKEEKYAVFKNPQNFYLDNRGKKESKETNEKMNAKNKESLLEESFCGTSIIVPELEGALYLKEDGKKSWKRRYFLLRASGIYYVPKGKTKTSRDLACFIQFENVNIYYGTQHKMKYKAPTDYCFVLKHPQIQKESQYIKYLCCDDTRTLNQWVMGIRIAKYGKTLYDNYQRAVAKAGLASRWTNLGTVNAAAPAQPSTGPKTGTTQPNGQIPQATHSVSAVLQEAQRHAETSKDKKPALGNHHDPAVPRAPHAPKSSLPPPPPVRRSSDTSGSPATPLKAKGTGGGGLPAPPDDFLPPPPPPPPLDDPELPPPPPDFMEPPPDFVPPPPPSYAGIAGSELPPPPPPPPAPAPAPVPDSARPPPAVAKRPPVPPKRQENPGHPGGAGGGEQDFMSDLMKALQKKRGNVS

SEQ ID NO: 13547 - protein, 187 aa, Artificial Sequence
  Synthetic polypeptide
PLKHNILPDAGALEMMGESSEDIDQMFSTLLGEMDLLTQSLGVDTLPPPDPNPPRAEFNYSVGFKDLNESLNALEDQDLDALMADLVADISEAEQRTIQAQKESLQNQHHSASLQASIFSGAASLGYGTNVAATGISQYEDDLPPPPADPVLDLPLPPPPPEPLSQVSMWDQRWQDHQPLLPITDVP

SEQ ID NO: 13548 - protein, 12 aa, Artificial Sequence
  Synthetic polypeptide
YIARCRCPGNDG

SEQ ID NO: 13549 - protein, 60 aa, Artificial Sequence
  Synthetic polypeptide
GGGFTHMLLVEVSLTRSDGFIRGIPVCLVLICCLSAAMLDVPSTFRHDCEASPAIWNSCS

SEQ ID NO: 13550 - protein, 191 aa, Artificial Sequence
  Synthetic polypeptide
GLPSHMELLLLRFTDDTFDPELAATIGVDFKVKTISVDGNKAKLAIWDTAGQERFRTLTPSYYRGAQGVILVYDVTRRDTFVKLDNWLNELETYCTRNDIVNMLVGNKIDKENREVDRNEGLKFARKHSMLFIEASAKTCDGVQCAFEELVEKIIQTPGLWESENQNKGVKLSHREEGQGGGACGGYCSVL

SEQ ID NO: 13551 - protein, 127 aa, Artificial Sequence
  Synthetic polypeptide
GLPSHMELLLLRFTDDTFDPELAATIGVDFKVKTISVDGNKAKLAIWENREVDRNEGLKFARKHSMLFIEASAKTCDGVQCAFEELVEKIIQTPGLWESENQNKGVKLSHREEGQGGGACGGYCSVL

SEQ ID NO: 13552 - protein, 192 aa, Artificial Sequence
  Synthetic polypeptide
GLPSHMELLLLRFTDDTFDPELAATIGVDFKVKTISVDGNKAKLAIWVTLHQQTANFFLKSQIGNSPILKWAMWQYDTAGQERFRTLTPSYYRGAQGVILVYDVTRRDTFVKLDNWLNELETYCTRNDIVNMLVGNKIDKENREVDRNEGLKFARKHSMLFIEASAKTCDGVQCAFEELVEKIIQTPGLWES

SEQ ID NO: 13553 - protein, 146 aa, Artificial Sequence
  Synthetic polypeptide
GLPSHMELLLLRFTDDTFDPELAATIVYDVTRRDTFVKLDNWLNELETYCTRNDIVNMLVGNKIDKENREVDRNEGLKFARKHSMLFIEASAKTCDGVQCAFEELVEKIIQTPGLWESENQNKGVKLSHREEGQGGGACGGYCSVL

SEQ ID NO: 13554 - protein, 25 aa, Artificial Sequence
  Synthetic polypeptide
MCLPPSAMIVRPPQPYGTPALEVHR

SEQ ID NO: 13555 - protein, 5 aa, Artificial Sequence
  Synthetic polypeptide
ENARC

SEQ ID NO: 13556 - protein, 171 aa, Artificial Sequence
  Synthetic polypeptide
LHEKMQGVDFKVKTISVDGNKAKLAIWDTAGQERFRTLTPSYYRGAQGVILVYDVTRRDTFVKLDNWLNELETYCTRNDIVNMLVGNKIDKENREVDRNEGLKFARKHSMLFIEASAKTCDGVQCAFEELVEKIIQTPGLWESENQNKGVKLSHREEGQGGGACGGYCSVL

SEQ ID NO: 13557 - protein, 107 aa, Artificial Sequence
  Synthetic polypeptide
LHEKMQGVDFKVKTISVDGNKAKLAIWENREVDRNEGLKFARKHSMLFIEASAKTCDGVQCAFEELVEKIIQTPGLWESENQNKGVKLSHREEGQGGGACGGYCSVL

SEQ ID NO: 13558 - protein, 172 aa, Artificial Sequence
  Synthetic polypeptide
LHEKMQGVDFKVKTISVDGNKAKLAIWVTLHQQTANFFLKSQIGNSPILKWAMWQYDTAGQERFRTLTPSYYRGAQGVILVYDVTRRDTFVKLDNWLNELETYCTRNDIVNMLVGNKIDKENREVDRNEGLKFARKHSMLFIEASAKTCDGVQCAFEELVEKIIQTPGLWES

SEQ ID NO: 13559 - protein, 13 aa, Artificial Sequence
  Synthetic polypeptide
NDCMRKCKVLTLR

SEQ ID NO: 13560 - protein, 36 aa, Artificial Sequence
  Synthetic polypeptide
DQPGKHSKTSSLQKMKKLASVFQLQLLRSHPGGFSQ

SEQ ID NO: 13561 - protein, 397 aa, Artificial Sequence
  Synthetic polypeptide
PVSSNSNFSEVTLAGLASKENFSNVSLRSVNLTEQNSNNSAVPYKRLMLLQIKGRRHVQTRLVEPRASALNSGDCFLLLSPHCCFLWVGEFANVIEKAKASELATLIQTKRELGCRATYIQTIEEGINTHTHAAKDFWKLLGGQTSYQSAGDPKEDELYEAAIIETNCIYRLMDDKLVPDDDYWGKIPKCSLLQPKEVLVFDFGSEVYVWHGKEVTLAQRKIAFQLAKHLWNGTFDYENCDINPLDPGECNPLIPRKGQGRPDWAIFGRLTEHNETILFKEKFLDWTELKRSNEKNPGELAQHKEDPRTDVKAYDVTRMVSMPQTTAGTILDGVNVGRGYGLVEGHDRRQFEITSVSVDVWHILEFDYSRLPKQSIGQFHEGDAYVVKWKFMVSTAG

SEQ ID NO: 13562 - protein, 818 aa, Artificial Sequence
  Synthetic polypeptide
PVSSNSNFSEVTLAGLASKENFSNVSLRSVNLTEQNSNNSAVPYKRLMLLQIKGRRHVQTRLVEPRASALNSGDCFLLLSPHCCFLWVGEFANVIEKAKASELATLIQTKRELGCRATYIQTIEEGINTHTHAAKDFWKLLGGQTSYQSAGDPKEDELYEAAIIETNCIYRLMDDKLVPDDDYWGKIPKCSLLQPKEVLVFDFGSEVYVWHGKEVTLAQRKIAFQLAKHLWNGTFDYENCDINPLDPGECNPLIPRKGQGRPDWAIFGRLTEHNETILFKEKFLDWTELKRSNEKNPGELAQHKEDPRTDVKAYDVTRMVSMPQTTAGTILDGVNVGRGYGLVEGHDRRQFEITSVSVDVWHILEFDYSRLPKQSIGQFHEGDAYVVKWKFMVSTAVGSRQKGEHSVRAAGKEKCVYFFWQGRHSTVSEKGTSALMTVELDEERGAQVQVLQGKEPPCFLQCFQGGMVVHSGRREEEEENVQSEWRLYCVRGEVPVEGNLLEVACHCSSLRSRTSMVVLNVNKALIYLWHGCKAQAHTKEVGRTAANKIKEQCPLEAGLHSSSKVTIHECDEGSEPLGFWDALGRRDRKAYDCMLQDPGSFNFAPRLFILSSSSGDFAATEFVYPARAPSVVSSMPFLQEDLYSAPQPALFLVDNHHEVYLWQGWWPIENKITGSARIRWASDRKSAMETVLQYCKGKNLKKPAPKSYLIHAGLEPLTFTNMFPSWEHREDIAEITEMDTEVSNQITLVEDVLAKLCKTIYPLADLLARPLPEGVDPLKLEIYLTDEDFEFALDMTRDEYNALPAWKQVNLKKAKGLF

SEQ ID NO: 13563 - protein, 27 aa, Artificial Sequence
  Synthetic polypeptide
QDFISTKNEKISQCLPTPTSQKSPWRV

SEQ ID NO: 13564 - protein, 19 aa, Artificial Sequence
  Synthetic polypeptide
AKMLATVLSQLTDSMKIDV

SEQ ID NO: 13565 - protein, 48 aa, Artificial Sequence
  Synthetic polypeptide
EKDWKEIGKNVSNSPLSVNRFNENRCLKANAKSCGECIQAGPNCGWCT

SEQ ID NO: 13566 - protein, 88 aa, Artificial Sequence
  Synthetic polypeptide
EKDWKEIGKNVSNSPLSVNRFNENRCLKANAKSCGECIQAGPNCGWCTNSTFLQEGMPTSARCDDLEALKKKGCPPDDIENPRGSKDI

SEQ ID NO: 13567 - protein, 103 aa, Artificial Sequence
  Synthetic polypeptide
EKDWKEIGKNVSNSPLSVNRFNENRCLKANAKSCGECIQAGPNCGWCTNSTFLQEGMPTSARCDDLEALKKKGCPPDDIENPRGSKDIKKNKNVTNRSKGTAE

SEQ ID NO: 13568 - protein, 123 aa, Artificial Sequence
  Synthetic polypeptide
EKDWKEIGKNVSNSPLSVNRFNENRCLKANAKSCGECIQAGPNCGWCTNSTFLQEGMPTSARCDDLEALKKKGCPPDDIENPRGSKDIKKNKNVTNRSKGTAEKLKPEDITQIQPQQLVLRLR

SEQ ID NO: 13569 - protein, 135 aa, Artificial Sequence
  Synthetic polypeptide
EKDWKEIGKNVSNSPLSVNRFNENRCLKANAKSCGECIQAGPNCGWCTNSTFLQEGMPTSARCDDLEALKKKGCPPDDIENPRGSKDIKKNKNVTNRSKGTAEKLKPEDITQIQPQQLVLRLRSGEPQTFTLKFK

SEQ ID NO: 13570 - protein, 142 aa, Artificial Sequence
  Synthetic polypeptide
EKDWKEIGKNVSNSPLSVNRFNENRCLKANAKSCGECIQAGPNCGWCTNSTFLQEGMPTSARCDDLEALKKKGCPPDDIENPRGSKDIKKNKNVTNRSKGTAEKLKPEDITQIQPQQLVLRLRSGEPQTFTLKFKRAEDYPI

SEQ ID NO: 13571 - protein, 162 aa, Artificial Sequence
  Synthetic polypeptide
EKDWKEIGKNVSNSPLSVNRFNENRCLKANAKSCGECIQAGPNCGWCTNSTFLQEGMPTSARCDDLEALKKKGCPPDDIENPRGSKDIKKNKNVTNRSKGTAEKLKPEDITQIQPQQLVLRLRSGEPQTFTLKFKRAEDYPIDLYYLMDLSYSMKDDLENVK

SEQ ID NO: 13572 - protein, 797 aa, Artificial Sequence
  Synthetic polypeptide
EKDWKEIGKNVSNSPLSVNRFNENRCLKANAKSCGECIQAGPNCGWCTNSTFLQEGMPTSARCDDLEALKKKGCPPDDIENPRGSKDIKKNKNVTNRSKGTAEKLKPEDITQIQPQQLVLRLRSGEPQTFTLKFKRAEDYPIDLYYLMDLSYSMKDDLENVKSLGTDLMNEMRRITSDFRIGFGSFVEKTVMPYISTTPAKLRNPCTSEQNCTSPFSYKNVLSLTNKGEVFNELVGKQRISGNLDSPEGGFDAIMQVAVCGSLIGWRNVTRLLVFSTDAGFHFAGDGKLGGIVLPNDGQCHLENNMYTMSHYYDYPSIAHLVQKLSENNIQTIFAVTEEFQPVYKELKNLIPKSAVGTLSANSSNVIQLIIDAYNSLSSEVILENGKLSEGVTISYKSYCKNGVNGTGENGRKCSNISIGDEVQFEISITSNKCPKKDSDSFKIRPLGFTEEVEVILQYICECECQSEGIPESPKCHEGNGTFECGACRCNEGRVGRHCECSTDEVNSEDMDAYCRKENSSEICSNNGECVCGQCVCRKRDNTNEIYSGKFCECDNFNCDRSNGLICGGNGVCKCRVCECNPNYTGSACDCSLDTSTCEASNGQICNGRGICECGVCKCTDPKFQGQTCEMCQTCLGVCAEHKECVQCRAFNKGEKKDTCTQECSYFNITKVESRDKLPQPVQPDPVSHCKEKDVDDCWFYFTYSVNGNNEVMVHVVENPECPTGPDIIPIVAGVVAGIVLIGLALLLIWKLLMIIHDRREFAKFEKEKMNAKWDTGENPIYKSAVTTVVNPKYEGK

SEQ ID NO: 13573 - protein, 800 aa, Artificial Sequence
  Synthetic polypeptide
EKDWKEIGKNVSNSPLSVNRFNENRCLKANAKSCGECIQAGPNCGWCTNSTFLQEGMPTSARCDDLEALKKKGCPPDDIENPRGSKDIKKNKNVTNRSKGTAEKLKPEDITQIQPQQLVLRLRSGEPQTFTLKFKRAEDYPIDLYYLMDLSYSMKDDLENVKSLGTDLMNEMRRITSDFRIGFGSFVEKTVMPYISTTPAKLRNPCTSEQNCTSPFSYKNVLSLTNKGEVFNELVGKQRISGNLDSPEGGFDAIMQVAVCGSLIGWRNVTRLLVFSTDAGFHFAGDGKLGGIVLPNDGQCHLENNMYTMSHYYDYPSIAHLVQKLSENNIQTIFAVTEEFQPVYKELKNLIPKSAVGTLSANSSNVIQLIIDAYNSLSSEVILENGKLSEGVTISYKSYCKNGVNGTGENGRKCSNISIGDEVQFEISITSNKCPKKDSDSFKIRPLGFTEEVEVILQYICECECQSEGIPESPKCHEGNGTFECGACRCNEGRVGRHCECSTDEVNSEDMDAYCRKENSSEICSNNGECVCGQCVCRKRDNTNEIYSGKFCECDNFNCDRSNGLICGGNGVCKCRVCECNPNYTGSACDCSLDTSTCEASNGQICNGRGICECGVCKCTDPKFQGQTCEMCQTCLGVCAEHKECVQCRAFNKGEKKDTCTQECSYFNITKVESRDKLPQPVQPDPVSHCKEKDVDDCWFYFTYSVNGNNEVMVHVVENPECPTGPDIIPIVAGVVAGIVLIGLALLLIWKLLMIIHDRREFAKFEKEKMNAKWDTQENPIYKSPINNFKNPNYGRKAGL

SEQ ID NO: 13574 - protein, 824 aa, Artificial Sequence
  Synthetic polypeptide
EKDWKEIGKNVSNSPLSVNRFNENRCLKANAKSCGECIQAGPNCGWCTNSTFLQEGMPTSARCDDLEALKKKGCPPDDIENPRGSKDIKKNKNVTNRSKGTAEKLKPEDITQIQPQQLVLRLRSGEPQTFTLKFKRAEDYPIDLYYLMDLSYSMKDDLENVKSLGTDLMNEMRRITSDFRIGFGSFVEKTVMPYISTTPAKLRNPCTSEQNCTSPFSYKNVLSLTNKGEVFNELVGKQRISGNLDSPEGGFDAIMQVAVCGSLIGWRNVTRLLVFSTDAGFHFAGDGKLGGIVLPNDGQCHLENNMYTMSHYYDYPSIAHLVQKLSENNIQTIFAVTEEFQPVYKELKNLIPKSAVGTLSANSSNVIQLIIDAYNSLSSEVILENGKLSEGVTISYKSYCKNGVNGTGENGRKCSNISIGDEVQFEISITSNKCPKKDSDSFKIRPLGFTEEVEVILQYICECECQSEGIPESPKCHEGNGTFECGACRCNEGRVGRHCECSTDEVNSEDMDAYCRKENSSEICSNNGECVCGQCVCRKRDNTNEIYSGKFCECDNFNCDRSNGLICGGNGVCKCRVCECNPNYTGSACDCSLDTSTCEASNGQICNGRGICECGVCKCTDPKFQGQTCEMCQTCLGVCAEHKECVQCRAFNKGEKKDTCTQECSYFNITKVESRDKLPQPVQPDPVSHCKEKDVDDCWFYFTYSVNGNNEVMVHVVENPECPTGPDIIPIVAGVVAGIVLIGLALLLIWKLLMIIHDRREFAKFEKEKMNAKWDTSLSVAQPGVQWCDISSLQPLTSRFQQFSCLSLPSTWDYRVKILFIRVP

SEQ ID NO: 13575 - protein, 151 aa, Artificial Sequence
  Synthetic polypeptide
EKDWKEIGKNVSNSPLSVNRFNENRCLKANAKSCGECIQAGPNCGWCTNSVSKTFLQEGMPTSARCDDLEALKKKGCPPDDIENPRGSKDIKKNKNVTNRSKGTAEKLKPEDITQIQPQQLVLRLRSGEPQTFTLKFKRAEDYPIDLYYLM

SEQ ID NO: 13576 - protein, 3 aa, Artificial Sequence
  Synthetic polypeptide
QIQ

SEQ ID NO: 13577 - protein, 27 aa, Artificial Sequence
  Synthetic polypeptide
NLSHNHAAPSGSPAIVPLTQRKTIWRM

SEQ ID NO: 13578 - protein, 24 aa, Artificial Sequence
  Synthetic polypeptide
SCCSFWKPCNCSSYSEKDDLENVK

SEQ ID NO: 13579 - protein, 659 aa, Artificial Sequence; identical to SEQ ID NO: 1820
  Synthetic polypeptide

SEQ ID NO: 13580 - protein, 662 aa, Artificial Sequence; identical to SEQ ID NO: 1815
  Synthetic polypeptide

SEQ ID NO: 13581 - protein, 686 aa, Artificial Sequence; identical to SEQ ID NO: 1789
  Synthetic polypeptide

SEQ ID NO: 13582 - protein, 27 aa, Artificial Sequence
  Synthetic polypeptide
VIIMLLLLEALQLFLLLRERRFGECKK

SEQ ID NO: 13583 - protein, 34 aa, Artificial Sequence; identical to SEQ ID NO: 6216
  Synthetic polypeptide

SEQ ID NO: 13584 - protein, 85 aa, Artificial Sequence
  Synthetic polypeptide
GDFLPMQLELIHFPVDFHWTDFLRTSQKFSTRSSPQMNLQPIFWIGLISSVCCVFAQTDENRCLKANAKSCGECIQAGPNCGWCT

SEQ ID NO: 13585 - protein, 125 aa, Artificial Sequence
  Synthetic polypeptide
GDFLPMQLELIHFPVDFHWTDFLRTSQKFSTRSSPQMNLQPIFWIGLISSVCCVFAQTDENRCLKANAKSCGECIQAGPNCGWCTNSTFLQEGMPTSARCDDLEALKKKGCPPDDIENPRGSKDI

SEQ ID NO: 13586 - protein, 140 aa, Artificial Sequence
  Synthetic polypeptide
GDFLPMQLELIHFPVDFHWTDFLRTSQKFSTRSSPQMNLQPIFWIGLISSVCCVFAQTDENRCLKANAKSCGECIQAGPNCGWCTNSTFLQEGMPTSARCDDLEALKKKGCPPDDIENPRGSKDIKKNKNVTNRSKGTAE

SEQ ID NO: 13587 - protein, 160 aa, Artificial Sequence
  Synthetic polypeptide
GDFLPMQLELIHFPVDFHWTDFLRTSQKFSTRSSPQMNLQPIFWIGLISSVCCVFAQTDENRCLKANAKSCGECIQAGPNCGWCTNSTFLQEGMPTSARCDDLEALKKKGCPPDDIENPRGSKDIKKNKNVTNRSKGTAEKLKPEDITQIQPQQLVLRLR

SEQ ID NO: 13588 - protein, 172 aa, Artificial Sequence
  Synthetic polypeptide
GDFLPMQLELIHFPVDFHWTDFLRTSQKFSTRSSPQMNLQPIFWIGLISSVCCVFAQTDENRCLKANAKSCGECIQAGPNCGWCTNSTFLQEGMPTSARCDDLEALKKKGCPPDDIENPRGSKDIKKNKNVTNRSKGTAEKLKPEDITQIQPQQLVLRLRSGEPQTFTLKFK

SEQ ID NO: 13589 - protein, 179 aa, Artificial Sequence
  Synthetic polypeptide
GDFLPMQLELIHFPVDFHWTDFLRTSQKFSTRSSPQMNLQPIFWIGLISSVCCVFAQTDENRCLKANAKSCGECIQAGPNCGWCTNSTFLQEGMPTSARCDDLEALKKKGCPPDDIENPRGSKDIKKNKNVTNRSKGTAEKLKPEDITQIQPQQLVLRLRSGEPQTFTLKFKRAEDYPI

SEQ ID NO: 13590 - protein, 199 aa, Artificial Sequence
  Synthetic polypeptide
GDFLPMQLELIHFPVDFHWTDFLRTSQKFSTRSSPQMNLQPIFWIGLISSVCCVFAQTDENRCLKANAKSCGECIQAGPNCGWCTNSTFLQEGMPTSARCDDLEALKKKGCPPDDIENPRGSKDIKKNKNVTNRSKGTAEKLKPEDITQIQPQQLVLRLRSGEPQTFTLKFKRAEDYPIDLYYLMDLSYSMKDDLENVK

SEQ ID NO: 13591 - protein, 834 aa, Artificial Sequence
  Synthetic polypeptide
GDFLPMQLELIHFPVDFHWTDFLRTSQKFSTRSSPQMNLQPIFWIGLISSVCCVFAQTDENRCLKANAKSCGECIQAGPNCGWCTNSTFLQEGMPTSARCDDLEALKKKGCPPDDIENPRGSKDIKKNKNVTNRSKGTAEKLKPEDITQIQPQQLVLRLRSGEPQTFTLKFKRAEDYPIDLYYLMDLSYSMKDDLENVKSLGTDLMNEMRRITSDFRIGFGSFVEKTVMPYISTTPAKLRNPCTSEQNCTSPFSYKNVLSLTNKGEVFNELVGKQRISGNLDSPEGGFDAIMQVAVCGSLIGWRNVTRLLVFSTDAGFHFAGDGKLGGIVLPNDGQCHLENNMYTMSHYYDYPSIAHLVQKLSENNIQTIFAVTEEFQPVYKELKNLIPKSAVGTLSANSSNVIQLIIDAYNSLSSEVILENGKLSEGVTISYKSYCKNGVNGTGENGRKCSNISIGDEVQFEISITSNKCPKKDSDSFKIRPLGFTEEVEVILQYICECECQSEGIPESPKCHEGNGTFECGACRCNEGRVGRHCECSTDEVNSEDMDAYCRKENSSEICSNNGECVCGQCVCRKRDNTNEIYSGKFCECDNFNCDRSNGLICGGNGVCKCRVCECNPNYTGSACDCSLDTSTCEASNGQICNGRGICECGVCKCTDPKFQGQTCEMCQTCLGVCAEHKECVQCRAFNKGEKKDTCTQECSYFNITKVESRDKLPQPVQPDPVSHCKEKDVDDCWFYFTYSVNGNNEVMVHVVENPECPTGPDIIPIVAGVVAGIVLIGLALLLIWKLLMIIHDRREFAKFEKEKMNAKWDTGENPIYKSAVTTVVNPKYEGK

SEQ ID NO: 13592 - protein, 837 aa, Artificial Sequence
  Synthetic polypeptide
GDFLPMQLELIHFPVDFHWTDFLRTSQKFSTRSSPQMNLQPIFWIGLISSVCCVFAQTDENRCLKANAKSCGECIQAGPNCGWCTNSTFLQEGMPTSARCDDLEALKKKGCPPDDIENPRGSKDIKKNKNVTNRSKGTAEKLKPEDITQIQPQQLVLRLRSGEPQTFTLKFKRAEDYPIDLYYLMDLSYSMKDDLENVKSLGTDLMNEMRRITSDFRIGFGSFVEKTVMPYISTTPAKLRNPCTSEQNCTSPFSYKNVLSLTNKGEVFNELVGKQRISGNLDSPEGGFDAIMQVAVCGSLIGWRNVTRLLVFSTDAGFHFAGDGKLGGIVLPNDGQCHLENNMYTMSHYYDYPSIAHLVQKLSENNIQTIFAVTEEFQPVYKELKNLIPKSAVGTLSANSSNVIQLIIDAYNSLSSEVILENGKLSEGVTISYKSYCKNGVNGTGENGRKCSNISIGDEVQFEISITSNKCPKKDSDSFKIRPLGFTEEVEVILQYICECECQSEGIPESPKCHEGNGTFECGACRCNEGRVGRHCECSTDEVNSEDMDAYCRKENSSEICSNNGECVCGQCVCRKRDNTNEIYSGKFCECDNFNCDRSNGLICGGNGVCKCRVCECNPNYTGSACDCSLDTSTCEASNGQICNGRGICECGVCKCTDPKFQGQTCEMCQTCLGVCAEHKECVQCRAFNKGEKKDTCTQECSYFNITKVESRDKLPQPVQPDPVSHCKEKDVDDCWFYFTYSVNGNNEVMVHVVENPECPTGPDIIPIVAGVVAGIVLIGLALLLIWKLLMIIHDRREFAKFEKEKMNAKWDTQENPIYKSPINNFKNPNYGRKAGL

SEQ ID NO: 13593 - protein, 861 aa, Artificial Sequence
  Synthetic polypeptide
GDFLPMQLELIHFPVDFHWTDFLRTSQKFSTRSSPQMNLQPIFWIGLISSVCCVFAQTDENRCLKANAKSCGECIQAGPNCGWCTNSTFLQEGMPTSARCDDLEALKKKGCPPDDIENPRGSKDIKKNKNVTNRSKGTAEKLKPEDITQIQPQQLVLRLRSGEPQTFTLKFKRAEDYPIDLYYLMDLSYSMKDDLENVKSLGTDLMNEMRRITSDFRIGFGSFVEKTVMPYISTTPAKLRNPCTSEQNCTSPFSYKNVLSLTNKGEVFNELVGKQRISGNLDSPEGGFDAIMQVAVCGSLIGWRNVTRLLVFSTDAGFHFAGDGKLGGIVLPNDGQCHLENNMYTMSHYYDYPSIAHLVQKLSENNIQTIFAVTEEFQPVYKELKNLIPKSAVGTLSANSSNVIQLIIDAYNSLSSEVILENGKLSEGVTISYKSYCKNGVNGTGENGRKCSNISIGDEVQFEISITSNKCPKKDSDSFKIRPLGFTEEVEVILQYICECECQSEGIPESPKCHEGNGTFECGACRCNEGRVGRHCECSTDEVNSEDMDAYCRKENSSEICSNNGECVCGQCVCRKRDNTNEIYSGKFCECDNFNCDRSNGLICGGNGVCKCRVCECNPNYTGSACDCSLDTSTCEASNGQICNGRGICECGVCKCTDPKFQGQTCEMCQTCLGVCAEHKECVQCRAFNKGEKKDTCTQECSYFNITKVESRDKLPQPVQPDPVSHCKEKDVDDCWFYFTYSVNGNNEVMVHVVENPECPTGPDIIPIVAGVVAGIVLIGLALLLIWKLLMIIHDRREFAKFEKEKMNAKWDTSLSVAQPGVQWCDISSLQPLTSRFQQFSCLSLPSTWDYRVKILFIRVP

SEQ ID NO: 13594 - protein, 188 aa, Artificial Sequence
  Synthetic polypeptide
GDFLPMQLELIHFPVDFHWTDFLRTSQKFSTRSSPQMNLQPIFWIGLISSVCCVFAQTDENRCLKANAKSCGECIQAGPNCGWCTNSVSKTFLQEGMPTSARCDDLEALKKKGCPPDDIENPRGSKDIKKNKNVTNRSKGTAEKLKPEDITQIQPQQLVLRLRSGEPQTFTLKFKRAEDYPIDLYYLM

SEQ ID NO: 13595 - protein, 43 aa, Artificial Sequence
  Synthetic polypeptide
LSLDRLSTYFSKVFHKIKPPDEFTTNFLDWTDQFSLLCVCSNR

SEQ ID NO: 13596 - protein, 26 aa, Artificial Sequence
  Synthetic polypeptide
SISPLTFTGQTFYVLLKSFPQDQAPR

SEQ ID NO: 13597 - protein, 37 aa, Artificial Sequence
  Synthetic polypeptide
CTGNLVCLSHILLASDSSWCCWEQSVAHSWLTACCLR

SEQ ID NO: 13598 - protein, 70 aa, Artificial Sequence
  Synthetic polypeptide
FQLVLLGTVGGSLLADCMLPQMNLQPIFWIGLISSVCCVFAQTDENRCLKANAKSCGECIQAGPNCGWCT

SEQ ID NO: 13599 - protein, 110 aa, Artificial Sequence
  Synthetic polypeptide
FQLVLLGTVGGSLLADCMLPQMNLQPIFWIGLISSVCCVFAQTDENRCLKANAKSCGECIQAGPNCGWCTNSTFLQEGMPTSARCDDLEALKKKGCPPDDIENPRGSKDI

SEQ ID NO: 13600 - protein, 125 aa, Artificial Sequence
  Synthetic polypeptide
FQLVLLGTVGGSLLADCMLPQMNLQPIFWIGLISSVCCVFAQTDENRCLKANAKSCGECIQAGPNCGWCTNSTFLQEGMPTSARCDDLEALKKKGCPPDDIENPRGSKDIKKNKNVTNRSKGTAE

SEQ ID NO: 13601 - protein, 145 aa, Artificial Sequence
  Synthetic polypeptide
FQLVLLGTVGGSLLADCMLPQMNLQPIFWIGLISSVCCVFAQTDENRCLKANAKSCGECIQAGPNCGWCTNSTFLQEGMPTSARCDDLEALKKKGCPPDDIENPRGSKDIKKNKNVTNRSKGTAEKLKPEDITQIQPQQLVLRLR

SEQ ID NO: 13602 - protein, 157 aa, Artificial Sequence
  Synthetic polypeptide
FQLVLLGTVGGSLLADCMLPQMNLQPIFWIGLISSVCCVFAQTDENRCLKANAKSCGECIQAGPNCGWCTNSTFLQEGMPTSARCDDLEALKKKGCPPDDIENPRGSKDIKKNKNVTNRSKGTAEKLKPEDITQIQPQQLVLRLRSGEPQTFTLKFK

SEQ ID NO: 13603 - protein, 164 aa, Artificial Sequence
  Synthetic polypeptide
FQLVLLGTVGGSLLADCMLPQMNLQPIFWIGLISSVCCVFAQTDENRCLKANAKSCGECIQAGPNCGWCTNSTFLQEGMPTSARCDDLEALKKKGCPPDDIENPRGSKDIKKNKNVTNRSKGTAEKLKPEDITQIQPQQLVLRLRSGEPQTFTLKFKRAEDYPI

SEQ ID NO: 13604 - protein, 184 aa, Artificial Sequence
  Synthetic polypeptide
FQLVLLGTVGGSLLADCMLPQMNLQPIFWIGLISSVCCVFAQTDENRCLKANAKSCGECIQAGPNCGWCTNSTFLQEGMPTSARCDDLEALKKKGCPPDDIENPRGSKDIKKNKNVTNRSKGTAEKLKPEDITQIQPQQLVLRLRSGEPQTFTLKFKRAEDYPIDLYYLMDLSYSMKDDLENVK

SEQ ID NO: 13605 - protein, 819 aa, Artificial Sequence
  Synthetic polypeptide
FQLVLLGTVGGSLLADCMLPQMNLQPIFWIGLISSVCCVFAQTDENRCLKANAKSCGECIQAGPNCGWCTNSTFLQEGMPTSARCDDLEALKKKGCPPDDIENPRGSKDIKKNKNVTNRSKGTAEKLKPEDITQIQPQQLVLRLRSGEPQTFTLKFKRAEDYPIDLYYLMDLSYSMKDDLENVKSLGTDLMNEMRRITSDFRIGFGSFVEKTVMPYISTTPAKLRNPCTSEQNCTSPFSYKNVLSLTNKGEVFNELVGKQRISGNLDSPEGGFDAIMQVAVCGSLIGWRNVTRLLVFSTDAGFHFAGDGKLGGIVLPNDGQCHLENNMYTMSHYYDYPSIAHLVQKLSENNIQTIFAVTEEFQPVYKELKNLIPKSAVGTLSANSSNVIQLIIDAYNSLSSEVILENGKLSEGVTISYKSYCKNGVNGTGENGRKCSNISIGDEVQFEISITSNKCPKKDSDSFKIRPLGFTEEVEVILQYICECECQSEGIPESPKCHEGNGTFECGACRCNEGRVGRHCECSTDEVNSEDMDAYCRKENSSEICSNNGECVCGQCVCRKRDNTNEIYSGKFCECDNFNCDRSNGLICGGNGVCKCRVCECNPNYTGSACDCSLDTSTCEASNGQICNGRGICECGVCKCTDPKFQGQTCEMCQTCLGVCAEHKECVQCRAFNKGEKKDTCTQECSYFNITKVESRDKLPQPVQPDPVSHCKEKDVDDCWFYFTYSVNGNNEVMVHVVENPECPTGPDIIPIVAGVVAGIVLIGLALLLIWKLLMIIHDRREFAKFEKEKMNAKWDTGENPIYKSAVTTVVNPKYEGK

SEQ ID NO: 13606 - protein, 822 aa, Artificial Sequence
  Synthetic polypeptide
FQLVLLGTVGGSLLADCMLPQMNLQPIFWIGLISSVCCVFAQTDENRCLKANAKSCGECIQAGPNCGWCTNSTFLQEGMPTSARCDDLEALKKKGCPPDDIENPRGSKDIKKNKNVTNRSKGTAEKLKPEDITQIQPQQLVLRLRSGEPQTFTLKFKRAEDYPIDLYYLMDLSYSMKDDLENVKSLGTDLMNEMRRITSDFRIGFGSFVEKTVMPYISTTPAKLRNPCTSEQNCTSPFSYKNVLSLTNKGEVFNELVGKQRISGNLDSPEGGFDAIMQVAVCGSLIGWRNVTRLLVFSTDAGFHFAGDGKLGGIVLPNDGQCHLENNMYTMSHYYDYPSIAHLVQKLSENNIQTIFAVTEEFQPVYKELKNLIPKSAVGTLSANSSNVIQLIIDAYNSLSSEVILENGKLSEGVTISYKSYCKNGVNGTGENGRKCSNISIGDEVQFEISITSNKCPKKDSDSFKIRPLGFTEEVEVILQYICECECQSEGIPESPKCHEGNGTFECGACRCNEGRVGRHCECSTDEVNSEDMDAYCRKENSSEICSNNGECVCGQCVCRKRDNTNEIYSGKFCECDNFNCDRSNGLICGGNGVCKCRVCECNPNYTGSACDCSLDTSTCEASNGQICNGRGICECGVCKCTDPKFQGQTCEMCQTCLGVCAEHKECVQCRAFNKGEKKDTCTQECSYFNITKVESRDKLPQPVQPDPVSHCKEKDVDDCWFYFTYSVNGNNEVMVHVVENPECPTGPDIIPIVAGVVAGIVLIGLALLLIWKLLMIIHDRREFAKFEKEKMNAKWDTQENPIYKSPINNFKNPNYGRKAGL

SEQ ID NO: 13607 - protein, 846 aa, Artificial Sequence
  Synthetic polypeptide
FQLVLLGTVGGSLLADCMLPQMNLQPIFWIGLISSVCCVFAQTDENRCLKANAKSCGECIQAGPNCGWCTNSTFLQEGMPTSARCDDLEALKKKGCPPDDIENPRGSKDIKKNKNVTNRSKGTAEKLKPEDITQIQPQQLVLRLRSGEPQTFTLKFKRAEDYPIDLYYLMDLSYSMKDDLENVKSLGTDLMNEMRRITSDFRIGFGSFVEKTVMPYISTTPAKLRNPCTSEQNCTSPFSYKNVLSLTNKGEVFNELVGKQRISGNLDSPEGGFDAIMQVAVCGSLIGWRNVTRLLVFSTDAGFHFAGDGKLGGIVLPNDGQCHLENNMYTMSHYYDYPSIAHLVQKLSENNIQTIFAVTEEFQPVYKELKNLIPKSAVGTLSANSSNVIQLIIDAYNSLSSEVILENGKLSEGVTISYKSYCKNGVNGTGENGRKCSNISIGDEVQFEISITSNKCPKKDSDSFKIRPLGFTEEVEVILQYICECECQSEGIPESPKCHEGNGTFECGACRCNEGRVGRHCECSTDEVNSEDMDAYCRKENSSEICSNNGECVCGQCVCRKRDNTNEIYSGKFCECDNFNCDRSNGLICGGNGVCKCRVCECNPNYTGSACDCSLDTSTCEASNGQICNGRGICECGVCKCTDPKFQGQTCEMCQTCLGVCAEHKECVQCRAFNKGEKKDTCTQECSYFNITKVESRDKLPQPVQPDPVSHCKEKDVDDCWFYFTYSVNGNNEVMVHVVENPECPTGPDIIPIVAGVVAGIVLIGLALLLIWKLLMIIHDRREFAKFEKEKMNAKWDTSLSVAQPGVQWCDISSLQPLTSRFQQFSCLSLPSTWDYRVKILFIRVP

SEQ ID NO: 13608 - protein, 173 aa, Artificial Sequence
  Synthetic polypeptide
FQLVLLGTVGGSLLADCMLPQMNLQPIFWIGLISSVCCVFAQTDENRCLKANAKSCGECIQAGPNCGWCTNSVSKTFLQEGMPTSARCDDLEALKKKGCPPDDIENPRGSKDIKKNKNVTNRSKGTAEKLKPEDITQIQPQQLVLRLRSGEPQTFTLKFKRAEDYPIDLYYLM

SEQ ID NO: 13609 - protein, 28 aa, Artificial Sequence
  Synthetic polypeptide
LHAASDEFTTNFLDWTDQFSLLCVCSNR

SEQ ID NO: 13610 - protein, 66 aa, Artificial Sequence
  Synthetic polypeptide
IAFILGTGMPRIFLLIKMNLQPIFWIGLISSVCCVFAQTDENRCLKANAKSCGECIQAGPNCGWCT

SEQ ID NO: 13611 - protein, 106 aa, Artificial Sequence
  Synthetic polypeptide
IAFILGTGMPRIFLLIKMNLQPIFWIGLISSVCCVFAQTDENRCLKANAKSCGECIQAGPNCGWCTNSTFLQEGMPTSARCDDLEALKKKGCPPDDIENPRGSKDI

SEQ ID NO: 13612 - protein, 121 aa, Artificial Sequence
  Synthetic polypeptide
IAFILGTGMPRIFLLIKMNLQPIFWIGLISSVCCVFAQTDENRCLKANAKSCGECIQAGPNCGWCTNSTFLQEGMPTSARCDDLEALKKKGCPPDDIENPRGSKDIKKNKNVTNRSKGTAE

SEQ ID NO: 13613 - protein, 141 aa, Artificial Sequence
  Synthetic polypeptide
IAFILGTGMPRIFLLIKMNLQPIFWIGLISSVCCVFAQTDENRCLKANAKSCGECIQAGPNCGWCTNSTFLQEGMPTSARCDDLEALKKKGCPPDDIENPRGSKDIKKNKNVTNRSKGTAEKLKPEDITQIQPQQLVLRLR

SEQ ID NO: 13614 - protein, 153 aa, Artificial Sequence
  Synthetic polypeptide
IAFILGTGMPRIFLLIKMNLQPIFWIGLISSVCCVFAQTDENRCLKANAKSCGECIQAGPNCGWCTNSTFLQEGMPTSARCDDLEALKKKGCPPDDIENPRGSKDIKKNKNVTNRSKGTAEKLKPEDITQIQPQQLVLRLRSGEPQTFTLKFK

SEQ ID NO: 13615 - protein, 160 aa, Artificial Sequence
  Synthetic polypeptide
IAFILGTGMPRIFLLIKMNLQPIFWIGLISSVCCVFAQTDENRCLKANAKSCGECIQAGPNCGWCTNSTFLQEGMPTSARCDDLEALKKKGCPPDDIENPRGSKDIKKNKNVTNRSKGTAEKLKPEDITQIQPQQLVLRLRSGEPQTFTLKFKRAEDYPI

SEQ ID NO: 13616 - protein, 180 aa, Artificial Sequence
  Synthetic polypeptide
IAFILGTGMPRIFLLIKMNLQPIFWIGLISSVCCVFAQTDENRCLKANAKSCGECIQAGPNCGWCTNSTFLQEGMPTSARCDDLEALKKKGCPPDDIENPRGSKDIKKNKNVTNRSKGTAEKLKPEDITQIQPQQLVLRLRSGEPQTFTLKFKRAEDYPIDLYYLMDLSYSMKDDLENVK

SEQ ID NO: 13617 - protein, 815 aa, Artificial Sequence
  Synthetic polypeptide
IAFILGTGMPRIFLLIKMNLQPIFWIGLISSVCCVFAQTDENRCLKANAKSCGECIQAGPNCGWCTNSTFLQEGMPTSARCDDLEALKKKGCPPDDIENPRGSKDIKKNKNVTNRSKGTAEKLKPEDITQIQPQQLVLRLRSGEPQTFTLKFKRAEDYPIDLYYLMDLSYSMKDDLENVKSLGTDLMNEMRRITSDFRIGFGSFVEKTVMPYISTTPAKLRNPCTSEQNCTSPFSYKNVLSLTNKGEVFNELVGKQRISGNLDSPEGGFDAIMQVAVCGSLIGWRNVTRLLVFSTDAGFHFAGDGKLGGIVLPNDGQCHLENNMYTMSHYYDYPSIAHLVQKLSENNIQTIFAVTEEFQPVYKELKNLIPKSAVGTLSANSSNVIQLIIDAYNSLSSEVILENGKLSEGVTISYKSYCKNGVNGTGENGRKCSNISIGDEVQFEISITSNKCPKKDSDSFKIRPLGFTEEVEVILQYICECECQSEGIPESPKCHEGNGTFECGACRCNEGRVGRHCECSTDEVNSEDMDAYCRKENSSEICSNNGECVCGQCVCRKRDNTNEIYSGKFCECDNFNCDRSNGLICGGNGVCKCRVCECNPNYTGSACDCSLDTSTCEASNGQICNGRGICECGVCKCTDPKFQGQTCEMCQTCLGVCAEHKECVQCRAFNKGEKKDTCTQECSYFNITKVESRDKLPQPVQPDPVSHCKEKDVDDCWFYFTYSVNGNNEVMVHVVENPECPTGPDIIPIVAGVVAGIVLIGLALLLIWKLLMIIHDRREFAKFEKEKMNAKWDTGENPIYKSAVTTVVNPKYEGK

SEQ ID NO: 13618 - protein, 818 aa, Artificial Sequence
  Synthetic polypeptide
IAFILGTGMPRIFLLIKMNLQPIFWIGLISSVCCVFAQTDENRCLKANAKSCGECIQAGPNCGWCTNSTFLQEGMPTSARCDDLEALKKKGCPPDDIENPRGSKDIKKNKNVTNRSKGTAEKLKPEDITQIQPQQLVLRLRSGEPQTFTLKFKRAEDYPIDLYYLMDLSYSMKDDLENVKSLGTDLMNEMRRITSDFRIGFGSFVEKTVMPYISTTPAKLRNPCTSEQNCTSPFSYKNVLSLTNKGEVFNELVGKQRISGNLDSPEGGFDAIMQVAVCGSLIGWRNVTRLLVFSTDAGFHFAGDGKLGGIVLPNDGQCHLENNMYTMSHYYDYPSIAHLVQKLSENNIQTIFAVTEEFQPVYKELKNLIPKSAVGTLSANSSNVIQLIIDAYNSLSSEVILENGKLSEGVTISYKSYCKNGVNGTGENGRKCSNISIGDEVQFEISITSNKCPKKDSDSFKIRPLGFTEEVEVILQYICECECQSEGIPESPKCHEGNGTFECGACRCNEGRVGRHCECSTDEVNSEDMDAYCRKENSSEICSNNGECVCGQCVCRKRDNTNEIYSGKFCECDNFNCDRSNGLICGGNGVCKCRVCECNPNYTGSACDCSLDTSTCEASNGQICNGRGICECGVCKCTDPKFQGQTCEMCQTCLGVCAEHKECVQCRAFNKGEKKDTCTQECSYFNITKVESRDKLPQPVQPDPVSHCKEKDVDDCWFYFTYSVNGNNEVMVHVVENPECPTGPDIIPIVAGVVAGIVLIGLALLLIWKLLMIIHDRREFAKFEKEKMNAKWDTQENPIYKSPINNFKNPNYGRKAGL

SEQ ID NO: 13619 - protein, 842 aa, Artificial Sequence
  Synthetic polypeptide
IAFILGTGMPRIFLLIKMNLQPIFWIGLISSVCCVFAQTDENRCLKANAKSCGECIQAGPNCGWCTNSTFLQEGMPTSARCDDLEALKKKGCPPDDIENPRGSKDIKKNKNVTNRSKGTAEKLKPEDITQIQPQQLVLRLRSGEPQTFTLKFKRAEDYPIDLYYLMDLSYSMKDDLENVKSLGTDLMNEMRRITSDFRIGFGSFVEKTVMPYISTTPAKLRNPCTSEQNCTSPFSYKNVLSLTNKGEVFNELVGKQRISGNLDSPEGGFDAIMQVAVCGSLIGWRNVTRLLVFSTDAGFHFAGDGKLGGIVLPNDGQCHLENNMYTMSHYYDYPSIAHLVQKLSENNIQTIFAVTEEFQPVYKELKNLIPKSAVGTLSANSSNVIQLIIDAYNSLSSEVILENGKLSEGVTISYKSYCKNGVNGTGENGRKCSNISIGDEVQFEISITSNKCPKKDSDSFKIRPLGFTEEVEVILQYICECECQSEGIPESPKCHEGNGTFECGACRCNEGRVGRHCECSTDEVNSEDMDAYCRKENSSEICSNNGECVCGQCVCRKRDNTNEIYSGKFCECDNFNCDRSNGLICGGNGVCKCRVCECNPNYTGSACDCSLDTSTCEASNGQICNGRGICECGVCKCTDPKFQGQTCEMCQTCLGVCAEHKECVQCRAFNKGEKKDTCTQECSYFNITKVESRDKLPQPVQPDPVSHCKEKDVDDCWFYFTYSVNGNNEVMVHVVENPECPTGPDIIPIVAGVVAGIVLIGLALLLIWKLLMIIHDRREFAKFEKEKMNAKWDTSLSVAQPGVQWCDISSLQPLTSRFQQFSCLSLPSTWDYRVKILFIRVP

SEQ ID NO: 13620 - protein, 169 aa, Artificial Sequence
  Synthetic polypeptide
IAFILGTGMPRIFLLIKMNLQPIFWIGLISSVCCVFAQTDENRCLKANAKSCGECIQAGPNCGWCTNSVSKTFLQEGMPTSARCDDLEALKKKGCPPDDIENPRGSKDIKKNKNVTNRSKGTAEKLKPEDITQIQPQQLVLRLRSGEPQTFTLKFKRAEDYPIDLYYLM

SEQ ID NO: 13621 - protein, 29 aa, Artificial Sequence
  Synthetic polypeptide
NFFADKDEFTTNFLDWTDQFSLLCVCSNR

SEQ ID NO: 13622 - protein, 1 aa, Artificial Sequence
  Synthetic polypeptide
R

SEQ ID NO: 13623 - protein, 51 aa, Artificial Sequence
  Synthetic polypeptide
SLMNLQPIFWIGLISSVCCVFAQTDENRCLKANAKSCGECIQAGPNCGWCT

SEQ ID NO: 13624 - protein, 91 aa, Artificial Sequence
  Synthetic polypeptide
SLMNLQPIFWIGLISSVCCVFAQTDENRCLKANAKSCGECIQAGPNCGWCTNSTFLQEGMPTSARCDDLEALKKKGCPPDDIENPRGSKDI

SEQ ID NO: 13625 - protein, 106 aa, Artificial Sequence
  Synthetic polypeptide
SLMNLQPIFWIGLISSVCCVFAQTDENRCLKANAKSCGECIQAGPNCGWCTNSTFLQEGMPTSARCDDLEALKKKGCPPDDIENPRGSKDIKKNKNVTNRSKGTAE

SEQ ID NO: 13626 - protein, 126 aa, Artificial Sequence
  Synthetic polypeptide
SLMNLQPIFWIGLISSVCCVFAQTDENRCLKANAKSCGECIQAGPNCGWCTNSTFLQEGMPTSARCDDLEALKKKGCPPDDIENPRGSKDIKKNKNVTNRSKGTAEKLKPEDITQIQPQQLVLRLR

SEQ ID NO: 13627 - protein, 138 aa, Artificial Sequence
  Synthetic polypeptide
SLMNLQPIFWIGLISSVCCVFAQTDENRCLKANAKSCGECIQAGPNCGWCTNSTFLQEGMPTSARCDDLEALKKKGCPPDDIENPRGSKDIKKNKNVTNRSKGTAEKLKPEDITQIQPQQLVLRLRSGEPQTFTLKFK

SEQ ID NO: 13628 - protein, 145 aa, Artificial Sequence
  Synthetic polypeptide
SLMNLQPIFWIGLISSVCCVFAQTDENRCLKANAKSCGECIQAGPNCGWCTNSTFLQEGMPTSARCDDLEALKKKGCPPDDIENPRGSKDIKKNKNVTNRSKGTAEKLKPEDITQIQPQQLVLRLRSGEPQTFTLKFKRAEDYPI

SEQ ID NO: 13629 - protein, 165 aa, Artificial Sequence
  Synthetic polypeptide
SLMNLQPIFWIGLISSVCCVFAQTDENRCLKANAKSCGECIQAGPNCGWCTNSTFLQEGMPTSARCDDLEALKKKGCPPDDIENPRGSKDIKKNKNVTNRSKGTAEKLKPEDITQIQPQQLVLRLRSGEPQTFTLKFKRAEDYPIDLYYLMDLSYSMKDDLENVK

SEQ ID NO: 13630 - protein, 800 aa, Artificial Sequence
  Synthetic polypeptide
SLMNLQPIFWIGLISSVCCVFAQTDENRCLKANAKSCGECIQAGPNCGWCTNSTFLQEGMPTSARCDDLEALKKKGCPPDDIENPRGSKDIKKNKNVTNRSKGTAEKLKPEDITQIQPQQLVLRLRSGEPQTFTLKFKRAEDYPIDLYYLMDLSYSMKDDLENVKSLGTDLMNEMRRITSDFRIGFGSFVEKTVMPYISTTPAKLRNPCTSEQNCTSPFSYKNVLSLTNKGEVFNELVGKQRISGNLDSPEGGFDAIMQVAVCGSLIGWRNVTRLLVFSTDAGFHFAGDGKLGGIVLPNDGQCHLENNMYTMSHYYDYPSIAHLVQKLSENNIQTIFAVTEEFQPVYKELKNLIPKSAVGTLSANSSNVIQLIIDAYNSLSSEVILENGKLSEGVTISYKSYCKNGVNGTGENGRKCSNISIGDEVQFEISITSNKCPKKDSDSFKIRPLGFTEEVEVILQYICECECQSEGIPESPKCHEGNGTFECGACRCNEGRVGRHCECSTDEVNSEDMDAYCRKENSSEICSNNGECVCGQCVCRKRDNTNEIYSGKFCECDNFNCDRSNGLICGGNGVCKCRVCECNPNYTGSACDCSLDTSTCEASNGQICNGRGICECGVCKCTDPKFQGQTCEMCQTCLGVCAEHKECVQCRAFNKGEKKDTCTQECSYFNITKVESRDKLPQPVQPDPVSHCKEKDVDDCWFYFTYSVNGNNEVMVHVVENPECPTGPDIIPIVAGVVAGIVLIGLALLLIWKLLMIIHDRREFAKFEKEKMNAKWDTGENPIYKSAVTTVVNPKYEGK

SEQ ID NO: 13631 - protein, 803 aa, Artificial Sequence
  Synthetic polypeptide
SLMNLQPIFWIGLISSVCCVFAQTDENRCLKANAKSCGECIQAGPNCGWCTNSTFLQEGMPTSARCDDLEALKKKGCPPDDIENPRGSKDIKKNKNVTNRSKGTAEKLKPEDITQIQPQQLVLRLRSGEPQTFTLKFKRAEDYPIDLYYLMDLSYSMKDDLENVKSLGTDLMNEMRRITSDFRIGFGSFVEKTVMPYISTTPAKLRNPCTSEQNCTSPFSYKNVLSLTNKGEVFNELVGKQRISGNLDSPEGGFDAIMQVAVCGSLIGWRNVTRLLVFSTDAGFHFAGDGKLGGIVLPNDGQCHLENNMYTMSHYYDYPSIAHLVQKLSENNIQTIFAVTEEFQPVYKELKNLIPKSAVGTLSANSSNVIQLIIDAYNSLSSEVILENGKLSEGVTISYKSYCKNGVNGTGENGRKCSNISIGDEVQFEISITSNKCPKKDSDSFKIRPLGFTEEVEVILQYICECECQSEGIPESPKCHEGNGTFECGACRCNEGRVGRHCECSTDEVNSEDMDAYCRKENSSEICSNNGECVCGQCVCRKRDNTNEIYSGKFCECDNFNCDRSNGLICGGNGVCKCRVCECNPNYTGSACDCSLDTSTCEASNGQICNGRGICECGVCKCTDPKFQGQTCEMCQTCLGVCAEHKECVQCRAFNKGEKKDTCTQECSYFNITKVESRDKLPQPVQPDPVSHCKEKDVDDCWFYFTYSVNGNNEVMVHVVENPECPTGPDIIPIVAGVVAGIVLIGLALLLIWKLLMIIHDRREFAKFEKEKMNAKWDTQENPIYKSPINNFKNPNYGRKAGL

SEQ ID NO: 13632 - protein, 827 aa, Artificial Sequence
  Synthetic polypeptide
SLMNLQPIFWIGLISSVCCVFAQTDENRCLKANAKSCGECIQAGPNCGWCTNSTFLQEGMPTSARCDDLEALKKKGCPPDDIENPRGSKDIKKNKNVTNRSKGTAEKLKPEDITQIQPQQLVLRLRSGEPQTFTLKFKRAEDYPIDLYYLMDLSYSMKDDLENVKSLGTDLMNEMRRITSDFRIGFGSFVEKTVMPYISTTPAKLRNPCTSEQNCTSPFSYKNVLSLTNKGEVFNELVGKQRISGNLDSPEGGFDAIMQVAVCGSLIGWRNVTRLLVFSTDAGFHFAGDGKLGGIVLPNDGQCHLENNMYTMSHYYDYPSIAHLVQKLSENNIQTIFAVTEEFQPVYKELKNLIPKSAVGTLSANSSNVIQLIIDAYNSLSSEVILENGKLSEGVTISYKSYCKNGVNGTGENGRKCSNISIGDEVQFEISITSNKCPKKDSDSFKIRPLGFTEEVEVILQYICECECQSEGIPESPKCHEGNGTFECGACRCNEGRVGRHCECSTDEVNSEDMDAYCRKENSSEICSNNGECVCGQCVCRKRDNTNEIYSGKFCECDNFNCDRSNGLICGGNGVCKCRVCECNPNYTGSACDCSLDTSTCEASNGQICNGRGICECGVCKCTDPKFQGQTCEMCQTCLGVCAEHKECVQCRAFNKGEKKDTCTQECSYFNITKVESRDKLPQPVQPDPVSHCKEKDVDDCWFYFTYSVNGNNEVMVHVVENPECPTGPDIIPIVAGVVAGIVLIGLALLLIWKLLMIIHDRREFAKFEKEKMNAKWDTSLSVAQPGVQWCDISSLQPLTSRFQQFSCLSLPSTWDYRVKILFIRVP

SEQ ID NO: 13633 - protein, 154 aa, Artificial Sequence
  Synthetic polypeptide
SLMNLQPIFWIGLISSVCCVFAQTDENRCLKANAKSCGECIQAGPNCGWCTNSVSKTFLQEGMPTSARCDDLEALKKKGCPPDDIENPRGSKDIKKNKNVTNRSKGTAEKLKPEDITQIQPQQLVLRLRSGEPQTFTLKFKRAEDYPIDLYYLM

SEQ ID NO: 13634 - protein, 34 aa, Artificial Sequence; identical to SEQ ID NO: 6168
  Synthetic polypeptide

SEQ ID NO: 13635 - protein, 58 aa, Artificial Sequence
  Synthetic polypeptide
FESKTLHSLMNLQPIFWIGLISSVCCVFAQTDENRCLKANAKSCGECIQAGPNCGWCT

SEQ ID NO: 13636 - protein, 98 aa, Artificial Sequence
  Synthetic polypeptide
FESKTLHSLMNLQPIFWIGLISSVCCVFAQTDENRCLKANAKSCGECIQAGPNCGWCTNSTFLQEGMPTSARCDDLEALKKKGCPPDDIENPRGSKDI

SEQ ID NO: 13637 - protein, 113 aa, Artificial Sequence
  Synthetic polypeptide
FESKTLHSLMNLQPIFWIGLISSVCCVFAQTDENRCLKANAKSCGECIQAGPNCGWCTNSTFLQEGMPTSARCDDLEALKKKGCPPDDIENPRGSKDIKKNKNVTNRSKGTAE

SEQ ID NO: 13638 - protein, 133 aa, Artificial Sequence
  Synthetic polypeptide
FESKTLHSLMNLQPIFWIGLISSVCCVFAQTDENRCLKANAKSCGECIQAGPNCGWCTNSTFLQEGMPTSARCDDLEALKKKGCPPDDIENPRGSKDIKKNKNVTNRSKGTAEKLKPEDITQIQPQQLVLRLR

SEQ ID NO: 13639 - protein, 145 aa, Artificial Sequence
  Synthetic polypeptide
FESKTLHSLMNLQPIFWIGLISSVCCVFAQTDENRCLKANAKSCGECIQAGPNCGWCTNSTFLQEGMPTSARCDDLEALKKKGCPPDDIENPRGSKDIKKNKNVTNRSKGTAEKLKPEDITQIQPQQLVLRLRSGEPQTFTLKFK

SEQ ID NO: 13640 - protein, 152 aa, Artificial Sequence
  Synthetic polypeptide
FESKTLHSLMNLQPIFWIGLISSVCCVFAQTDENRCLKANAKSCGECIQAGPNCGWCTNSTFLQEGMPTSARCDDLEALKKKGCPPDDIENPRGSKDIKKNKNVTNRSKGTAEKLKPEDITQIQPQQLVLRLRSGEPQTFTLKFKRAEDYPI

SEQ ID NO: 13641 - protein, 172 aa, Artificial Sequence
  Synthetic polypeptide
FESKTLHSLMNLQPIFWIGLISSVCCVFAQTDENRCLKANAKSCGECIQAGPNCGWCTNSTFLQEGMPTSARCDDLEALKKKGCPPDDIENPRGSKDIKKNKNVTNRSKGTAEKLKPEDITQIQPQQLVLRLRSGEPQTFTLKFKRAEDYPIDLYYLMDLSYSMKDDLENVK

SEQ ID NO: 13642 - protein, 807 aa, Artificial Sequence
  Synthetic polypeptide
FESKTLHSLMNLQPIFWIGLISSVCCVFAQTDENRCLKANAKSCGECIQAGPNCGWCTNSTFLQEGMPTSARCDDLEALKKKGCPPDDIENPRGSKDIKKNKNVTNRSKGTAEKLKPEDITQIQPQQLVLRLRSGEPQTFTLKFKRAEDYPIDLYYLMDLSYSMKDDLENVKSLGTDLMNEMRRITSDFRIGFGSFVEKTVMPYISTTPAKLRNPCTSEQNCTSPFSYKNVLSLTNKGEVFNELVGKQRISGNLDSPEGGFDAIMQVAVCGSLIGWRNVTRLLVFSTDAGFHFAGDGKLGGIVLPNDGQCHLENNMYTMSHYYDYPSIAHLVQKLSENNIQTIFAVTEEFQPVYKELKNLIPKSAVGTLSANSSNVIQLIIDAYNSLSSEVILENGKLSEGVTISYKSYCKNGVNGTGENGRKCSNISIGDEVQFEISITSNKCPKKDSDSFKIRPLGFTEEVEVILQYICECECQSEGIPESPKCHEGNGTFECGACRCNEGRVGRHCECSTDEVNSEDMDAYCRKENSSEICSNNGECVCGQCVCRKRDNTNEIYSGKFCECDNFNCDRSNGLICGGNGVCKCRVCECNPNYTGSACDCSLDTSTCEASNGQICNGRGICECGVCKCTDPKFQGQTCEMCQTCLGVCAEHKECVQCRAFNKGEKKDTCTQECSYFNITKVESRDKLPQPVQPDPVSHCKEKDVDDCWFYFTYSVNGNNEVMVHVVENPECPTGPDIIPIVAGVVAGIVLIGLALLLIWKLLMIIHDRREFAKFEKEKMNAKWDTGENPIYKSAVTTVVNPKYEGK

SEQ ID NO: 13643 - protein, 810 aa, Artificial Sequence
  Synthetic polypeptide
FESKTLHSLMNLQPIFWIGLISSVCCVFAQTDENRCLKANAKSCGECIQAGPNCGWCTNSTFLQEGMPTSARCDDLEALKKKGCPPDDIENPRGSKDIKKNKNVTNRSKGTAEKLKPEDITQIQPQQLVLRLRSGEPQTFTLKFKRAEDYPIDLYYLMDLSYSMKDDLENVKSLGTDLMNEMRRITSDFRIGFGSFVEKTVMPYISTTPAKLRNPCTSEQNCTSPFSYKNVLSLTNKGEVFNELVGKQRISGNLDSPEGGFDAIMQVAVCGSLIGWRNVTRLLVFSTDAGFHFAGDGKLGGIVLPNDGQCHLENNMYTMSHYYDYPSIAHLVQKLSENNIQTIFAVTEEFQPVYKELKNLIPKSAVGTLSANSSNVIQLIIDAYNSLSSEVILENGKLSEGVTISYKSYCKNGVNGTGENGRKCSNISIGDEVQFEISITSNKCPKKDSDSFKIRPLGFTEEVEVILQYICECECQSEGIPESPKCHEGNGTFECGACRCNEGRVGRHCECSTDEVNSEDMDAYCRKENSSEICSNNGECVCGQCVCRKRDNTNEIYSGKFCECDNFNCDRSNGLICGGNGVCKCRVCECNPNYTGSACDCSLDTSTCEASNGQICNGRGICECGVCKCTDPKFQGQTCEMCQTCLGVCAEHKECVQCRAFNKGEKKDTCTQECSYFNITKVESRDKLPQPVQPDPVSHCKEKDVDDCWFYFTYSVNGNNEVMVHVVENPECPTGPDIIPIVAGVVAGIVLIGLALLLIWKLLMIIHDRREFAKFEKEKMNAKWDTQENPIYKSPINNFKNPNYGRKAGL

SEQ ID NO: 13644 - protein, 834 aa, Artificial Sequence
  Synthetic polypeptide
FESKTLHSLMNLQPIFWIGLISSVCCVFAQTDENRCLKANAKSCGECIQAGPNCGWCTNSTFLQEGMPTSARCDDLEALKKKGCPPDDIENPRGSKDIKKNKNVTNRSKGTAEKLKPEDITQIQPQQLVLRLRSGEPQTFTLKFKRAEDYPIDLYYLMDLSYSMKDDLENVKSLGTDLMNEMRRITSDFRIGFGSFVEKTVMPYISTTPAKLRNPCTSEQNCTSPFSYKNVLSLTNKGEVFNELVGKQRISGNLDSPEGGFDAIMQVAVCGSLIGWRNVTRLLVFSTDAGFHFAGDGKLGGIVLPNDGQCHLENNMYTMSHYYDYPSIAHLVQKLSENNIQTIFAVTEEFQPVYKELKNLIPKSAVGTLSANSSNVIQLIIDAYNSLSSEVILENGKLSEGVTISYKSYCKNGVNGTGENGRKCSNISIGDEVQFEISITSNKCPKKDSDSFKIRPLGFTEEVEVILQYICECECQSEGIPESPKCHEGNGTFECGACRCNEGRVGRHCECSTDEVNSEDMDAYCRKENSSEICSNNGECVCGQCVCRKRDNTNEIYSGKFCECDNFNCDRSNGLICGGNGVCKCRVCECNPNYTGSACDCSLDTSTCEASNGQICNGRGICECGVCKCTDPKFQGQTCEMCQTCLGVCAEHKECVQCRAFNKGEKKDTCTQECSYFNITKVESRDKLPQPVQPDPVSHCKEKDVDDCWFYFTYSVNGNNEVMVHVVENPECPTGPDIIPIVAGVVAGIVLIGLALLLIWKLLMIIHDRREFAKFEKEKMNAKWDTSLSVAQPGVQWCDISSLQPLTSRFQQFSCLSLPSTWDYRVKILFIRVP

SEQ ID NO: 13645 - protein, 161 aa, Artificial Sequence
  Synthetic polypeptide
FESKTLHSLMNLQPIFWIGLISSVCCVFAQTDENRCLKANAKSCGECIQAGPNCGWCTNSVSKTFLQEGMPTSARCDDLEALKKKGCPPDDIENPRGSKDIKKNKNVTNRSKGTAEKLKPEDITQIQPQQLVLRLRSGEPQTFTLKFKRAEDYPIDLYYLM

SEQ ID NO: 13646 - protein, 30 aa, Artificial Sequence
  Synthetic polypeptide
VQNFALIDEFTTNFLDWTDQFSLLCVCSNR

SEQ ID NO: 13647 - protein, 190 aa, Artificial Sequence; identical to SEQ ID NO: 2906
  Synthetic polypeptide

SEQ ID NO: 13648 - protein, 409 aa, Artificial Sequence; identical to SEQ ID NO: 2229
  Synthetic polypeptide

SEQ ID NO: 13649 - protein, 392 aa, Artificial Sequence; identical to SEQ ID NO: 2258
  Synthetic polypeptide

SEQ ID NO: 13650 - protein, 130 aa, Artificial Sequence; identical to SEQ ID NO: 3279
  Synthetic polypeptide

SEQ ID NO: 13651 - protein, 402 aa, Artificial Sequence; identical to SEQ ID NO: 2243
  Synthetic polypeptide

SEQ ID NO: 13652 - protein, 95 aa, Artificial Sequence; identical to SEQ ID NO: 3689
  Synthetic polypeptide

SEQ ID NO: 13653 - protein, 127 aa, Artificial Sequence; identical to SEQ ID NO: 3304
  Synthetic polypeptide

SEQ ID NO: 13654 - protein, 127 aa, Artificial Sequence; identical to SEQ ID NO: 3305
  Synthetic polypeptide

SEQ ID NO: 13655 - protein, 113 aa, Artificial Sequence; identical to SEQ ID NO: 3454
  Synthetic polypeptide

SEQ ID NO: 13656 - protein, 120 aa, Artificial Sequence; identical to SEQ ID NO: 3365
  Synthetic polypeptide

SEQ ID NO: 13657 - protein, 128 aa, Artificial Sequence; identical to SEQ ID NO: 3300
  Synthetic polypeptide

SEQ ID NO: 13658 - protein, 85 aa, Artificial Sequence; identical to SEQ ID NO: 3852
  Synthetic polypeptide

SEQ ID NO: 13659 - protein, 17 aa, Artificial Sequence
  Synthetic polypeptide
SQHLERPMQEDHLQPVF

SEQ ID NO: 13660 - protein, 27 aa, Artificial Sequence
  Synthetic polypeptide
IQSILELLLVQSLANIEKMTRLRKRVK

SEQ ID NO: 13661 - protein, 13 aa, Artificial Sequence
  Synthetic polypeptide
NSSWYKVWQTSKR

SEQ ID NO: 13662 - protein, 347 aa, Artificial Sequence
  Synthetic polypeptide
WELIDTKHFRTPPGTKFGKHRKDDKIEKTGKIKIQESFTSEEERIRMKQEQERIQAKTREFRERQARERDYAEIQDFHRTFGCDDELMYGGVSSYEGSMALNARPQSPREGHMMDALYAQVKKPRNSKPSPVDSNRSTPSNHDRIQRLRQEFQQAKQDEDVEDRRRTYSFEQPWPNARPATQSGRHSVSVEVQMQRQRQEERESSQQAQRQYSSLPRQSRKNASSVSQDSWEQNYSPGEGFQSAKENPRYSSYQGSRNGYLGGHGFNARVMLETQELLRQEQRRKEQQMKKQPPSEGPSNYDSYKKVQDPSYAPPKGPFRQDVPPSPSQVARLNRLQTPEKGRPFYS

SEQ ID NO: 13663 - protein, 41 aa, Artificial Sequence
  Synthetic polypeptide
GQEIETILANMWKKTQKKVQDQGESLYPQPVISLPTLWRDK

SEQ ID NO: 13664 - protein, 47 aa, Artificial Sequence
  Synthetic polypeptide
LTPVIPALWEERLVDHEVKRSRPSWPTCGRRHRRKFKIRERVCIHSQ

SEQ ID NO: 13665 - protein, 432 aa, Artificial Sequence
  Synthetic polypeptide
SQHFGRRGWWIMRSRDRDHPGQHVEEDTEESSRSGRESVSTASDQPSHSLERQMNGNQEKGDKTDRKKDKTGKEKKKDRDKEKDKMKAKKGMLKGLGDMFRFGKHRKDDKIEKTGKIKIQESFTSEEERIRMKQEQERIQAKTREFRERQARERDYAEIQDFHRTFGCDDELMYGGVSSYEGSMALNARPQSPREGHMMDALYAQVKKPRNSKPSPVDSNRSTPSNHDRIQRLRQEFQQAKQDEDVEDRRRTYSFEQPWPNARPATQSGRHSVSVEVQMQRQRQEERESSQQAQRQYSSLPRQSRKNASSVSQDSWEQNYSPGEGFQSAKENPRYSSYQGSRNGYLGGHGFNARVMLETQELLRQEQRRKEQQMKKQPPSEGPSNYDSYKKVQDPSYAPPKGPFRQDVPPSPSQVARLNRLQTPEKGRPFYS

SEQ ID NO: 13666 - protein, 395 aa, Artificial Sequence
  Synthetic polypeptide
SQHFGRRGWWIMRSRDRDHPGQHVEEDTEESSRSGRESVSTASDQPSHSLERQMNGNQEKGDKTDRKKDKTGKEKKKDRDKEKDKMKAKKGMLKGLGDMFRIQAKTREFRERQARERDYAEIQDFHRTFGCDDELMYGGVSSYEGSMALNARPQSPREGHMMDALYAQVKKPRNSKPSPVDSNRSTPSNHDRIQRLRQEFQQAKQDEDVEDRRRTYSFEQPWPNARPATQSGRHSVSVEVQMQRQRQEERESSQQAQRQYSSLPRQSRKNASSVSQDSWEQNYSPGEGFQSAKENPRYSSYQGSRNGYLGGHGFNARVMLETQELLRQEQRRKEQQMKKQPPSEGPSNYDSYKKVQDPSYAPPKGPFRQDVPPSPSQVARLNRLQTPEKGRPFYS

SEQ ID NO: 13667 - protein, 110 aa, Artificial Sequence
  Synthetic polypeptide
SQHFGRRGWWIMRSRDRDHPGQHVEEDTEESSRSGRESVSTASDQPSHSLERQMNGNQEKGDKTDRKKDKTGKEKKKDRDKEKDKMKAKKGMLKGLGDMFSLAKLKPEKR

SEQ ID NO: 13668 - protein, 1196 aa, Artificial Sequence
  Synthetic polypeptide
PCGILVAVFDEQDPHHGGDGTSASSTGTQSPEIFGSELGTNNVSAFQPYQATSEIEVTPSVLRANMPLHVRRSSDPALIGLSTSVSDSNFSSEEPSRKNPTRWSTTAGFLKQNTAGSPKTCDRKDEDGTEEDNSRVEPVGHADTGLEHIPNFSLDDMVKLVEVPNDGGPLGIHVVPFSARGGRTLGLLVKRLEKGGKAEHENLFRENDCIVRINDGDLRNRRFEQAQHMFRQAMRTPIIWFHVVPAANKEQYEQLSQSEKNNYYSSRFSPDSQYIDNRSVNSAGLHTVQRAPRLNHPPEQIDSHSRLPHSAHPSGKPPSAPASAPQNVFSTTVSSGYNTKKIGKRLNIQLKKGTEGLGFSITSRDVTIGGSAPIYVKNILPRGAAIQDGRLKAGDRLIEVNGVDLVGKSQEEVVSLLRSTKMEGTVSLLVFRQEDAFHPRELKAEDEDIVLTPDGTREFLTFEVPLNDSGSAGLGVSVKGNRSKENHADLGIFVKSIINGGAASKDGRLRVNDQLIAVNGESLLGKTNQDAMETLRRSMSTEGNKRGMIQLIVARRISKCNELKSPGSPPGPELPIETALDDRERRISHSLYSGIEGLDESPSRNAALSRIMGKYQLSPTVNMPQDDTVIIEDDRLPVLPPHLSDQSSSSSHDDVGFVTADAGTWAKAAISDSADCSLSPDVDPVLAFQREGFGRQIADETKLNTVDDQKAGSPSRDVGPSLGLKKSSSLESLQTAVAEVTLNGDIPFHRPRPRIIRGRGCNESFRAAIDKSYDKPAVDDDDEGMETLEEDTEESSRSGRESVSTASDQPSHSLERQMNGNQEKGDKTDRKKDKTGKEKKKDRDKEKDKMKAKKGMLKGLGDMFRFGKHRKDDKIEKTGKIKIQESFTSEEERIRMKQEQERIQAKTREFRERQARERDYAEIQDFHRTFGCDDELMYGGVSSYEGSMALNARPQSPREGHMMDALYAQVKKPRNSKPSPVDSNRSTPSNHDRIQRLRQEFQQAKQDEDVEDRRRTYSFEQPWPNARPATQSGRHSVSVEVQMQRQRQEERESSQQAQRQYSSLPRQSRKNASSVSQDSWEQNYSPGEGFQSAKENPRYSSYQGSRNGYLGGHGFNARVMLETQELLRQEQRRKEQQMKKQPPSEGPSNYDSYKKVQDPSYAPPKGPFRQDVPPSPSQVARLNRLQTPEKGRPFYS

SEQ ID NO: 13669 - protein, 1226 aa, Artificial Sequence
  Synthetic polypeptide
PCGILVAVFDEQDPHHGGDGTSASSTGTQSPEIFGSELGTNNVSAFQPYQATSEIEVTPSVLRANMPLHVRRSSDPALIGLSTSVSDSNFSSEEPSRKNPTRWSTTAGFLKQNTAGSPKTCDRKDEDGTEEDNSRVEPVGHADTGLEHIPNFSLDDMVKLVEVPNDGGPLGIHVVPFSARGGRTLGLLVKRLEKGGKAEHENLFRENDCIVRINDGDLRNRRFEQAQHMFRQAMRTPIIWFHVVPAANKEQYEQLSQSEKNNYYSSRFSPDSQYIDNRSVNSAGLHTVQRAPRLNHPPEQIDSHSRLPHSAHPSGKPPSAPASAPQNVFSTTVSSGYNTKKIGKRLNIQLKKGTEGLGFSITSRDVTIGGSAPIYVKNILPRGAAIQDGRLKAGDRLIEVNGVDLVGKSQEEVVSLLRSTKMEGTVSLLVFRQEDAFHPRELKAEDEDIVLTPDGTREFLTFEVPLNDSGSAGLGVSVKGNRSKENHADLGIFVKSIINGGAASKDGRLRVNDQLIAVNGESLLGKTNQDAMETLRRSMSTEGNKRGMIQLIVARRISKCNELKSPGSPPGPELPIETALDDRERRISHSLYSGIEGLDESPSRNAALSRIMGKYQLSPTVNMPQDDTVIIEDDRLPVLPPHLSDQSSSSSHDDVGFVTADAGTWAKAAISDSADCSLSPDVDPVLAFQREGFGRQSMSEKRTKQFSDASQLDFVKTRKSKSMDLGIADETKLNTVDDQKAGSPSRDVGPSLGLKKSSSLESLQTAVAEVTLNGDIPFHRPRPRIIRGRGCNESFRAAIDKSYDKPAVDDDDEGMETLEEDTEESSRSGRESVSTASDQPSHSLERQMNGNQEKGDKTDRKKDKTGKEKKKDRDKEKDKMKAKKGMLKGLGDMFRFGKHRKDDKIEKTGKIKIQESFTSEEERIRMKQEQERIQAKTREFRERQARERDYAEIQDFHRTFGCDDELMYGGVSSYEGSMALNARPQSPREGHMMDALYAQVKKPRNSKPSPVDSNRSTPSNHDRIQRLRQEFQQAKQDEDVEDRRRTYSFEQPWPNARPATQSGRHSVSVEVQMQRQRQEERESSQQAQRQYSSLPRQSRKNASSVSQDSWEQNYSPGEGFQSAKENPRYSSYQGSRNGYLGGHGFNARVMLETQELLRQEQRRKEQQMKKQPPSEGPSNYDSYKKVQDPSYAPPKGPFRQDVPPSPSQVARLNRLQTPEKGRPFYS

SEQ ID NO: 13670 - protein, 1174 aa, Artificial Sequence
  Synthetic polypeptide
PCGILVAVFDEQDPHHGGDGTSASSTGTQSPEIFGSELGTNNVSAFQPYQATSEIEVTPSVLRANMPLHVRRSSDPALIGLSTSVSDSNFSSEEPSRKNPTRWSTTAGFLKQNTAGSPKTCDRKDEDGTEEDNSRVEPVGHADTGLEHIPNFSLDDMVKLVEVPNDGGPLGIHVVPFSARGGRTLGLLVKRLEKGGKAEHENLFRENDCIVRINDGDLRNRRFEQAQHMFRQAMRTPIIWFHVVPAANKEQYEQLSQSEKNNYYSSRFSPDSQYIDNRSVNSAGLHTVQRAPRLNHPPEQIDSHSRLPHSAHPSGKPPSAPASAPQNVFSTTVSSGYNTKKIGKRLNIQLKKGTEGLGFSITSRDVTIGGSAPIYVKNILPRGAAIQDGRLKAGDRLIEVNGVDLVGKSQEEVVSLLRSTKMEGTVSLLVFRQEDAFHPRELKAEDEDIVLTPDGTREFLTFEVPLNDSGSAGLGVSVKGNRSKENHADLGIFVKSIINGGAASKDGRLRVNDQLIAVNGESLLGKTNQDAMETLRRSMSTEGNKRGMIQLIVARRISKCNELKSPGSPPGPELPIETALDDRERRISHSLYSGIEGLDESPSRNAALSRIMGKYQLSPTVNMPQDDTVIIEDDRLPVLPPHLSDQSSSSSHDDVGFVTADAGTWAKAAISDSADCSLSPDVDPVLAFQREGFGRQSMSEKRTKQFSDASQLDFVKTRKSKSMDLGSSPSRDVGPSLGLKKSSSLESLQTAVAEVTLNGDIPFHRPRPRIIRGRGCNESFRAAIDKSYDKPAVDDDDEGMETLEEDTEESSRSGRESVSTASDQPSHSLERQMNGNQEKGDKTDRKKDKTGKEKKKDRDKEKDKMKAKKGMLKGLGDMFRIQAKTREFRERQARERDYAEIQDFHRTFGCDDELMYGGVSSYEGSMALNARPQSPREGHMMDALYAQVKKPRNSKPSPVDSNRSTPSNHDRIQRLRQEFQQAKQDEDVEDRRRTYSFEQPWPNARPATQSGRHSVSVEVQMQRQRQEERESSQQAQRQYSSLPRQSRKNASSVSQDSWEQNYSPGEGFQSAKENPRYSSYQGSRNGYLGGHGFNARVMLETQELLRQEQRRKEQQMKKQPPSEGPSNYDSYKKVQDPSYAPPKGPFRQDVPPSPSQVARLNRLQTPEKGRPFYS

SEQ ID NO: 13671 - protein, 1240 aa, Artificial Sequence
  Synthetic polypeptide
PCGILVAVFDEQDPHHGGDGTSASSTGTQSPEIFGSELGTNNVSAFQPYQATSEIEVTPSVLRANMPLHVRRSSDPALIGLSTSVSDSNFSSEEPSRKNPTRWSTTAGFLKQNTAGSPKTCDRKKDENYRSLPRDTSNWSNQFQRDNARSSLSASHPMVGKWLEKQEQDEDGTEEDNSRVEPVGHADTGLEHIPNFSLDDMVKLVEVPNDGGPLGIHVVPFSARGGRTLGLLVKRLEKGGKAEHENLFRENDCIVRINDGDLRNRRFEQAQHMFRQAMRTPIIWFHVVPAANKEQYEQLSQSEKNNYYSSRFSPDSQYIDNRSVNSAGLHTVQRAPRLNHPPEQIDSHSRLPHSAHPSGKPPSAPASAPQNVFSTTVSSGYNTKKIGKRLNIQLKKGTEGLGFSITSRDVTIGGSAPIYVKNILPRGAAIQDGRLKAGDRLIEVNGVDLVGKSQEEVVSLLRSTKMEGTVSLLVFRQEDAFHPRELKAEDEDIVLTPDGTREFLTFEVPLNDSGSAGLGVSVKGNRSKENHADLGIFVKSIINGGAASKDGRLRVNDQLIAVNGESLLGKTNQDAMETLRRSMSTEGNKRGMIQLIVARRISKCNELKSPGSPPGPELPIETALDDRERRISHSLYSGIEGLDESPSRNAALSRIMGKYQLSPTVNMPQDDTVIIEDDRLPVLPPHLSDQSSSSSHDDVGFVTADAGTWAKAAISDSADCSLSPDVDPVLAFQREGFGRQIADETKLNTVDDQKAGSPSRDVGPSLGLKKSSSLESLQTAVAEVTLNGDIPFHRPRPRIIRGRGCNESFRAAIDKSYDKPAVDDDDEGMETLEEDTEESSRSGRESVSTASDQPSHSLERQMNGNQEKGDKTDRKKDKTGKEKKKDRDKEKDKMKAKKGMLKGLGDMFRFGKHRKDDKIEKTGKIKIQESFTSEEERIRMKQEQERIQAKTREFRERQARERDYAEIQDFHRTFGCDDELMYGGVSSYEGSMALNARPQSPREGHMMDALYAQVKKPRNSKPSPVDSNRSTPSNHDRIQRLRQEFQQAKQDEDVEDRRRTYSFEQPWPNARPATQSGRHSVSVEVQMQRQRQEERESSQQAQRQYSSLPRQSRKNASSVSQDSWEQNYSPGEGFQSAKENPRYSSYQGSRNGYLGGHGFNARVMLETQELLRQEQRRKEQQMKKQPPSEGPSNYDSYKKVQDPSYAPPKGPFRQDVPPSPSQVARLNRLQTPEKGRPFYS

SEQ ID NO: 13672 - protein, 918 aa, Artificial Sequence
  Synthetic polypeptide
PCGILVAVFDEQDPHHGGDGTSASSTGTQSPEIFGSELGTNNVSAFQPYQATSEIEVTPSVLRANMPLHVRRSSDPALIGLSTSVSDSNFSSEEPSRKNPTRWSTTAGFLKQNTAGSPKTCDRKKDENYRSLPRDTSNWSNQFQRDNARSSLSASHPMVGKWLEKQEQDEDGTEEDNSRVEPVGHADTGLEHIPNFSLDDMVKLVEVPNDGGPLGIHVVPFSARGGRTLGLLVKRLEKGGKAEHENLFRENDCIVRINDGDLRNRRFEQAQHMFRQAMRTPIIWFHVVPAANKEQYEQLSQSEKNNYYSSRFSPDSQYIDNRSVNSAGLHTVQRAPRLNHPPEQIDSHSRLPHSAHPSGKPPSAPASAPQNVFSTTVSSGYNTKKIGKRLNIQLKKGTEGLGFSITSRDVTIGGSAPIYVKNILPRGAAIQDGRLKAGDRLIEVNGVDLVGKSQEEVVSLLRSTKMEGTVSLLVFRQEDAFHPRELKAEDEDIVLTPDGTREFLTFEVPLNDSGSAGLGVSVKGNRSKENHADLGIFVKSIINGGAASKDGRLRVNDQLIAVNGESLLGKTNQDAMETLRRSMSTEGNKRGMIQLIVARRISKCNELKSPGSPPGPELPIETALDDRERRISHSLYSGIEGLDESPSRNAALSRIMGKYQLSPTVNMPQDDTVIIEDDRLPVLPPHLSDQSSSSSHDDVGFVTADAGTWAKAAISDSADCSLSPDVDPVLAFQREGFGRQIADETKLNTVDDQKAGSPSRDVGPSLGLKKSSSLESLQTAVAEVTLNGDIPFHRPRPRIIRGRGCNESFRAAIDKSYDKPAVDDDDEGMETLEEDTEESSRSGRESVSTASDQPSHSLERQMNGNQEKGDKTDRKKDKTGKEKKKDRDKEKDKMKAKKGMLKGLGDMFSLAKLKPEKR

SEQ ID NO: 13673 - protein, 1270 aa, Artificial Sequence
  Synthetic polypeptide
PCGILVAVFDEQDPHHGGDGTSASSTGTQSPEIFGSELGTNNVSAFQPYQATSEIEVTPSVLRANMPLHVRRSSDPALIGLSTSVSDSNFSSEEPSRKNPTRWSTTAGFLKQNTAGSPKTCDRKKDENYRSLPRDTSNWSNQFQRDNARSSLSASHPMVGKWLEKQEQDEDGTEEDNSRVEPVGHADTGLEHIPNFSLDDMVKLVEVPNDGGPLGIHVVPFSARGGRTLGLLVKRLEKGGKAEHENLFRENDCIVRINDGDLRNRRFEQAQHMFRQAMRTPIIWFHVVPAANKEQYEQLSQSEKNNYYSSRFSPDSQYIDNRSVNSAGLHTVQRAPRLNHPPEQIDSHSRLPHSAHPSGKPPSAPASAPQNVFSTTVSSGYNTKKIGKRLNIQLKKGTEGLGFSITSRDVTIGGSAPIYVKNILPRGAAIQDGRLKAGDRLIEVNGVDLVGKSQEEVVSLLRSTKMEGTVSLLVFRQEDAFHPRELKAEDEDIVLTPDGTREFLTFEVPLNDSGSAGLGVSVKGNRSKENHADLGIFVKSIINGGAASKDGRLRVNDQLIAVNGESLLGKTNQDAMETLRRSMSTEGNKRGMIQLIVARRISKCNELKSPGSPPGPELPIETALDDRERRISHSLYSGIEGLDESPSRNAALSRIMGKYQLSPTVNMPQDDTVIIEDDRLPVLPPHLSDQSSSSSHDDVGFVTADAGTWAKAAISDSADCSLSPDVDPVLAFQREGFGRQSMSEKRTKQFSDASQLDFVKTRKSKSMDLGIADETKLNTVDDQKAGSPSRDVGPSLGLKKSSSLESLQTAVAEVTLNGDIPFHRPRPRIIRGRGCNESFRAAIDKSYDKPAVDDDDEGMETLEEDTEESSRSGRESVSTASDQPSHSLERQMNGNQEKGDKTDRKKDKTGKEKKKDRDKEKDKMKAKKGMLKGLGDMFRFGKHRKDDKIEKTGKIKIQESFTSEEERIRMKQEQERIQAKTREFRERQARERDYAEIQDFHRTFGCDDELMYGGVSSYEGSMALNARPQSPREGHMMDALYAQVKKPRNSKPSPVDSNRSTPSNHDRIQRLRQEFQQAKQDEDVEDRRRTYSFEQPWPNARPATQSGRHSVSVEVQMQRQRQEERESSQQAQRQYSSLPRQSRKNASSVSQDSWEQNYSPGEGFQSAKENPRYSSYQGSRNGYLGGHGFNARVMLETQELLRQEQRRKEQQMKKQPPSEGPSNYDSYKKVQDPSYAPPKGPFRQDVPPSPSQVARLNRLQTPEKGRPFYS

SEQ ID NO: 13674 - protein, 1286 aa, Artificial Sequence
  Synthetic polypeptide
PCGILVAVFDEQDPHHGGDGTSASSTGTQSPEIFGSELGTNNVSAFQPYQATSEIEVTPSVLRANMPLHVRRSSDPALIGLSTSVSDSNFSSEEPSRKNPTRWSTTAGFLKQNTAGSPKTCDRKKDENYRSLPRDTSNWSNQFQRDNARSSLSASHPMVGKWLEKQEQDEDGTEEDNSRVEPVGHADTGLEHIPNFSLDDMVKLVEVPNDGGPLGIHVVPFSARGGRTLGLLVKRLEKGGKAEHENLFRENDCIVRINDGDLRNRRFEQAQHMFRQAMRTPIIWFHVVPAANKEQYEQLSQSEKNNYYSSRFSPDSQYIDNRSVNSAGLHTVQRAPRLNHPPEQIDSHSRLPHSAHPSGKPPSAPASAPQNVFSTTVSSGYNTKKIGKRLNIQLKKGTEGLGFSITSRDVTIGGSAPIYVKNILPRGAAIQDGRLKAGDRLIEVNGVDLVGKSQEEVVSLLRSTKMEGTVSLLVFRQEDAFHPRELNAEPSQMQIPKETKAEDEDIVLTPDGTREFLTFEVPLNDSGSAGLGVSVKGNRSKENHADLGIFVKSIINGGAASKDGRLRVNDQLIAVNGESLLGKTNQDAMETLRRSMSTEGNKRGMIQLIVARRISKCNELKSPGSPPGPELPIETALDDRERRISHSLYSGIEGLDESPSRNAALSRIMGESGKYQLSPTVNMPQDDTVIIEDDRLPVLPPHLSDQSSSSSHDDVGFVTADAGTWAKAAISDSADCSLSPDVDPVLAFQREGFGRQSMSEKRTKQFSDASQLDFVKTRKSKSMDLGIADETKLNTVDDQKAGSPSRDVGPSLGLKKSSSLESLQTAVAEVTLNGDIPFHRPRPRIIRGRGCNESFRAAIDKSYDKPAVDDDDEGMETLEEDTEESSRSGRESVSTASDQPSHSLERQMNGNQEKGDKTDRKKDKTGKEKKKDRDKEKDKMKAKKGMLKGLGDMFRFGKHRKDDKIEKTGKIKIQESFTSEEERIRMKQEQERIQAKTREFRERQARERDYAEIQDFHRTFGCDDELMYGGVSSYEGSMALNARPQSPREGHMMDALYAQVKKPRNSKPSPVDSNRSTPSNHDRIQRLRQEFQQAKQDEDVEDRRRTYSFEQPWPNARPATQSGRHSVSVEVQMQRQRQEERESSQQAQRQYSSLPRQSRKNASSVSQDSWEQNYSPGEGFQSAKENPRYSSYQGSRNGYLGGHGFNARVMLETQELLRQEQRRKEQQMKKQPPSEGPSNYDSYKKVQDPSYAPPKGPFRQDVPPSPSQVARLNRLQTPEKGRPFYS

SEQ ID NO: 13675 - protein, 1249 aa, Artificial Sequence
  Synthetic polypeptide
PCGILVAVFDEQDPHHGGDGTSASSTGTQSPEIFGSELGTNNVSAFQPYQATSEIEVTPSVLRANMPLHVRRSSDPALIGLSTSVSDSNFSSEEPSRKNPTRWSTTAGFLKQNTAGSPKTCDRKKDENYRSLPRDTSNWSNQFQRDNARSSLSASHPMVGKWLEKQEQDEDGTEEDNSRVEPVGHADTGLEHIPNFSLDDMVKLVEVPNDGGPLGIHVVPFSARGGRTLGLLVKRLEKGGKAEHENLFRENDCIVRINDGDLRNRRFEQAQHMFRQAMRTPIIWFHVVPAANKEQYEQLSQSEKNNYYSSRFSPDSQYIDNRSVNSAGLHTVQRAPRLNHPPEQIDSHSRLPHSAHPSGKPPSAPASAPQNVFSTTVSSGYNTKKIGKRLNIQLKKGTEGLGFSITSRDVTIGGSAPIYVKNILPRGAAIQDGRLKAGDRLIEVNGVDLVGKSQEEVVSLLRSTKMEGTVSLLVFRQEDAFHPRELNAEPSQMQIPKETKAEDEDIVLTPDGTREFLTFEVPLNDSGSAGLGVSVKGNRSKENHADLGIFVKSIINGGAASKDGRLRVNDQLIAVNGESLLGKTNQDAMETLRRSMSTEGNKRGMIQLIVARRISKCNELKSPGSPPGPELPIETALDDRERRISHSLYSGIEGLDESPSRNAALSRIMGESGKYQLSPTVNMPQDDTVIIEDDRLPVLPPHLSDQSSSSSHDDVGFVTADAGTWAKAAISDSADCSLSPDVDPVLAFQREGFGRQSMSEKRTKQFSDASQLDFVKTRKSKSMDLGIADETKLNTVDDQKAGSPSRDVGPSLGLKKSSSLESLQTAVAEVTLNGDIPFHRPRPRIIRGRGCNESFRAAIDKSYDKPAVDDDDEGMETLEEDTEESSRSGRESVSTASDQPSHSLERQMNGNQEKGDKTDRKKDKTGKEKKKDRDKEKDKMKAKKGMLKGLGDMFRIQAKTREFRERQARERDYAEIQDFHRTFGCDDELMYGGVSSYEGSMALNARPQSPREGHMMDALYAQVKKPRNSKPSPVDSNRSTPSNHDRIQRLRQEFQQAKQDEDVEDRRRTYSFEQPWPNARPATQSGRHSVSVEVQMQRQRQEERESSQQAQRQYSSLPRQSRKNASSVSQDSWEQNYSPGEGFQSAKENPRYSSYQGSRNGYLGGHGFNARVMLETQELLRQEQRRKEQQMKKQPPSEGPSNYDSYKKVQDPSYAPPKGPFRQDVPPSPSQVARLNRLQTPEKGRPFYS

SEQ ID NO: 13676 - protein, 931 aa, Artificial Sequence
  Synthetic polypeptide
PCGILVAVFDEQDPHHGGDGTSASSTGTQSPEIFGSELGTNNVSAFQPYQATSEIEVTPSVLRANMPLHVRRSSDPALIGLSTSVSDSNFSSEEPSRKNPTRWSTTAGFLKQNTAGSPKTCDRKKDENYRSLPRDTSNWSNQFQRDNARSSLSASHPMVGKWLEKQEQDEDGTEEDNSRVEPVGHADTGLEHIPNFSLDDMVKLVEVPNDGGPLGIHVVPFSARGGRTLGLLVKRLEKGGKAEHENLFRENDCIVRINDGDLRNRRFEQAQHMFRQAMRTPIIWFHVVPAANKEQYEQLSQSEKNNYYSSRFSPDSQYIDNRSVNSAGLHTVQRAPRLNHPPEQIDSHSRLPHSAHPSGKPPSAPASAPQNVFSTTVSSGYNTKKIGKRLNIQLKKGTEGLGFSITSRDVTIGGSAPIYVKNILPRGAAIQDGRLKAGDRLIEVNGVDLVGKSQEEVVSLLRSTKMEGTVSLLVFRQEDAFHPRELNAEPSQMQIPKETKAEDEDIVLTPDGTREFLTFEVPLNDSGSAGLGVSVKGNRSKENHADLGIFVKSIINGGAASKDGRLRVNDQLIAVNGESLLGKTNQDAMETLRRSMSTEGNKRGMIQLIVARRISKCNELKSPGSPPGPELPIETALDDRERRISHSLYSGIEGLDESPSRNAALSRIMGKYQLSPTVNMPQDDTVIIEDDRLPVLPPHLSDQSSSSSHDDVGFVTADAGTWAKAAISDSADCSLSPDVDPVLAFQREGFGRQIADETKLNTVDDQKAGSPSRDVGPSLGLKKSSSLESLQTAVAEVTLNGDIPFHRPRPRIIRGRGCNESFRAAIDKSYDKPAVDDDDEGMETLEEDTEESSRSGRESVSTASDQPSHSLERQMNGNQEKGDKTDRKKDKTGKEKKKDRDKEKDKMKAKKGMLKGLGDMFSLAKLKPEKR

SEQ ID NO: 13677 - protein, 1283 aa, Artificial Sequence
  Synthetic polypeptide
PCGILVAVFDEQDPHHGGDGTSASSTGTQSPEIFGSELGTNNVSAFQPYQATSEIEVTPSVLRANMPLHVRRSSDPALIGLSTSVSDSNFSSEEPSRKNPTRWSTTAGFLKQNTAGSPKTCDRKKDENYRSLPRDTSNWSNQFQRDNARSSLSASHPMVGKWLEKQEQDEDGTEEDNSRVEPVGHADTGLEHIPNFSLDDMVKLVEVPNDGGPLGIHVVPFSARGGRTLGLLVKRLEKGGKAEHENLFRENDCIVRINDGDLRNRRFEQAQHMFRQAMRTPIIWFHVVPAANKEQYEQLSQSEKNNYYSSRFSPDSQYIDNRSVNSAGLHTVQRAPRLNHPPEQIDSHSRLPHSAHPSGKPPSAPASAPQNVFSTTVSSGYNTKKIGKRLNIQLKKGTEGLGFSITSRDVTIGGSAPIYVKNILPRGAAIQDGRLKAGDRLIEVNGVDLVGKSQEEVVSLLRSTKMEGTVSLLVFRQEDAFHPRELNAEPSQMQIPKETKAEDEDIVLTPDGTREFLTFEVPLNDSGSAGLGVSVKGNRSKENHADLGIFVKSIINGGAASKDGRLRVNDQLIAVNGESLLGKTNQDAMETLRRSMSTEGNKRGMIQLIVARRISKCNELKSPGSPPGPELPIETALDDRERRISHSLYSGIEGLDESPSRNAALSRIMGKYQLSPTVNMPQDDTVIIEDDRLPVLPPHLSDQSSSSSHDDVGFVTADAGTWAKAAISDSADCSLSPDVDPVLAFQREGFGRQSMSEKRTKQFSDASQLDFVKTRKSKSMDLGIADETKLNTVDDQKAGSPSRDVGPSLGLKKSSSLESLQTAVAEVTLNGDIPFHRPRPRIIRGRGCNESFRAAIDKSYDKPAVDDDDEGMETLEEDTEESSRSGRESVSTASDQPSHSLERQMNGNQEKGDKTDRKKDKTGKEKKKDRDKEKDKMKAKKGMLKGLGDMFRFGKHRKDDKIEKTGKIKIQESFTSEEERIRMKQEQERIQAKTREFRERQARERDYAEIQDFHRTFGCDDELMYGGVSSYEGSMALNARPQSPREGHMMDALYAQVKKPRNSKPSPVDSNRSTPSNHDRIQRLRQEFQQAKQDEDVEDRRRTYSFEQPWPNARPATQSGRHSVSVEVQMQRQRQEERESSQQAQRQYSSLPRQSRKNASSVSQDSWEQNYSPGEGFQSAKENPRYSSYQGSRNGYLGGHGFNARVMLETQELLRQEQRRKEQQMKKQPPSEGPSNYDSYKKVQDPSYAPPKGPFRQDVPPSPSQVARLNRLQTPEKGRPFYS

SEQ ID NO: 13678 - protein, 961 aa, Artificial Sequence
  Synthetic polypeptide
PCGILVAVFDEQDPHHGGDGTSASSTGTQSPEIFGSELGTNNVSAFQPYQATSEIEVTPSVLRANMPLHVRRSSDPALIGLSTSVSDSNFSSEEPSRKNPTRWSTTAGFLKQNTAGSPKTCDRKKDENYRSLPRDTSNWSNQFQRDNARSSLSASHPMVGKWLEKQEQDEDGTEEDNSRVEPVGHADTGLEHIPNFSLDDMVKLVEVPNDGGPLGIHVVPFSARGGRTLGLLVKRLEKGGKAEHENLFRENDCIVRINDGDLRNRRFEQAQHMFRQAMRTPIIWFHVVPAANKEQYEQLSQSEKNNYYSSRFSPDSQYIDNRSVNSAGLHTVQRAPRLNHPPEQIDSHSRLPHSAHPSGKPPSAPASAPQNVFSTTVSSGYNTKKIGKRLNIQLKKGTEGLGFSITSRDVTIGGSAPIYVKNILPRGAAIQDGRLKAGDRLIEVNGVDLVGKSQEEVVSLLRSTKMEGTVSLLVFRQEDAFHPRELNAEPSQMQIPKETKAEDEDIVLTPDGTREFLTFEVPLNDSGSAGLGVSVKGNRSKENHADLGIFVKSIINGGAASKDGRLRVNDQLIAVNGESLLGKTNQDAMETLRRSMSTEGNKRGMIQLIVARRISKCNELKSPGSPPGPELPIETALDDRERRISHSLYSGIEGLDESPSRNAALSRIMGKYQLSPTVNMPQDDTVIIEDDRLPVLPPHLSDQSSSSSHDDVGFVTADAGTWAKAAISDSADCSLSPDVDPVLAFQREGFGRQSMSEKRTKQFSDASQLDFVKTRKSKSMDLGIADETKLNTVDDQKAGSPSRDVGPSLGLKKSSSLESLQTAVAEVTLNGDIPFHRPRPRIIRGRGCNESFRAAIDKSYDKPAVDDDDEGMETLEEDTEESSRSGRESVSTASDQPSHSLERQMNGNQEKGDKTDRKKDKTGKEKKKDRDKEKDKMKAKKGMLKGLGDMFSLAKLKPEKR

SEQ ID NO: 13679 - protein, 24 aa, Artificial Sequence
  Synthetic polypeptide
RGAFRHDCKLAESSLAVWNSGSSV

SEQ ID NO: 13680 - protein, 9 aa, Artificial Sequence
  Synthetic polypeptide
VLPSRVEFW

SEQ ID NO: 13681 - protein, 306 aa, Artificial Sequence
  Synthetic polypeptide
MGAVAHVCNPSPLGGQDLNMEFNPSDHPRASTIFLSKSQTDVREKRKSLFINHHPPGQIARKYSSCSTIFLDDSTVSQPNLKYTIKCVALAIYYHIKNRDPDGRMLLDIFDENLHPLSKSEVPPDYDKHNPEQKQIYRFVRTLFSAAQLTAECAIVTLVYLERLLTYAEIDICPANWKRIVLGAILLASKVWDDQAVWNVDYCQILKDITVEDMNELERQFLELLQFNINVPSSVYAKYYFDLRSLAEANNLSFPLEPLSRERAHKLEAISRLCEDKYKDLRRSARKRSASADNLTLPRWSPAIIS

SEQ ID NO: 13682 - protein, 27 aa, Artificial Sequence
  Synthetic polypeptide
SQPFGRPRFEHGIQSFRSSSGQHNIPQ

SEQ ID NO: 13683 - protein, 17 aa, Artificial Sequence
  Synthetic polypeptide
WALWLMSVIPALWEAKI

SEQ ID NO: 13684 - protein, 300 aa, Artificial Sequence
  Synthetic polypeptide
ADSWAFEKIKYLNMEFNPSDHPRASTIFLSKSQTDVREKRKSLFINHHPPGQIARKYSSCSTIFLDDSTVSQPNLKYTIKCVALAIYYHIKNRDPDGRMLLDIFDENLHPLSKSEVPPDYDKHNPEQKQIYRFVRTLFSAAQLTAECAIVTLVYLERLLTYAEIDICPANWKRIVLGAILLASKVWDDQAVWNVDYCQILKDITVEDMNELERQFLELLQFNINVPSSVYAKYYFDLRSLAEANNLSFPLEPLSRERAHKLEAISRLCEDKYKDLRRSARKRSASADNLTLPRWSPAIIS

SEQ ID NO: 13685 - protein, 20 aa, Artificial Sequence
  Synthetic polypeptide
IFEHGIQSFRSSSGQHNIPQ

SEQ ID NO: 13686 - protein, 13 aa, Artificial Sequence
  Synthetic polypeptide
YELTRGHLRRLNI

SEQ ID NO: 13687 - protein, 198 aa, Artificial Sequence
  Synthetic polypeptide
ASHLCPAASTLLSVMLQLLCSLDVPDTHLPRDFCTSGLPPPLGTQLPLSQVYLERLLTYAEIDICPANWKRIVLGAILLASKVWDDQAVWNVDYCQILKDITVEDMNELERQFLELLQFNINVPSSVYAKYYFDLRSLAEANNLSFPLEPLSRERAHKLEAISRLCEDKYKDLRRSARKRSASADNLTLPRWSPAIIS

SEQ ID NO: 13688 - protein, 86 aa, Artificial Sequence
  Synthetic polypeptide
LLCSEPVVVPIFLKGKHKALMLLTGPSKIKPPISAQLPPLSSVSCCSCSVPWMYRTHTCLGTSAPQDFLHPLAPSSLCPRCTLKDF

SEQ ID NO: 13689 - protein, 59 aa, Artificial Sequence
  Synthetic polypeptide
RGLARLSLPSLPSCLHSPQCHAAAALFPGCTGHTPASGLLHLRTSSTPWHPAPSVPGVP

SEQ ID NO: 13690 - protein, 34 aa, Artificial Sequence
  Synthetic polypeptide
AEIAPLHCSLGNRARLCLKKKKKKICFLLKVRVT

SEQ ID NO: 13691 - protein, 756 aa, Artificial Sequence
  Synthetic polypeptide
IREAELSVSRDCTTALQPGQQSETLPQKKEKEDLFSSQSASNLKGASLLPGKLPTSVSLFDDEDEEDNLFGGTAAKKQTLSLQAQREEKAKASELSKKKASALLFSSDEEDQWNIPASQTHLASDSRSKGEPRDSGTLQSQEAKAVKKTSLFEEDKEDDLFAIAKDSQKKTQRVSLLFEDDVDSGGSLFGSPPTSVPPATKEGLLTRSAQETVKHSDLFSSSSPWDKGTKPRTKTVLSLFDEEEDKMEDQNIIQAPQKEVGKGCDPDAHPKSTGVFQDEELLFSHKLQKDNDPDVDLFAGTKKTKLLEPSVGSLFGDDEDDDLFSSAKSQPLVQEKKRVVKKDHSVNSFKNQKHPESIQGSKEKGIWKPETPQANLAINPAALLPTAASQISEVKPVLPELAFPSSEHRRSHGLESVPVLPGSGEAGVSFDLPAQADTLHSANKSRVKMRGKRRPQTRAARRLAAQESSEAEDMSVPRGPIAQWADGAISPNGHRPQLRAASGEDSTEEALAAAAAPWEGGPVPGVDTSPFAKSLGHSRGEADLFDSGDIFSTGTGSQSVERTKPKAKIAENPANPPVGGKAKSPMFPALGEASSDDDLFQSAKPKPAKKTNPFPLLEDEDDLFTDQKVKKNETKSSSQQDVILTTQDIFEDDIFATEAIKPSQKTREKEKTLESNLFDDNIDIFADLTVKPKEKSKKKVEAKSIFDDDMDDIFSTGIQAKTTKPKSRSAQAAPEPRFEHKVSNIFDDPLNAFGGQ

SEQ ID NO: 13692 - protein, 766 aa, Artificial Sequence
  Synthetic polypeptide
IREAELSVSRDCTTALQPGQQSETLPQKKEKEDLFSSQSASNLKGASLLPGKLPTSVSLFDDEDEEDNLFGGTAAKKQTLSLQAQREEKAKASELSKKKASALLFSSDEEDQWNIPASQTHLASDSRSKGEPRDSGTLQSQEAKAVKKTSLFEEDKEDDLFAIAKDSQKKTQRVSLLFEDDVDSGGSLFGSPPTSVPPATKKKETVSEAPPLLFSDEEEKEAQLGVKSVDKKVESAKESLKFGRTDVAESEKEGLLTRSAQETVKHSDLFSSSSPWDKGTKPRTKTVLSLFDEEEDKMEDQNIIQAPQKEVGKGCDPDAHPKSTGVFQDEELLFSHKLQKDNDPDVDLFAGTKKTKLLEPSVGSLFGDDEDDDLFSSAKSQPLANLAINPAALLPTAASQISEVKPVLPELAFPSSEHRRSHGLESVPVLPGSGEAGVSFDLPAQADTLHSANKSRVKMRGKRRPQTRAARRLAAQESSEAEDMSVPRGPIAQWADGAISPNGHRPQLRAASGEDSTEEALAAAAAPWEGGPVPGVDTSPFAKSLGHSRGEADLFDSGDIFSTGTGSQSVERTKPKAKIAENPANPPVGGKAKSPMFPALGEASSDDDLFQSAKPKPAKKTNPFPLLEDEDDLFTDQKVKKNETKSSSQQDVILTTQDIFEDDIFATEAIKPSQKTREKEKTLESNLFDDNIDIFADLTVKPKEKSKKKVEAKSIFDDDMDDIFSTGIQAKTTKPKSRSAQAAPEPRFEHKVSNIFDDPLNAFGGQ

SEQ ID NO: 13693 - protein, 807 aa, Artificial Sequence
  Synthetic polypeptide
IREAELSVSRDCTTALQPGQQSETLPQKKEKEDLFSSQSASNLKGASLLPGKLPTSVSLFDDEDEEDNLFGGTAAKKQTLSLQAQREEKAKASELSKKKASALLFSSDEEDQWNIPASQTHLASDSRSKGEPRDSGTLQSQEAKAVKKTSLFEEDKEDDLFAIAKDSQKKTQRVSLLFEDDVDSGGSLFGSPPTSVPPATKKKETVSEAPPLLFSDEEEKEAQLGVKSVDKKVESAKESLKFGRTDVAESEKEGLLTRSAQETVKHSDLFSSSSPWDKGTKPRTKTVLSLFDEEEDKMEDQNIIQAPQKEVGKGCDPDAHPKSTGVFQDEELLFSHKLQKDNDPDVDLFAGTKKTKLLEPSVGSLFGDDEDDDLFSSAKSQPLVQEKKRVVKKDHSVNSFKNQKHPESIQGSKEKGIWKPETPQANLAINPAALLPTAASQISEVKPVLPELAFPSSEHRRSHGLESVPVLPGSGEAGVSFDLPAQADTLHSANKSRVKMRGKRRPQTRAARRLAAQESSEAEDMSVPRGPIAQWADGAISPNGHRPQLRAASGEDSTEEALAAAAAPWEGGPVPGVDTSPFAKSLGHSRGEADLFDSGDIFSTGTGSQSVERTKPKAKIAENPANPPVGGKAKSPMFPALGEASSDDDLFQSAKPKPAKKTNPFPLLEDEDDLFTDQKVKKNETKSSSQQDVILTTQDIFEDDIFATEAIKPSQKTREKEKTLESNLFDDNIDIFADLTVKPKEKSKKKVEAKSIFDDDMDDIFSTGIQAKTTKPKSRSAQAAPEPRFEHKVSNIFDDPLNAFGGQ

SEQ ID NO: 13694 - protein, 805 aa, Artificial Sequence
  Synthetic polypeptide
IREAELSVSRDCTTALQPGQQSETLPQKKEKEDLFSSQSASNLKGASLLPGKLPTSVSLFDDEDEEDNLFGGTAAKKQTLSLQAQREEKAKASELSKKKASALLFSSDEEWNIPASQTHLASDSRSKGEPRDSGTLQSQEAKAVKKTSLFEEDKEDDLFAIAKDSQKKTQRVSLLFEDDVDSGGSLFGSPPTSVPPATKKKETVSEAPPLLFSDEEEKEAQLGVKSVDKKVESAKESLKFGRTDVAESEKEGLLTRSAQETVKHSDLFSSSSPWDKGTKPRTKTVLSLFDEEEDKMEDQNIIQAPQKEVGKGCDPDAHPKSTGVFQDEELLFSHKLQKDNDPDVDLFAGTKKTKLLEPSVGSLFGDDEDDDLFSSAKSQPLVQEKKRVVKKDHSVNSFKNQKHPESIQGSKEKGIWKPETPQANLAINPAALLPTAASQISEVKPVLPELAFPSSEHRRSHGLESVPVLPGSGEAGVSFDLPAQADTLHSANKSRVKMRGKRRPQTRAARRLAAQESSEAEDMSVPRGPIAQWADGAISPNGHRPQLRAASGEDSTEEALAAAAAPWEGGPVPGVDTSPFAKSLGHSRGEADLFDSGDIFSTGTGSQSVERTKPKAKIAENPANPPVGGKAKSPMFPALGEASSDDDLFQSAKPKPAKKTNPFPLLEDEDDLFTDQKVKKNETKSSSQQDVILTTQDIFEDDIFATEAIKPSQKTREKEKTLESNLFDDNIDIFADLTVKPKEKSKKKVEAKSIFDDDMDDIFSTGIQAKTTKPKSRSAQAAPEPRFEHKVSNIFDDPLNAFGGQ

SEQ ID NO: 13695 - protein, 54 aa, Artificial Sequence
  Synthetic polypeptide
SQLLRRQRQENGVNPGGGAFSEPRLHHCTAAWATERDSASKKRKRRFVFFSKCE

SEQ ID NO: 13696 - protein, 38 aa, Artificial Sequence
  Synthetic polypeptide
AKRRPRECHSSLKTMLIAEALCLALLPHLFLLQQRKDF

SEQ ID NO: 13697 - protein, 59 aa, Artificial Sequence
  Synthetic polypeptide
AKRRPRECHSSLKTMLIAEALCLALLPHLFLLQQRKKRLSLRHHLCCSAMKKRRRHNLE

SEQ ID NO: 13698 - protein, 596 aa, Artificial Sequence
  Synthetic polypeptide
THKKKLSQKKTQRVSLLFEDDVDSGGSLFGSPPTSVPPATKEGLLTRSAQETVKHSDLFSSSSPWDKGTKPRTKTVLSLFDEEEDKMEDQNIIQAPQKEVGKGCDPDAHPKSTGVFQDEELLFSHKLQKDNDPDVDLFAGTKKTKLLEPSVGSLFGDDEDDDLFSSAKSQPLVQEKKRVVKKDHSVNSFKNQKHPESIQGSKEKGIWKPETPQANLAINPAALLPTAASQISEVKPVLPELAFPSSEHRRSHGLESVPVLPGSGEAGVSFDLPAQADTLHSANKSRVKMRGKRRPQTRAARRLAAQESSEAEDMSVPRGPIAQWADGAISPNGHRPQLRAASGEDSTEEALAAAAAPWEGGPVPGVDTSPFAKSLGHSRGEADLFDSGDIFSTGTGSQSVERTKPKAKIAENPANPPVGGKAKSPMFPALGEASSDDDLFQSAKPKPAKKTNPFPLLEDEDDLFTDQKVKKNETKSSSQQDVILTTQDIFEDDIFATEAIKPSQKTREKEKTLESNLFDDNIDIFADLTVKPKEKSKKKVEAKSIFDDDMDDIFSTGIQAKTTKPKSRSAQAAPEPRFEHKVSNIFDDPLNAFGGQ

SEQ ID NO: 13699 - protein, 606 aa, Artificial Sequence
  Synthetic polypeptide
THKKKLSQKKTQRVSLLFEDDVDSGGSLFGSPPTSVPPATKKKETVSEAPPLLFSDEEEKEAQLGVKSVDKKVESAKESLKFGRTDVAESEKEGLLTRSAQETVKHSDLFSSSSPWDKGTKPRTKTVLSLFDEEEDKMEDQNIIQAPQKEVGKGCDPDAHPKSTGVFQDEELLFSHKLQKDNDPDVDLFAGTKKTKLLEPSVGSLFGDDEDDDLFSSAKSQPLANLAINPAALLPTAASQISEVKPVLPELAFPSSEHRRSHGLESVPVLPGSGEAGVSFDLPAQADTLHSANKSRVKMRGKRRPQTRAARRLAAQESSEAEDMSVPRGPIAQWADGAISPNGHRPQLRAASGEDSTEEALAAAAAPWEGGPVPGVDTSPFAKSLGHSRGEADLFDSGDIFSTGTGSQSVERTKPKAKIAENPANPPVGGKAKSPMFPALGEASSDDDLFQSAKPKPAKKTNPFPLLEDEDDLFTDQKVKKNETKSSSQQDVILTTQDIFEDDIFATEAIKPSQKTREKEKTLESNLFDDNIDIFADLTVKPKEKSKKKVEAKSIFDDDMDDIFSTGIQAKTTKPKSRSAQAAPEPRFEHKVSNIFDDPLNAFGGQ

SEQ ID NO: 13700 - protein, 647 aa, Artificial Sequence
  Synthetic polypeptide
THKKKLSQKKTQRVSLLFEDDVDSGGSLFGSPPTSVPPATKKKETVSEAPPLLFSDEEEKEAQLGVKSVDKKVESAKESLKFGRTDVAESEKEGLLTRSAQETVKHSDLFSSSSPWDKGTKPRTKTVLSLFDEEEDKMEDQNIIQAPQKEVGKGCDPDAHPKSTGVFQDEELLFSHKLQKDNDPDVDLFAGTKKTKLLEPSVGSLFGDDEDDDLFSSAKSQPLVQEKKRVVKKDHSVNSFKNQKHPESIQGSKEKGIWKPETPQANLAINPAALLPTAASQISEVKPVLPELAFPSSEHRRSHGLESVPVLPGSGEAGVSFDLPAQADTLHSANKSRVKMRGKRRPQTRAARRLAAQESSEAEDMSVPRGPIAQWADGAISPNGHRPQLRAASGEDSTEEALAAAAAPWEGGPVPGVDTSPFAKSLGHSRGEADLFDSGDIFSTGTGSQSVERTKPKAKIAENPANPPVGGKAKSPMFPALGEASSDDDLFQSAKPKPAKKTNPFPLLEDEDDLFTDQKVKKNETKSSSQQDVILTTQDIFEDDIFATEAIKPSQKTREKEKTLESNLFDDNIDIFADLTVKPKEKSKKKVEAKSIFDDDMDDIFSTGIQAKTTKPKSRSAQAAPEPRFEHKVSNIFDDPLNAFGGQ

SEQ ID NO: 13701 - protein, 17 aa, Artificial Sequence
  Synthetic polypeptide
TQEEVEPKEDPESVTPL

SEQ ID NO: 13702 - protein, 22 aa, Artificial Sequence
  Synthetic polypeptide
DVTCSSLPSAMIARLPQLHGTA

SEQ ID NO: 13703 - protein, 26 aa, Artificial Sequence
  Synthetic polypeptide
LRGFPSYMELHEPVLCDAGQRPTGQG

SEQ ID NO: 13704 - protein, 1334 aa, Artificial Sequence
  Synthetic polypeptide
TSSLSLPAAIHVRCDLLLLAFCHDCEASPATWNCMSLSSVTLASALQVRGEALSEEEIWSLLFLAAEQLLEDLRNDSSDYVVCPWSALLSAAGSLSFQGRVSHIEAAPFKAPELLQGQSEDEQPDASQMHVYSLGMTLYWSAGFHVPPHQPLQLCEPLHSILLTMCEDQPHRRCTLQSVLEACRVHEKEVSVYPAPAGLHIRRLVGLVLGTISEVEKRVVEESSSVQQNRSYLLRKRLRGTSSESPAAQAPECLHPCRVSERSTETQSSPEPHWSTLTHSHCSLLVNRALPGADPQDQQAGRRLSSGSVHSAADSSWPTTPSQRGFLQRRSKFSRPEFILLAGEAPMTLHLPGSVVTKKGKSYLALRDLCVVLLNGQHLEVKCDVESTVGAVFNAVTSFANLEELTYFGLAYMKSKEFFFLDSETRLCKIAPEGWREQPQKTSMNTFTLFLRIKFFVSHYGLLQHSLTRHQFYLQLRKDILEERLYCNEEILLQLGVLALQAEFGNYPKEQVESKPYFHVEDYIPASLIERMTALRVQVEVSEMHRLSSALWGEDAELKFLRVTQQLPEYGVLVHQVFSEKRRPEEEMALGICAKGVIVYEVKNNSRIAMLRFQWRETGKISTYQKKFTITSSVTGKKHTFVTDSAKTSKYLLDLCSAQHGFNAQMGSGQPSHVLFDHDKFVQMANLSPAHQARSKPLIWIQRLSCSENELFVSRLQGAAGGLLSTSMDNFNVDGSKEAGAEGIGRSPCTGREQLKSACVIQKPMTWDSLSGPPVQSMHAGSKNNRRKSFIAEPGREIVRVTLKRDPHRGFGFVINEGEYSGQADPGIFISSIIPGGPAEKAKTIKPGGQILALNHISLEGFTFNMAVRMIQNSPDNIELIISQSKGVGGNNPDEEKNSTANSGVSSTDILSFGYQGSLLSHTQDQDRNTEELDMAGVQSLVPRLRHQLSFLPLKGAGSSCPPSPPEISAGEIYFVELVKEDGTLGFSVTGGINTSVPYGGIYVKSIVPGGPAAKEGQILQGDRLLQVDGVILCGLTHKQAVQCLTGPGQVARLVLERRVPRSTQQCPSANDSMGDERTAVSLVTALPGRPSSCVSVTDGPKFEVKLKKNANGLGFSFVQMEKESCSHLKSDLVRIKRLFPGQPAEENGAIAAGDIILAVNGRSTEGLIFQEVLHLLRGAPQEVTLLLCRPPPGALPELEQEWQTPELSADKEFTRATCTDSCTSPILDQEDSWRDSASPDAGEGLGLRPESSQKAIREAQWGQNRERPWASSLTHSPESHPHLCKLHQERDESTLATSLEKDVRQNCYSVCDIMRLGRYSFSSPLTRLSTDIF

SEQ ID NO: 13705 - protein, 1311 aa, Artificial Sequence
  Synthetic polypeptide
TSSLSLPAAIHVRCDLLLLAFCHDCEASPATWNCMSLSSVTLASALQVRGEALSEEEIWSLLFLAAEQLLEDLRNDSSDYVVCPWSALLSAAGSLSFQGRVSHIEAAPFKAPELLQGQSEDEQPDASQPLQLCEPLHSILLTMCEDQPHRRCTLQSVLEACRVHEKEVSVYPAPAGLHIRRLVGLVLGTISEVEKRVVEESSSVQQNRSYLLRKRLRGTSSESPAAQAPECLHPCRVSERSTETQSSPEPHWSTLTHSHCSLLVNRALPGADPQDQQAGRRLSSGSVHSAADSSWPTTPSQRGFLQRRSKFSRPEFILLAGEAPMTLHLPGSVVTKKGKSYLALRDLCVVLLNGQHLEVKCDVESTVGAVFNAVTSFANLEELTYFGLAYMKSKEFFFLDSETRLCKIAPEGWREQPQKTSMNTFTLFLRIKFFVSHYGLLQHSLTRHQFYLQLRKDILEERLYCNEEILLQLGVLALQAEFGNYPKEVESKPYFHVEDYIPASLIERMTALRVQVEVSEMHRLSSALWGEDAELKFLRVTQQLPEYGVLVHQVFSEKRRPEEEMALGICAKGVIVYEVKNNSRIAMLRFQWRETGKISTYQKKFTITSSVTGKKHTFVTDSAKTSKYLLDLCSAQHGFNAQMGSGQPSHVLFDHDKFVQMANLSPAHQARSKPLIWIQRLSCSENELFVSRLQGAAGGLLSTSMDNFNVDGSKEAGAEGIGRSPCTGREQLKSACVIQKPMTWDSLSGPPVQSMHAGSKNNRRKSFIAEPGREIVRVTLKRDPHRGFGFVINEGEYSGQADPGIFISSIIPGGPAEKAKTIKPGGQILALNHISLEGFTFNMAVRMIQNSPDNIELIISQSKGVGGNNPDEEKNSTANSGVSSTDILSFGYQGSLLSHTQDQDRNTEELDMAGVQSLVPRLRHQLSFLPLKGAGSSCPPSPPEISAGEIYFVELVKEDGTLGFSVTGGINTSVPYGGIYVKSIVPGGPAAKEGQILQGDRLLQVDGVILCGLTHKQAVQCLTGPGQVARLVLERRVPRSTQQCPSANDSMGDERTAVSLVTALPGRPSSCVSVTDGPKFEVKLKKNANGLGFSFVQMEKESCSHLKSDLVRIKRLFPGQPAEENGAIAAGDIILAVNGRSTEGLIFQEVLHLLRGAPQEVTLLLCRPPPGALPELEQEWQTPELSADKEFTRATCTDSCTSPILDQEDSWRDSASPDAGEGLGLRPESSQKAIREAQWGQNRERPWASSLTHSPESHPHLCKLHQERDESTLATSLEKDVRQNCYSVCDIMRLGRYSFSSPLTRLSTDIF

SEQ ID NO: 13706 - protein, 34 aa, Artificial Sequence
  Synthetic polypeptide
AEIAPLHCSLGNRARLRLKKKKKKICFLLKVRVS

SEQ ID NO: 13707 - protein, 766 aa, Artificial Sequence
  Synthetic polypeptide
IREAELSVSRDCTTALQPGQQSETPPQKKEKEDLFSSQSASKLKGASLLPGKLPTLVSLFDDEDEEDNLFGGTAAKKQTLCLQAQREEKAKASELSKKKASALLFSSDEEDQWNIPASQTHLASDSRSKGEPRDSGTLQSQEAKAVKKTSLFEEDEEDDLFAIAKDSQKKTQRVSLLFEDDVDSGGSLFGSPPTSVPPATKKKETVSEAPPLLFSDEEEKEAQLGVKSVDKKVESAKESLKFGRTDVAESEKEGLLTRSAQETVKHSDLFSSSSPWDKGTKPRTKTVLSLFDEEEDKMEDQNIIQAPQKEVGKGRDPDAHPKSTGVFQDEELLFSHKLQKDNDPDVDLFAGTKKTKLLEPSVGSLFGDDEDDDLFSSAKSQPLANLAINPAALLPTAASQISEVKPVLPELAFPSSEHRRSHGLESVPVLPGSGEAGVSFDLPAQADTLHSANKSRVKMRGKRRPQTRAARRLAAQESSETEDMSVPRGPIAQWADGAISPNGHRPQLRAASGEDSTEEALAAAAAPWEGGPVPGVDRSPFAKSLGHSRGEADLFDSGDIFSTGTGSQSVERTKPKAKIAENPANPPVGGKAKSPMFPALGEASSDDDLFQSAKPKPAKKTNPFPLLEDEDDLFTDQKVKKNETKSNSQQDVILTTQDIFEDDIFATEAIKPSQKTREKEKTLESNLFDDNIDIFADLTVKPKEKSKKKVEAKSIFDDDMDDIFSSGIQAKTTKPKSRSAQAAPEPRFEHKVSNIFDDPLNAFGGQ

SEQ ID NO: 13708 - protein, 807 aa, Artificial Sequence
  Synthetic polypeptide
IREAELSVSRDCTTALQPGQQSETPPQKKEKEDLFSSQSASKLKGASLLPGKLPTLVSLFDDEDEEDNLFGGTAAKKQTLCLQAQREEKAKASELSKKKASALLFSSDEEDQWNIPASQTHLASDSRSKGEPRDSGTLQSQEAKAVKKTSLFEEDEEDDLFAIAKDSQKKTQRVSLLFEDDVDSGGSLFGSPPTSVPPATKKKETVSEAPPLLFSDEEEKEAQLGVKSVDKKVESAKESLKFGRTDVAESEKEGLLTRSAQETVKHSDLFSSSSPWDKGTKPRTKTVLSLFDEEEDKMEDQNIIQAPQKEVGKGRDPDAHPKSTGVFQDEELLFSHKLQKDNDPDVDLFAGTKKTKLLEPSVGSLFGDDEDDDLFSSAKSQPLVQEKKRVVKKDHSVDSFKNQKHPESIQGSKEKGIWKPETPQANLAINPAALLPTAASQISEVKPVLPELAFPSSEHRRSHGLESVPVLPGSGEAGVSFDLPAQADTLHSANKSRVKMRGKRRPQTRAARRLAAQESSETEDMSVPRGPIAQWADGAISPNGHRPQLRAASGEDSTEEALAAAAAPWEGGPVPGVDRSPFAKSLGHSRGEADLFDSGDIFSTGTGSQSVERTKPKAKIAENPANPPVGGKAKSPMFPALGEASSDDDLFQSAKPKPAKKTNPFPLLEDEDDLFTDQKVKKNETKSNSQQDVILTTQDIFEDDIFATEAIKPSQKTREKEKTLESNLFDDNIDIFADLTVKPKEKSKKKVEAKSIFDDDMDDIFSSGIQAKTTKPKSRSAQAAPEPRFEHKVSNIFDDPLNAFGGQ

SEQ ID NO: 13709 - protein, 828 aa, Artificial Sequence
  Synthetic polypeptide
IREAELSVSRDCTTALQPGQQSETPPQKKEKEDLFSSQSASKLKGASLLPGKLPTLVSLFDDEDEEDNLFGGTAAKKQTLCLQAQREEKAKASELSKKKASALLFSSDEEDQWNIPASQTHLASDSRSKGEPRDSGTLQSQEAKAVKKTSLFEEDEEDDLFAIAKDSQKKTQRVSLLFEDDVDSGGSLFGSPPTSVPPATKKKETVSEAPPLLFSDEEEKEAQLGVKSVDKKVESAKESLKFGRTDVAESEKEGLLTRSAQETVKHSDLFSSSSPWDKGTKPRTKTVLSLFDEEEDKMEDQNIIQAPQKEVGKGRDPDAHPKSTGVFQDEELLFSHKLQKDNDPDVDLFAGTKKTKLLEPSVGSLFGDDEDDDLFSSAKSQPLVQEKKRVVKKDHSVDSFKNQKHPESIQGSKEKGIWKPETPQDSSGLAPFKTKEPSTRIGKIQANLAINPAALLPTAASQISEVKPVLPELAFPSSEHRRSHGLESVPVLPGSGEAGVSFDLPAQADTLHSANKSRVKMRGKRRPQTRAARRLAAQESSETEDMSVPRGPIAQWADGAISPNGHRPQLRAASGEDSTEEALAAAAAPWEGGPVPGVDRSPFAKSLGHSRGEADLFDSGDIFSTGTGSQSVERTKPKAKIAENPANPPVGGKAKSPMFPALGEASSDDDLFQSAKPKPAKKTNPFPLLEDEDDLFTDQKVKKNETKSNSQQDVILTTQDIFEDDIFATEAIKPSQKTREKEKTLESNLFDDNIDIFADLTVKPKEKSKKKVEAKSIFDDDMDDIFSSGIQAKTTKPKSRSAQAAPEPRFEHKVSNIFDDPLNAFGGQ

SEQ ID NO: 13710 - protein, 54 aa, Artificial Sequence; identical to SEQ ID NO: 13695
  Synthetic polypeptide

SEQ ID NO: 13711 - protein, 59 aa, Artificial Sequence; identical to SEQ ID NO: 13697
  Synthetic polypeptide

SEQ ID NO: 13712 - protein, 606 aa, Artificial Sequence
  Synthetic polypeptide
THKKKLSQKKTQRVSLLFEDDVDSGGSLFGSPPTSVPPATKKKETVSEAPPLLFSDEEEKEAQLGVKSVDKKVESAKESLKFGRTDVAESEKEGLLTRSAQETVKHSDLFSSSSPWDKGTKPRTKTVLSLFDEEEDKMEDQNIIQAPQKEVGKGRDPDAHPKSTGVFQDEELLFSHKLQKDNDPDVDLFAGTKKTKLLEPSVGSLFGDDEDDDLFSSAKSQPLANLAINPAALLPTAASQISEVKPVLPELAFPSSEHRRSHGLESVPVLPGSGEAGVSFDLPAQADTLHSANKSRVKMRGKRRPQTRAARRLAAQESSETEDMSVPRGPIAQWADGAISPNGHRPQLRAASGEDSTEEALAAAAAPWEGGPVPGVDRSPFAKSLGHSRGEADLFDSGDIFSTGTGSQSVERTKPKAKIAENPANPPVGGKAKSPMFPALGEASSDDDLFQSAKPKPAKKTNPFPLLEDEDDLFTDQKVKKNETKSNSQQDVILTTQDIFEDDIFATEAIKPSQKTREKEKTLESNLFDDNIDIFADLTVKPKEKSKKKVEAKSIFDDDMDDIFSSGIQAKTTKPKSRSAQAAPEPRFEHKVSNIFDDPLNAFGGQ

SEQ ID NO: 13713 - protein, 647 aa, Artificial Sequence
  Synthetic polypeptide
THKKKLSQKKTQRVSLLFEDDVDSGGSLFGSPPTSVPPATKKKETVSEAPPLLFSDEEEKEAQLGVKSVDKKVESAKESLKFGRTDVAESEKEGLLTRSAQETVKHSDLFSSSSPWDKGTKPRTKTVLSLFDEEEDKMEDQNIIQAPQKEVGKGRDPDAHPKSTGVFQDEELLFSHKLQKDNDPDVDLFAGTKKTKLLEPSVGSLFGDDEDDDLFSSAKSQPLVQEKKRVVKKDHSVDSFKNQKHPESIQGSKEKGIWKPETPQANLAINPAALLPTAASQISEVKPVLPELAFPSSEHRRSHGLESVPVLPGSGEAGVSFDLPAQADTLHSANKSRVKMRGKRRPQTRAARRLAAQESSETEDMSVPRGPIAQWADGAISPNGHRPQLRAASGEDSTEEALAAAAAPWEGGPVPGVDRSPFAKSLGHSRGEADLFDSGDIFSTGTGSQSVERTKPKAKIAENPANPPVGGKAKSPMFPALGEASSDDDLFQSAKPKPAKKTNPFPLLEDEDDLFTDQKVKKNETKSNSQQDVILTTQDIFEDDIFATEAIKPSQKTREKEKTLESNLFDDNIDIFADLTVKPKEKSKKKVEAKSIFDDDMDDIFSSGIQAKTTKPKSRSAQAAPEPRFEHKVSNIFDDPLNAFGGQ

SEQ ID NO: 13714 - protein, 668 aa, Artificial Sequence
  Synthetic polypeptide
THKKKLSQKKTQRVSLLFEDDVDSGGSLFGSPPTSVPPATKKKETVSEAPPLLFSDEEEKEAQLGVKSVDKKVESAKESLKFGRTDVAESEKEGLLTRSAQETVKHSDLFSSSSPWDKGTKPRTKTVLSLFDEEEDKMEDQNIIQAPQKEVGKGRDPDAHPKSTGVFQDEELLFSHKLQKDNDPDVDLFAGTKKTKLLEPSVGSLFGDDEDDDLFSSAKSQPLVQEKKRVVKKDHSVDSFKNQKHPESIQGSKEKGIWKPETPQDSSGLAPFKTKEPSTRIGKIQANLAINPAALLPTAASQISEVKPVLPELAFPSSEHRRSHGLESVPVLPGSGEAGVSFDLPAQADTLHSANKSRVKMRGKRRPQTRAARRLAAQESSETEDMSVPRGPIAQWADGAISPNGHRPQLRAASGEDSTEEALAAAAAPWEGGPVPGVDRSPFAKSLGHSRGEADLFDSGDIFSTGTGSQSVERTKPKAKIAENPANPPVGGKAKSPMFPALGEASSDDDLFQSAKPKPAKKTNPFPLLEDEDDLFTDQKVKKNETKSNSQQDVILTTQDIFEDDIFATEAIKPSQKTREKEKTLESNLFDDNIDIFADLTVKPKEKSKKKVEAKSIFDDDMDDIFSSGIQAKTTKPKSRSAQAAPEPRFEHKVSNIFDDPLNAFGGQ

SEQ ID NO: 13715 - protein, 17 aa, Artificial Sequence
  Synthetic polypeptide
TQEEVEPKEDPESVTPL

SEQ ID NO: 13716 - protein, 21 aa, Artificial Sequence
  Synthetic polypeptide
DVPFTFHHDCEASPATWNYPL

SEQ ID NO: 13717 - protein, 34 aa, Artificial Sequence
  Synthetic polypeptide
GLSSHMELPTMKMENILSGKVQEGTPSLSSAKER

SEQ ID NO: 13718 - protein, 478 aa, Artificial Sequence
  Synthetic polypeptide
LCLTRSDDFIRGFPFCLTLILSCLPPCETCLSPFIMTVRPLQPHGTTHYENGEYIIRQGARGDTFFIISKGTVNVTREDSPSEDPVFLRTLGKGDWFGEKALQGEDVRTANVIAAEAVTCLVIDRDSFKHLIGGLDDVSNKAYEDAEAKAKYEAEAAFFANLKLSDFNIIDTLGVGGFGRVELVQLKSEESKTFAMKILKKRHIVDTRQQEHIRSEKQIMQGAHSDFIVRLYRTFKDSKYLYMLMEACLGGELWTILRDRGSFEDSTTRFYTACVVEAFAYLHSKGIIYRDLKPENLILDHRGYAKLVDFGFAKKIGFGKKTWTFCGTPEYVAPEIILNKGHDISADYWSLGILMYELLTGSPPFSGPDPMKTYNIILRGIDMIEFPKKIAKNAANLIKKLCRDNPSERLGNLKNGVKDIQKHKWFEGFNWEGLRKGTLTPPIIPSVASPTDTSNFDSFPEDNDEPPPDDNSGWDIDF

SEQ ID NO: 13719 - protein, 115 aa, Artificial Sequence
  Synthetic polypeptide
LCLTRSDDFIRGFPFCLTLILSCLPPCETCLSPFIMTVRPLQPHGTTHYENGEYIIRQGARGDTFFIISKGTVNVTREDSPSEDPVFLRTLGKGDWFGEKALQGWTWNLFEYVVE

SEQ ID NO: 13720 - protein, 23 aa, Artificial Sequence
  Synthetic polypeptide
LKWFHAIVYGSPGKSPGSCQVSS

SEQ ID NO: 13721 - protein, 38 aa, Artificial Sequence
  Synthetic polypeptide
TLNKWLMTKMVSRHCIWQPRKITWKLSSFFLTMVQARA

SEQ ID NO: 13722 - protein, 23 aa, Artificial Sequence
  Synthetic polypeptide
DFEVALDQIIHEALESLMPMQVT

SEQ ID NO: 13723 - protein, 13 aa, Artificial Sequence
  Synthetic polypeptide
ILRWLWIRLFTKL

SEQ ID NO: 13724 - protein, 2 aa, Artificial Sequence
  Synthetic polypeptide
AG

SEQ ID NO: 13725 - protein, 302 aa, Artificial Sequence
  Synthetic polypeptide
MSDLGEVTSFLSAMVSSSVNGHSNYIQLVGCSRRLREIGRLIGALVLSVGIYAEVERQKYKTLESAFLAPAIILILLGVVMFMVSFIGVLASLRDNLYLLQAFMYILGICLIMELIGGVVALTFRNQTIDFLNDNIRRGIENYYDDLDFKNIMDFVQKKFKCCGGEDYRDWSKNQYHDCSAPGPLACGVPYTCCIRNTTEVVNTMCGYKTIDKERFSVQDVIYVRGCTNAVIIWFMDNYTIMAGILLGILLPQFLGVLLTLLYITRVEDIIMEHSVTDGLLGPGAKPSVEAAGTGCCLCYPN

SEQ ID NO: 13726 - protein, 18 aa, Artificial Sequence
  Synthetic polypeptide
NRPADWGPGPVCGHLCRG

SEQ ID NO: 13727 - protein, 182 aa, Artificial Sequence
  Synthetic polypeptide
GEQPMRETIDFLNDNIRRGIENYYDDLDFKNIMDFVQKKFKCCGGEDYRDWSKNQYHDCSAPGPLACGVPYTCCIRNTTEVVNTMCGYKTIDKERFSVQDVIYVRGCTNAVIIWFMDNYTIMAGILLGILLPQFLGVLLTLLYITRVEDIIMEHSVTDGLLGPGAKPSVEAAGTGCCLCYPN

SEQ ID NO: 13728 - protein, 139 aa, Artificial Sequence
  Synthetic polypeptide
GEQPMRETIDFLNDNIRRGIENYYDDLDFKNIMDFVQKKFKCCGGEDYRDWSKNQYHDCSAPGPLACGVPYTCCIRNTTEVVNTMCGYKTIDKERFSVQDVIYVRGCTNAVIIWFMDNYTIMAGILLGILLPQITGVSD

SEQ ID NO: 13729 - protein, 17 aa, Artificial Sequence
  Synthetic polypeptide
GGPSAAVMRRTAHEGDH

SEQ ID NO: 13730 - protein, 6 aa, Artificial Sequence
  Synthetic polypeptide
GRPLTS

SEQ ID NO: 13731 - protein, 15 aa, Artificial Sequence
  Synthetic polypeptide
AVERALGLEPGQPDH

SEQ ID NO: 13732 - protein, 17 aa, Artificial Sequence
  Synthetic polypeptide
GRKSTGPGTRTARPLTS

SEQ ID NO: 13733 - protein, 186 aa, Artificial Sequence
  Synthetic polypeptide
KEHWAWNQDSQTIDFLNDNIRRGIENYYDDLDFKNIMDFVQKKFKCCGGEDYRDWSKNQYHDCSAPGPLACGVPYTCCIRNTTEVVNTMCGYKTIDKERFSVQDVIYVRGCTNAVIIWFMDNYTIMAGILLGILLPQFLGVLLTLLYITRVEDIIMEHSVTDGLLGPGAKPSVEAAGTGCCLCYPN

SEQ ID NO: 13734 - protein, 143 aa, Artificial Sequence
  Synthetic polypeptide
KEHWAWNQDSQTIDFLNDNIRRGIENYYDDLDFKNIMDFVQKKFKCCGGEDYRDWSKNQYHDCSAPGPLACGVPYTCCIRNTTEVVNTMCGYKTIDKERFSVQDVIYVRGCTNAVIIWFMDNYTIMAGILLGILLPQITGVSD

SEQ ID NO: 13735 - protein, 41 aa, Artificial Sequence
  Synthetic polypeptide
AVERALGLEPGQPGLSSGMAASELCVPKHGPSLSGPGLSDH

SEQ ID NO: 13736 - protein, 212 aa, Artificial Sequence
  Synthetic polypeptide
KEHWAWNQDSQVSAQAWRHQSCVSPSTAPASQGLGCLTIDFLNDNIRRGIENYYDDLDFKNIMDFVQKKFKCCGGEDYRDWSKNQYHDCSAPGPLACGVPYTCCIRNTTEVVNTMCGYKTIDKERFSVQDVIYVRGCTNAVIIWFMDNYTIMAGILLGILLPQFLGVLLTLLYITRVEDIIMEHSVTDGLLGPGAKPSVEAAGTGCCLCYPN

SEQ ID NO: 13737 - protein, 169 aa, Artificial Sequence
  Synthetic polypeptide
KEHWAWNQDSQVSAQAWRHQSCVSPSTAPASQGLGCLTIDFLNDNIRRGIENYYDDLDFKNIMDFVQKKFKCCGGEDYRDWSKNQYHDCSAPGPLACGVPYTCCIRNTTEVVNTMCGYKTIDKERFSVQDVIYVRGCTNAVIIWFMDNYTIMAGILLGILLPQITGVSD

SEQ ID NO: 13738 - protein, 49 aa, Artificial Sequence
  Synthetic polypeptide
AQLTTNWSWHWTDYFSGASVSSSVTWRSLSFTPKWPWLTRSSCPPSGRK

SEQ ID NO: 13739 - protein, 225 aa, Artificial Sequence
  Synthetic polypeptide
LVLALDRLLLWSFSFLICNLEVTLIHSQVALADKELLPSVRQEVKEILLRKGVQLLLSERVSNLEELPLNEYREYIKVQTDKGTEVATNLVILCTGIKINSSAYRKAFESRLASSGALRVNEHLQVEGHSNVYAIGDCADVRTPKMAYLAGLHANIAVANIVNSVKQRPLQAYKPGALTFLLSMGRNDGVGQISGFYVGRLMVRLTKSRDLFVSTSWKTMRQSPP

SEQ ID NO: 13740 - protein, 13 aa, Artificial Sequence
  Synthetic polypeptide
PGGHSHSLPSGPG

SEQ ID NO: 13741 - protein, 7 aa, Artificial Sequence
  Synthetic polypeptide
IPHPHRH

SEQ ID NO: 13742 - protein, 927 aa, Artificial Sequence; identical to SEQ ID NO: 1583
  Synthetic polypeptide

SEQ ID NO: 13743 - protein, 938 aa, Artificial Sequence; identical to SEQ ID NO: 1572
  Synthetic polypeptide

SEQ ID NO: 13744 - protein, 61 aa, Artificial Sequence; identical to SEQ ID NO: 4659
  Synthetic polypeptide

SEQ ID NO: 13745 - protein, 43 aa, Artificial Sequence
  Synthetic polypeptide
ASPGLSVLIYKMGAVMKKAALRACREDMARLEKRLFKPLRIRF

SEQ ID NO: 13746 - protein, 22 aa, Artificial Sequence
  Synthetic polypeptide
KRLPCGLVVKIWRGWKRDCSNH

SEQ ID NO: 13747 - protein, 275 aa, Artificial Sequence
  Synthetic polypeptide
RYGEVGKETVQTTEDQILKRDMPPAFIKVENACTKLVQAAQMLQSDPYSVPARDYLIDGSRGILSGTSDLLLTFDEAEVPPPRPPPPEEKDEEFPEQKAGEVINQPMMMAARQLHDEARKWSSKGNDIIAAAKRMALLMAEMSRLVRGGSGTKRALIQCAKDIAKASDEVTRLAKEVAKQCTDKRIRTNLLQVCERIPTISTQLKILSTVKATMLGRTNISDEESEQATEMLVHNAQNLMQSVKETVREAEAASIKIRTDAGFTLRWVRKTPWYQ

SEQ ID NO: 13748 - protein, 1014 aa, Artificial Sequence
  Synthetic polypeptide
RYGEVGKETVQTTEDQILKRDMPPAFIKVENACTKLVQAAQMLQSDPYSVPARDYLIDGSRGILSGTSDLLLTFDEAEVRKIIRVCKGILEYLTVAEVVETMEDLVTYTKNLGPGMTKMAKMIDERQQELTHQEHRVMLVNSMNTVKELLPVLISAMKIFVTTKNSKNQGIEEALKNRNFTVEKMSAEINEIIRVLQLTSWDEDAWASKDTEAMKRALASIDSKLNQAKGWLRDPSASPGDAGEQAIRQILDEAGKVGELCAGKERREILGTCKMLGQMTDQVADLRARGQGSSPVAMQKAQQVSQGLDVLTAKVENAARKLEAMTNSKQSIAKKIDAAQNWLADPNGGPEGEEQIRGALAEARKIAELCDDPKERDDILRSLGEISALTSKLADLRRQGKGDSPEARALAKQVATALQNLQTKTNRAVANSRPAKAAVHLEGKIEQAQRWIDNPTVDDRGVGQAAIRGLVAEGHRLANVMMGPYRQDLLAKCDRVDQLTAQLADLAARGEGESPQARALASQLQDSLKDLKARMQEAMTQEVSDVFSDTTTPIKLLAVAATAPPDAPNREEVFDERAANFENHSGKLGATAEKAAAVGTANKSTVEGIQASVKTARELTPQVVSAARILLRNPGNQAAYEHFETMKNQWIDNVEKMTGLVDEAIDTKSLLDASEEAIKKDLDKCKVAMANIQPQMLVAGATSIARRANRILLVAKREVENSEDPKFREAVKAASDELSKTISPMVMDAKAVAGNISDPGLQKSFLDSGYRILGAVAKVREAFQPQEPDFPPPPPDLEQLRLTDELAPPKPPLPEGEVPPPRPPPPEEKDEEFPEQKAGEVINQPMMMAARQLHDEARKWSSKGNDIIAAAKRMALLMAEMSRLVRGGSGTKRALIQCAKDIAKASDEVTRLAKEVAKQCTDKRIRTNLLQVCERIPTISTQLKILSTVKATMLGRTNISDEESEQATEMLVHNAQNLMQSVKETVREAEAASIKIRTDAGFTLRWVRKTPWYQ

SEQ ID NO: 13749 - protein, 1082 aa, Artificial Sequence
  Synthetic polypeptide
RYGEVGKETVQTTEDQILKRDMPPAFIKVENACTKLVQAAQMLQSDPYSVPARDYLIDGSRGILSGTSDLLLTFDEAEVRKIIRVCKGILEYLTVAEVVETMEDLVTYTKNLGPGMTKMAKMIDERQQELTHQEHRVMLVNSMNTVKELLPVLISAMKIFVTTKNSKNQGIEEALKNRNFTVEKMSAEINEIIRVLQLTSWDEDAWASKDTEAMKRALASIDSKLNQAKGWLRDPSASPGDAGEQAIRQILDEAGKVGELCAGKERREILGTCKMLGQMTDQVADLRARGQGSSPVAMQKAQQVSQGLDVLTAKVENAARKLEAMTNSKQSIAKKIDAAQNWLADPNGGPEGEEQIRGALAEARKIAELCDDPKERDDILRSLGEISALTSKLADLRRQGKGDSPEARALAKQVATALQNLQTKTNRAVANSRPAKAAVHLEGKIEQAQRWIDNPTVDDRGVGQAAIRGLVAEGHRLANVMMGPYRQDLLAKCDRVDQLTAQLADLAARGEGESPQARALASQLQDSLKDLKARMQEAMTQEVSDVFSDTTTPIKLLAVAATAPPDAPNREEVFDERAANFENHSGKLGATAEKAAAVGTANKSTVEGIQASVKTARELTPQVVSAARILLRNPGNQAAYEHFETMKNQWIDNVEKMTGLVDEAIDTKSLLDASEEAIKKDLDKCKVAMANIQPQMLVAGATSIARRANRILLVAKREVENSEDPKFREAVKAASDELSKTISPMVMDAKAVAGNISDPGLQKSFLDSGYRILGAVAKVREAFQPQEPDFPPPPPDLEQLRLTDELAPPKPPLPEGEVPPPRPPPPEEKDEEFPEQKAGEVINQPMMMAARQLHDEARKWSSKPGIPAAEVGIGVVAEADAADAAGFPVPPDMEDDYEPELLLMPSNQPVNQPILAAAQSLHREATKWSSKGNDIIAAAKRMALLMAEMSRLVRGGSGTKRALIQCAKDIAKASDEVTRLAKEVAKQCTDKRIRTNLLQVCERIPTISTQLKILSTVKATMLGRTNISDEESEQATEMLVHNAQNLMQSVKETVREAEAASIKIRTDAGFTLRWVRKTPWYQ

SEQ ID NO: 13750 - protein, 9 aa, Artificial Sequence
  Synthetic polypeptide
AKILDSLLG

SEQ ID NO: 13751 - protein, 82 aa, Artificial Sequence
  Synthetic polypeptide
GQNRHYQTKTDTFCHQQTFTRGNPKECTSDKSADPRCKPEIQEGMMSQDTGQFVGLRMLAPSLSRQLRCFSQTLTQCLLEII

SEQ ID NO: 13752 - protein, 262 aa, Artificial Sequence
  Synthetic polypeptide
NTRGNDEPRYWTVCWVENACTKLVQAAQMLQSDPYSVPARDYLIDGSRGILSGTSDLLLTFDEAEVPPPRPPPPEEKDEEFPEQKAGEVINQPMMMAARQLHDEARKWSSKGNDIIAAAKRMALLMAEMSRLVRGGSGTKRALIQCAKDIAKASDEVTRLAKEVAKQCTDKRIRTNLLQVCERIPTISTQLKILSTVKATMLGRTNISDEESEQATEMLVHNAQNLMQSVKETVREAEAASIKIRTDAGFTLRWVRKTPWYQ

SEQ ID NO: 13753 - protein, 1001 aa, Artificial Sequence
  Synthetic polypeptide
NTRGNDEPRYWTVCWVENACTKLVQAAQMLQSDPYSVPARDYLIDGSRGILSGTSDLLLTFDEAEVRKIIRVCKGILEYLTVAEVVETMEDLVTYTKNLGPGMTKMAKMIDERQQELTHQEHRVMLVNSMNTVKELLPVLISAMKIFVTTKNSKNQGIEEALKNRNFTVEKMSAEINEIIRVLQLTSWDEDAWASKDTEAMKRALASIDSKLNQAKGWLRDPSASPGDAGEQAIRQILDEAGKVGELCAGKERREILGTCKMLGQMTDQVADLRARGQGSSPVAMQKAQQVSQGLDVLTAKVENAARKLEAMTNSKQSIAKKIDAAQNWLADPNGGPEGEEQIRGALAEARKIAELCDDPKERDDILRSLGEISALTSKLADLRRQGKGDSPEARALAKQVATALQNLQTKTNRAVANSRPAKAAVHLEGKIEQAQRWIDNPTVDDRGVGQAAIRGLVAEGHRLANVMMGPYRQDLLAKCDRVDQLTAQLADLAARGEGESPQARALASQLQDSLKDLKARMQEAMTQEVSDVFSDTTTPIKLLAVAATAPPDAPNREEVFDERAANFENHSGKLGATAEKAAAVGTANKSTVEGIQASVKTARELTPQVVSAARILLRNPGNQAAYEHFETMKNQWIDNVEKMTGLVDEAIDTKSLLDASEEAIKKDLDKCKVAMANIQPQMLVAGATSIARRANRILLVAKREVENSEDPKFREAVKAASDELSKTISPMVMDAKAVAGNISDPGLQKSFLDSGYRILGAVAKVREAFQPQEPDFPPPPPDLEQLRLTDELAPPKPPLPEGEVPPPRPPPPEEKDEEFPEQKAGEVINQPMMMAARQLHDEARKWSSKGNDIIAAAKRMALLMAEMSRLVRGGSGTKRALIQCAKDIAKASDEVTRLAKEVAKQCTDKRIRTNLLQVCERIPTISTQLKILSTVKATMLGRTNISDEESEQATEMLVHNAQNLMQSVKETVREAEAASIKIRTDAGFTLRWVRKTPWYQ

SEQ ID NO: 13754 - protein, 1069 aa, Artificial Sequence
  Synthetic polypeptide
NTRGNDEPRYWTVCWVENACTKLVQAAQMLQSDPYSVPARDYLIDGSRGILSGTSDLLLTFDEAEVRKIIRVCKGILEYLTVAEVVETMEDLVTYTKNLGPGMTKMAKMIDERQQELTHQEHRVMLVNSMNTVKELLPVLISAMKIFVTTKNSKNQGIEEALKNRNFTVEKMSAEINEIIRVLQLTSWDEDAWASKDTEAMKRALASIDSKLNQAKGWLRDPSASPGDAGEQAIRQILDEAGKVGELCAGKERREILGTCKMLGQMTDQVADLRARGQGSSPVAMQKAQQVSQGLDVLTAKVENAARKLEAMTNSKQSIAKKIDAAQNWLADPNGGPEGEEQIRGALAEARKIAELCDDPKERDDILRSLGEISALTSKLADLRRQGKGDSPEARALAKQVATALQNLQTKTNRAVANSRPAKAAVHLEGKIEQAQRWIDNPTVDDRGVGQAAIRGLVAEGHRLANVMMGPYRQDLLAKCDRVDQLTAQLADLAARGEGESPQARALASQLQDSLKDLKARMQEAMTQEVSDVFSDTTTPIKLLAVAATAPPDAPNREEVFDERAANFENHSGKLGATAEKAAAVGTANKSTVEGIQASVKTARELTPQVVSAARILLRNPGNQAAYEHFETMKNQWIDNVEKMTGLVDEAIDTKSLLDASEEAIKKDLDKCKVAMANIQPQMLVAGATSIARRANRILLVAKREVENSEDPKFREAVKAASDELSKTISPMVMDAKAVAGNISDPGLQKSFLDSGYRILGAVAKVREAFQPQEPDFPPPPPDLEQLRLTDELAPPKPPLPEGEVPPPRPPPPEEKDEEFPEQKAGEVINQPMMMAARQLHDEARKWSSKPGIPAAEVGIGVVAEADAADAAGFPVPPDMEDDYEPELLLMPSNQPVNQPILAAAQSLHREATKWSSKGNDIIAAAKRMALLMAEMSRLVRGGSGTKRALIQCAKDIAKASDEVTRLAKEVAKQCTDKRIRTNLLQVCERIPTISTQLKILSTVKATMLGRTNISDEESEQATEMLVHNAQNLMQSVKETVREAEAASIKIRTDAGFTLRWVRKTPWYQ

SEQ ID NO: 13755 - protein, 108 aa, Artificial Sequence
  Synthetic polypeptide
ESSEKVVKNADPLTPPQTYLIGIAFDGGKEILQRLEPWPNRWPRPCRTCRPKPTGLWPTADRPKQLYTLRARLSKHSGGLIIPQWMTVESVRLPSGGLWPKGIVWLML

SEQ ID NO: 13756 - protein, 48 aa, Artificial Sequence
  Synthetic polypeptide
LESLLMGERRFSRGSSLGQTGGHGPAEPADQNQPGCGQQQTGQSSCTP

SEQ ID NO: 13757 - protein, 616 aa, Artificial Sequence
  Synthetic polypeptide
WGKGDSPEARALAKQVATALQNLQTKTNRAVANSRPAKAAVHLEGKIEQAQRWIDNPTVDDRGVGQAAIRGLVAEGHRLANVMMGPYRQDLLAKCDRVDQLTAQLADLAARGEGESPQARALASQLQDSLKDLKARMQEAMTQEVSDVFSDTTTPIKLLAVAATAPPDAPNREEVFDERAANFENHSGKLGATAEKAAAVGTANKSTVEGIQASVKTARELTPQVVSAARILLRNPGNQAAYEHFETMKNQWIDNVEKMTGLVDEAIDTKSLLDASEEAIKKDLDKCKVAMANIQPQMLVAGATSIARRANRILLVAKREVENSEDPKFREAVKAASDELSKTISPMVMDAKAVAGNISDPGLQKSFLDSGYRILGAVAKVREAFQPQEPDFPPPPPDLEQLRLTDELAPPKPPLPEGEVPPPRPPPPEEKDEEFPEQKAGEVINQPMMMAARQLHDEARKWSSKGNDIIAAAKRMALLMAEMSRLVRGGSGTKRALIQCAKDIAKASDEVTRLAKEVAKQCTDKRIRTNLLQVCERIPTISTQLKILSTVKATMLGRTNISDEESEQATEMLVHNAQNLMQSVKETVREAEAASIKIRTDAGFTLRWVRKTPWYQ

SEQ ID NO: 13758 - protein, 684 aa, Artificial Sequence
  Synthetic polypeptide
WGKGDSPEARALAKQVATALQNLQTKTNRAVANSRPAKAAVHLEGKIEQAQRWIDNPTVDDRGVGQAAIRGLVAEGHRLANVMMGPYRQDLLAKCDRVDQLTAQLADLAARGEGESPQARALASQLQDSLKDLKARMQEAMTQEVSDVFSDTTTPIKLLAVAATAPPDAPNREEVFDERAANFENHSGKLGATAEKAAAVGTANKSTVEGIQASVKTARELTPQVVSAARILLRNPGNQAAYEHFETMKNQWIDNVEKMTGLVDEAIDTKSLLDASEEAIKKDLDKCKVAMANIQPQMLVAGATSIARRANRILLVAKREVENSEDPKFREAVKAASDELSKTISPMVMDAKAVAGNISDPGLQKSFLDSGYRILGAVAKVREAFQPQEPDFPPPPPDLEQLRLTDELAPPKPPLPEGEVPPPRPPPPEEKDEEFPEQKAGEVINQPMMMAARQLHDEARKWSSKPGIPAAEVGIGVVAEADAADAAGFPVPPDMEDDYEPELLLMPSNQPVNQPILAAAQSLHREATKWSSKGNDIIAAAKRMALLMAEMSRLVRGGSGTKRALIQCAKDIAKASDEVTRLAKEVAKQCTDKRIRTNLLQVCERIPTISTQLKILSTVKATMLGRTNISDEESEQATEMLVHNAQNLMQSVKETVREAEAASIKIRTDAGFTLRWVRKTPWYQ

SEQ ID NO: 13759 - protein, 40 aa, Artificial Sequence
  Synthetic polypeptide
GLPSHVELRPRRLTMAQARRMALSNQWMKKRRQWPPRSAG

SEQ ID NO: 13760 - protein, 1118 aa, Artificial Sequence
  Synthetic polypeptide
PRGTEAQKINNGSSQADGTLKPVDEKEEAVAAEVGWMTSVKDWAGVMISAQTLTGRVLVVLVFALSIGALVIYFIDSSNPIESCQNFYKDFTLQIDMAFNVFFLLYFGLRFIAANDKLWFWLEVNSVVDFFTVPPVFVSVYLNRSWLGLRFLRALRLIQFSEILQFLNILKTSNSIKLVNLLSIFISTWLTAAGFIHLVENSGDPWENFQNNQALTYWECVYLLMVTMSTVGYGDVYAKTTLGRLFMVFFILGGLAMFASYVPEIIELIGNRKKYGGSYSAVSGRKHIVVCGHITLESVSNFLKDFLHKDRDDVNVEIVFLHNISPNLELEALFKRHFTQVEFYQGSVLNPHDLARVKIESADACLILANKYCADPDAEDASNIMRVISIKNYHPKIRIITQMLQYHNKAHLLNIPSWNWKEGDDAICLAELKLGFIAQSCLAQGLSTMLANLFSMRSFIKIEEDTWQKYYLEGVSNEMYTEYLSSAFVGLSFPTVCELCFVKLKLLMIAIEYKSANRESRGRLSILINPGNHLKIQEGTLGFFIASDAKEVKRAFFYCKACHDDITDPKRIKKCGCKRPKMSIYKRMRRACCFDCGRSERDCSCMSGRVRGNVDTLERAFPLSSVSVNDCSTSFRAFEDEQPSTLSPKKKQRNGGMRNSPNTSPKLMRHDPLLIPGNDQIDNMDSNVKKYDSTGMFHWCAPKEIEKVILTRSEAAMTVLSGHVVVCIFGDVSSALIGLRNLVMPLRASNFHYHELKHIVFVGSIEYLKREWETLHNFPKVSILPGTPLSRADLRAVNINLCDMCVILSANQNNIDDTSLQDKECILASLNIKSMQFDDSIGVLQANSQGFTPPGMDRSSPDNSPVHGMLRQPSITTGVNIPIITELVNDTNVQFLDQDDDDDPDTELYLTQPFACGTAFAVSVLDSLMSATYFNDNILTLIRTLVTGGATPELEALIAEENALRGGYSTPQTLANRDRCRVAQLALLDGPFADLGDGGCYGDLFCKALKTYNMLCFGIYRLRDAHLSTPSQCTKRYVITNPPYEFELVPTDLIFCLMQFDHNAGQSRASLSHSSHSSQSSSKKSSSVHSIPSTANRQNRPKSRESRDKQKYVQEERL

SEQ ID NO: 13761 - protein, 1083 aa, Artificial Sequence
  Synthetic polypeptide
PRGTEAQKINNGSSQADGTLKPVDEKEEAVAAEVGWMTSVKDWAGVMISAQTLTGRVLVVLVFALSIGALVIYFIDSSNPIESCQNFYKDFTLQIDMAFNVFFLLYFGLRFIAANDKLWFWLEVNSVVDFFTVPPVFVSVYLNRSWLGLRFLRALRLIQFSEILQFLNILKTSNSIKLVNLLSIFISTWLTAAGFIHLVENSGDPWENFQNNQALTYWECVYLLMVTMSTVGYGDVYAKTTLGRLFMVFFILGGLAMFASYVPEIIELIGNRKKYGGSYSAVSGRKHIVVCGHITLESVSNFLKDFLHKDRDDVNVEIVFLHNISPNLELEALFKRHFTQVEFYQGSVLNPHDLARVKIESADACLILANKYCADPDAEDASNIMRVISIKNYHPKIRIITQMLQYHNKAHLLNIPSWNWKEGDDAICLAELKLGFIAQSCLAQGLSTMLANLFSMRSFIKIEEDTWQKYYLEGVSNEMYTEYLSSAFVGLSFPTVCELCFVKLKLLMIAIEYKSANRESRILINPGNHLKIQEGTLGFFIASDAKEVKRAFFYCKACHDDITDPKRIKKCGCKRLEDEQPSTLSPKKKQRNGGMRNSPNTSPKLMRHDPLLIPGNDQIDNMDSNVKKYDSTGMFHWCAPKEIEKVILTRSEAAMTVLSGHVVVCIFGDVSSALIGLRNLVMPLRASNFHYHELKHIVFVGSIEYLKREWETLHNFPKVSILPGTPLSRADLRAVNINLCDMCVILSANQNNIDDTSLQDKECILASLNIKSMQFDDSIGVLQANSQGFTPPGMDRSSPDNSPVHGMLRQPSITTGVNIPIITELAKPGKLPLVSVNQEKNSGTHILMITELVNDTNVQFLDQDDDDDPDTELYLTQPFACGTAFAVSVLDSLMSATYFNDNILTLIRTLVTGGATPELEALIAEENALRGGYSTPQTLANRDRCRVAQLALLDGPFADLGDGGCYGDLFCKALKTYNMLCFGIYRLRDAHLSTPSQCTKRYVITNPPYEFELVPTDLIFCLMQFDHNAGQSRASLSHSSHSSQSSSKKSSSVHSIPSTANRQNRPKSRESRDKQNRKEMVYR

SEQ ID NO: 13762 - protein, 1055 aa, Artificial Sequence
  Synthetic polypeptide
PRGTEAQKINNGSSQADGTLKPVDEKEEAVAAEVGWMTSVKDWAGVMISAQTLTGRVLVVLVFALSIGALVIYFIDSSNPIESCQNFYKDFTLQIDMAFNVFFLLYFGLRFIAANDKLWFWLEVNSVVDFFTVPPVFVSVYLNRSWLGLRFLRALRLIQFSEILQFLNILKTSNSIKLVNLLSIFISTWLTAAGFIHLVENSGDPWENFQNNQALTYWECVYLLMVTMSTVGYGDVYAKTTLGRLFMVFFILGGLAMFASYVPEIIELIGNRKKYGGSYSAVSGRKHIVVCGHITLESVSNFLKDFLHKDRDDVNVEIVFLHNISPNLELEALFKRHFTQVEFYQGSVLNPHDLARVKIESADACLILANKYCADPDAEDASNIMRVISIKNYHPKIRIITQMLQYHNKAHLLNIPSWNWKEGDDAICLAELKLGFIAQSCLAQGLSTMLANLFSMRSFIKIEEDTWQKYYLEGVSNEMYTEYLSSAFVGLSFPTVCELCFVKLKLLMIAIEYKSANRESRILINPGNHLKIQEGTLGFFIASDAKEVKRAFFYCKACHDDITDPKRIKKCGCKRLEDEQPSTLSPKKKQRNGGMRNSPNTSPKLMRHDPLLIPGNDQIDNMDSNVKKYDSTGMFHWCAPKEIEKVILTRSEAAMTVLSGHVVVCIFGDVSSALIGLRNLVMPLRASNFHYHELKHIVFVGSIEYLKREWETLHNFPKVSILPGTPLSRADLRAVNINLCDMCVILSANQNNIDDTSLQDKECILASLNIKSMQFDDSIGVLQANSQGFTPPGMDRSSPDNSPVHGMLRQPSITTGVNIPIITELVNDTNVQFLDQDDDDDPDTELYLTQPFACGTAFAVSVLDSLMSATYFNDNILTLIRTLVTGGATPELEALIAEENALRGGYSTPQTLANRDRCRVAQLALLDGPFADLGDGGCYGDLFCKALKTYNMLCFGIYRLRDAHLSTPSQCTKRYVITNPPYEFELVPTDLIFCLMQFDHNAGQSRASLSHSSHSSQSSSKKSSSVHSIPSTANRQNRPKSRESRDKQKKEMVYR

SEQ ID NO: 13763 - protein, 1056 aa, Artificial Sequence
  Synthetic polypeptide
PRGTEAQKINNGSSQADGTLKPVDEKEEAVAAEVGWMTSVKDWAGVMISAQTLTGRVLVVLVFALSIGALVIYFIDSSNPIESCQNFYKDFTLQIDMAFNVFFLLYFGLRFIAANDKLWFWLEVNSVVDFFTVPPVFVSVYLNRSWLGLRFLRALRLIQFSEILQFLNILKTSNSIKLVNLLSIFISTWLTAAGFIHLVENSGDPWENFQNNQALTYWECVYLLMVTMSTVGYGDVYAKTTLGRLFMVFFILGGLAMFASYVPEIIELIGNRKKYGGSYSAVSGRKHIVVCGHITLESVSNFLKDFLHKDRDDVNVEIVFLHNISPNLELEALFKRHFTQVEFYQGSVLNPHDLARVKIESADACLILANKYCADPDAEDASNIMRVISIKNYHPKIRIITQMLQYHNKAHLLNIPSWNWKEGDDAICLAELKLGFIAQSCLAQGLSTMLANLFSMRSFIKIEEDTWQKYYLEGVSNEMYTEYLSSAFVGLSFPTVCELCFVKLKLLMIAIEYKSANRESRILINPGNHLKIQEGTLGFFIASDAKEVKRAFFYCKACHDDITDPKRIKKCGCKRLEDEQPSTLSPKKKQRNGGMRNSPNTSPKLMRHDPLLIPGNDQIDNMDSNVKKYDSTGMFHWCAPKEIEKVILTRSEAAMTVLSGHVVVCIFGDVSSALIGLRNLVMPLRASNFHYHELKHIVFVGSIEYLKREWETLHNFPKVSILPGTPLSRADLRAVNINLCDMCVILSANQNNIDDTSLQDKECILASLNIKSMQFDDSIGVLQANSQGFTPPGMDRSSPDNSPVHGMLRQPSITTGVNIPIITELVNDTNVQFLDQDDDDDPDTELYLTQPFACGTAFAVSVLDSLMSATYFNDNILTLIRTLVTGGATPELEALIAEENALRGGYSTPQTLANRDRCRVAQLALLDGPFADLGDGGCYGDLFCKALKTYNMLCFGIYRLRDAHLSTPSQCTKRYVITNPPYEFELVPTDLIFCLMQFDHNAGQSRASLSHSSHSSQSSSKKSSSVHSIPSTANRQNRPKSRESRDKQKYVQEERL

SEQ ID NO: 13764 - protein, 1109 aa, Artificial Sequence
  Synthetic polypeptide
PRGTEAQKINNGSSQADGTLKPVDEKEEAVAAEVGWMTSVKDWAGVMISAQTLTGRVLVVLVFALSIGALVIYFIDSSNPIESCQNFYKDFTLQIDMAFNVFFLLYFGLRFIAANDKLWFWLEVNSVVDFFTVPPVFVSVYLNRSWLGLRFLRALRLIQFSEILQFLNILKTSNSIKLVNLLSIFISTWLTAAGFIHLVENSGDPWENFQNNQALTYWECVYLLMVTMSTVGYGDVYAKTTLGRLFMVFFILGGLAMFASYVPEIIELIGNRKKYGGSYSAVSGRKHIVVCGHITLESVSNFLKDFLHKDRDDVNVEIVFLHNISPNLELEALFKRHFTQVEFYQGSVLNPHDLARVKIESADACLILANKYCADPDAEDASNIMRVISIKNYHPKIRIITQMLQYHNKAHLLNIPSWNWKEGDDAICLAELKLGFIAQSCLAQGLSTMLANLFSMRSFIKIEEDTWQKYYLEGVSNEMYTEYLSSAFVGLSFPTVCELCFVKLKLLMIAIEYKSANRESRILINPGNHLKIQEGTLGFFIASDAKEVKRAFFYCKACHDDITDPKRIKKCGCKRLEDEQPSTLSPKKKQRNGGMRNSPNTSPKLMRHDPLLIPGNDQIDNMDSNVKKYDSTGMFHWCAPKEIEKVILTRSEAAMTVLSGHVVVCIFGDVSSALIGLRNLVMPLRASNFHYHELKHIVFVGSIEYLKREWETLHNFPKVSILPGTPLSRADLRAVNINLCDMCVILSANQNNIDDTSLQDKECILASLNIKSMQFDDSIGVLQANSQGFTPPGMDRSSPDNSPVHGMLRQPSITTGVNIPIITELVNDTNVQFLDQDDDDDPDTELYLTQPFACGTAFAVSVLDSLMSATYFNDNILTLIRTLVTGGATPELEALIAEENALRGGYSTPQTLANRDRCRVAQLALLDGPFADLGDGGCYGDLFCKALKTYNMLCFGIYRLRDAHLSTPSQCTKRYVITNPPYEFELVPTDLIFCLMQFDHNAGQSRASLSHSSHSSQSSSKKSSSVHSIPSTANRQNRPKSRESRDKQNATRMNRMGQAEKKWFTDEPDNAYPRNIQIKPMSTHMANQINQYKSTSSLIPPIREVEDEC

SEQ ID NO: 13765 - protein, 1108 aa, Artificial Sequence
  Synthetic polypeptide
PRGTEAQKINNGSSQADGTLKPVDEKEEAVAAEVGWMTSVKDWAGVMISAQTLTGRVLVVLVFALSIGALVIYFIDSSNPIESCQNFYKDFTLQIDMAFNVFFLLYFGLRFIAANDKLWFWLEVNSVVDFFTVPPVFVSVYLNRSWLGLRFLRALRLIQFSEILQFLNILKTSNSIKLVNLLSIFISTWLTAAGFIHLVENSGDPWENFQNNQALTYWECVYLLMVTMSTVGYGDVYAKTTLGRLFMVFFILGGLAMFASYVPEIIELIGNRKKYGGSYSAVSGRKHIVVCGHITLESVSNFLKDFLHKDRDDVNVEIVFLHNISPNLELEALFKRHFTQVEFYQGSVLNPHDLARVKIESADACLILANKYCADPDAEDASNIMRVISIKNYHPKIRIITQMLQYHNKAHLLNIPSWNWKEGDDAICLAELKLGFIAQSCLAQGLSTMLANLFSMRSFIKIEEDTWQKYYLEGVSNEMYTEYLSSAFVGLSFPTVCELCFVKLKLLMIAIEYKSANRESRILINPGNHLKIQEGTLGFFIASDAKEVKRAFFYCKACHDDITDPKRIKKCGCKRLEDEQPSTLSPKKKQRNGGMRNSPNTSPKLMRHDPLLIPGNDQIDNMDSNVKKYDSTGMFHWCAPKEIEKVILTRSEAAMTVLSGHVVVCIFGDVSSALIGLRNLVMPLRASNFHYHELKHIVFVGSIEYLKREWETLHNFPKVSILPGTPLSRADLRAVNINLCDMCVILSANQNNIDDTSLQDKECILASLNIKSMQFDDSIGVLQANSQGFTPPGMDRSSPDNSPVHGMLRQPSITTGVNIPIITELVNDTNVQFLDQDDDDDPDTELYLTQPFACGTAFAVSVLDSLMSATYFNDNILTLIRTLVTGGATPELEALIAEENALRGGYSTPQTLANRDRCRVAQLALLDGPFADLGDGGCYGDLFCKALKTYNMLCFGIYRLRDAHLSTPSQCTKRYVITNPPYEFELVPTDLIFCLMQFDHNAGQSRASLSHSSHSSQSSSKKSSSVHSIPSTANRQNRPKSRESRDKQNATRMNRMGQEKKWFTDEPDNAYPRNIQIKPMSTHMANQINQYKSTSSLIPPIREVEDEC

SEQ ID NO: 13766 - protein, 1056 aa, Artificial Sequence
  Synthetic polypeptide
PRGTEAQKINNGSSQADGTLKPVDEKEEAVAAEVGWMTSVKDWAGVMISAQTLTGRVLVVLVFALSIGALVIYFIDSSNPIESCQNFYKDFTLQIDMAFNVFFLLYFGLRFIAANDKLWFWLEVNSVVDFFTVPPVFVSVYLNRSWLGLRFLRALRLIQFSEILQFLNILKTSNSIKLVNLLSIFISTWLTAAGFIHLVENSGDPWENFQNNQALTYWECVYLLMVTMSTVGYGDVYAKTTLGRLFMVFFILGGLAMFASYVPEIIELIGNRKKYGGSYSAVSGRKHIVVCGHITLESVSNFLKDFLHKDRDDVNVEIVFLHNISPNLELEALFKRHFTQVEFYQGSVLNPHDLARVKIESADACLILANKYCADPDAEDASNIMRVISIKNYHPKIRIITQMLQYHNKAHLLNIPSWNWKEGDDAICLAELKLGFIAQSCLAQGLSTMLANLFSMRSFIKIEEDTWQKYYLEGVSNEMYTEYLSSAFVGLSFPTVCELCFVKLKLLMIAIEYKSANRESRILINPGNHLKIQEGTLGFFIASDAKEVKRAFFYCKACHDDITDPKRIKKCGCKRLEDEQPSTLSPKKKQRNGGMRNSPNTSPKLMRHDPLLIPGNDQIDNMDSNVKKYDSTGMFHWCAPKEIEKVILTRSEAAMTVLSGHVVVCIFGDVSSALIGLRNLVMPLRASNFHYHELKHIVFVGSIEYLKREWETLHNFPKVSILPGTPLSRADLRAVNINLCDMCVILSANQNNIDDTSLQDKECILASLNIKSMQFDDSIGVLQANSQGFTPPGMDRSSPDNSPVHGMLRQPSITTGVNIPIITELVNDTNVQFLDQDDDDDPDTELYLTQPFACGTAFAVSVLDSLMSATYFNDNILTLIRTLVTGGATPELEALIAEENALRGGYSTPQTLANRDRCRVAQLALLDGPFADLGDGGCYGDLFCKALKTYNMLCFGIYRLRDAHLSTPSQCTKRYVITNPPYEFELVPTDLIFCLMQFDHNAGQSRASLSHSSHSSQSSSKKSSSVHSIPSTANRQNRPKSRESRDKQNRKEMVYR

SEQ ID NO: 13767 - protein, 1097 aa, Artificial Sequence
  Synthetic polypeptide
PRGTEAQKINNGSSQADGTLKPVDEKEEAVAAEVGWMTSVKDWAGVMISAQTLTGRVLVVLVFALSIGALVIYFIDSSNPIESCQNFYKDFTLQIDMAFNVFFLLYFGLRFIAANDKLWFWLEVNSVVDFFTVPPVFVSVYLNRSWLGLRFLRALRLIQFSEILQFLNILKTSNSIKLVNLLSIFISTWLTAAGFIHLVENSGDPWENFQNNQALTYWECVYLLMVTMSTVGYGDVYAKTTLGRLFMVFFILGGLAMFASYVPEIIELIGNRKKYGGSYSAVSGRKHIVVCGHITLESVSNFLKDFLHKDRDDVNVEIVFLHNISPNLELEALFKRHFTQVEFYQGSVLNPHDLARVKIESADACLILANKYCADPDAEDASNIMRVISIKNYHPKIRIITQMLQYHNKAHLLNIPSWNWKEGDDAICLAELKLGFIAQSCLAQGLSTMLANLFSMRSFIKIEEDTWQKYYLEGVSNEMYTEYLSSAFVGLSFPTVCELCFVKLKLLMIAIEYKSANRESRILINPGNHLKIQEGTLGFFIASDAKEVKRAFFYCKACHDDITDPKRIKKCGCKRLEDEQPSTLSPKKKQRNGGMRNSPNTSPKLMRHDPLLIPGNDQIDNMDSNVKKYDSTGMFHWCAPKEIEKVILVTGWMPYLGPRVLMTCLDIGVVCMPTDIQSTSPASIKKFKETRSEAAMTVLSGHVVVCIFGDVSSALIGLRNLVMPLRASNFHYHELKHIVFVGSIEYLKREWETLHNFPKVSILPGTPLSRADLRAVNINLCDMCVILSANQNNIDDTSLQDKECILASLNIKSMQFDDSIGVLQANSQGFTPPGMDRSSPDNSPVHGMLRQPSITTGVNIPIITELVNDTNVQFLDQDDDDDPDTELYLTQPFACGTAFAVSVLDSLMSATYFNDNILTLIRTLVTGGATPELEALIAEENALRGGYSTPQTLANRDRCRVAQLALLDGPFADLGDGGCYGDLFCKALKTYNMLCFGIYRLRDAHLSTPSQCTKRYVITNPPYEFELVPTDLIFCLMQFDHNAGQSRASLSHSSHSSQSSSKKSSSVHSIPSTANRQNRPKSRESRDKQKYVQEERL

SEQ ID NO: 13768 - protein, 1113 aa, Artificial Sequence
  Synthetic polypeptide
PRGTEAQKINNGSSQADGTLKPVDEKEEAVAAEVGWMTSVKDWAGVMISAQTLTGRVLVVLVFALSIGALVIYFIDSSNPIESCQNFYKDFTLQIDMAFNVFFLLYFGLRFIAANDKLWFWLEVNSVVDFFTVPPVFVSVYLNRSWLGLRFLRALRLIQFSEILQFLNILKTSNSIKLVNLLSIFISTWLTAAGFIHLVENSGDPWENFQNNQALTYWECVYLLMVTMSTVGYGDVYAKTTLGRLFMVFFILGGLAMFASYVPEIIELIGNRKKYGGSYSAVSGRKHIVVCGHITLESVSNFLKDFLHKDRDDVNVEIVFLHNISPNLELEALFKRHFTQVEFYQGSVLNPHDLARVKIESADACLILANKYCADPDAEDASNIMRVISIKNYHPKIRIITQMLQYHNKAHLLNIPSWNWKEGDDAICLAELKLGFIAQSCLAQGLSTMLANLFSMRSFIKIEEDTWQKYYLEGVSNEMYTEYLSSAFVGLSFPTVCELCFVKLKLLMIAIEYKSANRESRILINPGNHLKIQEGTLGFFIASDAKEVKRAFFYCKACHDDITDPKRIKKCGCKRPKMSIYKRMRRACCFDCGRSERDCSCMSGRVRGNVDTLERAFPLSSVSVNDCSTSFRAFEDEQPSTLSPKKKQRNGGMRNSPNTSPKLMRHDPLLIPGNDQIDNMDSNVKKYDSTGMFHWCAPKEIEKVILTRSEAAMTVLSGHVVVCIFGDVSSALIGLRNLVMPLRASNFHYHELKHIVFVGSIEYLKREWETLHNFPKVSILPGTPLSRADLRAVNINLCDMCVILSANQNNIDDTSLQDKECILASLNIKSMQFDDSIGVLQANSQGFTPPGMDRSSPDNSPVHGMLRQPSITTGVNIPIITELVNDTNVQFLDQDDDDDPDTELYLTQPFACGTAFAVSVLDSLMSATYFNDNILTLIRTLVTGGATPELEALIAEENALRGGYSTPQTLANRDRCRVAQLALLDGPFADLGDGGCYGDLFCKALKTYNMLCFGIYRLRDAHLSTPSQCTKRYVITNPPYEFELVPTDLIFCLMQFDHNAGQSRASLSHSSHSSQSSSKKSSSVHSIPSTANRQNRPKSRESRDKQKKEMVYR

SEQ ID NO: 13769 - protein, 1114 aa, Artificial Sequence
  Synthetic polypeptide
PRGTEAQKINNGSSQADGTLKPVDEKEEAVAAEVGWMTSVKDWAGVMISAQTLTGRVLVVLVFALSIGALVIYFIDSSNPIESCQNFYKDFTLQIDMAFNVFFLLYFGLRFIAANDKLWFWLEVNSVVDFFTVPPVFVSVYLNRSWLGLRFLRALRLIQFSEILQFLNILKTSNSIKLVNLLSIFISTWLTAAGFIHLVENSGDPWENFQNNQALTYWECVYLLMVTMSTVGYGDVYAKTTLGRLFMVFFILGGLAMFASYVPEIIELIGNRKKYGGSYSAVSGRKHIVVCGHITLESVSNFLKDFLHKDRDDVNVEIVFLHNISPNLELEALFKRHFTQVEFYQGSVLNPHDLARVKIESADACLILANKYCADPDAEDASNIMRVISIKNYHPKIRIITQMLQYHNKAHLLNIPSWNWKEGDDAICLAELKLGFIAQSCLAQGLSTMLANLFSMRSFIKIEEDTWQKYYLEGVSNEMYTEYLSSAFVGLSFPTVCELCFVKLKLLMIAIEYKSANRESRILINPGNHLKIQEGTLGFFIASDAKEVKRAFFYCKACHDDITDPKRIKKCGCKRPKMSIYKRMRRACCFDCGRSERDCSCMSGRVRGNVDTLERAFPLSSVSVNDCSTSFRAFEDEQPSTLSPKKKQRNGGMRNSPNTSPKLMRHDPLLIPGNDQIDNMDSNVKKYDSTGMFHWCAPKEIEKVILTRSEAAMTVLSGHVVVCIFGDVSSALIGLRNLVMPLRASNFHYHELKHIVFVGSIEYLKREWETLHNFPKVSILPGTPLSRADLRAVNINLCDMCVILSANQNNIDDTSLQDKECILASLNIKSMQFDDSIGVLQANSQGFTPPGMDRSSPDNSPVHGMLRQPSITTGVNIPIITELVNDTNVQFLDQDDDDDPDTELYLTQPFACGTAFAVSVLDSLMSATYFNDNILTLIRTLVTGGATPELEALIAEENALRGGYSTPQTLANRDRCRVAQLALLDGPFADLGDGGCYGDLFCKALKTYNMLCFGIYRLRDAHLSTPSQCTKRYVITNPPYEFELVPTDLIFCLMQFDHNAGQSRASLSHSSHSSQSSSKKSSSVHSIPSTANRQNRPKSRESRDKQKYVQEERL

SEQ ID NO: 13770 - protein, 1166 aa, Artificial Sequence
  Synthetic polypeptide
PRGTEAQKINNGSSQADGTLKPVDEKEEAVAAEVGWMTSVKDWAGVMISAQTLTGRVLVVLVFALSIGALVIYFIDSSNPIESCQNFYKDFTLQIDMAFNVFFLLYFGLRFIAANDKLWFWLEVNSVVDFFTVPPVFVSVYLNRSWLGLRFLRALRLIQFSEILQFLNILKTSNSIKLVNLLSIFISTWLTAAGFIHLVENSGDPWENFQNNQALTYWECVYLLMVTMSTVGYGDVYAKTTLGRLFMVFFILGGLAMFASYVPEIIELIGNRKKYGGSYSAVSGRKHIVVCGHITLESVSNFLKDFLHKDRDDVNVEIVFLHNISPNLELEALFKRHFTQVEFYQGSVLNPHDLARVKIESADACLILANKYCADPDAEDASNIMRVISIKNYHPKIRIITQMLQYHNKAHLLNIPSWNWKEGDDAICLAELKLGFIAQSCLAQGLSTMLANLFSMRSFIKIEEDTWQKYYLEGVSNEMYTEYLSSAFVGLSFPTVCELCFVKLKLLMIAIEYKSANRESRILINPGNHLKIQEGTLGFFIASDAKEVKRAFFYCKACHDDITDPKRIKKCGCKRPKMSIYKRMRRACCFDCGRSERDCSCMSGRVRGNVDTLERAFPLSSVSVNDCSTSFRAFEDEQPSTLSPKKKQRNGGMRNSPNTSPKLMRHDPLLIPGNDQIDNMDSNVKKYDSTGMFHWCAPKEIEKVILTRSEAAMTVLSGHVVVCIFGDVSSALIGLRNLVMPLRASNFHYHELKHIVFVGSIEYLKREWETLHNFPKVSILPGTPLSRADLRAVNINLCDMCVILSANQNNIDDTSLQDKECILASLNIKSMQFDDSIGVLQANSQGFTPPGMDRSSPDNSPVHGMLRQPSITTGVNIPIITELVNDTNVQFLDQDDDDDPDTELYLTQPFACGTAFAVSVLDSLMSATYFNDNILTLIRTLVTGGATPELEALIAEENALRGGYSTPQTLANRDRCRVAQLALLDGPFADLGDGGCYGDLFCKALKTYNMLCFGIYRLRDAHLSTPSQCTKRYVITNPPYEFELVPTDLIFCLMQFDHNAGQSRASLSHSSHSSQSSSKKSSSVHSIPSTANRQNRPKSRESRDKQNATRMNRMGQEKKWFTDEPDNAYPRNIQIKPMSTHMANQINQYKSTSSLIPPIREVEDEC

SEQ ID NO: 13771 - protein, 1114 aa, Artificial Sequence
  Synthetic polypeptide
PRGTEAQKINNGSSQADGTLKPVDEKEEAVAAEVGWMTSVKDWAGVMISAQTLTGRVLVVLVFALSIGALVIYFIDSSNPIESCQNFYKDFTLQIDMAFNVFFLLYFGLRFIAANDKLWFWLEVNSVVDFFTVPPVFVSVYLNRSWLGLRFLRALRLIQFSEILQFLNILKTSNSIKLVNLLSIFISTWLTAAGFIHLVENSGDPWENFQNNQALTYWECVYLLMVTMSTVGYGDVYAKTTLGRLFMVFFILGGLAMFASYVPEIIELIGNRKKYGGSYSAVSGRKHIVVCGHITLESVSNFLKDFLHKDRDDVNVEIVFLHNISPNLELEALFKRHFTQVEFYQGSVLNPHDLARVKIESADACLILANKYCADPDAEDASNIMRVISIKNYHPKIRIITQMLQYHNKAHLLNIPSWNWKEGDDAICLAELKLGFIAQSCLAQGLSTMLANLFSMRSFIKIEEDTWQKYYLEGVSNEMYTEYLSSAFVGLSFPTVCELCFVKLKLLMIAIEYKSANRESRILINPGNHLKIQEGTLGFFIASDAKEVKRAFFYCKACHDDITDPKRIKKCGCKRPKMSIYKRMRRACCFDCGRSERDCSCMSGRVRGNVDTLERAFPLSSVSVNDCSTSFRAFEDEQPSTLSPKKKQRNGGMRNSPNTSPKLMRHDPLLIPGNDQIDNMDSNVKKYDSTGMFHWCAPKEIEKVILTRSEAAMTVLSGHVVVCIFGDVSSALIGLRNLVMPLRASNFHYHELKHIVFVGSIEYLKREWETLHNFPKVSILPGTPLSRADLRAVNINLCDMCVILSANQNNIDDTSLQDKECILASLNIKSMQFDDSIGVLQANSQGFTPPGMDRSSPDNSPVHGMLRQPSITTGVNIPIITELVNDTNVQFLDQDDDDDPDTELYLTQPFACGTAFAVSVLDSLMSATYFNDNILTLIRTLVTGGATPELEALIAEENALRGGYSTPQTLANRDRCRVAQLALLDGPFADLGDGGCYGDLFCKALKTYNMLCFGIYRLRDAHLSTPSQCTKRYVITNPPYEFELVPTDLIFCLMQFDHNAGQSRASLSHSSHSSQSSSKKSSSVHSIPSTANRQNRPKSRESRDKQNRKEMVYR

SEQ ID NO: 13772 - protein, 1117 aa, Artificial Sequence
  Synthetic polypeptide
PRGTEAQKINNGSSQADGTLKPVDEKEEAVAAEVGWMTSVKDWAGVMISAQTLTGRVLVVLVFALSIGALVIYFIDSSNPIESCQNFYKDFTLQIDMAFNVFFLLYFGLRFIAANDKLWFWLEVNSVVDFFTVPPVFVSVYLNRSWLGLRFLRALRLIQFSEILQFLNILKTSNSIKLVNLLSIFISTWLTAAGFIHLVENSGDPWENFQNNQALTYWECVYLLMVTMSTVGYGDVYAKTTLGRLFMVFFILGGLAMFASYVPEIIELIGNRKKYGGSYSAVSGRKHIVVCGHITLESVSNFLKDFLHKDRDDVNVEIVFLHNISPNLELEALFKRHFTQVEFYQGSVLNPHDLARVKIESADACLILANKYCADPDAEDASNIMRVISIKNYHPKIRIITQMLQYHNKAHLLNIPSWNWKEGDDAICLAELKLGFIAQSCLAQGLSTMLANLFSMRSFIKIEEDTWQKYYLEGVSNEMYTEYLSSAFVGLSFPTVCELCFVKLKLLMIAIEYKSANRESRILINPGNHLKIQEGTLGFFIASDAKEVKRAFFYCKACHDDITDPKRIKKCGCKRRWEEHCSLWRLESKGNVRRLNYCRGQQTFSVKVKVAARSRYSKDPFEFKKETPNSRLVTEPVEDEQPSTLSPKKKQRNGGMRNSPNTSPKLMRHDPLLIPGNDQIDNMDSNVKKYDSTGMFHWCAPKEIEKVILTRSEAAMTVLSGHVVVCIFGDVSSALIGLRNLVMPLRASNFHYHELKHIVFVGSIEYLKREWETLHNFPKVSILPGTPLSRADLRAVNINLCDMCVILSANQNNIDDTSLQDKECILASLNIKSMQFDDSIGVLQANSQGFTPPGMDRSSPDNSPVHGMLRQPSITTGVNIPIITELVNDTNVQFLDQDDDDDPDTELYLTQPFACGTAFAVSVLDSLMSATYFNDNILTLIRTLVTGGATPELEALIAEENALRGGYSTPQTLANRDRCRVAQLALLDGPFADLGDGGCYGDLFCKALKTYNMLCFGIYRLRDAHLSTPSQCTKRYVITNPPYEFELVPTDLIFCLMQFDHNAGQSRASLSHSSHSSQSSSKKSSSVHSIPSTANRQNRPKSRESRDKQKYVQEERL

SEQ ID NO: 13773 - protein, 1142 aa, Artificial Sequence
  Synthetic polypeptide
GTLPPNPHSSLSCRHVKDLASPLPCTMIEAQKINNGSSQADGTLKPVDEKEEAVAAEVGWMTSVKDWAGVMISAQTLTGRVLVVLVFALSIGALVIYFIDSSNPIESCQNFYKDFTLQIDMAFNVFFLLYFGLRFIAANDKLWFWLEVNSVVDFFTVPPVFVSVYLNRSWLGLRFLRALRLIQFSEILQFLNILKTSNSIKLVNLLSIFISTWLTAAGFIHLVENSGDPWENFQNNQALTYWECVYLLMVTMSTVGYGDVYAKTTLGRLFMVFFILGGLAMFASYVPEIIELIGNRKKYGGSYSAVSGRKHIVVCGHITLESVSNFLKDFLHKDRDDVNVEIVFLHNISPNLELEALFKRHFTQVEFYQGSVLNPHDLARVKIESADACLILANKYCADPDAEDASNIMRVISIKNYHPKIRIITQMLQYHNKAHLLNIPSWNWKEGDDAICLAELKLGFIAQSCLAQGLSTMLANLFSMRSFIKIEEDTWQKYYLEGVSNEMYTEYLSSAFVGLSFPTVCELCFVKLKLLMIAIEYKSANRESRGRLSILINPGNHLKIQEGTLGFFIASDAKEVKRAFFYCKACHDDITDPKRIKKCGCKRPKMSIYKRMRRACCFDCGRSERDCSCMSGRVRGNVDTLERAFPLSSVSVNDCSTSFRAFEDEQPSTLSPKKKQRNGGMRNSPNTSPKLMRHDPLLIPGNDQIDNMDSNVKKYDSTGMFHWCAPKEIEKVILTRSEAAMTVLSGHVVVCIFGDVSSALIGLRNLVMPLRASNFHYHELKHIVFVGSIEYLKREWETLHNFPKVSILPGTPLSRADLRAVNINLCDMCVILSANQNNIDDTSLQDKECILASLNIKSMQFDDSIGVLQANSQGFTPPGMDRSSPDNSPVHGMLRQPSITTGVNIPIITELVNDTNVQFLDQDDDDDPDTELYLTQPFACGTAFAVSVLDSLMSATYFNDNILTLIRTLVTGGATPELEALIAEENALRGGYSTPQTLANRDRCRVAQLALLDGPFADLGDGGCYGDLFCKALKTYNMLCFGIYRLRDAHLSTPSQCTKRYVITNPPYEFELVPTDLIFCLMQFDHNAGQSRASLSHSSHSSQSSSKKSSSVHSIPSTANRQNRPKSRESRDKQKYVQEERL

SEQ ID NO: 13774 - protein, 1107 aa, Artificial Sequence
  Synthetic polypeptide
GTLPPNPHSSLSCRHVKDLASPLPCTMIEAQKINNGSSQADGTLKPVDEKEEAVAAEVGWMTSVKDWAGVMISAQTLTGRVLVVLVFALSIGALVIYFIDSSNPIESCQNFYKDFTLQIDMAFNVFFLLYFGLRFIAANDKLWFWLEVNSVVDFFTVPPVFVSVYLNRSWLGLRFLRALRLIQFSEILQFLNILKTSNSIKLVNLLSIFISTWLTAAGFIHLVENSGDPWENFQNNQALTYWECVYLLMVTMSTVGYGDVYAKTTLGRLFMVFFILGGLAMFASYVPEIIELIGNRKKYGGSYSAVSGRKHIVVCGHITLESVSNFLKDFLHKDRDDVNVEIVFLHNISPNLELEALFKRHFTQVEFYQGSVLNPHDLARVKIESADACLILANKYCADPDAEDASNIMRVISIKNYHPKIRIITQMLQYHNKAHLLNIPSWNWKEGDDAICLAELKLGFIAQSCLAQGLSTMLANLFSMRSFIKIEEDTWQKYYLEGVSNEMYTEYLSSAFVGLSFPTVCELCFVKLKLLMIAIEYKSANRESRILINPGNHLKIQEGTLGFFIASDAKEVKRAFFYCKACHDDITDPKRIKKCGCKRLEDEQPSTLSPKKKQRNGGMRNSPNTSPKLMRHDPLLIPGNDQIDNMDSNVKKYDSTGMFHWCAPKEIEKVILTRSEAAMTVLSGHVVVCIFGDVSSALIGLRNLVMPLRASNFHYHELKHIVFVGSIEYLKREWETLHNFPKVSILPGTPLSRADLRAVNINLCDMCVILSANQNNIDDTSLQDKECILASLNIKSMQFDDSIGVLQANSQGFTPPGMDRSSPDNSPVHGMLRQPSITTGVNIPIITELAKPGKLPLVSVNQEKNSGTHILMITELVNDTNVQFLDQDDDDDPDTELYLTQPFACGTAFAVSVLDSLMSATYFNDNILTLIRTLVTGGATPELEALIAEENALRGGYSTPQTLANRDRCRVAQLALLDGPFADLGDGGCYGDLFCKALKTYNMLCFGIYRLRDAHLSTPSQCTKRYVITNPPYEFELVPTDLIFCLMQFDHNAGQSRASLSHSSHSSQSSSKKSSSVHSIPSTANRQNRPKSRESRDKQNRKEMVYR

SEQ ID NO: 13775 - protein, 1079 aa, Artificial Sequence
  Synthetic polypeptide
GTLPPNPHSSLSCRHVKDLASPLPCTMIEAQKINNGSSQADGTLKPVDEKEEAVAAEVGWMTSVKDWAGVMISAQTLTGRVLVVLVFALSIGALVIYFIDSSNPIESCQNFYKDFTLQIDMAFNVFFLLYFGLRFIAANDKLWFWLEVNSVVDFFTVPPVFVSVYLNRSWLGLRFLRALRLIQFSEILQFLNILKTSNSIKLVNLLSIFISTWLTAAGFIHLVENSGDPWENFQNNQALTYWECVYLLMVTMSTVGYGDVYAKTTLGRLFMVFFILGGLAMFASYVPEIIELIGNRKKYGGSYSAVSGRKHIVVCGHITLESVSNFLKDFLHKDRDDVNVEIVFLHNISPNLELEALFKRHFTQVEFYQGSVLNPHDLARVKIESADACLILANKYCADPDAEDASNIMRVISIKNYHPKIRIITQMLQYHNKAHLLNIPSWNWKEGDDAICLAELKLGFIAQSCLAQGLSTMLANLFSMRSFIKIEEDTWQKYYLEGVSNEMYTEYLSSAFVGLSFPTVCELCFVKLKLLMIAIEYKSANRESRILINPGNHLKIQEGTLGFFIASDAKEVKRAFFYCKACHDDITDPKRIKKCGCKRLEDEQPSTLSPKKKQRNGGMRNSPNTSPKLMRHDPLLIPGNDQIDNMDSNVKKYDSTGMFHWCAPKEIEKVILTRSEAAMTVLSGHVVVCIFGDVSSALIGLRNLVMPLRASNFHYHELKHIVFVGSIEYLKREWETLHNFPKVSILPGTPLSRADLRAVNINLCDMCVILSANQNNIDDTSLQDKECILASLNIKSMQFDDSIGVLQANSQGFTPPGMDRSSPDNSPVHGMLRQPSITTGVNIPIITELVNDTNVQFLDQDDDDDPDTELYLTQPFACGTAFAVSVLDSLMSATYFNDNILTLIRTLVTGGATPELEALIAEENALRGGYSTPQTLANRDRCRVAQLALLDGPFADLGDGGCYGDLFCKALKTYNMLCFGIYRLRDAHLSTPSQCTKRYVITNPPYEFELVPTDLIFCLMQFDHNAGQSRASLSHSSHSSQSSSKKSSSVHSIPSTANRQNRPKSRESRDKQKKEMVYR

SEQ ID NO: 13776 - protein, 1080 aa, Artificial Sequence
  Synthetic polypeptide
GTLPPNPHSSLSCRHVKDLASPLPCTMIEAQKINNGSSQADGTLKPVDEKEEAVAAEVGWMTSVKDWAGVMISAQTLTGRVLVVLVFALSIGALVIYFIDSSNPIESCQNFYKDFTLQIDMAFNVFFLLYFGLRFIAANDKLWFWLEVNSVVDFFTVPPVFVSVYLNRSWLGLRFLRALRLIQFSEILQFLNILKTSNSIKLVNLLSIFISTWLTAAGFIHLVENSGDPWENFQNNQALTYWECVYLLMVTMSTVGYGDVYAKTTLGRLFMVFFILGGLAMFASYVPEIIELIGNRKKYGGSYSAVSGRKHIVVCGHITLESVSNFLKDFLHKDRDDVNVEIVFLHNISPNLELEALFKRHFTQVEFYQGSVLNPHDLARVKIESADACLILANKYCADPDAEDASNIMRVISIKNYHPKIRIITQMLQYHNKAHLLNIPSWNWKEGDDAICLAELKLGFIAQSCLAQGLSTMLANLFSMRSFIKIEEDTWQKYYLEGVSNEMYTEYLSSAFVGLSFPTVCELCFVKLKLLMIAIEYKSANRESRILINPGNHLKIQEGTLGFFIASDAKEVKRAFFYCKACHDDITDPKRIKKCGCKRLEDEQPSTLSPKKKQRNGGMRNSPNTSPKLMRHDPLLIPGNDQIDNMDSNVKKYDSTGMFHWCAPKEIEKVILTRSEAAMTVLSGHVVVCIFGDVSSALIGLRNLVMPLRASNFHYHELKHIVFVGSIEYLKREWETLHNFPKVSILPGTPLSRADLRAVNINLCDMCVILSANQNNIDDTSLQDKECILASLNIKSMQFDDSIGVLQANSQGFTPPGMDRSSPDNSPVHGMLRQPSITTGVNIPIITELVNDTNVQFLDQDDDDDPDTELYLTQPFACGTAFAVSVLDSLMSATYFNDNILTLIRTLVTGGATPELEALIAEENALRGGYSTPQTLANRDRCRVAQLALLDGPFADLGDGGCYGDLFCKALKTYNMLCFGIYRLRDAHLSTPSQCTKRYVITNPPYEFELVPTDLIFCLMQFDHNAGQSRASLSHSSHSSQSSSKKSSSVHSIPSTANRQNRPKSRESRDKQKYVQEERL

SEQ ID NO: 13777 - protein, 1133 aa, Artificial Sequence
  Synthetic polypeptide
GTLPPNPHSSLSCRHVKDLASPLPCTMIEAQKINNGSSQADGTLKPVDEKEEAVAAEVGWMTSVKDWAGVMISAQTLTGRVLVVLVFALSIGALVIYFIDSSNPIESCQNFYKDFTLQIDMAFNVFFLLYFGLRFIAANDKLWFWLEVNSVVDFFTVPPVFVSVYLNRSWLGLRFLRALRLIQFSEILQFLNILKTSNSIKLVNLLSIFISTWLTAAGFIHLVENSGDPWENFQNNQALTYWECVYLLMVTMSTVGYGDVYAKTTLGRLFMVFFILGGLAMFASYVPEIIELIGNRKKYGGSYSAVSGRKHIVVCGHITLESVSNFLKDFLHKDRDDVNVEIVFLHNISPNLELEALFKRHFTQVEFYQGSVLNPHDLARVKIESADACLILANKYCADPDAEDASNIMRVISIKNYHPKIRIITQMLQYHNKAHLLNIPSWNWKEGDDAICLAELKLGFIAQSCLAQGLSTMLANLFSMRSFIKIEEDTWQKYYLEGVSNEMYTEYLSSAFVGLSFPTVCELCFVKLKLLMIAIEYKSANRESRILINPGNHLKIQEGTLGFFIASDAKEVKRAFFYCKACHDDITDPKRIKKCGCKRLEDEQPSTLSPKKKQRNGGMRNSPNTSPKLMRHDPLLIPGNDQIDNMDSNVKKYDSTGMFHWCAPKEIEKVILTRSEAAMTVLSGHVVVCIFGDVSSALIGLRNLVMPLRASNFHYHELKHIVFVGSIEYLKREWETLHNFPKVSILPGTPLSRADLRAVNINLCDMCVILSANQNNIDDTSLQDKECILASLNIKSMQFDDSIGVLQANSQGFTPPGMDRSSPDNSPVHGMLRQPSITTGVNIPIITELVNDTNVQFLDQDDDDDPDTELYLTQPFACGTAFAVSVLDSLMSATYFNDNILTLIRTLVTGGATPELEALIAEENALRGGYSTPQTLANRDRCRVAQLALLDGPFADLGDGGCYGDLFCKALKTYNMLCFGIYRLRDAHLSTPSQCTKRYVITNPPYEFELVPTDLIFCLMQFDHNAGQSRASLSHSSHSSQSSSKKSSSVHSIPSTANRQNRPKSRESRDKQNATRMNRMGQAEKKWFTDEPDNAYPRNIQIKPMSTHMANQINQYKSTSSLIPPIREVEDEC

SEQ ID NO: 13778 - protein, 1132 aa, Artificial Sequence
  Synthetic polypeptide
GTLPPNPHSSLSCRHVKDLASPLPCTMIEAQKINNGSSQADGTLKPVDEKEEAVAAEVGWMTSVKDWAGVMISAQTLTGRVLVVLVFALSIGALVIYFIDSSNPIESCQNFYKDFTLQIDMAFNVFFLLYFGLRFIAANDKLWFWLEVNSVVDFFTVPPVFVSVYLNRSWLGLRFLRALRLIQFSEILQFLNILKTSNSIKLVNLLSIFISTWLTAAGFIHLVENSGDPWENFQNNQALTYWECVYLLMVTMSTVGYGDVYAKTTLGRLFMVFFILGGLAMFASYVPEIIELIGNRKKYGGSYSAVSGRKHIVVCGHITLESVSNFLKDFLHKDRDDVNVEIVFLHNISPNLELEALFKRHFTQVEFYQGSVLNPHDLARVKIESADACLILANKYCADPDAEDASNIMRVISIKNYHPKIRIITQMLQYHNKAHLLNIPSWNWKEGDDAICLAELKLGFIAQSCLAQGLSTMLANLFSMRSFIKIEEDTWQKYYLEGVSNEMYTEYLSSAFVGLSFPTVCELCFVKLKLLMIAIEYKSANRESRILINPGNHLKIQEGTLGFFIASDAKEVKRAFFYCKACHDDITDPKRIKKCGCKRLEDEQPSTLSPKKKQRNGGMRNSPNTSPKLMRHDPLLIPGNDQIDNMDSNVKKYDSTGMFHWCAPKEIEKVILTRSEAAMTVLSGHVVVCIFGDVSSALIGLRNLVMPLRASNFHYHELKHIVFVGSIEYLKREWETLHNFPKVSILPGTPLSRADLRAVNINLCDMCVILSANQNNIDDTSLQDKECILASLNIKSMQFDDSIGVLQANSQGFTPPGMDRSSPDNSPVHGMLRQPSITTGVNIPIITELVNDTNVQFLDQDDDDDPDTELYLTQPFACGTAFAVSVLDSLMSATYFNDNILTLIRTLVTGGATPELEALIAEENALRGGYSTPQTLANRDRCRVAQLALLDGPFADLGDGGCYGDLFCKALKTYNMLCFGIYRLRDAHLSTPSQCTKRYVITNPPYEFELVPTDLIFCLMQFDHNAGQSRASLSHSSHSSQSSSKKSSSVHSIPSTANRQNRPKSRESRDKQNATRMNRMGQEKKWFTDEPDNAYPRNIQIKPMSTHMANQINQYKSTSSLIPPIREVEDEC

SEQ ID NO: 13779 - protein, 1080 aa, Artificial Sequence
  Synthetic polypeptide
GTLPPNPHSSLSCRHVKDLASPLPCTMIEAQKINNGSSQADGTLKPVDEKEEAVAAEVGWMTSVKDWAGVMISAQTLTGRVLVVLVFALSIGALVIYFIDSSNPIESCQNFYKDFTLQIDMAFNVFFLLYFGLRFIAANDKLWFWLEVNSVVDFFTVPPVFVSVYLNRSWLGLRFLRALRLIQFSEILQFLNILKTSNSIKLVNLLSIFISTWLTAAGFIHLVENSGDPWENFQNNQALTYWECVYLLMVTMSTVGYGDVYAKTTLGRLFMVFFILGGLAMFASYVPEIIELIGNRKKYGGSYSAVSGRKHIVVCGHITLESVSNFLKDFLHKDRDDVNVEIVFLHNISPNLELEALFKRHFTQVEFYQGSVLNPHDLARVKIESADACLILANKYCADPDAEDASNIMRVISIKNYHPKIRIITQMLQYHNKAHLLNIPSWNWKEGDDAICLAELKLGFIAQSCLAQGLSTMLANLFSMRSFIKIEEDTWQKYYLEGVSNEMYTEYLSSAFVGLSFPTVCELCFVKLKLLMIAIEYKSANRESRILINPGNHLKIQEGTLGFFIASDAKEVKRAFFYCKACHDDITDPKRIKKCGCKRLEDEQPSTLSPKKKQRNGGMRNSPNTSPKLMRHDPLLIPGNDQIDNMDSNVKKYDSTGMFHWCAPKEIEKVILTRSEAAMTVLSGHVVVCIFGDVSSALIGLRNLVMPLRASNFHYHELKHIVFVGSIEYLKREWETLHNFPKVSILPGTPLSRADLRAVNINLCDMCVILSANQNNIDDTSLQDKECILASLNIKSMQFDDSIGVLQANSQGFTPPGMDRSSPDNSPVHGMLRQPSITTGVNIPIITELVNDTNVQFLDQDDDDDPDTELYLTQPFACGTAFAVSVLDSLMSATYFNDNILTLIRTLVTGGATPELEALIAEENALRGGYSTPQTLANRDRCRVAQLALLDGPFADLGDGGCYGDLFCKALKTYNMLCFGIYRLRDAHLSTPSQCTKRYVITNPPYEFELVPTDLIFCLMQFDHNAGQSRASLSHSSHSSQSSSKKSSSVHSIPSTANRQNRPKSRESRDKQNRKEMVYR

SEQ ID NO: 13780 - protein, 1121 aa, Artificial Sequence
  Synthetic polypeptide
GTLPPNPHSSLSCRHVKDLASPLPCTMIEAQKINNGSSQADGTLKPVDEKEEAVAAEVGWMTSVKDWAGVMISAQTLTGRVLVVLVFALSIGALVIYFIDSSNPIESCQNFYKDFTLQIDMAFNVFFLLYFGLRFIAANDKLWFWLEVNSVVDFFTVPPVFVSVYLNRSWLGLRFLRALRLIQFSEILQFLNILKTSNSIKLVNLLSIFISTWLTAAGFIHLVENSGDPWENFQNNQALTYWECVYLLMVTMSTVGYGDVYAKTTLGRLFMVFFILGGLAMFASYVPEIIELIGNRKKYGGSYSAVSGRKHIVVCGHITLESVSNFLKDFLHKDRDDVNVEIVFLHNISPNLELEALFKRHFTQVEFYQGSVLNPHDLARVKIESADACLILANKYCADPDAEDASNIMRVISIKNYHPKIRIITQMLQYHNKAHLLNIPSWNWKEGDDAICLAELKLGFIAQSCLAQGLSTMLANLFSMRSFIKIEEDTWQKYYLEGVSNEMYTEYLSSAFVGLSFPTVCELCFVKLKLLMIAIEYKSANRESRILINPGNHLKIQEGTLGFFIASDAKEVKRAFFYCKACHDDITDPKRIKKCGCKRLEDEQPSTLSPKKKQRNGGMRNSPNTSPKLMRHDPLLIPGNDQIDNMDSNVKKYDSTGMFHWCAPKEIEKVILVTGWMPYLGPRVLMTCLDIGVVCMPTDIQSTSPASIKKFKETRSEAAMTVLSGHVVVCIFGDVSSALIGLRNLVMPLRASNFHYHELKHIVFVGSIEYLKREWETLHNFPKVSILPGTPLSRADLRAVNINLCDMCVILSANQNNIDDTSLQDKECILASLNIKSMQFDDSIGVLQANSQGFTPPGMDRSSPDNSPVHGMLRQPSITTGVNIPIITELVNDTNVQFLDQDDDDDPDTELYLTQPFACGTAFAVSVLDSLMSATYFNDNILTLIRTLVTGGATPELEALIAEENALRGGYSTPQTLANRDRCRVAQLALLDGPFADLGDGGCYGDLFCKALKTYNMLCFGIYRLRDAHLSTPSQCTKRYVITNPPYEFELVPTDLIFCLMQFDHNAGQSRASLSHSSHSSQSSSKKSSSVHSIPSTANRQNRPKSRESRDKQKYVQEERL

SEQ ID NO: 13781 - protein, 1137 aa, Artificial Sequence
  Synthetic polypeptide
GTLPPNPHSSLSCRHVKDLASPLPCTMIEAQKINNGSSQADGTLKPVDEKEEAVAAEVGWMTSVKDWAGVMISAQTLTGRVLVVLVFALSIGALVIYFIDSSNPIESCQNFYKDFTLQIDMAFNVFFLLYFGLRFIAANDKLWFWLEVNSVVDFFTVPPVFVSVYLNRSWLGLRFLRALRLIQFSEILQFLNILKTSNSIKLVNLLSIFISTWLTAAGFIHLVENSGDPWENFQNNQALTYWECVYLLMVTMSTVGYGDVYAKTTLGRLFMVFFILGGLAMFASYVPEIIELIGNRKKYGGSYSAVSGRKHIVVCGHITLESVSNFLKDFLHKDRDDVNVEIVFLHNISPNLELEALFKRHFTQVEFYQGSVLNPHDLARVKIESADACLILANKYCADPDAEDASNIMRVISIKNYHPKIRIITQMLQYHNKAHLLNIPSWNWKEGDDAICLAELKLGFIAQSCLAQGLSTMLANLFSMRSFIKIEEDTWQKYYLEGVSNEMYTEYLSSAFVGLSFPTVCELCFVKLKLLMIAIEYKSANRESRILINPGNHLKIQEGTLGFFIASDAKEVKRAFFYCKACHDDITDPKRIKKCGCKRPKMSIYKRMRRACCFDCGRSERDCSCMSGRVRGNVDTLERAFPLSSVSVNDCSTSFRAFEDEQPSTLSPKKKQRNGGMRNSPNTSPKLMRHDPLLIPGNDQIDNMDSNVKKYDSTGMFHWCAPKEIEKVILTRSEAAMTVLSGHVVVCIFGDVSSALIGLRNLVMPLRASNFHYHELKHIVFVGSIEYLKREWETLHNFPKVSILPGTPLSRADLRAVNINLCDMCVILSANQNNIDDTSLQDKECILASLNIKSMQFDDSIGVLQANSQGFTPPGMDRSSPDNSPVHGMLRQPSITTGVNIPIITELVNDTNVQFLDQDDDDDPDTELYLTQPFACGTAFAVSVLDSLMSATYFNDNILTLIRTLVTGGATPELEALIAEENALRGGYSTPQTLANRDRCRVAQLALLDGPFADLGDGGCYGDLFCKALKTYNMLCFGIYRLRDAHLSTPSQCTKRYVITNPPYEFELVPTDLIFCLMQFDHNAGQSRASLSHSSHSSQSSSKKSSSVHSIPSTANRQNRPKSRESRDKQKKEMVYR

SEQ ID NO: 13782 - protein, 1138 aa, Artificial Sequence
  Synthetic polypeptide
GTLPPNPHSSLSCRHVKDLASPLPCTMIEAQKINNGSSQADGTLKPVDEKEEAVAAEVGWMTSVKDWAGVMISAQTLTGRVLVVLVFALSIGALVIYFIDSSNPIESCQNFYKDFTLQIDMAFNVFFLLYFGLRFIAANDKLWFWLEVNSVVDFFTVPPVFVSVYLNRSWLGLRFLRALRLIQFSEILQFLNILKTSNSIKLVNLLSIFISTWLTAAGFIHLVENSGDPWENFQNNQALTYWECVYLLMVTMSTVGYGDVYAKTTLGRLFMVFFILGGLAMFASYVPEIIELIGNRKKYGGSYSAVSGRKHIVVCGHITLESVSNFLKDFLHKDRDDVNVEIVFLHNISPNLELEALFKRHFTQVEFYQGSVLNPHDLARVKIESADACLILANKYCADPDAEDASNIMRVISIKNYHPKIRIITQMLQYHNKAHLLNIPSWNWKEGDDAICLAELKLGFIAQSCLAQGLSTMLANLFSMRSFIKIEEDTWQKYYLEGVSNEMYTEYLSSAFVGLSFPTVCELCFVKLKLLMIAIEYKSANRESRILINPGNHLKIQEGTLGFFIASDAKEVKRAFFYCKACHDDITDPKRIKKCGCKRPKMSIYKRMRRACCFDCGRSERDCSCMSGRVRGNVDTLERAFPLSSVSVNDCSTSFRAFEDEQPSTLSPKKKQRNGGMRNSPNTSPKLMRHDPLLIPGNDQIDNMDSNVKKYDSTGMFHWCAPKEIEKVILTRSEAAMTVLSGHVVVCIFGDVSSALIGLRNLVMPLRASNFHYHELKHIVFVGSIEYLKREWETLHNFPKVSILPGTPLSRADLRAVNINLCDMCVILSANQNNIDDTSLQDKECILASLNIKSMQFDDSIGVLQANSQGFTPPGMDRSSPDNSPVHGMLRQPSITTGVNIPIITELVNDTNVQFLDQDDDDDPDTELYLTQPFACGTAFAVSVLDSLMSATYFNDNILTLIRTLVTGGATPELEALIAEENALRGGYSTPQTLANRDRCRVAQLALLDGPFADLGDGGCYGDLFCKALKTYNMLCFGIYRLRDAHLSTPSQCTKRYVITNPPYEFELVPTDLIFCLMQFDHNAGQSRASLSHSSHSSQSSSKKSSSVHSIPSTANRQNRPKSRESRDKQKYVQEERL

SEQ ID NO: 13783 - protein, 1190 aa, Artificial Sequence
  Synthetic polypeptide
GTLPPNPHSSLSCRHVKDLASPLPCTMIEAQKINNGSSQADGTLKPVDEKEEAVAAEVGWMTSVKDWAGVMISAQTLTGRVLVVLVFALSIGALVIYFIDSSNPIESCQNFYKDFTLQIDMAFNVFFLLYFGLRFIAANDKLWFWLEVNSVVDFFTVPPVFVSVYLNRSWLGLRFLRALRLIQFSEILQFLNILKTSNSIKLVNLLSIFISTWLTAAGFIHLVENSGDPWENFQNNQALTYWECVYLLMVTMSTVGYGDVYAKTTLGRLFMVFFILGGLAMFASYVPEIIELIGNRKKYGGSYSAVSGRKHIVVCGHITLESVSNFLKDFLHKDRDDVNVEIVFLHNISPNLELEALFKRHFTQVEFYQGSVLNPHDLARVKIESADACLILANKYCADPDAEDASNIMRVISIKNYHPKIRIITQMLQYHNKAHLLNIPSWNWKEGDDAICLAELKLGFIAQSCLAQGLSTMLANLFSMRSFIKIEEDTWQKYYLEGVSNEMYTEYLSSAFVGLSFPTVCELCFVKLKLLMIAIEYKSANRESRILINPGNHLKIQEGTLGFFIASDAKEVKRAFFYCKACHDDITDPKRIKKCGCKRPKMSIYKRMRRACCFDCGRSERDCSCMSGRVRGNVDTLERAFPLSSVSVNDCSTSFRAFEDEQPSTLSPKKKQRNGGMRNSPNTSPKLMRHDPLLIPGNDQIDNMDSNVKKYDSTGMFHWCAPKEIEKVILTRSEAAMTVLSGHVVVCIFGDVSSALIGLRNLVMPLRASNFHYHELKHIVFVGSIEYLKREWETLHNFPKVSILPGTPLSRADLRAVNINLCDMCVILSANQNNIDDTSLQDKECILASLNIKSMQFDDSIGVLQANSQGFTPPGMDRSSPDNSPVHGMLRQPSITTGVNIPIITELVNDTNVQFLDQDDDDDPDTELYLTQPFACGTAFAVSVLDSLMSATYFNDNILTLIRTLVTGGATPELEALIAEENALRGGYSTPQTLANRDRCRVAQLALLDGPFADLGDGGCYGDLFCKALKTYNMLCFGIYRLRDAHLSTPSQCTKRYVITNPPYEFELVPTDLIFCLMQFDHNAGQSRASLSHSSHSSQSSSKKSSSVHSIPSTANRQNRPKSRESRDKQNATRMNRMGQEKKWFTDEPDNAYPRNIQIKPMSTHMANQINQYKSTSSLIPPIREVEDEC

SEQ ID NO: 13784 - protein, 1138 aa, Artificial Sequence
  Synthetic polypeptide
GTLPPNPHSSLSCRHVKDLASPLPCTMIEAQKINNGSSQADGTLKPVDEKEEAVAAEVGWMTSVKDWAGVMISAQTLTGRVLVVLVFALSIGALVIYFIDSSNPIESCQNFYKDFTLQIDMAFNVFFLLYFGLRFIAANDKLWFWLEVNSVVDFFTVPPVFVSVYLNRSWLGLRFLRALRLIQFSEILQFLNILKTSNSIKLVNLLSIFISTWLTAAGFIHLVENSGDPWENFQNNQALTYWECVYLLMVTMSTVGYGDVYAKTTLGRLFMVFFILGGLAMFASYVPEIIELIGNRKKYGGSYSAVSGRKHIVVCGHITLESVSNFLKDFLHKDRDDVNVEIVFLHNISPNLELEALFKRHFTQVEFYQGSVLNPHDLARVKIESADACLILANKYCADPDAEDASNIMRVISIKNYHPKIRIITQMLQYHNKAHLLNIPSWNWKEGDDAICLAELKLGFIAQSCLAQGLSTMLANLFSMRSFIKIEEDTWQKYYLEGVSNEMYTEYLSSAFVGLSFPTVCELCFVKLKLLMIAIEYKSANRESRILINPGNHLKIQEGTLGFFIASDAKEVKRAFFYCKACHDDITDPKRIKKCGCKRPKMSIYKRMRRACCFDCGRSERDCSCMSGRVRGNVDTLERAFPLSSVSVNDCSTSFRAFEDEQPSTLSPKKKQRNGGMRNSPNTSPKLMRHDPLLIPGNDQIDNMDSNVKKYDSTGMFHWCAPKEIEKVILTRSEAAMTVLSGHVVVCIFGDVSSALIGLRNLVMPLRASNFHYHELKHIVFVGSIEYLKREWETLHNFPKVSILPGTPLSRADLRAVNINLCDMCVILSANQNNIDDTSLQDKECILASLNIKSMQFDDSIGVLQANSQGFTPPGMDRSSPDNSPVHGMLRQPSITTGVNIPIITELVNDTNVQFLDQDDDDDPDTELYLTQPFACGTAFAVSVLDSLMSATYFNDNILTLIRTLVTGGATPELEALIAEENALRGGYSTPQTLANRDRCRVAQLALLDGPFADLGDGGCYGDLFCKALKTYNMLCFGIYRLRDAHLSTPSQCTKRYVITNPPYEFELVPTDLIFCLMQFDHNAGQSRASLSHSSHSSQSSSKKSSSVHSIPSTANRQNRPKSRESRDKQNRKEMVYR

SEQ ID NO: 13785 - protein, 1141 aa, Artificial Sequence
  Synthetic polypeptide
GTLPPNPHSSLSCRHVKDLASPLPCTMIEAQKINNGSSQADGTLKPVDEKEEAVAAEVGWMTSVKDWAGVMISAQTLTGRVLVVLVFALSIGALVIYFIDSSNPIESCQNFYKDFTLQIDMAFNVFFLLYFGLRFIAANDKLWFWLEVNSVVDFFTVPPVFVSVYLNRSWLGLRFLRALRLIQFSEILQFLNILKTSNSIKLVNLLSIFISTWLTAAGFIHLVENSGDPWENFQNNQALTYWECVYLLMVTMSTVGYGDVYAKTTLGRLFMVFFILGGLAMFASYVPEIIELIGNRKKYGGSYSAVSGRKHIVVCGHITLESVSNFLKDFLHKDRDDVNVEIVFLHNISPNLELEALFKRHFTQVEFYQGSVLNPHDLARVKIESADACLILANKYCADPDAEDASNIMRVISIKNYHPKIRIITQMLQYHNKAHLLNIPSWNWKEGDDAICLAELKLGFIAQSCLAQGLSTMLANLFSMRSFIKIEEDTWQKYYLEGVSNEMYTEYLSSAFVGLSFPTVCELCFVKLKLLMIAIEYKSANRESRILINPGNHLKIQEGTLGFFIASDAKEVKRAFFYCKACHDDITDPKRIKKCGCKRRWEEHCSLWRLESKGNVRRLNYCRGQQTFSVKVKVAARSRYSKDPFEFKKETPNSRLVTEPVEDEQPSTLSPKKKQRNGGMRNSPNTSPKLMRHDPLLIPGNDQIDNMDSNVKKYDSTGMFHWCAPKEIEKVILTRSEAAMTVLSGHVVVCIFGDVSSALIGLRNLVMPLRASNFHYHELKHIVFVGSIEYLKREWETLHNFPKVSILPGTPLSRADLRAVNINLCDMCVILSANQNNIDDTSLQDKECILASLNIKSMQFDDSIGVLQANSQGFTPPGMDRSSPDNSPVHGMLRQPSITTGVNIPIITELVNDTNVQFLDQDDDDDPDTELYLTQPFACGTAFAVSVLDSLMSATYFNDNILTLIRTLVTGGATPELEALIAEENALRGGYSTPQTLANRDRCRVAQLALLDGPFADLGDGGCYGDLFCKALKTYNMLCFGIYRLRDAHLSTPSQCTKRYVITNPPYEFELVPTDLIFCLMQFDHNAGQSRASLSHSSHSSQSSSKKSSSVHSIPSTANRQNRPKSRESRDKQKYVQEERL

SEQ ID NO: 13786 - protein, 33 aa, Artificial Sequence
  Synthetic polypeptide
LRPRRLTMAQARRMALSNQWMKKRRQWPPRSAG

SEQ ID NO: 13787 - protein, 16 aa, Artificial Sequence
  Synthetic polypeptide
DLGHYREGAVPTTPPH

SEQ ID NO: 13788 - protein, 19 aa, Artificial Sequence
  Synthetic polypeptide
PRALPGRRRPHHPSSLTSK

SEQ ID NO: 13789 - protein, 167 aa, Artificial Sequence
  Synthetic polypeptide
TSGTTGKAPSPPPLLTDQQVNEKVENLSIQLRLMTRERNELRKRLAFATHGTAFDKRPYHRLNPDYERLKIQCVRAMSDLQSLQNQHTNALKRCEEVAKETDFYHTLHSRLLSDQTRLKDDVDMLRRENGQLLRERNLLQQSWEDMKRLHEEDQKEIGDLRAQQQQS

SEQ ID NO: 13790 - protein, 1457 aa, Artificial Sequence
  Synthetic polypeptide
TSGTTGKAPSPPPLLTDQQVNEKVENLSIQLRLMTRERNELRKRLAFATHGTAFDKRPYHRLNPDYERLKIQCVRAMSDLQSLQNQHTNALKRCEEVAKETDFYHTLHSRLLSDQTRLKDDVDMLRRENGQLLRERNLLQQSWEDMKRLHEEDQKEIGDLRAQQQQVLKHNGSSEILNKLYDTAMDKLEVVKKDYDALRKRYSEKVAIHNADLSRLEQLGEENQRLLKQTEMLTQQRDTAIQLQHQCALSLRRFEAIHHELNKATAQNKDLQWEMELLQSELTELRTTQVKTAKESEKYREERDAVYSEYKLIMSERDQVISELDKLQTEVELAESKLKSSTSEKKAANEEMEALRQIKDTVTMDAGRANKEVEILRKQCKALCQELKEALQEADVAKCRRDWAFQERDKIVAERDSIRTLCDNLRRERDRAVSELAEALRSLDDTRKQKNDVSRELKELKEQMESQLEKEARFRQLMAHSSHDSAIDTDSMEWETEVVEFERETEDIDLKALGFDMAEGVNEPCFPGDCGIFVTKVDKGSIADGRLRVNDWLLRINDVDLINKDKKQAIKALLNGEGAINMVVRRRKSLGGKVVTPLHINLSGQKDSGISLENGVYAAAVLPGSPAAKEGSLAVGDRIVAINGIALDNKSLNECESLLRSCQDSLTLSLLKEQKCVPASGELSPELQEWAPYSPGHSSRHSNPPLYPSRPSVGTVPRSLTPSTTVSSILRNPIYTVRSHRVGPCSSPPAARDAGPQGLHPSVQHQGRLSLDLSHRTCSDYSEMRATHGSNSLPSSARLGSSSNLQFKAERIKIPSTPRYPRSVVGSERGSVSHSECSTPPQSPLNIDTLSSCSQSQTSASTLPRIAVNPASLGERRKDRPYVEEPRHVKVQKGSEPLGISIVSGEKGGIYVSKVTVGSIAHQAGLEYGDQLLEFNGINLRSATEQQARLIIGQQCDTITILAQYNPHVHQLSSHSRSSSHLDPAGTHSTLQGSGTTTPEHPSVIDPLMEQDEGPSTPPAKQSSSRIAGDANKKTLEPRVVFIKKSQLELGVHLCGGNLHGVFVAEVEDDSPAKGPDGLVPGDLILEYGSLDVRNKTVEEVYVEMLKPRDGVRLKVQYRPEEFTKAKGLPGDSFYIRALYDRLADVEQELSFKKDDILYVDDTLPQGTFGSWMAWQLDENAQKIQRGQIPSKYVMDQEFSRRLSMSEVKDDNSATKTLSAAARRSFFRRKHKHKRSGSKDGKDLLALDAFSSDSIPLFEDSVSLAYQRVQKVDCTALRPVLILGPLLDVVKEMLVNEAPGKFCRCPLEVMKASQQAIERGVKDCLFVDYKRRSGHFDVTTVASIKEITEKNRHCLLDIAPHAIERLHHMHIYPIVIFIHYKSAKHIKEQRDPIYLRDKVTQRHSKEQFEAAQKLEQEYSRYFTGVIQGGALSSICTQILAMVNQEQNKVLWIPACPL

SEQ ID NO: 13791 - protein, 1797 aa, Artificial Sequence
  Synthetic polypeptide
TSGTTGKAPSPPPLLTDQQVNEKVENLSIQLRLMTRERNELRKRLAFATHGTAFDKRPYHRLNPDYERLKIQCVRAMSDLQSLQNQHTNALKRCEEVAKETDFYHTLHSRLLSDQTRLKDDVDMLRRENGQLLRERNLLQQSWEDMKRLHEEDQKEIGDLRAQQQQVLKHNGSSEILNKLYDTAMDKLEVVKKDYDALRKRYSEKVAIHNADLSRLEQLGEENQRLLKQTEMLTQQRDTAIQLQHQCALSLRRFEAIHHELNKATAQNKDLQWEMELLQSELTELRTTQVKTAKESEKYREERDAVYSEYKLIMSERDQVISELDKLQTEVELAESKLKSSTSEKKAANEEMEALRQIKDTVTMDAGRANKEVEILRKQCKALCQELKEALQEADVAKCRRDWAFQERDKIVAERDSIRTLCDNLRRERDRAVSELAEALRSLDDTRKQKNDVSRELKELKEQMESQLEKEARFRQLMAHSSHDSAIDTDSMEWETEVVEFERETEDIDLKALGFDMAEGVNEPCFPGDCGIFVTKVDKGSIADGRLRVNDWLLRINDVDLINKDKKQAIKALLNGEGAINMVVRRRKSLGGKVVTPLHINLSGQKDSGISLENGVYAAAVLPGSPAAKEGSLAVGDRIVAINGIALDNKSLNECESLLRSCQDSLTLSLLKVFPQSSSWSGQNIFENIKDSDKMLSFRAHGPEVQAHNKRNLIQHNNSTQTDIFYTDRLEDRKEPGPPGGSSSFLHKPFPGGPLQVCPQACPSASERSLSSFRSDASGDRGFGLVDVRGRRPLLPFETEVGPCGVGEASLDKADSEGSNSGGTWPKAMLSSTAVPEKLSVYKKPKQRKSIFDPNTFKRPQTPPKIDYLLPGPGPAHSPQPSKRAGPLTPPKPPRRSDSIKFQHRLETSSESEATLVGSSPSTSPPSALPPDVDPGEPMHASPPRKARVRIASSYYPEGDGDSSHLPAKKSCDEDLTSQKVDELGQKRRRPKSAPSFRPKLAPVVIPAQFLEEQKCVPASGELSPELQEWAPYSPGHSSRHSNPPLYPSRPSVGTVPRSLTPSTTVSSILRNPIYTVRSHRVGPCSSPPAARDAGPQGLHPSVQHQGRLSLDLSHRTCSDYSEMRATHGSNSLPSSARLGSSSNLQFKAERIKIPSTPRYPRSVVGSERGSVSHSECSTPPQSPLNIDTLSSCSQSQTSASTLPRIAVNPASLGERRKDRPYVEEPRHVKVQKGSEPLGISIVSGEKGGIYVSKVTVGSIAHQAGLEYGDQLLEFNGINLRSATEQQARLIIGQQCDTITILAQYNPHVHQLSSHSRSSSHLDPAGTHSTLQGSGTTTPEHPSVIDPLMEQDEGPSTPPAKQSSSRIAGDANKKTLEPRVVFIKKSQLELGVHLCGGNLHGVFVAEVEDDSPAKGPDGLVPGDLILEYGSLDVRNKTVEEVYVEMLKPRDGVRLKVQYRPEEFTKAKGLPGDSFYIRALYDRLADVEQELSFKKDDILYVDDTLPQGTFGSWMAWQLDENAQKIQRGQIPSKYVMDQEFSRRLSMSEVKDDNSATKTLSAAARRSFFRRKHKHKRSGSKDGKDLLALDAFSSDSIPLFEDSVSLAYQRVQKVDCTALRPVLILGPLLDVVKEMLVNEAPGKFCRCPLEVMKASQQAIERGVKDCLFVDYKRRSGHFDVTTVASIKEITEKNRHCLLDIAPHAIERLHHMHIYPIVIFIHYKSAKHIKEQRDPIYLRDKVTQRHSKEQFEAAQKLEQEYSRYFTGVIQGGALSSICTQILAMVNQEQNKVLWIPACPL

SEQ ID NO: 13792 - protein, 251 aa, Artificial Sequence
  Synthetic polypeptide
IRVCIVNKLAGVVFLGVGLWAWSEKGVLSDLTKVTRMHGIDPVVLVLMVGVVMFTLGFAGCVGALRENICLLNFFCGTIVLIFFLELAVAVLAFLFQDWVRDRFREFFESNIKSYRDDIDLQNLIDSLQKANQCCGAYGPEDWDLNVYFNCSGASYSREKCGVPFSCCVPDPAQKVVNTQCGYDVRIQLKSKWDESIFTKGCIQALESWLPRNIYIVAGVFIAISLLQIFGIFLARTLISDIEAVKAGHHF

SEQ ID NO: 13793 - protein, 194 aa, Artificial Sequence
  Synthetic polypeptide
IRVCIVNKLAGVVFLGVGLWAWSEKGVLSDLTKVTRMHGIDPVVLVLMVGVVMFTLGFAGCVGALRENICLLNFNQCCGAYGPEDWDLNVYFNCSGASYSREKCGVPFSCCVPDPAQKVVNTQCGYDVRIQLKSKWDESIFTKGCIQALESWLPRNIYIVAGVFIAISLLQIFGIFLARTLISDIEAVKAGHHF

SEQ ID NO: 13794 - protein, 44 aa, Artificial Sequence
  Synthetic polypeptide
NLEGSPSRSAESEFALLTSWLELSSLESGCGHGAKRVCCPTSPK

SEQ ID NO: 13795 - protein, 67 aa, Artificial Sequence
  Synthetic polypeptide
QVGWSCLPWSRAVGMERKGCAVRPHQSDPDAWNRPCGAGPDGGRGDVHPGVRRLRGGSAGEYLLAQL

SEQ ID NO: 13796 - protein, 124 aa, Artificial Sequence
  Synthetic polypeptide
QVGWSCLPWSRAVGMERKGCAVRPHQSDPDAWNRPCGAGPDGGRGDVHPGVRRLRGGSAGEYLLAQLFLWHHRAHLLPGAGCGRAGLPVPGLGEGPVPGVLREQHQVLPGRYRSAKPHRLPSES

SEQ ID NO: 13797 - protein, 217 aa, Artificial Sequence; identical to SEQ ID NO: 2815
  Synthetic polypeptide

SEQ ID NO: 13798 - protein, 234 aa, Artificial Sequence; identical to SEQ ID NO: 2724
  Synthetic polypeptide

SEQ ID NO: 13799 - protein, 177 aa, Artificial Sequence; identical to SEQ ID NO: 2979
  Synthetic polypeptide

SEQ ID NO: 13800 - protein, 27 aa, Artificial Sequence
  Synthetic polypeptide
NLEGSPSRSAESEFALLTRVCCPTSPK

SEQ ID NO: 13801 - protein, 50 aa, Artificial Sequence
  Synthetic polypeptide
QGCAVRPHQSDPDAWNRPCGAGPDGGRGDVHPGVRRLRGGSAGEYLLAQL

SEQ ID NO: 13802 - protein, 107 aa, Artificial Sequence
  Synthetic polypeptide
QGCAVRPHQSDPDAWNRPCGAGPDGGRGDVHPGVRRLRGGSAGEYLLAQLFLWHHRAHLLPGAGCGRAGLPVPGLGEGPVPGVLREQHQVLPGRYRSAKPHRLPSES

SEQ ID NO: 13803 - protein, 88 aa, Artificial Sequence
  Synthetic polypeptide
GLARWLTSVIPALWEAEAGGSRVGWSCLPWSRAVGMERKGCAVRPHQSDPDAWNRPCGAGPDGGRGDVHPGVRRLRGGSAGEYLLAQL

SEQ ID NO: 13804 - protein, 145 aa, Artificial Sequence
  Synthetic polypeptide
GLARWLTSVIPALWEAEAGGSRVGWSCLPWSRAVGMERKGCAVRPHQSDPDAWNRPCGAGPDGGRGDVHPGVRRLRGGSAGEYLLAQLFLWHHRAHLLPGAGCGRAGLPVPGLGEGPVPGVLREQHQVLPGRYRSAKPHRLPSES

SEQ ID NO: 13805 - protein, 47 aa, Artificial Sequence
  Synthetic polypeptide
PGAVAHICNPSTLGGRGRRITSWLELSSLESGCGHGAKRVCCPTSPK

SEQ ID NO: 13806 - protein, 256 aa, Artificial Sequence
  Synthetic polypeptide
SQHFGRPRQADHELAGVVFLGVGLWAWSEKGVLSDLTKVTRMHGIDPVVLVLMVGVVMFTLGFAGCVGALRENICLLNFFCGTIVLIFFLELAVAVLAFLFQDWVRDRFREFFESNIKSYRDDIDLQNLIDSLQKANQCCGAYGPEDWDLNVYFNCSGASYSREKCGVPFSCCVPDPAQKVVNTQCGYDVRIQLKSKWDESIFTKGCIQALESWLPRNIYIVAGVFIAISLLQIFGIFLARTLISDIEAVKAGHHF

SEQ ID NO: 13807 - protein, 199 aa, Artificial Sequence
  Synthetic polypeptide
SQHFGRPRQADHELAGVVFLGVGLWAWSEKGVLSDLTKVTRMHGIDPVVLVLMVGVVMFTLGFAGCVGALRENICLLNFNQCCGAYGPEDWDLNVYFNCSGASYSREKCGVPFSCCVPDPAQKVVNTQCGYDVRIQLKSKWDESIFTKGCIQALESWLPRNIYIVAGVFIAISLLQIFGIFLARTLISDIEAVKAGHHF

SEQ ID NO: 13808 - protein, 276 aa, Artificial Sequence
  Synthetic polypeptide
GLARWLTSVIPALWEAEAGGSRGQEIKTILANTLAGVVFLGVGLWAWSEKGVLSDLTKVTRMHGIDPVVLVLMVGVVMFTLGFAGCVGALRENICLLNFFCGTIVLIFFLELAVAVLAFLFQDWVRDRFREFFESNIKSYRDDIDLQNLIDSLQKANQCCGAYGPEDWDLNVYFNCSGASYSREKCGVPFSCCVPDPAQKVVNTQCGYDVRIQLKSKWDESIFTKGCIQALESWLPRNIYIVAGVFIAISLLQIFGIFLARTLISDIEAVKAGHHF

SEQ ID NO: 13809 - protein, 219 aa, Artificial Sequence
  Synthetic polypeptide
GLARWLTSVIPALWEAEAGGSRGQEIKTILANTLAGVVFLGVGLWAWSEKGVLSDLTKVTRMHGIDPVVLVLMVGVVMFTLGFAGCVGALRENICLLNFNQCCGAYGPEDWDLNVYFNCSGASYSREKCGVPFSCCVPDPAQKVVNTQCGYDVRIQLKSKWDESIFTKGCIQALESWLPRNIYIVAGVFIAISLLQIFGIFLARTLISDIEAVKAGHHF

SEQ ID NO: 13810 - protein, 67 aa, Artificial Sequence
  Synthetic polypeptide
HVGWSCLPWSRAVGMERKGCAVRPHQSDPDAWNRPCGAGPDGGRGDVHPGVRRLRGGSAGEYLLAQL

SEQ ID NO: 13811 - protein, 124 aa, Artificial Sequence
  Synthetic polypeptide
HVGWSCLPWSRAVGMERKGCAVRPHQSDPDAWNRPCGAGPDGGRGDVHPGVRRLRGGSAGEYLLAQLFLWHHRAHLLPGAGCGRAGLPVPGLGEGPVPGVLREQHQVLPGRYRSAKPHRLPSES

SEQ ID NO: 13812 - protein, 49 aa, Artificial Sequence
  Synthetic polypeptide
SQHFGRPRQADHEVRRSRPSWLTRWLELSSLESGCGHGAKRVCCPTSPK

SEQ ID NO: 13813 - protein, 123 aa, Artificial Sequence; identical to SEQ ID NO: 3347
  Synthetic polypeptide

SEQ ID NO: 13814 - protein, 31 aa, Artificial Sequence; identical to SEQ ID NO: 6410
  Synthetic polypeptide

SEQ ID NO: 13815 - protein, 410 aa, Artificial Sequence; identical to SEQ ID NO: 2227
  Synthetic polypeptide

SEQ ID NO: 13816 - protein, 386 aa, Artificial Sequence; identical to SEQ ID NO: 2266
  Synthetic polypeptide

SEQ ID NO: 13817 - protein, 351 aa, Artificial Sequence; identical to SEQ ID NO: 2348
  Synthetic polypeptide

SEQ ID NO: 13818 - protein, 97 aa, Artificial Sequence; identical to SEQ ID NO: 3659
  Synthetic polypeptide

SEQ ID NO: 13819 - protein, 67 aa, Artificial Sequence; identical to SEQ ID NO: 4318
  Synthetic polypeptide

SEQ ID NO: 13820 - protein, 137 aa, Artificial Sequence
  Synthetic polypeptide
DSFLRNRSSSDHEATAMMKAQFMSLWDGLDTDHSCQALKQREAILKLILKNENVDRHVDLLEVAQETDGFSGSDLKEMCRDAALLCVREYVNSTSEESHDEDEIRPVQQQDLHRAIEKMKKSKDAAFQNVLTHVCLD

SEQ ID NO: 13821 - protein, 93 aa, Artificial Sequence
  Synthetic polypeptide
DSFLRNRSSSDHEATAMMKAQFMSLWDGLDTDHSCQVIVMGATNRPQDLDSAIMRRMPTRFHINQPALKQREAILKLILKNENLRKLKPREVL

SEQ ID NO: 13822 - protein, 167 aa, Artificial Sequence
  Synthetic polypeptide
DSFLRNRSSSDHEATAMMKAQFMSLWDGLDTDHSCQVIVMGATNRPQDLDSAIMRRMPTRFHINQPALKQREAILKLILKNENVDRHVDLLEVAQETDGFSGSDLKEMCRDAALLCVREYVNSTSEESHDEDEIRPVQQQDLHRAIEKMKKSKDAAFQNVLTHVCLD

SEQ ID NO: 13823 - protein, 22 aa, Artificial Sequence
  Synthetic polypeptide
NTVLNYLHSMCIRLLSTKPFKF

SEQ ID NO: 13824 - protein, 50 aa, Artificial Sequence
  Synthetic polypeptide
PHITDCGQTSVKTLFHAQNYVKYCIKLPSFYVYKTPFYETVQVLTMKLQP

SEQ ID NO: 13825 - protein, 27 aa, Artificial Sequence
  Synthetic polypeptide
GQEFKTRLANMAISSSAGHVELMAYRA

SEQ ID NO: 13826 - protein, 44 aa, Artificial Sequence
  Synthetic polypeptide
GRARWLTPIIPALWEAAAGGSPEVRSSRPDWPTWLYRLQRATSS

SEQ ID NO: 13827 - protein, 214 aa, Artificial Sequence
  Synthetic polypeptide
SQHFGRLRRVDHLRSGVQDQTGQHGYIVFSGPRRANGIQGLRFIIQSEKPPHYLESRVEAFLITMEKSIEDMTEEAFQKHIQALAIRRLDKPKKLSAECAKYWGEIISQQYNFDRDNTEVAYLKTLTKEDIIKFYKEMLAVDAPRRHKVSVHVLAREMDSCPVVGEFPCQNDINLSQAPALPQPEVIQNMTEFKRGLPLFPLVKPHINFMAAKL

SEQ ID NO: 13828 - protein, 19 aa, Artificial Sequence
  Synthetic polypeptide
EFETSLDNTPICLCGPLAL

SEQ ID NO: 13829 - protein, 55 aa, Artificial Sequence
  Synthetic polypeptide
HFGKPRQEDRLSLGVRDQPGQHTHLLMWTPCTVTWPICTLSSSKTHSTSMHMQQS

SEQ ID NO: 13830 - protein, 468 aa, Artificial Sequence
  Synthetic polypeptide
LTPVILTFWEAEAGRSLEPRSSRPAWTTHPFAYVDPLHCNMAYLYLELLKDSLNEYAYAAELAGLSYDLQNTIYGMYLSVKGYNDKQPILLKKIIEKMATFEIDEKRFEIIKEAYMRSLNNFRAEQPHQHAMYYLRLLMTEVAWTKDELKEALDDVTLPRLKAFIPQLLSRLHIEALLHGNITKQAALGIMQMVEDTLIEHAHTKPLLPSQLVRYREVQLPDRGWFVYQQRNEVHNNCGIEIYYQTDMQSTSENMFLELFCQIISEPCFNTLRTKEQLGYIVFSGPRRANGIQGLRFIIQSEKPPHYLESRVEAFLITMEKSIEDMTEEAFQKHIQALAIRRLDKPKKLSAECAKYWGEIISQQYNFDRDNTEVAYLKTLTKEDIIKFYKEMLAVDAPRRHKVSVHVLAREMDSCPVVGEFPCQNDINLSQAPALPQPEVIQNMTEFKRGLPLFPLVKPHINFMAAKL

SEQ ID NO: 13831 - protein, 27 aa, Artificial Sequence
  Synthetic polypeptide
GRWITCSQEFRTSLTNKFPKKDLQQNE

SEQ ID NO: 13832 - protein, 241 aa, Artificial Sequence
  Synthetic polypeptide
PTSFQKKTYSKMNNPAIKRIGNHITKSPEDKREYRGLELANGIKVLLISDPTTDKSSAALDVHIGSLSDPPNIAGLSHFCEHMLFLGTKKYPKENEYSQFLSEHAGSSNAFTSGEHTNYYFDVSHEHLEGALDRFAQFFLCPLFDESCKDREVNAVDSEHEKNVMNDAWRLFQLEKATGNPKHPFSKFGTGNKYTLETRPNQEGIDVRQELLKFHSAYYSSNLMAVCVLGRESLDDLTNLV

SEQ ID NO: 13833 - protein, 989 aa, Artificial Sequence
  Synthetic polypeptide
PTSFQKKTYSKMNNPAIKRIGNHITKSPEDKREYRGLELANGIKVLLISDPTTDKSSAALDVHIGSLSDPPNIAGLSHFCEHMLFLGTKKYPKENEYSQFLSEHAGSSNAFTSGEHTNYYFDVSHEHLEGALDRFAQFFLCPLFDESCKDREVNAVDSEHEKNVMNDAWRLFQLEKATGNPKHPFSKFGTGNKYTLETRPNQEGIDVRQELLKFHSAYYSSNLMAVCVLGRESLDDLTNLVVKLFSEVENKNVPLPEFPEHPFQEEHLKQLYKIVPIKDIRNLYVTFPIPDLQKYYKSNPGHYLGHLIGHEGPGSLLSELKSKGWVNTLVGGQKEGARGFMFFIINVDLTEEGLLHVEDIILHMFQYIQKLRAEGPQEWVFQECKDLNAVAFRFKDKERPRGYTSKIAGILHYYPLEEVLTAEYLLEEFRPDLIEMVLDKLRPENVRVAIVSKSFEGKTDRTEEWYGTQYKQEAIPDEVIKKWQNADLNGKFKLPTKNEFIPTNFEILPLEKEATPYPALIKDTAMSKLWFKQDDKFFLPKACLNFEFFSPFAYVDPLHCNMAYLYLELLKDSLNEYAYAAELAGLSYDLQNTIYGMYLSVKGYNDKQPILLKKIIEKMATFEIDEKRFEIIKEAYMRSLNNFRAEQPHQHAMYYLRLLMTEVAWTKDELKEALDDVTLPRLKAFIPQLLSRLHIEALLHGNITKQAALGIMQMVEDTLIEHAHTKPLLPSQLVRYREVQLPDRGWFVYQQRNEVHNNCGIEIYYQTDMQSTSENMFLELFCQIISEPCFNTLRTKEQLGYIVFSGPRRANGIQGLRFIIQSEKPPHYLESRVEAFLITMEKSIEDMTEEAFQKHIQALAIRRLDKPKKLSAECAKYWGEIISQQYNFDRDNTEVAYLKTLTKEDIIKFYKEMLAVDAPRRHKVSVHVLAREMDSCPVVGEFPCQNDINLSQAPALPQPEVIQNMTEFKRGLPLFPLVKPHINFMAAKL

SEQ ID NO: 13834 - protein, 33 aa, Artificial Sequence
  Synthetic polypeptide
SQHFGRMRQVDHLQSGVQDQPDQQVSKKRLTAK

SEQ ID NO: 13835 - protein, 17 aa, Artificial Sequence
  Synthetic polypeptide
EHLDTGHRTACLTSSSG

SEQ ID NO: 13836 - protein, 1043 aa, Artificial Sequence; identical to SEQ ID NO: 1538
  Synthetic polypeptide

SEQ ID NO: 13837 - protein, 1292 aa, Artificial Sequence; identical to SEQ ID NO: 1490
  Synthetic polypeptide

SEQ ID NO: 13838 - protein, 1302 aa, Artificial Sequence; identical to SEQ ID NO: 1483
  Synthetic polypeptide

SEQ ID NO: 13839 - protein, 1302 aa, Artificial Sequence; identical to SEQ ID NO: 1485
  Synthetic polypeptide

SEQ ID NO: 13840 - protein, 51 aa, Artificial Sequence; identical to SEQ ID NO: 5115
  Synthetic polypeptide

SEQ ID NO: 13841 - protein, 63 aa, Artificial Sequence; identical to SEQ ID NO: 4538
  Synthetic polypeptide

SEQ ID NO: 13842 - protein, 45 aa, Artificial Sequence; identical to SEQ ID NO: 5431
  Synthetic polypeptide

SEQ ID NO: 13843 - protein, 42 aa, Artificial Sequence
  Synthetic polypeptide
SQHFGRLSKHRRNRGRLCSNVWTLLPESLWKPQRVHGIPRPL

SEQ ID NO: 13844 - protein, 1566 aa, Artificial Sequence
  Synthetic polypeptide
VNTGETEVGFVPTFGPCYLNLYGSPREYTGFPDPYDELNTGKGEGVAYRGRILVELATFLEKTPPDKKLEPISNDDLLVVEKYQRRRKYSLSAVFHSATMLQDVGEAIQFEVSIGNYGNKFDTTCKPLASTTQYSRAVFDGNYYYYLPWAHTKPVVTLTSYWEDISHRLDAVNTLLAMAERLQTNIEALKSGIQGKIPANQLAELWLKLIDEVIEDTRYTLPLTEGKANVTVLDTQIRKLRSRSLSQIHEAAVRMRSEATDVKSTLAEIEDWLDKLMQLTEEPQNSMPDIIIWMIRGEKRLAYARIPAHQVLYSTSGENASGKYCGKTQTIFLKYPQEKNNGPKVPVELRVNIWLGLSAVEKKFNSFAEGTFTVFAEMYENQALMFGKWGTSGLVGRHKFSDVTGKIKLKREFFLPPKGWEWEGEWIVDPERSLLTEADAGHTEFTDEVYQNESRYPGGDWKPAEDTYTDANGDKAASPSELTCPPGWEWEDDAWSYDINRAVDEKGWEYGITIPPDHKPKSWVAAEKMYHTHRRRRLVRKRKKDLTQTASSTARAMEELQDQEGWEYASLIGWKFHWKQRSSDTFRRRRWRRKMAPSETHGAAAIFKLEGALGADTTEDGDEKSLEKQKHSATTVFGANTPIVSCNFDRVYIYHLRCYVYQARNLLALDKDSFSDPYAHICFLHRSKTTEIIHSTLNPTWDQTIIFDEVEIYGEPQTVLQNPPKVIMELFDNDQVGKDEFLGRSIFSPVVKLNSEMDITPKLLWHPVMNGDKACGDVLVTAELILRGKDGSNLPILPPQRAPNLYMVPQGIRPVVQLTAIEILAWGLRNMKNFQMASITSPSLVVECGGERVESVVIKNLKKTPNFPSSVLFMKVFLPKEELYMPPLVIKVIDHRQFGRKPVVGQCTIERLDRFRCDPYAGKEDIVPQLKASLLSAPPCRDIVIEMEDTKPLLASKCLSSMSTALSKMASPATVHVLDEEEEIVDWWSKFYASSGEHEKCGQYIQKGYSKLKIYNCELENVAEFEGLTDFSDTFKLYRGKSDENEDPSVVGEFKGSFRIYPLPDDPSVPAPPRQFRELPDSVPQECTVRIYIVRGLELQPQDNNGLCDPYIKITLGKKVIEDRDHYIPNTLNPVFGRMYELSCYLPQEKDLKISVYDYDTFTRDEKVGETIIDLENRFLSRFGSHCGIPEEYCVSGVNTWRDQLRPTQLLQNVARFKGFPQPILSEDGSRIRYGGRDYSLDEFEANKILHQHLGAPEERLALHILRTQGLVPEHVETRTLHSTFQPNISQRYYLRVIIWNTKDVILDEKSITGEEMSDIYVKGWIPGNEENKQKTDVHYRSLDGEGNFNWRFVFPFDYLPAEQLCIVAKKEHFWSIDQTEFRIPPRLIIQIWDNDKFSLDDYLGFLELDLRHTIIPAKSPEKCRLDMIPDLKAMNPLKAKTASLFEQKSMKGWWPCYAEKDGARVMAGKVEMTLEILNEKEADERPAGKGRDEPNMNPKLDLPNRPETSFLWFTNPCKTMKFIVWRRFKWVIIGLLFLLILLLFVAVLLYSLPNYLSMKIVKPNV

SEQ ID NO: 13845 - protein, 1576 aa, Artificial Sequence
  Synthetic polypeptide
VNTGETEVGFVPTFGPCYLNLYGSPREYTGFPDPYDELNTGKGEGVAYRGRILVELATFLEKTPPDKKLEPISNDDLLVVEKYQRRRKYSLSAVFHSATMLQDVGEAIQFEVSIGNYGNKFDTTCKPLASTTQYSRAVFDGNYYYYLPWAHTKPVVTLTSYWEDISHRLDAVNTLLAMAERLQTNIEALKSGIQGKIPANQLAELWLKLIDEVIEDTRYTLPLTEGKANVTVLDTQIRKLRSRSLSQIHEAAVRMRSEATDVKSTLAEIEDWLDKLMQLTEEPQNSMPDIIIWMIRGEKRLAYARIPAHQVLYSTSGENASGKYCGKTQTIFLKYPQEKNNGPKVPVELRVNIWLGLSAVEKKFNSFAEGTFTVFAEMYENQALMFGKWGTSGLVGRHKFSDVTGKIKLKREFFLPPKGWEWEGEWIVDPERSLLTEADAGHTEFTDEVYQNESRYPGGDWKPAEDTYTDANGDKAASPSELTCPPGWEWEDDAWSYDINRAVDEKGWEYGITIPPDHKPKSWVAAEKMYHTHRRRRLVRKRKKDLTQTASSTARAMEELQDQEGWEYASLIGWKFHWKQRSSDTFRRRRWRRKMAPSETHGAAAIFKLEGALGADTTEDGDEKSLEKQKHSATTVFGANTPIVSCNFDRVYIYHLRCYVYQARNLLALDKDSFSDPYAHICFLHRSKTTEIIHSTLNPTWDQTIIFDEVEIYGEPQTVLQNPPKVIMELFDNDQVGKDEFLGRSIFSPVVKLNSEMDITPKLLWHPVMNGDKACGDVLVTAELILRGKDGSNLPILPPQRAPNLYMVPQGIRPVVQLTAIEILAWGLRNMKNFQMASITSPSLVVECGGERVESVVIKNLKKTPNFPSSVLFMKVFLPKEELYMPPLVIKVIDHRQFGRKPVVGQCTIERLDRFRCDPYAGKEDIVPQLKASLLSAPPCRDIVIEMEDTKPLLASKLTEKEEEIVDWWSKFYASSGEHEKCGQYIQKGYSKLKIYNCELENVAEFEGLTDFSDTFKLYRGKSDENEDPSVVGEFKGSFRIYPLPDDPSVPAPPRQFRELPDSVPQECTVRIYIVRGLELQPQDNNGLCDPYIKITLGKKVIEDRDHYIPNTLNPVFGRMYELSCYLPQEKDLKISVYDYDTFTRDEKVGETIIDLENRFLSRFGSHCGIPEEYCVSGVNTWRDQLRPTQLLQNVARFKGFPQPILSEDGSRIRYGGRDYSLDEFEANKILHQHLGAPEERLALHILRTQGLVPEHVETRTLHSTFQPNISQGKLQMWVDVFPKSLGPPGPPFNITPRKAKKYYLRVIIWNTKDVILDEKSITGEEMSDIYVKGWIPGNEENKQKTDVHYRSLDGEGNFNWRFVFPFDYLPAEQLCIVAKKEHFWSIDQTEFRIPPRLIIQIWDNDKFSLDDYLGFLELDLRHTIIPAKSPEKCRLDMIPDLKAMNPLKAKTASLFEQKSMKGWWPCYAEKDGARVMAGKVEMTLEILNEKEADERPAGKGRDEPNMNPKLDLPNRPETSFLWFTNPCKTMKFIVWRRFKWVIIGLLFLLILLLFVAVLLYSLPNYLSMKIVKPNV

SEQ ID NO: 13846 - protein, 1576 aa, Artificial Sequence
  Synthetic polypeptide
VNTGETEVGFVPTFGPCYLNLYGSPREYTGFPDPYDELNTGKGEGVAYRGRILVELATFLEKTPPDKKLEPISNDDLLVVEKYQRRRKYSLSAVFHSATMLQDVGEAIQFEVSIGNYGNKFDTTCKPLASTTQYSRAVFDGNYYYYLPWAHTKPVVTLTSYWEDISHRLDAVNTLLAMAERLQTNIEALKSGIQGKIPANQLAELWLKLIDEVIEDTRYTLPLTEGKANVTVLDTQIRKLRSRSLSQIHEAAVRMRSEATDVKSTLAEIEDWLDKLMQLTEEPQNSMPDIIIWMIRGEKRLAYARIPAHQVLYSTSGENASGKYCGKTQTIFLKYPQEKNNGPKVPVELRVNIWLGLSAVEKKFNSFAEGTFTVFAEMYENQALMFGKWGTSGLVGRHKFSDVTGKIKLKREFFLPPKGWEWEGEWIVDPERSLLTEADAGHTEFTDEVYQNESRYPGGDWKPAEDTYTDANGDKAASPSELTCPPGWEWEDDAWSYDINRAVDEKGWEYGITIPPDHKPKSWVAAEKMYHTHRRRRLVRKRKKDLTQTASSTARAMEELQDQEGWEYASLIGWKFHWKQRSSDTFRRRRWRRKMAPSETHGAAAIFKLEGALGADTTEDGDEKSLEKQKHSATTVFGANTPIVSCNFDRVYIYHLRCYVYQARNLLALDKDSFSDPYAHICFLHRSKTTEIIHSTLNPTWDQTIIFDEVEIYGEPQTVLQNPPKVIMELFDNDQVGKDEFLGRSIFSPVVKLNSEMDITPKLLWHPVMNGDKACGDVLVTAELILRGKDGSNLPILPPQRAPNLYMVPQGIRPVVQLTAIEILAWGLRNMKNFQMASITSPSLVVECGGERVESVVIKNLKKTPNFPSSVLFMKVFLPKEELYMPPLVIKVIDHRQFGRKPVVGQCTIERLDRFRCDPYAGKEDIVPQLKASLLSAPPCRDIVIEMEDTKPLLASKLVSIEEEIVDWWSKFYASSGEHEKCGQYIQKGYSKLKIYNCELENVAEFEGLTDFSDTFKLYRGKSDENEDPSVVGEFKGSFRIYPLPDDPSVPAPPRQFRELPDSVPQECTVRIYIVRGLELQPQDNNGLCDPYIKITLGKKVIEDRDHYIPNTLNPVFGRMYELSCYLPQEKDLKISVYDYDTFTRDEKVGETIIDLENRFLSRFGSHCGIPEEYCVSGVNTWRDQLRPTQLLQNVARFKGFPQPILSEDGSRIRYGGRDYSLDEFEANKILHQHLGAPEERLALHILRTQGLVPEHVETRTLHSTFQPNISQGKLQMWVDVFPKSLGPPGPPFNITPRKAKKYYLRVIIWNTKDVILDEKSITGEEMSDIYVKGWIPGNEENKQKTDVHYRSLDGEGNFNWRFVFPFDYLPAEQLCIVAKKEHFWSIDQTEFRIPPRLIIQIWDNDKFSLDDYLGFLELDLRHTIIPAKSPEKCRLDMIPDLKAMNPLKAKTASLFEQKSMKGWWPCYAEKDGARVMAGKVEMTLEILNEKEADERPAGKGRDEPNMNPKLDLPNRPETSFLWFTNPCKTMKFIVWRRFKWVIIGLLFLLILLLFVAVLLYSLPNYLSMKIVKPNV

SEQ ID NO: 13847 - protein, 28 aa, Artificial Sequence
  Synthetic polypeptide
SGAAREAWTGRRVEFLPGTATSLLYFGV

SEQ ID NO: 13848 - protein, 421 aa, Artificial Sequence
  Synthetic polypeptide
VARQGKPGLAGELSSYQAPPRACCILEFDLRGIPLDFSSSLGIIVKDFETIGQNKLIGTATVALKDLTGDQSRSLPYKLISLLNEKGQDTGATIDLVIGYDPPSAPHPNDLSGPSVPGMGGDGEEDEGDEDRLDNAVRGPGPKGPVGTVSEAQLARRLTKVKNSRRMLSNKPQDFQIRVRVIEGRQLSGNNIRPVVKVHVCGQTHRTRIKRGNNPFFDELFFYNVNMTPSELMDEIISIRVYNSHSLRADCLMGEFKIDVGFVYDEPGHAVMRKWLLLNDPEDTSSGSKGYMKVSMFVLGTGDEPPPERRDRDNDSDDVESNLLLPAGIALRWVTFLLKIYRAEDIPQMDDAFSQTVKEIFGGNADKKNLVDPFVEVSFAGKKVCTNIIEKNANPEWNQVVNLQIKFPSVCEKIKLTIYDW

SEQ ID NO: 13849 - protein, 2027 aa, Artificial Sequence
  Synthetic polypeptide
VARQGKPGLAGELSSYQAPPRACCILEFDLRGIPLDFSSSLGIIVKDFETIGQNKLIGTATVALKDLTGDQSRSLPYKLISLLNEKGQDTGATIDLVIGYDPPSAPHPNDLSGPSVPGMGGDGEEDEGDEDRLDNAVRGPGPKGPVGTVSEAQLARRLTKVKNSRRMLSNKPQDFQIRVRVIEGRQLSGNNIRPVVKVHVCGQTHRTRIKRGNNPFFDELFFYNVNMTPSELMDEIISIRVYNSHSLRADCLMGEFKIDVGFVYDEPGHAVMRKWLLLNDPEDTSSGSKGYMKVSMFVLGTGDEPPPERRDRDNDSDDVESNLLLPAGIALRWVTFLLKIYRAEDIPQMDDAFSQTVKEIFGGNADKKNLVDPFVEVSFAGKKVCTNIIEKNANPEWNQVVNLQIKFPSVCEKIKLTIYDWDRLTKNDVVGTTYLHLSKIAASGGEVEDFSSSGTGAASYTVNTGETEVGFVPTFGPCYLNLYGSPREYTGFPDPYDELNTGKGEGVAYRGRILVELATFLEKTPPDKKLEPISNDDLLVVEKYQRRRKYSLSAVFHSATMLQDVGEAIQFEVSIGNYGNKFDTTCKPLASTTQYSRAVFDGNYYYYLPWAHTKPVVTLTSYWEDISHRLDAVNTLLAMAERLQTNIEALKSGIQGKIPANQLAELWLKLIDEVIEDTRYTLPLTEGKANVTVLDTQIRKLRSRSLSQIHEAAVRMRSEATDVKSTLAEIEDWLDKLMQLTEEPQNSMPDIIIWMIRGEKRLAYARIPAHQVLYSTSGENASGKYCGKTQTIFLKYPQEKNNGPKVPVELRVNIWLGLSAVEKKFNSFAEGTFTVFAEMYENQALMFGKWGTSGLVGRHKFSDVTGKIKLKREFFLPPKGWEWEGEWIVDPERSLLTEADAGHTEFTDEVYQNESRYPGGDWKPAEDTYTDANGDKAASPSELTCPPGWEWEDDAWSYDINRAVDEKGWEYGITIPPDHKPKSWVAAEKMYHTHRRRRLVRKRKKDLTQTASSTARAMEELQDQEGWEYASLIGWKFHWKQRSSDTFRRRRWRRKMAPSETHGAAAIFKLEGALGADTTEDGDEKSLEKQKHSATTVFGANTPIVSCNFDRVYIYHLRCYVYQARNLLALDKDSFSDPYAHICFLHRSKTTEIIHSTLNPTWDQTIIFDEVEIYGEPQTVLQNPPKVIMELFDNDQVGKDEFLGRSIFSPVVKLNSEMDITPKLLWHPVMNGDKACGDVLVTAELILRGKDGSNLPILPPQRAPNLYMVPQGIRPVVQLTAIEILAWGLRNMKNFQMASITSPSLVVECGGERVESVVIKNLKKTPNFPSSVLFMKVFLPKEELYMPPLVIKVIDHRQFGRKPVVGQCTIERLDRFRCDPYAGKEDIVPQLKASLLSAPPCRDIVIEMEDTKPLLASKCLSSMSTALSKMASPATVHVLDEEEEIVDWWSKFYASSGEHEKCGQYIQKGYSKLKIYNCELENVAEFEGLTDFSDTFKLYRGKSDENEDPSVVGEFKGSFRIYPLPDDPSVPAPPRQFRELPDSVPQECTVRIYIVRGLELQPQDNNGLCDPYIKITLGKKVIEDRDHYIPNTLNPVFGRMYELSCYLPQEKDLKISVYDYDTFTRDEKVGETIIDLENRFLSRFGSHCGIPEEYCVSGVNTWRDQLRPTQLLQNVARFKGFPQPILSEDGSRIRYGGRDYSLDEFEANKILHQHLGAPEERLALHILRTQGLVPEHVETRTLHSTFQPNISQRYYLRVIIWNTKDVILDEKSITGEEMSDIYVKGWIPGNEENKQKTDVHYRSLDGEGNFNWRFVFPFDYLPAEQLCIVAKKEHFWSIDQTEFRIPPRLIIQIWDNDKFSLDDYLGFLELDLRHTIIPAKSPEKCRLDMIPDLKAMNPLKAKTASLFEQKSMKGWWPCYAEKDGARVMAGKVEMTLEILNEKEADERPAGKGRDEPNMNPKLDLPNRPETSFLWFTNPCKTMKFIVWRRFKWVIIGLLFLLILLLFVAVLLYSLPNYLSMKIVKPNV

SEQ ID NO: 13850 - protein, 2037 aa, Artificial Sequence
  Synthetic polypeptide
VARQGKPGLAGELSSYQAPPRACCILEFDLRGIPLDFSSSLGIIVKDFETIGQNKLIGTATVALKDLTGDQSRSLPYKLISLLNEKGQDTGATIDLVIGYDPPSAPHPNDLSGPSVPGMGGDGEEDEGDEDRLDNAVRGPGPKGPVGTVSEAQLARRLTKVKNSRRMLSNKPQDFQIRVRVIEGRQLSGNNIRPVVKVHVCGQTHRTRIKRGNNPFFDELFFYNVNMTPSELMDEIISIRVYNSHSLRADCLMGEFKIDVGFVYDEPGHAVMRKWLLLNDPEDTSSGSKGYMKVSMFVLGTGDEPPPERRDRDNDSDDVESNLLLPAGIALRWVTFLLKIYRAEDIPQMDDAFSQTVKEIFGGNADKKNLVDPFVEVSFAGKKVCTNIIEKNANPEWNQVVNLQIKFPSVCEKIKLTIYDWDRLTKNDVVGTTYLHLSKIAASGGEVEDFSSSGTGAASYTVNTGETEVGFVPTFGPCYLNLYGSPREYTGFPDPYDELNTGKGEGVAYRGRILVELATFLEKTPPDKKLEPISNDDLLVVEKYQRRRKYSLSAVFHSATMLQDVGEAIQFEVSIGNYGNKFDTTCKPLASTTQYSRAVFDGNYYYYLPWAHTKPVVTLTSYWEDISHRLDAVNTLLAMAERLQTNIEALKSGIQGKIPANQLAELWLKLIDEVIEDTRYTLPLTEGKANVTVLDTQIRKLRSRSLSQIHEAAVRMRSEATDVKSTLAEIEDWLDKLMQLTEEPQNSMPDIIIWMIRGEKRLAYARIPAHQVLYSTSGENASGKYCGKTQTIFLKYPQEKNNGPKVPVELRVNIWLGLSAVEKKFNSFAEGTFTVFAEMYENQALMFGKWGTSGLVGRHKFSDVTGKIKLKREFFLPPKGWEWEGEWIVDPERSLLTEADAGHTEFTDEVYQNESRYPGGDWKPAEDTYTDANGDKAASPSELTCPPGWEWEDDAWSYDINRAVDEKGWEYGITIPPDHKPKSWVAAEKMYHTHRRRRLVRKRKKDLTQTASSTARAMEELQDQEGWEYASLIGWKFHWKQRSSDTFRRRRWRRKMAPSETHGAAAIFKLEGALGADTTEDGDEKSLEKQKHSATTVFGANTPIVSCNFDRVYIYHLRCYVYQARNLLALDKDSFSDPYAHICFLHRSKTTEIIHSTLNPTWDQTIIFDEVEIYGEPQTVLQNPPKVIMELFDNDQVGKDEFLGRSIFSPVVKLNSEMDITPKLLWHPVMNGDKACGDVLVTAELILRGKDGSNLPILPPQRAPNLYMVPQGIRPVVQLTAIEILAWGLRNMKNFQMASITSPSLVVECGGERVESVVIKNLKKTPNFPSSVLFMKVFLPKEELYMPPLVIKVIDHRQFGRKPVVGQCTIERLDRFRCDPYAGKEDIVPQLKASLLSAPPCRDIVIEMEDTKPLLASKLTEKEEEIVDWWSKFYASSGEHEKCGQYIQKGYSKLKIYNCELENVAEFEGLTDFSDTFKLYRGKSDENEDPSVVGEFKGSFRIYPLPDDPSVPAPPRQFRELPDSVPQECTVRIYIVRGLELQPQDNNGLCDPYIKITLGKKVIEDRDHYIPNTLNPVFGRMYELSCYLPQEKDLKISVYDYDTFTRDEKVGETIIDLENRFLSRFGSHCGIPEEYCVSGVNTWRDQLRPTQLLQNVARFKGFPQPILSEDGSRIRYGGRDYSLDEFEANKILHQHLGAPEERLALHILRTQGLVPEHVETRTLHSTFQPNISQGKLQMWVDVFPKSLGPPGPPFNITPRKAKKYYLRVIIWNTKDVILDEKSITGEEMSDIYVKGWIPGNEENKQKTDVHYRSLDGEGNFNWRFVFPFDYLPAEQLCIVAKKEHFWSIDQTEFRIPPRLIIQIWDNDKFSLDDYLGFLELDLRHTIIPAKSPEKCRLDMIPDLKAMNPLKAKTASLFEQKSMKGWWPCYAEKDGARVMAGKVEMTLEILNEKEADERPAGKGRDEPNMNPKLDLPNRPETSFLWFTNPCKTMKFIVWRRFKWVIIGLLFLLILLLFVAVLLYSLPNYLSMKIVKPNV

SEQ ID NO: 13851 - protein, 2037 aa, Artificial Sequence
  Synthetic polypeptide
VARQGKPGLAGELSSYQAPPRACCILEFDLRGIPLDFSSSLGIIVKDFETIGQNKLIGTATVALKDLTGDQSRSLPYKLISLLNEKGQDTGATIDLVIGYDPPSAPHPNDLSGPSVPGMGGDGEEDEGDEDRLDNAVRGPGPKGPVGTVSEAQLARRLTKVKNSRRMLSNKPQDFQIRVRVIEGRQLSGNNIRPVVKVHVCGQTHRTRIKRGNNPFFDELFFYNVNMTPSELMDEIISIRVYNSHSLRADCLMGEFKIDVGFVYDEPGHAVMRKWLLLNDPEDTSSGSKGYMKVSMFVLGTGDEPPPERRDRDNDSDDVESNLLLPAGIALRWVTFLLKIYRAEDIPQMDDAFSQTVKEIFGGNADKKNLVDPFVEVSFAGKKVCTNIIEKNANPEWNQVVNLQIKFPSVCEKIKLTIYDWDRLTKNDVVGTTYLHLSKIAASGGEVEDFSSSGTGAASYTVNTGETEVGFVPTFGPCYLNLYGSPREYTGFPDPYDELNTGKGEGVAYRGRILVELATFLEKTPPDKKLEPISNDDLLVVEKYQRRRKYSLSAVFHSATMLQDVGEAIQFEVSIGNYGNKFDTTCKPLASTTQYSRAVFDGNYYYYLPWAHTKPVVTLTSYWEDISHRLDAVNTLLAMAERLQTNIEALKSGIQGKIPANQLAELWLKLIDEVIEDTRYTLPLTEGKANVTVLDTQIRKLRSRSLSQIHEAAVRMRSEATDVKSTLAEIEDWLDKLMQLTEEPQNSMPDIIIWMIRGEKRLAYARIPAHQVLYSTSGENASGKYCGKTQTIFLKYPQEKNNGPKVPVELRVNIWLGLSAVEKKFNSFAEGTFTVFAEMYENQALMFGKWGTSGLVGRHKFSDVTGKIKLKREFFLPPKGWEWEGEWIVDPERSLLTEADAGHTEFTDEVYQNESRYPGGDWKPAEDTYTDANGDKAASPSELTCPPGWEWEDDAWSYDINRAVDEKGWEYGITIPPDHKPKSWVAAEKMYHTHRRRRLVRKRKKDLTQTASSTARAMEELQDQEGWEYASLIGWKFHWKQRSSDTFRRRRWRRKMAPSETHGAAAIFKLEGALGADTTEDGDEKSLEKQKHSATTVFGANTPIVSCNFDRVYIYHLRCYVYQARNLLALDKDSFSDPYAHICFLHRSKTTEIIHSTLNPTWDQTIIFDEVEIYGEPQTVLQNPPKVIMELFDNDQVGKDEFLGRSIFSPVVKLNSEMDITPKLLWHPVMNGDKACGDVLVTAELILRGKDGSNLPILPPQRAPNLYMVPQGIRPVVQLTAIEILAWGLRNMKNFQMASITSPSLVVECGGERVESVVIKNLKKTPNFPSSVLFMKVFLPKEELYMPPLVIKVIDHRQFGRKPVVGQCTIERLDRFRCDPYAGKEDIVPQLKASLLSAPPCRDIVIEMEDTKPLLASKLVSIEEEIVDWWSKFYASSGEHEKCGQYIQKGYSKLKIYNCELENVAEFEGLTDFSDTFKLYRGKSDENEDPSVVGEFKGSFRIYPLPDDPSVPAPPRQFRELPDSVPQECTVRIYIVRGLELQPQDNNGLCDPYIKITLGKKVIEDRDHYIPNTLNPVFGRMYELSCYLPQEKDLKISVYDYDTFTRDEKVGETIIDLENRFLSRFGSHCGIPEEYCVSGVNTWRDQLRPTQLLQNVARFKGFPQPILSEDGSRIRYGGRDYSLDEFEANKILHQHLGAPEERLALHILRTQGLVPEHVETRTLHSTFQPNISQGKLQMWVDVFPKSLGPPGPPFNITPRKAKKYYLRVIIWNTKDVILDEKSITGEEMSDIYVKGWIPGNEENKQKTDVHYRSLDGEGNFNWRFVFPFDYLPAEQLCIVAKKEHFWSIDQTEFRIPPRLIIQIWDNDKFSLDDYLGFLELDLRHTIIPAKSPEKCRLDMIPDLKAMNPLKAKTASLFEQKSMKGWWPCYAEKDGARVMAGKVEMTLEILNEKEADERPAGKGRDEPNMNPKLDLPNRPETSFLWFTNPCKTMKFIVWRRFKWVIIGLLFLLILLLFVAVLLYSLPNYLSMKIVKPNV

SEQ ID NO: 13852 - protein, 2024 aa, Artificial Sequence
  Synthetic polypeptide
VARQGKPGLAGELSSYQAPPRACCILEFDLRGIPLDFSSSLGIIVKDFETIGQNKLIGTATVALKDLTGDQSRSLPYKLISLLNEKGQDTGATIDLVIGYDPPSAPHPNDLSGPSVPGMGGDGEEDEGDEDRLDNAVRGPGPKGPVGTVSEAQLARRLTKVKNSRRMLSNKPQDFQIRVRVIEGRQLSGNNIRPVVKVHVCGQTHRTRIKRGNNPFFDELFFYNVNMTPSELMDEIISIRVYNSHSLRADCLMGEFKIDVGFVYDEPGHAVMRKWLLLNDPEDTSSGSKGYMKVSMFVLGTGDEPPPERRDRDNDSDDVESNLLLPAGIALRWVTFLLKIYRAEDIPQMDDAFSQTVKEIFGGNADKKNLVDPFVEVSFAGKKVCTNIIEKNANPEWNQVVNLQIKFPSVCEKIKLTIYDWDRLTKNDVVGTTYLHLSKIAASGGEVEVNTGETEVGFVPTFGPCYLNLYGSPREYTGFPDPYDELNTGKGEGVAYRGRILVELATFLEKTPPDKKLEPISNDDLLVVEKYQRRRKYSLSAVFHSATMLQDVGEAIQFEVSIGNYGNKFDTTCKPLASTTQYSRAVFDGNYYYYLPWAHTKPVVTLTSYWEDISHRLDAVNTLLAMAERLQTNIEALKSGIQGKIPANQLAELWLKLIDEVIEDTRYTLPLTEGKANVTVLDTQIRKLRSRSLSQIHEAAVRMRSEATDVKSTLAEIEDWLDKLMQLTEEPQNSMPDIIIWMIRGEKRLAYARIPAHQVLYSTSGENASGKYCGKTQTIFLKYPQEKNNGPKVPVELRVNIWLGLSAVEKKFNSFAEGTFTVFAEMYENQALMFGKWGTSGLVGRHKFSDVTGKIKLKREFFLPPKGWEWEGEWIVDPERSLLTEADAGHTEFTDEVYQNESRYPGGDWKPAEDTYTDANGDKAASPSELTCPPGWEWEDDAWSYDINRAVDEKGWEYGITIPPDHKPKSWVAAEKMYHTHRRRRLVRKRKKDLTQTASSTARAMEELQDQEGWEYASLIGWKFHWKQRSSDTFRRRRWRRKMAPSETHGAAAIFKLEGALGADTTEDGDEKSLEKQKHSATTVFGANTPIVSCNFDRVYIYHLRCYVYQARNLLALDKDSFSDPYAHICFLHRSKTTEIIHSTLNPTWDQTIIFDEVEIYGEPQTVLQNPPKVIMELFDNDQVGKDEFLGRSIFSPVVKLNSEMDITPKLLWHPVMNGDKACGDVLVTAELILRGKDGSNLPILPPQRAPNLYMVPQGIRPVVQLTAIEILAWGLRNMKNFQMASITSPSLVVECGGERVESVVIKNLKKTPNFPSSVLFMKVFLPKEELYMPPLVIKVIDHRQFGRKPVVGQCTIERLDRFRCDPYAGKEDIVPQLKASLLSAPPCRDIVIEMEDTKPLLASKLTEKEEEIVDWWSKFYASSGEHEKCGQYIQKGYSKLKIYNCELENVAEFEGLTDFSDTFKLYRGKSDENEDPSVVGEFKGSFRIYPLPDDPSVPAPPRQFRELPDSVPQECTVRIYIVRGLELQPQDNNGLCDPYIKITLGKKVIEDRDHYIPNTLNPVFGRMYELSCYLPQEKDLKISVYDYDTFTRDEKVGETIIDLENRFLSRFGSHCGIPEEYCVSGVNTWRDQLRPTQLLQNVARFKGFPQPILSEDGSRIRYGGRDYSLDEFEANKILHQHLGAPEERLALHILRTQGLVPEHVETRTLHSTFQPNISQGKLQMWVDVFPKSLGPPGPPFNITPRKAKKYYLRVIIWNTKDVILDEKSITGEEMSDIYVKGWIPGNEENKQKTDVHYRSLDGEGNFNWRFVFPFDYLPAEQLCIVAKKEHFWSIDQTEFRIPPRLIIQIWDNDKFSLDDYLGFLELDLRHTIIPAKSPEKCRLDMIPDLKAMNPLKAKTASLFEQKSMKGWWPCYAEKDGARVMAGKVEMTLEILNEKEADERPAGKGRDEPNMNPKLDLPNRPETSFLWFTNPCKTMKFIVWRRFKWVIIGLLFLLILLLFVAVLLYSLPNYLSMKIVKPNV

SEQ ID NO: 13853 - protein, 136 aa, Artificial Sequence
  Synthetic polypeptide
VARQGKPGLAGELSSYQAPPRACCILEFDLRGIPLDFSSSLGIIVKDFETIGQNKLIGTATVALKDLTGDQSRSLPYKLISLLNEKGQDTGATIDLVIGYDPPSAPHPNDLSGPSVPGMGGKLTLLKAQPPPGGGC

SEQ ID NO: 13854 - protein, 16 aa, Artificial Sequence
  Synthetic polypeptide
VLTRHRHELAVFWSLT

SEQ ID NO: 13855 - protein, 23 aa, Artificial Sequence
  Synthetic polypeptide
RQEFETSLANMMRKRKQRKLIMN

SEQ ID NO: 13856 - protein, 440 aa, Artificial Sequence
  Synthetic polypeptide
SQHFGRRRWADHLTSGVRDQPGQHDEKKKTKKVDNELNPVWNEILEFDLRGIPLDFSSSLGIIVKDFETIGQNKLIGTATVALKDLTGDQSRSLPYKLISLLNEKGQDTGATIDLVIGYDPPSAPHPNDLSGPSVPGMGGDGEEDEGDEDRLDNAVRGPGPKGPVGTVSEAQLARRLTKVKNSRRMLSNKPQDFQIRVRVIEGRQLSGNNIRPVVKVHVCGQTHRTRIKRGNNPFFDELFFYNVNMTPSELMDEIISIRVYNSHSLRADCLMGEFKIDVGFVYDEPGHAVMRKWLLLNDPEDTSSGSKGYMKVSMFVLGTGDEPPPERRDRDNDSDDVESNLLLPAGIALRWVTFLLKIYRAEDIPQMDDAFSQTVKEIFGGNADKKNLVDPFVEVSFAGKKVCTNIIEKNANPEWNQVVNLQIKFPSVCEKIKLTIYDW

SEQ ID NO: 13857 - protein, 2046 aa, Artificial Sequence
  Synthetic polypeptide
SQHFGRRRWADHLTSGVRDQPGQHDEKKKTKKVDNELNPVWNEILEFDLRGIPLDFSSSLGIIVKDFETIGQNKLIGTATVALKDLTGDQSRSLPYKLISLLNEKGQDTGATIDLVIGYDPPSAPHPNDLSGPSVPGMGGDGEEDEGDEDRLDNAVRGPGPKGPVGTVSEAQLARRLTKVKNSRRMLSNKPQDFQIRVRVIEGRQLSGNNIRPVVKVHVCGQTHRTRIKRGNNPFFDELFFYNVNMTPSELMDEIISIRVYNSHSLRADCLMGEFKIDVGFVYDEPGHAVMRKWLLLNDPEDTSSGSKGYMKVSMFVLGTGDEPPPERRDRDNDSDDVESNLLLPAGIALRWVTFLLKIYRAEDIPQMDDAFSQTVKEIFGGNADKKNLVDPFVEVSFAGKKVCTNIIEKNANPEWNQVVNLQIKFPSVCEKIKLTIYDWDRLTKNDVVGTTYLHLSKIAASGGEVEDFSSSGTGAASYTVNTGETEVGFVPTFGPCYLNLYGSPREYTGFPDPYDELNTGKGEGVAYRGRILVELATFLEKTPPDKKLEPISNDDLLVVEKYQRRRKYSLSAVFHSATMLQDVGEAIQFEVSIGNYGNKFDTTCKPLASTTQYSRAVFDGNYYYYLPWAHTKPVVTLTSYWEDISHRLDAVNTLLAMAERLQTNIEALKSGIQGKIPANQLAELWLKLIDEVIEDTRYTLPLTEGKANVTVLDTQIRKLRSRSLSQIHEAAVRMRSEATDVKSTLAEIEDWLDKLMQLTEEPQNSMPDIIIWMIRGEKRLAYARIPAHQVLYSTSGENASGKYCGKTQTIFLKYPQEKNNGPKVPVELRVNIWLGLSAVEKKFNSFAEGTFTVFAEMYENQALMFGKWGTSGLVGRHKFSDVTGKIKLKREFFLPPKGWEWEGEWIVDPERSLLTEADAGHTEFTDEVYQNESRYPGGDWKPAEDTYTDANGDKAASPSELTCPPGWEWEDDAWSYDINRAVDEKGWEYGITIPPDHKPKSWVAAEKMYHTHRRRRLVRKRKKDLTQTASSTARAMEELQDQEGWEYASLIGWKFHWKQRSSDTFRRRRWRRKMAPSETHGAAAIFKLEGALGADTTEDGDEKSLEKQKHSATTVFGANTPIVSCNFDRVYIYHLRCYVYQARNLLALDKDSFSDPYAHICFLHRSKTTEIIHSTLNPTWDQTIIFDEVEIYGEPQTVLQNPPKVIMELFDNDQVGKDEFLGRSIFSPVVKLNSEMDITPKLLWHPVMNGDKACGDVLVTAELILRGKDGSNLPILPPQRAPNLYMVPQGIRPVVQLTAIEILAWGLRNMKNFQMASITSPSLVVECGGERVESVVIKNLKKTPNFPSSVLFMKVFLPKEELYMPPLVIKVIDHRQFGRKPVVGQCTIERLDRFRCDPYAGKEDIVPQLKASLLSAPPCRDIVIEMEDTKPLLASKCLSSMSTALSKMASPATVHVLDEEEEIVDWWSKFYASSGEHEKCGQYIQKGYSKLKIYNCELENVAEFEGLTDFSDTFKLYRGKSDENEDPSVVGEFKGSFRIYPLPDDPSVPAPPRQFRELPDSVPQECTVRIYIVRGLELQPQDNNGLCDPYIKITLGKKVIEDRDHYIPNTLNPVFGRMYELSCYLPQEKDLKISVYDYDTFTRDEKVGETIIDLENRFLSRFGSHCGIPEEYCVSGVNTWRDQLRPTQLLQNVARFKGFPQPILSEDGSRIRYGGRDYSLDEFEANKILHQHLGAPEERLALHILRTQGLVPEHVETRTLHSTFQPNISQRYYLRVIIWNTKDVILDEKSITGEEMSDIYVKGWIPGNEENKQKTDVHYRSLDGEGNFNWRFVFPFDYLPAEQLCIVAKKEHFWSIDQTEFRIPPRLIIQIWDNDKFSLDDYLGFLELDLRHTIIPAKSPEKCRLDMIPDLKAMNPLKAKTASLFEQKSMKGWWPCYAEKDGARVMAGKVEMTLEILNEKEADERPAGKGRDEPNMNPKLDLPNRPETSFLWFTNPCKTMKFIVWRRFKWVIIGLLFLLILLLFVAVLLYSLPNYLSMKIVKPNV

SEQ ID NO: 13858 - protein, 2056 aa, Artificial Sequence
  Synthetic polypeptide
SQHFGRRRWADHLTSGVRDQPGQHDEKKKTKKVDNELNPVWNEILEFDLRGIPLDFSSSLGIIVKDFETIGQNKLIGTATVALKDLTGDQSRSLPYKLISLLNEKGQDTGATIDLVIGYDPPSAPHPNDLSGPSVPGMGGDGEEDEGDEDRLDNAVRGPGPKGPVGTVSEAQLARRLTKVKNSRRMLSNKPQDFQIRVRVIEGRQLSGNNIRPVVKVHVCGQTHRTRIKRGNNPFFDELFFYNVNMTPSELMDEIISIRVYNSHSLRADCLMGEFKIDVGFVYDEPGHAVMRKWLLLNDPEDTSSGSKGYMKVSMFVLGTGDEPPPERRDRDNDSDDVESNLLLPAGIALRWVTFLLKIYRAEDIPQMDDAFSQTVKEIFGGNADKKNLVDPFVEVSFAGKKVCTNIIEKNANPEWNQVVNLQIKFPSVCEKIKLTIYDWDRLTKNDVVGTTYLHLSKIAASGGEVEDFSSSGTGAASYTVNTGETEVGFVPTFGPCYLNLYGSPREYTGFPDPYDELNTGKGEGVAYRGRILVELATFLEKTPPDKKLEPISNDDLLVVEKYQRRRKYSLSAVFHSATMLQDVGEAIQFEVSIGNYGNKFDTTCKPLASTTQYSRAVFDGNYYYYLPWAHTKPVVTLTSYWEDISHRLDAVNTLLAMAERLQTNIEALKSGIQGKIPANQLAELWLKLIDEVIEDTRYTLPLTEGKANVTVLDTQIRKLRSRSLSQIHEAAVRMRSEATDVKSTLAEIEDWLDKLMQLTEEPQNSMPDIIIWMIRGEKRLAYARIPAHQVLYSTSGENASGKYCGKTQTIFLKYPQEKNNGPKVPVELRVNIWLGLSAVEKKFNSFAEGTFTVFAEMYENQALMFGKWGTSGLVGRHKFSDVTGKIKLKREFFLPPKGWEWEGEWIVDPERSLLTEADAGHTEFTDEVYQNESRYPGGDWKPAEDTYTDANGDKAASPSELTCPPGWEWEDDAWSYDINRAVDEKGWEYGITIPPDHKPKSWVAAEKMYHTHRRRRLVRKRKKDLTQTASSTARAMEELQDQEGWEYASLIGWKFHWKQRSSDTFRRRRWRRKMAPSETHGAAAIFKLEGALGADTTEDGDEKSLEKQKHSATTVFGANTPIVSCNFDRVYIYHLRCYVYQARNLLALDKDSFSDPYAHICFLHRSKTTEIIHSTLNPTWDQTIIFDEVEIYGEPQTVLQNPPKVIMELFDNDQVGKDEFLGRSIFSPVVKLNSEMDITPKLLWHPVMNGDKACGDVLVTAELILRGKDGSNLPILPPQRAPNLYMVPQGIRPVVQLTAIEILAWGLRNMKNFQMASITSPSLVVECGGERVESVVIKNLKKTPNFPSSVLFMKVFLPKEELYMPPLVIKVIDHRQFGRKPVVGQCTIERLDRFRCDPYAGKEDIVPQLKASLLSAPPCRDIVIEMEDTKPLLASKLTEKEEEIVDWWSKFYASSGEHEKCGQYIQKGYSKLKIYNCELENVAEFEGLTDFSDTFKLYRGKSDENEDPSVVGEFKGSFRIYPLPDDPSVPAPPRQFRELPDSVPQECTVRIYIVRGLELQPQDNNGLCDPYIKITLGKKVIEDRDHYIPNTLNPVFGRMYELSCYLPQEKDLKISVYDYDTFTRDEKVGETIIDLENRFLSRFGSHCGIPEEYCVSGVNTWRDQLRPTQLLQNVARFKGFPQPILSEDGSRIRYGGRDYSLDEFEANKILHQHLGAPEERLALHILRTQGLVPEHVETRTLHSTFQPNISQGKLQMWVDVFPKSLGPPGPPFNITPRKAKKYYLRVIIWNTKDVILDEKSITGEEMSDIYVKGWIPGNEENKQKTDVHYRSLDGEGNFNWRFVFPFDYLPAEQLCIVAKKEHFWSIDQTEFRIPPRLIIQIWDNDKFSLDDYLGFLELDLRHTIIPAKSPEKCRLDMIPDLKAMNPLKAKTASLFEQKSMKGWWPCYAEKDGARVMAGKVEMTLEILNEKEADERPAGKGRDEPNMNPKLDLPNRPETSFLWFTNPCKTMKFIVWRRFKWVIIGLLFLLILLLFVAVLLYSLPNYLSMKIVKPNV

SEQ ID NO: 13859 - protein, 2056 aa, Artificial Sequence
  Synthetic polypeptide
SQHFGRRRWADHLTSGVRDQPGQHDEKKKTKKVDNELNPVWNEILEFDLRGIPLDFSSSLGIIVKDFETIGQNKLIGTATVALKDLTGDQSRSLPYKLISLLNEKGQDTGATIDLVIGYDPPSAPHPNDLSGPSVPGMGGDGEEDEGDEDRLDNAVRGPGPKGPVGTVSEAQLARRLTKVKNSRRMLSNKPQDFQIRVRVIEGRQLSGNNIRPVVKVHVCGQTHRTRIKRGNNPFFDELFFYNVNMTPSELMDEIISIRVYNSHSLRADCLMGEFKIDVGFVYDEPGHAVMRKWLLLNDPEDTSSGSKGYMKVSMFVLGTGDEPPPERRDRDNDSDDVESNLLLPAGIALRWVTFLLKIYRAEDIPQMDDAFSQTVKEIFGGNADKKNLVDPFVEVSFAGKKVCTNIIEKNANPEWNQVVNLQIKFPSVCEKIKLTIYDWDRLTKNDVVGTTYLHLSKIAASGGEVEDFSSSGTGAASYTVNTGETEVGFVPTFGPCYLNLYGSPREYTGFPDPYDELNTGKGEGVAYRGRILVELATFLEKTPPDKKLEPISNDDLLVVEKYQRRRKYSLSAVFHSATMLQDVGEAIQFEVSIGNYGNKFDTTCKPLASTTQYSRAVFDGNYYYYLPWAHTKPVVTLTSYWEDISHRLDAVNTLLAMAERLQTNIEALKSGIQGKIPANQLAELWLKLIDEVIEDTRYTLPLTEGKANVTVLDTQIRKLRSRSLSQIHEAAVRMRSEATDVKSTLAEIEDWLDKLMQLTEEPQNSMPDIIIWMIRGEKRLAYARIPAHQVLYSTSGENASGKYCGKTQTIFLKYPQEKNNGPKVPVELRVNIWLGLSAVEKKFNSFAEGTFTVFAEMYENQALMFGKWGTSGLVGRHKFSDVTGKIKLKREFFLPPKGWEWEGEWIVDPERSLLTEADAGHTEFTDEVYQNESRYPGGDWKPAEDTYTDANGDKAASPSELTCPPGWEWEDDAWSYDINRAVDEKGWEYGITIPPDHKPKSWVAAEKMYHTHRRRRLVRKRKKDLTQTASSTARAMEELQDQEGWEYASLIGWKFHWKQRSSDTFRRRRWRRKMAPSETHGAAAIFKLEGALGADTTEDGDEKSLEKQKHSATTVFGANTPIVSCNFDRVYIYHLRCYVYQARNLLALDKDSFSDPYAHICFLHRSKTTEIIHSTLNPTWDQTIIFDEVEIYGEPQTVLQNPPKVIMELFDNDQVGKDEFLGRSIFSPVVKLNSEMDITPKLLWHPVMNGDKACGDVLVTAELILRGKDGSNLPILPPQRAPNLYMVPQGIRPVVQLTAIEILAWGLRNMKNFQMASITSPSLVVECGGERVESVVIKNLKKTPNFPSSVLFMKVFLPKEELYMPPLVIKVIDHRQFGRKPVVGQCTIERLDRFRCDPYAGKEDIVPQLKASLLSAPPCRDIVIEMEDTKPLLASKLVSIEEEIVDWWSKFYASSGEHEKCGQYIQKGYSKLKIYNCELENVAEFEGLTDFSDTFKLYRGKSDENEDPSVVGEFKGSFRIYPLPDDPSVPAPPRQFRELPDSVPQECTVRIYIVRGLELQPQDNNGLCDPYIKITLGKKVIEDRDHYIPNTLNPVFGRMYELSCYLPQEKDLKISVYDYDTFTRDEKVGETIIDLENRFLSRFGSHCGIPEEYCVSGVNTWRDQLRPTQLLQNVARFKGFPQPILSEDGSRIRYGGRDYSLDEFEANKILHQHLGAPEERLALHILRTQGLVPEHVETRTLHSTFQPNISQGKLQMWVDVFPKSLGPPGPPFNITPRKAKKYYLRVIIWNTKDVILDEKSITGEEMSDIYVKGWIPGNEENKQKTDVHYRSLDGEGNFNWRFVFPFDYLPAEQLCIVAKKEHFWSIDQTEFRIPPRLIIQIWDNDKFSLDDYLGFLELDLRHTIIPAKSPEKCRLDMIPDLKAMNPLKAKTASLFEQKSMKGWWPCYAEKDGARVMAGKVEMTLEILNEKEADERPAGKGRDEPNMNPKLDLPNRPETSFLWFTNPCKTMKFIVWRRFKWVIIGLLFLLILLLFVAVLLYSLPNYLSMKIVKPNV

SEQ ID NO: 13860 - protein, 2043 aa, Artificial Sequence
  Synthetic polypeptide
SQHFGRRRWADHLTSGVRDQPGQHDEKKKTKKVDNELNPVWNEILEFDLRGIPLDFSSSLGIIVKDFETIGQNKLIGTATVALKDLTGDQSRSLPYKLISLLNEKGQDTGATIDLVIGYDPPSAPHPNDLSGPSVPGMGGDGEEDEGDEDRLDNAVRGPGPKGPVGTVSEAQLARRLTKVKNSRRMLSNKPQDFQIRVRVIEGRQLSGNNIRPVVKVHVCGQTHRTRIKRGNNPFFDELFFYNVNMTPSELMDEIISIRVYNSHSLRADCLMGEFKIDVGFVYDEPGHAVMRKWLLLNDPEDTSSGSKGYMKVSMFVLGTGDEPPPERRDRDNDSDDVESNLLLPAGIALRWVTFLLKIYRAEDIPQMDDAFSQTVKEIFGGNADKKNLVDPFVEVSFAGKKVCTNIIEKNANPEWNQVVNLQIKFPSVCEKIKLTIYDWDRLTKNDVVGTTYLHLSKIAASGGEVEVNTGETEVGFVPTFGPCYLNLYGSPREYTGFPDPYDELNTGKGEGVAYRGRILVELATFLEKTPPDKKLEPISNDDLLVVEKYQRRRKYSLSAVFHSATMLQDVGEAIQFEVSIGNYGNKFDTTCKPLASTTQYSRAVFDGNYYYYLPWAHTKPVVTLTSYWEDISHRLDAVNTLLAMAERLQTNIEALKSGIQGKIPANQLAELWLKLIDEVIEDTRYTLPLTEGKANVTVLDTQIRKLRSRSLSQIHEAAVRMRSEATDVKSTLAEIEDWLDKLMQLTEEPQNSMPDIIIWMIRGEKRLAYARIPAHQVLYSTSGENASGKYCGKTQTIFLKYPQEKNNGPKVPVELRVNIWLGLSAVEKKFNSFAEGTFTVFAEMYENQALMFGKWGTSGLVGRHKFSDVTGKIKLKREFFLPPKGWEWEGEWIVDPERSLLTEADAGHTEFTDEVYQNESRYPGGDWKPAEDTYTDANGDKAASPSELTCPPGWEWEDDAWSYDINRAVDEKGWEYGITIPPDHKPKSWVAAEKMYHTHRRRRLVRKRKKDLTQTASSTARAMEELQDQEGWEYASLIGWKFHWKQRSSDTFRRRRWRRKMAPSETHGAAAIFKLEGALGADTTEDGDEKSLEKQKHSATTVFGANTPIVSCNFDRVYIYHLRCYVYQARNLLALDKDSFSDPYAHICFLHRSKTTEIIHSTLNPTWDQTIIFDEVEIYGEPQTVLQNPPKVIMELFDNDQVGKDEFLGRSIFSPVVKLNSEMDITPKLLWHPVMNGDKACGDVLVTAELILRGKDGSNLPILPPQRAPNLYMVPQGIRPVVQLTAIEILAWGLRNMKNFQMASITSPSLVVECGGERVESVVIKNLKKTPNFPSSVLFMKVFLPKEELYMPPLVIKVIDHRQFGRKPVVGQCTIERLDRFRCDPYAGKEDIVPQLKASLLSAPPCRDIVIEMEDTKPLLASKLTEKEEEIVDWWSKFYASSGEHEKCGQYIQKGYSKLKIYNCELENVAEFEGLTDFSDTFKLYRGKSDENEDPSVVGEFKGSFRIYPLPDDPSVPAPPRQFRELPDSVPQECTVRIYIVRGLELQPQDNNGLCDPYIKITLGKKVIEDRDHYIPNTLNPVFGRMYELSCYLPQEKDLKISVYDYDTFTRDEKVGETIIDLENRFLSRFGSHCGIPEEYCVSGVNTWRDQLRPTQLLQNVARFKGFPQPILSEDGSRIRYGGRDYSLDEFEANKILHQHLGAPEERLALHILRTQGLVPEHVETRTLHSTFQPNISQGKLQMWVDVFPKSLGPPGPPFNITPRKAKKYYLRVIIWNTKDVILDEKSITGEEMSDIYVKGWIPGNEENKQKTDVHYRSLDGEGNFNWRFVFPFDYLPAEQLCIVAKKEHFWSIDQTEFRIPPRLIIQIWDNDKFSLDDYLGFLELDLRHTIIPAKSPEKCRLDMIPDLKAMNPLKAKTASLFEQKSMKGWWPCYAEKDGARVMAGKVEMTLEILNEKEADERPAGKGRDEPNMNPKLDLPNRPETSFLWFTNPCKTMKFIVWRRFKWVIIGLLFLLILLLFVAVLLYSLPNYLSMKIVKPNV

SEQ ID NO: 13861 - protein, 155 aa, Artificial Sequence
  Synthetic polypeptide
SQHFGRRRWADHLTSGVRDQPGQHDEKKKTKKVDNELNPVWNEILEFDLRGIPLDFSSSLGIIVKDFETIGQNKLIGTATVALKDLTGDQSRSLPYKLISLLNEKGQDTGATIDLVIGYDPPSAPHPNDLSGPSVPGMGGKLTLLKAQPPPGGGC

SEQ ID NO: 13862 - protein, 28 aa, Artificial Sequence
  Synthetic polypeptide
AQEFDTSLGNIMRPARAKFDFKAQTLKE

SEQ ID NO: 13863 - protein, 529 aa, Artificial Sequence
  Synthetic polypeptide
AQEFDTSLGNIMRPARAKFDFKAQTLKELPLQKGDIVYIYKQIDQNWYEGEHHGRVGIFPRTYIELLPPAEKAQPKKLTPVQVLEYGEAIAKFNFNGDTQVEMSFRKGERITLLRQVDENWYEGRIPGTSRQGIFPITYVDVIKRPLVKNPVDYMDLPFSSSPSRSATASPQFSSHSKLITPAPSSLPHSRRALSPEMHAVTSEWISLTVGVPGRRSLALTPPLPPLPEASIYNTDHLALSPRASPSLSLSLPHLSWSDRPTPRSVASPLALPSPHKTYSLAPTSQASLHMNGDGGVHTPSSGIHQDSFLQLPLGSSDSVISQLSDAFSSQSKRQPWREESGQYERKAERGAGERGPGGPKISKKSCLKPSDVVRCLSTEQRLSDLNTPEESRPGKPLGSAFPGSEAEQTERHRGGEQAGRKAARRGGSQLSHHSLRAGPDLTESEKSYVQPQAQQRRVTPDRSQTSQDLFSYQALYSYIPQNDDELELRDGDIVDVMEKCDDGWFVGTSRRTKQFGTFPGNYVKPLYL

SEQ ID NO: 13864 - protein, 509 aa, Artificial Sequence
  Synthetic polypeptide
AQEFDTSLGNIMRPARAKFDFKAQTLKELPLQKGDIVYIYKQIDQNWYEGEHHGRVGIFPRTYIELLPPAEKAQPKKLTPVQVLEYGEAIAKFNFNGDTQVEMSFRKGERITLLRQVDENWYEGRIPGTSRQGIFPITYVDVIKRPLVKNPVDYMDLPFSSSPSRSATASPQFSSHSKLITPAPSSLPHSRRALSPEMHAVTSEWISLTVGVPGRRSLALTPPLPPLPEASIYNTDHLALSPRASPSLSLSLPHLSWSDRPTPRSVASPLALPSPHKTYSLAPTSQASLHMNGDGGVHTPSSGIHQDSFLQLPLGSSDSVISQLSDAFSSQSKRQPWREESGQYERKAERGAGERGPGGPKISKKSCLKPSDVVRCLSTEQRLSDLNTPEESRPGKPLGSAFPGSEAEQTERHRGGEQAGRKAARRGGSQQPQAQQRRVTPDRSQTSQDLFSYQALYSYIPQNDDELELRDGDIVDVMEKCDDGWFVGTSRRTKQFGTFPGNYVKPLYL

SEQ ID NO: 13865 - protein, 271 aa, Artificial Sequence
  Synthetic polypeptide
AQEFDTSLGNIMRPARAKFDFKAQTLKELPLQKGDIVYIYKQIDQNWYEGEHHGRVGIFPRTYIELLPPAEKAQPKKLTPVQVLEYGEAIAKFNFNGDTQVEMSFRKGERITLLRQVDENWYEGRIPGTSRQGIFPITYVDVIKRPLVKNPVDYMDLPFSSSPSRSATASPQLSHHSLRAGPDLTESEKSYVQPQAQQRRVTPDRSQTSQDLFSYQALYSYIPQNDDELELRDGDIVDVMEKCDDGWFVGTSRRTKQFGTFPGNYVKPLYL

SEQ ID NO: 13866 - protein, 346 aa, Artificial Sequence
  Synthetic polypeptide
AQEFDTSLGNIMRPARAKFDFKAQTLKELPLQKGDIVYIYKQIDQNWYEGEHHGRVGIFPRTYIELLPPAEKAQPKKLTPVQVLEYGEAIAKFNFNGDTQVEMSFRKGERITLLRQVDENWYEGRIPGTSRQGIFPITYVDVIKRPLVKNPVDYMDLPFSSSPSRSATASPQPWREESGQYERKAERGAGERGPGGPKISKKSCLKPSDVVRCLSTEQRLSDLNTPEESRPGKPLGSAFPGSEAEQTERHRGGEQAGRKAARRGGSQQPQAQQRRVTPDRSQTSQDLFSYQALYSYIPQNDDELELRDGDIVDVMEKCDDGWFVGTSRRTKQFGTFPGNYVKPLYL

SEQ ID NO: 13867 - protein, 251 aa, Artificial Sequence
  Synthetic polypeptide
AQEFDTSLGNIMRPARAKFDFKAQTLKELPLQKGDIVYIYKQIDQNWYEGEHHGRVGIFPRTYIELLPPAEKAQPKKLTPVQVLEYGEAIAKFNFNGDTQVEMSFRKGERITLLRQVDENWYEGRIPGTSRQGIFPITYVDVIKRPLVKNPVDYMDLPFSSSPSRSATASPQQPQAQQRRVTPDRSQTSQDLFSYQALYSYIPQNDDELELRDGDIVDVMEKCDDGWFVGTSRRTKQFGTFPGNYVKPLYL

SEQ ID NO: 13868 - protein, 32 aa, Artificial Sequence
  Synthetic polypeptide
SQYFGKSRWENCLSPGVRHQLGQHNETCQSQI

SEQ ID NO: 13869 - protein, 16 aa, Artificial Sequence
  Synthetic polypeptide
GSFKRWSMILKTMKVE

SEQ ID NO: 13870 - protein, 14 aa, Artificial Sequence
  Synthetic polypeptide
RQRQGFEAASKDGP

SEQ ID NO: 13871 - protein, 120 aa, Artificial Sequence
  Synthetic polypeptide
VYCLTLRTCECDIFWKASICRFDYIKDANLRLSWIKWVGPKFSNKCPDKQHRGETWREVRRPCEDRGRDLRQLQKMVHDIKNNEGGIMNKIKKLKVKAPPSVPRRDYASDTCSLSWNPSK

SEQ ID NO: 13872 - protein, 511 aa, Artificial Sequence
  Synthetic polypeptide
VYCLTLRTCECDIFWKASICRFDYIKDANLRLSWIKWVGPKFSNKCPDKQHRGETWREVRRPCEDRGRDLRQLQKMVHDIKNNEGGIMNKIKKLKVKAPPSVPRRDYASESPADEEEQWSDDFDSDYENPDEHSDSEMYVMPAEENADDSYEPPPVEQETRPVHPALPFARGEYIDNRSSQRHSPPFSKTLPSKPSWPSEKARLTSTLPALTALQKPQVPPKPKGLLEDEADYVVPVEDNDENYIHPTESSSPPPEKAPMVNRSTKPNSSTPASPPGTASGRNSGAWETKSPPPAAPSPLPRAGKKPTTPLKTTPVASQQNASSVCEEKPIPAERHRGSSHRQEAVQSPVFPPAQKQIHQKPIPLPRFTEGGNPTVDGPLPSFSSNSTISEQEAGVLCKPWYAGACDRKSAEEALHRSNKDGSFLIRKSSGHDSKQPYTLVVFFNKRVYNIPVRFIEATKQYALGRKKNGEEYFGSVAEIIRNHQHSPLVLIDSQNNTKDSTRLKYAVKVS

SEQ ID NO: 13873 - protein, 476 aa, Artificial Sequence
  Synthetic polypeptide
VYCLTLRTCECDIFWKASICRFDYIKDANLRLSWIKWVGPKFSNKCPDKQHRGETWREVRRPCEDRGRDLRQLQKMVHDIKNNEGGIMNKIKKLKVKAPPSVPRRDYASESPADEEEQWSDDFDSDYENPDEHSDSEMYVMPAEENADDSYEPPPVEQETRPVHPALPFARGEYIDNRSSQRHSPPFSKTLPSKPSWPSEKARLTSTLPALTALQKPQVPPKPKGLLEDEADYVVPVEDNDENYIHPTESSSPPPEKAPMVNRSTKPNSSTPASPPGTASGRNSGAWETKSPPPAAPSPLPRAGKKPTTPLKTTPVASQQNASSVCEEKPIPAERHRGSSHRQEAVQSPVFPPAQKQIHQKPIPLPRFTEGGNPTVDGPLPSFSSNSTISEQEAGVLCKPWYAGACDRKSAEEALHRSNKDPQPPLPSKQWETRKLQYFGSVAEIIRNHQHSPLVLIDSQNNTKDSTRLKYAVKVS

SEQ ID NO: 13874 - protein, 459 aa, Artificial Sequence
  Synthetic polypeptide
VYCLTLRTCECDIFWKASICRFDYIKDANLRLSWIKWVGPKFSNKCPDKQHRGETWREVRRPCEDRGRDLRQLQKMVHDIKNNEGGIMNKIKKLKVKAPPSVPRRDYASESPADEEEQWSDDFDSDYENPDEHSDSEMYVMPAEENADDSYEPPPVEQETRPVHPALPFARGEYIDNRSSQRHSPPFSKTLPSKPSWPSEKARLTSTLPALTALQKPQVPPKPKGLLEDEADYVVPVEDNDENYIHPTESSSPPPEKAPMVNRSTKPNSSTPASPPGTASGRNSGAWETKSPPPAAPSPLPRAGKKPTTPLKTTPVASQQNASSVCEEKPIPAERHRGSSHRQEAVQSPVFPPAQKQIHQKPIPLPRFTEGGNPTVDGPLPSFSSNSTISEQEAGVLCKPWYAGACDRKSAEEALHRSNKYFGSVAEIIRNHQHSPLVLIDSQNNTKDSTRLKYAVKVS

SEQ ID NO: 13875 - protein, 488 aa, Artificial Sequence
  Synthetic polypeptide
VYCLTLRTCECDIFWKASICRFDYIKDANLRLSWIKWVGPKFSNKCPDKQHRGETWREVRRPCEDRGRDLRQLQKMVHDIKNNEGGIMNKIKKLKVKAPPSVPRRDYASESPADEEEQWSDDFDSDYENPDEHSDSEMYVMPAEENADDSYEPPPVEQETRPVHPALPFARGEYIDNRSSQRHSPPFSKTLPSKPSWPSEKARLTSTLPALTALQKPQVPPKPKGLLEDEADYVVPVEDNDENYIHPTESSSPPPEKGRNSGAWETKSPPPAAPSPLPRAGKKPTTPLKTTPVASQQNASSVCEEKPIPAERHRGSSHRQEAVQSPVFPPAQKQIHQKPIPLPRFTEGGNPTVDGPLPSFSSNSTISEQEAGVLCKPWYAGACDRKSAEEALHRSNKDGSFLIRKSSGHDSKQPYTLVVFFNKRVYNIPVRFIEATKQYALGRKKNGEEYFGSVAEIIRNHQHSPLVLIDSQNNTKDSTRLKYAVKVS

SEQ ID NO: 13876 - protein, 176 aa, Artificial Sequence
  Synthetic polypeptide
VYCLTLRTCECDIFWKASICRFDYIKDANLRLSWIKWVGPKFSNKCPDKQHRGETWREVRRPCEDRGRDLRQLQKMVHDIKNNEGGIMNKIKKLKVKAPPSVPRRDYASESPADEEEQWSDDFDSDYENPDEHSDSEMYVMPAEENADDSYEPPPVEQETRPVHPALPFARGEYIG

SEQ ID NO: 13877 - protein, 13 aa, Artificial Sequence
  Synthetic polypeptide
MIVLQKITSKDGP

SEQ ID NO: 13878 - protein, 23 aa, Artificial Sequence
  Synthetic polypeptide
MNDSPPKDNFKRWSMILKTMKVE

SEQ ID NO: 13879 - protein, 22 aa, Artificial Sequence
  Synthetic polypeptide
ELKRPPTRETFHPPPPVPPRGR

SEQ ID NO: 13880 - protein, 20 aa, Artificial Sequence
  Synthetic polypeptide
KASDQGDLPSSSTCSTQRTL

SEQ ID NO: 13881 - protein, 27 aa, Artificial Sequence
  Synthetic polypeptide
VAHTRNLKGLRPGRPSILLHLFHPEDA

SEQ ID NO: 13882 - protein, 20 aa, Artificial Sequence
  Synthetic polypeptide
PGLRPGRPSILLHLFHPEDA

SEQ ID NO: 13883 - protein, 20 aa, Artificial Sequence
  Synthetic polypeptide
QASDQGDLPSSSTCSTQRTL

SEQ ID NO: 13884 - protein, 19 aa, Artificial Sequence
  Synthetic polypeptide
RPPTRETFHPPPPVPPRGR

SEQ ID NO: 13885 - protein, 10 aa, Artificial Sequence
  Synthetic polypeptide
ATVSSITGKS

SEQ ID NO: 13886 - protein, 159 aa, Artificial Sequence
  Synthetic polypeptide
LENLKRLRDSITRRQREKQKSGKQTDLEITVPIRHSQHLPAKVEFGVYESGPRKSVIPPRTELRRGDWKTDSTSSTASSTSNRSSTRSLLSVSSGMEGDNEDNEVPEVTRSRSPGPPQVDGTPTMSLERPPRVPPRAASQRPPTRETFHPPPPVPPRGR

SEQ ID NO: 13887 - protein, 27 aa, Artificial Sequence
  Synthetic polypeptide
PCCASYERGGLGDISYCKQHNWKILNG

SEQ ID NO: 13888 - protein, 15 aa, Artificial Sequence
  Synthetic polypeptide
LEKRWTCSRVTLKRN

SEQ ID NO: 13889 - protein, 11 aa, Artificial Sequence
  Synthetic polypeptide
MRNGGHAQESH

SEQ ID NO: 13890 - protein, 122 aa, Artificial Sequence
  Synthetic polypeptide
KGAQRMRHPHRLQPGCRGMVPVPADPVPVQSAGPQPEDTDSQAGPRGLLLGRGPKPFPQHPLCRGAAVRGAGAALPQARLAAPAAESFPSSAPRGQAALRRAGQRGVPRLLSRLGPLAGAHL

SEQ ID NO: 13891 - protein, 806 aa, Artificial Sequence
  Synthetic polypeptide
LTVRKRVPRGCDILIVYSPDAEEWCQYLQTLFLSSRQVRSQKILTHRLGPEASFSAEDLSLFLSTRCVVVLLSAELVQHFHKPALLPLLQRAFHPPHRVVRLLCGVRDSEEFLDFFPDWAHWQELTCDDEPETYVAAVKKAISEDSGCDSVTDTEPEDEKVVSYSKQQNLPTVTSPGNLMVVQPDRIRCGAETTVYVIVRCKLDDRVATEAEFSPEDSPSVRMEAKVENEYTISVKAPNLSSGNVSLKIYSGDLVVCETVISYYTDMEEIGNLLSNAANPVEFMCQAFKIVPYNTETLDKLLTESLKNNIPASGLHLFGINQLEEEDMMTNQRDEELPTLLHFAAKYGLKNLTALLLTCPGALQAYSVANKHGHYPNTIAEKHGFRDLRQFIDEYVETVDMLKSHIKEELMHGEEADAVYESMAHLSTDLLMKCSLNPGCDEDLYESMAAFVPAATEDLYVEMLQASTSNPIPGDGFSRATKDSMIRKFLEGNSMGMTNLERDQCHLGQEEDVYHTVDDDEAFSVDLASRPPVPVPRPETTAPGAHQLPDNEPYIFKVFAEKSQERPGNFYVSSESIRKGPPVRPWRDRPQSSIYDPFAGMKTPGQRQLITLQEQVKLGIVNVDEAVLHFKEWQLNQKKRSESFRFQQENLKRLRDSITRRQREKQKSGKQTDLEITVPIRHSQHLPAKVEFGVYESGPRKSVIPPRTELRRGDWKTDSTSSTASSTSNRSSTRSLLSVSSGMEGDNEDNEVPEVTRSRSPGPPQVDGTPTMSLERPPRVPPRAASQRPPTRETFHPPPPVPPRGR

SEQ ID NO: 13892 - protein, 42 aa, Artificial Sequence
  Synthetic polypeptide
QYVKGCPEDATSSSSTARMPRNGASTCRPCSCPVGRSAARRY

SEQ ID NO: 13893 - protein, 161 aa, Artificial Sequence
  Synthetic polypeptide
FLHFHLRYRVHLTRECQTVGAVPKTAPTNVSGRSGRRHELVIAWEPVSEEFQNGEGFGYIVAFRPNGTRGWKEKMVTSSEASKFIYRDESVPPLTPFEVKVGVYNNKGDGPFSQIVVICSAEGEPSAAPTDVKATSVSVSEILVAWKHIKESLGRPQGFEV

SEQ ID NO: 13894 - protein, 350 aa, Artificial Sequence
  Synthetic polypeptide
FLHFHLRYRVHLTRECQTVGAVPKTAPTNVSGRSGRRHELVIAWEPVSEEFQNGEGFGYIVAFRPNGTRGWKEKMVTSSEASKFIYRDESVPPLTPFEVKVGVYNNKGDGPFSQIVVICSAEGEPSAAPTDVKATSVSVSEILVAWKHIKESLGRPQGFEVGYWKDMEQEDTAETVKTRGNESFVILTGLEGNTLYHFTVRAYNGAGYGPPSSEVSATTKKSPPSQAPSNLRWEQQGSQVSLGWEPVIPLANESEVVGYKVFYRQEGHSNSQVIETQKLQAVVPLPDAGVYIIEVRAYSEGGDGTASSQIRVPSYSGGKITSAQSTLHSLSTSSSSVTLLLALMIPSTSW

SEQ ID NO: 13895 - protein, 23 aa, Artificial Sequence
  Synthetic polypeptide
GTGFISLGSARQWAQFRRQHPPM

SEQ ID NO: 13896 - protein, 24 aa, Artificial Sequence
  Synthetic polypeptide
GVPDSGRSSEDSTHQCKRKKWKKA

SEQ ID NO: 13897 - protein, 2 aa, Artificial Sequence
  Synthetic polypeptide
GR

SEQ ID NO: 13898 - protein, 8 aa, Artificial Sequence
  Synthetic polypeptide
SQLLRRLR

SEQ ID NO: 13899 - protein, 445 aa, Artificial Sequence
  Synthetic polypeptide
TKMSWTWCCTSVVPATQEAEVDDTIKIAEALLSDLPGFRCFHQSAKDLLDQLKLYEQEQFDDWSRDIQSGLSDSRSGLCIEASSRIMELDSNDGLLKVHYSDRLVILLREVRQLSALGFVIPAKIQQVANIAQKFCKQAIILKQVAHFYNSIDQQMIQSQRPMMLQSALAFEQIIKNSKAGSGGKSQITWDNPKELEGYIQKLQNAAERLATENRKLRKWHTTFCEKVVVLMNIDLLRQQQRWKDGLQELRTGLATVEAQCPLAWQSKWEGPEDPLQYLRGLVARALAIQNWVDKAEKQALLSETLDLSELFHPDTFLNALRQETARAVGRSVDSLKFVASWKGRLQEAKLQIKISGLLLEGCSFDGNQLSENQLDSPSVSSVLPCFMGWIPQDACGPYSPDECISLPVYTSAERDRVVTNIDVPCGGNQDQWIQCGAALFLKNQ

SEQ ID NO: 13900 - protein, 3839 aa, Artificial Sequence
  Synthetic polypeptide
TKMSWTWCCTSVVPATQEAEVDDTIKIAEALLSDLPGFRCFHQSAKDLLDQLKLYEQEQFDDWSRDIQSGLSDSRSGLCIEASSRIMELDSNDGLLKVHYSDRLVILLREVRQLSALGFVIPAKIQQVANIAQKFCKQAIILKQVAHFYNSIDQQMIQSQRPMMLQSALAFEQIIKNSKAGSGGKSQITWDNPKELEGYIQKLQNAAERLATENRKLRKWHTTFCEKVVVLMNIDLLRQQQRWKDGLQELRTGLATVEAQGFQASDMHAWKQHWNHQLYKALEHQYQMGLEALNENLPEINIDLTYKQGRLQFRPPFEEIRAKYYREMKRFIGIPNQFKGVGEAGDESIFSIMIDRNASGFLTIFSKAEDLFRRLSAVLHQHKEWIVIGQVDMEALVEKHLFTVHDWEKNFKALKIKGKEVERLPSAVKVDCLNINCNPVKTVIDDLIQKLFDLLVLSLKKSIQAHLHEIDTFVTEAMEVLTIMPQSVEEIGDANLQYSKLQERKPEILPLFQEAEDKNRLLRTVAGGGLETISNLKAKWDKFELMMESHQLMIKDQIEVMKGNVKSRLQIYYQELEKFKARWDQLKPGDDVIETGQHNTLDKSAKLIKEKKIEFDDLEVTRKKLVDDCHHFRLEEPNFSLASSISKDIESCAQIWAFYEEFQQGFQEMANEDWITFRTKTYLFEEFLMNWHDRLRKVEEHSVMTVKLQSEVDKYKIVIPILKYVRGEHLSPDHWLDLFRLLGLPRGTSLEKLLFGDLLRVADTIVAKAADLKDLNSRAQGEVTIREALRELDLWGVGAVFTLIDYEDSQSRTMKLIKDWKDIVNQVGDNRCLLQSLKDSPYYKGFEDKVSIWERKLAELDEYLQNLNHIQRKWVYLEPIFGRGALPKEQTRFNRVDEDFRSIMTDIKKDNRVTTLTTHAGIRNSLLTILDQLQRCQKSLNEFLEEKRSAFPRFYFIGDDDLLEILGQSTNPSVIQSHLKKLFAGINSVCFDEKSKHITAMKSLEGEVVPFKNKVPLSNNVETWLNDLALEMKKTLEQLLKECVTTGRSSQGAVDPSLFPSQILCLAEQIKFTEDVENAIKDHSLHQIETQLVNKLEQYTNIDTSSEDPGNTESGILELKLKALILDIIHNIDVVKQLNQIQVHTTEDWAWKKQLRFYMKSDHTCCVQMVDSEFQYTYEYQGNASKLVYTPLTDKCYLTLTQAMKMGLGGNPYGPAGTGKTESVKALGGLLGRQVLVFNCDEGIDVKSMGRIFVGLVKCGAWGCFDEFNRLEESVLSAVSMQIQTIQDALKNHRTVCELLGKEVEVNSNSGIFITMNPAGKGYGGRQKLPDNLKQLFRPVAMSHPDNELIAEVILYSEGFKDAKVLSRKLVAIFNLSRELLTPQQHYDWGLRALKTVLRGSGNLLRQLNKSGTTQNANESHIVVQALRLNTMSKFTFTDCTRFDALIKDVFPGIELKEVEYDELSAALKQVFEEANYEIIPNQIKKALELYEQLCQRMGVVIVGPSGAGKSTLWRMLRAALCKTGKVVKQYTMNPKAMPRYQLLGHIDMDTREWSDGVLTNSARQVVREPQDVSSWIICDGDIDPEWIESLNSVLDDNRLLTMPSGERIQFGPNVNFVFETHDLSCASPATISRMGMIFLSDEETDLNSLIKSWLRNQPAEYRNNLENWIGDYFEKALQWVLKQNDYVVETSLVGTVMNGLSHLHGCRDHDEFIINLIRGLGGNLNMKSRLEFTKEVFHWARESPPDFHKPMDTYYDSTRGRLATYVLKKPEDLTADDFSNGLTLPVIQTPDMQRGLDYFKPWLSSDTKQPFILVGPEGCGKGMLLRYAFSQLRSTQIATVHCSAQTTSRHLLQKLSQTCMVISTNTGRVYRPKDCERLVLYLKDINLPKLDKWGTSTLVAFLQQVLTYQGFYDENLEWVGLENIQIVASMSAGGRLGRHKLTTRFTSIVRLCSIDYPEREQLQTIYGAYLEPVLHKNLKNHSIWGSSSKIYLLAGSMVQVYEQVRAKFTVDDYSHYFFTPCILTQWVLGLFRYDLEGGSSNHPLDYVLEIVAYEARRLFRDKIVGAKELHLFDIILTSVFQGDWGSDILDNMSDSFYVTWGARHNSGARAAPGQPLPPHGKPLGKLNSTDLKDVIKKGLIHYGRDNQNLDILLFHEVLEYMSRIDRVLSFPGGSLLLAGRSGVGRRTITSLVSHMHGAVLFSPKISRGYELKQFKNDLKHVLQLAGIEAQQVVLLLEDYQFVHPTFLEMINSLLSSGEVPGLYTLEELEPLLLPLKDQASQDGFFGPVFNYFTYRIQQNLHIVLIMDSANSNFMINCESNPALHKKCQVLWMEGWSNSSMKKIPEMLFSETGGGEKYNDKKRKEEKKKNSVDPDFLKSFLLIHESCKAYGATPSRYMTFLHVYSAISSSKKKELLKRQSHLQAGVSKLNEAKALVDELNRKAGEQSVLLKTKQDEADAALQMITVSMQDASEQKTELERLKHRIAEEVVKIEERKNKIDDELKEVQPLVNEAKLAVGNIKPESLSEIRSLRMPPDVIRDILEGVLRLMGIFDTSWVSMKSFLAKRGVREDIATFDARNISKEIRESVEELLFKNKGSFDPKNAKRASTAAAPLAAWVKANIQYSHVLERIHPLETEQAGLESNLKKTEDRKRKLEELLNSVGQKVSELKEKFQSRTSEAAKLEAEVSKAQETIKAAEVLINQLDREHKRWNAQVVEITEELATLPKRAQLAAAFITYLSAAPESLRKTCLEEWTKSAGLEKFDLRRFLCTESEQLIWKSEGLPSDDLSIENALVILQIIGLKSWSRVCPFLIDPSSQATEWLKTHLKDSRLEVINQQDSNFITALELAVRFGKTLIIQEMDGVEPVLYPLLRRDLVAQGPRYVVQIGDKIIDYNEEFRLFLSTRNPNPFIPPDAASIVTEVNFTTTRSGLRGQLLALTIQHEKPDLEEQKTKLLQQEEDKKIQLAKLEESLLETLATSQGNILENKDLIESLNQTKASSALIQESLKESYKLQISLDQERDAYLPLAESASKMYFIISDLSKINNMYRFSLAAFLRLFQRALQNKQDSENTEQRIQSLISSLQHMVYEYICRCLFKADQLMFALHFVRGMHPELFQENEWDTFTGVVVGDMLRKADSQQKIRDQLPSWIDQERSWAVATLKIALPSLYQTLCFEDAALWRTYYNNSMCEQEFPSILAKKVSLFQQILVVQALRPDRLQSAMALFACKTLGLKEVSPLPLNLKRLYKETLEIEPILIIISPGADPSQELQELANAERSGECYHQVAMGQGQADLAIQMLKECARNGDWLCLKNLHLVVSWLPVLEKELNTLQPKDTFRLWLTAEVHPNFTPILLQSSLKITYESPPGLKKNLMRTYESWTPEQISKKDNTHRAHALFSLAWFHAACQERRNYIPQGWTKFYEFSLSDLRAGYNIIDRLFDGAKDVQWEFVHGLLENAIYGGRIDNYFDLRVLQSYLKQFFNSSVIDVFNQRNKKSIFPYSVSLPQSCSILDYRAVIEKIPEDDKPSFFGLPANIARSSQRMISSQVISQLRILGRSITAGSKFDREIWSNELSPVLNLWKKLNQNSNLIHQKVPPPNDRQGSPILSFIILEQFNAIRLVQSVHQSLAALSKVIRGTTLLSSEVQKLASALLNQKCPLAWQSKWEGPEDPLQYLRGLVARALAIQNWVDKAEKQALLSETLDLSELFHPDTFLNALRQETARAVGRSVDSLKFVASWKGRLQEAKLQIKISGLLLEGCSFDGNQLSENQLDSPSVSSVLPCFMGWIPQDACGPYSPDECISLPVYTSAERDRVVTNIDVPCGGNQDQWIQCGAALFLKNQ

SEQ ID NO: 13901 - protein, 3832 aa, Artificial Sequence
  Synthetic polypeptide
TKMSWTWCCTSVVPATQEAEVDDTIKIAEALLSDLPGFRCFHQSAKDLLDQLKLYEQEQFDDWSRDIQSGLSDSRSGLCIEASSRIMELDSNDGLLKVHYSDRLVILLREVRQLSALGFVIPAKIQQVANIAQKFCKQAIILKQVAHFYNSIDQQMIQSQRPMMLQSALAFEQIIKNSKAGSGGKSQITWDNPKELEGYIQKLQNAAERLATENRKLRKWHTTFCEKVVVLMNIDLLRQQQRWKDGLQELRTGLATVEAQGFQASDMHAWKQHWNHQLYKALEHQYQMGLEALNENLPEINIDLTYKQGRLQFRPPFEEIRAKYYREMKRFIGIPNQFKGVGEAGDESIFSIMIDRNASGFLTIFSKAEDLFRRLSAVLHQHKEWIVIGQVDMEALVEKHLFTVHDWEKNFKALKIKGKEVERLPSAVKVDCLNINCNPVKTVIDDLIQKLFDLLVLSLKKSIQAHLHEIDTFVTEAMEVLTIMPQSVEEIGDANLQYSKLQERKPEILPLFQEAEDKNRLLRTVAGGGLETISNLKAKWDKFELMMESHQLMIKDQIEVMKGNVKSRLQIYYQELEKFKARWDQLKPGDDVIETGQHNTLDKSAKLIKEKKIEFDDLEVTRKKLVDDCHHFRLEEPNFSLASSISKDIESCAQIWAFYEEFQQGFQEMANEDWITFRTKTYLFEEFLMNWHDRLRKVEEHSVMTVKLQSEVDKYKIVIPILKYVRGEHLSPDHWLDLFRLLGLPRGTSLEKLLFGDLLRVADTIVAKAADLKDLNSRAQGEVTIREALRELDLWGVGAVFTLIDYEDSQSRTMKLIKDWKDIVNQVGDNRCLLQSLKDSPYYKGFEDKVSIWERKLAELDEYLQNLNHIQRKWVYLEPIFGRGALPKEQTRFNRVDEDFRSIMTDIKKDNRVTTLTTHAGIRNSLLTILDQLQRCQKSLNEFLEEKRSAFPRFYFIGDDDLLEILGQSTNPSVIQSHLKKLFAGINSVCFDEKSKHITAMKSLEGEVVPFKNKVPLSNNVETWLNDLALEMKKTLEQLLKECVTTGRSSQGAVDPSLFPSQILCLAEQIKFTEDVENAIKDHSLHQIETQLVNKLEQYTNIDTSSEDPGNTESGILELKLKALILDIIHNIDVVKQLNQIQVHTTEDWAWKKQLRFYMKSDHTCCVQMVDSEFQYTYEYQGNASKLVYTPLTDKCYLTLTQAMKMGLGGNPYGPAGTGKTESVKALGGLLGRQVLVFNCDEGIDVKSMGRIFVGLVKCGAWGCFDEFNRLEESVLSAVSMQIQTIQDALKNHRTVCELLGKEVEVNSNSGIFITMNPAGKGYGGRQKLPDNLKQLFRPVAMSHPDNELIAEVILYSEGFKDAKVLSRKLVAIFNLSRELLTPQQHYDWGLRALKTVLRGSGNLLRQLNKSGTTQNANESHIVVQALRLNTMSKFTFTDCTRFDALIKDVFPGIELKEVEYDELSAALKQVFEEANYEIIPNQIKKALELYEQLCQRMGVVIVGPSGAGKSTLWRMLRAALCKTGKVVKQYTMNPKAMPRYQLLGHIDMDTREWSDGVLTNSARQVVREPQDVSSWIICDGDIDPEWIESLNSVLDDNRLLTMPSGERIQFGPNVNFVFETHDLSCASPATISRMGMIFLSDEETDLNSLIKSWLRNQPAEYRNNLENWIGDYFEKALQWVLKQNDYVVETSLVGTVMNGLSHLHGCRDHDEFIINLIRGLGGNLNMKSRLEFTKEVFHWARESPPDFHKPMDTYYDSTRGRLATYVLKKPEDLTADDFSNGLTLPVIQTPDMQRGLDYFKPWLSSDTKQPFILVGPEGCGKGMLLRYAFSQLRSTQIATVHCSAQTTSRHLLQKLSQTCMVISTNTGRVYRPKDCERLVLYLKDINLPKLDKWGTSTLVAFLQQVLTYQGFYDENLEWVGLENIQIVASMSAGGRLGRHKLTTRFTSIVRLCSIDYPEREQLQTIYGAYLEPVLHKNLKNHSIWGSSSKIYLLAGSMVQVYEQVRAKFTVDDYSHYFFTPCILTQWVLGLFRYDLEGGSSNHPLDYVLEIVAYEARRLFRDKIVGAKELHLFDIILTSVFQGDWGSDILDNMSDSFYVTWGARHNSGARAAPGQPLPPHGKPLGKLNSTDLKDVIKKGLIHYGRDNQNLDILLFHEVLEYMSRIDRVLSFPGGSLLLAGRSGVGRRTITSLVSHMHGAVLFSPKISRGYELKQFKNDLKHVLQLAGIEAQQVVLLLEDYQFVHPTFLEMINSLLSSGEVPGLYTLEELEPLLLPLKDQASQDGFFGPVFNYFTYRIQQNLHIVLIMDSANSNFMINCESNPALHKKCQVLWMEGWSNSSMKKIPEMLFSETGGGEKYNDKKRKEEKKKNSVDPDFLKSFLLIHESCKAYGATPSRYMTFLHVYSAISSSKKKELLKRQSHLQAGVSKLNEAKALVDELNRKAGEQSVLLKTKQDEADAALQMITVSMQDASEQKTELERLKHRIAEEVVKIEERKNKIDDELKEVQPLVNEAKLAVGNIKPESLSEIRSLRMPPDVIRDILEGVLRLMGIFDTSWVSMKSFLAKRGVREDIATFDARNISKEIRESVEELLFKNKGSFDPKNAKRASTAAAPLAAWVKANIQYSHVLERIHPLETEQAGLESNLKKTEDRKRKLEELLNSVGQKVSELKEKFQSRTSEAAKLEAEVSKAQETIKAAEVLINQLDREHKRWNAQVVEITEELATLPKRAQLAAAFITYLSAAPESLRKTCLEEWTKSAGLEKFDLRRFLCTESEQLIWKSEGLPSDDLSIENALVILQSRVCPFLIDPSSQATEWLKTHLKDSRLEVINQQDSNFITALELAVRFGKTLIIQEMDGVEPVLYPLLRRDLVAQGPRYVVQIGDKIIDYNEEFRLFLSTRNPNPFIPPDAASIVTEVNFTTTRSGLRGQLLALTIQHEKPDLEEQKTKLLQQEEDKKIQLAKLEESLLETLATSQGNILENKDLIESLNQTKASSALIQESLKESYKLQISLDQERDAYLPLAESASKMYFIISDLSKINNMYRFSLAAFLRLFQRALQNKQDSENTEQRIQSLISSLQHMVYEYICRCLFKADQLMFALHFVRGMHPELFQENEWDTFTGVVVGDMLRKADSQQKIRDQLPSWIDQERSWAVATLKIALPSLYQTLCFEDAALWRTYYNNSMCEQEFPSILAKKVSLFQQILVVQALRPDRLQSAMALFACKTLGLKEVSPLPLNLKRLYKETLEIEPILIIISPGADPSQELQELANAERSGECYHQVAMGQGQADLAIQMLKECARNGDWLCLKNLHLVVSWLPVLEKELNTLQPKDTFRLWLTAEVHPNFTPILLQSSLKITYESPPGLKKNLMRTYESWTPEQISKKDNTHRAHALFSLAWFHAACQERRNYIPQGWTKFYEFSLSDLRAGYNIIDRLFDGAKDVQWEFVHGLLENAIYGGRIDNYFDLRVLQSYLKQFFNSSVIDVFNQRNKKSIFPYSVSLPQSCSILDYRAVIEKIPEDDKPSFFGLPANIARSSQRMISSQVISQLRILGRSITAGSKFDREIWSNELSPVLNLWKKLNQNSNLIHQKVPPPNDRQGSPILSFIILEQFNAIRLVQSVHQSLAALSKVIRGTTLLSSEVQKLASALLNQKCPLAWQSKWEGPEDPLQYLRGLVARALAIQNWVDKAEKQALLSETLDLSELFHPDTFLNALRQETARAVGRSVDSLKFVASWKGRLQEAKLQIKISGLLLEGCSFDGNQLSENQLDSPSVSSVLPCFMGWIPQDACGPYSPDECISLPVYTSAERDRVVTNIDVPCGGNQDQWIQCGAALFLKNQ

SEQ ID NO: 13902 - protein, 8 aa, Artificial Sequence
  Synthetic polypeptide
IAKWLFHS

SEQ ID NO: 13903 - protein, 21 aa, Artificial Sequence
  Synthetic polypeptide
MPSGYFTVEDFGQIHNSWFQI

SEQ ID NO: 13904 - protein, 228 aa, Artificial Sequence
  Synthetic polypeptide
YCQVVISQLRILGRSITAGSKFDREIWSNELSPVLNLWKKLNQCPLAWQSKWEGPEDPLQYLRGLVARALAIQNWVDKAEKQALLSETLDLSELFHPDTFLNALRQETARAVGRSVDSLKFVASWKGRLQEAKLQIKISGLLLEGCSFDGNQLSENQLDSPSVSSVLPCFMGWIPQDACGPYSPDECISLPVYTSAERDRVVTNIDVPCGGNQDQWIQCGAALFLKNQ

SEQ ID NO: 13905 - protein, 298 aa, Artificial Sequence
  Synthetic polypeptide
YCQVVISQLRILGRSITAGSKFDREIWSNELSPVLNLWKKLNQNSNLIHQKVPPPNDRQGSPILSFIILEQFNAIRLVQSVHQSLAALSKVIRGTTLLSSEVQKLASALLNQKCPLAWQSKWEGPEDPLQYLRGLVARALAIQNWVDKAEKQALLSETLDLSELFHPDTFLNALRQETARAVGRSVDSLKFVASWKGRLQEAKLQIKISGLLLEGCSFDGNQLSENQLDSPSVSSVLPCFMGWIPQDACGPYSPDECISLPVYTSAERDRVVTNIDVPCGGNQDQWIQCGAALFLKNQ

SEQ ID NO: 13906 - protein, 99 aa, Artificial Sequence
  Synthetic polypeptide
EVKSPSARQPPRLGVPPHRDRGLHRGQVLPPAPLHPGPLPRAALPRLRPHRRRGLLLPPAGDRAGQEDQATALGHGGTGAVQINNPILLPQLSWWIFSI

SEQ ID NO: 13907 - protein, 32 aa, Artificial Sequence
  Synthetic polypeptide
EVRSPSARQPPRLRSEEPLRPAATPFGSSASS

SEQ ID NO: 13908 - protein, 221 aa, Artificial Sequence
  Synthetic polypeptide
RAPPPGSHPVWEFRLIVIGDSTVGKSCLLHRFTQGRFPGLRSPACDPTVGVDFFSRLLEIEPGKRIKLQLWDTAGQERFRSITRSYYRNSVGGFLVFDITNRRSFEHVKDWLEEAKMYVQPFRIVFLLVGHKCDLASQRQVTREEAEKLSADCGMKYIETSAKDATNVEESFTILTRDIYELIKKGEICIQDGWEGVKSGFVPNTVHSSEEAVKPRKECFC

SEQ ID NO: 13909 - protein, 16 aa, Artificial Sequence
  Synthetic polypeptide
EVKSPSARQPPRLGDQ

SEQ ID NO: 13910 - protein, 169 aa, Artificial Sequence
  Synthetic polypeptide
EVRSPSARQPPRLRSEEPLRPAATPFGRSITRSYYRNSVGGFLVFDITNRRSFEHVKDWLEEAKMYVQPFRIVFLLVGHKCDLASQRQVTREEAEKLSADCGMKYIETSAKDATNVEESFTILTRDIYELIKKGEICIQDGWEGVKSGFVPNTVHSSEEAVKPRKECFC

SEQ ID NO: 13911 - protein, 29 aa, Artificial Sequence
  Synthetic polypeptide
RAPPPGSHPVWEINNPILLPQLSWWIFSI

SEQ ID NO: 13912 - protein, 8 aa, Artificial Sequence
  Synthetic polypeptide
HSNEKCIG

SEQ ID NO: 13913 - protein, 17 aa, Artificial Sequence
  Synthetic polypeptide
HSNEKCIGTTQTNKRTR

SEQ ID NO: 13914 - protein, 25 aa, Artificial Sequence
  Synthetic polypeptide
HSNEKCIGTTQTNKRTVGRKNTELA

SEQ ID NO: 13915 - protein, 5 aa, Artificial Sequence
  Synthetic polypeptide
KVYWN

SEQ ID NO: 13916 - protein, 8 aa, Artificial Sequence
  Synthetic polypeptide
KVYWNNTN

SEQ ID NO: 13917 - protein, 35 aa, Artificial Sequence
  Synthetic polypeptide
VGPQLLSLGSAFTESTNHRLKICEKNNTAMKSVLE

SEQ ID NO: 13918 - protein, 108 aa, Artificial Sequence
  Synthetic polypeptide
VGPQLLSLGSAFTESTNHRLKICEKNNTAMKSVLEQHKLTKEQDETKKTQNDVLHAENVKAGRDKYKTLRQIRQGNTKQRIDEFEAMWGPKLYALFQMRSCQSSIKQM

SEQ ID NO: 13919 - protein, 52 aa, Artificial Sequence
  Synthetic polypeptide
VGPQLLSLGSAFTESTNHRLKICEKNNTAMKSVLEQHKLTKEQWEERIQNWH

SEQ ID NO: 13920 - protein, 459 aa, Artificial Sequence
  Synthetic polypeptide
VGPQLLSLGSAFTESTNHRLKICEKNNTAMKSVLEQHKLTKEQWEERIQNWHEEHRGMLREDSMMEYLKIAQDLEMYGVNYFEIKNKKGTELWLGVDALGLNIYEHDDKLTPKIGFPWSEIRNISFNDKKFVIKPIDKKAPDFVFYAPRLRINKRILALCMGNHELYMRRRKPDTIEVQQMKAQAREEKHQKQLERAQLENEKKKREIAEKEKERIEREKEELMERLKQIEEQTIKAQKELEEQTRKALELDQERKRAKEEAERLEKERRAAEEAKSAIAKQAADQMKNQEQLAAELAEFTAKIALLEEAKKKKEEEATEWQHKAFAAQEDLEKTKEELKTVMSAPPPPPPPPVIPPTENEHDEHDENNAEASAELSNEGVMNHRSEEERVTETQKNERVKKQLQALSSELAQARDETKKTQNDVLHAENVKAGRDKYKTLRQIRQGNTKQRIDEFEAM

SEQ ID NO: 13921 - protein, 480 aa, Artificial Sequence
  Synthetic polypeptide
VGPQLLSLGSAFTESTNHRLKICEKNNTAMKSVLEQHKLTKEQWEERIQNWHEEHRGMLREDSMMEYLKIAQDLEMYGVNYFEIKNKKGTELWLGVDALGLNIYEHDDKLTPKIGFPWSEIRNISFNDKKFVIKPIDKKAPDFVFYAPRLRINKRILALCMGNHELYMRRRKPDTIEVQQMKAQAREEKHQKQLERAQLENEKKKREIAEKEKERIEREKEELMERLKQIEEQTIKAQKELEEQTRKALELDQERKRAKEEAERLEKERRAAEEAKSAIAKQAADQMKNQEQLAAELAEFTAKIALLEEAKKKKEEEATEWQHKAFAAQEDLEKTKEELKTVMSAPPPPPPPPVIPPTENEHDEHDENNAEASAELSNEGVMNHRSEEERVTETQKNERVKKQLQALSSELAQARDETKKTQNDVLHAENVKAGRDKYKTLRQIRQGNTKQRIDEFEAMWGPKLYALFQMRSCQSSIKQM

SEQ ID NO: 13922 - protein, 560 aa, Artificial Sequence
  Synthetic polypeptide
PANIIMTGSNSHITILTLNVNGLNAPIKRHRLANWINSQDPSVCCIQETHLTCRDTHRLKINGWRKIYQANGKQKKAGVAILVSDKTDFKPTKIKRDKEGHYIMSLMLDDQPPMEAQYAEEGPGPGIFRAEPGDQQHPISQAVCWRSMRRGCAVLGALGLLAGAGVGSWLLVLYLCPAASQPISGTLQDEEITLSCSEASAEEALLPALPKTVSFRINSEDFLLEAQVRDQPRWLLVCHEGWSPALGLQICWSLGHLRLTHHKGVNLTDIKLNSSQEFAQLSPRLGGFLEEAWQPRNNCTSGQVVSLRCSECGARPLASRIVGGQSVAPGRWPWQASVALGFRHTCGGSVLAPRWVVTAAHCMHSFRLARLSSWRVHAGLVSHSAVRPHQGALVERIIPHPLYSAQNHDYDVALLRLQTALNFSDTVGAVCLPAKEQHFPKGSRCWVSGWGHTHPSHTYSSDMLQDTVVPLFSTQLCNSSCVYSGALTPRMLCAGYLDGRADACQGDSGGPLVCPDGDTWRLVGVVSWGRGCAEPNHPGVYAKVAEFLDWIHDTAQDSLL

SEQ ID NO: 13923 - protein, 491 aa, Artificial Sequence
  Synthetic polypeptide
PANIIMTGSNSHITILTLNVNGLNAPIKRHRLANWINSQDPSVCCIQETHLTCRDTHRLKINGWRKIYQANGKQKKAGVAILVSDKTDFKPTKIKRDKEGHYIMSLMLDDQPPMEAQYAEEGPGPGIFRAEPGDQQHPISQAVCWRSMRRGCAVLGALGLLAGAGVGSWLLVLYLCPAASQPISGTLQDEEITLSCSEASAEEALLPALPKTVSFRINSEDFLLEAQVRDQPRWLLVCHEGWSPALGLQICWSLGHLRLTHHKGVNLTDIKLNSSQEFAQLSPRLGGFLEEAWQPSFRLARLSSWRVHAGLVSHSAVRPHQGALVERIIPHPLYSAQNHDYDVALLRLQTALNFSDTVGAVCLPAKEQHFPKGSRCWVSGWGHTHPSHTYSSDMLQDTVVPLFSTQLCNSSCVYSGALTPRMLCAGYLDGRADACQGDSGGPLVCPDGDTWRLVGVVSWGRGCAEPNHPGVYAKVAEFLDWIHDTAQDSLL

SEQ ID NO: 13924 - protein, 147 aa, Artificial Sequence
  Synthetic polypeptide
PANIIMTGSNSHITILTLNVNGLNAPIKRHRLANWINSQDPSVCCIQETHLTCRDTHRLKINGWRKIYQANGKQKKAGVAILVSDKTDFKPTKIKRDKEGHYIMSLMLDDQPPMEAQYAEEGPGPGIFRAEPGDQQHPSRPDWAIGE

SEQ ID NO: 13925 - protein, 19 aa, Artificial Sequence
  Synthetic polypeptide
TNKDQKRQRRPLHNEPDAG

SEQ ID NO: 13926 - protein, 5 aa, Artificial Sequence
  Synthetic polypeptide
EPDAG

SEQ ID NO: 13927 - protein, 8 aa, Artificial Sequence
  Synthetic polypeptide
FLHFQLRA

SEQ ID NO: 13928 - protein, 481 aa, Artificial Sequence
  Synthetic polypeptide
IGTVLVCSSQHDQRRRWVISAFPTESLMLDDQPPMEAQYAEEGPGPGIFRAEPGDQQHPISQAVCWRSMRRGCAVLGALGLLAGAGVGSWLLVLYLCPAASQPISGTLQDEEITLSCSEASAEEALLPALPKTVSFRINSEDFLLEAQVRDQPRWLLVCHEGWSPALGLQICWSLGHLRLTHHKGVNLTDIKLNSSQEFAQLSPRLGGFLEEAWQPRNNCTSGQVVSLRCSECGARPLASRIVGGQSVAPGRWPWQASVALGFRHTCGGSVLAPRWVVTAAHCMHSFRLARLSSWRVHAGLVSHSAVRPHQGALVERIIPHPLYSAQNHDYDVALLRLQTALNFSDTVGAVCLPAKEQHFPKGSRCWVSGWGHTHPSHTYSSDMLQDTVVPLFSTQLCNSSCVYSGALTPRMLCAGYLDGRADACQGDSGGPLVCPDGDTWRLVGVVSWGRGCAEPNHPGVYAKVAEFLDWIHDTAQDSLL

SEQ ID NO: 13929 - protein, 412 aa, Artificial Sequence
  Synthetic polypeptide
IGTVLVCSSQHDQRRRWVISAFPTESLMLDDQPPMEAQYAEEGPGPGIFRAEPGDQQHPISQAVCWRSMRRGCAVLGALGLLAGAGVGSWLLVLYLCPAASQPISGTLQDEEITLSCSEASAEEALLPALPKTVSFRINSEDFLLEAQVRDQPRWLLVCHEGWSPALGLQICWSLGHLRLTHHKGVNLTDIKLNSSQEFAQLSPRLGGFLEEAWQPSFRLARLSSWRVHAGLVSHSAVRPHQGALVERIIPHPLYSAQNHDYDVALLRLQTALNFSDTVGAVCLPAKEQHFPKGSRCWVSGWGHTHPSHTYSSDMLQDTVVPLFSTQLCNSSCVYSGALTPRMLCAGYLDGRADACQGDSGGPLVCPDGDTWRLVGVVSWGRGCAEPNHPGVYAKVAEFLDWIHDTAQDSLL

SEQ ID NO: 13930 - protein, 68 aa, Artificial Sequence
  Synthetic polypeptide
IGTVLVCSSQHDQRRRWVISAFPTESLMLDDQPPMEAQYAEEGPGPGIFRAEPGDQQHPSRPDWAIGE

SEQ ID NO: 13931 - protein, 43 aa, Artificial Sequence
  Synthetic polypeptide
AQEVEAAGSCVRITASHLEIDHGKPLQPHGRTPGLREEPEGQM

SEQ ID NO: 13932 - protein, 95 aa, Artificial Sequence
  Synthetic polypeptide
GCRELCSHHCIPPGDRPWETTAATWEDPRTSRRARGTDVALPHHLGRPRWRCVGCCRSCPPSGNSWKSGMRSERWPETGCAWAPCWTSCYSTFTC

SEQ ID NO: 13933 - protein, 99 aa, Artificial Sequence
  Synthetic polypeptide
TMGNHCSHMGGPQDFEKSPRDRCSPPPPPREASLAVCGLLQELSSIRQFLEKRDEIREVARDWLRVGSVLDKLLFHIYLLAVLAYSITLVMLWSIWQYA

SEQ ID NO: 13934 - protein, 26 aa, Artificial Sequence
  Synthetic polypeptide
GIITVPTSDEFIHAKYLESCQDMSRP

SEQ ID NO: 13935 - protein, 33 aa, Artificial Sequence
  Synthetic polypeptide
NPARTCPGHDHFPPQHHHRHQGPCEGAKLHGTG

SEQ ID NO: 13936 - protein, 1280 aa, Artificial Sequence
  Synthetic polypeptide
VHSCKVLRILPGHVPAMITSHPNTTIAIKGHAKELNCTARGERPIIIRWEKGDTVIDPDRVMRYAIATKDNGDEVVSTLKLKPADRGDSVFFSCHAINSYGEDRGLIQLTVQEPPDPPELEIREVKARSMNLRWTQRFDGNSIITGFDIEYKNKSDSWDFKQSTRNISPTINQANIVDLHPASVYSIRMYSFNKIGRSEPSKELTISTEEAAPDGPPMDVTLQPVTSQSIQVTWKAPKKELQNGVIRGYQIGYRENSPGSNGQYSIVEMKATGDSEVYTLDNLKKFAQYGVVVQAFNRAGTGPSSSEINATTLEDVPSQPPENVRALSITSDVAVISWSEPPRSTLNGVLKGYRVIFWSLYVDGEWGEMQNITTTRERVELRGMEKFTNYSVQVLAYTQAGDGVRSSVLYIQTKEDVPGPPAGIKAVPSSASSVVVSWLPPTKPNGVIRKYTIFCSSPGSGQPAPSEYETSPEQLFYRIAHLNRGQQYLLWVAAVTSAGRGNSSEKVTIEPAGKAPAKIISFGGTVTTPWMKDVRLPCNSVGDPAPAVKWTKDSEDSAIPVSMDGHRLIHTNGTLLLRAVKAEDSGYYTCTATNTGGFDTIIVNLLVQVPPDQPRLTVSKTSASSITLTWIPGDNGGSSIRGFVLQYSVDNSEEWKDVFISSSERSFKLDSLKCGTWYKVKLAAKNSVGSGRISEIIEAKTHGREPSFSKDQHLFTHINSTHARLNLQGWNNGGCPITAIVLEYRPKGTWAWQGLRANSSGEVFLTELREATWYELRMRACNSAGCGNETAQFATLDYDGSTIPPIKSAQGEGDDVKKLFTIGCPVILATLGVALLFIVRKKRKEKRLKRLRDAKSLAEMLISKNNRSFDTPVKGPPQGPRLHIDIPRVQLLIEDKEGIKQLGDDKATIPVTDAEFSQAVNPQSFCTGVSLHHPTLIQSTGPLIDMSDIRPGTNPVSRKNVKSAHSTRNRYSSQWTLTKCQASTPARTLTSDWRTVGSQHGVTVTESDSYSASLSQDTDKGRNSMVSTESASSTYEELARAYEHAKLEEQLQHAKFEITECFISDSSSDQMTTGTNENADSMTSMSTPSEPGICRFTASPPKPQDADRGKNVAVPIPHRANKSDYCNLPLYAKSEAFFRKADGREPCPVVPPREASIRNLARTYHTQARHLTLDPASKSLGLPHPGAPAAASTATLPQRTLAMPAPPAGTAPPAPGPTPAEPPTAPSAAPPAPSTEPPRAGGPHTKMGGSRDSLLEMSTSGVGRSQKQGAGAYSKSYTLV

SEQ ID NO: 13937 - protein, 51 aa, Artificial Sequence; identical to SEQ ID NO: 5110
  Synthetic polypeptide

SEQ ID NO: 13938 - protein, 425 aa, Artificial Sequence; identical to SEQ ID NO: 2181
  Synthetic polypeptide

SEQ ID NO: 13939 - protein, 330 aa, Artificial Sequence; identical to SEQ ID NO: 2392
  Synthetic polypeptide

SEQ ID NO: 13940 - protein, 430 aa, Artificial Sequence; identical to SEQ ID NO: 2171
  Synthetic polypeptide

SEQ ID NO: 13941 - protein, 168 aa, Artificial Sequence; identical to SEQ ID NO: 3030
  Synthetic polypeptide

SEQ ID NO: 13942 - protein, 30 aa, Artificial Sequence; identical to SEQ ID NO: 6434
  Synthetic polypeptide

SEQ ID NO: 13943 - protein, 5 aa, Artificial Sequence
  Synthetic polypeptide
AEIRV

SEQ ID NO: 13944 - protein, 261 aa, Artificial Sequence
  Synthetic polypeptide
DQSMNSSPLVGPECDHPKIKPSSSANAIYSLAARPLPVPKLPPGEQCEGEEDTEYMTPSSRPLRPLDTSQSSRACDCDQQIDSCTYEAMYNIQSQAPSITESSTFGEGNLAAAHANTGPEESENEDDGYDVPKPPVPAVLARRTLSDISNASSSFGWLSLDGDPTTNVTEGSQVPERPPKPFPRRINSERKAGSCQQGSGPAASAATASPQLSSEIENLMSQGYSYQDIQKALVIAQNNIEMAKNILREFVSISSPAHVAT

SEQ ID NO: 13945 - protein, 50 aa, Artificial Sequence
  Synthetic polypeptide
HDETPSLLKIQKINWAWWWVSVIPATQEAEAGDSFEPGGRGCSELRSEYE

SEQ ID NO: 13946 - protein, 152 aa, Artificial Sequence
  Synthetic polypeptide
QGFTHDVQSIGMVAGAVTGIVAGALLIFLLVWLLIRRKDKERYEEEERPNEIREDAEAPKARLVKPSSSSSGSRSSRSGSSSTRSTANSASRSQRTLSTDAAPQPGLATQAYSLVGPEVRGSEPKKVHHANLTKAETTPSMIPSQSRAFQTV

SEQ ID NO: 13947 - protein, 16 aa, Artificial Sequence
  Synthetic polypeptide
RASHMMYKASAWLQEQ

SEQ ID NO: 13948 - protein, 98 aa, Artificial Sequence
  Synthetic polypeptide
GQAWWLMSVIPALWEAKEGGSPEAKSSRPAWPTWRNPVSTNNTKVSRAWWCTPVIPATQEAEAGELLEPRKRRSTKLKMRSRGTRCHPRIHLSPMPST

SEQ ID NO: 13949 - protein, 22 aa, Artificial Sequence
  Synthetic polypeptide
SQLLRRLRQENCLNPGSGEVQS

SEQ ID NO: 13950 - protein, 80 aa, Artificial Sequence
  Synthetic polypeptide
TQEAEKYKAEDEKQRDKVSSKNSLESYAFNMKATVEDEKLQGKINDEDKQKILDKCNEIINWLDKNQTAEKEEFEHQQKE

SEQ ID NO: 13951 - protein, 114 aa, Artificial Sequence
  Synthetic polypeptide
TQEAEKYKAEDEKQRDKVSSKNSLESYAFNMKATVEDEKLQGKINDEDKQKILDKCNEIINWLDKNQTAEKEEFEHQQKELEKVCNPIITKLYQSAGGMPGGMPGGFPGGGAPP

SEQ ID NO: 13952 - protein, 128 aa, Artificial Sequence
  Synthetic polypeptide
TQEAEKYKAEDEKQRDKVSSKNSLESYAFNMKATVEDEKLQGKINDEDKQKILDKCNEIINWLDKNQTAEKEEFEHQQKELEKVCNPIITKLYQSAGGMPGGMPGGFPGGGAPPSGGASSGPTIEEVD

SEQ ID NO: 13953 - protein, 318 aa, Artificial Sequence; identical to SEQ ID NO: 2451
  Synthetic polypeptide

SEQ ID NO: 13954 - protein, 31 aa, Artificial Sequence; identical to SEQ ID NO: 6383
  Synthetic polypeptide

SEQ ID NO: 13955 - protein, 2 aa, Artificial Sequence
  Synthetic polypeptide
VR

SEQ ID NO: 13956 - protein, 223 aa, Artificial Sequence
  Synthetic polypeptide
AKIAPLYSSLDWFRQTLLKKPKKRPNSPESTSSDASQPTSQDSPLPPSLSSVTSPSLPPTHASDSGSSRWSKDYDVCVCHSEEDLVAAQDLVSYLEGSTASLRCFLQLRDATPGGAIVSELCQALSSSHCRVLLITPGFLQDPWCKYQMLQALTEAPGAEGCTIPLLSGLSRAAYPPELRFMYYVDGRGPDGGFRQVKEAVMRCKLLQEGEGERDSATVSDLL

SEQ ID NO: 13957 - protein, 209 aa, Artificial Sequence
  Synthetic polypeptide
AKIAPLYSSLDWFRQTLLKKPKKRPNSPESTSSDASQPTSQDSPLPPSLSSVTSPSLPPTHASDSGSSRWSKDYDVCVCHSEEDLVAAQDLVSYLEGSTASLRCFLQLRDATPGGAIVSELCQALSSSHCRVLLITPGFLQDPWCKYQMLQALTEAPGAEGCTIPLLSGLSRAAYPPELRFMYYVDGRGPDGGFRQVKEAVMRYLQTLS

SEQ ID NO: 13958 - protein, 39 aa, Artificial Sequence
  Synthetic polypeptide
SQLLRRLRQENRLNLGGRSCSEPRSHHCTPAWTGSGRPC

SEQ ID NO: 13959 - protein, 71 aa, Artificial Sequence
  Synthetic polypeptide
TWEAEVAVSQDRTTVLQPGLVQADPAEEAQEEAQLPRKHLQRCFTAYLTGQPTTPKPQLSHVSQPATHTCE

SEQ ID NO: 13960 - protein, 21 aa, Artificial Sequence
  Synthetic polypeptide
CSLVVQSAASGKGCRDLQTLS

SEQ ID NO: 13961 - protein, 17 aa, Artificial Sequence
  Synthetic polypeptide
FKAQLLEKAVGICRHSV

SEQ ID NO: 13962 - protein, 20 aa, Artificial Sequence
  Synthetic polypeptide
PSSSKRSFWKRLSGSADTQL

SEQ ID NO: 13963 - protein, 357 aa, Artificial Sequence
  Synthetic polypeptide
NYSLSSEVGPPIISSTQTQHALHGEKGQIKCFIRSTPPPDRIAWSWKENVLESGTSGRYTVETISTEEGVISTLTISNIVRADFQTIYNCTAWNSFGSDTEIIRLKEQESVPMAVIIGVAVGAGVAFLVLMATIVAFCCARSQRNLKGVVSAKNDIRVEIVHKEPASGREGEEHSTIKQLMMDRGEFQQDSVLKQLEVLKEEEKEFQNLKDPTNGYYSVNTFKEHHSTPTISLSSCQPDLRPAGKQRVPTGMSFTNIYSTLSGQGRLYDYGQRFVLGMGSSSIELCEREFQRGSLSDSSSFLDTQCDSSVSSSGKQDGYVQFDKASKASASSSHHSQSSSQNSDPSRPLQRRMQTHV

SEQ ID NO: 13964 - protein, 369 aa, Artificial Sequence
  Synthetic polypeptide
NYSLSSEVGPPIISSTQTQHALHGEKGQIKCFIRSTPPPDRIAWSWKENVLESGTSGRYTVETISTEEGVISTLTISNIVRADFQTIYNCTAWNSFGSDTEIIRLKEQGSEMKSGAGLEAESVPMAVIIGVAVGAGVAFLVLMATIVAFCCARSQRNLKGVVSAKNDIRVEIVHKEPASGREGEEHSTIKQLMMDRGEFQQDSVLKQLEVLKEEEKEFQNLKDPTNGYYSVNTFKEHHSTPTISLSSCQPDLRPAGKQRVPTGMSFTNIYSTLSGQGRLYDYGQRFVLGMGSSSIELCEREFQRGSLSDSSSFLDTQCDSSVSSSGKQDGYVQFDKASKASASSSHHSQSSSQNSDPSRPLQRRMQTHV

SEQ ID NO: 13965 - protein, 191 aa, Artificial Sequence
  Synthetic polypeptide
NYSLSSEVGPPIISSTQTQHALHGEKGQIKCFIRSTPPPDRIAWSWKENVLESGTSGRYTVETISTEEGVISTLTISNIVRADFQTIYNCTAWNSFGSDTEIIRLKEQGSEMKSGAGLEAESVPMAVIIGVAVGAGVAFLVLMATIVAFCCARSQRSTGGRSGISGRGTEKKARLRLPRRASKQECNEQGS

SEQ ID NO: 13966 - protein, 81 aa, Artificial Sequence
  Synthetic polypeptide
SFPRPPDRIILSPLKSDPPSSPAPRPSTPSTARRARSSASSGARRRRTASPGPGRRTFWSRAHRGAIRWRPSAPRRASSPP

SEQ ID NO: 13967 - protein, 93 aa, Artificial Sequence
  Synthetic polypeptide
SRTPHHLQHPDPARPPRREGPDQVLHPEHAAAGPHRLVLEGERSGVGHIGALYGGDHQHRGGRHLHPDHQQHRAGRLPDHLQLHGLEQLRLRH

SEQ ID NO: 13968 - protein, 23 aa, Artificial Sequence
  Synthetic polypeptide
IRNPGRGTQQLVIHLTFQKEASK

SEQ ID NO: 13969 - protein, 42 aa, Artificial Sequence
  Synthetic polypeptide
LLEVHIVQSSSHTPDPLNQKPWAWDPATGHSSNFPERGLKIR

SEQ ID NO: 13970 - protein, 1445 aa, Artificial Sequence
  Synthetic polypeptide
LSRKRPQNKMKKSPVGSWRSFFNLGKSSSVSKRKLQRNESEPSEMKAMALKGGRAEGTLRSAKSEESLTSLHAVDGDSKLFRPRRPRSSSDALSASFNGEMLGNRCNSYDNLPHDNESEEEGGLLHIPALMSPHSAEDVDLSPPDIGVASLDFDPMSFQCSPPKAESECLESGASFLDSPGYSKDKPSANKKDAETGSSQCQTPGSTASSEPVSPLQEKLSPFFTLDLSPTEDKSSKPSSFTEKVVYAFSPKIGRKLSKSPSMSISEPISVTLPPRVSEVIGTVSNTTAQNASSSTWDKCVEERDATNRSPTQIVKMKTNETVAQEAYESEVQPLDQVAAEEVELPGKEDQSVSSSQSKAVASGQTQTGAVTHDPPQDSVPVSSVSLIPPPPPPKNVARMLALALAESAQQASTQSLKRPGTSQAGYTNYGDIAVATTEDNLSSSYSAVALDKAYFQTDRPAEQFHLQNNAPGNCDHPLPETTATGDPTHSNTTESGEQHHQVDLTGNQPHQAYLSGDPEKARITSVPLDSEKSDDHVSFPEDQSGKNSMPTVSFLDQDQSPPRFYSGDQPPSYLGASVDKLHHPLEFADKSPTPPNLPSDKIYPPSGSPEENTSTATMTYMTTTPATAQMSTKEASWDVAEQPTTADFAAATLQRTHRTNRPLPPPPSQRSAEQPPVVGQVQAATNIGLNNSHKVQGVVPVPERPPEPRAMDDPASAFISDSGAAAAQCPMATAVQPGLPEKVRDGARVPLLHLRAESVPAHPCGFPAPLPPTRMMESKMIAAIHSSSADATSSSNYHSFVTASSTSVDDALPLPLPVPQPKHASQKTVYSSFARPDVTTEPFGPDNCLHFNMTPNCQYRPQSVPPHHNKLEQHQVYGARSEPPASMGLRYNTYVAPGRNASGHHSKPCSRVEYVSSLSSSVRNTCYPEDIPPYPTIRRVQSLHAPPSSMIRSVPISRTEVPPDDEPAYCPRPLYQYKPYQSSQARSDYHVTQLQPYFENGRVHYRYSPYSSSSSSYYSPDGALCDVDAYGTVQLRPLHRLPNRDFAFYNPRLQGKSLYSYAGLAPRPRANVTGYFSPNDHNVVSMPPAADVKHTYTSWDLEDMEKYRMQSIRRESRARQKVKGPVMSQYDNMTPAVQDDLGGIYVIHLRSKSDPGKTGLLSVAEGKESRHAAKAISPEGEDRFYRRHPEAEMDRAHHHGGHGSTQPEKPSLPQKQSSLRSRKLPDMGCSLPEHRAHQEASHRQFCESKNGPPYPQGAGQLDYGSKGIPDTSEPVSYHNSGVKYAASGQESLRLNHKEVRLSKEMERPWVRQPSAPEKHSRDCYKEEEHLTQSIVPPPKPERSHSLKLHHTQNVERDPSVLYQYQPHGKRQSSVTVVSQYDNLEDYHSLPQHQRGVFGGGGMGTYVPPGFPHPQSRTYATALGQGAFLPAELSLQHPETQIHAE

SEQ ID NO: 13971 - protein, 378 aa, Artificial Sequence
  Synthetic polypeptide
LSRKRPQNKMKKSPVGSWRSFFNLGKSSSVSKRKLQRNESEPSEMKAMALKGGRAEGTLRSAKSEESLTSLHAVDGDSKLFRPRRPRSSSDALSASFNGEMLGNRCNSYDNLPHDNESEEEGGLLHIPALMSPHSAEDVDLSPPDIGVASLDFDPMSFQCSPPKAESECLESGASFLDSPGYSKDKPSANKKDAETGSSQCQTPGSTASSEPVSPLQEKLSPFFTLDLSPTEDKSSKPSSFTEKVVYAFSPKIGRKLSKSPSMSISEPISVTLPPRVSEVIGTVSNTTAQNASSSTWDKCVEERDATNRSPTQIVKMKTNETVAQEAYESEVQPLDQVAAEEVELPGKEDQSVSSSQSKAVASGQTQTGTVCFPPFFL

SEQ ID NO: 13972 - protein, 13 aa, Artificial Sequence
  Synthetic polypeptide
LCPRYKGNEHWSS

SEQ ID NO: 13973 - protein, 50 aa, Artificial Sequence
  Synthetic polypeptide
NAQALWSHSDLDLKCSTATASLWNPSNLDFVLGTRGMNTGVPDETLVSSS

SEQ ID NO: 13974 - protein, 25 aa, Artificial Sequence
  Synthetic polypeptide
CWKCSQEAEKSHDIVIRAFTFRRTE

SEQ ID NO: 13975 - protein, 71 aa, Artificial Sequence
  Synthetic polypeptide
ELSLSEEQNEVMKNGCESKELVYLVQIACQGKSWIVKRSYEDFRVLDKHLHLCIYDRRFSQLSELPRSDTL

SEQ ID NO: 13976 - protein, 1954 aa, Artificial Sequence
  Synthetic polypeptide
ELSLSEEQNEVMKNGCESKELVYLVQIACQGKSWIVKRSYEDFRVLDKHLHLCIYDRRFSQLSELPRSDTLKDSPESVTQMLMAYLSRLSAIAGNKINCGPALTWMEIDNKGNHLLVHEESSINTPAVGAAHVIKRYTARAPDELTLEVGDIVSVIDMPPKVLSTWWRGKHGFQVGLFPGHCVELINQKVPQSVTNSVPKPVSKKHGKLITFLRTFMKSRPTKQKLKQRGILKERVFGCDLGEHLLNSGFEVPQVLQSCTAFIERYGIVDGIYRLSGVASNIQRLRHEFDSEHVPDLTKEPYVQDIHSVGSLCKLYFRELPNPLLTYQLYEKFSDAVSAATDEERLIKIHDVIQQLPPPHYRTLEFLMRHLSLLADYCSITNMHAKNLAIVWAPNLLRSKQIESACFSGTAAFMEVRIQSVVVEFILNHVDVLFSGRISMAMQEGAASLSRPKSLLVSSPSTKLLTLEEAQARTQAQVNSPIVTENKYIEVGEGPAALQGKFHTIIEFPLERKRPQNKMKKSPVGSWRSFFNLGKSSSVSKRKLQRNESEPSEMKAMALKGGRAEGTLRSAKSEESLTSLHAVDGDSKLFRPRRPRSSSDALSASFNGEMLGNRCNSYDNLPHDNESEEEGGLLHIPALMSPHSAEDVDLSPPDIGVASLDFDPMSFQCSPPKAESECLESGASFLDSPGYSKDKPSANKKDAETGSSQCQTPGSTASSEPVSPLQEKLSPFFTLDLSPTEDKSSKPSSFTEKVVYAFSPKIGRKLSKSPSMSISEPISVTLPPRVSEVIGTVSNTTAQNASSSTWDKCVEERDATNRSPTQIVKMKTNETVAQEAYESEVQPLDQVAAEEVELPGKEDQSVSSSQSKAVASGQTQTGAVTHDPPQDSVPVSSVSLIPPPPPPKNVARMLALALAESAQQASTQSLKRPGTSQAGYTNYGDIAVATTEDNLSSSYSAVALDKAYFQTDRPAEQFHLQNNAPGNCDHPLPETTATGDPTHSNTTESGEQHHQVDLTGNQPHQAYLSGDPEKARITSVPLDSEKSDDHVSFPEDQSGKNSMPTVSFLDQDQSPPRFYSGDQPPSYLGASVDKLHHPLEFADKSPTPPNLPSDKIYPPSGSPEENTSTATMTYMTTTPATAQMSTKEASWDVAEQPTTADFAAATLQRTHRTNRPLPPPPSQRSAEQPPVVGQVQAATNIGLNNSHKVQGVVPVPERPPEPRAMDDPASAFISDSGAAAAQCPMATAVQPGLPEKVRDGARVPLLHLRAESVPAHPCGFPAPLPPTRMMESKMIAAIHSSSADATSSSNYHSFVTASSTSVDDALPLPLPVPQPKHASQKTVYSSFARPDVTTEPFGPDNCLHFNMTPNCQYRPQSVPPHHNKLEQHQVYGARSEPPASMGLRYNTYVAPGRNASGHHSKPCSRVEYVSSLSSSVRNTCYPEDIPPYPTIRRVQSLHAPPSSMIRSVPISRTEVPPDDEPAYCPRPLYQYKPYQSSQARSDYHVTQLQPYFENGRVHYRYSPYSSSSSSYYSPDGALCDVDAYGTVQLRPLHRLPNRDFAFYNPRLQGKSLYSYAGLAPRPRANVTGYFSPNDHNVVSMPPAADVKHTYTSWDLEDMEKYRMQSIRRESRARQKVKGPVMSQYDNMTPAVQDDLGGIYVIHLRSKSDPGKTGLLSVAEGKESRHAAKAISPEGEDRFYRRHPEAEMDRAHHHGGHGSTQPEKPSLPQKQSSLRSRKLPDMGCSLPEHRAHQEASHRQFCESKNGPPYPQGAGQLDYGSKGIPDTSEPVSYHNSGVKYAASGQESLRLNHKEVRLSKEMERPWVRQPSAPEKHSRDCYKEEEHLTQSIVPPPKPERSHSLKLHHTQNVERDPSVLYQYQPHGKRQSSVTVVSQYDNLEDYHSLPQHQRGVFGGGGMGTYVPPGFPHPQSRTYATALGQGAFLPAELSLQHPETQIHAE

SEQ ID NO: 13977 - protein, 887 aa, Artificial Sequence
  Synthetic polypeptide
ELSLSEEQNEVMKNGCESKELVYLVQIACQGKSWIVKRSYEDFRVLDKHLHLCIYDRRFSQLSELPRSDTLKDSPESVTQMLMAYLSRLSAIAGNKINCGPALTWMEIDNKGNHLLVHEESSINTPAVGAAHVIKRYTARAPDELTLEVGDIVSVIDMPPKVLSTWWRGKHGFQVGLFPGHCVELINQKVPQSVTNSVPKPVSKKHGKLITFLRTFMKSRPTKQKLKQRGILKERVFGCDLGEHLLNSGFEVPQVLQSCTAFIERYGIVDGIYRLSGVASNIQRLRHEFDSEHVPDLTKEPYVQDIHSVGSLCKLYFRELPNPLLTYQLYEKFSDAVSAATDEERLIKIHDVIQQLPPPHYRTLEFLMRHLSLLADYCSITNMHAKNLAIVWAPNLLRSKQIESACFSGTAAFMEVRIQSVVVEFILNHVDVLFSGRISMAMQEGAASLSRPKSLLVSSPSTKLLTLEEAQARTQAQVNSPIVTENKYIEVGEGPAALQGKFHTIIEFPLERKRPQNKMKKSPVGSWRSFFNLGKSSSVSKRKLQRNESEPSEMKAMALKGGRAEGTLRSAKSEESLTSLHAVDGDSKLFRPRRPRSSSDALSASFNGEMLGNRCNSYDNLPHDNESEEEGGLLHIPALMSPHSAEDVDLSPPDIGVASLDFDPMSFQCSPPKAESECLESGASFLDSPGYSKDKPSANKKDAETGSSQCQTPGSTASSEPVSPLQEKLSPFFTLDLSPTEDKSSKPSSFTEKVVYAFSPKIGRKLSKSPSMSISEPISVTLPPRVSEVIGTVSNTTAQNASSSTWDKCVEERDATNRSPTQIVKMKTNETVAQEAYESEVQPLDQVAAEEVELPGKEDQSVSSSQSKAVASGQTQTGTVCFPPFFL

SEQ ID NO: 13978 - protein, 14 aa, Artificial Sequence
  Synthetic polypeptide
HCNKSFHFQKNRMK

SEQ ID NO: 13979 - protein, 48 aa, Artificial Sequence
  Synthetic polypeptide
RGCSEKGTVLHCYWEWKLAQPLWKTVWRFLKELKVDLLFDPAIPLLGR

SEQ ID NO: 13980 - protein, 2055 aa, Artificial Sequence
  Synthetic polypeptide
SSNPTTRKMKSSVHSEEDDFVPELHRNVHPRERPDWEETLSAMARGADVPEIPGDLTLKTCGSTASMKVKHVKKLPFTKGHFPKMAECAHFHYENVEFGSIQLSLSEEQNEVMKNGCESKELVYLVQIACQGKSWIVKRSYEDFRVLDKHLHLCIYDRRFSQLSELPRSDTLKDSPESVTQMLMAYLSRLSAIAGNKINCGPALTWMEIDNKGNHLLVHEESSINTPAVGAAHVIKRYTARAPDELTLEVGDIVSVIDMPPKVLSTWWRGKHGFQVGLFPGHCVELINQKVPQSVTNSVPKPVSKKHGKLITFLRTFMKSRPTKQKLKQRGILKERVFGCDLGEHLLNSGFEVPQVLQSCTAFIERYGIVDGIYRLSGVASNIQRLRHEFDSEHVPDLTKEPYVQDIHSVGSLCKLYFRELPNPLLTYQLYEKFSDAVSAATDEERLIKIHDVIQQLPPPHYRTLEFLMRHLSLLADYCSITNMHAKNLAIVWAPNLLRSKQIESACFSGTAAFMEVRIQSVVVEFILNHVDVLFSGRISMAMQEGAASLSRPKSLLVSSPSTKLLTLEEAQARTQAQVNSPIVTENKYIEVGEGPAALQGKFHTIIEFPLERKRPQNKMKKSPVGSWRSFFNLGKSSSVSKRKLQRNESEPSEMKAMALKGGRAEGTLRSAKSEESLTSLHAVDGDSKLFRPRRPRSSSDALSASFNGEMLGNRCNSYDNLPHDNESEEEGGLLHIPALMSPHSAEDVDLSPPDIGVASLDFDPMSFQCSPPKAESECLESGASFLDSPGYSKDKPSANKKDAETGSSQCQTPGSTASSEPVSPLQEKLSPFFTLDLSPTEDKSSKPSSFTEKVVYAFSPKIGRKLSKSPSMSISEPISVTLPPRVSEVIGTVSNTTAQNASSSTWDKCVEERDATNRSPTQIVKMKTNETVAQEAYESEVQPLDQVAAEEVELPGKEDQSVSSSQSKAVASGQTQTGAVTHDPPQDSVPVSSVSLIPPPPPPKNVARMLALALAESAQQASTQSLKRPGTSQAGYTNYGDIAVATTEDNLSSSYSAVALDKAYFQTDRPAEQFHLQNNAPGNCDHPLPETTATGDPTHSNTTESGEQHHQVDLTGNQPHQAYLSGDPEKARITSVPLDSEKSDDHVSFPEDQSGKNSMPTVSFLDQDQSPPRFYSGDQPPSYLGASVDKLHHPLEFADKSPTPPNLPSDKIYPPSGSPEENTSTATMTYMTTTPATAQMSTKEASWDVAEQPTTADFAAATLQRTHRTNRPLPPPPSQRSAEQPPVVGQVQAATNIGLNNSHKVQGVVPVPERPPEPRAMDDPASAFISDSGAAAAQCPMATAVQPGLPEKVRDGARVPLLHLRAESVPAHPCGFPAPLPPTRMMESKMIAAIHSSSADATSSSNYHSFVTASSTSVDDALPLPLPVPQPKHASQKTVYSSFARPDVTTEPFGPDNCLHFNMTPNCQYRPQSVPPHHNKLEQHQVYGARSEPPASMGLRYNTYVAPGRNASGHHSKPCSRVEYVSSLSSSVRNTCYPEDIPPYPTIRRVQSLHAPPSSMIRSVPISRTEVPPDDEPAYCPRPLYQYKPYQSSQARSDYHVTQLQPYFENGRVHYRYSPYSSSSSSYYSPDGALCDVDAYGTVQLRPLHRLPNRDFAFYNPRLQGKSLYSYAGLAPRPRANVTGYFSPNDHNVVSMPPAADVKHTYTSWDLEDMEKYRMQSIRRESRARQKVKGPVMSQYDNMTPAVQDDLGGIYVIHLRSKSDPGKTGLLSVAEGKESRHAAKAISPEGEDRFYRRHPEAEMDRAHHHGGHGSTQPEKPSLPQKQSSLRSRKLPDMGCSLPEHRAHQEASHRQFCESKNGPPYPQGAGQLDYGSKGIPDTSEPVSYHNSGVKYAASGQESLRLNHKEVRLSKEMERPWVRQPSAPEKHSRDCYKEEEHLTQSIVPPPKPERSHSLKLHHTQNVERDPSVLYQYQPHGKRQSSVTVVSQYDNLEDYHSLPQHQRGVFGGGGMGTYVPPGFPHPQSRTYATALGQGAFLPAELSLQHPETQIHAE

SEQ ID NO: 13981 - protein, 32 aa, Artificial Sequence
  Synthetic polypeptide
CYPEENGWNGEECEKFDMTGSCSQCRNRICCC

SEQ ID NO: 13982 - protein, 26 aa, Artificial Sequence
  Synthetic polypeptide
HDRLLQPMPEQDLLLLSLKSQCFVGS

SEQ ID NO: 13983 - protein, 82 aa, Artificial Sequence
  Synthetic polypeptide
QALAANAGTGFAVAEPQIAMFCGKLNMHVNIQTGKWEPDPTGTKSCFETKEEVLQYCQEMYPELQITNSGWRCVRITSTGTR

SEQ ID NO: 13984 - protein, 99 aa, Artificial Sequence
  Synthetic polypeptide
QALAANAGTGFAVAEPQIAMFCGKLNMHVNIQTGKWEPDPTGTKSCFETKEEVLQYCQEMYPELQITNVMEANQRVSIDNWCRRDKKQCKSRFVTPFKC

SEQ ID NO: 13985 - protein, 729 aa, Artificial Sequence
  Synthetic polypeptide
QALAANAGTGFAVAEPQIAMFCGKLNMHVNIQTGKWEPDPTGTKSCFETKEEVLQYCQEMYPELQITNVMEANQRVSIDNWCRRDKKQCKSRFVTPFKCLVGEFVSDVLLVPEKCQFFHKERMEVCENHQHWHTVVKEACLTQGMTLYSYGMLLPCGVDQFHGTEYVCCPQTKIIGSVSKEEEEEDEEEEEEEDEEEDYDVYKSEFPTEADLEDFTEAAVDEDDEDEEEGEEVVEDRDYYYDTFKGDDYNEENPTEPGSDGTMSDKEITHDVKAVCSQEAMTGPCRAVMPRWYFDLSKGKCVRFIYGGCGGNRNNFESEDYCMAVCKAMIPPTPLPTNDVDVYFETSADDNEHARFQKAKEQLEIRHRNRMDRVKKEWEEAELQAKNLPKAERQTLIQHFQAMVKALEKEAASEKQQLVETHLARVEAMLNDRRRMALENYLAALQSDPPRPHRILQALRRYVRAENKDRLHTIRHYQHVLAVDPEKAAQMKSQVMTHLHVIEERRNQSLSLLYKVPYVAQEIQEEIDELLQEQRADMDQFTASISETPVDVRVSSEESEEIPPFHPFHPFPALPENEDTQPELYHPMKKGSGVGEQDGGLIGAEEKVINSKNKVDENMVIDETLDVKEMIFNAERVGGLEEERESVGPLREDFSLSSSALIGLLVIAVAIATVIVISLVMLRKRQYGTISHGIVEVDPMLTPEERHLNKMQNHGYENPTYKYLEQMQI

SEQ ID NO: 13986 - protein, 717 aa, Artificial Sequence
  Synthetic polypeptide
QALAANAGTGFAVAEPQIAMFCGKLNMHVNIQTGKWEPDPTGTKSCFETKEEVLQYCQEMYPELQITNVMEANQRVSIDNWCRRDKKQCKSRFVTPFKCLVGEFVSDVLLVPEKCQFFHKERMEVCENHQHWHTVVKEACLTQGMTLYSYGMLLPCGVDQFHGTEYVCCPQTKIIGSVSKEEEEEDEEEEEEEDEEEDYDVYKSEFPTEADLEDFTEAAVDEDDEDEEEGEEVVEDRDYYYDTFKGDDYNEENPTEPGSDGTMSDKEITHDVKAVCSQEAMTGPCRAVMPRWYFDLSKGKCVRFIYGGCGGNRNNFESEDYCMAVCKAMIPPTPLPTNDVDVYFETSADDNEHARFQKAKEQLEIRHRNRMDRVKKEWEEAELQAKNLPKAERQTLIQHFQAMVKALEKEAASEKQQLVETHLARVEAMLNDRRRMALENYLAALQSDPPRPHRILQALRRYVRAENKDRLHTIRHYQHVLAVDPEKAAQMKSQVMTHLHVIEERRNQSLSLLYKVPYVAQEIQEEIDELLQEQRADMDQFTASISETPVDVRVSSEESEEIPPFHPFHPFPALPENEGSGVGEQDGGLIGAEEKVINSKNKVDENMVIDETLDVKEMIFNAERVGGLEEERESVGPLREDFSLSSSALIGLLVIAVAIATVIVISLVMLRKRQYGTISHGIVEVDPMLTPEERHLNKMQNHGYENPTYKYLEQMQI

SEQ ID NO: 13987 - protein, 661 aa, Artificial Sequence
  Synthetic polypeptide
QALAANAGTGFAVAEPQIAMFCGKLNMHVNIQTGKWEPDPTGTKSCFETKEEVLQYCQEMYPELQITNVMEANQRVSIDNWCRRDKKQCKSRFVTPFKCLVGEFVSDVLLVPEKCQFFHKERMEVCENHQHWHTVVKEACLTQGMTLYSYGMLLPCGVDQFHGTEYVCCPQTKIIGSVSKEEEEEDEEEEEEEDEEEDYDVYKSEFPTEADLEDFTEAAVDEDDEDEEEGEEVVEDRDYYYDTFKGDDYNEENPTEPGSDGTMSDKEITHDVKVPPTPLPTNDVDVYFETSADDNEHARFQKAKEQLEIRHRNRMDRVKKEWEEAELQAKNLPKAERQTLIQHFQAMVKALEKEAASEKQQLVETHLARVEAMLNDRRRMALENYLAALQSDPPRPHRILQALRRYVRAENKDRLHTIRHYQHVLAVDPEKAAQMKSQVMTHLHVIEERRNQSLSLLYKVPYVAQEIQEEIDELLQEQRADMDQFTASISETPVDVRVSSEESEEIPPFHPFHPFPALPENEGSGVGEQDGGLIGAEEKVINSKNKVDENMVIDETLDVKEMIFNAERVGGLEEERESVGPLREDFSLSSSALIGLLVIAVAIATVIVISLVMLRKRQYGTISHGIVEVDPMLTPEERHLNKMQNHGYENPTYKYLEQMQI

SEQ ID NO: 13988 - protein, 139 aa, Artificial Sequence
  Synthetic polypeptide
QALAANAGTGFAVAEPQIAMFCGKLNMHVNIQTGKWEPDPTGTKSCFETKEEVLQYCQEMYPELQITNVMEANQRVSIDNWCRRDKKQCKSRFVTPFKCLVGEFVSDVLLVPEKCQFFHKERMEVCENHQHWHTVVKEV

SEQ ID NO: 13989 - protein, 488 aa, Artificial Sequence
  Synthetic polypeptide
QALAANAGTGFAVAEPQIAMFCGKLNMHVNIQTGKWEPDPTGTKSCFETKEEVLQYCQEMYPELQITNVMEANQRVSIDNWCRRDKKQCKSRFVTPFKCLVPPTPLPTNDVDVYFETSADDNEHARFQKAKEQLEIRHRNRMDRVKKEWEEAELQAKNLPKAERQTLIQHFQAMVKALEKEAASEKQQLVETHLARVEAMLNDRRRMALENYLAALQSDPPRPHRILQALRRYVRAENKDRLHTIRHYQHVLAVDPEKAAQMKSQVMTHLHVIEERRNQSLSLLYKVPYVAQEIQEEIDELLQEQRADMDQFTASISETPVDVRVSSEESEEIPPFHPFHPFPALPENEGSGVGEQDGGLIGAEEKVINSKNKVDENMVIDETLDVKEMIFNAERVGGLEEERESVGPLREDFSLSSSALIGLLVIAVAIATVIVISLVMLRKRQYGTISHGIVEVDPMLTPEERHLNKMQNHGYENPTYKYLEQMQI

SEQ ID NO: 13990 - protein, 114 aa, Artificial Sequence
  Synthetic polypeptide
GRARCLTPVIPALWEAEAGGSRGQGIETILANTALAANAGTGFAVAEPQIAMFCGKLNMHVNIQTGKWEPDPTGTKSCFETKEEVLQYCQEMYPELQITNSGWRCVRITSTGTR

SEQ ID NO: 13991 - protein, 131 aa, Artificial Sequence
  Synthetic polypeptide
GRARCLTPVIPALWEAEAGGSRGQGIETILANTALAANAGTGFAVAEPQIAMFCGKLNMHVNIQTGKWEPDPTGTKSCFETKEEVLQYCQEMYPELQITNVMEANQRVSIDNWCRRDKKQCKSRFVTPFKC

SEQ ID NO: 13992 - protein, 761 aa, Artificial Sequence
  Synthetic polypeptide
GRARCLTPVIPALWEAEAGGSRGQGIETILANTALAANAGTGFAVAEPQIAMFCGKLNMHVNIQTGKWEPDPTGTKSCFETKEEVLQYCQEMYPELQITNVMEANQRVSIDNWCRRDKKQCKSRFVTPFKCLVGEFVSDVLLVPEKCQFFHKERMEVCENHQHWHTVVKEACLTQGMTLYSYGMLLPCGVDQFHGTEYVCCPQTKIIGSVSKEEEEEDEEEEEEEDEEEDYDVYKSEFPTEADLEDFTEAAVDEDDEDEEEGEEVVEDRDYYYDTFKGDDYNEENPTEPGSDGTMSDKEITHDVKAVCSQEAMTGPCRAVMPRWYFDLSKGKCVRFIYGGCGGNRNNFESEDYCMAVCKAMIPPTPLPTNDVDVYFETSADDNEHARFQKAKEQLEIRHRNRMDRVKKEWEEAELQAKNLPKAERQTLIQHFQAMVKALEKEAASEKQQLVETHLARVEAMLNDRRRMALENYLAALQSDPPRPHRILQALRRYVRAENKDRLHTIRHYQHVLAVDPEKAAQMKSQVMTHLHVIEERRNQSLSLLYKVPYVAQEIQEEIDELLQEQRADMDQFTASISETPVDVRVSSEESEEIPPFHPFHPFPALPENEDTQPELYHPMKKGSGVGEQDGGLIGAEEKVINSKNKVDENMVIDETLDVKEMIFNAERVGGLEEERESVGPLREDFSLSSSALIGLLVIAVAIATVIVISLVMLRKRQYGTISHGIVEVDPMLTPEERHLNKMQNHGYENPTYKYLEQMQI

SEQ ID NO: 13993 - protein, 749 aa, Artificial Sequence
  Synthetic polypeptide
GRARCLTPVIPALWEAEAGGSRGQGIETILANTALAANAGTGFAVAEPQIAMFCGKLNMHVNIQTGKWEPDPTGTKSCFETKEEVLQYCQEMYPELQITNVMEANQRVSIDNWCRRDKKQCKSRFVTPFKCLVGEFVSDVLLVPEKCQFFHKERMEVCENHQHWHTVVKEACLTQGMTLYSYGMLLPCGVDQFHGTEYVCCPQTKIIGSVSKEEEEEDEEEEEEEDEEEDYDVYKSEFPTEADLEDFTEAAVDEDDEDEEEGEEVVEDRDYYYDTFKGDDYNEENPTEPGSDGTMSDKEITHDVKAVCSQEAMTGPCRAVMPRWYFDLSKGKCVRFIYGGCGGNRNNFESEDYCMAVCKAMIPPTPLPTNDVDVYFETSADDNEHARFQKAKEQLEIRHRNRMDRVKKEWEEAELQAKNLPKAERQTLIQHFQAMVKALEKEAASEKQQLVETHLARVEAMLNDRRRMALENYLAALQSDPPRPHRILQALRRYVRAENKDRLHTIRHYQHVLAVDPEKAAQMKSQVMTHLHVIEERRNQSLSLLYKVPYVAQEIQEEIDELLQEQRADMDQFTASISETPVDVRVSSEESEEIPPFHPFHPFPALPENEGSGVGEQDGGLIGAEEKVINSKNKVDENMVIDETLDVKEMIFNAERVGGLEEERESVGPLREDFSLSSSALIGLLVIAVAIATVIVISLVMLRKRQYGTISHGIVEVDPMLTPEERHLNKMQNHGYENPTYKYLEQMQI

SEQ ID NO: 13994 - protein, 693 aa, Artificial Sequence
  Synthetic polypeptide
GRARCLTPVIPALWEAEAGGSRGQGIETILANTALAANAGTGFAVAEPQIAMFCGKLNMHVNIQTGKWEPDPTGTKSCFETKEEVLQYCQEMYPELQITNVMEANQRVSIDNWCRRDKKQCKSRFVTPFKCLVGEFVSDVLLVPEKCQFFHKERMEVCENHQHWHTVVKEACLTQGMTLYSYGMLLPCGVDQFHGTEYVCCPQTKIIGSVSKEEEEEDEEEEEEEDEEEDYDVYKSEFPTEADLEDFTEAAVDEDDEDEEEGEEVVEDRDYYYDTFKGDDYNEENPTEPGSDGTMSDKEITHDVKVPPTPLPTNDVDVYFETSADDNEHARFQKAKEQLEIRHRNRMDRVKKEWEEAELQAKNLPKAERQTLIQHFQAMVKALEKEAASEKQQLVETHLARVEAMLNDRRRMALENYLAALQSDPPRPHRILQALRRYVRAENKDRLHTIRHYQHVLAVDPEKAAQMKSQVMTHLHVIEERRNQSLSLLYKVPYVAQEIQEEIDELLQEQRADMDQFTASISETPVDVRVSSEESEEIPPFHPFHPFPALPENEGSGVGEQDGGLIGAEEKVINSKNKVDENMVIDETLDVKEMIFNAERVGGLEEERESVGPLREDFSLSSSALIGLLVIAVAIATVIVISLVMLRKRQYGTISHGIVEVDPMLTPEERHLNKMQNHGYENPTYKYLEQMQI

SEQ ID NO: 13995 - protein, 171 aa, Artificial Sequence
  Synthetic polypeptide
GRARCLTPVIPALWEAEAGGSRGQGIETILANTALAANAGTGFAVAEPQIAMFCGKLNMHVNIQTGKWEPDPTGTKSCFETKEEVLQYCQEMYPELQITNVMEANQRVSIDNWCRRDKKQCKSRFVTPFKCLVGEFVSDVLLVPEKCQFFHKERMEVCENHQHWHTVVKEV

SEQ ID NO: 13996 - protein, 520 aa, Artificial Sequence
  Synthetic polypeptide
GRARCLTPVIPALWEAEAGGSRGQGIETILANTALAANAGTGFAVAEPQIAMFCGKLNMHVNIQTGKWEPDPTGTKSCFETKEEVLQYCQEMYPELQITNVMEANQRVSIDNWCRRDKKQCKSRFVTPFKCLVPPTPLPTNDVDVYFETSADDNEHARFQKAKEQLEIRHRNRMDRVKKEWEEAELQAKNLPKAERQTLIQHFQAMVKALEKEAASEKQQLVETHLARVEAMLNDRRRMALENYLAALQSDPPRPHRILQALRRYVRAENKDRLHTIRHYQHVLAVDPEKAAQMKSQVMTHLHVIEERRNQSLSLLYKVPYVAQEIQEEIDELLQEQRADMDQFTASISETPVDVRVSSEESEEIPPFHPFHPFPALPENEGSGVGEQDGGLIGAEEKVINSKNKVDENMVIDETLDVKEMIFNAERVGGLEEERESVGPLREDFSLSSSALIGLLVIAVAIATVIVISLVMLRKRQYGTISHGIVEVDPMLTPEERHLNKMQNHGYENPTYKYLEQMQI

SEQ ID NO: 13997 - protein, 14 aa, Artificial Sequence
  Synthetic polypeptide
HGSCSQCRNRICCC

SEQ ID NO: 13998 - protein, 47 aa, Artificial Sequence
  Synthetic polypeptide
SQHFGRPRQADHEVRGSRPSWLTRLLQPMPEQDLLLLSLKSQCFVGS

SEQ ID NO: 13999 - protein, 31 aa, Artificial Sequence
  Synthetic polypeptide
FLKDLELEIPFGPAIPLLGSCSQCRNRICCC

SEQ ID NO: 14000 - protein, 92 aa, Artificial Sequence
  Synthetic polypeptide
KYHLAQPSHYSALAANAGTGFAVAEPQIAMFCGKLNMHVNIQTGKWEPDPTGTKSCFETKEEVLQYCQEMYPELQITNSGWRCVRITSTGTR

SEQ ID NO: 14001 - protein, 109 aa, Artificial Sequence
  Synthetic polypeptide
KYHLAQPSHYSALAANAGTGFAVAEPQIAMFCGKLNMHVNIQTGKWEPDPTGTKSCFETKEEVLQYCQEMYPELQITNVMEANQRVSIDNWCRRDKKQCKSRFVTPFKC

SEQ ID NO: 14002 - protein, 739 aa, Artificial Sequence
  Synthetic polypeptide
KYHLAQPSHYSALAANAGTGFAVAEPQIAMFCGKLNMHVNIQTGKWEPDPTGTKSCFETKEEVLQYCQEMYPELQITNVMEANQRVSIDNWCRRDKKQCKSRFVTPFKCLVGEFVSDVLLVPEKCQFFHKERMEVCENHQHWHTVVKEACLTQGMTLYSYGMLLPCGVDQFHGTEYVCCPQTKIIGSVSKEEEEEDEEEEEEEDEEEDYDVYKSEFPTEADLEDFTEAAVDEDDEDEEEGEEVVEDRDYYYDTFKGDDYNEENPTEPGSDGTMSDKEITHDVKAVCSQEAMTGPCRAVMPRWYFDLSKGKCVRFIYGGCGGNRNNFESEDYCMAVCKAMIPPTPLPTNDVDVYFETSADDNEHARFQKAKEQLEIRHRNRMDRVKKEWEEAELQAKNLPKAERQTLIQHFQAMVKALEKEAASEKQQLVETHLARVEAMLNDRRRMALENYLAALQSDPPRPHRILQALRRYVRAENKDRLHTIRHYQHVLAVDPEKAAQMKSQVMTHLHVIEERRNQSLSLLYKVPYVAQEIQEEIDELLQEQRADMDQFTASISETPVDVRVSSEESEEIPPFHPFHPFPALPENEDTQPELYHPMKKGSGVGEQDGGLIGAEEKVINSKNKVDENMVIDETLDVKEMIFNAERVGGLEEERESVGPLREDFSLSSSALIGLLVIAVAIATVIVISLVMLRKRQYGTISHGIVEVDPMLTPEERHLNKMQNHGYENPTYKYLEQMQI

SEQ ID NO: 14003 - protein, 727 aa, Artificial Sequence
  Synthetic polypeptide
KYHLAQPSHYSALAANAGTGFAVAEPQIAMFCGKLNMHVNIQTGKWEPDPTGTKSCFETKEEVLQYCQEMYPELQITNVMEANQRVSIDNWCRRDKKQCKSRFVTPFKCLVGEFVSDVLLVPEKCQFFHKERMEVCENHQHWHTVVKEACLTQGMTLYSYGMLLPCGVDQFHGTEYVCCPQTKIIGSVSKEEEEEDEEEEEEEDEEEDYDVYKSEFPTEADLEDFTEAAVDEDDEDEEEGEEVVEDRDYYYDTFKGDDYNEENPTEPGSDGTMSDKEITHDVKAVCSQEAMTGPCRAVMPRWYFDLSKGKCVRFIYGGCGGNRNNFESEDYCMAVCKAMIPPTPLPTNDVDVYFETSADDNEHARFQKAKEQLEIRHRNRMDRVKKEWEEAELQAKNLPKAERQTLIQHFQAMVKALEKEAASEKQQLVETHLARVEAMLNDRRRMALENYLAALQSDPPRPHRILQALRRYVRAENKDRLHTIRHYQHVLAVDPEKAAQMKSQVMTHLHVIEERRNQSLSLLYKVPYVAQEIQEEIDELLQEQRADMDQFTASISETPVDVRVSSEESEEIPPFHPFHPFPALPENEGSGVGEQDGGLIGAEEKVINSKNKVDENMVIDETLDVKEMIFNAERVGGLEEERESVGPLREDFSLSSSALIGLLVIAVAIATVIVISLVMLRKRQYGTISHGIVEVDPMLTPEERHLNKMQNHGYENPTYKYLEQMQI

SEQ ID NO: 14004 - protein, 671 aa, Artificial Sequence
  Synthetic polypeptide
KYHLAQPSHYSALAANAGTGFAVAEPQIAMFCGKLNMHVNIQTGKWEPDPTGTKSCFETKEEVLQYCQEMYPELQITNVMEANQRVSIDNWCRRDKKQCKSRFVTPFKCLVGEFVSDVLLVPEKCQFFHKERMEVCENHQHWHTVVKEACLTQGMTLYSYGMLLPCGVDQFHGTEYVCCPQTKIIGSVSKEEEEEDEEEEEEEDEEEDYDVYKSEFPTEADLEDFTEAAVDEDDEDEEEGEEVVEDRDYYYDTFKGDDYNEENPTEPGSDGTMSDKEITHDVKVPPTPLPTNDVDVYFETSADDNEHARFQKAKEQLEIRHRNRMDRVKKEWEEAELQAKNLPKAERQTLIQHFQAMVKALEKEAASEKQQLVETHLARVEAMLNDRRRMALENYLAALQSDPPRPHRILQALRRYVRAENKDRLHTIRHYQHVLAVDPEKAAQMKSQVMTHLHVIEERRNQSLSLLYKVPYVAQEIQEEIDELLQEQRADMDQFTASISETPVDVRVSSEESEEIPPFHPFHPFPALPENEGSGVGEQDGGLIGAEEKVINSKNKVDENMVIDETLDVKEMIFNAERVGGLEEERESVGPLREDFSLSSSALIGLLVIAVAIATVIVISLVMLRKRQYGTISHGIVEVDPMLTPEERHLNKMQNHGYENPTYKYLEQMQI

SEQ ID NO: 14005 - protein, 149 aa, Artificial Sequence
  Synthetic polypeptide
KYHLAQPSHYSALAANAGTGFAVAEPQIAMFCGKLNMHVNIQTGKWEPDPTGTKSCFETKEEVLQYCQEMYPELQITNVMEANQRVSIDNWCRRDKKQCKSRFVTPFKCLVGEFVSDVLLVPEKCQFFHKERMEVCENHQHWHTVVKEV

SEQ ID NO: 14006 - protein, 498 aa, Artificial Sequence
  Synthetic polypeptide
KYHLAQPSHYSALAANAGTGFAVAEPQIAMFCGKLNMHVNIQTGKWEPDPTGTKSCFETKEEVLQYCQEMYPELQITNVMEANQRVSIDNWCRRDKKQCKSRFVTPFKCLVPPTPLPTNDVDVYFETSADDNEHARFQKAKEQLEIRHRNRMDRVKKEWEEAELQAKNLPKAERQTLIQHFQAMVKALEKEAASEKQQLVETHLARVEAMLNDRRRMALENYLAALQSDPPRPHRILQALRRYVRAENKDRLHTIRHYQHVLAVDPEKAAQMKSQVMTHLHVIEERRNQSLSLLYKVPYVAQEIQEEIDELLQEQRADMDQFTASISETPVDVRVSSEESEEIPPFHPFHPFPALPENEGSGVGEQDGGLIGAEEKVINSKNKVDENMVIDETLDVKEMIFNAERVGGLEEERESVGPLREDFSLSSSALIGLLVIAVAIATVIVISLVMLRKRQYGTISHGIVEVDPMLTPEERHLNKMQNHGYENPTYKYLEQMQI

SEQ ID NO: 14007 - protein, 53 aa, Artificial Sequence
  Synthetic polypeptide
TSSTIVEDSVVIPQGSRTRNTIWPSHPITRLLQPMPEQDLLLLSLKSQCFVGS

SEQ ID NO: 14008 - protein, 62 aa, Artificial Sequence
  Synthetic polypeptide
GDGTYHGILCSHKKVEFMSFVGTWMKLESIILSKLSQGQKTKHRMFSLIGSCSQCRNRICCC

SEQ ID NO: 14009 - protein, 57 aa, Artificial Sequence
  Synthetic polypeptide
VHVLCRDLDEAGKHHSEQTIARTEDQTPHVLTHRLLQPMPEQDLLLLSLKSQCFVGS

SEQ ID NO: 14010 - protein, 27 aa, Artificial Sequence
  Synthetic polypeptide
DQAQWLTPVIPTLGEAEAGVDHKWVNL

SEQ ID NO: 14011 - protein, 27 aa, Artificial Sequence
  Synthetic polypeptide
PGAVAHACNPNTWGGRGRGGSQVGEFV

SEQ ID NO: 14012 - protein, 651 aa, Artificial Sequence
  Synthetic polypeptide
PGAVAHACNPNTWGGRGRGGSQVGEFVSDVLLVPEKCQFFHKERMEVCENHQHWHTVVKEACLTQGMTLYSYGMLLPCGVDQFHGTEYVCCPQTKIIGSVSKEEEEEDEEEEEEEDEEEDYDVYKSEFPTEADLEDFTEAAVDEDDEDEEEGEEVVEDRDYYYDTFKGDDYNEENPTEPGSDGTMSDKEITHDVKAVCSQEAMTGPCRAVMPRWYFDLSKGKCVRFIYGGCGGNRNNFESEDYCMAVCKAMIPPTPLPTNDVDVYFETSADDNEHARFQKAKEQLEIRHRNRMDRVKKEWEEAELQAKNLPKAERQTLIQHFQAMVKALEKEAASEKQQLVETHLARVEAMLNDRRRMALENYLAALQSDPPRPHRILQALRRYVRAENKDRLHTIRHYQHVLAVDPEKAAQMKSQVMTHLHVIEERRNQSLSLLYKVPYVAQEIQEEIDELLQEQRADMDQFTASISETPVDVRVSSEESEEIPPFHPFHPFPALPENEDTQPELYHPMKKGSGVGEQDGGLIGAEEKVINSKNKVDENMVIDETLDVKEMIFNAERVGGLEEERESVGPLREDFSLSSSALIGLLVIAVAIATVIVISLVMLRKRQYGTISHGIVEVDPMLTPEERHLNKMQNHGYENPTYKYLEQMQI

SEQ ID NO: 14013 - protein, 639 aa, Artificial Sequence
  Synthetic polypeptide
PGAVAHACNPNTWGGRGRGGSQVGEFVSDVLLVPEKCQFFHKERMEVCENHQHWHTVVKEACLTQGMTLYSYGMLLPCGVDQFHGTEYVCCPQTKIIGSVSKEEEEEDEEEEEEEDEEEDYDVYKSEFPTEADLEDFTEAAVDEDDEDEEEGEEVVEDRDYYYDTFKGDDYNEENPTEPGSDGTMSDKEITHDVKAVCSQEAMTGPCRAVMPRWYFDLSKGKCVRFIYGGCGGNRNNFESEDYCMAVCKAMIPPTPLPTNDVDVYFETSADDNEHARFQKAKEQLEIRHRNRMDRVKKEWEEAELQAKNLPKAERQTLIQHFQAMVKALEKEAASEKQQLVETHLARVEAMLNDRRRMALENYLAALQSDPPRPHRILQALRRYVRAENKDRLHTIRHYQHVLAVDPEKAAQMKSQVMTHLHVIEERRNQSLSLLYKVPYVAQEIQEEIDELLQEQRADMDQFTASISETPVDVRVSSEESEEIPPFHPFHPFPALPENEGSGVGEQDGGLIGAEEKVINSKNKVDENMVIDETLDVKEMIFNAERVGGLEEERESVGPLREDFSLSSSALIGLLVIAVAIATVIVISLVMLRKRQYGTISHGIVEVDPMLTPEERHLNKMQNHGYENPTYKYLEQMQI

SEQ ID NO: 14014 - protein, 583 aa, Artificial Sequence
  Synthetic polypeptide
PGAVAHACNPNTWGGRGRGGSQVGEFVSDVLLVPEKCQFFHKERMEVCENHQHWHTVVKEACLTQGMTLYSYGMLLPCGVDQFHGTEYVCCPQTKIIGSVSKEEEEEDEEEEEEEDEEEDYDVYKSEFPTEADLEDFTEAAVDEDDEDEEEGEEVVEDRDYYYDTFKGDDYNEENPTEPGSDGTMSDKEITHDVKVPPTPLPTNDVDVYFETSADDNEHARFQKAKEQLEIRHRNRMDRVKKEWEEAELQAKNLPKAERQTLIQHFQAMVKALEKEAASEKQQLVETHLARVEAMLNDRRRMALENYLAALQSDPPRPHRILQALRRYVRAENKDRLHTIRHYQHVLAVDPEKAAQMKSQVMTHLHVIEERRNQSLSLLYKVPYVAQEIQEEIDELLQEQRADMDQFTASISETPVDVRVSSEESEEIPPFHPFHPFPALPENEGSGVGEQDGGLIGAEEKVINSKNKVDENMVIDETLDVKEMIFNAERVGGLEEERESVGPLREDFSLSSSALIGLLVIAVAIATVIVISLVMLRKRQYGTISHGIVEVDPMLTPEERHLNKMQNHGYENPTYKYLEQMQI

SEQ ID NO: 14015 - protein, 61 aa, Artificial Sequence
  Synthetic polypeptide
PGAVAHACNPNTWGGRGRGGSQVGEFVSDVLLVPEKCQFFHKERMEVCENHQHWHTVVKEV

SEQ ID NO: 14016 - protein, 15 aa, Artificial Sequence
  Synthetic polypeptide
SQHLGRPRPGWITSG

SEQ ID NO: 14017 - protein, 14 aa, Artificial Sequence
  Synthetic polypeptide
ERKKGGEKGRKVHY

SEQ ID NO: 14018 - protein, 24 aa, Artificial Sequence
  Synthetic polypeptide
REKERRRERKKGALLTTGSPGWPG

SEQ ID NO: 14019 - protein, 155 aa, Artificial Sequence
  Synthetic polypeptide
RERKEERKEERCTIDNRVTRVAWLNRSTILYAGNDKWCLDPRVVLLSNTQTQYSIEIQNVDVYDEGPYTCSVQTDNHPKTSRVHLIVQVSPKIVEISSDISINEGNNISLTCIATGRPEPTVTWRHISPKAVGFVSEDEYLEIQGITREQSGDYE

SEQ ID NO: 14020 - protein, 310 aa, Artificial Sequence
  Synthetic polypeptide
RERKEERKEERCTIDNRVTRVAWLNRSTILYAGNDKWCLDPRVVLLSNTQTQYSIEIQNVDVYDEGPYTCSVQTDNHPKTSRVHLIVQVSPKIVEISSDISINEGNNISLTCIATGRPEPTVTWRHISPKAVGFVSEDEYLEIQGITREQSGDYECSASNDVAAPVVRRVKVTVNYPPYISEAKGTGVPVGQKGTLQCEASAVPSAEFQWYKDDKRLIEGKKGVKVENRPFLSKLIFFNVSEHDYGNYTCVASNKLGHTNASIMLFEVKTTALTPWKGPGAVSEVSNGTSRRAGCVWLLPLLVLHLLLKF

SEQ ID NO: 14021 - protein, 271 aa, Artificial Sequence
  Synthetic polypeptide
RERKEERKEERCTIDNRVTRVAWLNRSTILYAGNDKWCLDPRVVLLSNTQTQYSIEIQNVDVYDEGPYTCSVQTDNHPKTSRVHLIVQVSPKIVEISSDISINEGNNISLTCIATGRPEPTVTWRHISPKAVGFVSEDEYLEIQGITREQSGDYECSASNDVAAPVVRRVKVTVNYPPYISEAKGTGVPVGQKGTLQCEASAVPSAEFQWYKDDKRLIEGKKGVKVENRPFLSKLIFFNVSEHDYGNYTCVASNKLGHTNASIMLFGETVL

SEQ ID NO: 14022 - protein, 299 aa, Artificial Sequence
  Synthetic polypeptide
RERKEERKEERCTIDNRVTRVAWLNRSTILYAGNDKWCLDPRVVLLSNTQTQYSIEIQNVDVYDEGPYTCSVQTDNHPKTSRVHLIVQVSPKIVEISSDISINEGNNISLTCIATGRPEPTVTWRHISPKAVGFVSEDEYLEIQGITREQSGDYECSASNDVAAPVVRRVKVTVNYPPYISEAKGTGVPVGQKGTLQCEASAVPSAEFQWYKDDKRLIEGKKGVKVENRPFLSKLIFFNVSEHDYGNYTCVASNKLGHTNASIMLFGPGAVSEVSNGTSRRAGCVWLLPLLVLHLLLKF

SEQ ID NO: 14023 - protein, 49 aa, Artificial Sequence
  Synthetic polypeptide
ATQKTEVKTTALTPWKGPGAVSEVSNGTSRRAGCVWLLPLLVLHLLLKF

SEQ ID NO: 14024 - protein, 60 aa, Artificial Sequence
  Synthetic polypeptide
EQLQSTAPSVSDAKDRSENYSPDPLERSRRRQRGEQRHVEEGRLRLAAASSGLAPASQIL

SEQ ID NO: 14025 - protein, 24 aa, Artificial Sequence
  Synthetic polypeptide
RSQDGRIGTAPVYSSQCERRKRQK

SEQ ID NO: 14026 - protein, 16 aa, Artificial Sequence
  Synthetic polypeptide
IQSTRDGNTGRRTTVS

SEQ ID NO: 14027 - protein, 19 aa, Artificial Sequence
  Synthetic polypeptide
IQSTRDGNTGRRTTVSTAA

SEQ ID NO: 14028 - protein, 34 aa, Artificial Sequence
  Synthetic polypeptide
KDVLRQKGNDTKWKSENEYRVPEMVTQEEGQQLA

SEQ ID NO: 14029 - protein, 73 aa, Artificial Sequence
  Synthetic polypeptide
KDVLRQKGNDTKWKSENEYRVPEMVTQEEGQQLARQLKVTYMEASAKIRMNVDQAFHELVRVIRKFQEQECPP

SEQ ID NO: 14030 - protein, 92 aa, Artificial Sequence
  Synthetic polypeptide
KDVLRQKGNDTKWKSENEYRVPEMVTQEEGQQLARQLKVTYMEASAKIRMNVDQAFHELVRVIRKFQEQECPPSPEPTRKEKDKKGCHCVIF

SEQ ID NO: 14031 - protein, 40 aa, Artificial Sequence
  Synthetic polypeptide
KRDNSSAADLHYKKCEKMSLGRREMIPNGNLKMNTEYQRW

SEQ ID NO: 14032 - protein, 166 aa, Artificial Sequence
  Synthetic polypeptide
GGRITRDQEFKTSLANMSYFVTDYDPTIEDSYTKQCVIDDRAARLDILDTAGQEEFGAMREQYMRTGEGFLLVFSVTDRGSFEEIYKFQRQILRVKDRDEFPMILIGNKADLDHQRQVTQEEGQQLARQLKVTYMEASAKIRMNVDQAFHELVRVIRKFQEQECPP

SEQ ID NO: 14033 - protein, 185 aa, Artificial Sequence
  Synthetic polypeptide
GGRITRDQEFKTSLANMSYFVTDYDPTIEDSYTKQCVIDDRAARLDILDTAGQEEFGAMREQYMRTGEGFLLVFSVTDRGSFEEIYKFQRQILRVKDRDEFPMILIGNKADLDHQRQVTQEEGQQLARQLKVTYMEASAKIRMNVDQAFHELVRVIRKFQEQECPPSPEPTRKEKDKKGCHCVIF

SEQ ID NO: 14034 - protein, 36 aa, Artificial Sequence
  Synthetic polypeptide
QAQWLVPVIPTLWEAEVGGSPEIRNSRPAWPTCPIL

SEQ ID NO: 14035 - protein, 31 aa, Artificial Sequence
  Synthetic polypeptide
SQHFGRLRWADHPRSGIQDQPGQHVLFCNGL

SEQ ID NO: 14036 - protein, 8 aa, Artificial Sequence
  Synthetic polypeptide
QVLFCNGL

SEQ ID NO: 14037 - protein, 181 aa, Artificial Sequence
  Synthetic polypeptide
RARWLTPVIPALWEAKAGGSRGQEIETILANKSYFVTDYDPTIEDSYTKQCVIDDRAARLDILDTAGQEEFGAMREQYMRTGEGFLLVFSVTDRGSFEEIYKFQRQILRVKDRDEFPMILIGNKADLDHQRQVTQEEGQQLARQLKVTYMEASAKIRMNVDQAFHELVRVIRKFQEQECPP

SEQ ID NO: 14038 - protein, 200 aa, Artificial Sequence
  Synthetic polypeptide
RARWLTPVIPALWEAKAGGSRGQEIETILANKSYFVTDYDPTIEDSYTKQCVIDDRAARLDILDTAGQEEFGAMREQYMRTGEGFLLVFSVTDRGSFEEIYKFQRQILRVKDRDEFPMILIGNKADLDHQRQVTQEEGQQLARQLKVTYMEASAKIRMNVDQAFHELVRVIRKFQEQECPPSPEPTRKEKDKKGCHCVIF

SEQ ID NO: 14039 - protein, 27 aa, Artificial Sequence
  Synthetic polypeptide
SQHFGRPRREDHEVRRSRPFWLTSPIL

SEQ ID NO: 14040 - protein, 25 aa, Artificial Sequence
  Synthetic polypeptide
PGTVAHACNPSTLGGQGGRITSPIL

SEQ ID NO: 14041 - protein, 28 aa, Artificial Sequence
  Synthetic polypeptide
RARWLTPVIPALWEAKAGGSRVLFCNGL

SEQ ID NO: 14042 - protein, 162 aa, Artificial Sequence
  Synthetic polypeptide
SQHFGRPRREDHESYFVTDYDPTIEDSYTKQCVIDDRAARLDILDTAGQEEFGAMREQYMRTGEGFLLVFSVTDRGSFEEIYKFQRQILRVKDRDEFPMILIGNKADLDHQRQVTQEEGQQLARQLKVTYMEASAKIRMNVDQAFHELVRVIRKFQEQECPP

SEQ ID NO: 14043 - protein, 181 aa, Artificial Sequence
  Synthetic polypeptide
SQHFGRPRREDHESYFVTDYDPTIEDSYTKQCVIDDRAARLDILDTAGQEEFGAMREQYMRTGEGFLLVFSVTDRGSFEEIYKFQRQILRVKDRDEFPMILIGNKADLDHQRQVTQEEGQQLARQLKVTYMEASAKIRMNVDQAFHELVRVIRKFQEQECPPSPEPTRKEKDKKGCHCVIF

SEQ ID NO: 14044 - protein, 64 aa, Artificial Sequence
  Synthetic polypeptide
DQPGQYGETPSLLKIQKLPRPFLVTVALWQPTFMLVPYLVKMHLQMSALRSQFTRDQMLLLPAI

SEQ ID NO: 14045 - protein, 104 aa, Artificial Sequence
  Synthetic polypeptide
EAEAGRSLEVRSLRPAWPIWRNPISTKNTKITQALSGYCGFMAANLYARSIFGEDALANVSIEKPIHQGPDAAVTGHIRIRAKSQGMALSLGDKINLSQKKTSI

SEQ ID NO: 14046 - protein, 26 aa, Artificial Sequence
  Synthetic polypeptide
KYKNYPGPFWLLWLYGSQPLCSFHIW

SEQ ID NO: 14047 - protein, 55 aa, Artificial Sequence
  Synthetic polypeptide
AGYGGSHLYSQHFGRPRQENCWMSGVGDQPGQHGFTEEHYGSWENTVVPRKTFRV

SEQ ID NO: 14048 - protein, 66 aa, Artificial Sequence
  Synthetic polypeptide
GWVWWLTLVFPALWEAKAGELLDVRSWRPAWATWIYRGALWILGEYCSTKEDIQSVMTEIRRSLGE

SEQ ID NO: 14049 - protein, 534 aa, Artificial Sequence
  Synthetic polypeptide
GWVWWLTLVFPALWEAKAGELLDVRSWRPAWATWIYRGALWILGEYCSTKEDIQSVMTEIRRSLGEIPIVESEIKKEAGELKPEEEITVGPVQKLVTEMGTYATQSALSSSRPTKKEEDRPPLRGFLLDGDFFVAASLATTLTKIALRYVALVQEKKKQNSFVAEAMLLMATILHLGKSSLPKKPITDDDVDRISLCLKVLSECSPLMNDIFNKECRQSLSHMLSAKLEEEKLSQKKESEKRNVTVQPDDPISFMQLTAKNEMNCKEDQFQLSLLAAMGNTQRKEAADPLASKLNKVTQLTGFSDPVYAEAYVHVNQYDIVLDVLVVNQTSDTLQNCTLELATLGDLKLVEKPSPLTLAPHDFANIKANVKVASTENGIIFGNIVYDVSGAASDRNCVVLSDIHIDIMDYIQPATCTDAEFRQMWAEFEWENKVTVNTNMVDLNDYLQHILKSTNMKCLTPEKALSGYCGFMAANLYARSIFGEDALANVSIEKPIHQGPDAAVTGHIRIRAKSQGMALSLGDKINLSQKKTSI

SEQ ID NO: 14050 - protein, 46 aa, Artificial Sequence
  Synthetic polypeptide
MGMVAHTCIPSTLGGQGRRIAGCQELETSLGNMDLPRSIMDPGRIL

SEQ ID NO: 14051 - protein, 8 aa, Artificial Sequence
  Synthetic polypeptide
IWIWLWIS

SEQ ID NO: 14052 - protein, 43 aa, Artificial Sequence
  Synthetic polypeptide
RTLLGQIEKYEYGSGYGYPKSIEHTRLRSTKENSAVSTGSCLF

SEQ ID NO: 14053 - protein, 191 aa, Artificial Sequence
  Synthetic polypeptide
SWIRTTATTNFYEGHYWDRLRNMNMDLVMDILRVLSTPDLEVRKKTLQLALDLVSSRNVEELVIVLKKEVIKTNNVSEHEDTDKYRQLLVRTLHSCSVRFPDMAANVIPVLMEFLSDNNEAAAADVLEFVREAIQRFDNLRMLIVEKMLEVFHAIKSVKIYRGALWILGEYCSTKEDIQSVMTEIRRSLGE

SEQ ID NO: 14054 - protein, 659 aa, Artificial Sequence
  Synthetic polypeptide
SWIRTTATTNFYEGHYWDRLRNMNMDLVMDILRVLSTPDLEVRKKTLQLALDLVSSRNVEELVIVLKKEVIKTNNVSEHEDTDKYRQLLVRTLHSCSVRFPDMAANVIPVLMEFLSDNNEAAAADVLEFVREAIQRFDNLRMLIVEKMLEVFHAIKSVKIYRGALWILGEYCSTKEDIQSVMTEIRRSLGEIPIVESEIKKEAGELKPEEEITVGPVQKLVTEMGTYATQSALSSSRPTKKEEDRPPLRGFLLDGDFFVAASLATTLTKIALRYVALVQEKKKQNSFVAEAMLLMATILHLGKSSLPKKPITDDDVDRISLCLKVLSECSPLMNDIFNKECRQSLSHMLSAKLEEEKLSQKKESEKRNVTVQPDDPISFMQLTAKNEMNCKEDQFQLSLLAAMGNTQRKEAADPLASKLNKVTQLTGFSDPVYAEAYVHVNQYDIVLDVLVVNQTSDTLQNCTLELATLGDLKLVEKPSPLTLAPHDFANIKANVKVASTENGIIFGNIVYDVSGAASDRNCVVLSDIHIDIMDYIQPATCTDAEFRQMWAEFEWENKVTVNTNMVDLNDYLQHILKSTNMKCLTPEKALSGYCGFMAANLYARSIFGEDALANVSIEKPIHQGPDAAVTGHIRIRAKSQGMALSLGDKINLSQKKTSI

SEQ ID NO: 14055 - protein, 31 aa, Artificial Sequence
  Synthetic polypeptide
AQEFKTSLGNMAHCSVERGGRGGGRPRAMPA

SEQ ID NO: 14056 - protein, 81 aa, Artificial Sequence
  Synthetic polypeptide
GCSGSCLYSQHYGRLRQEDGLSPGVQDQPGKHGPLLSGAWRTRRRPSTSNASMRETGSFRPRTRREAAMSPSGRSRRCSSA

SEQ ID NO: 14057 - protein, 119 aa, Artificial Sequence
  Synthetic polypeptide
RVQWFMLVLPALWEAETGGWFEPRSSRPAWETWPTAQWSVEDEEEAVHEQCQHERDRQLQAQDEEGGGHVPERPKQEMLLSLKPSEAPELDEDEGFGDWSQRPEQRQQHEGAQGALDSG

SEQ ID NO: 14058 - protein, 207 aa, Artificial Sequence
  Synthetic polypeptide
RVQWFMLVLPALWEAETGGWFEPRSSRPAWETWPTAQWSVEDEEEAVHEQCQHERDRQLQAQDEEGGGHVPERPKQEMLLSLKPSEAPELDEDEGFGDWSQRPEQRQQHEGAQGALDSGEPPQCRSPEGEQEDRPGLHAYEKEDSDEVHLEELSLSKEGPGPEDTVQDNLGAAGAEEEQEEHQKCQQPRTPSPLVLEGTIEQSSPPL

SEQ ID NO: 14059 - protein, 299 aa, Artificial Sequence
  Synthetic polypeptide
RVQWFMLVLPALWEAETGGWFEPRSSRPAWETWPTAQWSVEDEEEAVHEQCQHERDRQLQAQDEEGGGHVPERPKQEMLLSLKPSEAPELDEDEGFGDWSQRPEQRQQHEGAQGALDSGEPPQCRSPEGEQEDRPGLHAYEKEDSDEVHLEELSLSKEGPGPEDTVQDNLGAAGAEEEQEEHQKCQQPRTPSPLVLEGTIEQSSPPLSPTTKLIDRTESLNRSIEKSNSVKKSQPDLPISKIDQWLEQYTQAIETAGRTPKLARQASIELPSMAVASTKSRWETGEVQAQSAAKTPSCK

SEQ ID NO: 14060 - protein, 354 aa, Artificial Sequence
  Synthetic polypeptide
RVQWFMLVLPALWEAETGGWFEPRSSRPAWETWPTAQWSVEDEEEAVHEQCQHERDRQLQAQDEEGGGHVPERPKQEMLLSLKPSEAPELDEDEGFGDWSQRPEQRQQHEGAQGALDSGEPPQCRSPEGEQEDRPGLHAYEKEDSDEVHLEELSLSKEGPGPEDTVQDNLGAAGAEEEQEEHQKCQQPRTPSPLVLEGTIEQSSPPLSPTTKLIDRTESLNRSIEKSNSVKKSQPDLPISKIDQWLEQYTQAIETAGRTPKLARQASIELPSMAVASTKSRWETGEVQAQSAAKTPSCKDIVAGDMSKKSLWEQKGGSKTSSTIKSTPSGKRYKFVATGHGKYEKVLVEGGPAP

SEQ ID NO: 14061 - protein, 26 aa, Artificial Sequence
  Synthetic polypeptide
NSFRKPSRIVQAGWRRDPGCGPVAPP

SEQ ID NO: 14062 - protein, 16 aa, Artificial Sequence
  Synthetic polypeptide
QLLQEALPDCPSWLEA

SEQ ID NO: 14063 - protein, 97 aa, Artificial Sequence
  Synthetic polypeptide
STPSGSPPGLSKLAGGVILGVALWLRHDPQTTNLLYLELGDKPAPNTFYVGIYILIAVGAVMMFVGFLGCYGAIQESQCLLGTFFTCLVILFACEVA

SEQ ID NO: 14064 - protein, 143 aa, Artificial Sequence
  Synthetic polypeptide
STPSGSPPGLSKLAGGVILGVALWLRHDPQTTNLLYLELGDKPAPNTFYVGIYILIAVGAVMMFVGFLGCYGAIQESQCLLGTFFTCLVILFACEVAAGIWGFVNKDQIAKDVKQFYDQALQQAVVDDDANNAKAVVKTFHET

SEQ ID NO: 14065 - protein, 206 aa, Artificial Sequence
  Synthetic polypeptide
STPSGSPPGLSKLAGGVILGVALWLRHDPQTTNLLYLELGDKPAPNTFYVGIYILIAVGAVMMFVGFLGCYGAIQESQCLLGTFFTCLVILFACEVAAGIWGFVNKDQIAKDVKQFYDQALQQAVVDDDANNAKAVVKTFHETLDCCGSSTLTALTTSVLKNNLCPSGSNIISNLFKEDCHQKIDDLFSGKLYLIGIAAIVVAVIM

SEQ ID NO: 14066 - protein, 226 aa, Artificial Sequence
  Synthetic polypeptide
STPSGSPPGLSKLAGGVILGVALWLRHDPQTTNLLYLELGDKPAPNTFYVGIYILIAVGAVMMFVGFLGCYGAIQESQCLLGTFFTCLVILFACEVAAGIWGFVNKDQIAKDVKQFYDQALQQAVVDDDANNAKAVVKTFHETLDCCGSSTLTALTTSVLKNNLCPSGSNIISNLFKEDCHQKIDDLFSGKLYLIGIAAIVVAVIMIFEMILSMVLCCGIRNSSVY

SEQ ID NO: 14067 - protein, 226 aa, Artificial Sequence
  Synthetic polypeptide
STPSGSPPGLSKLAGGVILGVALWLRHDPQTTNLLYLELGDKPAPNTFYVGIYILIAVGAVMMFVGFLGCYGAIQESQCLLGTFFTCLVILFACEVAAGIWGFVNKDQIAKDVKQFYDQALQQAVVDDDANNAKAVVKTFHETLDCCGSSTLTALTTSVLKNNLCPSGSNIISNLFKEDCHQKIDDLFSGKLYLIGIAAIVVAVIMVSGRGRRACSLGCPFRGALC

SEQ ID NO: 14068 - protein, 36 aa, Artificial Sequence
  Synthetic polypeptide
DGTWSSLPSAMIVRLPQPHGTLPHRPGLPHLQRAVH

SEQ ID NO: 14069 - protein, 172 aa, Artificial Sequence
  Synthetic polypeptide
DGTWSSLPSAMIVRLPQPHGTLPHRPGLPHLQRAVHHRAVCRPGHGDSLLDGDRAGGVLRDGVRGPPLVRRLPQQVRGPLGAAALCPEAHFHHRPHRGRGLHGGPLRGLQGAGVCHVGHQGHPLPADPEDATRRPPGRHLEAPGLRGLHPPPGADNHPVHRLPGPHLLLVLC

SEQ ID NO: 14070 - protein, 175 aa, Artificial Sequence
  Synthetic polypeptide
DGTWSSLPSAMIVRLPQPHGTLPHRPGLPHLQRAVHHRAVCRPGHGDSLLDGDRAGGVLRDGVRGPPLVRRLPQQVRGPLGAAALCPEAHFHHRPHRGRGLHGGPLRGLQGAGVCHVGHQGHPLPADPEDATRRPPGRHLEAPGLRGLHPPPGADNHPVHRLPGPHLLLVLCVPG

SEQ ID NO: 14071 - protein, 60 aa, Artificial Sequence
  Synthetic polypeptide
DLMVLKRGIPLHKLSHVLPATIHVRWDLVLLAFRHDCEASPATWNSSSSSWSASSSACCP

SEQ ID NO: 14072 - protein, 152 aa, Artificial Sequence
  Synthetic polypeptide
DLMVLKRGIPLHKLSHVLPATIHVRWDLVLLAFRHDCEASPATWNSSSSSWSASSSACCPPSSSMPPWPRGLSSGWRSCWWCSSGRSTWSASGPPAAAASTWASGGGCALPGSPFPSSTSSWSWPPWWSSAWAPRGRCLPRRPSGASASCRS

SEQ ID NO: 14073 - protein, 23 aa, Artificial Sequence
  Synthetic polypeptide
GFPSHMELFLIVLVCLIFSVLST

SEQ ID NO: 14074 - protein, 159 aa, Artificial Sequence
  Synthetic polypeptide
GFPSHMELFLIVLVCLIFSVLSTIEQYAALATGTLFWMEIVLVVFFGTEYVVRLWSAGCRSKYVGLWGRLRFARKPISIIDLIVVVASMVVLCVGSKGQVFATSAIRGIRFLQILRMLHVDRQGGTWRLLGSVVFIHRQELITTLYIGFLGLIFSSYFV

SEQ ID NO: 14075 - protein, 555 aa, Artificial Sequence
  Synthetic polypeptide
GFPSHMELFLIVLVCLIFSVLSTIEQYAALATGTLFWMEIVLVVFFGTEYVVRLWSAGCRSKYVGLWGRLRFARKPISIIDLIVVVASMVVLCVGSKGQVFATSAIRGIRFLQILRMLHVDRQGGTWRLLGSVVFIHRQELITTLYIGFLGLIFSSYFVYLAEKDAVNESGRVEFGSYADALWWGVVTVTTIGYGDKVPQTWVGKTIASCFSVFAISFFALPAGILGSGFALKVQQKQRQKHFNRQIPAAASLIQTAWRCYAAENPDSSTWKIYIRKAPRSHTLLSPSPKPKKSVVVKKKKFKLDKDNGVTPGEKMLTVPHITCDPPEERRLDHFSVDGYDSSVRKSPTLLEVSMPHFMRTNSFAEDLDLEGETLLTPITHISQLREHHRATIKVIRRMQYFVAKKKFQQARKPYDVRDVIEQYSQGHLNLMVRIKELQRRLDQSIGKPSLFISVSEKSKDRGSNTIGARLNRVEDKVTQLDQRLALITDMLHQLLSLHGGSTPGSGGPPREGGAHITQPCGSGGSVDPELFLPSNTLPTYEQLTVPRRGPDEGS

SEQ ID NO: 14076 - protein, 62 aa, Artificial Sequence
  Synthetic polypeptide
GLPAMLTVQPTKLKEEPNTAGSEHAPFHENQQLRRGPGPGRGDSADTHHPHLTAAGTPSGHH

SEQ ID NO: 14077 - protein, 227 aa, Artificial Sequence
  Synthetic polypeptide
VSEACQPCLLYSLQNLRKSPTLLEVSMPHFMRTNSFAEDLDLEGETLLTPITHISQLREHHRATIKVIRRMQYFVAKKKFQQARKPYDVRDVIEQYSQGHLNLMVRIKELQRRLDQSIGKPSLFISVSEKSKDRGSNTIGARLNRVEDKVTQLDQRLALITDMLHQLLSLHGGSTPGSGGPPREGGAHITQPCGSGGSVDPELFLPSNTLPTYEQLTVPRRGPDEGS

SEQ ID NO: 14078 - protein, 223 aa, Artificial Sequence
  Synthetic polypeptide
GLPAMLTVQPTKLKSPTLLEVSMPHFMRTNSFAEDLDLEGETLLTPITHISQLREHHRATIKVIRRMQYFVAKKKFQQARKPYDVRDVIEQYSQGHLNLMVRIKELQRRLDQSIGKPSLFISVSEKSKDRGSNTIGARLNRVEDKVTQLDQRLALITDMLHQLLSLHGGSTPGSGGPPREGGAHITQPCGSGGSVDPELFLPSNTLPTYEQLTVPRRGPDEGS

SEQ ID NO: 14079 - protein, 77 aa, Artificial Sequence
  Synthetic polypeptide
RCACFSFAFRHDFKFLRPASHAYCTAYKTEEPNTAGSEHAPFHENQQLRRGPGPGRGDSADTHHPHLTAAGTPSGHH

SEQ ID NO: 14080 - protein, 50 aa, Artificial Sequence
  Synthetic polypeptide
AFILLSHRGLSTYNYDSTNQFAMLPRSSTLYRRFSTQEWWCMLLPWHSIK

SEQ ID NO: 14081 - protein, 43 aa, Artificial Sequence
  Synthetic polypeptide
VLTTTIQQTSSLCCHGHLHCTDDSLHRSGGVCSCPGTQSSDWV

SEQ ID NO: 14082 - protein, 518 aa, Artificial Sequence
  Synthetic polypeptide
YISLYPVKPQRFEYLQLRFNKPVRYAATVIYIVQTILYTGVVVYAPALALNQVTGFDLWGSVFATGIVCTFYCTLGGLKAVVWTDAFQMVVMIVGFLTVLIQGSTHAGGFHNVLEQSTNGSRLHIFDFDVDPLRRHTFWTITVGGTFTWLGIYGVNQSTIQRCISCKTEKHAKLALYFNLLGLWIILVCAVFSGLIMYSHFKDCDPWTSGIISAPDQLMPYFVMEIFATMPGLPGLFVACAFSGTLSTVASSINALATVTFEDFVKSCFPHLSDKLSTWISKGLCLLFGVMCTSMAVAASVMGGVVQASLSIHGMCGGPMLGLFSLGIVFPFVNWKGALGGLLTGITLSFWVAIGAFIYPAPASKTWPLPLSTDQCIKSNVTATGPPVLSSRPGIADTWYSISYLYYSAVGCLGCIVAGVIISLITGRQRGEDIQPLLIRPVCNLFCFWSKKYKTLCWCGVQHDSGTEQENLENGSARKQGAESVLQNGLRRESLVHVPGYDPKDKSYNNMAFETTHF

SEQ ID NO: 14083 - protein, 296 aa, Artificial Sequence
  Synthetic polypeptide
YISLYPVKPQRFEYLQLRFNKPVRYAATVIYIVQTILYTGVVVYAPALALNQVTGFDLWGSVFATGIVCTFYCTLGGLKAVVWTDAFQMVVMIVGFLTVLIQGSTHAGGFHNVLEQSTNGSRLHIFDFDVDPLRRHTFWTITVGGTFTWLGIYGVNQSTIQRCISCKTEKHAKLALYFNLLGLWIILVCAVFSGLIMYSHFKDCDPWTSGIISAPDQLMPYFVMEIFATMPGLPGLFVACAFSGTLSTVASSINALATVTFEDFVKSCFPHLSDKLSTWISKGLCRYSWWTFYSIS

SEQ ID NO: 14084 - protein, 515 aa, Artificial Sequence
  Synthetic polypeptide
EDASCTACRTYLQLRFNKPVRYAATVIYIVQTILYTGVVVYAPALALNQVTGFDLWGSVFATGIVCTFYCTLGGLKAVVWTDAFQMVVMIVGFLTVLIQGSTHAGGFHNVLEQSTNGSRLHIFDFDVDPLRRHTFWTITVGGTFTWLGIYGVNQSTIQRCISCKTEKHAKLALYFNLLGLWIILVCAVFSGLIMYSHFKDCDPWTSGIISAPDQLMPYFVMEIFATMPGLPGLFVACAFSGTLSTVASSINALATVTFEDFVKSCFPHLSDKLSTWISKGLCLLFGVMCTSMAVAASVMGGVVQASLSIHGMCGGPMLGLFSLGIVFPFVNWKGALGGLLTGITLSFWVAIGAFIYPAPASKTWPLPLSTDQCIKSNVTATGPPVLSSRPGIADTWYSISYLYYSAVGCLGCIVAGVIISLITGRQRGEDIQPLLIRPVCNLFCFWSKKYKTLCWCGVQHDSGTEQENLENGSARKQGAESVLQNGLRRESLVHVPGYDPKDKSYNNMAFETTHF

SEQ ID NO: 14085 - protein, 293 aa, Artificial Sequence
  Synthetic polypeptide
EDASCTACRTYLQLRFNKPVRYAATVIYIVQTILYTGVVVYAPALALNQVTGFDLWGSVFATGIVCTFYCTLGGLKAVVWTDAFQMVVMIVGFLTVLIQGSTHAGGFHNVLEQSTNGSRLHIFDFDVDPLRRHTFWTITVGGTFTWLGIYGVNQSTIQRCISCKTEKHAKLALYFNLLGLWIILVCAVFSGLIMYSHFKDCDPWTSGIISAPDQLMPYFVMEIFATMPGLPGLFVACAFSGTLSTVASSINALATVTFEDFVKSCFPHLSDKLSTWISKGLCRYSWWTFYSIS

SEQ ID NO: 14086 - protein, 71 aa, Artificial Sequence
  Synthetic polypeptide
SAHSPFAFCHDCVFPEASPEAEKMLPVQPAELTYNYDSTNQFAMLPRSSTLYRRFSTQEWWCMLLPWHSIK

SEQ ID NO: 14087 - protein, 100 aa, Artificial Sequence
  Synthetic polypeptide
VLVRYGCLKVCNNSFFFLFLLLQPCEVLTPPLPSAMIVCFLRPPQKLRRCFLYSLQNLLTTTIQQTSSLCCHGHLHCTDDSLHRSGGVCSCPGTQSSDWV

SEQ ID NO: 14088 - protein, 19 aa, Artificial Sequence
  Synthetic polypeptide
AGLNASCLGTIVKWPAPQL

SEQ ID NO: 14089 - protein, 64 aa, Artificial Sequence
  Synthetic polypeptide
LVTSSILFYLRSTVKVMRRLSRPERQLPGHHSEVASPPTMRCSRRSTRWLCWGRPTTLLPRRPP

SEQ ID NO: 14090 - protein, 120 aa, Artificial Sequence
  Synthetic polypeptide
SGQPPNYEMLKEEHEVAVLGAPHNPAPPTSTVIHIRSETSVPDHVVWSLFNTLFMNPCCLGFIAFAYSVKSRDRKMVGDVTGAQAYASTAKCLNIWALILGILMTILLIVIPVLIFQAYG

SEQ ID NO: 14091 - protein, 9 aa, Artificial Sequence
  Synthetic polypeptide
KTVWPAPQL

SEQ ID NO: 14092 - protein, 175 aa, Artificial Sequence; identical to SEQ ID NO: 2993
  Synthetic polypeptide

SEQ ID NO: 14093 - protein, 54 aa, Artificial Sequence; identical to SEQ ID NO: 4994
  Synthetic polypeptide

SEQ ID NO: 14094 - protein, 53 aa, Artificial Sequence; identical to SEQ ID NO: 5038
  Synthetic polypeptide

SEQ ID NO: 14095 - protein, 141 aa, Artificial Sequence; identical to SEQ ID NO: 3164
  Synthetic polypeptide

SEQ ID NO: 14096 - protein, 19 aa, Artificial Sequence
  Synthetic polypeptide
SQHFGRPRRPDHKWPAPQL

SEQ ID NO: 14097 - protein, 68 aa, Artificial Sequence; identical to SEQ ID NO: 4290
  Synthetic polypeptide

SEQ ID NO: 14098 - protein, 61 aa, Artificial Sequence; identical to SEQ ID NO: 4692
  Synthetic polypeptide

SEQ ID NO: 14099 - protein, 245 aa, Artificial Sequence; identical to SEQ ID NO: 2680
  Synthetic polypeptide

SEQ ID NO: 14100 - protein, 476 aa, Artificial Sequence; identical to SEQ ID NO: 2074
  Synthetic polypeptide

SEQ ID NO: 14101 - protein, 379 aa, Artificial Sequence; identical to SEQ ID NO: 2287
  Synthetic polypeptide

SEQ ID NO: 14102 - protein, 412 aa, Artificial Sequence; identical to SEQ ID NO: 2212
  Synthetic polypeptide

SEQ ID NO: 14103 - protein, 344 aa, Artificial Sequence; identical to SEQ ID NO: 2366
  Synthetic polypeptide

SEQ ID NO: 14104 - protein, 277 aa, Artificial Sequence; identical to SEQ ID NO: 2574
  Synthetic polypeptide

SEQ ID NO: 14105 - protein, 323 aa, Artificial Sequence; identical to SEQ ID NO: 2410
  Synthetic polypeptide

SEQ ID NO: 14106 - protein, 682 aa, Artificial Sequence; identical to SEQ ID NO: 1796
  Synthetic polypeptide

SEQ ID NO: 14107 - protein, 253 aa, Artificial Sequence; identical to SEQ ID NO: 2647
  Synthetic polypeptide

SEQ ID NO: 14108 - protein, 697 aa, Artificial Sequence; identical to SEQ ID NO: 1765
  Synthetic polypeptide

SEQ ID NO: 14109 - protein, 725 aa, Artificial Sequence; identical to SEQ ID NO: 1708
  Synthetic polypeptide

SEQ ID NO: 14110 - protein, 657 aa, Artificial Sequence; identical to SEQ ID NO: 1825
  Synthetic polypeptide

SEQ ID NO: 14111 - protein, 682 aa, Artificial Sequence; identical to SEQ ID NO: 1797
  Synthetic polypeptide

SEQ ID NO: 14112 - protein, 189 aa, Artificial Sequence; identical to SEQ ID NO: 2911
  Synthetic polypeptide

SEQ ID NO: 14113 - protein, 122 aa, Artificial Sequence; identical to SEQ ID NO: 3355
  Synthetic polypeptide

SEQ ID NO: 14114 - protein, 63 aa, Artificial Sequence; identical to SEQ ID NO: 4565
  Synthetic polypeptide

SEQ ID NO: 14115 - protein, 62 aa, Artificial Sequence; identical to SEQ ID NO: 4614
  Synthetic polypeptide

SEQ ID NO: 14116 - protein, 86 aa, Artificial Sequence
  Synthetic polypeptide
KNAHNIRLSGKMTLKSRTVYSVPFQLCKHMYLNITCRFAGVFHVEKNGRYSISRTEAADLCKAFNSTLPTMAQMEKALSIGFETCR

SEQ ID NO: 14117 - protein, 270 aa, Artificial Sequence
  Synthetic polypeptide
KNAHNIRLSGKMTLKSRTVYSVPFQLCKHMYLNITCRFAGVFHVEKNGRYSISRTEAADLCKAFNSTLPTMAQMEKALSIGFETCRYGFIEGHVVIPRIHPNSICAANNTGVYILTSNTSQYDTYCFNASAPPEEDCTSVTDLPNAFDGPITITIVNRDGTRYVQKGEYRTNPEDIYPSNPTDDDVSSGSSSERSSTSGDRNDVTGGRRDPNHSEGSTTLLEGYTSHYPHTKESRTFIPVTSAKTGSFGVTAVTVGDSNSNVNRSLSGDQ

SEQ ID NO: 14118 - protein, 501 aa, Artificial Sequence
  Synthetic polypeptide
KNAHNIRLSGKMTLKSRTVYSVPFQLCKHMYLNITCRFAGVFHVEKNGRYSISRTEAADLCKAFNSTLPTMAQMEKALSIGFETCRYGFIEGHVVIPRIHPNSICAANNTGVYILTSNTSQYDTYCFNASAPPEEDCTSVTDLPNAFDGPITITIVNRDGTRYVQKGEYRTNPEDIYPSNPTDDDVSSGSSSERSSTSGGYIFYTFSTVHPIPDEDSPWITDSTDRIPATNMDSSHSITLQPTANPNTGLVEDLDRTGPLSMTTQQSNSQSFSTSHEGLEEDKDHPTTSTLTSSNRNDVTGGRRDPNHSEGSTTLLEGYTSHYPHTKESRTFIPVTSAKTGSFGVTAVTVGDSNSNVNRSLSGDQDTFHPSGGSHTTHGSESDGHSHGSQEGGANTTSGPIRTPQIPEWLIILASLLALALILAVCIAVNSRRRCGQKKKLVINSGNGAVEDRKPSGLNGEASKSQEMVHLVNKESSETPDQFMTADETRNLQNVDMKIGV

SEQ ID NO: 14119 - protein, 404 aa, Artificial Sequence
  Synthetic polypeptide
KNAHNIRLSGKMTLKSRTVYSVPFQLCKHMYLNITCRFAGVFHVEKNGRYSISRTEAADLCKAFNSTLPTMAQMEKALSIGFETCRYGFIEGHVVIPRIHPNSICAANNTGVYILTSNTSQYDTYCFNASAPPEEDCTSVTDLPNAFDGPITITIVNRDGTRYVQKGEYRTNPEDIYPSNPTDDDVSSGSSSERSSTSGGYIFYTFSTVHPIPDEDSPWITDSTDRIPATNMDSSHSITLQPTANPNTGLVEDLDRTGPLSMTTRRDQDTFHPSGGSHTTHGSESDGHSHGSQEGGANTTSGPIRTPQIPEWLIILASLLALALILAVCIAVNSRRRCGQKKKLVINSGNGAVEDRKPSGLNGEASKSQEMVHLVNKESSETPDQFMTADETRNLQNVDMKIGV

SEQ ID NO: 14120 - protein, 437 aa, Artificial Sequence
  Synthetic polypeptide
KNAHNIRLSGKMTLKSRTVYSVPFQLCKHMYLNITCRFAGVFHVEKNGRYSISRTEAADLCKAFNSTLPTMAQMEKALSIGFETCRYGFIEGHVVIPRIHPNSICAANNTGVYILTSNTSQYDTYCFNASAPPEEDCTSVTDLPNAFDGPITITIVNRDGTRYVQKGEYRTNPEDIYPSNPTDDDVSSGSSSERSSTSGGYIFYTFSTVHPIPDEDSPWITDSTDRIPATNRNDVTGGRRDPNHSEGSTTLLEGYTSHYPHTKESRTFIPVTSAKTGSFGVTAVTVGDSNSNVNRSLSGDQDTFHPSGGSHTTHGSESDGHSHGSQEGGANTTSGPIRTPQIPEWLIILASLLALALILAVCIAVNSRRRCGQKKKLVINSGNGAVEDRKPSGLNGEASKSQEMVHLVNKESSETPDQFMTADETRNLQNVDMKIGV

SEQ ID NO: 14121 - protein, 369 aa, Artificial Sequence
  Synthetic polypeptide
KNAHNIRLSGKMTLKSRTVYSVPFQLCKHMYLNITCRFAGVFHVEKNGRYSISRTEAADLCKAFNSTLPTMAQMEKALSIGFETCRYGFIEGHVVIPRIHPNSICAANNTGVYILTSNTSQYDTYCFNASAPPEEDCTSVTDLPNAFDGPITITIVNRDGTRYVQKGEYRTNPEDIYPSNPTDDDVSSGSSSERSSTSGGYIFYTFSTVHPIPDEDSPWITDSTDRIPATRDQDTFHPSGGSHTTHGSESDGHSHGSQEGGANTTSGPIRTPQIPEWLIILASLLALALILAVCIAVNSRRRCGQKKKLVINSGNGAVEDRKPSGLNGEASKSQEMVHLVNKESSETPDQFMTADETRNLQNVDMKIGV

SEQ ID NO: 14122 - protein, 302 aa, Artificial Sequence
  Synthetic polypeptide
KNAHNIRLSGKMTLKSRTVYSVPFQLCKHMYLNITCRFAGVFHVEKNGRYSISRTEAADLCKAFNSTLPTMAQMEKALSIGFETCRYGFIEGHVVIPRIHPNSICAANNTGVYILTSNTSQYDTYCFNASAPPEEDCTSVTDLPNAFDGPITITIVNRDGTRYVQKGEYRTNPEDIYPSNPTDDDVSSGSSSERSSTSGGYIFYTFSTVHPIPDEDSPWITDSTDRIPATRDQDTFHPSGGSHTTHGSESDGHSHGSQEGGANTTSGPIRTPQIPEWLIILASLLALALILAVCIAVNSRRS

SEQ ID NO: 14123 - protein, 348 aa, Artificial Sequence
  Synthetic polypeptide
KNAHNIRLSGKMTLKSRTVYSVPFQLCKHMYLNITCRFAGVFHVEKNGRYSISRTEAADLCKAFNSTLPTMAQMEKALSIGFETCRYGFIEGHVVIPRIHPNSICAANNTGVYILTSNTSQYDTYCFNASAPPEEDCTSVTDLPNAFDGPITITIVNRDGTRYVQKGEYRTNPEDIYPSNPTDDDVSSGSSSERSSTSGGYIFYTFSTVHPIPDEDSPWITDSTDRIPATRHSHGSQEGGANTTSGPIRTPQIPEWLIILASLLALALILAVCIAVNSRRRCGQKKKLVINSGNGAVEDRKPSGLNGEASKSQEMVHLVNKESSETPDQFMTADETRNLQNVDMKIGV

SEQ ID NO: 14124 - protein, 707 aa, Artificial Sequence
  Synthetic polypeptide
KNAHNIRLSGKMTLKSRTVYSVPFQLCKHMYLNITCRFAGVFHVEKNGRYSISRTEAADLCKAFNSTLPTMAQMEKALSIGFETCRYGFIEGHVVIPRIHPNSICAANNTGVYILTSNTSQYDTYCFNASAPPEEDCTSVTDLPNAFDGPITITIVNRDGTRYVQKGEYRTNPEDIYPSNPTDDDVSSGSSSERSSTSGGYIFYTFSTVHPIPDEDSPWITDSTDRIPATSTSSNTISAGWEPNEENEDERDRHLSFSGSGIDDDEDFISSTISTTPRAFDHTKQNQDWTQWNPSHSNPEVLLQTTTRMTDVDRNGTTAYEGNWNPEAHPPLIHHEHHEEEETPHSTSTIQATPSSTTEETATQKEQWFGNRWHEGYRQTPKEDSHSTTGTAAASAHTSHPMQGRTTPSPEDSSWTDFFNPISHPMGRGHQAGRRMDMDSSHSITLQPTANPNTGLVEDLDRTGPLSMTTQQSNSQSFSTSHEGLEEDKDHPTTSTLTSSNRNDVTGGRRDPNHSEGSTTLLEGYTSHYPHTKESRTFIPVTSAKTGSFGVTAVTVGDSNSNVNRSLSGDQDTFHPSGGSHTTHGSESDGHSHGSQEGGANTTSGPIRTPQIPEWLIILASLLALALILAVCIAVNSRRRCGQKKKLVINSGNGAVEDRKPSGLNGEASKSQEMVHLVNKESSETPDQFMTADETRNLQNVDMKIGV

SEQ ID NO: 14125 - protein, 278 aa, Artificial Sequence
  Synthetic polypeptide
KNAHNIRLSGKMTLKSRTVYSVPFQLCKHMYLNITCRFAGVFHVEKNGRYSISRTEAADLCKAFNSTLPTMAQMEKALSIGFETCRYGFIEGHVVIPRIHPNSICAANNTGVYILTSNTSQYDTYCFNASAPPEEDCTSVTDLPNAFDGPITITIVNRDGTRYVQKGEYRTNPEDIYPSNPTDDDVSSGSSSERSSTSGGYIFYTFSTVHPIPDEDSPWITDSTDRIPATTASAHTSHPMQGRTTPSPEDSSWTDFFNPISHPMGRGHQAGRRMGNSL

SEQ ID NO: 14126 - protein, 722 aa, Artificial Sequence
  Synthetic polypeptide
KNAHNIRLSGKMTLKSRTVYSVPFQLCKHMYLNITCRFAGVFHVEKNGRYSISRTEAADLCKAFNSTLPTMAQMEKALSIGFETCRYGFIEGHVVIPRIHPNSICAANNTGVYILTSNTSQYDTYCFNASAPPEEDCTSVTDLPNAFDGPITITIVNRDGTRYVQKGEYRTNPEDIYPSNPTDDDVSSGSSSERSSTSGGYIFYTFSTVHPIPDEDSPWITDSTDRIPATTLMSTSATATETATKRQETWDWFSWLFLPSESKNHLHTTTQMAGTSSNTISAGWEPNEENEDERDRHLSFSGSGIDDDEDFISSTISTTPRAFDHTKQNQDWTQWNPSHSNPEVLLQTTTRMTADVDRNGTTAYEGNWNPEAHPPLIHHEHHEEEETPHSTSTIQATPSSTTEETATQKEQWFGNRWHEGYRQTPKEDSHSTTGTAAASAHTSHPMQGRTTPSPEDSSWTDFFNPISHPMGRGHQAGRRMDMDSSHSITLQPTANPNTGLVEDLDRTGPLSMTTRNRNDVTGGRRDPNHSEGSTTLLEGYTSHYPHTKESRTFIPVTSAKTGSFGVTAVTVGDSNSNVNRSLSGDQDTFHPSGGSHTTHGSESDGHSHGSQEGGANTTSGPIRTPQIPEWLIILASLLALALILAVCIAVNSRRRCGQKKKLVINSGNGAVEDRKPSGLNGEASKSQEMVHLVNKESSETPDQFMTADETRNLQNVDMKIGV

SEQ ID NO: 14127 - protein, 750 aa, Artificial Sequence
  Synthetic polypeptide
KNAHNIRLSGKMTLKSRTVYSVPFQLCKHMYLNITCRFAGVFHVEKNGRYSISRTEAADLCKAFNSTLPTMAQMEKALSIGFETCRYGFIEGHVVIPRIHPNSICAANNTGVYILTSNTSQYDTYCFNASAPPEEDCTSVTDLPNAFDGPITITIVNRDGTRYVQKGEYRTNPEDIYPSNPTDDDVSSGSSSERSSTSGGYIFYTFSTVHPIPDEDSPWITDSTDRIPATTLMSTSATATETATKRQETWDWFSWLFLPSESKNHLHTTTQMAGTSSNTISAGWEPNEENEDERDRHLSFSGSGIDDDEDFISSTISTTPRAFDHTKQNQDWTQWNPSHSNPEVLLQTTTRMTDVDRNGTTAYEGNWNPEAHPPLIHHEHHEEEETPHSTSTIQATPSSTTEETATQKEQWFGNRWHEGYRQTPKEDSHSTTGTAAASAHTSHPMQGRTTPSPEDSSWTDFFNPISHPMGRGHQAGRRMDMDSSHSITLQPTANPNTGLVEDLDRTGPLSMTTQQSNSQSFSTSHEGLEEDKDHPTTSTLTSSNRNDVTGGRRDPNHSEGSTTLLEGYTSHYPHTKESRTFIPVTSAKTGSFGVTAVTVGDSNSNVNRSLSGDQDTFHPSGGSHTTHGSESDGHSHGSQEGGANTTSGPIRTPQIPEWLIILASLLALALILAVCIAVNSRRRCGQKKKLVINSGNGAVEDRKPSGLNGEASKSQEMVHLVNKESSETPDQFMTADETRNLQNVDMKIGV

SEQ ID NO: 14128 - protein, 682 aa, Artificial Sequence
  Synthetic polypeptide
KNAHNIRLSGKMTLKSRTVYSVPFQLCKHMYLNITCRFAGVFHVEKNGRYSISRTEAADLCKAFNSTLPTMAQMEKALSIGFETCRYGFIEGHVVIPRIHPNSICAANNTGVYILTSNTSQYDTYCFNASAPPEEDCTSVTDLPNAFDGPITITIVNRDGTRYVQKGEYRTNPEDIYPSNPTDDDVSSGSSSERSSTSGGYIFYTFSTVHPIPDEDSPWITDSTDRIPATTLMSTSATATETATKRQETWDWFSWLFLPSESKNHLHTTTQMAGTSSNTISAGWEPNEENEDERDRHLSFSGSGIDDDEDFISSTISTTPRAFDHTKQNQDWTQWNPSHSNPEVLLQTTTRMTDVDRNGTTAYEGNWNPEAHPPLIHHEHHEEEETPHSTSTIQATPSSTTEETATQKEQWFGNRWHEGYRQTPKEDSHSTTGTAAASAHTSHPMQGRTTPSPEDSSWTDFFNPISHPMGRGHQAGRRMDMDSSHSITLQPTANPNTGLVEDLDRTGPLSMTTQQSNSQSFSTSHEGLEEDKDHPTTSTLTSSRDQDTFHPSGGSHTTHGSESDGHSHGSQEGGANTTSGPIRTPQIPEWLIILASLLALALILAVCIAVNSRRRCGQKKKLVINSGNGAVEDRKPSGLNGEASKSQEMVHLVNKESSETPDQFMTADETRNLQNVDMKIGV

SEQ ID NO: 14129 - protein, 707 aa, Artificial Sequence
  Synthetic polypeptide
KNAHNIRLSGKMTLKSRTVYSVPFQLCKHMYLNITCRFAGVFHVEKNGRYSISRTEAADLCKAFNSTLPTMAQMEKALSIGFETCRYGFIEGHVVIPRIHPNSICAANNTGVYILTSNTSQYDTYCFNASAPPEEDCTSVTDLPNAFDGPITITIVNRDGTRYVQKGEYRTNPEDIYPSNPTDDDVSSGSSSERSSTSGGYIFYTFSTVHPIPDEDSPWITDSTDRIPATTLMSTSATATETATKRQETWDWFSWLFLPSESKNHLHTTTQMAGTSSNTISAGWEPNEENEDERDRHLSFSGSGIDDDEDFISSTISTTPRAFDHTKQNQDWTQWNPSHSNPEVLLQTTTRMTDVDRNGTTAYEGNWNPEAHPPLIHHEHHEEEETPHSTSTTASAHTSHPMQGRTTPSPEDSSWTDFFNPISHPMGRGHQAGRRMDMDSSHSITLQPTANPNTGLVEDLDRTGPLSMTTQQSNSQSFSTSHEGLEEDKDHPTTSTLTSSNRNDVTGGRRDPNHSEGSTTLLEGYTSHYPHTKESRTFIPVTSAKTGSFGVTAVTVGDSNSNVNRSLSGDQDTFHPSGGSHTTHGSESDGHSHGSQEGGANTTSGPIRTPQIPEWLIILASLLALALILAVCIAVNSRRRCGQKKKLVINSGNGAVEDRKPSGLNGEASKSQEMVHLVNKESSETPDQFMTADETRNLQNVDMKIGV

SEQ ID NO: 14130 - protein, 214 aa, Artificial Sequence
  Synthetic polypeptide
KNAHNIRLSGKMTLKSRTVYSVPFQLCKHMYLNITCRFAGVFHVEKNGRYSISRTEAADLCKAFNSTLPTMAQMEKALSIGFETCRYGFIEGHVVIPRIHPNSICGANTTSGPIRTPQIPEWLIILASLLALALILAVCIAVNSRRRCGQKKKLVINSGNGAVEDRKPSGLNGEASKSQEMVHLVNKESSETPDQFMTADETRNLQNVDMKIGV

SEQ ID NO: 14131 - protein, 147 aa, Artificial Sequence
  Synthetic polypeptide
KNAHNIRLSGKMTLKSRTVYSVPFQLCKHMYLNITCRFAGVFHVEKNGRYSISRTEAADLCKAFNSTLPTMAQMEKALSIGFETCSLHCSQQSKKVWAEEKASDQQWQWSCGGQKAKWTQRRGQQVSGNGAFGEQGVVRNSRPVYDS

SEQ ID NO: 14132 - protein, 88 aa, Artificial Sequence
  Synthetic polypeptide
KNAHNIRLSGKMTLKSRTVYSVPFQLCKHMYLNITCRFAGVFHVEKNGRYSISRTEAADLCKAFNSTLPTMAQMEKALSIGFETCSST

SEQ ID NO: 14133 - protein, 19 aa, Artificial Sequence
  Synthetic polypeptide
LLNLELYIQYHFNYASICI

SEQ ID NO: 14134 - protein, 41 aa, Artificial Sequence
  Synthetic polypeptide
NCIFSTISIMQAYVFEYNLPLCRCIPRGEKWSLQHLSDGGR

SEQ ID NO: 14135 - protein, 35 aa, Artificial Sequence
  Synthetic polypeptide
AGLLLLTVMAPAMSRKENTERILKTSTPATLLMMT

SEQ ID NO: 14136 - protein, 5 aa, Artificial Sequence
  Synthetic polypeptide
QACYC

SEQ ID NO: 14137 - protein, 82 aa, Artificial Sequence
  Synthetic polypeptide
RPAIVNRDGTRYVQKGEYRTNPEDIYPSNPTDDDVSSGSSSERSSTSGDMDSSHSITLQPTANPNTGLVEDLDRTGPLSMTT

SEQ ID NO: 14138 - protein, 119 aa, Artificial Sequence
  Synthetic polypeptide
RPAIVNRDGTRYVQKGEYRTNPEDIYPSNPTDDDVSSGSSSERSSTSGDRNDVTGGRRDPNHSEGSTTLLEGYTSHYPHTKESRTFIPVTSAKTGSFGVTAVTVGDSNSNVNRSLSGDQ

SEQ ID NO: 14139 - protein, 184 aa, Artificial Sequence
  Synthetic polypeptide
RPAIVNRDGTRYVQKGEYRTNPEDIYPSNPTDDDVSSGSSSERSSTSGGDQDTFHPSGGSHTTHGSESDGHSHGSQEGGANTTSGPIRTPQIPEWLIILASLLALALILAVCIAVNSRRRCGQKKKLVINSGNGAVEDRKPSGLNGEASKSQEMVHLVNKESSETPDQFMTADETRNLQNVDMK

SEQ ID NO: 14140 - protein, 232 aa, Artificial Sequence
  Synthetic polypeptide
RPAIVNRDGTRYVQKGEYRTNPEDIYPSNPTDDDVSSGSSSERSSTSGGYIFYTFSTVHPIPDEDSPWITDSTDRIPATIQATPSSTTEETATQKEQWFGNRWHEGYRQTPKEDSHSTTGTAAASAHTSHPMQGRTTPSPEDSSWTDFFNPISHPMGRGHQAGRRMDMDSSHSITLQPTANPNTGLVEDLDRTGPLSMTTQQSNSQSFSTSHEGLEEDKDHPTTSTLTSSSK

SEQ ID NO: 14141 - protein, 149 aa, Artificial Sequence
  Synthetic polypeptide
RPAIVNRDGTRYVQKGEYRTNPEDIYPSNPTDDDVSSGSSSERSSTSGGYIFYTFSTVHPIPDEDSPWITDSTDRIPATISTTPRAFDHTKQNQDWTQWNPSHSNPEVLLQTTTRMTDVDRNGTTAYEGNWNPEAHPPLIHHEHHEEEE

SEQ ID NO: 14142 - protein, 131 aa, Artificial Sequence
  Synthetic polypeptide
RPAIVNRDGTRYVQKGEYRTNPEDIYPSNPTDDDVSSGSSSERSSTSGGYIFYTFSTVHPIPDEDSPWITDSTDRIPATKQSNSQSFSTSHEGLEEDKDHPTTSTLTSSNRNDVTGGRRDPNHSEGSTTLL

SEQ ID NO: 14143 - protein, 350 aa, Artificial Sequence
  Synthetic polypeptide
RPAIVNRDGTRYVQKGEYRTNPEDIYPSNPTDDDVSSGSSSERSSTSGGYIFYTFSTVHPIPDEDSPWITDSTDRIPATNMDSSHSITLQPTANPNTGLVEDLDRTGPLSMTTQQSNSQSFSTSHEGLEEDKDHPTTSTLTSSNRNDVTGGRRDPNHSEGSTTLLEGYTSHYPHTKESRTFIPVTSAKTGSFGVTAVTVGDSNSNVNRSLSGDQDTFHPSGGSHTTHGSESDGHSHGSQEGGANTTSGPIRTPQIPEWLIILASLLALALILAVCIAVNSRRRCGQKKKLVINSGNGAVEDRKPSGLNGEASKSQEMVHLVNKESSETPDQFMTADETRNLQNVDMKIGV

SEQ ID NO: 14144 - protein, 253 aa, Artificial Sequence
  Synthetic polypeptide
RPAIVNRDGTRYVQKGEYRTNPEDIYPSNPTDDDVSSGSSSERSSTSGGYIFYTFSTVHPIPDEDSPWITDSTDRIPATNMDSSHSITLQPTANPNTGLVEDLDRTGPLSMTTRRDQDTFHPSGGSHTTHGSESDGHSHGSQEGGANTTSGPIRTPQIPEWLIILASLLALALILAVCIAVNSRRRCGQKKKLVINSGNGAVEDRKPSGLNGEASKSQEMVHLVNKESSETPDQFMTADETRNLQNVDMKIGV

SEQ ID NO: 14145 - protein, 286 aa, Artificial Sequence
  Synthetic polypeptide
RPAIVNRDGTRYVQKGEYRTNPEDIYPSNPTDDDVSSGSSSERSSTSGGYIFYTFSTVHPIPDEDSPWITDSTDRIPATNRNDVTGGRRDPNHSEGSTTLLEGYTSHYPHTKESRTFIPVTSAKTGSFGVTAVTVGDSNSNVNRSLSGDQDTFHPSGGSHTTHGSESDGHSHGSQEGGANTTSGPIRTPQIPEWLIILASLLALALILAVCIAVNSRRRCGQKKKLVINSGNGAVEDRKPSGLNGEASKSQEMVHLVNKESSETPDQFMTADETRNLQNVDMKIGV

SEQ ID NO: 14146 - protein, 218 aa, Artificial Sequence
  Synthetic polypeptide
RPAIVNRDGTRYVQKGEYRTNPEDIYPSNPTDDDVSSGSSSERSSTSGGYIFYTFSTVHPIPDEDSPWITDSTDRIPATRDQDTFHPSGGSHTTHGSESDGHSHGSQEGGANTTSGPIRTPQIPEWLIILASLLALALILAVCIAVNSRRRCGQKKKLVINSGNGAVEDRKPSGLNGEASKSQEMVHLVNKESSETPDQFMTADETRNLQNVDMKIGV

SEQ ID NO: 14147 - protein, 151 aa, Artificial Sequence
  Synthetic polypeptide
RPAIVNRDGTRYVQKGEYRTNPEDIYPSNPTDDDVSSGSSSERSSTSGGYIFYTFSTVHPIPDEDSPWITDSTDRIPATRDQDTFHPSGGSHTTHGSESDGHSHGSQEGGANTTSGPIRTPQIPEWLIILASLLALALILAVCIAVNSRRS

SEQ ID NO: 14148 - protein, 197 aa, Artificial Sequence
  Synthetic polypeptide
RPAIVNRDGTRYVQKGEYRTNPEDIYPSNPTDDDVSSGSSSERSSTSGGYIFYTFSTVHPIPDEDSPWITDSTDRIPATRHSHGSQEGGANTTSGPIRTPQIPEWLIILASLLALALILAVCIAVNSRRRCGQKKKLVINSGNGAVEDRKPSGLNGEASKSQEMVHLVNKESSETPDQFMTADETRNLQNVDMKIGV

SEQ ID NO: 14149 - protein, 556 aa, Artificial Sequence
  Synthetic polypeptide
RPAIVNRDGTRYVQKGEYRTNPEDIYPSNPTDDDVSSGSSSERSSTSGGYIFYTFSTVHPIPDEDSPWITDSTDRIPATSTSSNTISAGWEPNEENEDERDRHLSFSGSGIDDDEDFISSTISTTPRAFDHTKQNQDWTQWNPSHSNPEVLLQTTTRMTDVDRNGTTAYEGNWNPEAHPPLIHHEHHEEEETPHSTSTIQATPSSTTEETATQKEQWFGNRWHEGYRQTPKEDSHSTTGTAAASAHTSHPMQGRTTPSPEDSSWTDFFNPISHPMGRGHQAGRRMDMDSSHSITLQPTANPNTGLVEDLDRTGPLSMTTQQSNSQSFSTSHEGLEEDKDHPTTSTLTSSNRNDVTGGRRDPNHSEGSTTLLEGYTSHYPHTKESRTFIPVTSAKTGSFGVTAVTVGDSNSNVNRSLSGDQDTFHPSGGSHTTHGSESDGHSHGSQEGGANTTSGPIRTPQIPEWLIILASLLALALILAVCIAVNSRRRCGQKKKLVINSGNGAVEDRKPSGLNGEASKSQEMVHLVNKESSETPDQFMTADETRNLQNVDMKIGV

SEQ ID NO: 14150 - protein, 127 aa, Artificial Sequence
  Synthetic polypeptide
RPAIVNRDGTRYVQKGEYRTNPEDIYPSNPTDDDVSSGSSSERSSTSGGYIFYTFSTVHPIPDEDSPWITDSTDRIPATTASAHTSHPMQGRTTPSPEDSSWTDFFNPISHPMGRGHQAGRRMGNSL

SEQ ID NO: 14151 - protein, 571 aa, Artificial Sequence
  Synthetic polypeptide
RPAIVNRDGTRYVQKGEYRTNPEDIYPSNPTDDDVSSGSSSERSSTSGGYIFYTFSTVHPIPDEDSPWITDSTDRIPATTLMSTSATATETATKRQETWDWFSWLFLPSESKNHLHTTTQMAGTSSNTISAGWEPNEENEDERDRHLSFSGSGIDDDEDFISSTISTTPRAFDHTKQNQDWTQWNPSHSNPEVLLQTTTRMTADVDRNGTTAYEGNWNPEAHPPLIHHEHHEEEETPHSTSTIQATPSSTTEETATQKEQWFGNRWHEGYRQTPKEDSHSTTGTAAASAHTSHPMQGRTTPSPEDSSWTDFFNPISHPMGRGHQAGRRMDMDSSHSITLQPTANPNTGLVEDLDRTGPLSMTTRNRNDVTGGRRDPNHSEGSTTLLEGYTSHYPHTKESRTFIPVTSAKTGSFGVTAVTVGDSNSNVNRSLSGDQDTFHPSGGSHTTHGSESDGHSHGSQEGGANTTSGPIRTPQIPEWLIILASLLALALILAVCIAVNSRRRCGQKKKLVINSGNGAVEDRKPSGLNGEASKSQEMVHLVNKESSETPDQFMTADETRNLQNVDMKIGV

SEQ ID NO: 14152 - protein, 599 aa, Artificial Sequence
  Synthetic polypeptide
RPAIVNRDGTRYVQKGEYRTNPEDIYPSNPTDDDVSSGSSSERSSTSGGYIFYTFSTVHPIPDEDSPWITDSTDRIPATTLMSTSATATETATKRQETWDWFSWLFLPSESKNHLHTTTQMAGTSSNTISAGWEPNEENEDERDRHLSFSGSGIDDDEDFISSTISTTPRAFDHTKQNQDWTQWNPSHSNPEVLLQTTTRMTDVDRNGTTAYEGNWNPEAHPPLIHHEHHEEEETPHSTSTIQATPSSTTEETATQKEQWFGNRWHEGYRQTPKEDSHSTTGTAAASAHTSHPMQGRTTPSPEDSSWTDFFNPISHPMGRGHQAGRRMDMDSSHSITLQPTANPNTGLVEDLDRTGPLSMTTQQSNSQSFSTSHEGLEEDKDHPTTSTLTSSNRNDVTGGRRDPNHSEGSTTLLEGYTSHYPHTKESRTFIPVTSAKTGSFGVTAVTVGDSNSNVNRSLSGDQDTFHPSGGSHTTHGSESDGHSHGSQEGGANTTSGPIRTPQIPEWLIILASLLALALILAVCIAVNSRRRCGQKKKLVINSGNGAVEDRKPSGLNGEASKSQEMVHLVNKESSETPDQFMTADETRNLQNVDMKIGV

SEQ ID NO: 14153 - protein, 531 aa, Artificial Sequence
  Synthetic polypeptide
RPAIVNRDGTRYVQKGEYRTNPEDIYPSNPTDDDVSSGSSSERSSTSGGYIFYTFSTVHPIPDEDSPWITDSTDRIPATTLMSTSATATETATKRQETWDWFSWLFLPSESKNHLHTTTQMAGTSSNTISAGWEPNEENEDERDRHLSFSGSGIDDDEDFISSTISTTPRAFDHTKQNQDWTQWNPSHSNPEVLLQTTTRMTDVDRNGTTAYEGNWNPEAHPPLIHHEHHEEEETPHSTSTIQATPSSTTEETATQKEQWFGNRWHEGYRQTPKEDSHSTTGTAAASAHTSHPMQGRTTPSPEDSSWTDFFNPISHPMGRGHQAGRRMDMDSSHSITLQPTANPNTGLVEDLDRTGPLSMTTQQSNSQSFSTSHEGLEEDKDHPTTSTLTSSRDQDTFHPSGGSHTTHGSESDGHSHGSQEGGANTTSGPIRTPQIPEWLIILASLLALALILAVCIAVNSRRRCGQKKKLVINSGNGAVEDRKPSGLNGEASKSQEMVHLVNKESSETPDQFMTADETRNLQNVDMKIGV

SEQ ID NO: 14154 - protein, 556 aa, Artificial Sequence
  Synthetic polypeptide
RPAIVNRDGTRYVQKGEYRTNPEDIYPSNPTDDDVSSGSSSERSSTSGGYIFYTFSTVHPIPDEDSPWITDSTDRIPATTLMSTSATATETATKRQETWDWFSWLFLPSESKNHLHTTTQMAGTSSNTISAGWEPNEENEDERDRHLSFSGSGIDDDEDFISSTISTTPRAFDHTKQNQDWTQWNPSHSNPEVLLQTTTRMTDVDRNGTTAYEGNWNPEAHPPLIHHEHHEEEETPHSTSTTASAHTSHPMQGRTTPSPEDSSWTDFFNPISHPMGRGHQAGRRMDMDSSHSITLQPTANPNTGLVEDLDRTGPLSMTTQQSNSQSFSTSHEGLEEDKDHPTTSTLTSSNRNDVTGGRRDPNHSEGSTTLLEGYTSHYPHTKESRTFIPVTSAKTGSFGVTAVTVGDSNSNVNRSLSGDQDTFHPSGGSHTTHGSESDGHSHGSQEGGANTTSGPIRTPQIPEWLIILASLLALALILAVCIAVNSRRRCGQKKKLVINSGNGAVEDRKPSGLNGEASKSQEMVHLVNKESSETPDQFMTADETRNLQNVDMKIGV

SEQ ID NO: 14155 - protein, 232 aa, Artificial Sequence
  Synthetic polypeptide
RPAIVNRDGTRYVQKGEYRTNPEDIYPSNPTDDDVSSGSSSERSSTSGGYIFYTFSTVHPIPDEDSPWITDSTDRIPATTLMSTSATATETATKRQETWDWFSWLFLPSESKNHLHTTTQMAGTSSNTISAGWEPNEENEDERDRHLSFSGSGIDDDEDFISSTNMDSSHSITLQPTANPNTGLVEDLDRTGPLSMTTQQSNSQSFSTSHEGLEEDKDHPTTSTLTSSSKDY

SEQ ID NO: 14156 - protein, 198 aa, Artificial Sequence
  Synthetic polypeptide
FANNMPKQVEVRMHDSHLGSEEPKHRHLGLRLCDKLGKNLLLTLTVFGVILGAVCGGLLRLASPIHPDVVMLIAFPGDILMRMLKMLILPLIISSLITGLSGLDAKASGRLGTRAMVYYMSTTIIAAVLGVILVLAIHPGNPKLKKQLGPGKKNDEVSSLDAFLDLIRNLFPENLVQACFQQIQTVTKKVLVAPPPDE

SEQ ID NO: 14157 - protein, 558 aa, Artificial Sequence
  Synthetic polypeptide
FANNMPKQVEVRMHDSHLGSEEPKHRHLGLRLCDKLGKNLLLTLTVFGVILGAVCGGLLRLASPIHPDVVMLIAFPGDILMRMLKMLILPLIISSLITGLSGLDAKASGRLGTRAMVYYMSTTIIAAVLGVILVLAIHPGNPKLKKQLGPGKKNDEVSSLDAFLDLIRNLFPENLVQACFQQIQTVTKKVLVAPPPDEEANATSAVVSLLNETVTEVPEETKMVIKKGLEFKDGMNVLGLIGFFIAFGIAMGKMGDQAKLMVDFFNILNEIVMKLVIMIMWYSPLGIACLICGKIIAIKDLEVVARQLGMYMVTVIIGLIIHGGIFLPLIYFVVTRKNPFSFFAGIFQAWITALGTASSAGTLPVTFRCLEENLGIDKRVTRFVLPVGATINMDGTALYEAVAAIFIAQMNGVVLDGGQIVTVSLTATLASVGAASIPSAGLVTMLLILTAVGLPTEDISLLVAVDWLLDRMRTSVNVVGDSFGAGIVYHLSKSELDTIDSQHRVHEDIEMTKTQSIYDDMKNHRESNSNQCVYAAHNSVIVDECKVHFPFMDIETCI

SEQ ID NO: 14158 - protein, 569 aa, Artificial Sequence
  Synthetic polypeptide
FANNMPKQVEVRMHDSHLGSEEPKHRHLGLRLCDKLGKNLLLTLTVFGVILGAVCGGLLRLASPIHPDVVMLIAFPGDILMRMLKMLILPLIISSLITGLSGLDAKASGRLGTRAMVYYMSTTIIAAVLGVILVLAIHPGNPKLKKQLGPGKKNDEVSSLDAFLDLIRNLFPENLVQACFQQIQTVTKKVLVAPPPDEEANATSAVVSLLNETVTEVPEETKMVIKKGLEFKDGMNVLGLIGFFIAFGIAMGKMGDQAKLMVDFFNILNEIVMKLVIMIMWYSPLGIACLICGKIIAIKDLEVVARQLGMYMVTVIIGLIIHGGIFLPLIYFVVTRKNPFSFFAGIFQAWITALGTASSAGTLPVTFRCLEENLGIDKRVTRFVLPVGATINMDGTALYEAVAAIFIAQMNGVVLDGGQIVTVSLTATLASVGAASIPSAGLVTMLLILTAVGLPTEDISLLVAVDWLLDRMRTSVNVVGDSFGAGIVYHLSKSELDTIDSQHRVHEDIEMTKTQSIYDDMKNHRESNSNQCVYAAHNSVIVDECKVTLAANGKSADCSVEEEPWKREK

SEQ ID NO: 14159 - protein, 45 aa, Artificial Sequence
  Synthetic polypeptide
FDLPTICPSRWKCECTTVILAQRNPSTGTWACACVTSWGRICCSP

SEQ ID NO: 14160 - protein, 62 aa, Artificial Sequence
  Synthetic polypeptide
GAFPPFAWRFSLLPPCEEGHVLFPFHHDLICQQYAQAGGSANARQSSWLRGTQAPAPGPAPV

SEQ ID NO: 14161 - protein, 22 aa, Artificial Sequence
  Synthetic polypeptide
ATSSKPSALLHRPLPLQERPLY

SEQ ID NO: 14162 - protein, 263 aa, Artificial Sequence
  Synthetic polypeptide
SQHFRRLRREDCLSPGVQDQPRQQAANPLLCSTARYHCKNGLCIDKSFICDGQNNCQDNSDEESCESSQEPGSGQVFVTSENQLVYYPSITYAIIGSSVIFVLVVALLALVLHHQRKRNNLMTLPVHRLQHPVLLSRLVVLDHPHHCNVTYNVNNGIQYVASQAEQNASEVGSPPSYSEALLDQRPAWYDLPPPPYSSDTESLNQADLPPYRSRSGSANSASSQAASSLLSVEDTSHSPGQPGPQEGTAEPRDSEPSQGTEEV

SEQ ID NO: 14163 - protein, 302 aa, Artificial Sequence
  Synthetic polypeptide
SQHFRRLRREDCLSPGVQDQPRQQAANPLLCSTARYHCKNGLCIDKSFICDGQNNCQDNSDEESCESSQVSLLLPRLECSGTISAHCKLRLPGSRHSPASASRVAGTTEPGSGQVFVTSENQLVYYPSITYAIIGSSVIFVLVVALLALVLHHQRKRNNLMTLPVHRLQHPVLLSRLVVLDHPHHCNVTYNVNNGIQYVASQAEQNASEVGSPPSYSEALLDQRPAWYDLPPPPYSSDTESLNQADLPPYRSRSGSANSASSQAASSLLSVEDTSHSPGQPGPQEGTAEPRDSEPSQGTEEV

SEQ ID NO: 14164 - protein, 64 aa, Artificial Sequence
  Synthetic polypeptide
VQEFKTSLGNKQQTLCFAPPPATTARTASVLTRASSAMDRITVKTTVMRKAVKVLKNPAVGRCL

SEQ ID NO: 14165 - protein, 90 aa, Artificial Sequence
  Synthetic polypeptide
VQEFKTSLGNKQQTLCFAPPPATTARTASVLTRASSAMDRITVKTTVMRKAVKVLKSHSCCPGWSAVAQSRLTASSASQVHAILLPQPPE

SEQ ID NO: 14166 - protein, 34 aa, Artificial Sequence
  Synthetic polypeptide
KLMFLRMTLCCHQKSSKPSALLHRPLPLQERPLY

SEQ ID NO: 14167 - protein, 246 aa, Artificial Sequence
  Synthetic polypeptide
PCAVTKKAANPLLCSTARYHCKNGLCIDKSFICDGQNNCQDNSDEESCESSQEPGSGQVFVTSENQLVYYPSITYAIIGSSVIFVLVVALLALVLHHQRKRNNLMTLPVHRLQHPVLLSRLVVLDHPHHCNVTYNVNNGIQYVASQAEQNASEVGSPPSYSEALLDQRPAWYDLPPPPYSSDTESLNQADLPPYRSRSGSANSASSQAASSLLSVEDTSHSPGQPGPQEGTAEPRDSEPSQGTEEV

SEQ ID NO: 14168 - protein, 285 aa, Artificial Sequence
  Synthetic polypeptide
PCAVTKKAANPLLCSTARYHCKNGLCIDKSFICDGQNNCQDNSDEESCESSQVSLLLPRLECSGTISAHCKLRLPGSRHSPASASRVAGTTEPGSGQVFVTSENQLVYYPSITYAIIGSSVIFVLVVALLALVLHHQRKRNNLMTLPVHRLQHPVLLSRLVVLDHPHHCNVTYNVNNGIQYVASQAEQNASEVGSPPSYSEALLDQRPAWYDLPPPPYSSDTESLNQADLPPYRSRSGSANSASSQAASSLLSVEDTSHSPGQPGPQEGTAEPRDSEPSQGTEEV

SEQ ID NO: 14169 - protein, 71 aa, Artificial Sequence
  Synthetic polypeptide
PGLKVNVPKNDPVLSPKKQQTLCFAPPPATTARTASVLTRASSAMDRITVKTTVMRKAVKVLKNPAVGRCL

SEQ ID NO: 14170 - protein, 97 aa, Artificial Sequence
  Synthetic polypeptide
PGLKVNVPKNDPVLSPKKQQTLCFAPPPATTARTASVLTRASSAMDRITVKTTVMRKAVKVLKSHSCCPGWSAVAQSRLTASSASQVHAILLPQPPE

SEQ ID NO: 14171 - protein, 33 aa, Artificial Sequence
  Synthetic polypeptide
KLMFLRMTLCCHQKSKPSALLHRPLPLQERPLY

SEQ ID NO: 14172 - protein, 245 aa, Artificial Sequence
  Synthetic polypeptide
PCAVTKKANPLLCSTARYHCKNGLCIDKSFICDGQNNCQDNSDEESCESSQEPGSGQVFVTSENQLVYYPSITYAIIGSSVIFVLVVALLALVLHHQRKRNNLMTLPVHRLQHPVLLSRLVVLDHPHHCNVTYNVNNGIQYVASQAEQNASEVGSPPSYSEALLDQRPAWYDLPPPPYSSDTESLNQADLPPYRSRSGSANSASSQAASSLLSVEDTSHSPGQPGPQEGTAEPRDSEPSQGTEEV

SEQ ID NO: 14173 - protein, 284 aa, Artificial Sequence
  Synthetic polypeptide
PCAVTKKANPLLCSTARYHCKNGLCIDKSFICDGQNNCQDNSDEESCESSQVSLLLPRLECSGTISAHCKLRLPGSRHSPASASRVAGTTEPGSGQVFVTSENQLVYYPSITYAIIGSSVIFVLVVALLALVLHHQRKRNNLMTLPVHRLQHPVLLSRLVVLDHPHHCNVTYNVNNGIQYVASQAEQNASEVGSPPSYSEALLDQRPAWYDLPPPPYSSDTESLNQADLPPYRSRSGSANSASSQAASSLLSVEDTSHSPGQPGPQEGTAEPRDSEPSQGTEEV

SEQ ID NO: 14174 - protein, 70 aa, Artificial Sequence
  Synthetic polypeptide
PGLKVNVPKNDPVLSPKKQTLCFAPPPATTARTASVLTRASSAMDRITVKTTVMRKAVKVLKNPAVGRCL

SEQ ID NO: 14175 - protein, 96 aa, Artificial Sequence
  Synthetic polypeptide
PGLKVNVPKNDPVLSPKKQTLCFAPPPATTARTASVLTRASSAMDRITVKTTVMRKAVKVLKSHSCCPGWSAVAQSRLTASSASQVHAILLPQPPE

SEQ ID NO: 14176 - protein, 9 aa, Artificial Sequence
  Synthetic polypeptide
ENPAVGRCL

SEQ ID NO: 14177 - protein, 208 aa, Artificial Sequence
  Synthetic polypeptide
EVRRPSAWQLPRLRKPGSGQVFVTSENQLVYYPSITYAIIGSSVIFVLVVALLALVLHHQRKRNNLMTLPVHRLQHPVLLSRLVVLDHPHHCNVTYNVNNGIQYVASQAEQNASEVGSPPSYSEALLDQRPAWYDLPPPPYSSDTESLNQADLPPYRSRSGSANSASSQAASSLLSVEDTSHSPGQPGPQEGTAEPRDSEPSQGTEEV

SEQ ID NO: 14178 - protein, 134 aa, Artificial Sequence
  Synthetic polypeptide
GASLPGRPSSEMWGAPLPCRPVWDVRSVSARPPRLRSEETLCLATAPSEKTRQWAGVCDFREPTCVLPQHHLCHHRQLRHFCAGGGPAGTGLAPPAEAEQPHDAARAPAAAPCAAVPPGGPGPPPPLQRHLQRQ

SEQ ID NO: 14179 - protein, 9 aa, Artificial Sequence
  Synthetic polypeptide
ENPAVGRCL

SEQ ID NO: 14180 - protein, 112 aa, Artificial Sequence; identical to SEQ ID NO: 3458
  Synthetic polypeptide

SEQ ID NO: 14181 - protein, 208 aa, Artificial Sequence; identical to SEQ ID NO: 2838
  Synthetic polypeptide

SEQ ID NO: 14182 - protein, 112 aa, Artificial Sequence
  Synthetic polypeptide
EVRSPSARQPHRLRSEEPLRPAATPSGKTRQWAGVCDFREPTCVLPQHHLCHHRQLRHFCAGGGPAGTGLAPPAEAEQPHDAARAPAAAPCAAVPPGGPGPPPPLQRHLQRQ

SEQ ID NO: 14183 - protein, 208 aa, Artificial Sequence
  Synthetic polypeptide
EVRSPSARQPPRLGKPGSGQVFVTSENQLVYYPSITYAIIGSSVIFVLVVALLALVLHHQRKRNNLMTLPVHRLQHPVLLSRLVVLDHPHHCNVTYNVNNGIQYVASQAEQNASEVGSPPSYSEALLDQRPAWYDLPPPPYSSDTESLNQADLPPYRSRSGSANSASSQAASSLLSVEDTSHSPGQPGPQEGTAEPRDSEPSQGTEEV

SEQ ID NO: 14184 - protein, 20 aa, Artificial Sequence
  Synthetic polypeptide
GAPPPGSHPVWENPAVGRCL

SEQ ID NO: 14185 - protein, 37 aa, Artificial Sequence
  Synthetic polypeptide
EVRSPSARQPPRLGSEERLRPAATPSGRENPAVGRCL

SEQ ID NO: 14186 - protein, 111 aa, Artificial Sequence
  Synthetic polypeptide
GAPPPGSHPVWEVRSVSARQPPRPGGRTRQWAGVCDFREPTCVLPQHHLCHHRQLRHFCAGGGPAGTGLAPPAEAEQPHDAARAPAAAPCAAVPPGGPGPPPPLQRHLQRQ

SEQ ID NO: 14187 - protein, 207 aa, Artificial Sequence
  Synthetic polypeptide
GASPPGSHPVREGEPGSGQVFVTSENQLVYYPSITYAIIGSSVIFVLVVALLALVLHHQRKRNNLMTLPVHRLQHPVLLSRLVVLDHPHHCNVTYNVNNGIQYVASQAEQNASEVGSPPSYSEALLDQRPAWYDLPPPPYSSDTESLNQADLPPYRSRSGSANSASSQAASSLLSVEDTSHSPGQPGPQEGTAEPRDSEPSQGTEEV

SEQ ID NO: 14188 - protein, 8 aa, Artificial Sequence
  Synthetic polypeptide
FLHFHLSS

SEQ ID NO: 14189 - protein, 70 aa, Artificial Sequence
  Synthetic polypeptide
GRSQDGRIGRALVYSSQRERRSRRVISAFPFEFLREDLNYHDPTVKHSTFHGEDKLISVEDLWKAWKSSE

SEQ ID NO: 14190 - protein, 83 aa, Artificial Sequence
  Synthetic polypeptide
GRSQDGRIGRALVYSSQRERRSRRVISAFPFEFLREDLNYHDPTVKHSTFHGEDKLISVEDLWKAWKSSEVYNWTVDEVVQWL

SEQ ID NO: 14191 - protein, 96 aa, Artificial Sequence
  Synthetic polypeptide
GRSQDGRIGRALVYSSQRERRSRRVISAFPFEFLREDLNYHDPTVKHSTFHGEDKLISVEDLWKAWKSSEVYNWTVDEVVQWLITYVELPQYEETF

SEQ ID NO: 14192 - protein, 98 aa, Artificial Sequence
  Synthetic polypeptide
GRSQDGRIGRALVYSSQRERRSRRVISAFPFEFLREDLNYHDPTVKHSTFHGEDKLISVEDLWKAWKSSEVYNWTVDEVVQWLITYVELPQYEETFRK

SEQ ID NO: 14193 - protein, 126 aa, Artificial Sequence
  Synthetic polypeptide
GRSQDGRIGRALVYSSQRERRSRRVISAFPFEFLREDLNYHDPTVKHSTFHGEDKLISVEDLWKAWKSSEVYNWTVDEVVQWLITYVELPQYEETFRKLQLSGHAMPRLAVTNTTMTGTVLKMTDR

SEQ ID NO: 14194 - protein, 133 aa, Artificial Sequence
  Synthetic polypeptide
GRSQDGRIGRALVYSSQRERRSRRVISAFPFEFLREDLNYHDPTVKHSTFHGEDKLISVEDLWKAWKSSEVYNWTVDEVVQWLITYVELPQYEETFRKLQLSGHAMPRLAVTNTTMTGTVLKMTDRSHRQKLQ

SEQ ID NO: 14195 - protein, 148 aa, Artificial Sequence
  Synthetic polypeptide
GRSQDGRIGRALVYSSQRERRSRRVISAFPFEFLREDLNYHDPTVKHSTFHGEDKLISVEDLWKAWKSSEVYNWTVDEVVQWLITYVELPQYEETFRKLQLSGHAMPRLAVTNTTMTGTVLKMTDRSHRQKLQLKALDTVLFGPPLCE

SEQ ID NO: 14196 - protein, 155 aa, Artificial Sequence
  Synthetic polypeptide
GRSQDGRIGRALVYSSQRERRSRRVISAFPFEFLREDLNYHDPTVKHSTFHGEDKLISVEDLWKAWKSSEVYNWTVDEVVQWLITYVELPQYEETFRKLQLSGHAMPRLAVTNTTMTGTVLKMTDRSHRQKLQLKALDTVLFGPPLLTRHNHLKD

SEQ ID NO: 14197 - protein, 627 aa, Artificial Sequence
  Synthetic polypeptide
GRSQDGRIGRALVYSSQRERRSRRVISAFPFEFLREDLNYHDPTVKHSTFHGEDKLISVEDLWKAWKSSEVYNWTVDEVVQWLITYVELPQYEETFRKLQLSGHAMPRLAVTNTTMTGTVLKMTDRSHRQKLQLKALDTVLFGPPLLTRHNHLKDFMLVVSIVIGVGGCWFAYIQNRYSKEHMKKMMKDLEGLHRAEQSLHDLQERLHKAQEEHRTVEVEKVHLEKKLRDEINLAKQEAQRLKELREGTENERSRQKYAEEELEQVREALRKAEKELESHSSWYAPEALQKWLQLTHEVEVQYYNIKKQNAEKQLLVAKEGAEKIKKKRNTLFGTFHVAHSSSLDDVDHKILTAKQALSEVTAALRERLHRWQQIEILCGFQIVNNPGIHSLVAALNIDPSWMGSTRPNPAHFIMTDDVDDMDEEIVSPLSMQSPSLQSSVRQRLTEPQHGLGSQRDLTHSDSESSLHMSDRQRVAPKPPQMSRAADEALNAMTSNGSHRLIEGVHPGSLVEKLPDSPALAKKALLALNHGLDKAHSLMELSPSAPPGGSPHLDSSRSHSPSSPDPDTPSPVGDSRALQASRNTRIPHLAGKKAVAEEDNGSIGEETDSSPGRKKFPLKIFKKPLKK

SEQ ID NO: 14198 - protein, 482 aa, Artificial Sequence
  Synthetic polypeptide
GRSQDGRIGRALVYSSQRERRSRRVISAFPFEFLREDLNYHDPTVKHSTFHGEDKLISVEDLWKAWKSSEVYNWTVDEVVQWLITYVELPQYEETFRKLQLSGHAMPRLAVTNTTMTGTVLKMTDRSHRQKLQLKALDTVLFGPPLLTRHNHLKDFMLVVSIVIGVGGCWFAYIQNRYSKEHMKKMMKDLEGLHRAEQSLHDLQERLHKAQEEHRTVEVEKVHLEKKLRDEINLAKQEAQRLKELREGTENERSRQKYAEEELEQVREALRKAEKELESHSSWYAPEALQKWLQLTHEVEVQYYNIKKQNAEKQLLVAKEGAEKIKKKRNTLFGTFHVAHSSSLDDVDHKILTAKQALSEVTAALRERLHRWQQIEILCGFQIVNNPGIHSLVAALNIDPSWMGSTRPNPAHFIMTDDVDDMDEEIVSPLSMQSPSLQSSVRQRLTEPQHGLGSQRGSSLKANRLSSKGFDPFRFGVLPPHE

SEQ ID NO: 14199 - protein, 9 aa, Artificial Sequence
  Synthetic polypeptide
VPEGRPQLP

SEQ ID NO: 14200 - protein, 126 aa, Artificial Sequence
  Synthetic polypeptide
FLKDLELEIPFDPAIPLLGIYPKDYKSCCYKDTCTRVFIAALFKIAKTWNQPKCPSTIDWIKKMWHIYTMEYYAAIKKDEFMSFVGTWMKLETIILSKISQEQKTKHRMFSLIVYNWTVDEVVQWL

SEQ ID NO: 14201 - protein, 139 aa, Artificial Sequence
  Synthetic polypeptide
FLKDLELEIPFDPAIPLLGIYPKDYKSCCYKDTCTRVFIAALFKIAKTWNQPKCPSTIDWIKKMWHIYTMEYYAAIKKDEFMSFVGTWMKLETIILSKISQEQKTKHRMFSLIVYNWTVDEVVQWLITYVELPQYEETF

SEQ ID NO: 14202 - protein, 141 aa, Artificial Sequence
  Synthetic polypeptide
FLKDLELEIPFDPAIPLLGIYPKDYKSCCYKDTCTRVFIAALFKIAKTWNQPKCPSTIDWIKKMWHIYTMEYYAAIKKDEFMSFVGTWMKLETIILSKISQEQKTKHRMFSLIVYNWTVDEVVQWLITYVELPQYEETFRK

SEQ ID NO: 14203 - protein, 169 aa, Artificial Sequence
  Synthetic polypeptide
FLKDLELEIPFDPAIPLLGIYPKDYKSCCYKDTCTRVFIAALFKIAKTWNQPKCPSTIDWIKKMWHIYTMEYYAAIKKDEFMSFVGTWMKLETIILSKISQEQKTKHRMFSLIVYNWTVDEVVQWLITYVELPQYEETFRKLQLSGHAMPRLAVTNTTMTGTVLKMTDR

SEQ ID NO: 14204 - protein, 176 aa, Artificial Sequence
  Synthetic polypeptide
FLKDLELEIPFDPAIPLLGIYPKDYKSCCYKDTCTRVFIAALFKIAKTWNQPKCPSTIDWIKKMWHIYTMEYYAAIKKDEFMSFVGTWMKLETIILSKISQEQKTKHRMFSLIVYNWTVDEVVQWLITYVELPQYEETFRKLQLSGHAMPRLAVTNTTMTGTVLKMTDRSHRQKLQ

SEQ ID NO: 14205 - protein, 191 aa, Artificial Sequence
  Synthetic polypeptide
FLKDLELEIPFDPAIPLLGIYPKDYKSCCYKDTCTRVFIAALFKIAKTWNQPKCPSTIDWIKKMWHIYTMEYYAAIKKDEFMSFVGTWMKLETIILSKISQEQKTKHRMFSLIVYNWTVDEVVQWLITYVELPQYEETFRKLQLSGHAMPRLAVTNTTMTGTVLKMTDRSHRQKLQLKALDTVLFGPPLCE

SEQ ID NO: 14206 - protein, 198 aa, Artificial Sequence
  Synthetic polypeptide
FLKDLELEIPFDPAIPLLGIYPKDYKSCCYKDTCTRVFIAALFKIAKTWNQPKCPSTIDWIKKMWHIYTMEYYAAIKKDEFMSFVGTWMKLETIILSKISQEQKTKHRMFSLIVYNWTVDEVVQWLITYVELPQYEETFRKLQLSGHAMPRLAVTNTTMTGTVLKMTDRSHRQKLQLKALDTVLFGPPLLTRHNHLKD

SEQ ID NO: 14207 - protein, 670 aa, Artificial Sequence
  Synthetic polypeptide
FLKDLELEIPFDPAIPLLGIYPKDYKSCCYKDTCTRVFIAALFKIAKTWNQPKCPSTIDWIKKMWHIYTMEYYAAIKKDEFMSFVGTWMKLETIILSKISQEQKTKHRMFSLIVYNWTVDEVVQWLITYVELPQYEETFRKLQLSGHAMPRLAVTNTTMTGTVLKMTDRSHRQKLQLKALDTVLFGPPLLTRHNHLKDFMLVVSIVIGVGGCWFAYIQNRYSKEHMKKMMKDLEGLHRAEQSLHDLQERLHKAQEEHRTVEVEKVHLEKKLRDEINLAKQEAQRLKELREGTENERSRQKYAEEELEQVREALRKAEKELESHSSWYAPEALQKWLQLTHEVEVQYYNIKKQNAEKQLLVAKEGAEKIKKKRNTLFGTFHVAHSSSLDDVDHKILTAKQALSEVTAALRERLHRWQQIEILCGFQIVNNPGIHSLVAALNIDPSWMGSTRPNPAHFIMTDDVDDMDEEIVSPLSMQSPSLQSSVRQRLTEPQHGLGSQRDLTHSDSESSLHMSDRQRVAPKPPQMSRAADEALNAMTSNGSHRLIEGVHPGSLVEKLPDSPALAKKALLALNHGLDKAHSLMELSPSAPPGGSPHLDSSRSHSPSSPDPDTPSPVGDSRALQASRNTRIPHLAGKKAVAEEDNGSIGEETDSSPGRKKFPLKIFKKPLKK

SEQ ID NO: 14208 - protein, 525 aa, Artificial Sequence
  Synthetic polypeptide
FLKDLELEIPFDPAIPLLGIYPKDYKSCCYKDTCTRVFIAALFKIAKTWNQPKCPSTIDWIKKMWHIYTMEYYAAIKKDEFMSFVGTWMKLETIILSKISQEQKTKHRMFSLIVYNWTVDEVVQWLITYVELPQYEETFRKLQLSGHAMPRLAVTNTTMTGTVLKMTDRSHRQKLQLKALDTVLFGPPLLTRHNHLKDFMLVVSIVIGVGGCWFAYIQNRYSKEHMKKMMKDLEGLHRAEQSLHDLQERLHKAQEEHRTVEVEKVHLEKKLRDEINLAKQEAQRLKELREGTENERSRQKYAEEELEQVREALRKAEKELESHSSWYAPEALQKWLQLTHEVEVQYYNIKKQNAEKQLLVAKEGAEKIKKKRNTLFGTFHVAHSSSLDDVDHKILTAKQALSEVTAALRERLHRWQQIEILCGFQIVNNPGIHSLVAALNIDPSWMGSTRPNPAHFIMTDDVDDMDEEIVSPLSMQSPSLQSSVRQRLTEPQHGLGSQRGSSLKANRLSSKGFDPFRFGVLPPHE

SEQ ID NO: 14209 - protein, 40 aa, Artificial Sequence
  Synthetic polypeptide
IHVLCRDMDEAGNHHSQQNIARTKNQTPHVLTHSIQLDRG

SEQ ID NO: 14210 - protein, 56 aa, Artificial Sequence
  Synthetic polypeptide
GWAQWLTPVISALREAEAEGSRAQEFKTSLGNMVKPHLYKNIYKLASLVRIHQPPV

SEQ ID NO: 14211 - protein, 515 aa, Artificial Sequence
  Synthetic polypeptide
IGQFGEDSSTSSMMSVNFDVQSNQSDINDSVKSSPVAHSILWIWGRDSDAYRDKQHILWPKRADCTESYPRVPVGGELPTYFLPPENKGLRIHELSSDDYSTEEEAQTPDCSITDFRKSHTLSYLVKELEVRMDLKAKMPDDHARKILLSRINNYTIPEEEIGSFLFHAINKPNAPIWLILNEAGLYWRAVGNSTFAIACLQRALNLAPLQYQDVPLVNLANLLIHYGLHLDATKLLLQALAINSSEPLTFLSLGNAYLALKNISGALEAFRQALKLTTKCPECENSLKLIRCMQFYPFLYNITSSVCSGNCHEKTLDNSHDKQKYFDNSQSLDAAEEEPSERGTEEDPVFSVENSGRDSDALRLESTVVEESNGSDEMENSDETKMSEEILALVDEFQQAWPLEGFGGALEMKGRRLDLQGIRVLKKGPQDGVARSSCYGDCRSEDDEATEWITFQVKRVKKPKGDHKKTPGKKVETGQIENGHRYQANLEITGPKVASPGPQGLLDWKTRKVP

SEQ ID NO: 14212 - protein, 700 aa, Artificial Sequence
  Synthetic polypeptide
IGQFGEDSSTSSMMSVNFDVQSNQSDINDSVKSSPVAHSILWIWGRDSDAYRDKQHILWPKRADCTESYPRVPVGGELPTYFLPPENKGLRIHELSSDDYSTEEEAQTPDCSITDFRKSHTLSYLVKELEVRMDLKAKMPDDHARKILLSRINNYTIPEEEIGSFLFHAINKPNAPIWLILNEAGLYWRAVGNSTFAIACLQRALNLAPLQYQDVPLVNLANLLIHYGLHLDATKLLLQALAINSSEPLTFLSLGNAYLALKNISGALEAFRQALKLTTKCPECENSLKLIRCMQFYPFLYNITSSVCSGTVVEESNGSDEMENSDETKMSEEILALVDEFQQAWPLEGFGGALEMKGRRLDLQGIRVLKKGPQDGVARSSCYGDCRSEDDEATEWITFQVKRVKKPKGDHKKTPGKKVETGQIENGHRYQANLEITGPKVASPGPQGKKRDYQRLGWPSPDECLKLRWVELTAIVSTWLAVSSKNIDITEHIDFATPIQQPAMEPLCNGNLPTSMHTLDHLHGVSNRASLHYTGESQLTEVLQNLGKDQYPQQSLEQIGTRIAKVLEKNQTSWVLSSMAALYWRVKGQGKKAIDCLRQALHYAPHQMKDVPLISLANILHNAKLWNDAVIVATMAVEIAPHFAVNHFTLGNVYVAMEEFEKALVWYESTLKLQPEFVPAKNRIQTIQCHLMLKKGRRSP

SEQ ID NO: 14213 - protein, 14 aa, Artificial Sequence
  Synthetic polypeptide
NPISTKTYINWPVW

SEQ ID NO: 14214 - protein, 26 aa, Artificial Sequence
  Synthetic polypeptide
LISFPFLVRATRLEDQESAIDIMKKT

SEQ ID NO: 14215 - protein, 33 aa, Artificial Sequence
  Synthetic polypeptide
TGRPGKCHRHNEKNVTTSVWDGPARTNASNSAG

SEQ ID NO: 14216 - protein, 15 aa, Artificial Sequence
  Synthetic polypeptide
LAAVSPLPGTNLAPN

SEQ ID NO: 14217 - protein, 19 aa, Artificial Sequence
  Synthetic polypeptide
LAAVSPLPGTNLAPNKFPL

SEQ ID NO: 14218 - protein, 14 aa, Artificial Sequence
  Synthetic polypeptide
LLYPHCLEQTWRLI

SEQ ID NO: 14219 - protein, 771 aa, Artificial Sequence
  Synthetic polypeptide
LLYPHCLEQTWRLINFRCKPSFRESGSRNVREGFQQKFTFHSKEIVAISCSWCKQAYHSKVSCFMLQQIEEPCSLGVHAAVVIPPTWILRARRPQNTLKASKKKKRASFKRKSSKKGPEEGRWRPFIIRPTPSPLMKPLLVFVNPKSGGNQGAKIIQSFLWYLNPRQVFDLSQGGPKEALEMYRKVHNLRILACGGDGTVGWILSTLDQLRLKPPPPVAILPLGTGNDLARTLNWGGGYTDEPVSKILSHVEEGNVVQLDRWDLHAEPNPEAGPEDRDEGATDRLPLDVFNNYFSLGFDAHVTLEFHESREANPEKFNSRFRNKMFYAGTAFSDFLMGSSKDLAKHIRVVCDGMDLTPKIQDLKPQCVVFLNIPRYCAGTMPWGHPGEHHDFEPQRHDDGYLEVIGFTMTSLAALQVGGHGERLTQCREVVLTTSKAIPVQVDGEPCKLAASRIRIALRNQATMVQKAKRRSAAPLHSDQQPVPEQLRIQVSRVSMHDYEALHYDKEQLKEASVPLGTVVVPGDSDLELCRAHIERLQQEPDGAGAKSPTCQKLSPKWCFLDATTASRFYRIDRAQEHLNYVTEIAQDEIYILDPELLGASARPDLPTPTSPLPTSPCSPTPRSLQGDAAPPQGEELIEAAKRNDFCKLQELHRAGGDLMHRDEQSRTLLHHAVSTGSKDVVRYLLDHAPPEILDAVEENGETCLHQAAALGQRTICHYIVEAGASLMKTDQQGDTPRQRAEKAQDTELAAYLENRQHYQMIQREDQETAV

SEQ ID NO: 14220 - protein, 79 aa, Artificial Sequence
  Synthetic polypeptide
LLYPHCLEQTWRLINFRCKPSFRESGSRNVREPTFVRHHWVHRRRQDGKCRHCGKGFQQKFTFHSKEIVAISCSWCKQA

SEQ ID NO: 14221 - protein, 794 aa, Artificial Sequence
  Synthetic polypeptide
LLYPHCLEQTWRLINFRCKPSFRESGSRNVREPTFVRHHWVHRRRQDGKCRHCGKGFQQKFTFHSKEIVAISCSWCKQAYHSKVSCFMLQQIEEPCSLGVHAAVVIPPTWILRARRPQNTLKASKKKKRASFKRKSSKKGPEEGRWRPFIIRPTPSPLMKPLLVFVNPKSGGNQGAKIIQSFLWYLNPRQVFDLSQGGPKEALEMYRKVHNLRILACGGDGTVGWILSTLDQLRLKPPPPVAILPLGTGNDLARTLNWGGGYTDEPVSKILSHVEEGNVVQLDRWDLHAEPNPEAGPEDRDEGATDRLPLDVFNNYFSLGFDAHVTLEFHESREANPEKFNSRFRNKMFYAGTAFSDFLMGSSKDLAKHIRVVCDGMDLTPKIQDLKPQCVVFLNIPRYCAGTMPWGHPGEHHDFEPQRHDDGYLEVIGFTMTSLAALQVGGHGERLTQCREVVLTTSKAIPVQVDGEPCKLAASRIRIALRNQATMVQKAKRRSAAPLHSDQQPVPEQLRIQVSRVSMHDYEALHYDKEQLKEASVPLGTVVVPGDSDLELCRAHIERLQQEPDGAGAKSPTCQKLSPKWCFLDATTASRFYRIDRAQEHLNYVTEIAQDEIYILDPELLGASARPDLPTPTSPLPTSPCSPTPRSLQGDAAPPQGEELIEAAKRNDFCKLQELHRAGGDLMHRDEQSRTLLHHAVSTGSKDVVRYLLDHAPPEILDAVEENGETCLHQAAALGQRTICHYIVEAGASLMKTDQQGDTPRQRAEKAQDTELAAYLENRQHYQMIQREDQETAV

SEQ ID NO: 14222 - protein, 799 aa, Artificial Sequence
  Synthetic polypeptide
LLYPHCLEQTWRLINFRCKPSFRESGSRNVREPTFVRHHWVHRRRQDGKCRHCGKGFQQKFTFHSKEIVAISCSWCKQAYHSKVSCFMLQQIEEPCSLGVHAAVVIPPTWILRARRPQNTLKASKKKKRASFKRKSSKKGPEEGRWRPFIIRPTPSPLMKPLLVFVNPKSGGNQGAKIIQSFLWYLNPRQVFDLSQGGPKEALEMYRKVHNLRILACGGDGTVGWILSTLDQLRLKPPPPVAILPLGTGNDLARTLNWGGGYTDEPVSKILSHVEEGNVVQLDRWDLHAEPNPEAGPEDRDEGATDRLPLDVFNNYFSLGFDAHVTLEFHESREANPEKFNSRFRNKMFYAGTAFSDFLMGSSKDLAKHIRVVCDGMDLTPKIQDLKPQCVVFLNIPRYCAGTMPWGHPGEHHDFEPQRHDDGYLEVIGFTMTSLAALQVGGHGERLTQCREVVLTTSKAIPVQVDGEPCKLAASRIRIALRNQATMVQKAKRRSAAPLHSDQQPVPEQLRIQVSRVSMHDYEALHYDKEQLKEASVPLGTVVVPGDSDLELCRAHIERLQQEPDGAGAKSPTCQKLSPKWCFLDATTASRFYRIDRAQEHLNYVTEIAQDEIYILDPELLGASARPDLPTPTSPLPTSPCSPTPRSLQGDAAPPQGEELIEAAKRNDFCKLQELHRAGGDLMHRDEQSRTLLHHAVSTGSKDVVRYLLDHAPPEILDAVEENPCSPSGETCLHQAAALGQRTICHYIVEAGASLMKTDQQGDTPRQRAEKAQDTELAAYLENRQHYQMIQREDQETAV

SEQ ID NO: 14223 - protein, 16 aa, Artificial Sequence
  Synthetic polypeptide
LAAVSPLPGTNLAPSG

SEQ ID NO: 14224 - protein, 15 aa, Artificial Sequence
  Synthetic polypeptide
LLYPHCLEQTWRLVD

SEQ ID NO: 14225 - protein, 19 aa, Artificial Sequence
  Synthetic polypeptide
LLYPHCLEQTWRLVDKFPL

SEQ ID NO: 14226 - protein, 2 aa, Artificial Sequence
  Synthetic polypeptide
WI

SEQ ID NO: 14227 - protein, 759 aa, Artificial Sequence
  Synthetic polypeptide
WINFRCKPSFRESGSRNVREGFQQKFTFHSKEIVAISCSWCKQAYHSKVSCFMLQQIEEPCSLGVHAAVVIPPTWILRARRPQNTLKASKKKKRASFKRKSSKKGPEEGRWRPFIIRPTPSPLMKPLLVFVNPKSGGNQGAKIIQSFLWYLNPRQVFDLSQGGPKEALEMYRKVHNLRILACGGDGTVGWILSTLDQLRLKPPPPVAILPLGTGNDLARTLNWGGGYTDEPVSKILSHVEEGNVVQLDRWDLHAEPNPEAGPEDRDEGATDRLPLDVFNNYFSLGFDAHVTLEFHESREANPEKFNSRFRNKMFYAGTAFSDFLMGSSKDLAKHIRVVCDGMDLTPKIQDLKPQCVVFLNIPRYCAGTMPWGHPGEHHDFEPQRHDDGYLEVIGFTMTSLAALQVGGHGERLTQCREVVLTTSKAIPVQVDGEPCKLAASRIRIALRNQATMVQKAKRRSAAPLHSDQQPVPEQLRIQVSRVSMHDYEALHYDKEQLKEASVPLGTVVVPGDSDLELCRAHIERLQQEPDGAGAKSPTCQKLSPKWCFLDATTASRFYRIDRAQEHLNYVTEIAQDEIYILDPELLGASARPDLPTPTSPLPTSPCSPTPRSLQGDAAPPQGEELIEAAKRNDFCKLQELHRAGGDLMHRDEQSRTLLHHAVSTGSKDVVRYLLDHAPPEILDAVEENGETCLHQAAALGQRTICHYIVEAGASLMKTDQQGDTPRQRAEKAQDTELAAYLENRQHYQMIQREDQETAV

SEQ ID NO: 14228 - protein, 67 aa, Artificial Sequence
  Synthetic polypeptide
WINFRCKPSFRESGSRNVREPTFVRHHWVHRRRQDGKCRHCGKGFQQKFTFHSKEIVAISCSWCKQA

SEQ ID NO: 14229 - protein, 782 aa, Artificial Sequence
  Synthetic polypeptide
WINFRCKPSFRESGSRNVREPTFVRHHWVHRRRQDGKCRHCGKGFQQKFTFHSKEIVAISCSWCKQAYHSKVSCFMLQQIEEPCSLGVHAAVVIPPTWILRARRPQNTLKASKKKKRASFKRKSSKKGPEEGRWRPFIIRPTPSPLMKPLLVFVNPKSGGNQGAKIIQSFLWYLNPRQVFDLSQGGPKEALEMYRKVHNLRILACGGDGTVGWILSTLDQLRLKPPPPVAILPLGTGNDLARTLNWGGGYTDEPVSKILSHVEEGNVVQLDRWDLHAEPNPEAGPEDRDEGATDRLPLDVFNNYFSLGFDAHVTLEFHESREANPEKFNSRFRNKMFYAGTAFSDFLMGSSKDLAKHIRVVCDGMDLTPKIQDLKPQCVVFLNIPRYCAGTMPWGHPGEHHDFEPQRHDDGYLEVIGFTMTSLAALQVGGHGERLTQCREVVLTTSKAIPVQVDGEPCKLAASRIRIALRNQATMVQKAKRRSAAPLHSDQQPVPEQLRIQVSRVSMHDYEALHYDKEQLKEASVPLGTVVVPGDSDLELCRAHIERLQQEPDGAGAKSPTCQKLSPKWCFLDATTASRFYRIDRAQEHLNYVTEIAQDEIYILDPELLGASARPDLPTPTSPLPTSPCSPTPRSLQGDAAPPQGEELIEAAKRNDFCKLQELHRAGGDLMHRDEQSRTLLHHAVSTGSKDVVRYLLDHAPPEILDAVEENGETCLHQAAALGQRTICHYIVEAGASLMKTDQQGDTPRQRAEKAQDTELAAYLENRQHYQMIQREDQETAV

SEQ ID NO: 14230 - protein, 787 aa, Artificial Sequence
  Synthetic polypeptide
WINFRCKPSFRESGSRNVREPTFVRHHWVHRRRQDGKCRHCGKGFQQKFTFHSKEIVAISCSWCKQAYHSKVSCFMLQQIEEPCSLGVHAAVVIPPTWILRARRPQNTLKASKKKKRASFKRKSSKKGPEEGRWRPFIIRPTPSPLMKPLLVFVNPKSGGNQGAKIIQSFLWYLNPRQVFDLSQGGPKEALEMYRKVHNLRILACGGDGTVGWILSTLDQLRLKPPPPVAILPLGTGNDLARTLNWGGGYTDEPVSKILSHVEEGNVVQLDRWDLHAEPNPEAGPEDRDEGATDRLPLDVFNNYFSLGFDAHVTLEFHESREANPEKFNSRFRNKMFYAGTAFSDFLMGSSKDLAKHIRVVCDGMDLTPKIQDLKPQCVVFLNIPRYCAGTMPWGHPGEHHDFEPQRHDDGYLEVIGFTMTSLAALQVGGHGERLTQCREVVLTTSKAIPVQVDGEPCKLAASRIRIALRNQATMVQKAKRRSAAPLHSDQQPVPEQLRIQVSRVSMHDYEALHYDKEQLKEASVPLGTVVVPGDSDLELCRAHIERLQQEPDGAGAKSPTCQKLSPKWCFLDATTASRFYRIDRAQEHLNYVTEIAQDEIYILDPELLGASARPDLPTPTSPLPTSPCSPTPRSLQGDAAPPQGEELIEAAKRNDFCKLQELHRAGGDLMHRDEQSRTLLHHAVSTGSKDVVRYLLDHAPPEILDAVEENPCSPSGETCLHQAAALGQRTICHYIVEAGASLMKTDQQGDTPRQRAEKAQDTELAAYLENRQHYQMIQREDQETAV

SEQ ID NO: 14231 - protein, 131 aa, Artificial Sequence
  Synthetic polypeptide
EPPPCVRQNSSAVTQAAVSACPGAVMGRTTVQTTAMKRTVRIQEAPNVPWTSSCVGMGAALGRGSCATGSTTVVTTATKAHSRIAGPGRVRRTAMLTTVAVPRSARWCGGQCSVPATQATGSQRMGTRAKM

SEQ ID NO: 14232 - protein, 1641 aa, Artificial Sequence
  Synthetic polypeptide
GATSMCTAEQFRCHSGRCVRLSWRCDGEDDCADNSDEENCENTGSPQCALDQFLCWNGRCIGQRKLCNGVNDCGDNSDESPQQNCRPRTGEENCNVNNGGCAQKCQMVRGAVQCTCHTGYRLTEDGHTCQDVNECAEEGYCSQGCTNSEGAFQCWCETGYELRPDRRSCKALGPEPVLLFANRIDIRQVLPHRSEYTLLLNNLENAIALDFHHRRELVFWSDVTLDRILRANLNGSNVEEVVSTGLESPGGLAVDWVHDKLYWTDSGTSRIEVANLDGAHRKVLLWQNLEKPRAIALHPMEGTIYWTDWGNTPRIEASSMDGSGRRIIADTHLFWPNGLTIDYAGRRMYWVDAKHHVIERANLDGSHRKAVISQGLPHPFAITVFEDSLYWTDWHTKSINSANKFTGKNQEIIRNKLHFPMDIHTLHPQRQPAGKNRCGDNNGGCTHLCLPSGQNYTCACPTGFRKISSHACAQSLDKFLLFARRMDIRRISFDTEDLSDDVIPLADVRSAVALDWDSRDDHVYWTDVSTDTISRAKWDGTGQEVVVDTSLESPAGLAIDWVTNKLYWTDAGTDRIEVANTDGSMRTVLIWENLDRPRDIVVEPMGGYMYWTDWGASPKIERAGMDASGRQVIISSNLTWPNGLAIDYGSQRLYWADAGMKTIEFAGLDGSKRKVLIGSQLPHPFGLTLYGERIYWTDWQTKSIQSADRLTGLDRETLQENLENLMDIHVFHRRRPPVSTPCAMENGGCSHLCLRSPNPSGFSCTCPTGINLLSDGKTCSPGMNSFLIFARRIDIRMVSLDIPYFADVVVPINITMKNTIAIGVDPQEGKVYWSDSTLHRISRANLDGSQHEDIITTGLQTTDGLAVDAIGRKVYWTDTGTNRIEVGNLDGSMRKVLVWQNLDSPRAIVLYHEMGFMYWTDWGENAKLERSGMDGSDRAVLINNNLGWPNGLTVDKASSQLLWADAHTERIEAADLNGANRHTLVSPVQHPYGLTLLDSYIYWTDWQTRSIHRADKGTGSNVILVRSNLPGLMDMQAVDRAQPLGFNKCGSRNGGCSHLCLPRPSGFSCACPTGIQLKGDGKTCDPSPETYLLFSSRGSIRRISLDTSDHTDVHVPVPELNNVISLDYDSVDGKVYYTDVFLDVIRRADLNGSNMETVIGRGLKTTDGLAVDWVARNLYWTDTGRNTIEASRLDGSCRKVLINNSLDEPRAIAVFPRKGYLFWTDWGHIAKIERANLDGSERKVLINTDLGWPNGLTLDYDTRRIYWVDAHLDRIESADLNGKLRQVLVSHVSHPFALTQQDRWIYWTDWQTKSIQRVDKYSGRNKETVLANVEGLMDIIVVSPQRQTGTNACGVNNGGCTHLCFARASDFVCACPDEPDSRPCSLVPGLVPPAPRATGMSEKSPVLPNTPPTTLYSSTTRTRTSLEEVEGRCSERDARLGLCARSNDAVPAAPGEGLHISYAIGGLLSILLILVVIAALMLYRHKKSKFTDPGMGNLTYSNPSYRTSTQEVKIEAIPKPAMYNQLCYKKEGGPDHNYTKEKIKIVEGICLLSGDDAEWDDLKQLRSSRGGLLRDHVCMKTDTVSIQASSGSLDDTETEQLLQEEQSECSSVHTAATPERRGSLPDTGWKHERKLSSESQV

SEQ ID NO: 14233 - protein, 24 aa, Artificial Sequence
  Synthetic polypeptide
SHLHVYGRTVPLSLRPLCPPVLAL

SEQ ID NO: 14234 - protein, 35 aa, Artificial Sequence
  Synthetic polypeptide
APGFKIILANMVPAEQRDPELSQLPPLIHEAWLCM

SEQ ID NO: 14235 - protein, 97 aa, Artificial Sequence
  Synthetic polypeptide
APGFKIILANMVPAEQRDPELSQLPPLIHEAWLCMTPGSRRGLPPRHSCSFSTARQRPIYSWGSCQVVLTIAKALGPAQGCSPGPSSPPCLFVLCSL

SEQ ID NO: 14236 - protein, 51 aa, Artificial Sequence
  Synthetic polypeptide
ARRGASRLSRKHFGRPRRADHLSPGVQDHLGQHGACRTTGPGAVPTAAAHP

SEQ ID NO: 14237 - protein, 37 aa, Artificial Sequence
  Synthetic polypeptide
SLEPRGSRSSWPTWCLQNNGTRSCPNCRRSSMKPGFV

SEQ ID NO: 14238 - protein, 29 aa, Artificial Sequence
  Synthetic polypeptide
IRPGKRSCAQVAGPVLCLTLKLFPSVQPM

SEQ ID NO: 14239 - protein, 21 aa, Artificial Sequence
  Synthetic polypeptide
IRPGKRSCAQVAPLVQFLTLQ

SEQ ID NO: 14240 - protein, 35 aa, Artificial Sequence
  Synthetic polypeptide
MQALAAVSLCPFMKARWRRGSESGRERDPVRRWHP

SEQ ID NO: 14241 - protein, 39 aa, Artificial Sequence
  Synthetic polypeptide
MQALAAVSLCPFMKARWRRGSESGRERDPVRRWQAQSCV

SEQ ID NO: 14242 - protein, 102 aa, Artificial Sequence
  Synthetic polypeptide
RPDGEEALNQAGKEILCAGGRPSPVFDIKAVSISPTNVILTWKSNDTAASEYKYVVKHKMENEKTITVVHQPWCNITGLRPATSYVFSITPGIGNETWGDPR

SEQ ID NO: 14243 - protein, 128 aa, Artificial Sequence
  Synthetic polypeptide
RPDGEEALNQAGKEILCAGGTPSPIPDPSVATVATGENGITQISSTAESFHKQNGTGTPQVETNTSEDGESSGANDSLRTPEQGSNGTDGASQKTPSSTEPIPVSDLRVALTGVRKAALSWSNGNGTA

SEQ ID NO: 14244 - protein, 521 aa, Artificial Sequence
  Synthetic polypeptide
RPDGEEALNQAGKEILCAGGTPSPIPDPSVATVATGENGITQISSTAESFHKQNGTGTPQVETNTSEDGESSGANDSLRTPEQGSNGTDGASQKTPSSTGPSPVFDIKAVSISPTNVILTWKSNDTAASEYKYVVKHKMENEKTITVVHQPWCNITGLRPATSYVFSITPGIGNETWGDPRVIKVITEPIPVSDLRVALTGVRKAALSWSNGNGTASCRVLLESIGSHEELTQDSRLQVNISGLKPGVQYNINPYLLQSNKTKGDPLGTEGGLDASNTERSRAGSPTAPVHDESLVGPVDPSSGQQSRDTEVLLVGLEPGTRYNATVYSQAANGTEGQPQAIEFRTNAIQVFDVTAVNISATSLTLIWKVSDNESSSNYTYKIHVAGETDSSNLNVSEPRAVIPGLRSSTFYNITVCPVLGDIEGTPGFLQVHTPPVPVSDFRVTVVSTTEIGLAWSSHDAESFQMHITQEGAGNSRVEITTNQSIIIGGLFPGTKYCFEIVPKGPNGTEGASRTVCNRTG

SEQ ID NO: 14245 - protein, 1319 aa, Artificial Sequence
  Synthetic polypeptide
RPDGEEALNQAGKEILCAGGTPSPIPDPSVATVATGENGITQISSTAESFHKQNGTGTPQVETNTSEDGESSGANDSLRTPEQGSNGTDGASQKTPSSTGPSPVFDIKAVSISPTNVILTWKSNDTAASEYKYVVKHKMENEKTITVVHQPWCNITGLRPATSYVFSITPGIGNETWGDPRVIKVITEPIPVSDLRVALTGVRKAALSWSNGNGTASCRVLLESIGSHEELTQDSRLQVNISGLKPGVQYNINPYLLQSNKTKGDPLGTEGGLDASNTERSRAGSPTAPVHDESLVGPVDPSSGQQSRDTEVLLVGLEPGTRYNATVYSQAANGTEGQPQAIEFRTNAIQVFDVTAVNISATSLTLIWKVSDNESSSNYTYKIHVAGETDSSNLNVSEPRAVIPGLRSSTFYNITVCPVLGDIEGTPGFLQVHTPPVPVSDFRVTVVSTTEIGLAWSSHDAESFQMHITQEGAGNSRVEITTNQSIIIGGLFPGTKYCFEIVPKGPNGTEGASRTVCNRTVPSAVFDIHVVYVTTTEMWLDWKSPDGASEYVYHLVIESKHGSNHTSTYDKAITLQGLIPGTLYNITISPEVDHVWGDPNSTAQYTRPSNVSNIDVSTNTTAATLSWQNFDDASPTYSYCLLIEKAGNSSNATQVVTDIGITDATVTELIPGSSYTVEIFAQVGDGIKSLEPGRKSFCTDPASMASFDCEVVPKEPALVLKWTCPPGANAGFELEVSSGAWNNATHLESCSSENGTEYRTEVTYLNFSTSYNISITTVSCGKMAAPTRNTCTTGITDPPPPDGSPNITSVSHNSVKVKFSGFEASHGPIKAYAVILTTGEAGHPSADVLKYTYEDFKKGASDTYVTYLIRTEEKGRSQSLSEVLKYEIDVGNESTTLGYYNGKLEPLGSYRACVAGFTNITFHPQNKGLIDGAESYVSFSRYSDAVSLPQDPGVICGAVFGCIFGALVIVTVGGFIFWRKKRKDAKNNEVSFSQIKPKKSKLIRVENFEAYFKKQQADSNCGFAEEYEDLKLVGISQPKYAAELAENRGKNRYNNVLPYDISRVKLSVQTHSTDDYINANYMPGYHSKKDFIATQGPLPNTLKDFWRMVWEKNVYAIIMLTKCVEQGRTKCEEYWPSKQAQDYGDITVAMTSEIVLPEWTIRDFTVKNIQTSESHPLRQFHFTSWPDHGVPDTTDLLINFRYLVRDYMKQSPPESPILVHCSAGVGRTGTFIAIDRLIYQIENENTVDVYGIVYDLRMHRPLMVQTEDQYVFLNQCVLDIVRSQKDSKVDLIYQNTTAMTIYENLAPVTTFGKTNGYIA

SEQ ID NO: 14246 - protein, 100 aa, Artificial Sequence
  Synthetic polypeptide
DAAWGHEKSPGLILCAGGRPSPVFDIKAVSISPTNVILTWKSNDTAASEYKYVVKHKMENEKTITVVHQPWCNITGLRPATSYVFSITPGIGNETWGDPR

SEQ ID NO: 14247 - protein, 126 aa, Artificial Sequence
  Synthetic polypeptide
DAAWGHEKSPGLILCAGGTPSPIPDPSVATVATGENGITQISSTAESFHKQNGTGTPQVETNTSEDGESSGANDSLRTPEQGSNGTDGASQKTPSSTEPIPVSDLRVALTGVRKAALSWSNGNGTA

SEQ ID NO: 14248 - protein, 519 aa, Artificial Sequence
  Synthetic polypeptide
DAAWGHEKSPGLILCAGGTPSPIPDPSVATVATGENGITQISSTAESFHKQNGTGTPQVETNTSEDGESSGANDSLRTPEQGSNGTDGASQKTPSSTGPSPVFDIKAVSISPTNVILTWKSNDTAASEYKYVVKHKMENEKTITVVHQPWCNITGLRPATSYVFSITPGIGNETWGDPRVIKVITEPIPVSDLRVALTGVRKAALSWSNGNGTASCRVLLESIGSHEELTQDSRLQVNISGLKPGVQYNINPYLLQSNKTKGDPLGTEGGLDASNTERSRAGSPTAPVHDESLVGPVDPSSGQQSRDTEVLLVGLEPGTRYNATVYSQAANGTEGQPQAIEFRTNAIQVFDVTAVNISATSLTLIWKVSDNESSSNYTYKIHVAGETDSSNLNVSEPRAVIPGLRSSTFYNITVCPVLGDIEGTPGFLQVHTPPVPVSDFRVTVVSTTEIGLAWSSHDAESFQMHITQEGAGNSRVEITTNQSIIIGGLFPGTKYCFEIVPKGPNGTEGASRTVCNRTG

SEQ ID NO: 14249 - protein, 1317 aa, Artificial Sequence
  Synthetic polypeptide
DAAWGHEKSPGLILCAGGTPSPIPDPSVATVATGENGITQISSTAESFHKQNGTGTPQVETNTSEDGESSGANDSLRTPEQGSNGTDGASQKTPSSTGPSPVFDIKAVSISPTNVILTWKSNDTAASEYKYVVKHKMENEKTITVVHQPWCNITGLRPATSYVFSITPGIGNETWGDPRVIKVITEPIPVSDLRVALTGVRKAALSWSNGNGTASCRVLLESIGSHEELTQDSRLQVNISGLKPGVQYNINPYLLQSNKTKGDPLGTEGGLDASNTERSRAGSPTAPVHDESLVGPVDPSSGQQSRDTEVLLVGLEPGTRYNATVYSQAANGTEGQPQAIEFRTNAIQVFDVTAVNISATSLTLIWKVSDNESSSNYTYKIHVAGETDSSNLNVSEPRAVIPGLRSSTFYNITVCPVLGDIEGTPGFLQVHTPPVPVSDFRVTVVSTTEIGLAWSSHDAESFQMHITQEGAGNSRVEITTNQSIIIGGLFPGTKYCFEIVPKGPNGTEGASRTVCNRTVPSAVFDIHVVYVTTTEMWLDWKSPDGASEYVYHLVIESKHGSNHTSTYDKAITLQGLIPGTLYNITISPEVDHVWGDPNSTAQYTRPSNVSNIDVSTNTTAATLSWQNFDDASPTYSYCLLIEKAGNSSNATQVVTDIGITDATVTELIPGSSYTVEIFAQVGDGIKSLEPGRKSFCTDPASMASFDCEVVPKEPALVLKWTCPPGANAGFELEVSSGAWNNATHLESCSSENGTEYRTEVTYLNFSTSYNISITTVSCGKMAAPTRNTCTTGITDPPPPDGSPNITSVSHNSVKVKFSGFEASHGPIKAYAVILTTGEAGHPSADVLKYTYEDFKKGASDTYVTYLIRTEEKGRSQSLSEVLKYEIDVGNESTTLGYYNGKLEPLGSYRACVAGFTNITFHPQNKGLIDGAESYVSFSRYSDAVSLPQDPGVICGAVFGCIFGALVIVTVGGFIFWRKKRKDAKNNEVSFSQIKPKKSKLIRVENFEAYFKKQQADSNCGFAEEYEDLKLVGISQPKYAAELAENRGKNRYNNVLPYDISRVKLSVQTHSTDDYINANYMPGYHSKKDFIATQGPLPNTLKDFWRMVWEKNVYAIIMLTKCVEQGRTKCEEYWPSKQAQDYGDITVAMTSEIVLPEWTIRDFTVKNIQTSESHPLRQFHFTSWPDHGVPDTTDLLINFRYLVRDYMKQSPPESPILVHCSAGVGRTGTFIAIDRLIYQIENENTVDVYGIVYDLRMHRPLMVQTEDQYVFLNQCVLDIVRSQKDSKVDLIYQNTTAMTIYENLAPVTTFGKTNGYIA

SEQ ID NO: 14250 - protein, 13 aa, Artificial Sequence
  Synthetic polypeptide
EESWSDPVRRWHP

SEQ ID NO: 14251 - protein, 17 aa, Artificial Sequence
  Synthetic polypeptide
EESWSDPVRRWQAQSCV

SEQ ID NO: 14252 - protein, 106 aa, Artificial Sequence
  Synthetic polypeptide
MALFTAVCQAADSIWLSQILCAGGRPSPVFDIKAVSISPTNVILTWKSNDTAASEYKYVVKHKMENEKTITVVHQPWCNITGLRPATSYVFSITPGIGNETWGDPR

SEQ ID NO: 14253 - protein, 132 aa, Artificial Sequence
  Synthetic polypeptide
MALFTAVCQAADSIWLSQILCAGGTPSPIPDPSVATVATGENGITQISSTAESFHKQNGTGTPQVETNTSEDGESSGANDSLRTPEQGSNGTDGASQKTPSSTEPIPVSDLRVALTGVRKAALSWSNGNGTA

SEQ ID NO: 14254 - protein, 525 aa, Artificial Sequence
  Synthetic polypeptide
MALFTAVCQAADSIWLSQILCAGGTPSPIPDPSVATVATGENGITQISSTAESFHKQNGTGTPQVETNTSEDGESSGANDSLRTPEQGSNGTDGASQKTPSSTGPSPVFDIKAVSISPTNVILTWKSNDTAASEYKYVVKHKMENEKTITVVHQPWCNITGLRPATSYVFSITPGIGNETWGDPRVIKVITEPIPVSDLRVALTGVRKAALSWSNGNGTASCRVLLESIGSHEELTQDSRLQVNISGLKPGVQYNINPYLLQSNKTKGDPLGTEGGLDASNTERSRAGSPTAPVHDESLVGPVDPSSGQQSRDTEVLLVGLEPGTRYNATVYSQAANGTEGQPQAIEFRTNAIQVFDVTAVNISATSLTLIWKVSDNESSSNYTYKIHVAGETDSSNLNVSEPRAVIPGLRSSTFYNITVCPVLGDIEGTPGFLQVHTPPVPVSDFRVTVVSTTEIGLAWSSHDAESFQMHITQEGAGNSRVEITTNQSIIIGGLFPGTKYCFEIVPKGPNGTEGASRTVCNRTG

SEQ ID NO: 14255 - protein, 1323 aa, Artificial Sequence
  Synthetic polypeptide
MALFTAVCQAADSIWLSQILCAGGTPSPIPDPSVATVATGENGITQISSTAESFHKQNGTGTPQVETNTSEDGESSGANDSLRTPEQGSNGTDGASQKTPSSTGPSPVFDIKAVSISPTNVILTWKSNDTAASEYKYVVKHKMENEKTITVVHQPWCNITGLRPATSYVFSITPGIGNETWGDPRVIKVITEPIPVSDLRVALTGVRKAALSWSNGNGTASCRVLLESIGSHEELTQDSRLQVNISGLKPGVQYNINPYLLQSNKTKGDPLGTEGGLDASNTERSRAGSPTAPVHDESLVGPVDPSSGQQSRDTEVLLVGLEPGTRYNATVYSQAANGTEGQPQAIEFRTNAIQVFDVTAVNISATSLTLIWKVSDNESSSNYTYKIHVAGETDSSNLNVSEPRAVIPGLRSSTFYNITVCPVLGDIEGTPGFLQVHTPPVPVSDFRVTVVSTTEIGLAWSSHDAESFQMHITQEGAGNSRVEITTNQSIIIGGLFPGTKYCFEIVPKGPNGTEGASRTVCNRTVPSAVFDIHVVYVTTTEMWLDWKSPDGASEYVYHLVIESKHGSNHTSTYDKAITLQGLIPGTLYNITISPEVDHVWGDPNSTAQYTRPSNVSNIDVSTNTTAATLSWQNFDDASPTYSYCLLIEKAGNSSNATQVVTDIGITDATVTELIPGSSYTVEIFAQVGDGIKSLEPGRKSFCTDPASMASFDCEVVPKEPALVLKWTCPPGANAGFELEVSSGAWNNATHLESCSSENGTEYRTEVTYLNFSTSYNISITTVSCGKMAAPTRNTCTTGITDPPPPDGSPNITSVSHNSVKVKFSGFEASHGPIKAYAVILTTGEAGHPSADVLKYTYEDFKKGASDTYVTYLIRTEEKGRSQSLSEVLKYEIDVGNESTTLGYYNGKLEPLGSYRACVAGFTNITFHPQNKGLIDGAESYVSFSRYSDAVSLPQDPGVICGAVFGCIFGALVIVTVGGFIFWRKKRKDAKNNEVSFSQIKPKKSKLIRVENFEAYFKKQQADSNCGFAEEYEDLKLVGISQPKYAAELAENRGKNRYNNVLPYDISRVKLSVQTHSTDDYINANYMPGYHSKKDFIATQGPLPNTLKDFWRMVWEKNVYAIIMLTKCVEQGRTKCEEYWPSKQAQDYGDITVAMTSEIVLPEWTIRDFTVKNIQTSESHPLRQFHFTSWPDHGVPDTTDLLINFRYLVRDYMKQSPPESPILVHCSAGVGRTGTFIAIDRLIYQIENENTVDVYGIVYDLRMHRPLMVQTEDQYVFLNQCVLDIVRSQKDSKVDLIYQNTTAMTIYENLAPVTTFGKTNGYIA

SEQ ID NO: 14256 - protein, 14 aa, Artificial Sequence
  Synthetic polypeptide
QHLAIADPVRRWHP

SEQ ID NO: 14257 - protein, 18 aa, Artificial Sequence
  Synthetic polypeptide
QHLAIADPVRRWQAQSCV

SEQ ID NO: 14258 - protein, 41 aa, Artificial Sequence
  Synthetic polypeptide
WPCSLLCAKLLTASGYRRSCAQVAGPVLCLTLKLFPSVQPM

SEQ ID NO: 14259 - protein, 33 aa, Artificial Sequence
  Synthetic polypeptide
WPCSLLCAKLLTASGYRRSCAQVAPLVQFLTLQ

SEQ ID NO: 14260 - protein, 656 aa, Artificial Sequence; identical to SEQ ID NO: 1833
  Synthetic polypeptide

SEQ ID NO: 14261 - protein, 315 aa, Artificial Sequence; identical to SEQ ID NO: 2459
  Synthetic polypeptide

SEQ ID NO: 14262 - protein, 36 aa, Artificial Sequence; identical to SEQ ID NO: 6106
  Synthetic polypeptide

SEQ ID NO: 14263 - protein, 8 aa, Artificial Sequence
  Synthetic polypeptide
SQHFGRPS

SEQ ID NO: 14264 - protein, 31 aa, Artificial Sequence
  Synthetic polypeptide
AQEFETSLGNTLRRMRTRKMISELPFTKQWR

SEQ ID NO: 14265 - protein, 646 aa, Artificial Sequence
  Synthetic polypeptide
DQPGEHAEEDEDKEDDFRAPLYKTVEIKGIQVRMKWCATCRFYRPPRCSHCSVCDNCVEEFDHHCPWVNNCIGRRNYRYFFLFLLSLTAHIMGVFGFGLLYVLYHIEELSGVRTAVTMAVMCVAGLFFIPVAGLTGFHVVLVARGRTTNEQVTGKFRGGVNPFTNGCCNNVSRVLCSSPAPRYLGRPKKEKTIVIRPPFLRPEVSDGQITVKIMDNGIQGELRRTKSKGSLEITESQSADAEPPPPPKPDLSRYTGLRTHLGLATNEDSSLLAKDSPPTPTMYKYRPGYSSSSTSAAMPHSSSAKLSRGDSLKEPTSIAESSRHPSYRSEPSLEPESFRSPTFGKSFHFDPLSSGSRSSSLKSAQGTGFELGQLQSIRSEGTTSTSYKSLANQTRNGSLSYDSLLTPSDSPDFESVQAGPEPDPPLGYTSPFLSARLAQQREAERHPRLVPTGPTHREPSPVRYDNLSRHIVASLQEREKLLRQSPPLPGREEEPGLGDSGIQSTPGSGHAPRTSSSSDDSKRSPLGKTPLGRPAVPRFGKPDGLRGRGVGSPEPGPTAPYLGRSMSYSSQKAQPGVSETEEVALQPLLTPKDEVQLKTTYSKSNGQPKSLGSASPGPGQPPLSSPTRGGVKKVSGVGGTTYEISV

SEQ ID NO: 14266 - protein, 305 aa, Artificial Sequence
  Synthetic polypeptide
DQPGEHAEEDEDKEDDFRAPLYKTVEIKGIQVRMKWCATCRFYRPPRCSHCSVCDNCVEVTGKFRGGVNPFTNGCCNNVSRVLCSSPAPRYLGRPKKEKTIVIRPPFLRPEVSDGQITVKIMDNGIQGELRRTKSKGSLEITESQSADAEPPPPPKPDLSRYTGLRTHLGLATNEDSSLLAKDSPPTPTMYKYRPGYSSSSTSAAMPHSSSAKLSRGDSLKEPTSIAESSRHPSYRSEPSLEPESFRSPTFGKSFHFDPLSSGSRSSSLKSAQGTGFELGQLQSIRSEGTTSTSYKSLANQTRNG

SEQ ID NO: 14267 - protein, 33 aa, Artificial Sequence
  Synthetic polypeptide
WVRWPMLVILILWEAEAGGLPELRSLRPAWGTR

SEQ ID NO: 14268 - protein, 109 aa, Artificial Sequence
  Synthetic polypeptide
GQAQWLIPVIPALWEPKLSRGDSLKEPTSIAESSRHPSYRSEPSLEPESFRSPTFGKSFHFDPLSSGSRSSSLKSAQGTGFELGQLQSIRSEGTTSTSYKSLANQTRNG

SEQ ID NO: 14269 - protein, 358 aa, Artificial Sequence
  Synthetic polypeptide
GQAQWLIPVIPALWEPKLSRGDSLKEPTSIAESSRHPSYRSEPSLEPESFRSPTFGKSFHFDPLSSGSRSSSLKSAQGTGFELGQLQSIRSEGTTSTSYKSLANQTRNGSLSYDSLLTPSDSPDFESVQAGPEPDPPLGYTSPFLSARLAQQREAERHPRLVPTGPTHREPSPVRYDNLSRHIVASLQEREKLLRQSPPLPGREEEPGLGDSGIQSTPGSGHAPRTSSSSDDSKRSPLGKTPLGRPAVPRFGKPDGLRGRGVGSPEPGPTAPYLGRSMSYSSQKAQPGVSETEEVALQPLLTPKDEVQLKTTYSKSNGQPKSLGSASPGPGQPPLSSPTRGGVKKVSGVGGTTYEISV

SEQ ID NO: 14270 - protein, 80 aa, Artificial Sequence
  Synthetic polypeptide
PGTVAHSCNPSTLGAQVESWGQLEGANLNCREQPSPQLPLRAQLGTRELPFSYLWQKFSLRSTIQWLTLLQPQVSPGHRL

SEQ ID NO: 14271 - protein, 8 aa, Artificial Sequence
  Synthetic polypeptide
SQHFGSPS

SEQ ID NO: 14272 - protein, 33 aa, Artificial Sequence
  Synthetic polypeptide
ARCLTLVIPALWEAELGGSRGQEIEIILANTEL

SEQ ID NO: 14273 - protein, 6 aa, Artificial Sequence
  Synthetic polypeptide
HGAMKT

SEQ ID NO: 14274 - protein, 44 aa, Artificial Sequence
  Synthetic polypeptide
SQHFGRPSWADHEVRRSRSSWLTRSYEDMIGEEVPSDQYYWAPL

SEQ ID NO: 14275 - protein, 643 aa, Artificial Sequence
  Synthetic polypeptide
SQHFGRPSWADHEVRRSRSSWLTRSYEDMIGEEVPSDQYYWAPLAQHERGSLASLDSLRKGGPPPPNWRQPELPEVIAMLGFRLDAVKSNAAAYLQHLCYRNDKVKTDVRKLKGIPVLVGLLDHPKKEVHLGACGALKNISFGRDQDNKIAIKNCDGVPALVRLLRKARDMDLTEVITGTLWNLSSHDSIKMEIVDHALHALTDEVIIPHSGWEREPNEDCKPRHIEWESVLTNTAGCLRNVSSERSEARRKLRECDGLVDALIFIVQAEIGQKDSDSKLVENCVCLLRNLSYQVHREIPQAERYQEAAPNVANNTGPHAASCFGAKKGKDEWFSRGKKPIEDPANDTVDFPKRTSPARGYELLFQPEVVRIYISLLKESKTPAILEASAGAIQNLCAGRWTYGRYIRSALRQEKALSAIADLLTNEHERVVKAASGALRNLAVDARNKELIGKHAIPNLVKNLPGGQQNSSWNFSEDTVISILNTINEVIAENLEAAKKLRETQGIEKLVLINKSGNRSEKEVRAAALVLQTIWGYKELRKPLEKEGWKKSDFQVNLNNASRSQSSHSYDDSTLPLIDRNQKSDKKPDREEIQMSNMGSNTKSLDNNYSTPNERGDHNRTLDRSGDLGDMEPLKGTTPLMKI

SEQ ID NO: 14276 - protein, 673 aa, Artificial Sequence
  Synthetic polypeptide
SQHFGRPSWADHEVRRSRSSWLTRSYEDMIGEEVPSDQYYWAPLAQHERGSLASLDSLRKGGPPPPNWRQPELPEVIAMLGFRLDAVKSNAAAYLQHLCYRNDKVKTDVRKLKGIPVLVGLLDHPKKEVHLGACGALKNISFGRDQDNKIAIKNCDGVPALVRLLRKARDMDLTEVITGTLWNLSSHDSIKMEIVDHALHALTDEVIIPHSGWEREPNEDCKPRHIEWESVLTNTAGCLRNVSSERSEARRKLRECDGLVDALIFIVQAEIGQKDSDSKLVENCVCLLRNLSYQVHREIPQAERYQEAAPNVANNTGPHAASCFGAKKGKDEWFSRGKKPIEDPANDTVDFPKRTSPARGYELLFQPEVVRIYISLLKESKTPAILEASAGAIQNLCAGRWTYGRYIRSALRQEKALSAIADLLTNEHERVVKAASGALRNLAVDARNKELIGKHAIPNLVKNLPGGQQNSSWNFSEDTVISILNTINEVIAENLEAAKKLRETQGIEKLVLINKSGNRSEKEVRAAALVLQTIWGYKELRKPLEKEGWKKSDFQVNLNNASRSQSSHSYDDSTLPLIDRNQKSDKKPDREEIQMSNMGSNTKSLDNNYSTPNERGDHNRTLDRSGDLGDMEPLKGTTPLMQDEGQESLEEELDVLVLDDEGGQVSYPSMQKI

SEQ ID NO: 14277 - protein, 644 aa, Artificial Sequence
  Synthetic polypeptide
SQHFGRPSWADHEVRRSRSSWLTRSYEDMIGEEVPSDQYYWAPLAQHERGSLASLDSLRKGGPPPPNWRQPELPEVIAMLGFRLDAVKSNAAAYLQHLCYRNDKVKTDVRKLKGIPVLVGLLDHPKKEVHLGACGALKNISFGRDQDNKIAIKNCDGVPALVRLLRKARDMDLTEVITGTLWNLSSHDSIKMEIVDHALHALTDEVIIPHSGWEREPNEDCKPRHIEWESVLTNTAGCLRNVSSERSEARRKLRECDGLVDALIFIVQAEIGQKDSDSKLVENCVCLLRNLSYQVHREIPQAERYQEAAPNVANNTGPHAASCFGAKKGKDEWFSRGKKPIEDPANDTVDFPKRTSPARGYELLFQPEVVRIYISLLKESKTPAILEASAGAIQNLCAGRWTYGRYIRSALRQEKALSAIADLLTNEHERVVKAASGALRNLAVDARNKELIGKHAIPNLVKNLPGGQQNSSWNFSEDTVISILNTINEVIAENLEAAKKLRETQGIEKLVLINKSGNRSEKEVRAAALVLQTIWGYKELRKPLEKEGWKKSDFQVNLNNASRSQSSHSYDDSTLPLIDRNQKSDKKPDREEIQMSNMGSNTKSLDNNYSTPNERGDHNRTLDRSGDLGDMEPLKGTTPLMQKI

SEQ ID NO: 14278 - protein, 652 aa, Artificial Sequence
  Synthetic polypeptide
SQHFGRPSWADHEVRRSRSSWLTRSYEDMIGEEVPSDQYYWAPLAQHERGSLASLDSLRKGGPPPPNWRQPELPEVIAMLGFRLDAVKSNAAAYLQHLCYRNDKVKTDVRKLKGIPVLVGLLDHPKKEVHLGACGALKNISFGRDQDNKIAIKNCDGVPALVRLLRKARDMDLTEVITGTLWNLSSHDSIKMEIVDHALHALTDEVIIPHSGWEREPNEDCKPRHIEWESVLTNTAGCLRNVSSERSEARRKLRECDGLVDALIFIVQAEIGQKDSDSKLVENCVCLLRNLSYQVHREIPQAERYQEAAPNVANNTGPHAASCFGAKKGKDEWFSRGKKPIEDPANDTVDFPKRTSPARGYELLFQPEVVRIYISLLKESKTPAILEASAGAIQNLCAGRWTYGRYIRSALRQEKALSAIADLLTNEHERVVKAASGALRNLAVDARNKELIGKHAIPNLVKNLPGGQQNSSWNFSEDTVISILNTINEVIAENLEAAKKLRETQGIEKLVLINKSGNRSEKEVRAAALVLQTIWGYKELRKPLEKEGWKKSDFQVNLNNASRSQSSHSYDDSTLPLIDRNQKSDNNYSTPNERGDHNRTLDRSGDLGDMEPLKGTTPLMQDEGQESLEEELDVLVLDDEGGQVSYPSMQKI

SEQ ID NO: 14279 - protein, 623 aa, Artificial Sequence
  Synthetic polypeptide
SQHFGRPSWADHEVRRSRSSWLTRSYEDMIGEEVPSDQYYWAPLAQHERGSLASLDSLRKGGPPPPNWRQPELPEVIAMLGFRLDAVKSNAAAYLQHLCYRNDKVKTDVRKLKGIPVLVGLLDHPKKEVHLGACGALKNISFGRDQDNKIAIKNCDGVPALVRLLRKARDMDLTEVITGTLWNLSSHDSIKMEIVDHALHALTDEVIIPHSGWEREPNEDCKPRHIEWESVLTNTAGCLRNVSSERSEARRKLRECDGLVDALIFIVQAEIGQKDSDSKLVENCVCLLRNLSYQVHREIPQAERYQEAAPNVANNTGPHAASCFGAKKGKDEWFSRGKKPIEDPANDTVDFPKRTSPARGYELLFQPEVVRIYISLLKESKTPAILEASAGAIQNLCAGRWTYGRYIRSALRQEKALSAIADLLTNEHERVVKAASGALRNLAVDARNKELIGKHAIPNLVKNLPGGQQNSSWNFSEDTVISILNTINEVIAENLEAAKKLRETQGIEKLVLINKSGNRSEKEVRAAALVLQTIWGYKELRKPLEKEGWKKSDFQVNLNNASRSQSSHSYDDSTLPLIDRNQKSDNNYSTPNERGDHNRTLDRSGDLGDMEPLKGTTPLMQKI

SEQ ID NO: 14280 - protein, 667 aa, Artificial Sequence
  Synthetic polypeptide
SQHFGRPSWADHEVRRSRSSWLTRSYEDMIGEEVPSDQYYWAPLAQHERGSLASLDSLRKGGPPPPNWRQPELPEVIAMLGFRLDAVKSNAAAYLQHLCYRNDKVKTDVRKLKGIPVLVGLLDHPKKEVHLGACGALKNISFGRDQDNKIAIKNCDGVPALVRLLRKARDMDLTEVITGTLWNLSSHDSIKMEIVDHALHALTDEVIIPHSGWEREPNEDCKPRHIEWESVLTNTAGCLRNVSSERSEARRKLRECDGLVDALIFIVQAEIGQKDSDSKLVENCVCLLRNLSYQVHREIPQAERYQEAAPNVANNTGPHAASCFGAKKGKGKKPIEDPANDTVDFPKRTSPARGYELLFQPEVVRIYISLLKESKTPAILEASAGAIQNLCAGRWTYGRYIRSALRQEKALSAIADLLTNEHERVVKAASGALRNLAVDARNKELIGKHAIPNLVKNLPGGQQNSSWNFSEDTVISILNTINEVIAENLEAAKKLRETQGIEKLVLINKSGNRSEKEVRAAALVLQTIWGYKELRKPLEKEGWKKSDFQVNLNNASRSQSSHSYDDSTLPLIDRNQKSDKKPDREEIQMSNMGSNTKSLDNNYSTPNERGDHNRTLDRSGDLGDMEPLKGTTPLMQDEGQESLEEELDVLVLDDEGGQVSYPSMQKI

SEQ ID NO: 14281 - protein, 638 aa, Artificial Sequence
  Synthetic polypeptide
SQHFGRPSWADHEVRRSRSSWLTRSYEDMIGEEVPSDQYYWAPLAQHERGSLASLDSLRKGGPPPPNWRQPELPEVIAMLGFRLDAVKSNAAAYLQHLCYRNDKVKTDVRKLKGIPVLVGLLDHPKKEVHLGACGALKNISFGRDQDNKIAIKNCDGVPALVRLLRKARDMDLTEVITGTLWNLSSHDSIKMEIVDHALHALTDEVIIPHSGWEREPNEDCKPRHIEWESVLTNTAGCLRNVSSERSEARRKLRECDGLVDALIFIVQAEIGQKDSDSKLVENCVCLLRNLSYQVHREIPQAERYQEAAPNVANNTGPHAASCFGAKKGKGKKPIEDPANDTVDFPKRTSPARGYELLFQPEVVRIYISLLKESKTPAILEASAGAIQNLCAGRWTYGRYIRSALRQEKALSAIADLLTNEHERVVKAASGALRNLAVDARNKELIGKHAIPNLVKNLPGGQQNSSWNFSEDTVISILNTINEVIAENLEAAKKLRETQGIEKLVLINKSGNRSEKEVRAAALVLQTIWGYKELRKPLEKEGWKKSDFQVNLNNASRSQSSHSYDDSTLPLIDRNQKSDKKPDREEIQMSNMGSNTKSLDNNYSTPNERGDHNRTLDRSGDLGDMEPLKGTTPLMQKI

SEQ ID NO: 14282 - protein, 646 aa, Artificial Sequence
  Synthetic polypeptide
SQHFGRPSWADHEVRRSRSSWLTRSYEDMIGEEVPSDQYYWAPLAQHERGSLASLDSLRKGGPPPPNWRQPELPEVIAMLGFRLDAVKSNAAAYLQHLCYRNDKVKTDVRKLKGIPVLVGLLDHPKKEVHLGACGALKNISFGRDQDNKIAIKNCDGVPALVRLLRKARDMDLTEVITGTLWNLSSHDSIKMEIVDHALHALTDEVIIPHSGWEREPNEDCKPRHIEWESVLTNTAGCLRNVSSERSEARRKLRECDGLVDALIFIVQAEIGQKDSDSKLVENCVCLLRNLSYQVHREIPQAERYQEAAPNVANNTGPHAASCFGAKKGKGKKPIEDPANDTVDFPKRTSPARGYELLFQPEVVRIYISLLKESKTPAILEASAGAIQNLCAGRWTYGRYIRSALRQEKALSAIADLLTNEHERVVKAASGALRNLAVDARNKELIGKHAIPNLVKNLPGGQQNSSWNFSEDTVISILNTINEVIAENLEAAKKLRETQGIEKLVLINKSGNRSEKEVRAAALVLQTIWGYKELRKPLEKEGWKKSDFQVNLNNASRSQSSHSYDDSTLPLIDRNQKSDNNYSTPNERGDHNRTLDRSGDLGDMEPLKGTTPLMQDEGQESLEEELDVLVLDDEGGQVSYPSMQKI

SEQ ID NO: 14283 - protein, 78 aa, Artificial Sequence
  Synthetic polypeptide
KAVKSRAFPPHKSLYFHRISVSSFIFFMTSAGAQQVCCGFTFCLLTWAPSSVKPKSQRNHHHLLKRQQLLSWMSSWLT

SEQ ID NO: 14284 - protein, 35 aa, Artificial Sequence
  Synthetic polypeptide
LCEAQEPKESPPPSKTSAAAQLDELMAHLTEMQAK

SEQ ID NO: 14285 - protein, 315 aa, Artificial Sequence
  Synthetic polypeptide
LCEAQEPKESPPPSKTSAAAQLDELMAHLTEMQAKVAVRADAGKKHLPDKQDHKASLDSMLGGLEQELQDLGIATVPKGHCASCQKPIAGKVIHALGQSWHPEHFVCTHCKEEIGSSPFFERSGLAYCPNDYHQLFSPRCAYCAAPILDKVLTAMNQTWHPEHFFCSHCGEVFGAEGFHEKDKKPYCRKDFLAMFSPKCGGCNRPVLENYLSAMDTVWHPECFVCGDCFTSFSTGSFFELDGRPFCELHYHHRRGTLCHGCGQPITGRCISAMGYKFHPEHFVCAFCLTQLSKGIFREQNDKTYCQPCFNKLFPL

SEQ ID NO: 14286 - protein, 22 aa, Artificial Sequence
  Synthetic polypeptide
DQPGPYGAARVYYQYPGAQCLQ

SEQ ID NO: 14287 - protein, 76 aa, Artificial Sequence
  Synthetic polypeptide
GQVQWLRPVISALWKAEAGGSLEARSLRPAWAIWRSSCILPISRSSMSTVKPKSQRNHHHLLKRQQLLSWMSSWLT

SEQ ID NO: 14288 - protein, 60 aa, Artificial Sequence
  Synthetic polypeptide
SQEFETSLGHMAQLVYTTNIQELNVYSEAQEPKESPPPSKTSAAAQLDELMAHLTEMQAK

SEQ ID NO: 14289 - protein, 340 aa, Artificial Sequence
  Synthetic polypeptide
SQEFETSLGHMAQLVYTTNIQELNVYSEAQEPKESPPPSKTSAAAQLDELMAHLTEMQAKVAVRADAGKKHLPDKQDHKASLDSMLGGLEQELQDLGIATVPKGHCASCQKPIAGKVIHALGQSWHPEHFVCTHCKEEIGSSPFFERSGLAYCPNDYHQLFSPRCAYCAAPILDKVLTAMNQTWHPEHFFCSHCGEVFGAEGFHEKDKKPYCRKDFLAMFSPKCGGCNRPVLENYLSAMDTVWHPECFVCGDCFTSFSTGSFFELDGRPFCELHYHHRRGTLCHGCGQPITGRCISAMGYKFHPEHFVCAFCLTQLSKGIFREQNDKTYCQPCFNKLFPL

SEQ ID NO: 14290 - protein, 378 aa, Artificial Sequence
  Synthetic polypeptide
CCRGKIPDFAIIMPYWRNWNAPPFRTVMNIPTQLLFPWISIPERRLTLMRLRRSFLFRITQVPCREAQEPKESPPPSKTSAAAQLDELMAHLTEMQAKVAVRADAGKKHLPDKQDHKASLDSMLGGLEQELQDLGIATVPKGHCASCQKPIAGKVIHALGQSWHPEHFVCTHCKEEIGSSPFFERSGLAYCPNDYHQLFSPRCAYCAAPILDKVLTAMNQTWHPEHFFCSHCGEVFGAEGFHEKDKKPYCRKDFLAMFSPKCGGCNRPVLENYLSAMDTVWHPECFVCGDCFTSFSTGSFFELDGRPFCELHYHHRRGTLCHGCGQPITGRCISAMGYKFHPEHFVCAFCLTQLSKGIFREQNDKTYCQPCFNKLFPL

SEQ ID NO: 14291 - protein, 107 aa, Artificial Sequence
  Synthetic polypeptide
CCRGKIPDFAIIMPYWRNWNAPPFRTVMNIPTQLLFPWISIPERRLTLMRLRRSFLFRITQVPCRRSSCILPISRSSMSTVKPKSQRNHHHLLKRQQLLSWMSSWLT

SEQ ID NO: 14292 - protein, 62 aa, Artificial Sequence
  Synthetic polypeptide
RKDPRLCNYNALLEELERSTLQDSDEYSNPAPLPLDQHSRKETNLDETSEILSIQDNTSPLP

SEQ ID NO: 14293 - protein, 111 aa, Artificial Sequence
  Synthetic polypeptide
RKDPRLCNYNALLEELERSTLQDSDEYSNPAPLPLDQHSRKETNLDETSEILSIQDNTSPLPAQLVYTTNIQELNVYSEAQEPKESPPPSKTSAAAQLDELMAHLTEMQAK

SEQ ID NO: 14294 - protein, 391 aa, Artificial Sequence
  Synthetic polypeptide
RKDPRLCNYNALLEELERSTLQDSDEYSNPAPLPLDQHSRKETNLDETSEILSIQDNTSPLPAQLVYTTNIQELNVYSEAQEPKESPPPSKTSAAAQLDELMAHLTEMQAKVAVRADAGKKHLPDKQDHKASLDSMLGGLEQELQDLGIATVPKGHCASCQKPIAGKVIHALGQSWHPEHFVCTHCKEEIGSSPFFERSGLAYCPNDYHQLFSPRCAYCAAPILDKVLTAMNQTWHPEHFFCSHCGEVFGAEGFHEKDKKPYCRKDFLAMFSPKCGGCNRPVLENYLSAMDTVWHPECFVCGDCFTSFSTGSFFELDGRPFCELHYHHRRGTLCHGCGQPITGRCISAMGYKFHPEHFVCAFCLTQLSKGIFREQNDKTYCQPCFNKLFPL

SEQ ID NO: 14295 - protein, 56 aa, Artificial Sequence
  Synthetic polypeptide
APRDALLEELERSTLQDSDEYSNPAPLPLDQHSRKETNLDETSEILSIQDNTSPLP

SEQ ID NO: 14296 - protein, 105 aa, Artificial Sequence
  Synthetic polypeptide
APRDALLEELERSTLQDSDEYSNPAPLPLDQHSRKETNLDETSEILSIQDNTSPLPAQLVYTTNIQELNVYSEAQEPKESPPPSKTSAAAQLDELMAHLTEMQAK

SEQ ID NO: 14297 - protein, 385 aa, Artificial Sequence
  Synthetic polypeptide
APRDALLEELERSTLQDSDEYSNPAPLPLDQHSRKETNLDETSEILSIQDNTSPLPAQLVYTTNIQELNVYSEAQEPKESPPPSKTSAAAQLDELMAHLTEMQAKVAVRADAGKKHLPDKQDHKASLDSMLGGLEQELQDLGIATVPKGHCASCQKPIAGKVIHALGQSWHPEHFVCTHCKEEIGSSPFFERSGLAYCPNDYHQLFSPRCAYCAAPILDKVLTAMNQTWHPEHFFCSHCGEVFGAEGFHEKDKKPYCRKDFLAMFSPKCGGCNRPVLENYLSAMDTVWHPECFVCGDCFTSFSTGSFFELDGRPFCELHYHHRRGTLCHGCGQPITGRCISAMGYKFHPEHFVCAFCLTQLSKGIFREQNDKTYCQPCFNKLFPL

SEQ ID NO: 14298 - protein, 15 aa, Artificial Sequence
  Synthetic polypeptide
RCLIGGTGTLHPSGQ

SEQ ID NO: 14299 - protein, 381 aa, Artificial Sequence
  Synthetic polypeptide
SRLPVCESLTCELLEMPYWRNWNAPPFRTVMNIPTQLLFPWISIPERRLTLMRLRRSFLFRITQVPCREAQEPKESPPPSKTSAAAQLDELMAHLTEMQAKVAVRADAGKKHLPDKQDHKASLDSMLGGLEQELQDLGIATVPKGHCASCQKPIAGKVIHALGQSWHPEHFVCTHCKEEIGSSPFFERSGLAYCPNDYHQLFSPRCAYCAAPILDKVLTAMNQTWHPEHFFCSHCGEVFGAEGFHEKDKKPYCRKDFLAMFSPKCGGCNRPVLENYLSAMDTVWHPECFVCGDCFTSFSTGSFFELDGRPFCELHYHHRRGTLCHGCGQPITGRCISAMGYKFHPEHFVCAFCLTQLSKGIFREQNDKTYCQPCFNKLFPL

SEQ ID NO: 14300 - protein, 110 aa, Artificial Sequence
  Synthetic polypeptide
SRLPVCESLTCELLEMPYWRNWNAPPFRTVMNIPTQLLFPWISIPERRLTLMRLRRSFLFRITQVPCRRSSCILPISRSSMSTVKPKSQRNHHHLLKRQQLLSWMSSWLT

SEQ ID NO: 14301 - protein, 23 aa, Artificial Sequence
  Synthetic polypeptide
RPMEMKGSRVCDGASQAIKSKEK

SEQ ID NO: 14302 - protein, 8 aa, Artificial Sequence
  Synthetic polypeptide
SQRKNDNE

SEQ ID NO: 14303 - protein, 27 aa, Artificial Sequence
  Synthetic polypeptide
SQRKNDNEFIEPLCCHFWNDSFNHGHT

SEQ ID NO: 14304 - protein, 15 aa, Artificial Sequence
  Synthetic polypeptide
WCFTGYKVKGKMIMN

SEQ ID NO: 14305 - protein, 179 aa, Artificial Sequence
  Synthetic polypeptide
WCFTGYKVKGKMIMNSLSLFAAISGMILSIMDILNIKISHFLKMESLNFIRAHTPYINIYNCEPANPSEKNSPSTQYCYSIQSLFLELVIAGIVENEWKRTCSRPKSNIVLLSAEEKKEQTIEIKEEVVGLTETSSQPKNEEDIEIIPIQEEEEEETETNFPEPPQDQESSPIENDSSP

SEQ ID NO: 14306 - protein, 192 aa, Artificial Sequence
  Synthetic polypeptide
WCFTGYKVKGKMIMNSLSLFAAISGMILSIMDILNIKISHFLKMESLNFIRAHTPYINIYNCEPANPSEKNSPSTQYCYSIQSLFLGILSVMLIFAFFQELVIAGIVENEWKRTCSRPKSNIVLLSAEEKKEQTIEIKEEVVGLTETSSQPKNEEDIEIIPIQEEEEEETETNFPEPPQDQESSPIENDSSP

SEQ ID NO: 14307 - protein, 415 aa, Artificial Sequence
  Synthetic polypeptide
GAVRVIFLPGHPSPAPPDQLNTSSAESELWEPGERLPVRLTNGSSSCSGTVEVRLEASWEPACGALWDSRAAEAVCRALGCGGAEAASQLAPPTPELPPPPAAGNTSVAANATLAGAPALLCSGAEWRLCEVVEHACRSDGRRARVTCAENRALRLVDGGGACAGRVEMLEHGEWGSVCDDTWDLEDAHVVCRQLGCGWAVQALPGLHFTPGRGPIHRDQVNCSGAEAYLWDCPGLPGQHYCGHKEDAGAVCSASRSLHNLSTPEVPASVQTVTIESSVTVKIENKESRELMLLIPSIVLGILLLGSLIFIAFILLRIKGKYVFMLPIQVQAPPPEDSDSGSDSDYEHYDFSAQPPVALTTFYNSQRHRVTDEEVQQSRFQMPPLEEGLEELHASHIPTANPGHCITDPPSLGPQ

SEQ ID NO: 14308 - protein, 585 aa, Artificial Sequence
  Synthetic polypeptide
GAVRVIFLPGHPSPAPPDQLNTSSAESELWEPGERLPVRLTNGSSSCSGTVEVRLEASWEPACGALWDSRAAEAVCRALGCGGAEAASQLAPPTPELPPPPAAGNTSVAANATLAGAPALLCSGAEWRLCEVVEHACRSDGRRARVTCAENRALRLVDGGGACAGRVEMLEHGEWGSVCDDTWDLEDAHVVCRQLGCGWAVQALPGLHFTPGRGPIHRDQVNCSGAEAYLWDCPGLPGQHYCGHKEDAGAVCSEHQSWRLTGGADRCEGQVEVHFRGVWNTVCDSEWYPSEAKVLCQSLGCGTAVERPKGLPHSLSGRMYYSCNGEELTLSNCSWRFNNSNLCSQSLAARVLCSASRSLHNLSTPEVPASVQTVTIESSVTVKIENKESRELMLLIPSIVLGILLLGSLIFIAFILLRIKGKYALPVMVNHQHLPTTIPAGSNSYQPVPITIPKEDSQRHRVTDEEVQQSRFQMPPLEEGLEELHASHIPTANPGHCITDPPSLGPQYHPRSNSESSTSSGEDYCNSPKSKLPPWNPQVFSSERSSFLEQPPNLELAGTQPAFSGSPSPQPDSTDNDDYDDISAA

SEQ ID NO: 14309 - protein, 461 aa, Artificial Sequence
  Synthetic polypeptide
GAVRVIFLPGHPSPAPPDQLNTSSAESELWEPGERLPVRLTNGSSSCSGTVEVRLEASWEPACGALWDSRAAEAVCRALGCGGAEAASQLAPPTPELPPPPAAGNTSVAANATLAGAPALLCSGAEWRLCEVVEHACRSDGRRARVTCAENRALRLVDGGGACAGRVEMLEHGEWGSVCDDTWDLEDAHVVCRQLGCGWAVQALPGLHFTPGRGPIHRDQVNCSGAEAYLWDCPGLPGQHYCGHKEDAGAVCSEHQSWRLTGGADRCEGQVEVHFRGVWNTVCDSEWYPSEAKVLCQSLGCGTAVERPKGLPHSLSGRMYYSCNGEELTLSNCSWRFNNSNLCSQSLAARVLCSASRSLHNLSTPEVPASVQTVTIESSVTVKIENKESRELMLLIPSIVLGILLLGSLIFIAFILLRIKGKYALPVMVNHQHLPTTIPAGSNSYQPVPITIPKEGPGPAP

SEQ ID NO: 14310 - protein, 661 aa, Artificial Sequence
  Synthetic polypeptide
GAVRVIFLPGHPSPAPPDQLNTSSAESELWEPGERLPVRLTNGSSSCSGTVEVRLEASWEPACGALWDSRAAEAVCRALGCGGAEAASQLAPPTPELPPPPAAGNTSVAANATLAGAPALLCSGAEWRLCEVVEHACRSDGRRARVTCAENRALRLVDGGGACAGRVEMLEHGEWGSVCDDTWDLEDAHVVCRQLGCGWAVQALPGLHFTPGRGPIHRDQVNCSGAEAYLWDCPGLPGQHYCGHKEDAGAVCSEHQSWRLTGGADRCEGQVEVHFRGVWNTVCDSEWYPSEAKVLCQSLGCGTAVERPKGLPHSLSGRMYYSCNGEELTLSNCSWRFNNSNLCSQSLAARVLCSASRSLHNLSTPEVPASVQTVTIESSVTVKIENKESRELMLLIPSIVLGILLLGSLIFIAFILLRIKGKYALPVMVNHQHLPTTIPAGSNSYQPVPITIPKEVFMLPIQVQAPPPEDSDSGSDSDYEHYDFSAQPPVALTTFYNSQRHRVTDEEVQQSRFQMPPLEEGLEELHASHIPTANPGHCITDPPSLGPQYHPRSNSESSTSSGEDYCNSPKSKLPPWNPQVFSSERSSFLEQPPNLELAGTQPAFSAGPPADDSSSTSSGEWYQNFQPPPQPPSEEQFGCPGSPSPQPDSTDNDDYDDISAA

SEQ ID NO: 14311 - protein, 588 aa, Artificial Sequence
  Synthetic polypeptide
GAVRVIFLPGHPSPAPPDQLNTSSAESELWEPGERLPVRLTNGSSSCSGTVEVRLEASWEPACGALWDSRAAEAVCRALGCGGAEAASQLAPPTPELPPPPAAGNTSVAANATLAGAPALLCSGAEWRLCEVVEHACRSDGRRARVTCAENRALRLVDGGGACAGRVEMLEHGEWGSVCDDTWDLEDAHVVCRQLGCGWAVQALPGLHFTPGRGPIHRDQVNCSGAEAYLWDCPGLPGQHYCGHKEDAGAVCSEHQSWRLTGGADRCEGQVEVHFRGVWNTVCDSEWYPSEAKVLCQSLGCGTAVERPKGLPHSLSGRMYYSCNGEELTLSNCSWRFNNSNLCSQSLAARVLCSASRSLHNLSTPEVPASVQTVTIESSVTVKIENKESRELMLLIPSIVLGILLLGSLIFIAFILLRIKGKYDSQRHRVTDEEVQQSRFQMPPLEEGLEELHASHIPTANPGHCITDPPSLGPQYHPRSNSESSTSSGEDYCNSPKSKLPPWNPQVFSSERSSFLEQPPNLELAGTQPAFSAGPPADDSSSTSSGEWYQNFQPPPQPPSEEQFGCPGSPSPQPDSTDNDDYDDISAA

SEQ ID NO: 14312 - protein, 629 aa, Artificial Sequence
  Synthetic polypeptide
GAVRVIFLPGHPSPAPPDQLNTSSAESELWEPGERLPVRLTNGSSSCSGTVEVRLEASWEPACGALWDSRAAEAVCRALGCGGAEAASQLAPPTPELPPPPAAGNTSVAANATLAGAPALLCSGAEWRLCEVVEHACRSDGRRARVTCAENRALRLVDGGGACAGRVEMLEHGEWGSVCDDTWDLEDAHVVCRQLGCGWAVQALPGLHFTPGRGPIHRDQVNCSGAEAYLWDCPGLPGQHYCGHKEDAGAVCSEHQSWRLTGGADRCEGQVEVHFRGVWNTVCDSEWYPSEAKVLCQSLGCGTAVERPKGLPHSLSGRMYYSCNGEELTLSNCSWRFNNSNLCSQSLAARVLCSASRSLHNLSTPEVPASVQTVTIESSVTVKIENKESRELMLLIPSIVLGILLLGSLIFIAFILLRIKGKYVFMLPIQVQAPPPEDSDSGSDSDYEHYDFSAQPPVALTTFYNSQRHRVTDEEVQQSRFQMPPLEEGLEELHASHIPTANPGHCITDPPSLGPQYHPRSNSESSTSSGEDYCNSPKSKLPPWNPQVFSSERSSFLEQPPNLELAGTQPAFSAGPPADDSSSTSSGEWYQNFQPPPQPPSEEQFGCPGSPSPQPDSTDNDDYDDISAA

SEQ ID NO: 14313 - protein, 594 aa, Artificial Sequence
  Synthetic polypeptide
GAVRVIFLPGHPSPAPPDQLNTSSAESELWEPGERLPVRLTNGSSSCSGTVEVRLEASWEPACGALWDSRAAEAVCRALGCGGAEAASQLAPPTPELPPPPAAGNTSVAANATLAGAPALLCSGAEWRLCEVVEHACRSDGRRARVTCAENRALRLVDGGGACAGRVEMLEHGEWGSVCDDTWDLEDAHVVCRQLGCGWAVQALPGLHFTPGRGPIHRDQVNCSGAEAYLWDCPGLPGQHYCGHKEDAGAVCSEHQSWRLTGGADRCEGQVEVHFRGVWNTVCDSEWYPSEAKVLCQSLGCGTAVERPKGLPHSLSGRMYYSCNGEELTLSNCSWRFNNSNLCSQSLAARVLCSASRSLHNLSTPEVPASVQTVTIESSVTVKIENKESRELMLLIPSIVLGILLLGSLIFIAFILLRIKGKYVFMLPIQVQAPPPEDSDSGSDSDYEHYDFSAQPPVALTTFYNSQRHRVTDEEVQQSRFQMPPLEEGLEELHASHIPTANPGHCITDPPSLGPQYHPRSNSESSTSSGEDYCNSPKSKLPPWNPQVFSSERSSFLEQPPNLELAGTQPAFSGSPSPQPDSTDNDDYDDISAA

SEQ ID NO: 14314 - protein, 271 aa, Artificial Sequence
  Synthetic polypeptide
GAVRVIFLPGHPSPAPPDQLNTSSAESELWEPGERLPVRLTNGSSSCSGTVEVRLEASWEPACGALWDSRAAEAVCRALGCGGAEAASQLAPPTPELPPPPAAGNTSVAANATLAGAPALLCSGAEWRLCEVVEHACRSDGRRARVTCAENRALRLVDGGGACAGRVEMLEHGEWGSVCDDTWDLEDAHVVCRQLGCGWAVQALPGLHFTPGRGPIHRDQVNCSGAEAYLWDCPGLPGQHYCGHKEDAGAVCSESSVTVKIENKESRELML

SEQ ID NO: 14315 - protein, 30 aa, Artificial Sequence
  Synthetic polypeptide
QRTRITPLQKRRLRSCQSHLSAWSSISSPT

SEQ ID NO: 14316 - protein, 53 aa, Artificial Sequence
  Synthetic polypeptide
SENQNHPLAEKKAKELSESSFCLVIHLQPHLTSSTPAVQRVSSGSQGSGFRSV

SEQ ID NO: 14317 - protein, 61 aa, Artificial Sequence
  Synthetic polypeptide
ATRILRALPGRQLPQWNASSEQCMAGPCGGSTQWLNTGKELALGVRTTETCRFLPRTAQLV

SEQ ID NO: 14318 - protein, 67 aa, Artificial Sequence
  Synthetic polypeptide
NLSLPASDGSAGMTQISRQGSPVPTRSARASWRSTSRTDGTWFAARAGAGAPSSGRTPVKRQKSASG

SEQ ID NO: 14319 - protein, 162 aa, Artificial Sequence
  Synthetic polypeptide
TQGRNWHLESGQLKLVASCLGRLSWYDPDFQARLTRSNSKCQGQLEVYLKDGWHMVCSQSWGRSSKQWEDPSQASKVCQRLNCGVPLSLGPFLVTYTPQSSIICYGQLGSFSNCSHSRNDMCHSLGLTCLEPQKTTPPTTRPPPTTTPEPTAMRPRTRPRTW

SEQ ID NO: 14320 - protein, 492 aa, Artificial Sequence
  Synthetic polypeptide
TQGRNWHLESGQLKLVASCLGRLSWYDPDFQARLTRSNSKCQGQLEVYLKDGWHMVCSQSWGRSSKQWEDPSQASKVCQRLNCGVPLSLGPFLVTYTPQSSIICYGQLGSFSNCSHSRNDMCHSLGLTCLEPQKTTPPTTRPPPTTTPEPTAPPRLQLVAQSGGQHCAGVVEFYSGSLGGTISYEAQDKTQDLENFLCNNLQCGSFLKHLPETEAGRAQDPGEPREHQPLPIQWKIQNSSCTSLEHCFRKIKPQKSGRVLALLCSGFQPKVQSRLVGGSSICEGTVEVRQGAQWAALCDSSSARSSLRWEEVCREQQCGSVNSYRVLDAGDPTSRGLFCPHQKLSQCHELWERNSYCKKVFVTCQDPNPAGLAAGTVASIILALVLLVVLLVVCGPLAYKKLVKKFRQKKQRQWIGPTGMNQNMSFHRNHTATVRSHAENPTASHVDNEYSQPPRNSHLSAYPALEGALHRSSMQPDNSSDSDYDLHGAQRL

SEQ ID NO: 14321 - protein, 118 aa, Artificial Sequence
  Synthetic polypeptide
EVQDLQLEREMALATNRSLAERNLEFQGPLEISRSNLSDRYQELRKLVERCQEQKAKLEKFSSALQPGTLLDLLQVEGMKIEEESEAMAEKFLEGEVPLETFLENFSSMRMLSHLRRV

SEQ ID NO: 14322 - protein, 325 aa, Artificial Sequence
  Synthetic polypeptide
EVQDLQLEREMALATNRSLAERNLEFQGPLEISRSNLSDRYQELRKLVERCQEQKAKLEKFSSALQPGTLLDLLQVEGMKIEEESEAMAEKFLEGEVPLETFLENFSSMRMLSHLRRVRVEKLQEVVRKPRASQELAGDAPPPRPPPPVRPVPQGTPPVVEEQPQPPLAMPPYPLPYSPSPSLPVGPTAHGALPPAPFPVVSQPSFYSGPLGPTYPAAQLGPRGAAGYSWSPQRSMPPRPGYPGTPMGASGPGYPLRGGRAPSPGYPQQSPYPATGGKPPYPIQPQLPSFPGQPQPSVPLQPPYPPGPAPPYGFPPPPGPAWPGY

SEQ ID NO: 14323 - protein, 119 aa, Artificial Sequence
  Synthetic polypeptide
GASLPGHPSSEMWGAPLLHRPVWDVRTASARPRPRLGGEERLCLAAPSEKSRTYSWNGRWHWPPTGAWQSGTWSSRVPWRSAAQTSRIDTRSSGSSWSGARSRRQSWRNFLQHCSQGPC

SEQ ID NO: 14324 - protein, 62 aa, Artificial Sequence
  Synthetic polypeptide
GPPLPGRDPVWEVRSVSAWPPRLRSPGPTAGTGDGTGHQPEPGRAELGVPGSPGDQPLKPLG

SEQ ID NO: 14325 - protein, 96 aa, Artificial Sequence
  Synthetic polypeptide
DVGSASAPPPRLGCEDRLCPAATPSGRSRTYSWNGRWHWPPTGAWQSGTWSSRVPWRSAAQTSRIDTRSSGSSWSGARSRRQSWRNFLQHCSQGPC

SEQ ID NO: 14326 - protein, 75 aa, Artificial Sequence
  Synthetic polypeptide
GASLPGHPSSEMWGAPLLHRPVWDVRTASARPRPRLGGPGPTAGTGDGTGHQPEPGRAELGVPGSPGDQPLKPLG

SEQ ID NO: 14327 - protein, 129 aa, Artificial Sequence
  Synthetic polypeptide
GPPLPGRDPVWEVQDLQLEREMALATNRSLAERNLEFQGPLEISRSNLSDRYQELRKLVERCQEQKAKLEKFSSALQPGTLLDLLQVEGMKIEEESEAMAEKFLEGEVPLETFLENFSSMRMLSHLRRV

SEQ ID NO: 14328 - protein, 336 aa, Artificial Sequence
  Synthetic polypeptide
GPPLPGRDPVWEVQDLQLEREMALATNRSLAERNLEFQGPLEISRSNLSDRYQELRKLVERCQEQKAKLEKFSSALQPGTLLDLLQVEGMKIEEESEAMAEKFLEGEVPLETFLENFSSMRMLSHLRRVRVEKLQEVVRKPRASQELAGDAPPPRPPPPVRPVPQGTPPVVEEQPQPPLAMPPYPLPYSPSPSLPVGPTAHGALPPAPFPVVSQPSFYSGPLGPTYPAAQLGPRGAAGYSWSPQRSMPPRPGYPGTPMGASGPGYPLRGGRAPSPGYPQQSPYPATGGKPPYPIQPQLPSFPGQPQPSVPLQPPYPPGPAPPYGFPPPPGPAWPGY

SEQ ID NO: 14329 - protein, 18 aa, Artificial Sequence
  Synthetic polypeptide
GDGDARVAGHALPRLRGG

SEQ ID NO: 14330 - protein, 62 aa, Artificial Sequence
  Synthetic polypeptide
RVVTPASPGYCQDSVRRRRCESRWSCSPQAPRRMRPTRVAAERTWAGSSSVSATTSRSPRSP

SEQ ID NO: 14331 - protein, 108 aa, Artificial Sequence
  Synthetic polypeptide
VREGSYCRQPWPCDFTSLNQSLQLEGGDTCLAWLLSGFSKETAMRESLVMLSPGSEEDEAHEGCSRENLGRIQFSVGYNFQESTLTVKIMKAQELPAKDFSGTSDPFV

SEQ ID NO: 14332 - protein, 336 aa, Artificial Sequence
  Synthetic polypeptide
VREGSYCRQPWPCDFTSLNQSLQLEGGDTCLAWLLSGFSKETAMRESLVMLSPGSEEDEAHEGCSRENLGRIQFSVGYNFQESTLTVKIMKAQELPAKDFSGTSDPFVKIYLLPDKKHKLETKVKRKNLNPHWNETFLFEGFPYEKVVQRILYLQVLDYDRFSRNDPIGEVSIPLNKVDLTQMQTFWKDLKPCSDGSGSRGELLLSLCYNPSANSIIVNIIKARNLKAMDIGGTSDPYVKVWLMYKDKRVEKKKTVTMKRNLNPIFNESFAFDIPTEKLRETTIIITVMDKDKLSRNDVIGKIYLSWKSGPGEVKHWKDMIARPRQPVAQWHQLKA

SEQ ID NO: 14333 - protein, 115 aa, Artificial Sequence
  Synthetic polypeptide
CVLCTWHPGLAVPRSSGRPRATSCWSLPSSPSALASLSSSAASATGVSANWANATRIPWRRWARQTQGVGAVRRRLSMAPSCRAPKWPPRRGWRWSGKAGWGRSRHRCRHPERTP

SEQ ID NO: 14334 - protein, 79 aa, Artificial Sequence
  Synthetic polypeptide
CVLCTWHPGLAVPRSSGRPRATSCWSLPSSPSALASLSSSAASATGVSANWANATRIPWRRWARQTQGVGAVRRRLSMI

SEQ ID NO: 14335 - protein, 85 aa, Artificial Sequence
  Synthetic polypeptide
CVLCTWHPGLAVPRSSGRPRATSCWSLPSSPSALASLSSSAASATGVSANWANATRIPWRRWARQTQGVGAVRRRLSSCLQEGRR

SEQ ID NO: 14336 - protein, 47 aa, Artificial Sequence
  Synthetic polypeptide
GDHNGTSVTIKRDNACYALGTRAWQSLGAQGALARRPAGLCHHHRQP

SEQ ID NO: 14337 - protein, 186 aa, Artificial Sequence
  Synthetic polypeptide
LLSGIMRVMHLAPGPGSPSELRAPSRDVLLVSAIITVSLSVTVVLCGLCHWCQRKLGKRYKNSLETVGTPDSGRGRSEKKAIKLPAGGKAVNTAPVPGQTPHDESDRRTEPRSSVSDLVNSLTSEMLMLSPGSEEDEAHEGCSRENLGRIQFSVGYNFQESTLTVKIMKAQELPAKDFSGTSDPFV

SEQ ID NO: 14338 - protein, 414 aa, Artificial Sequence
  Synthetic polypeptide
LLSGIMRVMHLAPGPGSPSELRAPSRDVLLVSAIITVSLSVTVVLCGLCHWCQRKLGKRYKNSLETVGTPDSGRGRSEKKAIKLPAGGKAVNTAPVPGQTPHDESDRRTEPRSSVSDLVNSLTSEMLMLSPGSEEDEAHEGCSRENLGRIQFSVGYNFQESTLTVKIMKAQELPAKDFSGTSDPFVKIYLLPDKKHKLETKVKRKNLNPHWNETFLFEGFPYEKVVQRILYLQVLDYDRFSRNDPIGEVSIPLNKVDLTQMQTFWKDLKPCSDGSGSRGELLLSLCYNPSANSIIVNIIKARNLKAMDIGGTSDPYVKVWLMYKDKRVEKKKTVTMKRNLNPIFNESFAFDIPTEKLRETTIIITVMDKDKLSRNDVIGKIYLSWKSGPGEVKHWKDMIARPRQPVAQWHQLKA

SEQ ID NO: 14339 - protein, 458 aa, Artificial Sequence
  Synthetic polypeptide
LLSGIMRVMHLAPGPGSPSELRAPSRDVLLVSAIITVSLSVTVVLCGLCHWCQRKLGKRYKNSLETVGTPDSGRGRSEKKAINDLDRDFWNNNESTVQQKWSSYPPKEFILNISPYAPYGDPRLSLKLPAGGKAVNTAPVPGQTPHDESDRRTEPRSSVSDLVNSLTSEMLMLSPGSEEDEAHEGCSRENLGRIQFSVGYNFQESTLTVKIMKAQELPAKDFSGTSDPFVKIYLLPDKKHKLETKVKRKNLNPHWNETFLFEGFPYEKVVQRILYLQVLDYDRFSRNDPIGEVSIPLNKVDLTQMQTFWKDLKPCSDGSGSRGELLLSLCYNPSANSIIVNIIKARNLKAMDIGGTSDPYVKVWLMYKDKRVEKKKTVTMKRNLNPIFNESFAFDIPTEKLRETTIIITVMDKDKLSRNDVIGKIYLSWKSGPGEVKHWKDMIARPRQPVAQWHQLKA

SEQ ID NO: 14340 - protein, 622 aa, Artificial Sequence
  Synthetic polypeptide
LLSGIMRVMHLAPGPGSPSELRAPSRDVLLVSAIITVSLSVTVVLCGLCHWCQRKLGKRYKNSLETVGTPDSGRGRSEKKAINDLDRDFWNNNESTVQQKWSSYPPKEFILNISPYAPYGDPRLSLNFEDSTLSTATTLESIPSSTGEPKCQRPRTLMRQQSLQQPLSQHQRGRQPSQPTTSQSLGQLQAHMASAPGPNPRAYGRGQARQGTSAGSKYRAAGGRSRSNPGSWDHVVGQIRNRGLDMKSFLEGRMVVLSLVLGLSEQDDFANIPDLQNPGTQQNQNAQGDKRLPAGGKAVNTAPVPGQTPHDESDRRTEPRSSVSDLVNSLTSEMLMLSPGSEEDEAHEGCSRENLGRIQFSVGYNFQESTLTVKIMKAQELPAKDFSGTSDPFVKIYLLPDKKHKLETKVKRKNLNPHWNETFLFEGFPYEKVVQRILYLQVLDYDRFSRNDPIGEVSIPLNKVDLTQMQTFWKDLKPCSDGSGSRGELLLSLCYNPSANSIIVNIIKARNLKAMDIGGTSDPYVKVWLMYKDKRVEKKKTVTMKRNLNPIFNESFAFDIPTEKLRETTIIITVMDKDKLSRNDVIGKIYLSWKSGPGEVKHWKDMIARPRQPVAQWHQLKA

SEQ ID NO: 14341 - protein, 533 aa, Artificial Sequence
  Synthetic polypeptide
LLSGIMRVMHLAPGPGSPSELRAPSRDVLLVSAIITVSLSVTVVLCGLCHWCQRKLGKRYKNSLETVGTPDSGRGRSEKKAINDLDRDFWNNNESTVQQKWSSYPPKEFILNISPYAPYGDPRLSLNGTLLSGAKVAAAAGLAVEREGRLGEKPAPVPPPGEDALRSGGAAPSEPGSGGKAGRGRWRTVQSHLAAGKLNLSKLPAGGKAVNTAPVPGQTPHDESDRRTEPRSSVSDLVNSLTSEMLMLSPGSEEDEAHEGCSRENLGRIQFSVGYNFQESTLTVKIMKAQELPAKDFSGTSDPFVKIYLLPDKKHKLETKVKRKNLNPHWNETFLFEGFPYEKVVQRILYLQVLDYDRFSRNDPIGEVSIPLNKVDLTQMQTFWKDLKPCSDGSGSRGELLLSLCYNPSANSIIVNIIKARNLKAMDIGGTSDPYVKVWLMYKDKRVEKKKTVTMKRNLNPIFNESFAFDIPTEKLRETTIIITVMDKDKLSRNDVIGKIYLSWKSGPGEVKHWKDMIARPRQPVAQWHQLKA

SEQ ID NO: 14342 - protein, 697 aa, Artificial Sequence
  Synthetic polypeptide
LLSGIMRVMHLAPGPGSPSELRAPSRDVLLVSAIITVSLSVTVVLCGLCHWCQRKLGKRYKNSLETVGTPDSGRGRSEKKAINDLDRDFWNNNESTVQQKWSSYPPKEFILNISPYAPYGDPRLSLNGTLLSGAKVAAAAGLAVEREGRLGEKPAPVPPPGEDALRSGGAAPSEPGSGGKAGRGRWRTVQSHLAAGKLNLSNFEDSTLSTATTLESIPSSTGEPKCQRPRTLMRQQSLQQPLSQHQRGRQPSQPTTSQSLGQLQAHMASAPGPNPRAYGRGQARQGTSAGSKYRAAGGRSRSNPGSWDHVVGQIRNRGLDMKSFLEGRMVVLSLVLGLSEQDDFANIPDLQNPGTQQNQNAQGDKRLPAGGKAVNTAPVPGQTPHDESDRRTEPRSSVSDLVNSLTSEMLMLSPGSEEDEAHEGCSRENLGRIQFSVGYNFQESTLTVKIMKAQELPAKDFSGTSDPFVKIYLLPDKKHKLETKVKRKNLNPHWNETFLFEGFPYEKVVQRILYLQVLDYDRFSRNDPIGEVSIPLNKVDLTQMQTFWKDLKPCSDGSGSRGELLLSLCYNPSANSIIVNIIKARNLKAMDIGGTSDPYVKVWLMYKDKRVEKKKTVTMKRNLNPIFNESFAFDIPTEKLRETTIIITVMDKDKLSRNDVIGKIYLSWKSGPGEVKHWKDMIARPRQPVAQWHQLKA

SEQ ID NO: 14343 - protein, 133 aa, Artificial Sequence
  Synthetic polypeptide
LLSGIMRVMHLAPGPGSPSELRAPSRDVLLVSAIITVSLSVTVVLCGLCHWCQRKLGKRYKNSLETVGTPDSGRGRSEKKAINDLDRDFWNNNESTVQQKWSSYPPKEFILNISPYAPYGDPRLSLNPLFLRR

SEQ ID NO: 14344 - protein, 489 aa, Artificial Sequence
  Synthetic polypeptide
LLSGIMRVMHLAPGPGSPSELRAPSRDVLLVSAIITVSLSVTVVLCGLCHWCQRKLGKRYKNSLETVGTPDSGRGRSEKKAINGTLLSGAKVAAAAGLAVEREGRLGEKPAPVPPPGEDALRSGGAAPSEPGSGGKAGRGRWRTVQSHLAAGKLNLSKLPAGGKAVNTAPVPGQTPHDESDRRTEPRSSVSDLVNSLTSEMLMLSPGSEEDEAHEGCSRENLGRIQFSVGYNFQESTLTVKIMKAQELPAKDFSGTSDPFVKIYLLPDKKHKLETKVKRKNLNPHWNETFLFEGFPYEKVVQRILYLQVLDYDRFSRNDPIGEVSIPLNKVDLTQMQTFWKDLKPCSDGSGSRGELLLSLCYNPSANSIIVNIIKARNLKAMDIGGTSDPYVKVWLMYKDKRVEKKKTVTMKRNLNPIFNESFAFDIPTEKLRETTIIITVMDKDKLSRNDVIGKIYLSWKSGPGEVKHWKDMIARPRQPVAQWHQLKA

SEQ ID NO: 14345 - protein, 59 aa, Artificial Sequence
  Synthetic polypeptide
HFRSCLLLTDYDCGRVSLLLWVCFFISKIGCSGVLAASWRGWVPGSGHRESEGCILILG

SEQ ID NO: 14346 - protein, 20 aa, Artificial Sequence
  Synthetic polypeptide
NRMLWSFGCKLAWMGSRFGT

SEQ ID NO: 14347 - protein, 10 aa, Artificial Sequence
  Synthetic polypeptide
ENIRTHLGTP

SEQ ID NO: 14348 - protein, 23 aa, Artificial Sequence
  Synthetic polypeptide
EPTLGHLDSKPSSKSNMIRGRNS

SEQ ID NO: 14349 - protein, 40 aa, Artificial Sequence
  Synthetic polypeptide
EPTLGHLDSKPSSKSNMIRGRNSATSADEQPHIGNYRLLK

SEQ ID NO: 14350 - protein, 762 aa, Artificial Sequence
  Synthetic polypeptide
EPTLGHLDSKPSSKSNMIRGRNSATSADEQPHIGNYRLLKTIGKGNFAKVKLARHILTGKEVAVKIIDKTQLNSSSLQKLFREVRIMKVLNHPNIVKLFEVIETEKTLYLVMEYASGGEVFDYLVAHGRMKEKEARAKFRQIVSAVQYCHQKFIVHRDLKAENLLLDADMNIKIADFGFSNEFTFGNKLDTFCGSPPYAAPELFQGKKYDGPEVDVWSLGVILYTLVSGSLPFDGQNLKELRERVLRGKYRIPFYMSTDCENLLKKFLILNPSKRGTLEQIMKDRWMNVGHEDDELKPYVEPLPDYKDPRRTELMVSMGYTREEIQDSLVGQRYNEVMATYLLLGYKSSELEGDTITLKPRPSADLTNSSAPSPSHKVQRSVSANPKQRRFSDQAAGPAIPTSNSYSKKTQSNNAENKRPEEDRESGRKASSTAKVPASPLPGLERKKTTPTPSTNSVLSTSTNRSRNSPLLERASLGQASIQNGKDSLTMPGSRASTASASAAVSAARPRQHQKSMSASVHPNKASGLPPTESNCEVPRPSTAPQRVPVASPSAHNISSSGGAPDRTNFPRGVSSRSTFHAGQLRQVRDQQNLPYGVTPASPSGHSQGRRGASGSIFSKFTSKFVRRNLNEPESKDRVETLRPHVVGSGGNDKEKEEFREAKPRSLRFTWSMKTTSSMEPNEMMREIRKVLDANSCQSELHEKYMLLCMHGTPGHEDFVQWEMEVCKLPRLSLNGVRFKRISGTSMAFKNIASKIANELKL

SEQ ID NO: 14351 - protein, 771 aa, Artificial Sequence
  Synthetic polypeptide
EPTLGHLDSKPSSKSNMIRGRNSATSADEQPHIGNYRLLKTIGKGNFAKVKLARHILTGKEVAVKIIDKTQLNSSSLQKLFREVRIMKVLNHPNIVKLFEVIETEKTLYLVMEYASGGEVFDYLVAHGRMKEKEARAKFRQIVSAVQYCHQKFIVHRDLKAENLLLDADMNIKIADFGFSNEFTFGNKLDTFCGSPPYAAPELFQGKKYDGPEVDVWSLGVILYTLVSGSLPFDGQNLKELRERVLRGKYRIPFYMSTDCENLLKKFLILNPSKRGTLEQIMKDRWMNVGHEDDELKPYVEPLPDYKDPRRTELMVSMGYTREEIQDSLVGQRYNEVMATYLLLGYKSSELEGDTITLKPRPSADLTNSSAPSPSHKVQRSVSANPKQRRFSDQAAGPAIPTSNSYSKKTQSNNAENKRPEEDRESGRKASSTAKVPASPLPGLERKKTTPTPSTNSVLSTSTNRSRNSPLLERASLGQASIQNGKDSLTMPGSRASTASASAAVSAARPRQHQKSMSASVHPNKASGLPPTESNCEVPRPSTAPQRVPVASPSAHNISSSGGAPDRTNFPRGVSSRSTFHAGQLRQVRDQQNLPYGVTPASPSGHSQGRRGASGSIFSKFTSKFVRRNLSFRFARRNLNEPESKDRVETLRPHVVGSGGNDKEKEEFREAKPRSLRFTWSMKTTSSMEPNEMMREIRKVLDANSCQSELHEKYMLLCMHGTPGHEDFVQWEMEVCKLPRLSLNGVRFKRISGTSMAFKNIASKIANELKL

SEQ ID NO: 14352 - protein, 756 aa, Artificial Sequence
  Synthetic polypeptide
EPTLGHLDSKPSSKSNMIRGRNSATSADEQPHIGNYRLLKTIGKGNFAKVKLARHILTGKEVAVKIIDKTQLNSSSLQKLFREVRIMKVLNHPNIVKLFEVIETEKTLYLVMEYASGGEVFDYLVAHGRMKEKEARAKFRQIVSAVQYCHQKFIVHRDLKAENLLLDADMNIKIADFGFSNEFTFGNKLDTFCGSPPYAAPELFQGKKYDGPEVDVWSLGVILYTLVSGSLPFDGQNLKELRERVLRGKYRIPFYMSTDCENLLKKFLILNPSKRGTLEQIMKDRWMNVGHEDDELKPYVEPLPDYKDPRRTELMVSMGYTREEIQDSLVGQRYNEVMATYLLLGYKSSELEGDTITLKPRPSADLTNSSAPSPSHKVQRSVSANPKQRRFSDQAAGPAIPTSNSYSKKTQSNNAENKRPEEDRESGRKASSTAKVPASPLPGLERKKTTPTPSTNSVLSTSTNRSRNSPLLERASLGQASIQNGKDSLTMPGSRASTASASAAVSAARPRQHQKSMSASVHPNKASGLPPTESNCEVPRPSTAPQRVPVASPSAHNISSSGGAPDRTNFPRGVSSRSTFHAGQLRQVRDQQNLPYGVTPASPSGHSQGRRGASGSIFSKFTSKFVRRNLSFRFARRPHVVGSGGNDKEKEEFREAKPRSLRFTWSMKTTSSMEPNEMMREIRKVLDANSCQSELHEKYMLLCMHGTPGHEDFVQWEMEVCKLPRLSLNGVRFKRISGTSMAFKNIASKIANELKL

SEQ ID NO: 14353 - protein, 717 aa, Artificial Sequence
  Synthetic polypeptide
EPTLGHLDSKPSSKSNMIRGRNSATSADEQPHIGNYRLLKTIGKGNFAKVKLARHILTGKEVAVKIIDKTQLNSSSLQKLFREVRIMKVLNHPNIVKLFEVIETEKTLYLVMEYASGGEVFDYLVAHGRMKEKEARAKFRQIVSAVQYCHQKFIVHRDLKAENLLLDADMNIKIADFGFSNEFTFGNKLDTFCGSPPYAAPELFQGKKYDGPEVDVWSLGVILYTLVSGSLPFDGQNLKELRERVLRGKYRIPFYMSTDCENLLKKFLILNPSKRGTLEQIMKDRWMNVGHEDDELKPYVEPLPDYKDPRRTELMVSMGYTREEIQDSLVGQRYNEVMATYLLLGYKSSELEGDTITLKPRPSADLTNSSAPSPSHKVQRSVSANPKQRRFSDQAAGPAIPTSNSYSKKTQSNNAENKRPEEDRESGRKASSTAKVPASPLPGLERKKTTPTPSTNSVLSTSTNRSRNSPLLERASLGQASIQNGKDSTAPQRVPVASPSAHNISSSGGAPDRTNFPRGVSSRSTFHAGQLRQVRDQQNLPYGVTPASPSGHSQGRRGASGSIFSKFTSKFVRRNLSFRFARRNLNEPESKDRVETLRPHVVGSGGNDKEKEEFREAKPRSLRFTWSMKTTSSMEPNEMMREIRKVLDANSCQSELHEKYMLLCMHGTPGHEDFVQWEMEVCKLPRLSLNGVRFKRISGTSMAFKNIASKIANELKL

SEQ ID NO: 14354 - protein, 702 aa, Artificial Sequence
  Synthetic polypeptide
EPTLGHLDSKPSSKSNMIRGRNSATSADEQPHIGNYRLLKTIGKGNFAKVKLARHILTGKEVAVKIIDKTQLNSSSLQKLFREVRIMKVLNHPNIVKLFEVIETEKTLYLVMEYASGGEVFDYLVAHGRMKEKEARAKFRQIVSAVQYCHQKFIVHRDLKAENLLLDADMNIKIADFGFSNEFTFGNKLDTFCGSPPYAAPELFQGKKYDGPEVDVWSLGVILYTLVSGSLPFDGQNLKELRERVLRGKYRIPFYMSTDCENLLKKFLILNPSKRGTLEQIMKDRWMNVGHEDDELKPYVEPLPDYKDPRRTELMVSMGYTREEIQDSLVGQRYNEVMATYLLLGYKSSELEGDTITLKPRPSADLTNSSAPSPSHKVQRSVSANPKQRRFSDQAAGPAIPTSNSYSKKTQSNNAENKRPEEDRESGRKASSTAKVPASPLPGLERKKTTPTPSTNSVLSTSTNRSRNSPLLERASLGQASIQNGKDSTAPQRVPVASPSAHNISSSGGAPDRTNFPRGVSSRSTFHAGQLRQVRDQQNLPYGVTPASPSGHSQGRRGASGSIFSKFTSKFVRRNLSFRFARRPHVVGSGGNDKEKEEFREAKPRSLRFTWSMKTTSSMEPNEMMREIRKVLDANSCQSELHEKYMLLCMHGTPGHEDFVQWEMEVCKLPRLSLNGVRFKRISGTSMAFKNIASKIANELKL

SEQ ID NO: 14355 - protein, 761 aa, Artificial Sequence
  Synthetic polypeptide
EPTLGHLDSKPSSKSNMIRGRNSATSADEQPHIGNYRLLKTIGKGNFAKVKLARHILTGKEVAVKIIDKTQLNSSSLQKLFREVRIMKVLNHPNIVKLFEVIETEKTLYLVMEYASGGEVFDYLVAHGRMKEKEARAKFRQIVSAVQYCHQKFIVHRDLKAENLLLDADMNIKIADFGFSNEFTFGNKLDTFCGSPPYAAPELFQGKKYDGPEVDVWSLGVILYTLVSGSLPFDGQNLKELRERVLRGKYRIPFYMSTDCENLLKKFLILNPSKRGTLEQIMKDRWMNVGHEDDELKPYVEPLPDYKDPRRTELMVSMGYTREEIQDSLVGQRYNEVMATYLLLGYKSSELEGDTITLKPRPSADLTNSSAPSPSHKVQRSVSANPKQRRFSDQAGPAIPTSNSYSKKTQSNNAENKRPEEDRESGRKASSTAKVPASPLPGLERKKTTPTPSTNSVLSTSTNRSRNSPLLERASLGQASIQNGKDSLTMPGSRASTASASAAVSAARPRQHQKSMSASVHPNKASGLPPTESNCEVPRPSTAPQRVPVASPSAHNISSSGGAPDRTNFPRGVSSRSTFHAGQLRQVRDQQNLPYGVTPASPSGHSQGRRGASGSIFSKFTSKFVRRNLNEPESKDRVETLRPHVVGSGGNDKEKEEFREAKPRSLRFTWSMKTTSSMEPNEMMREIRKVLDANSCQSELHEKYMLLCMHGTPGHEDFVQWEMEVCKLPRLSLNGVRFKRISGTSMAFKNIASKIANELKL

SEQ ID NO: 14356 - protein, 707 aa, Artificial Sequence
  Synthetic polypeptide
EPTLGHLDSKPSSKSNMIRGRNSATSADEQPHIGNYRLLKTIGKGNFAKVKLARHILTGKEVAVKIIDKTQLNSSSLQKLFREVRIMKVLNHPNIVKLFEVIETEKTLYLVMEYASGGEVFDYLVAHGRMKEKEARAKFRQIVSAVQYCHQKFIVHRDLKAENLLLDADMNIKIADFGFSNEFTFGNKLDTFCGSPPYAAPELFQGKKYDGPEVDVWSLGVILYTLVSGSLPFDGQNLKELRERVLRGKYRIPFYMSTDCENLLKKFLILNPSKRGTLEQIMKDRWMNVGHEDDELKPYVEPLPDYKDPRRTELMVSMGYTREEIQDSLVGQRYNEVMATYLLLGYKSSELEGDTITLKPRPSADLTNSSAPSPSHKVQRSVSANPKQRRFSDQAGPAIPTSNSYSKKTQSNNAENKRPEEDRESGRKASSTAKVPASPLPGLERKKTTPTPSTNSVLSTSTNRSRNSPLLERASLGQASIQNGKDSTAPQRVPVASPSAHNISSSGGAPDRTNFPRGVSSRSTFHAGQLRQVRDQQNLPYGVTPASPSGHSQGRRGASGSIFSKFTSKFVRRNLNEPESKDRVETLRPHVVGSGGNDKEKEEFREAKPRSLRFTWSMKTTSSMEPNEMMREIRKVLDANSCQSELHEKYMLLCMHGTPGHEDFVQWEMEVCKLPRLSLNGVRFKRISGTSMAFKNIASKIANELKL

SEQ ID NO: 14357 - protein, 692 aa, Artificial Sequence
  Synthetic polypeptide
EPTLGHLDSKPSSKSNMIRGRNSATSADEQPHIGNYRLLKTIGKGNFAKVKLARHILTGKEVAVKIIDKTQLNSSSLQKLFREVRIMKVLNHPNIVKLFEVIETEKTLYLVMEYASGGEVFDYLVAHGRMKEKEARAKFRQIVSAVQYCHQKFIVHRDLKAENLLLDADMNIKIADFGFSNEFTFGNKLDTFCGSPPYAAPELFQGKKYDGPEVDVWSLGVILYTLVSGSLPFDGQNLKELRERVLRGKYRIPFYMSTDCENLLKKFLILNPSKRGTLEQIMKDRWMNVGHEDDELKPYVEPLPDYKDPRRTELMVSMGYTREEIQDSLVGQRYNEVMATYLLLGYKSSELEGDTITLKPRPSADLTNSSAPSPSHKVQRSVSANPKQRRFSDQAGPAIPTSNSYSKKTQSNNAENKRPEEDRESGRKASSTAKVPASPLPGLERKKTTPTPSTNSVLSTSTNRSRNSPLLERASLGQASIQNGKDSTAPQRVPVASPSAHNISSSGGAPDRTNFPRGVSSRSTFHAGQLRQVRDQQNLPYGVTPASPSGHSQGRRGASGSIFSKFTSKFVRRPHVVGSGGNDKEKEEFREAKPRSLRFTWSMKTTSSMEPNEMMREIRKVLDANSCQSELHEKYMLLCMHGTPGHEDFVQWEMEVCKLPRLSLNGVRFKRISGTSMAFKNIASKIANELKL

SEQ ID NO: 14358 - protein, 29 aa, Artificial Sequence
  Synthetic polypeptide
NPSIFLEPLRKYKNPPWDTLTPSPAVSPT

SEQ ID NO: 14359 - protein, 325 aa, Artificial Sequence
  Synthetic polypeptide
GPGWRVAAEPPPVRRPHGHGRHAVHRLHLQPVRHQRGQVRGRGRAAALQPAGWEPPAAAAHRRHVAAVRGGGGARTVRPQRRARPRPRRVPPGGPRLRGLLVRVLLLPTLPAHAAALLGHVPRPAALGGGTSRQAARPRAPPTQRPWPAFPHATRAPPPPGPLRPRLCAPRARPSPGSLRPRLCARRAQPPPGPLRPRLCAPRARPPPGPLRLQLCSPRRRQSRRAPTPDSTADPQEAACQDHRPGAQGHEGPAGGGRGLPAVLDALLRGAHHAGAVSCLLRAPAAGQRRHLAGLRQQRPQPRHLHCLQRRVPQRLPQGPACLLL

SEQ ID NO: 14360 - protein, 340 aa, Artificial Sequence; identical to SEQ ID NO: 2370
  Synthetic polypeptide

SEQ ID NO: 14361 - protein, 15 aa, Artificial Sequence
  Synthetic polypeptide
SQLLWRLRSRVARGC

SEQ ID NO: 14362 - protein, 34 aa, Artificial Sequence
  Synthetic polypeptide
ARHGGSSCNSSTLGGQGSRLHHQLPQERDAQCLW

SEQ ID NO: 14363 - protein, 34 aa, Artificial Sequence
  Synthetic polypeptide
FQHFGRPRFTPTSSAPSRKRCPMSLVKRAKRKSW

SEQ ID NO: 14364 - protein, 71 aa, Artificial Sequence
  Synthetic polypeptide
PGMVAHPVIPALWEAKVHAYIISSLKKEMPNVFGKESKKKELVNNLGEIYQKIEREHQISPGDFPSLRKMQ

SEQ ID NO: 14365 - protein, 153 aa, Artificial Sequence
  Synthetic polypeptide
PGMVAHPVIPALWEAKVHAYIISSLKKEMPNVFGKESKKKELVNNLGEIYQKIEREHQISPGDFPSLRKMQELLQTQDFSKFQALKPKLLDTVDDMLANDIARLMVMVRQEESLMPSQVVKGGAFDGTMNGPFGHGYGEGAGEGIDDVEWVVG

SEQ ID NO: 14366 - protein, 245 aa, Artificial Sequence
  Synthetic polypeptide
PGMVAHPVIPALWEAKVHAYIISSLKKEMPNVFGKESKKKELVNNLGEIYQKIEREHQISPGDFPSLRKMQELLQTQDFSKFQALKPKLLDTVDDMLANDIARLMVMVRQEESLMPSQVVKGGAFDGTMNGPFGHGYGEGAGEGIDDVEWVVGKDKPTYDEIFYTLSPVNGKITGANAKKEMVKSKLPNTVLGKIWKLADVDKDGLLDDEEFALANHLIKVKLEGHELPADLPPHLVPPSKRRHE

SEQ ID NO: 14367 - protein, 76 aa, Artificial Sequence
  Synthetic polypeptide
GPRFARPAGQLVLLHCLAEHPLPWPAALCPWAPGHWGMGPKGEADRLRVLPSVGKAASSLCPTDNGFMCAQLPNPV

SEQ ID NO: 14368 - protein, 79 aa, Artificial Sequence
  Synthetic polypeptide
GPRFARPAGQLVLLHCLAEHPLPWPAALCPWAPGHWGMGPKGEADRLRVLPSVGKAASSLCPTDNGFMCAQLPNPVLDS

SEQ ID NO: 14369 - protein, 291 aa, Artificial Sequence
  Synthetic polypeptide
GPRFARPAGQLVLLHCLAEHPLPWPAALCPWAPGHWGMGPKGEADRLRVLPSVGKAASSLCPTDNGFMCAQLPNPVLDSISIIDTPGILSGEKQRISRGYDFAAVLEWFAERVDRIILLFDAHKLDISDEFSEVIKALKNHEDKIRVVLNKADQIETQQLMRVYGALMWSLGKIINTPEVVRVYIGSFWSHPLLIPDNRKLFEAEEQDLFKDIQSLPRNAALRKLNDLIKRARLAKVHAYIISSLKKEMPNVFGKESKKKELVNNLGEIYQKIEREHQISPGDFPSLRKMQ

SEQ ID NO: 14370 - protein, 465 aa, Artificial Sequence
  Synthetic polypeptide
GPRFARPAGQLVLLHCLAEHPLPWPAALCPWAPGHWGMGPKGEADRLRVLPSVGKAASSLCPTDNGFMCAQLPNPVLDSISIIDTPGILSGEKQRISRGYDFAAVLEWFAERVDRIILLFDAHKLDISDEFSEVIKALKNHEDKIRVVLNKADQIETQQLMRVYGALMWSLGKIINTPEVVRVYIGSFWSHPLLIPDNRKLFEAEEQDLFKDIQSLPRNAALRKLNDLIKRARLAKVHAYIISSLKKEMPNVFGKESKKKELVNNLGEIYQKIEREHQISPGDFPSLRKMQELLQTQDFSKFQALKPKLLDTVDDMLANDIARLMVMVRQEESLMPSQVVKGGAFDGTMNGPFGHGYGEGAGEGIDDVEWVVGKDKPTYDEIFYTLSPVNGKITGANAKKEMVKSKLPNTVLGKIWKLADVDKDGLLDDEEFALANHLIKVKLEGHELPADLPPHLVPPSKRRHE

SEQ ID NO: 14371 - protein, 77 aa, Artificial Sequence
  Synthetic polypeptide
SEAHVLLALQVSWSCSTALQSTPCPGQLPSARGPLVTGGWGQREKLIGSESSRLLERQLQVCVLQIMGSCVPSCPTP

SEQ ID NO: 14372 - protein, 81 aa, Artificial Sequence
  Synthetic polypeptide
SEAHVLLALQVSWSCSTALQSTPCPGQLPSARGPLVTGGWGQREKLIGSESSRLLERQLQVCVLQIMGSCVPSCPTPSWTA

SEQ ID NO: 14373 - protein, 135 aa, Artificial Sequence
  Synthetic polypeptide
SEAHVLLALQVSWSCSTALQSTPCPGQLPSARGPLVTGGWGQREKLIGSESSRLLERQLQVCVLQIMGSCVPSCPTPSWTASASSTPPGSCLERSSGSAEAMTLQPSWSGSRSVWTASSCSSTPTSWTSPMSSRK

SEQ ID NO: 14374 - protein, 11 aa, Artificial Sequence
  Synthetic polypeptide
WVHVCPAAQPR

SEQ ID NO: 14375 - protein, 14 aa, Artificial Sequence
  Synthetic polypeptide
WVHVCPAAQPRPGQ

SEQ ID NO: 14376 - protein, 35 aa, Artificial Sequence
  Synthetic polypeptide
WVHVCPAAQPRPGQHQHHRHPRDPVWREAADQQRL

SEQ ID NO: 14377 - protein, 30 aa, Artificial Sequence
  Synthetic polypeptide
GHGPSLAQPAHHPACSSHLLGEPSVQDPAG

SEQ ID NO: 14378 - protein, 344 aa, Artificial Sequence
  Synthetic polypeptide
REGMDRAWPSLPITLHVPATFWVNPQFKIRLDETDDPDDYGDRESGCSFVLALMQKHRRRERRFGRDMETIGFAVYEVPPELVGQPAVHLKRDFFLANASRARSEQFINLREVSTRFRLPPGEYVVVPSTFEPNKEGDFVLRFFSEKSAGTVELDDQIQANLPDEQVLSEEEIDENFKALFRQLAGEDMEISVKELRTILNRIISKHKDLRTKGFSLESCRSMVNLMDRDGNGKLGLVEFNILWNRIRNYLSIFRKFDLDKSGSMSAYEMRMAIESAGFKLNKKLYELIITRYSEPDLAVDFDNFVCCLVRLETMFRFFKTLDTDLDGVVTFDLFKWLQLTMFA

SEQ ID NO: 14379 - protein, 22 aa, Artificial Sequence
  Synthetic polypeptide
VRAWTEPGPACPSPCMFQPPSG

SEQ ID NO: 14380 - protein, 8 aa, Artificial Sequence
  Synthetic polypeptide
ASALRRGD

SEQ ID NO: 14381 - protein, 39 aa, Artificial Sequence
  Synthetic polypeptide
HFGRLRRADNLSKCSQKRRLTRTSRPSSGSWQGRTWRSA

SEQ ID NO: 14382 - protein, 181 aa, Artificial Sequence
  Synthetic polypeptide
PEQVLSEEEIDENFKALFRQLAGEDMEISVKELRTILNRIISKHKDLRTKGFSLESCRSMVNLMDRDGNGKLGLVEFNILWNRIRNYLSIFRKFDLDKSGSMSAYEMRMAIESAGFKLNKKLYELIITRYSEPDLAVDFDNFVCCLVRLETMFRFFKTLDTDLDGVVTFDLFKWLQLTMFA

SEQ ID NO: 14383 - protein, 10 aa, Artificial Sequence
  Synthetic polypeptide
EGLCSHRLLC

SEQ ID NO: 14384 - protein, 10 aa, Artificial Sequence
  Synthetic polypeptide
GTMQPSSSLL

SEQ ID NO: 14385 - protein, 23 aa, Artificial Sequence
  Synthetic polypeptide
GTMQPSSSLLTTALRQGRKNCSI

SEQ ID NO: 14386 - protein, 10 aa, Artificial Sequence
  Synthetic polypeptide
RDYAAIVFFA

SEQ ID NO: 14387 - protein, 187 aa, Artificial Sequence
  Synthetic polypeptide
RDYAAIVFFANNRFETGKKKLQYLSFGDFAFCAELMIQNWTLGAVDSQMDDMDMDLDKEFLQDLKELKVLVADKDLLDLHKSLVCTALRGKLGVFSEMEANFKNLSRGLVNVAAKLTHNKDVRDLFVDLVEKFVEPCRSDHWPLSDVRFFLNQYSASVHSLDGFRHQALWDRYMGTLRGCLLRLYHD

SEQ ID NO: 14388 - protein, 181 aa, Artificial Sequence
  Synthetic polypeptide
RDYAAIVFFANNRFETGKKKLQYLSFGDFAFCAELMIQNWTLGAVDSQMDDMDMDLDKEFLQDLKELKVLVADKDLLDLHKSLVCTALRGKLGVFSEMEANFKNLSRGLVNVAAKLTHNKDYSLGPAVCGTLPLRPLATQRRAVLPESVFSVCPLPRWLPTPGPLGPLHGHPPRLPPAPVS

SEQ ID NO: 14389 - protein, 194 aa, Artificial Sequence
  Synthetic polypeptide
RDYAAIVFFANNRFETGKKKLQYLSFGDFAFCAELMIQNWTLGAVGEAPTDPDSQMDDMDMDLDKEFLQDLKELKVLVADKDLLDLHKSLVCTALRGKLGVFSEMEANFKNLSRGLVNVAAKLTHNKDVRDLFVDLVEKFVEPCRSDHWPLSDVRFFLNQYSASVHSLDGFRHQALWDRYMGTLRGCLLRLYHD

SEQ ID NO: 14390 - protein, 26 aa, Artificial Sequence
  Synthetic polypeptide
PLHPSEPQCVICKAMMRTGFPVVPRK

SEQ ID NO: 14391 - protein, 214 aa, Artificial Sequence
  Synthetic polypeptide
SNDENGIPSSPQKVALTLDLDLEKEPESEPDEPQKPGKPSVFTVFQKIWLTALCLVLVFTVTLSVFPAITAMVTSSTSPGKWSQFFNPICCFLLFNIMDWLGRSLTSYFLWPDEDSRLLPLLVCLRFLFVPLFMLCHVPQRSRLPILFPQDAYFITFMLLFAVSNGYLVSLTMCLAPRQVLPHEREVAGALMTFFLALGLSCGASLSFLFKALL

SEQ ID NO: 14392 - protein, 59 aa, Artificial Sequence
  Synthetic polypeptide
SNDENGIPSSPQKVALTLDLDLEKEPESEPDEPQKPGKPSVFTVFQKSPCPSSPPSQPW

SEQ ID NO: 14393 - protein, 28 aa, Artificial Sequence
  Synthetic polypeptide
AWKPDCRGSNYGFASYSCVPLELHPHGV

SEQ ID NO: 14394 - protein, 96 aa, Artificial Sequence
  Synthetic polypeptide
ELGSQTAEVQIMALPLIAVCPWSYTPTVFERYMVNLQVKGKPVHLHIWDTAGQDDYDRLRPLFYPDASVLLLCFDVTSPNSFDNIFNRFLPRCWLC

SEQ ID NO: 14395 - protein, 188 aa, Artificial Sequence
  Synthetic polypeptide
ELGSQTAEVQIMALPLIAVCPWSYTPTVFERYMVNLQVKGKPVHLHIWDTAGQDDYDRLRPLFYPDASVLLLCFDVTSPNSFDNIFNRWYPEVNHFCKKVPIIVVGCKTDLCKDKSLVNKLRRNGLEPVTYHRGQEMARSVGAVAYLECSARLHDNVHAVFQEAAEVALSSRGRNFWRRITQGFCVVT

SEQ ID NO: 14396 - protein, 20 aa, Artificial Sequence
  Synthetic polypeptide
LCALGATPPRCLSGTWSTCK

SEQ ID NO: 14397 - protein, 20 aa, Artificial Sequence
  Synthetic polypeptide
FGRPRATPPRCLSGTWSTCK

SEQ ID NO: 14398 - protein, 79 aa, Artificial Sequence
  Synthetic polypeptide
LWEAKSYTPTVFERYMVNLQVKGKPVHLHIWDTAGQDDYDRLRPLFYPDASVLLLCFDVTSPNSFDNIFNRFLPRCWLC

SEQ ID NO: 14399 - protein, 171 aa, Artificial Sequence
  Synthetic polypeptide
LWEAKSYTPTVFERYMVNLQVKGKPVHLHIWDTAGQDDYDRLRPLFYPDASVLLLCFDVTSPNSFDNIFNRWYPEVNHFCKKVPIIVVGCKTDLCKDKSLVNKLRRNGLEPVTYHRGQEMARSVGAVAYLECSARLHDNVHAVFQEAAEVALSSRGRNFWRRITQGFCVVT

SEQ ID NO: 14400 - protein, 12 aa, Artificial Sequence
  Synthetic polypeptide
TLGGQELHPHGV

SEQ ID NO: 14401 - protein, 7 aa, Artificial Sequence
  Synthetic polypeptide
ELHPHGV

SEQ ID NO: 14402 - protein, 23 aa, Artificial Sequence
  Synthetic polypeptide
SQLLRRLRATPPRCLSGTWSTCK

SEQ ID NO: 14403 - protein, 114 aa, Artificial Sequence
  Synthetic polypeptide
VQEFETSLGNMAKPCLYEKRRKISQAWWPTPVIPATQEAESYTPTVFERYMVNLQVKGKPVHLHIWDTAGQDDYDRLRPLFYPDASVLLLCFDVTSPNSFDNIFNRFLPRCWLC

SEQ ID NO: 14404 - protein, 206 aa, Artificial Sequence
  Synthetic polypeptide
VQEFETSLGNMAKPCLYEKRRKISQAWWPTPVIPATQEAESYTPTVFERYMVNLQVKGKPVHLHIWDTAGQDDYDRLRPLFYPDASVLLLCFDVTSPNSFDNIFNRWYPEVNHFCKKVPIIVVGCKTDLCKDKSLVNKLRRNGLEPVTYHRGQEMARSVGAVAYLECSARLHDNVHAVFQEAAEVALSSRGRNFWRRITQGFCVVT

SEQ ID NO: 14405 - protein, 138 aa, Artificial Sequence
  Synthetic polypeptide
DYALGKDCIMHGYMSKMGNPFLTQWQRRYFYLFPNRLEWRGEGEAPQSLLTMEEIQSVEETQIKERKCLLLKIRGGKQFILQCDSDPELVQWKKELRDAYREAQQLVQRVPKMKNKPRSPVVELSKVPLVQRGSANGL

SEQ ID NO: 14406 - protein, 44 aa, Artificial Sequence
  Synthetic polypeptide
GRAWWLTPVIPALWEAKERRSLETTPWARTASCMATCPRWATPS

SEQ ID NO: 14407 - protein, 97 aa, Artificial Sequence
  Synthetic polypeptide
SQHFGRPRSADHLRLRPGQGLHHAWLHVQDGQPLPDPVAAAVLLPVPQPPRVAGRGRGPAEPADHGGDPVGGGDADQGAQVPAPQDPRWETVHFAVR

SEQ ID NO: 14408 - protein, 340 aa, Artificial Sequence
  Synthetic polypeptide
GCWLRPVIPALWEAKAGRSPESRNSRPHWATWYMYWTDWGETPRIERAGMDGSTRKIIVDSDIYWPNGLTIDLEEQKLYWADAKLSFIHRANLDGSFRQKVVEGSLTHPFALTLSGDTLYWTDWQTRSIHACNKRTGGKRKEILSALYSPMDIQVLSQERQPFFHTRCEEDNGGCSHLCLLSPSEPFYTCACPTGVQLQDNGRTCKAGAEEVLLLARRTDLRRISLDTPDFTDIVLQVDDIRHAIAIDYDPLEGYVYWTDDEVRAIRRAYLDGSGAQTLVNTEINDPDGIAVDWVARNLYWTDTGTDRIEVTRLNGTSRKILVSEDLDEPRAIALHPVMG

SEQ ID NO: 14409 - protein, 1484 aa, Artificial Sequence
  Synthetic polypeptide
GCWLRPVIPALWEAKAGRSPESRNSRPHWATWYMYWTDWGETPRIERAGMDGSTRKIIVDSDIYWPNGLTIDLEEQKLYWADAKLSFIHRANLDGSFRQKVVEGSLTHPFALTLSGDTLYWTDWQTRSIHACNKRTGGKRKEILSALYSPMDIQVLSQERQPFFHTRCEEDNGGCSHLCLLSPSEPFYTCACPTGVQLQDNGRTCKAGAEEVLLLARRTDLRRISLDTPDFTDIVLQVDDIRHAIAIDYDPLEGYVYWTDDEVRAIRRAYLDGSGAQTLVNTEINDPDGIAVDWVARNLYWTDTGTDRIEVTRLNGTSRKILVSEDLDEPRAIALHPVMGLMYWTDWGENPKIECANLDGQERRVLVNASLGWPNGLALDLQEGKLYWGDAKTDKIEVINVDGTKRRTLLEDKLPHIFGFTLLGDFIYWTDWQRRSIERVHKVKASRDVIIDQLPDLMGLKAVNVAKVVGTNPCADRNGGCSHLCFFTPHATRCGCPIGLELLSDMKTCIVPEAFLVFTSRAAIHRISLETNNNDVAIPLTGVKEASALDFDVSNNHIYWTDVSLKTISRAFMNGSSVEHVVEFGLDYPEGMAVDWMGKNLYWADTGTNRIEVARLDGQFRQVLVWRDLDNPRSLALDPTKGYIYWTEWGGKPRIVRAFMDGTNCMTLVDKVGRANDLTIDYADQRLYWTDLDTNMIESSNMLGQERVVIADDLPHPFGLTQYSDYIYWTDWNLHSIERADKTSGRNRTLIQGHLDFVMDILVFHSSRQDGLNDCMHNNGQCGQLCLAIPGGHRCGCASHYTLDPSSRNCSPPTTFLLFSQKSAISRMIPDDQHSPDLILPLHGLRNVKAIDYDPLDKFIYWVDGRQNIKRAKDDGTQPFVLTSLSQGQNPDRQPHDLSIDIYSRTLFWTCEATNTINVHRLSGEAMGVVLRGDRDKPRAIVVNAERGYLYFTNMQDRAAKIERAALDGTEREVLFTTGLIRPVALVVDNTLGKLFWVDADLKRIESCDLSGANRLTLEDANIVQPLGLTILGKHLYWIDRQQQMIERVEKTTGDKRTRIQGRVAHLTGIHAVEEVSLEEFSAHPCARDNGGCSHICIAKGDGTPRCSCPVHLVLLQNLLTCGEPPTCSPDQFACATGEIDCIPGAWRCDGFPECDDQSDEEGCPVCSAAQFPCARGQCVDLRLRCDGEADCQDRSDEADCDAICLPNQFRCASGQCVLIKQQCDSFPDCIDGSDELMCEITKPPSDDSPAHSSAIGPVIGIILSLFVMGGVYFVCQRVVCQRYAGANGPFPHEYVSGTPHVPLNFIAPGGSQHGPFTGIACGKSMMSSVSLMGGRGGVPLYDRNHVTGASSSSSSSTKATLYPPILNPPPSPATDPSLYNMDMFYSSNIPATARPYRPYIIRGMAPPTTPCSTDVCDSDYSASRWKASKYYLDLNSDSDPYPPPPTPHSQYLSAEDSCPPSPATERSYFHLFPPPPSPCTDSS

SEQ ID NO: 14410 - protein, 61 aa, Artificial Sequence
  Synthetic polypeptide
SQHSGRPRRADHLSPGIQDHTGQHGTCTGQTGVRRPGLSGQGWMAAPGRSLWTRTFTGPMD

SEQ ID NO: 14411 - protein, 19 aa, Artificial Sequence
  Synthetic polypeptide
VQEFKTTLGNMVHVLDRLG

SEQ ID NO: 14412 - protein, 47 aa, Artificial Sequence
  Synthetic polypeptide
AQEEPRRCCCWPGGRTYGGSRWTRRTSPTSCCRWTTSGTPLPSTTTR

SEQ ID NO: 14413 - protein, 73 aa, Artificial Sequence
  Synthetic polypeptide
FKSVVPATREAELGGLLEPRRSRGGAAAGPADGPTEDLAGHAGLHRHRAAGGRHPARHCHRLRPARGLCLLDR

SEQ ID NO: 14414 - protein, 157 aa, Artificial Sequence
  Synthetic polypeptide
GCGDSSLWSQLLGKLSWEDCLSPGGAEEVLLLARRTDLRRISLDTPDFTDIVLQVDDIRHAIAIDYDPLEGYVYWTDDEVRAIRRAYLDGSGAQTLVNTEINDPDGIAVDWVARNLYWTDTGTDRIEVTRLNGTSRKILVSEDLDEPRAIALHPVMG

SEQ ID NO: 14415 - protein, 1301 aa, Artificial Sequence
  Synthetic polypeptide
GCGDSSLWSQLLGKLSWEDCLSPGGAEEVLLLARRTDLRRISLDTPDFTDIVLQVDDIRHAIAIDYDPLEGYVYWTDDEVRAIRRAYLDGSGAQTLVNTEINDPDGIAVDWVARNLYWTDTGTDRIEVTRLNGTSRKILVSEDLDEPRAIALHPVMGLMYWTDWGENPKIECANLDGQERRVLVNASLGWPNGLALDLQEGKLYWGDAKTDKIEVINVDGTKRRTLLEDKLPHIFGFTLLGDFIYWTDWQRRSIERVHKVKASRDVIIDQLPDLMGLKAVNVAKVVGTNPCADRNGGCSHLCFFTPHATRCGCPIGLELLSDMKTCIVPEAFLVFTSRAAIHRISLETNNNDVAIPLTGVKEASALDFDVSNNHIYWTDVSLKTISRAFMNGSSVEHVVEFGLDYPEGMAVDWMGKNLYWADTGTNRIEVARLDGQFRQVLVWRDLDNPRSLALDPTKGYIYWTEWGGKPRIVRAFMDGTNCMTLVDKVGRANDLTIDYADQRLYWTDLDTNMIESSNMLGQERVVIADDLPHPFGLTQYSDYIYWTDWNLHSIERADKTSGRNRTLIQGHLDFVMDILVFHSSRQDGLNDCMHNNGQCGQLCLAIPGGHRCGCASHYTLDPSSRNCSPPTTFLLFSQKSAISRMIPDDQHSPDLILPLHGLRNVKAIDYDPLDKFIYWVDGRQNIKRAKDDGTQPFVLTSLSQGQNPDRQPHDLSIDIYSRTLFWTCEATNTINVHRLSGEAMGVVLRGDRDKPRAIVVNAERGYLYFTNMQDRAAKIERAALDGTEREVLFTTGLIRPVALVVDNTLGKLFWVDADLKRIESCDLSGANRLTLEDANIVQPLGLTILGKHLYWIDRQQQMIERVEKTTGDKRTRIQGRVAHLTGIHAVEEVSLEEFSAHPCARDNGGCSHICIAKGDGTPRCSCPVHLVLLQNLLTCGEPPTCSPDQFACATGEIDCIPGAWRCDGFPECDDQSDEEGCPVCSAAQFPCARGQCVDLRLRCDGEADCQDRSDEADCDAICLPNQFRCASGQCVLIKQQCDSFPDCIDGSDELMCEITKPPSDDSPAHSSAIGPVIGIILSLFVMGGVYFVCQRVVCQRYAGANGPFPHEYVSGTPHVPLNFIAPGGSQHGPFTGIACGKSMMSSVSLMGGRGGVPLYDRNHVTGASSSSSSSTKATLYPPILNPPPSPATDPSLYNMDMFYSSNIPATARPYRPYIIRGMAPPTTPCSTDVCDSDYSASRWKASKYYLDLNSDSDPYPPPPTPHSQYLSAEDSCPPSPATERSYFHLFPPPPSPCTDSS

SEQ ID NO: 14416 - protein, 66 aa, Artificial Sequence
  Synthetic polypeptide
DRLHGLCDLCSHMRSRGGAAAGPADGPTEDLAGHAGLHRHRAAGGRHPARHCHRLRPARGLCLLDR

SEQ ID NO: 14417 - protein, 133 aa, Artificial Sequence
  Synthetic polypeptide
GAEEVLLLARRTDLRRISLDTPDFTDIVLQVDDIRHAIAIDYDPLEGYVYWTDDEVRAIRRAYLDGSGAQTLVNTEINDPDGIAVDWVARNLYWTDTGTDRIEVTRLNGTSRKILVSEDLDEPRAIALHPVMG

SEQ ID NO: 14418 - protein, 1277 aa, Artificial Sequence
  Synthetic polypeptide
GAEEVLLLARRTDLRRISLDTPDFTDIVLQVDDIRHAIAIDYDPLEGYVYWTDDEVRAIRRAYLDGSGAQTLVNTEINDPDGIAVDWVARNLYWTDTGTDRIEVTRLNGTSRKILVSEDLDEPRAIALHPVMGLMYWTDWGENPKIECANLDGQERRVLVNASLGWPNGLALDLQEGKLYWGDAKTDKIEVINVDGTKRRTLLEDKLPHIFGFTLLGDFIYWTDWQRRSIERVHKVKASRDVIIDQLPDLMGLKAVNVAKVVGTNPCADRNGGCSHLCFFTPHATRCGCPIGLELLSDMKTCIVPEAFLVFTSRAAIHRISLETNNNDVAIPLTGVKEASALDFDVSNNHIYWTDVSLKTISRAFMNGSSVEHVVEFGLDYPEGMAVDWMGKNLYWADTGTNRIEVARLDGQFRQVLVWRDLDNPRSLALDPTKGYIYWTEWGGKPRIVRAFMDGTNCMTLVDKVGRANDLTIDYADQRLYWTDLDTNMIESSNMLGQERVVIADDLPHPFGLTQYSDYIYWTDWNLHSIERADKTSGRNRTLIQGHLDFVMDILVFHSSRQDGLNDCMHNNGQCGQLCLAIPGGHRCGCASHYTLDPSSRNCSPPTTFLLFSQKSAISRMIPDDQHSPDLILPLHGLRNVKAIDYDPLDKFIYWVDGRQNIKRAKDDGTQPFVLTSLSQGQNPDRQPHDLSIDIYSRTLFWTCEATNTINVHRLSGEAMGVVLRGDRDKPRAIVVNAERGYLYFTNMQDRAAKIERAALDGTEREVLFTTGLIRPVALVVDNTLGKLFWVDADLKRIESCDLSGANRLTLEDANIVQPLGLTILGKHLYWIDRQQQMIERVEKTTGDKRTRIQGRVAHLTGIHAVEEVSLEEFSAHPCARDNGGCSHICIAKGDGTPRCSCPVHLVLLQNLLTCGEPPTCSPDQFACATGEIDCIPGAWRCDGFPECDDQSDEEGCPVCSAAQFPCARGQCVDLRLRCDGEADCQDRSDEADCDAICLPNQFRCASGQCVLIKQQCDSFPDCIDGSDELMCEITKPPSDDSPAHSSAIGPVIGIILSLFVMGGVYFVCQRVVCQRYAGANGPFPHEYVSGTPHVPLNFIAPGGSQHGPFTGIACGKSMMSSVSLMGGRGGVPLYDRNHVTGASSSSSSSTKATLYPPILNPPPSPATDPSLYNMDMFYSSNIPATARPYRPYIIRGMAPPTTPCSTDVCDSDYSASRWKASKYYLDLNSDSDPYPPPPTPHSQYLSAEDSCPPSPATERSYFHLFPPPPSPCTDSS

SEQ ID NO: 14419 - protein, 47 aa, Artificial Sequence
  Synthetic polypeptide
SYEEPRRCCCWPGGRTYGGSRWTRRTSPTSCCRWTTSGTPLPSTTTR

SEQ ID NO: 14420 - protein, 55 aa, Artificial Sequence
  Synthetic polypeptide
ARRSRGGAAAGPADGPTEDLAGHAGLHRHRAAGGRHPARHCHRLRPARGLCLLDR

SEQ ID NO: 14421 - protein, 47 aa, Artificial Sequence
  Synthetic polypeptide
GEEEPRRCCCWPGGRTYGGSRWTRRTSPTSCCRWTTSGTPLPSTTTR

SEQ ID NO: 14422 - protein, 135 aa, Artificial Sequence
  Synthetic polypeptide
RGGAEEVLLLARRTDLRRISLDTPDFTDIVLQVDDIRHAIAIDYDPLEGYVYWTDDEVRAIRRAYLDGSGAQTLVNTEINDPDGIAVDWVARNLYWTDTGTDRIEVTRLNGTSRKILVSEDLDEPRAIALHPVMG

SEQ ID NO: 14423 - protein, 1279 aa, Artificial Sequence
  Synthetic polypeptide
RGGAEEVLLLARRTDLRRISLDTPDFTDIVLQVDDIRHAIAIDYDPLEGYVYWTDDEVRAIRRAYLDGSGAQTLVNTEINDPDGIAVDWVARNLYWTDTGTDRIEVTRLNGTSRKILVSEDLDEPRAIALHPVMGLMYWTDWGENPKIECANLDGQERRVLVNASLGWPNGLALDLQEGKLYWGDAKTDKIEVINVDGTKRRTLLEDKLPHIFGFTLLGDFIYWTDWQRRSIERVHKVKASRDVIIDQLPDLMGLKAVNVAKVVGTNPCADRNGGCSHLCFFTPHATRCGCPIGLELLSDMKTCIVPEAFLVFTSRAAIHRISLETNNNDVAIPLTGVKEASALDFDVSNNHIYWTDVSLKTISRAFMNGSSVEHVVEFGLDYPEGMAVDWMGKNLYWADTGTNRIEVARLDGQFRQVLVWRDLDNPRSLALDPTKGYIYWTEWGGKPRIVRAFMDGTNCMTLVDKVGRANDLTIDYADQRLYWTDLDTNMIESSNMLGQERVVIADDLPHPFGLTQYSDYIYWTDWNLHSIERADKTSGRNRTLIQGHLDFVMDILVFHSSRQDGLNDCMHNNGQCGQLCLAIPGGHRCGCASHYTLDPSSRNCSPPTTFLLFSQKSAISRMIPDDQHSPDLILPLHGLRNVKAIDYDPLDKFIYWVDGRQNIKRAKDDGTQPFVLTSLSQGQNPDRQPHDLSIDIYSRTLFWTCEATNTINVHRLSGEAMGVVLRGDRDKPRAIVVNAERGYLYFTNMQDRAAKIERAALDGTEREVLFTTGLIRPVALVVDNTLGKLFWVDADLKRIESCDLSGANRLTLEDANIVQPLGLTILGKHLYWIDRQQQMIERVEKTTGDKRTRIQGRVAHLTGIHAVEEVSLEEFSAHPCARDNGGCSHICIAKGDGTPRCSCPVHLVLLQNLLTCGEPPTCSPDQFACATGEIDCIPGAWRCDGFPECDDQSDEEGCPVCSAAQFPCARGQCVDLRLRCDGEADCQDRSDEADCDAICLPNQFRCASGQCVLIKQQCDSFPDCIDGSDELMCEITKPPSDDSPAHSSAIGPVIGIILSLFVMGGVYFVCQRVVCQRYAGANGPFPHEYVSGTPHVPLNFIAPGGSQHGPFTGIACGKSMMSSVSLMGGRGGVPLYDRNHVTGASSSSSSSTKATLYPPILNPPPSPATDPSLYNMDMFYSSNIPATARPYRPYIIRGMAPPTTPCSTDVCDSDYSASRWKASKYYLDLNSDSDPYPPPPTPHSQYLSAEDSCPPSPATERSYFHLFPPPPSPCTDSS

SEQ ID NO: 14424 - protein, 46 aa, Artificial Sequence
  Synthetic polypeptide
EQEPRRCCCWPGGRTYGGSRWTRRTSPTSCCRWTTSGTPLPSTTTR

SEQ ID NO: 14425 - protein, 146 aa, Artificial Sequence
  Synthetic polypeptide
GAYIHGAGVLMRAGAEEVLLLARRTDLRRISLDTPDFTDIVLQVDDIRHAIAIDYDPLEGYVYWTDDEVRAIRRAYLDGSGAQTLVNTEINDPDGIAVDWVARNLYWTDTGTDRIEVTRLNGTSRKILVSEDLDEPRAIALHPVMG

SEQ ID NO: 14426 - protein, 1290 aa, Artificial Sequence
  Synthetic polypeptide
GAYIHGAGVLMRAGAEEVLLLARRTDLRRISLDTPDFTDIVLQVDDIRHAIAIDYDPLEGYVYWTDDEVRAIRRAYLDGSGAQTLVNTEINDPDGIAVDWVARNLYWTDTGTDRIEVTRLNGTSRKILVSEDLDEPRAIALHPVMGLMYWTDWGENPKIECANLDGQERRVLVNASLGWPNGLALDLQEGKLYWGDAKTDKIEVINVDGTKRRTLLEDKLPHIFGFTLLGDFIYWTDWQRRSIERVHKVKASRDVIIDQLPDLMGLKAVNVAKVVGTNPCADRNGGCSHLCFFTPHATRCGCPIGLELLSDMKTCIVPEAFLVFTSRAAIHRISLETNNNDVAIPLTGVKEASALDFDVSNNHIYWTDVSLKTISRAFMNGSSVEHVVEFGLDYPEGMAVDWMGKNLYWADTGTNRIEVARLDGQFRQVLVWRDLDNPRSLALDPTKGYIYWTEWGGKPRIVRAFMDGTNCMTLVDKVGRANDLTIDYADQRLYWTDLDTNMIESSNMLGQERVVIADDLPHPFGLTQYSDYIYWTDWNLHSIERADKTSGRNRTLIQGHLDFVMDILVFHSSRQDGLNDCMHNNGQCGQLCLAIPGGHRCGCASHYTLDPSSRNCSPPTTFLLFSQKSAISRMIPDDQHSPDLILPLHGLRNVKAIDYDPLDKFIYWVDGRQNIKRAKDDGTQPFVLTSLSQGQNPDRQPHDLSIDIYSRTLFWTCEATNTINVHRLSGEAMGVVLRGDRDKPRAIVVNAERGYLYFTNMQDRAAKIERAALDGTEREVLFTTGLIRPVALVVDNTLGKLFWVDADLKRIESCDLSGANRLTLEDANIVQPLGLTILGKHLYWIDRQQQMIERVEKTTGDKRTRIQGRVAHLTGIHAVEEVSLEEFSAHPCARDNGGCSHICIAKGDGTPRCSCPVHLVLLQNLLTCGEPPTCSPDQFACATGEIDCIPGAWRCDGFPECDDQSDEEGCPVCSAAQFPCARGQCVDLRLRCDGEADCQDRSDEADCDAICLPNQFRCASGQCVLIKQQCDSFPDCIDGSDELMCEITKPPSDDSPAHSSAIGPVIGIILSLFVMGGVYFVCQRVVCQRYAGANGPFPHEYVSGTPHVPLNFIAPGGSQHGPFTGIACGKSMMSSVSLMGGRGGVPLYDRNHVTGASSSSSSSTKATLYPPILNPPPSPATDPSLYNMDMFYSSNIPATARPYRPYIIRGMAPPTTPCSTDVCDSDYSASRWKASKYYLDLNSDSDPYPPPPTPHSQYLSAEDSCPPSPATERSYFHLFPPPPSPCTDSS

SEQ ID NO: 14427 - protein, 71 aa, Artificial Sequence
  Synthetic polypeptide
GHPRVGGLYPRCWCPHESRSRGGAAAGPADGPTEDLAGHAGLHRHRAAGGRHPARHCHRLRPARGLCLLDR

SEQ ID NO: 14428 - protein, 57 aa, Artificial Sequence
  Synthetic polypeptide
GWARCLTPVIPALWEAEAGGSQVSCRPRISVETFQALLAGGLGPWLRRQVWCPDGQS

SEQ ID NO: 14429 - protein, 61 aa, Artificial Sequence
  Synthetic polypeptide
MGAVSHACNPSTLGGRGGWITSQLSATNISRNFPSTARRWTRSVASEASLVSRWTELISLL

SEQ ID NO: 14430 - protein, 466 aa, Artificial Sequence
  Synthetic polypeptide
SQHFGRPRRVDHKSAVGHEYQSKLSKHCSQVDSVRGFGGKFGVQMDRVDQSAVGFEYQGKTEKHASQKDYSSGFGGKYGVQADRVDKSAVGFDYQGKTEKHESQRDYSKGFGGKYGIDKDKVDKSAVGFEYQGKTEKHESQKDYVKGFGGKFGVQTDRQDKCALGWDHQEKLQLHESQKDYKTGFGGKFGVQSERQDSAAVGFDYKEKLAKHESQQDYSKGFGGKYGVQKDRMDKNASTFEDVTQVSSAYQKTVPVEAVTSKTSNIRANFENLAKEKEQEDRRKAEAERAQRMAKERQEQEEARRKLEEQARAKTQTPPVSPAPQPTEERLPSSPVYEDAASFKAELSYRGPVSGTEPEPVYSMEAADYREASSQQGLAYATEAVYESAEAPGHYPAEDSTYDEYENDLGITAVALYDYQAAGDDEISFDPDDIITNIEMIDDGWWRGVCKGRYGLFPANYVELRQ

SEQ ID NO: 14431 - protein, 550 aa, Artificial Sequence
  Synthetic polypeptide
SQHFGRPRRVDHKSAVGHEYQSKLSKHCSQVDSVRGFGGKFGVQMDRVDQSAVGFEYQGKTEKHASQKDYSSGFGGKYGVQADRVDKSAVGFDYQGKTEKHESQRDYSKGFGGKYGIDKDKVDKSAVGFEYQGKTEKHESQKDYVKGFGGKFGVQTDRQDKCALGWDHQEKLQLHESQKDYSKGFGGKYGVQKDRMDKNASTFEDVTQVSSAYQKTVPVEAVTSKTSNIRANFENLAKEKEQEDRRKAEAERAQRMAKERQEQEEARRKLEEQARAKTQTPPVSPAPQPTEERLPSSPVYEDAASFKAELSYRGPVSGTEPEPVYSMEAADYREASSQQGLAYATEAVYESAEAPGHYPAEDSTYDEYENDLGITAVALYDYQAAGDDEISFDPDDIITNIEMIDDGWWRGVCKGRFRELAFSCVRVALVPIKCSRDLPGQARGLRSALWRVGRKDCPRRGASSRVSLLGRRGLGLMEVNPELSHPEHRSCHVRWEICLCHTVTARRIRKLISFLRSREAGPVPSCSQVGGVSFQKVTWKCLGTWVPECP

SEQ ID NO: 14432 - protein, 429 aa, Artificial Sequence
  Synthetic polypeptide
SQHFGRPRRVDHKSAVGHEYQSKLSKHCSQVDSVRGFGGKFGVQMDRVDQSAVGFEYQGKTEKHASQKDYSSGFGGKYGVQADRVDKSAVGFDYQGKTEKHESQRDYSKGFGGKYGIDKDKVDKSAVGFEYQGKTEKHESQKDYVKGFGGKFGVQTDRQDKCALGWDHQEKLQLHESQKDYSKGFGGKYGVQKDRMDKNASTFEDVTQVSSAYQKTVPVEAVTSKTSNIRANFENLAKEKEQEDRRKAEAERAQRMAKERQEQEEARRKLEEQARAKTQTPPVSPAPQPTEERLPSSPVYEDAASFKAELSYRGPVSGTEPEPVYSMEAADYREASSQQGLAYATEAVYESAEAPGHYPAEDSTYDEYENDLGITAVALYDYQAAGDDEISFDPDDIITNIEMIDDGWWRGVCKGRYGLFPANYVELRQ

SEQ ID NO: 14433 - protein, 157 aa, Artificial Sequence
  Synthetic polypeptide
SQHFGRPRRVDHKSAVGHEYQSKLSKHCSQVDSVRGFGGKFGVQMDRVDQSAVGFEYQGKTEKHASQKDYSSGFGGKYGVQADRVDKSAVGFDYQGKTEKHESQRDYSKGFGGKYGIDKDKVDKSAVGFEYQGKTEKHESQKGVFRFILPSSQQLVM

SEQ ID NO: 14434 - protein, 320 aa, Artificial Sequence
  Synthetic polypeptide
ENKCLEEKNEILQGKLSQLEEHLSQLQDNPPQEKGEVLGDVLQLETLKQEAATLAANNTQLQARVEMLETERGQQEAKLLAERGHFEEEKQQLSSLITDLQSSISNLSQAKEELEQASQAHGARLTAQVASLTSELTTLNATIQQQDQELAGLKQQAKEKQAQLAQTLQQQEQASQGLRHQVEQLSSSLKQKEQQLKEVAEKQEATRQDHAQQLATAAEEREASLRERDAALKQLEALEKEKAAKLEILQQQLQVANEARDSAQTSVTQAQREKAELSRKVEELQACVETARQEQHEAQAQVAELELQLRSEQQKATEKE

SEQ ID NO: 14435 - protein, 480 aa, Artificial Sequence
  Synthetic polypeptide
ENKCLEEKNEILQGKLSQLEEHLSQLQDNPPQEKGEVLGDVLQLETLKQEAATLAANNTQLQARVEMLETERGQQEAKLLAERGHFEEEKQQLSSLITDLQSSISNLSQAKEELEQASQAHGARLTAQVASLTSELTTLNATIQQQDQELAGLKQQAKEKQAQLAQTLQQQEQASQGLRHQVEQLSSSLKQKEQQLKEVAEKQEATRQDHAQQLATAAEEREASLRERDAALKQLEALEKEKAAKLEILQQQLQVANEARDSAQTSVTQAQREKAELSRKVEELQACVETARQEQHEAQAQVAELELQLRSEQQKATEKERVAQEKDQLQEQLQALKESLKVTKGSLEEEKRRAADALEEQQRCISELKAETRSLVEQHKRERKELEEERAGRKGLEARLQQLGEAHQAETEVLRRELAEAMAAQHTAESECEQLVKEVAAWRERYEDSQQEEAQYGAMFQEQLMTLKEECEKARQELQE

SEQ ID NO: 14436 - protein, 1730 aa, Artificial Sequence
  Synthetic polypeptide
ENKCLEEKNEILQGKLSQLEEHLSQLQDNPPQEKGEVLGDVLQLETLKQEAATLAANNTQLQARVEMLETERGQQEAKLLAERGHFEEEKQQLSSLITDLQSSISNLSQAKEELEQASQAHGARLTAQVASLTSELTTLNATIQQQDQELAGLKQQAKEKQAQLAQTLQQQEQASQGLRHQVEQLSSSLKQKEQQLKEVAEKQEATRQDHAQQLATAAEEREASLRERDAALKQLEALEKEKAAKLEILQQQLQVANEARDSAQTSVTQAQREKAELSRKVEELQACVETARQEQHEAQAQVAELELQLRSEQQKATEKERVAQEKDQLQEQLQALKESLKVTKGSLEEEKRRAADALEEQQRCISELKAETRSLVEQHKRERKELEEERAGRKGLEARLQQLGEAHQAETEVLRRELAEAMAAQHTAESECEQLVKEVAAWRERYEDSQQEEAQYGAMFQEQLMTLKEECEKARQELQEAKEKVAGIESHSELQISRQQNELAELHANLARALQQVQEKEVRAQKLADDLSTLQEKMAATSKEVARLETLVRKAGEQQETASRELVKEPARAGDRQPEWLEEQQGRQFCSTQAALQAMEREAEQMGNELERLRAALMESQGQQQEERGQQEREVARLTQERGRAQADLALEKAARAELEMRLQNALNEQRVEFATLQEALAHALTEKEGKDQELAKLRGLEAAQIKELEELRQTVKQLKEQLAKKEKEHASGSGAQSEAAGRTEPTGPKLEALRAEVSKLEQQCQKQQEQADSLERSLEAERASRAERDSALETLQGQLEEKAQELGHSQSALASAQRELAAFRTKVQDHSKAEDEWKAQVARGRQEAERKNSLISSLEEEVSILNRQVLEKEGESKELKRLVMAESEKSQKLEERLRLLQAETASNSARAAERSSALREEVQSLREEAEKQRVASENLRQELTSQAERAEELGQELKAWQEKFFQKEQALSTLQLEHTSTQALVSELLPAKHLCQQLQAEQAAAEKRHREELEQSKQAAGGLRAELLRAQRELGELIPLRQKVAEQERTAQQLRAEKASYAEQLSMLKKAHGLLAEENRGLGERANLGRQFLEVELDQAREKYVQELAAVRADAETRLAEVQREAQSTARELEVMTAKYEGAKVKVLEERQRFQEERQKLTAQVEELSKKLADSDQASKVQQQKLKAVQAQGGESQQEAQRLQAQLNELQAQLSQKEQAAEHYKLQMEKAKTHYDAKKQQNQELQEQLRSLEQLQKENKELRAEAERLGHELQQAGLKTKEAEQTCRHLTAQVRSLEAQVAHADQQLRDLGKFQVATDALKSREPQAKPQLDLSIDSLDLSCEEGTPLSITSKLPRTQPDGTSVPGEPASPISQRLPPKVESLESLYFTPIPARSQAPLESSLDSLGDVFLDSGRKTRSARRRTTQIINITMTKKLDVEEPDSANSSFYSTRSAPASQASLRATSSTQSLARLGSPDYGNSALLSLPGYRPTTRSSARRSQAGVSSGAPPGRNSFYMGTCQDEPEQLDDWNRIAELQQRNRVCPPHLKTCYPLESRPSLSLGTITDEEMKTGDPQETLRRASMQPIQIAEGTGITTRQQRKRVSLEPHQGPGTPESKKATSCFPRPMTPRDRHEGRKQSTTEAQKKAAPASTKQADRRQSMAFSILNTPKKLGNSLLRRGASKKALSKASPNTRSGTRRSPRIATTTASAATAAAIGATPRAKGKAKH

SEQ ID NO: 14437 - protein, 1744 aa, Artificial Sequence
  Synthetic polypeptide
ENKCLEEKNEILQGKLSQLEEHLSQLQDNPPQEKGEVLGDVLQLETLKQEAATLAANNTQLQARVEMLETERGQQEAKLLAERGHFEEEKQQLSSLITDLQSSISNLSQAKEELEQASQAHGARLTAQVASLTSELTTLNATIQQQDQELAGLKQQAKEKQAQLAQTLQQQEQASQGLRHQVEQLSSSLKQKEQQLKEVAEKQEATRQDHAQQLATAAEEREASLRERDAALKQLEALEKEKAAKLEILQQQLQVANEARDSAQTSVTQAQREKAELSRKVEELQACVETARQEQHEAQAQVAELELQLRSEQQKATEKERVAQEKDQLQEQLQALKESLKVTKGSLEEEKRRAADALEEQQRCISELKAETRSLVEQHKRERKELEEERAGRKGLEARLQQLGEAHQAETEVLRRELAEAMAAQHTAESECEQLVKEVAAWRERYEDSQQEEAQYGAMFQEQLMTLKEECEKARQELQEAKEKVAGIESHSELQISRQQNELAELHANLARALQQVQEKEVRAQKLADDLSTLQEKMAATSKEVARLETLVRKAGEQQETASRELVKEPARAGDRQPEWLEEQQGRQFCSTQAALQAMEREAEQMGNELERLRAALMESQGQQQEERGQQEREVARLTQERGRAQADLALEKAARAELEMRLQNALNEQRVEFATLQEALAHALTEKEGKDQELAKLRGLEAAQIKELEELRQTVKQLKEQLAKKEKEHASGSGAQSEAAGRTEPTGPKLEALRAEVSKLEQQCQKQQEQADSLERSLEAERASRAERDSALETLQGQLEEKAQELGHSQSALASAQRELAAFRTKVQDHSKAEDEWKAQVARGRQEAERKNSLISSLEEEVSILNRQVLEKEGESKELKRLVMAESEKSQKLEERLRLLQAETASNSARAAERSSALREEVQSLREEAEKQRVASENLRQELTSQAERAEELGQELKAWQEKFFQKEQALSTLQLEHTSTQALVSELLPAKHLCQQLQAEQAAAEKRHREELEQSKQAAGGLRAELLRAQRELGELIPLRQKVAEQERTAQQLRAEKASYAEQLSMLKKAHGLLAEENRGLGERANLGRQFLEVELDQAREKYVQELAAVRADAETRLAEVQREAQSTARELEVMTAKYEGAKVKVLEERQRFQEERQKLTAQVEQLEVFQREQTKQVEELSKKLADSDQASKVQQQKLKAVQAQGGESQQEAQRLQAQLNELQAQLSQKEQAAEHYKLQMEKAKTHYDAKKQQNQELQEQLRSLEQLQKENKELRAEAERLGHELQQAGLKTKEAEQTCRHLTAQVRSLEAQVAHADQQLRDLGKFQVATDALKSREPQAKPQLDLSIDSLDLSCEEGTPLSITSKLPRTQPDGTSVPGEPASPISQRLPPKVESLESLYFTPIPARSQAPLESSLDSLGDVFLDSGRKTRSARRRTTQIINITMTKKLDVEEPDSANSSFYSTRSAPASQASLRATSSTQSLARLGSPDYGNSALLSLPGYRPTTRSSARRSQAGVSSGAPPGRNSFYMGTCQDEPEQLDDWNRIAELQQRNRVCPPHLKTCYPLESRPSLSLGTITDEEMKTGDPQETLRRASMQPIQIAEGTGITTRQQRKRVSLEPHQGPGTPESKKATSCFPRPMTPRDRHEGRKQSTTEAQKKAAPASTKQADRRQSMAFSILNTPKKLGNSLLRRGASKKALSKASPNTRSGTRRSPRIATTTASAATAAAIGATPRAKGKAKH

SEQ ID NO: 14438 - protein, 608 aa, Artificial Sequence
  Synthetic polypeptide
ENKCLEEKNEILQGKLSQLEEHLSQLQDNPPQEKGEVLGDVLQVEELSKKLADSDQASKVQQQKLKAVQAQGGESQQEAQRLQAQLNELQAQLSQKEQAAEHYKLQMEKAKTHYDAKKQQNQELQEQLRSLEQLQKENKELRAEAERLGHELQQAGLKTKEAEQTCRHLTAQVRSLEAQVAHADQQLRDLGKFQVATDALKSREPQAKPQLDLSIDSLDLSCEEGTPLSITSKLPRTQPDGTSVPGEPASPISQRLPPKVESLESLYFTPIPARSQAPLESSLDSLGDVFLDSGRKTRSARRRTTQIINITMTKKLDVEEPDSANSSFYSTRSAPASQASLRATSSTQSLARLGSPDYGNSALLSLPGYRPTTRSSARRSQAGVSSGAPPGRNSFYMGTCQDEPEQLDDWNRIAELQQRNRVCPPHLKTCYPLESRPSLSLGTITDEEMKTGDPQETLRRASMQPIQIAEGTGITTRQQRKRVSLEPHQGPGTPESKKATSCFPRPMTPRDRHEGRKQSTTEAQKKAAPASTKQADRRQSMAFSILNTPKKLGNSLLRRGASKKALSKASPNTRSGTRRSPRIATTTASAATAAAIGATPRAKGKAKH

SEQ ID NO: 14439 - protein, 14 aa, Artificial Sequence
  Synthetic polypeptide
RVAASSPIMRKQMP

SEQ ID NO: 14440 - protein, 71 aa, Artificial Sequence
  Synthetic polypeptide
SVCFSKHPFPKMGVVTSSCLITYYEKTNALKRRTKSFRENFHSWKNTCPSCRITHPRRRARCWVMSCRWKN

SEQ ID NO: 14441 - protein, 71 aa, Artificial Sequence
  Synthetic polypeptide
SVCFSKHPFPKMGVVTSSCLITYYEKTNALKRRTKSFRENFHSWKNTCPSCRITHPRRRARCWVMSCSWKP

SEQ ID NO: 14442 - protein, 9 aa, Artificial Sequence
  Synthetic polypeptide
GQEFKISLG

SEQ ID NO: 14443 - protein, 53 aa, Artificial Sequence
  Synthetic polypeptide
GRAWWLTPIVPALWEAETGGLLEARSSRSAWAELAVILKFVLDHEDGLNLNED

SEQ ID NO: 14444 - protein, 66 aa, Artificial Sequence
  Synthetic polypeptide
GRAWWLTPIVPALWEAETGGLLEARSSRSAWAELAVILKFVLDHEDGLNLNEDLENFLQKAPVPST

SEQ ID NO: 14445 - protein, 81 aa, Artificial Sequence
  Synthetic polypeptide
GRAWWLTPIVPALWEAETGGLLEARSSRSAWAELAVILKFVLDHEDGLNLNEDLENFLQKAPVPSTCSSTFPEELSPPSHQ

SEQ ID NO: 14446 - protein, 108 aa, Artificial Sequence
  Synthetic polypeptide
GRAWWLTPIVPALWEAETGGLLEARSSRSAWAELAVILKFVLDHEDGLNLNEDLENFLQKAPVPSTCSSTFPEELSPPSHQAKREIRFLELQKVASSSSGNNFLSGSP

SEQ ID NO: 14447 - protein, 127 aa, Artificial Sequence
  Synthetic polypeptide
GRAWWLTPIVPALWEAETGGLLEARSSRSAWAELAVILKFVLDHEDGLNLNEDLENFLQKAPVPSTCSSTFPEELSPPSHQAKREIRFLELQKVASSSSGNNFLSGSPASPMGDILQTPQFQMRRLK

SEQ ID NO: 14448 - protein, 598 aa, Artificial Sequence
  Synthetic polypeptide
GRAWWLTPIVPALWEAETGGLLEARSSRSAWAELAVILKFVLDHEDGLNLNEDLENFLQKAPVPSTCSSTFPEELSPPSHQAKREIRFLELQKVASSSSGNNFLSGSPASPMGDILQTPQFQMRRLKKQLADERSNRDELELELAENRKLLTEKDAQIAMMQQRIDRLALLNEKQAASPLEPKELEELRDKNESLTMRLHETLKQCQDLKTEKSQMDRKINQLSEENGDLSFKLREFASHLQQLQDALNELTEEHSKATQEWLEKQAQLEKELSAALQDKKCLEEKNEILQGKLSQLEEHLSQLQDNPPQEKGEVLGDVLQLETLKQEAATLAANNTQLQARVEMLETERGQQEAKLLAERGHFEEEKQQLSSLITDLQSSISNLSQAKEELEQASQAHGARLTAQVASLTSELTTLNATIQQQDQELAGLKQQAKEKQAQLAQTLQQQEQASQGLRHQVEQLSSSLKQKEQQLKEVAEKQEATRQDHAQQLATAAEEREASLRERDAALKQLEALEKEKAAKLEILQQQLQVANEARDSAQTSVTQAQREKAELSRKVEELQACVETARQEQHEAQAQVAELELQLRSEQQKATEKE

SEQ ID NO: 14449 - protein, 758 aa, Artificial Sequence
  Synthetic polypeptide
GRAWWLTPIVPALWEAETGGLLEARSSRSAWAELAVILKFVLDHEDGLNLNEDLENFLQKAPVPSTCSSTFPEELSPPSHQAKREIRFLELQKVASSSSGNNFLSGSPASPMGDILQTPQFQMRRLKKQLADERSNRDELELELAENRKLLTEKDAQIAMMQQRIDRLALLNEKQAASPLEPKELEELRDKNESLTMRLHETLKQCQDLKTEKSQMDRKINQLSEENGDLSFKLREFASHLQQLQDALNELTEEHSKATQEWLEKQAQLEKELSAALQDKKCLEEKNEILQGKLSQLEEHLSQLQDNPPQEKGEVLGDVLQLETLKQEAATLAANNTQLQARVEMLETERGQQEAKLLAERGHFEEEKQQLSSLITDLQSSISNLSQAKEELEQASQAHGARLTAQVASLTSELTTLNATIQQQDQELAGLKQQAKEKQAQLAQTLQQQEQASQGLRHQVEQLSSSLKQKEQQLKEVAEKQEATRQDHAQQLATAAEEREASLRERDAALKQLEALEKEKAAKLEILQQQLQVANEARDSAQTSVTQAQREKAELSRKVEELQACVETARQEQHEAQAQVAELELQLRSEQQKATEKERVAQEKDQLQEQLQALKESLKVTKGSLEEEKRRAADALEEQQRCISELKAETRSLVEQHKRERKELEEERAGRKGLEARLQQLGEAHQAETEVLRRELAEAMAAQHTAESECEQLVKEVAAWRERYEDSQQEEAQYGAMFQEQLMTLKEECEKARQELQE

SEQ ID NO: 14450 - protein, 2008 aa, Artificial Sequence
  Synthetic polypeptide
GRAWWLTPIVPALWEAETGGLLEARSSRSAWAELAVILKFVLDHEDGLNLNEDLENFLQKAPVPSTCSSTFPEELSPPSHQAKREIRFLELQKVASSSSGNNFLSGSPASPMGDILQTPQFQMRRLKKQLADERSNRDELELELAENRKLLTEKDAQIAMMQQRIDRLALLNEKQAASPLEPKELEELRDKNESLTMRLHETLKQCQDLKTEKSQMDRKINQLSEENGDLSFKLREFASHLQQLQDALNELTEEHSKATQEWLEKQAQLEKELSAALQDKKCLEEKNEILQGKLSQLEEHLSQLQDNPPQEKGEVLGDVLQLETLKQEAATLAANNTQLQARVEMLETERGQQEAKLLAERGHFEEEKQQLSSLITDLQSSISNLSQAKEELEQASQAHGARLTAQVASLTSELTTLNATIQQQDQELAGLKQQAKEKQAQLAQTLQQQEQASQGLRHQVEQLSSSLKQKEQQLKEVAEKQEATRQDHAQQLATAAEEREASLRERDAALKQLEALEKEKAAKLEILQQQLQVANEARDSAQTSVTQAQREKAELSRKVEELQACVETARQEQHEAQAQVAELELQLRSEQQKATEKERVAQEKDQLQEQLQALKESLKVTKGSLEEEKRRAADALEEQQRCISELKAETRSLVEQHKRERKELEEERAGRKGLEARLQQLGEAHQAETEVLRRELAEAMAAQHTAESECEQLVKEVAAWRERYEDSQQEEAQYGAMFQEQLMTLKEECEKARQELQEAKEKVAGIESHSELQISRQQNELAELHANLARALQQVQEKEVRAQKLADDLSTLQEKMAATSKEVARLETLVRKAGEQQETASRELVKEPARAGDRQPEWLEEQQGRQFCSTQAALQAMEREAEQMGNELERLRAALMESQGQQQEERGQQEREVARLTQERGRAQADLALEKAARAELEMRLQNALNEQRVEFATLQEALAHALTEKEGKDQELAKLRGLEAAQIKELEELRQTVKQLKEQLAKKEKEHASGSGAQSEAAGRTEPTGPKLEALRAEVSKLEQQCQKQQEQADSLERSLEAERASRAERDSALETLQGQLEEKAQELGHSQSALASAQRELAAFRTKVQDHSKAEDEWKAQVARGRQEAERKNSLISSLEEEVSILNRQVLEKEGESKELKRLVMAESEKSQKLEERLRLLQAETASNSARAAERSSALREEVQSLREEAEKQRVASENLRQELTSQAERAEELGQELKAWQEKFFQKEQALSTLQLEHTSTQALVSELLPAKHLCQQLQAEQAAAEKRHREELEQSKQAAGGLRAELLRAQRELGELIPLRQKVAEQERTAQQLRAEKASYAEQLSMLKKAHGLLAEENRGLGERANLGRQFLEVELDQAREKYVQELAAVRADAETRLAEVQREAQSTARELEVMTAKYEGAKVKVLEERQRFQEERQKLTAQVEELSKKLADSDQASKVQQQKLKAVQAQGGESQQEAQRLQAQLNELQAQLSQKEQAAEHYKLQMEKAKTHYDAKKQQNQELQEQLRSLEQLQKENKELRAEAERLGHELQQAGLKTKEAEQTCRHLTAQVRSLEAQVAHADQQLRDLGKFQVATDALKSREPQAKPQLDLSIDSLDLSCEEGTPLSITSKLPRTQPDGTSVPGEPASPISQRLPPKVESLESLYFTPIPARSQAPLESSLDSLGDVFLDSGRKTRSARRRTTQIINITMTKKLDVEEPDSANSSFYSTRSAPASQASLRATSSTQSLARLGSPDYGNSALLSLPGYRPTTRSSARRSQAGVSSGAPPGRNSFYMGTCQDEPEQLDDWNRIAELQQRNRVCPPHLKTCYPLESRPSLSLGTITDEEMKTGDPQETLRRASMQPIQIAEGTGITTRQQRKRVSLEPHQGPGTPESKKATSCFPRPMTPRDRHEGRKQSTTEAQKKAAPASTKQADRRQSMAFSILNTPKKLGNSLLRRGASKKALSKASPNTRSGTRRSPRIATTTASAATAAAIGATPRAKGKAKH

SEQ ID NO: 14451 - protein, 2022 aa, Artificial Sequence
  Synthetic polypeptide
GRAWWLTPIVPALWEAETGGLLEARSSRSAWAELAVILKFVLDHEDGLNLNEDLENFLQKAPVPSTCSSTFPEELSPPSHQAKREIRFLELQKVASSSSGNNFLSGSPASPMGDILQTPQFQMRRLKKQLADERSNRDELELELAENRKLLTEKDAQIAMMQQRIDRLALLNEKQAASPLEPKELEELRDKNESLTMRLHETLKQCQDLKTEKSQMDRKINQLSEENGDLSFKLREFASHLQQLQDALNELTEEHSKATQEWLEKQAQLEKELSAALQDKKCLEEKNEILQGKLSQLEEHLSQLQDNPPQEKGEVLGDVLQLETLKQEAATLAANNTQLQARVEMLETERGQQEAKLLAERGHFEEEKQQLSSLITDLQSSISNLSQAKEELEQASQAHGARLTAQVASLTSELTTLNATIQQQDQELAGLKQQAKEKQAQLAQTLQQQEQASQGLRHQVEQLSSSLKQKEQQLKEVAEKQEATRQDHAQQLATAAEEREASLRERDAALKQLEALEKEKAAKLEILQQQLQVANEARDSAQTSVTQAQREKAELSRKVEELQACVETARQEQHEAQAQVAELELQLRSEQQKATEKERVAQEKDQLQEQLQALKESLKVTKGSLEEEKRRAADALEEQQRCISELKAETRSLVEQHKRERKELEEERAGRKGLEARLQQLGEAHQAETEVLRRELAEAMAAQHTAESECEQLVKEVAAWRERYEDSQQEEAQYGAMFQEQLMTLKEECEKARQELQEAKEKVAGIESHSELQISRQQNELAELHANLARALQQVQEKEVRAQKLADDLSTLQEKMAATSKEVARLETLVRKAGEQQETASRELVKEPARAGDRQPEWLEEQQGRQFCSTQAALQAMEREAEQMGNELERLRAALMESQGQQQEERGQQEREVARLTQERGRAQADLALEKAARAELEMRLQNALNEQRVEFATLQEALAHALTEKEGKDQELAKLRGLEAAQIKELEELRQTVKQLKEQLAKKEKEHASGSGAQSEAAGRTEPTGPKLEALRAEVSKLEQQCQKQQEQADSLERSLEAERASRAERDSALETLQGQLEEKAQELGHSQSALASAQRELAAFRTKVQDHSKAEDEWKAQVARGRQEAERKNSLISSLEEEVSILNRQVLEKEGESKELKRLVMAESEKSQKLEERLRLLQAETASNSARAAERSSALREEVQSLREEAEKQRVASENLRQELTSQAERAEELGQELKAWQEKFFQKEQALSTLQLEHTSTQALVSELLPAKHLCQQLQAEQAAAEKRHREELEQSKQAAGGLRAELLRAQRELGELIPLRQKVAEQERTAQQLRAEKASYAEQLSMLKKAHGLLAEENRGLGERANLGRQFLEVELDQAREKYVQELAAVRADAETRLAEVQREAQSTARELEVMTAKYEGAKVKVLEERQRFQEERQKLTAQVEQLEVFQREQTKQVEELSKKLADSDQASKVQQQKLKAVQAQGGESQQEAQRLQAQLNELQAQLSQKEQAAEHYKLQMEKAKTHYDAKKQQNQELQEQLRSLEQLQKENKELRAEAERLGHELQQAGLKTKEAEQTCRHLTAQVRSLEAQVAHADQQLRDLGKFQVATDALKSREPQAKPQLDLSIDSLDLSCEEGTPLSITSKLPRTQPDGTSVPGEPASPISQRLPPKVESLESLYFTPIPARSQAPLESSLDSLGDVFLDSGRKTRSARRRTTQIINITMTKKLDVEEPDSANSSFYSTRSAPASQASLRATSSTQSLARLGSPDYGNSALLSLPGYRPTTRSSARRSQAGVSSGAPPGRNSFYMGTCQDEPEQLDDWNRIAELQQRNRVCPPHLKTCYPLESRPSLSLGTITDEEMKTGDPQETLRRASMQPIQIAEGTGITTRQQRKRVSLEPHQGPGTPESKKATSCFPRPMTPRDRHEGRKQSTTEAQKKAAPASTKQADRRQSMAFSILNTPKKLGNSLLRRGASKKALSKASPNTRSGTRRSPRIATTTASAATAAAIGATPRAKGKAKH

SEQ ID NO: 14452 - protein, 886 aa, Artificial Sequence
  Synthetic polypeptide
GRAWWLTPIVPALWEAETGGLLEARSSRSAWAELAVILKFVLDHEDGLNLNEDLENFLQKAPVPSTCSSTFPEELSPPSHQAKREIRFLELQKVASSSSGNNFLSGSPASPMGDILQTPQFQMRRLKKQLADERSNRDELELELAENRKLLTEKDAQIAMMQQRIDRLALLNEKQAASPLEPKELEELRDKNESLTMRLHETLKQCQDLKTEKSQMDRKINQLSEENGDLSFKLREFASHLQQLQDALNELTEEHSKATQEWLEKQAQLEKELSAALQDKKCLEEKNEILQGKLSQLEEHLSQLQDNPPQEKGEVLGDVLQVEELSKKLADSDQASKVQQQKLKAVQAQGGESQQEAQRLQAQLNELQAQLSQKEQAAEHYKLQMEKAKTHYDAKKQQNQELQEQLRSLEQLQKENKELRAEAERLGHELQQAGLKTKEAEQTCRHLTAQVRSLEAQVAHADQQLRDLGKFQVATDALKSREPQAKPQLDLSIDSLDLSCEEGTPLSITSKLPRTQPDGTSVPGEPASPISQRLPPKVESLESLYFTPIPARSQAPLESSLDSLGDVFLDSGRKTRSARRRTTQIINITMTKKLDVEEPDSANSSFYSTRSAPASQASLRATSSTQSLARLGSPDYGNSALLSLPGYRPTTRSSARRSQAGVSSGAPPGRNSFYMGTCQDEPEQLDDWNRIAELQQRNRVCPPHLKTCYPLESRPSLSLGTITDEEMKTGDPQETLRRASMQPIQIAEGTGITTRQQRKRVSLEPHQGPGTPESKKATSCFPRPMTPRDRHEGRKQSTTEAQKKAAPASTKQADRRQSMAFSILNTPKKLGNSLLRRGASKKALSKASPNTRSGTRRSPRIATTTASAATAAAIGATPRAKGKAKH

SEQ ID NO: 14453 - protein, 38 aa, Artificial Sequence
  Synthetic polypeptide
SQHFGRPRQEDCLRPGVQDQPGLSWLSFLNLCWTMRTG

SEQ ID NO: 14454 - protein, 25 aa, Artificial Sequence
  Synthetic polypeptide
PGAVAHACNLSTLGGQGRWITRTPC

SEQ ID NO: 14455 - protein, 25 aa, Artificial Sequence
  Synthetic polypeptide
RERWLTLVISALWEAKAGGSQGRLA

SEQ ID NO: 14456 - protein, 61 aa, Artificial Sequence
  Synthetic polypeptide
RERWLTLVISALWEAKAGGSQGRLAESGLCHRHFRPATCCQGGPVSCAPPSGNCLHLPTGW

SEQ ID NO: 14457 - protein, 17 aa, Artificial Sequence
  Synthetic polypeptide
SQHFGRPRQVDHKDALL

SEQ ID NO: 14458 - protein, 72 aa, Artificial Sequence
  Synthetic polypeptide
SQHFGRPRQVDHKDALLSLGSVIDISGLQRAVKEALSAVLPRVETVYTYLLDGESQLVCEDPPHELPQEGKV

SEQ ID NO: 14459 - protein, 78 aa, Artificial Sequence
  Synthetic polypeptide
SQHFGRPRQVDHKDALLSLGSVIDISGLQRAVKEALSAVLPRVETVYTYLLDGESQLVCEDPPHELPQEGKVRCTVAS

SEQ ID NO: 14460 - protein, 130 aa, Artificial Sequence
  Synthetic polypeptide
SQHFGRPRQVDHKDALLSLGSVIDISGLQRAVKEALSAVLPRVETVYTYLLDGESQLVCEDPPHELPQEGKVREAIISQKRLGCNGLGFSDLPGKPLARLVAPLAPDTQVLVMPLADKEAGAVAAVILVH

SEQ ID NO: 14461 - protein, 906 aa, Artificial Sequence
  Synthetic polypeptide
SQHFGRPRQVDHKDALLSLGSVIDISGLQRAVKEALSAVLPRVETVYTYLLDGESQLVCEDPPHELPQEGKVREAIISQKRLGCNGLGFSDLPGKPLARLVAPLAPDTQVLVMPLADKEAGAVAAVILVHCGQLSDNEEWSLQAVEKHTLVALRRVQVLQQRGPREAPRAVQNPPEGTAEDQKGGAAYTDRDRKILQLCGELYDLDASSLQLKVLQYLQQETRASRCCLLLVSEDNLQLSCKVIGDKVLGEEVSFPLTGCLGQVVEDKKSIQLKDLTSEDVQQLQSMLGCELQAMLCVPVISRATDQVVALACAFNKLEGDLFTDEDEHVIQHCFHYTSTVLTSTLAFQKEQKLKCECQALLQVAKNLFTHLDDVSVLLQEIITEARNLSNAEICSVFLLDQNELVAKVFDGGVVDDESYEIRIPADQGIAGHVATTGQILNIPDAYAHPLFYRGVDDSTGFRTRNILCFPIKNENQEVIGVAELVNKINGPWFSKFDEDLATAFSIYCGISIAHSLLYKKVNEAQYRSHLANEMMMYHMKVSDDEYTKLLHDGIQPVAAIDSNFASFTYTPRSLPEDDTSMAILSMLQDMNFINNYKIDCPTLARFCLMVKKGYRDPPYHNWMHAFSVSHFCYLLYKNLELTNYLEDIEIFALFISCMCHDLDHRGTNNSFQVASKSVLAALYSSEGSVMERHHFAQAIAILNTHGCNIFDHFSRKDYQRMLDLMRDIILATDLAHHLRIFKDLQKMAEVGYDRNNKQHHRLLLCLLMTSCDLSDQTKGWKTTRKIAELIYKEFFSQGDLEKAMGNRPMEMMDREKAYIPELQISFMEHIAMPIYKLLQDLFPKAAELYERVASNREHWTKVSHKFTIRGLPSNNSLDFLDEEYEVPDLDGTRAPINGCCSLDAE

SEQ ID NO: 14462 - protein, 657 aa, Artificial Sequence
  Synthetic polypeptide
SQHFGRPRQVDHKDALLSLGSVIDISGLQRAVKEALSAVLPRVETVYTYLLDGESQLVCEDPPHELPQEGKVRFTDEDEHVIQHCFHYTSTVLTSTLAFQKEQKLKCECQALLQVAKNLFTHLDDVSVLLQEIITEARNLSNAEICSVFLLDQNELVAKVFDGGVVDDESYEIRIPADQGIAGHVATTGQILNIPDAYAHPLFYRGVDDSTGFRTRNILCFPIKNENQEVIGVAELVNKINGPWFSKFDEDLATAFSIYCGISIAHSLLYKKVNEAQYRSHLANEMMMYHMKVSDDEYTKLLHDGIQPVAAIDSNFASFTYTPRSLPEDDTSMAILSMLQDMNFINNYKIDCPTLARFCLMVKKGYRDPPYHNWMHAFSVSHFCYLLYKNLELTNYLEDIEIFALFISCMCHDLDHRGTNNSFQVASKSVLAALYSSEGSVMERHHFAQAIAILNTHGCNIFDHFSRKDYQRMLDLMRDIILATDLAHHLRIFKDLQKMAEVGYDRNNKQHHRLLLCLLMTSCDLSDQTKGWKTTRKIAELIYKEFFSQGDLEKAMGNRPMEMMDREKAYIPELQISFMEHIAMPIYKLLQDLFPKAAELYERVASNREHWTKVSHKFTIRGLPSNNSLDFLDEEYEVPDLDGTRAPINGCCSLDAE

SEQ ID NO: 14463 - protein, 31 aa, Artificial Sequence
  Synthetic polypeptide
EATVHDPGSGPSPDTKSAGALILDFSVSRSS

SEQ ID NO: 14464 - protein, 37 aa, Artificial Sequence
  Synthetic polypeptide
SRKWALTRHQICWRLDLGFLSLQKLLMEMCMIISRII

SEQ ID NO: 14465 - protein, 537 aa, Artificial Sequence
  Synthetic polypeptide
SWISQSPEALDGNVYDHLKDYLIAFSRTELETCQAVQNTFQFLLENSSKVVRDYNLQLFLQENAVFHKPQPFQFQPCDSDTSLKAAQLVDIELSPVSALRMTIAESRQLESETGTTEEHSLNKEARKWATRVAREHKNIVHQQRVLNDLECHGAAVSEQSRAELEQKIDEARENIRKAEIIKLKAEARLDLLKQIGVSVDTWLKSAMNQVMEELENERWARPPAVTSNGTLHSLNADTEREEGEEFEDNMDVFDDSSSSPSGTLRNYPLTCKVVYSYKASQPDELTIEEHEVLEVIEDGDMEDWVKARNKVGQVGYVPEKYLQFPTSNSLLSMLQSLAALDSRSHTSSNSTEAELVSGSLNGDASVCFVKALYDYEGQTDDELSFPEGAIIRILNKENQDDDGFWEGEFNGRIGVFPSVLVEELSASENGDTPWMREIQISPSPKPHASLPPLPLYDQPPSSPYPSPDKRSSLYFPRSPSANEKSLHAESPGFSQASRHTPETSYGKLRPVRAAPPPPTQNHRRPAEKIEDVEITLV

SEQ ID NO: 14466 - protein, 344 aa, Artificial Sequence
  Synthetic polypeptide
SWISQSPEALDGNVYDHLKDYLIAFSRTELETCQAVQNTFQFLLENSSKVVRDYNLQLFLQENAVFHKPQPFQFQPCDSDTSRQLESETGTTEEHSLNKEARKWATRVAREHKNIVHQQRVLNDLECHGAAVSEQSRAELEQKIDEARENIRKAEIIKLKAEARLDLLKQIGVSVDTWLKSAMNQVMEELENERWARPPAVTSNGTLHSLNADTEREEGEEFEDNMDVFDDSSSSPSGTLRNYPLTCKVVYSYKASQPDELTIEEHEVLEVIEDGDMEDWVKARNKVGQVGYVPEKYLQFPTSNSLLSMLQSLAALDSRSHTSSNSTEAELVSGSLNGDASGKD

SEQ ID NO: 14467 - protein, 513 aa, Artificial Sequence
  Synthetic polypeptide
SWISQSPEALDGNVYDHLKDYLIAFSRTELETCQAVQNTFQFLLENSSKVVRDYNLQLFLQENAVFHKPQPFQFQPCDSDTSRQLESETGTTEEHSLNKEARKWATRVAREHKNIVHQQRVLNDLECHGAAVSEQSRAELEQKIDEARENIRKAEIIKLKAEARLDLLKQIGVSVDTWLKSAMNQVMEELENERWARPPAVTSNGTLHSLNADTEREEGEEFEDNMDVFDDSSSSPSGTLRNYPLTCKVVYSYKASQPDELTIEEHEVLEVIEDGDMEDWVKARNKVGQVGYVPEKYLQFPTSNSLLSMLQSLAALDSRSHTSSNSTEAELVSGSLNGDASVCFVKALYDYEGQTDDELSFPEGAIIRILNKENQDDDGFWEGEFNGRIGVFPSVLVEELSASENGDTPWMREIQISPSPKPHASLPPLPLYDQPPSSPYPSPDKRSSLYFPRSPSANEKSLHAESPGFSQASRHTPETSYGKLRPVRAAPPPPTQNHRRPAEKIEDVEITLV

SEQ ID NO: 14468 - protein, 111 aa, Artificial Sequence
  Synthetic polypeptide
FFQLKGMQKLASQYLKRDWPGVKADDRNDYRSMYPVWKSFLEGTMQVAQSRMNICENYKNFISEPARTVRSLKEQQLKRCVDQLTKIQTELQETVKDLAKGKKKYFETEQM

SEQ ID NO: 14469 - protein, 714 aa, Artificial Sequence
  Synthetic polypeptide
FFQLKGMQKLASQYLKRDWPGVKADDRNDYRSMYPVWKSFLEGTMQVAQSRMNICENYKNFISEPARTVRSLKEQQLKRCVDQLTKIQTELQETVKDLAKGKKKYFETEQMAHAVREKADIEAKSKLSLFQSRISLQKASVKLKARRSECNSKATHARNDYLLTLAAANAHQDRYYQTDLVNIMKALDGNVYDHLKDYLIAFSRTELETCQAVQNTFQFLLENSSKVVRDYNLQLFLQENAVFHKPQPFQFQPCDSDTSLKAAQLVDIELSPVSALRMTIAESRQLESETGTTEEHSLNKEARKWATRVAREHKNIVHQQRVLNDLECHGAAVSEQSRAELEQKIDEARENIRKAEIIKLKAEARLDLLKQIGVSVDTWLKSAMNQVMEELENERWARPPAVTSNGTLHSLNADTEREEGEEFEDNMDVFDDSSSSPSGTLRNYPLTCKVVYSYKASQPDELTIEEHEVLEVIEDGDMEDWVKARNKVGQVGYVPEKYLQFPTSNSLLSMLQSLAALDSRSHTSSNSTEAELVSGSLNGDASVCFVKALYDYEGQTDDELSFPEGAIIRILNKENQDDDGFWEGEFNGRIGVFPSVLVEELSASENGDTPWMREIQISPSPKPHASLPPLPLYDQPPSSPYPSPDKRSSLYFPRSPSANEKSLHAESPGFSQASRHTPETSYGKLRPVRAAPPPPTQNHRRPAEKIEDVEITLV

SEQ ID NO: 14470 - protein, 690 aa, Artificial Sequence
  Synthetic polypeptide
FFQLKGMQKLASQYLKRDWPGVKADDRNDYRSMYPVWKSFLEGTMQVAQSRMNICENYKNFISEPARTVRSLKEQQLKRCVDQLTKIQTELQETVKDLAKGKKKYFETEQMAHAVREKADIEAKSKLSLFQSRISLQKASVKLKARRSECNSKATHARNDYLLTLAAANAHQDRYYQTDLVNIMKALDGNVYDHLKDYLIAFSRTELETCQAVQNTFQFLLENSSKVVRDYNLQLFLQENAVFHKPQPFQFQPCDSDTSRQLESETGTTEEHSLNKEARKWATRVAREHKNIVHQQRVLNDLECHGAAVSEQSRAELEQKIDEARENIRKAEIIKLKAEARLDLLKQIGVSVDTWLKSAMNQVMEELENERWARPPAVTSNGTLHSLNADTEREEGEEFEDNMDVFDDSSSSPSGTLRNYPLTCKVVYSYKASQPDELTIEEHEVLEVIEDGDMEDWVKARNKVGQVGYVPEKYLQFPTSNSLLSMLQSLAALDSRSHTSSNSTEAELVSGSLNGDASVCFVKALYDYEGQTDDELSFPEGAIIRILNKENQDDDGFWEGEFNGRIGVFPSVLVEELSASENGDTPWMREIQISPSPKPHASLPPLPLYDQPPSSPYPSPDKRSSLYFPRSPSANEKSLHAESPGFSQASRHTPETSYGKLRPVRAAPPPPTQNHRRPAEKIEDVEITLV

SEQ ID NO: 14471 - protein, 10 aa, Artificial Sequence
  Synthetic polypeptide
KVCRSWLVNT

SEQ ID NO: 14472 - protein, 13 aa, Artificial Sequence
  Synthetic polypeptide
PLVFSTKRYAEVG

SEQ ID NO: 14473 - protein, 10 aa, Artificial Sequence
  Synthetic polypeptide
FLHFQLRASG

SEQ ID NO: 14474 - protein, 704 aa, Artificial Sequence
  Synthetic polypeptide
GPAGEVPQVPDKETKATMGTENTPGGKASPDPQDVRPSVFHNIKLFVLCHSLLQLAQLMISGYLKSSISTVEKRFGLSSQTSGLLASFNEVGNTALIVFVSYFGSRVHRPRMIGYGAILVALAGLLMTLPHFISEPYRYDNTSPEDMPQDFKASLCLPTTSAPASAPSNGNCSSYTETQHLSVVGIMFVAQTLLGVGGVPIQPFGISYIDDFAHNSNSPLYLGILFAVTMMGPGLAFGLGSLMLRLYVDINQMPEGGISLTIKDPRWVGAWWLGFLIAAGAVALAAIPYFFFPKEMPKEKRELQFRRKVLAVTDSPARKGKDSPSKQSPGESTKKQDGLVQIAPNLTVIQFIKVFPRVLLQTLRHPIFLLVVLSQVCLSSMAAGMAIFLPKFLERQFSITASYANLLIGCLSFPSVIVGIVVGGVLVKRLHLGPVGCGALCLLGMLLCLFFSLPLFFIGCSSHQIAGITHQTSAHPGLELSPSCMEACSCPLDGFNPVCDPSTRVEYITPCHAGCSSWVVQDALDNSQVFYTNCSCVVEGNPVLAGSCDSTCSHLVVPFLLLVSLGSALACLTHTPSFMLILRGVKKEDKTLAVGIQFMFLRILAWMPSPVIHGSAIDTTCVHWALSCGRRAVCRYYNNDLLRNRFIGLQFFFKTGSVICFALVLAVLRQQDKEARTKESRSSPAVEQQLLVSGPGKKPEDSRV

SEQ ID NO: 14475 - protein, 66 aa, Artificial Sequence
  Synthetic polypeptide
MISAFPTEGQRVRYPRYQTRKPKPQWAQKTHLEAKPAQTLRTCGQVCSITSSCSFCATACCSWRSS

SEQ ID NO: 14476 - protein, 663 aa, Artificial Sequence
  Synthetic polypeptide
CASVVPATQEAEAWKKRWFILRSGRMSGDPDVLEYYKNDHSKKPLRIINLNFCEQVDAGLTFNKKELQDSFVFDIKTSERTFYLVAETEEDMNKWVQSICQICGFNQAEESTDSLRNVSSAGHGPRSSPAELSSSSQHLLRERKSSAPSHSSQPTLFTFEPPVSNHMQPTLSTSAPQEYLYLHQCISRRAENARSASFSQGTRASFLMRSDTAVQKLAQGNGHCVNGISGQVHGFYSLPKPSRHNTEFRDSTYDLPRSLASHGHTKGSLTGSETDNEDVYTFKTPSNTLCREFGDLLVDNMDVPATPLSAYQIPRTFTLDKNHNAMTVATPGDSAIAPPPRPPKPSQAETPRWGSPQQRPPISENSRSVAATIPRRNTLPAMDNSRLHRASSCETYEYPQRGGESAGRSAESMSDGVGSFLPGKMIVGRSDSTNSEDNYVPMNPGSSTLLAMERAGDNSQSVYIPMSPGAHHFDSLGYPSTTLPVHRGPSRGSEIQPPPVNRNLKPDRKAKPTPLDLRNNTVIDELPFKSPITKSWSRANHTFNSSSSQYCRPISTQSITSTDSGDSEENYVPMQNPVSASPVPSGTNSPAPKKSTGSVDYLALDFQPSSPSPHRKPSTSSVTSDEKVDYVQVDKEKTQALQNTMQEWTDVRQSSEPSKGAKL

SEQ ID NO: 14477 - protein, 16 aa, Artificial Sequence
  Synthetic polypeptide
GLEETLVYPAEWPDER

SEQ ID NO: 14478 - protein, 21 aa, Artificial Sequence
  Synthetic polypeptide
SQPPRRLRPGRNAGLSCGVAG

SEQ ID NO: 14479 - protein, 16 aa, Artificial Sequence
  Synthetic polypeptide
GLEETLVYPAEWPDER

SEQ ID NO: 14480 - protein, 18 aa, Artificial Sequence
  Synthetic polypeptide
GLAIRPGRNAGLSCGVAG

SEQ ID NO: 14481 - protein, 21 aa, Artificial Sequence
  Synthetic polypeptide
MDWQSGLEETLVYPAEWPDER

SEQ ID NO: 14482 - protein, 656 aa, Artificial Sequence
  Synthetic polypeptide
WTGNQAWKKRWFILRSGRMSGDPDVLEYYKNDHSKKPLRIINLNFCEQVDAGLTFNKKELQDSFVFDIKTSERTFYLVAETEEDMNKWVQSICQICGFNQAEESTDSLRNVSSAGHGPRSSPAELSSSSQHLLRERKSSAPSHSSQPTLFTFEPPVSNHMQPTLSTSAPQEYLYLHQCISRRAENARSASFSQGTRASFLMRSDTAVQKLAQGNGHCVNGISGQVHGFYSLPKPSRHNTEFRDSTYDLPRSLASHGHTKGSLTGSETDNEDVYTFKTPSNTLCREFGDLLVDNMDVPATPLSAYQIPRTFTLDKNHNAMTVATPGDSAIAPPPRPPKPSQAETPRWGSPQQRPPISENSRSVAATIPRRNTLPAMDNSRLHRASSCETYEYPQRGGESAGRSAESMSDGVGSFLPGKMIVGRSDSTNSEDNYVPMNPGSSTLLAMERAGDNSQSVYIPMSPGAHHFDSLGYPSTTLPVHRGPSRGSEIQPPPVNRNLKPDRKAKPTPLDLRNNTVIDELPFKSPITKSWSRANHTFNSSSSQYCRPISTQSITSTDSGDSEENYVPMQNPVSASPVPSGTNSPAPKKSTGSVDYLALDFQPSSPSPHRKPSTSSVTSDEKVDYVQVDKEKTQALQNTMQEWTDVRQSSEPSKGAKL

SEQ ID NO: 14483 - protein, 1016 aa, Artificial Sequence
  Synthetic polypeptide
DQVRNSYYIGADGSLRLLLANGMEVALQTEPHLLAGTVNPTVGKRNVTLPIDNGLNLVEWRQRKEQARGQVTVFGRRLRVHNRNLLSLDFDRVTRTEKIYDDHRKFTLRILYDQAGRPSLWSPSSRLNGVNVTYSPGGYIAGIQRGIMSERMEYDQAGRITSRIFADGKTWSYTYLEKSMVLLLHSQRQYIFEFDKNDRLSSVTMPNVARQTLETIRSVGYYRNIYQPPEGNASVIQDFTEDGHLLHTFYLGTGRRVIYKYGKLSKLAETLYDTTKVSFTYDETAGMLKTINLQNEGFTCTIRYRQIGPLIDRQIFRFTEEGMVNARFDYNYDNSFRVTSMQAVINETPLPIDLYRYDDVSGKTEQFGKFGVIYYDINQIITTAVMTHTKHFDAYGRMKEVQYEIFRSLMYWMTVQYDNMGRVVKKELKVGPYANTTRYSYEYDADGQLQTVSINDKPLWRYSYDLNGNLHLLSPGNSARLTPLRYDIRDRITRLGDVQYKMDEDGFLRQRGGDIFEYNSAGLLIKAYNRAGSWSVRYRYDGLGRRVSSKSSHSHHLQFFYADLTNPTKVTHLYNHSSSEITSLYYDLQGHLFAMELSSGDEFYIACDNIGTPLAVFSGTGLMIKQILYTAYGEIYMDTNPNFQIIIGYHGGLYDPLTKLVHMGRRDYDVLAGRWTSPDHELWKHLSSSNVMPFNLYMFKNNNPISNSQDIKCFMTDVNSWLLTFGFQLHNVIPGYPKPDMDAMEPSYELIHTQMKTQEWDNSKSILGVQCEVQKQLKAFVTLERFDQLYGSTITSCQQAPKTKKFASSGSVFGKGVKFALKDGRVTTDIISVANEDGRRVAAILNHAHYLENLHFTIDGVDTHYFVKPGPSEGDLAILGLSGGRRTLENGVNVTVSQINTVLNGRTRRYTDIQLQYGALCLNTRYGTTLDEEKARVLELARQRAVRQAWAREQQRLREGEEGLRAWTEGEKQQVLSTGRVQGYDGFFVISVEQYPELSDSANNIHFMRQSEMGRR

SEQ ID NO: 14484 - protein, 734 aa, Artificial Sequence
  Synthetic polypeptide
DQVRNSYYIGADGSLRLLLANGMEVALQTEPHLLAGTVNPTVGKRNVTLPIDNGLNLVEWRQRKEQARGQVTVFGRRLRVHNRNLLSLDFDRVTRTEKIYDDHRKFTLRILYDQAGRPSLWSPSSRLNGVNVTYSPGGYIAGIQRGIMSERMEYDQAGRITSRIFADGKTWSYTYLEKSMVLLLHSQRQYIFEFDKNDRLSSVTMPNVARQTLETIRSVGYYRNIYQPPEGNASVIQDFTEDGHLLHTFYLGTGRRVIYKYGKLSKLAETLYDTTKVSFTYDETAGMLKTINLQNEGFTCTIRYRQIGPLIDRQIFRFTEEGMVNARFDYNYDNSFRVTSMQAVINETPLPIDLYRYDDVSGKTEQFGKFGVIYYDINQIITTAVMTHTKHFDAYGRMKEVQYEIFRSLMYWMTVQYDNMGRVVKKELKVGPYANTTRYSYEYDADGQLQTVSINDKPLWRYSYDLNGNLHLLSPGNSARLTPLRYDIRDRITRLGDVQYKMDEDGFLRQRGGDIFEYNSAGLLIKAYNRAGSWSVRYRYDGLGRRVSSKSSHSHHLQFFYADLTNPTKVTHLYNHSSSEITSLYYDLQGHLFAMELSSGDEFYIACDNIGTPLAVFSGTGLMIKQILYTAYGEIYMDTNPNFQIIIGYHGGLYDPLTKLVHMGRRDYDVLAGRWTSPDHELWKHLSSSNVMPFNLYMFKNNNPISNSQDIKCFMTERTKDFLPKTATLLWPHT

SEQ ID NO: 14485 - protein, 35 aa, Artificial Sequence
  Synthetic polypeptide
FLHFHLRPSPEQLLHRGRWLLAAAAGQRHGGGAAD

SEQ ID NO: 14486 - protein, 124 aa, Artificial Sequence
  Synthetic polypeptide
GRSQDGRIGTAPVYSSQRERRRRWVISAFPSETKSGTATTSGPMAPCGCCWPTAWRWRCRLSPTCWLAPSTPPWARGMSRCPSTTASTWWSGASAKSRLGARSLSLGAGCGFTTEISYLWTLIA

SEQ ID NO: 14487 - protein, 43 aa, Artificial Sequence
  Synthetic polypeptide
GAFPLLLGTSPCCHHVKKDMFASPSVMIVSFPRPPQPHGTTFA

SEQ ID NO: 14488 - protein, 61 aa, Artificial Sequence
  Synthetic polypeptide
VLTRSDGFIRGFPPFAWHFSLLPPCKKGHVCFPFCHDRKFPEASPATWNYICLKKLRMTSS

SEQ ID NO: 14489 - protein, 912 aa, Artificial Sequence
  Synthetic polypeptide
VSRGLPSHMELHLPEKIKDDQQLKNMSGQWFYEAKAKRHRDKIHGADIIRASMRKKRPQIAAEQSKDRENGAKESWVNNVNKDAFLPPELAGVVEEPEEDAAPASPSSSVVNPASSVIDMSQENTRKPNVSPEKQRKNPFNSSKLPEGHSSQQTKNEQSKNGRTGLFQTSKEDELSESKEKSTVADTSIQKLEKSKQTLPGLSNGSQIKAPIPKARKMIYKSTDLNKDDNQSFPRQRTDSLKARGAPRGILKRNSSSSSTDSETLRYNHNFEPKSKIVSPGLTIHERISEKEHSLEDNSSPNSLEPLKHVRFSAVKDELPQSPGLIHGREVGEFSVLESDRLKNGMEDAGDTEEFQSDPKPSQYRKPSLFHQSTSSPYVSKSETHQPMTSGSFPINGLHSHSEVLTARPQSMENSPTINEPKDKSSELTRLESVLPRSPADELSHCVEPEPSQVPGGSSRDRQQGSEEEPSPVLKTLERSAARKMPSKSLEDISSDSSNQAKVDNQPEELVRSAEDVSTVPTQPDNPFSHPDKLKRMSKSVPAFLQDESDDRETDTASESSYQLSRHKKSPSSLTNLSSSSGMTSLSSVSGSVMSVYSGDFGNLEVKGNIQFAIEYVESLKELHVFVAQCKDLAAADVKKQRSDPYVKAYLLPDKGKMGKKKTLVVKKTLNPVYNEILRYKIEKQILKTQKLNLSIWHRDTFKRNSFLGEVELDLETWDWDNKQNKQLRWYPLKRKTAPVALEAENRGEMKLALQYVPEPVPGKKLPTTGEVHIWVKECLDLPLLRGSHLNSFVKCTILPDTSRKSRQKTRAVGKTTNPIFNHTMVYDGFRPEDLMEACVELTVWDHYKLTNQFLGGLRIGFGTGKSYGTEVDWMDSTSEEVALWEKMVNSPNTWIEATLPLRMLLIAKISK

SEQ ID NO: 14490 - protein, 887 aa, Artificial Sequence
  Synthetic polypeptide
VSRGLPSHMELHLPEKIKDDQQLKNMSGQWFYEAKAKRHRDKIHGADIIRASMRKKRPQIAAEQSKDRENGAKESWVNNVNKDAFLPPELAGVVEEPEEDAAPASPSSSVVNPASSVIDMSQENTRKPNVSPEKRKNPFNSSKLPEGHSSQQTKNEQSKNGRTGLFQTSKEDELSESKEKSTVADTSIQKLEKSKQTLPGLSNGSQIKAPIPKARKMIYKSTDLNKDDNQSFPRQRTDSLKARGAPRGILKRNSSSSSTDSETLRYNHNFEPKSKIVSPGLTIHERISEKEHSLEDNSSPNSLEPLKHVRFSAVKDELPQSPGLIHGREVGEFSVLESDRLKNGMEDAGDTEEFQSDPKPSQYRKPSLFHQSTSSPYVSKSETHQPMTSGSFPINGLHSHSEVLTARPQSMENSPTINEPKDKSSELTRLESVLPRSPADELSHCVEPEPSQVPGGSSRDRQQGSEEEPSPVLKTLERSAARKMPSKSLEDISSDSSNQAKVDNQPEELVRSAEDDEKPDQKPVTNECVPRISTVPTQPDNPFSHPDKLKRMSKSVPAFLQDEVSGSVMSVYSGDFGNLEVKGNIQFAIEYVESLKELHVFVAQCKDLAAADVKKQRSDPYVKAYLLPDKGKMGKKKTLVVKKTLNPVYNEILRYKIEKQILKTQKLNLSIWHRDTFKRNSFLGEVELDLETWDWDNKQNKQLRWYPLKRKTAPVALEAENRGEMKLALQYVPEPVPGKKLPTTGEVHIWVKECLDLPLLRGSHLNSFVKCTILPDTSRKSRQKTRAVGKTTNPIFNHTMVYDGFRPEDLMEACVELTVWDHYKLTNQFLGGLRIGFGTGKSYGTEVDWMDSTSEEVALWEKMVNSPNTWIEATLPLRMLLIAKISK

SEQ ID NO: 14491 - protein, 911 aa, Artificial Sequence
  Synthetic polypeptide
VSRGLPSHMELHLPEKIKDDQQLKNMSGQWFYEAKAKRHRDKIHGADIIRASMRKKRPQIAAEQSKDRENGAKESWVNNVNKDAFLPPELAGVVEEPEEDAAPASPSSSVVNPASSVIDMSQENTRKPNVSPEKRKNPFNSSKLPEGHSSQQTKNEQSKNGRTGLFQTSKEDELSESKEKSTVADTSIQKLEKSKQTLPGLSNGSQIKAPIPKARKMIYKSTDLNKDDNQSFPRQRTDSLKARGAPRGILKRNSSSSSTDSETLRYNHNFEPKSKIVSPGLTIHERISEKEHSLEDNSSPNSLEPLKHVRFSAVKDELPQSPGLIHGREVGEFSVLESDRLKNGMEDAGDTEEFQSDPKPSQYRKPSLFHQSTSSPYVSKSETHQPMTSGSFPINGLHSHSEVLTARPQSMENSPTINEPKDKSSELTRLESVLPRSPADELSHCVEPEPSQVPGGSSRDRQQGSEEEPSPVLKTLERSAARKMPSKSLEDISSDSSNQAKVDNQPEELVRSAEDVSTVPTQPDNPFSHPDKLKRMSKSVPAFLQDESDDRETDTASESSYQLSRHKKSPSSLTNLSSSSGMTSLSSVSGSVMSVYSGDFGNLEVKGNIQFAIEYVESLKELHVFVAQCKDLAAADVKKQRSDPYVKAYLLPDKGKMGKKKTLVVKKTLNPVYNEILRYKIEKQILKTQKLNLSIWHRDTFKRNSFLGEVELDLETWDWDNKQNKQLRWYPLKRKTAPVALEAENRGEMKLALQYVPEPVPGKKLPTTGEVHIWVKECLDLPLLRGSHLNSFVKCTILPDTSRKSRQKTRAVGKTTNPIFNHTMVYDGFRPEDLMEACVELTVWDHYKLTNQFLGGLRIGFGTGKSYGTEVDWMDSTSEEVALWEKMVNSPNTWIEATLPLRMLLIAKISK

SEQ ID NO: 14492 - protein, 45 aa, Artificial Sequence
  Synthetic polypeptide
DLFQEVCPDTCMEPLPCPACSAGPTHQADARGRGKAQSHSPVLLP

SEQ ID NO: 14493 - protein, 111 aa, Artificial Sequence
  Synthetic polypeptide
LRLPCLSPASLASLFFLSHSTPLSLPLPLPGMCFLQLFTWLLAPSHFSGSAQVGPLSGGLSRHLHGAPPLPSLLCWTDPPSRCERQRKGSKPFPSFASLMPRTGFLCQSIA

SEQ ID NO: 14494 - protein, 118 aa, Artificial Sequence
  Synthetic polypeptide
LRLPCLSPASLASLFFLSHSTPLSLPLPLPGMCFLQLFTWLLAPSHFSGSAQVGPLSGGLSRHLHGAPPLPSLLCWTDPPSRCERQRKGSKPFPSFASLMPRTGFLCQSIAVRPFLSC

SEQ ID NO: 14495 - protein, 116 aa, Artificial Sequence
  Synthetic polypeptide
LRLPCLSPASLASLFFLSHSTPLSLPLPLPGMCFLQLFTWLLAPSHFSGSAQVGPLSGGLSRHLHGAPPLPSLLCWTDPPSRCERQRKGSKPFPSFASLMPRTGFLCQSIVLSHLP

SEQ ID NO: 14496 - protein, 110 aa, Artificial Sequence
  Synthetic polypeptide
PPSLLVASQPGLPLLPLTLNPSLSAIASARNVLSPALHVAAGSFSFLRLCSSRTSFRRSVQTPAWSPSPAQLALLDRPTKQMREAEERLKAIPQFCFPDAKDWLPVSEYS

SEQ ID NO: 14497 - protein, 115 aa, Artificial Sequence
  Synthetic polypeptide
PPSLLVASQPGLPLLPLTLNPSLSAIASARNVLSPALHVAAGSFSFLRLCSSRTSFRRSVQTPAWSPSPAQLALLDRPTKQMREAEERLKAIPQFCFPDAKDWLPVSEYSPLTPP

SEQ ID NO: 14498 - protein, 222 aa, Artificial Sequence
  Synthetic polypeptide
PPSLLVASQPGLPLLPLTLNPSLSAIASARNVLSPALHVAAGSFSFLRLCSSRTSFRRSVQTPAWSPSPAQLALLDRPTKQMREAEERLKAIPQFCFPDAKDWLPVSEYSSETFSFMLTGEDGSRRFGYCRRLLPSGKGPRLPEVYCVISRLGCFGLFSKVLDEVERRRGISAALVYPFMRSLMESPFPAPGKTIKVKTFLPGAGNEVLELRRPMDSRLEHV

SEQ ID NO: 14499 - protein, 487 aa, Artificial Sequence
  Synthetic polypeptide
PPSLLVASQPGLPLLPLTLNPSLSAIASARNVLSPALHVAAGSFSFLRLCSSRTSFRRSVQTPAWSPSPAQLALLDRPTKQMREAEERLKAIPQFCFPDAKDWLPVSEYSSETFSFMLTGEDGSRRFGYCRRLLPSGKGPRLPEVYCVISRLGCFGLFSKVLDEVERRRGISAALVYPFMRSLMESPFPAPGKTIKVKTFLPGAGNEVLELRRPMDSRLEHVDFECLFTCLSVRQLIRIFASLLLERRVIFVADKLSTLSSCSHAVVALLYPFSWQHTFIPVLPASMIDIVCCPTPFLVGLLSSSLPKLKELPVEEALMVNLGSDRFIRQMDDEDTLLPRKLQAALEQALERKNELISQDSDSDSDDECNTLNGLVSEVFIRFFVETVGHYSLFLTQSEKGERAFQREAFRKSVASKSIRRFLEVFMESQMFAGFIQDRELRKCRAKGLFEQRVEQYLEELPDTEQSGMNKFLRGLGNKMKFLHKKN

SEQ ID NO: 14500 - protein, 78 aa, Artificial Sequence
  Synthetic polypeptide
LGECCYHGSGLVGTGVGSLQKNYFRLFPLSCACFVAFLPSAMRCCSKKTLTRCQRLDIGFSSLQNSRIVSKQSLSICS

SEQ ID NO: 14501 - protein, 63 aa, Artificial Sequence
  Synthetic polypeptide
MLLSWEWVSWHRSGFLTKKLLPPLSSLMCMLCCLSAFCHEMLQQEDPHQVPASRHWIFQPPEL

SEQ ID NO: 14502 - protein, 300 aa, Artificial Sequence
  Synthetic polypeptide
TLDFPASRTLGLCLSRASASVLNLNCSLILLPMCRTLLAYLRGSQKVPSRRTRRLLDKSRTFHITCGVTICIFSGVHVAAHLVNALNFSVNYSEDFVELNAARYRDEDPRKLLFTTVPGLTGVCMVVVLFLMITASTYAIRVSNYDIFWYTHNLFFVFYMLLTLHVSGDDWKPYKLRRLYFIWVCRDIQSFRWFADLLCMLHNKFWQENRPDYVNIQLYLSQTDGIQKIIGEKYHALNSRLFIGRPRWKLLFDEIAKYNRGKTVGVFCCGPNSLSKTLHKLSNQNNSYGTRFEYNKESFS

SEQ ID NO: 14503 - protein, 496 aa, Artificial Sequence
  Synthetic polypeptide
TLDFPASRTLGLCLSRASASVLNLNCSLILLPMCRTLLAYLRGSQKVPSRRTRRLLDKSRTFHITCGVTICIFSGVHVAAHLVNALNFSVNYSEDFVELNAARYRDEDPRKLLFTTVPGLTGVCMVVVLFLMITASTYAIRVSNYDIFWYTHNLFFVFYMLLTLHVSGGLLKYQTNLDTHPPGCISLNRTSSQNISLPEYFSEHFHEPFPEGFSKPAEFTQHKFVKICMEEPRFQANFPQTWLWISGPLCLYCAERLYRYIRSNKPVTIISVMSHPSDVMEIRMVKENFKARPGQYITLHCPSVSALENHPFTLTMCPTETKATFGVHLKIVGDWTERFRDLLLPPSSQDSEILPFIQSRNYPKDDWKPYKLRRLYFIWVCRDIQSFRWFADLLCMLHNKFWQENRPDYVNIQLYLSQTDGIQKIIGEKYHALNSRLFIGRPRWKLLFDEIAKYNRGKTVGVFCCGPNSLSKTLHKLSNQNNSYGTRFEYNKESFS

SEQ ID NO: 14504 - protein, 536 aa, Artificial Sequence
  Synthetic polypeptide
TLDFPASRTLGLCLSRASASVLNLNCSLILLPMCRTLLAYLRGSQKVPSRRTRRLLDKSRTFHITCGVTICIFSGVHVAAHLVNALNFSVNYSEDFVELNAARYRDEDPRKLLFTTVPGLTGVCMVVVLFLMITASTYAIRVSNYDIFWYTHNLFFVFYMLLTLHVSGGLLKYQTNLDTHPPGCISLNRTSSQNISLPEYFSEHFHEPFPEGFSKPAEFTQHKFVKICMEEPRFQANFPQTWLWISGPLCLYCAERLYRYIRSNKPVTIISVMSHPSDVMEIRMVKENFKARPGQYITLHCPSVSALENHPFTLTMCPTETKATFGVHLKIVGDWTERFRDLLLPPSSQDSEILPFIQSRNYPKLYIDGPFGSPFEESLNYEVSLCVAGGIGVTPFASILNTLLDDWKPYKLRRLYFIWVCRDIQSFRWFADLLCMLHNKFWQENRPDYVNIQLYLSQTDGIQKIIGEKYHALNSRLFIGRPRWKLLFDEIAKYNRGKTVGVFCCGPNSLSKTLHKLSNQNNSYGTRFEYNKESFS

SEQ ID NO: 14505 - protein, 182 aa, Artificial Sequence
  Synthetic polypeptide
TLDFPASRTLGLCLSRASASVLNLNCSLILLPMCRTLLAYLRGSQKVPSRRTRRLLDKSRTFHITCGVTICIFSGVHVAAHLVNALNFSVNYSEDFVELNAARYRDEDPRKLLFTTVPGLTGVCMVVVLFLMITASTYAIRVSNYDIFWYTHNLFFVFYMLLTLHVSGVQLKPKQHLGFILK

SEQ ID NO: 14506 - protein, 59 aa, Artificial Sequence; identical to SEQ ID NO: 4743
  Synthetic polypeptide

SEQ ID NO: 14507 - protein, 21 aa, Artificial Sequence
  Synthetic polypeptide
ERRMSKYSRREALLISTRIHL

SEQ ID NO: 14508 - protein, 323 aa, Artificial Sequence; identical to SEQ ID NO: 2406
  Synthetic polypeptide

SEQ ID NO: 14509 - protein, 327 aa, Artificial Sequence
  Synthetic polypeptide
AEIVPLHSSLGNRENVKILQERSIAYINSDSSIEGNYTLRVDCTPLLYQLVYKLTKEIPSPDDGFESKSLYESWLEKDPSPENKNLPRINKLGSGSDFEAYFQRLGIASGRARYTKNKKTDKYSSYPVYHTIYETFELVEKFYDPTFKKQLSVAQLRGALVYELVDSKIIPFNIQDYAEALKNYAASIYNLSKKHDQQLTDHGVSFDSLFSAVKNFSEAASDFHKRLIQVDLNNPIAVRMMNDQLMLLERAFIDPLGLPGKLFYRHIIFAPSSHNKYAGESFPGIYDAIFDIENKANSRLAWKEVKKHISIAAFTIQAAAGTLKEVL

SEQ ID NO: 14510 - protein, 32 aa, Artificial Sequence
  Synthetic polypeptide
PGQQRECQNTPGEKHCLYQLGFIYRRQLYSQS

SEQ ID NO: 14511 - protein, 54 aa, Artificial Sequence
  Synthetic polypeptide
SRVLRRLSQENCLNLGGRGCSELRSCRCILAWATERMSKYSRREALLISTRIHL

SEQ ID NO: 14512 - protein, 35 aa, Artificial Sequence; identical to SEQ ID NO: 6147
  Synthetic polypeptide

SEQ ID NO: 14513 - protein, 2 aa, Artificial Sequence
  Synthetic polypeptide
MW

SEQ ID NO: 14514 - protein, 317 aa, Artificial Sequence; identical to SEQ ID NO: 2454
  Synthetic polypeptide

SEQ ID NO: 14515 - protein, 77 aa, Artificial Sequence
  Synthetic polypeptide
RARWLTPVILALWEAKAGGSPEVRSSRPAGPTWRNPDSTKNTKISQAWWWAPVIPTTQEAEAGELLEPGSWRSRFAL

SEQ ID NO: 14516 - protein, 107 aa, Artificial Sequence
  Synthetic polypeptide
SQLLRRLRQENCLNLGVGGHGSLCEQHMDIWEGHVPCQPLCPVLLTARLSTDTDSHCGGSPPGHHAPLETPDLNHKGCHLHRCHLDHGYVLFTPTCYLPEIIYLQIQ

SEQ ID NO: 14517 - protein, 301 aa, Artificial Sequence
  Synthetic polypeptide
TWELEVTVRFVNSTWIFGKGMCHVSRFAQYCSLHVSALTLTAIAVDRHQVIMHPLKPRISITKGVIYIAVIWTMATFFSLPHAICQKLFTFKYSEDIVRSLCLPDFPEPADLFWKYLDLATFILLYILPLLIISVAYARVAKKLWLCNMIGDVTTEQYFALRRKKKKTIKMLMLVVVLFALCWFPLNCYVLLLSSKVIRTNNALYFAFHWFAMSSTCYNPFIYCWLNENFRIELKALLSMCQRPPKPQEDRPPSPVPSFRVAWTEKNDGQRAPLANNLLPTSQLQSGKTDLSSVEPIVTMS

SEQ ID NO: 14518 - protein, 137 aa, Artificial Sequence
  Synthetic polypeptide
KNNGEDSYICQVKRQCKSKEAEIKRINKELANIRSKFKGDKALDGYSKKKYVCKLLFIFLLGHDIDFGHMEAVNLLSSNRYTEKQIGYLFISVLVNSNSELIRLINNAIKNDLASRNPTFMGLALHCIASVGSREMA

SEQ ID NO: 14519 - protein, 171 aa, Artificial Sequence
  Synthetic polypeptide
KNNGEDSYICQVKRQCKSKEAEIKRINKELANIRSKFKGDKALDGYSKKKYVCKLLFIFLLGHDIDFGHMEAVNLLSSNRYTEKQIGYLFISVLVNSNSELIRLINNAIKNDLASRNPTFMGLALHCIASVGSREMAEAFAGEIPKVLVAGDTMDSVKQSAALCLLRLYRT

SEQ ID NO: 14520 - protein, 188 aa, Artificial Sequence
  Synthetic polypeptide
KNNGEDSYICQVKRQCKSKEAEIKRINKELANIRSKFKGDKALDGYSKKKYVCKLLFIFLLGHDIDFGHMEAVNLLSSNRYTEKQIGYLFISVLVNSNSELIRLINNAIKNDLASRNPTFMGLALHCIASVGSREMAEAFAGEIPKVLVAGDTMDSVKQSAALCLLRLYRTSPDLVPMGDWTSRVVHL

SEQ ID NO: 14521 - protein, 371 aa, Artificial Sequence
  Synthetic polypeptide
KNNGEDSYICQVKRQCKSKEAEIKRINKELANIRSKFKGDKALDGYSKKKYVCKLLFIFLLGHDIDFGHMEAVNLLSSNRYTEKQIGYLFISVLVNSNSELIRLINNAIKNDLASRNPTFMGLALHCIASVGSREMAEAFAGEIPKVLVAGDTMDSVKQSAALCLLRLYRTSPDLVPMGDWTSRVVHLLNDQHLGVVTAATSLITTLAQKNPEEFKTSVSLAVSRLSRIVTSASTDLQDYTYYFVPAPWLSVKLLRLLQCYPPPDPAVRGRLTECLETILNKAQEPPKSKKVQHSNAKNAVLFEAISLIIHHDRCVGCLCTGSRCAQVRKPFLRDYVNCSQRSFSPEDGRPGSCVLCCLRLCRLSSWPSCR

SEQ ID NO: 14522 - protein, 932 aa, Artificial Sequence
  Synthetic polypeptide
KNNGEDSYICQVKRQCKSKEAEIKRINKELANIRSKFKGDKALDGYSKKKYVCKLLFIFLLGHDIDFGHMEAVNLLSSNRYTEKQIGYLFISVLVNSNSELIRLINNAIKNDLASRNPTFMGLALHCIASVGSREMAEAFAGEIPKVLVAGDTMDSVKQSAALCLLRLYRTSPDLVPMGDWTSRVVHLLNDQHLGVVTAATSLITTLAQKNPEEFKTSVSLAVSRLSRIVTSASTDLQDYTYYFVPAPWLSVKLLRLLQCYPPPDPAVRGRLTECLETILNKAQEPPKSKKVQHSNAKNAVLFEAISLIIHHDSEPNLLVRACNQLGQFLQHRETNLRYLALESMCTLASSEFSHEAVKTHIETVINALKTERDVSVRQRAVDLLYAMCDRSNAPQIVAEMLSYLETADYSIREEIVLKVAILAEKYAVDYTWYVDTILNLIRIAGDYVSEEVWYRVIQIVINRDDVQGYAAKTVFEALQAPACHENLVKVGGYILGEFGNLIAGDPRSSPLIQFHLLHSKFHLCSVPTRALLLSTYIKFVNLFPEVKPTIQDVLRSDSQLRNADVELQQRAVEYLRLSTVASTDILATVLEEMPPFPERESSILAKLKKKKGPSTVTDLEDTKRDRSVDVNGGPEPAPASTSAVSTPSPSADLLGLGAAPPAPAGPPPSSGGSGLLVDVFSDSASVVAPLAPGSEDNFARFVCKNNGVLFENQLLQIGLKSEFRQNLGRMFIFYGNKTSTQFLNFTPTLICSDDLQPNLNLQTKPVDPTVEGGAQVQQVVNIECVSDFTEAPVLNIQFRYGGTFQNVSVQLPITLNKFFQPTEMASQDFFQRWKQLSNPQQEVQNIFKAKHPMDTEVTKAKIIGFGSALLEEVDPNPANFVGAGIIHTKTTQIGCLLRLEPNLQAQMYRLTLRTSKEAVSQRLCELLSAQF

SEQ ID NO: 14523 - protein, 933 aa, Artificial Sequence
  Synthetic polypeptide
KNNGEDSYICQVKRQCKSKEAEIKRINKELANIRSKFKGDKALDGYSKKKYVCKLLFIFLLGHDIDFGHMEAVNLLSSNRYTEKQIGYLFISVLVNSNSELIRLINNAIKNDLASRNPTFMGLALHCIASVGSREMAEAFAGEIPKVLVAGDTMDSVKQSAALCLLRLYRTSPDLVPMGDWTSRVVHLLNDQHLGVVTAATSLITTLAQKNPEEFKTSVSLAVSRLSRIVTSASTDLQDYTYYFVPAPWLSVKLLRLLQCYPPPEDPAVRGRLTECLETILNKAQEPPKSKKVQHSNAKNAVLFEAISLIIHHDSEPNLLVRACNQLGQFLQHRETNLRYLALESMCTLASSEFSHEAVKTHIETVINALKTERDVSVRQRAVDLLYAMCDRSNAPQIVAEMLSYLETADYSIREEIVLKVAILAEKYAVDYTWYVDTILNLIRIAGDYVSEEVWYRVIQIVINRDDVQGYAAKTVFEALQAPACHENLVKVGGYILGEFGNLIAGDPRSSPLIQFHLLHSKFHLCSVPTRALLLSTYIKFVNLFPEVKPTIQDVLRSDSQLRNADVELQQRAVEYLRLSTVASTDILATVLEEMPPFPERESSILAKLKKKKGPSTVTDLEDTKRDRSVDVNGGPEPAPASTSAVSTPSPSADLLGLGAAPPAPAGPPPSSGGSGLLVDVFSDSASVVAPLAPGSEDNFARFVCKNNGVLFENQLLQIGLKSEFRQNLGRMFIFYGNKTSTQFLNFTPTLICSDDLQPNLNLQTKPVDPTVEGGAQVQQVVNIECVSDFTEAPVLNIQFRYGGTFQNVSVQLPITLNKFFQPTEMASQDFFQRWKQLSNPQQEVQNIFKAKHPMDTEVTKAKIIGFGSALLEEVDPNPANFVGAGIIHTKTTQIGCLLRLEPNLQAQMYRLTLRTSKEAVSQRLCELLSAQF

SEQ ID NO: 14524 - protein, 649 aa, Artificial Sequence
  Synthetic polypeptide
KNNGEDSYICQVKRQCKSKEAEIKRINKELANIRSKFKGDKALDGYSKKKYVCKLLFIFLLGHDIDFGHMEAVNLLSSNRYTEKQIGYLFISVLVNSNSELIRLINNAIKNDLASRNPTFMGLALHCIASVGSREMAEAFAGEIPKVLVAGDTMDSVKQSAALCLLRLYRTSPDLVPMGDWTSRVVHLLNDQHLGVVTAATSLITTLAQKNPEEFKTSVSLAVSRLSRIVTSASTDLQDYTYYFVPAPWLSVKLLRLLQCYPPPEDPAVRGRLTECLETILNKAQEPPKSKKVQHSNAKNAVLFEAISLIIHHDSEPNLLVRACNQLGQFLQHRETNLRYLALESMCTLASSEFSHEAVKTHIETVINALKTERDVSVRQRAVDLLYAMCDRSNAPQIVAEMLSYLETADYSIREEIVLKVAILAEKYAVDYTWYVDTILNLIRIAGDYVSEEVWYRVIQIVINRDDVQGYAAKTVFEALQAPACHENLVKVGGYILGEFGNLIAGDPRSSPLIQFHLLHSKFHLCSVPTRALLLSTYIKFVNLFPEVKPTIQDVLRSDSQLRNADVELQQRAVEYLRLSTVASTDILATVLEEMPPFPERESSILAKLKKKKGPSTVTDLEDTKRDRSVDVNGGPEPAPASTSAVVCL

SEQ ID NO: 14525 - protein, 3 aa, Artificial Sequence
  Synthetic polypeptide
KTM

SEQ ID NO: 14526 - protein, 25 aa, Artificial Sequence
  Synthetic polypeptide
RNKRTTVKTATYVKLKDNVKVKKQK

SEQ ID NO: 14527 - protein, 13 aa, Artificial Sequence
  Synthetic polypeptide
AILRSFPITCARC

SEQ ID NO: 14528 - protein, 507 aa, Artificial Sequence
  Synthetic polypeptide
AYTYSSFGLSYFKVLSHNLCTVLKVPHDPVALEEHFRDDDEGPVSNQGYMPYLNRFILEKIEYLLKKLTEAMGGGWQQEQFEHYKINFDDSKNGLSAWELIELIGNGQFSKGMDRQTVSMAINEVFNELILDVLKQGYMMKKGHRRKNWTERWFVLKPNIISYYVSEDLKDKKGDILLDENCCVESLPDKDGKKCLFLVKCFDKTFEISASDKKKKQEWIQAIHSTIHLLKLGSPPPHKEARQRRKELRKKQLAEQEELERQMKELQAANESKQQELEAVRKKLEEAASRAAEEEKKRLQTQVELQARFSTELEREKLIRQQMEEQVAQKSSELEQYLQRVRELEDMYLKLQEALEDERQARQDEETVRKLQARLLEEESSKRAELEKWHLEQQQAIQTTEAEKQELENQRVLKEQALQEAMEQLEQLELERKQALEQYEEVKKKLEMATNKTKSWKDKVAHHEGLIRLIEPGSKNPHLITNWGPAAFTEAELEEREKNWKEKKTTE

SEQ ID NO: 14529 - protein, 129 aa, Artificial Sequence
  Synthetic polypeptide
AYTYSSFGLSYFKVLSHNLCTVLKVPHDPVALEEHFRDDDEGPVSNQGYMPYLNRFILEKITKTLPASEPSDMLLPVLSKTTLTRLNSIGCVGPSVSKKTSQRIPCSLQKKMHLKYGLFSTFYLRTSIH

SEQ ID NO: 14530 - protein, 565 aa, Artificial Sequence
  Synthetic polypeptide
AYTYSSFGLSYFKVLSHNLCTVLKVPHDPVALEEHFRDDDEGPVSNQGYMPYLNRFILEKVQDNFDKIEFNRMCWTLCVKKNLTKNPLLITEEDAFKIWVIFNFLSEDKYPLIIVSEEIEYLLKKLTEAMGGGWQQEQFEHYKINFDDSKNGLSAWELIELIGNGQFSKGMDRQTVSMAINEVFNELILDVLKQGYMMKKGHRRKNWTERWFVLKPNIISYYVSEDLKDKKGDILLDENCCVESLPDKDGKKCLFLVKCFDKTFEISASDKKKKQEWIQAIHSTIHLLKLGSPPPHKEARQRRKELRKKQLAEQEELERQMKELQAANESKQQELEAVRKKLEEAASRAAEEEKKRLQTQVELQARFSTELEREKLIRQQMEEQVAQKSSELEQYLQRVRELEDMYLKLQEALEDERQARQDEETVRKLQARLLEEESSKRAELEKWHLEQQQAIQTTEAEKQELENQRVLKEQALQEAMEQLEQLELERKQALEQYEEVKKKLEMATNKTKSWKDKVAHHEGLIRLIEPGSKNPHLITNWGPAAFTEAELEEREKNWKEKKTTE

SEQ ID NO: 14531 - protein, 4 aa, Artificial Sequence
  Synthetic polypeptide
GPFP

SEQ ID NO: 14532 - protein, 54 aa, Artificial Sequence
  Synthetic polypeptide
ILWSKTTLTRLNSIGCVGPSVSKKTSQRIPCSLQKKMHLKYGLFSTFYLRTSIH

SEQ ID NO: 14533 - protein, 62 aa, Artificial Sequence
  Synthetic polypeptide
IVYFKRVNFMVQDNFDKIEFNRMCWTLCVKKNLTKNPLLITEEDAFKIWVIFNFLSEDKYPL

SEQ ID NO: 14534 - protein, 515 aa, Artificial Sequence
  Synthetic polypeptide
IVYFKRVNFMVQDNFDKIEFNRMCWTLCVKKNLTKNPLLITEEDAFKIWVIFNFLSEDKYPLIIVSEEIEYLLKKLTEAMGGGWQQEQFEHYKINFDDSKNGLSAWELIELIGNGQFSKGMDRQTVSMAINEVFNELILDVLKQGYMMKKGHRRKNWTERWFVLKPNIISYYVSEDLKDKKGDILLDENCCVESLPDKDGKKCLFLVKCFDKTFEISASDKKKKQEWIQAIHSTIHLLKLGSPPPHKEARQRRKELRKKQLAEQEELERQMKELQAANESKQQELEAVRKKLEEAASRAAEEEKKRLQTQVELQARFSTELEREKLIRQQMEEQVAQKSSELEQYLQRVRELEDMYLKLQEALEDERQARQDEETVRKLQARLLEEESSKRAELEKWHLEQQQAIQTTEAEKQELENQRVLKEQALQEAMEQLEQLELERKQALEQYEEVKKKLEMATNKTKSWKDKVAHHEGLIRLIEPGSKNPHLITNWGPAAFTEAELEEREKNWKEKKTTE

SEQ ID NO: 14535 - protein, 10 aa, Artificial Sequence
  Synthetic polypeptide
KGEFYGPRQL

SEQ ID NO: 14536 - protein, 26 aa, Artificial Sequence
  Synthetic polypeptide
LSRVCIPSNSYLAHSCWRKSLPRGLN

SEQ ID NO: 14537 - protein, 24 aa, Artificial Sequence
  Synthetic polypeptide
LVVSVFPATRTWHTVVGGRVFQEG

SEQ ID NO: 14538 - protein, 146 aa, Artificial Sequence
  Synthetic polypeptide
SCLYSQQLVPGTQLLEEESSKRAELEKWHLEQQQAIQTTEAEKQELENQRVLKEQALQEAMEQLEQLELERKQALEQYEEVKKKLEMATNKTKSWKDKVAHHEGLIRLIEPGSKNPHLITNWGPAAFTEAELEEREKNWKEKKTTE

SEQ ID NO: 14539 - protein, 38 aa, Artificial Sequence
  Synthetic polypeptide
ATPASLTHEGCEKVWTMGQFLCKNQMILFFQLILMKRR

SEQ ID NO: 14540 - protein, 819 aa, Artificial Sequence
  Synthetic polypeptide
ESVDYGPVFVQEPDDIIFPTDSDEKKVALNCEVRGNPVPSYRWLRNGTEIDLESDYRYSLIDGTFIISNPSEAKDSGHYQCLATNTVGSILSREATLQFAYLGNFSGRTRSAVSVREGQGVVLMCSPPPHSPEIIYSWVFNEFPSFVAEDSRRFISQETGNLYISKVQTSDVGSYICLVKNTVTNARVLSPPTPLTLRNDGVMGEYEPKIEVHFPFTVTAAKGTTVKMECFALGNPVPTITWMKVNGYIPSKARLRKSQAVLEIPNVQLDDAGIYECRAENSRGKNSFRGQLQVYTYPHWVEKLNDTQLDSGSPLRWECKATGKPRPTYRWLKNGVPLSPQSRVEMVNGVLMIHNVNQSDAGMYQCLAENKYGAIYASAELKILASAPTFALNQLKKTIIVTKDQEVVIECKPQGSPKPTISWKKGDRAVRENKRIAILPDGSLRILNASKSDEGKYVCRGENVFGSAEIIASLSVKEPTRIELTPKRTELTVGESIVLNCKAIHDASLDVTFYWTLKGQPIDFEEEGGHFESIRAQASSADLMIRNILLMHAGRYGCRVQTTADSVSDEAELLVRGPPGPPGIVIVEEITESTATLSWSPAADNHSPISSYNLQARSPFSLGWQTVKTVPEIITGDMESAMAVDLNPWVEYEFRVVATNPIGTGDPSTPSRMIRTNEAVPKTAPTNVSGRSGRRHELVIAWEPVSEEFQNGEGFGYIVAFRPNGTRGWKEKMVTSSEASKFIYRDESVPPLTPFEVKVGVYNNKGDGPFSQIVVICSAEGEPSAAPTDVKATSVSVSEILVAWKHIKESLGRPQGFEV

SEQ ID NO: 14541 - protein, 1008 aa, Artificial Sequence
  Synthetic polypeptide
ESVDYGPVFVQEPDDIIFPTDSDEKKVALNCEVRGNPVPSYRWLRNGTEIDLESDYRYSLIDGTFIISNPSEAKDSGHYQCLATNTVGSILSREATLQFAYLGNFSGRTRSAVSVREGQGVVLMCSPPPHSPEIIYSWVFNEFPSFVAEDSRRFISQETGNLYISKVQTSDVGSYICLVKNTVTNARVLSPPTPLTLRNDGVMGEYEPKIEVHFPFTVTAAKGTTVKMECFALGNPVPTITWMKVNGYIPSKARLRKSQAVLEIPNVQLDDAGIYECRAENSRGKNSFRGQLQVYTYPHWVEKLNDTQLDSGSPLRWECKATGKPRPTYRWLKNGVPLSPQSRVEMVNGVLMIHNVNQSDAGMYQCLAENKYGAIYASAELKILASAPTFALNQLKKTIIVTKDQEVVIECKPQGSPKPTISWKKGDRAVRENKRIAILPDGSLRILNASKSDEGKYVCRGENVFGSAEIIASLSVKEPTRIELTPKRTELTVGESIVLNCKAIHDASLDVTFYWTLKGQPIDFEEEGGHFESIRAQASSADLMIRNILLMHAGRYGCRVQTTADSVSDEAELLVRGPPGPPGIVIVEEITESTATLSWSPAADNHSPISSYNLQARSPFSLGWQTVKTVPEIITGDMESAMAVDLNPWVEYEFRVVATNPIGTGDPSTPSRMIRTNEAVPKTAPTNVSGRSGRRHELVIAWEPVSEEFQNGEGFGYIVAFRPNGTRGWKEKMVTSSEASKFIYRDESVPPLTPFEVKVGVYNNKGDGPFSQIVVICSAEGEPSAAPTDVKATSVSVSEILVAWKHIKESLGRPQGFEVGYWKDMEQEDTAETVKTRGNESFVILTGLEGNTLYHFTVRAYNGAGYGPPSSEVSATTKKSPPSQAPSNLRWEQQGSQVSLGWEPVIPLANESEVVGYKVFYRQEGHSNSQVIETQKLQAVVPLPDAGVYIIEVRAYSEGGDGTASSQIRVPSYSGGKITSAQSTLHSLSTSSSSVTLLLALMIPSTSW

SEQ ID NO: 14542 - protein, 19 aa, Artificial Sequence
  Synthetic polypeptide
PTKAVRKCGLWASFCARTR

SEQ ID NO: 14543 - protein, 585 aa, Artificial Sequence
  Synthetic polypeptide
MSRQQDNVTISHLQPKDCLAFCTEPVFASLANVLGNWENLPSPISPDIKDYKLYDVETKYGLLQVSEGLSFLHSSVKMVHGNITPENIILNKSGAWKIMGFDFCVSSTNPSEQEPKFPCKEWDPNLPSLCLPNPEYLAPEYILSVSCETASDMYSLGTVMYAVFNKGKPIFEVNKQDIYKSFSRQLDQLSRLGSSSLTNIPEEVREHVKLLLNVTPTVRPDADQMTKIPFFDDVGAVTLQYFDTLFQRDNLQKSQFFKGLPKVLPKLPKRVIVQRILPCLTSEFVNPDMVPFVLPNVLLIAEECTKEEYVKLILPELGPVFKQQEPIQILLIFLQKMDLLLTKTPPDEIKNSVLPMVYRALEAPSIQIQELCLNIIPTFANLIDYPSMKNALIPRIKNACLQTSSLAVRVNSLVCLGKILEYLDKWFVLDDILPFLQQIPSKEPAVLMGILGIYKCTFTHKKLGITKEQLAGKVLPHLIPLSIENNLNLNQFNSFISVIKEMLNRLESEHKTKLEQLHIMQEQQKSLDIGNQMNVSEEMKVTNIGNQQIDKVFNNIGADLLTGSESENKEDGLQNKHKRASLTLE

SEQ ID NO: 14544 - protein, 833 aa, Artificial Sequence
  Synthetic polypeptide
MSRQQDNVTISHLQPKDCLAFCTEPVFASLANVLGNWENLPSPISPDIKDYKLYDVETKYGLLQVSEGLSFLHSSVKMVHGNITPENIILNKSGAWKIMGFDFCVSSTNPSEQEPKFPCKEWDPNLPSLCLPNPEYLAPEYILSVSCETASDMYSLGTVMYAVFNKGKPIFEVNKQDIYKSFSRQLDQLSRLGSSSLTNIPEEVREHVKLLLNVTPTVRPDADQMTKIPFFDDVGAVTLQYFDTLFQRDNLQKSQFFKGLPKVLPKLPKRVIVQRILPCLTSEFVNPDMVPFVLPNVLLIAEECTKEEYVKLILPELGPVFKQQEPIQILLIFLQKMDLLLTKTPPDEIKNSVLPMVYRALEAPSIQIQELCLNIIPTFANLIDYPSMKNALIPRIKNACLQTSSLAVRVNSLVCLGKILEYLDKWFVLDDILPFLQQIPSKEPAVLMGILGIYKCTFTHKKLGITKEQLAGKVLPHLIPLSIENNLNLNQFNSFISVIKEMLNRLESEHKTKLEQLHIMQEQQKSLDIGNQMNVSEEMKVTNIGNQQIDKVFNNIGADLLTGSESENKEDGLQNKHKRASLTLEEKQKLAKEQEQAQKLKSQQPLKPQVHTPVATVKQTKDLTDTLMDNMSSLTSLSVSTPKSSASSTFTSVPSMGIGMMFSTPTDNTKRNLTNGLNANMGFQTSGFNMPVNTNQNFYSSPSTVGVTKMTLGTPPTLPNFNALSVPPAGAKQTQQRPTDMSALNNLFGPQKPKVSMNQLSQQKPNQWLNQFVPPQGSPTMGSSVMGTQMNVIGQSAFGMQGNPFFNPQNFAQPPTTMTNSSSASNDLKDLFG

SEQ ID NO: 14545 - protein, 21 aa, Artificial Sequence
  Synthetic polypeptide
PFLTFNLRIAWHFVQNQFLPV

SEQ ID NO: 14546 - protein, 25 aa, Artificial Sequence
  Synthetic polypeptide
ALGGRGCDFVNFPTKNGFATNQNPS

SEQ ID NO: 14547 - protein, 284 aa, Artificial Sequence
  Synthetic polypeptide
ARCLPVVPATQEAEVGGSPEPWEVEAAILLIFLQKMDLLLTKTPPDEIKNSVLPMVYRALEAPSIQIQELCLNIIPTFANLIDYPSMKNALIPRIKNACLQTSSLAVRVNSLVCLGKILEYLDKWFVLDDILPFLQQIPSKEPAVLMGILGIYKCTFTHKKLGITKEQLAGKVLPHLIPLSIENNLNLNQFNSFISVIKEMLNRLESEHKTKLEQLHIMQEQQKSLDIGNQMNVSEEMKVTNIGNQQIDKVFNNIGADLLTGSESENKEDGLQNKHKRASLTLE

SEQ ID NO: 14548 - protein, 532 aa, Artificial Sequence
  Synthetic polypeptide
ARCLPVVPATQEAEVGGSPEPWEVEAAILLIFLQKMDLLLTKTPPDEIKNSVLPMVYRALEAPSIQIQELCLNIIPTFANLIDYPSMKNALIPRIKNACLQTSSLAVRVNSLVCLGKILEYLDKWFVLDDILPFLQQIPSKEPAVLMGILGIYKCTFTHKKLGITKEQLAGKVLPHLIPLSIENNLNLNQFNSFISVIKEMLNRLESEHKTKLEQLHIMQEQQKSLDIGNQMNVSEEMKVTNIGNQQIDKVFNNIGADLLTGSESENKEDGLQNKHKRASLTLEEKQKLAKEQEQAQKLKSQQPLKPQVHTPVATVKQTKDLTDTLMDNMSSLTSLSVSTPKSSASSTFTSVPSMGIGMMFSTPTDNTKRNLTNGLNANMGFQTSGFNMPVNTNQNFYSSPSTVGVTKMTLGTPPTLPNFNALSVPPAGAKQTQQRPTDMSALNNLFGPQKPKVSMNQLSQQKPNQWLNQFVPPQGSPTMGSSVMGTQMNVIGQSAFGMQGNPFFNPQNFAQPPTTMTNSSSASNDLKDLFG

SEQ ID NO: 14549 - protein, 82 aa, Artificial Sequence
  Synthetic polypeptide
ARCLPVVPATQEAEVGGSPEPWEVEAAILLIFLQKMDLLLTKTPPDEIKNSVLPMVYRALEAPSIQIQICLLKGEGMLPLSK

SEQ ID NO: 14550 - protein, 40 aa, Artificial Sequence
  Synthetic polypeptide
NPVSSNKYKNKPGACLWSQLLRRLRWEDHLSPGRSRLRFC

SEQ ID NO: 14551 - protein, 185 aa, Artificial Sequence
  Synthetic polypeptide
DQEVEAAVRVNSLVCLGKILEYLDKWFVLDDILPFLQQIPSKEPAVLMGILGIYKCTFTHKKLGITKEQLAGKVLPHLIPLSIENNLNLNQFNSFISVIKEMLNRLESEHKTKLEQLHIMQEQQKSLDIGNQMNVSEEMKVTNIGNQQIDKVFNNIGADLLTGSESENKEDGLQNKHKRASLTLE

SEQ ID NO: 14552 - protein, 433 aa, Artificial Sequence
  Synthetic polypeptide
DQEVEAAVRVNSLVCLGKILEYLDKWFVLDDILPFLQQIPSKEPAVLMGILGIYKCTFTHKKLGITKEQLAGKVLPHLIPLSIENNLNLNQFNSFISVIKEMLNRLESEHKTKLEQLHIMQEQQKSLDIGNQMNVSEEMKVTNIGNQQIDKVFNNIGADLLTGSESENKEDGLQNKHKRASLTLEEKQKLAKEQEQAQKLKSQQPLKPQVHTPVATVKQTKDLTDTLMDNMSSLTSLSVSTPKSSASSTFTSVPSMGIGMMFSTPTDNTKRNLTNGLNANMGFQTSGFNMPVNTNQNFYSSPSTVGVTKMTLGTPPTLPNFNALSVPPAGAKQTQQRPTDMSALNNLFGPQKPKVSMNQLSQQKPNQWLNQFVPPQGSPTMGSSVMGTQMNVIGQSAFGMQGNPFFNPQNFAQPPTTMTNSSSASNDLKDLFG

SEQ ID NO: 14553 - protein, 53 aa, Artificial Sequence
  Synthetic polypeptide
DQEVEAAVRVNSLVCLGKILEYLDKWFVLDDILPFLQQIPSKEPAVLMGILGN

SEQ ID NO: 14554 - protein, 24 aa, Artificial Sequence
  Synthetic polypeptide
KNLAGCGGMVGASLETKRSRLQFV

SEQ ID NO: 14555 - protein, 35 aa, Artificial Sequence
  Synthetic polypeptide
LDVVAWWEHHLRPRGRGCSSCKFISVLRKDFGILG

SEQ ID NO: 14556 - protein, 35 aa, Artificial Sequence
  Synthetic polypeptide
DQEVEAAVSCDCAAPSSLGSCKFISVLRKDFGILG

SEQ ID NO: 14557 - protein, 10 aa, Artificial Sequence
  Synthetic polypeptide
LCCSFQSRFV

SEQ ID NO: 14558 - protein, 46 aa, Artificial Sequence
  Synthetic polypeptide
GWMQWLTPVFPALWEAKVFTNVLLLIRSWESPKSSWPEKCCLILFP

SEQ ID NO: 14559 - protein, 19 aa, Artificial Sequence
  Synthetic polypeptide
HLYSQHFGRPRYLQMYFYS

SEQ ID NO: 14560 - protein, 150 aa, Artificial Sequence
  Synthetic polypeptide
MDAVADTCIPSTLGGQGIYKCTFTHKKLGITKEQLAGKVLPHLIPLSIENNLNLNQFNSFISVIKEMLNRLESEHKTKLEQLHIMQEQQKSLDIGNQMNVSEEMKVTNIGNQQIDKVFNNIGADLLTGSESENKEDGLQNKHKRASLTLE

SEQ ID NO: 14561 - protein, 398 aa, Artificial Sequence
  Synthetic polypeptide
MDAVADTCIPSTLGGQGIYKCTFTHKKLGITKEQLAGKVLPHLIPLSIENNLNLNQFNSFISVIKEMLNRLESEHKTKLEQLHIMQEQQKSLDIGNQMNVSEEMKVTNIGNQQIDKVFNNIGADLLTGSESENKEDGLQNKHKRASLTLEEKQKLAKEQEQAQKLKSQQPLKPQVHTPVATVKQTKDLTDTLMDNMSSLTSLSVSTPKSSASSTFTSVPSMGIGMMFSTPTDNTKRNLTNGLNANMGFQTSGFNMPVNTNQNFYSSPSTVGVTKMTLGTPPTLPNFNALSVPPAGAKQTQQRPTDMSALNNLFGPQKPKVSMNQLSQQKPNQWLNQFVPPQGSPTMGSSVMGTQMNVIGQSAFGMQGNPFFNPQNFAQPPTTMTNSSSASNDLKDLFG

SEQ ID NO: 14562 - protein, 53 aa, Artificial Sequence
  Synthetic polypeptide
EISLHIHQCLKKLLMQIFNSRTPVRWKKSQKLANLGKKHLQLPLMYGVQQPCF

SEQ ID NO: 14563 - protein, 36 aa, Artificial Sequence; identical to SEQ ID NO: 6102
  Synthetic polypeptide

SEQ ID NO: 14564 - protein, 286 aa, Artificial Sequence; identical to SEQ ID NO: 2548
  Synthetic polypeptide

SEQ ID NO: 14565 - protein, 73 aa, Artificial Sequence
  Synthetic polypeptide
FIVYFKIAKREEMYYSQQKEKISLHIHQCLKKLLMQIFNSRTPVRWKKSQKLANLGKKHLQLPLMYGVQQPCF

SEQ ID NO: 14566 - protein, 284 aa, Artificial Sequence
  Synthetic polypeptide
KRRNVLFPTEGKDFFTYSSMSEEVTYADLQFQNSSEMEKIPEIGKFGEKAPPAPSHVWRPAALFLTLLCLLLLIGLGVLASMFHVTLKIEMKKMNKLQNISEELQRNISLQLMSNMNISNKIRNLSTTLQTIATKLCRELYSKEQEHKCKPCPRRWIWHKDSCYFLSDDVQTWQESKMACAAQNASLLKINNKNALEFIKSQSRSYDYWLGLSPEEDSTRGMRVDNIINSSAWVIRNAPDLNNMYCGYINRLYVQYYHCTYKKRMICEKMANPVQLGSTYFREA

SEQ ID NO: 14567 - protein, 22 aa, Artificial Sequence
  Synthetic polypeptide
LKEKKCTIPNRRKRFLYIFINV

SEQ ID NO: 14568 - protein, 79 aa, Artificial Sequence
  Synthetic polypeptide
GRLVESLALGALFWTQLYQTQTWLGLLFTRQLLMVLVVIWWPFRLAGFLPTSIYIAFQENCLMNPKVVTTHLELSLVQE

SEQ ID NO: 14569 - protein, 184 aa, Artificial Sequence
  Synthetic polypeptide
KFSIGGLILDTTVSDPNLVGIVVYTPVINGIGGNLVAIQASRISTYLHLHSIPGELPDEPKGCYYPFRTFFGPGVNNKSAQVLLLLVIPGHLIFLYTIHLMKSGHTSLTIIFIVVYLFGAVLQVFTLLWIADWMVHHFWRKGKDPDSFSIPYLTALGDLLGTALLALSFHFLWLIGDRDGDVGD

SEQ ID NO: 14570 - protein, 664 aa, Artificial Sequence
  Synthetic polypeptide
CPAQRPAHRWYRTRSLLSVFEEDAGTLTDYTNQLLQAMQRVYGAQNEMCLATQQLSKQLLAYEKQNFALGKGDEEVISTLHYFSKVVDELNLLHTELAKQLADTMVLPIIQFREKDLTEVSTLKDLFGLASNDVCLFLEHDLSMAKYSRLPKKKENEKVKTEVGKEVAAARRKQHLSSLQYYCALNALQYRKQMAMMEPMIGFAHGQINFFKKGAEMFSKRMDSFLSSVADMVQSIQVELEAEAEKMRVSQQELLSVDESVYTPDSDVAAPQINRNLIQKAGYLNLRNKTGLVTTTWERLYFFTQGGNLMCQPRGAVAGGLIQDLDNCSVMAVDCEDRRYCFQITTPNGKSGIILQAESRKENEEWICAINNISRQIYLTDNPEAVAIKLNQTALQAVTPITSFGKKQESSCPSQNLKNSEMENENDKIVPKATASLPEAEELIAPGTPIQFDIVLPATEFLDQNRGSRRTNPFGETEDESFPEAEDSLLQQMFIVRFLGSMAVKTDSTTEVIYEAMRQVLAARAIHNIFRMTESHLMVTSQSLRLIDPQTQVSRANFELTSVTQFAAHQENKRLVGFVIRVPESTGEESLSTYIFESNSEGEKICYAINLGKEIIEVQKDPEALAQLMLSIPLTNDGKYVLLNDQPDDDDGNPNEHRGAESEA

SEQ ID NO: 14571 - protein, 229 aa, Artificial Sequence
  Synthetic polypeptide
CPAQRPAHRWYRTRSLLSVFEEDAGTLTDYTNQLLQAMQRVYGAQNEMCLATQQLSKQLLAYEKQNFALGKGDEEVISTLHYFSKVVDELNLLHTELAKQLADTMVLPIIQFREKDLTEVSTLKDLFGLASNEHDLSMAKYSRLPKKKENEKVKTEVGKEVAAARRKQHLSSLQYYCALNALQYRKQMAMMEPMIGFAHGQINFFKKGAEMFSKRMDSFLSSVADMVQR

SEQ ID NO: 14572 - protein, 658 aa, Artificial Sequence
  Synthetic polypeptide
CPAQRPAHRWYRTRSLLSVFEEDAGTLTDYTNQLLQAMQRVYGAQNEMCLATQQLSKQLLAYEKQNFALGKGDEEVISTLHYFSKVVDELNLLHTELAKQLADTMVLPIIQFREKDLTEVSTLKDLFGLASNEHDLSMAKYSRLPKKKENEKVKTEVGKEVAAARRKQHLSSLQYYCALNALQYRKQMAMMEPMIGFAHGQINFFKKGAEMFSKRMDSFLSSVADMVQSIQVELEAEAEKMRVSQQELLSVDESVYTPDSDVAAPQINRNLIQKAGYLNLRNKTGLVTTTWERLYFFTQGGNLMCQPRGAVAGGLIQDLDNCSVMAVDCEDRRYCFQITTPNGKSGIILQAESRKENEEWICAINNISRQIYLTDNPEAVAIKLNQTALQAVTPITSFGKKQESSCPSQNLKNSEMENENDKIVPKATASLPEAEELIAPGTPIQFDIVLPATEFLDQNRGSRRTNPFGETEDESFPEAEDSLLQQMFIVRFLGSMAVKTDSTTEVIYEAMRQVLAARAIHNIFRMTESHLMVTSQSLRLIDPQTQVSRANFELTSVTQFAAHQENKRLVGFVIRVPESTGEESLSTYIFESNSEGEKICYAINLGKEIIEVQKDPEALAQLMLSIPLTNDGKYVLLNDQPDDDDGNPNEHRGAESEA

SEQ ID NO: 14573 - protein, 23 aa, Artificial Sequence
  Synthetic polypeptide
MKSHMFSAQHSVQHIGGTELALY

SEQ ID NO: 14574 - protein, 11 aa, Artificial Sequence
  Synthetic polypeptide
VVQNSLFTERV

SEQ ID NO: 14575 - protein, 12 aa, Artificial Sequence
  Synthetic polypeptide
SNPRDSLFTERV

SEQ ID NO: 14576 - protein, 688 aa, Artificial Sequence
  Synthetic polypeptide
WRPSWGLESKSKDCWSDGWNGKLAGGHPSTLKAIPVTRSLLSVFEEDAGTLTDYTNQLLQAMQRVYGAQNEMCLATQQLSKQLLAYEKQNFALGKGDEEVISTLHYFSKVVDELNLLHTELAKQLADTMVLPIIQFREKDLTEVSTLKDLFGLASNDVCLFLEHDLSMAKYSRLPKKKENEKVKTEVGKEVAAARRKQHLSSLQYYCALNALQYRKQMAMMEPMIGFAHGQINFFKKGAEMFSKRMDSFLSSVADMVQSIQVELEAEAEKMRVSQQELLSVDESVYTPDSDVAAPQINRNLIQKAGYLNLRNKTGLVTTTWERLYFFTQGGNLMCQPRGAVAGGLIQDLDNCSVMAVDCEDRRYCFQITTPNGKSGIILQAESRKENEEWICAINNISRQIYLTDNPEAVAIKLNQTALQAVTPITSFGKKQESSCPSQNLKNSEMENENDKIVPKATASLPEAEELIAPGTPIQFDIVLPATEFLDQNRGSRRTNPFGETEDESFPEAEDSLLQQMFIVRFLGSMAVKTDSTTEVIYEAMRQVLAARAIHNIFRMTESHLMVTSQSLRLIDPQTQVSRANFELTSVTQFAAHQENKRLVGFVIRVPESTGEESLSTYIFESNSEGEKICYAINLGKEIIEVQKDPEALAQLMLSIPLTNDGKYVLLNDQPDDDDGNPNEHRGAESEA

SEQ ID NO: 14577 - protein, 253 aa, Artificial Sequence
  Synthetic polypeptide
WRPSWGLESKSKDCWSDGWNGKLAGGHPSTLKAIPVTRSLLSVFEEDAGTLTDYTNQLLQAMQRVYGAQNEMCLATQQLSKQLLAYEKQNFALGKGDEEVISTLHYFSKVVDELNLLHTELAKQLADTMVLPIIQFREKDLTEVSTLKDLFGLASNEHDLSMAKYSRLPKKKENEKVKTEVGKEVAAARRKQHLSSLQYYCALNALQYRKQMAMMEPMIGFAHGQINFFKKGAEMFSKRMDSFLSSVADMVQR

SEQ ID NO: 14578 - protein, 682 aa, Artificial Sequence
  Synthetic polypeptide
WRPSWGLESKSKDCWSDGWNGKLAGGHPSTLKAIPVTRSLLSVFEEDAGTLTDYTNQLLQAMQRVYGAQNEMCLATQQLSKQLLAYEKQNFALGKGDEEVISTLHYFSKVVDELNLLHTELAKQLADTMVLPIIQFREKDLTEVSTLKDLFGLASNEHDLSMAKYSRLPKKKENEKVKTEVGKEVAAARRKQHLSSLQYYCALNALQYRKQMAMMEPMIGFAHGQINFFKKGAEMFSKRMDSFLSSVADMVQSIQVELEAEAEKMRVSQQELLSVDESVYTPDSDVAAPQINRNLIQKAGYLNLRNKTGLVTTTWERLYFFTQGGNLMCQPRGAVAGGLIQDLDNCSVMAVDCEDRRYCFQITTPNGKSGIILQAESRKENEEWICAINNISRQIYLTDNPEAVAIKLNQTALQAVTPITSFGKKQESSCPSQNLKNSEMENENDKIVPKATASLPEAEELIAPGTPIQFDIVLPATEFLDQNRGSRRTNPFGETEDESFPEAEDSLLQQMFIVRFLGSMAVKTDSTTEVIYEAMRQVLAARAIHNIFRMTESHLMVTSQSLRLIDPQTQVSRANFELTSVTQFAAHQENKRLVGFVIRVPESTGEESLSTYIFESNSEGEKICYAINLGKEIIEVQKDPEALAQLMLSIPLTNDGKYVLLNDQPDDDDGNPNEHRGAESEA

SEQ ID NO: 14579 - protein, 518 aa, Artificial Sequence
  Synthetic polypeptide
IISVSTGTVTCGLDNKCRDFLTSFPESFQMLPRADPFSSFIQHTMRRVVRQSKFRHVFGQAVKNDQCYDDIRVSRVTWDSSFCAVNPRFVAIIIEASGGGAFLVLPLHKTGRIDKSYPTVCGHTGPVLDIDWCPHNDQVIASGSEDCTVMVWQIPENGLTLSLTEPVVILEGHSKRVGIVAWHPTARNVLLSAGCDNAIIIWNVGTGEALINLDDMHSDMIYNVSWNRNGSLICTASKDKKVRVIDPRKQEIVAEKEKAHEGARPMRAIFLADGNVFTTGFSRMSERQLALWNPKNMQEPIALHEMDTSNGVLLPFYDPDTSIIYLCGKGDSSIRYFEITDESPYVHYLNTFSSKEPQRGMGYMPKRGLDVNKCEIARFFKLHERKCEPIIMTVPRKSDLFQDDLYPDTAGPEAALEAEEWFEGKNADPILISLKHGYIPGKNRDLKVVKKNILDSKPTANKKCDLISIPKKTTDTASVQNEAKLDEILKEIKSIKDTICNQDERISKLEQQMAKIAA

SEQ ID NO: 14580 - protein, 38 aa, Artificial Sequence
  Synthetic polypeptide
ILSDAPTCRSILQLHSAHDEASGTTEQVSACIWASGEK

SEQ ID NO: 14581 - protein, 23 aa, Artificial Sequence
  Synthetic polypeptide
LASLNPFRCSHVQIHSPASFSTR

SEQ ID NO: 14582 - protein, 510 aa, Artificial Sequence
  Synthetic polypeptide
DLSQAFIRLQTHERPPTRATQPGCSQIPNPQEIRDTMRRVVRQSKFRHVFGQAVKNDQCYDDIRVSRVTWDSSFCAVNPRFVAIIIEASGGGAFLVLPLHKTGRIDKSYPTVCGHTGPVLDIDWCPHNDQVIASGSEDCTVMVWQIPENGLTLSLTEPVVILEGHSKRVGIVAWHPTARNVLLSAGCDNAIIIWNVGTGEALINLDDMHSDMIYNVSWNRNGSLICTASKDKKVRVIDPRKQEIVAEKEKAHEGARPMRAIFLADGNVFTTGFSRMSERQLALWNPKNMQEPIALHEMDTSNGVLLPFYDPDTSIIYLCGKGDSSIRYFEITDESPYVHYLNTFSSKEPQRGMGYMPKRGLDVNKCEIARFFKLHERKCEPIIMTVPRKSDLFQDDLYPDTAGPEAALEAEEWFEGKNADPILISLKHGYIPGKNRDLKVVKKNILDSKPTANKKCDLISIPKKTTDTASVQNEAKLDEILKEIKSIKDTICNQDERISKLEQQMAKIAA

SEQ ID NO: 14583 - protein, 3 aa, Artificial Sequence
  Synthetic polypeptide
ETR

SEQ ID NO: 14584 - protein, 27 aa, Artificial Sequence
  Synthetic polypeptide
PTGDKRHDEASGTTEQVSACIWASGEK

SEQ ID NO: 14585 - protein, 298 aa, Artificial Sequence
  Synthetic polypeptide
GGGGGGSGGGGGAWAAAAAVAAALRTHMQMTIQALQDELRIQRDLNQLFQQDSSSRTGEPCVAELTEENFQRLHAEHERQAKELFLLRKTLEEMELRIETQKQTLNARDESIKKLLEMLQSKGLSAKATEEDHERTRRLAEAEMHVHHLESLLEQKEKENSMLREEMHRRFENAPDSAKTKALQTVIEMKDSKISSMERGLRDLEEEIQMLKSNGALSTEEREEEMKQMEVYRSHSKFMKNKIGQVKQELSRKDTELLALQTKLETLTNQFSDSKQHIEVLKESLTAKEQRAAILQTE

SEQ ID NO: 14586 - protein, 891 aa, Artificial Sequence
  Synthetic polypeptide
GGGGGGSGGGGGAWAAAAAVAAALRTHMQMTIQALQDELRIQRDLNQLFQQDSSSRTGEPCVAELTEENFQRLHAEHERQAKELFLLRKTLEEMELRIETQKQTLNARDESIKKLLEMLQSKGLSAKATEEDHERTRRLAEAEMHVHHLESLLEQKEKENSMLREEMHRRFENAPDSAKTKALQTVIEMKDSKISSMERGLRDLEEEIQMLKSNGALSTEEREEEMKQMEVYRSHSKFMKNKIGQVKQELSRKDTELLALQTKLETLTNQFSDSKQHIEVLKESLTAKEQRAAILQTEVDALRLRLEEKETMLNKKTKQIQDMAEEKGTQAGEIHDLKDMLDVKERKVNVLQKKIENLQEQLRDKEKQMSSLKERVKSLQADTTNTDTALTTLEEALAEKERTIERLKEQRDRDEREKQEEIDNYKKDLKDLKEKVSLLQGDLSEKEASLLDLKEHASSLASSGLKKDSRLKTLEIALEQKKEECLKMESQLKKAHEAALEARASPEMSDRIQHLEREITRYKDESSKAQAEVDRLLEILKEVENEKNDKDKKIAELERQVKDQNKKVANLKHKEQVEKKKSAQMLEEARRREDNLNDSSQQLQDSLRKKDDRIEELEEALRESVQITAEREMVLAQEESARTNAEKQVEELLMAMEKVKQELESMKAKLSSTQQSLAEKETHLTNLRAERRKHLEEVLEMKQEALLAAISEKDANIALLELSSSKKKTQEEVAALKREKDRLVQQLKQQTQNRMKLMADNYEDDHFKSSHSNQTNHKPSPDQIIQPLLELDQNRSKLKLYIGHLTTLCHDRDPLILRGLTPPASYNLDDDQAAWENELQKMTRGQLQDELEKGERDNAELQEFANAILQQIADHCPDILEQVVNALEESS

SEQ ID NO: 14587 - protein, 795 aa, Artificial Sequence
  Synthetic polypeptide
GGGGGGSGGGGGAWAAAAAVAAALRTHMQMTIQALQDELRIQRDLNQLFQQDSSSRTGEPCVAELTEENFQRLHAEHERQAKELFLLRKTLEEMELRIETQKQTLNARDESIKKLLEMLQSKGLSAKATEEDHERTRRLAEAEMHVHHLESLLEQKEKENSMLREEMHRRFENAPDSAKTKALQTVIEMKDSKISSMERGLRDLEEEIQMLKSNGALSTEEREEEMKQMEVYRSHSKFMKNKIGQVKQELSRKDTELLALQTKLETLTNQFSDSKQHIEVLKESLTAKEQRAAILQTEVDALRLRLEEKETMLNKKTKQIQDMAEEKGTQAGEIHDLKDMLDVKERKVNVLQKKIENLQEQLRDKEKQMSSLKERVKSLQADTTNTDTALTTLEEALAEKERTIERLKEQRDRDEREKQEEIDNYKKDLKDLKEKVSLLQGDLSEKEASLLDLKEHASSLASSGLKKDSRLKTLEIALEQKKEECLKMESQLKKAHEAALEARASPEMSDRIQHLEREITRYKDESSKAQAEVDRLLEILKEVENEKNDKDKKIAELESLTSRQVKDQNKKVANLKHKEQVEKKKSAQMLEEARRREDNLNDSSQQLQDSLRKKDDRIEELEEALRESVQITAEREMVLAQEESARTNAEKQVEELLMAMEKVKQELESMKAKLSSTQQSLAEKETHLTNLRAERRKHLEEVLEMKQEALLAAISEKDANIALLELSSSKKKTQEEVAALKREKDRLVQQLKQQTQNRMKLMADNYEDDHFKSSHSNQTNHKPSPDQDEEEGIWA

SEQ ID NO: 14588 - protein, 751 aa, Artificial Sequence
  Synthetic polypeptide
GGGGGGSGGGGGAWAAAAAVAAALRTHMQMTIQALQDELRIQRDLNQLFQQDSSSRTGEPCVAELTEENFQRLHAEHERQAKELFLLRKTLEEMELRIETQKQTLNARDESIKKLLEMLQSKGLSAKATEEDHERTRRLAEAEMHVHHLESLLEQKEKENSMLREEMHRRFENAPDSAKTKALQTVIEMKDSKISSMERGLRDLEEEIQMLKSNGALSTEEREEEMKQMEVYRSHSKFMKNKIGQVKQELSRKDTELLALQTKLETLTNQFSDSKQHIEVLKESLTAKEQRAAILQTEVDALRLRLEEKETMLNKKTKQIQDMAEEKGTQAGEIHDLKDMLDVKERKVNVLQKKIENLQEQLRDKEKQMSSLKERVKSLQADTTNTDTALTTLEEALAEKERTIERLKEQRDRDEREKQEEIDNYKKDLKDLKEKVSLLQGDLSEKEASLLDLKEHASSLASSGLKKDSRLKTLEIALEQKKEECLKMESQLKKAHEAALEARASPEMSDRIQHLEREITRYKDESSKAQAEVDRLLEILKEVENEKNDKDKKIAELESLTSRQVKDQNKKVANLKHKEQVEKKKSAQMLEEARRREDNLNDSSQQLQVEELLMAMEKVKQELESMKAKLSSTQQSLAEKETHLTNLRAERRKHLEEVLEMKQEALLAAISEKDANIALLELSSSKKKTQEEVAALKREKDRLVQQLKQQTQNRMKLMADNYEDDHFKSSHSNQTNHKPSPDQDEEEGIWA

SEQ ID NO: 14589 - protein, 919 aa, Artificial Sequence
  Synthetic polypeptide
GGGGGGSGGGGGAWAAAAAVAAALRTHMQMTIQALQDELRIQRDLNQLFQQDSSSRTGEPCVAELTEENFQRLHAEHERQAKELFLLRKTLEEMELRIETQKQTLNARDESIKKLLEMLQSKGLSAKATEEDHERTRRLAEAEMHVHHLESLLEQKEKENSMLREEMHRRFENAPDSAKTKALQTVIEMKDSKISSMERGLRDLEEEIQMLKSNGALSTEEREEEMKQMEVYRSHSKFMKNKVEQLKEELSSKEAQWEELKKKAAGLQAEIGQVKQELSRKDTELLALQTKLETLTNQFSDSKQHIEVLKESLTAKEQRAAILQTEVDALRLRLEEKETMLNKKTKQIQDMAEEKGTQAGEIHDLKDMLDVKERKVNVLQKKIENLQEQLRDKEKQMSSLKERVKSLQADTTNTDTALTTLEEALAEKERTIERLKEQRDRDEREKQEEIDNYKKDLKDLKEKVSLLQGDLSEKEASLLDLKEHASSLASSGLKKDSRLKTLEIALEQKKEECLKMESQLKKAHEAALEARASPEMSDRIQHLEREITRYKDESSKAQAEVDRLLEILKEVENEKNDKDKKIAELERQVKDQNKKVANLKHKEQVEKKKSAQMLEEARRREDNLNDSSQQLQDSLRKKDDRIEELEEALRESVQITAEREMVLAQEESARTNAEKQVEELLMAMEKVKQELESMKAKLSSTQQSLAEKETHLTNLRAERRKHLEEVLEMKQEALLAAISEKDANIALLELSSSKKKTQEEVAALKREKDRLVQQLKQQTQNRMKLMADNYEDDHFKSSHSNQTNHKPSPDQIIQPLLELDQNRSKLKLYIGHLTTLCHDRDPLILRGLTPPASYNLDDDQAAWENELQKMTRGQLQDELEKGERDNAELQEFANAILQQIADHCPDILEQVVNALEESS

SEQ ID NO: 14590 - protein, 889 aa, Artificial Sequence
  Synthetic polypeptide
GGGGGGSGGGGGAWAAAAAVAAALRTHMQMTIQALQDELRIQRDLNQLFQQDSSSRTGEPCVAELTEENFQRLHAEHERQAKELFLLRKTLEEMELRIETQKQTLNARDESIKKLLEMLQSKGLSAKATEEDHERTRRLAEAEMHVHHLESLLEQKEKENSMLREEMHRRFENAPDSAKTKALQTVIEMKDSKISSMERGLRDLEEEIQMLKSNGALSTEEREEEMKQMEVYRSHSKFMKNKVEQLKEELSSKEAQWEELKKKAAGLQAEIGQVKQELSRKDTELLALQTKLETLTNQFSDSKQHIEVLKESLTAKEQRAAILQTEVDALRLRLEEKETMLNKKTKQIQDMAEEKGTQAGEIHDLKDMLDVKERKVNVLQKKIENLQEQLRDKEKQMSSLKERVKSLQADTTNTDTALTTLEEALAEKERTIERLKEQRDRDEREKQEEIDNYKKDLKDLKEKVSLLQGDLSEKEASLLDLKEHASSLASSGLKKDSRLKTLEIALEQKKEECLKMESQLKKAHEAALEARASPEMSDRIQHLEREITRYKDESSKAQAEVDRLLEILKEVENEKNDKDKKIAELERQVKDQNKKVANLKHKEQVEKKKSAQMLEEARRREDNLNDSSQQLQDSLRKKDDRIEELEEALRESVQITAEREMVLAQEESARTNAEKQVEELLMAMEKVKQELESMKAKLSSTQQSLAEKETHLTNLRAERRKHLEEVLEMKQEALLAAISEKDANIALLELSSSKKKTQEEVAALKREKDRLVQQLKQQTQNRMKLMADNYEDDHFKSSHSNQTNHKPSPDQIIQPLLELDQNRSKLKLYIGHLTTLCHDRDPLILRGLTPPASYNLDDDQAAWENELQKMTRGQNPLHPKAMEKLPFFM

SEQ ID NO: 14591 - protein, 923 aa, Artificial Sequence
  Synthetic polypeptide
GGGGGGSGGGGGAWAAAAAVAAALRTHMQMTIQALQDELRIQRDLNQLFQQDSSSRTGEPCVAELTEENFQRLHAEHERQAKELFLLRKTLEEMELRIETQKQTLNARDESIKKLLEMLQSKGLSAKATEEDHERTRRLAEAEMHVHHLESLLEQKEKENSMLREEMHRRFENAPDSAKTKALQTVIEMKDSKISSMERGLRDLEEEIQMLKSNGALSTEEREEEMKQMEVYRSHSKFMKNKVEQLKEELSSKEAQWEELKKKAAGLQAEIGQVKQELSRKDTELLALQTKLETLTNQFSDSKQHIEVLKESLTAKEQRAAILQTEVDALRLRLEEKETMLNKKTKQIQDMAEEKGTQAGEIHDLKDMLDVKERKVNVLQKKIENLQEQLRDKEKQMSSLKERVKSLQADTTNTDTALTTLEEALAEKERTIERLKEQRDRDEREKQEEIDNYKKDLKDLKEKVSLLQGDLSEKEASLLDLKEHASSLASSGLKKDSRLKTLEIALEQKKEECLKMESQLKKAHEAALEARASPEMSDRIQHLEREITRYKDESSKAQAEVDRLLEILKEVENEKNDKDKKIAELESLTSRQVKDQNKKVANLKHKEQVEKKKSAQMLEEARRREDNLNDSSQQLQDSLRKKDDRIEELEEALRESVQITAEREMVLAQEESARTNAEKQVEELLMAMEKVKQELESMKAKLSSTQQSLAEKETHLTNLRAERRKHLEEVLEMKQEALLAAISEKDANIALLELSSSKKKTQEEVAALKREKDRLVQQLKQQTQNRMKLMADNYEDDHFKSSHSNQTNHKPSPDQIIQPLLELDQNRSKLKLYIGHLTTLCHDRDPLILRGLTPPASYNLDDDQAAWENELQKMTRGQLQDELEKGERDNAELQEFANAILQQIADHCPDILEQVVNALEESS

SEQ ID NO: 14592 - protein, 779 aa, Artificial Sequence
  Synthetic polypeptide
GGGGGGSGGGGGAWAAAAAVAAALRTHMQMTIQALQDELRIQRDLNQLFQQDSSSRTGEPCVAELTEENFQRLHAEHERQAKELFLLRKTLEEMELRIETQKQTLNARDESIKKLLEMLQSKGLSAKATEEDHERTRRLAEAEMHVHHLESLLEQKEKENSMLREEMHRRFENAPDSAKTKALQTVIEMKDSKISSMERGLRDLEEEIQMLKSNGALSTEEREEEMKQMEVYRSHSKFMKNKVEQLKEELSSKEAQWEELKKKAAGLQAEIGQVKQELSRKDTELLALQTKLETLTNQFSDSKQHIEVLKESLTAKEQRAAILQTEVDALRLRLEEKETMLNKKTKQIQDMAEEKGTQAGEIHDLKDMLDVKERKVNVLQKKIENLQEQLRDKEKQMSSLKERVKSLQADTTNTDTALTTLEEALAEKERTIERLKEQRDRDEREKQEEIDNYKKDLKDLKEKVSLLQGDLSEKEASLLDLKEHASSLASSGLKKDSRLKTLEIALEQKKEECLKMESQLKKAHEAALEARASPEMSDRIQHLEREITRYKDESSKAQAEVDRLLEILKEVENEKNDKDKKIAELESLTSRQVKDQNKKVANLKHKEQVEKKKSAQMLEEARRREDNLNDSSQQLQVEELLMAMEKVKQELESMKAKLSSTQQSLAEKETHLTNLRAERRKHLEEVLEMKQEALLAAISEKDANIALLELSSSKKKTQEEVAALKREKDRLVQQLKQQTQNRMKLMADNYEDDHFKSSHSNQTNHKPSPDQDEEEGIWA

SEQ ID NO: 14593 - protein, 5 aa, Artificial Sequence
  Synthetic polypeptide
GRTCR

SEQ ID NO: 14594 - protein, 30 aa, Artificial Sequence
  Synthetic polypeptide
WRRRRCLGGSSSSSGSPEDAHADDNPGSPG

SEQ ID NO: 14595 - protein, 37 aa, Artificial Sequence
  Synthetic polypeptide
ECPLVWCCDKCGDPHKALRKEPGRSNLSAHHPAGGDG

SEQ ID NO: 14596 - protein, 16 aa, Artificial Sequence
  Synthetic polypeptide
EGAWEKQSFSTSSGGR

SEQ ID NO: 14597 - protein, 231 aa, Artificial Sequence
  Synthetic polypeptide
RQEHLSKPWRYHFPVCDLRHLISLFCASVSLSVKWGYKSVLWCGVVTNAVIHIRLLGRSLGEAIFQHIIRREVTDEDTRHLSRKFKDWAYGPVYSSLYDLSSLDTCGEEASVLEILVYNSKIENRHEMLAVEPINELLRDKWRKFGAVSFYINVVSYLCAMVIFTLTAYYQPLEGTPPYPYRTTVDYLRLAGEVITLFTGVLFFFTNIKDLFMKKCPGVNSLFIDGSFQLL

SEQ ID NO: 14598 - protein, 550 aa, Artificial Sequence
  Synthetic polypeptide
RQEHLSKPWRYHFPVCDLRHLISLFCASVSLSVKWGYKSVLWCGVVTNAVIHIRLLGRSLGEAIFQHIIRREVTDEDTRHLSRKFKDWAYGPVYSSLYDLSSLDTCGEEASVLEILVYNSKIENRHEMLAVEPINELLRDKWRKFGAVSFYINVVSYLCAMVIFTLTAYYQPLEGTPPYPYRTTVDYLRLAGEVITLFTGVLFFFTNIKDLFMKKCPGVNSLFIDGSFQLLYFIYSVLVIVSAALYLAGIEAYLAVMVFALVLGWMNALYFTRGLKLTGTYSIMIQKILFKDLFRFLLVYLLFMIGYASALVSLLNPCANMKVCNEDQTNCTVPTYPSCRDSETFSTFLLDLFKLTIGMGDLEMLSSTKYPVVFIILLVTYIILTFVLLLNMLIALMGETVGQVSKESKHIWKLQWATTILDIERSFPVFLRKAFRSGEMVTVGKSSDGTPDRRWCFRVDEVNWSHWNQNLGIINEDPGKNETYQYYGFSHTVGRLRRDRWSSVVPRVVELNKNSNPDEVVVPLDSMGNPRCDGHQQGYPRKWRTDDAPL

SEQ ID NO: 14599 - protein, 47 aa, Artificial Sequence
  Synthetic polypeptide
DCSLLSRLQLYPYIAQAIPLSRSQLLHLQDERWRSRRCRPTGAASSA

SEQ ID NO: 14600 - protein, 89 aa, Artificial Sequence
  Synthetic polypeptide
EDSFWVRGIGAWSETALCFQGSSCIPTLLRQFLSLGLSFFICKMKDGAPDAAVLLVQPAAPESAASTTARAGGPASAAVGAEQPLLQDV

SEQ ID NO: 14601 - protein, 175 aa, Artificial Sequence
  Synthetic polypeptide
KMALPTLPSYWCSQQRLNQQLARQREQEARLRQQWEQNSRYFRMSDICSSKQAEWSSKTSYQRSMHAYQREKMKEEKRRSLEARREKLRQLMQEEQDLLARELEELRLSMNLQERRIREQHGKLKSAKEEQRKLIAEQLLYEHWKKNNPKLREMELDLHQKHVVNSWEMQKEEKK

SEQ ID NO: 14602 - protein, 499 aa, Artificial Sequence
  Synthetic polypeptide
KMALPTLPSYWCSQQRLNQQLARQREQEARLRQQWEQNSRYFRMSDICSSKQAEWSSKTSYQRSMHAYQREKMKEEKRRSLEARREKLRQLMQEEQDLLARELEELRLSMNLQERRIREQHGKLKSAKEEQRKLIAEQLLYEHWKKNNPKLREMELDLHQKHVVNSWEMQKEEKKQQEATAEQENKRYENEYERARREALERMKAEEERRQLEDKLQAEALLQQMEELKLKEVEATKLKKEQENLLKQRWELERLEEERKQMEAFRQKAELGRFLRHQYNAQLSRRTQQIQEELEADRRILQALLEKEDESQRLHLARREQVMADVAWMKQAIEEQLQLERAREAELQMLLREEAKEMWEKREAEWARERSARDRLMSEVLTGRQQQIQEKIEQNRRAQEESLKHREQLIRNLEEVRELARREKEESEKLKSARKQELEAQVAERRLQAWEADQQEEEEEEEARRVEQLSDALLQQEAETMAEQGYRPKPYGHPKIAWN

SEQ ID NO: 14603 - protein, 20 aa, Artificial Sequence
  Synthetic polypeptide
FTSSTWRSRRCRPTGAASSA

SEQ ID NO: 14604 - protein, 179 aa, Artificial Sequence
  Synthetic polypeptide
LYLFNMALPTLPSYWCSQQRLNQQLARQREQEARLRQQWEQNSRYFRMSDICSSKQAEWSSKTSYQRSMHAYQREKMKEEKRRSLEARREKLRQLMQEEQDLLARELEELRLSMNLQERRIREQHGKLKSAKEEQRKLIAEQLLYEHWKKNNPKLREMELDLHQKHVVNSWEMQKEEKK

SEQ ID NO: 14605 - protein, 503 aa, Artificial Sequence
  Synthetic polypeptide
LYLFNMALPTLPSYWCSQQRLNQQLARQREQEARLRQQWEQNSRYFRMSDICSSKQAEWSSKTSYQRSMHAYQREKMKEEKRRSLEARREKLRQLMQEEQDLLARELEELRLSMNLQERRIREQHGKLKSAKEEQRKLIAEQLLYEHWKKNNPKLREMELDLHQKHVVNSWEMQKEEKKQQEATAEQENKRYENEYERARREALERMKAEEERRQLEDKLQAEALLQQMEELKLKEVEATKLKKEQENLLKQRWELERLEEERKQMEAFRQKAELGRFLRHQYNAQLSRRTQQIQEELEADRRILQALLEKEDESQRLHLARREQVMADVAWMKQAIEEQLQLERAREAELQMLLREEAKEMWEKREAEWARERSARDRLMSEVLTGRQQQIQEKIEQNRRAQEESLKHREQLIRNLEEVRELARREKEESEKLKSARKQELEAQVAERRLQAWEADQQEEEEEEEARRVEQLSDALLQQEAETMAEQGYRPKPYGHPKIAWN

SEQ ID NO: 14606 - protein, 49 aa, Artificial Sequence
  Synthetic polypeptide
TLPLQHGAPDAAVLLVQPAAPESAASTTARAGGPASAAVGAEQPLLQDV

SEQ ID NO: 14607 - protein, 5 aa, Artificial Sequence
  Synthetic polypeptide
CALGF

SEQ ID NO: 14608 - protein, 471 aa, Artificial Sequence
  Synthetic polypeptide
NPVSTKIQKLAGHDVPLVSRICPNDVCRIWKSGAKLRVDITLLGFENMSWIRGRRSFIFKGEDNWAELMEVNHDDKVVTTERFDLSQEMERLTLDLMKPKSREVERRLTSPVINTSLDTKNIAFERTKSGFWGWRTDKAEVVNGYEAKVYTVNNVNVITKIRTEHLTEEEKKRYKADRNPLESLLGTVEHQFGAQGDLTTECATANNPTAITPDEYFNEEFDLKDRDIGRPKELTIRTQKFKAMLWMCEEFPLSLVEQVIPIIDLMARTSAHFARLRDFIKLEFPPGFPVKIEIPLFHVLNARITFGNVNGCSTAEESVSQNVEGTQADSASHITNFEVDQSVFEIPESYYVQDNGRNVHLQDEDYEIMQFAIQQSLLESSRSQELSGPASNGGISQTNTYDAQYERAIQESLLTSTEGLCPSALSETSRFDNDLQLAMELSAKELEEWELRLQEEEAELQQVLQLSLTDK

SEQ ID NO: 14609 - protein, 142 aa, Artificial Sequence
  Synthetic polypeptide
NPVSTKIQKLAGHDVPLVSRICPNDVCRIWKSGAKLRVDITLLGFENMSWIRGRRSFIFKGEDNWAELMEVNHDDKVVTTERFDLSQEMERLTLDLMKPKSREVERRLTSPVINTSLDTKNIAFERVFRVLKLTLLQLTVCS

SEQ ID NO: 14610 - protein, 37 aa, Artificial Sequence
  Synthetic polypeptide
PGMMCPWFLEYAQMMSVASGKVVPNCASISHCWDLKT

SEQ ID NO: 14611 - protein, 311 aa, Artificial Sequence
  Synthetic polypeptide
MSYDVEAFRMAPAVCADRNPLESLLGTVEHQFGAQGDLTTECATANNPTAITPDEYFNEEFDLKDRDIGRPKELTIRTQKFKAMLWMCEEFPLSLVEQVIPIIDLMARTSAHFARLRDFIKLEFPPGFPVKIEIPLFHVLNARITFGNVNGCSTAEESVSQNVEGTQADSASHITNFEVDQSVFEIPESYYVQDNGRNVHLQDEDYEIMQFAIQQSLLESSRSQELSGPASNGGISQTNTYDAQYERAIQESLLTSTEGLCPSALSETSRFDNDLQLAMELSAKELEEWELRLQEEEAELQQVLQLSLTDK

SEQ ID NO: 14612 - protein, 44 aa, Artificial Sequence
  Synthetic polypeptide
NGACSMCRQEPAGIFAGNCGTPIWCTRGPHHGMCYCKQPHSHHA

SEQ ID NO: 14613 - protein, 61 aa, Artificial Sequence
  Synthetic polypeptide
VTTWKPLEWRLQYVQTGTRWNLCWELWNTNLVHKGTSPRNVLLQTTPQPSRLMSTSMKSLI

SEQ ID NO: 14614 - protein, 64 aa, Artificial Sequence
  Synthetic polypeptide
ASGDPSTGQQHPFITAETWKRPKCPEMLPTSQTLRLINLCLKFPNLTMFKTMAEMCICKMKITR

SEQ ID NO: 14615 - protein, 91 aa, Artificial Sequence
  Synthetic polypeptide
MCTLKKVMHMSIWRPQYWAAASIHNSRNLETTQMSRDASHITNFEVDQSVFEIPESYYVQDNGRNVHLQDEDYEIMQFAIQQILQLSLTDK

SEQ ID NO: 14616 - protein, 178 aa, Artificial Sequence
  Synthetic polypeptide
MCTLKKVMHMSIWRPQYWAAASIHNSRNLETTQMSRDASHITNFEVDQSVFEIPESYYVQDNGRNVHLQDEDYEIMQFAIQQSLLESSRSQELSGPASNGGISQTNTYDAQYERAIQESLLTSTEGLCPSALSETSRFDNDLQLAMELSAKELEEWELRLQEEEAELQQVLQLSLTDK

SEQ ID NO: 14617 - protein, 19 aa, Artificial Sequence
  Synthetic polypeptide
QQKPGNDPNVPRCFPHHKL

SEQ ID NO: 14618 - protein, 57 aa, Artificial Sequence
  Synthetic polypeptide
GQERWLTPIIPAFWEAEAGGSRGQKIETILANTGHPGEPPHQHRRPVPQRPERDKPF

SEQ ID NO: 14619 - protein, 19 aa, Artificial Sequence
  Synthetic polypeptide
HGPSRRASSPAQKACAPAP

SEQ ID NO: 14620 - protein, 88 aa, Artificial Sequence
  Synthetic polypeptide
SQHFGRPRQADHEVRRLRPSWLTRAIQESLLTSTEGLCPSALSETSRFDNDLQLAMELSAKELEEWELRLQEEEAELQQVLQLSLTDK

SEQ ID NO: 14621 - protein, 40 aa, Artificial Sequence
  Synthetic polypeptide
AQELKTSLGNMKWQDILKEVKFLRQLKHPNTIEYKGCYLK

SEQ ID NO: 14622 - protein, 83 aa, Artificial Sequence
  Synthetic polypeptide
AQELKTSLGNMKWQDILKEVKFLRQLKHPNTIEYKGCYLKEHTAWLVMEYCLGSASDLLEVHKKPLQEVEIAAITHGALHGLA

SEQ ID NO: 14623 - protein, 845 aa, Artificial Sequence
  Synthetic polypeptide
AQELKTSLGNMKWQDILKEVKFLRQLKHPNTIEYKGCYLKEHTAWLVMEYCLGSASDLLEVHKKPLQEVEIAAITHGALHGLAYLHSHALIHRDIKAGNILLTEPGQVKLADFGSASMASPANSFVGTPYWMAPEVILAMDEGQYDGKVDIWSLGITCIELAERKPPLFNMNAMSALYHIAQNDSPTLQSNEWTDSFRRFVDYCLQKIPQERPTSAELLRHDFVRRDRPLRVLIDLIQRTKDAVRELDNLQYRKMKKILFQETRNGPLNESQEDEEDSEHGTSLNREMDSLGSNHSIPSMSVSTGSQSSSVNSMQEVMDESSSELVMMHDDESTINSSSSVVHKKDHVFIRDEAGHGDPRPEPRPTQSVQSQALHYRNRERFATIKSASLVTRQIHEHEQENELREQMSGYKRMRRQHQKQLIALENKLKAEMDEHRLKLQKEVETHANNSSIELEKLAKKQVAIIEKEAKVAAADEKKFQQQILAQQKKDLTTFLESQKKQYKICKEKIKEEMNEDHSTPKKEKQERISKHKENLQHTQAEEEAHLLTQQRLYYDKNCRFFKRKIMIKRHEVEQQNIREELNKKRTQKEMEHAMLIRHDESTRELEYRQLHTLQKLRMDLIRLQHQTELENQLEYNKRRERELHRKHVMELRQQPKNLKAMEMQIKKQFQDTCKVQTKQYKALKNHQLEVTPKNEHKTILKTLKDEQTRKLAILAEQYEQSINEMMASQALRLDEAQEAECQALRLQLQQEMELLNAYQSKIKMQTEAQHERELQKLEQRVSLRRAHLEQKIEEELAALQKERSERIKNLLERQEREIETFDMESLRMGFGNLVTLDFPKEDYR

SEQ ID NO: 14624 - protein, 30 aa, Artificial Sequence
  Synthetic polypeptide
SQHFGKPRLEDRLSPGAQDKPGQYEMARYS

SEQ ID NO: 14625 - protein, 29 aa, Artificial Sequence
  Synthetic polypeptide
EVPFASYRDSEASSAMWNSHADDNPGSPG

SEQ ID NO: 14626 - protein, 11 aa, Artificial Sequence
  Synthetic polypeptide
GFLSHVELTCR

SEQ ID NO: 14627 - protein, 311 aa, Artificial Sequence
  Synthetic polypeptide
WVYQGVPLLLLPDFLLLPPCKKCLLPHTVILRLPQPCGTHMQMTIQALQDELRIQRDLNQLFQQDSSSRTGEPCVAELTEENFQRLHAEHERQAKELFLLRKTLEEMELRIETQKQTLNARDESIKKLLEMLQSKGLSAKATEEDHERTRRLAEAEMHVHHLESLLEQKEKENSMLREEMHRRFENAPDSAKTKALQTVIEMKDSKISSMERGLRDLEEEIQMLKSNGALSTEEREEEMKQMEVYRSHSKFMKNKIGQVKQELSRKDTELLALQTKLETLTNQFSDSKQHIEVLKESLTAKEQRAAILQTE

SEQ ID NO: 14628 - protein, 904 aa, Artificial Sequence
  Synthetic polypeptide
WVYQGVPLLLLPDFLLLPPCKKCLLPHTVILRLPQPCGTHMQMTIQALQDELRIQRDLNQLFQQDSSSRTGEPCVAELTEENFQRLHAEHERQAKELFLLRKTLEEMELRIETQKQTLNARDESIKKLLEMLQSKGLSAKATEEDHERTRRLAEAEMHVHHLESLLEQKEKENSMLREEMHRRFENAPDSAKTKALQTVIEMKDSKISSMERGLRDLEEEIQMLKSNGALSTEEREEEMKQMEVYRSHSKFMKNKIGQVKQELSRKDTELLALQTKLETLTNQFSDSKQHIEVLKESLTAKEQRAAILQTEVDALRLRLEEKETMLNKKTKQIQDMAEEKGTQAGEIHDLKDMLDVKERKVNVLQKKIENLQEQLRDKEKQMSSLKERVKSLQADTTNTDTALTTLEEALAEKERTIERLKEQRDRDEREKQEEIDNYKKDLKDLKEKVSLLQGDLSEKEASLLDLKEHASSLASSGLKKDSRLKTLEIALEQKKEECLKMESQLKKAHEAALEARASPEMSDRIQHLEREITRYKDESSKAQAEVDRLLEILKEVENEKNDKDKKIAELERQVKDQNKKVANLKHKEQVEKKKSAQMLEEARRREDNLNDSSQQLQDSLRKKDDRIEELEEALRESVQITAEREMVLAQEESARTNAEKQVEELLMAMEKVKQELESMKAKLSSTQQSLAEKETHLTNLRAERRKHLEEVLEMKQEALLAAISEKDANIALLELSSSKKKTQEEVAALKREKDRLVQQLKQQTQNRMKLMADNYEDDHFKSSHSNQTNHKPSPDQIIQPLLELDQNRSKLKLYIGHLTTLCHDRDPLILRGLTPPASYNLDDDQAAWENELQKMTRGQLQDELEKGERDNAELQEFANAILQQIADHCPDILEQVVNALEESS

SEQ ID NO: 14629 - protein, 808 aa, Artificial Sequence
  Synthetic polypeptide
WVYQGVPLLLLPDFLLLPPCKKCLLPHTVILRLPQPCGTHMQMTIQALQDELRIQRDLNQLFQQDSSSRTGEPCVAELTEENFQRLHAEHERQAKELFLLRKTLEEMELRIETQKQTLNARDESIKKLLEMLQSKGLSAKATEEDHERTRRLAEAEMHVHHLESLLEQKEKENSMLREEMHRRFENAPDSAKTKALQTVIEMKDSKISSMERGLRDLEEEIQMLKSNGALSTEEREEEMKQMEVYRSHSKFMKNKIGQVKQELSRKDTELLALQTKLETLTNQFSDSKQHIEVLKESLTAKEQRAAILQTEVDALRLRLEEKETMLNKKTKQIQDMAEEKGTQAGEIHDLKDMLDVKERKVNVLQKKIENLQEQLRDKEKQMSSLKERVKSLQADTTNTDTALTTLEEALAEKERTIERLKEQRDRDEREKQEEIDNYKKDLKDLKEKVSLLQGDLSEKEASLLDLKEHASSLASSGLKKDSRLKTLEIALEQKKEECLKMESQLKKAHEAALEARASPEMSDRIQHLEREITRYKDESSKAQAEVDRLLEILKEVENEKNDKDKKIAELESLTSRQVKDQNKKVANLKHKEQVEKKKSAQMLEEARRREDNLNDSSQQLQDSLRKKDDRIEELEEALRESVQITAEREMVLAQEESARTNAEKQVEELLMAMEKVKQELESMKAKLSSTQQSLAEKETHLTNLRAERRKHLEEVLEMKQEALLAAISEKDANIALLELSSSKKKTQEEVAALKREKDRLVQQLKQQTQNRMKLMADNYEDDHFKSSHSNQTNHKPSPDQDEEEGIWA

SEQ ID NO: 14630 - protein, 764 aa, Artificial Sequence
  Synthetic polypeptide
WVYQGVPLLLLPDFLLLPPCKKCLLPHTVILRLPQPCGTHMQMTIQALQDELRIQRDLNQLFQQDSSSRTGEPCVAELTEENFQRLHAEHERQAKELFLLRKTLEEMELRIETQKQTLNARDESIKKLLEMLQSKGLSAKATEEDHERTRRLAEAEMHVHHLESLLEQKEKENSMLREEMHRRFENAPDSAKTKALQTVIEMKDSKISSMERGLRDLEEEIQMLKSNGALSTEEREEEMKQMEVYRSHSKFMKNKIGQVKQELSRKDTELLALQTKLETLTNQFSDSKQHIEVLKESLTAKEQRAAILQTEVDALRLRLEEKETMLNKKTKQIQDMAEEKGTQAGEIHDLKDMLDVKERKVNVLQKKIENLQEQLRDKEKQMSSLKERVKSLQADTTNTDTALTTLEEALAEKERTIERLKEQRDRDEREKQEEIDNYKKDLKDLKEKVSLLQGDLSEKEASLLDLKEHASSLASSGLKKDSRLKTLEIALEQKKEECLKMESQLKKAHEAALEARASPEMSDRIQHLEREITRYKDESSKAQAEVDRLLEILKEVENEKNDKDKKIAELESLTSRQVKDQNKKVANLKHKEQVEKKKSAQMLEEARRREDNLNDSSQQLQVEELLMAMEKVKQELESMKAKLSSTQQSLAEKETHLTNLRAERRKHLEEVLEMKQEALLAAISEKDANIALLELSSSKKKTQEEVAALKREKDRLVQQLKQQTQNRMKLMADNYEDDHFKSSHSNQTNHKPSPDQDEEEGIWA

SEQ ID NO: 14631 - protein, 932 aa, Artificial Sequence
  Synthetic polypeptide
WVYQGVPLLLLPDFLLLPPCKKCLLPHTVILRLPQPCGTHMQMTIQALQDELRIQRDLNQLFQQDSSSRTGEPCVAELTEENFQRLHAEHERQAKELFLLRKTLEEMELRIETQKQTLNARDESIKKLLEMLQSKGLSAKATEEDHERTRRLAEAEMHVHHLESLLEQKEKENSMLREEMHRRFENAPDSAKTKALQTVIEMKDSKISSMERGLRDLEEEIQMLKSNGALSTEEREEEMKQMEVYRSHSKFMKNKVEQLKEELSSKEAQWEELKKKAAGLQAEIGQVKQELSRKDTELLALQTKLETLTNQFSDSKQHIEVLKESLTAKEQRAAILQTEVDALRLRLEEKETMLNKKTKQIQDMAEEKGTQAGEIHDLKDMLDVKERKVNVLQKKIENLQEQLRDKEKQMSSLKERVKSLQADTTNTDTALTTLEEALAEKERTIERLKEQRDRDEREKQEEIDNYKKDLKDLKEKVSLLQGDLSEKEASLLDLKEHASSLASSGLKKDSRLKTLEIALEQKKEECLKMESQLKKAHEAALEARASPEMSDRIQHLEREITRYKDESSKAQAEVDRLLEILKEVENEKNDKDKKIAELERQVKDQNKKVANLKHKEQVEKKKSAQMLEEARRREDNLNDSSQQLQDSLRKKDDRIEELEEALRESVQITAEREMVLAQEESARTNAEKQVEELLMAMEKVKQELESMKAKLSSTQQSLAEKETHLTNLRAERRKHLEEVLEMKQEALLAAISEKDANIALLELSSSKKKTQEEVAALKREKDRLVQQLKQQTQNRMKLMADNYEDDHFKSSHSNQTNHKPSPDQIIQPLLELDQNRSKLKLYIGHLTTLCHDRDPLILRGLTPPASYNLDDDQAAWENELQKMTRGQLQDELEKGERDNAELQEFANAILQQIADHCPDILEQVVNALEESS

SEQ ID NO: 14632 - protein, 902 aa, Artificial Sequence
  Synthetic polypeptide
WVYQGVPLLLLPDFLLLPPCKKCLLPHTVILRLPQPCGTHMQMTIQALQDELRIQRDLNQLFQQDSSSRTGEPCVAELTEENFQRLHAEHERQAKELFLLRKTLEEMELRIETQKQTLNARDESIKKLLEMLQSKGLSAKATEEDHERTRRLAEAEMHVHHLESLLEQKEKENSMLREEMHRRFENAPDSAKTKALQTVIEMKDSKISSMERGLRDLEEEIQMLKSNGALSTEEREEEMKQMEVYRSHSKFMKNKVEQLKEELSSKEAQWEELKKKAAGLQAEIGQVKQELSRKDTELLALQTKLETLTNQFSDSKQHIEVLKESLTAKEQRAAILQTEVDALRLRLEEKETMLNKKTKQIQDMAEEKGTQAGEIHDLKDMLDVKERKVNVLQKKIENLQEQLRDKEKQMSSLKERVKSLQADTTNTDTALTTLEEALAEKERTIERLKEQRDRDEREKQEEIDNYKKDLKDLKEKVSLLQGDLSEKEASLLDLKEHASSLASSGLKKDSRLKTLEIALEQKKEECLKMESQLKKAHEAALEARASPEMSDRIQHLEREITRYKDESSKAQAEVDRLLEILKEVENEKNDKDKKIAELERQVKDQNKKVANLKHKEQVEKKKSAQMLEEARRREDNLNDSSQQLQDSLRKKDDRIEELEEALRESVQITAEREMVLAQEESARTNAEKQVEELLMAMEKVKQELESMKAKLSSTQQSLAEKETHLTNLRAERRKHLEEVLEMKQEALLAAISEKDANIALLELSSSKKKTQEEVAALKREKDRLVQQLKQQTQNRMKLMADNYEDDHFKSSHSNQTNHKPSPDQIIQPLLELDQNRSKLKLYIGHLTTLCHDRDPLILRGLTPPASYNLDDDQAAWENELQKMTRGQNPLHPKAMEKLPFFM

SEQ ID NO: 14633 - protein, 936 aa, Artificial Sequence
  Synthetic polypeptide
WVYQGVPLLLLPDFLLLPPCKKCLLPHTVILRLPQPCGTHMQMTIQALQDELRIQRDLNQLFQQDSSSRTGEPCVAELTEENFQRLHAEHERQAKELFLLRKTLEEMELRIETQKQTLNARDESIKKLLEMLQSKGLSAKATEEDHERTRRLAEAEMHVHHLESLLEQKEKENSMLREEMHRRFENAPDSAKTKALQTVIEMKDSKISSMERGLRDLEEEIQMLKSNGALSTEEREEEMKQMEVYRSHSKFMKNKVEQLKEELSSKEAQWEELKKKAAGLQAEIGQVKQELSRKDTELLALQTKLETLTNQFSDSKQHIEVLKESLTAKEQRAAILQTEVDALRLRLEEKETMLNKKTKQIQDMAEEKGTQAGEIHDLKDMLDVKERKVNVLQKKIENLQEQLRDKEKQMSSLKERVKSLQADTTNTDTALTTLEEALAEKERTIERLKEQRDRDEREKQEEIDNYKKDLKDLKEKVSLLQGDLSEKEASLLDLKEHASSLASSGLKKDSRLKTLEIALEQKKEECLKMESQLKKAHEAALEARASPEMSDRIQHLEREITRYKDESSKAQAEVDRLLEILKEVENEKNDKDKKIAELESLTSRQVKDQNKKVANLKHKEQVEKKKSAQMLEEARRREDNLNDSSQQLQDSLRKKDDRIEELEEALRESVQITAEREMVLAQEESARTNAEKQVEELLMAMEKVKQELESMKAKLSSTQQSLAEKETHLTNLRAERRKHLEEVLEMKQEALLAAISEKDANIALLELSSSKKKTQEEVAALKREKDRLVQQLKQQTQNRMKLMADNYEDDHFKSSHSNQTNHKPSPDQIIQPLLELDQNRSKLKLYIGHLTTLCHDRDPLILRGLTPPASYNLDDDQAAWENELQKMTRGQLQDELEKGERDNAELQEFANAILQQIADHCPDILEQVVNALEESS

SEQ ID NO: 14634 - protein, 792 aa, Artificial Sequence
  Synthetic polypeptide
WVYQGVPLLLLPDFLLLPPCKKCLLPHTVILRLPQPCGTHMQMTIQALQDELRIQRDLNQLFQQDSSSRTGEPCVAELTEENFQRLHAEHERQAKELFLLRKTLEEMELRIETQKQTLNARDESIKKLLEMLQSKGLSAKATEEDHERTRRLAEAEMHVHHLESLLEQKEKENSMLREEMHRRFENAPDSAKTKALQTVIEMKDSKISSMERGLRDLEEEIQMLKSNGALSTEEREEEMKQMEVYRSHSKFMKNKVEQLKEELSSKEAQWEELKKKAAGLQAEIGQVKQELSRKDTELLALQTKLETLTNQFSDSKQHIEVLKESLTAKEQRAAILQTEVDALRLRLEEKETMLNKKTKQIQDMAEEKGTQAGEIHDLKDMLDVKERKVNVLQKKIENLQEQLRDKEKQMSSLKERVKSLQADTTNTDTALTTLEEALAEKERTIERLKEQRDRDEREKQEEIDNYKKDLKDLKEKVSLLQGDLSEKEASLLDLKEHASSLASSGLKKDSRLKTLEIALEQKKEECLKMESQLKKAHEAALEARASPEMSDRIQHLEREITRYKDESSKAQAEVDRLLEILKEVENEKNDKDKKIAELESLTSRQVKDQNKKVANLKHKEQVEKKKSAQMLEEARRREDNLNDSSQQLQVEELLMAMEKVKQELESMKAKLSSTQQSLAEKETHLTNLRAERRKHLEEVLEMKQEALLAAISEKDANIALLELSSSKKKTQEEVAALKREKDRLVQQLKQQTQNRMKLMADNYEDDHFKSSHSNQTNHKPSPDQDEEEGIWA

SEQ ID NO: 14635 - protein, 11 aa, Artificial Sequence
  Synthetic polypeptide
GFLSHVDLTCR

SEQ ID NO: 14636 - protein, 276 aa, Artificial Sequence
  Synthetic polypeptide
PRGSHMQMTIQALQDELRIQRDLNQLFQQDSSSRTGEPCVAELTEENFQRLHAEHERQAKELFLLRKTLEEMELRIETQKQTLNARDESIKKLLEMLQSKGLSAKATEEDHERTRRLAEAEMHVHHLESLLEQKEKENSMLREEMHRRFENAPDSAKTKALQTVIEMKDSKISSMERGLRDLEEEIQMLKSNGALSTEEREEEMKQMEVYRSHSKFMKNKIGQVKQELSRKDTELLALQTKLETLTNQFSDSKQHIEVLKESLTAKEQRAAILQTE

SEQ ID NO: 14637 - protein, 869 aa, Artificial Sequence
  Synthetic polypeptide
PRGSHMQMTIQALQDELRIQRDLNQLFQQDSSSRTGEPCVAELTEENFQRLHAEHERQAKELFLLRKTLEEMELRIETQKQTLNARDESIKKLLEMLQSKGLSAKATEEDHERTRRLAEAEMHVHHLESLLEQKEKENSMLREEMHRRFENAPDSAKTKALQTVIEMKDSKISSMERGLRDLEEEIQMLKSNGALSTEEREEEMKQMEVYRSHSKFMKNKIGQVKQELSRKDTELLALQTKLETLTNQFSDSKQHIEVLKESLTAKEQRAAILQTEVDALRLRLEEKETMLNKKTKQIQDMAEEKGTQAGEIHDLKDMLDVKERKVNVLQKKIENLQEQLRDKEKQMSSLKERVKSLQADTTNTDTALTTLEEALAEKERTIERLKEQRDRDEREKQEEIDNYKKDLKDLKEKVSLLQGDLSEKEASLLDLKEHASSLASSGLKKDSRLKTLEIALEQKKEECLKMESQLKKAHEAALEARASPEMSDRIQHLEREITRYKDESSKAQAEVDRLLEILKEVENEKNDKDKKIAELERQVKDQNKKVANLKHKEQVEKKKSAQMLEEARRREDNLNDSSQQLQDSLRKKDDRIEELEEALRESVQITAEREMVLAQEESARTNAEKQVEELLMAMEKVKQELESMKAKLSSTQQSLAEKETHLTNLRAERRKHLEEVLEMKQEALLAAISEKDANIALLELSSSKKKTQEEVAALKREKDRLVQQLKQQTQNRMKLMADNYEDDHFKSSHSNQTNHKPSPDQIIQPLLELDQNRSKLKLYIGHLTTLCHDRDPLILRGLTPPASYNLDDDQAAWENELQKMTRGQLQDELEKGERDNAELQEFANAILQQIADHCPDILEQVVNALEESS

SEQ ID NO: 14638 - protein, 773 aa, Artificial Sequence
  Synthetic polypeptide
PRGSHMQMTIQALQDELRIQRDLNQLFQQDSSSRTGEPCVAELTEENFQRLHAEHERQAKELFLLRKTLEEMELRIETQKQTLNARDESIKKLLEMLQSKGLSAKATEEDHERTRRLAEAEMHVHHLESLLEQKEKENSMLREEMHRRFENAPDSAKTKALQTVIEMKDSKISSMERGLRDLEEEIQMLKSNGALSTEEREEEMKQMEVYRSHSKFMKNKIGQVKQELSRKDTELLALQTKLETLTNQFSDSKQHIEVLKESLTAKEQRAAILQTEVDALRLRLEEKETMLNKKTKQIQDMAEEKGTQAGEIHDLKDMLDVKERKVNVLQKKIENLQEQLRDKEKQMSSLKERVKSLQADTTNTDTALTTLEEALAEKERTIERLKEQRDRDEREKQEEIDNYKKDLKDLKEKVSLLQGDLSEKEASLLDLKEHASSLASSGLKKDSRLKTLEIALEQKKEECLKMESQLKKAHEAALEARASPEMSDRIQHLEREITRYKDESSKAQAEVDRLLEILKEVENEKNDKDKKIAELESLTSRQVKDQNKKVANLKHKEQVEKKKSAQMLEEARRREDNLNDSSQQLQDSLRKKDDRIEELEEALRESVQITAEREMVLAQEESARTNAEKQVEELLMAMEKVKQELESMKAKLSSTQQSLAEKETHLTNLRAERRKHLEEVLEMKQEALLAAISEKDANIALLELSSSKKKTQEEVAALKREKDRLVQQLKQQTQNRMKLMADNYEDDHFKSSHSNQTNHKPSPDQDEEEGIWA

SEQ ID NO: 14639 - protein, 729 aa, Artificial Sequence
  Synthetic polypeptide
PRGSHMQMTIQALQDELRIQRDLNQLFQQDSSSRTGEPCVAELTEENFQRLHAEHERQAKELFLLRKTLEEMELRIETQKQTLNARDESIKKLLEMLQSKGLSAKATEEDHERTRRLAEAEMHVHHLESLLEQKEKENSMLREEMHRRFENAPDSAKTKALQTVIEMKDSKISSMERGLRDLEEEIQMLKSNGALSTEEREEEMKQMEVYRSHSKFMKNKIGQVKQELSRKDTELLALQTKLETLTNQFSDSKQHIEVLKESLTAKEQRAAILQTEVDALRLRLEEKETMLNKKTKQIQDMAEEKGTQAGEIHDLKDMLDVKERKVNVLQKKIENLQEQLRDKEKQMSSLKERVKSLQADTTNTDTALTTLEEALAEKERTIERLKEQRDRDEREKQEEIDNYKKDLKDLKEKVSLLQGDLSEKEASLLDLKEHASSLASSGLKKDSRLKTLEIALEQKKEECLKMESQLKKAHEAALEARASPEMSDRIQHLEREITRYKDESSKAQAEVDRLLEILKEVENEKNDKDKKIAELESLTSRQVKDQNKKVANLKHKEQVEKKKSAQMLEEARRREDNLNDSSQQLQVEELLMAMEKVKQELESMKAKLSSTQQSLAEKETHLTNLRAERRKHLEEVLEMKQEALLAAISEKDANIALLELSSSKKKTQEEVAALKREKDRLVQQLKQQTQNRMKLMADNYEDDHFKSSHSNQTNHKPSPDQDEEEGIWA

SEQ ID NO: 14640 - protein, 897 aa, Artificial Sequence
  Synthetic polypeptide
PRGSHMQMTIQALQDELRIQRDLNQLFQQDSSSRTGEPCVAELTEENFQRLHAEHERQAKELFLLRKTLEEMELRIETQKQTLNARDESIKKLLEMLQSKGLSAKATEEDHERTRRLAEAEMHVHHLESLLEQKEKENSMLREEMHRRFENAPDSAKTKALQTVIEMKDSKISSMERGLRDLEEEIQMLKSNGALSTEEREEEMKQMEVYRSHSKFMKNKVEQLKEELSSKEAQWEELKKKAAGLQAEIGQVKQELSRKDTELLALQTKLETLTNQFSDSKQHIEVLKESLTAKEQRAAILQTEVDALRLRLEEKETMLNKKTKQIQDMAEEKGTQAGEIHDLKDMLDVKERKVNVLQKKIENLQEQLRDKEKQMSSLKERVKSLQADTTNTDTALTTLEEALAEKERTIERLKEQRDRDEREKQEEIDNYKKDLKDLKEKVSLLQGDLSEKEASLLDLKEHASSLASSGLKKDSRLKTLEIALEQKKEECLKMESQLKKAHEAALEARASPEMSDRIQHLEREITRYKDESSKAQAEVDRLLEILKEVENEKNDKDKKIAELERQVKDQNKKVANLKHKEQVEKKKSAQMLEEARRREDNLNDSSQQLQDSLRKKDDRIEELEEALRESVQITAEREMVLAQEESARTNAEKQVEELLMAMEKVKQELESMKAKLSSTQQSLAEKETHLTNLRAERRKHLEEVLEMKQEALLAAISEKDANIALLELSSSKKKTQEEVAALKREKDRLVQQLKQQTQNRMKLMADNYEDDHFKSSHSNQTNHKPSPDQIIQPLLELDQNRSKLKLYIGHLTTLCHDRDPLILRGLTPPASYNLDDDQAAWENELQKMTRGQLQDELEKGERDNAELQEFANAILQQIADHCPDILEQVVNALEESS

SEQ ID NO: 14641 - protein, 867 aa, Artificial Sequence
  Synthetic polypeptide
PRGSHMQMTIQALQDELRIQRDLNQLFQQDSSSRTGEPCVAELTEENFQRLHAEHERQAKELFLLRKTLEEMELRIETQKQTLNARDESIKKLLEMLQSKGLSAKATEEDHERTRRLAEAEMHVHHLESLLEQKEKENSMLREEMHRRFENAPDSAKTKALQTVIEMKDSKISSMERGLRDLEEEIQMLKSNGALSTEEREEEMKQMEVYRSHSKFMKNKVEQLKEELSSKEAQWEELKKKAAGLQAEIGQVKQELSRKDTELLALQTKLETLTNQFSDSKQHIEVLKESLTAKEQRAAILQTEVDALRLRLEEKETMLNKKTKQIQDMAEEKGTQAGEIHDLKDMLDVKERKVNVLQKKIENLQEQLRDKEKQMSSLKERVKSLQADTTNTDTALTTLEEALAEKERTIERLKEQRDRDEREKQEEIDNYKKDLKDLKEKVSLLQGDLSEKEASLLDLKEHASSLASSGLKKDSRLKTLEIALEQKKEECLKMESQLKKAHEAALEARASPEMSDRIQHLEREITRYKDESSKAQAEVDRLLEILKEVENEKNDKDKKIAELERQVKDQNKKVANLKHKEQVEKKKSAQMLEEARRREDNLNDSSQQLQDSLRKKDDRIEELEEALRESVQITAEREMVLAQEESARTNAEKQVEELLMAMEKVKQELESMKAKLSSTQQSLAEKETHLTNLRAERRKHLEEVLEMKQEALLAAISEKDANIALLELSSSKKKTQEEVAALKREKDRLVQQLKQQTQNRMKLMADNYEDDHFKSSHSNQTNHKPSPDQIIQPLLELDQNRSKLKLYIGHLTTLCHDRDPLILRGLTPPASYNLDDDQAAWENELQKMTRGQNPLHPKAMEKLPFFM

SEQ ID NO: 14642 - protein, 901 aa, Artificial Sequence
  Synthetic polypeptide
PRGSHMQMTIQALQDELRIQRDLNQLFQQDSSSRTGEPCVAELTEENFQRLHAEHERQAKELFLLRKTLEEMELRIETQKQTLNARDESIKKLLEMLQSKGLSAKATEEDHERTRRLAEAEMHVHHLESLLEQKEKENSMLREEMHRRFENAPDSAKTKALQTVIEMKDSKISSMERGLRDLEEEIQMLKSNGALSTEEREEEMKQMEVYRSHSKFMKNKVEQLKEELSSKEAQWEELKKKAAGLQAEIGQVKQELSRKDTELLALQTKLETLTNQFSDSKQHIEVLKESLTAKEQRAAILQTEVDALRLRLEEKETMLNKKTKQIQDMAEEKGTQAGEIHDLKDMLDVKERKVNVLQKKIENLQEQLRDKEKQMSSLKERVKSLQADTTNTDTALTTLEEALAEKERTIERLKEQRDRDEREKQEEIDNYKKDLKDLKEKVSLLQGDLSEKEASLLDLKEHASSLASSGLKKDSRLKTLEIALEQKKEECLKMESQLKKAHEAALEARASPEMSDRIQHLEREITRYKDESSKAQAEVDRLLEILKEVENEKNDKDKKIAELESLTSRQVKDQNKKVANLKHKEQVEKKKSAQMLEEARRREDNLNDSSQQLQDSLRKKDDRIEELEEALRESVQITAEREMVLAQEESARTNAEKQVEELLMAMEKVKQELESMKAKLSSTQQSLAEKETHLTNLRAERRKHLEEVLEMKQEALLAAISEKDANIALLELSSSKKKTQEEVAALKREKDRLVQQLKQQTQNRMKLMADNYEDDHFKSSHSNQTNHKPSPDQIIQPLLELDQNRSKLKLYIGHLTTLCHDRDPLILRGLTPPASYNLDDDQAAWENELQKMTRGQLQDELEKGERDNAELQEFANAILQQIADHCPDILEQVVNALEESS

SEQ ID NO: 14643 - protein, 757 aa, Artificial Sequence
  Synthetic polypeptide
PRGSHMQMTIQALQDELRIQRDLNQLFQQDSSSRTGEPCVAELTEENFQRLHAEHERQAKELFLLRKTLEEMELRIETQKQTLNARDESIKKLLEMLQSKGLSAKATEEDHERTRRLAEAEMHVHHLESLLEQKEKENSMLREEMHRRFENAPDSAKTKALQTVIEMKDSKISSMERGLRDLEEEIQMLKSNGALSTEEREEEMKQMEVYRSHSKFMKNKVEQLKEELSSKEAQWEELKKKAAGLQAEIGQVKQELSRKDTELLALQTKLETLTNQFSDSKQHIEVLKESLTAKEQRAAILQTEVDALRLRLEEKETMLNKKTKQIQDMAEEKGTQAGEIHDLKDMLDVKERKVNVLQKKIENLQEQLRDKEKQMSSLKERVKSLQADTTNTDTALTTLEEALAEKERTIERLKEQRDRDEREKQEEIDNYKKDLKDLKEKVSLLQGDLSEKEASLLDLKEHASSLASSGLKKDSRLKTLEIALEQKKEECLKMESQLKKAHEAALEARASPEMSDRIQHLEREITRYKDESSKAQAEVDRLLEILKEVENEKNDKDKKIAELESLTSRQVKDQNKKVANLKHKEQVEKKKSAQMLEEARRREDNLNDSSQQLQVEELLMAMEKVKQELESMKAKLSSTQQSLAEKETHLTNLRAERRKHLEEVLEMKQEALLAAISEKDANIALLELSSSKKKTQEEVAALKREKDRLVQQLKQQTQNRMKLMADNYEDDHFKSSHSNQTNHKPSPDQDEEEGIWA

SEQ ID NO: 14644 - protein, 73 aa, Artificial Sequence
  Synthetic polypeptide
WVYQGVPLLLLPDFLLLPPCKKCLLPHTVILRLPQPCGTVSPIKQVPFASYRDSEASLATWISHADDNPGSPG

SEQ ID NO: 14645 - protein, 43 aa, Artificial Sequence
  Synthetic polypeptide
GLNEVWARAVYCCVLQTTLSQAATSPRSEWISRSGPWRSTGRR

SEQ ID NO: 14646 - protein, 168 aa, Artificial Sequence
  Synthetic polypeptide
GVGKSSLLLRFADNTFSGSYITTIGVDFKIRTVEINGEKVKLQIWDTAGQERFRTITSTAESFVNVKRWLHEINQNCDDVCRILVGNKNDDPERKVVETEDAYKFAGQMGIQLFETSAKENVNVEEMFNCITELVLRAKKDNLAKQQQQQQNDVVKLTKNSKRKKRCC

SEQ ID NO: 14647 - protein, 93 aa, Artificial Sequence
  Synthetic polypeptide
GVGKSSLLLRFADNTFSGSYITTIGVDFKIRTVEINGEKVKLQIWDTAGQERFRTITSTYYRGTHGVIVVYDVTSAESFVNVKRWLHEINQNC

SEQ ID NO: 14648 - protein, 135 aa, Artificial Sequence
  Synthetic polypeptide
GVGKSSLLLRFADNTFSGSYITTIGVDFKIRTVEINGEKVKLQIWDTAGQERFRTITSTYYRGTHGVIVVYDVTSAESFVNVKRWLHEINQNCDDVCRILDVQLHHGAGPPSKERQPGKTAAATTERCGEAHEEQ

SEQ ID NO: 14649 - protein, 184 aa, Artificial Sequence
  Synthetic polypeptide
GVGKSSLLLRFADNTFSGSYITTIGVDFKIRTVEINGEKVKLQIWDTAGQERFRTITSTYYRGTHGVIVVYDVTSAESFVNVKRWLHEINQNCDDVCRILVGNKNDDPERKVVETEDAYKFAGQMGIQLFETSAKENVNVEEMFNCITELVLRAKKDNLAKQQQQQQNDVVKLTKNSKRKKRCC

SEQ ID NO: 14650 - protein, 78 aa, Artificial Sequence
  Synthetic polypeptide
MRCGQEQFTVAFCRQHFLRQLHHHDRSGFQDPDRGDQRGEGEAADLGHSGAGALPHHHLHCRVLCQRQAVASRNQPEL

SEQ ID NO: 14651 - protein, 94 aa, Artificial Sequence
  Synthetic polypeptide
MRCGQEQFTVAFCRQHFLRQLHHHDRSGFQDPDRGDQRGEGEAADLGHSGAGALPHHHLHVLSGDPRGHCGLRRHQCRVLCQRQAVASRNQPEL

SEQ ID NO: 14652 - protein, 65 aa, Artificial Sequence
  Synthetic polypeptide
ASVPSSEKWGCALLGGVRIRWDKVGKVWARAVYCCVLQTTLSQAATSPRSEWISRSGPWRSTGRR

SEQ ID NO: 14653 - protein, 78 aa, Artificial Sequence
  Synthetic polypeptide
EKCGQEQFTVAFCRQHFLRQLHHHDRSGFQDPDRGDQRGEGEAADLGHSGAGALPHHHLHCRVLCQRQAVASRNQPEL

SEQ ID NO: 14654 - protein, 94 aa, Artificial Sequence
  Synthetic polypeptide
EKCGQEQFTVAFCRQHFLRQLHHHDRSGFQDPDRGDQRGEGEAADLGHSGAGALPHHHLHVLSGDPRGHCGLRRHQCRVLCQRQAVASRNQPEL

SEQ ID NO: 14655 - protein, 171 aa, Artificial Sequence
  Synthetic polypeptide
SRKSVGKSSLLLRFADNTFSGSYITTIGVDFKIRTVEINGEKVKLQIWDTAGQERFRTITSTAESFVNVKRWLHEINQNCDDVCRILVGNKNDDPERKVVETEDAYKFAGQMGIQLFETSAKENVNVEEMFNCITELVLRAKKDNLAKQQQQQQNDVVKLTKNSKRKKRCC

SEQ ID NO: 14656 - protein, 96 aa, Artificial Sequence
  Synthetic polypeptide
SRKSVGKSSLLLRFADNTFSGSYITTIGVDFKIRTVEINGEKVKLQIWDTAGQERFRTITSTYYRGTHGVIVVYDVTSAESFVNVKRWLHEINQNC

SEQ ID NO: 14657 - protein, 138 aa, Artificial Sequence
  Synthetic polypeptide
SRKSVGKSSLLLRFADNTFSGSYITTIGVDFKIRTVEINGEKVKLQIWDTAGQERFRTITSTYYRGTHGVIVVYDVTSAESFVNVKRWLHEINQNCDDVCRILDVQLHHGAGPPSKERQPGKTAAATTERCGEAHEEQ

SEQ ID NO: 14658 - protein, 187 aa, Artificial Sequence
  Synthetic polypeptide
SRKSVGKSSLLLRFADNTFSGSYITTIGVDFKIRTVEINGEKVKLQIWDTAGQERFRTITSTYYRGTHGVIVVYDVTSAESFVNVKRWLHEINQNCDDVCRILVGNKNDDPERKVVETEDAYKFAGQMGIQLFETSAKENVNVEEMFNCITELVLRAKKDNLAKQQQQQQNDVVKLTKNSKRKKRCC

SEQ ID NO: 14659 - protein, 61 aa, Artificial Sequence
  Synthetic polypeptide
LLTWPVYQNYPGSFQKNSGAQAAPQTSEIRTSGPGTPGISIFKDLPGGCHVYVGFVLWAAE

SEQ ID NO: 14660 - protein, 549 aa, Artificial Sequence
  Synthetic polypeptide
PGLYIRITQGVFKKILVPRLHHRPVKSEPLGLGPQESVFLKTCLAGATSMWASCCGLLNEVMGTGAVRGQQSAFAGATGPFRFTPNPEFSTYPPAATEGPNIVCKACGLSFSVFRKKHVCCDCKKDFCSVCSVLQENLRRCSTCHLLQETAFQRPQLMRLKVKDLRQYLILRNIPIDTCREKEDLVDLVLCHHGLGSEDDMDTSSLNSSRSQTSSFFTRSFFSNYTAPSATMSSFQGELMDGDQTSRSGVPAQVQSEITSANTEDDDDDDDEDDDDEEENAEDRNPGLSKERVRASLSDLSSLDDVEGMSVRQLKEILARNFVNYSGCCEKWELVEKVNRLYKENEENQKSYGERLQLQDEEDDSLCRICMDAVIDCVLLECGHMVTCTKCGKRMRMSSCKGRLRNGPESSAVTIQKDQRKVSAHSSPKRVVEQLLPWKDLQNGIALWSVVPRSKWKIKALIFVKSLPSQSPPRIYILILGLTQFLQEFFFYLPKLDTHRHLGYELLTAFLGDLLAVPQVNMTDVSTAFEEGQALISDLIAVCREEIVM

SEQ ID NO: 14661 - protein, 414 aa, Artificial Sequence
  Synthetic polypeptide
PGLYIRITQGVFKKILVPRLHHRPVKSEPLGLGPQESVFLKTCLAGATSMWASCCGLLNEVMGTGAVRGQQSAFAGATGPFRFTPNPEFSTYPPAATEGPNIVCKACGLSFSVFRKKHVCCDCKKDFCSVCSVLQENLRRCSTCHLLQETAFQRPQLMRLKVKDLRQYLILRNIPIDTCREKEDLVDLVLCHHGLGSEDDMDTSSLNSSRSQTSSFFTRSFFSNYTAPSATMSSFQGELMDGDQTSRSGVPAQVQSEITSANTEDDDDDDDEDDDDEEENAEDRNPGLSKERVRASLSDLSSLDDVEGMSVRQLKEILARNFVNYSGCCEKWELVEKVNRLYKENEENQKSYGERLQLQDEEDDSLCRICMDAVIDCVLLECGHMVTCTKCGKRMSECPICRQYVVRAVHVFKS

SEQ ID NO: 14662 - protein, 17 aa, Artificial Sequence
  Synthetic polypeptide
RLAWRVPRLCGLRAVGC

SEQ ID NO: 14663 - protein, 522 aa, Artificial Sequence
  Synthetic polypeptide
GWARWLMPVIPALREAEAGATSMWASCCGLLNEVMGTGAVRGQQSAFAGATGPFRFTPNPEFSTYPPAATEGPNIVCKACGLSFSVFRKKHVCCDCKKDFCSVCSVLQENLRRCSTCHLLQETAFQRPQLMRLKVKDLRQYLILRNIPIDTCREKEDLVDLVLCHHGLGSEDDMDTSSLNSSRSQTSSFFTRSFFSNYTAPSATMSSFQGELMDGDQTSRSGVPAQVQSEITSANTEDDDDDDDEDDDDEEENAEDRNPGLSKERVRASLSDLSSLDDVEGMSVRQLKEILARNFVNYSGCCEKWELVEKVNRLYKENEENQKSYGERLQLQDEEDDSLCRICMDAVIDCVLLECGHMVTCTKCGKRMRMSSCKGRLRNGPESSAVTIQKDQRKVSAHSSPKRVVEQLLPWKDLQNGIALWSVVPRSKWKIKALIFVKSLPSQSPPRIYILILGLTQFLQEFFFYLPKLDTHRHLGYELLTAFLGDLLAVPQVNMTDVSTAFEEGQALISDLIAVCREEIVM

SEQ ID NO: 14664 - protein, 387 aa, Artificial Sequence
  Synthetic polypeptide
GWARWLMPVIPALREAEAGATSMWASCCGLLNEVMGTGAVRGQQSAFAGATGPFRFTPNPEFSTYPPAATEGPNIVCKACGLSFSVFRKKHVCCDCKKDFCSVCSVLQENLRRCSTCHLLQETAFQRPQLMRLKVKDLRQYLILRNIPIDTCREKEDLVDLVLCHHGLGSEDDMDTSSLNSSRSQTSSFFTRSFFSNYTAPSATMSSFQGELMDGDQTSRSGVPAQVQSEITSANTEDDDDDDDEDDDDEEENAEDRNPGLSKERVRASLSDLSSLDDVEGMSVRQLKEILARNFVNYSGCCEKWELVEKVNRLYKENEENQKSYGERLQLQDEEDDSLCRICMDAVIDCVLLECGHMVTCTKCGKRMSECPICRQYVVRAVHVFKS

SEQ ID NO: 14665 - protein, 31 aa, Artificial Sequence
  Synthetic polypeptide
MGTVAHACNPSTSGGRGGCHVYVGFVLWAAE

SEQ ID NO: 14666 - protein, 21 aa, Artificial Sequence
  Synthetic polypeptide
SQHFGRPRRVPRLCGLRAVGC

SEQ ID NO: 14667 - protein, 59 aa, Artificial Sequence
  Synthetic polypeptide
DMVAHACNPSTLGGRGRWIISGQEDYDRLRPLSYQNTHLVLICYDVMNPTSYDNVLIKV

SEQ ID NO: 14668 - protein, 157 aa, Artificial Sequence
  Synthetic polypeptide
DMVAHACNPSTLGGRGRWIISGQEDYDRLRPLSYQNTHLVLICYDVMNPTSYDNVLIKWFPEVTHFCRGIPMVLIGCKTDLRKDKEQLRKLRAAQLEPITYMQGLSACEQIRAALYLECSAKFRENVEDVFREAAKVALSALKKAQRQKKRRLCLLL

SEQ ID NO: 14669 - protein, 116 aa, Artificial Sequence
  Synthetic polypeptide
DMVAHACNPSTLGGRGRWIISGQEDYDRLRPLSYQNTHLVLICYDVMNPTSYDNVLIKWFPEVTHFCRGIPMVLIGCKTDLRKDKEQLRKLRAAQLEPITYMQVGRGQDPGAQPWL

SEQ ID NO: 14670 - protein, 18 aa, Artificial Sequence
  Synthetic polypeptide
SQHFGRPRQVDHLRARRL

SEQ ID NO: 14671 - protein, 46 aa, Artificial Sequence
  Synthetic polypeptide
TWWLTPVIPALWEAEAGGSSQGKKTMTGCGPCPTRTPTSCSSAMTS

SEQ ID NO: 14672 - protein, 89 aa, Artificial Sequence
  Synthetic polypeptide
RGGHDCNPSTLGGRVMIRRNSPRRNLASSVTFVTALISTTQRIVLPRHRCQRTLPIPHTMAVGVRNAHTVKSVRCLDTGPPTAMTTKPS

SEQ ID NO: 14673 - protein, 82 aa, Artificial Sequence
  Synthetic polypeptide
SQHFGRPSDDQEKQSKKKPRLFCDICDCFDLHDTEDCPTQAQMSEDPPHSTHHGSRGEERPYCEICEMFGHWATNCNDDETF

SEQ ID NO: 14674 - protein, 35 aa, Artificial Sequence
  Synthetic polypeptide
AEIAPLYSSLGGYSFRKVTYNGTGERPSIESTGSS

SEQ ID NO: 14675 - protein, 18 aa, Artificial Sequence
  Synthetic polypeptide
DRTIVLQPGWLQFQKSHV

SEQ ID NO: 14676 - protein, 408 aa, Artificial Sequence
  Synthetic polypeptide
LLRRLRQENRLNPGGGGCSELRSHHCTPAWVATVSEKSRIMELEKDLALRVQEVAELRRRLESNKPAGDVDMSLSLLQEISSLQEKLEVTRTDHQREITSLKEHFGAREETHQKEIKALYTATEKLSKENESLKSKLEHANKENSDVIALWKSKLETAIASHQQAMEELKVSFSKGLGTETAEFAELKTQIEKMRLDYQHEIENLQNQQDSERAAHAKEMEALRAKLMKVIKEKENSLEAIRSKLDKAEDQHLVEMEDTLNKLQEAEIKASSITRELQGRELKLTNLQENLSEVSQVKETLEKELQILKEKFAEASEEAVSVQRSMQETVNKLHQKEEQFNMLSSDLEKLRENLADMEAKFREKDEREEQLIKAKEKLENDIAEIMKMSGDNSSQLTKMNDELRLKER

SEQ ID NO: 14677 - protein, 890 aa, Artificial Sequence
  Synthetic polypeptide
LLRRLRQENRLNPGGGGCSELRSHHCTPAWVATVSEKSRIMELEKDLALRVQEVAELRRRLESNKPAGDVDMSLSLLQEISSLQEKLEVTRTDHQREITSLKEHFGAREETHQKEIKALYTATEKLSKENESLKSKLEHANKENSDVIALWKSKLETAIASHQQAMEELKVSFSKGLGTETAEFAELKTQIEKMRLDYQHEIENLQNQQDSERAAHAKEMEALRAKLMKVIKEKENSLEAIRSKLDKAEDQHLVEMEDTLNKLQEAEIKASSITRELQGRELKLTNLQENLSEVSQVKETLEKELQILKEKFAEASEEAVSVQRSMQETVNKLHQKEEQFNMLSSDLEKLRENLADMEAKFREKDEREEQLIKAKEKLENDIAEIMKMSGDNSSQLTKMNDELRLKERDVEELQLKLTKANENASFLQKSIEDMTVKAEQSQQEAAKKHEEEKKELERKLSDLEKKMETSHNQCQELKARYERATSETKTKHEEILQNLQKTLLDTEDKLKGAREENSGLLQELEELRKQADKAKAAQTAEDAMQIMEQMTKEKTETLASLEDTKQTNAKLQNELDTLKENNLKNVEELNKSKELLTVENQKMEEFRKEIETLKQAAAQKSQQLSALQEENVKLAEELGRSRDEVTSHQKLEEERSVLNNQLLEMKKRESKFIKDADEEKASLQKSISITSALLTEKDAELEKLRNEVTVLRGENASAKSLHSVVQTLESDKVKLELKVKNLELQLKENKRQLSSSSGNTDTQADEDERAQESQIDFLNSVIVDLQRKNQDLKMKVEMMSEAALNGNGDDLNNYDSDDQEKQSKKKPRLFCDICDCFDLHDTEDCPTQAQMSEDPPHSTHHGSRGEERPYCEICEMFGHWATNCNDDETF

SEQ ID NO: 14678 - protein, 851 aa, Artificial Sequence
  Synthetic polypeptide
LLRRLRQENRLNPGGGGCSELRSHHCTPAWVATVSEKSRIMELEKDLALRVQEVAELRRRLESNKPAGDVDMSLSLLQEISSLQEKLEVTRTDHQREITSLKEHFGAREETHQKEIKALYTATEKLSKENESLKSKLEHANKENSDVIALWKSKLETAIASHQQAMEELKVSFSKGLGTETAEFAELKTQIEKMRLDYQHEIENLQNQQDSERAAHAKEMEALRAKLMKVIKEKENSLEAIRSKLDKAEDQHLVEMEDTLNKLQEAEIKKEKFAEASEEAVSVQRSMQETVNKLHQKEEQFNMLSSDLEKLRENLADMEAKFREKDEREEQLIKAKEKLENDIAEIMKMSGDNSSQLTKMNDELRLKERDVEELQLKLTKANENASFLQKSIEDMTVKAEQSQQEAAKKHEEEKKELERKLSDLEKKMETSHNQCQELKARYERATSETKTKHEEILQNLQKTLLDTEDKLKGAREENSGLLQELEELRKQADKAKAAQTAEDAMQIMEQMTKEKTETLASLEDTKQTNAKLQNELDTLKENNLKNVEELNKSKELLTVENQKMEEFRKEIETLKQAAAQKSQQLSALQEENVKLAEELGRSRDEVTSHQKLEEERSVLNNQLLEMKKRESKFIKDADEEKASLQKSISITSALLTEKDAELEKLRNEVTVLRGENASAKSLHSVVQTLESDKVKLELKVKNLELQLKENKRQLSSSSGNTDTQADEDERAQESQIDFLNSVIVDLQRKNQDLKMKVEMMSEAALNGNGDDLNNYDSDDQEKQSKKKPRLFCDICDCFDLHDTEDCPTQAQMSEDPPHSTHHGSRGEERPYCEICEMFGHWATNCNDDETF

SEQ ID NO: 14679 - protein, 966 aa, Artificial Sequence
  Synthetic polypeptide
LLRRLRQENRLNPGGGGCSELRSHHCTPAWVATVSEKSRIMELEKDLALRVQEVAELRRRLESNKPAGDVDMSLSLLQEISSLQEKLEVTRTDHQREITSLKEHFGAREETHQKEIKALYTATEKLSKENESLKSKLEHANKENSDVIALWKSKLETAIASHQQAMEELKVSFSKGLGTETAEFAELKTQIEKMRLDYQHEIENLQNQQDSERAAHAKEMEALRAKLMKVIKEKENSLEAIRSKLDKAEDQHLVEMEDTLNKLQEAEIKVKELEVLQAKCNEQTKVIDNFTSQLKATEEKLLDLDALRKASSEGKSEMKKLRQQLEAAEKQIKHLEIEKNAESSKASSITRELQGRELKLTNLQENLSEVSQVKETLEKELQILKEKFAEASEEAVSVQRSMQETVNKLHQKEEQFNMLSSDLEKLRENLADMEAKFREKDEREEQLIKAKEKLENDIAEIMKMSGDNSSQLTKMNDELRLKERDVEELQLKLTKANENASFLQKSIEDMTVKAEQSQQEAAKKHEEEKKELERKLSDLEKKMETSHNQCQELKARYERATSETKTKHEEILQNLQKTLLDTEDKLKGAREENSGLLQELEELRKQADKAKAAQTAEDAMQIMEQMTKEKTETLASLEDTKQTNAKLQNELDTLKENNLKNVEELNKSKELLTVENQKMEEFRKEIETLKQAAAQKSQQLSALQEENVKLAEELGRSRDEVTSHQKLEEERSVLNNQLLEMKKRESKFIKDADEEKASLQKSISITSALLTEKDAELEKLRNEVTVLRGENASAKSLHSVVQTLESDKVKLELKVKNLELQLKENKRQLSSSSGNTDTQADEDERAQESQIDFLNSVIVDLQRKNQDLKMKVEMMSEAALNGNGDDLNNYDSDDQEKQSKKKPRLFCDICDCFDLHDTEDCPTQAQMSEDPPHSTHHGSRGEERPYCEICEMFGHWATNCNDDETF

SEQ ID NO: 14680 - protein, 226 aa, Artificial Sequence
  Synthetic polypeptide
GQVPWLMPVIPALWESQVGGTKAGVVRFLGETDFAKGEWCGVELDEPLGKNDGAVAGTRYFQCQPKYGLFAPVHKVTKIGFPSTTPAKAKANAVRRVMATTSASLKRSPSASSLSSMSSVASSVSSRPSRTGLHVLELEAKMDQLRTMVEAADREKVELLNQLEEEKRKVEDLQFRVEEESITKGDLEQKSQISEDPENVRGHLTVWIFPLLTKIDHRLKCLLIYS

SEQ ID NO: 14681 - protein, 601 aa, Artificial Sequence
  Synthetic polypeptide
GQVPWLMPVIPALWESQVGGTKAGVVRFLGETDFAKGEWCGVELDEPLGKNDGAVAGTRYFQCQPKYGLFAPVHKVTKIGFPSTTPAKAKANAVRRVMATTSASLKRSPSASSLSSMSSVASSVSSRPSRTGLHVLELEAKMDQLRTMVEAADREKVELLNQLEEEKRKVEDLQFRVEEESITKGDLETQTKLEHARIKELEQSLLFEKTKADKLQRELEDTRVATVSEKSRIMELEKDLALRVQEVAELRRRLESNKPAGDVDMSLSLLQEISSLQEKLEVTRTDHQREITSLKEHFGAREETHQKEIKALYTATEKLSKENESLKSKLEHANKENSDVIALWKSKLETAIASHQQAMEELKVSFSKGLGTETAEFAELKTQIEKMRLDYQHEIENLQNQQDSERAAHAKEMEALRAKLMKVIKEKENSLEAIRSKLDKAEDQHLVEMEDTLNKLQEAEIKASSITRELQGRELKLTNLQENLSEVSQVKETLEKELQILKEKFAEASEEAVSVQRSMQETVNKLHQKEEQFNMLSSDLEKLRENLADMEAKFREKDEREEQLIKAKEKLENDIAEIMKMSGDNSSQLTKMNDELRLKER

SEQ ID NO: 14682 - protein, 1236 aa, Artificial Sequence
  Synthetic polypeptide
GQVPWLMPVIPALWESQVGGTKAGVVRFLGETDFAKGEWCGVELDEPLGKNDGAVAGTRYFQCQPKYGLFAPVHKVTKIGFPSTTPAKAKANAVRRVMATTSASLKRSPSASSLSSMSSVASSVSSRPSRTGLLTETSSRYARKISGTTALQEALKEKQQHIEQLLAERDLERAEVAKATSHVGEIEQELALARDGHDQHVLELEAKMDQLRTMVEAADREKVELLNQLEEEKRKVEDLQFRVEEESITKGDLEQKSQISEDPENTQTKLEHARIKELEQSLLFEKTKADKLQRELEDTRVATVSEKSRIMELEKDLALRVQEVAELRRRLESNKPAGDVDMSLSLLQEISSLQEKLEVTRTDHQREITSLKEHFGAREETHQKEIKALYTATEKLSKENESLKSKLEHANKENSDVIALWKSKLETAIASHQQAMEELKVSFSKGLGTETAEFAELKTQIEKMRLDYQHEIENLQNQQDSERAAHAKEMEALRAKLMKVIKEKENSLEAIRSKLDKAEDQHLVEMEDTLNKLQEAEIKVKELEVLQAKCNEQTKVIDNFTSQLKATEEKLLDLDALRKASSEGKSEMKKLRQQLEAAEKQIKHLEIEKNAESSKASSITRELQGRELKLTNLQENLSEVSQVKETLEKELQILKEKFAEASEEAVSVQRSMQETVNKLHQKEEQFNMLSSDLEKLRENLADMEAKFREKDEREEQLIKAKEKLENDIAEIMKMSGDNSSQLTKMNDELRLKERDVEELQLKLTKANENASFLQKSIEDMTVKAEQSQQEAAKKHEEEKKELERKLSDLEKKMETSHNQCQELKARYERATSETKTKHEEILQNLQKTLLDTEDKLKGAREENSGLLQELEELRKQADKAKAAQTAEDAMQIMEQMTKEKTETLASLEDTKQTNAKLQNELDTLKENNLKNVEELNKSKELLTVENQKMEEFRKEIETLKQAAAQKSQQLSALQEENVKLAEELGRSRDEVTSHQKLEEERSVLNNQLLEMKKRESKFIKDADEEKASLQKSISITSALLTEKDAELEKLRNEVTVLRGENASAKSLHSVVQTLESDKVKLELKVKNLELQLKENKRQLSSSSGNTDTQADEDERAQESQIDFLNSVIVDLQRKNQDLKMKVEMMSEAALNGNGDDLNNYDSDDQEKQSKKKPRLFCDICDCFDLHDTEDCPTQAQMSEDPPHSTHHGSRGEERPYCEICEMFGHWATNCNDDETF

SEQ ID NO: 14683 - protein, 1225 aa, Artificial Sequence
  Synthetic polypeptide
GQVPWLMPVIPALWESQVGGTKAGVVRFLGETDFAKGEWCGVELDEPLGKNDGAVAGTRYFQCQPKYGLFAPVHKVTKIGFPSTTPAKAKANAVRRVMATTSASLKRSPSASSLSSMSSVASSVSSRPSRTGLLTETSSRYARKISGTTALQEALKEKQQHIEQLLAERDLERAEVAKATSHVGEIEQELALARDGHDQHVLELEAKMDQLRTMVEAADREKVELLNQLEEEKRKVEDLQFRVEEESITKGDLETQTKLEHARIKELEQSLLFEKTKADKLQRELEDTRVATVSEKSRIMELEKDLALRVQEVAELRRRLESNKPAGDVDMSLSLLQEISSLQEKLEVTRTDHQREITSLKEHFGAREETHQKEIKALYTATEKLSKENESLKSKLEHANKENSDVIALWKSKLETAIASHQQAMEELKVSFSKGLGTETAEFAELKTQIEKMRLDYQHEIENLQNQQDSERAAHAKEMEALRAKLMKVIKEKENSLEAIRSKLDKAEDQHLVEMEDTLNKLQEAEIKVKELEVLQAKCNEQTKVIDNFTSQLKATEEKLLDLDALRKASSEGKSEMKKLRQQLEAAEKQIKHLEIEKNAESSKASSITRELQGRELKLTNLQENLSEVSQVKETLEKELQILKEKFAEASEEAVSVQRSMQETVNKLHQKEEQFNMLSSDLEKLRENLADMEAKFREKDEREEQLIKAKEKLENDIAEIMKMSGDNSSQLTKMNDELRLKERDVEELQLKLTKANENASFLQKSIEDMTVKAEQSQQEAAKKHEEEKKELERKLSDLEKKMETSHNQCQELKARYERATSETKTKHEEILQNLQKTLLDTEDKLKGAREENSGLLQELEELRKQADKAKAAQTAEDAMQIMEQMTKEKTETLASLEDTKQTNAKLQNELDTLKENNLKNVEELNKSKELLTVENQKMEEFRKEIETLKQAAAQKSQQLSALQEENVKLAEELGRSRDEVTSHQKLEEERSVLNNQLLEMKKRESKFIKDADEEKASLQKSISITSALLTEKDAELEKLRNEVTVLRGENASAKSLHSVVQTLESDKVKLELKVKNLELQLKENKRQLSSSSGNTDTQADEDERAQESQIDFLNSVIVDLQRKNQDLKMKVEMMSEAALNGNGDDLNNYDSDDQEKQSKKKPRLFCDICDCFDLHDTEDCPTQAQMSEDPPHSTHHGSRGEERPYCEICEMFGHWATNCNDDETF

SEQ ID NO: 14684 - protein, 1114 aa, Artificial Sequence
  Synthetic polypeptide
GQVPWLMPVIPALWESQVGGTKAGVVRFLGETDFAKGEWCGVELDEPLGKNDGAVAGTRYFQCQPKYGLFAPVHKVTKIGFPSTTPAKAKANAVRRVMATTSASLKRSPSASSLSSMSSVASSVSSRPSRTGLLTETSSRYARKISGTTALQEALKEKQQHIEQLLAERDLERAEVAKATSHVGEIEQELALARDGHDQHVLELEAKMDQLRTMVEAADREKVELLNQLEEEKRKVEDLQFRVEEESITKGDLEVATVSEKSRIMELEKDLALRVQEVAELRRRLESNKPAGDVDMSLSLLQEISSLQEKLEVTRTDHQREITSLKEHFGAREETHQKEIKALYTATEKLSKENESLKSKLEHANKENSDVIALWKSKLETAIASHQQAMEELKVSFSKGLGTETAEFAELKTQIEKMRLDYQHEIENLQNQQDSERAAHAKEMEALRAKLMKVIKEKENSLEAIRSKLDKAEDQHLVEMEDTLNKLQEAEIKASSITRELQGRELKLTNLQENLSEVSQVKETLEKELQILKEKFAEASEEAVSVQRSMQETVNKLHQKEEQFNMLSSDLEKLRENLADMEAKFREKDEREEQLIKAKEKLENDIAEIMKMSGDNSSQLTKMNDELRLKERDVEELQLKLTKANENASFLQKSIEDMTVKAEQSQQEAAKKHEEEKKELERKLSDLEKKMETSHNQCQELKARYERATSETKTKHEEILQNLQKTLLDTEDKLKGAREENSGLLQELEELRKQADKAKAAQTAEDAMQIMEQMTKEKTETLASLEDTKQTNAKLQNELDTLKENNLKNVEELNKSKELLTVENQKMEEFRKEIETLKQAAAQKSQQLSALQEENVKLAEELGRSRDEVTSHQKLEEERSVLNNQLLEMKKRESKFIKDADEEKASLQKSISITSALLTEKDAELEKLRNEVTVLRGENASAKSLHSVVQTLESDKVKLELKVKNLELQLKENKRQLSSSSGNTDTQADEDERAQESQIDFLNSVIVDLQRKNQDLKMKVEMMSEAALNGNGDDLNNYDSDDQEKQSKKKPRLFCDICDCFDLHDTEDCPTQAQMSEDPPHSTHHGSRGEERPYCEICEMFGHWATNCNDDETF

SEQ ID NO: 14685 - protein, 1190 aa, Artificial Sequence
  Synthetic polypeptide
GQVPWLMPVIPALWESQVGGTKAGVVRFLGETDFAKGEWCGVELDEPLGKNDGAVAGTRYFQCQPKYGLFAPVHKVTKIGFPSTTPAKAKANAVRRVMATTSASLKRSPSASSLSSMSSVASSVSSRPSRTGLLTETSSRYARKISGTTALQEALKEKQQHIEQLLAERDLERAEVAKATSHVGEIEQELALARDGHDQHVLELEAKMDQLRTMVEAADREKVELLNQLEEEKRKVEDLQFRVEEESITKGDLEVATVSEKSRIMELEKDLALRVQEVAELRRRLESNKPAGDVDMSLSLLQEISSLQEKLEVTRTDHQREITSLKEHFGAREETHQKEIKALYTATEKLSKENESLKSKLEHANKENSDVIALWKSKLETAIASHQQAMEELKVSFSKGLGTETAEFAELKTQIEKMRLDYQHEIENLQNQQDSERAAHAKEMEALRAKLMKVIKEKENSLEAIRSKLDKAEDQHLVEMEDTLNKLQEAEIKVKELEVLQAKCNEQTKVIDNFTSQLKATEEKLLDLDALRKASSEGKSEMKKLRQQLEAAEKQIKHLEIEKNAESSKASSITRELQGRELKLTNLQENLSEVSQVKETLEKELQILKEKFAEASEEAVSVQRSMQETVNKLHQKEEQFNMLSSDLEKLRENLADMEAKFREKDEREEQLIKAKEKLENDIAEIMKMSGDNSSQLTKMNDELRLKERDVEELQLKLTKANENASFLQKSIEDMTVKAEQSQQEAAKKHEEEKKELERKLSDLEKKMETSHNQCQELKARYERATSETKTKHEEILQNLQKTLLDTEDKLKGAREENSGLLQELEELRKQADKAKAAQTAEDAMQIMEQMTKEKTETLASLEDTKQTNAKLQNELDTLKENNLKNVEELNKSKELLTVENQKMEEFRKEIETLKQAAAQKSQQLSALQEENVKLAEELGRSRDEVTSHQKLEEERSVLNNQLLEMKKRESKFIKDADEEKASLQKSISITSALLTEKDAELEKLRNEVTVLRGENASAKSLHSVVQTLESDKVKLELKVKNLELQLKENKRQLSSSSGNTDTQADEDERAQESQIDFLNSVIVDLQRKNQDLKMKVEMMSEAALNGNGDDLNNYDSDDQEKQSKKKPRLFCDICDCFDLHDTEDCPTQAQMSEDPPHSTHHGSRGEERPYCEICEMFGHWATNCNDDETF

SEQ ID NO: 14686 - protein, 148 aa, Artificial Sequence
  Synthetic polypeptide
GQVPWLMPVIPALWESQVGGTKAGVVRFLGETDFAKGEWCGVELDEPLGKNDGAVAGTRYFQCQPKYGLFAPVHKVTKIGFPSTTPAKAKANAVRRVMATTSASLKRSPSASSLSSMSSVASSVSSRPSRTGLVRPLSHYLPPLPRQD

SEQ ID NO: 14687 - protein, 20 aa, Artificial Sequence
  Synthetic polypeptide
PGAVAHACNPSTLGVPGWWH

SEQ ID NO: 14688 - protein, 15 aa, Artificial Sequence
  Synthetic polypeptide
SQHFGSPRLVALRLV

SEQ ID NO: 14689 - protein, 481 aa, Artificial Sequence
  Synthetic polypeptide
GANRIVLEDSNILQPVGLTVFENWLYWIDKQQQMIEKIDMTGREGRTKVQARIAQLSDIHAVKELNLQEYRQHPCAQDNGGCSHICLVKGDGTTRCSCPMHLVLLQDELSCGEPPTCSPQQFTCFTGEIDCIPVAWRCDGFTECEDHSDELNCPVCSESQFQCASGQCIDGALRCNGDANCQDKSDEKNCEVLCLIDQFRCANGQCIGKHKKCDHNVDCSDKSDELDCYPTEEPAPQATNTVGSVIGVIVTIFVSGTVYFICQRMLCPRMKGDGETMTNDYVVHGPASVPLGYVPHPSSLSGSLPGMSRGKSMISSLSIMGGSSGPPYDRAHVTGASSSSSSSTKGTYFPAILNPPPSPATERSHYTMEFGYSSNSPSTHRSYSYRPYSYRHFAPPTTPCSTDVCDSDYAPSRRMTSVATAKGYTSDLNYDSEPVPPPPTPRSQYLSAEENYESCPPSPYTERSYSHHLYPPPPSPCTDSS

SEQ ID NO: 14690 - protein, 436 aa, Artificial Sequence
  Synthetic polypeptide
GANRIVLEDSNILQPVGLTVFENWLYWIDKQQQMIEKIDMTGREGRTKVQARIAQLSDIHAVKELNLQEYRQHPCAQDNGGCSHICLVKGDGTTRCSCPMHLVLLQDELSCGESQFQCASGQCIDGALRCNGDANCQDKSDEKNCEVLCLIDQFRCANGQCIGKHKKCDHNVDCSDKSDELDCYPTEEPAPQATNTVGSVIGVIVTIFVSGTVYFICQRMLCPRMKGDGETMTNDYVVHGPASVPLGYVPHPSSLSGSLPGMSRGKSMISSLSIMGGSSGPPYDRAHVTGASSSSSSSTKGTYFPAILNPPPSPATERSHYTMEFGYSSNSPSTHRSYSYRPYSYRHFAPPTTPCSTDVCDSDYAPSRRMTSVATAKGYTSDLNYDSEPVPPPPTPRSQYLSAEENYESCPPSPYTERSYSHHLYPPPPSPCTDSS

SEQ ID NO: 14691 - protein, 7 aa, Artificial Sequence
  Synthetic polypeptide
GGQIMRC

SEQ ID NO: 14692 - protein, 17 aa, Artificial Sequence
  Synthetic polypeptide
SQHFWRLRRADHEVLTG

SEQ ID NO: 14693 - protein, 30 aa, Artificial Sequence; identical to SEQ ID NO: 6477
  Synthetic polypeptide

SEQ ID NO: 14694 - protein, 54 aa, Artificial Sequence; identical to SEQ ID NO: 4961
  Synthetic polypeptide

SEQ ID NO: 14695 - protein, 453 aa, Artificial Sequence; identical to SEQ ID NO: 2130
  Synthetic polypeptide

SEQ ID NO: 14696 - protein, 481 aa, Artificial Sequence; identical to SEQ ID NO: 2066
  Synthetic polypeptide

SEQ ID NO: 14697 - protein, 478 aa, Artificial Sequence; identical to SEQ ID NO: 2071
  Synthetic polypeptide

SEQ ID NO: 14698 - protein, 525 aa, Artificial Sequence; identical to SEQ ID NO: 1976
  Synthetic polypeptide

SEQ ID NO: 14699 - protein, 524 aa, Artificial Sequence; identical to SEQ ID NO: 1979
  Synthetic polypeptide

SEQ ID NO: 14700 - protein, 118 aa, Artificial Sequence; identical to SEQ ID NO: 3387
  Synthetic polypeptide

SEQ ID NO: 14701 - protein, 52 aa, Artificial Sequence
  Synthetic polypeptide
HGNLLRKSQGISKDKKVPRTNKWSVATSMDTREKQEKWQASFGIDAENGGPV

SEQ ID NO: 14702 - protein, 68 aa, Artificial Sequence
  Synthetic polypeptide
QHQWIQERSRRSGRRHSVSTRRMVALYDYDPRESSPNVDVEAELTFCTGDIITVFGEIDEDGFYYGEL

SEQ ID NO: 14703 - protein, 86 aa, Artificial Sequence
  Synthetic polypeptide
QHQWIQERSRRSGRRHSVSTRRMVALYDYDPRESSPNVDVEAELTFCTGDIITVFGEIDEDGFYYGELNGQKGLVPSNFLEEVPDD

SEQ ID NO: 14704 - protein, 118 aa, Artificial Sequence
  Synthetic polypeptide
QHQWIQERSRRSGRRHSVSTRRMVALYDYDPRESSPNVDVEAELTFCTGDIITVFGEIDEDGFYYGELNGQKGLVPSNFLEEVPDDVEVYLSDAPSHYSQDTPMRSKAKRKKSVHFTP

SEQ ID NO: 14705 - protein, 72 aa, Artificial Sequence
  Synthetic polypeptide
QMECSNINGYKREAGEVAGVIRYRRGEWWPCMTTTPEKARPTSMSRPNLHFAQEILLQFLVKLMKMDFIMGS

SEQ ID NO: 14706 - protein, 553 aa, Artificial Sequence
  Synthetic polypeptide
GHQEWLSRFGYLPPADPTTGQLQTQEELSKAITAMQQFGGLEATGILDEATLALMKTPRCSLPDLPVLTQARRRRQAPAPTKWNKRNLSWRVRTFPRDSPLGHDTVRALMYYALKVWSDIAPLNFHEVAGSAADIQIDFSKADHNDGYPFDGPGGTVAHAFFPGHHHTAGDTHFDDDEAWTFRSSDAHGMDLFAVAVHEFGHAIGLSHVAAAHSIMRPYYQGPVGDPLRYGLPYEDKVRVWQLYGVRESVSPTAQPEEPPLLPEPPDNRSSAPPRKDVPHRCSTHFDAVAQIRGEAFFFKGKYFWRLTRDRHLVSLQPAQMHRFWRGLPLHLDSVDAVYERTSDHKIVFFKGDRYWVFKDNNVEEGYPRPVSDFSLPPGGIDAAFSWAHNDRTYFFKDQLYWRYDDHTRHMDPGYPAQSPLWRGVPSTLDDAMRWSDGASYFFRGQEYWKVLDGELEVAPGYPQSTARDWLVCGDSQADGSVAAGVDAAEGPRAPPGQHDQSRSEDGYEVCSCTSGASSPPGAPGPLVAATMLLLLPPLSPGALWTAAQALTL

SEQ ID NO: 14707 - protein, 15 aa, Artificial Sequence
  Synthetic polypeptide
GTSGVAKQVRLPAPG

SEQ ID NO: 14708 - protein, 6 aa, Artificial Sequence
  Synthetic polypeptide
RDIRSG

SEQ ID NO: 14709 - protein, 15 aa, Artificial Sequence
  Synthetic polypeptide
DTFPAAAQGRDKRSG

SEQ ID NO: 14710 - protein, 569 aa, Artificial Sequence
  Synthetic polypeptide
GTSGLLRHFSGSCPGKRQEEWLSRFGYLPPADPTTGQLQTQEELSKAITAMQQFGGLEATGILDEATLALMKTPRCSLPDLPVLTQARRRRQAPAPTKWNKRNLSWRVRTFPRDSPLGHDTVRALMYYALKVWSDIAPLNFHEVAGSAADIQIDFSKADHNDGYPFDGPGGTVAHAFFPGHHHTAGDTHFDDDEAWTFRSSDAHGMDLFAVAVHEFGHAIGLSHVAAAHSIMRPYYQGPVGDPLRYGLPYEDKVRVWQLYGVRESVSPTAQPEEPPLLPEPPDNRSSAPPRKDVPHRCSTHFDAVAQIRGEAFFFKGKYFWRLTRDRHLVSLQPAQMHRFWRGLPLHLDSVDAVYERTSDHKIVFFKGDRYWVFKDNNVEEGYPRPVSDFSLPPGGIDAAFSWAHNDRTYFFKDQLYWRYDDHTRHMDPGYPAQSPLWRGVPSTLDDAMRWSDGASYFFRGQEYWKVLDGELEVAPGYPQSTARDWLVCGDSQADGSVAAGVDAAEGPRAPPGQHDQSRSEDGYEVCSCTSGASSPPGAPGPLVAATMLLLLPPLSPGALWTAAQALTL

SEQ ID NO: 14711 - protein, 31 aa, Artificial Sequence
  Synthetic polypeptide
RDIRFIKTLFRQLPREETRGVAKQVRLPAPG

SEQ ID NO: 14712 - protein, 64 aa, Artificial Sequence
  Synthetic polypeptide
GQEFETSLANMGPDVPTGLTTGARHGACTHVLRPQGLERHCAPELPRGGGQRRRHPDRLLQGRP

SEQ ID NO: 14713 - protein, 92 aa, Artificial Sequence
  Synthetic polypeptide
GWAWWLTPVIMALWEAKAGGSFEVRSSRPAWPTWVRTFPRDSPLGHDTVRALMYYALKVWSDIAPLNFHEVAGSAADIQIDFSKADHNDGYP

SEQ ID NO: 14714 - protein, 166 aa, Artificial Sequence
  Synthetic polypeptide
GWAWWLTPVIMALWEAKAGGSFEVRSSRPAWPTWVRTFPRDSPLGHDTVRALMYYALKVWSDIAPLNFHEVAGSAADIQIDFSKADHNDGYPFDGPGGTVAHAFFPGHHHTAGDTHFDDDEAWTFRSSDAHGMDLFAVAVHEFGHAIGLSHVAAAHSIMRPYYQGP

SEQ ID NO: 14715 - protein, 496 aa, Artificial Sequence
  Synthetic polypeptide
GWAWWLTPVIMALWEAKAGGSFEVRSSRPAWPTWVRTFPRDSPLGHDTVRALMYYALKVWSDIAPLNFHEVAGSAADIQIDFSKADHNDGYPFDGPGGTVAHAFFPGHHHTAGDTHFDDDEAWTFRSSDAHGMDLFAVAVHEFGHAIGLSHVAAAHSIMRPYYQGPVGDPLRYGLPYEDKVRVWQLYGVRESVSPTAQPEEPPLLPEPPDNRSSAPPRKDVPHRCSTHFDAVAQIRGEAFFFKGKYFWRLTRDRHLVSLQPAQMHRFWRGLPLHLDSVDAVYERTSDHKIVFFKGDRYWVFKDNNVEEGYPRPVSDFSLPPGGIDAAFSWAHNDRTYFFKDQLYWRYDDHTRHMDPGYPAQSPLWRGVPSTLDDAMRWSDGASYFFRGQEYWKVLDGELEVAPGYPQSTARDWLVCGDSQADGSVAAGVDAAEGPRAPPGQHDQSRSEDGYEVCSCTSGASSPPGAPGPLVAATMLLLLPPLSPGALWTAAQALTL

SEQ ID NO: 14716 - protein, 56 aa, Artificial Sequence
  Synthetic polypeptide
SWHFGRPRRADHLRSGVRDQPGQHGSGRSHGTHHWGTTRCVHSCTTPSRSGATLRP

SEQ ID NO: 14717 - protein, 60 aa, Artificial Sequence
  Synthetic polypeptide
GDRYWVFKDNNVEEGYPRPVSDFSLPPGGIDAAFSWAHNDRTYFFKDQLYWRYDDHTRHM

SEQ ID NO: 14718 - protein, 87 aa, Artificial Sequence
  Synthetic polypeptide
GDRYWVFKDNNVEEGYPRPVSDFSLPPGGIDAAFSWAHNDRTYFFKDQLYWRYDDHTRHMDPGYPAQSPLWRGVPSTLDDAMRWSDG

SEQ ID NO: 14719 - protein, 202 aa, Artificial Sequence
  Synthetic polypeptide
GDRYWVFKDNNVEEGYPRPVSDFSLPPGGIDAAFSWAHNDRTYFFKDQLYWRYDDHTRHMDPGYPAQSPLWRGVPSTLDDAMRWSDGASYFFRGQEYWKVLDGELEVAPGYPQSTARDWLVCGDSQADGSVAAGVDAAEGPRAPPGQHDQSRSEDGYEVCSCTSGASSPPGAPGPLVAATMLLLLPPLSPGALWTAAQALTL

SEQ ID NO: 14720 - protein, 53 aa, Artificial Sequence
  Synthetic polypeptide
NPVSTTKYKKFAGRGGGHLLFQLLGRLRQENGVNLGGGVCSEETGTGCSRTIT

SEQ ID NO: 14721 - protein, 18 aa, Artificial Sequence
  Synthetic polypeptide
TWEAEFAVRRQVLGVQGQ

SEQ ID NO: 14722 - protein, 8 aa, Artificial Sequence
  Synthetic polypeptide
GPAVLALR

SEQ ID NO: 14723 - protein, 50 aa, Artificial Sequence
  Synthetic polypeptide
NPVSTTKYKKFAGRGGGHLLFQLLGRLRQENGVNLGGGVCSEDQLYWRYD

SEQ ID NO: 14724 - protein, 56 aa, Artificial Sequence
  Synthetic polypeptide
NPVSTTKYKKFAGRGGGHLLFQLLGRLRQENGVNLGGGVCSEDQLYWRYDDHTRHM

SEQ ID NO: 14725 - protein, 83 aa, Artificial Sequence
  Synthetic polypeptide
NPVSTTKYKKFAGRGGGHLLFQLLGRLRQENGVNLGGGVCSEDQLYWRYDDHTRHMDPGYPAQSPLWRGVPSTLDDAMRWSDG

SEQ ID NO: 14726 - protein, 198 aa, Artificial Sequence
  Synthetic polypeptide
NPVSTTKYKKFAGRGGGHLLFQLLGRLRQENGVNLGGGVCSEDQLYWRYDDHTRHMDPGYPAQSPLWRGVPSTLDDAMRWSDGASYFFRGQEYWKVLDGELEVAPGYPQSTARDWLVCGDSQADGSVAAGVDAAEGPRAPPGQHDQSRSEDGYEVCSCTSGASSPPGAPGPLVAATMLLLLPPLSPGALWTAAQALTL

SEQ ID NO: 14727 - protein, 17 aa, Artificial Sequence
  Synthetic polypeptide
TWEAEFAVRTSCTGATM

SEQ ID NO: 14728 - protein, 23 aa, Artificial Sequence
  Synthetic polypeptide
TWEAEFAVRTSCTGATMTTRGTW

SEQ ID NO: 14729 - protein, 50 aa, Artificial Sequence
  Synthetic polypeptide
TWEAEFAVRTSCTGATMTTRGTWTPATPPRAPCGGVSPARWTTPCAGPTV

SEQ ID NO: 14730 - protein, 162 aa, Artificial Sequence
  Synthetic polypeptide
TWEAEFAVRTSCTGATMTTRGTWTPATPPRAPCGGVSPARWTTPCAGPTVPPTSSVARSTGKCWMASWRWHPGTHSPRPGTGWCVETHRPMDLWLRAWTRQRGPAPLQDNMTRAARRTVTRSAHAPLGHPLPRGPQAHWWLPPCCCCCRHCHQAPCGQRPRP

SEQ ID NO: 14731 - protein, 133 aa, Artificial Sequence
  Synthetic polypeptide
ECRLWSGMPMFRFYHHHVLASDLDKIIQPLLELDQNRSKLKLYIGHLTTLCHDRDPLILRGLTPPASYNLDDDQAAWENELQKMTRGQLQDELEKGERDNAELQEFANAILQQIADHCPDILEQVVNALEESS

SEQ ID NO: 14732 - protein, 103 aa, Artificial Sequence
  Synthetic polypeptide
ECRLWSGMPMFRFYHHHVLASDLDKIIQPLLELDQNRSKLKLYIGHLTTLCHDRDPLILRGLTPPASYNLDDDQAAWENELQKMTRGQNPLHPKAMEKLPFFM

SEQ ID NO: 14733 - protein, 95 aa, Artificial Sequence
  Synthetic polypeptide
ECRLWSGMPMFRFYHHHVLASDLDKIIQPLLELDQNRSKLKLYIGHLTTLCHDRDPLILRGLTPPASYNLDDDQAAWENELQKMTRGQVSLSLKL

SEQ ID NO: 14734 - protein, 11 aa, Artificial Sequence
  Synthetic polypeptide
FGQDHPAPLRT

SEQ ID NO: 14735 - protein, 11 aa, Artificial Sequence
  Synthetic polypeptide
LLIWTRSSSPS

SEQ ID NO: 14736 - protein, 12 aa, Artificial Sequence
  Synthetic polypeptide
DVLGSPVIQLYC

SEQ ID NO: 14737 - protein, 43 aa, Artificial Sequence
  Synthetic polypeptide
EDGPLPAAVLISDFSTSGTVTSKFLLFIRCSWQPCHSAILLKH

SEQ ID NO: 14738 - protein, 269 aa, Artificial Sequence
  Synthetic polypeptide
ISVVYKMFLAALSFSYIAKALGGIIMKISITQIERRFDISSSLAGLIDGSFEIGNLLVIVFVSYFGSKLHRPKLIGIGCLLMGTGSILTSLPHFFMGYYRYSKETHINPSENSTSSLSTCLINQTLSFNGTSPEIVEKDCVKESGSHMWIYVFMGNMLRGIGETPIVPLGISYIDDFAKEGHSSLYLGSLNAIGMIGPVIGFALGSLFAKMYVDIGYVDLSTIRITPKDSRWVGAWWLGFLVSGLFSIISSIPFFFLPKNPNKPQKERK

SEQ ID NO: 14739 - protein, 726 aa, Artificial Sequence
  Synthetic polypeptide
ISVVYKMFLAALSFSYIAKALGGIIMKISITQIERRFDISSSLAGLIDGSFEIGNLLVIVFVSYFGSKLHRPKLIGIGCLLMGTGSILTSLPHFFMGYYRYSKETHINPSENSTSSLSTCLINQTLSFNGTSPEIVEKDCVKESGSHMWIYVFMGNMLRGIGETPIVPLGISYIDDFAKEGHSSLYLGSLNAIGMIGPVIGFALGSLFAKMYVDIGYVDLSTIRITPKDSRWVGAWWLGFLVSGLFSIISSIPFFFLPKNPNKPQKERKISLSLHVLKTNDDRNQTANLTNQGKNVTKNVTGFFQSLKSILTNPLYVIFLLLTLLQVSSFIGSFTYVFKYMEQQYGQSASHANFLLGIITIPTVATGMFLGGFIIKKFKLSLVGIAKFSFLTSMISFLFQLLYFPLICESKSVAGLTLTYDGNNSVASHVDVPLSYCNSECNCDESQWEPVCGNNGITYLSPCLAGCKSSSGIKKHTVFYNCSCVEVTGLQNRNYSAHLGECPRDNTCTRKFFIYVAIQVINSLFSATGGTTFILLTVKIVQPELKALAMGFQSMVIRTLGGILAPIYFGALIDKTCMKWSTNSCGAQGACRIYNSVFFGIVQPELKALAIGFHSMIMRSLGGILVPIYFGALIDTTCMKWSTNSCGARGACRIYNSTYLGRAFFGLKVALIFPVLVLLTVFIFVVRKKSHGKDTKVLENERQVMDEANLEFLNDSEHFVPSAEEQ

SEQ ID NO: 14740 - protein, 680 aa, Artificial Sequence
  Synthetic polypeptide
ISVVYKMFLAALSFSYIAKALGGIIMKISITQIERRFDISSSLAGLIDGSFEIGNLLVIVFVSYFGSKLHRPKLIGIGCLLMGTGSILTSLPHFFMGYYRYSKETHINPSENSTSSLSTCLINQTLSFNGTSPEIVEKDCVKESGSHMWIYVFMGNMLRGIGETPIVPLGISYIDDFAKEGHSSLYLGSLNAIGMIGPVIGFALGSLFAKMYVDIGYVDLSTIRITPKDSRWVGAWWLGFLVSGLFSIISSIPFFFLPKNPNKPQKERKISLSLHVLKTNDDRNQTANLTNQGKNVTKNVTGFFQSLKSILTNPLYVIFLLLTLLQVSSFIGSFTYVFKYMEQQYGQSASHANFLLGIITIPTVATGMFLGGFIIKKFKLSLVGIAKFSFLTSMISFLFQLLYFPLICESKSVAGLTLTYDGNNSVASHVDVPLSYCNSECNCDESQWEPVCGNNGITYLSPCLAGCKSSSGIKKHTVFYNCSCVEVTGLQNRNYSAHLGECPRDNTCTRKFFIYVAIQVINSLFSATGGTTFILLTVKIVQPELKALAMGFQSMVIRTLGGILAPIYFGALIDKTCMKWSTNSCGAQGACRIYNSVFFGRVYLGLSIALRFPALVLYIVFIFAMKKKFQGKDTKASDNERKVMDEANLEFLNNGEHFVPSAGTDSKTCNLDMQDNAAAN

SEQ ID NO: 14741 - protein, 665 aa, Artificial Sequence
  Synthetic polypeptide
ISVVYKMFLAALSFSYIAKALGGIIMKISITQIERRFDISSSLAGLIDGSFEIGNLLVIVFVSYFGSKLHRPKLIGIGCLLMGTGSILTSLPHFFMGYYRYSKETNIDPSENSTSNLPNCLINQMLSLNRTPSEIIERGCVKESGSHMWIYVFMGNMLRGIGETPIVPLGISYIDDFAKEGHSSLYLGTVNVMGMTGLVFAFMLGSLFAKMYVDIGYVDLSTIRITPKDSRWVGAWWLGFLVSGIVSIISSIPFFFLPLNPNKPQKERKVSLFLHVLKTNDKRNQIANLTNRRKYITKNVTGFFQSLKSILTNPLYVIFVIFTLLHMSSYIASLTYIIKMVEQQYGWSASKTNFLLGVLALPAVAIGMFSGGYIIKKFKLSLVGLAKLAFCSATVHLLSQVLYFFLICESKSVAGLTLTYDGNSPVRSHVDVPLSYCNSECNCDESQWEPVCGNNGITYLSPCLAGCKSSSGNKEPIVFYNCSCVEVIGLQNKNYSAHLGECPRDDACTRKSYVYFVIQVLDAFLCAVGLTSYSVLVIRIVQPELKALAIGFHSMIMRSLGGILVPIYFGALIDTTCMKWSTNSCGARGACRIYNSTYLGRAFFGLKVALIFPVLVLLTVFIFVVRKKSHGKDTKVLENERQVMDEANLEFLNDSEHFVPSAEEQ

SEQ ID NO: 14742 - protein, 159 aa, Artificial Sequence
  Synthetic polypeptide
ENSTSSLSTCLINQTLSFNGTSPEIVEKDCVKESGSHMWIYVFMGNMLRGIGETPIVPLGISYIDDFAKEGHSSLYLGSLNAIGMIGPVIGFALGSLFAKMYVDIGYVDLSTIRITPKDSRWVGAWWLGFLVSGLFSIISSIPFFFLPKNPNKPQKERK

SEQ ID NO: 14743 - protein, 616 aa, Artificial Sequence
  Synthetic polypeptide
ENSTSSLSTCLINQTLSFNGTSPEIVEKDCVKESGSHMWIYVFMGNMLRGIGETPIVPLGISYIDDFAKEGHSSLYLGSLNAIGMIGPVIGFALGSLFAKMYVDIGYVDLSTIRITPKDSRWVGAWWLGFLVSGLFSIISSIPFFFLPKNPNKPQKERKISLSLHVLKTNDDRNQTANLTNQGKNVTKNVTGFFQSLKSILTNPLYVIFLLLTLLQVSSFIGSFTYVFKYMEQQYGQSASHANFLLGIITIPTVATGMFLGGFIIKKFKLSLVGIAKFSFLTSMISFLFQLLYFPLICESKSVAGLTLTYDGNNSVASHVDVPLSYCNSECNCDESQWEPVCGNNGITYLSPCLAGCKSSSGIKKHTVFYNCSCVEVTGLQNRNYSAHLGECPRDNTCTRKFFIYVAIQVINSLFSATGGTTFILLTVKIVQPELKALAMGFQSMVIRTLGGILAPIYFGALIDKTCMKWSTNSCGAQGACRIYNSVFFGIVQPELKALAIGFHSMIMRSLGGILVPIYFGALIDTTCMKWSTNSCGARGACRIYNSTYLGRAFFGLKVALIFPVLVLLTVFIFVVRKKSHGKDTKVLENERQVMDEANLEFLNDSEHFVPSAEEQ

SEQ ID NO: 14744 - protein, 570 aa, Artificial Sequence
  Synthetic polypeptide
ENSTSSLSTCLINQTLSFNGTSPEIVEKDCVKESGSHMWIYVFMGNMLRGIGETPIVPLGISYIDDFAKEGHSSLYLGSLNAIGMIGPVIGFALGSLFAKMYVDIGYVDLSTIRITPKDSRWVGAWWLGFLVSGLFSIISSIPFFFLPKNPNKPQKERKISLSLHVLKTNDDRNQTANLTNQGKNVTKNVTGFFQSLKSILTNPLYVIFLLLTLLQVSSFIGSFTYVFKYMEQQYGQSASHANFLLGIITIPTVATGMFLGGFIIKKFKLSLVGIAKFSFLTSMISFLFQLLYFPLICESKSVAGLTLTYDGNNSVASHVDVPLSYCNSECNCDESQWEPVCGNNGITYLSPCLAGCKSSSGIKKHTVFYNCSCVEVTGLQNRNYSAHLGECPRDNTCTRKFFIYVAIQVINSLFSATGGTTFILLTVKIVQPELKALAMGFQSMVIRTLGGILAPIYFGALIDKTCMKWSTNSCGAQGACRIYNSVFFGRVYLGLSIALRFPALVLYIVFIFAMKKKFQGKDTKASDNERKVMDEANLEFLNNGEHFVPSAGTDSKTCNLDMQDNAAAN

SEQ ID NO: 14745 - protein, 25 aa, Artificial Sequence
  Synthetic polypeptide
GFPISISLKLLFLRKFNIKFINLFN

SEQ ID NO: 14746 - protein, 24 aa, Artificial Sequence
  Synthetic polypeptide
RFSHQHFTEAALSKKIQHQVYQPV

SEQ ID NO: 14747 - protein, 131 aa, Artificial Sequence
  Synthetic polypeptide
DCVKESGSHMWIYVFMGNMLRGIGETPIVPLGISYIDDFAKEGHSSLYLGSLNAIGMIGPVIGFALGSLFAKMYVDIGYVDLSTIRITPKDSRWVGAWWLGFLVSGLFSIISSIPFFFLPKNPNKPQKERK

SEQ ID NO: 14748 - protein, 588 aa, Artificial Sequence
  Synthetic polypeptide
DCVKESGSHMWIYVFMGNMLRGIGETPIVPLGISYIDDFAKEGHSSLYLGSLNAIGMIGPVIGFALGSLFAKMYVDIGYVDLSTIRITPKDSRWVGAWWLGFLVSGLFSIISSIPFFFLPKNPNKPQKERKISLSLHVLKTNDDRNQTANLTNQGKNVTKNVTGFFQSLKSILTNPLYVIFLLLTLLQVSSFIGSFTYVFKYMEQQYGQSASHANFLLGIITIPTVATGMFLGGFIIKKFKLSLVGIAKFSFLTSMISFLFQLLYFPLICESKSVAGLTLTYDGNNSVASHVDVPLSYCNSECNCDESQWEPVCGNNGITYLSPCLAGCKSSSGIKKHTVFYNCSCVEVTGLQNRNYSAHLGECPRDNTCTRKFFIYVAIQVINSLFSATGGTTFILLTVKIVQPELKALAMGFQSMVIRTLGGILAPIYFGALIDKTCMKWSTNSCGAQGACRIYNSVFFGIVQPELKALAIGFHSMIMRSLGGILVPIYFGALIDTTCMKWSTNSCGARGACRIYNSTYLGRAFFGLKVALIFPVLVLLTVFIFVVRKKSHGKDTKVLENERQVMDEANLEFLNDSEHFVPSAEEQ

SEQ ID NO: 14749 - protein, 542 aa, Artificial Sequence
  Synthetic polypeptide
DCVKESGSHMWIYVFMGNMLRGIGETPIVPLGISYIDDFAKEGHSSLYLGSLNAIGMIGPVIGFALGSLFAKMYVDIGYVDLSTIRITPKDSRWVGAWWLGFLVSGLFSIISSIPFFFLPKNPNKPQKERKISLSLHVLKTNDDRNQTANLTNQGKNVTKNVTGFFQSLKSILTNPLYVIFLLLTLLQVSSFIGSFTYVFKYMEQQYGQSASHANFLLGIITIPTVATGMFLGGFIIKKFKLSLVGIAKFSFLTSMISFLFQLLYFPLICESKSVAGLTLTYDGNNSVASHVDVPLSYCNSECNCDESQWEPVCGNNGITYLSPCLAGCKSSSGIKKHTVFYNCSCVEVTGLQNRNYSAHLGECPRDNTCTRKFFIYVAIQVINSLFSATGGTTFILLTVKIVQPELKALAMGFQSMVIRTLGGILAPIYFGALIDKTCMKWSTNSCGAQGACRIYNSVFFGRVYLGLSIALRFPALVLYIVFIFAMKKKFQGKDTKASDNERKVMDEANLEFLNNGEHFVPSAGTDSKTCNLDMQDNAAAN

SEQ ID NO: 14750 - protein, 49 aa, Artificial Sequence
  Synthetic polypeptide
GFPISISLKLLFLRLCKGIWVTHVDLCLHGEYASWHRGNPHSTIGDFIH

SEQ ID NO: 14751 - protein, 16 aa, Artificial Sequence
  Synthetic polypeptide
RFSHQHFTEAALSKIV

SEQ ID NO: 14752 - protein, 32 aa, Artificial Sequence
  Synthetic polypeptide
DPQTLDCGLVPTCVACEELGCTAGRRIPTGSK

SEQ ID NO: 14753 - protein, 35 aa, Artificial Sequence
  Synthetic polypeptide
EIPKPWTADWYPPVWPVRNWAAQPEGGFLQEASSN

SEQ ID NO: 14754 - protein, 160 aa, Artificial Sequence
  Synthetic polypeptide
GTGLHSRKEDSYRKQVVIDGETCLLDILDTAGQEEYSAMRDQYMRTGEGFLCVFAINNTKSFEDIHHYREQIKRVKDSEDVPMVLVGNKCDLPSRTVDTKQAQDLARSYGIPFIETSAKTRQGVDDAFYTLVREIRKHKEKMSKDGKKKKKKSKTKCVIM

SEQ ID NO: 14755 - protein, 161 aa, Artificial Sequence
  Synthetic polypeptide
GTGLHSRKEDSYRKQVVIDGETCLLDILDTAGQEEYSAMRDQYMRTGEGFLCVFAINNTKSFEDIHHYREQIKRVKDSEDVPMVLVGNKCDLPSRTVDTKQAQDLARSYGIPFIETSAKTRQRVEDAFYTLVREIRQYRLKKISKEEKTPGCVKIKKCIIM

SEQ ID NO: 14756 - protein, 5 aa, Artificial Sequence
  Synthetic polypeptide
LRWLP

SEQ ID NO: 14757 - protein, 81 aa, Artificial Sequence
  Synthetic polypeptide
QVVTLTANDKTSVSFSSLPGQGVIYNVIVWDPFLNTSAAYIPAHTYACSFEAGEGSCASLAVLYLLLCLSTSSPSFITGLF

SEQ ID NO: 14758 - protein, 116 aa, Artificial Sequence
  Synthetic polypeptide
QVVTLTANDKTSVSFSSLPGQGVIYNVIVWDPFLNTSAAYIPAHTYACSFEAGEGSCASLGRVSSKVFFTLFALLGFFICFFGHRFWKTELFFIGFIIMGFFFYILITRLTPIKYD

SEQ ID NO: 14759 - protein, 134 aa, Artificial Sequence
  Synthetic polypeptide
QVVTLTANDKTSVSFSSLPGQGVIYNVIVWDPFLNTSAAYIPAHTYACSFEAGEGSCASLGRVSSKVFFTLFALLGFFICFFGHRFWKTELFFIGFIIMGFFFYILITRLTPIKYDAEHTDLWSHWLLFGGFSH

SEQ ID NO: 14760 - protein, 180 aa, Artificial Sequence
  Synthetic polypeptide
QVVTLTANDKTSVSFSSLPGQGVIYNVIVWDPFLNTSAAYIPAHTYACSFEAGEGSCASLGRVSSKVFFTLFALLGFFICFFGHRFWKTELFFIGFIIMGFFFYILITRLTPIKYDVNLILTAVTGSVGGMFLVAVWWRFGILSICMLCVGLVLGFLISSVTFFTPLETGSLSVTHAGLQ

SEQ ID NO: 14761 - protein, 341 aa, Artificial Sequence
  Synthetic polypeptide
QVVTLTANDKTSVSFSSLPGQGVIYNVIVWDPFLNTSAAYIPAHTYACSFEAGEGSCASLGRVSSKVFFTLFALLGFFICFFGHRFWKTELFFIGFIIMGFFFYILITRLTPIKYDVNLILTAVTGSVGGMFLVAVWWRFGILSICMLCVGLVLGFLISSVTFFTPLGNLKIFHDDGVFWVTFSCIAILIPVVFMGCLRILNILTCGVIGSYSVVLAIDSYWSTSLSYITLNVLKRALNKDFHRAFTNVPFQTNDFIILAVWGMLAVSGITLQIRRERGRPFFPPHPYKLWKQERERRVTNILDPSYHIPPLRERLYGRLTQIKGLFQKEQPAGERTPLLL

SEQ ID NO: 14762 - protein, 7 aa, Artificial Sequence
  Synthetic polypeptide
SGGYPNS

SEQ ID NO: 14763 - protein, 52 aa, Artificial Sequence; identical to SEQ ID NO: 5076
  Synthetic polypeptide

SEQ ID NO: 14764 - protein, 62 aa, Artificial Sequence; identical to SEQ ID NO: 4592
  Synthetic polypeptide

SEQ ID NO: 14765 - protein, 87 aa, Artificial Sequence; identical to SEQ ID NO: 3811
  Synthetic polypeptide

SEQ ID NO: 14766 - protein, 521 aa, Artificial Sequence; identical to SEQ ID NO: 1988
  Synthetic polypeptide

SEQ ID NO: 14767 - protein, 20 aa, Artificial Sequence
  Synthetic polypeptide
HDSPFQFLGNRHCQWTGFHP

SEQ ID NO: 14768 - protein, 7 aa, Artificial Sequence
  Synthetic polypeptide
IMSSMKK

SEQ ID NO: 14769 - protein, 489 aa, Artificial Sequence
  Synthetic polypeptide
NNVFHEEMMKMRQAKLDYQRLLLEKRQRKKRLEPFMVQPNPEARLRRAKPRASDEQTPLVNCHTPHSNVILHGIDGPAAVLKPDEVHAPSVSSSVVEEDAENTVDTASKPGLQERLQKHDISESVNFDEETDGISQSACLERPNSASSQNSTDTGTSGSATAAQPADNLLGDIDDLEDFVYSPAPQGVTVRCRIIRDKRGMDRGLFPTYYMYLEKEENQKIFLLAARKRKKSKTANYLISIDPVDLSREGESYVGKLRSNLMGTKFTVYDRGICPMKGRGLVGAAHTRQELAAISYETNVLGFKGPRKMSVIIPGMTLNHKQIPYQPQNNHDSLLSRWQNRTMENLVELHNKAPVWNSDTQSYVLNFRGRVTQASVKNFQIVHKNDPDYIVMQFGRVADDVFTLDYNYPLCAVQAFGIGLSSFDKCIQTLRMQELCELHRQHHSAASLVHRTVCQRWVGHPWRLLPQTSLLWTDLSPPPVVPAPHQISM

SEQ ID NO: 14770 - protein, 430 aa, Artificial Sequence
  Synthetic polypeptide
NNVFHEEMMKMRQAKLDYQRLLLEKRQRKKRLEPFMVQPNPEARLRRAKPRASDEQTPLVNCHTPHSNVILHGIDGPAAVLKPDEVHAPSVSSSVVEEDAENTVDTASKPGLQERLQKHDISESVNFDEETDGISQSACLERPNSASSQNSTDTGTSGSATAAQPADNLLGDIDDLEDFVYSPAPQGVTVRCRIIRDKRGMDRGLFPTYYMYLEKEENQKIFLLAARKRKKSKTANYLISIDPVDLSREGESYVGKLRSNLMGTKFTVYDRGICPMKGRGLVGAAHTRQELAAISYETNVLGFKGPRKMSVIIPGMTLNHKQIPYQPQNNHDSLLSRWQNRTMENLVELHNKAPVWNSDTQSYVLNFRGRVTQASVKNFQIVHKNDPDYIVMQFGRVADDVFTLDYNYPLCAVQAFGIGLSSFDSKLACE

SEQ ID NO: 14771 - protein, 27 aa, Artificial Sequence
  Synthetic polypeptide
NNVFHEEMMKMRQAKLDYQVLMVQLLS

SEQ ID NO: 14772 - protein, 22 aa, Artificial Sequence
  Synthetic polypeptide
LGVVAHASSPRQQFPQASNRLH

SEQ ID NO: 14773 - protein, 44 aa, Artificial Sequence
  Synthetic polypeptide
SPISTKNTKISWVWWLMPLVPGSNSPRQATVFTSFSKSSHGKGL

SEQ ID NO: 14774 - protein, 69 aa, Artificial Sequence
  Synthetic polypeptide
SQAAIPPGKQPSSLASPNPPMAKGSEQGFQSPPASSSSVTINTAPFQAMQTVFNVNAPLPPRKEQEIKE

SEQ ID NO: 14775 - protein, 413 aa, Artificial Sequence
  Synthetic polypeptide
SQAAIPPGKQPSSLASPNPPMAKGSEQGFQSPPASSSSVTINTAPFQAMQTVFNVNAPLPPRKEQEIKESPYSPGYNQSFTTASTQTPPQCQLPSIHVEQTVHSQETAANYHPDGTIQVSNGSLAFYPAQTNVFPRPTQPFVNSRGSVRGCTRGGRLITNSYRSPGGYKGFDTYRGLPSISNGNYSQLQFQAREYSGAPYSQRDNFQQCYKRGGTSGGPRANSRAGWSDSSQVSSPERDNETFNSGDSGQGDSRSMTPVDVPVTNPAATILPVHVYPLPQQMRVAFSAARTSNLAPGTLDQPIVFDLLLNNLGETFDLQLGRFNCPVNGTYVFIFHMLKLAVNVPLYVNLMKNEEVLVSAYANDGAPDHETASNHAILQLFQGDQIWLRLHRGAIYGSSWKYSTFSGYLLYQD

SEQ ID NO: 14776 - protein, 246 aa, Artificial Sequence
  Synthetic polypeptide
SQAAIPPGKQPSSLASPNPPMAKGSEQGFQSPPASSSSVTINTAPFQAMQTVFNVNAPLPPRKEQEIKESPYSPGYNQSFTTASTQTPPQCQLPSIHVEQTVHSQETANYHPDGTIQVSNGSLAFYPAQTNVFPRPTQPFVNSRGSVRGCTRGGRLITNSYRSPGGYKGFDTYRGLPSISNGNYSQLQFQAREYSGAPYSQRCLETSEPLWLLGKARIISSSVISEEGHLVVHEQIREQGGVILLR

SEQ ID NO: 14777 - protein, 412 aa, Artificial Sequence
  Synthetic polypeptide
SQAAIPPGKQPSSLASPNPPMAKGSEQGFQSPPASSSSVTINTAPFQAMQTVFNVNAPLPPRKEQEIKESPYSPGYNQSFTTASTQTPPQCQLPSIHVEQTVHSQETANYHPDGTIQVSNGSLAFYPAQTNVFPRPTQPFVNSRGSVRGCTRGGRLITNSYRSPGGYKGFDTYRGLPSISNGNYSQLQFQAREYSGAPYSQRDNFQQCYKRGGTSGGPRANSRAGWSDSSQVSSPERDNETFNSGDSGQGDSRSMTPVDVPVTNPAATILPVHVYPLPQQMRVAFSAARTSNLAPGTLDQPIVFDLLLNNLGETFDLQLGRFNCPVNGTYVFIFHMLKLAVNVPLYVNLMKNEEVLVSAYANDGAPDHETASNHAILQLFQGDQIWLRLHRGAIYGSSWKYSTFSGYLLYQD

SEQ ID NO: 14778 - protein, 246 aa, Artificial Sequence
  Synthetic polypeptide
SQAAIPPGKQPSSLASPNPPMAKGSEQGFQSPPASSSSVTINTAPFQAMQTVFNVNAPLPPRKEQEIKESPYSPGYNQSFTTASTQTPPQCQLPSIHVEQTVHSQETANYHPDGTIQVSNGSLAFYPAQTNVFPRPTQPFVNSRGSVRGCTRGGRLITNSYRSPGGYKGFDTYRGLPSISNGNYSQLQFQAREYSGAPYSQRDNFQQCYKRGGTSGGPRANSRANCFIMRNSLLLIKQQGGVILLR

SEQ ID NO: 14779 - protein, 226 aa, Artificial Sequence
  Synthetic polypeptide
SQAAIPPGKQPSSLASPNPPMAKGSEQGFQSPPASSSSVTINTAPFQAMQTVFNVNAPLPPRKEQEIKESPYSPGYNQSFTTASTQTPPQCQLPSIHVEQTVHSQETAQTNVFPRPTQPFVNSRGSVRGCTRGGRLITNSYRSPGGYKGFDTYRGLPSISNGNYSQLQFQAREYSGAPYSQRDNFQQCYKRGGTSGGPRANSRANCFIMRNSLLLIKQQGGVILLR

SEQ ID NO: 14780 - protein, 22 aa, Artificial Sequence
  Synthetic polypeptide
LTGCVILSEQPPLPAPPARRPC

SEQ ID NO: 14781 - protein, 7 aa, Artificial Sequence
  Synthetic polypeptide
YWLCDTE

SEQ ID NO: 14782 - protein, 63 aa, Artificial Sequence
  Synthetic polypeptide
FLHFHLRSVAPIKNVSRRSWVVDDNVLQHNSLSLHIFSHIQHDSSNGWEHGSIYHYRLYGHPK

SEQ ID NO: 14783 - protein, 55 aa, Artificial Sequence
  Synthetic polypeptide
FLHFHLRSVAPIKNVSRRSWVVDDNVLQHNSLSLHIFSHIQHDSSNGWEHGVTDM

SEQ ID NO: 14784 - protein, 395 aa, Artificial Sequence
  Synthetic polypeptide
FLHFHLRSVAPIKNVSRRSWVVDDNVLQHNSLSLHIFSHIQHDSSNGWEHGVTDMMLQDKPYPDWGKSARAFWKKGNVRITLFWTVLFTLTSVVVLVITTDWISWDKLNRGFLPSDEVSRAFLASFILVFDLLIVMQDWEFPHFMGDVDVNLPGLHTPHMQFKIPFFQKIFKEEYRIHITGKWFNYGIIFLVLILDLNMWKNQIFYKPHEYGQYIGPGQKIYTVKDSESLKDLNRTKLSWEWRSNHTNPRTNKTYVEGDMFLHSRFIGASLDVKCLAFVPSLIAFVWFGFFIWFFGRFLKNEPRMENQDKTYTRMKRKSPSEHSKDMGITRENTQASVEDPLNDPSLVCIRSDFNEIVYKSSHLTSENLSSQLNESTSATEADQDPTTSKSTPTN

SEQ ID NO: 14785 - protein, 176 aa, Artificial Sequence
  Synthetic polypeptide
GQLLRLKMFREDHGSWMTMFFSTILFLFIFSHIYNTILLMDGNMGAYIITDYMGIRNESFMKLAAVGTWMGDFVTAWMVTDMMLQDKPYPDWGKSARAFWKKGNVRITLFWTVLFTLTSVVVLVITTDWISWDKLNRGFLPSDEVSRAFLASFILVFDLLIVMQANGLTMELSSSS

SEQ ID NO: 14786 - protein, 422 aa, Artificial Sequence
  Synthetic polypeptide
GQLLRLKMFREDHGSWMTMFFSTILFLFIFSHIYNTILLMDGNMGAYIITDYMGIRNESFMKLAAVGTWMGDFVTAWMVTDMMLQDKPYPDWGKSARAFWKKGNVRITLFWTVLFTLTSVVVLVITTDWISWDKLNRGFLPSDEVSRAFLASFILVFDLLIVMQDWEFPHFMGDVDVNLPGLHTPHMQFKIPFFQKIFKEEYRIHITGKWFNYGIIFLVLILDLNMWKNQIFYKPHEYGQYIGPGQKIYTVKDSESLKDLNRTKLSWEWRSNHTNPRTNKTYVEGDMFLHSRFIGASLDVKCLAFVPSLIAFVWFGFFIWFFGRFLKNEPRMENQDKTYTRMKRKSPSEHSKDMGITRENTQASVEDPLNDPSLVCIRSDFNEIVYKSSHLTSENLSSQLNESTSATEADQDPTTSKSTPTN

SEQ ID NO: 14787 - protein, 48 aa, Artificial Sequence
  Synthetic polypeptide
GQLLRLKMFREDHGSWMTMFFSTILFLFIFSHIYNTILLMDGNMGSLI

SEQ ID NO: 14788 - protein, 37 aa, Artificial Sequence
  Synthetic polypeptide
GRSQDGRIGTAPVYSSQRERCRRPVISAFPSEVSCSD

SEQ ID NO: 14789 - protein, 12 aa, Artificial Sequence
  Synthetic polypeptide
DHDNYNCLNGRI

SEQ ID NO: 14790 - protein, 908 aa, Artificial Sequence
  Synthetic polypeptide
LYPPKKSECFLFSNSRTISLNVFSFCPAAKRLCASFHVKITTTTIVSMEEFNGKPDSLFFNDGQRRIDFVLVYEDESRKETNKKGTNEKQRRKRQAYESNLICHGLQLEATRSVLDDKLVFVKVHAPWEVLCTYAEIMHIKLPLKPNDLKNRSSAFGTLNWFTKVLSVDESIIKPEQEFFTAPFEKNRMNDFYIVDRDAFFNPATRSRIVYFILSRVKYQVINNVSKFGINRLVNSGIYKAAFPLHDCKFRRQSEDPSCPNERYLLYREWAHPRSIYKKQPLDLIRKYYGEKIGIYFAWLGYYTQMLLLAAVVGVACFLYGYLNQDNCTWSKEVCHPDIGGKIIMCPQCDRLCPFWKLNITCESSKKLCIFDSFGTLVFAVFMGVWVTLFLEFWKRRQAELEYEWDTVELQQEEQARPEYEARCTHVVINEITQEEERIPFTAWGKCIRITLCASAVFFWILLIIASVIGIIVYRLSVFIVFSAKLPKNINGTDPIQKYLTPQTATSITASIISFIIIMILNTIYEKVAIMITNFELPRTQTDYENSLTMKMFLFQFVNYYSSCFYIAFFKGKFVGYPGDPVYWLGKYRNEECDPGGCLLELTTQLTIIMGGKAIWNNIQEVLLPWIMNLIGRFHRVSGSEKITPRWEQDYHLQPMGKLGLFYEYLEMIIQFGFVTLFVASFPLAPLLALVNNILEIRVDAWKLTTQFRRLVPEKAQDIGAWQPIMQGIAILAVVTNAMIIAFTSDMIPRLVYYWSFSVPPYGDHTSYTMEGYINNTLSIFKVADFKNKSKGNPYSDLGNHTTCRYRDFRYPPGHPQEYKHNIYYWHVIAAKLAFIIVMEHVIYSVKFFISYAIPDVSKRTKSKIQREKYLTQKLLHENHLKDMTKNMGVIAERMIEAVDNNLRPKSE

SEQ ID NO: 14791 - protein, 927 aa, Artificial Sequence
  Synthetic polypeptide
LYPPKKSECFLFSNSRTISLNVFSFCPAAKRLCASFHVKITTTTIVSMEEFNGKPDSLFFNDGQRRIDFVLVYEDESRKETNKKGTNEKQRRKRQAYESNLICHGLQLEATRSVLDDKLVFVKVHAPWEVLCTYAEIMHIKLPLKPNDLKNRSSAFGTLNWFTKVLSVDESIIKPEQEFFTAPFEKNRMNDFYIVDRDAFFNPATRSRIVYFILSRVKYQVINNVSKFGINRLVNSGIYKAAFPLHDCKFRRQSEDPSCPNERYLLYREWAHPRSIYKKQPLDLIRKYYGEKIGIYFAWLGYYTQMLLLAAVVGVACFLYGYLNQDNCTWSKEVCHPDIGGKIIMCPQCDRLCPFWKLNITCESSKKLCIFDSFGTLVFAVFMGVWVTLFLEFWKRRQAELEYEWDTVELQQEEQARPEYEARCTHVVINEITQEEERIPFTAWGKCIRITLCASAVFFWILLIIASVIGIIVYRLSVFIVFSAKLPKNINGTDPIQKYLTPQTATSITASIISFIIIMILNTIYEKVAIMITNFELPRTQTDYENSLTMKMFLFQFVNYYSSCFYIAFFKGKFVGYPGDPVYWLGKYRNEECDPGGCLLELTTQLTIIMGGKAIWNNIQEVLLPWIMNLIGRFHRVSGSEKITPRWEQDYHLQPMGKLGLFYEYLEMIIQFGFVTLFVASFPLAPLLALVNNILEIRVDAWKLTTQFRRLVPEKAQDIGAWQPIMQGIAILAVVTNAMIIAFTSDMIPRLVYYWSFSVPPYGDHTSYTMEGYINNTLSIFKVADFKNKSKGNPYSDLGNHTTCRYRDFRYPPGHPQEYKHNIYYWHVIAAKLAFIIVMEYLALLPRLGHSGMILAHCNLRLPVDCCMCYRFVDEIRLLEQLTSDFIDSLYYIFSISIISIFFSVTFFFLLLSLGPTPCFSVSNFLS

SEQ ID NO: 14792 - protein, 50 aa, Artificial Sequence
  Synthetic polypeptide
TYFPFALLPRGFVPVFMLRSRQLQLSQWKNLMENLTPSFLMMASEELTLF

SEQ ID NO: 14793 - protein, 35 aa, Artificial Sequence
  Synthetic polypeptide
EIVHLRQFWNPGLCSIYGSMGYLVFGVLEATPGRT

SEQ ID NO: 14794 - protein, 67 aa, Artificial Sequence
  Synthetic polypeptide
FLHFHLRNCASSTVLEPWSLQYLWEYGLPCFWSFGSDARQNLSMNGILLSYSRKNKPDQNTKHDVLT

SEQ ID NO: 14795 - protein, 574 aa, Artificial Sequence
  Synthetic polypeptide
RRSQDGRIGTAPVYSSQPEQRRRRVISAFPSEKLCIFDSFGTLVFAVFMGVWVTLFLEFWKRRQAELEYEWDTVELQQEEQARPEYEARCTHVVINEITQEEERIPFTAWGKCIRITLCASAVFFWILLIIASVIGIIVYRLSVFIVFSAKLPKNINGTDPIQKYLTPQTATSITASIISFIIIMILNTIYEKVAIMITNFELPRTQTDYENSLTMKMFLFQFVNYYSSCFYIAFFKGKFVGYPGDPVYWLGKYRNEECDPGGCLLELTTQLTIIMGGKAIWNNIQEVLLPWIMNLIGRFHRVSGSEKITPRWEQDYHLQPMGKLGLFYEYLEMIIQFGFVTLFVASFPLAPLLALVNNILEIRVDAWKLTTQFRRLVPEKAQDIGAWQPIMQGIAILAVVTNAMIIAFTSDMIPRLVYYWSFSVPPYGDHTSYTMEGYINNTLSIFKVADFKNKSKGNPYSDLGNHTTCRYRDFRYPPGHPQEYKHNIYYWHVIAAKLAFIIVMEHVIYSVKFFISYAIPDVSKRTKSKIQREKYLTQKLLHENHLKDMTKNMGVIAERMIEAVDNNLRPKSE

SEQ ID NO: 14796 - protein, 593 aa, Artificial Sequence
  Synthetic polypeptide
RRSQDGRIGTAPVYSSQPEQRRRRVISAFPSEKLCIFDSFGTLVFAVFMGVWVTLFLEFWKRRQAELEYEWDTVELQQEEQARPEYEARCTHVVINEITQEEERIPFTAWGKCIRITLCASAVFFWILLIIASVIGIIVYRLSVFIVFSAKLPKNINGTDPIQKYLTPQTATSITASIISFIIIMILNTIYEKVAIMITNFELPRTQTDYENSLTMKMFLFQFVNYYSSCFYIAFFKGKFVGYPGDPVYWLGKYRNEECDPGGCLLELTTQLTIIMGGKAIWNNIQEVLLPWIMNLIGRFHRVSGSEKITPRWEQDYHLQPMGKLGLFYEYLEMIIQFGFVTLFVASFPLAPLLALVNNILEIRVDAWKLTTQFRRLVPEKAQDIGAWQPIMQGIAILAVVTNAMIIAFTSDMIPRLVYYWSFSVPPYGDHTSYTMEGYINNTLSIFKVADFKNKSKGNPYSDLGNHTTCRYRDFRYPPGHPQEYKHNIYYWHVIAAKLAFIIVMEYLALLPRLGHSGMILAHCNLRLPVDCCMCYRFVDEIRLLEQLTSDFIDSLYYIFSISIISIFFSVTFFFLLLSLGPTPCFSVSNFLS

SEQ ID NO: 14797 - protein, 56 aa, Artificial Sequence
  Synthetic polypeptide
FLHFHLRYRAHLTRECQTVGAEIVHLRQFWNPGLCSIYGSMGYLVFGVLEATPGRT

SEQ ID NO: 14798 - protein, 557 aa, Artificial Sequence
  Synthetic polypeptide
GTGLISLGSARQWAQKLCIFDSFGTLVFAVFMGVWVTLFLEFWKRRQAELEYEWDTVELQQEEQARPEYEARCTHVVINEITQEEERIPFTAWGKCIRITLCASAVFFWILLIIASVIGIIVYRLSVFIVFSAKLPKNINGTDPIQKYLTPQTATSITASIISFIIIMILNTIYEKVAIMITNFELPRTQTDYENSLTMKMFLFQFVNYYSSCFYIAFFKGKFVGYPGDPVYWLGKYRNEECDPGGCLLELTTQLTIIMGGKAIWNNIQEVLLPWIMNLIGRFHRVSGSEKITPRWEQDYHLQPMGKLGLFYEYLEMIIQFGFVTLFVASFPLAPLLALVNNILEIRVDAWKLTTQFRRLVPEKAQDIGAWQPIMQGIAILAVVTNAMIIAFTSDMIPRLVYYWSFSVPPYGDHTSYTMEGYINNTLSIFKVADFKNKSKGNPYSDLGNHTTCRYRDFRYPPGHPQEYKHNIYYWHVIAAKLAFIIVMEHVIYSVKFFISYAIPDVSKRTKSKIQREKYLTQKLLHENHLKDMTKNMGVIAERMIEAVDNNLRPKSE

SEQ ID NO: 14799 - protein, 576 aa, Artificial Sequence
  Synthetic polypeptide
GTGLISLGSARQWAQKLCIFDSFGTLVFAVFMGVWVTLFLEFWKRRQAELEYEWDTVELQQEEQARPEYEARCTHVVINEITQEEERIPFTAWGKCIRITLCASAVFFWILLIIASVIGIIVYRLSVFIVFSAKLPKNINGTDPIQKYLTPQTATSITASIISFIIIMILNTIYEKVAIMITNFELPRTQTDYENSLTMKMFLFQFVNYYSSCFYIAFFKGKFVGYPGDPVYWLGKYRNEECDPGGCLLELTTQLTIIMGGKAIWNNIQEVLLPWIMNLIGRFHRVSGSEKITPRWEQDYHLQPMGKLGLFYEYLEMIIQFGFVTLFVASFPLAPLLALVNNILEIRVDAWKLTTQFRRLVPEKAQDIGAWQPIMQGIAILAVVTNAMIIAFTSDMIPRLVYYWSFSVPPYGDHTSYTMEGYINNTLSIFKVADFKNKSKGNPYSDLGNHTTCRYRDFRYPPGHPQEYKHNIYYWHVIAAKLAFIIVMEYLALLPRLGHSGMILAHCNLRLPVDCCMCYRFVDEIRLLEQLTSDFIDSLYYIFSISIISIFFSVTFFFLLLSLGPTPCFSVSNFLS

SEQ ID NO: 14800 - protein, 68 aa, Artificial Sequence
  Synthetic polypeptide
GVPDSGRRNCASSTVLEPWSLQYLWEYGLPCFWSFGSDARQNLSMNGILLSYSRKNKPDQNTKHDVLT

SEQ ID NO: 14801 - protein, 58 aa, Artificial Sequence
  Synthetic polypeptide
FLHFQLRYLVHLTGTGWTVGAAHGRLPFSWAWGCCSPWSAFPWSSMTGPAHRVVTKAT

SEQ ID NO: 14802 - protein, 81 aa, Artificial Sequence
  Synthetic polypeptide
FQDSQIGTALVCSSQQDRCRRWVISAFPTEVPGSSHWDWLDSGCSPWKAALFLGLGVLFSLVSIPLVIYDWACSSSSDEGH

SEQ ID NO: 14803 - protein, 39 aa, Artificial Sequence
  Synthetic polypeptide
GTWFISLGLVGQWVQPMEGCPFLGPGGVVLLGQHSLGHL

SEQ ID NO: 14804 - protein, 40 aa, Artificial Sequence
  Synthetic polypeptide
ANSKFISDRESRRSLTNSHLEKKKCDEYIPGTTSLGMSVF

SEQ ID NO: 14805 - protein, 449 aa, Artificial Sequence
  Synthetic polypeptide
ANSKFISDRESRRSLTNSHLEKKKCDEYIPGTTSLGMSVFNLSNAIMGSGILGLAFALANTGILLFLVLLTSVTLLSIYSINLLLICSKETGCMVYEKLGEQVFGTTGKFVIFGATSLQNTGAMLSYLFIVKNELPSAIKFLMGKEETFSAWYVDGRVLVVIVTFGIILPLCLLKNLGYLGYTSGFSLSCMVFFLIVVIYKKFQIPCIVPELNSTISANSTNADTCTPKYVTFNSKTVYALPTIAFAFVCHPSVLPIYSELKDRSQKKMQMVSNISFFAMFVMYFLTAIFGYLTFYDNVQSDLLHKYQSKDDILILTVRLAVIVAVILTVPVLFFTVRSSLFELAKKTKFNLCRHTVVTCILLVVINLLVIFIPSMKDIFGVVGVTSANMLIFILPSSLYLKITDQDGDKGTQRIWAALFLGLGVLFSLVSIPLVIYDWACSSSSDEGH

SEQ ID NO: 14806 - protein, 465 aa, Artificial Sequence
  Synthetic polypeptide
ANSKFISDRESRRSLTNSHLEKKKCDEYIPGTTSLGMSVFNLSNAIMGSGILGLAFALANTGILLFLVLLTSVTLLSIYSINLLLICSKETGCMVYEKLGEQVFGTTGKFVIFGATSLQNTGAMLSYLFIVKNELPSAIKFLMGKEETFSAWYVDGRVLVVIVTFGIILPLCLLKNLGYLGYTSGFSLSCMVFFLIVVIYKKFQIPCIVPELNSTISANSTNADTCTPKYVTFNSKTVYALPTIAFAFVCHPSVLPIYSELKDRSQKKMQMVSNISFFAMFVMYFLTAIFGYLTFYDNVQSDLLHKYQSKDDILILTVRLAVIVAVILTVPVLFFTVRSSLFELAKKTKFNLCRHTVVTCILLVVINLLVIFIPSMKDIFGVVGVTSANMLIFILPSSLYLKITDQDGDKGTQRIWLFLFLQFPVQPCWLSECIILLPAALSLNMLKRKELIILCSLDSGFSNLY

SEQ ID NO: 14807 - protein, 5 aa, Artificial Sequence
  Synthetic polypeptide
QQVYF

SEQ ID NO: 14808 - protein, 40 aa, Artificial Sequence
  Synthetic polypeptide
SSLLAELTASLFLIVKVEEVSQTAIWKKRSVMSIFQVQPP

SEQ ID NO: 14809 - protein, 40 aa, Artificial Sequence
  Synthetic polypeptide
FPQNLETISSLFLIVKVEEVSQTAIWKKRSVMSIFQVQPP

SEQ ID NO: 14810 - protein, 85 aa, Artificial Sequence
  Synthetic polypeptide
PFVLFFRVKETFELFTACSNYVKYTPLNKIWSMFVSLYLISPESGNYLKFISDRESRRSLTNSHLEKKKCDEYIPGTTSLGMSVF

SEQ ID NO: 14811 - protein, 494 aa, Artificial Sequence
  Synthetic polypeptide
PFVLFFRVKETFELFTACSNYVKYTPLNKIWSMFVSLYLISPESGNYLKFISDRESRRSLTNSHLEKKKCDEYIPGTTSLGMSVFNLSNAIMGSGILGLAFALANTGILLFLVLLTSVTLLSIYSINLLLICSKETGCMVYEKLGEQVFGTTGKFVIFGATSLQNTGAMLSYLFIVKNELPSAIKFLMGKEETFSAWYVDGRVLVVIVTFGIILPLCLLKNLGYLGYTSGFSLSCMVFFLIVVIYKKFQIPCIVPELNSTISANSTNADTCTPKYVTFNSKTVYALPTIAFAFVCHPSVLPIYSELKDRSQKKMQMVSNISFFAMFVMYFLTAIFGYLTFYDNVQSDLLHKYQSKDDILILTVRLAVIVAVILTVPVLFFTVRSSLFELAKKTKFNLCRHTVVTCILLVVINLLVIFIPSMKDIFGVVGVTSANMLIFILPSSLYLKITDQDGDKGTQRIWAALFLGLGVLFSLVSIPLVIYDWACSSSSDEGH

SEQ ID NO: 14812 - protein, 510 aa, Artificial Sequence
  Synthetic polypeptide
PFVLFFRVKETFELFTACSNYVKYTPLNKIWSMFVSLYLISPESGNYLKFISDRESRRSLTNSHLEKKKCDEYIPGTTSLGMSVFNLSNAIMGSGILGLAFALANTGILLFLVLLTSVTLLSIYSINLLLICSKETGCMVYEKLGEQVFGTTGKFVIFGATSLQNTGAMLSYLFIVKNELPSAIKFLMGKEETFSAWYVDGRVLVVIVTFGIILPLCLLKNLGYLGYTSGFSLSCMVFFLIVVIYKKFQIPCIVPELNSTISANSTNADTCTPKYVTFNSKTVYALPTIAFAFVCHPSVLPIYSELKDRSQKKMQMVSNISFFAMFVMYFLTAIFGYLTFYDNVQSDLLHKYQSKDDILILTVRLAVIVAVILTVPVLFFTVRSSLFELAKKTKFNLCRHTVVTCILLVVINLLVIFIPSMKDIFGVVGVTSANMLIFILPSSLYLKITDQDGDKGTQRIWLFLFLQFPVQPCWLSECIILLPAALSLNMLKRKELIILCSLDSGFSNLY

SEQ ID NO: 14813 - protein, 33 aa, Artificial Sequence
  Synthetic polypeptide
QLCKVYSSEQNLEHVCFSLPDFPRIWKLSQVYF

SEQ ID NO: 14814 - protein, 51 aa, Artificial Sequence
  Synthetic polypeptide
CSQPGLREREPRSLACWPKASLFLIVKVEEVSQTAIWKKRSVMSIFQVQPP

SEQ ID NO: 14815 - protein, 36 aa, Artificial Sequence
  Synthetic polypeptide
FSFVLQLGPQGCDAASQVSGRGNPEAWHAGQRQVYF

SEQ ID NO: 14816 - protein, 115 aa, Artificial Sequence
  Synthetic polypeptide
NSWLEVGLTMMGASLSLASLILGVKHSGNVYVLSHIFCSGQMEKDNFPLCCSLAPRAVMQPARSQGEGTQKPGMLAKGKFISDRESRRSLTNSHLEKKKCDEYIPGTTSLGMSVF

SEQ ID NO: 14817 - protein, 524 aa, Artificial Sequence
  Synthetic polypeptide
NSWLEVGLTMMGASLSLASLILGVKHSGNVYVLSHIFCSGQMEKDNFPLCCSLAPRAVMQPARSQGEGTQKPGMLAKGKFISDRESRRSLTNSHLEKKKCDEYIPGTTSLGMSVFNLSNAIMGSGILGLAFALANTGILLFLVLLTSVTLLSIYSINLLLICSKETGCMVYEKLGEQVFGTTGKFVIFGATSLQNTGAMLSYLFIVKNELPSAIKFLMGKEETFSAWYVDGRVLVVIVTFGIILPLCLLKNLGYLGYTSGFSLSCMVFFLIVVIYKKFQIPCIVPELNSTISANSTNADTCTPKYVTFNSKTVYALPTIAFAFVCHPSVLPIYSELKDRSQKKMQMVSNISFFAMFVMYFLTAIFGYLTFYDNVQSDLLHKYQSKDDILILTVRLAVIVAVILTVPVLFFTVRSSLFELAKKTKFNLCRHTVVTCILLVVINLLVIFIPSMKDIFGVVGVTSANMLIFILPSSLYLKITDQDGDKGTQRIWAALFLGLGVLFSLVSIPLVIYDWACSSSSDEGH

SEQ ID NO: 14818 - protein, 540 aa, Artificial Sequence
  Synthetic polypeptide
NSWLEVGLTMMGASLSLASLILGVKHSGNVYVLSHIFCSGQMEKDNFPLCCSLAPRAVMQPARSQGEGTQKPGMLAKGKFISDRESRRSLTNSHLEKKKCDEYIPGTTSLGMSVFNLSNAIMGSGILGLAFALANTGILLFLVLLTSVTLLSIYSINLLLICSKETGCMVYEKLGEQVFGTTGKFVIFGATSLQNTGAMLSYLFIVKNELPSAIKFLMGKEETFSAWYVDGRVLVVIVTFGIILPLCLLKNLGYLGYTSGFSLSCMVFFLIVVIYKKFQIPCIVPELNSTISANSTNADTCTPKYVTFNSKTVYALPTIAFAFVCHPSVLPIYSELKDRSQKKMQMVSNISFFAMFVMYFLTAIFGYLTFYDNVQSDLLHKYQSKDDILILTVRLAVIVAVILTVPVLFFTVRSSLFELAKKTKFNLCRHTVVTCILLVVINLLVIFIPSMKDIFGVVGVTSANMLIFILPSSLYLKITDQDGDKGTQRIWLFLFLQFPVQPCWLSECIILLPAALSLNMLKRKELIILCSLDSGFSNLY

SEQ ID NO: 14819 - protein, 26 aa, Artificial Sequence
  Synthetic polypeptide
NPKLFECQHDTTSGKSTPDLVTDCGI

SEQ ID NO: 14820 - protein, 25 aa, Artificial Sequence
  Synthetic polypeptide
QIVVSERELFGSVGVIGGHSSFVAV

SEQ ID NO: 14821 - protein, 322 aa, Artificial Sequence; identical to SEQ ID NO: 2412
  Synthetic polypeptide

SEQ ID NO: 14822 - protein, 164 aa, Artificial Sequence
  Synthetic polypeptide
EVTCSLWDSVSQKIISEERFRQLEKIKTIGSTYMAASGLNASTYDQVGRSHITALADYAMRLMEQMKHINEHSFNNFQMKIGLNMGPVVAGVIGARKPQYDIWGNTVNVSSRMDSTGVPDRIQVTTDLYQVLAAKGYQLECRGVVKVKGKGEMTTYFLNGGPSS

SEQ ID NO: 14823 - protein, 39 aa, Artificial Sequence
  Synthetic polypeptide
GKSLAHSGTQYPKRLSARSGSGSWKRSRRLVAPTWLPQG

SEQ ID NO: 14824 - protein, 30 aa, Artificial Sequence
  Synthetic polypeptide
GSHLLTLGLSIPKDYQRGAVPAAGKDQDDW

SEQ ID NO: 14825 - protein, 32 aa, Artificial Sequence
  Synthetic polypeptide
AMIIPWHSSLEDRLRPCLKNKRTDDHPNFTAH

SEQ ID NO: 14826 - protein, 37 aa, Artificial Sequence
  Synthetic polypeptide
GPVSKIKELMTTPILQPTEALSPEDGASTALIAGNRL

SEQ ID NO: 14827 - protein, 45 aa, Artificial Sequence
  Synthetic polypeptide
GPVSKIKELMTTPILQPTEALSPEDGASTALIAVVITVVFLTLLS

SEQ ID NO: 14828 - protein, 92 aa, Artificial Sequence
  Synthetic polypeptide
GPVSKIKELMTTPILQPTEALSPEDGASTALIAVVITVVFLTLLSVVILIFFYLYKNKGSYVTYEPTEGEPSAIVQMESDLAKGSEKEEYFI

SEQ ID NO: 14829 - protein, 44 aa, Artificial Sequence
  Synthetic polypeptide
KYKKISQAWWCTPVIPTTQEAEAWESLEPGKHRRTDDHPNFTAH

SEQ ID NO: 14830 - protein, 49 aa, Artificial Sequence
  Synthetic polypeptide
SQLLRRLRHGNRLNLGSTEELMTTPILQPTEALSPEDGASTALIAGNRL

SEQ ID NO: 14831 - protein, 57 aa, Artificial Sequence
  Synthetic polypeptide
SQLLRRLRHGNRLNLGSTEELMTTPILQPTEALSPEDGASTALIAVVITVVFLTLLS

SEQ ID NO: 14832 - protein, 104 aa, Artificial Sequence
  Synthetic polypeptide
SQLLRRLRHGNRLNLGSTEELMTTPILQPTEALSPEDGASTALIAVVITVVFLTLLSVVILIFFYLYKNKGSYVTYEPTEGEPSAIVQMESDLAKGSEKEEYFI

SEQ ID NO: 14833 - protein, 7 aa, Artificial Sequence
  Synthetic polypeptide
TWEAQKN

SEQ ID NO: 14834 - protein, 26 aa, Artificial Sequence
  Synthetic polypeptide
NQELETSLATQLQLRWKLRRKALDLF

SEQ ID NO: 14835 - protein, 35 aa, Artificial Sequence
  Synthetic polypeptide
RAQWLAPVIPALWEAKERGSHETRSWRPAWQHSYN

SEQ ID NO: 14836 - protein, 1338 aa, Artificial Sequence
  Synthetic polypeptide
SQHFGRPRKEDHMKPGVGDQLGNTATTEVEIKKKGPGSLLVSMDQLASYGRKDRINSIMSVVTNTLVEELEESQRKCPPCWYKFANTFLIWECHPYWIKLKEIVNLIVMDPFVDLAITICIVLNTLFMAMEHHPMTPQFEHVLAVGNLVFTGIFTAEMFLKLIAMDPYYYFQEGWNIFDGFIVSLSLMELSLADVEGLSVLRSFRLLRVFKLAKSWPTLNMLIKIIGNSVGALGNLTLVLAIIVFIFAVVGMQLFGKSYKECVCKINQDCELPRWHMHDFFHSFLIVFRVLCGEWIETMWDCMEVAGQAMCLIVFMMVMVIGNLVVLNLFLALLLSSFSADNLAATDDDGEMNNLQISVIRIKKGVAWTKLKVHAFMQAHFKQREADEVKPLDELYEKKANCIANHTGADIHRNGDFQKNGNGTTSGIGSSVEKYIIDEDHMSFINNPNLTVRVPIAVGESDFENLNTEDVSSESDPEGSKDKLDDTSSSEGSTIDIKPEVEEVPVEQPEEYLDPDACFTEGCVQRFKCCQVNIEEGLGKSWWILRKTCFLIVEHNWFETFIIFMILLSSGALAFEDIYIEQRKTIRTILEYADKVFTYIFILEMLLKWTAYGFVKFFTNAWCWLDFLIVAVSLVSLIANALGYSELGAIKSLRTLRALRPLRALSRFEGMRVVVNALVGAIPSIMNVLLVCLIFWLIFSIMGVNLFAGKYHYCFNETSEIRFEIEDVNNKTECEKLMEGNNTEIRWKNVKINFDNVGAGYLALLQVATFKGWMDIMYAAVDSRKPDEQPKYEDNIYMYIYFVIFIIFGSFFTLNLFIGVIIDNFNQQKKKFGGQDIFMTEEQKKYYNAMKKLGSKKPQKPIPRPLNKIQGIVFDFVTQQAFDIVIMMLICLNMVTMMVETDTQSKQMENILYWINLVFVIFFTCECVLKMFALRHYYFTIGWNIFDFVVVILSIVGMFLADIIEKYFVSPTLFRVIRLARIGRILRLIKGAKGIRTLLFALMMSLPALFNIGLLLFLVMFIFSIFGMSNFAYVKHEAGIDDMFNFETFGNSMICLFQITTSAGWDGLLLPILNRPPDCSLDKEHPGSGFKGDCGNPSVGIFFFVSYIIISFLIVVNMYIAIILENFSVATEESADPLSEDDFETFYEIWEKFDPDATQFIEYCKLADFADALEHPLRVPKPNTIELIAMDLPMVSGDRIHCLDILFAFTKRVLGDSGELDILRQQMEERFVASNPSKVSYEPITTTLRRKQEEVSAVVLQRAYRGHLARRGFICKKTTSNKLENGGTHREKKESTPSTASLPSYDSVTKPEKEKQQRAEEGRRERAKRQKEVRESKC

SEQ ID NO: 14837 - protein, 915 aa, Artificial Sequence
  Synthetic polypeptide
SQHFGRPRKEDHMKPGVGDQLGNTATTEVEIKKKGPGSLLVSMDQLASYGRKDRINSIMSVVTNTLVEELEESQRKCPPCWYKFANTFLIWECHPYWIKLKEIVNLIVMDPFVDLAITICIVLNTLFMAMEHHPMTPQFEHVLAVGNLVFTGIFTAEMFLKLIAMDPYYYFQEGWNIFDGFIVSLSLMELSLADVEGLSVLRSFRLLRVFKLAKSWPTLNMLIKIIGNSVGALGNLTLVLAIIVFIFAVVGMQLFGKSYKECVCKINQDCELPRWHMHDFFHSFLIVFRVLCGEWIETMWDCMEVAGQAMCLIVFMMVMVIGNLVVLNLFLALLLSSFSADNLAATDDDGEMNNLQISVIRIKKGVAWTKLKVHAFMQAHFKQREADEVKPLDELYEKKANCIANHTGADIHRNGDFQKNGNGTTSGIGSSVEKYIIDEDHMSFINNPNLTVRVPIAVGESDFENLNTEDVSSESDPEGSKDKLDDTSSSEGSTIDIKPEVEEVPVEQPEEYLDPDACFTEGCVQRFKCCQVNIEEGLGKSWWILRKTCFLIVEHNWFETFIIFMILLSSGALAFEDIYIEQRKTIRTILEYADKVFTYIFILEMLLKWTAYGFVKFFTNAWCWLDFLIVAVVVNALVGAIPSIMNVLLVCLIFWLIFSIMGVNLFAGKYHYCFNETSEIRFEIEDVNNKTECEKLMEGNNTEIRWKNVKINFDNVGAGYLALLQVATFKGWMDIMYAAVDSRKPDEQPKYEDNIYMYIYFVIFIIFGSFFTLNLFIGVIIDNFNQQKKKFGGQDIFMTEEQKKYYNAMKKLGSKKPQKPIPRPLNKIQGIVFDFVTQQAFDIVIMMLICLNMVTMMVETDTQSKQMENILYWINLVFVIFFTCECVLKMFALRHYYFTIGWNIFDFVVVILSIV

SEQ ID NO: 14838 - protein, 1297 aa, Artificial Sequence
  Synthetic polypeptide
SQHFGRPRKEDHMKPGVGDQLGNTATTEVEIKKKGPGSLLVSMDQLASYGRKDRINSIMSVVTNTLVEELEESQRKCPPCWYKFANTFLIWECHPYWIKLKEIVNLIVMDPFVDLAITICIVLNTLFMAMEHHPMTPQFEHVLAVGNLVFTGIFTAEMFLKLIAMDPYYYFQEGWNIFDGFIVSLSLMELSLADVEGLSVLRSFRLLRVFKLAKSWPTLNMLIKIIGNSVGALGNLTLVLAIIVFIFAVVGMQLFGKSYKECVCKINQDCELPRWHMHDFFHSFLIVFRVLCGEWIETMWDCMEVAGQAMCLIVFMMVMVIGNLVVLNLFLALLLSSFSADNLAATDDDGEMNNLQISVIRIKKGVAWTKLKVHAFMQAHFKQREADEVKPLDELYEKKANCIANHTGADIHRNGDFQKNGNGTTSGIGSSVEKYIIDEDHMSFINNPNLTVRVPIAVGESDFENLNTEDVSSESDPEGSKDKLDDTSSSEGSTIDIKPEVEEVPVEQPEEYLDPDACFTEGCVQRFKCCQVNIEEGLGKSWWILRKTCFLIVEHNWFETFIIFMILLSSGALAFEDIYIEQRKTIRTILEYADKVFTYIFILEMLLKWTAYGFVKFFTNAWCWLDFLIVAVVVNALVGAIPSIMNVLLVCLIFWLIFSIMGVNLFAGKYHYCFNETSEIRFEIEDVNNKTECEKLMEGNNTEIRWKNVKINFDNVGAGYLALLQVATFKGWMDIMYAAVDSRKPDEQPKYEDNIYMYIYFVIFIIFGSFFTLNLFIGVIIDNFNQQKKKFGGQDIFMTEEQKKYYNAMKKLGSKKPQKPIPRPLNKIQGIVFDFVTQQAFDIVIMMLICLNMVTMMVETDTQSKQMENILYWINLVFVIFFTCECVLKMFALRHYYFTIGWNIFDFVVVILSIVGMFLADIIEKYFVSPTLFRVIRLARIGRILRLIKGAKGIRTLLFALMMSLPALFNIGLLLFLVMFIFSIFGMSNFAYVKHEAGIDDMFNFETFGNSMICLFQITTSAGWDGLLLPILNRPPDCSLDKEHPGSGFKGDCGNPSVGIFFFVSYIIISFLIVVNMYIAIILENFSVATEESADPLSEDDFETFYEIWEKFDPDATQFIEYCKLADFADALEHPLRVPKPNTIELIAMDLPMVSGDRIHCLDILFAFTKRVLGDSGELDILRQQMEERFVASNPSKVSYEPITTTLRRKQEEVSAVVLQRAYRGHLARRGFICKKTTSNKLENGGTHREKKESTPSTASLPSYDSVTKPEKEKQQRAEEGRRERAKRQKEVRESKC

SEQ ID NO: 14839 - protein, 330 aa, Artificial Sequence
  Synthetic polypeptide
SQHFGRPRKEDHMKPGVGDQLGNTATTEVEIKKKGPGSLLVSMDQLASYGRKDRINSIMSVVTNTLVEELEESQRKCPPCWYKFANTFLIWECHPYWIKLKEIVNLIVMDPFVDLAITICIVLNTLFMAMEHHPMTPQFEHVLAVGNLVFTGIFTAEMFLKLIAMDPYYYFQEGWNIFDGFIVSLSLMELSLADVEGLSVLRSFRLLRVFKLAKSWPTLNMLIKIIGNSVGALGNLTLVLAIIVFIFAVVGMQLFGKSYKECVCKINQDCELPRWHMHDFFHSFLIVFRVLCGEWIETMWDCMEVAGQAMCLIVFMMVMVIGNLVVSTNL

SEQ ID NO: 14840 - protein, 71 aa, Artificial Sequence; identical to SEQ ID NO: 4153
  Synthetic polypeptide

SEQ ID NO: 14841 - protein, 21 aa, Artificial Sequence
  Synthetic polypeptide
PGQRGETLSLLKIQKLARCGV

SEQ ID NO: 14842 - protein, 77 aa, Artificial Sequence; identical to SEQ ID NO: 4024
  Synthetic polypeptide

SEQ ID NO: 14843 - protein, 79 aa, Artificial Sequence; identical to SEQ ID NO: 3969
  Synthetic polypeptide

SEQ ID NO: 14844 - protein, 100 aa, Artificial Sequence; identical to SEQ ID NO: 3620
  Synthetic polypeptide

SEQ ID NO: 14845 - protein, 98 aa, Artificial Sequence; identical to SEQ ID NO: 3650
  Synthetic polypeptide

SEQ ID NO: 14846 - protein, 85 aa, Artificial Sequence
  Synthetic polypeptide
NPVSTKNTKISQFKCCGAANYTDWEKIPSMSKNRVPDSCCINVTVGCGINFNEKAIHKEGCVEKIGGWLRKNVLVVAAAALGIAF

SEQ ID NO: 14847 - protein, 87 aa, Artificial Sequence
  Synthetic polypeptide
NPVSTKNTKISQFKCCGAANYTDWEKIPSMSKNRVPDSCCINVTVGCGINFNEKAIHKEGCVEKIGGWLRKNVLVVAAAALGIAFVE

SEQ ID NO: 14848 - protein, 108 aa, Artificial Sequence
  Synthetic polypeptide
NPVSTKNTKISQFKCCGAANYTDWEKIPSMSKNRVPDSCCINVTVGCGINFNEKAIHKEGCVEKIGGWLRKNVLVVAAAALGIAFVEVLGIVFACCLVKSIRSGYEVM

SEQ ID NO: 14849 - protein, 106 aa, Artificial Sequence
  Synthetic polypeptide
NPVSTKNTKISQFKCCGAANYTDWEKIPSMSKNRVPDSCCINVTVGCGINFNEKAIHKEGCVEKIGGWLRKNVLVVAAAALGIAFVLGIVFACCLVKSIRSGYEVM

SEQ ID NO: 14850 - protein, 74 aa, Artificial Sequence
  Synthetic polypeptide
PGQRGETLSLLKIQKLASLSAVGLLTTQIGRKSLPCRRTESPTPAALMLLWAVGLISTRRRSIRRAVWRRLGAG

SEQ ID NO: 14851 - protein, 2 aa, Artificial Sequence
  Synthetic polypeptide
PV

SEQ ID NO: 14852 - protein, 63 aa, Artificial Sequence; identical to SEQ ID NO: 4550
  Synthetic polypeptide

SEQ ID NO: 14853 - protein, 3628 aa, Artificial Sequence; identical to SEQ ID NO: 1424
  Synthetic polypeptide

SEQ ID NO: 14854 - protein, 30 aa, Artificial Sequence; identical to SEQ ID NO: 6458
  Synthetic polypeptide

SEQ ID NO: 14855 - protein, 73 aa, Artificial Sequence
  Synthetic polypeptide
LEIGINPCPIYVRDNLASLIHQDPHGSHHPSWGHGTLGVCCCGAPSPPDSLAEGWGHRLPSCTGETHACDARG

SEQ ID NO: 14856 - protein, 43 aa, Artificial Sequence
  Synthetic polypeptide
PLPNLCQGQSCFPHSPRPPWISPSELGPWHAWSVLLWGTQPPR

SEQ ID NO: 14857 - protein, 544 aa, Artificial Sequence
  Synthetic polypeptide
SFHLNFSFLDLKLELTPAQSMSGTILLPSFTKTPMDLTIRAGAMARLECAAVGHPAPQIAWQKDGGTDFPAARERRMHVMPEDDVFFIVDVKIEDIGVYSCTAQNSAGSISANATLTVLETPSFLRPLLDRTVTKGETAVLQCIAGGSPPPKLNWTKDDSPLVVTERHFFAAGNQLLIIVDSDVSDAGKYTCEMSNTLGTERGNVRLSVIPTPTCDSPQMTAPSLDDDGWATVGVVIIAVVCCVVGTSLVWVVIIYHTRRRNEDCSITNTDETNLPADIPSYLSSQGTLADRQDGYVSSESGSHHQFVTSSGAGFFLPQHDSSGTCHIDNSSEADVEAATDLFLCPFLGSTGPMYLKGNVYGSDPFETYHTGCSPDPRTVLMDHYEPSYIKKKECYPCSHPSEESCERSFSNISWPSHVRKLLNTSYSHNEGPGMKNLCLNKSSLDFSANPEPASVASSNSFMGTFGKALRRPHLDAYSSFGQPSDCQPRAFYLKAHSSPDLDSGSEEDGKERTDFQEENHICTFKQTLENYRTPNFQSYDLDT

SEQ ID NO: 14858 - protein, 68 aa, Artificial Sequence
  Synthetic polypeptide
EGVADSSHVASEGRTWTKVMGREGNFPITRLHKSGVACLRRACRDCCPCHWTMAPIRLSDQEHLRARN

SEQ ID NO: 14859 - protein, 86 aa, Artificial Sequence
  Synthetic polypeptide
GLLLGRGGRLIPCGFRGQDMDKGYGKGGKLSNNQTAQEWSGLPQEGLPGLLSLPLDYGSDSTLRPRASSSKKLIIIIPASTQESIF

SEQ ID NO: 14860 - protein, 219 aa, Artificial Sequence
  Synthetic polypeptide
PDCTRVEWPASGGLAGIAVLAIGLWLRFDSQTKSIFEQETNNNNSSFYTGVYILIGAGALMMLVGFLGCCGAVQESQCMLGLATKRTMFPPFLEDHVCFFSLNPQFFGFLLVIFAIEIAAAIWGYSHKDEVIKEVQEFYKDTYNKLKTKDEPQRETLKAIHYALNCCGLAGGVEQFISDICPKKDVLETFTVKSCPDAIKEVFDNKFHIIGAVGIGIAV

SEQ ID NO: 14861 - protein, 132 aa, Artificial Sequence
  Synthetic polypeptide
PDCTRVEWPASGGLAGIAVLAIGLWLRFDSQTKSIFEQETNNNNSSFYTGVYILIGAGALMMLVGFLGCCGAVQESQCMLGLFFGFLLVIFAIEIAAAIWGYSHKDEVIKEVQEFYKDTYNKLKTKDEPQRE

SEQ ID NO: 14862 - protein, 219 aa, Artificial Sequence
  Synthetic polypeptide
PDCTRVEWPASGGLAGIAVLAIGLWLRFDSQTKSIFEQETNNNNSSFYTGVYILIGAGALMMLVGFLGCCGAVQESQCMLGLFFGFLLVIFAIEIAAAIWGYSHKDEVIKEVQEFYKDTYNKLKTKDEPQRETLKAIHYALNCCGLAGGVEQFISDICPKKDVLETFTVKSCPDAIKEVFDNKFHIIGAVGIGIAVVMIFGMIFSMILCCAIRRNREMV

SEQ ID NO: 14863 - protein, 36 aa, Artificial Sequence; identical to SEQ ID NO: 6100
  Synthetic polypeptide

SEQ ID NO: 14864 - protein, 174 aa, Artificial Sequence; identical to SEQ ID NO: 2995
  Synthetic polypeptide

SEQ ID NO: 14865 - protein, 65 aa, Artificial Sequence; identical to SEQ ID NO: 4414
  Synthetic polypeptide

SEQ ID NO: 14866 - protein, 43 aa, Artificial Sequence; identical to SEQ ID NO: 5544
  Synthetic polypeptide

SEQ ID NO: 14867 - protein, 49 aa, Artificial Sequence; identical to SEQ ID NO: 5233
  Synthetic polypeptide

SEQ ID NO: 14868 - protein, 31 aa, Artificial Sequence
  Synthetic polypeptide
CRRMGTATISSRLTSPQTTWAVSPSAGSHAA

SEQ ID NO: 14869 - protein, 62 aa, Artificial Sequence
  Synthetic polypeptide
CRRMGTATISSRLTSPQTTWAVSPSAGSHAGMGLPDAIATEQLHRQQQEKWSGQSQHLLQGA

SEQ ID NO: 14870 - protein, 38 aa, Artificial Sequence
  Synthetic polypeptide
HRETPSLLKIRKISRAWWRAPVVPATPEADAGEWVLLL

SEQ ID NO: 14871 - protein, 69 aa, Artificial Sequence
  Synthetic polypeptide
SQLLRRLMQENGYCYYKLQVDFSSDHLGCFTKCRKPCRNGSSRCYRDRTITPSTTREMEWPKSTSSSRS

SEQ ID NO: 14872 - protein, 227 aa, Artificial Sequence
  Synthetic polypeptide
SQLLRRLMQENGYCYYKLQVDFSSDHLGCFTKCRKPCSVTSYQLSAGYSRWPSVTSQEWVFQMLSRQNNYTVNNKRNGVAKVNIFFKELNYKTNSESPSVTMVTLLSNLGSQWSLWFGSSVLSVVEMAELVFDLLVIMFLMLLRRFRSRYWSPGRGGRGAQEVASTLASSPPSHFCPHPMSLSLSQPGPAPSPALTAPPPAYATLGPRPSPGGSAGASSSTCPLGGP

SEQ ID NO: 14873 - protein, 476 aa, Artificial Sequence
  Synthetic polypeptide
ALITPLYSSLSDRCNQNKSDCFYQTYSSGVDAVREWYRFHYINILSRLPETLPSLEEDTLGNFIFACRFNQVSCNQANYSHFHHPMYGNCYTFNDKNNSNLWMSSMPGINNGLSLMLRAEQNDFIPLLSTVTGARVMVHGQDEPAFMDDGGFNLRPGVETSISMRKETLDRLGGDYGDCTKNGSDVPVENLYPSKYTQQVCIHSCFQESMIKECGCAYIFYPRPQNVEYCDYRKHSSWGQVRSLTPVIPALWEAEAGRSRGYCYYKLQVDFSSDHLGCFTKCRKPCSVTSYQLSAGYSRWPSVTSQEWVFQMLSRQNNYTVNNKRNGVAKVNIFFKELNYKTNSESPSVTMVTLLSNLGSQWSLWFGSSVLSVVEMAELVFDLLVIMFLMLLRRFRSRYWSPGRGGRGAQEVASTLASSPPSHFCPHPMSLSLSQPGPAPSPALTAPPPAYATLGPRPSPGGSAGASSSTCPLGGP

SEQ ID NO: 14874 - protein, 296 aa, Artificial Sequence
  Synthetic polypeptide
ALITPLYSSLSDRCNQNKSDCFYQTYSSGVDAVREWYRFHYINILSRLPETLPSLEEDTLGNFIFACRFNQVSCNQANYSHFHHPMYGNCYTFNDKNNSNLWMSSMPGINNGLSLMLRAEQNDFIPLLSTVTGARVMVHGQDEPAFMDDGGFNLRPGVETSISMRKETLDRLGGDYGDCTKNGSDVPVENLYPSKYTQQVCIHSCFQESMIKECGCAYIFYPRPQNVEYCDYRKHSSWGYCYYKLQVDFSSDHLGCFTKCRKPCRNGSSRCYRDRTITPSTTREMEWPKSTSSSRS

SEQ ID NO: 14875 - protein, 454 aa, Artificial Sequence
  Synthetic polypeptide
ALITPLYSSLSDRCNQNKSDCFYQTYSSGVDAVREWYRFHYINILSRLPETLPSLEEDTLGNFIFACRFNQVSCNQANYSHFHHPMYGNCYTFNDKNNSNLWMSSMPGINNGLSLMLRAEQNDFIPLLSTVTGARVMVHGQDEPAFMDDGGFNLRPGVETSISMRKETLDRLGGDYGDCTKNGSDVPVENLYPSKYTQQVCIHSCFQESMIKECGCAYIFYPRPQNVEYCDYRKHSSWGYCYYKLQVDFSSDHLGCFTKCRKPCSVTSYQLSAGYSRWPSVTSQEWVFQMLSRQNNYTVNNKRNGVAKVNIFFKELNYKTNSESPSVTMVTLLSNLGSQWSLWFGSSVLSVVEMAELVFDLLVIMFLMLLRRFRSRYWSPGRGGRGAQEVASTLASSPPSHFCPHPMSLSLSQPGPAPSPALTAPPPAYATLGPRPSPGGSAGASSSTCPLGGP

SEQ ID NO: 14876 - protein, 82 aa, Artificial Sequence
  Synthetic polypeptide
QMQPEQIGLLLPDILIRGGCGEGVVPLPLHQHPVEAARDSAIPGGGHAGQLHLRLPLQPGLLQPGELLSLPPPDVWKLLYFQ

SEQ ID NO: 14877 - protein, 22 aa, Artificial Sequence
  Synthetic polypeptide
VTDATRTNRTASTRHTHQGWMR

SEQ ID NO: 14878 - protein, 9 aa, Artificial Sequence
  Synthetic polypeptide
GEQAGGAGP

SEQ ID NO: 14879 - protein, 157 aa, Artificial Sequence
  Synthetic polypeptide
QGNKLEEQDPRPLQPIPGLMEGNKLEEQDSSPPQSTPGLMKGNKREEQGLGPEPAAPQQPTAEEEALIEFHRSYRELFEFFCNNTTIHGAIRLVCSQHNRMKTAFWAVLWLCTFGMMYWQFGLLFGEYFSYPVSLNINLNSDKLVFPAVTICTLNPY

SEQ ID NO: 14880 - protein, 688 aa, Artificial Sequence
  Synthetic polypeptide
QGNKLEEQDPRPLQPIPGLMEGNKLEEQDSSPPQSTPGLMKGNKREEQGLGPEPAAPQQPTAEEEALIEFHRSYRELFEFFCNNTTIHGAIRLVCSQHNRMKTAFWAVLWLCTFGMMYWQFGLLFGEYFSYPVSLNINLNSDKLVFPAVTICTLNPYRYPEIKEELEELDRITEQTLFDLYKYSSFTTLVAGSRSRRDLRGTLPHPLQRLRVPPPPHGARRARSVASSLRDNNPQVDWKDWKIGFQLCNQNKSDCFYQTYSSGVDAVREWYRFHYINILSRLPETLPSLEEDTLGNFIFACRFNQVSCNQANYSHFHHPMYGNCYTFNDKNNSNLWMSSMPGINNGLSLMLRAEQNDFIPLLSTVTGARVMVHGQDEPAFMDDGGFNLRPGVETSISMRKETLDRLGGDYGDCTKNGSDVPVENLYPSKYTQQVCIHSCFQESMIKECGCAYIFYPRPQNVEYCDYRKHSSWGYCYYKLQVDFSSDHLGCFTKCRKPCSVTSYQLSAGYSRWPSVTSQEWVFQMLSRQNNYTVNNKRNGVAKVNIFFKELNYKTNSESPSVTMVTLLSNLGSQWSLWFGSSVLSVVEMAELVFDLLVIMFLMLLRRFRSRYWSPGRGGRGAQEVASTLASSPPSHFCPHPMSLSLSQPGPAPSPALTAPPPAYATLGPRPSPGGSAGASSSTCPLGGP

SEQ ID NO: 14881 - protein, 39 aa, Artificial Sequence
  Synthetic polypeptide
RGTSWRSRTLDLCSPYQVSWRGTSWRSRTLALHSPLQGS

SEQ ID NO: 14882 - protein, 162 aa, Artificial Sequence
  Synthetic polypeptide
EMPFTSHHNSEASPAKWNYESPYTKSASQTKPPDGALAVRRQSIPEEFKGSTVVELMKKEGTTLGLTVSGGIDKDGKPRVSNLRQGGIAARSDQLDVGDYIKAVNGINLAKFRHDEIISLLKNVGERVVLEVEYELPPVSVQGSSVIFRTVEVTLHKEGNTF

SEQ ID NO: 14883 - protein, 1056 aa, Artificial Sequence
  Synthetic polypeptide
EMPFTSHHNSEASPAKWNYESPYTKSASQTKPPDGALAVRRQSIPEEFKGSTVVELMKKEGTTLGLTVSGGIDKDGKPRVSNLRQGGIAARSDQLDVGDYIKAVNGINLAKFRHDEIISLLKNVGERVVLEVEYELPPVSVQGSSVIFRTVEVTLHKEGNTFGFVIRGGAHDDRNKSRPVVITCVRPGGPADREGTIKPGDRLLSVDGIRLLGTTHAEAMSILKQCGQEAALLIEYDVSVMDSVATASGPLLVEVAKTPGASLGVALTTSMCCNKQVIVIDKIKSASIADRCGALHVGDHILSIDGTSMEYCTLAEATQFLANTTDQVKLEILPHHQTRLALKGPDHAALVSSSFSPTSMSAYSLSSLNMGTLPRSLYSTSPRGTMMRRRLKKKDFKSSLSLASSTVGLAGQVVHTETTEVVLTADPVTGFGIQLQGSVFATETLSSPPLISYIEADSPAERCGVLQIGDRVMAINGIPTEDSTFEEASQLLRDSSITSKVTLEIEFDVAESVIPSSGTFHVKLPKKHNVELGITISSPSSRKPGDPLVISDIKKGSVAHRTGTLELGDKLLAIDNIRLDNCSMEDAVQILQQCEDLVKLKIRKDEDNSDEQESSGAIIYTVELKRYGGPLGITISGTEEPFDPIIISSLTKGGLAERTGAIHIGDRILAINSSSLKGKPLSEAIHLLQMAGETVTLKIKKQTDAQSASSPKKFPISSHLSDLGDVEEDSSPAQKPGKLSDMYPSTVPSVDSAVDSWDGSAIDTSYGTQGTSFQASGYNFNTYDWRSPKQRGSLSPVTKPRSQTYPDVGLSYEDWDRSTASGFAGAADSAETEQEENFWSQALEDLETCGQSGILRELEATIMSGSTMSLNHEAPTPRSQLGRQASFQERSSSRPHYSQTTRSNTLPSDVGRKSVTLRKMKQEIKEIMSPTPVELHKVTLYKDSDMEDFGFSVADGLLEKGVYVKNIRPAGPGDLGGLKPYDRLLQVNHVRTRDFDCCLVVPLIAESGNKLDLVISRNPLASQKSIDQQSLPGDWSEQNSAFFQQPSHGGNLETRE

SEQ ID NO: 14884 - protein, 1076 aa, Artificial Sequence
  Synthetic polypeptide
EMPFTSHHNSEASPAKWNYESPYTKSASQTKPPDGALAVRRQSIPEEFKGSTVVELMKKEGTTLGLTVSGGIDKDGKPRVSNLRQGGIAARSDQLDVGDYIKAVNGINLAKFRHDEIISLLKNVGERVVLEVEYELPPVSVQGSSVIFRTVEVTLHKEGNTFGFVIRGGAHDDRNKSRPVVITCVRPGGPADREGTIKPGDRLLSVDGIRLLGTTHAEAMSILKQCGQEAALLIEYDVSVMDSVATASGPLLVEVAKTPGASLGVALTTSMCCNKQVIVIDKIKSASIADRCGALHVGDHILSIDGTSMEYCTLAEATQFLANTTDQVKLEILPHHQTRLALKGPDHAALVSSSFSPTSMSAYSLSSLNMGTLPRSLYSTSPRGTMMRRRLKKKDFKSSLSLASSTVGLAGQVVHTETTEVVLTADPVTGFGIQLQGSVFATETLSSPPLISYIEADSPAERCGVLQIGDRVMAINGIPTEDSTFEEASQLLRDSSITSKVTLEIEFDVAESVIPSSGTFHVKLPKKHNVELGITISSPSSRKPGDPLVISDIKKGSVAHRTGTLELGDKLLAIDNIRLDNCSMEDAVQILQQCEDLVKLKIRKDEDNSDEQESSGAIIYTVELKRYGGPLGITISGTEEPFDPIIISSLTKGGLAERTGAIHIGDRILAINSSSLKGKPLSEAIHLLQMAGETVTLKIKKQTDAQSASSPKKFPISSHLSDLGDVEEDSSPAQKPGKLSDMYPSTVPSVDSAVDSWDGSAIDTSYGTQGTSFQASGYNFNTYDWRSPKQRGSLSPVTKPRSQTYPDVGLSYEDWDRSTASGFAGAADSAETEQEENFWSQALEDLETCGQSGILRELEEKADRRVSLRNMTLLATIMSGSTMSLNHEAPTPRSQLGRQASFQERSSSRPHYSQTTRSNTLPSDVGRKSVTLRKMKQEIKEIMSPTPVELHKVTLYKDSDMEDFGFSVADGLLEKGVYVKNIRPAGPGDLGGLKPYDRLLQVNHVRTRDFDCCLVVPLIAESGNKLDLVISRNPLASQKSIDQQSLPGDWSEQNSAFFQQPSHGGNLETREPTNTL

SEQ ID NO: 14885 - protein, 1113 aa, Artificial Sequence
  Synthetic polypeptide
EMPFTSHHNSEASPAKWNYESPYTKSASQTKPPDGALAVRRQSIPEEFKGSTVVELMKKEGTTLGLTVSGGIDKDGKPRVSNLRQGGIAARSDQLDVGDYIKAVNGINLAKFRHDEIISLLKNVGERVVLEVEYELPPVSVQGSSVIFRTVEVTLHKEGNTFGFVIRGGAHDDRNKSRPVVITCVRPGGPADREGTIKPGDRLLSVDGIRLLGTTHAEAMSILKQCGQEAALLIEYDVSVMDSVATASGPLLVEVAKTPGASLGVALTTSMCCNKQVIVIDKIKSASIADRCGALHVGDHILSIDGTSMEYCTLAEATQFLANTTDQVKLEILPHHQTRLALKGPDHVKIQRSDRQLTWDSWASNHSSLHTNHHYNTYHPDHCRVPALTFPKAPPPNSPPALVSSSFSPTSMSAYSLSSLNMGTLPRSLYSTSPRGTMMRRRLKKKDFKSSLSLASSTVGLAGQVVHTETTEVVLTADPVTGFGIQLQGSVFATETLSSPPLISYIEADSPAERCGVLQIGDRVMAINGIPTEDSTFEEASQLLRDSSITSKVTLEIEFDVAESVIPSSGTFHVKLPKKHNVELGITISSPSSRKPGDPLVISDIKKGSVAHRTGTLELGDKLLAIDNIRLDNCSMEDAVQILQQCEDLVKLKIRKDEDNSDEQESSGAIIYTVELKRYGGPLGITISGTEEPFDPIIISSLTKGGLAERTGAIHIGDRILAINSSSLKGKPLSEAIHLLQMAGETVTLKIKKQTDAQSASSPKKFPISSHLSDLGDVEEDSSPAQKPGKLSDMYPSTVPSVDSAVDSWDGSAIDTSYGTQGTSFQASGYNFNTYDWRSPKQRGSLSPVTKPRSQTYPDVGLSYEDWDRSTASGFAGAADSAETEQEENFWSQALEDLETCGQSGILRELEATIMSGSTMSLNHEAPTPRSQLGRQASFQERSSSRPHYSQTTRSNTLPSDVGRKSVTLRKMKQEIKEIMSPTPVELHKVTLYKDSDMEDFGFSVADGLLEKGVYVKNIRPAGPGDLGGLKPYDRLLQVNHVRTRDFDCCLVVPLIAESGNKLDLVISRNPLASQKSIDQQSLPGDWSEQNSAFFQQPSHGGNLETREPTNTL

SEQ ID NO: 14886 - protein, 1128 aa, Artificial Sequence
  Synthetic polypeptide
EMPFTSHHNSEASPAKWNYESPYTKSASQTKPPDGALAVRRQSIPEEFKGSTVVELMKKEGTTLGLTVSGGIDKDGKPRVSNLRQGGIAARSDQLDVGDYIKAVNGINLAKFRHDEIISLLKNVGERVVLEVEYELPPVSVQGSSVIFRTVEVTLHKEGNTFGFVIRGGAHDDRNKSRPVVITCVRPGGPADREGTIKPGDRLLSVDGIRLLGTTHAEAMSILKQCGQEAALLIEYDVSVMDSVATASGPLLVEVAKTPGASLGVALTTSMCCNKQVIVIDKIKSASIADRCGALHVGDHILSIDGTSMEYCTLAEATQFLANTTDQVKLEILPHHQTRLALKGPDHVKIQRSDRQLTWDSWASNHSSLHTNHHYNTYHPDHCRVPALTFPKAPPPNSPPALVSSSFSPTSMSAYSLSSLNMGTLPRSLYSTSPRGTMMRRRLKKKDFKSSLSLASSTVGLAGQVVHTETTEVVLTADPVTGFGIQLQGSVFATETLSSPPLISYIEADSPAERCGVLQIGDRVMAINGIPTEDSTFEEASQLLRDSSITSKVTLEIEFDVAESVIPSSGTFHVKLPKKHNVELGITISSPSSRKPGDPLVISDIKKGSVAHRTGTLELGDKLLAIDNIRLDNCSMEDAVQILQQCEDLVKLKIRKDEDNSDEQESSGAIIYTVELKRYGGPLGITISGTEEPFDPIIISSLTKGGLAERTGAIHIGDRILAINSSSLKGKPLSEAIHLLQMAGETVTLKIKKQTDAQSASSPKKFPISSHLSDLGDVEEDSSPAQKPGKLSDMYPSTVPSVDSAVDSWDGSAIDTSYGTQGTSFQASGYNFNTYDWRSPKQRGSLSPVTKPRSQTYPDVGLSYEDWDRSTASGFAGAADSAETEQEENFWSQALEDLETCGQSGILRELEEKADRRVSLRNMTLLATIMSGSTMSLNHEAPTPRSQLGRQASFQERSSSRPHYSQTTRSNTLPSDVGRKSVTLRKMKQEIKEIMSPTPVELHKVTLYKDSDMEDFGFSVADGLLEKGVYVKNIRPAGPGDLGGLKPYDRLLQVNHVRTRDFDCCLVVPLIAESGNKLDLVISRNPLASQKSIDQQSLPGDWSEQNSAFFQQPSHGGNLETREPTNTL

SEQ ID NO: 14887 - protein, 8 aa, Artificial Sequence
  Synthetic polypeptide
GLPSQVEL

SEQ ID NO: 14888 - protein, 66 aa, Artificial Sequence
  Synthetic polypeptide
ISLTRSDGFIRSFCFCLFLIFLLLLPCKKCLLPPTIILRPPQPSGTMRVPTLNPPARQSRLMERWL

SEQ ID NO: 14889 - protein, 28 aa, Artificial Sequence
  Synthetic polypeptide
AGAVAHACNPRTLGGQDRHITESYLSHS

SEQ ID NO: 14890 - protein, 33 aa, Artificial Sequence
  Synthetic polypeptide
PARWLTHVIPALWEAKIATSQNRIYLTADNLVL

SEQ ID NO: 14891 - protein, 41 aa, Artificial Sequence
  Synthetic polypeptide
PARWLTHVIPALWEAKIATSQNRIYLTADNLVLNLQDESFT

SEQ ID NO: 14892 - protein, 52 aa, Artificial Sequence
  Synthetic polypeptide
PARWLTHVIPALWEAKIATSQNRIYLTADNLVLNLQDESFTRGSDSLIKGKK

SEQ ID NO: 14893 - protein, 52 aa, Artificial Sequence
  Synthetic polypeptide
PARWLTHVIPALWEAKIATSQNRIYLTADNLVLNLQDESFTRYSDSLIKGKK

SEQ ID NO: 14894 - protein, 24 aa, Artificial Sequence
  Synthetic polypeptide
SPHFGRPRSPHHRIVSISQLTTLC

SEQ ID NO: 14895 - protein, 41 aa, Artificial Sequence
  Synthetic polypeptide
DPAPKRKRKKKGGMVQTSEQYEFVHHALCLYESRLSAETVQ

SEQ ID NO: 14896 - protein, 31 aa, Artificial Sequence
  Synthetic polypeptide
GCSEPRSSQDDTVRPCPKKKKKKKRWNGANQ

SEQ ID NO: 14897 - protein, 44 aa, Artificial Sequence
  Synthetic polypeptide
HSETLPQKEKEKKKVEWCKPVSSMNLCTMLCACMRADFQQRLSS

SEQ ID NO: 14898 - protein, 14 aa, Artificial Sequence
  Synthetic polypeptide
GLPSHAELVLFRKQ

SEQ ID NO: 14899 - protein, 702 aa, Artificial Sequence
  Synthetic polypeptide
IMGRLPLSCSCGSKLVLTRSDGFIRDFPPSLGTHSLTCCHVKRDVFASPSADCKFSEAFPATRNWCFSGNNDHFLAINQKKSGKPVFIYKHSQDIEKSLDIAPQKIYRHSYHSSSEAQVSKRHQIVNSAFPRPAYDPSLNLLAMDGQDLEVENLPIPAANVIVVTLQMDVNKLNITLLRIFRQGVAAALGLLPQQVHINRLIGKKNSIELFVSPINRKTGISDALPSEEVLRSLNINVLHQSLSQFGITEVSPEKNVLQGQHEADKIWSKEGFYAVVIFLSIFVIIVTCLMILYRLKERFQLSLRQDKEKNQEIHLSPITLQPALSEAKTVHSMVQPEQAPKVLNVVVDPQGRGAPEIKATTATSVCPSPFKMKPIGLQERRGSNVSLTLDMSSLGNIEPFVSIPTPREKVAMEYLQSASRILTRSQLRDVVASSHLLQSEFMEIPMNFVDPKEIDIPRHGTKNRYKTILPNPLSRVCLRPKNVTDSLSTYINANYIRGYSGKEKAFIATQGPMINTVDDFWQMVWQEDSPVIVMITKLKEKNEKCVLYWPEKRGIYGKVEVLVISVNECDNYTIRNLVLKQGSHTQHVKHYWYTSWPDHKTPDSAQPLLQLMLDVEEDRLASQGRGPVVVHCSAGIGRTGCFIATSIGCQQLKEEGVVDALSIVCQLRMDRGGMVQTSEQYEFVHHALCLYESRLSAETVQ

SEQ ID NO: 14900 - protein, 59 aa, Artificial Sequence
  Synthetic polypeptide
RGMCLLPLLPIVSFLRPSQPRGTGAFQETMIIFWQLIRRRVGSRYSFISIHKTLRRAWI

SEQ ID NO: 14901 - protein, 28 aa, Artificial Sequence
  Synthetic polypeptide
FYITPTSTSHGLRQSTRASSWRMTTRSY

SEQ ID NO: 14902 - protein, 22 aa, Artificial Sequence
  Synthetic polypeptide
LQENKLRAPTDSTLRQQAQAMD

SEQ ID NO: 14903 - protein, 132 aa, Artificial Sequence
  Synthetic polypeptide
MGPSSCKKTSSGLPLILHYANKHKPWIEAEYQGIVMENDNTVLLNPPLFALDKDAPLRYAGEICGFRLHGSGVPFEAVILDKATGEGLIRAKEPVDCEAQKEHTFTIQAYDCGEGPDGANTKKSHKATVHVR

SEQ ID NO: 14904 - protein, 191 aa, Artificial Sequence
  Synthetic polypeptide
MGPSSCKKTSSGLPLILHYANKHKPWIEAEYQGIVMENDNTVLLNPPLFALDKDAPLRYAGEICGFRLHGSGVPFEAVILDKATGEGLIRAKEPVDCEAQKEHTFTIQAYDCGEGPDGANTKKSHKATVHVRVNDVNEFAPVFVERLYRAAVTEGKLYDRILRVEAIDGDCSPQYSQICYYEILTPNTPFL

SEQ ID NO: 14905 - protein, 954 aa, Artificial Sequence
  Synthetic polypeptide
MGPSSCKKTSSGLPLILHYANKHKPWIEAEYQGIVMENDNTVLLNPPLFALDKDAPLRYAGEICGFRLHGSGVPFEAVILDKATGEGLIRAKEPVDCEAQKEHTFTIQAYDCGEGPDGANTKKSHKATVHVRVNDVNEFAPVFVERLYRAAVTEGKLYDRILRVEAIDGDCSPQYSQICYYEILTPNTPFLIDNDGNIENTEKLQYSGERLYKFTVTAYDCGKKRAADDAEVEIQVKPTCKPSWQGWNKRIEYAPGAGSLALFPGIRLETCDEPLWNIQATIELQTSHVAKGCDRDNYSERALRKLCGAATGEVDLLPMPGPNANWTAGLSVHYSQDSSLIYWFNGTQAVQVPLGGPSGLGSGPQDSLSDHFTLSFWMKHGVTPNKGKKEEETIVCNTVQNEDGFSHYSLTVHGCRIAFLYWPLLESARPVKFLWKLEQVCDDEWHHYALNLEFPTVTLYTDGISFDPALIHDNGLIHPPRREPALMIGACWTEEKNKEKEKGDNSTDTTQGDPLSIHHYFHGYLAGFSVRSGRLESREVIECLYACREGLDYRDFESLGKGMKVHVNPSQSLLTLEGDDVETFNHALQHVAYMNTLRFATPGVRPLRLTTAVKCFSEESCVSIPEVEGYVVVLQPDAPQILLSGTAHFARPAVDFEGTNGVPLFPDLQITCSISHQVEAKKDESWQGTVTDTRMSDEIVHNLDGCEISLVGDDLDPERESLLLDTTSLQQRGLELTNTSAYLTIAGVESITVYEEILRQARYRLRHGAALYTRKFRLSCSEMNGRYSSNEFIVEVNVLHSMNRVAHPSHVLSSQQFLHRGHQPPPEMAGHSLASSHRNSMIPSAATLIIVVCVGFLVLMVVLGLVRIHSLHRRVSGAGGPPGASSDPKDPDLFWDDSALTIIVNPMESYQNRQSCVTGAVGGQQEDEDSSDSEVADSPSSDERRIIETPPHRY

SEQ ID NO: 14906 - protein, 31 aa, Artificial Sequence
  Synthetic polypeptide
EDCSSPGVGDLPGQHNTIFRKVLLWINLEGT

SEQ ID NO: 14907 - protein, 76 aa, Artificial Sequence
  Synthetic polypeptide
QGAAAHSCNPSTLGVQSRRIVQVQELETCLGNIILYFERCYCGSTWRGPEFNSIALGHKTRPSIHGCATNEIWCRS

SEQ ID NO: 14908 - protein, 79 aa, Artificial Sequence
  Synthetic polypeptide
QGAAAHSCNPSTLGVQSRRIVQVQELETCLGNIILYFERCYCGSTWRGPEFNSIALGHKTRPSIHGCATNEIWCRSFIN

SEQ ID NO: 14909 - protein, 27 aa, Artificial Sequence
  Synthetic polypeptide
GVLLLNRNLQGCRCSRAHLCHHRRGCG

SEQ ID NO: 14910 - protein, 226 aa, Artificial Sequence
  Synthetic polypeptide
RAWWRCASVVPATQEAEVFYYSTGIFKDAGVQEPIYATIGAGVVNTIFTVVSLFLVERAGRRTLHMIGLGGMAFCSTLMTVSLLLKDNYNGMSFVCIGAILVFVAFFEIGPGPIPWFIVAELFSQGPRPAAMAVAGCSNWTSNFLVGLLFPSAAHYLGAYVFIIFTGFLITFLAFTFFKVPETRGRTFEDITRAFEGQAHGADRSGKDGVMEMNSIEPAKETTTNV

SEQ ID NO: 14911 - protein, 40 aa, Artificial Sequence
  Synthetic polypeptide
SQLLRRLRCSITQQESSRMQVFKSPSMPPSARVWLILSSL

SEQ ID NO: 14912 - protein, 25 aa, Artificial Sequence
  Synthetic polypeptide
CNLPRRGLPLTKVIPDSPSCFVPHC

SEQ ID NO: 14913 - protein, 210 aa, Artificial Sequence
  Synthetic polypeptide
SSKERTAPHKSNTGFPKLLCASLLIFFLLLAISFFIAFVIFFQKYSQLLEKKTTKELVHTTLECVKKNMPVEETAWSCCPKNWKSFSSNCYFISTESASWQDSEKDCARMEAHLLVINTQEEQDFIFQNLQEESAYFVGLSDPEGQRHWQWVDQTPYNESSTFWHPREPSDPNERCVVLNFRKSPKRWGWNDVNCLGPQRSVCEMMKIHL

SEQ ID NO: 14914 - protein, 177 aa, Artificial Sequence
  Synthetic polypeptide
SSKERTAPHKSNTGFPKLLCASLLIFFLLLAISFFIAFVKTAWSCCPKNWKSFSSNCYFISTESASWQDSEKDCARMEAHLLVINTQEEQDFIFQNLQEESAYFVGLSDPEGQRHWQWVDQTPYNESSTFWHPREPSDPNERCVVLNFRKSPKRWGWNDVNCLGPQRSVCEMMKIHL

SEQ ID NO: 14915 - protein, 68 aa, Artificial Sequence
  Synthetic polypeptide
SSKERTAPHKSNTGFPKLLCASLLIFFLLLAISFFIAFVRFHLPESARRICLFCGALRSRRSATLAMG

SEQ ID NO: 14916 - protein, 12 aa, Artificial Sequence
  Synthetic polypeptide
VIFQGEDCPSQK

SEQ ID NO: 14917 - protein, 20 aa, Artificial Sequence
  Synthetic polypeptide
FHQPVNFTKPSHCWISEMVV

SEQ ID NO: 14918 - protein, 218 aa, Artificial Sequence
  Synthetic polypeptide
FHQPVNFTKPSHCWISEMVVQLSDSLTDLLDKFSNISEGLSNYSIIDKLVNIVDDLVECVKENSSKDLKKSFKSPEPRLFTPEEFFRIFNRSIDAFKDFVVASETSDCVVSSTLSPEKDSRVSVTKPFMLPPVAASSLRNDSSSSNRKAKNPPGDSSLHWAAMALPALFSLIIGFAFGALYWKKRQPSLTRAVENIQINEEDNEISMLQEKEREFQEV

SEQ ID NO: 14919 - protein, 190 aa, Artificial Sequence
  Synthetic polypeptide
FHQPVNFTKPSHCWISEMVVQLSDSLTDLLDKFSNISEGLSNYSIIDKLVNIVDDLVECVKENSSKDLKKSFKSPEPRLFTPEEFFRIFNRSIDAFKDFVVASETSDCVVSSTLSPEKGKAKNPPGDSSLHWAAMALPALFSLIIGFAFGALYWKKRQPSLTRAVENIQINEEDNEISMLQEKEREFQEV

SEQ ID NO: 14920 - protein, 21 aa, Artificial Sequence
  Synthetic polypeptide
LPPTCKLHKAKSLLDKRDGST

SEQ ID NO: 14921 - protein, 27 aa, Artificial Sequence
  Synthetic polypeptide
LPPTCKLHKAKSLLDKRDGSTIVRQLD

SEQ ID NO: 14922 - protein, 9 aa, Artificial Sequence
  Synthetic polypeptide
TSQSQVIVG

SEQ ID NO: 14923 - protein, 17 aa, Artificial Sequence
  Synthetic polypeptide
HRARGASSSQGSEKISS

SEQ ID NO: 14924 - protein, 184 aa, Artificial Sequence
  Synthetic polypeptide
VNTAPSTEASRYTHWDSSRKQLDPERMEKSNQDSHPLGSDTEPEEPPLPREVRKSLHENKLKRLQEKVEVLEAKKEELETENQVLNRQNVPFEDYTRLQKRLKDIQRRHNEFRSLILVPNMPPTASINPVSFQSSAMVPSMELPFPPHMQEEQHQRELSLLRKRLEELETTQRKQLEELGSSGE

SEQ ID NO: 14925 - protein, 24 aa, Artificial Sequence
  Synthetic polypeptide
EEEPLPVLFIVIFQVPRTDFGIQR

SEQ ID NO: 14926 - protein, 47 aa, Artificial Sequence
  Synthetic polypeptide
FAYLLCLFSVLPPLEWKLHERRNLYLFCSLLYSKFLEQILVYRGRKV

SEQ ID NO: 14927 - protein, 468 aa, Artificial Sequence
  Synthetic polypeptide
NRFWYTEVEKYRAVYNKLRYEHTFLKSEFEHQKEEYARILDEGKIKYESEIARLEEDKEELRNQLLNVDLTKDSKRVEQLAREKVYLCQKLKGLEAEVAELKAEKENSEAQVENAQRIQVRQLAEMQATVRSLEAEKQSANLRAERLEKELQSSSEQNTFLINKLHKAEREINTLSSKVKELKHSNKLEITDIKLETARAKSELERERNKIQSELDGLQSDNEILKAAVEHHKVLLVEKDRELIRKVQAAKEEGYQKLVVLQDEKLELENRLADLEKMKVEHDVWRQSEKDQYEEKLRASQMAEEITRKELQSVRLKLQQQIVTIENAEKEKNENSDLKQQISSLQIQVTSLAQSENDLLNSNQMLKEMVERLKQECRNFRSQAEKAQLEAEKTLEEKQIQWLEEKHKLHERITDREEKYNQAKEKLQRAAIAQKKLEQDLELGCPSVTDTYRESVFPPPPLKRDLLK

SEQ ID NO: 14928 - protein, 568 aa, Artificial Sequence
  Synthetic polypeptide
NRFWYTEVEKYRAVYNKLRYEHTFLKSEFEHQKEEYARILDEGKIKYESEIARLEEDKEELRNQLLNVDLTKDSKRVEQLAREKVYLCQKLKGLEAEVAELKAEKENSEAQVENAQRIQVRQLAEMQATVRSLEAEKQSANLRAERLEKELQSSSEQNTFLINKLHKAEREINTLSSKVKELKHSNKLEITDIKLETARAKSELERERNKIQSELDGLQSDNEILKAAVEHHKVLLVEKDRELIRKVQAAKEEGYQKLVVLQDEKLELENRLADLEKMKVEHDVWRQSEKDQYEEKLRASQMAEEITRKELQSVRLKLQQQIVTIENAEKEKNENSDLKQQISSLQIQVTSLAQSENDLLNSNQMLKEMVERLKQECRNFRSQAEKAQLEAEKTLEEKQIQWLEEKHKLHERITDREEKYNQAKEKLQRAAIAQKKRKSLHENKLKRLQEKVEVLEAKKEELETENQVLNRQNVPFEDYTRLQKRLKDIQRRHNEFRSLILVPNMPPTASINPVSFQSSAMVPSMELPFPPHMQEEQHQRELSLLRKRLEELETTQRKQLEELGSSGE

SEQ ID NO: 14929 - protein, 219 aa, Artificial Sequence
  Synthetic polypeptide
NRFWYTEVEKYRAVYNKLRYEHTFLKSEFEHQKEEYARILDEGKIKYESEIARLEEDKEELRNQLLNVDLTKDSKRVEQLAREKVYLCQKLKGLEAEVAELKAEKENSEAQVENAQRIQVRQLAEMQATVRSLEAEKQSANLRAERLEKELQSSSEQNTFLINKLHKAEREINTLSSKVKELKHSNKLEITDIKLETARAKSELERERNKIQSELDGNM

SEQ ID NO: 14930 - protein, 15 aa, Artificial Sequence
  Synthetic polypeptide
ILSLQIRRGKLHLLR

SEQ ID NO: 14931 - protein, 484 aa, Artificial Sequence
  Synthetic polypeptide
NWHISFALNTLPPDTSWQTSSLEVEKYRAVYNKLRYEHTFLKSEFEHQKEEYARILDEGKIKYESEIARLEEDKEELRNQLLNVDLTKDSKRVEQLAREKVYLCQKLKGLEAEVAELKAEKENSEAQVENAQRIQVRQLAEMQATVRSLEAEKQSANLRAERLEKELQSSSEQNTFLINKLHKAEREINTLSSKVKELKHSNKLEITDIKLETARAKSELERERNKIQSELDGLQSDNEILKAAVEHHKVLLVEKDRELIRKVQAAKEEGYQKLVVLQDEKLELENRLADLEKMKVEHDVWRQSEKDQYEEKLRASQMAEEITRKELQSVRLKLQQQIVTIENAEKEKNENSDLKQQISSLQIQVTSLAQSENDLLNSNQMLKEMVERLKQECRNFRSQAEKAQLEAEKTLEEKQIQWLEEKHKLHERITDREEKYNQAKEKLQRAAIAQKKLEQDLELGCPSVTDTYRESVFPPPPLKRDLLK

SEQ ID NO: 14932 - protein, 584 aa, Artificial Sequence
  Synthetic polypeptide
NWHISFALNTLPPDTSWQTSSLEVEKYRAVYNKLRYEHTFLKSEFEHQKEEYARILDEGKIKYESEIARLEEDKEELRNQLLNVDLTKDSKRVEQLAREKVYLCQKLKGLEAEVAELKAEKENSEAQVENAQRIQVRQLAEMQATVRSLEAEKQSANLRAERLEKELQSSSEQNTFLINKLHKAEREINTLSSKVKELKHSNKLEITDIKLETARAKSELERERNKIQSELDGLQSDNEILKAAVEHHKVLLVEKDRELIRKVQAAKEEGYQKLVVLQDEKLELENRLADLEKMKVEHDVWRQSEKDQYEEKLRASQMAEEITRKELQSVRLKLQQQIVTIENAEKEKNENSDLKQQISSLQIQVTSLAQSENDLLNSNQMLKEMVERLKQECRNFRSQAEKAQLEAEKTLEEKQIQWLEEKHKLHERITDREEKYNQAKEKLQRAAIAQKKRKSLHENKLKRLQEKVEVLEAKKEELETENQVLNRQNVPFEDYTRLQKRLKDIQRRHNEFRSLILVPNMPPTASINPVSFQSSAMVPSMELPFPPHMQEEQHQRELSLLRKRLEELETTQRKQLEELGSSGE

SEQ ID NO: 14933 - protein, 235 aa, Artificial Sequence
  Synthetic polypeptide
NWHISFALNTLPPDTSWQTSSLEVEKYRAVYNKLRYEHTFLKSEFEHQKEEYARILDEGKIKYESEIARLEEDKEELRNQLLNVDLTKDSKRVEQLAREKVYLCQKLKGLEAEVAELKAEKENSEAQVENAQRIQVRQLAEMQATVRSLEAEKQSANLRAERLEKELQSSSEQNTFLINKLHKAEREINTLSSKVKELKHSNKLEITDIKLETARAKSELERERNKIQSELDGNM

SEQ ID NO: 14934 - protein, 16 aa, Artificial Sequence
  Synthetic polypeptide
LGVVVHACLPSCSGGY

SEQ ID NO: 14935 - protein, 544 aa, Artificial Sequence
  Synthetic polypeptide
SQIFGRPSCVDHLRSGVRDQPGQHGETLSPLKIQILAGCSGTCLSSQLLRRILTPQKLELLRAQIQQELETPMRERFRNLDEEVEKYRAVYNKLRYEHTFLKSEFEHQKEEYARILDEGKIKYESEIARLEEDKEELRNQLLNVDLTKDSKRVEQLAREKVYLCQKLKGLEAEVAELKAEKENSEAQVENAQRIQVRQLAEMQATVRSLEAEKQSANLRAERLEKELQSSSEQNTFLINKLHKAEREINTLSSKVKELKHSNKLEITDIKLETARAKSELERERNKIQSELDGLQSDNEILKAAVEHHKVLLVEKDRELIRKVQAAKEEGYQKLVVLQDEKLELENRLADLEKMKVEHDVWRQSEKDQYEEKLRASQMAEEITRKELQSVRLKLQQQIVTIENAEKEKNENSDLKQQISSLQIQVTSLAQSENDLLNSNQMLKEMVERLKQECRNFRSQAEKAQLEAEKTLEEKQIQWLEEKHKLHERITDREEKYNQAKEKLQRAAIAQKKLEQDLELGCPSVTDTYRESVFPPPPLKRDLLK

SEQ ID NO: 14936 - protein, 644 aa, Artificial Sequence
  Synthetic polypeptide
SQIFGRPSCVDHLRSGVRDQPGQHGETLSPLKIQILAGCSGTCLSSQLLRRILTPQKLELLRAQIQQELETPMRERFRNLDEEVEKYRAVYNKLRYEHTFLKSEFEHQKEEYARILDEGKIKYESEIARLEEDKEELRNQLLNVDLTKDSKRVEQLAREKVYLCQKLKGLEAEVAELKAEKENSEAQVENAQRIQVRQLAEMQATVRSLEAEKQSANLRAERLEKELQSSSEQNTFLINKLHKAEREINTLSSKVKELKHSNKLEITDIKLETARAKSELERERNKIQSELDGLQSDNEILKAAVEHHKVLLVEKDRELIRKVQAAKEEGYQKLVVLQDEKLELENRLADLEKMKVEHDVWRQSEKDQYEEKLRASQMAEEITRKELQSVRLKLQQQIVTIENAEKEKNENSDLKQQISSLQIQVTSLAQSENDLLNSNQMLKEMVERLKQECRNFRSQAEKAQLEAEKTLEEKQIQWLEEKHKLHERITDREEKYNQAKEKLQRAAIAQKKRKSLHENKLKRLQEKVEVLEAKKEELETENQVLNRQNVPFEDYTRLQKRLKDIQRRHNEFRSLILVPNMPPTASINPVSFQSSAMVPSMELPFPPHMQEEQHQRELSLLRKRLEELETTQRKQLEELGSSGE

SEQ ID NO: 14937 - protein, 295 aa, Artificial Sequence
  Synthetic polypeptide
SQIFGRPSCVDHLRSGVRDQPGQHGETLSPLKIQILAGCSGTCLSSQLLRRILTPQKLELLRAQIQQELETPMRERFRNLDEEVEKYRAVYNKLRYEHTFLKSEFEHQKEEYARILDEGKIKYESEIARLEEDKEELRNQLLNVDLTKDSKRVEQLAREKVYLCQKLKGLEAEVAELKAEKENSEAQVENAQRIQVRQLAEMQATVRSLEAEKQSANLRAERLEKELQSSSEQNTFLINKLHKAEREINTLSSKVKELKHSNKLEITDIKLETARAKSELERERNKIQSELDGNM

SEQ ID NO: 14938 - protein, 37 aa, Artificial Sequence
  Synthetic polypeptide
WYMLVFPAAQEDINSTKIGIAKSPNTTRIRNSNERTF

SEQ ID NO: 14939 - protein, 504 aa, Artificial Sequence
  Synthetic polypeptide
GQEFETSLANMILTPQKLELLRAQIQQELETPMRERFRNLDEEVEKYRAVYNKLRYEHTFLKSEFEHQKEEYARILDEGKIKYESEIARLEEDKEELRNQLLNVDLTKDSKRVEQLAREKVYLCQKLKGLEAEVAELKAEKENSEAQVENAQRIQVRQLAEMQATVRSLEAEKQSANLRAERLEKELQSSSEQNTFLINKLHKAEREINTLSSKVKELKHSNKLEITDIKLETARAKSELERERNKIQSELDGLQSDNEILKAAVEHHKVLLVEKDRELIRKVQAAKEEGYQKLVVLQDEKLELENRLADLEKMKVEHDVWRQSEKDQYEEKLRASQMAEEITRKELQSVRLKLQQQIVTIENAEKEKNENSDLKQQISSLQIQVTSLAQSENDLLNSNQMLKEMVERLKQECRNFRSQAEKAQLEAEKTLEEKQIQWLEEKHKLHERITDREEKYNQAKEKLQRAAIAQKKLEQDLELGCPSVTDTYRESVFPPPPLKRDLLK

SEQ ID NO: 14940 - protein, 604 aa, Artificial Sequence
  Synthetic polypeptide
GQEFETSLANMILTPQKLELLRAQIQQELETPMRERFRNLDEEVEKYRAVYNKLRYEHTFLKSEFEHQKEEYARILDEGKIKYESEIARLEEDKEELRNQLLNVDLTKDSKRVEQLAREKVYLCQKLKGLEAEVAELKAEKENSEAQVENAQRIQVRQLAEMQATVRSLEAEKQSANLRAERLEKELQSSSEQNTFLINKLHKAEREINTLSSKVKELKHSNKLEITDIKLETARAKSELERERNKIQSELDGLQSDNEILKAAVEHHKVLLVEKDRELIRKVQAAKEEGYQKLVVLQDEKLELENRLADLEKMKVEHDVWRQSEKDQYEEKLRASQMAEEITRKELQSVRLKLQQQIVTIENAEKEKNENSDLKQQISSLQIQVTSLAQSENDLLNSNQMLKEMVERLKQECRNFRSQAEKAQLEAEKTLEEKQIQWLEEKHKLHERITDREEKYNQAKEKLQRAAIAQKKRKSLHENKLKRLQEKVEVLEAKKEELETENQVLNRQNVPFEDYTRLQKRLKDIQRRHNEFRSLILVPNMPPTASINPVSFQSSAMVPSMELPFPPHMQEEQHQRELSLLRKRLEELETTQRKQLEELGSSGE

SEQ ID NO: 14941 - protein, 255 aa, Artificial Sequence
  Synthetic polypeptide
GQEFETSLANMILTPQKLELLRAQIQQELETPMRERFRNLDEEVEKYRAVYNKLRYEHTFLKSEFEHQKEEYARILDEGKIKYESEIARLEEDKEELRNQLLNVDLTKDSKRVEQLAREKVYLCQKLKGLEAEVAELKAEKENSEAQVENAQRIQVRQLAEMQATVRSLEAEKQSANLRAERLEKELQSSSEQNTFLINKLHKAEREINTLSSKVKELKHSNKLEITDIKLETARAKSELERERNKIQSELDGNM

SEQ ID NO: 14942 - protein, 50 aa, Artificial Sequence
  Synthetic polypeptide
SQIFGRPSCVDHLRSGVRDQPGQHDINSTKIGIAKSPNTTRIRNSNERTF

SEQ ID NO: 14943 - protein, 150 aa, Artificial Sequence
  Synthetic polypeptide
EAKNSPLYQYLQDLGHTDFEICSSLSPKTEKCTTEGQQKPPTRVLPKDIGFRLDSLHTILQQEVLLQEDVELIELLDPSILSAGQSQQQENGHLPTLCSLATPNIWDLSMLFAFISLLVMLPTWWIVSSWLVWGVILFVYLVIRALRLWR

SEQ ID NO: 14944 - protein, 56 aa, Artificial Sequence
  Synthetic polypeptide
EAKNSPLYQYLQDLGHTDFEICSSLSPKTEKCTTEGQQKPPTRVLPKGSLNAICLH

SEQ ID NO: 14945 - protein, 161 aa, Artificial Sequence
  Synthetic polypeptide
EAKNSPLYQYLQDLGHTDFEICSSLSPKTEKCTTEGQQKPPTRVLPKQGILLKVAETIKSWIFFSQCNKKDDLLHKLDIGFRLDSLHTILQQEVLLQEDVELIELLDPSILSAGQSQQQENGHLPTLCSLATPNIWDLSMLFAFISLLVMLPTWWIVSSWL

SEQ ID NO: 14946 - protein, 770 aa, Artificial Sequence
  Synthetic polypeptide
EAKNSPLYQYLQDLGHTDFEICSSLSPKTEKCTTEGQQKPPTRVLPKQGILLKVAETIKSWIFFSQCNKKDDLLHKLDIGFRLDSLHTILQQEVLLQEDVELIELLDPSILSAGQSQQQENGHLPTLCSLATPNIWDLSMLFAFISLLVMLPTWWIVSSWLVWGVILFVYLVIRALRLWRTAKLQVTLKKYSVHLEDMATNSRAFTNLVRKALRLIQETEVISRGFTLVSAACPFNKAGQHPSQHLIGLRKAVYRTLRANFQAARLATLYMLKNYPLNSESDNVTNYICVVPFKELGLGLSEEQISEEEAHNFTDGFSLPALKVLFQLWVAQSSEFFRRLALLLSTANSPPGPLLTPALLPHRILSDVTQGLPHAHSACLEELKRSYEFYRYFETQHQSVPQCLSKTQQKSRELNNVHTAVRSLQLHLKALLNEVIILEDELEKLVCTKETQELVSEAYPILEQKLKLIQPHVQASNNCWEEAISQVDKLLRRNTDKKGKPEIACENPHCTVVPLKQPTLHIADKDPIPEEQELEAYVDDIDIDSDFRKDDFYYLSQEDKERQKREHEESKRVLQELKSVLGFKASEAERQKWKQLLFSDHAVLKSLSPVDPVEPISNSEPSMNSDMGKVSKNDTEEESNKSATTDNEISRTEYLCENSLEGKNKDNSSNEVFPQGAEERMCYQCESEDEPQADGSGLTTAPPTPRDSLQPSIKQRLARLQLSPDFTFTAGLAAEVAARSLSFTTMQEQTFGGEEEEQIIEENKNEIEEK

SEQ ID NO: 14947 - protein, 90 aa, Artificial Sequence
  Synthetic polypeptide
EAKNSPLYQYLQDLGHTDFEICSSLSPKTEKCTTEGQQKPPTRVLPKQGILLKVAETIKSWIFFSQCNKKDDLLHKLVEPSHSSVILGLW

SEQ ID NO: 14948 - protein, 50 aa, Artificial Sequence
  Synthetic polypeptide
EAKNSPLYQYLQDLGHTDFEICSSLSPKTEKCTTEGQQKPPTRVLPKVSC

SEQ ID NO: 14949 - protein, 70 aa, Artificial Sequence
  Synthetic polypeptide
EAKNSPLYQYLQDLGHTDFEICSSLSPKTEKCTTEGQQKPPTRVLPKYLGYSNHSMNINCTYWHAQGMGY

SEQ ID NO: 14950 - protein, 32 aa, Artificial Sequence
  Synthetic polypeptide
MDMVAHTCNPSTLRGQEFSTLPILTGSGTHRL

SEQ ID NO: 14951 - protein, 61 aa, Artificial Sequence
  Synthetic polypeptide
SQHFERPRILHFTNTYRIWDTQTLKYVLLCHQKQKNAQQRDNKSLLQESYQKDLSMLFAFI

SEQ ID NO: 14952 - protein, 76 aa, Artificial Sequence
  Synthetic polypeptide
SQHFERPRILHFTNTYRIWDTQTLKYVLLCHQKQKNAQQRDNKSLLQESYQKILDSDSTHYIPSCNRKSCYKRMWS

SEQ ID NO: 14953 - protein, 55 aa, Artificial Sequence
  Synthetic polypeptide
SQHFERPRILHFTNTYRIWDTQTLKYVLLCHQKQKNAQQRDNKSLLQESYQKYPV

SEQ ID NO: 14954 - protein, 56 aa, Artificial Sequence
  Synthetic polypeptide
SQHFERPRILHFTNTYRIWDTQTLKYVLLCHQKQKNAQQRDNKSLLQESYQNKVSC

SEQ ID NO: 14955 - protein, 60 aa, Artificial Sequence
  Synthetic polypeptide
SQHFERPRILHFTNTYRIWDTQTLKYVLLCHQKQKNAQQRDNKSLLQESYQNTWDIVITQ

SEQ ID NO: 14956 - protein, 14 aa, Artificial Sequence
  Synthetic polypeptide
KNEFRDLSMLFAFI

SEQ ID NO: 14957 - protein, 21 aa, Artificial Sequence
  Synthetic polypeptide
KNEFRDLSMLFAFISLLVMLP

SEQ ID NO: 14958 - protein, 30 aa, Artificial Sequence
  Synthetic polypeptide
KNEFRDLSMLFAFISLLVMLPTWWIVSSWL

SEQ ID NO: 14959 - protein, 36 aa, Artificial Sequence
  Synthetic polypeptide
KNEFRDLSMLFAFISLLVMLPTWWIVSSWLVWGVIL

SEQ ID NO: 14960 - protein, 49 aa, Artificial Sequence
  Synthetic polypeptide
KNEFRDLSMLFAFISLLVMLPTWWIVSSWLVWGVILFVYLVIRALRLWR

SEQ ID NO: 14961 - protein, 631 aa, Artificial Sequence
  Synthetic polypeptide
KNEFRDLSMLFAFISLLVMLPTWWIVSSWLVWGVILFVYLVIRALRLWRTAKLQVTLKKYSVHLEDMATNSRAFTNLVRKALRLIQETEVISRGFTLLLDRVSAACPFNKAGQHPSQHLIGLRKAVYRTLRANFQAARLATLYMLKNYPLNSESDNVTNYICVVPFKELGLGLSEEQISEEEAHNFTDGFSLPALKVLFQLWVAQSSEFFRRLALLLSTANSPPGPLLTPALLPHRILSDVTQGLPHAHSACLEELKRSYEFYRYFETQHQSVPQCLSKTQQKSRELNNVHTAVRSLQLHLKALLNEVIILEDELEKLVCTKETQELVSEAYPILEQKLKLIQPHVQASNNCWEEAISQVDKLLRRNTDKKGKPEIACENPHCTVVPLKQPTLHIADKDPIPEEQELEAYVDDIDIDSDFRKDDFYYLSQEDKERQKREHEESKRVLQELKSVLGFKASEAERQKWKQLLFSDHAVLKSLSPVDPVEPISNSEPSMNSDMGKVSKNDTEEESNKSATTDNEISRTEYLCENSLEGKNKDNSSNEVFPQGAEERMCYQCESEDEPQADGSGLTTAPPTPRDSLQPSIKQRLARLQLSPDFTFTAGLAAEVAARSLSFTTMQEQTFGGEEEEQ

SEQ ID NO: 14962 - protein, 639 aa, Artificial Sequence
  Synthetic polypeptide
KNEFRDLSMLFAFISLLVMLPTWWIVSSWLVWGVILFVYLVIRALRLWRTAKLQVTLKKYSVHLEDMATNSRAFTNLVRKALRLIQETEVISRGFTLVSAACPFNKAGQHPSQHLIGLRKAVYRTLRANFQAARLATLYMLKNYPLNSESDNVTNYICVVPFKELGLGLSEEQISEEEAHNFTDGFSLPALKVLFQLWVAQSSEFFRRLALLLSTANSPPGPLLTPALLPHRILSDVTQGLPHAHSACLEELKRSYEFYRYFETQHQSVPQCLSKTQQKSRELNNVHTAVRSLQLHLKALLNEVIILEDELEKLVCTKETQELVSEAYPILEQKLKLIQPHVQASNNCWEEAISQVDKLLRRNTDKKGKPEIACENPHCTVVPLKQPTLHIADKDPIPEEQELEAYVDDIDIDSDFRKDDFYYLSQEDKERQKREHEESKRVLQELKSVLGFKASEAERQKWKQLLFSDHAVLKSLSPVDPVEPISNSEPSMNSDMGKVSKNDTEEESNKSATTDNEISRTEYLCENSLEGKNKDNSSNEVFPQGAEERMCYQCESEDEPQADGSGLTTAPPTPRDSLQPSIKQRLARLQLSPDFTFTAGLAAEVAARSLSFTTMQEQTFGGEEEEQIIEENKNEIEEK

SEQ ID NO: 14963 - protein, 23 aa, Artificial Sequence
  Synthetic polypeptide
QNPISTKHEKMSSGISQCYLPSL

SEQ ID NO: 14964 - protein, 30 aa, Artificial Sequence
  Synthetic polypeptide
QNPISTKHEKMSSGISQCYLPSLACSLCFP

SEQ ID NO: 14965 - protein, 38 aa, Artificial Sequence
  Synthetic polypeptide
QNPISTKHEKMSSGISQCYLPSLACSLCFPLGGLCLPG

SEQ ID NO: 14966 - protein, 42 aa, Artificial Sequence
  Synthetic polypeptide
QNPISTKHEKMSSGISQCYLPSLACSLCFPLGGLCLPGWYGE

SEQ ID NO: 14967 - protein, 11 aa, Artificial Sequence
  Synthetic polypeptide
VQGSLNAICLH

SEQ ID NO: 14968 - protein, 110 aa, Artificial Sequence
  Synthetic polypeptide
QTCTLCGMVAALSAIRANCHQEPSVCLQAACPESWIGFQRKCFYFSDDTKNWTSSQRFCDSQDADLAQVESFQELNFLLRYKGPSDHWIGLSREQGQPWKWINGTEWTRQ

SEQ ID NO: 14969 - protein, 147 aa, Artificial Sequence
  Synthetic polypeptide
QTCTLCGMVAALSAIRANCHQEPSVCLQAACPESWIGFQRKCFYFSDDTKNWTSSQRFCDSQDADLAQVESFQELNFLLRYKGPSDHWIGLSREQGQPWKWINGTEWTRQFPILGAGECAYLNDKGASSARHYTERKWICSKSDIHV

SEQ ID NO: 14970 - protein, 150 aa, Artificial Sequence
  Synthetic polypeptide
QTCTLCGMVAALSAIRANCHQEPSVCLQAACPESWIGFQRKCFYFSDDTKNWTSSQRFCDSQDADLAQVESFQELNFLLRYKGPSDHWIGLSREQGQPWKWINGTEWTRQLVMKEDGANLYVAKVSQVPRMNPRPVMVSYPGSRRVCLFE

SEQ ID NO: 14971 - protein, 78 aa, Artificial Sequence
  Synthetic polypeptide
QTCTLCGMVAALSAIRANCHQEPSVCLQAACPESWIGFQRKCFYFSDDTKNWTSSQRFCDSQDADLAQVESFQELVRK

SEQ ID NO: 14972 - protein, 88 aa, Artificial Sequence
  Synthetic polypeptide
QTCTLCGMVAALSAIRANCHQEPSVCLQAACPESWIGFQRKCFYFSDDTKNWTSSQRFCDSQDADLAQVESFQELVSYPGSRRVCLFE

SEQ ID NO: 14973 - protein, 19 aa, Artificial Sequence
  Synthetic polypeptide
QVTDLHIVWNGCCFKRNKS

SEQ ID NO: 14974 - protein, 13 aa, Artificial Sequence
  Synthetic polypeptide
SNRPAHCVEWLLL

SEQ ID NO: 14975 - protein, 31 aa, Artificial Sequence
  Synthetic polypeptide
DIRECSRQLEAERRFWKGATEKLSAFKRAFY

SEQ ID NO: 14976 - protein, 50 aa, Artificial Sequence
  Synthetic polypeptide
EQLEELELKKKDFIKILESVQGNWRQNEDSGKGPQRSCLHSKEHSIKATL

SEQ ID NO: 14977 - protein, 170 aa, Artificial Sequence
  Synthetic polypeptide
EQLEELELKKKDFIKILESVQGNWRQNEDSGKGPQRSCLHSKEHSIKATLIWRLFFLIMFLTIIVCGMVAALSAIRANCHQEPSVCLQAACPESWIGFQRKCFYFSDDTKNWTSSQRFCDSQDADLAQVESFQELNFLLRYKGPSDHWIGLSREQGQPWKWINGTEWTRQ

SEQ ID NO: 14978 - protein, 207 aa, Artificial Sequence
  Synthetic polypeptide
EQLEELELKKKDFIKILESVQGNWRQNEDSGKGPQRSCLHSKEHSIKATLIWRLFFLIMFLTIIVCGMVAALSAIRANCHQEPSVCLQAACPESWIGFQRKCFYFSDDTKNWTSSQRFCDSQDADLAQVESFQELNFLLRYKGPSDHWIGLSREQGQPWKWINGTEWTRQFPILGAGECAYLNDKGASSARHYTERKWICSKSDIHV

SEQ ID NO: 14979 - protein, 210 aa, Artificial Sequence
  Synthetic polypeptide
EQLEELELKKKDFIKILESVQGNWRQNEDSGKGPQRSCLHSKEHSIKATLIWRLFFLIMFLTIIVCGMVAALSAIRANCHQEPSVCLQAACPESWIGFQRKCFYFSDDTKNWTSSQRFCDSQDADLAQVESFQELNFLLRYKGPSDHWIGLSREQGQPWKWINGTEWTRQLVMKEDGANLYVAKVSQVPRMNPRPVMVSYPGSRRVCLFE

SEQ ID NO: 14980 - protein, 138 aa, Artificial Sequence
  Synthetic polypeptide
EQLEELELKKKDFIKILESVQGNWRQNEDSGKGPQRSCLHSKEHSIKATLIWRLFFLIMFLTIIVCGMVAALSAIRANCHQEPSVCLQAACPESWIGFQRKCFYFSDDTKNWTSSQRFCDSQDADLAQVESFQELVRK

SEQ ID NO: 14981 - protein, 148 aa, Artificial Sequence
  Synthetic polypeptide
EQLEELELKKKDFIKILESVQGNWRQNEDSGKGPQRSCLHSKEHSIKATLIWRLFFLIMFLTIIVCGMVAALSAIRANCHQEPSVCLQAACPESWIGFQRKCFYFSDDTKNWTSSQRFCDSQDADLAQVESFQELVSYPGSRRVCLFE

SEQ ID NO: 14982 - protein, 32 aa, Artificial Sequence
  Synthetic polypeptide
RVFKATGGRTKILERGHREVVCIQKSILLKLP

SEQ ID NO: 14983 - protein, 29 aa, Artificial Sequence
  Synthetic polypeptide
LNHGVGYPRAVLVIASCLHSKEHSIKATL

SEQ ID NO: 14984 - protein, 149 aa, Artificial Sequence
  Synthetic polypeptide
LNHGVGYPRAVLVIASCLHSKEHSIKATLIWRLFFLIMFLTIIVCGMVAALSAIRANCHQEPSVCLQAACPESWIGFQRKCFYFSDDTKNWTSSQRFCDSQDADLAQVESFQELNFLLRYKGPSDHWIGLSREQGQPWKWINGTEWTRQ

SEQ ID NO: 14985 - protein, 186 aa, Artificial Sequence
  Synthetic polypeptide
LNHGVGYPRAVLVIASCLHSKEHSIKATLIWRLFFLIMFLTIIVCGMVAALSAIRANCHQEPSVCLQAACPESWIGFQRKCFYFSDDTKNWTSSQRFCDSQDADLAQVESFQELNFLLRYKGPSDHWIGLSREQGQPWKWINGTEWTRQFPILGAGECAYLNDKGASSARHYTERKWICSKSDIHV

SEQ ID NO: 14986 - protein, 189 aa, Artificial Sequence
  Synthetic polypeptide
LNHGVGYPRAVLVIASCLHSKEHSIKATLIWRLFFLIMFLTIIVCGMVAALSAIRANCHQEPSVCLQAACPESWIGFQRKCFYFSDDTKNWTSSQRFCDSQDADLAQVESFQELNFLLRYKGPSDHWIGLSREQGQPWKWINGTEWTRQLVMKEDGANLYVAKVSQVPRMNPRPVMVSYPGSRRVCLFE

SEQ ID NO: 14987 - protein, 117 aa, Artificial Sequence
  Synthetic polypeptide
LNHGVGYPRAVLVIASCLHSKEHSIKATLIWRLFFLIMFLTIIVCGMVAALSAIRANCHQEPSVCLQAACPESWIGFQRKCFYFSDDTKNWTSSQRFCDSQDADLAQVESFQELVRK

SEQ ID NO: 14988 - protein, 127 aa, Artificial Sequence
  Synthetic polypeptide
LNHGVGYPRAVLVIASCLHSKEHSIKATLIWRLFFLIMFLTIIVCGMVAALSAIRANCHQEPSVCLQAACPESWIGFQRKCFYFSDDTKNWTSSQRFCDSQDADLAQVESFQELVSYPGSRRVCLFE

SEQ ID NO: 14989 - protein, 14 aa, Artificial Sequence
  Synthetic polypeptide
RVVCIQKSILLKLP

SEQ ID NO: 14990 - protein, 37 aa, Artificial Sequence
  Synthetic polypeptide
SPLVMGGTQWEITESWSWLPSCCSCDSELSAFKRAFY

SEQ ID NO: 14991 - protein, 53 aa, Artificial Sequence
  Synthetic polypeptide
GAFTPLLGTSVSCCHVKKNTFASSSTIIVSFLRPPQPCRIVVCIQKSILLKLP

SEQ ID NO: 14992 - protein, 17 aa, Artificial Sequence
  Synthetic polypeptide
GLPSHVELLSAFKRAFY

SEQ ID NO: 14993 - protein, 15 aa, Artificial Sequence
  Synthetic polypeptide
NCCLHSKEHSIKATL

SEQ ID NO: 14994 - protein, 135 aa, Artificial Sequence
  Synthetic polypeptide
NCCLHSKEHSIKATLIWRLFFLIMFLTIIVCGMVAALSAIRANCHQEPSVCLQAACPESWIGFQRKCFYFSDDTKNWTSSQRFCDSQDADLAQVESFQELNFLLRYKGPSDHWIGLSREQGQPWKWINGTEWTRQ

SEQ ID NO: 14995 - protein, 172 aa, Artificial Sequence
  Synthetic polypeptide
NCCLHSKEHSIKATLIWRLFFLIMFLTIIVCGMVAALSAIRANCHQEPSVCLQAACPESWIGFQRKCFYFSDDTKNWTSSQRFCDSQDADLAQVESFQELNFLLRYKGPSDHWIGLSREQGQPWKWINGTEWTRQFPILGAGECAYLNDKGASSARHYTERKWICSKSDIHV

SEQ ID NO: 14996 - protein, 175 aa, Artificial Sequence
  Synthetic polypeptide
NCCLHSKEHSIKATLIWRLFFLIMFLTIIVCGMVAALSAIRANCHQEPSVCLQAACPESWIGFQRKCFYFSDDTKNWTSSQRFCDSQDADLAQVESFQELNFLLRYKGPSDHWIGLSREQGQPWKWINGTEWTRQLVMKEDGANLYVAKVSQVPRMNPRPVMVSYPGSRRVCLFE

SEQ ID NO: 14997 - protein, 103 aa, Artificial Sequence
  Synthetic polypeptide
NCCLHSKEHSIKATLIWRLFFLIMFLTIIVCGMVAALSAIRANCHQEPSVCLQAACPESWIGFQRKCFYFSDDTKNWTSSQRFCDSQDADLAQVESFQELVRK

SEQ ID NO: 14998 - protein, 113 aa, Artificial Sequence
  Synthetic polypeptide
NCCLHSKEHSIKATLIWRLFFLIMFLTIIVCGMVAALSAIRANCHQEPSVCLQAACPESWIGFQRKCFYFSDDTKNWTSSQRFCDSQDADLAQVESFQELVSYPGSRRVCLFE

SEQ ID NO: 14999 - protein, 43 aa, Artificial Sequence
  Synthetic polypeptide
HFLSTFLLSINHVLPKTGRCIRENVTGLLKLRNLGTKVKMTVP

SEQ ID NO: 15000 - protein, 82 aa, Artificial Sequence
  Synthetic polypeptide
ISALLSSNCVTVNLNIPILTLSFNFSTVHKSCPAKDWKVHKGKCYWIAETKKSWNKSQNDCAINNSYLMVIQDITAMKSNLF

SEQ ID NO: 15001 - protein, 82 aa, Artificial Sequence
  Synthetic polypeptide
ISALLSSNCVTVNLNIPILTLSFNFSTVHKSCPAKDWKVHKGKCYWIAETKKSWNKSQNDCAINNSYLMVIQDITAMVRFNI

SEQ ID NO: 15002 - protein, 21 aa, Artificial Sequence
  Synthetic polypeptide
LCDCELEYPHFNTFFQLFYCP

SEQ ID NO: 15003 - protein, 30 aa, Artificial Sequence
  Synthetic polypeptide
KELYTMTKWVYPSTHFGTLYPRIYLNNSEE

SEQ ID NO: 15004 - protein, 18 aa, Artificial Sequence
  Synthetic polypeptide
PSGFILVHILELYTQEFI

SEQ ID NO: 15005 - protein, 55 aa, Artificial Sequence
  Synthetic polypeptide
AQPGQYSCRRKLQTPSRPCRRPGSKSGFSRETRWRRPRPRATPASSSAGTRSCWS

SEQ ID NO: 15006 - protein, 155 aa, Artificial Sequence
  Synthetic polypeptide
GQEFEPSLGNIAAGESCRHHRGPAEGRDQSLGSHGRQDGDGRGHVLRLQALPQEHAAAGADHQEDRGAEPARRPVRAEQDGPAPQREPDQRQPVRTFSRYAGLRFNYRRSCTVSDNEASRRREFRQLQGALPGNLPELQRGALLPHGALAEGSDC

SEQ ID NO: 15007 - protein, 151 aa, Artificial Sequence; identical to SEQ ID NO: 3108
  Synthetic polypeptide

SEQ ID NO: 15008 - protein, 67 aa, Artificial Sequence; identical to SEQ ID NO: 4327
  Synthetic polypeptide

SEQ ID NO: 15009 - protein, 292 aa, Artificial Sequence; identical to SEQ ID NO: 2531
  Synthetic polypeptide

SEQ ID NO: 15010 - protein, 552 aa, Artificial Sequence; identical to SEQ ID NO: 1933
  Synthetic polypeptide

SEQ ID NO: 15011 - protein, 495 aa, Artificial Sequence; identical to SEQ ID NO: 2052
  Synthetic polypeptide

SEQ ID NO: 15012 - protein, 321 aa, Artificial Sequence; identical to SEQ ID NO: 2422
  Synthetic polypeptide

SEQ ID NO: 15013 - protein, 32 aa, Artificial Sequence
  Synthetic polypeptide
AEAWQPVHAVGGHMKSCTRTSSRSVLPTSRTS

SEQ ID NO: 15014 - protein, 78 aa, Artificial Sequence
  Synthetic polypeptide
CGGMAARACCWWAHEIMHQDIVPLCAADIQDQLKKRFAYLSGGRGQDGSPVITFPDYPAFSEIPDKEFQNVMTYLTSI

SEQ ID NO: 15015 - protein, 125 aa, Artificial Sequence
  Synthetic polypeptide
CGGMAARACCWWAHEIMHQDIVPLCAADIQDQLKKRFAYLSGGRGQDGSPVITFPDYPAFSEIPDKEFQNVMTYLTSIPSGGQESSIRPVSCRLTWEGCRGGLSSDVLVPASRKMLRMSASHQTV

SEQ ID NO: 15016 - protein, 973 aa, Artificial Sequence
  Synthetic polypeptide
CGGMAARACCWWAHEIMHQDIVPLCAADIQDQLKKRFAYLSGGRGQDGSPVITFPDYPAFSEIPDKEFQNVMTYLTSIPSLQDAGIGFILVIDRRRDKWTSVKASVLRIAASFPANLQLVLVLRPTGFFQRTLSDIAFKFNRDDFKMKVPVIMLSSVPDLHGYIDKSQLTEDLGGTLDYCHSRWLCQRTAIESFALMVKQTAQMLQSFGTELAETELPNDVQSTSSVLCAHTEKKDKAKEDLRLALKEGHSVLESLRELQAEGSEPSVNQDQLDNQATVQRLLAQLNETEAAFDEFWAKHQQKLEQCLQLRHFEQGFREVKAILDAASQKIATFTDIGNSLAHVEHLLRDLASFEEKSGVAVERARALSLDGEQLIGNKHYAVDSIRPKCQELRHLCDQFSAEIARRRGLLSKSLELHRRLETSMKWCDEGIYLLASQPVDKCQSQDGAEAALQEIEKFLETGAENKIQELNAIYKEYESILNQDLMEHVRKVFQKQASMEEVFHRRQASLKKLAARQTRPVQPVAPRPEALAKSPCPSPGIRRGSENSSSEGGALRRGPYRRAKSEMSESRQGRGSAGEEEESLAILRRHVMSELLDTERAYVEELLCVLEGYAAEMDNPLMAHLLSTGLHNKKDVLFGNMEEIYHFHNRIFLRELENYTDCPELVGRCFLERMEDFQIYEKYCQNKPRSESLWRQCSDCPFFQECQRKLDHKLSLDSYLLKPVQRITKYQLLLKEMLKYSRNCEGAEDLQEALSSILGILKAVNDSMHLIAITGYDGNLGDLGKLLMQGSFSVWTDHKRGHTKVKELARFKPMQRHLFLHEKAVLFCKKREENGEGYEKAPSYSYKQSLNMAAVGITENVKGDAKKFEIWYNAREEVYIVQAPTPEIKAAWVNEIRKVLTSQLQACREASQHRALEQSQSLPLPAPTSTSPSRGNSRNIKKLEERKTDPLSLEGYVSSAPLTKPPEKGKEP

SEQ ID NO: 15017 - protein, 1050 aa, Artificial Sequence
  Synthetic polypeptide
CGGMAARACCWWAHEIMHQDIVPLCAADIQDQLKKRFAYLSGGRGQDGSPVITFPDYPAFSEIPDKEFQNVMTYLTSIPSLQDAGIGFILVIDRRRDKWTSVKASVLRIAASFPANLQLVLVLRPTGFFQRTLSDIAFKFNRDDFKMKVPVIMLSSVPDLHGYIDKSQLTEDLGGTLDYCHSRWLCQRTAIESFALMVKQTAQMLQSFGTELAETELPNDVQSTSSVLCAHTEKKDKAKEDLRLALKEGHSVLESLRELQAEGSEPSVNQDQLDNQATVQRLLAQLNETEAAFDEFWAKHQQKLEQCLQLRHFEQGFREVKAILDAASQKIATFTDIGNSLAHVEHLLRDLASFEEKSGVAVERARALSLDGEQLIGNKHYAVDSIRPKCQELRHLCDQFSAEIARRRGLLSKSLELHRRLETSMKWCDEGIYLLASQPVDKCQSQDGAEAALQEIEKFLETGAENKIQELNAIYKEYESILNQDLMEHVRKVFQKQASMEEVFHRRQASLKKLAARQTRPVQPVAPRPEALAKSPCPSPGIRRGSENSSSEGGALRRGPYRRAKSEMSESRQGRGSAGEEEESLAILRRHVMSELLDTERAYVEELLCVLEGYAAEMDNPLMAHLLSTGLHNKKDVLFGNMEEIYHFHNRIFLRELENYTDCPELVGRCFLERMEDFQIYEKYCQNKPRSESLWRQCSDCPFFQECQRKLDHKLSLDSYLLKPVQRITKYQLLLKEMLKYSRNCEGAEDLQEALSSILGILKAVNDSMHLIAITGYDGNLGDLGKLLMQGSFSVWTDHKRGHTKVKELARFKPMQRHLFLHEKAVLFCKKREENGEGYEKAPSYSYKQSLNMAAVGITENVKGDAKKFEIWYNAREEVYIVQAPTPEIKAAWVNEIRKVLTSQLQACREASQHRALEQSQSLPLPAPTSTSPSRGNSRNIKKLEERKTDPLSLEGYVSSAPLTKPPEKGKGWSKTSHSLEAPEDDGGWSSAEEQINSSDAEEDGGLGPKKLVPGKYTVVADHEKGGPDALRVRSGDVVELVQEGDEGLW

SEQ ID NO: 15018 - protein, 1112 aa, Artificial Sequence
  Synthetic polypeptide
CGGMAARACCWWAHEIMHQDIVPLCAADIQDQLKKRFAYLSGGRGQDGSPVITFPDYPAFSEIPDKEFQNVMTYLTSIPSLQDAGIGFILVIDRRRDKWTSVKASVLRIAASFPANLQLVLVLRPTGFFQRTLSDIAFKFNRDDFKMKVPVIMLSSVPDLHGYIDKSQLTEDLGGTLDYCHSRWLCQRTAIESFALMVKQTAQMLQSFGTELAETELPNDVQSTSSVLCAHTEKKDKAKEDLRLALKEGHSVLESLRELQAEGSEPSVNQDQLDNQATVQRLLAQLNETEAAFDEFWAKHQQKLEQCLQLRHFEQGFREVKAILDAASQKIATFTDIGNSLAHVEHLLRDLASFEEKSGVAVERARALSLDGEQLIGNKHYAVDSIRPKCQELRHLCDQFSAEIARRRGLLSKSLELHRRLETSMKWCDEGIYLLASQPVDKCQSQDGAEAALQEIEKFLETGAENKIQELNAIYKEYESILNQDLMEHVRKVFQKQASMEEVFHRRQASLKKLAARQTRPVQPVAPRPEALAKSPCPSPGIRRGSENSSSEGGALRRGPYRRAKSEMSESRQGRGSAGEEEESLAILRRHVMSELLDTERAYVEELLCVLEGYAAEMDNPLMAHLLSTGLHNKKDVLFGNMEEIYHFHNRIFLRELENYTDCPELVGRCFLERMEDFQIYEKYCQNKPRSESLWRQCSDCPFFQECQRKLDHKLSLDSYLLKPVQRITKYQLLLKEMLKYSRNCEGAEDLQEALSSILGILKAVNDSMHLIAITGYDGNLGDLGKLLMQGSFSVWTDHKRGHTKVKELARFKPMQRHLFLHEKAVLFCKKREENGEGYEKAPSYSYKQSLNMAAVGITENVKGDAKKFEIWYNAREEVYIVQAPTPEIKAAWVNEIRKVLTSQLQACREASQHRALEQSQSLPLPAPTSTSPSRGNSRNIKKLEERKTDPLSLEGYVSSAPLTKPPEKGKGWSKTSHSLEAPEDDGGWSSAEEQINSSDAEEDGGLGPKKLVPGKYTVVADHEKGGPDALRVRSGDVVELVQEGDEGLWYVRDPTTGKEGWVPASSLSVRLGPSGSAQCLSSSESSPGSAVLSNSSSCSEGGQAPFSDLQG

SEQ ID NO: 15019 - protein, 1094 aa, Artificial Sequence
  Synthetic polypeptide
CGGMAARACCWWAHEIMHQDIVPLCAADIQDQLKKRFAYLSGGRGQDGSPVITFPDYPAFSEIPDKEFQNVMTYLTSIPSLQDAGIGFILVIDRRRDKWTSVKASVLRIAASFPANLQLVLVLRPTGFFQRTLSDIAFKFNRDDFKMKVPVIMLSSVPDLHGYIDKSQLTEDLGGTLDYCHSRWLCQRTAIESFALMVKQTAQMLQSFGTELAETELPNDVQSTSSVLCAHTEKKDKAKEDLRLALKEGHSVLESLRELQAEGSEPSVNQDQLDNQATVQRLLAQLNETEAAFDEFWAKHQQKLEQCLQLRHFEQGFREVKAILDAASQKIATFTDIGNSLAHVEHLLRDLASFEEKSGVAVERARALSLDGEQLIGNKHYAVDSIRPKCQELRHLCDQFSAEIARRRGLLSKSLELHRRLETSMKWCDEGIYLLASQPVDKCQSQDGAEAALQEIEKFLETGAENKIQELNAIYKEYESILNQDLMEHVRKVFQKQASMEEVFHRRQASLKKLAARQTRPVQPVAPRPEALAKSPCPSPGIRRGSENSSSEGGALRRGPYRRAKSEMSESRQGRGSAGEEEESLAILRRHVMSELLDTERAYVEELLCVLEGYAAEMDNPLMAHLLSTGLHNKKDVLFGNMEEIYHFHNRIFLRELENYTDCPELVGRCFLERMEDFQIYEKYCQNKPRSESLWRQCSDCPFFQECQRKLDHKLSLDSYLLKPVQRITKYQLLLKEMLKYSRNCEGAEDLQEALSSILGILKAVNDSMHLIAITGYDGNLGDLGKLLMQGSFSVWTDHKRGHTKVKELARFKPMQRHLFLHEKAVLFCKKREENGEGYEKAPSYSYKQSLNMAAVGITENVKGDAKKFEIWYNAREEVYIVQAPTPEIKAAWVNEIRKVLTSQLQACREASQHRALEQSQSLPLPAPTSTSPSRGNSRNIKKLEERKTDPLSLEGYVSSAPLTKPPEKGKGWSKTSHSLEAPEDDGGWSSAEEQINSSDAEEDGGLGPKKLVPGKYTVVADHEKGGPDALRVRSGDVVELVQEGDEGLWYVRDPTTGKEGWVPASSLSVRLGPSGSAQCLSSSGKAHVPRAHP

SEQ ID NO: 15020 - protein, 13 aa, Artificial Sequence
  Synthetic polypeptide
RRHGSPCMLLVGT

SEQ ID NO: 15021 - protein, 35 aa, Artificial Sequence
  Synthetic polypeptide
ETQPAGRWHRIHPGDRPATGQMDLREGVRPAHRKL

SEQ ID NO: 15022 - protein, 64 aa, Artificial Sequence
  Synthetic polypeptide
ETQPAGRWHRIHPGDRPATGQMDLREGVRPAHRSIFPGKPAARPRASPDGFFPKDSLRHRFQIQ

SEQ ID NO: 15023 - protein, 34 aa, Artificial Sequence
  Synthetic polypeptide
ETQPAGRWHRIHPGDRPATGQMDLREGVRPAHRT

SEQ ID NO: 15024 - protein, 47 aa, Artificial Sequence
  Synthetic polypeptide
GQEHCSHFYSGLCLEVPGRQQDKKRKVLRIETVRNTACRTLASDSSW

SEQ ID NO: 15025 - protein, 78 aa, Artificial Sequence
  Synthetic polypeptide
NSKKHSLQDAGIGFILVIDRRRDKWTSVKASVLRIAASFPANLQLVLVLRPTGFFQRTLSDIAFKFNRDDFKMKVPVI

SEQ ID NO: 15026 - protein, 899 aa, Artificial Sequence
  Synthetic polypeptide
NSKKHSLQDAGIGFILVIDRRRDKWTSVKASVLRIAASFPANLQLVLVLRPTGFFQRTLSDIAFKFNRDDFKMKVPVIMLSSVPDLHGYIDKSQLTEDLGGTLDYCHSRWLCQRTAIESFALMVKQTAQMLQSFGTELAETELPNDVQSTSSVLCAHTEKKDKAKEDLRLALKEGHSVLESLRELQAEGSEPSVNQDQLDNQATVQRLLAQLNETEAAFDEFWAKHQQKLEQCLQLRHFEQGFREVKAILDAASQKIATFTDIGNSLAHVEHLLRDLASFEEKSGVAVERARALSLDGEQLIGNKHYAVDSIRPKCQELRHLCDQFSAEIARRRGLLSKSLELHRRLETSMKWCDEGIYLLASQPVDKCQSQDGAEAALQEIEKFLETGAENKIQELNAIYKEYESILNQDLMEHVRKVFQKQASMEEVFHRRQASLKKLAARQTRPVQPVAPRPEALAKSPCPSPGIRRGSENSSSEGGALRRGPYRRAKSEMSESRQGRGSAGEEEESLAILRRHVMSELLDTERAYVEELLCVLEGYAAEMDNPLMAHLLSTGLHNKKDVLFGNMEEIYHFHNRIFLRELENYTDCPELVGRCFLERMEDFQIYEKYCQNKPRSESLWRQCSDCPFFQECQRKLDHKLSLDSYLLKPVQRITKYQLLLKEMLKYSRNCEGAEDLQEALSSILGILKAVNDSMHLIAITGYDGNLGDLGKLLMQGSFSVWTDHKRGHTKVKELARFKPMQRHLFLHEKAVLFCKKREENGEGYEKAPSYSYKQSLNMAAVGITENVKGDAKKFEIWYNAREEVYIVQAPTPEIKAAWVNEIRKVLTSQLQACREASQHRALEQSQSLPLPAPTSTSPSRGNSRNIKKLEERKTDPLSLEGYVSSAPLTKPPEKGKEP

SEQ ID NO: 15027 - protein, 976 aa, Artificial Sequence
  Synthetic polypeptide
NSKKHSLQDAGIGFILVIDRRRDKWTSVKASVLRIAASFPANLQLVLVLRPTGFFQRTLSDIAFKFNRDDFKMKVPVIMLSSVPDLHGYIDKSQLTEDLGGTLDYCHSRWLCQRTAIESFALMVKQTAQMLQSFGTELAETELPNDVQSTSSVLCAHTEKKDKAKEDLRLALKEGHSVLESLRELQAEGSEPSVNQDQLDNQATVQRLLAQLNETEAAFDEFWAKHQQKLEQCLQLRHFEQGFREVKAILDAASQKIATFTDIGNSLAHVEHLLRDLASFEEKSGVAVERARALSLDGEQLIGNKHYAVDSIRPKCQELRHLCDQFSAEIARRRGLLSKSLELHRRLETSMKWCDEGIYLLASQPVDKCQSQDGAEAALQEIEKFLETGAENKIQELNAIYKEYESILNQDLMEHVRKVFQKQASMEEVFHRRQASLKKLAARQTRPVQPVAPRPEALAKSPCPSPGIRRGSENSSSEGGALRRGPYRRAKSEMSESRQGRGSAGEEEESLAILRRHVMSELLDTERAYVEELLCVLEGYAAEMDNPLMAHLLSTGLHNKKDVLFGNMEEIYHFHNRIFLRELENYTDCPELVGRCFLERMEDFQIYEKYCQNKPRSESLWRQCSDCPFFQECQRKLDHKLSLDSYLLKPVQRITKYQLLLKEMLKYSRNCEGAEDLQEALSSILGILKAVNDSMHLIAITGYDGNLGDLGKLLMQGSFSVWTDHKRGHTKVKELARFKPMQRHLFLHEKAVLFCKKREENGEGYEKAPSYSYKQSLNMAAVGITENVKGDAKKFEIWYNAREEVYIVQAPTPEIKAAWVNEIRKVLTSQLQACREASQHRALEQSQSLPLPAPTSTSPSRGNSRNIKKLEERKTDPLSLEGYVSSAPLTKPPEKGKGWSKTSHSLEAPEDDGGWSSAEEQINSSDAEEDGGLGPKKLVPGKYTVVADHEKGGPDALRVRSGDVVELVQEGDEGLW

SEQ ID NO: 15028 - protein, 1038 aa, Artificial Sequence
  Synthetic polypeptide
NSKKHSLQDAGIGFILVIDRRRDKWTSVKASVLRIAASFPANLQLVLVLRPTGFFQRTLSDIAFKFNRDDFKMKVPVIMLSSVPDLHGYIDKSQLTEDLGGTLDYCHSRWLCQRTAIESFALMVKQTAQMLQSFGTELAETELPNDVQSTSSVLCAHTEKKDKAKEDLRLALKEGHSVLESLRELQAEGSEPSVNQDQLDNQATVQRLLAQLNETEAAFDEFWAKHQQKLEQCLQLRHFEQGFREVKAILDAASQKIATFTDIGNSLAHVEHLLRDLASFEEKSGVAVERARALSLDGEQLIGNKHYAVDSIRPKCQELRHLCDQFSAEIARRRGLLSKSLELHRRLETSMKWCDEGIYLLASQPVDKCQSQDGAEAALQEIEKFLETGAENKIQELNAIYKEYESILNQDLMEHVRKVFQKQASMEEVFHRRQASLKKLAARQTRPVQPVAPRPEALAKSPCPSPGIRRGSENSSSEGGALRRGPYRRAKSEMSESRQGRGSAGEEEESLAILRRHVMSELLDTERAYVEELLCVLEGYAAEMDNPLMAHLLSTGLHNKKDVLFGNMEEIYHFHNRIFLRELENYTDCPELVGRCFLERMEDFQIYEKYCQNKPRSESLWRQCSDCPFFQECQRKLDHKLSLDSYLLKPVQRITKYQLLLKEMLKYSRNCEGAEDLQEALSSILGILKAVNDSMHLIAITGYDGNLGDLGKLLMQGSFSVWTDHKRGHTKVKELARFKPMQRHLFLHEKAVLFCKKREENGEGYEKAPSYSYKQSLNMAAVGITENVKGDAKKFEIWYNAREEVYIVQAPTPEIKAAWVNEIRKVLTSQLQACREASQHRALEQSQSLPLPAPTSTSPSRGNSRNIKKLEERKTDPLSLEGYVSSAPLTKPPEKGKGWSKTSHSLEAPEDDGGWSSAEEQINSSDAEEDGGLGPKKLVPGKYTVVADHEKGGPDALRVRSGDVVELVQEGDEGLWYVRDPTTGKEGWVPASSLSVRLGPSGSAQCLSSSESSPGSAVLSNSSSCSEGGQAPFSDLQG

SEQ ID NO: 15029 - protein, 1020 aa, Artificial Sequence
  Synthetic polypeptide
NSKKHSLQDAGIGFILVIDRRRDKWTSVKASVLRIAASFPANLQLVLVLRPTGFFQRTLSDIAFKFNRDDFKMKVPVIMLSSVPDLHGYIDKSQLTEDLGGTLDYCHSRWLCQRTAIESFALMVKQTAQMLQSFGTELAETELPNDVQSTSSVLCAHTEKKDKAKEDLRLALKEGHSVLESLRELQAEGSEPSVNQDQLDNQATVQRLLAQLNETEAAFDEFWAKHQQKLEQCLQLRHFEQGFREVKAILDAASQKIATFTDIGNSLAHVEHLLRDLASFEEKSGVAVERARALSLDGEQLIGNKHYAVDSIRPKCQELRHLCDQFSAEIARRRGLLSKSLELHRRLETSMKWCDEGIYLLASQPVDKCQSQDGAEAALQEIEKFLETGAENKIQELNAIYKEYESILNQDLMEHVRKVFQKQASMEEVFHRRQASLKKLAARQTRPVQPVAPRPEALAKSPCPSPGIRRGSENSSSEGGALRRGPYRRAKSEMSESRQGRGSAGEEEESLAILRRHVMSELLDTERAYVEELLCVLEGYAAEMDNPLMAHLLSTGLHNKKDVLFGNMEEIYHFHNRIFLRELENYTDCPELVGRCFLERMEDFQIYEKYCQNKPRSESLWRQCSDCPFFQECQRKLDHKLSLDSYLLKPVQRITKYQLLLKEMLKYSRNCEGAEDLQEALSSILGILKAVNDSMHLIAITGYDGNLGDLGKLLMQGSFSVWTDHKRGHTKVKELARFKPMQRHLFLHEKAVLFCKKREENGEGYEKAPSYSYKQSLNMAAVGITENVKGDAKKFEIWYNAREEVYIVQAPTPEIKAAWVNEIRKVLTSQLQACREASQHRALEQSQSLPLPAPTSTSPSRGNSRNIKKLEERKTDPLSLEGYVSSAPLTKPPEKGKGWSKTSHSLEAPEDDGGWSSAEEQINSSDAEEDGGLGPKKLVPGKYTVVADHEKGGPDALRVRSGDVVELVQEGDEGLWYVRDPTTGKEGWVPASSLSVRLGPSGSAQCLSSSGKAHVPRAHP

SEQ ID NO: 15030 - protein, 206 aa, Artificial Sequence
  Synthetic polypeptide
NSKKHSLQDAGIGFILVIDRRRDKWTSVKASVLRIAASFPANLQLVLVLRPTGFFQRTLSDIAFKFNRDDFKMKVPVIMLSSVPDLHGYIDKSQLTEDLGGTLDYCHSRWLCQRTAIESFALMVKQTAQMLQSFGTELAETELPNDVQSTSSVLCAHTEKKDKAKVHGGCSGWKLWGAPVSQKLRGAPVGSCGGSFVPAGVCVSST

SEQ ID NO: 15031 - protein, 54 aa, Artificial Sequence
  Synthetic polypeptide
NSKKHSLQDAGIGFILVIDRRRDKWTSVKASVLRIALRARCTESEPLHPGGSGI

SEQ ID NO: 15032 - protein, 37 aa, Artificial Sequence
  Synthetic polypeptide
NSKKHSLQDAGIGFILVIDRRRDKWTSVKASVLRIAN

SEQ ID NO: 15033 - protein, 880 aa, Artificial Sequence
  Synthetic polypeptide
ARRGPFASWKLFNLKIEGNPVSGHSRGHPGGHLLSRVSRAERTRPVDPADVRPQSSQIHRDRKWGEAKNLPSYPGPSKMRDCYCTVNLDQEEVFRTKIVEKSLCPFYGEDFYCEIPRSFRHLSFYIFDRDVFRRDSIIGKVAIQKEDLQKYHNRDTWFQLQHVDADSEVQGKVHLELRLSEVITDTGVVCHKLATRIVECQGLPIVNGQCDPYATVTLAGPFRSEAKKTKVKRKTNNPQFDEVFYFEVTRPCSYSKKSHFDFEEEDVDKLEIRVDLWNASNLKFGDEFLGELRIPLKVLRQSSSYEAWYFLQPRDNGSKSLKPDDLGSLRLNVVYTEDHVFSSDYYSPLRDLLLKSADVEPVSASAAHILGEVCREKQEAAVPLVRLFLHYGRVVPFISAIASAEVKRTQDPNTIFRGNSLASKCIDETMKLAGMHYLHVTLKPAIEEICQSHKPCEIDPVKLKDGENLENNMENLRQYVDRVFHAITESGVSCPTVMCDIFFSLREAAAKRFQDDPDVRYTAVSSFIFLRFFAPAILSPNLFQLTPHHTDPQTSRTLTLISKTVQTLGSLSKSKSASFKESYMATFYEFFNEQKYADAVKNFLDLISSSGRRDPKSVEQPIVLKEGFMIKRAQGRKRFGMKNFKKRWFRLTNHEFTYHKSKGDQPLYSIPIENILAVEKLEEESFKMKNMFQVIQPERALYIQANNCVEAKDWIDILTKVSQCNQKRLTVYHPSAYLSGHWLCCRAPSDSAPGCSPCTGGLPANIQLDIDGDRETERIYSLFNLYMSKLEKMQEACGSKSVYDGPEQEEYSTFVIDDPQETYKTLKQVIAGVGALEQEHAQYKRDKFKKTKYGSQEHPIGDKSFQNYIRQQSETSTHSI

SEQ ID NO: 15034 - protein, 178 aa, Artificial Sequence
  Synthetic polypeptide
ARRGPFASWKLFNLKIEGNPVSGHSRGHPGGHLLSRVSRAERTRPVDPADVRPQSSQIHRDRKWGEAKNLPSYPGPSKMRDCYCTVNLDQEEVFRTKIVEKSLCPFYGEDFYCEIPRSFRHLSFYIFDRDVFRRDSIIGQSAPGAAAERGHHRHWGRLPQARHTHRRVPGPPHREWAM

SEQ ID NO: 15035 - protein, 27 aa, Artificial Sequence
  Synthetic polypeptide
GPRVVRSTETESGVKPKTFPLTRGRAR

SEQ ID NO: 15036 - protein, 9 aa, Artificial Sequence
  Synthetic polypeptide
SDPQRQKVG

SEQ ID NO: 15037 - protein, 47 aa, Artificial Sequence
  Synthetic polypeptide
LPKPVSSDLAVACSICPVRELIICSTCPILKRNVMKKNSAKKDNKKF

SEQ ID NO: 15038 - protein, 63 aa, Artificial Sequence
  Synthetic polypeptide
PCCGMLHLPCQRTYHLFYLSNSEKERYEKEFSQERQQEILRRAARALPIYTTSASKSLMQSTK

SEQ ID NO: 15039 - protein, 253 aa, Artificial Sequence
  Synthetic polypeptide
PCCGMLHLPCQRTYHLFYLSNSEKERYEKEFSQERQQEILRRAARALPIYTTSASKTIRYCEKCQLIKPDRAHHCSACDSCILKMDHHCPWVNNCVGFSNYKFFLLFLLYSLLYCLFVAATVLEYFIKFWTNELTDTRAKFHVLFLFFVSAMFFISVLSLFSYHCWLVGKNRTTIESFRAPTFSYGPDGNGFSLGCSKNWRQVFGDEKKYWLLPIFSSLGDGCSFPTRLVGMDPEQASVTNQNEYARRSKLQR

SEQ ID NO: 15040 - protein, 287 aa, Artificial Sequence
  Synthetic polypeptide
PCCGMLHLPCQRTYHLFYLSNSEKERYEKEFSQERQQEILRRAARALPIYTTSASKTIRYCEKCQLIKPDRAHHCSACDSCILKMDHHCPWVNNCVGFSNYKFFLLFLLYSLLYCLFVAATVLEYFIKFWTNELTDTRAKFHVLFLFFVSAMFFISVLSLFSYHCWLVGKNRTTIESFRAPTFSYGPDGNGFSLGCSKNWRQVFGDEKKYWLLPIFSSLGDGCSFPTRLVGMDPEQASVTNQNEYARSGSNQPFPIKPLSESKNRLLDSESQWLENGAEEGIVKSGV

SEQ ID NO: 15041 - protein, 298 aa, Artificial Sequence
  Synthetic polypeptide
PCCGMLHLPCQRTYHLFYLSNSEKERYEKEFSQERQQEILRRAARALPIYTTSASKTIRYCEKCQLIKPDRAHHCSACDSCILKMDHHCPWVNNCVGFSNYKFFLLFLLYSLLYCLFVAATVLEYFIKFWTNELTDTRAKFHVLFLFFVSAMFFISVLSLFSYHCWLVGKNRTTIESFRAPTFSYGPDGNGFSLGCSKNWRQVFGDEKKYWLLPIFSSLGDGCSFPTRLVGMDPEQASVTNQNEYARSSGSNQPFPIKPLSESKNRLLDSESQWLENGAEEGIVKSGTNNHVTVAIEN

SEQ ID NO: 15042 - protein, 288 aa, Artificial Sequence
  Synthetic polypeptide
PCCGMLHLPCQRTYHLFYLSNSEKERYEKEFSQERQQEILRRAARALPIYTTSASKTIRYCEKCQLIKPDRAHHCSACDSCILKMDHHCPWVNNCVGFSNYKFFLLFLLYSLLYCLFVAATVLEYFIKFWTNELTDTRAKFHVLFLFFVSAMFFISVLSLFSYHCWLVGKNRTTIESFRAPTFSYGPDGNGFSLGCSKNWRQVFGDEKKYWLLPIFSSLGDGCSFPTRLVGMDPEQASVTNQNEYARSSGSNQPFPIKPLSESKNRLLDSESQWLENGAEEGIVKSGV

SEQ ID NO: 15043 - protein, 43 aa, Artificial Sequence
  Synthetic polypeptide
TSPSFSSTPIRSSDCPSLYPVTLLWHAPFALSENLSSVLLVQF

SEQ ID NO: 15044 - protein, 77 aa, Artificial Sequence; identical to SEQ ID NO: 4031
  Synthetic polypeptide

SEQ ID NO: 15045 - protein, 33 aa, Artificial Sequence; identical to SEQ ID NO: 6282
  Synthetic polypeptide

SEQ ID NO: 15046 - protein, 205 aa, Artificial Sequence; identical to SEQ ID NO: 2852
  Synthetic polypeptide

SEQ ID NO: 15047 - protein, 1102 aa, Artificial Sequence
  Synthetic polypeptide
NSTRIGRDPRRDNTAKYSVLTFLPRFLYEQIRRAANAFFLFIALLQQIPDVSPTGRYTTLVPLIIILTIAGIKEIVEDFKRHKADNAVNKKKTIVLRNGMWHTIMWKEVAVGDIVKVVNGQYLPADVVLLSSSEPQAMCYVETANLDGETNLKIRQGLSHTADMQTREVLMKLSGTIECEGPNRHLYDFTGNLNLDGKSLVALGPDQILLRGTQLRNTQWVFGIVVYTGHDTKLMQNSTKAPLKRSNVEKVTNVQILVLFGILLVMALVSSAGALYWNRSHGEKNWYIKKMDTTSDNFGYNLLTFIILYNNLIPISLLVTLEVVKYTQALFINWDTDMYYIGNDTPAMARTSNLNEELGQVKYLFSDKTGTLTCNIMNFKKCSIAGVTYGHFPELAREPSSDDFCRMPPPCSDSCDFDDPRLLKNIEDRHPTAPCIQEFLTLLAVCHTVVPEKDGDNIIYQASSPDEAALVKGAKKLGFVFTARTPFSVIIEAMGQEQTFGILNVLEFSSDRKRMSVIVRTPSGRLRLYCKGADNVIFERLSKDSKYMEETLCHLEYFATEGLRTLCVAYADLSENEYEEWLKVYQEASTILKDRAQRLEECYEIIEKNLLLLGATAIEDRLQAGVPETIATLLKAEIKIWVLTGDKQETAINIGYSCRLVSQNMALILLKEDSLDATRAAITQHCTDLGNLLGKENDVALIIDGHTLKYALSFEVRRSFLDLALSCKAVICCRVSPLQKSEIVDVVKKRVKAITLAIGDGANDVGMIQTAHVGVGISGNEGMQATNNSDYAIAQFSYLEKLLLVHGAWSYNRVTKCILYCFYKNVVLYIIEIFTALPPFTLGIFERSCTQESMLRFPQLYKITQNGEGFNTKVFWGHCINALVHSLILFWFPMKALEHDTVLTSGHATDYLFVGNIVYTYVVVTVCLKAGLETTAWTKFSHLAVWGSMLTWLVFFGIYSTIWPTIPIAPDMRGQATMVLSSAHFWLGLFLVPTACLIEDVAWRAAKHTCKKTLLEEVQELETKSRVLGKAVLRDSNGKRLNERDRLIKRLGRKTPPTLFRGSSLQQGVPHGYAFSQEEHGAVSQEEVIRAYDTTKKKSRKK

SEQ ID NO: 15048 - protein, 1127 aa, Artificial Sequence
  Synthetic polypeptide
NSTRIGRDPRRDNTAKYSVLTFLPRFLYEQIRRAANAFFLFIALLQQIPDVSPTGRYTTLVPLIIILTIAGIKEIVEDFKRHKADNAVNKKKTIVLRNGMWHTIMWKEVAVGDIVKVVNGQYLPADVVLLSSSEPQAMCYVETANLDGETNLKIRQGLSHTADMQTREVLMKLSGTIECEGPNRHLYDFTGNLNLDGKSLVALGPDQILLRGTQLRNTQWVFGIVVYTGHDTKLMQNSTKAPLKRSNVEKVTNVQILVLFGILLVMALVSSAGALYWNRSHGEKNWYIKKMDTTSDNFGYNLLTFIILYNNLIPISLLVTLEVVKYTQALFINWDTDMYYIGNDTPAMARTSNLNEELGQVKYLFSDKTGTLTCNIMNFKKCSIAGVTYGHFPELAREPSSDDFCRMPPPCSDSCDFDDPRLLKNIEDRHPTAPCIQEFLTLLAVCHTVVPEKDGDNIIYQASSPDEAALVKGAKKLGFVFTARTPFSVIIEAMGQEQTFGILNVLEFSSDRKRMSVIVRTPSGRLRLYCKGADNVIFERLSKDSKYMEETLCHLEYFATEGLRTLCVAYADLSENEYEEWLKVYQEASTILKDRAQRLEECYEIIEKNLLLLGATAIEDRLQAGVPETIATLLKAEIKIWVLTGDKQETAINIGYSCRLVSQNMALILLKEDSLDATRAAITQHCTDLGNLLGKENDVALIIDGHTLKYALSFEVRRSFLDLALSCKAVICCRVSPLQKSEIVDVVKKRVKAITLAIGDGANDVGMIQTAHVGVGISGNEGMQATNNSDYAIAQFSYLEKLLLVHGAWSYNRVTKCILYCFYKNVVLYIIELWFAFVNGFSGQILFERWCIGLYNVIFTALPPFTLGIFERSCTQESMLRFPQLYKITQNGEGFNTKVFWGHCINALVHSLILFWFPMKALEHDTVLTSGHATDYLFVGNIVYTYVVVTVCLKAGLETTAWTKFSHLAVWGSMLTWLVFFGIYSTIWPTIPIAPDMRGQATMVLSSAHFWLGLFLVPTACLIEDVAWRAAKHTCKKTLLEEVQELETKSRVLGKAVLRDSNGKRLNERDRLIKRLGRKTPPTLFRGSSLQQGVPHGYAFSQEEHGAVSQEEVIRAYDTTKKKSRKK

SEQ ID NO: 15049 - protein, 16 aa, Artificial Sequence
  Synthetic polypeptide
QYGQVQRVDISTSILV

SEQ ID NO: 15050 - protein, 23 aa, Artificial Sequence
  Synthetic polypeptide
RQIKTQPELEETQDVTIRPSTAC

SEQ ID NO: 15051 - protein, 65 aa, Artificial Sequence; identical to SEQ ID NO: 4411
  Synthetic polypeptide

SEQ ID NO: 15052 - protein, 11 aa, Artificial Sequence
  Synthetic polypeptide
GHKGSHYSALH

SEQ ID NO: 15053 - protein, 108 aa, Artificial Sequence; identical to SEQ ID NO: 3522
  Synthetic polypeptide

SEQ ID NO: 15054 - protein, 468 aa, Artificial Sequence; identical to SEQ ID NO: 2097
  Synthetic polypeptide

SEQ ID NO: 15055 - protein, 493 aa, Artificial Sequence; identical to SEQ ID NO: 2058
  Synthetic polypeptide

SEQ ID NO: 15056 - protein, 2 aa, Artificial Sequence
  Synthetic polypeptide
HG

SEQ ID NO: 15057 - protein, 68 aa, Artificial Sequence
  Synthetic polypeptide
HHLIAWLNERDRLIKRLGRKTPPTLFRGSSLQQGVPHGYAFSQEEHGAVSQEEVIRAYDTTKKKSRKK

SEQ ID NO: 15058 - protein, 49 aa, Artificial Sequence
  Synthetic polypeptide
SSPYSMAERARPPDQEAGPEDAPDAVPGQLPAAGRPAWVCFFSRRTRSC

SEQ ID NO: 15059 - protein, 32 aa, Artificial Sequence
  Synthetic polypeptide
DGYAFSQEEHGAVSQEEVIRAYDTTKKKSRKK

SEQ ID NO: 15060 - protein, 49 aa, Artificial Sequence
  Synthetic polypeptide
GRTRWLTPVILELSEAEMGMLFLKKNTELLVRKKSSVLMTPPKRNPGRN

SEQ ID NO: 15061 - protein, 18 aa, Artificial Sequence
  Synthetic polypeptide
NFRRLRWVCFFSRRTRSC

SEQ ID NO: 15062 - protein, 27 aa, Artificial Sequence
  Synthetic polypeptide
LCFIIGQLTAKPQTSSSSITRTHLLLR

SEQ ID NO: 15063 - protein, 1175 aa, Artificial Sequence
  Synthetic polypeptide
LLNLRLLAALSQEPIFYFGDVEYSVDESAGYVEVQVWRTGTDLSKSSSVTVRSRKTDPPSADAGTDYVGISRNLDFAPGVNMQPVRVVILDDLGQPALEGIEKFELVLRMPMNAALGEPSKATVSINDSVSDLPKMQFKERIYTGSESDGQIVTMIHRTGDVQYRSSVRCYTRQGSAQVMMDFEERPNTDTSIITFLPGETEKPCILELMDDVLYEEVEELRLVLGTPQSNSPFGAAVGEQNETLIRIRDDADKTVIKFGETKFSVTEPKEPGESVVIRIPVIRQGDTSKVSIVRVHTKDGSATSGEDYHPVSEEIEFKEGETQHVVEIEVTFDGVREMREAFTVHLKPDENMIAEMQLTKAIVYIEEMSSMADVTFPSVPQIVSLLMYDDTSKAKESAEPMSGYPVICITACNPKYSDYDKTGSICASENINDTLTRYRWLISAPAGPDGVTSPMREVDFDTFFTSSKMVTLDSIYFQPGSRVQCAARAVNTNGDEGLELMSPIVTISREEGLCQPRVPGVVGAEPFSAKLRYTGPEDADYTNLIKLTVTMPHIDGMLPVISTRELSNFELTLSPDGTRVGNHKCSNLLDYTEVKTHYGFLTDATKNPEIIGETYPYQYSLSIRGSTTLRFYRNLNLEACLWEFVSYYDMSELLADCGGTIGTDGQVLNLVQSYVTLRVPLYVSYVFHSPVGVGGWQHFDLKSELRLTFVYDTAILWNDGIGSPPEAELQGSLYPTSMRIGDEGRLAVHFKTEAQFHGLFVLSHPASFTSSVIMSADHPGLTFSLRLIRSEPTYNQPVQQWSFVSDFAVRDYSGTYTVKLVPCTAPSHQEYRLPVTCNPREPVTFDLDIRFQQVSDPVAAEFSLNTQMYLLSKKSLWLSDGSMGFGQESDVAFAEGDIIYGRVMVDPVQNLGDSFYCSIEKVFLCTGADGYVPKYSPMNAEYGCLADSPSLLYRFKIVDKAQPETQATSFGNVLFNAKLAVDDPEAILLVNQPGSDGFKVDSTPLFQVALGREWYIHTIYTVRSKDNANRGIGKRSVEYHSLVSQGKPQSTTKSRKKREIRSTPSLAWEIGAENSRGTNIQHIALDRTKRQIPHGRAPPDGILPWELNSPSSAVSLVTVVGGTTVGLLTICLTVIAVLMCRGKESFRGKDAPKGSSSSEPMVPPQSHHNDSSEV

SEQ ID NO: 15064 - protein, 43 aa, Artificial Sequence
  Synthetic polypeptide
QLYHKNPSFTSVMWNTLWMRVLAMWKCRCGERALTCPSLLVSQ

SEQ ID NO: 15065 - protein, 10 aa, Artificial Sequence
  Synthetic polypeptide
FLHFHLRCQQ

SEQ ID NO: 15066 - protein, 53 aa, Artificial Sequence
  Synthetic polypeptide
GRSQDGRIGIAPVYSSQHEQRRRRVISAFPSEVSTINGLVYVAGSCFPSLSCW

SEQ ID NO: 15067 - protein, 274 aa, Artificial Sequence
  Synthetic polypeptide
GVNNKRLGVCGWILFSLSFLLVIITFPISIWMCLKIIKEYERAVVFRLGRIQADKAKGPGLILVLPCIDVFVKVDLRTVTCNIPPQEILTRDSVTTQVDGVVYYRIYSAVSAVANVNDVHQATFLLAQTTLRNVLGTQTLSQILAGREEIAHSIQTLLDDATELWGIRVARVEIKDVRIPVQLQRSMAAEAEATREARAKVLAAEGEMNASKSLKSASMVLAESPIALQLRYLQTLSTVATEKNSTIVFPLPMNILEGIGGVSYDNHKKLPNKA

SEQ ID NO: 15068 - protein, 27 aa, Artificial Sequence
  Synthetic polypeptide
EFTNNISDKGLVSRTYKEPLKFNNKKV

SEQ ID NO: 15069 - protein, 443 aa, Artificial Sequence
  Synthetic polypeptide
KGLRAGLAASIAGSSIINKMLLANIDPFGATPFIDPDLDSVDGYSEKCVMNNYFGIGLDAKISLEFNNKREEHPEKCRSRTKNLMWYGVLGTRELLQRSYKNLEQRVQLECDGQYIPLPSLQGIAVLNIPSYAGGTNFWGGTKEDDIFAAPSFDDKILEVVAIFDSMQMAVSRVIKLQHHRIAQCRTVKITIFGDEGVPVQVDGEAWVQPPGIIKIVHKNRAQMLTRDRAFESTLKSWEDKQKCDSGKPVLRTHLYIHHAIDLATEEVSQMQLCSQAAEELITRICDAATIHCLLEQELAHAVNACSHALNKANPRCPESLTRDTATEIAINVKALYNETESLLVGRVPLQLESPHEERVSNALHSVEVELQKLTEIPWLYYILHPNEDEEPPMDCTKRNNRSTVFRIVPKFKKEKVQKQKTSSQPGSGDTESGSCEANSPGN

SEQ ID NO: 15070 - protein, 499 aa, Artificial Sequence
  Synthetic polypeptide
KGLRAGLAASIAGSSIINKMLLANIDPFGATPFIDPDLDSVDGYSEKCVMNNYFGIGLDAKISLEFNNKREEHPEKCRSRTKNLMWYGVLGTRELLQRSYKNLEQRVQLECDGQYIPLPSLQGIAVLNIPSYAGGTNFWGGTKEDDIFAAPSFDDKILEVVAIFDSMQMAVSRVIKLQHHRIAQCRTVKITIFGDEGVPVQVDGEAWVQPPGIIKIVHKNRAQMLTRDRAFESTLKSWEDKQKCDSGKPVLRTHLYIHHAIDLATEEVSQMQLCSQAAEELITRICDAATIHCLLEQELAHAVNACSHALNKANPRCPESLTRDTATEIAINVKALYNETESLLVGRVPLQLESPHEERVSNALHSVEVELQKLTEIPWLYYILHPNEDEEPPMDCTKRNNRSTVFRIVPKFKKEKVQKQKTSSQPVQKWGTEEVAAWLDLLNLGEYKDIFIRHDIRGAELLHLERRDLKDLGIPKVGHVKRILQGIKELGRSTPQSEV

SEQ ID NO: 15071 - protein, 515 aa, Artificial Sequence
  Synthetic polypeptide
KGLRAGLAASIAGSSIINKMLLANIDPFGATPFIDPDLDSVDGYSEKCVMNNYFGIGLDAKISLEFNNKREEHPEKCRSRTKNLMWYGVLGTRELLQRSYKNLEQRVQLECDGQYIPLPSLQGIAVLNIPSYAGGTNFWGGTKEDDIFAAPSFDDKILEVVAIFDSMQMAVSRVIKLQHHRIAQCRTVKITIFGDEGVPVQVDGEAWVQPPGIIKIVHKNRAQMLTRDRAFESTLKSWEDKQKCDSGKPVLRTHLYIHHAIDLATEEVSQMQLCSQAAEELITRICDAATIHCLLEQELAHAVNACSHALNKANPRCPESLTRDTATEIAINVKALYNETESLLVGRVPLQLESPHEERVSNALHSVEVELQKLTEIPWLYYILHPNEDEEPPMDCTKRNNRSTVFRIVPKFKKEKVQKQKTSSQPVQKWGTEEVAAWLDLLNLGEYKDIFIRHDIRGAELLHLERRDLKNTVGEKRDTKENGKHMDLGIPKVGHVKRILQGIKELGRSTPQSEV

SEQ ID NO: 15072 - protein, 29 aa, Artificial Sequence
  Synthetic polypeptide
NSTIKRFKSRTGCLNCWEFDYQQNVTGKH

SEQ ID NO: 15073 - protein, 8 aa, Artificial Sequence
  Synthetic polypeptide
EQQVPDGS

SEQ ID NO: 15074 - protein, 267 aa, Artificial Sequence
  Synthetic polypeptide
KALHVSAGLSCAPASCHENSKSQMDPNRISEDGTHCIYRILRLHENADFQDTTLESQDTKLIPDSCRRIKQAFQGAVQKELQHIVGSQHIRAEKAMVDGSWLDLAKRSKLEAQPFAHLTINATDIPSGSHKVSLSSWYHDRGWAKISNMTFSNGKLIVNQDGFYYLYANICFRHHETSGDLATEYLQLMVYVTKTSIKIPSSHTLMKGGSTKYWSGNSEFHFYSINVGGFFKLRSGEEISIEVSNPSLLDPDQDATYFGAFKVRDID

SEQ ID NO: 15075 - protein, 60 aa, Artificial Sequence
  Synthetic polypeptide
LVLTDRGWAYVNANSDRGFKRLCMFLQVSLVLLPPAMRTASPRWILIEYQKMALTAFIEF

SEQ ID NO: 15076 - protein, 109 aa, Artificial Sequence
  Synthetic polypeptide
SLNNMGWSCLGSLICEFSPRCATSKAARTIISLPPQVIQWEDDEDGDLCDDSLSLNEHCFPISPAPWMTVGPASALFPCQTPPFPWTEWNAWNSQLMFFLRSLRKNFPK

SEQ ID NO: 15077 - protein, 443 aa, Artificial Sequence
  Synthetic polypeptide
TLFSNFTGSVDDRGTCQCSVSLPDTTFPVDRVERLEFTAHVLSQKFEKELSKVREYVQLISVYEKKLLNLTVRIDIMEKDTISYTELDFELIKVEVKEMEKLVIQLKESFGGSSEIVDQLEVEIRNMTLLVEKLETLDKNNVLAIRREIVALKTKLKECEASKDQNTPVVHPPPTPGSCGHGGVVNISKPSVVQLNWRGFSYLYGAWGRDYSPQHPNKGLYWVAPLNTDGRLLEYYRLYNTLDDLLLYINARELRITYGQGSGTAVYNNNMYVNMYNTGNIARVNLTTNTIAVTQTLPNAAYNNRFSYANVAWQDIDFAVDENGLWVIYSTEASTGNMVISKLNDTTLQVLNTWYTKQYKPSASNAFMVCGVLYATRTMNTRTEEIFYYYDTNTGKEGKLDIVMHKMQEKVQSINYNPFDQKLYVYNDGYLLNYDLSVLQKPQ

SEQ ID NO: 15078 - protein, 65 aa, Artificial Sequence
  Synthetic polypeptide
TTWVGAAWVHLYVNFLPAVPPPRQQEQLFLFLLRLFNGKMMRMEIFVMIHFHLMNIVFQFHRLRG

SEQ ID NO: 15079 - protein, 17 aa, Artificial Sequence
  Synthetic polypeptide
EIETILANKMGLWVPED

SEQ ID NO: 15080 - protein, 125 aa, Artificial Sequence
  Synthetic polypeptide
QDGPLGPRGLAEATEMCTQECLVLGHSDNCWMPPGLGPYQHPKSPLSTFAPQKEWVKKDKLVNGHTLTRAWKEDSNRNQFNDRKQYGSNEGHFNNGSHMTDIPLANLKSYKQAGGATESPKEHQL

SEQ ID NO: 15081 - protein, 18 aa, Artificial Sequence
  Synthetic polypeptide
RSRPSWLTRWAFGSPRIS

SEQ ID NO: 15082 - protein, 94 aa, Artificial Sequence
  Synthetic polypeptide
ACPVEHSGGGLWPARATWILRALPGRHLPRWDALPEQCVAGPRGGSTQWLNTGKELVLGVWTSETCCWQRTGHLELRCVSWCLSYRKPLWESLC

SEQ ID NO: 15083 - protein, 277 aa, Artificial Sequence
  Synthetic polypeptide
NLLLAEDWPFGAEMCKLVPFIQKASVGITVLSLCALSIDRYRAVASWSRIKGIGVPKWTAVEIVLIWVVSVVLAVPEAIGFDIITMDYKGSYLRICLLHPVQKTAFMQFYKTAKDWWLFSFYFCLPLAITAFFYTLMTCEMLRKKSGMQIALNDHLKQRREVAKTVFCLVLVFALCWLPLHLSRILKLTLYNQNDPNRCELLSFLLVLDYIGINMASLNSCINPIALYLVSKRFKNCFKAGPHVGNKLVMLFSVNIECDGTVNQNPTMWPERKSNNN

SEQ ID NO: 15084 - protein, 283 aa, Artificial Sequence
  Synthetic polypeptide
NLLLAEDWPFGAEMCKLVPFIQKASVGITVLSLCALSIDRYRAVASWSRIKGIGVPKWTAVEIVLIWVVSVVLAVPEAIGFDIITMDYKGSYLRICLLHPVQKTAFMQFYKTAKDWWLFSFYFCLPLAITAFFYTLMTCEMLRKKSGMQIALNDHLKQRREVAKTVFCLVLVFALCWLPLHLSRILKLTLYNQNDPNRCELLSFLLVLDYIGINMASLNSCINPIALYLVSKRFKNCFKSCLCCWCQSFEEKQSLEEKQSCLKFKANDHGYDNFRSSNKYSSS

SEQ ID NO: 15085 - protein, 25 aa, Artificial Sequence
  Synthetic polypeptide
TLGRNWYLESGHLKLAAGRGLAIWS

SEQ ID NO: 15086 - protein, 144 aa, Artificial Sequence
  Synthetic polypeptide
ACPVEHSGGGLWPARATWILRALPGRHLPRWDALPEQCVAGPRGGSTQWLNTGKELVLGVWTSETCRDPEQTVEATLSGILAAFRQSRTRLQLKGGVLLSQSRLEPSWVPPPGKVVSIRRSASGLSDPRGSETAERPPDAFWSR

SEQ ID NO: 15087 - protein, 67 aa, Artificial Sequence
  Synthetic polypeptide
NLQRPRANGGGYTVWHSRSVSSEPDPPAAQGRRAPLPEQAGTQLGSASREGGLHSSLCIWFVRSERL

SEQ ID NO: 15088 - protein, 538 aa, Artificial Sequence
  Synthetic polypeptide
TLGRNWYLESGHLKLAETPSKRWRLHCLAFSQRFVRAGPACSSREACSSPRAGWNPAGFRLPGRWSPFVALHLVCQIREALKLRSGHRTPSGAGSSMQPPPSLCGRALVALVLACGLSRIWGEERGFPPDRATPLLQTAEIMTPPTKTLWPKGSNASLARSLAPAEVPKGDRTAGSPPRTISPPPCQGPIEIKETFKYINTVVSCLVFVLGIIGNSTLLRIIYKNKCMRNGPNILIASLALGDLLHIVIDIPINVYKLLAEDWPFGAEMCKLVPFIQKASVGITVLSLCALSIDRYRAVASWSRIKGIGVPKWTAVEIVLIWVVSVVLAVPEAIGFDIITMDYKGSYLRICLLHPVQKTAFMQFYKTAKDWWLFSFYFCLPLAITAFFYTLMTCEMLRKKSGMQIALNDHLKQRREVAKTVFCLVLVFALCWLPLHLSRILKLTLYNQNDPNRCELLSFLLVLDYIGINMASLNSCINPIALYLVSKRFKNCFKSCLCCWCQSFEEKQSLEEKQSCLKFKANDHGYDNFRSSNKYSSS

SEQ ID NO: 15089 - protein, 71 aa, Artificial Sequence
  Synthetic polypeptide
GTQGIGACEKSGKLVINFLQVVEELPCQEKFDSLCMVVRAESAATIGCSRKARFGLMKNFKSFLQRHWTLG

SEQ ID NO: 15090 - protein, 37 aa, Artificial Sequence
  Synthetic polypeptide
RAALSREIRFTLYGCKGRISSNDWMFPEGKIRFNEEF

SEQ ID NO: 15091 - protein, 19 aa, Artificial Sequence
  Synthetic polypeptide
AMIMPLHPSLSDKVAQSLV

SEQ ID NO: 15092 - protein, 15 aa, Artificial Sequence
  Synthetic polypeptide
QSGSIPCLKLAINGD

SEQ ID NO: 15093 - protein, 762 aa, Artificial Sequence
  Synthetic polypeptide
VTKWLNPLFKIGHKRRLEEDDMYSVLPEDRSQHLGEELQGFWDKEVLRAENDAQKPSLTRAIIKCYWKSYLVLGIFTLIEALRLSNMAMGKTTTGQIVNLLSNDVNKFDQVTVFLHFLWAGPLQAIAVTALLWMEIGISCLAGMAVLIILLPLQSCFGKLFSSLRSKTATFTDARIRTMNEVITGIRIIKMYAWEKSFSNLITNLRKKEISKILRSSCLRGMNLASFFSASKIIVFVTFTTYVLLGSVITASRVFVAVTLYGAVRLTVTLFFPSAIERVSEAIVSIRRIQTFLLLDEISQRNRQLPSDGKKMVHVQDFTAFWDKASETPTLQGLSFTVRPGELLAVVGPVGAGKSSLLSAVLGELAPSHGLVSVHGRIAYVSQQPWVFSGTLRSNILFGKKYEKERYEKVIKACALKKDLQLLEDGDLTVIGDRGTTLSGGQKARVNLARAVYQDADIYLLDDPLSAVDAEVSRHLFELCICQILHEKITILVTHQLQYLKAASQILILKDGKMVQKGTYTEFLKSGIDFGSLLKKDNEESEQPPVPGTPTLRNRTFSESSVWSQQSSRPSLKDGALESQDTENVPVTLSEENRSEGKVGFQAYKNYFRAGAHWIVFIFLILLNTAAQVAYVLQDWWLSYWANKQSMLNVTVNGGGNVTEKLDLNWYLGIYSGLTVATVLFGIARSLLVFYVLVNSSQTLHNKMFESILKAPVLFFDRNPIGRILNRFSKDIGHLDDLLPLTFLDFIQRWDLAVLSWLVSNS

SEQ ID NO: 15094 - protein, 837 aa, Artificial Sequence
  Synthetic polypeptide
VTKWLNPLFKIGHKRRLEEDDMYSVLPEDRSQHLGEELQGFWDKEVLRAENDAQKPSLTRAIIKCYWKSYLVLGIFTLIEESAKVIQPIFLGKIINYFENYDPMDSVALNTAYAYATVLTFCTLILAILHHLYFYHVQCAGMRLRVAMCHMIYRKALRLSNMAMGKTTTGQIVNLLSNDVNKFDQVTVFLHFLWAGPLQAIAVTALLWMEIGISCLAGMAVLIILLPLQSCFGKLFSSLRSKTATFTDARIRTMNEVITGIRIIKMYAWEKSFSNLITNLRKKEISKILRSSCLRGMNLASFFSASKIIVFVTFTTYVLLGSVITASRVFVAVTLYGAVRLTVTLFFPSAIERVSEAIVSIRRIQTFLLLDEISQRNRQLPSDGKKMVHVQDFTAFWDKASETPTLQGLSFTVRPGELLAVVGPVGAGKSSLLSAVLGELAPSHGLVSVHGRIAYVSQQPWVFSGTLRSNILFGKKYEKERYEKVIKACALKKDLQLLEDGDLTVIGDRGTTLSGGQKARVNLARAVYQDADIYLLDDPLSAVDAEVSRHLFELCICQILHEKITILVTHQLQYLKAASQILILKDGKMVQKGTYTEFLKSGIDFGSLLKKDNEESEQPPVPGTPTLRNRTFSESSVWSQQSSRPSLKDGALESQDTENVPVTLSEENRSEGKVGFQAYKNYFRAGAHWIVFIFLILLNTAAQVAYVLQDWWLSYWANKQSMLNVTVNGGGNVTEKLDLNWYLGIYSGLTVATVLFGIARSLLVFYVLVNSSQTLHNKMFESILKAPVLFFDRNPIGRILNRFSKDIGHLDDLLPLTFLDFIQRWDLAVLSWLVSNS

SEQ ID NO: 15095 - protein, 1303 aa, Artificial Sequence
  Synthetic polypeptide
VTKWLNPLFKIGHKRRLEEDDMYSVLPEDRSQHLGEELQGFWDKEVLRAENDAQKPSLTRAIIKCYWKSYLVLGIFTLIEESAKVIQPIFLGKIINYFENYDPMDSVALNTAYAYATVLTFCTLILAILHHLYFYHVQCAGMRLRVAMCHMIYRKALRLSNMAMGKTTTGQIVNLLSNDVNKFDQVTVFLHFLWAGPLQAIAVTALLWMEIGISCLAGMAVLIILLPLQSCFGKLFSSLRSKTATFTDARIRTMNEVITGIRIIKMYAWEKSFSNLITNLRKKEISKILRSSCLRGMNLASFFSASKIIVFVTFTTYVLLGSVITASRVFVAVTLYGAVRLTVTLFFPSAIERVSEAIVSIRRIQTFLLLDEISQRNRQLPSDGKKMVHVQDFTAFWDKASETPTLQGLSFTVRPGELLAVVGPVGAGKSSLLSAVLGELAPSHGLVSVHGRIAYVSQQPWVFSGTLRSNILFGKKYEKERYEKVIKACALKKDLQLLEDGDLTVIGDRGTTLSGGQKARVNLARAVYQDADIYLLDDPLSAVDAEVSRHLFELCICQILHEKITILVTHQLQYLKAASQILILKDGKMVQKGTYTEFLKSGIDFGSLLKKDNEESEQPPVPGTPTLRNRTFSESSVWSQQSSRPSLKDGALESQDTENVPVTLSEENRSEGKVGFQAYKNYFRAGAHWIVFIFLILLNTAAQVAYVLQDWWLSYWANKQSMLNVTVNGGGNVTEKLDLNWYLGIYSGLTVATVLFGIARSLLVFYVLVNSSQTLHNKMFESILKAPVLFFDRNPIGRILNRFSKDIGHLDDLLPLTFLDFIQTLLQVVGVVSVAVAVIPWIAIPLVPLGIIFIFLRRYFLETSRDVKRLESTTRSPVFSHLSSSLQGLWTIRAYKAEERCQELFDAHQDLHSEAWFLFLTTSRWFAVRLDAICAMFVIIVAFGSLILAKTLDAGQVGLALSYALTLMGMFQWCVRQSAEVENMMISVERVIEYTDLEKEAPWEYQKRPPPAWPHEGVIIFDNVNFMYSPGGPLVLKHLTALIKSQEKVGIVGRTGAGKSSLISALFRLSEPEGKIWIDKILTTEIGLHDLRKKMSIIPQEPVLFTGTMRKNLDPFNEHTDEELWNALQEVQLKETIEDLPGKMDTELAESGSNFSVGQRQLVCLARAILRKNQILIIDEATANVDPRTDELIQKKIREKFAHCTVLTIAHRLNTIIDSDKIMVLDSGRLKEYDEPYVLLQNKESLFYKMVQQLGKAEAAALTETAKQVYFKRNYPHIGHTDHMVTNTSNGQPSTLTIFETAL

SEQ ID NO: 15096 - protein, 1256 aa, Artificial Sequence
  Synthetic polypeptide
VTKWLNPLFKIGHKRRLEEDDMYSVLPEDRSQHLGEELQGFWDKEVLRAENDAQKPSLTRAIIKCYWKSYLVLGIFTLIEESAKVIQPIFLGKIINYFENYDPMDSVALNTAYAYATVLTFCTLILAILHHLYFYHVQCAGMRLRVAMCHMIYRKALRLSNMAMGKTTTGQIVNLLSNDVNKFDQVTVFLHFLWAGPLQAIAVTALLWMEIGISCLAGMAVLIILLPLQSCFGKLFSSLRSKTATFTDARIRTMNEVITGIRIIKMYAWEKSFSNLITNLRKKEISKILRSSCLRGMNLASFFSASKIIVFVTFTTYVLLGSVITASRVFVAVTLYGAVRLTVTLFFPSAIERVSEAIVSIRRIQTFLLLDEISQRNRQLPSDGKKMVHVQDFTAFWDKASETPTLQGLSFTVRPGELLAVVGPVGAGKSSLLSAVLGELAPSHGLVSVHGRIAYVSQQPWVFSGTLRSNILFGKKYEKERYEKVIKACALKKDLQLLEDGDLTVIGDRGTTLSGGQKARVNLARAVYQDADIYLLDDPLSAVDAEVSRHLFELCICQILHEKITILVTHQLQYLKAASQILILKDGKMVQKGTYTEFLKSGIDFGSLLKKDNEESEQPPVPGTPTLRNRTFSESSVWSQQSSRPSLKDGALESQDVAYVLQDWWLSYWANKQSMLNVTVNGGGNVTEKLDLNWYLGIYSGLTVATVLFGIARSLLVFYVLVNSSQTLHNKMFESILKAPVLFFDRNPIGRILNRFSKDIGHLDDLLPLTFLDFIQTLLQVVGVVSVAVAVIPWIAIPLVPLGIIFIFLRRYFLETSRDVKRLESTTRSPVFSHLSSSLQGLWTIRAYKAEERCQELFDAHQDLHSEAWFLFLTTSRWFAVRLDAICAMFVIIVAFGSLILAKTLDAGQVGLALSYALTLMGMFQWCVRQSAEVENMMISVERVIEYTDLEKEAPWEYQKRPPPAWPHEGVIIFDNVNFMYSPGGPLVLKHLTALIKSQEKVGIVGRTGAGKSSLISALFRLSEPEGKIWIDKILTTEIGLHDLRKKMSIIPQEPVLFTGTMRKNLDPFNEHTDEELWNALQEVQLKETIEDLPGKMDTELAESGSNFSVGQRQLVCLARAILRKNQILIIDEATANVDPRTDELIQKKIREKFAHCTVLTIAHRLNTIIDSDKIMVLDSGRLKEYDEPYVLLQNKESLFYKMVQQLGKAEAAALTETAKQVYFKRNYPHIGHTDHMVTNTSNGQPSTLTIFETAL

SEQ ID NO: 15097 - protein, 11 aa, Artificial Sequence
  Synthetic polypeptide
ICNTLRLYTGM

SEQ ID NO: 15098 - protein, 175 aa, Artificial Sequence
  Synthetic polypeptide
RGSVSTPHPRLNESESATPSGYIQACRGLMIAAVSLGFFGSIFALFGMKCTKVGGSDKAKAKIACLAGIVFILSGLCSMTGCSLYANKITTEFFDPLFVEQKYELGAALFIGWAGASLCIIGGVIFCFSISDNNKTPRYTYNGATSVMSSRTKYHGGEDFKTTNPSKQFDKNAYV

SEQ ID NO: 15099 - protein, 18 aa, Artificial Sequence
  Synthetic polypeptide
TNLNLQHPQVIYRHVEDL

SEQ ID NO: 15100 - protein, 163 aa, Artificial Sequence
  Synthetic polypeptide
GSGSQGQEIETILANTVVVSNRLVTSPCCIVTSTYGWTANMERIMKAQALRDNSTMGYMAAKKHLEINPDHSIIETLRQKAEADKNDKSVKDLVILLYETALLSSGFSLEDPQTHANRIYRMIKLGLGIDEDDPTADDTSAAVTEEMPPLEGDDDTSRMEEVD

SEQ ID NO: 15101 - protein, 40 aa, Artificial Sequence
  Synthetic polypeptide
GWARWLTPAIPALWEAEAADHKVRRSRPSWLTRWLCQTDW

SEQ ID NO: 15102 - protein, 54 aa, Artificial Sequence
  Synthetic polypeptide
HGGCVKPIGDISMLYCHKHIWLDSKHGENHESSSPKRQLNNGLHGSKETPGDKP

SEQ ID NO: 15103 - protein, 29 aa, Artificial Sequence
  Synthetic polypeptide
AGRGGSRLQSQHFGRLRQRITRWLCQTDW

SEQ ID NO: 15104 - protein, 58 aa, Artificial Sequence
  Synthetic polypeptide
GSGSQGGCVKPIGDISMLYCHKHIWLDSKHGENHESSSPKRQLNNGLHGSKETPGDKP

SEQ ID NO: 15105 - protein, 169 aa, Artificial Sequence
  Synthetic polypeptide
GWARWLTPAIPALWEAEAADHKVVVSNRLVTSPCCIVTSTYGWTANMERIMKAQALRDNSTMGYMAAKKHLEINPDHSIIETLRQKAEADKNDKSVKDLVILLYETALLSSGFSLEDPQTHANRIYRMIKLGLGIDEDDPTADDTSAAVTEEMPPLEGDDDTSRMEEVD

SEQ ID NO: 15106 - protein, 3 aa, Artificial Sequence
  Synthetic polypeptide
HDA

SEQ ID NO: 15107 - protein, 40 aa, Artificial Sequence
  Synthetic polypeptide
SQEIETILANMMPEETQTQDQPMEEEEVETFAFQAEIAQL

SEQ ID NO: 15108 - protein, 185 aa, Artificial Sequence
  Synthetic polypeptide
SQEIETILANMMPEETQTQDQPMEEEEVETFAFQAEIAQLMSLIINTFYSNKEIFLRELISNSSDALDKIRYESLTDPSKLDSGKELHINLIPNKQDRTLTIVDTGIGMTKADLINNLGEPMGRGTKVILHLKEDQTEYLEERRIKEIVKKHSQFIGYPITLFVEKERDKEVSDDEAEEKEDKEE

SEQ ID NO: 15109 - protein, 743 aa, Artificial Sequence
  Synthetic polypeptide
SQEIETILANMMPEETQTQDQPMEEEEVETFAFQAEIAQLMSLIINTFYSNKEIFLRELISNSSDALDKIRYESLTDPSKLDSGKELHINLIPNKQDRTLTIVDTGIGMTKADLINNLGTIAKSGTKAFMEALQAGADISMIGQFGVGFYSAYLVAEKVTVITKHNDDEQYAWESSAGGSFTVRTDTGEPMGRGTKVILHLKEDQTEYLEERRIKEIVKKHSQFIGYPITLFVEKERDKEVSDDEAEEKEDKEEEKEKEEKESEDKPEIEDVGSDEEEEKKDGDKKKKKKIKEKYIDQEELNKTKPIWTRNPDDITNEEYGEFYKSLTNDWEDHLAVKHFSVEGQLEFRALLFVPRRAPFDLFENRKKKNNIKLYVRRVFIMDNCEELIPEYLNFIRGVVDSEDLPLNISREMLQQSKILKVIRKNLVKKCLELFTELAEDKENYKKFYEQFSKNIKLGIHEDSQNRKKLSELLRYYTSASGDEMVSLKDYCTRMKENQKHIYYITGETKDQVANSAFVERLRKHGLEVIYMIEPIDEYCVQQLKEFEGKTLVSVTKEGLELPEDEEEKKKQEEKKTKFENLCKIMKDILEKKVEKVVVSNRLVTSPCCIVTSTYGWTANMERIMKAQALRDNSTMGYMAAKKHLEINPDHSIIETLRQKAEADKNDKSVKDLVILLYETALLSSGFSLEDPQTHANRIYRMIKLGLGIDEDDPTADDTSAAVTEEMPPLEGDDDTSRMEEVD

SEQ ID NO: 15110 - protein, 22 aa, Artificial Sequence
  Synthetic polypeptide
GWAQWLTPVILALWEAEAEEED

SEQ ID NO: 15111 - protein, 323 aa, Artificial Sequence
  Synthetic polypeptide
HFGRQKRKKKIKEKYIDQEELNKTKPIWTRNPDDITNEEYGEFYKSLTNDWEDHLAVKHFSVEGQLEFRALLFVPRRAPFDLFENRKKKNNIKLYVRRVFIMDNCEELIPEYLNFIRGVVDSEDLPLNISREMLQQSKILKVIRKNLVKKCLELFTELAEDKENYKKFYEQFSKNIKLGIHEDSQNRKKLSELLRYYTSASGDEMVSLKDYCTRMKENQKHIYYITGETKDQVANSAFVERLRKHGLEVIYMIEPIDEYCVQQLKEFEGKTLVSVTKEGLELPEDEEEKKKQEEKKTKFENLCKIMKDILEKKVEKVCEYSIS

SEQ ID NO: 15112 - protein, 463 aa, Artificial Sequence
  Synthetic polypeptide
HFGRQKRKKKIKEKYIDQEELNKTKPIWTRNPDDITNEEYGEFYKSLTNDWEDHLAVKHFSVEGQLEFRALLFVPRRAPFDLFENRKKKNNIKLYVRRVFIMDNCEELIPEYLNFIRGVVDSEDLPLNISREMLQQSKILKVIRKNLVKKCLELFTELAEDKENYKKFYEQFSKNIKLGIHEDSQNRKKLSELLRYYTSASGDEMVSLKDYCTRMKENQKHIYYITGETKDQVANSAFVERLRKHGLEVIYMIEPIDEYCVQQLKEFEGKTLVSVTKEGLELPEDEEEKKKQEEKKTKFENLCKIMKDILEKKVEKVVVSNRLVTSPCCIVTSTYGWTANMERIMKAQALRDNSTMGYMAAKKHLEINPDHSIIETLRQKAEADKNDKSVKDLVILLYETALLSSGFSLEDPQTHANRIYRMIKLGLGIDEDDPTADDTSAAVTEEMPPLEGDDDTSRMEEVD

SEQ ID NO: 15113 - protein, 57 aa, Artificial Sequence
  Synthetic polypeptide
MGAVAHACNPSTLGGRSGRRRLRKSTSIKKSSTKQSPSGPEIPTILLMRSTENSIRA

SEQ ID NO: 15114 - protein, 36 aa, Artificial Sequence
  Synthetic polypeptide
GQALWLTRVILAHWEAEAGGSPGVRSSRPAWPTWLQ

SEQ ID NO: 15115 - protein, 28 aa, Artificial Sequence
  Synthetic polypeptide
HIGRPRQVDHLGSGVRDQPGQHGCNKNN

SEQ ID NO: 15116 - protein, 728 aa, Artificial Sequence
  Synthetic polypeptide
PGAVAHTCNPSTLGGRGRWITWGQEFETSLANMVAIKIIDKTQLNPTSLQKLFREVRIMKILNHPNIVKLFEVIETEKTLYLIMEYASGGEVFDYLVAHGRMKEKEARSKFRQGCQAGQTIKVQVSFDLLSLMFTFIVSAVQYCHQKRIVHRDLKAENLLLDADMNIKIADFGFSNEFTVGGKLDTFCGSPPYAAPELFQGKKYDGPEVDVWSLGVILYTLVSGSLPFDGQNLKELRERVLRGKYRIPFYMSTDCENLLKRFLVLNPIKRGTLEQIMKDRWINAGHEEDELKPFVEPELDISDQKRIDIMVGMGYSQEEIQESLSKMKYDEITATYLLLGRKSSELDASDSSSSSNLSLAKVRPSSDLNNSTGQSPHHKVQRSVFSSQKQRRYSDHAGPAIPSVVAYPKRSQTSTADSDLKEDGISSRKSSGSAVGGKGIAPASPMLGNASNPNKADIPERKKSSTVPSSNTASGGMTRRNTYVCSERTTADRHSVIQNGKENSTIPDQRTPVASTHSISSAATPDRIRFPRGTASRSTFHGQPRERRTATYNGPPASPSLSHEATPLSQTRSRGSTNLFSKLTSKLTRRNMSFRFIKRLPTEYERNGRYEGSSRNVSAEQKDENKEAKPRSLRFTWSMKTTSSMDPGDMMREIRKVLDANNCDYEQRERFLLFCVHGDGHAENLVQWEMEVCKLPRLSLNGVRFKRISGTSIAFKNIASKIANELKL

SEQ ID NO: 15117 - protein, 704 aa, Artificial Sequence
  Synthetic polypeptide
PGAVAHTCNPSTLGGRGRWITWGQEFETSLANMVAIKIIDKTQLNPTSLQKLFREVRIMKILNHPNIVKLFEVIETEKTLYLIMEYASGGEVFDYLVAHGRMKEKEARSKFRQGCQAGQTIKVQVSFDLLSLMFTFIVSAVQYCHQKRIVHRDLKAENLLLDADMNIKIADFGFSNEFTVGGKLDTFCGSPPYAAPELFQGKKYDGPEVDVWSLGVILYTLVSGSLPFDGQNLKELRERVLRGKYRIPFYMSTDCENLLKRFLVLNPIKRGTLEQIMKDRWINAGHEEDELKPFVEPELDISDQKRIDIMVGMGYSQEEIQESLSKMKYDEITATYLLLGRKSSELDASDSSSSSNLSLAKVRPSSDLNNSTGQSPHHKVQRSVFSSQKQRRYSDHAGPAIPSVVAYPKRSQTSTADSDLKEDGISSRKSSGSAVGGKGIAPASPMLGNASNPNKADIPERKKSSTVPSSNTASGGMTRRNTYVCSERTTADRHSVIQNGKENSTIPDQRTPVASTHSISSAATPDRIRFPRGTASRSTFHGQPRERRTATYNGPPASPSLSHEATPLSQTRSRGSTNLFSKLTSKLTRSRNVSAEQKDENKEAKPRSLRFTWSMKTTSSMDPGDMMREIRKVLDANNCDYEQRERFLLFCVHGDGHAENLVQWEMEVCKLPRLSLNGVRFKRISGTSIAFKNIASKIANELKL

SEQ ID NO: 15118 - protein, 696 aa, Artificial Sequence
  Synthetic polypeptide
PGAVAHTCNPSTLGGRGRWITWGQEFETSLANMVAIKIIDKTQLNPTSLQKLFREVRIMKILNHPNIVKLFEVIETEKTLYLIMEYASGGEVFDYLVAHGRMKEKEARSKFRQIVSAVQYCHQKRIVHRDLKAENLLLDADMNIKIADFGFSNEFTVGGKLDTFCGSPPYAAPELFQGKKYDGPEVDVWSLGVILYTLVSGSLPFDGQNLKELRERVLRGKYRIPFYMSTDCENLLKRFLVLNPIKRGTLEQIMKDRWINAGHEEDELKPFVEPELDISDQKRIDIMVGMGYSQEEIQESLSKMKYDEITATYLLLGRKSSELDASDSSSSSNLSLAKVRPSSDLNNSTGQSPHHKVQRSVFSSQKQRRYSDHAGPAIPSVVAYPKRSQTSTADSDLKEDGISSRKSSGSAVGGKGIAPASPMLGNASNPNKADIPERKKSSTVPSSNTASGGMTRRNTYVCSERTTADRHSVIQNGKENSTIPDQRTPVASTHSISSAATPDRIRFPRGTASRSTFHGQPRERRTATYNGPPASPSLSHEATPLSQTRSRGSTNLFSKLTSKLTRRLPTEYERNGRYEGSSRNVSAEQKDENKEAKPRSLRFTWSMKTTSSMDPGDMMREIRKVLDANNCDYEQRERFLLFCVHGDGHAENLVQWEMEVCKLPRLSLNGVRFKRISGTSIAFKNIASKIANELKL

SEQ ID NO: 15119 - protein, 705 aa, Artificial Sequence
  Synthetic polypeptide
PGAVAHTCNPSTLGGRGRWITWGQEFETSLANMVAIKIIDKTQLNPTSLQKLFREVRIMKILNHPNIVKLFEVIETEKTLYLIMEYASGGEVFDYLVAHGRMKEKEARSKFRQIVSAVQYCHQKRIVHRDLKAENLLLDADMNIKIADFGFSNEFTVGGKLDTFCGSPPYAAPELFQGKKYDGPEVDVWSLGVILYTLVSGSLPFDGQNLKELRERVLRGKYRIPFYMSTDCENLLKRFLVLNPIKRGTLEQIMKDRWINAGHEEDELKPFVEPELDISDQKRIDIMVGMGYSQEEIQESLSKMKYDEITATYLLLGRKSSELDASDSSSSSNLSLAKVRPSSDLNNSTGQSPHHKVQRSVFSSQKQRRYSDHAGPAIPSVVAYPKRSQTSTADSDLKEDGISSRKSSGSAVGGKGIAPASPMLGNASNPNKADIPERKKSSTVPSSNTASGGMTRRNTYVCSERTTADRHSVIQNGKENSTIPDQRTPVASTHSISSAATPDRIRFPRGTASRSTFHGQPRERRTATYNGPPASPSLSHEATPLSQTRSRGSTNLFSKLTSKLTRRNMSFRFIKRLPTEYERNGRYEGSSRNVSAEQKDENKEAKPRSLRFTWSMKTTSSMDPGDMMREIRKVLDANNCDYEQRERFLLFCVHGDGHAENLVQWEMEVCKLPRLSLNGVRFKRISGTSIAFKNIASKIANELKL

SEQ ID NO: 15120 - protein, 681 aa, Artificial Sequence
  Synthetic polypeptide
PGAVAHTCNPSTLGGRGRWITWGQEFETSLANMVAIKIIDKTQLNPTSLQKLFREVRIMKILNHPNIVKLFEVIETEKTLYLIMEYASGGEVFDYLVAHGRMKEKEARSKFRQIVSAVQYCHQKRIVHRDLKAENLLLDADMNIKIADFGFSNEFTVGGKLDTFCGSPPYAAPELFQGKKYDGPEVDVWSLGVILYTLVSGSLPFDGQNLKELRERVLRGKYRIPFYMSTDCENLLKRFLVLNPIKRGTLEQIMKDRWINAGHEEDELKPFVEPELDISDQKRIDIMVGMGYSQEEIQESLSKMKYDEITATYLLLGRKSSELDASDSSSSSNLSLAKVRPSSDLNNSTGQSPHHKVQRSVFSSQKQRRYSDHAGPAIPSVVAYPKRSQTSTADSDLKEDGISSRKSSGSAVGGKGIAPASPMLGNASNPNKADIPERKKSSTVPSSNTASGGMTRRNTYVCSERTTADRHSVIQNGKENSTIPDQRTPVASTHSISSAATPDRIRFPRGTASRSTFHGQPRERRTATYNGPPASPSLSHEATPLSQTRSRGSTNLFSKLTSKLTRSRNVSAEQKDENKEAKPRSLRFTWSMKTTSSMDPGDMMREIRKVLDANNCDYEQRERFLLFCVHGDGHAENLVQWEMEVCKLPRLSLNGVRFKRISGTSIAFKNIASKIANELKL

SEQ ID NO: 15121 - protein, 665 aa, Artificial Sequence
  Synthetic polypeptide
PGAVAHTCNPSTLGGRGRWITWGQEFETSLANMVAIKIIDKTQLNPTSLQKLFREVRIMKILNHPNIVKLFEVIETEKTLYLIMEYASGGEVFDYLVAHGRMKEKEARSKFRQIVSAVQYCHQKRIVHRDLKAENLLLDADMNIKIADFGFSNEFTVGGKLDTFCGSPPYAAPELFQGKKYDGPEVDVWSLGVILYTLVSGSLPFDGQNLKELRERVLRGKYRIPFYMSTDCENLLKRFLVLNPIKRGTLEQIMKDRWINAGHEEDELKPFVEPELDISDQKRIDIMVGMGYSQEEIQESLSKMKYDEITATYLLLGRKSSEVRPSSDLNNSTGQSPHHKVQRSVFSSQKQRRYSDHAGPAIPSVVAYPKRSQTSTADSDLKEDGISSRKSSGSAVGGKGIAPASPMLGNASNPNKADIPERKKSSTVPSSNTASGGMTRRNTYVCSERTTADRHSVIQNGKENSTIPDQRTPVASTHSISSAATPDRIRFPRGTASRSTFHGQPRERRTATYNGPPASPSLSHEATPLSQTRSRGSTNLFSKLTSKLTRSRNVSAEQKDENKEAKPRSLRFTWSMKTTSSMDPGDMMREIRKVLDANNCDYEQRERFLLFCVHGDGHAENLVQWEMEVCKLPRLSLNGVRFKRISGTSIAFKNIASKIANELKL

SEQ ID NO: 15122 - protein, 611 aa, Artificial Sequence
  Synthetic polypeptide
PGAVAHTCNPSTLGGRGRWITWGQEFETSLANMVAIKIIDKTQLNPTSLQKLFREVRIMKILNHPNIVKLFEVIETEKTLYLIMEYASGGEVFDYLVAHGRMKEKEARSKFRQIVSAVQYCHQKRIVHRDLKELRERVLRGKYRIPFYMSTDCENLLKRFLVLNPIKRGTLEQIMKDRWINAGHEEDELKPFVEPELDISDQKRIDIMVGMGYSQEEIQESLSKMKYDEITATYLLLGRKSSELDASDSSSSSNLSLAKVRPSSDLNNSTGQSPHHKVQRSVFSSQKQRRYSDHAGPAIPSVVAYPKRSQTSTADSDLKEDGISSRKSSGSAVGGKGIAPASPMLGNASNPNKADIPERKKSSTVPSSNTASGGMTRRNTYVCSERTTADRHSVIQNGKENSTIPDQRTPVASTHSISSAATPDRIRFPRGTASRSTFHGQPRERRTATYNGPPASPSLSHEATPLSQTRSRGSTNLFSKLTSKLTRRNMSFRFIKSRNVSAEQKDENKEAKPRSLRFTWSMKTTSSMDPGDMMREIRKVLDANNCDYEQRERFLLFCVHGDGHAENLVQWEMEVCKLPRLSLNGVRFKRISGTSIAFKNIASKIANELKL

SEQ ID NO: 15123 - protein, 93 aa, Artificial Sequence
  Synthetic polypeptide
PGAVAHTCNPSTLGGRGRWITWGQEFETSLANMVAIKIIDKTQLNPTSLQKLFREVRIMKILNHPNIVKLFEVIETEKTLYLIMEYASGGKNI

SEQ ID NO: 15124 - protein, 13 aa, Artificial Sequence
  Synthetic polypeptide
EVKYLTIWLHMAG

SEQ ID NO: 15125 - protein, 646 aa, Artificial Sequence
  Synthetic polypeptide
QPVILLRGEVFDYLVAHGRMKEKEARSKFRQGCQAGQTIKVQVSFDLLSLMFTFIVSAVQYCHQKRIVHRDLKAENLLLDADMNIKIADFGFSNEFTVGGKLDTFCGSPPYAAPELFQGKKYDGPEVDVWSLGVILYTLVSGSLPFDGQNLKELRERVLRGKYRIPFYMSTDCENLLKRFLVLNPIKRGTLEQIMKDRWINAGHEEDELKPFVEPELDISDQKRIDIMVGMGYSQEEIQESLSKMKYDEITATYLLLGRKSSELDASDSSSSSNLSLAKVRPSSDLNNSTGQSPHHKVQRSVFSSQKQRRYSDHAGPAIPSVVAYPKRSQTSTADSDLKEDGISSRKSSGSAVGGKGIAPASPMLGNASNPNKADIPERKKSSTVPSSNTASGGMTRRNTYVCSERTTADRHSVIQNGKENSTIPDQRTPVASTHSISSAATPDRIRFPRGTASRSTFHGQPRERRTATYNGPPASPSLSHEATPLSQTRSRGSTNLFSKLTSKLTRRNMSFRFIKRLPTEYERNGRYEGSSRNVSAEQKDENKEAKPRSLRFTWSMKTTSSMDPGDMMREIRKVLDANNCDYEQRERFLLFCVHGDGHAENLVQWEMEVCKLPRLSLNGVRFKRISGTSIAFKNIASKIANELKL

SEQ ID NO: 15126 - protein, 622 aa, Artificial Sequence
  Synthetic polypeptide
QPVILLRGEVFDYLVAHGRMKEKEARSKFRQGCQAGQTIKVQVSFDLLSLMFTFIVSAVQYCHQKRIVHRDLKAENLLLDADMNIKIADFGFSNEFTVGGKLDTFCGSPPYAAPELFQGKKYDGPEVDVWSLGVILYTLVSGSLPFDGQNLKELRERVLRGKYRIPFYMSTDCENLLKRFLVLNPIKRGTLEQIMKDRWINAGHEEDELKPFVEPELDISDQKRIDIMVGMGYSQEEIQESLSKMKYDEITATYLLLGRKSSELDASDSSSSSNLSLAKVRPSSDLNNSTGQSPHHKVQRSVFSSQKQRRYSDHAGPAIPSVVAYPKRSQTSTADSDLKEDGISSRKSSGSAVGGKGIAPASPMLGNASNPNKADIPERKKSSTVPSSNTASGGMTRRNTYVCSERTTADRHSVIQNGKENSTIPDQRTPVASTHSISSAATPDRIRFPRGTASRSTFHGQPRERRTATYNGPPASPSLSHEATPLSQTRSRGSTNLFSKLTSKLTRSRNVSAEQKDENKEAKPRSLRFTWSMKTTSSMDPGDMMREIRKVLDANNCDYEQRERFLLFCVHGDGHAENLVQWEMEVCKLPRLSLNGVRFKRISGTSIAFKNIASKIANELKL

SEQ ID NO: 15127 - protein, 66 aa, Artificial Sequence
  Synthetic polypeptide
QPVILLRGEVFDYLVAHGRMKEKEARSKFRQIVSAVQYCHQKRIVHRDLKAENLLLDADMNIKIAD

SEQ ID NO: 15128 - protein, 614 aa, Artificial Sequence
  Synthetic polypeptide
QPVILLRGEVFDYLVAHGRMKEKEARSKFRQIVSAVQYCHQKRIVHRDLKAENLLLDADMNIKIADFGFSNEFTVGGKLDTFCGSPPYAAPELFQGKKYDGPEVDVWSLGVILYTLVSGSLPFDGQNLKELRERVLRGKYRIPFYMSTDCENLLKRFLVLNPIKRGTLEQIMKDRWINAGHEEDELKPFVEPELDISDQKRIDIMVGMGYSQEEIQESLSKMKYDEITATYLLLGRKSSELDASDSSSSSNLSLAKVRPSSDLNNSTGQSPHHKVQRSVFSSQKQRRYSDHAGPAIPSVVAYPKRSQTSTADSDLKEDGISSRKSSGSAVGGKGIAPASPMLGNASNPNKADIPERKKSSTVPSSNTASGGMTRRNTYVCSERTTADRHSVIQNGKENSTIPDQRTPVASTHSISSAATPDRIRFPRGTASRSTFHGQPRERRTATYNGPPASPSLSHEATPLSQTRSRGSTNLFSKLTSKLTRRLPTEYERNGRYEGSSRNVSAEQKDENKEAKPRSLRFTWSMKTTSSMDPGDMMREIRKVLDANNCDYEQRERFLLFCVHGDGHAENLVQWEMEVCKLPRLSLNGVRFKRISGTSIAFKNIASKIANELKL

SEQ ID NO: 15129 - protein, 623 aa, Artificial Sequence
  Synthetic polypeptide
QPVILLRGEVFDYLVAHGRMKEKEARSKFRQIVSAVQYCHQKRIVHRDLKAENLLLDADMNIKIADFGFSNEFTVGGKLDTFCGSPPYAAPELFQGKKYDGPEVDVWSLGVILYTLVSGSLPFDGQNLKELRERVLRGKYRIPFYMSTDCENLLKRFLVLNPIKRGTLEQIMKDRWINAGHEEDELKPFVEPELDISDQKRIDIMVGMGYSQEEIQESLSKMKYDEITATYLLLGRKSSELDASDSSSSSNLSLAKVRPSSDLNNSTGQSPHHKVQRSVFSSQKQRRYSDHAGPAIPSVVAYPKRSQTSTADSDLKEDGISSRKSSGSAVGGKGIAPASPMLGNASNPNKADIPERKKSSTVPSSNTASGGMTRRNTYVCSERTTADRHSVIQNGKENSTIPDQRTPVASTHSISSAATPDRIRFPRGTASRSTFHGQPRERRTATYNGPPASPSLSHEATPLSQTRSRGSTNLFSKLTSKLTRRNMSFRFIKRLPTEYERNGRYEGSSRNVSAEQKDENKEAKPRSLRFTWSMKTTSSMDPGDMMREIRKVLDANNCDYEQRERFLLFCVHGDGHAENLVQWEMEVCKLPRLSLNGVRFKRISGTSIAFKNIASKIANELKL

SEQ ID NO: 15130 - protein, 599 aa, Artificial Sequence
  Synthetic polypeptide
QPVILLRGEVFDYLVAHGRMKEKEARSKFRQIVSAVQYCHQKRIVHRDLKAENLLLDADMNIKIADFGFSNEFTVGGKLDTFCGSPPYAAPELFQGKKYDGPEVDVWSLGVILYTLVSGSLPFDGQNLKELRERVLRGKYRIPFYMSTDCENLLKRFLVLNPIKRGTLEQIMKDRWINAGHEEDELKPFVEPELDISDQKRIDIMVGMGYSQEEIQESLSKMKYDEITATYLLLGRKSSELDASDSSSSSNLSLAKVRPSSDLNNSTGQSPHHKVQRSVFSSQKQRRYSDHAGPAIPSVVAYPKRSQTSTADSDLKEDGISSRKSSGSAVGGKGIAPASPMLGNASNPNKADIPERKKSSTVPSSNTASGGMTRRNTYVCSERTTADRHSVIQNGKENSTIPDQRTPVASTHSISSAATPDRIRFPRGTASRSTFHGQPRERRTATYNGPPASPSLSHEATPLSQTRSRGSTNLFSKLTSKLTRSRNVSAEQKDENKEAKPRSLRFTWSMKTTSSMDPGDMMREIRKVLDANNCDYEQRERFLLFCVHGDGHAENLVQWEMEVCKLPRLSLNGVRFKRISGTSIAFKNIASKIANELKL

SEQ ID NO: 15131 - protein, 583 aa, Artificial Sequence
  Synthetic polypeptide
QPVILLRGEVFDYLVAHGRMKEKEARSKFRQIVSAVQYCHQKRIVHRDLKAENLLLDADMNIKIADFGFSNEFTVGGKLDTFCGSPPYAAPELFQGKKYDGPEVDVWSLGVILYTLVSGSLPFDGQNLKELRERVLRGKYRIPFYMSTDCENLLKRFLVLNPIKRGTLEQIMKDRWINAGHEEDELKPFVEPELDISDQKRIDIMVGMGYSQEEIQESLSKMKYDEITATYLLLGRKSSEVRPSSDLNNSTGQSPHHKVQRSVFSSQKQRRYSDHAGPAIPSVVAYPKRSQTSTADSDLKEDGISSRKSSGSAVGGKGIAPASPMLGNASNPNKADIPERKKSSTVPSSNTASGGMTRRNTYVCSERTTADRHSVIQNGKENSTIPDQRTPVASTHSISSAATPDRIRFPRGTASRSTFHGQPRERRTATYNGPPASPSLSHEATPLSQTRSRGSTNLFSKLTSKLTRSRNVSAEQKDENKEAKPRSLRFTWSMKTTSSMDPGDMMREIRKVLDANNCDYEQRERFLLFCVHGDGHAENLVQWEMEVCKLPRLSLNGVRFKRISGTSIAFKNIASKIANELKL

SEQ ID NO: 15132 - protein, 529 aa, Artificial Sequence
  Synthetic polypeptide
QPVILLRGEVFDYLVAHGRMKEKEARSKFRQIVSAVQYCHQKRIVHRDLKELRERVLRGKYRIPFYMSTDCENLLKRFLVLNPIKRGTLEQIMKDRWINAGHEEDELKPFVEPELDISDQKRIDIMVGMGYSQEEIQESLSKMKYDEITATYLLLGRKSSELDASDSSSSSNLSLAKVRPSSDLNNSTGQSPHHKVQRSVFSSQKQRRYSDHAGPAIPSVVAYPKRSQTSTADSDLKEDGISSRKSSGSAVGGKGIAPASPMLGNASNPNKADIPERKKSSTVPSSNTASGGMTRRNTYVCSERTTADRHSVIQNGKENSTIPDQRTPVASTHSISSAATPDRIRFPRGTASRSTFHGQPRERRTATYNGPPASPSLSHEATPLSQTRSRGSTNLFSKLTSKLTRRNMSFRFIKSRNVSAEQKDENKEAKPRSLRFTWSMKTTSSMDPGDMMREIRKVLDANNCDYEQRERFLLFCVHGDGHAENLVQWEMEVCKLPRLSLNGVRFKRISGTSIAFKNIASKIANELKL

SEQ ID NO: 15133 - protein, 26 aa, Artificial Sequence
  Synthetic polypeptide
SPSWSSCPFPSLEASSPLAASDPFKR

SEQ ID NO: 15134 - protein, 4 aa, Artificial Sequence
  Synthetic polypeptide
GCPV

SEQ ID NO: 15135 - protein, 129 aa, Artificial Sequence
  Synthetic polypeptide
RLGVEWRKGERKEGGRRSCKRTRENVEGVQCEVQLVESGGGLVQPGGSLRLSCAASGFTFSNSDMNWVHQAPGKGLEWVSGVSWNGSRTHYADSVKGRFIISRDNSRNTLYLQTNSLRAEDTAVYYCVR

SEQ ID NO: 15136 - protein, 50 aa, Artificial Sequence
  Synthetic polypeptide
YEGWELNGEKVSEKREDGGVAREQEKMLRVSSVRCSWWSLGEAWYSLGDP

SEQ ID NO: 15137 - protein, 35 aa, Artificial Sequence
  Synthetic polypeptide
CTRRWASASQEEAAPRTNPASTLIFYIQTAELCPV

SEQ ID NO: 15138 - protein, 50 aa, Artificial Sequence
  Synthetic polypeptide
KVGLCKPGRSRTKNQPCQHLDLLHSDCRIVSSVRCSWWSLGEAWYSLGGP

SEQ ID NO: 15139 - protein, 109 aa, Artificial Sequence
  Synthetic polypeptide
SSTFRLQNCVQCEVQLVESGGGLVQPRGSLRLSCAASGFTVSSNEMSWIRQAPGKGLEWVSSISGGSTYYADSRKGRFTISRDNSKNTLYLQMNNLRAEGTAVYYCARY

SEQ ID NO: 15140 - protein, 101 aa, Artificial Sequence
  Synthetic polypeptide
GVLSQVQLQQWGAGLLKPSETLSLTCAVYGGSFSGYYWSWIRQPPGKGLEWIGEINHSGSTNYNPSLKSRVTISVDTSKNQFSLKLSSVTAADTAVYYCAR

SEQ ID NO: 15141 - protein, 32 aa, Artificial Sequence
  Synthetic polypeptide
LNDDTWLKHCMENVSVQGSCPRCSYSSGAQDC

SEQ ID NO: 15142 - protein, 59 aa, Artificial Sequence
  Synthetic polypeptide
VFRGPVPGAATAVGRRTVEAFGDPVPHLRCLWWVLQWLLLELDPPAPREGAGVDWGNQS

SEQ ID NO: 15143 - protein, 114 aa, Artificial Sequence
  Synthetic polypeptide
YMAEALHGKRKCSGVLSQVQLQQWGAGLLKPSETLSLTCAVYGGSFSGYYWSWIRQPPGKGLEWIGEINHSGSTNYNPSLKSRVTISVDTSKNQFSLKLSSVTAADTAVYYCAR

SEQ ID NO: 15144 - protein, 103 aa, Artificial Sequence
  Synthetic polypeptide
GVLSQLQLQESGPGLVKPSETLSLTCTVSGGSISSSSYYWGWIRQPPGKGLEWIGSIYYSGSTYYNPSLKSRVTISVDTSKNQFSLKLSSVTAADTAVYYCAR

SEQ ID NO: 15145 - protein, 32 aa, Artificial Sequence
  Synthetic polypeptide
LNDDTWLKHCMENVSVQGSCPSCSCRSRAQDW

SEQ ID NO: 15146 - protein, 37 aa, Artificial Sequence
  Synthetic polypeptide
VFRGPVPAAAAGVGPRTGEAFGDPVPHLHCLWWLHQQ

SEQ ID NO: 15147 - protein, 116 aa, Artificial Sequence
  Synthetic polypeptide
YMAEALHGKRKCSGVLSQLQLQESGPGLVKPSETLSLTCTVSGGSISSSSYYWGWIRQPPGKGLEWIGSIYYSGSTYYNPSLKSRVTISVDTSKNQFSLKLSSVTAADTAVYYCAR

SEQ ID NO: 15148 - protein, 34 aa, Artificial Sequence
  Synthetic polypeptide
LNDDTWLKHCMENVSSVRCSWWSLGEAWSSLGGP

SEQ ID NO: 15149 - protein, 9 aa, Artificial Sequence
  Synthetic polypeptide
SIAWKTCPV

SEQ ID NO: 15150 - protein, 111 aa, Artificial Sequence
  Synthetic polypeptide
YMAEALHGKRVQCEVQLVESGGGLVQPGGSLRLSCAASGFTFSSYWMSWVRQAPGKGLEWVANIKQDGSEKYYVDSVKGRFTISRDNAKNSLYLQMNSLRAEDTAVYYCAR

SEQ ID NO: 15151 - protein, 34 aa, Artificial Sequence
  Synthetic polypeptide
LNDDTWLKHCMENVSSVRCSWWSLGEAWYSLGGP

SEQ ID NO: 15152 - protein, 9 aa, Artificial Sequence
  Synthetic polypeptide
SIAWKTCPV

SEQ ID NO: 15153 - protein, 110 aa, Artificial Sequence
  Synthetic polypeptide
YMAEALHGKRVQCEVQLVESGGGLVQPGGSLRLSCAASGFTFSSYDMHWVRQATGKGLEWVSAIGTAGDTYYPGSVKGRFTISRENAKNSLYLQMNSLRAGDTAVYYCAR

SEQ ID NO: 15154 - protein, 34 aa, Artificial Sequence; identical to SEQ ID NO: 15151
  Synthetic polypeptide

SEQ ID NO: 15155 - protein, 9 aa, Artificial Sequence
  Synthetic polypeptide
SIAWKTCPV

SEQ ID NO: 15156 - protein, 111 aa, Artificial Sequence
  Synthetic polypeptide
YMAEALHGKRVQCEVQLVESGGGLVQPGGSLRLSCAASGFTFSNSDMNWARKAPGKGLEWVSGVSWNGSRTHYVDSVKRRFIISRDNSRNSLYLQKNRRRAEDMAVYYCVR

SEQ ID NO: 15157 - protein, 34 aa, Artificial Sequence
  Synthetic polypeptide
LNDDTWLKHCMENVSSVRCSWWSLGEVWYGLGGP

SEQ ID NO: 15158 - protein, 9 aa, Artificial Sequence
  Synthetic polypeptide
SIAWKTCPV

SEQ ID NO: 15159 - protein, 111 aa, Artificial Sequence
  Synthetic polypeptide
YMAEALHGKRVQCEVQLVESGGGVVRPGGSLRLSCAASGFTFDDYGMSWVRQAPGKGLEWVSGINWNGGSTGYADSVKGRFTISRDNAKNSLYLQMNSLRAEDTALYHCAR

SEQ ID NO: 15160 - protein, 28 aa, Artificial Sequence
  Synthetic polypeptide
LNDDTWLKHCMENWSCPRCSCRSRAQDW

SEQ ID NO: 15161 - protein, 40 aa, Artificial Sequence
  Synthetic polypeptide
SIAWKTGPVPGAAAGVGPRTGEAFGHPVPHLRCLWLLHQQ

SEQ ID NO: 15162 - protein, 111 aa, Artificial Sequence
  Synthetic polypeptide
YMAEALHGKLVLSQVQLQESGPGLVKPSDTLSLTCAVSGYSISSSNWWGWIRQPPGKGLEWIGYIYYSGSTYYNPSLKSRVTMSVDTSKNQFSLKLSSVTAVDTAVYYCAR

SEQ ID NO: 15163 - protein, 28 aa, Artificial Sequence
  Synthetic polypeptide
LNDDTWLKHCMENGSCPRCSYSSGAQDC

SEQ ID NO: 15164 - protein, 62 aa, Artificial Sequence
  Synthetic polypeptide
SIAWKTGPVPGAATAVGRRTVEAFGDPVPHLRCLWWVLQWLLLELDPPAPREGAGVDWGNQS

SEQ ID NO: 15165 - protein, 110 aa, Artificial Sequence
  Synthetic polypeptide
YMAEALHGKRVLSQVQLQQWGAGLLKPSETLSLTCAVYGGSFSGYYWSWIRQPPGKGLEWIGEINHSGSTNYNPSLKSRVTISVDTSKNQFSLKLSSVTAADTAVYYCAR

SEQ ID NO: 15166 - protein, 34 aa, Artificial Sequence
  Synthetic polypeptide
LNDDTWLKHCMENVSSVRCSWWSLGEAWYSLGDP

SEQ ID NO: 15167 - protein, 9 aa, Artificial Sequence
  Synthetic polypeptide
SIAWKTCPV

SEQ ID NO: 15168 - protein, 111 aa, Artificial Sequence
  Synthetic polypeptide
YMAEALHGKRVQCEVQLVESGGGLVQPGGSLRLSCAASGFTFSNSDMNWVHQAPGKGLEWVSGVSWNGSRTHYADSVKGRFIISRDNSRNTLYLQTNSLRAEDTAVYYCVR

SEQ ID NO: 15169 - protein, 34 aa, Artificial Sequence; identical to SEQ ID NO: 15151
  Synthetic polypeptide

SEQ ID NO: 15170 - protein, 9 aa, Artificial Sequence
  Synthetic polypeptide
SIAWKTCPV

SEQ ID NO: 15171 - protein, 110 aa, Artificial Sequence
  Synthetic polypeptide
YMAEALHGKRVQCEVQLVESGGGLVQPRGSLRLSCAASGFTVSSNEMSWIRQAPGKGLEWVSSISGGSTYYADSRKGRFTISRDNSKNTLYLQMNNLRAEGTAVYYCARY

SEQ ID NO: 15172 - protein, 28 aa, Artificial Sequence
  Synthetic polypeptide
LNDDTWLKHCMENGSCPSCSCRSRAQDW

SEQ ID NO: 15173 - protein, 40 aa, Artificial Sequence
  Synthetic polypeptide
SIAWKTGPVPAAAAGVGPRTGEAFGDPVPHLHCLWWLHQQ

SEQ ID NO: 15174 - protein, 112 aa, Artificial Sequence
  Synthetic polypeptide
YMAEALHGKRVLSQLQLQESGPGLVKPSETLSLTCTVSGGSISSSSYYWGWIRQPPGKGLEWIGSIYYSGSTYYNPSLKSRVTISVDTSKNQFSLKLSSVTAADTAVYYCAR

SEQ ID NO: 15175 - protein, 14 aa, Artificial Sequence
  Synthetic polypeptide
AATRMGLVNIGCPV

SEQ ID NO: 15176 - protein, 36 aa, Artificial Sequence
  Synthetic polypeptide
STDIGCNSDGPCKHWVSSVKCSWWSLGESWYSLGGP

SEQ ID NO: 15177 - protein, 105 aa, Artificial Sequence
  Synthetic polypeptide
TLGVQCEVQLVESGGVVVQPGGSLRLSCAASGFTFDDYTMHWVRQAPGKGLEWVSLISWDGGSTYYADSVKGRFTISRDNSKNSLYLQMNSLRTEDTALYYCAKD

SEQ ID NO: 15178 - protein, 26 aa, Artificial Sequence
  Synthetic polypeptide
EKMLRVSSVKCSWWSLGESWYSLGGP

SEQ ID NO: 15179 - protein, 4 aa, Artificial Sequence
  Synthetic polypeptide
GCPV

SEQ ID NO: 15180 - protein, 129 aa, Artificial Sequence
  Synthetic polypeptide
RSGVEWRKGERKEGGRRCKRIRENVEGVQCEVQLVESGGVVVQPGGSLRLSCAASGFTFDDYTMHWVRQAPGKGLEWVSLISWDGGSTYYADSVKGRFTISRDNSKNSLYLQMNSLRTEDTALYYCAKD

SEQ ID NO: 15181 - protein, 31 aa, Artificial Sequence
  Synthetic polypeptide
HEGRELNGEKVSSVKCSWWSLGESWYSLGGP

SEQ ID NO: 15182 - protein, 7 aa, Artificial Sequence
  Synthetic polypeptide
MEKRCPV

SEQ ID NO: 15183 - protein, 111 aa, Artificial Sequence
  Synthetic polypeptide
RSGVEWRKGVQCEVQLVESGGVVVQPGGSLRLSCAASGFTFDDYTMHWVRQAPGKGLEWVSLISWDGGSTYYADSVKGRFTISRDNSKNSLYLQMNSLRTEDTALYYCAKD

SEQ ID NO: 15184 - protein, 34 aa, Artificial Sequence
  Synthetic polypeptide
FFYPQDNCLRTAHVSSVRCSWWSLGEAWYSLGDP

SEQ ID NO: 15185 - protein, 108 aa, Artificial Sequence
  Synthetic polypeptide
LPQNSSCVQCEVQLVESGGGLVQPGGSLRLSCAASGFTFSNSDMNWVHQAPGKGLEWVSGVSWNGSRTHYADSVKGRFIISRDNSRNTLYLQTNSLRAEDTAVYYCVR

SEQ ID NO: 15186 - protein, 24 aa, Artificial Sequence
  Synthetic polypeptide
TDSTLVINSSTPRIIASEQLMCPV

SEQ ID NO: 15187 - protein, 34 aa, Artificial Sequence
  Synthetic polypeptide
FFYPQDNCLRTAHVSSVRCSWWSLGEAWYSLGGP

SEQ ID NO: 15188 - protein, 107 aa, Artificial Sequence
  Synthetic polypeptide
LPQNSSCVQCEVQLVESGGGLVQPRGSLRLSCAASGFTVSSNEMSWIRQAPGKGLEWVSSISGGSTYYADSRKGRFTISRDNSKNTLYLQMNNLRAEGTAVYYCARY

SEQ ID NO: 15189 - protein, 24 aa, Artificial Sequence
  Synthetic polypeptide
TDSTLVINSSTPRIIASEQLMCPV

SEQ ID NO: 15190 - protein, 34 aa, Artificial Sequence; identical to SEQ ID NO: 15187
  Synthetic polypeptide

SEQ ID NO: 15191 - protein, 108 aa, Artificial Sequence
  Synthetic polypeptide
LPQNSSCVQCEVQLVESGGGLVQPGGSLRLSCAASGFTFSSYSMNWVRQAPGKGLEWVSYISSSSSTIYYADSVKGRFTISRDNAKNSLYLQMNSLRDEDTAVYYCAR

SEQ ID NO: 15192 - protein, 24 aa, Artificial Sequence
  Synthetic polypeptide
TDSTLVINSSTPRIIASEQLMCPV

SEQ ID NO: 15193 - protein, 23 aa, Artificial Sequence
  Synthetic polypeptide
KEVSSVRCSWWSLGEAWSSLEGP

SEQ ID NO: 15194 - protein, 42 aa, Artificial Sequence
  Synthetic polypeptide
LTSKAVTRKVSMMLSKGRSSEEWALKTLPALPQHKDEKRCPV

SEQ ID NO: 15195 - protein, 117 aa, Artificial Sequence
  Synthetic polypeptide
RLSQHSLSIRMKRGVQCEVQLVESGGGLVQPGGSLRLSCAASGFTFSDHYMDWVRQAPGKGLEWVGRTRNKANSYTTEYAASVKGRFTISRDDSKNSLYLQMNSLKTEDTAVYYCAR

SEQ ID NO: 15196 - protein, 23 aa, Artificial Sequence
  Synthetic polypeptide
KEVSSVRCSWWSPGEAWSSLGGP

SEQ ID NO: 15197 - protein, 42 aa, Artificial Sequence; identical to SEQ ID NO: 15194
  Synthetic polypeptide

SEQ ID NO: 15198 - protein, 117 aa, Artificial Sequence
  Synthetic polypeptide
RLSQHSLSIRMKRGVQCEVQLVESGGGLVQPGGSLKLSCAASGFTFSGSAMHWVRQASGKGLEWVGRIRSKANSYATAYAASVKGRFTISRDDSKNTAYLQMNSLKTEDTAVYYCTR

SEQ ID NO: 15199 - protein, 16 aa, Artificial Sequence
  Synthetic polypeptide
KEVSSVRCSWWSPGEA

SEQ ID NO: 15200 - protein, 42 aa, Artificial Sequence; identical to SEQ ID NO: 15194
  Synthetic polypeptide

SEQ ID NO: 15201 - protein, 115 aa, Artificial Sequence
  Synthetic polypeptide
RLSQHSLSIRMKRGVQCEVQLVESGGGLVQPGGSLRLSCAASGFTFSSYWMHWVRQAPGKGLVWVSRINSDGSSTSYADSVKGRFTISRDNAKNTLYLQMNSLRAEDTAVYYCAR

SEQ ID NO: 15202 - protein, 32 aa, Artificial Sequence
  Synthetic polypeptide
DLPSHVELISPVSRGASSRVAWGGPTPLFTLN

SEQ ID NO: 15203 - protein, 248 aa, Artificial Sequence
  Synthetic polypeptide
EVPFTLCHDCETSPAMWNSFPPFPEGHPAVLPGEDPPPYSPLTSPDSGSAPMITCRVCQSLINVEGKMHQHVVKCGVCNEATPIKNAPPGKKYVRCPCNCLLICKVTSQRIACPRPYCKRIINLGPVHPGPLSPEPQPMGVRVICGHCKNTFLWTEFTDRTLARCPHCRKVSSIGRRYPRKRCICCFLLGLLLAVTATGLAFGTWKHARRYGGIYAAWAFVILLAVLCLGRALYWACMKVSHPVQNFS

SEQ ID NO: 15204 - protein, 62 aa, Artificial Sequence
  Synthetic polypeptide
WFYQGFPLLHLPHSLLPPPSKKCLSPSAMIVRPPQPCGTHFPRFPRGIQPCCLGRTHPPIHP

SEQ ID NO: 15205 - protein, 22 aa, Artificial Sequence
  Synthetic polypeptide
GQAQWLTPVIPALWEAESTGEG

SEQ ID NO: 15206 - protein, 332 aa, Artificial Sequence
  Synthetic polypeptide
PGAVAHSCNPSTLGGREHWRRMKGANLSQGMEFELLGLTTDPQLQRLLFVVFLGMYTATLLGNLVMFLLIHVSATLHTPMYSLLKSLSFLDFCYSSTVVPQTLVNFLAKRKVISYFGCMTQMFFYAGFATSECYLIAAMAYDRYAAICNPLLYSTIMSPEVCASLIVGSYSAGFLNSLIHTGCIFSLKFCGAHVVTHFFCDGPPILSLSCVDTSLCEILLFIFAGFNLLSCTLTILISYFLILNTILKMSSAQGRFKAFSTCASHLTAICLFFGTTLFMYLRPRSSYSLTQDRTVAVIYTVVIPVLNPLMYSLRNKDVKKALIKVWGRKTME

SEQ ID NO: 15207 - protein, 24 aa, Artificial Sequence
  Synthetic polypeptide
SQHFGRPRALEKDERGKPEPRDGV

SEQ ID NO: 15208 - protein, 25 aa, Artificial Sequence
  Synthetic polypeptide
DWGATGEQLEHCWCTTLQGVKPSTT

SEQ ID NO: 15209 - protein, 144 aa, Artificial Sequence
  Synthetic polypeptide
LGCHRGAAGALLVYDITRRETFNHLTSWLEDARQHSSSNMVIMLIGNKSDLESRRDVKREEGEAFAREHGLIFMETSAKTACNVEEAFINTAKEIYRKIQQGLFDVHNEANGIKIGPQQSISTSVGPSASQRNSRDIGSNSGCC

SEQ ID NO: 15210 - protein, 19 aa, Artificial Sequence
  Synthetic polypeptide
TGVPQGSSWSTAGVRHYKA

SEQ ID NO: 15211 - protein, 34 aa, Artificial Sequence
  Synthetic polypeptide
DWGATGWARILPFYHPFLLQGSSWSTAGVRHYKA

SEQ ID NO: 15212 - protein, 39 aa, Artificial Sequence
  Synthetic polypeptide
LGCHRLGKNPSVLSPVPTTGEQLEHCWCTTLQGVKPSTT

SEQ ID NO: 15213 - protein, 159 aa, Artificial Sequence
  Synthetic polypeptide
TGVPQAGQESFRSITRSYYRGAAGALLVYDITRRETFNHLTSWLEDARQHSSSNMVIMLIGNKSDLESRRDVKREEGEAFAREHGLIFMETSAKTACNVEEAFINTAKEIYRKIQQGLFDVHNEANGIKIGPQQSISTSVGPSASQRNSRDIGSNSGCC

SEQ ID NO: 15214 - protein, 86 aa, Artificial Sequence
  Synthetic polypeptide
ETKQQSMTFCGHSTRKRKKASDVHEYNFLNTLLMPTSQAGRRALHMRAAHPKGRIMGKGHKMLENPAWPRQSLSLNQRCLCRRQRL

SEQ ID NO: 15215 - protein, 112 aa, Artificial Sequence
  Synthetic polypeptide
GKNHGKGAQDAGESGMAQTVTQSQPEMSVQEAETVTLSCTYDTSENNYYLFWYKQPPSRQMILVIRQEAYKQQNATENRFSVNFQKAAKSFSLKISDSQLGDTAMYFCAFMK

SEQ ID NO: 15216 - protein, 63 aa, Artificial Sequence
  Synthetic polypeptide
THCSCPRPKQEGGHCTCGQPILREESWERGTRCWRIRHGPDSHSVSTRDVCAGGRDCDPELHI

SEQ ID NO: 15217 - protein, 72 aa, Artificial Sequence
  Synthetic polypeptide
AEIAPLHSSLATERDKTPSQKKKSRCHATKEVRETVGRVGPERVTLCPWGPQTKRQYACPLQAPAPAGPGCR

SEQ ID NO: 15218 - protein, 27 aa, Artificial Sequence
  Synthetic polypeptide
DRATALQPGNRARQDSISKKKKQMPRY

SEQ ID NO: 15219 - protein, 350 aa, Artificial Sequence
  Synthetic polypeptide
SHLLGRLKQENHLNLGGKGCSELRSRHCTPAWQQSETRLHLKKKKADATLLKKSEKLLAELDRSGLPSAPGAPRRRGSMPVPYKHQLRRAQAVDELDWPPQASSSGSSDSLGSGEAAPAQKDGIFKVMLVGESGVGKSTLAGTFGGLQGDSAHEPENPEDTYERRIMVDKEEVTLVVYDIWEQGDAGGWLRDHCLQTGDAFLIVFSVTDRRSFSKVPETLLRLRAGRPHHDLPVILVGNKSDLARSREVSLEEGRHLAGTLSCKHIETSAALHHNTRELFEGAVRQIRLRRGRNHAGGQRPDPGSPEGPAPPARRESLTKKAKRFLANLVPRNAKFFKQRSRSCHDLSVL

SEQ ID NO: 15220 - protein, 231 aa, Artificial Sequence
  Synthetic polypeptide
SHLLGRLKQENHLNLGGKGCSELRSRHCTPAWQQSETRLHLKKKKADATLLKKSEKLLAELDRSGLPSAPGAPRRRGSMPVPYKHQLRRAQAVDELDWPPQASSSGSSDSLGSGEAAPAQKDGIFKVMLVGESGVGKSTLAGTFGGLQGDSAHEPENPGGCRRVAAGPLPSDRGRLSHRLLSHRPTEFLQSSRDPTSAPGWEAAPRPTRYPRWKQERLGPLPGGITGGCVS

SEQ ID NO: 15221 - protein, 68 aa, Artificial Sequence
  Synthetic polypeptide
ASECQGPYLRLSPGFLRHLYQVQQRHLWAEQCLPGPGQPLPHPVLCLLLLWANFALQGFLQCQWLCVL

SEQ ID NO: 15222 - protein, 229 aa, Artificial Sequence
  Synthetic polypeptide
CSLFSPTETKHLNARDHIFDFLQVSLGTCIKCNKGIYGQSNACQALDSLYHTQCFVCCSCGRTLRCKAFYSVNGSVYCEEDYLFSGFQEAAEKCCVCGHLILEKILQAMGKSYHPGCFRCIVCNKCLDGIPFTVDFSNQVYCVTDYHKNYAPKCAACGQPILPSEGCEDIVRVISMDRDYHFECYHCEDCRMQLSDEEGCCCFPLDGHLLCHGCHMQRLNARQPPANYI

SEQ ID NO: 15223 - protein, 78 aa, Artificial Sequence
  Synthetic polypeptide
GEYFWLEPKNAFENFQEPDIGLVALAFLQGSFAYGGWNFLNYVTEELVDPYKAANPGEPEDVCGRVPRGGAGLRDRGG

SEQ ID NO: 15224 - protein, 140 aa, Artificial Sequence
  Synthetic polypeptide
GEYFWLEPKNAFENFQEPDIGLVALAFLQGSFAYGGWNFLNYVTEELVDPYKLFFAGAREGHLPSVLAMIHVKRCTPIPALLFTCISTLLMLVTSDMYTLINYVGFINYLFYGVTVAGQIVLRWKKPDIPRPIKPLPYQG

SEQ ID NO: 15225 - protein, 324 aa, Artificial Sequence
  Synthetic polypeptide
GEYFWLEPKNAFENFQEPDIGLVALAFLQGSFAYGGWNFLNYVTEELVDPYKNLPRAIFISIPLVTFVYVFANVAYVTAMSPQELLASNAVAVTFGEKLLGVMAWIMPISVALSTFGGVNGSLFTSSRLFFAGAREGHLPSVLAMIHVKRCTPIPALLFTCISTLLMLVTSDMYTLINYVGFINYLFYGVTVAGQIVLRWKKPDIPRPIKINLLFPIIYLLFWAFLLVFSLWSEPVVCGIGLAIMLTGVPVYFLGVYWQHKPKCFSDFIELLTLVSQKMCVVVYPEVERGSGTEEANEDMEEQQQPMYQPTPTKDKDVAGQPQP

SEQ ID NO: 15226 - protein, 62 aa, Artificial Sequence; identical to SEQ ID NO: 4605
  Synthetic polypeptide

SEQ ID NO: 15227 - protein, 25 aa, Artificial Sequence
  Synthetic polypeptide
SQHFGRPMQADHLRRVLLAGAKECI

SEQ ID NO: 15228 - protein, 31 aa, Artificial Sequence
  Synthetic polypeptide
ATHLGTSSALESLSRQRECWRMLVLWALLSS

SEQ ID NO: 15229 - protein, 34 aa, Artificial Sequence
  Synthetic polypeptide
ATHLGTSSALESLSRQRECWRMLVLWALLSSSGL

SEQ ID NO: 15230 - protein, 45 aa, Artificial Sequence
  Synthetic polypeptide
DSILHHHLLRCGPRQLTWEHHRLWNLCLAKGSAGECWFCGPCSHR

SEQ ID NO: 15231 - protein, 61 aa, Artificial Sequence
  Synthetic polypeptide
DSILHHHLLRCGPRQLTWEHHRLWNLCLAKGSAGECWFCGPCSHRLDCDGLHHSCGSPLLC

SEQ ID NO: 15232 - protein, 47 aa, Artificial Sequence
  Synthetic polypeptide
PEIQYFTITYCDVDLGNSLGNIIGSGIFVSPKGVLENAGSVGLALIV

SEQ ID NO: 15233 - protein, 63 aa, Artificial Sequence
  Synthetic polypeptide
PEIQYFTITYCDVDLGNSLGNIIGSGIFVSPKGVLENAGSVGLALIVWIVTGFITVVGALCYA

SEQ ID NO: 15234 - protein, 258 aa, Artificial Sequence
  Synthetic polypeptide
PEIQYFTITYCDVDLGNSLGNIIGSGIFVSPKGVLENAGSVGLALIVWIVTGFITVVGALCYAELGVTIPKSGGDYSYVKDIFGGLAGFLRLWIAVLVIYPTNQAVIALTFSNYVLQPLFPTCFPPESGLRLLAAICLLLLTWVNCSSVRWATRVQDIFTAGKLLALALIIIMGIVQICKGEYFWLEPKNAFENFQEPDIGLVALAFLQGSFAYGGWNFLNYVTEELVDPYKAANPGEPEDVCGRVPRGGAGLRDRGG

SEQ ID NO: 15235 - protein, 504 aa, Artificial Sequence
  Synthetic polypeptide
PEIQYFTITYCDVDLGNSLGNIIGSGIFVSPKGVLENAGSVGLALIVWIVTGFITVVGALCYAELGVTIPKSGGDYSYVKDIFGGLAGFLRLWIAVLVIYPTNQAVIALTFSNYVLQPLFPTCFPPESGLRLLAAICLLLLTWVNCSSVRWATRVQDIFTAGKLLALALIIIMGIVQICKGEYFWLEPKNAFENFQEPDIGLVALAFLQGSFAYGGWNFLNYVTEELVDPYKNLPRAIFISIPLVTFVYVFANVAYVTAMSPQELLASNAVAVTFGEKLLGVMAWIMPISVALSTFGGVNGSLFTSSRLFFAGAREGHLPSVLAMIHVKRCTPIPALLFTCISTLLMLVTSDMYTLINYVGFINYLFYGVTVAGQIVLRWKKPDIPRPIKINLLFPIIYLLFWAFLLVFSLWSEPVVCGIGLAIMLTGVPVYFLGVYWQHKPKCFSDFIELLTLVSQKMCVVVYPEVERGSGTEEANEDMEEQQQPMYQPTPTKDKDVAGQPQP

SEQ ID NO: 15236 - protein, 225 aa, Artificial Sequence
  Synthetic polypeptide
PVGNWATQQEDLYHQSYECVCVLFASVPDFKEFYSESNINHEGLECLRLLNEIIADFDELLSKPKFSGVEKIKTIGSTYMAATGLNATSGQDAQQDAERSCSHLGTMVEFAVALGSKLDVINKHSFNNFRLRVGLNHGPVVAGVIGAQKPQYDIWGNTVNVASRMESTGVLGKIQVTEETAWALQSLGYTCYSRGVIKVKGKGQLCTYFLNTDLTRTGPPSATLG

SEQ ID NO: 15237 - protein, 58 aa, Artificial Sequence
  Synthetic polypeptide
RGPQPPGRRLILVHDLLGTGLHSRRISTTSPMNAFVSSSPQSQTSRSSTLNPTSIMRA

SEQ ID NO: 15238 - protein, 19 aa, Artificial Sequence
  Synthetic polypeptide
SMTCWELGYTAGGSLPPVL

SEQ ID NO: 15239 - protein, 47 aa, Artificial Sequence
  Synthetic polypeptide
RGFLDGIRSTAQTSEPCKNHHQSRLLVERRGQILNHTLDDQFTLTRF

SEQ ID NO: 15240 - protein, 103 aa, Artificial Sequence
  Synthetic polypeptide
SGAETRDWRWQISVSFACGTEAPGQRRPGKLGANGRASALKGIGPPMSRCPSRQCNGTSKGDSWMASGALHRHLNRAKITIRVVYWSREEVKFSIIHWTTNSP

SEQ ID NO: 15241 - protein, 682 aa, Artificial Sequence
  Synthetic polypeptide
TVQKSPSESFIGREKRSNSQSYIGRPIHLDKILMSKVKVPHTFVIHSYTRPTVCQYCKKLLKGLFRQGLQCKDCRFNCHKRCAPKVPNNCLGEVTINGDLLSPGAESDVVMEEGSDDNDSERNSGLMDDMEEAMVQDAEMAMAECQNDSGEMQDPDPDHEDANRTISPSTSNNIPLMRVVQSVKHTKRKSSTVMKEGWMVHYTSKDTLRKRHYWRLDSKCITLFQNDTGSRYYKEIPLSEILSLEPVKTSALIPNGANPHCFEITTANVVYYVGENVVNPSSPSPNNSVLTSGVGADVARMWEIAIQHALMPVIPKGSSVGTGTNLHRDISVSISVSNCQIQENVDISTVYQIFPDEVLGSGQFGIVYGGKHRKTGRDVAIKIIDKLRFPTKQESQLRNEVAILQNLHHPGVVNLECMFETPERVFVVMEKLHGDMLEMILSSEKGRLPEHITKFLITQILVALRHLHFKNIVHCDLKPENVLLASADPFPQVKLCDFGFARIIGEKSFRRSVVGTPAYLAPEVLRNKGYNRSLDMWSVGVIIYVSLSGTFPFNEDEDIHDQIQNAAFMYPPNPWKEISHEAIDLINNLLQVKMRKRYSVDKTLSHPWLQDYQTWLDLRELECKIGERYITHESDDLRWEKYAGEQGLQYPTHLINPSASHSDTPETEETEMKALGERVSIL

SEQ ID NO: 15242 - protein, 7 aa, Artificial Sequence
  Synthetic polypeptide
GKAEKEN

SEQ ID NO: 15243 - protein, 83 aa, Artificial Sequence
  Synthetic polypeptide
GKSRKRKLRTSIHQHVEIGKVITLGCPSRIWLQLRSPYHYLLRNVWNLLKIQGYVPKDSTVSAGIKLTKTIFKSSLIKIIISI

SEQ ID NO: 15244 - protein, 266 aa, Artificial Sequence
  Synthetic polypeptide
REKQKKKTKNFNPPTRRNWESNYFGMPLQDLVTAEKPIPLFVEKCVEFIEDTGLCTEGLYRVSGNKTDQDNIQKQFDQDHNINLVSMEVTVNAVAGALKAFFADLPDPLIPYSLHPELLEAAKIPDKTERLHALKEIVKKFHPVNYDVFRYVITHLNRVSQQHKINLMTADNLSICFWPTLMRPDFENREFLSTTKIHQSVVETFIQQCQFFFYNGEIVETTNIVAPPPPSNPGQLVEPMVPLQLPPPLQPQLIQPQLQTDPLGII

SEQ ID NO: 15245 - protein, 48 aa, Artificial Sequence
  Synthetic polypeptide
HGETPSRLKIQKKKISQGYVPKDSTVSAGIKLTKTIFKSSLIKIIISI

SEQ ID NO: 15246 - protein, 21 aa, Artificial Sequence
  Synthetic polypeptide
KYKKKKLARVMYRRTLPCQRE

SEQ ID NO: 15247 - protein, 33 aa, Artificial Sequence
  Synthetic polypeptide
PGLCTEGLYRVSGNKTDQDNIQKQFDQDHNINL

SEQ ID NO: 15248 - protein, 111 aa, Artificial Sequence
  Synthetic polypeptide
PGLCTEGLYRVSGNKTDQDNIQKQFDQDHNINLVSMEVTVNAVAGALKAFFADLPDPLIPYSLHPELLEAAKIPDKTERLHALKEIVKKFHPVNYDVFRYVITHLNRVSQQ

SEQ ID NO: 15249 - protein, 215 aa, Artificial Sequence
  Synthetic polypeptide
PGLCTEGLYRVSGNKTDQDNIQKQFDQDHNINLVSMEVTVNAVAGALKAFFADLPDPLIPYSLHPELLEAAKIPDKTERLHALKEIVKKFHPVNYDVFRYVITHLNRVSQQHKINLMTADNLSICFWPTLMRPDFENREFLSTTKIHQSVVETFIQQCQFFFYNGEIVETTNIVAPPPPSNPGQLVEPMVPLQLPPPLQPQLIQPQLQTDPLGII

SEQ ID NO: 15250 - protein, 15 aa, Artificial Sequence
  Synthetic polypeptide
ACQDILTRLFLAVLS

SEQ ID NO: 15251 - protein, 47 aa, Artificial Sequence
  Synthetic polypeptide
EAVCEYQDSDSFAREIPLLGMCYRSLCISMPRYTYKALPCSIIIISI

SEQ ID NO: 15252 - protein, 34 aa, Artificial Sequence
  Synthetic polypeptide
RNSTSRNVLQKSLHKHAKIYLQGSSLQYYHNINL

SEQ ID NO: 15253 - protein, 112 aa, Artificial Sequence
  Synthetic polypeptide
RNSTSRNVLQKSLHKHAKIYLQGSSLQYYHNINLVSMEVTVNAVAGALKAFFADLPDPLIPYSLHPELLEAAKIPDKTERLHALKEIVKKFHPVNYDVFRYVITHLNRVSQQ

SEQ ID NO: 15254 - protein, 216 aa, Artificial Sequence
  Synthetic polypeptide
RNSTSRNVLQKSLHKHAKIYLQGSSLQYYHNINLVSMEVTVNAVAGALKAFFADLPDPLIPYSLHPELLEAAKIPDKTERLHALKEIVKKFHPVNYDVFRYVITHLNRVSQQHKINLMTADNLSICFWPTLMRPDFENREFLSTTKIHQSVVETFIQQCQFFFYNGEIVETTNIVAPPPPSNPGQLVEPMVPLQLPPPLQPQLIQPQLQTDPLGII

SEQ ID NO: 15255 - protein, 7 aa, Artificial Sequence
  Synthetic polypeptide
DKRVSQQ

SEQ ID NO: 15256 - protein, 111 aa, Artificial Sequence
  Synthetic polypeptide
DKRVSQQHKINLMTADNLSICFWPTLMRPDFENREFLSTTKIHQSVVETFIQQCQFFFYNGEIVETTNIVAPPPPSNPGQLVEPMVPLQLPPPLQPQLIQPQLQTDPLGII

SEQ ID NO: 15257 - protein, 6 aa, Artificial Sequence
  Synthetic polypeptide
IKGLVS

SEQ ID NO: 15258 - protein, 11 aa, Artificial Sequence
  Synthetic polypeptide
IKGLVSNIKST

SEQ ID NO: 15259 - protein, 2 aa, Artificial Sequence
  Synthetic polypeptide
KG

SEQ ID NO: 15260 - protein, 20 aa, Artificial Sequence
  Synthetic polypeptide
IAQLRFCVTSCWSRFVTCSG

SEQ ID NO: 15261 - protein, 46 aa, Artificial Sequence
  Synthetic polypeptide
RCHMHEVFSEVPAYVNCSVKILCHQLLVQVCDLLRLKDCHLFGLSV

SEQ ID NO: 15262 - protein, 599 aa, Artificial Sequence
  Synthetic polypeptide
RCHMHEVFSEVPAYVNCSVKILCHQLLVQVCDLLRLKDCHLFGLSVIQNNEHVYMELSQKLYKYCPKEWKKEASKGIDQFGPPMIIHFRVQYYVENGRLISDRAARYYYYWHLRKQVLHSQCVLREEAYFLLAAFALQADLGNFKRNKHYGKYFEPEAYFPSWVVSKRGKDYILKHIPNMHKDQFALTASEAHLKYIKEAVRLDDVAVHYYRLYKDKREIEASLTLGLTMRGIQIFQNLDEEKQLLYDFPWTNVGKLVFVGKKFEILPDGLPSARKLIYYTGCPMRSRHLLQLLSNSHRLYMNLQPVLRHIRKLEENEEKKQYRESYISDNLDLDMDQLEKRSRASGSSAGSMKHKRLSRHSTASHSSSHTSGIEADTKPRDTGPEDSYSSSAIHRKLKTCSSMTSHGSSHTSGVESGGKDRLEEDLQDDEIEMLVDDPRDLEQMNEESLEVSPDMCIYITEDMLMSRKLNGHSGLIVKEIGSSTSSSSETVVKLRGQSTDSLPQTICRKPKTSTDRHSLSLDDIRLYQKDFLRIAGLCQDTAQSYTFGCGHELDEEGLYCNSCLAQQCINIQDAFPVKRTSKYFSLDLTHDEVPEFVV

SEQ ID NO: 15263 - protein, 607 aa, Artificial Sequence
  Synthetic polypeptide
RCHMHEVFSEVPAYVNCSVKILCHQLLVQVCDLLRLKDCHLFGLSVIQNNEHVYMELSQKLYKYCPKEWKKEASKVRQYEVTWGIDQFGPPMIIHFRVQYYVENGRLISDRAARYYYYWHLRKQVLHSQCVLREEAYFLLAAFALQADLGNFKRNKHYGKYFEPEAYFPSWVVSKRGKDYILKHIPNMHKDQFALTASEAHLKYIKEAVRLDDVAVHYYRLYKDKREIEASLTLGLTMRGIQIFQNLDEEKQLLYDFPWTNVGKLVFVGKKFEILPDGLPSARKLIYYTGCPMRSRHLLQLLSNSHRLYMNLQPVLRHIRKLEENEEKKQYRESYISDNLDLDMDQLEKRSRASGSSAGSMKHKRLSRHSTASHSSSHTSGIEADTKPRDTGPEDSYSSSAIHRKLKTCSSMTSHGSSHTSGVESGGKDRLEEDLQDDEIEMLVDDPRDLEQMNEESLEVSPDMCIYITEDMLMSRKLNGHSGLIVKEIGSSTSSSSETVVKLRGQSTDSLPQTICRKPKTSTDRHSLSLDDIRLYQKDFLRIAGLCQDTAQSYTFGCGHELDEEGLYCNSCLAQQCINIQDAFPVKRTSKYFSLDLTHDEVPEFVV

SEQ ID NO: 15264 - protein, 9 aa, Artificial Sequence
  Synthetic polypeptide
SACICELLS

SEQ ID NO: 15265 - protein, 6 aa, Artificial Sequence
  Synthetic polypeptide
KGTSVS

SEQ ID NO: 15266 - protein, 32 aa, Artificial Sequence
  Synthetic polypeptide
KGTSVSERSIQHSDGQQQHRQHSTSQEAGRAA

SEQ ID NO: 15267 - protein, 18 aa, Artificial Sequence
  Synthetic polypeptide
MWCIYTMDYSAMKRNKCF

SEQ ID NO: 15268 - protein, 21 aa, Artificial Sequence
  Synthetic polypeptide
NINVVYLYNGLFSHEKEQVFL

SEQ ID NO: 15269 - protein, 60 aa, Artificial Sequence
  Synthetic polypeptide
NINVVYLYNGLFSHEKEQVFLKDLSSTPMASNNTASIAQARKLVEQLKMEANIDRIKEVH

SEQ ID NO: 15270 - protein, 99 aa, Artificial Sequence
  Synthetic polypeptide
NINVVYLYNGLFSHEKEQVFLKDLSSTPMASNNTASIAQARKLVEQLKMEANIDRIKVSKAAADLMAYCEAHAKEDPLLTPVPASENPFREKKFFCAIL

SEQ ID NO: 15271 - protein, 43 aa, Artificial Sequence
  Synthetic polypeptide
GAFPNFTRHFSLLLPCEEGCVCFHLCRYCKFPEASPAVQNLFL

SEQ ID NO: 15272 - protein, 82 aa, Artificial Sequence
  Synthetic polypeptide
GAFPNFTRHFSLLLPCEEGCVCFHLCRYCKFPEASPAVQNLFLKDLSSTPMASNNTASIAQARKLVEQLKMEANIDRIKEVH

SEQ ID NO: 15273 - protein, 121 aa, Artificial Sequence
  Synthetic polypeptide
GAFPNFTRHFSLLLPCEEGCVCFHLCRYCKFPEASPAVQNLFLKDLSSTPMASNNTASIAQARKLVEQLKMEANIDRIKVSKAAADLMAYCEAHAKEDPLLTPVPASENPFREKKFFCAIL

SEQ ID NO: 15274 - protein, 10 aa, Artificial Sequence
  Synthetic polypeptide
GLPSRAELVS

SEQ ID NO: 15275 - protein, 36 aa, Artificial Sequence
  Synthetic polypeptide
GLPSRAELVSERSIQHSDGQQQHRQHSTSQEAGRAA

SEQ ID NO: 15276 - protein, 46 aa, Artificial Sequence
  Synthetic polypeptide
WFYKGLSPILLGTFPCCCHVKKDVFASTYAVIVNFLRPPQPCRTCF

SEQ ID NO: 15277 - protein, 29 aa, Artificial Sequence
  Synthetic polypeptide
CLLPSFKWQERQRDGEAKVTIVNSRWLCF

SEQ ID NO: 15278 - protein, 10 aa, Artificial Sequence
  Synthetic polypeptide
PLLTLGGCVS

SEQ ID NO: 15279 - protein, 36 aa, Artificial Sequence
  Synthetic polypeptide
PLLTLGGCVSERSIQHSDGQQQHRQHSTSQEAGRAA

SEQ ID NO: 15280 - protein, 5 aa, Artificial Sequence
  Synthetic polypeptide
VVVFL

SEQ ID NO: 15281 - protein, 44 aa, Artificial Sequence
  Synthetic polypeptide
VVVFLKDLSSTPMASNNTASIAQARKLVEQLKMEANIDRIKEVH

SEQ ID NO: 15282 - protein, 83 aa, Artificial Sequence
  Synthetic polypeptide
VVVFLKDLSSTPMASNNTASIAQARKLVEQLKMEANIDRIKVSKAAADLMAYCEAHAKEDPLLTPVPASENPFREKKFFCAIL

SEQ ID NO: 15283 - protein, 55 aa, Artificial Sequence
  Synthetic polypeptide
NITKGHNAWLKSQVSKAAADLMAYCEAHAKEDPLLTPVPASENPFREKKFFCAIL

SEQ ID NO: 15284 - protein, 21 aa, Artificial Sequence
  Synthetic polypeptide
RAQCLVKVTGVQGSCRFDGLL

SEQ ID NO: 15285 - protein, 10 aa, Artificial Sequence
  Synthetic polypeptide
SHRCPRQLQI

SEQ ID NO: 15286 - protein, 15 aa, Artificial Sequence
  Synthetic polypeptide
GLPSHAEPGTDHSRT

SEQ ID NO: 15287 - protein, 108 aa, Artificial Sequence
  Synthetic polypeptide
VLTRSDGFISVWHFPCLQFSLLIPCGEDPYFLFTFHHDCEFPEAFPAMRNRELITAAHELGVAHPPGYPLFTLVAKLAITLFPFGSIAYRVNLLCGLFGAVAASLLFF

SEQ ID NO: 15288 - protein, 112 aa, Artificial Sequence
  Synthetic polypeptide
VLTRSDGFISVWHFPCLQFSLLIPCGEDPYFLFTFHHDCEFPEAFPAMRNRELITAAHELGVAHPPGYPLFTLVAKLAITLFPFGSIAYRVNLLCGLFGAVAASLLFFTVFR

SEQ ID NO: 15289 - protein, 406 aa, Artificial Sequence
  Synthetic polypeptide
VLTRSDGFISVWHFPCLQFSLLIPCGEDPYFLFTFHHDCEFPEAFPAMRNRELITAAHELGVAHPPGYPLFTLVAKLAITLFPFGSIAYRVNLLCGLFGAVAASLLFFTVFRLSGSSAGGILAAGVFSFSRLTWQWSIAAEVFSLNNLFVGLLMALTVHFEEAATAKERSKVAKIGAFCCGLSLCNQHTIILYVLCIIPWILFQLLKKKELSLGSLLKLSLYFSAGLLPYVHLPISSYLNHARWTWGDQTTLQGFLTHFLREEYGTFSLAKSEIGSSMSEILLSQVTNMRTELSFNIQALAVCANICLATKDRQNPSLVWLFTGMFCIYSLFFAWRANLDISKPLFMGVVERFWMQSNAVVAVLAGIGLAAVVSETNRVLNSNGLQCLEWLSATLFVVYQIYSNYR

SEQ ID NO: 15290 - protein, 704 aa, Artificial Sequence
  Synthetic polypeptide
VLTRSDGFISVWHFPCLQFSLLIPCGEDPYFLFTFHHDCEFPEAFPAMRNRELITAAHELGVAHPPGYPLFTLVAKLAITLFPFGSIAYRVNLLCGLFGAVAASLLFFTVFRLSGSSAGGILAAGVFSFSRLTWQWSIAAEVFSLNNLFVGLLMALTVHFEEAATAKERSKVAKIGAFCCGLSLCNQHTIILYVLCIIPWILFQLLKKKELSLGSLLKLSLYFSAGLLPYVHLPISSYLNHARWTWGDQTTLQGFLTHFLREEYGTFSLAKSEIGSSMSEILLSQVTNMRTELSFNIQALAVCANICLATKDRQNPSLVWLFTGMFCIYSLFFAWRANLDISKPLFMGVVERFWMQSNAVVAVLAGIGLAAVVSETNRVLNSNGLQCLEWLSATLFVVYQIYSNYSVCDQRTNYVIDKFAKNLLTSMPHDAIILLRGDLPGNSLRYMHYCEGLRPDISLVDQEMMTYEWYLPKMAKHLPGVNFPGNRWNPVEGILPSGMVTFNLYHFLEVNKQKETFVCIGIHEGDPTWKKNYSLWPWGSCDKLVPLEIVFNPEEWIKLTKSIYNWTEEYGRFDPSSWESVANEEMWQARMKTPFFIFNLAETAHMPSKVKAQLYAQAYDLYKEIVYLQKEHPVNWHKNYAIACERMLRLQARDADPEVLLSETIRHFRLYSQKAPNDPQQADILGALKHLRKELQSLRNRKNV

SEQ ID NO: 15291 - protein, 321 aa, Artificial Sequence
  Synthetic polypeptide
VLTRSDGFISVWHFPCLQFSLLIPCGEDPYFLFTFHHDCEFPEAFPAMRNRELITAAHELGVAHPPGYPLFTLVAKLAITLFPFGSIAYRVNLLCGLFGAVAASLLFFTVFRLSGSSAGGILAAGVFSFSRLTWQWSIAAEVFSLNNLFVGLLMALTVHFEEAATAKERSKVAKIGAFCCGLSLCNQHTIILYVLCIIPWILFQLLKKKELSLGSLLKLSLYFSAGLLPYVHLPISSYLNHARWTWGDQTTLQGFLTHFLREEYGTFSLAKSEIGSSMSEILLSQVTNMRTELSFNIQALAVCANICLATKWNDSGCRAMQ

SEQ ID NO: 15292 - protein, 30 aa, Artificial Sequence
  Synthetic polypeptide
YHVEKILTSSSPSTMIVSFLRPSQPCGTGN

SEQ ID NO: 15293 - protein, 91 aa, Artificial Sequence
  Synthetic polypeptide
GAFPLSPIPCFTLHFSLLPLCEEGHVCFPLHHDWELITAAHELGVAHPPGYPLFTLVAKLAITLFPFGSIAYRVNLLCGLFGAVAASLLFF

SEQ ID NO: 15294 - protein, 95 aa, Artificial Sequence
  Synthetic polypeptide
GAFPLSPIPCFTLHFSLLPLCEEGHVCFPLHHDWELITAAHELGVAHPPGYPLFTLVAKLAITLFPFGSIAYRVNLLCGLFGAVAASLLFFTVFR

SEQ ID NO: 15295 - protein, 389 aa, Artificial Sequence
  Synthetic polypeptide
GAFPLSPIPCFTLHFSLLPLCEEGHVCFPLHHDWELITAAHELGVAHPPGYPLFTLVAKLAITLFPFGSIAYRVNLLCGLFGAVAASLLFFTVFRLSGSSAGGILAAGVFSFSRLTWQWSIAAEVFSLNNLFVGLLMALTVHFEEAATAKERSKVAKIGAFCCGLSLCNQHTIILYVLCIIPWILFQLLKKKELSLGSLLKLSLYFSAGLLPYVHLPISSYLNHARWTWGDQTTLQGFLTHFLREEYGTFSLAKSEIGSSMSEILLSQVTNMRTELSFNIQALAVCANICLATKDRQNPSLVWLFTGMFCIYSLFFAWRANLDISKPLFMGVVERFWMQSNAVVAVLAGIGLAAVVSETNRVLNSNGLQCLEWLSATLFVVYQIYSNYR

SEQ ID NO: 15296 - protein, 687 aa, Artificial Sequence
  Synthetic polypeptide
GAFPLSPIPCFTLHFSLLPLCEEGHVCFPLHHDWELITAAHELGVAHPPGYPLFTLVAKLAITLFPFGSIAYRVNLLCGLFGAVAASLLFFTVFRLSGSSAGGILAAGVFSFSRLTWQWSIAAEVFSLNNLFVGLLMALTVHFEEAATAKERSKVAKIGAFCCGLSLCNQHTIILYVLCIIPWILFQLLKKKELSLGSLLKLSLYFSAGLLPYVHLPISSYLNHARWTWGDQTTLQGFLTHFLREEYGTFSLAKSEIGSSMSEILLSQVTNMRTELSFNIQALAVCANICLATKDRQNPSLVWLFTGMFCIYSLFFAWRANLDISKPLFMGVVERFWMQSNAVVAVLAGIGLAAVVSETNRVLNSNGLQCLEWLSATLFVVYQIYSNYSVCDQRTNYVIDKFAKNLLTSMPHDAIILLRGDLPGNSLRYMHYCEGLRPDISLVDQEMMTYEWYLPKMAKHLPGVNFPGNRWNPVEGILPSGMVTFNLYHFLEVNKQKETFVCIGIHEGDPTWKKNYSLWPWGSCDKLVPLEIVFNPEEWIKLTKSIYNWTEEYGRFDPSSWESVANEEMWQARMKTPFFIFNLAETAHMPSKVKAQLYAQAYDLYKEIVYLQKEHPVNWHKNYAIACERMLRLQARDADPEVLLSETIRHFRLYSQKAPNDPQQADILGALKHLRKELQSLRNRKNV

SEQ ID NO: 15297 - protein, 304 aa, Artificial Sequence
  Synthetic polypeptide
GAFPLSPIPCFTLHFSLLPLCEEGHVCFPLHHDWELITAAHELGVAHPPGYPLFTLVAKLAITLFPFGSIAYRVNLLCGLFGAVAASLLFFTVFRLSGSSAGGILAAGVFSFSRLTWQWSIAAEVFSLNNLFVGLLMALTVHFEEAATAKERSKVAKIGAFCCGLSLCNQHTIILYVLCIIPWILFQLLKKKELSLGSLLKLSLYFSAGLLPYVHLPISSYLNHARWTWGDQTTLQGFLTHFLREEYGTFSLAKSEIGSSMSEILLSQVTNMRTELSFNIQALAVCANICLATKWNDSGCRAMQ

SEQ ID NO: 15298 - protein, 8 aa, Artificial Sequence
  Synthetic polypeptide
LGTDHSRT

SEQ ID NO: 15299 - protein, 39 aa, Artificial Sequence
  Synthetic polypeptide
WFYKGLFPSPPSPASLCTSLCCHCVKKDMFASPYTMIGN

SEQ ID NO: 15300 - protein, 3 aa, Artificial Sequence
  Synthetic polypeptide
AGN

SEQ ID NO: 15301 - protein, 62 aa, Artificial Sequence; identical to SEQ ID NO: 4601
  Synthetic polypeptide

SEQ ID NO: 15302 - protein, 66 aa, Artificial Sequence; identical to SEQ ID NO: 4367
  Synthetic polypeptide

SEQ ID NO: 15303 - protein, 360 aa, Artificial Sequence; identical to SEQ ID NO: 2328
  Synthetic polypeptide

SEQ ID NO: 15304 - protein, 658 aa, Artificial Sequence; identical to SEQ ID NO: 1822
  Synthetic polypeptide

SEQ ID NO: 15305 - protein, 275 aa, Artificial Sequence; identical to SEQ ID NO: 2584
  Synthetic polypeptide

SEQ ID NO: 15306 - protein, 15 aa, Artificial Sequence
  Synthetic polypeptide
DLLSHAELGTDHSRT

SEQ ID NO: 15307 - protein, 5 aa, Artificial Sequence
  Synthetic polypeptide
AMLSC

SEQ ID NO: 15308 - protein, 6 aa, Artificial Sequence
  Synthetic polypeptide
AMLSCS

SEQ ID NO: 15309 - protein, 2 aa, Artificial Sequence
  Synthetic polypeptide
AV

SEQ ID NO: 15310 - protein, 236 aa, Artificial Sequence
  Synthetic polypeptide
AVAKIGAFCCGLSLCNQHTIILYVLCIIPWILFQLLKKKELSLGSLLKLSLYFSAGLLPYVHLPISSYLNHARWTWGDQTTLQGFLTHFLREEYGTFSLAKSEIGSSMSEILLSQVTNMRTELSFNIQALAVCANICLATKDRQNPSLVWLFTGMFCIYSLFFAWRANLDISKPLFMGVVERFWMQSNAVVAVLAGIGLAAVVSETNRVLNSNGLQCLEWLSATLFVVYQIYSNYR

SEQ ID NO: 15311 - protein, 534 aa, Artificial Sequence
  Synthetic polypeptide
AVAKIGAFCCGLSLCNQHTIILYVLCIIPWILFQLLKKKELSLGSLLKLSLYFSAGLLPYVHLPISSYLNHARWTWGDQTTLQGFLTHFLREEYGTFSLAKSEIGSSMSEILLSQVTNMRTELSFNIQALAVCANICLATKDRQNPSLVWLFTGMFCIYSLFFAWRANLDISKPLFMGVVERFWMQSNAVVAVLAGIGLAAVVSETNRVLNSNGLQCLEWLSATLFVVYQIYSNYSVCDQRTNYVIDKFAKNLLTSMPHDAIILLRGDLPGNSLRYMHYCEGLRPDISLVDQEMMTYEWYLPKMAKHLPGVNFPGNRWNPVEGILPSGMVTFNLYHFLEVNKQKETFVCIGIHEGDPTWKKNYSLWPWGSCDKLVPLEIVFNPEEWIKLTKSIYNWTEEYGRFDPSSWESVANEEMWQARMKTPFFIFNLAETAHMPSKVKAQLYAQAYDLYKEIVYLQKEHPVNWHKNYAIACERMLRLQARDADPEVLLSETIRHFRLYSQKAPNDPQQADILGALKHLRKELQSLRNRKNV

SEQ ID NO: 15312 - protein, 151 aa, Artificial Sequence
  Synthetic polypeptide
AVAKIGAFCCGLSLCNQHTIILYVLCIIPWILFQLLKKKELSLGSLLKLSLYFSAGLLPYVHLPISSYLNHARWTWGDQTTLQGFLTHFLREEYGTFSLAKSEIGSSMSEILLSQVTNMRTELSFNIQALAVCANICLATKWNDSGCRAMQ

SEQ ID NO: 15313 - protein, 8 aa, Artificial Sequence
  Synthetic polypeptide
DLLSHAEL

SEQ ID NO: 15314 - protein, 162 aa, Artificial Sequence; identical to SEQ ID NO: 3057
  Synthetic polypeptide

SEQ ID NO: 15315 - protein, 216 aa, Artificial Sequence; identical to SEQ ID NO: 2817
  Synthetic polypeptide

SEQ ID NO: 15316 - protein, 227 aa, Artificial Sequence; identical to SEQ ID NO: 2758
  Synthetic polypeptide

SEQ ID NO: 15317 - protein, 21 aa, Artificial Sequence
  Synthetic polypeptide
GKDAVSSTKKKQSGVRITKRL

SEQ ID NO: 15318 - protein, 11 aa, Artificial Sequence
  Synthetic polypeptide
HQKETKWSQNY

SEQ ID NO: 15319 - protein, 55 aa, Artificial Sequence; identical to SEQ ID NO: 4908
  Synthetic polypeptide

SEQ ID NO: 15320 - protein, 89 aa, Artificial Sequence; identical to SEQ ID NO: 3776
  Synthetic polypeptide

SEQ ID NO: 15321 - protein, 217 aa, Artificial Sequence
  Synthetic polypeptide
EAFRYPLIYGLILIPCWCSLVCLSRIYMGMHSILDIIAGFLYTILILAVFYPFVDLIDNFNQTHKYAPFIIIGLHLALGIFSFTLDTWSTSRGDTAEILGSGAGIACGSHVTYNMGLVLDPSLDTLPLAGPPITVTLFGKAILRILIGMVFVLIIRDVMKKITIPLACKIFNIPCDDIRKARQHMEVELPYRYITYGMVGFSITFFVPYIFFFIGIS

SEQ ID NO: 15322 - protein, 24 aa, Artificial Sequence
  Synthetic polypeptide
PAESHSLKALAEDRRPSGTLLYMD

SEQ ID NO: 15323 - protein, 30 aa, Artificial Sequence
  Synthetic polypeptide
RHSLRIGGLQVPSYIWTDSYSLLVFSSLPK

SEQ ID NO: 15324 - protein, 34 aa, Artificial Sequence
  Synthetic polypeptide
DVRSASARPRPRLRSEEPLRPAAAPSENTLLYMD

SEQ ID NO: 15325 - protein, 34 aa, Artificial Sequence
  Synthetic polypeptide
EVRSPSARQPPRLRIPSYIWTDSYSLLVFSSLPK

SEQ ID NO: 15326 - protein, 214 aa, Artificial Sequence
  Synthetic polypeptide
EYPLIYGLILIPCWCSLVCLSRIYMGMHSILDIIAGFLYTILILAVFYPFVDLIDNFNQTHKYAPFIIIGLHLALGIFSFTLDTWSTSRGDTAEILGSGAGIACGSHVTYNMGLVLDPSLDTLPLAGPPITVTLFGKAILRILIGMVFVLIIRDVMKKITIPLACKIFNIPCDDIRKARQHMEVELPYRYITYGMVGFSITFFVPYIFFFIGIS

SEQ ID NO: 15327 - protein, 13 aa, Artificial Sequence
  Synthetic polypeptide
EIIYPVGSKESSH

SEQ ID NO: 15328 - protein, 4348 aa, Artificial Sequence
  Synthetic polypeptide
FQLLRRLRQEDCLNPEVQGCSEKLYTQLEAKKAAIKPLEQTECLNKTETGALVLHNIGYSAQHLDNLLQALITLKKNKESQYCVLRDFQEYLAAVESSMKALLTDKESLKVGPLDSVTYLDKIKKFIASIEKEKDSLGNLKIKWENLSNHVTDMDKKLLESQIKQLEHGWEQVEQQIQKKYSQQVVEYDEFTTLMNKVQDTEISLQQQQQHLQLRLKSPEERAGNQSMIALTTDLQATKHGFSVLKGQAELQMKRIWGEKEKKNLEDGINNLKKQWETLEPLHLEAENQIKKCDIRNKMKETILWAKNLLGELNPSIPLLPDDILSQIRKCKVTHDGILARQQSVESLAEEVKDKVPSLTTYEGSDLNNTLEDLRNQYQMLVLKSTQRSQQLEFKLEERSNFFAIIRKFQLMVQESETLIIPRVETAATEAELKHHHVTLEASQKELQEIDSGISTHLQELTNIYEELNVFERLFLEDQLKNLKIRTNRIQRFIQNTCNEVEHKIKFCRQFHEKTSALQEEADSIQRNELLLNQEVNKGVKEEIYNLKDRLTAIKCCILQVLKLKKVFDYIGLNWDFSQLDQLQTQVFEKEKELEEKIKQLDTFEEEHGKYQALLSKMRAIDLQIKKMTEVVLKAPDSSPESRRLNAQILSQRIEKAKCLCDEIIKKLNENKTFDDSFKEKEILQIKLNAEENDKLYKVLQNMVLELSPKELDEKNCQDKLETSLHVLNQIKSQLQQPLLINLEIKHIQNEKDNCEAFQEQVWAEMCSIKAVTAIEKQREENSSEASDVETKLREFEDLQMQLNTSIDLRTNVLNDAYENLTRYKEAVTRAVESITSLEAIIIPYRVDVGNPEESLEMPLRKQEELESTVAHIQDLTEKLGMISSPEAKLQLQYTLQELVSKNSAMKEAFKAQETEAERYLENYKCYRKMEEDIYTNLSKMETVLGQSMSSLPLSYREALERLEQSKALVSNLISTKEELMKLRQILRLLRLRCTENDGICLLKIVSALWEKWLSLLEAAKEWEMWCEELKQEWKFVSEEIEREAIILDNLQEELPEISKTKEAATTEELSELLDCLCQYGENVEKQQLLLTLLLQRIRSIQNVPESSGAVETVPAFQEITSMKERCNKLLQKVQKNKELVQTEIQERHSFTKEIIALKNFFQQTTTSFQNMAFQDHPEKSEQFEELQSILKKGKLTFENIMEKLRIKYSEMYTIVPAEIESQVEECRKALEDIDEKISNEVLKSSPSYAMRRKIEEINNGLHNVEKMLQQKSKNIEKAQEIQKKMWDELDLWHSKLNELDSEVQDIVEQDPGQAQEWMDNLMIPFQQYQQVSQRAECRTSQLNKATVKMEEYSDLLKSTEAWIENTSHLLANPADYDSLRTLSHHASTVQMALEDSEQKHNLLHSIFMDLEDLSIIFETDELTQSIQELSNQVTALQQKIMESLPQIQRMADDVVAIESEVKSMEKRVSKIKTILLSKEIFDFSPEEHLKHGEVILENIRPMKKTIAEIVSYQVELRLPQTGMKPLPVFQRTNQLLQDIKLLENVTQEQNELLKVVIKQTNEWDEEIENLKQILNNYSAQFSLEHMSPDQADKLPQLQGEIERMEKQILSLNQRKEDLLVDLKATVLNLHQHLKQEQEGVERDRLPAVTSEEGGVAERDASERKLNRRGSMSYLAAVEEEVEESSVKSDHDKDMEEDRASSSSGTIVQEAYGKISTSDNSMAQILTPDSLNTEQGPECSLRPNQTEEGTTPPIEADTLDSSDAQGGLEPRVEKTRPEPTEVLHACKTQVAELELWLQQANVAVEPETLNADMQQVLEQQLVGCQAMLTEIEHKVAFLLETCKDQGLGDNGATQHEAEALSLKLKTVKCNLEKVQMMLQEKHSEDQHPTILKKSSEPEHQEALQPVNLSELESIVTERPQFSRQKDFQQQQVLELKPMEQKDFIKFIEFNAKKMWPQYCQHDNDTTQESSARYPTTEELKTYTTQLEDLRQEASNLQTQENMTEEAYINLDKKLFELFLTLSQCLSSVEEMLEMPRLYREDGSGQQVHYETLALELKKLYLALSDKKGDLLKAMTWPGENTNLLLECFDNLQVCLEHTQAAAVCRSKSLKAGLDYNRSYQKADAYTVELENAESRVAKLRDEGERLHLPYALLQEVYKLEDVLDSMWGMLRARYTELSSPFVTESQQDALLQGMVELVKIGKEKLAHGHLKQTKSKVALQAQIENHKVFFQKLVADMLLIQAYSAKILPSLLQNRETFWAEQVTEVKILEEKSRQCGMKLQSLLQKWEEFDENYASLEKDLEILISTLPSVSLVEETEERLVERISFYQQIKRNIGGKHARLYQTLNEGKQLVASVSCPELEGQIAKLEEQWLSLNKKIDHELHRLQALLKHLLSYNRDSDQLTKWLESSQHTLNYWKEQSLNVSQDLDTIRSNINNFFEFSKEVDEKSSLKTAVISIGNQLLHLKETDTATLRASLAQFEQKWTMLITQLPDIQEKLHQLQMEKLPSRKAITEMISWMNNVEHQTSDEDSVHSPSSASQVKHLLQKHKEFRMEMDYKQWIVDFVNQSLLQLSTCDVESKRYERTEFAEHLGEMNRQWHRVHGMLNRKIQHLEQLLESITESENKIQILNNWLEAQEERLKTLQKPESVISVQKLLLDCQDIENQLAIKSKALDELKQSYLTLESGAVPLLEDTASRIDELFQKRSSVLTQVNQLKTSMQSVLQEWKIYDQLYDEVNMMTIRFWYCMEHSKPVVLSLETLRCQVENLQSLQDEAESSEGSWEKLQEVIGKLKGLCPSVAEIIEEKCQNTHKRWTQVNQAIADQLQKAQSLLQLWKAYSNAHGEAAARLKQQEAKFQQLANISMSGNNLAEILPPALQDIKELQHDVQKTKEAFLQNSSVLDRLPQPAESSTHMLLPGPLHSLQRAAYLEKMLLVKANEFENHVLALTAQSPDIEHLNEVSLKLPLSDVAVKTLQNMNRQWIRATATALERCSELQGIGLNEKFLYCCEKWIQLLEKIEEALKVDVANSLPELLEQQKTYKMLEAEVSINQTIADSYVTQSLQLLDTTEIENRPEFITEFSKLTDRWQNAVQGVRQRKGDVDGLNAHVARCGGASLKKQDLRYSLHTACGAALLCRSSHGANKEIHFQRRRTTCALTLEAGEKLLLTTDLKTKESVGRRISQLQDSWKDMEPQLAEMIKQFQSTVETWDQCEKKIKELKSRLQVLKAQSEDPLPELHEDLHNEKELIKVAIRKQEIEDRLNTWVVFNEKNKELCAWLVQMENKVLQTADISIEEMIEKLQKRTVGREEVPERWECETIVSGHGTEESCFLSIRKFHQGRGLHILTCQLIPQDCMEEINLFSENKLQLKQMGDQLIKASNKSRAAEIDDKLNKINDRWQHLFDVIGSSMADQTNSRWMFFQWPRGIQRTVTWPWDHLCSCASTGHTGPFHSSVLRCFEQHIEFGIYRRTYKVNKELGGDKNGQRCPIIYPHGLVQCIRLGEPLILKRVKKLKETFAFIQQLDKNMSNLRTWLARIESELSKPVVYDVCDDQEIQKRLAEQQDLQRDIEQHSAGVESVFNICDVLLHDSDACANETECDSIQQTTRSLDRRWRNICAMSMERRMKIEETWRLWQKFLDDYSRFEDWLKSAERTAACPNSSEVLYTSAKEELKRFERQIHERLTQLELINKQYRRLARENRTDTASRLKQMVHEGNQRWDNLQRRVTAVLRRLRHFTNQREEFEGTRESILVWLTEMDLQLTNVEHFSESDADDKMRQLNGFQQEITLNTNKIDQLIVFGEQLIQKSEPLDAVLIEDELEELHRYCQEGLEDEKEASENETDMEDPREIQTDSWRKRGESEEPSSPQSLCHLVAPGHERSGCETPVSVDSIPLEWDHTGDVGGSSSHEEDEEGPYYSALSGKSISDGHSWHVPDSPSCPEHHYKQMEGDRNVPPVPPASSTPYKPPYVSLNFTGSTAYVCAFDRWEMIQAQELHNKLKIKQNLQQLNSDISAITTWLKKTEAELEMLKMAKPPSDIQEIELRVKRLQEILKAFDTYKALVVSVNVSSKEFLQTESPESTELQSRLRQLSLLWEAAQGAVDSWRGGLRQSLMQCQDFHQLSQNLLLWLASAKNRRQKAHVTDPKADPRALLECRRELMQLEKELVERQPQVDMLQEISNSLLIKGHGEDCIEAEEKVHVIEKKLKQLREQVSQDLMALQGTQNPASPLPSFDEVDSGDQPPATSVPAPRAKFLYPAVQSSENYRRRGGDREQGPRQHTATALLPLKGGPGSPTPAAAPPAAAAPGLPAALLRRRLQLHSGQQLCPVLLPHAEVHQWATPHIEGIAGHSATPPA

SEQ ID NO: 15329 - protein, 4470 aa, Artificial Sequence
  Synthetic polypeptide
FQLLRRLRQEDCLNPEVQGCSEKLYTQLEAKKAAIKPLEQTECLNKTETGALVLHNIGYSAQHLDNLLQALITLKKNKESQYCVLRDFQEYLAAVESSMKALLTDKESLKVGPLDSVTYLDKIKKFIASIEKEKDSLGNLKIKWENLSNHVTDMDKKLLESQIKQLEHGWEQVEQQIQKKYSQQVVEYDEFTTLMNKVQDTEISLQQQQQHLQLRLKSPEERAGNQSMIALTTDLQATKHGFSVLKGQAELQMKRIWGEKEKKNLEDGINNLKKQWETLEPLHLEAENQIKKCDIRNKMKETILWAKNLLGELNPSIPLLPDDILSQIRKCKVTHDGILARQQSVESLAEEVKDKVPSLTTYEGSDLNNTLEDLRNQYQMLVLKSTQRSQQLEFKLEERSNFFAIIRKFQLMVQESETLIIPRVETAATEAELKHHHVTLEASQKELQEIDSGISTHLQELTNIYEELNVFERLFLEDQLKNLKIRTNRIQRFIQNTCNEVEHKIKFCRQFHEKTSALQEEADSIQRNELLLNQEVNKGVKEEIYNLKDRLTAIKCCILQVLKLKKVFDYIGLNWDFSQLDQLQTQVFEKEKELEEKIKQLDTFEEEHGKYQALLSKMRAIDLQIKKMTEVVLKAPDSSPESRRLNAQILSQRIEKAKCLCDEIIKKLNENKTFDDSFKEKEILQIKLNAEENDKLYKVLQNMVLELSPKELDEKNCQDKLETSLHVLNQIKSQLQQPLLINLEIKHIQNEKDNCEAFQEQVWAEMCSIKAVTAIEKQREENSSEASDVETKLREFEDLQMQLNTSIDLRTNVLNDAYENLTRYKEAVTRAVESITSLEAIIIPYRVDVGNPEESLEMPLRKQEELESTVAHIQDLTEKLGMISSPEAKLQLQYTLQELVSKNSAMKEAFKAQETEAERYLENYKCYRKMEEDIYTNLSKMETVLGQSMSSLPLSYREALERLEQSKALVSNLISTKEELMKLRQILRLLRLRCTENDGICLLKIVSALWEKWLSLLEAAKEWEMWCEELKQEWKFVSEEIEREAIILDNLQEELPEISKTKEAATTEELSELLDCLCQYGENVEKQQLLLTLLLQRIRSIQNVPESSGAVETVPAFQEITSMKERCNKLLQKVQKNKELVQTEIQERHSFTKEIIALKNFFQQTTTSFQNMAFQDHPEKSEQFEELQSILKKGKLTFENIMEKLRIKYSEMYTIVPAEIESQVEECRKALEDIDEKISNEVLKSSPSYAMRRKIEEINNGLHNVEKMLQQKSKNIEKAQEIQKKMWDELDLWHSKLNELDSEVQDIVEQDPGQAQEWMDNLMIPFQQYQQVSQRAECRTSQLNKATVKMEEYSDLLKSTEAWIENTSHLLANPADYDSLRTLSHHASTVQMALEDSEQKHNLLHSIFMDLEDLSIIFETDELTQSIQELSNQVTALQQKIMESLPQIQRMADDVVAIESEVKSMEKRVSKIKTILLSKEIFDFSPEEHLKHGEVILENIRPMKKTIAEIVSYQVELRLPQTGMKPLPVFQRTNQLLQDIKLLENVTQEQNELLKVVIKQTNEWDEEIENLKQILNNYSAQFSLEHMSPDQADKLPQLQGEIERMEKQILSLNQRKEDLLVDLKATVLNLHQHLKQEQEGVERDRLPAVTSEEGGVAERDASERKLNRRGSMSYLAAVEEEVEESSVKSDNGDEKAEPSPQSWSSLWKHDKDMEEDRASSSSGTIVQEAYGKISTSDNSMAQILTPDSLNTEQGPECSLRPNQTEEGTTPPIEADTLDSSDAQGGLEPRVEKTRPEPTEVLHACKTQVAELELWLQQANVAVEPETLNADMQQVLEQQLVGCQAMLTEIEHKVAFLLETCKDQGLGDNGATQHEAEALSLKLKTVKCNLEKVQMMLQEKHSEDQHPTILKKSSEPEHQEALQPVNLSELESIVTERPQFSRQKDFQQQQVLELKPMEQKDFIKFIEFNAKKMWPQYCQHDNDTTQESSASNQASSPENDVPDSILSPQGQNGDKWQYLHHELSSKIKLPLPQLVEPQVSTNMGILPSVTMYNFRYPTTEELKTYTTQLEDLRQEASNLQTQENMTEEAYINLDKKLFELFLTLSQCLSSVEEMLEMPRLYREDGSGQQVHYETLALELKKLYLALSDKKGDLLKAMTWPGENTNLLLECFDNLQVCLEHTQAAAVCRSKSLKAGLDYNRSYQNEIKRLYHQLIKSKTSLQQSLNEISGQSVAEQLQKADAYTVELENAESRVAKLRDEGERLHLPYALLQEVYKLEDVLDSMWGMLRARYTELSSPFVTESQQDALLQGMVELVKIGKEKLAHGHLKQTKSKVALQAQIENHKVFFQKLVADMLLIQAYSAKILPSLLQNRETFWAEQVTEVKILEEKSRQCGMKLQSLLQKWEEFDENYASLEKDLEILISTLPSVSLVEETEERLVERISFYQQIKRNIGGKHARLYQTLNEGKQLVASVSCPELEGQIAKLEEQWLSLNKKIDHELHRLQALLKHLLSYNRDSDQLTKWLESSQHTLNYWKEQSLNVSQDLDTIRSNINNFFEFSKEVDEKSSLKTAVISIGNQLLHLKETDTATLRASLAQFEQKWTMLITQLPDIQEKLHQLQMEKLPSRKAITEMISWMNNVEHQTSDEDSVHSPSSASQVKHLLQKHKEFRMEMDYKQWIVDFVNQSLLQLSTCDVESKRYERTEFAEHLGEMNRQWHRVHGMLNRKIQHLEQLLESITESENKIQILNNWLEAQEERLKTLQKPESVISVQKLLLDCQDIENQLAIKSKALDELKQSYLTLESGAVPLLEDTASRIDELFQKRSSVLTQVNQLKTSMQSVLQEWKIYDQLYDEVNMMTIRFWYCMEHSKPVVLSLETLRCQVENLQSLQDEAESSEGSWEKLQEVIGKLKGLCPSVAEIIEEKCQNTHKRWTQVNQAIADQLQKAQSLLQLWKAYSNAHGEAAARLKQQEAKFQQLANISMSGNNLAEILPPALQDIKELQHDVQKTKEAFLQNSSVLDRLPQPAESSTHMLLPGPLHSLQRAAYLEKMLLVKANEFEFVLSQFKDFGVRLESLKGLIMHEEENLDRLHQQEKENPDSFLNHVLALTAQSPDIEHLNEVSLKLPLSDVAVKTLQNMNRQWIRATATALERCSELQGIGLNEKFLYCCEKWIQLLEKIEEALKVDVANSLPELLEQQKTYKMLEAEVSINQTIADSYVTQSLQLLDTTEIENRPEFITEFSKLTDRWQNAVQGVRQRKGDVDGLVRQWQDFTTSVENLFRFLTDTSHLLSAVKGQERFSLYQTRSLIHELKNKEIHFQRRRTTCALTLEAGEKLLLTTDLKTKESVGRRISQLQDSWKDMEPQLAEMIKQFQSTVETWDQCEKKIKELKSRLQVLKAQSEDPLPELHEDLHNEKELIKELEQSLASWTQNLKELQTMKADLTRHVLVEDVMVLKEQIEHLHRQWEDLCLRVAIRKQEIEDRLNTWVVFNEKNKELCAWLVQMENKVLQTADISIEEMIEKLQKDCMEEINLFSENKLQLKQMGDQLIKASNKSRAAEIDDKLNKINDRWQHLFDVIGSRVKKLKETFAFIQQLDKNMSNLRTWLARIESELSKPVVYDVCDDQEIQKRLAEQQDLQRDIEQHSAGVESVFNICDVLLHDSDACANETECDSIQQTTRSLDRRWRNICAMSMERRMKIEETWRLWQKFLDDYSRFEDWLKSAERTAACPNSSEVLYTSAKEELKRFEAFQRQIHERLTQLELINKQYRRLARENRTDTASRLKQMVHEGNQRWDNLQRRVTAVLRRLRHFTNQREEFEGTRESILVWLTEMDLQLTNVEHFSESDADDKMRQLNGFQQEITLNTNKIDQLIVFGEQLIQKSEPLDAVLIEDELEELHRYCQEVFGRVSRFHRRLTSCTPGLEDEKEASENETDMEDPREIQTDSWRKRGESEEPSSPQSLCHLVAPGHERSGCETPVSVDSIPLEWDHTGDVGGSSSHEEDEEGPYYSALSDVEIPENPEAYLKMTTKTLKASSGKSISDGHSWHVPDSPSCPEHHYKQMEGDRNVPPVPPASSTPYKPPYGKLLLPPGTDGGKEGPRVLNGNPQQEDGGLAGITEQQSGAFDRWEMIQAQELHNKLKIKQNLQQLNSDISAITTWLKKTEAELEMLKMAKPPSDIQEIELRVKRLQEILKAFDTYKALVVSVNVSSKEFLQTESPESTELQSRLRQLSLLWEAAQGAVDSWRGGLRQSLMQCQDFHQLSQNLLLWLASAKNRRQKAHVTDPKADPRALLECRRELMQLEKELVERQPQVDMLQEISNSLLIKGHGEDCIEAEEKVHVIEKKLKQLREQVSQDLMALQGTQNPASPLPSFDEVDSGDQPPATSVPAPRAKFRAVRTTEGEEETESRVPGSTRPQRSFLSRVVRAALPLQLLLLLLLLLACLLPSSEEDYSCTQANNFARSFYPMLRYTNGPPPT

SEQ ID NO: 15330 - protein, 4448 aa, Artificial Sequence
  Synthetic polypeptide
FQLLRRLRQEDCLNPEVQGCSEKLYTQLEAKKAAIKPLEQTECLNKTETGALVLHNIGYSAQHLDNLLQALITLKKNKESQYCVLRDFQEYLAAVESSMKALLTDKESLKVGPLDSVTYLDKIKKFIASIEKEKDSLGNLKIKWENLSNHVTDMDKKLLESQIKQLEHGWEQVEQQIQKKYSQQVVEYDEFTTLMNKVQDTEISLQQQQQHLQLRLKSPEERAGNQSMIALTTDLQATKHGFSVLKGQAELQMKRIWGEKEKKNLEDGINNLKKQWETLEPLHLEAENQIKKCDIRNKMKETILWAKNLLGELNPSIPLLPDDILSQIRKCKVTHDGILARQQSVESLAEEVKDKVPSLTTYEGSDLNNTLEDLRNQYQMLVLKSTQRSQQLEFKLEERSNFFAIIRKFQLMVQESETLIIPRVETAATEAELKHHHVTLEASQKELQEIDSGISTHLQELTNIYEELNVFERLFLEDQLKNLKIRTNRIQRFIQNTCNEVEHKIKFCRQFHEKTSALQEEADSIQRNELLLNQEVNKGVKEEIYNLKDRLTAIKCCILQVLKLKKVFDYIGLNWDFSQLDQLQTQVFEKEKELEEKIKQLDTFEEEHGKYQALLSKMRAIDLQIKKMTEVVLKAPDSSPESRRLNAQILSQRIEKAKCLCDEIIKKLNENKTFDDSFKEKEILQIKLNAEENDKLYKVLQNMVLELSPKELDEKNCQDKLETSLHVLNQIKSQLQQPLLINLEIKHIQNEKDNCEAFQEQVWAEMCSIKAVTAIEKQREENSSEASDVETKLREFEDLQMQLNTSIDLRTNVLNDAYENLTRYKEAVTRAVESITSLEAIIIPYRVDVGNPEESLEMPLRKQEELESTVAHIQDLTEKLGMISSPEAKLQLQYTLQELVSKNSAMKEAFKAQETEAERYLENYKCYRKMEEDIYTNLSKMETVLGQSMSSLPLSYREALERLEQSKALVSNLISTKEELMKLRQILRLLRLRCTENDGICLLKIVSALWEKWLSLLEAAKEWEMWCEELKQEWKFVSEEIEREAIILDNLQEELPEISKTKEAATTEELSELLDCLCQYGENVEKQQLLLTLLLQRIRSIQNVPESSGAVETVPAFQEITSMKERCNKLLQKVQKNKELVQTEIQERHSFTKEIIALKNFFQQTTTSFQNMAFQDHPEKSEQFEELQSILKKGKLTFENIMEKLRIKYSEMYTIVPAEIESQVEECRKALEDIDEKISNEVLKSSPSYAMRRKIEEINNGLHNVEKMLQQKSKNIEKAQEIQKKMWDELDLWHSKLNELDSEVQDIVEQDPGQAQEWMDNLMIPFQQYQQVSQRAECRTSQLNKATVKMEEYSDLLKSTEAWIENTSHLLANPADYDSLRTLSHHASTVQMALEDSEQKHNLLHSIFMDLEDLSIIFETDELTQSIQELSNQVTALQQKIMESLPQIQRMADDVVAIESEVKSMEKRVSKIKTILLSKEIFDFSPEEHLKHGEVILENIRPMKKTIAEIVSYQVELRLPQTGMKPLPVFQRTNQLLQDIKLLENVTQEQNELLKVVIKQTNEWDEEIENLKQILNNYSAQFSLEHMSPDQADKLPQLQGEIERMEKQILSLNQRKEDLLVDLKATVLNLHQHLKQEQEGVERDRLPAVTSEEGGVAERDASERKLNRRGSMSYLAAVEEEVEESSVKSDNGDEKAEPSPQSWSSLWKHDKDMEEDRASSSSGTIVQEAYGKISTSDNSMAQILTPDSLNTEQGPECSLRPNQTEEGTTPPIEADTLDSSDAQGGLEPRVEKTRPEPTEVLHACKTQVAELELWLQQANVAVEPETLNADMQQVLEQQLVGCQAMLTEIEHKVAFLLETCKDQGLGDNGATQHEAEALSLKLKTVKCNLEKVQMMLQEKHSEDQHPTILKKSSEPEHQEALQPVNLSELESIVTERPQFSRQKDFQQQQVLELKPMEQKDFIKFIEFNAKKMWPQYCQHDNDTTQESSASNQASSPENDVPDSILSPQGQNGDKWQYLHHELSSKIKLPLPQLVEPQVSTNMGILPSVTMYNFRYPTTEELKTYTTQLEDLRQEASNLQTQENMTEEAYINLDKKLFELFLTLSQCLSSVEEMLEMPRLYREDGSGQQVHYETLALELKKLYLALSDKKGDLLKAMTWPGENTNLLLECFDNLQVCLEHTQAAAVCRSKSLKAGLDYNRSYQNEIKRLYHQLIKSKTSLQQSLNEISGQSVAEQLQKADAYTVELENAESRVAKLRDEGERLHLPYALLQEVYKLEDVLDSMWGMLRARYTELSSPFVTESQQDALLQGMVELVKIGKEKLAHGHLKQTKSKVALQAQIENHKVFFQKLVADMLLIQAYSAKILPSLLQNRETFWAEQVTEVKILEEKSRQCGMKLQSLLQKWEEFDENYASLEKDLEILISTLPSVSLVEETEERLVERISFYQQIKRNIGGKHARLYQTLNEGKQLVASVSCPELEGQIAKLEEQWLSLNKKIDHELHRLQALLKHLLSYNRDSDQLTKWLESSQHTLNYWKEQSLNVSQDLDTIRSNINNFFEFSKEVDEKSSLKTAVISIGNQLLHLKETDTATLRASLAQFEQKWTMLITQLPDIQEKLHQLQMEKLPSRKAITEMISWMNNVEHQTSDEDSVHSPSSASQVKHLLQKHKEFRMEMDYKQWIVDFVNQSLLQLSTCDVESKRYERTEFAEHLGEMNRQWHRVHGMLNRKIQHLEQLLESITESENKIQILNNWLEAQEERLKTLQKPESVISVQKLLLDCQDIENQLAIKSKALDELKQSYLTLESGAVPLLEDTASRIDELFQKRSSVLTQVNQLKTSMQSVLQEWKIYDQLYDEVNMMTIRFWYCMEHSKPVVLSLETLRCQVENLQSLQDEAESSEGSWEKLQEVIGKLKGLCPSVAEIIEEKCQNTHKRWTQVNQAIADQLQKAQSLLQLWKAYSNAHGEAAARLKQQEAKFQQLANISMSGNNLAEILPPALQDIKELQHDVQKTKEAFLQNSSVLDRLPQPAESSTHMLLPGPLHSLQRAAYLEKMLLVKANEFEFVLSQFKDFGVRLESLKGLIMHEEENLDRLHQQEKENPDSFLNHVLALTAQSPDIEHLNEVSLKLPLSDVAVKTLQNMNRQWIRATATALERCSELQGIGLNEKFLYCCEKWIQLLEKIEEALKVDVANSLPELLEQQKTYKMLEAEVSINQTIADSYVTQSLQLLDTTEIENRPEFITEFSKLTDRWQNAVQGVRQRKGDVDGLVRQWQDFTTSVENLFRFLTDTSHLLSAVKGQERFSLYQTRSLIHELKNKEIHFQRRRTTCALTLEAGEKLLLTTDLKTKESVGRRISQLQDSWKDMEPQLAEMIKQFQSTVETWDQCEKKIKELKSRLQVLKAQSEDPLPELHEDLHNEKELIKELEQSLASWTQNLKELQTMKADLTRHVLVEDVMVLKEQIEHLHRQWEDLCLRVAIRKQEIEDRLNTWVVFNEKNKELCAWLVQMENKVLQTADISIEEMIEKLQKDCMEEINLFSENKLQLKQMGDQLIKASNKSRAAEIDDKLNKINDRWQHLFDVIGSRVKKLKETFAFIQQLDKNMSNLRTWLARIESELSKPVVYDVCDDQEIQKRLAEQQDLQRDIEQHSAGVESVFNICDVLLHDSDACANETECDSIQQTTRSLDRRWRNICAMSMERRMKIEETWRLWQKFLDDYSRFEDWLKSAERTAACPNSSEVLYTSAKEELKRFEAFQRQIHERLTQLELINKQYRRLARENRTDTASRLKQMVHEGNQRWDNLQRRVTAVLRRLRHFTNQREEFEGTRESILVWLTEMDLQLTNVEHFSESDADDKMRQLNGFQQEITLNTNKIDQLIVFGEQLIQKSEPLDAVLIEDELEELHRYCQEVFGRVSRFHRRLTSCTPGLEDEKEASENETDMEDPREIQTDSWRKRGESEEPSSPQSLCHLVAPGHERSGCETPVSVDSIPLEWDHTGDVGGSSSHEEDEEGPYYSALSGKSISDGHSWHVPDSPSCPEHHYKQMEGDRNVPPVPPASSTPYKPPYGKLLLPPGTDGGKEGPRVLNGNPQQEDGGLAGITEQQSGAFDRWEMIQAQELHNKLKIKQNLQQLNSDISAITTWLKKTEAELEMLKMAKPPSDIQEIELRVKRLQEILKAFDTYKALVVSVNVSSKEFLQTESPESTELQSRLRQLSLLWEAAQGAVDSWRGGLRQSLMQCQDFHQLSQNLLLWLASAKNRRQKAHVTDPKADPRALLECRRELMQLEKELVERQPQVDMLQEISNSLLIKGHGEDCIEAEEKVHVIEKKLKQLREQVSQDLMALQGTQNPASPLPSFDEVDSGDQPPATSVPAPRAKQFRAVRTTEGEEETESRVPGSTRPQRSFLSRVVRAALPLQLLLLLLLLLACLLPSSEEDYSCTQANNFARSFYPMLRYTNGPPPT

SEQ ID NO: 15331 - protein, 43 aa, Artificial Sequence
  Synthetic polypeptide
TQKFKVAVRNYIPSWKQRKQPLSHWNKQNVLTKQKLGPWFSTI

SEQ ID NO: 15332 - protein, 42 aa, Artificial Sequence; identical to SEQ ID NO: 5600
  Synthetic polypeptide

SEQ ID NO: 15333 - protein, 2994 aa, Artificial Sequence; identical to SEQ ID NO: 1430
  Synthetic polypeptide

SEQ ID NO: 15334 - protein, 3116 aa, Artificial Sequence; identical to SEQ ID NO: 1425
  Synthetic polypeptide

SEQ ID NO: 15335 - protein, 3094 aa, Artificial Sequence; identical to SEQ ID NO: 1427
  Synthetic polypeptide

SEQ ID NO: 15336 - protein, 55 aa, Artificial Sequence; identical to SEQ ID NO: 4885
  Synthetic polypeptide

SEQ ID NO: 15337 - protein, 79 aa, Artificial Sequence
  Synthetic polypeptide
EDVVFNAPSWKQRTALTRHQTYQYFDPGLPSLQNWRNRTYGETDSEFEPEKRRPVGGLEGHRTKPSPAFEARTRRSRKR

SEQ ID NO: 15338 - protein, 2780 aa, Artificial Sequence
  Synthetic polypeptide
SSMRHLGNREQPSPDTKRTNTLILDFPVSRTGEIERMEKQILSLNQRKEDLLVDLKATVLNLHQHLKQEQEGVERDRLPAVTSEEGGVAERDASERKLNRRGSMSYLAAVEEEVEESSVKSDHDKDMEEDRASSSSGTIVQEAYGKISTSDNSMAQILTPDSLNTEQGPECSLRPNQTEEGTTPPIEADTLDSSDAQGGLEPRVEKTRPEPTEVLHACKTQVAELELWLQQANVAVEPETLNADMQQVLEQQLVGCQAMLTEIEHKVAFLLETCKDQGLGDNGATQHEAEALSLKLKTVKCNLEKVQMMLQEKHSEDQHPTILKKSSEPEHQEALQPVNLSELESIVTERPQFSRQKDFQQQQVLELKPMEQKDFIKFIEFNAKKMWPQYCQHDNDTTQESSARYPTTEELKTYTTQLEDLRQEASNLQTQENMTEEAYINLDKKLFELFLTLSQCLSSVEEMLEMPRLYREDGSGQQVHYETLALELKKLYLALSDKKGDLLKAMTWPGENTNLLLECFDNLQVCLEHTQAAAVCRSKSLKAGLDYNRSYQKADAYTVELENAESRVAKLRDEGERLHLPYALLQEVYKLEDVLDSMWGMLRARYTELSSPFVTESQQDALLQGMVELVKIGKEKLAHGHLKQTKSKVALQAQIENHKVFFQKLVADMLLIQAYSAKILPSLLQNRETFWAEQVTEVKILEEKSRQCGMKLQSLLQKWEEFDENYASLEKDLEILISTLPSVSLVEETEERLVERISFYQQIKRNIGGKHARLYQTLNEGKQLVASVSCPELEGQIAKLEEQWLSLNKKIDHELHRLQALLKHLLSYNRDSDQLTKWLESSQHTLNYWKEQSLNVSQDLDTIRSNINNFFEFSKEVDEKSSLKTAVISIGNQLLHLKETDTATLRASLAQFEQKWTMLITQLPDIQEKLHQLQMEKLPSRKAITEMISWMNNVEHQTSDEDSVHSPSSASQVKHLLQKHKEFRMEMDYKQWIVDFVNQSLLQLSTCDVESKRYERTEFAEHLGEMNRQWHRVHGMLNRKIQHLEQLLESITESENKIQILNNWLEAQEERLKTLQKPESVISVQKLLLDCQDIENQLAIKSKALDELKQSYLTLESGAVPLLEDTASRIDELFQKRSSVLTQVNQLKTSMQSVLQEWKIYDQLYDEVNMMTIRFWYCMEHSKPVVLSLETLRCQVENLQSLQDEAESSEGSWEKLQEVIGKLKGLCPSVAEIIEEKCQNTHKRWTQVNQAIADQLQKAQSLLQLWKAYSNAHGEAAARLKQQEAKFQQLANISMSGNNLAEILPPALQDIKELQHDVQKTKEAFLQNSSVLDRLPQPAESSTHMLLPGPLHSLQRAAYLEKMLLVKANEFENHVLALTAQSPDIEHLNEVSLKLPLSDVAVKTLQNMNRQWIRATATALERCSELQGIGLNEKFLYCCEKWIQLLEKIEEALKVDVANSLPELLEQQKTYKMLEAEVSINQTIADSYVTQSLQLLDTTEIENRPEFITEFSKLTDRWQNAVQGVRQRKGDVDGLNAHVARCGGASLKKQDLRYSLHTACGAALLCRSSHGANKEIHFQRRRTTCALTLEAGEKLLLTTDLKTKESVGRRISQLQDSWKDMEPQLAEMIKQFQSTVETWDQCEKKIKELKSRLQVLKAQSEDPLPELHEDLHNEKELIKVAIRKQEIEDRLNTWVVFNEKNKELCAWLVQMENKVLQTADISIEEMIEKLQKRTVGREEVPERWECETIVSGHGTEESCFLSIRKFHQGRGLHILTCQLIPQDCMEEINLFSENKLQLKQMGDQLIKASNKSRAAEIDDKLNKINDRWQHLFDVIGSSMADQTNSRWMFFQWPRGIQRTVTWPWDHLCSCASTGHTGPFHSSVLRCFEQHIEFGIYRRTYKVNKELGGDKNGQRCPIIYPHGLVQCIRLGEPLILKRVKKLKETFAFIQQLDKNMSNLRTWLARIESELSKPVVYDVCDDQEIQKRLAEQQDLQRDIEQHSAGVESVFNICDVLLHDSDACANETECDSIQQTTRSLDRRWRNICAMSMERRMKIEETWRLWQKFLDDYSRFEDWLKSAERTAACPNSSEVLYTSAKEELKRFERQIHERLTQLELINKQYRRLARENRTDTASRLKQMVHEGNQRWDNLQRRVTAVLRRLRHFTNQREEFEGTRESILVWLTEMDLQLTNVEHFSESDADDKMRQLNGFQQEITLNTNKIDQLIVFGEQLIQKSEPLDAVLIEDELEELHRYCQEGLEDEKEASENETDMEDPREIQTDSWRKRGESEEPSSPQSLCHLVAPGHERSGCETPVSVDSIPLEWDHTGDVGGSSSHEEDEEGPYYSALSGKSISDGHSWHVPDSPSCPEHHYKQMEGDRNVPPVPPASSTPYKPPYVSLNFTGSTAYVCAFDRWEMIQAQELHNKLKIKQNLQQLNSDISAITTWLKKTEAELEMLKMAKPPSDIQEIELRVKRLQEILKAFDTYKALVVSVNVSSKEFLQTESPESTELQSRLRQLSLLWEAAQGAVDSWRGGLRQSLMQCQDFHQLSQNLLLWLASAKNRRQKAHVTDPKADPRALLECRRELMQLEKELVERQPQVDMLQEISNSLLIKGHGEDCIEAEEKVHVIEKKLKQLREQVSQDLMALQGTQNPASPLPSFDEVDSGDQPPATSVPAPRAKFLYPAVQSSENYRRRGGDREQGPRQHTATALLPLKGGPGSPTPAAAPPAAAAPGLPAALLRRRLQLHSGQQLCPVLLPHAEVHQWATPHIEGIAGHSATPPA

SEQ ID NO: 15339 - protein, 2902 aa, Artificial Sequence
  Synthetic polypeptide
SSMRHLGNREQPSPDTKRTNTLILDFPVSRTGEIERMEKQILSLNQRKEDLLVDLKATVLNLHQHLKQEQEGVERDRLPAVTSEEGGVAERDASERKLNRRGSMSYLAAVEEEVEESSVKSDNGDEKAEPSPQSWSSLWKHDKDMEEDRASSSSGTIVQEAYGKISTSDNSMAQILTPDSLNTEQGPECSLRPNQTEEGTTPPIEADTLDSSDAQGGLEPRVEKTRPEPTEVLHACKTQVAELELWLQQANVAVEPETLNADMQQVLEQQLVGCQAMLTEIEHKVAFLLETCKDQGLGDNGATQHEAEALSLKLKTVKCNLEKVQMMLQEKHSEDQHPTILKKSSEPEHQEALQPVNLSELESIVTERPQFSRQKDFQQQQVLELKPMEQKDFIKFIEFNAKKMWPQYCQHDNDTTQESSASNQASSPENDVPDSILSPQGQNGDKWQYLHHELSSKIKLPLPQLVEPQVSTNMGILPSVTMYNFRYPTTEELKTYTTQLEDLRQEASNLQTQENMTEEAYINLDKKLFELFLTLSQCLSSVEEMLEMPRLYREDGSGQQVHYETLALELKKLYLALSDKKGDLLKAMTWPGENTNLLLECFDNLQVCLEHTQAAAVCRSKSLKAGLDYNRSYQNEIKRLYHQLIKSKTSLQQSLNEISGQSVAEQLQKADAYTVELENAESRVAKLRDEGERLHLPYALLQEVYKLEDVLDSMWGMLRARYTELSSPFVTESQQDALLQGMVELVKIGKEKLAHGHLKQTKSKVALQAQIENHKVFFQKLVADMLLIQAYSAKILPSLLQNRETFWAEQVTEVKILEEKSRQCGMKLQSLLQKWEEFDENYASLEKDLEILISTLPSVSLVEETEERLVERISFYQQIKRNIGGKHARLYQTLNEGKQLVASVSCPELEGQIAKLEEQWLSLNKKIDHELHRLQALLKHLLSYNRDSDQLTKWLESSQHTLNYWKEQSLNVSQDLDTIRSNINNFFEFSKEVDEKSSLKTAVISIGNQLLHLKETDTATLRASLAQFEQKWTMLITQLPDIQEKLHQLQMEKLPSRKAITEMISWMNNVEHQTSDEDSVHSPSSASQVKHLLQKHKEFRMEMDYKQWIVDFVNQSLLQLSTCDVESKRYERTEFAEHLGEMNRQWHRVHGMLNRKIQHLEQLLESITESENKIQILNNWLEAQEERLKTLQKPESVISVQKLLLDCQDIENQLAIKSKALDELKQSYLTLESGAVPLLEDTASRIDELFQKRSSVLTQVNQLKTSMQSVLQEWKIYDQLYDEVNMMTIRFWYCMEHSKPVVLSLETLRCQVENLQSLQDEAESSEGSWEKLQEVIGKLKGLCPSVAEIIEEKCQNTHKRWTQVNQAIADQLQKAQSLLQLWKAYSNAHGEAAARLKQQEAKFQQLANISMSGNNLAEILPPALQDIKELQHDVQKTKEAFLQNSSVLDRLPQPAESSTHMLLPGPLHSLQRAAYLEKMLLVKANEFEFVLSQFKDFGVRLESLKGLIMHEEENLDRLHQQEKENPDSFLNHVLALTAQSPDIEHLNEVSLKLPLSDVAVKTLQNMNRQWIRATATALERCSELQGIGLNEKFLYCCEKWIQLLEKIEEALKVDVANSLPELLEQQKTYKMLEAEVSINQTIADSYVTQSLQLLDTTEIENRPEFITEFSKLTDRWQNAVQGVRQRKGDVDGLVRQWQDFTTSVENLFRFLTDTSHLLSAVKGQERFSLYQTRSLIHELKNKEIHFQRRRTTCALTLEAGEKLLLTTDLKTKESVGRRISQLQDSWKDMEPQLAEMIKQFQSTVETWDQCEKKIKELKSRLQVLKAQSEDPLPELHEDLHNEKELIKELEQSLASWTQNLKELQTMKADLTRHVLVEDVMVLKEQIEHLHRQWEDLCLRVAIRKQEIEDRLNTWVVFNEKNKELCAWLVQMENKVLQTADISIEEMIEKLQKDCMEEINLFSENKLQLKQMGDQLIKASNKSRAAEIDDKLNKINDRWQHLFDVIGSRVKKLKETFAFIQQLDKNMSNLRTWLARIESELSKPVVYDVCDDQEIQKRLAEQQDLQRDIEQHSAGVESVFNICDVLLHDSDACANETECDSIQQTTRSLDRRWRNICAMSMERRMKIEETWRLWQKFLDDYSRFEDWLKSAERTAACPNSSEVLYTSAKEELKRFEAFQRQIHERLTQLELINKQYRRLARENRTDTASRLKQMVHEGNQRWDNLQRRVTAVLRRLRHFTNQREEFEGTRESILVWLTEMDLQLTNVEHFSESDADDKMRQLNGFQQEITLNTNKIDQLIVFGEQLIQKSEPLDAVLIEDELEELHRYCQEVFGRVSRFHRRLTSCTPGLEDEKEASENETDMEDPREIQTDSWRKRGESEEPSSPQSLCHLVAPGHERSGCETPVSVDSIPLEWDHTGDVGGSSSHEEDEEGPYYSALSDVEIPENPEAYLKMTTKTLKASSGKSISDGHSWHVPDSPSCPEHHYKQMEGDRNVPPVPPASSTPYKPPYGKLLLPPGTDGGKEGPRVLNGNPQQEDGGLAGITEQQSGAFDRWEMIQAQELHNKLKIKQNLQQLNSDISAITTWLKKTEAELEMLKMAKPPSDIQEIELRVKRLQEILKAFDTYKALVVSVNVSSKEFLQTESPESTELQSRLRQLSLLWEAAQGAVDSWRGGLRQSLMQCQDFHQLSQNLLLWLASAKNRRQKAHVTDPKADPRALLECRRELMQLEKELVERQPQVDMLQEISNSLLIKGHGEDCIEAEEKVHVIEKKLKQLREQVSQDLMALQGTQNPASPLPSFDEVDSGDQPPATSVPAPRAKFRAVRTTEGEEETESRVPGSTRPQRSFLSRVVRAALPLQLLLLLLLLLACLLPSSEEDYSCTQANNFARSFYPMLRYTNGPPPT

SEQ ID NO: 15340 - protein, 2880 aa, Artificial Sequence
  Synthetic polypeptide
SSMRHLGNREQPSPDTKRTNTLILDFPVSRTGEIERMEKQILSLNQRKEDLLVDLKATVLNLHQHLKQEQEGVERDRLPAVTSEEGGVAERDASERKLNRRGSMSYLAAVEEEVEESSVKSDNGDEKAEPSPQSWSSLWKHDKDMEEDRASSSSGTIVQEAYGKISTSDNSMAQILTPDSLNTEQGPECSLRPNQTEEGTTPPIEADTLDSSDAQGGLEPRVEKTRPEPTEVLHACKTQVAELELWLQQANVAVEPETLNADMQQVLEQQLVGCQAMLTEIEHKVAFLLETCKDQGLGDNGATQHEAEALSLKLKTVKCNLEKVQMMLQEKHSEDQHPTILKKSSEPEHQEALQPVNLSELESIVTERPQFSRQKDFQQQQVLELKPMEQKDFIKFIEFNAKKMWPQYCQHDNDTTQESSASNQASSPENDVPDSILSPQGQNGDKWQYLHHELSSKIKLPLPQLVEPQVSTNMGILPSVTMYNFRYPTTEELKTYTTQLEDLRQEASNLQTQENMTEEAYINLDKKLFELFLTLSQCLSSVEEMLEMPRLYREDGSGQQVHYETLALELKKLYLALSDKKGDLLKAMTWPGENTNLLLECFDNLQVCLEHTQAAAVCRSKSLKAGLDYNRSYQNEIKRLYHQLIKSKTSLQQSLNEISGQSVAEQLQKADAYTVELENAESRVAKLRDEGERLHLPYALLQEVYKLEDVLDSMWGMLRARYTELSSPFVTESQQDALLQGMVELVKIGKEKLAHGHLKQTKSKVALQAQIENHKVFFQKLVADMLLIQAYSAKILPSLLQNRETFWAEQVTEVKILEEKSRQCGMKLQSLLQKWEEFDENYASLEKDLEILISTLPSVSLVEETEERLVERISFYQQIKRNIGGKHARLYQTLNEGKQLVASVSCPELEGQIAKLEEQWLSLNKKIDHELHRLQALLKHLLSYNRDSDQLTKWLESSQHTLNYWKEQSLNVSQDLDTIRSNINNFFEFSKEVDEKSSLKTAVISIGNQLLHLKETDTATLRASLAQFEQKWTMLITQLPDIQEKLHQLQMEKLPSRKAITEMISWMNNVEHQTSDEDSVHSPSSASQVKHLLQKHKEFRMEMDYKQWIVDFVNQSLLQLSTCDVESKRYERTEFAEHLGEMNRQWHRVHGMLNRKIQHLEQLLESITESENKIQILNNWLEAQEERLKTLQKPESVISVQKLLLDCQDIENQLAIKSKALDELKQSYLTLESGAVPLLEDTASRIDELFQKRSSVLTQVNQLKTSMQSVLQEWKIYDQLYDEVNMMTIRFWYCMEHSKPVVLSLETLRCQVENLQSLQDEAESSEGSWEKLQEVIGKLKGLCPSVAEIIEEKCQNTHKRWTQVNQAIADQLQKAQSLLQLWKAYSNAHGEAAARLKQQEAKFQQLANISMSGNNLAEILPPALQDIKELQHDVQKTKEAFLQNSSVLDRLPQPAESSTHMLLPGPLHSLQRAAYLEKMLLVKANEFEFVLSQFKDFGVRLESLKGLIMHEEENLDRLHQQEKENPDSFLNHVLALTAQSPDIEHLNEVSLKLPLSDVAVKTLQNMNRQWIRATATALERCSELQGIGLNEKFLYCCEKWIQLLEKIEEALKVDVANSLPELLEQQKTYKMLEAEVSINQTIADSYVTQSLQLLDTTEIENRPEFITEFSKLTDRWQNAVQGVRQRKGDVDGLVRQWQDFTTSVENLFRFLTDTSHLLSAVKGQERFSLYQTRSLIHELKNKEIHFQRRRTTCALTLEAGEKLLLTTDLKTKESVGRRISQLQDSWKDMEPQLAEMIKQFQSTVETWDQCEKKIKELKSRLQVLKAQSEDPLPELHEDLHNEKELIKELEQSLASWTQNLKELQTMKADLTRHVLVEDVMVLKEQIEHLHRQWEDLCLRVAIRKQEIEDRLNTWVVFNEKNKELCAWLVQMENKVLQTADISIEEMIEKLQKDCMEEINLFSENKLQLKQMGDQLIKASNKSRAAEIDDKLNKINDRWQHLFDVIGSRVKKLKETFAFIQQLDKNMSNLRTWLARIESELSKPVVYDVCDDQEIQKRLAEQQDLQRDIEQHSAGVESVFNICDVLLHDSDACANETECDSIQQTTRSLDRRWRNICAMSMERRMKIEETWRLWQKFLDDYSRFEDWLKSAERTAACPNSSEVLYTSAKEELKRFEAFQRQIHERLTQLELINKQYRRLARENRTDTASRLKQMVHEGNQRWDNLQRRVTAVLRRLRHFTNQREEFEGTRESILVWLTEMDLQLTNVEHFSESDADDKMRQLNGFQQEITLNTNKIDQLIVFGEQLIQKSEPLDAVLIEDELEELHRYCQEVFGRVSRFHRRLTSCTPGLEDEKEASENETDMEDPREIQTDSWRKRGESEEPSSPQSLCHLVAPGHERSGCETPVSVDSIPLEWDHTGDVGGSSSHEEDEEGPYYSALSGKSISDGHSWHVPDSPSCPEHHYKQMEGDRNVPPVPPASSTPYKPPYGKLLLPPGTDGGKEGPRVLNGNPQQEDGGLAGITEQQSGAFDRWEMIQAQELHNKLKIKQNLQQLNSDISAITTWLKKTEAELEMLKMAKPPSDIQEIELRVKRLQEILKAFDTYKALVVSVNVSSKEFLQTESPESTELQSRLRQLSLLWEAAQGAVDSWRGGLRQSLMQCQDFHQLSQNLLLWLASAKNRRQKAHVTDPKADPRALLECRRELMQLEKELVERQPQVDMLQEISNSLLIKGHGEDCIEAEEKVHVIEKKLKQLREQVSQDLMALQGTQNPASPLPSFDEVDSGDQPPATSVPAPRAKQFRAVRTTEGEEETESRVPGSTRPQRSFLSRVVRAALPLQLLLLLLLLLACLLPSSEEDYSCTQANNFARSFYPMLRYTNGPPPT

SEQ ID NO: 15341 - protein, 19 aa, Artificial Sequence
  Synthetic polypeptide
SWTSQSPELEKSNVWRNRF

SEQ ID NO: 15342 - protein, 7 aa, Artificial Sequence
  Synthetic polypeptide
GIFKLSE

SEQ ID NO: 15343 - protein, 28 aa, Artificial Sequence
  Synthetic polypeptide
VSDSCFRNLAEDRSGINLKDLVQDPSLG

SEQ ID NO: 15344 - protein, 29 aa, Artificial Sequence
  Synthetic polypeptide
VSDSCFRNLAEDRSGINLKDLVQDPSLKP

SEQ ID NO: 15345 - protein, 684 aa, Artificial Sequence
  Synthetic polypeptide
VSDSCFRNLAEDRSGINLKDLVQDPSLLGGTISAYKIVPDEIEEIKATKEVIEREAPGMALAMLMGSLNVTPLGMLSRPVCGIRGKTLIINLPGSKKGSQECFQFILPALPHAIDLLRDAIVKVKEVHDELEDLPSPPPPLSPPPTTSPHKQTEDKGVQCEEEEEEKKDSGVASTEDSSSSHITAAAIAAKIPDSIISRGVQVLPRDTASLSTTPSESPRAQATSRLSTASCPTPKVQSRCSSKENILRASHSAVDITKVARRHRMSPFPLTSMDKAFITVLEMTPVLGTEIINYRDGMGRVLAQDVYAKDNLPPFPASVKDGYAVRAADGPGDRFIIGESQAGEQPTQTVMPGQVMRVTTGAPIPCGADAVVQVEDTELIRESDDGTEELEVRILVQARPGQDIRPIGHDIKRGECVLAKGTHMGPSEIGLLATVGVTEVEVNKFPVVAVMSTGNELLNPEDDLLPGKIRDSNRSTLLATIQEHGYPTINLGIVGDNPDDLLNALNEGISRADVIITSGGVSMGEKDYLKQVLDIDLHAQIHFGRVFMKPGLPTTFATLDIDGVRKIIFALPGNPVSAVVTCNLFVVPALRKMQGILDPRPTIIKARLSCDVKLDPRPEYHRCILTWHHQEPLPWAQSTGNQMSSRLMSMRSANGLLMLPPKTEQYVELHKGEVVDVMVIGRL

SEQ ID NO: 15346 - protein, 715 aa, Artificial Sequence
  Synthetic polypeptide
VSDSCFRNLAEDRSGINLKDLVQDPSLLGGTISAYKIVPDEIEEIKETLIDWCDEKELNLILTTGGTGFAPRDVTPEATKEVIEREAPGMALAMLMGSLNVTPLGMLSRPVCGIRGKTLIINLPGSKKGSQECFQFILPALPHAIDLLRDAIVKVKEVHDELEDLPSPPPPLSPPPTTSPHKQTEDKGVQCEEEEEEKKDSGVASTEDSSSSHITAAAIAAKIPDSIISRGVQVLPRDTASLSTTPSESPRAQATSRLSTASCPTPKVQSRCSSKENILRASHSAVDITKVARRHRMSPFPLTSMDKAFITVLEMTPVLGTEIINYRDGMGRVLAQDVYAKDNLPPFPASVKDGYAVRAADGPGDRFIIGESQAGEQPTQTVMPGQVMRVTTGAPIPCGADAVVQVEDTELIRESDDGTEELEVRILVQARPGQDIRPIGHDIKRGECVLAKGTHMGPSEIGLLATVGVTEVEVNKFPVVAVMSTGNELLNPEDDLLPGKIRDSNRSTLLATIQEHGYPTINLGIVGDNPDDLLNALNEGISRADVIITSGGVSMGEKDYLKQVLDIDLHAQIHFGRVFMKPGLPTTFATLDIDGVRKIIFALPGNPVSAVVTCNLFVVPALRKMQGILDPRPTIIKARLSCDVKLDPRPEYHRCILTWHHQEPLPWAQSTGNQMSSRLMSMRSANGLLMLPPKTEQYVELHKGEVVDVMVIGRL

SEQ ID NO: 15347 - protein, 748 aa, Artificial Sequence
  Synthetic polypeptide
VSDSCFRNLAEDRSGINLKDLVQDPSLLGGTISAYKIVPDEIEEIKETLIDWCDEKELNLILTTGGTGFAPRDVTPEATKEVIEREAPGMALAMLMGSLNVTPLGMLSRPVCGIRGKTLIINLPGSKKGSQECFQFILPALPHAIDLLRDAIVKVKEVHDELEDLPSPPPPLSPPPTTSPHKQTEDKGVQCEEEEEEKKDSGVASTEDSSSSHITAAAIAAKKHPFYTSPAVVMAHGEQPIPGLINYSHHSTDERIPDSIISRGVQVLPRDTASLSTTPSESPRAQATSRLSTASCPTPKVQSRCSSKENILRASHSAVDITKVARRHRMSPFPLTSMDKAFITVLEMTPVLGTEIINYRDGMGRVLAQDVYAKDNLPPFPASVKDGYAVRAADGPGDRFIIGESQAGEQPTQTVMPGQVMRVTTGAPIPCGADAVVQVEDTELIRESDDGTEELEVRILVQARPGQDIRPIGHDIKRGECVLAKGTHMGPSEIGLLATVGVTEVEVNKFPVVAVMSTGNELLNPEDDLLPGKIRDSNRSTLLATIQEHGYPTINLGIVGDNPDDLLNALNEGISRADVIITSGGVSMGEKDYLKQVLDIDLHAQIHFGRVFMKPGLPTTFATLDIDGVRKIIFALPGNPVSAVVTCNLFVVPALRKMQGILDPRPTIIKARLSCDVKLDPRPEYHRCILTWHHQEPLPWAQSTGNQMSSRLMSMRSANGLLMLPPKTEQYVELHKGEVVDVMVIGRL

SEQ ID NO: 15348 - protein, 761 aa, Artificial Sequence
  Synthetic polypeptide
VSDSCFRNLAEDRSGINLKDLVQDPSLLGGTISAYKIVPDEIEEIKETLIDWCDEKELNLILTTGGTGFAPRDVTPEKFPTFPFCGLQKGATKEVIEREAPGMALAMLMGSLNVTPLGMLSRPVCGIRGKTLIINLPGSKKGSQECFQFILPALPHAIDLLRDAIVKVKEVHDELEDLPSPPPPLSPPPTTSPHKQTEDKGVQCEEEEEEKKDSGVASTEDSSSSHITAAAIAAKIPDSIISRGVQVLPRDTASLSTTPSESPRAQATSRLSTASCPTPKQIRRPDESKGVASRVGSLKARLPSCSSTYSVSEVQSRCSSKENILRASHSAVDITKVARRHRMSPFPLTSMDKAFITVLEMTPVLGTEIINYRDGMGRVLAQDVYAKDNLPPFPASVKDGYAVRAADGPGDRFIIGESQAGEQPTQTVMPGQVMRVTTGAPIPCGADAVVQVEDTELIRESDDGTEELEVRILVQARPGQDIRPIGHDIKRGECVLAKGTHMGPSEIGLLATVGVTEVEVNKFPVVAVMSTGNELLNPEDDLLPGKIRDSNRSTLLATIQEHGYPTINLGIVGDNPDDLLNALNEGISRADVIITSGGVSMGEKDYLKQVLDIDLHAQIHFGRVFMKPGLPTTFATLDIDGVRKIIFALPGNPVSAVVTCNLFVVPALRKMQGILDPRPTIIKARLSCDVKLDPRPEYHRCILTWHHQEPLPWAQSTGNQMSSRLMSMRSANGLLMLPPKTEQYVELHKGEVVDVMVIGRL

SEQ ID NO: 15349 - protein, 359 aa, Artificial Sequence
  Synthetic polypeptide
VSDSCFRNLAEDRSGINLKDLVQDPSLLGGTISAYKIVPDEIEEIKKFPTFPFCGLQKGATKEVIEREAPGMALAMLMGSLNVTPLGMLSRPVCGIRGKTLIINLPGSKKGSQECFQFILPALPHAIDLLRDAIVKVKEVHDELEDLPSPPPPLSPPPTTSPHKQTEDKGVQCEEEEEEKKDSGVASTEDSSSSHITAAAIAAKKHPFYTSPAVVMAHGEQPIPGLINYSHHSTDERIPDSIISRGVQVLPRDTASLSTTPSESPRAQATSRLSTASCPTPKVQSRCSSKENILRASHSAVDITKVARRHRMSPFPLTSMDKAFITVLEMTPVLGTEIINYRGTIIFDHCPFFSSFFSK

SEQ ID NO: 15350 - protein, 665 aa, Artificial Sequence
  Synthetic polypeptide
GLPSHIKLLGGTISAYKIVPDEIEEIKATKEVIEREAPGMALAMLMGSLNVTPLGMLSRPVCGIRGKTLIINLPGSKKGSQECFQFILPALPHAIDLLRDAIVKVKEVHDELEDLPSPPPPLSPPPTTSPHKQTEDKGVQCEEEEEEKKDSGVASTEDSSSSHITAAAIAAKIPDSIISRGVQVLPRDTASLSTTPSESPRAQATSRLSTASCPTPKVQSRCSSKENILRASHSAVDITKVARRHRMSPFPLTSMDKAFITVLEMTPVLGTEIINYRDGMGRVLAQDVYAKDNLPPFPASVKDGYAVRAADGPGDRFIIGESQAGEQPTQTVMPGQVMRVTTGAPIPCGADAVVQVEDTELIRESDDGTEELEVRILVQARPGQDIRPIGHDIKRGECVLAKGTHMGPSEIGLLATVGVTEVEVNKFPVVAVMSTGNELLNPEDDLLPGKIRDSNRSTLLATIQEHGYPTINLGIVGDNPDDLLNALNEGISRADVIITSGGVSMGEKDYLKQVLDIDLHAQIHFGRVFMKPGLPTTFATLDIDGVRKIIFALPGNPVSAVVTCNLFVVPALRKMQGILDPRPTIIKARLSCDVKLDPRPEYHRCILTWHHQEPLPWAQSTGNQMSSRLMSMRSANGLLMLPPKTEQYVELHKGEVVDVMVIGRL

SEQ ID NO: 15351 - protein, 696 aa, Artificial Sequence
  Synthetic polypeptide
GLPSHIKLLGGTISAYKIVPDEIEEIKETLIDWCDEKELNLILTTGGTGFAPRDVTPEATKEVIEREAPGMALAMLMGSLNVTPLGMLSRPVCGIRGKTLIINLPGSKKGSQECFQFILPALPHAIDLLRDAIVKVKEVHDELEDLPSPPPPLSPPPTTSPHKQTEDKGVQCEEEEEEKKDSGVASTEDSSSSHITAAAIAAKIPDSIISRGVQVLPRDTASLSTTPSESPRAQATSRLSTASCPTPKVQSRCSSKENILRASHSAVDITKVARRHRMSPFPLTSMDKAFITVLEMTPVLGTEIINYRDGMGRVLAQDVYAKDNLPPFPASVKDGYAVRAADGPGDRFIIGESQAGEQPTQTVMPGQVMRVTTGAPIPCGADAVVQVEDTELIRESDDGTEELEVRILVQARPGQDIRPIGHDIKRGECVLAKGTHMGPSEIGLLATVGVTEVEVNKFPVVAVMSTGNELLNPEDDLLPGKIRDSNRSTLLATIQEHGYPTINLGIVGDNPDDLLNALNEGISRADVIITSGGVSMGEKDYLKQVLDIDLHAQIHFGRVFMKPGLPTTFATLDIDGVRKIIFALPGNPVSAVVTCNLFVVPALRKMQGILDPRPTIIKARLSCDVKLDPRPEYHRCILTWHHQEPLPWAQSTGNQMSSRLMSMRSANGLLMLPPKTEQYVELHKGEVVDVMVIGRL

SEQ ID NO: 15352 - protein, 729 aa, Artificial Sequence
  Synthetic polypeptide
GLPSHIKLLGGTISAYKIVPDEIEEIKETLIDWCDEKELNLILTTGGTGFAPRDVTPEATKEVIEREAPGMALAMLMGSLNVTPLGMLSRPVCGIRGKTLIINLPGSKKGSQECFQFILPALPHAIDLLRDAIVKVKEVHDELEDLPSPPPPLSPPPTTSPHKQTEDKGVQCEEEEEEKKDSGVASTEDSSSSHITAAAIAAKKHPFYTSPAVVMAHGEQPIPGLINYSHHSTDERIPDSIISRGVQVLPRDTASLSTTPSESPRAQATSRLSTASCPTPKVQSRCSSKENILRASHSAVDITKVARRHRMSPFPLTSMDKAFITVLEMTPVLGTEIINYRDGMGRVLAQDVYAKDNLPPFPASVKDGYAVRAADGPGDRFIIGESQAGEQPTQTVMPGQVMRVTTGAPIPCGADAVVQVEDTELIRESDDGTEELEVRILVQARPGQDIRPIGHDIKRGECVLAKGTHMGPSEIGLLATVGVTEVEVNKFPVVAVMSTGNELLNPEDDLLPGKIRDSNRSTLLATIQEHGYPTINLGIVGDNPDDLLNALNEGISRADVIITSGGVSMGEKDYLKQVLDIDLHAQIHFGRVFMKPGLPTTFATLDIDGVRKIIFALPGNPVSAVVTCNLFVVPALRKMQGILDPRPTIIKARLSCDVKLDPRPEYHRCILTWHHQEPLPWAQSTGNQMSSRLMSMRSANGLLMLPPKTEQYVELHKGEVVDVMVIGRL

SEQ ID NO: 15353 - protein, 742 aa, Artificial Sequence
  Synthetic polypeptide
GLPSHIKLLGGTISAYKIVPDEIEEIKETLIDWCDEKELNLILTTGGTGFAPRDVTPEKFPTFPFCGLQKGATKEVIEREAPGMALAMLMGSLNVTPLGMLSRPVCGIRGKTLIINLPGSKKGSQECFQFILPALPHAIDLLRDAIVKVKEVHDELEDLPSPPPPLSPPPTTSPHKQTEDKGVQCEEEEEEKKDSGVASTEDSSSSHITAAAIAAKIPDSIISRGVQVLPRDTASLSTTPSESPRAQATSRLSTASCPTPKQIRRPDESKGVASRVGSLKARLPSCSSTYSVSEVQSRCSSKENILRASHSAVDITKVARRHRMSPFPLTSMDKAFITVLEMTPVLGTEIINYRDGMGRVLAQDVYAKDNLPPFPASVKDGYAVRAADGPGDRFIIGESQAGEQPTQTVMPGQVMRVTTGAPIPCGADAVVQVEDTELIRESDDGTEELEVRILVQARPGQDIRPIGHDIKRGECVLAKGTHMGPSEIGLLATVGVTEVEVNKFPVVAVMSTGNELLNPEDDLLPGKIRDSNRSTLLATIQEHGYPTINLGIVGDNPDDLLNALNEGISRADVIITSGGVSMGEKDYLKQVLDIDLHAQIHFGRVFMKPGLPTTFATLDIDGVRKIIFALPGNPVSAVVTCNLFVVPALRKMQGILDPRPTIIKARLSCDVKLDPRPEYHRCILTWHHQEPLPWAQSTGNQMSSRLMSMRSANGLLMLPPKTEQYVELHKGEVVDVMVIGRL

SEQ ID NO: 15354 - protein, 340 aa, Artificial Sequence
  Synthetic polypeptide
GLPSHIKLLGGTISAYKIVPDEIEEIKKFPTFPFCGLQKGATKEVIEREAPGMALAMLMGSLNVTPLGMLSRPVCGIRGKTLIINLPGSKKGSQECFQFILPALPHAIDLLRDAIVKVKEVHDELEDLPSPPPPLSPPPTTSPHKQTEDKGVQCEEEEEEKKDSGVASTEDSSSSHITAAAIAAKKHPFYTSPAVVMAHGEQPIPGLINYSHHSTDERIPDSIISRGVQVLPRDTASLSTTPSESPRAQATSRLSTASCPTPKVQSRCSSKENILRASHSAVDITKVARRHRMSPFPLTSMDKAFITVLEMTPVLGTEIINYRGTIIFDHCPFFSSFFSK

SEQ ID NO: 15355 - protein, 49 aa, Artificial Sequence
  Synthetic polypeptide
KQEFPCTGSLLACSHPHIKHGLLLLAFHHDCEASPATSNCWVGLYQHTR

SEQ ID NO: 15356 - protein, 34 aa, Artificial Sequence
  Synthetic polypeptide
NMACSSLPSTMIVRPPQPHQTVGWDYISIQDSTR

SEQ ID NO: 15357 - protein, 35 aa, Artificial Sequence
  Synthetic polypeptide
DMPASPSTMIVSFLRLPQPCGNVGWDYISIQDSTR

SEQ ID NO: 15358 - protein, 665 aa, Artificial Sequence
  Synthetic polypeptide
GFPNHAEMLGGTISAYKIVPDEIEEIKATKEVIEREAPGMALAMLMGSLNVTPLGMLSRPVCGIRGKTLIINLPGSKKGSQECFQFILPALPHAIDLLRDAIVKVKEVHDELEDLPSPPPPLSPPPTTSPHKQTEDKGVQCEEEEEEKKDSGVASTEDSSSSHITAAAIAAKIPDSIISRGVQVLPRDTASLSTTPSESPRAQATSRLSTASCPTPKVQSRCSSKENILRASHSAVDITKVARRHRMSPFPLTSMDKAFITVLEMTPVLGTEIINYRDGMGRVLAQDVYAKDNLPPFPASVKDGYAVRAADGPGDRFIIGESQAGEQPTQTVMPGQVMRVTTGAPIPCGADAVVQVEDTELIRESDDGTEELEVRILVQARPGQDIRPIGHDIKRGECVLAKGTHMGPSEIGLLATVGVTEVEVNKFPVVAVMSTGNELLNPEDDLLPGKIRDSNRSTLLATIQEHGYPTINLGIVGDNPDDLLNALNEGISRADVIITSGGVSMGEKDYLKQVLDIDLHAQIHFGRVFMKPGLPTTFATLDIDGVRKIIFALPGNPVSAVVTCNLFVVPALRKMQGILDPRPTIIKARLSCDVKLDPRPEYHRCILTWHHQEPLPWAQSTGNQMSSRLMSMRSANGLLMLPPKTEQYVELHKGEVVDVMVIGRL

SEQ ID NO: 15359 - protein, 696 aa, Artificial Sequence
  Synthetic polypeptide
GFPNHAEMLGGTISAYKIVPDEIEEIKETLIDWCDEKELNLILTTGGTGFAPRDVTPEATKEVIEREAPGMALAMLMGSLNVTPLGMLSRPVCGIRGKTLIINLPGSKKGSQECFQFILPALPHAIDLLRDAIVKVKEVHDELEDLPSPPPPLSPPPTTSPHKQTEDKGVQCEEEEEEKKDSGVASTEDSSSSHITAAAIAAKIPDSIISRGVQVLPRDTASLSTTPSESPRAQATSRLSTASCPTPKVQSRCSSKENILRASHSAVDITKVARRHRMSPFPLTSMDKAFITVLEMTPVLGTEIINYRDGMGRVLAQDVYAKDNLPPFPASVKDGYAVRAADGPGDRFIIGESQAGEQPTQTVMPGQVMRVTTGAPIPCGADAVVQVEDTELIRESDDGTEELEVRILVQARPGQDIRPIGHDIKRGECVLAKGTHMGPSEIGLLATVGVTEVEVNKFPVVAVMSTGNELLNPEDDLLPGKIRDSNRSTLLATIQEHGYPTINLGIVGDNPDDLLNALNEGISRADVIITSGGVSMGEKDYLKQVLDIDLHAQIHFGRVFMKPGLPTTFATLDIDGVRKIIFALPGNPVSAVVTCNLFVVPALRKMQGILDPRPTIIKARLSCDVKLDPRPEYHRCILTWHHQEPLPWAQSTGNQMSSRLMSMRSANGLLMLPPKTEQYVELHKGEVVDVMVIGRL

SEQ ID NO: 15360 - protein, 729 aa, Artificial Sequence
  Synthetic polypeptide
GFPNHAEMLGGTISAYKIVPDEIEEIKETLIDWCDEKELNLILTTGGTGFAPRDVTPEATKEVIEREAPGMALAMLMGSLNVTPLGMLSRPVCGIRGKTLIINLPGSKKGSQECFQFILPALPHAIDLLRDAIVKVKEVHDELEDLPSPPPPLSPPPTTSPHKQTEDKGVQCEEEEEEKKDSGVASTEDSSSSHITAAAIAAKKHPFYTSPAVVMAHGEQPIPGLINYSHHSTDERIPDSIISRGVQVLPRDTASLSTTPSESPRAQATSRLSTASCPTPKVQSRCSSKENILRASHSAVDITKVARRHRMSPFPLTSMDKAFITVLEMTPVLGTEIINYRDGMGRVLAQDVYAKDNLPPFPASVKDGYAVRAADGPGDRFIIGESQAGEQPTQTVMPGQVMRVTTGAPIPCGADAVVQVEDTELIRESDDGTEELEVRILVQARPGQDIRPIGHDIKRGECVLAKGTHMGPSEIGLLATVGVTEVEVNKFPVVAVMSTGNELLNPEDDLLPGKIRDSNRSTLLATIQEHGYPTINLGIVGDNPDDLLNALNEGISRADVIITSGGVSMGEKDYLKQVLDIDLHAQIHFGRVFMKPGLPTTFATLDIDGVRKIIFALPGNPVSAVVTCNLFVVPALRKMQGILDPRPTIIKARLSCDVKLDPRPEYHRCILTWHHQEPLPWAQSTGNQMSSRLMSMRSANGLLMLPPKTEQYVELHKGEVVDVMVIGRL

SEQ ID NO: 15361 - protein, 742 aa, Artificial Sequence
  Synthetic polypeptide
GFPNHAEMLGGTISAYKIVPDEIEEIKETLIDWCDEKELNLILTTGGTGFAPRDVTPEKFPTFPFCGLQKGATKEVIEREAPGMALAMLMGSLNVTPLGMLSRPVCGIRGKTLIINLPGSKKGSQECFQFILPALPHAIDLLRDAIVKVKEVHDELEDLPSPPPPLSPPPTTSPHKQTEDKGVQCEEEEEEKKDSGVASTEDSSSSHITAAAIAAKIPDSIISRGVQVLPRDTASLSTTPSESPRAQATSRLSTASCPTPKQIRRPDESKGVASRVGSLKARLPSCSSTYSVSEVQSRCSSKENILRASHSAVDITKVARRHRMSPFPLTSMDKAFITVLEMTPVLGTEIINYRDGMGRVLAQDVYAKDNLPPFPASVKDGYAVRAADGPGDRFIIGESQAGEQPTQTVMPGQVMRVTTGAPIPCGADAVVQVEDTELIRESDDGTEELEVRILVQARPGQDIRPIGHDIKRGECVLAKGTHMGPSEIGLLATVGVTEVEVNKFPVVAVMSTGNELLNPEDDLLPGKIRDSNRSTLLATIQEHGYPTINLGIVGDNPDDLLNALNEGISRADVIITSGGVSMGEKDYLKQVLDIDLHAQIHFGRVFMKPGLPTTFATLDIDGVRKIIFALPGNPVSAVVTCNLFVVPALRKMQGILDPRPTIIKARLSCDVKLDPRPEYHRCILTWHHQEPLPWAQSTGNQMSSRLMSMRSANGLLMLPPKTEQYVELHKGEVVDVMVIGRL

SEQ ID NO: 15362 - protein, 340 aa, Artificial Sequence
  Synthetic polypeptide
GFPNHAEMLGGTISAYKIVPDEIEEIKKFPTFPFCGLQKGATKEVIEREAPGMALAMLMGSLNVTPLGMLSRPVCGIRGKTLIINLPGSKKGSQECFQFILPALPHAIDLLRDAIVKVKEVHDELEDLPSPPPPLSPPPTTSPHKQTEDKGVQCEEEEEEKKDSGVASTEDSSSSHITAAAIAAKKHPFYTSPAVVMAHGEQPIPGLINYSHHSTDERIPDSIISRGVQVLPRDTASLSTTPSESPRAQATSRLSTASCPTPKVQSRCSSKENILRASHSAVDITKVARRHRMSPFPLTSMDKAFITVLEMTPVLGTEIINYRGTIIFDHCPFFSSFFSK

SEQ ID NO: 15363 - protein, 40 aa, Artificial Sequence
  Synthetic polypeptide
VSLACRHIRHACLPLHHDCKFPEASPTMRKCWVGLYQHTR

SEQ ID NO: 15364 - protein, 56 aa, Artificial Sequence
  Synthetic polypeptide
DNRHAFNRSLQGRHQEWTRRRHRSWAKGRESWERCMDFCAPGLIFEPQQLQEHGKP

SEQ ID NO: 15365 - protein, 77 aa, Artificial Sequence
  Synthetic polypeptide
GQGQDGQLDTDKWNSSHGSTETTGMLLTDLYREGIKSGPGEDIEAGLKEEKAGNAAWTFVHQDSFLNHNSSRSMGNP

SEQ ID NO: 15366 - protein, 81 aa, Artificial Sequence
  Synthetic polypeptide
GQGQDGQLDTDKWNSSHGSTETTGMLLTDLYREGIKSGPGEDIEAGLKEEKAGNAAWTFVHQDSFLNHNSSRSMGNPDRLV

SEQ ID NO: 15367 - protein, 11 aa, Artificial Sequence
  Synthetic polypeptide
TTTAPGAWETL

SEQ ID NO: 15368 - protein, 288 aa, Artificial Sequence
  Synthetic polypeptide
TTTAPGAWETLIDWCDEKELNLILTTGGTGFAPRDVTPEATKEVIEREAPGMALAMLMGSLNVTPLGMLSRPVCGIRGKTLIINLPGSKKGSQECFQFILPALPHAIDLLRDAIVKVKEVHDELEDLPSPPPPLSPPPTTSPHKQTEDKGVQCEEEEEEKKDSGVASTEDSSSSHITAAAIAAKIPDSIISRGVQVLPRDTASLSTTPSESPRAQATSRLSTASCPTPKQIRRPDESKGVASRVGSLKVQSRCSSKENILRASHSAVDITKVARRHRMSPFPLTSMDK

SEQ ID NO: 15369 - protein, 677 aa, Artificial Sequence
  Synthetic polypeptide
TTTAPGAWETLIDWCDEKELNLILTTGGTGFAPRDVTPEATKEVIEREAPGMALAMLMGSLNVTPLGMLSRPVCGIRGKTLIINLPGSKKGSQECFQFILPALPHAIDLLRDAIVKVKEVHDELEDLPSPPPPLSPPPTTSPHKQTEDKGVQCEEEEEEKKDSGVASTEDSSSSHITAAAIAAKIPDSIISRGVQVLPRDTASLSTTPSESPRAQATSRLSTASCPTPKVQSRCSSKENILRASHSAVDITKVARRHRMSPFPLTSMDKAFITVLEMTPVLGTEIINYRDGMGRVLAQDVYAKDNLPPFPASVKDGYAVRAADGPGDRFIIGESQAGEQPTQTVMPGQVMRVTTGAPIPCGADAVVQVEDTELIRESDDGTEELEVRILVQARPGQDIRPIGHDIKRGECVLAKGTHMGPSEIGLLATVGVTEVEVNKFPVVAVMSTGNELLNPEDDLLPGKIRDSNRSTLLATIQEHGYPTINLGIVGDNPDDLLNALNEGISRADVIITSGGVSMGEKDYLKQVLDIDLHAQIHFGRVFMKPGLPTTFATLDIDGVRKIIFALPGNPVSAVVTCNLFVVPALRKMQGILDPRPTIIKARLSCDVKLDPRPEYHRCILTWHHQEPLPWAQSTGNQMSSRLMSMRSANGLLMLPPKTEQYVELHKGEVVDVMVIGRL

SEQ ID NO: 15370 - protein, 710 aa, Artificial Sequence
  Synthetic polypeptide
TTTAPGAWETLIDWCDEKELNLILTTGGTGFAPRDVTPEATKEVIEREAPGMALAMLMGSLNVTPLGMLSRPVCGIRGKTLIINLPGSKKGSQECFQFILPALPHAIDLLRDAIVKVKEVHDELEDLPSPPPPLSPPPTTSPHKQTEDKGVQCEEEEEEKKDSGVASTEDSSSSHITAAAIAAKKHPFYTSPAVVMAHGEQPIPGLINYSHHSTDERIPDSIISRGVQVLPRDTASLSTTPSESPRAQATSRLSTASCPTPKVQSRCSSKENILRASHSAVDITKVARRHRMSPFPLTSMDKAFITVLEMTPVLGTEIINYRDGMGRVLAQDVYAKDNLPPFPASVKDGYAVRAADGPGDRFIIGESQAGEQPTQTVMPGQVMRVTTGAPIPCGADAVVQVEDTELIRESDDGTEELEVRILVQARPGQDIRPIGHDIKRGECVLAKGTHMGPSEIGLLATVGVTEVEVNKFPVVAVMSTGNELLNPEDDLLPGKIRDSNRSTLLATIQEHGYPTINLGIVGDNPDDLLNALNEGISRADVIITSGGVSMGEKDYLKQVLDIDLHAQIHFGRVFMKPGLPTTFATLDIDGVRKIIFALPGNPVSAVVTCNLFVVPALRKMQGILDPRPTIIKARLSCDVKLDPRPEYHRCILTWHHQEPLPWAQSTGNQMSSRLMSMRSANGLLMLPPKTEQYVELHKGEVVDVMVIGRL

SEQ ID NO: 15371 - protein, 723 aa, Artificial Sequence
  Synthetic polypeptide
TTTAPGAWETLIDWCDEKELNLILTTGGTGFAPRDVTPEKFPTFPFCGLQKGATKEVIEREAPGMALAMLMGSLNVTPLGMLSRPVCGIRGKTLIINLPGSKKGSQECFQFILPALPHAIDLLRDAIVKVKEVHDELEDLPSPPPPLSPPPTTSPHKQTEDKGVQCEEEEEEKKDSGVASTEDSSSSHITAAAIAAKIPDSIISRGVQVLPRDTASLSTTPSESPRAQATSRLSTASCPTPKQIRRPDESKGVASRVGSLKARLPSCSSTYSVSEVQSRCSSKENILRASHSAVDITKVARRHRMSPFPLTSMDKAFITVLEMTPVLGTEIINYRDGMGRVLAQDVYAKDNLPPFPASVKDGYAVRAADGPGDRFIIGESQAGEQPTQTVMPGQVMRVTTGAPIPCGADAVVQVEDTELIRESDDGTEELEVRILVQARPGQDIRPIGHDIKRGECVLAKGTHMGPSEIGLLATVGVTEVEVNKFPVVAVMSTGNELLNPEDDLLPGKIRDSNRSTLLATIQEHGYPTINLGIVGDNPDDLLNALNEGISRADVIITSGGVSMGEKDYLKQVLDIDLHAQIHFGRVFMKPGLPTTFATLDIDGVRKIIFALPGNPVSAVVTCNLFVVPALRKMQGILDPRPTIIKARLSCDVKLDPRPEYHRCILTWHHQEPLPWAQSTGNQMSSRLMSMRSANGLLMLPPKTEQYVELHKGEVVDVMVIGRL

SEQ ID NO: 15372 - protein, 66 aa, Artificial Sequence
  Synthetic polypeptide
KSLKDYHAVQGLRPLADSEGQNQAQNRYPVEIVDGNVKMTLGMIWTIILRFAIQDISVEETSAKEG

SEQ ID NO: 15373 - protein, 67 aa, Artificial Sequence
  Synthetic polypeptide
KSLKDYHAVQGLRPLADSEGQNQAQNRYPVEIVDGNVKMTLGMIWTIILRFAIQDISVEETSAKEGL

SEQ ID NO: 15374 - protein, 126 aa, Artificial Sequence
  Synthetic polypeptide
KSLKDYHAVQGLRPLADSEGQNQAQNRYPVEIVDGNVKMTLGMIWTIILRFAIQDISVEETSAKEGLLLWCQRKTAPYKNVNIQNFHISWKDGLGFCALIHRHRPELIDYGKLRKDDPLTNLNTAF

SEQ ID NO: 15375 - protein, 198 aa, Artificial Sequence
  Synthetic polypeptide
KSLKDYHAVQGLRPLADSEGQNQAQNRYPVEIVDGNVKMTLGMIWTIILRFAIQDISVEETSAKEGLLLWCQRKTAPYKNVNIQNFHISWKDGLGFCALIHRHRPELIDYGKLRKDDPLTNLNTAFDVAEKYLDIPKMLDAEDIVGTARPDEKAIMTYVSSFYHAFSGAQKAETAANRICKVLAVNQENEQLMEDYEK

SEQ ID NO: 15376 - protein, 220 aa, Artificial Sequence
  Synthetic polypeptide
KSLKDYHAVQGLRPLADSEGQNQAQNRYPVEIVDGNVKMTLGMIWTIILRFAIQDISVEETSAKEGLLLWCQRKTAPYKNVNIQNFHISWKDGLGFCALIHRHRPELIDYGKLRKDDPLTNLNTAFDVAEKYLDIPKMLDAEDIVGTARPDEKAIMTYVSSFYHAFSGAQKAETAANRICKVLAVNQENEQLMEDYEKLASDLLEWIRRTIPWLENRVPE

SEQ ID NO: 15377 - protein, 809 aa, Artificial Sequence
  Synthetic polypeptide
KSLKDYHAVQGLRPLADSEGQNQAQNRYPVEIVDGNVKMTLGMIWTIILRFAIQDISVEETSAKEGLLLWCQRKTAPYKNVNIQNFHISWKDGLGFCALIHRHRPELIDYGKLRKDDPLTNLNTAFDVAEKYLDIPKMLDAEDIVGTARPDEKAIMTYVSSFYHAFSGAQKAETAANRICKVLAVNQENEQLMEDYEKLASDLLEWIRRTIPWLENRVPENTMHAMQQKLEDFRDYRRLHKPPKVQEKCQLEINFNTLQTKLRLSNRPAFMPSEGRMVSDINNAWGCLEQVEKGYEEWLLNEIRRLERLDHLAEKFRQKASIHEAWTDGKEAMLRQKDYETATLSEIKALLKKHEAFESDLAAHQDRVEQIAAIAQELNELDYYDSPSVNARCQKICDQWDNLGALTQKRREALERTEKLLETIDQLYLEYAKRAAPFNNWMEGAMEDLQDTFIVHTIEEIQGLTTAHEQFKATLPDADKERLAILGIHNEVSKIVQTYHVNMAGTNPYTTITPQEINGKWDHVRQLVPRRDQALTEEHARQQHNERLRKQFGAQANVIGPWIQTKMEEIGRISIEMHGTLEDQLSHLRQYEKSIVNYKPKIDQLEGDHQLIQEALIFDNKHTNYTMEHIRVGWEQLLTTIARTINEVENQILTRDAKGISQEQMNEFRASFNHFDRDHSGTLGPEEFKACLISLGYDIGNDPQGEAEFARIMSIVDPNRLGVVTFQAFIDFMSRETADTDTADQVMASFKILAGDKNYITMDELRRELPPDQAEYCIARMAPYTGPDSVPGALDYMSFSTALYGESDL

SEQ ID NO: 15378 - protein, 831 aa, Artificial Sequence
  Synthetic polypeptide
KSLKDYHAVQGLRPLADSEGQNQAQNRYPVEIVDGNVKMTLGMIWTIILRFAIQDISVEETSAKEGLLLWCQRKTAPYKNVNIQNFHISWKDGLGFCALIHRHRPELIDYGKLRKDDPLTNLNTAFDVAEKYLDIPKMLDAEDIVGTARPDEKAIMTYVSSFYHAFSGAQKAETAANRICKVLAVNQENEQLMEDYEKLASDLLEWIRRTIPWLENRVPENTMHAMQQKLEDFRDYRRLHKPPKVQEKCQLEINFNTLQTKLRLSNRPAFMPSEGRMVSDINNAWGCLEQVEKGYEEWLLNEIRRLERLDHLAEKFRQKASIHEAWTDGKEAMLRQKDYETATLSEIKALLKKHEAFESDLAAHQDRVEQIAAIAQELNELDYYDSPSVNARCQKICDQWDNLGALTQKRREALERTEKLLETIDQLYLEYAKRAAPFNNWMEGAMEDLQDTFIVHTIEEIQGLTTAHEQFKATLPDADKERLAILGIHNEVSKIVQTYHVNMAGTNPYTTITPQEINGKWDHVRQLVPRRDQALTEEHARQQHNERLRKQFGAQANVIGPWIQTKMEEIGRISIEMHGTLEDQLSHLRQYEKSIVNYKPKIDQLEGDHQLIQEALIFDNKHTNYTMEHIRVGWEQLLTTIARTINEVENQILTRDAKGISQEQMNEFRASFNHFDRDHSGTLGPEEFKACLISLGYDIGNDPQKKTGMMDTDDFRACLISMGYNMGEAEFARIMSIVDPNRLGVVTFQAFIDFMSRETADTDTADQVMASFKILAGDKNYITMDELRRELPPDQAEYCIARMAPYTGPDSVPGALDYMSFSTALYGESDL

SEQ ID NO: 15379 - protein, 847 aa, Artificial Sequence
  Synthetic polypeptide
KSLKDYHAVQGLRPLADSEGQNQAQNRYPVEIVDGNVKMTLGMIWTIILRFAIQDISVEETSAKEGLLLWCQRKTAPYKNVNIQNFHISWKDGLGFCALIHRHRPELIDYGKLRKDDPLTNLNTAFDVAEKYLDIPKMLDAEDIVGTARPDEKAIMTYVSSFYHAFSGAQKAETAANRICKVLAVNQENEQLMEDYEKLASDLLEWIRRTIPWLENRVPENTMHAMQQKLEDFRDYRRLHKPPKVQEKCQLEINFNTLQTKLRLSNRPAFMPSEGRMVSDINNAWGCLEQVEKGYEEWLLNEIRRLERLDHLAEKFRQKASIHEAWTDGKEAMLRQKDYETATLSEIKALLKKHEAFESDLAAHQDRVEQIAAIAQELNELDYYDSPSVNARCQKICDQWDNLGALTQKRREALERTEKLLETIDQLYLEYAKRAAPFNNWMEGAMEDLQDTFIVHTIEEIQGLTTAHEQFKATLPDADKERLAILGIHNEVSKIVQTYHVNMAGTNPYTTITPQEINGKWDHVRQLVPRRDQALTEEHARQQHNERLRKQFGAQANVIGPWIQTKMEEIGRISIEMHGTLEDQLSHLRQYEKSIVNYKPKIDQLEGDHQLIQEALIFDNKHTNYTMEHIRVGWEQLLTTIARTINEVENQILTRDAKGISQEQMNEFRASFNHFDRKKTGMMDTDDFRACLISMGYNMGEAEFARIMSIVDPNRLGVVTFQAFIDFMSRETADTDTADQVMASFKILAGDKLQEGGKMQTAHAAFTPPGFAAVSGRAALRLLDFAAFLTTLSSQNYITMDELRRELPPDQAEYCIARMAPYTGPDSVPGALDYMSFSTALYGESDL

SEQ ID NO: 15380 - protein, 804 aa, Artificial Sequence
  Synthetic polypeptide
KSLKDYHAVQGLRPLADSEGQNQAQNRYPVEIVDGNVKMTLGMIWTIILRFAIQDISVEETSAKEGLLLWCQRKTAPYKNVNIQNFHISWKDGLGFCALIHRHRPELIDYGKLRKDDPLTNLNTAFDVAEKYLDIPKMLDAEDIVGTARPDEKAIMTYVSSFYHAFSGAQKAETAANRICKVLAVNQENEQLMEDYEKLASDLLEWIRRTIPWLENRVPENTMHAMQQKLEDFRDYRRLHKPPKVQEKCQLEINFNTLQTKLRLSNRPAFMPSEGRMVSDINNAWGCLEQVEKGYEEWLLNEIRRLERLDHLAEKFRQKASIHEAWTDGKEAMLRQKDYETATLSEIKALLKKHEAFESDLAAHQDRVEQIAAIAQELNELDYYDSPSVNARCQKICDQWDNLGALTQKRREALERTEKLLETIDQLYLEYAKRAAPFNNWMEGAMEDLQDTFIVHTIEEIQGLTTAHEQFKATLPDADKERLAILGIHNEVSKIVQTYHVNMAGTNPYTTITPQEINGKWDHVRQLVPRRDQALTEEHARQQHNERLRKQFGAQANVIGPWIQTKMEEIGRISIEMHGTLEDQLSHLRQYEKSIVNYKPKIDQLEGDHQLIQEALIFDNKHTNYTMEHIRVGWEQLLTTIARTINEVENQILTRDAKGISQEQMNEFRASFNHFDRKKTGMMDTDDFRACLISMGYNMGEAEFARIMSIVDPNRLGVVTFQAFIDFMSRETADTDTADQVMASFKILAGDKNYITMDELRRELPPDQAEYCIARMAPYTGPDSVPGALDYMSFSTALYGESDL

SEQ ID NO: 15381 - protein, 39 aa, Artificial Sequence
  Synthetic polypeptide
VPCRNRGWECEDDPGHDLDHHPALCHPGHLRGRDFSQGR

SEQ ID NO: 15382 - protein, 40 aa, Artificial Sequence
  Synthetic polypeptide
VPCRNRGWECEDDPGHDLDHHPALCHPGHLRGRDFSQGRA

SEQ ID NO: 15383 - protein, 81 aa, Artificial Sequence
  Synthetic polypeptide
VPCRNRGWECEDDPGHDLDHHPALCHPGHLRGRDFSQGRAAPVVSEKDSPLQKCQHPELPHKLEGWPRLLCFDPPTPARAD

SEQ ID NO: 15384 - protein, 29 aa, Artificial Sequence
  Synthetic polypeptide
NFGIRNWRWGPAICILTSPPGDSDIHGMV

SEQ ID NO: 15385 - protein, 45 aa, Artificial Sequence
  Synthetic polypeptide
QALQVILTFTAWCNSHLRKAGTQIENIEEDFRDGLKLMLLLEVIS

SEQ ID NO: 15386 - protein, 121 aa, Artificial Sequence
  Synthetic polypeptide
QALQVILTFTAWCNSHLRKAGTQIENIEEDFRDGLKLMLLLEVISGERLAKPERGKMRVHKISNVNKALDFIASKGVKLVSIGAEEIVDGNVKMTLGMIWTIILRFAIQDISVEETSAKEG

SEQ ID NO: 15387 - protein, 253 aa, Artificial Sequence
  Synthetic polypeptide
QALQVILTFTAWCNSHLRKAGTQIENIEEDFRDGLKLMLLLEVISGERLAKPERGKMRVHKISNVNKALDFIASKGVKLVSIGAEEIVDGNVKMTLGMIWTIILRFAIQDISVEETSAKEGLLLWCQRKTAPYKNVNIQNFHISWKDGLGFCALIHRHRPELIDYGKLRKDDPLTNLNTAFDVAEKYLDIPKMLDAEDIVGTARPDEKAIMTYVSSFYHAFSGAQKAETAANRICKVLAVNQENEQLMEDYEK

SEQ ID NO: 15388 - protein, 864 aa, Artificial Sequence
  Synthetic polypeptide
QALQVILTFTAWCNSHLRKAGTQIENIEEDFRDGLKLMLLLEVISGERLAKPERGKMRVHKISNVNKALDFIASKGVKLVSIGAEEIVDGNVKMTLGMIWTIILRFAIQDISVEETSAKEGLLLWCQRKTAPYKNVNIQNFHISWKDGLGFCALIHRHRPELIDYGKLRKDDPLTNLNTAFDVAEKYLDIPKMLDAEDIVGTARPDEKAIMTYVSSFYHAFSGAQKAETAANRICKVLAVNQENEQLMEDYEKLASDLLEWIRRTIPWLENRVPENTMHAMQQKLEDFRDYRRLHKPPKVQEKCQLEINFNTLQTKLRLSNRPAFMPSEGRMVSDINNAWGCLEQVEKGYEEWLLNEIRRLERLDHLAEKFRQKASIHEAWTDGKEAMLRQKDYETATLSEIKALLKKHEAFESDLAAHQDRVEQIAAIAQELNELDYYDSPSVNARCQKICDQWDNLGALTQKRREALERTEKLLETIDQLYLEYAKRAAPFNNWMEGAMEDLQDTFIVHTIEEIQGLTTAHEQFKATLPDADKERLAILGIHNEVSKIVQTYHVNMAGTNPYTTITPQEINGKWDHVRQLVPRRDQALTEEHARQQHNERLRKQFGAQANVIGPWIQTKMEEIGRISIEMHGTLEDQLSHLRQYEKSIVNYKPKIDQLEGDHQLIQEALIFDNKHTNYTMEHIRVGWEQLLTTIARTINEVENQILTRDAKGISQEQMNEFRASFNHFDRDHSGTLGPEEFKACLISLGYDIGNDPQGEAEFARIMSIVDPNRLGVVTFQAFIDFMSRETADTDTADQVMASFKILAGDKNYITMDELRRELPPDQAEYCIARMAPYTGPDSVPGALDYMSFSTALYGESDL

SEQ ID NO: 15389 - protein, 886 aa, Artificial Sequence
  Synthetic polypeptide
QALQVILTFTAWCNSHLRKAGTQIENIEEDFRDGLKLMLLLEVISGERLAKPERGKMRVHKISNVNKALDFIASKGVKLVSIGAEEIVDGNVKMTLGMIWTIILRFAIQDISVEETSAKEGLLLWCQRKTAPYKNVNIQNFHISWKDGLGFCALIHRHRPELIDYGKLRKDDPLTNLNTAFDVAEKYLDIPKMLDAEDIVGTARPDEKAIMTYVSSFYHAFSGAQKAETAANRICKVLAVNQENEQLMEDYEKLASDLLEWIRRTIPWLENRVPENTMHAMQQKLEDFRDYRRLHKPPKVQEKCQLEINFNTLQTKLRLSNRPAFMPSEGRMVSDINNAWGCLEQVEKGYEEWLLNEIRRLERLDHLAEKFRQKASIHEAWTDGKEAMLRQKDYETATLSEIKALLKKHEAFESDLAAHQDRVEQIAAIAQELNELDYYDSPSVNARCQKICDQWDNLGALTQKRREALERTEKLLETIDQLYLEYAKRAAPFNNWMEGAMEDLQDTFIVHTIEEIQGLTTAHEQFKATLPDADKERLAILGIHNEVSKIVQTYHVNMAGTNPYTTITPQEINGKWDHVRQLVPRRDQALTEEHARQQHNERLRKQFGAQANVIGPWIQTKMEEIGRISIEMHGTLEDQLSHLRQYEKSIVNYKPKIDQLEGDHQLIQEALIFDNKHTNYTMEHIRVGWEQLLTTIARTINEVENQILTRDAKGISQEQMNEFRASFNHFDRDHSGTLGPEEFKACLISLGYDIGNDPQKKTGMMDTDDFRACLISMGYNMGEAEFARIMSIVDPNRLGVVTFQAFIDFMSRETADTDTADQVMASFKILAGDKNYITMDELRRELPPDQAEYCIARMAPYTGPDSVPGALDYMSFSTALYGESDL

SEQ ID NO: 15390 - protein, 902 aa, Artificial Sequence
  Synthetic polypeptide
QALQVILTFTAWCNSHLRKAGTQIENIEEDFRDGLKLMLLLEVISGERLAKPERGKMRVHKISNVNKALDFIASKGVKLVSIGAEEIVDGNVKMTLGMIWTIILRFAIQDISVEETSAKEGLLLWCQRKTAPYKNVNIQNFHISWKDGLGFCALIHRHRPELIDYGKLRKDDPLTNLNTAFDVAEKYLDIPKMLDAEDIVGTARPDEKAIMTYVSSFYHAFSGAQKAETAANRICKVLAVNQENEQLMEDYEKLASDLLEWIRRTIPWLENRVPENTMHAMQQKLEDFRDYRRLHKPPKVQEKCQLEINFNTLQTKLRLSNRPAFMPSEGRMVSDINNAWGCLEQVEKGYEEWLLNEIRRLERLDHLAEKFRQKASIHEAWTDGKEAMLRQKDYETATLSEIKALLKKHEAFESDLAAHQDRVEQIAAIAQELNELDYYDSPSVNARCQKICDQWDNLGALTQKRREALERTEKLLETIDQLYLEYAKRAAPFNNWMEGAMEDLQDTFIVHTIEEIQGLTTAHEQFKATLPDADKERLAILGIHNEVSKIVQTYHVNMAGTNPYTTITPQEINGKWDHVRQLVPRRDQALTEEHARQQHNERLRKQFGAQANVIGPWIQTKMEEIGRISIEMHGTLEDQLSHLRQYEKSIVNYKPKIDQLEGDHQLIQEALIFDNKHTNYTMEHIRVGWEQLLTTIARTINEVENQILTRDAKGISQEQMNEFRASFNHFDRKKTGMMDTDDFRACLISMGYNMGEAEFARIMSIVDPNRLGVVTFQAFIDFMSRETADTDTADQVMASFKILAGDKLQEGGKMQTAHAAFTPPGFAAVSGRAALRLLDFAAFLTTLSSQNYITMDELRRELPPDQAEYCIARMAPYTGPDSVPGALDYMSFSTALYGESDL

SEQ ID NO: 15391 - protein, 859 aa, Artificial Sequence
  Synthetic polypeptide
QALQVILTFTAWCNSHLRKAGTQIENIEEDFRDGLKLMLLLEVISGERLAKPERGKMRVHKISNVNKALDFIASKGVKLVSIGAEEIVDGNVKMTLGMIWTIILRFAIQDISVEETSAKEGLLLWCQRKTAPYKNVNIQNFHISWKDGLGFCALIHRHRPELIDYGKLRKDDPLTNLNTAFDVAEKYLDIPKMLDAEDIVGTARPDEKAIMTYVSSFYHAFSGAQKAETAANRICKVLAVNQENEQLMEDYEKLASDLLEWIRRTIPWLENRVPENTMHAMQQKLEDFRDYRRLHKPPKVQEKCQLEINFNTLQTKLRLSNRPAFMPSEGRMVSDINNAWGCLEQVEKGYEEWLLNEIRRLERLDHLAEKFRQKASIHEAWTDGKEAMLRQKDYETATLSEIKALLKKHEAFESDLAAHQDRVEQIAAIAQELNELDYYDSPSVNARCQKICDQWDNLGALTQKRREALERTEKLLETIDQLYLEYAKRAAPFNNWMEGAMEDLQDTFIVHTIEEIQGLTTAHEQFKATLPDADKERLAILGIHNEVSKIVQTYHVNMAGTNPYTTITPQEINGKWDHVRQLVPRRDQALTEEHARQQHNERLRKQFGAQANVIGPWIQTKMEEIGRISIEMHGTLEDQLSHLRQYEKSIVNYKPKIDQLEGDHQLIQEALIFDNKHTNYTMEHIRVGWEQLLTTIARTINEVENQILTRDAKGISQEQMNEFRASFNHFDRKKTGMMDTDDFRACLISMGYNMGEAEFARIMSIVDPNRLGVVTFQAFIDFMSRETADTDTADQVMASFKILAGDKNYITMDELRRELPPDQAEYCIARMAPYTGPDSVPGALDYMSFSTALYGESDL

SEQ ID NO: 15392 - protein, 77 aa, Artificial Sequence
  Synthetic polypeptide
RDCRVLGRTQLWSQQHWCGGKLCCLTCCVLELVLILSLSFFLCKKTICLAELLPRLNEMMDVNHPSWHPIPDIHGMV

SEQ ID NO: 15393 - protein, 47 aa, Artificial Sequence
  Synthetic polypeptide
TTQAGIPYLTFTAWCNSHLRKAGTQIENIEEDFRDGLKLMLLLEVIS

SEQ ID NO: 15394 - protein, 123 aa, Artificial Sequence
  Synthetic polypeptide
TTQAGIPYLTFTAWCNSHLRKAGTQIENIEEDFRDGLKLMLLLEVISGERLAKPERGKMRVHKISNVNKALDFIASKGVKLVSIGAEEIVDGNVKMTLGMIWTIILRFAIQDISVEETSAKEG

SEQ ID NO: 15395 - protein, 255 aa, Artificial Sequence
  Synthetic polypeptide
TTQAGIPYLTFTAWCNSHLRKAGTQIENIEEDFRDGLKLMLLLEVISGERLAKPERGKMRVHKISNVNKALDFIASKGVKLVSIGAEEIVDGNVKMTLGMIWTIILRFAIQDISVEETSAKEGLLLWCQRKTAPYKNVNIQNFHISWKDGLGFCALIHRHRPELIDYGKLRKDDPLTNLNTAFDVAEKYLDIPKMLDAEDIVGTARPDEKAIMTYVSSFYHAFSGAQKAETAANRICKVLAVNQENEQLMEDYEK

SEQ ID NO: 15396 - protein, 866 aa, Artificial Sequence
  Synthetic polypeptide
TTQAGIPYLTFTAWCNSHLRKAGTQIENIEEDFRDGLKLMLLLEVISGERLAKPERGKMRVHKISNVNKALDFIASKGVKLVSIGAEEIVDGNVKMTLGMIWTIILRFAIQDISVEETSAKEGLLLWCQRKTAPYKNVNIQNFHISWKDGLGFCALIHRHRPELIDYGKLRKDDPLTNLNTAFDVAEKYLDIPKMLDAEDIVGTARPDEKAIMTYVSSFYHAFSGAQKAETAANRICKVLAVNQENEQLMEDYEKLASDLLEWIRRTIPWLENRVPENTMHAMQQKLEDFRDYRRLHKPPKVQEKCQLEINFNTLQTKLRLSNRPAFMPSEGRMVSDINNAWGCLEQVEKGYEEWLLNEIRRLERLDHLAEKFRQKASIHEAWTDGKEAMLRQKDYETATLSEIKALLKKHEAFESDLAAHQDRVEQIAAIAQELNELDYYDSPSVNARCQKICDQWDNLGALTQKRREALERTEKLLETIDQLYLEYAKRAAPFNNWMEGAMEDLQDTFIVHTIEEIQGLTTAHEQFKATLPDADKERLAILGIHNEVSKIVQTYHVNMAGTNPYTTITPQEINGKWDHVRQLVPRRDQALTEEHARQQHNERLRKQFGAQANVIGPWIQTKMEEIGRISIEMHGTLEDQLSHLRQYEKSIVNYKPKIDQLEGDHQLIQEALIFDNKHTNYTMEHIRVGWEQLLTTIARTINEVENQILTRDAKGISQEQMNEFRASFNHFDRDHSGTLGPEEFKACLISLGYDIGNDPQGEAEFARIMSIVDPNRLGVVTFQAFIDFMSRETADTDTADQVMASFKILAGDKNYITMDELRRELPPDQAEYCIARMAPYTGPDSVPGALDYMSFSTALYGESDL

SEQ ID NO: 15397 - protein, 888 aa, Artificial Sequence
  Synthetic polypeptide
TTQAGIPYLTFTAWCNSHLRKAGTQIENIEEDFRDGLKLMLLLEVISGERLAKPERGKMRVHKISNVNKALDFIASKGVKLVSIGAEEIVDGNVKMTLGMIWTIILRFAIQDISVEETSAKEGLLLWCQRKTAPYKNVNIQNFHISWKDGLGFCALIHRHRPELIDYGKLRKDDPLTNLNTAFDVAEKYLDIPKMLDAEDIVGTARPDEKAIMTYVSSFYHAFSGAQKAETAANRICKVLAVNQENEQLMEDYEKLASDLLEWIRRTIPWLENRVPENTMHAMQQKLEDFRDYRRLHKPPKVQEKCQLEINFNTLQTKLRLSNRPAFMPSEGRMVSDINNAWGCLEQVEKGYEEWLLNEIRRLERLDHLAEKFRQKASIHEAWTDGKEAMLRQKDYETATLSEIKALLKKHEAFESDLAAHQDRVEQIAAIAQELNELDYYDSPSVNARCQKICDQWDNLGALTQKRREALERTEKLLETIDQLYLEYAKRAAPFNNWMEGAMEDLQDTFIVHTIEEIQGLTTAHEQFKATLPDADKERLAILGIHNEVSKIVQTYHVNMAGTNPYTTITPQEINGKWDHVRQLVPRRDQALTEEHARQQHNERLRKQFGAQANVIGPWIQTKMEEIGRISIEMHGTLEDQLSHLRQYEKSIVNYKPKIDQLEGDHQLIQEALIFDNKHTNYTMEHIRVGWEQLLTTIARTINEVENQILTRDAKGISQEQMNEFRASFNHFDRDHSGTLGPEEFKACLISLGYDIGNDPQKKTGMMDTDDFRACLISMGYNMGEAEFARIMSIVDPNRLGVVTFQAFIDFMSRETADTDTADQVMASFKILAGDKNYITMDELRRELPPDQAEYCIARMAPYTGPDSVPGALDYMSFSTALYGESDL

SEQ ID NO: 15398 - protein, 904 aa, Artificial Sequence
  Synthetic polypeptide
TTQAGIPYLTFTAWCNSHLRKAGTQIENIEEDFRDGLKLMLLLEVISGERLAKPERGKMRVHKISNVNKALDFIASKGVKLVSIGAEEIVDGNVKMTLGMIWTIILRFAIQDISVEETSAKEGLLLWCQRKTAPYKNVNIQNFHISWKDGLGFCALIHRHRPELIDYGKLRKDDPLTNLNTAFDVAEKYLDIPKMLDAEDIVGTARPDEKAIMTYVSSFYHAFSGAQKAETAANRICKVLAVNQENEQLMEDYEKLASDLLEWIRRTIPWLENRVPENTMHAMQQKLEDFRDYRRLHKPPKVQEKCQLEINFNTLQTKLRLSNRPAFMPSEGRMVSDINNAWGCLEQVEKGYEEWLLNEIRRLERLDHLAEKFRQKASIHEAWTDGKEAMLRQKDYETATLSEIKALLKKHEAFESDLAAHQDRVEQIAAIAQELNELDYYDSPSVNARCQKICDQWDNLGALTQKRREALERTEKLLETIDQLYLEYAKRAAPFNNWMEGAMEDLQDTFIVHTIEEIQGLTTAHEQFKATLPDADKERLAILGIHNEVSKIVQTYHVNMAGTNPYTTITPQEINGKWDHVRQLVPRRDQALTEEHARQQHNERLRKQFGAQANVIGPWIQTKMEEIGRISIEMHGTLEDQLSHLRQYEKSIVNYKPKIDQLEGDHQLIQEALIFDNKHTNYTMEHIRVGWEQLLTTIARTINEVENQILTRDAKGISQEQMNEFRASFNHFDRKKTGMMDTDDFRACLISMGYNMGEAEFARIMSIVDPNRLGVVTFQAFIDFMSRETADTDTADQVMASFKILAGDKLQEGGKMQTAHAAFTPPGFAAVSGRAALRLLDFAAFLTTLSSQNYITMDELRRELPPDQAEYCIARMAPYTGPDSVPGALDYMSFSTALYGESDL

SEQ ID NO: 15399 - protein, 861 aa, Artificial Sequence
  Synthetic polypeptide
TTQAGIPYLTFTAWCNSHLRKAGTQIENIEEDFRDGLKLMLLLEVISGERLAKPERGKMRVHKISNVNKALDFIASKGVKLVSIGAEEIVDGNVKMTLGMIWTIILRFAIQDISVEETSAKEGLLLWCQRKTAPYKNVNIQNFHISWKDGLGFCALIHRHRPELIDYGKLRKDDPLTNLNTAFDVAEKYLDIPKMLDAEDIVGTARPDEKAIMTYVSSFYHAFSGAQKAETAANRICKVLAVNQENEQLMEDYEKLASDLLEWIRRTIPWLENRVPENTMHAMQQKLEDFRDYRRLHKPPKVQEKCQLEINFNTLQTKLRLSNRPAFMPSEGRMVSDINNAWGCLEQVEKGYEEWLLNEIRRLERLDHLAEKFRQKASIHEAWTDGKEAMLRQKDYETATLSEIKALLKKHEAFESDLAAHQDRVEQIAAIAQELNELDYYDSPSVNARCQKICDQWDNLGALTQKRREALERTEKLLETIDQLYLEYAKRAAPFNNWMEGAMEDLQDTFIVHTIEEIQGLTTAHEQFKATLPDADKERLAILGIHNEVSKIVQTYHVNMAGTNPYTTITPQEINGKWDHVRQLVPRRDQALTEEHARQQHNERLRKQFGAQANVIGPWIQTKMEEIGRISIEMHGTLEDQLSHLRQYEKSIVNYKPKIDQLEGDHQLIQEALIFDNKHTNYTMEHIRVGWEQLLTTIARTINEVENQILTRDAKGISQEQMNEFRASFNHFDRKKTGMMDTDDFRACLISMGYNMGEAEFARIMSIVDPNRLGVVTFQAFIDFMSRETADTDTADQVMASFKILAGDKNYITMDELRRELPPDQAEYCIARMAPYTGPDSVPGALDYMSFSTALYGESDL

SEQ ID NO: 15400 - protein, 28 aa, Artificial Sequence
  Synthetic polypeptide
GRTWWLMPVIPALWEAKAARSQDIHGMV

SEQ ID NO: 15401 - protein, 49 aa, Artificial Sequence
  Synthetic polypeptide
PDVVAHACNPSTLGGQGSQITRHSRHGVTPTSGRRGHRSRTSKRTSGMA

SEQ ID NO: 15402 - protein, 51 aa, Artificial Sequence
  Synthetic polypeptide
SQHFGRPRQPDHKTFTAWCNSHLRKAGTQIENIEEDFRDGLKLMLLLEVIS

SEQ ID NO: 15403 - protein, 127 aa, Artificial Sequence
  Synthetic polypeptide
SQHFGRPRQPDHKTFTAWCNSHLRKAGTQIENIEEDFRDGLKLMLLLEVISGERLAKPERGKMRVHKISNVNKALDFIASKGVKLVSIGAEEIVDGNVKMTLGMIWTIILRFAIQDISVEETSAKEG

SEQ ID NO: 15404 - protein, 259 aa, Artificial Sequence
  Synthetic polypeptide
SQHFGRPRQPDHKTFTAWCNSHLRKAGTQIENIEEDFRDGLKLMLLLEVISGERLAKPERGKMRVHKISNVNKALDFIASKGVKLVSIGAEEIVDGNVKMTLGMIWTIILRFAIQDISVEETSAKEGLLLWCQRKTAPYKNVNIQNFHISWKDGLGFCALIHRHRPELIDYGKLRKDDPLTNLNTAFDVAEKYLDIPKMLDAEDIVGTARPDEKAIMTYVSSFYHAFSGAQKAETAANRICKVLAVNQENEQLMEDYEK

SEQ ID NO: 15405 - protein, 870 aa, Artificial Sequence
  Synthetic polypeptide
SQHFGRPRQPDHKTFTAWCNSHLRKAGTQIENIEEDFRDGLKLMLLLEVISGERLAKPERGKMRVHKISNVNKALDFIASKGVKLVSIGAEEIVDGNVKMTLGMIWTIILRFAIQDISVEETSAKEGLLLWCQRKTAPYKNVNIQNFHISWKDGLGFCALIHRHRPELIDYGKLRKDDPLTNLNTAFDVAEKYLDIPKMLDAEDIVGTARPDEKAIMTYVSSFYHAFSGAQKAETAANRICKVLAVNQENEQLMEDYEKLASDLLEWIRRTIPWLENRVPENTMHAMQQKLEDFRDYRRLHKPPKVQEKCQLEINFNTLQTKLRLSNRPAFMPSEGRMVSDINNAWGCLEQVEKGYEEWLLNEIRRLERLDHLAEKFRQKASIHEAWTDGKEAMLRQKDYETATLSEIKALLKKHEAFESDLAAHQDRVEQIAAIAQELNELDYYDSPSVNARCQKICDQWDNLGALTQKRREALERTEKLLETIDQLYLEYAKRAAPFNNWMEGAMEDLQDTFIVHTIEEIQGLTTAHEQFKATLPDADKERLAILGIHNEVSKIVQTYHVNMAGTNPYTTITPQEINGKWDHVRQLVPRRDQALTEEHARQQHNERLRKQFGAQANVIGPWIQTKMEEIGRISIEMHGTLEDQLSHLRQYEKSIVNYKPKIDQLEGDHQLIQEALIFDNKHTNYTMEHIRVGWEQLLTTIARTINEVENQILTRDAKGISQEQMNEFRASFNHFDRDHSGTLGPEEFKACLISLGYDIGNDPQGEAEFARIMSIVDPNRLGVVTFQAFIDFMSRETADTDTADQVMASFKILAGDKNYITMDELRRELPPDQAEYCIARMAPYTGPDSVPGALDYMSFSTALYGESDL

SEQ ID NO: 15406 - protein, 892 aa, Artificial Sequence
  Synthetic polypeptide
SQHFGRPRQPDHKTFTAWCNSHLRKAGTQIENIEEDFRDGLKLMLLLEVISGERLAKPERGKMRVHKISNVNKALDFIASKGVKLVSIGAEEIVDGNVKMTLGMIWTIILRFAIQDISVEETSAKEGLLLWCQRKTAPYKNVNIQNFHISWKDGLGFCALIHRHRPELIDYGKLRKDDPLTNLNTAFDVAEKYLDIPKMLDAEDIVGTARPDEKAIMTYVSSFYHAFSGAQKAETAANRICKVLAVNQENEQLMEDYEKLASDLLEWIRRTIPWLENRVPENTMHAMQQKLEDFRDYRRLHKPPKVQEKCQLEINFNTLQTKLRLSNRPAFMPSEGRMVSDINNAWGCLEQVEKGYEEWLLNEIRRLERLDHLAEKFRQKASIHEAWTDGKEAMLRQKDYETATLSEIKALLKKHEAFESDLAAHQDRVEQIAAIAQELNELDYYDSPSVNARCQKICDQWDNLGALTQKRREALERTEKLLETIDQLYLEYAKRAAPFNNWMEGAMEDLQDTFIVHTIEEIQGLTTAHEQFKATLPDADKERLAILGIHNEVSKIVQTYHVNMAGTNPYTTITPQEINGKWDHVRQLVPRRDQALTEEHARQQHNERLRKQFGAQANVIGPWIQTKMEEIGRISIEMHGTLEDQLSHLRQYEKSIVNYKPKIDQLEGDHQLIQEALIFDNKHTNYTMEHIRVGWEQLLTTIARTINEVENQILTRDAKGISQEQMNEFRASFNHFDRDHSGTLGPEEFKACLISLGYDIGNDPQKKTGMMDTDDFRACLISMGYNMGEAEFARIMSIVDPNRLGVVTFQAFIDFMSRETADTDTADQVMASFKILAGDKNYITMDELRRELPPDQAEYCIARMAPYTGPDSVPGALDYMSFSTALYGESDL

SEQ ID NO: 15407 - protein, 908 aa, Artificial Sequence
  Synthetic polypeptide
SQHFGRPRQPDHKTFTAWCNSHLRKAGTQIENIEEDFRDGLKLMLLLEVISGERLAKPERGKMRVHKISNVNKALDFIASKGVKLVSIGAEEIVDGNVKMTLGMIWTIILRFAIQDISVEETSAKEGLLLWCQRKTAPYKNVNIQNFHISWKDGLGFCALIHRHRPELIDYGKLRKDDPLTNLNTAFDVAEKYLDIPKMLDAEDIVGTARPDEKAIMTYVSSFYHAFSGAQKAETAANRICKVLAVNQENEQLMEDYEKLASDLLEWIRRTIPWLENRVPENTMHAMQQKLEDFRDYRRLHKPPKVQEKCQLEINFNTLQTKLRLSNRPAFMPSEGRMVSDINNAWGCLEQVEKGYEEWLLNEIRRLERLDHLAEKFRQKASIHEAWTDGKEAMLRQKDYETATLSEIKALLKKHEAFESDLAAHQDRVEQIAAIAQELNELDYYDSPSVNARCQKICDQWDNLGALTQKRREALERTEKLLETIDQLYLEYAKRAAPFNNWMEGAMEDLQDTFIVHTIEEIQGLTTAHEQFKATLPDADKERLAILGIHNEVSKIVQTYHVNMAGTNPYTTITPQEINGKWDHVRQLVPRRDQALTEEHARQQHNERLRKQFGAQANVIGPWIQTKMEEIGRISIEMHGTLEDQLSHLRQYEKSIVNYKPKIDQLEGDHQLIQEALIFDNKHTNYTMEHIRVGWEQLLTTIARTINEVENQILTRDAKGISQEQMNEFRASFNHFDRKKTGMMDTDDFRACLISMGYNMGEAEFARIMSIVDPNRLGVVTFQAFIDFMSRETADTDTADQVMASFKILAGDKLQEGGKMQTAHAAFTPPGFAAVSGRAALRLLDFAAFLTTLSSQNYITMDELRRELPPDQAEYCIARMAPYTGPDSVPGALDYMSFSTALYGESDL

SEQ ID NO: 15408 - protein, 865 aa, Artificial Sequence
  Synthetic polypeptide
SQHFGRPRQPDHKTFTAWCNSHLRKAGTQIENIEEDFRDGLKLMLLLEVISGERLAKPERGKMRVHKISNVNKALDFIASKGVKLVSIGAEEIVDGNVKMTLGMIWTIILRFAIQDISVEETSAKEGLLLWCQRKTAPYKNVNIQNFHISWKDGLGFCALIHRHRPELIDYGKLRKDDPLTNLNTAFDVAEKYLDIPKMLDAEDIVGTARPDEKAIMTYVSSFYHAFSGAQKAETAANRICKVLAVNQENEQLMEDYEKLASDLLEWIRRTIPWLENRVPENTMHAMQQKLEDFRDYRRLHKPPKVQEKCQLEINFNTLQTKLRLSNRPAFMPSEGRMVSDINNAWGCLEQVEKGYEEWLLNEIRRLERLDHLAEKFRQKASIHEAWTDGKEAMLRQKDYETATLSEIKALLKKHEAFESDLAAHQDRVEQIAAIAQELNELDYYDSPSVNARCQKICDQWDNLGALTQKRREALERTEKLLETIDQLYLEYAKRAAPFNNWMEGAMEDLQDTFIVHTIEEIQGLTTAHEQFKATLPDADKERLAILGIHNEVSKIVQTYHVNMAGTNPYTTITPQEINGKWDHVRQLVPRRDQALTEEHARQQHNERLRKQFGAQANVIGPWIQTKMEEIGRISIEMHGTLEDQLSHLRQYEKSIVNYKPKIDQLEGDHQLIQEALIFDNKHTNYTMEHIRVGWEQLLTTIARTINEVENQILTRDAKGISQEQMNEFRASFNHFDRKKTGMMDTDDFRACLISMGYNMGEAEFARIMSIVDPNRLGVVTFQAFIDFMSRETADTDTADQVMASFKILAGDKNYITMDELRRELPPDQAEYCIARMAPYTGPDSVPGALDYMSFSTALYGESDL

SEQ ID NO: 15409 - protein, 231 aa, Artificial Sequence
  Synthetic polypeptide
AEIVPLHSSLGDKVIHAWLIISSLLLLFFFSFIYLGEVFKTYNVAVDYITVALLIWNFGVVGMISIHWKGPLRLQQAYLIMISALMALVFIKYLPEWTAWLILAVISVYDLVAVLCPKGPLRMLVETAQERNETLFPALIYSSTMVWLVNMAEGDPEAQRRVSKNSKYNAERACLPPAAINLLSIAPMAPRLFMPKGACRPTAQKGSHKTLLQRMMMAGSVRNGKPRGTVI

SEQ ID NO: 15410 - protein, 262 aa, Artificial Sequence
  Synthetic polypeptide
AEIVPLHSSLGDKVIHAWLIISSLLLLFFFSFIYLGEVFKTYNVAVDYITVALLIWNFGVVGMISIHWKGPLRLQQAYLIMISALMALVFIKYLPEWTAWLILAVISVYDLVAVLCPKGPLRMLVETAQERNETLFPALIYSSTMVWLVNMAEGDPEAQRRVSKNSKYNAERGVKLGLGDFIFYSVLVGKASATASGDWNTTIACFVAILIGLCLTLLLLAIFKKALPALPISITFGLVFYFATDYLVQPFMDQLAFHQFYI

SEQ ID NO: 15411 - protein, 320 aa, Artificial Sequence
  Synthetic polypeptide
AEIVPLHSSLGDKVIHAWLIISSLLLLFFFSFIYLGEVFKTYNVAVDYITVALLIWNFGVVGMISIHWKGPLRLQQAYLIMISALMALVFIKYLPEWTAWLILAVISVYDLVAVLCPKGPLRMLVETAQERNETLFPALIYSSTMVWLVNMAEGDPEAQRRVSKNSKYNAESTERESQDTVAENDDGGFSEEWEAQRDSHLGPHRSTPESRAAVQELSSSILAGEDPEERGVKLGLGDFIFYSVLVGKASATASGDWNTTIACFVAILIGLCLTLLLLAIFKKALPALPISITFGLVFYFATDYLVQPFMDQLAFHQFYI

SEQ ID NO: 15412 - protein, 37 aa, Artificial Sequence
  Synthetic polypeptide
DRATALQSGRQSHPCLAYYIISIVAVLFFIHLLGGSV

SEQ ID NO: 15413 - protein, 82 aa, Artificial Sequence
  Synthetic polypeptide
RGGAHAWFHLLRRLKHENCLNPGGRGCGELRSCHCTPVWATKSSMPGLLYHLYCCCSFFHSFTWGKCLKPITLLWTTLLLHS

SEQ ID NO: 15414 - protein, 51 aa, Artificial Sequence
  Synthetic polypeptide
GQEFMTSLANNAETDKIVVGSSVAPGNTAPSPSSPTSPTSDATTSLEMNNP

SEQ ID NO: 15415 - protein, 52 aa, Artificial Sequence
  Synthetic polypeptide
GQEFMTSLANNAETDKIVVGSSVAPGNTAPSPSSPTSPTSDATTSLEMNNPH

SEQ ID NO: 15416 - protein, 444 aa, Artificial Sequence
  Synthetic polypeptide
GQEFMTSLANNAETDKIVVGSSVAPGNTAPSPSSPTSPTSDATTSLEMNNPHAIPRRHAPIEQLARQGSFRGFPALSQKMSPFKRQLSLRINELPSTMQRKTDFPIKNAVPEVEGEAESISSLCSQITNAFSTPEDPFSSAPMTKPVTVVAPQSPTFQANGTDSAFHVLAKPAHTALAPVAMPVRETNPWAHAPDAANKEIAATCSGTEWGQSSGAASPGLFQAGHRRTPSEADRWLEEVSKSVRAQQPQASAAPLQPVLQPPPPTAISQPASPFQGNAFLTSQPVPVGVVPALQPAFVPAQSYPVANGMPYPAPNVPVVGITPSQMVANVFGTAGHPQAAHPHQSPSLVRQQTFPHYEASSATTSPFFKPPAQHLNGSAAFNGVDDGRLASADRHTEVPTGTCPVDPFEAQWAALENKSKQRTNPSPTNPFSSDLQKTFEIEL

SEQ ID NO: 15417 - protein, 396 aa, Artificial Sequence
  Synthetic polypeptide
GQEFMTSLANNAETDKIVVGSSVAPGNTAPSPSSPTSPTSDATTSLEMNNPHAIPRRHAPIEQLARQGSFRGFPALSQKMSPFKRQLSLRINELPSTMQRKTDFPIKNAVPEVEGEAESISSLCSQITNAFSTPEDPFSSAPMTKPVTVVAPQSPTFQGTEWGQSSGAASPGLFQAGHRRTPSEADRWLEEVSKSVRAQQPQASAAPLQPVLQPPPPTAISQPASPFQGNAFLTSQPVPVGVVPALQPAFVPAQSYPVANGMPYPAPNVPVVGITPSQMVANVFGTAGHPQAAHPHQSPSLVRQQTFPHYEASSATTSPFFKPPAQHLNGSAAFNGVDDGRLASADRHTEVPTGTCPVDPFEAQWAALENKSKQRTNPSPTNPFSSDLQKTFEIEL

SEQ ID NO: 15418 - protein, 11 aa, Artificial Sequence
  Synthetic polypeptide
PAWPTMLKQIR

SEQ ID NO: 15419 - protein, 25 aa, Artificial Sequence
  Synthetic polypeptide
SQHLERRRQVDHLRSGVHDQPGQQC

SEQ ID NO: 15420 - protein, 11 aa, Artificial Sequence
  Synthetic polypeptide
AVFPNKLKQIR

SEQ ID NO: 15421 - protein, 46 aa, Artificial Sequence
  Synthetic polypeptide
CSFSQQAETDKIVVGSSVAPGNTAPSPSSPTSPTSDATTSLEMNNP

SEQ ID NO: 15422 - protein, 47 aa, Artificial Sequence
  Synthetic polypeptide
CSFSQQAETDKIVVGSSVAPGNTAPSPSSPTSPTSDATTSLEMNNPH

SEQ ID NO: 15423 - protein, 439 aa, Artificial Sequence
  Synthetic polypeptide
CSFSQQAETDKIVVGSSVAPGNTAPSPSSPTSPTSDATTSLEMNNPHAIPRRHAPIEQLARQGSFRGFPALSQKMSPFKRQLSLRINELPSTMQRKTDFPIKNAVPEVEGEAESISSLCSQITNAFSTPEDPFSSAPMTKPVTVVAPQSPTFQANGTDSAFHVLAKPAHTALAPVAMPVRETNPWAHAPDAANKEIAATCSGTEWGQSSGAASPGLFQAGHRRTPSEADRWLEEVSKSVRAQQPQASAAPLQPVLQPPPPTAISQPASPFQGNAFLTSQPVPVGVVPALQPAFVPAQSYPVANGMPYPAPNVPVVGITPSQMVANVFGTAGHPQAAHPHQSPSLVRQQTFPHYEASSATTSPFFKPPAQHLNGSAAFNGVDDGRLASADRHTEVPTGTCPVDPFEAQWAALENKSKQRTNPSPTNPFSSDLQKTFEIEL

SEQ ID NO: 15424 - protein, 391 aa, Artificial Sequence
  Synthetic polypeptide
CSFSQQAETDKIVVGSSVAPGNTAPSPSSPTSPTSDATTSLEMNNPHAIPRRHAPIEQLARQGSFRGFPALSQKMSPFKRQLSLRINELPSTMQRKTDFPIKNAVPEVEGEAESISSLCSQITNAFSTPEDPFSSAPMTKPVTVVAPQSPTFQGTEWGQSSGAASPGLFQAGHRRTPSEADRWLEEVSKSVRAQQPQASAAPLQPVLQPPPPTAISQPASPFQGNAFLTSQPVPVGVVPALQPAFVPAQSYPVANGMPYPAPNVPVVGITPSQMVANVFGTAGHPQAAHPHQSPSLVRQQTFPHYEASSATTSPFFKPPAQHLNGSAAFNGVDDGRLASADRHTEVPTGTCPVDPFEAQWAALENKSKQRTNPSPTNPFSSDLQKTFEIEL

SEQ ID NO: 15425 - protein, 7 aa, Artificial Sequence
  Synthetic polypeptide
MQFFPTS

SEQ ID NO: 15426 - protein, 13 aa, Artificial Sequence
  Synthetic polypeptide
PMTFRLGSLLRLT

SEQ ID NO: 15427 - protein, 7 aa, Artificial Sequence
  Synthetic polypeptide
PSGWEAY

SEQ ID NO: 15428 - protein, 209 aa, Artificial Sequence
  Synthetic polypeptide
STFHPFLHPANAYSQIQILDQPCRKLLLTHDLQAGKLIETHLRTIPSHAFSNLPNISRIYVSIDVTLQQLESHSFYNLSKVTHIEIRNTRNLTYIDPDALKELPLLKFLGIFNTGLKMFPDLTKVYSTDIFFILEITDNPYMTSIPVNAFQGLCNETLTLKLYNNGFTSVQGYAFNGTKLDAVYLNKNKYLTVIDKDAFGGVYSGPSLL

SEQ ID NO: 15429 - protein, 742 aa, Artificial Sequence
  Synthetic polypeptide
STFHPFLHPANAYSQIQILDQPCRKLLLTHDLQAGKLIETHLRTIPSHAFSNLPNISRIYVSIDVTLQQLESHSFYNLSKVTHIEIRNTRNLTYIDPDALKELPLLKFLGIFNTGLKMFPDLTKVYSTDIFFILEITDNPYMTSIPVNAFQGLCNETLTLKLYNNGFTSVQGYAFNGTKLDAVYLNKNKYLTVIDKDAFGGVYSGPSLLDVSQTSVTALPSKGLEHLKELIARNTWTLKKLPLSLSFLHLTRADLSYPSHCCAFKNQKKIRGILESLMCNESSMQSLRQRKSVNALNSPLHQEYEENLGDSIVGYKEKSKFQDTHNNAHYYVFFEEQEDEIIGFGQELKNPQEETLQAFDSHYDYTICGDSEDMVCTPKSDEFNPCEDIMGYKFLRIVVWFVSLLALLGNVFVLLILLTSHYKLNVPRFLMCNLAFADFCMGMYLLLIASVDLYTHSEYYNHAIDWQTGPGCNTAGFFTVFASELSVYTLTVITLERWYAITFAMRLDRKIRLRHACAIMVGGWVCCFLLALLPLVGISSYAKVSICLPMDTETPLALAYIVFVLTLNIVAFVIVCCCYVKIYITVRNPQYNPGDKDTKIAKRMAVLIFTDFICMAPISFYALSAILNKPLITVSNSKILLVLFYPLNSCANPFLYAIFTKAFQRDVFILLSKFGICKRQAQAYRGQRVPPKNSTDIQVQKVTHEMRQGLHNMEDVYELIENSHLTPKKQGQISEEYMQTVL

SEQ ID NO: 15430 - protein, 231 aa, Artificial Sequence
  Synthetic polypeptide
STFHPFLHPANAYSQIQILDQPCRKLLLTHDLQAGKLIETHLRTIPSHAFSNLPNISRIYVSIDVTLQQLESHSFYNLSKVTHIEIRNTRNLTYIDPDALKELPLLKFLGIFNTGLKMFPDLTKVYSTDIFFILEITDNPYMTSIPVNAFQGLCNETLTLKLYNNGFTSVQGYAFNGTKLDAVYLNKNKYLTVIDKDAFGGVYSGPSLLLPLGRKSLSFETQKAPRSSMPS

SEQ ID NO: 15431 - protein, 252 aa, Artificial Sequence
  Synthetic polypeptide
STFHPFLHPANAYSQIQILDQPCRKLLLTHDLQAGKLIETHLRTIPSHAFSNLPNISRIYVSIDVTLQQLESHSFYNLSKVTHIEIRNTRNLTYIDPDALKELPLLKFLGIFNTGLKMFPDLTKVYSTDIFFILEITDNPYMTSIPVNAFQGLCNETLTLKLYNNGFTSVQGYAFNGTKLDAVYLNKNKYLTVIDKDAFGGVYSGPSLLVENVAVSGKGFCKSLFSWLYRLPLGRKSLSFETQKAPRSSMPS

SEQ ID NO: 15432 - protein, 90 aa, Artificial Sequence
  Synthetic polypeptide
STFHPFLHPANAYSQIQILDQPCRKLLLTHDLQAGKLIETHLRTIPSHAFSNLPNISRIYVSIDVTLQQLESHSFYNLSKVTHITDTDAL

SEQ ID NO: 15433 - protein, 567 aa, Artificial Sequence
  Synthetic polypeptide
GHSKKVAICKPGREASGEAKLADTLILDLQPPELDVSQTSVTALPSKGLEHLKELIARNTWTLKKLPLSLSFLHLTRADLSYPSHCCAFKNQKKIRGILESLMCNESSMQSLRQRKSVNALNSPLHQEYEENLGDSIVGYKEKSKFQDTHNNAHYYVFFEEQEDEIIGFGQELKNPQEETLQAFDSHYDYTICGDSEDMVCTPKSDEFNPCEDIMGYKFLRIVVWFVSLLALLGNVFVLLILLTSHYKLNVPRFLMCNLAFADFCMGMYLLLIASVDLYTHSEYYNHAIDWQTGPGCNTAGFFTVFASELSVYTLTVITLERWYAITFAMRLDRKIRLRHACAIMVGGWVCCFLLALLPLVGISSYAKVSICLPMDTETPLALAYIVFVLTLNIVAFVIVCCCYVKIYITVRNPQYNPGDKDTKIAKRMAVLIFTDFICMAPISFYALSAILNKPLITVSNSKILLVLFYPLNSCANPFLYAIFTKAFQRDVFILLSKFGICKRQAQAYRGQRVPPKNSTDIQVQKVTHEMRQGLHNMEDVYELIENSHLTPKKQGQISEEYMQTVL

SEQ ID NO: 15434 - protein, 40 aa, Artificial Sequence
  Synthetic polypeptide
HFDLGLAASRTGRVSNQCHCPSIQRPGAPEGTDSKKHLDS

SEQ ID NO: 15435 - protein, 26 aa, Artificial Sequence
  Synthetic polypeptide
SWTCSLQNWTCLKPVSLPFHPKAWST

SEQ ID NO: 15436 - protein, 47 aa, Artificial Sequence
  Synthetic polypeptide
DEGEGAGLWSQGDLGFCTSSTALKPHDSGTSLGGAVSASPLVKRGQW

SEQ ID NO: 15437 - protein, 134 aa, Artificial Sequence
  Synthetic polypeptide
FGHLTWWSSLRFPSGKERTMVILSNIQNRSPKPGPAPHDQELGFFLETGLQRAHVLYFKNGGTDGNIKEPRMWFRVIEQDETRNLTRGVGRFRELLRAVETRTTQNLRMTIARQLAEILLRGMCEQSYWNPLED

SEQ ID NO: 15438 - protein, 688 aa, Artificial Sequence
  Synthetic polypeptide
FGHLTWWSSLRFPSGKERTMVILSNIQNRSPKPGPAPHDQELGFFLETGLQRAHVLYFKNGNLTRGVGRFRELLRAVETRTTQNLRMTIARQLAEILLRGMCEQSYWNPLEDPPCQSPLDDPLRKGANTKTYTLTRRARVYSGENIFCPQENTEEALLLLLISESMANRDAVLSRIPEHKSDRLISLQSASVVYDLLTIALGRRGQYEMLSECLERAMKFAFEEFHLWYQFALSLMAAGKSARAVKVLKECIRLKPDDATIPLLAAKLCMGSLHWLEEAEKFAKTVVDVGEKTSEFKAKGYLALGLTYSLQATDASLRGMQEVLQRKALLAFQRAHSLSPTDHQAAFYLALQLAISRQIPEALGYVRQALQLQGDDANSLHLLALLLSAQKHYHDALNIIDMALSEYPENFILLFSKVKLQSLCRGPDEALLTCKHMLQIWKSCYNLTNPSDSGRGSSLLDRTIADRRQLNTITLPDFSDPETGNSPEAYFHGFPSLFSVSSVHATSVAASRVEQALSEVASSLQSSAPKQGPLHPWMTLAQIWLHAAEVYIGIGKPAEATACTQEAANLFPMSHNVLYMRGQIAELRGSMDEARRWYEEALAISPTHVKSMQRLALILHQLGRYSLAEKILRDAVQVNSTAHEVWNGLGEVLQAQGNDAAATECFLTALELEASSPAVPFTIIPRVL

SEQ ID NO: 15439 - protein, 671 aa, Artificial Sequence
  Synthetic polypeptide
FGHLTWWSSLRFPSGKERTMVILSNIQNRSPKPGPAPHDQELGFFLETGLQRAHVLYFKNGNLTRGVGRFRELLRAVETRTTQNLRMTIARQLAEILLRGMCEQSYWNPLEDPPCQSPLDDPLRKGANTKTYTLTRRARVYSGENIFCPQENTEEALLLLLISESMANRDAVLSRIPEHKSDRLISLQSASVVYDLLTIALGRRGQYEMLSECLERAMKFAFEEFHLWYQFALSLMAAGKSARAVKVLKECIRLKPDDATIPLLAAKLCMGSLHWLEEAEKFAKTVVDVGEKTSEFKAKGYLALGLTYSLQATDASLRGMQEVLQRKALLAFQRAHSLSPTDHQAAFYLALQLAISRQIPEALGYVRQALQLQGDDANSLHLLALLLSAQKHYHDALNIIDMALSEYPENFILLFSKVKLQSLCRGPDEALLTCKHMLQIWKSCYNLTNPSDSGRGSSLLDRTIADRRQLNTITLPDFSDPETGSVHATSVAASRVEQALSEVASSLQSSAPKQGPLHPWMTLAQIWLHAAEVYIGIGKPAEATACTQEAANLFPMSHNVLYMRGQIAELRGSMDEARRWYEEALAISPTHVKSMQRLALILHQLGRYSLAEKILRDAVQVNSTAHEVWNGLGEVLQAQGNDAAATECFLTALELEASSPAVPFTIIPRVL

SEQ ID NO: 15440 - protein, 8 aa, Artificial Sequence
  Synthetic polypeptide
REDNGNTF

SEQ ID NO: 15441 - protein, 884 aa, Artificial Sequence
  Synthetic polypeptide
APPPVRSAAALESHRSTNPAVNYACEGSRLHTPYENLMPVSYHPQMGPSSCRKTSSGLPLILHDDDMAELLLGESKLEQYLKEHPLRQGASPRGPKPQLTEVRKHLTAALDRGNLKSEFLQESNLIMAKLNYVEGDYKEALNIYARVGLDDLPLTAVPPYRLRVIAEAYATKGLCLEKLPISSSTSNLHVDREQDVITCYEKAGDIALLYLQEIERVILSNIQNRSPKPGPAPHDQELGFFLETGLQRAHVLYFKNGNLTRGVGRFRELLRAVETRTTQNLRMTIARQLAEILLRGMCEQSYWNPLEDPPCQSPLDDPLRKGANTKTYTLTRRARVYSGENIFCPQENTEEALLLLLISESMANRDAVLSRIPEHKSDRLISLQSASVVYDLLTIALGRRGQYEMLSECLERAMKFAFEEFHLWYQFALSLMAAGKSARAVKVLKECIRLKPDDATIPLLAAKLCMGSLHWLEEAEKFAKTVVDVGEKTSEFKAKGYLALGLTYSLQATDASLRGMQEVLQRKALLAFQRAHSLSPTDHQAAFYLALQLAISRQIPEALGYVRQALQLQGDDANSLHLLALLLSAQKHYHDALNIIDMALSEYPENFILLFSKVKLQSLCRGPDEALLTCKHMLQIWKSCYNLTNPSDSGRGSSLLDRTIADRRQLNTITLPDFSDPETGNSPEAYFHGFPSLFSVSSVHATSVAASRVEQALSEVASSLQSSAPKQGPLHPWMTLAQIWLHAAEVYIGIGKPAEATACTQEAANLFPMSHNVLYMRGQIAELRGSMDEARRWYEEALAISPTHVKSMQRLALILHQLGRYSLAEKILRDAVQVNSTAHEVWNGLGEVLQAQGNDAAATECFLTALELEASSPAVPFTIIPRVL

SEQ ID NO: 15442 - protein, 867 aa, Artificial Sequence
  Synthetic polypeptide
APPPVRSAAALESHRSTNPAVNYACEGSRLHTPYENLMPVSYHPQMGPSSCRKTSSGLPLILHDDDMAELLLGESKLEQYLKEHPLRQGASPRGPKPQLTEVRKHLTAALDRGNLKSEFLQESNLIMAKLNYVEGDYKEALNIYARVGLDDLPLTAVPPYRLRVIAEAYATKGLCLEKLPISSSTSNLHVDREQDVITCYEKAGDIALLYLQEIERVILSNIQNRSPKPGPAPHDQELGFFLETGLQRAHVLYFKNGNLTRGVGRFRELLRAVETRTTQNLRMTIARQLAEILLRGMCEQSYWNPLEDPPCQSPLDDPLRKGANTKTYTLTRRARVYSGENIFCPQENTEEALLLLLISESMANRDAVLSRIPEHKSDRLISLQSASVVYDLLTIALGRRGQYEMLSECLERAMKFAFEEFHLWYQFALSLMAAGKSARAVKVLKECIRLKPDDATIPLLAAKLCMGSLHWLEEAEKFAKTVVDVGEKTSEFKAKGYLALGLTYSLQATDASLRGMQEVLQRKALLAFQRAHSLSPTDHQAAFYLALQLAISRQIPEALGYVRQALQLQGDDANSLHLLALLLSAQKHYHDALNIIDMALSEYPENFILLFSKVKLQSLCRGPDEALLTCKHMLQIWKSCYNLTNPSDSGRGSSLLDRTIADRRQLNTITLPDFSDPETGSVHATSVAASRVEQALSEVASSLQSSAPKQGPLHPWMTLAQIWLHAAEVYIGIGKPAEATACTQEAANLFPMSHNVLYMRGQIAELRGSMDEARRWYEEALAISPTHVKSMQRLALILHQLGRYSLAEKILRDAVQVNSTAHEVWNGLGEVLQAQGNDAAATECFLTALELEASSPAVPFTIIPRVL

SEQ ID NO: 15443 - protein, 20 aa, Artificial Sequence
  Synthetic polypeptide
FYMMMTWQSFSSGSRSWSST

SEQ ID NO: 15444 - protein, 29 aa, Artificial Sequence
  Synthetic polypeptide
KSQIHRGGPEVQCEDASLFHSQTKEHCKR

SEQ ID NO: 15445 - protein, 394 aa, Artificial Sequence
  Synthetic polypeptide
LHLHEGSRRARFIEVDQRYNVKMQAFFTVKQKSIANGNPVNSELEAGNDFYDGSYDDPSVPLLGQVKEKPQYGKNPVVMVDEIMSSSPPKFTFPEAGLRIMITNKFGPRTRLRMASRIIINERQRLINSANGVSSKPLQNGRHENIENGNVPVENPEDPQQNQEQQPPPQPPPPEPEPVEADFLSPFSVPEARGDKVKWVFTWPLIFLLCVTIPNCSKPRWEKFFMVTFITATLWIAVFSYIMVWLVTIIGYTLGIPDVIMGITFLAAGTSVPDCMASLIVARQGLGDMAVSNTIGSNVFDILVGLGVPWGLQTMVVNYGSTVKINSRGLVYSVVLLLGSVALTVLGIHLNKWRLDRKLGVYVLVLYAIFLCFSIMIEFNVFTFVNLPMCREDD

SEQ ID NO: 15446 - protein, 351 aa, Artificial Sequence
  Synthetic polypeptide
LHLHEGSRRARFIEVDQRYNVKMQAFFTVKQKSIANGNPVNSELEAVKEKPQYGKNPVVMVDEIMSSSPPKFTFPEAGLRIMITNKFGPRTRLRMASRIIINERQRLINSANGVSSKPLQNGRHENIENGNVPVENPEDPQQNQEQQPPPQPPPPEPEPVEADFLSPFSVPEARGDKVKWVFTWPLIFLLCVTIPNCSKPRWEKFFMVTFITATLWIAVFSYIMVWLVTIIGYTLGIPDVIMGITFLAAGTSVPDCMASLIVARQGLGDMAVSNTIGSNVFDILVGLGVPWGLQTMVVNYGSTVKINSRGLVYSVVLLLGSVALTCSSEVPGIQPQEALIEGQGGRQWKER

SEQ ID NO: 15447 - protein, 375 aa, Artificial Sequence
  Synthetic polypeptide
LHLHEGSRRARFIEVDQRYNVKMQAFFTVKQKSIANGNPVNSELEAVKEKPQYGKNPVVMVDEIMSSSPPKFTFPEAGLRIMITNKFGPRTRLRMASRIIINERQRLINSANGVSSKPLQNGRHENIENGNVPVENPEDPQQNQEQQPPPQPPPPEPEPVEADFLSPFSVPEARGDKVKWVFTWPLIFLLCVTIPNCSKPRWEKFFMVTFITATLWIAVFSYIMVWLVTIIGYTLGIPDVIMGITFLAAGTSVPDCMASLIVARQGLGDMAVSNTIGSNVFDILVGLGVPWGLQTMVVNYGSTVKINSRGLVYSVVLLLGSVALTVLGIHLNKWRLDRKLGVYVLVLYAIFLCFSIMIEFNVFTFVNLPMCREDD

SEQ ID NO: 15448 - protein, 7 aa, Artificial Sequence
  Synthetic polypeptide
RWTRGTM

SEQ ID NO: 15449 - protein, 332 aa, Artificial Sequence
  Synthetic polypeptide
FLGLLTLREASCCALRTLRQPWRAPQALTVPGPTCQSLGAGEVANFAAYAFAPATLVTPLGALSVLVSAILSSYFLNERLNLHGKIGCLLSILGSTVMVIHAPKEEEIETLNEMSHKLGDPGFVVFATLVVIVALILIFVVGPRHGQTNILVYITICSVIGAFSVSCVKGLGIAIKELFAGKPVLRHPLAWILLLSLIVCVSTQINYLNRALDIFNTSIVTPIYYVFFTTSVLTCSAILFKEWQDMPVDDVIGTLSGFFTIIVGIFLLHAFKDVSFSLASLPVSFRKDEKAMNGNLSNMYEVLNNNEESLTCGIEQHTGENVSRRNGNLTAF

SEQ ID NO: 15450 - protein, 40 aa, Artificial Sequence
  Synthetic polypeptide
GHSGSHGELPRLSLCQDLLASPWELVRWPTSLRMRLHQPL

SEQ ID NO: 15451 - protein, 51 aa, Artificial Sequence
  Synthetic polypeptide
SRERHCSFFLIPWIAHFERSQLLCSEDTQAAMESSPGSHCARTYLPVLGSW

SEQ ID NO: 15452 - protein, 19 aa, Artificial Sequence
  Synthetic polypeptide
AREFETSLGNIVMEPMMSA

SEQ ID NO: 15453 - protein, 476 aa, Artificial Sequence
  Synthetic polypeptide
DQPGQHSDGANDVSMIQVADVGVGISGQEGMQAVMASDFAVPKFRYLERLLILHGHWCYSRLANMVLYFFYKNTMFVGLLFWFQFFCGFSASTMIDQWYLIFFNLLFSSLPPLVTGVLDRDVPANVLLTNPQLYKSGQNMEEYRPRTFWFNMADAAFQSLVCFSIPYLAYYDSNVDLFTWGTPIVTIALLTFLLHLGIETKTWTWLNWITCGFSVLLFFTVALIYNASCATCYPPSNPYWTMQALLGDPVFYLTCLMTPVAALLPRLFFRSLQGRVFPTQLQLARQLTRKSPRRCSAPKETFAQGRLPKDSGTEHSSGRTVKTSVPLSQPSWHTQQPVCSLEASGEPSTVDMSMPVREHTLLEGLSAPAPMSSAPGEAVLRSPGGCPEESKVRAASTGRVTPLSSLFSLPTFSLLNWISSWSLVSRLGSVLQFSRTEQLADGQAGRGLPVQPHSGRSGLQGPDHRLLIGASSRRSQ

SEQ ID NO: 15454 - protein, 143 aa, Artificial Sequence
  Synthetic polypeptide
DQPGQHSDGANDVSMIQVADVGVGISGQEGMQEMLRETTAMETLAGHARTVFRMGIFLPCCVPCILRREDKSDARSASPVTGIPLPLKAVMASDFAVPKFRYLERLLILHGHWCYSRLANMVLYFFYKNTMFVGLLFWFQFFC

SEQ ID NO: 15455 - protein, 24 aa, Artificial Sequence
  Synthetic polypeptide
CGLRIQSFDVHQRDRMREAKQRPE

SEQ ID NO: 15456 - protein, 377 aa, Artificial Sequence
  Synthetic polypeptide
VVSEFNPLTFTSVIECEKPNNDLSRFRGCIIHDNGKKAGLYKENLLLRGCTLRNTDAVVGIVIYAGHETKALLNNSGPRYKRSKLERQMNCDVLWCVLLLVCMSLFSAVGHGLWIWRYQEKKSLFYVPKSDGSSLSPVTAAVYSFLTMIIVLQVLIPISLYVSIEIVKACQVYFINQDMQLYDEETDSQLQCRALNITEDLGQIQYIFSDKTGTLTENKMVFRRCTVSGVEYSHDANAQRLARYQEADSEEEEVVPRGGSVSQRGSIGSHQSVRVVHRTQSTKSHRRTGSRAEAKRASMLSKHTAFSSPMEKDITPDPKLLEKVSECDKSLAVARHQEHLLAHLSPELSDVFDFFIALTICNTVVVTSPDQPRTKAR

SEQ ID NO: 15457 - protein, 1282 aa, Artificial Sequence
  Synthetic polypeptide
VVSEFNPLTFTSVIECEKPNNDLSRFRGCIIHDNGKKAGLYKENLLLRGCTLRNTDAVVGIVIYAGHETKALLNNSGPRYKRSKLERQMNCDVLWCVLLLVCMSLFSAVGHGLWIWRYQEKKSLFYVPKSDGSSLSPVTAAVYSFLTMIIVLQVLIPISLYVSIEIVKACQVYFINQDMQLYDEETDSQLQCRALNITEDLGQIQYIFSDKTGTLTENKMVFRRCTVSGVEYSHDANAQRLARYQEADSEEEEVVPRGGSVSQRGSIGSHQSVRVVHRTQSTKSHRRTGSRAEAKRASMLSKHTAFSSPMEKDITPDPKLLEKVSECDKSLAVARHQEHLLAHLSPELSDVFDFFIALTICNTVVVTSPDQPRTKVRVRFELKSPVKTIEDFLRRFTPSCLTSGCSSIGSLAANKSSHKLGSSFPSTPSSDGMLLRLEERLGQPTSAIASNGYSSQADNWASELAQEQESERELRYEAESPDEAALVYAARAYNCVLVERLHDQVSVELPHLGRLTFELLHTLGFDSVRKRMSVVIRHPLTDEINVYTKGADSVVMDLLQPCSSVDARGRHQKKIRSKTQNYLNVYAAEGLRTLCIAKRVLSKEEYACWLQSHLEAESSLENSEELLFQSAIRLETNLHLLGATGIEDRLQDGVPETISKLRQAGLQIWVLTGDKQETAVNIAYACKLLDHDEEVITLNATSQEACAALLDQCLCYVQSRGLQRAPEKTKGKVSMRFSSLCPPSTSTASGRRPSLVIDGRSLAYALEKNLEDKFLFLAKQCRSVLCCRSTPLQKSMVVKLVRSKLKAMTLAIGDGANDVSMIQVADVGVGISGQEGMQAVMASDFAVPKFRYLERLLILHGHWCYSRLANMVLYFFYKNTMFVGLLFWFQFFCGFSASTMIDQWYLIFFNLLFSSLPPLVTGVLDRDVPANVLLTNPQLYKSGQNMEEYRPRTFWFNMADAAFQSLVCFSIPYLAYYDSNVDLFTWGTPIVTIALLTFLLHLGIETKTWTWLNWITCGFSVLLFFTVALIYNASCATCYPPSNPYWTMQALLGDPVFYLTCLMTPVAALLPRLFFRSLQGRVFPTQLQLARQLTRKSPRRCSAPKETFAQGRLPKDSGTEHSSGRTVKTSVPLSQPSWHTQQPVCSLEASGEPSTVDMSMPVREHTLLEGLSAPAPMSSAPGEAVLRSPGGCPEESKVRAASTGRVTPLSSLFSLPTFSLLNWISSWSLVSRLGSVLQFSRTEQLADGQAGRGLPVQPHSGRSGLQGPDHRLLIGASSRRSQ

SEQ ID NO: 15458 - protein, 7 aa, Artificial Sequence
  Synthetic polypeptide
WSPNSIL

SEQ ID NO: 15459 - protein, 15 aa, Artificial Sequence
  Synthetic polypeptide
FYVMLFTDANQFSER

SEQ ID NO: 15460 - protein, 71 aa, Artificial Sequence; identical to SEQ ID NO: 4183
  Synthetic polypeptide

SEQ ID NO: 15461 - protein, 133 aa, Artificial Sequence; identical to SEQ ID NO: 3244
  Synthetic polypeptide

SEQ ID NO: 15462 - protein, 151 aa, Artificial Sequence; identical to SEQ ID NO: 3115
  Synthetic polypeptide

SEQ ID NO: 15463 - protein, 447 aa, Artificial Sequence; identical to SEQ ID NO: 2136
  Synthetic polypeptide

SEQ ID NO: 15464 - protein, 22 aa, Artificial Sequence
  Synthetic polypeptide
RKTSLGLPLILRYAFHRCQPVQ

SEQ ID NO: 15465 - protein, 269 aa, Artificial Sequence
  Synthetic polypeptide
DCVGPCFPGLLCPDHVMRLLPVTERKLPEASLEADASCTACRTEYQIDIFFAQTWTDSRLRFNSTMKILTLNSNMVGLIWIPDTIFRNSKTAEAHWITTPNQLLRIWNDGKILYTLRLTINAECQLQLHNFPMDEHSCPLIFSSYGYPKEEMIYRWRKNSVEAADQKSWRLYQFDFMGLRNTTEIVTTSAGDYVVMTIYFELSRRMGYFTIQTYIPCILTVVLSWVSFWIKKDATPARTALGITTVLTMTTLSTIARKSLPRVSYVTAM

SEQ ID NO: 15466 - protein, 420 aa, Artificial Sequence
  Synthetic polypeptide
DCVGPCFPGLLCPDHVMRLLPVTERKLPEASLEADASCTACRTEYQIDIFFAQTWTDSRLRFNSTMKILTLNSNMVGLIWIPDTIFRNSKTAEAHWITTPNQLLRIWNDGKILYTLRLTINAECQLQLHNFPMDEHSCPLIFSSYGYPKEEMIYRWRKNSVEAADQKSWRLYQFDFMGLRNTTEIVTTSAGDYVVMTIYFELSRRMGYFTIQTYIPCILTVVLSWVSFWIKKDATPARTALGITTVLTMTTLSTIARKSLPRVSYVTAMDLFVTVCFLFVFAALMEYATLNYYSSCRKPTTTKKTTSLLHPDSSRWIPERISLQAPSNYSLLDMRPPPTAMITLNNSVYWQEFEDTCVYECLDGKDCQSFFCCYEECKSGSWRKGRIHIDILELDSYSRVFFPTSFLLFNLVYWVGYLYL

SEQ ID NO: 15467 - protein, 206 aa, Artificial Sequence
  Synthetic polypeptide
DCVGPCFPGLLCPDHVMRLLPVTERKLPEASLEADASCTACRTEYQIDIFFAQTWTDSRLRFNSTMKILTLNSNMVGLIWIPDTIFRNSKTAEAHWITTPNQLLRIWNDGKILYTLRLTINAECQLQLHNFPMDEHSCPLIFSSYGYPKEEMIYRWRKNSVEAADQKSWRLYQFDFMGLRNTTEIVTTSAGRNLLKEAQLSKAREA

SEQ ID NO: 15468 - protein, 33 aa, Artificial Sequence
  Synthetic polypeptide
KQMLPVQPAELNTKLTYFLLRPGQIVAFDSTAQ

SEQ ID NO: 15469 - protein, 74 aa, Artificial Sequence
  Synthetic polypeptide
LENLNLLTGETLLSPLVMCGPHGLKFLKPVELRLPHCASMTPDGDPKTWQNKCLPGDPNYLVGANCVSVLIDHF

SEQ ID NO: 15470 - protein, 87 aa, Artificial Sequence
  Synthetic polypeptide
LENLNLLTGETLLSPLVMCGPHGLKFLKPVELRLPHCASMTPDGWSFALKSSDSSSGDPKTWQNKCLPGDPNYLVGANCVSVLIDHF

SEQ ID NO: 15471 - protein, 67 aa, Artificial Sequence
  Synthetic polypeptide
LENLNLLTGETLLSPLVMCGPHGLKFLKPVELRLPHCDPKTWQNKCLPGDPNYLVGANCVSVLIDHF

SEQ ID NO: 15472 - protein, 12 aa, Artificial Sequence
  Synthetic polypeptide
LHLIGEPKPLDR

SEQ ID NO: 15473 - protein, 5 aa, Artificial Sequence
  Synthetic polypeptide
QVKHC

SEQ ID NO: 15474 - protein, 46 aa, Artificial Sequence
  Synthetic polypeptide
NQNELAHDPAIPLLGTYPKEMKSLSRRDICTLMFVAALFTIAKSPE

SEQ ID NO: 15475 - protein, 1433 aa, Artificial Sequence
  Synthetic polypeptide
PSLRSRDEERISKPGAVSTPVKHADDHTPKTVEEVTVERNEKQTPSLPEPKPVYAQVGQPDVDLPVSPSDGVLPNSTHEDGILRPSMKLVKFRKGDSVGLRLAGGNDVGIFVAGVLEDSPAAKEGLEEGDQILRVNNVDFTNIIREEAVLFLLDLPKGEEVTILAQKKKDVYRRIVESDVGDSFYIRTHFEYEKESPYGLSFNKGEVFRVVDTLYNGKLGSWLAIRIGKNHKEVERGIIPNKNRAEQLASVQYTLPKTAGGDRADFWRFRGLRSSKRNLRKSREDLSAQPVQTKFPAYERVVLREAGFLRPVTIFGPIADVAREKLAREEPDIYQIAKSEPRDAGTDQRSSGIIRLHTIKQIIDQDKHALLDVTPNAVDRLNYAQWYPIVVFLNPDSKQGVKTMRMRLCPESRKSARKLYERSHKLRKNNHHLFTTTINLNSMNDGWYGALKEAIQQQQNQLVWVSEGKADGATSDDLDLHDDRLSYLSAPGSEYSMYSTDSRHTSDYEDTDTEGGAYTDQELDETLNDEVGTPPESAITRSSEPVREDSSGMHHENQTYPPYSPQAQPQPIHRIDSPGFKPASQQKAEASSPVPYLSPETNPASSTSAVNHNVNLTNVRLEEPTPAPSTSYSPQADSLRTPSTEAAHIMLRDQEPSLSSHVDPTKVYRKDPYPEEMMRQNHVLKQPAVSHPGHRPDKEPNLTYEPQLPYVEKQASRDLEQPTYRYESSSYTDQFSRNYEHRLRYEDRVPMYEEQWSYYDDKQPYPSRPPFDNQHSQDLDSRQHPEESSERGYFPRFEEPAPLSYDSRPRYEQAPRASALRHEEQPAPGYDTHGRLRPEAQPHPSAGPKPAESKQYFEQYSRSYEQVPPQGFTSRAGHFEPLHGAAAVPPLIPSSQHKPEALPSNTKPLPPPPTQTEEEEDPAMKPQSVLTRVKMFENKRSASLETKKDVNDTGSFKPPEVASKPSGAPIIGPKPTSQNQFSEHDKTLYRIPEPQKPQLKPPEDIVRSNHYDPEEDEEYYRKQLSYFDRRSFENKPPAHIAASHLSEPAKPAHSQNQSNFSSYSSKGKPPEADGVDRSFGEKRYEPIQATPPPPPLPSQYAQPSQPVTSASLHIHSKGAHGEGNSVSLDFQNSLVSKPDPPPSQNKPATFRPPNREDTAQAAFYPQKSFPDKAPVNGTEQTQKTVTPAYNRFTPKPYTSSARPFERKFESPKFNHNLLPSETAHKPDLSSKTPTSPKTLVKSHSLAQPPEFDSGVETFSIHAEKPKYQINNISTVPKAIPVSPSAVEEDEDEDGHTVVATARGIFNSNGGVLSSIETGVSIIIPQGAIPEGVEQEIYFKVCRDNSILPPLDKEKGETLLSPLVMCGPHGLKFLKPVELRLPHCASMTPDGWSFALKSSDSSSGDPKTWQNKCLPGDPNYLVGANCVSVLIDHF

SEQ ID NO: 15476 - protein, 1413 aa, Artificial Sequence
  Synthetic polypeptide
PSLRSRDEERISKPGAVSTPVKHADDHTPKTVEEVTVERNEKQTPSLPEPKPVYAQVGQPDVDLPVSPSDGVLPNSTHEDGILRPSMKLVKFRKGDSVGLRLAGGNDVGIFVAGVLEDSPAAKEGLEEGDQILRVNNVDFTNIIREEAVLFLLDLPKGEEVTILAQKKKDVYRRIVESDVGDSFYIRTHFEYEKESPYGLSFNKGEVFRVVDTLYNGKLGSWLAIRIGKNHKEVERGIIPNKNRAEQLASVQYTLPKTAGGDRADFWRFRGLRSSKRNLRKSREDLSAQPVQTKFPAYERVVLREAGFLRPVTIFGPIADVAREKLAREEPDIYQIAKSEPRDAGTDQRSSGIIRLHTIKQIIDQDKHALLDVTPNAVDRLNYAQWYPIVVFLNPDSKQGVKTMRMRLCPESRKSARKLYERSHKLRKNNHHLFTTTINLNSMNDGWYGALKEAIQQQQNQLVWVSEGKADGATSDDLDLHDDRLSYLSAPGSEYSMYSTDSRHTSDYEDTDTEGGAYTDQELDETLNDEVGTPPESAITRSSEPVREDSSGMHHENQTYPPYSPQAQPQPIHRIDSPGFKPASQQKAEASSPVPYLSPETNPASSTSAVNHNVNLTNVRLEEPTPAPSTSYSPQADSLRTPSTEAAHIMLRDQEPSLSSHVDPTKVYRKDPYPEEMMRQNHVLKQPAVSHPGHRPDKEPNLTYEPQLPYVEKQASRDLEQPTYRYESSSYTDQFSRNYEHRLRYEDRVPMYEEQWSYYDDKQPYPSRPPFDNQHSQDLDSRQHPEESSERGYFPRFEEPAPLSYDSRPRYEQAPRASALRHEEQPAPGYDTHGRLRPEAQPHPSAGPKPAESKQYFEQYSRSYEQVPPQGFTSRAGHFEPLHGAAAVPPLIPSSQHKPEALPSNTKPLPPPPTQTEEEEDPAMKPQSVLTRVKMFENKRSASLETKKDVNDTGSFKPPEVASKPSGAPIIGPKPTSQNQFSEHDKTLYRIPEPQKPQLKPPEDIVRSNHYDPEEDEEYYRKQLSYFDRRSFENKPPAHIAASHLSEPAKPAHSQNQSNFSSYSSKGKPPEADGVDRSFGEKRYEPIQATPPPPPLPSQYAQPSQPVTSASLHIHSKGAHGEGNSVSLDFQNSLVSKPDPPPSQNKPATFRPPNREDTAQAAFYPQKSFPDKAPVNGTEQTQKTVTPAYNRFTPKPYTSSARPFERKFESPKFNHNLLPSETAHKPDLSSKTPTSPKTLVKSHSLAQPPEFDSGVETFSIHAEKPKYQINNISTVPKAIPVSPSAVEEDEDEDGHTVVATARGIFNSNGGVLSSIETGVSIIIPQGAIPEGVEQEIYFKVCRDNSILPPLDKEKGETLLSPLVMCGPHGLKFLKPVELRLPHCDPKTWQNKCLPGDPNYLVGANCVSVLIDHF

SEQ ID NO: 15477 - protein, 1353 aa, Artificial Sequence
  Synthetic polypeptide
PSLRSRDEERISKPGAVSTPVKHADDHTPKTVEEVTVERNEKQTPSLPEPKPVYAQVGQPDVDLPVSPSDGVLPNSTHEDGILRPSMKLVKFRKGDSVGLRLAGGNDVGIFVAGVLEDSPAAKEGLEEGDQILRVNNVDFTNIIREEAVLFLLDLPKGEEVTILAQKKKDVYRRIVESDVGDSFYIRTHFEYEKESPYGLSFNKGEVFRVVDTLYNGKLGSWLAIRIGKNHKEVERGIIPNKNRAEQLASVQYTLPKTAGGDRADFWRFRGLRSSKRNLRKSREDLSAQPVQTKFPAYERVVLREAGFLRPVTIFGPIADVAREKLAREEPDIYQIAKSEPRDAGTDQRSSGIIRLHTIKQIIDQDKHALLDVTPNAVDRLNYAQWYPIVVFLNPDSKQGVKTMRMRLCPESRKSARKLYERSHKLRKNNHHLFTTTINLNSMNDGWYGALKEAIQQQQNQLVWVSEGKADGATSDDLDLHDDRLSYLSAPGSEYSMYSTDSRHTSDYEDTDTEGGAYTDQELDETLNDEVGTPPESAITRSSEPVREDSSGMHHENQTYPPYSPQAQPQPIHRIDSPGFKPASQQVYRKDPYPEEMMRQNHVLKQPAVSHPGHRPDKEPNLTYEPQLPYVEKQASRDLEQPTYRYESSSYTDQFSRNYEHRLRYEDRVPMYEEQWSYYDDKQPYPSRPPFDNQHSQDLDSRQHPEESSERGYFPRFEEPAPLSYDSRPRYEQAPRASALRHEEQPAPGYDTHGRLRPEAQPHPSAGPKPAESKQYFEQYSRSYEQVPPQGFTSRAGHFEPLHGAAAVPPLIPSSQHKPEALPSNTKPLPPPPTQTEEEEDPAMKPQSVLTRVKMFENKRSASLETKKDVNDTGSFKPPEVASKPSGAPIIGPKPTSQNQFSEHDKTLYRIPEPQKPQLKPPEDIVRSNHYDPEEDEEYYRKQLSYFDRRSFENKPPAHIAASHLSEPAKPAHSQNQSNFSSYSSKGKPPEADGVDRSFGEKRYEPIQATPPPPPLPSQYAQPSQPVTSASLHIHSKGAHGEGNSVSLDFQNSLVSKPDPPPSQNKPATFRPPNREDTAQAAFYPQKSFPDKAPVNGTEQTQKTVTPAYNRFTPKPYTSSARPFERKFESPKFNHNLLPSETAHKPDLSSKTPTSPKTLVKSHSLAQPPEFDSGVETFSIHAEKPKYQINNISTVPKAIPVSPSAVEEDEDEDGHTVVATARGIFNSNGGVLSSIETGVSIIIPQGAIPEGVEQEIYFKVCRDNSILPPLDKEKGETLLSPLVMCGPHGLKFLKPVELRLPHCASMTPDGWSFALKSSDSSSGDPKTWQNKCLPGDPNYLVGANCVSVLIDHF

SEQ ID NO: 15478 - protein, 1333 aa, Artificial Sequence
  Synthetic polypeptide
PSLRSRDEERISKPGAVSTPVKHADDHTPKTVEEVTVERNEKQTPSLPEPKPVYAQVGQPDVDLPVSPSDGVLPNSTHEDGILRPSMKLVKFRKGDSVGLRLAGGNDVGIFVAGVLEDSPAAKEGLEEGDQILRVNNVDFTNIIREEAVLFLLDLPKGEEVTILAQKKKDVYRRIVESDVGDSFYIRTHFEYEKESPYGLSFNKGEVFRVVDTLYNGKLGSWLAIRIGKNHKEVERGIIPNKNRAEQLASVQYTLPKTAGGDRADFWRFRGLRSSKRNLRKSREDLSAQPVQTKFPAYERVVLREAGFLRPVTIFGPIADVAREKLAREEPDIYQIAKSEPRDAGTDQRSSGIIRLHTIKQIIDQDKHALLDVTPNAVDRLNYAQWYPIVVFLNPDSKQGVKTMRMRLCPESRKSARKLYERSHKLRKNNHHLFTTTINLNSMNDGWYGALKEAIQQQQNQLVWVSEGKADGATSDDLDLHDDRLSYLSAPGSEYSMYSTDSRHTSDYEDTDTEGGAYTDQELDETLNDEVGTPPESAITRSSEPVREDSSGMHHENQTYPPYSPQAQPQPIHRIDSPGFKPASQQVYRKDPYPEEMMRQNHVLKQPAVSHPGHRPDKEPNLTYEPQLPYVEKQASRDLEQPTYRYESSSYTDQFSRNYEHRLRYEDRVPMYEEQWSYYDDKQPYPSRPPFDNQHSQDLDSRQHPEESSERGYFPRFEEPAPLSYDSRPRYEQAPRASALRHEEQPAPGYDTHGRLRPEAQPHPSAGPKPAESKQYFEQYSRSYEQVPPQGFTSRAGHFEPLHGAAAVPPLIPSSQHKPEALPSNTKPLPPPPTQTEEEEDPAMKPQSVLTRVKMFENKRSASLETKKDVNDTGSFKPPEVASKPSGAPIIGPKPTSQNQFSEHDKTLYRIPEPQKPQLKPPEDIVRSNHYDPEEDEEYYRKQLSYFDRRSFENKPPAHIAASHLSEPAKPAHSQNQSNFSSYSSKGKPPEADGVDRSFGEKRYEPIQATPPPPPLPSQYAQPSQPVTSASLHIHSKGAHGEGNSVSLDFQNSLVSKPDPPPSQNKPATFRPPNREDTAQAAFYPQKSFPDKAPVNGTEQTQKTVTPAYNRFTPKPYTSSARPFERKFESPKFNHNLLPSETAHKPDLSSKTPTSPKTLVKSHSLAQPPEFDSGVETFSIHAEKPKYQINNISTVPKAIPVSPSAVEEDEDEDGHTVVATARGIFNSNGGVLSSIETGVSIIIPQGAIPEGVEQEIYFKVCRDNSILPPLDKEKGETLLSPLVMCGPHGLKFLKPVELRLPHCDPKTWQNKCLPGDPNYLVGANCVSVLIDHF

SEQ ID NO: 15479 - protein, 54 aa, Artificial Sequence
  Synthetic polypeptide
SSNSTSGYISKGNEITVSKRYLHSHVCCSIIHNSQVSGVEMKREFLNLGLSQLL

SEQ ID NO: 15480 - protein, 121 aa, Artificial Sequence
  Synthetic polypeptide
ILDFQIMGAELAPGFGFGIAISGGRDNPHFQSGETSIVISDVLKGGPAEGQLQENDRVAMVNGVSMDNVEHAFAVQQLRKSGKNAKITIRRKKKVQIPVSRPDPEPVSDNEEDSYDEEIHD

SEQ ID NO: 15481 - protein, 366 aa, Artificial Sequence
  Synthetic polypeptide
ILDFQIMGAELAPGFGFGIAISGGRDNPHFQSGETSIVISDVLKGGPAEGQLQENDRVAMVNGVSMDNVEHAFAVQQLRKSGKNAKITIRRKKKVQIPVSRPDPEPVSDNEEDSYDEEIHDPRSGRSGVVNRRSEKIWPRDRSASRERSLSPRSDRRSVASSQPAKPTKVTLVKSRKNEEYGLRLASHIFVKEISQDSLAARDGNIQEGDVVLKINGTVTENMSLTDAKTLIERSKGKLKMVVQRDERATLLNVPDLSDSIHSANASERDDISEIQSLASDHSGRSHDRPPRRSRSRSPDQRSEPSDHSRHSPQQPSNGRVTRTFENLKKIMILLSRKMCMCTYTQQLHTISGDSQGSIGHHLTHG

SEQ ID NO: 15482 - protein, 1751 aa, Artificial Sequence
  Synthetic polypeptide
ILDFQIMGAELAPGFGFGIAISGGRDNPHFQSGETSIVISDVLKGGPAEGQLQENDRVAMVNGVSMDNVEHAFAVQQLRKSGKNAKITIRRKKKVQIPVSRPDPEPVSDNEEDSYDEEIHDPRSGRSGVVNRRSEKIWPRDRSASRERSLSPRSDRRSVASSQPAKPTKVTLVKSRKNEEYGLRLASHIFVKEISQDSLAARDGNIQEGDVVLKINGTVTENMSLTDAKTLIERSKGKLKMVVQRDERATLLNVPDLSDSIHSANASERDDISEIQSLASDHSGRSHDRPPRRSRSRSPDQRSEPSDHSRHSPQQPSNGSLRSRDEERISKPGAVSTPVKHADDHTPKTVEEVTVERNEKQTPSLPEPKPVYAQVGQPDVDLPVSPSDGVLPNSTHEDGILRPSMKLVKFRKGDSVGLRLAGGNDVGIFVAGVLEDSPAAKEGLEEGDQILRVNNVDFTNIIREEAVLFLLDLPKGEEVTILAQKKKDVYRRIVESDVGDSFYIRTHFEYEKESPYGLSFNKGEVFRVVDTLYNGKLGSWLAIRIGKNHKEVERGIIPNKNRAEQLASVQYTLPKTAGGDRADFWRFRGLRSSKRNLRKSREDLSAQPVQTKFPAYERVVLREAGFLRPVTIFGPIADVAREKLAREEPDIYQIAKSEPRDAGTDQRSSGIIRLHTIKQIIDQDKHALLDVTPNAVDRLNYAQWYPIVVFLNPDSKQGVKTMRMRLCPESRKSARKLYERSHKLRKNNHHLFTTTINLNSMNDGWYGALKEAIQQQQNQLVWVSEGKADGATSDDLDLHDDRLSYLSAPGSEYSMYSTDSRHTSDYEDTDTEGGAYTDQELDETLNDEVGTPPESAITRSSEPVREDSSGMHHENQTYPPYSPQAQPQPIHRIDSPGFKPASQQKAEASSPVPYLSPETNPASSTSAVNHNVNLTNVRLEEPTPAPSTSYSPQADSLRTPSTEAAHIMLRDQEPSLSSHVDPTKVYRKDPYPEEMMRQNHVLKQPAVSHPGHRPDKEPNLTYEPQLPYVEKQASRDLEQPTYRYESSSYTDQFSRNYEHRLRYEDRVPMYEEQWSYYDDKQPYPSRPPFDNQHSQDLDSRQHPEESSERGYFPRFEEPAPLSYDSRPRYEQAPRASALRHEEQPAPGYDTHGRLRPEAQPHPSAGPKPAESKQYFEQYSRSYEQVPPQGFTSRAGHFEPLHGAAAVPPLIPSSQHKPEALPSNTKPLPPPPTQTEEEEDPAMKPQSVLTRVKMFENKRSASLETKKDVNDTGSFKPPEVASKPSGAPIIGPKPTSQNQFSEHDKTLYRIPEPQKPQLKPPEDIVRSNHYDPEEDEEYYRKQLSYFDRRSFENKPPAHIAASHLSEPAKPAHSQNQSNFSSYSSKGKPPEADGVDRSFGEKRYEPIQATPPPPPLPSQYAQPSQPVTSASLHIHSKGAHGEGNSVSLDFQNSLVSKPDPPPSQNKPATFRPPNREDTAQAAFYPQKSFPDKAPVNGTEQTQKTVTPAYNRFTPKPYTSSARPFERKFESPKFNHNLLPSETAHKPDLSSKTPTSPKTLVKSHSLAQPPEFDSGVETFSIHAEKPKYQINNISTVPKAIPVSPSAVEEDEDEDGHTVVATARGIFNSNGGVLSSIETGVSIIIPQGAIPEGVEQEIYFKVCRDNSILPPLDKEKGETLLSPLVMCGPHGLKFLKPVELRLPHCASMTPDGWSFALKSSDSSSGDPKTWQNKCLPGDPNYLVGANCVSVLIDHF

SEQ ID NO: 15483 - protein, 1731 aa, Artificial Sequence
  Synthetic polypeptide
ILDFQIMGAELAPGFGFGIAISGGRDNPHFQSGETSIVISDVLKGGPAEGQLQENDRVAMVNGVSMDNVEHAFAVQQLRKSGKNAKITIRRKKKVQIPVSRPDPEPVSDNEEDSYDEEIHDPRSGRSGVVNRRSEKIWPRDRSASRERSLSPRSDRRSVASSQPAKPTKVTLVKSRKNEEYGLRLASHIFVKEISQDSLAARDGNIQEGDVVLKINGTVTENMSLTDAKTLIERSKGKLKMVVQRDERATLLNVPDLSDSIHSANASERDDISEIQSLASDHSGRSHDRPPRRSRSRSPDQRSEPSDHSRHSPQQPSNGSLRSRDEERISKPGAVSTPVKHADDHTPKTVEEVTVERNEKQTPSLPEPKPVYAQVGQPDVDLPVSPSDGVLPNSTHEDGILRPSMKLVKFRKGDSVGLRLAGGNDVGIFVAGVLEDSPAAKEGLEEGDQILRVNNVDFTNIIREEAVLFLLDLPKGEEVTILAQKKKDVYRRIVESDVGDSFYIRTHFEYEKESPYGLSFNKGEVFRVVDTLYNGKLGSWLAIRIGKNHKEVERGIIPNKNRAEQLASVQYTLPKTAGGDRADFWRFRGLRSSKRNLRKSREDLSAQPVQTKFPAYERVVLREAGFLRPVTIFGPIADVAREKLAREEPDIYQIAKSEPRDAGTDQRSSGIIRLHTIKQIIDQDKHALLDVTPNAVDRLNYAQWYPIVVFLNPDSKQGVKTMRMRLCPESRKSARKLYERSHKLRKNNHHLFTTTINLNSMNDGWYGALKEAIQQQQNQLVWVSEGKADGATSDDLDLHDDRLSYLSAPGSEYSMYSTDSRHTSDYEDTDTEGGAYTDQELDETLNDEVGTPPESAITRSSEPVREDSSGMHHENQTYPPYSPQAQPQPIHRIDSPGFKPASQQKAEASSPVPYLSPETNPASSTSAVNHNVNLTNVRLEEPTPAPSTSYSPQADSLRTPSTEAAHIMLRDQEPSLSSHVDPTKVYRKDPYPEEMMRQNHVLKQPAVSHPGHRPDKEPNLTYEPQLPYVEKQASRDLEQPTYRYESSSYTDQFSRNYEHRLRYEDRVPMYEEQWSYYDDKQPYPSRPPFDNQHSQDLDSRQHPEESSERGYFPRFEEPAPLSYDSRPRYEQAPRASALRHEEQPAPGYDTHGRLRPEAQPHPSAGPKPAESKQYFEQYSRSYEQVPPQGFTSRAGHFEPLHGAAAVPPLIPSSQHKPEALPSNTKPLPPPPTQTEEEEDPAMKPQSVLTRVKMFENKRSASLETKKDVNDTGSFKPPEVASKPSGAPIIGPKPTSQNQFSEHDKTLYRIPEPQKPQLKPPEDIVRSNHYDPEEDEEYYRKQLSYFDRRSFENKPPAHIAASHLSEPAKPAHSQNQSNFSSYSSKGKPPEADGVDRSFGEKRYEPIQATPPPPPLPSQYAQPSQPVTSASLHIHSKGAHGEGNSVSLDFQNSLVSKPDPPPSQNKPATFRPPNREDTAQAAFYPQKSFPDKAPVNGTEQTQKTVTPAYNRFTPKPYTSSARPFERKFESPKFNHNLLPSETAHKPDLSSKTPTSPKTLVKSHSLAQPPEFDSGVETFSIHAEKPKYQINNISTVPKAIPVSPSAVEEDEDEDGHTVVATARGIFNSNGGVLSSIETGVSIIIPQGAIPEGVEQEIYFKVCRDNSILPPLDKEKGETLLSPLVMCGPHGLKFLKPVELRLPHCDPKTWQNKCLPGDPNYLVGANCVSVLIDHF

SEQ ID NO: 15484 - protein, 1671 aa, Artificial Sequence
  Synthetic polypeptide
ILDFQIMGAELAPGFGFGIAISGGRDNPHFQSGETSIVISDVLKGGPAEGQLQENDRVAMVNGVSMDNVEHAFAVQQLRKSGKNAKITIRRKKKVQIPVSRPDPEPVSDNEEDSYDEEIHDPRSGRSGVVNRRSEKIWPRDRSASRERSLSPRSDRRSVASSQPAKPTKVTLVKSRKNEEYGLRLASHIFVKEISQDSLAARDGNIQEGDVVLKINGTVTENMSLTDAKTLIERSKGKLKMVVQRDERATLLNVPDLSDSIHSANASERDDISEIQSLASDHSGRSHDRPPRRSRSRSPDQRSEPSDHSRHSPQQPSNGSLRSRDEERISKPGAVSTPVKHADDHTPKTVEEVTVERNEKQTPSLPEPKPVYAQVGQPDVDLPVSPSDGVLPNSTHEDGILRPSMKLVKFRKGDSVGLRLAGGNDVGIFVAGVLEDSPAAKEGLEEGDQILRVNNVDFTNIIREEAVLFLLDLPKGEEVTILAQKKKDVYRRIVESDVGDSFYIRTHFEYEKESPYGLSFNKGEVFRVVDTLYNGKLGSWLAIRIGKNHKEVERGIIPNKNRAEQLASVQYTLPKTAGGDRADFWRFRGLRSSKRNLRKSREDLSAQPVQTKFPAYERVVLREAGFLRPVTIFGPIADVAREKLAREEPDIYQIAKSEPRDAGTDQRSSGIIRLHTIKQIIDQDKHALLDVTPNAVDRLNYAQWYPIVVFLNPDSKQGVKTMRMRLCPESRKSARKLYERSHKLRKNNHHLFTTTINLNSMNDGWYGALKEAIQQQQNQLVWVSEGKADGATSDDLDLHDDRLSYLSAPGSEYSMYSTDSRHTSDYEDTDTEGGAYTDQELDETLNDEVGTPPESAITRSSEPVREDSSGMHHENQTYPPYSPQAQPQPIHRIDSPGFKPASQQVYRKDPYPEEMMRQNHVLKQPAVSHPGHRPDKEPNLTYEPQLPYVEKQASRDLEQPTYRYESSSYTDQFSRNYEHRLRYEDRVPMYEEQWSYYDDKQPYPSRPPFDNQHSQDLDSRQHPEESSERGYFPRFEEPAPLSYDSRPRYEQAPRASALRHEEQPAPGYDTHGRLRPEAQPHPSAGPKPAESKQYFEQYSRSYEQVPPQGFTSRAGHFEPLHGAAAVPPLIPSSQHKPEALPSNTKPLPPPPTQTEEEEDPAMKPQSVLTRVKMFENKRSASLETKKDVNDTGSFKPPEVASKPSGAPIIGPKPTSQNQFSEHDKTLYRIPEPQKPQLKPPEDIVRSNHYDPEEDEEYYRKQLSYFDRRSFENKPPAHIAASHLSEPAKPAHSQNQSNFSSYSSKGKPPEADGVDRSFGEKRYEPIQATPPPPPLPSQYAQPSQPVTSASLHIHSKGAHGEGNSVSLDFQNSLVSKPDPPPSQNKPATFRPPNREDTAQAAFYPQKSFPDKAPVNGTEQTQKTVTPAYNRFTPKPYTSSARPFERKFESPKFNHNLLPSETAHKPDLSSKTPTSPKTLVKSHSLAQPPEFDSGVETFSIHAEKPKYQINNISTVPKAIPVSPSAVEEDEDEDGHTVVATARGIFNSNGGVLSSIETGVSIIIPQGAIPEGVEQEIYFKVCRDNSILPPLDKEKGETLLSPLVMCGPHGLKFLKPVELRLPHCASMTPDGWSFALKSSDSSSGDPKTWQNKCLPGDPNYLVGANCVSVLIDHF

SEQ ID NO: 15485 - protein, 1651 aa, Artificial Sequence
  Synthetic polypeptide
ILDFQIMGAELAPGFGFGIAISGGRDNPHFQSGETSIVISDVLKGGPAEGQLQENDRVAMVNGVSMDNVEHAFAVQQLRKSGKNAKITIRRKKKVQIPVSRPDPEPVSDNEEDSYDEEIHDPRSGRSGVVNRRSEKIWPRDRSASRERSLSPRSDRRSVASSQPAKPTKVTLVKSRKNEEYGLRLASHIFVKEISQDSLAARDGNIQEGDVVLKINGTVTENMSLTDAKTLIERSKGKLKMVVQRDERATLLNVPDLSDSIHSANASERDDISEIQSLASDHSGRSHDRPPRRSRSRSPDQRSEPSDHSRHSPQQPSNGSLRSRDEERISKPGAVSTPVKHADDHTPKTVEEVTVERNEKQTPSLPEPKPVYAQVGQPDVDLPVSPSDGVLPNSTHEDGILRPSMKLVKFRKGDSVGLRLAGGNDVGIFVAGVLEDSPAAKEGLEEGDQILRVNNVDFTNIIREEAVLFLLDLPKGEEVTILAQKKKDVYRRIVESDVGDSFYIRTHFEYEKESPYGLSFNKGEVFRVVDTLYNGKLGSWLAIRIGKNHKEVERGIIPNKNRAEQLASVQYTLPKTAGGDRADFWRFRGLRSSKRNLRKSREDLSAQPVQTKFPAYERVVLREAGFLRPVTIFGPIADVAREKLAREEPDIYQIAKSEPRDAGTDQRSSGIIRLHTIKQIIDQDKHALLDVTPNAVDRLNYAQWYPIVVFLNPDSKQGVKTMRMRLCPESRKSARKLYERSHKLRKNNHHLFTTTINLNSMNDGWYGALKEAIQQQQNQLVWVSEGKADGATSDDLDLHDDRLSYLSAPGSEYSMYSTDSRHTSDYEDTDTEGGAYTDQELDETLNDEVGTPPESAITRSSEPVREDSSGMHHENQTYPPYSPQAQPQPIHRIDSPGFKPASQQVYRKDPYPEEMMRQNHVLKQPAVSHPGHRPDKEPNLTYEPQLPYVEKQASRDLEQPTYRYESSSYTDQFSRNYEHRLRYEDRVPMYEEQWSYYDDKQPYPSRPPFDNQHSQDLDSRQHPEESSERGYFPRFEEPAPLSYDSRPRYEQAPRASALRHEEQPAPGYDTHGRLRPEAQPHPSAGPKPAESKQYFEQYSRSYEQVPPQGFTSRAGHFEPLHGAAAVPPLIPSSQHKPEALPSNTKPLPPPPTQTEEEEDPAMKPQSVLTRVKMFENKRSASLETKKDVNDTGSFKPPEVASKPSGAPIIGPKPTSQNQFSEHDKTLYRIPEPQKPQLKPPEDIVRSNHYDPEEDEEYYRKQLSYFDRRSFENKPPAHIAASHLSEPAKPAHSQNQSNFSSYSSKGKPPEADGVDRSFGEKRYEPIQATPPPPPLPSQYAQPSQPVTSASLHIHSKGAHGEGNSVSLDFQNSLVSKPDPPPSQNKPATFRPPNREDTAQAAFYPQKSFPDKAPVNGTEQTQKTVTPAYNRFTPKPYTSSARPFERKFESPKFNHNLLPSETAHKPDLSSKTPTSPKTLVKSHSLAQPPEFDSGVETFSIHAEKPKYQINNISTVPKAIPVSPSAVEEDEDEDGHTVVATARGIFNSNGGVLSSIETGVSIIIPQGAIPEGVEQEIYFKVCRDNSILPPLDKEKGETLLSPLVMCGPHGLKFLKPVELRLPHCDPKTWQNKCLPGDPNYLVGANCVSVLIDHF

SEQ ID NO: 15486 - protein, 51 aa, Artificial Sequence
  Synthetic polypeptide
NLKCKIQNFSSDDVMFKGNAHWNILNFGFSDYGCRTGSWIWIWNCNIWWTR

SEQ ID NO: 15487 - protein, 45 aa, Artificial Sequence
  Synthetic polypeptide
RKCSLEHSEFWIFRLWVPNWLLDLDLELQYLVDEIILIFRVGKRQ

SEQ ID NO: 15488 - protein, 66 aa, Artificial Sequence; identical to SEQ ID NO: 4372
  Synthetic polypeptide

SEQ ID NO: 15489 - protein, 523 aa, Artificial Sequence; identical to SEQ ID NO: 1982
  Synthetic polypeptide

SEQ ID NO: 15490 - protein, 736 aa, Artificial Sequence; identical to SEQ ID NO: 1699
  Synthetic polypeptide

SEQ ID NO: 15491 - protein, 154 aa, Artificial Sequence; identical to SEQ ID NO: 3089
  Synthetic polypeptide

SEQ ID NO: 15492 - protein, 148 aa, Artificial Sequence
  Synthetic polypeptide
DPHVRTRQTQPENQSLASGVLEHHRSRGHFHIHDWSNSSPTEPALHGLWPGDLLCGYHLLVHPCPGHLWCQQVSGAIRDDDWKDDDRHAVLCGHHAGRAHEFRSSPSSHSASRGEALLETGPKHLLHALLDDLWRGVCRPDRPLRHGN

SEQ ID NO: 15493 - protein, 535 aa, Artificial Sequence; identical to SEQ ID NO: 1956
  Synthetic polypeptide

SEQ ID NO: 15494 - protein, 748 aa, Artificial Sequence; identical to SEQ ID NO: 1686
  Synthetic polypeptide

SEQ ID NO: 15495 - protein, 46 aa, Artificial Sequence; identical to SEQ ID NO: 5412
  Synthetic polypeptide

SEQ ID NO: 15496 - protein, 83 aa, Artificial Sequence
  Synthetic polypeptide
CVAVASSPTSISPLCQVQHPAKMKRKANRWRLSLRNGLLPSTPRATQQIPMEFLNSRVADIPIKPCISVYPMTPSQTHCSISW

SEQ ID NO: 15497 - protein, 66 aa, Artificial Sequence
  Synthetic polypeptide
CVAVASSPTSISPLCQVQHPAKMKRKANRWRLSLRNGLLPSTPRATQQIPMEFLNSRVADIPIKPW

SEQ ID NO: 15498 - protein, 23 aa, Artificial Sequence
  Synthetic polypeptide
HVLLWPVHQPAYPPSAKCNTQQK

SEQ ID NO: 15499 - protein, 131 aa, Artificial Sequence
  Synthetic polypeptide
MCCCGQFTNQHIPPLPSATPSKNEEESKQVETQPEKWSVAKHTQSYPTDSYGVLEFQGGGYSNKAMVRKAFRHGATRITAFIGGQSPSPKLQIPGLLHGCGSIFLDISLKNQEIYLCTWLLAMRLGNWTPL

SEQ ID NO: 15500 - protein, 500 aa, Artificial Sequence
  Synthetic polypeptide
MCCCGQFTNQHIPPLPSATPSKNEEESKQVETQPEKWSVAKHTQSYPTDSYGVLEFQGGGYSNKAMYIRVSYDTKPDSLLHLMVKDWQLELPKLLISVHGGLQNFEMQPKLKQVFGKGLIKAAMTTGAWIFTGGVSTAPCGENLYDEEGKRLPPCIPGAWLTPALMACYLLVANILLVNLLIAVFNNTFFEVKSISNQVWKFQRYQLIMTFHDRPVLPPPMIILSHIYIIIMRLSGRCRKKREGDQEERDRGLKLFLSDEELKRLHEFEEQCVQEHFREKEDEQQSSSDERIRVTSERVENMSMRLEEINERETFMKTSLQTVDLRLAQLEELSNRMVNALENLAGIDRSDLIQARSRASSECEATYLLRQSSINSADGYSLYRYHFNGEELLFEDTSLSTSPGTGVRKKTCSFRIKEEKDVKTHLVPECQNSLHLSLGTSTSATPDGSHLAVDDLKNAEESKLGPDIGISKEDDERQTDSKKEETISPSLNKTDVIHGQ

SEQ ID NO: 15501 - protein, 295 aa, Artificial Sequence
  Synthetic polypeptide
MCCCGQFTNQHIPPLPSATPSKNEEESKQVETQPEKWSVAKHTQSYPTDSYGVLEFQGGGYSNKAMYIRVSYDTKPDSLLHLMVKDWQLELPKLLISVHGGLQNFEMQPKLKQVFGKGLIKAAMTTGAWIFTGGVSTGVISHVGDALKDHSSKSRGRVCAIGIAPWGIVENKEDLVGKDVTRVYQTMSNPLSKLSVLNNSHTHFILADNGTLGKYGAEVKLRRLLEKHISLQKINTRLGQGVPLVGLVVEGGPNVVSIVLEYLQEEPPIPVVICDGSGRASDILSFAHKYCEEGG

SEQ ID NO: 15502 - protein, 1385 aa, Artificial Sequence
  Synthetic polypeptide
MCCCGQFTNQHIPPLPSATPSKNEEESKQVETQPEKWSVAKHTQSYPTDSYGVLEFQGGGYSNKAMYIRVSYDTKPDSLLHLMVKDWQLELPKLLISVHGGLQNFEMQPKLKQVFGKGLIKAAMTTGAWIFTGGVSTGVISHVGDALKDHSSKSRGRVCAIGIAPWGIVENKEDLVGKDVTRVYQTMSNPLSKLSVLNNSHTHFILADNGTLGKYGAEVKLRRLLEKHISLQKINTRLGQGVPLVGLVVEGGPNVVSIVLEYLQEEPPIPVVICDGSGRASDILSFAHKYCEEGGIINESLREQLLVTIQKTFNYNKAQSHQLFAIIMECMKKKELVTVFRMGSEGQQDIEMAILTALLKGTNVSAPDQLSLALAWNRVDIARSQIFVFGPHWPPLGSLAPPTDSKATEKEKKPPMATTKGGRGKGKGKKKGKVKEEVEEETDPRKIELLNWVNALEQAMLDALVLDRVDFVKLLIENGVNMQHFLTIPRLEELYNTRLGPPNTLHLLVRDVKKSNLPPDYHISLIDIGLVLEYLMGGAYRCNYTRKNFRTLYNNLFGPKRPKALKLLGMEDDEPPAKGKKKKKKKKEEEIDIDVDDPAVSRFQYPFHELMVWAVLMKRQKMAVFLWQRGEESMAKALVACKLYKAMAHESSESDLVDDISQDLDNNSKDFGQLALELLDQSYKHDEQIAMKLLTYELKNWSNSTCLKLAVAAKHRDFIAHTCSQMLLTDMWMGRLRMRKNPGLKVIMGILLPPTILFLEFRTYDDFSYQTSKENEDGKEKEEENTDANADAGSRKGDEENEHKKQRSIPIGTKICEFYNAPIVKFWFYTISYLGYLLLFNYVILVRMDGWPSLQEWIVISYIVSLALEKIREILMSEPGKLSQKIKVWLQEYWNITDLVAISTFMIGAILRLQNQPYMGYGRVIYCVDIIFWYIRVLDIFGVNKYLGPYVMMIGKMMIDMLYFVVIMLVVLMSFGVARQAILHPEEKPSWKLARNIFYMPYWMIYGEVFADQIDLYAMEINPPCGENLYDEEGKRLPPCIPGAWLTPALMACYLLVANILLVNLLIAVFNNTFFEVKSISNQVWKFQRYQLIMTFHDRPVLPPPMIILSHIYIIIMRLSGRCRKKREGDQEERDRGLKLFLSDEELKRLHEFEEQCVQEHFREKEDEQQSSSDERIRVTSERVENMSMRLEEINERETFMKTSLQTVDLRLAQLEELSNRMVNALENLAGIDRSDLIQARSRASSECEATYLLRQSSINSADGYSLYRYHFNGEELLFEDTSLSTSPGTGVRKKTCSFRIKEEKDVKTHLVPECQNSLHLSLGTSTSATPDGSHLAVDDLKNAEESKLGPDIGISKEDDERQTDSKKEETISPSLNKTDVIHGQ

SEQ ID NO: 15503 - protein, 1598 aa, Artificial Sequence
  Synthetic polypeptide
MCCCGQFTNQHIPPLPSATPSKNEEESKQVETQPEKWSVAKHTQSYPTDSYGVLEFQGGGYSNKAMYIRVSYDTKPDSLLHLMVKDWQLELPKLLISVHGGLQNFEMQPKLKQVFGKGLIKAAMTTGAWIFTGGVSTGVISHVGDALKDHSSKSRGRVCAIGIAPWGIVENKEDLVGKDVTRVYQTMSNPLSKLSVLNNSHTHFILADNGTLGKYGAEVKLRRLLEKHISLQKINTRLGQGVPLVGLVVEGGPNVVSIVLEYLQEEPPIPVVICDGSGRASDILSFAHKYCEEGGIINESLREQLLVTIQKTFNYNKAQSHQLFAIIMECMKKKELVTVFRMGSEGQQDIEMAILTALLKGTNVSAPDQLSLALAWNRVDIARSQIFVFGPHWPPLGSLAPPTDSKATEKEKKPPMATTKGGRGKGKGKKKGKVKEEVEEETDPRKIELLNWVNALEQAMLDALVLDRVDFVKLLIENGVNMQHFLTIPRLEELYNTRLGPPNTLHLLVRDVKKSNLPPDYHISLIDIGLVLEYLMGGAYRCNYTRKNFRTLYNNLFGPKRPKALKLLGMEDDEPPAKGKKKKKKKKEEEIDIDVDDPAVSRFQYPFHELMVWAVLMKRQKMAVFLWQRGEESMAKALVACKLYKAMAHESSESDLVDDISQDLDNNSKDFGQLALELLDQSYKHDEQIAMKLLTYELKNWSNSTCLKLAVAAKHRDFIAHTCSQMLLTDMWMGRLRMRKNPGLKVIMGILLPPTILFLEFRTYDDFSYQTSKENEDGKEKEEENTDANADAGSRKGDEENEHKKQRSIPIGTKICEFYNAPIVKFWFYTISYLGYLLLFNYVILVRMDGWPSLQEWIVISYIVSLALEKIREILMSEPGKLSQKIKVWLQEYWNITDLVAISTFMIGAILRLQNQPYMGYGRVIYCVDIIFWYIRVLDIFGVNKYLGPYVMMIGKMMIDMLYFVVIMLVVLMSFGVARQAILHPEEKPSWKLARNIFYMPYWMIYGEVFADQIDLYAMEINPPCGENLYDEEGKRLPPCIPGAWLTPALMACYLLVANILLVNLLIAVFNNTFFEVKSISNQVWKFQRYQLIMTFHDRPVLPPPMIILSHIYIIIMRLSGRCRKKREGDQEERDRGLKLFLSDEELKRLHEFEEQCVQEHFREKEDEQQSSSDERIRVTSERVENMSMRLEEINERETFMKTSLQTVDLRLAQLEELSNRMVNALENLAGIDRSDLIQARSRASSECEATYLLRQSSINSADGYSLYRYHFNGEELLFEDTSLSTSPGTGVRKKTCSFRIKEEKDVKTHLVPECQNSLHLSLGTSTSATPDGSHLAVDDLKNAEESKLGPDIGISKEDDERQTDSKKEETISPSLNKTDVIHGQDKSDVQNTQLTVETTNIEGTISYPLEETKITRYFPDETINACKTMKSRSFVYSRGRKLVGGVNQDVEYSSITDQQLTTEWQCQVQKITRSHSTDIPYIVSEAAVQAEHKEQFADMQDEHHVAEAIPRIPRLSLTITDRNGMENLLSVKPDQTLGFPSLRSKSLHGHPRNVKSIQGKLDRSGHASSVSSLVIVSGMTAEEKKVKKEKASTETEC

SEQ ID NO: 15504 - protein, 21 aa, Artificial Sequence
  Synthetic polypeptide
ENVAHIHHGILCSHKKGQKRA

SEQ ID NO: 15505 - protein, 188 aa, Artificial Sequence
  Synthetic polypeptide
FLKDLELEIPFDPVIPLLDIYPKDYKSCYYKDICTCIFIVALFTIAKTWNQAKCPSMRDWIKKMWHIYTMEYYAVIKKAKKEHKMEESHLENAQKSFETTVRYFGMKPKSGEKEITPSYVFMVWYEFCSDFKTIWKRESKNISKERLKMAQESVSKLTSEKKVETKKINPTASLKERLRQKEASVTTN

SEQ ID NO: 15506 - protein, 29 aa, Artificial Sequence
  Synthetic polypeptide
KRPKKSIRWKKVTWRMHRKVLKQQYDILG

SEQ ID NO: 15507 - protein, 25 aa, Artificial Sequence
  Synthetic polypeptide
LSFFSFLPPCEEGHVCFPFHHDCTV

SEQ ID NO: 15508 - protein, 27 aa, Artificial Sequence
  Synthetic polypeptide
RRTCLLPLPPRLHSLNFGHFISGASMQ

SEQ ID NO: 15509 - protein, 711 aa, Artificial Sequence
  Synthetic polypeptide
WFCKGLLPLLDSHSSPSCHHVKKDMFASPSTTTAQFELRAFHIRGEHAMITARLEETIENLKHELEHRWRGGCEERKDVCISTDDDCPPKTFRNVCVQTDRETFLKPCESESKTTRSNQLVPKKLNISSLSQLSPPNDHKDIHAALQPMEGMASNQQKALPPPPASIPPPPPLPSGLGSLSPAPPMPPVSAGPPLPPPPPPPPPLPPPSSAGPPPPPPPPPLPNSPAPPNPGGPPPAPPPPGLAPPPPPGLFFGLGSSSSQCPRKPAIEPSCPMKPLYWTRIQISDRSQNATPTLWDSLEEPDIRDPSEFEYLFSKDTTQQKKKPLSETYEKKNKVKKIIKLLDGKRSQTVGILISSLHLEMKDIQQAIFNVDDSVVDLETLAALYENRAQEDELVKIRKYYETSKEEELKLLDKPEQFLHELAQIPNFAERAQCIIFRSVFSEGITSLHRKVEIITRASKDLLHVKSVKDILALILAFGNYMNGGNRTRGQADGYSLEILPKLKDVKSRDNGINLVDYVVKYYLRYYDQEAGTEKSVFPLPEPQDFFLASQVKFEDLIKDLRKLKRQLEASEKQMVVVCKESPKEYLQPFKDKLEEFFQKAKKEHKMEESHLENAQKSFETTVRYFGMKPKSGEKEITPSYVFMVWYEFCSDFKTIWKRESKNISKERLKMAQESVSKLTSEKKVETKKINPTASLKERLRQKEASVTTN

SEQ ID NO: 15510 - protein, 6 aa, Artificial Sequence
  Synthetic polypeptide
PGSVML

SEQ ID NO: 15511 - protein, 48 aa, Artificial Sequence
  Synthetic polypeptide
QAPWLMPVIPALWEAKAGGLHELRSSRPACATWQNPVSTKSTKISQVR

SEQ ID NO: 15512 - protein, 394 aa, Artificial Sequence
  Synthetic polypeptide
SRHFGRPRQVDCMSSGVQDQPVQHGKTLSLQKAQKLARFGDAVKGNLVVGTLSWPSPWVIVIGSFFSTCGAGLQSLTGAPRLLQAIAKDNIIPFLRVFGHSKANGEPTWALLLTAAIAELGILIASLDLVAPILSMFFLMCYLFVNLACALQTLLRTPNWRPRFRYYHWALSFMGMSICLALMFISSWYYAIVAMVIAGMIYKYIEYQGAEKEWGDGIRGLSLSAARFALLRLEEGPPHTKNWRPQLLVLLKLDEDLHVKHPRLLTFASQLKAGKGLTIVGSVIVGNFLENYGEALAAEQTIKHLMEAEKVKGFCQLVVAAKLREGISHLIQSCGLGGMKHNTVVMGWPNGWRQSEDARAWKTFIAMWSNFLRATLMCGGLCMMGGCLCYYHSY

SEQ ID NO: 15513 - protein, 638 aa, Artificial Sequence
  Synthetic polypeptide
SRHFGRPRQVDCMSSGVQDQPVQHGKTLSLQKAQKLARFGDAVKGNLVVGTLSWPSPWVIVIGSFFSTCGAGLQSLTGAPRLLQAIAKDNIIPFLRVFGHSKANGEPTWALLLTAAIAELGILIASLDLVAPILSMFFLMCYLFVNLACALQTLLRTPNWRPRFRYYHWALSFMGMSICLALMFISSWYYAIVAMVIAGMIYKYIEYQGAEKEWGDGIRGLSLSAARFALLRLEEGPPHTKNWRPQLLVLLKLDEDLHVKHPRLLTFASQLKAGKGLTIVGSVIVGNFLENYGEALAAEQTIKHLMEAEKVKGFCQLVVAAKLREGISHLIQSCGLGGMKHNTVVMGWPNGWRQSEDARAWKTFIGTVRVTTAAHLALLVAKNISFFPSNVEQFSEGNIDVWWIVHDGGMLMLLPFLLKQHKVWRKCSIRIFTVAQLEDNSIQMKKDLATFLYHLRIEAEVEVVEMHDSDISAYTYERTLMMEQRSQMLRHMRLSKTERDREAQLVKDRNSMLRLTSIGSDEDEETETYQEKVHMTWTKDKYMASRGQKAKSMEGFQDLLNMRPDQSNVRRMHTAVKLNEVIVNKSHEAKLVLLNMPGPPRNPEGDENYMEFLEVLTEGLERVLLVRGGGSEVITIYS

SEQ ID NO: 15514 - protein, 489 aa, Artificial Sequence
  Synthetic polypeptide
SRHFGRPRQVDCMSSGVQDQPVQHGKTLSLQKAQKLARFGDAVKGNLVVGTLSWPSPWVIVIGSFFSTCGAGLQSLTGAPRLLQAIAKDNIIPFLRVFGHSKANGEPTWALLLTAAIAELGILIASLDLVAPILSMFFLMCYLFVNLACALQTLLRTPNWRPRFRYYHWALSFMGMSICLALMFISSWYYAIVAMVIAGMIYKYIEYQGAEKEWGDGIRGLSLSAARFALLRLEEGPPHTKNWRPQLLVLLKLDEDLHVKHPRLLTFASQLKAGKGLTIVGSVIVGNFLENYGEALAAEQTIKHLMEAEKVKGFCQLVVAAKLREGISHLIQSCGLGGMKHNTVVMGWPNGWRQSEDARAWKTFIGTVRVTTAAHLALLVAKNISFFPSNVEQFSEGNIDVWWIVHDGGMLMLLPFLLKQHKVWRKCSIRIFTVAQLEDNSIQMKKDLATFLYHLRIEAEVEVVEMVRKLSLRYKSMTVIYQHILTSAL

SEQ ID NO: 15515 - protein, 29 aa, Artificial Sequence
  Synthetic polypeptide
DLSQNSITGEHSQLLDDGHKKARNAYLNN

SEQ ID NO: 15516 - protein, 45 aa, Artificial Sequence
  Synthetic polypeptide
DLSQNSITGEHSQLLDDGHKKARNAYLNNSNYEEGDEYFDKNLAL

SEQ ID NO: 15517 - protein, 71 aa, Artificial Sequence
  Synthetic polypeptide
DLSQNSITGEHSQLLDDGHKKARNAYLNNSNYEEGDEYFDKNLALFEEEMDTRPKVSSLLNRMANYTNLTQ

SEQ ID NO: 15518 - protein, 816 aa, Artificial Sequence
  Synthetic polypeptide
DLSQNSITGEHSQLLDDGHKKARNAYLNNSNYEEGDEYFDKNLALFEEEMDTRPKVSSLLNRMANYTNLTQGAKEHEEAENITEGKKKPTKTPQMGTFMGVYLPCLQNIFGVILFLRLTWVVGTAGVLQAFAIVLICCCCTMLTAISMSAIATNGVVPAGGSYFMISRALGPEFGGAVGLCFYLGTTFAAAMYILGAIEIFLVYIVPRAAIFHSDDALKESAAMLNNMRVYGTAFLVLMVLVVFIGVRYVNKFASLFLACVIVSILAIYAGAIKSSFAPPHFPVCMLGNRTLSSRHIDVCSKTKEINNMTVPSKLWGFFCNSSQFFNATCDEYFVHNNVTSIQGIPGLASGIITENLWSNYLPKGEIIEKPSAKSSDVLGSLNHEYVLVDITTSFTLLVGIFFPSVTGIMAGSNRSGDLKDAQKSIPIGTILAILTTSFVYLSNVVLFGACIEGVVLRDKFGDAVKGNLVVGTLSWPSPWVIVIGSFFSTCGAGLQSLTGAPRLLQAIAKDNIIPFLRVFGHSKANGEPTWALLLTAAIAELGILIASLDLVAPILSMFFLMCYLFVNLACALQTLLRTPNWRPRFRYYHWALSFMGMSICLALMFISSWYYAIVAMVIAGMIYKYIEYQGAEKEWGDGIRGLSLSAARFALLRLEEGPPHTKNWRPQLLVLLKLDEDLHVKHPRLLTFASQLKAGKGLTIVGSVIVGNFLENYGEALAAEQTIKHLMEAEKVKGFCQLVVAAKLREGISHLIQSCGLGGMKHNTVVMGWPNGWRQSEDARAWKTFIAMWSNFLRATLMCGGLCMMGGCLCYYHSY

SEQ ID NO: 15519 - protein, 1060 aa, Artificial Sequence
  Synthetic polypeptide
DLSQNSITGEHSQLLDDGHKKARNAYLNNSNYEEGDEYFDKNLALFEEEMDTRPKVSSLLNRMANYTNLTQGAKEHEEAENITEGKKKPTKTPQMGTFMGVYLPCLQNIFGVILFLRLTWVVGTAGVLQAFAIVLICCCCTMLTAISMSAIATNGVVPAGGSYFMISRALGPEFGGAVGLCFYLGTTFAAAMYILGAIEIFLVYIVPRAAIFHSDDALKESAAMLNNMRVYGTAFLVLMVLVVFIGVRYVNKFASLFLACVIVSILAIYAGAIKSSFAPPHFPVCMLGNRTLSSRHIDVCSKTKEINNMTVPSKLWGFFCNSSQFFNATCDEYFVHNNVTSIQGIPGLASGIITENLWSNYLPKGEIIEKPSAKSSDVLGSLNHEYVLVDITTSFTLLVGIFFPSVTGIMAGSNRSGDLKDAQKSIPIGTILAILTTSFVYLSNVVLFGACIEGVVLRDKFGDAVKGNLVVGTLSWPSPWVIVIGSFFSTCGAGLQSLTGAPRLLQAIAKDNIIPFLRVFGHSKANGEPTWALLLTAAIAELGILIASLDLVAPILSMFFLMCYLFVNLACALQTLLRTPNWRPRFRYYHWALSFMGMSICLALMFISSWYYAIVAMVIAGMIYKYIEYQGAEKEWGDGIRGLSLSAARFALLRLEEGPPHTKNWRPQLLVLLKLDEDLHVKHPRLLTFASQLKAGKGLTIVGSVIVGNFLENYGEALAAEQTIKHLMEAEKVKGFCQLVVAAKLREGISHLIQSCGLGGMKHNTVVMGWPNGWRQSEDARAWKTFIGTVRVTTAAHLALLVAKNISFFPSNVEQFSEGNIDVWWIVHDGGMLMLLPFLLKQHKVWRKCSIRIFTVAQLEDNSIQMKKDLATFLYHLRIEAEVEVVEMHDSDISAYTYERTLMMEQRSQMLRHMRLSKTERDREAQLVKDRNSMLRLTSIGSDEDEETETYQEKVHMTWTKDKYMASRGQKAKSMEGFQDLLNMRPDQSNVRRMHTAVKLNEVIVNKSHEAKLVLLNMPGPPRNPEGDENYMEFLEVLTEGLERVLLVRGGGSEVITIYS

SEQ ID NO: 15520 - protein, 911 aa, Artificial Sequence
  Synthetic polypeptide
DLSQNSITGEHSQLLDDGHKKARNAYLNNSNYEEGDEYFDKNLALFEEEMDTRPKVSSLLNRMANYTNLTQGAKEHEEAENITEGKKKPTKTPQMGTFMGVYLPCLQNIFGVILFLRLTWVVGTAGVLQAFAIVLICCCCTMLTAISMSAIATNGVVPAGGSYFMISRALGPEFGGAVGLCFYLGTTFAAAMYILGAIEIFLVYIVPRAAIFHSDDALKESAAMLNNMRVYGTAFLVLMVLVVFIGVRYVNKFASLFLACVIVSILAIYAGAIKSSFAPPHFPVCMLGNRTLSSRHIDVCSKTKEINNMTVPSKLWGFFCNSSQFFNATCDEYFVHNNVTSIQGIPGLASGIITENLWSNYLPKGEIIEKPSAKSSDVLGSLNHEYVLVDITTSFTLLVGIFFPSVTGIMAGSNRSGDLKDAQKSIPIGTILAILTTSFVYLSNVVLFGACIEGVVLRDKFGDAVKGNLVVGTLSWPSPWVIVIGSFFSTCGAGLQSLTGAPRLLQAIAKDNIIPFLRVFGHSKANGEPTWALLLTAAIAELGILIASLDLVAPILSMFFLMCYLFVNLACALQTLLRTPNWRPRFRYYHWALSFMGMSICLALMFISSWYYAIVAMVIAGMIYKYIEYQGAEKEWGDGIRGLSLSAARFALLRLEEGPPHTKNWRPQLLVLLKLDEDLHVKHPRLLTFASQLKAGKGLTIVGSVIVGNFLENYGEALAAEQTIKHLMEAEKVKGFCQLVVAAKLREGISHLIQSCGLGGMKHNTVVMGWPNGWRQSEDARAWKTFIGTVRVTTAAHLALLVAKNISFFPSNVEQFSEGNIDVWWIVHDGGMLMLLPFLLKQHKVWRKCSIRIFTVAQLEDNSIQMKKDLATFLYHLRIEAEVEVVEMVRKLSLRYKSMTVIYQHILTSAL

SEQ ID NO: 15521 - protein, 25 aa, Artificial Sequence
  Synthetic polypeptide
FLHFQLRPESELHHRGTQPTVRRRT

SEQ ID NO: 15522 - protein, 13 aa, Artificial Sequence
  Synthetic polypeptide
HRRWVISAFPTET

SEQ ID NO: 15523 - protein, 9 aa, Artificial Sequence
  Synthetic polypeptide
AKMQMETCV

SEQ ID NO: 15524 - protein, 18 aa, Artificial Sequence
  Synthetic polypeptide
AKMQMETCVEVTNCCKSC

SEQ ID NO: 15525 - protein, 18 aa, Artificial Sequence
  Synthetic polypeptide
LIVTNSQKLEQKCRWKPV

SEQ ID NO: 15526 - protein, 20 aa, Artificial Sequence
  Synthetic polypeptide
LIVTNSQKLEQKCRWKPVSK

SEQ ID NO: 15527 - protein, 15 aa, Artificial Sequence
  Synthetic polypeptide
PTHRNLSKNADGNLC

SEQ ID NO: 15528 - protein, 40 aa, Artificial Sequence
  Synthetic polypeptide
PTHRNLSKNADGNLCRSNQLLQVMLTMHRIVISSAELLQK

SEQ ID NO: 15529 - protein, 79 aa, Artificial Sequence
  Synthetic polypeptide
PTHRNLSKNADGNLCRSNQLLQVMLTMHRIVISSAELLQKVITLYKDALAKNSPGLCLKICYFVRYWITEFWVMFKMDA

SEQ ID NO: 15530 - protein, 732 aa, Artificial Sequence
  Synthetic polypeptide
PTHRNLSKNADGNLCRSNQLLQVMLTMHRIVISSAELLQKVITLYKDALAKNSPGLCLKICYFVRYWITEFWVMFKMDASLTDTMEEFQELVKAKGEELHCRLIDTTQINARDWSRKLTQRIKSNTSKKRKVSLLFDHLEPEELSEHLTYLEFKSFRRISFSDYQNYLVNSCVKENPTMERSIALCNGISQWVQLMVLSRPTPQLRAEVFIKFIQVAQKLHQLQNFNTLMAVIGGLCHSSISRLKETSSHVPHEINKVLGEMTELLSSSRNYDNYRRAYGECTDFKIPILGVHLKDLISLYEAMPDYLEDGKVNVHKLLALYNHISELVQLQEVAPPLEANKDLVHLLTLSLDLYYTEDEIYELSYAREPRNHRAPPLTPSKPPVVVDWASGVSPKPDPKTISKHVQRMVDSVFKNYDHDQDGYISQEEFEKIAASFPFSFCVMDKDREGLISRDEITAYFMRASSIYSKLGLGFPHNFQETTYLKPTFCDNCAGFLWGVIKQGYRCKDCGMNCHKQCKDLVVFECKKRAKNPVAPTENNTSVGPVSNLCSLGAKDLLHAPEEGPFTFPNGEAVEHGEESKDRTIMLMGVSSQKISLRLKRAVAHKATQTESQPWIGSEGPSGPFVLSSPRKTAQDTLYVLPSPTSPCPSPVLVRKRAFVKWENKDSLIKSKEELRHLRLPTYQELEQEINTLKADNDALKIQLKYAQKKIESLQLEKSNHVLAQMEQGDCS

SEQ ID NO: 15531 - protein, 697 aa, Artificial Sequence
  Synthetic polypeptide
PTHRNLSKNADGNLCRSNQLLQVMLTMHRIVISSAELLQKVITLYKDALAKNSPGLCLKICYFVRYWITEFWVMFKMDASLTDTMEEFQELVKAKGEELHCRLIDTTQINARDWSRKLTQRIKSNTSKKRKVSLLFDHLEPEELSEHLTYLEFKSFRRISFSDYQNYLVNSCVKENPTMERSIALCNGISQWVQLMVLSRPTPQLRAEVFIKFIQVAQKLHQLQNFNTLMAVIGGLCHSSISRLKETSSHVPHEINKVLGEMTELLSSSRNYDNYRRAYGECTDFKIPILGVHLKDLISLYEAMPDYLEDGKVNVHKLLALYNHISELVQLQEVAPPLEANKDLVHLLTLSLDLYYTEDEIYELSYAREPRNHRAPSVFKNYDHDQDGYISQEEFEKIAASFPFSFCVMDKDREGLISRDEITAYFMRASSIYSKLGLGFPHNFQETTYLKPTFCDNCAGFLWGVIKQGYRCKDCGMNCHKQCKDLVVFECKKRAKNPVAPTENNTSVGPVSNLCSLGAKDLLHAPEEGPFTFPNGEAVEHGEESKDRTIMLMGVSSQKISLRLKRAVAHKATQTESQPWIGSEGPSGPFVLSSPRKTAQDTLYVLPSPTSPCPSPVLVRKRAFVKWENKDSLIKSKEELRHLRLPTYQELEQEINTLKADNDALKIQLKYAQKKIESLQLEKSNHVLAQMEQGDCS

SEQ ID NO: 15532 - protein, 532 aa, Artificial Sequence
  Synthetic polypeptide
PTHRNLSKNADGNLCRSNQLLQVMLTMHRIVISSAELLQKVITLYKDALAKNSPGLCLKICYFVRYWITEFWVMFKMDASLTDTMEEFQELVKAKGEELHCRLIDTTQINARDWSRKLTQRIKSNTSKKRKVSLLFDHLEPEELSEHLTYLEFKSFRRISFSDYQNYLVNSCVKENPTMERSIALCNGISQWVQLMVLSRPTPQLRAEVFIKFIQVAQKLHQLQNFNTLMAVIGGLCHSSISRLKETSSHVPHEINKVLGEMTELLSSSRNYDNYRRAYGECTDFKIPILGVHLKDLISLYEAMPDYLEDGKVNVHKLLALYNHISELVQLQEVAPPLEANKDLVHLLTLSLDLYYTEDEIYELSYAREPRNHRAPSVFKNYDHDQDGYISQEEFEKIAASFPFSFCVMDKDREGLISRDEITAYFMRASSIYSKLGLGFPHNFQETTYLKPTFCDNCAGFLWGVIKQGYRCKDCGMNCHKQCKDLVVFECKKRAKNPVAPTENNTSVGPVSNLCSLGAKDLLHGNKYSESR

SEQ ID NO: 15533 - protein, 481 aa, Artificial Sequence
  Synthetic polypeptide
PTHRNLSKNADGNLCRSNQLLQVMLTMHRIVISSAELLQKVITLYKDALAKNSPGLCLKICYFVRYWITEFWVMFKMDASLTDTMEEFQELVKAKGEELHCRLIDTTQINARDWSRKLTQRIKSNTSKKRKVSLLFDHLEPEELSEHLTYLEFKSFRRISFSDYQNYLVNSCVKENPTMERSIALCNGISQWVQLMVLSRPTPQLRAEVFIKFIQVAQKLHQLQNFNTLMAVIGGLCHSSISRLKETSSHVPHEINKVLGEMTELLSSSRNYDNYRRAYGECTDFKIPILGVHLKDLISLYEAMPDYLEDGKVNVHKLLALYNHISELVQLQEVAPPLEANKDLVHLLTLSLDLYYTEDEIYELSYAREPRNHRAPSVFKNYDHDQDGYISQEEFEKIAASFPFSFCVMDKDREGLISRDEITAYFMRASSIYSKLGLGFPHNFQETTYLKPTFCDNCAGFLWGVIKQGYRCKGNKYSESR

SEQ ID NO: 15534 - protein, 416 aa, Artificial Sequence
  Synthetic polypeptide
PTHRNLSKNADGNLCRSNQLLQVMLTMHRIVISSAELLQKVITLYKDALAKNSPGLCLKICYFVRYWITEFWVMFKMDASLTDTMEEFQELVKAKGEELHCRLIDTTQINARDWSRKLTQRIKSNTSKKRKVSLLFDHLEPEELSEHLTYLEFKSFRRISFSDYQNYLVNSCVKENPTMERSIALCNGISQWVQLMVLSRPTPQLRAEVFIKFIQVAQKLHQLQNFNTLMAVIGGLCHSSISRLKETSSHVPHEINKVLGEMTELLSSSRNYDNYRRAYGECTDFKIPILGVHLKDLISLYEAMPDYLEDGKVNVHKLLALYNHISELVQLQEVAPPLEANKDLVHLLTLSLDLYYTEDEIYELSYAREPRNHRAPSVFKNYDHDQDGYISQEEFEKIAASFPFSFCVMDKDSSGE

SEQ ID NO: 15535 - protein, 418 aa, Artificial Sequence
  Synthetic polypeptide
GAPLPGQPPHPGGRWGGQPPPGQPPRPGGRWGGQPPARPAAPPGRYYSVLYPLERKISDAKSRELVMYIWAHAVVASVPVFAVTNVADIYATSTCTEVWSNSLGHLVYVLVYNITTVIVPVVVVFLFLILIRRALSASQKKKVIIAALRTPQNTISIPYASQREAELHATLLSMVMVFILCSVPYATLVVYQTVLNVPDTSVFLLLTAVWLPKVSLLANPVLFLTVNKSVRKCLIGTLVQLHHRYSRRNVVSTGSGMAEASLEPSIRSGSQLLEMFHIGQQQIFKPTEDEEESEAKYIGSADFQAKEIFSTCLEGEQGPQFAPSAPPLSTVDSVSQVAPAAPVEPETFPDKYSLQFGFGPFELPPQWLSETRNSKKRLLPPLGNTPEELIQTKVPKVGRVERKMSRNNKVSIFPKVDS

SEQ ID NO: 15536 - protein, 70 aa, Artificial Sequence
  Synthetic polypeptide
GAPLPGRPYWEVRSPSARPAAPSGREVGGSAPAWPAAPPGREVGGSAPRPASRPAREVLLSPLSTGEENI

SEQ ID NO: 15537 - protein, 137 aa, Artificial Sequence
  Synthetic polypeptide
GAPLPGRPYWEVRSPSARPAAPSGREVGGSAPRPASRPVREGGWGGSAPNPASRPVREVRGASARPPLLGSEEPLCQASRPIREGGGGVSPRLASRPAREGGGGVSPPPGQPPRPGGTTQSSIHWRGKYLMPSPVNW

SEQ ID NO: 15538 - protein, 401 aa, Artificial Sequence
  Synthetic polypeptide
EVRRPSARQPPRLRSEEPLRPAAAPSGKYYSVLYPLERKISDAKSRELVMYIWAHAVVASVPVFAVTNVADIYATSTCTEVWSNSLGHLVYVLVYNITTVIVPVVVVFLFLILIRRALSASQKKKVIIAALRTPQNTISIPYASQREAELHATLLSMVMVFILCSVPYATLVVYQTVLNVPDTSVFLLLTAVWLPKVSLLANPVLFLTVNKSVRKCLIGTLVQLHHRYSRRNVVSTGSGMAEASLEPSIRSGSQLLEMFHIGQQQIFKPTEDEEESEAKYIGSADFQAKEIFSTCLEGEQGPQFAPSAPPLSTVDSVSQVAPAAPVEPETFPDKYSLQFGFGPFELPPQWLSETRNSKKRLLPPLGNTPEELIQTKVPKVGRVERKMSRNNKVSIFPKVDS

SEQ ID NO: 15539 - protein, 35 aa, Artificial Sequence
  Synthetic polypeptide
EVRSPSARQPPRLGSTTQSSIHWRGKYLMPSPVNW

SEQ ID NO: 15540 - protein, 25 aa, Artificial Sequence
  Synthetic polypeptide
GAPPPGSRPVWEVLLSPLSTGEENI

SEQ ID NO: 15541 - protein, 14 aa, Artificial Sequence
  Synthetic polypeptide
EVLLSPLSTGEENI

SEQ ID NO: 15542 - protein, 35 aa, Artificial Sequence
  Synthetic polypeptide
EVRRPSARQPPRLRSTTQSSIHWRGKYLMPSPVNW

SEQ ID NO: 15543 - protein, 436 aa, Artificial Sequence
  Synthetic polypeptide
GASLPGRPSSEMWGAPLPCRPVWDVRSTSARPRPCLGGEEHLCLPPPLRSEETLCPATAPSEKYYSVLYPLERKISDAKSRELVMYIWAHAVVASVPVFAVTNVADIYATSTCTEVWSNSLGHLVYVLVYNITTVIVPVVVVFLFLILIRRALSASQKKKVIIAALRTPQNTISIPYASQREAELHATLLSMVMVFILCSVPYATLVVYQTVLNVPDTSVFLLLTAVWLPKVSLLANPVLFLTVNKSVRKCLIGTLVQLHHRYSRRNVVSTGSGMAEASLEPSIRSGSQLLEMFHIGQQQIFKPTEDEEESEAKYIGSADFQAKEIFSTCLEGEQGPQFAPSAPPLSTVDSVSQVAPAAPVEPETFPDKYSLQFGFGPFELPPQWLSETRNSKKRLLPPLGNTPEELIQTKVPKVGRVERKMSRNNKVSIFPKVDS

SEQ ID NO: 15544 - protein, 3 aa, Artificial Sequence
  Synthetic polypeptide
EVH

SEQ ID NO: 15545 - protein, 66 aa, Artificial Sequence; identical to SEQ ID NO: 4369
  Synthetic polypeptide

SEQ ID NO: 15546 - protein, 500 aa, Artificial Sequence; identical to SEQ ID NO: 2035
  Synthetic polypeptide

SEQ ID NO: 15547 - protein, 72 aa, Artificial Sequence
  Synthetic polypeptide
ESLATWRSLENLIRADCLGLSSLKTWPARGFVPAWSVCPSTSSSAPVLTVAGGSTPCSSARSSNFCTKYSAL

SEQ ID NO: 15548 - protein, 471 aa, Artificial Sequence
  Synthetic polypeptide
EVRRPSARQPPRLRKFGNMEVTRKLDKSRLPGIKFIKNLACSGICASLVCVPFDIILSTSPHCCWWIYTMLFCKVVKFLHKVFCSVTILSFPAIALDRYYSVLYPLERKISDAKSRELVMYIWAHAVVASVPVFAVTNVADIYATSTCTEVWSNSLGHLVYVLVYNITTVIVPVVVVFLFLILIRRALSASQKKKVIIAALRTPQNTISIPYASQREAELHATLLSMVMVFILCSVPYATLVVYQTVLNVPDTSVFLLLTAVWLPKVSLLANPVLFLTVNKSVRKCLIGTLVQLHHRYSRRNVVSTGSGMAEASLEPSIRSGSQLLEMFHIGQQQIFKPTEDEEESEAKYIGSADFQAKEIFSTCLEGEQGPQFAPSAPPLSTVDSVSQVAPAAPVEPETFPDKYSLQFGFGPFELPPQWLSETRNSKKRLLPPLGNTPEELIQTKVPKVGRVERKMSRNNKVSIFPKVDS

SEQ ID NO: 15549 - protein, 70 aa, Artificial Sequence
  Synthetic polypeptide
GASLPGRPSSEMWGAPLPCRPVWDVRSTSARPRPCLGGEEHLCLPPPLRSEETLCPATAPSEKVWQHGGH

SEQ ID NO: 15550 - protein, 400 aa, Artificial Sequence; identical to SEQ ID NO: 2244
  Synthetic polypeptide

SEQ ID NO: 15551 - protein, 25 aa, Artificial Sequence
  Synthetic polypeptide
GAPLPGRDPVWEVLLSPLSTGEENI

SEQ ID NO: 15552 - protein, 58 aa, Artificial Sequence; identical to SEQ ID NO: 4789
  Synthetic polypeptide

SEQ ID NO: 15553 - protein, 34 aa, Artificial Sequence
  Synthetic polypeptide
DVGSASALPPRLGCEEHLCPAATLSGRVWQHGGH

SEQ ID NO: 15554 - protein, 83 aa, Artificial Sequence
  Synthetic polypeptide
GAPLPGRDPVWESLATWRSLENLIRADCLGLSSLKTWPARGFVPAWSVCPSTSSSAPVLTVAGGSTPCSSARSSNFCTKYSAL

SEQ ID NO: 15555 - protein, 494 aa, Artificial Sequence
  Synthetic polypeptide
GASLPGRPSSEMWGAPLPCRPVWDVRSTSARPRPCLGEFGNMEVTRKLDKSRLPGIKFIKNLACSGICASLVCVPFDIILSTSPHCCWWIYTMLFCKVVKFLHKVFCSVTILSFPAIALDRYYSVLYPLERKISDAKSRELVMYIWAHAVVASVPVFAVTNVADIYATSTCTEVWSNSLGHLVYVLVYNITTVIVPVVVVFLFLILIRRALSASQKKKVIIAALRTPQNTISIPYASQREAELHATLLSMVMVFILCSVPYATLVVYQTVLNVPDTSVFLLLTAVWLPKVSLLANPVLFLTVNKSVRKCLIGTLVQLHHRYSRRNVVSTGSGMAEASLEPSIRSGSQLLEMFHIGQQQIFKPTEDEEESEAKYIGSADFQAKEIFSTCLEGEQGPQFAPSAPPLSTVDSVSQVAPAAPVEPETFPDKYSLQFGFGPFELPPQWLSETRNSKKRLLPPLGNTPEELIQTKVPKVGRVERKMSRNNKVSIFPKVDS

SEQ ID NO: 15556 - protein, 10 aa, Artificial Sequence
  Synthetic polypeptide
SLSCKALGTA

SEQ ID NO: 15557 - protein, 16 aa, Artificial Sequence
  Synthetic polypeptide
SSRNSLRTMTSPNSTR

SEQ ID NO: 15558 - protein, 191 aa, Artificial Sequence
  Synthetic polypeptide
AKIAPLHSSQDNSEQLENYDFTKFHSLKPKLIEAVDNMLSNKISPLMNLISQEETSTPTQLVQGGAFDGTTEGPFNQGYGEGAKEGADEEEWVVAKDKPVYDELFYTLSPINGKISGVNAKKEMVTSKLPNSVLGKIWKLADCDCDGMLDEEEFALAKHLIKIKLDGYELPSSLPPHLVPPSHRKSLPKAD

SEQ ID NO: 15559 - protein, 39 aa, Artificial Sequence
  Synthetic polypeptide
EDYLSPGGEGCSEPRSHHCTPARTTVNSLRTMTSPNSTR

SEQ ID NO: 15560 - protein, 35 aa, Artificial Sequence
  Synthetic polypeptide
EIHVLTAPQSGPEEHQRHRQPRHPFWGEAAHQPRL

SEQ ID NO: 15561 - protein, 426 aa, Artificial Sequence
  Synthetic polypeptide
GCSKAGVNVHGKYFKLCLTPSKRFMCSQLPNQVLKSISVIDSPGILSGEKQRISRGYDFCQVLQWFAERVDRIILLFDAHKLDISDEFSEAIKAFRGQDDKIRVVLNKADQVDTQQLMRVYGALMWSLGKVINTPEVLRVYIGSFWAQPLQNTDNRRLFEAEAQDLFRDIQSLPQKAAVRKLNDLIKRARLAKVHAYIISYLKKEMPSVFGKENKKRELISRLPEIYIQLQREYQISAGDFPEVKAMQEQLENYDFTKFHSLKPKLIEAVDNMLSNKISPLMNLISQEETSTPTQLVQGGAFDGTTEGPFNQGYGEGAKEGADEEEWVVAKDKPVYDELFYTLSPINGKISGVNAKKEMVTSKLPNSVLGKIWKLADCDCDGMLDEEEFALAKHLIKIKLDGYELPSSLPPHLVPPSHRKSLPKAD

SEQ ID NO: 15562 - protein, 15 aa, Artificial Sequence
  Synthetic polypeptide
HPVRDSCAHSSPIRS

SEQ ID NO: 15563 - protein, 69 aa, Artificial Sequence
  Synthetic polypeptide
DNTCACSGCVGFRGWNPSHVFSVRQPGRVAGARPSRHCDLPEWGLWVYLVHLHTLQGPSLVPGGLAGPH

SEQ ID NO: 15564 - protein, 503 aa, Artificial Sequence
  Synthetic polypeptide
GFNEIIRVPVVAVLGSGGGTRAMSSLYGSLAGLQELGLLDTVTYLSGVSGSTWCISTLYRDPAWSQVALQGPIERAQVHVCSSKMGALSTERLQYYTQELGVRERSGHSVSLIDLWGLLVEYLLYQEENPAKLSDQQEAVRQGQNPYPIYTSVNVRTNLSGEDFAEWCEFTPYEVGFPKYGAYVPTELFGSELFMGRLLQLQPEPRICYLQGMWGSAFATSLDEIFLKTAGSGLSFLEWYRGSVNITDDCQKPQLHNPSRLRTRLLTPQGPFSQAVLDIFTSRFTSAQSFNFTRGLCLHKDYVAGREFVAWKDTHPDAFPNQLTPMRDCLYLVDGGFAINSPFPLALLPQRAVDLILSFDYSLEAPFEVLKMTEKYCLDRGIPFPSIEVGPEDMEEARECYLFAKAEDPRSPIVLHFPLVNRTFRTHLAPGVERQTAEEKAFGDFVINRPDTPYGMMNFTYEPQDFYRLVALSRYNVLNNVETLKCALQLALDRHQARERAGA

SEQ ID NO: 15565 - protein, 4 aa, Artificial Sequence
  Synthetic polypeptide
YVCL

SEQ ID NO: 15566 - protein, 40 aa, Artificial Sequence
  Synthetic polypeptide
QKPSLIPCTAARPQITHFLHHVLFIHLPCNSSSALRSPLG

SEQ ID NO: 15567 - protein, 59 aa, Artificial Sequence
  Synthetic polypeptide
QKPSLIPCTAARPQITHFLHHVLFIHLPCNSSSALRSPLGTAVALLALCPVLVLLPLLQ

SEQ ID NO: 15568 - protein, 347 aa, Artificial Sequence
  Synthetic polypeptide
SKALFDSMHSSQASDNPFSPPRTLHSPPLQLQQRSEKPPWLETRFCHVGQAGLELLTSSDLPASASQSAGITGVSHRTQPDSSGPSSTVSSAGPSSPTTVDGNSQFGFSDQPSLNSHVAEEHQGLGLLQETPGSGAQELSIEGEQELFEPNQSPQVPPMETSQPYEEVSQPCQEVPDISQPCQDISEALSQPCQKVPDISQQCQENHDNGNHTCQEVPHISQPCQKSSQLCQKVSEEVCQLCLENSEEVSQPCQGVSVEVGKLVHKFHVGVGSLVQETLVEVGSPAEEIPEEVIQPYQEFSVEVGRLAQETSAINLLSQGIPEIDKPSQEFPEEIDLQAQEVPEEIN

SEQ ID NO: 15569 - protein, 307 aa, Artificial Sequence
  Synthetic polypeptide
SKALFDSMHSSQASDNPFSPPRTLHSPPLQLQQRSEKPPWYSSGPSSTVSSAGPSSPTTVDGNSQFGFSDQPSLNSHVAEEHQGLGLLQETPGSGAQELSIEGEQELFEPNQSPQVPPMETSQPYEEVSQPCQEVPDISQPCQDISEALSQPCQKVPDISQQCQENHDNGNHTCQEVPHISQPCQKSSQLCQKVSEEVCQLCLENSEEVSQPCQGVSVEVGKLVHKFHVGVGSLVQETLVEVGSPAEEIPEEVIQPYQEFSVEVGRLAQETSAINLLSQGIPEIDKPSQEFPEEIDLQAQEVPEEIN

SEQ ID NO: 15570 - protein, 5 aa, Artificial Sequence
  Synthetic polypeptide
VKSPL

SEQ ID NO: 15571 - protein, 7 aa, Artificial Sequence
  Synthetic polypeptide
KWPYCPR

SEQ ID NO: 15572 - protein, 30 aa, Artificial Sequence
  Synthetic polypeptide
NKRGYKAMEEHSMLMGRKNQYRENGHTAPG

SEQ ID NO: 15573 - protein, 298 aa, Artificial Sequence
  Synthetic polypeptide
NKRGYKAMEEHSMLMGRKNQYRENGHTAPGDRVAIEPGAPRENDEFCKMGRYNLSPSIFFCATPPDDGNLCRFYKHNAAFCYKLPDNVTFEEGALIEPLSVGIHACRRGGVTLGHKVLVCGAGPIGMVTLLVAKAMGAAQVVVTDLSATRLSKAKEIGADLVLQISKESPQEIARKVEGQLGCKPEVTIECTGAEASIQAGIYATRSGGNLVLVGLGSEMTTVPLLHAAIREVDIKGVFRYCNTWPVAISMLASKSVNVKPLVTHRFPLEKALEAFETFKKGLGLKIMLKCDPSDQNP

SEQ ID NO: 15574 - protein, 74 aa, Artificial Sequence
  Synthetic polypeptide
QTESQIMSELPFTIASKRIKYLGIQLTRDVKDLFKENYKPLLNEIKEDTKQWKNIPCSWVGRINIVKMAILPQV

SEQ ID NO: 15575 - protein, 138 aa, Artificial Sequence
  Synthetic polypeptide
QTESQIMSELPFTIASKRIKYLGIQLTRDVKDLFKENYKPLLNEIKEDTKQWKNIPCSWVGRINIVKMAILPQVIVLPSSLVLPEKMMNSARWADTICHLPSSSVPRPPMTGTSAGSISTMQPFVTSFLTMSPLRKAP

SEQ ID NO: 15576 - protein, 21 aa, Artificial Sequence
  Synthetic polypeptide
EAEGQSGWSLCSWPKQWEQLK

SEQ ID NO: 15577 - protein, 176 aa, Artificial Sequence
  Synthetic polypeptide
GPIGMVTLLVAKAMGAAQVVVTDLSATRLSKAKEIGADLVLQISKESPQEIARKVEGQLGCKPEVTIECTGAEASIQAGIYATRSGGNLVLVGLGSEMTTVPLLHAAIREVDIKGVFRYCNTWPVAISMLASKSVNVKPLVTHRFPLEKALEAFETFKKGLGLKIMLKCDPSDQNP

SEQ ID NO: 15578 - protein, 29 aa, Artificial Sequence
  Synthetic polypeptide
SPLLRRLRANRDGHFARGQSNGSSSSSGD

SEQ ID NO: 15579 - protein, 59 aa, Artificial Sequence
  Synthetic polypeptide
AEIAPMHSREPGPHGGCAAPDPGHHVCLCLPPLPPPQFPGLLADPPPLHPALCPAHHPW

SEQ ID NO: 15580 - protein, 393 aa, Artificial Sequence
  Synthetic polypeptide
FQLLRRPRQKNHLNLGGRGCSEPRLHQCTPGSLGLTGVVLLLILAIMYVFASHHFRRRSFRGFWLTHHLYILLYVLLIIHGSFALIQLPRFHIFFLVPAIIYGGDKLVSLSRKKVEISVVKAELLPSGVTHLRFQRPQGFEYKSGQWVRIACLALGTTEYHPFTLTSAPHEDTLSLHIRAAGPWTTRLREIYSAPTGDRCARYPKLYLDGPFGEGHQEWHKFEVSVLVGGGIGVTPFASILKDLVFKSSVSCQVFCKKIYFIWVTRTQRQFEWLADIIREVEENDHQDLVSVHIYITQLAEKFDLRTTMLYICERHFQKVLNRSLFTGLRSITHFGRPPFEPFFNSLQEVHPQVRKIGVFSCGPPGMTKNVEKACQLINRQDRTHFSHHYENF

SEQ ID NO: 15581 - protein, 28 aa, Artificial Sequence
  Synthetic polypeptide
TWEAEVAVSRDCTNALQGAWASRGLCCS

SEQ ID NO: 15582 - protein, 584 aa, Artificial Sequence
  Synthetic polypeptide
GRARWLTPVIPALQEAEVGGSRGPEMETILASMLLGATAVEDKLQEGVIETVTSLSLANIKIWVLTGDKQETAINIGYACNMLTDDMNDVFVIAGNNAVEVREELRKAKQNLFGQNRNFSNGHVVCEKKQQLELDSIVEETITGDYALIINGHSLAHALESDVKNDLLELACMCKTVICCRVTPLQKAQVVELVKKYRNAVTLAIGDGANDVSMIKSAHIGVGISGQEGLQAVLASDYSFAQFRYLQRLLLVHGRWSYFRMCKFLCYFFYKNFAFTLVHFWFGFFCGFSAQTVYDQWFITLFNIVYTSLPVLAMGIFDQDVSDQNSVDCPQLYKPGQLNLLFNKRKFFICVLHGIYTSLVLFFIPYGAFYNVAGEDGQHIADYQSFAVTMATSLVIVVSVQIALDTSYWTFINHVFIWGSIAIYFSILFTMHSNGIFGIFPNQFPFVGNARHSLTQKCIWLVILLTTVASVMPVVAFRFLKVDLYPTLSDQIRRWQKAQKKARPPSSRRPRTRRSSSRRSGYAFAHQEGYGELITSGKNMRAKNPPPTSGLEKTHYNSTSWIENLCKKTTDTVSSFSQDKTVKL

SEQ ID NO: 15583 - protein, 109 aa, Artificial Sequence
  Synthetic polypeptide
GRARWLTPVIPALQEAEVGGSRGPEMETILASMLLGATAVEDKLQEGVIETVTSLSLANIKIWVLTGDKQETAINIGYACNMLTDDMNDVFVIAGNNAVEVREELRLMP

SEQ ID NO: 15584 - protein, 10 aa, Artificial Sequence
  Synthetic polypeptide
HATRCHCCRR

SEQ ID NO: 15585 - protein, 25 aa, Artificial Sequence
  Synthetic polypeptide
SQHFRRPRWADHEVRRWRPSWLACY

SEQ ID NO: 15586 - protein, 568 aa, Artificial Sequence
  Synthetic polypeptide
GRARWLTPVIPALQEAELLGATAVEDKLQEGVIETVTSLSLANIKIWVLTGDKQETAINIGYACNMLTDDMNDVFVIAGNNAVEVREELRKAKQNLFGQNRNFSNGHVVCEKKQQLELDSIVEETITGDYALIINGHSLAHALESDVKNDLLELACMCKTVICCRVTPLQKAQVVELVKKYRNAVTLAIGDGANDVSMIKSAHIGVGISGQEGLQAVLASDYSFAQFRYLQRLLLVHGRWSYFRMCKFLCYFFYKNFAFTLVHFWFGFFCGFSAQTVYDQWFITLFNIVYTSLPVLAMGIFDQDVSDQNSVDCPQLYKPGQLNLLFNKRKFFICVLHGIYTSLVLFFIPYGAFYNVAGEDGQHIADYQSFAVTMATSLVIVVSVQIALDTSYWTFINHVFIWGSIAIYFSILFTMHSNGIFGIFPNQFPFVGNARHSLTQKCIWLVILLTTVASVMPVVAFRFLKVDLYPTLSDQIRRWQKAQKKARPPSSRRPRTRRSSSRRSGYAFAHQEGYGELITSGKNMRAKNPPPTSGLEKTHYNSTSWIENLCKKTTDTVSSFSQDKTVKL

SEQ ID NO: 15587 - protein, 93 aa, Artificial Sequence
  Synthetic polypeptide
GRARWLTPVIPALQEAELLGATAVEDKLQEGVIETVTSLSLANIKIWVLTGDKQETAINIGYACNMLTDDMNDVFVIAGNNAVEVREELRLMP

SEQ ID NO: 15588 - protein, 25 aa, Artificial Sequence
  Synthetic polypeptide
PGAVAHTCNPSTSGGRATRCHCCRR

SEQ ID NO: 15589 - protein, 9 aa, Artificial Sequence
  Synthetic polypeptide
SQHFRRPSY

SEQ ID NO: 15590 - protein, 764 aa, Artificial Sequence
  Synthetic polypeptide
EEKEPVDFSVKSQADREFQFFDHHLMESIKMGDPKVHEFLRLLALCHTVMSEENSAGELIYQVQSPDEGALVTAARNFGFIFKSRTPETITIEELGTLVTYQLLAFLDFNNTRKRMSVIVRNPEGQIKLYSKGADTILFEKLHPSNEVLLSLTSDHLSEFAGEGLRTLAIAYRDLDDKYFKEWHKMLEDANAATEERDERIAGLYEEIERDLMLLGATAVEDKLQEGVIETVTSLSLANIKIWVLTGDKQETAINIGYACNMLTDDMNDVFVIAGNNAVEVREELRKAKQNLFGQNRNFSNGHVVCEKKQQLELDSIVEETITGDYALIINGHSLAHALESDVKNDLLELACMCKTVICCRVTPLQKAQVVELVKKYRNAVTLAIGDGANDVSMIKSAHIGVGISGQEGLQAVLASDYSFAQFRYLQRLLLVHGRWSYFRMCKFLCYFFYKNFAFTLVHFWFGFFCGFSAQTVYDQWFITLFNIVYTSLPVLAMGIFDQDVSDQNSVDCPQLYKPGQLNLLFNKRKFFICVLHGIYTSLVLFFIPYGAFYNVAGEDGQHIADYQSFAVTMATSLVIVVSVQIALDTSYWTFINHVFIWGSIAIYFSILFTMHSNGIFGIFPNQFPFVGNARHSLTQKCIWLVILLTTVASVMPVVAFRFLKVDLYPTLSDQIRRWQKAQKKARPPSSRRPRTRRSSSRRSGYAFAHQEGYGELITSGKNMRAKNPPPTSGLEKTHYNSTSWIENLCKKTTDTVSSFSQDKTVKL

SEQ ID NO: 15591 - protein, 289 aa, Artificial Sequence
  Synthetic polypeptide
EEKEPVDFSVKSQADREFQFFDHHLMESIKMGDPKVHEFLRLLALCHTVMSEENSAGELIYQVQSPDEGALVTAARNFGFIFKSRTPETITIEELGTLVTYQLLAFLDFNNTRKRMSVIVRNPEGQIKLYSKGADTILFEKLHPSNEVLLSLTSDHLSEFAGEGLRTLAIAYRDLDDKYFKEWHKMLEDANAATEERDERIAGLYEEIERDLMLLGATAVEDKLQEGVIETVTSLSLANIKIWVLTGDKQETAINIGYACNMLTDDMNDVFVIAGNNAVEVREELRLMP

SEQ ID NO: 15592 - protein, 28 aa, Artificial Sequence
  Synthetic polypeptide
PSVVAHTYSHSTLRGKRACGFLSQISSG

SEQ ID NO: 15593 - protein, 29 aa, Artificial Sequence
  Synthetic polypeptide
SQHFERKKSLWISQSNLKRIENFSSLTTI

SEQ ID NO: 15594 - protein, 26 aa, Artificial Sequence
  Synthetic polypeptide
SSRYEEAEVRKKLEEKDRQEEAQRLQ

SEQ ID NO: 15595 - protein, 371 aa, Artificial Sequence
  Synthetic polypeptide
SSRYEEAEVRKKLEEKDRQEEAQRLQQKRQETGREDGGTLAKGSLENVLDSKDKTQKSNGEKNEKCETKEKGAITAKELYTMMTDKNISLIIMDARRMQDYQDSCILHSLSVPEEAISPGVTASWIEAHLPDDSKDTWKKRGNVEYVVLLDWFSSAKDLQIGTTLRSLKDALFKWESKTVLRNEPLVLEGGYENWLLCYPQYTTNAKVTPPPRRQNEEVSISLDFTYPSLEESIPSKPAAQTPPASIEVDENIELISGQNERMGPLNISTPVEPVAASKSDVSPIIQPVPSIKNVPQIDRTKKPAVKLPEEHRIKSESTNHEQQSPQSGKVIPDRSTKPVVFSPTLMLTDEEKARIHAETALLMEKNKQEK

SEQ ID NO: 15596 - protein, 980 aa, Artificial Sequence
  Synthetic polypeptide
SSRYEEAEVRKKLEEKDRQEEAQRLQQKRQETGREDGGTLAKGSLENVLDSKDKTQKSNGEKNEKCETKEKGAITAKELYTMMTDKNISLIIMDARRMQDYQDSCILHSLSVPEEAISPGVTASWIEAHLPDDSKDTWKKRGNVEYVVLLDWFSSAKDLQIGTTLRSLKDALFKWESKTVLRNEPLVLEGGYENWLLCYPQYTTNAKVTPPPRRQNEEVSISLDFTYPSLEESIPSKPAAQTPPASIEVDENIELISGQNERMGPLNISTPVEPVAASKSDVSPIIQPVPSIKNVPQIDRTKKPAVKLPEEHRIKSESTNHEQQSPQSGKVIPDRSTKPVVFSPTLMLTDEEKARIHAETALLMEKNKQEKELRERQQEEQKEKLRKEEQEQKAKKKQEAEENEITEKQQKAKEEMEKKESEQAKKEDKETSAKRGKEITGVKRQSKSEHETSDAKKSVEDRGKRCPTPEIQKKSTGDVPHTSVTGDSGSGKAQREPLTRARSEEMGRIVPGLPSGWAKFLDPITGTFRYYHSPTNTVHMYPPEMAPSSAPPSTPPTHKAKPQIPAERDREPSKLKRSYSSPDITQAIQEEEKRKPTVTPTVNRENKPTCYPKAEISRLSASQIRNLNPVFGGSGPALTGLRNLGNTCYMNSILQCLCNAPHLADYFNRNCYQDDINRSNLLGHKGEVAEEFGIIMKALWTGQYRYISPKDFKITIGKINDQFAGYSQQDSQELLLFLMDGLHEDLNKADNRKRYKEENNDHLDDFKAAEHAWQKHKQLNESIIVALFQGQFKSTVQCLTCHKKSRTFEAFMYLSLPLASTSKCTLQDCLRLFSKEEKLTDNNRFYCSHCRARRDSLKKIEIWKLPPVLLVHLKRFSYDGRWKQKLQTSVDFPLENLDLSQYVIGPKNNLKKYNLFSVSNHYGGLDGGHYTAYCKNAARQRWFKFDDHEVSDISVSSVKSSAAYILFYTSLGPRVTDVAT

SEQ ID NO: 15597 - protein, 1009 aa, Artificial Sequence
  Synthetic polypeptide
SSRYEEAEVRKKLEEKDRQEEAQRLQQKRQETGREDGGTLAKGSLENVLDSKDKTQKSNGEKNEKCETKEKGAITAKELYTMMTDKNISLIIMDARRMQDYQDSCILHSLSVPEEAISPGVTASWIEAHLPDDSKDTWKKRGNVEYVVLLDWFSSAKDLQIGTTLRSLKDALFKWESKTVLRNEPLVLEGGYENWLLCYPQYTTNAKVTPPPRRQNEEVSISLDFTYPSLEESIPSKPAAQTPPASIEVDENIELISGQNERMGPLNISTPVEPVAASKSDVSPIIQPVPSIKNVPQIDRTKKPAVKLPEEHRIKSESTNHEQQSPQSGKVIPDRSTKPVVFSPTLMLTDEEKARIHAETALLMEKNKQEKELRERQQEEQKEKLRKEEQEQKAKKKQEAEENEITEKQQKAKEEMEKKESEQAKKEDKETSAKRGKEITGVKRQSKSEHETSDAKKSVEDRGKRCPTPEIQKKSTGDVPHTSVTGDSGSGKPFKIKGQPESGILRTGTFREDTDDTERNKAQREPLTRARSEEMGRIVPGLPSGWAKFLDPITGTFRYYHSPTNTVHMYPPEMAPSSAPPSTPPTHKAKPQIPAERDREPSKLKRSYSSPDITQAIQEEEKRKPTVTPTVNRENKPTCYPKAEISRLSASQIRNLNPVFGGSGPALTGLRNLGNTCYMNSILQCLCNAPHLADYFNRNCYQDDINRSNLLGHKGEVAEEFGIIMKALWTGQYRYISPKDFKITIGKINDQFAGYSQQDSQELLLFLMDGLHEDLNKADNRKRYKEENNDHLDDFKAAEHAWQKHKQLNESIIVALFQGQFKSTVQCLTCHKKSRTFEAFMYLSLPLASTSKCTLQDCLRLFSKEEKLTDNNRFYCSHCRARRDSLKKIEIWKLPPVLLVHLKRFSYDGRWKQKLQTSVDFPLENLDLSQYVIGPKNNLKKYNLFSVSNHYGGLDGGHYTAYCKNAARQRWFKFDDHEVSDISVSSVKSSAAYILFYTSLGPRVTDVAT

SEQ ID NO: 15598 - protein, 28 aa, Artificial Sequence
  Synthetic polypeptide
YRAVDMKKLKSGKNLRKKTGRRKHSGYN

SEQ ID NO: 15599 - protein, 83 aa, Artificial Sequence
  Synthetic polypeptide
YRAVDMKKLKSGKNLRKKTGRRKHSGYNKKGRKQEERMVAHWLKALWRMFWIPKTKPKRAMVKRMKNVRPKRKEQSQQRNYTQ

SEQ ID NO: 15600 - protein, 34 aa, Artificial Sequence
  Synthetic polypeptide
PGVVARPCNPSTLGGRRGWITLDQEFETSLANMI

SEQ ID NO: 15601 - protein, 48 aa, Artificial Sequence
  Synthetic polypeptide
SQHFGRPTRVDHFRPGVRDQPGQHDMKKLKSGKNLRKKTGRRKHSGYN

SEQ ID NO: 15602 - protein, 103 aa, Artificial Sequence
  Synthetic polypeptide
SQHFGRPTRVDHFRPGVRDQPGQHDMKKLKSGKNLRKKTGRRKHSGYNKKGRKQEERMVAHWLKALWRMFWIPKTKPKRAMVKRMKNVRPKRKEQSQQRNYTQ

SEQ ID NO: 15603 - protein, 20 aa, Artificial Sequence
  Synthetic polypeptide
GCPGQAPTHAITITESPRSE

SEQ ID NO: 15604 - protein, 184 aa, Artificial Sequence; identical to SEQ ID NO: 2951
  Synthetic polypeptide

SEQ ID NO: 15605 - protein, 456 aa, Artificial Sequence; identical to SEQ ID NO: 2125
  Synthetic polypeptide

SEQ ID NO: 15606 - protein, 193 aa, Artificial Sequence; identical to SEQ ID NO: 2895
  Synthetic polypeptide

SEQ ID NO: 15607 - protein, 50 aa, Artificial Sequence
  Synthetic polypeptide
ETPFFPFGFYQDFTFPEVSPDMQNWLEVDFMVLTACRIFAEKKLCLLSEM

SEQ ID NO: 15608 - protein, 52 aa, Artificial Sequence
  Synthetic polypeptide
ETPFFPFGFYQDFTFPEVSPDMQNWLEVDFMVLTACRIFAEKKLCLLSEMCF

SEQ ID NO: 15609 - protein, 52 aa, Artificial Sequence
  Synthetic polypeptide
ETPFFPFGFYQDFTFPEVSPDMQNWLEVDFMVLTACRIFAEKKLCLLSEMWP

SEQ ID NO: 15610 - protein, 1198 aa, Artificial Sequence
  Synthetic polypeptide
GLPRHAKLAGGGLYGIDSMPDLRRKKTLPIVRDVAMTLAARKSGLSLAMVIRTSLNNEELKMHVFKKTLQALIYPMSSTIPHNFEVWTATTPTYCYECEGLLWGIARQGMKCLECGVKCHEKCQDLLNADCLQRAAEKSSKHGAEDKTQTIITAMKERMKIREKNRPEVFEVIQEMFQISKEDFVQFTKAAKQSVLDGTSKWSAKITITVVSAQGLQAKDKTGSSDPYVTVQVGKNKRRTKTIFGNLNPVWDEKFYFECHNSTDRIKVRVWDEDDDIKSRVKQHFKKESDDFLGQTIVEVRTLSGEMDVWYNLEKRTDKSAVSGAIRLKINVEIKGEEKVAPYHIQYTCLHENLFHYLTEVKSNGGVKIPEVKGDEAWKVFFDDASQEIVDEFAMRYGIESIYQAMTHFSCLSSKYMCPGVPAVMSTLLANINAFYAHTTVSTNIQVSASDRFAATNFGREKFIKLLDQLHNSLRIDLSKYRENFPASNTERLQDLKSTVDLLTSITFFRMKVLELQSPPKASMVVKDCVRACLDSTYKYIFDNCHELYSQLTDPSKKQDIPREDQGPTTKNLDFWPQLITLMVTIIDEDKTAYTPVLNQFPQELNMGKISAEIMWTLFALDMKYALEEHENQRLCKSTDYMNLHFKVKWFYNEYVRELPAFKDAVPEYSLWFEPFVMQWLDENEDVSMEFLHGALGRDKKDGFQQTSEHALFSCSVVDVFAQLNQSFEIIKKLECPNPEALSHLMRRFAKTINKVLLQYAAIVSSDFSSHCDKENVPCILMNNIQQLRVQLEKMFESMGGKELDSEASTILKELQVKLSGVLDELSVTYGESFQVIIEECIKQMSFELNQMRANGNTTSNKNSAAMDAEIVLRSLMDFLDKTLSLSAKICEKTVLKRVLKELWKLVLNKIEKQIVLPPLTDQTGPQMIFIAAKDLGQLSKLKEHMIREDARGLTPRQCAIMEVVLATIKQYFHAGGNGLKKNFLEKSPDLQSLRYALSLYTQTTDALIKKFIDTQTSQSRSSKDAVGQISVHVDITATPGTGDHKVTVKVIAINDLNWQTTAMFRPFVEVCILGPNLGDKKRKQGTKTKSNTWSPKYNETFQFILGKENRPGAYELHLSVKDYCFAREDRIIGMTVIQLQNIAEKGSYGAWYPLLKNISMDETGLTILRILSQRTSDDVAKEFVRLKSETRSTEESA

SEQ ID NO: 15611 - protein, 1198 aa, Artificial Sequence
  Synthetic polypeptide
GLPRHAKLAGGGLYGIDSMPDLRRKKTLPIVRDVLLTLAARKSGLSLAMVIRTSLNNEELKMHVFKKTLQALIYPMSSTIPHNFEVWTATTPTYCYECEGLLWGIARQGMKCLECGVKCHEKCQDLLNADCLQRAAEKSSKHGAEDKTQTIITAMKERMKIREKNRPEVFEVIQEMFQISKEDFVQFTKAAKQSVLDGTSKWSAKITITVVSAQGLQAKDKTGSSDPYVTVQVGKNKRRTKTIFGNLNPVWDEKFYFECHNSTDRIKVRVWDEDDDIKSRVKQHFKKESDDFLGQTIVEVRTLSGEMDVWYNLEKRTDKSAVSGAIRLKINVEIKGEEKVAPYHIQYTCLHENLFHYLTEVKSNGGVKIPEVKGDEAWKVFFDDASQEIVDEFAMRYGIESIYQAMTHFSCLSSKYMCPGVPAVMSTLLANINAFYAHTTVSTNIQVSASDRFAATNFGREKFIKLLDQLHNSLRIDLSKYRENFPASNTERLQDLKSTVDLLTSITFFRMKVLELQSPPKASMVVKDCVRACLDSTYKYIFDNCHELYSQLTDPSKKQDIPREDQGPTTKNLDFWPQLITLMVTIIDEDKTAYTPVLNQFPQELNMGKISAEIMWTLFALDMKYALEEHENQRLCKSTDYMNLHFKVKWFYNEYVRELPAFKDAVPEYSLWFEPFVMQWLDENEDVSMEFLHGALGRDKKDGFQQTSEHALFSCSVVDVFAQLNQSFEIIKKLECPNPEALSHLMRRFAKTINKVLLQYAAIVSSDFSSHCDKENVPCILMNNIQQLRVQLEKMFESMGGKELDSEASTILKELQVKLSGVLDELSVTYGESFQVIIEECIKQMSFELNQMRANGNTTSNKNSAAMDAEIVLRSLMDFLDKTLSLSAKICEKTVLKRVLKELWKLVLNKIEKQIVLPPLTDQTGPQMIFIAAKDLGQLSKLKEHMIREDARGLTPRQCAIMEVVLATIKQYFHAGGNGLKKNFLEKSPDLQSLRYALSLYTQTTDALIKKFIDTQTSQSRSSKDAVGQISVHVDITATPGTGDHKVTVKVIAINDLNWQTTAMFRPFVEVCILGPNLGDKKRKQGTKTKSNTWSPKYNETFQFILGKENRPGAYELHLSVKDYCFAREDRIIGMTVIQLQNIAEKGSYGAWYPLLKNISMDETGLTILRILSQRTSDDVAKEFVRLKSETRSTEESA

SEQ ID NO: 15612 - protein, 1196 aa, Artificial Sequence
  Synthetic polypeptide
GLPRHAKLAGGGLYGIDSMPDLRRKKTLPIVRDVTLAARKSGLSLAMVIRTSLNNEELKMHVFKKTLQALIYPMSSTIPHNFEVWTATTPTYCYECEGLLWGIARQGMKCLECGVKCHEKCQDLLNADCLQRAAEKSSKHGAEDKTQTIITAMKERMKIREKNRPEVFEVIQEMFQISKEDFVQFTKAAKQSVLDGTSKWSAKITITVVSAQGLQAKDKTGSSDPYVTVQVGKNKRRTKTIFGNLNPVWDEKFYFECHNSTDRIKVRVWDEDDDIKSRVKQHFKKESDDFLGQTIVEVRTLSGEMDVWYNLEKRTDKSAVSGAIRLKINVEIKGEEKVAPYHIQYTCLHENLFHYLTEVKSNGGVKIPEVKGDEAWKVFFDDASQEIVDEFAMRYGIESIYQAMTHFSCLSSKYMCPGVPAVMSTLLANINAFYAHTTVSTNIQVSASDRFAATNFGREKFIKLLDQLHNSLRIDLSKYRENFPASNTERLQDLKSTVDLLTSITFFRMKVLELQSPPKASMVVKDCVRACLDSTYKYIFDNCHELYSQLTDPSKKQDIPREDQGPTTKNLDFWPQLITLMVTIIDEDKTAYTPVLNQFPQELNMGKISAEIMWTLFALDMKYALEEHENQRLCKSTDYMNLHFKVKWFYNEYVRELPAFKDAVPEYSLWFEPFVMQWLDENEDVSMEFLHGALGRDKKDGFQQTSEHALFSCSVVDVFAQLNQSFEIIKKLECPNPEALSHLMRRFAKTINKVLLQYAAIVSSDFSSHCDKENVPCILMNNIQQLRVQLEKMFESMGGKELDSEASTILKELQVKLSGVLDELSVTYGESFQVIIEECIKQMSFELNQMRANGNTTSNKNSAAMDAEIVLRSLMDFLDKTLSLSAKICEKTVLKRVLKELWKLVLNKIEKQIVLPPLTDQTGPQMIFIAAKDLGQLSKLKEHMIREDARGLTPRQCAIMEVVLATIKQYFHAGGNGLKKNFLEKSPDLQSLRYALSLYTQTTDALIKKFIDTQTSQSRSSKDAVGQISVHVDITATPGTGDHKVTVKVIAINDLNWQTTAMFRPFVEVCILGPNLGDKKRKQGTKTKSNTWSPKYNETFQFILGKENRPGAYELHLSVKDYCFAREDRIIGMTVIQLQNIAEKGSYGAWYPLLKNISMDETGLTILRILSQRTSDDVAKEFVRLKSETRSTEESA

SEQ ID NO: 15613 - protein, 100 aa, Artificial Sequence
  Synthetic polypeptide
MVWLCHLNLISNCNPHVSRRDLVGGDWIMGGSFPQAVLLLGSSHEIRGFKSVWQFPLSLALCLLLPCKRRLSSPLASTRILHFLRSPQTCKTGWRWTLWY

SEQ ID NO: 15614 - protein, 219 aa, Artificial Sequence
  Synthetic polypeptide
ATPPRESPRTKLQALTVLSGSPWPPDFPSGSCRSLDLSGMCRSSKDAVGQISVHVDITATPGTGDHKVTVKVIAINDLNWQTTAMFRPFVEVCILGPNLGDKKRKQGTKTKSNTWSPKYNETFQFILGKENRPGAYELHLSVKDYCFAREDRIIGMTVIQLQNIAEKGSYGAWYPLLKNISMDETGLTILRILSQRTSDDVAKEFVRLKSETRSTEESA

SEQ ID NO: 15615 - protein, 69 aa, Artificial Sequence
  Synthetic polypeptide
ISLSHTPTGKPQDKAPGPNCALWLPVASRLPLGLLPLSGPLWDVSFLQRCRGSDICSCGHHCHPRNGRS

SEQ ID NO: 15616 - protein, 54 aa, Artificial Sequence
  Synthetic polypeptide
LCSLAPRGLQTSPRAPAALWTSLGCVVPPKMPWVRYLFMWTSLPPQEREIIKSL

SEQ ID NO: 15617 - protein, 67 aa, Artificial Sequence
  Synthetic polypeptide
ATPPRESPRTKLQALTVLSGSPWPPDFPSGSCRSLDLSGMCKSFLQRCRGSDICSCGHHCHPRNGRS

SEQ ID NO: 15618 - protein, 205 aa, Artificial Sequence
  Synthetic polypeptide
LCSLAPRGLQTSPRAPAALWTSLGCVSRSSKDAVGQISVHVDITATPGTGDHKVTVKVIAINDLNWQTTAMFRPFVEVCILGPNLGDKKRKQGTKTKSNTWSPKYNETFQFILGKENRPGAYELHLSVKDYCFAREDRIIGMTVIQLQNIAEKGSYGAWYPLLKNISMDETGLTILRILSQRTSDDVAKEFVRLKSETRSTEESA

SEQ ID NO: 15619 - protein, 3 aa, Artificial Sequence
  Synthetic polypeptide
DKR

SEQ ID NO: 15620 - protein, 826 aa, Artificial Sequence
  Synthetic polypeptide
GRPWWLTPVIPALWEAEAGGSPETRDDFLGQVDVPLYPLPTENPRLERPYTFKDFVLHPRSHKSRVKGYLRLKMTYLPKTSGSEDDNAEQAEELEPGWVVLDQPDAACHLQQQQEPSPLPPGWEERQDILGRTYYVNHESRRTQWKRPTPQDNLTDAENGNIQLQAQRAFTTRRQISEETESVDNRESSENWEIIREDEATMYSNQAFPSPPPSSNLDVPTHLAEELNARLTIFGNSAVSQPASSSNHSSRRGSLQAYTFEEQPTLPVLLPTSSGLPPGWEEKQDERGRSYYVDHNSRTTTWTKPTVQATVETSQLTSSQSSAGPQSQASTSDSGQQVTQPSEIEQGFLPKGWEVRHAPNGRPFFIDHNTKTTTWEDPRLKIPAHLRGKTSLDTSNDLGPLPPGWEERTHTDGRIFYINHNIKRTQWEDPRLENVAITGPAVPYSRDYKRKYEFFRRKLKKQNDIPNKFEMKLRRATVLEDSYRRIMGVKRADFLKARLWIEFDGEKGLDYGGVAREWFFLISKEMFNPYYGLFEYSATDNYTLQINPNSGLCNEDHLSYFKFIGRVAGMAVYHGKLLDGFFIRPFYKMMLHKPITLHDMESVDSEYYNSLRWILENDPTELDLRFIIDEELFGQTHQHELKNGGSEIVVTNKNKKEYIYLVIQWRFVNRIQKQMAAFKEGFFELIPQDLIKIFDENELELLMCGLGDVDVNDWREHTKYKNGYSANHQVIQWFWKAVLMMDSEKRIRLLQFVTGTSRVPMNGFAELYGSNGPQSFTVEQWGTPEKLPRAHTCFNRLDLPPYESFEELWDKLQMAIENTQGFDGVD

SEQ ID NO: 15621 - protein, 810 aa, Artificial Sequence
  Synthetic polypeptide
GRPWWLTPVIPALWEAEAGGSPETRDDFLGQVDVPLYPLPTENPRLERPYTFKDFVLHPRSHKSRVKGYLRLKMTYLPKTSGSEDDNAEQAEELEQQQEPSPLPPGWEERQDILGRTYYVNHESRRTQWKRPTPQDNLTDAENGNIQLQAQRAFTTRRQISEETESVDNRESSENWEIIREDEATMYSNQAFPSPPPSSNLDVPTHLAEELNARLTIFGNSAVSQPASSSNHSSRRGSLQAYTFEEQPTLPVLLPTSSGLPPGWEEKQDERGRSYYVDHNSRTTTWTKPTVQATVETSQLTSSQSSAGPQSQASTSDSGQQVTQPSEIEQGFLPKGWEVRHAPNGRPFFIDHNTKTTTWEDPRLKIPAHLRGKTSLDTSNDLGPLPPGWEERTHTDGRIFYINHNIKRTQWEDPRLENVAITGPAVPYSRDYKRKYEFFRRKLKKQNDIPNKFEMKLRRATVLEDSYRRIMGVKRADFLKARLWIEFDGEKGLDYGGVAREWFFLISKEMFNPYYGLFEYSATDNYTLQINPNSGLCNEDHLSYFKFIGRVAGMAVYHGKLLDGFFIRPFYKMMLHKPITLHDMESVDSEYYNSLRWILENDPTELDLRFIIDEELFGQTHQHELKNGGSEIVVTNKNKKEYIYLVIQWRFVNRIQKQMAAFKEGFFELIPQDLIKIFDENELELLMCGLGDVDVNDWREHTKYKNGYSANHQVIQWFWKAVLMMDSEKRIRLLQFVTGTSRVPMNGFAELYGSNGPQSFTVEQWGTPEKLPRAHTCFNRLDLPPYESFEELWDKLQMAIENTQGFDGVD

SEQ ID NO: 15622 - protein, 19 aa, Artificial Sequence
  Synthetic polypeptide
SQHFGRLRQADHLRQEMIS

SEQ ID NO: 15623 - protein, 42 aa, Artificial Sequence
  Synthetic polypeptide
DIISHQLEWQSLKSQETTGKFTNCESKSYSRNRPCQEGYIGS

SEQ ID NO: 15624 - protein, 298 aa, Artificial Sequence
  Synthetic polypeptide
FTELEKTTLKFIWNQKRARIAKSILSQKNKAGGITLPDFKLYYKATVTKTAWYWYQNRDIDQWNRTEPSEIMPHIYNYLIFDKPEKNKQWGKDSLFNKWCWENWLAICRKLKLDPFLTPYTKINSRWIKDLNVRPKTIKTLEENLGITIQDIGVGKDFMSKTPKAMATKAKIDKWDLIKLKSFCTAKETTIRVNRQPTTWEKIFATYSSDKGLISRIYNELKQIYKKKTNNPIKKWAKDMNRHFSKEDIYAAKKHMKKCSSSLAIREMQIKTTMRYHLTPVRMAIIKKSGNNRKIHEL

SEQ ID NO: 15625 - protein, 32 aa, Artificial Sequence
  Synthetic polypeptide
KVRKQQENSRIVRVRVIAGIGLAKKDILGARV

SEQ ID NO: 15626 - protein, 891 aa, Artificial Sequence
  Synthetic polypeptide
KVRKQQENSRIVRVRVIAGIGLAKKDILGASDPYVRVTLYDPMNGVLTSVQTKTIKKSLNPKWNEEILFRVHPQQHRLLFEVFDENRLTRDDFLGQVDVPLYPLPTENPRLERPYTFKDFVLHPRSHKSRVKGYLRLKMTYLPKTSGSEDDNAEQAEELEPGWVVLDQPDAACHLQQQQEPSPLPPGWEERQDILGRTYYVNHESRRTQWKRPTPQDNLTDAENGNIQLQAQRAFTTRRQISEETESVDNRESSENWEIIREDEATMYSNQAFPSPPPSSNLDVPTHLAEELNARLTIFGNSAVSQPASSSNHSSRRGSLQAYTFEEQPTLPVLLPTSSGLPPGWEEKQDERGRSYYVDHNSRTTTWTKPTVQATVETSQLTSSQSSAGPQSQASTSDSGQQVTQPSEIEQGFLPKGWEVRHAPNGRPFFIDHNTKTTTWEDPRLKIPAHLRGKTSLDTSNDLGPLPPGWEERTHTDGRIFYINHNIKRTQWEDPRLENVAITGPAVPYSRDYKRKYEFFRRKLKKQNDIPNKFEMKLRRATVLEDSYRRIMGVKRADFLKARLWIEFDGEKGLDYGGVAREWFFLISKEMFNPYYGLFEYSATDNYTLQINPNSGLCNEDHLSYFKFIGRVAGMAVYHGKLLDGFFIRPFYKMMLHKPITLHDMESVDSEYYNSLRWILENDPTELDLRFIIDEELFGQTHQHELKNGGSEIVVTNKNKKEYIYLVIQWRFVNRIQKQMAAFKEGFFELIPQDLIKIFDENELELLMCGLGDVDVNDWREHTKYKNGYSANHQVIQWFWKAVLMMDSEKRIRLLQFVTGTSRVPMNGFAELYGSNGPQSFTVEQWGTPEKLPRAHTCFNRLDLPPYESFEELWDKLQMAIENTQGFDGVD

SEQ ID NO: 15627 - protein, 39 aa, Artificial Sequence
  Synthetic polypeptide
GLPSHASCIACGMENSRIVRVRVIAGIGLAKKDILGARV

SEQ ID NO: 15628 - protein, 898 aa, Artificial Sequence
  Synthetic polypeptide
GLPSHASCIACGMENSRIVRVRVIAGIGLAKKDILGASDPYVRVTLYDPMNGVLTSVQTKTIKKSLNPKWNEEILFRVHPQQHRLLFEVFDENRLTRDDFLGQVDVPLYPLPTENPRLERPYTFKDFVLHPRSHKSRVKGYLRLKMTYLPKTSGSEDDNAEQAEELEPGWVVLDQPDAACHLQQQQEPSPLPPGWEERQDILGRTYYVNHESRRTQWKRPTPQDNLTDAENGNIQLQAQRAFTTRRQISEETESVDNRESSENWEIIREDEATMYSNQAFPSPPPSSNLDVPTHLAEELNARLTIFGNSAVSQPASSSNHSSRRGSLQAYTFEEQPTLPVLLPTSSGLPPGWEEKQDERGRSYYVDHNSRTTTWTKPTVQATVETSQLTSSQSSAGPQSQASTSDSGQQVTQPSEIEQGFLPKGWEVRHAPNGRPFFIDHNTKTTTWEDPRLKIPAHLRGKTSLDTSNDLGPLPPGWEERTHTDGRIFYINHNIKRTQWEDPRLENVAITGPAVPYSRDYKRKYEFFRRKLKKQNDIPNKFEMKLRRATVLEDSYRRIMGVKRADFLKARLWIEFDGEKGLDYGGVAREWFFLISKEMFNPYYGLFEYSATDNYTLQINPNSGLCNEDHLSYFKFIGRVAGMAVYHGKLLDGFFIRPFYKMMLHKPITLHDMESVDSEYYNSLRWILENDPTELDLRFIIDEELFGQTHQHELKNGGSEIVVTNKNKKEYIYLVIQWRFVNRIQKQMAAFKEGFFELIPQDLIKIFDENELELLMCGLGDVDVNDWREHTKYKNGYSANHQVIQWFWKAVLMMDSEKRIRLLQFVTGTSRVPMNGFAELYGSNGPQSFTVEQWGTPEKLPRAHTCFNRLDLPPYESFEELWDKLQMAIENTQGFDGVD

SEQ ID NO: 15629 - protein, 33 aa, Artificial Sequence
  Synthetic polypeptide
PCFLYSLWNGKFTNCESKSYSRNRPCQEGYIGS

SEQ ID NO: 15630 - protein, 9 aa, Artificial Sequence
  Synthetic polypeptide
PVEWKIHEL

SEQ ID NO: 15631 - protein, 20 aa, Artificial Sequence
  Synthetic polypeptide
GFPVMLPVQPAELQMFADYG

SEQ ID NO: 15632 - protein, 417 aa, Artificial Sequence
  Synthetic polypeptide
KCVALLPSFSLLLPCEDVLASPLPSTMTASFLRLPSHASCTACRTANVCRLRLTVPPESPVPEQCEKKIERKEQLLDLSNGEPTRKLPQGVVYGVVRRSDQNQQKEMVVYGWSTSQLKEEMNYIKDKTLVDVTLENSNIKDQIRNLQQTYEASMDKLREKQRQLEVAQVENQLLKMKVESSQEANAEVMREMTKKLYSQYEEKLQEEQRKHSAEKEALLEETNSFLKAIEEANKKMQAAEISLEEKDQRIGELDRLIERMEKERHQLQLQLLEHETEMSGELTDSDKERYQQLEEASASLRERIRHLDDMVHCQQKKVKQMVEEIESLKKKLQQKQLLILQLLEKISFLEGENNELQSRLDYLTETQAKTEVETREIGVGCDLLPSQTGRTREIVMPSRNYTPYTRVLELTMKKTLT

SEQ ID NO: 15633 - protein, 167 aa, Artificial Sequence
  Synthetic polypeptide
KCVALLPSFSLLLPCEDVLASPLPSTMTASFLRLPSHASCTACRTANVCRLRLTVPPESPVPEQCEKKIERKEQLLDLSNGEPTRKLPQGVVYGVVRRSDQNQQKEMVVYGWSTSQLKEEMNYIKDVRATLEKVRKRMYGDYDEMRQKIRQLTQELSVSHAQQEYLE

SEQ ID NO: 15634 - protein, 434 aa, Artificial Sequence
  Synthetic polypeptide
KCVALLPSFSLLLPCEDVLASPLPSTMTASFLRLPSHASCTACRTANVCRLRLTVPPESPVPEQCEKKIERKEQLLDLSNGEPTRKLPQGVVYGVVRRSDQNQQKEMVVYGWSTSQLKEEMNYIKDVRATLEKVRKRMYGDYDEMRQKIRQLTQELSVSHAQQEYLENHIQTQSSALDRFNAMNSALASDSIGLQKTLVDVTLENSNIKDQIRNLQQTYEASMDKLREKQRQLEVAQVENQLLKMKVESSQEANAEVMREMTKKLYSQYEEKLQEEQRKHSAEKEALLEETNSFLKAIEEANKKMQAAEISLEEKDQRIGELDRLIERMEKERHQLQLQLLEHETEMSGELTDSDKERYQQLEEASASLRERIRHLDDMVHCQQKKVKQMVEEIESLKKKLQQKQLLILQLLEKISFLEGEGRKGLKGRLKMSC

SEQ ID NO: 15635 - protein, 785 aa, Artificial Sequence
  Synthetic polypeptide
KCVALLPSFSLLLPCEDVLASPLPSTMTASFLRLPSHASCTACRTANVCRLRLTVPPESPVPEQCEKKIERKEQLLDLSNGEPTRKLPQGVVYGVVRRSDQNQQKEMVVYGWSTSQLKEEMNYIKDVRATLEKVRKRMYGDYDEMRQKIRQLTQELSVSHAQQEYLENHIQTQSSALDRFNAMNSALASDSIGLQKTLVDVTLENSNIKDQIRNLQQTYEASMDKLREKQRQLEVAQVENQLLKMKVESSQEANAEVMREMTKKLYSQYEEKLQEEQRKHSAEKEALLEETNSFLKAIEEANKKMQAAEISLEEKDQRIGELDRLIERMEKERHQLQLQLLEHETEMSGELTDSDKERYQQLEEASASLRERIRHLDDMVHCQQKKVKQMVEEIESLKKKLQQKQLLILQLLEKISFLEGENNELQSRLDYLTETQAKTEVETREIGVGCDLLPRKFICKLPDKGKKIFDSFAKLKAAIAECEEVRRKSELFNPVSLDCKLRQKAIAEVDVGTDKAQNSDPILDTSSLVPGCSSVDNIKSSQTSQNQGLGRPTLEGDEETSEVEYTVNKGPASSNRDRVPPSSEASEHHPRHRVSSQAEDTSSSFDNLFIDRLQRITIADQGEQQSEENASTKNLTGLSSGTEKKPHYMEVLEMRAKNPVPQLRKFKTNVLPFRQNDSSSHCQKSGSPISSEERRRRDKQHLDDITAARLLPLHHMPTQLLSIEESLALQKQQKQNYEEMQAKLAAQKLAERLNIKMRSYNPEGESSGRYREVRDEDDDWSSDEF

SEQ ID NO: 15636 - protein, 570 aa, Artificial Sequence
  Synthetic polypeptide
KCVALLPSFSLLLPCEDVLASPLPSTMTASFLRLPSHASCTACRTANVCRLRLTVPPESPVPEQCEKKIERKEQLLDLSNGEPTRKLPQGVVYGVVRRSDQNQQKEMVVYGWSTSQLKEEMNYIKDVRATLEKVRKRMYGDYDEMRQKIRQLTQELSVSHAQQEYLENHIQTQSSALDRFNAMNSALASDSIGLQKTLVDVTLENSNIKDQIRNLQQTYEASMDKLREKQRQLEVAQVENQLLKMKVESSQEANAEVMREMTKKLYSQYEEKLQEEQRKHSAEKEALLEETNSFLKAIEEANKKMQAAEISLEEKDQRIGELDRLIERMEKERHQLQLQLLEHETEMSGELTDSDKERYQQLEEASASLRERIRHLDDMVHCQQKKVKQMVEEIESLKKKLQQKQLLILQLLEKISFLEGENNELQSRLDYLTETQAKTEVETREIGVGCDLLPRLPFRQNDSSSHCQKSGSPISSEERRRRDKQHLDDITAARLLPLHHMPTQLLSIEESLALQKQQKQNYEEMQAKLAAQKLAERLNIKMRSYNPEGESSGRYREVRDEDDDWSSDEF

SEQ ID NO: 15637 - protein, 465 aa, Artificial Sequence
  Synthetic polypeptide
KCVALLPSFSLLLPCEDVLASPLPSTMTASFLRLPSHASCTACRTANVCRLRLTVPPESPVPEQCEKKIERKEQLLDLSNGEPTRKLPQGVVYGVVRRSDQNQQKEMVVYGWSTSQLKEEMNYIKDVRATLEKVRKRMYGDYDEMRQKIRQLTQELSVSHAQQEYLENHIQTQSSALDRFNAMNSALASDSIGLQKTLVDVTLENSNIKDQIRNLQQTYEASMDKLREKQRQLEVAQVENQLLKMKVESSQEANAEVMREMTKKLYSQYEEKLQEEQRKHSAEKEALLEETNSFLKAIEEANKKMQAAEISLEEKDQRIGELDRLIERMEKERHQLQLQLLEHETEMSGELTDSDKERYQQLEEASASLRERIRHLDDMVHCQQKKVKQMVEEIESLKKKLQQKQLLILQLLEKISFLEGENNELQSRLDYLTETQAKTEVETREIGVGCDLLPRRCKQSSQRKN

SEQ ID NO: 15638 - protein, 486 aa, Artificial Sequence
  Synthetic polypeptide
KCVALLPSFSLLLPCEDVLASPLPSTMTASFLRLPSHASCTACRTANVCRLRLTVPPESPVPEQCEKKIERKEQLLDLSNGEPTRKLPQGVVYGVVRRSDQNQQKEMVVYGWSTSQLKEEMNYIKDVRATLEKVRKRMYGDYDEMRQKIRQLTQELSVSHAQQEYLENHIQTQSSALDRFNAMNSALASDSIGLQKTLVDVTLENSNIKDQIRNLQQTYEASMDKLREKQRQLEVAQVENQLLKMKVESSQEANAEVMREMTKKLYSQYEEKLQEEQRKHSAEKEALLEETNSFLKAIEEANKKMQAAEISLEEKDQRIGELDRLIERMEKERHQLQLQLLEHETEMSGELTDSDKERYQQLEEASASLRERIRHLDDMVHCQQKKVKQMVEEIESLKKKLQQKQLLILQLLEKISFLEGENNELQSRLDYLTETQAKTEVETREIGVGCDLLPSQTGRTREIVMPSRNYTPYTRVLELTMKKTLT

SEQ ID NO: 15639 - protein, 427 aa, Artificial Sequence
  Synthetic polypeptide
KCVALLPSFSLLLPCEDVLASPLPSTMTASFLRLPSHASCTACRTANVCRLRLTVPPESPVPEQCEKKIERKEQLLDLSNGEPTRKLPQGVVYGVVRRSDQNQQKEMVVYGWSTSQLKEEMNYIKDVRATLEKVRKRMYGDYDEMRQKIRQLTQELSVSHAQQEYLENHIQTQSSALDRFNAMNSALASDSIGLQKTLVDVTLENSNIKDQIRNLQQTYEASMDKLREKQRQLEVAQVENQLLKMKVESSQEANAEVMREMTKKLYSQYEEKLQEEQRKHSAEKEALLEETNSFLKAIEEANKKMQAAEISLEEKDQRIGELDRLIERMEKERHQLQLQLLEHETEMSGELTDSDKERYQQLEEASASLRERIRHLDDMVHCQQKKVKQMVEEIESLKKKLQQKQLLILQLLEKISFLEGEVTFSTK

SEQ ID NO: 15640 - protein, 410 aa, Artificial Sequence
  Synthetic polypeptide
KCVALLPSFSLLLPCEDVLASPLPSTMTASFLRLPSHASCTACRTANVCRLRLTVPPESPVPEQCEKKIERKEQLLDLSNGEPTRKLPQGVVYGVVRRSDQNQQKEMVVYGWSTSQLKEEMNYIKDVRATLEKVRKRMYGDYDEMRQKIRQLTQELSVSHAQQEYLENHIQTQSSALDRFNAMNSALASDSIGLQKTLVDVTLENSNIKDQIRNLQQTYEASMDKLREKQRQLEVAQVENQLLKMKVESSQEANAEVMREMTKKLYSQYEEKLQEEQRKHSAEKEALLEETNSFLKAIEEANKKMQAAEISLEEKDQRIGELDRLIERMEKERHQLQLQLLEHETEMSGELTDSDKERYQQLEEASASLRERIRHLDDMVHCQQKKVKQMVEEIMSHELFSRFSLRLFGR

SEQ ID NO: 15641 - protein, 458 aa, Artificial Sequence
  Synthetic polypeptide
KCVALLPSFSLLLPCEDVLASPLPSTMTASFLRLPSHASCTACRTANVCRLRLTVPPESPVPEQCEKKIERKEQLLDLSNGEPTRKLPQGVVYGVVRRSDQNQQKEMVVYGWSTSQLKEEMNYIKDVRATLEKVRKRMYGDYDEMRQKIRQLTQELSVSHAQQEYLENHIQTQSSALDRFNAMNSALASDSIGLQKTLVDVTLENSNIKDQIRNLQQTYEASMDKLREKQRQLEVAQVENQLLKMKVESSQEANAEVMREMTKKLYSQYEEKLQEEQRKHSAEKEALLEETNSFLKAIEEANKKMQAAEISLEEKDQRIGELDRLIERMEKERHQLQLQLLEHETEMSGELTDSDKERYQQLEEASASLRERIRHLDDMVHCQQKKVKQMVEENNELQSRLDYLTETQAKTEVETREIGVGCDLLPSQTGRTREIVMPSRNYTPYTRVLELTMKKTLT

SEQ ID NO: 15642 - protein, 399 aa, Artificial Sequence
  Synthetic polypeptide
KCVALLPSFSLLLPCEDVLASPLPSTMTASFLRLPSHASCTACRTANVCRLRLTVPPESPVPEQCEKKIERKEQLLDLSNGEPTRKLPQGVVYGVVRRSDQNQQKEMVVYGWSTSQLKEEMNYIKDVRATLEKVRKRMYGDYDEMRQKIRQLTQELSVSHAQQEYLENHIQTQSSALDRFNAMNSALASDSIGLQKTLVDVTLENSNIKDQIRNLQQTYEASMDKLREKQRQLEVAQVENQLLKMKVESSQEANAEVMREMTKKLYSQYEEKLQEEQRKHSAEKEALLEETNSFLKAIEEANKKMQAAEISLEEKDQRIGELDRLIERMEKERHQLQLQLLEHETEMSGELTDSDKERYQQLEEASASLRERIRHLDDMVHCQQKKVKQMVEEVTFSTK

SEQ ID NO: 15643 - protein, 455 aa, Artificial Sequence
  Synthetic polypeptide
KCVALLPSFSLLLPCEDVLASPLPSTMTASFLRLPSHASCTACRTANVCRLRLTVPPESPVPEQCEKKIERKEQLLDLSNGEPTRKLPQGVVYGVVRRSDQNQQKEMVVYGWSTSQLKEEMNYIKDVSHAQQEYLENHIQTQSSALDRFNAMNSALASDSIGLQKTLVDVTLENSNIKDQIRNLQQTYEASMDKLREKQRQLEVAQVENQLLKMKVESSQEANAEVMREMTKKLYSQYEEKLQEEQRKHSAEKEALLEETNSFLKAIEEANKKMQAAEISLEEKDQRIGELDRLIERMEKERHQLQLQLLEHETEMSGELTDSDKERYQQLEEASASLRERIRHLDDMVHCQQKKVKQMVEEIESLKKKLQQKQLLILQLLEKISFLEGENNELQSRLDYLTETQAKTEVETREIGVGCDLLPSQTGRTREIVMPSRNYTPYTRVLELTMKKTLT

SEQ ID NO: 15644 - protein, 435 aa, Artificial Sequence
  Synthetic polypeptide
KCVALLPSFSLLLPCEDVLASPLPSTMTASFLRLPSHASCTACRTANVCRLRLTVPPESPVPEQCEKKIERKEQLLDLSNGEPTRKLPQGVVYGVVRRSDQNQQKEMVVYGWSTSQLKEEMNYIKDVSHAQQEYLENHIQTQSSALDRFNAMNSALASDSIGLQKTLVDVTLENSNIKDQIRNLQQTYEASMDKLREKQRQLEVAQVENQLLKMKVESSQEANAEVMREMTKKLYSQYEEKLQEEQRKHSAEKEALLEETNSFLKAIEEANKKMQAAEISLEEKDQRIGELDRLIERMEKERHQLQLQLLEHETEMSGELTDSDKERYQQLEEASASLRERIRHLDDMVHCQQKKVKQMVEENNELQSRLDYLTETQAKTEVETREIGVGCDLLPRQSRKFEKVLNEFVQLLPLPHHLLWAFGNVCWRRHFGLLQ

SEQ ID NO: 15645 - protein, 41 aa, Artificial Sequence
  Synthetic polypeptide
RCACFTFAFHHDCKFSEASQSCFLYSLQNCKCLQTTADRTS

SEQ ID NO: 15646 - protein, 27 aa, Artificial Sequence
  Synthetic polypeptide
DLPRRAFGWDLEGLLPKNKDTSRRTCC

SEQ ID NO: 15647 - protein, 14 aa, Artificial Sequence
  Synthetic polypeptide
GYLKKNMLLMVQNF

SEQ ID NO: 15648 - protein, 600 aa, Artificial Sequence; identical to SEQ ID NO: 1896
  Synthetic polypeptide

SEQ ID NO: 15649 - protein, 42 aa, Artificial Sequence
  Synthetic polypeptide
LWHVREAKVSTSTTGKATMSSTVVWTTWCYCPRSQRTPSWRI

SEQ ID NO: 15650 - protein, 56 aa, Artificial Sequence
  Synthetic polypeptide
PSSTPLSSYGTLGKQRCLPVPLAKPQCQAQWCGRHGATVQDHRELHRGESEEEIHG

SEQ ID NO: 15651 - protein, 22 aa, Artificial Sequence
  Synthetic polypeptide
EPLCFLQNVYCSRNPVQAQLGG

SEQ ID NO: 15652 - protein, 125 aa, Artificial Sequence
  Synthetic polypeptide
NHCASFKMSTVHEILCKLSLEGDHSTPPSAYGSVKAYTNFDAERDALNIETAIKTKGVDEVTIVNILTNRSNAQRQDIAFAYQRRTKKELASALKSALSGHLETVILGLLKTPAQYDASELKASM

SEQ ID NO: 15653 - protein, 346 aa, Artificial Sequence
  Synthetic polypeptide
NHCASFKMSTVHEILCKLSLEGDHSTPPSAYGSVKAYTNFDAERDALNIETAIKTKGVDEVTIVNILTNRSNAQRQDIAFAYQRRTKKELASALKSALSGHLETVILGLLKTPAQYDASELKASMKGLGTDEDSLIEIICSRTNQELQEINRVYKEMYKTDLEKDIISDTSGDFRKLMVALAKGRRAEDGSVIDYELIDQDARDLYDAGVKRKGTDVPKWISIMTERSVPHLQKVFDRYKSYSPYDMLESIRKEVKGDLENAFLNLVQCIQNKPLYFADRLYDSMKGKGTRDKVLIRIMVSRSEVDMLKIRSEFKRKYGKSLYYYIQQDTKGDYQKALLYLCGGDD

SEQ ID NO: 15654 - protein, 46 aa, Artificial Sequence
  Synthetic polypeptide
TIVLPSKCLLFTKSCASSAWRVITLHPQVHMGLSKPILTLMLSGML

SEQ ID NO: 15655 - protein, 32 aa, Artificial Sequence
  Synthetic polypeptide
GRGRGPVVPAAQASGSLESKANVWMRSPLSTF

SEQ ID NO: 15656 - protein, 17 aa, Artificial Sequence
  Synthetic polypeptide
SQLLKLVDLLSPRPMCG

SEQ ID NO: 15657 - protein, 20 aa, Artificial Sequence
  Synthetic polypeptide
VQGQCVDEVTIVNILTNRSN

SEQ ID NO: 15658 - protein, 36 aa, Artificial Sequence
  Synthetic polypeptide
VQGQCVDEVTIVNILTNRSNAQRQDIAFAYQRRTKK

SEQ ID NO: 15659 - protein, 65 aa, Artificial Sequence
  Synthetic polypeptide
VQGQCVDEVTIVNILTNRSNAQRQDIAFAYQRRTKKELASALKSALSGHLETVILGLLKTPAQYD

SEQ ID NO: 15660 - protein, 73 aa, Artificial Sequence
  Synthetic polypeptide
VQGQCVDEVTIVNILTNRSNAQRQDIAFAYQRRTKKELASALKSALSGHLETVILGLLKTPAQYDASELKASM

SEQ ID NO: 15661 - protein, 74 aa, Artificial Sequence
  Synthetic polypeptide
VQGQCVDEVTIVNILTNRSNAQRQDIAFAYQRRTKKELASALKSALSGHLETVILGLLKTPAQYDASELKASMK

SEQ ID NO: 15662 - protein, 88 aa, Artificial Sequence
  Synthetic polypeptide
VQGQCVDEVTIVNILTNRSNAQRQDIAFAYQRRTKKELASALKSALSGHLETVILGLLKTPAQYDASELKASMKGLGTDEDSLIEIIC

SEQ ID NO: 15663 - protein, 89 aa, Artificial Sequence
  Synthetic polypeptide
VQGQCVDEVTIVNILTNRSNAQRQDIAFAYQRRTKKELASALKSALSGHLETVILGLLKTPAQYDASELKASMKGLGTDEDSLIEIICS

SEQ ID NO: 15664 - protein, 104 aa, Artificial Sequence
  Synthetic polypeptide
VQGQCVDEVTIVNILTNRSNAQRQDIAFAYQRRTKKELASALKSALSGHLETVILGLLKTPAQYDASELKASMKGLGTDEDSLIEIICSRTNQELQEINRVYKE

SEQ ID NO: 15665 - protein, 131 aa, Artificial Sequence
  Synthetic polypeptide
VQGQCVDEVTIVNILTNRSNAQRQDIAFAYQRRTKKELASALKSALSGHLETVILGLLKTPAQYDASELKASMKGLGTDEDSLIEIICSRTNQELQEINRVYKEMYKTDLEKDIISDTSGDFRKLMVALAK

SEQ ID NO: 15666 - protein, 182 aa, Artificial Sequence
  Synthetic polypeptide
VQGQCVDEVTIVNILTNRSNAQRQDIAFAYQRRTKKELASALKSALSGHLETVILGLLKTPAQYDASELKASMKGLGTDEDSLIEIICSRTNQELQEINRVYKEMYKTDLEKDIISDTSGDFRKLMVALAKGRRAEDGSVIDYELIDQDARDLYDAGVKRKGTDVPKWISIMTERSVPHLQK

SEQ ID NO: 15667 - protein, 185 aa, Artificial Sequence
  Synthetic polypeptide
VQGQCVDEVTIVNILTNRSNAQRQDIAFAYQRRTKKELASALKSALSGHLETVILGLLKTPAQYDASELKASMKGLGTDEDSLIEIICSRTNQELQEINRVYKEMYKTDLEKDIISDTSGDFRKLMVALAKGRRAEDGSVIDYELIDQDARDLYDAGVKRKGTDVPKWISIMTERSVPHLQKGGI

SEQ ID NO: 15668 - protein, 211 aa, Artificial Sequence
  Synthetic polypeptide
VQGQCVDEVTIVNILTNRSNAQRQDIAFAYQRRTKKELASALKSALSGHLETVILGLLKTPAQYDASELKASMKGLGTDEDSLIEIICSRTNQELQEINRVYKEMYKTDLEKDIISDTSGDFRKLMVALAKGRRAEDGSVIDYELIDQDARDLYDAGVKRKGTDVPKWISIMTERSVPHLQKVFDRYKSYSPYDMLESIRKEVKGDLENAF

SEQ ID NO: 15669 - protein, 234 aa, Artificial Sequence
  Synthetic polypeptide
VQGQCVDEVTIVNILTNRSNAQRQDIAFAYQRRTKKELASALKSALSGHLETVILGLLKTPAQYDASELKASMKGLGTDEDSLIEIICSRTNQELQEINRVYKEMYKTDLEKDIISDTSGDFRKLMVALAKGRRAEDGSVIDYELIDQDARDLYDAGVKRKGTDVPKWISIMTERSVPHLQKVFDRYKSYSPYDMLESIRKEVKGDLENAFLNLVQCIQNKPLYFADRLYDSMK

SEQ ID NO: 15670 - protein, 294 aa, Artificial Sequence
  Synthetic polypeptide
VQGQCVDEVTIVNILTNRSNAQRQDIAFAYQRRTKKELASALKSALSGHLETVILGLLKTPAQYDASELKASMKGLGTDEDSLIEIICSRTNQELQEINRVYKEMYKTDLEKDIISDTSGDFRKLMVALAKGRRAEDGSVIDYELIDQDARDLYDAGVKRKGTDVPKWISIMTERSVPHLQKVFDRYKSYSPYDMLESIRKEVKGDLENAFLNLVQCIQNKPLYFADRLYDSMKGKGTRDKVLIRIMVSRSEVDMLKIRSEFKRKYGKSLYYYIQQDTKGDYQKALLYLCGGDD

SEQ ID NO: 15671 - protein, 87 aa, Artificial Sequence
  Synthetic polypeptide
VQGQCVDEVTIVNILTNRSNAQRQDIAFAYQRRTKKELASALKSALSGHLETVILGLLKTPAQYDASELKASMKVNAWAGNRRGLSH

SEQ ID NO: 15672 - protein, 53 aa, Artificial Sequence
  Synthetic polypeptide
GRGRGPVVPAAQASGSLESKANHSTPPSAYGSVKAYTNFDAERDALNIETAIK

SEQ ID NO: 15673 - protein, 75 aa, Artificial Sequence
  Synthetic polypeptide
GRGRGPVVPAAQASGSLESKANHSTPPSAYGSVKAYTNFDAERDALNIETAIKTKGARPEPRSYQTLEKESLVPF

SEQ ID NO: 15674 - protein, 71 aa, Artificial Sequence
  Synthetic polypeptide
GRGRGPVVPAAQASGSLESKANHSTPPSAYGSVKAYTNFDAERDALNIETAIKTKGVDEVTIVNILTNRSN

SEQ ID NO: 15675 - protein, 87 aa, Artificial Sequence
  Synthetic polypeptide
GRGRGPVVPAAQASGSLESKANHSTPPSAYGSVKAYTNFDAERDALNIETAIKTKGVDEVTIVNILTNRSNAQRQDIAFAYQRRTKK

SEQ ID NO: 15676 - protein, 116 aa, Artificial Sequence
  Synthetic polypeptide
GRGRGPVVPAAQASGSLESKANHSTPPSAYGSVKAYTNFDAERDALNIETAIKTKGVDEVTIVNILTNRSNAQRQDIAFAYQRRTKKELASALKSALSGHLETVILGLLKTPAQYD

SEQ ID NO: 15677 - protein, 124 aa, Artificial Sequence
  Synthetic polypeptide
GRGRGPVVPAAQASGSLESKANHSTPPSAYGSVKAYTNFDAERDALNIETAIKTKGVDEVTIVNILTNRSNAQRQDIAFAYQRRTKKELASALKSALSGHLETVILGLLKTPAQYDASELKASM

SEQ ID NO: 15678 - protein, 125 aa, Artificial Sequence
  Synthetic polypeptide
GRGRGPVVPAAQASGSLESKANHSTPPSAYGSVKAYTNFDAERDALNIETAIKTKGVDEVTIVNILTNRSNAQRQDIAFAYQRRTKKELASALKSALSGHLETVILGLLKTPAQYDASELKASMK

SEQ ID NO: 15679 - protein, 139 aa, Artificial Sequence
  Synthetic polypeptide
GRGRGPVVPAAQASGSLESKANHSTPPSAYGSVKAYTNFDAERDALNIETAIKTKGVDEVTIVNILTNRSNAQRQDIAFAYQRRTKKELASALKSALSGHLETVILGLLKTPAQYDASELKASMKGLGTDEDSLIEIIC

SEQ ID NO: 15680 - protein, 140 aa, Artificial Sequence
  Synthetic polypeptide
GRGRGPVVPAAQASGSLESKANHSTPPSAYGSVKAYTNFDAERDALNIETAIKTKGVDEVTIVNILTNRSNAQRQDIAFAYQRRTKKELASALKSALSGHLETVILGLLKTPAQYDASELKASMKGLGTDEDSLIEIICS

SEQ ID NO: 15681 - protein, 155 aa, Artificial Sequence
  Synthetic polypeptide
GRGRGPVVPAAQASGSLESKANHSTPPSAYGSVKAYTNFDAERDALNIETAIKTKGVDEVTIVNILTNRSNAQRQDIAFAYQRRTKKELASALKSALSGHLETVILGLLKTPAQYDASELKASMKGLGTDEDSLIEIICSRTNQELQEINRVYKE

SEQ ID NO: 15682 - protein, 182 aa, Artificial Sequence
  Synthetic polypeptide
GRGRGPVVPAAQASGSLESKANHSTPPSAYGSVKAYTNFDAERDALNIETAIKTKGVDEVTIVNILTNRSNAQRQDIAFAYQRRTKKELASALKSALSGHLETVILGLLKTPAQYDASELKASMKGLGTDEDSLIEIICSRTNQELQEINRVYKEMYKTDLEKDIISDTSGDFRKLMVALAK

SEQ ID NO: 15683 - protein, 233 aa, Artificial Sequence
  Synthetic polypeptide
GRGRGPVVPAAQASGSLESKANHSTPPSAYGSVKAYTNFDAERDALNIETAIKTKGVDEVTIVNILTNRSNAQRQDIAFAYQRRTKKELASALKSALSGHLETVILGLLKTPAQYDASELKASMKGLGTDEDSLIEIICSRTNQELQEINRVYKEMYKTDLEKDIISDTSGDFRKLMVALAKGRRAEDGSVIDYELIDQDARDLYDAGVKRKGTDVPKWISIMTERSVPHLQK

SEQ ID NO: 15684 - protein, 236 aa, Artificial Sequence
  Synthetic polypeptide
GRGRGPVVPAAQASGSLESKANHSTPPSAYGSVKAYTNFDAERDALNIETAIKTKGVDEVTIVNILTNRSNAQRQDIAFAYQRRTKKELASALKSALSGHLETVILGLLKTPAQYDASELKASMKGLGTDEDSLIEIICSRTNQELQEINRVYKEMYKTDLEKDIISDTSGDFRKLMVALAKGRRAEDGSVIDYELIDQDARDLYDAGVKRKGTDVPKWISIMTERSVPHLQKGGI

SEQ ID NO: 15685 - protein, 262 aa, Artificial Sequence
  Synthetic polypeptide
GRGRGPVVPAAQASGSLESKANHSTPPSAYGSVKAYTNFDAERDALNIETAIKTKGVDEVTIVNILTNRSNAQRQDIAFAYQRRTKKELASALKSALSGHLETVILGLLKTPAQYDASELKASMKGLGTDEDSLIEIICSRTNQELQEINRVYKEMYKTDLEKDIISDTSGDFRKLMVALAKGRRAEDGSVIDYELIDQDARDLYDAGVKRKGTDVPKWISIMTERSVPHLQKVFDRYKSYSPYDMLESIRKEVKGDLENAF

SEQ ID NO: 15686 - protein, 345 aa, Artificial Sequence
  Synthetic polypeptide
GRGRGPVVPAAQASGSLESKANHSTPPSAYGSVKAYTNFDAERDALNIETAIKTKGVDEVTIVNILTNRSNAQRQDIAFAYQRRTKKELASALKSALSGHLETVILGLLKTPAQYDASELKASMKGLGTDEDSLIEIICSRTNQELQEINRVYKEMYKTDLEKDIISDTSGDFRKLMVALAKGRRAEDGSVIDYELIDQDARDLYDAGVKRKGTDVPKWISIMTERSVPHLQKVFDRYKSYSPYDMLESIRKEVKGDLENAFLNLVQCIQNKPLYFADRLYDSMKGKGTRDKVLIRIMVSRSEVDMLKIRSEFKRKYGKSLYYYIQQDTKGDYQKALLYLCGGDD

SEQ ID NO: 15687 - protein, 138 aa, Artificial Sequence
  Synthetic polypeptide
GRGRGPVVPAAQASGSLESKANHSTPPSAYGSVKAYTNFDAERDALNIETAIKTKGVDEVTIVNILTNRSNAQRQDIAFAYQRRTKKELASALKSALSGHLETVILGLLKTPAQYDASELKASMKVNAWAGNRRGLSH

SEQ ID NO: 15688 - protein, 38 aa, Artificial Sequence
  Synthetic polypeptide
SQLLKLVDLLSPRPITLHPQVHMGLSKPILTLMLSGML

SEQ ID NO: 15689 - protein, 19 aa, Artificial Sequence
  Synthetic polypeptide
VQGQSLYTPKCIWVCQSLY

SEQ ID NO: 15690 - protein, 65 aa, Artificial Sequence
  Synthetic polypeptide
GRGRGPVVPAAQASGSLESKANLPSKCLLFTKSCASSAWRVITLHPQVHMGLSKPILTLMLSGML

SEQ ID NO: 15691 - protein, 33 aa, Artificial Sequence
  Synthetic polypeptide
SQLLKLVDLLSPRPIFLQNVYCSRNPVQAQLGG

SEQ ID NO: 15692 - protein, 126 aa, Artificial Sequence
  Synthetic polypeptide
VQGQSSFKMSTVHEILCKLSLEGDHSTPPSAYGSVKAYTNFDAERDALNIETAIKTKGVDEVTIVNILTNRSNAQRQDIAFAYQRRTKKELASALKSALSGHLETVILGLLKTPAQYDASELKASM

SEQ ID NO: 15693 - protein, 347 aa, Artificial Sequence
  Synthetic polypeptide
VQGQSSFKMSTVHEILCKLSLEGDHSTPPSAYGSVKAYTNFDAERDALNIETAIKTKGVDEVTIVNILTNRSNAQRQDIAFAYQRRTKKELASALKSALSGHLETVILGLLKTPAQYDASELKASMKGLGTDEDSLIEIICSRTNQELQEINRVYKEMYKTDLEKDIISDTSGDFRKLMVALAKGRRAEDGSVIDYELIDQDARDLYDAGVKRKGTDVPKWISIMTERSVPHLQKVFDRYKSYSPYDMLESIRKEVKGDLENAFLNLVQCIQNKPLYFADRLYDSMKGKGTRDKVLIRIMVSRSEVDMLKIRSEFKRKYGKSLYYYIQQDTKGDYQKALLYLCGGDD

SEQ ID NO: 15694 - protein, 47 aa, Artificial Sequence
  Synthetic polypeptide
FPHLGRWLKDAYSYHHPELLEISKNTVISFLQNVYCSRNPVQAQLGG

SEQ ID NO: 15695 - protein, 151 aa, Artificial Sequence
  Synthetic polypeptide
SFLIWEGGLRMPILTTTQSYWRFQKTQSLASFKMSTVHEILCKLSLEGDHSTPPSAYGSVKAYTNFDAERDALNIETAIKTKGVDEVTIVNILTNRSNAQRQDIAFAYQRRTKKELASALKSALSGHLETVILGLLKTPAQYDASELKASM

SEQ ID NO: 15696 - protein, 372 aa, Artificial Sequence
  Synthetic polypeptide
SFLIWEGGLRMPILTTTQSYWRFQKTQSLASFKMSTVHEILCKLSLEGDHSTPPSAYGSVKAYTNFDAERDALNIETAIKTKGVDEVTIVNILTNRSNAQRQDIAFAYQRRTKKELASALKSALSGHLETVILGLLKTPAQYDASELKASMKGLGTDEDSLIEIICSRTNQELQEINRVYKEMYKTDLEKDIISDTSGDFRKLMVALAKGRRAEDGSVIDYELIDQDARDLYDAGVKRKGTDVPKWISIMTERSVPHLQKVFDRYKSYSPYDMLESIRKEVKGDLENAFLNLVQCIQNKPLYFADRLYDSMKGKGTRDKVLIRIMVSRSEVDMLKIRSEFKRKYGKSLYYYIQQDTKGDYQKALLYLCGGDD

SEQ ID NO: 15697 - protein, 75 aa, Artificial Sequence
  Synthetic polypeptide
AFTFTHHSLIDSFRATSSPVSAFHGIDFKIRTIELDGKKIKLQIWDTAGQERFRTITTAYYRGAMEGILGIKRTS

SEQ ID NO: 15698 - protein, 190 aa, Artificial Sequence
  Synthetic polypeptide
AFTFTHHSLIDSFRATSSPVSAFHGIDFKIRTIELDGKKIKLQIWDTAGQERFRTITTAYYRGAMGIMLVYDITNEKSFDNIKNWIRNIEEHASSDVERMILGNKCDMNDKRQVSKERGEKLAIDYGIKFLETSAKSSANVEEAFFTLARDIMTKLNRKMNDSNSAGAGGPVKITENRSKKTSFFRCSLL

SEQ ID NO: 15699 - protein, 171 aa, Artificial Sequence
  Synthetic polypeptide
AFTFTHHSLIDSFRATSSPVSAFHGIDFKIRTIELDGKKIKLQIWDTAGQERFRTITTAYYRGAMGIMLVYDITNEKSFDNIKNWIRNIEEHASSDVERMILGNKCDMNDKRQVSKERGEKLAIDYGIKFLETSAKSSANVEEAFFTLARDIMTKLNRKMVCITYNFYFHY

SEQ ID NO: 15700 - protein, 173 aa, Artificial Sequence
  Synthetic polypeptide
AFTFTHHSLIDSFRATSSPVSAFHGIDFKIRTIELDGKKIKLQIWDTAGQERFRTITTAYYRGAMGIMLVYDITNEKSFDNIKNWIRNIEEHASSDVERMILGNKCDMNDKRQVSKERGEKLAIDYGIKFLETSAKSSANVEENDSNSAGAGGPVKITENRSKKTSFFRCSLL

SEQ ID NO: 15701 - protein, 12 aa, Artificial Sequence
  Synthetic polypeptide
APFMELILKLER

SEQ ID NO: 15702 - protein, 15 aa, Artificial Sequence
  Synthetic polypeptide
FLQSNFQSCKRLSWN

SEQ ID NO: 15703 - protein, 70 aa, Artificial Sequence
  Synthetic polypeptide
CSGQSIGFGITVTYSTVVLGIDFKIRTIELDGKKIKLQIWDTAGQERFRTITTAYYRGAMEGILGIKRTS

SEQ ID NO: 15704 - protein, 185 aa, Artificial Sequence
  Synthetic polypeptide
CSGQSIGFGITVTYSTVVLGIDFKIRTIELDGKKIKLQIWDTAGQERFRTITTAYYRGAMGIMLVYDITNEKSFDNIKNWIRNIEEHASSDVERMILGNKCDMNDKRQVSKERGEKLAIDYGIKFLETSAKSSANVEEAFFTLARDIMTKLNRKMNDSNSAGAGGPVKITENRSKKTSFFRCSLL

SEQ ID NO: 15705 - protein, 166 aa, Artificial Sequence
  Synthetic polypeptide
CSGQSIGFGITVTYSTVVLGIDFKIRTIELDGKKIKLQIWDTAGQERFRTITTAYYRGAMGIMLVYDITNEKSFDNIKNWIRNIEEHASSDVERMILGNKCDMNDKRQVSKERGEKLAIDYGIKFLETSAKSSANVEEAFFTLARDIMTKLNRKMVCITYNFYFHY

SEQ ID NO: 15706 - protein, 168 aa, Artificial Sequence
  Synthetic polypeptide
CSGQSIGFGITVTYSTVVLGIDFKIRTIELDGKKIKLQIWDTAGQERFRTITTAYYRGAMGIMLVYDITNEKSFDNIKNWIRNIEEHASSDVERMILGNKCDMNDKRQVSKERGEKLAIDYGIKFLETSAKSSANVEENDSNSAGAGGPVKITENRSKKTSFFRCSLL

SEQ ID NO: 15707 - protein, 6 aa, Artificial Sequence
  Synthetic polypeptide
HCGVGN

SEQ ID NO: 15708 - protein, 31 aa, Artificial Sequence
  Synthetic polypeptide
KQCDVVDRVLDLESLSLIALWCWELILKLER

SEQ ID NO: 15709 - protein, 31 aa, Artificial Sequence
  Synthetic polypeptide
IDISQKKTNKWPTGIFYTCTRYNDKTQQKNE

SEQ ID NO: 15710 - protein, 35 aa, Artificial Sequence
  Synthetic polypeptide
IDISQKKTNKWPTGIFYTCTRYNDKTQQKNGLYHL

SEQ ID NO: 15711 - protein, 12 aa, Artificial Sequence
  Synthetic polypeptide
MANRHFLHLHEI

SEQ ID NO: 15712 - protein, 59 aa, Artificial Sequence
  Synthetic polypeptide
TFLKRRQINGQQAFFTLARDIMTKLNRKMNDSNSAGAGGPVKITENRSKKTSFFRCSLL

SEQ ID NO: 15713 - protein, 40 aa, Artificial Sequence
  Synthetic polypeptide
TFLKRRQINGQQAFFTLARDIMTKLNRKMVCITYNFYFHY

SEQ ID NO: 15714 - protein, 630 aa, Artificial Sequence; identical to SEQ ID NO: 1880
  Synthetic polypeptide

SEQ ID NO: 15715 - protein, 49 aa, Artificial Sequence; identical to SEQ ID NO: 5241
  Synthetic polypeptide

SEQ ID NO: 15716 - protein, 931 aa, Artificial Sequence; identical to SEQ ID NO: 1579
  Synthetic polypeptide

SEQ ID NO: 15717 - protein, 762 aa, Artificial Sequence; identical to SEQ ID NO: 1667
  Synthetic polypeptide

SEQ ID NO: 15718 - protein, 35 aa, Artificial Sequence; identical to SEQ ID NO: 6127
  Synthetic polypeptide

SEQ ID NO: 15719 - protein, 156 aa, Artificial Sequence
  Synthetic polypeptide
PQAATATTGGPTAATGASARTAPCVTPSQAPACAPPASVDGAARSSAHLAPTARDASCRASADTVPAATPAPASASAHLATPASTARSCALLGAMELTVSCAAPVRMGAPATTSLASVPAPQAGREQCVPSPAHQGHLARTAARIVLATMEGSVTT

SEQ ID NO: 15720 - protein, 31 aa, Artificial Sequence
  Synthetic polypeptide
LLEPIKALWGIWPHTLSTQSSCTRFLTCGVP

SEQ ID NO: 15721 - protein, 315 aa, Artificial Sequence
  Synthetic polypeptide
PVVFHEQGILFGYRHPQSSATACILSLFQMTNETLNIWTHLLPFWFFAWRFVTALYMTDIKNDSYSWPMLVYMCTSCVYPLVSSCAHTFSSMSKNARHICYFLDYGAVNLFSLGSAIAYSAYTFPDALMCTTFHDYYVALAVLNTILSTGLSCYSRFLEIQKPRLCKVIRVLAFAYPYTWDSLPIFYRLFLFPGESAQNEATSYHQKHMIMTLLASFLYSAHLPERLAPGRFDYIGHSHQLFHVCVILATHMQMEAILLDKTLRKEWLLATSKPFSFSQIAGAILLCIIFSLSNIIYFSAALYRIPKPELHKKET

SEQ ID NO: 15722 - protein, 50 aa, Artificial Sequence
  Synthetic polypeptide
SPLGNLASYLVHTEFLYKVPDLWCSMSKASCSATAIHRVLPLPASSAFSK

SEQ ID NO: 15723 - protein, 40 aa, Artificial Sequence
  Synthetic polypeptide
LLEPIKALWGIWPHTLSTQSSCTRFLTCGFLKSRSPDSVR

SEQ ID NO: 15724 - protein, 4 aa, Artificial Sequence
  Synthetic polypeptide
PVVS

SEQ ID NO: 15725 - protein, 182 aa, Artificial Sequence
  Synthetic polypeptide
SPLGNLASYLVHTEFLYKVPDLWFLEIQKPRLCKVIRVLAFAYPYTWDSLPIFYRLFLFPGESAQNEATSYHQKHMIMTLLASFLYSAHLPERLAPGRFDYIGHSHQLFHVCVILATHMQMEAILLDKTLRKEWLLATSKPFSFSQIAGAILLCIIFSLSNIIYFSAALYRIPKPELHKKET

SEQ ID NO: 15726 - protein, 108 aa, Artificial Sequence
  Synthetic polypeptide
LLEPIKALWGIWPHTLSTQSSCTRFLTCGHSHQLFHVCVILATHMQMEAILLDKTLRKEWLLATSKPFSFSQIAGAILLCIIFSLSNIIYFSAALYRIPKPELHKKET

SEQ ID NO: 15727 - protein, 12 aa, Artificial Sequence
  Synthetic polypeptide
PVVTVTSCFTCV

SEQ ID NO: 15728 - protein, 98 aa, Artificial Sequence
  Synthetic polypeptide
SPLGNLASYLVHTEFLYKVPDLWSQSPAVSRVCDPGHAHADGSHTSGQDSEEGMAPGHLQALLFLSDSWSHTSVHHLQPQQHNLFLSCSVSDSQARIT

SEQ ID NO: 15729 - protein, 22 aa, Artificial Sequence
  Synthetic polypeptide
FVSSDLVGPTQELSQRKKTGVP

SEQ ID NO: 15730 - protein, 42 aa, Artificial Sequence
  Synthetic polypeptide
SCGPHPGTESAQEDRCSMSKASCSATAIHRVLPLPASSAFSK

SEQ ID NO: 15731 - protein, 319 aa, Artificial Sequence
  Synthetic polypeptide
VSARRQVFHEQGILFGYRHPQSSATACILSLFQMTNETLNIWTHLLPFWFFAWRFVTALYMTDIKNDSYSWPMLVYMCTSCVYPLVSSCAHTFSSMSKNARHICYFLDYGAVNLFSLGSAIAYSAYTFPDALMCTTFHDYYVALAVLNTILSTGLSCYSRFLEIQKPRLCKVIRVLAFAYPYTWDSLPIFYRLFLFPGESAQNEATSYHQKHMIMTLLASFLYSAHLPERLAPGRFDYIGHSHQLFHVCVILATHMQMEAILLDKTLRKEWLLATSKPFSFSQIAGAILLCIIFSLSNIIYFSAALYRIPKPELHKKET

SEQ ID NO: 15732 - protein, 78 aa, Artificial Sequence; identical to SEQ ID NO: 3994
  Synthetic polypeptide

SEQ ID NO: 15733 - protein, 28 aa, Artificial Sequence
  Synthetic polypeptide
RCSMSKASCSATAIHRVLPLPASSAFSK

SEQ ID NO: 15734 - protein, 320 aa, Artificial Sequence; identical to SEQ ID NO: 2423
  Synthetic polypeptide

SEQ ID NO: 15735 - protein, 47 aa, Artificial Sequence
  Synthetic polypeptide
ASNQQMHRKTASLNSPVSCKEKPDRVEEPPDYSAIPLSQCGSLSQVR

SEQ ID NO: 15736 - protein, 145 aa, Artificial Sequence
  Synthetic polypeptide
ASNQQMHRKTASLNSPVSCKEKPDRVEEPPDYSLHWPEGLKGEEIKKCGREGITLNKYNQQYHKLFKDVPLEEVVLKVCSCALQRDFLLQGRLYISPNWLCFHASLFGKDIKVVIPVVSVQMIKKHKMARLLPNGLAITTNTSQK

SEQ ID NO: 15737 - protein, 164 aa, Artificial Sequence
  Synthetic polypeptide
ASNQQMHRKTASLNSPVSCKEKPDRVEEPPDYSLHWPEGLKGEEIKKCGREGITLNKYNQQYHKLFKDVPLEEVVLKVCSCALQRDFLLQGRLYISPNWLCFHASLFGKDIKVVIPVVSVQMIKKHKMARLLPNGLAITTNTSQKYIFVSLLSRDSVYDLLRRV

SEQ ID NO: 15738 - protein, 209 aa, Artificial Sequence
  Synthetic polypeptide
ASNQQMHRKTASLNSPVSCKEKPDRVEEPPDYSLHWPEGLKGEEIKKCGREGITLNKYNQQYHKLFKDVPLEEVVLKVCSCALQRDFLLQGRLYISPNWLCFHASLFGKDIKVVIPVVSVQMIKKHKMARLLPNGLAITTNTSQKYIFVSLLSRDSVYDLLRRVCTHLQPSSKKSLSVREFSGEPESLEVLIPEMKWRKVCPSSRSLSL

SEQ ID NO: 15739 - protein, 342 aa, Artificial Sequence
  Synthetic polypeptide
ASNQQMHRKTASLNSPVSCKEKPDRVEEPPDYSLHWPEGLKGEEIKKCGREGITLNKYNQQYHKLFKDVPLEEVVLKVCSCALQRDFLLQGRLYISPNWLCFHASLFGKDIKVVIPVVSVQMIKKHKMARLLPNGLAITTNTSQKYIFVSLLSRDSVYDLLRRVCTHLQPSSKKSLSVREFSGEPESLEVLIPEMKWRKVCPSSRSLSLPDNIPCIPPSSVDSTDSFFPSRKPPMSEKSRAQVASENGGRWAWPMPGWGPACPKKMPNCSPTAKNAVYEEDELEEEPRSTGELRLWDYRLLKVFFVLICFLVMSSSYLAFRISRLEQQLCSLSWDDPVPGHR

SEQ ID NO: 15740 - protein, 26 aa, Artificial Sequence
  Synthetic polypeptide
GQQPTNAQKDSFSEQSCVLQRETRQS

SEQ ID NO: 15741 - protein, 12 aa, Artificial Sequence
  Synthetic polypeptide
PATNKCTERQLL

SEQ ID NO: 15742 - protein, 49 aa, Artificial Sequence
  Synthetic polypeptide
ASGCSCFAATWDKSLPLSGPALHHKQPTNAQKDSFSEQSCVLQRETRQS

SEQ ID NO: 15743 - protein, 11 aa, Artificial Sequence
  Synthetic polypeptide
ATNKCTERQLL

SEQ ID NO: 15744 - protein, 77 aa, Artificial Sequence
  Synthetic polypeptide
ESEVSSKPQAVPVLLRLGTSHFRFLGLLYTISNQQMHRKTASLNSPVSCKEKPDRVEEPPDYSAIPLSQCGSLSQVR

SEQ ID NO: 15745 - protein, 175 aa, Artificial Sequence
  Synthetic polypeptide
ESEVSSKPQAVPVLLRLGTSHFRFLGLLYTISNQQMHRKTASLNSPVSCKEKPDRVEEPPDYSLHWPEGLKGEEIKKCGREGITLNKYNQQYHKLFKDVPLEEVVLKVCSCALQRDFLLQGRLYISPNWLCFHASLFGKDIKVVIPVVSVQMIKKHKMARLLPNGLAITTNTSQK

SEQ ID NO: 15746 - protein, 194 aa, Artificial Sequence
  Synthetic polypeptide
ESEVSSKPQAVPVLLRLGTSHFRFLGLLYTISNQQMHRKTASLNSPVSCKEKPDRVEEPPDYSLHWPEGLKGEEIKKCGREGITLNKYNQQYHKLFKDVPLEEVVLKVCSCALQRDFLLQGRLYISPNWLCFHASLFGKDIKVVIPVVSVQMIKKHKMARLLPNGLAITTNTSQKYIFVSLLSRDSVYDLLRRV

SEQ ID NO: 15747 - protein, 239 aa, Artificial Sequence
  Synthetic polypeptide
ESEVSSKPQAVPVLLRLGTSHFRFLGLLYTISNQQMHRKTASLNSPVSCKEKPDRVEEPPDYSLHWPEGLKGEEIKKCGREGITLNKYNQQYHKLFKDVPLEEVVLKVCSCALQRDFLLQGRLYISPNWLCFHASLFGKDIKVVIPVVSVQMIKKHKMARLLPNGLAITTNTSQKYIFVSLLSRDSVYDLLRRVCTHLQPSSKKSLSVREFSGEPESLEVLIPEMKWRKVCPSSRSLSL

SEQ ID NO: 15748 - protein, 372 aa, Artificial Sequence
  Synthetic polypeptide
ESEVSSKPQAVPVLLRLGTSHFRFLGLLYTISNQQMHRKTASLNSPVSCKEKPDRVEEPPDYSLHWPEGLKGEEIKKCGREGITLNKYNQQYHKLFKDVPLEEVVLKVCSCALQRDFLLQGRLYISPNWLCFHASLFGKDIKVVIPVVSVQMIKKHKMARLLPNGLAITTNTSQKYIFVSLLSRDSVYDLLRRVCTHLQPSSKKSLSVREFSGEPESLEVLIPEMKWRKVCPSSRSLSLPDNIPCIPPSSVDSTDSFFPSRKPPMSEKSRAQVASENGGRWAWPMPGWGPACPKKMPNCSPTAKNAVYEEDELEEEPRSTGELRLWDYRLLKVFFVLICFLVMSSSYLAFRISRLEQQLCSLSWDDPVPGHR

SEQ ID NO: 15749 - protein, 55 aa, Artificial Sequence; identical to SEQ ID NO: 4902
  Synthetic polypeptide

SEQ ID NO: 15750 - protein, 250 aa, Artificial Sequence; identical to SEQ ID NO: 2654
  Synthetic polypeptide

SEQ ID NO: 15751 - protein, 84 aa, Artificial Sequence; identical to SEQ ID NO: 3863
  Synthetic polypeptide

SEQ ID NO: 15752 - protein, 76 aa, Artificial Sequence; identical to SEQ ID NO: 4053
  Synthetic polypeptide

SEQ ID NO: 15753 - protein, 71 aa, Artificial Sequence; identical to SEQ ID NO: 4168
  Synthetic polypeptide

SEQ ID NO: 15754 - protein, 207 aa, Artificial Sequence; identical to SEQ ID NO: 2844
  Synthetic polypeptide

SEQ ID NO: 15755 - protein, 597 aa, Artificial Sequence
  Synthetic polypeptide
LKNEGHVGQDRVDFGQTEPHTVLFHEPGSSSVWVGGRGKVYLFDFPEGKNASVRTDCENYITLLERRSEGLLACGTNARHPSCWNLVNGTVVPLGEMRGYAPFSPDENSLVLFEGDEVYSTIRKQEYNGKIPRFRRIRGESELYTSDTVMQNPQFIKATIVHQDQAYDDKIYYFFREDNPDKNPEAPLNVSRVAQLCRGDQGGESSLSVSKWNTFLKAMLVCSDAATNKNFNRLQDVFLLPDPSGQWRDTRVYGVFSNPWNYSAVCVYSLGDIDKVFRTSSLKGYHSSLPNPRPGKCLPDQQPIPTETFQVADRHPEVAQRVEPMGPLKTPLFHSKYHYQKVAVHRMQASHGETFHVLYLTTDRGTIHKVVEPGEQEHSFAFNIMEIQPFRRAAAIQTMSLDAERRKLYVSSQWEVSQVPLDLCEVYGGGCHGCLMSRDPYCGWDQGRCISIYSSERSVLQSINPAEPHKECPNPKPDKAPLQKVSLAPNSRYYLSCPMESRHATYSWRHKENVEQSCEPGHQSPNCILFIENLTAQQYGHYFCEAQEGSYFREAQHWQLLPEDGIMAEHLLGHACALAASLWLGVLPTLTLGLLVH

SEQ ID NO: 15756 - protein, 611 aa, Artificial Sequence
  Synthetic polypeptide
LKNEGHVGQDRVDFGQTEPHTVLFHEPGSSSVWVGGRGKVYLFDFPEGKNASVRTVNIGSTKGSCLDKRDCENYITLLERRSEGLLACGTNARHPSCWNLVNGTVVPLGEMRGYAPFSPDENSLVLFEGDEVYSTIRKQEYNGKIPRFRRIRGESELYTSDTVMQNPQFIKATIVHQDQAYDDKIYYFFREDNPDKNPEAPLNVSRVAQLCRGDQGGESSLSVSKWNTFLKAMLVCSDAATNKNFNRLQDVFLLPDPSGQWRDTRVYGVFSNPWNYSAVCVYSLGDIDKVFRTSSLKGYHSSLPNPRPGKCLPDQQPIPTETFQVADRHPEVAQRVEPMGPLKTPLFHSKYHYQKVAVHRMQASHGETFHVLYLTTDRGTIHKVVEPGEQEHSFAFNIMEIQPFRRAAAIQTMSLDAERRKLYVSSQWEVSQVPLDLCEVYGGGCHGCLMSRDPYCGWDQGRCISIYSSERSVLQSINPAEPHKECPNPKPDKAPLQKVSLAPNSRYYLSCPMESRHATYSWRHKENVEQSCEPGHQSPNCILFIENLTAQQYGHYFCEAQEGSYFREAQHWQLLPEDGIMAEHLLGHACALAASLWLGVLPTLTLGLLVH

SEQ ID NO: 15757 - protein, 5 aa, Artificial Sequence
  Synthetic polypeptide
RMKAM

SEQ ID NO: 15758 - protein, 13 aa, Artificial Sequence
  Synthetic polypeptide
RPCRAGPGGLWPD

SEQ ID NO: 15759 - protein, 37 aa, Artificial Sequence
  Synthetic polypeptide
SRHFGRLSQEDHLSEQRHAGREPGGLSRVADRRRGSH

SEQ ID NO: 15760 - protein, 63 aa, Artificial Sequence
  Synthetic polypeptide
SRHFGRLSQEDHLSEQRHAGREPGGLSRVADRRRGSHQLWPRLSLAHPLHTLLLRLLVSAHLQ

SEQ ID NO: 15761 - protein, 66 aa, Artificial Sequence
  Synthetic polypeptide
SRHFGRLSQEDHLSEQRHAGREPGGLSRVADRRRGSHQLWPRLSLAHPLHTLLLRLLVSAHLQGLQ

SEQ ID NO: 15762 - protein, 67 aa, Artificial Sequence
  Synthetic polypeptide
SRHFGRLSQEDHLSEQRHAGREPGGLSRVADRRRGSHQLWPRLSLAHPLHTLLLRLLVSAHLQGLQD

SEQ ID NO: 15763 - protein, 24 aa, Artificial Sequence
  Synthetic polypeptide
VNSVTLAVNLVGCLAWLIGGGGAT

SEQ ID NO: 15764 - protein, 50 aa, Artificial Sequence
  Synthetic polypeptide
VNSVTLAVNLVGCLAWLIGGGGATNFGLAFLWLILFTPCSYVCWFRPIYK

SEQ ID NO: 15765 - protein, 53 aa, Artificial Sequence
  Synthetic polypeptide
VNSVTLAVNLVGCLAWLIGGGGATNFGLAFLWLILFTPCSYVCWFRPIYKAFK

SEQ ID NO: 15766 - protein, 71 aa, Artificial Sequence
  Synthetic polypeptide
VNSVTLAVNLVGCLAWLIGGGGATNFGLAFLWLILFTPCSYVCWFRPIYKAFKTDSSFSFMAFFFTFMAQL

SEQ ID NO: 15767 - protein, 78 aa, Artificial Sequence
  Synthetic polypeptide
VNSVTLAVNLVGCLAWLIGGGGATNFGLAFLWLILFTPCSYVCWFRPIYKAFKTDSSFSFMAFFFTFMAQLVISIIQA

SEQ ID NO: 15768 - protein, 103 aa, Artificial Sequence
  Synthetic polypeptide
VNSVTLAVNLVGCLAWLIGGGGATNFGLAFLWLILFTPCSYVCWFRPIYKAFKTDSSFSFMAFFFTFMAQLVISIIQAVGIPGWGVCGWIATISFFGTNIGSA

SEQ ID NO: 15769 - protein, 190 aa, Artificial Sequence
  Synthetic polypeptide
VNSVTLAVNLVGCLAWLIGGGGATNFGLAFLWLILFTPCSYVCWFRPIYKAFKTDSSFSFMAFFFTFMAQLVISIIQAVGIPGWGVCGWIATISFFGTNIGSAVVMLIPTVMFTVMAVFSFIALSMVHKFYRGSGGSFSKAQEEWTTGAWKNPHVQQAAQNAAMGAAQGAMNQPQTQYSATPNYTYSNEM

SEQ ID NO: 15770 - protein, 198 aa, Artificial Sequence
  Synthetic polypeptide
VNSVTLAVNLVGCLAWLIGGGGATNFGLAFLWLILFTPCSYVCWFRPIYKAFKTDSSFSFMAFFFTFMAQLVISIIQAVGIPGWGVCPTLASSCSGWIATISFFGTNIGSAVVMLIPTVMFTVMAVFSFIALSMVHKFYRGSGGSFSKAQEEWTTGAWKNPHVQQAAQNAAMGAAQGAMNQPQTQYSATPNYTYSNEM

SEQ ID NO: 15771 - protein, 6 aa, Artificial Sequence
  Synthetic polypeptide
KWLKWS

SEQ ID NO: 15772 - protein, 6 aa, Artificial Sequence
  Synthetic polypeptide
NGHEQH

SEQ ID NO: 15773 - protein, 17 aa, Artificial Sequence
  Synthetic polypeptide
YLMLLNLKMVKMVMNNT

SEQ ID NO: 15774 - protein, 35 aa, Artificial Sequence; identical to SEQ ID NO: 6118
  Synthetic polypeptide

SEQ ID NO: 15775 - protein, 40 aa, Artificial Sequence; identical to SEQ ID NO: 5775
  Synthetic polypeptide

SEQ ID NO: 15776 - protein, 47 aa, Artificial Sequence; identical to SEQ ID NO: 5322
  Synthetic polypeptide

SEQ ID NO: 15777 - protein, 23 aa, Artificial Sequence
  Synthetic polypeptide
LHYCTPAWATFREPVQSSMISTW

SEQ ID NO: 15778 - protein, 27 aa, Artificial Sequence
  Synthetic polypeptide
AMTALLHSCLGKATFREPVQSSMISTW

SEQ ID NO: 15779 - protein, 63 aa, Artificial Sequence
  Synthetic polypeptide
HMHVVLAAWEAEMGRSLEPRNERLQLSHDCTTALLPGKGHFQRASSVQYDINLVETSSTSAHH

SEQ ID NO: 15780 - protein, 68 aa, Artificial Sequence
  Synthetic polypeptide
HMHVVLAAWEAEMGRSLEPRNERLQLSHDCTTALLPGKGHFQRASSVQYDINLVETSSTSAHHSHEQH

SEQ ID NO: 15781 - protein, 20 aa, Artificial Sequence
  Synthetic polypeptide
LHYCTPAWERPLSESQFSPV

SEQ ID NO: 15782 - protein, 3 aa, Artificial Sequence
  Synthetic polypeptide
EVR

SEQ ID NO: 15783 - protein, 39 aa, Artificial Sequence
  Synthetic polypeptide
IVRGALKTIQELVVKRFFSQAPASKLKVTCLKLLWHWRS

SEQ ID NO: 15784 - protein, 89 aa, Artificial Sequence
  Synthetic polypeptide
NSSSFSSSSVYTKMKMTTMKTFMMIYFHLMNSKRCVENYTGARCEEVFLPGSSIQTKSNLFEAFVALAVLVTLIIGAFYFLCRCGNTCM

SEQ ID NO: 15785 - protein, 109 aa, Artificial Sequence
  Synthetic polypeptide
NSSSFSSSSVYTKMKMTTMKTFMMIYFHLMNSKRCVENYTGARCEEVFLPGSSIQTKSNLFEAFVALAVLVTLIIGAFYFLCRKGHFQRASSVQYDINLVETSSTSAHH

SEQ ID NO: 15786 - protein, 114 aa, Artificial Sequence
  Synthetic polypeptide
NSSSFSSSSVYTKMKMTTMKTFMMIYFHLMNSKRCVENYTGARCEEVFLPGSSIQTKSNLFEAFVALAVLVTLIIGAFYFLCRKGHFQRASSVQYDINLVETSSTSAHHSHEQH

SEQ ID NO: 15787 - protein, 7 aa, Artificial Sequence
  Synthetic polypeptide
DQGRCGL

SEQ ID NO: 15788 - protein, 71 aa, Artificial Sequence
  Synthetic polypeptide
GAVAHTCNPSTLGAQGGRIMRSRTLWAITLWATASSRKMGRRNATLLTTVLASLSSLEPSSPRTVTARCAR

SEQ ID NO: 15789 - protein, 775 aa, Artificial Sequence
  Synthetic polypeptide
SQHFGSPRRADHEIKDVVGYNSLGHCFFTEDGPEERNTFDHCLGLLVKSGTLLPSDRDSKMCKMITEDSYPGYIPKPRQDCNAVSTFWMANPNNNLINCAAAGSEETGFWFIFHHVPTGPSVGMYSPGYSEHIPLGKFYNNRAHSNYRAGMIIDNGVKTTEASAKDKRPFLSIISARYSPHQDADPLKPREPAIIRHFIAYKNQDHGAWLRGGDVWLDSCRFADNGIGLTLASGGTFPYDDGSKQEIKNSLFVGESGNVGTEMMDNRIWGPGGLDHSGRTLPIGQNFPIRGIQLYDGPINIQNCTFRKFVALEGRHTSALAFRLNNAWQSCPHNNVTGIAFEDVPITSRVFFGEPGPWFNQLDMDGDKTSVFHDVDGSVSEYPGSYLTKNDNWLVRHPDCINVPDWRGAICSGCYAQMYIQAYKTSNLRMKIIKNDFPSHPLYLEGALTRSTHYQQYQPVVTLQKGYTIHWDQTAPAELAIWLINFNKGDWIRVGLCYPRGTTFSILSDVHNRLLKQTSKTGVFVRTLQMDKVEQSYPGRSHYYWDEDSGLLFLKLKAQNEREKFAFCSMKGCERIKIKALIPKNAGVSDCTATAYPKFTERAVVDVPMPKKLFGSQLKTKDHFLEVKMESSKQHFFHLWNDFAYIEVDGKKYPSSEDGIQVVVIDGNQGRVVSHTSFRNSILQGIPWQLFNYVATIPDNSIVLMASKGRYVSRGPWTRVLEKLGADRGLKLKEQMAFVGFKGSFRPIWVTLDTEDHKAKIFQVVPIPVVKKKKL

SEQ ID NO: 15790 - protein, 28 aa, Artificial Sequence
  Synthetic polypeptide
DCCSFKVESEPSRMRTAHLHHPSACLPD

SEQ ID NO: 15791 - protein, 55 aa, Artificial Sequence
  Synthetic polypeptide
QNENSPSSPPERMSSRLTPTPRRTGCLRASRRSPFPTSMMSQGTAIGSSVWTEPR

SEQ ID NO: 15792 - protein, 206 aa, Artificial Sequence
  Synthetic polypeptide
GQEFKTSLGNMEKPCLYKNTKISQIDATSLIAASVMAAPCALALSKLVYPEVEESKFRREEGVKLTYGDAQNLIEAASTGAAISVKVVANIAANLIAFLAVLDFINAALSWLGDMVDIQGLSFQLICSYILRPVAFLMGVAWEDCPVVAELLGIKLFLNEFVAYQDLSKYKQRRLAGAEEWVGDRKQWISRRGLAMLTRLVLNSWP

SEQ ID NO: 15793 - protein, 299 aa, Artificial Sequence
  Synthetic polypeptide
GQEFKTSLGNMEKPCLYKNTKISQIDATSLIAASVMAAPCALALSKLVYPEVEESKFRREEGVKLTYGDAQNLIEAASTGAAISVKVVANIAANLIAFLAVLDFINAALSWLGDMVDIQGLSFQLICSYILRPVAFLMGVAWEDCPVVAELLGIKLFLNEFVAYQDLSKYKQRRLAGAEEWVGDRKQWISVRAEVLTTFALCGFANFSSIGIMLGGLTSMVPQRKSDFSQIVLRALFTGACVSLVNACMAGILYMPRGAEVDCMSLLNTTLSSSSFEIYQCCREAFQRIFKSTPAESQP

SEQ ID NO: 15794 - protein, 312 aa, Artificial Sequence
  Synthetic polypeptide
GQEFKTSLGNMEKPCLYKNTKISQIDATSLIAASVMAAPCALALSKLVYPEVEESKFRREEGVKLTYGDAQNLIEAASTGAAISVKVVANIAANLIAFLAVLDFINAALSWLGDMVDIQGLSFQLICSYILRPVAFLMGVAWEDCPVVAELLGIKLFLNEFVAYQDLSKYKQRRLAGAEEWVGDRKQWISVRAEVLTTFALCGFANFSSIGIMLGGLTSMVPQRKSDFSQIVLRALFTGACVSLVNACMAGILYMPRGAEVDCMSLLNTTLSSSSFEIYQCCREAFQSVNPEFSPEALDNCCRFYNHTICAQ

SEQ ID NO: 15795 - protein, 52 aa, Artificial Sequence
  Synthetic polypeptide
GRARWLTPVIPALWEAEAGGSPEVRSSRPAWATWRNPVSTKIQKLARSMPPR

SEQ ID NO: 15796 - protein, 34 aa, Artificial Sequence
  Synthetic polypeptide
PDRCHLVDCSLCDGCPLCLGPLQAGLPGGGGVQV

SEQ ID NO: 15797 - protein, 55 aa, Artificial Sequence
  Synthetic polypeptide
DLCFQLPTRCHCLDVPLTFQAEHVSTVNCSSSPAFVDGSMPRGRSASHHRTGGGA

SEQ ID NO: 15798 - protein, 1613 aa, Artificial Sequence
  Synthetic polypeptide
IAHPLRLLWMEACLGEDLPPTTELEEGLRNGVYLAKLGNFFSPKVVSLKKIYDREQTRYKATGLHFRHTDNVIQWLNAMDEIGLPKIFYPETTDIYDRKNMPRCIYCIHALSLYLFKLGLAPQIQDLYGKVDFTEEEINNMKTELEKYGIQMPAFSKIGGILANELSVDEAALHAAVIAINEAIDRRIPADTFAALKNPNAMLVNLEEPLASTYQDILYQAKQDKMTNAKNRTENSERERDVYEELLTQAEIQGNINKVNTFSALANIDLALEQGDALALFRALQSPALGLRGLQQQNSDWYLKQLLSDKQQKRQSGQTDPLQKEELQSGVDAANSAAQQYQRRLAAVALINAAIQKGVAEKTVLELMNPEAQLPQVYPFAADLYQKELATLQRQSPEHNLTHPELSVAVEMLSSVALINRALESGDVNTVWKQLSSSVTGLTNIEEENCQRYLDELMKLKAQAHAENNEFITWNDIQACVDHVNLVVQEEHERILAIGLINEALDEGDAQKTLQALQIPAAKLEGVLAEVAQHYQDTLIRAKREKAQEIQDESAVLWLDEIQGGIWQSNKDTQEAQKFALGIFAINEAVESGDVGKTLSALRSPDVGLYGVIPECGETYHSDLAEAKKKKLAVGDNNSKWVKHWVKGGYYYYHNLETQEGGWDEPPNFVQNSMQLSREEIQSSISGVTAAYNREQLWLANEGLITRLQARCRGYLVRQEFRSRMNFLKKQIPAITCIQSQWRGYKQKKAYQDRLAYLRSHKDEVVKIQSLARMHQARKRYRDRLQYFRDHINDIIKIQAFIRANKARDDYKTLINAEDPPMVVVRKFVHLLDQSDQDFQEELDLMKMREEVITLIRSNQQLENDLNLMDIKIGLLVKNKITLQDVVSHSKKLTKKNKEQLSDMMMINKQKGGLKALSKEKREKLEAYQHLFYLLQTNPTYLAKLIFQMPQNKSTKFMDSVIFTLYNYASNQREEYLLLRLFKTALQEEIKSKVDQIQEIVTGNPTVIKMVVSFNRGARGQNALRQILAPVVKEIMDDKSLNIKTDPVDIYKSWVNQMESQTGEASKLPYDVTPEQALAHEEVKTRLDSSIRNMRAVTDKFLSAIVSSVDKIPYGMRFIAKVLKDSLHEKFPDAGEDELLKIIGNLLYYRYMNPAIVAPDAFDIIDLSAGGQLTTDQRRNLGSIAKMLQHAASNKMFLGDNAHLSIINEYLSQSYQKFRRFFQTACDVPELQDKFNVDEYSDLVTLTKPVIYISIGEIINTHTLLLDHQDAIAPEHNDPIHELLDDLGEVPTIESLIGESSGNLNDPNKEALAKTEVSLTLTNKFDVPGDENAEMDARTILLNTKRLIVDVIRFQPGETLTEILETPATSEQEAEHQRAMQRRAIRDAKTPDKMKKSKSVKEDSNLTLQEKKEKIQTGLKKLTELGTVDPKNKYQELINDIARDIRNQRRYRQRRKAELVKLQQTYAALNSKATFYGEQVDYYKSYIKTCLDNLASKGKVSKKPREMKGKKSKKISLKYTAARLHEKGVLLEIEDLQVNQFKNVIFEISPTEEVGDFEVKAKFMGVQMETFMLHYQDLLQLQYEGVAVMKLFDRAKVNVNLLIFLLNKKFYGK

SEQ ID NO: 15799 - protein, 19 aa, Artificial Sequence
  Synthetic polypeptide
TCFNRELLILSGFCGWKHA

SEQ ID NO: 15800 - protein, 15 aa, Artificial Sequence
  Synthetic polypeptide
GQKFETSLANMHFLH

SEQ ID NO: 15801 - protein, 40 aa, Artificial Sequence
  Synthetic polypeptide
PICIFCISKYRPGFRTRRCTGLVQGSAVTSPGASRTAATE

SEQ ID NO: 15802 - protein, 1377 aa, Artificial Sequence
  Synthetic polypeptide
SQDFGRLRRVDHLRSEVRDQPSQYAFSALANIDLALEQGDALALFRALQSPALGLRGLQQQNSDWYLKQLLSDKQQKRQSGQTDPLQKEELQSGVDAANSAAQQYQRRLAAVALINAAIQKGVAEKTVLELMNPEAQLPQVYPFAADLYQKELATLQRQSPEHNLTHPELSVAVEMLSSVALINRALESGDVNTVWKQLSSSVTGLTNIEEENCQRYLDELMKLKAQAHAENNEFITWNDIQACVDHVNLVVQEEHERILAIGLINEALDEGDAQKTLQALQIPAAKLEGVLAEVAQHYQDTLIRAKREKAQEIQDESAVLWLDEIQGGIWQSNKDTQEAQKFALGIFAINEAVESGDVGKTLSALRSPDVGLYGVIPECGETYHSDLAEAKKKKLAVGDNNSKWVKHWVKGGYYYYHNLETQEGGWDEPPNFVQNSMQLSREEIQSSISGVTAAYNREQLWLANEGLITRLQARCRGYLVRQEFRSRMNFLKKQIPAITCIQSQWRGYKQKKAYQDRLAYLRSHKDEVVKIQSLARMHQARKRYRDRLQYFRDHINDIIKIQAFIRANKARDDYKTLINAEDPPMVVVRKFVHLLDQSDQDFQEELDLMKMREEVITLIRSNQQLENDLNLMDIKIGLLVKNKITLQDVVSHSKKLTKKNKEQLSDMMMINKQKGGLKALSKEKREKLEAYQHLFYLLQTNPTYLAKLIFQMPQNKSTKFMDSVIFTLYNYASNQREEYLLLRLFKTALQEEIKSKVDQIQEIVTGNPTVIKMVVSFNRGARGQNALRQILAPVVKEIMDDKSLNIKTDPVDIYKSWVNQMESQTGEASKLPYDVTPEQALAHEEVKTRLDSSIRNMRAVTDKFLSAIVSSVDKIPYGMRFIAKVLKDSLHEKFPDAGEDELLKIIGNLLYYRYMNPAIVAPDAFDIIDLSAGGQLTTDQRRNLGSIAKMLQHAASNKMFLGDNAHLSIINEYLSQSYQKFRRFFQTACDVPELQDKFNVDEYSDLVTLTKPVIYISIGEIINTHTLLLDHQDAIAPEHNDPIHELLDDLGEVPTIESLIGESSGNLNDPNKEALAKTEVSLTLTNKFDVPGDENAEMDARTILLNTKRLIVDVIRFQPGETLTEILETPATSEQEAEHQRAMQRRAIRDAKTPDKMKKSKSVKEDSNLTLQEKKEKIQTGLKKLTELGTVDPKNKYQELINDIARDIRNQRRYRQRRKAELVKLQQTYAALNSKATFYGEQVDYYKSYIKTCLDNLASKGKVSKKPREMKGKKSKKISLKYTAARLHEKGVLLEIEDLQVNQFKNVIFEISPTEEVGDFEVKAKFMGVQMETFMLHYQDLLQLQYEGVAVMKLFDRAKVNVNLLIFLLNKKFYGK

SEQ ID NO: 15803 - protein, 7 aa, Artificial Sequence
  Synthetic polypeptide
PAMQTAL

SEQ ID NO: 15804 - protein, 550 aa, Artificial Sequence
  Synthetic polypeptide
QPCKLPYDVTPEQALAHEEVKTRLDSSIRNMRAVTDKFLSAIVSSVDKIPYGMRFIAKVLKDSLHEKFPDAGEDELLKIIGNLLYYRYMNPAIVAPDAFDIIDLSAGGQLTTDQRRNLGSIAKMLQHAASNKMFLGDNAHLSIINEYLSQSYQKFRRFFQTACDVPELQDKFNVDEYSDLVTLTKPVIYISIGEIINTHTLLLDHQDAIAPEHNDPIHELLDDLGEVPTIESLIGESSGNLNDPNKEALAKTEVSLTLTNKFDVPGDENAEMDARTILLNTKRLIVDVIRFQPGETLTEILETPATSEQEAEHQRAMQRRAIRDAKTPDKMKKSKSVKEDSNLTLQEKKEKIQTGLKKLTELGTVDPKNKYQELINDIARDIRNQRRYRQRRKAELVKLQQTYAALNSKATFYGEQVDYYKSYIKTCLDNLASKGKVSKKPREMKGKKSKKISLKYTAARLHEKGVLLEIEDLQVNQFKNVIFEISPTEEVGDFEVKAKFMGVQMETFMLHYQDLLQLQYEGVAVMKLFDRAKVNVNLLIFLLNKKFYGK

SEQ ID NO: 15805 - protein, 8 aa, Artificial Sequence
  Synthetic polypeptide
SHANCPMM

SEQ ID NO: 15806 - protein, 6 aa, Artificial Sequence
  Synthetic polypeptide
ANCPMM

SEQ ID NO: 15807 - protein, 16 aa, Artificial Sequence
  Synthetic polypeptide
LTTVIPALWEAEQTAL

SEQ ID NO: 15808 - protein, 555 aa, Artificial Sequence
  Synthetic polypeptide
SQLFGRLSKLPYDVTPEQALAHEEVKTRLDSSIRNMRAVTDKFLSAIVSSVDKIPYGMRFIAKVLKDSLHEKFPDAGEDELLKIIGNLLYYRYMNPAIVAPDAFDIIDLSAGGQLTTDQRRNLGSIAKMLQHAASNKMFLGDNAHLSIINEYLSQSYQKFRRFFQTACDVPELQDKFNVDEYSDLVTLTKPVIYISIGEIINTHTLLLDHQDAIAPEHNDPIHELLDDLGEVPTIESLIGESSGNLNDPNKEALAKTEVSLTLTNKFDVPGDENAEMDARTILLNTKRLIVDVIRFQPGETLTEILETPATSEQEAEHQRAMQRRAIRDAKTPDKMKKSKSVKEDSNLTLQEKKEKIQTGLKKLTELGTVDPKNKYQELINDIARDIRNQRRYRQRRKAELVKLQQTYAALNSKATFYGEQVDYYKSYIKTCLDNLASKGKVSKKPREMKGKKSKKISLKYTAARLHEKGVLLEIEDLQVNQFKNVIFEISPTEEVGDFEVKAKFMGVQMETFMLHYQDLLQLQYEGVAVMKLFDRAKVNVNLLIFLLNKKFYGK

SEQ ID NO: 15809 - protein, 150 aa, Artificial Sequence; identical to SEQ ID NO: 3120
  Synthetic polypeptide

SEQ ID NO: 15810 - protein, 672 aa, Artificial Sequence; identical to SEQ ID NO: 1803
  Synthetic polypeptide

SEQ ID NO: 15811 - protein, 654 aa, Artificial Sequence; identical to SEQ ID NO: 1837
  Synthetic polypeptide

SEQ ID NO: 15812 - protein, 8 aa, Artificial Sequence
  Synthetic polypeptide
GLPSHVEL

SEQ ID NO: 15813 - protein, 59 aa, Artificial Sequence; identical to SEQ ID NO: 4745
  Synthetic polypeptide

SEQ ID NO: 15814 - protein, 8 aa, Artificial Sequence
  Synthetic polypeptide
GLPSHVEL

SEQ ID NO: 15815 - protein, 45 aa, Artificial Sequence
  Synthetic polypeptide
RANLLCTLSCLLPCKTCLCFSATFHHDCEASPAMWNCERPDHPGA

SEQ ID NO: 15816 - protein, 168 aa, Artificial Sequence
  Synthetic polypeptide
WFYKGQIFCAHCLACCHVRHAFASLPPSTMIVRPPQPCGTVSVLTTLERRFNLQSADVGVIASSFEIGNLALILFVSYFGARGHRPRLIGCGGIVMALGALLSALPEFLTHQYKYEAGEIRWGAEGRDVCAANGSGGDEGPDPDLICRNRTATNMMYLLLIGAQVLLG

SEQ ID NO: 15817 - protein, 690 aa, Artificial Sequence
  Synthetic polypeptide
WFYKGQIFCAHCLACCHVRHAFASLPPSTMIVRPPQPCGTVSVLTTLERRFNLQSADVGVIASSFEIGNLALILFVSYFGARGHRPRLIGCGGIVMALGALLSALPEFLTHQYKYEAGEIRWGAEGRDVCAANGSGGDEGPDPDLICRNRTATNMMYLLLIGAQVLLGIGATPVQPLGVSYIDDHVRRKDSSLYIGILFTMLVFGPACGFILGSFCTKIYVDAVFIDTSNLDITPDDPRWIGAWWGGFLLCGALLFFSSLLMFGFPQSLPPHSEPAMESEQAMLSEREYERPKPSNGVLRHPLEPDSSASCFQQLRVIPKVTKHLLSNPVFTCIILAACMEIAVVAGFAAFLGKYLEQQFNLTTSSANQLLGMTAIPCACLGIFLGGLLVKKLSLSALGAIRMAMLVNLVSTACYVSFLFLGCDTGPVAGVTVPYGNSTAPGSALDPYSPCNNNCECQTDSFTPVCGADGITYLSACFAGCNSTNLTGCACLTTVPAENATVVPGKCPSPGCQEAFLTFLCVMCICSLIGAMAQTPSVIILIRTVSPELKSYALGVLFLLLRLLGFIPPPLIFGAGIDSTCLFWSTFCGEQGACVLYDNVVYRYLYVSIAIALKSFAFILYTTTWQCLRKNYKRYIKNHEGGLSTSEFFASTLTLDNLGRDPVPANQTHRTKFIYNLEDHEWCENMESVL

SEQ ID NO: 15818 - protein, 672 aa, Artificial Sequence
  Synthetic polypeptide
WFYKGQIFCAHCLACCHVRHAFASLPPSTMIVRPPQPCGTVSVLTTLERRFNLQSADVGVIASSFEIGNLALILFVSYFGARGHRPRLIGCGGIVMALGALLSALPEFLTHQYKYEAGEIRWGAEGRDVCAANGSGGDEGPDPDLICRNRTATNMMYLLLIGAQVLLGIGATPVQPLGVSYIDDHVRRKDSSLYIGILFTMLVFGPACGFILGSFCTKIYVDAVFIDTSNLDITPDDPRWIGAWWGGFLLCGALLFFSSLLMFGFPQSLPPHSEPAMESEQAMLSEREYERPKPSNGVLRHPLEPDSSASCFQQLRVIPKVTKHLLSNPVFTCIILAACMEIAVVAGFAAFLGKYLEQQFNLTTSSANQLLGMTAIPCACLGIFLGGLLVKKLSLSALGAIRMAMLVNLVSTACYVSFLFLGCDTGPVAGVTVPYGNSTAPGSALDPYSPCNNNCECQTDSFTPVCGADGITYLSACFAGCNSTNLTGCACLTTVPAENATVVPGKCPSPGCQEAFLTFLCVMCICSLIGAMAQTPSVIILIRTVSPELKSYALGVLFLLLRLLGFIPPPLIFGAGIDSTCLFWSTFCGEQGACVLYDNVVYRYLYVSIAIALKSFAFILYTTTWQCLRKNYKRYIKNHEGGLSTSTEYQDIETEKTCPESHSPSEDSFVRS

SEQ ID NO: 15819 - protein, 56 aa, Artificial Sequence; identical to SEQ ID NO: 4862
  Synthetic polypeptide

SEQ ID NO: 15820 - protein, 74 aa, Artificial Sequence; identical to SEQ ID NO: 4088
  Synthetic polypeptide

SEQ ID NO: 15821 - protein, 520 aa, Artificial Sequence; identical to SEQ ID NO: 1992
  Synthetic polypeptide

SEQ ID NO: 15822 - protein, 502 aa, Artificial Sequence; identical to SEQ ID NO: 2030
  Synthetic polypeptide

SEQ ID NO: 15823 - protein, 20 aa, Artificial Sequence
  Synthetic polypeptide
HLDCTFGRGSEAENPGRERG

SEQ ID NO: 15824 - protein, 47 aa, Artificial Sequence
  Synthetic polypeptide
LSLEADPSPVEPSEETPAPADTLIAPLGEALKQRTQVGKEVKEDTQV

SEQ ID NO: 15825 - protein, 49 aa, Artificial Sequence
  Synthetic polypeptide
SREPRSGKRLKKTRKYDIITTPAERVEMAPLNEEDDEDEDSTVFDIKYR

SEQ ID NO: 15826 - protein, 29 aa, Artificial Sequence
  Synthetic polypeptide
HQLDSLCPLLSCSTWGSWVGKEVKEDTQV

SEQ ID NO: 15827 - protein, 26 aa, Artificial Sequence
  Synthetic polypeptide
PSVTPAGLIVSIALLQHLGLMGRERG

SEQ ID NO: 15828 - protein, 67 aa, Artificial Sequence
  Synthetic polypeptide
VTKCDTSWTHCVHCSLAAPGAHGSGKRLKKTRKYDIITTPAERVEMAPLNEEDDEDEDSTVFDIKYR

SEQ ID NO: 15829 - protein, 63 aa, Artificial Sequence
  Synthetic polypeptide
GQPGQPGETLSLLKIQKISWAWWHRCDQFSERNECDSLDLFGTELNNFFGSFRANVFAKEDKL

SEQ ID NO: 15830 - protein, 109 aa, Artificial Sequence
  Synthetic polypeptide
KYKKLAGHGGTGVTNSVKGTNAILWTCLGLSLIISLAVFVLMFLLRKINSEPLKDEFKNTEMESRSVAQAGVQWRDLNSLQPLPLGFKQFSHLSLLSNWDYRIRSPGHG

SEQ ID NO: 15831 - protein, 152 aa, Artificial Sequence
  Synthetic polypeptide
KYKKLAGHGGTGVTNSVKGTNAILWTCLGLSLIISLAVFVLMFLLRKINSEPLKDEFKNTGSGLLGMANIDLEKSRTGDEIILPRGLEYTVEECTCEDCIKSKPKVDSDHCFPLPAMEEGATILVTTKTNDYCKSLPAALSATEIEKSISAR

SEQ ID NO: 15832 - protein, 7 aa, Artificial Sequence
  Synthetic polypeptide
LGMVAQV

SEQ ID NO: 15833 - protein, 26 aa, Artificial Sequence
  Synthetic polypeptide
ANVGGLLEPRSLNAAWATQIRSPGHG

SEQ ID NO: 15834 - protein, 19 aa, Artificial Sequence
  Synthetic polypeptide
AQEFECSLGNTDQVSWAWL

SEQ ID NO: 15835 - protein, 90 aa, Artificial Sequence
  Synthetic polypeptide
AQEFECSLGNTDQVSWAWLTLTWKRAGLVMKLFFREASSTRWKNAPVKTASRANRRSTLTIAFHSQLWRKAQPFLSPRKRMTIARACQLL

SEQ ID NO: 15836 - protein, 14 aa, Artificial Sequence
  Synthetic polypeptide
MQPGQHRSGLLGMA

SEQ ID NO: 15837 - protein, 98 aa, Artificial Sequence
  Synthetic polypeptide
MQPGQHRSGLLGMANIDLEKSRTGDEIILPRGLEYTVEECTCEDCIKSKPKVDSDHCFPLPAMEEGATILVTTKTNDYCKSLPAALSATEIEKSISAR

SEQ ID NO: 15838 - protein, 113 aa, Artificial Sequence; identical to SEQ ID NO: 3448
  Synthetic polypeptide

SEQ ID NO: 15839 - protein, 1573 aa, Artificial Sequence; identical to SEQ ID NO: 1452
  Synthetic polypeptide

SEQ ID NO: 15840 - protein, 1498 aa, Artificial Sequence; identical to SEQ ID NO: 1460
  Synthetic polypeptide

SEQ ID NO: 15841 - protein, 1563 aa, Artificial Sequence; identical to SEQ ID NO: 1453
  Synthetic polypeptide

SEQ ID NO: 15842 - protein, 1507 aa, Artificial Sequence; identical to SEQ ID NO: 1458
  Synthetic polypeptide

SEQ ID NO: 15843 - protein, 1504 aa, Artificial Sequence; identical to SEQ ID NO: 1459
  Synthetic polypeptide

SEQ ID NO: 15844 - protein, 1448 aa, Artificial Sequence; identical to SEQ ID NO: 1465
  Synthetic polypeptide

SEQ ID NO: 15845 - protein, 51 aa, Artificial Sequence
  Synthetic polypeptide
WTGMSRGIPATPTSPSAFRTRSSCGCLVFTSGPVSPSTSSISPDMTEATFR

SEQ ID NO: 15846 - protein, 54 aa, Artificial Sequence; identical to SEQ ID NO: 4981
  Synthetic polypeptide

SEQ ID NO: 15847 - protein, 946 aa, Artificial Sequence; identical to SEQ ID NO: 1566
  Synthetic polypeptide

SEQ ID NO: 15848 - protein, 871 aa, Artificial Sequence; identical to SEQ ID NO: 1604
  Synthetic polypeptide

SEQ ID NO: 15849 - protein, 936 aa, Artificial Sequence; identical to SEQ ID NO: 1578
  Synthetic polypeptide

SEQ ID NO: 15850 - protein, 880 aa, Artificial Sequence; identical to SEQ ID NO: 1594
  Synthetic polypeptide

SEQ ID NO: 15851 - protein, 877 aa, Artificial Sequence; identical to SEQ ID NO: 1595
  Synthetic polypeptide

SEQ ID NO: 15852 - protein, 821 aa, Artificial Sequence; identical to SEQ ID NO: 1624
  Synthetic polypeptide

SEQ ID NO: 15853 - protein, 15 aa, Artificial Sequence
  Synthetic polypeptide
PGECLPQTPEDLSLP

SEQ ID NO: 15854 - protein, 38 aa, Artificial Sequence; identical to SEQ ID NO: 5950
  Synthetic polypeptide

SEQ ID NO: 15855 - protein, 52 aa, Artificial Sequence; identical to SEQ ID NO: 5084
  Synthetic polypeptide

SEQ ID NO: 15856 - protein, 85 aa, Artificial Sequence; identical to SEQ ID NO: 3853
  Synthetic polypeptide

SEQ ID NO: 15857 - protein, 59 aa, Artificial Sequence; identical to SEQ ID NO: 4764
  Synthetic polypeptide

SEQ ID NO: 15858 - protein, 886 aa, Artificial Sequence; identical to SEQ ID NO: 1592
  Synthetic polypeptide

SEQ ID NO: 15859 - protein, 811 aa, Artificial Sequence; identical to SEQ ID NO: 1631
  Synthetic polypeptide

SEQ ID NO: 15860 - protein, 876 aa, Artificial Sequence; identical to SEQ ID NO: 1596
  Synthetic polypeptide

SEQ ID NO: 15861 - protein, 820 aa, Artificial Sequence; identical to SEQ ID NO: 1627
  Synthetic polypeptide

SEQ ID NO: 15862 - protein, 817 aa, Artificial Sequence; identical to SEQ ID NO: 1628
  Synthetic polypeptide

SEQ ID NO: 15863 - protein, 761 aa, Artificial Sequence; identical to SEQ ID NO: 1669
  Synthetic polypeptide

SEQ ID NO: 15864 - protein, 342 aa, Artificial Sequence
  Synthetic polypeptide
GLNTDTHRWLAANVELLGNGLVFAAATCAVLSKAHLSAGLVGFSVSAALQVTQTLQWVVRNWTDLENSIVSVERMQDYAWTPKEAPWRLPTCAAQPPWPQGGQIEFRDFGLRYRPELPLAVQGVSFKIHAGEKVGIVGRTGAGKSSLASGLLRLQEAAEGGIWIDGVPIAHVGLHTLRSRISIIPQDPILFPGSLRMNLDLLQEHSDEAIWAALETVQLKALVASLPGQLQYKCADRGEDLSVGQKQLLCLARALLRKTQILILDEATAAVDPGTELQMQAMLGSWFAQCTVLLIAHRLRSVMDCARVLVMDKGQVAESGSPAQLLAQKGLFYRLAQESGLV

SEQ ID NO: 15865 - protein, 28 aa, Artificial Sequence
  Synthetic polypeptide
IQTLIGGLRPMWSSWGMAWCLQLPRVLC

SEQ ID NO: 15866 - protein, 36 aa, Artificial Sequence
  Synthetic polypeptide
DHATTAQPGSWLCPAAPERPVRWVMWSIWCPWTCSG

SEQ ID NO: 15867 - protein, 511 aa, Artificial Sequence
  Synthetic polypeptide
FQLLGKLTQENRLNPGGGGCSELRSRHYSAAWVLALSSGSRKASAVGDVVNLVSVDVQRLTESVLYLNGLWLPLVWIVVCFVYLWQLLGPSALTAIAVFLSLLPLNFFISKKRNHHQEEQMRQKDSRARLTSSILRNSKTIKFHGWEGAFLDRVLGIRGQELGALRTSGLLFSVSLVSFQVSTFLVALVVFAVHTLVAENAMNAEKAFVTLTVLNILNKAQAFLPFSIHSLVQARVSFDRLVTFLCLEEVDPGVVDSSSSGSAAGKDCITIHSATFAWSQESPPCLHRINLTVPQGCLLAVVGPVGAGKSSLLSALLGELSKVEGFVSIEGAVAYVPQEAWVQNTSVVENVCFGQELDPPWLERVLEACALQPDVDSFPEGIHTSIGEQGMNLSGGQKQRLSLARAVYRKAAVYLLDDPLAALDAHVGQHVFNQVIGPGGLLQGTKQNLGPAPRTPEAPLQAGGPSLDARGPSSQSLRRTVPLQKPRQRFLWMTLTGQDGQQERTASNTAG

SEQ ID NO: 15868 - protein, 1143 aa, Artificial Sequence
  Synthetic polypeptide
FQLLGKLTQENRLNPGGGGCSELRSRHYSAAWVLALSSGSRKASAVGDVVNLVSVDVQRLTESVLYLNGLWLPLVWIVVCFVYLWQLLGPSALTAIAVFLSLLPLNFFISKKRNHHQEEQMRQKDSRARLTSSILRNSKTIKFHGWEGAFLDRVLGIRGQELGALRTSGLLFSVSLVSFQVSTFLVALVVFAVHTLVAENAMNAEKAFVTLTVLNILNKAQAFLPFSIHSLVQARVSFDRLVTFLCLEEVDPGVVDSSSSGSAAGKDCITIHSATFAWSQESPPCLHRINLTVPQGCLLAVVGPVGAGKSSLLSALLGELSKVEGFVSIEGAVAYVPQEAWVQNTSVVENVCFGQELDPPWLERVLEACALQPDVDSFPEGIHTSIGEQGMNLSGGQKQRLSLARAVYRKAAVYLLDDPLAALDAHVGQHVFNQVIGPGGLLQGTTRILVTHALHILPQADWIIVLANGAIAEMGSYQELLQRKGALMCLLDQARQPGDRGEGETEPGTSTKDPRGTSAGRRPELRRERSIKSVPEKDRTTSEAQTEVPLDDPDRAGWPAGKDSIQYGRVKATVHLAYLRAVGTPLCLYALFLFLCQQVASFCRGYWLSLWADDPAVGGQQTQAALRGGIFGLLGCLQAIGLFASMAAVLLGGARASRLLFQRLLWDVVRSPISFFERTPIGHLLNRFSKETDTVDVDIPDKLRSLLMYAFGLLEVSLVVAVATPLATVAILPLFLLYAGFQSLYVVSSCQLRRLESASYSSVCSHMAETFQGSTVVRAFRTQAPFVAQNNARVDESQRISFPRLVADRWLAANVELLGNGLVFAAATCAVLSKAHLSAGLVGFSVSAALQVTQTLQWVVRNWTDLENSIVSVERMQDYAWTPKEAPWRLPTCAAQPPWPQGGQIEFRDFGLRYRPELPLAVQGVSFKIHAGEKVGIVGRTGAGKSSLASGLLRLQEAAEGGIWIDGVPIAHVGLHTLRSRISIIPQDPILFPGSLRMNLDLLQEHSDEAIWAALETVQLKALVASLPGQLQYKCADRGEDLSVGQKQLLCLARALLRKTQILILDEATAAVDPGTELQMQAMLGSWFAQCTVLLIAHRLRSVMDCARVLVMDKGQVAESGSPAQLLAQKGLFYRLAQESGLV

SEQ ID NO: 15869 - protein, 25 aa, Artificial Sequence
  Synthetic polypeptide
TEITPLQRSLGPGSVQRLQKGQCGG

SEQ ID NO: 15870 - protein, 106 aa, Artificial Sequence
  Synthetic polypeptide
GWAWWLTPVIPALWEDEAAETASLEEQLQGWGEVMLMADKVLRWERAWFPPAIMAPRIFGSNKWTTEQQQRFHEICSNLVKTRRRAVGWWKRLFTLKEEKPKMYFM

SEQ ID NO: 15871 - protein, 104 aa, Artificial Sequence
  Synthetic polypeptide
GWAWWLTPVIPALWEDEAAETASLEEQLQGWGEVMLMADKVLRWERAWFPPAIMGVVSLVFLIIYYLDPSVLSGVSCFVMFLCLADYLVPILAPRIFGSNKCTS

SEQ ID NO: 15872 - protein, 242 aa, Artificial Sequence
  Synthetic polypeptide
GWAWWLTPVIPALWEDEAAETASLEEQLQGWGEVMLMADKVLRWERAWFPPAIMGVVSLVFLIIYYLDPSVLSGVSCFVMFLCLADYLVPILAPRIFGSNKWTTEQQQRFHEICSNLVKTRRRAVGWWKRLFTLKEEKPKMYFMTMIVSLAAVAWVGQQVHNLLLTYLIATMVRMNVLADALKSINNAEKRGKRQVLIRPCSKVIVRFLTVMMKHGYIGEFEIIDDHRAGKIVVNLTGRLNK

SEQ ID NO: 15873 - protein, 208 aa, Artificial Sequence
  Synthetic polypeptide
GWAWWLTPVIPALWEDEAAETASLEEQLQGWGEVMLMADKVLRWERAWFPPAIMGVVSLVFLIIYYLDPSVLSGVSCFVMFLCLADYLVPILAPRIFGSNKWTTEQQQRFHEICSNLVKTRRRAVGWWKRLFTLKEEKPKMYFMTMIVSLAAVAWVGQQVHNLLLTYLIVTSLLLLPGLNQHGIILKYIGMAKREINKLLKQKEKKNE

SEQ ID NO: 15874 - protein, 93 aa, Artificial Sequence
  Synthetic polypeptide
GWAWWLTPVIPALWEDEAAETASLEEQLQGWGEVMLMADKVLRWERAWFPPAIMVTSLLLLPGLNQHGIILKYIGMAKREINKLLKQKEKKNE

SEQ ID NO: 15875 - protein, 37 aa, Artificial Sequence
  Synthetic polypeptide
MGLVAHTCNPSTLGRRGCRDCKSGRTAARMGRSDADG

SEQ ID NO: 15876 - protein, 24 aa, Artificial Sequence
  Synthetic polypeptide
SQHFGKTRLQRLQVWKNSCKDGEK

SEQ ID NO: 15877 - protein, 10 aa, Artificial Sequence
  Synthetic polypeptide
IPLWLLELEV

SEQ ID NO: 15878 - protein, 19 aa, Artificial Sequence
  Synthetic polypeptide
LGDMWTCVDTFVAARTGGL

SEQ ID NO: 15879 - protein, 123 aa, Artificial Sequence; identical to SEQ ID NO: 3342
  Synthetic polypeptide

SEQ ID NO: 15880 - protein, 4 aa, Artificial Sequence
  Synthetic polypeptide
NWRS

SEQ ID NO: 15881 - protein, 587 aa, Artificial Sequence
  Synthetic polypeptide
NWRSEELWPWMAHVLLPYVHGNQSSPELGPPRLRQVRLQEALYPDPPGPRVHTCSAAGGFSTSDYDVGWESPHNGSGTWAYSAPDLLGAWSWGSCAVYDSGGYVQELGLSLEESRDRLRFLQLHNWLDNRSRAVFLELTRYSPAVGLHAAVTLRLEFPAAGRALAALSVRPFALRRLSAGLSLPLLTSVCLLLFAVHFAVAEARTWHREGRWRVLRLGAWARWLLVALTAATALVRLAQLGAADRQWTRFVRGRPRRFTSFDQVAQLSSAARGLAASLLFLLLVKAAQQLRFVRQWSVFGKTLCRALPELLGVTLGLVVLGVAYAQLAILLVSSCVDSLWSVAQALLVLCPGTGLSTLCPAESWHLSPLLCVGLWALRLWGALRLGAVILRWRYHALRGELYRPAWEPQDYEMVELFLRRLRLWMGLSKVKEFRHKVRFEGMEPLPSRSSRGSKVSPDVPPPSAGSDASHPSTSSSQLDGLSVSLGRLGTRCEPEPSRLQAVFEALLTQFDRLNQATEDVYQLEQQLHSLQGRRSSRAPAGSSRGPSPGLRPALPSRLARASRGVDLATGPSRTPLRAKNKVHPSST

SEQ ID NO: 15882 - protein, 26 aa, Artificial Sequence
  Synthetic polypeptide
GPALLGRRQRRWRCRGWGSWGHPAQA

SEQ ID NO: 15883 - protein, 178 aa, Artificial Sequence
  Synthetic polypeptide
SQHFGRPRWADDLRSAVRDQPGQHGETPSLLKIQKISRACWQAPVVPVTRETEVQHSWGEDRDAGAAEAGGAGATQPRPELGTAPGSEAVQDRTGGGSAEAPAAGLVCLPGPRAQPAPGGCGCGCLRVGGCELPPGRECCVAPVQQRQLPGLIPRLGATEGLAGSPVLLTGGQAAAPG

SEQ ID NO: 15884 - protein, 811 aa, Artificial Sequence
  Synthetic polypeptide
SQLLGRLRSSTPGEKTETLALQRLGELGPPSPGLNWEQPQAARLSRTGLVEGLRKRLLPAWCASLAHGLSLLLVAVAVAVSGWVGASFPPGVSVAWLLSSSASFLASFLGWEPLKVLLEALYFSLVAKRLHPDEDDTLVESPAVTPVSARVPRVRPPHGFALFLAKEEARKVKRLHGMLRSLLVYMLFLLVTLLASYGDASCHGHAYRLQSAIKQELHSRAFLAITRSEELWPWMAHVLLPYVHGNQSSPELGPPRLRQVRLQEALYPDPPGPRVHTCSAAGGFSTSDYDVGWESPHNGSGTWAYSAPDLLGAWSWGSCAVYDSGGYVQELGLSLEESRDRLRFLQLHNWLDNRSRAVFLELTRYSPAVGLHAAVTLRLEFPAAGRALAALSVRPFALRRLSAGLSLPLLTSVCLLLFAVHFAVAEARTWHREGRWRVLRLGAWARWLLVALTAATALVRLAQLGAADRQWTRFVRGRPRRFTSFDQVAQLSSAARGLAASLLFLLLVKAAQQLRFVRQWSVFGKTLCRALPELLGVTLGLVVLGVAYAQLAILLVSSCVDSLWSVAQALLVLCPGTGLSTLCPAESWHLSPLLCVGLWALRLWGALRLGAVILRWRYHALRGELYRPAWEPQDYEMVELFLRRLRLWMGLSKVKEFRHKVRFEGMEPLPSRSSRGSKVSPDVPPPSAGSDASHPSTSSSQLDGLSVSLGRLGTRCEPEPSRLQAVFEALLTQFDRLNQATEDVYQLEQQLHSLQGRRSSRAPAGSSRGPSPGLRPALPSRLARASRGVDLATGPSRTPLRAKNKVHPSST

SEQ ID NO: 15885 - protein, 971 aa, Artificial Sequence; identical to SEQ ID NO: 1553
  Synthetic polypeptide

SEQ ID NO: 15886 - protein, 75 aa, Artificial Sequence; identical to SEQ ID NO: 4074
  Synthetic polypeptide

SEQ ID NO: 15887 - protein, 972 aa, Artificial Sequence; identical to SEQ ID NO: 1552
  Synthetic polypeptide

SEQ ID NO: 15888 - protein, 54 aa, Artificial Sequence; identical to SEQ ID NO: 4958
  Synthetic polypeptide

SEQ ID NO: 15889 - protein, 57 aa, Artificial Sequence; identical to SEQ ID NO: 4834
  Synthetic polypeptide

SEQ ID NO: 15890 - protein, 58 aa, Artificial Sequence; identical to SEQ ID NO: 4783
  Synthetic polypeptide

SEQ ID NO: 15891 - protein, 986 aa, Artificial Sequence
  Synthetic polypeptide
ADATDDCTAARQITQKKQARGCARFRNALQKKISVAGSPSPTPAGQQVLDIDSCLDSSVLDSSFLTFSGLHAEAFVGQMKSDLFLDDSKSLVCWPSGEGTLSWPDLLSDPSIVGSNLRQLARGQAGHGLGPEEDGFSLASPYSPAKSFSASDEDLIQQVLAEGVSSPAPTQDTHMETDLLSSLSSTPGEKTETLALQRLGELGPPSPGLNWEQPQAARLSRTGLVEGLRKRLLPAWCASLAHGLSLLLVAVAVAVSGWVGASFPPGVSVAWLLSSSASFLASFLGWEPLKVLLEALYFSLVAKRLHPDEDDTLVESPAVTPVSARVPRVRPPHGFALFLAKEEARKVKRLHGMLRSLLVYMLFLLVTLLASYGDASCHGHAYRLQSAIKQELHSRAFLAITRSEELWPWMAHVLLPYVHGNQSSPELGPPRLRQVRLQEALYPDPPGPRVHTCSAAGGFSTSDYDVGWESPHNGSGTWAYSAPDLLGAWSWGSCAVYDSGGYVQELGLSLEESRDRLRFLQLHNWLDNRSRAVFLELTRYSPAVGLHAAVTLRLEFPAAGRALAALSVRPFALRRLSAGLSLPLLTSVCLLLFAVHFAVAEARTWHREGRWRVLRLGAWARWLLVALTAATALVRLAQLGAADRQWTRFVRGRPRRFTSFDQVAQLSSAARGLAASLLFLLLVKAAQQLRFVRQWSVFGKTLCRALPELLGVTLGLVVLGVAYAQLAILLVSSCVDSLWSVAQALLVLCPGTGLSTLCPAESWHLSPLLCVGLWALRLWGALRLGAVILRWRYHALRGELYRPAWEPQDYEMVELFLRRLRLWMGLSKVKEFRHKVRFEGMEPLPSRSSRGSKVSPDVPPPSAGSDASHPSTSSSQLDGLSVSLGRLGTRCEPEPSRLQAVFEALLTQFDRLNQATEDVYQLEQQLHSLQGRRSSRAPAGSSRGPSPGLRPALPSRLARASRGVDLATGPSRTPLRAKNKVHPSST

SEQ ID NO: 15892 - protein, 90 aa, Artificial Sequence
  Synthetic polypeptide
ADATDDCTAARQITQKKQARGCARFRNALQKKISVAGSPSPTPAGQQVLDIDSCLDSSVLDSSFLTFSGLHAEQAFVGQMKSDLFLDDSK

SEQ ID NO: 15893 - protein, 987 aa, Artificial Sequence
  Synthetic polypeptide
ADATDDCTAARQITQKKQARGCARFRNALQKKISVAGSPSPTPAGQQVLDIDSCLDSSVLDSSFLTFSGLHAEQAFVGQMKSDLFLDDSKSLVCWPSGEGTLSWPDLLSDPSIVGSNLRQLARGQAGHGLGPEEDGFSLASPYSPAKSFSASDEDLIQQVLAEGVSSPAPTQDTHMETDLLSSLSSTPGEKTETLALQRLGELGPPSPGLNWEQPQAARLSRTGLVEGLRKRLLPAWCASLAHGLSLLLVAVAVAVSGWVGASFPPGVSVAWLLSSSASFLASFLGWEPLKVLLEALYFSLVAKRLHPDEDDTLVESPAVTPVSARVPRVRPPHGFALFLAKEEARKVKRLHGMLRSLLVYMLFLLVTLLASYGDASCHGHAYRLQSAIKQELHSRAFLAITRSEELWPWMAHVLLPYVHGNQSSPELGPPRLRQVRLQEALYPDPPGPRVHTCSAAGGFSTSDYDVGWESPHNGSGTWAYSAPDLLGAWSWGSCAVYDSGGYVQELGLSLEESRDRLRFLQLHNWLDNRSRAVFLELTRYSPAVGLHAAVTLRLEFPAAGRALAALSVRPFALRRLSAGLSLPLLTSVCLLLFAVHFAVAEARTWHREGRWRVLRLGAWARWLLVALTAATALVRLAQLGAADRQWTRFVRGRPRRFTSFDQVAQLSSAARGLAASLLFLLLVKAAQQLRFVRQWSVFGKTLCRALPELLGVTLGLVVLGVAYAQLAILLVSSCVDSLWSVAQALLVLCPGTGLSTLCPAESWHLSPLLCVGLWALRLWGALRLGAVILRWRYHALRGELYRPAWEPQDYEMVELFLRRLRLWMGLSKVKEFRHKVRFEGMEPLPSRSSRGSKVSPDVPPPSAGSDASHPSTSSSQLDGLSVSLGRLGTRCEPEPSRLQAVFEALLTQFDRLNQATEDVYQLEQQLHSLQGRRSSRAPAGSSRGPSPGLRPALPSRLARASRGVDLATGPSRTPLRAKNKVHPSST

SEQ ID NO: 15894 - protein, 79 aa, Artificial Sequence
  Synthetic polypeptide
KNEGTLLSRRHGRLHSSTPDNSEEASTRLCTLPKCTPEENLSGWEPEPHTCRAAGAGHRQLPGLVRAGQLLPHVLRPPR

SEQ ID NO: 15895 - protein, 65 aa, Artificial Sequence
  Synthetic polypeptide
LRRSKHAAVHASEMHSRRKSQWLGARAPHLPGSRCWTSTAAWTRPCWTAPSSRSQASTLRPLLDR

SEQ ID NO: 15896 - protein, 66 aa, Artificial Sequence
  Synthetic polypeptide
LRRSKHAAVHASEMHSRRKSQWLGARAPHLPGSRCWTSTAAWTRPCWTAPSSRSQASTLSRPLLDR

SEQ ID NO: 15897 - protein, 554 aa, Artificial Sequence
  Synthetic polypeptide
DSTTTQRYLVENVNNTEVNCLAWKYWEVSRLSMPPFLLAALPARYLASVPASQCVPFLISLGKSWLDSLVLDSHKKTSVLRKVQQCLDDSIADEYTVDIMGNLLCHLPAAIIDRGISPRAWATALHGLRDCPDLNPEQKAAVRLKLLGQYGLPQHWTAETTKDLGPFLVLFSGDELSSIATKFPEILLQAASKMARTLPTKEFLWAVFQSVRNSSDKIPSYDPMPGCHGVVAPSSDDIFKLAEANACWALEDLRCMEEDTFIRTVELLGAVQGFSRPQLMTLKEKAIQVWDMPSYWREHHIVSLGRIALALNESELEQLDLSSIDTVASLSWQTEWTPGQAESILQGYLDDSGYSIQDLKSFHLVGLGATLCAINITEIPLIKISEFRVVVARIGTLLCSTHVLAEFKRKAEVVFGDPTEWTSSVLQELGTIAAGLTKAELRMLDKDLMPYFQPSAIKCLPDEIFKELSAEQIASLGPENAAAVTHAQRRRLSPLQLQSLQQALDGAKTHSWQDAPASAGPTRTSSSRSPAGALQSWGLWLGCPLLVLMAKLLW

SEQ ID NO: 15898 - protein, 1 aa, Artificial Sequence
  Synthetic polypeptide
G

SEQ ID NO: 15899 - protein, 72 aa, Artificial Sequence
  Synthetic polypeptide
WVEARGGAQHPTMRRTAPLHRGTWSKMSIILRLIVWRGNTGKFPDCLCHLSSWLHSRPATWLLSQPPSVCPF

SEQ ID NO: 15900 - protein, 17 aa, Artificial Sequence
  Synthetic polypeptide
DSLSTGQPRPRRTWDPF

SEQ ID NO: 15901 - protein, 40 aa, Artificial Sequence
  Synthetic polypeptide
DSTTTQRYLVENVNNTETPSALDSRDHEGLGTLSSTFLRR

SEQ ID NO: 15902 - protein, 435 aa, Artificial Sequence
  Synthetic polypeptide
WVEARGGAQHPTMRRTAPLHRGTWSKMSIILRLPQHWTAETTKDLGPFLVLFSGDELSSIATKFPEILLQAASKMARTLPTKEFLWAVFQSVRNSSDKIPSYDPMPGCHGVVAPSSDDIFKLAEANACWALEDLRCMEEDTFIRTVELLGAVQGFSRPQLMTLKEKAIQVWDMPSYWREHHIVSLGRIALALNESELEQLDLSSIDTVASLSWQTEWTPGQAESILQGYLDDSGYSIQDLKSFHLVGLGATLCAINITEIPLIKISEFRVVVARIGTLLCSTHVLAEFKRKAEVVFGDPTEWTSSVLQELGTIAAGLTKAELRMLDKDLMPYFQPSAIKCLPDEIFKELSAEQIASLGPENAAAVTHAQRRRLSPLQLQSLQQALDGAKTHSWQDAPASAGPTRTSSSRSPAGALQSWGLWLGCPLLVLMAKLLW

SEQ ID NO: 15903 - protein, 648 aa, Artificial Sequence; identical to SEQ ID NO: 1843
  Synthetic polypeptide

SEQ ID NO: 15904 - protein, 7 aa, Artificial Sequence
  Synthetic polypeptide
LWVPLCT

SEQ ID NO: 15905 - protein, 71 aa, Artificial Sequence; identical to SEQ ID NO: 4178
  Synthetic polypeptide

SEQ ID NO: 15906 - protein, 647 aa, Artificial Sequence
  Synthetic polypeptide
FPKGGATMHVKKYLLKGLHRLQKGPGYTYKELLVWYCDNTNTHGPKRIICEGPKKKAMWFLLTLLFAALVCWQWGIFIRTYLSWEVSVSLSVGFKTMDFPAVTICNASPFKYSKIKHLLKDLDELMEAVLERILAPELSHANATRNLNFSIWNHTPLVLIDERNPHHPMVLDLFGDNHNGLTSSSASEKICNAHGCKMAMRLCSLNRTQCTFRNFTSATQALTEWYILQATNIFAQVPQQELVEMSYPGEQMILACLFGAEPCNYRNFTSIFYPHYGNCYIFNWGMTEKALPSANPGTEFGLKLILDIGQEDYVPFLASTAGVRLMLHEQRSYPFIRDEGIYAMSGTETSIGVLVDKLQRMGEPYSPCTVNGSEVPVQNFYSDYNTTYSIQACLRSCFQDHMIRNCNCGHYLYPLPRGEKYCNNRDFPDWAHCYSDLQMSVAQRETCIGMCKESCNDTQYKMTISMADWPSEASEDWIFHVLSQERDQSTNITLSRKGIVKLNIYFQEFNYRTIEESAANNIVWLLSNLGGQFGFWMGGSVLCLIEFGEIIIDFVWITIIKLVALAKSLRQRRAQASYAGPPPTVAELVEAHTNFGFQPDTAPRSPNTGPYPSEQALPIPGTPPPNYDSLRLQPLDVIESDSEGDAI

SEQ ID NO: 15907 - protein, 50 aa, Artificial Sequence
  Synthetic polypeptide
FPKGWCHYAREEVPAEGPASAAEGPRLHVQGAAGVVLRQHQHPRPQAHHL

SEQ ID NO: 15908 - protein, 9 aa, Artificial Sequence
  Synthetic polypeptide
SQRVVPLCT

SEQ ID NO: 15909 - protein, 418 aa, Artificial Sequence; identical to SEQ ID NO: 2198
  Synthetic polypeptide

SEQ ID NO: 15910 - protein, 454 aa, Artificial Sequence; identical to SEQ ID NO: 2128
  Synthetic polypeptide

SEQ ID NO: 15911 - protein, 110 aa, Artificial Sequence; identical to SEQ ID NO: 3496
  Synthetic polypeptide

SEQ ID NO: 15912 - protein, 18 aa, Artificial Sequence
  Synthetic polypeptide
SFNGIIDVRHWEQSPEQV

SEQ ID NO: 15913 - protein, 45 aa, Artificial Sequence; identical to SEQ ID NO: 5439
  Synthetic polypeptide

SEQ ID NO: 15914 - protein, 26 aa, Artificial Sequence
  Synthetic polypeptide
KYSQGQLIRGNSAVRFSRAAHGEVRL

SEQ ID NO: 15915 - protein, 69 aa, Artificial Sequence
  Synthetic polypeptide
PTWRNPVSTENTARANSFVGTAQYVSPELLTEKSACKRPLGSWMHNIPACGRTPTIPSWKRVSYISEDH

SEQ ID NO: 15916 - protein, 230 aa, Artificial Sequence
  Synthetic polypeptide
PTWRNPVSTENTARANSFVGTAQYVSPELLTEKSACKSSDLWALGCIIYQLVAGLPPFRAGNEYLIFQKIIKLEYDFPEKFFPKARDLVEKLLVLDATKRLGCEEMEGYGPLKAHPFFESVTWENLHQQTPPKLTAYLPAMSEDDEDCYGNYDNLLSQFGCMQVSSSSSSHSLSASDTGLPQRSGSNIEQYIHDLDSNSFELDLQFSEDEKRLLLEKQAGGNPCLTGRII

SEQ ID NO: 15917 - protein, 332 aa, Artificial Sequence
  Synthetic polypeptide
PTWRNPVSTENTARANSFVGTAQYVSPELLTEKSACKSSDLWALGCIIYQLVAGLPPFRAGNEYLIFQKIIKLEYDFPEKFFPKARDLVEKLLVLDATKRLGCEEMEGYGPLKAHPFFESVTWENLHQQTPPKLTAYLPAMSEDDEDCYGNYDNLLSQFGCMQVSSSSSSHSLSASDTGLPQRSGSNIEQYIHDLDSNSFELDLQFSEDEKRLLLEKQAGGNPWHQFVENNLILKMGPVDKRKGLFARRRQLLLTEGPHLYYVDPVNKVLKGEIPWSQELRPEAKNFKTFFVHTPNRTYYLMDPSGNAHKWCRKIQEVWRQRYQSHPDAAVQ

SEQ ID NO: 15918 - protein, 99 aa, Artificial Sequence
  Synthetic polypeptide
SQHFGRPRQADHLRSGVRDPPDQHGETLSLLKIQPGPTHSWEQRSTFLQSCSRRSPPVRDLWALGCIIYQLVAGLPPFRAGNEYLIFQKIIKLEYDFPE

SEQ ID NO: 15919 - protein, 68 aa, Artificial Sequence
  Synthetic polypeptide
SQHFGRPRQADHLRSGVRDPPDQHGETLSLLKIQPGPTHSWEQRSTFLQSCSRRSPPVRVQTFGLLDA

SEQ ID NO: 15920 - protein, 10 aa, Artificial Sequence
  Synthetic polypeptide
DQEFETSLGT

SEQ ID NO: 15921 - protein, 70 aa, Artificial Sequence
  Synthetic polypeptide
RAWWLMPIIPALLEAEAGRSLEIRSSRPAWEHEGLAGAHLRLRLHEHLYLRVEDEWSHQLQHRAPPVVPA

SEQ ID NO: 15922 - protein, 82 aa, Artificial Sequence
  Synthetic polypeptide
RAWWLMPIIPALLEAEAGRSLEIRSSRPAWEHEGLAGAHLRLRLHEHLYLRVEDEWSHQLQHRAPPVVPAGFSALRSPHVYP

SEQ ID NO: 15923 - protein, 61 aa, Artificial Sequence
  Synthetic polypeptide
SQHFWRLRRADHLRSGVRDQPGNMKVLQEPTCVSDYMSISTCEWKMNGPTNCSTELRLLYQ

SEQ ID NO: 15924 - protein, 118 aa, Artificial Sequence
  Synthetic polypeptide
SQHFWRLRRADHLRSGVRDQPGNMKVLQEPTCVSDYMSISTCEWKMNGPTNCSTELRLLYQLVFLLSEAHTCIPENNGGAGCVCHLLMDDVVSADNYTLDLWAGQQLLWKGSFKPSEH

SEQ ID NO: 15925 - protein, 225 aa, Artificial Sequence
  Synthetic polypeptide
SQHFWRLRRADHLRSGVRDQPGNMKVLQEPTCVSDYMSISTCEWKMNGPTNCSTELRLLYQLVFLLSEAHTCIPENNGGAGCVCHLLMDDVVSADNYTLDLWAGQQLLWKGSFKPSEHVKPRAPGNLTVHTNVSDTLLLTWSNPYPPDNYLYNHLTYAVNIWSENDPADFRIYNVTYLEPSLRIAASTLKSGISYRARVRAWAQCYNTTWSEWSPSTKWHNSNIC

SEQ ID NO: 15926 - protein, 823 aa, Artificial Sequence
  Synthetic polypeptide
SQHFWRLRRADHLRSGVRDQPGNMKVLQEPTCVSDYMSISTCEWKMNGPTNCSTELRLLYQLVFLLSEAHTCIPENNGGAGCVCHLLMDDVVSADNYTLDLWAGQQLLWKGSFKPSEHVKPRAPGNLTVHTNVSDTLLLTWSNPYPPDNYLYNHLTYAVNIWSENDPADFRIYNVTYLEPSLRIAASTLKSGISYRARVRAWAQCYNTTWSEWSPSTKWHNSYREPFEQHLLLGVSVSCIVILAVCLLCYVSITKIKKEWWDQIPNPARSRLVAIIIQDAQGSQWEKRSRGQEPAKCPHWKNCLTKLLPCFLEHNMKRDEDPHKAAKEMPFQGSGKSAWCPVEISKTVLWPESISVVRCVELFEAPVECEEEEEVEEEKGSFCASPESSRDDFQEGREGIVARLTESLFLDLLGEENGGFCQQDMGESCLLPPSGSTSAHMPWDEFPSAGPKEAPPWGKEQPLHLEPSPPASPTQSPDNLTCTETPLVIAGNPAYRSFSNSLSQSPCPRELGPDPLLARHLEEVEPEMPCVPQLSEPTTVPQPEPETWEQILRRNVLQHGAAAAPVSAPTSGYQEFVHAVEQGGTQASAVVGLGPPGEAGYKAFSSLLASSAVSPEKCGFGASSGEEGYKPFQDLIPGCPGDPAPVPVPLFTFGLDREPPRSPQSSHLPSSSPEHLGLEPGEKVEDMPKPPLPQEQATDPLVDSLGSGIVYSALTCHLCGHLKQCHGQEDGGQTPVMASPCCGCCCGDRSSPPTTPLRAPDPSPGGVPLEASLCPASLAPSGISEKSKSSSSFHPAPGNAQSSSQTPKIVNFVSVGPTYMRVS

SEQ ID NO: 15927 - protein, 122 aa, Artificial Sequence
  Synthetic polypeptide
SQHFWRLRRADHLRSGVRDQPGNMKVLQEPTCVSDYMSISTCEWKMNGPTNCSTELRLLYQLVFLLSEAHTCIPENNGGAGCVCHLLMDDVVSADNYTLDLWAGQQLLWKGSFKPSEHVQNL

SEQ ID NO: 15928 - protein, 62 aa, Artificial Sequence
  Synthetic polypeptide
GRVWWFMPIIPALWEAEPSGSPEVRSSRPAWTTCETQGPRKPDSSHQCLRHSAADLEQPVSP

SEQ ID NO: 15929 - protein, 131 aa, Artificial Sequence
  Synthetic polypeptide
SQHFGRPSPADHRRSGVRDQPGQHVKPRAPGNLTVHTNVSDTLLLTWSNPYPPDNYLYNHLTYAVNIWSENDPADFRIYNVTYLEPSLRIAASTLKSGISYRARVRAWAQCYNTTWSEWSPSTKWHNSNIC

SEQ ID NO: 15930 - protein, 729 aa, Artificial Sequence
  Synthetic polypeptide
SQHFGRPSPADHRRSGVRDQPGQHVKPRAPGNLTVHTNVSDTLLLTWSNPYPPDNYLYNHLTYAVNIWSENDPADFRIYNVTYLEPSLRIAASTLKSGISYRARVRAWAQCYNTTWSEWSPSTKWHNSYREPFEQHLLLGVSVSCIVILAVCLLCYVSITKIKKEWWDQIPNPARSRLVAIIIQDAQGSQWEKRSRGQEPAKCPHWKNCLTKLLPCFLEHNMKRDEDPHKAAKEMPFQGSGKSAWCPVEISKTVLWPESISVVRCVELFEAPVECEEEEEVEEEKGSFCASPESSRDDFQEGREGIVARLTESLFLDLLGEENGGFCQQDMGESCLLPPSGSTSAHMPWDEFPSAGPKEAPPWGKEQPLHLEPSPPASPTQSPDNLTCTETPLVIAGNPAYRSFSNSLSQSPCPRELGPDPLLARHLEEVEPEMPCVPQLSEPTTVPQPEPETWEQILRRNVLQHGAAAAPVSAPTSGYQEFVHAVEQGGTQASAVVGLGPPGEAGYKAFSSLLASSAVSPEKCGFGASSGEEGYKPFQDLIPGCPGDPAPVPVPLFTFGLDREPPRSPQSSHLPSSSPEHLGLEPGEKVEDMPKPPLPQEQATDPLVDSLGSGIVYSALTCHLCGHLKQCHGQEDGGQTPVMASPCCGCCCGDRSSPPTTPLRAPDPSPGGVPLEASLCPASLAPSGISEKSKSSSSFHPAPGNAQSSSQTPKIVNFVSVGPTYMRVS

SEQ ID NO: 15931 - protein, 79 aa, Artificial Sequence; identical to SEQ ID NO: 3970
  Synthetic polypeptide

SEQ ID NO: 15932 - protein, 92 aa, Artificial Sequence; identical to SEQ ID NO: 3719
  Synthetic polypeptide

SEQ ID NO: 15933 - protein, 22 aa, Artificial Sequence
  Synthetic polypeptide
AQEVKVAVSRDCTTALQPGGVH

SEQ ID NO: 15934 - protein, 34 aa, Artificial Sequence; identical to SEQ ID NO: 6183
  Synthetic polypeptide

SEQ ID NO: 15935 - protein, 31 aa, Artificial Sequence
  Synthetic polypeptide
GSSAGQLVLITARVTTERTAGTCLYFSAVPG

SEQ ID NO: 15936 - protein, 122 aa, Artificial Sequence
  Synthetic polypeptide
GSSAGQLVLITARVTTERTAGTCLYFSAVPGILPSSQPPISCSEEGAGNATLSPRMGEECVSVWSHEGLVLTKLLTSEELALCGSRLLVLGSFLLLFCGLLCCVTAMCFHPRRESHWSRTRL

SEQ ID NO: 15937 - protein, 95 aa, Artificial Sequence
  Synthetic polypeptide
GSSAGQLVLITARVTTERTAGTCLYFSAVPGILPSSQPPISCSEEGAGNATLSPRMGEECVSVWSHEGLVLTKLLTSELALCGSRLLVLGSFLLL

SEQ ID NO: 15938 - protein, 106 aa, Artificial Sequence
  Synthetic polypeptide
GSSAGQLVLITARVTTERTAGTCLYFSAVPGILPSSQPPISCSEEGAGNATLSPRMGEECVSVWSHEGLVLTKLLTSVRASDGSPGFCRLPADYCILKVPGNNSTL

SEQ ID NO: 15939 - protein, 30 aa, Artificial Sequence
  Synthetic polypeptide
GWVWWLTPVIPTLWEAKDLLQDNWSLSQPG

SEQ ID NO: 15940 - protein, 33 aa, Artificial Sequence
  Synthetic polypeptide
SQHFGRLRIFCRTTGPYHSQGDHRKDCRNLPIF

SEQ ID NO: 15941 - protein, 570 aa, Artificial Sequence; identical to SEQ ID NO: 1918
  Synthetic polypeptide

SEQ ID NO: 15942 - protein, 571 aa, Artificial Sequence; identical to SEQ ID NO: 1916
  Synthetic polypeptide

SEQ ID NO: 15943 - protein, 32 aa, Artificial Sequence; identical to SEQ ID NO: 6363
  Synthetic polypeptide

SEQ ID NO: 15944 - protein, 17 aa, Artificial Sequence
  Synthetic polypeptide
SSTLGGRAPGPWWIWSP

SEQ ID NO: 15945 - protein, 12 aa, Artificial Sequence
  Synthetic polypeptide
LMPVIQHFGRPS

SEQ ID NO: 15946 - protein, 33 aa, Artificial Sequence
  Synthetic polypeptide
PDAMTHACNPALWEAELRSQCMKWSAPIQPVTR

SEQ ID NO: 15947 - protein, 550 aa, Artificial Sequence
  Synthetic polypeptide
SSTLGGRAEIPVHEVECSYSTSNKMKEGVNITICFQIKSLIPQFQGRLVANLTYTLQLDGHRTRRRGLFPGGRHELRRNIAVTTSMSCTDFSFHFPVCVQDLISPINVSLNFSLWEEEGTPRDQRAGKDIPPILRPSLHSETWEIPFEKNCGEDKKCEANLRVSFSPARSRALRLTAFASLSVELSLSNLEEDAYWVQLDLHFPPGLSFRKVEMLKPHSQIPVSCEELPEESRLLSRALSCNVSSPIFKAGHSVALQMMFNTLVNSSWGDSVELHANVTCNNEDSDLLEDNSATTIIPILYPINILIQDQEDSTLYVSFTPKGPKIHQVKHMYQVRIQPSIHDHNIPTLEAVVGVPQPPSEGPITHQWSVQMEPPVPCHYEDLERLPDAAEPCLPGALFRCPVVFRQEILVQVIGTLELVGEIEASSMFSLCSSLSISFNSSKHFHLYGSNASLAQVVMKVDVVYEKQMLYLYVLSGIGGLLLLLLIFIVLYKVGFFKRNLKEKMEAGRGVPNGIPAEDSEQLASGQEAGDPGCLKPLHEKDSESGGGKD

SEQ ID NO: 15948 - protein, 551 aa, Artificial Sequence
  Synthetic polypeptide
SSTLGGRAEIPVHEVECSYSTSNKMKEGVNITICFQIKSLIPQFQGRLVANLTYTLQLDGHRTRRRGLFPGGRHELRRNIAVTTSMSCTDFSFHFPVCVQDLISPINVSLNFSLWEEEGTPRDQRAQGKDIPPILRPSLHSETWEIPFEKNCGEDKKCEANLRVSFSPARSRALRLTAFASLSVELSLSNLEEDAYWVQLDLHFPPGLSFRKVEMLKPHSQIPVSCEELPEESRLLSRALSCNVSSPIFKAGHSVALQMMFNTLVNSSWGDSVELHANVTCNNEDSDLLEDNSATTIIPILYPINILIQDQEDSTLYVSFTPKGPKIHQVKHMYQVRIQPSIHDHNIPTLEAVVGVPQPPSEGPITHQWSVQMEPPVPCHYEDLERLPDAAEPCLPGALFRCPVVFRQEILVQVIGTLELVGEIEASSMFSLCSSLSISFNSSKHFHLYGSNASLAQVVMKVDVVYEKQMLYLYVLSGIGGLLLLLLIFIVLYKVGFFKRNLKEKMEAGRGVPNGIPAEDSEQLASGQEAGDPGCLKPLHEKDSESGGGKD

SEQ ID NO: 15949 - protein, 77 aa, Artificial Sequence
  Synthetic polypeptide
AGRGGSCLSSQHFGRPRRRKVRTAIHRQGPQGRVTSCLPPPLGTTSRPAVWTWAVPGSGMHTRRTLRASWTSTYSVC

SEQ ID NO: 15950 - protein, 425 aa, Artificial Sequence
  Synthetic polypeptide
GRARRLMPVIPTLWEAEEEEGEDGDPSSGPPGPCHKLPPAPAWHHFPPRCVDMGCAGLRDAHEENPESILDEHVQRVLRTPGRQSPGPGHRSPDSGHVAKMPVALGGAASGHGKHVPKSGAKLDAAGLHHHRHVHHHVHHSTARPKEQVEAEATRRAQSSFAWGLEPHSHGARSRGYSESVGAAPNASDGLAHSGKVGVACKRNAKKAESGKSASTEVPGASEDAEKNQKIMQWIIEGEKEISRHRRTGHGSSGTRKPQPHENSRPLSLEHPWAGPQLRTSVQPSHLFIQDPTMPPHPAPNPLTQLEEARRRLEEEEKRASRAPSKQRTRSQRKVGGGSAQPCDSIVVAYYFCGEPIPYRTLVRGRAVTLGQFKELLTKKGSYRYYFKKVSDEFDCGVVFEEVREDEAVLPVFEEKIIGKVEKVD

SEQ ID NO: 15951 - protein, 461 aa, Artificial Sequence
  Synthetic polypeptide
GRARRLMPVIPTLWEAEEEEGEDGDPSSGPPGPCHKLPPAPAWHHFPPRCVDMGCAGLRDAHEENPESILDEHVQRVLRTPGRQSPGPGHRSPDSGHVAKMPVALGGAASGHGKHVPKSGAKLDAAGLHHHRHVHHHVHHSTARPKEQVEAEATRRAQSSFAWGLEPHSHGARSRGYSESVGAAPNASDGLAHSGKVGVACKRNAKKAESGKSASTEVPGASEDAEKNQKIMQWIIEGEKEISRHRRTGHGSSGTRKPQPHENSRPLSLEHPWAGPQLRTSVQPSHLFIQDPTMPPHPAPNPLTQLEEARRRLEEEEKRASRAPSKQRYVQEVMRRGRACVRPACAPVLHVVPAVSDMELSETETRSQRKVGGGSAQPCDSIVVAYYFCGEPIPYRTLVRGRAVTLGQFKELLTKKGSYRYYFKKVSDEFDCGVVFEEVREDEAVLPVFEEKIIGKVEKVD

SEQ ID NO: 15952 - protein, 20 aa, Artificial Sequence
  Synthetic polypeptide
PGAAAHACHPNTLGGRGGGR

SEQ ID NO: 15953 - protein, 459 aa, Artificial Sequence
  Synthetic polypeptide
CYCIRRTYRVPKEVRVEPQKFAEELIHRLEAVQRTREAEEKLEERLKRVRMEEEGEDGDPSSGPPGPCHKLPPAPAWHHFPPRCVDMGCAGLRDAHEENPESILDEHVQRVLRTPGRQSPGPGHRSPDSGHVAKMPVALGGAASGHGKHVPKSGAKLDAAGLHHHRHVHHHVHHSTARPKEQVEAEATRRAQSSFAWGLEPHSHGARSRGYSESVGAAPNASDGLAHSGKVGVACKRNAKKAESGKSASTEVPGASEDAEKNQKIMQWIIEGEKEISRHRRTGHGSSGTRKPQPHENSRPLSLEHPWAGPQLRTSVQPSHLFIQDPTMPPHPAPNPLTQLEEARRRLEEEEKRASRAPSKQRTRSQRKVGGGSAQPCDSIVVAYYFCGEPIPYRTLVRGRAVTLGQFKELLTKKGSYRYYFKKVSDEFDCGVVFEEVREDEAVLPVFEEKIIGKVEKVD

SEQ ID NO: 15954 - protein, 495 aa, Artificial Sequence
  Synthetic polypeptide
CYCIRRTYRVPKEVRVEPQKFAEELIHRLEAVQRTREAEEKLEERLKRVRMEEEGEDGDPSSGPPGPCHKLPPAPAWHHFPPRCVDMGCAGLRDAHEENPESILDEHVQRVLRTPGRQSPGPGHRSPDSGHVAKMPVALGGAASGHGKHVPKSGAKLDAAGLHHHRHVHHHVHHSTARPKEQVEAEATRRAQSSFAWGLEPHSHGARSRGYSESVGAAPNASDGLAHSGKVGVACKRNAKKAESGKSASTEVPGASEDAEKNQKIMQWIIEGEKEISRHRRTGHGSSGTRKPQPHENSRPLSLEHPWAGPQLRTSVQPSHLFIQDPTMPPHPAPNPLTQLEEARRRLEEEEKRASRAPSKQRYVQEVMRRGRACVRPACAPVLHVVPAVSDMELSETETRSQRKVGGGSAQPCDSIVVAYYFCGEPIPYRTLVRGRAVTLGQFKELLTKKGSYRYYFKKVSDEFDCGVVFEEVREDEAVLPVFEEKIIGKVEKVD

SEQ ID NO: 15955 - protein, 50 aa, Artificial Sequence
  Synthetic polypeptide
DLPRDVIVSGARTGCRRRSAWSLRSSRRSSSTAWRLCSARGRPRRSWRSG

SEQ ID NO: 15956 - protein, 75 aa, Artificial Sequence
  Synthetic polypeptide
FCYEGCYWSSWQNWNKICHVMLLYQAHVPGAEGGPRGASEVRGGAHPPPGGCAAHAGGRGEAGGAAEARAHGGGR

SEQ ID NO: 15957 - protein, 3 aa, Artificial Sequence
  Synthetic polypeptide
PSV

SEQ ID NO: 15958 - protein, 798 aa, Artificial Sequence
  Synthetic polypeptide
QPLAQILTFGLKTYLISGQRAKESRCSCAEALLSGFEVIDGSQVSSGPRGQGTASSGNVSDLAQTVKTFDNLKTCPSCGITFAPKSEAGAEGGAPQNGCQDEHKNSTKASGGPNPKTQNGLLSPPQEEKLTNSQTSLCEILQEKGRWAGVSLDQSALLPLRFKNIREKTDAHFVDVIKEDSLMKDYFFKPPINQFSLNFLDQELERSYRTSYQEEVIKNSPVKTFASPTFSSLLDVFLSTTVFLTLSTTCFLKYEAATVPPPPAALAVFSAALLLEVLSLAVSIRMVFFLEDVMACTKRLLEWIAGWLPRHCIGAILVSLPALAVYSHVTSEYETNIHFPVFTGSAALIAVVHYCNFCQLSSWMRSSLATVVGAGPLLLLYVSLCPDSSVLTSPLDAVQNFSSERNPCNSSVPRDLRRPASLIGQEVVLVFFLLLLLVWFLNREFEVSYRLHYHGDVEADLHRTKIQSMRDQADWLLRNIIPYHVAEQLKVSQTYSKNHDSGGVIFASIVNFSEFYEENYEGGKECYRVLNELIGDFDELLSKPDYSSIEKIKTIGATYMAASGLNTAQAQDGSHPQEHLQILFEFAKEMMRVVDDFNNNMLWFNFKLRVGFNHGPLTAGVIGTTKLLYDIWGDTVNIASRMDTTGVECRIQVSEESYRVLSKMGYDFDYRGTVNVKGKGQMKTYLYPKCTDHRVIPQHQLSISPDIRVQVDGSIGRSPTDEIANLVPSVQYVDKTSLGSDSSTQAKDAHLSPKRPWKEPVKAEERGRFGKAIEKDDCDETGIEEANELTKLNVSKSV

SEQ ID NO: 15959 - protein, 174 aa, Artificial Sequence
  Synthetic polypeptide
QPLAQILTFGLKTYLISGQRAKESRCSCAEALLSGFEVIDGSQVSSGPRGQGTASSGNVSDLAQTVKTFDNLKTCPSCGITFAPKSEAGAEGGAPQNGCQDEHKNSTKVTSSWLLFLSVPLLAHPPKASGGPNPKTQNGLLSPPQEEKLTNSQTSLCEILQEKGRWAGVSLDQS

SEQ ID NO: 15960 - protein, 35 aa, Artificial Sequence
  Synthetic polypeptide
TLSPDPNLRFEDIPDIGSESQGVSLQLCRGLAFWL

SEQ ID NO: 15961 - protein, 28 aa, Artificial Sequence
  Synthetic polypeptide
FWSPSYRLRKLLCFALFHGRREIRHPPP

SEQ ID NO: 15962 - protein, 502 aa, Artificial Sequence
  Synthetic polypeptide
GNYFASHFFMGGEKFDTPHPEGYLFGENMDLNFLGSRPVQFPYVTPAPHEPVKTLRSLVNIRKDSLRLVRYKDDADSPTEDGDKPRVLYSLEFTFDADARVAITIYCQASEEFLNGRAVYSPKSPSLQSETVHYKRGVSQQFSLPSFKIDFSEWKDDELNFDLDRGVFPVVIQAVVDEGDAVVEVTGHAHVLLAAFEKHMDGSFSVKPLKQKQIVDRVSYLLQEIYGIENKNNQETKPSDDENSDNSNECVVCLSDLRDTLILPCRHLCLCTSCADTLRYQANNCPICRLPFRALLQIRAVRKKPGALSPVSFSPVLAQSLEHDEHSNSDSVPPGYEPISLLEALNGLRAVSPAIPSAPLYEEITYSGISDGLSQASCPLAAIDHILDSSRQKGRPQSKAPDSTLRSPSSPIHEEDEEKLSEDVDAPPPLGGAELALRESSSPESFITEEVDESSSPQQGTRAASIENVLQDSSPEHCGRGPPADIYLPALGPDSCSVGIDE

SEQ ID NO: 15963 - protein, 565 aa, Artificial Sequence
  Synthetic polypeptide
GNYFASHFFMGGEKFDTPHPEGYLFGENMDLNFLGSRPVQFPYVTPAPHEPVKTLRSLVNIRKDSLRLVRYKDDADSPTEDGDKPRVLYSLEFTFDADARVAITIYCQASEEFLNGRAVYSPKSPSLQSETVHYKRGVSQQFSLPSFKIDFSEWKDDELNFDLDRGVFPVVIQAVVDEGDVVEVTGHAHVLLAAFEKHMDGSFSVKPLKQKQIVDRVSYLLQEIYGIENKNNQETKISWKVSQARFIMASGPRTTGAAPRGGSGAPGRASPQPREPSDDENSDNSNECVVCLSDLRDTLILPCRHLCLCTSCADTLRYQANNCPICRLPFRALLQIRAVRKKPGALSPVSFSPVLAQSLEHDEHSCPFKKSKPHPASLASKKPKRETNSDSVPPGYEPISLLEALNGLRAVSPAIPSAPLYEEITYSGISDGLSQASCPLAAIDHILDSSRQKGRPQSKAPDSTLRSPSSPIHEEDEEKLSEDVDAPPPLGGAELALRESSSPESFITEEVDESSSPQQGTRAASIENVLQDSSPEHCGRGPPADIYLPGRPTSMETAHGLATTS

SEQ ID NO: 15964 - protein, 523 aa, Artificial Sequence
  Synthetic polypeptide
GNYFASHFFMGGEKFDTPHPEGYLFGENMDLNFLGSRPVQFPYVTPAPHEPVKTLRSLVNIRKDSLRLVRYKDDADSPTEDGDKPRVLYSLEFTFDADARVAITIYCQASEEFLNGRAVYSPKSPSLQSETVHYKRGVSQQFSLPSFKIDFSEWKDDELNFDLDRGVFPVVIQAVVDEGDVVEVTGHAHVLLAAFEKHMDGSFSVKPLKQKQIVDRVSYLLQEIYGIENKNNQETKPSDDENSDNSNECVVCLSDLRDTLILPCRHLCLCTSCADTLRYQANNCPICRLPFRALLQIRAVRKKPGALSPVSFSPVLAQSLEHDEHSCPFKKSKPHPASLASKKPKRETNSDSVPPGYEPISLLEALNGLRAVSPAIPSAPLYEEITYSGISDGLSQASCPLAAIDHILDSSRQKGRPQSKAPDSTLRSPSSPIHEEDEEKLSEDVDAPPPLGGAELALRESSSPESFITEEVDESSSPQQGTRAASIENVLQDSSPEHCGRGPPADIYLPALGPDSCSVGIDE

SEQ ID NO: 15965 - protein, 547 aa, Artificial Sequence
  Synthetic polypeptide
GNYFASHFFMGGEKFDTPHPEGYLFGENMDLNFLGSRPVQFPYVTPAPHEPVKTLRSLVNIRKDSLRLVRYKDDADSPTEDGDKPRVLYSLEFTFDADARVAITIYCQASEEFLNGRAVYSPKSPSLQSETVHYKRGVSQQFSLPSFKIDFSEWKDDELNFDLDRGVFPVVIQAVVDEGDVVEVTGHAHVLLAAFEKHMDGSFSVKPLKQKQIVDRVSYLLQEIYGIENKNNQETKPSDDENSDNSNECVVCLSDLRDTLILPCRHLCLCTSCADTLRYQANNCPICRLPFRALLQIRAVRKKPGALSPVSFSPVLAQSLEHDEHSCPFKKSKPHPASLASKKPKRETNSDSVPPGYEPISLLEALNGLRAVSPAIPSAPLYEEITYSGISDGLSQASCPLAAIDHILDSSRQKGRPQSKAPDSTLRSPSSPIHEEDEEKLSEDVDAPPPLGGAELALRESSSPESFITEEVDESSSPQQGTRAASIENVLQDSSPEHCGRGPPADIYLPGRPTSMETAHGLATTSPTWPPLGGPSPDPSAAELTPL

SEQ ID NO: 15966 - protein, 501 aa, Artificial Sequence
  Synthetic polypeptide
GNYFASHFFMGGEKFDTPHPEGYLFGENMDLNFLGSRPVQFPYVTPAPHEPVKTLRSLVNIRKDSLRLVRYKDDADSPTEDGDKPRVLYSLEFTFDADARVAITIYCQASEEFLNGRAVYSPKSPSLQSETVHYKRGVSQQFSLPSFKIDFSEWKDDELNFDLDRGVFPVVIQAVVDEGDVVEVTGHAHVLLAAFEKHMDGSFSVKPLKQKQIVDRVSYLLQEIYGIENKNNQETKPSDDENSDNSNECVVCLSDLRDTLILPCRHLCLCTSCADTLRYQANNCPICRLPFRALLQIRAVRKKPGALSPVSFSPVLAQSLEHDEHSNSDSVPPGYEPISLLEALNGLRAVSPAIPSAPLYEEITYSGISDGLSQASCPLAAIDHILDSSRQKGRPQSKAPDSTLRSPSSPIHEEDEEKLSEDVDAPPPLGGAELALRESSSPESFITEEVDESSSPQQGTRAASIENVLQDSSPEHCGRGPPADIYLPALGPDSCSVGIDE

SEQ ID NO: 15967 - protein, 525 aa, Artificial Sequence
  Synthetic polypeptide
GNYFASHFFMGGEKFDTPHPEGYLFGENMDLNFLGSRPVQFPYVTPAPHEPVKTLRSLVNIRKDSLRLVRYKDDADSPTEDGDKPRVLYSLEFTFDADARVAITIYCQASEEFLNGRAVYSPKSPSLQSETVHYKRGVSQQFSLPSFKIDFSEWKDDELNFDLDRGVFPVVIQAVVDEGDVVEVTGHAHVLLAAFEKHMDGSFSVKPLKQKQIVDRVSYLLQEIYGIENKNNQETKPSDDENSDNSNECVVCLSDLRDTLILPCRHLCLCTSCADTLRYQANNCPICRLPFRALLQIRAVRKKPGALSPVSFSPVLAQSLEHDEHSNSDSVPPGYEPISLLEALNGLRAVSPAIPSAPLYEEITYSGISDGLSQASCPLAAIDHILDSSRQKGRPQSKAPDSTLRSPSSPIHEEDEEKLSEDVDAPPPLGGAELALRESSSPESFITEEVDESSSPQQGTRAASIENVLQDSSPEHCGRGPPADIYLPGRPTSMETAHGLATTSPTWPPLGGPSPDPSAAELTPL

SEQ ID NO: 15968 - protein, 291 aa, Artificial Sequence
  Synthetic polypeptide
GNYFASHFFMGGEKFDTPHPEGYLFGENMDLNFLGSRPVQFPYVTPAPHEPVKTLRSLVNIRKDSLRLVRYKDDADSPTEDGDKPRVLYSLEFTFDADARVAITIYCQASEEFLNGRAVYSPKSPSLQSETVHYKRGVSQQFSLPSFKIDFSEWKDDELNFDLDRGVFPVVIQAVVDEGDVVEVTGHAHVLLAAFEKHMDGSFSVKPLKQKQIVDRVSYLLQEIYGIENKNNQETKPSDDENSDNSNECVVCLSDLRDTLILPCRHLCLCTSCADTLRYQANNCPICRLQL

SEQ ID NO: 15969 - protein, 38 aa, Artificial Sequence
  Synthetic polypeptide
MESQLQIEETTLLRTFSWEERNSTPPTLKVTSLERTWI

SEQ ID NO: 15970 - protein, 21 aa, Artificial Sequence
  Synthetic polypeptide
GAVAHACNPSTLGGRGRRITS

SEQ ID NO: 15971 - protein, 194 aa, Artificial Sequence
  Synthetic polypeptide
SQHFGRPRQADHELNFDLDRGVFPVVIQAVVDEGDAVVEVTGHAHVLLAAFEKHMDGSFSVKPLKQKQIVDRVSYLLQEIYGIENKNNQETKPSDDENSDNSNECVVCLSDLRDTLILPCRHLCLCTSCADTLRYQANNCPICRLPFRALLQIRAVRKKPGALSPVSFSPVLAQSLEHDEHSCPFKKSKPHPAS

SEQ ID NO: 15972 - protein, 357 aa, Artificial Sequence
  Synthetic polypeptide
SQHFGRPRQADHELNFDLDRGVFPVVIQAVVDEGDAVVEVTGHAHVLLAAFEKHMDGSFSVKPLKQKQIVDRVSYLLQEIYGIENKNNQETKPSDDENSDNSNECVVCLSDLRDTLILPCRHLCLCTSCADTLRYQANNCPICRLPFRALLQIRAVRKKPGALSPVSFSPVLAQSLEHDEHSNSDSVPPGYEPISLLEALNGLRAVSPAIPSAPLYEEITYSGISDGLSQASCPLAAIDHILDSSRQKGRPQSKAPDSTLRSPSSPIHEEDEEKLSEDVDAPPPLGGAELALRESSSPESFITEEVDESSSPQQGTRAASIENVLQDSSPEHCGRGPPADIYLPALGPDSCSVGIDE

SEQ ID NO: 15973 - protein, 420 aa, Artificial Sequence
  Synthetic polypeptide
SQHFGRPRQADHELNFDLDRGVFPVVIQAVVDEGDVVEVTGHAHVLLAAFEKHMDGSFSVKPLKQKQIVDRVSYLLQEIYGIENKNNQETKISWKVSQARFIMASGPRTTGAAPRGGSGAPGRASPQPREPSDDENSDNSNECVVCLSDLRDTLILPCRHLCLCTSCADTLRYQANNCPICRLPFRALLQIRAVRKKPGALSPVSFSPVLAQSLEHDEHSCPFKKSKPHPASLASKKPKRETNSDSVPPGYEPISLLEALNGLRAVSPAIPSAPLYEEITYSGISDGLSQASCPLAAIDHILDSSRQKGRPQSKAPDSTLRSPSSPIHEEDEEKLSEDVDAPPPLGGAELALRESSSPESFITEEVDESSSPQQGTRAASIENVLQDSSPEHCGRGPPADIYLPGRPTSMETAHGLATTS

SEQ ID NO: 15974 - protein, 378 aa, Artificial Sequence
  Synthetic polypeptide
SQHFGRPRQADHELNFDLDRGVFPVVIQAVVDEGDVVEVTGHAHVLLAAFEKHMDGSFSVKPLKQKQIVDRVSYLLQEIYGIENKNNQETKPSDDENSDNSNECVVCLSDLRDTLILPCRHLCLCTSCADTLRYQANNCPICRLPFRALLQIRAVRKKPGALSPVSFSPVLAQSLEHDEHSCPFKKSKPHPASLASKKPKRETNSDSVPPGYEPISLLEALNGLRAVSPAIPSAPLYEEITYSGISDGLSQASCPLAAIDHILDSSRQKGRPQSKAPDSTLRSPSSPIHEEDEEKLSEDVDAPPPLGGAELALRESSSPESFITEEVDESSSPQQGTRAASIENVLQDSSPEHCGRGPPADIYLPALGPDSCSVGIDE

SEQ ID NO: 15975 - protein, 402 aa, Artificial Sequence
  Synthetic polypeptide
SQHFGRPRQADHELNFDLDRGVFPVVIQAVVDEGDVVEVTGHAHVLLAAFEKHMDGSFSVKPLKQKQIVDRVSYLLQEIYGIENKNNQETKPSDDENSDNSNECVVCLSDLRDTLILPCRHLCLCTSCADTLRYQANNCPICRLPFRALLQIRAVRKKPGALSPVSFSPVLAQSLEHDEHSCPFKKSKPHPASLASKKPKRETNSDSVPPGYEPISLLEALNGLRAVSPAIPSAPLYEEITYSGISDGLSQASCPLAAIDHILDSSRQKGRPQSKAPDSTLRSPSSPIHEEDEEKLSEDVDAPPPLGGAELALRESSSPESFITEEVDESSSPQQGTRAASIENVLQDSSPEHCGRGPPADIYLPGRPTSMETAHGLATTSPTWPPLGGPSPDPSAAELTPL

SEQ ID NO: 15976 - protein, 356 aa, Artificial Sequence
  Synthetic polypeptide
SQHFGRPRQADHELNFDLDRGVFPVVIQAVVDEGDVVEVTGHAHVLLAAFEKHMDGSFSVKPLKQKQIVDRVSYLLQEIYGIENKNNQETKPSDDENSDNSNECVVCLSDLRDTLILPCRHLCLCTSCADTLRYQANNCPICRLPFRALLQIRAVRKKPGALSPVSFSPVLAQSLEHDEHSNSDSVPPGYEPISLLEALNGLRAVSPAIPSAPLYEEITYSGISDGLSQASCPLAAIDHILDSSRQKGRPQSKAPDSTLRSPSSPIHEEDEEKLSEDVDAPPPLGGAELALRESSSPESFITEEVDESSSPQQGTRAASIENVLQDSSPEHCGRGPPADIYLPALGPDSCSVGIDE

SEQ ID NO: 15977 - protein, 380 aa, Artificial Sequence
  Synthetic polypeptide
SQHFGRPRQADHELNFDLDRGVFPVVIQAVVDEGDVVEVTGHAHVLLAAFEKHMDGSFSVKPLKQKQIVDRVSYLLQEIYGIENKNNQETKPSDDENSDNSNECVVCLSDLRDTLILPCRHLCLCTSCADTLRYQANNCPICRLPFRALLQIRAVRKKPGALSPVSFSPVLAQSLEHDEHSNSDSVPPGYEPISLLEALNGLRAVSPAIPSAPLYEEITYSGISDGLSQASCPLAAIDHILDSSRQKGRPQSKAPDSTLRSPSSPIHEEDEEKLSEDVDAPPPLGGAELALRESSSPESFITEEVDESSSPQQGTRAASIENVLQDSSPEHCGRGPPADIYLPGRPTSMETAHGLATTSPTWPPLGGPSPDPSAAELTPL

SEQ ID NO: 15978 - protein, 146 aa, Artificial Sequence
  Synthetic polypeptide
SQHFGRPRQADHELNFDLDRGVFPVVIQAVVDEGDVVEVTGHAHVLLAAFEKHMDGSFSVKPLKQKQIVDRVSYLLQEIYGIENKNNQETKPSDDENSDNSNECVVCLSDLRDTLILPCRHLCLCTSCADTLRYQANNCPICRLQL

SEQ ID NO: 15979 - protein, 23 aa, Artificial Sequence
  Synthetic polypeptide
VRWLTPVIPALWEAEAGGSRAEL

SEQ ID NO: 15980 - protein, 25 aa, Artificial Sequence
  Synthetic polypeptide
GRARWLMPVIPALWEAEAGGSRAEL

SEQ ID NO: 15981 - protein, 22 aa, Artificial Sequence
  Synthetic polypeptide
PGAVAHACNPSTLGGRGRRITS

SEQ ID NO: 15982 - protein, 194 aa, Artificial Sequence; identical to SEQ ID NO: 15971
  Synthetic polypeptide

SEQ ID NO: 15983 - protein, 357 aa, Artificial Sequence; identical to SEQ ID NO: 15972
  Synthetic polypeptide

SEQ ID NO: 15984 - protein, 420 aa, Artificial Sequence; identical to SEQ ID NO: 15973
  Synthetic polypeptide

SEQ ID NO: 15985 - protein, 378 aa, Artificial Sequence; identical to SEQ ID NO: 15974
  Synthetic polypeptide

SEQ ID NO: 15986 - protein, 402 aa, Artificial Sequence; identical to SEQ ID NO: 15975
  Synthetic polypeptide

SEQ ID NO: 15987 - protein, 356 aa, Artificial Sequence; identical to SEQ ID NO: 15976
  Synthetic polypeptide

SEQ ID NO: 15988 - protein, 380 aa, Artificial Sequence; identical to SEQ ID NO: 15977
  Synthetic polypeptide

SEQ ID NO: 15989 - protein, 146 aa, Artificial Sequence; identical to SEQ ID NO: 15978
  Synthetic polypeptide

SEQ ID NO: 15990 - protein, 260 aa, Artificial Sequence
  Synthetic polypeptide
KRGSGRHLRTGVQCSAAHRSQDTGPARCPSQRNACTACGYPHSACYLARKRKAAPMRAAPWVNFGNIPRHRRSPVVQFHLNFDLDRGVFPVVIQAVVDEGDAVVEVTGHAHVLLAAFEKHMDGSFSVKPLKQKQIVDRVSYLLQEIYGIENKNNQETKPSDDENSDNSNECVVCLSDLRDTLILPCRHLCLCTSCADTLRYQANNCPICRLPFRALLQIRAVRKKPGALSPVSFSPVLAQSLEHDEHSCPFKKSKPHPAS

SEQ ID NO: 15991 - protein, 423 aa, Artificial Sequence
  Synthetic polypeptide
KRGSGRHLRTGVQCSAAHRSQDTGPARCPSQRNACTACGYPHSACYLARKRKAAPMRAAPWVNFGNIPRHRRSPVVQFHLNFDLDRGVFPVVIQAVVDEGDAVVEVTGHAHVLLAAFEKHMDGSFSVKPLKQKQIVDRVSYLLQEIYGIENKNNQETKPSDDENSDNSNECVVCLSDLRDTLILPCRHLCLCTSCADTLRYQANNCPICRLPFRALLQIRAVRKKPGALSPVSFSPVLAQSLEHDEHSNSDSVPPGYEPISLLEALNGLRAVSPAIPSAPLYEEITYSGISDGLSQASCPLAAIDHILDSSRQKGRPQSKAPDSTLRSPSSPIHEEDEEKLSEDVDAPPPLGGAELALRESSSPESFITEEVDESSSPQQGTRAASIENVLQDSSPEHCGRGPPADIYLPALGPDSCSVGIDE

SEQ ID NO: 15992 - protein, 486 aa, Artificial Sequence
  Synthetic polypeptide
KRGSGRHLRTGVQCSAAHRSQDTGPARCPSQRNACTACGYPHSACYLARKRKAAPMRAAPWVNFGNIPRHRRSPVVQFHLNFDLDRGVFPVVIQAVVDEGDVVEVTGHAHVLLAAFEKHMDGSFSVKPLKQKQIVDRVSYLLQEIYGIENKNNQETKISWKVSQARFIMASGPRTTGAAPRGGSGAPGRASPQPREPSDDENSDNSNECVVCLSDLRDTLILPCRHLCLCTSCADTLRYQANNCPICRLPFRALLQIRAVRKKPGALSPVSFSPVLAQSLEHDEHSCPFKKSKPHPASLASKKPKRETNSDSVPPGYEPISLLEALNGLRAVSPAIPSAPLYEEITYSGISDGLSQASCPLAAIDHILDSSRQKGRPQSKAPDSTLRSPSSPIHEEDEEKLSEDVDAPPPLGGAELALRESSSPESFITEEVDESSSPQQGTRAASIENVLQDSSPEHCGRGPPADIYLPGRPTSMETAHGLATTS

SEQ ID NO: 15993 - protein, 444 aa, Artificial Sequence
  Synthetic polypeptide
KRGSGRHLRTGVQCSAAHRSQDTGPARCPSQRNACTACGYPHSACYLARKRKAAPMRAAPWVNFGNIPRHRRSPVVQFHLNFDLDRGVFPVVIQAVVDEGDVVEVTGHAHVLLAAFEKHMDGSFSVKPLKQKQIVDRVSYLLQEIYGIENKNNQETKPSDDENSDNSNECVVCLSDLRDTLILPCRHLCLCTSCADTLRYQANNCPICRLPFRALLQIRAVRKKPGALSPVSFSPVLAQSLEHDEHSCPFKKSKPHPASLASKKPKRETNSDSVPPGYEPISLLEALNGLRAVSPAIPSAPLYEEITYSGISDGLSQASCPLAAIDHILDSSRQKGRPQSKAPDSTLRSPSSPIHEEDEEKLSEDVDAPPPLGGAELALRESSSPESFITEEVDESSSPQQGTRAASIENVLQDSSPEHCGRGPPADIYLPALGPDSCSVGIDE

SEQ ID NO: 15994 - protein, 468 aa, Artificial Sequence
  Synthetic polypeptide
KRGSGRHLRTGVQCSAAHRSQDTGPARCPSQRNACTACGYPHSACYLARKRKAAPMRAAPWVNFGNIPRHRRSPVVQFHLNFDLDRGVFPVVIQAVVDEGDVVEVTGHAHVLLAAFEKHMDGSFSVKPLKQKQIVDRVSYLLQEIYGIENKNNQETKPSDDENSDNSNECVVCLSDLRDTLILPCRHLCLCTSCADTLRYQANNCPICRLPFRALLQIRAVRKKPGALSPVSFSPVLAQSLEHDEHSCPFKKSKPHPASLASKKPKRETNSDSVPPGYEPISLLEALNGLRAVSPAIPSAPLYEEITYSGISDGLSQASCPLAAIDHILDSSRQKGRPQSKAPDSTLRSPSSPIHEEDEEKLSEDVDAPPPLGGAELALRESSSPESFITEEVDESSSPQQGTRAASIENVLQDSSPEHCGRGPPADIYLPGRPTSMETAHGLATTSPTWPPLGGPSPDPSAAELTPL

SEQ ID NO: 15995 - protein, 422 aa, Artificial Sequence
  Synthetic polypeptide
KRGSGRHLRTGVQCSAAHRSQDTGPARCPSQRNACTACGYPHSACYLARKRKAAPMRAAPWVNFGNIPRHRRSPVVQFHLNFDLDRGVFPVVIQAVVDEGDVVEVTGHAHVLLAAFEKHMDGSFSVKPLKQKQIVDRVSYLLQEIYGIENKNNQETKPSDDENSDNSNECVVCLSDLRDTLILPCRHLCLCTSCADTLRYQANNCPICRLPFRALLQIRAVRKKPGALSPVSFSPVLAQSLEHDEHSNSDSVPPGYEPISLLEALNGLRAVSPAIPSAPLYEEITYSGISDGLSQASCPLAAIDHILDSSRQKGRPQSKAPDSTLRSPSSPIHEEDEEKLSEDVDAPPPLGGAELALRESSSPESFITEEVDESSSPQQGTRAASIENVLQDSSPEHCGRGPPADIYLPALGPDSCSVGIDE

SEQ ID NO: 15996 - protein, 446 aa, Artificial Sequence
  Synthetic polypeptide
KRGSGRHLRTGVQCSAAHRSQDTGPARCPSQRNACTACGYPHSACYLARKRKAAPMRAAPWVNFGNIPRHRRSPVVQFHLNFDLDRGVFPVVIQAVVDEGDVVEVTGHAHVLLAAFEKHMDGSFSVKPLKQKQIVDRVSYLLQEIYGIENKNNQETKPSDDENSDNSNECVVCLSDLRDTLILPCRHLCLCTSCADTLRYQANNCPICRLPFRALLQIRAVRKKPGALSPVSFSPVLAQSLEHDEHSNSDSVPPGYEPISLLEALNGLRAVSPAIPSAPLYEEITYSGISDGLSQASCPLAAIDHILDSSRQKGRPQSKAPDSTLRSPSSPIHEEDEEKLSEDVDAPPPLGGAELALRESSSPESFITEEVDESSSPQQGTRAASIENVLQDSSPEHCGRGPPADIYLPGRPTSMETAHGLATTSPTWPPLGGPSPDPSAAELTPL

SEQ ID NO: 15997 - protein, 212 aa, Artificial Sequence
  Synthetic polypeptide
KRGSGRHLRTGVQCSAAHRSQDTGPARCPSQRNACTACGYPHSACYLARKRKAAPMRAAPWVNFGNIPRHRRSPVVQFHLNFDLDRGVFPVVIQAVVDEGDVVEVTGHAHVLLAAFEKHMDGSFSVKPLKQKQIVDRVSYLLQEIYGIENKNNQETKPSDDENSDNSNECVVCLSDLRDTLILPCRHLCLCTSCADTLRYQANNCPICRLQL

SEQ ID NO: 15998 - protein, 17 aa, Artificial Sequence
  Synthetic polypeptide
TLETYLDTEGHLLCNSI

SEQ ID NO: 15999 - protein, 13 aa, Artificial Sequence
  Synthetic polypeptide
TQKVTCCAIPSEL

SEQ ID NO: 16000 - protein, 363 aa, Artificial Sequence
  Synthetic polypeptide
AQEFDISLANMVDRVSYLLQEIYGIENKNNQETKISWKVSQARFIMASGPRTTGAAPRGGSGAPGRASPQPREPSDDENSDNSNECVVCLSDLRDTLILPCRHLCLCTSCADTLRYQANNCPICRLPFRALLQIRAVRKKPGALSPVSFSPVLAQSLEHDEHSCPFKKSKPHPASLASKKPKRETNSDSVPPGYEPISLLEALNGLRAVSPAIPSAPLYEEITYSGISDGLSQASCPLAAIDHILDSSRQKGRPQSKAPDSTLRSPSSPIHEEDEEKLSEDVDAPPPLGGAELALRESSSPESFITEEVDESSSPQQGTRAASIENVLQDSSPEHCGRGPPADIYLPGRPTSMETAHGLATTS

SEQ ID NO: 16001 - protein, 136 aa, Artificial Sequence
  Synthetic polypeptide
AQEFDISLANMVDRVSYLLQEIYGIENKNNQETKPSDDENSDNSNECVVCLSDLRDTLILPCRHLCLCTSCADTLRYQANNCPICRLPFRALLQIRAVRKKPGALSPVSFSPVLAQSLEHDEHSCPFKKSKPHPAS

SEQ ID NO: 16002 - protein, 321 aa, Artificial Sequence
  Synthetic polypeptide
AQEFDISLANMVDRVSYLLQEIYGIENKNNQETKPSDDENSDNSNECVVCLSDLRDTLILPCRHLCLCTSCADTLRYQANNCPICRLPFRALLQIRAVRKKPGALSPVSFSPVLAQSLEHDEHSCPFKKSKPHPASLASKKPKRETNSDSVPPGYEPISLLEALNGLRAVSPAIPSAPLYEEITYSGISDGLSQASCPLAAIDHILDSSRQKGRPQSKAPDSTLRSPSSPIHEEDEEKLSEDVDAPPPLGGAELALRESSSPESFITEEVDESSSPQQGTRAASIENVLQDSSPEHCGRGPPADIYLPALGPDSCSVGIDE

SEQ ID NO: 16003 - protein, 345 aa, Artificial Sequence
  Synthetic polypeptide
AQEFDISLANMVDRVSYLLQEIYGIENKNNQETKPSDDENSDNSNECVVCLSDLRDTLILPCRHLCLCTSCADTLRYQANNCPICRLPFRALLQIRAVRKKPGALSPVSFSPVLAQSLEHDEHSCPFKKSKPHPASLASKKPKRETNSDSVPPGYEPISLLEALNGLRAVSPAIPSAPLYEEITYSGISDGLSQASCPLAAIDHILDSSRQKGRPQSKAPDSTLRSPSSPIHEEDEEKLSEDVDAPPPLGGAELALRESSSPESFITEEVDESSSPQQGTRAASIENVLQDSSPEHCGRGPPADIYLPGRPTSMETAHGLATTSPTWPPLGGPSPDPSAAELTPL

SEQ ID NO: 16004 - protein, 299 aa, Artificial Sequence
  Synthetic polypeptide
AQEFDISLANMVDRVSYLLQEIYGIENKNNQETKPSDDENSDNSNECVVCLSDLRDTLILPCRHLCLCTSCADTLRYQANNCPICRLPFRALLQIRAVRKKPGALSPVSFSPVLAQSLEHDEHSNSDSVPPGYEPISLLEALNGLRAVSPAIPSAPLYEEITYSGISDGLSQASCPLAAIDHILDSSRQKGRPQSKAPDSTLRSPSSPIHEEDEEKLSEDVDAPPPLGGAELALRESSSPESFITEEVDESSSPQQGTRAASIENVLQDSSPEHCGRGPPADIYLPALGPDSCSVGIDE

SEQ ID NO: 16005 - protein, 323 aa, Artificial Sequence
  Synthetic polypeptide
AQEFDISLANMVDRVSYLLQEIYGIENKNNQETKPSDDENSDNSNECVVCLSDLRDTLILPCRHLCLCTSCADTLRYQANNCPICRLPFRALLQIRAVRKKPGALSPVSFSPVLAQSLEHDEHSNSDSVPPGYEPISLLEALNGLRAVSPAIPSAPLYEEITYSGISDGLSQASCPLAAIDHILDSSRQKGRPQSKAPDSTLRSPSSPIHEEDEEKLSEDVDAPPPLGGAELALRESSSPESFITEEVDESSSPQQGTRAASIENVLQDSSPEHCGRGPPADIYLPGRPTSMETAHGLATTSPTWPPLGGPSPDPSAAELTPL

SEQ ID NO: 16006 - protein, 89 aa, Artificial Sequence
  Synthetic polypeptide
AQEFDISLANMVDRVSYLLQEIYGIENKNNQETKPSDDENSDNSNECVVCLSDLRDTLILPCRHLCLCTSCADTLRYQANNCPICRLQL

SEQ ID NO: 16007 - protein, 119 aa, Artificial Sequence
  Synthetic polypeptide
GWAQWLTPVIPALREAEVGRSLEPRSLISAWPTWWTGSATSCRRSMALRTRTTRRPRSLGKSHRPASLWHLGPGQLEQLHVAGAEHLAGPRLNPGNPRTTRTATTATSVWCACPTCGTR

SEQ ID NO: 16008 - protein, 80 aa, Artificial Sequence
  Synthetic polypeptide
GWAQWLTPVIPALREAEVGRSLEPRSLISAWPTWWTGSATSCRRSMALRTRTTRRPSPRTTRTATTATSVWCACPTCGTR

SEQ ID NO: 16009 - protein, 20 aa, Artificial Sequence
  Synthetic polypeptide
YQLGQHGGPGQLPPAGDLWH

SEQ ID NO: 16010 - protein, 41 aa, Artificial Sequence
  Synthetic polypeptide
PQLLPIHQGQLCHLLLTEPSPVSSGLSLWILTIGNSGCLWA

SEQ ID NO: 16011 - protein, 11 aa, Artificial Sequence
  Synthetic polypeptide
QWSLSLDSHNR

SEQ ID NO: 16012 - protein, 20 aa, Artificial Sequence
  Synthetic polypeptide
AMITPLHSSLGHHQLAAHHL

SEQ ID NO: 16013 - protein, 53 aa, Artificial Sequence
  Synthetic polypeptide
GWRIAWDWEFKSAVSHDHTPALQPGTSPACCTPSMRWWTPLSTTPQHPARCCG

SEQ ID NO: 16014 - protein, 324 aa, Artificial Sequence
  Synthetic polypeptide
SHPCTPAWDITSLLHTIYEVVDSSVNHSPTSSKMLRVKLTVAPDGSQSKRSVLVNQADLQSARPRAETKPTEDLRSWEKKQRAPLRFQGDSRLEQSGCYHHCVDENIERRNHYLDLAGIENYTSQFGPGSPSVAQKSELPPRTSNPTRSRSHEPEAIHIPHRKPQGVDPASFHFLDTPIAKVSELQQRLRGTQDGSKHFVRSPKAQGKSVGVGHVARGARNKPPLGPAIPAVSPSAHLAASPALLPSLAPLGHKKHKHRAKESQQGCRGLQAPLASGGPVLGREHLRELPALVVYESQAGQPVQRHEHHHHHEHHHHYHHFYQT

SEQ ID NO: 16015 - protein, 329 aa, Artificial Sequence
  Synthetic polypeptide
AMITPLHSSLGDRDITSLLHTIYEVVDSSVNHSPTSSKMLRVKLTVAPDGSQSKRSVLVNQADLQSARPRAETKPTEDLRSWEKKQRAPLRFQGDSRLEQSGCYHHCVDENIERRNHYLDLAGIENYTSQFGPGSPSVAQKSELPPRTSNPTRSRSHEPEAIHIPHRKPQGVDPASFHFLDTPIAKVSELQQRLRGTQDGSKHFVRSPKAQGKSVGVGHVARGARNKPPLGPAIPAVSPSAHLAASPALLPSLAPLGHKKHKHRAKESQQGCRGLQAPLASGGPVLGREHLRELPALVVYESQAGQPVQRHEHHHHHEHHHHYHHFYQT

SEQ ID NO: 16016 - protein, 11 aa, Artificial Sequence
  Synthetic polypeptide
QRHHQLAAHHL

SEQ ID NO: 16017 - protein, 39 aa, Artificial Sequence
  Synthetic polypeptide
SHPCTPAWVTETSPACCTPSMRWWTPLSTTPQHPARCCG

SEQ ID NO: 16018 - protein, 48 aa, Artificial Sequence
  Synthetic polypeptide
DLDIQEGMKSTGNDCPSWDYLASNSCLIGCVNFITCMAICCNFNSMLS

SEQ ID NO: 16019 - protein, 492 aa, Artificial Sequence
  Synthetic polypeptide
RALEMIVLLGIILLPIRVLLVALILLLAWPFAAISTVCCPEKLTHPITGWRRKITQTALKFLGRAMFFSMGFIVAVKGKIASPLEAPVFVAAPHSTFFDGIACVVAGLPSMVSRNENAQVPLIGRLLRAVQPVLVSRVDPDSRKNTINEIIKRTTSGGEWPQILVFPEGTCTNRSCLITFKPGAFIPGVPVQPVLLRYPNKLDTVTWTWQGYTFIQLCMLTFCQLFTKVEVEFMPVQVPNDEEKNDPVLFANKVRNLMAEALGIPVTDHTYEDCRLMISAGQLTLPMEAGLVEFTKISRKLKLDWDGVRKHLDEYASIASSSKGGRIGIEEFAKYLKLPVSDVLRQLFALFDRNHDGSIDFREYVIGLAVLCNPSNTEEIIQVAFKLFDVDEDGYITEEEFSTILQASLGVPDLDVSGLFKEIAQGDSISYEEFKSFALKHPEYAKIFTTYLDLQTCHVFSLPKEVQTTPSTASNKVSPEKHEESTSDKKDD

SEQ ID NO: 16020 - protein, 54 aa, Artificial Sequence
  Synthetic polypeptide
EGWLVEKIRVFFESDKSWAEFWPCDLHAFSLCQFKYQMMKKKMILSFLPIKSGI

SEQ ID NO: 16021 - protein, 29 aa, Artificial Sequence
  Synthetic polypeptide
GFFLNLTNLGLNSGHVTCMPLVYASSSTK

SEQ ID NO: 16022 - protein, 67 aa, Artificial Sequence
  Synthetic polypeptide
AAGVGYAVILIALYVGFYYNVIIAWSLYYLFSSFTLNLPWTDCGHTWNSPNCTDPKLLNGSVLGNHT

SEQ ID NO: 16023 - protein, 471 aa, Artificial Sequence
  Synthetic polypeptide
AAGVGYAVILIALYVGFYYNVIIAWSLYYLFSSFTLNLPWTDCGHTWNSPNCTDPKLLNGSVLGNHTKYSKYKFTPAAEFYERGVLHLHESSGIHDIGLPQWQLLLCLMVVVIVLYFSLWKGVKTSGKVVWITATLPYFVLFVLLVHGVTLPGASNGINAYLHIDFYRLKEATVWIDAATQIFFSLGAGFGVLIAFASYNKFDNNCYRDALLTSSINCITSFVSGFAIFSILGYMAHEHKVNIEDVATEGAGLVFILYPEAISTLSGSTFWAVVFFVMLLALGLDSSMGGMEAVITGLADDFQVLKRHRKLFTFGVTFSTFLLALFCITKGGIYVLTLLDTFAAGTSILFAVLMEAIGVSWFYGVDRFSNDIQQMMGFRPGLYWRLCWKFVSPAFLLFVVVVSIINFKPLTYDDYIFPPWANWVGWGIALSSMVLVPIYVIYKFLSTQGSLWEMKTRQGRRRATNSCQISC

SEQ ID NO: 16024 - protein, 484 aa, Artificial Sequence
  Synthetic polypeptide
AAGVGYAVILIALYVGFYYNVIIAWSLYYLFSSFTLNLPWTDCGHTWNSPNCTDPKLLNGSVLGNHTKYSKYKFTPAAEFYERGVLHLHESSGIHDIGLPQWQLLLCLMVVVIVLYFSLWKGVKTSGKVVWITATLPYFVLFVLLVHGVTLPGASNGINAYLHIDFYRLKEATVWIDAATQIFFSLGAGFGVLIAFASYNKFDNNCYRDALLTSSINCITSFVSGFAIFSILGYMAHEHKVNIEDVATEGAGLVFILYPEAISTLSGSTFWAVVFFVMLLALGLDSSMGGMEAVITGLADDFQVLKRHRKLFTFGVTFSTFLLALFCITKGGIYVLTLLDTFAAGTSILFAVLMEAIGVSWFYGVDRFSNDIQQMMGFRPGLYWRLCWKFVSPAFLLFVVVVSIINFKPLTYDDYIFPPWANWVGWGIALSSMVLVPIYVIYKFLSTQGSLWERLAYGITPENEHHLVAQRDIRQFQLQHWLAI

SEQ ID NO: 16025 - protein, 495 aa, Artificial Sequence
  Synthetic polypeptide
AAGVGYAVILIALYVGFYYNVIIAWSLYYLFSSFTLNLPWTDCGHTWNSPNCTDPKLLNGSVLGNHTKYSKYKFTPAAEFYERGVLHLHESSGIHDIGLPQWQLLLCLMVVVIVLYFSLWKGVKTSGKVVWITATLPYFVLFVLLVHGVTLPGASNGINAYLHIDFYRLKEATVWIDAATQIFFSLGAGFGVLIAFASYNKFDNNCYRDALLTSSINCITSFVSGFAIFSILGYMAHEHKVNIEDVATEGAGLVFILYPEAISTLSGSTFWAVVFFVMLLALGLDSSMGGMEAVITGLADDFQVLKRHRKLFTFGVTFSTFLLALFCITKGGIYVLTLLDTFAAGTSILFAVLMEAIGVSWFYGVDRFSNDIQQMMGFRPGLYWRLCWKFVSPAFLLFVVVVSIINFKPLTYDDYIFPPWANWVGWGIALSSMVLVPIYVIYKFLSTQGSLWERLAYGITPENEHHLVAQRDIRQFQMKTRQGRRRATNSCQISC

SEQ ID NO: 16026 - protein, 428 aa, Artificial Sequence
  Synthetic polypeptide
AAGVGYAVILIALYVGFYYNVIIAWSLYYLFSSFTLNLPWTDCGHTWNSPNCTDPKLLNGSVLGNHTKYSKYKFTPAAEFYERGVLHLHESSGIHDIGLPQWQLLLCLMVVVIVLYFSLWKGVKTSGKVVWITATLPYFVLFVLLVHGVTLPGASNGINAYLHIDFYRLKEATVWIDAATQIFFSLGAGFGVLIAFASYNKFDNNCYRDALLTSSINCITSFVSGFAIFSILGYMAHEHKVNIEDVATEGAGLVFILYPEAISTLSGSTFWAVVFFVMLLALGLDSSMGGMEAVITGLADDFQVLKRHRKLFTFGVTFSTFLLALFCITKGGIYVLTLLDTFAAGTSILFAVLMEAIGVSWFYGVDRFSNDIQQMMGFRPGLYWRLCWKFVSPAFLLRLAYGITPENEHHLVAQRDIRQFQLQHWLAI

SEQ ID NO: 16027 - protein, 162 aa, Artificial Sequence
  Synthetic polypeptide
AAGVGYAVILIALYVGFYYNVIIAWSLYYLFSSFTLNLPWTDCGHTWNSPNCTDPKLLNGSVLGNHTKYSKYKFTPAAEFYERGVLHLHESSGIHDIGLPQWQLLLCLMVVVIVLYFSLWKGVKTSGKVWIDAATQIFFSLGAGFGVLIAFASYNKFDNNCY

SEQ ID NO: 16028 - protein, 439 aa, Artificial Sequence
  Synthetic polypeptide
AAGVGYAVILIALYVGFYYNVIIAWSLYYLFSSFTLNLPWTDCGHTWNSPNCTDPKLLNGSVLGNHTKYSKYKFTPAAEFYERGVLHLHESSGIHDIGLPQWQLLLCLMVVVIVLYFSLWKGVKTSGKVWIDAATQIFFSLGAGFGVLIAFASYNKFDNNCYRDALLTSSINCITSFVSGFAIFSILGYMAHEHKVNIEDVATEGAGLVFILYPEAISTLSGSTFWAVVFFVMLLALGLDSSMGGMEAVITGLADDFQVLKRHRKLFTFGVTFSTFLLALFCITKGGIYVLTLLDTFAAGTSILFAVLMEAIGVSWFYGVDRFSNDIQQMMGFRPGLYWRLCWKFVSPAFLLFVVVVSIINFKPLTYDDYIFPPWANWVGWGIALSSMVLVPIYVIYKFLSTQGSLWERLAYGITPENEHHLVAQRDIRQFQLQHWLAI

SEQ ID NO: 16029 - protein, 18 aa, Artificial Sequence
  Synthetic polypeptide
EPGHTAGGEQRALAMLSS

SEQ ID NO: 16030 - protein, 89 aa, Artificial Sequence; identical to SEQ ID NO: 3783
  Synthetic polypeptide

SEQ ID NO: 16031 - protein, 103 aa, Artificial Sequence; identical to SEQ ID NO: 3580
  Synthetic polypeptide

SEQ ID NO: 16032 - protein, 7 aa, Artificial Sequence
  Synthetic polypeptide
FYIMDHP

SEQ ID NO: 16033 - protein, 131 aa, Artificial Sequence
  Synthetic polypeptide
LQENKLRAPTDSTLWIIHEDGFSGEDVKQYKPVVYSNTIQSLAAIVRAMDTLGIEYGDKERKADAKMVCDVVSRMEDTEPFSAELLSAMMRLWGDSGIQECFNRSREYQLNDSAKYYLDSLDRIGAADYQP

SEQ ID NO: 16034 - protein, 315 aa, Artificial Sequence
  Synthetic polypeptide
LQENKLRAPTDSTLWIIHEDGFSGEDVKQYKPVVYSNTIQSLAAIVRAMDTLGIEYGDKERKADAKMVCDVVSRMEDTEPFSAELLSAMMRLWGDSGIQECFNRSREYQLNDSAKYYLDSLDRIGAADYQPTEQDILRTRVKTTGIVETHFTFKNLHFRLFDVGGQRSERKKWIHCFEDVTAIIFCVALSGYDQVLHEDETTNRMHESLKLFDSICNNKWFTDTSIILFLNKKDIFEEKIKKSPLTICFPEYTGPSAFTEAVAYIQAQYESKNKSAHKEIYTHVTCATDTNNIQFVFDAVTDVIIAKNLRGCGLY

SEQ ID NO: 16035 - protein, 315 aa, Artificial Sequence
  Synthetic polypeptide
LQENKLRAPTDSTLWIIHEDGFSGEDVKQYKPVVYSNTIQSLAAIVRAMDTLGIEYGDKERKADAKMVCDVVSRMEDTEPFSAELLSAMMRLWGDSGIQECFNRSREYQLNDSAKYYLDSLDRIGAADYQPTEQDILRTRVKTTGIVETHFTFKNLHFRLFDVGGQRSERKKWIHCFEDVTAIIFCVALSGYDQVLHEDETTNRMHESLMLFDSICNNKFFIDTSIILFLNKKDLFGEKIKKSPLTICFPEYTGPNTYEDAAAYIQAQFESKNRSPNKEIYCHMTCATDTNNIQVVFDAVTDIIIANNLRGCGLY

SEQ ID NO: 16036 - protein, 31 aa, Artificial Sequence
  Synthetic polypeptide
TGPSSCRKTSSGLPLILHYGSSMKMASPEKT

SEQ ID NO: 16037 - protein, 12 aa, Artificial Sequence
  Synthetic polypeptide
ASWLTPRWCVMW

SEQ ID NO: 16038 - protein, 63 aa, Artificial Sequence
  Synthetic polypeptide
SRAARGWRCGLRSQAAGVQSQLYHLLAEGPSASLITHLIFGLSEYKMGETIILVNIKWSKPPG

SEQ ID NO: 16039 - protein, 77 aa, Artificial Sequence
  Synthetic polypeptide
TSNGVSLLADAKMVCDVVSRMEDTEPFSAELLSAMMRLWGDSGIQECFNRSREYQLNDSAKYYLDSLDRIGAADYQP

SEQ ID NO: 16040 - protein, 104 aa, Artificial Sequence
  Synthetic polypeptide
TSNGVSLLADAKMVCDVVSRMEDTEPFSAELLSAMMRLWGDSGIQECFNRSREYQLNDSAKYYLDSLDRIGAADYQPTEQDILRTRVKTTGIVETHFTFKNLHF

SEQ ID NO: 16041 - protein, 261 aa, Artificial Sequence
  Synthetic polypeptide
TSNGVSLLADAKMVCDVVSRMEDTEPFSAELLSAMMRLWGDSGIQECFNRSREYQLNDSAKYYLDSLDRIGAADYQPTEQDILRTRVKTTGIVETHFTFKNLHFRLFDVGGQRSERKKWIHCFEDVTAIIFCVALSGYDQVLHEDETTNRMHESLKLFDSICNNKWFTDTSIILFLNKKDIFEEKIKKSPLTICFPEYTGPSAFTEAVAYIQAQYESKNKSAHKEIYTHVTCATDTNNIQFVFDAVTDVIIAKNLRGCGLY

SEQ ID NO: 16042 - protein, 261 aa, Artificial Sequence
  Synthetic polypeptide
TSNGVSLLADAKMVCDVVSRMEDTEPFSAELLSAMMRLWGDSGIQECFNRSREYQLNDSAKYYLDSLDRIGAADYQPTEQDILRTRVKTTGIVETHFTFKNLHFRLFDVGGQRSERKKWIHCFEDVTAIIFCVALSGYDQVLHEDETTNRMHESLMLFDSICNNKFFIDTSIILFLNKKDLFGEKIKKSPLTICFPEYTGPNTYEDAAAYIQAQFESKNRSPNKEIYCHMTCATDTNNIQVVFDAVTDIIIANNLRGCGLY

SEQ ID NO: 16043 - protein, 124 aa, Artificial Sequence
  Synthetic polypeptide
ENEGDNRTYLMEPLWLLQDASKNTAQIWLPEVITECPDLDHHPAVGHGDLHHRPLHLSHLHQWQGQVRWHLLPHLPESGPRAWGLHRPHFRFRQCRGCGHAHGGLCRDRAGPAPGVWGTHRGPH

SEQ ID NO: 16044 - protein, 15 aa, Artificial Sequence
  Synthetic polypeptide
KHSADLAPRGDHGVS

SEQ ID NO: 16045 - protein, 865 aa, Artificial Sequence
  Synthetic polypeptide
SRSVLTWIIILLSVTVTSITGLSISAISTNGKVKSGGTYFLISRSLGPELGGSIGLIFAFANAVGVAMHTVGFAETVRDLLQEYGAPIVDPINDIRIIAVVSVTVLLAISLAGMEWESKAQVLFFLVIMVSFANYLVGTLIPPSEDKASKGFFSYRADIFVQNLVPDWRGPDGTFFGMFSIFFPSATGILAGANISGDLKDPAIAIPKGTLMAIFWTTISYLAISATIGSCVVRDASGVLNDTVTPGWGACEGLACSYGWNFTECTQQHSCHYGLINYYQTMSMVSGFAPLITAGIFGATLSSALACLVSAAKVFQCLCEDQLYPLIGFFGKGYGKNKEPVRGYLLAYAIAVAFIIIAELNTIAPIISNFFLCSYALINFSCFHASITNSPGWRPSFQYYNKWAALFGAIISVVIMFLLTWWAALIAIGVVLFLLLYVIYKKPEVNWGSSVQAGSYNLALSYSVGLNEVEDHIKNYRPQCLVLTGPPNFRPALVDFVGTFTRNLSLMICGHVLIGPHKQRMPELQLIANGHTKWLNKRKIKAFYSDVIAEDLRRGVQILMQAAGLGRMKPNILVVGFKKNWQSAHPATVEDYIGILHDAFDFNYGVCVMRMREGLNVSKMMQAHINPVFDPAEDGKEASARGARPSVSGALDPKALVKEEQATTIFQSEQGKKTIDIYWLFDDGGLTLLIPYLLGRKRRWSKCKIRVFVGGQINRMDQERKAIISLLSKFRLGFHEVHILPDINQNPRAEHTKRFEDMIAPFRLNDGFKDEATVNEMRRDCPWKISDEEITKNRVKSLRQVRLNEIVLDYSRDAALIVITLPIGRKGKCPSSLYMAWLETLSQDLRPPVILIRGNQENVLTFYCQ

SEQ ID NO: 16046 - protein, 856 aa, Artificial Sequence
  Synthetic polypeptide
SRSVLTWIIILLSVTVTSITGLSISAISTNGKVKSGGTYFLISRSLGPELGGSIGLIFAFANAVGVAMHTVGFAETVRDLLQEYGAPIVDPINDIRIIAVVSVTVLLAISLAGMEWESKAQVLFFLVIMVSFANYLVGTLIPPSEDKASKGFFSYRADIFVQNLVPDWRGPDGTFFGMFSIFFPSATGILAGANISGDLKDPAIAIPKGTLMAIFWTTISYLAISATIGSCVVRDASGVLNDTVTPGWGACEGLACSYGWNFTECTQQHSCHYGLINYYQTMSMVSGFAPLITAGIFGATLSSALACLVSAAKVFQCLCEDQLYPLIGFFGKGYGKNKEPVRGYLLAYAIAVAFIIIAELNTIAPIISNFFLCSYALINFSCFHASITNSPGWRPSFQYYNKWAALFGAIISVVIMFLLTWWAALIAIGVVLFLLLYVIYKKPEVNWGSSVQAGSYNLALSYSVGLNEVEDHIKNYRPQCLVLTGPPNFRPALVDFVGTFTRNLSLMICGHVLIGPHKQRMPELQLIANGHTKWLNKRKIKAFYSDVIAEDLRRGVQILMQAAGLGRMKPNILVVGFKKNWQSAHPATVEDYIGILHDAFDFNYGVCVMRMREGLNVSKMMQAHINPVFDPAEDGKEASARVDPKALVKEEQATTIFQSEQGKKTIDIYWLFDDGGLTLLIPYLLGRKRRWSKCKIRVFVGGQINRMDQERKAIISLLSKFRLGFHEVHILPDINQNPRAEHTKRFEDMIAPFRLNDGFKDEATVNEMRRDCPWKISDEEITKNRVKSLRQVRLNEIVLDYSRDAALIVITLPIGRKGKCPSSLYMAWLETLSQDLRPPVILIRGNQENVLTFYCQ

SEQ ID NO: 16047 - protein, 59 aa, Artificial Sequence
  Synthetic polypeptide
PISLSDLFGKSDPFLEFYKPGDDGKWMLVHRTEVIKYTLDPVWKPFTVPLVSLCDGDME

SEQ ID NO: 16048 - protein, 384 aa, Artificial Sequence
  Synthetic polypeptide
PISLSDLFGKSDPFLEFYKPGDDGKWMLVHRTEVIKYTLDPVWKPFTVPLVSLCDGDMEKPIQVMCYDYDNDGGHDFIGEFQTSVSQMCEARDSVPLEFECINPKKQRKKKNYKNSGIIILRSCKINRDYSFLDYILGGCQLMFTVGIDFTASNGNPLDPSSLHYINPMGTNEYLSAIWAVGQIIQDYDSDKMFPALGFGAQLPPDWKVSHEFAINFNPTNPFCSGVDGIAQAYSACLPHIRFYGPTNFSPIVNHVARFAAQATQQRTATQYFILLIITDGVISDMEETRHAVVQASKLPMSIIIVGVGNADFAAMEFLDGDSRMLRSHTGEEAARDIVQFVPFREFRNAAKETLAKAVLAELPQQVVQYFKHKNLPPTNSEPA

SEQ ID NO: 16049 - protein, 34 aa, Artificial Sequence
  Synthetic polypeptide
SPSHLVTSLGSQTPFWSFISQETMASGCWSTGLR

SEQ ID NO: 16050 - protein, 26 aa, Artificial Sequence
  Synthetic polypeptide
DRPGHRGGQQQQPGAAAQVPPRAAAA

SEQ ID NO: 16051 - protein, 14 aa, Artificial Sequence
  Synthetic polypeptide
FQHFGRPRQADHLR

SEQ ID NO: 16052 - protein, 440 aa, Artificial Sequence
  Synthetic polypeptide
GQARWLTPVIPTLWEAEAGGSLEIGQAIEEVNSNNQELLRKYRRELQLRKKCHNELVRLKGNIRVIARVRPVTKEDGEGPEATNAVTFDADDDSIIHLLHKGKPVSFELDKVFSPQASQQDEVQALVTSCIDGFNVCIFAYGQTGAGKTYTMEGTAENPGINQRALQLLFSEVQEKASDWEYTITVSAAEIYNEVLRDLLGKEPQEKLEIRLCPDGSGQLYVPGLTEFQVQSVDDINKVFEFGHTNRTTEFTNLNEHSSRSHALLIVTVRGVDCSTGLRTTGKLNLVDLAGSERVGKSGAEGSRLREAQHINKSLSALGDVIAALRSRQGHVPFRNSKLTYLLQDSLSGDSKTLMVVQVSPVEKNTSETLYSLKFAERVRSVELGPGLRRAELGSWSSQEHLEWEPACQTPQPSARAHSAPSSGTSSRPGSIRRKLQPSA

SEQ ID NO: 16053 - protein, 443 aa, Artificial Sequence
  Synthetic polypeptide
GQARWLTPVIPTLWEAEAGGSLEIGQAIEEVNSNNQELLRKYRRELQLRKKCHNELVRLKGNIRVIARVRPVTKEDGEGPEATNAVTFDADDDSIIHLLHKGKPVSFELDKVFSPQASQQDVFQEVQALVTSCIDGFNVCIFAYGQTGAGKTYTMEGTAENPGINQRALQLLFSEVQEKASDWEYTITVSAAEIYNEVLRDLLGKEPQEKLEIRLCPDGSGQLYVPGLTEFQVQSVDDINKVFEFGHTNRTTEFTNLNEHSSRSHALLIVTVRGVDCSTGLRTTGKLNLVDLAGSERVGKSGAEGSRLREAQHINKSLSALGDVIAALRSRQGHVPFRNSKLTYLLQDSLSGDSKTLMVVQVSPVEKNTSETLYSLKFAERVRSVELGPGLRRAELGSWSSQEHLEWEPACQTPQPSARAHSAPSSGTSSRPGSIRRKLQPSA

SEQ ID NO: 16054 - protein, 450 aa, Artificial Sequence
  Synthetic polypeptide
GQARWLTPVIPTLWEAEAGGSLEIGQAIEEVNSNNQELLRKYRRELQLRKKCHNELVRLKGNIRVIARVRPVTKEDGEGPEATNAVTFDADDDSIIHLLHKGKPVSFELDKVFSPQASQQDVFQEVQALVTSCIDGFNVCIFAYGQTGAGKTYTMEGTAENPGINQRALQLLFSEVQEKASDWEYTITVSAAEIYNEVLRDLLGKEPQEKLEIRLCPDGSGQLYVPGLTEFQVQSVDDINKVFEFGHTNRTTEFTNLNEHSSRSHALLIVTVRGVDCSTGLRTTGKLNLVDLAGSERVGKSGAEGSRLREAQHINKSLSALGDVIAALRSRQGHVPFRNSKLTYLLQDSLSGDSKTLMVVQVSPVEKNTSETLYSLKFAERVRSVELGPGLRRAELGSWSSQEHLEWEPACQTPQPSARAHSAPSSGTSSRPGSIRRKLQPSGKSRPLPV

SEQ ID NO: 16055 - protein, 254 aa, Artificial Sequence
  Synthetic polypeptide
GQARWLTPVIPTLWEAEAGGSLEIGQAIEEVNSNNQELLRKYRRELQLRKKCHNELVRLKGNIRVIARVRPVTKEDGEGPEATNAVTFDADDDSIIHLLHKGKPVSFELDKVFSPQASQQDVFQEVQALVTSCIDGFNVCIFAYGQTGAGKTYTMEGTAENPGINQRALQLLFSEVQEKASDWEYTITVSAAEIYNEVLRDLLGKEPQEKLEIRLCPDGSGQLYVPGLTEFQVQSVDDINKVWRREPLTTATLL

SEQ ID NO: 16056 - protein, 8 aa, Artificial Sequence
  Synthetic polypeptide
GLPSHVEL

SEQ ID NO: 16057 - protein, 52 aa, Artificial Sequence
  Synthetic polypeptide
KTCFVSPPPSARIVSFLRPPQPCGTVEHLKEKLISQAQEVSRLRSELGGTDL

SEQ ID NO: 16058 - protein, 66 aa, Artificial Sequence
  Synthetic polypeptide
KTCFVSPPPSARIVSFLRPPQPCGTVEHLKEKLISQAQEVSRLRSELGGTDLEKHRDLLMVENERL

SEQ ID NO: 16059 - protein, 82 aa, Artificial Sequence
  Synthetic polypeptide
KTCFVSPPPSARIVSFLRPPQPCGTVEHLKEKLISQAQEVSRLRSELGGTDLEKHRDLLMVENERLRQEMRRCEAELQELRT

SEQ ID NO: 16060 - protein, 145 aa, Artificial Sequence
  Synthetic polypeptide
KTCFVSPPPSARIVSFLRPPQPCGTVEHLKEKLISQAQEVSRLRSELGGTDLEKHRDLLMVENERLRQEMRRCEAELQELRTKPAGPCPGCEHSQESAQLRDKLSQLQLEMAESKGMLSELNLEVQQKTDRLAEVELRLKDCLAE

SEQ ID NO: 16061 - protein, 746 aa, Artificial Sequence
  Synthetic polypeptide
KTCFVSPPPSARIVSFLRPPQPCGTVEHLKEKLISQAQEVSRLRSELGGTDLEKHRDLLMVENERLRQEMRRCEAELQELRTKPAGPCPGCEHSQESAQLRDKLSQLQLEMAESKGMLSELNLEVQQKTDRLAEVELRLKDCLAEKAQEEERLSRRLRDSHETIASLRAQSPPVKYVIKTVEVESSKTKQALSESQARNQHLQEQVAMQRQVLKEMEQQLQSSHQLTARLRAQIAMYESELERAHGQMLEEMQSLEEDKNRAIEEAFARAQVEMKAVHENLAGVRTNLLTLQPALRTLTNDYNGLKRQVRGFPLLLQEALRSVKAEIGQAIEEVNSNNQELLRKYRRELQLRKKCHNELVRLKGNIRVIARVRPVTKEDGEGPEATNAVTFDADDDSIIHLLHKGKPVSFELDKVFSPQASQQDVFQEVQALVTSCIDGFNVCIFAYGQTGAGKTYTMEGTAENPGINQRALQLLFSEVQEKASDWEYTITVSAAEIYNEVLRDLLGKEPQEKLEIRLCPDGSGQLYVPGLTEFQVQSVDDINKVFEFGHTNRTTEFTNLNEHSSRSHALLIVTVRGVDCSTGLRTTGKLNLVDLAGSERVGKSGAEGSRLREAQHINKSLSALGDVIAALRSRQGHVPFRNSKLTYLLQDSLSGDSKTLMVVQVSPVEKNTSETLYSLKFAERVRSVELGPGLRRAELGSWSSQEHLEWEPACQTPQPSARAHSAPSSGTSSRPGSIRRKLQPSA

SEQ ID NO: 16062 - protein, 753 aa, Artificial Sequence
  Synthetic polypeptide
KTCFVSPPPSARIVSFLRPPQPCGTVEHLKEKLISQAQEVSRLRSELGGTDLEKHRDLLMVENERLRQEMRRCEAELQELRTKPAGPCPGCEHSQESAQLRDKLSQLQLEMAESKGMLSELNLEVQQKTDRLAEVELRLKDCLAEKAQEEERLSRRLRDSHETIASLRAQSPPVKYVIKTVEVESSKTKQALSESQARNQHLQEQVAMQRQVLKEMEQQLQSSHQLTARLRAQIAMYESELERAHGQMLEEMQSLEEDKNRAIEEAFARAQVEMKAVHENLAGVRTNLLTLQPALRTLTNDYNGLKRQVRGFPLLLQEALRSVKAEIGQAIEEVNSNNQELLRKYRRELQLRKKCHNELVRLKGNIRVIARVRPVTKEDGEGPEATNAVTFDADDDSIIHLLHKGKPVSFELDKVFSPQASQQDVFQEVQALVTSCIDGFNVCIFAYGQTGAGKTYTMEGTAENPGINQRALQLLFSEVQEKASDWEYTITVSAAEIYNEVLRDLLGKEPQEKLEIRLCPDGSGQLYVPGLTEFQVQSVDDINKVFEFGHTNRTTEFTNLNEHSSRSHALLIVTVRGVDCSTGLRTTGKLNLVDLAGSERVGKSGAEGSRLREAQHINKSLSALGDVIAALRSRQGHVPFRNSKLTYLLQDSLSGDSKTLMVVQVSPVEKNTSETLYSLKFAERVRSVELGPGLRRAELGSWSSQEHLEWEPACQTPQPSARAHSAPSSGTSSRPGSIRRKLQPSGKSRPLPV

SEQ ID NO: 16063 - protein, 126 aa, Artificial Sequence
  Synthetic polypeptide
KTCFVSPPPSARIVSFLRPPQPCGTVEHLKEKLISQAQEVSRLRSELHRDLLMVENERLRQEMRRCEAELQELRTKPAGPCPGCEHSQESAQLRDKLSQLQLEMAESKGMLSELNLEVQQKTDRLA

SEQ ID NO: 16064 - protein, 59 aa, Artificial Sequence
  Synthetic polypeptide
VLMRSDGLKVAVCPSCAHYLSPAAIEDMLCVSSSFCQDCKFPEASPAMWNCRTPEGEAH

SEQ ID NO: 16065 - protein, 38 aa, Artificial Sequence
  Synthetic polypeptide
AQEFTTSLDNIVEHLKEKLISQAQEVSRLRSELGGTDL

SEQ ID NO: 16066 - protein, 52 aa, Artificial Sequence
  Synthetic polypeptide
AQEFTTSLDNIVEHLKEKLISQAQEVSRLRSELGGTDLEKHRDLLMVENERL

SEQ ID NO: 16067 - protein, 68 aa, Artificial Sequence
  Synthetic polypeptide
AQEFTTSLDNIVEHLKEKLISQAQEVSRLRSELGGTDLEKHRDLLMVENERLRQEMRRCEAELQELRT

SEQ ID NO: 16068 - protein, 131 aa, Artificial Sequence
  Synthetic polypeptide
AQEFTTSLDNIVEHLKEKLISQAQEVSRLRSELGGTDLEKHRDLLMVENERLRQEMRRCEAELQELRTKPAGPCPGCEHSQESAQLRDKLSQLQLEMAESKGMLSELNLEVQQKTDRLAEVELRLKDCLAE

SEQ ID NO: 16069 - protein, 732 aa, Artificial Sequence
  Synthetic polypeptide
AQEFTTSLDNIVEHLKEKLISQAQEVSRLRSELGGTDLEKHRDLLMVENERLRQEMRRCEAELQELRTKPAGPCPGCEHSQESAQLRDKLSQLQLEMAESKGMLSELNLEVQQKTDRLAEVELRLKDCLAEKAQEEERLSRRLRDSHETIASLRAQSPPVKYVIKTVEVESSKTKQALSESQARNQHLQEQVAMQRQVLKEMEQQLQSSHQLTARLRAQIAMYESELERAHGQMLEEMQSLEEDKNRAIEEAFARAQVEMKAVHENLAGVRTNLLTLQPALRTLTNDYNGLKRQVRGFPLLLQEALRSVKAEIGQAIEEVNSNNQELLRKYRRELQLRKKCHNELVRLKGNIRVIARVRPVTKEDGEGPEATNAVTFDADDDSIIHLLHKGKPVSFELDKVFSPQASQQDVFQEVQALVTSCIDGFNVCIFAYGQTGAGKTYTMEGTAENPGINQRALQLLFSEVQEKASDWEYTITVSAAEIYNEVLRDLLGKEPQEKLEIRLCPDGSGQLYVPGLTEFQVQSVDDINKVFEFGHTNRTTEFTNLNEHSSRSHALLIVTVRGVDCSTGLRTTGKLNLVDLAGSERVGKSGAEGSRLREAQHINKSLSALGDVIAALRSRQGHVPFRNSKLTYLLQDSLSGDSKTLMVVQVSPVEKNTSETLYSLKFAERVRSVELGPGLRRAELGSWSSQEHLEWEPACQTPQPSARAHSAPSSGTSSRPGSIRRKLQPSA

SEQ ID NO: 16070 - protein, 739 aa, Artificial Sequence
  Synthetic polypeptide
AQEFTTSLDNIVEHLKEKLISQAQEVSRLRSELGGTDLEKHRDLLMVENERLRQEMRRCEAELQELRTKPAGPCPGCEHSQESAQLRDKLSQLQLEMAESKGMLSELNLEVQQKTDRLAEVELRLKDCLAEKAQEEERLSRRLRDSHETIASLRAQSPPVKYVIKTVEVESSKTKQALSESQARNQHLQEQVAMQRQVLKEMEQQLQSSHQLTARLRAQIAMYESELERAHGQMLEEMQSLEEDKNRAIEEAFARAQVEMKAVHENLAGVRTNLLTLQPALRTLTNDYNGLKRQVRGFPLLLQEALRSVKAEIGQAIEEVNSNNQELLRKYRRELQLRKKCHNELVRLKGNIRVIARVRPVTKEDGEGPEATNAVTFDADDDSIIHLLHKGKPVSFELDKVFSPQASQQDVFQEVQALVTSCIDGFNVCIFAYGQTGAGKTYTMEGTAENPGINQRALQLLFSEVQEKASDWEYTITVSAAEIYNEVLRDLLGKEPQEKLEIRLCPDGSGQLYVPGLTEFQVQSVDDINKVFEFGHTNRTTEFTNLNEHSSRSHALLIVTVRGVDCSTGLRTTGKLNLVDLAGSERVGKSGAEGSRLREAQHINKSLSALGDVIAALRSRQGHVPFRNSKLTYLLQDSLSGDSKTLMVVQVSPVEKNTSETLYSLKFAERVRSVELGPGLRRAELGSWSSQEHLEWEPACQTPQPSARAHSAPSSGTSSRPGSIRRKLQPSGKSRPLPV

SEQ ID NO: 16071 - protein, 112 aa, Artificial Sequence
  Synthetic polypeptide
AQEFTTSLDNIVEHLKEKLISQAQEVSRLRSELHRDLLMVENERLRQEMRRCEAELQELRTKPAGPCPGCEHSQESAQLRDKLSQLQLEMAESKGMLSELNLEVQQKTDRLA

SEQ ID NO: 16072 - protein, 24 aa, Artificial Sequence
  Synthetic polypeptide
EDRLSPGVHDQPGQYSRTPEGEAH

SEQ ID NO: 16073 - protein, 316 aa, Artificial Sequence
  Synthetic polypeptide
GQEFETSLTNMFVTVQTISGTGALRIGASFLQRFFKFSRDVFLPKPTWGNHTPIFRDAGMQLQGYRYYDPKTCGFDFTGAVEDISKIPEQSVLLLHACAHNPTGVDPRPEQWKEIATVVKKRNLFAFFDMAYQGFASGDGDKDAWAVRHFIEQGINVCLCQSYAKNMGLYGERVGAFTMVCKDADEAKRVESQLKILIRPMYSNPPLNGARIAAAILNTPDLRKQWLQEVKVMADRIIGMRTQLVSNLKKEGSTHNWQHITDQIGMFCFTGLKPEQVERLIKEFSIYMTKDGRISVAGVTSSNVGYLAHAIHQVTK

SEQ ID NO: 16074 - protein, 15 aa, Artificial Sequence
  Synthetic polypeptide
PICLSLCRPFLELEP

SEQ ID NO: 16075 - protein, 48 aa, Artificial Sequence
  Synthetic polypeptide
SQHFPGPRRVDHLRSGVRDQPDQYVCHCADHFWNWSLKDRSQFSAKIF

SEQ ID NO: 16076 - protein, 32 aa, Artificial Sequence
  Synthetic polypeptide
LSAPGGPMWKWDLQIPFWESLKPLRGTPIAKR

SEQ ID NO: 16077 - protein, 414 aa, Artificial Sequence
  Synthetic polypeptide
RMGRGRESEKITVSSWWTHVEMGPPDPILGVTEAFKRDTNSKKMNLGVGAYRDDNGKPYVLPSVRKAEAQIAAKNLDKEYLPIGGLAEFCKASAELALGENSEVLKSGRFVTVQTISGTGALRIGASFLQRFFKFSRDVFLPKPTWGNHTPIFRDAGMQLQGYRYYDPKTCGFDFTGAVEDISKIPEQSVLLLHACAHNPTGVDPRPEQWKEIATVVKKRNLFAFFDMAYQGFASGDGDKDAWAVRHFIEQGINVCLCQSYAKNMGLYGERVGAFTMVCKDADEAKRVESQLKILIRPMYSNPPLNGARIAAAILNTPDLRKQWLQEVKVMADRIIGMRTQLVSNLKKEGSTHNWQHITDQIGMFCFTGLKPEQVERLIKEFSIYMTKDGRISVAGVTSSNVGYLAHAIHQVTK

SEQ ID NO: 16078 - protein, 371 aa, Artificial Sequence
  Synthetic polypeptide
RMGRGRESEKITVSSWWTHVEMGPPDPILGVTEAFKRDTNSKKMNLGVGAYRDDNGKPYVLPSVRKFVTVQTISGTGALRIGASFLQRFFKFSRDVFLPKPTWGNHTPIFRDAGMQLQGYRYYDPKTCGFDFTGAVEDISKIPEQSVLLLHACAHNPTGVDPRPEQWKEIATVVKKRNLFAFFDMAYQGFASGDGDKDAWAVRHFIEQGINVCLCQSYAKNMGLYGERVGAFTMVCKDADEAKRVESQLKILIRPMYSNPPLNGARIAAAILNTPDLRKQWLQEVKVMADRIIGMRTQLVSNLKKEGSTHNWQHITDQIGMFCFTGLKPEQVERLIKEFSIYMTKDGRISVAGVTSSNVGYLAHAIHQVTK

SEQ ID NO: 16079 - protein, 45 aa, Artificial Sequence
  Synthetic polypeptide
RRGTTDTGAYLRVENGKRERIRKNNCQLLVDPCGNGTSRSHSGSH

SEQ ID NO: 16080 - protein, 277 aa, Artificial Sequence
  Synthetic polypeptide
DNTGNHSQISRVPVAIKVLDVNDNAPEFASEYEAFLCENGKPGQVIQTVSAMDKDDPKNGHYFLYSLLPEMVNNPNFTIKKNEDNSLSILAKHNGFNRQKQEVYLLPIIISDSGNPPLSSTSTLTIRVCGCSNDGVVQSCNVEAYVLPIGLSMGALIAILACIILLLVIVVLFVTLRRHKNEPLIIKDDEDVRENIIRYDDEGGGEEDTEAFDIATLQNPDGINGFLPRKDIKPDLQFMPRLQKRVARRNITRCCLKRKTVENHGFNELRGQDQKRK

SEQ ID NO: 16081 - protein, 331 aa, Artificial Sequence
  Synthetic polypeptide
DNTGNHSQISRVPVAIKVLDVNDNAPEFASEYEAFLCENGKPGQVIQTVSAMDKDDPKNGHYFLYSLLPEMVNNPNFTIKKNEDNSLSILAKHNGFNRQKQEVYLLPIIISDSGNPPLSSTSTLTIRVCGCSNDGVVQSCNVEAYVLPIGLSMGALIAILACIILLLVIVVLFVTLRRHKNEPLIIKDDEDVRENIIRYDDEGGGEEDTEAFDIATLQNPDGINGFLPRKDIKPDLQFMPRQGLAPVPNGVDVDEFINVRLHEADNDPTAPPYDSIQIYGYEGRGSVAGSLSSLESTTSDSDQNFDYLSDWGPRFKRLGELYSVGESDKET

SEQ ID NO: 16082 - protein, 276 aa, Artificial Sequence
  Synthetic polypeptide
DNTGNHSQISRVPVAIKVLDVNDNAPEFASEYEAFLCENGKPGQVIQTVSAMDKDDPKNGHYFLYSLLPEMVNNPNFTIKKNEDNSLSILAKHNGFNRQKQEVYLLPIIISDSGNPPLSSTSTLTIRVCGCSNDGVVQSCNVEAYVLPIGLSMGALIAILACIILLLVIVVLFVTLRRHKNEPLIIKDDEDVRENIIRYDDEGGGEEDTEAFDIATLQNPDGINGFLPRWGLPIQWWEERNPIQTCLFSRSRIPRSLLFIFFHKDTKINCITQWTT

SEQ ID NO: 16083 - protein, 64 aa, Artificial Sequence
  Synthetic polypeptide
DNTGNHSQISRVPVAIKVLDVNDNAPEFASEYEAFLCENGKPGQVNISMLLMLNMFVYNCLIFD

SEQ ID NO: 16084 - protein, 14 aa, Artificial Sequence
  Synthetic polypeptide
HREPQSDITSTCCY

SEQ ID NO: 16085 - protein, 52 aa, Artificial Sequence
  Synthetic polypeptide
SLLWELNEITQGTTVRYHEYLLLLKCWMSMTTPLNSHPNMRHFYVKMENPAK

SEQ ID NO: 16086 - protein, 116 aa, Artificial Sequence
  Synthetic polypeptide
SLLWELNEITQGTTVRYHEYLLLLKCWMSMTTPLNSHPNMRHFYVKMENPAKSFKLLAPWTKMIPKTDIISYTVSFQKWSTIRISPSRKMKIIPSVFWQSIMDSTARSKKSIFYQS

SEQ ID NO: 16087 - protein, 192 aa, Artificial Sequence
  Synthetic polypeptide
KISYREKAKKDAAAVGNHVAKLLQSIGQAPESISEKELKLLCSNSAFLRVVRCRSLAEEYGLDTINKDEIISSMDNPDNEIVLYLMLRAVDRFHKQQGRYPGVSNYQVEEDIGKLKSCLTGFLQEYGLSVMVKDDYVHEFCRYGAAEPHTIAAFLGGAAAQEVIKIITKQFVIFNNTYIYSGMSQTSATFQL

SEQ ID NO: 16088 - protein, 57 aa, Artificial Sequence
  Synthetic polypeptide
VQEFETIVGNIVRLPSLQIEKLVTVKKQRKMLPLWVIMLPNCCSPLARHQSPFQRKN

SEQ ID NO: 16089 - protein, 99 aa, Artificial Sequence
  Synthetic polypeptide
ARWLTPVIPALWEAEAGGSPEVRSSRPAWATWLWGDHGQEALESAHVCLINATATGTEILKNLVLPGIGSFTIIDGNQVSGEDAGNKTELKLPWNSYKN

SEQ ID NO: 16090 - protein, 146 aa, Artificial Sequence
  Synthetic polypeptide
ARWLTPVIPALWEAEAGGSPEVRSSRPAWATWLWGDHGQEALESAHVCLINATATGTEILKNLVLPGIGSFTIIDGNQVSGEDAGNNFFLQRSSIGKNRAEAAMEFLQELNSDVSGSFVEESPENLLDNDPSFFCRFTVVVATQLP

SEQ ID NO: 16091 - protein, 182 aa, Artificial Sequence
  Synthetic polypeptide
ARWLTPVIPALWEAEAGGSPEVRSSRPAWATWLWGDHGQEALESAHVCLINATATGTEILKNLVLPGIGSFTIIDGNQVSGEDAGNNFFLQRSSIGKNRAEAAMEFLQELNSDVSGSFVEESPENLLDNDPSFFCRFTVVVATQLPESTSLRLADVLWNSQIPLLICRTYGLVGYMRIIIKE

SEQ ID NO: 16092 - protein, 548 aa, Artificial Sequence
  Synthetic polypeptide
ARWLTPVIPALWEAEAGGSPEVRSSRPAWATWLWGDHGQEALESAHVCLINATATGTEILKNLVLPGIGSFTIIDGNQVSGEDAGNNFFLQRSSIGKNRAEAAMEFLQELNSDVSGSFVEESPENLLDNDPSFFCRFTVVVATQLPESTSLRLADVLWNSQIPLLICRTYGLVGYMRIIIKEHPVIESHPDNALEDLRLDKPFPELREHFQSYDLDHMEKKDHSHTPWIVIIAKYLAQWYSETNGRIPKTYKEKEDFRDLIRQGILKNENGAPEDEENFEEAIKNVNTALNTTQIPSSIEDIFNDDRCINITKQTPSFWILARALKEFVAKEGQGNLPVRGTIPDMIADSGKYIKLQNVYREKAKKDAAAVGNHVAKLLQSIGQAPESISEKELKLLCSNSAFLRVVRCRSLAEEYGLDTINKDEIISSMDNPDNEIVLYLMLRAVDRFHKQQGRYPGVSNYQVEEDIGKLKSCLTGFLQEYGLSVMVKDDYVHEFCRYGAAEPHTIAAFLGGAAAQEVIKIITKQFVIFNNTYIYSGMSQTSATFQL

SEQ ID NO: 16093 - protein, 551 aa, Artificial Sequence
  Synthetic polypeptide
ARWLTPVIPALWEAEAGGSPEVRSSRPAWATWLWGDHGQEALESAHVCLINATATGTEILKNLVLPGNVGIGSFTIIDGNQVSGEDAGNNFFLQRSSIGKNRAEAAMEFLQELNSDVSGSFVEESPENLLDNDPSFFCRFTVVVATQLPESTSLRLADVLWNSQIPLLICRTYGLVGYMRIIIKEHPVIESHPDNALEDLRLDKPFPELREHFQSYDLDHMEKKDHSHTPWIVIIAKYLAQWYSETNGRIPKTYKEKEDFRDLIRQGILKNENGAPEDEENFEEAIKNVNTALNTTQIPSSIEDIFNDDRCINITKQTPSFWILARALKEFVAKEGQGNLPVRGTIPDMIADSGKYIKLQNVYREKAKKDAAAVGNHVAKLLQSIGQAPESISEKELKLLCSNSAFLRVVRCRSLAEEYGLDTINKDEIISSMDNPDNEIVLYLMLRAVDRFHKQQGRYPGVSNYQVEEDIGKLKSCLTGFLQEYGLSVMVKDDYVHEFCRYGAAEPHTIAAFLGGAAAQEVIKIITKQFVIFNNTYIYSGMSQTSATFQL

SEQ ID NO: 16094 - protein, 14 aa, Artificial Sequence
  Synthetic polypeptide
GQEFETSLGNMVVG

SEQ ID NO: 16095 - protein, 34 aa, Artificial Sequence
  Synthetic polypeptide
SQHFGRPKRADHLRSGVRDQPGQHGCGVIMGKRL

SEQ ID NO: 16096 - protein, 24 aa, Artificial Sequence
  Synthetic polypeptide
ARWLTPVIPALWEAEAGGSPEVVG

SEQ ID NO: 16097 - protein, 10 aa, Artificial Sequence
  Synthetic polypeptide
GCGVIMGKRL

SEQ ID NO: 16098 - protein, 81 aa, Artificial Sequence
  Synthetic polypeptide
SQHFGRPKRADHLRLWGDHGQEALESAHVCLINATATGTEILKNLVLPGIGSFTIIDGNQVSGEDAGNKTELKLPWNSYKN

SEQ ID NO: 16099 - protein, 128 aa, Artificial Sequence
  Synthetic polypeptide
SQHFGRPKRADHLRLWGDHGQEALESAHVCLINATATGTEILKNLVLPGIGSFTIIDGNQVSGEDAGNNFFLQRSSIGKNRAEAAMEFLQELNSDVSGSFVEESPENLLDNDPSFFCRFTVVVATQLP

SEQ ID NO: 16100 - protein, 164 aa, Artificial Sequence
  Synthetic polypeptide
SQHFGRPKRADHLRLWGDHGQEALESAHVCLINATATGTEILKNLVLPGIGSFTIIDGNQVSGEDAGNNFFLQRSSIGKNRAEAAMEFLQELNSDVSGSFVEESPENLLDNDPSFFCRFTVVVATQLPESTSLRLADVLWNSQIPLLICRTYGLVGYMRIIIKE

SEQ ID NO: 16101 - protein, 530 aa, Artificial Sequence
  Synthetic polypeptide
SQHFGRPKRADHLRLWGDHGQEALESAHVCLINATATGTEILKNLVLPGIGSFTIIDGNQVSGEDAGNNFFLQRSSIGKNRAEAAMEFLQELNSDVSGSFVEESPENLLDNDPSFFCRFTVVVATQLPESTSLRLADVLWNSQIPLLICRTYGLVGYMRIIIKEHPVIESHPDNALEDLRLDKPFPELREHFQSYDLDHMEKKDHSHTPWIVIIAKYLAQWYSETNGRIPKTYKEKEDFRDLIRQGILKNENGAPEDEENFEEAIKNVNTALNTTQIPSSIEDIFNDDRCINITKQTPSFWILARALKEFVAKEGQGNLPVRGTIPDMIADSGKYIKLQNVYREKAKKDAAAVGNHVAKLLQSIGQAPESISEKELKLLCSNSAFLRVVRCRSLAEEYGLDTINKDEIISSMDNPDNEIVLYLMLRAVDRFHKQQGRYPGVSNYQVEEDIGKLKSCLTGFLQEYGLSVMVKDDYVHEFCRYGAAEPHTIAAFLGGAAAQEVIKIITKQFVIFNNTYIYSGMSQTSATFQL

SEQ ID NO: 16102 - protein, 533 aa, Artificial Sequence
  Synthetic polypeptide
SQHFGRPKRADHLRLWGDHGQEALESAHVCLINATATGTEILKNLVLPGNVGIGSFTIIDGNQVSGEDAGNNFFLQRSSIGKNRAEAAMEFLQELNSDVSGSFVEESPENLLDNDPSFFCRFTVVVATQLPESTSLRLADVLWNSQIPLLICRTYGLVGYMRIIIKEHPVIESHPDNALEDLRLDKPFPELREHFQSYDLDHMEKKDHSHTPWIVIIAKYLAQWYSETNGRIPKTYKEKEDFRDLIRQGILKNENGAPEDEENFEEAIKNVNTALNTTQIPSSIEDIFNDDRCINITKQTPSFWILARALKEFVAKEGQGNLPVRGTIPDMIADSGKYIKLQNVYREKAKKDAAAVGNHVAKLLQSIGQAPESISEKELKLLCSNSAFLRVVRCRSLAEEYGLDTINKDEIISSMDNPDNEIVLYLMLRAVDRFHKQQGRYPGVSNYQVEEDIGKLKSCLTGFLQEYGLSVMVKDDYVHEFCRYGAAEPHTIAAFLGGAAAQEVIKIITKQFVIFNNTYIYSGMSQTSATFQL

SEQ ID NO: 16103 - protein, 67 aa, Artificial Sequence
  Synthetic polypeptide
QKAAQSSAQQRTTNRSDWKLPLRPCAGGKHTSGPKNRRVHRLHTPACPARGQRHPVWAAGPASGLAG

SEQ ID NO: 16104 - protein, 182 aa, Artificial Sequence
  Synthetic polypeptide
RKQRRAAHSSARQTDPTGSCLLDHVQVGSTPQDQRIVGYIACTHLHAPQEDSAIRCGQLDLLQDWLADFRKSTSSSSAANPEELVAFDVVCGDFNFDNCSSDDKLEQQHSLFTHYRDPCRLGPGEEKPWAIGTLLDTNGLYDEDVCTPDNLQKVLESEEGRREYLAFPTSKSSGQKGRKELL

SEQ ID NO: 16105 - protein, 238 aa, Artificial Sequence
  Synthetic polypeptide
RKQRRAAHSSARQTDPTGSCLLDHVQVGSTPQDQRIVGYIACTHLHAPQEDSAIRCGQLDLLQDWLADFRKSTSSSSAANPEELVAFDVVCGDFNFDNCSSDDKLEQQHSLFTHYRDPCRLGPGEEKPWAIGTLLDTNGLYDEDVCTPDNLQKVLESEEGRREYLAFPTSKSSGQKGRKELLKGNGRRIDYMLHAEEGLCPDWKAEVEEFSFITQLSGLTDHLPVAMRLMVSSGEEEA

SEQ ID NO: 16106 - protein, 221 aa, Artificial Sequence
  Synthetic polypeptide
RKQRRAAHSSARQTDPTGSCLLDHVQVGSTPQDQRIVGYIACTHLHAPQEDSAIRCGQLDLLQDWLADFRKSTSSSSAANPEELVAFDVVCGDFNFDNCSSDDKLEQQHSLFTHYRDPCRLGPGEEKPWAIGTLLDTNGLYDEDVCTPDNLQNKSSGQKGRKELLKGNGRRIDYMLHAEEGLCPDWKAEVEEFSFITQLSGLTDHLPVAMRLMVSSGEEEA

SEQ ID NO: 16107 - protein, 230 aa, Artificial Sequence
  Synthetic polypeptide
RKQRRAAHSSARQTDPTGSCLLDHVQVGSTPQDQRIVGYIACTHLHAPQEDSAIRCGQLDLLQDWLADFRKSTSSSSAANPEELVAFDVVCGDFNFDNCSSDDKLEQQHSLFTHYRDPCRLGPGTLLDTNGLYDEDVCTPDNLQKVLESEEGRREYLAFPTSKSSGQKGRKELLKGNGRRIDYMLHAEEGLCPDWKAEVEEFSFITQLSGLTDHLPVAMRLMVSSGEEEA

SEQ ID NO: 16108 - protein, 151 aa, Artificial Sequence
  Synthetic polypeptide
TMCRWEAHLRTKESSGTSPAHTCMPRKRTAPSGVGSWTCFRTGWLISENLPPRPAQPTPRSWWHLTSSVEISTLITAPLTTSWSSNTPCSPTTGTPAAWGLVLCWTRTACTMRMCAPPTTCRRSWRVRRAAGSTWRFPPARARARRGGRSC

SEQ ID NO: 16109 - protein, 159 aa, Artificial Sequence
  Synthetic polypeptide
TMCRWEAHLRTKESSGTSPAHTCMPRKRTAPSGVGSWTCFRTGWLISENLPPRPAQPTPRSWWHLTSSVEISTLITAPLTTSWSSNTPCSPTTGTPAAWGLVRRSRGPSVLCWTRTACTMRMCAPPTTCRRSWRVRRAAGSTWRFPPARARARRGGRSC

SEQ ID NO: 16110 - protein, 142 aa, Artificial Sequence
  Synthetic polypeptide
TMCRWEAHLRTKESSGTSPAHTCMPRKRTAPSGVGSWTCFRTGWLISENLPPRPAQPTPRSWWHLTSSVEISTLITAPLTTSWSSNTPCSPTTGTPAAWGLVRRSRGPSVLCWTRTACTMRMCAPPTTCRTRARARRGGRSC

SEQ ID NO: 16111 - protein, 29 aa, Artificial Sequence
  Synthetic polypeptide
GRMQWLMPVIPALWEAKAALPPLAREPFC

SEQ ID NO: 16112 - protein, 277 aa, Artificial Sequence
  Synthetic polypeptide
PDAVAHACNPSTLGGQGSPPTTGTGTLLLTLIDVNDHGPVPEPRQITICNQSPVRQVLNITDKDLSPHTSPFQAQLTDDSDIYWTAEVNEEGDTVVLSLKKFLKQDTYDVHLSLSDHGNKEQLTVIRATVCDCHGHVETCPGPWKGGFILPVLGAVLALLFLLLVLLLLVRKKRKIKEPLLLPEDDTRDNVFYYGEEGGGEEDQDYDITQLHRGLEARPEVVLRNDVAPTIIPTPMYRPRPANPDEIGNFIIEGRGERGSQRGNGGLQLARGRTRRS

SEQ ID NO: 16113 - protein, 322 aa, Artificial Sequence
  Synthetic polypeptide
PDAVAHACNPSTLGGQGSPPTTGTGTLLLTLIDVNDHGPVPEPRQITICNQSPVRQVLNITDKDLSPHTSPFQAQLTDDSDIYWTAEVNEEGDTVVLSLKKFLKQDTYDVHLSLSDHGNKEQLTVIRATVCDCHGHVETCPGPWKGGFILPVLGAVLALLFLLLVLLLLVRKKRKIKEPLLLPEDDTRDNVFYYGEEGGGEEDQDYDITQLHRGLEARPEVVLRNDVAPTIIPTPMYRPRPANPDEIGNFIIENLKAANTDPTAPPYDTLLVFDYEGSGSDAASLSSLTSSASDQDQDYDYLNEWGSRFKKLADMYGGGEDD

SEQ ID NO: 16114 - protein, 23 aa, Artificial Sequence
  Synthetic polypeptide
SQHFGRPRQPSHHWHGNPSANTD

SEQ ID NO: 16115 - protein, 11 aa, Artificial Sequence
  Synthetic polypeptide
HVRSASSACEF

SEQ ID NO: 16116 - protein, 777 aa, Artificial Sequence
  Synthetic polypeptide
VSMCEVLPVPVNFEDCTGRQRTAYFSLDTRFKVGTDGVITVKRPLRFHNPQIHFLVYAWDSTYRKFSTKVTLNTVGHHHRPPPHQASVSGIQAELLTFPNSSPGLRRQKRDWVIPPISCPENEKGPFPKNLVQIKSNKDKEGKVFYSITGQGADTPPVGVFIIERETGWLKVTEPLDRERIATYTLFSHAVSSNGNAVEDPMEILITVTDQNDNKPEFTQEVFKGSVMEGALPGTSVMEVTATDADDDVNTYNAAIAYTILSQDPELPDKNMFTINRNTGVISVVTTGLDRESFPTYTLVVQAADLQGEGLSTTATAVITVTDTNDNPPIFNPTTGLDFEAKQQYILHVAVTNVVPFEVSLTTSTATVTVDVLDVNEAPIFVPPEKRVEVSEDFGVGQEITSYTAQEPDTFMEQKITYRIWRDTANWLEINPDTGAISTRAELDREDFEHVKNSTYTALIIATDNGSPVATGTGTLLLILSDVNDNAPIPEPRTIFFCERNPKPQVINIIDADLPPNTSPFTAELTHGASANWTIQYNDPTQESIILKPKMALEVGDYKINLKLMDNQNKDQVTTLEVSVCDCEGAAGVCRKAQPVEAGLQIPAILGILGGILALLILILLLLLFLRRRAVVKEPLLPPEDDTRDNVYYYDEEGGGEEDQDFDLSQLHRGLDARPEVTRNDVAPTLMSVPRYLPRPANPDEIGNFIDENLKAADTDPTAPPYDSLLVFDYEGSGSEAASLSSLNSSESDKDQDYDYLNEWGNRFKKLADMYGGGEDD

SEQ ID NO: 16117 - protein, 493 aa, Artificial Sequence
  Synthetic polypeptide
VSMCEVLPVPVNFEDCTGRQRTAYFSLDTRFKVGTDGVITVKRPLRFHNPQIHFLVYAWDSTYRKFSTKVTLNTVGHHHRPPPHQASVSGIQAELLTFPNSSPGLRRQKRDWVIPPISCPENEKGPFPKNLVQIKSNKDKEGKVFYSITGQGADTPPVGVFIIERETGWLKVTEPLDRERIATYTLFSHAVSSNGNAVEDPMEILITVTDQNDNKPEFTQEVFKGSVMEGALPGTSVMEVTATDADDDVNTYNAAIAYTILSQDPELPDKNMFTINRNTGVISVVTTGLDRESFPTYTLVVQAADLQGEGLSTTATAVITVTDTNDNPPIFNPTTYKGQVPENEANVVITTLKVTDADAPNTPAWEAVYTILNDDGGQFVVTTNPVNNDGILKTAKGLDFEAKQQYILHVAVTNVVPFEVSLTTSTATVTVDVLDVNEAPIFVPPEKRVEVSEDFGVGQEITSYTAQEPDTFMEQKITFSSCYWNRDTSADPV

SEQ ID NO: 16118 - protein, 838 aa, Artificial Sequence
  Synthetic polypeptide
VSMCEVLPVPVNFEDCTGRQRTAYFSLDTRFKVGTDGVITVKRPLRFHNPQIHFLVYAWDSTYRKFSTKVTLNTVGHHHRPPPHQASVSGIQAELLTFPNSSPGLRRQKRDWVIPPISCPENEKGPFPKNLVQIKSNKDKEGKVFYSITGQGADTPPVGVFIIERETGWLKVTEPLDRERIATYTLFSHAVSSNGNAVEDPMEILITVTDQNDNKPEFTQEVFKGSVMEGALPGTSVMEVTATDADDDVNTYNAAIAYTILSQDPELPDKNMFTINRNTGVISVVTTGLDRESFPTYTLVVQAADLQGEGLSTTATAVITVTDTNDNPPIFNPTTYKGQVPENEANVVITTLKVTDADAPNTPAWEAVYTILNDDGGQFVVTTNPVNNDGILKTAKGLDFEAKQQYILHVAVTNVVPFEVSLTTSTATVTVDVLDVNEAPIFVPPEKRVEVSEDFGVGQEITSYTAQEPDTFMEQKITYRIWRDTANWLEINPDTGAISTRAELDREDFEHVKNSTYTALIIATDNGSPVATGTGTLLLILSDVNDNAPIPEPRTIFFCERNPKPQVINIIDADLPPNTSPFTAELTHGASANWTIQYNDPTQESIILKPKMALEVGDYKINLKLMDNQNKDQVTTLEVSVCDCEGAAGVCRKAQPVEAGLQIPAILGILGGILALLILILLLLLFLRRRAVVKEPLLPPEDDTRDNVYYYDEEGGGEEDQDFDLSQLHRGLDARPEVTRNDVAPTLMSVPRYLPRPANPDEIGNFIDENLKAADTDPTAPPYDSLLVFDYEGSGSEAASLSSLNSSESDKDQDYDYLNEWGNRFKKLADMYGGGEDD

SEQ ID NO: 16119 - protein, 370 aa, Artificial Sequence
  Synthetic polypeptide
VSMCEVLPVPVNFEDCTGRQRTAYFSLDTRFKVGTDGVITVKRPLRFHNPQIHFLVYAWDSTYRKFSTKVTLNTVGHHHRPPPHQASVSGIQAELLTFPNSSPGLRRQKRDWVIPPISCPENEKGPFPKNLVQLFSHAVSSNGNAVEDPMEILITVTDQNDNKPEFTQEVFKGSVMEGALPGTSVMEVTATDADDDVNTYNAAIAYTILSQDPELPDKNMFTINRNTGVISVVTTGLDRESFPTYTLVVQAADLQGEGLSTTATAVITVTDTNDNPPIFNPTTYKGQVPENEANVVITTLKVTDADAPNTPAWEAVYTILNDDGGQFVVTTNPVNNDGILKTAKVCMVPGKMQKLASSQLFIPLSPGLGF

SEQ ID NO: 16120 - protein, 13 aa, Artificial Sequence
  Synthetic polypeptide
GQEFRTSLTKSEF

SEQ ID NO: 16121 - protein, 769 aa, Artificial Sequence
  Synthetic polypeptide
PRVNFEDCTGRQRTAYFSLDTRFKVGTDGVITVKRPLRFHNPQIHFLVYAWDSTYRKFSTKVTLNTVGHHHRPPPHQASVSGIQAELLTFPNSSPGLRRQKRDWVIPPISCPENEKGPFPKNLVQIKSNKDKEGKVFYSITGQGADTPPVGVFIIERETGWLKVTEPLDRERIATYTLFSHAVSSNGNAVEDPMEILITVTDQNDNKPEFTQEVFKGSVMEGALPGTSVMEVTATDADDDVNTYNAAIAYTILSQDPELPDKNMFTINRNTGVISVVTTGLDRESFPTYTLVVQAADLQGEGLSTTATAVITVTDTNDNPPIFNPTTGLDFEAKQQYILHVAVTNVVPFEVSLTTSTATVTVDVLDVNEAPIFVPPEKRVEVSEDFGVGQEITSYTAQEPDTFMEQKITYRIWRDTANWLEINPDTGAISTRAELDREDFEHVKNSTYTALIIATDNGSPVATGTGTLLLILSDVNDNAPIPEPRTIFFCERNPKPQVINIIDADLPPNTSPFTAELTHGASANWTIQYNDPTQESIILKPKMALEVGDYKINLKLMDNQNKDQVTTLEVSVCDCEGAAGVCRKAQPVEAGLQIPAILGILGGILALLILILLLLLFLRRRAVVKEPLLPPEDDTRDNVYYYDEEGGGEEDQDFDLSQLHRGLDARPEVTRNDVAPTLMSVPRYLPRPANPDEIGNFIDENLKAADTDPTAPPYDSLLVFDYEGSGSEAASLSSLNSSESDKDQDYDYLNEWGNRFKKLADMYGGGEDD

SEQ ID NO: 16122 - protein, 485 aa, Artificial Sequence
  Synthetic polypeptide
PRVNFEDCTGRQRTAYFSLDTRFKVGTDGVITVKRPLRFHNPQIHFLVYAWDSTYRKFSTKVTLNTVGHHHRPPPHQASVSGIQAELLTFPNSSPGLRRQKRDWVIPPISCPENEKGPFPKNLVQIKSNKDKEGKVFYSITGQGADTPPVGVFIIERETGWLKVTEPLDRERIATYTLFSHAVSSNGNAVEDPMEILITVTDQNDNKPEFTQEVFKGSVMEGALPGTSVMEVTATDADDDVNTYNAAIAYTILSQDPELPDKNMFTINRNTGVISVVTTGLDRESFPTYTLVVQAADLQGEGLSTTATAVITVTDTNDNPPIFNPTTYKGQVPENEANVVITTLKVTDADAPNTPAWEAVYTILNDDGGQFVVTTNPVNNDGILKTAKGLDFEAKQQYILHVAVTNVVPFEVSLTTSTATVTVDVLDVNEAPIFVPPEKRVEVSEDFGVGQEITSYTAQEPDTFMEQKITFSSCYWNRDTSADPV

SEQ ID NO: 16123 - protein, 830 aa, Artificial Sequence
  Synthetic polypeptide
PRVNFEDCTGRQRTAYFSLDTRFKVGTDGVITVKRPLRFHNPQIHFLVYAWDSTYRKFSTKVTLNTVGHHHRPPPHQASVSGIQAELLTFPNSSPGLRRQKRDWVIPPISCPENEKGPFPKNLVQIKSNKDKEGKVFYSITGQGADTPPVGVFIIERETGWLKVTEPLDRERIATYTLFSHAVSSNGNAVEDPMEILITVTDQNDNKPEFTQEVFKGSVMEGALPGTSVMEVTATDADDDVNTYNAAIAYTILSQDPELPDKNMFTINRNTGVISVVTTGLDRESFPTYTLVVQAADLQGEGLSTTATAVITVTDTNDNPPIFNPTTYKGQVPENEANVVITTLKVTDADAPNTPAWEAVYTILNDDGGQFVVTTNPVNNDGILKTAKGLDFEAKQQYILHVAVTNVVPFEVSLTTSTATVTVDVLDVNEAPIFVPPEKRVEVSEDFGVGQEITSYTAQEPDTFMEQKITYRIWRDTANWLEINPDTGAISTRAELDREDFEHVKNSTYTALIIATDNGSPVATGTGTLLLILSDVNDNAPIPEPRTIFFCERNPKPQVINIIDADLPPNTSPFTAELTHGASANWTIQYNDPTQESIILKPKMALEVGDYKINLKLMDNQNKDQVTTLEVSVCDCEGAAGVCRKAQPVEAGLQIPAILGILGGILALLILILLLLLFLRRRAVVKEPLLPPEDDTRDNVYYYDEEGGGEEDQDFDLSQLHRGLDARPEVTRNDVAPTLMSVPRYLPRPANPDEIGNFIDENLKAADTDPTAPPYDSLLVFDYEGSGSEAASLSSLNSSESDKDQDYDYLNEWGNRFKKLADMYGGGEDD

SEQ ID NO: 16124 - protein, 362 aa, Artificial Sequence
  Synthetic polypeptide
PRVNFEDCTGRQRTAYFSLDTRFKVGTDGVITVKRPLRFHNPQIHFLVYAWDSTYRKFSTKVTLNTVGHHHRPPPHQASVSGIQAELLTFPNSSPGLRRQKRDWVIPPISCPENEKGPFPKNLVQLFSHAVSSNGNAVEDPMEILITVTDQNDNKPEFTQEVFKGSVMEGALPGTSVMEVTATDADDDVNTYNAAIAYTILSQDPELPDKNMFTINRNTGVISVVTTGLDRESFPTYTLVVQAADLQGEGLSTTATAVITVTDTNDNPPIFNPTTYKGQVPENEANVVITTLKVTDADAPNTPAWEAVYTILNDDGGQFVVTTNPVNNDGILKTAKVCMVPGKMQKLASSQLFIPLSPGLGF

SEQ ID NO: 16125 - protein, 786 aa, Artificial Sequence; identical to SEQ ID NO: 1643
  Synthetic polypeptide

SEQ ID NO: 16126 - protein, 502 aa, Artificial Sequence; identical to SEQ ID NO: 2031
  Synthetic polypeptide

SEQ ID NO: 16127 - protein, 847 aa, Artificial Sequence; identical to SEQ ID NO: 1609
  Synthetic polypeptide

SEQ ID NO: 16128 - protein, 379 aa, Artificial Sequence; identical to SEQ ID NO: 2288
  Synthetic polypeptide

SEQ ID NO: 16129 - protein, 22 aa, Artificial Sequence
  Synthetic polypeptide
CSPLPGSFFEPGFCKAGSFSEF

SEQ ID NO: 16130 - protein, 94 aa, Artificial Sequence
  Synthetic polypeptide
PGTVAHICNPSTLGGQVTPPQFSIVMEYCELGTLRELLDREKDLTLGKRMVLVLGAARGLYRLHHSEAPELHGKIRSSNFLVTQGYQVKIWVPG

SEQ ID NO: 16131 - protein, 214 aa, Artificial Sequence
  Synthetic polypeptide
PGTVAHICNPSTLGGQVTPPQFSIVMEYCELGTLRELLDREKDLTLGKRMVLVLGAARGLYRLHHSEAPELHGKIRSSNFLVTQGYQVKLAGFELRKTQTSMSLGTTREKTDRVKSTAYLSPQELEDVFYQYDVKSEIYSFGIVLWEIATGDIPFQGCNSEKIRKLVAVKRQQEPLGEDCPSELREIIDECRAHDPSVRPSVDEILKKLSTFSK

SEQ ID NO: 16132 - protein, 20 aa, Artificial Sequence
  Synthetic polypeptide
SQHFGRPSDSASILHCHGVL

SEQ ID NO: 16133 - protein, 8 aa, Artificial Sequence
  Synthetic polypeptide
GLSSHAEQ

SEQ ID NO: 16134 - protein, 36 aa, Artificial Sequence
  Synthetic polypeptide
PCRTMTVMILLCLPCLRHPSAVLPSSPAVMVLDLQG

SEQ ID NO: 16135 - protein, 1275 aa, Artificial Sequence
  Synthetic polypeptide
WFYRRLSPSLGSQSSLACHHVRRACFAFCRDFKFPEASLAMQNNDCDDPLVSALPQASFSSSSELSSSHGPGFARLNRRDGAGGWSPLVSNKYQWLQIDLGERMEVTAVATQGGYGSSNWVTSYLLMFSDSGWNWKQYRQEDSIWGFSGNANADSVVYYRLQPSIKARFLRFIPLEWNPKGRIGMRIEVFGCAYRSEVVDLDGKSSLLYRFDQKSLSPIKDIISLKFKTMQSDGILLHREGPNGDHITLQLRRARLFLLINSGEAKLPSTSTLVNLTLGSLLDDQHWHSVLIQRLGKQVNFTVDEHRHHFHARGEFNLMNLDYEGNVSFSCSQPQSMPVTFLSSRSYLALPDFSGEEEVSATFQFRTWNKAGLLLFSELQLISGGILLFLSDGKLKSNLYQPGKLPSDITAGVELNDGQWHSVSLSAKKNHLSVAVDGQMASAAPLLGPEQIYSGGTYYFGGCPDKSFGSKCKSPLGGFQGCMRLISISGKVVDLISVQQGSLGNFSDLQIDSCGISDRCLPNYCEHGGECSQSWSTFHCNCTNTGYRGATCHNSIYEQSCEAYKHRGNTSGFYYIDSDGSGPLEPFLLYCNMTETAWTIIQHNGSDLTRVRNTNPENPYAGFFEYVASMEQLQATINRAEHCEQEFTYYCKKSRLVNKQDGTPLSWWVGRTNETQTYWGGSSPDLQKCTCGLEGNCIDSQYYCNCDADRNEWTNDTGLLAYKEHLPVTKIVITDTGRLHSEAAYKLGPLLCQGDRSFWNSASFDTEASYLHFPTFHGELSADVSFFFKTTASSGVFLENLGIADFIRIELRSPTVVTFSFDVGNGPFEISVQSPTHFNDNQWHHVRVERNMKEASLQVDQLTPKTQPAPADGHVLLQLNSQLFVGGTATRQRGFLGCIRSLQLNGMTLDLEERAQVTPEVQPGCRGHCSSYGKLCRNGGKCRERPIGFFCDCTFSAYTGPFCSNEISAYFGSGSSVIYNFQENYLLSKNSSSHAASFHGDMKLSREMIKFSFRTTRTPSLLLFVSSFYKEYLSVIIAKNGDLQIRYKLNKYQEPDVVNFDFKNMADGQLHHIMINREEGVVFIEIDDNRRRQVHLSSGTEFSAVKSLVLGRILEHSDVDQDTALAGAQGFTGCLSAVQLSHVAPLKAALHPSHPDPVTVTGHVTESSCMAQPGTDATSRERTHSFADHSGTIDDREPLANAIKSDSAVIGGLIAVVIFILLCITAIAVRIYQQKRLYKRSEAKRSENVDSAEAVLKSELNIQNAVNENQKEYFF

SEQ ID NO: 16136 - protein, 1275 aa, Artificial Sequence
  Synthetic polypeptide
WFYRRLSPSLGSQSSLACHHVRRACFAFCRDFKFPEASLAMQNNDCDDPLVSALPQASFSSSSELSSSHGPGFARLNRRDGAGGWSPLVSNKYQWLQIDLGERMEVTAVATQGGYGSSNWVTSYLLMFSDSGWNWKQYRQEDSIWGFSGNANADSVVYYRLQPSIKARFLRFIPLEWNPKGRIGMRIEVFGCAYRSEVVDLDGKSSLLYRFDQKSLSPIKDIISLKFKTMQSDGILLHREGPNGDHITLQLRRARLFLLINSGEAKLPSTSTLVNLTLGSLLDDQHWHSVLIQRLGKQVNFTVDEHRHHFHARGEFNLMNLDYEGNVSFSCSQPQSMPVTFLSSRSYLALPDFSGEEEVSATFQFRTWNKAGLLLFSELQLISGGILLFLSDGKLKSNLYQPGKLPSDITAGVELNDGQWHSVSLSAKKNHLSVAVDGQMASAAPLLGPEQIYSGGTYYFGGCPDKSFGSKCKSPLGGFQGCMRLISISGKVVDLISVQQGSLGNFSDLQIDSCGISDRCLPNYCEHGGECSQSWSTFHCNCTNTGYRGATCHNSIYEQSCEAYKHRGNTSGFYYIDSDGSGPLEPFLLYCNMTETAWTIIQHNGSDLTRVRNTNPENPYAGFFEYVASMEQLQATINRAEHCEQEFTYYCKKSRLVNKQDGTPLSWWVGRTNETQTYWGGSSPDLQKCTCGLEGNCIDSQYYCNCDADRNEWTNDTGLLAYKEHLPVTKIVITDTGRLHSEAAYKLGPLLCQGDRSFWNSASFDTEASYLHFPTFHGELSADVSFFFKTTASSGVFLENLGIADFIRIELRSPTVVTFSFDVGNGPFEISVQSPTHFNDNQWHHVRVERNMKEASLQVDQLTPKTQPAPADGHVLLQLNSQLFVGGTATRQRGFLGCIRSLQLNGMTLDLEERAQVTPEVQPGCRGHCSSYGKLCRNGGKCRERPIGFFCDCTFSAYTGPFCSNEISAYFGSGSSVIYNFQENYLLSKNSSSHAASFHGDMKLSREMIKFSFRTTRTPSLLLFVSSFYKEYLSVIIAKNGSLQIRYKLNKYQEPDVVNFDFKNMADGQLHHIMINREEGVVFIEIDDNRRRQVHLSSGTEFSAVKSLVLGRILEHSDVDQDTALAGAQGFTGCLSAVQLSHVAPLKAALHPSHPDPVTVTGHVTESSCMAQPGTDATSRERTHSFADHSGTIDDREPLANAIKSDSAVIGGLIAVVIFILLCITAIAVRIYQQKRLYKRSEAKRSENVDSAEAVLKSELNIQNAVNENQKEYFF

SEQ ID NO: 16137 - protein, 1323 aa, Artificial Sequence
  Synthetic polypeptide
WFYRRLSPSLGSQSSLACHHVRRACFAFCRDFKFPEASLAMQNNDCDDPLVSALPQASFSSSSELSSSHGPGFARLNRRDGAGGWSPLVSNKYQWLQIDLGERMEVTAVATQGGYGSSNWVTSYLLMFSDSGWNWKQYRQEDSIWGFSGNANADSVVYYRLQPSIKARFLRFIPLEWNPKGRIGMRIEVFGCAYRSEVVDLDGKSSLLYRFDQKSLSPIKDIISLKFKTMQSDGILLHREGPNGDHITLQLRRARLFLLINSGEAKLPSTSTLVNLTLGSLLDDQHWHSVLIQRLGKQVNFTVDEHRHHFHARGEFNLMNLDYEISFGGIPAPGKSVSFPHRNFHGCLENLYYNGVDIIDLAKQQKPQIIAMGNVSFSCSQPQSMPVTFLSSRSYLALPDFSGEEEVSATFQFRTWNKAGLLLFSELQLISGGILLFLSDGKLKSNLYQPGKLPSDITAGVELNDGQWHSVSLSAKKNHLSVAVDGQMASAAPLLGPEQIYSGGTYYFGGCPDKSFGSKCKSPLGGFQGCMRLISISGKVVDLISVQQGSLGNFSDLQIDSCGISDRCLPNYCEHGGECSQSWSTFHCNCTNTGYRGATCHNSIYEQSCEAYKHRGNTSGFYYIDSDGSGPLEPFLLYCNMTETAWTIIQHNGSDLTRVRNTNPENPYAGFFEYVASMEQLQATINRAEHCEQEFTYYCKKSRLVNKQDGTPLSWWVGRTNETQTYWGGSSPDLQKCTCGLEGNCIDSQYYCNCDADRNEWTNDTGLLAYKEHLPVTKIVITDTGRLHSEAAYKLGPLLCQGDRSFWNSASFDTEASYLHFPTFHGELSADVSFFFKTTASSGVFLENLGIADFIRIELRSPTVVTFSFDVGNGPFEISVQSPTHFNDNQWHHVRVERNMKEASLQVDQLTPKTQPAPADGHVLLQLNSQLFVGGTATRQRGFLGCIRSLQLNGMTLDLEERAQVTPEVQPGCRGHCSSYGKLCRNGGKCRERPIGFFCDCTFSAYTGPFCSNEISAYFGSGSSVIYNFQENYLLSKNSSSHAASFHGDMKLSREMIKFSFRTTRTPSLLLFVSSFYKEYLSVIIAKNGDLQIRYKLNKYQEPDVVNFDFKNMADGQLHHIMINREEGVVFIEIDDNRRRQVHLSSGTEFSAVKSLVLGRILEHSDVDQDTALAGAQGFTGCLSAVQLSHVAPLKAALHPSHPDPVTVTGHVTESSCMAQPGTDATSRERTHSFADHSGTIDDREPLANAIKSDSAVIGGLIAVVIFILLCITAIAVRIYQQKRLYKRSEAKRSENVDSAEAVLKSELNIQNAVNENQKEYFF

SEQ ID NO: 16138 - protein, 1323 aa, Artificial Sequence
  Synthetic polypeptide
WFYRRLSPSLGSQSSLACHHVRRACFAFCRDFKFPEASLAMQNNDCDDPLVSALPQASFSSSSELSSSHGPGFARLNRRDGAGGWSPLVSNKYQWLQIDLGERMEVTAVATQGGYGSSNWVTSYLLMFSDSGWNWKQYRQEDSIWGFSGNANADSVVYYRLQPSIKARFLRFIPLEWNPKGRIGMRIEVFGCAYRSEVVDLDGKSSLLYRFDQKSLSPIKDIISLKFKTMQSDGILLHREGPNGDHITLQLRRARLFLLINSGEAKLPSTSTLVNLTLGSLLDDQHWHSVLIQRLGKQVNFTVDEHRHHFHARGEFNLMNLDYEISFGGIPAPGKSVSFPHRNFHGCLENLYYNGVDIIDLAKQQKPQIIAMGNVSFSCSQPQSMPVTFLSSRSYLALPDFSGEEEVSATFQFRTWNKAGLLLFSELQLISGGILLFLSDGKLKSNLYQPGKLPSDITAGVELNDGQWHSVSLSAKKNHLSVAVDGQMASAAPLLGPEQIYSGGTYYFGGCPDKSFGSKCKSPLGGFQGCMRLISISGKVVDLISVQQGSLGNFSDLQIDSCGISDRCLPNYCEHGGECSQSWSTFHCNCTNTGYRGATCHNSIYEQSCEAYKHRGNTSGFYYIDSDGSGPLEPFLLYCNMTETAWTIIQHNGSDLTRVRNTNPENPYAGFFEYVASMEQLQATINRAEHCEQEFTYYCKKSRLVNKQDGTPLSWWVGRTNETQTYWGGSSPDLQKCTCGLEGNCIDSQYYCNCDADRNEWTNDTGLLAYKEHLPVTKIVITDTGRLHSEAAYKLGPLLCQGDRSFWNSASFDTEASYLHFPTFHGELSADVSFFFKTTASSGVFLENLGIADFIRIELRSPTVVTFSFDVGNGPFEISVQSPTHFNDNQWHHVRVERNMKEASLQVDQLTPKTQPAPADGHVLLQLNSQLFVGGTATRQRGFLGCIRSLQLNGMTLDLEERAQVTPEVQPGCRGHCSSYGKLCRNGGKCRERPIGFFCDCTFSAYTGPFCSNEISAYFGSGSSVIYNFQENYLLSKNSSSHAASFHGDMKLSREMIKFSFRTTRTPSLLLFVSSFYKEYLSVIIAKNGSLQIRYKLNKYQEPDVVNFDFKNMADGQLHHIMINREEGVVFIEIDDNRRRQVHLSSGTEFSAVKSLVLGRILEHSDVDQDTALAGAQGFTGCLSAVQLSHVAPLKAALHPSHPDPVTVTGHVTESSCMAQPGTDATSRERTHSFADHSGTIDDREPLANAIKSDSAVIGGLIAVVIFILLCITAIAVRIYQQKRLYKRSEAKRSENVDSAEAVLKSELNIQNAVNENQKEYFF

SEQ ID NO: 16139 - protein, 115 aa, Artificial Sequence
  Synthetic polypeptide
GWASPFTSPFRGPRVGIGPRSERGCPVPHGRCQRHALLFLPGRPLPSAVTRGQRATGGPTVPPSLGSDGCSPRGPWLERQGRRLRPWTESWPTHLTFPASPLANSLASRVRRCPA

SEQ ID NO: 16140 - protein, 45 aa, Artificial Sequence
  Synthetic polypeptide
RADRELPVDPRCLPPWDLMGAALEDPGWRDRAGGCAPGRSPGQPT

SEQ ID NO: 16141 - protein, 30 aa, Artificial Sequence
  Synthetic polypeptide
CQLRAAANICRRFGLHSWISAESVPYQSAS

SEQ ID NO: 16142 - protein, 52 aa, Artificial Sequence
  Synthetic polypeptide
GSVFPLAEGRNDANFVLLLTSAEDLDCTPGFQQKVFHINQPAEFIEDQSILN

SEQ ID NO: 16143 - protein, 67 aa, Artificial Sequence
  Synthetic polypeptide
GSVFPLAEGRNDANFVLLLTSAEDLDCTPGFQQKVFHINQPAEFIEDQSILNCKQCHSKMLLDSSHI

SEQ ID NO: 16144 - protein, 175 aa, Artificial Sequence
  Synthetic polypeptide
GSVFPLAEGRNDANFVLLLTSAEDLDCTPGFQQKVFHINQPAEFIEDQSILNLTFSDCKGNDKLRYEVSSPYFKVNSDGGLVALRNITAVGKTLFVHARTPHAEDMAELVIVGGKDIQGSLQDIFKFARTSPVPRQKRSIVVSPILIPENQRQPFPRDVGKMKIWQVLCLARWLT

SEQ ID NO: 16145 - protein, 190 aa, Artificial Sequence
  Synthetic polypeptide
GSVFPLAEGRNDANFVLLLTSAEDLDCTPGFQQKVFHINQPAEFIEDQSILNLTFSDCKGNDKLRYEVSSPYFKVNSDGGLVALRNITAVGKTLFVHARTPHAEDMAELVIVGGKDIQGSLQDIFKFARTSPVPRQKRSIVVSPILIPENQRQPFPRDVGKRTHNPINSELLLNEGITADLNPCITILAI

SEQ ID NO: 16146 - protein, 713 aa, Artificial Sequence
  Synthetic polypeptide
GSVFPLAEGRNDANFVLLLTSAEDLDCTPGFQQKVFHINQPAEFIEDQSILNLTFSDCKGNDKLRYEVSSPYFKVNSDGGLVALRNITAVGKTLFVHARTPHAEDMAELVIVGGKDIQGSLQDIFKFARTSPVPRQKRSIVVSPILIPENQRQPFPRDVGKVVDSDRPERSKFRLTGKGVDQEPKGIFRINENTGSVSVTRTLDREVIAVYQLFVETTDVNGKTLEGPVPLEVIVIDQNDNRPIFREGPYIGHVMEGSPTGTTVMRMTAFDADDPATDNALLRYNIRQQTPDKPSPNMFYIDPEKGDIVTVVSPALLDRETLENPKYELIIEAQDMAGLDVGLTGTATATIMIDDKNDHSPKFTKKEFQATVEEGAVGVIVNLTVEDKDDPTTGAWRAAYTIINGNPGQSFEIHTNPQTNEGMLSVVKPLDYEISAFHTLLIKVENEDPLVPDVSYGPSSTATVHITVLDVNEGPVFYPDPMMVTRQEDLSVGSVLLTVNATDPDSLQHQTIRYSVYKDPAGWLNINPINGTVDTTAVLDRESPFVDNSVYTALFLAIDSGNPPATGTGTLLITLEDVNDNAPFIYPTVAEVCDDAKNLSVVILGASDKDLHPNTDPFKFEIHKQAVPDKVWKISKINNTHALVSLLQNLNKANYNLPIMVTDSGKPPMTNITDLRVQVCSCRNSKVDCNAAGALRFSLPSVLLLSLFSLACL

SEQ ID NO: 16147 - protein, 674 aa, Artificial Sequence
  Synthetic polypeptide
GSVFPLAEGRNDANFVLLLTSAEDLDCTPGFQQKVFHINQPAEFIEDQSILNLTFSDCKGNDKLRYEVSSPYFKVNSDGGLVALRNITAVGKTLFVHARTPHAEDMAELVIVGGKDIQGSLQVVDSDRPERSKFRLTGKGVDQEPKGIFRINENTGSVSVTRTLDREVIAVYQLFVETTDVNGKTLEGPVPLEVIVIDQNDNRPIFREGPYIGHVMEGSPTGTTVMRMTAFDADDPATDNALLRYNIRQQTPDKPSPNMFYIDPEKGDIVTVVSPALLDRETLENPKYELIIEAQDMAGLDVGLTGTATATIMIDDKNDHSPKFTKKEFQATVEEGAVGVIVNLTVEDKDDPTTGAWRAAYTIINGNPGQSFEIHTNPQTNEGMLSVVKPLDYEISAFHTLLIKVENEDPLVPDVSYGPSSTATVHITVLDVNEGPVFYPDPMMVTRQEDLSVGSVLLTVNATDPDSLQHQTIRYSVYKDPAGWLNINPINGTVDTTAVLDRESPFVDNSVYTALFLAIDSGNPPATGTGTLLITLEDVNDNAPFIYPTVAEVCDDAKNLSVVILGASDKDLHPNTDPFKFEIHKQAVPDKVWKISKINNTHALVSLLQNLNKANYNLPIMVTDSGKPPMTNITDLRVQVCSCRNSKVDCNAAGALRFSLPSVLLLSLFSLACL

SEQ ID NO: 16148 - protein, 56 aa, Artificial Sequence
  Synthetic polypeptide
GSVFPLAEGRNDANFVLLLTSAEDLDCTPGFQQKVFHINQPAEFIEDQSILNYVFY

SEQ ID NO: 16149 - protein, 44 aa, Artificial Sequence
  Synthetic polypeptide
LWSQVVLCASPSSRPFHWLSNGLESEAQFSHLQKEGMMPTSCCC

SEQ ID NO: 16150 - protein, 29 aa, Artificial Sequence
  Synthetic polypeptide
DMPFTFRHDCEASLATWNCILFTRTQQVG

SEQ ID NO: 16151 - protein, 210 aa, Artificial Sequence
  Synthetic polypeptide
LRGLLSHMELYSVYKDPAGWLNINPINGTVDTTAVLDRESPFVDNSVYTALFLAIDSGNPPATGTGTLLITLEDVNDNAPFIYPTVAEVCDDAKNLSVVILGASDKDLHPNTDPFKFEIHKQAVPDKVWKISKINNTHALVSLLQNLNKANYNLPIMVTDSGKPPMTNITDLRVQVCSCRNSKVDCNAAGALRFSLPSVLLLSLFSLACL

SEQ ID NO: 16152 - protein, 17 aa, Artificial Sequence
  Synthetic polypeptide
PHGTVFCLQGPSRLAEY

SEQ ID NO: 16153 - protein, 3 aa, Artificial Sequence
  Synthetic polypeptide
PGL

SEQ ID NO: 16154 - protein, 20 aa, Artificial Sequence
  Synthetic polypeptide
RCDSVKDFEMGRVSWISQVC

SEQ ID NO: 16155 - protein, 15 aa, Artificial Sequence
  Synthetic polypeptide
RILRWGEYLGLARSV

SEQ ID NO: 16156 - protein, 9 aa, Artificial Sequence
  Synthetic polypeptide
ARCSGSQVC

SEQ ID NO: 16157 - protein, 9 aa, Artificial Sequence
  Synthetic polypeptide
GQVQWLTGL

SEQ ID NO: 16158 - protein, 9 aa, Artificial Sequence
  Synthetic polypeptide
PGAVAHRSV

SEQ ID NO: 16159 - protein, 17 aa, Artificial Sequence
  Synthetic polypeptide
APRGACTTLQRLMNRVS

SEQ ID NO: 16160 - protein, 49 aa, Artificial Sequence
  Synthetic polypeptide
HRDRKQMSRSGGWKGRGECLLPGHRIFLWRAVKVFGDELHVVPAQHCKD

SEQ ID NO: 16161 - protein, 958 aa, Artificial Sequence
  Synthetic polypeptide
KCLGMSSTWCLHNIAKIDEQSELKAIEKEKKVTALPPKEACKCQKEDLARAFCVDLHTGLSEFSVTQRRLAHGWNEFVADNSEPVWKKYLDQFKNPLILLLLGSALVSVLTKEYEDAVSIATAVLVVVTVAFIQEYRSEKSLEELTKMVPPECNCLREGKLQHLLARELVPGDVVSLSIGDRIPADIRLTEVTDLLVDESSFTGEAEPCSKTDSPLTGGGDLTTLSNIVFMGTLVQYGRGQGVVIGTGESSQFGEVFKMMQAEETPKTPLQKSMDRLGKQLTLFSFGIIGLIMLIGWSQGKQLLSMFTIGVSLAVAAIPEGLPIVVMVTLVLGVLRMAKKRVIVKKLPIVETLGCCSVLCSDKTGTLTANEMTVTQLVTSDGLRAEVSGVGYDGQGTVCLLPSKEVIKEFSNVSVGKLVEAGCVANNAVIRKNAVMGQPTEGALMALAMKMDLSDIKNSYIRKKEIPFSSEQKWMAVKCSLKTEDQEDIYFMKGALEEVIRYCTMYNNGGIPLPLTPQQRSFCLQEEKRMGSLGLRVLALASGPELGRLTFLGLVGIIDPPRVGVKEAVQVLSESGVSVKMITGDALETALAIGRNIGLCNGKLQAMSGEEVDSVEKGELADRVGKVSVFFRTSPKHKLKIIKALQESGAIVAMTGDGVNDAVALKSADIGIAMGQTGTDVSKEAANMILVDDDFSAIMNAVEEGKGIFYNIKNFVRFQLSTSISALSLITLSTVFNLPSPLNAMQILWINIIMDGPPAQRSSQKTEVCCTAVRLGVEGRGESTWAGRAGLGVEPVDKDAFRQPPRSVRDTILSRALILKILMSAAIIISGTLFIFWKEMPEDRASTPRTTTMTFTCFVFFDLFNALTCRSQTKLIFEIGFLRNHMFLYSVLGSILGQLAVIYIPPLQRVFQTENLGALDLLFLTGLASSVFILSELLKLCEKYCCSPKRVQMHPEDV

SEQ ID NO: 16162 - protein, 929 aa, Artificial Sequence
  Synthetic polypeptide
KCLGMSSTWCLHNIAKIDEQSELKAIEKEKKVTALPPKEACKCQKEDLARAFCVDLHTGLSEFSVTQRRLAHGWNEFVADNSEPVWKKYLDQFKNPLILLLLGSALVSVLTKEYEDAVSIATAVLVVVTVAFIQEYRSEKSLEELTKMVPPECNCLREGKLQHLLARELVPGDVVSLSIGDRIPADIRLTEVTDLLVDESSFTGEAEPCSKTDSPLTGGGDLTTLSNIVFMGTLVQYGRGQGVVIGTGESSQFGEVFKMMQAEETPKTPLQKSMDRLGKQLTLFSFGIIGLIMLIGWSQGKQLLSMFTIGVSLAVAAIPEGLPIVVMVTLVLGVLRMAKKRVIVKKLPIVETLGCCSVLCSDKTGTLTANEMTVTQLVTSDGLRAEVSGVGYDGQGTVCLLPSKEVIKEFSNVSVGKLVEAGCVANNAVIRKNAVMGQPTEGALMALAMKMDLSDIKNSYIRKKEIPFSSEQKWMAVKCSLKTEDQEDIYFMKGALEEVIRYCTMYNNGGIPLPLTPQQRSFCLQEEKRMGSLGLRVLALASGPELGRLTFLGLVGIIDPPRVGVKEAVQVLSESGVSVKMITGDALETALAIGRNIGLCNGKLQAMSGEEVDSVEKGELADRVGKVSVFFRTSPKHKLKIIKALQESGAIVAMTGDGVNDAVALKSADIGIAMGQTGTDVSKEAANMILVDDDFSAIMNAVEEGKGIFYNIKNFVRFQLSTSISALSLITLSTVFNLPSPLNAMQILWINIIMDGPPAQSLGVEPVDKDAFRQPPRSVRDTILSRALILKILMSAAIIISGTLFIFWKEMPEDRASTPRTTTMTFTCFVFFDLFNALTCRSQTKLIFEIGFLRNHMFLYSVLGSILGQLAVIYIPPLQRVFQTENLGALDLLFLTGLASSVFILSELLKLCEKYCCSPKRVQMHPEDV

SEQ ID NO: 16163 - protein, 75 aa, Artificial Sequence
  Synthetic polypeptide
PGTVAHTCNPSTWEAEAGGSPEVRSSRPAWPTCAAHGRELLQREGRHPGPGCLCRRQAPGPGPDHPAGLRPDREG

SEQ ID NO: 16164 - protein, 360 aa, Artificial Sequence
  Synthetic polypeptide
QALWLTPVIPALGRPRQADHLKSGVRDQPGQHVLLTAVNCYSVKAATRVQDAFAAAKLLALALIILLGFVQIGKGDVSNLDPNFSFEGTKLDVGNIVLALYSGLFAYGGWNYLNFVTEEMINPYRNLPLAIIISLPIVTLVYVLTNLAYFTTLSTEQMLSSEAVAVDFGNYHLGVMSWIIPVFVGLSCFGSVNGSLFTSSRLFFVGSREGHLPSILSMIHPQLLTPVPSLVFTCVMTLLYAFSKDIFSVINFFSFFNWLCVALAIIGMIWLRHRKPELERPIKVNLALPVFFILACLFLIAVSFWKTPVECGIGFTIILSGLPVYFFGVWWKNKPKWLLQGIFSTTVLCQKLMQVVPQET

SEQ ID NO: 16165 - protein, 16 aa, Artificial Sequence
  Synthetic polypeptide
SQEFETSLANMCCSRP

SEQ ID NO: 16166 - protein, 129 aa, Artificial Sequence
  Synthetic polypeptide
AGQVLITGGIVATAGRFTQWYFGAYSIVAGVFVCLLEYPRGKRKKGSTMERWGQKYMTAVVKLFGPFTRNYYVRAVLHLLACVCCLVCRICKDPLQIRGAPIRRQGLGLSVPAGFLLATILGTACLAIA

SEQ ID NO: 16167 - protein, 117 aa, Artificial Sequence
  Synthetic polypeptide
AGQVLITGGIVATAGRFTQWYFGAYSIVAGVFVCLLEYPRGKRKKGSTMERWGQKYMTAVVKLFGPFTRNYYVRAVLHLLLSVPAGFLLATILGTACLAIASGIYLLAAVRGEQWTP

SEQ ID NO: 16168 - protein, 179 aa, Artificial Sequence
  Synthetic polypeptide
AGQVLITGGIVATAGRFTQWYFGAYSIVAGVFVCLLEYPRGKRKKGSTMERWGQKYMTAVVKLFGPFTRNYYVRAVLHLLLSVPAGFLLATILGTACLAIASGIYLLAAVRGEQWTPIEPKPRERPQIGGTIKQPPSNPPPRPPAEARKKPSEEEAAVAAGGPPGGPQVNPIPVTDEVV

SEQ ID NO: 16169 - protein, 194 aa, Artificial Sequence
  Synthetic polypeptide
AGQVLITGGIVATAGRFTQWYFGAYSIVAGVFVCLLEYPRGKRKKGSTMERWGQKYMTAVVKLFGPFTRNYYVRAVLHLLLSVPAGFLLATILGTACLAIASGIYLLSQVPPARRGNCPPLAVRLLVCVRGKGAALSVYAFRVWKWSSVSSLTDLPPAELSFRTPSCCQVLIWAVALFSGGHPHPPRLPAATHS

SEQ ID NO: 16170 - protein, 112 aa, Artificial Sequence
  Synthetic polypeptide
AGQVLITGGIVATAGRFTQWYFGAYSIVAGVFVCLLEYPRGKRKKGSTMERWGQKYMTAVVKLFGPFTRNYYVRAVLHLLLSVPAGFLLATILGTACLAIASGIYLLVSGAL

SEQ ID NO: 16171 - protein, 153 aa, Artificial Sequence
  Synthetic polypeptide
GRASPHHRGHRGHSWALHPVVLWCLLHCGGRVCVPAGVPPGEEEEGLHHGALGTEVHDRRGEAVRALYQELLCSGRPASPALGARRLPAGHHPWDRLPGHCERHLPTEPSPSCPQRQLPSPCCASSSVCAWERCSTFCVRLPRMEVEFCFKPH

SEQ ID NO: 16172 - protein, 113 aa, Artificial Sequence
  Synthetic polypeptide
GRASPHHRGHRGHSWALHPVVLWCLLHCGGRVCVPAGVPPGEEEEGLHHGALGTEVHDRRGEAVRALYQELLCSGRPASPALGARRLPAGHHPWDRLPGHCERHLPTGEWRPL

SEQ ID NO: 16173 - protein, 118 aa, Artificial Sequence
  Synthetic polypeptide
GRASPHHRGHRGHSWALHPVVLWCLLHCGGRVCVPAGVPPGEEEEGLHHGALGTEVHDRRGEAVRALYQELLCSGRPASPALGARRLPAGHHPWDRLPGHCERHLPTGGCAWRAVDAH

SEQ ID NO: 16174 - protein, 180 aa, Artificial Sequence
  Synthetic polypeptide
GRASPHHRGHRGHSWALHPVVLWCLLHCGGRVCVPAGVPPGEEEEGLHHGALGTEVHDRRGEAVRALYQELLCSGRPASPALGARRLPAGHHPWDRLPGHCERHLPTGGCAWRAVDAHRAQAPGAAADRRHHQAAAQQPPAAAPGRGPQEAQRGGGCGGGGGTPGRSPGQPHPGDRRGRV

SEQ ID NO: 16175 - protein, 91 aa, Artificial Sequence
  Synthetic polypeptide
GRASPHHRGHRGHSWALHPVVLWCLLHCGGRVCVPAGVPPGEEEEGLHHGALGTEVHDRRGEAVRALYQELLCSGRPASPGLCLLSSVQDL

SEQ ID NO: 16176 - protein, 56 aa, Artificial Sequence
  Synthetic polypeptide
QGKSSSPGASWPQLGASPSGTLVPTPLWRACLCACWSTPGGRGRRAPPWSAGDRST

SEQ ID NO: 16177 - protein, 68 aa, Artificial Sequence
  Synthetic polypeptide
DQPGQHKIPAAQRAEEEEDRQVRHGWPHHPLPHRHHLVPTALHVAGALRGWGCQPAHRCHRHPEAGRL

SEQ ID NO: 16178 - protein, 378 aa, Artificial Sequence
  Synthetic polypeptide
QLMPMVPALWEAKGGGSVEARSFKTSLGNIKYPQPKGQKKKKIVKYGMGGLIILFLIAIIWFPLLFMSLVRSVVGVVNQPIDVTVTLKLGGYEPLFTMSAQQPSIIPFTAQAYEELSRQFDPQPLAMQFISQYSPEDIVTAQIEGSSGALWRISPPSRAQMKRELYNGTADITLRFTWNFQRDLAKGGTVEYANEKHMLALAPNSTARRQLASLLEGTSDQSVVIPNLFPKYIRAPNGPEANPVKQLQPNEEADYLGVRIQLRREQGAGATGFLEWWVIELQECRTDCNLLPMVIFSDKHHGAVRVHRAGHRQVRARILQRDLALHYVRGAAVRGPHPQALPGHLPGAGDSGAGAGGGVVRQAHLPLPLTGDHDQVDS

SEQ ID NO: 16179 - protein, 394 aa, Artificial Sequence
  Synthetic polypeptide
QLMPMVPALWEAKGGGSVEARSFKTSLGNIKYPQPKGQKKKKIVKYGMGGLIILFLIAIIWFPLLFMSLVRSVVGVVNQPIDVTVTLKLGGYEPLFTMSAQQPSIIPFTAQAYEELSRQFDPQPLAMQFISQYSPEDIVTAQIEGSSGALWRISPPSRAQMKRELYNGTADITLRFTWNFQRDLAKGGTVEYANEKHMLALAPNSTARRQLASLLEGTSDQSVVIPNLFPKYIRAPNGPEANPVKQLQPNEEADYLGVRIQLRREQGAGATGFLEWWVIELQECRTDCNLLPMVIFSDKVSPPSLGFLAGYGIMGLYVSIVLVIGKFVRGFFSEISHSIMFEELPCVDRILKLCQDIFLVRETRELELEEELYAKLIFLYRSPETMIKWTREKE

SEQ ID NO: 16180 - protein, 20 aa, Artificial Sequence
  Synthetic polypeptide
AKITPLHSSLGNRARCHLKS

SEQ ID NO: 16181 - protein, 68 aa, Artificial Sequence; identical to SEQ ID NO: 4279
  Synthetic polypeptide

SEQ ID NO: 16182 - protein, 723 aa, Artificial Sequence; identical to SEQ ID NO: 1718
  Synthetic polypeptide

SEQ ID NO: 16183 - protein, 136 aa, Artificial Sequence
  Synthetic polypeptide
NPISTENTKISWAWWQMPVIPATQEAEAGESLEPGRRRLHDKRFSALGFGARIPPKYEVSHDFAINFNPEDDECEAILHPADPDGRRGDRHGRHTGGHCACLTPAHVHHHRGRGQRRLHRHAGPGRRRRRPALPTG

SEQ ID NO: 16184 - protein, 139 aa, Artificial Sequence
  Synthetic polypeptide
NPISTENTKISWAWWQMPVIPATQEAEAGESLEPGRRRLHDKRFSALGFGARIPPKYEVSHDFAINFNPEDDECEGIQGVVEAYQNCLPRVQLYGPTNVAPIISKVARVAAAEESTGKASQYYILLILTDGVVTDMADT

SEQ ID NO: 16185 - protein, 244 aa, Artificial Sequence
  Synthetic polypeptide
NPISTENTKISWAWWQMPVIPATQEAEAGESLEPGRRRLHDKRFSALGFGARIPPKYEVSHDFAINFNPEDDECEGIQGVVEAYQNCLPRVQLYGPTNVAPIISKVARVAAAEESTGKASQYYILLILTDGVVTDMADTREAIVRASRLPMSIIIVGVGNADFTDMQVLDGDDGVLRSPRGEPALRDIVQFVPFRELKNASPAALAKCVLAEVPKQVVEYYSHRGLPPRSLGVPAGEASPGCTP

SEQ ID NO: 16186 - protein, 106 aa, Artificial Sequence
  Synthetic polypeptide
SQLLRRLRQENHWNPGGGGYMTRGFPLWGLEPGSLPSMRCPMTLPSISTLRTMSVKASRAWWRPTRTACPGSSSTAPPTWRPSSPRWHAWRRPRRAPGKPLNTTSC

SEQ ID NO: 16187 - protein, 117 aa, Artificial Sequence
  Synthetic polypeptide
SQLLRRLRQENHWNPGGGGYMTRGFPLWGLEPGSLPSMRCPMTLPSISTLRTMSVKQYYILLILTDGVVTDMADTREAIVRASRLPMSIIIVGVGNADFTDMQVLDGDDGVLRSPRG

SEQ ID NO: 16188 - protein, 28 aa, Artificial Sequence
  Synthetic polypeptide
ARIAPLHSSLEPATMVVPLASSEAQLHR

SEQ ID NO: 16189 - protein, 643 aa, Artificial Sequence
  Synthetic polypeptide
ARIAPLHSSLEPATMVVPLASSEAQTVQSLGFAIYRALDWGLDESEERELSPQLERLIDLMANNDSEDSGCGAADEGYGGPEEEEEAEGVPRSVRTFAQAMRLCAARLTDPRGAQAHYQAVCRALFVETLELRAFLARVREAKEMLQKLREDEPHLETPRAELDSLGHTDWARLWVQLMRELRRGVKLKKVQEQEFNPLPTEFQLTPFEMLMQDIRARNYKLRKVMVDGDIPPRVKKDAHELILDFIRSRPPLKQVSERRLRPLPPKQRSLHEKILEEIKQERRLRPVRGEGWAARGFGSLPCILNACSGDAKSTSCINLSVTDAGGSAQRPRPRVLLKAPTLAEMEEMNTSEEEESPCGEVTLKRDRSFSEHDLAQLRSEVASGLQSATHPPGGTEPPRPRAGSAHVWRPGSRDQGTCPASVSDPSHPLLSNRGSSGDRPEASMTPDAKHLWLEFSHPVESLALTVEEVMDVRRVLVKAEMEKFLQNKELFSSLKKGKICCCCRAKFPLFSWPPSCLFCKRAVCTSCSIKMKMPSKKFGHIPVYTLGFESPQRVSAAKTAPIQRRDIFQSLQGPQWQSVEEAFPHIYSHGCVLKDVCSECTSFVADVVRSSRKSVDVLNTTPRRSRQTQSLYIPNTRTLDFK

SEQ ID NO: 16190 - protein, 595 aa, Artificial Sequence
  Synthetic polypeptide
ARIAPLHSSLEPATMVVPLASSEAQTVQSLGFAIYRALDWGLDESEERELSPQLERLIDLMANNDSEDSGCGAADEGYGGPEEEEEAEGVPRSVRTFAQAMRLCAARLTDPRGAQAHYQAVCRALFVETLELRAFLARVREAKEMLQKLREDEPHLETPRAELDSLGHTDWARLWVQLMRELRRGVKLKKVQEQEFNPLPTEFQLTPFEMLMQDIRARNYKLRKVMVDGDIPPRVKKDAHELILDFIRSRPPLKQVSERRLRPLPPKQRSLHEKILEEIKQERRLRPVRGEGWAARGFGSLPCILNACSGDAKSTSCINLSVTDAGGSAQRPRPRVLLKAPTLAEMEEMNTSEEEESPCGEVTLKRDRSFSEHDLAQLRSEVASGLQSATHPPGGTEPPRPRAGSAHVWRPGSRDQGTCPASVSDPSHPLLSNRGSSGDRPEASMTPDAKHLWLEFSHPVESLALTVEEVMDVRRVLVKAEMEKFLQNKELFSSLKKGKICCCCRAKFPLFSWPPSCLFCKRSLQGPQWQSVEEAFPHIYSHGCVLKDVCSECTSFVADVVRSSRKSVDVLNTTPRRSRQTQSLYIPNTRTLDFK

SEQ ID NO: 16191 - protein, 37 aa, Artificial Sequence
  Synthetic polypeptide
TWEAEVVVSQDCAIALQPRTCNHGRATSQLGSPAAQM

SEQ ID NO: 16192 - protein, 83 aa, Artificial Sequence
  Synthetic polypeptide
TWEAEVVVSQDCAIALQPRTCNHGRATSQLGSPDRAVPRLRHLPRAGLGAGRERGARTQPSAGAAHRPHGQQRQRGQRLRCRR

SEQ ID NO: 16193 - protein, 15 aa, Artificial Sequence
  Synthetic polypeptide
ADESTRYEPSALPVA

SEQ ID NO: 16194 - protein, 14 aa, Artificial Sequence
  Synthetic polypeptide
WLMSPQDMSRLHFL

SEQ ID NO: 16195 - protein, 12 aa, Artificial Sequence
  Synthetic polypeptide
AQQIQGCNEDAF

SEQ ID NO: 16196 - protein, 30 aa, Artificial Sequence
  Synthetic polypeptide
ARRGGSCLQFLHFGRLRWEDLLSPANSRLQ

SEQ ID NO: 16197 - protein, 141 aa, Artificial Sequence
  Synthetic polypeptide
QARWLMPAVPALWEAEVGGSLEPSKFKAAMKMPSKKFGHIPVYTLGFESPQRVSAAKTAPIQRRDIFQSLQGPQWQSVEEAFPHIYSHGCVLKDVCSECTSFVADVVRSSRKSVDVLNTTPRRSRQTQSLYIPNTRTLDFK

SEQ ID NO: 16198 - protein, 8 aa, Artificial Sequence
  Synthetic polypeptide
PALWEAEG

SEQ ID NO: 16199 - protein, 231 aa, Artificial Sequence
  Synthetic polypeptide
PGALGGRGVSPSRLRIGDQEFDSLPALLEFYKIHYLDTTTLIEPVSRSRQGSGVILRQEEAEYVRALFDFNGNDEEDLPFKKGDILRIRDKPEEQWWNAEDSEGKRGMIPVPYVEKYRPASASVSALIGGNQEGSHPQPLGGPEPGPYAQPSVNTPLPNLQNGPIYARVIQKRVPNAYDKTALALEVGELVKVTKINVSGQWEGECNGKRGHFPFTHVRLLDQQNPDEDFS

SEQ ID NO: 16200 - protein, 131 aa, Artificial Sequence
  Synthetic polypeptide
PGALGGRGVSPSRLRIGDQEFDSLPALLEFYKIHYLDTTTLIEPVSRSRQGSGVILRQEEAEYVRALFDFNGNDEEDLPFKKGDILRIRDKPEEQWWNAEDSEGKRGMIPVPYVEKYRPASASVSALIGGR

SEQ ID NO: 16201 - protein, 150 aa, Artificial Sequence
  Synthetic polypeptide
PGALGGRGVSPSRLRIGDQEFDSLPALLEFYKIHYLDTTTLIEPVSRSRQGSGVILRQEEECYTLLTLIYSVVLFSFWNHTIKWRQTVPFHPREVIMHRVNSIKQDCFHCMEHDQRVTHSDISDPKNSKNTTRSICSLLVNASYFFLGFF

SEQ ID NO: 16202 - protein, 20 aa, Artificial Sequence
  Synthetic polypeptide
RRFGRPRGEPLQTPNRRSRV

SEQ ID NO: 16203 - protein, 61 aa, Artificial Sequence
  Synthetic polypeptide
APEPAEPGAGRVRTRRPRQGCVQPHFYLARREDQQVAGLQGRGEPQLAEHHGSRAPGYLWL

SEQ ID NO: 16204 - protein, 9 aa, Artificial Sequence
  Synthetic polypeptide
PQHLGRLSS

SEQ ID NO: 16205 - protein, 715 aa, Artificial Sequence
  Synthetic polypeptide
RAPWLTPVTPALGEAELLSPLNLEQAAYARDALAKAVYSRTFTWLVGKINRSLASKDVESPSWRSTTVLGLLDIYGFEVFQHNSFEQFCINYCNEKLQQLFIELTLKSEQEEYEAEGIAWEPVQYFNNKIICDLVEEKFKGIISILDEECLRPGEATDLTFLEKLEDTVKHHPHFLTHKLADQRTRKSLGRGEFRLLHYAGEVTYSVTGFLDKNNDLLFRNLKETMCSSKNPIMSQCFDRSELSDKKRPETVATQFKMSLLQLVEILQSKEPAYVRCIKPNDAKQPGRFDEVLIRHQVKYLGLLENLRVRRAGFAYRRKYEAFLQRYKSLCPETWPTWAGRPQDGVAVLVRHLGYKPEEYKMGRTKIFIRFPKTLFATEDALEVRRQSLATKIQAAWRGFHWRQKFLRVKRSAICIQSWWRGTLGRRKAAKRKWAAQTIRRLIRGFVLRHAPRCPENAFFLDHVRTSFLLNLRRQLPQNVLDTSWPTPPPALREASELLRELCIKNMVWKYCRSISPEWKQQLQQKAVASEIFKGKKDNYPQSVPRLFISTRLGTDEISPRVLQALGSEPIQYAVPVVKYDRKGYKPRSRQLLLTPNAVVIVEDAKVKQRIDYANLTGISVSSLSDSLFVLHVQRADNKQKGDVVLQSDHVIETLTKTALSANRVNSININQGSITFAGGPGRDGTIDFTPGSELLITKAKNGHLAVVAPRLNSR

SEQ ID NO: 16206 - protein, 15 aa, Artificial Sequence
  Synthetic polypeptide
SGTSQPPEPVSMAEF

SEQ ID NO: 16207 - protein, 117 aa, Artificial Sequence; identical to SEQ ID NO: 3406
  Synthetic polypeptide

SEQ ID NO: 16208 - protein, 199 aa, Artificial Sequence; identical to SEQ ID NO: 2867
  Synthetic polypeptide

SEQ ID NO: 16209 - protein, 222 aa, Artificial Sequence
  Synthetic polypeptide
ILLPIPPRVGSLNTPIAMGSQEVLLLAAGLTAMLRQEVTGQGQQFLFQVLTFMIYIVSTVFCGHLGKVELASVTLAVAFVNVCGVSVGVGLSSACDTLMSQSFGSPNKKHVGVILQRGALVLLLCCLPCWALFLNTQHILLLFRQDPDVSRLTQDYVMIFIPGLPVIFLYNLLAKYLQNQAGERLCVPASSNSSTGMAEGAGGGVPIPNPGFVHPPSISLTP

SEQ ID NO: 16210 - protein, 605 aa, Artificial Sequence
  Synthetic polypeptide
ILLPIPPRVGSLNTPIAMGSQEVLLLAAGLTAMLRQEVTGQGQQFLFQVLTFMIYIVSTVFCGHLGKVELASVTLAVAFVNVCGVSVGVGLSSACDTLMSQSFGSPNKKHVGVILQRGALVLLLCCLPCWALFLNTQHILLLFRQDPDVSRLTQDYVMIFIPGLPVIFLYNLLAKYLQNQGWLKGQEEESPFQTPGLSILHPSHSHLSRASFHLFQKITWPQVLSGVVGNCVNGVANYALVSVLNLGVRGSAYANIISQFAQTVFLLLYIVLKKLHLETWAGWSSQCLQDWGPFFSLAVPSMLMICVEWWAYEIGSFLMGLLSVVDLSAQAVIYEVATVTYMIPLGLSIGVCVRVGMALGAADTVQAKRSAVSGVLSIVGISLVLGTLISILKNQLGHIFTNDEDVIALVSQVLPVYSVFHVFEAICCVYGGVLRGTGKQAFGAAVNAITYYIIGLPLGILLTFVVRMRIMGLWLGMLACVFLATAAFVAYTARLDWKLAAEEAKKHSGRQQQQRAESTATRPGPEKAVLSSVATGSSPGITLTTYSRSECHVDFFRTPEEAHALSAPTSRLSVKQLVIRRGAALGAASATLMVGLTVRILATRH

SEQ ID NO: 16211 - protein, 366 aa, Artificial Sequence
  Synthetic polypeptide
ILLPIPPRVGSLNTPIAMGSQEVLLLAAGLTAMLRQEVTGQGQQFLFQVLTFMIYIVSTVFCGHLGKVELASVTLAVAFVNVCGVSVGVGLSSACDTLMSQSFGSPNKKHVGVILQRGALVLLLCCLPCWALFLNTQHILLLFRQDPDVSRLTQDYVMIFIPGLPVIFLYNLLAKYLQNQKITWPQVLSGVVGNCVNGVANYALVSVLNLGVRGSAYANIISQFAQTVFLLLYIVLKKLHLETWAGWSSQCLQDWGPFFSLAVPSMLMICVEWWAYEIGSFLMGLLSVVDLSAQAVIYEVATVTYMIPLGLSIGVCVRVGMALGAADTVQAKRSAVSGVLSIVGISLVLGTLISILKNQLGHIFTN

SEQ ID NO: 16212 - protein, 583 aa, Artificial Sequence
  Synthetic polypeptide
ILLPIPPRVGSLNTPIAMGSQEVLLLAAGLTAMLRQEVTGQGQQFLFQVLTFMIYIVSTVFCGHLGKVELASVTLAVAFVNVCGVSVGVGLSSACDTLMSQSFGSPNKKHVGVILQRGALVLLLCCLPCWALFLNTQHILLLFRQDPDVSRLTQDYVMIFIPGLPVIFLYNLLAKYLQNQKITWPQVLSGVVGNCVNGVANYALVSVLNLGVRGSAYANIISQFAQTVFLLLYIVLKKLHLETWAGWSSQCLQDWGPFFSLAVPSMLMICVEWWAYEIGSFLMGLLSVVDLSAQAVIYEVATVTYMRHSHRLAYAAHVTRIPLGLSIGVCVRVGMALGAADTVQAKRSAVSGVLSIVGISLVLGTLISILKNQLGHIFTNDEDVIALVSQVLPVYSVFHVFEAICCVYGGVLRGTGKQAFGAAVNAITYYIIGLPLGILLTFVVRMRIMGLWLGMLACVFLATAAFVAYTARLDWKLAAEEAKKHSGRQQQQRAESTATRPGPEKAVLSSVATGSSPGITLTTYSRSECHVDFFRTPEEAHALSAPTSRLSVKQLVIRRGAALGAASATLMVGLTVRILATRH

SEQ ID NO: 16213 - protein, 11 aa, Artificial Sequence
  Synthetic polypeptide
QAKASSSCSRC

SEQ ID NO: 16214 - protein, 94 aa, Artificial Sequence
  Synthetic polypeptide
SSAYTSTCGLPEHPHRHGLPRSIASGCRAHCNAATGGDRPRPAVPVPGADFYDLHREHCVLRAPGQGGAGIGDPRGGLCQCLRSFCRSWFVFGM

SEQ ID NO: 16215 - protein, 801 aa, Artificial Sequence
  Synthetic polypeptide
RAKLVRYICKQRQCKLSVAPGERTPELNSYPRFSDWLYTFNVRPEVVQEIPRDLTLDALLEMNEAKVKETLRRCGASGDECGRLQYALTCLRKVTGLGGEHKEDSSWSSLDARRESGSGPSTDTLSAASLPWPPGSSQLGRAGNSAQGPRSISVSALPASDSPTPSFSEGLSDTCIPLHASGRLTPRALHSFITPPTTPQLRRHTKLKPPRTPPPPSRKVFQLLPSFPTLTRSKSHESQLGNRIDDVSSMRFDLSHGSPQMVRRDIGLSVTHRFSTKSWLSQVCHVCQKSMIFGVKCKHCRLKCHNKCTKEAPACRISFLPLTRLRRTESVPSDINNPVDRAAEPHFGTLPKALTKKEHPPAMNHLDSSSNPSSTTSSTPSSPAPFPTSSNPSSATTPPNPSPGQRDSRFNFPAAYFIHHRQQFIFPDISAFAHAAPLPEAADGTRLDDQPKADVLEAHEAEAEEPEAGKSEAEDDEDEVDDLPSSRRPWRGPISRKASQTSVYLQEWDIPFEQVELGEPIGQGRWGRVHRGRWHGEVAIRLLEMDGHNQDHLKLFKKEVMNYRQTRHENVVLFMGACMNPPHLAIITSFCKGRTLHSFVRDPKTSLDINKTRQIAQEIIKGMGYLHAKGIVHKDLKSKNVFYDNGKVVITDFGLFGISGVVREGRRENQLKLSHDWLCYLAPEIVREMTPGKDEDQLPFSKAADVYAFGTVWYELQARDWPLKNQAAEASIWQIGSGEGMKRVLTSVSLGKEVSEILSACWAFDLQERPSFSLLMDMLEKLPKLNRRLSHPGHFWKSAEL

SEQ ID NO: 16216 - protein, 847 aa, Artificial Sequence
  Synthetic polypeptide
RAKLVRYICKQRQCKLSVAPGERTPELNSYPRFSDWLYTFNVRPEVVQEIPRDLTLDALLEMNEAKVKETLRRCGASGDECGRLQYALTCLRKVTGLGGEHKEDSSWSSLDARRESGSGPSTDTLSAASLPWPPGSSQLGRAGNSAQGPRSISVSALPASDSPTPSFSEGLSDTCIPLHASGRLTPRALHSFITPPTTPQLRRHTKLKPPRTPPPPSRKVFQLLPSFPTLTRSKSHESQLGNRIDDVSSMRFDLSHGSPQMVRRDIGLSVTHRFSTKSWLSQVCHVCQKSMIFGVKCKHCRLKCHNKCTKEAPACRISFLPLTRLRRTESVPSDINNPVDRAAEPHFGTLPKALTKKEHPPAMNHLDSSSNPSSTTSSTPSSPAPFPTSSNPSSATTPPNPSPGQRDSRFNFPAAYFIHHRQQFIFPVPSAGHCWKCLLIAESLKENAFNISAFAHAAPLPEAADGTRLDDQPKADVLEAHEAEAEEPEAGKSEAEDDEDEVDDLPSSRRPWRGPISRKASQTSVYLQEWDIPFEQVELGEPIGQGRWGRVHRGRWHGEVAIRLLEMDGHNQDHLKLFKKEVMNYRQTRHENVVLFMGACMNPPHLAIITSFCKGRTLHSFVRDPKTSLDINKTRQIAQEIIKGMGYLHAKGIVHKDLKSKNVFYDNGKVVITDFGLFGISGVVREGRRENQLKLSHDWLCYLAPEIVREMTPGKDEDQLPFSKAADVYAFGTVWYELQARDWPLKNQAAEASIWQIGSGEGMKRVLTSVSLGKEVSEILSACWAFDLQERPSFSLLMDMLEKLPKLNRRLSHPGHFWKSADINSSKVVPRFERFGLGVLESSNPKM

SEQ ID NO: 16217 - protein, 14 aa, Artificial Sequence
  Synthetic polypeptide
SHLLLKGEAGPLHL

SEQ ID NO: 16218 - protein, 25 aa, Artificial Sequence
  Synthetic polypeptide
VPPVKSPSAEGRSWSVTFVSRGSAS

SEQ ID NO: 16219 - protein, 21 aa, Artificial Sequence
  Synthetic polypeptide
RVHPLPRRSWSVTFVSRGSAS

SEQ ID NO: 16220 - protein, 812 aa, Artificial Sequence
  Synthetic polypeptide
SHLLLKGTSSPKAKLVRYICKQRQCKLSVAPGERTPELNSYPRFSDWLYTFNVRPEVVQEIPRDLTLDALLEMNEAKVKETLRRCGASGDECGRLQYALTCLRKVTGLGGEHKEDSSWSSLDARRESGSGPSTDTLSAASLPWPPGSSQLGRAGNSAQGPRSISVSALPASDSPTPSFSEGLSDTCIPLHASGRLTPRALHSFITPPTTPQLRRHTKLKPPRTPPPPSRKVFQLLPSFPTLTRSKSHESQLGNRIDDVSSMRFDLSHGSPQMVRRDIGLSVTHRFSTKSWLSQVCHVCQKSMIFGVKCKHCRLKCHNKCTKEAPACRISFLPLTRLRRTESVPSDINNPVDRAAEPHFGTLPKALTKKEHPPAMNHLDSSSNPSSTTSSTPSSPAPFPTSSNPSSATTPPNPSPGQRDSRFNFPAAYFIHHRQQFIFPDISAFAHAAPLPEAADGTRLDDQPKADVLEAHEAEAEEPEAGKSEAEDDEDEVDDLPSSRRPWRGPISRKASQTSVYLQEWDIPFEQVELGEPIGQGRWGRVHRGRWHGEVAIRLLEMDGHNQDHLKLFKKEVMNYRQTRHENVVLFMGACMNPPHLAIITSFCKGRTLHSFVRDPKTSLDINKTRQIAQEIIKGMGYLHAKGIVHKDLKSKNVFYDNGKVVITDFGLFGISGVVREGRRENQLKLSHDWLCYLAPEIVREMTPGKDEDQLPFSKAADVYAFGTVWYELQARDWPLKNQAAEASIWQIGSGEGMKRVLTSVSLGKEVSEILSACWAFDLQERPSFSLLMDMLEKLPKLNRRLSHPGHFWKSAEL

SEQ ID NO: 16221 - protein, 858 aa, Artificial Sequence
  Synthetic polypeptide
SHLLLKGTSSPKAKLVRYICKQRQCKLSVAPGERTPELNSYPRFSDWLYTFNVRPEVVQEIPRDLTLDALLEMNEAKVKETLRRCGASGDECGRLQYALTCLRKVTGLGGEHKEDSSWSSLDARRESGSGPSTDTLSAASLPWPPGSSQLGRAGNSAQGPRSISVSALPASDSPTPSFSEGLSDTCIPLHASGRLTPRALHSFITPPTTPQLRRHTKLKPPRTPPPPSRKVFQLLPSFPTLTRSKSHESQLGNRIDDVSSMRFDLSHGSPQMVRRDIGLSVTHRFSTKSWLSQVCHVCQKSMIFGVKCKHCRLKCHNKCTKEAPACRISFLPLTRLRRTESVPSDINNPVDRAAEPHFGTLPKALTKKEHPPAMNHLDSSSNPSSTTSSTPSSPAPFPTSSNPSSATTPPNPSPGQRDSRFNFPAAYFIHHRQQFIFPVPSAGHCWKCLLIAESLKENAFNISAFAHAAPLPEAADGTRLDDQPKADVLEAHEAEAEEPEAGKSEAEDDEDEVDDLPSSRRPWRGPISRKASQTSVYLQEWDIPFEQVELGEPIGQGRWGRVHRGRWHGEVAIRLLEMDGHNQDHLKLFKKEVMNYRQTRHENVVLFMGACMNPPHLAIITSFCKGRTLHSFVRDPKTSLDINKTRQIAQEIIKGMGYLHAKGIVHKDLKSKNVFYDNGKVVITDFGLFGISGVVREGRRENQLKLSHDWLCYLAPEIVREMTPGKDEDQLPFSKAADVYAFGTVWYELQARDWPLKNQAAEASIWQIGSGEGMKRVLTSVSLGKEVSEILSACWAFDLQERPSFSLLMDMLEKLPKLNRRLSHPGHFWKSADINSSKVVPRFERFGLGVLESSNPKM

SEQ ID NO: 16222 - protein, 24 aa, Artificial Sequence
  Synthetic polypeptide
VPPVKSPSAEGYILSQGEAGPLHL

SEQ ID NO: 16223 - protein, 801 aa, Artificial Sequence
  Synthetic polypeptide
EAKLVRYICKQRQCKLSVAPGERTPELNSYPRFSDWLYTFNVRPEVVQEIPRDLTLDALLEMNEAKVKETLRRCGASGDECGRLQYALTCLRKVTGLGGEHKEDSSWSSLDARRESGSGPSTDTLSAASLPWPPGSSQLGRAGNSAQGPRSISVSALPASDSPTPSFSEGLSDTCIPLHASGRLTPRALHSFITPPTTPQLRRHTKLKPPRTPPPPSRKVFQLLPSFPTLTRSKSHESQLGNRIDDVSSMRFDLSHGSPQMVRRDIGLSVTHRFSTKSWLSQVCHVCQKSMIFGVKCKHCRLKCHNKCTKEAPACRISFLPLTRLRRTESVPSDINNPVDRAAEPHFGTLPKALTKKEHPPAMNHLDSSSNPSSTTSSTPSSPAPFPTSSNPSSATTPPNPSPGQRDSRFNFPAAYFIHHRQQFIFPDISAFAHAAPLPEAADGTRLDDQPKADVLEAHEAEAEEPEAGKSEAEDDEDEVDDLPSSRRPWRGPISRKASQTSVYLQEWDIPFEQVELGEPIGQGRWGRVHRGRWHGEVAIRLLEMDGHNQDHLKLFKKEVMNYRQTRHENVVLFMGACMNPPHLAIITSFCKGRTLHSFVRDPKTSLDINKTRQIAQEIIKGMGYLHAKGIVHKDLKSKNVFYDNGKVVITDFGLFGISGVVREGRRENQLKLSHDWLCYLAPEIVREMTPGKDEDQLPFSKAADVYAFGTVWYELQARDWPLKNQAAEASIWQIGSGEGMKRVLTSVSLGKEVSEILSACWAFDLQERPSFSLLMDMLEKLPKLNRRLSHPGHFWKSAEL

SEQ ID NO: 16224 - protein, 847 aa, Artificial Sequence
  Synthetic polypeptide
EAKLVRYICKQRQCKLSVAPGERTPELNSYPRFSDWLYTFNVRPEVVQEIPRDLTLDALLEMNEAKVKETLRRCGASGDECGRLQYALTCLRKVTGLGGEHKEDSSWSSLDARRESGSGPSTDTLSAASLPWPPGSSQLGRAGNSAQGPRSISVSALPASDSPTPSFSEGLSDTCIPLHASGRLTPRALHSFITPPTTPQLRRHTKLKPPRTPPPPSRKVFQLLPSFPTLTRSKSHESQLGNRIDDVSSMRFDLSHGSPQMVRRDIGLSVTHRFSTKSWLSQVCHVCQKSMIFGVKCKHCRLKCHNKCTKEAPACRISFLPLTRLRRTESVPSDINNPVDRAAEPHFGTLPKALTKKEHPPAMNHLDSSSNPSSTTSSTPSSPAPFPTSSNPSSATTPPNPSPGQRDSRFNFPAAYFIHHRQQFIFPVPSAGHCWKCLLIAESLKENAFNISAFAHAAPLPEAADGTRLDDQPKADVLEAHEAEAEEPEAGKSEAEDDEDEVDDLPSSRRPWRGPISRKASQTSVYLQEWDIPFEQVELGEPIGQGRWGRVHRGRWHGEVAIRLLEMDGHNQDHLKLFKKEVMNYRQTRHENVVLFMGACMNPPHLAIITSFCKGRTLHSFVRDPKTSLDINKTRQIAQEIIKGMGYLHAKGIVHKDLKSKNVFYDNGKVVITDFGLFGISGVVREGRRENQLKLSHDWLCYLAPEIVREMTPGKDEDQLPFSKAADVYAFGTVWYELQARDWPLKNQAAEASIWQIGSGEGMKRVLTSVSLGKEVSEILSACWAFDLQERPSFSLLMDMLEKLPKLNRRLSHPGHFWKSADINSSKVVPRFERFGLGVLESSNPKM

SEQ ID NO: 16225 - protein, 10 aa, Artificial Sequence
  Synthetic polypeptide
MRGEAGPLHL

SEQ ID NO: 16226 - protein, 21 aa, Artificial Sequence
  Synthetic polypeptide
TRSMNERRSWSVTFVSRGSAS

SEQ ID NO: 16227 - protein, 820 aa, Artificial Sequence
  Synthetic polypeptide
MGERVLDRTRRPSWHCLLLCAKLVRYICKQRQCKLSVAPGERTPELNSYPRFSDWLYTFNVRPEVVQEIPRDLTLDALLEMNEAKVKETLRRCGASGDECGRLQYALTCLRKVTGLGGEHKEDSSWSSLDARRESGSGPSTDTLSAASLPWPPGSSQLGRAGNSAQGPRSISVSALPASDSPTPSFSEGLSDTCIPLHASGRLTPRALHSFITPPTTPQLRRHTKLKPPRTPPPPSRKVFQLLPSFPTLTRSKSHESQLGNRIDDVSSMRFDLSHGSPQMVRRDIGLSVTHRFSTKSWLSQVCHVCQKSMIFGVKCKHCRLKCHNKCTKEAPACRISFLPLTRLRRTESVPSDINNPVDRAAEPHFGTLPKALTKKEHPPAMNHLDSSSNPSSTTSSTPSSPAPFPTSSNPSSATTPPNPSPGQRDSRFNFPAAYFIHHRQQFIFPDISAFAHAAPLPEAADGTRLDDQPKADVLEAHEAEAEEPEAGKSEAEDDEDEVDDLPSSRRPWRGPISRKASQTSVYLQEWDIPFEQVELGEPIGQGRWGRVHRGRWHGEVAIRLLEMDGHNQDHLKLFKKEVMNYRQTRHENVVLFMGACMNPPHLAIITSFCKGRTLHSFVRDPKTSLDINKTRQIAQEIIKGMGYLHAKGIVHKDLKSKNVFYDNGKVVITDFGLFGISGVVREGRRENQLKLSHDWLCYLAPEIVREMTPGKDEDQLPFSKAADVYAFGTVWYELQARDWPLKNQAAEASIWQIGSGEGMKRVLTSVSLGKEVSEILSACWAFDLQERPSFSLLMDMLEKLPKLNRRLSHPGHFWKSAEL

SEQ ID NO: 16228 - protein, 866 aa, Artificial Sequence
  Synthetic polypeptide
MGERVLDRTRRPSWHCLLLCAKLVRYICKQRQCKLSVAPGERTPELNSYPRFSDWLYTFNVRPEVVQEIPRDLTLDALLEMNEAKVKETLRRCGASGDECGRLQYALTCLRKVTGLGGEHKEDSSWSSLDARRESGSGPSTDTLSAASLPWPPGSSQLGRAGNSAQGPRSISVSALPASDSPTPSFSEGLSDTCIPLHASGRLTPRALHSFITPPTTPQLRRHTKLKPPRTPPPPSRKVFQLLPSFPTLTRSKSHESQLGNRIDDVSSMRFDLSHGSPQMVRRDIGLSVTHRFSTKSWLSQVCHVCQKSMIFGVKCKHCRLKCHNKCTKEAPACRISFLPLTRLRRTESVPSDINNPVDRAAEPHFGTLPKALTKKEHPPAMNHLDSSSNPSSTTSSTPSSPAPFPTSSNPSSATTPPNPSPGQRDSRFNFPAAYFIHHRQQFIFPVPSAGHCWKCLLIAESLKENAFNISAFAHAAPLPEAADGTRLDDQPKADVLEAHEAEAEEPEAGKSEAEDDEDEVDDLPSSRRPWRGPISRKASQTSVYLQEWDIPFEQVELGEPIGQGRWGRVHRGRWHGEVAIRLLEMDGHNQDHLKLFKKEVMNYRQTRHENVVLFMGACMNPPHLAIITSFCKGRTLHSFVRDPKTSLDINKTRQIAQEIIKGMGYLHAKGIVHKDLKSKNVFYDNGKVVITDFGLFGISGVVREGRRENQLKLSHDWLCYLAPEIVREMTPGKDEDQLPFSKAADVYAFGTVWYELQARDWPLKNQAAEASIWQIGSGEGMKRVLTSVSLGKEVSEILSACWAFDLQERPSFSLLMDMLEKLPKLNRRLSHPGHFWKSADINSSKVVPRFERFGLGVLESSNPKM
